United States Patent Application Publication US 2018/0126003 A1 - sequence listing, part 137

SEQ ID NO: 239465 - DNA, 4365 bp, Artificial Sequence
  derived and/or modified sequence
atgtgggctcagcttcttttgggaatgcttgctctctcccctgccatcgccgaagagctgccaaattacctggttacacttcctgctaggctgaacttcccaagcgtgcagaaagtgtgtctcgacctttcccccggatacagcgacgtcaaattcactgttaccctcgaaaccaaggacaaaactcaaaagctgctagagtatagtgggctcaaaaagcgccatcttcattgcatttccttcctggtgcccccaccagcgggaggaaccgaggaagtagccacaatacgcgtttccggcgtgggcaacaatatctcttttgaagaaaagaagaaagtactaattcaacgccagggaaatggcacctttgtgcaaactgacaaacccctctacacccctggtcaacaggtctactttaggattgtaacaatggacagcaactttgtccctgtgaatgacaagtattctatggttgagttacaggaccctaatagcaatagaatcgcgcaatggctcgaggttgtgccagagcagggaattgtcgatctctcctttcagctcgcccctgaggcaatgttagggacttatacagtggctgtggccgaaggcaaaacatttggaacattctcggtggaagagtatgtcctgcccaagtttaaggtagaggtcgtggaacccaaggagctctccaccgtgcaagagtccttcttggtaaaaatctgctgtaggtacacctacggcaaacctatgctcggggcagttcaagtcagcgtgtgtcaaaaagctaatacctattggtaccgagaggttgagcgggaacagttgccagataagtgccggaacctgagtggtcagactgacaagactggctgtttttccgccccagtcgatatggccaccttcgacttgattggctacgcctacagtcatcagattaatatcgtggccaccgtcgtagaagagggaaccggagtcgaagccaacgccacccagaacatctacatttctccacagatggggagcatgacatttgaggacactagcaacttctaccatccaaattttcctttcagtggcaaaatcagggtgcgtgggcacgacgactcattcctcaagaatcatctggtgttcttagtgatttatgggactaacgggacgtttaatcagactcttgtaactgataacaacggcctggcaccgtttaccctggagacctcggggtggaatgggactgacgtctccctggaggggaagtttcagatggaagaccttgtgtataatcccgaacaggtccccagatactatcagaacgcatatctccacctgcggcctttttattcgacgacacgaagtttccttgggatccaccggttaaacggcccactcaaatgcggacagcctcaggaggtccttgtggattactatatagatcccgctgatgctagtccagaccaagaaatctccttttcttattaccttataggcaagggttccctggttatggaggggcagaagcatctgaatagcaaaaaaaaggggctgaaggccagcttttctctgtcattaactttcaccagccgcctcgcacccgatccaagtctagtgatttatgcgatctttccgtctggcggtgttgtggctgataaaatccagttcagtgtggagatgtgctttgataatcaggtcagccttggcttcagtccgagccagcagctccctggggctgaggtggaactgcagctgcaggcagcgccaggtagcctttgtgccttgagagccgtagatgaatcagtgctgctgctgagacctgacagggagttgtcaaacaggagcgtctacggcatgtttcctttttggtacggacactacccttaccaggttgcggagtacgatcagtgtcctgtgtcagggccatgggactttccgcaaccactgattgatcccatgccccaagggcattcaagccaaagaagcattatctggaggccctcattcagcgaaggaaccgacctctttagcttcttccgtgatgtagggcttaagatcctgtcaaacgccaaaatcaaaaaacctgtggactgttctcacagatcacccgagtatagcaccgccatgggcgcagggggtggccatcccgaggcttttgagtcttcgacccctcttcatcaggcagaggattctcaagtcaggcaatattttcccgaaacatggctctgggacttgttcccgataggaaattctggaaaagaagcagtgcacgtcacagtgccagacgcgattactgagtggaaagctatgagcttctgtacctcccaaagcagaggctttggtctcagccccacggtaggtctcactgccttcaagccattcttcgttgacctgactctaccttactccgtggtgagaggggaatcattcaggttaacagctactatttttaattatctcaaggattgcattcgcgtgcaaacagatctcgcgaaatcgcacgagtatcaattggaaagctgggccgactcccagacgtcaagctgtctgtgtgccgatgacgccaagacacaccactggaatataaccgcagtaaaattggggcacatcaatttcacaatatcaaccaaaatcttggattccaacgagccatgtggaggccagaaaggttttgttccacaaaaggggagatcggatacactgataaaaccagtgctagtgaagccagagggggtgctggtcgagaagacacattcctccctactgtgccccaagggcaaggtggcaagcgagagcgtgtccctggaattgcctgttgatatcgtaccggatagcactaaagcttacgttactgtgctcggggacatcatgggcacagcgctacagaacctcgacgggcttgtacagatgccatccggatgtggagagcaaaatatggttcttttcgcgccaataatatacgttttgcagtacttggagaaggccggtctgttaacagaggagatccgctcgagagccgtgggatttctagagatcggatatcagaaagagttaatgtataagcactccaatgggtcgtattccgccttcggggaaagagatggaaatggtaatacgtggctgaccgctttcgtcaccaagtgttttgggcaggcccagaagtttatcttcatagatccgaaaaatattcaggatgcactgaagtggatggccggtaaccagctgcccagcggctgctacgccaatgtcggtaacttactacacactgccatgaaggggggagtagacgacgaagttagcctgactgcctacgtgaccgctgcacttttggagatgggaaaagacgtagacgatcccatggtcagccagggacttaggtgtctgaaaaattccgccacctcaaccacgaatctatatacacaggccctattagcctatatttttagcctggccggagagatggacattagaaacatcctgctgaagcagctggatcagcaggccattatctccggcgaatctatctactggtcacagaagcccacacccagttcaaacgcgtccccatggtccgagccagctgctgtagatgtcgagttgaccgcctatgctctgctcgcacagcttaccaaaccctccctaacacagaaagagatcgcgaaggcaacatctatagtggcatggcttgctaagcaacacaacgcctacggagggttttccagtacccaggacaccgtggttgctctgcaggccctggcaaagtatgcaacaaccgcttacatgccaagcgaggaaattaatctagtcgtcaagagtaccgagaattttcagcgcacgttcaacattcagagcgtcaacagactggtgttccagcaggacacactgccaaatgttccaggcatgtatacgctcgaagcctcagggcaggggtgcgtgtatgtgcaaaccgtgttgaggtacaatattcttcccccaaccaatatgaaaacgttcagccttagcgtagagattggcaaagcacggtgtgagcaacccacatctcctcgttccttaacccttactatccacactagttacgtgggctctcgctcgtcctccaacatggccatagtggaagtgaaaatgctcagcggcttctctccaatggaggggactaatcaactgcttttacaacaacctttggtcaagaaggtcgagtttggaaccgacacacttaacatctacctcgatgagctgataaaaaacactcagacatatacatttacaatcagtcagtccgtgctggtgaccaatctaaaaccagctaccattaaggtgtatgactactatttaccagacgagcaggcaaccatacagtactccgacccgtgtgagtag

SEQ ID NO: 239466 - DNA, 4365 bp, Artificial Sequence
  derived and/or modified sequence
atgtgggctcagctgctcctggggatgcttgctctgagtcctgctattgctgaggaattgccaaactatctggtcaccttgccagcgaggctcaactttccttcagtgcagaaggtctgcctggatctgagtccagggtattcagatgtgaagtttactgtcacgctcgagacaaaggacaagacccagaagttactggaatactcaggcctgaagaaaaggcacctgcactgtatcagttttctcgtcccacctccagctggtggaaccgaggaagtggcaactattcgcgtgtccggtgtgggaaacaatatcagctttgaggagaagaaaaaagtgctgatccagcggcagggtaacgggacattcgtccagaccgataaacccctctataccccaggccaacaggtctatttccgaattgttacgatggattccaacttcgtcccagtgaatgataaagtatcatgggaggaaggccaggaccccaactctaaccggattgctcagtggctcgaggtggttcccgaacagggaatcgtcgatttgtctttccagctggctcccgaagctatgctgggtacttatacggttgccgtggccgagggcaagacctttggaactttcagcgtggaagaatatgtgctccctaagttcaaggtggaggtcgtcgagccaaaggaattaagtacagtgcaggaatccttcctcgtgaagatctgttgcagatacacatacggcaaacccatgttaggagctgtgcaggtttccgtgtgccagaaagccaacacctattggtatagggaggtggaacgtgagcagcttcccgataagtgtcggaatttaagcggccagactgataagactggttgttttagtgcgccagtagatatggccactttcgacttgattggatacgcctatagccatcagattaacattgtggctacagtcgttgaggagggcaccggggttgaagccaacgctacacagaacatttacatcagccctcagatgggtagtatgacttttgaagatacatctaatttctatcatccaaacttcccattctccgggaagattcgggttagaggccacgacgactctttcttaaagaaccatctggtcttcctggtcatctatgggacaaatgggacattcaaccagaccctggtaacagataataacggccttgccccttttaccctcgagacttcggggtggaatggtaccgatgtgagtttggagggaaaatttcagatggaggatctggtgtataatcccgaacaggtgcccaggtactaccagaacgcctatctgcatcttaggccgttttattctacaacacgcagtttcctgggtatccaccgcctgaatggaccgttgaaatgcggacagccacaggaggtgctcgtggattattatatcgatccagccgatgcaagcccggatcaagaaatttcttttagttactacttaatcgggaaggggagtttggtgatggaggggcagaaacacctgaattctaagaaaaaggggttaaaagcaagcttctcattatctctcacattcacctcaaggctcgcaccggacccttcattagtgatctacgcaatcttcccaagtggaggggtggttgcagacaagattcaattcagcgttgagatgtgcttcgacaaccaagtatcgctaggttttagccccagccagcagctccccggagctgaggttgagcttcagttacaagcagctccaggcagcctgtgcgccttgcgggcagtggacgaaagcgttctgctcctgcggcctgatagggaactctccaatcgcagcgtctacggcatgttccccttttggtacggacattacccttaccaggttgccgaatacgatcaatgtcccgtcagcgggccatgggattttcctcagccgcttatcgatcccatgccccagggacatagcagccaacggtcaattatttggagacccagcttcagcgaggggaccgacctgttcagcttttttcgagacgtcggccttaagattctttctaatgcgaagatcaaaaagcccgtggattgcagccacaggagccccgaatactcaaccgccatgggggcaggaggcggtcaccccgaagccttcgagtctagtacccccctccaccaggctgaggactcccaggttagacaatacttcccggaaacatggctttgggacctgttcccaattggaaactctgggaaggaagccgtgcacgtcacagtaccagatgcgattactgagtggaaagcgatgtcgttttgcacaagccaatcccgaggattcggactgtcccccacggtcggccttacagcattcaagccgtttttcgtggacctaacactgccttactccgttgtgagaggcgaaagttttaggcttactgccacaatcttcaattatctgaaggactgcatcagagtccagactgaccttgcaaagagtcacgaataccagcttgagagttgggcagattcccagactagtagctgtctctgtgccgacgacgctaagacacatcactggaatatcaccgccgtaaaattagggcacataaattttacaatctcaaccaagattctcgactccaacgagccatgcggcggacaaaagggtttcgttccccagaaagggcgttctgacactctgatcaagccagtgctggtcaagccagaaggtgtcctggtggaaaaaacacacagttccctcctttgccccaagggcaaagtcgcatcagagtccgtgtctttggaacttcccgtcgatattgtcccggatagtacaaaggcttacgtgactgtactcggggacattatgggcacagcactgcagaatctggatggactcgtccaaatgccaagcggatgcggagaacagaacatggtactcttcgccccaatcatctacgtgctgcagtacctcgaaaaagccggattgttgacagaggaaataagatcaagagcagtcgggttcctggaaatcggataccagaaagaactgatgtacaaacactcaaatggatcttactcagcttttggagaacgggatggaaacggcaatacgtggttgacggcattcgttaccaagtgctttggtcaggctcagaaatttattttcatcgacccaaagaatatccaggacgcccttaagtggatggctggcaatcaactgccctccggatgttacgccaatgtcggaaatctgttacacacggcaatgaaaggtggcgtagacgacgaggtttctctcaccgcatatgtgacagccgcactgctcgagatgggtaaagatgttgatgatcccatggtgagccaaggcctgcggtgtctgaagaactccgccacttccacgacaaatctgtatacgcaggccttactggcatacatcttcagtcttgccggtgaaatggacatcagaaacatactgctgaaacagctggaccaacaggctataatctctggtgagagcatatattggagccaaaagcccactccaagcagcaatgcttctccgtggagtgaacccgcagccgtagacgtggagctgaccgcttacgcactcctcgcgcaactgactaaaccttccctgacacaaaaagagatcgccaaagccacttccattgtcgcttggctcgcaaagcagcacaacgcttatggcggttttagctcaactcaagataccgtggtcgccttacaagctcttgctaagtatgccacaactgcttacatgcctagcgaggagatcaatctggtggtgaaaagtaccgaaaacttccagcgaacattcaacatccagtctgtgaaccgcctcgtcttccagcaggacaccttgcctaatgtgcctgggatgtacactctagaggcaagcggccaggggtgcgtgtacgttcaaactgttctgaggtacaatattctgccacccactaacatgaagacttttagcttatctgtcgagatcgggaaagccaggtgcgagcagccgacctcacctcgttccctcaccctgaccatacatacctcttacgtcgggagccgcagctctagcaatatggccatcgtggaggtaaaaatgctgtccggtttctcaccaatggaagggacaaaccagctactactccaacaaccactggttaaaaaggtagaattcggcaccgacactctgaacatctatctcgacgagctgataaaaaacacccaaacctacaccttcaccatctcacagtccgtgcttgtgacaaacttaaagcctgccacgatcaaggtctatgactactatctgcccgatgagcaggcaacaatacagtactctgacccctgtgagtag

SEQ ID NO: 239467 - DNA, 3015 bp, Artificial Sequence
  derived and/or modified sequence
tctttcctcggaattcataggttgaacgggccacttaaatgcggccagccccaagaagtgctcgtcgactactacatcgatcctgcggacgcctctcctgaccaggagatcagtttttcatactacttgatcgggaaaggaagcctggtgatggaaggacagaagcatttgaattccaagaagaaaggccttaaggccagcttctccctctctttgacctttacctcccgcctcgcgccagacccttcccttgtgatttatgcgatttttcctagtggaggtgttgtcgcggataaaatccagttctccgtggagatgtgctttgataaccaagtgtcactgggattctctccttcccagcagttgcccggagccgaggtggaactccaactacaggcggcaccaggcagcctgtgtgctcttagggcagtcgacgagtctgtccttttactacgcccagatcgtgaactgtcaaaccgctctgtgtacgggatgttcccgttttggtacggccattacccttatcaggtggcggagtacgatcagtgtcccgtgagtgggccttgggactttcctcaacccctgatcgaccctatgccccaaggccattcatcacagagatcaatcatttggaggccctccttctctgagggtaccgacctcttcagtttcttccgagatgtggggttgaaaatcttatccaacgccaagatcaagaagccagttgactgtagccaccgctcccctgaatattccaccgctatgggcgcaggcggaggtcatccggaagccttcgagtccagtacacccttgcatcaagccgaagactctcaggtgcgtcagtatttccccgagacatggttatgggacctgtttccgataggcaattcgggtaaagaagctgtacatgtcacagttccagacgcgatcacggagtggaaggcgatgtcgttctgtacctctcagtcgagggggtttggactgagtcctacagttgggcttaccgcattcaaacccttttttgtggatctgaccctgccatattctgtggtgagaggcgagagcttccgtctgacagctacaatattcaactatcttaaagactgtattagagtccagactgaccttgctaagagccacgaataccagctagagtcctgggcggacagtcagacaagtagctgcctttgcgctgacgacgccaaaacacaccattggaatatcacagctgtgaagctcgggcatatcaactttacaatctcaacgaaaattctggattccaacgaaccctgcggagggcagaagggttttgtgcctcagaaaggcagaagcgataccctgataaagcctgtcctggtgaaacccgagggcgtcctggtcgagaaaactcattcctcactcctgtgcccaaaaggcaaagtagcttccgaatccgtgagccttgaactgccagtggacatcgtgccagacagcaccaaggcctatgtcacagtgctgggcgacattatgggaacagcacttcagaacttggacggcctcgtccaaatgcctagtgggtgtggggagcagaacatggtgcttttcgctcctattatctatgtcttgcaatacctggagaaggccggtctgctgaccgaagagatcagaagtagagccgtgggatttctggaaattggatatcagaaggaactgatgtacaaacacagcaacgggtcttactcagcattcggagaacgggacgggaacggcaacacctggttgactgcctttgtgacgaaatgtttcggacaggcccagaagtttatcttcatcgacccaaagaacatccaggacgcgctcaaatggatggctggtaatcagttgcctagtggatgctacgccaatgtgggtaatctgctccacacggccatgaaagggggtgtcgacgacgaggtgtccctgactgcctacgttactgccgcacttctggagatgggaaaggatgtggatgatcccatggtaagtcaggggctgcgttgcctaaaaaacagcgccactagcacaacgaatctttacacccaggccctgctggcttacatcttctcactagccggtgaaatggatattcgtaatatactgctgaaacagctggaccagcaggctataatcagcggcgagtcaatctactggagccaaaagcccaccccgagctccaatgcctcaccatggtccgagcctgctgccgttgacgtggagttaacagcctatgctctattagctcaactaacgaagccttcccttacccagaaggagattgctaaggcgacaagtattgtggcatggttggcaaaacagcacaacgcctatggaggctttagttctacccaagacactgtcgtggccctgcaggcacttgctaagtatgctacaaccgcatacatgcctagtgaggaaatcaatctggtggttaaatcgactgaaaattttcagcgcacctttaacatccagagcgtaaatcggctagtgtttcagcaggatacactgcccaatgtgcccggtatgtacaccttagaagcttccgggcagggatgcgtgtacgtgcagacagtcctaagatataacatactgccaccgaccaatatgaaaaccttcagtctttctgttgagataggtaaggccaggtgtgaacagcccacctccccgaggagcttaaccctcacaatccataccagctacgtgggatctaggagcagttctaatatggccattgtggaggtcaagatgctatctggcttttcccctatggagggcacaaatcaactgctcttacagcagccacttgtgaagaaggtggagttcgggactgacactcttaatatctacctggatgagctaatcaagaatacgcaaacttatacgtttaccatatcacaaagcgtcctggtcaccaacctgaagccggctactattaaagtttacgattattacctcccggacgagcaggctacgatacaatattctgacccatgtgagtag

SEQ ID NO: 239468 - DNA, 4365 bp, Artificial Sequence
  derived and/or modified sequence
atgtgggcccagctgctgctgggcatgctggccctgagccccgccatcgccgaggagctgcccaactacctggtgaccctgcccgccagactgaacttccccagcgtgcagaaggtgtgcctggacctgagccccggctacagcgacgtgaagttcaccgtgaccctggagaccaaggacaagacccagaagctgctggagtacagcggcctgaagaagagacacctgcactgcatcagcttcctggtgcccccccccgccggcggcaccgaggaggtggccaccatcagagtgagcggcgtgggcaacaacatcagcttcgaggagaagaagaaggtgctgatccagagacagggcaacggcaccttcgtgcagaccgacaagcccctgtacacccccggccagcaggtgtacttcagaatcgtgaccatggacagcaacttcgtgcccgtgaacgacaagtacagcatggtggagctgcaggaccccaacagcaacagaatcgcccagtggctggaggtggtgcccgagcagggcatcgtggacctgagcttccagctggcccccgaggccatgctgggcacctacaccgtggccgtggccgagggcaagaccttcggcaccttcagcgtggaggagtacgtgctgcccaagttcaaggtggaggtggtggagcccaaggagctgagcaccgtgcaggagagcttcctggtgaagatctgctgcagatacacctacggcaagcccatgctgggcgccgtgcaggtgagcgtgtgccagaaggccaacacctactggtacagagaggtggagagagagcagctgcccgacaagtgcagaaacctgagcggccagaccgacaagaccggctgcttcagcgcccccgtggacatggccaccttcgacctgatcggctacgcctacagccaccagatcaacatcgtggccaccgtggtggaggagggcaccggcgtggaggccaacgccacccagaacatctacatcagcccccagatgggcagcatgaccttcgaggacaccagcaacttctaccaccccaacttccccttcagcggcaagatcagagtgagaggccacgacgacagcttcctgaagaaccacctggtgttcctggtgatctacggcaccaacggcaccttcaaccagaccctggtgaccgacaacaacggcctggcccccttcaccctggagaccagcggctggaacggcaccgacgtgagcctggagggcaagttccagatggaggacctggtgtacaaccccgagcaggtgcccagatactaccagaacgcctacctgcacctgagacccttctacagcaccaccagaagcttcctgggcatccacagactgaacggccccctgaagtgcggccagccccaggaggtgctggtggactactacatcgaccccgccgacgccagccccgaccaggagatcagcttcagctactacctgatcggcaagggcagcctggtgatggagggccagaagcacctgaacagcaagaagaagggcctgaaggccagcttcagcctgagcctgaccttcaccagcagactggcccccgaccccagcctggtgatctacgccatcttccccagcggcggcgtggtggccgacaagatccagttcagcgtggagatgtgcttcgacaaccaggtgagcctgggcttcagccccagccagcagctgcccggcgccgaggtggagctgcagctgcaggccgcccccggcagcctgtgcgccctgagagccgtggacgagagcgtgctgctgctgagacccgacagagagctgagcaacagaagcgtgtacggcatgttccccttctggtacggccactacccctaccaggtggccgagtacgaccagtgccccgtgagcggcccctgggacttcccccagcccctgatcgaccccatgccccagggccacagcagccagagaagcatcatctggagacccagcttcagcgagggcaccgacctgttcagcttcttcagagacgtgggcctgaagatcctgagcaacgccaagatcaagaagcccgtggactgcagccacagaagccccgagtacagcaccgccatgggcgccggcggcggccaccccgaggccttcgagagcagcacccccctgcaccaggccgaggacagccaggtgagacagtacttccccgagacctggctgtgggacctgttccccatcggcaacagcggcaaggaggccgtgcacgtgaccgtgcccgacgccatcaccgagtggaaggccatgagcttctgcaccagccagagcagaggcttcggcctgagccccaccgtgggcctgaccgccttcaagcccttcttcgtggacctgaccctgccctacagcgtggtgagaggcgagagcttcagactgaccgccaccatcttcaactacctgaaggactgcatcagagtgcagaccgacctggccaagagccacgagtaccagctggagagctgggccgacagccagaccagcagctgcctgtgcgccgacgacgccaagacccaccactggaacatcaccgccgtgaagctgggccacatcaacttcaccatcagcaccaagatcctggacagcaacgagccctgcggcggccagaagggcttcgtgccccagaagggcagaagcgacaccctgatcaagcccgtgctggtgaagcccgagggcgtgctggtggagaagacccacagcagcctgctgtgccccaagggcaaggtggccagcgagagcgtgagcctggagctgcccgtggacatcgtgcccgacagcaccaaggcctacgtgaccgtgctgggcgacatcatgggcaccgccctgcagaacctggacggcctggtgcagatgcccagcggctgcggcgagcagaacatggtgctgttcgcccccatcatctacgtgctgcagtacctggagaaggccggcctgctgaccgaggagatcagaagcagagccgtgggcttcctggagatcggctaccagaaggagctgatgtacaagcacagcaacggcagctacagcgccttcggcgagagagacggcaacggcaacacctggctgaccgccttcgtgaccaagtgcttcggccaggcccagaagttcatcttcatcgaccccaagaacatccaggacgccctgaagtggatggccggcaaccagctgcccagcggctgctacgccaacgtgggcaacctgctgcacaccgccatgaagggcggcgtggacgacgaggtgagcctgaccgcctacgtgaccgccgccctgctggagatgggcaaggacgtggacgaccccatggtgagccagggcctgagatgcctgaagaacagcgccaccagcaccaccaacctgtacacccaggccctgctggcctacatcttcagcctggccggcgagatggacatcagaaacatcctgctgaagcagctggaccagcaggccatcatcagcggcgagagcatctactggagccagaagcccacccccagcagcaacgccagcccctggagcgagcccgccgccgtggacgtggagctgaccgcctacgccctgctggcccagctgaccaagcccagcctgacccagaaggagatcgccaaggccaccagcatcgtggcctggctggccaagcagcacaacgcctacggcggcttcagcagcacccaggacaccgtggtggccctgcaggccctggccaagtacgccaccaccgcctacatgcccagcgaggagatcaacctggtggtgaagagcaccgagaacttccagagaaccttcaacatccagagcgtgaacagactggtgttccagcaggacaccctgcccaacgtgcccggcatgtacaccctggaggccagcggccagggctgcgtgtacgtgcagaccgtgctgagatacaacatcctgccccccaccaacatgaagaccttcagcctgagcgtggagatcggcaaggccagatgcgagcagcccaccagccccagaagcctgaccctgaccatccacaccagctacgtgggcagcagaagcagcagcaacatggccatcgtggaggtgaagatgctgagcggcttcagccccatggagggcaccaaccagctgctgctgcagcagcccctggtgaagaaggtggagttcggcaccgacaccctgaacatctacctggacgagctgatcaagaacacccagacctacaccttcaccatcagccagagcgtgctggtgaccaacctgaagcccgccaccatcaaggtgtacgactactacctgcccgacgagcaggccaccatccagtacagcgacccctgcgagtag

SEQ ID NO: 239469 - DNA, 4365 bp, Artificial Sequence
  derived and/or modified sequence
atgtgggcccagctgctgctgggcatgctggccctgagccccgccatcgccgaggagctgcccaactacctggtgaccctgcccgccagactgaacttccccagcgtgcagaaggtgtgcctggacctgagccccggctacagcgacgtgaagttcaccgtgaccctggagaccaaggacaagacccagaagctgctggagtacagcggcctgaagaagagacacctgcactgcatcagcttcctggtgcccccccccgccggcggcaccgaggaggtggccaccatcagagtgagcggcgtgggcaacaacatcagcttcgaggagaagaagaaggtgctgatccagagacagggcaacggcaccttcgtgcagaccgacaagcccctgtacacccccggccagcaggtgtacttcagaatcgtgaccatggacagcaacttcgtgcccgtgaacgacaaggtgagctgggaggagggccaggaccccaacagcaacagaatcgcccagtggctggaggtggtgcccgagcagggcatcgtggacctgagcttccagctggcccccgaggccatgctgggcacctacaccgtggccgtggccgagggcaagaccttcggcaccttcagcgtggaggagtacgtgctgcccaagttcaaggtggaggtggtggagcccaaggagctgagcaccgtgcaggagagcttcctggtgaagatctgctgcagatacacctacggcaagcccatgctgggcgccgtgcaggtgagcgtgtgccagaaggccaacacctactggtacagagaggtggagagagagcagctgcccgacaagtgcagaaacctgagcggccagaccgacaagaccggctgcttcagcgcccccgtggacatggccaccttcgacctgatcggctacgcctacagccaccagatcaacatcgtggccaccgtggtggaggagggcaccggcgtggaggccaacgccacccagaacatctacatcagcccccagatgggcagcatgaccttcgaggacaccagcaacttctaccaccccaacttccccttcagcggcaagatcagagtgagaggccacgacgacagcttcctgaagaaccacctggtgttcctggtgatctacggcaccaacggcaccttcaaccagaccctggtgaccgacaacaacggcctggcccccttcaccctggagaccagcggctggaacggcaccgacgtgagcctggagggcaagttccagatggaggacctggtgtacaaccccgagcaggtgcccagatactaccagaacgcctacctgcacctgagacccttctacagcaccaccagaagcttcctgggcatccacagactgaacggccccctgaagtgcggccagccccaggaggtgctggtggactactacatcgaccccgccgacgccagccccgaccaggagatcagcttcagctactacctgatcggcaagggcagcctggtgatggagggccagaagcacctgaacagcaagaagaagggcctgaaggccagcttcagcctgagcctgaccttcaccagcagactggcccccgaccccagcctggtgatctacgccatcttccccagcggcggcgtggtggccgacaagatccagttcagcgtggagatgtgcttcgacaaccaggtgagcctgggcttcagccccagccagcagctgcccggcgccgaggtggagctgcagctgcaggccgcccccggcagcctgtgcgccctgagagccgtggacgagagcgtgctgctgctgagacccgacagagagctgagcaacagaagcgtgtacggcatgttccccttctggtacggccactacccctaccaggtggccgagtacgaccagtgccccgtgagcggcccctgggacttcccccagcccctgatcgaccccatgccccagggccacagcagccagagaagcatcatctggagacccagcttcagcgagggcaccgacctgttcagcttcttcagagacgtgggcctgaagatcctgagcaacgccaagatcaagaagcccgtggactgcagccacagaagccccgagtacagcaccgccatgggcgccggcggcggccaccccgaggccttcgagagcagcacccccctgcaccaggccgaggacagccaggtgagacagtacttccccgagacctggctgtgggacctgttccccatcggcaacagcggcaaggaggccgtgcacgtgaccgtgcccgacgccatcaccgagtggaaggccatgagcttctgcaccagccagagcagaggcttcggcctgagccccaccgtgggcctgaccgccttcaagcccttcttcgtggacctgaccctgccctacagcgtggtgagaggcgagagcttcagactgaccgccaccatcttcaactacctgaaggactgcatcagagtgcagaccgacctggccaagagccacgagtaccagctggagagctgggccgacagccagaccagcagctgcctgtgcgccgacgacgccaagacccaccactggaacatcaccgccgtgaagctgggccacatcaacttcaccatcagcaccaagatcctggacagcaacgagccctgcggcggccagaagggcttcgtgccccagaagggcagaagcgacaccctgatcaagcccgtgctggtgaagcccgagggcgtgctggtggagaagacccacagcagcctgctgtgccccaagggcaaggtggccagcgagagcgtgagcctggagctgcccgtggacatcgtgcccgacagcaccaaggcctacgtgaccgtgctgggcgacatcatgggcaccgccctgcagaacctggacggcctggtgcagatgcccagcggctgcggcgagcagaacatggtgctgttcgcccccatcatctacgtgctgcagtacctggagaaggccggcctgctgaccgaggagatcagaagcagagccgtgggcttcctggagatcggctaccagaaggagctgatgtacaagcacagcaacggcagctacagcgccttcggcgagagagacggcaacggcaacacctggctgaccgccttcgtgaccaagtgcttcggccaggcccagaagttcatcttcatcgaccccaagaacatccaggacgccctgaagtggatggccggcaaccagctgcccagcggctgctacgccaacgtgggcaacctgctgcacaccgccatgaagggcggcgtggacgacgaggtgagcctgaccgcctacgtgaccgccgccctgctggagatgggcaaggacgtggacgaccccatggtgagccagggcctgagatgcctgaagaacagcgccaccagcaccaccaacctgtacacccaggccctgctggcctacatcttcagcctggccggcgagatggacatcagaaacatcctgctgaagcagctggaccagcaggccatcatcagcggcgagagcatctactggagccagaagcccacccccagcagcaacgccagcccctggagcgagcccgccgccgtggacgtggagctgaccgcctacgccctgctggcccagctgaccaagcccagcctgacccagaaggagatcgccaaggccaccagcatcgtggcctggctggccaagcagcacaacgcctacggcggcttcagcagcacccaggacaccgtggtggccctgcaggccctggccaagtacgccaccaccgcctacatgcccagcgaggagatcaacctggtggtgaagagcaccgagaacttccagagaaccttcaacatccagagcgtgaacagactggtgttccagcaggacaccctgcccaacgtgcccggcatgtacaccctggaggccagcggccagggctgcgtgtacgtgcagaccgtgctgagatacaacatcctgccccccaccaacatgaagaccttcagcctgagcgtggagatcggcaaggccagatgcgagcagcccaccagccccagaagcctgaccctgaccatccacaccagctacgtgggcagcagaagcagcagcaacatggccatcgtggaggtgaagatgctgagcggcttcagccccatggagggcaccaaccagctgctgctgcagcagcccctggtgaagaaggtggagttcggcaccgacaccctgaacatctacctggacgagctgatcaagaacacccagacctacaccttcaccatcagccagagcgtgctggtgaccaacctgaagcccgccaccatcaaggtgtacgactactacctgcccgacgagcaggccaccatccagtacagcgacccctgcgagtag

SEQ ID NO: 239470 - DNA, 3015 bp, Artificial Sequence
  derived and/or modified sequence
agcttcctgggcatccacagactgaacggccccctgaagtgcggccagccccaggaggtgctggtggactactacatcgaccccgccgacgccagccccgaccaggagatcagcttcagctactacctgatcggcaagggcagcctggtgatggagggccagaagcacctgaacagcaagaagaagggcctgaaggccagcttcagcctgagcctgaccttcaccagcagactggcccccgaccccagcctggtgatctacgccatcttccccagcggcggcgtggtggccgacaagatccagttcagcgtggagatgtgcttcgacaaccaggtgagcctgggcttcagccccagccagcagctgcccggcgccgaggtggagctgcagctgcaggccgcccccggcagcctgtgcgccctgagagccgtggacgagagcgtgctgctgctgagacccgacagagagctgagcaacagaagcgtgtacggcatgttccccttctggtacggccactacccctaccaggtggccgagtacgaccagtgccccgtgagcggcccctgggacttcccccagcccctgatcgaccccatgccccagggccacagcagccagagaagcatcatctggagacccagcttcagcgagggcaccgacctgttcagcttcttcagagacgtgggcctgaagatcctgagcaacgccaagatcaagaagcccgtggactgcagccacagaagccccgagtacagcaccgccatgggcgccggcggcggccaccccgaggccttcgagagcagcacccccctgcaccaggccgaggacagccaggtgagacagtacttccccgagacctggctgtgggacctgttccccatcggcaacagcggcaaggaggccgtgcacgtgaccgtgcccgacgccatcaccgagtggaaggccatgagcttctgcaccagccagagcagaggcttcggcctgagccccaccgtgggcctgaccgccttcaagcccttcttcgtggacctgaccctgccctacagcgtggtgagaggcgagagcttcagactgaccgccaccatcttcaactacctgaaggactgcatcagagtgcagaccgacctggccaagagccacgagtaccagctggagagctgggccgacagccagaccagcagctgcctgtgcgccgacgacgccaagacccaccactggaacatcaccgccgtgaagctgggccacatcaacttcaccatcagcaccaagatcctggacagcaacgagccctgcggcggccagaagggcttcgtgccccagaagggcagaagcgacaccctgatcaagcccgtgctggtgaagcccgagggcgtgctggtggagaagacccacagcagcctgctgtgccccaagggcaaggtggccagcgagagcgtgagcctggagctgcccgtggacatcgtgcccgacagcaccaaggcctacgtgaccgtgctgggcgacatcatgggcaccgccctgcagaacctggacggcctggtgcagatgcccagcggctgcggcgagcagaacatggtgctgttcgcccccatcatctacgtgctgcagtacctggagaaggccggcctgctgaccgaggagatcagaagcagagccgtgggcttcctggagatcggctaccagaaggagctgatgtacaagcacagcaacggcagctacagcgccttcggcgagagagacggcaacggcaacacctggctgaccgccttcgtgaccaagtgcttcggccaggcccagaagttcatcttcatcgaccccaagaacatccaggacgccctgaagtggatggccggcaaccagctgcccagcggctgctacgccaacgtgggcaacctgctgcacaccgccatgaagggcggcgtggacgacgaggtgagcctgaccgcctacgtgaccgccgccctgctggagatgggcaaggacgtggacgaccccatggtgagccagggcctgagatgcctgaagaacagcgccaccagcaccaccaacctgtacacccaggccctgctggcctacatcttcagcctggccggcgagatggacatcagaaacatcctgctgaagcagctggaccagcaggccatcatcagcggcgagagcatctactggagccagaagcccacccccagcagcaacgccagcccctggagcgagcccgccgccgtggacgtggagctgaccgcctacgccctgctggcccagctgaccaagcccagcctgacccagaaggagatcgccaaggccaccagcatcgtggcctggctggccaagcagcacaacgcctacggcggcttcagcagcacccaggacaccgtggtggccctgcaggccctggccaagtacgccaccaccgcctacatgcccagcgaggagatcaacctggtggtgaagagcaccgagaacttccagagaaccttcaacatccagagcgtgaacagactggtgttccagcaggacaccctgcccaacgtgcccggcatgtacaccctggaggccagcggccagggctgcgtgtacgtgcagaccgtgctgagatacaacatcctgccccccaccaacatgaagaccttcagcctgagcgtggagatcggcaaggccagatgcgagcagcccaccagccccagaagcctgaccctgaccatccacaccagctacgtgggcagcagaagcagcagcaacatggccatcgtggaggtgaagatgctgagcggcttcagccccatggagggcaccaaccagctgctgctgcagcagcccctggtgaagaaggtggagttcggcaccgacaccctgaacatctacctggacgagctgatcaagaacacccagacctacaccttcaccatcagccagagcgtgctggtgaccaacctgaagcccgccaccatcaaggtgtacgactactacctgcccgacgagcaggccaccatccagtacagcgacccctgcgagtag

SEQ ID NO: 239471 - protein, 485 aa, Artificial Sequence
  derived and/or modified sequence
MEFLGTTQTASYCGPKKCCGLTSLPAVQAPVIQECYQPYYLPGYRYLNSWRPSLFYKIANVQTCPDESTSTLRPPTILPTLRSALFSRYSPHDWDQSNQLQVRGAEASRLWASRLTDDSMRLLQDKDQLTHQMQEGTCRNLGQRLSDIGFWKSELSYELDRLLTENQNLETVKRRLECAANEVNCPLQVALECLYHREKRIGIDLVHDNVEKNLIREVDLLKCCQEQMRKLAQRIDIQMRDNRDAQHVLERDLEDKSSAQCIDEKCFNLRNTSDCISFFHGMEKIDGTISVPETWAKFSNDNIKHSQNMRANSIQLREEAEHLFETLSDQMWRQFTDTNLAFNARISEVTDVKNKLQTQLAKTLQEIFQAENTIMLLERSIMAKEGPLKVAQTRLECRTRRPNMELCRDIPQLKLVNEVFTIDDTLQTLKLRLRETQDTLQLLVMTKCRLEHELAIKANTLCIDKEKCMGMRKTFPCTPRLVGHT

SEQ ID NO: 239472 - DNA, 1458 bp, Artificial Sequence
  derived and/or modified sequence
atggaattcctgggcacgacccagactgcctcatattgcgggccaaagaaatgttgtgggctgaccagtctccccgcagttcaagctccggttattcaggagtgctatcagccctactacctgccaggttaccggtacctgaacagctggcgtccctccttattctataagattgccaacgtgcagacatgccccgatgagtctaccagcactcttcgccctccaaccattctaccaactctgcggtcggccctgttctcaagatacagtcctcacgattgggaccagagcaatcagcttcaggttagaggcgcggaagcctcccggctgtgggcaagcaggctgacagatgactcaatgaggctgttgcaagataaggatcagctgactcatcagatgcaggaaggaacctgcagaaacctgggtcagcggctgtccgatatcggattctggaaatctgaactaagctatgaactggaccggttgttgaccgaaaaccaaaatctggagaccgtcaagcggagattggagtgtgctgccaatgaggtgaattgccctctgcaggtagctctggaatgtctctatcacagggaaaagcggataggaatcgaccttgttcatgacaacgttgaaaagaatctgatccgtgaggtagacctacttaagtgttgccaggaacagatgcgcaagttggcccagcgcattgacatccagatgcgagacaatagggacgcccagcacgtcctcgagcgcgacctggaggacaaatcaagcgcccagtgtatcgatgagaaatgtttcaacctgcgaaatacaagtgactgtatcagtttcttccacggcatggaaaaaattgacggcaccatatctgtgcctgagacttgggccaaattctctaatgacaatatcaaacactcacagaacatgcgggccaacagtatacagctcagagaggaagccgaacacctctttgaaaccctcagtgaccagatgtggagacagttcaccgataccaacctggccttcaacgcaaggatcagcgaggtgaccgatgtaaaaaacaagcttcagactcagctggcgaaaaccctgcaagagatttttcaggcggagaacactatcatgctgctcgaacgatccattatggctaaagaaggccctttaaaagttgcgcagacccgcttggagtgccggactcgcagacccaacatggagctatgcagggatatacctcagttgaagctcgtgaacgaggtgtttaccattgacgatactctccaaaccttgaagctgcgcctgcgagaaacacaggatacattacagctgctggtgatgacaaaatgcaggttagagcacgagctggccattaaagccaacaccctgtgcatcgataaggaaaagtgtatgggaatgcggaagacctttccatgtacgcctaggctggtggggcacacctag

SEQ ID NO: 239473 - DNA, 1458 bp, Artificial Sequence
  derived and/or modified sequence
atggagttcctgggcaccacccagacagccagctactgcggccccaagaagtgctgcggcctgaccagcctgcctgctgtgcaggcccctgtgatccaggagtgctaccagccctactacctgcccggctaccgctacctgaacagctggaggcccagcctcttctacaagatcgccaacgtgcagacctgcccagatgagagcaccagcaccctgcggccccccaccatcctgcccaccctgcggagcgccctcttcagccgctacagcccccatgactgggaccagagcaaccagctgcaggtgagaggagctgaggccagccggctgtgggccagccggctgacagatgacagcatgaggctgctgcaggacaaggaccagctgacccaccagatgcaggagggcacctgcaggaacctgggccagaggctgagtgacatcggcttctggaagtctgagctgtcctatgagctggaccggctgctgacagagaaccagaacctggagaccgtgaagaggcggctggagtgtgccgccaatgaggtgaactgccccctgcaggtggccctggagtgcctgtaccaccgggagaagagaattggaattgacctggtgcatgacaacgtggagaagaacctgatccgggaggtggacctgctgaagtgctgccaggagcagatgaggaagctggcccagagaattgacatccagatgagggacaacagagatgcccagcacgtgctggagcgggacctggaggacaagagcagcgcccagtgcattgatgagaagtgcttcaacctgaggaacaccagtgactgcatctccttcttccacggcatggagaagattgatggcaccatctctgtgcctgagacctgggccaagttcagcaatgacaacatcaagcacagccagaacatgagggccaacagcatccagctgcgggaggaggccgagcacctgtttgagaccctgagtgaccagatgtggaggcagttcacagacaccaacctggccttcaatgcccgcatcagcgaggtgacagatgtgaagaacaagctgcagacccagctggccaagaccctgcaggagatcttccaggccgagaacaccatcatgctgctggagaggagcatcatggccaaggagggccccctgaaggtggcccagacccggctggagtgcaggacccggcggcccaacatggagctgtgccgggacatcccccagctgaagctggtgaatgaggtgttcaccattgatgacaccctgcagaccctgaagctgcggctgcgggagacccaggacaccctgcagctgctggtgatgaccaagtgccgcctggagcacgagctggccatcaaggccaacaccctgtgcatcgacaaggagaagtgcatgggcatgaggaagaccttcccctgcaccccccggctggtgggccacacctag

SEQ ID NO: 239474 - DNA, 1458 bp, Artificial Sequence
  derived and/or modified sequence
atggagttcctgggcaccacccagaccgccagctactgcggccccaagaaatgttgcggcctcacgtctttgccggcagtgcaggctcctgttatccaggaatgctaccagccatactacctgccagggtaccggtacttgaacagttggagaccttcgctgttctacaaaatagcgaatgtacagacatgccccgatgagtccactagtaccctgagaccacccactatcctaccgaccctgagatctgccctcttctctcgatattcaccacacgattgggaccagtccaaccagcttcaggtgcgtggtgctgaggcgagtcgcttgtgggcgtcacggcttactgatgacagtatgaggctcctccaagataaagatcagttgacccaccagatgcaagagggaacctgcagaaacctgggccaacggctgagcgacattgggttctggaagagcgagctgtcctatgagctggacagactactcacagaaaaccagaatttggagaccgttaagaggcggttagagtgtgccgccaatgaggttaactgccctctgcaggttgctctggaatgtctctatcatcgggaaaaaagaattggaattgacctggttcacgacaatgtagaaaaaaacctgattagggaggtcgatctcctcaagtgttgccaggaacagatgagaaaacttgcccagcgaatcgacatccagatgcgtgacaaccgtgatgcccagcacgttctggaaagggacctggaggacaagtcctctgcccagtgcatcgacgagaagtgcttcaacttgcggaatacatctgactgcatcagcttctttcacggaatggaaaaaattgatggaactatcagcgttcctgaaacttgggctaaattcagtaatgataacatcaaacattctcagaacatgcgtgccaattcaattcagctgcgtgaagaagctgagcacctgtttgaaacattgtcagaccagatgtggcgacagttcactgacacgaacctcgctttcaatgccagaatctctgaggtcaccgatgtgaaaaataagcttcaaactcaactggccaaaaccctacaggaaatcttccaggccgaaaacactatcatgctcttagaacggtcaatcatggccaaagaaggacccctcaaggtggcgcagacgcgactcgaatgtcggaccagaagacctaatatggaattatgcagagatatcccccagctgaaactagtgaatgaggtttttaccatcgatgatactctccagacgttgaagctacgcctgcgagagacacaggatacgctccaactgttggtgatgacaaaatgcaggctcgagcacgaactggccattaaggcgaacaccctctgcattgataaggagaagtgcatggggatgagaaagaccttcccgtgcactcctcgcctggtaggccacacgtag

SEQ ID NO: 239475 - DNA, 1458 bp, Artificial Sequence
  derived and/or modified sequence
atggaatttctgggtacgacacaaacggcctcatactgcggtcctaagaagtgctgcggcctgactagcctgcccgctgtccaagcgccagtgatacaggagtgctaccagccatattacttacccggataccggtatctgaatagctggcgccctagcctgttttacaagatcgccaatgttcagacctgtccagatgaatcaacgagtactttacggccacccacaatactccctacccttcggtcagcactctttagccggtatagcccacacgattgggatcagtccaatcagctgcaggtccggggtgctgaagcttcaagactatgggcgagtcgcctgacggacgactctatgcgactcctgcaggacaaagaccaactgacacaccagatgcaggaaggaacctgtcggaatttgggacagcggctgtccgacatcgggttctggaagagtgaattgtcttacgagctggaccggctactcaccgagaaccagaatttggaaactgtcaaaagaagactcgaatgtgctgcaaatgaagtgaactgccctctgcaggtggccttggaatgcctctaccatcgagagaagaggatcggcattgatctggtgcacgacaatgtggagaagaatctgatcagggaggtggacctcctcaaatgctgccaagaacagatgagaaaacttgcccaacgcattgatattcagatgagagataatcgggacgctcaacatgtgttagagcgggacctggaggacaaaagttcagcccagtgcatcgatgagaaatgctttaacctgagaaacacctcagactgtatttcctttttccatgggatggagaagatcgacggcaccatctcagtacctgaaacctgggcaaaattttcgaatgataacatcaaacactcccagaatatgagggctaactcaatccagctgagggaagaggccgaacatctctttgaaaccttgtccgaccagatgtggcggcaattcactgatactaacctggcatttaacgctcggatctctgaggttaccgacgtaaaaaataaactgcagacccagttggccaaaactttgcaggagatcttccaggcagagaacactattatgttactggaaaggtcaatcatggctaaggaggggccactcaaagtggcccagacgcgattggaatgccgcacacgtcgccctaacatggagctctgtcgcgatatcccccagctaaagttggtcaatgaggtgttcactatcgatgataccctgcagactcttaagctgaggctacgggagactcaagacaccctgcaactgctagttatgaccaagtgtcggctagaacacgaactggctatcaaggctaatactctttgcattgataaagaaaaatgcatgggcatgcgcaagacttttccttgcaccccccgtctggtcggccacacttag

SEQ ID NO: 239476 - DNA, 1612 bp, Artificial Sequence
  derived and/or modified sequence
actttcacctttcctggtgatgcctttggctccttgagctgagttttgcccgagtggggctcatgagggaggatggagtttcttgggactactcagaccgccagttactgtggtcccaagaaatgctgtggcttgacctcactgccagctgtacaggcgccagtgatccaggaatgctatcagccctactacctgcccgggtaccgctacctcaattcatggaggcctagcctcttctacaagatagccaacgtccagacctgcccggacgagagcaccagtaccctgcggccgcccaccatcctgcccacactgcgctccgcactcttctctcgctatagcccccacgactgggaccagtccaaccagctgcaggtgcgtggggccgaggcctcccggctgtgggccagccggctgacggatgactccatgaggctcttgcaggacaaggaccagctgacgcaccagatgcaggagggcacctgccggaacctgggccagaggctgtcggacattggcttctggaagtcagagctgagctatgagctggacaggcttctgactgagaaccagaacttggagacggtcaagaggcggctggagtgcgcggccaatgaggtgaactgcccattgcaggtggccttggagtgtctgtaccatcgagagaagaggattgggattgatttggtccatgacaacgtggagaaaaaccttatccgggaagtggatttgctaaaatgttgccaagaacagatgagaaaattagctcaaagaattgatatccagatgcgggataaccgggatgctcagcacgtgctggagagggacctcgaagacaaaagctcggcccagtgtatcgatgagaagtgctttaacctgagaaatacgtcagactgcatcagcttcttccacggcatggagaaaattgacggcacgatctccgtacctgagacctgggccaagttcagtaacgacaacatcaaacactctcagaacatgcgggccaactccatccagctgcgggaggaggcggagcacctctttgagaccttgtcggatcagatgtggaggcagttcacagacaccaacctggccttcaacgcccgcatctctgaggtgacggatgtgaagaataagctgcagacgcagctggcgaagacgctgcaggagatcttccaggccgagaacaccatcatgctgctggaaaggtccatcatggccaaggagggcccgctgaaggtggcccagacaaggctggagtgccggacccggcgccccaacatggagctgtgcagggacatcccgcagttgaagctggtgaacgaggtgttcaccatcgacgacaccctgcagaccctcaagctgcggctgcgggagacacaggacacgctgcagctgctggtcatgaccaagtgccggctggagcacgagctcgccatcaaggccaacaccctctgcatcgacaaggagaagtgcatgggcatgcgtaagaccttcccctgcaccccgcgcctggtgggccacacctgagcaccgccctggcgcctcattccgcgctggcgtaaaattggaaaaggctgagaaacaaagtaaaacagtattttgtttgaaa

SEQ ID NO: 239477 - DNA, 1458 bp, Artificial Sequence
  derived and/or modified sequence
atggagttcctgggcaccacccagaccgccagctactgcggccccaagaagtgctgcggcctgaccagcctgcccgccgtgcaggcccccgtgatccaggagtgctaccagccctactacctgcccggctacagatacctgaacagctggagacccagcctgttctacaagatcgccaacgtgcagacctgccccgacgagagcaccagcaccctgagaccccccaccatcctgcccaccctgagaagcgccctgttcagcagatacagcccccacgactgggaccagagcaaccagctgcaggtgagaggcgccgaggccagcagactgtgggccagcagactgaccgacgacagcatgagactgctgcaggacaaggaccagctgacccaccagatgcaggagggcacctgcagaaacctgggccagagactgagcgacatcggcttctggaagagcgagctgagctacgagctggacagactgctgaccgagaaccagaacctggagaccgtgaagagaagactggagtgcgccgccaacgaggtgaactgccccctgcaggtggccctggagtgcctgtaccacagagagaagagaatcggcatcgacctggtgcacgacaacgtggagaagaacctgatcagagaggtggacctgctgaagtgctgccaggagcagatgagaaagctggcccagagaatcgacatccagatgagagacaacagagacgcccagcacgtgctggagagagacctggaggacaagagcagcgcccagtgcatcgacgagaagtgcttcaacctgagaaacaccagcgactgcatcagcttcttccacggcatggagaagatcgacggcaccatcagcgtgcccgagacctgggccaagttcagcaacgacaacatcaagcacagccagaacatgagagccaacagcatccagctgagagaggaggccgagcacctgttcgagaccctgagcgaccagatgtggagacagttcaccgacaccaacctggccttcaacgccagaatcagcgaggtgaccgacgtgaagaacaagctgcagacccagctggccaagaccctgcaggagatcttccaggccgagaacaccatcatgctgctggagagaagcatcatggccaaggagggccccctgaaggtggcccagaccagactggagtgcagaaccagaagacccaacatggagctgtgcagagacatcccccagctgaagctggtgaacgaggtgttcaccatcgacgacaccctgcagaccctgaagctgagactgagagagacccaggacaccctgcagctgctggtgatgaccaagtgcagactggagcacgagctggccatcaaggccaacaccctgtgcatcgacaaggagaagtgcatgggcatgagaaagaccttcccctgcacccccagactggtgggccacacctag

SEQ ID NO: 239478 - DNA, 531 bp, Artificial Sequence
  derived and/or modified sequence
atgtgcctggagctgttccacagcagcaacgtgatcgacggcctgaagctgaacgccttcgccgccgtgttcaccgtgctgagcggcctgctgggcatggtggcccacatgatgtacacccaggtgttccaggtgaccgtgagcctgggccccgaggactggagaccccacagctgggactacggctggagcttctgcctggcctggggcagcttcacctgctgcatggccgccagcgtgaccaccctgaacagctacaccaagaccgtgatcgagttcagacacaagagaaaggtgttcgagcagggctacagagaggagcccaccttcatcgaccccgaggccatcaagtacttcagagagagaatggagaagagagacggcagcgaggaggacttccacctggactgcagacacgagagataccccgccagacaccagccccacatggccgacagctggcccagaagcagcgcccaggaggcccccgagctgaacagacagtgctgggtgctgggccactgggtgtag

SEQ ID NO: 239479 - DNA, 531 bp, Artificial Sequence
  derived and/or modified sequence
atgtgcttggaattgtttcactcaagtaacgtcattgacggccttaaattgaacgcatttgccgcggtctttacagtgctttctggcttgctgggcatggtagctcacatgatgtacactcaagtgttccaggtcaccgtctctttgggcccggaggattggcggccacactcgtgggattatgggtggtccttctgcctggcttggggctcattcacttgttgcatggccgctagtgtgactacgcttaattcttacactaaaacagtgatcgaatttcggcacaagcggaaagtgtttgaacaggggtatcgcgaagagccgacctttatagaccctgaggccataaagtattttcgggaacggatggaaaagcgcgatggctccgaggaggactttcatctcgattgcagacatgagcggtaccccgcacgtcatcagccacacatggccgacagctggccccgaagctctgcccaggaagctcctgaacttaacaggcagtgctgggttttgggacattgggtgtag

SEQ ID NO: 239480 - DNA, 531 bp, Artificial Sequence
  derived and/or modified sequence
atgtgcctggagctgttccacagcagcaatgtgattgatggcctgaagctgaatgcctttgctgctgtgttcaccgtgctgagcggcctgctgggcatggtggcccacatgatgtacacccaggtgttccaggtgacagtgtccctgggccctgaggactggaggccccacagctgggactatggctggagcttctgcctggcctggggcagcttcacctgctgcatggccgcctctgtgaccaccctgaacagctacaccaagacagtgattgagttccgccacaagaggaaggtgtttgagcagggctaccgggaggagcccaccttcattgatcctgaggccatcaagtacttccgggagaggatggagaagagagatggcagcgaggaggacttccacctggactgcagacatgagcgctacccagcccggcaccagccccacatggctgacagctggcccaggagcagcgcccaggaggcccctgagctgaaccggcagtgctgggtgctgggccactgggtgtag

SEQ ID NO: 239481 - DNA, 531 bp, Artificial Sequence
  derived and/or modified sequence
atgtgcctggagctgttccacagcagcaacgtgatcgacggcctgaagttgaacgcttttgccgccgtgttcactgtattgagcggcctgctgggcatggtggcccacatgatgtacactcaggtctttcaagtgaccgtgagtctgggtcctgaagattggcgacctcatagctgggattacggatggagtttttgtttggcttggggttccttcacgtgctgcatggcagcatctgtgaccactctgaactcttataccaagaccgtgatcgagtttagacacaagcgtaaagtctttgaacaaggttatagagaggagcccaccttcatcgaccccgaggcaattaagtatttccgcgaacgtatggagaaaagagatggttctgaagaggattttcatttagattgtagacacgagcgctaccctgccaggcatcagccccacatggcagactcttggccgcgatcgagcgcgcaggaggccccagagttaaataggcagtgctgggtccttggccattgggtgtag

SEQ ID NO: 239482 - DNA, 531 bp, Artificial Sequence
  derived and/or modified sequence
atgtgcctagagctgttccattcttccaacgtcatcgatggtctcaagctcaacgctttcgccgctgtgtttacagtgctctctggcttgctcggcatggtggcccacatgatgtacacacaggtttttcaagtaactgttagcctcggacccgaggattggaggcctcattcatgggattatgggtggagcttctgcctggcatggggaagctttacctgctgcatggcggcttcggtgaccacactgaattcctatactaaaactgtcattgagtttagacataagaggaaggtatttgagcagggctatcgggaagagccaactttcattgaccccgaggccataaaatattttagggagcggatggaaaagcgggatgggtccgaggaggattttcacctggactgtcgtcatgagaggtatcccgctcgacatcaaccccacatggccgacagttggcctcggagtagcgcacaggaggctcccgaattgaatcgccagtgctgggtcttaggccactgggtctag

SEQ ID NO: 239483 - protein, 790 aa, Artificial Sequence
  derived and/or modified sequence
MITVNPDGKIMVRRCLVTLRPFRLFVLGIGFFTLCFLMTSLGGQFSARRLGDSPFTIRTEVMGGPESRGVLRKMSDLLELMVKRMDALARLENSSELHRAGGDLHFPADRMPPGAGLMERIQAIAQNVSDIAVKVDQILRHSLLLHSKVSEGRRDQCEAPSDPKFPDCSGKVEWMRARWTSDPCYAFFGVDGTECSFLIYLSEVEWFCPPLPWRNQTAAQRAPKPLPKVQAVFRSNLSHLLDLMGSGKESLIFMKKRTKRLTAQWALAAQRLAQKLGATQRDQKQILVHIGFLTEESGDVFSPRVLKGGPLGEMVQWADILTALYVLGHGLRVTVSLKELQSNLGVPPGRGSCPLTMPLPFDLIYTDYHGLQQMKRHMGLSFKKYRCRIRVIDTFGTEPAYNHEEYATLHGYRTNWGYWNLNPKQFMTMFPHTPDNSFMGFVSEELNETEKRLIKGGKASNMAVVYGKEASIWKGKEKFLGILNKYMEIHGTVYYESQRPPEVPAFVKNHGLLPQPEFQQLLRKAKLFIGFGFPYEGPAPLEAIANGCIFLQSRFSPPHSSLNHEFFRGKPTSREVFSQHPYAENFIGKPHVWTVDYNNSEEFEAAIKAIMRTQVDPYLPYEYTCEGMLERIHAYIQHQDFCRAPDPALPEAHAPQSPFVLAPNATHLEWARNTSLAPGAWPPAHALRAWLAVPGRACTDTCLDHGLICEPSFFPFLNSQDAFLKLQVPCDSTESEMNHLYPAFAQPGQECYLQKEPLLFSCAGSNTKYRRLCPCRDFRKGQVALCQGCL

SEQ ID NO: 239484 - DNA, 2373 bp, Artificial Sequence
  derived and/or modified sequence
atgatcaccgtgaaccctgatgggaagataatggtcaggagatgcttagttaccctgagacctttccgtctgtttgtactgggcatagggtttttcaccctgtgtttcctgatgactagccttgggggacaattcagtgctcgccggctaggggactctccattcactattcgaaccgaggtcatgggcggccctgaatccaggggcgtcctgagaaagatgtcagacctgctagagcttatggtgaaacgcatggacgccctggcccgactggagaattcctcagaactgcaccgagctggaggcgatctgcacttccccgcggacagaatgcccccaggcgctgggctaatggaacgcatacaagccatagctcagaatgtatctgatatagcagtgaaggtggatcaaatcctcagacacagtctgttattacacagtaaggtgtctgaagggcgcagagaccaatgcgaggcccccagcgatccaaaattcccagattgctccggcaaggttgagtggatgcgggcccgctggacaagcgacccatgctatgctttttttggcgtggatggaactgagtgttcttttctcatttacctctctgaagtcgagtggttctgccctcccttaccatggcgcaaccagacggcggctcagcgagctccaaagccactgccgaaggttcaggcagtgttccgcagcaacttgtcccaccttctggatcttatgggctccggtaaggaatctctaatcttcatgaagaagcggactaaacgactgacagcccagtgggctcttgctgcccagaggctggcccagaaactcggagcaacccagcgcgaccagaagcagatcttggtgcatatagggtttctcactgaggagagcggcgatgtcttcagcccacgcgtgctgaaggggggcccgctgggtgaaatggtccagtgggccgacattctcacagcattgtatgtcctaggccatgggctccgcgtcactgtgagcttgaaagagctgcagtctaaccttggggttcctccaggccgcggctcatgccccttgactatgccgttgccttttgatctgatatataccgactatcacggattacagcagatgaaacgacacatgggcctgagcttcaaaaaataccgctgcagaatccgtgtcattgacaccttcggcaccgaacccgcatataaccacgaggaatacgctacgctccacggttatcgcacgaactgggggtactggaatctcaatcctaagcagttcatgactatgttcccacacactccagataactctttcatggggttcgtgtcagaggaactcaacgagacagagaagagactgatcaagggcggaaaggcctccaacatggctgtggtttacggaaaagaggcttccatctggaagggcaaggaaaagtttttgggcatccttaacaagtacatggagattcatggtacggtgtattatgagtcccagcgtccgccagaggtgcccgccttcgtcaaaaaccacggactgctccctcagccggaatttcagcaattactgagaaaagctaagctgttcatcgggttcggctttccatatgagggccccgccccacttgaagccatcgctaatggttgcatctttcttcagagccggttcagccctccgcacagcagtctgaatcacgagttcttccgcggtaaacccacctcgagagaggtgttctctcaacatccttacgcggagaatttcataggtaagcctcatgtatggactgtcgactacaacaactctgaggaatttgaggctgcaatcaaagctataatgcggacgcaggtggacccttacctgccctacgagtacacctgcgagggtatgttagagcggatacacgcctatatccagcaccaggacttttgtagggcccctgaccccgccttgcccgaggcccacgcacctcagtcacccttcgtcttggcgcccaacgccacacatttagaatgggctcgcaacacatctctggcacctggagcctggcccccagctcacgctctgagagcttggctagctgtgccaggcagggcctgtaccgacacatgccttgaccacggccttatatgcgaaccttctttctttccttttcttaattctcaggatgcctttttgaaactgcaggttccatgtgactccacagaaagtgaaatgaaccacctttacccagcatttgcacagccaggacaggagtgttacctgcagaaggaaccccttttgttttcctgtgctggatccaatactaaatatcgcaggctgtgtccttgtagagatttccgcaaaggtcaagtggccttgtgtcaggggtgcctgtag

SEQ ID NO: 239485 - DNA, 2373 bp, Artificial Sequence
  derived and/or modified sequence
atgatcaccgtgaacccagatggcaagatcatggtgcggcgctgcctggtgaccctgcggcccttccggctgtttgtgctgggcatcggcttcttcaccctgtgcttcctgatgaccagcctgggcggccagttcagcgcccggcggctgggggacagccccttcaccatcagaacagaggtgatgggcggccctgagagcagaggagtgctgaggaagatgtctgacctgctggagctgatggtgaagaggatggatgccctggcccggctggagaacagcagcgagctgcaccgggccggcggggacctgcacttccctgctgacaggatgcctcctggagctggcctgatggagcgcatccaggccatcgcccagaatgtgtctgacattgctgtgaaggtggaccagatcctgcggcacagcctgctgctgcacagcaaggtgtctgagggcagaagagaccagtgtgaggcccccagcgaccccaagttcccagactgcagcggcaaggtggagtggatgagggcccgctggaccagtgacccctgctacgccttcttcggcgtggatggaacagagtgcagcttcctgatctacctgtctgaggtggagtggttctgcccccccctgccctggaggaaccagacagctgcccagagggcccccaagcccctgcccaaggtgcaggccgtgttccgcagcaacctgagccacctgctggacctgatgggcagcggcaaggagagcctcatcttcatgaagaagaggaccaagaggctgacagcccagtgggccctggccgcccagaggctggcccagaagctgggcgccacccagagggaccagaagcagatcctggtgcacatcggcttcctgacagaggagagcggagatgtgttcagcccccgggtgctgaagggcggccccctgggggagatggtgcagtgggccgacatcctgacagccctgtatgtgctgggccacggcctgcgggtgacagtgtccctgaaggagctgcagagcaacctgggcgtgcccccaggccggggcagctgccccctgaccatgcccctgccctttgacctgatctacacagactaccacggcctgcagcagatgaagaggcacatgggcctgtccttcaagaagtaccgctgccgcatccgggtcatcgacacctttggaacagagcccgcctacaaccacgaggagtatgccaccctgcacggctaccgcaccaactggggctactggaacctgaaccccaagcagttcatgaccatgttcccccacaccccagacaacagcttcatgggctttgtgtctgaggagctgaatgaaacagagaagaggctcatcaagggcggcaaggccagcaacatggctgtggtgtatggcaaggaggccagcatctggaagggcaaggagaagttcctgggcatcctgaacaagtacatggagatccacggcaccgtgtactatgagagccagaggcctcctgaggtgcctgcctttgtgaagaaccacggcctgctgccccagcctgagttccagcagctgctgaggaaggccaagctgttcatcggcttcggcttcccctatgagggccctgcccccctggaggccatcgccaacggctgcatcttcctgcagagccgcttcagccccccccacagcagcctgaaccacgagttcttccggggcaagcccaccagccgggaggtgttcagccagcacccctatgcagagaacttcatcggcaagccccacgtgtggacagtggactacaacaacagcgaggagtttgaagctgccatcaaggccatcatgaggacccaggtggacccctacctgccctatgagtacacctgtgagggcatgctggagcgcatccacgcctacatccagcaccaggacttctgccgggccccagaccctgccctgcctgaggcccacgccccccagagcccctttgtgctggccccaaatgccacccacctggagtgggccaggaacaccagcctggcccctggggcctggcccccagcccacgccctgcgggcctggctggccgtgcccggccgggcctgcacagacacctgcctggaccacggcctcatctgtgagcccagcttcttccccttcctgaacagccaggatgccttcctgaagctgcaggtgccctgtgacagcacagaaagtgagatgaaccacctgtacccagcctttgcccagcccggccaggagtgctacctgcagaaggagcccctgctcttcagctgtgccggcagcaacaccaagtaccgccgcctgtgcccctgccgggacttcaggaagggccaggtggccctgtgccagggctgcctgtag

SEQ ID NO: 239486 - DNA, 4232 bp, Artificial Sequence
  derived and/or modified sequence
gcgagcccgagcaggcagacgcgcggccggcggtctgggggcgcgccgcctcccggtccccaaaatgtgaagcggggagggcggagacgcagagacggcccggccgggcgccctcgccgccctccggcagccgcgccgctccctccgctgcacgcccaggcctgagcagcgaggccaccgggccgcgcgctcccagcttcgctcggacgcggcttcggcccgcagagggttcgtggcccggacgcggcgagagctgggcccaggacggtgcgtccggcctcgcccgcggctgctcgcaccaacaagtttgaacaatgatcaccgtcaaccccgatgggaagataatggtcagaagatgcctggtcaccctgagaccctttcggctttttgtcctgggcatcggcttcttcactctctgcttcctgatgacgtctctgggaggccagttctcggcccggcgcctgggggactcgccattcaccatccgcacagaagtgatggggggccccgagtcccgcggcgtcctgcgcaagatgagcgacctgctggagctgatggtgaagcgcatggacgcactggccaggctggagaacagcagtgagctgcaccgggccggcggcgacctgcactttcccgcagacaggatgccccctggggccggcctcatggagcggatccaggctattgcccagaacgtctccgacatcgctgtgaaggtggaccagatcctgcgccacagtctgctcctgcacagcaaggtgtcagaaggccggcgggaccagtgtgaggcacccagtgaccccaagttccctgactgctcagggaaggtggagtggatgcgtgcccgctggacctctgacccctgctacgccttctttggggtggacggcaccgagtgctccttcctcatctacctcagtgaggtcgagtggttctgccccccgctgccctggaggaaccagacggctgcccagagggcacccaagcccctccccaaagtccaggcagttttccgaagcaacctgtcccaccttctggacctgatgggcagcgggaaggagtccctgatcttcatgaagaagcggaccaagaggctcacagcccagtgggcgctggctgcccagcgcctggcacagaagctgggggccacccagagggaccagaagcagatcctggtccacatcggcttcctgacggaggagtccggggacgtgttcagccctcgggtcctgaagggcgggcccctaggggagatggtgcagtgggcggacattctgactgcactctatgtcctgggccatggcctgcgggtcacagtctccctgaaggagctgcagagtaacttaggggtaccgccaggccggggaagctgcccgctcaccatgcccctgcccttcgacctcatctacaccgactaccacggcctgcagcagatgaagcggcacatgggactctccttcaagaagtaccggtgccgaatcagggtcatcgacaccttcgggacggaacctgcgtacaaccacgaggagtacgccacgctgcacggctaccggaccaactggggctactggaacctcaaccccaagcagttcatgaccatgtttcctcatacccccgacaactccttcatgggcttcgtgtccgaggagctcaacgagacggagaagcggctcatcaaaggcggcaaggccagcaacatggccgtggtgtacggcaaggaggcgagcatctggaaggggaaggagaagttcctgggcatcctgaacaaatacatggagatccatggcaccgtgtactacgagagccagcggccccccgaggtgccagcctttgtgaagaaccacggcctcttaccgcagcctgagtttcagcagctgctgcgcaaggccaaactcttcatcgggtttggcttcccctacgagggccccgcccccctggaggccatcgccaatggttgcatcttcctgcagtcccgcttcagcccgccccacagctccctcaaccacgagttcttccgaggcaagcccacctccagagaggtgttctcccagcatccctacgcggagaacttcatcggcaagccccacgtgtggacagtcgactacaacaactcagaggagtttgaagcagccatcaaggccattatgagaactcaggtagacccctacctaccctacgagtacacctgcgaggggatgctggagcggatccacgcctacatccagcaccaggacttctgcagagctccagaccctgccctaccagaggcccacgccccgcagagcccctttgtcctggcccccaatgccacccacctcgagtgggctcggaacaccagcttggctcctggggcctggccccccgcgcacgccctgcgggcctggctggccgtgcctgggagggcctgcaccgacacctgcctggaccacgggctaatctgtgagccctccttcttccccttcctgaacagccaggacgccttcctcaagctgcaggtgccctgtgacagcaccgagtcggagatgaaccacctgtacccggcgttcgcccagcctggccaggagtgctacctgcagaaggagcctctgctcttcagctgcgccggctccaacaccaagtaccgccggctctgcccctgccgcgacttccgcaagggccaggtggccttgtgccagggctgtctgtgaatccgcctctgccgccctgcctggcacccacgctggctctctcctgccgcgggagaaagcaccagcaggttctgagccctggctgcttgtcctcctcgcaacccccccaggccggagcttccttccttagccgggaagctggcagaggagagccgtgcccgggaataggaggaggcagcatgccgagcccctgggacctcccaggcaggctccggttctctcctggggactcacagaagcatcgtggccaagcaggtgtcggactgctcagagtccgcatggcccaggagcaggtggtcggaggcccctggctttgtgcaaggccggatctgggccaggtggcgaaaggggcccagtcgttcttgggcccaggatggggcctctagacttgcaagggagaggaacagggaccaggctgccccacggtccctgaagggtccaaggaggggccctccccatggccctggagagtgggcctgggtggtacctgctccaggcagggaaactgggggctcgcccttctcctgtgaggggagccaggcacacagggcccattggtgtttgggatgtggacagaggggcagggggctgggagaaggctaagccgaggggtcctgtttgtgcctccccttagtcccttccctcccgatttcccgattcccccaccctccctctacacttgaggaccacagttgggggtgtagggaccacccagaccctggttgaattgtttctctctcctgcttgttccaacccttttcactctgggcttctcccaaaacccatcctggcatgacctgcaactccaggtggtggatttgttccaaagcctcaatccctaccccctccaaggggcaggtttccagtccagcctcagagatcaggctctgggacccctgcctggggggtggccttcatgcactagccacttccgcaggtgctgactcccgcactccctggcattttttgcagacaagggcttgggatggaccctcagccccatggtacgccctgcccagtttccagttgccctgtccacttaccctaggtagccccccaccccatcagtgccgagtccttgtccctacctccagcttcctccagcctcaaaccgcctctggatctagctgtccttctccgagtggcacgcctgccccaggatgccccctttccctcccccccatgcccagagccccgcctgcctcagcgggtcaggccttcagaacactgccacccacccagttttataatcccgctccctctccaggcaaccccacccaccagcctaggcctgctcctccacccttcccgggaggcagccccgggatgctgagagttggtggaggggccaggctggacgcttcctgtgggagtcccctccagacctggctggcccctgcagccacagaaaccacgatggcaaaaaatctcattggttctcaaggactaacctgtgggggaaagcaatagagacactctttttctctcttttttttaaagatttatttcttgaaataataaatattttattgggatgtgaggtgc

SEQ ID NO: 239487 - DNA, 2373 bp, Artificial Sequence
  derived and/or modified sequence
atgatcaccgtgaaccccgacggcaagatcatggtgcggcggtgcttagttactctccgtccctttagactcttcgtgctcgggattggtttttttaccttgtgctttcttatgaccagcctgggagggcagttcagtgcccgtagacttggggattccccattcactatccgaaccgaagtgatgggcggtccagaatccaggggggttctgaggaagatgagcgatctcttagagttaatggtgaagcgtatggatgccctggcaaggctggagaactcgtccgagctccatagggccggcggggacttacattttccagccgacagaatgccaccaggcgcaggcttgatggaaagaatacaagctatagcgcaaaacgtctcggacatcgcagtgaaagttgatcagatcctccggcacagtttgctgctgcattccaaggtatctgaaggccgtcgcgaccagtgcgaggcgccctcggatcccaagttccccgactgttctggcaaggtcgagtggatgcgagccaggtggaccagcgacccatgctacgcttttttcggcgttgacggtaccgagtgctcctttctgatttatttgagcgaggtggagtggttctgtcccccacttccttggaggaatcagacggctgcccaaagagcgccgaaacctttgcccaaggtccaggcagtgttcaggagtaatctttctcatctgttggacttgatgggcagcggtaaggaaagcttgatattcatgaagaagcgaacgaagcgactgaccgctcaatgggccctggccgcacaacggctggcacagaaacttggggccactcagagagatcagaagcagattctggtccacatcggctttctaactgaagaaagcggggatgtgttctctcccagggtgctgaagggtggacccttgggagagatggttcagtgggcagatatcctgactgccctctacgtcttgggccacggcctccgagtgaccgtttcccttaaagaactccagagcaacctgggagtgccccccggtagaggttcgtgcccactgaccatgccactgcccttcgatctaatatacactgactatcacggtctgcagcagatgaagcgacatatgggcctttcattcaagaaataccggtgtcgtatcagagtgatcgatacttttgggacagagcccgcttataatcacgaagagtacgcaacattgcacggttacaggacgaactgggggtactggaatcttaaccccaagcagtttatgacaatgttcccacacactccagacaatagctttatgggatttgtcagcgaggagctcaatgagacagaaaaaaggctcatcaaaggaggcaaggcatctaacatggcagtcgtctacggtaaggaagccagcatatggaagggtaaagagaagtttctcggcattcttaacaaatatatggaaattcacgggacagtttactacgagtctcagcgtccacccgaggtgcccgcattcgtgaaaaatcacggcctgctacctcaacccgaattccaacagctgttacgtaaagccaaactcttcatcggttttgggttcccttacgaaggaccggcgccacttgaagctatagctaacggctgcattttcttgcagagtaggttttcacctcctcatagctccttgaaccacgaattcttccgcggaaaaccaacctccagagaggtgttcagtcagcacccctatgccgagaattttataggtaaaccacatgtttggacggtagactacaataacagtgaagaattcgaagccgcgatcaaagccatcatgagaacacaggtggatccctacttgccatatgagtacacctgtgagggcatgctcgagaggattcatgcatatattcaacaccaagatttctgtagagctccggatcccgctctgcccgaggcccacgccccacagtctccgttcgttctcgccccaaacgccacccaccttgagtgggcgcggaacacttccctggcgcccggagcctggcctcccgcccacgcgctgcgggcctggctcgctgtgcctgggcgggcctgtaccgacacatgtctcgaccacggcttgatttgcgagccctcctttttccctttccttaacagtcaagacgcattcctgaagctgcaggtgccatgtgactcaactgaatctgagatgaatcatctgtaccctgcttttgcacagcctgggcaagaatgctacctccaaaaggaaccgcttctgttcagttgcgccgggtctaatacaaagtaccgcagactgtgtccatgccgggatttccgcaagggccaggtggctctgtgccaggggtgcctttag

SEQ ID NO: 239488 - DNA, 2373 bp, Artificial Sequence
  derived and/or modified sequence
atgatcacagtgaaccccgatggaaagattatggtgcgacgctgcttggttaccctgcgccctttcagactgttcgtgcttggcataggtttctttacgctgtgcttccttatgacctctcttggcggacagttttccgccaggcggcttggtgattctcctttcacaatacggactgaggtgatgggtgggccagagtcacggggagtacttaggaaaatgtctgacctgctggagctgatggttaagcgtatggatgccctagctagactcgagaattcatctgagctgcatcgcgcagggggtgacctgcacttccccgcagatcgtatgcctcctggtgccggtctgatggaacggatccaggcaatcgctcaaaacgtctccgacatagctgttaaggtcgaccagatcctgcgacacagtttgcttctgcacagcaaggtgagtgaagggcgacgggaccaatgcgaagctccctccgatccgaaatttcctgactgctccggcaaggtggagtggatgagggcccgatggacttctgatccatgctacgccttttttggcgtcgacgggaccgagtgtagtttcctcatctatctcagcgaagttgaatggttctgtccacctctgccttggaggaaccaaacagctgcccaacgcgcacccaagccgttacccaaggtccaggctgtgttcagaagcaacctttcacaccttcttgaccttatgggatccgggaaagagtcactgatcttcatgaaaaagaggaccaaacggctgaccgcgcaatgggccctcgccgcacagagattggcccagaagcttggcgctacacagcgcgaccagaagcaaatcttagtgcatatcgggtttctcacagaagaaagcggggatgtattcagccctagagtgctgaaaggcggaccgctcggagaaatggtacaatgggcagatatcctcactgctttatatgttcttggacatggactgagagtcacggtgagcctgaaggaattacagtcaaaccttggcgtcccacccggtagaggcagctgccctcttaccatgcccctgcccttcgatctgatctatacggattatcacggtctccaacagatgaaacggcacatgggtctgagttttaaaaaatataggtgtagaatccgtgtcatcgacacattcggtaccgaacctgcctacaatcatgaagaatatgccactctgcatggctataggaccaactggggatactggaaccttaaccccaagcagtttatgacgatgttcccacacactcctgataacagcttcatgggatttgtgtctgaagagctgaacgagaccgaaaagagactaattaaggggggaaaagcctctaatatggctgttgtatacgggaaagaggcgtcaatttggaagggcaaggagaagtttctgggcatcttaaataaatacatggagatacatggaacagtgtactatgaatcacagaggccccctgaagtgccagccttcgtaaagaatcacggactgctcccccagccagagttccaacagctgctacgaaaagctaagttgtttatcggcttcggcttcccatatgagggcccagctccacttgaagcaattgccaatggatgtatttttttacagagccgcttttctcctccccacagctcactgaatcacgagttttttcgcggaaaacctacttccagggaagtattctcccaacatccatacgcagagaattttatcgggaaacctcacgtttggacggtcgactataacaattccgaggaatttgaggccgcaatcaaggccatcatgaggacccaggtggatccttatctgccgtacgaatacacatgcgaagggatgcttgagaggatccacgcctacattcagcaccaggatttttgtagagcacccgatcctgctctccctgaagcccatgccccacagtcacccttcgtcctggccccaaatgcaactcacctggagtgggctcggaatacatcccttgccccaggagcctggccccctgcacatgcccttcgtgcttggctggccgtgccgggacgtgcttgtaccgacacatgcctggaccatggcttgatttgcgaaccgtcttttttccccttcctgaactcccaggacgcttttttgaagttgcaggtgccttgcgactctacagaatctgaaatgaaccacctgtaccctgcatttgcccaaccaggtcaggaatgttacttacaaaaggaaccactcttgttcagctgtgctggttctaacacaaagtatcggagactgtgtccctgccgggattttcgtaagggacaagtagccctctgccagggatgtctgtag

SEQ ID NO: 239489 - DNA, 2373 bp, Artificial Sequence
  derived and/or modified sequence
atgatcaccgtgaaccccgacggcaagatcatggtgagaagatgcctggtgaccctgagacccttcagactgttcgtgctgggcatcggcttcttcaccctgtgcttcctgatgaccagcctgggcggccagttcagcgccagaagactgggcgacagccccttcaccatcagaaccgaggtgatgggcggccccgagagcagaggcgtgctgagaaagatgagcgacctgctggagctgatggtgaagagaatggacgccctggccagactggagaacagcagcgagctgcacagagccggcggcgacctgcacttccccgccgacagaatgccccccggcgccggcctgatggagagaatccaggccatcgcccagaacgtgagcgacatcgccgtgaaggtggaccagatcctgagacacagcctgctgctgcacagcaaggtgagcgagggcagaagagaccagtgcgaggcccccagcgaccccaagttccccgactgcagcggcaaggtggagtggatgagagccagatggaccagcgacccctgctacgccttcttcggcgtggacggcaccgagtgcagcttcctgatctacctgagcgaggtggagtggttctgcccccccctgccctggagaaaccagaccgccgcccagagagcccccaagcccctgcccaaggtgcaggccgtgttcagaagcaacctgagccacctgctggacctgatgggcagcggcaaggagagcctgatcttcatgaagaagagaaccaagagactgaccgcccagtgggccctggccgcccagagactggcccagaagctgggcgccacccagagagaccagaagcagatcctggtgcacatcggcttcctgaccgaggagagcggcgacgtgttcagccccagagtgctgaagggcggccccctgggcgagatggtgcagtgggccgacatcctgaccgccctgtacgtgctgggccacggcctgagagtgaccgtgagcctgaaggagctgcagagcaacctgggcgtgccccccggcagaggcagctgccccctgaccatgcccctgcccttcgacctgatctacaccgactaccacggcctgcagcagatgaagagacacatgggcctgagcttcaagaagtacagatgcagaatcagagtgatcgacaccttcggcaccgagcccgcctacaaccacgaggagtacgccaccctgcacggctacagaaccaactggggctactggaacctgaaccccaagcagttcatgaccatgttcccccacacccccgacaacagcttcatgggcttcgtgagcgaggagctgaacgagaccgagaagagactgatcaagggcggcaaggccagcaacatggccgtggtgtacggcaaggaggccagcatctggaagggcaaggagaagttcctgggcatcctgaacaagtacatggagatccacggcaccgtgtactacgagagccagagaccccccgaggtgcccgccttcgtgaagaaccacggcctgctgccccagcccgagttccagcagctgctgagaaaggccaagctgttcatcggcttcggcttcccctacgagggccccgcccccctggaggccatcgccaacggctgcatcttcctgcagagcagattcagccccccccacagcagcctgaaccacgagttcttcagaggcaagcccaccagcagagaggtgttcagccagcacccctacgccgagaacttcatcggcaagccccacgtgtggaccgtggactacaacaacagcgaggagttcgaggccgccatcaaggccatcatgagaacccaggtggacccctacctgccctacgagtacacctgcgagggcatgctggagagaatccacgcctacatccagcaccaggacttctgcagagcccccgaccccgccctgcccgaggcccacgccccccagagccccttcgtgctggcccccaacgccacccacctggagtgggccagaaacaccagcctggcccccggcgcctggccccccgcccacgccctgagagcctggctggccgtgcccggcagagcctgcaccgacacctgcctggaccacggcctgatctgcgagcccagcttcttccccttcctgaacagccaggacgccttcctgaagctgcaggtgccctgcgacagcaccgagagcgagatgaaccacctgtaccccgccttcgcccagcccggccaggagtgctacctgcagaaggagcccctgctgttcagctgcgccggcagcaacaccaagtacagaagactgtgcccctgcagagacttcagaaagggccaggtggccctgtgccagggctgcctgtag

SEQ ID NO: 239490 - protein, 525 aa, Artificial Sequence
  derived and/or modified sequence
MAAAPPLRDRLSFLHRLPILLKGTSDDDVPCPGYLFEEIAKISHESPGSSQCLLEYLLSRLHSSSGHGKLKVLKILLYLCSHGSSFFLLILKRNSAFIQEAAAFAGPPDPLHGNSLYQKVRAAAQDLGSTLFSDTVLPLAPSQPLGTPPATGMGSQARPHSTLQGFGYSKEHGRTAVRHQPGQAGGGWDELDSGPSSQNSSQNSDLSRVSDSGSHSGSDSHSGASREPGDLAERVEVVALSDCQQELSLVRTVTRGPRAFLSREEAQHFIKACGLLNCEAVLQLLTCHLRGTSECTQLRALCAIASLGSSDLLPQEHILLRTRPWLQELSMGSPGPVTNKATKILRHFEASCGQLSPARGTSAEPGPTAALPGPSDLLTDAVPLPGSQVFLQPLSSTPVSSRSPAPSSGMPSSPVPTPPPDASPIPAPGDPSEAEARLAESRRWRPERIPGGTDSPKRGPSSCAWSRDSLFAGMELVACPRLVGAGAAAGESCPDAPRAPQTSSQRTAAKEPPGSEPSAFAFLNA

SEQ ID NO: 239491 - DNA, 2285 bp, Artificial Sequence
  derived and/or modified sequence
agtgattggagggcccgggcctggcggaagcggggcagaccgggaggggacctggatcatggctgccgcgccgccgctacgggaccgcctgagctttctacaccggctcccgattctcctgaaggggacgtccgatgatgatgtcccgtgtccgggctacctgtttgaagagattgctaaaatctcccacgagtctccgggcagcagccagtgcctgctggagtacctcctgagccgcctgcacagcagctccggccacgggaagctcaaggtgctgaagatcctgctctatctgtgcagccacggctcctccttcttcctgctcatcctcaaacgcaactctgccttcatccaggaagctgcagcttttgcagggcccccagatcctctgcacgggaacagcttgtaccagaaggttcgcgcggccgcgcaggacttggggagcaccctgttctcggacaccgtgttgccgctggctccctcccagcctctggggaccccgcctgccacaggcatgggctcccaggccaggccgcacagcaccctccagggtttcggctacagcaaggaacacggccgcacggctgtgaggcatcagcctgggcaggccggagggggctgggatgagctggacagcggccccagctctcagaattcctcccagaacagcgacctgagcagggtctcggactcgggcagtcattccggcagcgacagccattcaggggccagccgggagccgggtgacctggcagaaagggtcgaggtggtggccctgagtgactgtcagcaggagttgagcttggtgaggactgtgactcggggaccacgcgccttcctgagccgcgaggaggcacagcacttcatcaaagcgtgtggactgctcaactgtgaggccgtgctgcagctgctgacctgccacctgcgtgggaccagtgaatgcacgcagctgagggcgctgtgtgccatcgcctccctggggagcagcgacctcctcccccaggagcacatcctcctccgcacccggccgtggctgcaggagctcagcatgggcagcccgggacctgtgaccaacaaggccaccaagatcctgaggcactttgaggcctcctgtgggcagctgtcccctgcccggggcacctcagctgagcctggccccacagccgccctcccaggcccatctgacctgctgaccgacgctgtgcctctccctgggagccaggtcttcctgcagcctctgagttcaaccccggtctcgtcccggagccctgctccctcatctgggatgccgtccagccctgtgcccaccccacccccagatgcctcccccattccagcccccggagaccccagcgaggccgaggccagactggcagaaagcaggcggtggagacctgaacggatcccagggggcacggacagcccaaagagaggccccagcagctgtgcgtggagccgcgactccttgtttgctggcatggagctggtggcctgtccccgcctggtgggggctggggctgctgcgggagagtcctgtcctgatgctccccgcgccccccaaacatcgtcccagaggacagcagccaaagagcctcctggctcagagccgtcagctttcgcgttcctgaacgcctgacccgatggcctggccctggagtcttcagcttcagctgctgtctggggcggtctgtgcttcctgagcagcctcaaccgtagctgctacagtctccaggcagcttgacttgagaggacgaccctagggctacctcagtttcccccatctcctctgccagaggctctggctatttggacttgaatccctacgagggatggcaggtggcagggcttcagaaatgtcgatctcagggctctcagggggcagtccctgcctgtcttgctctcagacatgaggtttcttgtatgaatgcggaagcgactaccaggttccttatttcattttgatctcagctccctccttccccaggaggtcatgagcagcaacaagccactgctcccccgtcccatcggggtgggctaggtgctgaggctgggtttggtgcatgtgggttgagggtgtcttgtccgggctgccttgtgctgtctggcctgaggccatttcaagtctcagatccctacgtgatccttccctggctctcacctgctcctttaggctgtaattgcttcctacacacgaagcctctgattggagcctctggtccatctcagaaaaaccttccaagagcgctggggtttatgctttctgaataaacactactgtttacatg

SEQ ID NO: 239492 - DNA, 1578 bp, Artificial Sequence
  derived and/or modified sequence
atggccgccgccccccccctgagagacagactgagcttcctgcacagactgcccatcctgctgaagggcaccagcgacgacgacgtgccctgccccggctacctgttcgaggagatcgccaagatcagccacgagagccccggcagcagccagtgcctgctggagtacctgctgagcagactgcacagcagcagcggccacggcaagctgaaggtgctgaagatcctgctgtacctgtgcagccacggcagcagcttcttcctgctgatcctgaagagaaacagcgccttcatccaggaggccgccgccttcgccggcccccccgaccccctgcacggcaacagcctgtaccagaaggtgagagccgccgcccaggacctgggcagcaccctgttcagcgacaccgtgctgcccctggcccccagccagcccctgggcaccccccccgccaccggcatgggcagccaggccagaccccacagcaccctgcagggcttcggctacagcaaggagcacggcagaaccgccgtgagacaccagcccggccaggccggcggcggctgggacgagctggacagcggccccagcagccagaacagcagccagaacagcgacctgagcagagtgagcgacagcggcagccacagcggcagcgacagccacagcggcgccagcagagagcccggcgacctggccgagagagtggaggtggtggccctgagcgactgccagcaggagctgagcctggtgagaaccgtgaccagaggccccagagccttcctgagcagagaggaggcccagcacttcatcaaggcctgcggcctgctgaactgcgaggccgtgctgcagctgctgacctgccacctgagaggcaccagcgagtgcacccagctgagagccctgtgcgccatcgccagcctgggcagcagcgacctgctgccccaggagcacatcctgctgagaaccagaccctggctgcaggagctgagcatgggcagccccggccccgtgaccaacaaggccaccaagatcctgagacacttcgaggccagctgcggccagctgagccccgccagaggcaccagcgccgagcccggccccaccgccgccctgcccggccccagcgacctgctgaccgacgccgtgcccctgcccggcagccaggtgttcctgcagcccctgagcagcacccccgtgagcagcagaagccccgcccccagcagcggcatgcccagcagccccgtgcccacccccccccccgacgccagccccatccccgcccccggcgaccccagcgaggccgaggccagactggccgagagcagaagatggagacccgagagaatccccggcggcaccgacagccccaagagaggccccagcagctgcgcctggagcagagacagcctgttcgccggcatggagctggtggcctgccccagactggtgggcgccggcgccgccgccggcgagagctgccccgacgcccccagagccccccagaccagcagccagagaaccgccgccaaggagccccccggcagcgagcccagcgccttcgccttcctgaacgcctag

SEQ ID NO: 239493 - DNA, 1578 bp, Artificial Sequence
  derived and/or modified sequence
atggcagctgccccacccctaagagatcgtttgtccttcctccacagactcccaatcctcttgaagggaacctcggacgatgatgtgccatgtcctggctacttgttcgaggagatcgccaaaatcagtcatgagagtccgggttcctcgcagtgcttgctggagtaccttttgtcccgcctccatagtagctctggacacgggaaactaaaagtcttaaaaattttgctttacctgtgtagtcacggtagctcattcttcctcctgattctgaagcgaaattccgcctttattcaggaagcggcggcctttgctggccctccagacccactgcacggaaattcactgtaccagaaagtccgagccgccgcccaggatcttggcagtactctcttcagcgacacagtgctgcctctggcaccaagccagccactggggacaccacccgctacaggcatgggttcacaggcccgaccccactccacgctccagggctttggctattccaaagagcacggtaggacagcagtccgtcaccaaccaggccaagctggcggtggatgggatgagctggatagcggcccatcctcacagaatagtagccagaattccgatctgagccgggtcagcgactccggttcgcattcaggatcggactctcactccggggcctcacgtgagccaggagacttagccgagcgcgtagaggtcgtggcattgtcagactgtcagcaggaattatctctggtgcggactgtcacgcgcgggccacgagcttttttatccagagaagaggcacaacacttcattaaggcctgtggtctcctcaattgcgaggctgtgctccaactgcttacttgccacctgcgagggacctccgagtgtacccagttacgcgccctatgcgccatagccagcctcggatcctctgatcttctgcctcaggaacacattttgctcagaacaagaccctggttgcaggaactgtctatggggtctcctggaccggtcactaacaaggctaccaaaattcttagacattttgaagcgtcctgcggccaactctcaccagcccgggggacgtctgccgaacccggacccaccgccgcgctgccagggccatcagatttgcttactgatgctgtccctctgcccggatctcaggtttttttgcagccattgtcctctactccggtgagtagccgttcaccagccccctccagcggtatgcccagcagtccggtgcctacacctccccctgacgcctcccccatccccgcaccaggcgatccatctgaggcggaagcaagactggccgaaagcaggcgctggagacctgaacgcatcccgggaggaactgacagtccaaagcgcggcccatccagctgtgcttggtctcgggactctctgtttgccggaatggagctggtggcatgccctcgtctcgttggagcgggcgccgctgccggagaatcatgcccagatgccccccgggccccccaaaccagcagtcagcggactgctgccaaagagccaccgggaagcgagccttcagccttcgcattcctcaacgcttag

SEQ ID NO: 239494 - DNA, 1578 bp, Artificial Sequence
  derived and/or modified sequence
atggctgctgccccacccctgcgggaccggctgtccttcctgcaccggctgcccatcctgctgaagggcaccagtgatgatgatgtgccctgccccggctacctgtttgaggagatcgccaagatcagccatgagagccctggcagcagccagtgcctgctggagtacctgctgagccggctgcacagcagcagcggccacggcaagctgaaggtgctgaagatcctgctgtacctgtgcagccacggcagcagcttcttcctgctgatcctgaagagaaattctgccttcatccaggaggccgccgcctttgctggccccccagaccccctgcacggcaacagcctgtaccagaaggtgcgggctgctgcccaggacctgggcagcaccctcttcagtgacacagtgctgcccctggcccccagccagcccctgggcaccccaccagccaccggcatgggcagccaggcccggccccacagcaccctgcagggcttcggctacagcaaggagcacggccgcacagctgtgcgccaccagcccggccaggccggcggcggctgggatgagctggacagcggccccagcagccagaacagcagccagaacagcgacctgagccgggtgtctgacagcggcagccacagcggcagtgacagccacagcggggccagccgggagcccggggacctggccgagcgggtggaggtggtggccctgagtgactgccagcaggagctgagcctggtgaggacagtgacccggggcccccgggccttcctgagccgggaggaggcccagcacttcatcaaggcctgtggcctgctgaactgtgaggccgtgctgcagctgctgacctgccacctgcggggcaccagcgagtgcacccagctgcgggccctgtgtgccatcgccagcctgggcagcagtgacctgctgccccaggagcacatcctgctgcggacccggccctggctgcaggagctgtccatgggcagccctggccctgtgaccaacaaggccaccaagatcctgcggcactttgaggccagctgtggccagctgagccctgcccggggcaccagcgctgagcccggccccacagctgccctgcccggccccagcgacctgctgacagatgctgtgcccctgcccggcagccaggtgttcctgcagcccctgagcagcacccctgtgagcagccgcagccctgcccccagcagcggcatgcccagcagccctgtgcccaccccacctccagatgccagccccatcccagcccctggggaccccagcgaggccgaggcccggctggccgagagccgccgctggaggcctgagcgcatccctgggggcacagacagccccaagaggggccccagcagctgtgcctggagccgggacagcctgtttgctggcatggagctggtggcctgcccccggctggtgggcgctggagctgctgctggggagagctgcccagatgccccccgggccccccagaccagcagccagaggacagctgccaaggagcccccaggcagcgagcccagcgcctttgccttcctgaatgcctag

SEQ ID NO: 239495 - DNA, 1578 bp, Artificial Sequence
  derived and/or modified sequence
atggccgccgccccccccctgcgggaccggctgagcttcctgcacagattgcccattctgctgaaggggactagtgatgacgatgtgccttgccccgggtacctcttcgaagagattgcaaaaatctctcatgagagccccgggagcagccagtgcttgctggagtacctcttaagtcgacttcattcatccagtggtcatggaaaactgaaggtgttgaagatcctgctgtatttatgttcacacggctctagtttcttccttctgattcttaagaggaattcagcatttatccaggaagcagccgcattcgccggacctcctgatcccctccacggcaatagtctctatcagaaagtgagggcagccgctcaggatctcgggagtactttattctccgacaccgtgctgccattagccccttcccagcctctcggcacaccccccgcaaccggcatggggtcacaggcccgcccccattccactttgcaggggttcgggtactccaaagagcacgggagaacggctgtgcgtcaccagccggggcaagctggaggggggtgggatgagctggattcaggcccaagcagccagaactcttcgcagaacagtgatctatctagagtcagtgacagtggctcacattccggcagtgatagccatagcggggcctccagggaaccaggggatcttgctgaaagagtcgaagtcgttgcactgtccgactgccagcaggagctctccttggttaggaccgtcactagaggaccacgcgcttttctatctcgagaggaggcacagcatttcataaaagcttgtggactcctgaactgcgaagcagtgttgcagctgctgacgtgtcacttgcgcggcacttctgaatgtacgcagctgcgcgccctttgcgccatcgcttccctaggttcgtctgatcttctaccacaggaacacatactgttacgaacccggccctggctccaggagctgtctatgggcagccctggacctgtcacaaataaggccactaagatactgagacattttgaggcatcctgtgggcagctgtcgccagctaggggcacctccgctgaacccgggcctacagccgctctcccgggcccatccgatctgctaaccgatgccgtgcccctgccgggttcccaggtgttcttgcagccgctgagcagtacaccggtgtcaagtcggtctcccgctcctagcagcggaatgccctcttcgccggtgcccacccccccccccgatgcatcacccatcccggcccctggggaccccagcgaagccgaagcgcgtctcgccgaatctagaaggtggagacctgagcggattcccgggggcactgatagtcctaagcgaggtcctagctcgtgcgcttggtccagagactctctatttgccggtatggaattggtggcgtgcccacgcttagtcggggccggggcagcagcgggtgagtcttgccctgacgcccctcgcgcacctcagactagtagccagcggactgctgcaaaggaaccgccagggagcgaacccagcgctttcgcatttctgaatgcatag

SEQ ID NO: 239496 - DNA, 1578 bp, Artificial Sequence
  derived and/or modified sequence
atggccgcagcccctccactgcgcgaccgcttgagcttcttacatcggctgcctatactgttgaaagggactagcgacgatgatgtaccatgcccaggttacctgttcgaggagatcgcgaaaattagccacgagtctcccggtagcagtcaatgcttattggagtacctgctctctaggctccacagttcgagcgggcatggtaaactcaaggtgctcaaaatccttctgtatctatgcagtcatggcagctcattttttcttctcattctgaaaagaaacagcgcatttatccaggaggctgccgctttcgccggacctcccgacccactgcacggtaacagcctataccagaaggtgcgtgccgcagcccaagatcttggatctacactgttcagcgacaccgtcttgcctctggcccctagccagccacttggcaccccacctgccaccggaatggggagtcaagccagaccccactcgacactgcaaggatttggctatagcaaagagcatggacgcaccgccgtcagacatcagcccggtcaggcaggcggagggtgggacgaattagacagcggaccctctagtcagaactcatcacagaattcagatctgtcaagggtgagtgacagcggttcccattctgggagcgactcccacagcggagcttccagggaaccaggggacctggctgaaagggtggaggtggtagcactctcagactgccaacaggagctgtcgctggtgcgaaccgtcacaagaggcccacgcgcttttctgagccgtgaagaggcccagcactttattaaggcttgcggcctgctgaattgtgaggccgtgctccagttgctgacatgccacttgagaggaacgagcgagtgcacccagctgcgggcactgtgtgctatagcttcactaggcagctcagacctgctccctcaggaacatatccttctccgaacccgaccctggttacaggaactcagcatggggtccccagggcctgtcacaaacaaggccaccaaaatcctgagacactttgaggcatcgtgtggccagctcagccctgccaggggtacctcagcagaaccgggacccactgccgctctcccgggaccctcagacctacttacagacgcagttcctctgcccggttcccaggttttcctgcagccattgagctcaacccccgtttcatcccggagcccagcccctagttccgggatgccatcgagcccggtccccacccctcccccagacgccagtcccattcctgcaccaggagaccctagtgaggcagaagccaggttagcggagagcaggcgatggcgtccagaacggatacccggtgggactgatagccctaaaagggggccatccagttgtgcctggagtcgagattctttgttcgccggaatggagctggtcgcctgcccacgattggtaggggcaggcgctgcagccggtgagtcctgcccagatgccccaagggccccacagacatcatcacagcggacagccgcaaaagagccaccaggttccgaaccaagtgcttttgcttttttaaatgcgtag

SEQ ID NO: 239497 - protein, 316 aa, Artificial Sequence
  derived and/or modified sequence
MSLGIMEEEDLAEYFRLQYGERLLQMLQKLPNVEGASESPSIWLLEKKKETEIMHQTMVQKKKMFQRRMETLNLRWEELGVKEAQLKAHIQKSEQFIQENDQKRIRAMKKANKERELKCQHMQELTKRKQEMVALRLEHQRLSAKLKDYYIFNKYLEKVVENSEFEEIHEVIARYKTLVSMRHDLMQSAQEGQEKIERAKARLARYMEEKDDEILQQNNELARLQMRFDRARSNVIFWESRWAHIQNTAAKKTLLLGTIKMATLNLFQIVSKHLKEVTEVALEDTHKQLDMIQQFIQDRSDIWAEVKKKEQQRVRI

SEQ ID NO: 239498 - DNA, 951 bp, Artificial Sequence
  derived and/or modified sequence
atgagcctgggcatcatggaggaggaggacctggccgagtacttcagactgcagtacggcgagagactgctgcagatgctgcagaagctgcccaacgtggagggcgccagcgagagccccagcatctggctgctggagaagaagaaggagaccgagatcatgcaccagaccatggtgcagaagaagaagatgttccagagaagaatggagaccctgaacctgagatgggaggagctgggcgtgaaggaggcccagctgaaggcccacatccagaagagcgagcagttcatccaggagaacgaccagaagagaatcagagccatgaagaaggccaacaaggagagagagctgaagtgccagcacatgcaggagctgaccaagagaaagcaggagatggtggccctgagactggagcaccagagactgagcgccaagctgaaggactactacatcttcaacaagtacctggagaaggtggtggagaacagcgagttcgaggagatccacgaggtgatcgccagatacaagaccctggtgagcatgagacacgacctgatgcagagcgcccaggagggccaggagaagatcgagagagccaaggccagactggccagatacatggaggagaaggacgacgagatcctgcagcagaacaacgagctggccagactgcagatgagattcgacagagccagaagcaacgtgatcttctgggagagcagatgggcccacatccagaacaccgccgccaagaagaccctgctgctgggcaccatcaagatggccaccctgaacctgttccagatcgtgagcaagcacctgaaggaggtgaccgaggtggccctggaggacacccacaagcagctggacatgatccagcagttcatccaggacagaagcgacatctgggccgaggtgaagaagaaggagcagcagagagtgagaatctag

SEQ ID NO: 239499 - DNA, 1380 bp, Artificial Sequence
  derived and/or modified sequence
gttgctaggtaaccacatctcccataactgccccagcacatcgtcctgagccgcccaacctgtctccagccaccttctgtggagtctcaaactccatcatctgtgggaccctgtaggccgaagggagaaacaagagtgcagccaccacccctgagccacctgtggctctgctacccacaatttcactgtgaagagtcagctgcctgggccgtgaggtcactgccaccatgagtctgggcatcatggaagaggaagacctggccgagtacttccggctgcagtatggggagcggctgctgcagatgctccagaaactccccaatgttgagggggcgtcggagtccccatccatctggctactggagaagaaaaaggagacagaaatcatgcatcaaactatggtgcagaagaagaagatgtttcagcgcagaatggaaaccctgaacctgcgctgggaggaactgggcgttaaggaagcccaactgaaggctcacatccagaagtctgagcagttcatccaggagaacgaccagaaacggatccgcgccatgaagaaagccaacaaggagcgagaactcaagtgccagcacatgcaggagctgaccaagcgcaagcaggagatggtggcgctgcggctggagcaccagcggctgagcgccaagctgaaggactactacatcttcaacaagtacctagagaaggtggtggagaactccgagttcgaggagatccatgaggtgattgcacgctacaagacgctggtgagcatgcgccacgacctcatgcagtctgcgcaggaaggccaggagaagattgagcgcgccaaggcccggctggcgcgctacatggaggaaaaggatgatgagatcctgcagcaaaacaatgagctggcaaggctgcagatgcgctttgaccgtgcccgcagcaatgtcatcttctgggaatctcgctgggcgcacatccagaacaccgcagccaagaagaccctcctgcttggcaccattaagatggccacgctgaacctcttccagatcgtgagcaagcacctgaaggaggtgactgaggtggcactggaggacacccacaagcagctggacatgatccagcaatttatccaagaccggtcggacatctgggcagaggtgaaaaagaaggaacaacagcgagtccggatttaaggaggcagccttgttccagaatgtcctgagacagagatcgtgaaagaagaagtcgtgagcctgcggtccagtcagtccagctcgggaccgatgcctgctgtgccttcctgctgagggacacctgcttattttcccccgtgggcctcactctatccctgaaaacagtgaatgttatatgaagtttgttctcaagttctctcta

SEQ ID NO: 239500 - DNA, 951 bp, Artificial Sequence
  derived and/or modified sequence
atgagccttgggatcatggaggaagaagatctggccgaatattttcggctccagtatggcgaacggcttctgcagatgcttcaaaaactccccaacgtggaaggggcaagtgagtcgcctagtatttggctcctggagaagaaaaaggaaactgaaatcatgcatcagacaatggtccagaagaaaaaaatgttccagaggcggatggaaaccctcaacttaagatgggaagaactcggtgtaaaggaggctcagcttaaagctcacattcaaaaaagcgagcagttcatacaggaaaacgaccagaagagaatcagggctatgaaaaaggccaacaaagagagggaacttaagtgccaacatatgcaggaactcaccaagcgaaaacaggagatggtggccctgagacttgaacatcagagactcagcgccaagctgaaagattattacattttcaacaaatatctggaaaaggtagtggagaattctgagtttgaggaaattcatgaagtgatcgcccggtacaagaccttggtctcgatgcgacacgatttgatgcagtcagctcaagagggccaggaaaagattgagagagccaaagcaaggctggcgagatatatggaggagaaggatgatgagatactgcaacagaataatgagttagcacgccttcaaatgcgattcgaccgcgctcggagcaacgtaatcttttgggagagcaggtgggcccatatccagaatacagccgccaagaagacactgttgttggggaccatcaaaatggccacgctgaacctgttccagatagtgagcaagcacttgaaggaggttactgaggtggcactggaggacacccataagcaactcgacatgatccaacagtttatccaggataggtccgacatctgggcggaggtgaaaaagaaggaacagcaaagagtcaggatttag

SEQ ID NO: 239501 - DNA, 951 bp, Artificial Sequence
  derived and/or modified sequence
atgagcctgggcatcatggaggaggaggacctggccgagtacttccggctgcagtatggagagcggctgctgcagatgctgcagaagctgcccaacgtggagggcgccagcgagagccccagcatctggctgctggagaagaagaaggagacagagatcatgcaccagaccatggtgcagaagaagaagatgttccagaggaggatggagaccctgaacctgcgctgggaggagctgggcgtgaaggaggcccagctgaaggcccacatccagaagtctgagcagttcatccaggagaatgaccagaagaggatccgggccatgaagaaggccaacaaggagcgggagctgaagtgccagcacatgcaggagctgaccaagaggaagcaggagatggtggccctgcggctggagcaccagaggctgagcgccaagctgaaggactactacatcttcaacaagtacctggagaaggtggtggagaacagcgagtttgaggagatccatgaagtcatcgcccgctacaagaccctggtgtccatgagacatgacctgatgcagagcgcccaggagggccaggagaagattgaaagagccaaggcccggctggcccgctacatggaggagaaggatgatgagatcctgcagcagaacaatgagctggcccggctgcagatgagatttgaccgggcccggagcaatgtcatcttctgggagagccgctgggcccacatccagaacacagctgccaagaagaccctgctgctgggcaccatcaagatggccaccctgaacctcttccagatcgtgtccaagcacctgaaggaggtgacagaggtggccctggaggacacccacaagcagctggacatgatccagcagttcatccaggacagaagtgacatctgggccgaggtgaagaagaaggagcagcagagggtgcgcatctag

SEQ ID NO: 239502 - DNA, 951 bp, Artificial Sequence
  derived and/or modified sequence
atgagcctgggcatcatggaggaggaggacctggccgagtacttccgactccagtacggggagagattgctgcaaatgctgcaaaagctccctaatgtcgaaggagccagtgagtccccctctatctggctgctggagaagaagaaggaaaccgagatcatgcatcagacaatggtccaaaaaaaaaagatgtttcagcgccggatggaaaccctgaatctccgttgggaagagctgggcgtgaaggaggcccagcttaaggcccacatacagaaatccgagcagttcattcaggaaaacgatcagaagaggattcgtgcaatgaaaaaggcaaacaaggaaagagaacttaagtgccagcacatgcaagaactcaccaaacggaagcaagagatggtggccctccgactggaacaccagcgcctgagcgctaaattaaaagattactatatatttaacaagtatttggagaaggtcgtagaaaatagtgaatttgaggagatccacgaagtgatcgccagatacaagactcttgtgtctatgagacacgacctgatgcagagcgcccaggagggacaggagaagatcgagcgtgctaaggcacggttggcccgttacatggaagagaaagacgacgaaattctccagcagaataatgagctagcccggttgcaaatgcgctttgatcgcgctcgatccaacgtcattttttgggaatcacgttgggcgcatatccagaacaccgcagcaaaaaagacactactgctcggcaccatcaagatggctaccttaaacctgtttcagatcgtgtccaaacatctgaaagaggtcacggaggtggctctggaagatactcacaagcagctggatatgatccagcaattcatacaggacagatcagatatctgggcggaagtgaaaaagaaggagcagcaaagggtgcgaatatag

SEQ ID NO: 239503 - DNA, 951 bp, Artificial Sequence
  derived and/or modified sequence
atgtccctcgggataatggaggaggaagacctggctgaatacttcagacttcaatacggagaaagactgctacagatgctgcagaaattgccgaacgtggagggagcatctgaatcaccttctatttggctgttggagaagaagaaagagacggagatcatgcatcagacgatggtgcaaaagaagaagatgtttcagagacgcatggaaacattgaatcttcggtgggaagaattgggggtgaaagaagcccagctgaaagcacacattcaaaaaagcgaacaattcattcaagagaatgaccagaagagaatccgggctatgaagaaggctaataaagaacgggaactcaaatgccaacacatgcaagaattaacgaaacgaaagcaggaaatggtggctctgcgactggaacaccaacgcctatctgcaaaactgaaggattactacatctttaataagtatttagaaaaggtggtcgagaactccgagttcgaggaaattcatgaggtgatcgccagatataagactctggtgagtatgaggcatgatctcatgcagtccgcacaggaaggccaggaaaaaattgagagggcgaaagcgaggctcgccaggtatatggaagagaaggacgacgagattctgcagcagaacaacgagctcgccaggctgcaaatgaggttcgatagagcccgaagtaacgtgattttctgggaaagccgctgggcccatattcagaacacggccgctaaaaagaccctcctccttgggaccatcaagatggcaacgttaaatctgttccagatcgtatctaaacacctcaaggaagttaccgaggtggcactcgaagacacccacaaacaattagacatgatacagcagtttatccaggataggtcggacatatgggctgaagtcaagaaaaaggaacagcagagagtgcggatatag

SEQ ID NO: 239504 - protein, 1061 aa, Artificial Sequence
  derived and/or modified sequence
MLRTAGRDGLCRLSTYLEELEAVELKKFKLYLGTATELGEGKIPWGSMEKAGPLEMAQLLITHFGPEEAWRLALSTFERINRKDLWERGQREDLVRDTPPGGPSSLGNQSTCLLEVSLVTPRKDPQETYRDYVRRKFRLMEDRNARLGECVNLSHRYTRLLLVKEHSNPMQVQQQLLDTGRGHARTVGHQASPIKIETLFEPDEERPEPPRTVVMQGAAGIGKSMLAHKVMLDWADGKLFQGRFDYLFYINCREMNQSATECSMQDLIFSCWPEPSAPLQELIRVPERLLFIIDGFDELKPSFHDPQGPWCLCWEEKRPTELLLNSLIRKKLLPELSLLITTRPTALEKLHRLLEHPRHVEILGFSEAERKEYFYKYFHNAEQAGQVFNYVRDNEPLFTMCFVPLVCWVVCTCLQQQLEGGGLLRQTSRTTTAVYMLYLLSLMQPKPGAPRLQPPPNQRGLCSLAADGLWNQKILFEEQDLRKHGLDGEDVSAFLNMNIFQKDINCERYYSFIHLSFQEFFAAMYYILDEGEGGAGPDQDVTRLLTEYAFSERSFLALTSRFLFGLLNEETRSHLEKSLCWKVSPHIKMDLLQWIQSKAQSDGSTLQQGSLEFFSCLYEIQEEEFIQQALSHFQVIVVSNIASKMEHMVSSFCLKRCRSAQVLHLYGATYSADGEDRARCSAGAHTLLVQLPERTVLLDAYSEHLAAALCTNPNLIELSLYRNALGSRGVKLLCQGLRHPNCKLQNLRLKRCRISSSACEDLSAALIANKNLTRMDLSGNGVGFPGMMLLCEGLRHPQCRLQMIQLRKCQLESGACQEMASVLGTNPHLVELDLTGNALEDLGLRLLCQGLRHPVCRLRTLWLKICRLTAAACDELASTLSVNQSLRELDLSLNELGDLGVLLLCEGLRHPTCKLQTLRLGICRLGSAACEGLSVVLQANHNLRELDLSFNDLGDWGLWLLAEGLQHPACRLQKLWLDSCGLTAKACENLYFTLGINQTLTDLYLTNNALGDTGVRLLCKRLSHPGCKLRVLWLFGMDLNKMTHSRLAALRVTKPYLDIGC

SEQ ID NO: 239505 - protein, 1004 aa, Artificial Sequence
  derived and/or modified sequence
MLRTAGRDGLCRLSTYLEELEAVELKKFKLYLGTATELGEGKIPWGSMEKAGPLEMAQLLITHFGPEEAWRLALSTFERINRKDLWERGQREDLVRDTPPGGPSSLGNQSTCLLEVSLVTPRKDPQETYRDYVRRKFRLMEDRNARLGECVNLSHRYTRLLLVKEHSNPMQVQQQLLDTGRGHARTVGHQASPIKIETLFEPDEERPEPPRTVVMQGAAGIGKSMLAHKVMLDWADGKLFQGRFDYLFYINCREMNQSATECSMQDLIFSCWPEPSAPLQELIRVPERLLFIIDGFDELKPSFHDPQGPWCLCWEEKRPTELLLNSLIRKKLLPELSLLITTRPTALEKLHRLLEHPRHVEILGFSEAERKEYFYKYFHNAEQAGQVFNYVRDNEPLFTMCFVPLVCWVVCTCLQQQLEGGGLLRQTSRTTTAVYMLYLLSLMQPKPGAPRLQPPPNQRGLCSLAADGLWNQKILFEEQDLRKHGLDGEDVSAFLNMNIFQKDINCERYYSFIHLSFQEFFAAMYYILDEGEGGAGPDQDVTRLLTEYAFSERSFLALTSRFLFGLLNEETRSHLEKSLCWKVSPHIKMDLLQWIQSKAQSDGSTLQQGSLEFFSCLYEIQEEEFIQQALSHFQVIVVSNIASKMEHMVSSFCLKRCRSAQVLHLYGATYSADGEDRARCSAGAHTLLVQLPERTVLLDAYSEHLAAALCTNPNLIELSLYRNALGSRGVKLLCQGLRHPNCKLQNLRLKRCRISSSACEDLSAALIANKNLTRMDLSGNGVGFPGMMLLCEGLRHPQCRLQMIQLRKCQLESGACQEMASVLGTNPHLVELDLTGNALEDLGLRLLCQGLRHPVCRLRTLWLKICRLTAAACDELASTLSVNQSLRELDLSLNELGDLGVLLLCEGLRHPTCKLQTLRLGICRLGSAACEGLSVVLQANHNLRELDLSFNDLGDWGLWLLAEGLQHPACRLQKLWLFGMDLNKMTHSRLAALRVTKPYLDIGC

SEQ ID NO: 239506 - DNA, 3015 bp, Artificial Sequence
  derived and/or modified sequence
atgctgagaaccgccggcagagacggcctgtgcagactgagcacctacctggaggagctggaggccgtggagctgaagaagttcaagctgtacctgggcaccgccaccgagctgggcgagggcaagatcccctggggcagcatggagaaggccggccccctggagatggcccagctgctgatcacccacttcggccccgaggaggcctggagactggccctgagcaccttcgagagaatcaacagaaaggacctgtgggagagaggccagagagaggacctggtgagagacaccccccccggcggccccagcagcctgggcaaccagagcacctgcctgctggaggtgagcctggtgacccccagaaaggacccccaggagacctacagagactacgtgagaagaaagttcagactgatggaggacagaaacgccagactgggcgagtgcgtgaacctgagccacagatacaccagactgctgctggtgaaggagcacagcaaccccatgcaggtgcagcagcagctgctggacaccggcagaggccacgccagaaccgtgggccaccaggccagccccatcaagatcgagaccctgttcgagcccgacgaggagagacccgagccccccagaaccgtggtgatgcagggcgccgccggcatcggcaagagcatgctggcccacaaggtgatgctggactgggccgacggcaagctgttccagggcagattcgactacctgttctacatcaactgcagagagatgaaccagagcgccaccgagtgcagcatgcaggacctgatcttcagctgctggcccgagcccagcgcccccctgcaggagctgatcagagtgcccgagagactgctgttcatcatcgacggcttcgacgagctgaagcccagcttccacgacccccagggcccctggtgcctgtgctgggaggagaagagacccaccgagctgctgctgaacagcctgatcagaaagaagctgctgcccgagctgagcctgctgatcaccaccagacccaccgccctggagaagctgcacagactgctggagcaccccagacacgtggagatcctgggcttcagcgaggccgagagaaaggagtacttctacaagtacttccacaacgccgagcaggccggccaggtgttcaactacgtgagagacaacgagcccctgttcaccatgtgcttcgtgcccctggtgtgctgggtggtgtgcacctgcctgcagcagcagctggagggcggcggcctgctgagacagaccagcagaaccaccaccgccgtgtacatgctgtacctgctgagcctgatgcagcccaagcccggcgcccccagactgcagcccccccccaaccagagaggcctgtgcagcctggccgccgacggcctgtggaaccagaagatcctgttcgaggagcaggacctgagaaagcacggcctggacggcgaggacgtgagcgccttcctgaacatgaacatcttccagaaggacatcaactgcgagagatactacagcttcatccacctgagcttccaggagttcttcgccgccatgtactacatcctggacgagggcgagggcggcgccggccccgaccaggacgtgaccagactgctgaccgagtacgccttcagcgagagaagcttcctggccctgaccagcagattcctgttcggcctgctgaacgaggagaccagaagccacctggagaagagcctgtgctggaaggtgagcccccacatcaagatggacctgctgcagtggatccagagcaaggcccagagcgacggcagcaccctgcagcagggcagcctggagttcttcagctgcctgtacgagatccaggaggaggagttcatccagcaggccctgagccacttccaggtgatcgtggtgagcaacatcgccagcaagatggagcacatggtgagcagcttctgcctgaagagatgcagaagcgcccaggtgctgcacctgtacggcgccacctacagcgccgacggcgaggacagagccagatgcagcgccggcgcccacaccctgctggtgcagctgcccgagagaaccgtgctgctggacgcctacagcgagcacctggccgccgccctgtgcaccaaccccaacctgatcgagctgagcctgtacagaaacgccctgggcagcagaggcgtgaagctgctgtgccagggcctgagacaccccaactgcaagctgcagaacctgagactgaagagatgcagaatcagcagcagcgcctgcgaggacctgagcgccgccctgatcgccaacaagaacctgaccagaatggacctgagcggcaacggcgtgggcttccccggcatgatgctgctgtgcgagggcctgagacacccccagtgcagactgcagatgatccagctgagaaagtgccagctggagagcggcgcctgccaggagatggccagcgtgctgggcaccaacccccacctggtggagctggacctgaccggcaacgccctggaggacctgggcctgagactgctgtgccagggcctgagacaccccgtgtgcagactgagaaccctgtggctgaagatctgcagactgaccgccgccgcctgcgacgagctggccagcaccctgagcgtgaaccagagcctgagagagctggacctgagcctgaacgagctgggcgacctgggcgtgctgctgctgtgcgagggcctgagacaccccacctgcaagctgcagaccctgagactgggcatctgcagactgggcagcgccgcctgcgagggcctgagcgtggtgctgcaggccaaccacaacctgagagagctggacctgagcttcaacgacctgggcgactggggcctgtggctgctggccgagggcctgcagcaccccgcctgcagactgcagaagctgtggctgttcggcatggacctgaacaagatgacccacagcagactggccgccctgagagtgaccaagccctacctggacatcggctgctag

SEQ ID NO: 239507 - DNA, 3186 bp, Artificial Sequence
  derived and/or modified sequence
atgctgcgaacggccggacgggacggcctatgtcgcctctctacatatctggaagagctagaggccgttgagcttaagaagttcaagctgtacctcggcactgcaacagaattaggtgagggcaaaatcccttggggcagtatggagaaggcgggcccccttgagatggcccagctcctaattactcattttggcccagaggaagcctggcgtttggccctctccaccttcgaacggatcaacaggaaggacctgtgggagaggggtcaaagggaggacctagtccgcgacacaccgccggggggaccctccagccttggaaatcaatctacgtgcctacttgaggtgtctttagttacacctaggaaggacccacaagagacatatcgggactatgtcaggaggaagttccggctgatggaagataggaacgcccgtcttggagagtgcgtcaatctctctcatcgatacaccaggcttttgctagtgaaagaacactccaatcccatgcaagtccagcagcagcttctcgatacaggcagggggcatgcgaggaccgttggtcaccaagcgtcgcctattaaaatcgagacattgttcgaaccagatgaagagcgtcccgagcctcccaggacggtcgtcatgcaaggcgcagccgggatagggaaaagcatgctggctcacaaagtcatgctagactgggccgatggcaagctatttcaggggagattcgattatctgttctatataaattgccgggaaatgaatcagagtgcgaccgaatgtagcatgcaggaccttattttttcttgctggcccgagccatccgccccattacaggagctgatacgcgtgccagagaggttgctattcatcattgacgggttcgacgagctgaaaccctcattccacgatccccaggggccatggtgtctgtgctgggaggaaaagcggcctactgaactgctcctcaactccttgatccggaaaaagctattacctgagctgtccttgttaattaccactcggcccactgctcttgagaaactgcacagactgttggagcatcctagacacgtggagatcctgggattctccgaggctgagcggaaagaatatttctataagtactttcataacgcagaacaggccggtcaagtgtttaactacgtgagggataacgagccgttattcacaatgtgcttcgtgccgctagtatgttgggttgtctgtacatgtctgcagcagcagctggagggcggaggtctgttgcgacaaactagccgaaccacaactgccgtgtatatgctctatctgctgtcactgatgcagccaaaacctggcgccccaagattgcagccaccccctaaccagcgaggtctctgcagcctggccgccgacggtctgtggaaccagaaaatcttatttgaagagcaggacctgaggaagcatgggcttgatggtgaagacgtgtccgccttcctgaatatgaatatcttccagaaggacattaattgcgaacgatattattcctttatccacctctctttccaggagtttttcgcagcaatgtactacattctggatgaaggagaggggggcgccggtcctgatcaggatgtgactcggctattgaccgaatatgccttcagcgagcgatcattcctggccctgaccagtcggtttctgttcggattactgaatgaagagacgcgcagccatctggaaaagtctttgtgctggaaggtttcaccccacattaaaatggatctcttacaatggatacaaagtaaggcccagtctgacgggagcaccctgcagcaggggtcactcgagttcttttcctgtctgtatgaaatccaggaggaggagtttatccagcaggccttgtcacatttccaggtgatagtcgtctctaatattgcctccaaaatggaacacatggtatccagcttctgcctgaagcggtgccggtccgcccaggtgctgcacttgtatggtgccacatattctgctgacggggaggaccgggcgcgatgtagtgcgggggcccacacccttttggtgcagctacccgaaagaacggtcctgttagacgcatatagtgaacatctagccgcggccttgtgtacaaacccaaatctgatcgaactctccttatacaggaacgctctggggtcccgtggcgtgaaactcctgtgccagggtctgaggcacccgaattgtaaattgcagaacctaagactcaagcgttgccggatctcttctagcgcttgtgaagacctctcagccgctctgatagctaacaagaatctcacaaggatggacttgagtgggaatggtgtgggttttcccggaatgatgctgttatgcgagggtctccggcacccacagtgtaggctccaaatgattcagctgcggaagtgccagctggagtctggtgcttgccaagaaatggcgtccgttttgggaactaacccacacctggtagagctcgatctgaccggcaacgcgttagaagacctagggcttaggcttctatgccaggggctgaggcatccggtttgccggctaagaacgctttggctgaagatttgcaggttgaccgctgcagcctgcgatgaactggcaagcactctgtccgtaaatcaaagtctgcgggaactggatttgagtctcaacgaactgggcgacctaggggtgctgttgctgtgtgaagggttgaggcaccccacatgcaagcttcagaccctgcgtttaggcatttgcagattggggagcgcagcgtgtgaggggttgtctgtggtgctgcaggctaaccacaatttacgcgagcttgacctttcattcaatgacctcggggattggggcttgtggttgcttgccgaaggactgcagcatcccgcgtgccgcctgcagaagttgtggcttgatagctgcgggctgaccgccaaagcatgcgaaaatctatatttcacgttaggaataaaccagactttaactgatttatacctaacaaataatgccctgggcgacaccggtgtaagattgctctgcaagcgtctctcccacccgggctgcaagctccgagtgctgtggctattcgggatggatctgaacaagatgactcactcgagacttgctgcgttaagggtaacgaagccctacttagacatcggttgttag

SEQ ID NO: 239508 - DNA, 3015 bp, Artificial Sequence
  derived and/or modified sequence
atgctgcgtaccgcagggcgcgacggtctgtgtcgcctgagcacttacctggaggagttagaagcagtggaactcaaaaagtttaagctctatctgggcaccgccaccgaactgggagagggaaaaatcccttggggatccatggagaaggctggccccttagaaatggctcagctgctgatcacccactttggcccggaggaagcgtggcgactggccttatccaccttcgagcggattaatcggaaagatctctgggaacgtggacagcgggaggatctggttagagacaccccccctggcggcccgagctcgctgggcaaccagtcaacatgcctgctagaggtgtctttggtcacgcctagaaaggaccctcaagaaacctatcgcgactacgtgcgccgaaagtttcggcttatggaagatagaaatgctaggctcggagagtgcgtcaacttgtcacaccgatacacacgactcctgctggtcaaggagcattctaatcccatgcaggtgcagcagcagttgctcgacactggtcggggccacgccagaaccgtcggacaccaggcttctcccattaagatcgaaactcttttcgagcccgatgaagagcgacccgagcccccccgcaccgttgtcatgcaaggcgccgcaggaattggcaagtccatgctggctcataaagttatgctggactgggccgatggcaagctgtttcagggcaggtttgactatctgttctatattaactgcagagaaatgaaccagtccgctaccgaatgttccatgcaggatctgatattctcctgttggcccgagccaagtgcccctctgcaagagttgatcagggtgcccgagagacttctgtttatcattgacggcttcgatgagttaaaaccttcatttcatgacccgcagggcccgtggtgtctctgctgggaggagaaacgtcctacggaacttctcttaaattccctaatcagaaagaaactacttcccgagcttagtctccttattaccacccgtcctaccgccctggagaaactgcaccgcttactggagcacccgagacacgtagaaatcctggggttcagtgaggccgaaaggaaggagtacttttacaagtactttcataacgcagaacaggccggtcaggttttcaactatgtccgagacaatgagcccctcttcacgatgtgctttgttccactcgtgtgctgggtggtatgtacttgcctgcagcagcagcttgaaggtggggggctgctaaggcaaaccagccggaccactacagccgtctacatgctgtacctgttgagtctgatgcagccgaagcctggagcccctcgcctccagcctcctccgaaccagaggggactctgcagccttgccgcagacggactgtggaaccagaagatactcttcgaggaacaagacctacgaaagcacggtcttgacggagaggatgtgagcgcattccttaacatgaacattttccagaaagatataaattgcgaacggtattactctttcatacatttatccttccaggagttttttgccgctatgtactatattctggatgagggggaaggcggagctgggcccgaccaggacgtgacccgtttactgactgagtacgcctttagtgagagatctttcctggcgctcacatctcgctttctgtttggtttactgaacgaggaaacaaggtcccatttagagaagagtttatgctggaaagtttctccccacatcaaaatggatcttttgcagtggattcagtccaaggcgcaatccgatgggtccaccctccaacaggggtcactggagttcttcagttgtttatacgagattcaggaagaagagtttatccagcaggcccttagccacttccaagtgatcgtcgtgagcaacatcgccagcaagatggaacatatggtgtcatctttttgtctgaagaggtgtcgctccgcccaggtcttgcacctatatggcgccacctatagcgcagacggagaggatcgtgctcgctgttcagcgggggcccacaccctcttggtacagcttcccgagcggactgtcttactggatgcctatagtgaacatttggccgctgccctttgtactaaccccaacttgattgaactgtcactgtacaggaatgctttaggctctaggggcgtgaagctgctctgccaagggctacgtcaccctaattgcaagctgcaaaacctgaggcttaagaggtgtaggatcagctcttctgcctgcgaggacctgagcgccgcattgatagccaataagaatctcactcggatggacctgtccggcaacggagtgggattcccaggtatgatgctgctgtgcgaaggccttcggcatccccaatgccgcctccaaatgattcaactaagaaaatgccaattggaatcaggcgcgtgccaggaaatggctagtgtgcttggcacaaaccctcaccttgtagagcttgacctaactggaaacgccctcgaggatctggggctccggctgttatgccaggggctcagacaccccgtgtgcagactgcgaaccctgtggctgaagatctgtcgactgaccgcagcagcatgtgacgagcttgcaagcacactgtctgtcaatcagtctcttagagaacttgacctttcactaaacgagctcggggacttgggggtgctgttgctgtgtgagggacttcggcaccctacttgtaagttacaaaccctgcgactgggcatctgccgtctgggctcagccgcatgcgaagggttatctgtggttctgcaggccaaccataacctgcgcgagctggatttgtcattcaatgacttaggtgactggggtctttggttgctggctgagggtctgcagcacccggcctgcaggctgcaaaaactttggctcttcggaatggacctcaacaagatgacacacagccgactcgcggctttgcgggtgaccaagccttatctggatatcggctgttag

SEQ ID NO: 239509 - DNA, 3186 bp, Artificial Sequence
  derived and/or modified sequence
atgctgaggacagctggaagagatggcctgtgccgcctgagcacctacctggaggagctggaggccgtggagctgaagaagttcaagctgtacctgggcacagccacagagctgggggagggcaagatcccctggggctccatggagaaggccggccccctggagatggcccagctgctgatcacccacttcggccctgaggaggcctggaggctggccctgagcacctttgagcgcatcaacaggaaggacctgtgggagcggggccagcgggaggacctggtgcgggacaccccacctgggggccccagcagcctgggcaaccagagcacctgcctgctggaggtgtccctggtgacccccaggaaggacccccaggagacctacagagattatgtgcggaggaagttccggctgatggaggacagaaatgcccggctgggagaatgtgtgaacctgagccaccgctacacccggctgctgctggtgaaggagcacagcaaccccatgcaggtgcagcagcagctgctggacaccggccggggccacgccaggacagtgggccaccaggccagccccatcaagattgagaccctgtttgagccagatgaggagaggcctgagccccccaggacagtggtgatgcagggcgctgctggcatcggcaagtccatgctggcccacaaggtgatgctggactgggcagatggcaagctgttccagggccgctttgactacctgttctacatcaactgccgggagatgaaccagagcgccacagaatgttccatgcaggacctgatcttcagctgctggccagagcccagcgcccccctgcaggagctgatccgggtgcctgagcggctgctcttcatcattgatggctttgatgagctgaagcccagcttccatgacccccagggcccctggtgcctgtgctgggaggagaagaggcccacagagctgctgctgaacagcctcatcaggaagaagctgctgcctgagctgagcctgctgatcaccacccggcccacagccctggagaagctgcaccggctgctggagcaccccaggcatgtggagatcctgggcttcagcgaggccgagaggaaggagtacttctacaagtacttccacaatgctgagcaggccggccaggtgttcaactacgtgcgggacaatgagcccctcttcaccatgtgctttgtgcccctggtgtgctgggtggtgtgcacctgcctgcagcagcagctggagggcggcggcctgctgcggcagaccagcaggaccaccacagctgtgtacatgctgtacctgctgagcctgatgcagcccaagccaggggccccccggctgcagcccccacccaaccagaggggcctgtgcagcctggccgcagatggcctgtggaaccagaagatcctgtttgaggagcaggacctgaggaagcacggcctggatggagaagatgtgtctgccttcctgaacatgaacatcttccagaaggacatcaactgtgagcgctactacagcttcatccacctgtccttccaggagttctttgctgccatgtactacatcctggatgaaggagagggcggggccggccctgaccaggatgtgacccggctgctgacagaatatgccttcagcgagaggagcttcctggccctgaccagccgcttcctgtttggcctgctgaatgaggagaccaggagccacctggagaagagcctgtgctggaaggtgagcccccacatcaagatggacctgctgcagtggatccagagcaaggcccagagtgatggcagcaccctgcagcagggcagcctggagttcttcagctgcctgtatgagatccaggaggaggagttcatccagcaggccctgagccacttccaggtgattgtggtgagcaacatcgccagcaagatggagcacatggtgtcctccttctgcctgaagcgctgccgcagcgcccaggtgctgcacctgtatggagccacctacagcgcagatggagaagatcgggcccgctgcagcgctggggcccacaccctgctggtgcagctgcctgagaggacagtgctgctggatgcctacagcgagcacctggccgccgccctgtgcaccaaccccaacctgattgagctgagcctgtacagaaatgccctgggcagcagaggagtgaagctgctgtgccagggcctgcggcaccccaactgcaagctgcagaacctgcggctgaagcgctgccgcatcagcagcagcgcctgtgaggacctgtctgctgccctgattgccaacaagaacctgaccaggatggacctgtctggaaatggagtgggcttccctggcatgatgctgctgtgtgagggcctgcggcacccccagtgccgcctgcagatgatccagctgaggaagtgccagctggagagcggggcctgccaggagatggcctctgtgctgggcaccaacccccacctggtggagctggacctgactggaaatgccctggaggacctgggcctgcggctgctgtgccagggcctgcggcaccctgtgtgccgcctgcggaccctgtggctgaagatctgccgcctgacagctgctgcctgtgatgagctggccagcaccctgtctgtgaaccagagcctgcgggagctggacctgagcctgaatgagctgggggacctgggcgtgctgctgctgtgtgagggcctgcggcaccccacctgcaagctgcagaccctgcggctgggcatctgccgcctgggcagcgctgcctgtgagggcctgtctgtggtgctgcaggccaaccacaacctgcgggagctggacctgtccttcaatgacctgggggactggggcctgtggctgctggccgagggcctgcagcacccagcctgccgcctgcagaagctgtggctggacagctgtggcctgacagccaaggcctgtgagaacctgtacttcaccctgggcatcaaccagaccctgacagacctgtacctgaccaacaatgccctgggggacacaggagtgcggctgctgtgcaagaggctgagccaccctggctgcaagctgcgggtgctgtggctgtttggcatggacctgaacaagatgacccacagccggctggccgccctgcgggtgaccaagccctacctggacatcggctgctag

SEQ ID NO: 239510 - DNA, 3015 bp, Artificial Sequence
  derived and/or modified sequence
atgctgaggacagctggaagagatggcctgtgccgcctgagcacctacctggaggagctggaggccgtggagctgaagaagttcaagctgtacctgggcacagccacagagctgggggagggcaagatcccctggggctccatggagaaggccggccccctggagatggcccagctgctgatcacccacttcggccctgaggaggcctggaggctggccctgagcacctttgagcgcatcaacaggaaggacctgtgggagcggggccagcgggaggacctggtgcgggacaccccacctgggggccccagcagcctgggcaaccagagcacctgcctgctggaggtgtccctggtgacccccaggaaggacccccaggagacctacagagattatgtgcggaggaagttccggctgatggaggacagaaatgcccggctgggagaatgtgtgaacctgagccaccgctacacccggctgctgctggtgaaggagcacagcaaccccatgcaggtgcagcagcagctgctggacaccggccggggccacgccaggacagtgggccaccaggccagccccatcaagattgagaccctgtttgagccagatgaggagaggcctgagccccccaggacagtggtgatgcagggcgctgctggcatcggcaagtccatgctggcccacaaggtgatgctggactgggcagatggcaagctgttccagggccgctttgactacctgttctacatcaactgccgggagatgaaccagagcgccacagaatgttccatgcaggacctgatcttcagctgctggccagagcccagcgcccccctgcaggagctgatccgggtgcctgagcggctgctcttcatcattgatggctttgatgagctgaagcccagcttccatgacccccagggcccctggtgcctgtgctgggaggagaagaggcccacagagctgctgctgaacagcctcatcaggaagaagctgctgcctgagctgagcctgctgatcaccacccggcccacagccctggagaagctgcaccggctgctggagcaccccaggcatgtggagatcctgggcttcagcgaggccgagaggaaggagtacttctacaagtacttccacaatgctgagcaggccggccaggtgttcaactacgtgcgggacaatgagcccctcttcaccatgtgctttgtgcccctggtgtgctgggtggtgtgcacctgcctgcagcagcagctggagggcggcggcctgctgcggcagaccagcaggaccaccacagctgtgtacatgctgtacctgctgagcctgatgcagcccaagccaggggccccccggctgcagcccccacccaaccagaggggcctgtgcagcctggccgcagatggcctgtggaaccagaagatcctgtttgaggagcaggacctgaggaagcacggcctggatggagaagatgtgtctgccttcctgaacatgaacatcttccagaaggacatcaactgtgagcgctactacagcttcatccacctgtccttccaggagttctttgctgccatgtactacatcctggatgaaggagagggcggggccggccctgaccaggatgtgacccggctgctgacagaatatgccttcagcgagaggagcttcctggccctgaccagccgcttcctgtttggcctgctgaatgaggagaccaggagccacctggagaagagcctgtgctggaaggtgagcccccacatcaagatggacctgctgcagtggatccagagcaaggcccagagtgatggcagcaccctgcagcagggcagcctggagttcttcagctgcctgtatgagatccaggaggaggagttcatccagcaggccctgagccacttccaggtgattgtggtgagcaacatcgccagcaagatggagcacatggtgtcctccttctgcctgaagcgctgccgcagcgcccaggtgctgcacctgtatggagccacctacagcgcagatggagaagatcgggcccgctgcagcgctggggcccacaccctgctggtgcagctgcctgagaggacagtgctgctggatgcctacagcgagcacctggccgccgccctgtgcaccaaccccaacctgattgagctgagcctgtacagaaatgccctgggcagcagaggagtgaagctgctgtgccagggcctgcggcaccccaactgcaagctgcagaacctgcggctgaagcgctgccgcatcagcagcagcgcctgtgaggacctgtctgctgccctgattgccaacaagaacctgaccaggatggacctgtctggaaatggagtgggcttccctggcatgatgctgctgtgtgagggcctgcggcacccccagtgccgcctgcagatgatccagctgaggaagtgccagctggagagcggggcctgccaggagatggcctctgtgctgggcaccaacccccacctggtggagctggacctgactggaaatgccctggaggacctgggcctgcggctgctgtgccagggcctgcggcaccctgtgtgccgcctgcggaccctgtggctgaagatctgccgcctgacagctgctgcctgtgatgagctggccagcaccctgtctgtgaaccagagcctgcgggagctggacctgagcctgaatgagctgggggacctgggcgtgctgctgctgtgtgagggcctgcggcaccccacctgcaagctgcagaccctgcggctgggcatctgccgcctgggcagcgctgcctgtgagggcctgtctgtggtgctgcaggccaaccacaacctgcgggagctggacctgtccttcaatgacctgggggactggggcctgtggctgctggccgagggcctgcagcacccagcctgccgcctgcagaagctgtggctgtttggcatggacctgaacaagatgacccacagccggctggccgccctgcgggtgaccaagccctacctggacatcggctgctag

SEQ ID NO: 239511 - DNA, 3186 bp, Artificial Sequence
  derived and/or modified sequence
atgctgcggaccgccggccgggacggcctgtgccggctgagcacctatctcgaggagctcgaggccgtggaactaaaaaagtttaagctatacctcggtacagccactgagttgggagaagggaagatcccttgggggagtatggagaaagccggcccactggaaatggcgcaactcctcattacccatttcgggccggaggaggcttggagactggcattatcaacattcgagagaatcaatcggaaggatctttgggaaagagggcagagagaggacctcgtacgggacaccccccccggtgggccctcttctttagggaaccagagcacctgcctccttgaggtttcgcttgtgactccaaggaaggacccacaagagacataccgagactacgtgcgcagaaagttccgactaatggaggaccggaacgctcggcttggagagtgcgttaacttaagccaccgctatactcggctgcttttagtgaaagagcactcaaatcctatgcaggtccaacaacagcttctggataccggaagggggcacgctaggactgtcggtcatcaggcgtctccaatcaagattgaaaccctctttgaaccggacgaggaaagacctgaaccacctcggactgtcgtgatgcagggggccgccggaatagggaagtctatgctggcccataaggtgatgcttgattgggcagatgggaaactgttccagggaaggttcgattatttgttttacatcaactgtcgcgaaatgaatcagtccgccacggaatgctccatgcaagatctcatcttttcttgttggcctgagcctagtgctccgttgcaagagttaatccgcgttcctgagcgcttgttgttcatcattgatggcttcgatgagttgaagccgagtttccatgacccgcaaggtccttggtgtctgtgctgggaggaaaagcgacctacagagttgcttctgaattcactgatacggaaaaagctccttcccgagctctccctactcattactacgcggcctaccgcgctggaaaaactgcataggctgctggagcaccctaggcatgtggagatacttggattttcagaggcagagcgtaaagagtacttttacaaatacttccataacgctgaacaggccggtcaggtttttaattacgtccgcgataatgaacctctgttcacaatgtgtttcgtaccattggtgtgctgggtggtatgtacatgccttcaacaacagctcgaaggaggaggcctactgaggcagaccagccggacaactacagcagtgtacatgctgtacttactctctctcatgcagccaaagccaggagcgcccaggttacagcctcctccaaaccaacgcggtctctgctccctcgccgcggacggtctctggaaccagaagatcctttttgaagagcaagacctgaggaaacacggattagacggcgaggatgtatccgctttcctaaacatgaacatttttcaaaaagatatcaactgcgagaggtactacagcttcattcatctctctttccaagagttctttgcagcaatgtattacattttggacgagggggaagggggtgcaggtcctgatcaggatgtcactcgccttttgactgaatacgcgttcagtgagagatctttccttgccctcacaagtcggttcctcttcggcctcttgaacgaggagaccagaagtcacctagagaagtctctgtgttggaaggtgtccccgcatattaagatggacttgttacagtggatccagtccaaggctcagtctgacggaagcactctgcagcaaggtagcttagaattctttagttgtctctacgaaattcaagaggaggagtttatccagcaagctctgtctcattttcaggtcatcgtcgttagtaacatcgcttcaaaaatggaacacatggtttctagcttctgcctcaagcgttgccgatcggctcaggtgctccacttatatggtgcaacctatagcgccgacggggaagatagggcaaggtgttctgcaggcgcccatacattgcttgtacagttgccagaacggaccgtgttactggacgcatactcagagcacctggccgcggccctgtgtactaaccccaaccttattgagctgagcctgtacagaaacgccttgggcagcaggggtgtgaagctactgtgtcaagggctccgtcaccctaattgtaagctgcagaatctccgcttgaagcgctgccgcatctcttctagcgcctgcgaggacctgtccgctgccctgattgctaataaaaacctgactagaatggacttatcaggtaacggcgttggcttcccaggaatgatgctactgtgtgagggcttacgccatcctcagtgtaggcttcagatgatccaacttcgaaagtgccaactcgaaagtggcgcatgtcaggagatggcttccgtgttgggaactaaccctcatctcgtggagttggaccttactgggaatgctctggaggatctcggcttaagattgttgtgccagggtctgcgccacccagtatgccggctgcgaaccttgtggctcaagatctgccgcctcaccgccgccgcctgtgacgaacttgcttccacgctttctgttaaccaaagcctcagggagttggacctaagcctcaacgagctgggtgacctaggggtcttgcttctgtgtgagggactgaggcaccccacctgtaaacttcaaactctgaggctggggatctgccggctcgggtccgctgcctgcgagggacttagtgtggtactgcaggctaaccacaacctgagagagctcgatctaagtttcaacgacctcggcgactggggattgtggctactggccgaggggctgcagcatcctgcctgcaggcttcagaagctctggctggattcctgtggcctgactgctaaggcttgtgagaatctctatttcaccctgggaattaatcaaaccctgacggatttgtatctcaccaataacgcattgggggacacgggcgtccggttgctatgcaagcgactgtctcatcccggctgcaaattgcgtgttctgtggctcttcggcatggatctcaataagatgacgcattctcggttggcggcactcagggttaccaagccatacctagacattggctgctag

SEQ ID NO: 239512 - DNA, 3015 bp, Artificial Sequence
  derived and/or modified sequence
atgctgcggaccgccggccgggacggcctgtgccggctgagcacctacctggaggaactcgaggccgtggagctgaaaaagtttaagctctatttggggaccgccaccgagctgggcgaaggcaaaatcccctggggctctatggagaaggctggacctctcgagatggcccagcttctgatcacacacttcggcccagaagaggcttggcgactggccctgtctacatttgaacgcattaataggaaagatctgtgggagcgcgggcagcgtgaggatctggtccgcgataccccccccgggggcccctcttcccttggaaaccagtctacctgtctgttagaagttagcctcgtcactcccagaaaggacccacaagagacttaccgagattacgtgcgcagaaaatttcgattaatggaggatcggaacgccagattgggcgagtgcgttaacctgagccacagatacacaaggctgctgctcgtgaaggagcattccaaccccatgcaagtgcagcagcaactgctggacacagggagggggcacgcacgaacggttgggcaccaggcatccccaattaagatcgaaaccctgtttgagcccgacgaggagcggcctgaaccccctcgtaccgttgtcatgcagggcgctgcgggcatcgggaagtcaatgctcgctcataaagtgatgctcgactgggcggacggcaagctttttcagggaagattcgactatctgttttacatcaactgtagagagatgaaccaaagcgccacggagtgctctatgcaagatctaatcttctcttgctggccagaaccctcagctccactccaggaactgattcgggtgccagagcggctactgttcataatcgacggtttcgatgagctaaagccctccttccatgatccccagggaccttggtgcctttgctgggaggaaaagagacccaccgaacttttattgaatagcctcattcgaaagaaattattaccagagctgtccttgttaatcaccacaaggcctaccgccctggagaagctgcataggctgcttgagcatccccgccatgtcgagattctggggttcagcgaagcagagcgaaaagaatatttctataagtacttccacaatgctgaacaggccgggcaagtgttcaactacgtcagggataatgagcccctgtttaccatgtgtttcgtcccattggtgtgctgggttgtctgtacgtgtctgcagcagcagctggaggggggtggactactgagacagacatccagaaccacaacagctgtatacatgctctatctcctgagcctcatgcaacctaagcccggtgcccctcgtttgcagcccccacctaaccagcgagggttgtgttccttggcggccgatggcctctggaaccagaagatcctttttgaggagcaggatctacgcaagcacgggttagacggggaggacgtctcggcattcttgaatatgaatatctttcagaaagacatcaattgcgaaagatattactccttcattcacctgagtttccaggagttctttgctgcaatgtattacatcctcgacgagggcgaagggggggcggggccggatcaggatgtgacacgcctcttaacggaatatgcatttagcgagcgctctttccttgccttgacttcacgttttctctttggactcctgaatgaagaaactagatcacacctggagaaaagcctgtgttggaaagtaagccctcatatcaagatggatctgttgcagtggattcagtcaaaagcccagtcagatggctccaccctgcagcaaggttccctggagttcttctcctgcctctatgaaattcaggaggaggagttcatccagcaagccttgtctcactttcaggtgatcgtggtttccaacatcgcgagtaaaatggagcatatggttagcagcttttgtctgaaacggtgtcgaagtgctcaggtcctgcatctctacggagctacctacagcgcagatggcgaagatcgggctaggtgcagtgctggagcccataccctcctggtccagctgcccgaacggactgtcctgcttgacgcatatagcgaacacctggccgccgcactttgcactaacccaaatctgattgagttaagcctgtaccgcaacgctctggggagccgcggggtgaaattactctgccagggcttgaggcatcctaactgcaagctacagaacttacgccttaaaagatgtcggatatccagcagtgcatgtgaagacctcagtgctgctctgatcgctaataagaatctgacccgcatggacctcagtggtaacggggtaggattccctggtatgatgctactgtgtgagggtctcagacacccccagtgcagactgcagatgatccagctgcggaaatgtcagttggagagtggcgcatgccaggagatggcttctgtactcggcaccaacccccacctcgtggagttggacttgactggaaatgcattagaagaccttggccttcggcttctgtgtcagggtctgagacacccggtgtgtaggctgagaacactgtggctcaaaatctgtcgtctaactgccgcggcgtgcgacgagctggcgagtaccttgagtgtgaaccagagtcttagggagcttgacctgagtctgaacgaattaggggatctaggggtgctattattgtgtgaggggcttagacacccaacttgtaagctacagacgctaaggctcggaatttgcagactcggatcagccgcgtgtgagggactgagcgtggtcttgcaggctaatcataatctgcgagaactggatctctccttcaatgacctaggtgattggggtctgtggctgctggccgaaggtctacagcatccagcctgcaggctccaaaaactctggctgtttggaatggaccttaataagatgactcattccagattagcggctctcagggtcacaaaaccctatctggacattgggtgttag

SEQ ID NO: 239513 - DNA, 3186 bp, Artificial Sequence
  derived and/or modified sequence
atgctgagaactgcaggacgcgacgggttgtgtagacttagcacgtatctcgaagagcttgaggctgttgagctcaaaaagttcaaactgtacttaggaacagctactgaactgggggaaggaaaaattccatggggtagtatggagaaggcagggccactcgaaatggcccaactactcatcacccacttcggccctgaggaagcatggagactggccctgtccactttcgaacgcatcaaccggaaagacctgtgggaaagaggccagagggaagacctagtacgagacactccacctggcggaccttcttctctgggtaaccaatctacatgcctgctggaagtcagcctggtgacgcctaggaaagatccccaggaaacgtatcgggactatgtgaggagaaagtttagattaatggaggaccgcaatgccaggctgggcgagtgtgtcaatctcagtcacagatacactcgcctgcttctggtgaaagagcactctaatcccatgcaggtgcagcagcagctgttggataccggacggggacacgcacggactgtcggtcatcaagcaagtcctattaagatagagaccctgttcgagcccgatgaggaacggccagagccgcctagaacagtcgttatgcagggtgcagccggaattgggaagagcatgttggcacataaagtaatgttagactgggctgacgggaagctgtttcagggcaggtttgattatcttttttatattaattgccgggagatgaatcaatctgccacagaatgttctatgcaggatctgatcttttcctgttggccagagcctagtgcccctctgcaggaactcatcagagtgcctgaacgcttattgttcataatcgatggcttcgatgagttgaaaccgagtttccacgatccccaggggccttggtgcctctgctgggaagagaagagacccaccgaacttctcctcaattctctcatccggaagaagctgctgcccgagctgagcctattaataacaactagacctacggctctggaaaagctgcatcggctccttgagcatcctcggcatgtggaaattcttggtttctccgaagctgagaggaaagagtatttctacaaatattttcataacgcagaacaggccggacaggtcttcaattatgttcgcgataatgaaccactgtttactatgtgtttcgttcccctcgtatgttgggtggtgtgtacttgtctgcagcagcaattggaagggggtgggctgctgaggcaaacgtcgaggactacaacggcggtctatatgctgtatctgttgtcgctgatgcaaccaaagcccggagctccgaggctgcagccgccacctaatcaacggggactgtgctcactcgcagcggacggcctttggaatcagaagatcctgttcgaagaacaggacttaaggaagcatggactagatggcgaggatgtgagcgcatttctgaacatgaatattttccaaaaagacatcaactgcgaaagatactatagcttcattcatcttagcttccaggagttcttcgccgctatgtattatattctcgacgagggtgagggtggagccggacccgaccaggatgtcactaggttacttaccgagtatgccttctccgagaggtccttcctggcccttacctcacggtttcttttcgggttgctaaacgaggagactcgcagccacctggagaaatcgctttgttggaaagtctcccctcacatcaaaatggacctcctgcagtggatccagtccaaagcccagtccgacggctccactctgcagcagggatctctggaatttttctcctgtctgtacgagatacaggaggaggaatttattcaacaagcactgagtcactttcaagtgatagtcgtcagcaatatcgccagcaagatggagcatatggtcagctcattttgtctcaagaggtgtcgcagcgcccaggtgctccatctgtacggcgcaacctatagcgcagacggcgaagatcgcgcaaggtgctccgctggggcacataccctcctggtgcaactgccagaacgcacagtgctactagatgcctactcagagcacctcgccgcagccctttgtaccaatccaaacctgatagagctgtccctctataggaatgccctggggagcaggggagtgaaattgctttgccagggtttgcggcacccgaattgtaaactgcagaacctgcggctgaaaagatgtcgtataagctcttccgcttgcgaggatttgagtgctgcccttatcgccaacaagaacctcacccgaatggatctctccgggaatggtgtggggttccctggaatgatgctgctgtgcgaggggctgaggcatccccagtgccgcttgcagatgattcagttgcggaaatgtcagttggagagcggtgcgtgccaggagatggctagcgtgcttggaactaacccccacctagtggagttggacctcacagggaacgccctggaagatctgggactgcgactgctctgtcagggtctgcggcaccctgtctgccggttgcggaccctatggctgaagatctgccggctgaccgctgcggcatgtgatgaactggctagcaccctgagcgtgaatcagtctctcagggaactcgatctttccctaaatgagcttggggatttgggagttcttttgctctgtgagggtctgcgtcaccctacctgcaagttacagacactgcgtctcggcatttgtcgactggggtccgccgcttgcgaagggctgtctgttgtcctgcaggctaatcataatttgagggaactagacctcagttttaacgacctgggcgactggggactctggctgctcgctgaggggctgcagcatcctgcttgccgactgcagaagctgtggcttgacagttgcgggctgaccgccaaggcctgtgagaatctctacttcacactcggaatcaatcagaccctgaccgacctgtatctcaccaacaacgcacttggcgatacaggcgtgcgtctgctgtgtaaacgcctgtcacatcctggatgcaagcttcgagtgctgtggctatttggcatggacttaaacaagatgacacactctaggctggcggcactgcgggtcacgaagccataccttgacatcggatgttag

SEQ ID NO: 239514 - DNA, 3015 bp, Artificial Sequence
  derived and/or modified sequence
atgctccgaacagctggtcgggatggcctttgccgccttagcacttacttggaggagctggaggcagtagagctgaagaaatttaaactctacctgggcacggcaaccgaactcggagagggaaaaattccgtgggggtccatggagaaagcaggcccactggagatggcccaactccttatcacacattttggcccagaggaagcatggaggctcgcactatctacctttgagcgaattaataggaaagatctttgggagaggggccaaagagaagacctagtgagggacacgccacccggaggaccgagctcgctggggaatcagtccacttgcctacttgaagtcagcctcgtgacaccccgaaaggatccccaggagacctacagggattacgttaggaggaagttccggctgatggaggatcgcaacgcacgtctcggcgagtgcgtgaatctgtcgcataggtatactaggcttctcctcgtcaaagaacactctaaccccatgcaagtgcagcaacagctcctggacacaggtagggggcatgctcggaccgtagggcatcaagcatcacctatcaaaatcgaaacgctgttcgagcccgacgaggaacgacctgagcctccaagaacggtggtgatgcagggagccgcaggcatcggcaaaagcatgctcgcccataaggtgatgctggattgggccgacggtaagttgtttcagggcaggttcgactacctgttttacattaattgccgtgagatgaatcagtccgctactgagtgtagcatgcaggacctgatcttttcttgctggcctgagccttctgcccctctgcaggagttgataagagtaccagaacgcctgttattcattattgacgggttcgacgaactaaagcccagtttccacgatccccaaggtccttggtgcctttgttgggaggagaaacggcctaccgagctgttgctaaacagcctcattcgtaagaagttgctacctgagctttcgctgctgataaccactcgtcccactgcactcgaaaagctgcaccgcctcctagagcaccctagacacgttgagatccttggcttctctgaggccgagcggaaagagtacttctacaagtatttccacaacgctgagcaggccggtcaagtcttcaattatgtgcgggataatgaacctctgttcaccatgtgcttcgtgccactcgtgtgctgggtcgtgtgtacatgtttacagcagcaattagaaggagggggtttactgaggcagaccagcagaacaaccaccgcagtttatatgctgtatctgctttctctgatgcaaccaaagcccggagcccctcggttacagccccctccgaaccagcggggtctgtgctctctcgctgccgatggactgtggaaccagaagattctgtttgaagaacaggatcttcgtaaacacggactcgatggagaggatgtgtcggcctttcttaacatgaacatcttccagaaggacatcaattgcgaaaggtattacagctttatccacctgtcctttcaagagttctttgctgccatgtattacatcctggatgaaggcgaagggggtgccggtccagatcaggatgtgacgcggctcctgacggaatacgccttttccgagaggagtttcctggctttgacctcgcggtttctctttggactcctgaacgaagagactcgctctcacctggagaagagtctgtgctggaaggtttctccacacataaagatggacctgctgcagtggatccagagcaaagctcagtccgacggctccacccttcagcaggggtcccttgaattctttagctgcctctatgagattcaggaagaggagtttatacagcaagccttgtcacatttccaggtcattgttgtgtctaacatcgcatcaaagatggagcacatggtgagcagcttttgcctgaaaagatgtcggtctgcccaggtcttgcacctatatggggcaacttactcagctgacggcgaagaccgcgcaaggtgttccgcaggcgctcacacactccttgttcagctccccgagcgaaccgtactcctggatgcatattccgaacacctggccgcagccttgtgcaccaaccctaatctaattgaactgtctctctatcgtaacgcactgggctcccgaggtgttaagctgctctgtcagggtcttaggcaccccaattgcaaactgcaaaaccttcggctcaagcgctgcaggatatccagttccgcgtgtgaggatctgagcgccgcattaatcgcaaataagaatcttactcggatggatctgagtgggaatggcgttgggttccctggcatgatgctgctgtgcgaggggctcaggcatccccagtgccgcctgcagatgattcagttacggaaatgccagctggaaagcggggcttgccaggagatggcatccgtgctggggaccaatccacatttagtcgagctcgaccttacaggtaacgcattagaagatctgggtttgcgcttgctctgccagggactgcggcatcccgtctgtcgcctgaggaccctctggctcaaaatatgtcgactgactgccgcagcatgtgacgagctcgctagtaccctaagtgttaatcagtcattgagagaattggacttatctctgaacgagctgggcgacctgggtgtgctgctattgtgcgaaggactgcggcatccaacgtgcaagcttcagacactccgcctggggatctgcaggctaggatccgcagcttgcgagggcctgtccgtggtactacaggccaatcacaatctccgggaactggacctcagttttaatgacctcggcgactggggcctatggttgctggctgagggattacagcacccggcttgccggcttcaaaagctgtggttgttcggaatggatttgaataagatgactcactcaaggctggccgcactcagagtgaccaaaccgtacctggatattggttgttag

SEQ ID NO: 239515 - DNA, 3681 bp, Artificial Sequence
  derived and/or modified sequence
attggtgagtggggcagggcaggagggaactgaagagtgagaaagcattatttcagcaaaaggtctttcctcccttgctctctcctccaaccactggctcagcctctccgcccgctgcctgtgaatgatgcaatggaaggtgtgctggggtcgccctgtgtcccgtgcataggagcatctcagcctccaggtcctctcctttggggctcacggcacccccatgctacgaaccgcaggcagggacggcctctgtcgcctgtccacctacttggaagaactcgaggctgtggaactgaagaagttcaagttatacctggggaccgcgacagagctgggagaaggcaagatcccctggggaagcatggagaaggccggtcccctggaaatggcccagctgctcatcacccacttcgggccagaggaggcctggaggttggctctcagcacctttgagcggataaacaggaaggacctgtgggagagaggacagagagaggacctggtgagggataccccacctggtggcccgtcctcacttgggaaccagtcaacatgccttctggaagtctctcttgtcactccaagaaaagatccccaggaaacctacagggactatgtccgcaggaaattccggctcatggaagaccgcaatgcgcgcctaggggaatgtgtcaacctcagccaccggtacacccggctcctgctggtgaaggagcactcaaaccccatgcaggtccagcagcagcttctggacacaggccggggacacgcgaggaccgtgggacaccaggctagccccatcaagatagagaccctctttgagccagacgaggagcgccccgagccaccgcgcaccgtggtcatgcaaggcgcggcagggataggcaagtccatgctggcacacaaggtgatgctggactgggcggacgggaagctcttccaaggcagatttgattatctcttctacatcaactgcagggagatgaaccagagtgccacggaatgcagcatgcaagacctcatcttcagctgctggcctgagcccagcgcgcctctccaggagctcatccgagttcccgagcgcctccttttcatcatcgacggcttcgatgagctcaagccttctttccacgatcctcagggaccctggtgcctctgctgggaggagaaacggcccacggagctgcttcttaacagcttaattcggaagaagctgctccctgagctatctttgctcatcaccacacggcccacggctttggagaagctccaccgtctgctggagcaccccaggcatgtggagatcctgggcttctctgaggcagaaaggaaggaatacttctacaagtatttccacaatgcagagcaggcgggccaagtcttcaattacgtgagggacaacgagcctctcttcaccatgtgcttcgtccccctggtgtgctgggtggtgtgtacctgcctccagcagcagctggagggtggggggctgttgagacagacgtccaggaccaccactgcagtgtacatgctctacctgctgagtctgatgcaacccaagccgggggccccgcgcctccagcccccacccaaccagagagggttgtgctccttggcggcagatgggctctggaatcagaaaatcctatttgaggagcaggacctccggaagcacggcctagacggggaagacgtctctgccttcctcaacatgaacatcttccagaaggacatcaactgtgagaggtactacagcttcatccacttgagtttccaggaattctttgcagctatgtactatatcctggacgagggggagggcggggcaggcccagaccaggacgtgaccaggctgttgaccgagtacgcgttttctgaaaggagcttcctggcactcaccagccgcttcctgtttggactcctgaacgaggagaccaggagccacctggagaagagtctctgctggaaggtctcgccgcacatcaagatggacctgttgcagtggatccaaagcaaagctcagagcgacggctccaccctgcagcagggctccttggagttcttcagctgcttgtacgagatccaggaggaggagtttatccagcaggccctgagccacttccaggtgatcgtggtcagcaacattgcctccaagatggagcacatggtctcctcgttctgtctgaagcgctgcaggagcgcccaggtgctgcacttgtatggcgccacctacagcgcggacggggaagaccgcgcgaggtgctccgcaggagcgcacacgctgttggtgcagctaccagagaggaccgttctgctggacgcctacagtgaacatctggcagcggccctgtgcaccaatccaaacctgatagagctgtctctgtaccgaaatgccctgggcagccggggggtgaagctgctctgtcaaggactcagacaccccaactgcaaacttcagaacctgaggctgaagaggtgccgcatctccagctcagcctgcgaggacctctctgcagctctcatagccaataagaatttgacaaggatggatctcagtggcaacggcgttggattcccaggcatgatgctgctttgcgagggcctgcggcatccccagtgcaggctgcagatgattcagttgaggaagtgtcagctggagtccggggcttgtcaggagatggcttctgtgctcggcaccaacccacatctggttgagttggacctgacaggaaatgcactggaggatttgggcctgaggttactatgccagggactgaggcacccagtctgcagactacggactttgtggctgaagatctgccgcctcactgctgctgcctgtgacgagctggcctcaactctcagtgtgaaccagagcctgagagagctggacctgagcctgaatgagctgggggacctcggggtgctgctgctgtgtgagggcctcaggcatcccacgtgcaagctccagaccctgcggttgggcatctgccggctgggctctgccgcctgtgagggtctttctgtggtgctccaggccaaccacaacctccgggagctggacttgagtttcaacgacctgggagactggggcctgtggttgctggctgaggggctgcaacatcccgcctgcagactccagaaactgtggttatttgggatggacctgaataaaatgacccacagtaggttggcagcgcttcgagtaacaaaaccttatttggacattggctgctgaatggtcctatctgctggctctcccctgagatctggacagaggaagatgggagggtgctcatcacccccccagcataatgatcagcctccttcctagagacagactcatgcagattgagatcaaaagtccctctgcttgggatcaaattaatgtttgacagagctggccaggcgtggtggctcatgtatgtaatcctagcacttcgagaggccgaggcaggtggatcacgaggtcaggagtttgagattagcctggccaagatggtgaaaccctgtctctactaaaaataaaaaaaaattagccaggcatggtggcgggcacctgtagtcccagctactcaggaggctgaggcaggagaatcgcttgaacccgggaggtggaggttgcagtgagccgagatcgcgccactgcactccagcctgggcgacagagtgggactccatctc

SEQ ID NO: 239516 - DNA, 3801 bp, Artificial Sequence
  derived and/or modified sequence
ttcagcaaaaggtctttcctcccttgctctctcctccaaccactggctcagcctctccgcccgctgcctgtgaatgatgcaatggaaggtgtgctggggtcgccctgtgtcccgtgcataggagcatctcagcctccaggtcctctcctttggggctcacggcacccccatgctacgaaccgcaggcagggacggcctctgtcgcctgtccacctacttggaagaactcgaggctgtggaactgaagaagttcaagttatacctggggaccgcgacagagctgggagaaggcaagatcccctggggaagcatggagaaggccggtcccctggaaatggcccagctgctcatcacccacttcgggccagaggaggcctggaggttggctctcagcacctttgagcggataaacaggaaggacctgtgggagagaggacagagagaggacctggtgagggataccccacctggtggcccgtcctcacttgggaaccagtcaacatgccttctggaagtctctcttgtcactccaagaaaagatccccaggaaacctacagggactatgtccgcaggaaattccggctcatggaagaccgcaatgcgcgcctaggggaatgtgtcaacctcagccaccggtacacccggctcctgctggtgaaggagcactcaaaccccatgcaggtccagcagcagcttctggacacaggccggggacacgcgaggaccgtgggacaccaggctagccccatcaagatagagaccctctttgagccagacgaggagcgccccgagccaccgcgcaccgtggtcatgcaaggcgcggcagggataggcaagtccatgctggcacacaaggtgatgctggactgggcggacgggaagctcttccaaggcagatttgattatctcttctacatcaactgcagggagatgaaccagagtgccacggaatgcagcatgcaagacctcatcttcagctgctggcctgagcccagcgcgcctctccaggagctcatccgagttcccgagcgcctccttttcatcatcgacggcttcgatgagctcaagccttctttccacgatcctcagggaccctggtgcctctgctgggaggagaaacggcccacggagctgcttcttaacagcttaattcggaagaagctgctccctgagctatctttgctcatcaccacacggcccacggctttggagaagctccaccgtctgctggagcaccccaggcatgtggagatcctgggcttctctgaggcagaaaggaaggaatacttctacaagtatttccacaatgcagagcaggcgggccaagtcttcaattacgtgagggacaacgagcctctcttcaccatgtgcttcgtccccctggtgtgctgggtggtgtgtacctgcctccagcagcagctggagggtggggggctgttgagacagacgtccaggaccaccactgcagtgtacatgctctacctgctgagtctgatgcaacccaagccgggggccccgcgcctccagcccccacccaaccagagagggttgtgctccttggcggcagatgggctctggaatcagaaaatcctatttgaggagcaggacctccggaagcacggcctagacggggaagacgtctctgccttcctcaacatgaacatcttccagaaggacatcaactgtgagaggtactacagcttcatccacttgagtttccaggaattctttgcagctatgtactatatcctggacgagggggagggcggggcaggcccagaccaggacgtgaccaggctgttgaccgagtacgcgttttctgaaaggagcttcctggcactcaccagccgcttcctgtttggactcctgaacgaggagaccaggagccacctggagaagagtctctgctggaaggtctcgccgcacatcaagatggacctgttgcagtggatccaaagcaaagctcagagcgacggctccaccctgcagcagggctccttggagttcttcagctgcttgtacgagatccaggaggaggagtttatccagcaggccctgagccacttccaggtgatcgtggtcagcaacattgcctccaagatggagcacatggtctcctcgttctgtctgaagcgctgcaggagcgcccaggtgctgcacttgtatggcgccacctacagcgcggacggggaagaccgcgcgaggtgctccgcaggagcgcacacgctgttggtgcagctaccagagaggaccgttctgctggacgcctacagtgaacatctggcagcggccctgtgcaccaatccaaacctgatagagctgtctctgtaccgaaatgccctgggcagccggggggtgaagctgctctgtcaaggactcagacaccccaactgcaaacttcagaacctgaggctgaagaggtgccgcatctccagctcagcctgcgaggacctctctgcagctctcatagccaataagaatttgacaaggatggatctcagtggcaacggcgttggattcccaggcatgatgctgctttgcgagggcctgcggcatccccagtgcaggctgcagatgattcagttgaggaagtgtcagctggagtccggggcttgtcaggagatggcttctgtgctcggcaccaacccacatctggttgagttggacctgacaggaaatgcactggaggatttgggcctgaggttactatgccagggactgaggcacccagtctgcagactacggactttgtggctgaagatctgccgcctcactgctgctgcctgtgacgagctggcctcaactctcagtgtgaaccagagcctgagagagctggacctgagcctgaatgagctgggggacctcggggtgctgctgctgtgtgagggcctcaggcatcccacgtgcaagctccagaccctgcggttgggcatctgccggctgggctctgccgcctgtgagggtctttctgtggtgctccaggccaaccacaacctccgggagctggacttgagtttcaacgacctgggagactggggcctgtggttgctggctgaggggctgcaacatcccgcctgcagactccagaaactgtggctggatagctgtggcctcacagccaaggcttgtgagaatctttacttcaccctggggatcaaccagaccttgaccgacctttacctgaccaacaacgccctaggggacacaggtgtccgactgctttgcaagcggctgagccatcctggctgcaaactccgagtcctctggttatttgggatggacctgaataaaatgacccacagtaggttggcagcgcttcgagtaacaaaaccttatttggacattggctgctgaatggtcctatctgctggctctcccctgagatctggacagaggaagatgggagggtgctcatcacccccccagcataatgatcagcctccttcctagagacagactcatgcagattgagatcaaaagtccctctgcttgggatcaaattaatgtttgacagagctggccaggcgtggtggctcatgtatgtaatcctagcacttcgagaggccgaggcaggtggatcacgaggtcaggagtttgagattagcctggccaagatggtgaaaccctgtctctactaaaaataaaaaaaaattagccaggcatggtggcgggcacctgtagtcccagctactcaggaggctgaggcaggagaatcgcttgaacccgggaggtggaggttgcagtgagccgagatcgcgccactgcactccagcctgggcgacagagtgggactccatctc

SEQ ID NO: 239517 - DNA, 3186 bp, Artificial Sequence
  derived and/or modified sequence
atgctgagaaccgccggcagagacggcctgtgcagactgagcacctacctggaggagctggaggccgtggagctgaagaagttcaagctgtacctgggcaccgccaccgagctgggcgagggcaagatcccctggggcagcatggagaaggccggccccctggagatggcccagctgctgatcacccacttcggccccgaggaggcctggagactggccctgagcaccttcgagagaatcaacagaaaggacctgtgggagagaggccagagagaggacctggtgagagacaccccccccggcggccccagcagcctgggcaaccagagcacctgcctgctggaggtgagcctggtgacccccagaaaggacccccaggagacctacagagactacgtgagaagaaagttcagactgatggaggacagaaacgccagactgggcgagtgcgtgaacctgagccacagatacaccagactgctgctggtgaaggagcacagcaaccccatgcaggtgcagcagcagctgctggacaccggcagaggccacgccagaaccgtgggccaccaggccagccccatcaagatcgagaccctgttcgagcccgacgaggagagacccgagccccccagaaccgtggtgatgcagggcgccgccggcatcggcaagagcatgctggcccacaaggtgatgctggactgggccgacggcaagctgttccagggcagattcgactacctgttctacatcaactgcagagagatgaaccagagcgccaccgagtgcagcatgcaggacctgatcttcagctgctggcccgagcccagcgcccccctgcaggagctgatcagagtgcccgagagactgctgttcatcatcgacggcttcgacgagctgaagcccagcttccacgacccccagggcccctggtgcctgtgctgggaggagaagagacccaccgagctgctgctgaacagcctgatcagaaagaagctgctgcccgagctgagcctgctgatcaccaccagacccaccgccctggagaagctgcacagactgctggagcaccccagacacgtggagatcctgggcttcagcgaggccgagagaaaggagtacttctacaagtacttccacaacgccgagcaggccggccaggtgttcaactacgtgagagacaacgagcccctgttcaccatgtgcttcgtgcccctggtgtgctgggtggtgtgcacctgcctgcagcagcagctggagggcggcggcctgctgagacagaccagcagaaccaccaccgccgtgtacatgctgtacctgctgagcctgatgcagcccaagcccggcgcccccagactgcagcccccccccaaccagagaggcctgtgcagcctggccgccgacggcctgtggaaccagaagatcctgttcgaggagcaggacctgagaaagcacggcctggacggcgaggacgtgagcgccttcctgaacatgaacatcttccagaaggacatcaactgcgagagatactacagcttcatccacctgagcttccaggagttcttcgccgccatgtactacatcctggacgagggcgagggcggcgccggccccgaccaggacgtgaccagactgctgaccgagtacgccttcagcgagagaagcttcctggccctgaccagcagattcctgttcggcctgctgaacgaggagaccagaagccacctggagaagagcctgtgctggaaggtgagcccccacatcaagatggacctgctgcagtggatccagagcaaggcccagagcgacggcagcaccctgcagcagggcagcctggagttcttcagctgcctgtacgagatccaggaggaggagttcatccagcaggccctgagccacttccaggtgatcgtggtgagcaacatcgccagcaagatggagcacatggtgagcagcttctgcctgaagagatgcagaagcgcccaggtgctgcacctgtacggcgccacctacagcgccgacggcgaggacagagccagatgcagcgccggcgcccacaccctgctggtgcagctgcccgagagaaccgtgctgctggacgcctacagcgagcacctggccgccgccctgtgcaccaaccccaacctgatcgagctgagcctgtacagaaacgccctgggcagcagaggcgtgaagctgctgtgccagggcctgagacaccccaactgcaagctgcagaacctgagactgaagagatgcagaatcagcagcagcgcctgcgaggacctgagcgccgccctgatcgccaacaagaacctgaccagaatggacctgagcggcaacggcgtgggcttccccggcatgatgctgctgtgcgagggcctgagacacccccagtgcagactgcagatgatccagctgagaaagtgccagctggagagcggcgcctgccaggagatggccagcgtgctgggcaccaacccccacctggtggagctggacctgaccggcaacgccctggaggacctgggcctgagactgctgtgccagggcctgagacaccccgtgtgcagactgagaaccctgtggctgaagatctgcagactgaccgccgccgcctgcgacgagctggccagcaccctgagcgtgaaccagagcctgagagagctggacctgagcctgaacgagctgggcgacctgggcgtgctgctgctgtgcgagggcctgagacaccccacctgcaagctgcagaccctgagactgggcatctgcagactgggcagcgccgcctgcgagggcctgagcgtggtgctgcaggccaaccacaacctgagagagctggacctgagcttcaacgacctgggcgactggggcctgtggctgctggccgagggcctgcagcaccccgcctgcagactgcagaagctgtggctggacagctgcggcctgaccgccaaggcctgcgagaacctgtacttcaccctgggcatcaaccagaccctgaccgacctgtacctgaccaacaacgccctgggcgacaccggcgtgagactgctgtgcaagagactgagccaccccggctgcaagctgagagtgctgtggctgttcggcatggacctgaacaagatgacccacagcagactggccgccctgagagtgaccaagccctacctggacatcggctgctag

SEQ ID NO: 239518 - DNA, 1554 bp, Artificial Sequence
  derived and/or modified sequence
atgagcctgggcagcgagctgttcagagacgtggccatcgtgttcagccaggaggagtggcagtggctggcccccgcccagagagacctgtacagagacgtgatgctggagacctacagcaacctggtgagcctgggcctggccgtgagcaagcccgacgtgatcagcttcctggagcagggcaaggagccctggatggtggagagagtggtgagcggcggcctgtgccccgtgctggagagcagatacgacaccaaggagctgttccccaagcagcacgtgtacgaggtggagagcccccagtgggagatcatggagagcctgaccagctacggcctggagtgcagcagcttccaggacgactgggagtgcagaaaccagttcgacagacagcagggcaaccccgacagacacttccaccagatgatcatcagacacgaggagatgcccaccttcgaccagcacgccagcctgaccttctaccagaagatccacaccagagagaagcccttcggctacaacaagtgcagaaaggacttctggcagaaggagctgctgatcaaccaccagggcatctacaccaacgagaagccctacaagtgcaaggagtgcggcaaggccttcaagtacggcagcagactgatccagcacgagaacatccacagcggcaagaagccctacgagtgcaaggagtgcggcaaggccttcaacagcggcagcaacttcatccagcaccagagagtgcacaccggcgagaagccctacgagtgcaaggactgcgagaaggccttcagcagaagcagccagctgatcgagcaccagagaacccacaccggcgagaagccctaccagtgcaaggagtgcggcaaggccttcaacagaatcagccacctgaaggtgcactacagaatccacaccggcgagaagccctacgcctgcaaggagtgcggcaagaccttcagccacagaagccagctgatccagcaccagaccgtgcacaccggcagaaagctgtacgagtgcaaggagtgcggcaaggccttcaaccagggcagcaccctgatcagacaccagagaatccacaccggcgagaagccctacgagtgcaaggtgtgcggcaaggccttcagagtgagcagccagctgaagcagcaccagagaatccacaccggcgagaagccctaccagtgcaaggtgtgcggcagagccttcaagagagtgagccacctgaccgtgcactacagaatccacaccggcgagaagccctacgagtgcaaggagtgcggcaaggccttcagccactgcagccagctgatccaccaccaggtgatccacaccgagaagaagccctacgagtacaaggagtgcgagaagaccctgagccacgacagcaccaccgtgcagccccagagaatgcacaacagagagacccacgtgaacatcatcaacgtggagaagcccagcatcagcagctaccccctgctgatcatcagagagttcatgctggccagcaaccacatgaacggcagcaacggcgagagccccctggcctag

SEQ ID NO: 239519 - DNA, 1554 bp, Artificial Sequence
  derived and/or modified sequence
atgtctctggggtccgagttatttcgagacgttgcaatcgtgttctcccaggaggagtggcagtggctggcccctgctcagagggacctgtatcgcgatgttatgctggaaacttactccaacctcgtgtccctcgggttggcagtatcaaaaccggatgtcatctcgtttctggagcaggggaaggagccctggatggttgagagggtggtcagcggcgggttgtgtccagtgcttgagagtaggtatgatacaaaggaactttttccaaaacagcacgtgtatgaggtcgaatctccacagtgggaaatcatggaatctctgacctcatacgggctggaatgctcctccttccaggatgattgggaatgccggaaccaattcgatagacaacagggcaatcccgaccggcactttcaccaaatgatcattagacacgaggagatgccaacattcgaccaacacgcttcgctgaccttctaccagaagattcacacacgtgaaaagcctttcgggtataataagtgtaggaaagatttctggcagaaagagctattgataaatcaccaggggatttataccaatgagaaaccttacaagtgcaaagaatgcggcaaggcattcaaatacggttccagactgattcagcacgaaaatattcactctggaaagaagccctatgagtgtaaggaatgcggcaaagcattcaacagcggatctaatttcattcagcaccagcgcgtgcacacaggggagaagccctacgagtgcaaagattgcgagaaggctttttctcggagttcccagctgatagagcatcagaggacgcacaccggtgagaagccatatcagtgcaaggagtgcggcaaagcttttaatcgtattagtcacttaaaggtccactatagaatccataccggtgaaaagccgtacgcctgcaaagagtgtggaaaaaccttcagccatcgctctcagcttatccagcaccagacagtccacacaggaaggaagctgtacgagtgtaaggagtgcgggaaagcttttaaccagggctctactctgattcgtcatcagcgaattcacactggcgagaagccttacgaatgtaaggtctgtggtaaagcttttagggtgtcaagccagctgaagcagcaccagcgtatccataccggggagaaaccctaccagtgcaaagtttgcggtcgagccttcaagcgggtgtcgcacttgaccgtccactacaggatccacactggagagaaaccttatgagtgcaaggaatgtgggaaagccttttcccactgttcccagttgatccatcaccaggtgatacacacagaaaagaagccttatgagtacaaggaatgtgaaaaaaccctgtcacacgatagcacaacggtgcagccccagagaatgcataatcgcgagactcacgtaaacatcatcaatgtggaaaaacccagtatttccagctaccccctcctgatcatccgcgaattcatgctggccagtaaccacatgaacggttctaatggcgagtccccgctggcatag

SEQ ID NO: 239520 - DNA, 1554 bp, Artificial Sequence
  derived and/or modified sequence
atgagcctgggcagcgagctgttcagagatgtggccatcgtgttcagccaggaggagtggcagtggctggccccagcccagagggacctgtacagagatgtgatgctggagacctacagcaacctggtgtccctgggcctggccgtgtccaagccagatgtgatctccttcctggagcagggcaaggagccctggatggtggagcgggtggtgtctgggggcctgtgccctgtgctggagagccgctatgacaccaaggagctgttccccaagcagcacgtgtatgaggtggagagcccccagtgggagatcatggagagcctgaccagctatggcctggagtgcagcagcttccaggatgactgggagtgcaggaaccagtttgaccggcagcagggcaacccagacagacacttccaccagatgatcatcagacatgaggagatgcccacctttgaccagcacgccagcctgaccttctaccagaagatccacacccgggagaagcccttcggctacaacaagtgcaggaaggacttctggcagaaggagctgctgatcaaccaccagggcatctacaccaatgagaagccctacaagtgcaaggaatgtgggaaggccttcaagtatggcagccgcctcatccagcacgagaacatccacagcggcaagaagccctatgagtgcaaggaatgtgggaaggccttcaacagcggcagcaacttcatccagcaccagagggtgcacactggagagaagccctatgagtgcaaggactgtgagaaggccttcagccgcagcagccagctgattgagcaccagaggacccacactggagagaagccctaccagtgcaaggaatgtgggaaggccttcaaccgcatcagccacctgaaggtgcactaccgcatccacactggagagaagccctatgcctgcaaggaatgtgggaagaccttcagccacaggagccagctgatccagcaccagacagtgcacacaggcaggaagctgtatgagtgcaaggaatgtgggaaggccttcaaccagggcagcaccctcatccgccaccagaggatccacactggagagaagccctatgagtgcaaggtgtgtgggaaggccttccgggtgagcagccagctgaagcagcaccagaggatccacactggagagaagccctaccagtgcaaggtgtgtggccgggccttcaagagggtgagccacctgactgtgcactaccgcatccacactggagagaagccctatgagtgcaaggaatgtgggaaggccttcagccactgcagccagctgatccaccaccaggtgatccacacagagaagaagccctatgagtacaaggaatgtgagaagaccctgagccatgacagcaccaccgtgcagccccagaggatgcacaaccgggagacccacgtgaacatcatcaacgtggagaagcccagcatcagcagctaccccctgctgatcatccgggagttcatgctggccagcaaccacatgaatggcagcaatggagagagccccctggcctag

SEQ ID NO: 239521 - DNA, 1554 bp, Artificial Sequence
  derived and/or modified sequence
atgagcctgggcagcgagctgttccgggacgtggccatcgtgttctcacaggaagaatggcagtggcttgcccccgcccagagggacctctacagggatgtcatgctcgagacttacagcaacctagtctccctgggactcgctgtctccaaacccgacgtaatttcatttctagaacagggaaaggagccatggatggtggaacgcgtggtaagtggcgggctgtgtccagtgctggaaagccgatatgacacgaaagaactgttcccgaagcagcacgtctacgaagtcgaatcaccccagtgggaaattatggaaagcctgacttcatacggcctggagtgtagctcttttcaggacgactgggagtgtcggaatcaatttgatcgtcagcagggcaatccagaccgccatttccaccagatgatcattaggcatgaagagatgccaacgtttgatcagcacgccagcttgactttctatcaaaagatacacacccgcgaaaagcctttcggctacaacaagtgcaggaaagacttttggcaaaaggaattgttgatcaaccaccagggcatttatacaaacgaaaaaccctacaagtgcaaggagtgcgggaaagccttcaagtatgggtcgagactgatccagcacgaaaacatccacagcggcaaaaagccttatgaatgcaaggagtgcggaaaagcttttaattccggatcgaattttattcagcaccagcgggtgcatactggagaaaagccctacgaatgtaaagattgcgagaaggctttcagtaggagttcccaacttatcgagcaccaaaggacccacaccggagagaagccttaccaatgtaaggagtgcgggaaggctttcaaccgcatcagtcacctaaaagtccactacagaattcatacgggagagaaaccttatgcttgcaaagagtgcggcaaaactttttctcatcgtagtcagctgattcaacatcaaacagtacacacggggagaaagttgtacgagtgtaaagaatgcggcaaagccttcaaccagggttctaccctgatccgacatcagagaatccacaccggagaaaagccttatgaatgtaaggtatgcggcaaggcgtttagggtaagctcccagctcaaacagcaccagcggatacacacaggcgagaagccttaccagtgcaaagtttgcggaagggcctttaagcgcgttagtcatctgacagtgcactacagaattcacacaggggagaaaccttatgagtgcaaagagtgtggcaaggcgttttcgcactgttcccagctgattcaccatcaggtgatccacactgaaaagaaaccatacgagtacaaagagtgcgaaaaaaccctgtcccatgacagcacaaccgtacagccgcagcggatgcataatcgcgaaactcacgttaatattattaatgtggagaagcctagcatatcgtcttatcccctgctgattattagagagttcatgctggcttccaaccacatgaatggaagcaatggcgagtccccactcgcctag

SEQ ID NO: 239522 - DNA, 1554 bp, Artificial Sequence
  derived and/or modified sequence
atgtcactgggctctgagctctttcgagacgtcgccatcgtcttttcacaggaggagtggcaatggctggctccagcacaaagggacctctacagggacgtgatgttagagacatatagtaacctggtgtctctgggactagcagttagcaaaccagatgtgattagttttctagaacaaggtaaagaaccttggatggtggaaagggtcgtatcgggcggactgtgcccagtgttggaaagcaggtacgataccaaggaattgtttccaaagcagcatgtgtatgaagtggagtcaccgcaatgggagatcatggagagcctgacatcctacggtctggagtgctccagctttcaagatgactgggagtgcagaaatcagttcgacaggcagcaggggaaccccgataggcactttcaccagatgattatacgtcacgaagaaatgccaaccttcgatcagcatgcatctttgactttttatcagaagatccacacccgtgagaagccatttggttataataaatgtcgaaaggacttctggcagaaggagcttctcattaatcaccaaggcatctatacaaacgaaaagccttacaaatgcaaagagtgcgggaaagcttttaaatatggcagtcggctgatccagcatgagaacatccactctggcaaaaagccctatgaatgtaaagaatgcggcaaggcctttaactctggttcgaattttatccagcatcagagggtgcacacaggcgagaagccctacgagtgtaaagattgtgagaaagcattctcacggagctcacagctcatcgagcaccagcggactcacacaggagaaaaaccttaccagtgtaaggaatgtgggaaggccttcaaccgcattagccatctcaaagtgcattacaggatccacactggagaaaaaccgtacgcctgtaaagagtgtgggaagacctttagccaccggagtcagttaattcagcaccagaccgtgcatacaggcagaaagctgtatgaatgtaaggagtgcggtaaggcatttaatcaggggagcaccttaatacgccaccagcggatccataccggggagaagccatatgagtgcaaggtgtgcggtaaggctttcagggtcagctcccaacttaagcaacatcagcgcatccatacaggcgagaagccataccaatgtaaggtctgtggaagggccttcaaaagggtcagccatctgaccgtccattaccgtatccacaccggagagaaaccatacgagtgtaaagagtgtggaaaggctttcagccactgtagccaattgatccaccatcaggtgatacataccgaaaaaaaaccgtacgaatacaaagagtgtgagaagacactgtcacatgattcaactacggtgcagcctcaacggatgcataatcgggaaacccacgtgaacatcattaacgtggaaaagccatctataagcagctaccccctgttgataattcgggagtttatgctggcgtcaaatcacatgaacggctccaatggcgaatcccctctagcttag

SEQ ID NO: 239523 - protein, 1012 aa, Artificial Sequence
  derived and/or modified sequence
MSLPKTPSTPLNSTSTSESKKLKVSVAKEGTRGLPELKEKKNMVDRSKLLPTSLQNEFIPKEVLLSLTYAANAGPCPENLLPPKKIKTPKGTLPRLVDHVWHHPVRRNKFKYLIDHPVSLTGAGRDISFLYDVTYAKGQTREKAVCPPHLARSLQSHDGVIVPHKPKTLTDTLIPEEFHIVSSTGVSGLECYDDKYTTLLTDSENRLLLFPSMKPNKRVEVAQLNDVMDTMLERAGVENQEYTGPTKMHKLLHILKKEQTIYNMIFHELIRQVSVDCADRGELLSKVRERYVQMLDQIARQMIDFYKDLVTQRVMDQRILEELYNFKHVIEELTRELCLVRAHDVKLTKETEKAHKDLAQALLNAEKNAKIVEEYHDLYTLQRERMENDMKKLVAERDIWSSATYELALKVIERNRVILARRLYLNEKGWNKYTKHFIILLSNKDTEDLALLQKLTQKWRNLVNKLKQEVEQMEESTSETLKIVKDGLIKWQEFFNEKDILSPNKGNIFNSVLLDFKQWQKILNEKKEEFTGDVLLSKYDTLKIIKHLQENWADIGLGIFNRHKSLEGEMPSERQYMEEIIKNIQKLYKEYEIRINGDNGYSKILPSLISSLDFCSFKLENLEFPDTPLEEWQEIDEKINEMKSHLDILLNLTGIVPQHIDVDSVSVLQAYIFNMIQQWLLKIGNEINNGNIELQHHMDELHISMIQWMVNLLILMIPNFTDQDCLLKLEEESAEKHDIGVARLELDAIELTRKLYQYSSYLSSCCKGMVTAMALSKSTNSHKNATEDLYEVDKLKKECYEWINTCSCLLSNIKGRKITLLTYEEIERLLEEEAVKEFIEPEIDESFKEDEEESKEDRKLQEENKERAEEQPSTSTEKEKLIRFIGEDENVHSKPLFETDVLSSWRESAKQGTLAQKYLEAMAVIEHMQEKLLEVENRARQAEEKFEDAYEKLHHTLIKNKDLEELVMTSRKESKEEKENQDEREVKEEEEQQEEEEVRSAENSSKSPKKGH

SEQ ID NO: 239524 - DNA, 3039 bp, Artificial Sequence
  derived and/or modified sequence
atgagcctgcccaagacccccagcacccccctgaacagcaccagcaccagcgagagcaagaagctgaaggtgagcgtggccaaggagggcaccagaggcctgcccgagctgaaggagaagaagaacatggtggacagaagcaagctgctgcccaccagcctgcagaacgagttcatccccaaggaggtgctgctgagcctgacctacgccgccaacgccggcccctgccccgagaacctgctgccccccaagaagatcaagacccccaagggcaccctgcccagactggtggaccacgtgtggcaccaccccgtgagaagaaacaagttcaagtacctgatcgaccaccccgtgagcctgaccggcgccggcagagacatcagcttcctgtacgacgtgacctacgccaagggccagaccagagagaaggccgtgtgccccccccacctggccagaagcctgcagagccacgacggcgtgatcgtgccccacaagcccaagaccctgaccgacaccctgatccccgaggagttccacatcgtgagcagcaccggcgtgagcggcctggagtgctacgacgacaagtacaccaccctgctgaccgacagcgagaacagactgctgctgttccccagcatgaagcccaacaagagagtggaggtggcccagctgaacgacgtgatggacaccatgctggagagagccggcgtggagaaccaggagtacaccggccccaccaagatgcacaagctgctgcacatcctgaagaaggagcagaccatctacaacatgatcttccacgagctgatcagacaggtgagcgtggactgcgccgacagaggcgagctgctgagcaaggtgagagagagatacgtgcagatgctggaccagatcgccagacagatgatcgacttctacaaggacctggtgacccagagagtgatggaccagagaatcctggaggagctgtacaacttcaagcacgtgatcgaggagctgaccagagagctgtgcctggtgagagcccacgacgtgaagctgaccaaggagaccgagaaggcccacaaggacctggcccaggccctgctgaacgccgagaagaacgccaagatcgtggaggagtaccacgacctgtacaccctgcagagagagagaatggagaacgacatgaagaagctggtggccgagagagacatctggagcagcgccacctacgagctggccctgaaggtgatcgagagaaacagagtgatcctggccagaagactgtacctgaacgagaagggctggaacaagtacaccaagcacttcatcatcctgctgagcaacaaggacaccgaggacctggccctgctgcagaagctgacccagaagtggagaaacctggtgaacaagctgaagcaggaggtggagcagatggaggagagcaccagcgagaccctgaagatcgtgaaggacggcctgatcaagtggcaggagttcttcaacgagaaggacatcctgagccccaacaagggcaacatcttcaacagcgtgctgctggacttcaagcagtggcagaagatcctgaacgagaagaaggaggagttcaccggcgacgtgctgctgagcaagtacgacaccctgaagatcatcaagcacctgcaggagaactgggccgacatcggcctgggcatcttcaacagacacaagagcctggagggcgagatgcccagcgagagacagtacatggaggagatcatcaagaacatccagaagctgtacaaggagtacgagatcagaatcaacggcgacaacggctacagcaagatcctgcccagcctgatcagcagcctggacttctgcagcttcaagctggagaacctggagttccccgacacccccctggaggagtggcaggagatcgacgagaagatcaacgagatgaagagccacctggacatcctgctgaacctgaccggcatcgtgccccagcacatcgacgtggacagcgtgagcgtgctgcaggcctacatcttcaacatgatccagcagtggctgctgaagatcggcaacgagatcaacaacggcaacatcgagctgcagcaccacatggacgagctgcacatcagcatgatccagtggatggtgaacctgctgatcctgatgatccccaacttcaccgaccaggactgcctgctgaagctggaggaggagagcgccgagaagcacgacatcggcgtggccagactggagctggacgccatcgagctgaccagaaagctgtaccagtacagcagctacctgagcagctgctgcaagggcatggtgaccgccatggccctgagcaagagcaccaacagccacaagaacgccaccgaggacctgtacgaggtggacaagctgaagaaggagtgctacgagtggatcaacacctgcagctgcctgctgagcaacatcaagggcagaaagatcaccctgctgacctacgaggagatcgagagactgctggaggaggaggccgtgaaggagttcatcgagcccgagatcgacgagagcttcaaggaggacgaggaggagagcaaggaggacagaaagctgcaggaggagaacaaggagagagccgaggagcagcccagcaccagcaccgagaaggagaagctgatcagattcatcggcgaggacgagaacgtgcacagcaagcccctgttcgagaccgacgtgctgagcagctggagagagagcgccaagcagggcaccctggcccagaagtacctggaggccatggccgtgatcgagcacatgcaggagaagctgctggaggtggagaacagagccagacaggccgaggagaagttcgaggacgcctacgagaagctgcaccacaccctgatcaagaacaaggacctggaggagctggtgatgaccagcagaaaggagagcaaggaggagaaggagaaccaggacgagagagaggtgaaggaggaggaggagcagcaggaggaggaggaggtgagaagcgccgagaacagcagcaagagccccaagaagggccactag

SEQ ID NO: 239525 - DNA, 3039 bp, Artificial Sequence
  derived and/or modified sequence
atgagcctgcctaagacaccctccacccctctaaatagcacatcaacctccgaatcaaagaaattgaaagtttccgtggcaaaagaaggcacaagaggcctgccagagctcaaagagaagaaaaatatggttgacagaagcaagctgcttcccacatctcttcagaatgaattcattcctaaagaagttctgctctccctgacttatgctgctaacgcgggcccgtgccccgaaaacctgctaccgcctaaaaaaattaagaccccaaaggggactctcccgaggctggttgaccacgtctggcaccatcccgtcagacggaacaagtttaaatatctgattgaccatcctgtgagtctaacaggggccggcagagacatttccttcctgtatgacgtaacctatgccaaaggccagactagggagaaggctgtctgtccccctcacttggccagatccctccagtctcacgatggtgtgatcgtgccacacaagccaaagacactaacagatacccttattcctgaagagtttcacatagtgtccagcacgggcgtgagcggtttggagtgctacgacgataaatacaccactctgctgacagattctgagaacagactcttactgtttccatctatgaaacccaacaaaagagtggaagtcgcccagttgaatgacgtcatggacaccatgttagaacgggccggagttgaaaatcaggaatacacaggtcctacaaagatgcacaaactcctccatatcctcaaaaaagagcagacgatctataatatgatctttcacgagctcatccgacaggtcagtgtcgactgcgccgatagaggtgagctgctgtcaaaggtccgggagcggtatgttcagatgttagaccaaattgctcgccaaatgattgacttttataaagatctggtcacccagcgggttatggaccagagaatcctagaggagctctataactttaagcatgtaattgaagaactgacacgggaattatgccttgtgagggcccacgatgttaaacttaccaaggaaaccgagaaagcccacaaagatcttgcacaagccttgctgaacgcagagaagaatgccaaaattgtggaggagtaccacgacctgtacactctgcagcgagagcgcatggaaaacgacatgaagaaattggttgccgagcgggatatctggtcttcagcaacatatgaactggccctcaaagttatcgaacgcaatagggtcatcctcgcccgacgtctctacctcaatgagaagggatggaataaatacacaaaacactttatcatcctgttatccaataaggatactgaggatctcgctctgcttcagaaactgactcagaagtggcgtaacctggtgaataagctgaaacaggaggtcgaacagatggaggagagcacctccgaaacactaaaaatagtgaaggacgggctcattaaatggcaggagttctttaacgaaaaagacatcttgtcaccaaacaagggcaatattttcaattccgttttattggactttaagcaatggcagaagatattaaacgaaaagaaagaagagttcaccggagacgtattgctctcgaaatacgacactctgaaaataatcaaacatctccaggaaaattgggcagatattggactcgggatctttaaccgacataaatccttggaaggagagatgcctagcgaacgccagtacatggaggaaatcattaaaaacatccaaaaactttataaagagtacgagattcgtatcaatggggacaatgggtactctaaaattctaccatctctcatctcaagtctcgacttttgctcctttaagcttgagaatttggaatttcctgatacaccactggaggaatggcaggaaattgacgagaaaatcaacgaaatgaagtctcaccttgacattttgctgaacctgacaggcatcgtcccgcaacatattgacgtagactcagtcagtgtactgcaggcttatattttcaatatgattcagcagtggctgctgaagatcgggaatgaaattaacaacggtaacatcgagctgcagcatcatatggatgaactgcatatttctatgattcaatggatggtcaatctgttaattctcatgatacctaactttacagaccaggattgcctgcttaagctggaagaagaaagcgctgagaagcatgacatcggtgttgcccgactggaactggacgccatcgagctaacacgaaagctgtatcaatattcgtcctatctctcaagttgttgtaagggaatggtgacagctatggctctgagcaagagtactaactctcataaaaacgccacagaagatctatacgaggtggacaaacttaagaaagaatgctacgagtggataaatacatgcagctgtcttctgtcgaacataaaagggcgcaagattaccttactcacatatgaagaaatcgaacgcctgttggaggaagaggctgtgaaagagtttatcgagccagagatcgatgagagcttcaaggaggacgaagaggagtcaaaagaggaccgcaaactccaagaggagaataaagaaagagcagaagaacagcccagcacatcaaccgaaaaagagaagctcatcagatttattggagaggacgaaaatgtccacagcaaacccctttttgaaacggatgtgctgtcttcttggcgggagtctgctaagcaaggcaccctggcccagaagtacctcgaggccatggctgttattgagcacatgcaggaaaagctgctggaggtcgagaacagggcccgacaggccgaagaaaagtttgaagacgcatacgaaaaactccatcataccttaattaagaataaagatctcgaggaactcgtgatgacttccaggaaagagtccaaagaagagaaggagaaccaagacgaaagggaagttaaggaagaagaagaacagcaggaggaggaggaggttagatccgcggagaactcctccaagtctccgaagaagggccactag

SEQ ID NO: 239526 - DNA, 3039 bp, Artificial Sequence
  derived and/or modified sequence
atgagcctgcccaagacccccagcacccccctgaacagcaccagcaccagcgagagcaagaagctgaaggtgtctgtggccaaggagggcacccggggcctgcctgagctgaaggagaagaagaacatggtggacaggagcaagctgctgcccaccagcctgcagaatgagttcatccccaaggaggtgctgctgagcctgacctacgccgccaatgccggcccctgcccagagaacctgctgccccccaagaagatcaagacccccaagggcaccctgccccggctggtggaccacgtgtggcaccaccctgtgagaagaaacaagttcaagtacctgattgaccaccctgtgtccctgactggagctggccgggacatctccttcctgtatgatgtgacctacgccaagggccagacccgggagaaggctgtgtgccccccccacctggcccggagcctgcagagccatgatggagtgattgtgccccacaagcccaagaccctgacagacaccctcatccctgaggagttccacatcgtgagcagcactggagtgtctggcctggagtgctatgatgacaagtacaccaccctgctgacagattctgagaaccggctgctgctcttccccagcatgaagcccaacaagagggtggaggtggcccagctgaatgatgtgatggacaccatgctggagagagctggggtggagaaccaggagtacacaggccccaccaagatgcacaagctgctgcacatcctgaagaaggagcagaccatctacaacatgatcttccacgagctgatccggcaggtgtctgtggactgtgccgacagaggagagctgctgagcaaggtgcgggagagatatgtgcagatgctggaccagatcgcccggcagatgattgacttctacaaggacctggtgacccagagggtgatggaccagaggatcctggaggagctgtacaacttcaagcacgtgattgaggagctgacccgggagctgtgcctggtgcgggcccatgatgtgaagctgaccaaggagacagagaaggcccacaaggacctggcccaggccctgctgaatgctgagaagaatgccaagatcgtggaggagtaccatgacctgtacaccctgcagcgggagaggatggagaatgacatgaagaagctggtggccgagcgggacatctggagcagcgccacctatgagctggccctgaaggtgattgaaagaaacagagtcatcctggcccggcggctgtacctgaatgagaagggctggaacaagtacaccaagcacttcatcatcctgctgagcaacaaggacacagaggacctggccctgctgcagaagctgacccagaagtggaggaacctggtgaacaagctgaagcaggaggtggagcagatggaggagagcaccagcgagaccctgaagatcgtgaaggatggcctcatcaagtggcaggagttcttcaatgagaaggacatcctgagccccaacaagggcaacatcttcaacagcgtgctgctggacttcaagcagtggcagaagatcctgaatgagaagaaggaggagttcaccggagatgtgctgctgagcaaatatgacaccctgaagatcatcaagcacctgcaggagaactgggccgacatcggcctgggcatcttcaacagacacaagagcctggagggggagatgcccagcgagcggcagtacatggaggagatcatcaagaacatccagaagctgtacaaggagtatgagatccgcatcaacggggacaatggctacagcaagatcctgcccagcctcatcagcagcctggacttctgcagcttcaagctggagaacctggagttcccagacacccccctggaggagtggcaggagattgatgagaagatcaatgagatgaagagccacctggacatcctgctgaacctgactggaattgtgccccagcacattgatgtggacagcgtgtctgtgctgcaggcctacatcttcaacatgatccagcagtggctgctgaagattggaaatgagatcaacaatggaaacatcgagctgcagcaccacatggatgagctgcacatctccatgatccagtggatggtgaacctgctgatcctgatgatccccaacttcacagaccaggactgcctgctgaagctggaggaggagagcgctgagaagcatgacattggagtggcccggctggagctggatgccatcgagctgaccaggaagctgtaccagtacagcagctacctgagcagctgctgcaagggcatggtgacagccatggccctgagcaagagcaccaacagccacaagaatgccacagaggacctgtatgaggtggacaagctgaagaaggagtgctatgagtggatcaacacctgcagctgcctgctgagcaacatcaagggcaggaagatcaccctgctgacctatgaggagattgaaaggctgctggaggaggaggccgtgaaggagttcatcgagcctgagattgatgagagcttcaaggaggatgaggaggagagcaaggaggacaggaagctgcaggaggagaacaaggagcgggcagaggagcagcccagcaccagcacagagaaggagaagctgatccgcttcatcggagaagatgaaaatgtgcacagcaagcccctgtttgaaacagatgtgctgagctcctggagggagagcgccaagcagggcaccctggcccagaagtacctggaggccatggctgtgattgagcacatgcaggagaagctgctggaggtggagaacagagcccggcaggccgaggagaagtttgaagatgcctatgagaagctgcaccacaccctcatcaagaacaaggacctggaggagctggtgatgaccagcaggaaggagagcaaggaggagaaggagaaccaggatgagcgggaggtgaaggaggaggaggagcagcaggaggaggaggaggtgcgctctgctgagaacagcagcaagagccccaagaagggccactag

SEQ ID NO: 239527 - DNA, 3039 bp, Artificial Sequence
  derived and/or modified sequence
atgagcctgcccaagacccccagcacccccctgaacagcaccagcacaagcgaatccaaaaagctgaaggtctccgtggctaaggagggcacacgaggtcttccagagctgaaggaaaaaaagaacatggttgaccgtagcaagctcctgcccactagtctccaaaacgagtttataccaaaagaggtgcttttaagcctgacctacgcagccaatgctggtccctgccctgagaacctcctcccccccaagaagattaagacccctaaaggcactctccccaggcttgtagatcacgtttggcatcatcccgtaagacggaacaaatttaagtatctgattgatcaccctgtgagcctcaccggggcaggtagagatatcagctttctctatgatgtaacctacgcaaaagggcagactagagaaaaagcagtgtgccctcctcatctcgcccggtcgctgcagtcccacgatggcgtgatcgtgccacacaaacctaaaacgctgaccgatactctcattccagaggagtttcacatcgtctcttctaccggggtaagcgggctggagtgttacgatgataagtatacaaccctgctgaccgattctgaaaacagacttctgctgtttccttccatgaaacctaataaacgggtcgaggtcgcccagctgaatgacgtgatggacaccatgctcgaacgggccggggtggaaaaccaggaatacaccggacccacgaagatgcataagctgctccatatactgaaaaaagaacagaccatttacaacatgatctttcatgagctcatacgacaagtctctgtggattgcgcagaccgcggcgagttgctaagcaaggtgagagaaagatacgtgcaaatgttagaccagatagcacgccagatgattgacttctataaggatcttgtgacacagcgcgtcatggaccagcgaattctggaggaactgtataatttcaaacatgtgatagaagaactcacacgagagctgtgtctcgtgcgtgcgcatgatgtgaaactcacaaaggagaccgaaaaagcccacaaagatttggcccaggcattgctgaacgccgaaaagaatgcgaaaatcgtggaggaataccacgatctctatactctgcagcgcgaaagaatggaaaacgacatgaaaaaactggttgcggaaagggatatctggagctcagctacttatgaacttgcattgaaggtgatcgagagaaatcgtgtgatactggcacgtaggctgtacctcaatgaaaaaggatggaacaagtacactaagcactttatcatcttactatcaaataaagacacagaggacttggccctattgcaaaaactgacgcaaaagtggcgcaacctcgtgaataagcttaagcaagaggtggagcagatggaagagtcaacctcagagactttgaagattgtcaaggacgggcttataaaatggcaggagtttttcaatgaaaaagatatactgtctcctaacaagggaaatatctttaatagcgtcctgctggattttaagcaatggcagaaaattcttaacgaaaagaaggaggaatttactggagacgtgctgctctcaaagtacgatacgcttaaaattatcaagcacctgcaagagaactgggctgacatcgggctgggtatcttcaaccggcacaaaagtctcgagggcgagatgccaagcgaacgccaatacatggaagaaattattaagaatattcaaaagctatacaaagaatatgaaatccgtatcaatggcgacaatggatacagtaagattctcccgtcactgatcagctcccttgacttctgttcgtttaagcttgagaaccttgagttccccgatacgccgttggaagagtggcaggagattgatgaaaaaattaacgagatgaaatcgcacttggatattctcttgaacctgactgggatcgtgccacaacatattgacgtagattctgtatctgtccttcaggcttacatatttaacatgatccaacagtggctgctgaaaatcggaaatgagatcaacaacggtaatatcgaactgcagcaccatatggacgagctgcacatcagtatgattcaatggatggtcaacttgctaatcttaatgattcctaattttacagatcaggattgcctcctaaagctggaggaggagagcgccgagaagcacgacatcggcgtagcccgcctggaactggacgccattgagctcacgagaaagctgtatcagtacagcagctatctgtcttcctgctgtaaagggatggtgaccgccatggcgttgtcgaagagcaccaactcacacaagaatgccactgaggatctctacgaagtcgataagttaaaaaaggagtgttacgaatggataaatacctgttcctgtctcctatcaaacattaagggacgtaaaatcactctgctgacctacgaagagatagaaagattgttggaggaagaagccgtgaaggaattcattgagcctgagatagacgaaagttttaaagaggacgaggaagagtctaaagaggaccgaaaactccaggaggaaaacaaagaacgggcggaggaacaaccttccacgagcacagaaaaggaaaagctcattaggttcataggggaggatgaaaatgttcactctaaacctttgtttgagacagatgttctctcctcttggcgggagtccgctaagcagggaaccctggcccagaagtacctggaagctatggccgtcatcgaacacatgcaggagaaactcctcgaagtggaaaatcgggctagacaggccgaggagaaattcgaggacgcgtatgagaaacttcaccacaccctgataaagaacaaggacctggaggaattggtcatgaccagtcgaaaggagagtaaggaagaaaaggagaaccaggatgagagggaggtaaaggaggaggaggaacagcaggaagaagaagaggttaggagtgcagagaactcctcaaagtcacccaagaaagggcattag

SEQ ID NO: 239528 - DNA, 3039 bp, Artificial Sequence
  derived and/or modified sequence
atgtctctccctaagacccccagcactcccctaaacagcacttccacgtccgagagcaaaaaattgaaagtatctgtggcaaaagagggaacgcggggacttccggaactgaaagaaaagaagaacatggtggacagaagtaaactgctgccgaccagcctgcagaacgagttcataccaaaagaagtgctgctgtccttgacatacgcggctaacgcgggaccttgtccggaaaacttgctccccccaaaaaaaatcaagacccctaaagggactctccccaggctcgtggatcatgtctggcatcatcccgttaggcggaacaagttcaaatatctcatcgaccaccctgtttctcttactggcgcaggaagagatatttcctttttgtacgacgtcacgtacgcgaaagggcagactcgcgaaaaagctgtctgtcccccacacctcgccagatccttacaaagccatgacggcgtcatcgtgccccacaaaccgaaaacactcacagatacgttgattcctgaggagttccacatagtatccagcaccggagtgtctggtctggagtgctatgacgacaagtatacaacgctgctgaccgactcagagaaccgcctgctcctcttccctagcatgaagccaaataaaagagtcgaagtggcgcagctgaatgacgtgatggacactatgctggaaagggccggagtggaaaaccaggaatatactggcccaaccaaaatgcataaactactccacattctcaagaaggaacagactatatacaatatgatctttcacgagctgatcaggcaggtgtcggtcgattgcgcagatagaggagagcttttgtcaaaagtgagagaacgttacgttcagatgttggaccagattgcacggcagatgatcgacttttacaaggacctggtgacccaacgggtcatggaccaaaggattctggaggagctgtacaattttaagcacgtcatcgaggaactcacaagggagctctgcctggtcagggctcacgatgttaagctcaccaaagagactgaaaaggcccataaggacctagcgcaagcccttcttaatgctgaaaaaaatgcaaagatcgtggaggagtatcatgatttgtacacactgcagcgggagagaatggagaacgacatgaagaagctcgttgccgagcgggacatatggtcgtccgccacatatgagctcgctctcaaggtgatcgaacggaaccgagtgatcttggccagacgtctctacttgaatgaaaaaggatggaataagtacaccaagcattttatcatccttttgtccaacaaggatactgaggatctggctctgcttcaaaaactgacacagaagtggaggaatctggtgaacaaactcaagcaggaagtggaacaaatggaggaatccaccagtgagaccctgaagatagtcaaggacggactcatcaagtggcaggaattttttaacgaaaaggacatcctgtctccaaacaaggggaacatctttaacagcgtcttgctcgattttaaacagtggcagaaaatattaaacgagaagaaggaggaatttaccggagacgtcctgcttagcaaatatgatactctcaagatcatcaaacacctgcaggagaattgggccgatattggtttaggcattttcaacagacacaagagtcttgaaggggagatgccctcagagcgtcaatatatggaggaaatcattaaaaacatccagaagctgtataaggagtacgaaatccgcatcaacggggataatggctacagcaagatactgccctcactgattagcagtctggatttttgcagcttcaaattagaaaacctcgagttccccgacacacctctggaagagtggcaggagattgatgagaagataaacgagatgaagtcacatcttgatatcttgttaaacctcacgggcatcgttccgcagcacatcgatgtcgattcagtgtccgttctacaggcttacattttcaatatgatccagcagtggttgctgaaaataggtaatgagattaataacgggaacatcgagcttcagcaccacatggacgagctacacatctcaatgattcagtggatggttaacctgctgatactgatgatccccaatttcacagatcaggattgcctcttgaagctagaggaggagtccgccgaaaaacatgatattggggtggcaagattggagcttgacgctattgaactgaccagaaagttgtatcaatattcaagttacctgagctcctgctgcaaaggcatggttaccgccatggcccttagcaagtcaacgaacagccataagaacgctacagaagacttgtacgaggttgataagcttaaaaaagaatgctacgagtggatcaacacgtgctcctgccttctgtctaacatcaagggcaggaaaatcacacttctgacctacgaggagatcgagcggctgcttgaagaagaggccgttaaggagtttatagagcccgaaattgacgagtcctttaaggaggatgaagaagaatctaaggaagacaggaaattgcaagaggaaaataaagaacgagctgaagaacagccctccaccagtaccgagaaggagaaactgatcagattcataggagaagacgagaatgtccacagcaaacctctgttcgaaacagacgtgctaagctcatggagagaatccgcaaagcagggtacgttggcccagaagtatttggaggccatggccgtcattgaacacatgcaagagaagctgctagaggtggaaaaccgtgcccgacaggcggaggagaagtttgaggatgcctatgaaaagctgcaccacacccttatcaagaataaggatcttgaagagctggtgatgacatcacgcaaagagtcaaaggaggagaaggagaaccaggatgagcgggaagtgaaagaagaggaagaacaacaagaggaggaggaagtccgctctgccgagaattcctcaaagtccccaaagaaaggccattag

SEQ ID NO: 239529 - DNA, 3642 bp, Artificial Sequence
  derived and/or modified sequence
actggcctggcccgcggcaggaagccccggcgtgagacactttcggattccgtgacaacggcgggattaaacgtttttcttctcctttgctactgaacctatgctgtgacttagaacataagaaactccaagagggtgtagggattgtcttagctgtctccctcctccgccggcaccgctgaaggcagcccctatggagggcgctaaacctcggggccctgggtttctatgacgacaaacaggcgttccagcaaaggaggaagtgagcggatgctgggcgggactatgtggcagcctgcaagtcccagtgcggcgctgatttgtgtctaaattagctttccggaggactatttcaaattactaaagagataggaggcattgtttattatgtctctcccgaaaacgccctccaccccgctaaactctacatcaacatctgagagcaaaaagttaaaagtgtctgtagccaaggaagggacaagaggacttcctgagctaaaggagaaaaaaaatatggtggatcgttcaaaactccttcctacttcccttcagaatgagttcattcccaaagaagttcttctttctctgacctatgcggccaatgctggtccttgtcctgaaaacttactacctcctaagaaaattaaaaccccaaagggcactcttccacgccttgtagaccatgtctggcatcaccctgttcgaaggaataaattcaaatacctgattgaccatcccgtctccctcacaggagctggaagggatatttcttttctgtacgatgtaacatatgccaaaggacagactagggagaaggcagtttgtcccccacatttggcccgttcattacagtcacatgatggtgtcattgtgccccataagccaaagacactaacagatactttgattcctgaagaatttcatattgtgtcaagtacaggagtttcaggtttggagtgttatgatgacaaatacactactctcctcacagatagtgaaaacaggctattgctcttcccatccatgaaacctaataaaagagtagaagtggcccagctgaatgatgtgatggatactatgctagagagggctggtgtggaaaatcaggaatatacaggaccaacgaagatgcacaaactactacatatattgaagaaggaacagaccatttacaacatgatatttcatgaacttattcgacaagtcagtgtggactgtgcagacagaggagaacttctgtctaaagtcagagagaggtatgtgcaaatgcttgaccagattgctcggcagatgattgatttctacaaagacttggtaactcagcgagtgatggaccagcgcattttagaagaattgtataatttcaagcatgttattgaagaactgaccagggaactgtgtctagttcgggcacatgatgtgaaattaacaaaggaaacagaaaaagcccacaaggatttggcacaagctcttttaaatgcggaaaagaatgccaaaatagtagaagaatatcatgacttatatacattacaaagagaaaggatggagaatgatatgaaaaagttagtggcagaaagagatatctggagctcagccacatatgaattggccctgaaggtgattgaaagaaatagagtcatattggctagaagactttaccttaatgaaaaaggctggaataaatacactaagcatttcatcatactgctatcaaacaaggacactgaagaccttgcactgttgcagaagttgacacaaaaatggagaaacttagtgaataaacttaaacaagaggtagaacaaatggaagagtctacaagcgagacactgaaaattgttaaggatgggcttatcaaatggcaggagttcttcaatgaaaaagacattttatcccctaataagggaaatatatttaattcagttcttttagacttcaaacagtggcagaagatcctgaatgagaaaaaagaagagtttactggggatgttctactgtcaaaatacgatactctcaagattattaaacatttacaggaaaactgggcagatattgggcttgggatatttaatcggcataaaagtttggagggggagatgccatcagagcgacagtacatggaggaaattatcaaaaacatacaaaaactctacaaagaatatgaaataagaataaatggggacaatggttactccaaaattcttccaagtttgattagttctcttgacttctgttctttcaagttggaaaacctggagtttcctgatacgcctcttgaagaatggcaggaaatagatgaaaaaattaatgaaatgaaatcacacttggatatattgttaaaccttactggtattgttccacagcacatagatgtggattctgtttcggtactccaagcgtatatatttaacatgattcaacaatggcttttgaagataggcaatgaaattaacaacggtaacattgaacttcagcaccacatggatgagttacatatatctatgatccagtggatggtaaacttgctgattttaatgatacccaactttactgaccaagactgtctcctaaagttggaggaggaaagtgctgagaaacatgatataggagttgcgcgattggagctagatgcgattgaactgacaaggaagttgtaccaatactccagctatttgagcagttgttgcaaagggatggtaacagcaatggctctgagtaaatccactaactcacacaaaaatgctactgaagacctttatgaggtggataagttgaagaaagaatgttatgaatggatcaacacatgctcttgcctcctttctaatatcaaaggcagaaaaattacattattgacatatgaagaaatagagcggctacttgaagaggaggctgtaaaagaattcattgagcctgaaatagacgagtcttttaaagaagatgaagaagaaagtaaggaggataggaaacttcaggaggaaaataaagagagagcagaagaacaaccttcaacatctacagagaaggaaaaactcattcgattcattggagaagatgaaaatgttcattccaaacctctatttgaaacagatgtgttgtcttcctggagagagtcagctaagcaaggtacattggcccaaaaatatcttgaagcaatggctgtaattgaacatatgcaggagaagttactggaggttgaaaatagagccagacaggcagaggagaagtttgaagatgcatatgagaaacttcatcatacccttataaaaaataaagatctagaggaattagtcatgacatcaagaaaggagtctaaagaagagaaagaaaatcaagatgaaagagaagtaaaagaagaagaagaacaacaagaagaagaagaagtcaggtcagcagaaaattcctcaaaatctccaaagaaaggtcactgaatccaaggcaacctgtggaaagaagaattcagatgtcagtgggagcctccaggtgggaggagagcatgcctaaaccctggtggccattgttctgtactaaggaacaacattccctttgaaaggacattatttgcctgttgtatttaacttcacagtgccttgcaaagagttgtttaacttgcatggtgccacccaataaatatctgtgcaattgaa

SEQ ID NO: 239530 - protein, 1029 aa, Artificial Sequence
  derived and/or modified sequence
MGLWGKKGTVAPHDQSPRRRPKKGLIKKKMVKREKQKRNMEELKKEVVMDDHKLTLEELSTKYSVDLTKGHSHQRAKEILTRGGPNTVTPPPTTPEWVKFCKQLFGGFSLLLWTGAILCFVAYSIQIYFNEEPTKDNLYLSIVLSVVVIVTGCFSYYQEAKSSKIMESFKNMVPQQALVIRGGEKMQINVQEVVLGDLVEIKGGDRVPADLRLISAQGCKVDNSSLTGESEPQSRSPDFTHENPLETRNICFFSTNCVEGTARGIVIATGDSTVMGRIASLTSGLAVGQTPIAAEIEHFIHLITVVAVFLGVTFFALSLLLGYGWLEAIIFLIGIIVANVPEGLLATVTVCLTLTAKRMARKNCLVKNLEAVETLGSTSTICSDKTGTLTQNRMTVAHMWFDMTVYEADTTEEQTGKTFTKSSDTWFMLARIAGLCNRADFKANQEILPIAKRATTGDASESALLKFIEQSYSSVAEMREKNPKVAEIPFNSTNKYQMSIHLREDSSQTHVLMMKGAPERILEFCSTFLLNGQEYSMNDEMKEAFQNAYLELGGLGERVLGFCFLNLPSSFSKGFPFNTDEINFPMDNLCFVGLISMIDPPRAAVPDAVSKCRSAGIKVIMVTGDHPITAKAIAKGVGIISEGTETAEEVAARLKIPISKVDASAAKAIVVHGAELKDIQSKQLDQILQNHPEIVFARTSPQQKLIIVEGCQRLGAVVAVTGDGVNDSPALKKADIGIAMGISGSDVSKQAADMILLDDNFASIVTGVEEGRLIFDNLKKSIMYTLTSNIPEITPFLMFIILGIPLPLGTITILCIDLGTDMVPAISLAYESAESDIMKRLPRNPKTDNLVNHRLIGMAYGQIGMIQALAGFFTYFVILAENGFRPVDLLGIRLHWEDKYLNDLEDSYGQQWTYEQRKVVEFTCQTAFFVTIVVVQWADLIISKTRRNSLFQQGMRNKVLIFGILEETLLAAFLSYTPGMDVALRMYPLKITWWLCAIPYSILIFVYDEIRKLLIRQHPDGWVERETYY

SEQ ID NO: 239531 - protein, 165 aa, Artificial Sequence
  derived and/or modified sequence
MIQALAGFFTYFVILAENGFRPVDLLGIRLHWEDKYLNDLEDSYGQQWTYEQRKVVEFTCQTAFFVTIVVVQWADLIISKTRRNSLFQQGMRNKVLIFGILEETLLAAFLSYTPGMDVALRMYPLKITWWLCAIPYSILIFVYDEIRKLLIRQHPDGWVERETYY

SEQ ID NO: 239532 - DNA, 3090 bp, Artificial Sequence
  derived and/or modified sequence
atgggcctctggggaaaaaaagggaccgtcgctccacacgaccaatcccctaggcgccgtccgaaaaaaggcctaatcaagaagaagatggtgaagagagaaaagcagaagagaaacatggaagagttgaagaaagaggtggtgatggatgaccataagcttacattagaggaactctccactaagtattctgtggacctgacaaaagggcacagtcaccagcgagctaaggagatactgaccagaggtgggcccaacacagtcactccccccccaacaactcccgaatgggttaagttctgcaaacagctgtttggcgggtttagcttgttactctggactggcgcaatactctgcttcgtggcttactcaattcagatctacttcaacgaggaacctaccaaagataatttgtatttaagcatcgtgctctctgttgtggttattgtgacaggttgtttctcttactaccaggaggctaagtcaagcaagattatggagtcattcaaaaatatggtgccgcagcaagccttggtgataagagggggggagaagatgcagatcaacgtgcaggaggtcgtgctgggagatctcgtggaaattaagggtggggatcgcgtgccggccgatcttcggctgatttcggcacaaggctgcaaggtggacaactcctctcttaccggcgaatctgagccccagtcacgcagcccagattttacgcatgagaaccctttggagacccggaacatatgtttttttagtacaaactgcgtcgaaggcaccgctaggggtattgtgatagcgaccggcgacagcaccgtgatgggccgcatcgctagcctgaccagtggactggccgtgggtcaaacccctatcgccgcagagatagaacattttattcatttaatcacggtcgtagccgtgttcctcggagtcacattctttgcccttagcctgttattgggttacggttggctcgaggcaattattttcctgattggcatcattgttgccaatgtgcctgagggtctcttagccaccgtcactgtgtgtttgaccctgacagccaagcggatggctaggaaaaactgcctcgtgaaaaatttggaggccgtggagactctcggcagcaccagtactatctgctctgataaaactggcacactaacccagaacaggatgacagttgcacatatgtggtttgacatgactgtctacgaagcagataccactgaagagcagacaggaaagacattcaccaagtcctctgacacttggttcatgctggctcgtattgcggggctctgcaaccgggcggattttaaggctaatcaggaaatcctccccatcgctaaaagggccaccaccggcgacgctagcgaatcagcactgctgaagttcattgaacagagttacagctccgtggcagaaatgcgggaaaaaaatcccaaggtagcagaaattccattcaatagcaccaataagtaccagatgagcattcacctacgagaggattccagccaaacacatgtcctgatgatgaaaggcgctcccgagaggatcttggaattctgcagcaccttcttgctgaatggacaggagtactctatgaatgatgagatgaaggaagccttccagaacgcctatcttgagcttggggggcttggcgaacgagtgcttgggttttgctttctgaatctgccatcatcgtttagtaaggggttcccattcaacaccgacgaaataaatttcccaatggacaacctgtgctttgtcggattgatctctatgattgaccctcctagggccgccgtgccggacgccgtgagcaagtgtagaagtgctggcatcaaagttatcatggtgactggggatcacccaataacagccaaagctatagccaaaggggttggcatcatcagcgaggggaccgagacagctgaggaagtcgcagctcggctcaaaatccctatcagcaaagtggacgcatcagcggctaaagccatcgttgtgcacggcgctgaactgaaggacatacagtctaaacagctagaccaaattttacaaaatcaccccgaaattgtattcgctcggactagtccccagcaaaagctgattatcgttgaaggttgccagcggctcggggcagttgtcgctgtcactggggatggcgtgaatgacagcccggcactcaagaaggcggacatcggaatcgcgatgggtataagtgggagcgatgtctctaagcaggcagccgacatgattctgctggacgacaactttgcatcaattgtgacaggagtcgaagagggacggctgatattcgacaacctaaaaaaatccataatgtacactctgacgagcaatattcccgaaattacgccattcctgatgtttataatcctgggaatccccctccctctaggcaccatcactatactgtgcattgatctcggtaccgatatggtgcctgcgatcagcctggcttatgagtccgcggagtcagatattatgaaaaggcttccgcgcaacccaaagaccgacaatcttgtaaaccacaggctgataggaatggcttacggccagatcggcatgatccaggccctggcaggcttctttacctactttgtgattttagcagaaaacggatttaggcccgtggatctcttgggcatacggttacattgggaggacaaatacctgaatgatctggaagactcatatggccaacagtggacctacgaacagagaaaggtggtggaatttacttgtcagactgcctttttcgtcacaatcgtcgtggttcagtgggccgacctaattatctcaaagacaagaagaaactcactctttcaacaaggtatgagaaacaaagtcctcatttttggtatcttggaggagactctgctggctgcatttctgtcctacaccccagggatggacgtggccctgcggatgtaccccttaaaaatcacgtggtggctgtgcgcaataccttattcaatacttatatttgtctacgatgagatccgcaagctgcttatccgccagcatccagacgggtgggtggaacgcgagacctattactag

SEQ ID NO: 239533 - DNA, 3090 bp, Artificial Sequence
  derived and/or modified sequence
atgggcctgtggggcaagaagggcaccgtggcccctcatgaccagagccccaggagaagacccaagaagggcctcatcaagaagaagatggtgaagcgggagaagcagaagaggaacatggaggagctgaagaaggaggtggtgatggatgaccacaagctgaccctggaggagctgagcaccaagtacagcgtggacctgaccaagggccacagccaccagagggccaaggagatcctgacccggggcggccccaacacagtgaccccaccacccaccaccccagagtgggtgaagttctgcaagcagctgtttggaggcttcagcctgctgctgtggacaggagccatcctgtgctttgtggcctacagcatccagatctacttcaatgaggagcccaccaaggacaacctgtacctgagcatcgtgctgtctgtggtggtgattgtgacaggctgcttctcctactaccaggaggccaagagcagcaagatcatggagagcttcaagaacatggtgccccagcaggccctggtgatccggggcggggagaagatgcagatcaacgtgcaggaggtggtgctgggggacctggtggagatcaagggcggggacagagtgcctgctgacctgcggctcatcagcgcccagggctgcaaggtggacaacagcagcctgactggagagagcgagccccagagccgcagcccagacttcacccatgagaaccccctggagaccaggaacatctgcttcttcagcaccaactgtgtggagggcacagcccggggcatcgtgattgccactggagacagcacagtgatgggccgcatcgccagcctgaccagcggcctggccgtgggccagacccccatcgctgctgagattgagcacttcatccacctgatcaccgtggtggccgtgttcctgggcgtgaccttctttgccctgagcctgctgctgggctacggctggctggaggccatcatcttcctgattggcatcatcgtggccaacgtgcctgagggcctgctggccaccgtgacagtgtgcctgaccctgacagccaagaggatggccaggaagaactgcctggtgaagaacctggaggccgtggagaccctgggcagcaccagcaccatctgcagcgacaagacaggcaccctgacccagaacaggatgacagtggcccacatgtggtttgacatgacagtgtatgaggccgacaccacagaggagcagacaggcaagaccttcaccaagagcagtgacacctggttcatgctggccagaattgctggcctgtgcaacagagctgacttcaaggccaaccaggagatcctgcccatcgccaagagggccaccactggagatgccagcgagagcgccctgctgaagttcatcgagcagagctacagctctgtggccgagatgagggagaagaaccccaaggtggccgagatccccttcaacagcaccaacaagtaccagatgagcatccacctgcgggaggacagcagccagacccacgtgctgatgatgaagggggcccctgagcgcatcctggagttctgcagcaccttcctgctgaatggccaggagtacagcatgaatgatgagatgaaggaggccttccagaatgcctacctggagctgggcggcctgggggagcgggtgctgggcttctgcttcctgaacctgcccagcagcttcagcaagggcttccccttcaacacagatgagatcaacttccccatggacaacctgtgctttgtgggcctcatctccatgattgacccccccagggctgctgtgcctgatgctgtgtccaaatgtagatctgctggcatcaaggtgatcatggtgactggagaccaccccatcacagccaaggccatcgccaagggcgtgggcatcatcagcgagggcacagaaacagctgaggaggtggccgcccggctgaagatccccatcagcaaggtggatgccagcgctgccaaggccatcgtggtgcacggggctgagctgaaggacatccagagcaagcagctggaccagatcctgcagaaccaccctgagatcgtgtttgcccggaccagcccccagcagaagctgatcatcgtggagggctgccagaggctgggcgctgtggtggccgtgactggagatggagtgaatgacagccctgccctgaagaaggctgacatcggcatcgccatgggcatcagcggcagtgatgtgtccaagcaggccgctgacatgatcctgctggatgacaactttgccagcatcgtgactggagtggaggagggccgcctcatctttgacaacctgaagaagagcatcatgtacaccctgaccagcaacatccctgagatcacccccttcctgatgttcatcatcctgggcatccccctgcccctgggcaccatcaccatcctgtgcatcgacctgggcacagacatggtgcctgccatcagcctggcctatgagagcgctgagagtgacatcatgaagaggctgcccaggaaccccaagacagacaacctggtgaaccacaggctcatcggcatggcctacggccagatcggcatgatccaggccctggccggcttcttcacctacttcgtcatcctggctgaaaatggcttccggcctgtggacctgctgggcatccggctgcactgggaggacaagtacctgaatgacctggaggacagctatggccagcagtggacctatgagcagaggaaggtggtggagttcacctgccagacagccttctttgtgaccatcgtggtggtgcagtgggccgacctgatcatcagcaagaccaggaggaacagcctcttccagcagggcatgaggaacaaggtgctgatcttcggcatcctggaggagaccctgctggccgccttcctgagctacaccccaggcatggatgtggccctgaggatgtaccccctgaagatcacctggtggctgtgtgccatcccctacagcatcctgatctttgtgtatgatgagatcaggaagctgctgatccggcagcacccagatggctgggtggagcgggagacctactactag

SEQ ID NO: 239534 - DNA, 3090 bp, Artificial Sequence
  derived and/or modified sequence
atgggcctgtggggcaagaagggcaccgtggccccccacgaccagtcacctcgacggcgccctaagaagggtctcatcaagaaaaagatggtgaagcgagaaaaacagaagaggaatatggaggaactgaaaaaagaggtggtaatggatgaccataagctcacgctcgaagagctcagcacgaagtattctgtggatctgacaaaaggacattcacatcaaagagccaaagagattttaacaagaggaggccccaatactgtgacccctcccccaactactcccgagtgggtgaagttttgtaagcaactgtttggcggattcagtttgttactctggacgggagccattctctgcttcgtggcatactctattcaaatttacttcaatgaggagcctactaaggataacttgtacttgtctatagtgctcagcgttgtcgtgatcgtgactgggtgcttctcatactatcaagaggccaagtctagcaaaatcatggaaagtttcaagaacatggtgcctcagcaggccctggtaatccggggtggcgaaaaaatgcagatcaatgttcaggaggtcgtactgggcgacctcgtggagattaaaggaggcgaccgagtgccagcagatttacggctcatttccgctcaaggctgcaaggtggacaatagctccttgactggtgagtccgaaccccagagccgcagccccgactttacacatgagaaccctctggagacccgaaacatatgtttcttctcaacaaattgtgtggaaggcacagcccgtgggatcgttattgccactggagactccacagtcatgggcaggatagcctctctgacaagcggattggccgtcggccagacacccatcgcggcagagattgagcattttatccacctgattacggtggtagccgtgttcctcggggtgacattttttgccctgagccttttacttggctacggctggttggaagccatcatcttcctaattgggattatcgtcgccaatgtgccagagggattgctcgcaacagttactgtttgcctgactctgacagctaaaaggatggccaggaaaaattgtttggtaaagaatctggaagccgtggaaacgcttggctcgacatcaacaatttgctcagacaagaccgggacactcacgcaaaaccgcatgacagtggcacacatgtggttcgacatgacagtgtacgaggcagacaccacagaagagcagacaggcaaaaccttcacaaaatcgtctgacacgtggttcatgctcgcccgaatagccggcctgtgtaaccgcgccgacttcaaggctaatcaggaaatcctacctatcgcaaaacgcgctaccaccggtgacgcgtctgaaagcgcactcctgaagttcatcgagcaaagttattcctccgtggcagagatgcgcgaaaaaaatccaaaagtggcggaaattccttttaacagcaccaacaagtatcagatgagcatacacctacgtgaggattcatcccagactcacgttttaatgatgaagggtgcccctgagaggatcctcgagttttgtagcactttccttcttaacggacaggaatacagcatgaatgatgaaatgaaggaggcctttcagaacgcttacttggaactggggggcctgggagagagggtacttggtttttgttttttgaatctgccttccagtttcagtaagggcttcccgttcaatactgacgaaattaactttccaatggacaacctgtgttttgtcggactgattagcatgatagatcccccacgtgcagccgtgcctgacgcagtaagcaagtgccgcagtgccggaattaaagtgatcatggtgacgggtgaccaccccatcacggctaaggctattgcgaagggggtgggcatcatctctgaaggcactgagacagctgaggaagtggccgcccggctcaaaatccctatatctaaggtcgatgcgtccgccgcaaaagccatcgtcgtccacggtgctgagctcaaagatatccaaagcaaacagctggaccagattttgcagaatcaccccgaaattgttttcgcgcgcacaagtcctcagcagaagctgattatcgtcgaagggtgtcagcggttaggagccgtcgtggccgtgactggtgatggggtgaacgattctccagccctcaaaaaggccgacattgggatcgccatgggaattagcgggtccgacgtctctaagcaggctgcagacatgatactgttagatgataacttcgcttctattgtgacgggcgtggaagagggacgcctcattttcgataatttgaaaaaatccatcatgtacaccctaacgagcaacattccagagattactccttttttgatgtttataatccttggcatccctctccctctgggcaccatcacgatcttatgtatcgacttgggaacagacatggtgccagctatcagtctagcatacgaatctgccgaaagcgacattatgaaacgtctgccccgcaatccaaagacggataacctggttaatcacagactaattgggatggcctatggacaaataggcatgatacaagccctggcaggattcttcacatatttcgtgatactagcggagaacggattccgcccagtagacctgctgggaatccgtctgcactgggaggacaagtacctcaacgacctggaggactcgtatggccaacagtggacatacgagcagcgtaaagtcgttgaatttacatgccagaccgctttttttgtaactattgtggtggttcagtgggcagacctaataatctctaaaacacggcggaatagcttgtttcagcaaggtatgaggaacaaggttctaatctttggcatactggaggagacgctcttagcagcctttctctcctacacccccggaatggatgtagccctgcgcatgtacccattgaaaatcacatggtggttgtgtgctattccatactcaatcctcatttttgtctatgacgaaatcagaaaactgcttatacgtcagcatcctgacggctgggtggagcgcgagacgtattattag

SEQ ID NO: 239535 - DNA, 3090 bp, Artificial Sequence
  derived and/or modified sequence
atggggctctggggtaagaaaggaacagtggcaccccacgaccagtcgccccgaagaagaccgaagaagggcctcatcaagaaaaaaatggtaaagcgtgagaaacaaaagcggaacatggaggagctgaagaaagaggtggtaatggatgatcataaactgactctggaggaattaagtaccaagtactcggtagacctcacaaaagggcacagtcatcagagggccaaggaaattctcacacggggaggaccaaacaccgtgacaccaccccctacgacccccgaatgggtgaaattctgcaagcagctctttggaggtttcagtttgttactgtggacaggcgctatactttgtttcgtcgcatattccattcagatctattttaatgaagagcctacaaaggataatctctacctaagtatcgtgctgtccgtagtggtgattgtcacgggatgtttcagctactaccaggaggcaaaatcttcaaagatcatggagtcctttaagaatatggttccccagcaggcgcttgttataaggggaggcgagaagatgcaaattaacgtccaggaggtggtgttgggcgaccttgtggaaattaaggggggagaccgagtgcccgctgaccttcggcttatttcagctcagggctgtaaagtggataactcatccctaactggcgagagcgagccgcagtctcgatcaccagattttacccatgaaaatccccttgagactcggaacatctgtttcttttccactaattgtgtcgaagggactgcaaggggcattgtgatcgctaccggcgactctaccgttatgggcaggatagcgtcactaactagcggcttagcggtgggtcagacccctattgcggcagagattgagcactttatccatctcatcactgttgtggccgtcttcctaggggtgactttctttgccttatccttgctcttgggatatggctggcttgaagccattattttcttgattggcattatcgtggccaatgttccagagggcttgctggctacagtgactgtgtgcctcacgctcactgctaaaagaatggccagaaagaattgtttagtgaaaaaccttgaagctgttgaaaccctcggctccacctccactatctgtagtgacaagactgggacattgactcaaaacaggatgaccgtggcccatatgtggttcgatatgactgtgtatgaggcagacacgaccgaagagcagacaggcaagaccttcaccaagtcctctgacacgtggttcatgctggcccgaatagctgggctgtgcaacagggccgatttcaaggccaaccaggagattttgcccatcgccaagagagcgacgaccggggacgcctcagagagtgcattgctaaagttcatcgagcagtcttacagctcggttgcggagatgagagaaaagaaccccaaagtagccgaaatcccattcaacagtactaacaaataccagatgagcatccacctgcgcgaggacagtagtcagacccatgtgctcatgatgaagggagcaccagaacggattctggaattctgctctacgttcctgctgaatggccaagaatactcaatgaacgatgagatgaaagaagcctttcagaacgcatatctcgaacttggtggcctcggcgaacgagtcctcggattttgtttcctcaatctgccgagttcatttagcaaagggttcccctttaataccgatgaaatcaatttcccaatggataacctctgttttgtaggcctaatttcgatgatcgaccccccaagggcagcggtgcctgacgctgtgagcaagtgcagatctgcagggataaaggtaattatggtgacaggggaccatccgatcaccgctaaggccattgctaaaggcgtgggcattatcagcgagggaaccgagacagcggaagaagtggcagctcggcttaaaatccccatttccaaggtcgacgcctccgctgccaaagcgatcgtagtgcacggtgccgaactgaaagatattcagagcaaacagcttgaccagatcctgcagaatcaccctgagattgtctttgcgcgaacttctccccagcagaagctaataattgtcgaagggtgccagcggcttggggcagttgtggctgtgactggagacggcgttaatgacagcccagcactgaagaaggccgatatcggtattgccatgggtatatccgggtccgatgtttcgaaacaagcagcagacatgattttgctggacgataattttgcctcgatcgtgaccggagtggaggagggcaggctcattttcgacaatcttaagaagtctattatgtacaccttaacgtcgaacattcctgagattactcctttcctgatgttcatcatactgggtatccctctgccgctggggaccattacaattctgtgtatcgacctcgggactgacatggtacccgctatttctctagcttatgaaagtgccgagagcgacattatgaaaaggctcccaagaaatcctaagacagataatctggtgaatcatcggctgatcgggatggcatacggtcagattggtatgattcaggctctcgcaggcttcttcacgtattttgttattctcgcagagaacgggttccgcccagtagacctgctcggaattcggctccactgggaagataaatatttgaatgacctggaggactcttatggccaacagtggacatatgaacagaggaaagtggtcgagtttacctgtcaaaccgcttttttcgttactatcgttgtggtccaatgggccgacctaattatcagtaaaactaggcgcaattccctgtttcagcagggaatgcgcaacaaggtgttaatctttgggatcctcgaggaaaccctgctggccgcttttttaagttataccccaggcatggatgtcgcgcttaggatgtatccactgaagatcacttggtggttgtgcgctattccgtacagtatacttatctttgtgtacgacgagattcgtaagctcctcatcagacaacaccctgacggctgggtggaaagggagacttattactag

SEQ ID NO: 239536 - DNA, 3839 bp, Artificial Sequence
  derived and/or modified sequence
agcaaccacagggcctgggactggggggttcccagatccttgaagctcactccgcctcctcactctcactgcatttcccaccttcctgtgggccttgcggcatcttcatcactgaggcacctggttacgcttcacctcttgtttcctgccctcactgcattccctcacctctacctttttatccttccaccctaggcttctctcctccctcttccctcactcctgactcttcctcttcccagcggacggctggaggaccgctcagtctctcctctctcacttcccttcctctctctcaccttcaccacccaacacctccctccctgcctctttctttctgctccctcattctctccccaccactctcttctcgtggcccccttgcccgcgcgccctcttcccttccccttgcctcactctctcagctttcttcccacagttgagctcgggcagctctttctggggatagctatggggctttgggggaagaaagggacagtggctccccatgaccagagtccaagacgaagacctaaaaaagggcttatcaagaaaaaaatggtgaagagggaaaaacagaagcgcaatatggaggaactgaagaaggaagtggtcatggatgatcacaaattaaccttggaagagctgagcaccaagtactccgtggacctgacaaagggccatagccaccaaagggcaaaggaaatcctgactcgaggtggacccaatactgttaccccaccccccaccactccagaatgggtcaaattctgtaagcaactgttcggaggcttctccctcctactatggactggggccattctctgctttgtggcctacagcatccagatatatttcaatgaggagcctaccaaagacaacctctacctgagcatcgtactgtccgtcgtggtcatcgtcactggctgcttctcctattatcaggaggccaagagctccaagatcatggagtcttttaagaacatggtgcctcagcaagctctggtaattcgaggaggagagaagatgcaaattaatgtacaagaggtggtgttgggagacctggtggaaatcaagggtggagaccgagtccctgctgacctccggcttatctctgcacaaggatgtaaggtggacaactcatccttgactggggagtcagaaccccagagccgctcccctgacttcacccatgagaaccctctggagacccgaaacatctgcttcttttccaccaactgtgtggaaggaaccgcccggggtattgtgattgctacgggagactccacagtgatgggcagaattgcctccctgacgtcaggcctggcggttggccagacacctatcgctgctgagatcgaacacttcatccatctgatcactgtggtggccgtcttccttggtgtcactttttttgcgctctcacttctcttgggctatggttggctggaggctatcatttttctcattggcatcattgtggccaatgtgcctgaggggctgttggccacagtcactgtgtgcctgaccctcacagccaagcgcatggcgcggaagaactgcctggtgaagaacctggaggcggtggagacgctgggctccacgtccaccatctgctcagacaagacgggcaccctcacccagaaccgcatgaccgtcgcccacatgtggtttgatatgaccgtgtatgaggccgacaccactgaagaacagactggaaaaacatttaccaagagctctgatacctggtttatgctggcccgaatcgctggcctctgcaaccgggctgactttaaggctaatcaggagatcctgcccattgctaagagggccacaacaggtgatgcttccgagtcagccctcctcaagttcatcgagcagtcttacagctctgtggcggagatgagagagaaaaaccccaaggtggcagagattccctttaattctaccaacaagtaccagatgtccatccaccttcgggaggacagctcccagacccacgtactgatgatgaagggtgctccggagaggatcttggagttttgttctacctttcttctgaatgggcaggagtactcaatgaacgatgaaatgaaggaagccttccaaaatgcctacttagaactgggaggtctgggggaacgtgtgctaggcttctgcttcttgaatctgcctagcagcttctccaagggattcccatttaatacagatgaaataaatttccccatggacaacctttgttttgtgggcctcatatccatgattgaccctccccgagctgcagtgcctgatgctgtgagcaagtgtcgcagtgcaggaattaaggtgatcatggtaacaggagatcatcccattacagctaaggccattgccaagggtgtgggcatcatctcagaaggcactgagacggcagaggaagtcgctgcccggcttaagatccctatcagcaaggtcgatgccagtgctgccaaagccattgtggtgcatggtgcagaactgaaggacatacagtccaagcagcttgatcagatcctccagaaccaccctgagatcgtgtttgctcggacctcccctcagcagaagctcatcattgtcgagggatgtcagaggctgggagccgttgtggccgtgacaggtgacggggtgaacgactcccctgcgctgaagaaggctgacattggcattgccatgggcatctctggctctgacgtctctaagcaggcagccgacatgatcctgctggatgacaactttgcctccatcgtcacgggggtggaggagggccgcctgatctttgacaacctgaagaaatccatcatgtacaccctgaccagcaacatccccgagatcacgcccttcctgatgttcatcatcctcggtatacccctgcctctgggaaccataaccatcctctgcattgatctcggcactgacatggtccctgccatctccttggcttatgagtcagctgaaagcgacatcatgaagaggcttccaaggaacccaaagacggataatctggtgaaccaccgtctcattggcatggcctatggacagattgggatgatccaggctctggctggattctttacctactttgtaatcctggctgagaatggttttaggcctgttgatctgctgggcatccgcctccactgggaagataaatacttgaatgacctggaggacagctacggacagcagtggacctatgagcaacgaaaagttgtggagttcacatgccaaacggccttttttgtcaccatcgtggttgtgcagtgggcggatctcatcatctccaagactcgccgcaactcacttttccagcagggcatgagaaacaaagtcttaatatttgggatcctggaggagacactcttggctgcatttctgtcctacactccaggcatggacgtggccctgcgaatgtacccactcaagataacctggtggctctgtgccattccctacagtattctcatcttcgtctatgatgaaatcagaaaactcctcatccgtcagcacccggatggctgggtggaaagggagacgtactactaaactcagcagatgaagagcttcatgtgacacaggggtgttgtgagagctgggatggggccagagattataagtttgacacaacatctgagacactaggatgaattatcttggatgagaaagatgggcaatcctgggctggcttgagggaatcatgggcagaggatgaggtgggctgaagggaagcccagcctgcatctagctggagccccgcagggaggggcatggtcctgctgaatcccgtagccagtctagacagtaaatgtctggaaaagccctca

SEQ ID NO: 239537 - DNA, 3090 bp, Artificial Sequence
  derived and/or modified sequence
atgggcctgtggggcaagaagggcaccgtggccccccacgaccagagccccagaagaagacccaagaagggcctgatcaagaagaagatggtgaagagagagaagcagaagagaaacatggaggagctgaagaaggaggtggtgatggacgaccacaagctgaccctggaggagctgagcaccaagtacagcgtggacctgaccaagggccacagccaccagagagccaaggagatcctgaccagaggcggccccaacaccgtgacccccccccccaccacccccgagtgggtgaagttctgcaagcagctgttcggcggcttcagcctgctgctgtggaccggcgccatcctgtgcttcgtggcctacagcatccagatctacttcaacgaggagcccaccaaggacaacctgtacctgagcatcgtgctgagcgtggtggtgatcgtgaccggctgcttcagctactaccaggaggccaagagcagcaagatcatggagagcttcaagaacatggtgccccagcaggccctggtgatcagaggcggcgagaagatgcagatcaacgtgcaggaggtggtgctgggcgacctggtggagatcaagggcggcgacagagtgcccgccgacctgagactgatcagcgcccagggctgcaaggtggacaacagcagcctgaccggcgagagcgagccccagagcagaagccccgacttcacccacgagaaccccctggagaccagaaacatctgcttcttcagcaccaactgcgtggagggcaccgccagaggcatcgtgatcgccaccggcgacagcaccgtgatgggcagaatcgccagcctgaccagcggcctggccgtgggccagacccccatcgccgccgagatcgagcacttcatccacctgatcaccgtggtggccgtgttcctgggcgtgaccttcttcgccctgagcctgctgctgggctacggctggctggaggccatcatcttcctgatcggcatcatcgtggccaacgtgcccgagggcctgctggccaccgtgaccgtgtgcctgaccctgaccgccaagagaatggccagaaagaactgcctggtgaagaacctggaggccgtggagaccctgggcagcaccagcaccatctgcagcgacaagaccggcaccctgacccagaacagaatgaccgtggcccacatgtggttcgacatgaccgtgtacgaggccgacaccaccgaggagcagaccggcaagaccttcaccaagagcagcgacacctggttcatgctggccagaatcgccggcctgtgcaacagagccgacttcaaggccaaccaggagatcctgcccatcgccaagagagccaccaccggcgacgccagcgagagcgccctgctgaagttcatcgagcagagctacagcagcgtggccgagatgagagagaagaaccccaaggtggccgagatccccttcaacagcaccaacaagtaccagatgagcatccacctgagagaggacagcagccagacccacgtgctgatgatgaagggcgcccccgagagaatcctggagttctgcagcaccttcctgctgaacggccaggagtacagcatgaacgacgagatgaaggaggccttccagaacgcctacctggagctgggcggcctgggcgagagagtgctgggcttctgcttcctgaacctgcccagcagcttcagcaagggcttccccttcaacaccgacgagatcaacttccccatggacaacctgtgcttcgtgggcctgatcagcatgatcgacccccccagagccgccgtgcccgacgccgtgagcaagtgcagaagcgccggcatcaaggtgatcatggtgaccggcgaccaccccatcaccgccaaggccatcgccaagggcgtgggcatcatcagcgagggcaccgagaccgccgaggaggtggccgccagactgaagatccccatcagcaaggtggacgccagcgccgccaaggccatcgtggtgcacggcgccgagctgaaggacatccagagcaagcagctggaccagatcctgcagaaccaccccgagatcgtgttcgccagaaccagcccccagcagaagctgatcatcgtggagggctgccagagactgggcgccgtggtggccgtgaccggcgacggcgtgaacgacagccccgccctgaagaaggccgacatcggcatcgccatgggcatcagcggcagcgacgtgagcaagcaggccgccgacatgatcctgctggacgacaacttcgccagcatcgtgaccggcgtggaggagggcagactgatcttcgacaacctgaagaagagcatcatgtacaccctgaccagcaacatccccgagatcacccccttcctgatgttcatcatcctgggcatccccctgcccctgggcaccatcaccatcctgtgcatcgacctgggcaccgacatggtgcccgccatcagcctggcctacgagagcgccgagagcgacatcatgaagagactgcccagaaaccccaagaccgacaacctggtgaaccacagactgatcggcatggcctacggccagatcggcatgatccaggccctggccggcttcttcacctacttcgtgatcctggccgagaacggcttcagacccgtggacctgctgggcatcagactgcactgggaggacaagtacctgaacgacctggaggacagctacggccagcagtggacctacgagcagagaaaggtggtggagttcacctgccagaccgccttcttcgtgaccatcgtggtggtgcagtgggccgacctgatcatcagcaagaccagaagaaacagcctgttccagcagggcatgagaaacaaggtgctgatcttcggcatcctggaggagaccctgctggccgccttcctgagctacacccccggcatggacgtggccctgagaatgtaccccctgaagatcacctggtggctgtgcgccatcccctacagcatcctgatcttcgtgtacgacgagatcagaaagctgctgatcagacagcaccccgacggctgggtggagagagagacctactactag

SEQ ID NO: 239538 - protein, 605 aa, Artificial Sequence
  derived and/or modified sequence
MGGCFSKPKPVELKIEVVLPEKERGKEELSASGKGSPRAYQGNGTARHFHTEERLSTPHPYPSPQDCVEAAVCHVKDLENGQMREVELGWGKVLLVKDNGEFHALGHKCPHYGAPLVKGVLSRGRVRCPWHGACFNISTGDLEDFPGLDSLHKFQVKIEKEKVYVRASKQALQLQRRTKVMAKCISPSAGYSSSTNVLIVGAGAAGLVCAETLRQEGFSDRIVLCTLDRHLPYDRPKLSKSLDTQPEQLALRPKEFFRAYGIEVLTEAQVVTVDVRTKKVVFKDGFKLEYSKLLLAPGSSPKTLSCKGKEVENVFTIRTPEDANRVVRLARGRNVVVVGAGFLGMEVAAYLTEKAHSVSVVELEETPFRRFLGERVGRALMKMFENNRVKFYMQTEVSELRGQEGKLKEVVLKSSKVVRADVCVVGIGAVPATGFLRQSGIGLDSRGFIPVNKMMQTNVPGVFAAGDAVTFPLAWRNNRKVNIPHWQMAHAQGRVAAQNMLAQEAEMSTVPYLWTAMFGKSLRYAGYGEGFDDVIIQGDLEELKFVAFYTKGDEVIAVASMNYDPIVSKVAEVLASGRAIRKREVELFVLHSKTGDMSWLTGKGS

SEQ ID NO: 239539 - protein, 129 aa, Artificial Sequence
  derived and/or modified sequence
MGGCFSKPKPVELKIEVVLPEKERGKEELSASGKGSPRAYQGNGTARHFHTEERLSTPHPYPSPQDCVEAAVCHVKDLENGQMREVELGWGKVLLVKDNGEFHALGHKCPHYGAPLVKGVLSRGRVRCP

SEQ ID NO: 239540 - DNA, 1818 bp, Artificial Sequence
  derived and/or modified sequence
atgggcggctgcttcagcaagcccaagcccgtggagctgaagatcgaggtggtgctgcccgagaaggagagaggcaaggaggagctgagcgccagcggcaagggcagccccagagcctaccagggcaacggcaccgccagacacttccacaccgaggagagactgagcaccccccacccctaccccagcccccaggactgcgtggaggccgccgtgtgccacgtgaaggacctggagaacggccagatgagagaggtggagctgggctggggcaaggtgctgctggtgaaggacaacggcgagttccacgccctgggccacaagtgcccccactacggcgcccccctggtgaagggcgtgctgagcagaggcagagtgagatgcccctggcacggcgcctgcttcaacatcagcaccggcgacctggaggacttccccggcctggacagcctgcacaagttccaggtgaagatcgagaaggagaaggtgtacgtgagagccagcaagcaggccctgcagctgcagagaagaaccaaggtgatggccaagtgcatcagccccagcgccggctacagcagcagcaccaacgtgctgatcgtgggcgccggcgccgccggcctggtgtgcgccgagaccctgagacaggagggcttcagcgacagaatcgtgctgtgcaccctggacagacacctgccctacgacagacccaagctgagcaagagcctggacacccagcccgagcagctggccctgagacccaaggagttcttcagagcctacggcatcgaggtgctgaccgaggcccaggtggtgaccgtggacgtgagaaccaagaaggtggtgttcaaggacggcttcaagctggagtacagcaagctgctgctggcccccggcagcagccccaagaccctgagctgcaagggcaaggaggtggagaacgtgttcaccatcagaacccccgaggacgccaacagagtggtgagactggccagaggcagaaacgtggtggtggtgggcgccggcttcctgggcatggaggtggccgcctacctgaccgagaaggcccacagcgtgagcgtggtggagctggaggagacccccttcagaagattcctgggcgagagagtgggcagagccctgatgaagatgttcgagaacaacagagtgaagttctacatgcagaccgaggtgagcgagctgagaggccaggagggcaagctgaaggaggtggtgctgaagagcagcaaggtggtgagagccgacgtgtgcgtggtgggcatcggcgccgtgcccgccaccggcttcctgagacagagcggcatcggcctggacagcagaggcttcatccccgtgaacaagatgatgcagaccaacgtgcccggcgtgttcgccgccggcgacgccgtgaccttccccctggcctggagaaacaacagaaaggtgaacatcccccactggcagatggcccacgcccagggcagagtggccgcccagaacatgctggcccaggaggccgagatgagcaccgtgccctacctgtggaccgccatgttcggcaagagcctgagatacgccggctacggcgagggcttcgacgacgtgatcatccagggcgacctggaggagctgaagttcgtggccttctacaccaagggcgacgaggtgatcgccgtggccagcatgaactacgaccccatcgtgagcaaggtggccgaggtgctggccagcggcagagccatcagaaagagagaggtggagctgttcgtgctgcacagcaagaccggcgacatgagctggctgaccggcaagggcagctag

SEQ ID NO: 239541 - DNA, 1818 bp, Artificial Sequence
  derived and/or modified sequence
atggggggctgcttttcaaaacccaagcccgttgagctcaaaatagaagttgtgctccctgaaaaagagagaggaaaggaagagttaagcgcctccggaaagggctccccacgggcataccaaggtaacgggacagcccgccactttcacactgaagaaagattatcgacacctcacccgtacccatcaccacaggactgcgttgaagctgccgtttgccatgtgaaggatcttgagaacgggcaaatgcgggaggtcgagctggggtggggaaaggtgcttctagtgaaggataatggcgaatttcatgctctcgggcataaatgcccacactatggcgccccgcttgtcaagggggtcctgagtcgcggtcgcgtgcgatgcccatggcatggagcctgcttcaacataagcacaggagacctggaggacttccccggtctcgattctctgcataaattccaggtgaaaattgaaaaggaaaaagtctacgtgcgtgctagcaaacaagctctgcagctgcagaggaggacaaaagtaatggccaagtgcatttcacctagcgccggctattcctcctccacaaatgtgctaattgtgggggccggtgctgccggcctcgtgtgcgccgagactcttcggcaagaaggcttctcagacagaatagtgctgtgcacgctcgatcggcacctaccctatgatcggccgaagctctctaaatctctggacacacagccagaacagctcgcactccgtcccaaagagtttttccgtgcttacgggatcgaggtactgacagaggcccaggtggtcacagtcgatgtgcggaccaagaaagtggtcttcaaagacgggtttaagctcgagtattctaaactgttgctcgctcccgggagctccccaaaaaccctgtcatgtaaagggaaggaagtagaaaatgtttttaccatcagaaccccggaggacgctaatcgtgttgtcagacttgcaagaggcaggaacgtcgtcgtcgtgggtgcggggtttctcgggatggaggtggcagcctacctcacggaaaaagctcacagtgtgtccgtggtggagttggaggagacccccttcaggagatttttgggcgaaagggtgggtagagctctgatgaagatgttcgagaataatcgcgtaaaattttatatgcagaccgaagtcagtgaattgagaggccaggaaggaaaattgaaggaagtcgtgctgaaatcttccaaagtggttagagctgacgtatgcgtggtgggcattggggccgttcccgcgaccggatttcttaggcaaagtgggatcggtctggactcccgcgggtttattccagtcaacaaaatgatgcagacaaacgtcccaggcgtctttgcagccggagatgcggtcacctttcccctagcatggcgaaacaaccggaaagtcaacataccacactggcagatggcccacgcccagggccgcgtcgcggcccagaatatgctggctcaggaggcagaaatgtctaccgtgccctatctctggactgccatgttcggcaagtctcttagatatgccggctacggggaggggtttgacgatgtgatcatacagggtgatctggaggaactgaagtttgttgctttctataccaaaggagacgaggtgattgcagtcgctagcatgaactacgaccccattgtgagcaaggtggcagaggtcctggcctcagggcgtgccatcaggaaaagggaggtggagttattcgttcttcattcaaaaactggagacatgtcttggctgactgggaagggcagttag

SEQ ID NO: 239542 - DNA, 1818 bp, Artificial Sequence
  derived and/or modified sequence
atgggcggctgcttctccaagccaaaacctgtggagctaaaaatcgaggtggtgttgcctgagaaagagagaggcaaggaggaactctctgcctcaggaaaaggttctccaagagcctaccagggcaacggaacagcgaggcactttcatactgaagaaagactctctaccccccacccctacccttcaccccaggactgtgtggaagccgccgtttgccacgttaaggatttagagaacggccagatgcgagaggtggaactgggttgggggaaggtgctgctcgttaaagataatggcgaattccacgccttagggcacaaatgcccgcactatggagcccctctggtcaagggtgttctctctaggggtagagttagatgtccctggcacggcgcttgcttcaatatttccaccggggatctggaggatttcccaggtctggactctctgcacaaattccaggtaaagatcgagaaggaaaaggtctacgtgcgggcctcaaaacaggctttgcagctgcagcggcggaccaaagtcatggccaaatgtatcagtcccagtgctggttatagttcctcgacaaatgtactcatcgtgggcgctggtgccgccgggcttgtgtgcgctgagaccttacggcaagaggggttctcagacaggatagtactttgcacacttgaccggcatttgccttacgatcgtcctaagctgagcaaatccctcgacactcagcccgaacagctggctctccgacccaaggagttttttcgggcatatgggattgaagtgctgactgaagcccaggtggtaacggtcgacgttaggacaaagaaggtggtgtttaaggatgggtttaaactggagtacagtaaactgctcctggcccctggcagtagtcccaagaccctcagctgtaaggggaaagaggtcgagaacgtgtttacaatccggacaccagaggatgcgaatagagtagtccggcttgcaaggggtcgcaacgttgttgtcgtcggggccgggttcctgggtatggaggttgccgcgtacctgaccgaaaaagctcacagcgttagcgtggttgagctggaggaaactccctttcggcggttccttggagaacgcgtaggcagagctctgatgaaaatgttcgagaacaatcgagtcaagttctacatgcagacagaagtaagcgagctgcggggtcaagaagggaagctaaaggaggtggtcctgaaatcctctaaggttgttagggccgatgtatgtgtggtcggcatcggggcagtccccgccacaggatttctccggcaaagcggcattgggttagatagcagaggatttatcccagtgaacaaaatgatgcagacgaacgttccaggtgtgttcgccgcaggcgacgctgtcacctttccattggcatggcgcaataatcggaaggtaaatatcccacactggcagatggctcacgcacagggtcgcgtcgccgcccagaatatgctggcgcaggaagccgagatgagtactgtgccatatctctggaccgccatgtttggcaagtctctccgctacgcgggatatggcgaggggttcgacgatgttataatacagggagatcttgaagaacttaagtttgtggctttttacacaaaaggggatgaggtgattgcagtggcatcaatgaattacgaccccatcgtgtctaaggtcgcagaagtgctggcaagcggcagggcaatcaggaaacgggaggtagaactgttcgtcctgcacagtaagacaggcgacatgtcatggctcacaggcaagggctcgtag

SEQ ID NO: 239543 - DNA, 1818 bp, Artificial Sequence
  derived and/or modified sequence
atgggcggctgcttcagcaagcccaagcctgtggagctgaagattgaggtggtgctgcctgagaaggagcggggcaaggaggagctgagcgccagcggcaagggcagcccccgggcctaccagggcaatggaacagcccggcacttccacacagaggagcggctgagcaccccccacccctaccccagcccccaggactgtgtggaggccgctgtgtgccacgtgaaggacctggagaatggccagatgagggaggtggagctgggctggggcaaggtgctgctggtgaaggacaatggagagttccacgccctgggccacaagtgcccccactacggggcccccctggtgaagggcgtgctgagccggggccgggtgcgctgcccctggcatggagcctgcttcaacatcagcactggagacctggaggacttccctggcctggacagcctgcacaagttccaggtgaagattgagaaggagaaggtgtatgtgcgggccagcaagcaggccctgcagctgcagaggaggaccaaggtgatggccaagtgcatcagccccagcgctggctacagcagcagcaccaacgtgctgattgtgggcgctggagctgctggcctggtgtgtgccgagaccctgcggcaggagggcttcagtgaccgcatcgtgctgtgcaccctggacagacacctgccctatgaccggcccaagctgagcaagagcctggacacccagcctgagcagctggccctgcggcccaaggagttcttccgggcctacggcatcgaggtgctgacagaggcccaggtggtgacagtggatgtgaggaccaagaaggtggtgttcaaggatggcttcaagctggagtacagcaagctgctgctggcccctggcagcagccccaagaccctgagctgcaagggcaaggaggtggagaatgtgttcaccatccgcaccccagaagatgccaacagagtggtgcggctggcccggggcagaaatgtggtggtggtgggcgccggcttcctgggcatggaggtggccgcctacctgacagagaaggcccacagcgtgtctgtggtggagctggaggagacccccttccgccgcttcctgggggagcgggtgggccgggccctgatgaagatgtttgagaacaacagagtgaagttctacatgcagacagaggtgtctgagctgcggggccaggagggcaagctgaaggaggtggtgctgaagagcagcaaggtggtgcgggcagatgtgtgtgtggtgggcattggagctgtgcctgccaccggcttcctgcggcagagcggcatcggcctggacagccggggcttcatccctgtgaacaagatgatgcagaccaacgtgcctggggtgtttgctgctggagatgctgtgaccttccccctggcctggaggaacaacaggaaggtgaacatcccccactggcagatggcccacgcccagggccgggtggccgcccagaacatgctggcccaggaggccgagatgagcacagtgccctacctgtggacagccatgtttgggaagagcctgcgctatgccggctatggagagggctttgatgatgtgatcatccagggcgacctggaggagctgaagtttgtggccttctacaccaagggagatgaggtgattgctgtggcctccatgaactatgaccccatcgtgtccaaggtggccgaggtgctggccagcggccgggccatcaggaagcgggaggtggagctgtttgtgctgcacagcaagacaggagacatgtcctggctgaccgggaagggcagctag

SEQ ID NO: 239544 - DNA, 1818 bp, Artificial Sequence
  derived and/or modified sequence
atgggcggctgcttcagcaagcccaagcccgtggagctgaagatcgaggtcgtcctgccagaaaaggaacgcggtaaggaggaactctctgcatccggaaagggctccccacgcgcttaccagggcaacggtacagcacggcacttccacactgaggaacgtcttagtacccctcatccctaccccagccctcaggattgcgttgaggcggctgtgtgtcatgtcaaagatctggaaaatggccaaatgagggaagtggagctggggtgggggaaagtgctcctagtcaaggacaacggtgagtttcatgctctgggccataaatgtccacattatggcgcgcctctggtcaaaggggtattatcaaggggaagagtgcggtgcccgtggcacggcgcctgttttaatatctcgaccggcgaccttgaagacttccctggcctggactctctccacaaatttcaggtgaaaatcgaaaaagagaaagtgtatgtccgagcgagcaagcaggccttgcagctccagaggcggacaaaggtgatggccaagtgcatctcaccatccgcaggctattcgtcttctacaaatgtcttaatagtgggagcgggggcagccgggctcgtgtgtgcggagactctgcgccaggaaggattctccgaccggatagtcctctgtaccctggacaggcatctgccatacgaccgacccaaacttagcaaatctctcgacacccaacctgagcaactggcactgagacctaaagagttcttcagagcttatggaattgaggttctcacagaggcgcaggtggtgaccgtggatgtaagaaccaagaaagttgtgttcaaggatggttttaagctcgagtacagcaagctgctcctcgcccccgggagcagccctaaaaccttaagctgcaaaggtaaggaagttgagaatgtgtttacaatccgcacccccgaagatgctaaccgcgttgtgcgactggctcgggggcggaacgtggtggtagttggggccggctttcttggaatggaggtggccgcctacctgaccgaaaaggctcacagcgtgtccgttgtggagttggaggaaacaccctttagaagattcctaggggaacgcgtgggtcgcgctttaatgaaaatgtttgagaataacagagtcaaattctatatgcagacagaagttagcgagttacgcggtcaggagggcaagctgaaagaagtcgtcctgaaatcttcaaaagtggtcagagccgacgtgtgtgttgtgggaatcggggcagtcccagctactggattcctgcgtcaatccggaatcgggttagattctcgaggtttcatacccgttaataaaatgatgcagaccaatgttccaggtgtcttcgccgcaggagacgcagtaacatttccgttggcttggagaaataaccgcaaagttaatatcccacactggcagatggcccatgcacaggggcgagtggcagcccaaaacatgctggcgcaggaagctgagatgagcacagtcccctacctttggacggcgatgtttggcaaaagccttcgctatgcagggtatggggaagggtttgatgatgtaatcatacagggagacctagaagagctcaagttcgtggccttctacaccaagggtgatgaagttatcgccgtggcgtcaatgaattatgatccaatcgtcagtaaggttgccgaggtcctcgcaagcggacgcgccatccgtaaaagagaagtggagctttttgtgctgcattccaagacaggtgacatgagttggctgacaggcaaaggatcctag

SEQ ID NO: 239545 - DNA, 2387 bp, Artificial Sequence
  derived and/or modified sequence
agtgcaaacgcagcgccagacacgccccgcccgcgcctccccgcccccccgcgcccgcggccccaagcggttcccgagcccaggcccgcgccgagcccaggtcctagagcagctccagcaggatggcggctccagcgtctctaaggcctgcagggggtccagccccatggggggcgccctaggcctccgacagctccccatctgtgctcctgcctgccggccatcctcaggccactcgccatgggcggctgcttctccaaacccaaaccagtggagctcaagatcgaggtggtgctgcctgagaaggagcgaggcaaggaggagctgtcggccagtgggaagggcagcccccgggcctaccagggcaatggcacggcccgccacttccacacggaggagcgcctgtccacccctcacccctaccccagccctcaggattgcgtggaggctgctgtctgccacgtcaaggacctcgagaatggccagatgcgggaagtggagctgggctgggggaaggtgttgctggtgaaggacaatggggagttccacgccctgggccataagtgtccgcactacggcgcacccctggtgaaaggcgttctgtcccgtggtcgggtgcgctgcccctggcacggcgcctgcttcaacatcagcactggggacctggaggacttccctggcctggacagtctacacaagttccaggtgaagattgagaaggagaaggtgtacgtccgggccagcaagcaggccctacagctgcagcgaaggaccaaggtgatggccaagtgtatctctccaagtgctgggtacagcagtagcaccaatgtgctcattgtgggtgcaggtgcagctggcctggtgtgtgcagagacactgcggcaggagggcttctccgaccggatcgtcctgtgcacgctagaccggcaccttccctacgaccgtcccaagctcagcaagtccctggacacacagcctgagcagctggccctgaggcccaaggagtttttccgagcctatggcatcgaggtgctcaccgaggctcaggtggtcacagtggacgtgagaactaagaaggtcgtgttcaaggatggcttcaagctggagtacagcaagctgctgctggcaccagggagcagccccaagactctgagctgcaaaggcaaagaagtggagaacgtgttcactatccggacgccagaggatgccaatcgcgtggtgaggctggcccgaggccgcaacgtggtcgtcgtgggagccggcttcctggggatggaggtggccgcttacctgacggagaaggcccactctgtgtctgtggtggagctggaggagacgcccttcaggaggttcctgggggagcgcgtgggtcgagccctcatgaagatgtttgagaacaaccgggtgaagttctacatgcagacggaggtgtctgagctgcggggccaggagggaaagctgaaggaggttgtgctgaagagcagcaaggtcgtgcgggctgacgtctgcgtggtgggcattggtgcagtgcccgccacaggcttcctgaggcaaagcggcatcggtttggattcccgaggcttcatccctgtcaacaagatgatgcagaccaatgtcccaggcgtgtttgcagctggcgatgctgtcaccttcccccttgcctggaggaacaaccgcaaagtgaacattccacattggcagatggctcatgctcaggggcgcgtggcagcccagaacatgttggcgcaggaggcggagatgagcactgtgccctacctctggaccgccatgtttggcaagagcctgcgctacgcgggctacggagaaggcttcgacgacgtcatcatccagggggatctggaggagctgaagtttgtggctttttacactaaaggcgacgaggtgatcgccgtggccagcatgaactacgatcccattgtgtccaaggtcgctgaggtgctggcctcaggccgtgccatccggaagcgggaggtggagctgtttgtgctgcacagcaagactggcgacatgtcctggcttacggggaaaggatcctgagctcacatgcagtagacttgggcaggcaaagggggcaccaagggcacaggccaagccttgggggcaggtgccaatctccagtcccaggatcccccagggcagaacctgagccctcccagtgcttgccttcagccacctggctcccctcctgggaggcctctgctggatccagaagatgctcaaccctcaaggcctctgctgccactgacagctggcactggaggcaggacaagccctgcctcttctccctctattgggactggtcccctgaagaaccctgcaacacgttaaacattaccgtaaaattaaaacgcacaaatttgcagatc

SEQ ID NO: 239546 - DNA, 1818 bp, Artificial Sequence
  derived and/or modified sequence
atgggcggctgcttcagcaagcccaagcccgtggagctgaagatcgaggtagtcctgccagagaaggaaagaggcaaggaggaactgtccgccagtggaaagggcagtccccgagcataccaaggaaacgggactgcaaggcacttccacactgaggagcgactcagcactccacacccttacccatctccacaagattgcgttgaggccgccgtatgccatgtgaaagacctcgagaacggccagatgagagaagtagaattggggtggggtaaggtgctgctggtgaaggataacggcgagttccacgcattagggcacaagtgtccacactatggggccccgctcgtcaagggggtactgtcccgcggcagagtgcgctgcccatggcacggagcatgtttcaacatctctaccggcgacctggaggatttccccggactggactctttgcacaaatttcaagtgaaaattgaaaaggagaaggtttacgtgcgcgcttccaaacaggccttacagcttcagaggcgcacaaaggtgatggcaaagtgcatcagtccaagtgctggttactccagctcgacaaatgtgcttatcgtgggtgccggggctgcagggctcgtatgcgcagagaccttgcgccaagaagggttttccgaccgaatcgttctgtgtactctcgacagacatctgccatatgatcgtccaaagttaagcaagtccctagacacgcaaccagaacagctggcccttagacctaaggaatttttcagagcatacggtatcgaagtcctcactgaagcccaggtggttactgtcgacgttaggactaaaaaggttgtgttcaaagatggtttcaagttagagtacagcaaactgctccttgcccctgggtctagcccaaagaccctgagttgtaaaggaaaggaggtggagaatgtctttacaataagaacacctgaggacgccaacagggtcgtaaggcttgcgagaggaagaaatgtagtggtggtgggggccgggttcctgggcatggaagttgccgcctatctgaccgagaaggctcactctgtcagcgtcgtggaactagaggagacgccttttcgaagatttctgggagagagggtcggaagagcgctcatgaagatgttcgagaataaccgggtcaagttctatatgcagacagaggtgagcgagctgcgtggacaggaaggtaagctgaaagaggtggtactgaagtcttccaaagttgtgagagcggatgtatgcgtcgttggcattggtgccgttcccgctactggattcctccgtcagagtggtattggtctggactccagagggtttattccagtgaacaaaatgatgcagacaaatgtgccaggggtgttcgcagcaggcgatgctgtgaccttccccttggcatggcggaataaccgcaaggtcaacatacctcactggcaaatggcccacgcccaaggacgagttgctgcccagaatatgctggcccaggaagccgagatgtcgaccgtaccgtacctctggactgcaatgtttggcaaatcgttgagatatgcaggatatggcgagggttttgatgatgttatcattcagggagatcttgaggagctaaaattcgtggcattctacacaaagggcgacgaagtgatcgctgttgccagtatgaactacgatccaatcgtcagcaaggttgccgaagtgctagcctcgggccgtgccatccgcaaacgagaagtggagctcttcgtgttacattccaaaacaggcgacatgtcttggctcactggtaaaggaagttag

SEQ ID NO: 239547 - DNA, 1818 bp, Artificial Sequence
  derived and/or modified sequence
atgggcggatgcttctcaaagcctaagccagtagagctgaaaatcgaagttgtgctgccagagaaagaaaggggtaaagaagagttgtcggcctctggcaaggggtcaccgagggcgtaccagggtaacggcacagccagacatttccacacagaggagaggttgagcactccccacccctatccgtcccctcaggattgcgttgaggcagccgtgtgtcacgtaaaagatttggagaacggacagatgcgcgaggtcgaactaggctgggggaaggtgctcctggtgaaagacaatggagaatttcacgcgctggggcacaagtgtccgcactacggggctcccctggtgaaaggagtgctgagtcggggacgagtgcggtgcccttggcacggagcctgttttaatatctctaccggtgatctggaggattttccaggcctggattcactgcataagtttcaggtcaaaatcgagaaagagaaggtgtacgtgcgagctagtaagcaagcattgcagctccaacgcaggactaaggtcatggcgaagtgtatatccccctcagctggatattcctctagcacaaacgttctgatcgtgggcgcaggagccgctggactagtgtgcgccgagacactgcgtcaggagggtttttctgataggatcgtgctatgtacattagatcggcatctgccctacgatagaccgaaattaagcaagagtctcgacacccagccagaacagctcgctcttaggcccaaggaattcttccgcgcatacggcatcgaagtcctgacagaagctcaggtggtgaccgtggacgttaggaccaagaaagtagtgtttaaggatggatttaaattagaatacagtaaacttctgctggcgccaggaagctcccctaagaccctgtcatgcaaaggcaaggaggtggagaacgtgtttactattaggacaccggaagacgctaatcgcgtagtcaggcttgcccgaggacgaaatgttgtggttgtgggcgctggcttccttggaatggaagttgcagcttacttgaccgaaaaagcacacagtgtatccgtggtagagcttgaagaaacaccgttcagacgctttctcggagagcgagttggacgcgctctgatgaagatgtttgaaaataaccgcgtgaagttctatatgcagactgaggtctccgagctgaggggccaggaaggcaagctgaaagaagttgtgctgaagtcatctaaagtggtccgggctgacgtgtgcgttgtcggcatcggggctgtgcccgcaacaggattcctgaggcagagcggaattggactagactccaggggatttattccggttaacaagatgatgcagaccaacgtgcccggagtgtttgccgctggtgacgcggttactttcccactggcgtggcggaacaaccggaaagtgaacattcctcactggcagatggcccacgcccagggcagggtggcagcccagaacatgctcgcccaggaggcagaaatgagtacagtgccgtacctgtggactgccatgtttggcaagagtctgaggtacgctgggtacggagagggttttgatgacgtcatcatacagggtgacctggaagaattgaagtttgtggcgttctacacgaagggagacgaagtgatcgccgtagcatcaatgaattatgatcccatagtgtccaaggttgccgaagtgctggcgtcaggacgggcaatacgcaaaagagaagtagagctgttcgtgctgcatagcaaaactggggatatgagctggctgaccgggaaagggagctag

SEQ ID NO: 239548 - DNA, 1818 bp, Artificial Sequence
  derived and/or modified sequence
atgggcggatgtttctccaagcccaagcccgtggagctgaaaattgaggtcgtgttgcccgaaaaagagcgcggtaaagaggaattatctgcctccggaaagggcagccctcgggcatatcaggggaacgggacggccagacacttccacactgaagaaagactcagcaccccacatccatacccctccccccaggattgtgttgaggcagcagtgtgtcatgtgaaggatctcgagaatgggcagatgcgggaggttgagttaggttgggggaaagtcctgctggtgaaagataatggggagtttcatgccttagggcataagtgtccacattacggagccccactcgtgaagggcgtgctgagtagaggtagggttagatgtccatggcacggtgcatgtttcaacatctccaccggggaccttgaggactttcccggtcttgacagcctccacaagttccaggtgaaaattgagaaggagaaggtttacgtgcgcgcttcaaagcaagcattgcagctccagcgcaggactaaagtcatggctaagtgcatctcaccatccgctggatactcgtcatcaacgaatgtcctgatcgttggcgcaggagctgcaggtttggtgtgcgcagaaactctcaggcaggagggtttttctgatcgcattgtcctgtgtaccctcgacagacacctgccatatgaccggccaaaactctctaaatcactggacacccagcccgaacagctggccctccgccctaaagagttctttagagcatacggtatcgaagtgctgactgaagcacaggtcgtgactgtcgacgtacgcacaaaaaaagtggtgtttaaagatggttttaagctcgaatactctaaactcctgctggcccctggttcttcacctaagacactctcatgcaaaggaaaggaagtggaaaacgtcttcaccattcgcaccccagaagatgctaatcgcgtcgttcgtctcgccagggggaggaacgtggtggttgtcggagctggcttcctaggtatggaggtggccgcatatttaactgagaaagcacactctgtttccgtggtcgagctggaagagacccccttccgcaggttcctgggagagagagttggccgagccctgatgaaaatgttcgaaaataaccgagttaagttttacatgcagactgaggtatccgagcttcggggacaggaggggaagttgaaggaggtggtccttaaaagctctaaagtggtgagggccgatgtgtgtgtagtgggcattggagctgtccctgctaccgggttcctccgtcagagcggcatcgggcttgattcccgcggtttcatccctgtcaataaaatgatgcagacaaatgtcccaggagtgttcgctgcaggagatgctgtcacgttccctcttgcttggagaaataacaggaaagtgaacattccacattggcaaatggcccacgcccagggcagagtggcagctcagaacatgctggcccaggaagccgaaatgtctacagtaccttacctttggaccgcaatgttcgggaagtcccttagatacgccggatacggggagggcttcgatgacgtgatcattcagggcgacttggaggaactaaaatttgttgcattttacaccaagggagatgaagtgatcgcagtggctagcatgaactacgatccaattgtgagtaaggtcgcagaggtcctggcttcaggacgcgctattcgaaagcgcgaggttgaactctttgtgttgcacagtaagacaggggacatgtcttggctaactggcaaggggagctag

SEQ ID NO: 239549 - DNA, 2251 bp, Artificial Sequence
  derived and/or modified sequence
caggtcctagagcagctccagcaggatggcggctccagcgtctctaaggcctgcagggggtccagccccatggggggcgccctaggcctccgacagctccccatctgtgctcctgcctgccggccatcctcaggccactcgccatgggcggctgcttctccaaacccaaaccagtggagctcaagatcgaggtggtgctgcctgagaaggagcgaggcaaggaggagctgtcggccagtgggaagggcagcccccgggcctaccagggcaatggcacggcccgccacttccacacggaggagcgcctgtccacccctcacccctaccccagccctcaggattgcgtggaggctgctgtctgccacgtcaaggacctcgagaatggccagatgcgggaagtggagctgggctgggggaaggtgttgctggtgaaggacaatggggagttccacgccctgggccataagtgtccgcactacggcgcacccctggtgaaaggcgttctgtcccgtggtcgggtgcgctgcccctggcacggcgcctgcttcaacatcagcactggggacctggaggacttccctggcctggacagtctacacaagttccaggtgaagattgagaaggagaaggtgtacgtccgggccagcaagcaggccctacagctgcagcgaaggaccaaggtgatggccaagtgtatctctccaagtgctgggtacagcagtagcaccaatgtgctcattgtgggtgcaggtgcagctggcctggtgtgtgcagagacactgcggcaggagggcttctccgaccggatcgtcctgtgcacgctagaccggcaccttccctacgaccgtcccaagctcagcaagtccctggacacacagcctgagcagctggccctgaggcccaaggagtttttccgagcctatggcatcgaggtgctcaccgaggctcaggtggtcacagtggacgtgagaactaagaaggtcgtgttcaaggatggcttcaagctggagtacagcaagctgctgctggcaccagggagcagccccaagactctgagctgcaaaggcaaagaagtggagaacgtgttcactatccggacgccagaggatgccaatcgcgtggtgaggctggcccgaggccgcaacgtggtcgtcgtgggagccggcttcctggggatggaggtggccgcttacctgacggagaaggcccactctgtgtctgtggtggagctggaggagacgcccttcaggaggttcctgggggagcgcgtgggtcgagccctcatgaagatgtttgagaacaaccgggtgaagttctacatgcagacggaggtgtctgagctgcggggccaggagggaaagctgaaggaggttgtgctgaagagcagcaaggtcgtgcgggctgacgtctgcgtggtgggcattggtgcagtgcccgccacaggcttcctgaggcaaagcggcatcggtttggattcccgaggcttcatccctgtcaacaagatgatgcagaccaatgtcccaggcgtgtttgcagctggcgatgctgtcaccttcccccttgcctggaggaacaaccgcaaagtgaacattccacattggcagatggctcatgctcaggggcgcgtggcagcccagaacatgttggcgcaggaggcggagatgagcactgtgccctacctctggaccgccatgtttggcaagagcctgcgctacgcgggctacggagaaggcttcgacgacgtcatcatccagggggatctggaggagctgaagtttgtggctttttacactaaaggcgacgaggtgatcgccgtggccagcatgaactacgatcccattgtgtccaaggtcgctgaggtgctggcctcaggccgtgccatccggaagcgggaggtggagctgtttgtgctgcacagcaagactggcgacatgtcctggcttacggggaaaggatcctgagctcacatgcagtagacttgggcaggcaaagggggcaccaagggcacaggccaagccttgggggcaggtgccaatctccagtcccaggatcccccagggcagaacctgagccctcccagtgcttgccttcagccacctggctcccctcctgggaggcctctgctggatccagaagatgctcaaccctcaaggcctctgctgccactgacagctggcactggaggcaggacaagccctgcctcttctccctctattgggactggtcccctgaagaaccctgcaacacgtta

SEQ ID NO: 239550 - protein, 321 aa, Artificial Sequence
  derived and/or modified sequence
MMNRYYQPIVDYIDAQFEAYLQEELKIKRSLFTYHDSRIHVCLYFISPTGHSLKTLDLLTMKNLDSKVNIIPVIAKADTVSKTELQKFKIKLMSELVSNGVQIYQFPTDDDTIAKVNAAMNGQLPFAVVGSMDEVKVGNKMVKARQYPWGVVQVENENHCDFVKLREMLICTNMEDLREQTHTRHYELYRRCKLEEMGFTDVGPENKPVSVQETYEAKRHEFHGERQRKEEEMKQMFVQRVKEKEAILKEAERELQAKFEHLKRLHQEERMKLEEKRRLLEEEIIAFSKKKATSEIFHSQSFLATGSNLRKDKDRKNSNFL

SEQ ID NO: 239551 - protein, 454 aa, Artificial Sequence
  derived and/or modified sequence
MASSEVARHLLFQSHMATKTTCMSSQGSDDEQIKRENIRSLTMSGHVGFESLPDQLVNRSIQQGFCFNILCVGETGIGKSTLIDTLFNTNFEDYESSHFCPNVKLKAQTYELQESNVQLKLTIVNTVGFGDQINKEESYQPIVDYIDAQFEAYLQEELKIKRSLFTYHDSRIHVCLYFISPTGHSLKTLDLLTMKNLDSKVNIIPVIAKADTVSKTELQKFKIKLMSELVSNGVQIYQFPTDDDTIAKVNAAMNGQLPFAVVGSMDEVKVGNKMVKARQYPWGVVQVENENHCDFVKLREMLICTNMEDLREQTHTRHYELYRRCKLEEMGFTDVGPENKPVSVQETYEAKRHEFHGERQRKEEEMKQMFVQRVKEKEAILKEAERELQAKFEHLKRLHQEERMKLEEKRRLLEEEIIAFSKKKATSEIFHSQSFLATGSNLRKDKDRKNSNFL

SEQ ID NO: 239552 - protein, 450 aa, Artificial Sequence
  derived and/or modified sequence
MASSEVARHLLFQSHMATKTTCMSSQGSDDEQIKRENIRSLTMSGHVGFESLPDQLVNRSIQQGFCFNILCVGETGIGKSTLIDTLFNTNFEDYESSHFCPNVKLKAQTYELQESNVQLKLTIVNTVGFGDQINKEESYQPIVDYIDAQFEAYLQEELKIKRSLFTYHDSRIHVCLYFISPTGHSLKTLDLLTMKNLDSKVNIIPVIAKADTVSKTELQKFKIKLMSELVSNGVQIYQFPTDDDTIAKVNAAMNGQLPFAVVGSMDEVKVGNKMVKARQYPWGVVQVENENHCDFVKLREMLICTNMEDLREQTHTRHYELYRRCKLEEMGFTDVGPENKPVSVQETYEAKRHEFHGERQRKEEEMKQMFVQRVKEKEAILKEAERELQAKFEHLKRLHQEERMKLEEKRRLLEEEIIAFSKKKATSEIFHSQSFLATGSNLRKDKDRKK

SEQ ID NO: 239553 - DNA, 1365 bp, Artificial Sequence
  derived and/or modified sequence
atggcctcctcggaagtggcaagacatctgctattccagtcccacatggccaccaagaccacatgtatgagttctcaaggcagcgatgacgagcagatcaagagggaaaatataagaagcctgaccatgtctggacacgtcgggtttgaatccttgccagatcagctggtgaacagatccatccaacagggcttctgctttaatattttgtgcgtaggggagactggcattggcaaatcgaccctgatcgacacactgttcaataccaatttcgaagactatgagtctagccatttctgtcccaacgtgaaactgaaagcacagacttatgagctccaggaatctaacgtccagctgaagctcacaattgttaacactgtgggttttggcgatcaaatcaataaggaggagagttaccagccgattgtcgactacatcgacgcccaatttgaagcctacctccaggaagaactgaaaataaaaaggtccctcttcacataccatgactctcgtattcacgtttgcctctatttcatttctccgacaggccactctctgaagacccttgatctactcactatgaagaacttggattctaaagtcaacattatccccgttatcgccaaggccgacacagtgtctaagacagagctccagaagttcaagatcaagttgatgtctgagctagtgtccaacggcgtccagatatatcagtttccgacagatgacgatacaattgctaaagttaacgctgccatgaatggccagctaccattcgcagtagtggggtctatggacgaggtgaaggtgggcaataagatggtgaaggcccgccagtatccttggggtgtcgtccaggtcgagaatgaaaatcattgcgatttcgttaagcttagggaaatgctgatctgtaccaacatggaagaccttagagagcagacgcataccagacattacgaactttatagacgatgcaaactggaagaaatggggtttactgacgttggcccagagaataagccagtaagcgtgcaggaaacttatgaggccaagaggcacgagttccacggagagcggcaacgcaaggaggaagagatgaagcagatgttcgtccaacgggtaaaggagaaggaggccattctgaaggaagccgaaagagagctccaggctaagtttgagcacttaaagaggctgcatcaggaggagaggatgaaactggaggaaaagcggcgcctgctggaagaggaaattattgcattctcaaagaagaaggctacgagcgagatatttcacagtcagtctttccttgcaaccggttcaaacctgcggaaggataaggatcggaagaattccaactttctctag

SEQ ID NO: 239554 - DNA, 1365 bp, Artificial Sequence
  derived and/or modified sequence
atggccagcagcgaggtggcccggcacctgctcttccagagccacatggccaccaagaccacctgcatgagcagccagggcagtgatgatgagcagatcaagcgggagaacatccgcagcctgaccatgagcggccacgtgggctttgagagcctgcctgaccagctggtgaacagaagcatccagcagggcttctgcttcaacatcctgtgtgtgggggagactggaattggcaagagcaccctgattgacaccctcttcaacaccaactttgaggactatgagagcagccacttctgccccaacgtgaagctgaaggcccagacctatgagctgcaggagagcaatgtgcagctgaagctgaccatcgtgaacacagtgggctttggagaccagatcaacaaggaggagagctaccagcccatcgtggactacattgatgcccagtttgaggcctacctgcaggaggagctgaagatcaagaggagcctcttcacctaccatgacagccgcatccacgtgtgcctgtacttcatcagccccaccggccacagcctgaagaccctggacctgctgaccatgaagaacctggacagcaaggtgaacatcatccctgtgattgccaaggctgacacagtgtccaagacagagctgcagaagttcaagatcaagctgatgtctgagctggtgtccaatggagtgcagatctaccagttccccacagatgatgacaccatcgccaaggtgaatgctgccatgaatggccagctgccctttgctgtggtgggctccatggatgaggtgaaggtgggcaacaagatggtgaaggcccggcagtacccctggggcgtggtgcaggtggagaatgaaaaccactgtgactttgtgaagctgcgggagatgctgatctgcaccaacatggaggacctgcgggagcagacccacaccaggcactatgagctgtaccgccgctgcaagctggaggagatgggcttcacagatgtgggccctgagaacaagcctgtgtctgtgcaggagacctatgaggccaagagacatgagttccacggggagcggcagaggaaggaggaggagatgaagcagatgtttgtgcagagggtgaaggagaaggaggccatcctgaaggaggccgagcgggagctgcaggccaagtttgagcacctgaagaggctgcaccaggaggagaggatgaagctggaggagaagaggcggctgctggaggaggagatcatcgccttcagcaagaagaaggccaccagcgagatcttccacagccagagcttcctggccaccggcagcaacctgaggaaggacaaggacaggaagaacagcaacttcctgtag

SEQ ID NO: 239555 - DNA, 1365 bp, Artificial Sequence
  derived and/or modified sequence
atggccagcagcgaggtggcccggcacctgctgttccagagccacatggccaccaaaaccacctgcatgtcgtctcagggttctgacgacgagcagatcaagagggaaaacatacggagcttaacaatgtccggtcatgtgggattcgagagtctgccagatcaacttgtcaaccggagtatccagcaggggttttgttttaatatactttgtgtgggggaaacagggatcggaaagtcaacactgattgacaccctgttcaatacaaatttcgaagactatgagtcctctcacttctgtcctaatgttaagctcaaagcccagacctacgaactccaagaatccaatgtgcagctcaagctgaccatcgttaacacagttggattcggagaccagatcaataaagaggagtcctatcagcccatcgtggattacattgatgcacagttcgaggcgtacttacaggaggagttgaaaataaaaagatcactgttcacttaccacgactcgcggattcacgtgtgtctgtacttcatctcaccaaccggccatagtctgaaaacgctggatctgctgacaatgaagaacctggattcaaaggtgaatattattcccgtgatcgccaaagccgataccgtttcaaaaactgaactgcagaagtttaaaattaagctgatgagcgaacttgtttccaacggagtccagatctatcagtttcccactgacgacgatactattgctaaagtaaacgcggccatgaatggtcagctgcccttcgccgtcgttgggtcaatggacgaagtgaaggtcgggaacaaaatggttaaagccaggcagtacccctggggagttgtgcaggtggagaatgagaaccactgtgatttcgtgaagctccgagagatgctgatttgcacaaatatggaggatctgcgtgagcagacacacacgcgccactacgaactttatcggaggtgtaagttggaggagatgggctttactgacgtgggcccagagaacaaacccgtcagtgtccaggagacctatgaagctaaaaggcatgagttccacggagagcgccagcgcaaggaggaagagatgaagcagatgtttgtccaacgggttaaagaaaaggaagccattttgaaagaagctgagagagagctgcaagcgaagttcgagcacctcaagaggttacaccaggaggagaggatgaaattggaagaaaagagaagactattggaagaagaaattatcgccttttcaaagaagaaagccaccagcgagattttccacagtcagagttttctcgccacagggagcaacctgaggaaagacaaggacagaaaaaattccaacttcctgtag

SEQ ID NO: 239556 - DNA, 1365 bp, Artificial Sequence
  derived and/or modified sequence
atggcctccagtgaggtggcccgtcacctactcttccagtcccacatggccaccaaaaccacctgcatgtctagccagggcagcgacgatgaacaaatcaaaagggaaaatatcagatcactgaccatgtctggccacgtcggatttgaatccttacccgatcagcttgtgaacagatccattcagcaaggattttgcttcaatatcctttgtgtgggcgagaccggcattggaaaaagcacactcatcgatactctcttcaatacaaattttgaggattatgagagcagtcacttctgtccaaacgtgaagttgaaggcccaaacatatgaattacaggagtcaaacgtgcaattaaagctgaccattgttaataccgtgggctttggagaccagattaacaaagaagaatcttatcagcccattgttgattatattgatgcccagtttgaggcttatttacaggaggagctgaagatcaagcggtccctatttacttaccacgatagtcggatacacgtgtgcctgtactttattagtccaaccggccatagcctgaaaaccttggaccttctcaccatgaaaaacctggacagcaaggttaatatcattcccgttattgccaaagccgacaccgttagcaaaacagagttgcagaaatttaaaattaagcttatgtcggagcttgtgtcaaacggcgtccagatctaccagtttccaactgacgacgatacaattgccaaggtgaacgctgctatgaatgggcagttaccctttgcagtcgttgggtccatggatgaggtgaaagttgggaataagatggtgaaggccagacagtatccttggggggtggtacaggtggaaaatgaaaaccattgcgactttgtgaagttacgggagatgttgatctgcactaatatggaagacttacgcgaacagacccacacccgccactacgaattataccgcagatgcaagctcgaagagatgggctttacagatgtgggaccggaaaataaaccagtctctgtgcaggaaacctacgaggcaaaacgccatgaatttcacggcgagcgacagagaaaggaagaagagatgaagcagatgttcgtgcaacgggtaaaggaaaaagaagccattcttaaggaggccgaacgagaactgcaggccaagttcgaacacttgaagaggttgcaccaggaggagaggatgaagcttgaggaaaaaaggcgactgctcgaagaggagataatcgcgttctcaaagaaaaaagccacctcagagattttccattctcagtccttcctcgccactggttccaacctgcgcaaggacaaagaccggaaaaactcaaactttctctag

SEQ ID NO: 239557 - DNA, 3071 bp, Artificial Sequence
  derived and/or modified sequence
cacttccggcctcgcgagggccgcaatcactgctccgcagttcccgcctgcattcctcgcgccgtcttcctggagtcccagctctccttcagcccgccccaacgctgacgctcagtcctcaggcgtcgagggtagctcctgtgaggggctcgcttggcgcaggcaaaacgctcagcgcgcaccacagggcgtccgccccaaccccgcccccggaggcctccagctcggccccgcccctgtcccttccccgtcgcggaggcagcctagcctcgcgccccgcccgttgcttctgccctccggccttcccgccgccgtcgccgggaccagccgctcggggccgggctgatacagccgcttcaccgtgcccctgcccgcgaccatggcctcctccgaggtggcgcggcacctgctctttcagtctcacatggcaacgaaaacaacttgtatgtcttcacaaggatcagatgatgaacagataaaaagagaaaacattcgttcgttgactatgtctggccatgttggttttgagagtttgcctgatcagctggtgaacagatccattcagcaaggtttctgctttaatattctctgtgtgggggaaactggaattggaaaatcaacactgattgacacattgtttaatactaattttgaagactatgaatcctcacatttttgcccaaatgttaaacttaaagctcagacatatgaactccaggaaagtaatgttcaattgaaattgaccattgtgaatacagtgggatttggtgaccaaataaataaagaagagagctaccaaccaatagttgactacatagatgctcagtttgaggcctatctccaagaagaactgaagattaagcgttctctctttacctaccatgattctcgcatccatgtgtgtctctacttcatttcaccgacaggccactctctgaagacacttgatctcttaaccatgaagaaccttgacagcaaggtaaacattataccagtgattgccaaagcagatacggtttctaaaactgaattacagaagtttaagatcaagctcatgagtgaattggtcagcaatggcgtccagatataccagttcccaacggatgatgacactattgctaaggtcaacgctgcaatgaatggacagttgccgtttgctgttgtgggaagtatggatgaggtaaaagtcggaaacaagatggtcaaagctcgccagtacccttggggtgttgtacaagtggaaaatgaaaaccactgtgactttgtaaagctgcgggaaatgctcatttgtacaaatatggaggacctgcgagagcagacccataccaggcactatgagctttacaggcgctgcaaactggaggaaatgggctttacagatgtgggcccagaaaacaagccagtcagtgttcaagagacctatgaagccaaaagacatgagttccatggtgaacgtcagaggaaggaagaagaaatgaaacagatgtttgtgcagcgagtaaaggagaaagaagccatattgaaagaagctgagagagagctacaggccaaatttgagcaccttaagagacttcaccaagaagagagaatgaagcttgaagaaaagagaagacttttggaagaagaaataattgctttctctaaaaagaaagctacctccgagatatttcacagccagtcctttctggcaacaggcagcaacctgaggaaggacaaggaccgtaagaactccaattttttgtaaaacagaagttccagagcacagaaggtcatcatcacaagcaaactttattaaaaaaaaactagaagtgtgctttgattttgctgttatttgttttatcacttctatatttggtgaacagccacagttactgatatttatggaaaagtactttcaagtacaaggtcaatacataagccagagtgaatgatactacaagttgagcatctctaattcaaaaatctgaaatccagaagcttcaaaatctgaatctttttgagcactgacttgaccccacaagtggaaaattccccacccgacacctttgctttctgatggttcagtttaaacagattttgtttcttgcacaaaatttttgtataaattactttcaggctatatgtataaggtggatgtgaaacatgaattatgtaattagagtcgggtcccgttgtgtatatgcagatattccaaacctgaaatccaaaacacttctggtccctagcattttggataagggatactcagcttgtacctatatattcatatatattcactgttgttagaaatgtttaagttgctgttctgtgatgaatctaaatcttttctcttgctaccaagctattgtcactgcagtgcattataccaaagagcgaagtcagtgccactgaaaatacagaacccattaatatcgtggctatctgattacatttatattccaagatgaaccttttttatatatgctaaaaattttggggaatatgttttgggatgtattatggagctaaaactctaacctcttaatagttttatagaacttaaaaattttttatacaattacccaattggtgatatgatcttaagcttttgtgtcagattatttaatatgatgacttcatgctttattatgccttattatggctgacgtattactgtggtgaaacaaaatatctttaaaagttaaaacatccagatatataagctattttttcctaaggataaagtacctttgagcatgagtgtatcacagctttcattaggaaaacttttcattacatacttgtttaaactctgtcttccagggtaaaaataataaggttgaatcattttattaaaaatactttttaagaaaataactatgaacatctgaatattaaagatataaaaatgcacataattcatatttcaggtggtatttgcattcagtgccttactggtattctcagaacattttaatgatttctaacatttcttaacagtcatagatatatacattttcattttttgtacttgaatattctaaataaaactgacatttactcttgacaaataaaacatatatttactaaaa

SEQ ID NO: 239558 - DNA, 1365 bp, Artificial Sequence
  derived and/or modified sequence
atggccagcagcgaggtggccagacacctgctgttccagagccacatggccaccaagaccacctgcatgagcagccagggcagcgacgacgagcagatcaagagagagaacatcagaagcctgaccatgagcggccacgtgggcttcgagagcctgcccgaccagctggtgaacagaagcatccagcagggcttctgcttcaacatcctgtgcgtgggcgagaccggcatcggcaagagcaccctgatcgacaccctgttcaacaccaacttcgaggactacgagagcagccacttctgccccaacgtgaagctgaaggcccagacctacgagctgcaggagagcaacgtgcagctgaagctgaccatcgtgaacaccgtgggcttcggcgaccagatcaacaaggaggagagctaccagcccatcgtggactacatcgacgcccagttcgaggcctacctgcaggaggagctgaagatcaagagaagcctgttcacctaccacgacagcagaatccacgtgtgcctgtacttcatcagccccaccggccacagcctgaagaccctggacctgctgaccatgaagaacctggacagcaaggtgaacatcatccccgtgatcgccaaggccgacaccgtgagcaagaccgagctgcagaagttcaagatcaagctgatgagcgagctggtgagcaacggcgtgcagatctaccagttccccaccgacgacgacaccatcgccaaggtgaacgccgccatgaacggccagctgcccttcgccgtggtgggcagcatggacgaggtgaaggtgggcaacaagatggtgaaggccagacagtacccctggggcgtggtgcaggtggagaacgagaaccactgcgacttcgtgaagctgagagagatgctgatctgcaccaacatggaggacctgagagagcagacccacaccagacactacgagctgtacagaagatgcaagctggaggagatgggcttcaccgacgtgggccccgagaacaagcccgtgagcgtgcaggagacctacgaggccaagagacacgagttccacggcgagagacagagaaaggaggaggagatgaagcagatgttcgtgcagagagtgaaggagaaggaggccatcctgaaggaggccgagagagagctgcaggccaagttcgagcacctgaagagactgcaccaggaggagagaatgaagctggaggagaagagaagactgctggaggaggagatcatcgccttcagcaagaagaaggccaccagcgagatcttccacagccagagcttcctggccaccggcagcaacctgagaaaggacaaggacagaaagaacagcaacttcctgtag

SEQ ID NO: 239559 - DNA, 1985 bp, Artificial Sequence
  derived and/or modified sequence
cacatgcagcttgagcattcagtcttctgacctgttccacctctacagggcattttatggcttaaggatgacggcctagaagggaagggagagacttactttggattaaatttacaatgggaaagtgcttaagctgctgcaaagaggaccagagcttccaacgatgttctccagaagatcaagttagtacagacgcccagcatcgtggagcctcttctatttcacaaccaagtatatctcttggtcataaaacatcttattcccctgtaacacataaagtcaatgcagccaaagcaagtagaaggttattatctgtatcaagtccatctttctctgaaagaagatattctttatttgttggatttcaaaaaagaaatgcttccccttactggcaacaaagtagagctaactttgattctgaagaagacacaggcttcactgatataaaatcttcctcagaccattgtggtagctttatttcccgcagaagacgtttctcatcccgtaaactaagtatagtttcctattacaagagtgccattttttttgatcctcaagcaagtggccagaatgtgtttaatctaaatgaaatcgaaatcttttctaaaacttcaagtaatactgatgctaaaaaacatataaccatctctgctcctgaatataacactaaaaattttaagaattttgaaacaaacactacttctccagcctttgggaacactattgatacagcctcctatcaacaaagcacatcatccttcttttctcttgcaagtgatatttcctctcccgatcaacaaaatggaattgccaatgatattcaacaaaggggccaattatgtaaagatttaaaagatttccttcatcctcgtcctgaaagttacagcacaggtcattctccaatcatgattccacagcatccctctcaaagtggaactttcccattcctccataaagctggattttcttcatcttataaaaattctggttgctttatcccacctcaaagcgaattaacttcaggcctgtttgaagatgaagactttgctgtcttgtttcaagatgaagacagatcttcacctattgaaattcctaaaataaggtatattacagctaatactgacacagaagaacagagttttccagtccctaaggcatttaacacacgtgtagaggaattaaatttagatgtccttcttcagaaggtagatcatttacgtatgagtgagtctggcaagtcggagagttttgaactacttcgtgaccacaaagaaaagtttagagatgaaatagagtttatgtggcgatttgctcgtgcttatggagacatgtatgaactatctacaaacacacaagaaaagaaacattatgctaatattggaaaaactttaagtgaaagagctattaatagagcacccatgaatggacattgtcatctgtggtatgcagttttgtgtggctatgtatctgagtttgagggtttacaaaacaaaatcaactatgggcacctcttcaaggaacatctagatatagcaatcaaacttttaccagaggaaccctttctatattacctcaaagggagatactgctatactgtctcaaaactgagctggattgagaaaaaaatggctgctactctgtttggaaaaataccatcttcaactgtacaagaagctttacacaatttccttaaggctgaagaactatgccctggttattctaatcccaattacatgtacttagcaaagtgttatactgatcttgaggaaaaccagaatgctttgaagttctgtaatttggctttattgcttcctactgttaccaaagaggagctgtagtctggaagataaagagcctttggtaccgcaagccctgtcatctgtgagtgtggcacagtgaaggcctggagagtcatgacctaggccctgtgaagtcaagtatttttaccaagtaaaaagattggcaataaaacatttccacatagt

SEQ ID NO: 239560 - DNA, 1722 bp, Artificial Sequence
  derived and/or modified sequence
atgggcaagtgtctgagttgctgtaaagaggatcaaagtttccagagatgtagcccagaggatcaggtcagcactgatgctcaacaccggggggcttcaagcatatctcagccatcaatatctttgggtcataaaacaagctactcgccggtgacacacaaggttaacgcagctaaggcgagtagacggctgctctcagtgtcttctcccagttttagtgagcgaaggtacagcctctttgtgggcttccagaaaaggaacgcctctccctattggcagcagtccagggccaatttcgattctgaggaagacaccggattcacggacatcaagtctagcagcgaccactgcggatcctttatttcgcgcaggagaagattctcctcccggaaactgtccattgtgtcctactacaaaagcgccatctttttcgacccccaagcatctggccagaacgtcttcaacctaaacgagatagaaattttttccaaaacatcttctaacacagacgcaaagaagcacattaccatctctgcccccgagtataatacaaagaatttcaagaactttgagactaacaccacatctcccgccttcggaaacaccatagacaccgcgagttaccaacagtccacttctagcttcttttccctagctagcgacattagctcccccgaccaacaaaacggaattgccaacgacatccagcagagaggtcaactctgcaaggacctgaaggatttcctgcaccctagaccggagagttattctacgggacacagccccatcatgatcccccaacacccatctcagtccggaacttttcctttcctacataaggctgggttttcgagctcatacaagaattctggctgctttatccccccacagagcgagctcacaagcggcctatttgaggatgaggacttcgctgtgctgtttcaagacgaggatagatcgtcccccatcgagataccgaaaatcagatacataacagccaataccgatacagaggagcagagctttcccgtgccaaaggcctttaatacaagggtagaagagttgaatctggacgtgcttttgcaaaaggtcgaccacctgcgtatgagtgaaagcggcaaaagcgagagcttcgaactcctaagggatcataaggaaaagtttagggatgaaatcgaatttatgtggagatttgcacgggcctacggagatatgtatgagctttctaccaatacacaggagaagaagcactacgctaatattggcaagactctctccgaacgggccatcaatcgagcgcccatgaacgggcattgccacttgtggtacgccgttctctgcggctatgtatctgagtttgaaggcctgcagaacaagatcaactatgggcatttatttaaagaacatctcgatatagccatcaagctgctccccgaggaaccctttctttactatcttaaaggcagatactgctacactgtaagcaaactctcgtggattgagaaaaagatggccgctaccttgtttggcaaaatcccctcgtcaaccgtccaagaagccctccacaacttcttaaaggccgaggagctctgccctgggtacagcaaccctaactatatgtacctggccaagtgctacacagacttggaggagaatcagaacgccctaaaattctgtaatctagctctcctgctgccaacggtcacaaaagaagagttgtag

SEQ ID NO: 239561 - DNA, 1722 bp, Artificial Sequence
  derived and/or modified sequence
atgggcaagtgcctgagctgctgcaaggaggaccagagcttccagcgctgcagccctgaggaccaggtgtccacagatgcccagcacagaggagccagcagcatcagccagcccagcatcagcctgggccacaagaccagctacagccctgtgacccacaaggtgaatgctgccaaggccagccggcggctgctgtctgtgagcagccccagcttcagcgagcggcgctacagcctgtttgtgggcttccagaagagaaatgccagcccctactggcagcagagccgggccaactttgattctgaggaggacaccggcttcacagacatcaagagcagcagtgaccactgcggcagcttcatcagcagaagaagacgcttcagcagcaggaagctgagcatcgtgtcctactacaagagcgccatcttctttgacccccaggccagcggccagaatgtgttcaacctgaatgaaattgagatcttcagcaagaccagcagcaacacagatgccaagaagcacatcaccatcagcgcccctgagtacaacaccaagaacttcaagaactttgagaccaacaccaccagccctgcctttggaaacaccatcgacacagccagctaccagcagagcaccagcagcttcttcagcctggccagtgacatcagcagcccagaccagcagaatggaattgccaatgacatccagcagaggggccagctgtgcaaggacctgaaggacttcctgcaccccaggcctgagagctacagcacaggccacagccccatcatgatcccccagcaccccagccagagcggcaccttccccttcctgcacaaggccggcttcagcagcagctacaagaacagcggctgcttcatccccccccagagcgagctgaccagcggcctgtttgaagatgaggactttgctgtgctcttccaggatgaagatagaagcagccccatcgagatccccaagatccgctacatcacagccaacacagacacagaggagcagagcttccctgtgcccaaggccttcaacaccagggtggaggagctgaacctggatgtgctgctgcagaaggtggaccacctgaggatgtctgagagcggcaagtctgagagctttgagctgctgcgggaccacaaggagaagttcagagatgaaattgagttcatgtggaggtttgcccgggcctacggggacatgtatgagctgagcaccaacacccaggagaagaagcactacgccaacatcggcaagaccctgtctgagcgggccatcaacagagcccccatgaatggccactgccacctgtggtatgctgtgctgtgtggctacgtgtctgaatttgagggcctgcagaacaagatcaactacggccacctgttcaaggagcacctggacatcgccatcaagctgctgcctgaggagcccttcctgtactacctgaagggccgctactgctacacagtgtccaagctgtcctggattgagaagaagatggccgccaccctgtttgggaagatccccagcagcacagtgcaggaggccctgcacaacttcctgaaggccgaggagctgtgccccggctacagcaaccccaactacatgtacctggccaagtgctacacagacctggaggagaaccagaatgccctgaagttctgcaacctggccctgctgctgcccaccgtgaccaaggaggagctgtag

SEQ ID NO: 239562 - DNA, 1722 bp, Artificial Sequence
  derived and/or modified sequence
atgggcaagtgcctgagctgctgcaaggaggaccagagcttccagcgctgttctccggaagaccaggtcagtactgatgctcagcatagaggcgcctcgtcaatctctcagccttctattagtctgggacacaagacttcatattcccctgtgacccacaaagtgaacgccgctaaggctagtagaagattgctgtctgtgagttccccttcattctcagaacggcgttactcacttttcgttggattccagaagcgtaacgcctccccgtactggcaacagagccgcgctaactttgatagtgaggaagataccgggttcaccgatataaaaagcagctcagaccactgtggctcctttatctctcgtcggcgtagattctcttcccggaagctttcaatcgtgagctactataagtctgcaattttctttgaccctcaagcctctggccaaaatgtctttaacctcaacgaaatagaaattttttctaagacttcttccaatacggacgcaaagaaacatatcacaattagcgcaccagagtacaataccaagaactttaaaaatttcgagacgaataccacgagccccgcatttggcaacactatcgatacggcctcatatcagcagagcacctcctcattttttagcctcgcctccgatatctccagccccgatcaacagaacggcatcgctaatgacatccaacagaggggccaactctgcaaggacttaaaggatttcctccatccgagaccggaatcatacagtacaggacactctccaattatgatcccccagcaccccagccagtccggcacgttcccattcttacataaagctggattcagtagctcttataagaatagtggctgttttattccacctcagagcgagctgactagtggtttgttcgaagacgaagactttgcagtgctgttccaggacgaggacaggagctctcctattgagattcccaagattcggtatataacggcaaacaccgacaccgaggaacagagctttccagttcccaaggccttcaacacccgcgtcgaggaactcaatctagacgtgctgctccagaaggtggaccacttacggatgtcggagtcaggcaaatccgagagctttgaattgctgcgggaccacaaagagaagttcagggatgaaattgaatttatgtggcggttcgctcgggcttacggcgacatgtatgagctgagcaccaatacccaagaaaagaagcattacgctaatatcgggaaaaccctctctgagcgagccataaaccgagcccccatgaatggtcattgccacctttggtatgctgtcctttgcggatatgtttcagaatttgaaggcctgcagaataaaattaattacggtcatctgtttaaggagcacctggatatagctatcaaactactgcctgaggaaccattcctttactatttaaagggtagatactgctacactgtatccaagctaagctggattgagaagaaaatggccgctaccttattcgggaagattccctcctcaaccgttcaggaggccttacacaatttcttaaaagctgaagagctgtgcccaggttatagcaatcccaactacatgtacttggctaagtgttataccgacttggaggagaatcagaatgccctgaaattctgcaacctggcacttctcctgccaacagtaactaaggaagaactctag

SEQ ID NO: 239563 - DNA, 1722 bp, Artificial Sequence
  derived and/or modified sequence
atggggaaatgcttaagttgctgtaaagaagaccagagtttccagaggtgttccccagaagaccaggtgagcacggatgctcagcaccggggtgcgagtagcatcagccagccctctatcagtctgggacacaagactagttactcacctgttacccataaagtgaatgctgctaaggcttctagaagactattatctgtctcctcgccttccttttcagagagacgttattccctcttcgtaggcttccagaaaaggaatgcgtctccctactggcagcaatcccgcgcaaacttcgatagcgaagaagacaccggctttacagatataaaaagtagctccgaccactgtggctcctttataagccgccgaagaaggttcagctccagaaagcttagcatcgtttcttactacaagtctgccatattcttcgacccccaggcatctggccagaatgttttcaatttgaacgaaatcgagatttttagcaaaacttcttctaatacagatgcgaaaaagcatataactatcagtgctcccgagtataacacgaagaatttcaagaactttgagacgaacaccacatccccagcatttgggaacacgatcgacaccgctagttaccaacaatcaacaagctcattctttagcttagcctcggatatttcctctccagatcagcagaacggaattgcgaatgatatacaacagcgcggtcagctgtgtaaggaccttaaagacttccttcatccacgtcctgagagttatagtacaggccactcaccaattatgatcccgcagcaccctagccagagcggcacatttcctttcttgcataaagcagggttttcctcttcttacaagaactcaggttgttttattcccccacagtctgagctcacatccggcttgtttgaggatgaagacttcgccgttctgttccaagacgaagataggagttctccaatcgaaatccctaagatccggtacattaccgcaaatacagacaccgaagagcagtccttccctgtgcccaaggcatttaatactcgcgtcgaggaactcaatctggatgtgctcttgcagaaggtggatcatctgcggatgtccgagtcaggcaaatctgaatctttcgagcttctgagagaccataaagagaaattcagagacgaaattgagttcatgtggcgtttcgcaagagcctatggggatatgtatgaactgagtactaacacacaggaaaagaagcactatgctaacattggcaagacattgtctgaacgggcaatcaaccgcgctcccatgaacggacattgtcatctatggtatgcagtcttgtgcggctacgtctcagagtttgagggactccaaaacaagattaactacggccacctgtttaaagagcacttagatatcgctataaagttgctgcccgaggagccattcttatattacttaaaaggcagatactgttacactgtcagcaagctgagttggatcgagaagaagatggccgcaaccctctttgggaagatcccatcaagcacagttcaggaggccctccataatttcctcaaggcagaggaattgtgtcccggatatagcaatcccaattatatgtacctggctaaatgttatacagatctagaggagaatcagaacgctctaaaattctgcaacttagctctgctgctccctacagtcaccaaagaagagctttag

SEQ ID NO: 239564 - DNA, 1722 bp, Artificial Sequence
  derived and/or modified sequence
atgggcaagtgcctgagctgctgcaaggaggaccagagcttccagagatgcagccccgaggaccaggtgagcaccgacgcccagcacagaggcgccagcagcatcagccagcccagcatcagcctgggccacaagaccagctacagccccgtgacccacaaggtgaacgccgccaaggccagcagaagactgctgagcgtgagcagccccagcttcagcgagagaagatacagcctgttcgtgggcttccagaagagaaacgccagcccctactggcagcagagcagagccaacttcgacagcgaggaggacaccggcttcaccgacatcaagagcagcagcgaccactgcggcagcttcatcagcagaagaagaagattcagcagcagaaagctgagcatcgtgagctactacaagagcgccatcttcttcgacccccaggccagcggccagaacgtgttcaacctgaacgagatcgagatcttcagcaagaccagcagcaacaccgacgccaagaagcacatcaccatcagcgcccccgagtacaacaccaagaacttcaagaacttcgagaccaacaccaccagccccgccttcggcaacaccatcgacaccgccagctaccagcagagcaccagcagcttcttcagcctggccagcgacatcagcagccccgaccagcagaacggcatcgccaacgacatccagcagagaggccagctgtgcaaggacctgaaggacttcctgcaccccagacccgagagctacagcaccggccacagccccatcatgatcccccagcaccccagccagagcggcaccttccccttcctgcacaaggccggcttcagcagcagctacaagaacagcggctgcttcatccccccccagagcgagctgaccagcggcctgttcgaggacgaggacttcgccgtgctgttccaggacgaggacagaagcagccccatcgagatccccaagatcagatacatcaccgccaacaccgacaccgaggagcagagcttccccgtgcccaaggccttcaacaccagagtggaggagctgaacctggacgtgctgctgcagaaggtggaccacctgagaatgagcgagagcggcaagagcgagagcttcgagctgctgagagaccacaaggagaagttcagagacgagatcgagttcatgtggagattcgccagagcctacggcgacatgtacgagctgagcaccaacacccaggagaagaagcactacgccaacatcggcaagaccctgagcgagagagccatcaacagagcccccatgaacggccactgccacctgtggtacgccgtgctgtgcggctacgtgagcgagttcgagggcctgcagaacaagatcaactacggccacctgttcaaggagcacctggacatcgccatcaagctgctgcccgaggagcccttcctgtactacctgaagggcagatactgctacaccgtgagcaagctgagctggatcgagaagaagatggccgccaccctgttcggcaagatccccagcagcaccgtgcaggaggccctgcacaacttcctgaaggccgaggagctgtgccccggctacagcaaccccaactacatgtacctggccaagtgctacaccgacctggaggagaaccagaacgccctgaagttctgcaacctggccctgctgctgcccaccgtgaccaaggaggagctgtag

SEQ ID NO: 239565 - protein, 833 aa, Artificial Sequence
  derived and/or modified sequence
MNMEIGHPHEGKDDLGDKRVIMGTKFPMELGIRVGLGKEDSRCGESPVVSNKCEGRMAPPETKFPLSKGLEMGLERQNISRTVMQRGSLGVDSVSASQGTKPSLLPGRMGLENESLLAGYTHERIIQPPLGRVCGSSQAAGSRRAPLASGPEGVEELVGKPAFVMEPRQEMEKESTCVLMKPNTEIKLPVEVDIGLTQAEGPDETKNTEPQMGLVIEPPQCQFAQQHEQRKEAGNIESGVEPPDRIRPIYSGKFFDRTPCWPSAGKVIPVGYRVATCLTEKLPRLITPPEAKKYFNFRYPPAGVERVFYGRANDPQIAPYLTHGIRSKISVLANTLINPQPITTFQQKIKDKKESIYLSNRRAPLGKSHDQAPGLPKGMDTTNTTFGTAVIKEYSAKDVVNPPKSYEEVFKEGNEGHDLYVVSHNDYYAGEAKNRKYNPSSFHRCSVYGVPTPHFNDGRAMAKSLYWLHELQMKRGAKFVSKRADDFKEKFQHKLGRVLDPIAETMNVPPDCTFGACLRPEEYGVGDLIHNRLPDEYLRGKDRQRALIAAVRHHLKKVNYQKFDTLLAAFRHYDKKGDGMIDKDELQEACDQANLSLDDKLLDQLFDYCDVDNDGFINYLEFANFLNWKDKMLLKEYEERVIIKGRKPDCVNPTEANVEEPEQTLLIKPEDIVLKEAGSTEKTLRTLLRPSDKVSNYYKTTSSEINAIVGAIPSTCYPICGVPTIRSDIPAPRIRRISDRTNYGEEGSAYSLLYPTIFARKGVFERDFFKTRSKEEIAEILCNIGVKLSDEEFENVWNLASKKHHRGEVCVENIRNVLDELRHADRIKCKTLM

SEQ ID NO: 239566 - DNA, 2502 bp, Artificial Sequence
  derived and/or modified sequence
atgaatatggaaatcggccacccccatgagggaaaagacgatcttggtgacaaaagagtgattatgggcaccaaatttccaatggagttaggaatccgagtaggcctgggaaaggaggactcacgttgtggggaaagtcctgtggtgagcaacaaatgcgagggaagaatggctcctccggaaacaaagttccccttatccaaaggtctggaaatgggcctcgagaggcagaatatctcccggacagtcatgcaaagaggatccctcggcgtggacagcgtcagcgcttcacagggtacaaagcccagtttgcttcctggacggatgggactcgaaaatgagtcactgctggcaggttacactcacgagcgaatcattcaaccccctctggggagggtctgtggaagttctcaggccgcagggagtagacgagccccacttgcaagcggtcccgaaggcgtggaagaactggtggggaagccagcttttgttatggagccaagacaagaaatggagaaagaaagcacctgtgtgctcatgaaaccaaacaccgagatcaaactgcctgtggaagtcgacattgggctgacccaggcagaagggcctgatgaaactaaaaatactgaaccacagatgggtctggttatcgagccacctcaatgccagtttgcacagcagcatgaacagaggaaggaagctggcaatattgagtcaggagttgagccgccagataggatccggccaatttatagtggaaaattcttcgaccggactccatgttggccctcagccggaaaagtgatccctgtgggttatagagtcgcaacgtgtttaacggaaaagctgccaaggctgatcacgccccctgaggccaaaaagtatttcaacttccggtacccaccggctggagtcgaaagggttttttatggcagagccaacgacccacagatcgcgccttacctcactcatgggatccgctccaaaatttccgtgctggccaacacgctgatcaaccctcagccaatcacaacttttcagcagaaaataaaggataagaaagagagtatttatctgagcaaccgcagggccccactaggtaagtctcacgaccaagcaccagggttgcccaagggtatggatactactaataccacgtttggcacggcagtgattaaggagtacagcgcaaaggatgtggttaacccgccaaagtcctacgaggaggtcttcaaggagggaaatgagggacacgatctgtatgtggtgtctcacaatgattattatgcaggagaggccaagaataggaaatacaatccatcctcattccaccgttgctctgtgtatggggtgcctacccctcattttaacgatggacgggctatggcaaagtctctttattggctgcatgagctgcaaatgaaaagaggagccaagtttgtaagcaagcgagcagacgatttcaaggagaagttccaacacaagctgggccgtgtgctggacccaatcgcagagactatgaatgtgccaccagactgcacattcggagcatgcttacgacctgaggagtacggagttggagatcttatccacaataggcttcccgatgagtatctgaggggcaaggaccgccagcgcgcactgatagccgcagtgcgccatcacctgaaaaaagtcaattaccagaagttcgacaccttactggctgcgtttaggcactacgacaagaagggcgacggaatgatagacaaggacgagctccaggaagcatgtgaccaggcgaatctgtccttagacgataaactgctggatcagctgttcgactactgtgatgttgacaacgatgggttcattaactatctggagtttgccaatttcttgaattggaaggacaagatgttacttaaagaatacgaggagagagtgatcataaaaggccgaaaaccagactgtgtgaacccaactgaagccaacgtggaagagccagagcaaactctgctgattaaaccagaggacatagtcctgaaggaggccggatcgacagaaaagactttgcgcacccttttacggccatctgataaggtcagtaattattataagaccacttcctcggaaattaacgcaattgtaggagccattccttcaacttgctatccaatctgcggggtccctacaatccggtcagatatccctgcccctcgcatcagaagaataagcgaccgtacgaactatggcgaagaagggagcgcatactctctcttgtacccaactatctttgcaaggaagggcgtgtttgaaagggactttttcaagacgagatcgaaggaagagattgccgaaattctgtgcaatatcggagttaaattatctgatgaggagttcgaaaacgtctggaatctggctagtaaaaagcatcatagaggggaagtgtgcgtcgaaaatattcgaaacgtcctcgacgaacttaggcacgcagatagaatcaaatgtaagaccctgatgtag

SEQ ID NO: 239567 - DNA, 2502 bp, Artificial Sequence
  derived and/or modified sequence
atgaatatggagataggtcacccacacgagggtaaagacgatctaggcgacaagagagtaataatgggcaccaaatttcctatggagctgggcattcgcgtcggtctgggtaaggaggattcaaggtgcggcgagtcccctgtggtctcgaataaatgtgaaggaagaatggccccgcctgaaacaaagtttccgctctcgaagggactggaaatgggtctcgaaagacagaacatctctcgtaccgtcatgcaaaggggctcactgggcgtcgactctgttagcgcctcgcagggtacgaaaccatccctgttgcctggaagaatggggctcgaaaacgagtctctgctcgccggatatacccacgaaaggattatacaacctcccctgggcagggtttgtgggagctctcaagcggccgggagcaggcgcgctccacttgcaagcgggcctgaaggcgtggaggaattggtgggaaaaccggcatttgtcatggagccacggcaggagatggaaaaggaatccacttgtgtactcatgaagccaaataccgaaatcaaactacccgtcgaagttgacattggactcacacaggccgaaggccccgacgaaacaaaaaacacagagccacagatgggactggttatcgagccacctcaatgccagttcgcccagcaacacgaacagcggaaggaagctggaaacattgaaagcggcgtggaaccccccgatagaatacggccaatctacagtggcaaattctttgatcgcactccttgttggccttccgctggaaaagtgatccctgtaggatacagagtcgctacgtgcttgaccgaaaagcttcctcggctgattacaccacccgaagcgaagaagtactttaactttcgctaccctcccgctggtgtggaaagggtgttttacggaagagcaaatgacccccagatcgcaccatacctcactcacggtatcaggagcaaaattagcgtgctggctaataccctcataaatccccagccaatcacaacgttccagcagaaaattaaggataaaaaggaatccatttacctttctaaccgcagagcaccactgggcaagtcccatgatcaagccccaggcttgcctaagggcatggacaccactaatacaacatttgggactgctgttatcaaggagtacagtgcgaaagacgttgtgaacccaccaaagagttacgaagaggtctttaaagagggtaatgaggggcatgacctgtacgtcgtctcgcacaacgactattatgcaggcgaagctaagaacaggaagtataacccctccagttttcatcggtgctctgtatatggcgtccctaccccccactttaatgatggccgcgcgatggccaagagtttgtactggctgcatgagctgcagatgaaacgcggagcgaagttcgtatctaagcgggccgatgatttcaaagaaaaattccaacacaaactgggtagagtgttggaccccatcgcagaaacgatgaacgtgcctccagactgcacattcggggcatgcttgaggcctgaagaatatggcgtgggagatcttatccataaccggttacctgatgagtatctgaggggtaaagaccggcagcgtgccctgatcgccgccgtccgtcaccacctgaagaaggtcaattaccagaaatttgacactctgttagctgcattccggcattacgataaaaagggggatggaatgattgacaaagacgagctgcaggaggcatgcgatcaggcaaatctgtcactcgatgataaactcctggaccagctttttgactattgtgacgttgacaatgatggatttattaactacttggaattcgccaattttctgaattggaaagacaagatgttgctgaaggaatatgaggagagagttattatcaaagggcggaagccagactgtgtcaacccgaccgaggcaaatgtcgaggaacccgaacagaccctattgatcaagcccgaagacatcgtccttaaagaagctggctcgactgaaaagactttgagaaccctgctgagaccctcagataaagttagcaactactataaaacaacatcatccgaaatcaacgccatcgtaggggcaattcccagcacatgctatccgatctgtggggtcccaacaatacgctccgacatccctgcgcctcgtataaggcgaatttcagatagaacgaactacggagaggaagggtccgcctatagcctgttgtacccaactatatttgctaggaagggtgtgtttgaacgcgacttttttaaaaccaggtccaaagaggaaatcgcagagatcctgtgtaatattggtgttaagctctccgacgaggaattcgaaaatgtttggaacctggccagtaaaaagcaccaccgcggagaggtgtgtgtggagaacatccgcaatgtcctagacgagcttcgacacgccgatagaattaaatgcaagaccctgatgtag

SEQ ID NO: 239568 - DNA, 2502 bp, Artificial Sequence
  derived and/or modified sequence
atgaatatggagattggacacccccacgaaggcaaggatgatttaggcgataagagggtgataatgggaaccaagtttcccatggagttgggcattcgcgtaggtttgggcaaagaagatagcaggtgcggtgaatctccggtggtcagcaacaagtgtgagggacgcatggcacccccagagaccaaattcccactgtctaaagggctggagatgggactcgaacggcagaacatttctcgcaccgtgatgcagcggggttccctcggcgtggatagcgtgtcagcaagccagggaaccaagcccagcctgttgcctggtagaatgggtctggaaaacgaatcactgctggccgggtacacacacgaacgaataatacagccacctcttggccgcgtgtgcggaagctcccaggctgctgggagtcgtcgcgctcccctggcaagtggtcctgaaggagttgaagaattagttggcaaacccgcttttgttatggagcctaggcaagaaatggagaaggagagcacctgcgttttgatgaaacccaacacagaaataaaacttcctgtggaggtggacatcgggctgacccaagcggagggtccggacgaaacgaaaaatactgagccccagatgggactggtgattgaaccacctcaatgccaattcgctcaacagcatgaacagaggaaagaggcaggaaacatcgaatccggggtagagccacctgacaggatccgcccgatctatagcggcaaattcttcgaccgcaccccgtgttggccgtctgccggcaaagtcattcccgtaggttatagagtggctacctgcttgaccgagaagctaccaagattgataactcctcccgaagcaaaaaagtacttcaatttccgatatccccctgcaggggtcgaacgcgtgttttacggcagagctaacgacccgcaaattgctccctacttgactcatgggattcgttccaaaatttccgtcctggctaatactctcattaatccccagccaattaccaccttccagcaaaagataaaggataagaaggaaagtatctatctctccaaccgccgtgcaccactcggcaagtctcacgaccaggctcccggactccctaaaggcatggatacgaccaacaccaccttcggaaccgccgtgattaaagaatattctgccaaagatgtagtaaacccaccaaagtcgtatgaagaagtgttcaaagaaggcaatgaaggtcacgatctttacgtggtgtcgcataatgactattatgcaggagaagcaaagaatcgcaaatataatccctcatcattccaccggtgcagcgtttatggagttcctacccctcatttcaacgacggccgagcaatggccaaaagcctatactggctgcacgagctgcaaatgaagcggggcgccaagttcgtatcaaaaagggccgatgacttcaaagagaagtttcaacacaaattgggcagggtgctggaccctatagctgaaaccatgaatgtccctcctgactgtacctttggagcgtgcctccgccctgaagaatacggggtaggagatctgatacataacagactccctgacgaatatcttcgcggcaaggaccgccaacgagcactgattgcagctgtgagacatcatttaaaaaaggtgaactatcagaagtttgacacactcctggcagcatttcggcattacgataagaagggagatggaatgattgacaaagacgagctgcaagaggcctgcgaccaagctaacctgtcccttgatgacaagctcctggaccagctttttgattattgcgacgtggacaacgatggatttatcaactacctggaatttgcaaactttctgaactggaaggataaaatgctgctcaaagaatacgaagaacgcgttattataaaaggaaggaagcccgactgcgtgaatccaacagaagctaatgtcgaagagccagagcagactctactcataaagcccgaggacatcgtacttaaggaggctggaagcacagagaaaacactgagaacactcctccgccctagtgataaggtgagtaactactacaaaacaactagctcagagatcaacgctatcgttggggctataccatcaacgtgctatccaatttgcggcgtcccaacgatcagaagcgacatcccagctccaagaatacgaagaataagcgacagaaccaattatggagaggaagggtccgcctacagccttctgtatccaactatctttgccaggaaaggtgtgtttgaacgggatttctttaagaccaggtcaaaagaggagattgctgagatactgtgcaatatcggcgtgaagttatccgatgaagagttcgaaaacgtctggaacctcgcatccaagaaacatcatagaggagaagtctgtgtagagaatatccgcaacgtgctcgacgaactaagacatgccgatcggattaaatgtaagactttaatgtag

SEQ ID NO: 239569 - DNA, 2823 bp, Artificial Sequence
  derived and/or modified sequence
taagaggcaggcaggaagcaatggacagggagtccgagtgaggttgtgctctttcctgagagaggggttccgcaagggattggaggcgtctttgtagccaggtacagctttccccttagagatgagcgctcttggagaaatgagaatggggagaaatcgtccatgaacatggagattggacatccccacgaaggaaaggatgatttaggagacaagagggtcatcatgggaacaaaatttcccatggagttggggatcagagtaggattaggaaaagaagattcccgatgcggggagagccctgtggttagtaataagtgtgagggaaggatggcaccaccagaaacaaaatttccattgagcaaggggcttgaaatgggattagaaagacagaatatttctaggactgtcatgcagaggggtagtttaggagtcgacagtgtctcagcttcacagggaacaaaaccttctctgttgccaggaagaatggggttagaaaatgagagtcttcttgcaggatatacccatgaacggataatacagcctcctttgggcagggtgtgtggaagttcacaggctgcagggagcaggagagctcctttggctagtggccctgaaggggtagaggaattagtgggaaagcctgctttcgttatggaaccaagacaggaaatggaaaaagagtctacctgtgttttaatgaaacccaacacagagattaagcttcctgtggaggtggacattggactaacccaagccgaggggccagatgagactaagaatacagagccccaaatgggcttggtgatagaacctccccaatgccagtttgcccaacaacatgaacagagaaaggaggctggaaacattgaatcaggagtggaacctccagatcgcatcagacccatatactctgggaagttttttgatcggaccccttgctggccaagtgcaggaaaagttattccagttggttacagagttgcaacctgcttgactgaaaaacttcccaggctaattactccacctgaagcaaaaaagtatttcaacttcagatatccacctgctggagtagaaagagtattttacggaagagcaaatgatccccagattgcaccttatttgacacatggaattagatctaaaatttcagtactggcaaacacattgataaacccacagcctattaccacatttcaacagaaaattaaagataaaaaagaatctatatatcttagcaatcgacgagcaccattaggaaaatctcacgatcaagcaccaggattaccaaaaggcatggacacaaccaatacgacatttgggacagcagtcatcaaagaatactctgctaaagatgtggtgaatccaccaaaatcctatgaagaagtatttaaagaaggaaatgaaggacatgatttgtatgttgtttctcacaatgattattatgcaggagaggcaaagaaccgaaagtataacccatcaagtttccataggtgtagtgtgtatggagtaccaacaccacattttaatgatggacgagccatggcaaaatctctatattggctccatgaactacaaatgaaaagaggagctaagtttgtatccaaaagagcagatgatttcaaagaaaagtttcaacataaacttggaagagttttagatcccattgcagaaacaatgaatgttcccccagactgcacatttggagcttgtctccgtcctgaggaatatggagttggtgatctcatccataatagacttccggatgaatatcttcgaggcaaggatagacagcgagccctgattgcagcagttcggcatcacctgaagaaagttaattaccaaaagtttgacactttgctggcagccttcaggcactatgacaagaagggagatgggatgatagataaagacgagctgcaggaagcttgtgaccaggccaacttgagtttagatgacaagctcctggaccagctatttgactactgtgatgtggataatgatggcttcattaactatctggaattcgcaaattttcttaactggaaagacaaaatgcttcttaaagagtatgaagagagggtcattattaaaggtagaaaaccagattgtgtaaaccctactgaggctaatgttgaagaacctgaacaaactctcctcataaagccagaagatattgtcttaaaagaagcaggaagcacagaaaagactctccggacacttctgagaccaagtgataaagtttccaactactataagacaacttcttctgagatcaatgcaattgtaggagccattccttctacttgttaccccatttgtggtgttccaaccattcgatctgacattcctgctccccgaattcgtcgcatcagtgacagaactaattatggtgaagaaggtagtgcatattcactactatatcctaccatttttgcccggaaaggagtgtttgaaagagacttcttcaagaccagatcaaaagaagagattgcagagatattgtgtaacattggtgtcaaactgtctgatgaagaatttgaaaatgtatggaatcttgcatcaaaaaagcatcacagaggagaagtttgtgttgagaacatcagaaatgttctagatgagctacggcatgcagaccggatcaagtgtaaaacactcatgtgatatttttggacttcattcattcaagcaaaagaattattaactctgtgtttatctaaaatgttgaatccattctggttttagatattatgttagagttcacagtggtaagactcatatgcctgtatgtgttgctaataaattagattttggattttaaaa

SEQ ID NO: 239570 - DNA, 2502 bp, Artificial Sequence
  derived and/or modified sequence
atgaacatggagatcggccacccccacgagggcaaggacgacctgggcgacaagagagtgatcatgggcaccaagttccccatggagctgggcatcagagtgggcctgggcaaggaggacagcagatgcggcgagagccccgtggtgagcaacaagtgcgagggcagaatggccccccccgagaccaagttccccctgagcaagggcctggagatgggcctggagagacagaacatcagcagaaccgtgatgcagagaggcagcctgggcgtggacagcgtgagcgccagccagggcaccaagcccagcctgctgcccggcagaatgggcctggagaacgagagcctgctggccggctacacccacgagagaatcatccagccccccctgggcagagtgtgcggcagcagccaggccgccggcagcagaagagcccccctggccagcggccccgagggcgtggaggagctggtgggcaagcccgccttcgtgatggagcccagacaggagatggagaaggagagcacctgcgtgctgatgaagcccaacaccgagatcaagctgcccgtggaggtggacatcggcctgacccaggccgagggccccgacgagaccaagaacaccgagccccagatgggcctggtgatcgagcccccccagtgccagttcgcccagcagcacgagcagagaaaggaggccggcaacatcgagagcggcgtggagccccccgacagaatcagacccatctacagcggcaagttcttcgacagaaccccctgctggcccagcgccggcaaggtgatccccgtgggctacagagtggccacctgcctgaccgagaagctgcccagactgatcaccccccccgaggccaagaagtacttcaacttcagatacccccccgccggcgtggagagagtgttctacggcagagccaacgacccccagatcgccccctacctgacccacggcatcagaagcaagatcagcgtgctggccaacaccctgatcaacccccagcccatcaccaccttccagcagaagatcaaggacaagaaggagagcatctacctgagcaacagaagagcccccctgggcaagagccacgaccaggcccccggcctgcccaagggcatggacaccaccaacaccaccttcggcaccgccgtgatcaaggagtacagcgccaaggacgtggtgaacccccccaagagctacgaggaggtgttcaaggagggcaacgagggccacgacctgtacgtggtgagccacaacgactactacgccggcgaggccaagaacagaaagtacaaccccagcagcttccacagatgcagcgtgtacggcgtgcccaccccccacttcaacgacggcagagccatggccaagagcctgtactggctgcacgagctgcagatgaagagaggcgccaagttcgtgagcaagagagccgacgacttcaaggagaagttccagcacaagctgggcagagtgctggaccccatcgccgagaccatgaacgtgccccccgactgcaccttcggcgcctgcctgagacccgaggagtacggcgtgggcgacctgatccacaacagactgcccgacgagtacctgagaggcaaggacagacagagagccctgatcgccgccgtgagacaccacctgaagaaggtgaactaccagaagttcgacaccctgctggccgccttcagacactacgacaagaagggcgacggcatgatcgacaaggacgagctgcaggaggcctgcgaccaggccaacctgagcctggacgacaagctgctggaccagctgttcgactactgcgacgtggacaacgacggcttcatcaactacctggagttcgccaacttcctgaactggaaggacaagatgctgctgaaggagtacgaggagagagtgatcatcaagggcagaaagcccgactgcgtgaaccccaccgaggccaacgtggaggagcccgagcagaccctgctgatcaagcccgaggacatcgtgctgaaggaggccggcagcaccgagaagaccctgagaaccctgctgagacccagcgacaaggtgagcaactactacaagaccaccagcagcgagatcaacgccatcgtgggcgccatccccagcacctgctaccccatctgcggcgtgcccaccatcagaagcgacatccccgcccccagaatcagaagaatcagcgacagaaccaactacggcgaggagggcagcgcctacagcctgctgtaccccaccatcttcgccagaaagggcgtgttcgagagagacttcttcaagaccagaagcaaggaggagatcgccgagatcctgtgcaacatcggcgtgaagctgagcgacgaggagttcgagaacgtgtggaacctggccagcaagaagcaccacagaggcgaggtgtgcgtggagaacatcagaaacgtgctggacgagctgagacacgccgacagaatcaagtgcaagaccctgatgtag

SEQ ID NO: 239571 - DNA, 2502 bp, Artificial Sequence
  derived and/or modified sequence
atgaacatggaaattgggcacccccatgagggaaaggacgatcttggcgacaagcgcgtaattatggggactaagttcccaatggagcttggcattagagtcgggctgggaaaggaggactcacggtgtggcgaatcaccagtggtttcgaataaatgtgagggccggatggctcctcctgagacaaaattcccactgagcaagggactggagatgggacttgaacggcaaaatatttcaaggacagtgatgcagcgcgggagtctcggtgtggactctgtgagtgcgtctcagggcaccaagccatcgctactgccaggtaggatgggccttgagaatgaatcgctgctggccggatacactcacgaacgtataattcagcctccactcgggcgagtatgtgggtcgtcacaggctgctggttcccgcagggcaccgctagcgtcagggcctgagggggttgaggagctggttggtaagcccgcctttgtcatggaacccagacaggagatggagaaggaatccacatgtgtgctgatgaagcccaacacagagatcaaactgcctgtagaggtggatattgggctgacacaggctgagggaccagatgaaactaaaaacactgaaccgcaaatgggattggtcatagagccccctcagtgccagtttgcccagcagcatgagcagagaaaggaagcaggaaatatcgagtccggagtcgagcctccagataggattagacctatttatagtggtaaattctttgacaggacgccatgctggccttccgcgggaaaagtgattccagtcgggtatcgagtggcaacgtgcctgacagagaagctacccagacttattactccccccgaagcaaaaaaatattttaattttaggtatcctcccgccggggttgagcgcgtgttctatggacgtgcgaacgacccgcagattgccccctaccttacccacggcatccgttccaaaatcagtgtgctggctaatactctgatcaatccacagccaattaccacatttcaacagaagattaaagataagaaggaatcaatctacctctcgaatcggagagctcctttgggtaaatcccacgatcaggctccaggcctgcctaaagggatggacacgaccaatacaacatttggcaccgcggttatcaaggagtacagcgccaaggacgtagtaaatccccctaagagctatgaggaagtgtttaaagaaggaaacgagggacacgatctgtacgtagtctcacacaacgactactacgccggcgaggctaaaaaccgtaagtacaaccctagcagcttccacaggtgttccgtgtacggtgtgcctaccccgcacttcaacgacggccgagccatggccaagtccctctattggttacatgagctgcagatgaaaagaggagccaagtttgtgagtaaacgcgctgacgacttcaaggaaaagttccagcacaagctgggtagggtactggaccccatagcagagaccatgaacgttcccccagattgcacatttggggcttgtctgcggccagaagagtacggagtgggagatctgatccacaatagactgcctgacgagtatctgcggggcaaagataggcaaagagccctcattgctgctgtgcgccatcatctgaagaaagtgaattaccaaaagtttgacactctgttagcagcgttcagacactacgacaagaaaggcgatgggatgatcgataaagacgagttgcaggaagcttgtgaccaggcgaacttgagtctggatgacaaactgctcgaccaactgtttgactactgcgacgtagacaacgatgggtttatcaattatcttgaatttgctaactttcttaactggaaggataagatgctcctgaaggagtacgaggagagagttattattaagggaagaaagcccgactgcgtcaacccgaccgaagcaaacgtcgaagaacctgaacagacactgctgattaaacctgaggacattgtcttgaaggaagcaggcagtactgagaagactctgcgaactctgctcagacctagcgataaagtgagcaattactataagacaaccagctccgagattaatgcaatcgtgggggcaatacctagcacctgttatcctatatgcggggtgccaacaatccggagtgacatcccagcgccgagaattaggcgaataagtgatagaaccaactacggcgaggaaggaagtgcctacagccttttgtaccctaccatctttgctcggaaaggcgtattcgaacgagattttttcaagacacggtctaaagaggagatcgccgagatcctgtgtaacattggagtcaagctaagcgatgaggagttcgaaaacgtgtggaatctggcatctaagaaacatcatagaggcgaggtgtgcgtagagaatatccgcaatgtgctggatgagctgaggcatgccgatagaatcaaatgcaaaacgctgatgtag

SEQ ID NO: 239572 - DNA, 2502 bp, Artificial Sequence
  derived and/or modified sequence
atgaacatggagatcggccacccccatgagggcaaggatgacctgggggacaagagggtcatcatgggcaccaagttccccatggagctgggcatccgggtgggcctgggcaaggaggacagccgctgtggggagagccctgtggtgagcaacaagtgtgagggccgcatggcccctcctgagaccaagttccccctgagcaagggcctggagatgggcctggagcggcagaacatcagcaggacagtgatgcagaggggcagcctgggcgtggacagcgtgtctgccagccagggcaccaagcccagcctgctgcccggccgcatgggcctggagaatgaaagcctgctggccggctacacccatgagcgcatcatccagccccccctgggccgggtgtgtggcagcagccaggccgccggcagcagaagagcccccctggccagcggccctgagggcgtggaggagctggtgggcaagccagcctttgtgatggagccccggcaggagatggagaaggagagcacctgtgtgctgatgaagcccaacacagagatcaagctgcctgtggaggtggacatcggcctgacccaggccgagggcccagatgagaccaagaacacagagccccagatgggcctggtgattgagcccccccagtgccagtttgcccagcagcacgagcagaggaaggaggccggcaacatcgagagcggcgtggagcccccagaccgcatccggcccatctacagcggcaagttctttgacaggaccccctgctggcccagcgctgggaaggtgattcctgtgggctacagagtggccacctgcctgacagagaagctgcccaggctcatcaccccacctgaggccaagaagtacttcaacttccgctaccccccagctggggtggagagggtcttctacggccgggccaatgacccccagatcgccccctacctgacccacggcatccgcagcaagatctctgtgctggccaacaccctcatcaacccccagcccatcaccaccttccagcagaagatcaaggacaagaaggagagcatctacctgagcaacagaagagcccccctgggcaagagccatgaccaggcccctggcctgcccaagggcatggacaccaccaacaccaccttcggcacagctgtgatcaaggagtacagcgccaaggatgtggtgaacccccccaagagctatgaggaggtgttcaaggagggcaatgaaggacatgacctgtatgtggtgagccacaatgactactatgctggggaggccaagaacaggaagtacaaccccagcagcttccaccgctgcagcgtgtatggagtgcccaccccccacttcaatgatggccgggccatggccaagagcctgtactggctgcacgagctgcagatgaagagaggagccaagtttgtgtccaagagagcagatgacttcaaggagaagttccagcacaagctgggccgggtgctggaccccatcgccgagaccatgaatgtgcccccagactgcaccttcggggcctgcctgcggcctgaggagtatggagtgggggacctgatccacaaccggctgcctgatgagtacctgcggggcaaggaccggcagagggccctgattgctgctgtgcgccaccacctgaagaaggtgaactaccagaagtttgacaccctgctggccgccttccgccactatgacaagaagggagatggcatgattgacaaggatgagctgcaggaggcctgtgaccaggccaacctgagcctggatgacaagctgctggaccagctgtttgactactgtgatgtggacaatgatggcttcatcaactacctggagtttgccaacttcctgaactggaaggacaagatgctgctgaaggagtatgaggagagggtcatcatcaagggcaggaagccagactgtgtgaaccccacagaggccaacgtggaggagcctgagcagaccctgctgatcaagccagaggacatcgtgctgaaggaggccggcagcacagagaagaccctgcggaccctgctgcggcccagcgacaaggtgagcaactactacaagaccaccagcagcgagatcaatgccatcgtgggcgccatccccagcacctgctaccccatctgtggggtgcccaccatccgcagtgacatcccagccccccgcatccgccgcatcagtgacaggaccaactatggagaggagggcagcgcctacagcctgctgtaccccaccatctttgccaggaaaggagtgtttgagcgggacttcttcaagaccaggagcaaggaggagattgctgagatcctgtgcaacatcggcgtgaagctgagtgatgaggagtttgaaaatgtgtggaacctggccagcaagaagcaccacagaggagaggtgtgtgtggagaacatcagaaatgtgctggatgagctgcggcatgctgaccgcatcaagtgcaagaccctgatgtag

SEQ ID NO: 239573 - DNA, 2502 bp, Artificial Sequence
  derived and/or modified sequence
atgaacatggagatcggccacccccacgagggcaaggacgacctgggcgacaaacgcgtcatcatgggcaccaagttccccatggagttaggaatcagggtgggactggggaaggaggattctagatgcggcgaaagtcccgtggtctctaataaatgcgaaggtcgaatggccccacctgaaacaaagtttcccctgtcgaaggggctagagatgggtcttgaacggcagaacatttcacgcacagtgatgcaaaggggctccttaggagtggatagcgtgtccgcaagtcaagggacaaaaccaagcttgctacccggccgaatgggactggagaatgaatctctcttggctggctacacacacgagcggataatccagccacccttgggacgcgtatgcggctcatcacaagcagcgggcagtaggagagccccacttgcttcgggccccgaaggtgtcgaggaactggtgggaaagcctgctttcgtgatggaaccgaggcaggagatggaaaaggaaagtacctgtgtcctgatgaaacctaataccgaaatcaagctgccagtcgaggtggatataggcctgacacaggcggaagggcccgacgaaacaaaaaataccgaaccacagatggggcttgtgatcgagcctccccagtgccagttcgcccagcagcacgagcagcggaaggaggctggcaatattgaaagcggggtcgagcctccagaccgcatccgcccaatctattcaggcaagttctttgatcggacaccttgttggccctctgccggcaaagttattcctgtgggttaccgcgtggctacctgcctaacagagaaactgccccggctcatcacacccccagaggctaaaaagtattttaattttagatatccccctgccggcgtcgaacgtgtcttctacgggagagccaatgaccctcagatcgccccgtacctcactcacggtattaggagcaaaatttccgtgctggccaacacactgatcaaccctcagccaataaccactttccagcagaaaattaaggacaaaaaagagtccatatatctgagcaatagacgagctcctctgggcaaatctcatgatcaagcgccaggcctccctaaagggatggacactactaataccacattcggcacggccgtgattaaagaatactctgcgaaggatgtggtcaatcctcccaaatcctacgaggaagtttttaaggaagggaatgagggtcatgatctgtatgtggtgagccacaacgactattatgcgggtgaggccaaaaatcgcaaatacaatccctccagcttccaccgctgctctgtctatggcgtgccaaccccgcattttaatgacggcagagctatggccaagtcactctattggctccacgaactgcaaatgaagcgtggagcaaagttcgtgtccaagcgggcagacgactttaaggagaagttccaacacaagctgggaagagttctggatcctattgctgagaccatgaatgtgccacccgattgtacattcggtgcatgtttgaggccagaggagtacggggtgggcgacctaatccacaacagactccctgacgagtacctccgcgggaaagatcggcagagagctctgattgcggcagtcagacaccatttgaagaaggtgaactaccagaagttcgataccttgctcgctgccttcagacattacgataaaaagggcgatggaatgattgacaaagacgagctgcaggaagcctgtgatcaggcaaatctgtccctggatgataaattgcttgaccaactcttcgattattgcgacgttgacaacgatggattcatcaactacttggagtttgccaacttcctcaattggaaagataaaatgttacttaaggaatacgaggaaagagtcatcatcaaaggaaggaagcccgactgtgttaatccaacggaggccaatgttgaggagcctgagcagacccttctcattaagcctgaagacatcgtgctgaaagaggcgggatctaccgaaaagaccctgagaaccttgcttcggccttcggataaggtgagtaattattacaagaccacatctagcgagataaatgcaatagtaggtgcgatccccagcacatgctaccccatctgcggagtgcccacaatccgctctgacatcccagcaccgcgcataaggaggattagcgatcgcaccaactacggcgaggaaggatccgcctacagcctgctctacccgaccatttttgccagaaaaggggtgtttgagagggatttcttcaaaacccgctctaaagaggaaatagcggagatcctctgtaacataggcgtcaagttatccgacgaggagtttgaaaatgtgtggaatctcgcaagtaagaagcaccatcgaggggaggtgtgcgtggaaaacataagaaacgtgctggacgaacttcgacacgcagacagaatcaagtgcaagacactcatgtag

SEQ ID NO: 239574 - RNA, 2502 nt, Artificial Sequence
  derived and/or modified sequence
augaauauggagauaggucacccacacgaggguaaagacgaucuaggcgacaagagaguaauaaugggcaccaaauuuccuauggagcugggcauucgcgucggucuggguaaggaggauucaaggugcggcgaguccccuguggucucgaauaaaugugaaggaagaauggccccgccugaaacaaaguuuccgcucucgaagggacuggaaaugggucucgaaagacagaacaucucucguaccgucaugcaaaggggcucacugggcgucgacucuguuagcgccucgcaggguacgaaaccaucccuguugccuggaagaauggggcucgaaaacgagucucugcucgccggauauacccacgaaaggauuauacaaccuccccugggcaggguuugugggagcucucaagcggccgggagcaggcgcgcuccacuugcaagcgggccugaaggcguggaggaauuggugggaaaaccggcauuugucauggagccacggcaggagauggaaaaggaauccacuuguguacucaugaagccaaauaccgaaaucaaacuacccgucgaaguugacauuggacucacacaggccgaaggccccgacgaaacaaaaaacacagagccacagaugggacugguuaucgagccaccucaaugccaguucgcccagcaacacgaacagcggaaggaagcuggaaacauugaaagcggcguggaaccccccgauagaauacggccaaucuacaguggcaaauucuuugaucgcacuccuuguuggccuuccgcuggaaaagugaucccuguaggauacagagucgcuacgugcuugaccgaaaagcuuccucggcugauuacaccacccgaagcgaagaaguacuuuaacuuucgcuacccucccgcugguguggaaaggguguuuuacggaagagcaaaugacccccagaucgcaccauaccucacucacgguaucaggagcaaaauuagcgugcuggcuaauacccucauaaauccccagccaaucacaacguuccagcagaaaauuaaggauaaaaaggaauccauuuaccuuucuaaccgcagagcaccacugggcaagucccaugaucaagccccaggcuugccuaagggcauggacaccacuaauacaacauuugggacugcuguuaucaaggaguacagugcgaaagacguugugaacccaccaaagaguuacgaagaggucuuuaaagaggguaaugaggggcaugaccuguacgucgucucgcacaacgacuauuaugcaggcgaagcuaagaacaggaaguauaaccccuccaguuuucaucggugcucuguauauggcgucccuaccccccacuuuaaugauggccgcgcgauggccaagaguuuguacuggcugcaugagcugcagaugaaacgcggagcgaaguucguaucuaagcgggccgaugauuucaaagaaaaauuccaacacaaacuggguagaguguuggaccccaucgcagaaacgaugaacgugccuccagacugcacauucggggcaugcuugaggccugaagaauauggcgugggagaucuuauccauaaccgguuaccugaugaguaucugagggguaaagaccggcagcgugcccugaucgccgccguccgucaccaccugaagaaggucaauuaccagaaauuugacacucuguuagcugcauuccggcauuacgauaaaaagggggauggaaugauugacaaagacgagcugcaggaggcaugcgaucaggcaaaucugucacucgaugauaaacuccuggaccagcuuuuugacuauugugacguugacaaugauggauuuauuaacuacuuggaauucgccaauuuucugaauuggaaagacaagauguugcugaaggaauaugaggagagaguuauuaucaaagggcggaagccagacugugucaacccgaccgaggcaaaugucgaggaacccgaacagacccuauugaucaagcccgaagacaucguccuuaaagaagcuggcucgacugaaaagacuuugagaacccugcugagacccucagauaaaguuagcaacuacuauaaaacaacaucauccgaaaucaacgccaucguaggggcaauucccagcacaugcuauccgaucuguggggucccaacaauacgcuccgacaucccugcgccucguauaaggcgaauuucagauagaacgaacuacggagaggaaggguccgccuauagccuguuguacccaacuauauuugcuaggaaggguguguuugaacgcgacuuuuuuaaaaccagguccaaagaggaaaucgcagagauccuguguaauauugguguuaagcucuccgacgaggaauucgaaaauguuuggaaccuggccaguaaaaagcaccaccgcggagagguguguguggagaacauccgcaauguccuagacgagcuucgacacgccgauagaauuaaaugcaagacccugauguag

SEQ ID NO: 239575 - RNA, 2502 nt, Artificial Sequence
  derived and/or modified sequence
augaauauggagauuggacacccccacgaaggcaaggaugauuuaggcgauaagagggugauaaugggaaccaaguuucccauggaguugggcauucgcguagguuugggcaaagaagauagcaggugcggugaaucuccgguggucagcaacaagugugagggacgcauggcacccccagagaccaaauucccacugucuaaagggcuggagaugggacucgaacggcagaacauuucucgcaccgugaugcagcgggguucccucggcguggauagcgugucagcaagccagggaaccaagcccagccuguugccugguagaaugggucuggaaaacgaaucacugcuggccggguacacacacgaacgaauaauacagccaccucuuggccgcgugugcggaagcucccaggcugcugggagucgucgcgcuccccuggcaagugguccugaaggaguugaagaauuaguuggcaaacccgcuuuuguuauggagccuaggcaagaaauggagaaggagagcaccugcguuuugaugaaacccaacacagaaauaaaacuuccuguggagguggacaucgggcugacccaagcggaggguccggacgaaacgaaaaauacugagccccagaugggacuggugauugaaccaccucaaugccaauucgcucaacagcaugaacagaggaaagaggcaggaaacaucgaauccgggguagagccaccugacaggauccgcccgaucuauagcggcaaauucuucgaccgcaccccguguuggccgucugccggcaaagucauucccguagguuauagaguggcuaccugcuugaccgagaagcuaccaagauugauaacuccucccgaagcaaaaaaguacuucaauuuccgauaucccccugcaggggucgaacgcguguuuuacggcagagcuaacgacccgcaaauugcucccuacuugacucaugggauucguuccaaaauuuccguccuggcuaauacucucauuaauccccagccaauuaccaccuuccagcaaaagauaaaggauaagaaggaaaguaucuaucucuccaaccgccgugcaccacucggcaagucucacgaccaggcucccggacucccuaaaggcauggauacgaccaacaccaccuucggaaccgccgugauuaaagaauauucugccaaagauguaguaaacccaccaaagucguaugaagaaguguucaaagaaggcaaugaaggucacgaucuuuacguggugucgcauaaugacuauuaugcaggagaagcaaagaaucgcaaauauaaucccucaucauuccaccggugcagcguuuauggaguuccuaccccucauuucaacgacggccgagcaauggccaaaagccuauacuggcugcacgagcugcaaaugaagcggggcgccaaguucguaucaaaaagggccgaugacuucaaagagaaguuucaacacaaauugggcagggugcuggacccuauagcugaaaccaugaaugucccuccugacuguaccuuuggagcgugccuccgcccugaagaauacgggguaggagaucugauacauaacagacucccugacgaauaucuucgcggcaaggaccgccaacgagcacugauugcagcugugagacaucauuuaaaaaaggugaacuaucagaaguuugacacacuccuggcagcauuucggcauuacgauaagaagggagauggaaugauugacaaagacgagcugcaagaggccugcgaccaagcuaaccugucccuugaugacaagcuccuggaccagcuuuuugauuauugcgacguggacaacgauggauuuaucaacuaccuggaauuugcaaacuuucugaacuggaaggauaaaaugcugcucaaagaauacgaagaacgcguuauuauaaaaggaaggaagcccgacugcgugaauccaacagaagcuaaugucgaagagccagagcagacucuacucauaaagcccgaggacaucguacuuaaggaggcuggaagcacagagaaaacacugagaacacuccuccgcccuagugauaaggugaguaacuacuacaaaacaacuagcucagagaucaacgcuaucguuggggcuauaccaucaacgugcuauccaauuugcggcgucccaacgaucagaagcgacaucccagcuccaagaauacgaagaauaagcgacagaaccaauuauggagaggaaggguccgccuacagccuucuguauccaacuaucuuugccaggaaagguguguuugaacgggauuucuuuaagaccaggucaaaagaggagauugcugagauacugugcaauaucggcgugaaguuauccgaugaagaguucgaaaacgucuggaaccucgcauccaagaaacaucauagaggagaagucuguguagagaauauccgcaacgugcucgacgaacuaagacaugccgaucggauuaaauguaagacuuuaauguag

SEQ ID NO: 239576 - protein, 311 aa, Artificial Sequence
  derived and/or modified sequence
MQTFTMVLEEIWTSLFMWFFYALIPCLLTDEVAILPAPQNLSVLSTNMKHLLMWSPVIAPGETVYYSVEYQGEYESLYTSHIWIPSSWCSLTEGPECDVTDDITATVPYNLRVRATLGSQTSAWSILKHPFNRNSTILTRPGMEITKDGFHLVIELEDLGPQFEFLVAYWRREPGAEEHVKMVRSGGIPVHLETMEPGAAYCVKAQTFVKAIGRYSAFSQTECVEVQGEAIPLVLALFAFVGFMLILVVVPLFVWKMGRLLQYSCCPVVVLPDTLKITNSPQKLISCRREEVDACATAVMSPEELLRAWIS

SEQ ID NO: 239577 - DNA, 936 bp, Artificial Sequence
  derived and/or modified sequence
atgcagaccttcaccatggtgctggaggagatctggaccagcctgttcatgtggttcttctacgccctgatcccctgcctgctgaccgacgaggtggccatcctgcccgccccccagaacctgagcgtgctgagcaccaacatgaagcacctgctgatgtggagccccgtgatcgcccccggcgagaccgtgtactacagcgtggagtaccagggcgagtacgagagcctgtacaccagccacatctggatccccagcagctggtgcagcctgaccgagggccccgagtgcgacgtgaccgacgacatcaccgccaccgtgccctacaacctgagagtgagagccaccctgggcagccagaccagcgcctggagcatcctgaagcaccccttcaacagaaacagcaccatcctgaccagacccggcatggagatcaccaaggacggcttccacctggtgatcgagctggaggacctgggcccccagttcgagttcctggtggcctactggagaagagagcccggcgccgaggagcacgtgaagatggtgagaagcggcggcatccccgtgcacctggagaccatggagcccggcgccgcctactgcgtgaaggcccagaccttcgtgaaggccatcggcagatacagcgccttcagccagaccgagtgcgtggaggtgcagggcgaggccatccccctggtgctggccctgttcgccttcgtgggcttcatgctgatcctggtggtggtgcccctgttcgtgtggaagatgggcagactgctgcagtacagctgctgccccgtggtggtgctgcccgacaccctgaagatcaccaacagcccccagaagctgatcagctgcagaagagaggaggtggacgcctgcgccaccgccgtgatgagccccgaggagctgctgagagcctggatcagctag

SEQ ID NO: 239578 - DNA, 936 bp, Artificial Sequence
  derived and/or modified sequence
atgcaaacttttactatggttctcgaagaaatatggacgagtctgtttatgtggtttttttacgctttgattccgtgtctgctgaccgacgaagtggccatcctgcctgctccccagaacctgagcgtcctgagcacgaatatgaaacatctgctcatgtggagccccgtaatcgcaccgggggaaacagtctattactctgtggagtaccagggagagtacgaaagcctctatacgagccatatttggattccctcctcatggtgtagcctcaccgaaggacccgaatgtgatgtgactgatgacattaccgccacagttccgtataacttacgcgtgcgcgccaccctggggtctcagacaagtgcctggtccatcctgaagcacccttttaaccgtaattctacgatcctgacacggcccgggatggaaataaccaaagatgggttccacctcgtcatcgagttggaagatctgggccctcagttcgaatttctcgtcgcttactggagaagagagcccggtgccgaagagcacgttaagatggtcaggtctggaggtatccctgtgcatctggaaacgatggaaccaggtgccgcgtactgcgtcaaggcgcagacattcgtgaaagccataggacgatactccgcattcagccagaccgagtgcgtggaggtacagggcgaggctattccgctggttctcgcgctgttcgccttcgtgggcttcatgttaatattggtcgtggttcccctgttcgtgtggaaaatgggaagactactgcaatactcctgctgcccagttgtcgtcctgcctgataccctgaaaataaccaactcacctcagaaactgatatcatgtagacgagaagaagtggatgcttgcgccaccgctgtgatgtcaccagaagagctcctccgcgcctggatctcgtag

SEQ ID NO: 239579 - DNA, 1884 bp, Artificial Sequence
  derived and/or modified sequence
cagacctcagctccaacatatgcattctgaagaaagatggctgagatggacagaatgctttattttggaaagaaacaatgttctaggtcaaactgagtctaccaaatgcagactttcacaatggttctagaagaaatctggacaagtcttttcatgtggtttttctacgcattgattccatgtttgctcacaggctggagtgcagtggtgcaatctcagcttactgcaacctccgccagtgaggcccttcattagacactaatttgaagctatggcattcccccactatgagcccacctgtcagccaggctatctgccttgatcctagatgaagtggccattctgcctgcccctcagaacctctctgtactctcaaccaacatgaagcatctcttgatgtggagcccagtgatcgcgcctggagaaacagtgtactattctgtcgaataccagggggagtacgagagcctgtacacgagccacatctggatccccagcagctggtgctcactcactgaaggtcctgagtgtgatgtcactgatgacatcacggccactgtgccatacaaccttcgtgtcagggccacattgggctcacagacctcagcctggagcatcctgaagcatccctttaatagaaactcaaccatccttacccgacctgggatggagatcaccaaagatggcttccacctggttattgagctggaggacctggggccccagtttgagttccttgtggcctactggaggagggagcctggtgccgaggagaggccattcccctggtactggccctgtttgcctttgttggcttcatgctgatccttgtggtcgtgccactgttcgtctggaaaatgggccggctgctccagtactcctgttgccccgtggtggtcctcccagacaccttgaaaataaccaattcaccccagaagttaatcagctgcagaagggaggaggtggatgcctgtgccacggctgtgatgtctcctgaggaactcctcagggcctggatctcataggtttgcggaagggcccaggtgaagccgagaacctggtctgcatgacatggaaaccatgaggggacaagttgtgtttctgttttccgccacggacaagggatgagagaagtaggaagagcctgttgtctacaagtctagaagcaaccatcagaggcagggtggtttgtctaacagaacactgactgaggcttaggggatgtgacctctagactgggggctgccacttgctggctgagcaaccctgggaaaagtgacttcatcccttcggtcctaagttttctcatctgtaatgggggaattacctacacacctgctaaacacacacacacagagtctctctctatatatacacacgtacacataaatacacccagcacttgcaaggctagagggaaactggtgacactctacagtctgactgattcagtgtttctggagagcaggacataaatgtatgatgagaatgatcaaggactctacacactgggtggcttggagagcccactttcccagaataatccttgagagaaaaggaatcatgggagcaatggtgttgagttcacttcaagcccaatgccggtgcagaggggaatggcttagcgagctctacagtaggtgacctggaggaaggtcacagccacactgaaaatgggatgtgcatgaacacggaggatccatgaactactgtaaagtgttgacagtgtgtgcacactgcagacagcaggtgaaatgtatgtgtgcaatgcgacgagaatgcagaagtcagtaacatgtgcatgtttgttgtgctccttttttctgttggtaaagtacagaattcagcaaataaaaagggccaccctggccaaaagcggtcttt

SEQ ID NO: 239580 - DNA, 2047 bp, Artificial Sequence
  derived and/or modified sequence
aaagttacattttctctggaactctcctaggccactccctgctgatgcaacatctgggtttgggcagaaaggagggtgcttcggagcccgccctttctgagcttcctgggccggctctagaacaattcaggcttcgctgcgactcagacctcagctccaacatatgcattctgaagaaagatggctgagatggacagaatgctttattttggaaagaaacaatgttctaggtcaaactgagtctaccaaatgcagactttcacaatggttctagaagaaatctggacaagtcttttcatgtggtttttctacgcattgattccatgtttgctcacagatgaagtggccattctgcctgcccctcagaacctctctgtactctcaaccaacatgaagcatctcttgatgtggagcccagtgatcgcgcctggagaaacagtgtactattctgtcgaataccagggggagtacgagagcctgtacacgagccacatctggatccccagcagctggtgctcactcactgaaggtcctgagtgtgatgtcactgatgacatcacggccactgtgccatacaaccttcgtgtcagggccacattgggctcacagacctcagcctggagcatcctgaagcatccctttaatagaaactcaaccatccttacccgacctgggatggagatcaccaaagatggcttccacctggttattgagctggaggacctggggccccagtttgagttccttgtggcctactggaggagggagcctggtgccgaggaacatgtcaaaatggtgaggagtgggggtattccagtgcacctagaaaccatggagccaggggctgcatactgtgtgaaggcccagacattcgtgaaggccattgggaggtacagcgccttcagccagacagaatgtgtggaggtgcaaggagaggccattcccctggtactggccctgtttgcctttgttggcttcatgctgatccttgtggtcgtgccactgttcgtctggaaaatgggccggctgctccagtactcctgttgccccgtggtggtcctcccagacaccttgaaaataaccaattcaccccagaagttaatcagctgcagaagggaggaggtggatgcctgtgccacggctgtgatgtctcctgaggaactcctcagggcctggatctcataggtttgcggaagggcccaggtgaagccgagaacctggtctgcatgacatggaaaccatgaggggacaagttgtgtttctgttttccgccacggacaagggatgagagaagtaggaagagcctgttgtctacaagtctagaagcaaccatcagaggcagggtggtttgtctaacagaacactgactgaggcttaggggatgtgacctctagactgggggctgccacttgctggctgagcaaccctgggaaaagtgacttcatcccttcggtcctaagttttctcatctgtaatgggggaattacctacacacctgctaaacacacacacacagagtctctctctatatatacacacgtacacataaatacacccagcacttgcaaggctagagggaaactggtgacactctacagtctgactgattcagtgtttctggagagcaggacataaatgtatgatgagaatgatcaaggactctacacactgggtggcttggagagcccactttcccagaataatccttgagagaaaaggaatcatgggagcaatggtgttgagttcacttcaagcccaatgccggtgcagaggggaatggcttagcgagctctacagtaggtgacctggaggaaggtcacagccacactgaaaatgggatgtgcatgaacacggaggatccatgaactactgtaaagtgttgacagtgtgtgcacactgcagacagcaggtgaaatgtatgtgtgcaatgcgacgagaatgcagaagtcagtaacatgtgcatgtttgttgtgctccttttttctgttggtaaagtacagaattcagcaaataaaaagggccaccctggccaaaagcggtctttaaa

SEQ ID NO: 239581 - DNA, 936 bp, Artificial Sequence
  derived and/or modified sequence
atgcagaccttcaccatggtgctggaggagatctggaccagcctcttcatgtggttcttctacgccctgatcccctgcctgctgacagatgaggtggccatcctgcctgccccccagaacctgtctgtgctgagcaccaacatgaagcacctgctgatgtggagccctgtgattgcccctggagaaacagtgtactacagcgtggagtaccagggcgagtatgagagcctgtacaccagccacatctggatccccagctcctggtgcagcctgacagagggcccagaatgtgatgtgacagatgacatcacagccaccgtgccctacaacctgcgggtgcgggccaccctgggcagccagaccagcgcctggagcatcctgaagcaccccttcaacagaaacagcaccatcctgaccaggcctggcatggagatcaccaaggatggcttccacctggtgattgagctggaggacctgggcccccagtttgagttcctggtggcctactggaggcgggagcccggggctgaggagcacgtgaagatggtgcgcagcggcggcatccctgtgcacctggagaccatggagcctggagctgcctactgtgtgaaggcccagacctttgtgaaggccatcggccgctacagcgccttcagccagacagaatgtgtggaggtgcagggcgaggccatccccctggtgctggccctgtttgcctttgtgggcttcatgctgatcctggtggtggtgcccctgtttgtgtggaagatgggccgcctgctgcagtacagctgctgccctgtggtggtgctgcctgacaccctgaagatcaccaacagcccccagaagctgatcagctgccggcgggaggaggtggatgcctgtgccacagctgtgatgagccctgaggagctgctgcgggcctggatctcctag

SEQ ID NO: 239582 - DNA, 936 bp, Artificial Sequence
  derived and/or modified sequence
atgcagaccttcaccatggtgctggaggagatctggaccagcctgttcatgtggttcttttacgcactcatcccatgcctgctgactgatgaggtggcaattctcccggccccgcaaaacctgtcggttttgtctacaaacatgaaacatctgctgatgtggagtccggtgatcgccccaggggagaccgtgtattacagcgtcgagtaccagggcgagtatgaaagcctctacaccagtcacatctggatcccttcaagttggtgtagcctgaccgaaggccccgagtgtgacgtcacagatgacatcactgcaacggtaccctataatctgcgggtgcgagctaccctgggaagccagacttctgcctggtctattttaaagcacccattcaatcggaacagcactatcctgacaagacccggaatggaaatcactaaggatggctttcacctggttattgagcttgaggacctcggacctcagtttgaatttctcgtcgcttactggaggagagagccaggggcggaagagcacgtgaaaatggtgaggtctggcgggatccctgtgcatttggagacaatggaaccaggagccgcctactgcgtcaaagcacaaacattcgtgaaagcaataggccgatactccgcctttagtcagacagagtgtgttgaggtccagggggaagctattcccctcgttctcgccctcttcgcctttgtggggtttatgctcattctggtggtggtccccctgtttgtctggaagatgggtagactcctacagtattcatgctgtcccgtggttgtcttaccggatacactgaagatcactaactcaccccaaaagctcatctcttgtcgcagggaggaagtggacgcctgtgctactgctgtgatgagtccggaagaattactccgtgcatggatttcttag

SEQ ID NO: 239583 - DNA, 936 bp, Artificial Sequence
  derived and/or modified sequence
atgcagacctttacaatggtgctggaagagatctggacatcactgttcatgtggtttttttatgccctgatcccttgcctgttaacagacgaagtggctatcttgcctgccccacagaaccttagtgtgctctccaccaatatgaaacaccttctgatgtggtcacccgttatcgcccctggagaaactgtatactactcagtggaataccagggcgagtatgaaagtctctacacatcacacatttggatccctagtagctggtgtagcctcacagagggaccagaatgcgatgtgacagatgatataaccgcaaccgtcccatacaatctgagggtgcgcgctaccctgggctcacaaacttctgcctggagcattctgaagcacccgtttaacagaaactctactatcctgaccagaccaggaatggagataacaaaggacggctttcacctggttatcgaactcgaggacctgggtccccaatttgaatttctcgtcgcatactggagacgggaacccggtgctgaggagcacgtcaaaatggttcgcagtgggggaatccccgtccacctggagacgatggaacctggcgcagcctattgcgtgaaagctcaaactttcgttaaggcaataggacggtattccgcattctcccagacagagtgcgtggaagtccagggtgaggccattcctctcgttctcgctttgttcgctttcgtgggatttatgctgatcctggtggttgttccgctttttgtgtggaaaatggggaggcttttacagtatagctgctgcccagtcgtcgtactgcctgacactcttaaaattacaaatagtccccagaagcttatcagttgtagacgagaagaagttgacgcatgtgcaaccgctgttatgtcccccgaagagctactgagggcttggatcagttag

SEQ ID NO: 239584 - protein, 222 aa, Artificial Sequence
  derived and/or modified sequence
MVKCCSAIGCASRCLPNSKLKGLTFHVFPTDENIKRKWVLAMKRLDVNAAGIWEPKKGDVLCSRHFKKTDFDRSAPNIKLKPGVIPSIFDSPYHLQGKREKLHCRKNFTLKTVPATNYNHHLVGASSCIEEFQSQFIFEHSYSVMDSPKKLKHKLDHVIGELEDTKESLRNVLDREKRFQKSLRKTIRELKDECLISQETANRLDTFCWDCCQESIEQDYIS

SEQ ID NO: 239585 - DNA, 669 bp, Artificial Sequence
  derived and/or modified sequence
atggtgaagtgctgcagcgccatcggctgcgccagcagatgcctgcccaacagcaagctgaagggcctgaccttccacgtgttccccaccgacgagaacatcaagagaaagtgggtgctggccatgaagagactggacgtgaacgccgccggcatctgggagcccaagaagggcgacgtgctgtgcagcagacacttcaagaagaccgacttcgacagaagcgcccccaacatcaagctgaagcccggcgtgatccccagcatcttcgacagcccctaccacctgcagggcaagagagagaagctgcactgcagaaagaacttcaccctgaagaccgtgcccgccaccaactacaaccaccacctggtgggcgccagcagctgcatcgaggagttccagagccagttcatcttcgagcacagctacagcgtgatggacagccccaagaagctgaagcacaagctggaccacgtgatcggcgagctggaggacaccaaggagagcctgagaaacgtgctggacagagagaagagattccagaagagcctgagaaagaccatcagagagctgaaggacgagtgcctgatcagccaggagaccgccaacagactggacaccttctgctgggactgctgccaggagagcatcgagcaggactacatcagctag

SEQ ID NO: 239586 - DNA, 669 bp, Artificial Sequence
  derived and/or modified sequence
atggttaagtgctgctctgcaattggctgcgccagtcgttgtttacccaactcaaaactgaaagggttgacctttcatgtgtttccaaccgacgaaaacataaagcgaaagtgggtattggccatgaagcggttggacgttaatgcagccgggatttgggaacctaaaaaaggtgacgtgttatgttcccgccattttaagaagacggactttgaccggtcagcccccaacataaagctcaaaccaggagtaataccctccatttttgattcaccttaccacctgcaaggcaagagagagaaactgcattgcaggaaaaacttcaccttaaagacagtcccagccacgaactacaaccaccacctcgtcggtgcttcctcgtgtatagaggagttccaaagtcagtttatctttgagcattcttactcggtcatggattctccaaaaaaactgaaacataagcttgaccatgtgatcggtgagctggaggacaccaaggaatcgttacgaaatgttctggatcgcgagaagagattccagaagtcattgaggaaaacaatcagagagcttaaagacgaatgcctaatcagccaagaaacagctaaccgactggataccttttgttgggattgttgccaggagagcattgaacaggattacatttcatag

SEQ ID NO: 239587 - DNA, 669 bp, Artificial Sequence
  derived and/or modified sequence
atggtcaaatgctgtagtgccattggctgtgcaagtcggtgcctgccgaattccaaactaaagggtctaacctttcacgtgttccctactgacgagaatatcaagcggaagtgggtccttgctatgaagagacttgacgtgaatgccgccgggatttgggagccaaagaaaggagatgtgctgtgctcgaggcactttaagaaaacggatttcgataggagtgctcctaatatcaagcttaaacccggtgtgatacccagcatctttgacagcccttaccacctacaagggaagcgcgaaaagcttcattgcaggaagaatttcaccttgaagactgtaccggctacgaactataaccaccacttagtcggggctagttcgtgcatcgaggagttccagtcacaatttatatttgagcattcctatagcgtcatggactcaccaaaaaaattgaagcacaagctcgatcatgtgatcggagaacttgaagataccaaggagagcctaagaaatgttctggacagggagaagcgctttcagaagtccctgcgaaagaccattcgcgagctaaaggatgagtgccttatctctcaagaaaccgcaaacagactagacacattttgctgggactgctgccaggagagtattgaacaggactacatttcctag

SEQ ID NO: 239588 - DNA, 669 bp, Artificial Sequence
  derived and/or modified sequence
atggtgaagtgctgcagcgccatcggctgtgccagccgctgcctgcccaacagcaagctgaagggcctgaccttccacgtgttccccacagatgagaacatcaagaggaagtgggtgctggccatgaagaggctggatgtgaatgctgctggcatctgggagcccaagaagggagatgtgctgtgcagccgccacttcaagaagacagactttgacagaagtgcccccaacatcaagctgaagccaggagtcatccccagcatctttgacagcccctaccacctgcagggcaagcgggagaagctgcactgcaggaagaacttcaccctgaagacagtgcctgccaccaactacaaccaccacctggtgggcgccagcagctgcatcgaggagttccagagccagttcatctttgagcacagctacagcgtgatggacagccccaagaagctgaagcacaagctggaccacgtgattggagagctggaggacaccaaggagagcctgagaaatgtgctggaccgggagaagcgcttccagaagagcctgaggaagaccatccgggagctgaaggatgaatgtctcatcagccaggagacagccaaccggctggacaccttctgctgggactgctgccaggagagcattgagcaggactacatctcctag

SEQ ID NO: 239589 - DNA, 669 bp, Artificial Sequence
  derived and/or modified sequence
atggtgaagtgctgcagcgccatcggctgcgccagccggtgcctgcccaatagtaagctaaaaggcttgacattccacgtgttcccaaccgacgaaaacatcaaaaggaaatgggtattggcaatgaaacgactggatgtcaatgccgccgggatctgggagccgaagaaaggcgacgtgctctgttctcgccattttaagaagaccgattttgacaggagcgccccgaacatcaaattgaagcccggagtgattcctagcatctttgactccccttatcatctgcaaggcaagcgggagaagctgcactgccgaaaaaattttacacttaaaactgtgccagctactaattataatcaccacctcgtgggcgcaagcagttgtatcgaagagtttcagtctcagttcatttttgagcactcctattcagtgatggacagccctaagaaactgaaacataaactggatcacgtgattggagaactggaggatactaaggagtctctccggaacgtgcttgaccgggagaagagattccagaaatccctgaggaagacaatcagagagttgaaagacgagtgtctcatatcgcaggagacagctaatagactggatactttctgctgggactgttgccaggagtccattgagcaggattacatctcgtag

SEQ ID NO: 239590 - DNA, 669 bp, Artificial Sequence
  derived and/or modified sequence
atggtgaagtgctgcagcgccatcggctgcgccagccggtgcctgcctaactcaaagcttaaagggctgacgttccacgtattccccacggatgagaacattaagcggaaatgggtgctggcaatgaagcgcctggatgttaatgcagccgggatatgggagccaaagaaaggagacgtgttatgtagcagacacttcaagaaaaccgatttcgaccgttcagcccccaacataaagctaaagcccggagtgattcccagtatttttgactcaccctatcacctgcagggcaaacgggaaaaactgcactgtaggaagaacttcaccctcaagaccgtcccagcaaccaactataatcaccacctcgttggggccagctcatgcattgaagagttccaatcacagtttatcttcgaacacagctattcagtaatggactccccaaaaaagttgaagcacaaactggatcatgtcataggcgagctggaagacactaaggagtccctgaggaacgtgttagacagagagaaacggtttcagaagagcctgcggaaaacgattagagagctgaaggacgagtgcctgatttctcaggagaccgctaaccgacttgacaccttctgctgggattgttgtcaggagtccatcgaacaggattacatctcgtag

SEQ ID NO: 239591 - DNA, 669 bp, Artificial Sequence
  derived and/or modified sequence
atggtcaagtgctgttcagccatcgggtgcgcgagtcggtgtctgcccaactccaagcttaagggactcacatttcacgtatttcccactgatgagaacatcaaacgcaagtgggtcctggctatgaaacgacttgacgtcaacgcagcgggtatttgggagcctaaaaaaggagacgttctgtgttcacgccattttaagaaaaccgactttgaccgttccgctcctaacatcaaattgaagccaggcgtgattccttccatttttgacagcccctatcatcttcaggggaagagagagaaactccactgccggaagaattttacattgaagactgtccccgctacaaattataaccaccatctggtgggcgcatcgtcgtgcatcgaagaattccagagtcagtttatatttgagcatagctatagcgtgatggactctcccaaaaagctgaagcacaagctggaccacgtgattggggagttggaagataccaaggaatcactcagaaacgtccttgatagagagaaacggtttcagaagtctcttcggaaaacgataagagagctgaaggatgaatgtttgatctctcaggagaccgccaatcgtctagatacattttgttgggactgttgtcaggagtccatcgagcaggactatatctcctag

SEQ ID NO: 239592 - DNA, 669 bp, Artificial Sequence
  derived and/or modified sequence
atggtgaaatgctgttctgccatcggttgtgccagccgatgcctacccaatagtaaactgaagggccttactttccatgtgttccctaccgacgagaatattaaaaggaaatgggtgctggccatgaagagactggacgtgaacgctgccggaatttgggagcctaagaagggagacgtgttatgctcaaggcattttaaaaaaaccgactttgatcggagcgcaccaaacattaagctgaagccaggcgtgattcctagtatctttgacagtccatatcacctccagggcaaacgcgaaaaattgcactgcaggaagaactttactctgaaaacagttcccgcaacaaattacaatcatcatcttgtgggagcttccagctgcattgaagagttccagagtcagttcatcttcgagcactcatatagtgttatggactcacccaaaaagttgaaacacaaactagaccacgtcatcggtgagctggaggatacaaaggagtctttgaggaatgtgctggacagggagaagcgcttccagaaatctctgcgcaaaacgattcgcgaactcaaagacgagtgcctaatctcccaggagaccgccaaccgcttggacaccttttgctgggattgctgtcaggagtctattgagcaagactacatttcatag

SEQ ID NO: 239593 - DNA, 3549 bp, Artificial Sequence
  derived and/or modified sequence
agacgcagtctccgtcgttgacgttagtcgcagtcttcgctgctaacgttttgttatgagttgctaaaatggtgaaatgctgctccgccattggatgtgcttctcgctgcttgccaaattcgaagttaaaaggactgacatttcacgtattccccacagatgaaaacatcaaaaggaaatgggtattagcaatgaaaagacttgatgtgaatgcagccggcatttgggagcctaaaaaaggagatgtgttgtgttcgaggcactttaagaagacagattttgacagaagtgctccaaatattaaactgaaacctggagtcataccttctatctttgattctccatatcacctacaggggaaaagagaaaaacttcattgtagaaaaaacttcaccctcaaaaccgttccagccactaactacaatcaccatcttgttggtgcttcctcatgtattgaagaattccaatcccagttcatttttgaacatagctacagtgtaatggacagtccaaagaaacttaagcataaattagatcatgtgatcggcgagctagaggatacaaaggaaagtctacggaatgttttagaccgagaaaaacgttttcagaaatcattgaggaagacaatcagggaattaaaggatgaatgtctgatcagccaagaaacagcaaatagactggacactttctgttgggactgttgtcaggagagcatagaacaggactatatttcatgaaataatttcatgttacgttccacctaaaattgtcattggtacaaatttttataaaatctcatttaccatcactaaataatatccatcatttaaagtgctgctttggattctctggagcattatgcattatagttgttatccaaagacttttttgaaaatatgcagaaatttgtggtaattatgtatttgtgtcttgtgacaattatgttttatagacctacactagtgccaggtcactattgtaagatgttaaaatctcaagaaaatttcacagagctaaagaaatgatgtcaaattagtcacattaagctatagtagaaggaattggacacttctccagatatttggcttcaaaggagtacctttacttacatgtgctttatggtaagtacattgaattttactttaaatgcattttactacaaagcacaattcatttgtaatgcatatccatcttggattcaatccaaggtgctttagctatcagtagtaccaaaggatctttttacaaggcttcctgtggtattgactctgagaataacacatagtgaagatctgtgggcttttaaaattgttcacagccaatttaagaagacccctcatgaagtctcagttttcagtacagtacatcattcctcctcactaggagcactttgatgtaaaccagaatagctttaaaaagacaaaaaggatcgtagatctgatttttaaatggttggttgctctgacagatctgaacactttgcttcatgactatttcgtcataaaggtatatgtttaaaatctgaatggcagtactagctctatacttttaatactgctttgtattttatatgtaaagtagtattgctgacattttaaaaaaatacaaaatacaaaagaaaccattagaaattaataactgtggctcttccagttgaaataggaattggagagaaaggattagaatattttaattaggggagtagattattgtccaaaggcttttatttagagaaacgggtaattaaaacagcagctttagaatagcttcttactgaatatgcaaaagaataattccttgttatttcctaattgatccaagtctcataaatttagcttttgtcataattccttaccgaaaacaactgaaattgagagtcataaatactgtgggttagaataaaaaccatttgccaaagcaacactctacttagaagcacatgtacatacatggacctcattcagaagtccatgttgtagcagttagaatttgagtatcagccatttcattgtagtaacaaaaattgaattgcattttgtgctcagttgtttattgtaattttatttttgttacattaatattagttaagatatggtcacttgaattttttgtatttaagaattttctgttttaatgcatgttatacttttatgtaggattccaaaccttccctctaaatgggatttaacccacatctgcgagatcagcgttatgctaagaggaaatcactgaggccatatctttttacaatctgaaaaaaaagtagtaaaaaggtagttaaaaaaaaaaaaggccgggtggtggctcatacctgtaatcctagcactttgggaggccaaggcaggcagatcacttgaggtcaggggttcaaaaccagcctggccaagatggtgaaaccccatctctgctaaaaatacaaaaaaaaattagccgggcatggtggcacgtgcctgtaatcccagctacttgggagactgaggcaggagaattgcttgaacccgggaggcggagattgcagtgagccaagatcacgccgttgcactccagcctgagcaacagagcaagactccatctcaaaaaaacaaaactactttcattaattacccattatttattttagttacttaattttgagttcataaatggccaccctaatggaaagtttgggtatgatcttaggttttatggagatgttttcaatagagattatttttccctcaccctatttgtgaatatataaattaaagtaagacaatggagtaagtaagagggtagatccaaacacagtatgtctaaattctagcactctactggctgcttagaatacaccaaacctggaagacctttccaagagtaaaatcccagtctgccactatcaaaattgccacagtcacttttactacttgtgttcatagtagactcagcacttctttttcactggacctagtataactgagaaataaataactgtgtgcaaaatattggtatcattaaggacccagagctgcccattttctctttgttctaatagggaagcaattactgatagaaatgtgagattaaaaatagggtcctccctgctgctccaaacaaatgcctaaacacagtatgtatctcagtcctctgttcccagagattccaccctagcccaggaaagaactggcctgtgtaaagcaaaacccaagtcatccccctccagaaatttctctggcagccaagcctgaccctaagggttccactttgctttaaaagctaggagtggcctctagagccaggaacacattaatacaacagttcaacctcagcaccaagtcaggtacgaagcgcttgatacgtggaatttttctctatatcaagtttaaatttctggaaatagactttggttgctaatgacaattacagttataccatagtctgtaatttgagaaaaggtgaaatgtatttaatatatatttagttttaataaaaagataaaattattacagaaataattgagagagagaaaatctattataatttatttgaaaaataaaacattttatccagtaa

SEQ ID NO: 239594 - DNA, 1161 bp, Artificial Sequence
  derived and/or modified sequence
ggtaataactcttaggttgcctgttttcccccaatcgctacccgcccaaatctcagggcgtagttcggcgcgaggttggcggcagcggcgcggagacgctggttggccccagaggaaaggacgctcactgggcgcatcgttacctgtgacgggtcctccctctctccctccggtggcggggagcctggagaaaggggcggagctcggcccgggccctgggctcagcgggtcccgcgcgctgctcttggacgccagggtgctcgctggcacctcgaagtgcttcttgcttcctccctttcccgtttacttgctgttctttcaaaatatgtactgacattcactattgccagtcaccagctaaaccgtgaggacaaaaagtaaggaaaaatagacacactccaccatgacctcatggaactaacaagactggtggaggaggaagacattaataagagcaatcactgcaataaatttttgttatgagttgctaaaatggtgaaatgctgctccgccattggatgtgcttctcgctgcttgccaaattcgaagttaaaaggactgacatttcacgtattccccacagatgaaaacatcaaaaggaaatgggtattagcaatgaaaagacttgatgtgaatgcagccggcatttgggagcctaaaaaaggagatgtgttgtgttcgaggcactttaagaagacagattttgacagaagtgctccaaatattaaactgaaacctggagtcataccttctatctttgattctccatatcacctacaggggaaaagagaaaaacttcattgtagaaaaaacttcaccctcaaaaccgttccagccactaactacaatcaccatcttgttggtgcttcctcatgtattgaagaattccaatcccagttcatttttgaacatagctacagtgtaatggacagtccaaagaaacttaagcataaattagatcatgtgatcggcgagctagaggatacaaaggaaagtctacggaatgttttagaccgagaaaaacgttttcagaaatcattgaggaagacaatcagggaattaaaggatgaatgtctgatcagccaagaaacagcaaatagactggacactttctgttgggactgttgtcaggagagcatagaacaggactatatttcatga

SEQ ID NO: 239595 - protein, 514 aa, Artificial Sequence
  derived and/or modified sequence
MSEILCQWLNKELKVSRTVSPKSFAKAFSSGYLLGEVLHKFELQDDFSEFLDSRVSSAKLNNFSRLEPTLNLLGVQFDQNVAHGIITEKPGVATKLLYQLYIALQKKKKSGLTGVEMQTMQRLTNLRLQNMKSDTFQERLRHMIPRQTDFNLMRITYRFQEKYKHVKEDLAHLHFEKLERFQKLKEEQRCFDIEKQYLNRRRQNEIMAKIQAAIIQIPKPASNRTLKALEAQKMMKKKKEAEDVADEIKKFEALIKKDLQAKESASKTSLDTAGQTTTDLLNTYSDDEYIKKIQKRLEEDAFAREQREKRRRKLLMDQLIAHEAQEEAYREEQLINRLMRQSQQERRIAVQLMHVRHEKEVLWQNRIFREKQHEERRLKDFQDALDREAALAKQAKIDFEEQFLKEKRFHDQIAVERAQARYEKHYSVCAEILDQIVDLSTKVADYRMLTNNLIPYKLMHDWKELFFNAKPIYEQASVKTLPANPSREQLTELEKRDLLDTNDYEEYKVPTDMK

SEQ ID NO: 239596 - DNA, 1545 bp, Artificial Sequence
  derived and/or modified sequence
atgagcgagatcctgtgccagtggctgaacaaggagctgaaggtgagcagaaccgtgagccccaagagcttcgccaaggccttcagcagcggctacctgctgggcgaggtgctgcacaagttcgagctgcaggacgacttcagcgagttcctggacagcagagtgagcagcgccaagctgaacaacttcagcagactggagcccaccctgaacctgctgggcgtgcagttcgaccagaacgtggcccacggcatcatcaccgagaagcccggcgtggccaccaagctgctgtaccagctgtacatcgccctgcagaagaagaagaagagcggcctgaccggcgtggagatgcagaccatgcagagactgaccaacctgagactgcagaacatgaagagcgacaccttccaggagagactgagacacatgatccccagacagaccgacttcaacctgatgagaatcacctacagattccaggagaagtacaagcacgtgaaggaggacctggcccacctgcacttcgagaagctggagagattccagaagctgaaggaggagcagagatgcttcgacatcgagaagcagtacctgaacagaagaagacagaacgagatcatggccaagatccaggccgccatcatccagatccccaagcccgccagcaacagaaccctgaaggccctggaggcccagaagatgatgaagaagaagaaggaggccgaggacgtggccgacgagatcaagaagttcgaggccctgatcaagaaggacctgcaggccaaggagagcgccagcaagaccagcctggacaccgccggccagaccaccaccgacctgctgaacacctacagcgacgacgagtacatcaagaagatccagaagagactggaggaggacgccttcgccagagagcagagagagaagagaagaagaaagctgctgatggaccagctgatcgcccacgaggcccaggaggaggcctacagagaggagcagctgatcaacagactgatgagacagagccagcaggagagaagaatcgccgtgcagctgatgcacgtgagacacgagaaggaggtgctgtggcagaacagaatcttcagagagaagcagcacgaggagagaagactgaaggacttccaggacgccctggacagagaggccgccctggccaagcaggccaagatcgacttcgaggagcagttcctgaaggagaagagattccacgaccagatcgccgtggagagagcccaggccagatacgagaagcactacagcgtgtgcgccgagatcctggaccagatcgtggacctgagcaccaaggtggccgactacagaatgctgaccaacaacctgatcccctacaagctgatgcacgactggaaggagctgttcttcaacgccaagcccatctacgagcaggccagcgtgaagaccctgcccgccaaccccagcagagagcagctgaccgagctggagaagagagacctgctggacaccaacgactacgaggagtacaaggtgcccaccgacatgaagtag

SEQ ID NO: 239597 - DNA, 1545 bp, Artificial Sequence
  derived and/or modified sequence
atgagtgagattctgtgccagtggcttaacaaggaactgaaagtaagtaggacagtcagtccaaaatcattcgcgaaggcattttccagcggctatcttctgggagaagtgcttcacaaattcgagctgcaagacgacttctcggagttcctggatagcagagtttcctcagcaaaacttaacaacttctctcggctcgagccaactctgaacctcctgggagtgcagtttgatcagaacgtggcccacggcattataaccgaaaagcccggcgtggccaccaagctcctgtatcaactgtacattgcgctgcagaagaagaagaaaagcggcttgaccggggtcgaaatgcagaccatgcaaaggctgaccaaccttaggctgcagaacatgaagagcgacaccttccaagagagactcagacacatgatccctcggcagacagatttcaacctgatgcgcattacataccgctttcaggaaaaatacaagcacgttaaggaggatctcgcacatttgcactttgaaaagttagaacgctttcagaagctgaaggaagaacaaaggtgtttcgacattgaaaaacagtacttgaatcgccggagacagaacgaaatcatggccaagatccaggcagctattatccagattcctaagccggcttctaaccgcacacttaaggccctagaggctcaaaaaatgatgaagaaaaaaaaagaagccgaggacgtcgccgacgaaattaaaaagttcgaggccctgattaagaaggatctccaggccaaagaatccgctagcaaaactagcctggacacagccggccagactactaccgaccttctgaacacttatagtgacgacgaatatattaaaaagatccagaaacgtctcgaggaggatgccttcgcccgggagcagagggaaaaaaggagacgtaagcttcttatggatcaattgattgcccacgaagctcaggaagaagcctaccgagaagagcagctcattaatcgactgatgagacagtctcagcaggagaggaggatagccgtgcagctgatgcacgtccggcatgagaaggaggtcctgtggcaaaatagaatcttccgggagaaacagcacgaagaacggaggctgaaggattttcaggatgcattagaccgagaagctgctttggcgaaacaagccaagattgatttcgaagaacagtttttaaaagaaaaaagatttcatgatcagatcgccgtggagcgagcccaggcaaggtacgagaagcactattccgtatgtgcggaaattttagatcagattgtggatttgagtacaaaggtagcagattatcggatgctcacaaataacttgatcccatacaagctgatgcacgattggaaagagctgtttttcaatgccaaacctatttacgagcaggcatctgtgaaaacgctcccggcaaatcctagcagagagcaacttactgagctcgagaaaagagatctcttggacacaaacgattacgaggagtacaaagtgcctaccgatatgaagtag

SEQ ID NO: 239598 - DNA, 1545 bp, Artificial Sequence
  derived and/or modified sequence
atgtctgagatcctgtgccagtggctgaacaaggagctgaaggtgtccaggacagtgagccccaagagctttgccaaggccttcagcagcggctacctgctgggggaggtgctgcacaagtttgagctgcaggatgacttcagcgagttcctggacagccgggtgtcctctgccaagctgaacaacttcagccggctggagcccaccctgaacctgctgggcgtgcagtttgaccagaatgtggcccacggcatcatcacagagaagccaggagtggccaccaagctgctgtaccagctgtacatcgccctgcagaagaagaagaagagcggcctgactggagtggagatgcagaccatgcagaggctgaccaacctgcggctgcagaacatgaagagtgacaccttccaggagcggctgcggcacatgatcccccggcagacagacttcaacctgatgaggatcacctaccgcttccaggagaagtacaagcacgtgaaggaggacctggcccacctgcactttgagaagctggagcgcttccagaagctgaaggaggagcagcgctgctttgatattgagaagcagtacctgaacagaagacggcagaatgagatcatggccaagatccaggccgccatcatccagatccccaagccagccagcaacagaaccctgaaggccctggaggcccagaagatgatgaagaagaagaaggaggccgaggatgtggctgatgagatcaagaagtttgaggccctgatcaagaaggacctgcaggccaaggagagcgccagcaagaccagcctggacacagctggccagaccaccacagacctgctgaacacctacagtgatgatgagtacatcaagaagatccagaagaggctggaggaggatgcctttgcccgggagcagcgggagaagagaagaaggaagctgctgatggaccagctgattgcccacgaggcccaggaggaggcctaccgggaggagcagctgatcaaccggctgatgaggcagagccagcaggagaggagaattgctgtgcagctgatgcacgtgagacatgagaaggaggtgctgtggcagaaccgcatcttccgggagaagcagcacgaggagcggcggctgaaggacttccaggatgccctggaccgggaggccgccctggccaagcaggccaagattgactttgaggagcagttcctgaaggagaagcgcttccatgaccagattgctgtggagcgggcccaggcccgctatgagaagcactacagcgtgtgtgccgagatcctggaccagatcgtggacctgagcaccaaggtggccgactacaggatgctgaccaacaacctgatcccctacaagctgatgcatgactggaaggagctgttcttcaatgccaagcccatctatgagcaggcctctgtgaagaccctgcctgccaaccccagccgggagcagctgacagagctggagaagagggacctgctggacaccaatgactatgaggagtacaaggtgcccacagacatgaagtag

SEQ ID NO: 239599 - DNA, 1545 bp, Artificial Sequence
  derived and/or modified sequence
atgagcgagatcctgtgccagtggctgaacaaggagctgaaggtgtcccgcactgtatcacccaaaagcttcgctaaggcattctcttctggatacttgctgggtgaagttctgcataaatttgagctacaggatgactttagtgagtttttggattccagagtgagcagtgccaaactaaataacttcagtcggctagagccgactctgaacctgcttggcgtccagtttgaccagaacgtggctcatgggataattactgaaaagcctggcgtggctaccaaactgctctatcagctttacattgccctgcagaagaagaaaaagtcagggctgactggagtcgagatgcagaccatgcagagactcactaaccttcgcctccagaacatgaagtccgatacgtttcaagagcgcctgcggcacatgatccccagacagactgatttcaacttgatgcgaattacctaccgcttccaggagaaatacaagcacgtaaaagaggacctcgcccacttacactttgaaaaattggagaggttccagaaactgaaagaagaacagcgatgtttcgatattgaaaaacaatacttgaaccgaaggcgccagaacgaaatcatggccaagattcaggccgctatcattcaaatacccaaacccgcatccaaccgtacactgaaagctctggaagctcagaagatgatgaaaaaaaaaaaggaagccgaggacgtggcggatgagattaaaaagtttgaagccctcattaaaaaagacctgcaggccaaggagagtgcctctaagactagcctcgatacggccggccaaacgacgactgatctccttaatacttacagtgacgatgaatacataaaaaaaatccaaaagaggttggaagaggatgcatttgctcgggagcagagagagaaacggagaagaaaactgctgatggaccaactgatcgcccacgaggcccaggaagaggcatatcgggaggagcagctgatcaatcggcttatgcgtcaatcccagcaggaacgccgtattgcggtacagctgatgcatgtgcggcatgagaaggaagtattgtggcagaaccggatcttcagagaaaagcagcacgaagagcgccgcctgaaggattttcaggacgccctggatcgtgaagcagccctcgcgaagcaagccaagatcgatttcgaagagcaattccttaaggaaaagcggttccacgaccagatcgccgtggaaagggcacaagcaagatatgagaagcactattccgtctgtgctgaaattctggaccagatagtagatctgtccacaaaggtggcggactaccggatgttaactaataatctcattccgtacaagctgatgcatgattggaaagagctgttctttaacgcgaaaccaatttatgagcaggcctcggtgaaaaccctgcccgctaatcctagccgggagcagctgacagagctggagaaacgcgatttactcgacacaaacgactacgaggagtacaaggtgcccacggacatgaaatag

SEQ ID NO: 239600 - DNA, 1545 bp, Artificial Sequence
  derived and/or modified sequence
atgtccgagattctctgtcaatggctgaataaagagcttaaggtgtctagaactgtgagcccaaaatcctttgcaaaggcgttttctagtggatatctgctcggagaagtcctgcacaaatttgaactacaggacgatttcagcgaatttctggattctagagtgtcttccgccaagcttaataattttagccgtctcgagcctactctgaatctgctgggagtgcagttcgatcagaatgtcgcccacggcatcattactgaaaagcctggtgttgcaaccaaactgctgtatcagttatatatagccttgcagaagaagaagaaatcaggcctgaccggcgtagaaatgcagaccatgcagcggctaacaaatttgcggttgcaaaatatgaaaagtgacacctttcaagaacgcctaaggcacatgatccctcgccagactgatttcaacctgatgcggataacatatcggtttcaggaaaaatacaaacacgtgaaagaagatctggctcacttacactttgaaaagctcgaacgttttcagaagttgaaggaagaacagaggtgctttgatattgagaagcagtatctcaacagaagaaggcagaacgagatcatggccaagatccaggctgctatcattcaaattccgaagccagcgtcaaacagaactctcaaggccctcgaggcccaaaagatgatgaaaaagaagaaggaggccgaggacgttgcagacgagatcaagaagttcgaagccttgatcaagaaagaccttcaggctaaggagagcgcgtccaagacaagtctggataccgccggacagaccaccaccgacctcctaaacacctacagcgacgacgaatacattaaaaagattcagaagcgcctggaggaagatgcctttgcccgagaacaacgcgagaaacggcgaaggaaactgctgatggatcagctgattgcgcacgaggcacaggaggaggcgtatcgcgaggagcagctcattaatcgtctcatgaggcaatctcagcaggagagacgcattgcagtccagctgatgcatgtcagacatgagaaggaggtcctgtggcagaataggatattcagagaaaaacagcatgaggagcggcgactgaaagacttccaggacgctttggaccgggaggctgcactggcaaaacaggcaaaaattgactttgaagagcagtttctcaaggagaaacgattccatgaccagattgccgtggagagagctcaggccagatacgagaaacactactcggtgtgtgctgagattctggaccaaatcgtcgacctcagcactaaagtcgcagattataggatgctgaccaacaatctgatcccatacaaactgatgcatgattggaaggaactcttttttaacgccaaacccatttatgaacaggcctccgtcaagacattacccgcaaacccgtccagggagcagctgactgagttggaaaagcgggacctcctcgacacgaacgattacgaggaatataaggtgccgacagatatgaaatag

SEQ ID NO: 239601 - DNA, 3026 bp, Artificial Sequence
  derived and/or modified sequence
gtcccctcttctctaaggcctttcgcctagttccagcctggatacgcttccatagcaaagggttgcccttggctacaggaggacgcgggctggcaggcttggttcctggcgagtttctaagcccccgcctgcggtctgaggcaccggctgaaccatgtcggagatcctgtgccagtggctcaacaaggagttgaaggtgtcccggaccgtgagtcccaagtcatttgcaaaggcattttccagtggctatctacttggagaagttctacacaagtttgaacttcaggatgatttttcagaatttttggacagcagggtttcaagtgccaaacttaataatttttctcgcttggagccaacacttaaccttctgggtgtgcagtttgatcagaatgtggcccatggcatcatcacagaaaagcctggggtggcaacaaagctgttatatcaattgtacattgctcttcagaaaaagaagaaaagtggactgactggagtggagatgcaaaccatgcaacgtctgacaaatttaagacttcaaaacatgaaaagtgatacttttcaagagagacttagacacatgataccacgtcaaactgatttcaatctgatgcggattacatacaggtttcaagaaaaatataaacacgtgaaagaagatcttgcccatttgcattttgagaaacttgaaagatttcaaaaactcaaggaagagcaaagatgttttgatattgaaaagcaatacttaaacagaagacgacaaaatgaaataatggccaaaatccaagcagctattatacagattcctaaacctgcatcaaatcgtactttgaaagcactcgaggcccaaaaaatgatgaaaaagaaaaaagaggcagaagatgtggctgatgaaattaagaagttcgaagcattaataaaaaaggatctccaagcaaaagaaagtgcatccaagacttctttagatacagcaggccagacaaccaccgatttgttaaatacttactcagatgacgagtacattaaaaaaatccagaagcgccttgaagaagatgcttttgcacgagagcaaagggagaaaagacggcggaaattgttaatggaccagttaatagcccacgaagcacaagaggaggcttatcgggaggaacagctgattaaccggctgatgcggcagtcccagcaggagcgcaggattgccgtgcagctcatgcatgttcggcatgaaaaggaagttttatggcaaaacagaattttcagagaaaaacaacatgaggaaagacgacttaaagatttccaggatgctcttgatcgagaagcggctttggcaaaacaagccaagattgactttgaagaacaattccttaaagaaaagagatttcatgatcagattgctgtggaaagagctcaagctcgttatgaaaagcattattcagtatgtgcagaaattttggatcaaatagttgatttgtccactaaagtggcagactatcgaatgttgacaaataatctgattccgtataagttgatgcatgattggaaggaactattttttaatgcaaaacccatatatgaacaagcctctgttaagacactacctgctaacccctcaagagaacaacttacagaactggagaaaagggacttgctagataccaatgattatgaagaatataaggtacctactgatatgaaataattagaatgctacataataaatcctttttctttaacattaattttgtgatattccttatttcatttctactaataaaaatagacatgttttgtttgcattttcccttgttttaatttgtatgtttgtactactttttagatgcttaaactatacataagctattatctattgttcctagtaatcttaggggagtggtctgaaaaaacatcaagcatagtaattgtctgggtagacagatttcagaatttttaaaatgctttaatttatttattagcatttttctttgtatgggctgtgtacttttgcttcaaaaaccattgttaaaaagtatttcttttgtaatcaatctaaataatagactttttttacaggcaaaatgaaagaggaggaagtctgggttttatgaatagcatagattcaaacaatcttttattcaaagattgaaataaaaagtatcgggtgccaactgtgatttttagaagaactgttgtaaagcctttgagattagacagactagagctacattactgaaattgccaactactaactgtgtgaccttaggtgaccagttcattaagggctaatagatttccatttttcaattaatggaaagggaatgctactatacctacttcatttaaaataacatgagttaaacacttagctgagtgcacttcatgttggatgcatataatacatatccatttctttcctcaccatcctactctccccatcccactccatctcacccttagaagtaaaggtgtaacaatcatagcttttggatagaaattttgagtggatcaacagcaatggaatgaggagtgaggctttttattagaaaaattacaaaatgagtcccggaaggtcagtaagtgcaacatgaaaaaaatctatgaaaagattatttgacctaattattcactgatagtacatactcaacaaaggtttgtgggacaaagggtgaataaaatgaatgaattacaatgaacaaagaaaagtgcaaaataacactaacaagtaaatattacaagaagataaccttgtggttaaaagataaggaaaaatatgagattatgagaaattaaatgtatactatattttaattaaatgaatctgtatttgtagcactaagagaattattattaaggattgactagaaccttaaaagatatatgtggatgtttgttttgtacggttgtaaaatatactagacctattacatccacctaaagtataatgccatgtaagaaaatgctttgacagtatcaacctgtgttaaggtatttctttccattgtaaattaaaagtcattttatttgacaga

SEQ ID NO: 239602 - protein, 215 aa, Artificial Sequence
  derived and/or modified sequence
MYGKSSTRAVLLLLGIQLTALWPIAAVEIYTSRVLEAVNGTDARLKCTFSSFAPVGDALTVTWNFRPLDGGPEQFVFYYHIDPFQPMSGRFKDRVSWDGNPERYDASILLWKLQFDDNGTYTCQVKNPPDVDGVIGEIRLSVVHTVRFSEIHFLALAIGSACALMIIIVIVVVLFQHYRKKRWAERAHKVVEIKSKEEERLNQEKKVSVYLEDTD

SEQ ID NO: 239603 - DNA, 648 bp, Artificial Sequence
  derived and/or modified sequence
atgtatgggaagtcctcaaccagagcagttctgctcctcctcggcatccagctgaccgcactatggccaatagcagccgtggagatttatactagtcgggtgctggaggcggttaatgggaccgatgcccgattgaagtgcacgttttcttcgttcgcaccagttggtgacgccctgactgtgacctggaattttcggcccctggatggtggacccgaacagtttgtgttttattaccacatcgatcctttccagcctatgagtggccgattcaaggatagggtatcttgggacggtaatccagagagatacgacgccagcatattactgtggaagctccagtttgacgacaacgggacctacacgtgccaggttaagaaccctccagatgtcgacggcgtgattggggaaataaggttgtctgtggtccatacagtgcgcttctcggagatccattttctagctctagcaattgggtccgcttgtgctctgatgattatcattgtcatagtggtcgttctcttccagcactacaggaaaaagcggtgggccgagcgcgcccataaggtcgtcgagattaagagcaaggaggaggagagattgaaccaagaaaaaaaagtaagtgtatatctggaagacactgactag

SEQ ID NO: 239604 - DNA, 648 bp, Artificial Sequence
  derived and/or modified sequence
atgtatgggaagtcatccactcgggcagtgctcctgctgctgggaattcagttgaccgccctgtggcctattgccgccgttgagatttataccagcagagtgctagaggctgtgaacggcaccgatgcaaggttgaagtgtaccttttcatcatttgcccctgtcggggatgctttgacagtcacctggaacttcaggccgttggacggcgggcctgagcagtttgtcttctattatcatatagatccgtttcagccaatgtctggtcggttcaaggatagagtgagttgggatggcaatccagagcggtatgatgcatccattttactgtggaaactgcagttcgacgacaatggcacctacacctgtcaggtgaagaatccgcctgatgtggatggcgtgattggagagataagattgtccgtcgtgcacaccgtgcgcttctctgaaatacactttctggctctggcgataggctcggcatgtgcactaatgataatcatcgtgattgtcgtggtgctgttccagcactaccgcaagaaacgctgggctgagagagctcacaaggtggtggagattaaatccaaagaagaagagcgcctgaaccaagaaaagaaggtttctgtctacctagaggacacagattag

SEQ ID NO: 239605 - DNA, 648 bp, Artificial Sequence
  derived and/or modified sequence
atgtatggcaagagcagcaccagggctgtgctgctgctgctgggcatccagctgacagccctgtggcccatcgctgctgtggagatctacaccagccgggtgctggaggccgtgaatggaacagatgcccggctgaagtgcaccttcagcagctttgcccctgtgggagatgccctgactgtgacctggaacttccggcccctggatggcggccctgagcagtttgtgttctactaccacatcgaccccttccagcccatgagcggccgcttcaaggacagagtgtcctgggatggcaaccctgagagatatgatgccagcatcctgctgtggaagctgcagtttgatgacaatggcacctacacctgccaggtgaagaaccccccagatgtggatggagtgattggagagatccggctgtctgtggtgcacacagtgcgcttcagcgagatccacttcctggccctggccatcggcagcgcctgtgccctgatgatcatcatcgtcatcgtggtggtgctcttccagcactacaggaagaagcgctgggccgagcgggcccacaaggtggtggagatcaagagcaaggaggaggagcggctgaaccaggagaagaaggtgtctgtgtacctggaggacacagactag

SEQ ID NO: 239606 - DNA, 2620 bp, Artificial Sequence
  derived and/or modified sequence
gaggaactcaactcaaactcctctctctgggaaaacgcggtgcttgctcctcccggagtggccttggcagggtgttggagccctcggtctgccccgtccggtctctggggccaaggctgggtttccctcatgtatggcaagagctctactcgtgcggtgcttcttctccttggcatacagctcacagctctttggcctatagcagctgtggaaatttatacctcccgggtgctggaggctgttaatgggacagatgctcggttaaaatgcactttctccagctttgcccctgtgggtgatgctctaacagtgacctggaattttcgtcctctagacgggggacctgagcagtttgtattctactaccacatagatcccttccaacccatgagtgggcggtttaaggaccgggtgtcttgggatgggaatcctgagcggtacgatgcctccatccttctctggaaactgcagttcgacgacaatgggacatacacctgccaggtgaagaacccacctgatgttgatggggtgataggggagatccggctcagcgtcgtgcacactgtacgcttctctgagatccacttcctggctctggccattggctctgcctgtgcactgatgatcataatagtaattgtagtggtcctcttccagcattaccggaaaaagcgatgggccgaaagagctcataaagtggtggagataaaatcaaaagaagaggaaaggctcaaccaagagaaaaaggtctctgtttatttagaagacacagactaacaattttagatggaagctgagatgatttccaagaacaagaaccctagtatttcttgaagttaatggaaacttttctttggcttttccagttgtgacccgttttccaaccagttctgcagcatattagattctagacaagcaacacccctctggagccagcacagtgctcctccatatcaccagtcatacacagcctcattattaaggtcttatttaatttcagagtgtaaattttttcaagtgctcattaggttttataaacaagaagctacatttttgcccttaagacactacttacagtgttatgacttgtatacacatatattggtatcaaaagggataaaagccaatttgtctgttacatttcctttcacgtatttcttttagcagcacttctgctactaaagttaatgtgtttactctctttccttcccacattctcaattaaaaggtgagctaagcctcctcggtgtttctgattaacagtaaatcctaaattcaaactgttaaatgacatttttatttttatgtctctccttaactatgagacacatcttgttttactgaatttctttcaatattccaggtgatagatttttgttgttttgttaattaatccaagatttacaatagcacaacgctaaatcacacagtaactacaaaaggttacatagatatgaaaagattggcagaggccattgcaggatgaatcacttgtcacttttcttctgtgctgggaaaaataatcaacaatgtgggtctttcatgagcagtgacggatagtttagcttactatgtttcccccccaattcaatgatctataacaacagagcaaagtctatgctcatttgcagactggaatcattaagtaatttaataaaaaaattgtgaaacagcatattacaagtttgaaaattcagggctggtgaaaaaaatcaactctaaatgatgataattttgtacagttttatataaaactctgagaactagaagaaattattaactttttttcttttttaattctaattcacttgtttattttgggggaggaagactttggtatggagcaaagaaataccaaaactactttaaatggaataaaaccaactttattctttttttcccccatactggtagataaagcaaactttataagtgggctattgaaagaaaagttacaagcttaagatacagaagcatttgttcaaaggatagaaagcatctaaaagtttaggctcaagatcaatctttacagattgatattttcagtttttaatcgactggactgcagatgttttttcttttaacaaactggaattttcaaacagattatctgtatttaaatgtatagaccttgatatttttccaatactattttttaaaaaattgtatgatttacatatgaacctcagttctgaaattcattacatatctgtctcattctgccttttatactgtctaaaaaagcaaagttttaaagtgcaattttaaaactgtaaattacatctgaaggctatatatcctttaatcacattttatattttttcttcacaattctaacctttgaaaatattataactggatatttcttcaaacagatgtcctggatgatggtccataagaataatgaagaagtagttaaaaatgtatggacagtttttccggcaaaatttgtagcttatgtcttggctaaatagtcaaggggtaatatgggcctgttgtttagtgtctccttcctaaagagcacttttgtattgtaatttattttttattatgctttaaacactatgtaaataaacctttagtaataaagaattatcagttatataatttgtgtatatac

SEQ ID NO: 239607 - DNA, 1370 bp, Artificial Sequence
  derived and/or modified sequence
aacagtctgggacatttcagactggcaccacctcctctggctgtttccgaggccatctagaggccagagcccagtcagattaactgaaagtaaagagaggactgcgggagtttgggacctttgtgcagacgtgctcatgctcgttcgtgtagagggcgggagagaggaaaggaaggagggcattgggagctgaggccccacctttcatttcagaaaagtgcacaggcagagcgggctgagtcacaggcacaggtgaggaactcaactcaaactcctctctctgggaaaacgcggtgcttgctcctcccggagtggccttggcagggtgttggagccctcggtctgccccgtccggtctctggggccaaggctgggtttccctcatgtatggcaagagctctactcgtgcggtgcttcttctccttggcatacagctcacagctctttggcctatagcagctgtggaaatttatacctcccgggtgctggaggctgttaatgggacagatgctcggttaaaatgcactttctccagctttgcccctgtgggtgatgctctaacagtgacctggaattttcgtcctctagacgggggacctgagcagtttgtattctactaccacatagatcccttccaacccatgagtgggcggtttaaggaccgggtgtcttgggatgggaatcctgagcggtacgatgcctccatccttctctggaaactgcagttcgacgacaatgggacatacacctgccaggtgaagaacccacctgatgttgatggggtgataggggagatccggctcagcgtcgtgcacactgtacgcttctctgagatccacttcctggctctggccattggctctgcctgtgcactgatgatcataatagtaattgtagtggtcctcttccagcattaccggaaaaagcgatgggccgaaagagctcataaagtggtggagataaaatcaaaagaagaggaaaggctcaaccaagagaaaaaggtctctgtttatttagaagacacagactaacaattttagatggtaaggttcacaaataggttgatttctttcttcagctttctgacatgtccagcccatctctaatgaggactcccagatcatcactttatggctgttaggtgtttcccatatgaaattagaggagctgggtcagggagacaaaagtcttctattagtcttatggatagctcctccttgagtgtattttgtgcaaaagattaagaagctggactctactgccattaaagctgagagaatcctaaggttatttgtggcttcggggttatatttattactactactactaataaatattcaacaagtaaataaatcttttttaaatcaaaa

SEQ ID NO: 239608 - DNA, 648 bp, Artificial Sequence
  derived and/or modified sequence
atgtacggcaagagcagcacccgggccgtgctgctgctgctgggcatccagctcactgcgctttggcctattgcagcggtcgaaatctacacatccagggtcctcgaggctgttaacggaactgacgccagactgaagtgtacattctcctctttcgcacctgtgggtgacgcccttacagtgacttggaatttcagacctcttgatggtggacctgaacagttcgtattctattaccacatagacccattccagccaatgagtggacggtttaaagacagagtcagctgggacggaaatcctgagcggtacgatgcctctattctactgtggaaactacagtttgacgataatggcacttatacgtgtcaggttaaaaatcctccggatgtggatggtgtgatcggcgaaatcaggctgtcagtggtccataccgtccgtttctccgagatccacttcctggccctggccattggatctgcttgcgccctcatgataattatcgttatagttgtggttctgtttcagcattacagaaagaaacggtgggcagaacgcgctcacaaagttgttgaaataaagtccaaggaagaggaacgcttgaaccaggaaaagaaagtttctgtctacctcgaggacaccgactag

SEQ ID NO: 239609 - DNA, 648 bp, Artificial Sequence
  derived and/or modified sequence
atgtacggcaagagcagcacccgggccgtgctgctgctgctgggcattcagctaacagctctatggcccatagccgcagtggagatctatacaagcagagtcctcgaggccgttaacgggaccgacgcgcgcctcaaatgtacttttagttcatttgctccagtgggcgacgccctgactgtcacctggaatttcagacctcttgacgggggcccagaacagtttgtgttttattatcatattgatccattccagcctatgtccggaagattcaaggaccgagtgagttgggacggaaatccagagagatatgacgcctccatcttgctctggaaactgcagttcgatgataacggtacctatacctgccaggtcaaaaacccccccgatgtggacggggtgattggggagatccgactgagcgtggtacatactgtaaggtttagtgagatccactttctcgctcttgctatcggctctgcttgcgccctgatgatcattattgttatcgttgtggtgctctttcagcactatcgcaagaagaggtgggctgaacgcgcccataaagtagttgagatcaagagcaaggaggaggagcggctgaatcaagagaagaaagtgagcgtatatctggaagacaccgactag

SEQ ID NO: 239610 - DNA, 648 bp, Artificial Sequence
  derived and/or modified sequence
atgtacggcaaaagcagcacgcgcgctgtgctattgctgttgggaatacaactgaccgccctgtggccgattgcagctgtggagatctacacctccagggtgctggaggcagtgaacggaactgatgcccgtcttaaatgcacctttagcagcttcgctcctgtgggcgacgctctgaccgttacatggaacttcaggccactggatggcggaccagagcagtttgtgttctactaccacattgaccctttccagcctatgtccggcagatttaaggatcgggtgagttgggacgggaaccctgagaggtacgatgcctccatcctgctatggaagctccagtttgatgacaacggaacctacacctgtcaggttaagaatcctccagatgttgacggagtcattggtgagatacgcctgtctgttgtccacaccgttcgtttcagtgaaatccactttcttgcattggcaattggaagtgcttgtgccctcatgattataatcgtaatagtggtggttctcttccagcactaccggaagaaaaggtgggcagagagggcccacaaggtagtggagatcaaaagcaaagaagaagagagacttaaccaggaaaaaaaggtgagtgtgtacctcgaagacactgattag

SEQ ID NO: 239611 - DNA, 648 bp, Artificial Sequence
  derived and/or modified sequence
atgtacggaaagtcctcaacgcgggctgttctgctcctgctgggtatacagctgacagccctatggcctatcgctgcggtggagatttataccagtcgagtgttggaggctgtcaacggcacggatgccagacttaaatgtaccttcagctccttcgctcccgtgggagatgcactcactgtgacatggaatttccgcccactggatggcggtccagagcagttcgtgttttactaccacattgatccgtttcagccaatgagcggaaggttcaaggaccgggtctcatgggatggcaatcctgagagatatgatgcttctatcctgctgtggaaattgcaatttgacgataatgggacctacacctgtcaggtgaagaacccacccgacgtggatggcgtaatcggtgagattcggctctcggtggtgcatacggtcaggtttagcgaaatccactttctggctttagccatcggctcagcttgtgccctaatgattatcattgtcattgtggtcgtgctgttccagcactatcggaaaaagaggtgggctgaacgcgctcacaaggtcgtggagatcaagagtaaggaggaagagaggcttaaccaggagaagaaagttagtgtgtatcttgaagacaccgattag

SEQ ID NO: 239612 - DNA, 648 bp, Artificial Sequence
  derived and/or modified sequence
atgtacggcaagagcagcaccagagccgtgctgctgctgctgggcatccagctgaccgccctgtggcccatcgccgccgtggagatctacaccagcagagtgctggaggccgtgaacggcaccgacgccagactgaagtgcaccttcagcagcttcgcccccgtgggcgacgccctgaccgtgacctggaacttcagacccctggacggcggccccgagcagttcgtgttctactaccacatcgaccccttccagcccatgagcggcagattcaaggacagagtgagctgggacggcaaccccgagagatacgacgccagcatcctgctgtggaagctgcagttcgacgacaacggcacctacacctgccaggtgaagaacccccccgacgtggacggcgtgatcggcgagatcagactgagcgtggtgcacaccgtgagattcagcgagatccacttcctggccctggccatcggcagcgcctgcgccctgatgatcatcatcgtgatcgtggtggtgctgttccagcactacagaaagaagagatgggccgagagagcccacaaggtggtggagatcaagagcaaggaggaggagagactgaaccaggagaagaaggtgagcgtgtacctggaggacaccgactag

SEQ ID NO: 239613 - protein, 283 aa, Artificial Sequence
  derived and/or modified sequence
MSSFDLPAPSPPRCSPQFPSIGQEPPEMNLYYENFFHPQGVPSPQRPSFEGGGEYGATPNPYLWFNGPTMTPPPYLPGPNASPFLPQAYGVQRPLLPSVSGLGGSDLGWLPIPSQEELMKLVRPPYSYSALIAMAIHGAPDKRLTLSQIYQYVADNFPFYNKSKAGWQNSIRHNLSLNDCFKKVPRDEDDPAYVSGGSPTSHPLVTPGLSPEPSDKTGQNSLTFNSFSPLTNLSNHSGGGDWANPMPTNMLSYGGSVLSQFSPHFYNSVNTSGVLYPREGTEV

SEQ ID NO: 239614 - DNA, 2009 bp, Artificial Sequence
  derived and/or modified sequence
gggtgcaggtgccaggcaggtggctccggccagcccagccccagcatgagctccttcgacctgccggcgccctccccacctcgctgcagcccccagttccccagcatcggccaggagccccccgagatgaacctctactatgagaacttcttccacccacagggcgtgcccagccctcagcggccctccttcgaggggggcggcgagtatggggccacccccaacccctacctctggttcaacgggcccaccatgaccccgccaccctacctgcccggccccaacgccagccccttcctgccccaggcctatggagtgcagaggccgctgctgcccagcgtgtcggggcttggggggagcgacctgggctggctgcccatcccctcgcaggaggagctgatgaagctggtgcggccaccctattcctactcggctctcatcgccatggccatccacggggcacccgacaagcgcctcactctcagccagatctaccagtacgtggccgacaacttccccttctacaacaagagcaaggccggctggcagaactccatccgccacaacctgtcgctcaacgactgcttcaagaaggtgccccgcgacgaggacgacccggcctatgtgagcggggggagccccacgagccaccccttggtcacaccaggactgagccctgagcccagtgacaagacggggcagaactcactgaccttcaactccttctccccgctcaccaacctcagcaaccacagcggtgggggtgactgggcgaaccccatgcccaccaacatgctcagctatggaggatctgtgctcagccaattcagccctcacttctacaacagtgtcaacaccagtggtgtcctctaccccagggagggcaccgaggtctaggtacagaacagctcctgagccaggtggacatgccagagagaaaagcagtagaggtcctccatgccagccccacggtggtccatgactgcggaactgcccagacataagcaggagcctccgaggaatccaccctctttctagaacactggttaaggcttctgtttatcacacataggcccacacacagactcaccaactttgcaatagaaatactggtgcctgcagagcagcactaacagtggcaggtgctgtactaggctctgtactggccacacttactattgacagtcaccccgtaaggttcacaaaccaccccattgaacagatgaggaactgaggctcaaggaggttaagtaacatttccagggttatataaactagtaaatggcagagctaagagtcaaatccaggtctatgtgatcctcagagattggaggccgggatggagaattggttgagtagccaaggaaggtcagtgtgaaaagcttgctatggcaaatatagcgaaatctctccactgccttctgtccaccaacatttagtgccagcctaggcacaacttgtcctggtccaagtccttattctgcttgccccaacttacctgcagacactccttttgctaccactcaaggaaggaagtcaccagtggccttagtgcaggaaactcagccctggtggccctgcagaacaatgcatctgacatgtgcgatgcatccccatggagagacagcattgctccccagccctccagaaaccttgagcagatccagggatcagtgagaggagtggtgtgtacccctaaatcctcccaccccagcactgcccatctgtaaaatcttgtaaagcccagtttcctgtgtgcatgtcatggaccagtgagctggagatggctgaatcttccaagagaaacaaggttggataagcgcttccttttttttagcccaggagaggtggatgtttgtctgagaaaacaatggcctcaagggaggggccttgggcccaccctcacagggggtctctgtgtgatctcttgggatttctccttgtttttgtgagtacctgggaagtgttgtttgttttcttattttctttttaattaaaaaacaaacaaa

SEQ ID NO: 239615 - DNA, 852 bp, Artificial Sequence
  derived and/or modified sequence
atgtccagctttgatctccctgcccccagccccccacgctgttcaccgcaattcccctctattggacaagagcctcccgaaatgaacttatactacgagaactttttccaccctcagggcgtaccgtctcctcagcgcccgagcttcgagggcggtggcgagtacggtgcaacacccaatccttatctctggttcaacggccctacaatgacacccccaccatacctgcctggccccaacgcctctccattcttgccccaggcatatggagtgcagcgccctctcctcccctccgtgtccgggctaggtgggtctgatctgggctggctgcccatcccatctcaagaagaactgatgaagttagtgcgacctccttactcatattctgctctaatcgctatggccatccacggagcgccagataagagactgacactcagccagatttaccagtacgtagctgataactttccattttacaataagagcaaagctggctggcaaaactctatccggcataatctgagtctaaatgattgttttaaaaaagtgcccagagatgaggacgatcccgcttatgtgtcaggtggctctccgactagccacccactggtgacgccagggttatcaccagaaccttcggacaaaactgggcagaactcactcaccttcaatagcttttcacccctcaccaaccttagcaatcacagtggcggaggcgattgggcgaatcccatgccgacaaatatgctgagttatggcggaagcgtcttgtcccagttctccccccacttttacaactccgtgaatacatccggggtgctgtaccctagggagggcacagaggtgtag

SEQ ID NO: 239616 - DNA, 852 bp, Artificial Sequence
  derived and/or modified sequence
atgagcagctttgacctgcctgcccccagccccccacgctgcagcccccagttccccagcatcggccaggagcccccagagatgaacctgtactatgagaacttcttccacccccagggcgtgcccagcccccagaggcccagctttgaaggaggaggagaatatggagccacccccaacccctacctgtggttcaacggccccaccatgaccccaccaccctacctgcccggccccaatgccagccccttcctgccccaggcctatggagtgcagaggcccctgctgcccagcgtgtctggcctgggcggcagtgacctgggctggctgcccatccccagccaggaggagctgatgaagctggtgcggcccccctacagctacagcgccctgattgccatggccatccatggagccccagacaagaggctgaccctgagccagatctaccagtatgtggccgacaacttccccttctacaacaagagcaaggccggctggcagaacagcatccgccacaacctgagcctgaatgactgcttcaagaaggtgcccagagatgaagatgatcctgcctacgtgtctgggggcagccccaccagccaccccctggtgaccccaggcctgagccctgagcccagcgacaagacaggccagaacagcctgaccttcaacagcttcagccccctgaccaacctgagcaaccacagcggcggcggggactgggccaaccccatgcccaccaacatgctgtcctatggaggctctgtgctgagccagttcagcccccacttctacaacagcgtgaacaccagcggcgtgctgtacccccgggagggcacagaggtgtag

SEQ ID NO: 239617 - DNA, 852 bp, Artificial Sequence
  derived and/or modified sequence
atgagcagcttcgacctgcccgcccccagccccccccggtgcagccctcagttccccagcattggacaggaacctcctgaaatgaatttgtattatgaaaatttttttcacccccagggcgtgccttccccccaacggccatctttcgaaggaggcggagagtacggcgctactccgaatccttacctgtggttcaacggtcctacgatgacgcctccaccttatctgccaggcccaaatgctagccccttccttccgcaggcctacggcgttcagaggcctttactccccagcgtgtcaggtcttgggggaagtgacctaggatggctccctatcccttcccaagaggaacttatgaagctggtcagaccgccctactcctactccgccctcatagcaatggccatccacggagcccctgacaagcgcttaaccctctcacagatctaccagtatgtggccgataatttcccgttctataataaaagtaaagcagggtggcagaatagtattcggcacaacctgtcgcttaatgattgcttcaagaaggtgccccgcgacgaggacgaccccgcctacgtctctggcggttcacccacctcacacccactagtgactcctggcctgtccccggagccaagtgacaagaccgggcagaatagtctcacctttaatagtttctcgcccctcaccaacttgtccaaccattccggggggggggattgggcaaatccaatgcctaccaatatgctgagctacggcgggagcgtgttgtctcaatttagtcctcatttctacaacagtgtgaacactagcggagtgttgtacccacgcgaggggacagaagtttag

SEQ ID NO: 239618 - DNA, 852 bp, Artificial Sequence
  derived and/or modified sequence
atgagcagttttgacctaccagctccaagcccccctcggtgtagcccccaattccctagcattgggcaggagccaccagaaatgaacctctactacgagaacttttttcatccgcagggcgtgccttcaccccagcgtccaagctttgagggtggtggggagtatggagctaccccaaacccatacctatggttcaacggccctacaatgaccccaccaccttatctgccgggtccaaatgcctcgcccttcctgcctcaggcctacggggtccaacgtccactgttgccatccgtctctggcctcgggggatctgacctgggttggctgcccatcccatcacaggaagaactgatgaaactggtgaggcccccttattcatattctgctcttattgccatggccattcatggagccccagacaagcggttaactctgagccagatctaccagtatgttgccgataactttcccttctataacaagtccaaagctggttggcagaatagcatccggcacaatctgagtctgaacgactgctttaagaaagtccctcgagacgaggatgaccctgcctacgtgtccggcggatcacctacatctcatcccttggttactccagggctaagcccagagcccagcgataagactggccagaattctctgacctttaactctttctctccactgactaacctgtccaaccacagcggcggaggcgactgggccaatcctatgcctactaatatgctgtcatatggagggtcagttcttagtcaattttccccccatttttataactccgttaatacatccggagtcttatatcctcgcgaaggaactgaagtctag

SEQ ID NO: 239619 - DNA, 852 bp, Artificial Sequence
  derived and/or modified sequence
atgagcagcttcgacctgcccgcccccagcccccccagatgcagcccccagttccccagcatcggccaggagccccccgagatgaacctgtactacgagaacttcttccacccccagggcgtgcccagcccccagagacccagcttcgagggcggcggcgagtacggcgccacccccaacccctacctgtggttcaacggccccaccatgaccccccccccctacctgcccggccccaacgccagccccttcctgccccaggcctacggcgtgcagagacccctgctgcccagcgtgagcggcctgggcggcagcgacctgggctggctgcccatccccagccaggaggagctgatgaagctggtgagacccccctacagctacagcgccctgatcgccatggccatccacggcgcccccgacaagagactgaccctgagccagatctaccagtacgtggccgacaacttccccttctacaacaagagcaaggccggctggcagaacagcatcagacacaacctgagcctgaacgactgcttcaagaaggtgcccagagacgaggacgaccccgcctacgtgagcggcggcagccccaccagccaccccctggtgacccccggcctgagccccgagcccagcgacaagaccggccagaacagcctgaccttcaacagcttcagccccctgaccaacctgagcaaccacagcggcggcggcgactgggccaaccccatgcccaccaacatgctgagctacggcggcagcgtgctgagccagttcagcccccacttctacaacagcgtgaacaccagcggcgtgctgtaccccagagagggcaccgaggtgtag

SEQ ID NO: 239620 - protein, 245 aa, Artificial Sequence
  derived and/or modified sequence
MSRLRALLGLGLLVAGSRVPRIKSQTIACRSGPTWWGPQRLNSGGRWDSEVMASTVVKYLSQEEAQAVDQELFNEYQFSVDQLMELAGLSCATAIAKAYPPTSMSRSPPTVLVICGPGNNGGDGLVCARHLKLFGYEPTIYYPKRPNKPLFTALVTQCQKMDIPFLGEMPAEPMTIDELYELVVDAIFGFSFKGDVREPFHSILSVLKGLTVPIASIDIPSGAGIQKVGWGRLGPYPPDSCPHQV

SEQ ID NO: 239621 - protein, 260 aa, Artificial Sequence
  derived and/or modified sequence
MSRLRALLGLGLLVAGSRVPRIKSQTIACRSGPTWWGPQRLNSGGRWDSEVMASTVVKYLSQEEAQAVDQELFNEYQFSVDQLMELAGLSCATAIAKAYPPTSMSRSPPTVLVICGPGNNGGDGLVCARHLKLFGYEPTIYYPKRPNKPLFTALVTQCQKMDIPFLGEMPAELQGRCSGTVPQHPECPEGTHCAHCQHRHSLRMGRGEGKCWRDPARLAHIPHSPQKICNPVYRSLPLPGGSFCATCSGEEVPAEPATLP

SEQ ID NO: 239622 - protein, 288 aa, Artificial Sequence
  derived and/or modified sequence
MSRLRALLGLGLLVAGSRVPRIKSQTIACRSGPTWWGPQRLNSGGRWDSEVMASTVVKYLSQEEAQAVDQELFNEYQFSVDQLMELAGLSCATAIAKAYPPTSMSRSPPTVLVICGPGNNGGDGLVCARHLKLFGYEPTIYYPKRPNKPLFTALVTQCQKMDIPFLGEMPAEPMTIDELYELVVDAIFGFSFKGDVREPFHSILSVLKGLTVPIASIDIPSGWDVEKGNAGGIQPDLLISLTAPKKSATQFTGRYHYLGGRFVPPALEKKYQLNLPPYPDTECVYRLQ

SEQ ID NO: 239623 - protein, 306 aa, Artificial Sequence
  derived and/or modified sequence
RRTCAGPGRAGGARSASWMSRLRALLGLGLLVAGSRVPRIKSQTIACRSGPTWWGPQRLNSGGRWDSEVMASTVVKYLSQEEAQAVDQELFNEYQFSVDQLMELAGLSCATAIAKAYPPTSMSRSPPTVLVICGPGNNGGDGLVCARHLKLFGYEPTIYYPKRPNKPLFTALVTQCQKMDIPFLGEMPAEPMTIDELYELVVDAIFGFSFKGDVREPFHSILSVLKGLTVPIASIDIPSGWDVEKGNAGGIQPDLLISLTAPKKSATQFTGRYHYLGGRFVPPALEKKYQLNLPPYPDTECVYRLQ

SEQ ID NO: 239624 - DNA, 738 bp, Artificial Sequence
  derived and/or modified sequence
atgtctcggctgagggcactcctaggattggggctgttagtagccggtagtcgtgtgcctagaattaaatcccagacaatagcctgccggtctgggcctacatggtggggtccacaacggctgaactctggcggaagatgggactctgaagtgatggccagtaccgttgtcaaatatctgtctcaggaggaagcgcaagccgtcgaccaggagctgtttaacgaatatcagttttcagtggaccagctgatggagttagcgggactgtcttgtgccactgccatagccaaggcataccccccaacgtccatgagtcggagccctccaacagttctggtcatttgtggcccaggtaacaatggaggggatggtctggtctgcgcacggcacctgaagctttttgggtatgaaccgacgatttattatccaaagcgcccaaataaaccactgttcacagccttggtgacccagtgtcagaaaatggacattccttttttaggggaaatgcccgctgagccgatgactatcgacgagctctacgaactcgtggtggatgccattttcggtttctcattcaaaggagacgtgagagagccctttcactcaatcttgtccgtgttgaaagggctcactgttcctatagccagcatcgatatccctagcggcgctgggatacaaaaagtgggatggggacgcctggggccttacccaccagactcctgccctcaccaggtatag

SEQ ID NO: 239625 - DNA, 783 bp, Artificial Sequence
  derived and/or modified sequence
atgtcacggctaagggcacttttaggccttgggctgctggttgcaggctctcgcgtgcccaggattaagtcacagacgattgcctgccgttccggcccaacatggtggggcccacagaggctgaactctgggggaagatgggactcggaggtgatggcttccaccgtcgtgaaatatctgtcccaggaagaagctcaggcagtagaccaggaattgttcaatgaataccagttttccgtagatcagcttatggagctggccggactaagctgcgcaacagctatagcaaaggcatatccacccacgagcatgtctcgctcaccccctaccgtcttggtcatttgtggcccagggaacaatggcggagacggactcgtctgtgctagacacctgaaactgttcggttacgagccaactatttattatcccaagaggcccaacaagccgttgtttactgcattagttacccaatgccagaagatggatattccttttttgggggaaatgccagcagaattgcaaggtaggtgcagcgggactgtgccccaacaccccgagtgcccggaggggactcactgcgcacattgccagcacagacacagcttgaggatgggaaggggcgaagggaaatgttggagagatccagcacgcctggcccacatccctcattcacctcaaaagatatgcaaccctgtgtatcggtccctgcccctccccggaggcagtttctgtgcgacatgtagcggcgaggaggtgcccgctgaacctgccacattgccatag

SEQ ID NO: 239626 - DNA, 867 bp, Artificial Sequence
  derived and/or modified sequence
atgagtcggctgcgcgcacttctgggactcgggctcctcgtggcaggctcccgagtgccccgtatcaaaagccagaccatcgcctgcagaagcggacccacatggtgggggcctcagaggctgaattctggaggaagatgggactccgaagtgatggcatccaccgtggtcaagtatctatcccaggaggaggcgcaagccgttgaccaggaacttttcaatgaataccaattctctgtggatcaattgatggaactggccggtcttagttgtgcgaccgcaatcgccaaagcttacccacccacttctatgtcgcggagtccccctactgttcttgtaatttgcggacctggcaacaacggaggagatgggctggtgtgtgccaggcacctgaaactgttcggctatgaacccactatatactatccaaagaggccgaataagcctttgtttacggcactcgtcacccagtgccagaagatggatattcccttcctaggggaaatgcccgctgagcctatgactattgatgagctttatgagctggtagtggacgcgattttcgggttctcctttaagggcgatgtacgcgaacctttccacagcatcctgagcgttctgaagggtctgaccgtgcctatcgctagtattgacattccttccggatgggatgtggagaaagggaacgccggaggtatccagcccgatctcttgatctccttaaccgcccctaaaaagtctgcgacgcaattcactggcagatatcactatctgggcggtcggtttgtaccgccagctctggagaagaagtaccagctgaacctgccgccttacccggatactgagtgcgtctacaggctgcagtag

SEQ ID NO: 239627 - DNA, 921 bp, Artificial Sequence
  derived and/or modified sequence
aggagaacctgcgctgggccaggtcgggctgggggagccaggagcgctagttggatgtcccggctccgggctctgttgggacttgggctgctcgtggccggtagccgggtgccgaggatcaaaagccaaactatcgcatgccgctcagggcctacctggtggggccctcagcggcttaacagcgggggtaggtgggactctgaggtgatggccagtactgtcgtcaagtatctttcccaggaagaggcgcaggcagttgaccaagaactgtttaatgagtaccagtttagtgtagatcagctgatggagctggccggattaagctgtgcaacagccatcgccaaagcttaccctcccaccagtatgagcagatctcccccaaccgtactcgtcatctgtggacccggaaataatgggggagacggcctggtgtgtgctcgtcacctgaagctcttcgggtatgagcccacaatttactaccccaagcgacccaacaaacctctgtttaccgccctggtgacacagtgtcagaaaatggatatcccatttctgggcgaaatgcctgccgaacctatgacaatcgacgagctttatgaattagtcgtcgacgccatcttcggtttttctttcaaaggagacgtccgggagccttttcactccatccttagtgttcttaaaggactgactgtcccaatcgcctcgattgatatcccttctgggtgggatgtggagaagggtaatgccggaggcattcagcccgacctccttatctccctgacagcccctaagaaatctgcgacacaattcaccgggaggtatcactacctcggcggaaggtttgtgcccccagcattagagaagaagtatcagcttaacctgccaccgtaccctgacacggaatgtgtataccgccttcaatag

SEQ ID NO: 239628 - DNA, 738 bp, Artificial Sequence
  derived and/or modified sequence
atgagccggctacgtgcgctgctggggctgggactattggtggcaggttcgagggtgccccgcatcaagagtcagaccatcgcatgcagaagcggacccacctggtgggggccacagcgactaaatagtggaggccggtgggacagcgaggttatggcctcaactgtggtgaagtacctttcccaggaggaagcgcaagccgttgatcaggagctttttaatgaataccagttctccgtagaccagttgatggagttggcaggcctgtcctgcgctaccgcgattgccaaggcataccctccaacatcaatgagtcgcagccctccgaccgtgctggtgatatgcggcccagggaacaacggcggggatgggcttgtgtgtgcccgccacctgaaactgttcggctatgagcctaccatatattatccaaagcgccctaataaacccctcttcaccgccttagtcacccaatgccagaaaatggatattcctttcctcggggagatgcctgctgagcccatgacgatagatgagctgtacgaactagttgtggatgccattttcggtttttccttcaaaggtgatgtcagagaaccttttcattccattctgagtgtcctaaaaggcctgaccgtcccaattgccagtattgacatcccgagtggcgcgggcatccagaaagttggctgggggcggctcggcccttaccctccagactcctgcccccatcaagtgtag

SEQ ID NO: 239629 - DNA, 783 bp, Artificial Sequence
  derived and/or modified sequence
atgtcacgactgcgtgcgctgcttggactgggtctgctagtagccgggtctcgcgtgccaagaatcaagtcccagactatcgcctgtaggtccgggccgacctggtgggggccacaaaggcttaatagcgggggccgctgggacagcgaggttatggcttcaacggttgttaaatacttgagtcaggaggaggcacaggcagtggatcaagaactctttaatgaataccagttttcagtggatcagctgatggagctggccggcctgtcctgtgctaccgcgattgccaaagcctacccccctacaagcatgtctaggtcccccccaactgtccttgtcatatgtggtcccggtaacaatggaggagatggcctcgtgtgcgcccggcatcttaaattattcggctatgaacccacgatttattacccaaagcggcccaacaagccattgttcacagcccttgtgacccagtgccaaaaaatggatataccttttctgggagaaatgccagccgagctgcaaggcagatgtagcgggacagttcctcagcatcccgagtgtcccgagggaacccattgcgcacattgccagcacagacactcgttgcgcatgggccgtggcgaaggaaaatgctggcgcgatcctgctcgactggctcacattccgcatagtcctcagaagatttgtaaccccgtatacaggagcttacccctgcctggtggttctttctgcgctacttgttcaggagaagaggtgccagcagaacccgcaacacttccctag

SEQ ID NO: 239630 - DNA, 867 bp, Artificial Sequence
  derived and/or modified sequence
atgtcaagactacgcgctctccttggcctggggctgctggtggccggttccagagttcctcgcatcaagtctcaaaccatcgcatgcagaagcggccccacatggtggggtccccagaggttaaatagcggcggacgttgggatagtgaggtcatggcaagcaccgtggttaagtatttgtcccaggaggaggcgcaagcagtggaccaagagctctttaacgaataccaatttagcgttgaccagctcatggaactggccggacttagctgtgcaaccgctattgctaaagcctacccgccaacatctatgtcaagatctccacccaccgtcctagtgatctgtggccctggtaataatggaggcgatggcttggtctgcgcaaggcacctgaaactgttcggatatgaaccaacgatctattatcctaaaagaccaaacaaaccactcttcaccgcgctggtgactcaatgtcagaagatggatatcccgtttctgggcgaaatgcccgccgaacctatgaccatcgacgagctttacgaattggtagtcgatgcaatattcggattctctttcaaaggcgacgttagggaaccattccacagcattttaagcgtactaaagggattgacagtgccaatcgcgtctatagatatcccttctggttgggatgtggagaaaggcaacgctggtggtatacagcccgatctgcttatctccctcaccgctcccaagaaaagtgccacacagttcactggaagatatcattacctgggtggacgctttgtgcctcccgccctcgaaaagaaataccagctcaatcttcccccgtaccctgatacagaatgcgtataccgcttacagtag

SEQ ID NO: 239631 - DNA, 921 bp, Artificial Sequence
  derived and/or modified sequence
cgtcggacttgcgcaggaccaggtcgggctggcggcgccaggagtgcttcgtggatgtccagattgcgcgcattgctaggattgggtctccttgttgccggatcccgggtgcctcgcatcaaatcacagactattgcttgcaggtctgggcctacttggtggggccctcaaaggttaaactcaggtggacgttgggatagtgaggtcatggctagcaccgtggtgaaatacctgtctcaggaagaagctcaagctgtcgaccaagagctgtttaatgagtatcagttcagtgtggaccagcttatggaacttgctgggctgtcctgtgctaccgccatcgcgaaggcatacccacctacctctatgtctagatcccctccgaccgtcctggtgatctgtggccccggtaacaatggcggtgacggccttgtatgtgcacgccacttgaaactctttgggtacgagccaaccatctactatcctaagcgcccaaacaaacctttgttcacagctctcgttacacagtgtcaaaagatggatattcctttcctgggtgagatgcccgccgaacctatgactattgacgagctctacgagctcgttgtcgacgccatctttggctttagctttaaaggggatgtacgagaaccgtttcactccatcctgtccgttcttaaagggcttaccgtacctatagccagtatcgacatcccttctggctgggatgtggaaaaggggaatgccggcggaattcagccagacctccttattagcttaaccgctcccaagaagtctgcaacccaatttacaggaaggtaccattatctcggaggaagattcgttcccccagctctggaaaagaagtatcaattaaatctgcctccttaccctgatacggagtgtgtttatcggctgcagtag

SEQ ID NO: 239632 - DNA, 1134 bp, Artificial Sequence
  derived and/or modified sequence
cgccgcacatgcgccgggccgggccgggccgggggcgcgcgctctgcgagctggatgtccaggctgcgggcgctgctgggcctcgggctgctggttgcgggctcgcgcgtgccgcggatcaaaagccagaccatcgcctgtcgctcgggacccacctggtggggaccgcagcggctgaactcgggtggccgctgggactcagaggtcatggcgagcacggtggtgaagtacctgagccaggaggaggcccaggccgtggaccaggagctatttaacgaataccagttcagcgtggaccaacttatggaactggccgggctgagctgtgctacagccatcgccaaggcatatccccccacgtccatgtccaggagcccccctactgtcctggtcatctgtggcccggggaataatggaggagatggtctggtctgtgctcgacacctcaaactctttggctacgagccaaccatctattaccccaaaaggcctaacaagcccctcttcactgcattggtgacccagtgtcagaaaatggacatccctttccttggggaaatgcccgcagagcccatgacgattgatgaactgtatgagctggtggtggatgccatctttggcttcagcttcaagggcgatgttcgggaaccgttccacagcatcctgagtgtcctgaagggactcactgtgcccattgccagcatcgacattccctcaggatgggacgtggagaagggaaatgctggagggatccagccagacttgctcatatccctcacagcccccaaaaaatctgcaacccagtttaccggtcgctaccattacctggggggtcgttttgtgccacctgctctggagaagaagtaccagctgaacctgccaccctaccctgacaccgagtgtgtctatcgtctgcagtgagggaaggtgggtgggtattcttcccaataaagacttagagcccctctcttccagaactgtggattcctgggagctcctctggcaataaaagtcagtgaatggtggaagtcagagaccaaccctggggattgggtgccatctctctaggggtaacacaaagggcaagaggttgctatggtatttggaaacaatgaaaatggactgttagatgcc

SEQ ID NO: 239633 - DNA, 738 bp, Artificial Sequence
  derived and/or modified sequence
atgtcgcgactccgcgccttgctgggcttgggcctattagtcgctgggtcccgggtcccgaggattaaaagtcagacgatcgcctgtaggtccggccccacatggtggggaccccagagactgaatagcgggggcagatgggattccgaggtcatggcatctacagtggtgaaatacttgtcacaagaagaggctcaagcggtcgatcaagagttgtttaacgagtaccagttttcggtggatcagctgatggaattggcaggattgtcttgtgctaccgccatagccaaagcttacccccctacatctatgagtaggagtcctccaactgtcctagtgatatgcggtcccggcaacaatggaggtgacggcctggtgtgcgctagacacctcaagctgttcggatatgaacctacaatatattaccccaagagacccaacaagcccctgtttaccgcactagttactcaatgtcagaagatggatattcccttcctcggcgaaatgcccgctgaacctatgaccatcgatgaactctacgaactcgtggttgatgcaatctttggattttccttcaagggggatgtgagagagcccttccacagtattttatctgtgcttaaaggccttactgtacctatagcttctatcgacattccaagtggtgccggaatccagaaggtaggttggggtagactgggaccatatccgccagactcttgtcctcatcaagtctag

SEQ ID NO: 239634 - DNA, 783 bp, Artificial Sequence
  derived and/or modified sequence
atgagccgcctgagagccctattaggactaggcctgttagtggctggaagcagagtgcccagaattaagtcacagactattgcatgtcgaagtgggcctacctggtggggaccccaacgacttaattcagggggaagatgggatagtgaggttatggcatcaacagtcgtgaaatatctctcgcaggaagaggcccaggcagtggaccaggaactgtttaatgagtaccagttcagtgttgatcaattgatggaactggccggcttgagttgcgcgacagcaatcgctaaagcttatcctcctacaagcatgtctaggtcccccccaactgtccttgtcatatgtggtcccggtaacaatggaggagatggcctcgtgtgcgcccggcatcttaaattattcggctatgaacccacgatttattacccaaagcggcccaacaagccattgttcacagcccttgtgacccagtgccaaaaaatggatataccttttctgggagaaatgccagccgagctgcaaggcagatgtagcgggacagttcctcagcatcccgagtgtcccgagggaacccattgcgcacattgccagcacagacacagtttgcgcatgggacgaggcgaagggaaatgttggcgcgacccggcccgccttgcacacatcccccactctccccagaaaatctgcaatcccgtgtaccgaagcctgccactgcctgggggctctttttgtgctacatgctccggtgaagaagttcctgccgaacctgcaacccttccttag

SEQ ID NO: 239635 - DNA, 867 bp, Artificial Sequence
  derived and/or modified sequence
atgtccagactgagggctttgctcgggctgggccttcttgtggcaggctcccgcgtcccacgcatcaaaagccaaaccatagcatgcaggtcaggtcccacctggtgggggccacaacgtctcaactccggcggacgatgggacagcgaagtaatggcctcaacggttgtaaagtacctaagtcaggaagaagcccaggctgttgatcaggaactgtttaatgagtaccagtttagtgtcgatcaactgatggaactggctggcttgtcatgtgcaactgctatagcgaaagcataccctccaacatctatgtcaagatctccacccaccgtcctagtgatctgtggccctggtaataatggaggcgatggcttggtctgcgcaaggcacctgaaactgttcggatatgaaccaacgatctattatcctaaaagaccaaacaaaccactcttcaccgcgctggtgactcaatgtcagaagatggatatcccgtttctgggcgaaatgcccgccgaacctatgaccatcgacgagctttacgaattggtagtcgatgcaatattcggattctctttcaaaggcgacgttagggaaccattccatagtattctgtccgtgctcaaaggactgacggtcccaatagcgtccattgacatcccttcggggtgggatgttgaaaaaggtaacgcaggagggatacagcctgatctgctgatttcacttacagctcctaagaaaagcgctacccagtttacaggccgctatcattacctgggaggacgtttcgtgcccccagctttagaaaagaaatatcaattaaacctgcccccctacccagataccgaatgtgtataccgcctacaatag

SEQ ID NO: 239636 - DNA, 921 bp, Artificial Sequence
  derived and/or modified sequence
agacgaacttgtgctggacctggcagagcaggaggagcacgatcagcctcctggatgtcaagactcagggccctgcttggactcggccttttagtagccgggagccgggtgccacgaatcaagtcgcagactatcgcttgtcgctctggaccaacttggtgggggccccagcgtttgaactccggcggtcgatgggattcggaggtaatggccagcacagtggtgaaatatctatcacaagaagaagcacaggctgtcgaccaggaactgttcaatgagtatcaattttcagtcgatcagctcatggaactcgccggcctctcgtgtgccaccgccatcgcaaaggcctatccaccgactagtatgtctcgctccccacctacggttctggtcatatgtggccctggaaataatggcggcgacgggctcgtgtgcgccagacatctgaaattattcggttatgaacccaccatatattatcccaaacgacctaacaaacccttgttcaccgccttagtaactcagtgccagaagatggatattccgtttcttggtgaaatgccagcagagcctatgactatcgacgaactgtacgagcttgtagtggatgctatcttcggcttcagcttcaaaggagatgtccgcgaacccttccattcgatcctatctgttctcaagggcctgactgtcccaatagcgagtatcgacataccttctggctgggacgtcgagaagggaaatgccggaggaatacagcctgatctgttgatctcgcttacggctcccaaaaagtccgccacccaattcaccggacgctaccattacctaggggggagattcgtaccacctgccctcgaaaagaagtaccaattaaacctgccgccttatccggacaccgagtgtgtgtacagactccagtag

SEQ ID NO: 239637 - DNA, 738 bp, Artificial Sequence
  derived and/or modified sequence
atgagcagactgagagccctgctgggcctgggcctgctggtggccggcagcagagtgcccagaatcaagagccagaccatcgcctgcagaagcggccccacctggtggggcccccagagactgaacagcggcggcagatgggacagcgaggtgatggccagcaccgtggtgaagtacctgagccaggaggaggcccaggccgtggaccaggagctgttcaacgagtaccagttcagcgtggaccagctgatggagctggccggcctgagctgcgccaccgccatcgccaaggcctacccccccaccagcatgagcagaagcccccccaccgtgctggtgatctgcggccccggcaacaacggcggcgacggcctggtgtgcgccagacacctgaagctgttcggctacgagcccaccatctactaccccaagagacccaacaagcccctgttcaccgccctggtgacccagtgccagaagatggacatccccttcctgggcgagatgcccgccgagcccatgaccatcgacgagctgtacgagctggtggtggacgccatcttcggcttcagcttcaagggcgacgtgagagagcccttccacagcatcctgagcgtgctgaagggcctgaccgtgcccatcgccagcatcgacatccccagcggcgccggcatccagaaggtgggctggggcagactgggcccctacccccccgacagctgcccccaccaggtgtag

SEQ ID NO: 239638 - DNA, 783 bp, Artificial Sequence
  derived and/or modified sequence
atgagcagactgagagccctgctgggcctgggcctgctggtggccggcagcagagtgcccagaatcaagagccagaccatcgcctgcagaagcggccccacctggtggggcccccagagactgaacagcggcggcagatgggacagcgaggtgatggccagcaccgtggtgaagtacctgagccaggaggaggcccaggccgtggaccaggagctgttcaacgagtaccagttcagcgtggaccagctgatggagctggccggcctgagctgcgccaccgccatcgccaaggcctacccccccaccagcatgagcagaagcccccccaccgtgctggtgatctgcggccccggcaacaacggcggcgacggcctggtgtgcgccagacacctgaagctgttcggctacgagcccaccatctactaccccaagagacccaacaagcccctgttcaccgccctggtgacccagtgccagaagatggacatccccttcctgggcgagatgcccgccgagctgcagggcagatgcagcggcaccgtgccccagcaccccgagtgccccgagggcacccactgcgcccactgccagcacagacacagcctgagaatgggcagaggcgagggcaagtgctggagagaccccgccagactggcccacatcccccacagcccccagaagatctgcaaccccgtgtacagaagcctgcccctgcccggcggcagcttctgcgccacctgcagcggcgaggaggtgcccgccgagcccgccaccctgccctag

SEQ ID NO: 239639 - DNA, 867 bp, Artificial Sequence
  derived and/or modified sequence
atgagcagactgagagccctgctgggcctgggcctgctggtggccggcagcagagtgcccagaatcaagagccagaccatcgcctgcagaagcggccccacctggtggggcccccagagactgaacagcggcggcagatgggacagcgaggtgatggccagcaccgtggtgaagtacctgagccaggaggaggcccaggccgtggaccaggagctgttcaacgagtaccagttcagcgtggaccagctgatggagctggccggcctgagctgcgccaccgccatcgccaaggcctacccccccaccagcatgagcagaagcccccccaccgtgctggtgatctgcggccccggcaacaacggcggcgacggcctggtgtgcgccagacacctgaagctgttcggctacgagcccaccatctactaccccaagagacccaacaagcccctgttcaccgccctggtgacccagtgccagaagatggacatccccttcctgggcgagatgcccgccgagcccatgaccatcgacgagctgtacgagctggtggtggacgccatcttcggcttcagcttcaagggcgacgtgagagagcccttccacagcatcctgagcgtgctgaagggcctgaccgtgcccatcgccagcatcgacatccccagcggctgggacgtggagaagggcaacgccggcggcatccagcccgacctgctgatcagcctgaccgcccccaagaagagcgccacccagttcaccggcagataccactacctgggcggcagattcgtgccccccgccctggagaagaagtaccagctgaacctgcccccctaccccgacaccgagtgcgtgtacagactgcagtag

SEQ ID NO: 239640 - DNA, 921 bp, Artificial Sequence
  derived and/or modified sequence
agaagaacctgcgccggccccggcagagccggcggcgccagaagcgccagctggatgagcagactgagagccctgctgggcctgggcctgctggtggccggcagcagagtgcccagaatcaagagccagaccatcgcctgcagaagcggccccacctggtggggcccccagagactgaacagcggcggcagatgggacagcgaggtgatggccagcaccgtggtgaagtacctgagccaggaggaggcccaggccgtggaccaggagctgttcaacgagtaccagttcagcgtggaccagctgatggagctggccggcctgagctgcgccaccgccatcgccaaggcctacccccccaccagcatgagcagaagcccccccaccgtgctggtgatctgcggccccggcaacaacggcggcgacggcctggtgtgcgccagacacctgaagctgttcggctacgagcccaccatctactaccccaagagacccaacaagcccctgttcaccgccctggtgacccagtgccagaagatggacatccccttcctgggcgagatgcccgccgagcccatgaccatcgacgagctgtacgagctggtggtggacgccatcttcggcttcagcttcaagggcgacgtgagagagcccttccacagcatcctgagcgtgctgaagggcctgaccgtgcccatcgccagcatcgacatccccagcggctgggacgtggagaagggcaacgccggcggcatccagcccgacctgctgatcagcctgaccgcccccaagaagagcgccacccagttcaccggcagataccactacctgggcggcagattcgtgccccccgccctggagaagaagtaccagctgaacctgcccccctaccccgacaccgagtgcgtgtacagactgcagtag

SEQ ID NO: 239641 - DNA, 738 bp, Artificial Sequence
  derived and/or modified sequence
atgtcaagacttcgagccttgctgggtctgggattgttggtggcaggaagtcgagtcccgcgcatcaaaagtcaaactatagcatgccgctcagggcctacctggtggggccctcagagactcaactctgggggacgttgggactctgaggtgatggcgtccactgtggtaaagtatctcagtcaggaggaagcccaggccgtcgatcaggagctgtttaacgaataccagttttccgtcgaccagttaatggagctggcgggcctgagttgtgccaccgccatagcgaaggcttacccacctaccagcatgtcccgcagcccgccgaccgtcctggtgatatgtggtccaggcaacaacgggggcgatggattggtatgcgcaaggcaccttaaactatttggttacgagcccactatctactatccaaaaaggccaaacaaacccctgttcactgcccttgtcacccagtgtcagaaaatggatatcccctttttgggagagatgcccgcggagcctatgaccattgacgagttatacgagttggttgttgatgccatttttggatttagttttaaaggcgatgtgcgagaaccatttcattcgattctgagcgttctgaaaggccttacggtacccatcgcctctattgacataccatcaggcgccgggattcagaaagtcggctggggacgcctgggtccatatcccccagactcttgtccccaccaggtatag

SEQ ID NO: 239642 - DNA, 783 bp, Artificial Sequence
  derived and/or modified sequence
atgagccgactccgcgcacttttgggacttggactcctcgtcgctggaagtagagtacccaggattaaaagccagactatagcttgcaggtctggccccacgtggtgggggcctcagaggttaaattcagggggcagatgggattccgaggtaatggccagtacagtcgtaaaatacctgagtcaggaagaggcgcaagcagtggatcaggagctttttaacgagtatcagttctctgtagaccagctgatggagctagctggtctttcctgcgccaccgcaatcgccaaggcctatccccctacttctatgtctagatcaccccccactgtgctggtcatctgcggtcccggcaacaacggcggcgatggccttgtctgtgctcggcacttgaagctgttcgggtacgagcccacaatctactacccaaagaggcccaacaagcctcttttcactgcactggtcactcaatgccagaaaatggatatcccttttttgggcgagatgccagccgagctacaggggaggtgttccggcaccgtaccccaacacccagagtgccccgaaggcacccactgcgcccattgccagcataggcattccctccgaatgggtaggggtgaggggaaatgctggagagacccagcaagactggctcacatcccccactcaccacaaaaaatctgtaacccagtctatagaagcctccccctgcctggtggctccttttgtgctacctgttctggagaagaagtgccggctgaacccgcgaccctcccctag

SEQ ID NO: 239643 - DNA, 867 bp, Artificial Sequence
  derived and/or modified sequence
atgtcacgacttcgcgcgctcctggggcttgggctactagtggcaggatccagggtgccccgcattaagtcccagactatcgcctgtcgttcgggcccgacctggtggggccctcaacggctgaactccggaggtagatgggattccgaagtgatggcttccacagtggtgaagtacctgtcccaagaagaggcccaagcggtcgaccaggagctattcaacgaataccagttctccgtggaccagttaatggagctggcagggctttcctgcgctacagcgatcgccaaggcctacccccccacctctatgagccggtcccctcccacagtgttggtaatttgcggaccaggcaacaatggcggggacggacttgtctgcgctcggcaccttaagctcttcggatatgaaccaacaatatactacccaaagagacctaataagccactcttcacagctctggtcacacaatgccaaaaaatggacatcccttttctgggtgaaatgccggccgaaccgatgaccatcgacgagctctatgagctcgtggtggacgcaattttcggtttctcattcaagggcgatgtcagggaaccgttccatagcattctctccgtcttaaagggactgaccgtacctatagctagtatcgacatacccagcggatgggatgtcgaaaaaggtaacgcaggggggattcagccagaccttttaatatctctgaccgcaccaaagaagtcagctacgcagttcacaggacggtaccactatttaggcgggcggtttgttccaccagcactcgaaaaaaagtatcagttgaatctgccgccctacccagacactgaatgcgtgtaccggcttcaatag

SEQ ID NO: 239644 - DNA, 921 bp, Artificial Sequence
  derived and/or modified sequence
aggcgcacatgcgccggtccgggccgcgcaggcggcgctcggagcgcatcatggatgtctagattgcgggccctgcttgggctaggactcctggttgccggatcacgagtgccccggatcaaaagtcagacaatcgcatgccgatccggccctacttggtgggggccccaacgcctcaattcaggggggcgctgggatagtgaggtgatggcttctaccgtggttaaatacctgagccaagaggaggcccaagctgtggaccaggaactgtttaatgaataccaattttccgtagatcagctcatggaacttgctggactgtcttgtgccactgcgatcgccaaggcttatccaccaacctcaatgagccggagtcccccaaccgtgttagtgatctgcggtccaggcaacaacgggggagacggtctggtgtgtgccagacacctgaagttatttggatatgagccaactatttactaccccaaacgcccgaataagccgctcttcacagcccttgtaactcaatgtcaaaagatggatatccccttccttggcgaaatgccagccgaacctatgaccatcgatgagctgtacgagttagtggtggacgccattttcggattcagtttcaaaggggatgtgcgtgagcctttccactctatcctatcggtcctgaagggtctgactgtgcccatcgcttcaatcgatattccaagcggatgggatgttgagaagggcaacgcgggcggcatccagccagaccttttgatttccctgacagccccaaaaaagtccgctacccagttcactgggagataccattacttgggcggcaggttcgtgcccccagccctggagaaaaagtaccagttgaaccttcccccttatcccgatacggagtgtgtttatcggctgcagtag

SEQ ID NO: 239645 - DNA, 1012 bp, Artificial Sequence
  derived and/or modified sequence
gccgggggcgcgcgctctgcgagctggatgtccaggctgcgggcgctgctgggcctcgggctgctggttgcgggctcgcgcgtgccgcggatcaaaagccagaccatcgcctgtcgctcgggacccacctggtggggaccgcagcggctgaactcgggtggccgctgggactcagaggtcatggcgagcacggtggtgaagtacctgagccaggaggaggcccaggccgtggaccaggagctatttaacgaataccagttcagcgtggaccaacttatggaactggccgggctgagctgtgctacagccatcgccaaggcatatccccccacgtccatgtccaggagcccccctactgtcctggtcatctgtggcccggggaataatggaggagatggtctggtctgtgctcgacacctcaaactctttggctacgagccaaccatctattaccccaaaaggcctaacaagcccctcttcactgcattggtgacccagtgtcagaaaatggacatccctttccttggggaaatgcccgcagagcccatgacgattgatgaactgtatgagctggtggtggatgccatctttggcttcagcttcaagggcgatgttcgggaaccgttccacagcatcctgagtgtcctgaagggactcactgtgcccattgccagcatcgacattccctcaggtgctgggatccagaaggtggggtgggggagattggggccctaccctcctgactcttgcccacaccaggtctaaaataattttagtctagaggggcagaacacagctttctggacccccatcagggctggggaacagtgttcagaagtcccctttacatgttggccccatgaagagaccacggcccaagggtacgtggagctcgttggacgagagttcctcaggtgggaactgaggggacttcccactcctctgggactagggtaaactaaggtgtagaaggggacgagacatctggcctcttcctgaacaccaccctctt

SEQ ID NO: 239646 - DNA, 901 bp, Artificial Sequence
  derived and/or modified sequence
gccggggccgggccgggccgggggcgcgcgctctgcgagctggatgtccaggctgcgggcgctgctgggcctcgggctgctggttgcgggctcgcgcgtgccgcggatcaaaagccagaccatcgcctgtcgctcgggacccacctggtggggaccgcagcggctgaactcgggtggccgctgggactcagaggtcatggcgagcacggtggtgaagtacctgagccaggaggaggcccaggccgtggaccaggagctatttaacgaataccagttcagcgtggaccaacttatggaactggccgggctgagctgtgctacagccatcgccaaggcatatccccccacgtccatgtccaggagcccccctactgtcctggtcatctgtggcccggggaataatggaggagatggtctggtctgtgctcgacacctcaaactctttggctacgagccaaccatctattaccccaaaaggcctaacaagcccctcttcactgcattggtgacccagtgtcagaaaatggacatccctttccttggggaaatgcccgcagagcttcaagggcgatgttcgggaaccgttccacagcatcctgagtgtcctgaagggactcactgtgcccattgccagcatcgacattccctcaggatgggacgtggagaagggaaatgctggagggatccagccagacttgctcatatccctcacagcccccaaaaaatctgcaacccagtttaccggtcgctaccattacctggggggtcgttttgtgccacctgctctggagaagaagtaccagctgaacctgccaccctaccctgacaccgagtgtgtctatcgtctgcagtgagggaaggtgggtgggtattcttcccaataaagacttagagcccctct

SEQ ID NO: 239647 - DNA, 1125 bp, Artificial Sequence
  derived and/or modified sequence
gccggggccgggccgggccgggggcgcgcgctctgcgagctggatgtccaggctgcgggcgctgctgggcctcgggctgctggttgcgggctcgcgcgtgccgcggatcaaaagccagaccatcgcctgtcgctcgggacccacctggtggggaccgcagcggctgaactcgggtggccgctgggactcagaggtcatggcgagcacggtggtgaagtacctgagccaggaggaggcccaggccgtggaccaggagctatttaacgaataccagttcagcgtggaccaacttatggaactggccgggctgagctgtgctacagccatcgccaaggcatatccccccacgtccatgtccaggagcccccctactgtcctggtcatctgtggcccggggaataatggaggagatggtctggtctgtgctcgacacctcaaactctttggctacgagccaaccatctattaccccaaaaggcctaacaagcccctcttcactgcattggtgacccagtgtcagaaaatggacatccctttccttggggaaatgcccgcagagcccatgacgattgatgaactgtatgagctggtggtggatgccatctttggcttcagcttcaagggcgatgttcgggaaccgttccacagcatcctgagtgtcctgaagggactcactgtgcccattgccagcatcgacattccctcaggatgggacgtggagaagggaaatgctggagggatccagccagacttgctcatatccctcacagcccccaaaaaatctgcaacccagtttaccggtcgctaccattacctggggggtcgttttgtgccacctgctctggagaagaagtaccagctgaacctgccaccctaccctgacaccgagtgtgtctatcgtctgcagtgagggaaggtgggtgggtattcttcccaataaagacttagagcccctctcttccagaactgtggattcctgggagctcctctggcaataaaagtcagtgaatggtggaagtcagagaccaaccctggggattgggtgccatctctctaggggtaacacaaagggcaagaggttgctatggtatttggaaacaatgaaaatggactgttagatgccaa

SEQ ID NO: 239648 - DNA, 738 bp, Artificial Sequence
  derived and/or modified sequence
atgagccggctgcgggccctgctgggcctgggcctgctggtggccggcagccgggtgccccgcatcaagagccagaccatcgcctgccgcagcggccccacctggtggggcccccagaggctgaacagcggcggccgctgggacagcgaggtgatggccagcacagtggtgaagtacctgagccaggaggaggcccaggccgtggaccaggagctgttcaatgagtaccagttctctgtggaccagctgatggagctggccggcctgagctgtgccacagccatcgccaaggcctacccacccacctccatgagccgcagcccccccaccgtgctggtgatctgtggccctggcaacaatggaggagatggcctggtgtgtgcccggcacctgaagctgtttggctatgagcccaccatctactaccccaagaggcccaacaagcccctcttcaccgccctggtgacccagtgccagaagatggacatccccttcctgggggagatgcctgctgagcccatgaccattgatgagctgtatgagctggtggtggatgccatcttcggcttctccttcaagggagatgtgcgggagcccttccacagcatcctgtctgtgctgaagggcctgactgtgcccatcgccagcattgacatccccagcggggccggcatccagaaggtgggctggggccgcctgggcccctaccccccagacagctgcccccaccaggtgtag

SEQ ID NO: 239649 - DNA, 783 bp, Artificial Sequence
  derived and/or modified sequence
atgagccggctgcgggccctgctgggcctgggcctgctggtggccggcagccgggtgccccgcatcaagagccagaccatcgcctgccgcagcggccccacctggtggggcccccagaggctgaacagcggcggccgctgggacagcgaggtgatggccagcacagtggtgaagtacctgagccaggaggaggcccaggccgtggaccaggagctgttcaatgagtaccagttctctgtggaccagctgatggagctggccggcctgagctgtgccacagccatcgccaaggcctacccacccacctccatgagccgcagcccccccaccgtgctggtgatctgtggccctggcaacaatggaggagatggcctggtgtgtgcccggcacctgaagctgtttggctatgagcccaccatctactaccccaagaggcccaacaagcccctcttcaccgccctggtgacccagtgccagaagatggacatccccttcctgggggagatgcctgctgagctgcagggccgctgcagcggcaccgtgccccagcaccctgagtgcccagagggcacccactgtgcccactgccagcaccgccacagcctgaggatgggccgcggggagggcaagtgctggagggaccctgcccggctggcccacatcccccacagcccccagaagatctgcaaccctgtgtaccgcagcctgcccctgcccggcggcagcttctgtgccacctgcagcggggaggaggtgcctgctgagcccgccaccctgccctag

SEQ ID NO: 239650 - DNA, 867 bp, Artificial Sequence
  derived and/or modified sequence
atgagccggctgcgggccctgctgggcctgggcctgctggtggccggcagccgggtgccccgcatcaagagccagaccatcgcctgccgcagcggccccacctggtggggcccccagaggctgaacagcggcggccgctgggacagcgaggtgatggccagcacagtggtgaagtacctgagccaggaggaggcccaggccgtggaccaggagctgttcaatgagtaccagttctctgtggaccagctgatggagctggccggcctgagctgtgccacagccatcgccaaggcctacccacccacctccatgagccgcagcccccccaccgtgctggtgatctgtggccctggcaacaatggaggagatggcctggtgtgtgcccggcacctgaagctgtttggctatgagcccaccatctactaccccaagaggcccaacaagcccctcttcaccgccctggtgacccagtgccagaagatggacatccccttcctgggggagatgcctgctgagcccatgaccattgatgagctgtatgagctggtggtggatgccatcttcggcttctccttcaagggagatgtgcgggagcccttccacagcatcctgtctgtgctgaagggcctgactgtgcccatcgccagcattgacatccccagcggctgggatgtggagaagggaaatgctgggggcatccagcctgacctgctgatcagcctgacagcccccaagaagagcgccacccagttcaccggccgctaccactacctgggcggccgctttgtgcccccagccctggagaagaagtaccagctgaacctgcccccctacccagacacagaatgtgtgtaccgcctgcagtag

SEQ ID NO: 239651 - DNA, 921 bp, Artificial Sequence
  derived and/or modified sequence
agaaggacctgtgccggccctggccgggccggcggggcccggagcgcctcctggatgagccggctgcgggccctgctgggcctgggcctgctggtggccggcagccgggtgccccgcatcaagagccagaccatcgcctgccgcagcggccccacctggtggggcccccagaggctgaacagcggcggccgctgggacagcgaggtgatggccagcacagtggtgaagtacctgagccaggaggaggcccaggccgtggaccaggagctgttcaatgagtaccagttctctgtggaccagctgatggagctggccggcctgagctgtgccacagccatcgccaaggcctacccacccacctccatgagccgcagcccccccaccgtgctggtgatctgtggccctggcaacaatggaggagatggcctggtgtgtgcccggcacctgaagctgtttggctatgagcccaccatctactaccccaagaggcccaacaagcccctcttcaccgccctggtgacccagtgccagaagatggacatccccttcctgggggagatgcctgctgagcccatgaccattgatgagctgtatgagctggtggtggatgccatcttcggcttctccttcaagggagatgtgcgggagcccttccacagcatcctgtctgtgctgaagggcctgactgtgcccatcgccagcattgacatccccagcggctgggatgtggagaagggaaatgctgggggcatccagcctgacctgctgatcagcctgacagcccccaagaagagcgccacccagttcaccggccgctaccactacctgggcggccgctttgtgcccccagccctggagaagaagtaccagctgaacctgcccccctacccagacacagaatgtgtgtaccgcctgcagtag

SEQ ID NO: 239652 - DNA, 738 bp, Artificial Sequence
  derived and/or modified sequence
atgagccggctgcgggccctgctgggcctgggcctgctggtggccggaagccgcgttccgaggatcaagtctcagacaatcgcctgtcgttccggccccacctggtggggcccccagagactcaactccggtggaaggtgggacagcgaggtcatggcatctacagtcgtgaaatatctgtcgcaagaagaggcacaagccgtcgatcaggaattattcaacgaataccagttcagtgtcgatcagcttatggagctggccggcctgtcttgcgctaccgcgatcgccaaagcctatcccccaaccagtatgagccggtcaccgcccacagtactcgtgatatgtggacccggtaacaatggcggggacggcctcgtgtgtgcgcgccatctgaaactgttcggctacgaacccactatctattatcccaagcgaccaaacaagccactcttcactgctctcgtaacacaatgccagaaaatggacatcccgtttctcggggagatgccagccgagccgatgactatagatgaattgtatgagctagtcgtcgatgccatctttgggttttctttcaagggagacgtccgagaaccatttcactccattctgagtgtgctaaaaggtctgacagtccccattgcctctatcgacataccttcgggggcaggcatacagaaagtgggttgggggcgcctggggccctaccctccagattcctgccctcaccaagtgtag

SEQ ID NO: 239653 - DNA, 783 bp, Artificial Sequence
  derived and/or modified sequence
atgagccggctgcgggccctgctgggcctgggcctgctggtggccggctcgcgtgtccctcgaatcaaaagtcagacgattgcctgtcgctctggccccacctggtggggtcctcagcgattgaactccggaggcagatgggatagcgaggtcatggcctctactgttgtgaaatatttgtcccaggaggaggcccaggccgtggatcaggagctctttaatgagtaccagttcagtgtagatcagctgatggagttggcgggtctcagctgtgctaccgccatcgcgaaggcttaccccccgacaagtatgtccagatctccaccaaccgtgctggttatctgcgggcccgggaataatgggggcgacgggttggtgtgtgcaaggcacctgaaattgttcgggtacgaacccaccatatattacccaaaaagacctaacaaacccctctttaccgccctcgtgacccaatgccaaaagatggatattccgttcctgggcgagatgccagcagagcttcagggaagatgtagcggaactgtcccgcaacatccagagtgtccggaagggacgcactgtgcgcattgccagcatcgccatagcctaagaatgggcagaggagaaggaaagtgctggagagatcctgctcggctcgcacatattccgcattctccacaaaagatctgcaatccagtctatagaagccttccactgccaggtgggtcattctgtgcaacctgtagtggggaagaagttccagctgaacccgccacattgccatag

SEQ ID NO: 239654 - DNA, 867 bp, Artificial Sequence
  derived and/or modified sequence
atgagccggctgcgggccctgctgggcctgggcctgctggtggccgggtcaagagtgccccggataaagagtcagaccatcgcctgtcgcagtggcccgacatggtggggaccacagcgcctaaactctggtgggcgatgggactctgaggtcatggccagcaccgtggttaagtatctgtcccaggaggaggcccaggcggtagaccaggagctgttcaacgagtatcaattttctgttgatcagctgatggaacttgccgggttgtcttgcgcgaccgcaatagccaaggcttacccgcctaccagcatgtcacgtagcccccctactgttctggtgatctgcggaccaggaaataatgggggtgacggcctggtctgtgcacgccacttgaaactctttggttatgagcccacgatctactaccctaaaaggcccaataaacctttgttcacggccctagttacacagtgtcagaaaatggatatcccatttttaggcgagatgcccgctgagcctatgactatcgacgaactctacgagctggtcgtggacgctatttttgggttctcgttcaagggggacgtccgcgaaccatttcattcgatcctatctgttttgaaaggattgaccgtgcccattgcgagcatcgatattccgtctggctgggacgtcgaaaagggtaacgccggagggattcaacccgacctacttatcagtctcaccgccccaaagaagtccgccacccagtttactggtcgatatcactatctaggaggaaggttcgtgccgccagccctcgagaaaaagtaccagttaaacctgcctccctaccccgacacggaatgcgtgtatcgtctgcagtag

SEQ ID NO: 239655 - DNA, 921 bp, Artificial Sequence
  derived and/or modified sequence
cggcggacctgcgccggccccggccgggccggcggcgcccggagcgcttcctggatgtcaagactgcgcgccttgctaggtctggggttactggtggccggaagtagagttccacgaatcaaatcccagactatagcttgccgctccggtcccacttggtgggggccccagcgcctgaatagcggagggcgatgggattctgaggtgatggcaagtactgtggtaaaatatctaagccaggaagaagcacaggcagtcgaccaagaactatttaatgaataccagttctccgtcgaccagctgatggagctagctggcctgtcatgtgcaacagccatcgccaaggcctatcctcctactagcatgtccagaagccccccaaccgtcctagtgatatgcggaccaggaaataacgggggcgatggactggtttgcgcaagacatctgaaattattcggttacgaaccaaccatttactatccaaagcgtccaaacaagcctctgttcacagcactggttacacagtgtcagaagatggatatccctttcctcggagaaatgccagccgagcccatgacaattgatgagctgtatgaacttgtagtggacgcaatcttcggattcagctttaagggggacgtgagggaaccctttcatagcattctctcagtccttaaaggcctgaccgtgccaatcgcttccatcgatataccttccggatgggacgttgagaagggcaacgctgggggaatccagccggacctcctcataagccttactgcccctaaaaaaagtgcgactcagtttacagggcgttatcattatctcggaggcaggttcgtgccccccgccttagagaaaaaataccagctcaatctgcccccctatccagacactgagtgcgtgtaccgactccaatag

SEQ ID NO: 239656 - RNA, 738 nt, Artificial Sequence
  derived and/or modified sequence
augagccggcuacgugcgcugcuggggcugggacuauugguggcagguucgagggugccccgcaucaagagucagaccaucgcaugcagaagcggacccaccuggugggggccacagcgacuaaauaguggaggccggugggacagcgagguuauggccucaacuguggugaaguaccuuucccaggaggaagcgcaagccguugaucaggagcuuuuuaaugaauaccaguucuccguagaccaguugauggaguuggcaggccuguccugcgcuaccgcgauugccaaggcauacccuccaacaucaaugagucgcagcccuccgaccgugcuggugauaugcggcccagggaacaacggcggggaugggcuugugugugcccgccaccugaaacuguucggcuaugagccuaccauauauuauccaaagcgcccuaauaaaccccucuucaccgccuuagucacccaaugccagaaaauggauauuccuuuccucggggagaugccugcugagcccaugacgauagaugagcuguacgaacuaguuguggaugccauuuucgguuuuuccuucaaaggugaugucagagaaccuuuucauuccauucugaguguccuaaaaggccugaccgucccaauugccaguauugacaucccgaguggcgcgggcauccagaaaguuggcugggggcggcucggcccuuacccuccagacuccugcccccaucaaguguag

SEQ ID NO: 239657 - RNA, 783 nt, Artificial Sequence
  derived and/or modified sequence
augucacgacugcgugcgcugcuuggacugggucugcuaguagccgggucucgcgugccaagaaucaagucccagacuaucgccuguagguccgggccgaccuggugggggccacaaaggcuuaauagcgggggccgcugggacagcgagguuauggcuucaacgguuguuaaauacuugagucaggaggaggcacaggcaguggaucaagaacucuuuaaugaauaccaguuuucaguggaucagcugauggagcuggccggccuguccugugcuaccgcgauugccaaagccuaccccccuacaagcaugucuaggucccccccaacuguccuugucauauguggucccgguaacaauggaggagauggccucgugugcgcccggcaucuuaaauuauucggcuaugaacccacgauuuauuacccaaagcggcccaacaagccauuguucacagcccuugugacccagugccaaaaaauggauauaccuuuucugggagaaaugccagccgagcugcaaggcagauguagcgggacaguuccucagcaucccgagugucccgagggaacccauugcgcacauugccagcacagacacucguugcgcaugggccguggcgaaggaaaaugcuggcgcgauccugcucgacuggcucacauuccgcauaguccucagaagauuuguaaccccguauacaggagcuuaccccugccuggugguucuuucugcgcuacuuguucaggagaagaggugccagcagaacccgcaacacuucccuag

SEQ ID NO: 239658 - RNA, 867 nt, Artificial Sequence
  derived and/or modified sequence
augucaagacuacgcgcucuccuuggccuggggcugcugguggccgguuccagaguuccucgcaucaagucucaaaccaucgcaugcagaagcggccccacauggugggguccccagagguuaaauagcggcggacguugggauagugaggucauggcaagcaccgugguuaaguauuugucccaggaggaggcgcaagcaguggaccaagagcucuuuaacgaauaccaauuuagcguugaccagcucauggaacuggccggacuuagcugugcaaccgcuauugcuaaagccuacccgccaacaucuaugucaagaucuccacccaccguccuagugaucuguggcccugguaauaauggaggcgauggcuuggucugcgcaaggcaccugaaacuguucggauaugaaccaacgaucuauuauccuaaaagaccaaacaaaccacucuucaccgcgcuggugacucaaugucagaagauggauaucccguuucugggcgaaaugcccgccgaaccuaugaccaucgacgagcuuuacgaauugguagucgaugcaauauucggauucucuuucaaaggcgacguuagggaaccauuccacagcauuuuaagcguacuaaagggauugacagugccaaucgcgucuauagauaucccuucugguugggauguggagaaaggcaacgcuggugguauacagcccgaucugcuuaucucccucaccgcucccaagaaaagugccacacaguucacuggaagauaucauuaccuggguggacgcuuugugccucccgcccucgaaaagaaauaccagcucaaucuucccccguacccugauacagaaugcguauaccgcuuacaguag

SEQ ID NO: 239659 - RNA, 921 nt, Artificial Sequence
  derived and/or modified sequence
cgucggacuugcgcaggaccaggucgggcuggcggcgccaggagugcuucguggauguccagauugcgcgcauugcuaggauugggucuccuuguugccggaucccgggugccucgcaucaaaucacagacuauugcuugcaggucugggccuacuugguggggcccucaaagguuaaacucagguggacguugggauagugaggucauggcuagcaccguggugaaauaccugucucaggaagaagcucaagcugucgaccaagagcuguuuaaugaguaucaguucaguguggaccagcuuauggaacuugcugggcuguccugugcuaccgccaucgcgaaggcauacccaccuaccucuaugucuagauccccuccgaccguccuggugaucuguggccccgguaacaauggcggugacggccuuguaugugcacgccacuugaaacucuuuggguacgagccaaccaucuacuauccuaagcgcccaaacaaaccuuuguucacagcucucguuacacagugucaaaagauggauauuccuuuccugggugagaugcccgccgaaccuaugacuauugacgagcucuacgagcucguugucgacgccaucuuuggcuuuagcuuuaaaggggauguacgagaaccguuucacuccauccuguccguucuuaaagggcuuaccguaccuauagccaguaucgacaucccuucuggcugggauguggaaaaggggaaugccggcggaauucagccagaccuccuuauuagcuuaaccgcucccaagaagucugcaacccaauuuacaggaagguaccauuaucucggaggaagauucguucccccagcucuggaaaagaaguaucaauuaaaucugccuccuuacccugauacggaguguguuuaucggcugcaguag

SEQ ID NO: 239660 - RNA, 738 nt, Artificial Sequence
  derived and/or modified sequence
augucgcgacuccgcgccuugcugggcuugggccuauuagucgcugggucccgggucccgaggauuaaaagucagacgaucgccuguagguccggccccacaugguggggaccccagagacugaauagcgggggcagaugggauuccgaggucauggcaucuacaguggugaaauacuugucacaagaagaggcucaagcggucgaucaagaguuguuuaacgaguaccaguuuucgguggaucagcugauggaauuggcaggauugucuugugcuaccgccauagccaaagcuuaccccccuacaucuaugaguaggaguccuccaacuguccuagugauaugcggucccggcaacaauggaggugacggccuggugugcgcuagacaccucaagcuguucggauaugaaccuacaauauauuaccccaagagacccaacaagccccuguuuaccgcacuaguuacucaaugucagaagauggauauucccuuccucggcgaaaugcccgcugaaccuaugaccaucgaugaacucuacgaacucgugguugaugcaaucuuuggauuuuccuucaagggggaugugagagagcccuuccacaguauuuuaucugugcuuaaaggccuuacuguaccuauagcuucuaucgacauuccaaguggugccggaauccagaagguagguugggguagacugggaccauauccgccagacucuuguccucaucaagucuag

SEQ ID NO: 239661 - RNA, 783 nt, Artificial Sequence
  derived and/or modified sequence
augagccgccugagagcccuauuaggacuaggccuguuaguggcuggaagcagagugcccagaauuaagucacagacuauugcaugucgaagugggccuaccugguggggaccccaacgacuuaauucagggggaagaugggauagugagguuauggcaucaacagucgugaaauaucucucgcaggaagaggcccaggcaguggaccaggaacuguuuaaugaguaccaguucaguguugaucaauugauggaacuggccggcuugaguugcgcgacagcaaucgcuaaagcuuauccuccuacaagcaugucuaggucccccccaacuguccuugucauauguggucccgguaacaauggaggagauggccucgugugcgcccggcaucuuaaauuauucggcuaugaacccacgauuuauuacccaaagcggcccaacaagccauuguucacagcccuugugacccagugccaaaaaauggauauaccuuuucugggagaaaugccagccgagcugcaaggcagauguagcgggacaguuccucagcaucccgagugucccgagggaacccauugcgcacauugccagcacagacacaguuugcgcaugggacgaggcgaagggaaauguuggcgcgacccggcccgccuugcacacaucccccacucuccccagaaaaucugcaaucccguguaccgaagccugccacugccugggggcucuuuuugugcuacaugcuccggugaagaaguuccugccgaaccugcaacccuuccuuag

SEQ ID NO: 239662 - RNA, 867 nt, Artificial Sequence
  derived and/or modified sequence
auguccagacugagggcuuugcucgggcugggccuucuuguggcaggcucccgcgucccacgcaucaaaagccaaaccauagcaugcaggucaggucccaccuggugggggccacaacgucucaacuccggcggacgaugggacagcgaaguaauggccucaacgguuguaaaguaccuaagucaggaagaagcccaggcuguugaucaggaacuguuuaaugaguaccaguuuagugucgaucaacugauggaacuggcuggcuugucaugugcaacugcuauagcgaaagcauacccuccaacaucuaugucaagaucuccacccaccguccuagugaucuguggcccugguaauaauggaggcgauggcuuggucugcgcaaggcaccugaaacuguucggauaugaaccaacgaucuauuauccuaaaagaccaaacaaaccacucuucaccgcgcuggugacucaaugucagaagauggauaucccguuucugggcgaaaugcccgccgaaccuaugaccaucgacgagcuuuacgaauugguagucgaugcaauauucggauucucuuucaaaggcgacguuagggaaccauuccauaguauucuguccgugcucaaaggacugacggucccaauagcguccauugacaucccuucggggugggauguugaaaaagguaacgcaggagggauacagccugaucugcugauuucacuuacagcuccuaagaaaagcgcuacccaguuuacaggccgcuaucauuaccugggaggacguuucgugcccccagcuuuagaaaagaaauaucaauuaaaccugccccccuacccagauaccgaauguguauaccgccuacaauag

SEQ ID NO: 239663 - RNA, 921 nt, Artificial Sequence
  derived and/or modified sequence
agacgaacuugugcuggaccuggcagagcaggaggagcacgaucagccuccuggaugucaagacucagggcccugcuuggacucggccuuuuaguagccgggagccgggugccacgaaucaagucgcagacuaucgcuugucgcucuggaccaacuuggugggggccccagcguuugaacuccggcggucgaugggauucggagguaauggccagcacaguggugaaauaucuaucacaagaagaagcacaggcugucgaccaggaacuguucaaugaguaucaauuuucagucgaucagcucauggaacucgccggccucucgugugccaccgccaucgcaaaggccuauccaccgacuaguaugucucgcuccccaccuacgguucuggucauauguggcccuggaaauaauggcggcgacgggcucgugugcgccagacaucugaaauuauucgguuaugaacccaccauauauuaucccaaacgaccuaacaaacccuuguucaccgccuuaguaacucagugccagaagauggauauuccguuucuuggugaaaugccagcagagccuaugacuaucgacgaacuguacgagcuuguaguggaugcuaucuucggcuucagcuucaaaggagauguccgcgaacccuuccauucgauccuaucuguucucaagggccugacugucccaauagcgaguaucgacauaccuucuggcugggacgucgagaagggaaaugccggaggaauacagccugaucuguugaucucgcuuacggcucccaaaaaguccgccacccaauucaccggacgcuaccauuaccuaggggggagauucguaccaccugcccucgaaaagaaguaccaauuaaaccugccgccuuauccggacaccgaguguguguacagacuccaguag

SEQ ID NO: 239664 - protein, 384 aa, Artificial Sequence
  derived and/or modified sequence
MAAQNGNTSFTPNFNPPQDHASSLSFNFSYGDYDLPMDEDEDMTKTRTFFAAKIVIGIALAGIMLVCGIGNFVFIAALTRYKKLRNLTNLLIANLAISDFLVAIICCPFEMDYYVVRQLSWEHGHVLCASVNYLRTVSLYVSTNALLAIAIDRYLAIVHPLKPRMNYQTASFLIALVWMVSILIAIPSAYFATETVLFIVKSQEKIFCGQIWPVDQQLYYKSYFLFIFGVEFVGPVVTMTLCYARISRELWFKAVPGFQTEQIRKRLRCRRKTVLVLMCILTAYVLCWAPFYGFTIVRDFFPTVFVKEKHYLTAFYVVECIAMSNSMINTVCFVTVKNNTMKYFKKMMLLHWRPSQRGSKSSADLDLRTNGVPTTEEVDCIRLK

SEQ ID NO: 239665 - DNA, 1155 bp, Artificial Sequence
  derived and/or modified sequence
atggccgcccagaacggcaacaccagcttcacccccaacttcaaccccccccaggaccacgccagcagcctgagcttcaacttcagctacggcgactacgacctgcccatggacgaggacgaggacatgaccaagaccagaaccttcttcgccgccaagatcgtgatcggcatcgccctggccggcatcatgctggtgtgcggcatcggcaacttcgtgttcatcgccgccctgaccagatacaagaagctgagaaacctgaccaacctgctgatcgccaacctggccatcagcgacttcctggtggccatcatctgctgccccttcgagatggactactacgtggtgagacagctgagctgggagcacggccacgtgctgtgcgccagcgtgaactacctgagaaccgtgagcctgtacgtgagcaccaacgccctgctggccatcgccatcgacagatacctggccatcgtgcaccccctgaagcccagaatgaactaccagaccgccagcttcctgatcgccctggtgtggatggtgagcatcctgatcgccatccccagcgcctacttcgccaccgagaccgtgctgttcatcgtgaagagccaggagaagatcttctgcggccagatctggcccgtggaccagcagctgtactacaagagctacttcctgttcatcttcggcgtggagttcgtgggccccgtggtgaccatgaccctgtgctacgccagaatcagcagagagctgtggttcaaggccgtgcccggcttccagaccgagcagatcagaaagagactgagatgcagaagaaagaccgtgctggtgctgatgtgcatcctgaccgcctacgtgctgtgctgggcccccttctacggcttcaccatcgtgagagacttcttccccaccgtgttcgtgaaggagaagcactacctgaccgccttctacgtggtggagtgcatcgccatgagcaacagcatgatcaacaccgtgtgcttcgtgaccgtgaagaacaacaccatgaagtacttcaagaagatgatgctgctgcactggagacccagccagagaggcagcaagagcagcgccgacctggacctgagaaccaacggcgtgcccaccaccgaggaggtggactgcatcagactgaagtag

SEQ ID NO: 239666 - DNA, 1155 bp, Artificial Sequence
  derived and/or modified sequence
atggcagcacagaacgggaacacctcttttacacccaatttcaatcctcctcaggatcacgcgtcctctctttcattcaatttctcgtatggtgattacgatctgcctatggatgaagatgaagacatgacgaaaactcggaccttttttgccgcgaagatagtgataggtattgctctagctggaattatgctggtgtgcggcataggcaattttgtgttcattgcagcactcactaggtataagaagctccgtaacctgactaacctgctgatcgccaatctcgctatcagcgactttctcgtagctatcatttgctgtcccttcgagatggattactacgtagtgcgtcaactgtcgtgggagcatgggcatgtcctctgcgccagcgtgaattacctgagaactgtcagcctgtacgtatctactaatgccctcttagcaatcgcaatagaccggtacctagctatagtgcatcctctcaagccccgaatgaattatcagactgcaagttttctgatagccctggtttggatggttagcatcctgatcgcaattcccagcgcatactttgcaaccgaaacagtgctgttcattgtgaagtcccaggagaaaatcttttgtggccaaatctggccagtcgaccaacagttatactataaatcctacttcctgttcatttttggagtagagttcgtcgggccggtggtcacaatgacgctttgttacgcacgcatctccagggaactctggttcaaggcagtccctggtttccagactgaacagatacgaaaacggctaagatgccgaaggaagacggtgttagtgctcatgtgtatattgacagcttacgtcctatgttgggcccccttctatgggttcaccatcgtgagagatttcttcccgaccgtgttcgtaaaggaaaaacactatcttaccgctttttatgtggtcgagtgcatagccatgtcaaactccatgattaacactgtttgcttcgttaccgttaaaaacaacacaatgaagtattttaaaaaaatgatgctgcttcattggagaccttcccaacggggctccaagtccagtgctgacttagacctgcggaccaacggagtgccaactaccgaagaggtggattgtattaggctaaaatag

SEQ ID NO: 239667 - DNA, 1155 bp, Artificial Sequence
  derived and/or modified sequence
atggccgcccagaatggaaacaccagcttcacccccaacttcaaccccccccaggaccacgccagcagcctgtccttcaacttctcctatggagactatgacctgcccatggatgaagatgaggacatgaccaagaccaggaccttctttgctgccaagatcgtcatcggcatcgccctggccggcatcatgctggtgtgtggcatcggcaactttgtgttcatcgccgccctgacccgctacaagaagctgaggaacctgaccaacctgctgattgccaacctggccatcagtgacttcctggtggccatcatctgctgcccctttgagatggactactacgtggtgcggcagctgtcctgggagcacggccacgtgctgtgtgcctctgtgaactacctgaggacagtgtccctgtatgtgtccaccaatgccctgctggccatcgccatcgaccgctacctggccatcgtgcaccccctgaagcccaggatgaactaccagacagccagcttcctgattgccctggtgtggatggtgtccatcctgattgccatccccagcgcctactttgccacagaaacagtgctcttcatcgtgaagagccaggagaagatcttctgtggccagatctggcctgtggaccagcagctgtactacaagagctacttcctgttcatcttcggcgtggagtttgtgggccctgtggtgaccatgaccctgtgctacgcccgcatcagccgggagctgtggttcaaggctgtgcccggcttccagacagagcagatcaggaagaggctgcgctgcaggaggaagacagtgctggtgctgatgtgcatcctgacagcctacgtgctgtgctgggcccccttctacggcttcaccatcgtgcgggacttcttccccaccgtgtttgtgaaggagaagcactacctgacagccttctacgtggtggagtgcatcgccatgagcaacagcatgatcaacacagtgtgctttgtgacagtgaagaacaacaccatgaagtacttcaagaagatgatgctgctgcactggaggcccagccagaggggcagcaagagcagcgctgacctggacctgcggaccaacggggtgcccaccacagaggaggtggactgcatccggctgaagtag

SEQ ID NO: 239668 - DNA, 1155 bp, Artificial Sequence
  derived and/or modified sequence
atggccgcccagaacggcaacaccagcttcacccccaacttcaaccctcctcaggatcatgcctcttccctctcttttaatttcagctatggggactacgatctccccatggacgaagacgaggatatgaccaaaacccggacatttttcgctgccaaaatagtcataggaatcgcactcgccggcataatgctcgtatgcggcattggcaacttcgtatttatcgcggccctgacacgctacaagaaacttaggaatctgactaacctgctaatcgccaacctagccatatctgactttcttgtagccatcatttgctgtccatttgaaatggattactatgtggttcgacaactgtcatgggaacacggccatgtgttatgcgcttccgtgaattacctcagaactgtgtcgctgtatgtctccactaatgccctgctggctattgccatcgacagatatctggcaatcgtgcatccacttaagcctagaatgaactatcagaccgcttcgttcctcatcgccctggtctggatggtgagcatactgattgcgatcccctcagcctattttgccaccgaaactgttctgttcatcgttaagagtcaggagaaaattttttgcgggcagatatggcctgtggatcagcagctgtattacaagagctactttctgtttatcttcggggttgagtttgtaggcccagttgtaaccatgacgctttgttacgcacgaatttcccgcgagctgtggtttaaagccgtcccgggtttccagactgagcagattagaaaacggctgagatgcagaagaaaaaccgtcctggtcttgatgtgcatactgacggcctatgtgctctgttgggccccattttacggtttcactatcgtgcgcgactttttcccaaccgtttttgtgaaggagaagcattatcttacggcgttttacgtcgtggagtgtatcgccatgagcaatagtatgatcaacacagtttgtttcgtcacagtcaagaataatacaatgaagtatttcaaaaaaatgatgcttctgcattggcgccctagccagcggggctccaagagctctgcagacctggatctgcgtactaacggtgtcccaaccactgaagaggtcgactgtatccggctcaagtag

SEQ ID NO: 239669 - DNA, 1155 bp, Artificial Sequence
  derived and/or modified sequence
atggccgctcagaacggcaatacatccttcactcctaactttaaccctccacaggaccacgcctcatccttgtcttttaatttctcctatggggactatgacctacccatggatgaggacgaggacatgacaaagaccagaactttcttcgccgcaaaaattgtcattggcatcgcattagccggaattatgctcgtttgcggtataggcaacttcgtcttcatcgccgctctcaccagatataagaaactcagaaatcttacgaacctgctcatcgccaatctcgcgatcagcgacttcctcgtggctattatctgttgtcctttcgagatggactactacgtagtaagacagctgtcatgggagcacggacacgttctttgcgccagcgtcaactatctgcggactgtgtccttgtatgtgagcacgaacgctctacttgccatagcgattgaccggtatttggccatcgtccatcccctcaagcccaggatgaattatcagacggcaagtttcttaatcgctctggtgtggatggtgtccattctgattgcaatccctagcgcttacttcgccaccgagacagtgctgtttattgtgaagtcccaggagaaaatcttttgtgggcagatttggccagtggatcagcagctctactacaagagttattttctgtttattttcggcgtggagtttgtgggccctgtggtgacaatgaccctctgttacgcccgaatttcccgcgagctttggtttaaggctgttccaggtttccagacagagcagatcaggaagagacttcgttgccgtcgcaaaaccgtgcttgtcctcatgtgtatcctgacagcctacgtgctgtgctgggctcccttttacggattcacaatcgtgagagatttttttcctactgtcttcgtaaaagagaaacactacctgacagcattttacgtggttgaatgtattgccatgtccaacagcatgatcaacactgtgtgttttgtgacagtgaaaaacaacacgatgaagtacttcaaaaaaatgatgttactgcattggagaccaagccaaagaggtagcaagtcatctgccgatcttgacctccgcactaacggcgtcccaactaccgaagaggtggactgtattcgcttgaagtag

SEQ ID NO: 239670 - DNA, 1155 bp, Artificial Sequence
  derived and/or modified sequence
atggctgctcagaatggaaacactagctttactcccaatttcaaccccccccaggatcacgctagcagcctgtcttttaacttctcttatggggactatgacctgccgatggatgaggacgaagatatgacaaaaacccgcaccttcttcgctgccaagatcgtaattgggattgctttggccgggatcatgcttgtgtgcgggatcgggaacttcgtgttcattgccgccctcactaggtacaagaaattacgtaatttgaccaacctcctgattgccaaccttgcaatttctgacttccttgtagcgataatatgctgtcctttcgagatggattattacgtcgttagacaactgtcatgggagcatgggcacgttctctgtgctagcgtaaactatttgagaacagtctcgctgtacgtgagcaccaacgctctgctcgcaatagctattgataggtaccttgctattgtgcaccctctaaaacctaggatgaactaccagacagcatcgttccttatagcccttgtctggatggttagcattctaatcgctataccttcagcctacttcgctacggagacggtgctctttatcgttaagtctcaagaaaagatcttctgtggacaaatctggccagttgatcagcagctctattacaagagttacttcttattcattttcggcgtggaattcgtgggacctgtggtgaccatgaccctgtgttacgcacgtatctcgcgcgagctgtggtttaaggccgttcccggatttcagaccgaacagatacggaaacggctgagatgccggaggaagactgtgctcgtcttaatgtgcatcctgactgcctacgtgctgtgctgggctcccttctatggcttcaccatcgtccgcgatttcttccccacagtgtttgttaaggagaaacactacttgacagccttctatgtcgtggagtgtatagccatgtccaactctatgatcaacacagtgtgcttcgtgacagtcaagaataacacaatgaaatatttcaagaagatgatgttacttcattggcggccatcccagcgcggatcaaaatcatcagcagacttggacttacgcaccaatggagtgcctaccacagaagaggtggattgcatcagactcaaatag

SEQ ID NO: 239671 - DNA, 1155 bp, Artificial Sequence
  derived and/or modified sequence
atggccgcccagaacggcaacaccagcttcacccccaacttcaaccctccacaggaccacgcatcgagcctgtctttcaatttttcttatggggattatgatctgcccatggatgaagacgaagacatgaccaagactcggactttctttgctgccaaaattgtgattgggattgctctcgccggcatcatgctcgtctgtggaattgggaatttcgttttcattgccgccttgacgagatataagaaacttcgcaacctgactaatctcctgatcgctaacctggctattagcgattttctcgtggcaattatctgctgccccttcgagatggattactatgttgttcggcagctgtcctgggaacatggacacgtgttatgcgctagcgttaactacctgcgcacagtcagcctgtatgtgagtaccaatgcactgctcgcaatcgccattgaccgctatctggcaatcgtacacccacttaagcctcgtatgaattaccagactgcgagcttcttaatcgcgctagtatggatggtctcaatcctgattgccatcccctccgcgtacttcgctaccgaaacagtgttattcatcgtaaagagccaagagaaaatcttctgcggccaaatttggcccgtggaccagcaactgtactacaagagttacttcctctttatcttcggcgtggaattcgtcgggcccgttgtaactatgacgctgtgttatgccagaattagccgagaattatggtttaaggcagtgcctggctttcaaaccgaacagatccgaaaaaggctgcggtgtaggaggaaaacagttctggtgcttatgtgcatcctgacagcatatgtgctgtgttgggctccattctacggcttcactattgtccgggattttttcccaaccgtgtttgtgaaagagaaacattatctcactgcattttacgtcgtcgaatgcattgccatgagcaactcaatgattaacaccgtatgctttgtgacggtcaaaaataacactatgaaatattttaaaaagatgatgctgctgcactggcgaccgagtcagcgcggatccaaaagcagcgccgacctcgacttaagaactaacggcgtgcccacaaccgaggaagtcgactgtatccgcctgaaatag

SEQ ID NO: 239672 - DNA, 1155 bp, Artificial Sequence
  derived and/or modified sequence
atggcagctcaaaatggcaatacctcattcaccccaaactttaacccccctcaggaccatgcaagcagtctgtcatttaatttctcttatggagactatgatctccccatggacgaggatgaggacatgacaaagaccagaaccttttttgccgcaaagattgtaattgggatagccctggcaggcattatgttggtctgcggaataggcaatttcgtctttattgcggcactgacacgttataagaaactccgtaacctcaccaatctgttgatcgcgaaccttgcaatttcagacttccttgtggccatcatctgttgcccctttgagatggattattacgtcgtgcgtcagctgagctgggagcacggacacgtgctatgcgcttcagtcaattaccttaggactgtgagtctctacgtatctacaaacgcgctgcttgcgattgccatcgacaggtatttggccatcgtacaccccctcaagcctagaatgaattaccagaccgcctcatttctcatcgcattggtgtggatggtatccatcttgattgccatccctagcgcatacttcgctactgaaacagtgcttttcatcgtgaaatcccaggaaaaaatcttttgcggtcaaatctggcccgtggaccagcagctgtattacaagagctacttcctcttcattttcggcgttgagttcgtgggcccagtggttaccatgactctgtgctacgcaagaatctctcgtgaactgtggttcaaagccgtcccaggctttcagacagagcagattcgtaaacggctgcgatgccgccgaaagacagtactggttctcatgtgcatactcactgcctacgtgttgtgttgggcccctttttatgggttcacaatcgtccgggattttttcccaactgttttcgtgaaagagaagcattacttgacagctttttacgtagtagaatgtattgctatgtctaattctatgattaataccgtctgtttcgtgactgtgaagaataacaccatgaaatacttcaaaaagatgatgctcttacactggcggccttcccagagaggctcgaagtcctcagcggacctcgatctcaggactaacggcgttccaactacagaggaagttgattgtatccggctgaaatag

SEQ ID NO: 239673 - DNA, 1155 bp, Artificial Sequence
  derived and/or modified sequence
atggcagcccagaatggaaacaccagtttcacacccaactttaatccaccccaagaccatgcctcctccctctcctttaacttcagttatggtgattatgacctccctatggatgaggatgaggacatgaccaagacccggaccttcttcgcagccaagatcgtcattggcattgcactggcaggcatcatgctggtctgcggcatcggtaactttgtctttatcgctgccctcacccgctataagaagttgcgcaacctcaccaatctgctcattgccaacctggccatctccgacttcctggtggccatcatctgctgccccttcgagatggactactacgtggtacggcagctctcctgggagcatggccacgtgctctgtgcctccgtcaactacctgcgcaccgtctccctctacgtctccaccaatgccttgctggccattgccattgacagatatctcgccatcgttcaccccttgaaaccacggatgaattatcaaacggcctccttcctgatcgccttggtctggatggtgtccattctcattgccatcccatcggcttactttgcaacagaaacggtcctctttattgtcaagagccaggagaagatcttctgtggccagatctggcctgtggatcagcagctctactacaagtcctacttcctcttcatctttggtgtcgagttcgtgggccctgtggtcaccatgaccctgtgctatgccaggatctcccgggagctctggttcaaggcagtccctgggttccagacggagcagattcgcaagcggctgcgctgccgcaggaagacggtcctggtgctcatgtgcattctcacggcctatgtgctgtgctgggcacccttctacggtttcaccatcgttcgtgacttcttccccactgtgttcgtgaaggaaaagcactacctcactgccttctacgtggtcgagtgcatcgccatgagcaacagcatgatcaacaccgtgtgcttcgtgacggtcaagaacaacaccatgaagtacttcaagaagatgatgctgctgcactggcgtccctcccagcgggggagcaagtccagtgctgaccttgacctcagaaccaacggggtgcccaccacagaagaggtggactgtatcaggctgaagtga

SEQ ID NO: 239674 - DNA, 1771 bp, Artificial Sequence
  derived and/or modified sequence
gctggaaagagctgtggggccggagcgccaactccagctggaacccagagaccctgacacgccggaggagcccgccggggcgaggaaaaaagagggacatcccccacgcagcggctctgcaagtgcaagtccgggtcctcgaggtgaaaaccgagcggcccgcctgcgcccaaccacactgtgactctcgatccggcttccggagcagcagagcgcacagaaaggaggcgccgagacagacatcaccatggcagcccagaatggaaacaccagtttcacacccaactttaatccaccccaagaccatgcctcctccctctcctttaacttcagttatggtgattatgacctccctatggatgaggatgaggacatgaccaagacccggaccttcttcgcagccaagatcgtcattggcattgcactggcaggcatcatgctggtctgcggcatcggtaactttgtctttatcgctgccctcacccgctataagaagttgcgcaacctcaccaatctgctcattgccaacctggccatctccgacttcctggtggccatcatctgctgccccttcgagatggactactacgtggtacggcagctctcctgggagcatggccacgtgctctgtgcctccgtcaactacctgcgcaccgtctccctctacgtctccaccaatgccttgctggccattgccattgacagatatctcgccatcgttcaccccttgaaaccacggatgaattatcaaacggcctccttcctgatcgccttggtctggatggtgtccattctcattgccatcccatcggcttactttgcaacagaaacggtcctctttattgtcaagagccaggagaagatcttctgtggccagatctggcctgtggatcagcagctctactacaagtcctacttcctcttcatctttggtgtcgagttcgtgggccctgtggtcaccatgaccctgtgctatgccaggatctcccgggagctctggttcaaggcagtccctgggttccagacggagcagattcgcaagcggctgcgctgccgcaggaagacggtcctggtgctcatgtgcattctcacggcctatgtgctgtgctgggcacccttctacggtttcaccatcgttcgtgacttcttccccactgtgttcgtgaaggaaaagcactacctcactgccttctacgtggtcgagtgcatcgccatgagcaacagcatgatcaacaccgtgtgcttcgtgacggtcaagaacaacaccatgaagtacttcaagaagatgatgctgctgcactggcgtccctcccagcgggggagcaagtccagtgctgaccttgacctcagaaccaacggggtgcccaccacagaagaggtggactgtatcaggctgaagtgacccactggtgtcacacaattgaaaaccccagtccagtactcagagcatcacccaccatcaaccaagttcataggctgcatgggaaatgacatctgtgttcatgcctcccccgtgccctcaagaagctgaatgctgcaaagtcgtaacatacaatgagactagacatgaaccaaatcagctgacatttactgatatccgctcgacacctactgtgtccacaatcccaacaaggagattagacacaaggagcagcaactgacatggactgaacatgtactgtgtgcaaaccacaccaatgagattagacagggacagcaggagctgacatttactcttcacctactgtaataaaaaacacttgatttgatt

SEQ ID NO: 239675 - protein, 367 aa, Artificial Sequence
  derived and/or modified sequence
MALNVAPVRDTKWLTLEVCRQFQRGTCSRSDEECKFAHPPKSCQVENGRVIACFDSLKGRCSRENCKYLHPPTHLKTQLEINGRNNLIQQKTAAAMLAQQMQFMFPGTPLHPVPTFPVGPAIGTNTAISFAPYLAPVTPGVGLVPTEILPTTPVIVPGSPPVTVPGSTATQKLLRTDKLEVCREFQRGNCARGETDCRFAHPADSTMIDTSDNTVTVCMDYIKGRCMREKCKYFHPPAHLQAKIKAAQHQANQAAVAAQAAAAAATVMAFPPGALHPLPKRQALEKSNGTSAVFNPSVLHYQQALTSAQLQQHAAFIPTGSVLCMTPATSIVPMMHSATSATVSAATTPATSVPFAATATANQIILK

SEQ ID NO: 239676 - DNA, 1104 bp, Artificial Sequence
  derived and/or modified sequence
atggccctgaacgtggcccccgtgagagacaccaagtggctgaccctggaggtgtgcagacagttccagagaggcacctgcagcagaagcgacgaggagtgcaagttcgcccacccccccaagagctgccaggtggagaacggcagagtgatcgcctgcttcgacagcctgaagggcagatgcagcagagagaactgcaagtacctgcacccccccacccacctgaagacccagctggagatcaacggcagaaacaacctgatccagcagaagaccgccgccgccatgctggcccagcagatgcagttcatgttccccggcacccccctgcaccccgtgcccaccttccccgtgggccccgccatcggcaccaacaccgccatcagcttcgccccctacctggcccccgtgacccccggcgtgggcctggtgcccaccgagatcctgcccaccacccccgtgatcgtgcccggcagcccccccgtgaccgtgcccggcagcaccgccacccagaagctgctgagaaccgacaagctggaggtgtgcagagagttccagagaggcaactgcgccagaggcgagaccgactgcagattcgcccaccccgccgacagcaccatgatcgacaccagcgacaacaccgtgaccgtgtgcatggactacatcaagggcagatgcatgagagagaagtgcaagtacttccacccccccgcccacctgcaggccaagatcaaggccgcccagcaccaggccaaccaggccgccgtggccgcccaggccgccgccgccgccgccaccgtgatggccttcccccccggcgccctgcaccccctgcccaagagacaggccctggagaagagcaacggcaccagcgccgtgttcaaccccagcgtgctgcactaccagcaggccctgaccagcgcccagctgcagcagcacgccgccttcatccccaccggcagcgtgctgtgcatgacccccgccaccagcatcgtgcccatgatgcacagcgccaccagcgccaccgtgagcgccgccaccacccccgccaccagcgtgcccttcgccgccaccgccaccgccaaccagatcatcctgaagtag

SEQ ID NO: 239677 - DNA, 4669 bp, Artificial Sequence
  derived and/or modified sequence
tgaaggtaaaattttccagatacggcagacggctttcagagtacaataaacagggaatgagaactatttacatggaagtttctttctcatgatgcggtggagaagcctcggccacttggttctgccagatgttcctggggttactgtaaatgggaaggacaggcagagctaaacaaggtttatcatttaaaagtgcctgtgtgaagtcacttttgctggaaaactgcagcttgggagctttctttgtattcacatcccactcttctgtcaagtacactttaccctgaccttatgagtggatgaagatacctcagttgtctgactttgccaattgcttaatttcagaatttaaaaaggggaaagaaaaacatcctgctaaaatatgaacatctgagtgtcttattttccaacatcgtcaatagctgtgagcgtcagcattaaatattctcccaaggagtgccatgatattgaagtcactttattaataacagctgtatctgcaaaacagtcaagagactcggacgttgaaagccagagatgacactgagcatgcttttattgcggcctaccatctttaagtgggacatattgattgatgagtgattgcctgtccatacactctctcatcatcctgttccttggattggacttcactaagcaatttatcactcaccttcagacttacatgtgggagttttcacaacagtagttttggaatcattagaacttggattgatttcatcatttaacagaaacaaacagcccaaattactttatcaccatggctttgaacgttgccccagtcagagatacaaaatggctgacattagaagtctgcagacagtttcaaagaggaacatgctcacgctctgatgaagaatgcaaatttgctcatccccccaaaagttgtcaggttgaaaatggaagagtaattgcctgctttgattccctaaagggccgttgttcgagagagaactgcaagtatcttcaccctccgacacacttaaaaactcaactagaaattaatggaaggaacaatttgattcagcaaaaaactgcagcagcaatgcttgcccagcagatgcaatttatgtttccaggaacaccacttcatccagtgcccactttccctgtaggtcccgcgatagggacaaatacggctattagctttgctccttacctagcacctgtaacccctggagttgggttggtcccaacggaaattctgcccaccacgcctgttattgttcccggaagtccaccggtcactgtcccgggctcaactgcaactcagaaacttctcaggactgacaaactggaggtatgcagggagttccagcgaggaaactgtgcccggggagagaccgactgccgctttgcacaccccgcagacagcaccatgatcgacacaagtgacaacaccgtaaccgtttgtatggattacataaaggggcgttgcatgagggagaaatgcaaatattttcaccctcctgcacacttgcaggccaaaatcaaagctgcgcagcaccaagccaaccaagctgcggtggccgcccaggcagccgcggccgcggccacagtcatggcctttccccctggtgctcttcatcctttaccaaagagacaagcacttgaaaaaagcaatggtaccagcgcggtctttaaccccagcgtcttgcactaccagcaggctctcaccagcgcacagttgcagcaacacgccgcgttcattccaacagggtcagttttgtgcatgacacccgctaccagtattgtacccatgatgcacagcgctacgtccgccactgtctctgcagcaacaactcctgcaacaagtgtccccttcgcagcaacagccacagccaatcagataattctgaaataatcagcagaaacggaatggaatgccaagaatctgcattgagaataactaaacattgttactgtacatactatcctgtttcctcctcaatagaattgccacaaactgcatgctaaataaagatgtagttcttctggacagaccacaactctaagaagctagtgctgctatctcatatatgagtattaaatatggtatgcttagtatattccaacctaagatagttaactacctgagaccagctgtgatgtttaaagacataaaggataaagtttacttttaaagggtttctaaacatagtttctgtcctaggaatattgtcttatctccataactatagctgatgcagaaagtccagccagtttactcatttcgattcagaatatttcaaatttagcaataaacaattagcattagttaaaaaagaaacatattccaagggcaggttcgattctagctctaattactgtcatgtcatttacccactggatcaaagggtatgtttcacttcttgacaatataaatgctgcagcaaagatgagaggtgaagtaaaaccgatacctgtcctgcaggtctaaaatttgaatggaaattcaagcacaagtactggggacacatcaaagtgtggtgtttggtttgcctggagatgccacgttgaatcatgtgattctagattaacattaaatagattgaaaaagaaactttgcacggtatgagcttcataccccaccaaacaaagtcttgaaggtattattttacaagtatatttttaaagttgttttataagagagactttgtagaagtgcctagattttgccagacttcatccagcttgacaagattgagaggcccatgccaacagtctaatctaagagattagtctttcaaactcaccatccagttgcctgttacagaataactcttcttaactaaaaacctagtcaaacaaggaagctgtaggtgaggagatctgtataatattctaatttaagtaagtttgagtttagtcactgcaaatttgactgtgactttaatctaaattactatgtaaacaaaaagtagatagtttcactttttaaaaaatccattactgttttgcatttcaaaagttggattaaagggttgtaactgactacagcatggaaaaaaatagttcttttaattctttcaccttaaagcatattttatgtctcaaaagtataaaaaactttaatacaagtacatacatattatatatacacatacatatatatactatatatggatgaaacatattttaatgttgtttacttttttaaatacttggttgatcttcaaggtaatagcgatacaattaaattttgttcagaaagtttgttttaaagtttattttaagcactatcgtaccaaatatttcatatttcacattttatatgttgcacatagcctatacagtacctacatagtttttaaattattgtttaaaaaacaaaacagctgttataaatgaatattatgtgtaattgtttcaaacatccattttctttgtgaacatattagtgattgaagtattttgacttttgagattgaatgtaaaatattttaaatttgggatcatcgcctgttctgaaaactagatgcaccaaccgtatcattatttgtttgaggaaaaaaagaaatctgcattttaattcatgttggtcaaagtcgaattactatctatttatcttatatcgtagatctgataaccctatctaaaagaaagtcacacgctaaatgtattcttacatagtgcttgtatcgttgcatttgttttaatttgtggaaaagtattgtatctaacttgtattactttggtagtttcatctttatgtattattgatatttgtaattttctcaactataacaatgtagttacgctacaacttgcctaaaacattcaaacttgttttcttttttctgtttttttctttgttaattcatttaaactcattgaaaacatagtatacattactaaaaggtaaattatgggaatcactgaaatatttttgtagattaattgttgtaacattgtctttcttttttttcttttgtttcatgattttgatttttaaaattattagcacacaactattttcagccctttaataatggagcatcaaaaacatcacctgtaaccccaagcaaatatagaagactgtattttttactatgatatccattttccagaattgtgattacaatatgcaaagagtcataaatatgccatttacaataaggaggaggcaaggcaaatgcatagatgtacaaatatatgtacaacagattttgctttttatttatttataatgtaattttatagaataattctgggatttgagaggatctaaaactatttttctgtataaatattatttgccaaaagtttgtttatattcagaagtctgactatgatgaataaatcttaaatgctttgtttaattaaaaaacaaaaatcaccaatatccaagacatgaagatatcagttcaacaaatactgtagttaagagactaactctccacttgtatgggaactacatttcactcttggttttcaggatataacagcacttcaccgaaatattctttcagccataccactggtaacatttctactaaatctttctgtaacacttaaagaattccctcattcattaccttacagtgtaaacaggagtctaatttgtatcaatactatgttttggttgtaatattcagttcactcacccaatgtacaaccaatgaaataaaagaagcatttaaaagga

SEQ ID NO: 239678 - DNA, 1104 bp, Artificial Sequence
  derived and/or modified sequence
atggcccttaatgtcgcaccagtacgagacaccaagtggttgactctggaggtgtgtcggcaattccagaggggaacatgtagcaggagtgacgaagaatgcaaatttgcccaccctccaaagagttgtcaggtggagaatggcagggtgatcgcctgttttgactctcttaaaggcagatgcagcagggagaactgcaaatatctgcaccctccaacacacttgaagactcaactggagatcaatgggagaaacaatcttatccagcagaaaactgccgccgcgatgctggcccagcagatgcagttcatgttccctgggacccctctccatcccgtgcccacatttcccgttggaccggctatcggcaccaataccgcaatttccttcgctccctatctggcgccagtcaccccaggtgtgggactggtgcctaccgagatcttaccaacaacacccgtgatcgtgcctggaagtcctccggtgactgtgcctgggtcgacagctacgcagaagctgcttcgcactgataaactggaagtctgcagagagttccagagaggtaattgcgctcgcggcgagaccgactgtagatttgctcaccctgcagattcgactatgattgacacgtcagacaatacagtgaccgtgtgtatggattatatcaaaggtaggtgtatgcgggagaaatgtaagtactttcacccaccagctcatctccaggctaagatcaaagccgctcagcatcaggccaaccaggctgccgttgccgcccaagcagctgccgctgccgcaaccgttatggccttccctcctggcgccctgcacccactgccaaagagacaagcactggagaaaagcaacgggacctctgccgtgtttaacccttccgtgttgcattatcaacaggcacttaccagcgcacaactccaacagcacgccgcattcattcccactggctctgttctgtgtatgactcctgcaacaagcatcgtaccgatgatgcatagtgctacttctgctactgtgagtgccgctaccacaccagcgacttccgtaccgttcgcggccactgcgaccgctaatcaaatcatcctgaagtag

SEQ ID NO: 239679 - DNA, 1104 bp, Artificial Sequence
  derived and/or modified sequence
atggccctgaatgtggcccctgtgcgggacaccaagtggctgaccctggaggtgtgccggcagttccagaggggcacctgcagcagaagtgatgaggagtgcaagtttgcccacccccccaagagctgccaggtggagaatggccgggtgattgcctgctttgacagcctgaagggccgctgcagccgggagaactgcaagtacctgcacccccccacccacctgaagacccagctggagatcaatggaagaaacaacctgatccagcagaagacagctgctgccatgctggcccagcagatgcagttcatgtttcctggcacccccctgcaccctgtgcccaccttccctgtgggccctgccatcggcaccaacacagccatcagctttgccccctacctggcccctgtgaccccaggagtgggcctggtgcccacagagatcctgcccaccacccctgtgattgtgcccggcagcccccctgtgacagtgcccggcagcacagccacccagaagctgctgaggacagacaagctggaggtgtgccgggagttccagaggggcaactgtgcccggggggagacagactgccgctttgcccaccctgctgacagcaccatgattgacaccagtgacaacacagtgacagtgtgcatggactacatcaagggccgctgcatgagggagaagtgcaagtacttccaccccccagcccacctgcaggccaagatcaaggccgcccagcaccaggccaaccaggccgctgtggccgcccaggccgctgctgctgctgccaccgtgatggccttccccccaggggccctgcaccccctgcccaagaggcaggccctggagaagagcaatggcaccagcgctgtgttcaaccccagcgtgctgcactaccagcaggccctgaccagcgcccagctgcagcagcacgccgccttcatccccactggatctgtgctgtgcatgaccccagccaccagcatcgtgcccatgatgcacagcgccaccagcgccaccgtgtctgctgccaccaccccagccacctctgtgccctttgctgccacagccacagccaaccagatcatcctgaagtag

SEQ ID NO: 239680 - DNA, 1104 bp, Artificial Sequence
  derived and/or modified sequence
atggccctgaacgtggcccccgtgcgggacaccaagtggctgaccctcgaggtgtgccgtcagttccagaggggcacctgcagcaggtcagacgaggagtgtaaattcgcccaccctcccaaaagctgccaagtcgagaatggcagagtaatagcgtgttttgactcattgaagggcaggtgtagtagggaaaattgtaaatacctgcatccccctacccacctgaaaacccagctggagattaatggacggaacaacctaatccaacagaagactgctgctgcgatgctcgcccaacaaatgcagttcatgttcccgggcacccccctccaccccgtcccaaccttcccggttgggccggccattggaaccaacacagccatttcgtttgctccctatctagcacctgtgacgcctggcgtgggacttgtgcctaccgaaattttgcccaccacaccggtcatcgttccagggtccccacctgtcacagtcccaggaagtactgccactcaaaaacttctgcggacagataagctcgaagtgtgtcgagagttccagcgcggcaactgtgcccggggcgaaacagactgtcggttcgcacacccagccgatagcaccatgatcgacacatcagacaacacagttaccgtttgtatggactacattaagggacgatgtatgagagagaaatgtaagtattttcatcccccagcacacttgcaggccaaaatcaaggcagcccagcaccaggcgaatcaggctgctgtcgccgcccaggccgccgctgctgccgccactgtcatggcatttcccccaggggctttgcaccccttgcccaagcgccaagccctagagaaaagcaatggaacctcggctgtctttaatccatctgttttacattaccagcaagctttgacatccgcccagttgcaacagcatgccgccttcatacccacaggttcagtgctatgtatgacgccagctacatctatagtgcctatgatgcatagcgctacgtccgccacagtgtcagccgctacgacccctgcaacttcagttccttttgcagccacagccacagcaaaccagattatcctcaaatag

SEQ ID NO: 239681 - DNA, 1104 bp, Artificial Sequence
  derived and/or modified sequence
atggccctcaatgttgccccagtcagggataccaaatggctgaccctcgaagtgtgcagacaattccagcggggtacgtgtagtcgcagcgacgaggaatgcaagttcgcccatccccctaagtcttgccaggtcgaaaatggccgtgtgattgcgtgctttgatagtctgaaggggaggtgtagtcgggagaattgtaaatacctgcatccacctacacaccttaaaacacaactggagatcaacggcaggaataacctgattcaacagaaaacagctgctgccatgttagctcagcagatgcaattcatgtttcctgggacacctctacaccccgttcccacgtttcctgttggcccagccattgggactaataccgcaatcagctttgccccttacctggcgccagttacccctggagtggggctagtgcctaccgaaatattacctacgactcctgttatcgtacctggctctccacccgtcacagtgcccggtagcactgctacccaaaagctgctccggaccgataaattagaagtgtgcagggaatttcagcgcggaaactgcgcccgaggcgagactgactgtagattcgctcacccagcagatagcactatgatcgatacctccgacaacacggtgaccgtatgtatggattacatcaagggccgttgtatgagagagaagtgcaaatacttccaccctccagcacatttacaggcaaaaatcaaagccgctcagcatcaggcgaaccaggcagcagtggccgcacaagccgctgctgctgctgctactgtgatggcatttccacccggagccttgcatcctctgcctaagcggcaagcgctcgaaaagtccaacgggacgagcgctgtcttcaacccaagtgtgctgcactaccaacaggccctgacctcagcacagttacagcagcacgccgctttcatccccactggctccgtgctgtgtatgacccccgctaccagcatcgtgcccatgatgcactcagcaacctctgcgactgttagcgctgctaccacccctgcaacgtcggtaccatttgctgccactgccactgccaaccagatcatcctgaaatag

SEQ ID NO: 239682 - protein, 178 aa, Artificial Sequence
  derived and/or modified sequence
MSPSGRLCLLTIVGLILPTRGQTLKDTTSSSSADSTIMDIQVPTRAPDAVYTELQPTSPTPTWPADETPQPQTQTQQLEGTDGPLVTDPETHKSTKAAHPTDDTTTLSERPSPSTDVQTDPQTLKPSGFHEDDPFFYDEHTLRKRGLLVAAVLFITGIIILTSGKCRQLSRLCRNRCR

SEQ ID NO: 239683 - protein, 107 aa, Artificial Sequence
  derived and/or modified sequence
MQTLSNIPCFCLHGSLLPSTDLATLSAHPTDDTTTLSERPSPSTDVQTDPQTLKPSGFHEDDPFFYDEHTLRKRGLLVAAVLFITGIIILTSGKCRQLSRLCRNRCR

SEQ ID NO: 239684 - protein, 96 aa, Artificial Sequence
  derived and/or modified sequence
MSPSGRLCLLTIVGLILPTRGQTLKDTTSSSSADSTIMDIQVPTRAPDAVYTELQPTSPTPTWPADGAYITAYGVTHFLMNMLAVSSFFCLHTAPQ

SEQ ID NO: 239685 - DNA, 537 bp, Artificial Sequence
  derived and/or modified sequence
atgagccccagcggcagactgtgcctgctgaccatcgtgggcctgatcctgcccaccagaggccagaccctgaaggacaccaccagcagcagcagcgccgacagcaccatcatggacatccaggtgcccaccagagcccccgacgccgtgtacaccgagctgcagcccaccagccccacccccacctggcccgccgacgagaccccccagccccagacccagacccagcagctggagggcaccgacggccccctggtgaccgaccccgagacccacaagagcaccaaggccgcccaccccaccgacgacaccaccaccctgagcgagagacccagccccagcaccgacgtgcagaccgacccccagaccctgaagcccagcggcttccacgaggacgaccccttcttctacgacgagcacaccctgagaaagagaggcctgctggtggccgccgtgctgttcatcaccggcatcatcatcctgaccagcggcaagtgcagacagctgagcagactgtgcagaaacagatgcagatag

SEQ ID NO: 239686 - DNA, 324 bp, Artificial Sequence
  derived and/or modified sequence
atgcagaccctgagcaacatcccctgcttctgcctgcacggcagcctgctgcccagcaccgacctggccaccctgagcgcccaccccaccgacgacaccaccaccctgagcgagagacccagccccagcaccgacgtgcagaccgacccccagaccctgaagcccagcggcttccacgaggacgaccccttcttctacgacgagcacaccctgagaaagagaggcctgctggtggccgccgtgctgttcatcaccggcatcatcatcctgaccagcggcaagtgcagacagctgagcagactgtgcagaaacagatgcagatag

SEQ ID NO: 239687 - DNA, 537 bp, Artificial Sequence
  derived and/or modified sequence
atgtctccctctggcagattgtgtttactgacgattgttggcttgattttacccacaagggggcaaaccctaaaggataccacaagctcttcttccgcagatagcaccatcatggatattcaggtgcccacccgcgcccccgacgctgtgtacacagagctgcagcccacatctccgacccccacttggcctgcagacgagacaccccagccacagacccagactcagcaactggagggaactgatggccctctggtgaccgaccccgagactcataagtctaccaaggccgcgcatcccaccgatgatactacaaccctatctgaacgccccagcccctctaccgacgtccaaactgatccccaaacactgaaaccctcgggcttccacgaagacgacccatttttctatgacgaacacacattgagaaaacgaggccttttggtggccgccgtgcttttcataaccggaataattatacttacgtcaggcaagtgccgtcaactgagccgcctttgcaggaatagatgtagatag

SEQ ID NO: 239688 - DNA, 324 bp, Artificial Sequence
  derived and/or modified sequence
atgcaaactctctcaaacattccgtgcttttgccttcacgggtctttgctcccatctaccgacctggctactctctcagcgcaccccactgacgacaccacaaccttatctgagcgtccatctcctagtacagacgtccagactgacccacagaccctgaaaccatcgggttttcacgaggatgacccattcttttatgatgaacataccctgcggaagcggggccttcttgtggccgccgtgctattcatcaccggaatcattattcttacttctgggaaatgccgccaactcagtcgcctctgcagaaataggtgccgttag

SEQ ID NO: 239689 - DNA, 537 bp, Artificial Sequence
  derived and/or modified sequence
atgtccccgagtgggcgtctctgtctgctgaccattgtcggcctaattctccctacaagggggcaaaccctgaaagacacaacctcatcctcctctgcagattccactatcatggacattcaggtgcctacccgagcgcctgatgcggtgtatacggagctgcagcccaccagccccaccccaacatggccagcagacgagacacctcagcctcagacgcagacgcagcagctggagggaaccgatggacctctggtcaccgatcccgagactcataagagcaccaaggcggctcacccaactgacgacaccaccactctctccgagcgtccctcccctagcaccgacgtgcagaccgaccctcagactttaaagccatcgggattccatgaggatgacccatttttctatgacgaacataccctgaggaagagaggccttctggtcgctgccgttctgttcatcactggcataataatccttacgtcagggaagtgcagacagctatcaaggctttgccgcaaccggtgcaggtag

SEQ ID NO: 239690 - DNA, 537 bp, Artificial Sequence
  derived and/or modified sequence
atgagtcctagcgggcgcctctgtctgctaacaattgtcggcctgatcctgccaactcgaggtcagactttaaaagatactacgagcagctcctcggctgactcaaccataatggacattcaggtccctactagagccccagatgcggtgtatacagagctacagccaactagcccaacccctacatggccagccgacgagacacctcagccacaaactcagacacagcaacttgaggggaccgacggcccactggttacggatcccgaaactcacaagagcaccaaagcagcccatcccaccgacgataccaccacgttaagcgagcgcccatcaccctccacggatgtccagaccgacccccagacccttaagccgtccggcttccacgaggacgatccttttttctacgacgaacatacgcttcggaagagaggcctgttggtggccgcagtgctgtttatcacgggcatcataattctgactagtggtaagtgtcggcagctctcccgcctgtgtcgcaatcggtgcaggtag

SEQ ID NO: 239691 - DNA, 537 bp, Artificial Sequence
  derived and/or modified sequence
atgagtccatcgggaaggctgtgcctgttgaccatcgtcggtttgattctgccaacccgcggacagacgctgaaggacactacgtcgtcctcaagtgccgactcaaccattatggacatacaggtgcctacccgagctccggacgcagtgtacaccgagctgcagccaacgtctccgacacccacttggcctgccgacgaaaccccccagccccagacacagacccagcagttggaagggacggacggtccgctcgtaacagaccccgagacccataaatccactaaagcagcccacccaaccgatgatactaccacactgtctgagagaccttctccaagcacagacgttcaaaccgatccccagacgctcaaaccttccggcttccacgaggacgatccttttttttacgatgagcatacactcaggaagcgaggccttttggtggctgctgtgctatttatcactggcatcattatattgactagtggtaagtgtcgtcaactgtcccggctgtgtcgcaatcggtgcaggtag

SEQ ID NO: 239692 - DNA, 1580 bp, Artificial Sequence
  derived and/or modified sequence
tccacgaggctgccggcttaggacccccagctccgacgtaagtccctctcgtgcgccacctccatccgctgcccctctgcccacgggccgggctcaggtgggtaggggtttgaccccttccgctcctctccgccccccatccacgcccacatctctctgcctcctctcctgggctacagtgggccgctctgcctcgctcccgcccgcctgcctcagtctccccagctctctgccacccccctcggaccagtgcctcttaggtctctccagcgcgccatccctgcaaggcggcccctgacaccaactcactttttcctctgagcgcgggaggcgttactcactcttcctccttcccctcctcgccgactcccgggctctgggcccctgggggagggaagaggcctcctatctactcctctgccccagtcccctccttgcgtcagtcccagtgagggataagcgcctggcggaaggcgcagggaggtgtttctctgcttcaggagtgcccgccggcccttgcagctgctggaagacccatttatctcatgcttcttgttttctttggggacctgcaggggaaggaagcagggtgacggtttggtatccccacctaagaccctcccctttcccctgaggccagccgtcagcccctggcagggggtcttggaagccagaggtttttgctcagggcagggaaagggctgcaggatccccgggggctgccggaggtcggtctcactgacatcatggctgaccccagcatcgcctggtcccacagatgtcgccctctggtcgcctgtgtcttctcaccatcgttggcctgattctccccaccagaggacagacgttgaaagataccacgtccagttcttcagcagactcaactatcatggacattcaggtcccgacacgagccccagatgcagtctacacagaactccagcccacctctccaaccccaacctggcctgctgatgaaacaccacaaccccagacccagacccagcaactggaaggaacggatgggcctctagtgacagatccagagacacacaagagcaccaaagcagctcatcccactgatgacaccacgacgctctctgagagaccatccccaagcacagacgtccagacagacccccagaccctcaagccatctggttttcatgaggatgaccccttcttctatgatgaacacaccctccggaaacgggggctgttggtcgcagctgtgctgttcatcacaggcatcatcatcctcaccagtggcaagtgcaggcagctgtcccggttatgccggaatcgttgcaggtgagtccatcagaaacaggagctgacaacctgctgggcacccgaagaccaagccccctgccagctcaccgtgcccagcctcctgcatcccctcgaagagcctggccagagagggaagacacagatgatgaagctggagccagggctgccggtccgagtctcctacctcccccaaccctgcccgcccctgaaggctacctggcgccttgggggctgtccctcaagttatctcctctgctaagacaaaaagtaaagcactgtggtctttg

SEQ ID NO: 239693 - DNA, 632 bp, Artificial Sequence
  derived and/or modified sequence
tgcacaccagctgtgtagatgtgggagaggggtttcttccagatgcagactctcagtaatatcccttgtttctgcctccatggctcactcctgccctccactgatctggccactctctcagctcatcccactgatgacaccacgacgctctctgagagaccatccccaagcacagacgtccagacagacccccagaccctcaagccatctggttttcatgaggatgaccccttcttctatgatgaacacaccctccggaaacgggggctgttggtcgcagctgtgctgttcatcacaggcatcatcatcctcaccagtggcaagtgcaggcagctgtcccggttatgccggaatcgttgcaggtgagtccatcagaaacaggagctgacaacctgctgggcacccgaagaccaagccccctgccagctcaccgtgcccagcctcctgcatcccctcgaagagcctggccagagagggaagacacagatgatgaagctggagccagggctgccggtccgagtctcctacctcccccaaccctgcccgcccctgaaggctacctggcgccttgggggctgtccctcaagttatctcctctgctaagacaaaaagtaaagcactgtggtctttgc

SEQ ID NO: 239694 - DNA, 872 bp, Artificial Sequence
  derived and/or modified sequence
ggacgcagcagccaccgccgcgtccctctctccacgaggctgccggcttaggacccccagctccgacatgtcgccctctggtcgcctgtgtcttctcaccatcgttggcctgattctccccaccagaggacagacgttgaaagataccacgtccagttcttcagcagactcaactatcatggacattcaggtcccgacacgagccccagatgcagtctacacagaactccagcccacctctccaaccccaacctggcctgctgatgaaacaccacaaccccagacccagacccagcaactggaaggaacggatgggcctctagtgacagatccagagacacacaagagcaccaaagcagctcatcccactgatgacaccacgacgctctctgagagaccatccccaagcacagacgtccagacagacccccagaccctcaagccatctggttttcatgaggatgaccccttcttctatgatgaacacaccctccggaaacgggggctgttggtcgcagctgtgctgttcatcacaggcatcatcatcctcaccagtggcaagtgcaggcagctgtcccggttatgccggaatcgttgcaggtgagtccatcagaaacaggagctgacaacctgctgggcacccgaagaccaagccccctgccagctcaccgtgcccagcctcctgcatcccctcgaagagcctggccagagagggaagacacagatgatgaagctggagccagggctgccggtccgagtctcctacctcccccaaccctgcccgcccctgaaggctacctggcgccttgggggctgtccctcaagttatctcctctgctaagacaaaaagtaaagcactgtggtctttgccc

SEQ ID NO: 239695 - DNA, 897 bp, Artificial Sequence
  derived and/or modified sequence
tgggctacagtgggccgctctgcctcgctcccgcccgcctgcctcagtctccccagctctctgccacccccctcggaccagtgcctcttagatgtcgccctctggtcgcctgtgtcttctcaccatcgttggcctgattctccccaccagaggacagacgttgaaagataccacgtccagttcttcagcagactcaactatcatggacattcaggtcccgacacgagccccagatgcagtctacacagaactccagcccacctctccaaccccaacctggcctgctgatgaaacaccacaaccccagacccagacccagcaactggaaggaacggatgggcctctagtgacagatccagagacacacaagagcaccaaagcagctcatcccactgatgacaccacgacgctctctgagagaccatccccaagcacagacgtccagacagacccccagaccctcaagccatctggttttcatgaggatgaccccttcttctatgatgaacacaccctccggaaacgggggctgttggtcgcagctgtgctgttcatcacaggcatcatcatcctcaccagtggcaagtgcaggcagctgtcccggttatgccggaatcgttgcaggtgagtccatcagaaacaggagctgacaacctgctgggcacccgaagaccaagccccctgccagctcaccgtgcccagcctcctgcatcccctcgaagagcctggccagagagggaagacacagatgatgaagctggagccagggctgccggtccgagtctcctacctcccccaaccctgcccgcccctgaaggctacctggcgccttgggggctgtccctcaagttatctcctctgctaagacaaaaagtaaagcactgtggtctttgcccc

SEQ ID NO: 239696 - DNA, 907 bp, Artificial Sequence
  derived and/or modified sequence
tctctccacgaggctgccggcttaggacccccagctccgacgtaagtccctctcgtgcgccacctccatccgctgcccctctgcccacgggccgggctcagatgtcgccctctggtcgcctgtgtcttctcaccatcgttggcctgattctccccaccagaggacagacgttgaaagataccacgtccagttcttcagcagactcaactatcatggacattcaggtcccgacacgagccccagatgcagtctacacagaactccagcccacctctccaaccccaacctggcctgctgatgaaacaccacaaccccagacccagacccagcaactggaaggaacggatgggcctctagtgacagatccagagacacacaagagcaccaaagcagctcatcccactgatgacaccacgacgctctctgagagaccatccccaagcacagacgtccagacagacccccagaccctcaagccatctggttttcatgaggatgaccccttcttctatgatgaacacaccctccggaaacgggggctgttggtcgcagctgtgctgttcatcacaggcatcatcatcctcaccagtggcaagtgcaggcagctgtcccggttatgccggaatcgttgcaggtgagtccatcagaaacaggagctgacaacctgctgggcacccgaagaccaagccccctgccagctcaccgtgcccagcctcctgcatcccctcgaagagcctggccagagagggaagacacagatgatgaagctggagccagggctgccggtccgagtctcctacctcccccaaccctgcccgcccctgaaggctacctggcgccttgggggctgtccctcaagttatctcctctgctaagacaaaaagtaaagcactgtggtctttgcccc

SEQ ID NO: 239697 - DNA, 537 bp, Artificial Sequence
  derived and/or modified sequence
atgagccccagcggccgcctgtgcctgctgaccatcgtgggcctcatcctgcccacccggggccagaccctgaaggacaccaccagcagcagcagcgctgacagcaccatcatggacatccaggtgcccacccgggccccagatgctgtgtacacagagctgcagcccaccagccccacccccacctggccagcagatgagaccccccagccccagacccagacccagcagctggagggcacagatggccccctggtgacagatcctgagacccacaagagcaccaaggccgcccaccccacagatgacaccaccaccctgtctgagcggcccagccccagcacagatgtgcagacagacccccagaccctgaagcccagcggcttccatgaagatgaccccttcttctatgatgagcacaccctgaggaagaggggcctgctggtggccgctgtgctcttcatcaccggcatcatcatcctgaccagcgggaaatgtcggcagctgagccggctgtgcaggaaccgctgcaggtag

SEQ ID NO: 239698 - DNA, 324 bp, Artificial Sequence
  derived and/or modified sequence
atgcagaccctgagcaacatcccctgcttctgcctgcacggcagcctgctgcccagcacagacctggccaccctgagcgcccaccccacagatgacaccaccaccctgtctgagcggcccagccccagcacagatgtgcagacagacccccagaccctgaagcccagcggcttccatgaagatgaccccttcttctatgatgagcacaccctgaggaagaggggcctgctggtggccgctgtgctcttcatcaccggcatcatcatcctgaccagcggcaagtgccggcagctgagccggctgtgcaggaaccgctgcaggtag

SEQ ID NO: 239699 - DNA, 537 bp, Artificial Sequence
  derived and/or modified sequence
atgagccccagcggccggctgtgcctgctgaccatcgtgggcctgattctccctaccagaggacagacactcaaagataccactagttcctcctcagcagattcgacaataatggatattcaggtcccgacgcgtgctcccgacgcggtttatacagagctacagccgacctcccctacccctacgtggccggcagacgagaccccccaaccgcagacacaaacccagcaactcgaaggtaccgatggtcccctcgtgactgaccccgagacacataagtcgacgaaggccgcacaccccaccgatgacacaactacactgtccgaacggccttcaccttccaccgacgtgcagacagatcctcagacccttaagccgtccggcttccacgaggatgaccctttcttttacgatgagcatacacttcgaaagaggggcctccttgtcgccgccgtgctgttcattacgggaatcataatcctcactagtgggaagtgccgacagctttctcgcctgtgccgtaaccgatgcaggtag

SEQ ID NO: 239700 - DNA, 324 bp, Artificial Sequence
  derived and/or modified sequence
atgcagaccctgagcaacatcccctgcttctgcctgcacggcagcttactgccgtcgaccgatctggcgaccctcagcgctcatccaactgatgacacgactactctcagcgaacggccttccccaagcacagatgtacagacagacccacagactcttaagccttctggcttccacgaagacgatccattcttctatgatgaacacactctgaggaaaagaggcctcctcgttgcagcggtgctttttattacgggtattataatcctgacctcaggaaaatgcaggcagctgtcccgcttgtgcagaaacagatgccgatag

SEQ ID NO: 239701 - DNA, 537 bp, Artificial Sequence
  derived and/or modified sequence
atgagccccagcggccggctgtgcctgctgaccatcgtgggcctgatccttccaactcgaggacagactctgaaagacacaacctcctcgagttctgccgatagcacaataatggatatccaggttcccacaagggctcccgacgcagtgtacaccgaactacagccgacctcacccacccctacctggccagcggatgaaaccccgcagccccagactcaaacccagcagcttgaggggactgacggaccgttagttaccgatcccgaaacacataagagtacaaaagctgctcatccaaccgatgatacaaccacactgagcgagcggccatccccatctacagacgtgcagacagacccccaaacgcttaagccatcgggtttccacgaagacgaccctttcttttacgatgaacatacactgcgaaagcgggggttgctggtggctgctgtgctgtttattactggcatcattatcctgacatccggtaaatgtcggcaactgtctcgcctttgtcgcaatcggtgccggtag

SEQ ID NO: 239702 - DNA, 537 bp, Artificial Sequence
  derived and/or modified sequence
atgagccccagcggccggctgtgcctgctgaccatcgtgggcctgatccttccaacaagaggccagacactcaaggacactacctcatcttcctcagcagattctaccatcatggatattcaggtgccaaccagagcccccgacgctgtgtacacagagctccagcctacatcaccgactcctacatggcccgctgacgaaacaccacaaccgcagactcaaacgcagcagcttgaaggaactgacggccccctcgtgaccgatcccgagactcacaagtctaccaaagcagcccaccctacagacgacacaacgaccctgagtgagcgcccctcaccaagcaccgatgtgcagacagacccgcagactctaaaaccttccgggttccatgaggacgacccgttcttctacgatgagcacacattgaggaaacgtggcctcttggtagccgcagttttgttcatcacaggcattattattctcacttcaggcaaatgccgccagttgtccaggctgtgccgtaataggtgcaggtag

SEQ ID NO: 239703 - DNA, 537 bp, Artificial Sequence
  derived and/or modified sequence
atgagccccagcggccggctgtgcctgctgaccatcgtgggcctgatcctgcctacacggggccaaaccctcaaagacactacctcatcctcctccgccgacagtacaataatggatatccaggtcccaactagagcccccgacgccgtttatactgagctgcagccaactagccctacgccgacttggcccgccgatgagacaccgcaaccgcagacacaaacccaacagctggaaggtaccgatgggcccctggttacagatcccgagactcacaagtccactaaagccgcccatccaactgatgacaccaccaccctgtccgagcgaccttctccaagcaccgacgtgcaaaccgatcctcagacattgaagcccagtgggtttcatgaagatgacccctttttctacgatgagcacacgttgagaaagaggggcttgttggtagccgccgtgctgttcatcacaggaatcatcattctgacaagcgggaagtgtcggcagttgtcgagattatgccgcaacaggtgccgctag

SEQ ID NO: 239704 - DNA, 537 bp, Artificial Sequence
  derived and/or modified sequence
atgtccccgagtgggcgactgtgcctcctcacaatcgtgggactcatactcccgacgaggggtcagacactgaaggacacgacgagcagcagcagcgcggactcaactatcatggatatccaggtccctactcgagctccagatgccgtttacactgagttgcagcctactagtccgacaccaacttggcccgctgatgaaacaccacagccgcagacacagacacagcagctggagggaaccgacgggcctttagtcacggaccccgagacccataagtcaactaaggctgctcacccgacagatgatactaccacactgagtgagcggccatctccctccaccgatgtgcagacggatccacagacactcaaaccatcagggttccatgaggacgatccttttttctatgatgaacataccttgagaaaacggggtctcctggttgccgcagtgttattcatcacaggtataatcatacttacgtccggcaagtgcagacagctcagtaggctgtgcaggaatagatgtcgatag

SEQ ID NO: 239705 - DNA, 324 bp, Artificial Sequence
  derived and/or modified sequence
atgcagacactgagtaatattccatgtttctgcctccatggcagcctgctcccatcgacagaccttgctacgctttcagctcacccgaccgacgacacaaccacgttgtcagagcgcccttcacctagcactgatgtgcagaccgaccctcaaaccctgaaaccgtccggttttcacgaagatgatccgtttttttacgatgaacacaccttgcgaaagcgcggactgcttgtggccgcagtcttatttataacaggcataatcatattgacctctgggaagtgtcgccagctgtcaaggttgtgccggaaccgctgcagatag

SEQ ID NO: 239706 - DNA, 537 bp, Artificial Sequence
  derived and/or modified sequence
atgtctccctccggacgactgtgtcttctgacgatcgtgggtcttatccttcccacaagaggtcaaaccctgaaggacactacatccagctcttccgcagacagcactataatggacatccaggtgcccacacgcgcacccgacgccgtatacactgagttgcagccaactagtcccaccccaacttggccagccgacgagaccccacagccgcaaactcagactcaacaactcgagggcaccgacggtcccctggtgaccgatccagagacacacaaatccacaaaagctgcacacccaactgatgataccactacactttcggagcgaccatctccctcgaccgacgtgcagacggatcctcagaccctcaagccatcaggattccacgaggacgacccgtttttctacgatgagcacacgcttcgcaaaagaggtctgttagtggcagcggtgctatttattacaggaatcataattctgactagtggtaagtgtcgtcagctgagccgattatgtcgaaatcgttgccggtag

SEQ ID NO: 239707 - DNA, 537 bp, Artificial Sequence
  derived and/or modified sequence
atgtccccgtcaggtcgtctgtgtctcttgaccattgtgggtttgattcttcccacccgaggtcagactctcaaggacactacctcttctagctctgcagactcaaccatcatggacatacaagttccgacaagggccccagacgccgtgtacaccgagctgcagccaacaagccccacacccacctggcccgctgacgaaaccccacagccccagactcagacgcaacagctggaggggacagacggtcctttggtgacggaccccgaaacccataaaagtacaaaagccgctcaccccaccgatgatacaaccactctgtccgagaggccctccccatccaccgatgtacagacagatccacaaactttgaagccttctggatttcacgaggatgatccttttttctatgatgaacatactttgcgcaaacgtggcctccttgtcgcggcagttttgttcattacgggcatcataatcttgacatctggaaagtgcaggcaactgtctcggctctgtaggaaccgttgtcgttag

SEQ ID NO: 239708 - DNA, 537 bp, Artificial Sequence
  derived and/or modified sequence
atgagcccaagcggcaggctttgtcttctgacaatagtcggactgatacttcccactagggggcaaactctgaaggatactacaagctcctctagcgccgactcaacaattatggatatccaggtgcctacacgggctcccgatgcagtgtacaccgaattgcagcctacttcccccacccccacttggccggcagacgagactcctcagcctcaaacgcaaacccagcagctagaaggtactgacggcccattggtcaccgacccggagacccacaaatcaacaaaggctgcccatccgacagatgatacaaccaccctgtccgaacggccaagtcccagtacagacgtgcagactgatccccagacgctgaagcctagcggattccacgaggacgatccatttttctacgacgagcacacactgagaaaaagaggactgctcgttgctgcggtcctgtttatcaccggcattataattctgacgtcagggaagtgcagacaactgtcacgtctgtgcagaaatcgctgtagatag

SEQ ID NO: 239709 - protein, 228 aa, Artificial Sequence
  derived and/or modified sequence
MAAAGARPVELGFAESAPAWRLRSEQFPSKVGGRPAWLGAAGLPGPQALACELCGRPLSFLLQVYAPLPGRPDAFHRCIFLFCCREQPCCAGLRVFRNQLPRKNDFYSYEPPSENPPPETGESVCLQLKSGAHLCRVCGCLGPKTCSRCHKAYYCSKEHQTLDWRLGHKQACAQPDHLDHIIPDHNFLFPEFEIVIETEDEIMPEVVEKEDYSEIIGSMGKQFQDFIH

SEQ ID NO: 239710 - DNA, 687 bp, Artificial Sequence
  derived and/or modified sequence
atggccgctgctggtgctcggcccgtggagctgggctttgctgagtccgcccccgcctggagactcagaagcgagcagtttccgtctaaagtaggcggtcgccctgcctggctgggtgctgcaggattaccaggaccacaggcattagcttgcgaattatgcggacgcccattgagttttctgttacaggtgtacgccccactccccgggaggccagacgcattccacagatgcatatttctattttgctgtagagagcaaccttgctgtgcgggactgcgcgtcttcaggaatcaactccctcggaagaatgacttctactcttacgagcccccttcagagaatccccctcctgaaacaggagagagcgtatgcttgcagcttaagagcggcgcccacttatgcagggtctgcggatgtttaggtcccaagacctgtagtcgctgtcacaaagcttattattgttcaaaagaacaccagacactagattggaggctgggccacaaacaggcttgtgcacagcctgaccatctcgaccatattattcccgaccataacttcctctttccagagtttgaaatcgtgatcgagaccgaagatgaaatcatgcctgaggttgtagagaaggaggattacagtgagatcatcggatccatgggtaagcagttccaggatttcatccattag

SEQ ID NO: 239711 - DNA, 687 bp, Artificial Sequence
  derived and/or modified sequence
atggctgctgctggggcccggcctgtggagctgggctttgctgagagcgccccagcctggaggctgcggtctgagcagttccccagcaaggtgggcggccgcccagcctggctgggcgctgctggcctgcccggcccccaggccctggcctgtgagctgtgtggccggcccctgtccttcctgctgcaggtgtatgcccccctgcccggccgcccagatgccttccaccgctgcatcttcctgttctgctgccgggagcagccctgctgtgccggcctgcgggtcttcaggaaccagctgcccaggaagaatgacttctacagctatgagcccccatctgagaaccccccacctgagaccggggagagcgtgtgcctgcagctgaagagcggggcccacctgtgccgggtgtgtggctgcctgggccccaagacctgcagccgctgccacaaggcctactactgcagcaaggagcaccagaccctggactggaggctgggccacaagcaggcctgtgcccagcctgaccacctggaccacatcatcccagaccacaacttcctgtttcctgagtttgagatcgtcatcgagacagaagatgagatcatgcctgaggtggtggagaaggaggactacagcgagatcatcggctccatgggcaagcagttccaggacttcatccactag

SEQ ID NO: 239712 - DNA, 687 bp, Artificial Sequence
  derived and/or modified sequence
atggccgccgccggcgcccggcccgtggagctgggcttcgccgagtccgctcccgcttggaggctgagaagcgagcagtttcccagtaaggtggggggtcgacctgcatggcttggtgccgcagggctgcctggaccacaagcattagcatgcgaactgtgcggacgccccctctctttcctgttgcaggtgtacgcaccacttccgggcaggccggatgccttccatcggtgtattttcctattctgttgcagggagcaaccttgctgtgctggcctgcgagtattccgcaatcagctgccgagaaaaaatgacttttactcctacgagccaccaagcgaaaatccccctccagagaccggggaatcagtctgcttacaacttaaaagtggcgcccacctgtgtagggtctgtgggtgcctgggacctaaaacgtgttctaggtgtcacaaggcctactattgctctaaagaacatcaaacgcttgattggcgacttggccataaacaggcatgcgcgcagcctgaccacctcgaccacatcattccagaccacaacttcctcttccccgaattcgaaattgtaatcgaaaccgaggacgaaataatgcctgaagtggtcgagaaggaggactattccgagatcatcggttccatgggtaagcagttccaagacttcatccactag

SEQ ID NO: 239713 - DNA, 687 bp, Artificial Sequence
  derived and/or modified sequence
atggctgccgctggcgctcgcccagtggagctggggtttgctgaatctgcccctgcttggagactgagatccgagcagtttccatcaaaagttggaggacgccctgcctggttaggggctgccggattgccaggtccccaggcgctagcctgtgagctgtgcggaagacccttaagcttcctgctccaagtctacgcacctctgccagggagaccggatgcatttcacaggtgcatttttctcttctgctgtcgagaacagccctgctgtgcaggcttgcgcgtgtttcgaaatcagctgcccagaaagaacgacttctatagttacgaacccccttccgagaaccccccacctgagaccggcgagagcgtgtgcttgcagctcaaaagcggagcccatctttgtagggtctgcgggtgcctgggcccaaaaacatgttcacggtgccataaggcatattattgtagcaaggagcaccagaccctcgattggagactaggtcataagcaggcgtgtgctcaaccggatcacttggatcatatcatcccagatcataattttctgttcccagagttcgaaattgttattgaaactgaggatgagatcatgccagaggttgtggagaaggaagactatagtgaaattataggttccatgggcaaacagttccaggacttcatccactag

SEQ ID NO: 239714 - DNA, 2657 bp, Artificial Sequence
  derived and/or modified sequence
gggctgcgccccacgccagcccgcgccccgcatggctgccgccggggccaggcctgtggagctgggcttcgccgagtcggcgccggcgtggcgactgcgcagcgagcagttccccagcaaggtgggcgggcggccggcatggctgggcgcggccgggctgccggggccccaggccctggcctgcgagctgtgcggccgcccgctctccttcctgctgcaggtgtatgcgccgctgcctggccgcccggacgccttccaccgctgcatcttcctcttctgctgccgcgagcagccgtgctgtgccggcctgcgagtttttaggaatcaactacccaggaaaaacgatttttactcatatgagccaccttctgagaatcctcccccagaaacaggagaatcagtgtgtctccagcttaagtctggtgctcatctctgcagggtttgtggctgtttaggccccaaaacgtgctccagatgccacaaagcatattactgcagcaaggagcatcagaccctagactggagattgggacataagcaggcttgtgcacaaccagatcatctggaccatataattccagaccacaacttcctttttccagaatttgaaattgtaatagaaacagaagatgagattatgcctgaggttgtggaaaaggaagattactcagagattatagggagcatgggtaagcagtttcaggacttcattcattaagtggttaaacataatacttggaagaaagggctccatgtgcctagaagagaggtactgagaggaagactcactttggaggctgtagcatacaattttcagatattgcctcaggtaaaaatatacttcctggactttgttttctgacacataagaggtgtgttctgctccctgtaaagacaagggtgggtatccagatggtcccatgagtagggctgcacaagatgctggaggcttggtaagttcctctgggtcgcagatcggtttctcgggtcgggatagtgtgagtgcctagcacagtgtcgggcacgcagaagggccccttaaaagtttctctttcatctggccagttttagatacacaattttgtcagtttacttacagtgcatactcttgggtagtacttgtgctgaccaagtatcttagaggcttattttattatagtagccaacatttatccagcacttaccttatataaagggctgtttgtgcatgagctcattaaaatcgtgacagcagaccaatgagtgagaaactgccccattttgaaggtgaggaaattgaggttctgggtataactttctttggtcacataatattaaattttacaatttgagccttgagccatacacaaaaccaccacaaaattagatttatagactcaaaatgaaaacatcagcttactggtttgtagttcataccagtcatacattccaaaacatgttttgagtcttactctgtgcctgaccttgtgcttgataacagggatataatgggaagcaacactccagtggtcagatgctcacagtcttatggaggagcccaaataatatctggggaagttaaagtccatataatgactgataagagtacaatacaggtgccatgggaacacgtgacatcactgaagactgcctggaaggggccgcgcgtgtgttcatgcctatacgataaacatgatacataatgaaaatgcttatctttaggagaaaggagagcctagagtagcaggatcaaggatgaaagctggacttcaaatatgccttgttagtgtaaatgtgactgtggaactgtatgagtattttaagattatggagtaaagtaagttttaaaaagcagtccctaatcatcaaaagtaaaaaactcttgatgtagtcatataaccacactaagaactcttccaggtgacttcaaaacataggacagtacatctctagtagaatatgccctgagaatgaaaagaatgtaacagtgttagtattttgaataaacatgttattactagactgttgcttttattttgagatggttgtgtgtgtattggggggaaaggaaacgagtaattatgttggtgttactgagaactgagatgttgggcgtaggaggaagataatgttgattgtgtctacgtaccatttctctctaaaaggaactccaggctctttggagaggtggttgattccagaactaggtcaggaaacgttcatataatgtgggaacatggtcatatcaaagattaaggataaggattactagggccatgtcagaactcaagcaacatgaaaaggctcctgcttgcaaaagatggacagtttgaacatccacaaggacgctaactgcatcagatatgtttaatgggttcaaaatgatactttaaaaaaactcagtaatcatctttataggatacttgggaacagactcattttcaaattggtaaataaaaggaaagagtttgccttcgaggggtacataacttaattatgaatgaagtgatatgtgtggaatttacttcagagtaatggaggtggaagtggcagagaaaggaaacactggacttgatagtgttgaaactgattaatgatatgtggcggttcattatagtatttccacttttctgtatgtccaaaattttctaaaataaaaggagaattgaatagaaaaa

SEQ ID NO: 239715 - DNA, 687 bp, Artificial Sequence
  derived and/or modified sequence
atggccgccgccggcgccagacccgtggagctgggcttcgccgagagcgcccccgcctggagactgagaagcgagcagttccccagcaaggtgggcggcagacccgcctggctgggcgccgccggcctgcccggcccccaggccctggcctgcgagctgtgcggcagacccctgagcttcctgctgcaggtgtacgcccccctgcccggcagacccgacgccttccacagatgcatcttcctgttctgctgcagagagcagccctgctgcgccggcctgagagtgttcagaaaccagctgcccagaaagaacgacttctacagctacgagccccccagcgagaaccccccccccgagaccggcgagagcgtgtgcctgcagctgaagagcggcgcccacctgtgcagagtgtgcggctgcctgggccccaagacctgcagcagatgccacaaggcctactactgcagcaaggagcaccagaccctggactggagactgggccacaagcaggcctgcgcccagcccgaccacctggaccacatcatccccgaccacaacttcctgttccccgagttcgagatcgtgatcgagaccgaggacgagatcatgcccgaggtggtggagaaggaggactacagcgagatcatcggcagcatgggcaagcagttccaggacttcatccactag

SEQ ID NO: 239716 - protein, 250 aa, Artificial Sequence
  derived and/or modified sequence
MRILQLILLALATGLVGGETRIIKGFECKPHSQPWQAALFEKTRLLCGATLIAPRWLLTAAHCLKPRYIVHLGQHNLQKEEGCEQTRTATESFPHPGFNNSLPNKDHRNDIMLVKMASPVSITWAVRPLTLSSRCVTAGTSCLISGWGSTSSPQLRLPHTLRCANITIIEHQKCENAYPGNITDTMVCASVQEGGKDSCQGDSGGPLVCNQSLQGIISWGQDPCAITRKPGVYTKVCKYVDWIQETMKNN

SEQ ID NO: 239717 - protein, 282 aa, Artificial Sequence
  derived and/or modified sequence
MQRLRWLRDWKSSGRGLTAAKEPGARSSPLQAMRILQLILLALATGLVGGETRIIKGFECKPHSQPWQAALFEKTRLLCGATLIAPRWLLTAAHCLKPRYIVHLGQHNLQKEEGCEQTRTATESFPHPGFNNSLPNKDHRNDIMLVKMASPVSITWAVRPLTLSSRCVTAGTSCLISGWGSTSSPQLRLPHTLRCANITIIEHQKCENAYPGNITDTMVCASVQEGGKDSCQGDSGGPLVCNQSLQGIISWGQDPCAITRKPGVYTKVCKYVDWIQETMKNN

SEQ ID NO: 239718 - DNA, 849 bp, Artificial Sequence
  derived and/or modified sequence
atgcagcggctaaggtggctgcgggactggaaaagctccggtagaggacttaccgcggccaaggaaccaggggcaagaagtagtcctctgcaggccatgcggatccttcagttgattctcctcgcattggctacgggcctcgtgggaggcgaaaccagaatcatcaaggggtttgagtgtaagccccacagccagccttggcaggccgccctttttgagaaaacccgacttctctgtggggcaacactaatagcacccagatggctcctgacggccgcccattgtctgaagccccgatacattgtgcatcttggacagcacaatttacaaaaggaggaaggatgcgagcaaacccgcaccgccaccgagagctttcctcatccaggctttaataattcgttgccgaacaaggatcaccggaatgacatcatgctcgttaagatggcctcccccgtaagcatcacgtgggccgttcgtccactgaccctgtcctcgcgatgcgtgaccgccggcacatcgtgtctgatttcaggctgggggtccacatcgtcaccacagctaaggttaccacataccctgagatgcgcaaatatcacaattatagaacaccagaagtgcgaaaacgcgtacccgggtaatattacagacacaatggtgtgtgcctcagtacaggaaggcggcaaggactcctgccagggggactctggagggcctcttgtctgtaatcagtccttgcaaggcattatcagctggggccaagatccttgcgcgatcacccggaagccaggggtttacacaaaagtatgcaagtatgtcgactggattcaggagacaatgaagaataactag

SEQ ID NO: 239719 - DNA, 849 bp, Artificial Sequence
  derived and/or modified sequence
atgcagaggctccgctggctgcgggactggaagagctccggtcggggtctgacagctgctaaagagcctggggcccgtagcagtcctctccaggcaatgaggatcctacagctgatcctactcgcactcgccaccggcctggtgggtggtgagactcgaattattaaaggctttgaatgcaagccccatagccagccatggcaggccgcactgtttgagaagactagactactctgcggagccacacttattgctcccagatggctgcttactgccgcgcactgtctgaagcctcgctacattgtgcaccttggccagcacaacctgcagaaggaggagggatgtgaacaaactcgcacagctactgagtcttttccccatcccgggtttaacaacagtcttccgaacaaagatcataggaatgacatcatgcttgtcaaaatggcttcacctgtatcgatcacatgggccgtgcggccacttactctgagttccagatgtgtaaccgcaggcacatcctgtctgatcagtggctgggggagcacctcttccccgcagttgcgactgccccatacgctgcgatgcgcaaacataacgatcatcgagcatcagaagtgtgaaaacgcgtaccctggcaatatcacagataccatggtgtgcgccagcgttcaggaggggggtaaagatagctgtcagggagacagcggcgggcctttggtctgcaatcaaagcttacaaggtatcatttcctggggtcaggatccatgtgccatcacaaggaagcccggcgtgtataccaaagtgtgtaaatatgttgactggatccaggaaaccatgaagaataactag

SEQ ID NO: 239720 - DNA, 1191 bp, Artificial Sequence
  derived and/or modified sequence
ggagtgcaggcttggaaagcaggagagctcagcctacgtctttaatcctcctgcccaccccttggattctgtctccactgggactcaagagaggaacctggggcccgctcctcccccctccaggccatgaggattctgcagttaatcctgcttgctctggcaacagggcttgtagggggagagaccaggatcatcaaggggttcgagtgcaagcctcactcccagccctggcaggcagccctgttcgagaagacgcggctactctgtggggcgacgctcatcgcccccagatggctcctgacagcagcccactgcctcaagccccgctacatagttcacctggggcagcacaacctccagaaggaggagggctgtgagcagacccggacagccactgagtccttcccccaccccggcttcaacaacagcctccccaacaaagaccaccgcaatgacatcatgctggtgaagatggcatcgccagtctccatcacctgggctgtgcgacccctcaccctctcctcacgctgtgtcactgctggcaccagctgcctcatttccggctggggcagcacgtccagcccccagttacgcctgcctcacaccttgcgatgcgccaacatcaccatcattgagcaccagaagtgtgagaacgcctaccccggcaacatcacagacaccatggtgtgtgccagcgtgcaggaagggggcaaggactcctgccagggtgactccgggggccctctggtctgtaaccagtctcttcaaggcattatctcctggggccaggatccgtgtgcgatcacccgaaagcctggtgtctacacgaaagtctgcaaatatgtggactggatccaggagacgatgaagaacaattagactggacccacccaccacagcccatcaccctccatttccacttggtgtttggttcctgttcactctgttaataagaaaccctaagccaagaccctctacgaacattctttgggcctcctggactacaggagatgctgtcacttaataatcaacctggggttcgaaatcagtgagacctggattcaaattctgccttgaaatattgtgactctgggaatgacaacacctggtttgttctctgttgtatccccagccccaaagacagctcctggccatatatcaaggtttcaataaatatttgctaaatgagtg

SEQ ID NO: 239721 - DNA, 1273 bp, Artificial Sequence
  derived and/or modified sequence
ctgccttgctccacacctggtcaggggagagaggggaggaaagccaagggaagggacctaactgaaaacaaacaagctgggagaagcaggaatctgcgctcgggttccgcagatgcagaggttgaggtggctgcgggactggaagtcatcgggcagaggtctcacagcagccaaggaacctggggcccgctcctcccccctccaggccatgaggattctgcagttaatcctgcttgctctggcaacagggcttgtagggggagagaccaggatcatcaaggggttcgagtgcaagcctcactcccagccctggcaggcagccctgttcgagaagacgcggctactctgtggggcgacgctcatcgcccccagatggctcctgacagcagcccactgcctcaagccccgctacatagttcacctggggcagcacaacctccagaaggaggagggctgtgagcagacccggacagccactgagtccttcccccaccccggcttcaacaacagcctccccaacaaagaccaccgcaatgacatcatgctggtgaagatggcatcgccagtctccatcacctgggctgtgcgacccctcaccctctcctcacgctgtgtcactgctggcaccagctgcctcatttccggctggggcagcacgtccagcccccagttacgcctgcctcacaccttgcgatgcgccaacatcaccatcattgagcaccagaagtgtgagaacgcctaccccggcaacatcacagacaccatggtgtgtgccagcgtgcaggaagggggcaaggactcctgccagggtgactccgggggccctctggtctgtaaccagtctcttcaaggcattatctcctggggccaggatccgtgtgcgatcacccgaaagcctggtgtctacacgaaagtctgcaaatatgtggactggatccaggagacgatgaagaacaattagactggacccacccaccacagcccatcaccctccatttccacttggtgtttggttcctgttcactctgttaataagaaaccctaagccaagaccctctacgaacattctttgggcctcctggactacaggagatgctgtcacttaataatcaacctggggttcgaaatcagtgagacctggattcaaattctgccttgaaatattgtgactctgggaatgacaacacctggtttgttctctgttgtatccccagccccaaagacagctcctggccatatatcaaggtttcaataaatatttgctaaatgagtg

SEQ ID NO: 239722 - DNA, 1179 bp, Artificial Sequence
  derived and/or modified sequence
aacccagcctacctgctgtagctgccgccactgccgtctccgccgccactgggcccccagagccccagccccagagcctaggaacctggggcccgctcctcccccctccaggccatgaggattctgcagttaatcctgcttgctctggcaacagggcttgtagggggagagaccaggatcatcaaggggttcgagtgcaagcctcactcccagccctggcaggcagccctgttcgagaagacgcggctactctgtggggcgacgctcatcgcccccagatggctcctgacagcagcccactgcctcaagccccgctacatagttcacctggggcagcacaacctccagaaggaggagggctgtgagcagacccggacagccactgagtccttcccccaccccggcttcaacaacagcctccccaacaaagaccaccgcaatgacatcatgctggtgaagatggcatcgccagtctccatcacctgggctgtgcgacccctcaccctctcctcacgctgtgtcactgctggcaccagctgcctcatttccggctggggcagcacgtccagcccccagttacgcctgcctcacaccttgcgatgcgccaacatcaccatcattgagcaccagaagtgtgagaacgcctaccccggcaacatcacagacaccatggtgtgtgccagcgtgcaggaagggggcaaggactcctgccagggtgactccgggggccctctggtctgtaaccagtctcttcaaggcattatctcctggggccaggatccgtgtgcgatcacccgaaagcctggtgtctacacgaaagtctgcaaatatgtggactggatccaggagacgatgaagaacaattagactggacccacccaccacagcccatcaccctccatttccacttggtgtttggttcctgttcactctgttaataagaaaccctaagccaagaccctctacgaacattctttgggcctcctggactacaggagatgctgtcacttaataatcaacctggggttcgaaatcagtgagacctggattcaaattctgccttgaaatattgtgactctgggaatgacaacacctggtttgttctctgttgtatccccagccccaaagacagctcctggccatatatcaaggtttcaataaatatttgctaaatgagtg

SEQ ID NO: 239723 - DNA, 1347 bp, Artificial Sequence
  derived and/or modified sequence
agtcatagtagtaggaagaggaagcacctaggtttgaggccagggctggctgctgtcagaacctaggccctcccctgccttgctccacacctggtcaggggagagaggggaggaaagccaagggaagggacctaactgaaaacaaacaagctgggagaagcaggaatctgcgctcgggttccgcagatgcagaggttgaggtggctgcgggactggaagtcatcgggcagaggtctcacagcagccaaggaacctggggcccgctcctcccccctccaggccatgaggattctgcagttaatcctgcttgctctggcaacagggcttgtagggggagagaccaggatcatcaaggggttcgagtgcaagcctcactcccagccctggcaggcagccctgttcgagaagacgcggctactctgtggggcgacgctcatcgcccccagatggctcctgacagcagcccactgcctcaagccccgctacatagttcacctggggcagcacaacctccagaaggaggagggctgtgagcagacccggacagccactgagtccttcccccaccccggcttcaacaacagcctccccaacaaagaccaccgcaatgacatcatgctggtgaagatggcatcgccagtctccatcacctgggctgtgcgacccctcaccctctcctcacgctgtgtcactgctggcaccagctgcctcatttccggctggggcagcacgtccagcccccagttacgcctgcctcacaccttgcgatgcgccaacatcaccatcattgagcaccagaagtgtgagaacgcctaccccggcaacatcacagacaccatggtgtgtgccagcgtgcaggaagggggcaaggactcctgccagggtgactccgggggccctctggtctgtaaccagtctcttcaaggcattatctcctggggccaggatccgtgtgcgatcacccgaaagcctggtgtctacacgaaagtctgcaaatatgtggactggatccaggagacgatgaagaacaattagactggacccacccaccacagcccatcaccctccatttccacttggtgtttggttcctgttcactctgttaataagaaaccctaagccaagaccctctacgaacattctttgggcctcctggactacaggagatgctgtcacttaataatcaacctggggttcgaaatcagtgagacctggattcaaattctgccttgaaatattgtgactctgggaatgacaacacctggtttgttctctgttgtatccccagccccaaagacagctcctggccatatatcaaggtttcaataaatatttgctaaatgagtg

SEQ ID NO: 239724 - DNA, 849 bp, Artificial Sequence
  derived and/or modified sequence
atgcagaggctgcgctggctgcgggactggaagagcagcggccggggcctgacagctgccaaggagcccggggcccggagcagccccctgcaggccatgaggatcctgcagctgatcctgctggccctggccaccggcctggtgggcggggagacccgcatcatcaagggctttgagtgcaagccccacagccagccctggcaggccgccctgtttgagaagacccggctgctgtgtggggccaccctcatcgccccccgctggctgctgacagctgcccactgcctgaagccccgctacatcgtgcacctgggccagcacaacctgcagaaggaggagggctgtgagcagaccaggacagccacagagagcttcccccaccctggcttcaacaacagcctgcccaacaaggaccacagaaatgacatcatgctggtgaagatggccagccctgtgtccatcacctgggccgtgcggcccctgaccctgagcagccgctgtgtgacagctggcaccagctgcctgatcagcggctggggcagcaccagcagcccccagctgcggctgccccacaccctgcgctgtgccaacatcaccatcatcgagcaccagaagtgtgaaaatgcctacccaggcaacatcacagacaccatggtgtgtgcctctgtgcaggagggcggcaaggacagctgccagggcgacagcggcggccccctggtgtgcaaccagagcctgcagggcatcatctcctggggccaggacccctgtgccatcaccaggaagccaggagtgtacaccaaggtgtgcaagtatgtggactggatccaggagaccatgaagaacaactag

SEQ ID NO: 239725 - DNA, 849 bp, Artificial Sequence
  derived and/or modified sequence
atgcagcggctgcggtggctgcgggactggaagagcagcggccgggggttgactgctgcaaaggagcctggcgcacgctccagtcccttgcaagctatgagaatcttacagctgatcctgcttgcgctcgccacgggtctggtaggtggagagactaggattattaaggggttcgagtgtaagccgcactcccagccatggcaggctgctctttttgagaaaacacgtctcctatgcggcgccacacttatagccccccggtggctcctcacagccgctcattgtttgaaaccacggtacatcgtgcacttgggccagcataacctccagaaggaggagggctgcgagcaaacccgcaccgcaactgaaagcttcccgcaccccgggttcaacaactccctgcccaataaagatcatagaaatgatattatgctggtcaagatggcatcccccgtttccatcacatgggctgtccggcctctcaccctgtcttccaggtgcgttaccgctggaactagctgtctaatttccgggtggggctccaccagttctccacagcttcggctgccccacacacttcggtgcgcaaatatcactatcatcgagcaccaaaagtgtgaaaatgcctatcctggaaatattacagatacaatggtgtgtgccagcgttcaggaaggaggaaaagattcttgtcagggcgactccggaggacccctcgtgtgcaatcaatctttgcagggtatcatttcatggggccaggacccatgtgccattaccagaaaacctggcgtatatacaaaggtatgtaaatacgtcgactggattcaggaaacgatgaaaaataactag

SEQ ID NO: 239726 - DNA, 849 bp, Artificial Sequence
  derived and/or modified sequence
atgcagcggctgcggtggctgcgggactggaagagcagcggccggggactaaccgccgccaaagagcctggcgcccgaagttctcctttgcaggcaatgagaatcctgcagctgatcctcctcgccctcgcaactggactcgttggtggcgagacacggataattaagggatttgaatgtaagcctcacagccaaccatggcaggcagcactgtttgaaaagactcgtctcctgtgtggtgcgaccctcatagcacctcgttggctcttaactgctgcacattgcctcaagcccaggtacattgtgcacctcgggcagcacaatctccagaaagaggagggttgcgaacaaacccgtaccgccaccgagtctttccctcacccaggtttcaacaactccctgccaaacaaagatcatcggaacgacatcatgttggtcaaaatggcgagcccagtgtcgatcacttgggctgtaaggcccctcaccctgtcttccaggtgtgtgacagcggggacttcctgcctaatttctggatggggctctactagcagcccacaactaagactgccgcacactttacggtgtgctaacataacgatcatagaacaccagaaatgcgagaatgcttacccaggtaacataactgacacaatggtgtgtgcatctgttcaggagggcggcaaagattcatgtcaaggagatagcgggggccccttagtgtgcaatcagtcactgcaggggattatttcctggggtcaagacccatgtgctattacgcgtaagcccggcgtgtatacaaaagtgtgtaaatatgtggattggatccaggaaaccatgaaaaataattag

SEQ ID NO: 239727 - DNA, 849 bp, Artificial Sequence
  derived and/or modified sequence
atgcaacgactgagatggttacgcgactggaaaagttcgggcaggggtcttactgccgcaaaagaacccggagccaggagcagtccccttcaggccatgcgaatattgcaactgatcttgctggcgttagccactggcctggtggggggagaaacaagaatcataaaggggtttgagtgcaagccacacagccagccatggcaggccgctctgttcgagaagacacgtctgctgtgtggtgcaaccttgatcgccccacggtggctattgaccgctgcccattgcctgaagccacggtacattgtgcacctcggccagcacaatcttcaaaaggaagagggctgtgaacaaacgcggaccgctactgagtcttttcctcaccccggttttaacaactccctgccaaacaaggaccacaggaacgatattatgctggtcaaaatggcctcccccgtaagtataacctgggccgtccggcctctgacattgtcgagtagatgcgtgacagctgggactagctgtctgattagcggctggggatcgaccagctcaccgcagctaagattaccccacactcttagatgcgcgaatatcacgataattgaacatcagaagtgcgaaaacgcttaccccggaaacatcaccgacactatggtgtgtgcgtccgtgcaggaggggggaaaggattcttgtcagggggacagcggaggtccactagtgtgcaaccaatcactgcagggcatcattagctggggtcaggacccttgcgccatcacccgaaaaccaggcgtctatacgaaggtgtgcaaatacgttgattggatacaggaaaccatgaaaaataattag

SEQ ID NO: 239728 - DNA, 849 bp, Artificial Sequence
  derived and/or modified sequence
atgcaaaggctgaggtggctgcgggattggaaatcttccgggagggggttgaccgcagctaaagagcccggtgcccgatcgagccctctccaggcaatgaggatcctgcagctaattctcttagcgctggctactggactggttgggggtgagacacgcatcattaaggggtttgaatgcaagccacacagtcaaccatggcaggccgctttatttgagaagacgaggctcctctgtggcgctacattaatcgcacctcgctggcttctcactgccgctcactgcttgaaaccaagatatattgtgcatctgggacagcacaatctacagaaggaggaaggctgcgagcaaacccgtacggccacagagtccttcccccaccctgggttcaataattctctcccaaacaaggaccaccgcaacgatatcatgctggtcaaaatggccagccccgtgagcattacctgggcggtgcgtcccttgaccctttcttctcgctgcgtaaccgcgggtacaagctgcctgatttctgggtggggatcaacgtctagccctcaattacggctgccacacacattgagatgtgcaaatattacaatcattgaacaccaaaaatgtgagaatgcctatccaggtaatatcaccgataccatggtttgtgcctccgttcaggagggaggcaaggactcatgtcagggggattcaggaggccctctggtgtgcaaccagtccttgcagggcatcatttcctgggggcaagacccatgtgccattacccgcaaacccggtgtatacactaaagtttgcaaatacgtcgattggattcaggagacgatgaagaacaactag

SEQ ID NO: 239729 - DNA, 849 bp, Artificial Sequence
  derived and/or modified sequence
atgcagagactgagatggctgagagactggaagagcagcggcagaggcctgaccgccgccaaggagcccggcgccagaagcagccccctgcaggccatgagaatcctgcagctgatcctgctggccctggccaccggcctggtgggcggcgagaccagaatcatcaagggcttcgagtgcaagccccacagccagccctggcaggccgccctgttcgagaagaccagactgctgtgcggcgccaccctgatcgcccccagatggctgctgaccgccgcccactgcctgaagcccagatacatcgtgcacctgggccagcacaacctgcagaaggaggagggctgcgagcagaccagaaccgccaccgagagcttcccccaccccggcttcaacaacagcctgcccaacaaggaccacagaaacgacatcatgctggtgaagatggccagccccgtgagcatcacctgggccgtgagacccctgaccctgagcagcagatgcgtgaccgccggcaccagctgcctgatcagcggctggggcagcaccagcagcccccagctgagactgccccacaccctgagatgcgccaacatcaccatcatcgagcaccagaagtgcgagaacgcctaccccggcaacatcaccgacaccatggtgtgcgccagcgtgcaggagggcggcaaggacagctgccagggcgacagcggcggccccctggtgtgcaaccagagcctgcagggcatcatcagctggggccaggacccctgcgccatcaccagaaagcccggcgtgtacaccaaggtgtgcaagtacgtggactggatccaggagaccatgaagaacaactag

SEQ ID NO: 239730 - protein, 536 aa, Artificial Sequence
  derived and/or modified sequence
MDKVGKMWNNFKYRCQNLFGHEGGSRSENVDMNSNRCLSVKEKNISIGDSTPQQQSSPLRENIALQLGLSPSKNSSRRNQNCATEIPQIVEISIEKDNDSCVTPGTRLARRDSYSRHAPWGGKKKHSCSTKTQSSLDADKKFGRTRSGLQRRERRYGVSSVHDMDSVSSRTVGSRSLRQRLQDTVGLCFPMRTYSKQSKPLFSNKRKIHLSELMLEKCPFPAGSDLAQKWHLIKQHTAPVSPHSTFFDTFDPSLVSTEDEEDRLRERRRLSIEEGVDPPPNAQIHTFEATAQVNPLYKLGPKLAPGMTEISGDSSAIPQANCDSEEDTTTLCLQSRRQKQRQISGDSHTHVSRQGAWKVHTQIDYIHCLVPDLLQITGNPCYWGVMDRYEAEALLEGKPEGTFLLRDSAQEDYLFSVSFRRYNRSLHARIEQWNHNFSFDAHDPCVFHSSTVTGLLEHYKDPSSCMFFEPLLTISLNRTFPFSLQYICRAVICRCTTYDGIDGLPLPSMLQDFLKEYHYKQKVRVRWLEREPVKAK

SEQ ID NO: 239731 - DNA, 1611 bp, Artificial Sequence
  derived and/or modified sequence
atggacaaggtgggcaagatgtggaacaacttcaagtacagatgccagaacctgttcggccacgagggcggcagcagaagcgagaacgtggacatgaacagcaacagatgcctgagcgtgaaggagaagaacatcagcatcggcgacagcaccccccagcagcagagcagccccctgagagagaacatcgccctgcagctgggcctgagccccagcaagaacagcagcagaagaaaccagaactgcgccaccgagatcccccagatcgtggagatcagcatcgagaaggacaacgacagctgcgtgacccccggcaccagactggccagaagagacagctacagcagacacgccccctggggcggcaagaagaagcacagctgcagcaccaagacccagagcagcctggacgccgacaagaagttcggcagaaccagaagcggcctgcagagaagagagagaagatacggcgtgagcagcgtgcacgacatggacagcgtgagcagcagaaccgtgggcagcagaagcctgagacagagactgcaggacaccgtgggcctgtgcttccccatgagaacctacagcaagcagagcaagcccctgttcagcaacaagagaaagatccacctgagcgagctgatgctggagaagtgccccttccccgccggcagcgacctggcccagaagtggcacctgatcaagcagcacaccgcccccgtgagcccccacagcaccttcttcgacaccttcgaccccagcctggtgagcaccgaggacgaggaggacagactgagagagagaagaagactgagcatcgaggagggcgtggaccccccccccaacgcccagatccacaccttcgaggccaccgcccaggtgaaccccctgtacaagctgggccccaagctggcccccggcatgaccgagatcagcggcgacagcagcgccatcccccaggccaactgcgacagcgaggaggacaccaccaccctgtgcctgcagagcagaagacagaagcagagacagatcagcggcgacagccacacccacgtgagcagacagggcgcctggaaggtgcacacccagatcgactacatccactgcctggtgcccgacctgctgcagatcaccggcaacccctgctactggggcgtgatggacagatacgaggccgaggccctgctggagggcaagcccgagggcaccttcctgctgagagacagcgcccaggaggactacctgttcagcgtgagcttcagaagatacaacagaagcctgcacgccagaatcgagcagtggaaccacaacttcagcttcgacgcccacgacccctgcgtgttccacagcagcaccgtgaccggcctgctggagcactacaaggaccccagcagctgcatgttcttcgagcccctgctgaccatcagcctgaacagaaccttccccttcagcctgcagtacatctgcagagccgtgatctgcagatgcaccacctacgacggcatcgacggcctgcccctgcccagcatgctgcaggacttcctgaaggagtaccactacaagcagaaggtgagagtgagatggctggagagagagcccgtgaaggccaagtag

SEQ ID NO: 239732 - DNA, 1611 bp, Artificial Sequence
  derived and/or modified sequence
atggacaaagtgggcaaaatgtggaataacttcaagtacaggtgccaaaacctttttggtcacgaggggggcagtaggagcgagaatgtcgacatgaactctaatcggtgtttaagcgtcaaagaaaagaacatctccattggcgactctactccgcagcagcagtcatcccctctgagggagaatattgcactgcagcttggcttgtcaccatcaaagaactcaagtagaaggaaccagaactgtgctaccgagatccctcagatcgtggaaattagtatcgaaaaggataacgatagctgcgtaacacccggcacgcgactcgccaggagagactcttactccaggcacgcaccctgggggggaaaaaaaaagcattcctgtagtactaagacacagagctctttagatgccgacaagaaattcgggcgtacaaggtccgggctgcagcggagagagcgccgctatggcgtgagcagcgtgcacgatatggacagcgtctctagcagaaccgttggatcccggagcctgagacaaagacttcaggacactgttggtctgtgtttccccatgagaacgtactccaaacagtctaaacccctcttcagtaataaacgaaagatccatttgagcgaactgatgctggagaagtgcccatttcctgccggatccgacctggcacagaagtggcacctgataaaacaacacacagcaccagtgtccccacatagtaccttcttcgacacttttgaccctagtctcgtgtccaccgaggacgaggaggataggctccgcgaacgcagacggctgtccatcgaagagggcgtcgacccacctcccaacgctcagatccacacatttgaggccactgcgcaggtaaacccactgtacaagctgggaccgaaacttgcgccaggcatgactgagatttcgggcgacagcagtgccatcccacaggcaaattgtgattctgaggaagacacgacaaccctttgcttgcaaagccggcgccaaaaacagaggcaaatttctggtgattcccacacacatgtgtctcgtcaaggcgcatggaaggttcatactcaaatcgattacattcactgtttggtccctgacctccttcaaatcactgggaacccctgttactggggcgttatggaccgatatgaagcagaagccctgctcgagggaaagcccgaagggacctttctgctgcgggatagcgctcaagaggactatctgttctctgtctctttcaggagatacaatcggtctctccacgcacgcatcgagcagtggaatcataatttctccttcgatgcccatgacccctgtgtgttccactctagtactgtgacaggactgttggagcactacaaggatccatccagctgcatgttcttcgagcccttacttacaattagcttaaatcgaacgttccccttctcattgcagtacatttgtagggccgtgatctgccggtgcaccacatatgacggaatcgacggtctgcccttgccatcaatgttgcaggactttctcaaggagtaccactacaagcaaaaggtcagagtgcggtggctggaacgcgaacctgtgaaagctaagtag

SEQ ID NO: 239733 - DNA, 1611 bp, Artificial Sequence
  derived and/or modified sequence
atggacaaagtcggtaagatgtggaacaacttcaaataccgctgccaaaacctttttggtcatgagggcggcagtcgcagcgaaaacgtggacatgaatagcaatcgatgtctcagtgtgaaggagaagaatatctccattggtgattctacccctcagcaacagagctcaccattgcgggagaatattgctctgcagctgggcctctccccaagcaagaatagtagccgcagaaaccagaactgtgctacggagatccctcagatcgtcgagatatctattgagaaagataatgattcatgcgtcacgcctggaacccggttggctaggcgggattcttactcaaggcacgcaccttggggagggaagaaaaaacattcttgttctacaaaaactcagtcttcgctagacgcagataagaagtttggcagaacaaggagcggcctgcaacgaagggagcggcggtatggagtgagcagcgtccacgacatggacagtgtcagctctcgtactgtcggttcgcgtagtctcaggcagagactacaggacaccgtgggcttgtgtttccctatgagaacttattctaaacagtccaagcctctgtttagcaataagaggaagattcatctgagcgagcttatgctggagaagtgcccattcccggcaggatcagacctggctcagaagtggcaccttataaaacagcacactgcacctgttagccctcactcaaccttttttgatacatttgacccctctctcgtaagtacagaagatgaggaggaccggctcagagagcggaggagactaagcattgaagaaggagtggacccccctcctaatgcacagatacacaccttcgaggccactgctcaggtgaaccctttgtacaagctggggccaaagctggcaccggggatgactgagatctctggtgacagtagcgcaattccccaggccaactgcgattctgaggaagatacgaccacgttatgtctacagagcaggagacagaagcagagacagatctccggcgattcccacacccatgtgagtcgccagggagcatggaaggtccatacacagatcgattacatccactgtttggttccagatctcctccagattacaggcaacccgtgctactggggagttatggatagatacgaggcagaagccctgctggaagggaaaccagaaggcactttcctgctgagagattctgcccaagaagactacctctttagtgtgagttttcgcagatataaccggtctctgcacgcgcgcatcgaacaatggaaccataatttctccttcgatgcccacgacccctgcgtgttccactcctcaacagtcaccggtttgttggagcattacaaggacccttcatcttgtatgttcttcgaaccactgctcactatcagcctgaatcgcactttcccatttagcctgcagtatatttgtagggctgtgatttgccggtgcacaacctacgatggaattgacggtctgccgctgccctctatgctacaggacttcctgaaggaataccactacaaacagaaggtgcgggttagatggcttgaaagggaacccgtgaaggcgaagtag

SEQ ID NO: 239734 - DNA, 1611 bp, Artificial Sequence
  derived and/or modified sequence
atggacaaggtgggcaagatgtggaacaacttcaagtaccgctgccagaacctgtttggacatgaaggaggcagccgctcagaaaatgtggacatgaacagcaaccgctgcctgtctgtgaaggagaagaacatcagcattggagacagcaccccccagcagcagagcagccccctgagagaaaatattgccctgcagctgggcctgagccccagcaagaacagcagcagaagaaaccagaactgtgccacagagatcccccagatcgtggagatcagcattgagaaggacaatgacagctgtgtgaccccaggcacccggctggcccggcgggacagctacagcagacatgccccctggggcggcaagaagaagcacagctgcagcaccaagacccagagcagcctggatgctgacaagaagtttggccgcaccaggagcggcctgcagaggcgggagcggcgctatggagtgtcctctgtgcatgacatggacagcgtgagcagcaggacagtgggcagccgcagcctgcggcagaggctgcaggacacagtgggcctgtgcttccccatgaggacctacagcaagcagagcaagcccctcttcagcaacaagaggaagatccacctgtctgagctgatgctggagaagtgccccttccctgctggcagtgacctggcccagaagtggcacctgatcaagcagcacacagcccctgtgagcccccacagcaccttctttgacacctttgaccccagcctggtgtccacagaagatgaagaagatcggctgcgggagcggcggcggctgagcattgaggagggcgtggaccccccaccaaatgcccagatccacacctttgaggccacagcccaggtgaaccccctgtacaagctgggccccaagctggcccctggcatgacagagatcagcggggacagcagcgccatcccccaggccaactgtgacagcgaggaggacaccaccaccctgtgcctgcagagccggcggcagaagcagaggcagatcagcggggacagccacacccacgtgtcccggcagggcgcctggaaggtgcacacccagattgactacatccactgcctggtgcctgacctgctgcagatcactggaaacccctgctactggggcgtgatggacagatatgaagctgaggccctgctggagggcaagccagagggcaccttcctgctgcgggacagcgcccaggaggactacctgttctctgtgtccttccgccgctacaacagaagcctgcacgcccgcatcgagcagtggaaccacaacttctcctttgatgcccatgacccctgtgtgttccacagcagcacagtgacaggcctgctggagcactacaaggaccccagcagctgcatgttctttgagcccctgctgaccatcagcctgaacagaaccttccccttcagcctgcagtacatctgccgggccgtcatctgccgctgcaccacctatgatggcattgatggcctgcccctgcccagcatgctgcaggacttcctgaaggagtaccactacaagcagaaggtgcgggtgcgctggctggagcgggagcctgtgaaggccaagtag

SEQ ID NO: 239735 - DNA, 1611 bp, Artificial Sequence
  derived and/or modified sequence
atggacaaggtgggcaagatgtggaacaacttcaagtaccggtgccagaacctgtttggacacgaaggcggctcaagaagtgagaacgtcgatatgaacagcaatagatgcctgtctgtgaaggagaagaatatttccattggagacagtactccacaacagcagagcagtcccctccgggagaatatcgctctgcagctcggtttgtcacctagcaaaaacagctcgagacgaaaccagaattgcgcaaccgagatcccacaaatagtcgaaattagtatcgaaaaggacaacgactcatgcgtcactcctggaactcgcctcgcaaggcgggatagttactcacgtcatgcgccgtggggtggcaagaaaaagcactcctgtagcactaagacacagtccagcctcgacgctgataagaagttcggccggacgagatctgggttgcagagaagggagcggaggtacggggtaagttccgtccacgacatggactcagtcagctcccggacagtaggctcaagaagcctgaggcagagactccaggacaccgtgggactctgcttccctatgcgtacctacagtaagcagtctaagcccctattcagcaataaacgtaaaatccacttatctgagctcatgctagagaagtgtccctttcccgctggtagtgatctggctcagaaatggcatcttattaaacagcacaccgcacctgtgtccccccactctactttttttgacacctttgaccctagtcttgtatcaacagaggatgaggaagacaggttacgggaaaggcggcgcctctcgatcgaagagggtgtcgacccaccccccaacgcgcagatccatacgtttgaagcgactgctcaggtgaatccactgtataagctcggacctaagttggccccgggcatgacagagatctctggggattctagtgccataccgcaggcaaactgtgactccgaggaggatacgacaacgctgtgtcttcagtctcggagacagaaacagaggcagatttccggggactcgcacacgcatgtgtccaggcagggagcatggaaggttcacacacagatcgattatatccactgcctcgtacccgatctcctgcaaattacaggaaatccctgttactggggagtgatggatcggtacgaagctgaggccttgttggaaggaaagccagaagggacatttttgttaagagacagtgcccaggaagactacctgttctccgtgtcctttcggcgctacaaccggtctctgcatgccaggatcgagcagtggaaccataatttctctttcgacgcccacgatccctgcgtattccacagctcaaccgtcaccggtctgttagaacattacaaagacccttcatcctgcatgttttttgaacccttgcttacaatcagcttgaaccgtacattcccattctctctgcagtacatctgcagagccgtcatttgtcgttgcacaacttacgatggaatcgatggactaccactaccatctatgctccaggatttcctaaaagagtatcactataagcagaaagtccgcgtcaggtggctagagcgtgagccggttaaggctaagtag

SEQ ID NO: 239736 - DNA, 1611 bp, Artificial Sequence
  derived and/or modified sequence
atggacaaggtgggcaagatgtggaacaacttcaagtaccggtgccaaaacctgttcggacacgaaggcggctcccggagtgaaaatgtggatatgaactccaaccgttgtctgtccgtcaaggagaagaatatttctataggagacagcactcctcagcagcagtccagccccttgagagagaatattgcattgcaactggggctgagtccttccaagaatagttccagaaggaaccagaactgtgccaccgaaattccacagatcgttgagatttctatcgagaaagacaatgactcgtgcgtgactccggggacaagattagcccgcagggactcttactcacggcacgctccctggggtggcaaaaaaaagcattcatgctctaccaaaactcagagcagcctggacgctgataagaaatttggacggacacggtccggactccagcgtagagagcgtaggtacggcgtcagcagcgtccacgacatggacagtgtttcatccagaaccgtggggtcacggtcccttcgacaaaggctgcaagatacagtgggtctctgcttcccaatgagaacctattccaagcaatccaaacctctgtttagtaataaacgcaaaatccacctatccgagctgatgctggagaagtgcccattcccagccgggtctgacctagcacagaagtggcacctcatcaagcagcacaccgctccagtttccccacattccacctttttcgacaccttcgaccctagtttagtgtctacggaggatgaggaagacaggctcagggaaaggcgcagattatcaatcgaggagggagtggatccaccgccgaacgcacagattcatacatttgaggcaaccgcccaggtgaacccgctctacaagttaggtcccaaactggctccagggatgaccgaaattagtggggactcaagcgctatccctcaagctaactgcgattccgaggaggacaccactacactctgccttcagagcaggaggcagaagcagcggcagattagcggggactcccatactcatgtttcaaggcagggggcttggaaggttcacactcagattgactatattcattgtctggttccagacctgctgcagataaccgggaacccctgctactggggtgtgatggaccgatacgaagcggaagcgcttctggaaggcaaacctgaaggaacctttttactaagggacagtgcccaagaagactacctgtttagtgtatcattcagaaggtataaccgaagtctgcacgcccgtatcgagcagtggaaccacaatttttctttcgacgcccatgatccttgcgtgtttcactcatctacggtaacgggtctgctggaacattataaggaccccagttcgtgcatgttcttcgaacccctacttacgattagcctcaaccgaacttttccatttagtctgcagtatatctgccgcgctgtgatatgcaggtgtaccacctacgacggaattgatggccttccactcccatcgatgctccaagatttcttgaaggagtaccactacaagcagaaggtaagagtccggtggctcgagcgtgagcccgtcaaggcaaagtag

SEQ ID NO: 239737 - DNA, 1611 bp, Artificial Sequence
  derived and/or modified sequence
atggataaagttggtaagatgtggaacaacttcaagtatagatgccagaatcttttcggacatgagggtggctctagaagtgagaacgtggacatgaactctaaccggtgcctgtcagtaaaggaaaaaaacatctctataggagacagcacacctcagcagcagtcctctcctctgagagaaaacatagcgctccagctcgggctgtctccttcaaagaacagctccagacggaaccagaattgcgccacggagattccgcagatcgtggagatctccatcgagaaagacaacgattcatgcgtgacaccaggtacacgtctagccaggagagactcctactcccgccatgctccgtgggggggtaagaagaaacactcatgctcgacaaagacgcagtcctcactggacgctgacaaaaagttcggcagaaccagatctggacttcagcgcagggagcgtcggtacggagtgagctccgttcacgatatggacagcgtatcaagccgaacggtagggtcccgctcacttaggcaacgcctacaggatacggtcggcctgtgtttcccgatgcgaacatactctaaacaatccaagccccttttctcaaataagcggaagatacacctgagcgaactgatgctagagaagtgtcccttccctgcaggaagtgatcttgcccagaaatggcatcttatcaaacaacacaccgctccagtgagcccacactccacattttttgatacgtttgatcctagtcttgtctccaccgaagacgaagaagatagattacgcgagcgcaggagacttagtatagaggagggggtcgatccccctcctaacgcgcagatccacacatttgaggcaacagcccaggtcaatcccctgtataagctaggccctaagcttgcacccggtatgacggagatttcaggggactcatcagccatccctcaggccaactgtgattcagaggaggataccactactctgtgccttcagtcacgccgtcagaagcagagacagatttcaggagactctcatactcacgttagcagacagggggcttggaaggtgcatacccaaattgactacatccattgtctggtcccagacctgctacagatcaccggcaacccatgttattggggcgtgatggaccgatatgaagctgaggccctgttggaagggaaaccggaggggacctttctgcttcgcgattccgcacaggaggattacttgttcagcgttagttttcgcaggtacaacagaagcttgcacgcaagaattgaacagtggaatcacaatttctccttcgatgcccacgacccatgtgtgtttcacagcagcaccgttacaggccttctcgagcattataaggatccaagctcctgcatgttcttcgaacctttgctgacgatctccctgaatcggaccttcccgttctcactccagtatatctgccgcgcagtgatatgtcgctgtacaacctacgacgggatcgacggcctgcctcttcccagcatgctccaagactttcttaaagagtatcactataagcaaaaagtccgcgtgagatggcttgagcgcgagccggtaaaggccaagtag

SEQ ID NO: 239738 - DNA, 1611 bp, Artificial Sequence
  derived and/or modified sequence
atggacaaggtgggcaagatgtggaacaattttaagtaccgctgtcagaatctgtttggtcatgaggggggatcccggtctgaaaacgtggatatgaactcgaaccggtgtttaagcgtgaaagaaaagaacatctccatcggtgactctacccctcaacagcagagctcccctctccgcgagaacatcgctctgcagctgggattgtccccaagcaaaaattccagtcggagaaatcagaattgcgctaccgagatcccacaaatcgtggaaatttccatcgagaaggacaatgatagttgcgtgacaccaggaactaggttggccagacgtgatagttactctcgccatgctccctggggcggaaaaaaaaagcacagctgcagcaccaagacacaatcaagtctggatgcagacaaaaaattcggcagaactcgcagcggactccagaggcgggagcggaggtatggtgtcagcagtgtccatgatatggatagcgtgtccagccgcactgttggctcacggtccctgagacagcggctccaggatactgtgggcctctgttttccaatgcgcacatacagtaagcagtctaaaccgttgttctcaaacaaacgaaagatccacttgagcgaactgatgctcgaaaaatgtccatttcctgctggctctgacttggcacagaaatggcatcttatcaagcagcacaccgcaccggtttcacctcactccaccttctttgacacttttgatccaagtctggtatccacggaagacgaagaggatcgcctgcgggaaagacgcagactcagcattgaggagggtgtcgatccccctcctaatgcacagatccacacttttgaagccacggcccaggttaatcctctctacaagctgggccctaaattggcaccgggaatgacagagatctcgggggactcaagtgccattccacaggcaaattgtgattctgaggaggacactacgactctgtgtctccaatccaggaggcagaagcagcgtcagatctcaggcgattcccacacccatgtctcaagacaaggtgcctggaaggtccacacacagatcgattatatccactgcctggtgcccgaccttttgcagattacaggcaacccatgttattggggcgtcatggaccggtacgaggccgaggctctgctggaaggaaagcccgagggaacctttctcctgagagattccgcacaggaggactacttattttcggtgtcctttcggagatataacagatccttacacgcaagaatcgaacagtggaatcataacttttctttcgacgctcatgatccttgcgtgttccattcaagcactgtgactggactcctcgagcattacaaggacccttcctcttgcatgtttttcgaacccctgctcactatctcgctaaatcgcactttccccttctctctccagtatatctgcagggccgtaatatgtaggtgtacaacctacgatggaattgacggtcttccactgcccagcatgctgcaagattttctgaaggagtatcactataaacagaaagttagagtgagatggcttgaaagggagcctgtcaaagctaagtag

SEQ ID NO: 239739 - DNA, 4771 bp, Artificial Sequence
  derived and/or modified sequence
ggcagccgcgcagagcgcgcacccaagcggccggacctccccgactcccgggccgcccccgtctcgcgccctgcctccctccttcggccttcacctacccgcctccggattggccgctaggaatcccgcccctctaaagccctgcctgctattggtcacgattttataatcaatggataaagtgggaaaaatgtggaataacttcaaatacaggtgtcagaatctcttcggtcatgagggaggaagccgtagtgaaaatgtggacatgaactccaacagatgtttgtctgtcaaagagaaaaacatcagcataggagactcaactcctcagcaacaaagcagtcccttaagagaaaatattgccttacaactgggattaagcccttcgaagaattcttcaaggagaaatcaaaattgtgccacagaaatccctcaaattgttgaaataagcatcgaaaaggataatgattcttgtgttaccccaggaacaagacttgcacgaagagattcctactctcgacatgctccatggggtgggaagaaaaaacattcctgttctacaaagacccagagttcattggatgctgataaaaagtttggtagaactcgaagtggacttcaaaggagagagaggcgctacggcgtaagttctgtacacgacatggacagtgtttccagcagaactgtaggaagtcgctctctaagacagaggttgcaggatactgtgggcttgtgttttcccatgagaacttacagcaagcagtcaaagcctctcttttccaataaaagaaaaatccatctctctgaattaatgcttgagaaatgcccttttcctgctggctcagatttagcccaaaaatggcatttgattaaacagcatacagctcctgtgagcccacattcaacattttttgatacatttgatccatctttggtttctacagaagatgaagaagataggcttagagagagaaggcggcttagtattgaagaaggggttgatccccctcccaatgcacaaatacatacatttgaagctactgcacaggttaatccattatataaactgggaccaaaattagctcctggaatgactgaaataagtggggacagttctgcaattccacaagctaattgtgactcggaagaggatacaaccaccctgtgtttgcagtcacggaggcagaagcagcgtcagatatctggagacagccatacccatgttagcagacagggagcttggaaagtccacacacagattgattacatacactgcctcgtgcctgatttgcttcaaattacagggaatccctgttactggggagtgatggaccgttatgaagcagaagcccttctcgaagggaaacctgaaggcacgtttttgctcagggactctgcgcaagaggactacctcttctctgtgagcttccgccgctacaacagatccctgcatgcccgaattgagcagtggaatcacaactttagtttcgacgcccatgacccgtgtgtatttcactcctccactgtaacgggacttttagaacattataaagatcccagttcgtgcatgttttttgaaccattgcttactatatcactaaataggactttcccttttagcctgcagtatatctgtcgcgcggtaatctgcaggtgcactacgtatgatggaattgatgggctccctctaccctcaatgttacaggattttttaaaagagtatcattataaacaaaaagttagagttcgctggttggaacgagaaccagtcaaggcaaagtaaactctccggtccccaaaggttgttaactaggtccgctttcatgtgcatcagacagtacacctatagcaagcacacgtagcagtgttaggctttttcatacagtatgtaagcttagtgttagtatctgtcagatgctacctgctgttacttattcagataaacatggtgcctattggaacaatagcggatagagctacaggtgttcagtaagactacaaaaacattttgcctatttcgctaacagtttggtttttaatggctgtggtatttgagtgaggcaactctggggcatttgttatgaagaattctatttcttactgaagaacaaattattaatattggatgagtatttcaacagtgtgactaatgtttgaaattattttttctaagagtttttctataaccttccaaaagtcgtgatgtttgtagttactataaatcaagctttggaagtccaaaaagaataaaagactgccttccttttagaaaaaaatgcaattttctggccacaagggcatagtgcagttcacttacgtgttgatgtagtttataatcagacgccttttctcttctgcaaaaggtactgttaagtaaaccagattttctaaataggcattcttaaaatttcagacttacaaagctagtagtagaattttattgaaaggcctaggtattaattttttaaatgagtgctttaacttaaaacaggcgtttggaatagctgctgcaatgtagtcttgtgtgtgatttttttttaagttgatgtgcagtctaattgttgtttcataaaagttggatctgttcctatgcccaggatgattttgtgaaccgtgaagtacgtgagactagaagacgcccaaacaagtcagataatagtaactacaatggttgctgatgttgagattattgttgaactataattaataatttggatggcagaatttatctcttttttgtaaactctcataactgaattgcttaagtataatttatagaatttcagtgcagttcattcttaatggaaaatctgaaacctaaattgcagatttaaaaggtactgtacaaccattatatctgtaaataacttagcacctttttgtcacttagaataatatgtactactacttgagtgagcgcttttggaagttatatcaagttctagtgtttgcttcttagtaactgaactgaatttacagttctgtcctagacattttgcactaaagtagccgaatccactctcatgtcttttcgttaatgtgctctgtaccactggtgagtgctccatagtttccttacctgctgctacagaatgttattttacatccctatggctattgccaaggctacaaaaaaggaaagctatatttgtatgcaacactaaccttttgactgctaatgtatgtttctgcttgctgtgccttgttatggctgctttttttgtgctaataaagtatgtttggtgttctccttgtatatctgctgttttatacatttgcaacaatttctcttgtaaatggaatggtttggggtttttaaataagcattaactaacaacctttctatagttaatgcagagttaatgaacagtctaatattgacttatcagaataagctaactctaaatttaatgctctacatcttatcagtcataattatatatactgtggaacagtatctgtagttactgcaaattactgtacagtttaggttataacagaaaactgacagagaagtaataaacctattgatttctctgcttataaatgaaagattgaaactatccaatgacatattatagtaaatgagtatctgtaacctcccactgcatcagaagcaggttaaatgaagtcttgtgaatttgtaatagatcagtaccatttattggtttggggaccatcttaattaaaaataaatgcccaaaatgtagaactttaaccaaagacttgtcccttttaaagcaaaatggggattgaagggacttataatttctgttgtttctaattaaagtccctgaagatcatataccaaagtgtttgagaacttcatccaaacctactttaaagcattatgtgcaattaagttgttatgacataattatattgcctaattgttgggtcttttttcttgagcttataatgtacctggaaaataaacctcttgagaaaaagaaaagttcatactgattattggaaaaggactatatatgtgagcaagattgtgttttagagaggaaacttgaaactccaagaaagcacttgatgtttttatatgcttgtagcaaattgatgttctaactgtagttttatagaaagtattaatgcttttatgtatttcaaaactttcatatgttaaatggaaattgttttaaatgtgtttgagtttatgtaagcatgtatacactgtgctaaaagtcacatgtttcagtttgtgtataatattaatatgcaatttttggtttaaatttttgtcttaaaatattagtggcttacattttaaaaaagaaaaatcaccagcatgaacttgcacctaagtctatattcactgtgtccttttctgaatcccattgtagcctgtcaactaaatttgagtgttaacggtctttttaaagtgcatttaaatacaaaccaggaatttctttagaagttgagatacatctttatagttgaaataattaacccaagaaaaggttgctttgatttgtacccattctcattcattttcttcattcccttacacacacacacacacctctcccttccgcatacatataagtgtgtattatatatttatgtatgcacatatatacatttatgttgttaatattactttagatggcatttccacctgatacaaaaacatttagagatcttattctatagatattacctaaagagtattcttgtactattcgaattttattatctgcactaaaagtttagccttgctactttagccttgtttataatacagtcaccttacaaagagaaa

SEQ ID NO: 239740 - DNA, 4058 bp, Artificial Sequence
  derived and/or modified sequence
gggggttggggggaggggggaggggaaacgggtgaagaaggggaggcggcagggaagggggtgggggcctggcgggggcatccggcggagctggggtccccgggctccgtccggaggaagcgacgctgcgctcgctgggcagtcggaggggacgggacgcaccggagggcaggcggactcgccctgtcggtgactgcgccgtccgggcccgtcctgcctggccgcaggtgccctggatgaggccgccccgcgcgccccaaacgattttataatcaatggataaagtgggaaaaatgtggaataacttcaaatacaggtgtcagaatctcttcggtcatgagggaggaagccgtagtgaaaatgtggacatgaactccaacagatgtttgtctgtcaaagagaaaaacatcagcataggagactcaactcctcagcaacaaagcagtcccttaagagaaaatattgccttacaactgggattaagcccttcgaagaattcttcaaggagaaatcaaaattgtgccacagaaatccctcaaattgttgaaataagcatcgaaaaggataatgattcttgtgttaccccaggaacaagacttgcacgaagagattcctactctcgacatgctccatggggtgggaagaaaaaacattcctgttctacaaagacccagagttcattggatgctgataaaaagtttggtagaactcgaagtggacttcaaaggagagagaggcgctacggcgtaagttctgtacacgacatggacagtgtttccagcagaactgtaggaagtcgctctctaagacagaggttgcaggatactgtgggcttgtgttttcccatgagaacttacagcaagcagtcaaagcctctcttttccaataaaagaaaaatccatctctctgaattaatgcttgagaaatgcccttttcctgctggctcagatttagcccaaaaatggcatttgattaaacagcatacagctcctgtgagcccacattcaacattttttgatacatttgatccatctttggtttctacagaagatgaagaagataggcttagagagagaaggcggcttagtattgaagaaggggttgatccccctcccaatgcacaaatacatacatttgaagctactgcacaggttaatccattatataaactgggaccaaaattagctcctggaatgactgaaataagtggggacagttctgcaattccacaagctaattgtgactcggaagaggatacaaccaccctgtgtttgcagtcacggaggcagaagcagcgtcagatatctggagacagccatacccatgttagcagacagggagcttggaaagtccacacacagattgattacatacactgcctcgtgcctgatttgcttcaaattacagggaatccctgttactggggagtgatggaccgttatgaagcagaagcccttctcgaagggaaacctgaaggcacgtttttgctcagggactctgcgcaagaggactacctcttctctgtgagcttccgccgctacaacagatccctgcatgcccgaattgagcagtggaatcacaactttagtttcgacgcccatgacccgtgtgtatttcactcctccactgtaacgggacttttagaacattataaagatcccagttcgtgcatgttttttgaaccattgcttactatatcactaaataggactttcccttttagcctgcagtatatctgtcgcgcggtaatctgcaggtgcactacgtatgatggaattgatgggctccctctaccctcaatgttacaggattttttaaaagagtatcattataaacaaaaagttagagttcgctggttggaacgagaaccagtcaaggcaaagtaaactctccggtccccaaaggttgttaactaggtccgctttcatgtgcatcagacagtacacctatagcaagcacacgtagcagtgttaggctttttcatacagtatgtaagcttagtgttagtatctgtcagatgctacctgctgttacttattcagataaacatggtgcctattggaacaatagcggatagagctacaggtgttcagtaagactacaaaaacattttgcctatttcgctaacagtttggtttttaatggctgtggtatttgagtgaggcaactctggggcatttgttatgaagaattctatttcttactgaagaacaaattattaatattggatgagtatttcaacagtgtgactaatgtttgaaattattttttctaagagtttttctataaccttccaaaagtcgtgatgtttgtagttactataaatcaagctttggaagtccaaaaagaataaaagactgccttccttttagaaaaaaatgcaattttctggccacaagggcatagtgcagttcacttacgtgttgatgtagtttataatcagacgccttttctcttctgcaaaaggtactgttaagtaaaccagattttctaaataggcattcttaaaatttcagacttacaaagctagtagtagaattttattgaaaggcctaggtattaattttttaaatgagtgctttaacttaaaacaggcgtttggaatagctgctgcaatgtagtcttgtgtgtgatttttttttaagttgatgtgcagtctaattgttgtttcataaaagttggatctgttcctatgcccaggatgattttgtgaaccgtgaagtacgtgagactagaagacgcccaaacaagtcagataatagtaactacaatggttgctgatgttgagattattgttgaactataattaataatttggatggcagaatttatctcttttttgtaaactctcataactgaattgcttaagtataatttatagaatttcagtgcagttcattcttaatggaaaatctgaaacctaaattgcagatttaaaaggtactgtacaaccattatatctgtaaataacttagcacctttttgtcacttagaataatatgtactactacttgagtgagcgcttttggaagttatatcaagttctagtgtttgcttcttagtaactgaactgaatttacagttctgtcctagacattttgcactaaagtagccgaatccactctcatgtcttttcgttaatgtgctctgtaccactggtgagtgctccatagtttccttacctgctgctacagaatgttattttacatccctatggctattgccaaggctacaaaaaaggaaagctatatttgtatgcaacactaaccttttgactgctaatgtatgtttctgcttgctgtgccttgttatggctgctttttttgtgctaataaagtatgtttggtgttctccttgtatatctgctgttttatacatttgcaacaatttctcttgtaaatggaatggtttggggtttttaaataagcattaactaacaacctttctatagttaatgcagagttaatgaacagtctaatattgacttatcagaataagctaactctaaatttaatgctctacatcttatcagtcataattatatatactgtggaacagtatctgtagttactgcaaattactgtacagtttaggttataacagaaaactgacagagaagtaataaacctattgatttctctgcttataaatgaaagattgaaactatccaatgacatattatagtaaatgagtatctgtaacctcccactgcatcagaagcaggttaaatgaagtcttgtgaatttgtaatagatcagtaccatttattggtttggggaccatcttaattaaaaataaatgcccaaaatgtagaactttaaccaaagacttgtcccttttaaagcaaaatggggattgaagggacttataatttctgttgtttctaattaaagtccctgaagatcatataccaaagtgtttgagaacttcatccaaacctactttaaagcattatgtgcaattaagttgttatgacataattatattgcctaattgttgggtcttttttcttgagcttataatgtacctggaaaataaacctcttgagaaaaagaaaa

SEQ ID NO: 239741 - protein, 312 aa, Artificial Sequence
  derived and/or modified sequence
MGARGALLLALLLARAGLRKPESQEAAPLSGPCGRRVITSRIVGGEDAELGRWPWQGSLRLWDSHVCGVSLLSHRWALTAAHCFETDLSDPSGWMVQFGQLTSMPSFWSLQAYYTRYFVSNIYLSPRYLGNSPYDIALVKLSAPVTYTKHIQPICLQASTFEFENRTDCWVTGWGYIKEDEALPSPHTLQEVQVAIINNSMCNHLFLKYSFRKDIFGDMVCAGNAQGGKDACFGDSGGPLACNKNGLWYQIGVVSWGVGCGRPNRPGVYTNISHHFEWIQKLMAQSGMSQPDPSWPLLFFPLLWALPLLGPV

SEQ ID NO: 239742 - DNA, 939 bp, Artificial Sequence
  derived and/or modified sequence
atgggagctcgaggtgcccttctactggcactgctcctggcacgcgccggactcaggaaacctgagtctcaggaagccgcccccctgtctggaccttgtggccggcgagtcatcacgtcacgcatcgtgggaggcgaggacgcagagctcgggagatggccctggcaaggatccctccggctgtgggacagtcatgtctgtggtgtaagcctcctcagtcataggtgggccctgacagcggcacattgcttcgaaactgacttaagtgacccttcaggttggatggtgcaatttggtcagctgacaagcatgccttccttctggtctctgcaggcttattatacccggtactttgtcagtaacatctacctgtcacccagatatcttggaaacagcccctacgacatcgccctggtgaagctctccgcaccggtgacctatacgaaacacatccagccaatctgtttgcaggcatccacctttgagtttgaaaatcggaccgactgttgggtgaccggatggggctatatcaaggaagacgaggcactgccatctccacacacactgcaggaagtgcaggtggcaatcatcaataattccatgtgcaaccaccttttcctcaagtattccttcaggaaggatattttcggcgatatggtatgcgccggtaacgctcagggggggaaggatgcatgttttggagatagcggcgggccactcgcctgtaataaaaacgggctatggtaccaaattggtgtcgtgtcttggggggtgggctgcggacggcccaacaggcccggcgtttataccaacatatcacatcatttcgagtggatccagaagcttatggcacagtcgggcatgtcacaaccagatcctagttggcctctcttattctttccccttctatgggctctgcccctcttggggccagtttag

SEQ ID NO: 239743 - DNA, 939 bp, Artificial Sequence
  derived and/or modified sequence
atgggcgcccggggggccctgctgctggccctgctgctggcccgggccggcctgaggaagccagagagccaggaggccgcccccctgagcggcccctgtggcagaagagtcatcaccagccgcatcgtgggcggggaggatgctgagctgggccgctggccctggcagggcagcctgcggctgtgggacagccacgtgtgtggggtgtccctgctgagccaccgctgggccctgacagctgcccactgctttgaaacagacctgagtgaccccagcggctggatggtgcagtttggccagctgacctccatgcccagcttctggagcctgcaggcctactacacccgctactttgtgagcaacatctacctgagcccccgctacctgggcaacagcccctatgacatcgccctggtgaagctgagcgcccctgtgacctacaccaagcacatccagcccatctgcctgcaggccagcacctttgaatttgagaacagaacagactgctgggtgacaggctggggctacatcaaggaggatgaggccctgcccagcccccacaccctgcaggaggtgcaggtggccatcatcaacaacagcatgtgcaaccacctgttcctgaagtacagcttcaggaaggacatctttggagacatggtgtgtgctggaaatgcccagggcggcaaggatgcctgctttggagacagcggcggccccctggcctgcaacaagaatggcctgtggtaccagattggagtggtgtcctggggcgtgggctgcggccggcccaacagacctggggtgtacaccaacatcagccaccactttgagtggatccagaagctgatggcccagagcggcatgagccagcctgaccccagctggcccctgctcttcttccccctgctgtgggccctgcccctgctgggccctgtgtag

SEQ ID NO: 239744 - DNA, 939 bp, Artificial Sequence
  derived and/or modified sequence
atgggcgcccggggcgccctgctgctggccctgctgctggcccgggcaggcttgcggaaacctgagtcccaagaagcagcccctttaagcgggccctgcggtcggcgagtcattacaagtcgtatcgtgggtggcgaagacgcggagctaggtcggtggccttggcaggggagcttgcggctctgggacagtcacgtctgcggcgtatccctcctttcccaccgctgggccctgactgctgctcactgcttcgagactgacctgagcgatccctcagggtggatggtgcagtttgggcagcttacttctatgcccagtttctggagcctccaggcgtattacacacggtactttgtcagcaatatatacttatccccaaggtacctcggcaattcaccttacgatatcgctttggttaaactatccgcacctgtcacctacaccaagcacatacagcccatctgtctgcaggcaagtacgtttgagtttgaaaataggaccgattgctgggtgacaggctggggttatataaaggaagacgaagcattacccagccctcatactctgcaggaggtccaggtagcaataattaacaatagcatgtgcaaccatttatttctgaaatactcatttcgtaaagacatcttcggcgacatggtttgcgctggaaatgctcagggcggcaaagatgcctgttttggagactccggcggccctctggcctgcaataagaatggcctgtggtaccaaatcggagtggtttcgtggggggtggggtgcgggcgccccaataggccaggcgtttataccaatatctcccaccatttcgagtggatacaaaagttgatggcccagagcggcatgagtcagcctgatccatcctggccattgctgttcttcccattgttatgggccctccccctcctggggccagtctag

SEQ ID NO: 239745 - DNA, 939 bp, Artificial Sequence
  derived and/or modified sequence
atgggggctaggggtgctctcctgttggccctattattggcgagggccggtctgagaaaacctgagtcccaagaagccgcacccttgagtggaccatgtggcagaagggtgatcacctcccggatagtgggcggtgaggacgcagaactggggcgatggccttggcagggcagtttgaggctgtgggacagccatgtatgtggggtctctctgctctcacaccgttgggctctcactgccgcacactgctttgagaccgaccttagcgatccaagtgggtggatggtgcagttcggtcagttaaccagcatgcccagcttctggtctctgcaagcctattacactaggtacttcgtgtctaatatctacctgtcaccgaggtacctcggcaacagtccttacgatatagcactcgtcaagctgagcgcacccgttacatacactaaacatattcagccaatctgtttacaagcctctacctttgaatttgagaatagaaccgactgttgggttactgggtggggttatattaaggaagatgaagccctgccaagcccgcacaccttacaggaagtgcaggtcgccatcattaacaactcgatgtgtaaccatctgttcttaaagtattcttttaggaaggacatatttggcgatatggtttgcgccggaaacgctcaggggggaaaagacgcttgtttcggagacagtggcggaccgcttgcttgcaacaagaatggcctgtggtatcagattggcgtggtcagttggggagtgggatgtgggagacccaacagacctggcgtatacaccaatattagccaccacttcgagtggattcagaagctgatggctcagtccggcatgagccagccggacccctcttggcctctgctattctttcccttgctgtgggcactccctttgctgggtcctgtttag

SEQ ID NO: 239746 - DNA, 873 bp, Artificial Sequence
  derived and/or modified sequence
tgctggcgctgctgctggctcgggctggactcaggaagccggagtcgcaggaggcggcgccgttatcaggaccatgcggccgacgggtcatcacgtcgcgcatcgtgggtggagaggacgccgaactcgggcgttggccgtggcaggggagcctgcgcctgtgggattcccacgtatgcggagtgagcctgctcagccaccgctgggcactcacggcggcgcactgctttgaaactgaccttagtgatccctccgggtggatggtccagtttggccagctgacttccatgccatccttctggagcctgcaggcctactacacccgttacttcgtatcgaatatctatctgagccctcgctacctggggaattcaccctatgacattgccttggtgaagctgtctgcacctgtcacctacactaaacacatccagcccatctgtctccaggcctccacatttgagtttgagaaccggacagactgctgggtgactggctgggggtacatcaaagaggatgagggaagttcaggtcgccatcataaacaactctatgtgcaaccacctcttcctcaagtacagtttccgcaaggacatctttggagacatggtttgtgctggcaatgcccaaggcgggaaggatgcctgcttcggtgactcaggtggacccttggcctgtaacaagaatggactgtggtatcagattggagtcgtgagctggggagtgggctgtggtcggcccaatcggcccggtgtctacaccaatatcagccaccactttgagtggatccagaagctgatggcccagagtggcatgtcccagccagacccctcctggccgctactctttttccctcttctctgggctctccca

SEQ ID NO: 239747 - DNA, 1159 bp, Artificial Sequence
  derived and/or modified sequence
gctgggagtagagggcagagctcccaccccgccccgcccccagggggcgccccgggcccggcgcgagaggaggcagagggggcgtcaggccgcgggagaggaggccatgggcgcgcgcggggcgctgctgctggcgctgctgctggctcgggctggactcaggaagccggagtcgcaggaggcggcgccgttatcaggaccatgcggccgacgggtcatcacgtcgcgcatcgtgggtggagaggacgccgaactcgggcgttggccgtggcaggggagcctgcgcctgtgggattcccacgtatgcggagtgagcctgctcagccaccgctgggcactcacggcggcgcactgctttgaaactgaccttagtgatccctccgggtggatggtccagtttggccagctgacttccatgccatccttctggagcctgcaggcctactacacccgttacttcgtatcgaatatctatctgagccctcgctacctggggaattcaccctatgacattgccttggtgaagctgtctgcacctgtcacctacactaaacacatccagcccatctgtctccaggcctccacatttgagtttgagaaccggacagactgctgggtgactggctgggggtacatcaaagaggatgaggcactgccatctccccacaccctccaggaagttcaggtcgccatcataaacaactctatgtgcaaccacctcttcctcaagtacagtttccgcaaggacatctttggagacatggtttgtgctggcaatgcccaaggcgggaaggatgcctgcttcggtgactcaggtggacccttggcctgtaacaagaatggactgtggtatcagattggagtcgtgagctggggagtgggctgtggtcggcccaatcggcccggtgtctacaccaatatcagccaccactttgagtggatccagaagctgatggcccagagtggcatgtcccagccagacccctcctggccgctactctttttccctcttctctgggctctcccactcctggggccggtctgagcctacctgagcccatgcagcctggggccactgccaagtcaggccctggttctcttctgtcttgtttggtaataaacacattccagttgatgccttgcagggcattcttcaaaa

SEQ ID NO: 239748 - DNA, 939 bp, Artificial Sequence
  derived and/or modified sequence
atgggcgccagaggcgccctgctgctggccctgctgctggccagagccggcctgagaaagcccgagagccaggaggccgcccccctgagcggcccctgcggcagaagagtgatcaccagcagaatcgtgggcggcgaggacgccgagctgggcagatggccctggcagggcagcctgagactgtgggacagccacgtgtgcggcgtgagcctgctgagccacagatgggccctgaccgccgcccactgcttcgagaccgacctgagcgaccccagcggctggatggtgcagttcggccagctgaccagcatgcccagcttctggagcctgcaggcctactacaccagatacttcgtgagcaacatctacctgagccccagatacctgggcaacagcccctacgacatcgccctggtgaagctgagcgcccccgtgacctacaccaagcacatccagcccatctgcctgcaggccagcaccttcgagttcgagaacagaaccgactgctgggtgaccggctggggctacatcaaggaggacgaggccctgcccagcccccacaccctgcaggaggtgcaggtggccatcatcaacaacagcatgtgcaaccacctgttcctgaagtacagcttcagaaaggacatcttcggcgacatggtgtgcgccggcaacgcccagggcggcaaggacgcctgcttcggcgacagcggcggccccctggcctgcaacaagaacggcctgtggtaccagatcggcgtggtgagctggggcgtgggctgcggcagacccaacagacccggcgtgtacaccaacatcagccaccacttcgagtggatccagaagctgatggcccagagcggcatgagccagcccgaccccagctggcccctgctgttcttccccctgctgtgggccctgcccctgctgggccccgtgtag

SEQ ID NO: 239749 - protein, 300 aa, Artificial Sequence
  derived and/or modified sequence
MGARGALLLALLLARAGLRKPESQEAAPLSGPCGRRVITSRIVGGEDAELGRWPWQGSLRLWDSHVCGVSLLSHRWALTAAHCFETYSDLSDPSGWMVQFGQLTSMPSFWSLQAYYTRYFVSNIYLSPRYLGNSPYDIALVKLSAPVTYTKHIQPICLQASTFEFENRTDCWVTGWGYIKEDEALPSPHTLQEVQVAIINNSMCNHLFLKYSFRKDIFGDMGDSGGPLACNKNGLWYQIGVVSWGVGCGRPNRPGVYTNISHHFEWIQKLMAQSGMSQPDPSWPLLFFPLLWALPLLGPV

SEQ ID NO: 239750 - DNA, 903 bp, Artificial Sequence
  derived and/or modified sequence
atgggtgcccggggagccttgttgctggctctgctgctggcccgcgctggtctccgaaagcccgagtcacaggaagctgcacctttgtctggaccatgcggtagacgggtgatcacctctcggatagtggggggcgaggacgcggagttgggaaggtggccttggcagggctctctgagactgtgggacagccacgtatgcggagtgtctctactttctcataggtgggctctgaccgccgcgcactgttttgaaacctattctgatttgagtgatccttccggatggatggtgcagttcggccagctcacgtctatgcctagcttctggtctctgcaggcctactatacacggtatttcgtgagcaatatttacctgtcaccacgatatctgggaaacagcccctacgacattgccctcgtgaaactttcagcaccagtcacttataccaagcatattcagcctatctgtttgcaggccagtaccttcgaatttgagaaccgcacggactgctgggttacaggctgggggtatatcaaagaggacgaggccctgccaagtccccacactcttcaggaggtgcaggtggcaataattaacaacagtatgtgcaatcacttatttttgaagtatagcttccggaaggacatttttggcgatatgggggatagcggcgggccactagcatgcaataagaatggcttgtggtatcagatcggcgtggtgtcgtggggcgtaggctgtgggaggcccaaccgccccggggtatataccaacattagccatcatttcgagtggatccagaagctaatggcccagagtgggatgtcacagcctgacccatcttggcccttgctgtttttccctctgctgtgggccttgcccctgttgggccctgtgtag

SEQ ID NO: 239751 - DNA, 903 bp, Artificial Sequence
  derived and/or modified sequence
atgggcgcccggggggccctgctgctggccctgctgctggcccgggccggcctgaggaagccagagagccaggaggccgcccccctgagcggcccctgtggcagaagagtcatcaccagccgcatcgtgggcggggaggatgctgagctgggccgctggccctggcagggcagcctgcggctgtgggacagccacgtgtgtggggtgtccctgctgagccaccgctgggccctgacagctgcccactgctttgagacctacagcgacctgagtgaccccagcggctggatggtgcagtttggccagctgacctccatgcccagcttctggagcctgcaggcctactacacccgctactttgtgagcaacatctacctgagcccccgctacctgggcaacagcccctatgacatcgccctggtgaagctgagcgcccctgtgacctacaccaagcacatccagcccatctgcctgcaggccagcacctttgaatttgagaacagaacagactgctgggtgacaggctggggctacatcaaggaggatgaggccctgcccagcccccacaccctgcaggaggtgcaggtggccatcatcaacaacagcatgtgcaaccacctgttcctgaagtacagcttcaggaaggacatctttggagacatgggagacagcggcggccccctggcctgcaacaagaatggcctgtggtaccagattggagtggtgtcctggggcgtgggctgcggccggcccaacagacctggggtgtacaccaacatcagccaccactttgagtggatccagaagctgatggcccagagcggcatgagccagcctgaccccagctggcccctgctcttcttccccctgctgtgggccctgcccctgctgggccctgtgtag

SEQ ID NO: 239752 - DNA, 903 bp, Artificial Sequence
  derived and/or modified sequence
atgggcgcccggggcgccctgctgctggccctgctgctggcccgggctgggctccgaaagcctgaatcacaagaggctgcgccattatctggtccttgtggtcgtcgggtcattacttcacggatcgttggaggggaggatgccgaattaggtcggtggccttggcaaggcagccttcgtctgtgggacagtcatgtttgcggcgtcagtcttctgtcccatcgctgggcacttaccgccgcacattgtttcgagacctactctgacttgtctgacccctctgggtggatggtacagttcggacaacttacaagtatgccatcattttggtccttgcaggcctattatacccgctactttgtcagtaatatctatctgtcgccccggtatctgggcaactccccttacgacattgccttagtgaaactaagtgctcctgtaacctacaccaagcatatccagcctatatgcctgcaggcatccacattcgagtttgaaaatcgcacagattgctgggttactgggtgggggtatatcaaagaagacgaagcactcccctccccccacactctacaggaagtgcaggtggcgattattaataattccatgtgcaaccacctctttctgaagtattcctttcgaaaggacatttttggtgacatgggagactcgggcggaccactcgcttgcaacaaaaacggcttgtggtaccaaatcggtgttgtgtcatggggcgttggatgtggccgacctaacagaccaggagtgtatacaaacatttcacaccatttcgagtggattcagaaactgatggctcagagcggcatgagtcaacccgatccttcctggccactgcttttttttccattgctgtgggccctacctctgttaggtcctgtgtag

SEQ ID NO: 239753 - DNA, 903 bp, Artificial Sequence
  derived and/or modified sequence
atgggtgcccgaggagcattgttgttggccttgttactcgcacgcgctggactgcggaagccagaatcacaagaagccgcaccccttagcggcccatgtggacggcgagttattaccagcaggatcgtgggaggcgaggatgccgaactcggtcgttggccatggcagggctctctaagattatgggatagccatgtgtgtggagtgagcctgctgtcacatagatgggccctaaccgccgctcactgcttcgagacctacagtgacctgtcagatcccagcgggtggatggtccagtttggacagctcacttcaatgcccagcttctggagtctgcaagcatattacacaaggtactttgtgtcgaatatctacctctccccacggtatctggggaacagcccctacgacatcgctcttgtgaaactttccgctccagtgacatataccaagcatatccagcccatttgccttcaggcttccacatttgagtttgaaaaccgaaccgattgctgggtgaccggctggggctacatcaaggaagacgaagctttacccagtccccataccctacaggaggtgcaggtggcaattataaacaatagtatgtgtaatcaccttttcttaaagtactcgttcaggaaagacatcttcggcgatatgggggactccggtggacctttggcatgcaacaagaacggcctgtggtaccagattggtgtcgtgtcctggggagtgggatgcggtcggcctaataggcccggagtctatacgaacatttcccaccacttcgaatggatacagaagttgatggcacaatctggtatgtcccagccagatccctcttggcctcttttgttcttcccccttctttgggcattgccactccttggcccagtctag

SEQ ID NO: 239754 - DNA, 1119 bp, Artificial Sequence
  derived and/or modified sequence
gctgggagtagagggcagagctcccaccccgccccgcccccagggggcgccccgggcccggcgcgagaggaggcagagggggcgtcaggccgcgggagaggaggccatgggcgcgcgcggggcgctgctgctggcgctgctgctggctcgggctggactcaggaagccggagtcgcaggaggcggcgccgttatcaggaccatgcggccgacgggtcatcacgtcgcgcatcgtgggtggagaggacgccgaactcgggcgttggccgtggcaggggagcctgcgcctgtgggattcccacgtatgcggagtgagcctgctcagccaccgctgggcactcacggcggcgcactgctttgaaacctatagtgaccttagtgatccctccgggtggatggtccagtttggccagctgacttccatgccatccttctggagcctgcaggcctactacacccgttacttcgtatcgaatatctatctgagccctcgctacctggggaattcaccctatgacattgccttggtgaagctgtctgcacctgtcacctacactaaacacatccagcccatctgtctccaggcctccacatttgagtttgagaaccggacagactgctgggtgactggctgggggtacatcaaagaggatgaggcactgccatctccccacaccctccaggaagttcaggtcgccatcataaacaactctatgtgcaaccacctcttcctcaagtacagtttccgcaaggacatctttggagacatgggtgactcaggtggacccttggcctgtaacaagaatggactgtggtatcagattggagtcgtgagctggggagtgggctgtggtcggcccaatcggcccggtgtctacaccaatatcagccaccactttgagtggatccagaagctgatggcccagagtggcatgtcccagccagacccctcctggccgctactctttttccctcttctctgggctctcccactcctggggccggtctgagcctacctgagcccatgcagcctggggccactgccaagtcaggccctggttctcttctgtcttgtttggtaataaacacattccagttgatgccttgcagggcattcttc

SEQ ID NO: 239755 - DNA, 903 bp, Artificial Sequence
  derived and/or modified sequence
atgggcgccagaggcgccctgctgctggccctgctgctggccagagccggcctgagaaagcccgagagccaggaggccgcccccctgagcggcccctgcggcagaagagtgatcaccagcagaatcgtgggcggcgaggacgccgagctgggcagatggccctggcagggcagcctgagactgtgggacagccacgtgtgcggcgtgagcctgctgagccacagatgggccctgaccgccgcccactgcttcgagacctacagcgacctgagcgaccccagcggctggatggtgcagttcggccagctgaccagcatgcccagcttctggagcctgcaggcctactacaccagatacttcgtgagcaacatctacctgagccccagatacctgggcaacagcccctacgacatcgccctggtgaagctgagcgcccccgtgacctacaccaagcacatccagcccatctgcctgcaggccagcaccttcgagttcgagaacagaaccgactgctgggtgaccggctggggctacatcaaggaggacgaggccctgcccagcccccacaccctgcaggaggtgcaggtggccatcatcaacaacagcatgtgcaaccacctgttcctgaagtacagcttcagaaaggacatcttcggcgacatgggcgacagcggcggccccctggcctgcaacaagaacggcctgtggtaccagatcggcgtggtgagctggggcgtgggctgcggcagacccaacagacccggcgtgtacaccaacatcagccaccacttcgagtggatccagaagctgatggcccagagcggcatgagccagcccgaccccagctggcccctgctgttcttccccctgctgtgggccctgcccctgctgggccccgtgtag

SEQ ID NO: 239756 - protein, 227 aa, Artificial Sequence
  derived and/or modified sequence
MGWTMRLVTAALLLGLMMVVTGDEDENSPCAHEALLDEDTLFCQGLEVFYPELGNIGCKVVPDCNNYRQKITSWMEPIVKFPGAVDGATYILVMVDPDAPSRAEPRQRFWRHWLVTDIKGADLKKGKIQGQELSAYQAPSPPAHSGFHRYQFFVYLQEGKVISLLPKENKTRGSWKMDRFLNRFHLGEPEASTQFMTQNYQDSPTLQAPRERASEPKHKNQAEIAAC

SEQ ID NO: 239757 - DNA, 684 bp, Artificial Sequence
  derived and/or modified sequence
atgggctggaccatgagactggtgaccgccgccctgctgctgggcctgatgatggtggtgaccggcgacgaggacgagaacagcccctgcgcccacgaggccctgctggacgaggacaccctgttctgccagggcctggaggtgttctaccccgagctgggcaacatcggctgcaaggtggtgcccgactgcaacaactacagacagaagatcaccagctggatggagcccatcgtgaagttccccggcgccgtggacggcgccacctacatcctggtgatggtggaccccgacgcccccagcagagccgagcccagacagagattctggagacactggctggtgaccgacatcaagggcgccgacctgaagaagggcaagatccagggccaggagctgagcgcctaccaggcccccagcccccccgcccacagcggcttccacagataccagttcttcgtgtacctgcaggagggcaaggtgatcagcctgctgcccaaggagaacaagaccagaggcagctggaagatggacagattcctgaacagattccacctgggcgagcccgaggccagcacccagttcatgacccagaactaccaggacagccccaccctgcaggcccccagagagagagccagcgagcccaagcacaagaaccaggccgagatcgccgcctgctag

SEQ ID NO: 239758 - DNA, 684 bp, Artificial Sequence
  derived and/or modified sequence
atgggttggacaatgcgtctggtcaccgcagcactgctgctcggactgatgatggtggttacgggcgatgaggacgagaacagcccttgcgcgcacgaggctcttctggacgaggacacactcttttgccagggcctcgaagtcttctatccggagctcggcaacattggttgtaaagtggtccccgactgcaacaattacagacaaaagatcacctcgtggatggagcctattgtgaagtttcctggagccgtagatggcgctacttacatattagttatggtggatcctgatgctccaagcagggctgagcctagacaacggttttggcggcattggctggtgacggatataaaaggtgctgatctaaagaagggcaagattcaggggcaagagctctcagcttaccaggcccctagcccaccagcccacagtggattccatagatatcagttctttgtatatctacaggaggggaaggtcatctcactgcttccaaaggaaaacaagactcggggatcttggaagatggatagatttctaaaccgtttccacctgggagaacccgaggcttcaactcagttcatgacacagaattaccaggacagtcctacgctgcaggccccccgagaacgtgcgtccgaaccgaaacacaagaaccaggcagagatcgccgcctgctag

SEQ ID NO: 239759 - DNA, 684 bp, Artificial Sequence
  derived and/or modified sequence
atgggctggaccatgaggctggtgacagctgccctgctgctgggcctgatgatggtggtgactggagatgaagatgagaacagcccctgtgcccacgaggccctgctggatgaggacaccctcttctgccagggcctggaggtgttctacccagagctgggcaacatcggctgcaaggtggtgcctgactgcaacaactaccggcagaagatcacctcctggatggagcccatcgtgaagtttcctggagctgtggatggagccacctacatcctggtgatggtggaccctgatgcccccagcagagctgagccccggcagcgcttctggaggcactggctggtgacagacatcaagggagctgacctgaagaagggcaagatccagggccaggagctgagcgcctaccaggcccccagccccccagcccacagcggcttccaccgctaccagttctttgtgtacctgcaggagggcaaggtgatcagcctgctgcccaaggagaacaagacccggggctcctggaagatggaccgcttcctgaaccgcttccacctgggggagcctgaggccagcacccagttcatgacccagaactaccaggacagccccaccctgcaggccccccgggagcgggccagcgagcccaagcacaagaaccaggccgagattgctgcctgctag

SEQ ID NO: 239760 - DNA, 684 bp, Artificial Sequence
  derived and/or modified sequence
atgggctggaccatgcggctggtgaccgccgccctgctgctgggcttaatgatggtggtaactggcgatgaggacgagaattccccttgcgcacacgaagcactgctggatgaagacaccctgttctgccaaggcctggaggttttttaccctgagttggggaacatcggttgtaaggtggtcccagactgtaataactaccggcagaaaataacctcgtggatggaacccattgtaaaatttcctggggccgtggacggagctacttacatcctggttatggtagatccagatgcaccatctagggcagaacctagacagcgtttctggcgacattggctggtgaccgatattaagggtgccgatctgaaaaaaggcaaaatccaggggcaggaactgtcagcctatcaggctccgtctcctcccgcccactcgggttttcaccgttatcagttttttgtctacctgcaagaaggcaaggtgatcagtctcctgcctaaagagaacaaaaccaggggaagctggaaaatggacagatttcttaaccgcttccacctcggagaacccgaagcctcaacacagttcatgactcagaattatcaggattcgccaactctgcaggcgccacgtgagagagcgtccgagcctaaacacaagaatcaggccgaaatcgccgcatgttag

SEQ ID NO: 239761 - DNA, 890 bp, Artificial Sequence
  derived and/or modified sequence
cccaaagtacttgtgtccgggtggtggactggattagctgcggagccctggaagctgcctgtccttctccctgtgcttaaccagaggtgcccatgggttggacaatgaggctggtcacagcagcactgttactgggtctcatgatggtggtcactggagacgaggatgagaacagcccgtgtgcccatgaggccctcttggacgaggacaccctcttttgccagggccttgaagttttctacccagagttggggaacattggctgcaaggttgttcctgattgtaacaactacagacagaagatcacctcctggatggagccgatagtcaagttcccgggggccgtggacggcgcaacctatatcctggtgatggtggatccagatgcccctagcagagcagaacccagacagagattctggagacattggctggtaacagatatcaagggcgccgacctgaagaaagggaagattcagggccaggagttatcagcctaccaggctccctccccaccggcacacagtggcttccatcgctaccagttctttgtctatcttcaggaaggaaaagtcatctctctccttcccaaggaaaacaaaactcgaggctcttggaaaatggacagatttctgaaccgtttccacctgggcgaacctgaagcaagcacccagttcatgacccagaactaccaggactcaccaaccctccaggctcccagagaaagggccagcgagcccaagcacaaaaaccaggcggagatagctgcctgctagatagccggctttgccatccgggcatgtggccacactgcccaccaccgacgatgtgggtatggaaccccctctggatacagaaccccttcttttccaaataaaaaaaaaatcatc

SEQ ID NO: 239762 - DNA, 684 bp, Artificial Sequence
  derived and/or modified sequence
atgggctggactatgcggctggtgaccgctgccctcctcctcggactgatgatggtggtgaccggagacgaagatgaaaatagcccctgcgcacacgaagctcttctcgacgaagatactctcttttgccagggattggaagttttctaccctgagttaggtaatatcggatgtaaagtggtccccgattgcaataactaccgacaaaagattaccagctggatggaacctatcgtcaaattccctggggcagttgatggcgctacatatattttggtgatggtggacccagacgcaccatctcgcgcagagcccagacaacgcttttggcggcattggctcgtgaccgacattaaaggcgcagacttaaaaaagggcaaaatccaggggcaggagctgtccgcttaccaagccccaagtccaccagcgcactccggattccatcgttaccaattcttcgtatatctgcaggaggggaaagttatctcactactacctaaggagaacaaaacaagaggcagttggaaaatggaccgctttttaaaccgtttccatctgggcgagcctgaagcgtccacgcagttcatgacacagaactaccaggattcacccaccttgcaggcacccagagaacgtgcttctgagcctaaacataagaaccaggcggagattgccgcatgttag

SEQ ID NO: 239763 - protein, 337 aa, Artificial Sequence
  derived and/or modified sequence
MRRGWKMALSGGLRCCRRVLSWVPVLVIVLVVLWSYYAYVFELCLVTVLSPAEKVIYLILYHAIFVFFTWTYWKSIFTLPQQPNQKFHLSYTDKERYENEERPEVQKQMLVDMAKKLPVYTRTGSGAVRFCDRCHLIKPDRCHHCSVCAMCVLKMDHHCPWVNNCIGFSNYKFFLQFLAYSVLYCLYIATTVFSYFIKYWRGELPSVRSKFHVLFLLFVACMFFVSLVILFGYHCWLVSRNKTTLEAFCTPVFTSGPEKNGFNLGFIKNIQQVFGDKKKFWLIPIGSSPGDGHSFPMRSMNESQNPLLANEETWEDNEDDNQDYPEGSSSLAVETET

SEQ ID NO: 239764 - DNA, 1014 bp, Artificial Sequence
  derived and/or modified sequence
atgagaagaggctggaagatggccctgagcggcggcctgagatgctgcagaagagtgctgagctgggtgcccgtgctggtgatcgtgctggtggtgctgtggagctactacgcctacgtgttcgagctgtgcctggtgaccgtgctgagccccgccgagaaggtgatctacctgatcctgtaccacgccatcttcgtgttcttcacctggacctactggaagagcatcttcaccctgccccagcagcccaaccagaagttccacctgagctacaccgacaaggagagatacgagaacgaggagagacccgaggtgcagaagcagatgctggtggacatggccaagaagctgcccgtgtacaccagaaccggcagcggcgccgtgagattctgcgacagatgccacctgatcaagcccgacagatgccaccactgcagcgtgtgcgccatgtgcgtgctgaagatggaccaccactgcccctgggtgaacaactgcatcggcttcagcaactacaagttcttcctgcagttcctggcctacagcgtgctgtactgcctgtacatcgccaccaccgtgttcagctacttcatcaagtactggagaggcgagctgcccagcgtgagaagcaagttccacgtgctgttcctgctgttcgtggcctgcatgttcttcgtgagcctggtgatcctgttcggctaccactgctggctggtgagcagaaacaagaccaccctggaggccttctgcacccccgtgttcaccagcggccccgagaagaacggcttcaacctgggcttcatcaagaacatccagcaggtgttcggcgacaagaagaagttctggctgatccccatcggcagcagccccggcgacggccacagcttccccatgagaagcatgaacgagagccagaaccccctgctggccaacgaggagacctgggaggacaacgaggacgacaaccaggactaccccgagggcagcagcagcctggccgtggagaccgagacctag

SEQ ID NO: 239765 - DNA, 1014 bp, Artificial Sequence
  derived and/or modified sequence
atgcgacggggatggaaaatggccttgtccggtggcctccgatgctgtcgccgggtgctatcatgggtacctgtgcttgtcatcgttctggtagtgttatggtcgtattatgcctacgtgttcgaactctgcctcgtcactgtcctctcccctgccgagaaggtaatctacctgattctctatcacgcaatcttcgtgtttttcacctggacctattggaagtccatcttcaccctgccacaacagcccaaccaaaaatttcatttaagctacacagacaaagagcgatacgagaacgaggagcgaccagaggttcaaaagcaaatgctcgtggatatggctaagaagctgccggtgtacacccggaccggcagcggagctgtcaggttctgtgatcgatgtcacctgataaaacccgatcggtgccaccattgcagcgtctgtgcaatgtgtgtactgaagatggatcaccattgtccgtgggtgaataactgtatcggtttctctaattataaattctttctgcaatttctggcctacagcgtgctatattgtctttatattgcgactaccgtttttagctacttcatcaagtattggcggggagaactccctagcgttaggagtaagttccacgtgctatttctgttattcgtcgcttgcatgttctttgtttcattggtaattttattcggttatcattgttggctcgttagtcgcaacaagaccacgctggaggccttctgcacaccagtatttacctccggtcccgagaagaatggttttaacttggggttcattaaaaacatacagcaggtgtttggcgacaagaaaaagttctggctcattccaatcgggagctcgccaggggatggacactccttcccaatgcggagcatgaacgagagtcagaatccacttctggctaatgaggagacttgggaggataatgaagacgacaaccaagactacccagaagggagttcatccctcgctgttgagacagagacatag

SEQ ID NO: 239766 - DNA, 1014 bp, Artificial Sequence
  derived and/or modified sequence
atgaggcggggctggaagatggccctgagcggcggcctgcgctgctgcagaagagtgctgtcctgggtgcctgtgctggtgattgtgctggtggtgctgtggagctactatgcctacgtgtttgagctgtgcctggtgacagtgctgagccctgctgagaaggtgatctacctgatcctgtaccacgccatctttgtgttcttcacctggacctactggaagagcatcttcaccctgccccagcagcccaaccagaagttccacctgagctacacagacaaggagagatatgaaaatgaggagaggcctgaggtgcagaagcagatgctggtggacatggccaagaagctgcctgtgtacaccaggactggaagtggagctgtgcgcttctgtgaccgctgccacctgatcaagccagaccgctgccaccactgcagcgtgtgtgccatgtgtgtgctgaagatggaccaccactgcccctgggtgaacaactgcatcggcttcagcaactacaagttcttcctgcagttcctggcctacagcgtgctgtactgcctgtacatcgccaccaccgtcttctcctacttcatcaagtactggagaggagagctgcccagcgtgcgcagcaagttccacgtgctcttcctgctgtttgtggcctgcatgttctttgtgtccctggtgatcctgtttggctaccactgctggctggtgtccaggaacaagaccaccctggaggccttctgcacccctgtgttcaccagcggccctgagaagaatggcttcaacctgggcttcatcaagaacatccagcaggtgtttggagacaagaagaagttctggctgatccccatcggcagcagccctggagatggccacagcttccccatgaggtccatgaatgaaagccagaaccccctgctggccaatgaggagacctgggaggacaatgaagatgacaaccaggactacccagagggcagcagcagcctggccgtggagacagagacctag

SEQ ID NO: 239767 - DNA, 1014 bp, Artificial Sequence
  derived and/or modified sequence
atgcggcggggctggaagatggccctgagcggcggcctgcggtgctgcagacgcgttctcagctgggtgcctgttctcgtaatagtgctggtggtcctatggtcttactatgcctacgttttcgagctctgcctggtgaccgtcctgtcccctgccgagaaagtgatctatctaatcctctaccatgcaatctttgtgttctttacatggacctattggaaaagtattttcacgctcccgcagcagccaaaccagaagttccacctctcctacaccgacaaggaaagatacgaaaacgaggagaggccagaagtgcagaagcagatgctcgtcgacatggcaaagaagctgcccgtctacacgagaactggatccggcgctgttagattctgcgataggtgccacctgatcaaaccagacagatgccatcattgtagtgtgtgcgcgatgtgtgtgctgaaaatggaccaccattgtccatgggtgaataattgcatcggcttttcaaactataaatttttcctccagtttctggcatattcagtcctttattgcctgtatattgcaacaactgttttctcttacttcatcaaatactggcgaggcgagctccctagcgtcaggtctaagttccacgttctttttctgttattcgtggcttgcatgttcttcgtctcactagtgattcttttcgggtatcactgctggctggtgagccggaataagaccacattggaggctttctgcacacccgtattcactagtggacctgaaaagaacgggttcaatctcggattcatcaaaaatatccaacaggtcttcggagataaaaaaaagttctggttgatcccaattggctccagccctggagatgggcacagctttcctatgaggtcaatgaacgagtcccagaaccctctgttagctaacgaggagacttgggaggacaatgaggacgataatcaggactatcctgagggctcttcttccctggctgtggaaaccgaaacatag

SEQ ID NO: 239768 - DNA, 1014 bp, Artificial Sequence
  derived and/or modified sequence
atgaggcgcggatggaaaatggccctgagtggcggattgagatgctgtagaagagtgctgagctgggtacctgttctcgtgatagttctcgtcgtactctggagctattatgcttacgtcttcgagctctgtttagtcaccgttctatccccagctgaaaaggttatctatctcattctctatcatgccattttcgtattttttacctggacgtactggaaaagtatctttactctcccccagcagccaaaccagaaatttcacctgtcttatacagataaggagaggtacgaaaatgaagaacggcctgaggtccagaagcaaatgctagtggatatggcgaagaaactgcccgtgtatacccgtacaggaagcggcgcagtccgcttctgcgacaggtgtcacctaattaaacctgaccgctgtcatcattgcagcgtgtgcgctatgtgcgtgctgaaaatggaccaccactgcccatgggtgaacaattgcattgggttctcaaattataaatttttcctgcagttcctcgcctactcagtgctgtattgtctgtacatcgccaccaccgttttcagctactttatcaagtactggagaggcgaactgccctcagtgagaagtaagtttcatgtcctgttcctactcttcgtcgcttgcatgttttttgtgtcattggtgatcctttttggctaccactgctggctggtgtcacggaataaaacaaccctggaggcgttttgcacccccgtgtttactagcggaccagagaaaaacggctttaacttgggtttcattaaaaacattcagcaagtttttggcgacaaaaaaaaattttggctgatcccaattggcagttccccgggagacgggcattcctttcctatgaggagcatgaacgaaagtcagaaccctcttttggccaacgaagagacctgggaagataacgaagacgataatcaggattacccagaggggagcagctccctggcggtcgagacagagacttag

SEQ ID NO: 239769 - DNA, 897 bp, Artificial Sequence
  derived and/or modified sequence
tcttcgagccaaagatgcggcgaggctggaagatggctctgtctggggggctgcggtgctgccgccgggtactgtcctgggtgccagtgctcgttattgtcctcgtcgtgctctggtcctactatgcctacgtctttgaactctgcctggtgactgttttgagcccagcagaaaaagttatttacctcatactctaccatgccatctttgtgttctttacctggacctactggaagtctatctttacactcccacagcagccaaaccagaagttccacttgtcctacacagacaaggagcgctatgaaaatgaagaaagacctgaggtccagaagcagatgcttgttgatatggccaaaaagctaccggtttacacaagaactggaagtggagctgtacgattctgtgaccggtgtcatctgatcaagccagaccgctgccaccactgctctgtctgtgctatgtgtgtgttaaaaatggatcatcactgcccttgggggaattacccagtgttcgctctaagttccatgtcctttttcttctctttgtggcctgcatgttttttgtcagccttgtgattctctttggttaccattgttggcttgtcagcagaaacaaaaccaccttagaggccttctgcactccagtgtttacaagtggcccagagaaaaatgggttcaaccttggcttcatcaagaatatccagcaggtgtttggagataagaagaagttctggttaatacctattggttccagccctggtgatggacactccttccctatgaggtctatgaatgagtcacagaacccactgctagcaaatgaagaaacctgggaagacaacgaggatgacaaccaagattatccagaaggctcatcatctcttgctgtggaaac

SEQ ID NO: 239770 - DNA, 5796 bp, Artificial Sequence
  derived and/or modified sequence
cacccttccgctccaacatggctagttcctcaacgccgtgactcaagcctgttgtgccaggcagggcgcactcagcagcgcagccccacaggtggcgaaggctccgcgagagggttcccgccaggctagacagtggagtgccgcacagcgcgccttccagcctcgcagccgccaccctagcggttccgacccggcgccagcaggcctgcttggtcgatcttcgagccaaagatgcggcgaggctggaagatggctctgtctggggggctgcggtgctgccgccgggtactgtcctgggtgccagtgctcgttattgtcctcgtcgtgctctggtcctactatgcctacgtctttgaactctgcctggtgactgttttgagcccagcagaaaaagttatttacctcatactctaccatgccatctttgtgttctttacctggacctactggaagtctatctttacactcccacagcagccaaaccagaagttccacttgtcctacacagacaaggagcgctatgaaaatgaagaaagacctgaggtccagaagcagatgcttgttgatatggccaaaaagctaccggtttacacaagaactggaagtggagctgtacgattctgtgaccggtgtcatctgatcaagccagaccgctgccaccactgctctgtctgtgctatgtgtgtgttaaaaatggatcatcactgcccttgggttaataactgcattggattttccaactacaaattcttccttcaattcttagcttactctgttctctactgcctgtacattgctacgacagtcttcagctatttcatcaaatactggagaggggaattacccagtgttcgctctaagttccatgtcctttttcttctctttgtggcctgcatgttttttgtcagccttgtgattctctttggttaccattgttggcttgtcagcagaaacaaaaccaccttagaggccttctgcactccagtgtttacaagtggcccagagaaaaatgggttcaaccttggcttcatcaagaatatccagcaggtgtttggagataagaagaagttctggttaatacctattggttccagccctggtgatggacactccttccctatgaggtctatgaatgagtcacagaacccactgctagcaaatgaagaaacctgggaagacaacgaggatgacaaccaagattatccagaaggctcatcatctcttgctgtggaaacggaaacatagcagttttcacatttcctgcatctctcagacaggactcaccatctctgcctcccatgaggcttacagagttcaatgttggaaatcattgtaatcttcaaaataagtcaccgtgttggattgaaagcttcaaaatttgaaagaattccatcaaatacttgctgtgtaaatgtttctggactttatgttatttaatttactgactgaaatccaatttggaatttggtagcagttaattcaagccaattttttttgtttcttcatttcccctcccccaatccatgaaagcctaaatgtaaaatatatcttttcattcatcttatcaggtaaaaggaaattcagaaaatttccttagagtctttaattcccccacaaagattattaatcacatatatagggcctttttggtgttgaagggaatcaaactacatttgctgcttgtgtgcgtgtgcatttgtgaacacgtacagcatatctatacaaaattctgctatagtgtgaaaatcagggctaaaaacctgaagcctttgtttaattatgcttttcctctaaatagcaacttaaatatttgctagactttgaatcatcgctatatcaagtatctaaaatttgggagggtgaatcagtacactgtgaccaaggtcctcaaattggaatttgaacaacaatgtaaaacctgttctgtcacaaatgttcctgaaagcaccacagctactcaagaagatcaaattcaggacataaactttattgaacataataaccagtgttttttaaagacttttttgtcagggtgcagtaaaattctccaattacttttattcatttatctgcttcctagttttattttagcctttatgagttattttatgatgaaagaaaatctataagcctaagttatggcccataggttttgttaagggttttcagagtgattttcaggtttaatttcactgcctttcataagggtaaagtttcacagctgacattagcctgaggattagcactaaagagctgtgttttcatagcaggggctattgtacagacagtgataaccaaatagtaatatgccagttctttcttctttttttagcttcagtagtagctaagccattaatacagtttgcatcaatttccccatttatttataatcagcctttcttttagtcctagtgcctgaatcaatgagtgagaatactagtactgattctttacaataataatatcttaagagtattgatatctttcattttttcatccagcagtctagtgcccagctgctgacaataaaagctccaactcttttagagatcagtggaatttagaagcatcttacaggtatcaaggaattgagcttctagagggatggtttggcttactaatttatcttccctgaaatatgtttgagtaaaaaagagttgcctgccacaatttagtgttggggttccagtggagctgagaaagtgaacaatccagctacttaaagcaacaacaaaacctgttcatctggatccctaggtaattttgaccaaggtgagacttttggcataaattaaatggattgtggtcagcattacatttgagagaatactagacatgactacacttattagggctagtgactttctcaaactcagaagctaaaaagcagcctagatgactatgcacacactgggtttcaagatgaaatcttcttatatattcagatggaaaaaaatttccccttacactctttctcaaaatactctcatttcggtttttcctgaaaccttatttggccattcccatggttttatgacagacaagccttgtcttctattcatatagatatgcacctttttctacatgtatggcctttacttactacacagcaagtaggcctcaaagtaatcttcctctttcccatcaatcatcttctgccaagcattcaggcagagcagctgttaactgtgattcaaagtcagaaaaacatcaagaacttctttgatgcatagggtgtatcagcactcagctcccacagaagtcaagtcacaaaatatagtgtcagttaactataaggaagttccggagaggtaaagctcaggaaagatgtaatgcaaagctgattgtttaatgtcttacagatttacactgtctttaaaaggccaaataaggctgggcgcagtggctcacacctgtaatcccaacattttgggagcccaaggcggccggaccacctgaggtcgggagttcaagaccagcctgaccaacatggagaaaccctgtctctactaaaaatacaaaaattagccaggagtgttggtgcatgactgtaatcccagctactcaggaggctgaggcaggagaatcgcttgaacctgggaggtagaggttgtggtgagctgagatcgtgccattgcactccggcctgggcaataagagtgaaactctgtctcaaaaaaaaaaaaaaaaaaaaaaaaagccaaataaatcagggttttaccaggggctcagagataaaaagaaaacctattcctatcttagcattttggtctcattggtttatagactctgataatatccctatccatggatcatttgagtattgactaatgtacataggtacccaactggttgattattaatcaagaatacagaactttatttaataattagcacaccctgatctggcttctttgcttgcttttctttggatccctgtccaataacctctgtggaatctcattccctaattgttgatactcattttctccgtttgcaaaatgaagatactcattgttaggatcctactgctgaagggtgctatgtcactttctagtgctcttatatgtctttaattataggactggaatgaaaagcttaaccatacagtatttctaagcaaaataatgtactccattcttttgtccatgctctcattgctgatttgttcttgcaggacttagagcactttgttaatgttcttccattcactccaacagcgtcctcagaaagagacagaataaaaaaattgttccccatggtacagctggaaaaattaaggggaaaagagattaagtggtccccaatggaacacagctgtcttatgcagggctcacagttaccatgttcagtacattgttaaagtaacttggcttcccaggactggaattatcatggagcagttagaattttgagagtaattacaacaggatcacattctgaaagagtcacattttgtcaaaaatctgaaaagtatgcaatttgtacaactcttactttctatgtgataagaatgcaatatgtgcctctttcccctactagccccatgtgacacatatttttcacactatgtggcatcaaccagtgccattacctcctgtggcaccatagagcccaatctcagggcagacattgccaaggtaaagaatgcactccatgtttataccaaattgcacaaagtatagacattgaggttaatggagatttaagcacaatcctagcaagtaagttttaagaatactgaatattatacattattgtaacatgaacctaaaattaatttaacagggcccaaattcataggaatgtaacagtcattgaaagcctattcttttcacctctcatcacacatatctacatacatgtatgcacatgtacacacacacacacacacacacacacacacatacacattttctccaaagcaggctgcctcttcagcaggagcaaatactttaatttaaaagaatgattatctgttttctccttttagaaaaagagtctaagaaacacagcatgtgaagaacattagatttatacattccagaatctctgctctcagagtagctaagagattcggtacagaagacgttctatggagaagcacagggggcatctaatgagattgtcaggcccttggacaagatccatattcttagaaaattaatgagttccatctcgttaggaattggttgatgaggtatggtacatctgcatttctttaaccatagctgtaatgtaccatattaaattgtagccttttgcatgcgggtattatataataatgaatgggtggctcctagtagcatgcaacccatgactgtttacttccctaaaagggttaggtctgtgtcctgcacagtgttcaaaaccattaaatgtgttctttgtagcaggatggtacacagccatcagcagaatgagttaaaaccaacaatgaattcaatataccaggaaatagattgttagtagggaatggcattaaaggaaaaaaaaattagataagatgcattcaaggaataattactttcactctgctggcttaatcagtgaaggaacataaaaggaaagctggcagtgggtcttggtaatatatgaactatattagagtgccagaaaaggagacctcagaagttaagcataggttgccaatctgctacaattatttttcccaccaatctgctcaaaatgattgtatatagtattcttaaaaccatgtgtcttggtgcagaaatattgacaaatgctggccagctttatcttcctatatccttcattaaaagtatatgcatataa

SEQ ID NO: 239771 - protein, 273 aa, Artificial Sequence
  derived and/or modified sequence
MSDNKERKSQGFPKEDNQDTSSLADAVEKVAKQQQSQASEIEKNKKVLFNLKNELHELEKEIAAISAETKETERQIYQQDSAIENTKLHCDSLETQIKSLHSENVKLKFDIETAQEDFEEHMIKYNAYYAKIKAHKNSLGEVESKWSFMTELHEKRDFVKKLKTMKEELMQDLQNPGGNRITQVQEDITNLKDKIITVKESIIEKTCFLEEEKKTHEKLRKEIEVQHKRYDAILKRLHCQVNKLQSNRRQWQWNIQQLEKTAAELRKCIGMQE

SEQ ID NO: 239772 - DNA, 822 bp, Artificial Sequence
  derived and/or modified sequence
atgtcagacaataaggagaggaaatcccagggttttcctaaggaggataaccaggacacctcctccctcgccgacgcagtggagaaagtagccaaacagcagcagagccaggcgagcgagattgaaaaaaataaaaaagtgctgttcaatctgaaaaacgaactacacgagctggaaaaggagattgccgctatatctgccgaaactaaagaaacggaaagacagatttatcagcaggattcagctatcgaaaataccaaactccactgtgatagcctggagacccagattaagtccctccactccgagaatgtcaagctgaagtttgacatagaaaccgcccaagaagattttgaagagcatatgattaagtacaatgcctactacgccaagattaaggcccataaaaatagcctgggggaggttgagtctaaatggtccttcatgacagagctgcatgaaaagcgcgatttcgttaagaaactgaaaactatgaaggaggagctcatgcaggacctacaaaatcctggtgggaacaggattacacaggtacaagaagatatcaccaatctaaaagataagatcatcacagtgaaagaatcaattattgaaaagacgtgcttcctggaagaagaaaaaaagactcatgaaaagctgcgcaaagagattgaggtgcaacataagcgctatgacgccattctgaaacgcttacattgccaggtgaataaactccagtctaatcgccgacagtggcagtggaatatccagcagctcgagaaaacagccgcagagctcaggaaatgcatcggcatgcaggaatag

SEQ ID NO: 239773 - DNA, 822 bp, Artificial Sequence
  derived and/or modified sequence
atgtctgacaacaaggagaggaagagccagggcttccccaaggaggacaaccaggacaccagcagcctggctgatgctgtggagaaggtggccaagcagcagcagagccaggccagcgagattgagaagaacaagaaggtgctcttcaacctgaagaatgagctgcacgagctggagaaggagattgctgccatctctgctgagaccaaggagacagagcggcagatctaccagcaggacagcgccatcgagaacaccaagctgcactgtgacagcctggagacccagatcaagagcctgcacagtgaaaatgtgaagctgaagtttgatattgaaacagcccaggaggactttgaggagcacatgatcaagtacaatgcctactatgccaagatcaaggcccacaagaacagcctgggggaggtggagagcaagtggagcttcatgacagagctgcacgagaagagggactttgtgaagaagctgaagaccatgaaggaggagctgatgcaggacctgcagaaccctgggggcaaccgcatcacccaggtgcaggaggacatcaccaacctgaaggacaagatcatcaccgtgaaggagagcatcatcgagaagacctgcttcctggaggaggagaagaagacccatgagaagctgaggaaggagattgaggtgcagcacaagagatatgatgccatcctgaagaggctgcactgccaggtgaacaagctgcagagcaacagacggcagtggcagtggaacatccagcagctggagaagacagctgctgagctgaggaaatgtattggcatgcaggagtag

SEQ ID NO: 239774 - DNA, 822 bp, Artificial Sequence
  derived and/or modified sequence
atgagcgacaacaaggagcggaagagccagggcttccccaaggaggataatcaggacacttcttctctagctgacgcggtggaaaaggttgccaagcagcagcagtctcaggccagtgaaattgaaaaaaacaagaaagttttgttcaacttgaaaaacgaactgcacgaactggagaaagagattgcggcgatctccgccgagaccaaagagaccgaacggcagatttatcaacaggactcagccattgagaatactaaattgcactgcgactccttggagactcagatcaaatcactgcactccgagaacgtgaagctaaagttcgatatcgagaccgctcaggaagatttcgaggagcatatgattaagtacaatgcttactacgcaaagatcaaagctcacaagaactccttgggagaagtggaatctaagtggtctttcatgacagagctccacgagaagcgtgactttgtcaagaagctcaagaccatgaaagaagagttgatgcaagacttacaaaaccctggcggtaatcggatcacacaagtgcaggaggacatcacaaatttgaaagacaagataattaccgtgaaggaatccatcattgagaaaacctgttttttggaggaagagaagaaaacgcatgagaagctccggaaagaaatagaggtgcagcacaaaaggtatgatgccatcttgaagcgcctgcattgtcaggtgaacaaattacagtcgaataggagacagtggcagtggaatattcagcagctcgagaaaaccgctgcagagcttcgcaaatgcataggaatgcaggagtag

SEQ ID NO: 239775 - DNA, 822 bp, Artificial Sequence
  derived and/or modified sequence
atgagcgacaataaggagcgtaagtcacagggcttccctaaagaggataatcaggacacttctagtttggctgacgctgtggagaaggtagccaaacaacagcagagtcaggcctcagagatagaaaaaaacaaaaaggtgttgttcaacctgaaaaacgagctccacgagctagagaaggagatcgctgcaatctccgcggagaccaaggaaaccgagagacagatttatcagcaggactcagcaatcgagaatacaaagctgcattgcgacagtctggagacccagattaagtctctgcactcggaaaatgtaaaactcaaatttgacattgagaccgcacaagaggactttgaggagcacatgattaagtacaacgcttactacgccaagataaaggcacacaagaactcgctgggcgaagtggagtctaaatggtcgtttatgaccgaactgcacgaaaagcgggattttgtcaagaaacttaagaccatgaaagaagagctgatgcaggatttgcagaacccaggaggcaatcgcatcacccaagtgcaggaggatatcaccaacttgaaagataagataattaccgtaaaggaatccattattgaaaagacgtgctttctcgaggaggagaagaaaacgcacgagaaactgagaaaggagattgaggtgcagcacaaaaggtacgatgcaattctgaaaaggctccactgccaggttaacaagctacaatctaatcgacggcagtggcagtggaatattcagcagctggagaagaccgcagccgaactccgaaaatgcatcggcatgcaagaatag

SEQ ID NO: 239776 - DNA, 1118 bp, Artificial Sequence
  derived and/or modified sequence
tcccaggggaaacctgacggccaggttccctcgtgccagctgccgggaggcgggagggagtgccctgaaactctaatctcattgcctggccagaaaaggaagtaatccctagtgtcagcagattcagcggtactggtgtataataggatcaccaatatacaacaggaaaaaacaaaagtgaaagattatcaatatagattattgagtaggagtaaagaaggtaaatcaaaaaggggaaaagagattacagacacagaaaatgtcagacaacaaagaaaggaagagtcaaggatttcctaaagaagataaccaagacacaagttcattagctgatgctgtagagaaagttgcaaagcaacaacaatcacaagcatcagagatagaaaaaaacaaaaaggttctgttcaatttgaagaatgaacttcatgagcttgaaaaagaaatagcagctatctctgcagaaactaaagaaacagaaagacaaatttatcaacaagattctgccatagagaataccaaacttcattgtgatagcctggaaactcaaatcaaatccttacattcagaaaatgtaaagcttaaatttgacatagaaacagcccaagaagattttgaggaacacatgataaaatataatgcatattatgcaaaaataaaagcacataaaaatagtttgggggaagtagagagcaaatggtcatttatgactgaactccatgaaaagcgagattttgttaaaaaattaaagacaatgaaagaagaacttatgcaagatcttcaaaatccaggagggaaccgaataacacaagtacaggaagacattacaaacttaaaggataaaattataactgtaaaagaatctatcattgaaaaaacttgttttcttgaggaagaaaaaaagacacatgaaaaattaagaaaagaaatagaggtacaacataagaggtatgatgcaattcttaagcgtttgcattgtcaggtgaacaagcttcagtcaaatagacgacagtggcaatggaacattcaacaattggaaaaaactgcagccgaattaagaaaatgcattggaatgcaagagtaacattgccatagggcaatgtggaacacagaccatgaca

SEQ ID NO: 239777 - DNA, 822 bp, Artificial Sequence
  derived and/or modified sequence
atgagcgacaacaaggagagaaagagccagggcttccccaaggaggacaaccaggacaccagcagcctggccgacgccgtggagaaggtggccaagcagcagcagagccaggccagcgagatcgagaagaacaagaaggtgctgttcaacctgaagaacgagctgcacgagctggagaaggagatcgccgccatcagcgccgagaccaaggagaccgagagacagatctaccagcaggacagcgccatcgagaacaccaagctgcactgcgacagcctggagacccagatcaagagcctgcacagcgagaacgtgaagctgaagttcgacatcgagaccgcccaggaggacttcgaggagcacatgatcaagtacaacgcctactacgccaagatcaaggcccacaagaacagcctgggcgaggtggagagcaagtggagcttcatgaccgagctgcacgagaagagagacttcgtgaagaagctgaagaccatgaaggaggagctgatgcaggacctgcagaaccccggcggcaacagaatcacccaggtgcaggaggacatcaccaacctgaaggacaagatcatcaccgtgaaggagagcatcatcgagaagacctgcttcctggaggaggagaagaagacccacgagaagctgagaaaggagatcgaggtgcagcacaagagatacgacgccatcctgaagagactgcactgccaggtgaacaagctgcagagcaacagaagacagtggcagtggaacatccagcagctggagaagaccgccgccgagctgagaaagtgcatcggcatgcaggagtag

SEQ ID NO: 239778 - protein, 891 aa, Artificial Sequence
  derived and/or modified sequence
MSLRIDVDTNFPECVVDAGKVTLGTQQRQEMDPRLREKQNEIILRAVCALLNSGGGIIKAEIENKGYNYERHGVGLDVPPIFRSHLDKMQKENHFLIFVKSWNTEAGVPLATLCSNLYHRERTSTDVMDSQEALAFLKCRTQTPTNINVSNSLGPQAAQGSVQYEGNINVSAAALFDRKRLQYLEKLNLPESTHVEFVMFSTDVSHCVKDRLPKCVSAFANTEGGYVFFGVHDETCQVIGCEKEKIDLTSLRASIDGCIKKLPVHHFCTQRPEIKYVLNFLEVHDKGALRGYVCAIKVEKFCCAVFAKVPSSWQVKDNRVRQLPTREWTAWMMEADPDLSRCPEMVLQLSLSSATPRSKPVCIHKNSECLKEQQKRYFPVFSDRVVYTPESLYKELFSQHKGLRDLINTEMRPFSQGILIFSQSWAVDLGLQEKQGVICDALLISQNNTPILYTIFSKWDAGCKGYSMIVAYSLKQKLVNKGGYTGRLCITPLVCVLNSDRKAQSVYSSYLQIYPESYNFMTPQHMEALLQSLVIVLLGFKSFLSEELGSEVLNLLTNKQYELLSKNLRKTRELFVHGLPGSGKTILALRIMEKIRNVFHCEPANILYICENQPLKKLVSFSKKNICQPVTRKTFMKNNFEHIQHIIIDDAQNFRTEDGDWYGKAKFITQTARDGPGVLWIFLDYFQTYHLSCSGLPPPSDQYPREEINRVVRNAGPIANYLQQVMQEARQNPPPNLPPGSLVMLYEPKWAQGVPGNLEIIEDLNLEEILIYVANKCRFLLRNGYSPKDIAVLFTKASEVEKYKDRLLTAMRKRKLSQLHEESDLLLQIGDASDVLTDHIVLDSVCRFSGLERNIVFGINPGVAPPAGAYNLLLCLASRAKRHLYILKASV

SEQ ID NO: 239779 - DNA, 2676 bp, Artificial Sequence
  derived and/or modified sequence
atgagcctgagaatcgacgtggacaccaacttccccgagtgcgtggtggacgccggcaaggtgaccctgggcacccagcagagacaggagatggaccccagactgagagagaagcagaacgagatcatcctgagagccgtgtgcgccctgctgaacagcggcggcggcatcatcaaggccgagatcgagaacaagggctacaactacgagagacacggcgtgggcctggacgtgccccccatcttcagaagccacctggacaagatgcagaaggagaaccacttcctgatcttcgtgaagagctggaacaccgaggccggcgtgcccctggccaccctgtgcagcaacctgtaccacagagagagaaccagcaccgacgtgatggacagccaggaggccctggccttcctgaagtgcagaacccagacccccaccaacatcaacgtgagcaacagcctgggcccccaggccgcccagggcagcgtgcagtacgagggcaacatcaacgtgagcgccgccgccctgttcgacagaaagagactgcagtacctggagaagctgaacctgcccgagagcacccacgtggagttcgtgatgttcagcaccgacgtgagccactgcgtgaaggacagactgcccaagtgcgtgagcgccttcgccaacaccgagggcggctacgtgttcttcggcgtgcacgacgagacctgccaggtgatcggctgcgagaaggagaagatcgacctgaccagcctgagagccagcatcgacggctgcatcaagaagctgcccgtgcaccacttctgcacccagagacccgagatcaagtacgtgctgaacttcctggaggtgcacgacaagggcgccctgagaggctacgtgtgcgccatcaaggtggagaagttctgctgcgccgtgttcgccaaggtgcccagcagctggcaggtgaaggacaacagagtgagacagctgcccaccagagagtggaccgcctggatgatggaggccgaccccgacctgagcagatgccccgagatggtgctgcagctgagcctgagcagcgccacccccagaagcaagcccgtgtgcatccacaagaacagcgagtgcctgaaggagcagcagaagagatacttccccgtgttcagcgacagagtggtgtacacccccgagagcctgtacaaggagctgttcagccagcacaagggcctgagagacctgatcaacaccgagatgagacccttcagccagggcatcctgatcttcagccagagctgggccgtggacctgggcctgcaggagaagcagggcgtgatctgcgacgccctgctgatcagccagaacaacacccccatcctgtacaccatcttcagcaagtgggacgccggctgcaagggctacagcatgatcgtggcctacagcctgaagcagaagctggtgaacaagggcggctacaccggcagactgtgcatcacccccctggtgtgcgtgctgaacagcgacagaaaggcccagagcgtgtacagcagctacctgcagatctaccccgagagctacaacttcatgaccccccagcacatggaggccctgctgcagagcctggtgatcgtgctgctgggcttcaagagcttcctgagcgaggagctgggcagcgaggtgctgaacctgctgaccaacaagcagtacgagctgctgagcaagaacctgagaaagaccagagagctgttcgtgcacggcctgcccggcagcggcaagaccatcctggccctgagaatcatggagaagatcagaaacgtgttccactgcgagcccgccaacatcctgtacatctgcgagaaccagcccctgaagaagctggtgagcttcagcaagaagaacatctgccagcccgtgaccagaaagaccttcatgaagaacaacttcgagcacatccagcacatcatcatcgacgacgcccagaacttcagaaccgaggacggcgactggtacggcaaggccaagttcatcacccagaccgccagagacggccccggcgtgctgtggatcttcctggactacttccagacctaccacctgagctgcagcggcctgcccccccccagcgaccagtaccccagagaggagatcaacagagtggtgagaaacgccggccccatcgccaactacctgcagcaggtgatgcaggaggccagacagaaccccccccccaacctgccccccggcagcctggtgatgctgtacgagcccaagtgggcccagggcgtgcccggcaacctggagatcatcgaggacctgaacctggaggagatcctgatctacgtggccaacaagtgcagattcctgctgagaaacggctacagccccaaggacatcgccgtgctgttcaccaaggccagcgaggtggagaagtacaaggacagactgctgaccgccatgagaaagagaaagctgagccagctgcacgaggagagcgacctgctgctgcagatcggcgacgccagcgacgtgctgaccgaccacatcgtgctggacagcgtgtgcagattcagcggcctggagagaaacatcgtgttcggcatcaaccccggcgtggccccccccgccggcgcctacaacctgctgctgtgcctggccagcagagccaagagacacctgtacatcctgaaggccagcgtgtag

SEQ ID NO: 239780 - DNA, 2676 bp, Artificial Sequence
  derived and/or modified sequence
atgtccctgcgaatcgacgtggatacgaactttcccgagtgtgtcgtggacgccgggaaagtgactctggggacccagcagcgtcaggagatggatcctagacttagagagaaacagaacgagattatattacgtgcggtctgtgccctgttgaacagcggaggggggatcataaaagcagaaatcgagaataaggggtataactatgagcgccatggagtcgggctggacgtgcctccgatctttcggtcccatttagacaaaatgcagaaggagaatcacttcctgatcttcgtcaaaagttggaatacagaagctggagtccccctggctactttgtgctcaaacctgtatcaccgggaaaggaccagcacagatgtgatggattcccaggaggctctggctttcctcaaatgcaggactcagaccccgactaatattaacgtatccaatagtctgggaccgcaggctgcccagggttccgtccagtacgaagggaacattaacgtgagtgcagccgctctttttgatcgcaagaggctgcagtatcttgaaaagttaaatctgccggagtcaacccacgtggagtttgtcatgtttagtactgacgtatcacattgtgtaaaagaccgactgcctaaatgcgtgtctgccttcgcgaatacagagggggggtatgtgttctttggtgttcatgacgaaacctgtcaggtaattggttgtgagaaagagaagattgacctgacaagtctgagagcatccatagacggatgtatcaagaagctgcccgtccaccacttctgcactcagcgccccgaaatcaagtatgtgctcaatttcttagaagttcatgacaaaggcgcactccgcggatacgtctgtgcaatcaaggtggaaaaattttgctgcgcggtgttcgcaaaagtcccttctagttggcaagtgaaagataatagggtgcggcagctgccgacccgcgaatggacggcttggatgatggaagccgaccctgacctgtccaggtgtccggaaatggtgctccagttatctctctcatcggcaacgccccgctctaaaccagtctgcatccacaagaatagtgagtgtcttaaagagcaacagaagcgctactttccagttttctccgaccgcgtggtgtacacccctgagtccctgtataaagaattattctcacaacataagggtcttcgggatctcattaataccgagatgaggccattcagccagggcattctcattttctctcagtcatgggccgtggacctgggcctgcaagagaaacagggcgttatttgtgacgcactcctcatctcacagaataacacccctatcctttatactattttctccaagtgggacgctggatgcaagggctatagtatgatagtggcctatagtctcaagcaaaagctcgtgaacaaaggtgggtacactggtcgtctttgcattacgccactggtttgcgtgctaaacagcgatagaaaagctcagtccgtttacagtagctatttacagatttatcccgagtcttacaatttcatgacccctcagcacatggaggccctcttgcagtcactggtgatcgtgctgcttggttttaaatcattcttgagtgaggagctgggctctgaagtgcttaatttgctcacaaataagcagtatgaactgctgagtaagaacctgcgaaaaacacgagagctatttgtccacggcctccctggcagcggtaaaacaattttggccctgagaatcatggagaagatcaggaatgtcttccattgtgagcctgctaacatactttatatctgtgaaaaccagccccttaaaaagctagtctcgttctccaaaaaaaacatctgtcagcctgtgaccagaaagacttttatgaaaaacaatttcgagcatatccagcatatcattatcgatgacgcccagaattttaggaccgaagatggagattggtatggtaaggctaagttcataacccagacagcacgagacggacccggcgtgctgtggattttcctggattactttcaaacttatcacctgtcatgcagcgggctgccccctccatctgatcagtatcctcgggaagagattaacagggtggttcgcaacgcagggccaattgctaattacctccaacaagtgatgcaggaggctagacagaatcctccaccaaatcttcctccaggaagtctggtgatgctctacgagccaaaatgggcccagggcgttcccggcaatctagaaatcatcgaagatcttaacctcgaagagattctgatatacgtcgctaataaatgccgtttcttgctgagaaatgggtacagccccaaggatattgcagttctgttcaccaaagccagtgaggtggaaaagtataaggatcgattattaacagccatgcgtaagagaaagcttagccagctacatgaggaatctgatctgctgttgcaaatcggcgatgcctcagatgtgcttactgaccacatagtactggactccgtgtgcaggttctctgggcttgagcggaatattgtctttggaattaatcccggggtcgcacctcccgccggcgcttataatttactgttatgcctagcctcccgggccaagcggcacttgtacatcctgaaagcctcagtatag

SEQ ID NO: 239781 - DNA, 2676 bp, Artificial Sequence
  derived and/or modified sequence
atgagcctgagaattgatgtggacaccaacttcccagaatgtgtggtggatgctgggaaggtgaccctgggcacccagcagaggcaggagatggacccccggctgcgggagaagcagaatgagatcatcctgcgggctgtgtgtgccctgctgaacagcggcggcggcatcatcaaggccgagattgaaaataaaggctacaactatgaaagacatggagtgggcctggatgtgccccccatcttccgcagccacctggacaagatgcagaaggagaaccacttcctgatctttgtgaagtcctggaacacagaggccggcgtgcccctggccaccctgtgcagcaacctgtaccaccgggagaggaccagcacagatgtgatggacagccaggaggccctggccttcctgaagtgcaggacccagacccccaccaacatcaacgtgagcaacagcctgggcccccaggccgcccagggctctgtgcagtatgagggcaacatcaacgtgtctgctgctgccctgtttgacaggaagaggctgcagtacctggagaagctgaacctgcctgagagcacccacgtggagtttgtgatgttcagcacagatgtgagccactgtgtgaaggaccggctgcccaagtgtgtgtctgcctttgccaacacagagggcggctacgtgttctttggagtgcatgatgagacctgccaggtgattggctgtgagaaggagaagattgacctgaccagcctgcgggccagcattgatggctgcatcaagaagctgcctgtgcaccacttctgcacccagaggcctgagatcaagtatgtgctgaacttcctggaggtgcatgacaagggggccctgcggggctacgtgtgtgccatcaaggtggagaagttctgctgtgctgtgtttgccaaggtgcccagctcctggcaggtgaaggacaacagagtgcggcagctgcccacccgggagtggacagcctggatgatggaggccgaccctgacctgagccgctgcccagagatggtgctgcagctgagcctgagcagcgccacccccaggagcaagcctgtgtgcatccacaagaacagcgagtgcctgaaggagcagcagaagcgctacttccctgtgttcagtgacagagtggtgtacaccccagagagcctgtacaaggagctgttcagccagcacaagggcctgcgggacctgatcaacacagagatgaggcccttcagccagggcatcctgatcttcagccagagctgggccgtggacctgggcctgcaggagaagcagggcgtcatctgtgatgccctgctgatcagccagaacaacacccccatcctgtacaccatcttcagcaagtgggatgctggctgcaagggctacagcatgattgtggcctacagcctgaagcagaagctggtgaacaagggcggctacacaggccgcctgtgcatcacccccctggtgtgtgtgctgaacagcgacaggaaggcccagagcgtgtacagcagctacctgcagatctacccagagagctacaacttcatgaccccccagcacatggaggccctgctgcagagcctggtgattgtgctgctgggcttcaagagcttcctgtctgaggagctgggcagcgaggtgctgaacctgctgaccaacaagcagtatgagctgctgagcaagaacctgaggaagacccgggagctgtttgtgcacggcctgcccggcagcggcaagaccatcctggccctgcgcatcatggagaagatcagaaatgtgttccactgtgagcccgccaacatcctgtacatctgtgagaaccagcccctgaagaagctggtgtccttcagcaagaagaacatctgccagcctgtgaccaggaagaccttcatgaagaacaactttgagcacatccagcacatcatcattgatgatgcccagaacttcagaacagaagatggagactggtacggcaaggccaagttcatcacccagacagccagagatggccctggggtgctgtggatcttcctggactacttccagacctaccacctgagctgcagcggcctgcccccacccagcgaccagtacccccgggaggagatcaacagagtggtgagaaatgccggccccatcgccaactacctgcagcaggtgatgcaggaggcccggcagaaccccccacccaacctgcccccaggcagcctggtgatgctgtatgagcccaagtgggcccagggcgtgcccggcaacctggagatcatcgaggacctgaacctggaggagatcctgatctacgtggccaacaagtgccgcttcctgctgagaaatggctacagccccaaggacattgctgtgctcttcaccaaggccagcgaggtggagaagtacaaggaccggctgctgacagccatgaggaagaggaagctgagccagctgcacgaggagagtgacctgctgctgcagattggagatgccagtgatgtgctgacagaccacatcgtgctggacagcgtgtgccgcttcagcggcctggagagaaatattgtgtttggcatcaaccctggggtggcccctcctgctggggcctacaacctgctgctgtgcctggccagccgggccaagaggcacctgtacatcctgaaggcctctgtgtag

SEQ ID NO: 239782 - DNA, 2676 bp, Artificial Sequence
  derived and/or modified sequence
atgagcctgcggatcgacgtggacaccaacttccccgagtgcgtggtggacgccggcaaagtcaccctgggcacgcaacagcgtcaggagatggacccccgcctgcgggagaaacagaacgagattatcctacgggcagtctgtgccctgttgaactccggaggaggcataattaaggccgaaatagaaaacaaggggtataactacgagaggcatggggtgggtctggatgtgcctcctatcttccgcagtcaccttgataaaatgcagaaggaaaatcatttcctgatctttgtgaaatcttggaacacagaggctggagtgcccctcgctacactctgtagcaacctttaccacagggagcggacttccacagatgtcatggactctcaggaagcattggcctttctcaagtgtaggactcagacacctaccaacattaatgtgtctaatagtctgggtccccaggccgctcaggggagtgtccagtacgagggcaatatcaacgtgagtgccgccgctctgttcgaccgaaagagactccagtacctagaaaaattaaatctgccagagagcacccacgtcgagttcgtcatgtttagtacagacgtgagtcactgcgtgaaggacagattgcctaagtgcgtgtccgcctttgcaaatacagaaggcggttatgtcttctttggcgtgcatgatgagacgtgccaggtcattggatgcgagaaagaaaaaatagacctcacttcactccgggcttcaattgacggctgcatcaaaaaactgcctgtgcatcacttttgcacgcagcgtcccgaaattaaatatgtccttaatttccttgaggtccacgacaagggagctctgaggggctatgtttgtgctatcaaagtcgagaagttttgttgtgctgtgtttgccaaggtgcccagtagctggcaagtaaaagacaatagggttcgacaattgccaactagagaatggaccgcatggatgatggaggcagacccagacctgtcccgctgtccagaaatggtgcttcagctcagtctttcctcggccacgcctagatctaagcctgtctgtattcacaaaaattcggagtgcctgaaggagcagcagaagcgctatttcccagtattttctgatagggtggtctacaccccagaatctctctataaggaattgttctctcagcacaaaggcctacgggacctgattaacacagaaatgaggccattctcccaggggattctcatcttttcacaatcttgggctgttgatctggggctgcaagagaagcagggggtcatttgcgacgctctcctaatctcacaaaataacacgccaatcctctacacaatcttttcaaagtgggatgcaggctgcaaaggttactcgatgatcgtggcctactccctcaagcaaaagctggtgaacaagggcggttacacaggaagactgtgtataactccccttgtgtgcgtgctcaactccgacaggaaggcccaaagcgtttacagctcatatctgcagatctacccagagtcctataatttcatgacgccacagcatatggaggcattactccagtctctggtgattgtcttgctgggctttaagtcatttctctcagaagagttaggctctgaagttctcaatttgttgaccaataagcagtacgagcttctctccaaaaacctgcggaaaacacgagaactgttcgtgcatggacttccaggtagcggaaaaaccatcctcgccttgcgcattatggagaagatccggaatgtatttcattgtgaaccagccaacatcctgtatatttgtgaaaatcaacccctgaagaagctggtttccttctccaagaagaacatttgccagcctgtgacccggaagacgtttatgaagaacaacttcgagcatatccaacatatcatcatcgatgatgcccagaactttcgcacagaagatggggattggtacggaaaagccaagtttattacacaaactgccagggatggcccaggcgtactgtggattttcctggactatttccagacctatcacttaagctgctctggcctacccccacctagcgaccagtatcccagggaggagatcaaccgggtggtgcgcaacgccggacccatcgctaactatctgcagcaggtcatgcaggaagcccgtcagaatcctcccccaaatttgcccccaggcagtctggtgatgttatacgaacctaagtgggcacagggcgtgcccggaaacctcgaaatcatcgaagatctgaatctagaggaaatcctaatctatgttgccaataaatgtcgctttcttctgaggaacgggtatagccctaaagatatagccgtgctgtttacaaaggcttcagaagtagaaaagtataaggacaggctgctgacagcaatgagaaagagaaagctcagtcagttgcacgaggagtccgacttattgttgcagattggagacgcctctgacgtcctcactgatcacatcgtcttagactcagtttgcaggttttccggcttagaacgaaatatagttttcggcatcaatcccggcgttgccccccccgccggggcctacaacctgttgctgtgcctggcctcccgtgccaaacgacacctttatatcttgaaggcctcagtgtag

SEQ ID NO: 239783 - DNA, 2676 bp, Artificial Sequence
  derived and/or modified sequence
atgtctctgcgcattgacgtagacacgaatttcccggagtgcgttgtggacgcaggcaaagtcactctcggcactcagcagcgccaggaaatggaccctcgtctgcgggaaaaacagaacgagatcatcctgagggctgtgtgtgccctcttgaattctggaggtggaatcattaaagcagagattgagaacaaaggctacaattatgaacggcatggtgtcggtctggacgtgccgcctatcttcaggtcacatctggataaaatgcagaaggagaaccactttttgatcttcgtgaaaagttggaacacagaggcgggagtgccactggccactctctgttccaatttgtaccatcgcgagcggacatccaccgatgtaatggactcacaggaagcacttgcttttttaaagtgtaggacacagacccccactaatataaatgtgtccaactcgctgggccctcaggccgctcaggggtcagtgcagtacgaggggaacataaacgttagcgcggcagccctcttcgaccgcaagagactgcagtacttggagaaactgaatttgccagagtctacacacgttgagtttgtgatgttctccaccgacgtttctcattgcgtgaaagacagacttccgaagtgcgtgtctgccttcgcaaatacagaggggggatacgttttcttcggagtacacgacgaaacctgtcaggtcataggctgcgagaaggagaaaattgatctcacaagtctgcgagcatccattgacggctgcattaaaaaactcccggtccatcacttctgcacccagcggcctgagatcaagtacgttctgaatttcctggaggtgcatgacaaaggcgcactgaggggatacgtgtgcgctatcaaagtcgagaaattctgttgcgcggtcttcgccaaagtccccagcagctggcaggtcaaagacaaccgagttcgtcagctgcctaccagggagtggacggcctggatgatggaagcagacccagaccttagtagatgtccggagatggtactccagcttagtctgtcaagtgcaacacccagaagcaaacccgtgtgcatccataagaatagcgagtgtttgaaagaacagcaaaaacgctatttcccagtgttcagtgaccgggttgtttacactcctgagtccctgtataaggaactcttcagtcagcacaagggcctacgagacctgatcaatactgagatgaggcccttttctcagggcatcttgatttttagccagagctgggccgtggatctggggctccaggagaagcaaggcgttatttgcgatgctttactcattagccaaaacaataccccaatcttgtatacaatcttctccaagtgggacgccggatgtaagggttattcaatgattgttgcgtacagcctcaaacaaaagttggttaacaaggggggttatactggtaggctgtgtatcacgccgctggtttgtgtgctgaatagtgaccggaaagcgcaatcagtatatagttcctacctccagatttacccagagagctacaactttatgacaccccagcatatggaagctctgttacaatcactggtgattgtgttgctgggctttaaatcctttttaagcgaagagctcgggagcgaggtcctcaacctcctgacaaataagcagtatgaattgctgtccaaaaatctcaggaaaaccagggaactgtttgttcatggcctgcccggttcgggcaagacaatcctggctttgaggataatggagaaaattcgcaatgtgtttcactgcgagcccgctaacattctctacatatgtgagaaccaacccttgaagaagcttgtgagcttctccaagaaaaacatctgccagcctgtgacaagaaaaaccttcatgaaaaataatttcgaacatatacaacatattataattgatgacgcccagaatttccgcactgaagacggagattggtacggtaaagctaaatttattacccaaaccgcccgagacggccctggggtattatggatatttctcgactactttcagacataccacctctcctgttcaggcctcccgcctccttccgaccagtatccacgcgaggaaatcaacagagtggttcgcaacgccggtcctattgccaactatctgcagcaggtgatgcaggaagcgagacagaatccaccaccgaatttaccccctggctctctggttatgctttacgagccgaaatgggcccagggagtccccggtaacctcgagatcatcgaggatctcaaccttgaagagattcttatctacgtcgcgaataaatgccggtttctcttgaggaacggatacagcccaaaagatatcgcagtgctgttcactaaagcctccgaggtggagaagtataaagatagacttttaacagccatgagaaagcgaaaactgagccagctgcatgaggaaagcgacctgttacttcagataggcgacgcctcggatgtgctcacagaccacatagtgttagacagcgtgtgccgattcagtgggctcgagcggaatatagtgtttgggattaacccaggagtggcgcctcctgccggagcctataacttgctgctctgcttagcgagtagggcgaaacgtcatctatacatcctgaaagctagtgtgtag

SEQ ID NO: 239784 - DNA, 4625 bp, Artificial Sequence
  derived and/or modified sequence
aggttctctgctctggacttgggaggctccgttgcctgctcccggagggagacgcgctgccgaggagaacccagcgggagaacatttcaggataggaataggccaagtgctgagaagatgagtcttaggattgatgtggatacaaactttcctgagtgtgttgtagatgcaggaaaagtcacccttgggactcagcagaggcaggagatggaccctcgcctgcgggagaaacagaatgaaatcatcctgcgagcagtatgtgctctgctgaattctggtgggggcataatcaaggctgagattgagaacaaaggctacaattatgaacgtcatggagtaggattggatgtgcctccaattttcagaagccatttagataagatgcagaaggaaaaccactttttgatttttgtgaaatcatggaacacagaggctggtgtgccacttgctaccttatgctccaatttgtaccacagagagagaacatccaccgatgtcatggattctcaggaagctctggcattcctcaaatgcaggactcagactccaacgaatattaatgtttccaattcattaggtccacaggcagctcagggtagtgtacaatatgaaggtaacataaatgtgtcagctgctgctttatttgatagaaagcggcttcagtatctggaaaaactcaaccttcctgagtccacacatgttgaatttgtaatgttctcgacagacgtgtcacactgtgttaaagacagacttccgaagtgtgtttctgcatttgcaaatactgaaggaggatatgtattttttggtgtgcatgatgagacttgtcaagtgattggatgtgaaaaagagaaaatagaccttacgagcttgagggcttctattgatggctgtattaagaagctacctgtccatcatttctgcacacagaggcctgagataaaatatgtccttaacttccttgaagtgcatgataagggggccctccgtggatatgtctgtgcaatcaaggtggagaaattctgctgtgcggtgtttgccaaagtgcctagttcctggcaggtgaaggacaaccgtgtgagacaattgcccacaagagaatggactgcttggatgatggaagctgacccagacctttccaggtgtcctgagatggttctccagttgagtttgtcatctgccacgccccgcagcaagcctgtgtgcattcataagaattcggaatgtctgaaagagcagcagaaacgctactttccagtattttcagacagagtggtatatactccagaaagcctctacaaggaactcttctcacaacataaaggactcagagacttaataaatacagaaatgcgccctttctctcaaggaatattgattttttctcaaagctgggctgtggatttaggtctgcaagagaagcagggagtcatctgtgatgctcttctaatttcccagaacaacacccctattctctacaccatcttcagcaagtgggatgcggggtgcaagggctattctatgatagttgcctattctttgaagcagaagctggtgaacaaaggcggctacactgggaggttatgcatcacccccttggtctgtgtgctgaattctgatagaaaagcacagagcgtttacagttcgtatttacaaatttaccctgaatcctataacttcatgaccccccagcacatggaagccctgttacagtccctcgtgatagtcttgcttgggttcaaatccttcttaagtgaagagctgggctctgaggttttgaacctactgacaaataaacagtatgagttgctttcaaagaaccttcgcaagaccagagagttgtttgttcatggcttacctggatcagggaagactatcttggctcttaggatcatggagaagatcaggaatgtgtttcactgtgaaccggctaacattctctacatctgtgaaaaccagcccctgaagaagttggtgagtttcagcaagaaaaacatctgccagccagtgacccggaaaaccttcatgaaaaacaactttgaacacatccagcacattatcattgatgacgctcagaatttccgtactgaagatggggactggtatgggaaagcaaagttcatcactcagacagcaagggatggcccaggagttctctggatctttctggactactttcagacctatcacttgagttgcagtggcctcccccctccctcagaccagtatccaagagaagagatcaacagagtggtccgcaatgcaggtccaatagctaattacctacaacaagtaatgcaggaagcccgacaaaatcctccacctaacctcccccctgggtccctggtgatgctctatgaacctaaatgggctcaaggtgtcccaggcaacttagagattattgaagacttgaacttggaggagatactgatctatgtagcgaataaatgccgttttctcttgcggaatggttattctccgaaggatattgctgtgcttttcaccaaagcaagtgaagtggaaaaatataaagacaggcttctaacagcaatgaggaagagaaaactgtctcagctccatgaggagtctgatctgttactacagatcggtgatgcgtcggatgttctaaccgatcacattgtgttggacagtgtctgtcgattttcaggcctggaaagaaatatcgtgtttggaatcaatccaggagtagccccaccggctggggcctacaatcttctgctctgtttggcttctagggcaaaaagacatctgtatattctgaaggcttctgtgtgacaggaaacccaagcctaagaaacaattaagtggttctcatctctaattaactgtgaaaccatttaatccaaacatgtaagcacacactcacttattaagtcacatacttttctaggtgctggggattgagaacgaatcgatgtaagattcctcctttagggcagagacagaccactgacaaatacacagatagacaaggaatttcccatggtaaaaagggatatcagtaattagaggaccgtgagactcagagatgtgtgtgtgtgtgtgtgtgtgtgtgtgtgtgtgtgcgcgcgcgcacgtgcacatgtgtgtaggtagatggagggggtgattattttgggtggtcagggaagtgctcagtgagggaagaacttgtcatgagaatctctgagcgtgccaggcagactcggatatttttataaatttttaacatggccacttgcagaagagcttgaatgggacgtgcagcgagaatgtgaaggatggagcaggtagctcatctggccttgtaggtgccgggaacgggcaagacatgttttgaaatgtaagatcacagactgttttttgcaagaccacattatattactttattattttctgctttttcttttaacgacattagtgtttttgatcactatattttaaaatgctttttgtgagccttttggttatgtggaatctgttccttagctctgattttttattcttatggagcgtcttaggttactacatgaaggtaagactgccacagtcccccagggaggcacactgtgttttactgattgatttgaagatgatagagagcctagggggatgagtctattggactcaaaggttacattttgtttttccatttaatttaataatcaacaaaacgacaaagtcagtttaatatctttcttctgctgagtcttcaggatgttagctagtctttcaaaagccattgctacaaaagtgcaaatttctcatttcctgtgggtctctagaaactctctcaatatttaaagccaaacaaatccatcttttctgagagacagaaactaaaaaattcagagttaattcactattaaaaacagcaaggccctgctatttcccaagaataaagaaatttaaaattctcattgtaagaagtatgaacttgaagctagaattggtttatttctggcagctacttacaatattaagaactttactttttaaatttgagacaatttcacaggaaagcaagaaattagtctattgtgaaatgtttttacaactaacttggaatatactgcaaatcactagtaagtagagacacatttaagataaaatgattaataaaacaattggtaattctgaataaggatctgaataaatccagatcacagactgttcctttaccaatatgtaaaagaatgtgcaaaattagtaaaaatatacccaaaaatttaccagcaacagagaagcaaagaatggagttcaaccttacactataaacatctaatagatatgtatgaaaatttaaaaactagaaaaggttgggcatggtggctcatgcttgtgatcccaggactttaggaggccaaggtgggaggattgtttgagcccaggagttcaagaccagcttgagcaatatagtgagaccctgtctctacaaaaacaaacaaacaaacaaacaaataaataaataaataaaattagctgggaatggtgatgcacacctggagtcctagctactcagaaggctgaggcaggacgatcacttgacctcagaagtctgaggttacagtgagctatgatcataccagtgcactccagtctgggtgacagaacaagaccctgtctcc

SEQ ID NO: 239785 - protein, 426 aa, Artificial Sequence
  derived and/or modified sequence
MDCRTKANPDRTFDLVLKVKCHASENEDPVVLWKFPEDFGDQEILQSVPKFCFPFDVERVSQNQVGQHFTFVLTDIESKQRFGFCRLTSGGTICLCILSYLPWFEVYYKLLNTLADYLAKELENDLNETLRSLYNHPVPKANTPVNLSVNQEIFIACEQVLKDQPALVPHSYFIAPDVTGLPTIPESRNLTEYFVAVDVNNMLQLYASMLHERRIVIISSKLSTLTACIHGSAALLYPMYWQHIYIPVLPPHLLDYCCAPMPYLIGIHSSLIERVKNKSLEDVVMLNVDTNTLESPFSDLNNLPSDVVSALKNKLKKQSTATGDGVARAFLRAQAALFGSYRDALRYKPGEPITFCEESFVKHRSSVMKQFLETAINLQLFKQFIDGRLAKLNAGRGFSDVFEEEITSGGFCGGKDKLQYDYPFSQ

SEQ ID NO: 239786 - DNA, 1281 bp, Artificial Sequence
  derived and/or modified sequence
atggactgtcggaccaaagccaatcccgatagaacgttcgatctcgtgttgaaagtgaagtgccatgccagcgagaacgaagacccggttgtgctttggaaatttcccgaagactttggagaccaggagattctacagtccgttccgaagttctgtttcccatttgatgtggaacgggtctcccagaaccaggtggggcagcattttacctttgtgttgaccgatattgaaagtaagcagaggtttgggttctgtcgactgacctcgggtggcactatttgtctgtgtattctgagctacttgccgtggttcgaagtgtactataaacttttaaacaccttggcggattatctggctaaggagctggagaatgatttgaatgagactctgcgtagcctctacaatcatcctgtgccaaaggcaaacacccctgtgaacttgtccgttaatcaggagatctttatcgcatgcgaacaggtgcttaaggaccagcctgcactcgttccacactcctatttcatcgctcccgatgttaccggtctaccaacaatccccgagagtagaaatctcaccgaatactttgtggccgtggacgtgaataatatgctgcaattgtatgcctctatgttacacgagcgcaggatcgtgataatttccagcaaactgtcaactctgacggcatgtatccatggctccgctgcccttctgtatcctatgtattggcagcacatttatattcccgtgctgccccctcacttactggactattgttgtgcacccatgccctacctgattggcatccattcatcgctgattgagagagtaaaaaataagagccttgaagacgttgtcatgctgaacgtggacactaacacgctggagtcccctttctccgatctcaataacctgccaagcgatgtggtgagcgctctgaagaacaagttaaagaaacaatccacggctactggagacggcgtggctcgggccttccttagagcccaagccgcgctgttcggtagctaccgcgatgctttaagatataaaccaggcgagccaattactttctgtgaagagtcattcgtcaagcaccggagtagcgtgatgaagcagttcttggagacggcgattaatctccaactgtttaagcaatttatcgatggccgtctggccaagctaaacgcgggcaggggcttctccgatgtctttgaggaagagataacctcagggggtttttgcggaggcaaagataaactccagtatgactatccctttagtcagtag

SEQ ID NO: 239787 - DNA, 1281 bp, Artificial Sequence
  derived and/or modified sequence
atggactgcaggaccaaggccaacccagacaggacctttgacctggtgctgaaggtgaagtgccacgcctctgaaaatgaagatcctgtggtgctgtggaagttcccagaagattttggagaccaggagatcctgcagagcgtgcccaagttctgcttcccctttgatgtggagcgggtgtcccagaaccaggtgggccagcacttcacctttgtgctgacagacatcgagagcaagcagcgcttcggcttctgccgcctgaccagcggcggcaccatctgcctgtgcatcctgagctacctgccctggtttgaggtgtactacaagctgctgaacaccctggccgactacctggccaaggagctggagaatgacctgaatgagaccctgcggagcctgtacaaccaccctgtgcccaaggccaacacccctgtgaacctgtctgtgaaccaggagatcttcatcgcctgtgagcaggtgctgaaggaccagcctgccctggtgccccacagctacttcatcgccccagatgtgacaggcctgcccaccatccctgagagcaggaacctgacagagtactttgtggccgtggatgtgaacaacatgctgcagctgtatgcctccatgctgcatgaaagaagaattgtcatcatcagcagcaagctgagcaccctgacagcctgcatccacggcagcgctgccctgctgtaccccatgtactggcagcacatctacatccctgtgctgcccccccacctgctggactactgctgtgcccccatgccctacctgattggcatccacagcagcctcatcgagcgggtgaagaacaagagcctggaggatgtggtgatgctgaatgtggacaccaacaccctggagagccccttcagtgacctgaacaacctgcccagtgatgtggtgtctgccctgaagaacaagctgaagaagcagagcacagccactggagatggagtggcccgggccttcctgcgggcccaggccgccctgtttggcagctacagagatgccctgcgctacaagccaggagagcccatcaccttctgtgaggagagctttgtgaagcacaggagctctgtgatgaagcagttcctggagacagccatcaacctgcagctgttcaagcagttcattgatggccgcctggccaagctgaatgccggccggggcttcagtgatgtgtttgaggaggagatcaccagcggcggcttctgtggcggcaaggacaagctgcagtatgactaccccttcagccagtag

SEQ ID NO: 239788 - DNA, 1281 bp, Artificial Sequence
  derived and/or modified sequence
atggactgccggaccaaggccaaccccgaccggaccttcgacctggtgttaaaagtcaaatgccacgcttccgagaacgaggacccggtggtgctgtggaagtttccagaagatttcggcgaccaggagattctgcagtcggtccccaaattttgcttccccttcgatgttgagcgcgttagccaaaatcaggtggggcagcatttcaccttcgttcttactgatatcgagagtaagcagcggttcggtttctgtcgattgacatccggcgggactatctgcctttgcatcttgtcatatttgccttggttcgaggtttactataagctcttaaacacgttggcagattatctagcaaaggagctggagaacgatttgaatgagacacttcgcagtctgtataatcatcccgtgcctaaggctaacacgcccgttaatctgagcgtgaatcaagagatatttatagcctgtgagcaggtgctgaaggatcagccagccctagtcccccatagttatttcattgcacctgacgtgacaggactgccaacgatcccagaaagtcgcaatctcactgagtatttcgtagcagttgacgtcaataatatgctgcagttgtacgcgtcaatgctgcatgagcgaagaattgtaattatttcatctaagctgtccacacttacagcgtgtatccatggttcagccgctctgctgtatccaatgtattggcagcacatttacattccagttcttcccccccacttgcttgattattgctgtgcccctatgccctacctgatcgggattcacagcagcctcatagagcgcgtaaagaataagtctctagaggacgtggtgatgcttaacgtggacaccaacacgctcgaatctcccttctcagacctgaataatctgccttcagacgttgtgtctgccctgaaaaacaagctgaaaaagcagtctacagccactggcgacggagtggcgagggctttcctgagggcccaagcagccctattcggatcttaccgcgatgctttaaggtataagcccggcgagcctataacattctgtgaggaatcattcgtgaagcaccgcagctctgtcatgaaacaatttctggaaaccgccataaatctgcagctgtttaaacaatttattgacggtcgcctggccaagctcaacgctgggcgcggcttctccgatgtgtttgaggaggagatcacctctggaggattctgcggaggaaaggataaactgcagtacgactatcctttttcacagtag

SEQ ID NO: 239789 - DNA, 1281 bp, Artificial Sequence
  derived and/or modified sequence
atggattgtagaacaaaggccaaccctgatagaacattcgacctggtcctcaaggtgaaatgtcacgcgtcagaaaacgaagatccagtggttctgtggaagttccctgaggatttcggggatcaggagattctgcagtctgtgcccaaattctgctttccctttgacgtcgagagagtgtcccagaaccaggtggggcagcattttacgttcgtactgactgatatcgaatctaagcaacggttcggtttctgccgccttacatcaggcggtacaatatgtctctgtattctctcttatttgccatggttcgaggtatactacaagttgctgaacactctggcagactacttggctaaggaactcgaaaatgacctgaacgaaacattgcgatccctttataaccaccctgtcccaaaagctaacactccggtaaatttatctgttaatcaggagatattcatcgcctgtgaacaggtgctgaaggatcagcctgccctggtcccccattcctattttatcgcccctgatgtgactggccttcccactatccccgagagccggaacctgacagaatacttcgtggcagtagacgtgaacaacatgttgcagctatatgcctctatgcttcacgaacgcaggatcgtgatcatctcatctaagctttctactcttacagcatgtatccacgggtcagccgcactcctctaccctatgtactggcaacatatatacataccggtgctgccaccgcacttgctggattattgctgtgcgcctatgccttatctgattggaattcatagctccttaatagaaagagtgaagaacaaatccctggaggatgtggttatgctgaacgtcgacactaatacactagaaagccctttctcagatctgaataacctaccatccgacgtggtaagcgcgctcaaaaataagctcaaaaaacagtcaaccgccaccggagatggggtggctcgagcttttttgcgggcacaggccgcactgttcgggagctaccgggatgctctgcgctacaaacccggagaaccaataacattctgcgaggagtcattcgtgaaacatcggagcagcgtaatgaagcagttccttgagaccgccattaatcttcagctgtttaaacaatttattgacgggagactcgccaagcttaacgcaggacggggtttctcagatgtgtttgaggaggagatcactagcgggggattttgtgggggaaaggataagctccagtacgactacccatttagccagtag

SEQ ID NO: 239790 - DNA, 1281 bp, Artificial Sequence
  derived and/or modified sequence
atggactgcagaaccaaggccaaccccgacagaaccttcgacctggtgctgaaggtgaagtgccacgccagcgagaacgaggaccccgtggtgctgtggaagttccccgaggacttcggcgaccaggagatcctgcagagcgtgcccaagttctgcttccccttcgacgtggagagagtgagccagaaccaggtgggccagcacttcaccttcgtgctgaccgacatcgagagcaagcagagattcggcttctgcagactgaccagcggcggcaccatctgcctgtgcatcctgagctacctgccctggttcgaggtgtactacaagctgctgaacaccctggccgactacctggccaaggagctggagaacgacctgaacgagaccctgagaagcctgtacaaccaccccgtgcccaaggccaacacccccgtgaacctgagcgtgaaccaggagatcttcatcgcctgcgagcaggtgctgaaggaccagcccgccctggtgccccacagctacttcatcgcccccgacgtgaccggcctgcccaccatccccgagagcagaaacctgaccgagtacttcgtggccgtggacgtgaacaacatgctgcagctgtacgccagcatgctgcacgagagaagaatcgtgatcatcagcagcaagctgagcaccctgaccgcctgcatccacggcagcgccgccctgctgtaccccatgtactggcagcacatctacatccccgtgctgcccccccacctgctggactactgctgcgcccccatgccctacctgatcggcatccacagcagcctgatcgagagagtgaagaacaagagcctggaggacgtggtgatgctgaacgtggacaccaacaccctggagagccccttcagcgacctgaacaacctgcccagcgacgtggtgagcgccctgaagaacaagctgaagaagcagagcaccgccaccggcgacggcgtggccagagccttcctgagagcccaggccgccctgttcggcagctacagagacgccctgagatacaagcccggcgagcccatcaccttctgcgaggagagcttcgtgaagcacagaagcagcgtgatgaagcagttcctggagaccgccatcaacctgcagctgttcaagcagttcatcgacggcagactggccaagctgaacgccggcagaggcttcagcgacgtgttcgaggaggagatcaccagcggcggcttctgcggcggcaaggacaagctgcagtacgactaccccttcagccagtag

SEQ ID NO: 239791 - DNA, 2177 bp, Artificial Sequence
  derived and/or modified sequence
gccgggggcgcagccgacatgggcccgccgccacggctgctgtgagcagcctctttccctgtgtggccgccggcgtgggcggggacggcgcgaccctcgcgcggccgggctgcgggcttccaggccagcgcgcgggggccggacggacagccccacaccgacatgtaaccatggactgcaggaccaaggcaaatccagacagaacctttgacttggtgttgaaagtgaaatgtcatgcctctgaaaatgaagatcctgtggtattgtggaaattcccagaggactttggagaccaggaaatactacagagtgtgccaaagttctgttttccctttgacgttgaaagggtgtctcagaatcaagttggacagcactttacctttgtactgacagacattgaaagtaaacagagatttggattctgcagactgacgtcaggaggcacaatttgtttatgcatccttagttaccttccctggtttgaagtgtattacaagcttctaaatactcttgcagattacttggctaaggaactggaaaatgatttgaatgaaactctcagatcactgtataaccacccagtaccaaaggcaaatactcctgtaaatttgagtgtgaaccaagagatatttattgcctgtgagcaagttctgaaagatcagcctgctctagtaccgcattcctacttcattgcccctgatgtaactggactcccaacaatacccgagagtagaaatcttacagaatattttgttgccgtggatgtgaacaacatgctgcagctgtatgccagtatgctgcatgaaaggcgcatcgtgattatctcgagcaaattaagcactttaactgcctgtatccatggatcagctgctcttctatacccaatgtattggcaacacatatacatcccagtgcttcctccacacctgctggactactgctgtgccccaatgccatacctgattggaatacactccagcctcatagagagagtgaaaaacaaatcattggaagatgttgttatgttaaatgttgatacaaacacattagaatcaccatttagtgacttgaacaacctaccaagtgatgtggtctcggccttgaaaaataaactgaagaagcagtctacagctacgggtgatggagtagctagggcctttcttagagcacaggctgctttgtttggatcctacagagatgcactgagatacaaacctggtgagcccatcactttctgtgaggagagttttgtaaagcaccgctcaagcgtgatgaaacagttcctggaaactgccattaacctccagctttttaagcagtttatcgatggtcgactggcaaaactaaatgcaggaaggggtttctctgatgtatttgaagaagagatcacttcaggtggcttttgtggaggtaaagacaagttacaatatgattatccattttctcaataacaattttcttggtctttgcacttgtgtctgataaaacctatttcataaacaactaatgatttcctcctaaatatgtaatgtcttaaatacatttttcatcttataaaagctatggaattagcttattttgcctgatacctgttactcaaggcattaagttggcctcctgaattggcagctgttggcctcgataatctcttaatattgctggaaattagtaatacagaaatccaatcaactcatatcttcctgtctttccttctgaatagtagtattctctgctagaaaactactagtgatggttattactgagtatgaatttaagaactgaggttatgattggtaatacaatccaaaaagaagggtctgaacaccaaaattctttatacatatttaagtaactgtattattattatacagatgtctttacctttttgactttatagatcactgcagcattaagaaagtttccagtttaccattccataagtacaattaatccttctagtgtaaatgttcaaatactgttataattatctaggcaattaataatttacaaactgatatttttgcacgattgtagtggtgtatagtcttgacttgcagagcattttgcttgagtccttgaaatgtcgtgttcattcattatttgctgagtgcttacaatgtattaggcactgttctaaatattaagtgtactaaataaacaaaaatccttgtattctg

SEQ ID NO: 239792 - protein, 533 aa, Artificial Sequence
  derived and/or modified sequence
MNEENIDGTNGCSKVRTGIQNEAALLALMEKTGYNMVQENGQRKFGGPPPGWEGPPPPRGCEVFVGKIPRDMYEDELVPVFERAGKIYEFRLMMEFSGENRGYAFVMYTTKEEAQLAIRILNNYEIRPGKFIGVCVSLDNCRLFIGAIPKEKKKEEILDEMKKVTEGVVDVIVYPSATDKTKNRGFAFVEYESHRAAAMARRKLIPGTFQLWGHTIQVDWADPEKEVDEETMQRVKVLYVRNLMISTTEETIKAEFNKFKPGAVERVKKLRDYAFVHFFNREDAVAAMSVMNGKCIDGASIEVTLAKPVNKENTWRQHLNGQISPNSENLIVFANKEESHPKTLGKLPTLPARLNGQHSPSPPEVERCTYPFYPGTKLTPISMYSLKSNHFNSAVMHLDYYCNKNNWAPPEYYLYSTTSQDGKVLLVYKIVIPAIANGSQSYFMPDKLCTTLEDAKELAAQFTLLHLDYNFHRSSINSLSPVSATLSSGTPSVLPYTSRPYSYPGYPLSPTISLANGSHVGQRLCISNQASFF

SEQ ID NO: 239793 - DNA, 2583 bp, Artificial Sequence
  derived and/or modified sequence
gattggatgaggcaccactcctcgtggggctgcttaggccaccgcgcgcgctgcgcgctgggaaacgagtggagacacgaggaccagcgcgagcggtcccggtgggctaccctccccctgcgacgaccccccctcgctctgaccgactggtcccctaaacggtggcggcggtttttggtcgttgggccccgggatttaggaccaacatttgaagacccgaaggggaactgcaaccatgaatgaagaaaatatagatggaacaaatggatgcagtaaagttcgaactggtattcagaatgaagcagcattacttgctttgatggaaaagactggttacaacatggttcaggaaaatggacaaaggaaatttggcggtcctcctccaggttgggaaggtccacctccacctagaggctgtgaagtttttgtaggaaaaatacctcgtgatatgtatgaagatgagttagttcctgtatttgaaagagctgggaagatatatgaatttcgacttatgatggaatttagtggtgaaaatcgaggttatgcttttgtgatgtacactacaaaagaagaagcccaattagccatcagaattcttaataattatgaaattcgaccagggaagtttattggtgtgtgtgtaagcctggataattgtagattatttattggagctattcccaaggaaaagaagaaagaagaaattttagatgaaatgaagaaagttacagaaggagttgtagatgtcattgtttatccaagtgcaactgataagaccaaaaatcgtggttttgcatttgtggaatatgaatctcacagagctgctgctatggcaaggaggaaactaattccaggaacattccaactatggggccacaccattcaggtagattgggctgacccagagaaagaggtggatgaggaaaccatgcagagagttaaagttctttatgtaagaaatttaatgatctcaactacagaggaaacaattaaagcagaattcaataaatttaagcctggtgcagttgaacgggtaaagaaacttagagattatgcttttgttcactttttcaaccgagaagatgcagtggctgccatgtctgttatgaatggaaaatgcattgatggagcaagtattgaggtaacactagctaaaccagtaaataaagaaaacacttggagacagcatcttaatggtcagattagtccaaattctgaaaatctgattgtgtttgctaacaaagaagagagccacccaaaaactctaggcaagctgccaactcttcctgctcgtctcaatggtcagcatagcccaagtccgcctgaagttgaaagatgcacttaccctttttatcctggaacaaagcttactccaattagtatgtattctttaaaatccaatcattttaattctgcagtaatgcatttggattattactgcaacaaaaataactgggcaccaccagaatattatttatattcaacaacaagtcaagatgggaaagtactcttggtgtataagatagttattcctgctattgcaaatggatcccagagttacttcatgccagacaaactctgtactacgttagaagatgcaaaggaactggcagcccagtttacattacttcatttggactacaatttccatcgcagctcaataaatagtctttcccctgttagtgctaccctctcttctgggactcccagcgtgcttccttatacttcaaggccttattcttatccaggctatcctttgtcaccaacaatatcacttgctaatggcagccatgttggacagcggctatgtatctccaatcaggcctccttcttctgaagaaaatactaacattagtatgaaaatttgtgtaaatttgtagtatgaaaacttgcaaattaaaatattgttttattttagaatcgggtttgcatatttggttttaaaaaggtatttattccaaagtactaaacatcagctataattcagaataacatggagttgtagaatttataaaaatgcaaagtttaaaaagttattcagtggtttctcttgataaaggtacagcaaactactattctttttaaacttctaggattttcttctactttctgagtgggcaatagaacctagtcatttatgtttttttttttttttgcataattttactaaatagtatttcacaaatattaaagcacttgaagacaatggttatagtagatttgattaccaaggatcactatctgtactggagattagaacaattatatgaccagaagcatctaaccattatgtaaaaagaaatgatgagacaaaaagattaagatacaaattttgtgcagtactaaagaaaaagcagtctaccattgtggtccttgaaaataactatagatatttttgttatttgttagacacaaattataattttgttgttaatgtatttaagcattttatagttatgctttgtgtttttgatattctttgtattgttaataacaagtgttatgggtttttaatgttgaaatcatgtgttaatttttgtacttgaattcaaattttttgacattaaatatgtgatgcttcta

SEQ ID NO: 239794 - DNA, 1602 bp, Artificial Sequence
  derived and/or modified sequence
atgaacgaggagaacatcgacggcaccaacggctgcagcaaggtgagaaccggcatccagaacgaggccgccctgctggccctgatggagaagaccggctacaacatggtgcaggagaacggccagagaaagttcggcggccccccccccggctgggagggcccccccccccccagaggctgcgaggtgttcgtgggcaagatccccagagacatgtacgaggacgagctggtgcccgtgttcgagagagccggcaagatctacgagttcagactgatgatggagttcagcggcgagaacagaggctacgccttcgtgatgtacaccaccaaggaggaggcccagctggccatcagaatcctgaacaactacgagatcagacccggcaagttcatcggcgtgtgcgtgagcctggacaactgcagactgttcatcggcgccatccccaaggagaagaagaaggaggagatcctggacgagatgaagaaggtgaccgagggcgtggtggacgtgatcgtgtaccccagcgccaccgacaagaccaagaacagaggcttcgccttcgtggagtacgagagccacagagccgccgccatggccagaagaaagctgatccccggcaccttccagctgtggggccacaccatccaggtggactgggccgaccccgagaaggaggtggacgaggagaccatgcagagagtgaaggtgctgtacgtgagaaacctgatgatcagcaccaccgaggagaccatcaaggccgagttcaacaagttcaagcccggcgccgtggagagagtgaagaagctgagagactacgccttcgtgcacttcttcaacagagaggacgccgtggccgccatgagcgtgatgaacggcaagtgcatcgacggcgccagcatcgaggtgaccctggccaagcccgtgaacaaggagaacacctggagacagcacctgaacggccagatcagccccaacagcgagaacctgatcgtgttcgccaacaaggaggagagccaccccaagaccctgggcaagctgcccaccctgcccgccagactgaacggccagcacagccccagcccccccgaggtggagagatgcacctaccccttctaccccggcaccaagctgacccccatcagcatgtacagcctgaagagcaaccacttcaacagcgccgtgatgcacctggactactactgcaacaagaacaactgggccccccccgagtactacctgtacagcaccaccagccaggacggcaaggtgctgctggtgtacaagatcgtgatccccgccatcgccaacggcagccagagctacttcatgcccgacaagctgtgcaccaccctggaggacgccaaggagctggccgcccagttcaccctgctgcacctggactacaacttccacagaagcagcatcaacagcctgagccccgtgagcgccaccctgagcagcggcacccccagcgtgctgccctacaccagcagaccctacagctaccccggctaccccctgagccccaccatcagcctggccaacggcagccacgtgggccagagactgtgcatcagcaaccaggccagcttcttctag

SEQ ID NO: 239795 - DNA, 1602 bp, Artificial Sequence
  derived and/or modified sequence
atgaacgaagagaatattgacggtacaaacggctgctcaaaggtgaggacaggcattcagaatgaagcagcccttttggctttaatggagaagaccgggtataacatggtgcaggagaacggacagcgcaaatttggcggacctcctcctggatgggagggtccccctccacctcggggatgcgaggtgtttgtcggcaagatccctcgcgacatgtacgaagacgaattagtgcccgtattcgagcgagccgggaagatatatgaatttagactgatgatggaatttagtggcgagaacaggggatacgcatttgtgatgtatacaacaaaggaggaggcacagctcgccatcagaattctgaataactatgagatacggccgggaaagttcatcggtgtgtgcgtgagtctggacaattgccggctgttcattggagcaattcccaaagaaaaaaagaaggaagaaatcctcgatgagatgaaaaaggtgacagagggagtagtcgacgtgatcgtgtatcctagcgcaacagacaaaaccaaaaatcgtggcttcgcttttgtcgagtatgaatctcatcgagccgcagccatggcacgacggaagttaattcctggaacatttcaactttggggtcatactattcaggtcgactgggcggatccagaaaaggaagtggacgaggaaacgatgcaacgagtgaaggtcttatatgtcaggaaccttatgatctctactaccgaagagactatcaaggcggaatttaacaagtttaagcccggagcagtggagagagtgaagaaactgcgagattatgcctttgtccatttctttaatagggaggatgccgtggcggccatgtcagtcatgaatggcaaatgcattgatggcgcctctatcgaggtcactctggccaaacccgtgaataaagaaaatacatggaggcagcacctcaatgggcagatctcgcctaactccgagaaccttatcgtctttgcgaacaaggaggaaagccacccaaagacacttggtaaactcccgaccctgccagcgcgtcttaacggtcaacactctcccagtcccccagaggtggaaaggtgcacgtatccattctacccggggacaaagctgacccccatatctatgtactcactgaagagcaatcattttaactcagcagttatgcatctcgattattactgtaacaaaaataactgggcccctcctgaatactacctatactctacgacaagtcaagacgggaaagttttgctggtgtataagattgtcatccccgccatcgccaacggaagccagagctactttatgccagataagctatgtactactctggaggacgccaaggagctggctgcccagttcacgctgctgcatctggactataatttccacaggagcagcatcaattctttatccccagtaagcgccaccctgagtagcgggaccccttcagtcctaccgtacacgtcaagaccttatagctaccctgggtaccccttatcccccacaatctctttagccaacggaagccatgtgggccagcgactgtgtatatccaaccaggcctctttcttctag

SEQ ID NO: 239796 - DNA, 1602 bp, Artificial Sequence
  derived and/or modified sequence
atgaatgaggagaacattgatggcaccaacggctgcagcaaggtgaggacaggcatccagaatgaagctgccctgctggccctgatggagaagacaggctacaacatggtgcaggagaatggccagaggaagtttggaggccccccacctggctgggagggccccccaccaccccggggctgtgaggtgtttgtgggcaagatcccccgggacatgtatgaagatgagctggtgcctgtgtttgagcgggccggcaagatctatgagttccggctgatgatggagttctctggagaaaatagaggctacgcctttgtgatgtacaccaccaaggaggaggcccagctggccatccgcatcctgaacaactatgagatccggcctgggaagttcatcggcgtgtgtgtgtccctggacaactgccgcctcttcatcggggccatccccaaggagaagaagaaggaggagatcctggatgagatgaagaaggtgacagaaggagtggtggatgtgattgtgtaccccagcgccacagacaagaccaagaacagaggatttgcctttgtggagtatgagagccacagagctgctgccatggcccggaggaagctgatccctggcaccttccagctgtggggccacaccatccaggtggactgggccgaccctgagaaggaggtggatgaggagaccatgcagagggtgaaggtgctgtatgtgaggaacctgatgatcagcaccacagaggagaccatcaaggccgagttcaacaagttcaagccaggagctgtggagcgggtgaagaagctgcgggactatgcctttgtgcacttcttcaaccgggaggatgctgtggccgccatgtctgtgatgaatggcaagtgcattgatggagccagcattgaggtgaccctggccaagcctgtgaacaaggagaacacctggaggcagcacctgaatggccagatcagccccaacagcgagaacctgattgtgtttgccaacaaggaggagagccaccccaagaccctgggcaagctgcccaccctgcctgcccggctgaatggccagcacagccccagccccccagaggtggagcgctgcacctaccccttctacccaggcaccaagctgacccccatctccatgtacagcctgaagagcaaccacttcaacagcgctgtgatgcacctggactactactgcaacaagaacaactgggcccctcctgagtactacctgtacagcaccaccagccaggacggcaaggtgctgctggtgtacaagatcgtcatcccagccatcgccaacggcagccagagctacttcatgccagacaagctgtgcaccaccctggaggatgccaaggagctggccgcccagttcaccctgctgcacctggactacaacttccacaggagcagcatcaacagcctgagccctgtgtctgccaccctgagcagcggcacccccagcgtgctgccctacaccagccggccctacagctacccaggctaccccctgagccccaccatcagcctggccaacggcagccacgtgggccagaggctgtgcatcagcaaccaggccagcttcttctag

SEQ ID NO: 239797 - DNA, 1602 bp, Artificial Sequence
  derived and/or modified sequence
atgaacgaggagaacatcgacggcaccaacggctgcagcaaggtgagaacggggatccaaaacgaagcggcactgctcgccctgatggaaaaaaccgggtataacatggtccaggagaacggtcagcgcaagttcggcggcccaccgccaggttgggaaggtccccctccaccgagaggatgtgaggtgtttgtggggaaaatccctcgtgacatgtatgaggacgagttggtacctgtcttcgaaagagccgggaaaatttatgaattcaggctgatgatggagttctcgggagagaatcggggttacgccttcgtaatgtatactaccaaagaggaagctcagttggcgattcggattctgaataattatgaaatccggcccggaaagttcatcggcgtgtgcgtgagtctggataactgccgcctctttatcggagccattcctaaggagaagaagaaggaagagattcttgacgagatgaaaaaggtcacagagggggtcgtcgacgttatagtgtacccttccgcaacagacaaaacgaagaaccgagggtttgcattcgtggaatatgagtcccaccgggccgccgccatggcccgtcgtaagctgattcctggcacattccagctgtggggtcacaccattcaggtcgactgggccgatcctgagaaggaagtcgatgaggagacgatgcagcgcgttaaagtcctgtatgtgcgaaatctgatgatcagcaccacagaggagacaattaaggccgagtttaacaaatttaaaccaggtgctgtcgaaagggtcaaaaagctgcgagattacgcttttgtccatttctttaacagggaggacgctgttgcagcaatgtcggtcatgaacgggaagtgtattgacggagcatcaatagaagtcaccttggccaaaccagtgaataaggagaacacttggcgtcagcatctgaatgggcagatctccccgaattcggagaatctgatcgtgtttgcaaacaaggaggagtcccatcccaagaccctgggtaaactacctactttgcctgcccggctgaatggacagcactcacccagtcctccagaggttgaaaggtgtacttatcccttttaccctggtacaaaactcacccctatctccatgtacagcctgaagtctaatcatttcaattccgccgtcatgcacttggattactattgtaataaaaataattgggctcccccggagtattacctgtactccaccaccagccaggatggcaaagtgttactcgtgtacaaaatcgtgattccagccatcgcgaatgggagtcagtcgtacttcatgccagataagttgtgtacaactttggaggatgccaaggagctggcggcccaattcactctattgcacttggattataactttcaccgatccagtatcaactcattgtcccccgtgagcgctaccctatctagcggcacaccctcagttctcccatacacttcacggccttactcctatccaggctacccactgtcgcccaccatcagtcttgcaaatggatcccacgtcggtcaaagactgtgcatttccaatcaagccagttttttttag

SEQ ID NO: 239798 - DNA, 1602 bp, Artificial Sequence
  derived and/or modified sequence
atgaatgaagaaaatatcgatggcaccaacgggtgcagcaaagttcgtacagggatccaaaacgaagcggcactgctcgctttgatggagaaaaccggatataatatggttcaggagaacggccagagaaagtttggagggccaccgcctggttgggaagggcctccgccaccccgtggctgcgaagtcttcgtaggaaaaattccaagggacatgtatgaggacgagctggtgccggtctttgagagggcaggcaaaatatacgagttccgcttgatgatggagttttccggtgaaaacagggggtatgctttcgtgatgtacaccaccaaggaggaggcccagctagcaattagaatcctaaacaactacgagatcagaccagggaaattcatcggagtgtgcgtgagtttggacaattgccggctgtttatcggggctattccaaaggaaaaaaagaaggaagagattttagatgagatgaagaaagtgacggagggggtggtcgatgttatcgtctacccctcagcaaccgataagacaaaaaatagagggttcgcatttgtggagtacgagagccatagggccgctgccatggctcgtcgaaagctgattcccggtacatttcagttgtggggccatacaatccaggtcgactgggctgaccccgagaaagaagtggatgaagagactatgcagagagtcaaagtgctctatgttcgcaatcttatgatctcaactacggaggagacgatcaaggctgaattcaacaaattcaaacctggcgcagtcgagagagtgaaaaaactccgcgactacgcttttgttcacttctttaatagggaggatgccgtcgcggcaatgtctgtaatgaacggaaagtgtattgacggtgccagcatcgaggtaacgttggccaagcccgtcaataaagaaaatacatggcggcagcacctaaatgggcagatatcaccaaatagtgagaatctgatcgtgtttgcaaataaggaagagtcccatcccaaaacccttggcaaactacccacactaccagctcggctgaatggacagcattccccaagtccgcctgaagtcgaaagatgtacctaccccttctaccccggaacaaaactgactcctatctcaatgtacagcctgaaatcaaatcacttcaattccgcagtgatgcatctcgactattactgcaataaaaacaactgggctcccccagaatactatctttattcaaccaccagccaggacggcaaagtgttgctagtatacaagatagtcattcccgcaatcgctaatggctcccaatcatattttatgccggataaattatgtacaacgttagaagatgccaaagagctagctgcacagttcacactgttacatttagactacaatttccataggtcgagtataaacagtctgtctcccgtgtcagccaccttgtcttcaggaacgcccagtgtattgccatatacctctcggccatacagctaccctggataccctctgagtcccactatttccctggcgaacggatcacatgttgggcaaaggctttgtatcagtaaccaggcctcatttttttag

SEQ ID NO: 239799 - protein, 1989 aa, Artificial Sequence
  derived and/or modified sequence
MATADTPAPASSGLSPKEEGELEDGEISDDDNNSQIRSRSSSSSSGGGLLPYPRRRPPHSARGGGSGGGGGSSSSSSSSQQQLRNFSRSRHASERGHLRGPSSYRPKEPFRSHPPSVRMPSSSLSESSPRPSFWERSHLALDRFRFRGRPYRGGSRWSRGRGVGERGGKPGCRPPLGGGAGSGFSSSQSWREPSPPRKSSKSFGRSPSRKQNYSSKNENCVEETFEDLLLKYKQIQLELECINKDEKLALSSKEENVQEDPKTLNFEDQTSTDNVSITKDSSKEVAPEEKTQVKTFQAFELKPLRQKLTLPGDKNRLKKVKDGAKPLSLKSDTTDSSQGLQDKEQNLTRRISTSDILSEKKLGEDEEELSELQLRLLALQSASKKWQQKEQQVMKESKEKLTKTKTVQQKVKTSTKTHSAKKVSTTAKQALRKQQTKAWKKLQQQKEQERQKEEDQRKQAEEEERRKREEEIRKIRDLSNQEEQYNRFMKLVGGKRRSRSKSSDPDLRRSLDKQPTDSGGGIYQYDNYEEVAMDTDSETSSPAPSPVQPPFFSECSLGYFSPAPSLSLPPPPQVSSLPPLSQPYVEGLCVSLEPLPPLPPLPPLPPEDPEQPPKPPFADEEEEEEMLLREELLKSLANKRAFKPEETSSNSDPPSPPVLNNSHPVPRSNLSIVSINTVSQPRIQNPKFHRGPRLPRTVISLPKHKSVVVTLNDSDDSESDGEASKSTNSVFGGLESMIKEARRTAEQASKPKVPPKSEKENDPLRTPEALPEEKKIEYRLLKEEIANREKQRLIKSDQLKTSSSSPANSDVEIDGIGRIAMVTKQVTDAESKLKKHRILLMKDESVLKNLVQQEAKKKESVRNAEAKITKLTEQLQATEKILNVNRMFLKKLQEQIHRVQQRVTIKKALTLKYGEELARAKAVASKEIGKRKLEQDRFGPNKMMRLDSSPVSSPRKHSAELIAMEKRRLQKLEYEYALKIQKLKEARALKAKEQQNISPVVEEEPEFSLPQPSLHDLTQDKLTLDTEENDVDDEILSGSSRERRRSFLESNYFTKPNLKHTDTANKECINKLNKNTVEKPELFLGLKIGELQKLYSKADSLKQLILKTTTGITEKVLHGQEISVDVDFVTAQSKTMEVKPCPFRPYHSPLLVFKSYRFSPYYRTKEKLPLSSVSYSNMIEPDQCFCRFDLTGTCNDDDCQWQHIQDYTLSRKQLFQDILSYNLSLIGCAETSTNEEITASAEKYVEKLFGVNKDRMSMDQMAVLLVSNINESKGHTPPFTTYKDKRKWKPKFWRKPISDNSFSSDEEQSTGPIKYAFQPENQINVPALDTVVTPDDVRYFTNETDDIANLEASVLENPSHVQLWLKLAYKYLNQNEGECSESLDSALNVLARALENNKDNPEIWCHYLRLFSKRGTKDEVQEMCETAVEYAPDYQSFWTFLHLESTFEEKDYVCERMLEFLMGAAKQETSNILSFQLLEALLFRVQLHIFTGRCQSALAILQNALKSANDGIVAEYLKTSDRCLAWLAYIHLIEFNILPSKFYDPSNDNPSRIVNTESFVMPWQAVQDVKTNPDMLLAVFEDAVKACTDESLAVEERIEACLPLYTNMIALHQLLERYEAAMELCKSLLESCPINCQLLEALVALYLQTNQHDKARAVWLTAFEKNPQNAEVFYHMCKFFILQNRGDNLLPFLRKFIASFFKPGFEKYNNLDLFRYLLNIPGPIDIPSRLCKGNFDDDMFNHQVPYLWLIYCLCHPLQSSIKETVEAYEAALGVAMRCDIVQKIWMDYLVFANNRAAGSRNKVQEFKFFTDLVNRCLVTVPARYPIPFSSADYWSNYEFHNRVIFFYLSCVPKTQHSKTLERFCSVMPANSGLALRLLQHEWEESNVQILKLQAKMFTYNIPTCLATWKIAIAAEIVLKGQREVHRLYQRALQKLPLCASLWKDQLLFEASEGGKTDNLRKLVSKCQEIGVSLNELLNLNSNKTESKNH

SEQ ID NO: 239800 - protein, 346 aa, Artificial Sequence
  derived and/or modified sequence
MATADTPAPASSGLSPKEEGELEDGEISDDDNNSQIRSRSSSSSSGGGLLPYPRRRPPHSARGGGSGGGGGSSSSSSSSQQQLRNFSRSRHASERGHLRGPSSYRPKEPFRSHPPSVRMPSSSLSESSPRPSFWERSHLALDRFRFRGRPYRGGSRWSRGRGVGERGGKPGCRPPLGGGAGSGFSSSQSWREPSPPRKSSKSFGRSPSRKQNYSSKNENCVEETFEDLLLKYKQIQLELECINKDEKLALSSKEENVQEDPKTLNFEDQTSTDNVSITKDSSKEVAPEEKTQVKTFQAFELKPLRQKLTLPGDKNRLKKVKDGAKPLSLKSDTTDSSQGNGIKYFS

SEQ ID NO: 239801 - DNA, 5970 bp, Artificial Sequence
  derived and/or modified sequence
atggccaccgccgacacccccgcccccgccagcagcggcctgagccccaaggaggagggcgagctggaggacggcgagatcagcgacgacgacaacaacagccagatcagaagcagaagcagcagcagcagcagcggcggcggcctgctgccctaccccagaagaagacccccccacagcgccagaggcggcggcagcggcggcggcggcggcagcagcagcagcagcagcagcagccagcagcagctgagaaacttcagcagaagcagacacgccagcgagagaggccacctgagaggccccagcagctacagacccaaggagcccttcagaagccacccccccagcgtgagaatgcccagcagcagcctgagcgagagcagccccagacccagcttctgggagagaagccacctggccctggacagattcagattcagaggcagaccctacagaggcggcagcagatggagcagaggcagaggcgtgggcgagagaggcggcaagcccggctgcagaccccccctgggcggcggcgccggcagcggcttcagcagcagccagagctggagagagcccagcccccccagaaagagcagcaagagcttcggcagaagccccagcagaaagcagaactacagcagcaagaacgagaactgcgtggaggagaccttcgaggacctgctgctgaagtacaagcagatccagctggagctggagtgcatcaacaaggacgagaagctggccctgagcagcaaggaggagaacgtgcaggaggaccccaagaccctgaacttcgaggaccagaccagcaccgacaacgtgagcatcaccaaggacagcagcaaggaggtggcccccgaggagaagacccaggtgaagaccttccaggccttcgagctgaagcccctgagacagaagctgaccctgcccggcgacaagaacagactgaagaaggtgaaggacggcgccaagcccctgagcctgaagagcgacaccaccgacagcagccagggcctgcaggacaaggagcagaacctgaccagaagaatcagcaccagcgacatcctgagcgagaagaagctgggcgaggacgaggaggagctgagcgagctgcagctgagactgctggccctgcagagcgccagcaagaagtggcagcagaaggagcagcaggtgatgaaggagagcaaggagaagctgaccaagaccaagaccgtgcagcagaaggtgaagaccagcaccaagacccacagcgccaagaaggtgagcaccaccgccaagcaggccctgagaaagcagcagaccaaggcctggaagaagctgcagcagcagaaggagcaggagagacagaaggaggaggaccagagaaagcaggccgaggaggaggagagaagaaagagagaggaggagatcagaaagatcagagacctgagcaaccaggaggagcagtacaacagattcatgaagctggtgggcggcaagagaagaagcagaagcaagagcagcgaccccgacctgagaagaagcctggacaagcagcccaccgacagcggcggcggcatctaccagtacgacaactacgaggaggtggccatggacaccgacagcgagaccagcagccccgcccccagccccgtgcagccccccttcttcagcgagtgcagcctgggctacttcagccccgcccccagcctgagcctgcccccccccccccaggtgagcagcctgccccccctgagccagccctacgtggagggcctgtgcgtgagcctggagcccctgccccccctgccccccctgccccccctgccccccgaggaccccgagcagccccccaagccccccttcgccgacgaggaggaggaggaggagatgctgctgagagaggagctgctgaagagcctggccaacaagagagccttcaagcccgaggagaccagcagcaacagcgacccccccagcccccccgtgctgaacaacagccaccccgtgcccagaagcaacctgagcatcgtgagcatcaacaccgtgagccagcccagaatccagaaccccaagttccacagaggccccagactgcccagaaccgtgatcagcctgcccaagcacaagagcgtggtggtgaccctgaacgacagcgacgacagcgagagcgacggcgaggccagcaagagcaccaacagcgtgttcggcggcctggagagcatgatcaaggaggccagaagaaccgccgagcaggccagcaagcccaaggtgccccccaagagcgagaaggagaacgaccccctgagaacccccgaggccctgcccgaggagaagaagatcgagtacagactgctgaaggaggagatcgccaacagagagaagcagagactgatcaagagcgaccagctgaagaccagcagcagcagccccgccaacagcgacgtggagatcgacggcatcggcagaatcgccatggtgaccaagcaggtgaccgacgccgagagcaagctgaagaagcacagaatcctgctgatgaaggacgagagcgtgctgaagaacctggtgcagcaggaggccaagaagaaggagagcgtgagaaacgccgaggccaagatcaccaagctgaccgagcagctgcaggccaccgagaagatcctgaacgtgaacagaatgttcctgaagaagctgcaggagcagatccacagagtgcagcagagagtgaccatcaagaaggccctgaccctgaagtacggcgaggagctggccagagccaaggccgtggccagcaaggagatcggcaagagaaagctggagcaggacagattcggccccaacaagatgatgagactggacagcagccccgtgagcagccccagaaagcacagcgccgagctgatcgccatggagaagagaagactgcagaagctggagtacgagtacgccctgaagatccagaagctgaaggaggccagagccctgaaggccaaggagcagcagaacatcagccccgtggtggaggaggagcccgagttcagcctgccccagcccagcctgcacgacctgacccaggacaagctgaccctggacaccgaggagaacgacgtggacgacgagatcctgagcggcagcagcagagagagaagaagaagcttcctggagagcaactacttcaccaagcccaacctgaagcacaccgacaccgccaacaaggagtgcatcaacaagctgaacaagaacaccgtggagaagcccgagctgttcctgggcctgaagatcggcgagctgcagaagctgtacagcaaggccgacagcctgaagcagctgatcctgaagaccaccaccggcatcaccgagaaggtgctgcacggccaggagatcagcgtggacgtggacttcgtgaccgcccagagcaagaccatggaggtgaagccctgccccttcagaccctaccacagccccctgctggtgttcaagagctacagattcagcccctactacagaaccaaggagaagctgcccctgagcagcgtgagctacagcaacatgatcgagcccgaccagtgcttctgcagattcgacctgaccggcacctgcaacgacgacgactgccagtggcagcacatccaggactacaccctgagcagaaagcagctgttccaggacatcctgagctacaacctgagcctgatcggctgcgccgagaccagcaccaacgaggagatcaccgccagcgccgagaagtacgtggagaagctgttcggcgtgaacaaggacagaatgagcatggaccagatggccgtgctgctggtgagcaacatcaacgagagcaagggccacaccccccccttcaccacctacaaggacaagagaaagtggaagcccaagttctggagaaagcccatcagcgacaacagcttcagcagcgacgaggagcagagcaccggccccatcaagtacgccttccagcccgagaaccagatcaacgtgcccgccctggacaccgtggtgacccccgacgacgtgagatacttcaccaacgagaccgacgacatcgccaacctggaggccagcgtgctggagaaccccagccacgtgcagctgtggctgaagctggcctacaagtacctgaaccagaacgagggcgagtgcagcgagagcctggacagcgccctgaacgtgctggccagagccctggagaacaacaaggacaaccccgagatctggtgccactacctgagactgttcagcaagagaggcaccaaggacgaggtgcaggagatgtgcgagaccgccgtggagtacgcccccgactaccagagcttctggaccttcctgcacctggagagcaccttcgaggagaaggactacgtgtgcgagagaatgctggagttcctgatgggcgccgccaagcaggagaccagcaacatcctgagcttccagctgctggaggccctgctgttcagagtgcagctgcacatcttcaccggcagatgccagagcgccctggccatcctgcagaacgccctgaagagcgccaacgacggcatcgtggccgagtacctgaagaccagcgacagatgcctggcctggctggcctacatccacctgatcgagttcaacatcctgcccagcaagttctacgaccccagcaacgacaaccccagcagaatcgtgaacaccgagagcttcgtgatgccctggcaggccgtgcaggacgtgaagaccaaccccgacatgctgctggccgtgttcgaggacgccgtgaaggcctgcaccgacgagagcctggccgtggaggagagaatcgaggcctgcctgcccctgtacaccaacatgatcgccctgcaccagctgctggagagatacgaggccgccatggagctgtgcaagagcctgctggagagctgccccatcaactgccagctgctggaggccctggtggccctgtacctgcagaccaaccagcacgacaaggccagagccgtgtggctgaccgccttcgagaagaacccccagaacgccgaggtgttctaccacatgtgcaagttcttcatcctgcagaacagaggcgacaacctgctgcccttcctgagaaagttcatcgccagcttcttcaagcccggcttcgagaagtacaacaacctggacctgttcagatacctgctgaacatccccggccccatcgacatccccagcagactgtgcaagggcaacttcgacgacgacatgttcaaccaccaggtgccctacctgtggctgatctactgcctgtgccaccccctgcagagcagcatcaaggagaccgtggaggcctacgaggccgccctgggcgtggccatgagatgcgacatcgtgcagaagatctggatggactacctggtgttcgccaacaacagagccgccggcagcagaaacaaggtgcaggagttcaagttcttcaccgacctggtgaacagatgcctggtgaccgtgcccgccagataccccatccccttcagcagcgccgactactggagcaactacgagttccacaacagagtgatcttcttctacctgagctgcgtgcccaagacccagcacagcaagaccctggagagattctgcagcgtgatgcccgccaacagcggcctggccctgagactgctgcagcacgagtgggaggagagcaacgtgcagatcctgaagctgcaggccaagatgttcacctacaacatccccacctgcctggccacctggaagatcgccatcgccgccgagatcgtgctgaagggccagagagaggtgcacagactgtaccagagagccctgcagaagctgcccctgtgcgccagcctgtggaaggaccagctgctgttcgaggccagcgagggcggcaagaccgacaacctgagaaagctggtgagcaagtgccaggagatcggcgtgagcctgaacgagctgctgaacctgaacagcaacaagaccgagagcaagaaccactag

SEQ ID NO: 239802 - DNA, 1041 bp, Artificial Sequence
  derived and/or modified sequence
atggccaccgccgacacccccgcccccgccagcagcggcctgagccccaaggaggagggcgagctggaggacggcgagatcagcgacgacgacaacaacagccagatcagaagcagaagcagcagcagcagcagcggcggcggcctgctgccctaccccagaagaagacccccccacagcgccagaggcggcggcagcggcggcggcggcggcagcagcagcagcagcagcagcagccagcagcagctgagaaacttcagcagaagcagacacgccagcgagagaggccacctgagaggccccagcagctacagacccaaggagcccttcagaagccacccccccagcgtgagaatgcccagcagcagcctgagcgagagcagccccagacccagcttctgggagagaagccacctggccctggacagattcagattcagaggcagaccctacagaggcggcagcagatggagcagaggcagaggcgtgggcgagagaggcggcaagcccggctgcagaccccccctgggcggcggcgccggcagcggcttcagcagcagccagagctggagagagcccagcccccccagaaagagcagcaagagcttcggcagaagccccagcagaaagcagaactacagcagcaagaacgagaactgcgtggaggagaccttcgaggacctgctgctgaagtacaagcagatccagctggagctggagtgcatcaacaaggacgagaagctggccctgagcagcaaggaggagaacgtgcaggaggaccccaagaccctgaacttcgaggaccagaccagcaccgacaacgtgagcatcaccaaggacagcagcaaggaggtggcccccgaggagaagacccaggtgaagaccttccaggccttcgagctgaagcccctgagacagaagctgaccctgcccggcgacaagaacagactgaagaaggtgaaggacggcgccaagcccctgagcctgaagagcgacaccaccgacagcagccagggcaacggcatcaagtacttcagctag

SEQ ID NO: 239803 - DNA, 5970 bp, Artificial Sequence
  derived and/or modified sequence
atggcaacagccgatacccccgcgccagcatcttctggtctgagccccaaagaggagggcgagctcgaggacggggaaatttccgacgacgacaacaattcgcaaataagatcccgcagttccagttcatcctccggcggagggttgctgccctaccctagacgacgacccccacactcagctcgtggcggaggatcaggtggcggcggcggttcaagctcttcgagctcctcctctcaacaacagctgagaaacttttctagatcacgtcatgcttctgagcgcgggcacttgcgcggaccctccagctaccgccctaaggagcctttccgtagtcaccccccctcagtgcgcatgccttcgtcatcactaagtgaatccagtcccagaccctcgttttgggagcgctcacatcttgccctcgaccggttccgatttagagggcgtccctaccgggggggatcccgctggagtagaggccgaggtgttggcgagcgggggggaaagccaggatgtcgcccgcctctgggaggtggcgctggatccgggttcagtagttcacaatcatggcgagaaccatctcccccacgaaaatccagtaagtctttcgggaggagtccttcacgaaagcaaaactatagttccaaaaatgaaaattgtgtcgaggagacattcgaggatttgctgctgaagtacaagcagattcaactggagcttgagtgcatcaataaggacgaaaaattagccctttcctccaaagaggagaacgtccaggaggatccaaaaacactgaattttgaagaccaaaccagtaccgacaacgtgtcaattactaaggacagctctaaagaagtggcaccagaagagaagacacaggtcaaaactttccaggcatttgagttaaagccacttcgacagaaactgaccttgccaggcgataaaaatagattgaagaaggtcaaggacggcgctaaacccctgagcctgaaatctgatacaacagacagctcccaaggccttcaggacaaagaacagaatctaacccgccgcatctctacttccgacatattaagcgagaagaagctgggcgaagatgaggaagagctatccgaacttcagctgaggctcctggccctgcagtccgcgtctaagaaatggcagcagaaagaacagcaagtgatgaaggaatcaaaagagaaactaaccaaaacgaagacagtgcaacaaaaggttaagacaagtactaagacgcattctgcaaagaaggtcagcactacggccaagcaggctttgcgaaagcagcagaccaaagcctggaagaaattacagcagcagaaggaacaggagaggcagaaggaagaggatcagcgcaagcaggccgaagaggaagagaggcggaaacgagaagaggaaattcgaaaaatcagagatctgagtaaccaggaagaacaatataaccgcttcatgaaactggtcgggggcaaaaggagaagccggtctaaatccagtgatcccgatctgcgcaggtccctggataaacagccaacagattccggcggtggcatataccaatatgataactacgaagaggtagcgatggacacagactccgaaacttcatcgccagcgccgtcgccagtccagcccccgtttttttccgagtgctctctgggctatttcagcccagccccgtccctgtccctgcctccaccccctcaagtttcctctctgccccccttaagccagccatacgtcgagggactgtgtgtctcccttgagccactgcctccattgcccccactccctccgttgcccccggaggatccggagcaacccccaaagccccccttcgcggatgaggaagaagaagaagagatgcttctccgtgaggaactcctcaaatccctggcgaataaaagggcgtttaagcccgaggagacgtcctctaactctgacccccccagcccccctgtcctaaacaactcacaccccgtgccgcggagcaacctgagcatcgtgtccatcaacacagtaagtcaacccagaattcagaatccaaagtttcatcggggccctagactgcccagaaccgttatcagtctgcctaaacataaaagtgtggtcgtgacgctcaatgatagcgacgattccgagtcagatggcgaggcaagcaaatccactaatagcgtgtttgggggcttagagtcaatgatcaaggaggccagacggaccgcagagcaggctagcaagcccaaagtgccgcccaaatcagagaaagaaaatgacccactcagaaccccggaggccctgccagaagaaaaaaaaattgaatacagactgctgaaagaggagatagcaaatcgcgaaaaacaacgtctgatcaagtcggaccagcttaaaacatcctcttcatctccagctaatagtgacgtcgaaatcgatggaatcggcaggattgccatggtgacaaagcaggtgacggatgccgagtctaagctgaagaaacaccgaatcttgctaatgaaagacgaaagtgtgctgaagaacctggtgcagcaggaggccaaaaaaaaagagagtgtgaggaatgcagaggctaagatcactaaactgacagaacagctgcaggccaccgagaagatcctcaacgtcaatcggatgtttctgaagaagctgcaggagcagatacatcgggttcagcagcgagtgacgataaagaaagcattgacactgaagtatggagaagaactggctagggctaaagccgtggccagcaaagagattggcaagaggaaactggagcaggatcggttcggcccaaacaaaatgatgcgccttgactcctctcccgtgagttcaccacggaagcattccgccgagctgatagcgatggaaaagcgacgacttcagaaactggagtatgaatacgctctgaaaatacagaagctcaaagaagcccgcgccctcaaggctaaagaacagcagaatatttctcctgtcgtggaggaggaacccgaattctccctgccccagccaagcttacatgacctgacacaagacaagttgacccttgatacagaggagaatgacgttgatgacgaaattttgtctgggagcagtcgcgagaggaggcgtagttttctggagtctaattattttacaaagccaaacctaaaacataccgacaccgcaaataaggagtgtataaacaagctgaataagaatacagtcgagaaaccggaactgtttttaggcctcaaaatcggagaactgcagaaattgtactccaaggcagattcgctgaaacagcttatcctgaagacaaccaccggcattaccgaaaaggtcttgcatggccaagagatatccgtggatgttgacttcgtcacagcccagagtaaaaccatggaggttaagccctgtccatttcgcccttaccactcgccgcttctggtttttaaatcctacaggttcagcccatactaccggacgaaggagaagctgccactaagttccgtttcctattcaaatatgatcgagcccgatcagtgtttttgcagatttgaccttactggtacctgtaacgatgacgattgccaatggcagcacatccaagactatactctgtcacggaagcaactctttcaagatatcctttcctacaatctgtcccttatcgggtgcgctgaaacctcaacaaacgaagagatcacagccagcgccgaaaaatatgttgagaagttatttggcgtcaataaagacagaatgtctatggatcaaatggccgtcctactagtttccaatattaacgaaagcaagggtcatacaccaccctttacaacatataaggataaaaggaagtggaagcccaagttttggaggaagcccatttctgacaattctttttcttctgacgaagaacagagtactggcccaattaagtatgccttccagcccgaaaatcagatcaatgtgccagcccttgacacggtggtgactccagatgatgtcaggtactttaccaatgaaaccgacgacattgctaacctagaggcttccgtcctggaaaatcctagtcacgtccaactttggcttaagttagcctacaagtacctcaaccagaatgagggtgaatgtagtgagtctctcgacagcgctttgaatgtgctagcaagggctctcgagaataacaaagataatcctgagatttggtgccattacttacgactgttttcaaaacgggggacaaaggacgaggtgcaggaaatgtgcgaaaccgcagttgagtacgcacccgattaccagagtttctggacgtttctccaccttgagagcactttcgaagagaaggattacgtctgcgagcgaatgctggagtttcttatgggtgctgcaaaacaggagacttccaatattctgtccttccagcttctggaagctcttttgttccgggtgcaactacatatctttactggccgatgccagtctgcactggccatactgcagaacgctttaaaatctgcaaacgatggaatagtggccgagtacctaaagacctccgacaggtgtctcgcgtggctagcttatatccacctcattgaattcaatatcttgcccagtaaattctacgacccgtccaacgataacccctcacggatcgttaataccgaatcattcgtgatgccttggcaggctgtgcaggatgttaaaactaatccggatatgctgctcgcagtatttgaagatgcagtcaaggcttgcacagacgaaagtctggccgtcgaggagagaatcgaagcatgccttccattgtatacaaacatgatcgcgctccatcagctgttagaacggtacgaagccgcaatggaactttgtaagagtcttctggagtcatgccccatcaattgtcagctgctggaggccctcgtcgcattgtacctgcagactaaccagcacgataaagcccgggccgtgtggttaaccgcttttgagaagaacccacagaatgctgaagtattctatcacatgtgtaagttctttatactgcagaatcgaggggataacctgctgccgttcctgaggaagtttatcgcgtcattttttaagcctggtttcgagaagtataataatttggacctgttcaggtaccttttgaatatccctggtcccatcgatatcccttcccgtttgtgtaaagggaattttgatgacgatatgttcaaccatcaggtcccctacttatggctaatctactgtctctgccatcccctccagtcttccattaaggaaaccgtggaggcttacgaggctgcgctcggcgttgccatgagatgcgatatagtccaaaaaatctggatggactatctggtcttcgccaacaaccgggctgcagggagccggaacaaggtgcaagagtttaagttctttacagatctcgttaatcgctgcctagtgacggtgcccgctagatatcccattcccttcagcagtgcagattactggtcgaattatgagtttcataaccgcgtcatttttttctacttatcctgcgtgcctaagacacaacactctaagactctggagcgtttttgcagtgtcatgcccgcgaacagtggattggccttgcgcctcctgcagcatgagtgggaggagagcaatgtccagatactgaagctccaggccaagatgttcacctacaatattccaacctgcttggcaacatggaaaattgctatcgctgctgagattgtgctcaaaggacagcgggaagtacacaggctttaccaaagggcgctccagaagcttccactctgtgcttccctgtggaaagatcaactgctgtttgaagcatcagagggtggcaaaaccgacaatctgcgtaagctggtgtctaagtgtcaagagatcggtgtaagtctcaacgagctgctgaacctcaacagcaacaagaccgagtccaagaaccattag

SEQ ID NO: 239804 - DNA, 1041 bp, Artificial Sequence
  derived and/or modified sequence
atggctactgccgacacacctgctcctgcaagcagcggcctgtcacctaaagaggagggagagttagaggatggtgaaatcagtgatgacgacaataacagtcagattaggtcacgtagcagttcgtcttctagcggtggcggcctgctcccgtaccctaggagacgccccccacattcagcccggggaggagggtctgggggcggaggtggctcaagttcatccagcagctcctcacaacagcagcttcgcaatttctctcggagtcgccatgcgtccgagaggggtcatctgcgcggaccaagtagttatcgcccaaaggagccatttaggagccacccgccgtcagttcgcatgccttctagcagtctgagtgagagttctccacgaccttctttttgggagagaagccatttggccctggatcggttcaggtttcggggacgcccctatagaggaggctcaagatggagccgcgggcgaggggtgggagagcgcggtggtaagcccggatgtagaccgccgttgggtgggggggcaggctcggggttctcctcctctcagagctggagggagccctctccaccgaggaaaagtagtaagagcttcgggcgttctccatctagaaagcaaaactacagctctaagaacgaaaattgtgtagaggaaaccttcgaggatctcctgctgaaatacaagcagattcagcttgaactcgagtgtattaacaaagatgagaagttagccttgagctccaaagaggagaacgtccaggaagaccctaagaccctgaattttgaagaccagacctccaccgacaacgtgtcaataactaaagactcatccaaggaagtagctcctgaagaaaagacgcaggtgaaaacctttcaggcgttcgaactgaaacctttaagacaaaagctaacgttacccggagataaaaacagactcaagaaggtgaaggatggcgccaaacccctcagcctgaagtccgataccacagatagttcacagggcaacggaattaaatatttttcgtag

SEQ ID NO: 239805 - DNA, 5970 bp, Artificial Sequence
  derived and/or modified sequence
atggccacagctgacaccccagccccagccagcagcggcctgagccccaaggaggagggggagctggaggatggagagatcagtgatgatgacaacaacagccagatccgcagccgcagcagcagcagcagcagcggcggcggcctgctgccctaccccaggagaagaccaccccacagcgcccggggcggcggcagcggcggcggcggcggcagcagcagcagcagcagcagcagccagcagcagctgaggaacttcagccgcagcagacatgccagcgagcggggccacctgcggggccccagcagctaccggcccaaggagcccttccgcagccacccccccagcgtgaggatgcccagcagcagcctgtctgagagcagcccccggcccagcttctgggagaggagccacctggccctggaccgcttccgcttccggggccggccctacagaggaggcagccgctggagccggggccggggcgtgggggagcggggcggcaagccaggctgccggccccccctgggcggcggggccggcagcggcttcagcagcagccagagctggagggagcccagcccccccaggaagagcagcaagagctttggccgcagccccagcaggaagcagaactacagcagcaagaatgaaaactgtgtggaggagacctttgaggacctgctgctgaagtacaagcagatccagctggagctggagtgcatcaacaaggatgagaagctggccctgagcagcaaggaggagaatgtgcaggaggaccccaagaccctgaactttgaggaccagaccagcacagacaacgtgtccatcaccaaggacagcagcaaggaggtggcccctgaggagaagacccaggtgaagaccttccaggcctttgagctgaagcccctgcggcagaagctgaccctgcccggggacaagaaccggctgaagaaggtgaaggatggagccaagcccctgagcctgaagagtgacaccacagacagcagccagggcctgcaggacaaggagcagaacctgacccggcgcatcagcaccagtgacatcctgtctgagaagaagctgggggaggatgaggaggagctgtctgagctgcagctgcggctgctggccctgcagagcgccagcaagaagtggcagcagaaggagcagcaggtgatgaaggagagcaaggagaagctgaccaagaccaagacagtgcagcagaaggtgaagaccagcaccaagacccacagcgccaagaaggtgtccaccacagccaagcaggccctgaggaagcagcagaccaaggcctggaagaagctgcagcagcagaaggagcaggagcggcagaaggaggaggaccagaggaagcaggccgaggaggaggagaggaggaagcgggaggaggagatcaggaagatccgggacctgagcaaccaggaggagcagtacaaccgcttcatgaagctggtgggcggcaagaggaggagccgcagcaagagcagtgaccctgacctgcggcgcagcctggacaagcagcccacagacagcggcggcggcatctaccagtatgacaactatgaggaggtggccatggacacagattctgagaccagcagccctgcccccagccctgtgcagccccccttcttcagcgagtgcagcctgggctacttcagccctgcccccagcctgagcctgcccccaccaccccaggtgagcagcctgccccccctgagccagccctacgtggagggcctgtgtgtgtccctggagcccctgccccccctgccccccctgccccccctgcccccagaagatcctgagcagccccccaagcccccatttgctgatgaggaggaggaggaggagatgctgctgcgggaggagctgctgaagagcctggccaacaagagggccttcaagccagaggagaccagcagcaacagcgacccccccagcccccctgtgctgaacaacagccaccctgtgcccaggagcaacctgagcatcgtgtccatcaacacagtgtcccagccccgcatccagaaccccaagttccaccggggcccccggctgcccaggacagtcatcagcctgcccaagcacaagtctgtggtggtgaccctgaatgacagtgatgattctgagagtgatggagaggccagcaagagcaccaacagcgtgtttggaggcctggagagcatgatcaaggaggcccggaggacagctgagcaggccagcaagcccaaggtgccccccaagtctgagaaggaaaatgaccccctgcggaccccagaggccctgcctgaggagaagaagattgagtaccgcctgctgaaggaggagatcgccaaccgggagaagcagaggctcatcaagagtgaccagctgaagaccagcagcagcagccctgccaacagtgatgtggagattgatggcatcggcagaattgccatggtgaccaagcaggtgacagatgctgagagcaagctgaagaagcaccgcatcctgctgatgaaggatgaatctgtgctgaagaacctggtgcagcaggaggccaagaagaaggagagcgtgagaaatgctgaggccaagatcaccaagctgacagagcagctgcaggccacagagaagatcctgaatgtgaacaggatgttcctgaagaagctgcaggagcagatccaccgggtgcagcagagggtgaccatcaagaaggccctgaccctgaagtatggagaggagctggcccgggccaaggctgtggccagcaaggagatcggcaagaggaagctggagcaggaccgcttcggccccaacaagatgatgaggctggacagcagccctgtgagcagccccaggaagcacagcgctgagctgattgccatggagaagaggcggctgcagaagctggagtatgaatatgccctgaagatccagaagctgaaggaggcccgggccctgaaggccaaggagcagcagaacatcagccctgtggtggaggaggagcctgagttcagcctgccccagcccagcctgcatgacctgacccaggacaagctgaccctggacacagaggagaatgatgtggatgatgagatcctgagcggcagcagccgggagcggcggcgctccttcctggagagcaactacttcaccaagcccaacctgaagcacacagacacagccaacaaggagtgcatcaacaagctgaacaagaacacagtggagaagccagagctgttcctgggcctgaagatcggggagctgcagaagctgtacagcaaggctgacagcctgaagcagctgatcctgaagaccaccaccggcatcacagagaaggtgctgcacggccaggagatctctgtggatgtggactttgtgacagcccagagcaagaccatggaggtgaagccctgccccttccggccctaccacagccccctgctggtgttcaagagctaccgcttcagcccctactaccgcaccaaggagaagctgcccctgagctctgtgtcctacagcaacatgattgaaccagaccagtgcttctgccgctttgacctgaccggcacctgcaatgatgatgactgccagtggcagcacatccaggactacaccctgagcaggaagcagctgttccaggacatcctgagctacaacctgagcctcatcggctgtgccgagaccagcaccaatgaggagatcacagccagcgctgagaagtatgtggagaagctgtttggagtgaacaaggacaggatgtccatggaccagatggctgtgctgctggtgagcaacatcaatgaaagcaagggccacaccccacccttcaccacctacaaggacaagaggaagtggaagcccaagttctggaggaagcccatcagtgacaacagcttcagcagtgatgaggagcagagcacaggccccatcaagtatgccttccagcctgagaaccagatcaacgtgcctgccctggacacagtggtgaccccagatgatgtgcgctacttcaccaatgaaacagatgacatcgccaacctggaggcctctgtgctggagaaccccagccacgtgcagctgtggctgaagctggcctacaagtacctgaaccagaatgaaggagagtgcagcgagagcctggacagcgccctgaatgtgctggcccgggccctggagaacaacaaggacaaccctgagatctggtgccactacctgcggctcttcagcaagaggggcaccaaggatgaggtgcaggagatgtgtgaaacagctgtggagtatgccccagactaccagagcttctggaccttcctgcacctggagagcacctttgaggagaaggactatgtgtgtgagaggatgctggagttcctgatgggcgccgccaagcaggagaccagcaacatcctgtccttccagctgctggaggccctgctcttccgggtgcagctgcacatcttcaccggccgctgccagagcgccctggccatcctgcagaatgccctgaagagcgccaatgatggcatcgtggccgagtacctgaagaccagtgaccgctgcctggcctggctggcctacatccacctgattgagttcaacatcctgcccagcaagttctatgaccccagcaatgacaaccccagcagaattgtgaacacagagagctttgtgatgccctggcaggccgtgcaggatgtgaagaccaacccagacatgctgctggccgtgtttgaagatgctgtgaaggcctgcacagatgagagcctggccgtggaggagcgcatcgaggcctgcctgcccctgtacaccaacatgattgccctgcaccagctgctggagagatatgaggccgccatggagctgtgcaagagcctgctggagagctgccccatcaactgccagctgctggaggccctggtggccctgtacctgcagaccaaccagcacgacaaggcccgggctgtgtggctgacagcctttgagaagaacccccagaatgctgaggtgttctaccacatgtgcaagttcttcatcctgcagaacagaggagacaacctgctgcccttcctgaggaagttcatcgccagcttcttcaagccaggctttgagaagtacaacaacctggacctcttccgctacctgctgaacatccctggccccatcgacatccccagccggctgtgcaagggcaactttgatgatgacatgttcaaccaccaggtgccctacctgtggctgatctactgcctgtgccaccccctgcagagcagcatcaaggagaccgtggaggcctatgaggccgccctgggcgtggccatgagatgtgacatcgtgcagaagatctggatggactacctggtgtttgccaacaacagagctgctggcagcaggaacaaggtgcaggagttcaagttcttcacagacctggtgaaccgctgcctggtgacagtgcctgcccgctaccccatccccttcagcagcgctgactactggagcaactatgagttccacaacagagtcatcttcttctacctgagctgtgtgcccaagacccagcacagcaagaccctggagcgcttctgcagcgtgatgcctgccaacagcggcctggccctgcggctgctgcagcacgagtgggaggagagcaatgtgcagatcctgaagctgcaggccaagatgttcacctacaacatccccacctgcctggccacctggaagatcgccatcgctgctgagatcgtgctgaagggccagcgggaggtgcaccggctgtaccagagggccctgcagaagctgcccctgtgtgccagcctgtggaaggaccagctgctgtttgaggccagcgagggcggcaagacagacaacctgaggaagctggtgtccaagtgccaggagattggagtgtccctgaatgagctgctgaacctgaacagcaacaagacagagagcaagaaccactag

SEQ ID NO: 239806 - DNA, 1041 bp, Artificial Sequence
  derived and/or modified sequence
atggccacagctgacaccccagccccagccagcagcggcctgagccccaaggaggagggggagctggaggatggagagatcagtgatgatgacaacaacagccagatccgcagccgcagcagcagcagcagcagcggcggcggcctgctgccctaccccaggagaagaccaccccacagcgcccggggcggcggcagcggcggcggcggcggcagcagcagcagcagcagcagcagccagcagcagctgaggaacttcagccgcagcagacatgccagcgagcggggccacctgcggggccccagcagctaccggcccaaggagcccttccgcagccacccccccagcgtgaggatgcccagcagcagcctgtctgagagcagcccccggcccagcttctgggagaggagccacctggccctggaccgcttccgcttccggggccggccctacagaggaggcagccgctggagccggggccggggcgtgggggagcggggcggcaagccaggctgccggccccccctgggcggcggggccggcagcggcttcagcagcagccagagctggagggagcccagcccccccaggaagagcagcaagagctttggccgcagccccagcaggaagcagaactacagcagcaagaatgaaaactgtgtggaggagacctttgaggacctgctgctgaagtacaagcagatccagctggagctggagtgcatcaacaaggatgagaagctggccctgagcagcaaggaggagaatgtgcaggaggaccccaagaccctgaactttgaggaccagaccagcacagacaacgtgtccatcaccaaggacagcagcaaggaggtggcccctgaggagaagacccaggtgaagaccttccaggcctttgagctgaagcccctgcggcagaagctgaccctgcccggggacaagaaccggctgaagaaggtgaaggatggagccaagcccctgagcctgaagagtgacaccacagacagcagccagggcaatggcatcaagtacttctcctag

SEQ ID NO: 239807 - DNA, 5970 bp, Artificial Sequence
  derived and/or modified sequence
atggccaccgccgacacccccgcccccgccagcagcggcctgagcccaaaggaagagggagagctggaagatggcgagatcagcgacgacgacaataacagccagattcgaagcagatcctccagtagttcatcaggcggcgggctcctgccctacccccgccggaggcccccccactctgctcggggggggggttcagggggcggagggggaagttcaagtagttctagctcaagtcagcaacaacttcgcaactttagccggtcacgtcatgctagtgagaggggacatctcaggggcccatcttcctaccggcctaaggagccattccggagccatcctccttccgtgagaatgccatcatcatctctcagtgagagcagtcctaggccgagtttttgggagcggtcccacctagctctggaccggttccgatttcgggggcggccttatcggggtggctctagatggtcccgcgggagaggggtgggcgaacgaggtgggaaaccaggatgcagacccccactcgggggcggtgctggttccgggttctcaagctcccaatcctggcgcgagccctcgccacctcgaaagtcatccaagtccttcggcaggagccctagtcggaaacaaaattattcttccaaaaatgaaaattgtgtggaggagaccttcgaggatctcctgttgaaatataaacaaattcaactggagctggaatgcataaacaaggatgagaagctcgccctgtcctcaaaggaagaaaacgtgcaagaggatccgaaaactcttaacttcgaagaccagacttcaactgacaatgtatctattaccaaggactctagtaaggaagttgcccccgaggaaaagacccaggtgaaaacctttcaggcttttgagctcaaacccctcaggcagaagctaaccctccccggtgataaaaatcgcctgaagaaggtcaaggatggggccaagccattatccctgaaaagtgataccacagatagttcacagggactgcaggataaagaacaaaatctcacccggaggatctcaacaagcgatatcttgtccgagaagaaactgggcgaagacgaggaagaactgtccgagctccagttgcggctgctggctctccaaagtgccagtaagaagtggcaacaaaaggaacaacaggtgatgaaggaaagcaaagagaagctgacaaagaccaaaactgtgcagcaaaaggtcaagacctcaacgaagactcatagcgccaagaaagtttccacaaccgctaagcaggcgcttagaaagcagcagaccaaggcgtggaagaagcttcagcagcagaaggagcaggagcgtcaaaaggaggaggatcaaagaaaacaggcggaagaagaggagcggaggaagcgggaagaggaaatccgcaaaattcgggacctgtctaatcaggaggaacaatataaccgttttatgaagctcgtcggcgggaaacggcggtcacgatccaaatcaagtgatcctgaccttcgccggtctctcgacaagcaacctacggattccgggggtgggatttatcagtacgacaactacgaagaggtcgccatggacaccgactccgagacatcatctccagccccatccccggtgcagcctcctttttttagtgagtgtagtctcggatacttcagtccagcacctagcctttctttaccccctccaccccaggtttcatctctgcctccgctcagccagccctatgtagagggcctgtgcgtgagcctcgaaccgcttcctccgcttcctccgctgccgcctttgcctcccgaggaccccgaacaacctcccaaacctccctttgcagacgaagaggaagaggaagaaatgctcctgagagaagagctgctgaaatcgctcgctaacaaacgagccttcaagcccgaagaaacaagcagcaactcagatccacccagccctccagtcttaaataatagtcacccagtcccgagaagtaatctgtccatagtttccataaataccgtgtcacaaccacgcatccaaaacccaaaattccatagaggccctagactgccacgcacagtgatatccctgcctaaacacaagagtgtggtagtgactttaaacgattccgatgattctgaatccgacggcgaggcctctaaatctaccaacagtgtatttggcggcctggagagtatgatcaaagaagccagacggacggcagaacaagcgtctaagccgaaagtgccccccaagtctgagaaagagaatgacccactccgcacccccgaggccctacctgaggagaaaaaaatcgagtacagactcctgaaggaagagatcgctaatagggaaaaacagagactcataaagagtgaccagcttaaaacctcgtccagcagtcctgcgaattcagacgtggaaatcgacggtattggccggatcgcgatggtgactaagcaggttacagatgctgagtctaaactcaagaagcatcggattctgctgatgaaagatgagagtgtcctgaaaaacctggtgcagcaggaggccaaaaagaaggagagcgtgcgcaacgccgaagcaaagattacaaaactgacggaacagctccaggcgaccgagaagattttgaacgtgaacagaatgttcctgaagaagctgcaggaacagattcacagggtccagcagagagtgaccattaagaaagcactcacacttaagtacggcgaagagctggccagagctaaagcagtggcctcgaaggaaatcggcaaacggaagttggagcaggacaggttcgggccaaacaaaatgatgcgactcgactcatcacctgtatcctcgcctcgcaagcacagcgccgagttgatagccatggagaagcgcaggctgcaaaagctggagtatgaatatgcgctcaagatccaaaagcttaaggaagctcgcgcccttaaggctaaggaacagcagaatattagtcctgtcgtggaagaagaaccagaatttagtttgccacagcctagccttcatgatctgacccaggacaaactcacgctcgatactgaggagaatgacgttgacgacgagatcctgtctggtagttccagggagagacgtaggtccttcctggaatccaactatttcaccaagccaaatctgaagcacacggacacggctaataaagaatgtatcaacaagctgaacaagaacacagttgagaagcctgaactcttcctgggccttaagataggagagcttcagaaactgtactctaaagccgattccctgaagcaattaatattaaagaccacaacaggtatcaccgagaaggttctccacggtcaagaaatatctgtcgacgttgacttcgttactgctcagtctaaaaccatggaggtcaagccatgtccattcaggccctatcactctccattactggttttcaaatcttataggttcagtccgtactatcgcaccaaggagaaactgccactctcatcagtgagctacagcaatatgattgagccagatcagtgcttctgtcgctttgacctcacgggtacttgtaacgacgatgattgccaatggcagcacatccaggattataccctgtcacgaaagcagttgtttcaggacattctcagttacaatctgtccctcattggttgcgccgagaccagtactaatgaggagataactgcaagtgctgagaaatatgtcgagaagctgtttggagtgaacaaagacagaatgtctatggatcagatggctgtgctgctggtgtcaaacattaatgagagcaaaggccatactccccccttcaccacctataaggataaacgcaagtggaagcctaagttttggcggaaacctatcagtgataatagcttctcaagcgacgaggagcagtccacgggaccaatcaagtacgcgttccagccggagaatcagatcaacgtgccagcccttgacactgtcgtgacaccagacgacgtccggtacttcactaacgagacagatgacatagctaatcttgaggcgtccgtcctggaaaacccttcacatgtacagctgtggctgaagttggcctacaagtaccttaatcagaacgagggtgaatgtagtgaaagtctggattctgctctcaacgtgctggccagagctctggagaataacaaggacaatcctgaaatttggtgccactacctgcgcttgttttctaaaagaggcacaaaagatgaggtgcaggaaatgtgtgagaccgccgtcgaatatgctcctgattatcagtctttttggacgttcctccacctggaatctacgtttgaagagaaggactatgtgtgtgaacgaatgttggagttcctcatgggagctgctaaacaagaaacaagcaacattttgtcattccagctgctggaagcattacttttcagagtccagctgcacatttttactgggcggtgtcagtccgcattggctattttacagaatgccctgaagagcgctaatgacggcatcgtcgctgagtacctgaaaacttctgaccgttgcctggcctggcttgcttacatccatctaattgagtttaacattctgccatctaagttctatgacccgtctaacgacaaccctagccgcatcgtgaacacagaatcctttgtgatgccgtggcaggccgttcaggacgtcaagaccaacccagatatgctcttggccgtcttcgaagatgccgttaaagcatgcactgacgagtccctagctgtggaagagaggattgaggcttgtctaccgctttatacaaacatgattgccctgcaccagctcctggagcggtatgaagcggcaatggagctgtgcaagagcctcctggagtcatgccccattaactgccagctgctggaggcactggtagccctgtacttgcagacaaaccagcacgataaggcgcgcgcagtgtggttgacggcttttgaaaagaaccctcagaacgcggaagtattttaccacatgtgtaaattcttcattcttcaaaatcggggagacaacttactgccattccttcgcaagttcatcgcaagtttctttaaacccgggttcgaaaagtacaacaacctagatctgttccggtacctgttgaacatcccaggtcccattgatatccccagccggctctgcaagggtaacttcgacgatgacatgttcaatcatcaagtgccatatctgtggctcatttactgtctgtgtcacccacttcagtcttccattaaagaaaccgtggaggcgtatgaagccgcacttggtgtggccatgcgatgcgatatcgttcagaagatctggatggactatctggtatttgcgaacaatcgcgccgcgggctctcgcaacaaagtgcaggagttcaagttcttcacagatttggtaaatagatgtctcgtcaccgtgcccgcccggtaccctatcccattctccagtgctgactattggtccaactacgaattccataacagagttatttttttttaccttagctgcgtgcccaagacccagcatagcaagacactcgaacgtttctgtagcgtaatgcccgccaatagcggactagcccttcgcctactccagcacgagtgggaagaaagcaatgtgcagattctgaaacttcaagccaaaatgttcacctacaacatccctacttgtcttgccacttggaagattgccattgccgcagaaattgtcctcaagggacagagagaggtccacaggttgtatcagcgtgctctccaaaaacttcctctctgcgcctccttgtggaaagatcaattactgttcgaggcttccgagggaggaaaaacagataatttgcgaaaactggttagcaaatgccaagagataggcgtgtcattaaacgagctgctcaaccttaacagcaataaaaccgaaagtaagaaccattag

SEQ ID NO: 239808 - DNA, 1041 bp, Artificial Sequence
  derived and/or modified sequence
atggccaccgccgacacccccgcccccgccagcagcggcctgagccctaaagaggagggagagctcgaagacggcgaaatatccgacgacgacaacaactcccaaatccgaagtaggagcagctcctccagttctggaggagggttacttccttatcctcggaggagaccaccgcactccgctcggggcggcggcagcgggggcggcggcgggtcttcgtcaagctcatcatctagccagcagcagctgcggaactttagccgctcaaggcatgcttcagaaagagggcatctgagaggaccttctagctaccgaccgaaggaaccattccggagccatccaccctcagtgcggatgccatcttcttccctgagtgagagctccccacgtccttccttctgggaacggtctcatttggccctcgatcgattccgctttcgtggacggccttacagaggcggttcccgctggtcacgcgggcgaggtgtgggggaacggggaggaaagcccggttgtcgaccaccactcggaggaggtgccggctcagggttctcctcttcccaatcctggcgggagccttctcctcctcgcaaatctagcaagtccttcggcagaagccccagccggaaacagaactattcaagcaaaaatgagaactgcgtggaggagacctttgaagatctgttgttaaaatataagcagatccagctcgagctcgagtgcattaataaggatgaaaagctcgctctgtcctcaaaggaggagaacgtgcaagaggatcccaagaccctgaatttcgaagaccagacatccacggacaacgtttcgatcacgaaggattcttccaaggaggtggccccggaggaaaagacgcaggttaaaacattccaagccttcgagcttaaacctctaaggcaaaaactaactctgcctggggataaaaatcggctgaagaaggtgaaagatggggcaaagcccctgagtctgaaatccgacacaactgattccagccaggggaacggaatcaagtacttttcttag

SEQ ID NO: 239809 - DNA, 5969 bp, Artificial Sequence
  derived and/or modified sequence
atggcaaccgccgatactccggcacctgcctcaagtggtctctcaccaaaggaagagggtgagctggaagacggtgagatcagcgatgacgataataacagccagattaggtccaggtcaagcagcagcagcagcggtggcggactgctgccttacccaagaagacgccctccacactcagcccgaggaggaggaagcggtggaggtggagggtcctcctcctcctcaagctcatctcagcagcagctgcgcaacttctctcgctccagacatgcgtcagaacgcggtcacctaagaggtcctagctcttatcggcctaaggagccctttcggagtcaccccccatctgtgcgtatgcctagctcatccttaagcgaatcatccccgcgtccatctttctgggagcgatcacacctggcacttgacagattcagattccgaggaaggccctatagaggcggttcacgttggagtagaggacgcggagttggagaaaggggcggaaaacctgggtgccggccaccattaggaggtggtgccggtagtggtttcagcagctcccagtcttggagggaacctagtccaccacggaagtccagcaagagttttggccgttctccgtcgagaaagcaaaattacagtagtaagaatgaaaattgcgtggaagagacttttgaggatctgctcttgaagtataagcagatccagttggagcttgagtgtatcaacaaggacgagaaactggcccttagttcgaaagaggaaaatgtacaagaagatccaaaaactctgaattttgaggatcagacctcgacagataacgtgtcaatcacaaaagactcctctaaagaagtggcgcctgaagagaaaacacaagtgaagaccttccaggcctttgaactgaaaccactccggcagaaattgaccctgcccggtgacaaaaatagactgaagaaggttaaagacggtgcaaagccgctgtctctgaagagtgacacgacggactcaagtcagggtctgcaggacaaagagcagaatctcacaaggcggatcagcacaagcgacattctgagcgaaaagaagctgggggaagacgaagaggagttgagcgagttgcagctgcggctgctggctttgcagtcagcaagcaagaaatggcagcagaaggaacagcaagttatgaaggaatcaaaggaaaagttaaccaagacaaagactgtgcaacagaaagtaaagacatccaccaagacccactcagccaagaaggtctccacaactgcaaagcaggctctccgtaagcagcagacaaaagcttggaagaagctacagcagcaaaaggagcaagagcgtcagaaggaagaagatcagcggaagcaagccgaagaagaggagaggcgcaagagggaggaggaaatcagaaagattagagacctgtctaatcaagaagagcagtacaaccggttcatgaagctcgtgggcggaaaacgaaggagcagaagcaagtcaagcgaccccgacctcaggcgttccctggataaacagcccacggactccgggggaggtatctaccagtatgacaattacgaagaggtagccatggataccgactcagagacgagctcaccggctccatcccccgtgcagcccccttttttctcggagtgtagccttggttacttcagtccagccccatcgctgagcctgcccccaccccctcaggtaagctccctgccccctttgagtcagccatacgtggaaggcttgtgtgtcagcctcgaacctctgcccccactgccgcctcttccacctctaccccctgaggacccagaacaaccaccgaagccaccattcgcggacgaagaggaggaggaggagatgttacttagggaagagctcctcaagtccctggctaacaagagggccttcaagcctgaagagacatctagcaactccgatccgccatctcccccagtgctgaataacagtcacccagtgccccgtagcaacctgtccattgtctccattaacactgtgtcccagcctcgcattcagaatccaaaatttcatagaggtccgcgtctgcctagaaccgtcatttccctgcccaagcacaaatctgtcgtcgtgacactcaatgactcagacgactcagagagtgacggagaggccagcaagtctacgaatagcgtttttggaggactggagagtatgatcaaggaagccaggaggaccgccgagcaggcttccaaaccaaaagtacccccaaaaagcgagaaggaaaatgaccctttgaggaccccagaggctctgcccgaagagaaaaagatagaatatcgactactgaaggaagagattgctaaccgggaaaagcagcgattgattaaatctgaccagcttaagacatcctcaagcagcccggctaattcagatgtggaaattgatgggattggacggatcgcaatggtgaccaagcaggtgacagacgcggaatctaagctaaagaaacatcggatcttgctgatgaaggatgagtccgttctgaagaatcttgtgcaacaagaagctaaaaaaaaggaatccgtacgaaacgccgaagccaagattacaaagctgactgagcagcttcaggcgaccgagaagattttgaacgtgaatcgaatgttcctcaagaagctgcaggagcagatccaccgggtgcagcagcgggtgacaataaagaaggctctgacactgaaatatggggaggagctagcacgtgctaaggccgtggcgtccaaggaaatcgggaagaggaagctggagcaggatcggttcggacccaacaaaatgatgaggctcgactcaagtccagtaagcagcccacgcaagcactccgcagaattgatcgccatggaaaagcgcagactacagaagttagaatacgagtacgccctgaagatccagaagctgaaagaggcgagagcattgaaagccaaggagcaacagaacattagtcctgtggtagaggaagaaccagaattcagcctgccacaaccaagcttgcatgatttgacccaggataaactaacgcttgacacagaggagaacgacgtggacgacgagatcctctccgggtcaagtcgggaacgcagaagatcgtttcttgagtccaattacttcacgaagcctaaccttaaacataccgacacggccaataaagaatgtattaataaactcaacaaaaatactgtagaaaaacctgagttgttccttggcttgaagattggcgagcttcagaagctgtactccaaagcggacagtctgaagcagcttatcttgaaaacaaccactggcatcacagaaaaggtgctgcatggtcaggagatctctgtagacgtagacttcgtgaccgctcagagtaaaacaatggaagtgaaaccctgcccctttaggccttatcacagtccactgctggtctttaaaagttaccgtttcagcccatactataggactaaagagaaactgcctctgagttctgtatcatatagcaacatgatcgagccagaccaatgtttttgcaggttcgatttgaccggaacctgtaatgacgacgattgccagtggcagcatattcaggattacacgctctctagaaagcagctgtttcaggacatactcagctacaacctgagtcttattggctgtgccgagacgtctaccaacgaagagattactgcttctgctgagaagtacgttgaaaaactgtttggggtgaacaaagacaggatgtctatggatcaaatggcagtcttgttagtctcaaacatcaacgagtccaaagggcatactcctccattcacgacctataaggacaaacgaaagtggaagccgaagttctggagaaagccaattagcgacaacagctttagttcggatgaagagcaaagtaccgggccaatcaaatacgctttccagccagagaaccagatcaacgttcctgcgctcgacacagtcgtgactccggacgatgtgcggtactttactaacgagaccgatgatatcgccaacctcgaggcttcagtcctcgagaatccctcacatgtgcaattgtggttgaagctagcttacaagtatctcaaccagaacgaaggggaatgctccgaatctctggatagtgcccttaatgtactcgcaagagccctggagaataacaaggataaccccgagatctggtgtcactatctacgactgttcagtaaacggggtactaaggatgaggtacaggaaatgtgcgagactgccgtggaatacgcccctgattatcagtccttttggactttcttgcacctggagtctactttcgaggagaaggactacgtctgcgaacggatgttggaattcctcatgggggctgccaaacaggaaacatccaatatcctcagcttccagctgctggaggccttgttgtttcgcgtgcagctgcatatctttacaggacggtgccagtccgccttagctatcctccaaaacgctttgaagtctgccaatgacggaatcgtggctgaatacctgaaaacttccgatcggtgcctggcatggctggcttacatccatcttatcgagttcaatatcctgccatccaaattttacgatccttctaatgacaacccttctcgtatagtgaatacagaatccttcgtcatgccttggcaagcagtccaagacgtgaagaccaaccctgatatgctcctcgcagtttttgaagacgccgtaaaggcttgtacagatgaatcgctggcagtggaagagagaattgaggcctgcttaccactgtatactaatatgattgccctgcatcaattacttgaacgctacgaggcggcaatggaattatgcaagagcctcttggaaagttgtccaatcaattgtcagctccttgaggccctcgtggccctgtatctccagacaaaccagcacgataaggcccgagccgtgtggttaactgccttcgagaagaacccgcagaatgccgaagtgttttatcacatgtgcaagtttttcatcctacagaataggggtgacaacctgttgccgttcttgcgtaaattcatcgccagcttctttaagcctgggttcgaaaagtataacaacctcgatctgtttcgctacctcctgaacatccctgggcctattgatatcccgagcaggctatgcaaaggcaactttgacgatgatatgtttaaccatcaggtgccctacctgtggttaatctattgtctgtgtcacccattgcaaagctcgataaaggagacagtggaggcctacgaggcggctctcggagttgccatgagatgcgatatcgtacagaagatatggatggactatctggtgttcgcgaataaccgagccgcaggcagccggaacaaggtccaagaattcaaattcttcacagacctcgtcaatagatgcctcgtcaccgtccccgctagataccccatccccttttcatccgctgactattggtcaaattatgaatttcacaacagggtgatattcttctatctttcttgcgtaccgaaaacacagcactcgaaaaccctggagcggttctgtagcgtaatgcccgctaatagtggactggctctgagacttttgcaacatgagtgggaagaatctaatgtccagatcctcaaactgcaggcaaagatgtttacctacaacatacccacctgcctggccacatggaaaatcgccatagctgcggaaattgtgctaaaggggcagcgtgaagtgcatagactgtatcaacgggcattacagaagctgcccctttgcgccagtctgtggaaagaccaactgctatttgaggctagtgagggcggaaagaccgataacctgcgcaaacttgtctccaaatgtcaggaaataggagtttctcttaatgaactccttaacttgaactctaacaagaccgagagtaaaaatcatta

SEQ ID NO: 239810 - DNA, 1041 bp, Artificial Sequence
  derived and/or modified sequence
atggcaacagccgatacgcctgcacccgcatcctcggggctttcccctaaggaggagggagagcttgaggatggagaaatcagcgatgacgataataattcacaaatcagatccagatcgagtagttcatcatctggcggagggctcctcccctaccctagacggaggccccctcatagcgctcggggtggcggatccggtggcggaggagggagcagcagctcctctagcagcagccagcagcaactccggaacttcagccgttctcgacacgcctcagaacgaggacacctgagaggtccctctagttatagacctaaggaacccttcaggtcacatccaccttcggtcagaatgccatcttcctcactgtccgaatcatcccctaggccatcattctgggaaagaagccaccttgcccttgatagattcaggtttcgcggtcgaccctatcgcggtgggtctcggtggagccgaggacggggagtcggcgagcgtggagggaaacccggatgccggccaccccttgggggtggtgctgggtccggcttcagcagtagccaatcttggcgggagccaagcccgcctcggaagtcatctaaaagttttggcagatcaccctctagaaaacaaaattactcttccaaaaacgagaactgcgtggaggagacatttgaggacctgctactcaagtacaagcagatccaactggagttagaatgtatcaataaagacgaaaagcttgctctctcttctaaggaggaaaatgtgcaggaggatcctaaaaccttgaactttgaagaccagacctcgactgataatgtctctatcacaaaggactccagcaaggaagtggccccagaagagaagactcaggtgaaaacatttcaggcctttgaactgaaaccgttgcggcagaagctgaccttaccaggtgacaagaaccgtctcaaaaaagttaaagatggtgcaaaacccttatctttgaagagcgatacgacagattctagccaagggaacggcatcaaatacttttcctag

SEQ ID NO: 239811 - DNA, 7285 bp, Artificial Sequence
  derived and/or modified sequence
tcctagtgagtatcgagttggtcttattatcgcgtgaactgggagcctttgtttcctgcgtgtcgcaggaagtgacgtttcgggtacagccgctaccagagtccctttctcgcgaggcggaagaaccccgatcgctgaggagcaagggggcgctaggaaagggaactgggttgcgacggtccggcgagagagagctggggtgctggggtgcggggaagttggggagcagaggccgcttggtgtccgagtagggtaagaccgcaccgacccagtccgttaggaaagaagggaaacgaggcaattgtcgggcggatccccggacggagggctaaggttgtgtggaaggcgctgctccccggatggcgaccgcagatactccggccccggcctccagtggcctctcgccgaaggaagaaggggagcttgaagatggggaaatcagtgacgacgataataacagccagatacggagtcggagcagcagcagcagcagcggcggcgggctgttaccctatccgcggcgaaggcctcctcactcggcccggggcggtggatctggcggaggcggtggctcttcctcgtcatcgtcctcttctcagcagcagctgaggaatttctcacgctcgcggcacgcgtctgagcggggccacctcaggggacccagcagctaccgacccaaagaaccgttccggtctcatccgccttctgtacggatgccttcgagctcactgtccgaaagcagtccccggccgtctttctgggagcggagccacctcgccttggaccgtttccgctttcgaggcaggccttaccggggtgggagtcgctggagtcgggggcgaggagtgggtgagcgaggaggcaagccggggtgcagacctcctctgggaggaggagcaggatccgggttcagcagcagtcagagctggcgagagccctctccacctcggaagagctccaaaagttttggaaggtctccatcaagaaaacaaaattattcatcaaaaaatgaaaactgtgtggaagaaacttttgaagatttgcttttaaagtataaacaaatacagttggaactagaatgcatcaataaggatgaaaaactagcattgagtagcaaagaagagaatgtgcaggaagatcctaaaacattgaacttcgaggaccaaactagcactgataatgtcagtattacaaaggattcaagtaaagaagtagctcctgaggagaaaacacaagtcaaaacttttcaggcatttgaattaaaaccactcaggcaaaaattgactttaccaggagataagaaccgtttgaaaaaagttaaagatggagcaaaaccactttccctgaaatccgacactactgattctagtcaaggattacaagataaagaacaaaatttaacaagaagaattagtacctcagatattctgtctgaaaagaaacttggtgaagatgaagaggaactatctgaattacagcttcgccttttggctcttcagtcagccagtaaaaaatggcaacaaaaagaacagcaggtgatgaaagaaagcaaagaaaagttgactaagacgaaaactgtacagcaaaaagttaaaacaagtacaaaaacacattcggccaaaaaagttagcactacagctaaacaagcattgaggaagcagcaaacaaaggcatggaagaaactacaacaacaaaaagagcaggaaagacagaaagaagaggatcagcggaaacaagctgaagaagaagagagaaggaaaagagaggaagaaatcagaaaaattcgagatctctcaaatcaggaagaacagtacaatcgattcatgaaattggttggtggcaagaggagatcaagaagtaaatcttcagatcctgacctgaggcgatccttagataagcaacctactgatagtggaggaggcatttatcagtatgataactatgaagaagttgctatggatacagatagtgaaaccagttctccagctccttcaccagtgcaaccgccatttttctctgaatgttcattggggtatttttctccagcaccatctctttctttgcctccaccacctcaggtttcttctctgccacctttgagccagccttatgtggaaggcttgtgtgtttctcttgaacctctacctcctctaccaccattaccacctctcccacctgaagatccagaacagcctccaaaaccaccttttgcagatgaggaagaggaggaagaaatgctgcttcgagaagaactacttaaatctctagcaaataaaagagcttttaagccagaggaaacatccagtaatagtgacccaccttcacctccagttctgaacaattcacatcctgtgccaagaagcaatctatcaatagtcagtattaacacagtgtctcagcctaggatacagaatccaaagtttcacagaggaccccgtcttccacgaactgtgatctcgcttccaaagcataaatcagtggttgtaacactaaatgattcagatgatagtgaatctgatggagaggcttccaagtcaacaaatagtgtttttggtggattagagtccatgattaaagaagcaagacgaactgctgagcaagcttcaaaaccgaaagtacctccaaaatctgaaaaagaaaatgatcctctgcgaacaccggaggctttgcctgaagaaaagaagattgaatatagattgttaaaggaagagattgccaaccgtgagaaacagcgtttgattaaatcagatcagctgaagacaagttcatcatccccagcaaactctgatgtggaaattgatggtattggcaggatagcaatggttactaagcaggttacagatgcagaatcaaaactgaaaaaacataggattctcttgatgaaagatgaatctgttttaaagaatttagtgcaacaagaagctaagaagaaagaatctgttagaaatgctgaagcaaagattacaaaacttacagaacagcttcaagcaactgaaaaaattcttaatgttaacagaatgtttttgaagaagcttcaggaacaaattcacagagttcaacagcgtgttacaattaagaaagctttgactctaaaatatggagaagagcttgctcgggcaaaggcagtggccagtaaagaaataggaaaacgtaaactggaacaagatcgctttgggccaaacaaaatgatgagactggacagttctccagtatcaagtccaagaaagcattcagcagaactaattgctatggagaaaagacggttacaaaagctagaatatgaatatgccctgaaaattcaaaaattaaaagaagcccgtgcccttaaagcaaaggaacaacaaaatatctctccagttgtggaagaggaacccgaattttctttacctcaaccctcacttcatgatctgacacaagataaattaaccctggacactgaagaaaatgatgttgatgatgaaattttgtctggttcaagcagagagcgaagaagatcttttttagaatccaattattttactaaacctaaccttaagcacactgatactgctaacaaagaatgcataaacaaacttaataaaaatactgtagaaaaaccagaactttttctagggttaaaaattggtgaattgcaaaaattgtattcaaaagctgacagcctaaaacagctgattttaaaaaccaccacaggcattacagagaaggttttgcatggtcaggagatttctgtagatgtggattttgtcacagcacaaagtaaaacaatggaagtgaagccatgtccttttagaccctaccatagtcctcttctagtttttaagtcctacagatttagtccatattatcgaaccaaggaaaaacttcccctgagctcagtatcatacagtaatatgattgaaccggatcagtgtttctgccgttttgatttaacaggaacatgtaatgatgatgattgtcaatggcagcatatacaagactatacacttagccgaaaacagttattccaggacattctgtcatataatctgtctttgattggttgtgcagagacaagtactaatgaagaaattactgcttcagcagaaaaatatgttgagaaactttttggagtaaacaaagatcgaatgtcaatggaccagatggctgttctccttgttagcaatatcaatgaaagtaaaggtcatactcctccatttacaacctacaaagataaaagaaagtggaagccaaagttttggagaaaacctatttcagataatagcttcagtagtgatgaggaacagtctacaggaccaattaagtatgctttccagccagagaaccaaataaatgttccagctctggatacagttgtcactccagatgatgtcagatactttacaaatgagactgatgacatcgctaatttagaagcaagtgtgcttgaaaatccttctcatgtacaactttggctcaagcttgcgtacaagtacttgaatcaaaatgagggggagtgctcagaatccttggattctgctttaaatgttctggcgcgagcattggaaaataacaaagacaatccagaaatttggtgccattacctcagattgttctcaaaaagaggaaccaaggacgaggtgcaggaaatgtgtgaaacagctgttgaatatgctccagattatcaaagcttttggacttttctacacctagaaagtacctttgaagaaaaggattacgtatgtgagagaatgttggagtttctgatgggagcagccaagcaggaaacatccaatattttgtcctttcagcttttagaggctcttttgtttagagttcagctgcacatatttactggaagatgccaaagtgcactggcaattttacagaatgcattgaaatctgctaatgatggaatagtagctgaataccttaaaaccagtgatcgatgtttggcatggttggcctacatacatcttattgaattcaacattctcccttcaaaattttatgatccatctaatgataatccttcaagaattgttaacactgaatcatttgtaatgccatggcaagctgttcaagatgtaaagactaatcctgacatgttgttagcagtttttgaagatgcagtgaaagcttgcacagatgagagccttgctgttgaggaaagaatagaggcctgccttccactttacacaaacatgattgctctgcaccaactcctggagaggtatgaggctgcaatggagctttgtaaatctttattggaatcatgtcctattaactgccagttgctggaagctcttgttgcattatatttgcaaacaaatcagcatgacaaagccagagcagtgtggcttactgcatttgaaaaaaatcctcagaatgcagaggttttttatcatatgtgcaaattcttcatcttacagaatcgaggcgataatcttcttccatttttgcggaaatttattgcatccttctttaaaccggggtttgagaagtataataacttggatctgtttcggtatctcttaaatattccaggaccaattgacattccatctcgtttatgtaaagggaattttgatgatgatatgtttaaccaccaagttccttatttgtggctgatttactgcctttgtcatcctcttcaatcaagtattaaagaaacagtggaggcatatgaggcagcattaggggtggctatgagatgtgatatagtacagaagatatggatggattatcttgtctttgcaaataatagagctgctggatccagaaacaaagttcaagaattcaaattttttactgatttagtgaatagatgtttggttacagtccctgcccgataccccattccttttagcagtgctgattactggtccaactatgaatttcataatagggttattttcttttatttgagctgtgttccaaagacccagcattccaaaaccttggaacggttttgttcagttatgccagctaattctggacttgcattgaggttacttcaacatgaatgggaagaaagcaatgttcagattctgaaacttcaagccaagatgtttacatataatatcccaacatgcctggccacctggaaaatagccattgctgctgagattgttctaaagggacaaagagaggtccaccgtttatatcagagagccttacagaagttacctctttgtgcatcactgtggaaagatcaactcttgtttgaagcatcagaaggaggtaaaactgataacctgagaaaactagtttccaagtgccaagagattggagtcagcctaaatgagctcttaaatttaaacagtaacaaaacagaaagcaagaatcactgaacactgggtgcagtcagttctaagtccttataataattgccaaaattatttgaatgattcttcaagattaggctgatccctggctaaggtctgtgtaaggcagacaagcgttattgatcatatcaagttccctacaatatcctgtcctcaaaaccggaagcaatgaacatgatcctcttcggttggataaatgaacttcctgtttggcctgcttctaggccctgccagattctcataacatcatatacgtaagtatagttcctcaaagtgactgacatttattttaattttgctttgtttttttttattttctcccccattcctttattttgtgttattcctgactcacttgacactctctgatgcctgagagattcctgtttgggatttaatatccagggctgtgtttacagtaaaaaaagcaggcagtcccttttagtttttcctttttaaatttttttgagattcttcatttcaggatttaaaactatagcagtccatcttaaggaaagtgtaactgccatggccacaagtctgctagttgcacttgaatgctctatcagggttgtttattaccctttctacgttctggactccttgccgagactgtttaacttgaagattaaagaaactattgcaaatgccagtgcatcagaacctaagagtggtcaaatattatgtgcaatttttttgtaaagaaattttaatttataataaagtttaacagtttaaagaacagttaatatttgaactgctttgtattgaaatactactttgtagtattgaaattgtttatatacttttttaatataagttaactttctaaaaactcttgctgtctttattcacttttcacactggtgggaaagggttgaagtcggagatacggatattcaccataacttatagcaatacttttttatcttgaaactgctttcccattaaaaaaaaaaaaa

SEQ ID NO: 239812 - DNA, 1771 bp, Artificial Sequence
  derived and/or modified sequence
gggggcgctaggaaagggaactgggttgcgacggtccggcgagagagagctggggtgctggggtgcggggaagttggggagcagaggccgcttggtgtccgagtagggtaagaccgcaccgacccagtccgttaggaaagaagggaaacgaggcaattgtcgggcggatccccggacggagggctaaggttgtgtggaaggcgctgctccccggatggcgaccgcagatactccggccccggcctccagtggcctctcgccgaaggaagaaggggagcttgaagatggggaaatcagtgacgacgataataacagccagatacggagtcggagcagcagcagcagcagcggcggcgggctgttaccctatccgcggcgaaggcctcctcactcggcccggggcggtggatctggcggaggcggtggctcttcctcgtcatcgtcctcttctcagcagcagctgaggaatttctcacgctcgcggcacgcgtctgagcggggccacctcaggggacccagcagctaccgacccaaagaaccgttccggtctcatccgccttctgtacggatgccttcgagctcactgtccgaaagcagtccccggccgtctttctgggagcggagccacctcgccttggaccgtttccgctttcgaggcaggccttaccggggtgggagtcgctggagtcgggggcgaggagtgggtgagcgaggaggcaagccggggtgcagacctcctctgggaggaggagcaggatccgggttcagcagcagtcagagctggcgagagccctctccacctcggaagagctccaaaagttttggaaggtctccatcaagaaaacaaaattattcatcaaaaaatgaaaactgtgtggaagaaacttttgaagatttgcttttaaagtataaacaaatacagttggaactagaatgcatcaataaggatgaaaaactagcattgagtagcaaagaagagaatgtgcaggaagatcctaaaacattgaacttcgaggaccaaactagcactgataatgtcagtattacaaaggattcaagtaaagaagtagctcctgaggagaaaacacaagtcaaaacttttcaggcatttgaattaaaaccactcaggcaaaaattgactttaccaggagataagaaccgtttgaaaaaagttaaagatggagcaaaaccactttccctgaaatccgacactactgattctagtcaaggtaatggaattaaatatttcagttagtaatgactcttcttcctctaaagtagtaactacttgttttggcagtgtacttcattgaaatgattgtaattatctgtaaattcttttgtactttctatgtagacattcatatcattgaataattactaattttgtttacttttagtctttatttatttatttattttttgcctgacattctggcctctataatagaatgttatacataagtgataatagtggacacctttgtttcctaatttaaagaaaatggttttgacatttaccattaaatatgatgttaatttttttgtaggtatcccttatcgggtaaaggagggttttactcctattcctggtttgaaattttcagcgtgaatggatgttgaagtttacaaaatctgttttcttcattattgggatgagcatctaatttattttaatttgttagtgtaatgaattatataatttatttctagtattaaaccacccttgtatgcttgcgtttaatacagtttatgatataccatttttaaa

SEQ ID NO: 239813 - protein, 669 aa, Artificial Sequence
  derived and/or modified sequence
MSALLSLCFVLPLAAPGHGTQGWEPCTDLRPLDILAEVVPSDGATSGIRIVQVHGARGLQLSVAAPRTMSFPASRIFSQCDLFPEEFSIVVTLRVPNLPPKRNEYLLTVVAEESDLLLLGLRLSPAQLHFLFLREDTAGAWQTRVSFRSPALVDGRWHTLVLAVSAGVFSLTTDCGLPVDIMADVPFPATLSVKGARFFVGSRRRAKGLFMGLVRQLVLLPGSDATPRLCPSRNAPLAVLSIPRVLQALTGKPEDNEVLKYPYETNIRVTLGPQPPCTEVEDAQFWFDASRKGLYLCVGNEWVSVLAAKERLDYVEEHQNLSTNSETLGIEVFRIPQVGLFVATANRKATSAVYKWTEEKFVSYQNIPTHQAQAWRHFTIGKKIFLAVANFEPDEKGQEFSVIYKWSHRKLKFTPYQSIATHSARDWEAFEVDGEHFLAVANHREGDNHNIDSVIYKWNPATRLFEANQTIATSGAYDWEFFSVGPYSFLVVANTFNGTSTKVHSHLYIRLLGSFQLFQSFPTFGAADWEVFQIGERIFLAVANSHSYDVEMQVQNDSYVINSVIYELNVTAQAFVKFQDILTCSALDWEFFSVGEDYFLVVANSFDGRTFSVNSIIYRWQGYEGFVAVHSLPTVGCRDWEAFSTTAGAYLIYSSAKEPLSRVLRLRTR

SEQ ID NO: 239814 - protein, 599 aa, Artificial Sequence
  derived and/or modified sequence
MSALLSLCFVLPLAAPGHGTQGWEPCTDLRPLDILAEVVPSDGATSGIRIVQVHGARGLQLSVAAPRTMSFPASRIFSQCDLFPEEFSIVVTLRVPNLPPKRNEYLLTVVAEESDLLLLGLRLSPAQLHFLFLREDTAGAWQTRVSFRSPALVDGRWHTLVLAVSAGVFSLTTDCGLPVDIMADVPFPATLSVKGARFFVGSRRRAKGLFMGLVRQLVLLPGSDATPRLCPSRNAPLAVLSIPRVLQALTGKPEDNEVLKYPYETNIRVTLGPQPPCTEVEDAQFWFDASRKGLYLCVGNEWVSVLAEAKERLDYVEEHQNLSTNSETLGIEVFRIPQVGLFVATANRKATSAVYKWTEEKFVSYQNIPTHQAQAWRHFTIGKKIFLAVANFEPDEKGQEFSVIYKWSHRKLKFTPYQSIATHSARDWEAFEVDGEHFLAVANHREGDNHNIDSVIYKWNPATRLFEANQTIATSGAYDWEFFSVGPYSFLVVANTFNGTSTKVHSHLYIRLLGSFQLFQSFPTFGAADWEVFQIGERIFLAVANSHSYDVEMQVQNDSYVINSVIYELNVTAQAFVKFQDILTCSGGRRGLHARRAEG

SEQ ID NO: 239815 - protein, 522 aa, Artificial Sequence
  derived and/or modified sequence
MSALLSLCFVLPLAAPGHGTQGWEPCTDLRPLDILAEVVPSDGATSGIRIVQVHGARGLQLSVAAPRTMSFPASRIFSQCDLFPEEFSIVVTLRVPNLPPKRNEYLLTVVAEESDLLLLGLRLSPAQPPCTEVEDAQFWFDASRKGLYLCVGNEWVSVLAAKERLDYVEEHQNLSTNSETLGIEVFRIPQVGLFVATANRKATSAVYKWTEEKFVSYQNIPTHQAQAWRHFTIGKKIFLAVANFEPDEKGQEFSVIYKWSHRKLKFTPYQSIATHSARDWEAFEVDGEHFLAVANHREGDNHNIDSVIYKWNPATRLFEANQTIATSGAYDWEFFSVGPYSFLVVANTFNGTSTKVHSHLYIRLLGSFQLFQSFPTFGAADWEVFQIGERIFLAVANSHSYDVEMQVQNDSYVINSVIYELNVTAQAFVKFQDILTCSALDWEFFSVGEDYFLVVANSFDGRTFSVNSIIYRWQGYEGFVAVHSLPTVGCRDWEAFSTTAGAYLIYSSAKEPLSRVLRLRTR

SEQ ID NO: 239816 - DNA, 2010 bp, Artificial Sequence
  derived and/or modified sequence
atgagcgccctgctgagcctgtgcttcgtgctgcccctggccgcccccggccacggcacccagggctgggagccctgcaccgacctgagacccctggacatcctggccgaggtggtgcccagcgacggcgccaccagcggcatcagaatcgtgcaggtgcacggcgccagaggcctgcagctgagcgtggccgcccccagaaccatgagcttccccgccagcagaatcttcagccagtgcgacctgttccccgaggagttcagcatcgtggtgaccctgagagtgcccaacctgccccccaagagaaacgagtacctgctgaccgtggtggccgaggagagcgacctgctgctgctgggcctgagactgagccccgcccagctgcacttcctgttcctgagagaggacaccgccggcgcctggcagaccagagtgagcttcagaagccccgccctggtggacggcagatggcacaccctggtgctggccgtgagcgccggcgtgttcagcctgaccaccgactgcggcctgcccgtggacatcatggccgacgtgcccttccccgccaccctgagcgtgaagggcgccagattcttcgtgggcagcagaagaagagccaagggcctgttcatgggcctggtgagacagctggtgctgctgcccggcagcgacgccacccccagactgtgccccagcagaaacgcccccctggccgtgctgagcatccccagagtgctgcaggccctgaccggcaagcccgaggacaacgaggtgctgaagtacccctacgagaccaacatcagagtgaccctgggcccccagcccccctgcaccgaggtggaggacgcccagttctggttcgacgccagcagaaagggcctgtacctgtgcgtgggcaacgagtgggtgagcgtgctggccgccaaggagagactggactacgtggaggagcaccagaacctgagcaccaacagcgagaccctgggcatcgaggtgttcagaatcccccaggtgggcctgttcgtggccaccgccaacagaaaggccaccagcgccgtgtacaagtggaccgaggagaagttcgtgagctaccagaacatccccacccaccaggcccaggcctggagacacttcaccatcggcaagaagatcttcctggccgtggccaacttcgagcccgacgagaagggccaggagttcagcgtgatctacaagtggagccacagaaagctgaagttcaccccctaccagagcatcgccacccacagcgccagagactgggaggccttcgaggtggacggcgagcacttcctggccgtggccaaccacagagagggcgacaaccacaacatcgacagcgtgatctacaagtggaaccccgccaccagactgttcgaggccaaccagaccatcgccaccagcggcgcctacgactgggagttcttcagcgtgggcccctacagcttcctggtggtggccaacaccttcaacggcaccagcaccaaggtgcacagccacctgtacatcagactgctgggcagcttccagctgttccagagcttccccaccttcggcgccgccgactgggaggtgttccagatcggcgagagaatcttcctggccgtggccaacagccacagctacgacgtggagatgcaggtgcagaacgacagctacgtgatcaacagcgtgatctacgagctgaacgtgaccgcccaggccttcgtgaagttccaggacatcctgacctgcagcgccctggactgggagttcttcagcgtgggcgaggactacttcctggtggtggccaacagcttcgacggcagaaccttcagcgtgaacagcatcatctacagatggcagggctacgagggcttcgtggccgtgcacagcctgcccaccgtgggctgcagagactgggaggccttcagcaccaccgccggcgcctacctgatctacagcagcgccaaggagcccctgagcagagtgctgagactgagaaccagatag

SEQ ID NO: 239817 - DNA, 1800 bp, Artificial Sequence
  derived and/or modified sequence
atgagcgccctgctgagcctgtgcttcgtgctgcccctggccgcccccggccacggcacccagggctgggagccctgcaccgacctgagacccctggacatcctggccgaggtggtgcccagcgacggcgccaccagcggcatcagaatcgtgcaggtgcacggcgccagaggcctgcagctgagcgtggccgcccccagaaccatgagcttccccgccagcagaatcttcagccagtgcgacctgttccccgaggagttcagcatcgtggtgaccctgagagtgcccaacctgccccccaagagaaacgagtacctgctgaccgtggtggccgaggagagcgacctgctgctgctgggcctgagactgagccccgcccagctgcacttcctgttcctgagagaggacaccgccggcgcctggcagaccagagtgagcttcagaagccccgccctggtggacggcagatggcacaccctggtgctggccgtgagcgccggcgtgttcagcctgaccaccgactgcggcctgcccgtggacatcatggccgacgtgcccttccccgccaccctgagcgtgaagggcgccagattcttcgtgggcagcagaagaagagccaagggcctgttcatgggcctggtgagacagctggtgctgctgcccggcagcgacgccacccccagactgtgccccagcagaaacgcccccctggccgtgctgagcatccccagagtgctgcaggccctgaccggcaagcccgaggacaacgaggtgctgaagtacccctacgagaccaacatcagagtgaccctgggcccccagcccccctgcaccgaggtggaggacgcccagttctggttcgacgccagcagaaagggcctgtacctgtgcgtgggcaacgagtgggtgagcgtgctggccgaggccaaggagagactggactacgtggaggagcaccagaacctgagcaccaacagcgagaccctgggcatcgaggtgttcagaatcccccaggtgggcctgttcgtggccaccgccaacagaaaggccaccagcgccgtgtacaagtggaccgaggagaagttcgtgagctaccagaacatccccacccaccaggcccaggcctggagacacttcaccatcggcaagaagatcttcctggccgtggccaacttcgagcccgacgagaagggccaggagttcagcgtgatctacaagtggagccacagaaagctgaagttcaccccctaccagagcatcgccacccacagcgccagagactgggaggccttcgaggtggacggcgagcacttcctggccgtggccaaccacagagagggcgacaaccacaacatcgacagcgtgatctacaagtggaaccccgccaccagactgttcgaggccaaccagaccatcgccaccagcggcgcctacgactgggagttcttcagcgtgggcccctacagcttcctggtggtggccaacaccttcaacggcaccagcaccaaggtgcacagccacctgtacatcagactgctgggcagcttccagctgttccagagcttccccaccttcggcgccgccgactgggaggtgttccagatcggcgagagaatcttcctggccgtggccaacagccacagctacgacgtggagatgcaggtgcagaacgacagctacgtgatcaacagcgtgatctacgagctgaacgtgaccgcccaggccttcgtgaagttccaggacatcctgacctgcagcggcggcagaagaggcctgcacgccagaagagccgagggctag

SEQ ID NO: 239818 - DNA, 2010 bp, Artificial Sequence
  derived and/or modified sequence
atgagcgctcttttatccctgtgtttcgtattacccctggcagctcctgggcacggcacccagggctgggaaccatgtacagatctgcgccctttagatattctcgccgaggtcgtcccatctgacggcgccacttcgggcatccggattgtccaggtgcacggtgccagggggctccagttaagtgtcgctgcccctcggactatgagcttccccgcctccaggattttttcccagtgtgatctttttcctgaagagttcagtatcgtcgtcaccctgcgcgtgcccaatctgccccccaagaggaatgagtatctcttgaccgtggtcgcggaggaaagcgacctcctccttcttggattacgcctgtctccggcccagcttcactttctgtttctgcgcgaagacacagccggggcctggcaaactcgggtgtccttcagaagccctgcactggtagatggtcggtggcacacactcgtgcttgctgtcagtgctggagtcttttcactcactactgactgcggattgccagtggacatcatggctgacgtgccctttcccgctacattatcagtgaaaggcgctaggtttttcgtgggcagccgccgcagggccaagggtctgtttatgggactcgttcggcagcttgtcctgcttcctggaagtgacgccactcctagactgtgtccctctcgaaatgcccctttagcagtactgtcaattcctagggtacttcaggcgcttacagggaaaccagaagacaacgaagttctgaaatacccttacgaaaccaacattagggttacactgggtccccaacctccttgtactgaggtggaggatgcccagttttggtttgatgcttccaggaaaggcttgtacctctgcgtgggcaacgagtgggtcagcgttttggccgccaaggagagacttgattacgtggaagagcatcagaacttgagtacaaattccgaaacactgggaatagaggtctttcggatcccccaggtagggttgtttgtagctaccgccaataggaaggctacctccgcagtttataagtggacggaggaaaagtttgtaagctaccagaacatccccactcaccaggcccaggcctggcggcatttcaccatcggtaagaagattttcctcgctgtggccaacttcgagccagacgaaaaaggtcaggaattcagtgtcatttataagtggtcccaccgcaaattaaaattcactccttaccagagcatcgcgacacactccgccagggattgggaggccttcgaagtggatggcgagcacttcctcgccgttgcaaatcaccgtgagggcgataaccacaatattgattccgttatttacaaatggaatcctgccacacggttatttgaggctaaccaaacaatcgcaacttctggtgcatacgattgggagtttttctccgtgggtccatattcgttccttgtcgttgctaacactttcaatggcacttctactaaggtgcattcacacctatatattcgcctgttgggcagcttccagttatttcagagcttcccaactttcggggccgctgattgggaggtgttccaaattggtgagcggatctttctcgccgttgccaacagccattcctacgacgtggaaatgcaggtgcagaacgactcttacgtcatcaatagtgtgatctacgaattgaacgtgaccgctcaggccttcgtgaagttccaagacattcttacttgcagcgcactggactgggaatttttctcagttggcgaagactattttctcgtggtcgcaaacagttttgatgggcgcacattcagtgtcaacagcatcatctaccgctggcagggctatgagggctttgtggctgtccattcccttccaaccgtgggatgcagggattgggaagctttttcaacaactgccggggcctaccttatatacagcagtgcaaaagagccactgagcagagtcttgagacttcgtaccagatag

SEQ ID NO: 239819 - DNA, 1800 bp, Artificial Sequence
  derived and/or modified sequence
atgagcgcactcctgtcactctgcttcgtccttcccctcgctgcgcccggccacggcactcaagggtgggaaccatgcaccgatttacgacctctcgacatcttggctgaggttgttccaagcgacggagccacctcaggcatccggatagtacaggtgcacggagcacgcgggttgcaactgtcagtggccgctccccggacaatgagtttcccagcttcacgcatctttagtcagtgcgatctctttcccgaagaatttagcattgtggttaccctgcgggttccaaacctgccccccaaacgcaacgagtatctgctcaccgtggtggctgaggagagcgatcttctcctcctcggcctgagactcagcccggcacagcttcacttcctctttctaagggaagacaccgctggggcgtggcagacccgcgtgtcctttaggtctcctgccctggtggatgggcgctggcataccctggtgctcgctgtttctgctggggttttcagtctaaccactgactgtggcctgccggtcgatatcatggctgacgtcccatttcctgcaaccttgtcggttaaaggggcccgcttttttgtcggatcccgccggcgcgcaaaaggactgttcatggggctagtgcgtcagctggtgctcttaccaggcagcgatgcaacacccagactgtgccccagcaggaacgcacctctggccgtcctttcaatccccagagttctccaggccctaactgggaaaccagaggataatgaagtgctcaaatacccctacgagaccaatattagagtcacactgggccctcagccaccctgtactgaagtggaggatgcacagttctggtttgacgcatcccgaaagggcctgtacctgtgtgtggggaatgagtgggtatcagtcctcgctgaggcaaaagaacgtctggattatgtggaggagcatcaaaacctgtctaccaactcagagactctgggaatagaagtctttcgtatacctcaagtgggcctgtttgtagccaccgccaatagaaaagccacatctgccgtttacaagtggactgaagagaaatttgtgtcataccagaacatccccacacatcaggctcaggcctggaggcatttcaccataggtaaaaagatttttttagctgtcgccaatttcgaaccagacgagaagggtcaggagtttagtgtgatatacaagtggtcccatcgcaagctgaagttcaccccctaccagagtatcgcaacacattcagccagagactgggaagcgtttgaggtagatggagaacacttcctggccgttgctaaccaccgggagggcgataatcacaatatcgacagtgtcatatacaaatggaaccccgccacgcgcctgttcgaggccaaccagactatagctacatctggcgcttatgattgggagtttttctcagtgggtccgtacagctttctggtggtggctaataccttcaacggcacgagtaccaaggttcattcacatttatatattcgattgctgggcagcttccaactttttcagtcttttcccacgtttggcgccgcagattgggaggtatttcagatcggggaacgcatatttctggcagtggcaaatagtcacagttacgatgtcgaaatgcaagtccagaacgactcctatgttattaactcagtgatctacgagctcaacgtaactgcacaggctttcgttaaatttcaggacatacttacttgctccggcggacgaagagggctgcacgccaggcgagccgagggttag

SEQ ID NO: 239820 - DNA, 2010 bp, Artificial Sequence
  derived and/or modified sequence
atgtctgccctgctgagcctgtgctttgtgctgcccctggccgcccctggccacggcacccagggctgggagccctgcacagacctgcggcccctggacatcctggccgaggtggtgcccagtgatggagccaccagcggcatccgcatcgtgcaggtgcacggggcccggggcctgcagctgtctgtggccgcccccaggaccatgtccttccctgccagccgcatcttcagccagtgtgacctcttccctgaggagttcagcatcgtggtgaccctgcgggtgcccaacctgccccccaagagaaatgagtacctgctgactgtggtggccgaggagagtgacctgctgctgctgggcctgcggctgagccctgcccagctgcacttcctgttcctgcgggaggacacagctggggcctggcagaccagggtgtccttccgcagccctgccctggtggatggccgctggcacaccctggtgctggccgtgtctgctggggtcttcagcctgaccacagactgtggcctgcctgtggacatcatggctgatgtgcccttccctgccaccctgtctgtgaagggggcccgcttctttgtgggcagcagaagaagagccaagggcctcttcatgggcctggtgcggcagctggtgctgctgcccggcagtgatgccaccccccggctgtgccccagcagaaatgcccccctggccgtgctgagcatcccccgggtgctgcaggccctgaccgggaagccagaggacaatgaggtgctgaagtacccctatgagaccaacatccgggtgaccctgggcccccagcccccctgcacagaggtggaggatgcccagttctggtttgatgccagcaggaagggcctgtacctgtgtgtgggcaatgagtgggtgtctgtgctggccgccaaggagcggctggactatgtggaggagcaccagaacctgagcaccaacagcgagaccctgggcatcgaggtgttccgcatcccccaggtgggcctgtttgtggccacagccaacaggaaggccaccagcgctgtgtacaagtggacagaggagaagtttgtgtcctaccagaacatccccacccaccaggcccaggcctggaggcacttcaccatcggcaagaagatcttcctggccgtggccaactttgagccagatgagaagggccaggagttcagcgtcatctacaagtggagccacaggaagctgaagttcaccccctaccagagcatcgccacccacagcgcccgggactgggaggcctttgaggtggatggagagcacttcctggccgtggccaaccaccgggagggggacaaccacaacattgattctgtcatctacaagtggaacccagccacccggctgtttgaggccaaccagaccatcgccaccagcggggcctatgactgggagttcttctctgtgggcccctacagcttcctggtggtggccaacaccttcaacggcaccagcaccaaggtgcacagccacctgtacatccggctgctgggcagcttccagctgttccagagcttccccaccttcggggctgctgactgggaggtgttccagatcggggagcgcatcttcctggccgtggccaacagccacagctatgatgtggagatgcaggtgcagaatgacagctatgtgatcaacagcgtcatctatgagctgaatgtgacagcccaggcctttgtgaagttccaggacatcctgacctgcagcgccctggactgggagttcttctctgtgggggaggactacttcctggtggtggccaacagctttgatggccgcaccttctctgtgaacagcatcatctaccgctggcagggctatgagggctttgtggccgtgcacagcctgcccaccgtgggctgccgggactgggaggccttcagcaccacagctggggcctacctgatctacagcagcgccaaggagcccctgagccgggtgctgcggctgcggaccaggtag

SEQ ID NO: 239821 - DNA, 1800 bp, Artificial Sequence
  derived and/or modified sequence
atgtctgccctgctgagcctgtgctttgtgctgcccctggccgcccctggccacggcacccagggctgggagccctgcacagacctgcggcccctggacatcctggccgaggtggtgcccagtgatggagccaccagcggcatccgcatcgtgcaggtgcacggggcccggggcctgcagctgtctgtggccgcccccaggaccatgtccttccctgccagccgcatcttcagccagtgtgacctcttccctgaggagttcagcatcgtggtgaccctgcgggtgcccaacctgccccccaagagaaatgagtacctgctgactgtggtggccgaggagagtgacctgctgctgctgggcctgcggctgagccctgcccagctgcacttcctgttcctgcgggaggacacagctggggcctggcagaccagggtgtccttccgcagccctgccctggtggatggccgctggcacaccctggtgctggccgtgtctgctggggtcttcagcctgaccacagactgtggcctgcctgtggacatcatggctgatgtgcccttccctgccaccctgtctgtgaagggggcccgcttctttgtgggcagcagaagaagagccaagggcctcttcatgggcctggtgcggcagctggtgctgctgcccggcagtgatgccaccccccggctgtgccccagcagaaatgcccccctggccgtgctgagcatcccccgggtgctgcaggccctgaccgggaagccagaggacaatgaggtgctgaagtacccctatgagaccaacatccgggtgaccctgggcccccagcccccctgcacagaggtggaggatgcccagttctggtttgatgccagcaggaagggcctgtacctgtgtgtgggcaatgagtgggtgtctgtgctggccgaggccaaggagcggctggactatgtggaggagcaccagaacctgagcaccaacagcgagaccctgggcatcgaggtgttccgcatcccccaggtgggcctgtttgtggccacagccaacaggaaggccaccagcgctgtgtacaagtggacagaggagaagtttgtgtcctaccagaacatccccacccaccaggcccaggcctggaggcacttcaccatcggcaagaagatcttcctggccgtggccaactttgagccagatgagaagggccaggagttcagcgtcatctacaagtggagccacaggaagctgaagttcaccccctaccagagcatcgccacccacagcgcccgggactgggaggcctttgaggtggatggagagcacttcctggccgtggccaaccaccgggagggggacaaccacaacatcgacagcgtcatctacaagtggaacccagccacccggctgtttgaggccaaccagaccatcgccaccagcggggcctatgactgggagttcttctctgtgggcccctacagcttcctggtggtggccaacaccttcaacggcaccagcaccaaggtgcacagccacctgtacatccggctgctgggcagcttccagctgttccagagcttccccacctttggagctgctgactgggaggtgttccagattggagagcgcatcttcctggccgtggccaacagccacagctatgatgtggagatgcaggtgcagaatgacagctatgtgatcaacagcgtcatctatgagctgaatgtgacagcccaggcctttgtgaagttccaggacatcctgacctgcagcggcggcagaagaggcctgcacgccaggagagctgagggctag

SEQ ID NO: 239822 - DNA, 2010 bp, Artificial Sequence
  derived and/or modified sequence
atgagcgccctgctgagcctgtgcttcgtgctgcccctggccgcccctggtcacgggacacagggttgggaaccatgcactgacctgcgccccttggatatcctagctgaagtggttcctagcgacggcgcaacgagtggaatccgcatcgtgcaggtgcacggagctagagggctgcagctctctgtggctgcaccccgcaccatgtctttccccgcctcaaggattttcagccagtgcgatttattccctgaggagttcagcattgtcgtgactctgagagtgccaaaccttcctccgaagcggaatgaatacctcctgacggtggtggcggaagaatcggacctgttacttttaggtctccggctgagccccgcgcagttgcattttctatttttgagggaagacaccgccggcgcgtggcagactagagtgagctttaggtcccccgcattggtggatggtagatggcataccctagttctggcggtgtcagccggagtgttctcactcaccaccgactgcggtctccccgtcgatattatggccgacgtacccttccccgccacattaagtgtaaaaggagcaagattctttgtcggcagcagaaggcgcgctaaaggcctgttcatgggtctcgtcagacagctggtgctgctgccgggtagtgacgctaccccgagactgtgccccagcaggaatgcccccctggccgtgctatctattccacgagtacttcaagccttaactggcaagcccgaggataacgaagtgctgaaatatccatatgagacaaatattcgcgtcactttaggaccgcagcccccgtgtacggaggttgaggatgcccagttctggtttgacgcttctcggaaaggactgtatctttgtgtgggcaatgaatgggtgagtgtgcttgctgccaaggagcgcctggactacgtcgaagagcaccaaaatctgtcaaccaattccgagacactagggatcgaggtgtttcgtatcccccaggtcggcttgtttgtagcaaccgccaataggaaggctactagcgcagtctacaagtggacagaggagaaattcgtgtcatatcagaatatccctacacaccaggcccaggcctggcgacattttactattgggaaaaaaatttttcttgccgtggccaactttgagcccgacgagaaaggccaggagttttccgtcatatacaagtggtcacatcgcaagttgaaattcaccccctatcaaagtatcgctactcactccgctcgagactgggaagcctttgaagttgacggcgaacacttccttgccgtggccaatcatcgcgaaggcgataaccacaatatcgactcagtcatctacaagtggaaccccgcgacgcggcttttcgaggccaatcagacaattgctacctctggtgcatacgactgggagtttttcagtgtggggccttactcatttttggtggtggccaatactttcaacggcacctccactaaagtgcactctcacctatacattcgcctgttgggttcattccagctttttcagagtttcccgactttcggtgctgctgattgggaggtgttccagataggcgagcgtatctttttggctgttgccaacagccactcatacgacgtggaaatgcaagtgcagaacgactcatacgtcatcaacagcgtaatttacgaactcaacgttactgcacaagcattcgtgaagtttcaggatatactaacctgctccgctctggattgggaatttttttccgtcggcgaagactacttcctggttgtggctaacagctttgatggacggacctttagtgttaacagcatcatatatcgatggcagggctacgagggtttcgtggccgtccattctcttcctacagtgggttgcagagactgggaggctttcagtacaaccgcaggtgcatatctcatatatagctccgcgaaagagcctctttctagggtcctgcgtctcaggacgaggtag

SEQ ID NO: 239823 - DNA, 1800 bp, Artificial Sequence
  derived and/or modified sequence
atgagcgccctgctgagcctgtgcttcgtgctgcccctggccgcccccggacatggaacccaggggtgggagccctgcaccgatttgcgccccttggatattctagccgaggtcgtccccagcgacggagccacttcaggtatccgcattgtgcaagtgcacggagcgcgtggcttgcaactaagcgtagctgcaccaagaacgatgtccttccccgcctctcggattttctcgcagtgtgatctttttccagaagagttcagcatcgtcgttacactgagggttccaaatctcccccctaaacgcaacgaatatctgctcacagtcgtggccgaggagtcggatctgctgctgcttgggctgcgactatccccggcacaattacacttcttgtttcttagggaggatactgccggggcgtggcaaaccagagtctccttccgctcccctgcattggtggacgggcgttggcacacactagtccttgctgtgagcgctggtgtctttagtctgacaaccgactgcggcctgcctgttgacataatggccgacgtgcccttcccagctaccctttccgtcaaaggggcacgcttcttcgtgggcagcaggagacgagctaaaggcctttttatgggcctggtgagacaactcgttctcctgcctggtagcgatgctactccgcgactctgccctagccgtaacgccccactggctgtcctcagtattccccgggtcctccaggccctgacgggtaagcccgaggacaacgaagttctaaagtatccatacgaaactaacataagggtgaccctcggcccacagcccccatgcactgaagtcgaggatgcccagttttggttcgatgcaagccgtaaggggctctacctctgtgttgggaacgagtgggtcagcgtgctagccgaagccaaggaacgcctcgattatgtggaggagcatcagaacctgagtactaatagcgagactctggggattgaggtgttcaggattccacaggtagggttgttcgtagctaccgcaaacagaaaggcaaccagtgcagtctacaagtggaccgaagagaagttcgtaagttaccagaatattcccactcaccaggcccaggcatggcggcacttcacgatcgggaagaagatcttcttagctgtggcaaatttcgaaccagatgagaaaggtcaggagttctcggtgatttataaatggtcacatcggaaactcaagtttaccccatatcaaagtattgctacccactccgcgagagactgggaggctttcgaagtggacggggaacacttcctggctgtggcaaaccaccgagaaggagacaatcacaacatcgattccgtgatctataagtggaatccagctacgagactgttcgaggcgaaccagaccattgctactagtggagcttacgattgggagttcttttctgtggggccttacagttttctggtggtcgccaatacgttcaacggcactagcacgaaagtgcactctcatctctatatccgccttctaggcagcttccagctgtttcagagcttccccacgtttggagctgccgattgggaggtcttccaaataggcgagagaatttttttggcagtggctaactcacattcttacgacgtggaaatgcaggtccagaatgacagttacgtgatcaacagtgtgatctacgagttaaatgtcacagcccaggcttttgtaaagtttcaggacatcttgacatgtagtggggggaggcgcgggttacacgctaggcgtgcggagggatag

SEQ ID NO: 239824 - DNA, 2010 bp, Artificial Sequence
  derived and/or modified sequence
atgtccgctctccttagcctatgctttgtactcccactcgccgcacccggtcatggcacccagggctgggaaccctgcacagatcttcggccactggacatccttgctgaggtggtgccttctgatggtgcaacatcaggcatcaggatcgtgcaggttcacggcgctcggggactccagctgagtgtggccgctcctaggaccatgtcctttcctgcatcccgcatcttcagtcaatgcgatctctttccagaagagttttcgatcgtggtaacgctcagagtgcccaatcttccgccaaaacggaatgaatacctactgactgttgtggcggaggaatccgatctgcttttactcgggctgaggctgagccccgctcagctgcatttcctgtttctaagagaggacactgccggagcgtggcagactcgagtgagcttcagatcacccgcactggttgacggcagatggcacaccctggtcctggctgttagtgctggcgtgttttccctgaccactgactgcggccttccagtggacatcatggctgacgtgcccttcccagccactttgtccgtgaaaggcgctcgtttctttgtgggcagccgacgccgtgctaagggactgtttatgggactcgtcaggcagcttgtgctgttacccggttctgacgctaccccacggttgtgccctagccggaacgcccctcttgccgtactatccattccacgggtcctccaggctttaactggcaagcccgaagacaacgaggttctcaagtatccgtatgagaccaatatacgcgttacactggggccacagcccccatgtaccgaggttgaggacgcccaattttggtttgacgcctcgcgtaagggactgtacctctgtgttggaaacgagtgggtatccgtgctggctgctaaggagcgccttgattacgtggaggagcatcaaaacctctccactaattctgagactcttgggatagaagtgtttcggatcccccaggtcggactttttgtggccactgctaaccggaaggcaactagtgctgtgtacaaatggacagaggaaaaatttgtttcataccagaacatccccacccatcaggcccaggcatggcggcattttacgataggtaaaaagatattcctggcagtggcaaattttgaacccgacgaaaaggggcaggagttctctgtcatatataagtggtcgcacaggaagctgaaatttacaccctatcagagtatcgccacccattctgccagagactgggaggccttcgaagtcgatggtgagcactttcttgccgtggccaaccacagagagggagataatcacaatattgacagtgtcatttataagtggaatccagccacaaggctcttcgaggctaaccaaaccatagcgacctccggtgcttatgattgggagttcttctccgtagggccttactcgttccttgtggtggcaaacactttcaatggtacctctaccaaagtgcacagtcacttgtacatcagattactgggcagcttccaactcttccagagctttcccacgttcggcgcagctgactgggaagtgtttcagatcggcgagagaatctttctagccgtggccaacagtcattcctatgacgtggagatgcaggtgcaaaatgattcctacgtcatcaactctgtgatttatgagctaaacgtgacagcccaagctttcgtcaaatttcaggacatcttaacatgctctgctttggattgggaattcttcagcgttggggaagattactttctggtcgtggcaaacagttttgacgggcgaacgtttagcgtcaatagcattatctaccgctggcagggttacgaaggcttcgtggctgtccattctcttccaaccgtcggatgccgcgattgggaggcatttagcacaacagccggagcatatctcatatatagcagtgctaaagagccgctctcgcgggtgctgagattgagaactagatag

SEQ ID NO: 239825 - DNA, 1800 bp, Artificial Sequence
  derived and/or modified sequence
atgtctgccctgctctctctgtgttttgtactgccacttgccgctccgggacacggtacccaagggtgggagccatgcacagatttgcgccctctggacattcttgccgaagtggtcccatcagacggggctacctcaggaattcggatcgtgcaagtgcacggcgcacggggactgcagctgagcgtcgccgcaccacggacaatgtcctttccagcctctcgcatcttctctcagtgcgacctatttcctgaggagttcagtatcgtcgtaacactcagggtccccaatctgccccctaaacggaacgagtacctactgactgttgtggcggaggaaagcgacctgctgctgcttgggttgcggctgagcccggctcagcttcactttctgtttctcagggaagacaccgccggagcctggcagacacgagtgagcttccgcagtcctgcattagtcgatggccgatggcacaccctggtcctggctgtcagtgcgggtgtgttcagcctgacaacagactgcggcctgcccgtggacatcatggctgatgtgccatttccagctaccctgagcgttaagggcgctagattttttgtaggctctcgacgacgtgccaaaggactatttatgggccttgttaggcagctagttttactgcccggaagtgatgctacccctcggctgtgcccctctcgaaacgccccactggccgttctgtcaatccccagagtcctgcaagccctgaccgggaaacctgaagacaatgaagtcctcaaatacccctatgagacaaacatcagagtgaccctgggtccgcaacctccatgcactgaggtggaagacgcacaattttggttcgatgctagccgcaagggactgtacttgtgcgttgggaacgaatgggtgtcagtccttgcagaggcaaaagagaggctcgactacgtggaggagcatcagaatttgtccaccaacagcgagactctcggaatcgaagtgtttcgaatccctcaagtcggcttgttcgtggcaactgcaaaccgcaaggccacttcagctgtgtacaaatggaccgaagagaaattcgtgtcatatcaaaatattccgacccatcaggcccaggcctggaggcatttcaccatcggaaaaaagatttttttggccgtcgcgaactttgagcccgatgaaaaggggcaggagttctccgtgatttacaaatggtcacaccgcaaactcaaattcacaccataccagtcgatagccacccactccgctagagactgggaggcattcgaggtggacggggaacatttcctggcagtggcaaaccacagagaaggtgataatcacaatatagattccgtgatctacaagtggaacccagccactcgtctgttcgaggcaaatcaaaccattgcaacctccggagcttacgactgggagttcttttcagtaggtccgtactctttcctggttgtcgccaacacattcaacgggacatcaactaaggtccactcacatctatatatcaggctcctgggttctttccagctcttccagtccttccccactttcggggctgcagactgggaagtgtttcagatcggtgaacggatcttcctcgccgtggctaatagccactcctacgatgttgagatgcaggtccaaaacgattcttatgtaatcaattctgttatctacgagctgaatgtaacagctcaagcctttgtgaagttccaagatattttgacatgcagcggcggaagaaggggattacatgccagacgggcagaagggtag

SEQ ID NO: 239826 - DNA, 3967 bp, Artificial Sequence
  derived and/or modified sequence
tgaggagcagccacttccctgcaggctgagcggagccctggatggagcttggcacccaagcccctcatgtctgccctgctgagtctgtgttttgtgctgcccctggcggcccccggccacggcacgcagggttgggagccctgcacagacctgcgccccctggacatcctggcggaagtggtcccttctgatggcgccacaagcgggatcaggatagttcaggttcacggtgcacggggactccagctctcagtagccgccccccgcaccatgagcttcccagcatccaggattttctcccagtgtgacctcttccctgaagaattttccatcgtcgtaactttgagagttcccaatcttccacccaagaggaacgagtacctgctgacggtggtggcagaggagagcgacctgctgctgctcggcctgcggttgtcacctgcccagctgcacttcctgttccttcgcgaggacacggccggcgcctggcagacccgagtgtccttccgcagcccggccctggtggatggccgctggcacacactggtcctggctgtgtccgcaggcgtcttctccctcaccacggactgcggcctcccggtggacataatggccgatgtgcccttcccagccaccctgtcagtgaaaggagctcgattcttcgtcggcagccggaggagagccaaaggcctgttcatgggactggtgaggcaactggtcctgctgccgggctcagacgccaccccaaggctgtgtcccagcaggaacgccccgctggcggtgctgtccatcccacgggtcctgcaggctctcacggggaagccagaagataacgaggtgctaaaatatccctatgaaaccaacattcgagtgacgctgggaccccagccaccgtgtaccgaggtggaagacgcccagttctggtttgatgccagccggaagggcctgtatctgtgtgttggcaacgagtgggtctccgtgttagcagccaaagaaagactggactacgtggaggagcatcagaacttgtccaccaactcagagaccctgggcattgaggtgttccgcatccctcaggtggggctctttgtggccacagccaatcgcaaagccacatccgccgtctacaagtggaccgaagagaagttcgtctcatatcagaacatccccacgcaccaagcacaggcctggaggcatttcaccatcgggaaaaagatcttcctggcagtggctaattttgaaccagatgagaagggtcaggagttctctgtcatttacaaatggagccacagaaagctgaagtttaccccatatcagagcattgccacacacagcgcccgagactgggaggccttcgaggtggatggggagcacttcctggcggtggccaaccaccgggaaggcgacaaccacaacatcgacagtgtcatctacaagtggaacccggcaacccggctcttcgaggccaaccagaccatcgccacctccggcgcctacgactgggagttcttcagtgtggggccctactcgttcctggtggtggccaacaccttcaacggcacctccaccaaggtgcactcgcacctctacatccgactcctgggctccttccagctcttccagtccttcccgacgttcggtgctgcagactgggaggtcttccagatcggggagaggatcttcctcgctgtggcaaacagtcacagctacgatgtggagatgcaagtccagaatgattcctatgtcatcaactccgtcatctacgagctgaacgtgaccgcgcaggcctttgtcaagttccaggacattctcacctgcagtgctctggactgggagtttttctcggtgggagaagattatttcctggtggtggccaactccttcgatgggcgtaccttctcggtgaacagtattatttacaggtggcagggctacgagggcttcgtggcggtgcacagcctccccaccgtcggctgcagggactgggaggccttcagcaccacggctggtgcctacctcatctactccagcgccaaggagcccctctccagggtcctgcggctgaggacacgctgaggccgcggctgcccggcagcaactggggtggccaggtggggcgggaccccagcacctcccccaactgaccctggacgtccaggtgggcccagcctagggcatcccgggcctgggcatcaggcagggtgcaggtggggccatctgcggccctggttcgggcagggacatccatccacctctgagtccttctgagccacagccccagtgacggtctggtcttgcaggcagaggcccagagcccctgccagtgctcgcccatctgagtgtcaagcggggatttcgctgtcaaggaaccgtttctatacatttttacctcaaacaacaggacctcggttcatgtccctgcggctggcctctcgccagccactcctgcagtgtgcgtccggccgcctgagcaggtgtggtgccgtcccgccattgccgccacctatttattgtgttttatctgaacggaagtgtatttatactgctctttacaaaagcaccggtgctcctctctaggcagcgggtgggcacagcccctcaccacggacacggacagaggaccacctccccatacagagagaggcttccctcccagcctcagtttacccgtaaatgcactagcgcgaggtcagaaatcacaagcctgggcatggcctgggtcgcaccccctccccacggccccacccacagggacctcaacttctgggcccgggattttttccctattcagcagcattttaatcacatgtcctccagctgactgggactcaggctgcgtgcctccgtctgcctgtgtgctggctgtcctagctccctggtaacagcatcctctgctggctctcctgtggtcatcttgtctctgcagctgggagagctgcttgtctgtccgtcacaggcagtgaggatgagagggggtgatgggcgcaaggccccaggggtcctccctcttaacccatgtaggtgccagagaaaccacccccactccatgagaagaggctcagacagcaggctccggggccacgcagcccagaccacacctgccacggtcttccaggaacggtgctcctgcttctgcaacacaaatcggaacaggagcgatcctcagagagtttacaatgtgctttttccgccaatcagaactgtggacaaaacttcctatttcctacaccgcagctgtctgttcaccttcagctcagagagcactcctgacctttcgtaatgaaatggaagcctccccttgtctggcaaataataaactcagtgtctacttttgccggctttgggaccttcgtgtttttccggggctcaggtctcactccagccatcgctgtggccagtggagagccactcccctctgggggcagtcgccgagagcctccttcccctccgtccagccagcaaggctttcccaagcgtcctgggcaggagggttgggccctgctttccaccaagtcactcagaaggtcccaatcacacatgattggcctcattgggtcagcacctgtgaaaggaagattaaaaactcgacaccccaattcactcaaccaagaagaaaaaagctgaaagctgagtcctgcaggaagctgcctttccctttgccctaagcagacagctgcagatgagagggtcagcatctccactagtggctgctctgtgtgccccttatctcatggaaagtgccaatttactgagcacgagataaacaggtaactgactgttcccacctgctccttttctcctgcagcatggagcaatcagtcatgtgaccacaccctcctccctctgccccctccagccggcttttccccttgactgaagccttcaacatcatcttgggagagaggcacagacctgtctcctgggtgcatccttagccttggcaaaataaacttctccattgatcgag

SEQ ID NO: 239827 - DNA, 1866 bp, Artificial Sequence
  derived and/or modified sequence
tgaggagcagccacttccctgcaggctgagcggagccctggatggagcttggcacccaagcccctcatgtctgccctgctgagtctgtgttttgtgctgcccctggcggcccccggccacggcacgcagggttgggagccctgcacagacctgcgccccctggacatcctggcggaagtggtcccttctgatggcgccacaagcgggatcaggatagttcaggttcacggtgcacggggactccagctctcagtagccgccccccgcaccatgagcttcccagcatccaggattttctcccagtgtgacctcttccctgaagaattttccatcgtcgtaactttgagagttcccaatcttccacccaagaggaacgagtacctgctgacggtggtggcagaggagagcgacctgctgctgctcggcctgcggttgtcacctgcccagctgcacttcctgttccttcgcgaggacacggccggcgcctggcagacccgagtgtccttccgcagcccggccctggtggatggccgctggcacacactggtcctggctgtgtccgcaggcgtcttctccctcaccacggactgcggcctcccggtggacataatggccgatgtgcccttcccagccaccctgtcagtgaaaggagctcgattcttcgtcggcagccggaggagagccaaaggcctgttcatgggactggtgaggcaactggtcctgctgccgggctcagacgccaccccaaggctgtgtcccagcaggaacgccccgctggcggtgctgtccatcccacgggtcctgcaggctctcacggggaagccagaagataacgaggtgctaaaatatccctatgaaaccaacattcgagtgacgctgggaccccagccaccgtgtaccgaggtggaagacgcccagttctggtttgatgccagccggaagggcctgtatctgtgtgttggcaacgagtgggtctccgtgttagcagaagccaaagaaagactggactacgtggaggagcatcagaacttgtccaccaactcagagaccctgggcattgaggtgttccgcatccctcaggtggggctctttgtggccacagccaatcgcaaagccacatccgccgtctacaagtggaccgaagagaagttcgtctcatatcagaacatccccacgcaccaagcacaggcctggaggcatttcaccatcgggaaaaagatcttcctggcagtggctaattttgaaccagatgagaagggtcaggagttctctgtcatttacaaatggagccacagaaagctgaagtttaccccatatcagagcattgccacacacagcgcccgagactgggaggccttcgaggtggatggggagcacttcctggcggtggccaaccaccgggaaggcgacaaccacaacatcgacagtgtcatctacaagtggaacccggcaacccggctcttcgaggccaaccagaccatcgccacctccggcgcctacgactgggagttcttcagtgtggggccctactcgttcctggtggtggccaacaccttcaacggcacctccaccaaggtgcactcgcacctctacatccgactcctgggctccttccagctcttccagtccttcccgacgttcggtgctgcagactgggaggtcttccagatcggggagaggatcttcctcgctgtggcaaacagtcacagctacgatgtggagatgcaagtccagaatgattcctatgtcatcaactccgtcatctacgagctgaacgtgaccgcgcaggcctttgtcaagttccaggacattctcacctgcagtggaggcaggagggggcttcatgcccgtcgtgcggagggatag

SEQ ID NO: 239828 - protein, 416 aa, Artificial Sequence
  derived and/or modified sequence
MATKGMRLKSTKEVFPLAHVCNDTNKMTLINPQGAKLNIYKRKVEQAIQSYEKRLNKIVWRALSQEEKEKLDANKPIQYLENKTVLNQALERLNWPISLKELSMLESEILAGKMYIQQAMELQEAAKKNYANKAPGEQQKLQGNPTKKTKSKRPDPLKGQKVIARCDENGFYFPGVVKKCVSRTQALVGFSYGDTKVVSTSFITPVGGAMPCPLLQVGDYVFAKIVIPKGFDFYVPAIVIALPNKHVATEKFYTVLKCNNRREFCPRSALIKISQNKYALSCSHIKSPPIPEDPEVEDVEARNSAFLFWPLKEADTQDSREPRREKPRRKKRPAKQPLQQAAPSDSDGSSHGISSHGSCQGTHPEPRTAHLHFPAAGRLGLSSHAIIATPPPRAALPCTLQATHSSKGLRSVPETL

SEQ ID NO: 239829 - protein, 1294 aa, Artificial Sequence
  derived and/or modified sequence
MEKSGPSSTISEQQLQRQEGWINTKTDLAEQSLISSEKWLQLHGLKSNKLTLKQILSQIGFPHCEDYVASLGRPVASRYADGLFPQLYRAEDGRVYNLTAKSELIYQFVEHLTQAVESYKQRMDWLTSKSRQIFGVILEQCVTIVLDFGGILEGELDLCREALTMVLQEQVAHITEFNIIRVSQEPVKWQENATPVTEQSIATAISWVEKLTVELTVSEAGRLDALLEAGRDKTIESIYYFVVGDVPEESKELLLQRALEIPCPVYTVSFNARGEGTIAFLKDLSAKTHSRFHAFAERTECVEFPAFSTKDGDNVMTWNSRKLKGKLPPGAGVREDVFLVWQEMEEACSTLAQIQRLVAEPPKPDVATVDCESETTSVEIASNPEDTWDSKTWLQKYGLKAQKLSLYDVLADCSFRHADGVVDIKAKPENESVQTSAETNKKTVHAKYCSRFVHAPWKDGSLVHVNITKEKCKWYSERIHTALARIRRRIKWLQDGSQSLFGRLHNDCIYILIDTSHSMKSKLDLVKDKIIQFIQEQLKYKSKFNFVKFDGQAVAWREQLAEVNEDNLEQAQSWIRDIKIGSSTNTLSALKTAFADKETQAIYLLTDGRPDQPPETVIDQVKRFQEIPIYTISFNYNDEIANRFLKEVAALTGGEFHFYNFGCKDPTPPEAVQNEDLTLLVKEMEQGHSDLEKMQDLYSESLIMDWWYNAEKDGDSKHQKEICSMISTPEKCAKPQSDVDSTQTSSLNMLKGPWGLSDQKVQKKKVLHAESTKTSLLRSQMSSLRSSACSERKDGLSNASSRRTALSDKEMSILLAEEWLDDKSSEKVTREGSQVYDHDSSDVSSENWLKTYGLVAKKLTLMDALSVAAVPHSSTYVPVLDKHVVSKVFDEVFPLAHVCNDTNKMTLINPQGAKLNIYKRKVEQAIQSYEKRLNKIVWRALSQEEKEKLDANKPIQYLENKTVLNQALERLNWPISLKELSMLESEILAGKMYIQQAMELQEAAKKNYANKAPGEQQKLQGNPTKKTKSKRPDPLKGQKVIARCDENGFYFPGVVKKCVSRTQALVGFSYGDTKVVSTSFITPVGGAMPCPLLQVGDYVFAKIVIPKGFDFYVPAIVIALPNKHVATEKFYTVLKCNNRREFCPRSALIKISQNKYALSCSHIKSPPIPEDPEVEDVEARNSAFLFWPLKEADTQDSREPRREKPRRKKRPAKQPLQQAAPSDSDGSSHGISSHGSCQGTHPEPRTAHLHFPAAGRLGLSSHAIIATPPPRAALPCTLQATHSSKGLRSVPETL

SEQ ID NO: 239830 - DNA, 1251 bp, Artificial Sequence
  derived and/or modified sequence
atggccaccaagggcatgagactgaagagcaccaaggaggtgttccccctggcccacgtgtgcaacgacaccaacaagatgaccctgatcaacccccagggcgccaagctgaacatctacaagagaaaggtggagcaggccatccagagctacgagaagagactgaacaagatcgtgtggagagccctgagccaggaggagaaggagaagctggacgccaacaagcccatccagtacctggagaacaagaccgtgctgaaccaggccctggagagactgaactggcccatcagcctgaaggagctgagcatgctggagagcgagatcctggccggcaagatgtacatccagcaggccatggagctgcaggaggccgccaagaagaactacgccaacaaggcccccggcgagcagcagaagctgcagggcaaccccaccaagaagaccaagagcaagagacccgaccccctgaagggccagaaggtgatcgccagatgcgacgagaacggcttctacttccccggcgtggtgaagaagtgcgtgagcagaacccaggccctggtgggcttcagctacggcgacaccaaggtggtgagcaccagcttcatcacccccgtgggcggcgccatgccctgccccctgctgcaggtgggcgactacgtgttcgccaagatcgtgatccccaagggcttcgacttctacgtgcccgccatcgtgatcgccctgcccaacaagcacgtggccaccgagaagttctacaccgtgctgaagtgcaacaacagaagagagttctgccccagaagcgccctgatcaagatcagccagaacaagtacgccctgagctgcagccacatcaagagcccccccatccccgaggaccccgaggtggaggacgtggaggccagaaacagcgccttcctgttctggcccctgaaggaggccgacacccaggacagcagagagcccagaagagagaagcccagaagaaagaagagacccgccaagcagcccctgcagcaggccgcccccagcgacagcgacggcagcagccacggcatcagcagccacggcagctgccagggcacccaccccgagcccagaaccgcccacctgcacttccccgccgccggcagactgggcctgagcagccacgccatcatcgccacccccccccccagagccgccctgccctgcaccctgcaggccacccacagcagcaagggcctgagaagcgtgcccgagaccctgtag

SEQ ID NO: 239831 - DNA, 3885 bp, Artificial Sequence
  derived and/or modified sequence
atggagaagagcggccccagcagcaccatcagcgagcagcagctgcagagacaggagggctggatcaacaccaagaccgacctggccgagcagagcctgatcagcagcgagaagtggctgcagctgcacggcctgaagagcaacaagctgaccctgaagcagatcctgagccagatcggcttcccccactgcgaggactacgtggccagcctgggcagacccgtggccagcagatacgccgacggcctgttcccccagctgtacagagccgaggacggcagagtgtacaacctgaccgccaagagcgagctgatctaccagttcgtggagcacctgacccaggccgtggagagctacaagcagagaatggactggctgaccagcaagagcagacagatcttcggcgtgatcctggagcagtgcgtgaccatcgtgctggacttcggcggcatcctggagggcgagctggacctgtgcagagaggccctgaccatggtgctgcaggagcaggtggcccacatcaccgagttcaacatcatcagagtgagccaggagcccgtgaagtggcaggagaacgccacccccgtgaccgagcagagcatcgccaccgccatcagctgggtggagaagctgaccgtggagctgaccgtgagcgaggccggcagactggacgccctgctggaggccggcagagacaagaccatcgagagcatctactacttcgtggtgggcgacgtgcccgaggagagcaaggagctgctgctgcagagagccctggagatcccctgccccgtgtacaccgtgagcttcaacgccagaggcgagggcaccatcgccttcctgaaggacctgagcgccaagacccacagcagattccacgccttcgccgagagaaccgagtgcgtggagttccccgccttcagcaccaaggacggcgacaacgtgatgacctggaacagcagaaagctgaagggcaagctgccccccggcgccggcgtgagagaggacgtgttcctggtgtggcaggagatggaggaggcctgcagcaccctggcccagatccagagactggtggccgagccccccaagcccgacgtggccaccgtggactgcgagagcgagaccaccagcgtggagatcgccagcaaccccgaggacacctgggacagcaagacctggctgcagaagtacggcctgaaggcccagaagctgagcctgtacgacgtgctggccgactgcagcttcagacacgccgacggcgtggtggacatcaaggccaagcccgagaacgagagcgtgcagaccagcgccgagaccaacaagaagaccgtgcacgccaagtactgcagcagattcgtgcacgccccctggaaggacggcagcctggtgcacgtgaacatcaccaaggagaagtgcaagtggtacagcgagagaatccacaccgccctggccagaatcagaagaagaatcaagtggctgcaggacggcagccagagcctgttcggcagactgcacaacgactgcatctacatcctgatcgacaccagccacagcatgaagagcaagctggacctggtgaaggacaagatcatccagttcatccaggagcagctgaagtacaagagcaagttcaacttcgtgaagttcgacggccaggccgtggcctggagagagcagctggccgaggtgaacgaggacaacctggagcaggcccagagctggatcagagacatcaagatcggcagcagcaccaacaccctgagcgccctgaagaccgccttcgccgacaaggagacccaggccatctacctgctgaccgacggcagacccgaccagccccccgagaccgtgatcgaccaggtgaagagattccaggagatccccatctacaccatcagcttcaactacaacgacgagatcgccaacagattcctgaaggaggtggccgccctgaccggcggcgagttccacttctacaacttcggctgcaaggaccccaccccccccgaggccgtgcagaacgaggacctgaccctgctggtgaaggagatggagcagggccacagcgacctggagaagatgcaggacctgtacagcgagagcctgatcatggactggtggtacaacgccgagaaggacggcgacagcaagcaccagaaggagatctgcagcatgatcagcacccccgagaagtgcgccaagccccagagcgacgtggacagcacccagaccagcagcctgaacatgctgaagggcccctggggcctgagcgaccagaaggtgcagaagaagaaggtgctgcacgccgagagcaccaagaccagcctgctgagaagccagatgagcagcctgagaagcagcgcctgcagcgagagaaaggacggcctgagcaacgccagcagcagaagaaccgccctgagcgacaaggagatgagcatcctgctggccgaggagtggctggacgacaagagcagcgagaaggtgaccagagagggcagccaggtgtacgaccacgacagcagcgacgtgagcagcgagaactggctgaagacctacggcctggtggccaagaagctgaccctgatggacgccctgagcgtggccgccgtgccccacagcagcacctacgtgcccgtgctggacaagcacgtggtgagcaaggtgttcgacgaggtgttccccctggcccacgtgtgcaacgacaccaacaagatgaccctgatcaacccccagggcgccaagctgaacatctacaagagaaaggtggagcaggccatccagagctacgagaagagactgaacaagatcgtgtggagagccctgagccaggaggagaaggagaagctggacgccaacaagcccatccagtacctggagaacaagaccgtgctgaaccaggccctggagagactgaactggcccatcagcctgaaggagctgagcatgctggagagcgagatcctggccggcaagatgtacatccagcaggccatggagctgcaggaggccgccaagaagaactacgccaacaaggcccccggcgagcagcagaagctgcagggcaaccccaccaagaagaccaagagcaagagacccgaccccctgaagggccagaaggtgatcgccagatgcgacgagaacggcttctacttccccggcgtggtgaagaagtgcgtgagcagaacccaggccctggtgggcttcagctacggcgacaccaaggtggtgagcaccagcttcatcacccccgtgggcggcgccatgccctgccccctgctgcaggtgggcgactacgtgttcgccaagatcgtgatccccaagggcttcgacttctacgtgcccgccatcgtgatcgccctgcccaacaagcacgtggccaccgagaagttctacaccgtgctgaagtgcaacaacagaagagagttctgccccagaagcgccctgatcaagatcagccagaacaagtacgccctgagctgcagccacatcaagagcccccccatccccgaggaccccgaggtggaggacgtggaggccagaaacagcgccttcctgttctggcccctgaaggaggccgacacccaggacagcagagagcccagaagagagaagcccagaagaaagaagagacccgccaagcagcccctgcagcaggccgcccccagcgacagcgacggcagcagccacggcatcagcagccacggcagctgccagggcacccaccccgagcccagaaccgcccacctgcacttccccgccgccggcagactgggcctgagcagccacgccatcatcgccacccccccccccagagccgccctgccctgcaccctgcaggccacccacagcagcaagggcctgagaagcgtgcccgagaccctgtag

SEQ ID NO: 239832 - DNA, 1251 bp, Artificial Sequence
  derived and/or modified sequence
atggccacaaaaggtatgaggctcaaaagcactaaggaagttttccccctagcccatgtctgtaacgacacaaataaaatgactctcataaacccacaaggcgccaaacttaacatatacaagcggaaggtcgaacaggccatacaatcctacgagaaacggttaaacaagattgtgtggcgagctctttcacaggaagagaaagaaaaactggacgcaaataagcctattcagtatctagagaataagaccgtgctaaatcaagcgttggagaggctcaactggccgatctccctgaaggagctgagcatgctagagtccgagatactcgcagggaaaatgtacattcaacaagccatggagctgcaggaagccgctaagaagaattacgctaataaggctccgggggaacaacaaaaattacaaggcaacccgacaaagaagaccaagagtaagcggcccgaccctctgaagggccagaaggtgatagccagatgtgacgaaaatggcttctattttcccggggtggtaaaaaagtgcgtgtcccggactcaggctttggtagggtttagttacggggatactaaagttgtgagcactagcttcatcaccccagtagggggagcaatgccttgtcctctcctccaggtgggcgattacgtttttgcaaagattgtcatccctaagggattcgacttttacgtgcctgctatcgtgattgctcttccaaacaagcacgttgcgaccgagaagttttacactgtgctgaagtgcaataatcggagagaattttgtcctcggtcggcactcatcaagatcagccagaataaatacgccctatcatgttctcatataaagtcacctccaatccccgaagaccctgaggttgaggatgtggaagccagaaattctgcctttctgttttggcctctgaaagaggctgatactcaagatagtagggaaccacggcgcgagaagccaagacgtaagaagcgccctgcgaagcaacctcttcaacaggcagcccctagcgatagcgacggaagtagccacgggatcagcagccatgggtcatgtcaagggacacatcctgaacccagaacagcccacttacattttcccgccgccggaaggctcggactttccagccacgccatcatcgcgactcccccaccccgggccgccctcccttgcacactgcaggctactcactcatcaaaagggttgcggtctgtgccggaaacactctag

SEQ ID NO: 239833 - DNA, 3885 bp, Artificial Sequence
  derived and/or modified sequence
atggaaaagtcagggccatcttctacaattagtgagcagcagctgcagcggcaagagggctggatcaacaccaaaacggacctggccgaacagtcactgatcagtagtgagaagtggcttcagctgcatggtctaaaatctaataagctcacactcaagcaaatcctcagccagattggcttcccccactgtgaagactatgtagcatccttggggcgacccgtggccagccgttacgcagacggcctgtttcctcagctgtatcgggccgaggacggacgagtgtacaacctcaccgcaaagtccgagctgatctaccagttcgtagagcacctgacacaggctgtggagagctacaagcaacgtatggactggctgacttcaaaatccagacagatctttggcgtgattctggagcagtgcgtcacaatagtgcttgacttcggaggaatccttgaaggcgaattagatctgtgccgcgaggccctaacaatggtcctccaagagcaggtggcacatataactgagtttaacattatacgggtgagccaggagcccgtaaagtggcaggaaaacgcaacccctgtgacggaacagtctatcgctaccgccatttcatgggtggaaaaactcacagttgagctgactgtgtctgaggccggtagactggatgccctcctggaggctgggcgtgataagacaattgaatccatctattactttgtggtgggggacgtaccagaggagagcaaggagttgcttctacagcgagctctggagattccctgccctgtttataccgtatccttcaacgcacggggcgagggcaccattgccttcctcaaggacctctcggctaaaactcattctagattccacgcgttcgctgagaggacggaatgcgttgagtttcccgcgttcagcaccaaggatggcgataacgtcatgacgtggaacagtagaaagctgaaagggaaacttccacccggtgctggggtgagggaagacgtgtttctcgtctggcaagagatggaagaagcttgcagcactctcgctcagatccagcggctagtcgctgagccacccaaaccagacgtggctaccgtggactgtgagagcgaaaccacctccgttgaaatcgcaagcaatcccgaggacacctgggatagtaaaacatggttgcagaaatacggactgaaagcgcagaaactcagtttatatgacgttctcgcggactgctcttttcgacatgccgatggggtggtggacatcaaggcaaagccggagaatgagtctgtccagacttcggctgagacaaacaagaagaccgtgcatgcaaaatattgcagcagatttgtgcacgccccctggaaagacggcagcctggtgcacgtaaacattaccaaggagaaatgcaagtggtattccgagaggatacataccgcactagccagaatcaggcgtcgaataaagtggttgcaggatggatcccaatcactttttggcagactccataacgattgtatatacattctaatcgatacaagtcacagcatgaagagtaaacttgacctcgtgaaggataagattatccagttcatccaggagcaactgaaatataaatccaaatttaatttcgtgaaattcgatgggcaagctgtagcttggcgcgagcagctggcagaggtgaatgaggataatctcgagcaggctcaaagctggattagagacatcaaaatcggtagctccacaaatacgctgtcagctttaaagactgcattcgcagacaaggagactcaagcaatttacctcctaacggatgggcgcccagaccagcctcccgagactgtcattgaccaggtcaaacggtttcaggagatcccaatttatactatatcttttaattataacgacgagattgccaacagattcctcaaagaagttgcggcattgactggtggcgagtttcacttctacaattttggctgcaaagatccgaccccaccagaagctgttcagaatgaggatctgacactgctggtgaaggagatggaacagggacacagtgatctcgagaaaatgcaggatctgtattccgaaagcctcatcatggactggtggtacaacgctgaaaaggatggagactccaaacatcagaaggagatctgctccatgatcagcaccccagaaaagtgtgctaagcctcagtccgatgtggatagcacgcagacgagcagcttaaacatgctcaaggggccttggggcttatcggatcagaaagtgcagaagaagaaagtattgcacgcggaaagcactaagacaagcctgttgcgcagccagatgagctctctgcgttcttctgcctgcagcgagcggaaagatggactttctaacgcaagctcaaggaggactgctttgtcagataaggaaatgtccatcctactggcggaagaatggctggacgataagagctcagagaaggtcaccagagagggatctcaagtttatgaccacgactcctctgacgtgagttcggagaattggttgaagacctacggtctggttgccaaaaagctcaccctgatggacgcattgagcgtcgccgcagttccccattcctcaacatatgtgcccgtgctggacaagcacgtagtatcaaaggtgtttgacgaggtctttcctctggcccatgtctgcaatgatacaaataaaatgacccttattaacccacagggagctaaactcaatatatacaagagaaaagtagagcaggctatacaatcctacgaaaagaggctgaacaagatcgtgtggagagcactgtcacaggaagagaaagaaaagctcgacgcaaacaagcccatccagtacctcgaaaataaaaccgtcctcaaccaggcactcgaaaggctgaactggccaatctccctgaaggagctcagcatgctagagagcgagattttagcaggcaagatgtacattcagcaggccatggagctgcaagaggctgccaaaaagaactatgccaataaggcaccgggggagcagcagaaactgcaaggcaacccgactaaaaaaacaaagagtaagagacccgatcctctgaaaggtcagaaagtcatcgctcggtgcgatgagaacggcttctactttccaggcgtggtgaaaaagtgcgtatcaaggactcaggctctagtcggattttcctacggagacacaaaggtggtaagcaccagttttatcacccctgtaggaggcgccatgccttgccccttgctgcaagtcggagactatgtatttgctaagatagtcatccctaagggatttgatttctacgtacctgccatagtcatagcgcttccaaataagcatgtggccaccgagaaattttatactgttctaaagtgcaacaacaggagagagttctgtcctaggagtgcattgatcaagatcagccagaacaagtatgccttatcttgtagccacattaagtccccgcccatccccgaggaccctgaagtggaagacgtggaggcccggaactccgcttttctcttctggcccctgaaggaagctgatacgcaggatagccgcgagccccgaagggaaaagcccaggcggaagaagcgcccagccaaacagccacttcagcaagcggcgccaagcgactcagacggaagctctcatggaatttcaagtcacgggtcctgtcaagggactcatcctgaaccccgcaccgctcacctacacttcccagccgccgggaggctggggctatcgtcccacgccattattgcaactccaccgccaagggcagcacttccttgtacactgcaggccactcacagttcaaaaggactgcgctccgtgcccgagaccttgtag

SEQ ID NO: 239834 - DNA, 1251 bp, Artificial Sequence
  derived and/or modified sequence
atggccaccaagggcatgaggctgaagagcaccaaggaggtgttccccctggcccacgtgtgcaatgacaccaacaagatgaccctcatcaacccccagggcgccaagctgaacatctacaagaggaaggtggagcaggccatccagagctatgagaagaggctgaacaagatcgtgtggagggccctgagccaggaggagaaggagaagctggatgccaacaagcccatccagtacctggagaacaagacagtgctgaaccaggccctggagcggctgaactggcccatcagcctgaaggagctgtccatgctggagagcgagatcctggccggcaagatgtacatccagcaggccatggagctgcaggaggccgccaagaagaactatgccaacaaggcccctggagagcagcagaagctgcagggcaaccccaccaagaagaccaagagcaagaggccagaccccctgaagggccagaaggtgattgcccgctgtgatgaaaatggcttctacttccctggggtggtgaagaagtgtgtgtccaggacccaggccctggtgggcttctcctatggagacaccaaggtggtgtccaccagcttcatcacccctgtgggcggggccatgccctgccccctgctgcaggtgggggactatgtgtttgccaagatcgtcatccccaagggctttgacttctacgtgcctgccatcgtcatcgccctgcccaacaagcacgtggccacagagaagttctacacagtgctgaagtgcaacaacagaagagagttctgccccaggtctgccctgatcaagatcagccagaacaagtatgccctgagctgcagccacatcaagagcccccccatccctgaggaccctgaggtggaggatgtggaggccaggaacagcgccttcctgttctggcccctgaaggaggccgacacccaggacagccgggagccccggcgggagaagcccaggaggaagaagaggcctgccaagcagcccctgcagcaggccgcccccagcgacagtgatggcagcagccacggcatcagcagccacggcagctgccagggcacccaccctgagcccaggacagcccacctgcacttccctgctgctggccgcctgggcctgagcagccacgccatcatcgccaccccaccaccccgggccgccctgccctgcaccctgcaggccacccacagcagcaagggcctgcggtctgtgcctgagaccctgtag

SEQ ID NO: 239835 - DNA, 3885 bp, Artificial Sequence
  derived and/or modified sequence
atggagaagagcggccccagcagcaccatcagcgagcagcagctgcagaggcaggagggctggatcaacaccaagacagacctggccgagcagagcctcatcagcagcgagaagtggctgcagctgcacggcctgaagagcaacaagctgaccctgaagcagatcctgagccagatcggcttcccccactgtgaagattatgtggccagcctgggccggcctgtggccagccgctatgcagatggcctcttcccccagctgtacagagcagaagatggccgggtgtacaacctgacagccaagtctgagctgatctaccagtttgtggagcacctgacccaggccgtggagagctacaagcagaggatggactggctgaccagcaagagccggcagatctttggagtcatcctggagcagtgtgtgaccatcgtgctggactttggaggcatcctggagggggagctggacctgtgccgggaggccctgaccatggtgctgcaggagcaggtggcccacatcacagagttcaacatcatccgggtgtcccaggagcctgtgaagtggcaggagaatgccacccctgtgacagagcagagcatcgccacagccatctcctgggtggagaagctgactgtggagctgactgtgtctgaggccggccgcctggatgccctgctggaggccggccgggacaagaccatcgagagcatctactactttgtggtgggagatgtgcctgaggagagcaaggagctgctgctgcagagggccctggagatcccctgccctgtgtacacagtgtccttcaatgcccggggggagggcaccatcgccttcctgaaggacctgagcgccaagacccacagccgcttccacgcctttgctgagaggacagaatgtgtggagttccctgccttcagcaccaaggatggagacaacgtgatgacctggaacagcaggaagctgaagggcaagctgcccccaggagctggggtgagagaagatgtgttcctggtgtggcaggagatggaggaggcctgcagcaccctggcccagatccagaggctggtggccgagccccccaagccagatgtggccaccgtggactgtgagagcgagaccacctctgtggagatcgccagcaaccctgaggacacctgggacagcaagacctggctgcagaagtatggcctgaaggcccagaagctgagcctgtatgatgtgctggccgactgcagcttcagacatgctgatggagtggtggacatcaaggccaagccagaaaatgaatctgtgcagaccagcgctgagaccaacaagaagacagtgcacgccaagtactgcagcagatttgtgcacgccccctggaaggatggcagcctggtgcacgtgaacatcaccaaggagaagtgcaagtggtacagcgagcgcatccacacagccctggcccgcatcagaagacgcatcaagtggctgcaggacggcagccagagcctgtttggccgcctgcacaatgactgcatctacatcctgattgacaccagccacagcatgaagagcaagctggacctggtgaaggacaagatcatccagttcatccaggagcagctgaagtacaagagcaagttcaactttgtgaagtttgatggccaggccgtggcctggagggagcagctggccgaggtgaatgaagacaacctggagcaggcccagagctggatccgggacatcaagattggcagcagcaccaacaccctgagcgccctgaagacagcctttgctgacaaggagacccaggccatctacctgctgacagatggccgcccagaccagcccccagagaccgtcatcgaccaggtgaagcgcttccaggagatccccatctacaccatctccttcaactacaatgatgagatcgccaaccgcttcctgaaggaggtggccgccctgaccggcggggagttccacttctacaactttggctgcaaggaccccaccccacctgaggccgtgcagaatgaagacctgaccctgctggtgaaggagatggagcagggccacagcgacctggagaagatgcaggacctgtacagcgagagcctcatcatggactggtggtacaatgctgagaaggatggagacagcaagcaccagaaggagatctgcagcatgatcagcaccccagagaagtgtgccaagccccagagtgatgtggacagcacccagaccagcagcctgaacatgctgaagggcccctggggcctgagtgaccagaaggtgcagaagaagaaggtgctgcatgctgagagcaccaagaccagcctgctgcggagccagatgagcagcctgcggagcagcgcctgcagcgagaggaaggatggcctgagcaatgccagcagcagaagaacagccctgagtgacaaggagatgagcatcctgctggccgaggagtggctggatgacaagagcagcgagaaggtgacccgggagggcagccaggtgtatgaccatgacagcagtgatgtgtcctctgagaactggctgaagacctacggcctggtggccaagaagctgaccctgatggatgccctgtctgtggccgctgtgccccacagcagcacctacgtgcctgtgctggacaagcacgtggtgtccaaggtgtttgatgaggtgttccccctggcccacgtgtgcaatgacaccaacaagatgaccctcatcaacccccagggcgccaagctgaacatctacaagaggaaggtggagcaggccatccagagctatgagaagaggctgaacaagatcgtgtggagggccctgagccaggaggagaaggagaagctggatgccaacaagcccatccagtacctggagaacaagacagtgctgaaccaggccctggagcggctgaactggcccatcagcctgaaggagctgtccatgctggagagcgagatcctggccggcaagatgtacatccagcaggccatggagctgcaggaggccgccaagaagaactatgccaacaaggcccctggagagcagcagaagctgcagggcaaccccaccaagaagaccaagagcaagaggccagaccccctgaagggccagaaggtgattgcccgctgtgatgaaaatggcttctacttccctggggtggtgaagaagtgtgtgtccaggacccaggccctggtgggcttctcctatggagacaccaaggtggtgtccaccagcttcatcacccctgtgggcggggccatgccctgccccctgctgcaggtgggggactatgtgtttgccaagatcgtcatccccaagggctttgacttctacgtgcctgccatcgtcatcgccctgcccaacaagcacgtggccacagagaagttctacacagtgctgaagtgcaacaacagaagagagttctgccccaggtctgccctgatcaagatcagccagaacaagtatgccctgagctgcagccacatcaagagcccccccatccctgaggaccctgaggtggaggatgtggaggccaggaacagcgccttcctgttctggcccctgaaggaggccgacacccaggacagccgggagccccggcgggagaagcccaggaggaagaagaggcctgccaagcagcccctgcagcaggccgcccccagcgacagtgatggcagcagccacggcatcagcagccacggcagctgccagggcacccaccctgagcccaggacagcccacctgcacttccctgctgctggccgcctgggcctgagcagccacgccatcatcgccaccccaccaccccgggccgccctgccctgcaccctgcaggccacccacagcagcaagggcctgcggtctgtgcctgagaccctgtag

SEQ ID NO: 239836 - DNA, 1251 bp, Artificial Sequence
  derived and/or modified sequence
atggccaccaagggcatgcggctgaagagcaccaaggaggtgttccccttggctcatgtttgtaacgacacgaataagatgacgctaattaaccctcagggagccaaacttaacatctacaagagaaaggtagagcaagcgattcagagttacgaaaagaggttgaataagattgtctggcgagcgttgtcacaggaggaaaaggagaagctggacgcaaataagcccatccagtacctggagaacaaaaccgtacttaaccaagccctggagcgcttgaactggcccatctcactgaaggaactttctatgttagaaagtgaaatcctagccggcaaaatgtacatccagcaagccatggaactgcaggaggcagcaaagaaaaattacgctaataaagcccctggcgagcagcagaagctgcagggcaatcccacaaaaaaaacgaagtcaaagagacctgatcccctgaagggacagaaagtgatcgcccgatgtgacgagaatgggttctatttccctggggtcgtgaaaaagtgtgtgtccaggactcaagccctcgtcgggttctcctatggcgacacaaaggttgtctctaccagttttattacccccgttggcggtgccatgccgtgccctctgctgcaagtgggtgactatgtgttcgctaaaatcgtgatacctaaaggctttgacttctatgttcctgcaatcgtgatagccctccctaacaagcacgtggcaaccgagaagttttacactgtcctgaaatgcaacaataggcgagagttctgtccccgctctgccctgataaaaatttcccagaataaatatgccttgagctgttctcacataaaaagtccaccaatcccggaagatcccgaggtcgaagatgtggaagccagaaattcagcatttcttttttggccactgaaggaggccgacacccaggactcccgggaaccaaggcgcgagaagccaagaaggaagaagcgcccggctaagcaaccactgcagcaagcagccccatccgacagtgacggaagttcccacggaatttcttcacatggaagctgccaaggaacacacccggaaccccgcaccgcacacctgcacttcccagccgcagggcgactaggcctgagttctcacgctattattgctactccccccccacgggccgctctcccgtgcaccttgcaggcaacacacagctccaagggactgaggagcgtgccagaaacattgtag

SEQ ID NO: 239837 - DNA, 3885 bp, Artificial Sequence
  derived and/or modified sequence
atggagaagagcggccccagcagcaccatcagcgagcagcagctgcagcggcaggaaggatggatcaatacaaagactgacctggcagagcagagcctgattagctcagaaaaatggctacagctccacgggctgaaatctaacaagctgaccctgaagcagattctgagccagatcggctttccacattgcgaggattacgttgcatcccttggccgtcccgttgcctcacgatacgccgatggcctttttcctcaactttatcgcgcggaagacgggagggtctataatcttactgctaagagtgaactgatttaccagtttgtcgagcatctgacgcaggctgtggagtcctacaagcaaagaatggattggcttaccagtaaaagccgccagattttcggcgtcattctcgagcagtgtgtgacgattgtgctggatttcgggggcatcttagaaggcgaattggacttgtgtcgggaagccctcacaatggtgttacaggagcaagtggcacatataacggagttcaacatcatacgcgtgtcgcaggagcctgtgaaatggcaagagaatgcaacaccggtgacagagcagtctatcgccaccgctatttcttgggtggagaaactgactgtggaactgactgtgtctgaagctggccgcctggacgctctgctagaggcagggagggacaaaaccatcgaaagcatctattactttgtggtgggcgatgtccccgaggaatctaaggaacttctcctgcagagagctctggaaatcccctgtcctgtatataccgtgagtttcaacgcccggggtgaaggtacaatagcattcctgaaggatcttagtgccaaaacacattcacgcttccatgcttttgccgagcgaactgagtgcgttgaattccccgccttttccacaaaggacggcgacaacgtcatgacctggaattctagaaaacttaaaggtaaactcccccccggtgccggcgtgcgtgaagatgttttcctggtgtggcaagagatggaagaagcttgctccacactggcgcagattcaacgactggtggcagaaccccctaagcctgatgtggcaacggttgactgcgagagcgaaacaacttcagtagaaatcgccagtaatccggaagatacgtgggacagcaagacctggctccaaaagtatggcttgaaggcacaaaaattatctctctatgacgtattggctgattgttcatttcggcacgcagacggggtggtggacattaaagcaaaaccagagaacgaatccgtgcagaccagtgcagagacaaataaaaagaccgtgcatgcgaaatattgcagcaggtttgtccacgcaccttggaaagatgggtcccttgtacacgtaaacattaccaaggagaaatgcaagtggtattccgagcgaatccacaccgcgctcgccaggattcggcggaggattaagtggcttcaggacggctcccaatcgctctttggacgactccataatgactgtatctacatcctcatagatacgtcccactccatgaagtcaaaattagacctagttaaagacaaaataatccagtttattcaagagcaactcaaatataaatccaagttcaactttgtcaaattcgacggccaggcagtcgcctggcgtgagcagctggcggaggtcaacgaggacaacctggagcaggcccagtcctggatacgggacattaaaatcgggagcagcacaaatacactttccgccctgaagacagcctttgcggataaggaaacacaggcaatctatctcctgaccgatggccggccggaccagcctcccgaaactgttatcgatcaggttaagagattccaggagattcccatctacaccatctcatttaattacaatgacgaaatcgccaatagattcttgaaagaagtggccgctttgaccggtggcgaattccatttttacaatttcggttgtaaagacccgacacctcccgaggcagtccagaatgaagatctcactctccttgtgaaggagatggagcagggacattctgaccttgagaagatgcaggacctgtacagcgagagtctaattatggactggtggtataatgctgaaaaagatggggactccaaacatcagaaggaaatctgctcaatgatttctacccccgaaaagtgcgccaagccacaaagcgatgtggactctactcaaacttcaagtctcaacatgctgaaaggcccttggggactgagcgaccagaaggtgcagaaaaagaaagtgcttcacgcggagagcactaaaaccagcctgctgaggagtcaaatgtccagcctaaggagcagtgcctgctccgaaaggaaggacggccttagtaacgcatctagccggcggactgcgttgtcagacaaggagatgtctatccttctggccgaggaatggctggacgacaagtcttcagaaaaggttacccgcgaggggtcgcaggtgtacgaccacgacagcagtgacgttagctcagagaattggttgaaaacctacggactggttgctaaaaagcttacgctgatggacgcactttcagtagccgctgtgccacattcttcaacctacgtcccagtgctcgacaaacatgtggtgtcaaaagtgttcgacgaggttttcccgctggcccacgtgtgtaatgatactaataagatgacattaatcaacccacagggtgctaagctgaacatatacaagcggaaggtggaacaggcaatccagagctacgaaaaacgcctgaacaagatagtgtggcgcgctctttcgcaagaggagaaggaaaagttggatgccaacaagcctattcaatatctggaaaataaaactgtccttaatcaggcgctggagagactgaattggcctatcagcctgaaagaactgtcaatgctggaaagcgaaattttggcaggcaagatgtacatacagcaggccatggagttacaggaggcagctaaaaaaaactatgctaacaaggcccctggggaacagcagaagttacagggaaatccaactaagaaaacgaagtcaaagcggcccgaccctctgaaaggccagaaggtgatagcgcggtgcgatgagaatgggttctacttccccggcgtggtcaagaagtgtgtgagtcgtactcaagccctggttgggttctcttatggcgatacaaaagttgtatctaccagctttatcactcctgtgggtggcgccatgccctgcccactgctccaggtgggggactacgtttttgccaaaatcgtgattcctaaggggtttgacttctatgtgcccgctatcgtgattgccttgcctaacaaacatgtggcaacagaaaaattctacaccgtcttgaagtgcaacaatcgtagggagttttgcccaaggagcgccctgattaagatcagtcagaataagtatgctctgagctgttcccatataaaaagcccgccaatccccgaggatcccgaggtggaagatgtagaagcacgcaattccgcatttcttttttggccgttaaaggaggccgacactcaggacagccgcgaaccacgtagggagaagcccagacggaaaaagagaccagccaaacaacccctacagcaggccgcgcctagcgactcagacggtagcagtcacggcatcagttcccacggatcctgccagggcacccaccccgagcccagaacggcgcatctacactttcccgcggccggacgtctgggcctttctagccacgccatcatagctaccccgccgcctagggcagccctgccatgcactttgcaggctacccacagcagcaaaggtctgcgaagcgttcccgaaactctttag

SEQ ID NO: 239838 - DNA, 1251 bp, Artificial Sequence
  derived and/or modified sequence
atggccactaagggcatgagactgaaatctaccaaagaagttttcccactggctcacgtctgcaatgataccaataagatgaccctgattaatccgcagggcgcaaaactcaacatctacaagcgtaaagtcgaacaggcgattcagtcatacgaaaagcgtctgaataaaatcgtctggcgcgcactcagtcaagaggaaaaggagaagctcgacgccaataagccaatacagtatctggaaaacaagaccgtgctgaatcaggccctcgaaaggctgaactggccaatcagccttaaagaactatccatgctggaatctgagattctggccggaaagatgtacatccaacaggccatggagttgcaagaggccgctaaaaagaactacgcaaacaaagctccaggagagcagcagaagttgcagggtaatcctacaaaaaagactaaatctaagcgcccagatcctcttaaaggacagaaagtaatcgcccgatgcgacgagaacggcttctattttcctggagtagtaaaaaagtgtgtctcaagaactcaggcactggtgggattcagctatggcgacaccaaagtggtgtccacctcgtttatcacaccagttggcggagctatgccatgccctctgttgcaggtgggtgactatgtgttcgctaaaattgtaatcccgaagggcttcgacttctacgtgcctgcgatagtgatagctctcccaaacaaacatgtggcaactgagaagttctataccgtcctcaagtgcaacaaccggagggagttttgcccccgatccgctttgatcaagattagtcaaaacaaatacgctctgtcatgctctcacattaagagccccccaattcctgaggacccagaggttgaggacgtggaggctcgcaattcagctttcctcttctggcccctgaaagaggccgacacccaggactcaagagaaccgaggcgagagaagccgagacggaagaagcggccagccaagcagccacttcagcaggccgctccttccgactctgatggcagtagccacggcatcagtagccatggatcctgccagggaacacatccagagcccagaacagcgcacctgcactttcccgctgctgggcgtcttggcctgtccagccacgccatcatagctacacccccaccgagggccgctttaccttgcacactccaggcaacccattccagtaaggggctgcgctcagttcccgagaccctgtag

SEQ ID NO: 239839 - DNA, 3885 bp, Artificial Sequence
  derived and/or modified sequence
atggaaaagagtggtcctagttcaaccattagcgagcagcagctgcagcgccaggaaggttggataaatactaaaacagacctggccgagcagagcttaatatcctcagagaaatggctacagctgcacgggttgaaaagcaataagctcacactcaaacagatactctctcagatcgggtttccccattgcgaagactacgtggccagtttgggccgtcccgtggctagccgatacgcagacggtctgtttccccagttgtatagagcagaggacgggcgagtgtataacctcactgctaaaagcgaactcatttatcagtttgtcgaacatctcacccaggccgtggagtcctacaagcagcgcatggactggctcactagcaaaagcagacagattttcggggtgattctggagcagtgtgtcaccattgtattagactttggtggcattcttgagggcgaactggatctgtgccgagaggccctcacgatggtgctgcaagagcaggttgcacatattactgaatttaacatcatacgggtgtcccaggagcccgttaagtggcaagagaatgccacgcccgtgaccgagcaaagcatagcgaccgctatctcatgggttgaaaagctgactgtggagctgacagttagcgaggccggacggttggacgctctgttggaagcaggtagggacaagactatcgaatcgatctattatttcgtggtcggagacgtgcctgaggagagcaaggagctcctgctgcagcgagccctcgaaataccatgccctgtgtatacggtgtcctttaacgccagaggagaagggaccatcgccttcctaaaagacttatctgctaagacccactctaggttccatgctttcgcagaacgaaccgaatgtgtggagtttccagccttctcaaccaaagacggggataatgtcatgacctggaattctcgaaagctcaaagggaagttgccgcctggagccggagttcgagaagacgtctttctcgtgtggcaggaaatggaggaagcttgtagtacactcgctcagattcagcgcctggtggccgagcctcccaagcctgacgtggccaccgtggactgcgagtccgagacaacttctgtagagatcgccagcaatccagaagacacctgggacagtaagacatggttgcagaaatatgggctgaaggcccagaagctctctctgtatgacgtgctggccgactgcagtttccgacacgccgatggcgtagtcgacataaaggccaagcccgagaatgagagtgtacagacgagtgccgaaactaacaagaaaactgtccacgcaaagtactgtagcaggttcgtacacgctccatggaaagacggttcacttgtgcatgtaaacattacaaaggaaaaatgcaagtggtactctgaacgcattcacacagcattagctcgtatcaggagaaggataaagtggctacaagacggttcgcagtccctatttggacgtctccacaatgattgcatctatattttaatcgatacatctcatagcatgaaaagcaaattggatctcgtgaaggataaaatcattcagtttattcaagaacagctgaagtacaaatcaaaattcaacttcgtaaaattcgacggtcaggccgtcgcttggagggaacagctggctgaggtgaatgaagacaacttggagcaggcccagtcctggatccgcgacatcaaaattggcagttccaccaatacactgagtgccttaaaaactgcatttgccgacaaggaaacacaggctatctacttactaactgatggtcggcctgaccagcctcctgagaccgtgattgatcaggtcaaaagatttcaggagatcccaatttacactatcagctttaactacaatgatgaaatcgccaaccgcttcctgaaggaggtggccgcactcactggcggagagttccacttctacaatttcggctgtaaagaccccacaccacctgaggccgtgcaaaatgaagacctgacgctcctggtaaaagagatggagcagggtcactctgatcttgagaaaatgcaggatctctacagcgagtcactcatcatggattggtggtataacgcggaaaaggatggcgacagcaaacatcaaaaagagatttgcagcatgatcagtacccccgaaaagtgcgcaaagccgcagagcgatgtggattcaacccaaacatcgtccctcaatatgcttaaagggccttggggactttctgatcaaaaggtccagaaaaagaaggtcttgcacgcggaatcaaccaaaacatccctgctgcggagtcagatgtccagtctgagaagttctgcttgctccgagcggaaggacgggctcagcaacgcctcttcaaggcggaccgcactgtcggacaaagagatgtccatcctgttagcagaggagtggcttgatgataaatcttcggagaaggtaacccgggaagggagccaggtatatgatcatgacagctcagatgtgtcttcggagaactggctgaagacttacgggctcgttgccaaaaagctgacgcttatggacgctctttctgtggcggcagtgccacacagttcgacatacgtcccagtgctcgataagcacgtggtttcaaaagtattcgatgaagtgttcccattagctcacgtttgcaacgataccaacaagatgacactcataaaccctcagggagccaagttgaacatctacaagcgaaaggtggaacaggcaatccagtcatatgaaaagcgactgaacaagatcgtttggagggcgctgtcacaggaagagaaggagaagctggacgccaacaagccaatacaatatcttgagaacaaaacggtgttgaaccaggccttagaacgtttaaactggccaatctcgctcaaggagctctctatgcttgaaagcgaaattctcgctggaaaaatgtacattcagcaggctatggaattacaagaagccgcaaagaagaactacgcaaacaaggctcctggcgagcagcagaaattgcagggcaatcccactaagaagaccaagagcaagaggccagacccgttaaaagggcagaaggttatcgcacgatgtgatgagaacggcttctacttccccggtgtggtcaagaagtgtgtatctcggacgcaggccctagtgggttttagctatggcgatacaaaggtggtctcaacttcatttataactccagtgggcggagctatgccatgtcctctgctgcaagtgggggattacgttttcgccaagattgttattcccaagggcttcgatttctatgtgcccgcaatcgttattgcgctgccaaataaacatgttgccaccgaaaaattttacacagttctgaagtgtaataatcgtcgagaattttgtccccgttcagccctgattaaaatttcacagaacaagtacgctctgagttgctcacacattaagtccccccctatacctgaagaccccgaggtggaagacgtggaggcgaggaattctgcatttctcttctggcctctaaaagaggctgatactcaggactctagagaaccacgtcgggagaagcccagaagaaagaagcgcccagcgaagcagcctttgcaacaagcagctcccagtgattcggatggcagtagtcacgggataagctcccacggctcatgtcagggaacgcaccctgagccgcgtacggcccacctccatttcccagctgccggaaggctcggactttcttcccatgcaattatcgctacccctccgcctagggcggctctgccctgtaccttgcaggcaacccactccagcaagggcctgcgctcggtgcccgagacgctgtag

SEQ ID NO: 239840 - DNA, 1848 bp, Artificial Sequence
  derived and/or modified sequence
atggccacgaaaggcatgaggttgaaatccacaaaagaggtgttccctctggcacatgtgtgcaacgacacaaataagatgacattaattaacccccaaggagccaaactcaatatctacaagcgaaaagtggaacaggcaattcaatcctatgaaaagcgcttgaataaaattgtttggcgagcattatctcaagaggaaaaagaaaagttagatgcaaacaaaccaatacagtacttggaaaacaaaacagttttaaaccaggctttagaacggttgaattggcccatttcactgaaagagctgtcgatgctggaaagtgaaatcctagctgggaaaatgtacatccagcaggccatggaactccaggaggctgccaagaagaattatgcaaacaaggccccgggagagcaacagaaattgcaaggaaatccaacaaagaaaaccaaatcaaaaagaccagatcccctcaaaggacagaaggttattgcaagatgtgatgaaaatggcttttattttccaggggttgtgaagaagtgtgtgagccgcacccaagcactggtgggcttcagttacggagacaccaaggtcgtgtccacctccttcatcacgcctgtggggggcgccatgccctgcccgctgctccaggttggagattatgtgtttgccaaaattgtgatacccaaaggatttgacttctatgtccctgccattgtcatagcacttcccaataagcatgtggccacagaaaaattctacacagttttgaagtgtaacaaccggagagaattttgccctcggagtgcacttattaagatcagccaaaacaagtatgcgctctcttgctctcatataaagtcacccccaattcctgaggatccagaagtagaggatgtggaggcgaggaactctgctttcctcttctggccactgaaagaagcggacacgcaggattccagagagccaagacgagagaagcccaggaggaaaaagaggcccgccaagcagccactccagcaggcggcgccctcggactcggacggctcctcccacggcatcagctcccatgggtcctgccaggggacacaccccgagcccaggacagcccacctccacttccccgcggccgggcgtctaggactcagcagccacgccatcattgccacacctccacctcgagcagccctgccctgtactctccaagccacccacagcagcaaagggctgaggagcgtccctgagacactttaaggccgtctggtggcagctatgtttaagagaccagcgtccttccaggctgttcagacctcagcgttgacactgaaactggcccctccgcggaggtaaggccgccctccgcgccgcctatgcctgccctgtctgtagcaaagactcctctcccctccatccctgctgcctcccctacccgtttgacgacttggttctggctttttctgactgttctttatcctgttttccccctgcactcacaaaattgtattccatcttctggtagacgccccacccccagaagttttaacctgaaggatgactgtcacaggactttcaaattgtttagcagtcagcatagtcaggatccaagcccgcaatcttgttttaaattaattatcacatctaaattagagaatttgtcacccaatattaggactgaaattcagactcggtaacttgtctgagatctgcaagactgaacatcccctactgtatagtttcctgacattttcatttagcctttcctaattatttttgtctatagtctgttgtaggtaactctaattgagcccgaaaccagaataaaaactcttacattggaaacatttcaaaacc

SEQ ID NO: 239841 - DNA, 4454 bp, Artificial Sequence
  derived and/or modified sequence
aacagctggaatccttcgcccccggcgcgcagccttcgcccgccggaatcgctgccttatccaccagcgggatgcttacctcgcccgccctctcgggtcaggcgggcccgggaggatgggagggtggctgctgagcgggagccgccacgtcttccacccgacatattgcctagagtttgctgtgacttagatcttgattcagagatggagaaatcaggcccatcttctaccatctctgagcagcagctgcagaggcaagagggatggattaacaccaaaacagacttggctgagcagagtctcatttcatctgagaaatggcttcaactgcatgggcttaagagcaacaaattgaccttgaaacagattttgtcacagatcggattcccacattgtgaagattatgtggcgtctctggggagacctgtggcttctcggtatgctgatggtctgtttccacagctctacagagcagaagatggcagagtatacaatctgacagctaaatcagaactgatttatcagtttgtggaacatttaacacaagctgtggagagctacaagcagcgaatggactggctcaccagcaagagccggcagatttttggtgtcatcttggaacagtgcgtcaccatagtgctggattttggcggcattctggagggggagcttgatctgtgccgagaggctctaacaatggttctccaggagcaggtggctcacataaccgagttcaatatcatacgggtttctcaagagcctgtgaagtggcaggaaaatgctactcctgtgaccgaacagtccatagctactgccatcagttgggttgagaaactgacggttgagctgactgtgagcgaggctggccgcctggatgctctgctggaagccgggagagacaagactattgaatccatttactactttgtggtgggggatgttcctgaagaatccaaggagcttctcctccagagggccttggagatcccgtgtccagtctacacagtgtccttcaacgccagaggagaaggcactatagcttttctaaaggatctgagtgccaagacccacagcagattccacgcatttgccgagagaacagagtgtgtagaatttcctgcattctccacaaaggatggtgacaatgtgatgacttggaattcaaggaaactgaaaggaaaactccctccaggagctggagtcagagaggacgtgtttctcgtttggcaagagatggaggaagcctgcagcacgctggcccagatccagaggctggtggccgagcctcccaagcccgacgtggccactgtggactgcgagtcagaaacaacctctgttgagattgcatcgaatccagaagacacctgggactctaagacatggctgcagaaatatggcttgaaggcccagaagctatccttgtatgatgtgcttgccgactgctctttccgccacgctgatggggttgtggatataaaagccaaaccggagaatgagtccgtgcagaccagtgcggagacgaacaagaagacagtccatgcaaaatattgcagcaggtttgtccatgctccctggaaggatgggagcttggtccacgtcaacattaccaaagagaagtgcaagtggtacagtgagagaatccacacagccctggcccggatccgaaggaggattaaatggctacaggatgggagtcaaagcctctttggaagattgcataatgattgcatctacattctcattgacacgtctcactcaatgaagagcaaactggacttggtgaaggacaagatcattcagttcatacaggaacagctgaaatataaaagtaagtttaactttgtgaagtttgatggtcaagcagttgcttggcgggaacaacttgctgaagtcaatgaagataatttggaacaggctcagtcctggattagagacataaagattggaagctccacaaacaccctgagtgccctgaaaactgcttttgctgataaagaaacacaggcaatctaccttctgaccgatgggagacctgatcagccacctgaaacagttatagaccaggtcaaacgttttcaggaaattcctatttataccatctccttcaattacaatgatgagattgcaaacaggtttttgaaagaggttgctgctttgactggaggagagttccatttttataattttggttgcaaggatcccactcccccagaggctgttcagaatgaagatctgactcttttagttaaggaaatggaacagggtcacagtgatctggagaagatgcaagacctttattctgagtccttgatcatggactggtggtacaatgcagaaaaggatggagacagcaagcatcaaaaggaaatctgttctatgatttcaaccccagaaaagtgtgcaaagcctcaatctgatgtcgattcaacacaaacttcatctctgaatatgttgaagggaccatggggcctttcagatcaaaaggttcagaaaaagaaagtccttcacgcagaatcaaccaaaaccagcctgctcagaagccagatgtcctccctcaggagctcagcttgcagtgaaaggaaggatggcctctccaatgccagcagccggaggactgctctaagtgacaaagaaatgagcatcttgctggctgaggagtggctggatgacaaatcgtcagaaaaggtgacgcgagaaggaagccaggtttatgaccacgattcttcagatgtgtcttcagaaaactggctgaagacctatggcttggtcgccaagaaactcaccctcatggatgccttgtcagtggcagcagtcccgcacagctccacctatgttcccgtcctggacaagcatgtcgtgtctaaggtctttgatgaggtgttccctctggcacatgtgtgcaacgacacaaataagatgacattaattaacccccaaggagccaaactcaatatctacaagcgaaaagtggaacaggcaattcaatcctatgaaaagcgcttgaataaaattgtttggcgagcattatctcaagaggaaaaagaaaagttagatgcaaacaaaccaatacagtacttggaaaacaaaacagttttaaaccaggctttagaacggttgaattggcccatttcactgaaagagctgtcgatgctggaaagtgaaatcctagctgggaaaatgtacatccagcaggccatggaactccaggaggctgccaagaagaattatgcaaacaaggccccgggagagcaacagaaattgcaaggaaatccaacaaagaaaaccaaatcaaaaagaccagatcccctcaaaggacagaaggttattgcaagatgtgatgaaaatggcttttattttccaggggttgtgaagaagtgtgtgagccgcacccaagcactggtgggcttcagttacggagacaccaaggtcgtgtccacctccttcatcacgcctgtggggggcgccatgccctgcccgctgctccaggttggagattatgtgtttgccaaaattgtgatacccaaaggatttgacttctatgtccctgccattgtcatagcacttcccaataagcatgtggccacagaaaaattctacacagttttgaagtgtaacaaccggagagaattttgccctcggagtgcacttattaagatcagccaaaacaagtatgcgctctcttgctctcatataaagtcacccccaattcctgaggatccagaagtagaggatgtggaggcgaggaactctgctttcctcttctggccactgaaagaagcggacacgcaggattccagagagccaagacgagagaagcccaggaggaaaaagaggcccgccaagcagccactccagcaggcggcgccctcggactcggacggctcctcccacggcatcagctcccatgggtcctgccaggggacacaccccgagcccaggacagcccacctccacttccccgcggccgggcgtctaggactcagcagccacgccatcattgccacacctccacctcgagcagccctgccctgtactctccaagccacccacagcagcaaagggctgaggagcgtccctgagacactttaaggccgtctggtggcagctatgtttaagagaccagcgtccttccaggctgttcagacctcagcgttgacactgaaactggcccctccgcggaggtaaggccgccctccgcgccgcctatgcctgccctgtctgtagcaaagactcctctcccctccatccctgctgcctcccctacccgtttgacgacttggttctggctttttctgactgttctttatcctgttttccccctgcactcacaaaattgtattccatcttctggtagacgccccacccccagaagttttaacctgaaggatgactgtcacaggactttcaaattgtttagcagtcagcatagtcaggatccaagcccgcaatcttgt

SEQ ID NO: 239842 - protein, 305 aa, Artificial Sequence
  derived and/or modified sequence
MDFISIQQLVSGERVEGKVLGFGHGVPDPGAWPSDWRRGPQEAVAREKLKLEEEKKKKLERFNSTRFNLDNLADLENLVQRRKKRLRHRVPPRKPEPLVKPQSQAQVEPVGLEMFLKAAAENQEYLIDKYLTDGGDPNAHDKLHRTALHWACLKGHSQLVNKLLVAGATVDARDLLDRTPVFWACRGGHLVILKQLLNQGARVNARDKIGSTPLHVAVRTRHPDCLEHLIECGAHLNAQDKEGDTALHEAVRHGSYKAMKLLLLYGAELGVRNAASVTPVQLARDWQRGIREALQAHVAHPRTRC

SEQ ID NO: 239843 - protein, 263 aa, Artificial Sequence
  derived and/or modified sequence
MDFISIQQLVSGERVEGKVLGFGHGVPDPGAWPSDWRRGPQEAVAREKLKLEEEKKKKLERFNSTRFNLDNLADLENLVQRRKKRLRHRVPPRKPEPLVKLHRTALHWACLKGHSQLVNKLLVAGATVDARDLLDRTPVFWACRGGHLVILKQLLNQGARVNARDKIGSTPLHVAVRTRHPDCLEHLIECGAHLNAQDKEGDTALHEAVRHGSYKAMKLLLLYGAELGVRNAASVTPVQLARDWQRGIREALQAHVAHPRTRC

SEQ ID NO: 239844 - DNA, 918 bp, Artificial Sequence
  derived and/or modified sequence
atggactttatttcgattcagcagctggtgagcggagaaagggtcgaaggaaaagttctcggatttgggcacggcgtacctgacccgggcgcgtggccatctgattggcgacgcgggccgcaggaagcggttgctagagagaaattgaagctcgaggaagaaaaaaagaaaaaattagaaaggtttaattcgacgagattcaatcttgacaacctcgcggacctggaaaacctggtgcagcggagaaagaaaagactgaggcaccgcgtcccccctagaaagccagagccactggttaagccccaaagccaggctcaggtcgagcctgtaggcctggaaatgtttctgaaggccgcagcagagaatcaggagtatctcattgacaaatatctgaccgatggaggagaccccaacgctcatgataaattgcatcgcaccgctctccactgggcctgccttaaggggcacagccagttggtcaataagctcctggtcgctggcgcaactgtagatgcaagggatttattggaccggacccccgtattctgggcgtgcagaggaggccacctggtgatactgaagcagcttctgaaccagggggcccgcgtaaatgccagagacaagatcggctccactccgctacatgtcgcagtgaggacaagacatccagactgcctcgagcaccttatcgagtgcggcgctcatctcaacgctcaggacaaagaaggagatactgctctgcacgaagcagttaggcatggttcatataaggctatgaaactactcctgctgtacggggcggaactcggcgtgcggaacgctgcatccgttacacctgtgcagcttgccagagactggcagagggggatccgagaagctctgcaggcccacgtagcccatccccggactaggtgctag

SEQ ID NO: 239845 - DNA, 792 bp, Artificial Sequence
  derived and/or modified sequence
atggatttcatcagcattcagcagcttgtgagcggagagagggttgagggcaaagtgctggggtttggccacggtgtcccagatcctggcgcttggccttccgattggaggagaggaccccaggaagcagtggcacgcgaaaaactgaaactagaggaggaaaaaaaaaagaaattggagcgcttcaacagtacacggttcaacctggataatctagccgaccttgagaatctggtgcaaaggagaaagaagcgtttgaggcacagggttcctcccagaaagccagaacctctggttaaactccatagaaccgccttgcactgggcctgtttgaaaggccacagtcaactcgttaacaagttgttagtagcaggcgcaaccgtggatgcacgggacctcctggacagaacccctgtgttctgggcctgccgtggcgggcacctggttattttaaagcagctgttgaatcaaggtgccagggtgaatgctagggataagatcggcagcactccactgcatgtagctgtgcggacccggcatcccgactgccttgagcacctgatcgaatgtggcgcccacctgaacgcacaggacaaggagggagatacagcccttcacgaggctgtgaggcatgggtcatataaggccatgaaactgttactcctgtacggggctgaattgggagtaagaaatgccgcctccgtcaccccagttcagcttgcccgcgactggcagcgcgggatcagagaggcacttcaggcacatgttgcccatccacgaactagatgctag

SEQ ID NO: 239846 - DNA, 918 bp, Artificial Sequence
  derived and/or modified sequence
atggatttcatttctattcagcaactggtgtccggcgagcgagttgagggaaaagtgctgggttttgggcacggggttccagatccgggcgcctggccgtccgactggcgaagaggaccccaagaagccgtggcgagagagaagctgaagctcgaggaagaaaagaaaaagaaactggagaggttcaacagtacacgtttcaacctcgataacctggctgatttggagaacctggtgcagagacgtaaaaagcggctgagacaccgggtccccccccggaaacctgaacccttggtaaagccacagtcgcaggcgcaagtcgaaccagtggggctcgaaatgtttctcaaggccgccgctgagaaccaggagtacctgattgataagtatctaacggatggcggcgatccgaatgcccacgataagttacaccggactgccctgcactgggcttgtctgaagggccatagccagctggtgaacaagctcctggtcgccggtgccaccgtcgacgcgagggacctactagatagaactcctgtgttttgggcctgcagaggaggacacctggtaattcttaagcagctactaaaccagggcgcaagggttaacgcacgggataagattggatccaccccgcttcatgtggctgtgagaacccggcatcccgattgcttggaacacctgattgagtgcggcgcccacctaaacgcccaagacaaagagggggatactgccctgcatgaggctgtgcgtcacggatcttataaggcgatgaagctacttctactttacggtgctgagctcggggtccgaaacgcagcttcggtgaccccagtgcagctggcccgcgactggcagcgtgggatcagggaggcactgcaggcccacgttgctcatccgagaacccgctgttag

SEQ ID NO: 239847 - DNA, 918 bp, Artificial Sequence
  derived and/or modified sequence
atggacttcatcagcatccagcagctggtgtctggagagcgggtggagggcaaggtgctgggcttcggccacggcgtgcctgaccccggggcctggcccagcgactggaggcggggcccccaggaggccgtggcccgggagaagctgaagctggaggaggagaagaagaagaagctggagcgcttcaacagcacccgcttcaacctggacaacctggccgacctggagaacctggtgcagaggaggaagaagaggctgcggcaccgggtgccccccaggaagccagagcccctggtgaagccccagagccaggcccaggtggagcctgtgggcctggagatgttcctgaaggctgctgctgagaaccaggagtacctgattgacaagtacctgacagatggaggagaccccaatgcccatgacaagctgcacaggacagccctgcactgggcctgcctgaagggccacagccagctggtgaacaagctgctggtggccggggccaccgtggatgcccgggacctgctggacaggacccctgtgttctgggcctgccggggcggccacctggtgatcctgaagcagctgctgaaccagggcgcccgggtgaatgcccgggacaagattggcagcacccccctgcacgtggccgtgaggaccaggcacccagactgcctggagcacctgattgaatgtggggcccacctgaatgcccaggacaaggagggggacacagccctgcacgaggccgtgagacatggcagctacaaggccatgaagctgctgctgctgtatggagctgagctgggcgtgagaaatgctgcctctgtgacccctgtgcagctggcccgggactggcagaggggcatccgggaggccctgcaggcccacgtggcccaccccaggacccgctgctag

SEQ ID NO: 239848 - DNA, 792 bp, Artificial Sequence
  derived and/or modified sequence
atggacttcatcagcatccagcagctggtgtctggagagcgggtggagggcaaggtgctgggcttcggccacggcgtgcctgaccccggggcctggcccagcgactggaggcggggcccccaggaggccgtggcccgggagaagctgaagctggaggaggagaagaagaagaagctggagcgcttcaacagcacccgcttcaacctggacaacctggccgacctggagaacctggtgcagaggaggaagaagaggctgcggcaccgggtgccccccaggaagccagagcccctggtgaagctgcacaggacagccctgcactgggcctgcctgaagggccacagccagctggtgaacaagctgctggtggccggggccaccgtggatgcccgggacctgctggacaggacccctgtgttctgggcctgccggggcggccacctggtgatcctgaagcagctgctgaaccagggcgcccgggtgaatgcccgggacaagattggcagcacccccctgcacgtggccgtgaggaccaggcacccagactgcctggagcacctgattgaatgtggggcccacctgaatgcccaggacaaggagggggacacagccctgcacgaggccgtgagacatggcagctacaaggccatgaagctgctgctgctgtatggagctgagctgggcgtgagaaatgctgcctctgtgacccctgtgcagctggcccgggactggcagaggggcatccgggaggccctgcaggcccacgtggcccaccccaggacccgctgctag

SEQ ID NO: 239849 - DNA, 918 bp, Artificial Sequence
  derived and/or modified sequence
atggacttcatcagcatccagcagctggtgagcggcgagcgggtggaggggaaggtgctcggtttcggccacggagtgcccgatcccggtgcgtggccaagcgactggcgccgcggtccccaggaggccgttgccagggagaaactaaagctcgaggaggagaaaaagaaaaaactggagcggttcaacagtaccagatttaatctggataatctagccgacctggaaaaccttgtccaaagacgaaaaaaaagattgcgacatagggtaccgccccggaagccggaacctctcgtcaagcctcagagtcaggcacaggtggaacctgtgggtttagaaatgttcctgaaggccgccgccgaaaatcaagagtatctcattgacaagtacctgactgacggcggggatccaaacgctcacgacaaactccaccgcaccgccctgcattgggcttgcctcaaaggccacagccaactcgtgaacaagctgctcgtggcaggtgcaaccgttgatgctcgggatctattggatcggaccccggttttttgggcctgcagaggaggccatcttgtgattcttaagcagcttctcaatcagggcgcgcgcgtgaatgcaagggacaaaatcggaagtacaccgctgcatgtcgctgttcgaacccgacacccagattgtctagagcacctgatcgaatgtggggcccacctgaatgctcaggataaagagggagacacagcactgcacgaagcggtgaggcatggctcctacaaagccatgaaactgcttttgctatacggagccgagcttggagtacgaaatgccgcgtcagttacaccggtccaactcgctcgggattggcagcgtggcattagggaggccctgcaggcccacgtcgcccatccccgcacgcgatgctag

SEQ ID NO: 239850 - DNA, 792 bp, Artificial Sequence
  derived and/or modified sequence
atggacttcatcagcatccagcagctggtgagcggcgagcgggtggaaggaaaagttctcggctttgggcacggtgtgccagatccgggagcctggccgtccgactggcgtagaggccctcaggaggccgtcgcccgagagaaactcaaattggaggaagaaaagaaaaaaaaacttgaacggtttaattcgactaggtttaatctggataacttagccgatctggagaatttagtgcagaggcgaaaaaagcgcctccgacacagggtgccgccaagaaagcccgagccactagtcaaactgcatcgtaccgctttgcattgggcctgcttgaagggtcactcccagctagtgaacaaactgctcgttgctggtgccaccgtggatgcccgggatctgcttgaccggacaccagtgttttgggcatgccgtggaggtcaccttgtgatcctaaaacagctgcttaaccaaggcgcaagggtgaacgccagggacaaaattgggtccactcctttacatgtggcagtgagaacgcgacatccagactgtttggagcacctgattgagtgcggagctcatctaaatgcccaggacaaggaaggcgatacagcattgcacgaggctgtgagacatggcagctataaggctatgaagctgttgttattgtacggtgctgagcttggagtccgaaatgccgctagcgtgactccagtacaattagcgagagattggcaaaggggaatcagagaggccttgcaggcacacgtggcacacccaagaacaagatgttag

SEQ ID NO: 239851 - DNA, 918 bp, Artificial Sequence
  derived and/or modified sequence
atggacttcatcagcatccagcagctggtgagcggcgagcgggtggaggggaaagtattaggattcggacatggcgtccccgaccctggtgcatggccaagtgactggcgccgcggcccacaggaagctgtggctcgggaaaaactcaagctcgaggaggagaagaagaaaaagctggaacgtttcaactctacccgcttcaatctggataatctggccgatctggagaacctagtgcagcggcgtaagaaaaggctgcgacaccgagtgccgcctagaaagccagaaccgctcgtgaagcctcagtcccaggcacaggtcgagcctgtgggcctggagatgttcctcaaagccgccgcagaaaatcaggagtacctaattgacaaatacttgacagacggcggcgaccctaatgcccacgacaaactccatagaactgcactgcattgggcctgtctgaaaggacattcccagctagtcaataaacttctcgtcgctggagcaacggtcgatgctagggacttactggaccgaacaccggtattctgggcctgccgaggtggtcatttagtgatcctgaagcagctgcttaatcagggggcaagggtcaatgcccgtgataaaatcggaagcacaccactgcatgtggccgtgaggacgcgccatcccgactgccttgagcacctgatcgaatgcggggctcatctcaacgcacaggataaagagggcgatacagccctacacgaggccgtcaggcacgggtcatacaaggccatgaagctgttgctgctgtatggcgctgaactgggagtgcggaatgccgcaagcgtgactcctgttcagttagcgagggattggcagagaggcatccgggaggctttacaggctcacgtggcccatccgagaacccgctgctag

SEQ ID NO: 239852 - DNA, 2597 bp, Artificial Sequence
  derived and/or modified sequence
ttcagctcttctcactggggggtgtgaggaacaggggggaccatggacttcatcagcattcagcagttggtaagtggagaaagagttgaagggaaagtgttgggatttggacatggagttcctgaccctggagcctggcctagtgactggaggaggggcccccaagaggctgtggcccgggagaagctgaaattggaagaagagaagaagaagaaacttgaaagatttaacagtaccagatttaatctggataacctggctgacttggaaaacttggttcaaagacggaaaaagcgactgagacacagagtcccccccaggaaacctgagcccctggttaagccgcagtcccaggcccaggtggagcctgtgggcctggagatgttcctgaaggcagctgctgagaaccaggagtacctgattgacaagtacttgacagacggaggggaccccaatgcccatgacaagctccaccgcaccgccttgcactgggcctgtctgaagggtcacagccagctggtgaacaagctgctggtggcaggtgccacagtggacgcgcgagacttgctggacaggacacctgtgttctgggcctgccgcggaggacatctggtcatcctcaaacagctgcttaaccagggagcccgggtcaatgcccgggacaagatcgggagcacccccctgcacgtggcagtgcgcacccggcaccccgactgcctggagcacctcatcgagtgtggcgcccacctgaacgcacaggataaggaaggggacacggctctgcacgaggccgtgcggcacggcagctacaaagccatgaagctactgctgctctatggggccgagctgggggtgcggaacgcggcctccgtgaccccggtgcagctggctcgagactggcagcgcggcatccgggaggccctgcaggcccacgtggcgcatccccgcacccggtgctgaccgcagcaccgccccccgccgcgcctttcgcactgccaccattccatcctgtgccccgcccccgcgtctgcacctctgtggttcctgccctcagccctggttcctccctctctggcctgtgccgcctcagcagccctggcagaactgaagagcggcaccgggcccagcaggcaaagagagaggcctccctggcttcgagtgtcaggggagccgcgttccctcccagggctggagcagaggaccacaaggcagcagaaagcgcgggtccagatgagggccaggaaggggaggagagtgagggccaagaacgagccttaagggagcagtcccaagctggagccacccagggctgggtctgggagtcctcagtgtccacttgtcccaggttagggggcttgccttgctctctccagggccagtctgtgtgtgtggggactcagcccgtggccggcagatgccatccaggatgtacaaggtgcagccaaggcaggccatgcaggggccgggcctgtctgcagctggtggatgcctgtgggcatggctttctctggggaccccattcctgtcagtagcaaccctggcagtgtccggagcggctctagacaactttggtcataggaactctggaggtgggttctggtcatctgaggtggctactcaacaggtttgaggccccacagcaacagaagtccaggacccactaggttgcctcagaagccctaagactgatgagctggagcgcgcatttgagagaagcctcgcacccactgtgtactggccccgctcaggccggcctggcacaccgttgcctgctggcggctctcatggggaagcgcctgggcactggggattgcttgtggcccactcaactcttggggcagtggcccgtaaccctagtttgcctgaggcccttatgtccccttatgttcctggtactggagcttgagctcttgcctggaacgctgcagctgcacccaccctgcttgatcccacctgggaggccaggacactgaggagctctgaacccagcccacagggaagcagaggaaggtgagcccccgccgccccccagcccttcccatcccttccctgctccctggtggtctaaggacccaagctccctagacttcctcttccaccgtctgtacgtttcaaattacactggtgtaggcctgtactgctggtggggctgggcccctaaacgccagaaagtgaatcttaagaagctctgccctaaactgagaaccacatgctgagggaagggctgaaaggtgaaggctcagcctccctcacatgggtcctgggttacattaggtaccgggctgattgataggcatttggccatggttccttttcgtctacctttgggggccttctcaggcccagaacaaggctgttgttactatgtggaaaagctgaccagtgctgcacactaggggcacacacctttccatgagcagctcctgccctgtggcgacagccagcgtgcacccagacgctggtgccatggcgaagcaggcgttcaagaccatggagaagacaactcctcatctagaaaatgaggacacctcagtgacaaacacacctttttataccaatcagtatcctctgttcattaaaactggctatccattaca

SEQ ID NO: 239853 - DNA, 2455 bp, Artificial Sequence
  derived and/or modified sequence
actggggggtgtgaggaacaggggggaccatggacttcatcagcattcagcagttggtaagtggagaaagagttgaagggaaagtgttgggatttggacatggagttcctgaccctggagcctggcctagtgactggaggaggggcccccaagaggctgtggcccgggagaagctgaaattggaagaagagaagaagaagaaacttgaaagatttaacagtaccagatttaatctggataacctggctgacttggaaaacttggttcaaagacggaaaaagcgactgagacacagagtcccccccaggaaacctgagcccctggttaagctccaccgcaccgccttgcactgggcctgtctgaagggtcacagccagctggtgaacaagctgctggtggcaggtgccacagtggacgcgcgagacttgctggacaggacacctgtgttctgggcctgccgcggaggacatctggtcatcctcaaacagctgcttaaccagggagcccgggtcaatgcccgggacaagatcgggagcacccccctgcacgtggcagtgcgcacccggcaccccgactgcctggagcacctcatcgagtgtggcgcccacctgaacgcacaggataaggaaggggacacggctctgcacgaggccgtgcggcacggcagctacaaagccatgaagctactgctgctctatggggccgagctgggggtgcggaacgcggcctccgtgaccccggtgcagctggctcgagactggcagcgcggcatccgggaggccctgcaggcccacgtggcgcatccccgcacccggtgctgaccgcagcaccgccccccgccgcgcctttcgcactgccaccattccatcctgtgccccgcccccgcgtctgcacctctgtggttcctgccctcagccctggttcctccctctctggcctgtgccgcctcagcagccctggcagaactgaagagcggcaccgggcccagcaggcaaagagagaggcctccctggcttcgagtgtcaggggagccgcgttccctcccagggctggagcagaggaccacaaggcagcagaaagcgcgggtccagatgagggccaggaaggggaggagagtgagggccaagaacgagccttaagggagcagtcccaagctggagccacccagggctgggtctgggagtcctcagtgtccacttgtcccaggttagggggcttgccttgctctctccagggccagtctgtgtgtgtggggactcagcccgtggccggcagatgccatccaggatgtacaaggtgcagccaaggcaggccatgcaggggccgggcctgtctgcagctggtggatgcctgtgggcatggctttctctggggaccccattcctgtcagtagcaaccctggcagtgtccggagcggctctagacaactttggtcataggaactctggaggtgggttctggtcatctgaggtggctactcaacaggtttgaggccccacagcaacagaagtccaggacccactaggttgcctcagaagccctaagactgatgagctggagcgcgcatttgagagaagcctcgcacccactgtgtactggccccgctcaggccggcctggcacaccgttgcctgctggcggctctcatggggaagcgcctgggcactggggattgcttgtggcccactcaactcttggggcagtggcccgtaaccctagtttgcctgaggcccttatgtccccttatgttcctggtactggagcttgagctcttgcctggaacgctgcagctgcacccaccctgcttgatcccacctgggaggccaggacactgaggagctctgaacccagcccacagggaagcagaggaaggtgagcccccgccgccccccagcccttcccatcccttccctgctccctggtggtctaaggacccaagctccctagacttcctcttccaccgtctgtacgtttcaaattacactggtgtaggcctgtactgctggtggggctgggcccctaaacgccagaaagtgaatcttaagaagctctgccctaaactgagaaccacatgctgagggaagggctgaaaggtgaaggctcagcctccctcacatgggtcctgggttacattaggtaccgggctgattgataggcatttggccatggttccttttcgtctacctttgggggccttctcaggcccagaacaaggctgttgttactatgtggaaaagctgaccagtgctgcacactaggggcacacacctttccatgagcagctcctgccctgtggcgacagccagcgtgcacccagacgctggtgccatggcgaagcaggcgttcaagaccatggagaagacaactcctcatctagaaaatgaggacacctcagtgacaaacacacctttttataccaatcagtatcctctgttcattaaaactggctatccatt

SEQ ID NO: 239854 - DNA, 2156 bp, Artificial Sequence
  derived and/or modified sequence
aacaggggggaccatggacttcatcagcattcagcagttggtaagtggagaaagagttgaagggaaagtgttgggatttggacatggagttcctgaccctggagcctggcctagtgactggaggaggggcccccaagaggctgtggcccgggagaagctgaaattggaagaagagaagaagaagaaacttgaaagatttaacagtaccagatttaatctggataacctggctgacttggaaaacttggttcaaagacggaaaaagcgactgagacacagagtcccccccaggaaacctgagcccctggttaagccgcagtcccaggcccaggtggagcctgtgggcctggagatgttcctgaaggcagctgctgagaaccaggagtacctgattgacaagtacttgacagacggaggggaccccaatgcccatgacaagctccaccgcaccgccttgcactgggcctgtctgaagggtcacagccagctggtgaacaagctgctggtggcaggtgccacagtggacgcgcgagacttgctggacaggacacctgtgttctgggcctgccgcggaggacatctggtcatcctcaaacagctgcttaaccagggagcccgggtcaatgcccgggacaagatcgggagcacccccctgcacgtggcagtgcgcacccggcaccccgactgcctggagcacctcatcgagtgtggcgcccacctgaacgcacaggataaggaaggggacacggctctgcacgaggccgtgcggcacggcagctacaaagccatgaagctactgctgctctatggggccgagctgggggtgcggaacgcggcctccgtgaccccggtgcagctggctcgagactggcagcgcggcatccgggaggccctgcaggcccacgtggcgcatccccgcacccggtgctgaccgcagcaccgccccccgccgcgcctttcgcactgccaccattccatcctgtgccccgcccccgcgtctgcacctctgtggttcctgccctcagccctggttcctccctctctggcctgtgccgcctcagcagccctggcagaactgaagagcggcaccgggcccagcaggcaaagagagaggcctccctggcttcgagtgtcaggggagccgcgttccctcccagggctggagcagaggaccacaaggcagcagaaagcgcgggtccagatgagggccaggaaggggaggagagtgagggccaagaacgagccttaagggagcagtcccaagctggagccacccagggctgggtctgggagtcctcagtgtccacttgtcccaggttagggggcttgccttgctctctccagggccagtctgtgtgtgtggggactcagcccgtggccggcagatgccatccaggatgtacaaggtgcagccaaggcaggccatgcaggggccgggcctgtctgcagctggtggatgcctgtgggcatggctttctctggggaccccattcctgtcagtagcaaccctggcagtgtccggagcggctctagacaactttggtcataggaactctggaggtgggttctggtcatctgaggtggctactcaacaggtttgaggccccacagcaacagaagtccaggacccactaggttgcctcagaagccctaagactgatgagctggagcgcgcatttgagagaagcctcgcacccactgtgtactggccccgctcaggccggcctggcacaccgttgcctgctggcggctctcatggggaagcgcctgggcactggggattgcttgtggcccactcaactcttggggcagtggcccgtaaccctagtttgcctgaggcccttatgtccccttatgttcctggtactggagcttgagctcttgcctggaacgctgcagctgcacccaccctgcttgatcccacctgggaggccaggacactgaggagctctgaacccagcccacagggaagcagaggaagctcctgccctgtggcgacagccagcgtgcacccagacgctggtgccatggcgaagcaggcgttcaagaccatggagaagacaactcctcatctagaaaatgaggacacctcagtgacaaacacacctttttataccaatcagtatcctctgttcattaaaactggctatccatta

SEQ ID NO: 239855 - DNA, 918 bp, Artificial Sequence
  derived and/or modified sequence
atggacttcatctctattcagcaattagtttcgggcgagagggtcgaggggaaggtcctgggattcgggcacggcgtgccggatccaggcgcatggccaagtgattggaggcggggacctcaggaggcagtggcaagggaaaaactgaagctggaggaggagaagaagaaaaaattagagaggttcaactcgacaagattcaacctggacaatcttgccgacttggagaaccttgtgcagcgtcggaagaagagactgagacacagggtgccccctaggaaacctgagcctcttgtgaaacctcagagtcaggcacaggtggagccggttgggttagaaatgttcctgaaagctgcggcagaaaatcaggaatacctgattgacaagtacttaaccgatggcggtgatcctaacgcccacgataagttgcaccggacagcactccactgggcctgtctcaaagggcactctcagctggtcaataaactgctggttgccggagccactgtggatgcacgggacttactagatagaaccccggtcttttgggcttgtcggggtggacatctggtcatactgaagcagcttctgaatcagggcgctagagttaacgccagggacaaaatcgggtctacaccactccacgtggctgtccgcactcggcacccagattgccttgaacatctgatagagtgcggggcacatttaaacgcccaggataaggagggggatacagctctgcacgaagcagtccgtcatgggagctataaggccatgaaactactgctgctgtatggggcagagttgggggtgcggaatgctgccagtgtgactccagtgcagcttgccagagattggcagcggggtatccgagaggctctgcaagcccatgtggcccaccccagaacacggtgctag

SEQ ID NO: 239856 - DNA, 792 bp, Artificial Sequence
  derived and/or modified sequence
atggattttatttcaatccaacagctggtgagtggagaaagagtggaaggaaaggtgctcggattcggccacggagtcccggacccaggtgcctggccctctgactggaggaggggaccccaggaagctgtggccagagaaaagctgaagctggaggaggaaaagaagaagaaactggagcgattcaacagcacgagatttaaccttgacaacctcgctgatttagagaacttggtacagcggcgtaagaaacgtcttcgccatcgcgtgccaccaaggaagcccgagccgctcgtaaagctacaccgcacagctctgcactgggcttgcctgaaaggtcatagccagctggttaataaactgctcgttgctggcgcaaccgtggatgcacgtgatcttctggataggacacctgtgttttgggcttgccggggaggtcatttagttatcttgaagcagcttttaaatcagggggctagggttaatgccagagataaaatcggaagtacacctctgcacgttgccgtgagaaccaggcatccagactgccttgagcacctgattgagtgcggagcacatctgaatgctcaagataaagaaggcgacacggccttacatgaggcagtgagacacgggtcttataaggctatgaaattgttgttgctgtacggcgctgagcttggcgtgagaaacgccgcaagcgtcacccctgtgcagctggcccgagactggcaacgcggtatccgggaggcgctgcaggcacatgtcgctcatcccaggaccaggtgctag

SEQ ID NO: 239857 - DNA, 918 bp, Artificial Sequence
  derived and/or modified sequence
atggactttatctctatccagcaactggtgagcggagagagagtcgaggggaaagtactcggcttcggtcatggcgttcctgaccccggtgcttggccttcggactggcggaggggaccacaggaagctgtggccagagagaagctcaagctggaagaagagaaaaaaaagaagctggagagatttaacagcacacggtttaacctggacaacctggctgatctggagaatcttgtgcaacggagaaagaaacgccttcgccatcgggttccccctaggaagcctgaacctcttgtaaagccccagtctcaggcccaggtcgagcccgtgggactcgaaatgttcctgaaggctgccgcagaaaaccaggagtaccttatcgataagtacttaacagatggtggtgaccctaatgcccacgacaaattgcaccggaccgctttgcactgggcctgtctgaaaggccattcgcagctggtgaataaacttctcgttgcaggggctacggtggatgcaagagatctcctggacagaaccccagtgttctgggcatgccggggaggccatctggtgatcctcaagcagcttctgaaccagggcgcaagagtgaacgcacgggataagatcggaagtacgccactgcatgtggctgtaaggacccggcatcctgactgtttggagcacctcatagagtgtggcgctcacctgaacgctcaagacaaggagggagacactgcactgcatgaggctgtgcggcacgggtcttacaaggcaatgaaactgctgctgctgtacggtgcagagctgggcgtgaggaacgccgcttccgtcacgcccgtacaattggctagggattggcagcgcggaatccgggaggccctccaggcccacgtggctcatcctcgtacccggtgctag

SEQ ID NO: 239858 - DNA, 918 bp, Artificial Sequence
  derived and/or modified sequence
atggacttcatcagcatccagcagctggtgagcggcgagagagtggagggcaaggtgctgggcttcggccacggcgtgcccgaccccggcgcctggcccagcgactggagaagaggcccccaggaggccgtggccagagagaagctgaagctggaggaggagaagaagaagaagctggagagattcaacagcaccagattcaacctggacaacctggccgacctggagaacctggtgcagagaagaaagaagagactgagacacagagtgccccccagaaagcccgagcccctggtgaagccccagagccaggcccaggtggagcccgtgggcctggagatgttcctgaaggccgccgccgagaaccaggagtacctgatcgacaagtacctgaccgacggcggcgaccccaacgcccacgacaagctgcacagaaccgccctgcactgggcctgcctgaagggccacagccagctggtgaacaagctgctggtggccggcgccaccgtggacgccagagacctgctggacagaacccccgtgttctgggcctgcagaggcggccacctggtgatcctgaagcagctgctgaaccagggcgccagagtgaacgccagagacaagatcggcagcacccccctgcacgtggccgtgagaaccagacaccccgactgcctggagcacctgatcgagtgcggcgcccacctgaacgcccaggacaaggagggcgacaccgccctgcacgaggccgtgagacacggcagctacaaggccatgaagctgctgctgctgtacggcgccgagctgggcgtgagaaacgccgccagcgtgacccccgtgcagctggccagagactggcagagaggcatcagagaggccctgcaggcccacgtggcccaccccagaaccagatgctag

SEQ ID NO: 239859 - DNA, 792 bp, Artificial Sequence
  derived and/or modified sequence
atggacttcatcagcatccagcagctggtgagcggcgagagagtggagggcaaggtgctgggcttcggccacggcgtgcccgaccccggcgcctggcccagcgactggagaagaggcccccaggaggccgtggccagagagaagctgaagctggaggaggagaagaagaagaagctggagagattcaacagcaccagattcaacctggacaacctggccgacctggagaacctggtgcagagaagaaagaagagactgagacacagagtgccccccagaaagcccgagcccctggtgaagctgcacagaaccgccctgcactgggcctgcctgaagggccacagccagctggtgaacaagctgctggtggccggcgccaccgtggacgccagagacctgctggacagaacccccgtgttctgggcctgcagaggcggccacctggtgatcctgaagcagctgctgaaccagggcgccagagtgaacgccagagacaagatcggcagcacccccctgcacgtggccgtgagaaccagacaccccgactgcctggagcacctgatcgagtgcggcgcccacctgaacgcccaggacaaggagggcgacaccgccctgcacgaggccgtgagacacggcagctacaaggccatgaagctgctgctgctgtacggcgccgagctgggcgtgagaaacgccgccagcgtgacccccgtgcagctggccagagactggcagagaggcatcagagaggccctgcaggcccacgtggcccaccccagaaccagatgctag

SEQ ID NO: 239860 - protein, 321 aa, Artificial Sequence
  derived and/or modified sequence
MFSLMASCCGWFKRWREPVRLANKQDKEGALGEADVIECLSLEKLVNEHKCLCQIEPCSAISGYGKKIDKSIKKGLYWLLHVIARDFDALNERIQKETTEQRALEEQEKQERAERVRKLREERKQNEQEQAELDGTSGLAELDPEPTNPFQPIASVIIENEGKLEREKKNQKMEKDSDGCHLKHKMEHEQIETQGQVNHNGQKNNEFGLVENYKEALTQQLKNEDETDRPSLESANGKKKTKKLRMKRNHRVEPLNIDDCAPESPTPPPPPPPVGWGTPKVTRLPKLEPLGETHHNDFYRKPLPPLAVPQRPNSDAHDVIS

SEQ ID NO: 239861 - DNA, 966 bp, Artificial Sequence
  derived and/or modified sequence
atgttttcgttaatggccagttgctgcgggtggtttaaacgctggcgggagccagtgcggttggccaacaagcaggataaagaaggcgcccttggcgaagcagacgtgatagagtgtctcagtcttgagaaattggttaatgaacataagtgcctctgccaaatcgagccatgctccgcaatatccgggtatggaaagaagatagataagagtatcaagaaagggttatattggttgctccacgtgatcgcaagagacttcgatgctcttaacgaaagaattcagaaggagacgaccgagcaaagggctttggaggagcaggaaaagcaagagagggccgaaagggttaggaagctacgagaagagcgcaagcagaacgaacaggaacaggctgagctcgatgggacttctggactcgccgagctggaccctgagcccacaaaccccttccagccaatcgcctcagtgattatcgaaaatgagggcaagctcgaaagagagaaaaaaaaccagaaaatggagaaagactcagatggctgccaccttaaacacaagatggagcacgagcagattgagacccagggacaggtgaatcataacggtcagaagaacaacgaatttggactcgtcgagaactacaaggaggcgctgacacagcagctgaaaaacgaggacgagaccgaccgccctagtctggaatctgccaatggcaagaaaaagacgaaaaagctgaggatgaaacggaaccatcgagtcgaacctctcaatattgatgactgtgcgcccgaatccccaacgcccccacctccccccccaccggtggggtggggtacacccaaagtgactagattgccgaagctagagcctctaggagagactcatcacaatgatttctacagaaagccattgccaccccttgccgtccctcagcgccccaatagtgacgcgcacgacgttatctcctag

SEQ ID NO: 239862 - DNA, 450 bp, Artificial Sequence
  derived and/or modified sequence
atggagaaagattctgatggttgtcacttgaagcataagatggagcacgagcagattgagacgcaagggcaagtcaaccacaacggccaaaagaacaacgagttcggtctggtcgagaactacaaggaagctctgacacagcagttgaagaatgaagacgaaaccgacaggccctcccttgagagcgcaaatggtaagaaaaaaactaaaaaattgcggatgaagagaaaccacagagtcgagcccctcaatattgatgactgcgcacccgagagtcctacacccccccctccacctccaccagtgggatgggggacgccaaaagtgacaaggttgcctaagctagagccacttggtgaaacacatcacaatgacttctacaggaagccactgccacctttggcagtgccccaacggcctaatagtgatgcacatgacgtgatctcttag

SEQ ID NO: 239863 - DNA, 3264 bp, Artificial Sequence
  derived and/or modified sequence
acgtcgacgcggggcttttctttagccgggtcccgctaactcggctacggtgtatctgcgtctttggtcaggttgttccttggctaagagggcagtcgtcgcggacccacgcggttagcaaggcttagtgctcgggccggccgccttcacttccctcccggcttttcctcccgacttatccactttaggggcgtctcggagtgccggaggcccccggggaagagcggggtgccggtgtccgctccgggctcggatgggaagtggtgggaggagcgacccgggatgttcagtctgatggccagttgctgcggctggttcaagcggtggcgggagcctgtcaggttggcaaataaacaagataaagaaggagctttaggagaagctgatgtcattgaatgtctatctctggaaaaattggtcaatgagcacaagtgcctgtgtcagatagaaccatgttcagcaatctcggggtatggaaagaaaattgacaagtccattaaaaaaggcctttattggctgctacatgttattgcaagagactttgatgccttaaatgaacgcatccaaaaagagacaacagagcagcgtgctcttgaggaacaagagaaacaagaaagagctgaacgagtgcgaaaattacgagaagaaagaaaacaaaatgaacaggagcaggctgaactcgatggaaccagtggtctggctgagttggacccagaaccaacgaatcctttccagccaatagcatctgtaatcattgagaatgaaggaaaacttgaaagagagaaaaaaaaccaaaaaatggagaaagacagtgatggctgccacctgaaacataaaatggagcatgagcaaatagagacacaaggccaggttaatcacaatggccaaaaaaataatgaatttggactagtagaaaattataaggaggcattaacacagcagttaaagaatgaagatgagacagaccggccatcattggaatcagctaatggtaaaaagaaaactaagaaactaagaatgaaaaggaaccaccgggtagaaccacttaatatagatgactgtgctcctgagagtccaacgccacccccaccccctcctcctgttggctggggaacccctaaagtcactagacttccaaaacttgagcctcttggtgaaacacatcataatgatttctataggaagccactgcctcccctggctgtgccacagcgacctaacagtgatgctcatgatgtgatctcataaacaagacgtatggaggagttctcttaatatcagcaaggtgaactgggacattcttctttctcagaagaagaaacatcttgtaaattgatgactggggcaagataaccataataattttagtgagaagattaatactcaaggacctgacttgataattacttatttgtgtttttcatggttaaaaaaataaaagaagcacaatgaccagtacatgaaatcagcatttggaccaaattagcaagatttactgttgactctggtttatacatccccactcatgagcatacttctgaaggaaaactttacaaaaagagccaatggactcagcactttctttactatttgttcaatagcctatatttctagatattaaatattttttgtaagatatatgcacatagaagggggacttctaggaatttataaccaaaattttaaaactatttttatatttttttaaatctttaaaaattttaattactgtgatattgattatacaccttttttatagatgatttgtttaaattatatctggaaaatagagttgatttactttcagacatgaactatacaaacaggatatatttatatggcttgaggtatgttttgtaatagcgttgttctttaagtgtacatcgtaatttgacctaatttaaaaataatatattttcgaagtagtagattctcagatctttattctaacaattacatgatttgaaaacagtactcaatgagactggaaataccttttgtacctaaatgttttttaaattaatcaaaatacattctgtgagatactattaaaagtctcagtaaagtcctattttaaaggttagacactttcagagatcaaggtgctccctatactcccttgttccatcagaagctgcagtgactcttttaggtgattctaattctttcatgccttgaaattaaactatgaaattaaaggcagaaaaactggaaaacctactgcaggtccagagacttctgttttacaactgggaaacagcttgtgtactaaagtaatgagaataaaaatgttggcccaaaattacttttataaataaataattccaaaataatttcttaatttaaaatgatagcacttctcttgcacttaagaatggcatccataagattctgtatttggcatttagactaacttctagatgtatatttttaataatagattcataatgttacatttaattgaaaacaaacctttatatccaatgaaaatagtataaacagaatgatttttataccaccttgttaagattggtgcttttggtaacttgtactgacacaacagacatgtgctagtatctgataacattaagtacattttatgtcgtttaatataattatttactttaaaaattgtacttcagaacatcagattttattcacattttttaactcactgaactttaataatcaggtcacctgtactctagtcagcactgtatatattcttggagtttgtacatgggacttagcaaccacactgagtgaggtaaaagcatttgatttcagatctaaaattcgtaacaacctaaatttgagaggtggctgaaatgtgatgaaaagcaatacgaaaagacaatgtaaactttgaaaaggattttagagggaaaattgcatagctttttgtaacatttacttaattttaaaactaaactcatacttttgctatctttttaatatttatctcgtttgggagtatacgtgtttttaaaatttgtgttttctatctgtttactatagtgtagctactggcttcatttaataaaaataaatgattttgaaattaaatataatatagaattcacattttatatagctctctcaaaaattaatttttattccttaagcattttaaaaacattttaaaaaatgttttgtaaatccaggtgtattttaacaattaaatgcctattttgttatatgttatacttttattcttaattctgaattttgacattttcacacaataaaaataatttatatcaa

SEQ ID NO: 239864 - DNA, 1615 bp, Artificial Sequence
  derived and/or modified sequence
gcttttctttagccgggtcccgctaactcggctacggtgtatctgcgtctttggtcaggttgttccttggctaagagggcagtcgtcgcggacccacgcggttagcaaggcttagtgctcgggccggccgccttcacttccctcccggcttttcctcccgacttatccactttaggggcgtctcggagtgccggaggcccccggggaagagcggggtgccggtgtccgctccgggctcggatgggaagtggtgggaggagcgacccgggatgttcagtctgatggccagttgctgcggctggttcaagcggtggcgggagcctgtcagaaaggtgactcttttgatggtgggacttgataatgctggtaaaaccgcaacagcaaagggaatccaaggaggttggcaaataaacaagataaagaaggagctttaggagaagctgatgtcattgaatgtctatctctggaaaaattggtcaatgagcacaagtgcctgtgtcagatagtaaggaaccatgttcagcaatctcggggtatggaaagaaaattgacaagtccattaaaaaaggcctttattggctgctacatgttattgcaagagactttgatgccttaaatgaacgcatccaaaaagagacaacagagcagcgtgctcttgaggaacaagagaaacaagaaagagctgaacgagtgcgaaaattacgagaagaaagaaaacaaaatgaacaggagcaggctgaactcgatggaaccagtggtctggctgagttggacccagaaccaacgaatcctttccagccaatagcatctgtaatcattgagaatgaaggaaaacttgaaagagagaaaaaaaaccaaaaaatggagaaagacagtgatggctgccacctgaaacataaaatggagcatgagcaaatagagacacaaggccaggttaatcacaatggccaaaaaaataatgaatttggactagtagaaaattataaggaggcattaacacagcagttaaagaatgaagatgagacagaccggccatcattggaatcagctaatggtaaaaagaaaactaagaaactaagaatgaaaaggaaccaccgggtagaaccacttaatatagatgactgtgctcctgagagtccaacgccacccccaccccctcctcctgttggctggggaacccctaaagtcactagacttccaaaacttgagcctcttggtgaaacacatcataatgatttctataggaagccactgcctcccctggctgtgccacagcgacctaacagtgatgctcatgatgtgatctcataaacaagacgtatggaggagttctcttaatatcagcaaggtgaactgggacattcttctttctcagaagaagaaacatcttgtaaattgatgactggggcaagataaccataataattttagtgagaagattaatactcaaggacctgacttgataattacttatttgtgtttttcatggttaaaaaaataaaagaagcacaatgaccagtacatgaaatcagcatttggaccaaattagcaagatttactgttgactctggtttatacatccccactcatgagcatacttctgaaggaaaacttt

SEQ ID NO: 239865 - DNA, 966 bp, Artificial Sequence
  derived and/or modified sequence
atgttcagcctgatggccagctgctgcggctggttcaagcgctggagggagcctgtgcggctggccaacaagcaggacaaggagggcgccctgggggaggctgatgtgattgagtgcctgagcctggagaagctggtgaatgagcacaagtgcctgtgccagatcgagccctgcagcgccatcagcggctacggcaagaagattgacaagagcatcaagaagggcctgtactggctgctgcacgtgattgcccgggactttgatgccctgaatgaaagaatccagaaggagaccacagagcagagggccctggaggagcaggagaagcaggagagagctgagcgggtgaggaagctgcgggaggagaggaagcagaatgagcaggagcaggccgagctggatggcaccagcggcctggccgagctggaccctgagcccaccaaccccttccagcccatcgccagcgtcatcattgaaaatgaaggcaagctggagcgggagaagaagaaccagaagatggagaaggacagtgatggctgccacctgaagcacaagatggagcacgagcagatcgagacccagggccaggtgaaccacaacggccagaagaacaatgaatttggcctggtggagaactacaaggaggccctgacccagcagctgaagaatgaagatgaaacagaccggcccagcctggagagcgccaacgggaagaagaagaccaagaagctgaggatgaagaggaaccaccgggtggagcccctgaacattgatgactgtgcccctgagagccccaccccacctcctcctcctcctcctgtgggctggggcacccccaaggtgacccggctgcccaagctggagcccctgggggagacccaccacaatgacttctacaggaagcccctgccccccctggccgtgccccagaggcccaacagtgatgcccatgatgtgatctcctag

SEQ ID NO: 239866 - DNA, 450 bp, Artificial Sequence
  derived and/or modified sequence
atggagaaggacagtgatggctgccacctgaagcacaagatggagcacgagcagatcgagacccagggccaggtgaaccacaacggccagaagaacaatgaatttggcctggtggagaactacaaggaggccctgacccagcagctgaagaatgaagatgaaacagaccggcccagcctggagagcgccaacgggaagaagaagaccaagaagctgaggatgaagaggaaccaccgggtggagcccctgaacattgatgactgtgcccctgagagccccaccccacctcctcctcctcctcctgtgggctggggcacccccaaggtgacccggctgcccaagctggagcccctgggggagacccaccacaatgacttctacaggaagcccctgccccccctggccgtgccccagaggcccaacagtgatgcccatgatgtgatctcctag

SEQ ID NO: 239867 - DNA, 966 bp, Artificial Sequence
  derived and/or modified sequence
atgttcagcctgatggccagctgctgcggctggttcaagcggtggagagaacctgtgcggctggccaataagcaggacaaggagggagctttgggtgaagccgacgtgatcgaatgtttatcactggaaaagctcgtgaacgaacacaagtgcctgtgccagatcgaaccctgctcggccatatccggatacgggaaaaagatcgataagtcaataaaaaagggcttgtattggctcctgcatgtgatcgcgcgagattttgatgccctaaacgagcgaatacaaaaggaaactactgaacaacgggccctcgaggaacaggagaagcaagagcgggccgaaagagttcggaaacttagagaggagcgcaagcagaacgagcaggagcaggcggaactggatgggacttccggtcttgccgagctagaccccgaacccactaatccttttcaacccattgcaagcgtgatcatcgagaatgaaggcaagctggagcgcgaaaaaaagaatcaaaaaatggagaaggattccgatggctgtcaccttaaacacaaaatggagcacgagcagatcgaaacgcagggacaagtgaatcacaacggacagaagaataacgagttcgggctggtggagaactataaagaggctttaactcagcaactcaagaacgaagacgaaaccgacaggccaagccttgagtccgctaacggcaagaaaaagacaaaaaagctccgcatgaagcggaatcaccgggtggagcccttaaacatcgatgattgcgcacccgagagccctactcctccgcctccacctccacctgtgggctggggaacacctaaagtaaccagattaccgaagctggagcctctgggcgaaacccaccacaatgacttttatagaaaaccactgcccccgctggcagttccccagaggcctaactcagatgcccacgacgtgatatcctag

SEQ ID NO: 239868 - DNA, 450 bp, Artificial Sequence
  derived and/or modified sequence
atggagaaggacagcgacggctgccacctgaagcacaagatggagcatgaacagatcgaaactcaggggcaggtgaaccacaatggacaaaaaaacaatgagtttggcctggttgagaattataaagaggccttaactcagcagctgaagaatgaagacgagaccgatcgcccctcgttagaatccgcgaacgggaagaagaaaactaaaaaattaagaatgaagcggaaccaccgcgtggaacctctgaatatagatgactgtgccccagagagtcccacaccaccaccaccaccaccccccgtagggtgggggacccctaaagtcacaagattgcctaagttggaacccctcggagagacacaccacaacgacttctacagaaagccgctacctccactggctgttccccagcgccccaactccgatgctcacgatgtgatttcttag

SEQ ID NO: 239869 - DNA, 966 bp, Artificial Sequence
  derived and/or modified sequence
atgttttcactcatggctagttgttgtgggtggtttaaacgctggcgggagccagtaaggttggctaataagcaagacaaggaaggggcactgggagaggccgatgttatcgagtgtctgagtctggagaagctagtcaatgaacacaaatgtctgtgccagatcgagccatgttctgccattagtggatacggcaagaagattgacaaaagcatcaagaaggggctttactggctgctccacgtcattgctcgagactttgacgcgctaaatgagaggatccagaaggaaaccacagagcagcgcgcactcgaggagcaggagaagcaagagcgcgctgaacgcgttcgcaagctgagggaagagagaaagcagaacgagcaggagcaagcagaattagacgggacatcggggttagccgaactcgaccctgagccgaccaaccccttccagcctatcgccagcgtgataattgaaaacgagggaaagttagagagagaaaaaaagaatcagaaaatggaaaaagacagtgatggctgtcacctaaaacacaaaatggagcacgagcagatcgaaacgcaggggcaggtgaatcacaacggtcagaagaataacgagtttggccttgtggaaaattacaaggaggccttgacccagcagttgaaaaatgaggacgaaaccgaccgcccaagcctagaatccgccaatgggaagaagaaaaccaagaaactccgcatgaaacggaaccatagagtggagccattaaacattgatgactgtgccccagaatcaccaactccccctcctcctcctccacccgtgggatgggggacccccaaggttacacggttacctaaactcgagccccttggagaaactcaccacaatgacttctaccgcaaacccctcccaccactcgccgttccccagaggcccaactcagacgcacatgacgtaatttcttag

SEQ ID NO: 239870 - DNA, 450 bp, Artificial Sequence
  derived and/or modified sequence
atggaaaaagacagcgatggctgccacttgaagcataagatggaacatgaacaaattgaaacgcagggtcaggtgaaccataacgggcagaagaacaacgaatttggtcttgtagaaaattacaaggaagccctcacccaacagttaaaaaacgaagatgagaccgatcgcccttcattagagtcagctaatggtaagaagaaaacaaagaaattgcgcatgaagcgtaaccatagggtcgaaccattgaacattgacgattgtgccccagagtcacccacccctcctcccccacccccaccagtcgggtgggggactcctaaagtgacccggctccccaaactagaacctctgggcgaaacgcatcacaacgatttctataggaaaccactcccaccccttgcggtacctcagagacctaactcagacgctcatgacgtgatcagctag

SEQ ID NO: 239871 - DNA, 966 bp, Artificial Sequence
  derived and/or modified sequence
atgttcagcctgatggccagctgctgcggctggttcaagagatggagagagcccgtgagactggccaacaagcaggacaaggagggcgccctgggcgaggccgacgtgatcgagtgcctgagcctggagaagctggtgaacgagcacaagtgcctgtgccagatcgagccctgcagcgccatcagcggctacggcaagaagatcgacaagagcatcaagaagggcctgtactggctgctgcacgtgatcgccagagacttcgacgccctgaacgagagaatccagaaggagaccaccgagcagagagccctggaggagcaggagaagcaggagagagccgagagagtgagaaagctgagagaggagagaaagcagaacgagcaggagcaggccgagctggacggcaccagcggcctggccgagctggaccccgagcccaccaaccccttccagcccatcgccagcgtgatcatcgagaacgagggcaagctggagagagagaagaagaaccagaagatggagaaggacagcgacggctgccacctgaagcacaagatggagcacgagcagatcgagacccagggccaggtgaaccacaacggccagaagaacaacgagttcggcctggtggagaactacaaggaggccctgacccagcagctgaagaacgaggacgagaccgacagacccagcctggagagcgccaacggcaagaagaagaccaagaagctgagaatgaagagaaaccacagagtggagcccctgaacatcgacgactgcgcccccgagagccccacccccccccccccccccccccccgtgggctggggcacccccaaggtgaccagactgcccaagctggagcccctgggcgagacccaccacaacgacttctacagaaagcccctgccccccctggccgtgccccagagacccaacagcgacgcccacgacgtgatcagctag

SEQ ID NO: 239872 - DNA, 450 bp, Artificial Sequence
  derived and/or modified sequence
atggagaaggacagcgacggctgccacctgaagcacaagatggagcacgagcagatcgagacccagggccaggtgaaccacaacggccagaagaacaacgagttcggcctggtggagaactacaaggaggccctgacccagcagctgaagaacgaggacgagaccgacagacccagcctggagagcgccaacggcaagaagaagaccaagaagctgagaatgaagagaaaccacagagtggagcccctgaacatcgacgactgcgcccccgagagccccacccccccccccccccccccccccgtgggctggggcacccccaaggtgaccagactgcccaagctggagcccctgggcgagacccaccacaacgacttctacagaaagcccctgccccccctggccgtgccccagagacccaacagcgacgcccacgacgtgatcagctag

SEQ ID NO: 239873 - protein, 579 aa, Artificial Sequence
  derived and/or modified sequence
MNAIVALCHFCELHGPRTLFCTEVLHAPLPQGDGNEDSPGQGEQAEEEEGGIQMNSRMRAHSPAEGASVESSSPGPKKSDMCEGCRSLAAGHPGYISHDKETSIKYVSHQHPSHPQLFSIVRQACVRSLSCEVCPGREGPIFFGDEQHGFVFSHTFFIKDSLARGFQRWYSIITIMMDRIYLINSWPFLLGKVRGIIDELQGKALKVFEAEQFGCPQRAQRMNTAFTPFLHQRNGNAARSLTSLTSDDNLWACLHTSFAWLLKACGSRLTEKLLEGAPTEDTLVQMEKLADLEEESESWDNSEAEEEEKAPVLPESTEGRELTQGPAESSSLSGCGSWQPRKLPVFKSLRHMRQVLGAPSFRMLAWHVLMGNQVIWKSRDVDLVQSAFEVLRTMLPVGCVRIIPYSSQYEEAYRCNFLGLSPHVQIPPHVLSSEFAVIVEVHAAARSTLHPVGCEDDQSLSKYEFVVTSGSPVAADRVGPTILNKIEAALTNQNLSVDVVDQCLVCLKEEWMNKVKVLFKFTKVDSRPKEDTQKLLSILGASEEDNVKLLKFWMTGLSKTYKSHLMSTVRSPTASESRN

SEQ ID NO: 239874 - protein, 153 aa, Artificial Sequence
  derived and/or modified sequence
MNSRMRAHSPAEGASVESSSPGPKKSDMCEGCRSLAAGHPGYISHDKETSIKYVSHQHPSHPQLFSIVRQACVRSLSCEVCPGREGPIFFGDEQHGFVFSHTFFIKDSLARGFQRWYSIITIMMDRIYLINSWPFLLGKVRGIIDELQGKALK

SEQ ID NO: 239875 - DNA, 1740 bp, Artificial Sequence
  derived and/or modified sequence
atgaacgccatcgtggccctgtgccacttctgcgagctgcacggccccagaaccctgttctgcaccgaggtgctgcacgcccccctgccccagggcgacggcaacgaggacagccccggccagggcgagcaggccgaggaggaggagggcggcatccagatgaacagcagaatgagagcccacagccccgccgagggcgccagcgtggagagcagcagccccggccccaagaagagcgacatgtgcgagggctgcagaagcctggccgccggccaccccggctacatcagccacgacaaggagaccagcatcaagtacgtgagccaccagcaccccagccacccccagctgttcagcatcgtgagacaggcctgcgtgagaagcctgagctgcgaggtgtgccccggcagagagggccccatcttcttcggcgacgagcagcacggcttcgtgttcagccacaccttcttcatcaaggacagcctggccagaggcttccagagatggtacagcatcatcaccatcatgatggacagaatctacctgatcaacagctggcccttcctgctgggcaaggtgagaggcatcatcgacgagctgcagggcaaggccctgaaggtgttcgaggccgagcagttcggctgcccccagagagcccagagaatgaacaccgccttcacccccttcctgcaccagagaaacggcaacgccgccagaagcctgaccagcctgaccagcgacgacaacctgtgggcctgcctgcacaccagcttcgcctggctgctgaaggcctgcggcagcagactgaccgagaagctgctggagggcgcccccaccgaggacaccctggtgcagatggagaagctggccgacctggaggaggagagcgagagctgggacaacagcgaggccgaggaggaggagaaggcccccgtgctgcccgagagcaccgagggcagagagctgacccagggccccgccgagagcagcagcctgagcggctgcggcagctggcagcccagaaagctgcccgtgttcaagagcctgagacacatgagacaggtgctgggcgcccccagcttcagaatgctggcctggcacgtgctgatgggcaaccaggtgatctggaagagcagagacgtggacctggtgcagagcgccttcgaggtgctgagaaccatgctgcccgtgggctgcgtgagaatcatcccctacagcagccagtacgaggaggcctacagatgcaacttcctgggcctgagcccccacgtgcagatccccccccacgtgctgagcagcgagttcgccgtgatcgtggaggtgcacgccgccgccagaagcaccctgcaccccgtgggctgcgaggacgaccagagcctgagcaagtacgagttcgtggtgaccagcggcagccccgtggccgccgacagagtgggccccaccatcctgaacaagatcgaggccgccctgaccaaccagaacctgagcgtggacgtggtggaccagtgcctggtgtgcctgaaggaggagtggatgaacaaggtgaaggtgctgttcaagttcaccaaggtggacagcagacccaaggaggacacccagaagctgctgagcatcctgggcgccagcgaggaggacaacgtgaagctgctgaagttctggatgaccggcctgagcaagacctacaagagccacctgatgagcaccgtgagaagccccaccgccagcgagagcagaaactag

SEQ ID NO: 239876 - DNA, 1740 bp, Artificial Sequence
  derived and/or modified sequence
atgaatgccatcgtagccctgtgtcatttctgcgaacttcacggcccccgcacactgttttgcacggaagtgttacacgctcctctccctcagggcgatggtaacgaagacagtcccggccagggagagcaggctgaggaagaggaagggggaatacagatgaattctcgtatgagggcacactctcctgctgagggcgcctccgtggagtcatcttcccccggacccaagaaaagcgacatgtgtgaaggctgccggtccctggctgcggggcaccccggctacatttctcacgataaggagacttctattaagtacgtgtcgcatcagcaccccagccatcctcagttgttctcgattgtcagacaagcatgtgtacgctctctgagttgtgaggtatgccctggtcgcgaaggaccaatattctttggcgatgagcagcatggcttcgtgttctcgcacacttttttcattaaagactcgcttgctaggggctttcagcggtggtattccatcataaccattatgatggaccgcatctatcttattaattcctggccgtttctcctgggcaaagtgaggggaatcatcgacgagctccaagggaaggccctaaaggtgttcgaggccgaacagtttggttgcccacagagagcccagcggatgaacactgcttttactccctttcttcaccagaggaatggaaacgctgcgcggtcactgacctcactcacctctgacgataatctatgggcttgtctacacaccagtttcgcgtggctcttgaaagcctgtgggagccgactgaccgagaagctactcgagggcgcccctacggaggatactctggttcagatggagaaactggccgacctggaagaggagtcagagtcatgggataactctgaggctgaggaggaagagaaagctcctgtcctgcctgagtccaccgagggcagagagctgacccaggggcctgcagaaagttctagtctttccgggtgtggcagctggcagcccagaaaactgcccgtctttaagagtctgcggcatatgaggcaagtgcttggggctccctcattcaggatgttagcctggcacgtgctgatgggaaaccaagtgatttggaaaagtagggatgttgatttggtgcaatctgccttcgaagtgctgaggaccatgctgccagtgggctgtgttaggatcataccatattcctctcagtacgaggaggcatatcgttgcaacttcctgggtttgtcaccacacgtgcagatcccccctcacgtactgagctctgaatttgctgtcatcgtggaagtgcatgctgccgctagatcgaccctgcatccagttggctgcgaagacgatcaaagtttgtctaagtacgaattcgtcgtgacgtcaggctcccccgtggctgctgatagggtgggccctaccattcttaacaagatagaggcagctctgaccaaccagaatttgtccgttgacgttgttgatcagtgtttagtctgcttgaaggaggagtggatgaacaaagtaaaagtgttgttcaagttcacgaaagtggactccaggccaaaagaggatactcagaagttgctctccattttgggcgcttcagaggaggacaacgtgaagctcttgaaattctggatgacaggactctctaaaacatataaaagtcacctgatgagcaccgtcaggtctcccaccgcctcagaatcaagaaactag

SEQ ID NO: 239877 - DNA, 3638 bp, Artificial Sequence
  derived and/or modified sequence
ggtcgctcctggttctgccagctcccctgagagcctgaacccgggcttgagagcctcgccaccccgggtgacatccctgccgtgggcttgggggctctgggtgtgattccgccggtccgggtcccgcagcgaccacctacccagcgcagtcaggggcggggctgggacccagagcgggaccccggctgccgagtccaggtgtcccgcgggcctcgatttggggagcagaaaacgccaggtcttcaagggtgtctgccaccaccatgcctgacccatttggcagcagcctcgtgtgtggtggtctggtgtggacggtggaagcgtgattctgctgagtgtcagtgtgaccactcgtgctcagccgtatctcagcaggaggacaggtgccggagcagctcgtgcagctaagcagccaactgcagaaacgtcaggcctgttgcagtctccaaggcaccatgaatgccatcgtggctctctgccacttctgcgagctccacggcccccgcactctcttctgcacggaggtgctgcacgccccacttcctcaaggggatgggaatgaggacagtcctggccagggtgagcaggcggaagaagaggaaggtggcattcagatgaacagtcggatgcgtgcgcacagccccgcagagggggccagcgtcgagtccagcagcccggggcccaaaaagtcggacatgtgcgagggctgccggtcacttgctgcagggcacccgggatatatcagccatgataaagagacctccattaaatacgtcagccaccagcaccccagccacccccagctcttcagcattgtccgccaggcctgtgtccggagcctgagctgtgaggtctgccctggccgtgaaggccccatcttcttcggagatgagcagcacggctttgtgttcagccacaccttcttcatcaaggacagcctggccaggggcttccagcgctggtacagcatcatcaccatcatgatggaccggatctacctcatcaactcctggcccttcctgctggggaaggtccggggaatcatcgatgagctccagggcaaggcgctcaaggtgtttgaggcagagcagtttggatgcccacagcgtgctcagaggatgaacacagccttcacgccattcctacaccagaggaacggcaacgccgcccgctcgctgacatcgctgacaagtgatgacaacctgtgggcgtgcctgcacacctcctttgcctggctcctgaaggcgtgtggcagccggctgaccgagaagctcctggaaggtgctccgaccgaggataccttggtccagatggagaagctcgctgatttagaagaggaatcagaaagctgggacaactctgaggctgaagaggaggagaaagcccctgtgttgccagagagtacagaagggcgggagctgacccagggcccggcagagtcctcctctctctcaggctgtgggagctggcagccccggaagctgccagtcttcaagtccctccggcacatgaggcaggtcctgggtgccccttctttccgcatgctggcctggcacgttctcatggggaaccaggtgatctggaaaagcagagacgtggacctcgtccagtcagcttttgaagtacttcggaccatgcttcccgtgggctgcgtccgcatcatcccatacagcagccagtacgaggaggcctatcggtgcaacttcctggggctcagcccgcacgtgcagatccccccccacgtgctctcctcagagtttgctgtcatcgtggaggtccacgcagccgcacgttccaccctccaccctgtggggtgtgaggatgaccagtctctcagcaagtacgagtttgtggtgaccagtgggagccctgtagctgcagaccgagtgggccccaccatcctgaataagattgaagcggctctgaccaaccagaacctgtctgtggatgtggtggaccagtgcctcgtctgcctcaaggaggagtggatgaacaaagtgaaggtgctttttaagttcaccaaggtggacagtcgacccaaagaggacacacagaagctgctgagcatcctgggtgcgtccgaggaggacaatgtcaagctgctgaagttctggatgactggcctgagcaagacctacaagtcacacctcatgtccacggtccgcagccccacagcctcggagtctcggaactgacccgtcacacacacctgcctaaagacagggatggctgtccacaggatcctccagccccgtgagagggactgtcccttgagtttctcaactgctggaaggagctgtgtcccagcaaggaagggaaaccatcagggctgggctcggccctgtcaggtttggggcctgtgtgcttcccagactctccctccagccgttggaatcgctgaagatggcaatgaaaggcggagggatgatgggctctctctgtgttcaaactccttggagagacgactaggaggacagcttgcctcccaggccccttgtggacttagactcaaaacccgcaggagaaacaggtccgactcagtatgcagtcgcaataacatgtctgctcccgaggttaacattcaagcgtttctactttgaaattcagcaagagtttctgggccttatgtttgagggtaccttttgctgcagttgtgaatattcagtacattgccagctcttggtcactgagtgattgagttagggctccgcaagagactttggggagtgaagtggatctcttcctcatcttttggtcctctgaaatgtgtgttctgaagccatggggctcgtcttctggggtgttcccctgcaggtgctggtgaaggtaacctggggcttaatgatggagtccctgatcatttttgcacaagacaggttgctgaggggtcggcaagcatctgacttgcccaatcccctggatatggtgagccccgccatgcttttattctgtatcgcttttgtctttattgctgctttcaacatttacgtttggttacagttaactattttcggagtgtggtgattgaagacaatttcatcatcccactgtacttttttttttgagagggagtttcactcttgttgcccaggctggagtgcaatggcacgatcttggctcactgcaacctctgcctcctgggttcaagcaattctcctgcctcagcctccagagtagctggaactacaggtgcccgccactatgcccagctaatttttgtattttttagtagagacggggtttcaccgtgttggccgggctggtctcaaactcctgacctcaggtgatccacccacctcagcctcccaaagtgctgggattacaagcgtgagccactgtgcctggcccttttttttttttttttttttttttttaaagagatggcatcttgctatgtcgtccaggctggtcttgaactcctgagttcaagcagtcctcctgcttcaacatacagctacaggtaccccccactatacatttttaataaggattcatggctcagagggattttctgatggttttgctgatttgtttctagtttttttgtgtttatatttaacatgaagaccaagtttatataactaggtatctgtataatgcaacaacattggaacacaataaagatgtatttttgtaaa

SEQ ID NO: 239878 - DNA, 1740 bp, Artificial Sequence
  derived and/or modified sequence
atgaatgccatcgtggccctgtgccacttctgtgagctgcacggccccaggaccctcttctgcacagaggtgctgcacgcccccctgccccagggagatggaaatgaagacagccctggccagggcgagcaggccgaggaggaggagggcggcatccagatgaacagcaggatgagggcccacagccctgctgagggcgcctctgtggagagcagcagccctggccccaagaagagtgacatgtgtgagggctgccgcagcctggccgccggccaccctggctacatcagccatgacaaggagaccagcatcaagtatgtgagccaccagcaccccagccacccccagctgttcagcatcgtgcggcaggcctgtgtgcgcagcctgagctgtgaggtgtgccccggccgggagggccccatcttctttggagatgagcagcacggctttgtgttcagccacaccttcttcatcaaggacagcctggcccggggcttccagcgctggtacagcatcatcaccatcatgatggaccgcatctacctgatcaacagctggcccttcctgctgggcaaggtgcggggcatcattgatgagctgcagggcaaggccctgaaggtgtttgaggccgagcagtttggctgcccccagagggcccagaggatgaacacagccttcacccccttcctgcaccagagaaatggaaatgctgcccggagcctgaccagcctgaccagtgatgacaacctgtgggcctgcctgcacaccagctttgcctggctgctgaaggcctgtggcagccggctgacagagaagctgctggagggcgcccccacagaggacaccctggtgcagatggagaagctggccgacctggaggaggagagcgagagctgggacaacagcgaggccgaggaggaggagaaggcccctgtgctgcctgagagcacagagggccgggagctgacccagggccctgctgagagcagcagcctgagcggctgcggctcctggcagcccaggaagctgcccgtcttcaagagcctgcggcacatgaggcaggtgctgggcgcccccagcttcaggatgctggcctggcacgtgctgatgggcaaccaggtgatctggaagagcagagatgtggacctggtgcagagcgcctttgaggtgctgcggaccatgctgcctgtgggctgtgtgcgcatcatcccctacagcagccagtatgaggaggcctaccgctgcaacttcctgggcctgagcccccacgtgcagatcccccctcatgtgctgagcagcgagtttgctgtgattgtggaggtgcatgctgctgcccggagcaccctgcaccctgtgggctgtgaagatgaccagagcctgagcaaatatgaatttgtggtgaccagcggcagccctgtggccgctgacagagtgggccccaccatcctgaacaagattgaggccgccctgaccaaccagaacctgtctgtggatgtggtggaccagtgcctggtgtgcctgaaggaggagtggatgaacaaggtgaaggtgctcttcaagttcaccaaggtggacagccggcccaaggaggacacccagaagctgctgagcatcctgggcgccagcgaggaggacaacgtgaagctgctgaagttctggatgacaggcctgagcaagacctacaagagccacctgatgagcacagtgcgcagccccacagccagcgagagcaggaactag

SEQ ID NO: 239879 - DNA, 1740 bp, Artificial Sequence
  derived and/or modified sequence
atgaacgccatcgtggccctgtgccacttctgcgagctgcacggcccaagaactttgttctgtaccgaggtgttgcacgccccactgccccagggggatggaaacgaggattctccaggtcagggcgagcaggccgaagaagaagaaggagggattcaaatgaatagccgaatgagggcacattccccagcggaaggcgcgtcagtggaatcctcatcccctggccctaaaaagagcgatatgtgcgagggctgtcgcagcctcgccgctggacatccaggctacatttctcacgacaaagagaccagtatcaaatatgtgtcccatcagcatccttcacatccgcaattgtttagcattgtcagacaagcctgcgttcggtctctcagctgtgaggtgtgtccaggacgagaaggaccaattttttttggtgatgagcagcacgggttcgtgttttcgcatactttttttattaaagatagtctggccagggggttccagcgctggtacagcattatcacgataatgatggacagaatctatcttatcaattcatggccctttctgctaggaaaagtaagaggtataattgacgaactgcagggcaaggcccttaaagtattcgaggcagaacaattcggatgccctcagcgcgctcagagaatgaataccgccttcacacccttccttcaccagcggaacggcaatgcagcaagatctttaactagtctaacttctgatgataacctctgggcctgtctgcacactagcttcgcgtggctgcttaaggcttgtggatcgcgtctcacagaaaagttgctggagggagcaccaactgaggatactctggtgcagatggaaaaattggcagacttggaagaagaatccgaaagctgggataattcagaagctgaagaagaggagaaggccccagtactgcccgaatcaacggagggtcgcgagcttacgcagggaccagcagagtcttcttcactgagcggttgtggctcctggcagcctcgcaagctgcccgtctttaaaagcctgcgccacatgcgacaagtacttggcgccccctcttttagaatgctcgcatggcatgtcctgatgggaaaccaagttatttggaaatctagggacgtcgacttagtccagtcagccttcgaggtgctaaggaccatgctccccgtcggctgcgttaggatcatcccgtattcaagccagtatgaagaagcctacagatgtaatttcctgggactgagccctcatgtgcagatccctcctcacgtgctgtcctcagagttcgctgttattgtggaggtccacgcagcagcccgcagcacactgcatccggtcggttgtgaagacgaccagtcgctcagcaagtatgagtttgtggtgacgtccggatctccagtagccgctgaccgcgttggacctaccatcttgaataagatcgaggcagcactgacaaaccaaaacctgtctgtggacgtggtggatcagtgcctggtctgtcttaaggaagagtggatgaacaaggtcaaagtgctgtttaaattcactaaggtggatagtagacccaaggaggatactcaaaaactgttatccatcctgggagcaagtgaggaggataatgtgaagctgctgaagttctggatgaccgggttatccaagacttataaatcacacctgatgtccacggtccgttccccaacagccagcgagtctcgcaactag

SEQ ID NO: 239880 - DNA, 1740 bp, Artificial Sequence
  derived and/or modified sequence
atgaacgccattgttgctctttgtcatttttgcgagttgcacggacccaggaccctgttctgtacggaggtacttcacgcgccattaccacagggagatgggaatgaagactctccaggccagggcgagcaagccgaggaggaagagggaggcatacagatgaacagccggatgcgcgcacatagtcccgcagagggggcttcagtggagagctcttctcctggcccaaaaaaatcagatatgtgcgaaggctgcaggtcgctggcggctggtcatcctggctacatttcccatgataaggaaacctcaattaagtacgtgtctcaccagcacccctctcatcctcagttattcagcatcgtcagacaagcgtgtgttcggagtttatcttgtgaagtgtgccccggtcgagagggccctatttttttcggcgacgagcaacacggattcgtgtttagtcatacgttctttatcaaagattcacttgctcgtggttttcagcggtggtatagcatcatcactatcatgatggacaggatctacttaattaacagctggcctttcctactcgggaaagtccgtggcatcatagatgagcttcagggcaaagctctgaaagttttcgaggcagaacaatttggctgccctcagagggctcagcggatgaatacggccttcacgcccttcttacaccagcgcaacgggaacgctgcccgatccttgacttctcttaccagcgatgacaacctctgggcctgtttgcatacatctttcgcctggttgctgaaggcctgcggttcccgactgacggaaaaattacttgagggagctcccacagaggataccctggtgcagatggagaagctggctgaccttgaggaggaaagtgaatcttgggacaactctgaggctgaggaggaggagaaggcgcctgtgcttcctgaatcaaccgagggaagagagctcactcaggggcctgcggaatccagtagtctgtctggctgtggctcatggcagccaagaaagctgccggtctttaaaagcctgaggcacatgagacaggtccttggcgcaccatctttccgcatgctggcctggcacgtactaatggggaatcaggttatttggaaatccagggatgtcgatctggtccagtcagcttttgaagtactgcgcactatgttgcctgtcggctgcgtccgaatcataccctactccagccagtacgaggaagcgtatcgttgcaatttcctcggtctatctccacatgtacagatccctcctcatgtgctctccagcgaattcgccgtgatagttgaagtacacgccgctgcaaggagcacactgcatcccgtcggatgtgaagacgatcagagtttaagtaagtatgaattcgtcgtgacatcagggagccctgtggctgccgatcgcgttggcccaaccatcttgaacaagatcgaggctgccctcacgaatcagaacttatctgtggatgtcgtggaccagtgcctcgtgtgtctcaaagaggaatggatgaataaggtgaaagttctgtttaagtttaccaaggtcgactcccgaccgaaagaagatacacagaaactgttgtctattttgggagctagcgaggaggataacgtgaaattgctgaagttttggatgaccggactgagtaaaacctacaaaagtcacctgatgtctaccgttcgctccccgaccgcctcagaatctaggaattag

SEQ ID NO: 239881 - protein, 63 aa, Artificial Sequence
  derived and/or modified sequence
MEGAGAGSGFRKELVSRLLHLHFKDDKTKEAAVRGVRQAQAEDALRVDVDQLEKVLPQLLLDF

SEQ ID NO: 239882 - DNA, 192 bp, Artificial Sequence
  derived and/or modified sequence
atggagggcgccggcgccggcagcggcttcagaaaggagctggtgagcagactgctgcacctgcacttcaaggacgacaagaccaaggaggccgccgtgagaggcgtgagacaggcccaggccgaggacgccctgagagtggacgtggaccagctggagaaggtgctgccccagctgctgctggacttctag

SEQ ID NO: 239883 - DNA, 192 bp, Artificial Sequence
  derived and/or modified sequence
atggagggggccggcgctggctcagggtttcgtaaggagctagtgagcaggcttctgcatctgcactttaaagatgataagacaaaggaggcagccgtgcggggggtgagacaggctcaagccgaagatgccctcagggttgacgtggatcaattggaaaaagtattaccacagttgctgctcgacttctag

SEQ ID NO: 239884 - DNA, 192 bp, Artificial Sequence
  derived and/or modified sequence
atggagggcgctggggccggcagcggcttcaggaaggagctggtgtcccggctgctgcacctgcacttcaaggatgacaagaccaaggaggccgctgtgcggggcgtgcggcaggcccaggccgaggatgccctgcgggtggatgtggaccagctggagaaggtgctgccccagctgctgctggacttctag

SEQ ID NO: 239885 - DNA, 192 bp, Artificial Sequence
  derived and/or modified sequence
atggagggcgccggcgccggcagcggcttccggaaggagctggtgagtcggctgctccacttacatttcaaggacgacaaaactaaggaagcggccgtgaggggagtgcgccaggcacaagccgaagacgctctacgcgtggacgttgaccaactcgagaaagtgctgcctcagcttttgctggacttctag

SEQ ID NO: 239886 - DNA, 192 bp, Artificial Sequence
  derived and/or modified sequence
atggagggtgctggcgctggcagcggatttcggaaggagctggtgagcaggttactgcacctgcactttaaggacgataaaaccaaagaggccgctgttaggggggttaggcaggcacaggcggaagatgcactgcgggtggatgttgaccagctggagaaagtactgccccagctcctgctggacttctag

SEQ ID NO: 239887 - DNA, 751 bp, Artificial Sequence
  derived and/or modified sequence
ctcattggctggaggcgcggggcggggttccggtgggcgcgcgttgaggctgcggtcatggagggagcaggagctggatccggcttccggaaggagctggtgagcaggctgctgcacctgcacttcaaggatgacaagaccaaagaagcagcagtccgcggcgtgcggcaggcccaggcagaagacgcgctccgtgtggacgtggaccagctggagaaggtgcttccgcagctgctcctggacttctagggatctcagccgtggctgaggccacccccagaggagcccctggtccacagaagcaggccttgtgtttccagcggcctctgataagaggcagggaaggacctgaaggatttggagttgattcaaacaagatctctgggagtctccagcctgtgcagaaggggcaggactgcagtgcactgcgggccttggagtgtccagtggggacactggtgtgggaaggggcagcacctggggagtccctgcctctcctccctgggacaatagtgtgcatgccacccggggtcctacaggcaggtgctgggaaaggcctggccagcaggtagcctgtgtgtttgacaaacagcagctggcagcgctgcctcctgcccacattcctgccacccgacatcaaagctggcgtgtgacctttccagccatgcgatattccccttggaagatgcttccccaggctataaatttgttctcacaaagcaacatcaataaatcaaaactgtctctccca

SEQ ID NO: 239888 - protein, 465 aa, Artificial Sequence
  derived and/or modified sequence
MTTIPRKGSSHLPGSLHTCKLKLQEDRRQQEKSVIAQPIFVFEKGEQTFKRPAEDTLYEAAEPECNGFPTKRVRSSSFTFHITDSQSQGVRKNNVFMTSALVQSSVDIKSAEQGPVKHSKHVIRPAILQLPQARSCAKVRKTFGHKALESCKTKEKTNNKISEGNSYLLSENLSRARISVQLSTNQDFLGATSVGCQPNEDKCSFKSCSSNFVFGENMVERVLGTQKLTQPQLENDSYAKEKPFKSIPKFPVNFLSSRTDSIKNTSLIESAAAFSSQPSRKCLLEKIDVITGEETEHNVLKINCKLFIFNKTTQSWIERGRGTLRLNDTASTDCGTLQSRLIMRNQGSLRLILNSKLWAQMKIQRANHKNVRITATDLEDYSIKIFLIQASAQDTAYLYAAIHHRLVALQSFNKQRDVNQAESLSETAQQLNCESCDENEDDFIQVTKNGSDPSSWTHRQSVACS

SEQ ID NO: 239889 - protein, 108 aa, Artificial Sequence
  derived and/or modified sequence
MTTIPRKGSSHLPGSLHTCKLKLQEDRRQQEKSVIAQPIFVFEKGEQTFKRPAEDTLYEAAEPECNGFPTKRVRSSSFTFHITDSQSQGVRKNNVFMTSALVQSSVDI

SEQ ID NO: 239890 - DNA, 1398 bp, Artificial Sequence
  derived and/or modified sequence
atgaccaccatccccagaaagggcagcagccacctgcccggcagcctgcacacctgcaagctgaagctgcaggaggacagaagacagcaggagaagagcgtgatcgcccagcccatcttcgtgttcgagaagggcgagcagaccttcaagagacccgccgaggacaccctgtacgaggccgccgagcccgagtgcaacggcttccccaccaagagagtgagaagcagcagcttcaccttccacatcaccgacagccagagccagggcgtgagaaagaacaacgtgttcatgaccagcgccctggtgcagagcagcgtggacatcaagagcgccgagcagggccccgtgaagcacagcaagcacgtgatcagacccgccatcctgcagctgccccaggccagaagctgcgccaaggtgagaaagaccttcggccacaaggccctggagagctgcaagaccaaggagaagaccaacaacaagatcagcgagggcaacagctacctgctgagcgagaacctgagcagagccagaatcagcgtgcagctgagcaccaaccaggacttcctgggcgccaccagcgtgggctgccagcccaacgaggacaagtgcagcttcaagagctgcagcagcaacttcgtgttcggcgagaacatggtggagagagtgctgggcacccagaagctgacccagccccagctggagaacgacagctacgccaaggagaagcccttcaagagcatccccaagttccccgtgaacttcctgagcagcagaaccgacagcatcaagaacaccagcctgatcgagagcgccgccgccttcagcagccagcccagcagaaagtgcctgctggagaagatcgacgtgatcaccggcgaggagaccgagcacaacgtgctgaagatcaactgcaagctgttcatcttcaacaagaccacccagagctggatcgagagaggcagaggcaccctgagactgaacgacaccgccagcaccgactgcggcaccctgcagagcagactgatcatgagaaaccagggcagcctgagactgatcctgaacagcaagctgtgggcccagatgaagatccagagagccaaccacaagaacgtgagaatcaccgccaccgacctggaggactacagcatcaagatcttcctgatccaggccagcgcccaggacaccgcctacctgtacgccgccatccaccacagactggtggccctgcagagcttcaacaagcagagagacgtgaaccaggccgagagcctgagcgagaccgcccagcagctgaactgcgagagctgcgacgagaacgaggacgacttcatccaggtgaccaagaacggcagcgaccccagcagctggacccacagacagagcgtggcctgcagctag

SEQ ID NO: 239891 - DNA, 327 bp, Artificial Sequence
  derived and/or modified sequence
atgaccaccatccccagaaagggcagcagccacctgcccggcagcctgcacacctgcaagctgaagctgcaggaggacagaagacagcaggagaagagcgtgatcgcccagcccatcttcgtgttcgagaagggcgagcagaccttcaagagacccgccgaggacaccctgtacgaggccgccgagcccgagtgcaacggcttccccaccaagagagtgagaagcagcagcttcaccttccacatcaccgacagccagagccagggcgtgagaaagaacaacgtgttcatgaccagcgccctggtgcagagcagcgtggacatctag

SEQ ID NO: 239892 - DNA, 1398 bp, Artificial Sequence
  derived and/or modified sequence
atgacaactattcctcgcaagggatcttcgcaccttccggggagcttgcatacttgtaaattgaaactgcaagaagatagacgccaacaggaaaagagcgtgattgcacagcctatctttgtattcgaaaaaggagagcagacctttaagcgccctgcggaagacacgctctacgaggcagctgagcccgagtgcaatgggttcccaacgaaaagggttcgttcaagctccttcacgtttcatattacagacagtcagtcccagggcgtccgcaagaataatgtgtttatgacgagcgctctcgtccaaagctcagtcgatatcaaatcagccgaacaaggaccggtgaaacactccaaacacgtgattcgccccgccatactacagctgccccaggcacggtcctgcgccaaggttcgaaagacgttcggtcacaaggccttagagtcctgcaaaacaaaggagaaaaccaacaataagataagcgagggaaacagctatctgctatccgagaatttaagcagggccaggatttccgtccagctgtcaacaaatcaagactttcttggagcaacctcggtgggatgccagcctaacgaagacaaatgctcttttaagagttgcagtagcaatttcgtgttcggcgaaaacatggttgagcgagtattaggaacccagaaattgactcagccacagctggaaaacgactcctacgccaaggagaaaccctttaagtctatccctaaatttcctgttaacttccttagctctcgcaccgactccatcaagaacacatcactgatcgagagcgcggcagccttctcttcacagccatctcgtaaatgccttctggaaaagatcgacgttataaccggggaagaaaccgaacacaatgtcctcaagattaactgcaagttattcatcttcaataagaccactcagagctggatcgagcgggggcgcggtaccttaaggctgaacgacaccgcctccacggactgtgggacactgcagtcccggcttatcatgcggaaccaagggtctctgcggctgattctcaatagcaaactttgggctcagatgaagatccagcgcgccaaccacaagaacgtcagaatcactgcaaccgacctggaagattacagcatcaagatttttttaatacaggcatctgcccaagacacagcatatttgtacgccgccattcatcatcgcttggtcgcccttcagagctttaacaaacagcgagacgtgaatcaggcagagtccctaagtgagactgcccagcagctcaattgcgagtcctgtgacgagaacgaagatgacttcatccaggtgacaaagaacggctcagacccttcgtcctggactcatcgccagagtgtggcatgtagttag

SEQ ID NO: 239893 - DNA, 327 bp, Artificial Sequence
  derived and/or modified sequence
atgactacaataccacgtaagggtagtagtcatctgcccggctctctccacacatgtaagctgaaacttcaggaggataggcggcagcaggagaaatccgtgatagctcagccaatatttgtgttcgaaaagggggagcagacctttaaaaggcccgcagaggatactctgtacgaggccgccgaacccgagtgcaatggttttccaactaagagggttcggtcttcctccttcacattccatattaccgatagccaatcccaaggggtcaggaaaaacaatgtgtttatgacctctgcattagttcaaagctccgtggacatctag

SEQ ID NO: 239894 - DNA, 1398 bp, Artificial Sequence
  derived and/or modified sequence
atgaccaccatccccaggaagggcagcagccacctgcccggcagcctgcacacctgcaagctgaagctgcaggaggaccggcggcagcaggagaagtctgtgattgcccagcccatctttgtgtttgagaagggggagcagaccttcaagaggcctgctgaggacaccctgtatgaggccgctgagcctgagtgcaatggcttccccaccaagagggtgcgcagcagcagcttcaccttccacatcacagacagccagagccagggcgtgaggaagaacaacgtgttcatgaccagcgccctggtgcagagctctgtggacatcaagtctgctgagcagggccctgtgaagcacagcaagcacgtgatccggcctgccatcctgcagctgccccaggcccggagctgtgccaaggtgaggaagaccttcggccacaaggccctggagagctgcaagaccaaggagaagaccaacaacaagatcagcgagggcaacagctacctgctgtctgagaacctgagccgggcccgcatctctgtgcagctgagcaccaaccaggacttcctgggcgccacctctgtgggctgccagcccaatgaagacaagtgcagcttcaagagctgcagcagcaactttgtgtttggagagaacatggtggagcgggtgctgggcacccagaagctgacccagccccagctggagaatgacagctatgccaaggagaagcccttcaagagcatccccaagtttcctgtgaacttcctgagcagcaggacagacagcatcaagaacaccagcctcatcgagagcgctgctgccttcagcagccagcccagcaggaagtgcctgctggagaagattgatgtgatcactggagaggagacagagcacaacgtgctgaagatcaactgcaagctgttcatcttcaacaagaccacccagagctggattgagcggggccggggcaccctgcggctgaatgacacagccagcacagactgtggcaccctgcagagccgcctcatcatgaggaaccagggcagcctgcggctcatcctgaacagcaagctgtgggcccagatgaagatccagagggccaaccacaagaatgtgcgcatcacagccacagacctggaggactacagcatcaagatcttcctgatccaggccagcgcccaggacacagcctacctgtatgctgccatccaccaccggctggtggccctgcagagcttcaacaagcagagagatgtgaaccaggccgagagcctgtctgaaacagcccagcagctgaactgtgagagctgtgatgaaaatgaagatgacttcatccaggtgaccaagaatggaagtgaccccagctcctggacccaccggcagagcgtggcctgcagctag

SEQ ID NO: 239895 - DNA, 327 bp, Artificial Sequence
  derived and/or modified sequence
atgaccaccatccccaggaagggcagcagccacctgcccggcagcctgcacacctgcaagctgaagctgcaggaggaccggcggcagcaggagaagtctgtgattgcccagcccatctttgtgtttgagaagggggagcagaccttcaagaggcctgctgaggacaccctgtatgaggccgctgagcctgagtgcaatggcttccccaccaagagggtgcgcagcagcagcttcaccttccacatcacagacagccagagccagggcgtgaggaagaacaacgtgttcatgaccagcgccctggtgcagagctctgtggacatctag

SEQ ID NO: 239896 - DNA, 1398 bp, Artificial Sequence
  derived and/or modified sequence
atgaccaccatcccccggaagggcagcagccacctgcccggcagcctacacacgtgcaagctgaaattacaggaggatcgaagacagcaggaaaaatctgtgatagcacagccgatattcgtcttcgagaaaggagagcagactttcaaacgtcctgctgaagatacactttacgaggcggcagagcccgagtgtaacgggtttcccactaaacgcgtaaggagcagtagctttacgtttcatattactgacagccagtcccagggcgtgcggaagaacaacgtgtttatgacttctgccctggtccaatcgagcgtcgatataaagagcgccgagcagggacctgtgaaacacagtaaacatgttattcgaccagctattcttcagctcccccaggccaggagttgtgccaaggtgcgcaaaacctttggccacaaggccctggaatcctgcaagactaaagaaaaaacaaacaacaagatctctgagggcaacagctacctgcttagcgaaaacttgtctcgcgcacgcataagcgtgcaactctcaacaaaccaggacttccttggggccacttccgtaggatgtcagcctaatgaggacaagtgctcctttaagtcttgctcatctaatttcgtctttggcgaaaatatggtggagcgagtccttggtactcagaagttgacccagccacagttggaaaatgattcttacgctaaggagaaaccgtttaagtctattcctaaatttcccgtgaattttctgtcttccaggaccgacagcatcaaaaacacgtcgttaatcgaaagtgctgccgctttctccagccaaccgtcccgcaaatgtctgctggagaagattgacgtaatcactggcgaggaaactgagcataacgttctgaagataaactgcaaactctttattttcaacaaaaccacacaaagctggattgagagaggcaggggaacactgcggctgaatgacacagcaagtacagattgtgggacactgcagagtcgattaatcatgcggaaccagggaagcctgcgactgatcctgaactccaaactgtgggcgcaaatgaaaatccagcgcgcaaaccataaaaatgtacgaattactgccacagatctggaagattacagtattaagatctttctgattcaggcatcagcccaggacacagcttatctctatgctgccatccaccaccgtttggtggccctccaatcattcaacaagcagcgggacgtgaaccaggccgagtccttgagtgaaacagcccagcaactcaattgcgaaagctgcgacgaaaacgaggacgacttcatccaagtcacaaagaacggcagcgatccgtcctcctggactcatcgtcagagcgttgcttgttcctag

SEQ ID NO: 239897 - DNA, 327 bp, Artificial Sequence
  derived and/or modified sequence
atgaccaccatcccccggaagggcagcagccacctgcccggcagcttgcatacatgtaaattgaaactgcaggaggatcgaaggcaacaggagaaatctgttatcgcccagcccatctttgttttcgagaagggagaacaaacgttcaagcggcctgcggaggacacgctctatgaagctgcggaacctgagtgtaatggattccccaccaagcgcgtcaggagcagctccttcacattccacatcaccgattcgcagagccagggtgtgcggaagaacaacgtgttcatgacttccgcgctcgtccagtcttctgtcgatatttag

SEQ ID NO: 239898 - DNA, 1398 bp, Artificial Sequence
  derived and/or modified sequence
atgacaaccatcccgcgaaaaggatctagccacttacctggctccttacatacttgtaaactgaagttacaggaagacagacggcaacaagagaagtccgtaatcgctcaaccgatcttcgtgttcgagaaaggtgagcagacttttaagcgacccgctgaggatacgctctacgaagcagcagaacccgagtgtaatggcttccccaccaagagagttcgaagctccagcttcacttttcacataacagactctcagagccaaggcgttagaaaaaataacgtgttcatgacatccgcgctggtgcagtcctctgtggacatcaaatcggcggagcagggtcctgtaaagcactccaagcatgtgattaggcccgctatcctgcagctgccccaggccaggtcatgtgcgaaggtgcggaagacattcggccataaggcactggagtcctgcaagaccaaggagaaaacaaacaataaaatctctgaagggaatagctacctgctttctgagaacctgtccagggcacgcatttcagttcaactcagcacaaatcaggactttctgggagcgacctccgtggggtgccaacctaatgaggataagtgcagcttcaaatcgtgttcatccaacttcgtgttcggcgaaaatatggtggagcgcgttctcggaacccaaaaactgactcaaccccagctagaaaatgacagctatgccaaagaaaagccttttaagagcatccccaagtttccagtgaactttctgagctcaaggaccgacagtatcaagaacactagtctgatagaatctgccgctgccttttcttcacagcccagccgcaagtgcctcttagaaaaaattgacgtaattaccggcgaggagacagagcacaatgtcttgaaaatcaactgcaaactgtttatctttaacaagactactcagagttggattgaaagaggaaggggaaccctccggctgaacgacaccgctagcacagactgtggcactttacagagcaggcttatcatgcggaatcagggatcacttcggctcatccttaattcaaaactctgggcacaaatgaaaatccagcgggcaaaccacaagaacgtgagaatcacagccaccgacttggaggactatagtattaagatcttcctgatccaggctagcgcacaggatactgcatacctctatgctgccattcaccatcggctcgtggccctgcagtcctttaataaacaacgggatgttaaccaggctgagtctctgtccgagactgctcaacagctgaattgcgagagctgcgatgagaacgaagacgatttcattcaggtgaccaagaatggttctgacccgtccagttggacccacagacagtccgtggcctgttcttag

SEQ ID NO: 239899 - DNA, 327 bp, Artificial Sequence
  derived and/or modified sequence
atgacaaccataccacggaagggatcgtctcatctgcctgggtctctacatacatgcaaactgaaactgcaggaggaccggcgtcagcaggaaaagagcgtgattgcacagcccatttttgtcttcgagaagggtgaacagaccttcaagaggccagcagaagacacattatacgaagccgcagagcccgagtgcaacggattccccacaaagagggtgcggtcgagcagtttcacatttcacatcacagatagtcagagtcagggcgtacgcaagaataacgtatttatgacatccgcattagtacagagctcagtggatatttag

SEQ ID NO: 239900 - DNA, 3104 bp, Artificial Sequence
  derived and/or modified sequence
acagagggtaactcagatcaggcttagaaatcacttgacttaactcagcagcactttttcttttctttgtgtctgtattattttagcagccttctctaaatactggaggcattggatttcatgtcgccaaaaggaatttaaaaatgacaaaagtgtaatctgttagaaatagttaatttgtagaattttactctataaggaggtttagtttcaatttgttttgaaatgaaggaattaagttgtgtttttaaccaaatgaattggcatctttatatttaggagaagtaacattggtgattatttatttcaagaatcatgactggaaaaagcttggaagtttagtagaggagtatatgttgtacatgcaaagacaagatctgcatgaatctatgtatttctgggtgtctggtgaaggccactttaggtgactggccagagaaggaggtgccctagtgatccttgagtcacagccatactgctaggaccatgactaccataccaagaaaaggcagcagccacctgcctggcagtttgcacacctgtaaactgaagctgcaggaggaccggcgacagcaagaaaaatctgtcattgctcaacccatatttgtttttgaaaagggagaacaaacttttaagagacctgcagaagacaccctgtatgaagcagcagaaccagaatgtaatggttttccaacaaagcgtgtacggtcttcatcttttacttttcatattacagattctcagtcccagggagtgaggaaaaacaatgtttttatgacatcagctcttgtgcaaagtagtgttgatataaagagtgctgaacaaggtcctgtgaaacattctaaacatgttattagacctgctattttgcagctacctcaagctcgaagttgtgcaaaagtaagaaaaacatttggacacaaggcactggaatcttgcaagactaaagaaaaaacaaataataagatttctgagggaaattcctatttgttaagtgaaaatttatcaagggctagaatttcagtccagctgtctactaaccaggactttttaggtgcaacatcagtaggatgtcaaccaaatgaagataaatgttcttttaaaagctgcagttccaattttgtttttggagaaaacatggtagaaagagttttgggtactcaaaaactcacccagcctcaacttgaaaatgattcatatgccaaggaaaaaccattcaaatccattccgaaatttcctgtcaactttttaagttcaagaacagactctattaaaaatacttccctaattgaatcagctgctgcattctcttcccaaccatcacgaaaatgcttgctggagaaaattgatgttataacaggggaggaaacagaacataatgtgttaaagataaactgcaagcttttcatattcaacaaaacaacacaatcctggattgaaaggggcagaggaacgttgagactgaatgacacagcaagcactgactgtggaacattacagtcaagactaattatgcgcaatcaaggcagtctaaggctgatcctcaacagcaaactctgggcccaaatgaagattcaaagagcaaaccacaaaaatgtacgaataacagctactgatttagaagactatagcatcaaaatatttttaattcaggccagtgcccaagatacagcatatttgtatgcagcaatacatcatcgtcttgttgcacttcaaagcttcaataagcagagagatgtcaatcaagctgaaagcctgtcagaaacagcccaacaattgaactgcgaaagctgtgatgagaatgaggatgatttcatccaagtcactaaaaatggatcagatccttctagttggactcacagacagtcggttgcctgttcatgaatactacctactataaacatgacatctacaaaaagaggggtcaccctactgaaaatactaaaccaccctaactaatgagaagattctattcattccttgaagagtttttatagaaaagtttaagaaatgtaatttgttgcaattaacatttttatgttttacattttacattttgattattgtgcagaaactgacagaatttaaaaaaatggacttcagaagttcaaaatttatcatttttgaagaagtttatttagaataggattttataactaatttggactcttcatcacattgatggatataatacttagaattataaattgctagatttgataaatacctaacaaaatgtttatttttttcagtcatacttgaccacaaaacaaatattttactaaatttccagagtcatttctctgaaaaatagtataatggcatgataacatttcactaaatcctatttatcttctgggaaatattttaatttagcttttggatttcctaatatgataagcttatatattcatggtatgaattcctttaaaaagagcatctgctcttggacttgtatctgttgcatcttgtcaatgtttgactcatggtcagcatccaatagttgttaaatgaataaataaaatataatacattacctatgtatcaaaaagcatgtgtaagaaagccaaatatgttaactgttctactttatttatgtaattatattttcattagtattttagtagatggggctgtatagaaaaacaaatgtatcatatgtagccaaatgaatctttttcttaaatgatattattatagtaggctacagtaatttcaacaattttacaatagagttttgatcctcttctttgcgatttgtttcagagacacctcatgaatcacacaagaaaattagtctcagtacttatagccctatttcatttttcaattcagttttatcacaccatggcttcgaagtgactttgattgtgacccctaagcaattatctgattaggggataaaaattcataattccaagatgtttctgaaaatgttctgaacaatgacaacatatttggaatgagggcgtaatttcactaagtgatgcttcgaagaacaatattcatttggatatgcaaacacacattttcaaaagttatattactgtgttaccatacctgttataaaataataaaaatatataagtatttattaagtcaaa

SEQ ID NO: 239901 - DNA, 572 bp, Artificial Sequence
  derived and/or modified sequence
agcttgcattttaattacaaacaaagtagcagaaatcaggagaagtaacattggtgattatttatttcaagaatcatgactggaaaaagcttggaagtttagtagaggagtatatgttgtacatgcaaagacaagatctgcatgaatctatgtatttctgggtgtctggtgaaggccactttaggtgactggccagagaaggaggtgccctagtgatccttgagtcacagccatactgctaggaccatgactaccataccaagaaaaggcagcagccacctgcctggcagtttgcacacctgtaaactgaagctgcaggaggaccggcgacagcaagaaaaatctgtcattgctcaacccatatttgtttttgaaaagggagaacaaacttttaagagacctgcagaagacaccctgtatgaagcagcagaaccagaatgtaatggttttccaacaaagcgtgtacggtcttcatcttttacttttcatattacagattctcagtcccagggagtgaggaaaaacaatgtttttatgacatcagctcttgtgcaaagtagtgttgatataaa

SEQ ID NO: 239902 - protein, 166 aa, Artificial Sequence
  derived and/or modified sequence
MGANTSRKPPVFDENEDVNFDHFEILRAIGKGSFGKVCIVQKNDTKKMYAMKYMNKQKCVERNEVRNVFKELQIMQGLEHPFLVNLWYSFQDEEDMFMVVDLLLGGDLRYHLQQNVHFKEETVKLFICELVMALDYLQNQRIIHRDMKPDNILLDEHDTWLSYKSH

SEQ ID NO: 239903 - DNA, 501 bp, Artificial Sequence
  derived and/or modified sequence
atgggcgccaacaccagcagaaagccccccgtgttcgacgagaacgaggacgtgaacttcgaccacttcgagatcctgagagccatcggcaagggcagcttcggcaaggtgtgcatcgtgcagaagaacgacaccaagaagatgtacgccatgaagtacatgaacaagcagaagtgcgtggagagaaacgaggtgagaaacgtgttcaaggagctgcagatcatgcagggcctggagcaccccttcctggtgaacctgtggtacagcttccaggacgaggaggacatgttcatggtggtggacctgctgctgggcggcgacctgagataccacctgcagcagaacgtgcacttcaaggaggagaccgtgaagctgttcatctgcgagctggtgatggccctggactacctgcagaaccagagaatcatccacagagacatgaagcccgacaacatcctgctggacgagcacgtgcagcagtacaccctgaagagccactag

SEQ ID NO: 239904 - DNA, 501 bp, Artificial Sequence
  derived and/or modified sequence
atgggcgccaacaccagcagaaagccccccgtgttcgacgagaacgaggacgtgaacttcgaccacttcgagatcctgagagccatcggcaagggcagcttcggcaaggtgtgcatcgtgcagaagaacgacaccaagaagatgtacgccatgaagtacatgaacaagcagaagtgcgtggagagaaacgaggtgagaaacgtgttcaaggagctgcagatcatgcagggcctggagcaccccttcctggtgaacctgtggtacagcttccaggacgaggaggacatgttcatggtggtggacctgctgctgggcggcgacctgagataccacctgcagcagaacgtgcacttcaaggaggagaccgtgaagctgttcatctgcgagctggtgatggccctggactacctgcagaaccagagaatcatccacagagacatgaagcccgacaacatcctgctggacgagcacgacacctggctgagctacaagagccactag

SEQ ID NO: 239905 - DNA, 501 bp, Artificial Sequence
  derived and/or modified sequence
atgggagccaacacctctagaaaaccaccagtctttgacgagaacgaagacgttaactttgaccatttcgagattctgagagctatcgggaaaggatcttttgggaaagtgtgtatcgttcagaaaaatgacactaaaaaaatgtatgccatgaagtacatgaacaaacaaaaatgcgtggaacgaaacgaggtgaggaacgtctttaaggagctgcagataatgcagggtctggagcatcccttcttggtgaatctctggtattcctttcaagatgaggaggatatgtttatggtggttgatcttctcttaggtggcgacctgagatatcacctccaacagaacgtacattttaaggaggaaacggttaagttattcatttgcgagcttgtgatggccctggactatctgcagaaccagcgcatcatacaccgggacatgaagccagataacattctgctggatgaacatgtgcagcagtataccctaaagagtcattag

SEQ ID NO: 239906 - DNA, 501 bp, Artificial Sequence
  derived and/or modified sequence
atgggcgccaatacttctcggaagcccccagtgttcgacgaaaatgaagatgtgaattttgaccatttcgagatccttagagctatcggcaagggatcctttggtaaagtatgtatcgtacaaaaaaacgacacgaaaaaaatgtacgcgatgaagtatatgaataaacagaagtgcgtggagcgtaatgaggtccgaaatgtatttaaagaactccagatcatgcaaggtctcgaacaccctttcctggtcaatctatggtattccttccaggacgaggaggacatgtttatggtagtggatttgctgcttggcggggaccttcggtaccatctgcagcagaatgtgcactttaaggaggagaccgtgaagctgtttatttgtgaactagtaatggccttagactatctccaaaatcagaggattatacatagagatatgaagcccgataatatcttgctggacgaacacgacacttggctgtcctacaaaagtcactag

SEQ ID NO: 239907 - DNA, 501 bp, Artificial Sequence
  derived and/or modified sequence
atgggcgccaacaccagcaggaagccccctgtgtttgatgaaaatgaagatgtgaactttgaccactttgagatcctgcgggccatcggcaagggcagctttgggaaggtgtgcatcgtgcagaagaatgacaccaagaagatgtatgccatgaagtacatgaacaagcagaagtgtgtggagagaaatgaggtgagaaatgtgttcaaggagctgcagatcatgcagggcctggagcaccccttcctggtgaacctgtggtacagcttccaggatgaggaggacatgttcatggtggtggacctgctgctgggcggggacctgcgctaccacctgcagcagaatgtgcacttcaaggaggagaccgtgaagctgttcatctgtgagctggtgatggccctggactacctgcagaaccagaggatcatccaccgggacatgaagccagacaacatcctgctggatgaacatgtgcagcagtacaccctgaagagccactag

SEQ ID NO: 239908 - DNA, 501 bp, Artificial Sequence
  derived and/or modified sequence
atgggcgccaacaccagcaggaagccccctgtgtttgatgaaaatgaagatgtgaactttgaccactttgagatcctgcgggccatcggcaagggcagctttgggaaggtgtgcatcgtgcagaagaatgacaccaagaagatgtatgccatgaagtacatgaacaagcagaagtgtgtggagagaaatgaggtgagaaatgtgttcaaggagctgcagatcatgcagggcctggagcaccccttcctggtgaacctgtggtacagcttccaggatgaggaggacatgttcatggtggtggacctgctgctgggcggggacctgcgctaccacctgcagcagaatgtgcacttcaaggaggagaccgtgaagctgttcatctgtgagctggtgatggccctggactacctgcagaaccagaggatcatccaccgggacatgaagccagacaacatcctgctggatgaacatgacacctggctgagctacaagagccactag

SEQ ID NO: 239909 - DNA, 501 bp, Artificial Sequence
  derived and/or modified sequence
atgggcgccaacaccagccggaagccccccgtgttcgacgagaacgaagacgttaacttcgaccatttcgagattctgagagcaatcggtaaaggttccttcgggaaggtgtgtattgtgcagaaaaacgataccaagaaaatgtatgctatgaagtatatgaataagcaaaagtgcgttgagaggaatgaggtgcgcaatgtgttcaaggagctccaaatcatgcagggcttggagcatccttttcttgtgaatttgtggtatagcttccaggatgaggaggatatgtttatggttgtggatttgctgctcgggggcgatctgcggtaccacttgcagcagaatgtgcacttcaaggaggagaccgtcaaattgttcatttgcgaactcgtaatggcattggactatctccaaaaccagcgaattatccacagagatatgaagccagataacattctgctggatgagcacgtacagcaatataccttgaagtcccattag

SEQ ID NO: 239910 - DNA, 501 bp, Artificial Sequence
  derived and/or modified sequence
atgggcgccaacaccagccggaagccccccgtgttcgacgagaacgaagatgtcaactttgaccatttcgagatcctccgcgccatcggcaaggggagcttcggaaaagtgtgtatcgtgcagaagaatgatacaaaaaagatgtatgcgatgaaatatatgaataagcaaaaatgcgttgaaagaaatgaagtgagaaacgtgtttaaggagttacaaatcatgcaaggtttagagcatccttttctcgtcaatctgtggtactctttccaggatgaggaggacatgtttatggtcgtcgacctgctccttgggggggacctccgctatcacctgcagcagaatgtgcactttaaagaggagacggtgaagctgttcatttgcgaactggtgatggccttggattacctgcagaatcagcggattatccacagggacatgaagcctgacaatattctgctagacgagcacgatacatggctgtcatacaagagccattag

SEQ ID NO: 239911 - DNA, 501 bp, Artificial Sequence
  derived and/or modified sequence
atgggagccaacacttccaggaagccccctgtgttcgatgaaaatgaagatgtgaacttcgatcatttcgagatactgagggcaatcggcaaagggtcattcgggaaagtgtgtattgttcagaaaaatgatactaaaaagatgtacgcaatgaaatacatgaacaaacagaaatgtgtggagcggaatgaggtcagaaacgtgtttaaagaacttcagatcatgcaggggttagagcacccatttctcgtcaatctctggtatagctttcaggatgaagaggatatgtttatggtggtcgatcttctgctgggcggtgacctgcggtaccacctccagcagaacgtccacttcaaggaagagacagtcaagctttttatttgcgaattggtcatggctctggactacctgcagaaccagcgtatcatccaccgagatatgaagcccgacaacatcctgttagatgaacacgttcaacaatacaccctaaaaagtcattag

SEQ ID NO: 239912 - DNA, 501 bp, Artificial Sequence
  derived and/or modified sequence
atgggagccaatacctctcgaaaacctcctgtgtttgacgaaaatgaagacgtaaactttgaccactttgaaatcctcagagctatcggcaaaggtagcttcgggaaagtgtgtattgtgcagaagaacgacactaaaaaaatgtatgctatgaagtatatgaacaagcaaaaatgcgtcgaacggaacgaggttagaaacgtctttaaagagttgcagatcatgcagggactggaacatccttttttagtgaacctgtggtactccttccaggatgaagaggatatgtttatggtcgttgacctgctccttggaggagacctcagataccatctgcaacagaacgtacacttcaaggaggagacggtgaagttgtttatatgcgagctggtgatggcacttgactatttgcagaaccagaggatcatccaccgagatatgaagccggataatattctgttggatgaacatgacacctggctgtcctacaagtcccattag

SEQ ID NO: 239913 - DNA, 771 bp, Artificial Sequence
  derived and/or modified sequence
agtccagcgcagcccagcccagcccagcccggcgctcgcagcctccgccgcttccgggcagataggtgccttttcttgctccttgctcttggagttcttctcttagtccctgttccctggatgaaagcatcgctccgagcctcatgggaggaatgaaggaagaatcgagactagatatccaactaaggcttcgggacatgttttgagcgaagatgggtgtttctgcccggatagtataaatcgaggatccaggtctgggcagattcaaccatgggagcgaacacttcaagaaaaccaccagtgtttgatgaaaatgaagatgtcaactttgaccactttgaaattttgcgagccattgggaaaggcagttttgggaaggtctgcattgtacagaagaatgataccaagaagatgtacgcaatgaagtacatgaataaacaaaagtgcgtggagcgcaatgaagtgagaaatgtcttcaaggaactccagatcatgcagggtctggagcaccctttcctggttaatttgtggtattccttccaagatgaggaagacatgttcatggtggtggacctcctgctgggtggagacctgcgttatcacctgcaacagaacgtccacttcaaggaagaaacagtgaagctcttcatctgtgagctggtcatggccctggactacctgcagaaccagcgcatcattcacagggatatgaagcctgacaatattttacttgacgaacatgtacaacaatacacccttaaatcacattga

SEQ ID NO: 239914 - DNA, 888 bp, Artificial Sequence
  derived and/or modified sequence
agcccagctcagtccagcgcagcccagcccagcccagcccggcgctcgcagcctccgccgcttccgggcagataggtgccttttcttgctccttgctcttggagttcttctcttagtccctgttccctggatgaaagcatcgctccgagcctcatgggaggaatgaaggaagaatcgagactagatatccaactaaggcttcgggacatgttttgagcgaagatgggtgtttctgcccggatagtataaatcgaggatccaggtctgggcagattcaaccatgggagcgaacacttcaagaaaaccaccagtgtttgatgaaaatgaagatgtcaactttgaccactttgaaattttgcgagccattgggaaaggcagttttgggaaggtctgcattgtacagaagaatgataccaagaagatgtacgcaatgaagtacatgaataaacaaaagtgcgtggagcgcaatgaagtgagaaatgtcttcaaggaactccagatcatgcagggtctggagcaccctttcctggttaatttgtggtattccttccaagatgaggaagacatgttcatggtggtggacctcctgctgggtggagacctgcgttatcacctgcaacagaacgtccacttcaaggaagaaacagtgaagctcttcatctgtgagctggtcatggccctggactacctgcagaaccagcgcatcattcacagggatatgaagcctgacaatattttacttgacgaacatgatacctggctctcctacaagtcccactgaattggagtttcaggagaccgaagcccaggcacatgtattttgcaaaactacactgaagtttctgataatgacggatatcaacaattaaacgcttacttcttgccaaa

SEQ ID NO: 239915 - DNA, 669 bp, Artificial Sequence
  derived and/or modified sequence
atgagtactctgtgtccaccccccagtcctgctgtcgctaaaacagagattgcgctgagtggaaagtctcctctgctggcagccacatttgcatattgggataatatcctgggacctcgcgttcggcacatttgggcccccaaaaccgagcaggttttgctctccgacggagaaatcacgtttctcgcaaaccataccctgaacggcgagattcttaggaacgccgagtctggtgccatcgatgtaaaatttttcgtgctgtcagaaaagggtgtgatcattgtgagcttgatctttgacggaaattggaatggtgaccggtccacatacgggctcagtattatcctgcctcaaactgagctgagcttttacttaccactacacagagtgtgcgtagatagactgacacacatcatccgcaaaggtcggatatggatgcataaggagcggcaggaaaacgtacagaaaataattcttgaaggcacggaacgcatggaggatcaaggccaatcaatcattccaatgcttactggggaagttatccccgtgatggagctcctctcaagtatgaaatctcattccgtgcccgaggagatcgatatcgcagacacagtcctcaatgatgatgacatcggagactcatgccatgagggatttcttctcaagtag

SEQ ID NO: 239916 - DNA, 669 bp, Artificial Sequence
  derived and/or modified sequence
atgtccaccctttgccccccccccagccccgcagtagcgaagacggagattgccctatcagggaaatcacccctgttggcggctacgtttgcctattgggacaacattttgggcccccgggtcagacacatctgggctccgaagaccgagcaggtgttactgagtgatggcgaaatcaccttcttggcgaaccacacactgaacggcgaaattcttagaaacgccgagagcggtgctatcgacgtaaaattctttgtcctatccgaaaaaggcgtgataatagtatctttgattttcgacggcaattggaatggcgatcggtcaacctacggcctctctattatcctgccccagacagagcttagcttctacctgcccctgcatcgcgtctgtgtggatcggctaacacacattatcaggaaaggccgaatctggatgcataaagaacgccaagaaaacgtgcagaagatcattctggaagggaccgagcgcatggaggaccagggccagtcaatcatccccatgctgacaggagaggtgatccctgtgatggagttattgtcttctatgaagagtcattccgtaccagaggaaattgacatcgccgatacagtgctgaatgacgacgacattggggactcatgccacgagggcttcctcctcaagtag

SEQ ID NO: 239917 - DNA, 669 bp, Artificial Sequence
  derived and/or modified sequence
atgagcaccctgtgccccccacccagccctgctgtggccaagacagaaattgccctgagcggcaagagccccctgctggccgccacctttgcctactgggacaacatcctgggcccccgggtgcgccacatctgggcccccaagacagagcaggtgctgctgagtgatggagagatcaccttcctggccaaccacaccctgaatggagagatcctgagaaatgctgagagcggggccattgatgtgaagttctttgtgctgtctgagaagggcgtcatcatcgtgtccctcatctttgatggcaactggaatggagacaggagcacctacggcctgagcatcatcctgccccagacagagctgtccttctacctgcccctgcaccgggtgtgtgtggaccggctgacccacatcatcaggaagggccgcatctggatgcacaaggagcggcaggagaatgtgcagaagatcatcctggagggcacagagaggatggaggaccagggccagagcatcatccccatgctgactggagaggtgattcctgtgatggagctgctgagctccatgaagagccacagcgtgcctgaggagattgatattgctgacacagtgctgaatgatgatgacattggagacagctgccacgagggcttcctgctgaagtag

SEQ ID NO: 239918 - DNA, 669 bp, Artificial Sequence
  derived and/or modified sequence
atgagcaccctgtgccccccccccagccccgccgtggccaagaccgaaattgcgcttagcggcaagtctcctctccttgctgctactttcgcttattgggacaacatattagggcctagagtgagacacatctgggctcctaagactgaacaggtcctcctgagtgacggtgagatcacctttctcgccaaccacaccttgaatggcgagatcttgcgaaatgctgagtctggcgctatagatgtaaaattctttgtcttatccgaaaaaggcgtgattatcgtgagtcttatcttcgacggtaactggaacggtgataggtcaacctacgggctgtccataatcctgccacaaactgaactctccttttatctgcctttgcacagggtttgtgtggatcgcctgactcatattattaggaagggcaggatatggatgcacaaagagcggcaagaaaatgtgcagaaaatcatacttgaggggactgagcggatggaggatcaaggtcagtcaatcatacctatgcttacaggtgaagtgattccagtgatggagttactgagttccatgaagagtcactccgtgcccgaagagattgacatcgctgacactgtcttgaatgacgatgacatcggcgatagctgccatgagggcttcctgctcaaatag

SEQ ID NO: 239919 - DNA, 669 bp, Artificial Sequence
  derived and/or modified sequence
atgagcaccctgtgccccccccccagccccgccgtggccaagaccgagattgcactctcagggaaatcacccttgttagcggccacctttgcctactgggataatatcctggggcccagggtgcgacacatctgggcccctaaaacagagcaagtcctgctctccgatggcgaaataacatttctcgccaaccacaccctgaatggcgaaattctgcgaaacgcagaaagtggtgctatcgatgtcaagttctttgttctctccgagaagggagtgatcatcgtgtccctcatttttgacggcaattggaatggcgataggagcacttatggactttccatcatcctgccacagacagaattgagcttctatttacctctgcatcgggtctgtgtcgaccggctgactcacattatccggaaagggcggatttggatgcacaaggaacgacaagagaacgtgcaaaagattattctagaagggacggaacgcatggaagaccaggggcagagtattattcctatgctgactggcgaggttattcccgtaatggagctgctaagctctatgaagtcacattcagtgcccgaagagattgacattgcagatacagttctgaacgacgacgacatcggagatagttgccatgagggatttctgttgaaatag

SEQ ID NO: 239920 - DNA, 669 bp, Artificial Sequence
  derived and/or modified sequence
atgtcaacactatgcccccctccaagccctgctgtagccaagacagaaattgcgttaagcggaaagagccccctgctggctgctacttttgcctattgggacaatattttaggccctagagtccggcatatttgggcaccaaaaactgagcaagtcctgttgtcagatggggagattacttttctggctaatcacacgctcaacggcgagatccttcgcaatgcggaaagtggagccatagatgtgaagttctttgttctttcagagaaaggcgtcatcattgtgtccctgatcttcgacggcaactggaacggcgataggagcacgtatgggttgtctatcatcctcccccagaccgaactgagtttctacctgcccctgcatcgggtatgtgtcgaccgcctgacacacatcatccgcaagggacgcatttggatgcacaaggaacgccaggagaacgtgcagaagattatcctggagggaacagagcggatggaggatcaaggacaatccatcattcctatgctgaccggggaggtcattccagtgatggaactgctgagctccatgaagtcgcactctgtgcccgaagaaatcgatatcgctgatactgtcctgaatgacgacgacatcggagattcgtgccacgaggggtttctgcttaaatag

SEQ ID NO: 239921 - DNA, 669 bp, Artificial Sequence
  derived and/or modified sequence
atgtcaacgctctgcccacctccaagcccagccgtcgcaaagactgagatcgccctctcaggcaaaagtccattactggcagctacgttcgcctattgggacaacatcttggggccacgcgtgcgtcatatttgggcaccgaagactgagcaggtgttgctttctgatggagagatcacgttcctcgcgaaccacaccctgaatggggagatcctgcggaacgccgaatccggggctattgatgttaagtttttcgtgcttagcgagaagggagtcatcattgtgagtctcatctttgatgggaattggaacggcgataggagcacttatggattatcaattatcctacctcagacagagctgagcttctacttgccgcttcacagagtttgtgtggaccggctgactcatatcatccgcaaggggaggatatggatgcataaagaaagacaggagaacgtacagaaaataatccttgagggtacggagagaatggaggatcagggacagtcgatcatccccatgttgacgggggaggtcatcccagttatggaactcctgtcttctatgaaaagtcactctgtgccagaggagattgacattgcggatacggtgcttaatgatgatgacataggggacagttgtcatgaggggtttctgctcaagtag

SEQ ID NO: 239922 - DNA, 777 bp, Artificial Sequence
  derived and/or modified sequence
tctcttttgggggcggggtctagcaagagcagatatctccggagcatttggataatgtgacagttggaatgcagtgatgtcgactctttgcccaccgccatctccagctgttgccaagacagagattgctttaagtggcaaatcacctttattagcagctacttttgcttactgggacaatattcttggtcctagagtaaggcacatttgggctccaaagacagaacaggtacttctcagtgatggagaaataacttttcttgccaaccacactctaaatggagaaatccttcgaaatgcagagagtggtgctatagatgtaaagttttttgtcttgtctgaaaagggagtgattattgtttcattaatctttgatggaaactggaatggggatcgcagcacatatggactatcaattatacttccacagacagaacttagtttctacctcccacttcatagagtgtgtgttgatagattaacacatataatccggaaaggaagaatatggatgcataaggaaagacaagaaaatgtccagaagattatcttagaaggcacagagagaatggaagatcagggtcagagtattattccaatgcttactggagaagtgattcctgtaatggaactgctttcatctatgaaatcacacagtgttcctgaagaaatagatatagctgatacagtactcaatgatgatgatattggtgacagctgtcatgaaggctttcttctcaagtaagaatttttcttttcataaaagctggatgaagc

SEQ ID NO: 239923 - DNA, 1873 bp, Artificial Sequence
  derived and/or modified sequence
acgtaacctacggtgtcccgctaggaaagagaggtgcgtcaaacagcgacaagttccgcccacgtaaaagatgacgcttgatatctccggagcatttggataatgtgacagttggaatgcagtgatgtcgactctttgcccaccgccatctccagctgttgccaagacagagattgctttaagtggcaaatcacctttattagcagctacttttgcttactgggacaatattcttggtcctagagtaaggcacatttgggctccaaagacagaacaggtacttctcagtgatggagaaataacttttcttgccaaccacactctaaatggagaaatccttcgaaatgcagagagtggtgctatagatgtaaagttttttgtcttgtctgaaaagggagtgattattgtttcattaatctttgatggaaactggaatggggatcgcagcacatatggactatcaattatacttccacagacagaacttagtttctacctcccacttcatagagtgtgtgttgatagattaacacatataatccggaaaggaagaatatggatgcataaggaaagacaagaaaatgtccagaagattatcttagaaggcacagagagaatggaagatcagggtcagagtattattccaatgcttactggagaagtgattcctgtaatggaactgctttcatctatgaaatcacacagtgttcctgaagaaatagatatagctgatacagtactcaatgatgatgatattggtgacagctgtcatgaaggctttcttctcaagtaagaatttttcttttcataaaagctggatgaagcagataccatcttatgctcacctatgacaagatttggaagaaagaaaataacagactgtctacttagattgttctagggacattacgtatttgaactgttgcttaaatttgtgttatttttcactcattatatttctatatatatttggtgttattccatttgctatttaaagaaaccgagtttccatcccagacaagaaatcatggccccttgcttgattctggtttcttgttttacttctcattaaagctaacagaatcctttcatattaagttgtactgtagatgaacttaagttatttaggcgtagaacaaaattattcatatttatactgatctttttccatccagcagtggagtttagtacttaagagtttgtgcccttaaaccagactccctggattaatgctgtgtacccgtgggcaaggtgcctgaattctctatacacctatttcctcatctgtaaaatggcaataatagtaatagtacctaatgtgtagggttgttataagcattgagtaagataaataatataaagcacttagaacagtgcctggaacataaaaacacttaataatagctcatagctaacatttcctatttacatttcttctagaaatagccagtatttgttgagtgcctacatgttagttcctttactagttgctttacatgtattatcttatattctgttttaaagtttcttcacagttacagattttcatgaaattttacttttaataaaagagaagtaaaagtataaagtattcacttttatgttcacagtcttttcctttaggctcatgatggagtatcagaggcatgagtgtgtttaacctaagagccttaatggcttgaatcagaagcactttagtcctgtatctgttcagtgtcagcctttcatacatcattttaaatcccatttgactttaagtaagtcacttaatctctctacatgtcaatttcttcagctataaaatgatggtatttcaataaataaatacattaattaaatgatattatactgactaattgggctgttttaaggc

SEQ ID NO: 239924 - DNA, 669 bp, Artificial Sequence
  derived and/or modified sequence
atgagcaccctgtgccccccccccagccccgccgtggccaagaccgagatcgccctgagcggcaagagccccctgctggccgccaccttcgcctactgggacaacatcctgggccccagagtgagacacatctgggcccccaagaccgagcaggtgctgctgagcgacggcgagatcaccttcctggccaaccacaccctgaacggcgagatcctgagaaacgccgagagcggcgccatcgacgtgaagttcttcgtgctgagcgagaagggcgtgatcatcgtgagcctgatcttcgacggcaactggaacggcgacagaagcacctacggcctgagcatcatcctgccccagaccgagctgagcttctacctgcccctgcacagagtgtgcgtggacagactgacccacatcatcagaaagggcagaatctggatgcacaaggagagacaggagaacgtgcagaagatcatcctggagggcaccgagagaatggaggaccagggccagagcatcatccccatgctgaccggcgaggtgatccccgtgatggagctgctgagcagcatgaagagccacagcgtgcccgaggagatcgacatcgccgacaccgtgctgaacgacgacgacatcggcgacagctgccacgagggcttcctgctgaagtag

SEQ ID NO: 239925 - protein, 979 aa, Artificial Sequence
  derived and/or modified sequence
MAESDSTDFDLLWYLENLSDKEFQSFKKYLARKILDFKLPQFPLIQMTKEELANVLPISYEGQYIWNMLFSIFSMMRKEDLCRKIIGRRNRNQEACKAVMRRKFMLQWESHTFGKFHYKFFRDVSSDVFYILQLAYDSTSYYSANNLNVFLMGERASGKTIVINLAVLRWIKGEMWQNMISYVVHLTAHEINQMTNSSLAELIAKDWPDGQAPIADILSDPKKLLFILEDLDNIRFELNVNESALCSNSTQKVPIPVLLVSLLKRKMAPGCWFLISSRPTRGNNVKTFLKEVDCCTTLQLSNGKREIYFNSFFKDRQRASAALQLVHEDEILVGLCRVAILCWITCTVLKRQMDKGRDFQLCCQTPTDLHAHFLADALTSEAGLTANQYHLGLLKRLCLLAAGGLFLSTLNFSGEDLRCVGFTEADVSVLQAANILLPSNTHKDRYKFIHLNVQEFCTAIAFLMAVPNYLIPSGSREYKEKREQYSDFNQVFTFIFGLLNANRRKILETSFGYQLPMVDSFKWYSVGYMKHLDRDPEKLTHHMPLFYCLYENREEEFVKTIVDALMEVTVYLQSDKDMMVSLYCLDYCCHLRTLKLSVQRIFQNKEPLIRPTARLSYVSTASGFEDLLKALARNRSLTYLSINCTSISLNMFSLLHDILHEPTCQISHLSLMKCDLRASECEEIASLLISGGSLRKLTLSSNPLRSDGMNILCDALLHPNCTLISLVLVFCCLTENCCSALGRVLLFSPTLRQLDLCVNRLKNYGVLHVTFPLLFPTCQLEELHLSGCFFSSDICQYIAIVIATNEKLRSLEIGSNKIEDAGMQLLCGGLRHPNCMLVNIGLEECMLTSACCRSLASVLTTNKTLERLNLLQNHLGNDGVAKLLESLISPDCVLKVVGLPLTGLNTQTQQLLMTVKERKPSLIFLSETWSLKEGREIGVTPASQPGSIIPNSNLDYMFFKFPRMSAAMRTSNTASRQPL

SEQ ID NO: 239926 - protein, 1033 aa, Artificial Sequence
  derived and/or modified sequence
MAESDSTDFDLLWYLENLSDKEFQSFKKYLARKILDFKLPQFPLIQMTKEELANVLPISYEGQYIWNMLFSIFSMMRKEDLCRKIIGRRNRNQEACKAVMRRKFMLQWESHTFGKFHYKFFRDVSSDVFYILQLAYDSTSYYSANNLNVFLMGERASGKTIVINLAVLRWIKGEMWQNMISYVVHLTAHEINQMTNSSLAELIAKDWPDGQAPIADILSDPKKLLFILEDLDNIRFELNVNESALCSNSTQKVPIPVLLVSLLKRKMAPGCWFLISSRPTRGNNVKTFLKEVDCCTTLQLSNGKREIYFNSFFKDRQRASAALQLVHEDEILVGLCRVAILCWITCTVLKRQMDKGRDFQLCCQTPTDLHAHFLADALTSEAGLTANQYHLGLLKRLCLLAAGGLFLSTLNFSGEDLRCVGFTEADVSVLQAANILLPSNTHKDRYKFIHLNVQEFCTAIAFLMAVPNYLIPSGSREYKEKREQYSDFNQVFTFIFGLLNANRRKILETSFGYQLPMVDSFKWYSVGYMKHLDRDPEKLTHHMPLFYCLYENREEEFVKTIVDALMEVTVYLQSDKDMMVSLYCLDYCCHLRTLKLSVQRIFQNKEPLIRPTASQMKSLVYWREICSLFYTMESLRELHIFDNDLNGISERILSKALEHSSCKLRTLKLSYVSTASGFEDLLKALARNRSLTYLSINCTSISLNMFSLLHDILHEPTCQISHLSLMKCDLRASECEEIASLLISGGSLRKLTLSSNPLRSDGMNILCDALLHPNCTLISLVLVFCCLTENCCSALGRVLLFSPTLRQLDLCVNRLKNYGVLHVTFPLLFPTCQLEELHLSGCFFSSDICQYIAIVIATNEKLRSLEIGSNKIEDAGMQLLCGGLRHPNCMLVNIGLEECMLTSACCRSLASVLTTNKTLERLNLLQNHLGNDGVAKLLESLISPDCVLKVVGLPLTGLNTQTQQLLMTVKERKPSLIFLSETWSLKEGREIGVTPASQPGSIIPNSNLDYMFFKFPRMSAAMRTSNTASRQPL

SEQ ID NO: 239927 - DNA, 2940 bp, Artificial Sequence
  derived and/or modified sequence
atggccgagagcgacagcaccgacttcgacctgctgtggtacctggagaacctgagcgacaaggagttccagagcttcaagaagtacctggccagaaagatcctggacttcaagctgccccagttccccctgatccagatgaccaaggaggagctggccaacgtgctgcccatcagctacgagggccagtacatctggaacatgctgttcagcatcttcagcatgatgagaaaggaggacctgtgcagaaagatcatcggcagaagaaacagaaaccaggaggcctgcaaggccgtgatgagaagaaagttcatgctgcagtgggagagccacaccttcggcaagttccactacaagttcttcagagacgtgagcagcgacgtgttctacatcctgcagctggcctacgacagcaccagctactacagcgccaacaacctgaacgtgttcctgatgggcgagagagccagcggcaagaccatcgtgatcaacctggccgtgctgagatggatcaagggcgagatgtggcagaacatgatcagctacgtggtgcacctgaccgcccacgagatcaaccagatgaccaacagcagcctggccgagctgatcgccaaggactggcccgacggccaggcccccatcgccgacatcctgagcgaccccaagaagctgctgttcatcctggaggacctggacaacatcagattcgagctgaacgtgaacgagagcgccctgtgcagcaacagcacccagaaggtgcccatccccgtgctgctggtgagcctgctgaagagaaagatggcccccggctgctggttcctgatcagcagcagacccaccagaggcaacaacgtgaagaccttcctgaaggaggtggactgctgcaccaccctgcagctgagcaacggcaagagagagatctacttcaacagcttcttcaaggacagacagagagccagcgccgccctgcagctggtgcacgaggacgagatcctggtgggcctgtgcagagtggccatcctgtgctggatcacctgcaccgtgctgaagagacagatggacaagggcagagacttccagctgtgctgccagacccccaccgacctgcacgcccacttcctggccgacgccctgaccagcgaggccggcctgaccgccaaccagtaccacctgggcctgctgaagagactgtgcctgctggccgccggcggcctgttcctgagcaccctgaacttcagcggcgaggacctgagatgcgtgggcttcaccgaggccgacgtgagcgtgctgcaggccgccaacatcctgctgcccagcaacacccacaaggacagatacaagttcatccacctgaacgtgcaggagttctgcaccgccatcgccttcctgatggccgtgcccaactacctgatccccagcggcagcagagagtacaaggagaagagagagcagtacagcgacttcaaccaggtgttcaccttcatcttcggcctgctgaacgccaacagaagaaagatcctggagaccagcttcggctaccagctgcccatggtggacagcttcaagtggtacagcgtgggctacatgaagcacctggacagagaccccgagaagctgacccaccacatgcccctgttctactgcctgtacgagaacagagaggaggagttcgtgaagaccatcgtggacgccctgatggaggtgaccgtgtacctgcagagcgacaaggacatgatggtgagcctgtactgcctggactactgctgccacctgagaaccctgaagctgagcgtgcagagaatcttccagaacaaggagcccctgatcagacccaccgccagactgagctacgtgagcaccgccagcggcttcgaggacctgctgaaggccctggccagaaacagaagcctgacctacctgagcatcaactgcaccagcatcagcctgaacatgttcagcctgctgcacgacatcctgcacgagcccacctgccagatcagccacctgagcctgatgaagtgcgacctgagagccagcgagtgcgaggagatcgccagcctgctgatcagcggcggcagcctgagaaagctgaccctgagcagcaaccccctgagaagcgacggcatgaacatcctgtgcgacgccctgctgcaccccaactgcaccctgatcagcctggtgctggtgttctgctgcctgaccgagaactgctgcagcgccctgggcagagtgctgctgttcagccccaccctgagacagctggacctgtgcgtgaacagactgaagaactacggcgtgctgcacgtgaccttccccctgctgttccccacctgccagctggaggagctgcacctgagcggctgcttcttcagcagcgacatctgccagtacatcgccatcgtgatcgccaccaacgagaagctgagaagcctggagatcggcagcaacaagatcgaggacgccggcatgcagctgctgtgcggcggcctgagacaccccaactgcatgctggtgaacatcggcctggaggagtgcatgctgaccagcgcctgctgcagaagcctggccagcgtgctgaccaccaacaagaccctggagagactgaacctgctgcagaaccacctgggcaacgacggcgtggccaagctgctggagagcctgatcagccccgactgcgtgctgaaggtggtgggcctgcccctgaccggcctgaacacccagacccagcagctgctgatgaccgtgaaggagagaaagcccagcctgatcttcctgagcgagacctggagcctgaaggagggcagagagatcggcgtgacccccgccagccagcccggcagcatcatccccaacagcaacctggactacatgttcttcaagttccccagaatgagcgccgccatgagaaccagcaacaccgccagcagacagcccctgtag

SEQ ID NO: 239928 - DNA, 3102 bp, Artificial Sequence
  derived and/or modified sequence
atggccgagagcgacagcaccgacttcgacctgctgtggtacctggagaacctgagcgacaaggagttccagagcttcaagaagtacctggccagaaagatcctggacttcaagctgccccagttccccctgatccagatgaccaaggaggagctggccaacgtgctgcccatcagctacgagggccagtacatctggaacatgctgttcagcatcttcagcatgatgagaaaggaggacctgtgcagaaagatcatcggcagaagaaacagaaaccaggaggcctgcaaggccgtgatgagaagaaagttcatgctgcagtgggagagccacaccttcggcaagttccactacaagttcttcagagacgtgagcagcgacgtgttctacatcctgcagctggcctacgacagcaccagctactacagcgccaacaacctgaacgtgttcctgatgggcgagagagccagcggcaagaccatcgtgatcaacctggccgtgctgagatggatcaagggcgagatgtggcagaacatgatcagctacgtggtgcacctgaccgcccacgagatcaaccagatgaccaacagcagcctggccgagctgatcgccaaggactggcccgacggccaggcccccatcgccgacatcctgagcgaccccaagaagctgctgttcatcctggaggacctggacaacatcagattcgagctgaacgtgaacgagagcgccctgtgcagcaacagcacccagaaggtgcccatccccgtgctgctggtgagcctgctgaagagaaagatggcccccggctgctggttcctgatcagcagcagacccaccagaggcaacaacgtgaagaccttcctgaaggaggtggactgctgcaccaccctgcagctgagcaacggcaagagagagatctacttcaacagcttcttcaaggacagacagagagccagcgccgccctgcagctggtgcacgaggacgagatcctggtgggcctgtgcagagtggccatcctgtgctggatcacctgcaccgtgctgaagagacagatggacaagggcagagacttccagctgtgctgccagacccccaccgacctgcacgcccacttcctggccgacgccctgaccagcgaggccggcctgaccgccaaccagtaccacctgggcctgctgaagagactgtgcctgctggccgccggcggcctgttcctgagcaccctgaacttcagcggcgaggacctgagatgcgtgggcttcaccgaggccgacgtgagcgtgctgcaggccgccaacatcctgctgcccagcaacacccacaaggacagatacaagttcatccacctgaacgtgcaggagttctgcaccgccatcgccttcctgatggccgtgcccaactacctgatccccagcggcagcagagagtacaaggagaagagagagcagtacagcgacttcaaccaggtgttcaccttcatcttcggcctgctgaacgccaacagaagaaagatcctggagaccagcttcggctaccagctgcccatggtggacagcttcaagtggtacagcgtgggctacatgaagcacctggacagagaccccgagaagctgacccaccacatgcccctgttctactgcctgtacgagaacagagaggaggagttcgtgaagaccatcgtggacgccctgatggaggtgaccgtgtacctgcagagcgacaaggacatgatggtgagcctgtactgcctggactactgctgccacctgagaaccctgaagctgagcgtgcagagaatcttccagaacaaggagcccctgatcagacccaccgccagccagatgaagagcctggtgtactggagagagatctgcagcctgttctacaccatggagagcctgagagagctgcacatcttcgacaacgacctgaacggcatcagcgagagaatcctgagcaaggccctggagcacagcagctgcaagctgagaaccctgaagctgagctacgtgagcaccgccagcggcttcgaggacctgctgaaggccctggccagaaacagaagcctgacctacctgagcatcaactgcaccagcatcagcctgaacatgttcagcctgctgcacgacatcctgcacgagcccacctgccagatcagccacctgagcctgatgaagtgcgacctgagagccagcgagtgcgaggagatcgccagcctgctgatcagcggcggcagcctgagaaagctgaccctgagcagcaaccccctgagaagcgacggcatgaacatcctgtgcgacgccctgctgcaccccaactgcaccctgatcagcctggtgctggtgttctgctgcctgaccgagaactgctgcagcgccctgggcagagtgctgctgttcagccccaccctgagacagctggacctgtgcgtgaacagactgaagaactacggcgtgctgcacgtgaccttccccctgctgttccccacctgccagctggaggagctgcacctgagcggctgcttcttcagcagcgacatctgccagtacatcgccatcgtgatcgccaccaacgagaagctgagaagcctggagatcggcagcaacaagatcgaggacgccggcatgcagctgctgtgcggcggcctgagacaccccaactgcatgctggtgaacatcggcctggaggagtgcatgctgaccagcgcctgctgcagaagcctggccagcgtgctgaccaccaacaagaccctggagagactgaacctgctgcagaaccacctgggcaacgacggcgtggccaagctgctggagagcctgatcagccccgactgcgtgctgaaggtggtgggcctgcccctgaccggcctgaacacccagacccagcagctgctgatgaccgtgaaggagagaaagcccagcctgatcttcctgagcgagacctggagcctgaaggagggcagagagatcggcgtgacccccgccagccagcccggcagcatcatccccaacagcaacctggactacatgttcttcaagttccccagaatgagcgccgccatgagaaccagcaacaccgccagcagacagcccctgtag

SEQ ID NO: 239929 - DNA, 2940 bp, Artificial Sequence
  derived and/or modified sequence
atggccgagtccgactcgacggatttcgacctcttatggtacttggagaacctgtcagataaggagttccaatcctttaaaaagtacttggccaggaaaatactggatttcaagctgccacagttccctcttattcagatgaccaaggaagaactcgccaacgtgctgcccatttcctatgaggggcaatatatctggaatatgctattctcgatattttctatgatgcggaaagaagacctctgccggaagatcattgggagacggaacagaaaccaagaagcctgtaaagccgtgatgcgtagaaaatttatgttgcagtgggagtcgcacaccttcggaaagttccactacaaattcttccgggacgtgtcctccgacgttttttatattctgcagctggcctatgattcaaccagctactatagtgcaaataatttgaacgtgtttttaatgggagagcgggctagtggtaagaccatcgtcatcaatctggccgtgcttcggtggattaagggagaaatgtggcagaacatgataagctatgtggttcacttaaccgcccatgaaatcaaccagatgacaaactccagcttagctgagcttattgccaaggattggccggacgggcaagcccccatcgccgacatcctgagtgaccccaaaaaactattattcatcctagaagacctcgataatattcgttttgagctcaacgtgaatgagtctgccttatgctccaactcaacgcagaaagtcccaatccccgtcctactggtgtctttgctgaagagaaagatggctcccgggtgctggtttctgatttcaagccggccgacaaggggaaataacgtgaagacattcctaaaggaggtggactgctgtacaaccctgcagctgagcaatgggaagcgtgagatctattttaatagcttcttcaaagatagacagcgagcctctgccgcacttcagttggtgcacgaggatgagatcctggtcggtttgtgtagggtcgcgattctgtgctggattacatgcacagtgttaaagcgtcagatggataaaggccgcgactttcaactgtgctgccaaactcccacagatctgcatgcccacttccttgccgacgccctcaccagtgaggccggtctgacagccaatcagtatcacctgggtctgctgaaaagattgtgcctccttgcggctgggggtctattcctgtctaccctgaattttagcggcgaggacctcagatgtgtcgggtttaccgaagcagatgtgtcagtgctacaggccgcaaacattctcctgccatccaacacacacaaggataggtacaagtttatacacttaaatgtacaggaattctgtacggcgattgcctttctgatggcagttccgaattatctgattccgtctggatctcgcgaatataaagaaaagcgagaacagtattccgactttaaccaggtttttacctttatattcggcttgcttaatgccaatagacgcaagatactggagacctcctttggataccagttacctatggtggactcttttaagtggtacagcgttgggtatatgaagcatctggacagggacccggaaaaactcactcaccacatgcctctcttctattgtctgtacgaaaacagagaggaagaatttgtgaagacaatagtggacgcccttatggaagtgacggtatatctccagtccgataaagatatgatggtctccctctattgtttagactactgctgccacctccgcacgctcaagctgtccgttcaaaggatattccagaataaggaaccactgattcggccaactgcccgattgagttacgtgtcaacagcttccggtttcgaggacctgctgaaggccctcgcgaggaatcggtcactgacttatctctcaatcaactgtacctcaattagtcttaatatgttttcactcctgcacgatattcttcacgagccaacatgtcagatcagccacctttctctaatgaagtgtgacctaagggcttcagaatgcgaggagattgcctcactgctgatatccgggggctctctccgtaaattgactttgtcctcaaacccactgcgcagcgatggcatgaatatattgtgtgatgctctgttacatcccaactgtacacttattagtcttgtacttgtcttttgctgtctgactgagaactgctgtagcgccctgggccgtgtcctactgtttagcccaaccttgaggcagctcgatctgtgtgtgaacaggctcaagaattacggcgttttgcatgtaacctttccattgctgttccccacctgtcaactggaggaattacatctgtcagggtgctttttctctagtgatatctgtcagtatatcgccatcgtgatcgccactaatgaaaaactgaggtcattggagatcggctccaataagatcgaggatgctggcatgcagctgctgtgcggggggttacgccaccccaactgcatgctggttaatatcggcctcgaggaatgcatgcttacatccgcatgctgtcggtcacttgcatctgtcctgacaactaataagacattagaaagactcaacctgctgcagaatcacctggggaatgatggagtggccaagcttcttgaaagcctgatttctccggattgcgttctaaaagttgtcggcctgccactgactggcctgaacacccagacacagcagctgcttatgaccgtgaaggaaaggaagccaagcctgattttcttatctgagacatggtctcttaaagaaggccgggaaatcggcgttacacccgcttctcagcctggcagcattatcccaaacagcaacctggattatatgttcttcaaatttccgcgcatgagtgcggccatgagaactagtaatacagcttcgcggcaacctctatag

SEQ ID NO: 239930 - DNA, 3102 bp, Artificial Sequence
  derived and/or modified sequence
atggcagaatcagactctaccgacttcgacctcctgtggtacttggaaaacttgagtgataaggagtttcagagctttaaaaaatacctggcacggaagatccttgacttcaaactacctcagtttcctttaatccaaatgacaaaggaagaactggcgaacgtcctacctatctcttacgagggccagtacatctggaatatgctttttagcattttcagcatgatgcgaaaggaagacctctgtcgaaaaattattggtagacgcaaccggaaccaagaagcctgcaaggccgtgatgcgacgcaagtttatgctccaatgggagagccacacgttcgggaagtttcattataagtttttcagggacgtttcctcagacgttttttacattttgcagttagcctatgacagtaccagttattactcagccaacaacctgaacgtgtttttaatgggggagagggccagcgggaagaccattgtcatcaacttggcggtacttcggtggataaagggagaaatgtggcaaaatatgatcagctatgtcgtacacttaaccgcccatgaaataaatcagatgacaaatagcagcctcgccgaactcatagctaaagactggcccgacggccaggcacccatcgccgacatcttgagtgatccgaagaagctgttgttcattcttgaggacctggacaatatccgtttcgagctcaacgttaacgaatccgcactctgcagcaattccacccagaaagtgccgatccccgtgttactggttagcctgctgaagaggaaaatggcccccgggtgctggtttctgatctcatcccgccccacccgtggcaacaatgttaaaactttcctgaaagaggtggattgctgcaccacgctgcagctgtctaatgggaaacgtgagatctatttcaactcgttttttaaggaccgccagcgggccagcgcagcactccaactcgtgcacgaagacgagattcttgtcggtctctgtcgggtggcgatcctttgctggattacttgcacagtgctaaagcggcagatggataagggtagagactttcagctatgttgtcaaacacctaccgacttgcatgcacattttctcgccgatgccctgaccagtgaagctggtctgactgctaaccagtatcacctgggcctgttaaagcgactgtgcctgctcgcggccggcggactgtttctcagcactctgaacttctccggcgaggatctgcggtgcgtaggcttcaccgaggccgatgtttcagtcctgcaggccgccaacatcttgctgccgagcaatacccataaagatcgatataagttcattcacctcaacgtccaggaattttgcactgccatcgcgtttcttatggcagtgccaaattacctgatcccaagtggctctagggagtacaaggagaaacgagaacagtacagtgacttcaatcaggtgttcacgtttatctttggccttctgaatgctaataggcgcaagatcctcgagacttcttttggctatcagctgcccatggtagactcttttaaatggtattccgtgggatatatgaaacatttggaccgggatccagaaaagcttactcaccacatgcctctgttctactgtctttacgagaaccgagaggaagaattcgttaagactatcgttgatgcactgatggaagtgactgtttatctccaatctgataaggacatgatggtcagcttgtattgcttggattattgttgccacttgcgcactctgaaactgagtgtccaacggatttttcagaataaagagccacttatcaggccaacagccagccagatgaaaagtctggtctattggagggaaatttgctccttgttttacactatggagagcctgagggaactacacatctttgacaacgatctgaacggaatttctgagagaattctttccaaagcgctggaacactctagttgtaaactgcgaacactgaaactctcatacgtcagcacagcctctggtttcgaagatctgctcaaggcgctggccagaaacaggagtctgacctatttgtcaataaattgcacatcaatctctctaaacatgttcagcctccttcacgacatccttcacgagcctacatgccagatttcacatttatcccttatgaaatgtgatctcagagctagtgagtgcgaggagatcgccagcctgttgatcagtggaggaagtctacgcaaacttaccctgtcatcaaacccactgcgctcggacgggatgaacatcctgtgcgacgctttattgcatcctaattgcactctcatatccctggtgctggtgttctgttgtctgactgagaactgttgcagtgccctggggcgggtgttgcttttcagccccacactcaggcagttagatctctgtgtgaacaggctcaaaaattacggcgttctgcatgtgacctttcctcttttgttcccaacgtgccagctcgaagaattgcatctgtctggatgcttcttttctagtgacatttgccagtatattgccattgtgatcgctaccaatgaaaagttgcggagcctggagatcgggtccaacaaaatcgaggacgctggtatgcaacttctctgcggtggtctgagacatcctaattgtatgctggtgaacataggtttggaggagtgcatgctaactagtgcctgttgtaggtccctggcttcagtcctgaccacaaacaaaactctggagcgcttgaatcttctccagaatcatctgggtaatgacggggtcgccaagctgctggaatcgttgatctcaccggattgtgtgctgaaggtggtgggcctcccactcactgggcttaacacgcagactcaacaactccttatgaccgtgaaggagagaaagccttcccttatctttctgagtgagacctggagcctgaaggagggacgggagattggagtgacaccagccagtcagccagggtccatcattcccaactccaacctagactatatgttttttaaattcccacgaatgagcgcagccatgagaacaagcaataccgcatcgcgtcagccactgtag

SEQ ID NO: 239931 - DNA, 2940 bp, Artificial Sequence
  derived and/or modified sequence
atggccgagagtgacagcacagactttgacctgctgtggtacctggagaacctgagtgacaaggagttccagagcttcaagaagtacctggccaggaagatcctggacttcaagctgccccagttccccctcatccagatgaccaaggaggagctggccaacgtgctgcccatctcctatgagggccagtacatctggaacatgctgttcagcatcttctccatgatgaggaaagaagacctgtgcaggaagatcatcggcagaagaaacagaaaccaggaggcctgcaaggctgtgatgaggaggaagttcatgctgcagtgggagagccacaccttcggcaagttccactacaagttcttcagagatgtgtccagtgatgtgttctacatcctgcagctggcctatgacagcaccagctactacagcgccaacaacctgaatgtgttcctgatgggagagcgggccagcggcaagaccatcgtcatcaacctggccgtgctgcgctggatcaagggggagatgtggcagaacatgatctcctatgtggtgcacctgacagcccacgagatcaaccagatgaccaacagcagcctggccgagctgattgccaaggactggccagatggccaggcccccatcgctgacatcctgagtgaccccaagaagctgctcttcatcctggaggacctggacaacatccgctttgagctgaatgtgaatgaaagtgccctgtgcagcaacagcacccagaaggtgcccatccctgtgctgctggtgtccctgctgaagaggaagatggcccctggctgctggttcctgatcagcagccggcccacccggggcaacaacgtgaagaccttcctgaaggaggtggactgctgcaccaccctgcagctgagcaatggcaagcgggagatctacttcaacagcttcttcaaggaccggcagagggccagcgctgccctgcagctggtgcatgaagatgagatcctggtgggcctgtgccgggtggccatcctgtgctggatcacctgcaccgtgctgaagaggcagatggacaagggccgggacttccagctgtgctgccagacccccacagacctgcacgcccacttcctggctgatgccctgaccagcgaggccggcctgacagccaaccagtaccacctgggcctgctgaagaggctgtgcctgctggccgccggcggcctcttcctgagcaccctgaacttctctggagaggacctgcgctgtgtgggcttcacagaagcagatgtgtctgtgctgcaggccgccaacatcctgctgcccagcaacacccacaaggaccgctacaagttcatccacctgaatgtgcaggagttctgcacagccatcgccttcctgatggctgtgcccaactacctgatccccagcggcagccgggagtacaaggagaagcgggagcagtacagcgacttcaaccaggtgttcaccttcatcttcggcctgctgaatgccaacagaaggaagatcctggagaccagctttggctaccagctgcccatggtggacagcttcaagtggtacagcgtgggctacatgaagcacctggaccgggaccctgagaagctgacccaccacatgcccctcttctactgcctgtatgaaaatcgggaggaggagtttgtgaagaccatcgtggatgccctgatggaggtgacagtgtacctgcagagcgacaaggacatgatggtgtccctgtactgcctggactactgctgccacctgcggaccctgaagctgtctgtgcagaggatcttccagaacaaggagcccctcatccggcccacagcccggctgtcctatgtgtccacagccagcggctttgaggacctgctgaaggccctggccaggaacagaagcctgacctacctgagcatcaactgcaccagcatcagcctgaacatgttcagcctgctgcatgacatcctgcacgagcccacctgccagatcagccacctgagcctgatgaagtgtgacctgcgggcctctgaatgtgaggagatcgccagcctgctgatcagcggcggcagcctgaggaagctgaccctgagcagcaaccccctgcggagtgatggcatgaacatcctgtgtgatgccctgctgcaccccaactgcaccctcatcagcctggtgctggtgttctgctgcctgacagagaactgctgcagcgccctgggccgggtgctgctcttcagccccaccctgcggcagctggacctgtgtgtgaaccggctgaagaactacggcgtgctgcacgtgaccttccccctgctcttccccacctgccagctggaggagctgcacctgagcggctgcttcttcagcagtgacatctgccagtacatcgccatcgtcatcgccaccaatgagaagctgcggagcctggagatcggcagcaacaagattgaagatgctggcatgcagctgctgtgtggcggcctgcggcaccccaactgcatgctggtgaacatcggcctggaggagtgcatgctgaccagcgcctgctgccgcagcctggcctctgtgctgaccaccaacaagaccctggagcggctgaacctgctgcagaaccacctgggcaatgatggagtggccaagctgctggagagcctcatcagcccagactgtgtgctgaaggtggtgggcctgcccctgaccggcctgaacacccagacccagcagctgctgatgacagtgaaggagaggaagcccagcctcatcttcctgtctgagacctggagcctgaaggagggccgggagattggagtgaccccagccagccagcccggcagcatcatccccaacagcaacctggactacatgttcttcaagttccccaggatgtctgctgccatgaggaccagcaacacagccagccggcagcccctgtag

SEQ ID NO: 239932 - DNA, 3102 bp, Artificial Sequence
  derived and/or modified sequence
atggccgagagtgacagcacagactttgacctgctgtggtacctggagaacctgagtgacaaggagttccagagcttcaagaagtacctggccaggaagatcctggacttcaagctgccccagttccccctcatccagatgaccaaggaggagctggccaacgtgctgcccatctcctatgagggccagtacatctggaacatgctgttcagcatcttctccatgatgaggaaagaagacctgtgcaggaagatcatcggcagaagaaacagaaaccaggaggcctgcaaggctgtgatgaggaggaagttcatgctgcagtgggagagccacaccttcggcaagttccactacaagttcttcagagatgtgtccagtgatgtgttctacatcctgcagctggcctatgacagcaccagctactacagcgccaacaacctgaatgtgttcctgatgggagagcgggccagcggcaagaccatcgtcatcaacctggccgtgctgcgctggatcaagggggagatgtggcagaacatgatctcctatgtggtgcacctgacagcccacgagatcaaccagatgaccaacagcagcctggccgagctgattgccaaggactggccagatggccaggcccccatcgctgacatcctgagtgaccccaagaagctgctcttcatcctggaggacctggacaacatccgctttgagctgaatgtgaatgaaagtgccctgtgcagcaacagcacccagaaggtgcccatccctgtgctgctggtgtccctgctgaagaggaagatggcccctggctgctggttcctgatcagcagccggcccacccggggcaacaacgtgaagaccttcctgaaggaggtggactgctgcaccaccctgcagctgagcaatggcaagcgggagatctacttcaacagcttcttcaaggaccggcagagggccagcgctgccctgcagctggtgcatgaagatgagatcctggtgggcctgtgccgggtggccatcctgtgctggatcacctgcaccgtgctgaagaggcagatggacaagggccgggacttccagctgtgctgccagacccccacagacctgcacgcccacttcctggctgatgccctgaccagcgaggccggcctgacagccaaccagtaccacctgggcctgctgaagaggctgtgcctgctggccgccggcggcctcttcctgagcaccctgaacttctctggagaggacctgcgctgtgtgggcttcacagaagcagatgtgtctgtgctgcaggccgccaacatcctgctgcccagcaacacccacaaggaccgctacaagttcatccacctgaatgtgcaggagttctgcacagccatcgccttcctgatggctgtgcccaactacctgatccccagcggcagccgggagtacaaggagaagcgggagcagtacagcgacttcaaccaggtgttcaccttcatcttcggcctgctgaatgccaacagaaggaagatcctggagaccagctttggctaccagctgcccatggtggacagcttcaagtggtacagcgtgggctacatgaagcacctggaccgggaccctgagaagctgacccaccacatgcccctcttctactgcctgtatgaaaatcgggaggaggagtttgtgaagaccatcgtggatgccctgatggaggtgacagtgtacctgcagagcgacaaggacatgatggtgtccctgtactgcctggactactgctgccacctgcggaccctgaagctgtctgtgcagaggatcttccagaacaaggagcccctcatccggcccacagccagccagatgaagagcctggtgtactggagggagatctgcagcctcttctacaccatggagagcctgcgggagctgcacatctttgacaatgacctgaatggcatcagcgagcgcatcctgagcaaggccctggagcacagcagctgcaagctgcggaccctgaagctgtcctatgtgtccacagccagcggctttgaggacctgctgaaggccctggccaggaacagaagcctgacctacctgagcatcaactgcaccagcatcagcctgaacatgttcagcctgctgcatgacatcctgcacgagcccacctgccagatcagccacctgagcctgatgaagtgtgacctgcgggcctctgaatgtgaggagatcgccagcctgctgatcagcggcggcagcctgaggaagctgaccctgagcagcaaccccctgcggagtgatggcatgaacatcctgtgtgatgccctgctgcaccccaactgcaccctcatcagcctggtgctggtgttctgctgcctgacagagaactgctgcagcgccctgggccgggtgctgctcttcagccccaccctgcggcagctggacctgtgtgtgaaccggctgaagaactacggcgtgctgcacgtgaccttccccctgctcttccccacctgccagctggaggagctgcacctgagcggctgcttcttcagcagtgacatctgccagtacatcgccatcgtcatcgccaccaatgagaagctgcggagcctggagatcggcagcaacaagattgaagatgctggcatgcagctgctgtgtggcggcctgcggcaccccaactgcatgctggtgaacatcggcctggaggagtgcatgctgaccagcgcctgctgccgcagcctggcctctgtgctgaccaccaacaagaccctggagcggctgaacctgctgcagaaccacctgggcaatgatggagtggccaagctgctggagagcctcatcagcccagactgtgtgctgaaggtggtgggcctgcccctgaccggcctgaacacccagacccagcagctgctgatgacagtgaaggagaggaagcccagcctcatcttcctgtctgagacctggagcctgaaggagggccgggagattggagtgaccccagccagccagcccggcagcatcatccccaacagcaacctggactacatgttcttcaagttccccaggatgtctgctgccatgaggaccagcaacacagccagccggcagcccctgtag

SEQ ID NO: 239933 - DNA, 2940 bp, Artificial Sequence
  derived and/or modified sequence
atggccgagagcgacagcaccgacttcgacctgctgtggtacctggaaaacttaagtgataaggaatttcagagcttcaaaaaatacctagcccgcaagattttagattttaaactgccccagttccccttgatccagatgacaaaagaggagttggcaaacgtgttgcccatatcttacgaaggacagtacatttggaacatgctgttctccatattctcaatgatgaggaaggaggatctttgtcgcaagatcatcgggcgccggaacaggaatcaagaagcctgcaaagccgttatgcggaggaagttcatgctccagtgggagtcacacaccttcggaaaattccattataagttcttccgcgatgtgtcttctgacgtgttttacatcctgcagttggcttatgacagcacaagctactatagtgcgaacaaccttaacgtttttctgatgggcgagcgggcttccggcaagaccattgtgatcaacttggccgtgctgagatggatcaaaggcgaaatgtggcagaacatgatctcatacgtagttcacctgacagcacacgagatcaatcagatgactaactccagcttagcagagctgatcgctaaggactggcccgatggccaggctcccattgcagacatcctgtctgatccgaaaaaactactgtttattcttgaggacttggataatattcgtttcgaacttaatgtaaacgaatcagctttatgctccaattctacccagaaggtgcctatcccagtgctgctggtcagcctgctgaagaggaagatggctcctggatgttggttcctgatcagcagccgccccaccagagggaataatgtcaagaccttcttgaaagaagtggattgctgtaccaccctgcaactatccaacggcaagagggagatttattttaactcttttttcaaagatcgtcagagggcaagcgcagcactgcaactggtgcacgaagacgaaatcttagtgggcttgtgcagggtagcaatcctttgctggataacctgcactgtgcttaaacggcagatggataaaggtcgggattttcagctgtgttgtcagacacccacagaccttcatgcccatttccttgccgatgcacttactagtgaagctgggttgaccgcaaatcaatatcatctcgggttgttaaagagattgtgtttgcttgccgcaggaggcctgttcttatctacactgaactttagtggcgaagacttgaggtgcgttggatttacagaggctgacgtgtctgtcttgcaagcggctaacattctgctgccctctaacacacacaaggataggtataagtttattcacctgaacgtccaagaattctgcaccgccatagcattccttatggccgtgcccaactatcttatccccagcgggtccagggaatacaaggagaaaagggagcagtattctgatttcaaccaggtcttcaccttcatcttcggcctgcttaacgccaacaggcgcaagatcctggagactagtttcggctatcaactgcccatggtggattcatttaaatggtacagtgtaggatacatgaagcatctggaccgtgacccagagaaactgacacaccacatgcccctgttctattgcctgtacgaaaatagagaagaggaatttgtcaagactatagtggatgccctcatggaggtaactgtgtatctccagtctgataaggacatgatggtatcactgtactgcttggattactgctgccatttgcggacccttaagctgagcgtccagcgcatctttcagaataaggagcctctaatccgccccaccgctcggctgagttacgtgagcacagcttccggcttcgaagacctgctgaaggctttggctaggaacagatcactgacgtacctaagcatcaattgtacatccatctccctaaacatgtttagccttctgcatgacatactccacgagcctacatgtcagattagtcacctgtctttaatgaagtgtgacctgcgcgcctccgaatgtgaagaaattgccagtctgcttatttctggcgggtcactccgcaaactgacattgagcagcaacccgctcagaagtgacggcatgaacattctgtgcgacgcactgctccaccctaactgtacactcatttccttggtgcttgtgttctgttgtctgactgagaactgctgctcagctctaggccgagtcttactgttctcccctacacttagacagctggatctctgcgtgaacaggttgaaaaactatggtgtcttacatgtgactttcccactcctatttcccacgtgtcagctggaggaactgcatctgtctggatgctttttttcaagcgatatatgccagtatatcgccattgtgatcgccacaaatgagaaactgcgctccctggaaatagggagcaataagatcgaggatgctggcatgcagttgctgtgcggcggactgcgccatcctaattgcatgctcgtgaacatcggtctggaggagtgcatgctgacctccgcttgttgtcgttccctggccagcgtgctaacaactaacaagactcttgaaagactcaatttgctgcagaaccacctcggcaatgacggagtcgctaagttgctcgaatctctgattagtccagactgcgtgctgaaggtggtcggtctaccccttaccggtctgaacacacagacccaacagcttctcatgacggtgaaggaaagaaaaccttcgcttatctttttgtccgagacctggagcctgaaggagggacgggagatcggtgtcacaccagcgtcccagccgggcagcatcataccaaacagcaacttggactacatgtttttcaaatttccgcgtatgtctgcggccatgaggacgtccaacacagcaagccgacagcctctctag

SEQ ID NO: 239934 - DNA, 3102 bp, Artificial Sequence
  derived and/or modified sequence
atggccgagagcgacagcaccgacttcgacctgctgtggtacctggagaacctgtctgacaaagagttccagtcattcaaaaagtatctcgctaggaaaatcctggactttaagcttccacagtttcctctaatacagatgactaaagaagaactggcaaacgtgctgcccatctcctacgagggccagtacatctggaacatgttatttagcatctttagtatgatgcggaaggaggatctctgcagaaagatcatcgggaggcggaaccgaaaccaggaggcttgtaaggcagtgatgcgccggaaatttatgctgcaatgggagtctcatacatttgggaagttccactataagttcttcagagatgtgagctccgacgtgttctacatactgcaactggcctacgactccacaagctattacagcgcgaataacctcaatgtgtttttgatgggcgaacgggcatctggcaagaccatagtgatcaatctcgcagtgctgcgatggatcaaaggagagatgtggcagaacatgatctcttacgttgtgcatctgactgctcatgagatcaatcagatgactaattcgtccctcgctgagttaatcgcgaaggactggcccgacggccaggcccctatagcggacattttatccgatccaaaaaagcttctattcatactggaggatctggacaacatcaggtttgaacttaacgtgaatgaatcggcattatgttctaactcaacacagaaggttccaattccagttctgctggttagcctgctgaagaggaaaatggccccgggctgttggtttctgatttcatcccggcccacacgcggtaacaatgtgaaaacctttctgaaagaagtcgattgttgtaccaccctccagctgagcaacgggaagcgtgagatttactttaactcttttttcaaggatcgacagcgagcaagcgctgccctccagttagttcacgaggacgaaattttggtgggattgtgccgagtcgcaatcctttgctggataacttgcactgtactgaagcgccagatggataaaggcagggattttcaactgtgttgccagaccccaaccgatctgcatgcgcacttcttggcagatgccttaacttctgaagcgggcctcaccgctaatcagtaccacttaggacttctgaagagactttgcctccttgcggctggtggcctcttcctgtctaccctaaacttcagcggggaggacctgcgctgtgtgggttttacagaggccgacgtgtcagtgctccaggccgcaaacatactactgccatccaacacccataaggataggtacaagttcatccatctgaatgtacaggagttttgtactgcaatcgctttcctgatggccgtcccaaactaccttattccatctgggtctagagaatataaagagaagagggaacagtattcggactttaaccaggtgttcacgttcatatttggcttgctcaacgcgaatcggagaaagatcttagaaacgtcttttgggtaccagctgcccatggtggacagtttcaagtggtattcagtcggatacatgaaacacctggatcgagaccctgaaaaattaacccaccatatgccactcttctactgtctctacgagaaccgagaggaggagttcgtgaaaacaattgtggacgcccttatggaggtcaccgtttatctgcagtccgataaagatatgatggtcagcctttactgcctcgactactgctgccatctcagaacgctcaagctcagtgttcagaggatcttccagaacaaagagcctctgatccggccaacggcttcacaaatgaagtctctggtgtattggagagagatttgtagtttgttttatactatggagagtctccgcgagttacacatttttgataacgatctcaacggcatttctgagagaattttgtccaaggcccttgaacactcttcatgtaaacttagaacgttaaagctgtcttatgtgagcacagcctccggcttcgaggacctgcttaaggcccttgcacgtaatcggtcactcacttatctgagcatcaactgcactagcatcagcttgaatatgttctcccttctccacgacatcctgcatgaaccaacctgtcagatctctcatctgagcttgatgaaatgcgatttgagagcgtcagagtgcgaagagatagcgagtctgctgatctccggcggctccctgagaaaattaactctctcctctaatcctctcaggtccgacggtatgaatatactgtgtgacgctctcttgcatcctaactgtaccttaataagtcttgtgcttgtgttctgttgtctgaccgaaaattgctgctcggccttaggcagagtacttctcttttcacccacccttcggcagctcgacctgtgtgttaatcgcctcaagaactatggcgtgctccatgtgacttttcctctgttgttccccacctgtcagctggaagagctgcacctttcaggttgctttttctcctcagacatctgccaatatatcgccatcgtaatagcaactaacgagaagctaaggagcctcgagatcgggagtaataagatcgaggacgcgggcatgcaactgctttgcggggggcttcgacatcctaactgtatgctggtgaatattggtttggaagagtgtatgctcacctcagcttgttgtcgatcactcgctagtgtactgaccacaaacaagacactggagcgccttaatctattgcagaaccacctggggaacgacggggtcgccaagctgttagaatccctgatatcccccgattgtgttttgaaagttgtgggtctccctctgacaggtctgaacactcagacccaacagctcttgatgacagtaaaagagcgaaaacccagcctaatcttcctcagcgagacttggtcacttaaagagggccgagaaattggcgtcactcctgcctcacagcctggctcgatcattccgaacagcaacctcgattatatgttcttcaaatttccaagaatgtcagccgccatgcgcacgtcaaatacagcctcaagacagcctttatag

SEQ ID NO: 239935 - DNA, 3872 bp, Artificial Sequence
  derived and/or modified sequence
ataaacacagggcgttcatctaccccactaactggagagaaggaaaacgctgggtaaatagaatggagaggcctggctgtgatcgatcagcctcaagaaaggagacagggtaaaagggagaaagaaaaggaagacccaaagtaacccaggaaatcagcacatagaagagacgaacagcccagcacgaagcgctgactcaccgctccacgccttcctggtccttaatgattggcggctggaagcgggaagaaaagatccgtggtgccatttgattggccaacgaattgctcccttgccattggctcagagggcttttgatgaacagatccagaaaatatgtgaagcgaaacgcccaccgccccttgaggggctgttctagacctttgctcctggtgtcgtatagagcgggggatatttcaagctggagatccgttttcttgtcccagtgaacaggtgcactatgttgaaataagagtggtgacggaggccttgtttatcttgtatcttattgtaaaaggtcatcaagaacccaccttggccaatcaagagaggagtcagctggctaatcaccgggcaggcaccgcctttttcttcccgctgcctagcttgtttgctttcgaccagccaaggagacctggtggcagggttgatctcatatttcttgtgcctcaaaatcccttctctgaagtctgccttccctggagaagcaagatggcagaatcggattctactgactttgacctgctgtggtatctagagaatctcagtgacaaggaatttcagagttttaagaagtatctggcacgcaagattcttgatttcaaactgccacagtttccactgatacagatgacaaaagaagaactggctaacgtgttgccaatctcttatgagggacagtatatatggaatatgctcttcagcatattttcaatgatgcgtaaggaagatctttgtaggaagatcattggcagacgaaaccgcaatcaggaggcatgcaaagctgtcatgaggagaaaattcatgctgcaatgggaaagtcacacttttggaaaatttcattataaattttttcgtgacgtttcgtcagatgtgttctacatacttcaattagcctatgattctaccagctattattcagcaaacaatctcaatgtgttcctgatgggagagagagcatctggaaaaactattgttataaatctggctgtgttgaggtggatcaagggtgagatgtggcagaacatgatctcgtacgtcgttcacctcactgctcacgaaataaaccagatgaccaacagcagcttggctgagctaatcgccaaggactggcctgacggccaggctcccattgcagacatcctgtctgatcccaagaaactccttttcatcctcgaggacttggacaacataagattcgagttaaatgtcaatgaaagtgctttgtgtagtaacagcacccagaaagttcccattccagttctcctggtcagtttgctgaagagaaaaatggctccaggctgctggttcctcatctcctcaaggcccacacgtgggaataatgtaaaaacgttcttgaaagaggtagattgctgcacgaccttgcagctgtcgaatgggaagagggagatatattttaactctttctttaaagaccgccagagggcgtcggcagccctccagcttgtacatgaggatgaaatactcgtgggtctgtgccgagtcgccatcttatgctggatcacgtgtactgtcctgaagcggcagatggacaaggggcgtgacttccagctctgctgccaaacacccactgatctacatgcccactttcttgctgatgcgttgacatcagaggctggacttactgccaatcagtatcacctaggtctcctaaaacgtctgtgtttgctggctgcaggaggactgtttctgagcaccctgaatttcagtggtgaagacctcagatgtgttgggtttactgaggctgatgtctctgtgttgcaggccgcgaatattcttttgccgagcaacactcataaagaccgttacaagttcatacacttgaacgtccaggagttttgtacagccattgcatttctgatggcagtacccaactatctgatcccctcaggcagcagagagtataaagagaagagagaacaatactctgactttaatcaagtgtttactttcatttttggtcttctaaatgcaaacaggagaaagattcttgagacatcctttggataccagctaccgatggtagacagcttcaagtggtactcggtgggatacatgaaacatttggaccgtgacccggaaaagttgacgcaccatatgcctttgttttactgtctctatgagaatcgggaagaagaatttgtgaagacgattgtggatgctctcatggaggttacagtttaccttcaatcagacaaggatatgatggtctcattatactgtctggattactgctgtcacctgaggacacttaagttgagtgttcagcgcatctttcaaaacaaagagccacttataaggccaactgctaggttgtcctatgtctcgactgcttctggttttgaagacttactcaaggctttggctcgtaatcggagcctgacatacctgagtatcaactgtacgtccatttccctaaatatgttttcacttctgcatgacatcctgcacgagcccacatgccaaataagtcatctgagcttgatgaaatgtgatttgcgagccagcgaatgtgaagaaatcgcctctctcctcatcagtggcgggagtctgagaaaactgaccttatccagcaatccgctgaggagcgacgggatgaacatactgtgtgatgccttgcttcatcccaactgcactcttatatcactggtgttagtcttctgctgtctcactgaaaattgctgcagcgcccttggaagagtgcttctgttcagcccaactctaagacaactagacctgtgtgtgaatcgcttaaaaaattacggagtgttgcatgtgacgtttcccttgctgtttccaacctgtcagttagaggagcttcatctgtctggctgtttctttagcagcgatatctgtcaatatattgccatagttattgctactaatgaaaaactgaggagcctggagattgggagcaacaaaatagaagatgcaggaatgcagctgctatgtggtggtttgagacatcccaactgcatgttggtgaatattgggctagaagagtgcatgttaaccagtgcctgctgtcgatctcttgcctctgttcttaccaccaacaaaacactagaaagactcaacttgcttcaaaatcacttgggcaatgatggagttgcaaaacttcttgagagcttgatcagcccagattgtgtacttaaggtagttgggcttccattaactggcctgaacacacaaacccagcagttgctgatgactgtaaaggaaagaaaacccagtttgatctttctgtctgaaacttggtctttaaaggaaggcagagaaattggtgtgacacctgcttctcagccaggttcaataatacctaattctaatttggattacatgtttttcaaatttcccagaatgtctgcagccatgagaacgtcaaatacagcatctaggcaacccctttgatcatgttgtacgtaaacagtatttattataaattactaccgtgactgggatgcaagagaattaggactataattttcctatttgatgtgtgtgtgtgtgtgtgtgtgtgtgtgtgtgtgtgtgtgtgtgtgaccttgatccagtcaaccacttcaaattcctacactgtctcaagagtattaaaaggattatatgaagtaataaaggataaaatgcattgg

SEQ ID NO: 239936 - DNA, 4034 bp, Artificial Sequence
  derived and/or modified sequence
ataaacacagggcgttcatctaccccactaactggagagaaggaaaacgctgggtaaatagaatggagaggcctggctgtgatcgatcagcctcaagaaaggagacagggtaaaagggagaaagaaaaggaagacccaaagtaacccaggaaatcagcacatagaagagacgaacagcccagcacgaagcgctgactcaccgctccacgccttcctggtccttaatgattggcggctggaagcgggaagaaaagatccgtggtgccatttgattggccaacgaattgctcccttgccattggctcagagggcttttgatgaacagatccagaaaatatgtgaagcgaaacgcccaccgccccttgaggggctgttctagacctttgctcctggtgtcgtatagagcgggggatatttcaagctggagatccgttttcttgtcccagtgaacaggtgcactatgttgaaataagagtggtgacggaggccttgtttatcttgtatcttattgtaaaaggtcatcaagaacccaccttggccaatcaagagaggagtcagctggctaatcaccgggcaggcaccgcctttttcttcccgctgcctagcttgtttgctttcgaccagccaaggagacctggtggcagggttgatctcatatttcttgtgcctcaaaatcccttctctgaagtctgccttccctggagaagcaagatggcagaatcggattctactgactttgacctgctgtggtatctagagaatctcagtgacaaggaatttcagagttttaagaagtatctggcacgcaagattcttgatttcaaactgccacagtttccactgatacagatgacaaaagaagaactggctaacgtgttgccaatctcttatgagggacagtatatatggaatatgctcttcagcatattttcaatgatgcgtaaggaagatctttgtaggaagatcattggcagacgaaaccgcaatcaggaggcatgcaaagctgtcatgaggagaaaattcatgctgcaatgggaaagtcacacttttggaaaatttcattataaattttttcgtgacgtttcgtcagatgtgttctacatacttcaattagcctatgattctaccagctattattcagcaaacaatctcaatgtgttcctgatgggagagagagcatctggaaaaactattgttataaatctggctgtgttgaggtggatcaagggtgagatgtggcagaacatgatctcgtacgtcgttcacctcactgctcacgaaataaaccagatgaccaacagcagcttggctgagctaatcgccaaggactggcctgacggccaggctcccattgcagacatcctgtctgatcccaagaaactccttttcatcctcgaggacttggacaacataagattcgagttaaatgtcaatgaaagtgctttgtgtagtaacagcacccagaaagttcccattccagttctcctggtcagtttgctgaagagaaaaatggctccaggctgctggttcctcatctcctcaaggcccacacgtgggaataatgtaaaaacgttcttgaaagaggtagattgctgcacgaccttgcagctgtcgaatgggaagagggagatatattttaactctttctttaaagaccgccagagggcgtcggcagccctccagcttgtacatgaggatgaaatactcgtgggtctgtgccgagtcgccatcttatgctggatcacgtgtactgtcctgaagcggcagatggacaaggggcgtgacttccagctctgctgccaaacacccactgatctacatgcccactttcttgctgatgcgttgacatcagaggctggacttactgccaatcagtatcacctaggtctcctaaaacgtctgtgtttgctggctgcaggaggactgtttctgagcaccctgaatttcagtggtgaagacctcagatgtgttgggtttactgaggctgatgtctctgtgttgcaggccgcgaatattcttttgccgagcaacactcataaagaccgttacaagttcatacacttgaacgtccaggagttttgtacagccattgcatttctgatggcagtacccaactatctgatcccctcaggcagcagagagtataaagagaagagagaacaatactctgactttaatcaagtgtttactttcatttttggtcttctaaatgcaaacaggagaaagattcttgagacatcctttggataccagctaccgatggtagacagcttcaagtggtactcggtgggatacatgaaacatttggaccgtgacccggaaaagttgacgcaccatatgcctttgttttactgtctctatgagaatcgggaagaagaatttgtgaagacgattgtggatgctctcatggaggttacagtttaccttcaatcagacaaggatatgatggtctcattatactgtctggattactgctgtcacctgaggacacttaagttgagtgttcagcgcatctttcaaaacaaagagccacttataaggccaactgctagtcaaatgaagagccttgtctactggagagagatctgctctcttttttatacaatggagagcctccgggagctgcatatctttgacaatgaccttaatggtatttcagaaaggattctgtctaaagccctggagcattctagctgtaaacttcgcacactcaagttgtcctatgtctcgactgcttctggttttgaagacttactcaaggctttggctcgtaatcggagcctgacatacctgagtatcaactgtacgtccatttccctaaatatgttttcacttctgcatgacatcctgcacgagcccacatgccaaataagtcatctgagcttgatgaaatgtgatttgcgagccagcgaatgtgaagaaatcgcctctctcctcatcagtggcgggagtctgagaaaactgaccttatccagcaatccgctgaggagcgacgggatgaacatactgtgtgatgccttgcttcatcccaactgcactcttatatcactggtgttagtcttctgctgtctcactgaaaattgctgcagcgcccttggaagagtgcttctgttcagcccaactctaagacaactagacctgtgtgtgaatcgcttaaaaaattacggagtgttgcatgtgacgtttcccttgctgtttccaacctgtcagttagaggagcttcatctgtctggctgtttctttagcagcgatatctgtcaatatattgccatagttattgctactaatgaaaaactgaggagcctggagattgggagcaacaaaatagaagatgcaggaatgcagctgctatgtggtggtttgagacatcccaactgcatgttggtgaatattgggctagaagagtgcatgttaaccagtgcctgctgtcgatctcttgcctctgttcttaccaccaacaaaacactagaaagactcaacttgcttcaaaatcacttgggcaatgatggagttgcaaaacttcttgagagcttgatcagcccagattgtgtacttaaggtagttgggcttccattaactggcctgaacacacaaacccagcagttgctgatgactgtaaaggaaagaaaacccagtttgatctttctgtctgaaacttggtctttaaaggaaggcagagaaattggtgtgacacctgcttctcagccaggttcaataatacctaattctaatttggattacatgtttttcaaatttcccagaatgtctgcagccatgagaacgtcaaatacagcatctaggcaacccctttgatcatgttgtacgtaaacagtatttattataaattactaccgtgactgggatgcaagagaattaggactataattttcctatttgatgtgtgtgtgtgtgtgtgtgtgtgtgtgtgtgtgtgtgtgtgtgtgaccttgatccagtcaaccacttcaaattcctacactgtctcaagagtattaaaaggattatatgaagtaataaaggataaaatgcattgg

SEQ ID NO: 239937 - DNA, 2940 bp, Artificial Sequence
  derived and/or modified sequence
atggcagagtctgattcgaccgatttcgacctgctatggtatctcgagaacctgagcgataaggaattccagagtttcaaaaaatatttagcacgcaagattctggactttaagcttccccagttcccgctcatccagatgacgaaagaggagttggccaatgtgttgccaattagctacgagggccaatacatctggaatatgctgttcagcatcttttctatgatgaggaaagaagatctgtgccgcaagataatcggcagacgcaaccgcaaccaagaggcctgtaaggcagtgatgcgccgaaaatttatgttgcagtgggaaagccatacttttggaaaatttcactacaaattttttagggatgtttccagcgatgttttttatattctgcagcttgcttatgattccacaagctattacagtgctaacaacctgaatgttttcctgatgggggagagggcctctgggaaaaccatagtgatcaacctggccgtactacgctggatcaagggagaaatgtggcagaacatgatctcctatgtcgtgcacctcactgcacacgagattaatcagatgactaactcttccttagcagagctcatcgctaaggattggccagacggacaggcccctatagccgatatcctgagcgatcctaagaaactactcttcatcttggaagatctggacaatataaggtttgagcttaacgtgaatgagtcggccttgtgttcaaatagcactcagaaggtgccaattccagtcctactggtttcactgctcaagcgcaaaatggccccagggtgctggttcttaatctcatctaggcccactcgcggtaataatgtgaaaacttttcttaaagaggtcgattgctgtacgacactacagttatctaacgggaaacgtgaaatttacttcaactcgtttttcaaggacagacagcgtgcttcagcagccctgcagctggtacacgaggacgagattctggtcggactatgtagagttgcaattctatgctggatcacatgtactgttctcaaacgccaaatggataagggcagagactttcaactgtgttgccaaactccaacggacttgcacgcccacttcctggctgacgcgctcacatcagaagccggtctaacagctaatcagtaccacctgggactactcaagagactctgcctactggctgccggagggctgtttctgagcaccttgaatttcagtggcgaagatctccggtgcgtcggtttcactgaggcagacgttagtgtgctgcaagcggcaaatatcctacttccttcgaacacccacaaagaccgctacaagttcatacatctaaatgtccaggaattttgcaccgccattgcattcctgatggctgtgcccaactatctcatcccgtcaggatcaagagagtataaggaaaagagagaacagtattccgacttcaaccaggtgttcacctttatattcggcctcctcaatgcgaaccgcagaaaaattctggaaacatcttttgggtaccagctccctatggtggactcattcaagtggtactccgtggggtacatgaaacaccttgatagggatcccgaaaagctgacccatcatatgcccctcttctactgcctgtatgagaacagagaggaagaattcgtcaagaccatcgttgatgccttaatggaggtcaccgtgtacttgcagagcgataaggacatgatggtgtcactgtactgtttggactattgctgccacctaaggactctcaaactaagtgtgcagaggatcttccagaacaaggagccattgattaggccgacagccagactctcctatgtcagtaccgctagcggctttgaagacctgctgaaagcacttgcaagaaatagaagcctgacctacctgtcaatcaactgtaccagcatatcactgaatatgttttctttgctgcacgacattttgcatgagccaacatgccagatctctcacttgagtctgatgaagtgcgaccttagagcatcagaatgcgaggagatagcctcattgttgatctctggaggctctcttcgaaaactcacattgagctcaaatccgttgcggagcgacggtatgaacatcctgtgtgatgccctgctccaccccaactgcaccttgataagcctggtattagttttttgctgtttgacagagaactgctgcagcgcactgggacgcgtactgctgtttagccctacactgcgacagctggatctttgcgttaaccgtcttaagaactatggggtgctgcacgtcactttccccctgctgttccctacatgccagctggaagagctgcatctctccggctgtttcttttctagcgatatatgccaatacatcgcgattgtgatcgcaactaacgaaaaactgcgttcactggaaatcgggtctaacaaaatagaagacgcagggatgcagctactctgtgggggtctgcggcacccaaactgcatgttagtgaacattggtctggaggaatgtatgctgacttcagcatgctgtaggagcctagcctctgtacttaccacaaataaaacactcgaaagactgaacttgttgcaaaaccacctgggtaacgacggggtggccaaactcctagagtctcttatttctcccgactgcgtgctgaaggtggttggcctgcctctgacagggctgaacacccaaacgcagcaacttctgatgaccgtaaaggagaggaagccatcccttatctttctgtccgaaacttggtccttaaaagaaggacgcgagataggggtgaccccagcctctcagcccggatctataattccaaacagtaatctcgactatatgtttttcaagttcccaagaatgagcgctgccatgagaacaagtaatactgcctcaaggcaacctctgtag

SEQ ID NO: 239938 - DNA, 3102 bp, Artificial Sequence
  derived and/or modified sequence
atggctgagagcgactcaactgatttcgacctgctgtggtacctcgaaaacctgtctgataaggaattccagtcctttaaaaagtacctcgccaggaaaatccttgactttaaactgccacaattcccactgatccagatgaccaaagaggaactcgcgaatgttttacccatatcatacgaaggtcaatacatttggaacatgttgttcagcatcttctctatgatgcgaaaagaggatctgtgccgcaagatcattggcaggagaaaccgtaatcaggaggcttgcaaggccgtaatgagacgcaaattcatgttgcaatgggaatcacacactttcggcaagttccactataaattctttcgggatgtgtccagcgacgtcttctacatccttcagctggcatacgacagcacctcttactactcagcgaacaacctgaacgtgttcctgatgggagaacgtgctagtggtaaaacaatcgtaataaacctggcagtgctcaggtggattaagggagaaatgtggcagaatatgatctcctacgttgtacacttaacagctcatgaaattaatcagatgaccaattctagtcttgcggagctaatcgctaaagattggcccgacggccaggccccaatcgccgacatactgtccgatccaaagaaattactcttcatcctggaagaccttgataatatccgctttgaattgaatgtcaacgagagcgcactgtgctctaatagtactcagaaggttcccattccagtgctgctggtgagtttgcttaagcgcaaaatggctccaggatgctggttcctcatttcttcacggccaactaggggaaataatgtcaaaacattcctgaaagaagtggactgttgcacaacactccagttatcaaacggcaagcgggagatatactttaatagttttttcaaggataggcagagggcaagtgcagcacttcagctggtgcacgaggacgaaatcctggtcggattgtgccgagtggctatcctgtgctggattacctgcactgtgttaaaaagacagatggataagggcagagatttccaattatgctgccagacaccaactgacttacatgcccattttctggcagacgctcttactagtgaagccggactgacagccaaccagtaccatcttggcctgctaaagcgtctgtgcttgctcgccgctggaggcctgtttctcagcactctcaatttctctggtgaagacctgcgctgtgttggctttacagaagcagatgtatcggtgcttcaagctgccaatatcctcctgccatcgaacactcataaagatcggtataagttcatccatctcaatgtccaggagttctgcaccgctatcgctttcctgatggctgttccaaattatttgatccccagtgggtcacgcgaatacaaggaaaagcgggaacagtacagcgacttcaaccaggtatttaccttcattttcggactgttgaatgctaaccgaagaaaaattctggaaacgtcttttggctaccagctgcccatggttgactccttcaaatggtattcagtcggatacatgaagcatttggaccgcgacccagaaaagttgacccaccacatgccactcttctactgtctttacgaaaatagagaagaggagttcgtgaaaaccattgtggatgccctgatggaggtgacggtctatcttcagagtgacaaggacatgatggtatcactgtactgtctggattactgttgccacctgcggaccctcaagttgtccgtacagcggatttttcaaaataaggagcccctgattagacccaccgcgtctcagatgaaatccttggtgtattggcgagaaatttgtagtttgttctacactatggagtcactgagggagctgcacattttcgacaacgatctgaacggtataagtgagcggatcctgagcaaagcccttgagcattcctcttgtaagctgcggaccttaaaactgagctatgtgagcacagcgtccggcttcgaggatctcctgaaggcactggctaggaaccggtccctgacttacctctctatcaattgcacttccatttctctgaacatgttctccctgctgcacgatattcttcacgagcctacttgccagattagtcacctgagtcttatgaagtgcgacttacgtgcctcggagtgcgaagagattgctagtctattaatctctggcggatccctccgcaagctaactctctcatcgaaccccctcaggagtgacggcatgaacattttatgcgacgcactcttgcaccctaactgtaccttgatctctctggtgctcgttttttgttgtctcacagaaaactgctgttctgccctgggcagggtgttacttttcagccctactctgaggcagctcgatctgtgcgtcaacagactgaagaattacggggtgctgcatgttacctttcccctcctattccccacatgccaactggaggagctccatctgtcaggctgtttcttttcgagcgatatctgccagtacattgccattgttatagctaccaatgagaaactgcgcagtctcgagattggaagcaacaaaattgaagatgctggtatgcagctgttgtgcggaggcctgaggcatccaaactgcatgcttgtgaacattggcctggaggagtgtatgcttacaagcgcgtgttgtcggtcgctggcgtccgtgctcaccaccaacaaaacactcgagcgcttgaatttgcttcagaaccaccttggcaacgatggggtagctaagctcctggaatctctcatctctcctgattgtgtgctgaaggtggtaggcctgcccctgacagggctcaacacccaaacacagcagctgcttatgacagtaaaggagcgcaagccctccctgatctttctctccgaaacttggtcccttaaagagggtagggaaataggtgtcacgccagcttcccagcctggcagcattattcccaacagcaacctggactatatgttctttaagttcccccgaatgtcggccgcaatgcggacctccaataccgctagcaggcagcctctgtag

SEQ ID NO: 239939 - protein, 127 aa, Artificial Sequence
  derived and/or modified sequence
MPSCDPGPGPACLPTKTFRSYLPRCHRTYSCVHCRAHLAKHDELISKSFQGSHGRAYLFNSVVNVGCGPAEQRLLLTGLHSVADIFCESCKTTLGWKYEQAFETSQKYKEGKYIIEMSHMVKDNGWD

SEQ ID NO: 239940 - protein, 80 aa, Artificial Sequence
  derived and/or modified sequence
MPSCDPGPGPACLPTKTFRSYLPRCHRTYSCVHCRAHLAKHDELISKSFQGSHGRAYLFNSVVNVGCGPAEQRLLLTGLH

SEQ ID NO: 239941 - DNA, 384 bp, Artificial Sequence
  derived and/or modified sequence
atgcccagctgcgaccccggccccggccccgcctgcctgcccaccaagaccttcagaagctacctgcccagatgccacagaacctacagctgcgtgcactgcagagcccacctggccaagcacgacgagctgatcagcaagagcttccagggcagccacggcagagcctacctgttcaacagcgtggtgaacgtgggctgcggccccgccgagcagagactgctgctgaccggcctgcacagcgtggccgacatcttctgcgagagctgcaagaccaccctgggctggaagtacgagcaggccttcgagaccagccagaagtacaaggagggcaagtacatcatcgagatgagccacatggtgaaggacaacggctgggactag

SEQ ID NO: 239942 - DNA, 243 bp, Artificial Sequence
  derived and/or modified sequence
atgcccagctgcgaccccggccccggccccgcctgcctgcccaccaagaccttcagaagctacctgcccagatgccacagaacctacagctgcgtgcactgcagagcccacctggccaagcacgacgagctgatcagcaagagcttccagggcagccacggcagagcctacctgttcaacagcgtggtgaacgtgggctgcggccccgccgagcagagactgctgctgaccggcctgcactag

SEQ ID NO: 239943 - DNA, 384 bp, Artificial Sequence
  derived and/or modified sequence
atgccatcttgtgatccaggacccgggccagcctgccttcctactaagacatttaggtcatatcttcccaggtgccatagaacgtattcctgcgtgcactgccgagcccacttggctaaacatgacgaactaatctcaaagtctttccagggcagtcatggacgagcctatctcttcaattcagtcgtgaacgtcggctgcggccctgctgagcagagactgcttctcaccggcctccactccgtagccgatatcttttgtgagtcgtgcaagacgacactaggatggaaatacgagcaggcgttcgagacgtcccagaaatacaaagaggggaaatatattatcgagatgtctcatatggtgaaggataatggatgggactag

SEQ ID NO: 239944 - DNA, 384 bp, Artificial Sequence
  derived and/or modified sequence
atgccttcttgtgatcccggccccggaccagcctgtctacccacgaagaccttcaggagctatttacccagatgccacaggacatattcatgcgtgcactgtagggcccatctggctaagcacgatgaactgatcagtaaatccttccagggaagccatggaagagcctatctttttaatagcgtcgtgaatgtgggctgtggaccggccgagcagcgcctgttgctaaccggactgcatagcgtggcagatatcttttgcgagagctgcaagacaaccctgggatggaaatacgaacaagcctttgagacaagtcagaaatacaaggaaggaaaatacatcatcgaaatgtcccatatggtgaaggacaatggctgggactag

SEQ ID NO: 239945 - DNA, 384 bp, Artificial Sequence
  derived and/or modified sequence
atgccaagttgcgaccccggccccggtccagcctgtctgcctaccaagacgttcaggtcctacctgcccaggtgccatcgtacctacagctgtgtgcactgccgtgcgcacctggcgaagcatgatgagctgatttctaagtccttccaaggctcacacgggagggcctatctgttcaattccgtcgtcaacgtgggctgcgggcctgcagaacagaggttgttgcttacgggactccacagtgtggccgacatcttttgcgaatcctgcaagaccactctgggctggaaatacgagcaggcattcgagacatcccagaaatataaggaaggtaagtatattatagagatgtcgcacatggtgaaggataacggatgggactag

SEQ ID NO: 239946 - DNA, 243 bp, Artificial Sequence
  derived and/or modified sequence
atgccttcttgcgaccctggtcctgggcccgcctgcctccctactaagacctttcggtcttatttgccccgttgtcataggacttacagctgtgttcattgcagagcccatctcgcgaagcacgacgaactgatatcaaagtcctttcaggggtcccatggtcgggcatacctgtttaatagcgtggtgaacgtaggatgcgggcccgcagagcagcgtctgctgctgactggtctccattag

SEQ ID NO: 239947 - DNA, 384 bp, Artificial Sequence
  derived and/or modified sequence
atgccaagctgcgatcccggccctggtcctgcttgccttcctaccaagacattccgctcgtatttacctagatgtcataggacatatagttgtgtgcattgcagggcccacctcgctaaacatgatgagcttatcagcaagtctttccaaggctcccacggacgagcatacttgtttaacagcgtagtgaacgttggatgcggaccagccgaacagagactgctgctaacaggtctacactcagtagccgacattttctgtgagagctgcaagaccactcttggctggaaatacgaacaggccttcgagaccagtcagaagtacaaggaggggaaatatattattgagatgagccatatggttaaggacaacggatgggactag

SEQ ID NO: 239948 - DNA, 384 bp, Artificial Sequence
  derived and/or modified sequence
atgcccagctgtgaccccggccctggccctgcctgcctgcccaccaagaccttccgcagctacctgccccgctgccacaggacctacagctgtgtgcactgccgggcccacctggccaagcatgatgagctgatcagcaagagcttccagggcagccacggccgggcctacctgttcaacagcgtggtgaatgtgggctgcggccctgctgagcagaggctgctgctgaccggcctgcacagcgtggccgacatcttctgtgagagctgcaagaccaccctgggctggaagtatgagcaggcctttgagaccagccagaagtacaaggagggcaagtacatcatcgagatgagccacatggtgaaggacaatggctgggactag

SEQ ID NO: 239949 - DNA, 243 bp, Artificial Sequence
  derived and/or modified sequence
atgcccagctgtgaccccggccctggccctgcctgcctgcccaccaagaccttccgcagctacctgccccgctgccacaggacctacagctgtgtgcactgccgggcccacctggccaagcatgatgagctgatcagcaagagcttccagggcagccacggccgggcctacctgttcaacagcgtggtgaatgtgggctgcggccctgctgagcagaggctgctgctgaccggcctgcactag

SEQ ID NO: 239950 - DNA, 384 bp, Artificial Sequence
  derived and/or modified sequence
atgcccagctgcgaccccggccccggccccgcctgcctgcccaccaaaaccttccgttcttatcttcctcgctgccaccggacctacagctgtgttcactgcagggctcacctggccaaacatgatgagttgattagtaagtcatttcaaggtagccatggccgggcttatctgtttaactctgtcgttaacgtcggctgcggccccgccgagcagcgccttttgctgacagggctgcacagtgtggccgatatattctgtgagtcatgcaagaccactctcgggtggaaatacgaacaggccttcgaaaccagtcaaaaatataaggaaggcaagtatataattgaaatgtcacatatggtcaaggacaatggctgggattag

SEQ ID NO: 239951 - DNA, 384 bp, Artificial Sequence
  derived and/or modified sequence
atgcccagctgcgaccccggccccggccccgcctgcctgcccaccaagacattcaggtcgtacctgcctcggtgtcaccgcacctatagttgcgtgcactgtagggcccacctggccaagcacgatgaactaattagcaaaagcttccagggctcacatgggcgggcgtacctgttcaatagcgttgtgaacgtgggctgtggacccgcagagcagcgcctgctgcttacgggtctccatagcgtcgccgatatcttctgcgagagctgcaaaaccactctgggctggaagtacgagcaggcgtttgagacatcccaaaaatataaggaggggaagtacattattgagatgagtcatatggtaaaagacaacggttgggactag

SEQ ID NO: 239952 - DNA, 384 bp, Artificial Sequence
  derived and/or modified sequence
atgcccagctgcgaccccggccccggccccgcctgcctgcccaccaaaacatttcgcagctatctgccccgatgtcaccgaacctactcatgtgtgcattgccgcgcccacttggcgaaacatgacgaacttatttcaaaatcattccagggatctcatggaagggcttacctgttcaattcggtggtgaatgtgggttgcggcccagccgaacagcgcctcctgttaaccggccttcacagcgtagcggacatcttctgtgagagctgcaagactaccctcggatggaaatatgaacaggcattcgaaacctctcagaagtataaggagggcaaatatatcattgagatgtcacacatggtaaaggataatggatgggattag

SEQ ID NO: 239953 - DNA, 243 bp, Artificial Sequence
  derived and/or modified sequence
atgcccagctgcgaccccggccccggccccgcctgcctgcccaccaaaacatttcggtcctatctccctcgatgccacagaacctacagctgcgtgcactgcagagcacacttggctaagcacgatgagctcatctccaagagttttcagggaagtcatggtcgggcctatctgtttaattctgtggttaacgtggggtgcggtccagctgagcagagacttcttctgaccggtctacactag

SEQ ID NO: 239954 - DNA, 384 bp, Artificial Sequence
  derived and/or modified sequence
atgcccagctgcgaccccggccccggccccgcctgcctgcccaccaagacctttcggagctacctccctcgttgtcaccgtacatactcctgtgtccactgcagagcacacctcgccaagcacgacgagctcatcagtaagtccttccaaggttctcacggccgcgcctacctgtttaacagcgtggttaacgtgggctgtggacctgccgagcagcgattactactcacaggactgcacagcgtcgccgacattttttgcgaatcatgcaagaccaccctaggctggaagtacgagcaggccttcgaaactagtcaaaaatacaaagaaggtaaatacatcatcgaaatgtcgcacatggtgaaggacaacggatgggactag

SEQ ID NO: 239955 - DNA, 384 bp, Artificial Sequence
  derived and/or modified sequence
atgccctcctgcgacccaggcccaggccctgcatgcctgcctaccaagacatttcggagttatctgccaagatgccaccggacctactcttgcgtgcactgtcgagcgcatctggccaaacatgatgaattgattagcaaaagtttccaaggcagtcatggcagggcatatctgtttaactcagtggtgaatgtgggctgcggacccgctgaacagcgactccttttgacaggcttgcactccgtggctgacattttctgcgagtcttgtaaaaccacactgggttggaagtatgagcaggcttttgagacttcccagaaatataaagaggggaaatatatcatcgaaatgtctcatatggtgaaggacaatggctgggactag

SEQ ID NO: 239956 - DNA, 384 bp, Artificial Sequence
  derived and/or modified sequence
atgccaagctgcgaccccggacccggtccggcttgcttgcccaccaaaactttccgaagttacctgccgaggtgtcacagaacttacagctgcgtgcattgccgggctcacctggcaaaacacgacgaactcatctccaaaagtttccagggcagtcacggcagggcctatctcttcaattccgttgttaatgtggggtgcggtcctgctgagcaacgtctactgcttaccggactccacagcgttgccgatatcttctgtgaaagctgtaagacgactctcggctggaaatatgagcaggcctttgaaactagccagaagtacaaagagggaaaatacataatcgagatgtcccacatggtgaaagataatgggtgggactag

SEQ ID NO: 239957 - DNA, 384 bp, Artificial Sequence
  derived and/or modified sequence
atgccctcctgcgatccaggccctggcccagcttgtctcccaaccaagacattccgttcttacttaccgagatgccatcgaacctactcatgtgtgcattgtcgagctcacctagccaagcatgacgagctcatcagtaagtcctttcagggtagtcacggaagggcttatctgttcaactctgtggtgaacgtcgggtgtggaccggctgagcaacgactgcttctaaccggtcttcacagcgttgctgatatattctgtgaatcttgtaaaaccactctcggctggaagtatgaacaggcgttcgaaactagccagaaatacaaagagggaaaatacatcattgagatgtcacacatggttaaggacaacggatgggactag

SEQ ID NO: 239958 - DNA, 243 bp, Artificial Sequence
  derived and/or modified sequence
atgcctagctgtgacccgggtcccggacctgcctgcctgcctactaaaaccttcaggagctatctgccccgatgccatcggacatacagctgcgtgcattgccgcgctcacctagctaagcacgatgagttaatttcgaagtctttccagggttcacatggaagagcttacctctttaattcagtggtgaatgtgggctgcgggccagcagaacagcgattgctgctcaccggactgcattag

SEQ ID NO: 239959 - DNA, 384 bp, Artificial Sequence
  derived and/or modified sequence
atgccttcatgtgaccccggtcccggaccggcatgcctgccaaccaagacctttcgctcttatttgccacggtgtcaccgaacatattcatgcgtgcattgccgggctcacctcgccaaacatgacgagctgataagcaagtctttccaggggagtcacggcagggcctatcttttcaatagcgtagttaacgtagggtgcggacctgctgagcagagattgttgctcacaggtctccactccgttgctgacatattttgtgagagctgcaaaactactctcggctggaaatatgaacaggcctttgagacatctcagaagtacaaagagggaaagtatatcatcgagatgtcccacatggttaaagataacggatgggactag

SEQ ID NO: 239960 - DNA, 1721 bp, Artificial Sequence
  derived and/or modified sequence
agtgttatgatgcagttccacaacacacagccacattcacccacagaccgaggtacagaacgagagacaacctctgcccccccagcagctggccagctttgcagccccagtcttgagcccccaactaccctccccccacccacccccatccccttcccaattgaaggagcggaaagagaagagagaagagtgagcagagagattgagagattgagagagagagagagagatagacggagatctctggagcagacctcaaggtgacttctatttctatctggttctcgtctgggggggccctggccgggcagccccccaacacttctcctgccctgaaacacggctctagccaacctgctccgctgcttcacctgcgaccgtctctgcgggggctgcacggcgccagcccctccagcccaccagggcattgtcctccagcccgtcatgcccagctgtgaccccggtccgggccctgcctgcctccccaccaagactttccgcagctatctgccccgctgtcaccgcacttacagctgtgtccactgccgtgcacacctggccaaacacgatgagcttatttccaagtccttccaagggagccatggccgagcctacctgtttaactccgtggtcaacgtgggttgcgggccagctgaacagcgcctcttgctcacggggctccactcggtagctgacattttctgtgagagctgcaaaaccacactgggctggaaatatgagcaagcttttgagacgagccagaagtacaaggaagggaaatacatcattgaaatgtcacacatggtgaaggacaacggctgggactgaggggctcaggcagggtgtgcccttcctccgcatgcccctccctccccacggccctgccaagcagtctataccagcatgagtactgccccacccctgggggaaacctggctccaaccaacccctcccctgcctccaccatatccactaccaggcaccctttagaacaggggtctgggggtaccccaggggtgttaaggctcaggagtgggcagcagtcagggagagacagaactgggggaaagggatggttgtgggtctttctgttcccaagatcctgaacatggaagcgatggcagggcatagactcaggcagagaggattgtgggaggaatccgtttttgctccacctctttttgagtgaacagaggacaaaccttgggtcacagggcaagtagatcatggaccacagaacagcagatgagaaaagacttgggttggagtgaaattctggtctcagacaccaggagaccagagtctctgaggatgaagtttcctacccctatttgtagggaaaaggacttgagtgcagggaaaactcaaatcccaggccctgggaaatagtaaaataatcaaagggttttccatttcactccacttgttagtttatcttggcactgaagaggcactttcgagtatctaacttttgccattgggtggggtggggacagctgctcgcggaacagcccctagtcggctgcttccagagtaagcagtctttatgggctttctctgaggcccagtcactgctcctgggacccagtcccctggaggggaggtggaaaatcagtgctacggggccagtctttcccgtggctgccaccagcgaatgaaacttttgtatgatacataaagtgcttgagtctatttttaataaaaagggaaaaagcaacttg

SEQ ID NO: 239961 - DNA, 4000 bp, Artificial Sequence
  derived and/or modified sequence
agtgttatgatgcagttccacaacacacagccacattcacccacagaccgaggagcggaaagagaagagagaagagtgagcagagagattgagagattgagagagagagagagagatagacggagatctctggagcagacctcaaggtgagggggcagcccttctccaaatgaatttttttctctttgcaaatttcctcctcctgctgcgtgttgctttctcccctttgcaaaagcattattcatccaccctttgtcctcccttccccctccccgctgcctccgctcctctctctcggttcctccatccctctccaagctctgacgattcccgcacttatttcccggcaactttggctgcagcatcaggcatcactgtttattgttttgctgctggtgcagacccccaaagcctgccctgggagctggcggtgctgctaattatttggaccataccatactgagaataccagcctggggggtgccaaaacctcagagcagatgagaaaatccattgtgagcaggtgtccccccccttttcttttcccccctgagaagcacgagattcgcacctggttcctccagcctccgcctcggcgcctctgctgtcagctgtcagttgcccccgccagccctccctctcccctttctcctacggtccagccccgtctcacttcaggggaacatctctccccagcactcggcttgcctttgttttttctccagtcatttgcccaacttgcttctccctgtgatccgagatgggtgaaaaaatgacccctactcccctttgtgattctctggccttctgtgcagcctttccttggcttgactgggaattaggggagagggagggaggcgtgacggccggaggctggagaaggagctcaggattggggacccaagctgccccattctccatgccccttgaagaaggtgtttcaaggtggtgcatgtcagaggggaactcgctggcaaagttgaaggcaaacctgtgaagcagagactgaaaggtggtctcttggcaaggagggcccgtttcctgcagccggagcccaatgtcaccctgaactcagcccaaggtgtcttcctgggacccagcccggaggagaggacctgaaactgaagatagtctctatggaggttttgcggagagactgcctggcggccttcagagagagtggaacagctgggtgcctgtggccactgcggaggacaggacgaggagagcctgtatgccctggctaaccagagccaacactgcctcttctctgcttagtgctctagcattgccagagtgcccagctggcatctctgaaccagacttaggctaaccacccacagtgggctgggaagccctatgaaggagaaagcagcagctcacctgcttatcggagccaacaggggccacctcccttcttatcctctgcctccagcaccttcagccactcggaggctggcgcgtgggcagaaggcaatcttcctctattcctaatcagaacccagcaattacttcatcttcagtcacccacagagtcactgctgtttgtccctgcccctgggagaaggtagaaagaaacattttctgccttgtgccccaaagcacagctgttaaaaataagagtcccccttctgctgttcgttgtggccgttgctctcaccctaccacacagccctgcccagcccaggaatcaggctcctctgacatgctacccatttcccattggctccagctgtcagattgcctgaagaaaatgtattttctgcctaagtctttaaccaagggctaaggcaacagttagtaaagactaggagagagaaagaccaaggggcccacaggctgggaagacaggcaggtgcttattctgggccagaatgagtgaaccaaggtgcgagaatgggcggccacacgtgagggctttggtactgttggaaacatctataaagttctagtgaagagtcccagagcacaggaccctgacctcaggagagaaccgaatcagggtttgtatacctgcctgcatgctctccctcccctcaccttacacctcctgcccccctccccaaaatgtataaaggaccaattgtattgcaaacaaagaccatgtaaaagaaagaccttcaggcatccccaactcttaaaaggctctgatcccctgagacacagtgcctgtgcgatgcagagcctcacgaagaactgaaaaccaaggagagggcacttgcagatgacgttgctcccatggcagcgtctgtgcccgtgggcttctctctgtggaaaatggtggaggctgcttctgccccaggagggagaaacaccgactccctggctttggcgccagaagcctggatcggctgccaggtttgccagagcagaatggggatccaggggacagggcgacaatgcaactggatgctgtgggggggtcgatggtgatggggaaagtagaggtatgggtgagctgattcccttttcctccattccctcaggaggggtcctcctgaggtcgcagctcccctgatgtcctttcccctcttcccaggtgacttctatttctatctggttctcgtctgggggggccctggccgggcagccccccaacacttctcctgccctgaaacacggctctagccaacctgctccgctgcttcacctgcgaccgtctctgcgggggctgcacggcgccagcccctccagcccaccagggcattgtcctccagcccgtcatgcccagctgtgaccccggtccgggccctgcctgcctccccaccaagactttccgcagctatctgccccgctgtcaccgcacttacagctgtgtccactgccgtgcacacctggccaaacacgatgagcttatttccaagtccttccaagggagccatggccgagcctacctgtttaactccgtggtcaacgtgggttgcgggccagctgaacagcgcctcttgctcacggggctccactcggtagctgacattttctgtgagagctgcaaaaccacactgggctggaaatatgagcaagcttttgagacgagccagaagtacaaggaagggaaatacatcattgaaatgtcacacatggtgaaggacaacggctgggactgaggggctcaggcagggtgtgcccttcctccgcatgcccctccctccccacggccctgccaagcagtctataccagcatgagtactgccccacccctgggggaaacctggctccaaccaacccctcccctgcctccaccatatccactaccaggcaccctttagaacaggggtctgggggtaccccaggggtgttaaggctcaggagtgggcagcagtcagggagagacagaactgggggaaagggatggttgtgggtctttctgttcccaagatcctgaacatggaagcgatggcagggcatagactcaggcagagaggattgtgggaggaatccgtttttgctccacctctttttgagtgaacagaggacaaaccttgggtcacagggcaagtagatcatggaccacagaacagcagatgagaaaagacttgggttggagtgaaattctggtctcagacaccaggagaccagagtctctgaggatgaagtttcctacccctatttgtagggaaaaggacttgagtgcagggaaaactcaaatcccaggccctgggaaatagtaaaataatcaaagggttttccatttcactccacttgttagtttatcttggcactgaagaggcactttcgagtatctaacttttgccattgggtggggtggggacagctgctcgcggaacagcccctagtcggctgcttccagagtaagcagtctttatgggctttctctgaggcccagtcactgctcctgggacccagtcccctggaggggaggtggaaaatcagtgctacggggccagtctttcccgtggctgccaccagcgaatgaaacttttgtatgatacataaagtgcttgagtctatttttaataaaaagggaaaaagcaacttg

SEQ ID NO: 239962 - DNA, 889 bp, Artificial Sequence
  derived and/or modified sequence
ccgactccctggctttggcgccagaagcctggatcggctgccaggtttgccagagcagaatggggatccaggggacagggcgacaatgcaactggatgctgtgggggggtcgatggtgatggggaaagtagaggtgacttctatttctatctggttctcgtctgggggggccctggccgggcagccccccaacacttctcctgccctgaaacacggctctagccaacctgctccgctgcttcacctgcgaccgtctctgcgggggctgcacggcgccagcccctccagcccaccagggcattgtcctccagcccgtcatgcccagctgtgaccccggtccgggccctgcctgcctccccaccaagactttccgcagctatctgccccgctgtcaccgcacttacagctgtgtccactgccgtgcacacctggccaaacacgatgagcttatttccaagtccttccaagggagccatggccgagcctacctgtttaactccgtggtcaacgtgggttgcgggccagctgaacagcgcctcttgctcacggggctccactcggtagctgacattttctgtgagagctgcaaaaccacactgggctggaaatatgagcaagcttttgagacgagccagaagtacaaggaagggaaatacatcattgaaatgtcacacatggtgaaggacaacggctgggactgaggggctcaggcagggtgtgcccttcctccgcatgcccctccctccccacggccctgccaagcagtctataccagcatgagtactgccccacccctgggggaaacctggctccaaccaacccctcccctgcctccaccatatccactaccaggcaccctttagaacaggggtctgggggtaccccaggg

SEQ ID NO: 239963 - DNA, 561 bp, Artificial Sequence
  derived and/or modified sequence
ttcacccacagaccgaggtacagaacgagagacaacctctgcccccccagcagctggccagctttgcagccccagtcttgagcccccaactaccctccccccacccacccccatccccttcccaattgaaggagcggaaagagaagagagaagagtgagcagagagattgagagattgagagagagagagagagatagacggagatctctggagcagacctcaagccaacctgctccgctgcttcacctgcgaccgtctctgcgggggctgcacggcgccagcccctccagcccaccagggcattgtcctccagcccgtcatgcccagctgtgaccccggtccgggccctgcctgcctccccaccaagactttccgcagctatctgccccgctgtcaccgcacttacagctgtgtccactgccgtgcacacctggccaaacacgatgagcttatttccaagtccttccaagggagccatggccgagcctacctgtttaactccgtggtcaacgtgggttgcgggccagctgaacagcgcctcttgctcacggggctccact

SEQ ID NO: 239964 - DNA, 2510 bp, Artificial Sequence
  derived and/or modified sequence
ctaatcagaacccagcaattacttcatcttcagtcacccacagagtcactgctgtttgtccctgcccctgggagaaggtagaaagaaacattttctgccttgtgccccaaagcacagctgttaaaaataagagtcccccttctgctgttcgttgtggccgttgctctcaccctaccacacagccctgcccagcccaggaatcaggctcctctgacatgctacccatttcccattggctccagctgtcagattgcctgaagaaaatgtattttctgcctaagtctttaaccaagggctaaggcaacagttagtaaagactaggagagagaaagaccaaggggcccacaggctgggaagacaggcaggtgcttattctgggccagaatgagtgaaccaaggtgcgagaatgggcggccacacgtgagggctttggtactgttggaaacatctataaagttctagtgaagagtcccagagcacaggaccctgacctcaggagagaaccgaatcagggtttgtatacctgcctgcatgctctccctcccctcaccttacacctcctgcccccctccccaaaatgtataaaggaccaattgtattgcaaacaaagaccatgtaaaagaaagaccttcaggcatccccaactcttaaaaggctctgatcccctgagacacagtgcctgtgcgatgcagagcctcacgaagaactgaaaaccaaggagagggcacttgcagatgacgttgctcccatggcagcgtctgtgcccgtgggcttctctctgtggaaaatggtggaggctgcttctgccccaggagggagaaacaccgactccctggctttggcgccagaagcctggatcggctgccaggtttgccagagcagaatggggatccaggggacagggcgacaatgcaactggatgctgtgggggggtcgatggtgatggggaaagtagaggtatgggtgagctgattcccttttcctccattccctcaggaggggtcctcctgaggtcgcagctcccctgatgtcctttcccctcttcccaggtgacttctatttctatctggttctcgtctgggggggccctggccgggcagccccccaacacttctcctgccctgaaacacggctctagccaacctgctccgctgcttcacctgcgaccgtctctgcgggggctgcacggcgccagcccctccagcccaccagggcattgtcctccagcccgtcatgcccagctgtgaccccggtccgggccctgcctgcctccccaccaagactttccgcagctatctgccccgctgtcaccgcacttacagctgtgtccactgccgtgcacacctggccaaacacgatgagcttatttccaagtccttccaagggagccatggccgagcctacctgtttaactccgtggtcaacgtgggttgcgggccagctgaacagcgcctcttgctcacggggctccactcggtagctgacattttctgtgagagctgcaaaaccacactgggctggaaatatgagcaagcttttgagacgagccagaagtacaaggaagggaaatacatcattgaaatgtcacacatggtgaaggacaacggctgggactgaggggctcaggcagggtgtgcccttcctccgcatgcccctccctccccacggccctgccaagcagtctataccagcatgagtactgccccacccctgggggaaacctggctccaaccaacccctcccctgcctccaccatatccactaccaggcaccctttagaacaggggtctgggggtaccccaggggtgttaaggctcaggagtgggcagcagtcagggagagacagaactgggggaaagggatggttgtgggtctttctgttcccaagatcctgaacatggaagcgatggcagggcatagactcaggcagagaggattgtgggaggaatccgtttttgctccacctctttttgagtgaacagaggacaaaccttgggtcacagggcaagtagatcatggaccacagaacagcagatgagaaaagacttgggttggagtgaaattctggtctcagacaccaggagaccagagtctctgaggatgaagtttcctacccctatttgtagggaaaaggacttgagtgcagggaaaactcaaatcccaggccctgggaaatagtaaaataatcaaagggttttccatttcactccacttgttagtttatcttggcactgaagaggcactttcgagtatctaacttttgccattgggtggggtggggacagctgctcgcggaacagcccctagtcggctgcttccagagtaagcagtctttatgggctttctctgaggcccagtcactgctcctgggacccagtcccctggaggggaggtggaaaatcagtgctacggggccagtctttcccgtggctgccaccagcgaatgaaacttttgtatgatacataaagtgcttgagtctatttttaataaaaagggaaaaagcaacttg

SEQ ID NO: 239965 - protein, 341 aa, Artificial Sequence
  derived and/or modified sequence
MGNTTSCCVSSSPKLRRNAHSRLESYRPDTDLSREDTGCNLQHISDRENIDDLNMEFNPSDHPRASTIFLSKSQTDVREKRKSLFINHHPPGQIARKYSSCSTIFLDDSTVSQPNLKYTIKCVALAIYYHIKNRDPDGRMLLDIFDENLHPLSKSEVPPDYDKHNPEQKQIYRFVRTLFSAAQLTAECAIVTLVYLERLLTYAEIDICPANWKRIVLGAILLASKVWDDQAVWNVDYCQILKDITVEDMNELERQFLELLQFNINVPSSVYAKYYFDLRSLAEANNLSFPLEPLSRERAHKLEAISRLCEDKYKDLRRSARKRSASADNLTLPRWSPAIIS

SEQ ID NO: 239966 - DNA, 1026 bp, Artificial Sequence
  derived and/or modified sequence
atgggaaacacaacctcgtgttgcgtctcgtcatccccgaagctgcggagaaatgcacacagccggctagaaagctatcgccccgacaccgacttaagtagagaagacaccggatgcaatctccagcacattagcgatagagaaaacatagatgaccttaatatggagtttaatccaagtgaccatccccgcgcaagtacaatcttcctcagcaaaagccagacagatgtcagggagaaacggaaatctctgttcattaatcatcacccccctggccagattgcccggaagtactccagctgttctaccatcttcctggacgacagcacagtttcccagccgaacctcaaatacacaattaaatgcgtcgcacttgccatctactatcatattaaaaatagagaccccgacggtcggatgctgctggatatctttgacgaaaacctccaccccctgtccaaatccgaagtgcctcccgactacgacaagcacaaccctgagcagaagcagatctaccgctttgtaaggacactgttttcagccgcccagctcacagccgagtgtgccatcgttacgctcgtttacctggagagattgttgacgtatgcagagattgatatctgccccgccaactggaaacgaattgtcctgggggccattctgctggcatcaaaggtgtgggacgatcaagccgtttggaatgtcgattattgccagatccttaaggacatcaccgtggaagatatgaatgagctcgaaaggcagttcttggagctattacagttcaacatcaatgtcccatcaagcgtgtacgccaagtattactttgatctgcgtagtttggccgaggccaacaacctctcatttccactcgagcctcttagtagagaaagagcccataaactcgaggcaataagcaggctgtgcgaggacaagtacaaggaccttaggcgaagcgcacggaaacggagtgcctccgctgataacctgaccctcccacgctggagccctgccattatctcctag

SEQ ID NO: 239967 - DNA, 1026 bp, Artificial Sequence
  derived and/or modified sequence
atgggaaataccacaagttgctgcgtgtcatcatcgccaaaactccgacggaacgcacattctaggttggagagttatagacctgataccgatttgtcccgggaagataccggttgcaacctgcaacatatttctgatcgggaaaacattgatgatctcaacatggagttcaaccctagcgatcacccccgggcttctacgatctttctgtctaaaagccagacagacgtgcgtgaaaagcgcaaaagcttgtttatcaatcatcatccccccggccagatcgcccgtaaatactcaagctgtagcacaatcttccttgacgattccactgtgtcacagccaaacctgaaatacaccatcaaatgcgtagcactcgcgatatactaccacatcaagaatagagaccccgatggacgaatgctgcttgatattttcgacgagaacctgcacccgctgagtaaatccgaggtccctcccgactacgacaagcataatccagagcagaagcagatttaccgttttgtgagaacgctcttctctgctgcacagctaaccgccgagtgtgccatagtgaccttggtctacctggaaagactgctgacctatgccgagatcgacatctgtcctgcgaactggaaaaggatagtcctgggggctattctgctggcatcaaaagtatgggacgaccaggccgtgtggaatgtcgactactgtcaaattctgaaagacataactgtggaggacatgaacgagctcgagcgtcagtttctagaacttctgcaatttaatatcaacgtcccatcttccgtgtatgccaagtactattttgatctgagatccttggctgaggctaataatttatccttccctctagagcccctctctagggagcgcgctcataagcttgaagcaattagtcggttgtgtgaggacaaatacaaggacctccgcagatctgcacgcaaaagaagtgcctcagctgataatctgactctccctcggtggtcgcctgccataatttcctag

SEQ ID NO: 239968 - DNA, 1026 bp, Artificial Sequence
  derived and/or modified sequence
atgggcaacaccaccagctgctgcgtgagcagcagccccaagctgcggagaaatgcccacagccggctggagagctacagaccagacacagacctgagccgggaggacaccggctgcaacctgcagcacatcagtgaccgggagaacattgatgacctgaacatggagttcaaccccagcgaccacccccgggccagcaccatcttcctgagcaagagccagacagatgtgcgggagaagaggaagagcctcttcatcaaccaccaccccccaggccagatcgccaggaagtacagcagctgcagcaccatcttcctggatgacagcacagtgtcccagcccaacctgaagtacaccatcaagtgtgtggccctggccatctactaccacatcaagaacagagatcctgatggccgcatgctgctggacatctttgatgagaacctgcaccccctgagcaagtctgaggtgcccccagactatgacaagcacaaccctgagcagaagcagatctacagatttgtgaggaccctcttctctgctgcccagctgacagcagaatgtgccatcgtgaccctggtgtacctggagcggctgctgacctatgcagaaattgacatctgcccagccaactggaagagaattgtgctgggcgccatcctgctggccagcaaggtgtgggatgaccaggccgtgtggaatgtggactactgccagatcctgaaggacatcaccgtggaggacatgaatgagctggagcggcagttcctggagctgctgcagttcaacatcaacgtgcccagctctgtgtatgccaagtactactttgacctgcggagcctggccgaggccaacaacctgtccttccccctggagcccctgagccgggagcgggcccacaagctggaggccatcagccggctgtgtgaggacaagtacaaggacctgcggcgcagcgccaggaagaggtctgccagcgctgacaacctgaccctgccccgctggagccctgccatcatctcctag

SEQ ID NO: 239969 - DNA, 1026 bp, Artificial Sequence
  derived and/or modified sequence
atgggcaacaccaccagctgctgcgtgagcagcagccccaagctgcgccgaaacgcgcattctcgtctcgagtcttacagacctgatacagacctaagtagagaggacacgggttgtaatctccagcatatatcagatcgcgaaaatattgacgatttgaatatggaatttaatccgtccgatcacccacgcgcgtctacaatatttctctcaaaatcacagactgacgtccgcgaaaaaaggaagtccctgttcattaatcatcatcctcctggccagatcgcacgaaagtatagcagctgttccaccatcttcctagacgatagcaccgtgagccagcccaacctcaagtacactattaaatgtgtcgccctagctatctattatcacattaagaaccgcgatcctgatggacgcatgctgctggatatttttgatgagaacttgcatcccctgtcaaaatcagaggtgcccccggattatgataaacacaaccctgaacaaaaacagatctacagatttgtgagaacgctgttttctgctgcgcagctgacggcagagtgcgccatcgtgactttggtgtatcttgaacgcttactcacgtatgccgagattgacatctgccctgccaactggaagcgcattgtgctgggcgctattctcctagcaagcaaggtatgggacgaccaggcggtgtggaatgtggattactgccagatcctgaaggatattacagtggaagatatgaacgagcttgagcgccaatttctagagttgttgcagtttaatattaacgtgccgtctagcgtctatgcaaagtactatttcgatttacggtcactcgccgaagccaataatctgagtttccctctggagccactcagtcgggagcgggcccacaaactggaggcaattagcagactgtgcgaggataaatataaggatctgcgaagaagcgcgcgcaagaggagcgcctctgccgacaacctgactctcccgcgctggtcccctgccattatctcttag

SEQ ID NO: 239970 - DNA, 1026 bp, Artificial Sequence
  derived and/or modified sequence
atgggcaacaccaccagctgctgcgtgagcagcagccccaagctgcggcgcaacgcgcactcaaggctcgaatcctatcgcccagatactgacctcagccgggaggatacaggttgcaatcttcagcacatatctgatcgagagaacatcgacgatttgaacatggaatttaacccgtcagatcatcctagggcctctactatcttccttagcaagtcccagacagatgtgagggagaagcggaaatcgctcttcatcaatcatcacccacccggacagatagccaggaagtactcaagctgcagcacgatatttttagatgattccaccgtatcccaaccaaatctcaagtacaccattaagtgcgtcgccttggccatatactatcacattaaaaatcgggatccagatggcaggatgcttctcgatatctttgacgagaatcttcaccccctgtctaaatccgaggtgcctcccgattatgataaacataaccctgaacagaaacagatttaccggttcgttaggactctcttctccgccgcccagctgacagcagagtgtgctatcgtgactctcgtttatctggaaagactgcttacatatgcagaaatcgatatctgtccagctaattggaaacgaattgttttgggcgctattctgctcgccagcaaagtgtgggacgatcaagcggtctggaacgtggactactgccagattttaaaggatatcaccgtggaggatatgaatgagctggaacgccaattcctcgagctgctccaatttaacatcaacgtgcctagttccgtctacgcaaaatattactttgatctccggtctttggccgaggccaacaacctgtccttcccactcgaacccttgagtcgcgagcgggctcataagcttgaagcgatttctaggttatgtgaagacaagtataaggatctgcgaaggtcagctcggaaaaggtccgccagtgcagataacctgactcttccccgctggagccccgccatcatctcatag

SEQ ID NO: 239971 - DNA, 1026 bp, Artificial Sequence
  derived and/or modified sequence
atgggcaacaccacctcctgttgtgtcagttcctcaccaaaactgcggcgtaacgcacattccaggctggagagctatcgccctgacactgacttatcacgggaggatactgggtgtaacctgcagcacatttctgaccgcgaaaatatcgacgacctgaacatggaatttaatccaagcgatcatcccagagcctcgacaatctttttaagcaaaagtcagactgacgtgcgggaaaagaggaagtcactattcatcaaccatcaccctcccggacagatcgcaaggaaatatagctcatgtagcactattttcctagatgatagtaccgtaagtcaacctaacctgaagtacactataaagtgcgtcgccctggcaatatattaccatattaaaaaccgagatcccgacgggcgaatgcttctggacatctttgatgagaatttgcaccccttgagcaaatcagaagtgcctcctgactatgataagcacaaccctgagcaaaagcagatttaccggtttgtcagaaccctgtttagcgcagctcaactgaccgctgagtgcgcaatcgtgactcttgtgtacctggaaagactgctgacttatgctgaaatcgatatatgtcctgccaattggaagcgcattgtgctcggggctattctacttgcttctaaagtctgggacgatcaggccgtctggaatgtcgactattgtcagatactgaaagacattacggtggaggacatgaacgagctcgagaggcagtttctcgagctgctccaattcaatattaatgtcccctccagtgtgtatgctaaatattactttgacctgagaagcctcgccgaggcaaacaatttgagttttcctctggagcctctgtctagggaacgtgcccacaaattagaagctatttctcgcctttgtgaagacaagtataaggaccttcggaggtcagctagaaagcgatcagcgagtgccgacaacctcacacttccgcgatggagcccagccatcatttcctag

SEQ ID NO: 239972 - DNA, 1026 bp, Artificial Sequence
  derived and/or modified sequence
atgggtaacaccacgtcctgttgtgtgagctccagtcccaagttacggaggaacgcccatagccgactggagtcatacaggcctgacactgatctgtcgcgggaggacactggttgcaatcttcaacacatttccgacagagaaaatatagatgatctgaatatggagtttaacccaagtgaccatccacgagcctccacgatttttctcagtaagtctcagacagatgtaagagaaaagagaaaaagccttttcatcaatcatcatcctcccggacagattgctaggaagtactcctcatgttcaaccatctttcttgatgactcgaccgttagtcaacctaacctgaagtacacgataaagtgcgtcgcgctggctatatactaccacattaagaatagagatccagacgggaggatgttgctggatatctttgatgagaatttgcatcctctgtcaaagtccgaagtgcccccagactatgacaaacacaaccctgagcagaagcagatttaccgattcgtaaggaccctgttctcagctgcgcaattgaccgcagaatgcgcaatcgtcactctagtctacctggaacgtctgttaacttatgcagagatagatatctgccctgcaaactggaagagaatagtgctgggtgccatcttgcttgccagtaaagtgtgggacgaccaggctgtatggaatgtcgattactgtcagattctgaaagacatcacagtggaggatatgaacgagctcgagcggcagttcctggagctccttcagtttaacataaatgtgccgagctccgtgtatgccaaatactacttcgacctccgtagcctcgctgaagccaacaatctgtccttcccccttgaaccgctgagccgggagcgagctcataaacttgaagctatttcacggttatgtgaggataagtataaagacctgcgcaggtctgcaagaaagcggtcggcttccgctgataacttaaccctaccgagatggagtcctgctatcatttcatag

SEQ ID NO: 239973 - DNA, 3948 bp, Artificial Sequence
  derived and/or modified sequence
aggccccgccgccgccgccgctgctgacccggcggccggccgccgttccgccccctcccgtggcggcgagcgggcgggcctccccacacgcccccgccgcccgcgccccgcgtccacccgcgccccgctcccggggactgggagaacaggatagcagcaggagtcggggggccgccgaagatggggaacactacctcgtgctgcgtgtcgtccagtcccaagctccggaggaatgcccactcccggctggagtcctaccggccagacacggacctgagccgcgaggacacgggctgcaacctgcagcacatcagcgaccgggagaacatagacgatttgaacatggaattcaatccttcagatcatcctcgggccagcacaatattcctcagtaaatctcagacggacgtgagagaaaaacgcaagagtctcttcattaaccatcatcctccaggacaaatagcaaggaaatacagttcctgctccaccattttcctagatgatagcacagtcagtcaaccaaacctcaagtatacaattaaatgtgtcgctcttgcaatatattatcacatcaaaaacagggacccagatggaaggatgctcttagatatttttgatgaaaatcttcaccctctttcgaaatccgaagtgccaccagattatgacaaacacaacccagagcagaagcagatttaccggttcgttcggacactgttcagtgctgctcagctgacggctgaatgtgccatcgtcaccctggtgtaccttgaaagacttttaacatacgcagagatagatatctgtccggccaactggaagcggattgttttaggggcgatcctgctggcctccaaggtgtgggatgaccaggctgtatggaatgtggattactgccagatcctgaaagacatcacggtggaggacatgaacgagctagagcgacagtttcttgaattgctgcagttcaacatcaatgttccttccagtgtctatgccaagtattattttgatcttcgttctctggcagaagcgaacaacctgagctttcccttggagcccctgagcagggagagggctcacaagcttgaggccatctctcgcctctgcgaggacaagtacaaggacctaagaagatccgcgaggaagcgctcagccagtgcagacaacctgactctgccccggtggtccccagccatcatctcttaactacggaggcccgccggaggccacaccatcccttagtttctcctttagtttgagaaaagacagacttggggtgggtttgtttttgttttttctttccttttctttttttacgcatagctccgtcaagctgcctggatgagcgcccatgcagcaaggcttggaggaagcgtcagtgccctggagatcccagctcgctctccccactgtcagcaacagcacttccttcgtggaggaagtggactcgaatcctggaggaggaaataaagggaaagggaagtcgtggagaggcagggaaaatggttaagcagcccggccctctggagtccccatgggggcggtagctgaagttggcgagcgcagcggtggatgcagagctggctgcacccagggctgggccagtgtgtcctgtaagacttcttgcattccttctgctgcttttttgggatgggggtatttttgttcatttgtttttgccctgttttgattttggtcccacagagcaggggatgtagtttgtacccaccatggcgcagacttccaaataaatagtactggtcatttctctctgcactatttctgcgcgctgtcttctgagctttcttcctcaccagtgggctgtgcttgttccatttctgtacacccttattttataccgtttttcttcaacaatggcgaaattgactgtagtgctgaaccaaaagtatccctttccctccttattcctcaccccaagaacattctagatcacatgggtgcttgtgccttccgattttcttgcatttgtttttttcctgacctgaagttgttgttacaaaatcagtcagactttgtgggctgaaggacacggtgcagcagagggtgtccctgtgagagttctgcagagtgctgggcatgtgcctggaactaccgagtaggagccatttctttgtacccctgcctaatccattcctctccttccaagtccattgttgcaagcaatattcttctcaatttttatatgtttactttaaatcaaagttagtctatttgtataaaatttttaaaaaatctaaaagaaaaagaaaaaaaacaagggtgggttgggtattccagtgggaagatcattgaagggaaaaatgttactatttactgaggtatttttcacagaatgattgaattaaaaaaaactcaacttgcattttcattgtgggtgcttagagaagttctacaaaattcaaactgtgaaggtttatgcttcattaattatgaccatactttttcattttctgacgatccctgatttccttatggactcaataagaatcttttatatcaagtaaaatgaaagttgatgatagaatatcaaatagtgaatttgatatgaaatctaagagtgtgagtcacttgcatatgtaatgctttgggtttttgcatattttcttaggtcacagtgacaggtttctgagttgtttcccttttcaagtctctgggaggccagtggcagcagcaggtctgtgtttcaccttcttcccatgtgagcttggaaaactttggcatcttaattagtcttgaatcatacacctgatccccaaacattgcctgctctcaatgaaacatgctttggaaatggaagggactcagaaagtcgaaatcccaagaactccaagccaaaagtgttaggttttagtgaaatttgtgtcaggtataagcatacctgtttgggccagaattattatcacagcctttctgacccaaactttcaaaagcaaataaacagcatataaaacgttaattatctttccattgtaattgtgatgatctactctgtatgggtaccaaaatcaccttctctcttcaagtcaaagttgaatttagaactttgaatacaggtcaaaaaatgtagaaaatatcattttatattccctaatctatatagctgaaaaagggttgtattttcttagctgaatatgaatacctcttaaacataaattagttcctctccagtgaagtatcttattttaccaatccatttcaggaaagaggttctgctgccgtaaaggcagaaattttatttttatcccttttatttgaatgagagatttgaaaatcgaattatgtaaatatttcaatgcatctgctattattttgtggagtttattaaactactttaaaaaaattgtatagtctatttattgtatgtatgtacatacagtctgatacctaaaatttaaagtggattccataaaaccagactcaagtcttgtttagactactgaatactgttttagcctgtgccctggattctacctctgtataggaaaattttccatattcattaattagtgttgatctgtattaattggttatgtttcttgcactaaggatgtttaaaactccgctgtaagtgtagattttagttttactggcaggatgaatcacttgacacataggtagatacttgaggttcattttcttttctttttctacatgatgatgaatagttatgttttcttctctgatttgttcaaagtttgccaaaagaaaacacaaaaccagtacagtacttactgataaatcgtagtgactgtaatttgtttgtaaggcgaattaatgctctacaattaaagctggattactattgaggaacacattgtcttagtgtagtttttgaatggaaagtttttgtcattaaggatgaaggaaacgacacaatttgttactttaattttatatttgatttaaacaacaaataaagtcattggg

SEQ ID NO: 239974 - DNA, 3960 bp, Artificial Sequence
  derived and/or modified sequence
aggccccgccgccgccgccgctgctgacccggcggccggccgccgttccgccccctcccgtggcggcgagcgggcgggcctccccacacgcccccgccgcccgcgccccgcgtccacccgcgccccgctcccggggactgggagaacaggatagcagcaggagtcggggggccgccgaagatggggaacactacctcgtgctgcgtgtcgtccagtcccaagctccggaggaatgcccactcccggctggagtcctaccggccagacacggacctgagccgcgaggacacgggctgcaacctgcagcacatcagcgaccgggagaacatagacgatttgaacatggaattcaatccttcagatcatcctcgggccagcacaatattcctcagtaaatctcagacggacgtgagagaaaaacgcaagagtctcttcattaaccatcatcctccaggacaaatagcaaggaaatacagttcctgctccaccattttcctagatgatagcacagtcagtcaaccaaacctcaagtatacaattaaatgtgtcgctcttgcaatatattatcacatcaaaaacagggacccagatggaaggatgctcttagatatttttgatgaaaatcttcaccctctttcgaaatccgaagtgccaccagattatgacaaacacaacccagagcagaagcagatttaccggttcgttcggacactgttcagtgctgctcagctgacggctgaatgtgccatcgtcaccctggtgtaccttgaaagacttttaacatacgcagagatagatatctgtccggccaactggaagcggattgttttaggggcgatcctgctggcctccaaggtgtgggatgaccaggctgtatggaatgtggattactgccagatcctgaaagacatcacggtggaggacatgaacgagctagagcgacagtttcttgaattgctgcagttcaacatcaatgttccttccagtgtctatgccaagtattattttgatcttcgttctctggcagaagcgaacaacctgagctttcccttggagcccctgagcagggagagggctcacaagcttgaggccatctctcgcctctgcgaggacaagtacaaggacctaagaagatccgcgaggaagcgctcagccagtgcagacaacctgactctgccccggtggtccccagccatcatctcttaactacggaggcccgccggaggccacaccatcccttagtttctcctttagtttgagaaaagacagacttggggtgggtttgtttttgttttttctttccttttctttttttacgcatagctccgtcaagctgcctggatgagcgcccatgcagcaaggcttggaggaagcgtcagtgccctggagatcccagctcgctctccccactgtcagcaacagcacttccttcgtggaggaagtggactcgaatcctggaggaggaaataaagggaaagggaagtcgtggagaggcagggaaaatggttaagcagcccggccctctggagtccccatgggggcggtagctgaagttggcgagcgcagcggtggatgcagagctggctgcacccagggctgggccagtgtgtcctgtaagacttcttgcattccttctgctgcttttttgggatgggggtatttttgttcatttgtttttgccctgttttgattttggtcccacagagcaggggatgtagtttgtacccaccatggcgcagacttccaaataaatagtactggtcatttctctctgcactatttctgcgcgctgtcttctgagctttcttcctcaccagtgggctgtgcttgttccatttctgtacacccttattttataccgtttttcttcaacaatggcgaaattgactgtagtgctgaaccaaaagtatccctttccctccttattcctcaccccaagaacattctagatcacatgggtgcttgtgccttccgattttcttgcatttgtttttttcctgacctgaagttgttgttacaaaatcagtcagactttgtgggctgaaggacacggtgcagcagagggtgtccctgtgagagttctgcagagtgctgggcatgtgcctggaactaccgagtaggagccatttctttgtacccctgcctaatccattcctctccttccaagtccattgttgcaagcaatattcttctcaatttttatatgtttactttaaatcaaagttagtctatttgtataaaatttttaaaaaatctaaaagaaaaagaaaaaaaacaagggtgggttgggtattccagtgggaagatcattgaagggaaaaatgttactatttactgaggtatttttcacagaatgattgaattaaaaaaaactcaacttgcattttcattgtgggtgcttagagaagttctacaaaattcaaactgtgaaggtttatgcttcattaattatgaccatactttttcattttctgacgatccctgatttccttatggactcaataagaatcttttatatcaagtaaaatgaaagttgatgatagaatatcaaatagtgaatttgatatgaaatctaagagtgtgagtcacttgcatatgtaatgctttgggtttttgcatattttcttaggtcacagtgacaggtttctgagttgtttcccttttcaagtctctgggaggccagtggcagcagcaggtctgtgtttcaccttcttcccatgtgagcttggaaaactttggcatcttaattagtcttgaatcatacacctgatccccaaacattgcctgctctcaatgaaacatgctttggaaatggaagggactcagaaagtcgaaatcccaagaactccaagccaaaagtgttaggttttagtgaaatttgtgtcaggtataagcatacctgtttgggccagaattattatcacagcctttctgacccaaactttcaaaagcaaataaacagcatataaaacgttaattatctttccattgtaattgtgatgatctactctgtatgggtaccaaaatcaccttctctcttcaagtcaaagttgaatttagaactttgaatacaggtcaaaaaatgtagaaaatatcattttatattccctaatctatatagctgaaaaagggttgtattttcttagctgaatatgaatacctcttaaacataaattagttcctctccagtgaagtatcttattttaccaatccatttcaggaaagaggttctgctgccgtaaaggcagaaattttatttttatcccttttatttgaatgagagatttgaaaatcgaattatgtaaatatttcaatgcatctgctattattttgtggagtttattaaactactttaaaaaaattgtatagtctatttattgtatgtatgtacatacagtctgatacctaaaatttaaagtggattccataaaaccagactcaagtcttgtttagactactgaatactgttttagcctgtgccctggattctacctctgtataggaaaattttccatattcattaattagtgttgatctgtattaattggttatgtttcttgcactaaggatgtttaaaactccgctgtaagtgtagattttagttttactggcaggatgaatcacttgacacataggtagatacttgaggttcattttcttttctttttctacatgatgatgaatagttatgttttcttctctgatttgttcaaagtttgccaaaagaaaacacaaaaccagtacagtacttactgataaatcgtagtgactgtaatttgtttgtaaggcgaattaatgctctacaattaaagctggattactattgaggaacacattgtcttagtgtagtttttgaatggaaagtttttgtcattaaggatgaaggaaacgacacaatttgttactttaattttatatttgatttaaacaacaaataaagtcattgggacaataaatata

SEQ ID NO: 239975 - DNA, 3940 bp, Artificial Sequence
  derived and/or modified sequence
aggagagatgtgagcctcgtaccaggaagatcatactgaggccaccaggttgagagccgcctggctggggggcttgtccggggacagcaggggcagaggcatggaggttcacagccaggaaatcgtgcagtgaacctgtcccctccggtcacaacatcaagagctgaactgggactagaagtcatcgccccagagctttttgctaccagaactgccgggtgaaaatctttggaagagaagtttgagaacctgttaaacaagctctctaggtaattctgtgcacgttcagtctgagaactgctgcatctgaagagatttgaacatggaattcaatccttcagatcatcctcgggccagcacaatattcctcagtaaatctcagacggacgtgagagaaaaacgcaagagtctcttcattaaccatcatcctccaggacaaatagcaaggaaatacagttcctgctccaccattttcctagatgatagcacagtcagtcaaccaaacctcaagtatacaattaaatgtgtcgctcttgcaatatattatcacatcaaaaacagggacccagatggaaggatgctcttagatatttttgatgaaaatcttcaccctctttcgaaatccgaagtgccaccagattatgacaaacacaacccagagcagaagcagatttaccggttcgttcggacactgttcagtgctgctcagctgacggctgaatgtgccatcgtcaccctggtgtaccttgaaagacttttaacatacgcagagatagatatctgtccggccaactggaagcggattgttttaggggcgatcctgctggcctccaaggtgtgggatgaccaggctgtatggaatgtggattactgccagatcctgaaagacatcacggtggaggacatgaacgagctagagcgacagtttcttgaattgctgcagttcaacatcaatgttccttccagtgtctatgccaagtattattttgatcttcgttctctggcagaagcgaacaacctgagctttcccttggagcccctgagcagggagagggctcacaagcttgaggccatctctcgcctctgcgaggacaagtacaaggacctaagaagatccgcgaggaagcgctcagccagtgcagacaacctgactctgccccggtggtccccagccatcatctcttaactacggaggcccgccggaggccacaccatcccttagtttctcctttagtttgagaaaagacagacttggggtgggtttgtttttgttttttctttccttttctttttttacgcatagctccgtcaagctgcctggatgagcgcccatgcagcaaggcttggaggaagcgtcagtgccctggagatcccagctcgctctccccactgtcagcaacagcacttccttcgtggaggaagtggactcgaatcctggaggaggaaataaagggaaagggaagtcgtggagaggcagggaaaatggttaagcagcccggccctctggagtccccatgggggcggtagctgaagttggcgagcgcagcggtggatgcagagctggctgcacccagggctgggccagtgtgtcctgtaagacttcttgcattccttctgctgcttttttgggatgggggtatttttgttcatttgtttttgccctgttttgattttggtcccacagagcaggggatgtagtttgtacccaccatggcgcagacttccaaataaatagtactggtcatttctctctgcactatttctgcgcgctgtcttctgagctttcttcctcaccagtgggctgtgcttgttccatttctgtacacccttattttataccgtttttcttcaacaatggcgaaattgactgtagtgctgaaccaaaagtatccctttccctccttattcctcaccccaagaacattctagatcacatgggtgcttgtgccttccgattttcttgcatttgtttttttcctgacctgaagttgttgttacaaaatcagtcagactttgtgggctgaaggacacggtgcagcagagggtgtccctgtgagagttctgcagagtgctgggcatgtgcctggaactaccgagtaggagccatttctttgtacccctgcctaatccattcctctccttccaagtccattgttgcaagcaatattcttctcaatttttatatgtttactttaaatcaaagttagtctatttgtataaaatttttaaaaaatctaaaagaaaaagaaaaaaaacaagggtgggttgggtattccagtgggaagatcattgaagggaaaaatgttactatttactgaggtatttttcacagaatgattgaattaaaaaaaactcaacttgcattttcattgtgggtgcttagagaagttctacaaaattcaaactgtgaaggtttatgcttcattaattatgaccatactttttcattttctgacgatccctgatttccttatggactcaataagaatcttttatatcaagtaaaatgaaagttgatgatagaatatcaaatagtgaatttgatatgaaatctaagagtgtgagtcacttgcatatgtaatgctttgggtttttgcatattttcttaggtcacagtgacaggtttctgagttgtttcccttttcaagtctctgggaggccagtggcagcagcaggtctgtgtttcaccttcttcccatgtgagcttggaaaactttggcatcttaattagtcttgaatcatacacctgatccccaaacattgcctgctctcaatgaaacatgctttggaaatggaagggactcagaaagtcgaaatcccaagaactccaagccaaaagtgttaggttttagtgaaatttgtgtcaggtataagcatacctgtttgggccagaattattatcacagcctttctgacccaaactttcaaaagcaaataaacagcatataaaacgttaattatctttccattgtaattgtgatgatctactctgtatgggtaccaaaatcaccttctctcttcaagtcaaagttgaatttagaactttgaatacaggtcaaaaaatgtagaaaatatcattttatattccctaatctatatagctgaaaaagggttgtattttcttagctgaatatgaatacctcttaaacataaattagttcctctccagtgaagtatcttattttaccaatccatttcaggaaagaggttctgctgccgtaaaggcagaaattttatttttatcccttttatttgaatgagagatttgaaaatcgaattatgtaaatatttcaatgcatctgctattattttgtggagtttattaaactactttaaaaaaattgtatagtctatttattgtatgtatgtacatacagtctgatacctaaaatttaaagtggattccataaaaccagactcaagtcttgtttagactactgaatactgttttagcctgtgccctggattctacctctgtataggaaaattttccatattcattaattagtgttgatctgtattaattggttatgtttcttgcactaaggatgtttaaaactccgctgtaagtgtagattttagttttactggcaggatgaatcacttgacacataggtagatacttgaggttcattttcttttctttttctacatgatgatgaatagttatgttttcttctctgatttgttcaaagtttgccaaaagaaaacacaaaaccagtacagtacttactgataaatcgtagtgactgtaatttgtttgtaaggcgaattaatgctctacaattaaagctggattactattgaggaacacattgtcttagtgtagtttttgaatggaaagtttttgtcattaaggatgaaggaaacgacacaatttgttactttaattttatatttgatttaaacaacaaataaagtcattgggacaataaatata

SEQ ID NO: 239976 - DNA, 1245 bp, Artificial Sequence
  derived and/or modified sequence
gcaccgcgccgcgaggagtccgggggctgcgcccacgcccgctgcccgcccgctcgtcggctagtcccgccgtccggcgcggacacgcgtgcccccggcttgaaccggaacctcttgccgaggcggccgccgtcgccgcccgcgccccgcgtccacccgcgccccgctcccggggactgggagaacaggatagcagcaggagtcggggggccgccgaagatggggaacactacctcgtgctgcgtgtcgtccagtcccaagctccggaggaatgcccactcccggctggagtcctaccggccagacacggacctgagccgcgaggacacgggctgcaacctgcagcacatcagcgaccgggagaacatagacgatttgaacatggaattcaatccttcagatcatcctcgggccagcacaatattcctcagtaaatctcagacggacgtgagagaaaaacgcaagagtctcttcattaaccatcatcctccaggacaaatagcaaggaaatacagttcctgctccaccattttcctagatgatagcacagtcagtcaaccaaacctcaagtatacaattaaatgtgtcgctcttgcaatatattatcacatcaaaaacagggacccagatggaaggatgctcttagatatttttgatgaaaatcttcaccctctttcgaaatccgaagtgccaccagattatgacaaacacaacccagagcagaagcagatttaccggttcgttcggacactgttcagtgctgctcagctgacggctgaatgtgccatcgtcaccctggtgtaccttgaaagacttttaacatacgcagagatagatatctgtccggccaactggaagcggattgttttaggggcgatcctgctggcctccaaggtgtgggatgaccaggctgtatggaatgtggattactgccagatcctgaaagacatcacggtggaggacatgaacgagctagagcgacagtttcttgaattgctgcagttcaacatcaatgttccttccagtgtctatgccaagtattattttgatcttcgttctctggcagaagcgaacaacctgagctttcccttggagcccctgagcagggagagggctcacaagcttgaggccatctctcgcctctgcgaggacaagtacaaggacctaagaagatccgcgaggaagcgctcagccagtgcagacaacctgactctgccccggtggtccccagccatcatctcttaa

SEQ ID NO: 239977 - DNA, 1026 bp, Artificial Sequence
  derived and/or modified sequence
atgggcaacaccaccagctgctgcgtgagcagcagccccaagctgagaagaaacgcccacagcagactggagagctacagacccgacaccgacctgagcagagaggacaccggctgcaacctgcagcacatcagcgacagagagaacatcgacgacctgaacatggagttcaaccccagcgaccaccccagagccagcaccatcttcctgagcaagagccagaccgacgtgagagagaagagaaagagcctgttcatcaaccaccacccccccggccagatcgccagaaagtacagcagctgcagcaccatcttcctggacgacagcaccgtgagccagcccaacctgaagtacaccatcaagtgcgtggccctggccatctactaccacatcaagaacagagaccccgacggcagaatgctgctggacatcttcgacgagaacctgcaccccctgagcaagagcgaggtgccccccgactacgacaagcacaaccccgagcagaagcagatctacagattcgtgagaaccctgttcagcgccgcccagctgaccgccgagtgcgccatcgtgaccctggtgtacctggagagactgctgacctacgccgagatcgacatctgccccgccaactggaagagaatcgtgctgggcgccatcctgctggccagcaaggtgtgggacgaccaggccgtgtggaacgtggactactgccagatcctgaaggacatcaccgtggaggacatgaacgagctggagagacagttcctggagctgctgcagttcaacatcaacgtgcccagcagcgtgtacgccaagtactacttcgacctgagaagcctggccgaggccaacaacctgagcttccccctggagcccctgagcagagagagagcccacaagctggaggccatcagcagactgtgcgaggacaagtacaaggacctgagaagaagcgccagaaagagaagcgccagcgccgacaacctgaccctgcccagatggagccccgccatcatcagctag

SEQ ID NO: 239978 - protein, 299 aa, Artificial Sequence
  derived and/or modified sequence
MEELLPDGQIWANMDPEERMLAAATAFTHICAGQGEGDVRREAQSIQYDPYSKASVAPGKRPALPVQLQYPHVESNVPSETVSEASQRLRKPVMKRKVLRRKPDGEVLVTDESIISESESGTENDQDLWDLRQRLMNVQFQEDKESSFDVSQKFNLPHEYQGISQDQLICSLQREGMGSPAYEQDLIVASRPKSFILPKLDQLSRNRGKTDRVARYFEYKRDWDSIRLPGEDHRKELRWGVREQMLCRAEPQSKPQHIYVPNNYLVPTEKKRSALRWGVRCDLANGVIPRKLPFPLSPS

SEQ ID NO: 239979 - DNA, 900 bp, Artificial Sequence
  derived and/or modified sequence
atggaagagctgttgccagatggtcagatctgggcgaacatggatccagaggagagaatgcttgctgccgccactgcctttactcacatctgcgccggacagggcgaaggagatgtgaggagggaggcacagtcaattcagtacgacccttactccaaggccagtgtggctcctggtaagagacctgctctgcctgtgcagcttcagtacccccatgtggaaagcaatgtgcctagtgagactgtgtccgaagcatcccagagactccgtaagccagtcatgaaaaggaaggtgttgcggagaaagccagacggcgaagttttggtgacggacgaaagtatcatcagcgaatcagaaagcggaactgaaaacgatcaggatctttgggacctgaggcagcgtctcatgaacgttcagttccaggaggacaaggaatcctccttcgatgtgtcccagaagttcaatctgccacacgagtaccaggggatcagccaggaccagttgatctgcagtctccagcgtgagggtatgggctccccggcatacgagcaggacctgatagtggcttccagacccaagagctttattctccctaaactggatcagctgtcccgcaatcgcggtaaaaccgatcgtgttgcccgatacttcgaatataaacgagattgggatagcatcagactacctggagaggaccatcggaaggagttgcggtggggggtccgtgaacagatgctttgtagagccgagcctcagtccaagcctcaacacatatacgtgccaaacaattacctggttcccactgaaaagaagaggagcgccttaagatggggggtaagatgcgatcttgccaacggggtgattccaaggaagctgccttttccattaagccccagttag

SEQ ID NO: 239980 - DNA, 900 bp, Artificial Sequence
  derived and/or modified sequence
atggaagagttgctgcccgatggccaaatctgggccaatatggaccctgaggaacgaatgcttgccgcagccacagcctttacacacatttgcgctggacaaggagagggggacgtccggcgggaagcgcagagtatccagtatgacccctacagtaaagcttctgtggctcctggtaagaggcctgcactccctgtccagctacagtatccacatgtggaaagcaacgttcccagtgagactgtcagtgaggcatcccagcgtctgcgcaaacccgtcatgaagagaaaggtactgcggaggaagcctgacggagaggttctcgtgaccgacgagagcattatatctgaatctgagagcgggaccgaaaacgaccaggacctttgggacctgagacagcggctgatgaatgtgcagttccaagaggataaggagagctccttcgacgtaagccagaagttcaatctgccacatgagtatcagggcataagccaggaccagttgatttgttctttgcaacgggaaggtatgggtagccccgcatacgaacaggacttgatcgtagcgtcccgccccaaaagttttattctgccgaagctggatcagctaagtcgcaaccgggggaagacggatagggtggctcgttatttcgagtataagcgagactgggatagcattaggctgcccggtgaggaccacagaaaggagctgaggtggggtgtcagggagcagatgctgtgccgtgccgagccacagagcaagccacagcacatctatgtgccaaacaattacctggttccaacagagaaaaaaaggagcgcccttaggtggggagtgcggtgcgatctcgctaacggggtgatcccaagaaagctgcccttcccactgtctccctcatag

SEQ ID NO: 239981 - DNA, 900 bp, Artificial Sequence
  derived and/or modified sequence
atggaggaactactgcctgatgggcaaatctgggccaatatggaccccgaagagcggatgcttgctgctgccacggcctttacacatatttgtgcaggccagggggagggagacgtgcgtcgcgaggcacaatccattcagtacgatccgtatagtaaagcctctgtcgcacccggtaaacgccccgccctacccgtgcagctgcagtatccccacgtagagtctaatgtcccctccgagaccgtttctgaagcttctcagaggctgcgcaaaccagtgatgaaacgaaaagtgctgaggcgaaaacccgatggggaggtgcttgtgactgacgagagcattatttcggagtcagagtcaggtaccgagaacgaccaagatttatgggatctcagacagcggcttatgaatgtgcagttccaagaggataaagagtcctcatttgatgtgtctcagaagttcaacctgccccatgagtatcagggcatcagtcaagaccagctaatctgtagccttcagagagaggggatgggatcacccgcctacgagcaggacctcattgtggcctcccgaccgaagtcgtttattctgcctaagctcgaccaactgagtcggaaccgcggcaaaaccgatagggtggcccgctacttcgagtacaagcgggactgggatagcatccgcttacctggagaggatcatcgcaaggagctcagatggggtgtccgggaacagatgttgtgccgcgctgagccgcaatcaaaaccccagcacatttatgtacccaacaactatctggtgccaacagagaaaaagaggagtgccttgcggtggggggtccgatgcgatctcgccaacggcgtcatccctcgaaagctacctttccccctcagtccttcttag

SEQ ID NO: 239982 - DNA, 1810 bp, Artificial Sequence
  derived and/or modified sequence
aatcctcacattttgggagggaggccaaggcgggcagatcacctgaggttaggagttcaagatcagcctggccaacatggcgaaaccctgtctctattaaaaataccaaaattagctgggcatggtggcacgcgcctgtaataccagctactcaggaggctgaggcaggagagtcacttgaacccgggaggcggaggctgcagtgagtcgagatcgtgccactgcactccagcctgggcgacaagagcgagactctgtctcaaaaaaaaaagagtggttaacaagcatgatgatacaaccagttgaaagcaatatttgagttcataaagaagttgatgagttgataaaccaacaacacctaattggggaaagcataaggaagagagctgtgttgcaatcaaaaggttttttttttacttgaatgtaaataccaatcaagatacattgaaataaggacctgaaggtggcaagacagtagaaagcaggagtaagagtggaaatgaaagcagaaggtcctacagtgtaggggaagcaatggaagaacttctacctgatggacaaatatgggctaatatggatccagaagaacgaatgttggcagctgctacagcttttacccacatctgtgcagggcagggtgaaggagatgtcaggagagaagcccaatctatccaatatgatccctacagtaaagcttcagtagccccagggaagcgacctgctcttcctgtgcaactacagtacccacatgtagaaagtaatgtcccttcagaaacagtctctgaggcctcccaaagactccgaaagccagtgatgaagagaaaggtgctgcgcagaaagccagatggggaagtattagtaacagatgagtcgattatcagtgaatcagaatctggtacagaaaatgatcaggatctctgggacttaagacaaaggctgatgaatgtacagttccaggaagacaaggaatcttcatttgatgtttcacaaaaatttaacctaccacatgaataccaaggaatttctcaagatcagctcatttgctctctacaaagagaaggaatgggctctccagcttacgaacaagacctgattgttgccagcagacccaagtcctttattctcccaaagctggaccagttaagccgaaaccggggcaagacagaccgggtagcccggtattttgagtacaaacgggactgggactcaatacgtttacctggtgaagatcatagaaaggaattacgctggggtgtccgagagcagatgctttgtcgagcagaaccccaatccaaacctcagcatatatatgtcccaaacaattatctagtaccaacagagaagaaaaggtctgcactccgttggggtgttcgttgtgaccttgcaaatggtgtcatacccaggaagcttcccttccctctttctccttcttaaatctttttaaacttctttcacaggattgtttgagataacctagctctttatatcttcccttttaaatagaaacaactgtcttgagaagctcttcgaaacattttatggtaaggacttcacctatcattggtctttcctagctatatatcacattggtatcagatgatacttccaaattgccactcaaatccagcaattgcaagataaatcatatcagagaaagaacaacagacctggtctttctattttgtcaaattagtaagggccctttgtgtcctgtaactttttttacctatcaatatgagttgctgtgcttcagtgtgtgttttttaagttgctgggcattacacttaccaattaaagaattttggaaatt

SEQ ID NO: 239983 - DNA, 2061 bp, Artificial Sequence
  derived and/or modified sequence
gcagccacgggtcacgccagggccctgcacaccatgcagaggaaaggaagagctcagtgcgccagggtttcatacagccgctctctcaggccccaaggaaacgtctagagcgcacaggcggactcaccccagactgttcgaaccgtccctgagcgcccgccctcgtctcccggcaccactggccccgcagcagccagttgagaagggcggaggctgattccaatgaagtggcagaccgttaggcggcctctccaaaaagccagctatgtcgccgttagccaaggtttgagggtcttctccttctcttcgagggcccaacctcccctccagatttagtacaccagaggcgtcgcagcaacggctgctgcctgcgcgcctcagctaggcgggctcggatatttttaaggccacattggaaatcccgggcatgctcccgccggcggagaaggcccagacaaaatgtgcgccaatcaggatacagacttggaggacgtttaccctcaggaccaataagagggagggcggaccgggccaagggtgccggttcgctctccggatttaaacctcagcggtcggcggttaaccgcaggctcggcgcgtgggccggcagtgcgcctgcgcaagttacgcgaaagctaacagaatctgcggtgctctgctggcgactggcaggacgcggtgcagagagcggacttccgcgacgcgggttttttttttacttgaatgtaaataccaatcaagatacattgaaataagaaggtcctacagtgtaggggaagcaatggaagaacttctacctgatggacaaatatgggctaatatggatccagaagaacgaatgttggcagctgctacagcttttacccacatctgtgcagggcagggtgaaggagatgtcaggagagaagcccaatctatccaatatgatccctacagtaaagcttcagtagccccagggaagcgacctgctcttcctgtgcaactacagtacccacatgtagaaagtaatgtcccttcagaaacagtctctgaggcctcccaaagactccgaaagccagtgatgaagagaaaggtgctgcgcagaaagccagatggggaagtattagtaacagatgagtcgattatcagtgaatcagaatctggtacagaaaatgatcaggatctctgggacttaagacaaaggctgatgaatgtacagttccaggaagacaaggaatcttcatttgatgtttcacaaaaatttaacctaccacatgaataccaaggaatttctcaagatcagctcatttgctctctacaaagagaaggaatgggctctccagcttacgaacaagacctgattgttgccagcagacccaagtcctttattctcccaaagctggaccagttaagccgaaaccggggcaagacagaccgggtagcccggtattttgagtacaaacgggactgggactcaatacgtttacctggtgaagatcatagaaaggaattacgctggggtgtccgagagcagatgctttgtcgagcagaaccccaatccaaacctcagcatatatatgtcccaaacaattatctagtaccaacagagaagaaaaggtctgcactccgttggggtgttcgttgtgaccttgcaaatggtgtcatacccaggaagcttcccttccctctttctccttcttaaatctttttaaacttctttcacaggattgtttgagataacctagctctttatatcttcccttttaaatagaaacaactgtcttgagaagctcttcgaaacattttatggtaaggacttcacctatcattggtctttcctagctatatatcacattggtatcagatgatacttccaaattgccactcaaatccagcaattgcaagataaatcatatcagagaaagaacaacagacctggtctttctattttgtcaaattagtaagggccctttgtgtcctgtaactttttttacctatcaatatgagttgctgtgcttcagtgtgtgttttttaagttgctgggcattacacttaccaattaaagaattttggaaattcatg

SEQ ID NO: 239984 - DNA, 1803 bp, Artificial Sequence
  derived and/or modified sequence
ccggaagcggagggacgcggggacctggtggctgccggcccactgcggcgggagccctcgctccttttcccaccgtcgggacggtgcagagtggcagcttccctccgtggattccaggtcctgcctggcgagccgtccccaacgtctgcgttcctgagggaggcggccggggcagcgtgagctacaggcgatgtgcgcggcgggccgcagcccctggaggtcacggtgtgcgctggccgccgccgcggtctttgccccggtggcctttctgagctcctgggccgcgcccctgggaccaggcggaggccggggacggccccagggctggaggggagtcccgaaggccgctagcgacctgggtccaagccacgcccacggccaggcggggcgactgcgagctttgccgttgaaaggcggagcgtgtcttgtcgccttctagctgcaccttttgtggactgcagcatggaaccgtccaaggtgttttttttttacttgaatgtaaataccaatcaagatacattgaaataagaaggtcctacagtgtaggggaagcaatggaagaacttctacctgatggacaaatatgggctaatatggatccagaagaacgaatgttggcagctgctacagcttttacccacatctgtgcagggcagggtgaaggagatgtcaggagagaagcccaatctatccaatatgatccctacagtaaagcttcagtagccccagggaagcgacctgctcttcctgtgcaactacagtacccacatgtagaaagtaatgtcccttcagaaacagtctctgaggcctcccaaagactccgaaagccagtgatgaagagaaaggtgctgcgcagaaagccagatggggaagtattagtaacagatgagtcgattatcagtgaatcagaatctggtacagaaaatgatcaggatctctgggacttaagacaaaggctgatgaatgtacagttccaggaagacaaggaatcttcatttgatgtttcacaaaaatttaacctaccacatgaataccaaggaatttctcaagatcagctcatttgctctctacaaagagaaggaatgggctctccagcttacgaacaagacctgattgttgccagcagacccaagtcctttattctcccaaagctggaccagttaagccgaaaccggggcaagacagaccgggtagcccggtattttgagtacaaacgggactgggactcaatacgtttacctggtgaagatcatagaaaggaattacgctggggtgtccgagagcagatgctttgtcgagcagaaccccaatccaaacctcagcatatatatgtcccaaacaattatctagtaccaacagagaagaaaaggtctgcactccgttggggtgttcgttgtgaccttgcaaatggtgtcatacccaggaagcttcccttccctctttctccttcttaaatctttttaaacttctttcacaggattgtttgagataacctagctctttatatcttcccttttaaatagaaacaactgtcttgagaagctcttcgaaacattttatggtaaggacttcacctatcattggtctttcctagctatatatcacattggtatcagatgatacttccaaattgccactcaaatccagcaattgcaagataaatcatatcagagaaagaacaacagacctggtctttctattttgtcaaattagtaagggccctttgtgtcctgtaactttttttacctatcaatatgagttgctgtgcttcagtgtgtgttttttaagttgctgggcattaca

SEQ ID NO: 239985 - DNA, 900 bp, Artificial Sequence
  derived and/or modified sequence
atggaggagctgctgcctgatggccagatctgggccaacatggaccctgaggagaggatgctggccgccgccacagccttcacccacatctgtgccggccagggcgagggagatgtgcggcgggaggcccagagcatccagtatgacccctacagcaaggcctctgtggcccctgggaagaggcctgccctgcctgtgcagctgcagtacccccacgtggagagcaatgtgcccagcgagaccgtgtctgaggccagccagaggctgaggaagcctgtgatgaagaggaaggtgctgcggaggaagccagatggagaggtgctggtgacagatgagagcatcatcagcgagagcgagagcggcacagaaaatgaccaggacctgtgggacctgcggcagaggctgatgaatgtgcagttccaggaggacaaggagagcagctttgatgtgtcccagaagttcaacctgccccatgagtaccagggcatcagccaggaccagctgatctgcagcctgcagcgggagggcatgggcagccctgcctatgagcaggacctgattgtggccagccggcccaagagcttcatcctgcccaagctggaccagctgagcaggaacagaggcaagacagacagagtggcccgctactttgagtacaagagggactgggacagcatccggctgcctggagaggaccacaggaaggagctgcgctggggcgtgcgggagcagatgctgtgcagagctgagccccagagcaagccccagcacatctacgtgcccaacaactacctggtgcccacagagaagaagaggtctgccctgcgctggggcgtgcgctgtgacctggccaatggagtcatccccaggaagctgcccttccccctgagccccagctag

SEQ ID NO: 239986 - DNA, 900 bp, Artificial Sequence
  derived and/or modified sequence
atggaggagctgctgcccgacggccagatctgggccaacatggacccagaagaacgcatgctggccgcggctactgcgttcacgcacatttgtgccgggcaaggtgagggtgacgttaggcgcgaggcacaatcgatccaatacgacccttactctaaggcttcggtcgcccccgggaagcggccagctctgcccgttcaactgcagtatcctcacgtcgaatctaatgtcccctctgaaacggtgagtgaagcctcccagcgcctaaggaagcctgtcatgaagcggaaggtgctaaggcgtaaacctgatggagaggtgttggtgacggatgaatcgattatctccgagtccgagagtggaactgagaacgatcaggatctgtgggacctgcgtcagcgcctgatgaatgtacagtttcaggaggacaaggagtcatccttcgatgtgtcccagaagtttaaccttccacacgagtatcaggggatctcgcaggatcagctgatctgctcactgcagcgcgaaggtatgggcagccccgcatatgaacaggatctaattgtcgccagtcgacctaagtcttttatcctccccaaattggaccagcttagccgaaatcggggtaaaactgatagggtcgctcgctacttcgagtacaagagagattgggattccatacgcctgccgggtgaggaccataggaaagagttgaggtggggcgtaagggagcagatgctatgtcgtgccgagcctcaatccaaaccacagcacatctatgtcccaaataactatctggtccccaccgaaaagaaacggtctgccctccggtggggagtgaggtgtgatctagctaatggggtgattccacgcaaactgccttttccactgagtccctcttag

SEQ ID NO: 239987 - DNA, 900 bp, Artificial Sequence
  derived and/or modified sequence
atggaggagctgctgcccgacggccagatctgggccaacatggaccccgaagaaagaatgctggcagctgccacagcatttacacacatctgtgccggccagggcgaaggcgacgtgagacgggaggcccagtcaattcaatacgacccttactccaaggcctccgtcgcccctggaaagaggcccgcgttgcccgtacagctgcagtacccgcatgtggagagcaatgtaccttctgaaacagtgtccgaggcttctcagcggttgcggaagcccgttatgaaaagaaaagtgttgagaagaaagcccgatggagaggttttagtgacggatgagagtatcatatccgagagtgagtccggcactgagaatgaccaggacttatgggatctgagacagcgcttgatgaacgtgcagtttcaggaagacaaagaaagctctttcgacgtcagtcagaagttcaatctgcctcacgaataccagggaatttcacaggatcagttgatctgttccctgcagcgcgaagggatgggtagcccagcctacgagcaggaccttatcgtcgccagccgccccaagtcattcattctccctaagctcgaccagctgtcgcggaacagggggaaaaccgacagggttgcgaggtacttcgagtacaaacgtgactgggactctataagactgcctggtgaagaccacagaaaagagcttaggtggggcgtaagggagcagatgttatgccgagccgaaccccaaagcaagcctcagcacatctacgttcctaacaactacctggttcccacggaaaaaaaaagatctgcactgagatggggagtccgctgtgatctggccaacggggttatcccacggaagcttccatttccactctcaccatcatag

SEQ ID NO: 239988 - DNA, 900 bp, Artificial Sequence
  derived and/or modified sequence
atggaggagctgctgcccgacggccagatctgggccaacatggacccggaagagcggatgctggccgcggctaccgctttcacccatatctgcgccggtcagggggagggagatgtacggagagaggctcagagcattcagtacgatccgtactcaaaagcgagtgtcgcccctggtaagcgccctgctctgccagttcagctccagtacccacatgtggagtcaaatgtgccctccgaaacggtaagcgaggcatcacagagattacggaaaccggtgatgaaacggaaagtcctcaggcggaagccagacggtgaagtcctggtgaccgacgagtcaatcatctcagaatccgaatcagggaccgaaaatgatcaggacttgtgggacttacgccagcggctgatgaacgtccagtttcaggaggacaaggagtcctcttttgacgtttcacagaaatttaatcttccacacgagtaccagggcatatcccaagaccaactcatttgctctctgcagagagaagggatggggtccccagcctatgagcaggatctgattgtggcaagccgccctaagtctttcatcctgcctaagctagatcagttgagtagaaatagaggaaaaacagaccgagtagcgcggtacttcgaatacaaacgagactgggattcaatcaggttacccggagaagaccaccggaaagagctgcgctggggcgtgcgggagcagatgctgtgtcgggcagaaccccagtctaaacctcagcacatctacgtgcccaacaattacttggtacccacagagaagaaaaggtccgctttgcgctggggagtgaggtgcgatttggccaacggggtgatccccaggaaactaccgttcccgctgtcaccaagctag

SEQ ID NO: 239989 - DNA, 900 bp, Artificial Sequence
  derived and/or modified sequence
atggaagaactactccctgatggacaaatctgggcaaacatggacccagaggaacggatgcttgctgcggctaccgcattcactcacatctgcgcaggacagggagagggcgacgttagaagagaagcgcagtctatccagtacgacccatactctaaggcttccgtggcacctggaaaacgccctgcgctgcccgttcaactgcagtacccccacgtcgaatcaaacgtgccttccgaaaccgtcagcgaagcctcccagaggttgcgcaagcccgttatgaagcggaaagttctgcggcgaaaacctgacggagaggtgttggtcaccgacgagagtatcattagtgaaagtgaaagcgggacggagaacgaccaggacctgtgggacctacgacaacgactcatgaacgtacagttccaggaggataaggaatcatcttttgatgtttcccagaagtttaacctgccccacgagtaccaggggatctcacaggatcagctcatctgcagcttgcaaagagagggcatgggttcccccgcttatgaacaggacctgatcgtcgcctcgcggcctaaatctttcatcctgcccaagctggatcaactttcacggaatagaggcaagaccgaccgtgtggcaaggtatttcgagtacaagcgcgattgggactcaatccggttgcctggggaagatcaccgcaaagaactcaggtggggagtccgcgaacaaatgttgtgcagagccgagccccagagcaaaccgcagcacatctacgtgcccaacaattatctggtaccaaccgaaaaaaaacgcagcgcactcagatggggtgtccgctgtgatctcgccaatggcgttattccccgaaaactgccttttccgctaagtccctcctag

SEQ ID NO: 239990 - DNA, 900 bp, Artificial Sequence
  derived and/or modified sequence
atggaggagctgcttcctgatgggcaaatctgggcgaatatggatcccgaggaaaggatgctggcagccgctaccgcttttactcacatatgtgccggtcagggagagggggacgttcggagggaggcgcagagcatccagtacgatccctattctaaggcgtctgttgcgccaggcaaaaggcccgctctgccggttcagttacagtatcctcacgtggagtcaaacgttccaagcgagaccgtatctgaagcgtcgcagaggctgcgcaagccagtgatgaaacggaaggtactccgcagaaaacccgacggagaggttttagttactgatgagtcgataattagcgaaagtgaaagcgggactgagaatgaccaggacctctgggaccttaggcaacggcttatgaatgtgcagttccaggaggataaggaatcaagtttcgatgtctcacaaaaatttaacctcccacatgagtatcaaggtatttctcaagatcagctcatttgtagcctgcagagagaggggatgggaagcccagcatacgagcaagacctgatcgttgcctcccgaccaaagtctttcatactgcccaagctggaccagttatcaaggaacagggggaagaccgacagggtggccaggtatttcgagtataagagggattgggactccattcgcctgcccggtgaagaccatagaaaagagcttaggtggggcgttagagaacagatgctgtgccgagcagaacctcagagtaaaccgcagcatatctatgtgcctaataactacctggtgccaactgagaaaaagcgcagcgcactgaggtggggtgtcagatgtgacctcgccaacggcgttatcccacggaagttaccctttccacttagccccagctag

SEQ ID NO: 239991 - DNA, 900 bp, Artificial Sequence
  derived and/or modified sequence
atggaggagctgctccctgatggccagatttgggcaaacatggacccagaggaaaggatgctggccgctgcaactgcattcactcacatttgtgccggtcagggcgagggcgacgttaggagagaggcccaatcgatccagtacgacccgtattctaaggcgtcagttgctcctggtaaacgaccggctctcccggtccaactgcaatacccccatgtagaatcaaacgtgccctctgagactgtgtctgaagcatcccagcggctccgcaagcccgtcatgaaacggaaggtcttacggaggaagcccgatggtgaggtcctcgtaaccgacgagtcgattatcagtgagtcagaaagcggcactgagaacgatcaggatctgtgggatcttcggcagcgactgatgaacgtccagtttcaggaggacaaagagtcgtccttcgatgtgtcacagaagttcaatctgccgcacgagtatcagggtattagccaggatcagttgatctgcagcctgcaaagggagggaatggggagccccgcttacgagcaggatctgattgtggccagcaggcctaagagctttatcctgcctaagctggatcagctgtccaggaatcgcggtaagacggaccgggtcgctaggtactttgaatataagcgagactgggacagtatccgtctcccgggtgaagaccatcgtaaagagctgagatggggggtacgggagcagatgctgtgtcgggctgagccccagagtaagccccagcatatatacgttcctaataattacttggtgcccactgagaaaaagcgaagtgctttacgatggggcgtgagatgtgacctggccaatggggtcatccccaggaagttgccctttcctctgagcccaagctag

SEQ ID NO: 239992 - DNA, 900 bp, Artificial Sequence
  derived and/or modified sequence
atggaggagctgctgcccgacggccagatctgggccaacatggaccccgaggagagaatgctggccgccgccaccgccttcacccacatctgcgccggccagggcgagggcgacgtgagaagagaggcccagagcatccagtacgacccctacagcaaggccagcgtggcccccggcaagagacccgccctgcccgtgcagctgcagtacccccacgtggagagcaacgtgcccagcgagaccgtgagcgaggccagccagagactgagaaagcccgtgatgaagagaaaggtgctgagaagaaagcccgacggcgaggtgctggtgaccgacgagagcatcatcagcgagagcgagagcggcaccgagaacgaccaggacctgtgggacctgagacagagactgatgaacgtgcagttccaggaggacaaggagagcagcttcgacgtgagccagaagttcaacctgccccacgagtaccagggcatcagccaggaccagctgatctgcagcctgcagagagagggcatgggcagccccgcctacgagcaggacctgatcgtggccagcagacccaagagcttcatcctgcccaagctggaccagctgagcagaaacagaggcaagaccgacagagtggccagatacttcgagtacaagagagactgggacagcatcagactgcccggcgaggaccacagaaaggagctgagatggggcgtgagagagcagatgctgtgcagagccgagccccagagcaagccccagcacatctacgtgcccaacaactacctggtgcccaccgagaagaagagaagcgccctgagatggggcgtgagatgcgacctggccaacggcgtgatccccagaaagctgcccttccccctgagccccagctag

SEQ ID NO: 239993 - protein, 343 aa, Artificial Sequence
  derived and/or modified sequence
MAGNCSWEAHPGNRNKMCPGLSEAPELYSRGFLTIEQIAMLPPPAVMNYIFLLLCLCGLVGNGLVLWFFGFSIKRNPFSIYFLHLASADVGYLFSKAVFSILNTGGFLGTFADYIRSVCRVLGLCMFLTGVSLLPAVSAERCASVIFPAWYWRRRPKRLSAVVCALLWVLSLLVTCLHNYFCVFLGRGAPGAACRHMDIFLGILLFLLCCPLMVLPCLALILHVECRARRRQRSAKLNHVILAMVSVFLVSSIYLGIDWFLFWVFQIPAPFPEYVTDLCICINSSAKPIVYFLAGRDKSQRLWEPLRVVFQRALRDGAELGEAGGSTPNTVTMEMQCPPGNAS

SEQ ID NO: 239994 - protein, 315 aa, Artificial Sequence
  derived and/or modified sequence
MAGNCSWEAHPGNRNKMCPGLSEAPELYSRGFLTIEQIAMLPPPAVMNYIFLLLCLCGLVGNGLVLWFFGFSILNTGGFLGTFADYIRSVCRVLGLCMFLTGVSLLPAVSAERCASVIFPAWYWRRRPKRLSAVVCALLWVLSLLVTCLHNYFCVFLGRGAPGAACRHMDIFLGILLFLLCCPLMVLPCLALILHVECRARRRQRSAKLNHVILAMVSVFLVSSIYLGIDWFLFWVFQIPAPFPEYVTDLCICINSSAKPIVYFLAGRDKSQRLWEPLRVVFQRALRDGAELGEAGGSTPNTVTMEMQCPPGNAS

SEQ ID NO: 239995 - DNA, 1032 bp, Artificial Sequence
  derived and/or modified sequence
atggcgggaaattgctcttgggaagcccacccaggtaataggaataaaatgtgcccgggattaagcgaggcccccgagctttactcaagaggattccttacaatagagcagatcgccatgctacctccaccagccgttatgaactacatattccttcttctgtgtctctgtgggttggttggaaacggtctggttctatggttctttgggttctctatcaaacggaatccattcagtatctactttctgcacttagcatctgctgacgtgggctatctgttcagcaaagccgtgttctctatcttaaacaccgggggtttcctgggaacctttgccgactacattaggtctgtctgcagggttctgggcctctgcatgtttctgactggggtctccctcttaccagctgtctccgccgagagatgcgcgagcgtgatcttccccgcctggtattggcggcgacgtcctaagcgcctcagcgccgtggtatgcgccctcctgtgggtgttatcgttgctggtgacatgtctgcacaattacttctgtgtgttcctggggcgcggggcacctggagctgcgtgccgacatatggacatatttctgggcatcctcctgttccttctctgctgccctctgatggtcctgccatgcctggcactgattcttcatgtagaatgtagagcccgccgacgccagagatcggccaaactcaaccacgtgatactggccatggtgagcgtgttcctggttagtagcatttatttaggaattgactggttcctcttttgggtttttcagattcctgccccttttcctgaatatgtcaccgatctgtgtatctgcataaactcctctgccaagcccatcgtgtattttttggccggcagggacaagtcacagaggttatgggaacccttgagagtcgtgtttcagcgggcactcagagacggcgctgagctcggagaagcaggcgggtcgacacctaacaccgttaccatggagatgcaatgcccaccaggcaacgcctcgtag

SEQ ID NO: 239996 - DNA, 948 bp, Artificial Sequence
  derived and/or modified sequence
atggctggcaactgctcctgggaggcccatcctggtaacaggaataaaatgtgccctgggttgtccgaggcacctgagctttatagccgaggatttctgacaattgagcaaatcgccatgctcccacccccagctgtgatgaactatatcttcctgttactgtgtctttgcggattggtcggaaacggactggttttgtggttcttcggcttcagcattttgaacacgggcggttttctgggtaccttcgctgactatatccgatctgtgtgccgggtcctgggtctctgcatgttccttaccggtgtatccctgctccccgctgtctccgctgagaggtgtgcgtctgtgatattcccagcctggtattggcgacgtcgtcccaaacggctatcggccgtcgtatgcgcactgctgtgggtgctctcgctgctggtgacttgcctgcacaactacttttgcgtgttccttggaaggggggcacctggagcggcctgtcgccatatggacattttccttggcatccttttgttcctcctgtgctgcccattaatggtgcttccgtgcctggcactgatactgcacgtagaatgtcgcgctcggcgtaggcaacgatccgccaagctgaaccacgttatccttgccatggtgagcgtgtttctggttagttctatttacctgggcatcgactggttcctgttttgggtctttcagatccctgcgcctttccctgagtatgttaccgacctgtgtatctgtatcaatagctccgccaaacccattgtttactttttagcgggacgcgataaaagccagcgactctgggagccactccgggtcgtgtttcagcgcgctctgagggacggggcagaactgggggaggcaggcggatcgaccccaaacacagtaaccatggaaatgcagtgtccacccgggaatgcctcttag

SEQ ID NO: 239997 - DNA, 1032 bp, Artificial Sequence
  derived and/or modified sequence
atggccggcaactgtagctgggaagctcacccaggtaacagaaacaagatgtgtccaggattatctgaggctccggagctgtactctcgggggttcctgacaatagaacagattgccatgctcccgcccccagcagtgatgaattatatcttcctgcttttatgtctttgtggattggtggggaatggccttgtgctctggtttttcggctttagcataaaaagaaaccccttctcaatctacttcctccacctcgcatccgcggacgtcggctacctcttctccaaagctgtgttcagcatactgaacaccggtggttttctcggcacatttgctgattacattcgaagtgtgtgtcgggtgctcgggttgtgtatgttccttaccggtgtttctttactgccggctgtgagcgcggagagatgcgcatctgtgattttccctgcctggtattggaggcgtcgacccaaacggctcagtgcggtggtgtgtgctcttttgtgggtactcagcctgctggtcacttgccttcataactacttctgcgtgttcctcggccggggagctcctggggccgcttgtagacatatggacatcttcctgggcatcttgctctttttgttgtgctgtccactgatggtgctaccttgcctcgcactgatcctgcacgtggaatgtagagctaggcgacgacagaggagcgcaaagcttaaccacgtaattctcgcaatggtgagcgtcttcttagtgtcaagcatctacctcggtattgactggtttctcttttgggtgttccagatccccgcccccttcccagagtacgttaccgacctgtgcatctgtattaacagctctgcaaagcccattgtttattttttggcagggagggacaaatcacagaggctctgggagcctcttcgggttgtcttccagcgggcccttagagacggcgctgaactgggggaggccggcgggtctactcctaatacggtaactatggagatgcagtgccccccaggaaatgcttcgtag

SEQ ID NO: 239998 - DNA, 1032 bp, Artificial Sequence
  derived and/or modified sequence
atggccggcaactgctcctgggaggcccaccctggcaacagaaacaagatgtgccccggcctgtctgaggcccctgagctgtacagccggggcttcctgaccatcgagcagatcgccatgctgcccccacctgctgtgatgaactacatcttcctgctgctgtgcctgtgtggcctggtgggcaatggcctggtgctgtggttcttcggcttcagcatcaagaggaaccccttcagcatctacttcctgcacctggccagcgcagatgtgggctacctgttcagcaaggctgtgttcagcatcctgaacacaggaggcttcctgggcacctttgctgactacatccgctctgtgtgccgggtgctgggcctgtgcatgttcctgactggagtgtccctgctgcctgctgtgtctgctgagcgctgtgccagcgtcatcttccctgcctggtactggaggcggcggcccaagaggctgtctgctgtggtgtgtgccctgctgtgggtgctgagcctgctggtgacctgcctgcacaactacttctgtgtgttcctgggccgcggggcccctggggccgcctgccgccacatggacatcttcctgggcatcctgctcttcctgctgtgctgccccctgatggtgctgccctgcctggccctgatcctgcacgtggagtgccgggcccggcggcggcagaggtctgccaagctgaaccacgtgatcctggccatggtgtctgtgttcctggtgagcagcatctacctgggcatcgactggttcctgttctgggtgttccagatcccagcccccttcccagaatatgtgacagacctgtgcatctgcatcaacagcagcgccaagcccatcgtgtacttcctggccggccgggacaagagccagaggctgtgggagcccctgcgggtggtgttccagagggccctgagagatggagctgagctgggggaggccggcggcagcacccccaacacagtgaccatggagatgcagtgccccccaggaaatgccagctag

SEQ ID NO: 239999 - DNA, 948 bp, Artificial Sequence
  derived and/or modified sequence
atggccggcaactgctcctgggaggcccaccctggcaacagaaacaagatgtgccccggcctgtctgaggcccctgagctgtacagccggggcttcctgaccatcgagcagatcgccatgctgcccccacctgctgtgatgaactacatcttcctgctgctgtgcctgtgtggcctggtgggcaatggcctggtgctgtggttcttcggcttcagcatcctgaacacaggaggcttcctgggcacctttgctgactacatccgctctgtgtgccgggtgctgggcctgtgcatgttcctgactggagtgtccctgctgcctgctgtgtctgctgagcgctgtgccagcgtcatcttccctgcctggtactggaggcggcggcccaagaggctgtctgctgtggtgtgtgccctgctgtgggtgctgagcctgctggtgacctgcctgcacaactacttctgtgtgttcctgggccgcggggcccctggggccgcctgccgccacatggacatcttcctgggcatcctgctcttcctgctgtgctgccccctgatggtgctgccctgcctggccctgatcctgcacgtggagtgccgggcccggcggcggcagaggtctgccaagctgaaccacgtgatcctggccatggtgtctgtgttcctggtgagcagcatctacctgggcatcgactggttcctgttctgggtgttccagatcccagcccccttcccagaatatgtgacagacctgtgcatctgcatcaacagcagcgccaagcccatcgtgtacttcctggccggccgggacaagagccagaggctgtgggagcccctgcgggtggtgttccagagggccctgagagatggagctgagctgggggaggccggcggcagcacccccaacacagtgaccatggagatgcagtgccccccaggaaatgccagctag

SEQ ID NO: 240000 - DNA, 2295 bp, Artificial Sequence
  derived and/or modified sequence
gatgagttcccggtggggctctggggggggctcctgagcggggcattccttcctgaagcctcatccccgctcagccctgctcagcccctcctcctactcccctccccctccccctcctgccgggccaggaattgggtttggggcgggttctgcttccaaagccatctcttccagcaggagagggctctactctgagctcctattttccaaggctccgggccgcgctcggcgctggcctgctgccccggcgggtccgccggccggaggcgggagtcacaggaagagccctccacaaaaggaggcctcggcggatcaggacagctgcaggtgggtgtgcagactggtgagctgccagcaggggcccagacgcgccaggcctggagatggctggaaactgctcctgggaggcccatcccggcaacaggaacaagatgtgccctggcctgagcgaggccccggaactctacagccggggcttcctgaccatcgagcagatcgcgatgctgccgcctccggccgtcatgaactacatcttcctgctcctctgcctgtgtggcctggtgggcaacgggctggtcctctggtttttcggcttctccatcaagaggaaccccttctccatctacttcctgcacctggccagcgccgatgtgggctacctcttcagcaaggcggtgttctccatcctgaacacggggggcttcctgggcacgtttgccgactacatccgcagcgtgtgccgggtcctggggctctgcatgttccttaccggcgtgagcctcctgccggccgtcagcgccgagcgctgcgcctcggtcatcttccccgcctggtactggcgccggcggcccaagcgcctgtcggccgtggtgtgcgccctgctgtgggtcctgtccctcctggtcacctgcctgcacaactacttctgcgtgttcctgggccgcggggcccccggcgcggcctgcaggcacatggacatcttcctgggcatcctcctgttcctgctctgctgcccgctcatggtgctgccctgcctggccctcatcctgcacgtggagtgccgggcccgacggcgccagcgctctgccaagctcaaccacgtcatcctggccatggtctccgtcttcctggtgtcctccatctacttagggatcgactggttcctcttctgggtcttccagatcccggcccccttccccgagtacgtcactgacctgtgcatctgcatcaacagcagcgccaagcccatcgtctacttcctggccgggagggacaagtcgcagcggctgtgggagccgctcagggtggtcttccagcgggccctgcgggacggcgctgagctgggggaggccgggggcagcacgcccaacacagtcaccatggagatgcagtgtcccccggggaacgcctcctgagactccagcgcctggaggaggcaggggcaggaagcggcctccaagacccttcgccttgggacaggaatgggcacctgcttctgagtccatacaggagaagaaagatctgtttcctctcctcgggcctccttctccctgggctggggactccaggggtggctgggagactgggcagccaccagcaaacagaccctgtggcccctgcccggctcccccacccattctgctcccctagagacctcttgtacagaagttgcccccaggtggtggggcccctccttgccctaggctggttggtaaaagagaggaggtcaacacccagcctagccacctctgcctcttgggtcagccctccttgactgtgtcccagccagcaccaggccagcagcctcatccctgccattcagggctgttccagagattcgatcctcttaaggcattatcagtgagcaaatgtgaaggaaatggtgtctggaagaaagttctggttcacatgccttgtagctaagtctttctgcaaacaacctcccttccccccgtcgagtcatttggtgactttgatggggggatttctggttatgtcaaggctctggagacaggaagggcctttggccgccttgggtagttgacctgccttttctgactccgggacgagccagtcctaggctgcctccgggagcacttgaggtatcccgcaggccatgaggacccactgggcagctcctggacagcctcttggctccagcccccacccgaaagtggacactggctccgccctggccacctggggactggcactgtggtgcacagtggcccaatgtggccaacggaagttttataaaagacaaaatgtatatcaataaacattttataacttgca

SEQ ID NO: 240001 - DNA, 1301 bp, Artificial Sequence
  derived and/or modified sequence
atctcttccagcaggagagggctctactctgagctcctattttccaaggctccgggccgcgctcggcgctggcctgctgccccggcgggtccgccggccggaggcgggagtcacaggaagagccctccacaaaaggaggcctcggcggatcaggacagctgcaggtgggtgtgcagactggtgagctgccagcaggggcccagacgcgccaggcctggagatggctggaaactgctcctgggaggcccatcccggcaacaggaacaagatgtgccctggcctgagcgaggccccggaactctacagccggggcttcctgaccatcgagcagatcgcgatgctgccgcctccggccgtcatgaactacatcttcctgctcctctgcctgtgtggcctggtgggcaacgggctggtcctctggtttttcggcttctccatcctgaacacggggggcttcctgggcacgtttgccgactacatccgcagcgtgtgccgggtcctggggctctgcatgttccttaccggcgtgagcctcctgccggccgtcagcgccgagcgctgcgcctcggtcatcttccccgcctggtactggcgccggcggcccaagcgcctgtcggccgtggtgtgcgccctgctgtgggtcctgtccctcctggtcacctgcctgcacaactacttctgcgtgttcctgggccgcggggcccccggcgcggcctgcaggcacatggacatcttcctgggcatcctcctgttcctgctctgctgcccgctcatggtgctgccctgcctggccctcatcctgcacgtggagtgccgggcccgacggcgccagcgctctgccaagctcaaccacgtcatcctggccatggtctccgtcttcctggtgtcctccatctacttagggatcgactggttcctcttctgggtcttccagatcccggcccccttccccgagtacgtcactgacctgtgcatctgcatcaacagcagcgccaagcccatcgtctacttcctggccgggagggacaagtcgcagcggctgtgggagccgctcagggtggtcttccagcgggccctgcgggacggcgctgagctgggggaggccgggggcagcacgcccaacacagtcaccatggagatgcagtgtcccccggggaacgcctcctgagactccagcgcctggaggaggcaggggcaggaagcggcctccaagacccttcgccttgggacaggaatgggcacctgcttctgagtccatacaggagaagaaagatctgtttcctctcctcgggcctccttct

SEQ ID NO: 240002 - DNA, 2282 bp, Artificial Sequence
  derived and/or modified sequence
gggctcctgagcggggcattccttcctgaagcctcatccccgctcagccctgctcagcccctcctcctactcccctccccctccccctcctgccgggccaggaattgggtttggggcgggttctgcttccaaagccatctcttccagcaggagagggctctactctgagctcctattttccaaggctccgggccgcgctcggcgctggcctgctgccccggcgggtccgccggccggaggcgggagtcacaggaagagccctccacaaaaggaggcctcggcggatcaggacagctgcaggcttctgccaggtgggtgtgcagactggtgagctgccagcaggggcccagacgcgccaggcctggagatggctggaaactgctcctgggaggcccatcccggcaacaggaacaagatgtgccctggcctgagcgaggccccggaactctacagccggggcttcctgaccatcgagcagatcgcgatgctgccgcctccggccgtcatgaactacatcttcctgctcctctgcctgtgtggcctggtgggcaacgggctggtcctctggtttttcggcttctccatcaagaggaaccccttctccatctacttcctgcacctggccagcgccgatgtgggctacctcttcagcaaggcggtgttctccatcctgaacacggggggcttcctgggcacgtttgccgactacatccgcagcgtgtgccgggtcctggggctctgcatgttccttaccggcgtgagcctcctgccggccgtcagcgccgagcgctgcgcctcggtcatcttccccgcctggtactggcgccggcggcccaagcgcctgtcggccgtggtgtgcgccctgctgtgggtcctgtccctcctggtcacctgcctgcacaactacttctgcgtgttcctgggccgcggggcccccggcgcggcctgcaggcacatggacatcttcctgggcatcctcctgttcctgctctgctgcccgctcatggtgctgccctgcctggccctcatcctgcacgtggagtgccgggcccgacggcgccagcgctctgccaagctcaaccacgtcatcctggccatggtctccgtcttcctggtgtcctccatctacttagggatcgactggttcctcttctgggtcttccagatcccggcccccttccccgagtacgtcactgacctgtgcatctgcatcaacagcagcgccaagcccatcgtctacttcctggccgggagggacaagtcgcagcggctgtgggagccgctcagggtggtcttccagcgggccctgcgggacggcgctgagctgggggaggccgggggcagcacgcccaacacagtcaccatggagatgcagtgtcccccggggaacgcctcctgagactccagcgcctggaggaggcaggggcaggaagcggcctccaagacccttcgccttgggacaggaatgggcacctgcttctgagtccatacaggagaagaaagatctgtttcctctcctcgggcctccttctccctgggctggggactccaggggtggctgggagactgggcagccaccagcaaacagaccctgtggcccctgcccggctcccccacccattctgctcccctagagacctcttgtacagaagttgcccccaggtggtggggcccctccttgccctaggctggttggtaaaagagaggaggtcaacacccagcctagccacctctgcctcttgggtcagccctccttgactgtgtcccagccagcaccaggccagcagcctcatccctgccattcagggctgttccagagattcgatcctcttaaggcattatcagtgagcaaatgtgaaggaaatggtgtctggaagaaagttctggttcacatgccttgtagctaagtctttctgcaaacaacctcccttccccccgtcgagtcatttggtgactttgatggggggatttctggttatgtcaaggctctggagacaggaagggcctttggccgccttgggtagttgacctgccttttctgactccgggacgagccagtcctaggctgcctccgggagcacttgaggtatcccgcaggccatgaggacccactgggcagctcctggacagcctcttggctccagcccccacccgaaagtggacactggctccgccctggccacctggggactggcactgtggtgcacagtggcccaatgtggccaacggaagttttataaaagacaaaatgtatatcaataaacattttataacttgcagcc

SEQ ID NO: 240003 - DNA, 1032 bp, Artificial Sequence
  derived and/or modified sequence
atggccggcaactgcagctgggaggcccaccccggcaaccggaacaaaatgtgtccgggactgagcgaagctccggagctgtactctaggggctttttgacaatcgagcagatcgcgatgctacctccaccagcagtcatgaactatatattcctgctcctctgcctatgtgggctcgttggcaatggcctcgtgctatggttttttggatttagtataaagcgtaatccgttctcaatttatttcctgcatctggcctccgcggatgtcggctatctgtttagcaaggctgttttttcgattctgaatacaggtggatttctcggtacatttgccgattatattcggtcggtgtgcagagttctgggcttgtgtatgtttctgacaggcgtttccctgttaccagccgtatcagccgagcgctgtgcctccgtcatttttcccgcatggtattggagacggaggcccaagcgcctgagcgctgttgtatgcgctcttctctgggtcctctcgttattggtaacatgcctccataactacttttgcgtcttcctgggcaggggggcccccggcgccgcttgcagacacatggatatctttctcggaatcctcctcttccttctttgttgtcctctgatggttctgccttgcctggcactcattctccacgtcgagtgccgagccagaaggcgacagcgatctgccaaactcaaccatgtaatccttgccatggtgtccgtttttctcgtctcaagtatctacctgggaattgattggtttctattttgggtttttcagatcccagcccccttcccggaatatgtaacagatctgtgtatctgcataaactcatctgctaagcccatcgtttatttcctggctggaagggataagagccagcgcctgtgggaaccattacgggtcgtcttccagcgggctctcagggacggcgctgagttgggcgaagctggcgggtctactccaaacacggtcacgatggaaatgcagtgcccccccggtaacgctagttag

SEQ ID NO: 240004 - DNA, 948 bp, Artificial Sequence
  derived and/or modified sequence
atggccggcaactgcagctgggaggcccaccccggcaaccggaacaaaatgtgccccggtctgagcgaagcacctgagttgtattcaaggggctttttaacaatcgagcagattgctatgttgccgccacctgctgtgatgaactacatctttctactattgtgcctgtgcggtctcgtggggaacggtcttgtgctctggttttttgggttctctatcctgaatacaggaggttttttgggtacctttgctgactatattcgttctgtgtgccgggtgctgggtctctgtatgtttcttactggcgtgtcactgttgccagctgtttccgctgagcgctgcgcctctgtgatttttcctgcctggtactggcggcggcgtcctaaacgactctccgcggtcgtgtgtgctctcctgtgggtgctgagcctactcgtgacgtgtctccacaattatttctgcgttttcctgggcaggggcgcaccaggcgccgcctgtagacacatggatatctttctcggcattcttctgttcttactgtgctgcccactaatggtgctgccatgccttgccctcatactccatgttgagtgccgagcacgacgtcgtcagcgtagtgccaaactgaatcatgtgatcctagccatggtcagcgtattcctggtgtcttccatttacctcggtatagattggtttctgttttgggtgtttcagattccagcgccatttcctgagtacgtgactgacctgtgtatctgtatcaatagcagcgctaagcccattgtttacttcctggccggacgagataaaagtcagagactgtgggaacccctgcgcgttgttttccagcgagcccttcgcgacggcgcggagctcggggaagccggagggtcgacgcccaacaccgttacaatggaaatgcagtgccctcctggaaacgcctcctag

SEQ ID NO: 240005 - DNA, 1032 bp, Artificial Sequence
  derived and/or modified sequence
atggccggcaactgcagctgggaggcccaccccggcaaccggaacaaaatgtgcccagggctgtcagaagcaccggaactatactcgcgcggcttcttgacaatcgaacagatagctatgctgcctccccctgccgtaatgaattatatttttctcctgctctgcctttgtggactcgtgggtaacgggttggtgctttggttcttcgggttcagcatcaagcgcaacccgtttagtatttactttctgcacctggcatctgcggacgttgggtacttattctccaaggccgtcttctctatcctcaacaccggggggttcctaggcacattcgcagattatattagatccgtgtgcagagtactgggcctgtgtatgttccttaccggggtcagcttgctaccagcagtgagcgctgaaaggtgcgcatccgtgattttccccgcgtggtactggcgccgcaggcctaagcggctgagcgcagtcgtgtgtgcactactgtgggtgttgtcactgttggtaacatgtctgcataattacttctgcgtgttcctcggtcgtggggcgcccggcgcagcttgtaggcacatggatatatttctcggcattctcttgtttctgctctgttgcccccttatggtgttaccctgcctggccctcatcctgcacgtggaatgtagagctagaagacgccaaaggtccgctaaactcaaccacgtgattctggccatggtctctgtcttcttagtgagctccatttacctggggattgactggttcttgttctgggttttccaaattccagcgcccttcccggagtatgtgactgacctgtgcatatgtatcaacagtagtgccaagccaatcgtgtacttcttagctggccgggataagtcccagagactgtgggagcctctgagagtggtcttccagcgggccttgcgcgatggggcggaactcggggaagccggcgggagcacacccaacactgtgacgatggagatgcagtgccctccaggcaacgcttcatag

SEQ ID NO: 240006 - DNA, 1032 bp, Artificial Sequence
  derived and/or modified sequence
atggccggaaactgctcttgggaagcccacccagggaatagaaacaaaatgtgtcccggactcagcgaggctcccgaactctactccagggggttcctgacaatagagcagatcgccatgttgcctccacctgcagtaatgaactacatctttctgctcctgtgcctgtgtggccttgtggggaatggtctcgtgctgtggtttttcggtttttcaatcaaacggaatcccttctcaatctattttttacatcttgccagcgccgacgttggctacctttttagcaaggcagtgttctccattctcaacaccggcggattcctcggcacttttgcagattacattcgctcggtttgccgtgtgctcggactatgcatgtttttaactggggtctccctgctgcctgcagtttctgctgaacggtgtgctagcgtgatatttccagcctggtactggcgccgtcggccaaagaggttgagcgcggtcgtctgcgccttgctatgggtactgtccctgttggtcacctgtcttcataactacttttgtgtcttcctggggaggggagcgcctggtgccgcatgtaggcacatggacattttcctgggcatcctgctgttcttgctttgttgccccctcatggtgctgccctgtttggccctcatactgcacgtggaatgtagagcccgaaggaggcagaggtcagctaaactcaaccacgtcattctggccatggtgtccgtctttctggtgtcctctatttacctaggcatagattggttcctcttttgggtgtttcagatccctgctcctttcccagagtacgtcaccgatttgtgcatatgtataaacagcagcgcaaagcctatcgtctacttcttggcaggacgcgacaagagccagcggctctgggagcccctccgagtggtctttcagcgggctctccgcgacggcgctgaactgggggaggctgggggttctaccccaaatacggtcaccatggagatgcagtgccccccaggcaacgccagttag

SEQ ID NO: 240007 - DNA, 948 bp, Artificial Sequence
  derived and/or modified sequence
atggccggaaactgctcatgggaagctcaccccggtaatagaaacaaaatgtgccccggtctctctgaggctcccgaactgtattcacggggtttcctcaccatcgagcaaatcgcaatgctgcctcctccagcagtgatgaactacattttcctgcttctatgtctgtgtggactggtggggaacggcctcgtgctgtggttttttggattttccatattaaacaccggtggcttcctagggacattcgcggattacatcaggtctgtgtgcagggttctgggtttgtgcatgtttctgactggcgtgtcacttctacccgctgtttctgctgaacggtgtgcctcagtgatctttcccgcatggtactggaggcggaggcccaagagactctcagccgtggtttgcgctctactgtgggtgctcagccttctcgtaacctgtctccacaactatttttgtgtcttccttgggaggggcgcacctggcgcagcttgccggcacatggatattttcctgggtatcctgctgtttttactgtgctgtcccttgatggtactcccctgcctggccctcattctgcatgttgaatgtcgcgcaagaagacgccagcggagcgctaaactcaaccatgtcatcctcgctatggtgtcggtgttcctggtcagctcgatctaccttggcattgattggtttttgttctgggtctttcagatccctgccccttttccggaatacgtgacagatttatgcatatgtatcaacagttccgctaagcctatagtctactttctggccggaagagataaatctcagcgactctgggagcctctgagagtggtgttccaacgagccctcagagatggcgctgagttgggcgaggctgggggatcaacacctaataccgtgactatggagatgcagtgcccaccagggaacgcaagttag

SEQ ID NO: 240008 - DNA, 1032 bp, Artificial Sequence
  derived and/or modified sequence
atggccggtaactgttcctgggaagctcatcccggtaataggaataaaatgtgtcccggactgtctgaggcacctgagctgtacagtcgtggtttccttacaattgaacagatcgccatgcttccaccccctgcagttatgaactacatattcctgttgctctgcctctgtgggcttgtgggaaacggtctggtcctctggtttttcggtttcagcatcaagcgaaacccattcagcatctacttcttgcacctcgcctctgccgacgtaggctacttattctcaaaggccgtctttagcattctcaatacagggggattcctgggaaccttcgctgattatatccgctctgtctgcagagttctaggcctgtgtatgtttctgactggcgtgtccctcttgccggctgtgtccgcagaacgctgcgcaagcgttatattccctgcgtggtactggcgccgaagacctaaacgattatccgctgttgtctgtgcactgctatgggtgctttcgctcctggtcacctgcctccataactatttctgtgtcttcctgggacggggagcacccggagctgcctgccgtcacatggacatcttcctcggcatcctgctttttttactgtgctgtcctttaatggtgttgccttgtctagcactgatcttgcatgttgagtgtagggccaggcggcgtcagcgatctgcgaagctgaaccacgtgatcctggctatggtttctgttttcttggtgtcctctatttacctgggcatcgactggttcttattctgggtcttccaaattccagccccattccccgaatacgtcacagacctctgcatttgtatcaacagttctgctaagccaatagtttacttcttagcgggacgcgacaagagccagcgactttgggagcctttgagagtggtgttccagcgagcactgcgggacggagcggaacttggcgaggcgggaggtagtacgccaaataccgtcaccatggagatgcagtgcccccctggtaatgccagctag

SEQ ID NO: 240009 - DNA, 1032 bp, Artificial Sequence
  derived and/or modified sequence
atggccggcaactgcagctgggaggcccaccccggcaacagaaacaagatgtgccccggcctgagcgaggcccccgagctgtacagcagaggcttcctgaccatcgagcagatcgccatgctgcccccccccgccgtgatgaactacatcttcctgctgctgtgcctgtgcggcctggtgggcaacggcctggtgctgtggttcttcggcttcagcatcaagagaaaccccttcagcatctacttcctgcacctggccagcgccgacgtgggctacctgttcagcaaggccgtgttcagcatcctgaacaccggcggcttcctgggcaccttcgccgactacatcagaagcgtgtgcagagtgctgggcctgtgcatgttcctgaccggcgtgagcctgctgcccgccgtgagcgccgagagatgcgccagcgtgatcttccccgcctggtactggagaagaagacccaagagactgagcgccgtggtgtgcgccctgctgtgggtgctgagcctgctggtgacctgcctgcacaactacttctgcgtgttcctgggcagaggcgcccccggcgccgcctgcagacacatggacatcttcctgggcatcctgctgttcctgctgtgctgccccctgatggtgctgccctgcctggccctgatcctgcacgtggagtgcagagccagaagaagacagagaagcgccaagctgaaccacgtgatcctggccatggtgagcgtgttcctggtgagcagcatctacctgggcatcgactggttcctgttctgggtgttccagatccccgcccccttccccgagtacgtgaccgacctgtgcatctgcatcaacagcagcgccaagcccatcgtgtacttcctggccggcagagacaagagccagagactgtgggagcccctgagagtggtgttccagagagccctgagagacggcgccgagctgggcgaggccggcggcagcacccccaacaccgtgaccatggagatgcagtgcccccccggcaacgccagctag

SEQ ID NO: 240010 - DNA, 948 bp, Artificial Sequence
  derived and/or modified sequence
atggccggcaactgcagctgggaggcccaccccggcaacagaaacaagatgtgccccggcctgagcgaggcccccgagctgtacagcagaggcttcctgaccatcgagcagatcgccatgctgcccccccccgccgtgatgaactacatcttcctgctgctgtgcctgtgcggcctggtgggcaacggcctggtgctgtggttcttcggcttcagcatcctgaacaccggcggcttcctgggcaccttcgccgactacatcagaagcgtgtgcagagtgctgggcctgtgcatgttcctgaccggcgtgagcctgctgcccgccgtgagcgccgagagatgcgccagcgtgatcttccccgcctggtactggagaagaagacccaagagactgagcgccgtggtgtgcgccctgctgtgggtgctgagcctgctggtgacctgcctgcacaactacttctgcgtgttcctgggcagaggcgcccccggcgccgcctgcagacacatggacatcttcctgggcatcctgctgttcctgctgtgctgccccctgatggtgctgccctgcctggccctgatcctgcacgtggagtgcagagccagaagaagacagagaagcgccaagctgaaccacgtgatcctggccatggtgagcgtgttcctggtgagcagcatctacctgggcatcgactggttcctgttctgggtgttccagatccccgcccccttccccgagtacgtgaccgacctgtgcatctgcatcaacagcagcgccaagcccatcgtgtacttcctggccggcagagacaagagccagagactgtgggagcccctgagagtggtgttccagagagccctgagagacggcgccgagctgggcgaggccggcggcagcacccccaacaccgtgaccatggagatgcagtgcccccccggcaacgccagctag

SEQ ID NO: 240011 - protein, 697 aa, Artificial Sequence
  derived and/or modified sequence
MDKKSTAEKLGKELGLQAKELSAVHSSHHEIGVNDSNLFSLEMREPLESSNTKSFHSAVEIKNRSQHELPCFQHHGIDTPTSLQKRSACCPPSLLRLEETASSSQDGDPQIWDDLPFSESLNKFLAVLESEIAVTQADVSSRKHHVDNDIDKFHADHSRLSVTPQRTTGALHTPPIALRSSQVIVKANCSKDDFLFNCKGNLSPSVEKESQPDNKVEAVSVNHNGRDMSEYFLPNPYLSALSSSSKDLETIVTLKKTIRISPHRESDHSSLNNKYLNGCGEISVSEMNEKLTTLCYRKYNDVSDLCKLENKQYCRWSKNQDDSFTICRKLTYPLETLCNSPNRSTNTLKEMPWGHINNNVTQSYSIGYEGSYDASADLFDDIAKEMDIATEITKKSQDILLKWGTSLAESHPSESDFSLRSLSEDFIQPSQKLSLQSLSDSRHSRTCSPTPHFQSDSEYNFENSQDFVPCSQSTPISGFHQTRIHGINRAFKKPVFYSDLDGNYEKIRIFPENDKQQASPSCPKNIKTPSQKIRSPIVSGVSQPDVFNHYPFAECHETDSDEWVPPTTQKIFPSDMLGFQGIGLGKCLAAYHFPDQQELPRKKLKHIRQGTNKGLIKKKLKNMLAAVVTKKKTHKYNCKSSGWISKCPDIQVLAAPQLHPILGPDSCSEVKCCLPFSEKGPPSVCETRSAWSPELFS

SEQ ID NO: 240012 - protein, 998 aa, Artificial Sequence
  derived and/or modified sequence
MNRRRKFLLASVLALQNSSFIYPSCQKCFSRIILVSKRSNCPKCGSTGESGNANYRYKLSLKVAESNKLFVITVFGSCLDTFFGLTATGLHRYIQDPNKIPETLDNDTTQNLLTKAVETCFVGQSFIFGVTNFENQPGQGSDASNFLQQCSDHKRKAKALVACQIVLPDPGIAGFTVIDYFHQLLQTFNFRKLQCDSQAPNNHLLALDHSNSDLSSIYTSDSTSDFFKSCSKDTFSKFWQPSLEFTCIVSQLTDNDDFSASEQSKAFGTLQQNRKSISIAEATGSSSCHDPIQDSWSLVSYMDKKSTAEKLGKELGLQAKELSAVHSSHHEIGVNDSNLFSLEMREPLESSNTKSFHSAVEIKNRSQHELPCFQHHGIDTPTSLQKRSACCPPSLLRLEETASSSQDGDPQIWDDLPFSESLNKFLAVLESEIAVTQADVSSRKHHVDNDIDKFHADHSRLSVTPQRTTGALHTPPIALRSSQVIVKANCSKDDFLFNCKGNLSPSVEKESQPDNKVEAVSVNHNGRDMSEYFLPNPYLSALSSSSKDLETIVTLKKTIRISPHRESDHSSLNNKYLNGCGEISVSEMNEKLTTLCYRKYNDVSDLCKLENKQYCRWSKNQDDSFTICRKLTYPLETLCNSPNRSTNTLKEMPWGHINNNVTQSYSIGYEGSYDASADLFDDIAKEMDIATEITKKSQDILLKWGTSLAESHPSESDFSLRSLSEDFIQPSQKLSLQSLSDSRHSRTCSPTPHFQSDSEYNFENSQDFVPCSQSTPISGFHQTRIHGINRAFKKPVFYSDLDGNYEKIRIFPENDKQQASPSCPKNIKTPSQKIRSPIVSGVSQPDVFNHYPFAECHETDSDEWVPPTTQKIFPSDMLGFQGIGLGKCLAAYHFPDQQELPRKKLKHIRQGTNKGLIKKKLKNMLAAVVTKKKTHKYNCKSSGWISKCPDIQVLAAPQLHPILGPDSCSEVKCCLPFSEKGPPSVCETRSAWSPELFS

SEQ ID NO: 240013 - protein, 178 aa, Artificial Sequence
  derived and/or modified sequence
MNRRRKFLLASVLALQNSSFIYPSCQKCFSRIILVSKRSNCPKCGSTGESGNANYRYKLSLKVAESNKLFVITVFGSCLDTFFGLTATGLHRYIQDPNKIPETLDNDTTQNLLTKAVETCFVGQSFIFGVTNFENQPGQGSDASNFLQQCSDHKRKAKALVACQIVLPDPATQDAKTK

SEQ ID NO: 240014 - protein, 123 aa, Artificial Sequence
  derived and/or modified sequence
MNRRRKFLLASVLALQNSSFIYPSCQKCFSRIILVSKRSNCPKCGSTGESGNANYRYKLSLKVAESNKLFVITVFGSCLDTFFGLTATGLHRYIQDPNKIPETLDNDTTQNLLTKAVETCFVG

SEQ ID NO: 240015 - protein, 75 aa, Artificial Sequence
  derived and/or modified sequence
MNRRRKFLLASVLALQNSSFIYPSCQKCFSRIILVSKRSNCPKCGSTGESGNANYRYKLSLKVAESNKLFVITVF

SEQ ID NO: 240016 - protein, 76 aa, Artificial Sequence
  derived and/or modified sequence
MNRRRKFLLASVLALQNSSFIYPSCQKCFSRIILVSKRSNCPKCGSTGESGNANYRYKLSLKVAESNKLFVITVFG

SEQ ID NO: 240017 - DNA, 2094 bp, Artificial Sequence
  derived and/or modified sequence
atggacaagaagagcaccgccgagaagctgggcaaggagctgggcctgcaggccaaggagctgagcgccgtgcacagcagccaccacgagatcggcgtgaacgacagcaacctgttcagcctggagatgagagagcccctggagagcagcaacaccaagagcttccacagcgccgtggagatcaagaacagaagccagcacgagctgccctgcttccagcaccacggcatcgacacccccaccagcctgcagaagagaagcgcctgctgcccccccagcctgctgagactggaggagaccgccagcagcagccaggacggcgacccccagatctgggacgacctgcccttcagcgagagcctgaacaagttcctggccgtgctggagagcgagatcgccgtgacccaggccgacgtgagcagcagaaagcaccacgtggacaacgacatcgacaagttccacgccgaccacagcagactgagcgtgaccccccagagaaccaccggcgccctgcacaccccccccatcgccctgagaagcagccaggtgatcgtgaaggccaactgcagcaaggacgacttcctgttcaactgcaagggcaacctgagccccagcgtggagaaggagagccagcccgacaacaaggtggaggccgtgagcgtgaaccacaacggcagagacatgagcgagtacttcctgcccaacccctacctgagcgccctgagcagcagcagcaaggacctggagaccatcgtgaccctgaagaagaccatcagaatcagcccccacagagagagcgaccacagcagcctgaacaacaagtacctgaacggctgcggcgagatcagcgtgagcgagatgaacgagaagctgaccaccctgtgctacagaaagtacaacgacgtgagcgacctgtgcaagctggagaacaagcagtactgcagatggagcaagaaccaggacgacagcttcaccatctgcagaaagctgacctaccccctggagaccctgtgcaacagccccaacagaagcaccaacaccctgaaggagatgccctggggccacatcaacaacaacgtgacccagagctacagcatcggctacgagggcagctacgacgccagcgccgacctgttcgacgacatcgccaaggagatggacatcgccaccgagatcaccaagaagagccaggacatcctgctgaagtggggcaccagcctggccgagagccaccccagcgagagcgacttcagcctgagaagcctgagcgaggacttcatccagcccagccagaagctgagcctgcagagcctgagcgacagcagacacagcagaacctgcagccccaccccccacttccagagcgacagcgagtacaacttcgagaacagccaggacttcgtgccctgcagccagagcacccccatcagcggcttccaccagaccagaatccacggcatcaacagagccttcaagaagcccgtgttctacagcgacctggacggcaactacgagaagatcagaatcttccccgagaacgacaagcagcaggccagccccagctgccccaagaacatcaagacccccagccagaagatcagaagccccatcgtgagcggcgtgagccagcccgacgtgttcaaccactaccccttcgccgagtgccacgagaccgacagcgacgagtgggtgccccccaccacccagaagatcttccccagcgacatgctgggcttccagggcatcggcctgggcaagtgcctggccgcctaccacttccccgaccagcaggagctgcccagaaagaagctgaagcacatcagacagggcaccaacaagggcctgatcaagaagaagctgaagaacatgctggccgccgtggtgaccaagaagaagacccacaagtacaactgcaagagcagcggctggatcagcaagtgccccgacatccaggtgctggccgccccccagctgcaccccatcctgggccccgacagctgcagcgaggtgaagtgctgcctgcccttcagcgagaagggcccccccagcgtgtgcgagaccagaagcgcctggagccccgagctgttcagctag

SEQ ID NO: 240018 - DNA, 3087 bp, Artificial Sequence
  derived and/or modified sequence
tgccagtcatcccaatggctattttgttttgcagaccacggtgtgaacacatgaacagaagacgaaaatttcttctagcctcagtacttgctctccagaattcaagttttatatatccatcatgtcagaagtgcttctctaggataatcctggtctccaaaagaattttgaaaaccaacctggacaaggttcagatgccagtaacttcttacagcaatgctctgaccacaaaagaaaagccaaagcactagtggcttgccagattgttctaccagacccaggtattgcaggctttactgtcattgactacttccatcaacttttgcagacttttaatttcaggaaacttcagtgtgactctcaggcacctaacaatcacttacttgctttagatcactcaaatagtgatctcagcagcatatatacttctgacagcacttctgattttttcaagtcctgcagcaaggatactttttcaaaattctggcagccatcacttgaattcacttgcattgtttcacaactaacagataatgatgatttttcagcttcagaacaaagtaaggcctttggtactcttcagcagaacagaaagtccatctccattgcagaggccactggttccagtagctgccatgatcccattcaggattcatggagccttgtttcatatatggataaaaagagtacagcagaaaagttgggtaaagaacttggcttacaagctaaggagctgagtgcagttcacagcagtcatcatgaaattggagttaatgactctaatttattctctttggaaatgcgagagccccttgagtcaagtaatacaaaatccttccacagtgcagtggaaattaaaaataggtcccagcatgagctaccatgttttcagcatcatggtatagataccccaactagccttcagaagagatctgcatgttgtccaccttcgttactcagacttgaagagacagccagcagttcccaggatggtgaccctcaaatttgggatgatctgccattctctgaaagcctgaacaagtttctggcagttcttgaaagtgagattgctgtaacccaggcagatgtcagtagtaggaaacatcatgtagataatgacattgataaatttcatgcagaccacagcaggttatctgtgactccccagagaactactggagccctgcatacaccacctatagctttaagatcatcacaagtaatagtcaaagcaaactgtagcaaagatgacttccttttcaactgtaaaggaaatctaagtcctagtgttgaaaaggagtcacaaccagataacaaagtagaggctgtctctgtaaatcataatggaagagatatgtcagaatattttttaccgaatccttacctgtcagctctgtcttcatcttcaaaagatttagaaacaatagttactcttaagaagactatcagaatctcaccacacagggagagtgaccattctagtctaaataacaaatatttgaatggatgtggagaaatatcagtttcagaaatgaatgaaaagttgacaactctgtgttataggaagtataatgatgtctctgatctttgcaaattagaaaataaacaatattgtaggtggtccaagaaccaagatgacagttttacaatttgcaggaaacttacatatcctttagaaactctttgcaatagtccaaatagaagtacaaatacattgaaagaaatgccttggggacatatcaataacaacgtaacacagagctattctattggttatgaaggtagctatgatgcctctgctgatctctttgatgatattgctaaagaaatggacattgcaactgagattaccaaaaaatcacaggatattttgttaaaatggggaacatctttggcagaaagtcacccttcagagtctgatttttcactgagatcactttctgaagacttcatccagccttcacaaaaattatccttgcaaagcctatctgactctaggcattcaagaacatgctctccaacacctcattttcaatcagattcagaatataattttgaaaatagtcaagactttgttccatgttcacagtcaactccaatttcagggttccaccaaacaagaattcatgggataaacagagctttcaaaaaacctgtattttattcagatcttgatggtaactatgaaaaaataaggattttccctgaaaatgacaaacagcaagccagcccaagctgtccaaaaaatataaaaacacctagccagaaaatcagaagccctattgtatctggtgtttcacaaccagacgttttcaatcactacccttttgctgagtgccatgaaactgatagtgatgaatgggtccctcctaccacacaaaaaatatttccttcagatatgcttggattccaaggcataggtctagggaaatgccttgctgcctatcatttccctgatcaacaagagttaccaagaaagaaactgaaacatattagacaaggaaccaataaaggtttaattaagaagaaattaaagaatatgcttgcagcagttgttacgaaaaagaaaactcataaatataactgtaaaagttcaggctggatttccaaatgtccagacattcaagtcttagcagcacctcagctgcaccctattcttggacctgattcttgttcagaagtcaaatgttgccttccattttcagaaaaaggcccaccttcagtgtgtgaaactcgaagtgcttggtcacctgaattgttttcataaaaagtcacctgaacccaattcctgaacttttaaatctgtttggaaatgtttgccttcaggggtacggaaagcattctttacattttgaacacttggagagaagcaaattgaaaacaggactctgctgggagctactgtgccttttaaaatataaagccattgttttccccagggttttatctagaatactatgattaggtagttgagcactttatcttatactgtttattgtactttaataatattgttaagattgtttttgaaagtattaatgtttgttaaaatcacatatacatccagaaataaagactttgcaaacc

SEQ ID NO: 240019 - DNA, 2997 bp, Artificial Sequence
  derived and/or modified sequence
atgaacagaagaagaaagttcctgctggccagcgtgctggccctgcagaacagcagcttcatctaccccagctgccagaagtgcttcagcagaatcatcctggtgagcaagagaagcaactgccccaagtgcggcagcaccggcgagagcggcaacgccaactacagatacaagctgagcctgaaggtggccgagagcaacaagctgttcgtgatcaccgtgttcggcagctgcctggacaccttcttcggcctgaccgccaccggcctgcacagatacatccaggaccccaacaagatccccgagaccctggacaacgacaccacccagaacctgctgaccaaggccgtggagacctgcttcgtgggccagagcttcatcttcggcgtgaccaacttcgagaaccagcccggccagggcagcgacgccagcaacttcctgcagcagtgcagcgaccacaagagaaaggccaaggccctggtggcctgccagatcgtgctgcccgaccccggcatcgccggcttcaccgtgatcgactacttccaccagctgctgcagaccttcaacttcagaaagctgcagtgcgacagccaggcccccaacaaccacctgctggccctggaccacagcaacagcgacctgagcagcatctacaccagcgacagcaccagcgacttcttcaagagctgcagcaaggacaccttcagcaagttctggcagcccagcctggagttcacctgcatcgtgagccagctgaccgacaacgacgacttcagcgccagcgagcagagcaaggccttcggcaccctgcagcagaacagaaagagcatcagcatcgccgaggccaccggcagcagcagctgccacgaccccatccaggacagctggagcctggtgagctacatggacaagaagagcaccgccgagaagctgggcaaggagctgggcctgcaggccaaggagctgagcgccgtgcacagcagccaccacgagatcggcgtgaacgacagcaacctgttcagcctggagatgagagagcccctggagagcagcaacaccaagagcttccacagcgccgtggagatcaagaacagaagccagcacgagctgccctgcttccagcaccacggcatcgacacccccaccagcctgcagaagagaagcgcctgctgcccccccagcctgctgagactggaggagaccgccagcagcagccaggacggcgacccccagatctgggacgacctgcccttcagcgagagcctgaacaagttcctggccgtgctggagagcgagatcgccgtgacccaggccgacgtgagcagcagaaagcaccacgtggacaacgacatcgacaagttccacgccgaccacagcagactgagcgtgaccccccagagaaccaccggcgccctgcacaccccccccatcgccctgagaagcagccaggtgatcgtgaaggccaactgcagcaaggacgacttcctgttcaactgcaagggcaacctgagccccagcgtggagaaggagagccagcccgacaacaaggtggaggccgtgagcgtgaaccacaacggcagagacatgagcgagtacttcctgcccaacccctacctgagcgccctgagcagcagcagcaaggacctggagaccatcgtgaccctgaagaagaccatcagaatcagcccccacagagagagcgaccacagcagcctgaacaacaagtacctgaacggctgcggcgagatcagcgtgagcgagatgaacgagaagctgaccaccctgtgctacagaaagtacaacgacgtgagcgacctgtgcaagctggagaacaagcagtactgcagatggagcaagaaccaggacgacagcttcaccatctgcagaaagctgacctaccccctggagaccctgtgcaacagccccaacagaagcaccaacaccctgaaggagatgccctggggccacatcaacaacaacgtgacccagagctacagcatcggctacgagggcagctacgacgccagcgccgacctgttcgacgacatcgccaaggagatggacatcgccaccgagatcaccaagaagagccaggacatcctgctgaagtggggcaccagcctggccgagagccaccccagcgagagcgacttcagcctgagaagcctgagcgaggacttcatccagcccagccagaagctgagcctgcagagcctgagcgacagcagacacagcagaacctgcagccccaccccccacttccagagcgacagcgagtacaacttcgagaacagccaggacttcgtgccctgcagccagagcacccccatcagcggcttccaccagaccagaatccacggcatcaacagagccttcaagaagcccgtgttctacagcgacctggacggcaactacgagaagatcagaatcttccccgagaacgacaagcagcaggccagccccagctgccccaagaacatcaagacccccagccagaagatcagaagccccatcgtgagcggcgtgagccagcccgacgtgttcaaccactaccccttcgccgagtgccacgagaccgacagcgacgagtgggtgccccccaccacccagaagatcttccccagcgacatgctgggcttccagggcatcggcctgggcaagtgcctggccgcctaccacttccccgaccagcaggagctgcccagaaagaagctgaagcacatcagacagggcaccaacaagggcctgatcaagaagaagctgaagaacatgctggccgccgtggtgaccaagaagaagacccacaagtacaactgcaagagcagcggctggatcagcaagtgccccgacatccaggtgctggccgccccccagctgcaccccatcctgggccccgacagctgcagcgaggtgaagtgctgcctgcccttcagcgagaagggcccccccagcgtgtgcgagaccagaagcgcctggagccccgagctgttcagctag

SEQ ID NO: 240020 - DNA, 537 bp, Artificial Sequence
  derived and/or modified sequence
atgaacagaagaagaaagttcctgctggccagcgtgctggccctgcagaacagcagcttcatctaccccagctgccagaagtgcttcagcagaatcatcctggtgagcaagagaagcaactgccccaagtgcggcagcaccggcgagagcggcaacgccaactacagatacaagctgagcctgaaggtggccgagagcaacaagctgttcgtgatcaccgtgttcggcagctgcctggacaccttcttcggcctgaccgccaccggcctgcacagatacatccaggaccccaacaagatccccgagaccctggacaacgacaccacccagaacctgctgaccaaggccgtggagacctgcttcgtgggccagagcttcatcttcggcgtgaccaacttcgagaaccagcccggccagggcagcgacgccagcaacttcctgcagcagtgcagcgaccacaagagaaaggccaaggccctggtggcctgccagatcgtgctgcccgaccccgccacccaggacgccaagaccaagtag

SEQ ID NO: 240021 - DNA, 372 bp, Artificial Sequence
  derived and/or modified sequence
atgaacagaagaagaaagttcctgctggccagcgtgctggccctgcagaacagcagcttcatctaccccagctgccagaagtgcttcagcagaatcatcctggtgagcaagagaagcaactgccccaagtgcggcagcaccggcgagagcggcaacgccaactacagatacaagctgagcctgaaggtggccgagagcaacaagctgttcgtgatcaccgtgttcggcagctgcctggacaccttcttcggcctgaccgccaccggcctgcacagatacatccaggaccccaacaagatccccgagaccctggacaacgacaccacccagaacctgctgaccaaggccgtggagacctgcttcgtgggctag

SEQ ID NO: 240022 - DNA, 228 bp, Artificial Sequence
  derived and/or modified sequence
atgaacagaagaagaaagttcctgctggccagcgtgctggccctgcagaacagcagcttcatctaccccagctgccagaagtgcttcagcagaatcatcctggtgagcaagagaagcaactgccccaagtgcggcagcaccggcgagagcggcaacgccaactacagatacaagctgagcctgaaggtggccgagagcaacaagctgttcgtgatcaccgtgttctag

SEQ ID NO: 240023 - DNA, 231 bp, Artificial Sequence
  derived and/or modified sequence
atgaacagaagaagaaagttcctgctggccagcgtgctggccctgcagaacagcagcttcatctaccccagctgccagaagtgcttcagcagaatcatcctggtgagcaagagaagcaactgccccaagtgcggcagcaccggcgagagcggcaacgccaactacagatacaagctgagcctgaaggtggccgagagcaacaagctgttcgtgatcaccgtgttcggctag

SEQ ID NO: 240024 - DNA, 2094 bp, Artificial Sequence
  derived and/or modified sequence
atggacaaaaagagcacagctgagaagttaggtaaggaacttgggctgcaggcaaaagagctaagcgcagtccacagcagccatcatgaaatcggggttaacgactctaatctgttcagtctcgagatgcgagagcccctggaaagcagcaatacgaagagtttccattcagctgtggaaatcaagaaccgatctcaacacgaactcccctgcttccagcatcacggcatagatactcccacttctctgcagaagcggtccgcctgttgtcccccctcattactccgactcgaggagaccgccagctcatcacaggatggcgatccccagatttgggacgaccttcccttctccgagtcattgaataagttccttgctgtgctggaatcagagatcgcggtgactcaggccgatgtgagcagccgcaagcaccatgtggataatgatatcgataagttccacgccgaccactctcgcctcagcgttacacctcaaagaaccacgggtgcactacatacaccaccaatcgctctgcgctcaagccaggtcatcgtgaaagcgaattgtagcaaagacgattttctctttaactgcaaggggaacctgtccccttccgtggaaaaagagtcacaacccgataacaaggtcgaggctgtgtctgtgaatcacaacggtagggacatgtcagaatacttcctgcccaacccctacctgagtgctttgtcttctagctccaaagaccttgagacgatcgtgaccctgaaaaaaacaatcaggattagcccccacagagagtctgaccactcttcactgaataataagtatttgaatggctgtggagagatctctgtctcagagatgaacgagaagctgaccaccctgtgttacagaaagtataatgatgtgtcagatctctgtaaactggagaacaaacagtactgcagatggtcgaaaaaccaggatgacagcttcacgatctgtcgtaaattaacttatccgttggaaaccctgtgcaactctccaaacagatcaacgaatacccttaaagaaatgccgtggggccatatcaataacaacgttacccaaagctacagtattgggtacgagggaagttacgacgcttctgcagatctgtttgatgacatcgccaaagagatggacatcgccacagaaataactaaaaagtctcaggacatactacttaagtggggaacttctctggctgaaagccatcctagtgagtcagacttctctctgagaagcctaagtgaagactttatacagccctctcagaaactcagcctgcagtctctcagcgacagccgacactccagaacttgttcccctacaccccactttcagtcagatagcgagtacaacttcgagaattcccaggattttgtgccgtgttcacaaagcacgccaatatccggattccatcaaactagaattcacgggatcaatcgggccttcaaaaagcctgtcttctactctgacctcgatggcaactacgagaagattaggatattcccagagaatgacaaacagcaggcatctccttcttgtcccaaaaatatcaaaacaccctcccagaagattcgttcacccatcgtcagcggggtcagtcagccagatgtgttcaaccattacccttttgccgagtgtcatgagactgattctgacgagtgggtcccgccaactacccagaagattttcccctctgatatgttaggatttcagggaatcggccttggaaaatgtctggccgcttaccacttcccagatcagcaggagctgccacgtaagaagttgaagcatatcagacagggaaccaataagggcctgatcaaaaagaagttgaagaacatgctggccgcagtggtaactaagaagaaaactcataaatacaactgtaagtcaagcggatggatctcaaaatgccccgatatccaagtccttgcagcccctcagctgcaccctatactcggccctgattcctgttctgaggttaagtgctgcctgccattcagtgaaaaaggtccaccatctgtgtgtgagacacgttccgcgtggtcgcctgagctttttagctag

SEQ ID NO: 240025 - DNA, 2997 bp, Artificial Sequence
  derived and/or modified sequence
atgaacagaagaagaaaatttctattagcttccgtattggcactgcagaacagctcattcatatacccttcatgccaaaagtgcttctccaggataatcctggtctccaagagatctaactgtccgaagtgcggctcaactggggagtcgggaaacgccaactaccgatataagttgtctttaaaggtagcagagagtaataagctcttcgtgattacagttttcggtagctgtctggacacatttttcgggctaacagctaccgggctgcatcggtatatacaggaccccaacaaaataccagagaccttggataatgatacaacccagaatcttttgacaaaagccgtcgaaacttgctttgtgggacagtcgttcatctttggcgtaacgaattttgagaatcagcctggacagggctcagatgcaagtaactttctccagcagtgttctgatcataagcgcaaagccaaagcactggtagcatgccagattgtgttgcccgacccgggaattgccggatttaccgtgatcgattacttccaccagttgctccagactttcaatttcaggaaactacagtgtgactctcaggcaccaaacaaccaccttctcgccctcgatcattccaactccgatctatcctctatttatacttcggactctacaagtgatttcttcaaaagctgcagtaaagacacgtttagcaaattctggcaaccttcattggagtttacctgtattgtcagtcagctcacggacaatgacgatttttcagccagcgaacagtccaaggcattcggaacgctgcaacagaaccggaagtctatttctattgcagaagccaccggcagctctagctgtcacgaccccattcaggattcctggtccctcgtgtcctatatggacaagaagtctaccgccgaaaaattggggaaagaattgggcttacaggccaaagagctcagtgccgtgcacagctcccatcacgagataggggttaacgatagtaatctcttcagcctggagatgcgagagccgctggaatcgtctaacaccaagtccttccacagtgccgttgagatcaaaaaccgtagccagcacgaactcccttgtttccagcatcacgggatagacacaccaacctctctgcagaagagatcagcttgctgtcctccctctctgttgcgactggaagaaactgcaagctcctcccaggacggagacccccaaatttgggacgaccttccctttagcgaaagcttaaataaattcctggcagttctagagagcgaaatcgctgtgacccaggcggatgtgtctagtcgcaaacatcacgtggacaatgatatagacaagttccacgcagaccactctcgcctgtccgtgactccccaacggactacaggcgcactgcacaccccaccaatagcactccgctcttcccaggtcatcgtgaaggcgaattgttccaaggatgattttttgtttaattgtaaaggaaatctgagtccttccgtcgagaaagagagccaacccgacaacaaggtcgaagctgtgtcggtgaaccataacggacgcgatatgtctgaatactttctacctaacccatacttatcggcactttcttcctcttctaaggatctggaaactatcgtcacattgaaaaaaaccatccgaatttctccccaccgagagtcagaccactcttctcttaataacaaatacctgaatggttgcggagaaatttccgtgtccgagatgaatgagaaactgacaaccctatgttatcgcaaatataatgacgtgagcgacctctgcaaactggaaaataaacagtattgtaggtggtctaaaaaccaggatgatagcttcactatctgccgcaaactgacttatcccctggaaaccctgtgcaatagccctaataggtccacgaacacactaaaagaaatgccatgggggcatatcaataacaacgtgacccagtcatactcgatcggttacgagggttcttacgatgccagtgccgatttgttcgacgatattgctaaggaaatggatatcgcaaccgaaatcactaagaagagccaggacattcttctgaagtggggcacctccctcgcagagtctcatccatcagagtccgacttcagcctgagaagcctgtccgaggactttattcagccgtctcagaagctctctctgcaaagtctcagcgattccaggcactcaagaacatgcagtccaacaccccacttccagtcagacagcgagtacaacttcgagaatagccaggactttgtgccttgctcccagtctaccccaatttcaggctttcatcagacccggatccatggtatcaatagggcgtttaaaaaacctgtgttctacagtgatctcgacggtaactacgagaagatacgtatcttcccagagaatgataaacagcaggcttcccccagttgccccaagaatattaagactccgagccagaagatcaggagccctattgtgagcggcgtgagtcaacccgatgtgttcaatcactaccccttcgctgaatgccatgagacagatagcgatgaatgggttcccccaaccacccaaaaaattttcccatcagatatgctcggattccaggggatagggctgggcaagtgtctcgcagcttaccactttcccgaccagcaggagttgccccggaagaagcttaaacacatcaggcaggggaccaacaaaggacttattaagaaaaagctaaagaatatgctggcagcggttgtgaccaagaaaaagactcataaatataactgcaagtccagtgggtggatctccaaatgtccagatatccaggtgttagctgccccgcagctccaccctatactcggacccgactcgtgttctgaagtgaagtgctgtctaccattcagtgaaaaagggcctcccagcgtgtgcgagacaagatccgcctggtcccccgagctattttcctag

SEQ ID NO: 240026 - DNA, 537 bp, Artificial Sequence
  derived and/or modified sequence
atgaacaggaggcggaaatttctgctggccagcgtcctggcgctgcagaacagtagctttatttatcccagctgtcagaagtgtttttccagaatcatcctggttagcaaacgcagtaattgtcccaagtgtggaagcactggtgagtcaggtaatgccaattatcgctataagctgagtcttaaagtggccgagtccaataaattattcgtgattacggtatttggctcttgcctggatacattttttggtctgaccgcgacaggacttcatcggtatattcaggatccaaataagattcctgagaccctggacaacgatacaactcagaacttgctgaccaaggcagtggaaacctgctttgtaggccagagttttatcttcggagtcaccaatttcgagaaccagccaggacagggcagcgatgcctctaactttctccagcaatgctctgatcacaaacgcaaagccaaagccctagttgcatgtcagattgtgctacccgatcccgcaacccaggacgccaaaaccaagtag

SEQ ID NO: 240027 - DNA, 372 bp, Artificial Sequence
  derived and/or modified sequence
atgaatcggcgccgtaagttcctgctggcttccgtcctggccttacaaaatagtagctttatttaccctagctgtcaaaaatgcttcagtcgcatcattctcgtgtccaaaagatcaaattgccctaagtgcggttctaccggtgagagcgggaacgcaaactatagatataagctgagtctgaaagtggccgagtcaaacaaacttttcgttattactgtattcggctcctgtctcgataccttctttgggcttaccgctacgggtctacaccgatacattcaggatcccaataaaatacctgagaccctggacaatgatactactcagaaccttcttaccaaggcggtcgaaacatgcttcgtcggctag

SEQ ID NO: 240028 - DNA, 228 bp, Artificial Sequence
  derived and/or modified sequence
atgaaccgcaggcgtaaattcctgttggctagcgtgctggccctccagaactcatcatttatttaccccagctgccaaaagtgctttagtaggattattctcgtgagcaagcgttcaaactgccccaagtgcggaagtacaggagaatcgggaaatgctaattacaggtataagctcagcctaaaggtcgccgaatctaacaagttattcgtgatcacagtgttctag

SEQ ID NO: 240029 - DNA, 231 bp, Artificial Sequence
  derived and/or modified sequence
atgaaccgaagaagaaagttcctgctggcatcggtccttgcccttcagaacagctccttcatttatcccagttgtcagaaatgcttcagccgcataatcctggtttcaaaaagaagtaactgcccgaagtgtggttctacgggcgagtcgggaaatgcaaattatcggtacaagctgtctctgaaagtggcggagtccaataagttattcgtgataacagttttcgggtag

SEQ ID NO: 240030 - DNA, 2997 bp, Artificial Sequence
  derived and/or modified sequence
atgaacaggcgcagaaaatttctgctcgccagtgtgctggccttgcagaactcgagttttatttacccttcatgtcaaaagtgctttagcaggatcatcctggtgtcaaagcggtccaattgccccaaatgcggcagcacaggcgagtccggcaatgccaattatcgatacaaacttagtctgaaggtggccgagagtaacaaactttttgtgattactgtgttcggatcttgcctcgacacctttttcggccttaccgctacaggtctgcacaggtacatccaggaccccaacaaaatcccagaaaccctcgataacgatacaacccagaacctcctgactaaagctgtggagacctgctttgtgggacagtccttcattttcggcgtgacaaattttgaaaaccagccgggacagggatccgacgcctctaacttcctccagcagtgctccgaccacaagagaaaggccaaagcactggtggcttgccagatcgtccttccagatcctgggatcgctgggtttacggtgattgactattttcaccaacttctccaaactttcaacttccggaaactgcaatgcgattcccaggcccctaacaaccatctgctcgccttagatcactccaattctgatttgagtagcatctatacgagtgattcaactagtgatttcttcaagtcttgctcaaaagacacgttcagtaagttctggcagccatcactggagtttacatgcatcgtatcacagctcactgacaatgatgacttctcggccagcgagcagagcaaggccttcgggaccctccagcagaatcgtaaatccatttccatcgcagaagcaaccggatcatcttcgtgccacgatcccattcaggactcatggtcactggtctcctacatggataagaaatcgactgccgagaaactggggaaagagctgggcctgcaggccaaggagctttcagccgtgcattcctcccaccacgaaattggcgtgaatgacagtaatcttttctctcttgaaatgagggaacccctcgaatctagcaatacaaaaagtttccactctgctgttgagatcaagaatagatcacagcatgaactgccatgcttccagcaccacggtatcgacacaccaacctctctgcagaaacgatccgcatgttgtcccccctcactgttgaggctggaggaaaccgccagctccagccaagatggagacccgcagatctgggacgatctgcctttctccgaaagcctgaacaaatttctcgccgttcttgagtccgaaatcgctgtcactcaggccgatgtcagctctcggaagcaccatgtggacaacgacatcgacaaatttcacgcagatcatagtagactgagtgttactccccagagaaccactggcgccctgcacactccacctatagcgctccgctccagtcaggtgatcgtgaaggccaactgttcaaaagatgactttctttttaattgtaaaggcaatctcagcccaagtgtcgaaaaggagagtcaacccgataacaaggtggaagccgtttccgtcaatcataatggacgggatatgtccgagtatttcctgcctaacccttacctaagtgctctgtcttcttcatccaaagacctggagacaatcgtgacactgaagaagaccatccgaatttctccccaccgtgagtctgatcattctagtttgaacaataaatacctgaatggctgcggtgaaatctcagtgtctgagatgaatgagaaactgaccacattatgctacagaaaatacaatgatgtgagcgatctgtgtaaactggagaataagcagtattgccggtggtccaagaaccaggacgattcatttacgatttgcagaaagctgacttaccccctggaaactttgtgcaatagccccaacagatcaacaaacacgttaaaggagatgccttggggacacattaacaacaatgttacccagtcctacagcattggttatgaagggagctacgatgctagtgctgacctgtttgatgatatcgccaaagagatggatattgctactgaaatcactaagaaatcccaggacattctgctcaaatggggaactagcctggccgagagtcacccttccgagagcgacttttccttaaggtccctgtctgaggacttcattcagccaagccagaaactgtctcttcagagcctctctgatagtaggcatagccggacatgtagcccgactccccattttcagtcagattctgagtataactttgaaaactctcaggatttcgtaccatgttctcagagtactcccatttcaggcttccaccagacaaggatccatggcattaaccgagctttcaagaaacccgtcttttactcagatttggatggaaactatgaaaagatacgcatctttcccgaaaatgataagcagcaggcttcaccaagctgcccaaagaatatcaagactccgtctcaaaagattcgctcccccattgtgagtggcgtctcccagccagacgtgttcaatcattacccattcgcagagtgtcatgagacagatagcgacgagtgggtgcctccaacaacccaaaaaattttccccagcgatatgctgggcttccagggcataggactggggaagtgcttggctgcataccactttcctgaccagcaggagctgccaaggaagaagctcaaacacatcaggcagggcacaaacaagggccttatcaagaaaaaacttaagaatatgctggctgctgtcgtgacaaagaaaaaaacccataagtataattgcaagagcagcggctggatatctaagtgtccagacatccaggtgttagcagcacctcagttacaccctatcttagggcccgactcatgctctgaagtgaaatgttgtttgcctttttccgagaagggccccccatcagtttgcgagacccgctcagcctggagcccagaactattttcgtag

SEQ ID NO: 240031 - DNA, 2094 bp, Artificial Sequence
  derived and/or modified sequence
atggacaagaagagcacagctgagaagctgggcaaggagctgggcctgcaggccaaggagctgtctgctgtgcacagcagccaccatgaaattggagtgaatgacagcaacctcttcagcctggagatgagggagcccctggagagcagcaacaccaagagcttccacagcgctgtggagatcaagaacagaagccagcacgagctgccctgcttccagcaccacggcatcgacacccccaccagcctgcagaagaggtctgcctgctgcccccccagcctgctgcggctggaggagacagccagcagcagccaggatggagacccccagatctgggatgacctgcccttcagcgagagcctgaacaagttcctggccgtgctggagagcgagattgctgtgacccaggctgatgtgagcagcaggaagcaccacgtggacaatgacatcgacaagttccacgccgaccacagccggctgtctgtgaccccccagaggaccaccggggccctgcacaccccacccatcgccctgcggagcagccaggtgattgtgaaggccaactgcagcaaggatgacttcctgttcaactgcaagggcaacctgagccccagcgtggagaaggagagccagcctgacaacaaggtggaggccgtgtctgtgaaccacaacggccgggacatgtctgagtacttcctgcccaacccctacctgagcgccctgagcagcagcagcaaggacctggagaccatcgtgaccctgaagaagaccatccgcatcagcccccaccgggagagtgaccacagcagcctgaacaacaagtacctgaatggctgtggggagatctctgtgtctgagatgaatgagaagctgaccaccctgtgctacaggaagtacaatgatgtgtctgacctgtgcaagctggagaacaagcagtactgccgctggagcaagaaccaggatgacagcttcaccatctgcaggaagctgacctaccccctggagaccctgtgcaacagccccaacagaagcaccaacaccctgaaggagatgccctggggccacatcaacaacaacgtgacccagagctacagcatcggctatgagggcagctatgatgccagcgctgacctgtttgatgacatcgccaaggagatggacatcgccacagagatcaccaagaagagccaggacatcctgctgaagtggggcaccagcctggccgagagccaccccagcgagagtgacttcagcctgcggagcctgtctgaggacttcatccagcccagccagaagctgagcctgcagagcctgagtgacagccgccacagcaggacctgcagccccaccccccacttccagagcgacagcgagtacaactttgagaacagccaggactttgtgccctgcagccagagcacccccatcagcggcttccaccagacccgcatccacggcatcaacagagccttcaagaagcctgtgttctacagcgacctggatggcaactatgagaagatccgcatcttcccagaaaatgacaagcagcaggccagccccagctgccccaagaacatcaagacccccagccagaagatccgcagccccatcgtgtctggagtgtcccagccagatgtgttcaaccactacccctttgctgagtgccacgagacagacagtgatgagtgggtgccccccaccacccagaagatcttccccagcgacatgctgggcttccagggcatcggcctgggcaagtgcctggccgcctaccacttcccagaccagcaggagctgcccaggaagaagctgaagcacatccggcagggcaccaacaagggcctcatcaagaagaagctgaagaacatgctggccgctgtggtgaccaagaagaagacccacaagtacaactgcaagagcagcggctggatcagcaagtgcccagacatccaggtgctggccgccccccagctgcaccccatcctgggccctgacagctgcagcgaggtgaagtgctgcctgcccttcagcgagaagggccccccatctgtgtgtgagaccaggtctgcctggagccctgagctgttctcctag

SEQ ID NO: 240032 - DNA, 2997 bp, Artificial Sequence
  derived and/or modified sequence
atgaacagaagaaggaagttcctgctggcctctgtgctggccctgcagaacagcagcttcatctaccccagctgccagaagtgcttcagccgcatcatcctggtgtccaagaggagcaactgccccaagtgtggcagcactggagagagcggaaatgccaactaccgctacaagctgagcctgaaggtggccgagagcaacaagctgtttgtgatcaccgtgtttggcagctgcctggacaccttcttcggcctgacagccaccggcctgcaccgctacatccaggaccccaacaagatccctgagaccctggacaatgacaccacccagaacctgctgaccaaggctgtggagacctgctttgtgggccagagcttcatcttcggcgtgaccaactttgagaaccagcccggccagggcagtgatgccagcaacttcctgcagcagtgcagcgaccacaagaggaaggccaaggccctggtggcctgccagatcgtgctgcctgaccccggcattgctggcttcaccgtcatcgactacttccaccagctgctgcagaccttcaacttcaggaagctgcagtgtgacagccaggcccccaacaaccacctgctggccctggaccacagcaacagcgacctgagcagcatctacaccagtgacagcaccagtgacttcttcaagagctgcagcaaggacaccttcagcaagttctggcagcccagcctggagttcacctgcatcgtgtcccagctgacagacaatgatgacttcagcgccagcgagcagagcaaggccttcggcaccctgcagcagaacaggaagagcatcagcattgctgaggccaccggcagcagcagctgccacgaccccatccaggacagctggagcctggtgtcctacatggacaagaagagcacagctgagaagctgggcaaggagctgggcctgcaggccaaggagctgtctgctgtgcacagcagccaccacgagattggagtgaatgacagcaacctcttcagcctggagatgagggagcccctggagagcagcaacaccaagagcttccacagcgctgtggagatcaagaacagaagccagcacgagctgccctgcttccagcaccacggcatcgacacccccaccagcctgcagaagaggtctgcctgctgcccccccagcctgctgcggctggaggagacagccagcagcagccaggatggagacccccagatctgggatgacctgcccttcagcgagagcctgaacaagttcctggccgtgctggagagcgagattgctgtgacccaggctgatgtgagcagcaggaagcaccacgtggacaatgacatcgacaagttccacgccgaccacagccggctgtctgtgaccccccagaggaccactggagccctgcacaccccacccatcgccctgcggagcagccaggtgattgtgaaggccaactgcagcaaggatgacttcctgttcaactgcaagggcaacctgagccccagcgtggagaaggagagccagcctgacaacaaggtggaggccgtgtctgtgaaccacaacggccgggacatgtctgagtacttcctgcccaacccctacctgagcgccctgagcagcagcagcaaggacctggagaccatcgtgaccctgaagaagaccatccgcatcagcccccaccgggagagtgaccacagcagcctgaacaacaagtacctgaatggctgtggggagatctctgtgtctgagatgaatgagaagctgaccaccctgtgctacaggaagtacaatgatgtgtctgacctgtgcaagctggagaacaagcagtactgccgctggagcaagaaccaggatgacagcttcaccatctgcaggaagctgacctaccccctggagaccctgtgcaacagccccaacagaagcaccaacaccctgaaggagatgccctggggccacatcaacaacaacgtgacccagagctacagcatcggctatgagggcagctatgatgccagcgctgacctgtttgatgacatcgccaaggagatggacatcgccacagagatcaccaagaagagccaggacatcctgctgaagtggggcaccagcctggccgagagccaccccagcgagagtgacttcagcctgcggagcctgtctgaggacttcatccagcccagccagaagctgagcctgcagagcctgagtgacagccgccacagcaggacctgcagccccaccccccacttccagagcgacagcgagtacaactttgagaacagccaggactttgtgccctgcagccagagcacccccatcagcggcttccaccagacccgcatccacggcatcaacagagccttcaagaagcctgtgttctacagcgacctggatggcaactatgagaagatccgcatcttcccagaaaatgacaagcagcaggccagccccagctgccccaagaacatcaagacccccagccagaagatccgcagccccatcgtgtctggagtgtcccagccagatgtgttcaaccactacccctttgctgaatgtcatgaaacagacagtgatgagtgggtgccccccaccacccagaagatcttccccagcgacatgctgggcttccagggcatcggcctgggcaagtgcctggccgcctaccacttcccagaccagcaggagctgcccaggaagaagctgaagcacatccggcagggcaccaacaagggcctcatcaagaagaagctgaagaacatgctggccgctgtggtgaccaagaagaagacccacaagtacaactgcaagagcagcggctggatcagcaaatgtcctgacatccaggtgctggccgccccccagctgcaccccatcctgggccctgacagctgcagcgaggtgaagtgctgcctgcccttcagcgagaagggcccccccagcgtgtgtgagaccaggtctgcctggagccctgagctgttctcctag

SEQ ID NO: 240033 - DNA, 537 bp, Artificial Sequence
  derived and/or modified sequence
atgaacagaagaaggaagttcctgctggcctctgtgctggccctgcagaacagcagcttcatctaccccagctgccagaagtgcttcagccgcatcatcctggtgtccaagaggagcaactgccccaagtgtggcagcactggagagagcggaaatgccaactaccgctacaagctgagcctgaaggtggccgagagcaacaagctgtttgtgatcaccgtgtttggcagctgcctggacaccttcttcggcctgacagccaccggcctgcaccgctacatccaggaccccaacaagatccctgagaccctggacaatgacaccacccagaacctgctgaccaaggctgtggagacctgctttgtgggccagagcttcatcttcggcgtgaccaactttgagaaccagcccggccagggcagtgatgccagcaacttcctgcagcagtgcagcgaccacaagaggaaggccaaggccctggtggcctgccagatcgtgctgcctgaccctgccacccaggatgccaagaccaagtag

SEQ ID NO: 240034 - DNA, 372 bp, Artificial Sequence
  derived and/or modified sequence
atgaacagaagaaggaagttcctgctggcctctgtgctggccctgcagaacagcagcttcatctaccccagctgccagaagtgcttcagccgcatcatcctggtgtccaagaggagcaactgccccaagtgtggcagcactggagagagcggaaatgccaactaccgctacaagctgagcctgaaggtggccgagagcaacaagctgtttgtgatcaccgtgtttggcagctgcctggacaccttcttcggcctgacagccaccggcctgcaccgctacatccaggaccccaacaagatccctgagaccctggacaatgacaccacccagaacctgctgaccaaggctgtggagacctgctttgtgggctag

SEQ ID NO: 240035 - DNA, 228 bp, Artificial Sequence
  derived and/or modified sequence
atgaacagaagaaggaagttcctgctggcctctgtgctggccctgcagaacagcagcttcatctaccccagctgccagaagtgcttcagccgcatcatcctggtgtccaagaggagcaactgccccaagtgtggcagcactggagagagcggaaatgccaactaccgctacaagctgagcctgaaggtggccgagagcaacaagctgtttgtgatcaccgtcttctag

SEQ ID NO: 240036 - DNA, 231 bp, Artificial Sequence
  derived and/or modified sequence
atgaacagaagaaggaagttcctgctggcctctgtgctggccctgcagaacagcagcttcatctaccccagctgccagaagtgcttcagccgcatcatcctggtgtccaagaggagcaactgccccaagtgtggcagcactggagagagcggaaatgccaactaccgctacaagctgagcctgaaggtggccgagagcaacaagctgtttgtgatcaccgtgtttggatag

SEQ ID NO: 240037 - DNA, 2094 bp, Artificial Sequence
  derived and/or modified sequence
atggacaagaagagcaccgccgagaagctgggcaaggagctgggccttcaggccaaagagttatccgccgtgcattcttcccaccatgagattggcgtcaacgatagtaacctgttttctctagagatgagggaaccactggaatccagcaatacgaaaagcttccactccgcggtcgagatcaagaaccgctctcagcacgagctcccctgtttccagcaccacgggatagatacacctacatccctccagaaaaggtccgcctgttgcccgccctctctgttgcgcctcgaggagacggcttcctccagtcaggatggtgatccgcaaatctgggatgatttgccattctcagagtcactgaataagtttcttgcggttttggaatcggagattgcagttacccaggccgacgtgagctcgcggaagcatcatgttgacaacgatatcgataaatttcatgccgatcatagtcgtctgtctgttaccccacagaggaccacaggcgccctgcatacccctccaatcgcactccggagttcgcaagtaattgtgaaagcgaactgcagtaaggatgacttcctcttcaattgcaaaggcaacctgtccccaagcgtggagaaagaatctcaacccgataataaagtcgaagccgtttcagtgaaccacaacggtcgtgatatgagcgaatactttttgcctaacccatatttgtccgccctgtcttcttcttccaaggaccttgagacgattgtgacattgaaaaaaacaattaggatatcaccgcaccgcgagagtgaccatagcagccttaacaataaatacttgaacggctgcggagaaatctctgtcagcgaaatgaacgaaaaattgaccaccctgtgttacagaaagtataatgatgtgtctgacctgtgtaaactagagaataagcaatattgccgatggtccaagaaccaagacgactcttttacaatctgcaggaaactgacttatccactggagaccttgtgcaattcccccaatcggtcgactaacactctcaaagagatgccttggggtcatattaataataacgtcactcaaagctatagtattggctacgaaggatcatacgatgccagtgcggatttgtttgatgacattgcaaaagagatggatatagccacagagatcactaaaaaaagccaggacatcttgctgaagtggggtacgtccctagccgagtcccacccttccgagagcgattttagtcttagaagcctcagcgaagacttcattcaaccttctcagaagttgtcactgcagtcactcagtgatagccgccactcccgaacatgcagtccaacgccacacttccaatctgatagcgagtataacttcgaaaattctcaagacttcgtgccctgcagccagtcaacacctatttcgggctttcaccagacaaggatacacggcatcaatcgagcgtttaaaaagcccgtattctatagtgacttggatggcaattatgagaagattcggatctttccagaaaacgataagcagcaggctagccctagctgtcctaaaaacataaaaaccccttctcaaaagatcagatcacccatagtctccggcgtgtcacaacccgacgttttcaaccactaccccttcgctgagtgtcacgagaccgatagcgatgagtgggtgccacccactacacaaaaaatctttcctagcgacatgctgggtttccagggaataggccttggcaagtgcctggctgcctaccactttcccgaccaacaggagctcccccgtaaaaagttgaaacatattcggcaggggactaataagggactcatcaagaagaaactaaagaacatgcttgccgccgtagtgacaaaaaagaagactcacaagtacaactgtaaatcatccggctggatctccaaatgtcctgacattcaggtgctggccgctccacagctgcatcccattctcgggccagattcctgtagtgaggtgaaatgttgcctgccattttcagaaaaggggcctccatctgtttgtgagaccaggtctgcatggtctccagaactgttctcctag

SEQ ID NO: 240038 - DNA, 2997 bp, Artificial Sequence
  derived and/or modified sequence
atgaaccggcggcggaagttcctgctggccagcgtgctggccctgcagaacagtagtttcatttacccttcatgccaaaagtgtttcagccggattatcctagtgagcaagcgttctaactgtccaaagtgtggctccaccggggagagtgggaatgcgaattaccgctacaagcttagtcttaaggtggctgagtccaacaaactgttcgttataactgtgtttgggagctgtctggatactttcttcgggctgacagccactggcctacacaggtacattcaggatcccaataaaattccagagaccctggacaatgacaccacccagaacctgcttacgaaggcggtcgaaacatgcttcgtggggcagtccttcatctttggggttactaacttcgaaaaccagcccggtcaagggtcagatgcatccaacttccttcaacagtgcagcgatcataaaaggaaggctaaggctcttgtggcttgtcagatcgtcctccccgaccctggaattgctgggtttactgtgatcgattacttccaccagctcctgcagacattcaactttagaaaactacagtgtgatagccaggcccctaataaccatctgttggctctggaccactccaacagtgatctgagctctatatatacctccgattcaacctcagatttttttaaatcctgttcaaaagatacattctctaaattttggcagcccagtctagaatttacatgcatagtttcgcaactcaccgacaacgatgacttcagcgccagtgagcagtcaaaggcttttggtaccctccagcagaacagaaaatctatctcgatcgctgaggcaaccggatccagcagttgtcacgatccaatccaagactcttggagtctagtgtcttacatggacaaaaaatcaacagctgaaaaactggggaaggaactgggtctgcaggccaaggagctcagtgcagtccatagttcacaccatgagataggagtcaacgacagcaacctattctcacttgaaatgagggagcctctggagtccagcaatactaagtcttttcattcagcagtagaaataaagaaccggtctcagcacgagttgccttgttttcagcaccacgggattgacacgcccacttccctgcagaaaagatctgcgtgctgccctccttcccttttgcgactggaagaaaccgcaagttctagccaggacggcgatccccagatttgggatgaccttcctttcagtgagtctcttaataagtttttagctgttttggagtccgagatagccgttacccaggctgacgtgtcttctcgtaagcatcacgtggataatgatatagacaaattccatgcagatcattccaggctctctgtcaccccacaaagaactaccggggcactgcacactccgccaatcgctctcagatcctcacaggtgatcgtgaaggccaattgttctaaggatgactttctgtttaattgcaagggcaacctttctcccagtgtcgaaaaggaatcccagcctgataataaagtggaggcggtatctgtgaaccacaatggtcgggacatgagtgagtacttcctcccaaatccttacctctctgccctgtcatcttcgagtaaagatctggagactattgtgacccttaagaagacaattagaataagcccccacagagagagtgaccattccagcctaaataacaaatacctgaacggctgtggcgaaataagcgttagcgagatgaacgagaaactaacgacgttgtgttatcggaaatacaacgacgtcagcgacttgtgcaagctcgaaaataagcagtactgtcggtggtctaaaaatcaagacgattcttttacaatttgccgcaagctgacttaccccttggagaccttgtgtaattcacctaatcgaagcaccaacacgctgaaggaaatgccttgggggcacatcaacaacaatgtgactcagtcatatagcatcggctatgaagggagttatgatgcttctgctgacttattcgatgatattgctaaagagatggacattgccactgagattactaagaagtcacaggacatcctgctgaaatggggtactagcctcgctgagtcacacccatctgagtctgacttcagtcttcgctccctgtccgaggattttatccagccttcccagaaattgtcccttcagagcctgagcgatagcagacatagcaggacctgttcccctacaccccactttcagtcagacagcgagtacaatttcgaaaactcccaagacttcgtgccttgctcccaatccacccctataagtgggttccaccaaacacgaatacatggcatcaatagagcattcaagaagcccgtcttctattctgatctagatggaaactacgaaaagattaggattttccccgaaaatgataagcagcaggcttcgccatcttgtcccaaaaatatcaagacccctagccaaaagattcgtagcccgatagtttctggggtgtcccagcctgatgtttttaatcattacccttttgcagagtgccatgaaactgatagcgacgagtgggtgccccccaccactcagaagatctttccttccgatatgttagggtttcagggcattgggcttggcaagtgcctggctgcttaccactttcccgatcaacaggaactcccccgcaagaaactcaaacatatcagacagggaaccaacaagggtctgatcaaaaagaagctaaagaatatgctggcggccgttgtaaccaaaaaaaagacccataaatacaattgcaaatcctcaggttggatctcgaaatgccctgatattcaggttctggcagcgccacagctacacccaatcctcgggccggattcatgctcggaagtaaagtgttgccttcctttctccgaaaagggaccacctagcgtgtgtgagacacgtagtgcatggtcccccgagctttttagttag

SEQ ID NO: 240039 - DNA, 537 bp, Artificial Sequence
  derived and/or modified sequence
atgaaccggcggcggaagttcctgctggccagcgtgctggccctgcagaacagctctttcatctacccctcatgccaaaaatgttttagtcggataatcttggtgtctaagaggtcaaactgccctaagtgcgggtcgactggagaatccggcaatgctaactatcgatacaagctctccctgaaagtggcagagtcgaataagcttttcgtcatcactgtttttggaagctgtcttgatactttctttggcctcaccgctaccggtttgcaccgatacatccaggacccaaacaaaattccggaaacgctggataacgacaccacacagaacctgctcactaaggctgtggaaacatgttttgtaggacagagctttattttcggcgtgaccaattttgagaatcagcctggtcagggaagcgacgcttcaaacttcttgcagcagtgttctgaccataaaagaaaggctaaggccctcgtggcttgtcaaattgttctgccagatcccgcaacacaggatgccaagaccaaatag

SEQ ID NO: 240040 - DNA, 372 bp, Artificial Sequence
  derived and/or modified sequence
atgaaccggcggcggaagttcctgctggccagcgtgctggccctgcagaactcctcatttatctatcctagttgtcagaagtgcttttcacggatcattctggtgagcaaaaggagcaactgtccaaaatgcggcagcaccggcgagtccgggaacgcaaattatcgatataagcttagcctaaaggttgcagagtctaacaagctttttgtcattacggtcttcggtagctgcctggataccttctttggcttgaccgccacaggtttacacaggtacatccaggatcccaataagattcccgagacactcgacaatgacactacccagaacctcttaacaaaggccgtggagacgtgctttgttggctag

SEQ ID NO: 240041 - DNA, 228 bp, Artificial Sequence
  derived and/or modified sequence
atgaaccggcggcggaagttcctgctggccagcgtgctggccctgcagaacagctctttcatctatccctcatgtcaaaaatgctttagccggatcatactcgttagtaagcggagcaattgccctaaatgcggttcaaccggtgagagtggcaatgcaaactatcggtataagcttagtttgaaagttgccgaatcaaataagcttttcgtgattactgtcttctag

SEQ ID NO: 240042 - DNA, 231 bp, Artificial Sequence
  derived and/or modified sequence
atgaaccggcggcggaagttcctgctggccagcgtgctggccctgcaaaacagtagcttcatatatccctcttgtcaaaaatgcttctctcgtattattttagtgtccaagcggtcaaattgtcctaagtgtggtagtaccggggagagcggcaatgctaactacaggtataagctgtcgctcaaagtcgctgaatctaacaaattatttgtaatcaccgtattcggttag

SEQ ID NO: 240043 - DNA, 2997 bp, Artificial Sequence
  derived and/or modified sequence
atgaaccggcggcggaagttcctgctggccagcgtgctggccctgcagaactcaagctttatctatccctcttgccagaagtgtttctcccgcattatcctcgtgtctaagcgctctaactgtccaaaatgcggctcaacgggagaatcaggcaacgcgaattaccgctacaagctctccctgaaggtggcagaatcaaataagctgttcgtgattaccgtgtttggctcctgtttggacactttttttggcttgaccgcaaccggtctccatcgctacatccaagaccctaataagatcccagaaactctggacaacgacacaacccagaatcttctcacgaaggcagtggagacctgctttgtcggccagagtttcatcttcggggtcacgaactttgagaaccaacccggccagggttccgacgcctctaacttcctacagcaatgttccgaccataagcgaaaagccaaagcccttgtggcatgccagatcgttcttcctgaccccgggatcgctggctttaccgtaattgactattttcatcagctactgcaaacctttaactttcggaagctacagtgtgactcacaggcccctaacaaccacctcctggcactcgatcactctaactccgaccttagttccatatacacaagcgactctacctccgactttttcaagtcatgtagcaaggatacatttagcaagttctggcagccttctctggagtttacatgtatcgtgtcacagctgacagacaacgatgactttagtgcttccgagcagtccaaggcgttcgggactttgcagcaaaatcgaaaaagtatcagtattgccgaagctaccgggtcgagctcatgtcacgaccccattcaggattcttggtctcttgtgtcctatatggataagaagagcactgccgagaaactgggcaaggagctcggactgcaggcaaaagagctgtccgctgttcactcaagtcatcacgaaattggagtcaacgactcgaacctattttccctggaaatgagggaacctctagaaagttctaataccaaaagctttcactcagctgtcgagatcaagaacagatcacaacacgaactgccgtgtttccagcaccacggaatcgatacacctaccagcctccagaagcgttcggcttgctgcccaccctctcttcttcgcctggaggaaaccgcatcatcctcccaagatggggatcctcagatctgggacgatttgcctttcagtgagagcctcaataagtttttagcagttctcgagagtgaaattgctgtcacacaagcagacgtcagcagtcgcaaacaccatgtggataacgatattgacaagttccacgccgaccacagtaggctctcggtcacaccgcagaggaccaccggcgcgctgcacactcctcctatcgccttacgttcatcacaggtcattgtgaaggctaactgttcaaaggatgacttcttgtttaactgtaagggaaatctgagtccaagcgtggagaaggaatcacagcctgataacaaagtcgaggctgtgtccgttaaccacaatggaagggacatgagcgagtacttcctccccaacccatacttgtctgcgttgtcaagctcctctaaggacctggagacaattgtcacgttgaagaagacaattcgcatcagcccacaccgcgagagcgaccacagtagcttgaacaacaagtatttgaatgggtgcggggaaatatcagtatccgaaatgaatgaaaagctgacaaccctgtgctaccgcaagtacaatgacgtgagcgatctatgtaagctagaaaacaaacagtactgcaggtggagcaagaaccaggacgactcattcactatttgcaggaaactgacctaccccctcgagacgctgtgcaactcacctaaccgctccacaaacactcttaaagaaatgccttggggccatatcaacaacaatgtcacccagagctattccatcggatacgaaggaagttatgacgcatccgctgaccttttcgatgatatagccaaggaaatggatatcgctactgaaattacaaaaaaatctcaggacatcctgctgaagtgggggacaagcctggcggagagccatccaagcgagagtgacttttctctgaggtcactgtcagaagatttcattcagccaagtcagaaattgtcactgcaatcactaagtgacagccgccacagccgtacctgtagccccaccccccatttccaatctgactccgagtacaactttgagaacagtcaggactttgtcccatgtagccagtctacccccatttcggggttccatcagacgcgcattcatggcattaacagagcatttaaaaagcctgtgttctatagtgatctggatggcaactatgagaagatccgaatatttcccgaaaacgacaaacagcaggcatctccttcatgtccgaaaaacatcaagacaccctctcagaagatcaggtcccctattgtctcaggagtgagccagccagacgtcttcaatcattaccccttcgccgagtgccatgaaaccgactccgatgagtgggtccctccaacgacacaaaaaattttcccatctgatatgctgggttttcaggggataggacttggaaagtgcctcgccgcgtatcattttccagaccaacaggaactcccgcggaaaaagttaaagcacatcagacagggtaccaacaagggccttattaaaaaaaaactgaagaacatgctcgcagcggttgtcactaaaaaaaaaacccacaagtacaattgcaaatcctctggttggatttcaaagtgtcccgatatccaagtgcttgcagccccccaactacatcctattctgggccctgattcgtgtagcgaggtgaaatgttgcctgccctttagcgagaaaggccccccctctgtttgcgagactcgctccgcctggtcacctgaactgttttcctag

SEQ ID NO: 240044 - DNA, 2094 bp, Artificial Sequence
  derived and/or modified sequence
atggacaaaaagtcaaccgccgagaaactgggtaaagagctgggcctacaggctaaggagctctcggccgtccacagcagtcatcatgagatcggagtgaatgatagtaacttgttttctctagaaatgcgcgaacctctggagtctagcaacactaaatcctttcacagtgcagtggagatcaagaatcgttctcaacatgagctgccgtgctttcaacatcatgggatcgatacccccacttctcttcagaagcggagcgcgtgctgtcccccatctctgctgcggctggaggagactgcttcaagctctcaggatggcgatccccagatttgggacgatttaccattctctgagagcttgaacaagttcctggccgtactggagtccgagattgctgtgactcaggcagacgtcagcagcaggaaacaccatgtggacaatgacatcgataagtttcatgcagatcattcaaggctgtctgtgacaccccagcgaaccactggagcactgcataccccaccaattgccttacggagttcccaggtgattgtgaaggcgaactgctccaaggacgactttcttttcaactgcaaggggaacctgtcgccctcagtggagaaggagagccagcccgataacaaagttgaggccgtgagtgtcaaccacaacgggcgtgacatgagtgaatactttctgcctaatccgtatctcagtgctctttcgtcttctagtaaggacctggagaccatcgtcaccctcaaaaagaccatccgaatctctcctcatcgggagtctgatcactcctcgcttaacaacaagtaccttaatggatgcggtgagattagcgtatccgaaatgaatgaaaagttgaccaccctctgctataggaaatataacgacgtgtccgacctctgcaaactggaaaataagcagtattgtaggtggagcaagaatcaggatgactccttcacaatttgtcgcaagcttacctaccccttggagaccttgtgtaattcgccaaacaggtctaccaatacgttaaaggagatgccgtgggggcatataaacaataatgtcacccagagttactccatcggatatgagggcagctacgatgctagtgccgacctgttcgacgatatagccaaagaaatggatatcgcaacggaaattaccaaaaagtcccaagacatcttgctgaagtggggtacctccttagcggaatcgcacccatccgaaagcgatttttctttgcggagcctgtctgaagattttattcagcctagtcagaaactttctctgcagagtctgtccgactcaagacacagccgtacttgcagtccaacacctcacttccagagtgactccgagtacaacttcgaaaattcccaggatttcgtgccatgcagtcaatcaacacccatcagcggttttcaccagacccgcattcacggaattaatcgggctttcaaaaaacctgtcttttatagtgacctcgacggaaactacgaaaagattagaatctttcctgagaatgataagcagcaagcctccccttcctgtccaaagaatattaagacccctagtcagaagattcggtctcctatcgtgagcggggtttcccaaccagatgtgtttaaccactacccgtttgccgagtgtcacgagacggactcagacgaatgggtgccacccacgactcagaaaatttttccctctgatatgttgggctttcaggggatagggcttggcaaatgtttggctgcctaccacttcccggatcagcaagagctcccaagaaaaaagcttaagcacatccggcagggcaccaacaaaggtttgattaaaaaaaaattgaagaatatgttggccgcagtcgtgaccaagaagaaaacccacaagtacaactgcaagtcgtctgggtggatcagtaagtgcccagacatccaggtgcttgcagctcctcaactgcatcccattctcgggccagattcctgcagcgaagtgaaatgctgtctgcccttcagcgaaaaaggacccccatctgtttgcgagactcgcagcgcttggtcacctgagcttttctcctag

SEQ ID NO: 240045 - DNA, 2997 bp, Artificial Sequence
  derived and/or modified sequence
atgaacaggcgcaggaaattcttgttggccagcgtcctggccctgcagaattcttcctttatttatccttcctgccagaaatgtttttctagaattatacttgtcagtaagcgtagcaactgtccaaaatgcggaagtaccggcgagtctggtaacgctaattaccgttataaactctccctgaaggtggccgaatctaacaagctgttcgttatcactgtatttggaagttgtctggatacttttttcggcctgaccgctaccggtcttcataggtatatccaggatccgaataagattccggaaaccttggacaacgatactacacagaatctcttaacgaaggccgtggaaacatgcttcgtaggccagtcatttatttttggtgtgacaaatttcgagaaccaacccggacaaggcagcgacgcctcaaactttctgcagcagtgctccgatcacaaaaggaaggccaaggctttagtcgcttgtcagatcgttttgcccgatccaggcatcgccggttttaccgtgattgattattttcatcagctgttgcaaacctttaatttccgaaaactgcagtgtgattcccaggccccaaataatcacttactggctctcgaccacagcaattctgacctgtctagcatttacacctcagactctaccagcgatttttttaaaagctgctccaaagacacattttctaaattctggcagccatcactagaatttacctgtatcgtctctcagcttaccgacaacgatgactttagcgcgtctgagcagtctaaggcattcgggactctccaacaaaaccgtaagtccatctcaatcgcagaggcaacaggtagttcgagctgccacgatcctatccaggactcatggtcactcgtcagctatatggacaagaagagcaccgcagaaaagctcggcaaagagttaggcttacaagccaaggagctgagcgctgttcattctagtcaccatgaaattggcgttaatgactccaacctgtttagtctggagatgagggagcccttagaaagcagcaacacaaagtcgttccacagtgctgttgagatcaagaatcggagccagcatgaactgccatgttttcaacaccatgggatcgatactcctacatcattgcaaaagagatctgcctgctgcccaccttccttgttgcggctggaagaaaccgcctctagctcccaagacggggaccctcagatttgggatgacctgccattcagtgagagtttgaacaagttcctggctgtcctggagagcgagatcgctgttacccaagcagacgtttctagccgaaaacatcatgtggataacgatatcgacaagtttcatgcagaccattccagactgagtgtgaccccccagagaaccaccggcgcactgcatactccgcctattgcactgaggagctcccaggtgattgtgaaggctaattgctccaaggatgacttcctcttcaactgcaaagggaacctgtcaccctcagtggagaaggaatcccagcccgacaataaggtcgaggcggtctcagtgaaccataacggcagagatatgagtgagtattttctcccaaacccgtatctgagtgccctttcatcctcaagtaaagacctggaaactattgttacccttaagaagactattagaattagcccacaccgagaatcggaccattcaagtctgaataacaagtatctcaacggctgtggcgagataagcgtgtcggagatgaacgagaagctgactacactgtgctacagaaaatataacgacgtatccgacttatgcaagcttgaaaacaagcaatactgccgctggagcaaaaaccaggacgactcatttaccatctgccgaaaactgacatacccgttagaaacgctgtgcaatagtccaaaccggtcaaccaataccctcaaggagatgccatggggccacataaataataacgtcactcagtcttactctatagggtatgaggggagctacgacgcaagcgccgacctatttgacgacatcgcgaaggagatggatatagctaccgagattactaagaaaagtcaggacatcttgctgaaatggggtacatccctcgcagaatcccatccgagcgaatctgattttagtctaagaagcctgagcgaagactttatccagccaagtcagaagctgagtttgcaaagtctcagtgactcccgacactcgcgcacatgttccccgaccccgcacttccaatctgactcggagtataactttgagaattcccaggactttgttccatgctctcaatctacccccatatctggcttccaccagaccagaattcatggcatcaaccgcgcattcaaaaaacccgtcttctactcagatcttgacgggaattacgagaagatcagaatctttccagagaacgacaagcagcaggcctctccatcttgcccgaaaaatattaagacccccagtcagaaaattcggtctcccatcgtctcaggcgtttcccagcctgatgtgttcaaccattacccattcgcggaatgtcatgagacggactcggatgaatgggtgcctccaacgacccagaagatatttcccagcgatatgctggggttccaagggatcgggctgggcaaatgtctggcagcatatcacttcccagaccaacaggaactaccaaggaagaaactgaagcatattcggcagggaacgaacaaagggcttatcaagaaaaaactgaagaacatgctcgcagccgttgttacaaaaaagaaaactcataagtacaactgcaaatcttccggctggatcagtaagtgtccagatattcaagtgctcgccgcaccacagttgcaccccattctgggcccagattcctgtagcgaagtcaagtgttgtctaccattcagtgagaagggccctccctccgtatgcgaaacgaggagtgcatggtccccagaactctttagctag

SEQ ID NO: 240046 - DNA, 3452 bp, Artificial Sequence
  derived and/or modified sequence
aaagcgttacttccggcggaaaaggacgcgggagattcgattggaaggctgccggcgtgctactgagttcggccggtccgagtcactgtgcgtcgcctgggcccgttcctggtcttctcccccagggtcttgctctgtcacccaggctggagtgccatggcatcatcatagctcactatggccttgatcctcctgccttagcctcccaagcagctggtattacagatggagttttgctcttgttgcccaggctgaagtgccatggtgcaatctcggctcactgcaacctccgcatcctaggttcaagcaattctcctgccgcagcctcctgagtagctgggattacaggcaccccccaccatgctcagctactttttgtatttagtggagatggggtttcaccatgttggccaggctggtctcaaactccctacctcagaccacggtgtgaacacatgaacagaagacgaaaatttcttctagcctcagtacttgctctccagaattcaagttttatatatccatcatgtcagaagtgcttctctaggataatcctggtctccaaaaggtctaattgtccaaaatgtggctctactggtgaatctggaaatgccaattacagatacaaactttccttaaaagttgcagaatcaaacaaattgtttgttattactgtatttggaagttgcttagatacattttttggtcttactgccactggtttgcacaggtacattcaggatcctaataaaattccagaaacactggacaatgatacaactcagaatctattaactaaagcagttgaaacttgctttgttggacaaagctttatttttggagtgacgaattttgaaaaccaacctggacaaggttcagatgccagtaacttcttacagcaatgctctgaccacaaaagaaaagccaaagcactagtggcttgccagattgttctaccagacccaggtattgcaggctttactgtcattgactacttccatcaacttttgcagacttttaatttcaggaaacttcagtgtgactctcaggcacctaacaatcacttacttgctttagatcactcaaatagtgatctcagcagcatatatacttctgacagcacttctgattttttcaagtcctgcagcaaggatactttttcaaaattctggcagccatcacttgaattcacttgcattgtttcacaactaacagataatgatgatttttcagcttcagaacaaagtaaggcctttggtactcttcagcagaacagaaagtccatctccattgcagaggccactggttccagtagctgccatgatcccattcaggattcatggagccttgtttcatatatggataaaaagagtacagcagaaaagttgggtaaagaacttggcttacaagctaaggagctgagtgcagttcacagcagtcatcatgaaattggagttaatgactctaatttattctctttggaaatgcgagagccccttgagtcaagtaatacaaaatccttccacagtgcagtggaaattaaaaataggtcccagcatgagctaccatgttttcagcatcatggtatagataccccaactagccttcagaagagatctgcatgttgtccaccttcgttactcagacttgaagagacagccagcagttcccaggatggtgaccctcaaatttgggatgatctgccattctctgaaagcctgaacaagtttctggcagttcttgaaagtgagattgctgtaacccaggcagatgtcagtagtaggaaacatcatgtagataatgacattgataaatttcatgcagaccacagcaggttatctgtgactccccagagaactactggagccctgcatacaccacctatagctttaagatcatcacaagtaatagtcaaagcaaactgtagcaaagatgacttccttttcaactgtaaaggaaatctaagtcctagtgttgaaaaggagtcacaaccagataacaaagtagaggctgtctctgtaaatcataatggaagagatatgtcagaatattttttaccgaatccttacctgtcagctctgtcttcatcttcaaaagatttagaaacaatagttactcttaagaagactatcagaatctcaccacacagggagagtgaccattctagtctaaataacaaatatttgaatggatgtggagaaatatcagtttcagaaatgaatgaaaagttgacaactctgtgttataggaagtataatgatgtctctgatctttgcaaattagaaaataaacaatattgtaggtggtccaagaaccaagatgacagttttacaatttgcaggaaacttacatatcctttagaaactctttgcaatagtccaaatagaagtacaaatacattgaaagaaatgccttggggacatatcaataacaacgtaacacagagctattctattggttatgaaggtagctatgatgcctctgctgatctctttgatgatattgctaaagaaatggacattgcaactgagattaccaaaaaatcacaggatattttgttaaaatggggaacatctttggcagaaagtcacccttcagagtctgatttttcactgagatcactttctgaagacttcatccagccttcacaaaaattatccttgcaaagcctatctgactctaggcattcaagaacatgctctccaacacctcattttcaatcagattcagaatataattttgaaaatagtcaagactttgttccatgttcacagtcaactccaatttcagggttccaccaaacaagaattcatgggataaacagagctttcaaaaaacctgtattttattcagatcttgatggtaactatgaaaaaataaggattttccctgaaaatgacaaacagcaagccagcccaagctgtccaaaaaatataaaaacacctagccagaaaatcagaagccctattgtatctggtgtttcacaaccagacgttttcaatcactacccttttgctgagtgccatgaaactgatagtgatgaatgggtccctcctaccacacaaaaaatatttccttcagatatgcttggattccaaggcataggtctagggaaatgccttgctgcctatcatttccctgatcaacaagagttaccaagaaagaaactgaaacatattagacaaggaaccaataaaggtttaattaagaagaaattaaagaatatgcttgcagcagttgttacgaaaaagaaaactcataaatataactgtaaaagttcaggctggatttccaaatgtccagacattcaagtcttagcagcacctcagctgcaccctattcttggacctgattcttgttcagaagtcaaatgttgccttccattttcagaaaaaggcccaccttcagtgtgtgaaactcgaagtgcttggtcacctgaattgttttcataa

SEQ ID NO: 240047 - DNA, 537 bp, Artificial Sequence
  derived and/or modified sequence
atgaatagaagaaggaagttccttctcgcctcagtacttgctctgcagaacagcagttttatttacccatcatgccaaaaatgcttttcccggataatccttgtgtccaaaagatccaattgccctaaatgcgggtcaaccggggagtcgggcaatgccaattaccgctataagttgagtctgaaggtcgccgaatcaaacaaacttttcgtaatcaccgtttttggatcatgcctcgacacgtttttcggcctgacggccacgggactgcataggtatattcaagaccccaacaagattcctgagacactggacaatgacacaactcagaatcttttgaccaaggcagttgagacctgctttgtaggtcaatccttcatcttcggcgtcacgaacttcgaaaaccagcccggtcagggctctgacgcatctaacttcttacaacagtgttcagatcacaaacgtaaagctaaggctttggttgcctgccagatcgtcctgcccgacccggcaactcaggatgccaagaccaagtag

SEQ ID NO: 240048 - DNA, 372 bp, Artificial Sequence
  derived and/or modified sequence
atgaacagaaggcgtaaatttctgttggcttccgttctcgctctgcagaattcatcctttatataccctagctgtcagaagtgcttttcacgcattatcctagtgagcaaaagaagcaactgccccaaatgcggttcaaccggagaatccgggaatgctaactatagatacaagctgtcactgaaggtcgctgaatccaataaattgtttgttattactgtctttggctcctgcctggacacatttttcggtctaactgctacaggactgcataggtatatccaggaccctaataagattccagagaccctcgataacgacaccactcagaaccttttgaccaaagcggtagagacatgctttgtgggatag

SEQ ID NO: 240049 - DNA, 228 bp, Artificial Sequence
  derived and/or modified sequence
atgaaccgtagacggaagttcctcctcgcctcggttctcgccctgcagaactcctctttcatctatcccagttgtcagaagtgcttttcgcgtatcatccttgttagcaaaaggtctaactgcccgaaatgtggaagtacaggagaaagcggcaacgctaactacaggtataagcttagcctgaaggtggcggagtcaaataaactttttgtgatcaccgttttctag

SEQ ID NO: 240050 - DNA, 231 bp, Artificial Sequence
  derived and/or modified sequence
atgaatcgtcggagaaaatttctgctggcttctgtactggccctccagaacagctccttcatctacccatcatgccagaaatgcttcagtcgcattatcctggtgtccaaacgatccaactgccccaaatgcggatccaccggagagagtgggaacgcaaattatagatataagctgagcctaaaagtcgccgagtccaacaagctgtttgtgatcacagtgtttggctag

SEQ ID NO: 240051 - DNA, 2997 bp, Artificial Sequence
  derived and/or modified sequence
atgaatcgccgacgcaaattcctccttgcctctgtcctggccctgcaaaacagctcattcatctacccttcttgccaaaaatgtttttcacgaattatcctggtctccaagcgatctaactgtcctaaatgtgggtccacgggcgagagtggtaacgcaaactaccgatacaagctgagtctcaaggtggctgaaagcaacaaactgttcgtgatcactgtattcgggagctgccttgacactttcttcggcctcaccgccaccggcttgcatcgttacattcaagaccctaacaagatccccgaaaccctcgacaatgatacaacacagaatctgttaaccaaggccgttgaaacatgttttgtgggacagtccttcatctttggagtcacaaacttcgagaaccagccaggccagggatccgacgcatccaactttctgcagcagtgctcagatcataaacgcaaggcaaaagcgctcgtagcgtgccaaatcgtcctgcccgaccccggtatagccggttttaccgtcatcgattatttccaccagctcctgcaaacgtttaattttagaaaactccagtgcgactcccaggctccaaataatcatttactggctcttgaccactccaattcagacttgtcttcaatatacacaagtgattcaacgtctgacttcttcaagagttgctcgaaagacacattcagtaagttctggcagccaagtctcgagtttacctgcatcgtcagccagctgacggacaatgatgatttttccgctagtgagcaatcaaaggcgttcgggacgctccagcagaaccgcaagtctatttccatcgctgaggccactggttcatcatcttgccacgaccctattcaggactcctggtcgctggtctcgtacatggataaaaagtctactgcagaaaagctggggaaggagctcggcttgcaggctaaggaactgagcgctgtccatagctcccaccacgagatcggtgtcaatgactctaacctgttctcactagaaatgagagagcctctggaatcaagtaataccaagagcttccactcagctgtggagataaagaaccgatctcagcacgagctgccctgttttcagcatcatgggatcgacacccccaccagtctccagaagcggagcgcgtgttgtcctcccagtctgcttaggcttgaggagaccgcaagctcttcccaggatggagacccccagatctgggacgacttgccgttctcagaatccctaaacaagttcctcgcagtcttggaaagtgagatcgccgtcacacaggcagatgtcagctcccggaagcaccacgtcgataatgatatcgacaagttccatgctgaccattcacggctttctgttacccctcagagaactaccggcgcactacacacacctccaatagccctgcgtagcagccaggtgatcgtcaaggcaaactgctccaaggatgacttcctattcaactgtaagggcaacctcagcccctcggtagagaaagagagtcagcccgataataaagtcgaagccgtgagcgtcaaccacaatggacgcgatatgtctgaatacttcctgccaaacccatacttgagcgctttgtcatcctcttcgaaggacctagagaccattgtgactttaaagaagacgatcagaataagcccgcaccgtgaatctgaccattcatcactgaacaacaagtaccttaacggctgtggggagatctctgtttcagaaatgaacgagaaattaaccaccctttgttatcgtaaatacaatgacgtctccgacctgtgtaagttggagaacaaacaatactgcaggtggagtaagaaccaagatgacagcttcaccatctgccgcaagctgacatatccactggagactctctgcaatagtcccaacagatcaacaaataccctgaaggaaatgccctgggggcatataaataacaatgtcacccagagttattcaatcgggtatgaagggagctacgatgcatcagccgatctgtttgacgacatcgccaaggaaatggatatagctacggagataaccaaaaagtcccaggacattctgttgaaatggggtaccagtctagccgagtcacatccatcagaatctgacttttctctgaggagtttgagtgaggacttcatccagcccagtcagaaactttcacttcaatcacttagtgattccaggcactcccggacctgcagcccgactccccatttccagtccgactcagaatacaatttcgagaactctcaagactttgtgccttgttcccagtctacccctatctccggctttcatcagactcggattcatggaatcaatcgggctttcaagaagccagtgttctattcagatttggatggtaactatgagaagatcaggatttttccagagaacgataagcagcaggcgtccccttcttgccctaaaaacatcaaaactccttcgcagaaaatcagatctcccatagtatctggggtgagtcagcccgatgtcttcaaccactacccatttgccgaatgccatgagaccgattctgatgaatgggtaccacctacgactcagaagatctttccttcagacatgctgggtttccagggtattgggctcggaaagtgcctggcggcataccatttccctgaccaacaggagttgcctcggaaaaaactgaagcacatacgacaggggaccaacaagggactgattaaaaagaagctgaaaaacatgctggccgcagtggtaaccaagaaaaaaactcacaaatacaactgcaagtcaagcgggtggatcagtaagtgccccgatatccaggtgttggccgctccccaactccacccaattctgggcccagactcatgtagtgaagtgaagtgctgccttcccttttctgagaaaggccctcccagcgtatgcgagaccagaagcgcttggagtccggagttgttctcctag

SEQ ID NO: 240052 - DNA, 1830 bp, Artificial Sequence
  derived and/or modified sequence
aaagcgttacttccggcggaaaaggacgcgggagattcgattggaaggctgccggcgtgctactgagttcggccggtccgagtcactgtgcgtcgcctgggcccgttcctggtcttctcccccagggtcttgctctgtcacccaggctggagtgccatggcatcatcatagctcactatggccttgatcctcctgccttagcctcccaagcagctggtattacagatggagttttgctcttgttgcccaggctgaagtgccatggtgcaatctcggctcactgcaacctccgcatcctaggttcaagcaattctcctgccgcagcctcctgagtagctgggattacaggcaccccccaccatgctcagctactttttgtatttagtggagatggggtttcaccatgttggccaggctggtctcaaactccctacctcagaccacggtgtgaacacatgaacagaagacgaaaatttcttctagcctcagtacttgctctccagaattcaagttttatatatccatcatgtcagaagtgcttctctaggataatcctggtctccaaaaggtctaattgtccaaaatgtggctctactggtgaatctggaaatgccaattacagatacaaactttccttaaaagttgcagaatcaaacaaattgtttgttattactgtatttggaagttgcttagatacattttttggtcttactgccactggtttgcacaggtacattcaggatcctaataaaattccagaaacactggacaatgatacaactcagaatctattaactaaagcagttgaaacttgctttgttggacaaagctttatttttggagtgacgaattttgaaaaccaacctggacaaggttcagatgccagtaacttcttacagcaatgctctgaccacaaaagaaaagccaaagcactagtggcttgccagattgttctaccagacccagccacccaagatgctaaaacaaaataagaccaaggggaagaagatggctggggcccctgctgtcatgaagaagcaagaagccaagaaagtggtgaatctcccctgtttgagaaaaggcctaagaattttagcactggacaggacatccaccccaaagggatctcactcactttgtcaaatggcctcattatattaggttgcagcagcaaagaactatcctctgtaggtcactggaagtgcctcttgtgattaaccagtttacccaggccttggacctcctaacagctgctcagcttcttaagctggcccacgagtacagaccagtgacaaagcaagagaagaagcaggaattgttggcccatgctgacaggaatgctgccagcaatggagacatccccactaagagttcacctgtccttcaagcaggggttaatactgtcaccaactcaatggtgaacaagaagtctcagctggtgctgactgcacaagatatggatcccatcaagctggttgtcttcctgccagccctgtgttgtaaaatgggggtcccttactgtgttatcaaagagaaggcaaggccgggaagtttagtccacaggaggacctgcatcattgtcaccttcacacaggttaaatggaaaaaacaaggagctttagctaaactttgggagcttcaggatcaattacaatgacagatataatgagatccaccatcaatggggaggcaacatcctgggtccaaaatctgtggcttacaatgccaagccagaaaagacaaaggctaaaaaacatgccactaagcttagttaaatgcacactgttgagttttctgtacagaaagataataaaaaattctccttcagcc

SEQ ID NO: 240053 - DNA, 560 bp, Artificial Sequence
  derived and/or modified sequence
aaactgtcatggcgctggtggcagtgtagcagtgaggacaaccagaggtcactctcatcaccatcttagttttgggtcttgctctgtcacccaggctggagtgccatggcatcatcatagctcactatggccttgatcctcctgccttagcctcccaagcagctggtattacagaccacggtgtgaacacatgaacagaagacgaaaatttcttctagcctcagtacttgctctccagaattcaagttttatatatccatcatgtcagaagtgcttctctaggataatcctggtctccaaaaggtctaattgtccaaaatgtggctctactggtgaatctggaaatgccaattacagatacaaactttccttaaaagttgcagaatcaaacaaattgtttgttattactgtatttggaagttgcttagatacattttttggtcttactgccactggtttgcacaggtacattcaggatcctaataaaattccagaaacactggacaatgatacaactcagaatctattaactaaagcagttgaaacttgctttgttggac

SEQ ID NO: 240054 - DNA, 889 bp, Artificial Sequence
  derived and/or modified sequence
gtgactgtcgtgtccaattacagaaaagcctgaatcaagagtatgcagccaaaactactaccaaattattggtaatgggaggagaaaatttaaacagaactgggatttgggaccaccttctggaagatgttagccaaaaaccgaacagatcctaggcatcaaggggtgtgaatttcgagtcaccccgccagaccccagggcgctgcggctcactccacactttcccgggaaccctacgcccaggaggctcagcgaagctccaaaaccaattttacggactgtactactgatccacctgtcggggagaaagactctacccgcagtttgacgaaaatggtcgtttccagatgcttgtaggatttcctcgctaagctccaccctctgcggcgccttcttctgattggctctgagtaatcagagccaaagcgttacttccggcggaaaaggacgcgggagattcgattggaaggctgccggcgtgctactgagttcggccggtccgagtcactgtgcgtcgcctgggcccgttcctggtcttctcccccagggtcttgctctgtcacccaggctggagtgccatggcatcatcatagctcactatggccttgatcctcctgccttagcctcccaagcagctggtattacagaccacggtgtgaacacatgaacagaagacgaaaatttcttctagcctcagtacttgctctccagaattcaagttttatatatccatcatgtcagaagtgcttctctaggataatcctggtctccaaaaggtctaattgtccaaaatgtggctctactggtgaatctggaaatgccaattacagatacaaactttccttaaaagttgcagaatcaaacaaattgtttgttattactgtatttg

SEQ ID NO: 240055 - DNA, 331 bp, Artificial Sequence
  derived and/or modified sequence
gattggaaggctgccggcgtgctactgagttcggccggtccgagtcactgtgcgtcgcctgggcccgttcctggtcttctcccccagaccacggtgtgaacacatgaacagaagacgaaaatttcttctagcctcagtacttgctctccagaattcaagttttatatatccatcatgtcagaagtgcttctctaggataatcctggtctccaaaaggtctaattgtccaaaatgtggctctactggtgaatctggaaatgccaattacagatacaaactttccttaaaagttgcagaatcaaacaaattgtttgttattactgtatttgga

SEQ ID NO: 240056 - DNA, 3533 bp, Artificial Sequence
  derived and/or modified sequence
gggagattcgattggaaggctgccggcgtgctactgagttcggccggtccgagtcactgtgcgtcgcctgggcccgttcctggtcttctcccccagggtcttgctctgtcacccaggctggagtgccatggcatcatcatagctcactatggccttgatcctcctgccttagcctcccaagcagctggtattacagaccacggtgtgaacacatgaacagaagacgaaaatttcttctagcctcagtacttgctctccagaattcaagttttatatatccatcatgtcagaagtgcttctctaggataatcctggtctccaaaaggtctaattgtccaaaatgtggctctactggtgaatctggaaatgccaattacagatacaaactttccttaaaagttgcagaatcaaacaaattgtttgttattactgtatttggaagttgcttagatacattttttggtcttactgccactggtttgcacaggtacattcaggatcctaataaaattccagaaacactggacaatgatacaactcagaatctattaactaaagcagttgaaacttgctttgttggacaaagctttatttttggagtgacgaattttgaaaaccaacctggacaaggttcagatgccagtaacttcttacagcaatgctctgaccacaaaagaaaagccaaagcactagtggcttgccagattgttctaccagacccaggtattgcaggctttactgtcattgactacttccatcaacttttgcagacttttaatttcaggaaacttcagtgtgactctcaggcacctaacaatcacttacttgctttagatcactcaaatagtgatctcagcagcatatatacttctgacagcacttctgattttttcaagtcctgcagcaaggatactttttcaaaattctggcagccatcacttgaattcacttgcattgtttcacaactaacagataatgatgatttttcagcttcagaacaaagtaaggcctttggtactcttcagcagaacagaaagtccatctccattgcagaggccactggttccagtagctgccatgatcccattcaggattcatggagccttgtttcatatatggataaaaagagtacagcagaaaagttgggtaaagaacttggcttacaagctaaggagctgagtgcagttcacagcagtcatcatgaaattggagttaatgactctaatttattctctttggaaatgcgagagccccttgagtcaagtaatacaaaatccttccacagtgcagtggaaattaaaaataggtcccagcatgagctaccatgttttcagcatcatggtatagataccccaactagccttcagaagagatctgcatgttgtccaccttcgttactcagacttgaagagacagccagcagttcccaggatggtgaccctcaaatttgggatgatctgccattctctgaaagcctgaacaagtttctggcagttcttgaaagtgagattgctgtaacccaggcagatgtcagtagtaggaaacatcatgtagataatgacattgataaatttcatgcagaccacagcaggttatctgtgactccccagagaactactggagccctgcatacaccacctatagctttaagatcatcacaagtaatagtcaaagcaaactgtagcaaagatgacttccttttcaactgtaaaggaaatctaagtcctagtgttgaaaaggagtcacaaccagataacaaagtagaggctgtctctgtaaatcataatggaagagatatgtcagaatattttttaccgaatccttacctgtcagctctgtcttcatcttcaaaagatttagaaacaatagttactcttaagaagactatcagaatctcaccacacagggagagtgaccattctagtctaaataacaaatatttgaatggatgtggagaaatatcagtttcagaaatgaatgaaaagttgacaactctgtgttataggaagtataatgatgtctctgatctttgcaaattagaaaataaacaatattgtaggtggtccaagaaccaagatgacagttttacaatttgcaggaaacttacatatcctttagaaactctttgcaatagtccaaatagaagtacaaatacattgaaagaaatgccttggggacatatcaataacaacgtaacacagagctattctattggttatgaaggtagctatgatgcctctgctgatctctttgatgatattgctaaagaaatggacattgcaactgagattaccaaaaaatcacaggatattttgttaaaatggggaacatctttggcagaaagtcacccttcagagtctgatttttcactgagatcactttctgaagacttcatccagccttcacaaaaattatccttgcaaagcctatctgactctaggcattcaagaacatgctctccaacacctcattttcaatcagattcagaatataattttgaaaatagtcaagactttgttccatgttcacagtcaactccaatttcagggttccaccaaacaagaattcatgggataaacagagctttcaaaaaacctgtattttattcagatcttgatggtaactatgaaaaaataaggattttccctgaaaatgacaaacagcaagccagcccaagctgtccaaaaaatataaaaacacctagccagaaaatcagaagccctattgtatctggtgtttcacaaccagacgttttcaatcactacccttttgctgagtgccatgaaactgatagtgatgaatgggtccctcctaccacacaaaaaatatttccttcagatatgcttggattccaaggcataggtctagggaaatgccttgctgcctatcatttccctgatcaacaagagttaccaagaaagaaactgaaacatattagacaaggaaccaataaaggtttaattaagaagaaattaaagaatatgcttgcagcagttgttacgaaaaagaaaactcataaatataactgtaaaagttcaggctggatttccaaatgtccagacattcaagtcttagcagcacctcagctgcaccctattcttggacctgattcttgttcagaagtcaaatgttgccttccattttcagaaaaaggcccaccttcagtgtgtgaaactcgaagtgcttggtcacctgaattgttttcataaaaagtcacctgaacccaattcctgaacttttaaatctgtttggaaatgtttgccttcaggggtacggaaagcattctttacattttgaacacttggagagaagcaaattgaaaacaggactctgctgggagctactgtgccttttaaaatataaagccattgttttccccagggttttatctagaatactatgattaggtagttgagcactttatcttatactgtttattgtactttaataatattgttaagattgtttttgaaagtattaatgtttgttaaaatcacatatacatccagaaataaagactttgcaaaccaaaa

SEQ ID NO: 240057 - protein, 514 aa, Artificial Sequence
  derived and/or modified sequence
MYSQRFGTVQREVKGPTPKVVIVRSKPPKGQGAEHHLERIRRSHQKHNAILASIKSSERDRLKAEWDQHNDCKILDSLVRARIKDAVQGFIINIEERRNKLRELLALEENEYFTEMQLKKETIEEKKDRMREKTKLLKEKNEKERQDFVAEKLDQQFRERCEELRVELLSIHQKKVCEERKAQIAFNEELSRQKLVEEQMFSKLWEEDRLAKEKREAQEARRQKELMENTRLGLNAQITSIKAQRQATQLLKEEEARLVESNNAQIKHENEQDMLKKQKAKQETRTILQKALQERIEHIQQEYRDEQDLNMKLVQRALQDLQEEADKKKQKREDMIREQKIYHKYLAQRREEEKAQEKEFDRILEEDKAKKLAEKDKELRLEKEARRQLVDEVMCTRKLQVQEKLQREAKEQEERAMEQKHINESLKELNCEEKENFARRQRLAQEYRKQLQMQIAYQQQSQEAEKEEKRREFEAGVAANKMCLDKVQEVLSTHQVLPQNIHPMRKACPSKLPP

SEQ ID NO: 240058 - DNA, 1545 bp, Artificial Sequence
  derived and/or modified sequence
atgtacagccagagattcggcaccgtgcagagagaggtgaagggccccacccccaaggtggtgatcgtgagaagcaagccccccaagggccagggcgccgagcaccacctggagagaatcagaagaagccaccagaagcacaacgccatcctggccagcatcaagagcagcgagagagacagactgaaggccgagtgggaccagcacaacgactgcaagatcctggacagcctggtgagagccagaatcaaggacgccgtgcagggcttcatcatcaacatcgaggagagaagaaacaagctgagagagctgctggccctggaggagaacgagtacttcaccgagatgcagctgaagaaggagaccatcgaggagaagaaggacagaatgagagagaagaccaagctgctgaaggagaagaacgagaaggagagacaggacttcgtggccgagaagctggaccagcagttcagagagagatgcgaggagctgagagtggagctgctgagcatccaccagaagaaggtgtgcgaggagagaaaggcccagatcgccttcaacgaggagctgagcagacagaagctggtggaggagcagatgttcagcaagctgtgggaggaggacagactggccaaggagaagagagaggcccaggaggccagaagacagaaggagctgatggagaacaccagactgggcctgaacgcccagatcaccagcatcaaggcccagagacaggccacccagctgctgaaggaggaggaggccagactggtggagagcaacaacgcccagatcaagcacgagaacgagcaggacatgctgaagaagcagaaggccaagcaggagaccagaaccatcctgcagaaggccctgcaggagagaatcgagcacatccagcaggagtacagagacgagcaggacctgaacatgaagctggtgcagagagccctgcaggacctgcaggaggaggccgacaagaagaagcagaagagagaggacatgatcagagagcagaagatctaccacaagtacctggcccagagaagagaggaggagaaggcccaggagaaggagttcgacagaatcctggaggaggacaaggccaagaagctggccgagaaggacaaggagctgagactggagaaggaggccagaagacagctggtggacgaggtgatgtgcaccagaaagctgcaggtgcaggagaagctgcagagagaggccaaggagcaggaggagagagccatggagcagaagcacatcaacgagagcctgaaggagctgaactgcgaggagaaggagaacttcgccagaagacagagactggcccaggagtacagaaagcagctgcagatgcagatcgcctaccagcagcagagccaggaggccgagaaggaggagaagagaagagagttcgaggccggcgtggccgccaacaagatgtgcctggacaaggtgcaggaggtgctgagcacccaccaggtgctgccccagaacatccaccccatgagaaaggcctgccccagcaagctgcccccctag

SEQ ID NO: 240059 - DNA, 1824 bp, Artificial Sequence
  derived and/or modified sequence
agacttctgcgtcgcggaagcgggtcccgcaggtcgccacggttgggggaaacgcggcggacgccgcccccgtcccgaaggggactcgaaaatgtacagccagcggtttggcaccgtacagcgggaggttaagggccccacccccaaagtggtgatcgtgagatccaagcctcctaaaggccaaggagctgagcaccatctagaaagaatccgacgcagccatcagaagcataatgctattttggcttccattaagtcaagtgagcgggatcgcttgaaagctgagtgggaccagcacaatgactgcaagattttggacagccttgtgcgagcaagaatcaaggatgctgtgcaagggtttatcattaacattgaagaaagacgaaataagctacgtgagcttttagcattagaagaaaatgagtattttacagaaatgcaattgaagaaagaaaccattgaggagaaaaaagataggatgagagagaaaactaaattactaaaagagaagaatgaaaaagagaggcaggattttgtggctgaaaagctagaccagcaattcagggaacgctgtgaggagctccgtgttgaattgttatctatccatcagaagaaggtgtgtgaggagcggaaagcacagattgcatttaatgaggagctgagcaggcaaaagctggtggaagagcagatgttctccaaactctgggaggaagaccgattagccaaggaaaagcgagaagcccaagaggcgaggagacagaaagagctgatggagaacacacgcctggggctgaatgcccagatcaccagcatcaaggcacaaaggcaggcgacacagctgctgaaggaagaggaggcacgccttgtggaaagtaacaacgcacagattaaacatgagaatgaacaggatatgctaaagaaacagaaggcaaagcaggaaactaggaccattttgcaaaaagccctacaagagaggatagaacatattcagcaggaatacagagacgaacaggacttgaacatgaagctcgtgcaaagggcccttcaagacttacaggaagaggcagataaaaagaaacaaaaaagagaagatatgataagagaacagaagatataccataaatatttggcacagagacgtgaggaagaaaaagctcaggagaaagaatttgacagaatattagaggaagacaaggcaaagaagttggctgagaaggacaaggagctgagacttgaaaaggaggcaaggagacagcttgtggatgaggtcatgtgtacaagaaaacttcaagttcaagaaaagttgcaacgagaagctaaagaacaggaagaacgtgctatggaacagaaacacataaatgaaagtcttaaagaacttaactgtgaagagaaggagaattttgcaagacgccaacgtttagcccaggagtacaggaagcaacttcagatgcaaatcgcctaccagcagcagtcccaagaagcagagaaggaagagaaacgccgagagtttgaagcaggtgtagcagcaaacaagatgtgtttggacaaggtccaggaggtcctgtccacccatcaagtgctgcctcaaaacattcatcccatgcgcaaggcatgccccagtaagcttccaccgtagttccgtgagcatcaatatatcttttcttggtcttttaatatttttaactacagtatgcttgtatgcttcttttaactcctggataaacttttcttttttccctgagtttgtgtaattaattgaacataattttcttcctttgaataaacctgtgcctattttggagttcacagacttacaaatccaaa

SEQ ID NO: 240060 - DNA, 1545 bp, Artificial Sequence
  derived and/or modified sequence
atgtattctcagcgctttgggaccgtgcaacgcgaggtgaaggggccaaccccaaaagtggtgattgtgcgttccaaaccaccaaaagggcagggagccgaacatcacctcgaaaggattagacgttctcatcagaaacataatgccattttggccagcattaagtcatctgaaagagataggctgaaggccgaatgggatcaacacaatgactgcaagatcctggactctttggtgcgtgcgcgaatcaaggacgcagtacagggattcataatcaatatagaggagcggagaaacaagctgcgtgagttgctagccctcgaggagaatgaatatttcaccgagatgcaactgaaaaaggagactatcgaagaaaagaaagataggatgcgagagaagaccaagctgcttaaagaaaagaacgaaaaggaacgtcaagatttcgtggccgagaaactggatcagcagtttcgtgaacggtgtgaagagctgcgagttgaactgctgtcaatccatcagaagaaggtgtgtgaggagcgaaaggcgcagatcgcgttcaacgaagagctgtccaggcagaagttagttgaagaacaaatgttcagtaaactgtgggaggaggaccggctagccaaggagaagagagaggcgcaggaagctcgacgacaaaaggagctgatggagaacacaaggttggggttgaacgctcaaatcacaagtatcaaggcccaaaggcaggctacccaattgcttaaagaagaagaagcaaggctcgtcgagagcaataacgcacaaattaagcatgaaaatgaacaggacatgctcaaaaaacagaaggccaagcaagaaacccgaaccattctgcagaaggctctacaggagaggatcgagcacatccagcaggagtacagagatgagcaggacctcaatatgaagctggtacaaagggcgctccaggacctccaggaagaagcagataaaaaaaaacaaaagcgcgaggacatgattcgagagcaaaagatataccacaagtacttagcccagagacgggaggaagagaaagcccaggaaaaggaattcgaccgcatattagaagaggacaaggccaaaaagctagccgagaaggataaagagctgcgattggaaaaggaggctcggaggcagcttgtggacgaggtcatgtgcacgagaaaactgcaggtacaagaaaagctgcaacgtgaggccaaagaacaggaggagagggccatggaacagaaacatattaatgaatctttaaaagagttgaattgcgaggagaaggagaattttgcacgcaggcagcgcctcgcccaggagtataggaaacaactgcagatgcaaattgcctaccagcaacagagccaggaagcggagaaagaagaaaagagaagggagtttgaggcgggtgtggccgctaacaagatgtgcttagacaaggtacaagaggtcctcagcacccaccaagtcctgccacagaacattcatcccatgaggaaagcatgcccttccaaactgccgccgtag

SEQ ID NO: 240061 - DNA, 1545 bp, Artificial Sequence
  derived and/or modified sequence
atgtacagccagcgcttcggcaccgtgcagcgggaggtgaagggccccacccccaaggtggtgattgtgcgcagcaagccacccaagggccagggcgctgagcaccacctggagcgcatcagaagaagccaccagaagcacaatgccatcctggccagcatcaagagcagcgagcgggaccggctgaaggccgagtgggaccagcacaatgactgcaagatcctggacagcctggtgcgggcccgcatcaaggatgctgtgcagggcttcatcatcaacatcgaggagaggaggaacaagctgcgggagctgctggccctggaggagaatgagtacttcacagagatgcagctgaagaaggagaccatcgaggagaagaaggacaggatgagggagaagaccaagctgctgaaggagaagaatgagaaggagcggcaggactttgtggccgagaagctggaccagcagttccgggagcgctgtgaggagctgcgggtggagctgctgagcatccaccagaagaaggtgtgtgaggagaggaaggcccagatcgccttcaatgaggagctgagccggcagaagctggtggaggagcagatgttcagcaagctgtgggaggaggaccggctggccaaggagaagcgggaggcccaggaggcccggcggcagaaggagctgatggagaacacccggctgggcctgaatgcccagatcaccagcatcaaggcccagaggcaggccacccagctgctgaaggaggaggaggcccggctggtggagagcaacaatgcccagatcaagcatgaaaatgagcaggacatgctgaagaagcagaaggccaagcaggagaccaggaccatcctgcagaaggccctgcaggagcgcatcgagcacatccagcaggagtacagagatgagcaggacctgaacatgaagctggtgcagagggccctgcaggacctgcaggaggaggccgacaagaagaagcagaagcgggaggacatgatccgggagcagaagatctaccacaagtacctggcccagaggcgggaggaggagaaggcccaggagaaggagtttgaccgcatcctggaggaggacaaggccaagaagctggccgagaaggacaaggagctgcggctggagaaggaggcccggcggcagctggtggatgaggtgatgtgcaccaggaagctgcaggtgcaggagaagctgcagcgggaggccaaggagcaggaggagcgggccatggagcagaagcacatcaatgaaagcctgaaggagctgaactgtgaggagaaggaaaattttgcccggcggcagaggctggcccaggagtacaggaagcagctgcagatgcagatcgcctaccagcagcagagccaggaggccgagaaggaggagaagaggcgggagtttgaagctggggtggccgccaacaagatgtgcctggacaaggtgcaggaggtgctgagcacccaccaggtgctgccccagaacatccaccccatgaggaaggcctgccccagcaagctgcccccatag

SEQ ID NO: 240062 - DNA, 1545 bp, Artificial Sequence
  derived and/or modified sequence
atgtacagccagcggttcggcaccgtgcagcgggaggtgaagggcccaacaccaaaagttgtgattgtgcggtctaagccgccaaaaggtcagggggccgaacatcacctcgagcgtatacgtcgcagtcaccagaagcacaatgcaatcctggccagtatcaaatcaagcgaacgtgatcgcctgaaggccgagtgggatcaacataatgactgtaaaattctcgacagcctagtgagggctcggattaaagacgccgtgcaaggttttatcatcaacatagaagagcggcgcaataagctcagagagctgctggcactagaggaaaatgagtatttcacagaaatgcagctgaagaaagaaactattgaggaaaaaaaggatcgtatgagggaaaaaactaaactcctgaaggaaaaaaacgagaaggagcgtcaggacttcgttgcggagaaactcgaccaacagtttcgagaacgctgtgaagagctgcgcgtcgagctactgtccattcaccagaaaaaggtctgcgaggaacgaaaagcccagattgcctttaacgaggaactgagcaggcagaaacttgtcgaagagcagatgttcagtaaactctgggaggaagaccgcctcgcgaaagagaaacgcgaggctcaggaagcacgaaggcagaaagagctaatggagaatacccgattaggccttaacgctcagattacctcaattaaagctcagcgccaggctacccaactgctcaaagaggaagaagcccggcttgttgaatcaaacaacgcgcaaattaaacacgagaacgagcaagacatgctcaaaaagcagaaagcaaaacaagagactaggaccatcctgcaaaaggctctgcaggaacgcatcgaacacatacagcaagagtaccgtgacgaacaggacctcaacatgaagctcgtgcagcgtgcccttcaggatctgcaagaggaagcagataaaaaaaagcagaagagagaggatatgatccgcgaacaaaagatttaccacaaatatctcgcacaaaggcgcgaagaggagaaagctcaggagaaagaatttgatcgaattctggaggaggacaaggcaaagaagctggctgagaaagacaaggaactgagactggagaaggaagctaggcgccaacttgtagacgaagtgatgtgcacgagaaagctccaggtccaggagaaactccagcgagaagccaaagagcaggaagaaagggccatggagcaaaagcatataaacgaatctttgaaggagctgaattgcgaggagaaggagaactttgctaggcggcagcgcctggcacaggagtatagaaagcagctgcaaatgcagatcgcttaccagcagcagagccaagaggcggagaaggaagagaagagaagagagtttgaggcaggagtcgcagccaacaaaatgtgcttggacaaagttcaggaggtgctgagcacacaccaggtgctcccacagaacatacatcccatgcgcaaggcctgcccttctaaattgcccccttag

SEQ ID NO: 240063 - DNA, 1545 bp, Artificial Sequence
  derived and/or modified sequence
atgtactcccagcgcttcgggacggtgcaacgggaagtgaagggcccaactccaaaagtagtcatcgtccgctccaaacctccaaagggccagggagccgagcatcatttggaacggatcaggcgatcacaccagaagcataatgcaatactcgcctcgattaagtcgagtgagcgggataggctgaaagccgagtgggatcagcacaatgactgtaagattctggattccctggttcgcgctcgcatcaaggatgctgtgcagggattcatcatcaatattgaagagagaaggaacaaattgcgcgaactgttggctttggaagagaatgagtactttaccgaaatgcagctcaaaaaagaaacaatcgaggagaagaaagatcgtatgcgggaaaagaccaagctgctcaaggaaaagaacgaaaaggagcgccaagacttcgtcgccgaaaaactcgaccaacagttcagggaacgctgtgaggagctccgcgtggaacttttgtctatccatcaaaagaaggtgtgcgaagagcgcaaggcccaaatcgcttttaatgaggaactttcccggcagaaattggtggaagaacagatgtttagcaagctgtgggaagaagaccggctggccaaggagaagcgggaagctcaagaagccagacgccagaaagagctcatggagaacacgaggctgggcttgaatgcccagattacatccattaaggcacagcggcaggctacccaattgctgaaggaggaggaagctaggctggtcgagagtaataatgctcagatcaagcacgaaaatgagcaggacatgttaaaaaagcaaaaggctaaacaggaaactcgcactatccttcagaaagcactgcaagagagaattgagcacatccagcaggagtatcgcgacgagcaggacctgaatatgaaactggttcagcgcgcactacaggacttgcaagaggaagccgacaaaaagaaacagaagcgagaggatatgatacgtgagcagaagatctatcacaaatacctggcacaaagacgggaggaagaaaaagcgcaggagaaggagtttgacaggatcctcgaggaggataaagctaagaaactggcagagaaggacaaagagcttaggctggagaaggaagcgaggagacagctcgtagacgaggtcatgtgtaccaggaagctccaggtccaggaaaaactccagagagaggcaaaggaacaggaagaaagagccatggagcagaagcacattaacgagagcctgaaggagctaaattgtgaagagaaggagaacttcgccaggagacaaaggctggcccaggagtacaggaagcagttgcagatgcagattgcatatcagcaacaatcacaagaggcagaaaaggaagagaagaggagagagttcgaggctggggtcgctgccaataagatgtgtttagataaggtccaggaggtactttctactcaccaggtgctgccacagaatatacaccccatgaggaaggcatgtccctcaaagttgccgccatag

SEQ ID NO: 240064 - DNA, 1266 bp, Artificial Sequence
  derived and/or modified sequence
atgaccagccaggagaagaccgaggagtaccccttcgccgacatcttcgacgaggacgagaccgagagaaacttcctgctgagcaagcccgtgtgcttcgtggtgttcggcaagcccggcgtgggcaagaccaccctggccagatacatcacccaggcctggaagtgcatcagagtggaggccctgcccatcctggaggagcagatcgccgccgagaccgagagcggcgtgatgctgcagagcatgctgatcagcggccagagcatccccgacgagctggtgatcaagctgatgctggagaagctgaacagccccgaggtgtgccacttcggctacatcatcaccgagatccccagcctgagccaggacgccatgaccaccctgcagcagatcgagctgatcaagaacctgaacctgaagcccgacgtgatcatcaacatcaagtgccccgactacgacctgtgccagagaatcagcggccagagacagcacaacaacaccggctacatctacagcagagaccagtgggaccccgaggtgatcgagaaccacagaaagaagaagaaggaggcccagaaggacggcaagggcgaggaggaggaggaggaggaggagcaggaggaggaggaggccttcatcgccgagatgcagatggtggccgagatcctgcaccacctggtgcagagacccgaggactacctggagaacgtggagaacatcgtgaagctgtacaaggagaccatcctgcagaccctggaggaggtgatggccgagcacaacccccagtacctgatcgagctgaacggcaacaagcccgccgaggagctgttcatgatcgtgatggacagactgaagtacctgaacctgaagagagccgccatcctgaccaagctgcagggcgccgaggaggagatcaacgacaccatggagaacgacgagctgttcagaaccctggccagctacaagctgatcgcccccagatacagatggcagagaagcaagtggggcagaacctgccccgtgaacctgaaggacggcaacatctacagcggcctgcccgactacagcgtgagcttcctgggcaagatctactgcctgagcagcgaggaggccctgaagcccttcctgctgaaccccagaccctacctgctgccccccatgcccggccccccctgcaaggtgttcatcctgggcccccagtacagcggcaagaccaccctgtgcaacatgctggccgagaactacaagggcaaggtgaccaactag

SEQ ID NO: 240065 - DNA, 684 bp, Artificial Sequence
  derived and/or modified sequence
atgctgcagagcatgctgatcagcggccagagcatccccgacgagctggtgatcaagctgatgctggagaagctgaacagccccgaggtgtgccacttcggctacatcatcaccgagatccccagcctgagccaggacgccatgaccaccctgcagcagatcgagctgatcaagaacctgaacctgaagcccgacgtgatcatcaacatcaagtgccccgactacgacctgtgccagagaatcagcggccagagacagcacaacaacaccggctacatctacagcagagaccagtgggaccccgaggtgatcgagaaccacagaaagaagaagaaggaggcccagaaggacggcaagggcgaggaggaggaggaggaggaggagcaggaggaggaggaggccttcatcgccgagatgcagatggtggccgagatcctgcaccacctggtgcagagacccgaggactacctggagaacgtggagaacatcgtgaagctgtacaaggagaccatcctgcagaccctggaggaggtgatggccgagcacaacccccagtacctgatcgagctgaacggcaacaagcccgccgaggagctgttcatgatcgtgatggacagactgaagtacctgaacctgaagagagccgccatcctgaccaagctgcagggcgccgaggaggagtag

SEQ ID NO: 240066 - DNA, 2550 bp, Artificial Sequence
  derived and/or modified sequence
atagagaggtcgggtagaggctcccgggacctgcgtgctgccgagagaggaagcgaagggcaccatctttgtattttgtgtcatgacttctcaagagaagacagaagagtatccttttgcagatatatttgatgaagatgaaactgaaaggaattttttgttgtccaaacctgtttgctttgttgtatttgggaaaccaggtgttgggaaaacaacattagcccgttacataacacaggcatggaaatgtattcgtgttgaagctttgccaattttagaagaacagattgctgctgaaaccgaatcaggagttatgttgcaatcaatgttgatcagcggtcaaagcattccagatgaacttgtcataaagctaatgttggagaagctcaactccccagaagtctgtcactttggttatattatcactgaaataccatcactttcacaggatgccatgactaccttacagcaaatagaattaattaaaaacttaaacctgaaacctgatgttataatcaatataaagtgtcctgactatgatttgtgccagagaatttctgggcaaagacagcacaataatacgggatacatatacagtagagaccagtgggatcctgaagtcattgagaatcataggaaaaagaagaaagaagcccaaaaggacggaaaaggagaagaggaagaagaggaagaagagcaagaagaagaagaggcatttattgccgaaatgcagatggtggctgaaattcttcatcatctagttcagaggcctgaagattatttggaaaatgttgaaaacattgttaagctttataaggaaacaattctccaaactttagaagaagtaatggctgaacacaatccccagtatctcattgagctaaatggaaataaaccagcagaggagctctttatgattgttatggatcgacttaaatatctgaacctaaaaagagcagctattctaaccaaacttcagggtgcagaggaagaaattaatgacacaatggaaaatgatgagctatttcgtactcttgcatcttataaacttattgcaccaagatacagatggcaaagaagtaaatggggacgtacatgtcctgtgaatttaaaagatggtaacatttattcaggattaccagattattctgtgagttttctaggtaaaatctactgtctttcatcagaagaagcattaaaaccatttttgttgaacccacgtccctatctgcttccacctatgccaggaccaccatgtaaagtattcatacttggacctcaatattcagggaaaacaacactttgcaatatgcttgcagaaaattacaaaggaaaggtgactaactaactatctgtctatctatctatctatctatctatctatctatctatctatgtctatctgtcatgtatctatactcgattataatttgtaggattttatttgtactcagtttttaaaatttcatgttttaattgaataattgttccactgggcttggggtagggtaggcattctttttgttgtttattgctgcttccagaccagagtccctccctgcttcccaaaagctcccacatgtgaatatcgtgtcattcagactctgccacctattagctttcttggttctactcatcttctgtcccctgggtttcacttctcctggctcactctcactctccccatataatcactcctgtcctaattcttggtgatttcagtattacaaagatgatcctcccaacaccttgacacctccctcagtaatcttgttctccactctcagtaaatgaaattatttttagcttagacaagagtgatagcagtaaaagtggtatgaaacaagcatatttgggatataatttgaagacaaagctgaaagatttgatgagggattggaatgtggaggaattctagaaggggcaatgtggcttgaggattgcctatgcaagaaggaatggcacaagatcatggctaaagacagagcaattcaggccacagaaaggtgttagaagttgttcaaagtgctgttgcattcttttaagcgccggagtatcattttctatttgcttttaactttttcattgtgaaacatgacaaacatacagaaaagtgaagcccactgagttaccgcaaaatgaacccccatgtaaccaccaaccaggtcaaatctggaatgttgccagcacccagacgccctctcatgtttcttctcaataccagtctcctcactctccacacaaaggtaaccactgcccagaattttatggcattcacttccatacttctcctatggttttgccgtggaagcatacatccaaataccataggctagttttgcatggtttttttgaattttatagacctaaacaatttatcttctttgtgcctggcttctttcacttaacattataattatgatatttgtccagactattgaatgtagctgtagtttattcatttttattgttttattgtattctgttgattgacttataccataatgtatttatccacatttgagcactaataaaacttggattgattcc

SEQ ID NO: 240067 - DNA, 831 bp, Artificial Sequence
  derived and/or modified sequence
agttgcttccctgaggagggtccggctgcggccagggtgttgggaaaacaacattagcccgttacataacacaggcatggaaatgtattcgtgttgaagctttgccaattttagaagaacagattgctgctgaaaccgaatcaggagttatgttgcaatcaatgttgatcagcggtcaaagcattccagatgaacttgtcataaagctaatgttggagaagctcaactccccagaagtctgtcactttggttatattatcactgaaataccatcactttcacaggatgccatgactaccttacagcaaatagaattaattaaaaacttaaacctgaaacctgatgttataatcaatataaagtgtcctgactatgatttgtgccagagaatttctgggcaaagacagcacaataatacgggatacatatacagtagagaccagtgggatcctgaagtcattgagaatcataggaaaaagaagaaagaagcccaaaaggacggaaaaggagaagaggaagaagaggaagaagagcaagaagaagaagaggcatttattgccgaaatgcagatggtggctgaaattcttcatcatctagttcagaggcctgaagattatttggaaaatgttgaaaacattgttaagctttataaggaaacaattctccaaactttagaagaagtaatggctgaacacaatccccagtatctcattgagctaaatggaaataaaccagcagaggagctctttatgattgttatggatcgacttaaatatctgaacctaaaaagagcagctattctaaccaaacttcagggtgcagaggaagaaa

SEQ ID NO: 240068 - DNA, 1266 bp, Artificial Sequence
  derived and/or modified sequence
atgacgtctcaggaaaagaccgaggagtatccttttgcagatatctttgatgaagacgagacggagcgaaactttctgctgagtaaacccgtttgtttcgtcgtgtttggcaagcccggcgttgggaagactactctggcccgctatatcacccaggcgtggaagtgcattcgggtggaagccctccctattctggaggaacagattgcggccgaaacagagtctggcgttatgctgcaatctatgctgatctctggacagtcaattcctgacgaattggtaatcaagctcatgctggagaaactgaacagccctgaagtctgtcatttcggctacatcattacagagataccttcccttagtcaggacgccatgaccaccctacaacagatcgaacttatcaagaacctcaatctgaaaccagacgtcatcattaacataaagtgcccagattatgatctttgccagcggatctcaggccagcgtcagcataacaataccgggtacatctacagcagggaccaatgggaccccgaggtgattgagaatcaccgcaagaagaaaaaggaggcgcagaaagacggcaagggggaagaggaggaggaagaagaggagcaggaggaggaagaggcattcatcgctgagatgcagatggttgctgagatactgcatcacctagtgcagcgaccagaggattacttggagaacgtggagaatatcgtgaagctgtacaaggagaccatcctgcagactttggaagaggtaatggccgaacacaatccccagtacctgattgaactgaacggaaacaaacccgctgaagaactcttcatgattgtgatggacagattaaagtatcttaacctgaaacgcgcggccatcctgactaagttgcagggcgccgaggaagaaattaacgacaccatggaaaatgatgaactgtttagaaccttggcctcttataagctcattgcaccccgctacaggtggcaacgctccaaatgggggcgcacatgccccgtgaacctgaaagatggcaacatttactcagggttaccagattacagcgtgtcctttcttgggaagatctactgcctaagctccgaggaggccctcaagcccttccttctgaacccacgcccatacctgctgccacccatgcctggacccccctgcaaagtgtttattctgggcccccagtactctgggaagactactctctgtaatatgctggccgagaattataagggcaaagtgaccaattag

SEQ ID NO: 240069 - DNA, 684 bp, Artificial Sequence
  derived and/or modified sequence
atgctgcagtccatgctaattagtggacagagtattcccgacgaactcgtaatcaagctgatgttagagaagttgaatagtccagaagtgtgtcattttggctatatcatcaccgaaatcccttccctcagtcaggacgcaatgacaacactgcagcagattgaactcataaaaaaccttaacttaaaacctgatgtgatcatcaacattaagtgtcctgattatgacctgtgccaacgcatcagcggacagcgccagcacaataatacggggtatatctactccagggaccagtgggatcctgaggtcatcgaaaatcaccgtaagaaaaaaaaggaagcacaaaaagacggtaagggcgaggaggaggaggaggaagaggaacaggaagaggaggaggcattcatagccgagatgcagatggttgcagagattttgcatcatttggtccagcggccggaggactacctggagaacgttgaaaatattgtgaaactgtacaaagagaccattctgcagactctagaagaggtcatggctgaacacaatcctcagtacctgatcgaactcaatggcaataaaccggctgaggagttattcatgatcgtgatggacagattaaagtatttgaacttgaaaagagcagcaatccttaccaaattgcagggcgcagaagaggagtag

SEQ ID NO: 240070 - DNA, 1266 bp, Artificial Sequence
  derived and/or modified sequence
atgaccagccaggagaagacagaggagtacccctttgctgacatctttgatgaagatgaaacagaaagaaacttcctgctgagcaagcctgtgtgctttgtggtgtttgggaagccaggagtgggcaagaccaccctggcccgctacatcacccaggcctggaagtgcatccgggtggaggccctgcccatcctggaggagcagattgctgctgagacagaaagtggagtgatgctgcagagcatgctgatcagcggccagagcatcccagatgagctggtgatcaagctgatgctggagaagctgaacagccctgaggtgtgccacttcggctacatcatcacagagatccccagcctgagccaggatgccatgaccaccctgcagcagatcgagctgatcaagaacctgaacctgaagccagatgtgatcatcaacatcaagtgcccagactatgacctgtgccagaggatcagcggccagaggcagcacaacaacacaggctacatctacagccgggaccagtgggaccctgaggtgattgagaaccacaggaagaagaagaaggaggcccagaaggatggcaagggggaggaggaggaggaggaggaggagcaggaggaggaggaggccttcatcgccgagatgcagatggtggccgagatcctgcaccacctggtgcagaggcctgaggactacctggagaatgtggagaacatcgtgaagctgtacaaggagaccatcctgcagaccctggaggaggtgatggccgagcacaacccccagtacctgattgagctgaatggaaacaagccagctgaggagctgttcatgattgtgatggaccggctgaagtacctgaacctgaagagagctgccatcctgaccaagctgcagggcgctgaggaggagatcaatgacaccatggagaatgatgagctgttccgcaccctggccagctacaagctgattgccccccgctaccgctggcagaggagcaagtggggccgcacctgccctgtgaacctgaaggatggcaacatctacagcggcctgcctgactacagcgtgtccttcctgggcaagatctactgcctgagcagcgaggaggccctgaagcccttcctgctgaacccccggccctacctgctgccccccatgcctggccccccctgcaaggtgttcatcctgggcccccagtacagcggcaagaccaccctgtgcaacatgctggccgagaactacaagggcaaggtgaccaactag

SEQ ID NO: 240071 - DNA, 684 bp, Artificial Sequence
  derived and/or modified sequence
atgctgcagagcatgctgatcagcggccagagcatcccagatgagctggtgatcaagctgatgctggagaagctgaacagccctgaggtgtgccacttcggctacatcatcacagagatccccagcctgagccaggatgccatgaccaccctgcagcagatcgagctgatcaagaacctgaacctgaagccagatgtgatcatcaacatcaagtgcccagactatgacctgtgccagaggatcagcggccagaggcagcacaacaacacaggctacatctacagccgggaccagtgggaccctgaggtgattgagaaccacaggaagaagaagaaggaggcccagaaggatggaaaaggagaggaggaggaggaggaggaggagcaggaggaggaggaggccttcatcgccgagatgcagatggtggccgagatcctgcaccacctggtgcagaggcctgaggactacctggagaatgtggagaacatcgtgaagctgtacaaggagaccatcctgcagaccctggaggaggtgatggccgagcacaacccccagtacctgattgagctgaatggaaacaagccagctgaggagctgttcatgattgtgatggaccggctgaagtacctgaacctgaagagagctgccatcctgaccaagctgcagggcgctgaggaggagtag

SEQ ID NO: 240072 - DNA, 1266 bp, Artificial Sequence
  derived and/or modified sequence
atgaccagccaggagaagaccgaggagtaccccttcgccgacatctttgacgaagatgaaactgaacgaaattttctcctctctaagcctgtttgtttcgtggtgttcggcaagcccggcgtgggaaagacaacccttgcaagatatataacacaggcctggaagtgcatccgcgtggaggcactacctatattggaagaacagatcgctgccgagacagagagtggagttatgcttcagagtatgctcatctcaggtcagtccatccctgatgagctggtcatcaagctcatgttagaaaaacttaacagtcccgaggtctgtcatttcggctatataattaccgaaatcccaagtctgtcacaggatgctatgacgaccctgcagcagatcgagctgatcaaaaacttaaatctcaagccagacgtgatcatcaacatcaagtgtcctgattacgacttgtgccagcggatctccggtcagagacaacacaacaataccggctatatctattctcgagatcaatgggatcctgaggtgatcgagaaccatagaaagaagaaaaaagaagcccagaaagatggtaagggtgaagaggaggaagaagaagaggaacaggaagaagaggaggcgtttatcgccgagatgcaaatggttgccgaaattttgcaccacctggtgcagaggccagaggactacctggaaaatgtggagaacatcgtcaagttgtataaggaaactatcctacagaccttggaggaggtgatggccgagcataatccccagtaccttatcgagctaaacgggaataagcctgctgaagaactctttatgatcgtcatggacaggttaaagtatctgaacctgaagcgtgcagccattttgaccaagttgcagggcgctgaagaggagatcaatgataccatggagaacgacgagctgttcaggaccctggcaagctataaattgattgccccccgttataggtggcaaaggtccaaatggggtagaacatgtccagtgaacttgaaggacggcaatatttattctgggttgcccgactatagcgtgtcgtttctggggaaaatatactgcctctcatcagaggaagcgctgaaaccttttttgctcaatccaaggccatacctccttcctccgatgcctggaccaccttgcaaggtgtttattctgggcccccagtacagcggcaagacgactctgtgtaacatgctcgctgagaactataagggcaaggttacaaactag

SEQ ID NO: 240073 - DNA, 684 bp, Artificial Sequence
  derived and/or modified sequence
atgctgcagagcatgctgatcagcggccagagcatccccgacgagcttgtgattaaactgatgctcgagaagcttaattcacccgaggtatgccatttcggttatattatcaccgagatcccgtctctctctcaggatgccatgacgacccttcaacagatcgaactcatcaaaaacctcaacctgaagccagacgtgatcatcaatattaaatgccccgactatgatctttgtcagaggataagcggacagagacagcacaacaatactggttacatatactcccgcgatcagtgggatccggaagttatagaaaatcatcggaagaaaaagaaggaggcccagaaagatggcaaaggggaagaggaggaagaggaggaagagcaggaagaggaggaggcttttatcgcagagatgcagatggtcgcagagatcctgcatcatctcgtgcagagacccgaggattatttagaaaatgtggaaaatatcgtgaagctgtataaagagacaatactgcagacccttgaggaggtaatggcagagcataacccacagtatctgattgaactgaatggaaataagccggctgaggagctgttcatgatcgttatggatagactgaagtacctgaacctcaagagggcagccatattgaccaaactgcagggcgccgaggaggaatag

SEQ ID NO: 240074 - DNA, 1266 bp, Artificial Sequence
  derived and/or modified sequence
atgaccagtcaggagaaaactgaagaataccccttcgctgacatttttgatgaggacgaaacagagaggaatttcctcctgtcaaagcctgtctgctttgtggtgttcggaaagcccggtgtgggaaagacaaccctagctagatacatcacacaggcctggaagtgtatccgcgtggaggcgctgcccattttggaggagcagattgccgcagagaccgagagcggagtgatgctgcaaagcatgctgatcagcgggcaaagtatccccgatgagctcgtcattaagctgatgttggagaaattaaacagccccgaggtttgccattttggatacattataactgaaatcccatcactgagtcaggatgcaatgacaacgctgcagcagatcgaattgattaagaacctgaacctgaaacctgacgttatcatcaacatcaagtgtccggactatgacctgtgtcaaagaatctctggacagcggcagcataacaacaccggttacatctacagtcgggaccagtgggatccagaagtaatcgaaaatcaccgaaagaagaagaaagaggcccagaaggacggtaaaggggaagaagaagaagaggaggaggagcaagaggaagaggaagccttcatcgcggaaatgcaaatggtggctgaaatcttacaccatctcgtacaacgaccggaagactatctggaaaacgtggagaatatcgtgaagctgtataaggaaacgatcctgcagacactggaggaggtgatggctgagcataatccacaatatctgatcgaactgaacgggaacaaacccgcagaggaactttttatgattgttatggacagactgaaatacctaaatttaaaacgcgcagcaatcctgactaaactacagggggcagaggaggagattaatgacactatggaaaacgatgagttatttagaactctcgccagctataagcttatagctcctcgataccgctggcagcgctctaagtggggtaggacatgccccgtcaacctgaaggatggcaacatttattctgggctgccagattactccgttagcttcttggggaaaatttactgcctttcttctgaggaagcactaaaacccttcctgctgaatccgaggccgtacctcctacctcctatgccaggtcctccatgtaaggtgtttattctgggaccacaatatagcgggaaaacaaccctgtgtaatatgctggcagagaactacaaggggaaggtgaccaattag

SEQ ID NO: 240075 - DNA, 684 bp, Artificial Sequence
  derived and/or modified sequence
atgttgcagagcatgctgatcagtggtcagagcattcctgacgaactagtaattaaattaatgcttgagaagctgaattcacctgaggtgtgccacttcggatatatcatcacggagataccctccctgtctcaagatgctatgacaacgttgcagcagatcgaactgatcaaaaacctgaaccttaagcctgacgtaatcatcaatataaagtgccctgattacgatctctgtcagaggataagtggacagcgccagcacaataacactggatacatatatagtagagaccagtgggatccagaagtgattgagaatcataggaaaaaaaagaaagaggctcagaaagatgggaagggagaggaggaagaggaagaagaggaacaggaagaagaggaagcttttattgccgagatgcagatggtggccgaaattctccatcacctggtgcagcgacctgaagactatctggagaacgtggaaaatatcgtgaaactgtataaggagacaatcctacaaacacttgaagaggtcatggctgagcacaaccctcagtatttgatcgaacttaatgggaacaaacccgcagaagagctgtttatgattgtaatggatcggctcaagtatctcaacttaaaacgggctgcgatcctgaccaagctgcaaggggctgaggaggagtag

SEQ ID NO: 240076 - protein, 265 aa, Artificial Sequence
  derived and/or modified sequence
MREEMSLGCQEAFEIFKRDHADSVTIDDNKQILKQRFSEAKALGESINEARSKIGHLKEEITQRHIQQVALGISENMAVPLMPDQQEEKLRSQLEEEKRRYKTMFTRLKALKVEIEHLQLLMDKAKVKLQKEFEVWWAEEATNLQVNSPAVNSLDHTKPFLQTSDSQHEWSQLLSNKSSGGWEVQDQGTGRFDVCDVNARKILPSPCPSPHSQKQSSTSTPLEDSIPKRPVSSIPLTGDSQTDSDIIAFIKARQSILQKQCLGSN

SEQ ID NO: 240077 - protein, 814 aa, Artificial Sequence
  derived and/or modified sequence
MVKQTIQIFARVKPPVRKHQQGIYSIDEDEKLIPSLEIILPRDLADGFVNNKRESYKFKFQRIFDQDANQETVFENIAKPVAGSVLAGYNGTIFAYGQTGSGKTFTITGGAERYSDRGIIPRTLSYIFEQLQKDSSKIYTTHISYLEIYNECGYDLLDPRHEASSLEDLPKVTILEDPDQNIHLKNLTLHQATTEEEALNLLFLGDTNRMIAETPMNQASTRSHCIFTIHLSSKEPGSATVRHAKLHLVDLAGSERVAKTGVGGHLLTEAKYINLSLHYLEQVIIALSEKHRSHIPYRNSMMTSVLRDSLGGNCMTTMIATLSLEKRNLDESISTCRFAQRVALIKNEAVLNEEINPRLVIKRLQKEIQELKDELAMVTGEQRTEALTEAELLQLEKLITSFLEDQDSDSRLEVGADMRKVHHCFHHLKKLLNDKKILENNTVSSESKDQDCQEPLKEEEYRKLRDILKQRDNEINILVNMLKKEKKKAQEALHLAGMDRREFRQSQSPPFRLGNPEEGQRMRLSSAPSQAQDFSILGKRSSLLHKKIGMREEMSLGCQEAFEIFKRDHADSVTIDDNKQILKQRFSEAKALGESINEARSKIGHLKEEITQRHIQQVALGISENMAVPLMPDQQEEKLRSQLEEEKRRYKTMFTRLKALKVEIEHLQLLMDKAKVKLQKEFEVWWAEEATNLQVNSPAVNSLDHTKPFLQTSDSQHEWSQLLSNKSSGGWEVQDQGTGRFDVCDVNARKILPSPCPSPHSQKQSSTSTPLEDSIPKRPVSSIPLTGDSQTDSDIIAFIKARQSILQKQCLGSN

SEQ ID NO: 240078 - protein, 653 aa, Artificial Sequence
  derived and/or modified sequence
MASSLYDLKKVTILEDPDQNIHLKNLTLHQATTEEEALNLLFLGDTNRMIAETPMNQASTRSHCIFTIHLSSKEPGSATVRHAKLHLVDLAGSERVAKTGVGGHLLTEAKYINLSLHYLEQVIIALSEKHRSHIPYRNSMMTSVLRDSLGGNCMTTMIATLSLEKRNLDESISTCRFAQRVALIKNEAVLNEEINPRLVIKRLQKEIQELKDELAMVTGEQRTEALTEAELLQLEKLITSFLEDQDSDSRLEVGADMRKVHHCFHHLKKLLNDKKILENNTVSSESKDQDCQEPLKEEEYRKLRDILKQRDNEINILVNMLKKEKKKAQEALHLAGMDRREFRQSQSPPFRLGNPEEGQRMRLSSAPSQAQDFSILGKRSSLLHKKIGMREEMSLGCQEAFEIFKRDHADSVTIDDNKQILKQRFSEAKALGESINEARSKIGHLKEEITQRHIQQVALGISENMAVPLMPDQQEEKLRSQLEEEKRRYKTMFTRLKALKVEIEHLQLLMDKAKVKLQKEFEVWWAEEATNLQVNSPAVNSLDHTKPFLQTSDSQHEWSQLLSNKSSGGWEVQDQGTGRFDVCDVNARKILPSPCPSPHSQKQSSTSTPLEDSIPKRPVSSIPLTGDSQTDSDIIAFIKARQSILQKQCLGSN

SEQ ID NO: 240079 - DNA, 2445 bp, Artificial Sequence
  derived and/or modified sequence
atggtcaagcaaacgatacagattttcgcaagggtgaaacctcctgtaagaaaacatcaacagggtatatatagtatcgatgaggacgaaaaactcattcccagtctggagatcatcctgcctcgtgacctggctgatggcttcgtcaataacaaacgtgaatcttacaaatttaagttccagcggatcttcgaccaggatgctaatcaggagactgtgtttgagaacattgccaaacccgtcgccggatccgtgctggccggctacaatggcacaatctttgcgtacgggcaaactgggtctggtaaaactttcacgattacaggaggagcagagagatacagtgaccggggcattattccacgcaccctgtcctacattttcgaacagcttcaaaaggattcgtccaaaatctacacaacgcacatttcatacctagaaatctataatgagtgcgggtacgacctgcttgaccccaggcacgaagccagcagtctcgaagacctacctaaggtgacaatcctggaggacccagaccagaacatccacctcaagaatctgactctgcaccaggccacaacagaagaagaggcccttaatcttctcttcttgggggacacgaaccggatgattgctgagaccccgatgaatcaggccagcaccaggagtcattgcatctttacaatacacctatccagtaaggaacctggatcggccacagtgcgccacgccaagctgcacctggtagatctggctggctctgagcgggttgctaaaactggagtgggggggcaccttctcacagaggccaagtacattaatctgtcgttgcactatcttgaacaggtcatcatcgccttgtcagagaaacaccggtcacatattccttatcgaaacagtatgatgaccagcgtactgcgtgattctcttgggggaaactgcatgactactatgattgcgacactgtccctggaaaaaagaaacctggatgagtccatatccacctgccgctttgctcaacgggtcgcgcttatcaagaacgaggcggttttaaatgaagagataaatcctcgactcgtaatcaaacggctgcagaaagagatccaggagcttaaagacgaactggcaatggtgacaggcgaacaacgaaccgaagccctgaccgaggcagaactgcttcagctcgagaagctcataacctccttcttagaggaccaagatagcgactcccggctggaggtgggcgccgacatgagaaaagtgcaccactgcttccaccacttgaagaagttgctcaacgacaaaaagatccttgagaataacaccgtctccagcgaatcgaaagatcaggactgccaggaaccgctcaaagaggaggagtaccggaaactgcgagatattctcaaacagcgtgataatgaaattaacattctggtaaatatgctgaaaaaggaaaaaaagaaagcccaggaagccctgcatctggccggcatggatagacgagagtttcgtcagtcccagtcaccccccttcaggttgggaaatcccgaggaaggccagcgcatgcgcttaagtagcgctccgagccaggctcaggacttttcaatcctcggaaagcgtagttcactgcttcataaaaagattggtatgcgcgaggaaatgagcttggggtgccaggaagcattcgagatatttaaacgggaccacgccgattctgtgactatcgacgacaataagcagatcctgaaacagcggtttagcgaggcaaaggcactgggcgagtccattaacgaggcccgcagcaagatagggcatttgaaggaggagatcacccagagacatattcagcaagttgccctgggcatcagcgaaaatatggctgtcccattaatgcccgaccagcaggaggagaagctccgatctcagctggaagaggagaagcgtcgctacaagaccatgtttacccgtctgaaggcactgaaggttgaaattgagcacctgcagctcctgatggataaagcaaaagtgaagctgcagaaagaatttgaggtttggtgggccgaagaggcgaccaacctgcaggtgaattccccagctgtcaactcactggaccacaccaaaccctttttgcagacttccgacagtcagcacgagtggtctcaattgctctcaaacaagtcttcgggcggctgggaggtccaggatcaggggacaggcagattcgatgtgtgcgatgtcaatgcacggaagatcctgcctagtccttgcccctcaccccattcccagaagcagtccagtacctcaacacctctggaggacagcattccaaaaaggcccgtatcttcaatccccctgacaggggatagtcagaccgacagcgatatcattgccttcattaaagccaggcagagcatcttgcagaagcagtgtctggggtccaattag

SEQ ID NO: 240080 - DNA, 1962 bp, Artificial Sequence
  derived and/or modified sequence
atggcgagcagcctttatgacctcaagaaagttacaattctcgaggaccctgaccagaacattcatcttaagaatcttacgctgcaccaggccaccaccgaagaagaggcccttaacctgctctttttaggagacacaaatagaatgatcgctgaaacccccatgaatcaggcaagcacccggagccattgtatattcactatacatctctcatccaaagaaccgggctcagcaacagtgcggcatgcaaaactccacctagtcgatctggctgggagtgagagagtcgctaagaccggtgtcggaggacatcttctgacggaggccaaatacatcaatttatcgctccattacctggaacaggtgatcatagcactgtccgagaagcatcgatctcatattccttacagaaattcgatgatgacttctgtgctgcgtgatagcctcggaggcaactgtatgacaaccatgattgccaccctgagcctggagaagcggaatttagatgagtctatatcaacttgcagattcgcccagcgtgttgccttgataaagaacgaagccgttctgaacgaagaaatcaatcccagattggtaattaaaagactccaaaaggagatccaggagcttaaggacgagctggctatggtgacaggcgagcagcgcacagaggctttgactgaggctgagctgttgcagctggagaagttaatcactagttttctcgaggaccaggacagcgatagtagactagaggtgggggctgatatgaggaaggttcaccattgttttcatcacctgaaaaagctgctgaatgataagaagatcctagaaaacaacacagtaagtagcgagagcaaggaccaagattgtcaggaaccactgaaagaagaagagtacagaaagctgagagacatccttaaacagagggataacgagattaacattctggttaatatgctcaaaaaggagaagaagaaggcgcaggaagcattacatctcgccgggatggacagacgagagtttcgccaaagccagagccccccctttcgcctaggcaatcctgaggaaggccagcgaatgcggctcagctctgctccgtcacaggcacaggacttttctattttgggtaagcggtctagcctcctccataagaagatcgggatgcgtgaggagatgtcccttggatgccaagaggctttcgaaattttcaaacgggaccatgctgatagcgtgaccatcgatgacaacaagcagattctaaaacagaggttttccgaggccaaagccctcggggagtctattaacgaagccaggagcaaaattggccatttgaaagaggagatcactcaacggcatattcagcaagtggctctgggaatatccgaaaatatggcagtacccctcatgcctgaccagcaggaagaaaagcttcgctcgcagctcgaagaggaaaagcgcagatacaagactatgttcacccgcctgaaggcgctcaaagtagaaatcgagcacttgcaactacttatggataaggcaaaagtaaaacttcagaaagagttcgaggtctggtgggccgaggaagccacaaacctccaggtgaactcacctgccgttaactcactcgaccacacgaagccttttctgcagacctctgattcgcagcacgagtggtctcagctactctccaacaagtccagtggaggttgggaagttcaggaccaaggcacggggaggttcgatgtgtgcgacgtgaacgccagaaagatcttaccttccccatgcccgtcccctcatagccagaagcaatcgagcacttccacacctttggaggactccattccaaagcgccccgtcagttcaatcccactgacaggtgattcacaaacggattccgacataatagcattcataaaggcacgccagtccatcctacagaagcagtgtctgggaagtaattag

SEQ ID NO: 240081 - DNA, 9082 bp, Artificial Sequence
  derived and/or modified sequence
gttgctaagactgtgggtcgccggaggtggtgggagttagttttggcagcccgggcctgagagaggtcaagggtcattgcagagccagggaggagatggtgaagcagactatccagatattcgcgagggtgaagccccctgtccggaagcaccaacaagggatttattccatagatgaagatgaaaaattaatacctagcttggaaatcatcttaccacgtgatttggcagatgggtttgtgaataataagcgagaaagctacaaatttaaatttcaaagaatttttgatcaggatgcaaaccaagagaccgtttttgaaaacattgccaaaccagttgctgggagtgtcctggcaggttacaatggtaccatctttgcatatgggcaaacaggcagcgggaagacattcactatcacagggggtgcagagcgttacagtgacagaggcattatcccaaggacactgtcatacatttttgaacagttacaaaaggacagcagcaaaatatatacaacacacatttcctatttggaaatctacaatgaatgtggttatgatcttttggatccaagacatgaagcctccagtttggaagatttgccgaaagtgacaatactggaggatcctgatcagaacattcacctgaaaaacttgactctccatcaggcaaccacagaggaagaagctctgaatttgctttttttaggagacaccaaccgaatgattgcagagactcctatgaaccaagcttcaacccgttcccactgcattttcaccattcatttgtcaagcaaggaaccaggatctgcaactgtacgacatgccaaactccatctggttgacctggctggttcagagcgagttgcaaagactggagtagggggccatcttctaacagaggccaagtatatcaacttgtcactacattacttagaacaggttatcattgccctttcagaaaagcaccgttcgcacattccttatagaaactccatgatgaccagtgtcctaagagacagtttgggagggaactgcatgacaactatgattgcaacactctccttggagaaaaggaatcttgatgagtctatatcaacctgcagatttgcacagcgagtggcactcataaagaatgaagctgttcttaatgaagaaattaaccccagattagtgattaaacgcctacaaaaggaaatccaggaactgaaggatgaactggccatggtcactggggagcagaggacagaggcactcacagaagcagagctccttcagctggaaaaactaataacatcctttttggaagaccaggattcagacagtagattagaggttggcgcggatatgcgtaaagttcatcactgttttcatcatttaaagaaactattgaatgacaagaagatccttgaaaacaatacagtctcctctgaaagcaaagaccaagattgtcaagaaccattaaaagaagaagaatatagaaagctacgagatattctgaaacagagagataacgaaatcaatatcctggtcaacatgttaaaaaaagaaaagaagaaagctcaggaggctctccacttggctggcatggatagacgtgaattcagacagtcccagagcccacccttccgcctaggaaacccagaagaaggtcaaagaatgcgactatcctcagctccctcacaggcccaggacttcagcattttggggaaaagatccagtttgctccacaagaaaataggaatgagagaggaaatgtcattaggatgccaggaggcttttgaaatcttcaagagggaccacgctgacagcgttaccatcgatgacaacaaacagattctgaaacagagattttctgaagccaaggccctgggagaaagtataaatgaagcaagaagtaaaattggtcacctgaaggaagaaatcacccagcggcatatacagcaagtagccctaggaatctcggaaaacatggccgtgcctctgatgccagaccagcaggaggagaagctgcgatcacaactggaggaagaaaagagaaggtataaaacaatgttcactcgcctgaaagccctgaaggtggagatcgagcacttgcagctgctcatggacaaagccaaggtgaagctacagaaagagtttgaagtctggtgggcagaggaggccaccaacctgcaggtaaattctccagcagtgaattcactcgatcacacgaagccatttctccagacatctgactcccagcatgaatggtcccaactcctctctaacaaaagttctggaggctgggaagtccaagatcaaggcactggcagattcgatgtctgtgatgtgaatgccaggaaaatcctgccctcgccttgccccagtccacacagccagaaacagagcagcaccagcaccccactggaagacagcatccccaagaggccagtgtcgtccatccctctcaccggagacagccagacggactcggacatcatcgccttcatcaaggccagacagagcattctgcagaagcaatgtttgggaagcaattgaatttccaggaaatatccatccatgaattatgccagcaagaatgaagcacagatgaaggcagcgcccctcacttgctctggcttcagaagtgaactatgggctgctgggagcaactagtgactttgattcccatggaggggactgtgtttctttaaggatgctgacctggaggccaccgagaggctggggctggggctgaccacaacatccttcctgtggttgctggagctgctggcagggccaggcaaggccagagtgctaggggcagggtgaaggcttcagctcactgttgtagtgacgttttgtgtagatctttataagcttttgagaatgtgaaatagcaccatcaaaatataatgtcagaggatgctcacaccagtggaatgtggggggaatatttttatttttaacgatttgccagctctctcccttggcccgtgctctggtttggaagcccagaaatggccatgacaggtccaggcaggatgtcccagccacaggcaaggcagtggaatgcagggcatcctgaaggccaatcctgatctcccagaccacatctttcaccatcagcctcttggccaggatgacctggaggcagtgcctgaacagctgtgtctccagggagccatctgccctgcagggtctaaggacatcatagcacccagagaacagtgggcagctcccaggggctctgctgagagcttgagagagggcagtgtgggtaccttgggcctcacaaccttcacccagccacttgggaggatttgggctgacactccccacttccacagggaaaaacatagctgcctgggggtcttgtctccatgggccctctccatgacagatccaagggaaggtgggcagccctcaaggaggttcttgaagaactgccccctgggccagggggttccaacccagctgcagccagggaggggcagcggagggtgagcaggagtggcacctggaaatgaagctaactggataaaagtgctggtccactgctcctggtgtctctgtcctataaatacaggacctgatgaccctggaggggagcagagtggtaatatagtataattggcttgattttctttttcgttttttaggactgggtaacaggatcatgcaggagaagattaaaccattacatttctaagctaggcaggcccatcgagctcctctaatccacacccctattttatataattagaaggccagagtgaaggggagattcagcttgctgttctatgccactgacaaatgtcccctcttcagggggcttcccctgaccactccatctcgagtcaccccctagttatcccctatcccattaccattttttctgcatcactatctgacatgttatccttccgaacttgcctatttttgaaatacctgcaaccccccataatactaagagctccaatgcaacagggacctgtttgtcttgctcattgctgtgtcccaagcacagagtcgctgttcagtaaacggtccttcagttcatgagtagacgagccagaacccagatgtgtttctcaggctggtgtcactctgacttcccccaggctctgactgaatcccatcgggacaggggccagcatctctggtccactcctggccctcacagttcaatggaacatagtaagccctctgtaaagtctgtagaaccagaggaagaccaaattctgattctagaagcctccccaagagtccatggaacacacatgtaactgcacacacacacacacatacacacacacactctcaagagccctgaagatggcatggcatttgccccagtcccctatgtagcagcagcagtattcttggcatgccttagtgccctcagccctctagagctgggtagagtctactaacttttattttcttttatttttactttcttttatttattttttgagatggggggggtctctgtcagccaggctggggtgcagtggtgcgaccatacctcactagtcagcctccaactcctgggctcaagccatactcagcctccaactcctgggctcaagcgatcctctcacctcagcctccaaagtagctggaactacaggcatgcaccaccacacctagctcgttttaaattttttgtagagacagggtctcactgtgtggctcaggatggtctcaaattcctggccttaagcgatgctcccgccttggcctcccaaagtgctgggattgcaggcatgagccacataccctgccagagtctttcaacattagatctcccactgagacatcatctcctggatccaaaggccttactgacagagatgtgtggcatggccccatgcggggtgtgaaccagcctcctggggcaatcactaagacaggaaaggaaatgaagacagaaaaacacacaacatgggatctggggccactggtgtccagagcatatgcaaagtgtgtgcagcaactggccaaggggccttttgctccgaacatcccctaatggaagcccagcctttgatatggacacatgcttgacagcagtgcaccttcccagagttcactggcctctgcaaatgggagaaattgatgcaatgttttgaaaagactttccagcaatccacctgggatcagtggagccacggatgacaagaagtatctgagttcactctaggccaaaatgtgggattttcaaaaacattttctggaaagcagcctagccagtgactccagcccagtccctgctagaattcaactggctctaccaatcccttgacaagaagtagggtggacggaggttggaggagggaagttaaaatgtagcttgcccagatcttgctaaaaaggagttttagaaagcagatagagaaattgtggtatactgaatacatcattttaattcttcaccaccagtatagaattacacatccaaagctttgtcatggcccactttgactaatgtggtgttggcaaacctgatccaggcagaggcttgaattgtgctctcatggttgagcttgcctcttgctccagtgatctctcttgggatgaacatgccatgggtagctgctgccccttcagcctggaacatccagagagcagacctgagcccagtctacagcctggagcagagcctcccaggcaagcccagcccagatcagctgaactatggctcacccaaagacctattggcatgagaatatatgctgcttgtcataaaccactgaggtttagagtggtttgttatatagcattaattgtagcaatagcagactggcacagaaattggaacccagagacagtatatgactggatctaggatttctcagtgcagagttcattgtctctccatgcagcctgtggaaaggcactgagagcatcctgtatatggaaaagcaggaccaccacctacagccatgatgaagcaacaaggacctgatttaccctcctgctttaaatgactaaaaatgagacaaaatcctctatacaaaccaatggttttcagccattggataacaagcaatatagggtatgattgatccgcaagagaagggaaacaagtgaggggagccctatgattgctccaacttactgcctgcagtgagttttcaggctgcagcccaggaagggggaaccaggtagagcccagtggtttccctgagttgaggaaatggagctgggaatccagggaggacaaagtggcttaaatttgcaaggcagagtcccagggatgagagagagagaaggagagagagaggagaaaaaagagagagaaagagagagagcatgctctggagatcttcagagggttacccttgagtcttcagctaactaccgatcaacatctgcatgtgaagaaattacccaaggcaggggaaagaaccaccaggaggaagcaggtggaataatttcctgagataacactgtgttgggaagagttcatgtttccaacagccagagtggagaaacctcccaaaacagtcattgtatagagacacataaggtactgcctcagaagtggggccaaattagtcctagatgatagattgctctggtcccacctaacaaagcttaaaaagccagccccaaaggagtcaaattgtttccagtaagtttccaagtaacttcaatgagtcccaaaacaaagcttcaaaatatctaaaggaatatgaaaaacaaaccaaaaagaaaccagcatccaacaatatagaatccacaatgtctggtgtccattaaaaaataatcaggcatgcaaagaagcaggaaaatatgggccatgagaggagaaaaaaccatcaatagaaatagaggccgggtgtggtggctcactcctataatcccagcactttgggaggccgaggcaggaggatcacctgaggtcaggagttcaagaacagcctgttcaacatggggaaaccccgtctctactaaaaatacaaaaaatagccgggcatggtgttgcgtacctgtaatcccagctactcagaggctgaggcaggagaattgcttgagcccaggaggcagaggttacagtgagccgaaattgtgccattgcactccagcttgggcaacaagagtgaaactctgtctcaaaaaaaaaaaaaagaaaaaacaaatagaaacagccccaggcatggcacagttgatagagtaaatagacagaaacattttttaaaatgcaatgggtgtgtgtttcaaatctaggcagaaaaaatgctccttgtaattccttaaacataagcatgtctcattcatctggtcattgttttgacaaggatgtgccatccattgtgctaagttctgaggagtcagaggtgacagagacagagaaagtgccagcattcttggaaccttctaacgaaggagagggacaagccaggcatggtggctcacgcctgtaatcccaacactttgggagactgaggctggcggatcacgaggtcaggagtttgagaccaacctggccaacatggcgaaaccccatcgctactaaaaatacaaaaattagctgggtgtggtggtgcgcacctgtaatcccagctactctggaggctgaggcaggacaatcacttgaaccctggaggcagagtttgcagtgagctgagatcgtgccactgcactccaacctgggcaacaagagcgagactccttctctgaaaaaaaaaaaaagagagggacaataaacaagtaagcaagacaatctgattaagaaggagttggggttagctgggcatggtagcaagcgcctgtagtctcagctactcgggaggctgaggtgggaggatccttgaacccaggaggttaaggctgcagtgagctgtgatcacaccactgcactccagcctggatgacagagcaagaccctgtctcagaaaaagaagaaggagttgggggtggggtaggatgggcttggactcactatcaaggtgggtgggagtgtgagaacccggcaaggtgcaaagagagaagcagggaagggaagcttaggacaatgatggcaggttgggtattgggtgatgggaagaggcaaaggacgtggagcttggcaaaaaggggacttgtggggatttgggccatgtgagcatgtgggggagacagtgttccttccataacacgtgtccagggactgccagggctccgaggcagagcaggtgtagagaggttggctgtgaatgttggatgttgaaaacatatgtgtcaaatgtgggaggaaaaagcagtgtttccttgaatacaagctcctcctcaccttgcgaaaagtggcctctgagtgtagccctgaatgcatctcccaaggaataggaggaagcagcaaccttttcagagttaactgctttatttgggttttccatggcctcgtgccagccagcagggctgagccagtttcacccacactgagagggaactcagcaaagagcaagcagcatgccagctggtactcttccctctccattcactcagctcctgatctcaggagggcagcccctccccaggccagcacccctccccttctggccccaggtgtgggatgttgttgttttcttttctccgaaacatctcctgggtttgtcttttccatcactgtctttagactgaggcaagcagtccccatgccttcagccccatgttttgggggtaacctgtgctttgacatgctttgctaaaaactttctaagtctccctctggtgctgggaccagccatgaccaacaacgtcatccatgcaggccacccctaacatagtccaggcctcatgtgggtctcagttcccttttcttctttcaggaagttctccagtgcatgcatagggttgaccagatgtcccaaggtgctctaggacttatgcctatgaagctgttttagggcttcctagtcagtccctggttccaggaaagcagcctgatgaggagatcattcccgctggctggtgtggcatttcttttatggcactacctgggattgggccaccagacctgcgctaacatgctgatttgatggactcttaacatcataggacaaagaatcgtcatgtgaaccaattagacaataaacaaatgcctaagtgcc

SEQ ID NO: 240082 - DNA, 3394 bp, Artificial Sequence
  derived and/or modified sequence
atggcctctagtctgtatgacctcaagaaagtgacaatactggaggatcctgatcagaacattcacctgaaaaacttgactctccatcaggcaaccacagaggaagaagctctgaatttgctttttttaggagacaccaaccgaatgattgcagagactcctatgaaccaagcttcaacccgttcccactgcattttcaccattcatttgtcaagcaaggaaccaggatctgcaactgtacgacatgccaaactccatctggttgacctggctggttcagagcgagttgcaaagactggagtagggggccatcttctaacagaggccaagtatatcaacttgtcactacattacttagaacaggttatcattgccctttcagaaaagcaccgttcgcacattccttatagaaactccatgatgaccagtgtcctaagagacagtttgggagggaactgcatgacaactatgattgcaacactctccttggagaaaaggaatcttgatgagtctatatcaacctgcagatttgcacagcgagtggcactcataaagaatgaagctgttcttaatgaagaaattaaccccagattagtgattaaacgcctacaaaaggaaatccaggaactgaaggatgaactggccatggtcactggggagcagaggacagaggcactcacagaagcagagctccttcagctggaaaaactaataacatcctttttggaagaccaggattcagacagtagattagaggttggcgcggatatgcgtaaagttcatcactgttttcatcatttaaagaaactattgaatgacaagaagatccttgaaaacaatacagtctcctctgaaagcaaagaccaagattgtcaagaaccattaaaagaagaagaatatagaaagctacgagatattctgaaacagagagataacgaaatcaatatcctggtcaacatgttaaaaaaagaaaagaagaaagctcaggaggctctccacttggctggcatggatagacgtgaattcagacagtcccagagcccacccttccgcctaggaaacccagaagaaggtcaaagaatgcgactatcctcagctccctcacaggcccaggacttcagcattttggggaaaagatccagtttgctccacaagaaaataggaatgagagaggaaatgtcattaggatgccaggaggcttttgaaatcttcaagagggaccacgctgacagcgttaccatcgatgacaacaaacagattctgaaacagagattttctgaagccaaggccctgggagaaagtataaatgaagcaagaagtaaaattggtcacctgaaggaagaaatcacccagcggcatatacagcaagtagccctaggaatctcggaaaacatggccgtgcctctgatgccagaccagcaggaggagaagctgcgatcacaactggaggaagaaaagagaaggtataaaacaatgttcactcgcctgaaagccctgaaggtggagatcgagcacttgcagctgctcatggacaaagccaaggtgaagctacagaaagagtttgaagtctggtgggcagaggaggccaccaacctgcaggtaaattctccagcagtgaattcactcgatcacacgaagccatttctccagacatctgactcccagcatgaatggtcccaactcctctctaacaaaagttctggaggctgggaagtccaagatcaaggcactggcagattcgatgtctgtgatgtgaatgccaggaaaatcctgccctcgccttgccccagtccacacagccagaaacagagcagcaccagcaccccactggaagacagcatccccaagaggccagtgtcgtccatccctctcaccggagacagccagacggactcggacatcatcgccttcatcaaggccagacagagcattctgcagaagcaatgtttgggaagcaattgaatttccaggaaatatccatccatgaattatgccagcaagaatgaagcacagatgaaggcagcgcccctcacttgctctggcttcagaagtgaactatgggctgctgggagcaactagtgactttgattcccatggaggggactgtgtttctttaaggatgctgacctggaggccaccgagaggctggggctggggctgaccacaacatccttcctgtggttgctggagctgctggcagggccaggcaaggccagagtgctaggggcagggtgaaggcttcagctcactgttgtagtgacgttttgtgtagatctttataagcttttgagaatgtgaaatagcaccatcaaaatataatgtcagaggatgctcacaccagtggaatgtggggggaatatttttatttttaacgatttgccagctctctcccttggcccgtgctctggtttggaagcccagaaatggccatgacaggtccaggcaggatgtcccagccacaggcaaggcagtggaatgcagggcatcctgaaggccaatcctgatctcccagaccacatctttcaccatcagcctcttggccaggatgacctggaggcagtgcctgaacagctgtgtctccagggagccatctgccctgcagggtctaaggacatcatagcacccagagaacagtgggcagctcccaggggctctgctgagagcttgagagagggcagtgtgggtaccttgggcctcacaaccttcacccagccacttgggaggatttgggctgacactccccacttccacagggaaaaacatagctgcctgggggtcttgtctccatgggccctctccatgacagatccaagggaaggtgggcagccctcaaggaggttcttgaagaactgccccctgggccagggggttccaacccagctgcagccagggaggggcagcggagggtgagcaggagtggcacctggaaatgaagctaactggataaaagtgctggtccactgctcctggtgtctctgtcctataaatacaggacctgatgaccctggaggggagcagagtggtaatatagtataattggcttgattttctttttcgttttttaggactgggtaacaggatcatgcaggagaagattaaaccattacatttctaagctaggcaggcccatcgagctcctctaatccacacccctattttatataattagaaggccagagtgaaggggagattcagcttgctgttctatgccactgacaaatgtcccctcttcagggggcttcccctgaccactccatctcgagtcaccccctagttatcccctatcccattaccattttttctgcatcactatctgacatgttatccttccgaacttgcctatttttgaaatacctgcaaccccccataatactaagagctccaatgcaacagg

SEQ ID NO: 240083 - DNA, 2445 bp, Artificial Sequence
  derived and/or modified sequence
atggtgaagcagaccatccagatctttgcccgggtgaagccccctgtgaggaagcaccagcagggcatctacagcattgatgaagatgagaagctgatccccagcctggagatcatcctgccccgggacctggctgatggctttgtgaacaacaagcgggagagctacaagttcaagttccagaggatctttgaccaggatgccaaccaggagaccgtgtttgaaaatattgccaagcctgtggccggctctgtgctggccggctacaacggcaccatctttgcctacggccagacaggcagcggcaagaccttcaccatcaccggcggcgctgagcgctacagcgaccggggcatcatccccaggaccctgagctacatctttgagcagctgcagaaggacagcagcaagatctacaccacccacatctcctacctggagatctacaatgaatgtggctatgacctgctggaccccaggcatgaggccagcagcctggaggacctgcccaaggtgaccatcctggaggaccctgaccagaacatccacctgaagaacctgaccctgcaccaggccaccacagaggaggaggccctgaacctgctcttcctgggggacaccaacaggatgattgctgagacccccatgaaccaggccagcaccaggagccactgcatcttcaccatccacctgagcagcaaggagcccggcagcgccaccgtgagacatgccaagctgcacctggtggacctggccggcagcgagcgggtggccaagacaggagtgggcggccacctgctgacagaggccaagtacatcaacctgagcctgcactacctggagcaggtgatcatcgccctgtctgagaagcacaggagccacatcccctacagaaacagcatgatgacctctgtgctgcgggacagcctgggcggcaactgcatgaccaccatgattgccaccctgagcctggagaagaggaacctggatgagagcatcagcacctgccgctttgcccagagggtggccctgatcaagaatgaagctgtgctgaatgaggagatcaacccccggctggtgatcaagaggctgcagaaggagatccaggagctgaaggatgagctggccatggtgactggagagcagaggacagaggccctgacagaggccgagctgctgcagctggagaagctgatcaccagcttcctggaggaccaggacagcgacagccggctggaggtgggcgctgacatgaggaaggtgcaccactgcttccaccacctgaagaagctgctgaatgacaagaagatcctggagaacaacacagtgtcctctgagagcaaggaccaggactgccaggagcccctgaaggaggaggagtacaggaagctgcgggacatcctgaagcagagggacaatgagatcaacatcctggtgaacatgctgaagaaggagaagaagaaggcccaggaggccctgcacctggccggcatggaccggcgggagttccggcagagccagagcccccccttccggctgggcaaccctgaggagggccagaggatgaggctgagcagcgcccccagccaggcccaggacttcagcatcctgggcaagaggagcagcctgctgcacaagaagattggcatgagggaggagatgagcctgggctgccaggaggcctttgagatcttcaagagggaccacgccgacagcgtgaccattgatgacaacaagcagatcctgaagcagcgcttcagcgaggccaaggccctgggggagagcatcaatgaggcccggagcaagattggccacctgaaggaggagatcacccagaggcacatccagcaggtggccctgggcatcagcgagaacatggctgtgcccctgatgccagaccagcaggaggagaagctgcggagccagctggaggaggagaagaggcgctacaagaccatgttcacccggctgaaggccctgaaggtggagattgagcacctgcagctgctgatggacaaggccaaggtgaagctgcagaaggagtttgaggtgtggtgggccgaggaggccaccaacctgcaggtgaacagccctgctgtgaacagcctggaccacaccaagcccttcctgcagaccagtgacagccagcacgagtggagccagctgctgagcaacaagagcagcggcggctgggaggtgcaggaccagggcaccggccgctttgatgtgtgtgatgtgaatgccaggaagatcctgcccagcccctgccccagcccccacagccagaagcagagcagcaccagcacccccctggaggacagcatccccaagaggcctgtgagcagcatccccctgaccggggacagccagacagacagcgacatcatcgccttcatcaaggcccggcagagcatcctgcagaagcagtgcctgggcagcaactag

SEQ ID NO: 240084 - DNA, 1962 bp, Artificial Sequence
  derived and/or modified sequence
atggccagcagcctgtatgacctgaagaaggtgaccatcctggaggaccctgaccagaacatccacctgaagaacctgaccctgcaccaggccaccacagaggaggaggccctgaacctgctcttcctgggggacaccaacaggatgattgctgagacccccatgaaccaggccagcaccaggagccactgcatcttcaccatccacctgagcagcaaggagcccggcagcgccaccgtgagacatgccaagctgcacctggtggacctggccggcagcgagcgggtggccaagacaggagtgggcggccacctgctgacagaggccaagtacatcaacctgagcctgcactacctggagcaggtgatcatcgccctgtctgagaagcacaggagccacatcccctacagaaattccatgatgacctctgtgctgcgggacagcctgggcggcaactgcatgaccaccatgattgccaccctgagcctggagaagaggaacctggatgagagcatcagcacctgccgctttgcccagagggtggccctgatcaagaatgaggccgtgctgaatgaggagatcaacccccggctggtgatcaagaggctgcagaaggagatccaggagctgaaggatgagctggccatggtgactggagagcagaggacagaggccctgacagaagctgagctgctgcagctggagaagctgatcaccagcttcctggaggaccaggacagcgacagccggctggaggtgggcgctgacatgaggaaggtgcaccactgcttccaccacctgaagaagctgctgaatgacaagaagatcctggagaacaacacagtgagcagcgagagcaaggaccaggactgccaggagcccctgaaggaggaggagtacaggaagctgcgggacatcctgaagcagagggacaatgagatcaacatcctggtgaacatgctgaagaaggagaagaagaaggcccaggaggccctgcacctggccggcatggacagaagagagttccggcagagccagagcccccccttccggctgggcaaccctgaggagggccagaggatgaggctgagcagcgcccccagccaggcccaggacttcagcatcctgggcaagaggagcagcctgctgcacaagaagattggcatgagggaggagatgagcctgggctgccaggaggcctttgagatcttcaagagggaccatgctgacagcgtgaccattgatgacaacaagcagatcctgaagcagcgcttcagcgaggccaaggccctgggggagagcatcaatgaggcccggagcaagattggccacctgaaggaggagatcacccagaggcacatccagcaggtggccctgggcatcagcgagaacatggctgtgcccctgatgccagaccagcaggaggagaagctgcggagccagctggaggaggagaagaggcgctacaagaccatgttcacccggctgaaggccctgaaggtggagattgagcacctgcagctgctgatggacaaggccaaggtgaagctgcagaaggagtttgaggtgtggtgggccgaggaggccaccaacctgcaggtgaacagccctgctgtgaacagcctggaccacaccaagcccttcctgcagaccagtgacagccagcacgagtggagccagctgctgagcaacaagagcagcggcggctgggaggtgcaggaccagggcaccggccgctttgatgtgtgtgatgtgaatgccaggaagatcctgcccagcccctgccccagcccccacagccagaagcagagcagcaccagcacccccctggaggacagcatccccaagaggcctgtgagcagcatccccctgactggagacagccagacagacagcgacatcatcgccttcatcaaggcccggcagagcatcctgcagaagcagtgcctgggcagcaactag

SEQ ID NO: 240085 - DNA, 2445 bp, Artificial Sequence
  derived and/or modified sequence
atggtgaagcagaccatccagatcttcgcccgggtgaagccccccgtccgaaaacatcagcaggggatttactctatagacgaagacgaaaagttgataccatcacttgagattattctaccgagggacttagcggatggcttcgtgaacaacaagcgcgaatcctacaaatttaagtttcagcgtatctttgaccaagacgctaatcaggaaactgtctttgaaaacattgccaagccagtagctggatctgtgctcgctggctataatggcaccattttcgcttatggtcaaaccggcagtggcaagacttttacaattaccggcggtgccgagcggtattccgacagaggaattatccctaggactttatcgtatatcttcgaacagctgcagaaagactctagcaagatttacacgacacacatctcatatttggaaatttacaatgagtgtggctatgatttactcgatccccggcacgaggcttcaagcctggaagaccttccaaaggtgacgattcttgaggatcccgaccagaatattcatctaaagaatctaactctgcaccaggcaacaactgaggaagaagctctgaacttactgttcctcggggacaccaatagaatgatagcagagacaccaatgaatcaggcgtctacccgcagccattgtatcttcactattcatctgagctctaaggagcccgggagcgccacagtcaggcatgccaagttgcatctcgtggacctggcggggtctgagagggtcgctaaaaccggtgtggggggccacctgctcaccgaggccaaatacatcaacttgagtctgcactacttggagcaggtgataatcgctctctccgaaaagcaccggtcccacattccatacaggaatagcatgatgacttccgtgcttagggattctttgggaggcaactgcatgaccactatgattgctaccctcagcctggagaaacgcaacttagacgagtccattagcacatgtaggttcgcccagagggtggccttgattaaaaatgaggccgtgttgaacgaggagataaacccccggcttgtgattaaacgcctacaaaaggaaatccaagaactcaaggacgagttggccatggttacaggcgaacagagaactgaagctctcacagaagcagagctgttgcaacttgagaagttaattacttccttcctggaagatcaggattcagacagtagactagaggttggggcagacatgaggaaagtacatcattgcttccatcacttgaaaaaactcctgaatgacaagaaaattctagagaacaataccgtgagctctgagtctaaggaccaagactgtcaggagccgcttaaggaagaggagtatagaaaactgagggatatcctcaagcagagagataatgaaattaacatcttagtgaacatgctgaaaaaagaaaaaaagaaggctcaggaagcacttcaccttgccggtatggaccgacgcgaattccgccagtcccagagccccccattcagattgggaaatcctgaggagggtcagcgaatgcgactgtccagcgctccatcacaggcacaggacttttccatcttaggcaaacgtagtagcctcctccacaagaagatagggatgagggaggaaatgagcctgggttgtcaggaggctttcgagatttttaagcgggaccatgccgatagtgtcactattgacgataataagcagattttgaagcaaagattcagtgaagccaaggctttgggagagtctataaatgaggccaggtcaaagatcggccatctcaaagaggagataactcagaggcatatccagcaggtggccctggggatttctgaaaatatggctgtgcctctgatgccagatcagcaggaggagaagctgagatcacagctagaggaggaaaagcggcggtacaagaccatgtttacccggttgaaggctctgaaggtggagatcgagcatctccagctcttgatggataaggctaaggttaagctgcaaaaggaattcgaagtgtggtgggccgaggaagccaccaacttacaggtcaatagccctgctgtgaattccctggaccacactaaaccatttctgcagacctctgattcccagcatgaatggtctcagctccttagtaacaagtcctctggcggctgggaggtgcaagatcagggtaccggccggtttgacgtttgtgatgtgaacgcgcgcaaaatcctcccatctccctgcccatccccacactctcaaaagcagtcatctacctctacacctctagaagattctatccccaagcgcccggtttcatcgatccctctcacaggtgattctcagaccgattccgacattatcgctttcataaaagctcggcaatccatcctgcagaagcaatgtctgggatccaactag

SEQ ID NO: 240086 - DNA, 1962 bp, Artificial Sequence
  derived and/or modified sequence
atggccagcagcctgtacgacctgaagaaggtgaccatcctggaggaccctgatcaaaacattcatctgaagaatctgaccctgcaccaagccacaactgaagaagaggcgctcaatctcctgttcctgggggacaccaatagaatgatcgccgaaacacctatgaatcaggcatcgacccggtcccattgcatctttactatccatctgtcctcaaaggagcccggatccgccaccgttcggcatgccaagcttcatctagtggacttggctggaagcgagcgcgtggccaaaacgggagtgggagggcacctactgacggaagcaaagtatataaatcttagtctccactacctggaacaagttattatcgctctgtctgagaagcaccgcagccacatcccttaccggaacagcatgatgacgtcagtgctgcgcgactcgttaggtggaaactgtatgaccactatgattgcaaccctatcgctggaaaagcggaacctagatgagagcatatctacatgcaggttcgcacagagggtcgctcttattaaaaatgaggcagttctcaacgaggaaatcaatccccgcttagtgattaagcgtctccaaaaagagattcaggagttgaaggatgaactcgcaatggtgactggggagcagcgcaccgaagcactgacggaggcagaactattgcagctggagaagctgataacgagcttcctggaagaccaggattctgactccagactggaggtgggggctgatatgaggaaagtgcatcactgttttcaccatctgaagaagttactcaatgataagaaaatcttggaaaataataccgtatcatccgaatcaaaggaccaagattgccaggagccactgaaggaagaggagtatcgaaaactgagagatatactaaaacagagagacaatgaaatcaacattttagtgaacatgctgaagaaagagaaaaaaaaggctcaggaggccctccacttggccggcatggatagacgtgagtttcggcagagccagtccccgccctttcgactgggtaatccagaggagggacagcggatgcgcctgtccagcgccccgtcacaggcacaagacttttccattttggggaagcggagctcactgctccataagaagatcggtatgcgcgaagaaatgagcctggggtgccaggaagctttcgagatctttaaacgtgaccatgccgactccgtcaccattgacgacaacaagcaaatcctgaaacagcgctttagcgaggccaaagccctgggtgaaagcattaatgaggccagatccaagataggtcacttgaaagaggaaattactcagagacacattcagcaggtcgccctggggatctcagagaatatggcagttcccctgatgccagaccaacaggaagaaaagctcagaagccagctcgaagaagagaaaagaagatataaaacaatgtttactagacttaaggccctcaaagtggaaatcgaacaccttcagctgcttatggacaaagctaaagtaaaactgcagaaggagttcgaggtatggtgggctgaagaggctacaaacctgcaggtcaacagcccagcagtgaacagtctggaccataccaaaccattcttgcagactagtgactctcagcacgaatggtcccagttgctgtccaacaagagtagcggaggctgggaagttcaggatcagggtaccggccggttcgatgtgtgcgacgtgaacgcccggaaaatcctccccagcccgtgtccaagtccccatagccagaaacagtcttctactagcactcccctggaggatagcatcccaaagcggcccgtctcttccattcccttgacaggagacagccagaccgatagcgacattatcgcctttatcaaagctagacagagcatcctacagaagcagtgcttgggttcaaactag

SEQ ID NO: 240087 - DNA, 2445 bp, Artificial Sequence
  derived and/or modified sequence
atggtcaagcagacaatccagatattcgctcgcgtgaagcccccagttcgaaaacatcaacagggaatttatagcatcgatgaagatgaaaaactcatccccagcctcgagatcattttaccaagggacctggcagacggctttgtaaataataagagagagagctacaagttcaagttccagcgaatctttgaccaagacgcaaaccaggagacagtcttcgagaacatcgcgaagcctgtggctgggtctgtgctggccggttataatgggacgattttcgcctatggacagactggcagcgggaaaacttttacaatcaccggtggggctgagcgatacagcgatcggggaatcattccccgtacgttgtcttacattttcgagcaactgcaaaaggactcctccaagatttataccacccacataagttacctggagatttacaatgagtgtgggtatgaccttcttgacccgagacatgaggcttcgtctctggaggatctgcccaaggtgaccatattggaagacccagatcagaacatccatctgaaaaatcttacgttgcaccaggccaccacagaggaggaagccttgaatctgctgtttctcggagacacaaatcgtatgatcgcagaaacacctatgaaccaggcctcaactcggtcccattgtatcttcactatccacctgtcatcaaaggaacccggatcggcaaccgttcgtcacgctaagctgcacctggtcgaccttgccggatctgaaagagtggccaagacaggagtgggaggccacctcctgacagaggctaaatatatcaatctcagcctacattacctggagcaggtgataatagcactgtcagagaaacatagaagccacatcccataccggaactcaatgatgacctctgttttaagggatagtctcggaggtaactgcatgacgactatgatcgcaacactcagcctagagaaacggaatctggatgaatccatatctacctgcagatttgcacagagggtggcgctcatcaagaacgaggccgtgctgaacgaagagattaacccccgactggtgatcaaacggctccagaaggagattcaggaattaaaggatgagttagccatggtcactggcgaacaacgcacagaggccttaactgaagcagagctgctgcagctggaaaagctgattacatcatttctggaggatcaagatagcgattctcgactggaagttggagctgacatgcggaaggtgcatcactgtttccatcatcttaagaagttgctcaacgataagaagattctggagaacaataccgtaagcagcgaaagtaaagatcaagattgccaagagccactcaaggaggaggagtatagaaagttaagagatatattgaagcagagggacaacgaaataaacatcctcgtcaatatgctaaagaaggagaaaaagaaggcacaggaggcactacatcttgctggcatggatagacgcgagttcaggcagtcacaaagtcccccttttaggctcgggaacccagaagagggtcagcgcatgagattgtcctctgctccatcccaggcccaggatttcagcattctgggcaagcgatctagcctgctccacaagaaaatcgggatgcgtgaagaaatgtctttaggatgccaggaggcctttgagattttcaaacgcgaccacgctgactccgtgacaatcgatgataataaacagatcctcaagcagcgcttctccgaagccaaagccctgggcgagtcaatcaatgaagcacgaagcaagatcggacacctgaaagaagaaatcacacagagacatatacagcaggtagcgctggggatctctgagaatatggccgtgcccttaatgcccgatcagcaggaggagaagcttagaagtcaactcgaggaggagaagcgtaggtataaaaccatgttcacacgtctaaaggccctgaaggtggagatcgaacatttgcagcttcttatggacaaagccaaggttaaactgcagaaggaattcgaagtttggtgggcagaggaggccacaaatttacaagttaactcccctgcagtgaactctttggaccataccaagccttttctgcagacgtccgactcacagcatgagtggtctcaactcctctccaacaaatcgtctggcggatgggaggtccaggaccaggggaccggcagattcgacgtttgcgatgttaacgcacgcaagattttaccaagtccctgtccatccccgcacagccagaaacagtcctccaccagtactcctctggaggactctatacccaagcgaccagtatccagcattcctttgactggtgacagccagactgactctgatatcatcgccttcatcaaggccagacagtccatactgcagaagcagtgcctgggaagtaactag

SEQ ID NO: 240088 - DNA, 1962 bp, Artificial Sequence
  derived and/or modified sequence
atggccagcagtttgtatgacttaaaaaaagttacgatcctggaggatcccgatcagaacatccatctgaagaatctgactctgcaccaagcgacaaccgaggaagaagccctcaatctgctgttcttaggtgacaccaatagaatgattgctgagacaccgatgaaccaggcgagcacgagatctcattgcatcttcaccatccaccttagttccaaagaaccaggatccgccaccgtgaggcatgctaagctgcatctcgttgatctggcgggaagcgagagggtggccaagacaggtgtcggcggtcatctgctaacagaggcgaaatacataaatctgagtctgcattatttagaacaggtgatcatcgcgctaagcgagaagcacagatcccatatcccgtatcgcaacagtatgatgacaagtgtcctgcgggattcactcggaggaaattgcatgaccactatgatagctaccctctccctggagaaacggaatttggatgaatcgatctctacatgtcgatttgcccaacgagtggccctcatcaagaacgaggctgtgcttaatgaggagatcaatcctcgactcgtaatcaaaagacttcagaaagaaatccaagagttgaaggacgaactggccatggtgacaggagaacagcggaccgaagcacttacagaggccgaattgctgcagctcgagaagctgattacttcttttctggaagatcaggactcggactccaggctcgaggtcggggctgatatgcgaaaagtgcatcactgttttcatcacctcaagaagttgctaaatgataagaagatactggagaacaataccgtttcgtctgagtctaaagatcaggattgtcaggagcctttgaaagaggaggaataccgaaagctgagggatatcttaaaacagagagacaatgaaattaatatcttggtgaacatgttgaagaaggagaagaagaaggcccaggaagccctgcacctggcgggtatggaccggcgtgagtttcggcagtcacagagccccccttttaggctgggcaacccagaggaggggcagcggatgagactatcttcggctccatcccaagcccaggacttttctattcttggtaagaggtccagcctgctacataagaagatcggaatgagggaagaaatgagtctcggatgccaggaagcctttgagattttcaagagagatcacgctgacagtgttacgatcgacgacaataaacagatcctcaaacaaagattcagcgaggccaaggcgctgggcgaaagcataaacgaagccaggagtaagataggccatctgaaagaagaaatcactcagcgccacatccagcaggtggcattgggaatatccgagaacatggctgtgccacttatgcctgatcagcaggaagaaaagcttagaagccagctcgaggaagagaaaagacgttataaaactatgttcaccagattgaaggctctgaaggtcgaaatcgagcacttacagctcttgatggataaagccaaagttaagttgcagaaagagttcgaggtgtggtgggccgaggaggctactaacctgcaggttaacagtcctgcagtgaactcgcttgaccacactaagcctttccttcagacaagtgacagccagcatgaatggtcgcaattgctgagcaataaaagtagtggaggctgggaagtgcaagatcaggggactggaaggttcgacgtctgtgatgtgaatgcacggaagatccttccgtcaccctgcccgtcaccacactcgcagaaacaaagtagtaccagtacacccctggaggatagtataccgaagaggccggtctctagcattccacttaccggcgactctcagacagacagcgatatcatcgcttttatcaaggcacggcaaagcattttacagaaacagtgtctgggttctaactag

SEQ ID NO: 240089 - DNA, 2445 bp, Artificial Sequence
  derived and/or modified sequence
atggtgaagcagaccatccagatcttcgccagagtgaagccccccgtgagaaagcaccagcagggcatctacagcatcgacgaggacgagaagctgatccccagcctggagatcatcctgcccagagacctggccgacggcttcgtgaacaacaagagagagagctacaagttcaagttccagagaatcttcgaccaggacgccaaccaggagaccgtgttcgagaacatcgccaagcccgtggccggcagcgtgctggccggctacaacggcaccatcttcgcctacggccagaccggcagcggcaagaccttcaccatcaccggcggcgccgagagatacagcgacagaggcatcatccccagaaccctgagctacatcttcgagcagctgcagaaggacagcagcaagatctacaccacccacatcagctacctggagatctacaacgagtgcggctacgacctgctggaccccagacacgaggccagcagcctggaggacctgcccaaggtgaccatcctggaggaccccgaccagaacatccacctgaagaacctgaccctgcaccaggccaccaccgaggaggaggccctgaacctgctgttcctgggcgacaccaacagaatgatcgccgagacccccatgaaccaggccagcaccagaagccactgcatcttcaccatccacctgagcagcaaggagcccggcagcgccaccgtgagacacgccaagctgcacctggtggacctggccggcagcgagagagtggccaagaccggcgtgggcggccacctgctgaccgaggccaagtacatcaacctgagcctgcactacctggagcaggtgatcatcgccctgagcgagaagcacagaagccacatcccctacagaaacagcatgatgaccagcgtgctgagagacagcctgggcggcaactgcatgaccaccatgatcgccaccctgagcctggagaagagaaacctggacgagagcatcagcacctgcagattcgcccagagagtggccctgatcaagaacgaggccgtgctgaacgaggagatcaaccccagactggtgatcaagagactgcagaaggagatccaggagctgaaggacgagctggccatggtgaccggcgagcagagaaccgaggccctgaccgaggccgagctgctgcagctggagaagctgatcaccagcttcctggaggaccaggacagcgacagcagactggaggtgggcgccgacatgagaaaggtgcaccactgcttccaccacctgaagaagctgctgaacgacaagaagatcctggagaacaacaccgtgagcagcgagagcaaggaccaggactgccaggagcccctgaaggaggaggagtacagaaagctgagagacatcctgaagcagagagacaacgagatcaacatcctggtgaacatgctgaagaaggagaagaagaaggcccaggaggccctgcacctggccggcatggacagaagagagttcagacagagccagagcccccccttcagactgggcaaccccgaggagggccagagaatgagactgagcagcgcccccagccaggcccaggacttcagcatcctgggcaagagaagcagcctgctgcacaagaagatcggcatgagagaggagatgagcctgggctgccaggaggccttcgagatcttcaagagagaccacgccgacagcgtgaccatcgacgacaacaagcagatcctgaagcagagattcagcgaggccaaggccctgggcgagagcatcaacgaggccagaagcaagatcggccacctgaaggaggagatcacccagagacacatccagcaggtggccctgggcatcagcgagaacatggccgtgcccctgatgcccgaccagcaggaggagaagctgagaagccagctggaggaggagaagagaagatacaagaccatgttcaccagactgaaggccctgaaggtggagatcgagcacctgcagctgctgatggacaaggccaaggtgaagctgcagaaggagttcgaggtgtggtgggccgaggaggccaccaacctgcaggtgaacagccccgccgtgaacagcctggaccacaccaagcccttcctgcagaccagcgacagccagcacgagtggagccagctgctgagcaacaagagcagcggcggctgggaggtgcaggaccagggcaccggcagattcgacgtgtgcgacgtgaacgccagaaagatcctgcccagcccctgccccagcccccacagccagaagcagagcagcaccagcacccccctggaggacagcatccccaagagacccgtgagcagcatccccctgaccggcgacagccagaccgacagcgacatcatcgccttcatcaaggccagacagagcatcctgcagaagcagtgcctgggcagcaactag

SEQ ID NO: 240090 - DNA, 1962 bp, Artificial Sequence
  derived and/or modified sequence
atggccagcagcctgtacgacctgaagaaggtgaccatcctggaggaccccgaccagaacatccacctgaagaacctgaccctgcaccaggccaccaccgaggaggaggccctgaacctgctgttcctgggcgacaccaacagaatgatcgccgagacccccatgaaccaggccagcaccagaagccactgcatcttcaccatccacctgagcagcaaggagcccggcagcgccaccgtgagacacgccaagctgcacctggtggacctggccggcagcgagagagtggccaagaccggcgtgggcggccacctgctgaccgaggccaagtacatcaacctgagcctgcactacctggagcaggtgatcatcgccctgagcgagaagcacagaagccacatcccctacagaaacagcatgatgaccagcgtgctgagagacagcctgggcggcaactgcatgaccaccatgatcgccaccctgagcctggagaagagaaacctggacgagagcatcagcacctgcagattcgcccagagagtggccctgatcaagaacgaggccgtgctgaacgaggagatcaaccccagactggtgatcaagagactgcagaaggagatccaggagctgaaggacgagctggccatggtgaccggcgagcagagaaccgaggccctgaccgaggccgagctgctgcagctggagaagctgatcaccagcttcctggaggaccaggacagcgacagcagactggaggtgggcgccgacatgagaaaggtgcaccactgcttccaccacctgaagaagctgctgaacgacaagaagatcctggagaacaacaccgtgagcagcgagagcaaggaccaggactgccaggagcccctgaaggaggaggagtacagaaagctgagagacatcctgaagcagagagacaacgagatcaacatcctggtgaacatgctgaagaaggagaagaagaaggcccaggaggccctgcacctggccggcatggacagaagagagttcagacagagccagagcccccccttcagactgggcaaccccgaggagggccagagaatgagactgagcagcgcccccagccaggcccaggacttcagcatcctgggcaagagaagcagcctgctgcacaagaagatcggcatgagagaggagatgagcctgggctgccaggaggccttcgagatcttcaagagagaccacgccgacagcgtgaccatcgacgacaacaagcagatcctgaagcagagattcagcgaggccaaggccctgggcgagagcatcaacgaggccagaagcaagatcggccacctgaaggaggagatcacccagagacacatccagcaggtggccctgggcatcagcgagaacatggccgtgcccctgatgcccgaccagcaggaggagaagctgagaagccagctggaggaggagaagagaagatacaagaccatgttcaccagactgaaggccctgaaggtggagatcgagcacctgcagctgctgatggacaaggccaaggtgaagctgcagaaggagttcgaggtgtggtgggccgaggaggccaccaacctgcaggtgaacagccccgccgtgaacagcctggaccacaccaagcccttcctgcagaccagcgacagccagcacgagtggagccagctgctgagcaacaagagcagcggcggctgggaggtgcaggaccagggcaccggcagattcgacgtgtgcgacgtgaacgccagaaagatcctgcccagcccctgccccagcccccacagccagaagcagagcagcaccagcacccccctggaggacagcatccccaagagacccgtgagcagcatccccctgaccggcgacagccagaccgacagcgacatcatcgccttcatcaaggccagacagagcatcctgcagaagcagtgcctgggcagcaactag

SEQ ID NO: 240091 - protein, 470 aa, Artificial Sequence
  derived and/or modified sequence
MADSGLREPQEDSQKDLENDPSVNSQAQETTIIASNAEEAEILHSACGLSKDHQEVETEGPESADTGDKSESPDEANVGKHPKDKTEDENKQSFLDGGKGHHLPSENLGKEPLDPDPSHSPSDKVGRADAHLGSSSVALPKEASDGTGASQEPPTTDSQEAQSPGHSSAGQEGEDTLRRRLLAPEAGSHPQQTQKLEEIKENAQDTMRQINKKGFWSYGPVILVVLVVAVVASSVNSYYSSPAQQVPKNPALEAFLAQFSQLEDKFPGQSSFLWQRGRKFLQKHLNASNPTEPATIIFTAAREGRETLKCLSHHVADAYTSSQKVSPIQIDGAGRTWQDSDTVKLLVDLELSYGFENGQKAAVVHHFESFPAGSTLIFYKYCDHENAAFKDVALVLTVLLEEETLEASVGPRETEEKVRDLLWAKFTNSDTPTSFNHMDSDKLSGLWSRISHLVLPVQPVSSIEEQGCLF

SEQ ID NO: 240092 - DNA, 1413 bp, Artificial Sequence
  derived and/or modified sequence
atggccgacagcggcctgagagagccccaggaggacagccagaaggacctggagaacgaccccagcgtgaacagccaggcccaggagaccaccatcatcgccagcaacgccgaggaggccgagatcctgcacagcgcctgcggcctgagcaaggaccaccaggaggtggagaccgagggccccgagagcgccgacaccggcgacaagagcgagagccccgacgaggccaacgtgggcaagcaccccaaggacaagaccgaggacgagaacaagcagagcttcctggacggcggcaagggccaccacctgcccagcgagaacctgggcaaggagcccctggaccccgaccccagccacagccccagcgacaaggtgggcagagccgacgcccacctgggcagcagcagcgtggccctgcccaaggaggccagcgacggcaccggcgccagccaggagccccccaccaccgacagccaggaggcccagagccccggccacagcagcgccggccaggagggcgaggacaccctgagaagaagactgctggcccccgaggccggcagccacccccagcagacccagaagctggaggagatcaaggagaacgcccaggacaccatgagacagatcaacaagaagggcttctggagctacggccccgtgatcctggtggtgctggtggtggccgtggtggccagcagcgtgaacagctactacagcagccccgcccagcaggtgcccaagaaccccgccctggaggccttcctggcccagttcagccagctggaggacaagttccccggccagagcagcttcctgtggcagagaggcagaaagttcctgcagaagcacctgaacgccagcaaccccaccgagcccgccaccatcatcttcaccgccgccagagagggcagagagaccctgaagtgcctgagccaccacgtggccgacgcctacaccagcagccagaaggtgagccccatccagatcgacggcgccggcagaacctggcaggacagcgacaccgtgaagctgctggtggacctggagctgagctacggcttcgagaacggccagaaggccgccgtggtgcaccacttcgagagcttccccgccggcagcaccctgatcttctacaagtactgcgaccacgagaacgccgccttcaaggacgtggccctggtgctgaccgtgctgctggaggaggagaccctggaggccagcgtgggccccagagagaccgaggagaaggtgagagacctgctgtgggccaagttcaccaacagcgacacccccaccagcttcaaccacatggacagcgacaagctgagcggcctgtggagcagaatcagccacctggtgctgcccgtgcagcccgtgagcagcatcgaggagcagggctgcctgttctag

SEQ ID NO: 240093 - DNA, 1413 bp, Artificial Sequence
  derived and/or modified sequence
atggccgacagtgggctaagagagccacaggaagactcccagaaagatttggagaatgaccctagcgtgaacagccaggcccaagagaccaccatcatcgctagcaacgctgaggaggctgaaatcctccatagcgcttgcggtctcagcaaggaccatcaggaagtagagacagagggccctgaaagcgccgacacaggggacaagtcagaatccccagacgaagctaatgtaggcaagcaccccaaggacaagacagaggatgagaacaaacagtctttcctggacggcggaaagggacatcacctaccaagtgaaaatttgggaaaagagccgctcgatcccgaccctagtcattcccccagtgataaagtaggcagggcagacgctcacctgggatctagtagtgtcgctctacccaaggaggcatctgacggcactggcgcatctcaggaaccacctactacggactcacaggaagcacagagccctggtcacagtagtgccggacaggagggggaggataccttgcggcgccgcctcctggcccccgaggccggatctcatccccaacagacgcagaagctggaagagatcaaggaaaatgctcaggacacgatgcggcaaattaacaaaaaggggttttggagctacggacccgtgatcctggtggtcttggtagtagccgtggtggcgagcagtgtgaactcgtactatagctctccagcgcaacaggtgccaaaaaatccagcgctggaagccttcctggcccagttctcccagctagaggataaattccctggacagtctagcttcctctggcagcgcggtcggaagttcctgcagaagcatctgaatgctagcaaccctaccgaacctgcaaccattatcttcacggcggccagagaaggtcgggagaccctgaagtgcctgagccaccacgtggcagacgcatacacatcgtctcagaaagtgtctcccatccagatcgatggagcaggccgaacctggcaggactctgacacggttaagctgctcgtggacctggaactatcgtacggattcgagaatggacagaaagccgcagtagtgcaccactttgagtcatttccagccggctcgacgcttattttctacaagtattgcgaccacgagaacgctgcatttaaagatgtcgctcttgttctgaccgtgctccttgaggaggagaccttggaagcttccgtcgggccacgcgagacagaagagaaggttcgcgacctgctatgggctaaattcacaaactcagatacccccacatcatttaatcacatggactcagacaagttgtcaggcctttggtccagaattagtcacctcgtcctgccagtgcaaccggtctcttccatcgaggagcaaggttgccttttctag

SEQ ID NO: 240094 - DNA, 1413 bp, Artificial Sequence
  derived and/or modified sequence
atggctgacagcggcctgcgggagccccaggaggacagccagaaggacctggagaatgaccccagcgtgaacagccaggcccaggagaccaccatcatcgccagcaatgctgaggaggccgagatcctgcacagcgcctgtggcctgagcaaggaccaccaggaggtggagacagagggccctgagagcgctgacaccggggacaagtctgagagcccagatgaggccaacgtgggcaagcaccccaaggacaagacagaagatgagaacaagcagagcttcctggatggcggcaagggccaccacctgcccagcgagaacctgggcaaggagcccctggaccctgaccccagccacagccccagcgacaaggtgggccgggcagatgcccacctgggcagcagctctgtggccctgcccaaggaggccagtgatggcactggagccagccaggagccccccaccacagacagccaggaggcccagagccctggccacagcagcgctggccaggagggggaggacaccctgcggcggcggctgctggcccctgaggccggcagccacccccagcagacccagaagctggaggagatcaaggaaaatgcccaggacaccatgaggcagatcaacaagaagggcttctggagctatggccctgtgatcctggtggtgctggtggtggccgtggtggccagctctgtgaacagctactacagcagccctgcccagcaggtgcccaagaacccagccctggaggccttcctggcccagttcagccagctggaggacaagtttcctggccagagcagcttcctgtggcagaggggcaggaagttcctgcagaagcacctgaatgccagcaaccccacagagcccgccaccatcatcttcaccgctgcccgggagggccgggagaccctgaagtgcctgagccaccacgtggctgatgcctacaccagcagccagaaggtgagccccatccagattgatggagctggccgcacctggcaggacagcgacacagtgaagctgctggtggacctggagctgtcctatggctttgaaaatggccagaaggctgctgtggtgcaccactttgagagcttccctgctggcagcaccctcatcttctacaagtactgtgaccatgaaaatgctgccttcaaggatgtggccctggtgctgactgtgctgctggaggaggagaccctggaggcctctgtgggcccccgggagacagaggagaaggtgcgggacctgctgtgggccaagttcaccaacagcgacacccccaccagcttcaaccacatggacagcgacaagctgagcggcctgtggagccgcatcagccacctggtgctgcctgtgcagcctgtgagcagcattgaggagcagggctgcctcttctag

SEQ ID NO: 240095 - DNA, 1413 bp, Artificial Sequence
  derived and/or modified sequence
atggccgacagcggcctgcgggagccccaggaggacagccagaaggatttggaaaacgaccccagcgtaaatagccaggcccaggaaactactattattgcctccaatgccgaagaggccgaaattttgcacagtgcgtgcggactgtccaaggaccaccaggaagtagagactgaaggtcccgagagcgcggatactggggataagagcgagtcacccgatgaagcaaatgtcgggaaacaccccaaagataagaccgaggatgagaacaagcaaagtttcctggatggagggaagggccatcacctcccctctgaaaatttgggtaaggagcccctggatccagacccttctcactcaccctctgataaggtgggaagagccgacgctcatcttgggtcttcgtccgttgcactgcccaaggaagcctcagacggaacaggagccagccaagaaccacctactactgattcccaggaggcacagtctcctggccacagttccgctggccaggaaggggaggatacccttagacgtcggctgctcgcgcccgaagcaggatctcatccgcagcagacccaaaagctcgaggagattaaggagaatgcgcaggatacgatgagacagatcaacaagaaaggcttttggagttacggaccagttatcctcgtggtcctcgtggttgccgtggttgctagcagtgtgaacagctactattctagccccgcccaacaggtccctaagaatcccgctcttgaggccttcttggcccagttttctcaattggaggacaaatttcctggccagtcctcatttctctggcaacggggccgcaaatttcttcagaaacatctgaatgcctccaacccaacggaaccagccactatcattttcacagccgccagagaaggaagagaaactctgaagtgcctttcacaccatgtcgccgatgcttacaccagcagccaaaaggtgtccccaatccagatcgatggcgccgggaggacatggcaagattcggacaccgtcaagttgctagttgacctcgagctgtcatatggattcgagaatgggcagaaagctgccgttgtacaccactttgagtcctttcccgctggatcaacgctcatcttctataagtattgtgatcacgagaacgctgcttttaaagacgtggctctcgttctgactgtgcttcttgaggaggagaccctggaagcttccgtggggccccgcgagactgaggaaaaggtgagggatttactctgggcgaagttcaccaactccgatactccaacaagcttcaaccatatggattcagataagttgtctggcctgtggtcacggatttctcatttagttctaccggtccagcccgtttcatccatagaagagcagggatgcctcttctag

SEQ ID NO: 240096 - DNA, 1413 bp, Artificial Sequence
  derived and/or modified sequence
atggcagactcaggtcttagagagccccaggaggactctcagaaggacttggaaaatgacccctcagtaaactcccaggcccaagagacgaccattattgcatcaaacgcagaggaggcagagatactccactcggcgtgtgggttgtccaaggaccatcaggaggtggaaactgaaggaccagagagtgctgacactggtgataagagcgagtcccctgatgaggccaatgtcggaaaacaccccaaggataagaccgaagatgagaataagcagtcattcctggacggcggtaagggtcaccacttacccagcgagaacctcggtaaagagccgctcgatccagacccatcccactcacctagcgacaaagttgggcgtgccgatgcacacctgggttccagttctgtagcactccccaaagaagcttctgatggtactggtgctagccaggagccccctactactgatagccaggaagcccagtcccccggtcattcatctgctggtcaggagggggaggacactcttagacgcaggctcctggcacctgaggccggaagccacccacagcagacccagaaattggaagagatcaaggaaaacgcccaggatacaatgcgacagattaacaagaagggattttggtcttacggcccagtaattctggtggtgctcgtggtagcagtcgtcgccagttctgtaaactcatactacagcagcccagctcaacaagtacccaagaaccctgctttagaggcttttttggcccaattttcccagctggaggataagtttcctggccagtcctccttcttatggcagaggggaagaaagtttctgcagaagcacctgaacgctagtaaccctactgagcccgcaaccatcatctttaccgccgcacgagagggtcgtgaaacactcaaatgcctcagtcatcacgtcgccgatgcatacacttcatcccaaaaggtatccccaattcagatagatggtgccggtcggacctggcaggacagtgacaccgtgaagcttctcgttgacctggaactgtcctacggctttgaaaatggccagaaggccgcagttgtgcaccacttcgaatctttccctgcagggagcacccttatcttttataaatattgcgatcatgaaaatgcggcttttaaggacgtagctttggtactcacggtgctccttgaggaggagactctggaagccagcgtggggcctagagaaactgaggaaaaggtaagggatctcctgtgggctaagtttacaaatagcgacacacccacaagcttcaatcacatggactccgataagctctccggcctttggtctcggatcagccatctcgtactgcccgtccagcccgtgtcttccattgaggagcagggctgtctcttttag

SEQ ID NO: 240097 - DNA, 7905 bp, Artificial Sequence
  derived and/or modified sequence
gggccgcggcggccgctgggtgcagccgagcggtgtggagcggagagaatactcgaagggctctcctgatactaacagttttacgatttaaaacttcgccagaatttcgacagggtctcactgtattgcccaggttggtctcgaactcctggcttcaagcgattctcccacctcagcctcccaaagtgctgggattacaggcgtgagccaccacgcctggcctcactcaaacagtaaacgagtcactgtatatatgccttatttcctgggtccatgggaagcatgagtctgttgggacttgggacaagaagaaaacaagacatcttcacaaggaaaaccaagtactaaaaaaagtatcctcccaactctgaagagatagaacacaaacatggccgacagtggacttagggaacctcaagaggactctcaaaaggatttggaaaatgatccatcagtaaattctcaggcgcaggagaccacaatcatagcaagtaatgctgaagaagctgagatcctacactctgcctgtggtcttagcaaagaccaccaagaggtagagacagaaggtccagaaagtgcagatacaggtgataaatcagaaagtccagatgaagcaaatgtggggaaacatccaaaggataaaacagaagatgagaacaagcagagttttctggatggcggaaaagggcatcacctcccttcagaaaatctgggtaaagaacccttggatccagatcccagccattctccaagtgacaaggtaggaagagcagatgcacacttagggagcagctctgtggccctccctaaggaagcgagtgacggaactggagcatctcaggaaccacctactacagactcccaggaggcccagagtcctggtcattccagtgcagggcaagagggtgaggatacactgaggaggcgactgctggccccagaggctggaagtcatccacaacaaacacaaaaattggaagaaattaaagagaatgcacaggacaccatgagacagattaataaaaagggtttttggagctatggccctgtgattcttgtcgtcctggttgtggctgttgtggcaagttctgtgaatagctactattcctctccagcccagcaagtgcccaaaaatccagctttggaggcctttttggcccagtttagccaattggaagataaatttccaggccagagttccttcctgtggcagagaggacggaagtttctccagaagcacctcaatgcttccaaccccactgagccagccaccatcatatttacagcagctcgggagggaagagagaccctgaagtgcctgagccaccatgttgcagatgcctacacctcttcccagaaagtctctcccattcagattgatggggctggaaggacctggcaggacagtgacacggtcaagctgttggttgacctggagctgagctatgggtttgagaatggccagaaggctgctgtggtacaccacttcgaatccttccctgccggctccactttgatcttctataagtattgtgatcatgagaatgctgcctttaaagatgtggccctggtcctgactgttctgctagaggaggaaacattagaagcaagtgtaggcccaagggaaacggaagaaaaagtgagagacttactctgggccaagtttaccaactctgacactcccacctccttcaaccacatggactcagacaaattgagtgggctgtggagccgaatttcacacctggtactgccagtccagccagtgagtagcatagaagaacaggggtgccttttctaaagctaagcacagagttggttacagaaggtatatgtttatgaaaaagtttgtttaaagaccttccatttatatggaaggaggttgataaaatagcttgaggaaatagcctgaaaaacaaagatgagcttattttagaaacaagtttttattttttattccttgtaaaatctttctaatctaagccttgacaaagctaaaaattaacctgactttttttctttggaccaaatcaggtttgaaatatcgatgatatatatgagaattttttttaaattctaaaatatagcaacattgcacaggaagatactcttacttcttagagtaactacagagtgattttttttttttcttgagtgagactctgaagaaccttttcgataatgtttggacttggactaaagcaattagaattatgaagcaatgataacctttagaaaatttttctatcacatgttgaatattttcaaaccttactttaataatctaaagttacgggattatatcttatattaattttgcagttttgagtagtatgataaaagaaataagaattcaaaccattaagtacctacctaaatactacatgtaaggcactgtgcttttatttcattcagctgaggtataagcagctgtactcaaatgttcttaaaaatgagaaccagtggggaaattgtttataatcattggaaatgaagaaattccaattggctatatctttacttcagcttttcttgaacaatttacagcattgattttcaaactgtgtctactggcacccttcccctttgtatcagagcagttctgcttttaactgttttatatgttggggttctctatgagatttcattggaacaaagagtttcactgatattcgagtttgaaaaccattgattaagtgaaaaaacatcttagaagataggaaatatgtttaaaaaatgaatgtattaaatcttatgagtaggaagatgaaatacaggtttattgtatagatacattatttatgaaggataaagatctatacatgaacagcagaatgtataagctagcatttactagcatgtctctgatgcttttgttcatttctgttaatcgtcatttctgtcccctctgcatggaattttatacttgtctagggtaagagtttgtagactctttcagcagaacagattttaataaccaatttatttgttttattttaaaaatttatttttgaataaccaatttaatagtaaattttatatgaacatttggcataactttaccagtttatttctatgcagtgatggaacattatgtaatgcagctcatttcttgaccaactagttatagaagtaccattaggttaaaaattagagaaatctaagagatgttatacttagtgagaggaagcagaaatggtgggtagattctcagaggttttgatgttcagtactgacggaccatgttctgtgattgtaagaaagattgaaaacagtttgtatggagatagagttgattagcatttgagctctgaaagcagaactctagtaaaatgatctcgacctaacaaagggtctgttccattatatagactattaccataatcctggattatttcaactgggttttggcctctccattatatgagatcatatgtatatagctaagaagtctgattaaagtatggaaagattttaggaaacactaagaagatacagggatctttactgatacctaaaaagattacaattgagtaattgctcaattgagtgtaggggcatacctgaaggaagaatttgcatttgggacttcgaaggaagcttccaagagatttgggaagagacctgaacaaaaagttaaagcatggtgaatgtgatatcactgtcaatccagtataaaagcagaggaagttgaaggaaaatctgtatcccatatgcacattttttctgtctttttagatcttagatgctagcgttacatccacaaaaccagtgttgccttgtataactattatattggcctgctgacctgtgctacctcagatctgtcaaggaaccagtatgtcgcatattcttgtttcttcattcagttgaatatggtttttcatcatttctcttcaaaataatttagaaaaataaatttctaaagtcataatttttaatttagcctttttaaaaacattttcccttccatgtatagtgcaatcaattgagggtgttgtcagttttctgtctgctatttcaaaagtcttttttttttttttttttttttgagatggagtctcactctgactcccaggctgcagtgctgtggcttgatcatagctcactgtagctttaaactcctgggctcaagcaatcctcccaccttagcctcctgagtagccgggactacaagtgcagactaccacaccactctaccacactattttgtatagagacagggtcttactgtgttgcctaggctggtcttgaactcctggcctcaagtgatcctcccacctcagcgtcccaaagtgtttggattacagatgtgacccaatgcacccaaccaaacttcttttttttttttttttttttttgagagaaggtcttgctctgtcacccaggctggaatgcagtgcagtggcacaatctcatctcactgtaacctacacctcctgggttcaagtgattcttgtgcctcagcctcccaagtagctgggattacaggcatgcaccacaatgcccagctaattattgtatttttaatagagacgaggttttgctatgttgtccaggttggtctcgaactcctggcctcaattgatccgcctgccttggtctttcaaagtgctaggattataggcacgagccactgcacctggcctcaaaaatcatttttaaaagaagcagtatattagctctgggtcttctcatgactaaaatgactatttttaaacataagaccatattttataaatgtacagataattcaaatctattatctaatgtattaggttaatttctatttgttctatacttttttttttttttttttttttgagatggagtcttgctctgttgcccaggctggagtgcagtggtgcaatcttggctcactgcaagctccgcctcctgggttcatgccattctcctgcctcggccttccaagtagctgggactacaggtgcccgccccgacacctggctaatttttaaaaaaatatttttagtagagacagggtttcaccgtgttagccaggatggtctcgatctcctgacctcgtgatccgcccgctttggcctcccaaagtgctgggattacaggcgtgagccaccgcacccggcctattgacattttttaaggtttcagattttcttttgtgtgtctagtaattcgtcttttattgtcaaagataatttgcttatttgacttagaaaaatgatttgtgggcatacaatattgtatgtggtacctaaacgttgccatttagttactcttacagaacaactttcattacactgtatattaatataaattacttcttgagtaatcccagaattgtagaaccaattggtagaatcagaaactgtctttggacttgaggtttttcttcccttagggtaaattttaggttttctggttagtttccaggagttggcggacaagttcatatcactaaaggtgttcatatcactaaaatagtaatgctaatttgtttcatatttctattttaaaaagcaatcaataaagacatttcaatacatttcatttggaagcccccaagtgtatggtggttaataaggctcagcatgctggtaacccaccattctcttagctagtgactccactaaatagtgctagccgctgagatggttttgaccctttaacagcctttttttttttttgagacagagtttcactcttgttatccaggctggggtgcaatggtgcgatatctcggctcactgcaaccactgcctcccaggttcaagcgattctcctgcctcagcctgccaagtagctggattacaggcacgtgccatcacgcccagctaatttttgtatttttggtagagacggggtttccccacgttgaccaggctggtctcgaactcctcacctcaagtgatccacccgcctcggcctcccaaagtgctgggattacaggcgtgagccaccgcgactggcctacacagcttttaattgcttgatttatactttattaaagagaggaagcacaatgagcagtgatactaaaatataactaatatggcatgtgaaagtgatcattattcagatgatcttcaccaacactgcatttgcatatatctgaccaaactttatgcgacataggcaggtctctggcacttcaaaaatgaatgttaaatagaaaataataaataatagctgattagggtaatcatttatttaatcagaataaagattatatccataaaatttacttgcagagaagtactttctttttgttttaaagacagggtctcactctgtcacccaagctatggtgcagtggcacaatcacagctcactgcagcctggacctcctggcctcaaggggatgatcctcctacttcaggaattatgccaccatgcccggctagttgagaagtactttcaaatagcaacatgaagcctttcctttaccatttgaaaataaaacatagttgtaaacataaaccagtatgtctttgtaaagccaataatatatcattttataggagcattgtcttcttgtgtttttcaagttgactatgtagttcaatgtcagtctccattttaatatcttgtttgtttatcagcctgagcatatttcattttaaaatgtatttgttgagaagtcatggtggttttttgtttttcacaagtcaagtagcttgaacactatcacttgtccaatgggaaagttgatgcttatctttatggcaaatgcttggttgaataatatatttgcaaagatgttaattctacagagagctaaataaagttaagatacctgtaaaacagtttctccagatgactttaaaataagccttatttttgtaaatttatgttaaattttaggtgttaagttgtgaaatacctaatgatgtgggcctaaatttgcctcattcagactgagacagggctgttaaaattcatttctagctaataaactgtgctataacttctttattattattattattattattattatagtttaagttctgggatacatgtggagaacatgcaggtttgttaacataggtatacacgtgccatggtggtttgctgcacccatcaacccgtcatctacattaggtatttctcctaatgctatccctcccccagccccccaccccctgacaggccccagtgtgtgatgttccctgccctgtgtccaagtgttttctttgttcaattcccacctatgagtgagaacatgcgatgtttggtaaactgtgctataacttctgtatctctataggccaatccaaatggcctgagaacataatcagtatcccctaatctgcaaaaaggtaaataccttagtcttcagtacctttccttccagtattatctgcattatctgtgcccgcttgctgtgatgtcttgaaaagcccataaattggttcttattttggcaaatggtctcctgcttttcctcactgaggcttataaactaaatttgcctttggctaagcgcagttacatgaaccaaaaagaacattttagacttgggaagcaacaggctgagtcacattgtatggggcagagttggccaagcccccggcagtcacagccctactctctgtgttccttctaggcctgaggacgcatcaacacaaagctccaggcagttgctcctggttcatcagagagcacaggaaatttaaatctatttgcctttcctgtcataaaagaaacagcacactgactttcaaactcaattgcattttgcttatttgtgcttaacaaaaaatatgtgtgctttgccaatactaacgtcccacttctctgcactccctttctgtataacagggattgcttttgtatttgtttcttatagatgctgatgatgtgccttattcagattagttggccattaccagaataaagaataaatctgaatttttttca

SEQ ID NO: 240098 - protein, 740 aa, Artificial Sequence
  derived and/or modified sequence
MNPPGSLEALDPNVDEHLSTQILAPSVHSDNSQERIQARRLRIAARLEARRREALGEYLDGKKESEEDQSKSYKQKEESRLKLAKLLLCGTELVTNIQVAIDIREIHRRVEEEEIKRQRIEKLENEVKTSQDKFDEITSKWEEGKQKRIPQELWEMLNTQQLHCAGLLEDKNKLISELQQELKTKDDQYVKDLKKQSDDICLLLERMEEQVKNVMKTFREELYNIEKAFEVERQELLASNKKKWEQALQAHNAKELEYLNNRMKKVEDYEKQLNRQRIWDCEEYNMIKIKLEQDVQILEQQLQQRKAIYQLNQEKLEYNLQVLKKRDEESTVIKSQQKRKINRLHDILNNLRSKYAKQIKQFQEENQSLTSDYKRLVMQFKELQKAMRHFALIDDEKFWEIWLMNEEEAKDLIARAFDVDRIIHTHHLGLPWAAPDFWFLNNVGPISQQPQKSATQIVEEMLMRSEEEEAEEAAAEPESYLDLPKQISEKTTKRILMLLCDESGFLIESKLLSLLLPLEQNECYLLRLDAIFSALGIESEDDLYKLVNFFLKYRAHRLSSSLQIKPCSQASMEKASMEETSTRSELELAEQTEMEGEKEESLVEGEKEEEEETPPSPWVIHPNDVLKILEAFVMGLKKPRDSRAPLRVQKNVRDNSKDSEYWQALTTVIPSSKQNLWDALYTALEKYHLVLTQRAKLLLENSSLEQQNTELQALLQQYLNSKINSELQVPPTQVLRVPTK

SEQ ID NO: 240099 - DNA, 2223 bp, Artificial Sequence
  derived and/or modified sequence
atgaacccccccggcagcctggaggccctggaccccaacgtggacgagcacctgagcacccagatcctggcccccagcgtgcacagcgacaacagccaggagagaatccaggccagaagactgagaatcgccgccagactggaggccagaagaagagaggccctgggcgagtacctggacggcaagaaggagagcgaggaggaccagagcaagagctacaagcagaaggaggagagcagactgaagctggccaagctgctgctgtgcggcaccgagctggtgaccaacatccaggtggccatcgacatcagagagatccacagaagagtggaggaggaggagatcaagagacagagaatcgagaagctggagaacgaggtgaagaccagccaggacaagttcgacgagatcaccagcaagtgggaggagggcaagcagaagagaatcccccaggagctgtgggagatgctgaacacccagcagctgcactgcgccggcctgctggaggacaagaacaagctgatcagcgagctgcagcaggagctgaagaccaaggacgaccagtacgtgaaggacctgaagaagcagagcgacgacatctgcctgctgctggagagaatggaggagcaggtgaagaacgtgatgaagaccttcagagaggagctgtacaacatcgagaaggccttcgaggtggagagacaggagctgctggccagcaacaagaagaagtgggagcaggccctgcaggcccacaacgccaaggagctggagtacctgaacaacagaatgaagaaggtggaggactacgagaagcagctgaacagacagagaatctgggactgcgaggagtacaacatgatcaagatcaagctggagcaggacgtgcagatcctggagcagcagctgcagcagagaaaggccatctaccagctgaaccaggagaagctggagtacaacctgcaggtgctgaagaagagagacgaggagagcaccgtgatcaagagccagcagaagagaaagatcaacagactgcacgacatcctgaacaacctgagaagcaagtacgccaagcagatcaagcagttccaggaggagaaccagagcctgaccagcgactacaagagactggtgatgcagttcaaggagctgcagaaggccatgagacacttcgccctgatcgacgacgagaagttctgggagatctggctgatgaacgaggaggaggccaaggacctgatcgccagagccttcgacgtggacagaatcatccacacccaccacctgggcctgccctgggccgcccccgacttctggttcctgaacaacgtgggccccatcagccagcagccccagaagagcgccacccagatcgtggaggagatgctgatgagaagcgaggaggaggaggccgaggaggccgccgccgagcccgagagctacctggacctgcccaagcagatcagcgagaagaccaccaagagaatcctgatgctgctgtgcgacgagagcggcttcctgatcgagagcaagctgctgagcctgctgctgcccctggagcagaacgagtgctacctgctgagactggacgccatcttcagcgccctgggcatcgagagcgaggacgacctgtacaagctggtgaacttcttcctgaagtacagagcccacagactgagcagcagcctgcagatcaagccctgcagccaggccagcatggagaaggccagcatggaggagaccagcaccagaagcgagctggagctggccgagcagaccgagatggagggcgagaaggaggagagcctggtggagggcgagaaggaggaggaggaggagaccccccccagcccctgggtgatccaccccaacgacgtgctgaagatcctggaggccttcgtgatgggcctgaagaagcccagagacagcagagcccccctgagagtgcagaagaacgtgagagacaacagcaaggacagcgagtactggcaggccctgaccaccgtgatccccagcagcaagcagaacctgtgggacgccctgtacaccgccctggagaagtaccacctggtgctgacccagagagccaagctgctgctggagaacagcagcctggagcagcagaacaccgagctgcaggccctgctgcagcagtacctgaacagcaagatcaacagcgagctgcaggtgccccccacccaggtgctgagagtgcccaccaagtag

SEQ ID NO: 240100 - DNA, 2491 bp, Artificial Sequence
  derived and/or modified sequence
gtttgttcctagcaaccagcctgaggtctggaggtggtgcggagggagccgcctagggaccagggactcctgccatgaatccgccggggtccctagaggccctggacccgaacgtggacgagcacttgtccacccagattctcgcgccctcggtccactccgacaactctcaggagcgcatccaggcccggcgcctccgcatcgctgcgcgcttagaagcccggaggcgggaagcacttggagaatatttagatgggaagaaggagagtgaggaggatcaaagcaagagctacaaacagaaagaagaaagccgattgaaattggctaaacttctgctctgtggcaccgagttggtgacaaatatccaggtggctatagatatcagagagattcacaggagagtcgaagaagaggagataaagcgtcaaaggattgagaagctggagaatgaagttaagaccagccaggacaaattcgatgaaatcacctcaaagtgggaagagggcaagcagaagagaattccccaagagctgtgggaaatgctcaatacccaacagctgcactgtgctggactcttagaagataagaataaactcatcagcgagttacagcaggagttaaaaacaaaggatgaccagtatgtgaaggatttgaagaaacagtcagatgacatctgcctgcttctggagcggatggaagaacaggtgaagaatgtgatgaaaacctttcgtgaggagctctataacattgagaaagcatttgaggtggaacgccaagagctactggccagtaataagaagaaatgggagcaagcccttcaggctcataatgccaaagagctggagtatcttaacaaccgcatgaagaaagtagaggactatgagaagcagctgaacaggcagaggatctgggattgcgaagaatacaacatgatcaagatcaagctggagcaggatgtgcagattcttgagcagcagcttcagcagaggaaagcaatttatcagctaaaccaagagaaattagagtacaacttgcaggtgctgaagaagagagatgaagaaagcacagtaattaaatcccagcagaagaggaagatcaatcgcctgcatgatatacttaacaatctgagatcaaaatatgccaagcaaataaagcagtttcaggaggagaaccagtctctaacctcggactacaaacgtcttgtgatgcaattcaaggagctacagaaagccatgaggcattttgctcttattgatgatgagaagttttgggagatttggctgatgaatgaagaggaggcgaaggacctaatagccagagcctttgatgtggacaggatcatccacacccatcatctggggcttccctgggcagcacctgatttctggttcctgaacaatgttgggcctatttctcagcagccccagaagtccgccacacagatagtagaagaaatgcttatgcgctcagaagaggaggaggcagaagaggccgccgcggaaccagagtcctacctggatttgccgaagcaaatttctgaaaaaactaccaagaggatcctgatgctcctgtgtgacgagtcggggttcctcatagagagcaagctgctgagccttctcctgcccctggagcagaatgaatgctatctgctgaggctggatgccatcttctccgcccttggaattgaaagtgaggatgacttgtataaactggtgaacttcttccttaaatatcgagctcaccgtttatcttccagcctccagatcaagccctgcagtcaggcgagcatggagaaggcgagcatggaggagacaagcacgaggtcagaattggagctggcagagcagacggagatggagggagaaaaggaagaaagcctggtggaaggggagaaggaagaagaggaggagaccccaccctccccctgggtcatccaccccaatgatgtcctcaagattctggaggccttcgtcatgggtctgaagaagcctagggactcgcgggccccgctgagggtacagaagaatgtgcgtgacaactccaaggactcggagtactggcaggccctgaccacagtgatcccttcctccaagcagaacctctgggatgccctctacacagccttggagaagtaccaccttgtcctgacccagagggccaagctgctgctggaaaacagttctctggagcagcagaacacagagctgcaggcgctactgcagcagtatctgaactccaagatcaactctgaactgcaagttcctcccactcaggtgttgcgggtacccacaaaatgagctggaccgccaaaggctgatgtgttagggctggcctgatgctggtgtctgtgccggagccagctcatatcacccactgggccgcacctgggcctgctctctggattttccagggctgtctttatagcctgtcgaaataaggagccagaggagttacctgtgtcctgcattatgattaaagccttttaaagttg

SEQ ID NO: 240101 - DNA, 2223 bp, Artificial Sequence
  derived and/or modified sequence
atgaaccctcccgggagcctggaggcactggaccccaatgtcgacgagcacctctcaacccaaattctggcgccttctgtccatagtgacaatagtcaggagcgtattcaagctcggcggctgagaattgcagcccgactagaagcgcgaaggcgcgaagcactgggcgaatatctggacggtaagaaggaatccgaagaagaccagagcaaaagctacaagcagaaagaggagtctaggctcaagctggcaaagttactactgtgcggaactgagctcgttaccaatattcaggttgcgatcgacattcgagaaatccataggcgggtggaggaagaggagattaagcgacaaagaatagagaagttagaaaatgaagtgaaaacctcccaggacaagttcgacgaaattacctccaagtgggaagaagggaagcaaaaaagaataccacaagaactgtgggagatgcttaatacacagcaacttcactgcgctggcctgctcgaggacaagaataagctgatctcagagctgcagcaagaactgaaaactaaagacgatcaatacgtcaaagacctgaaaaagcagtcagacgatatttgtctccttctggaacgcatggaagaacaggtgaaaaacgtgatgaaaaccttcagggaagagctgtacaatatcgagaaagcattcgaagtggagcgccaggaactgctggccagtaataagaagaagtgggaacaagctctgcaggcccacaatgctaaggagctcgaatatttgaataaccggatgaagaaagtcgaagactacgagaagcagttaaaccgccaacgaatttgggattgtgaagaatacaacatgatcaaaatcaagctggagcaagatgtacagattcttgagcagcagctgcaacagcggaaagccatctatcagcttaaccaggaaaaactggaatacaatttgcaggtgcttaaaaagcgggatgaggaaagcaccgtcattaagtcgcagcagaagcggaagattaatcgcctgcacgacattttaaataacttgcgaagcaagtacgccaagcagattaagcaatttcaggaggagaatcaaagcttaacttcagattataaaaggcttgtgatgcaattcaaagagctgcagaaggccatgcgccattttgctcttattgacgacgaaaagttctgggagatatggctgatgaacgaagaagaagctaaagatctgatagcccgcgccttcgacgtcgacagaatcatccacacccatcatctgggactgccatgggcggcacccgatttctggtttttgaataacgtgggtcctatttcacaacaaccccagaagtccgcgacccagatcgtggaggagatgctcatgagatccgaggaggaagaggctgaggaagcagccgcagaaccagaaagctacttagacctcccgaagcagatctctgaaaaaacaacaaaacggatactgatgttgctgtgcgacgagagtgggtttctgattgagtccaagctcttgtcactgttactcccactagaacagaatgagtgttacctccttcggctggatgctatttttagtgcgttgggtattgagtccgaagacgatctctataagctcgtgaacttcttcctgaaatatcgtgcacatcggctgtcaagtagcctgcagatcaaaccttgcagccaggcctccatggagaaagcgtctatggaagaaacttcaactcgtagcgagctggagctcgcggagcagactgaaatggaaggagaaaaggaagagtcactggtggagggcgaaaaagaggaggaggaagagacacctcctagcccatgggtaatacacccaaacgatgtgctcaaaattttggaagcctttgtgatgggtctgaagaagccgcgcgatagcagggcgccgctgagggtgcagaagaatgtgcgggacaacagtaaggattccgaatactggcaggccctaacaacagtgattccaagcagcaaacaaaatttgtgggatgccttgtataccgcactggagaagtatcatctggtgctcactcagcgggcgaagctgctgctagagaatagctcactagagcagcagaataccgagctgcaagctctactgcagcagtacttgaattctaaaattaacagcgagctccaggtcccacccacacaggtgctacgagtaccaaccaaatag

SEQ ID NO: 240102 - DNA, 2223 bp, Artificial Sequence
  derived and/or modified sequence
atgaaccccccaggcagcctggaggccctggaccccaacgtggatgagcacctgagcacccagatcctggcccccagcgtgcacagcgacaacagccaggagcgcatccaggcccggcggctgagaattgctgcccggctggaggccaggagaagagaggccctgggggagtacctggatggcaagaaggagagcgaggaggaccagagcaagagctacaagcagaaggaggagagccggctgaagctggccaagctgctgctgtgtggcacagagctggtgaccaacatccaggtggccatcgacatccgggagatccaccggcgggtggaggaggaggagatcaagaggcagagaattgagaagctggagaatgaggtgaagaccagccaggacaagtttgatgagatcaccagcaagtgggaggagggcaagcagaagaggatcccccaggagctgtgggagatgctgaacacccagcagctgcactgtgccggcctgctggaggacaagaacaagctgatcagcgagctgcagcaggagctgaagaccaaggatgaccagtatgtgaaggacctgaagaagcagagtgatgacatctgcctgctgctggagaggatggaggagcaggtgaagaatgtgatgaagaccttccgggaggagctgtacaacatcgagaaggcctttgaggtggagcggcaggagctgctggccagcaacaagaagaagtgggagcaggccctgcaggcccacaatgccaaggagctggagtacctgaacaacaggatgaagaaggtggaggactatgagaagcagctgaaccggcagaggatctgggactgtgaggagtacaacatgatcaagatcaagctggagcaggatgtgcagatcctggagcagcagctgcagcagaggaaggccatctaccagctgaaccaggagaagctggagtacaacctgcaggtgctgaagaagagagatgaggagagcaccgtcatcaagagccagcagaagaggaagatcaaccggctgcatgacatcctgaacaacctgcggagcaaatatgccaagcagatcaagcagttccaggaggagaaccagagcctgaccagtgactacaagaggctggtgatgcagttcaaggagctgcagaaggccatgaggcactttgccctgattgatgatgagaagttctgggagatctggctgatgaatgaggaggaggccaaggacctgattgcccgggcctttgatgtggaccgcatcatccacacccaccacctgggcctgccctgggccgccccagacttctggttcctgaacaacgtgggccccatcagccagcagccccagaagagcgccacccagatcgtggaggagatgctgatgaggtctgaggaggaggaggccgaggaggccgctgctgagcctgagagctacctggacctgcccaagcagatcagcgagaagaccaccaagaggatcctgatgctgctgtgtgatgaaagtggcttcctgattgagagcaagctgctgagcctgctgctgcccctggagcagaatgaatgctacctgctgcggctggatgccatcttcagcgccctgggcattgaaagtgaagatgacctgtacaagctggtgaacttcttcctgaagtaccgggcccaccggctgagcagcagcctgcagatcaagccctgcagccaggcctccatggagaaggcctccatggaggagaccagcaccaggtctgagctggagctggccgagcagacagagatggagggggagaaggaggagagcctggtggagggggagaaggaggaggaggaggagaccccacccagcccctgggtgatccaccccaatgatgtgctgaagatcctggaggcctttgtgatgggcctgaagaagccccgggacagccgggcccccctgcgggtgcagaagaatgtgcgggacaacagcaaggacagcgagtactggcaggccctgaccaccgtcatccccagcagcaagcagaacctgtgggatgccctgtacacagccctggagaagtaccacctggtgctgacccagagggccaagctgctgctggagaacagcagcctggagcagcagaacacagagctgcaggccctgctgcagcagtacctgaacagcaagatcaacagcgagctgcaggtgccccccacccaggtgctgcgggtgcccaccaagtag

SEQ ID NO: 240103 - DNA, 2223 bp, Artificial Sequence
  derived and/or modified sequence
atgaacccccccggcagcctggaggccctggaccccaacgtggacgaacatctcagcacacaaattttagctcctagtgtccactcggataacagccaggagaggattcaggctcggaggcttcgcatcgctgcccgtctggaagccagacggagagaagctttgggtgagtacttggacggtaagaaggagtcagaagaggaccaatcaaagagctacaagcagaaagaagagtcacgactgaaactagccaaactgctgctttgtgggaccgaattagttactaacattcaggtcgcgatcgacataagagagatccataggagggtggaagaagaggaaatcaagcggcagagaattgagaagctggagaacgaagtgaagacttctcaagacaagtttgacgagataaccagtaaatgggaggagggcaagcagaaacgtatacctcaggaactgtgggagatgttgaatacccagcagctgcactgtgctggcttactcgaagacaagaataagttgatcagcgaattacagcaagagctcaaaactaaggacgatcagtacgtgaaagatctgaagaagcagagcgatgacatttgtctgctcctggagcgcatggaggagcaggtgaagaatgtgatgaagacattccgggaagaactgtacaacattgaaaaagccttcgaggtagagaggcaagagctccttgcgtccaacaagaaaaaatgggaacaggctctgcaggctcacaacgccaaagaactggaataccttaataatcgaatgaaaaaggtcgaagactatgagaaacaactgaatcgccagaggatatgggactgcgaagaatataatatgataaagatcaaactggagcaggatgtacagatcctggaacaacagcttcagcagcgaaaagccatctaccagctgaaccaggagaaacttgagtacaatctgcaggtcttgaagaaaagggacgaggaatcaactgttattaagtcacaacagaaacggaagatcaatagactgcatgacatccttaataatcttagatctaagtatgcaaagcaaataaaacagtttcaggaggaaaaccagagcttgaccagtgattataagcggctggtcatgcagtttaaggagttacagaaagccatgagacatttcgccctgatcgacgacgagaaattttgggagatatggctgatgaatgaggaggaggccaaagatcttatcgcccgggctttcgatgtcgaccgtatcattcatacccatcatctcggccttccttgggccgccccagacttttggtttctgaataacgttggaccaatttctcagcagccacagaagagtgccacccagatagttgaagaaatgcttatgcggagcgaagaggaggaagcagaggaagcggcagctgagccggaatcatatcttgacttgccaaagcaaattagcgagaagacaacaaagcgcatactgatgctactctgtgatgaaagcggctttctgattgaatccaaactgctgagtctcctattgcccctcgagcagaatgagtgttacctcctacgactggacgccatatttagcgcgcttggaatcgagtcagaggatgatctgtataaactagtaaacttctttctaaaatacagagcacaccgtctgagttccagcctccagatcaagccctgttcacaagcctctatggaaaaggcatctatggaagagactagtacacggtctgagctggagttggccgaacagactgaaatggagggcgagaaggaagagtctctcgtggaaggggagaaggaagaagaggaagagactcctccttcaccgtgggttattcaccccaacgatgtcctgaagattctggaagcatttgtgatggggctgaaaaagccccgagatagtcgtgctcctctacgggtacagaaaaacgtgcgagataatagcaaggattctgaatattggcaggccctgacaaccgtgatcccaagtagtaagcaaaatctctgggacgctctgtatactgctctcgaaaagtaccatctagttctgactcagagggctaagctgctgctggagaactccagtctagaacagcagaataccgaacttcaggcattgcttcagcagtatctaaattccaaaataaacagcgagcttcaggtgccccctacacaggtcctgcgggtaccaactaagtag

SEQ ID NO: 240104 - DNA, 2223 bp, Artificial Sequence
  derived and/or modified sequence
atgaacccgccaggctcactcgaggctctggatcccaacgtcgacgagcacctatcaacacagattttggccccttccgtgcatagcgacaatagtcaggaaaggatccaggcgagaaggctgagaattgccgcacgcctagaggctcggcgacgggaagcactgggggagtatttggatggcaaaaaggagtctgaggaagaccaatcaaaatcgtacaagcagaaagaagagtcacgtctgaagctcgctaagctgctcttgtgcggtacggagctggtcaccaatattcaggtggctatcgacattagagagattcacagacgggtggaggaggaagaaataaaacggcagcgaatcgagaaattggagaacgaagtcaagacatcccaggataagttcgacgagatcacgagtaagtgggaggagggcaaacagaaacgcataccacaggaactgtgggagatgctcaatacccagcagttacactgcgctggactgctggaagacaagaacaaactcatttcggagctgcagcaggagctaaaaacaaaggatgaccagtatgtgaaggacctgaagaaacagagtgatgacatctgcctgctgttagagcgcatggaggagcaggtcaagaacgttatgaagacatttcgagaggaattgtacaatatcgaaaaagcttttgaggtcgagcggcaggaactgttggctagcaataagaagaagtgggagcaggccctccaggctcacaatgcgaaggagcttgaatacttgaacaaccgaatgaaaaaagtggaggactacgagaagcagcttaaccggcagaggatctgggattgcgaggagtataatatgattaagatcaaacttgagcaagatgttcaaatcctggaacagcaattacagcagcggaaggcgatttaccagctaaaccaggagaaacttgagtataatctccaggtcctgaaaaaacgggatgaggaatccaccgtgattaaaagtcagcaaaagaggaaaatcaaccggttacacgacatcctgaacaatttaaggagcaagtatgccaagcagatcaagcagttccaggaagagaatcagtcccttacatcagattacaaacggctcgtcatgcagttcaaagagcttcagaaggccatgcgtcacttcgctcttattgacgatgaaaaattttgggagatatggctgatgaatgaagaggaagctaaagatctgattgccagggccttcgatgtggacagaattattcatacccatcatcttggacttccgtgggcagcacctgacttctggtttcttaacaatgtgggcccaatctcccagcaacctcagaaatcagctacccagatcgtcgaggaaatgcttatgcgatcagaggaggaagaagccgaagaggccgcagcggagcctgagtcatacctggatcttcctaaacagatctcggaaaagaccaccaaaagaatcttgatgctgctgtgtgacgagagtggcttcctcatcgaatctaagctactcagccttctccttcccctcgagcaaaatgagtgctacctgctgcgcctcgacgccatattcagcgctctgggaatcgagtccgaggacgacctctataagctggtcaacttctttcttaagtacagagcacaccggctttcatctagcctacaaatcaaaccatgcagtcaagccagtatggagaaggcttcaatggaggagacctcaacgcgctcggagttagagctcgcggagcagacagagatggaaggtgagaaagaggagtccctcgtggagggcgaaaaagaagaagaggaagaaaccccgccatctccgtgggtaatccatccaaacgatgttttaaagatcttggaggccttcgtgatgggcctgaagaaaccaagagattcccgtgcacctctgcgggtccagaagaacgtccgggataacagcaaggactctgaatattggcaggcactgacgactgtgattccttcgtccaagcagaacttgtgggatgctctatacaccgctctcgaaaagtatcatctggtgctgacccagagagccaagctgttgctcgagaactcctctctcgaacaacaaaacacagagctgcaggcgctgctacagcagtacttaaactccaagatcaattctgagctgcaggttccaccaacccaggtgctacgggtacctactaaatag

SEQ ID NO: 240105 - protein, 261 aa, Artificial Sequence
  derived and/or modified sequence
MRESALERGPVPEAPAGGPVHAVTVVTLLEKLASMLETLRERQGGLARRQGGLAGSVRRIQSGLGALSRSHDTTSNTLAQLLAKAERVSSHANAAQERAVRRAAQVQRLEANHGLLVARGKLHVLLFKEEGEVPASAFQKAPEPLGPADQSELGPEQLEAEVGESSDEEPVESRAQRLRRTGLQKVQSLRRALSGRKGPAAPPPTPVKPPRLGPGRSAEAQPEAQPALEPTLEPEPPQDTEEDPGRPGAAEEALLQMESVA

SEQ ID NO: 240106 - DNA, 786 bp, Artificial Sequence
  derived and/or modified sequence
atgagagagagcgccctggagagaggccccgtgcccgaggcccccgccggcggccccgtgcacgccgtgaccgtggtgaccctgctggagaagctggccagcatgctggagaccctgagagagagacagggcggcctggccagaagacagggcggcctggccggcagcgtgagaagaatccagagcggcctgggcgccctgagcagaagccacgacaccaccagcaacaccctggcccagctgctggccaaggccgagagagtgagcagccacgccaacgccgcccaggagagagccgtgagaagagccgcccaggtgcagagactggaggccaaccacggcctgctggtggccagaggcaagctgcacgtgctgctgttcaaggaggagggcgaggtgcccgccagcgccttccagaaggcccccgagcccctgggccccgccgaccagagcgagctgggccccgagcagctggaggccgaggtgggcgagagcagcgacgaggagcccgtggagagcagagcccagagactgagaagaaccggcctgcagaaggtgcagagcctgagaagagccctgagcggcagaaagggccccgccgcccccccccccacccccgtgaagccccccagactgggccccggcagaagcgccgaggcccagcccgaggcccagcccgccctggagcccaccctggagcccgagcccccccaggacaccgaggaggaccccggcagacccggcgccgccgaggaggccctgctgcagatggagagcgtggcctag

SEQ ID NO: 240107 - DNA, 786 bp, Artificial Sequence
  derived and/or modified sequence
atgagagagagcgcacttgaacgggggccagtccctgaagcgccagccgggggcccagtgcatgccgtgacagtagtgacgctgctcgagaagctggccagtatgcttgagacacttcgcgagaggcaggggggattggcgcgccggcaaggcggtttagcgggcagcgtgcggcgcatccagtctgggctcggggccctgagtcggagtcatgatactaccagtaacaccttagctcagcttctagccaaagcagagagagtttctagtcatgcgaacgccgcacaggaacgggctgtacggcgcgccgcccaggtgcagaggttggaggccaaccacgggctattggtggcacgaggcaaactgcacgtcctgctctttaaagaagagggagaagtccctgccagcgccttccagaaggcccccgagccactgggacccgcagaccagagtgagctagggccggagcaacttgaagccgaggtaggggagagctcagatgaggagccggtggagagtcgagcccaacgtttgagaagaaccggcctacagaaagtgcagtcacttagacgagccttatccggtcggaagggccccgctgccccaccacccacccccgtaaaacctccacggttgggaccgggcaggtctgccgaagcacaacccgaggcccagcctgccctggaacccaccctcgaaccggagcccccacaggacactgaagaagacccggggcgaccaggggccgccgaggaagccctgctgcagatggagtcagttgcttag

SEQ ID NO: 240108 - DNA, 786 bp, Artificial Sequence
  derived and/or modified sequence
atgagggagagcgccctggagcggggccctgtgcctgaggccccagctgggggccctgtgcatgctgtgacagtggtgaccctgctggagaagctggcctccatgctggagaccctgcgggagcggcagggcggcctggcccggcggcagggcggcctggccggctctgtgcggcgcatccagagcggcctgggcgccctgagccgcagccatgacaccaccagcaacaccctggcccagctgctggccaaggccgagcgggtgagcagccacgccaatgctgcccaggagagagctgtgagaagagctgcccaggtgcagaggctggaggccaaccacggcctgctggtggcccggggcaagctgcacgtgctgctcttcaaggaggagggggaggtgcctgccagcgccttccagaaggcccctgagcccctgggccctgctgaccagagcgagctgggccctgagcagctggaggccgaggtgggggagagcagtgatgaggagcctgtggagagccgggcccagaggctgcggaggacaggcctgcagaaggtgcagagcctgcggcgggccctgagcggcaggaaaggacctgctgcccccccacccacccctgtgaagccaccccggctgggccctggccgctctgctgaggcccagcctgaggcccagcctgccctggagcccaccctggagcctgagcccccccaggacacagaggaggaccccggccggcctggagctgctgaggaggccctgctgcagatggagagcgtggcctag

SEQ ID NO: 240109 - DNA, 786 bp, Artificial Sequence
  derived and/or modified sequence
atgcgggagagcgccctggagcggggccccgtgcccgaggcccccgccggaggaccggtacatgcggtgaccgtggtcactttgttggaaaagctggcatctatgctggagaccctgcgggagcgccaggggggtcttgccaggaggcagggtggtctggccggcagcgtcaggaggattcagagtggactgggggcgctgagcagatcgcatgacaccacttcgaatactctcgcacagctgcttgcaaaggccgagagagtctctagccacgctaatgcagcccaggagcgagcagtgcgccgggccgcgcaggtgcagagattagaggcgaaccacggcttgttagtcgctagggggaagctgcatgtactgctgttcaaggaggagggcgaagtaccggcatcagccttccagaaggccccagaaccactcggacctgccgatcagagcgagcttggtccggagcagctggaagccgaggttggcgagtcttccgacgaggaaccagttgagtcacgggcccagcgactcagacgtacgggtcttcaaaaagttcagtcgctaaggcgcgccctctccgggcgcaaagggcccgcggccccaccccccacacctgttaagccaccccggctcggtcctggccgtagcgcggaagcacagcctgaagcacaacctgccttggagccaactcttgagcctgagccaccgcaggacacggaggaggatcccggccgccctggagctgctgaagaggcgctgcttcagatggaatccgttgcatag

SEQ ID NO: 240110 - DNA, 786 bp, Artificial Sequence
  derived and/or modified sequence
atgcgtgagtctgccctggaacggggacccgtcccagaggccccagcaggaggaccagtacacgccgtaactgttgttacactcctcgaaaaactcgcttccatgctggagacactccgagaaaggcaggggggacttgcccgtcgacaggggggtctcgccggtagtgtgcggaggattcagtcaggcctgggcgcactctccagatctcacgacacaacctcaaatacgctggcacagttgctcgccaaagcagagagggtctcatcacacgccaacgccgcacaggagagagcagtcagacgtgccgctcaagtccaaagactcgaagcaaaccatggactgttagtggctcggggaaaacttcatgtgttgctgttcaaagaggagggggaggtgcctgcctctgcttttcagaaggccccagagcctctaggtccggcagatcagagcgaactcggccctgaacagcttgaagcggaggttggcgaaagctccgacgaggagcctgtagagtcccgagcccagcggctgaggcgcaccggactgcagaaagtgcagagtctgcgaagagcgctctctgggagaaaaggaccagcagcgccaccccctactcccgttaaaccacctcggctcggccctggcaggagtgcagaggcacagcccgaggctcaaccagcattagagccgactctggagcccgaaccacctcaggacacagaggaggatcctggaaggcctggcgcagctgaggaggccctattgcaaatggagtcagtcgcctag

SEQ ID NO: 240111 - DNA, 1174 bp, Artificial Sequence
  derived and/or modified sequence
aagagaccccgctgccaacatccccacgccctcgcgccctcccgccgccccagaaggccaactccgcctgcctgagtcacagctggagctggggaggagccagggaaaggaggcccctgaccgtagtgcggccagcagttgcaggcagacggagcagagcggtcagggatcatgagggagagtgcgttggagcgggggcctgtgcccgaggcgccggcggggggtcccgtgcacgccgtgacggtggtgaccctgctggagaagctggcctccatgctggagactctgcgggagcggcagggaggcctggctcgaaggcagggaggcctggcagggtccgtgcgccgcatccagagcggcctgggcgctctgagtcgcagccacgacaccaccagcaacaccttggcgcagctgctggccaaggcggagcgcgtgagctcgcacgccaacgccgcccaagagcgcgcggtgcgccgcgcagcccaggtgcagcggctggaggccaaccacgggctgctggtggcgcgcgggaagctccacgttctgctcttcaaggaggagggtgaagtcccagccagcgctttccagaaggcaccagagcccttgggcccggcggaccagtccgagctgggcccagagcagctggaggccgaagttggagagagctcggacgaggagccggtggagtccagggcccagcggctgcggcgcaccggattgcagaaggtacagagcctccgaagggccctttcgggccggaaaggccctgcagcgccaccgcccaccccggtcaagccgcctcgccttgggcctggccggagcgctgaagcccagccggaagcccagcctgcgctggagcccacgctggagccagagcctccgcaggacaccgaggaagatcccgggagacctggggctgccgaagaagctctgctccaaatggagagtgtagcctgagggctggtgttgcctgcctcccctgtgcttgtgccttgtcccaaaataaatcctttcagaatgtagcactcacgccctaataaggagcgaatcctacatccaccaaggcgggcgctctggccctcccttccttaagcccagtcctgtgtcctctgaaagaggtgcagtcactcacacctgcttgcgctcaccatcaataaaagtaatttcacccgaa

SEQ ID NO: 240112 - DNA, 584 bp, Artificial Sequence
  derived and/or modified sequence
gccgccgcggagccggcgtccgcagcggctgcgcatctcgggcctgcagcggggcgcttggcgggcgggggccgggggagagcctgtttgcgcagtacccccggagggcggaaggccgccgagagaaacagcaagtgacagagcagaggaacggctggcccagccaatcctggagctgctgttgcagcacttgttccccaaacaagtgctcctacattctgatgactcagtgtatcgggagccgggagatggagctctcagcagagtggccaggatgttctgtcaacatgaaagctacaaaaacagctcggggctctgagctgatccttagcctggggtcattttcagggagggctggacagagaaggcggccaccgcccgggcatcaggatgggagcgacaccagaggactcaggagagtgcagcttgctctgtgagtgggtgacaacctcttggcgactcaggctcagctgaggatggtgccagtgtgccggagacagccgtcatactgccggatagagtggctcacttgcatgtatttggaacaaaaaaaggagatgcctggcagccccgctctctgcagt

SEQ ID NO: 240113 - protein, 332 aa, Artificial Sequence
  derived and/or modified sequence
MPEGPLVRKFHHLVSPFVGQQVVKTGGSSKKLQPASLQSLWLQDTQVHGKKLFLRFDLDEEMGPPGSSPTPEPPQKEVQKEGAADPKQVGEPSGQKTLDGSSRSAELVPQGEDDSEYLERDAPAGDAGRWLRVSFGLFGSVWVNDFSRAKKANKRGDWRDPSPRLVLHFGGGGFLAFYNCQLSWSSSPVVTPTCDILSEKFHRGQALEALGQAQPVCYTLLDQRYFSGLGNIIKNEALYRAGIHPLSLGSVLSASRREVLVDHVVEFSTAWLQGKFQGRPQHTQVYQKEQCPAGHQVMKEAFGPEDGLQRLTWWCPQCQPQLSEEPEQCQFS

SEQ ID NO: 240114 - protein, 317 aa, Artificial Sequence
  derived and/or modified sequence
MPEGPLVRKFHHLVSPFVGQQVVKTGGSSKKLQPASLQSLWLQDTQVHGKKLFLRFDLDEEMGPPGSSPTPEPPQKEVQKKTLDGSSRSAELVPQGEDDSEYLERDAPAGDAGRWLRVSFGLFGSVWVNDFSRAKKANKRGDWRDPSPRLVLHFGGGGFLAFYNCQLSWSSSPVVTPTCDILSEKFHRGQALEALGQAQPVCYTLLDQRYFSGLGNIIKNEALYRAGIHPLSLGSVLSASRREVLVDHVVEFSTAWLQGKFQGRPQHTQVYQKEQCPAGHQVMKEAFGPEDGLQRLTWWCPQCQPQLSEEPEQCQFS

SEQ ID NO: 240115 - protein, 271 aa, Artificial Sequence
  derived and/or modified sequence
MGPPGSSPTPEPPQKEVQKEGAADPKQVGEPSGQKTLDGSSRSAELVPQGEDDSEYLERDAPAGDAGRWLRVSFGLFGSVWVNDFSRAKKANKRGDWRDPSPRLVLHFGGGGFLAFYNCQLSWSSSPVVTPTCDILSEKFHRGQALEALGQAQPVCYTLLDQRYFSGLGNIIKNEALYRAGIHPLSLGSVLSASRREVLVDHVVEFSTAWLQGKFQGRPQHTQVYQKEQCPAGHQVMKEAFGPEDGLQRLTWWCPQCQPQLSEEPEQCQFS

SEQ ID NO: 240116 - DNA, 999 bp, Artificial Sequence
  derived and/or modified sequence
atgcccgagggccccctggtgagaaagttccaccacctggtgagccccttcgtgggccagcaggtggtgaagaccggcggcagcagcaagaagctgcagcccgccagcctgcagagcctgtggctgcaggacacccaggtgcacggcaagaagctgttcctgagattcgacctggacgaggagatgggcccccccggcagcagccccacccccgagcccccccagaaggaggtgcagaaggagggcgccgccgaccccaagcaggtgggcgagcccagcggccagaagaccctggacggcagcagcagaagcgccgagctggtgccccagggcgaggacgacagcgagtacctggagagagacgcccccgccggcgacgccggcagatggctgagagtgagcttcggcctgttcggcagcgtgtgggtgaacgacttcagcagagccaagaaggccaacaagagaggcgactggagagaccccagccccagactggtgctgcacttcggcggcggcggcttcctggccttctacaactgccagctgagctggagcagcagccccgtggtgacccccacctgcgacatcctgagcgagaagttccacagaggccaggccctggaggccctgggccaggcccagcccgtgtgctacaccctgctggaccagagatacttcagcggcctgggcaacatcatcaagaacgaggccctgtacagagccggcatccaccccctgagcctgggcagcgtgctgagcgccagcagaagagaggtgctggtggaccacgtggtggagttcagcaccgcctggctgcagggcaagttccagggcagaccccagcacacccaggtgtaccagaaggagcagtgccccgccggccaccaggtgatgaaggaggccttcggccccgaggacggcctgcagagactgacctggtggtgcccccagtgccagccccagctgagcgaggagcccgagcagtgccagttcagctag

SEQ ID NO: 240117 - DNA, 954 bp, Artificial Sequence
  derived and/or modified sequence
atgcccgagggccccctggtgagaaagttccaccacctggtgagccccttcgtgggccagcaggtggtgaagaccggcggcagcagcaagaagctgcagcccgccagcctgcagagcctgtggctgcaggacacccaggtgcacggcaagaagctgttcctgagattcgacctggacgaggagatgggcccccccggcagcagccccacccccgagcccccccagaaggaggtgcagaagaagaccctggacggcagcagcagaagcgccgagctggtgccccagggcgaggacgacagcgagtacctggagagagacgcccccgccggcgacgccggcagatggctgagagtgagcttcggcctgttcggcagcgtgtgggtgaacgacttcagcagagccaagaaggccaacaagagaggcgactggagagaccccagccccagactggtgctgcacttcggcggcggcggcttcctggccttctacaactgccagctgagctggagcagcagccccgtggtgacccccacctgcgacatcctgagcgagaagttccacagaggccaggccctggaggccctgggccaggcccagcccgtgtgctacaccctgctggaccagagatacttcagcggcctgggcaacatcatcaagaacgaggccctgtacagagccggcatccaccccctgagcctgggcagcgtgctgagcgccagcagaagagaggtgctggtggaccacgtggtggagttcagcaccgcctggctgcagggcaagttccagggcagaccccagcacacccaggtgtaccagaaggagcagtgccccgccggccaccaggtgatgaaggaggccttcggccccgaggacggcctgcagagactgacctggtggtgcccccagtgccagccccagctgagcgaggagcccgagcagtgccagttcagctag

SEQ ID NO: 240118 - DNA, 999 bp, Artificial Sequence
  derived and/or modified sequence
atgcctgaaggccccctggtgcgcaagttccaccatctcgtcagccctttcgtgggacagcaagttgtgaagacagggggcagcagcaaaaaactgcagcccgcctccttgcagagtctatggctccaggatacgcaggttcatggaaagaagctgttccttaggttcgaccttgacgaggaaatgggcccaccgggcagtagtcccacacccgagccccctcaaaaggaggtccagaaagagggcgcagctgaccccaagcaggtgggagaacctagcggacagaaaaccttggatggcagtagtcggtccgcagagctggtgcctcagggagaggacgacagcgagtacctggagagagatgcacccgccggggacgcagggagatggttaagggttagctttggtctgtttggtagtgtctgggtcaacgatttttctagggcaaaaaaggcaaacaaaagaggtgactggagagatccttctcctaggctggtgctgcacttcggagggggcggattcctagccttttataactgccagcttagctggagctcctcccctgttgttacccccacctgcgatatacttagcgagaaatttcacagaggtcaagcactcgaggcacttggccaggcccaaccagtctgctacactcttctggatcagagatatttttccggcttgggtaatattattaagaacgaggctctgtatcgtgcagggatccacccactatctctcggcagtgttctgtctgcctcccgcagggaggtccttgtcgaccatgtagtcgaattttcaaccgcatggcttcagggcaaattccagggcaggccacagcatactcaagtgtaccaaaaagaacagtgccccgctgggcatcaggtcatgaaggaagcgtttggtccggaggacggtctgcaaagactgacttggtggtgtccccaatgtcagccccagctttctgaggagcctgaacaatgccagttttcatag

SEQ ID NO: 240119 - DNA, 954 bp, Artificial Sequence
  derived and/or modified sequence
atgccagaaggaccgctggtccggaagttccatcaccttgtgtcccccttcgtgggacaacaagttgtgaagacgggcggcagctctaagaagcttcagcctgccagtctacaaagtttgtggcttcaggacactcaggtgcatggcaaaaaactttttctcaggttcgatctcgacgaagagatgggcccaccaggatcatcaccaaccccggagcctccccagaaagaagtccagaaaaaaactctcgacggatcttccagaagcgcagaactggttcctcagggagaggacgatagcgagtaccttgaaagggacgcccctgccggcgacgccggtcgatggcttcgcgtttcttttggcttattcggaagcgtttgggtgaacgactttagccgcgcaaagaaagctaataagcgcggtgattggcgagatccaagtcctcgcttggtgctgcacttcggagggggcgggtttctggctttttacaattgccagctgagctggtcttcgtctcccgtggtgacccctacttgcgatattctgtccgagaagttccaccgcggtcaggccctcgaagccctgggccaagctcaacctgtttgctacaccctgctagatcaaaggtattttagcggactcgggaacataatcaagaacgaagctctgtacagagccgggattcaccctctcagcctaggcagcgtgctatccgccagccggagggaagtcctggtagatcacgtcgttgagttctcaacagcctggctgcagggcaaatttcagggcagaccccaacacacacaggtctatcagaaagagcagtgtcccgcgggacatcaagttatgaaggaggcttttggtcccgaggatggcctgcaaagactgacatggtggtgcccccaatgccagccacagcttagcgaagaaccagaacagtgtcagttctcatag

SEQ ID NO: 240120 - DNA, 999 bp, Artificial Sequence
  derived and/or modified sequence
atgcccgaaggcccattggttagaaagttccaccatttggtgtcccctttcgtgggacagcaggttgtgaaaacagggggctcttctaagaagttacagccagccagcctccagtcgctctggctccaggatacccaggtgcacggcaaaaagttatttctgcgctttgatctggatgaggagatgggacctccgggatcatctcctacgcccgagcccccccagaaggaagtgcagaaggagggggctgcagacccaaaacaggttggagagccaagcggtcagaaaaccctagacggctcaagcagatcggctgagcttgtcccccagggtgaggatgattcagaatatcttgaaagagacgcgccagctggtgatgccgggcggtggttacgggtgagctttgggctttttggctctgtctgggttaatgacttctcacgggccaaaaaggccaacaagaggggagattggcgcgatccgagcccccgcctggtgttgcactttggcgggggcggcttcttggctttctacaattgtcagctgagttggagttcttcccccgttgtgacacccacgtgtgacatcctgtcagagaagttccaccgaggtcaggccctggaggccctgggacaggcgcagcccgtttgctacacattgctcgatcaaaggtacttctccggtctgggcaatatcatcaaaaacgaagccttgtaccgcgcgggcatccacccactctccctcggctcagtccttagtgccagccgtcgagaagtactcgtcgatcatgtcgtcgagttcagtactgcatggctccagggtaagtttcaagggcgaccacagcacacccaagtgtaccagaaggagcagtgtcccgctggccaccaggttatgaaagaagcattcgggcccgaggatggtcttcagcggctgacatggtggtgtccacagtgccaacctcagctgagtgaagaacctgaacaatgtcaattttcttag

SEQ ID NO: 240121 - DNA, 999 bp, Artificial Sequence
  derived and/or modified sequence
atgccagaggggcccctggttagaaaatttcatcatctggtcagtccttttgtggggcagcaggtggtgaaaacgggaggaagttctaagaagttacaaccagcatctctgcagagtttgtggctgcaggacactcaggtgcatgggaagaagctgtttcttcgatttgacttagacgaggaaatgggccctccaggctcttctcctacgccagaaccgccacaaaaagaagtacagaaggaaggagccgctgatcccaaacaggtgggcgaaccctcagggcaaaagactctcgacggctcttcaaggtctgccgaactggttccacagggcgaagatgactctgaataccttgaaagagacgctccagcaggagacgccgggcgttggctccgtgtgtccttcggtctcttcggcagcgtttgggttaatgacttttctagggccaaaaaggcaaataagcggggcgactggcgcgacccttcaccaaggctggtccttcactttgggggcgggggtttcctggctttctataactgccaactatcctggtcctccagtcccgttgttacgccaacttgcgacattctttccgagaagtttcatcggggtcaagccctcgaggcattaggtcaggcacagcccgtttgttacacactgttggaccagcgctatttctctgggctggggaatattataaaaaatgaagccttatatcgcgctgggattcaccccctgagcctcggatcagtgctctctgcatcccggcgagaggtgctggtggaccatgtggtggagttctccaccgcctggcttcagggcaaattccagggccggccgcagcatactcaggtttaccagaaggagcagtgtcccgctggacaccaggtgatgaaagaggccttcggtccagaagatgggttacaacggctgacatggtggtgtccacagtgccagccgcagttgtctgaggaaccagagcagtgtcagttcagctag

SEQ ID NO: 240122 - DNA, 999 bp, Artificial Sequence
  derived and/or modified sequence
atgcctgagggccccctggtgaggaagttccaccacctggtgagcccctttgtgggccagcaggtggtgaagacaggaggcagcagcaagaagctgcagcctgccagcctgcagagcctgtggctgcaggacacccaggtgcacggcaagaagctgttcctgcgctttgacctggatgaggagatgggccccccaggcagcagccccaccccagagcccccccagaaggaggtgcagaaggagggcgctgctgaccccaagcaggtgggggagcccagcggccagaagaccctggatggcagcagccgctctgctgagctggtgccccagggagaagatgattctgagtacctggagagagatgccccagctggagatgctggccgctggctgcgggtgtcctttggcctgtttggatctgtgtgggtgaatgacttcagccgggccaagaaggccaacaagagaggagactggagggaccccagcccccggctggtgctgcactttggaggcggcggcttcctggccttctacaactgccagctgtcctggagcagcagccctgtggtgacccccacctgtgacatcctgtctgagaagttccaccggggccaggccctggaggccctgggccaggcccagcctgtgtgctacaccctgctggaccagcgctacttcagcggcctgggcaacatcatcaagaatgaggccctgtacagagctggcatccaccccctgagcctgggctctgtgctgagcgccagccggcgggaggtgctggtggaccacgtggtggagttcagcacagcctggctgcagggcaagttccagggccggccccagcacacccaggtgtaccagaaggagcagtgcccagctggccaccaggtgatgaaggaggccttcggcccagaagatggcctgcagaggctgacctggtggtgcccccagtgccagccccagctgtctgaggagcctgagcagtgccagttctcctag

SEQ ID NO: 240123 - DNA, 954 bp, Artificial Sequence
  derived and/or modified sequence
atgcctgagggccccctggtgaggaagttccaccacctggtgagcccctttgtgggccagcaggtggtgaagacaggaggcagcagcaagaagctgcagcctgccagcctgcagagcctgtggctgcaggacacccaggtgcacggcaagaagctgttcctgcgctttgacctggatgaggagatgggccccccaggcagcagccccaccccagagcccccccagaaggaggtgcagaagaagaccctggatggcagcagccgctctgctgagctggtgccccagggagaagatgacagcgagtacctggagagagatgccccagctggagatgctggccgctggctgcgggtgtcctttggcctgtttggatctgtgtgggtgaatgacttcagccgggccaagaaggccaacaagagaggagactggagggaccccagcccccggctggtgctgcactttggaggcggcggcttcctggccttctacaactgccagctgtcctggagcagcagccctgtggtgacccccacctgtgacatcctgtctgagaagttccaccggggccaggccctggaggccctgggccaggcccagcctgtgtgctacaccctgctggaccagcgctacttcagcggcctgggcaacatcatcaagaatgaggccctgtaccgggccggcatccaccccctgagcctgggctctgtgctgagcgccagcagaagagaggtgctggtggaccacgtggtggagttcagcacagcctggctgcagggcaagttccagggccggccccagcacacccaggtgtaccagaaggagcagtgcccagctggccaccaggtgatgaaggaggcctttggaccagaagatggcctgcagaggctgacctggtggtgcccccagtgccagccccagctgtctgaggagcctgagcagtgccagttctcctag

SEQ ID NO: 240124 - DNA, 999 bp, Artificial Sequence
  derived and/or modified sequence
atgcccgagggccccctggtgcggaagttccaccacctggtgagcccctttgtgggtcagcaggtcgtgaaaacaggaggcagctccaaaaagctgcagcctgcttctttgcaatcgttatggctgcaagatacccaagttcatggtaaaaaactgttcctgcgctttgatctcgacgaggagatgggccccccagggtctagccccaccccagagccaccccagaaggaggttcaaaaagaaggcgcggccgacccaaaacaagtaggtgaaccgtcaggtcaaaagaccctagatgggagttctaggtcagcagaactggtgcctcagggtgaagatgattctgaatacctggaacgcgatgctcctgcaggtgatgccggccggtggttacgggtgtccttcggcctgttcggatccgtgtgggtaaatgacttcagccgggctaaaaaagctaataaacggggagattggagggacccttctcccagactggttctacacttcggcggcggtggattcctggcattctacaattgccagctctcatggtcttcgtccccagtggtcacccccacctgtgacatcctctcagaaaaatttcatcggggacaggctcttgaagccctcggtcaggcgcaaccagtgtgttacactctcctggatcagcggtacttcagcgggctgggtaacatcattaaaaatgaggccctgtaccgagcgggaatccaccccctgagcctgggctctgtcttgtccgcttcgcgaagggaagtcctcgtcgaccatgtggtcgaatttagcactgcatggcttcagggtaaattccagggaaggccccagcacactcaggtctatcagaaagagcagtgccctgccggtcaccaagtgatgaaggaggcatttggcccggaggatggactccaaagattgacctggtggtgcccacagtgtcaaccacagctttccgaagagcctgagcagtgtcagttcagttag

SEQ ID NO: 240125 - DNA, 954 bp, Artificial Sequence
  derived and/or modified sequence
atgcccgagggccccctggtgcggaagttccaccacctggtgagcccttttgtcggccagcaggtggttaagacaggtggcagcagtaaaaagttgcagcccgcctctttgcagtctctgtggttgcaagacactcaagtccatgggaaaaaactgttcctgagattcgacctggatgaggagatgggacctccaggatcatcaccaacccctgagccccctcaaaaagaggtccaaaaaaaaacccttgacgggtcatcgcgctccgcagagttagtgcctcagggggaggatgatagcgagtatctggagcgggacgctcccgcgggcgacgcaggtcgctggctcagggtgagcttcggcctattcgggtccgtgtgggtgaatgacttcagtcgcgccaaaaaagctaacaagcggggcgattggcgggacccctctcctagacttgtgcttcactttgggggaggaggcttcctagctttttacaactgccaactttcatggtcaagctccccagtggttacgccgacctgcgatatcttgagtgaaaagttccataggggacaggcccttgaagcgctaggtcaagcacagcccgtgtgttatacgttactggatcagcggtatttttctggtctggggaatatcattaaaaacgaagcattataccgggcgggaatacacccattgagcctgggctccgtactgagtgcgagcaggcgcgaggtcctggtagatcacgtggtggaattctcaacagcctggctgcagggcaagtttcagggaaggccgcaacacacccaggtttaccagaaagagcaatgccccgcgggacatcaggtgatgaaagaggcattcggccccgaggacgggttgcagagactgacttggtggtgcccgcagtgtcagcctcagctgagcgaggagccagaacagtgtcaattcagctag

SEQ ID NO: 240126 - DNA, 999 bp, Artificial Sequence
  derived and/or modified sequence
atgcccgagggccccctggtgcggaagttccaccacctggtgagccctttcgtgggtcagcaggtggttaaaaccgggggctcatctaaaaaactacagcctgcaagcctacagagcttgtggctgcaggatacccaggtgcacggcaagaagctattcctgcggttcgacctggatgaagagatgggcccaccaggatccagtcctacgcccgaacctccacagaaggaagtgcagaaggagggcgcagcagaccctaagcaggtgggcgaaccttccggccagaagacactcgatggcagcagtaggtccgcggagctggtcccacagggggaggacgacagcgagtacctcgagagagacgccccagccggagacgcgggcaggtggctgcgggtctcctttggactgtttgggtcagtgtgggtcaatgacttttcacgcgccaaaaaggcaaataaaagaggtgactggcgagacccatccccgcgcctcgtgctgcattttggcgggggaggcttcctggctttttataactgccagctatcctggagcagctctccagttgtcacgcccacatgtgacatcctctccgagaaatttcaccgtgggcaggccctggaggcactgggccaggcccagcccgtgtgctacacgctgctcgaccagagatacttcagtggcctgggaaatattatcaagaacgaggcactgtaccgcgctggcatccaccccctgagtcttggcagcgtcctgagcgcatctcgccgagaggtgctcgttgaccacgtggtcgagttctcaacagcatggctgcaggggaaattccaggggcggccccagcacacgcaagtataccagaaggagcaatgccctgcgggccaccaagtaatgaaggaagccttcggtcccgaagacggtttgcagcgcctcacatggtggtgcccccagtgtcaaccacagctctcggaggagcccgagcagtgccagttctcgtag

SEQ ID NO: 240127 - DNA, 999 bp, Artificial Sequence
  derived and/or modified sequence
atgcccgagggccccctggtgcggaagttccaccacctggtgagcccatttgttggacagcaagtggtgaagaccggcggcagctctaaaaaattacagcctgcatcccttcagtccttgtggctccaggatactcaggtgcatggcaagaaactgtttctgcggttcgacctagacgaggagatggggcccccgggctcctcccccacacccgagccgccacagaaagaggttcagaaagaaggggctgctgatcccaagcaggtgggggagccctccggccagaagaccctggacggatctagcaggtcggccgaactcgtacctcagggcgaggacgactctgaatatctggagcgcgatgcaccagcaggggatgcgggacgctggttgagagtgtctttcggactgttcggctctgtttgggttaatgatttttctcgagcgaaaaaggcaaacaagagaggggactggcgggatccttcccctcgcctggtgttgcacttcggcggagggggctttttggctttctacaattgccagttatcttggtcttcatccccagtggtgacacccacatgcgatatactctccgagaaatttcacagaggtcaggcgttagaagcactcgggcaggctcaacccgtgtgctacaccctgctcgaccagcgatactttagtgggcttggcaacatcattaaaaatgaagcgctgtatagggcaggtatacaccctctgtccctaggctctgttctatctgcaagccgacgggaagtgctggtggatcatgtcgtggagttttcaacagcatggttgcaaggtaagttccaagggcgtcctcagcacactcaggtctatcagaaggaacaatgccctgcaggacaccaagtcatgaaggaggcatttgggcccgaggatggcttgcaacggctcacatggtggtgcccccagtgccagccccagctttcagaagagcctgaacagtgtcagttttcttag

SEQ ID NO: 240128 - DNA, 2671 bp, Artificial Sequence
  derived and/or modified sequence
gcgggctgcgtagcggtgctgggtcgggccgacgtgccacccacccggagccggtgagtgcagccgcccgccctccggtagatctgcggcctggcggagaagtcgggaggggacaggaagggagggcgggccccgggccctcctccgtctcagccgcctgcggaggtgctgcccacgcctggaggcccccactgaccctcagacccgcgtctgcgcccctctccccgcaccccgaggcagagttgggaaagcagtggtcttagaccccccacctcgggcactcggaagagaacggcggagacaacccctcctcttccctggctggcgcagcgccagcctcgagctcctcggtagcccccgggcagggagggccggagggtgggcgcggcatcttcagcgactcttcgaagtcccttccgcgtctcatctttcaaggctgttgcagaggcggcttgcttcccacctgtccatctccataaaaatccctaaacgaaacatgcccacgtgtccggagattttcaggacttggtgcatttcagatgaaggcttttccagaagcttccccgtagaagaggatcaggcatccaactggttaagggatgccagaagggccgttggtgaggaaatttcaccatttggtctccccctttgtgggtcagcaggtggtcaagacagggggcagcagtaagaagctacagcccgccagcctgcagtctctgtggctccaggacacccaggtccatggaaagaaattattccttagatttgatctagatgaagaaatggggccccctggcagcagcccaacaccagagcctccacaaaaagaagtgcagaaggaaggggctgcggacccaaagcaggtcggggagcccagcgggcagaagacccttgatggatcctcacggtctgcagagctcgtcccccagggcgaggatgattctgagtatttggagagagacgcccctgcaggagatgctgggaggtggctgcgtgtcagctttggtttgtttggcagcgtttgggtgaacgatttctccagagccaagaaagccaacaagaggggggactggagggacccttccccgaggttggtcctgcactttggtggtggtggcttcctggcattttataattgtcagttgtcttggagctcttccccagtggtcacacccacctgtgacatcctgtctgagaagttccatcgaggacaagccttagaagctctaggccaggctcagcctgtctgctatacactgctggaccagagatacttctcagggctagggaacatcattaagaatgaagccttgtacagagctgggatccatcccctttctctcggttcagtcctgagtgcctcgcgtcgggaggtcctggtggatcacgtggtggagttcagtacagcctggctgcagggcaagttccaaggcagaccgcagcacacacaggtctaccagaaagaacagtgccctgctggccaccaggtcatgaaggaggcgtttgggcccgaagatgggttacagaggctcacctggtggtgcccgcagtgccagccccagttgtcagaggagccagagcagtgccagttctcctaaggagctggtggtgctcctcacggaaccttgccgcttggggaacctgacgtctaagtgtccagaaaggaggatgtgggcagggacggggtacagaggatagtgtgggtcagaggtgccagtagtataatattcgtctccctggagttatgttgaaggcagagttttcatagggttagattttttttatccttttctagttcagttaattcatcctgttgaattgcaccatcgtgaaagatgggaaaaatcgtgatgatgggtaaggggaaaacttcccggaaggcaatggggcaaggaaaaagaaagcctatgggaaatggctgtgctcccaacatagctttgcagatgatgtgggttttttttttttttttggttgtttgttttgagagagagtcttgctctgtctccctggctagggtgtggtggtgtgatcttggctcacggcagccttgccctccctggctcaagcagtcttcatctcagcctccagagtagctgggactacaggcatgtgatatgatgctcggctgatttttgtttactttttagagagatggggtcttgccatatttgccaggctggtttgaactcctacaactcaagcattcctcccaccttggtctcccaaaatgttgggaccacgggtgtgagccaccgcgcccagctagctcctgtgttttgtttttgttttgtaactttggttgatgttaaggccctccattttggaaagcaggaaaacaggatttttttttttttatcttgttccctggaggatccagggatgaggatagagtggcctgagagcagtgcttggattcagcctcctgctgggtccttctgctggatacaggcaccaagaggcggtcgtggagcagggagctgcgccttcctggggtgcccggtggtgtgtagagaaaagctgcttgtttactccttaagtcaatgtattggtgactgttgatttgttgaacaattcaggaatcaagggctgtggagaaactccctcatgttgttggcaacaggtgaatgaacctagagcggtgacatgaaaataaagctcactgttactcgct

SEQ ID NO: 240129 - DNA, 2026 bp, Artificial Sequence
  derived and/or modified sequence
atgccagaagggccgttggtgaggaaatttcaccatttggtctccccctttgtgggtcagcaggtggtcaagacagggggcagcagtaagaagctacagcccgccagcctgcagtctctgtggctccaggacacccaggtccatggaaagaaattattccttagatttgatctagatgaagaaatggggccccctggcagcagcccaacaccagagcctccacaaaaagaagtgcagaagaagacccttgatggatcctcacggtctgcagagctcgtcccccagggcgaggatgattctgagtatttggagagagacgcccctgcaggagatgctgggaggtggctgcgtgtcagctttggtttgtttggcagcgtttgggtgaacgatttctccagagccaagaaagccaacaagaggggggactggagggacccttccccgaggttggtcctgcactttggtggtggtggcttcctggcattttataattgtcagttgtcttggagctcttccccagtggtcacacccacctgtgacatcctgtctgagaagttccatcgaggacaagccttagaagctctaggccaggctcagcctgtctgctatacactgctggaccagagatacttctcagggctagggaacatcattaagaatgaagccttgtacagagctgggatccatcccctttctctcggttcagtcctgagtgcctcgcgtcgggaggtcctggtggatcacgtggtggagttcagtacagcctggctgcagggcaagttccaaggcagaccgcagcacacacaggtctaccagaaagaacagtgccctgctggccaccaggtcatgaaggaggcgtttgggcccgaagatgggttacagaggctcacctggtggtgcccgcagtgccagccccagttgtcagaggagccagagcagtgccagttctcctaaggagctggtggtgctcctcacggaaccttgccgcttggggaacctgacgtctaagtgtccagaaaggaggatgtgggcagggacggggtacagaggatagtgtgggtcagaggtgccagtagtataatattcgtctccctggagttatgttgaaggcagagttttcatagggttagattttttttatccttttctagttcagttaattcatcctgttgaattgcaccatcgtgaaagatgggaaaaatcgtgatgatgggtaaggggaaaacttcccggaaggcaatggggcaaggaaaaagaaagcctatgggaaatggctgtgctcccaacatagctttgcagatgatgtgggttttttttttttttttggttgtttgttttgagagagagtcttgctctgtctccctggctagggtgtggtggtgtgatcttggctcacggcagccttgccctccctggctcaagcagtcttcatctcagcctccagagtagctgggactacaggcatgtgatatgatgctcggctgatttttgtttactttttagagagatggggtcttgccatatttgccaggctggtttgaactcctacaactcaagcattcctcccaccttggtctcccaaaatgttgggaccacgggtgtgagccaccgcgcccagctagctcctgtgttttgtttttgttttgtaactttggttgatgttaaggccctccattttggaaagcaggaaaacaggatttttttttttttatcttgttccctggaggatccagggatgaggatagagtggcctgagagcagtgcttggattcagcctcctgctgggtccttctgctggatacaggcaccaagaggcggtcgtggagcagggagctgcgccttcctggggtgcccggtggtgtgtagagaaaagctgcttgtttactccttaagtcaatgtattggtgactgttgatttgttgaacaattcaggaatcaagggctgtggagaaactccctcatgttgttggcaacaggtgaatgaacctagagcggtgacatgaaaataaagctcactgttactcgc

SEQ ID NO: 240130 - DNA, 2016 bp, Artificial Sequence
  derived and/or modified sequence
gaaatctccgcccccagctggagcggctgtgcgggctgcgtagcggtgctgggtcgggccgacgtgccacccacccggagccggtccatggaaagaaattattccttagatttgatctagatgaagaaatggggccccctggcagcagcccaacaccagagcctccacaaaaagaagtgcagaaggaaggggctgcggacccaaagcaggtcggggagcccagcgggcagaagacccttgatggatcctcacggtctgcagagctcgtcccccagggcgaggatgattctgagtatttggagagagacgcccctgcaggagatgctgggaggtggctgcgtgtcagctttggtttgtttggcagcgtttgggtgaacgatttctccagagccaagaaagccaacaagaggggggactggagggacccttccccgaggttggtcctgcactttggtggtggtggcttcctggcattttataattgtcagttgtcttggagctcttccccagtggtcacacccacctgtgacatcctgtctgagaagttccatcgaggacaagccttagaagctctaggccaggctcagcctgtctgctatacactgctggaccagagatacttctcagggctagggaacatcattaagaatgaagccttgtacagagctgggatccatcccctttctctcggttcagtcctgagtgcctcgcgtcgggaggtcctggtggatcacgtggtggagttcagtacagcctggctgcagggcaagttccaaggcagaccgcagcacacacaggtctaccagaaagaacagtgccctgctggccaccaggtcatgaaggaggcgtttgggcccgaagatgggttacagaggctcacctggtggtgcccgcagtgccagccccagttgtcagaggagccagagcagtgccagttctcctaaggagctggtggtgctcctcacggaaccttgccgcttggggaacctgacgtctaagtgtccagaaaggaggatgtgggcagggacggggtacagaggatagtgtgggtcagaggtgccagtagtataatattcgtctccctggagttatgttgaaggcagagttttcatagggttagattttttttatccttttctagttcagttaattcatcctgttgaattgcaccatcgtgaaagatgggaaaaatcgtgatgatgggtaaggggaaaacttcccggaaggcaatggggcaaggaaaaagaaagcctatgggaaatggctgtgctcccaacatagctttgcagatgatgtgggttttttttttttttttggttgtttgttttgagagagagtcttgctctgtctccctggctagggtgtggtggtgtgatcttggctcacggcagccttgccctccctggctcaagcagtcttcatctcagcctccagagtagctgggactacaggcatgtgatatgatgctcggctgatttttgtttactttttagagagatggggtcttgccatatttgccaggctggtttgaactcctacaactcaagcattcctcccaccttggtctcccaaaatgttgggaccacgggtgtgagccaccgcgcccagctagctcctgtgttttgtttttgttttgtaactttggttgatgttaaggccctccattttggaaagcaggaaaacaggatttttttttttttatcttgttccctggaggatccagggatgaggatagagtggcctgagagcagtgcttggattcagcctcctgctgggtccttctgctggatacaggcaccaagaggcggtcgtggagcagggagctgcgccttcctggggtgcccggtggtgtgtagagaaaagctgcttgtttactccttaagtcaatgtattggtgactgttgatttgttgaacaattcaggaatcaagggctgtggagaaactccctcatgttgttggcaacaggtgaatgaacctagagcggtgacatgaaaataaagctcactgttactcgc

SEQ ID NO: 240131 - DNA, 2128 bp, Artificial Sequence
  derived and/or modified sequence
gtgcgggctgcgtagcggtgctgggtcgggccgacgtgccacccacccggagccgggatgccagaagggccgttggtgaggaaatttcaccatttggtctccccctttgtgggtcagcaggtggtcaagacagggggcagcagtaagaagctacagcccgccagcctgcagtctctgtggctccaggacacccaggtccatggaaagaaattattccttagatttgatctagatgaagaaatggggccccctggcagcagcccaacaccagagcctccacaaaaagaagtgcagaaggaaggggctgcggacccaaagcaggtcggggagcccagcgggcagaagacccttgatggatcctcacggtctgcagagctcgtcccccagggcgaggatgattctgagtatttggagagagacgcccctgcaggagatgctgggaggtggctgcgtgtcagctttggtttgtttggcagcgtttgggtgaacgatttctccagagccaagaaagccaacaagaggggggactggagggacccttccccgaggttggtcctgcactttggtggtggtggcttcctggcattttataattgtcagttgtcttggagctcttccccagtggtcacacccacctgtgacatcctgtctgagaagttccatcgaggacaagccttagaagctctaggccaggctcagcctgtctgctatacactgctggaccagagatacttctcagggctagggaacatcattaagaatgaagccttgtacagagctgggatccatcccctttctctcggttcagtcctgagtgcctcgcgtcgggaggtcctggtggatcacgtggtggagttcagtacagcctggctgcagggcaagttccaaggcagaccgcagcacacacaggtctaccagaaagaacagtgccctgctggccaccaggtcatgaaggaggcgtttgggcccgaagatgggttacagaggctcacctggtggtgcccgcagtgccagccccagttgtcagaggagccagagcagtgccagttctcctaaggagctggtggtgctcctcacggaaccttgccgcttggggaacctgacgtctaagtgtccagaaaggaggatgtgggcagggacggggtacagaggatagtgtgggtcagaggtgccagtagtataatattcgtctccctggagttatgttgaaggcagagttttcatagggttagattttttttatccttttctagttcagttaattcatcctgttgaattgcaccatcgtgaaagatgggaaaaatcgtgatgatgggtaaggggaaaacttcccggaaggcaatggggcaaggaaaaagaaagcctatgggaaatggctgtgctcccaacatagctttgcagatgatgtgggttttttttttttttttggttgtttgttttgagagagagtcttgctctgtctccctggctagggtgtggtggtgtgatcttggctcacggcagccttgccctccctggctcaagcagtcttcatctcagcctccagagtagctgggactacaggcatgtgatatgatgctcggctgatttttgtttactttttagagagatggggtcttgccatatttgccaggctggtttgaactcctacaactcaagcattcctcccaccttggtctcccaaaatgttgggaccacgggtgtgagccaccgcgcccagctagctcctgtgttttgtttttgttttgtaactttggttgatgttaaggccctccattttggaaagcaggaaaacaggatttttttttttttatcttgttccctggaggatccagggatgaggatagagtggcctgagagcagtgcttggattcagcctcctgctgggtccttctgctggatacaggcaccaagaggcggtcgtggagcagggagctgcgccttcctggggtgcccggtggtgtgtagagaaaagctgcttgtttactccttaagtcaatgtattggtgactgttgatttgttgaacaattcaggaatcaagggctgtggagaaactccctcatgttgttggcaacaggtgaatgaacctagagcggtgacatgaaaataaagctcactgttactcgc

SEQ ID NO: 240132 - DNA, 2323 bp, Artificial Sequence
  derived and/or modified sequence
gccgagccgggaaatctccgcccccagctggagcggctgtgcgggctgcgtagcggtgctgggtcgggccgacgtgccacccacccggagccggctgttgcagaggcggcttgcttcccacctgtccatctccataaaaatccctaaacgaaacatgcccacgtgtccggagattttcaggacttggtgcatttcagatgaaggcttttccagaagcttccccgtagaagaggatcaggcatccaactggttaagggatgccagaagggccgttggtgaggaaatttcaccatttggtctccccctttgtgggtcagcaggtggtcaagacagggggcagcagtaagaagctacagcccgccagcctgcagtctctgtggctccaggacacccaggtccatggaaagaaattattccttagatttgatctagatgaagaaatggggccccctggcagcagcccaacaccagagcctccacaaaaagaagtgcagaaggaaggggctgcggacccaaagcaggtcggggagcccagcgggcagaagacccttgatggatcctcacggtctgcagagctcgtcccccagggcgaggatgattctgagtatttggagagagacgcccctgcaggagatgctgggaggtggctgcgtgtcagctttggtttgtttggcagcgtttgggtgaacgatttctccagagccaagaaagccaacaagaggggggactggagggacccttccccgaggttggtcctgcactttggtggtggtggcttcctggcattttataattgtcagttgtcttggagctcttccccagtggtcacacccacctgtgacatcctgtctgagaagttccatcgaggacaagccttagaagctctaggccaggctcagcctgtctgctatacactgctggaccagagatacttctcagggctagggaacatcattaagaatgaagccttgtacagagctgggatccatcccctttctctcggttcagtcctgagtgcctcgcgtcgggaggtcctggtggatcacgtggtggagttcagtacagcctggctgcagggcaagttccaaggcagaccgcagcacacacaggtctaccagaaagaacagtgccctgctggccaccaggtcatgaaggaggcgtttgggcccgaagatgggttacagaggctcacctggtggtgcccgcagtgccagccccagttgtcagaggagccagagcagtgccagttctcctaaggagctggtggtgctcctcacggaaccttgccgcttggggaacctgacgtctaagtgtccagaaaggaggatgtgggcagggacggggtacagaggatagtgtgggtcagaggtgccagtagtataatattcgtctccctggagttatgttgaaggcagagttttcatagggttagattttttttatccttttctagttcagttaattcatcctgttgaattgcaccatcgtgaaagatgggaaaaatcgtgatgatgggtaaggggaaaacttcccggaaggcaatggggcaaggaaaaagaaagcctatgggaaatggctgtgctcccaacatagctttgcagatgatgtgggttttttttttttttttggttgtttgttttgagagagagtcttgctctgtctccctggctagggtgtggtggtgtgatcttggctcacggcagccttgccctccctggctcaagcagtcttcatctcagcctccagagtagctgggactacaggcatgtgatatgatgctcggctgatttttgtttactttttagagagatggggtcttgccatatttgccaggctggtttgaactcctacaactcaagcattcctcccaccttggtctcccaaaatgttgggaccacgggtgtgagccaccgcgcccagctagctcctgtgttttgtttttgttttgtaactttggttgatgttaaggccctccattttggaaagcaggaaaacaggatttttttttttttatcttgttccctggaggatccagggatgaggatagagtggcctgagagcagtgcttggattcagcctcctgctgggtccttctgctggatacaggcaccaagaggcggtcgtggagcagggagctgcgccttcctggggtgcccggtggtgtgtagagaaaagctgcttgtttactccttaagtcaatgtattggtgactgttgatttgttgaacaattcaggaatcaagggctgtggagaaactccctcatgttgttggcaacaggtgaatgaacctagagcggtgacatgaaaataaagctcactgtta

SEQ ID NO: 240133 - DNA, 999 bp, Artificial Sequence
  derived and/or modified sequence
atgcctgaagggccattggtccgcaaatttcaccacctcgtgagtccgttcgtgggtcagcaggttgtcaaaacggggggttcatctaaaaaactgcagcctgcgagcctgcaatctctgtggctgcaggacacacaagtgcacggaaaaaagctcttcctgaggtttgaccttgatgaagagatgggaccgccaggcagttcacccacccccgaaccgcctcagaaggaagtgcagaaggaaggagccgcagacccaaagcaggtgggagaacctagcggccagaagaccctggatggttcaagccgctcagcagaactggtaccccagggcgaggacgactctgagtatctggaaagagatgccccagctggagacgctgggcgatggctgagagtcagttttgggctattcggttctgtgtgggttaatgacttttctcgcgctaaaaaggcaaacaagcgcggtgattggagagacccgtcacccagactagtgctacacttcggcggaggcggatttctggctttttacaactgccagctgagttggtcatcatctcccgtggtgacaccaacatgcgatatcctttcagaaaagttccatagaggccaggcccttgaagcacttgggcaggcccagcccgtgtgttataccctgttggaccaacggtatttttctgggctgggaaacataatcaagaatgaggccctgtaccgagccggaatccacccactgtctctaggctctgtgctatctgcatcacgcagggaggtgctcgtggatcatgtggttgagttctccactgcctggctgcagggtaagttccagggacgaccccagcatacgcaagtataccaaaaagaacaatgcccagccggacaccaggtcatgaaagaagcttttggcccagaagatggcttacagcgcctgacgtggtggtgtccccaatgtcagccgcagctcagcgaggaacctgagcagtgtcagttctcttag

SEQ ID NO: 240134 - DNA, 954 bp, Artificial Sequence
  derived and/or modified sequence
atgcctgaagggccactcgtacggaagttccaccatctagtttctccctttgttggacaacaggtcgtgaagaccggtggtagctcaaagaagttgcagcctgcctccctgcagagcctctggttgcaggacacgcaagtgcacggcaaaaaactgtttctgaggttcgatctggatgaagagatggggcctcctggcagcagccctaccccagaaccacctcagaaggaagtccagaaaaaaaccctcgatggctcctctagaagcgcagagctggtgccacaaggggaggacgatagtgagtatctggagcgcgacgcccctgcaggcgatgccggacgctggctgcgggtctcctttggtctttttggtagcgtctgggtcaacgatttctccagagcaaagaaggccaataaaaggggcgactggcgggaccctagccctagactggtgttgcattttgggggagggggattcctggccttttacaactgccaactttcctggagttcctcacccgtggtgacaccgacttgcgatatcctctccgaaaagtttcaccggggtcaagcactggaagccctcgggcaagcccagcccgtgtgttataccctgctggaccaaagatacttttcagggctcggtaatatcatcaaaaacgaagcactctatcgggcaggcatccatccactctccctgggttctgtcctgtcggcctcaagacgcgaggtgctagtcgatcatgtcgtagagttcagcaccgcctggctccaggggaaatttcagggcaggcctcagcacacacaggtctatcaaaaagagcagtgcccggctggccaccaggtcatgaaagaggcgtttggccctgaggacggtttgcagcgccttacatggtggtgtccccagtgtcagccacagctgtctgaggagcccgagcaatgtcagtttagctag

SEQ ID NO: 240135 - DNA, 999 bp, Artificial Sequence
  derived and/or modified sequence
atgccagaggggcctttagtccgcaaatttcatcacctagtgagccctttcgtgggccagcaggtggtgaaaacaggtggatccagcaagaagctccagccagccagcttgcagagcctctggttgcaggacactcaggtgcatggcaagaagttatttttacgtttcgacctggatgaggagatgggtccacccggtagcagccctactcccgagccgccacagaaggaggtgcagaaagaaggagctgcagacccgaagcaggtcggtgagccctctggtcagaagaccctggacggaagctcccgcagcgctgaattggtgcctcaaggggaagacgacagcgagtaccttgaaagggacgccccagccggtgacgctggcagatggctaagagtctcttttggattgttcgggtctgtgtgggtcaacgattttagtcgggctaagaaagcaaacaaaaggggggattggagggaccccagtcctcgcctggttctccattttggtggagggggattcttggccttttataattgccaactcagttggtctagctctcccgtggtcacgccaacatgcgacattttgagtgaaaagttccatagagggcaggcactggaagctctgggtcaggcccaacctgtttgttacacattgctagaccagcgctacttttcaggcttggggaacattatcaagaatgaggctttatatagagcagggatccaccctcttagcctggggtcagtactcagcgcttctcgaagggaggtcctcgttgatcatgtggtcgagttcagtaccgcctggctgcagggcaaatttcaggggagaccccagcatacacaggtgtaccagaaggagcagtgccccgctgggcaccaggtcatgaaggaagcttttggacctgaggacggcctgcagcgcctgacctggtggtgccctcagtgccagccccagctgtccgaggagcctgagcagtgccagttttcatag

SEQ ID NO: 240136 - DNA, 999 bp, Artificial Sequence
  derived and/or modified sequence
atgcccgagggtccgctggtccgcaagtttcatcacctggtgagcccatttgtcgggcaacaggttgtcaagaccggtgggtcgtccaaaaaactccaacctgcttcactacagtcactgtggttgcaggacactcaagtgcacgggaagaaattatttctgaggtttgacctggacgaggagatgggcccacctggctcttctccaactccggaaccaccacaaaaagaggtgcagaaggaaggagcggcagatcccaagcaggtcggagaaccttccggacagaagactttagacggatcctctagatccgccgagctggtcccacaaggagaggacgactctgaatacctggagagagacgctccagcaggcgacgcgggacgctggttgagggtttctttcggcctcttcggaagcgtgtgggtcaatgacttttctagagccaagaaagctaataagagaggcgactggcgggacccatctccacgcctcgtgctgcacttcggcggaggaggattccttgccttctacaattgccaattatcctggagttctagccccgttgtgacccccacctgtgatatactgtccgagaaattccacaggggtcaggcactagaagccctgggtcaggcacagcctgtgtgctacacactcctggatcagcggtacttctctgggctgggcaacattattaaaaacgaggccctctatagagccggaattcaccctctgagtctcggatccgtgctgtcggcgtcgaggcgagaggtcttggtggatcatgtcgtggagttttcaactgcctggctccaggggaaattccaagggaggccgcaacacacccaggtctaccagaaagagcagtgtccggcaggccatcaggtgatgaaagaggcgtttggccctgaggatggcctccagaggctgacttggtggtgtccacaatgccagccccagctgagtgaggagccagagcagtgccagtttagctag

SEQ ID NO: 240137 - protein, 215 aa, Artificial Sequence
  derived and/or modified sequence
MNSSQISLRMKHGRVNMQKKPSKCSECGKFFTQRSSLTQHQRIHRGEKPYVCSECGSCFRKQSNLTQHLRIHTGEKPYKCNECEKAFQTKAILVQHLRIHTGEKPYKCNECGKAFCQSPSLIKHQRIHTGEKPYTCTECGKAFTQNSSLVEHERTHTGEKLYKCSECEKTFRKQAHLSEHYRIHTGEKPYECVGCGKSFRHSSALLRHQRLHAGE

SEQ ID NO: 240138 - protein, 271 aa, Artificial Sequence
  derived and/or modified sequence
MNSSQISLRMKHGRVNMQKKPSKCSECGKFFTQRSSLTQHQRIHRGEKPYVCSECGSCFRKQSNLTQHLRIHTGEKPYKCNECEKAFQTKAILVQHLRIHTGEKPYKCNECGKAFCQSPSLIKHQRIHTGEKPYKCTECGKAFSQSICLTRHQRSHSGDKPFKCNECGKAFNQSACLMQHQRIHSGEKPYTCTECGKAFTQNSSLVEHERTHTGEKLYKCSECEKTFRKQAHLSEHYRIHTGEKPYECVGCGKSFRHSSALLRHQRLHAGE

SEQ ID NO: 240139 - DNA, 648 bp, Artificial Sequence
  derived and/or modified sequence
atgaacagcagccagatcagcctgagaatgaagcacggcagagtgaacatgcagaagaagcccagcaagtgcagcgagtgcggcaagttcttcacccagagaagcagcctgacccagcaccagagaatccacagaggcgagaagccctacgtgtgcagcgagtgcggcagctgcttcagaaagcagagcaacctgacccagcacctgagaatccacaccggcgagaagccctacaagtgcaacgagtgcgagaaggccttccagaccaaggccatcctggtgcagcacctgagaatccacaccggcgagaagccctacaagtgcaacgagtgcggcaaggccttctgccagagccccagcctgatcaagcaccagagaatccacaccggcgagaagccctacacctgcaccgagtgcggcaaggccttcacccagaacagcagcctggtggagcacgagagaacccacaccggcgagaagctgtacaagtgcagcgagtgcgagaagaccttcagaaagcaggcccacctgagcgagcactacagaatccacaccggcgagaagccctacgagtgcgtgggctgcggcaagagcttcagacacagcagcgccctgctgagacaccagagactgcacgccggcgagtag

SEQ ID NO: 240140 - DNA, 816 bp, Artificial Sequence
  derived and/or modified sequence
atgaacagcagccagatcagcctgagaatgaagcacggcagagtgaacatgcagaagaagcccagcaagtgcagcgagtgcggcaagttcttcacccagagaagcagcctgacccagcaccagagaatccacagaggcgagaagccctacgtgtgcagcgagtgcggcagctgcttcagaaagcagagcaacctgacccagcacctgagaatccacaccggcgagaagccctacaagtgcaacgagtgcgagaaggccttccagaccaaggccatcctggtgcagcacctgagaatccacaccggcgagaagccctacaagtgcaacgagtgcggcaaggccttctgccagagccccagcctgatcaagcaccagagaatccacaccggcgagaagccctacaagtgcaccgagtgcggcaaggccttcagccagagcatctgcctgaccagacaccagagaagccacagcggcgacaagcccttcaagtgcaacgagtgcggcaaggccttcaaccagagcgcctgcctgatgcagcaccagagaatccacagcggcgagaagccctacacctgcaccgagtgcggcaaggccttcacccagaacagcagcctggtggagcacgagagaacccacaccggcgagaagctgtacaagtgcagcgagtgcgagaagaccttcagaaagcaggcccacctgagcgagcactacagaatccacaccggcgagaagccctacgagtgcgtgggctgcggcaagagcttcagacacagcagcgccctgctgagacaccagagactgcacgccggcgagtag

SEQ ID NO: 240141 - DNA, 648 bp, Artificial Sequence
  derived and/or modified sequence
atgaattcttcacaaatttccctcaggatgaagcatggaagggtcaatatgcagaaaaagccttcaaagtgctcggaatgcggcaagtttttcacccaacgcagtagtttgacgcagcatcagaggatccaccgcggtgaaaaaccctacgtttgttcagagtgcggtagttgcttccggaagcaatcgaacctgacacaacacctgaggattcacacaggcgaaaaaccgtacaaatgcaacgaatgcgaaaaggcctttcagaccaaggccatcctggtgcagcatctacgcatccacacaggggaaaaaccgtataagtgcaacgagtgcggaaaggccttctgtcagagtccttcactgataaagcaccagaggatacacacaggggagaaaccctatacctgcacagagtgtggaaaagcattcacacagaacagcagtctggtggagcatgagcgtacccatactggagagaagctttacaagtgctcggaatgtgagaaaacattcagaaaacaggctcatctaagcgaacactaccgtatccataccggagagaaaccgtacgagtgtgttggctgtggaaagtcttttcggcactcctctgccctgctgaggcaccaaaggttgcacgccggagagtag

SEQ ID NO: 240142 - DNA, 816 bp, Artificial Sequence
  derived and/or modified sequence
atgaattccagccagatcagccttcgaatgaagcacggcagggttaatatgcaaaagaagccaagtaaatgtagcgagtgcgggaagttcttcactcaacggtcttccctaactcagcaccaacgcatccaccgcggggagaagccatacgtttgcagcgaatgtggctcgtgctttaggaagcagagcaatttgacacagcacttaaggattcatacaggtgagaagccttacaagtgcaatgagtgcgagaaggcgttccagactaaggccattttggtccagcacctgaggattcacacaggagagaaaccatataagtgcaatgagtgtgggaaggccttttgtcagagcccatcacttataaagcaccagcgaattcacacaggtgagaagccatataagtgtacagagtgtgggaaagcttttagccagtctatctgtctgactcgccatcagagatcccattctggggataagccattcaagtgtaacgaatgtggtaaggctttcaatcagagtgcctgtctgatgcagcatcagcgcatccattcaggggagaaaccatatacctgcactgagtgcgggaaagctttcacccagaatagctccctagtcgagcacgagcgcacacatacaggggaaaaactctacaagtgctcggaatgtgagaagaccttccgaaagcaggcccacctctctgagcactacaggattcatactggggagaagccatatgaatgcgtaggctgtggcaaaagtttccggcatagttccgccttgcttaggcatcaacgattacatgctggcgaatag

SEQ ID NO: 240143 - DNA, 648 bp, Artificial Sequence
  derived and/or modified sequence
atgaacagcagccagatcagcctgaggatgaagcacggccgggtgaacatgcagaagaagcccagcaaatgttctgaatgtgggaagttcttcacccagaggagcagcctgacccagcaccagaggatccacagaggagagaagccctacgtgtgcagtgaatgtggcagctgcttcaggaagcagagcaacctgacccagcacctgcgcatccacactggagagaagccctacaagtgcaatgaatgtgagaaggccttccagaccaaggccatcctggtgcagcacctgcgcatccacactggagagaagccctacaagtgcaatgaatgtgggaaggccttctgccagagccccagcctcatcaagcaccagaggatccacactggagagaagccctacacctgcacagaatgtgggaaggccttcacccagaacagcagcctggtggagcacgagaggacccacactggagagaagctgtacaagtgcagtgaatgtgagaagaccttcaggaagcaggcccacctgtctgagcactaccgcatccacactggagagaagccctatgaatgtgtgggctgcggcaagagcttccgccacagcagcgccctgctgcggcaccagaggctgcatgctggggagtag

SEQ ID NO: 240144 - DNA, 816 bp, Artificial Sequence
  derived and/or modified sequence
atgaacagcagccagatcagcctgaggatgaagcacggccgggtgaacatgcagaagaagcccagcaaatgttctgaatgtgggaagttcttcacccagaggagcagcctgacccagcaccagaggatccacagaggagagaagccctacgtgtgcagtgaatgtggcagctgcttcaggaagcagagcaacctgacccagcacctgcgcatccacactggagagaagccctacaagtgcaatgaatgtgagaaggccttccagaccaaggccatcctggtgcagcacctgcgcatccacactggagagaagccctacaagtgcaatgaatgtgggaaggccttctgccagagccccagcctcatcaagcaccagaggatccacactggagagaagccctacaagtgcacagaatgtgggaaggccttcagccagagcatctgcctgaccaggcaccagaggagccacagcggggacaagcccttcaagtgcaatgaatgtgggaaggccttcaaccagagcgcctgcctgatgcagcaccagaggatccacagcggggagaagccctacacctgcacagaatgtgggaaggccttcacccagaacagcagcctggtggagcacgagaggacccacactggagagaagctgtacaagtgcagtgaatgtgagaagaccttcaggaagcaggcccacctgtctgagcactaccgcatccacactggagagaagccctatgaatgtgtgggctgcggcaagagcttccgccacagcagcgccctgctgcggcaccagaggctgcatgctggggagtag

SEQ ID NO: 240145 - DNA, 648 bp, Artificial Sequence
  derived and/or modified sequence
atgaacagcagccagatcagcctgcggatgaagcacggccgggtgaatatgcaaaaaaaacctagtaaatgctccgagtgcggtaaattttttacccagcgatcctcattgacacagcatcaacgtattcacagaggagagaagccctatgtgtgttcagagtgtgggtcttgctttcggaagcaatctaacctgacacagcacctgcgaattcataccggggaaaaaccctacaagtgtaacgagtgtgagaaggccttccagaccaaagcaattttagtccagcatctcagaatccataccggggaaaagccttacaagtgcaacgaatgtggaaaggcgttctgtcagagcccgtccctcattaagcatcagcggatccacacgggcgaaaagccgtatacgtgcaccgagtgcgggaaggcgttcacgcaaaactcttccctggtggaacacgaacgcacccataccggagaaaagttatataagtgttctgagtgcgagaagaccttccggaaacaagcccatctttccgaacactataggattcataccggcgagaagccttacgaatgcgtggggtgcggcaagtcctttcgacattctagtgcactcttaaggcaccagcggcttcacgcaggagagtag

SEQ ID NO: 240146 - DNA, 816 bp, Artificial Sequence
  derived and/or modified sequence
atgaacagcagccagatcagcctgcggatgaagcacggccgggtgaacatgcagaaaaagccctcgaaatgttccgaatgcgggaaattctttactcaacggtcctccctgacgcagcaccagcgaatccacagaggagaaaagccctacgtctgctctgaatgtggaagttgttttcggaagcagtcaaacctaacacagcacttacgcattcatactggcgagaagccgtataagtgcaacgagtgcgaaaaagccttccagaccaaagcaattcttgtgcagcacttaaggattcacaccggagagaagccatataagtgtaatgaatgcggcaaggcattttgtcaatccccttctctcatcaaacaccaaaggatccacactggcgaaaaaccatataaatgcacagaatgtgggaaggctttcagccagagcatatgtcttacacgccatcagcggtctcactccggcgataaacccttcaagtgcaacgagtgtggtaaagcctttaatcagagtgcctgtttgatgcagcaccagcggattcactcaggcgagaaaccatatacatgcaccgaatgcggcaaggctttcacccagaacagctcactggttgagcacgagcgaacccacacaggagagaaactatacaagtgcagcgagtgtgaaaaaaccttcaggaaacaggcccacctcagcgaacactatcgtatacacacaggcgagaagccttacgagtgcgtagggtgtggaaagtccttccgtcatagctccgctctgctgaggcatcagcgcctgcatgccggtgagtag

SEQ ID NO: 240147 - DNA, 648 bp, Artificial Sequence
  derived and/or modified sequence
atgaattcctcacagatcagcctgaggatgaagcacggcagggttaacatgcagaaaaagccctctaaatgttcggaatgcggaaaattctttacacaaagaagctcattgacccaacaccagcggattcatcggggagagaaaccatacgtctgctccgaatgtggatcctgttttcgaaaacagagtaatctgacccagcacttgcggattcacacaggggaaaaaccctacaagtgcaatgagtgcgaaaaggccttccagacaaaagctattctcgttcagcacctgcgaatccatacgggcgagaaaccttacaagtgcaatgaatgtggcaaggctttctgtcagtccccctcactcattaagcatcaacggatccatacaggtgagaagccctatacctgtaccgagtgtgggaaagccttcacccaaaactcttctctggtcgagcatgaacgaacacatactggggaaaagttatacaagtgcagtgaatgtgaaaagacctttcggaagcaggctcatctcagcgaacattacagaattcacacaggcgagaagccctatgagtgtgtggggtgcggcaaatccttccgccactctagcgcccttctccgccatcagcgtttacacgcaggagagtag

SEQ ID NO: 240148 - DNA, 816 bp, Artificial Sequence
  derived and/or modified sequence
atgaactcctcccaaatcagtcttagaatgaagcacggaagggttaatatgcaaaagaaaccttcaaagtgtagcgagtgcggcaaattcttcacccagagatcctctttgacacagcaccaacggatccacaggggagagaagccgtatgtgtgtagtgagtgcgggagctgtttccgaaaacagagcaacttgactcagcacctaagaatacacaccggcgagaaaccttataagtgcaacgaatgtgagaaggcctttcaaactaaagcgatccttgtccagcaccttaggatccacacaggggaaaaaccgtacaagtgcaatgagtgcggcaaggctttctgccaaagccccagcctgatcaagcatcagcgtatacacaccggcgagaaaccatataaatgcacagagtgtgggaaggcattttctcagtcaatctgtctgactagacaccagcggtcacactccggcgataaaccctttaagtgcaatgagtgtgggaaagcatttaatcagtctgcctgcttaatgcagcatcaacgtattcacagcggcgagaaaccttatacctgcaccgagtgcggcaaggcgtttacccagaacagttctttagttgagcacgaacggacccatactggggaaaagttgtataaatgcagtgagtgcgagaaaacattccggaaacaggcacatctgtctgaacactatcgcatacacaccggagagaaaccgtatgagtgtgttggctgcggcaagtcttttaggcattcatctgcactgctacgacatcagagacttcacgcaggggagtag

SEQ ID NO: 240149 - DNA, 648 bp, Artificial Sequence
  derived and/or modified sequence
atgaattccagccaaatatcactcagaatgaaacatgggagagttaacatgcagaagaaaccttcaaagtgtagtgaatgtgggaagttctttactcagagatcatctcttacccagcaccagaggattcacagaggagagaagccctatgtgtgcagtgaatgtggaagttgtttccgtaaacagtcaaatcttactcaacatctgagaattcataccggagagaaaccttataaatgtaatgaatgtgagaaagcctttcaaacaaaagcaattcttgttcagcatctgagaattcatactggagagaaaccctataaatgcaatgaatgtggaaaagccttttgtcagagcccatcccttattaaacaccagcgaattcatactggagagaagccctacacatgcactgaatgtggtaaagccttcactcagaactcttcccttgttgaacatgaaaggactcacactggagagaaactttataagtgtagtgagtgtgaaaaaactttccgcaaacaagcacaccttagtgagcattacagaattcatactggagaaaaaccttatgagtgtgttggatgtgggaaatcctttaggcacagttcagcacttcttcgacatcagaggcttcatgctggagagtaa

SEQ ID NO: 240150 - DNA, 3099 bp, Artificial Sequence
  derived and/or modified sequence
gactgctgacgtcacgccggctgggcgcgtccgggacttactcctttccgcagggcagcacccagggacctgagtgttgcaaggtgcgagaggggagcgccgcggggagcgccgcgggaagcgcatgtgcctcaaattcctgcctttcctcaagagaagagcccccaggagaaaagccagtattgcttgtgctcctaacaacctgtctcttgagaggctgatcatcaggggttcactttcagagaagttgagaatgcaggctgaacaaggaagaggaaggggaatcctgcagggatgaatgagaggacagcaatgcatgtgtgatgtgtgtgagcacacacacacagtaacctttcctaggagaactgtattactctaatgataatcacctttgaggaaaaaaaacttgtaagtatgaatttggtgttacaagcagcatgaattccagccaaatatcactcagaatgaaacatgggagagttaacatgcagaagaaaccttcaaagtgtagtgaatgtgggaagttctttactcagagatcatctcttacccagcaccagaggattcacagaggagagaagccctatgtgtgcagtgaatgtggaagttgtttccgtaaacagtcaaatcttactcaacatctgagaattcataccggagagaaaccttataaatgtaatgaatgtgagaaagcctttcaaacaaaagcaattcttgttcagcatctgagaattcatactggagagaaaccctataaatgcaatgaatgtggaaaagccttttgtcagagcccatcccttattaaacaccagcgaattcatactggagagaaaccatataaatgtacagaatgtggcaaagccttcagtcagagcatatgccttactcgtcatcagagaagtcattctggagataaaccttttaagtgtaatgaatgtgggaaagcctttaatcagagtgcatgtctcatgcagcatcagagaattcattcaggagagaagccctacacatgcactgaatgtggtaaagccttcactcagaactcttcccttgttgaacatgaaaggactcacactggagagaaactttataagtgtagtgagtgtgaaaaaactttccgcaaacaagcacaccttagtgagcattacagaattcatactggagaaaaaccttatgagtgtgttggatgtgggaaatcctttaggcacagttcagcacttcttcgacatcagaggcttcatgctggagagtaaaatttggaatataatgagtatgggaagatttgtatggaagcaccttttttttctcctaaattcctaggaatgtaagactcaatctgtagctagtatgaatattttgtattttgaacaagaaatgttgtgtcctaatgtgtcctagtctggagtttgatgccttatctgctgctcagtgggtgtaaccttatcccttctgagcctcagtttccccattccccccaatagaaaaatggggatatttcctagggttgtcctgagaataaaatgagttctgtgtgacagttaactgccattaattaattagccgttctaaaagtttatttacaatatcaaaatctgacaagtaaatcagcattgttgtttggttctcataatgtattgtttcttaagaacattttgtaattgggctatgattttatgatctacagacgtctatttaaactataatgtcttggtttaaataggataatacaatctaagactggtttgtccttgagaaatttcagatttaatcagagaaaaatgtactgattgggatttgagtggacattgtggggtgtatttctggataccctcaagatcttcatttaaattttgatactttctattactagatctaatttgattttaagctctaagtttcacttttccattaaacggaaagcctccctgacattaactgaataaaacctcatgttgtgggacttctgtgtgtgtttagggttggcagcaggtgattaggagaaggcatatgacagtagagaggactggaatatagaggagaatataagcatgtagatgaggatgtggctgtatttgttttgagttctaggagcacagcaccaaatgtggtctcttaagggaagatgagggtagaagatgttaagatcccaggttccagcaactgatgccactgactaacaactagccacttgtcagaggaaggagagaacagtgtcttggggatgctgatgggttggagtgcctaatggctcattaaaagccatgaaaaagcaaagaaatcaaagaatacttttgatggagctttaggctatgctaagccttttaatgtaaacaagcacctctaacgctaaaagcacccttgcaagaaaggtaggagttactattcacatcctagagtcaaggaaaaagagaagatgtttgacttgctcaaagtcaagcaggtaatgtcagaattgaatctcaaatctatatctttatagatttgcagttctggtttatataataccaaagtcacatacaggtaatttcccaccattgaaccttcctgttggtgtgagatgccaaatctgtgaaaaccagacacaggtggccaggtgggtgtcgaactcctgacctcaagtgatccgcctgcctcagcctcccaaagtgctgggattacaggtgtgagtcaccacatctggtcggattttaactattctaataggtatgtagtggtattaattgttttaatctgcagttcaccaataatatatgaatttagcatcttttcatatgtttgccatctgtatagctttggtgaggtatctgttagaggttttgcccatttttaattggattgctcattttcttattgttgaattttaagtgttccttgtatattttgtataacagacctttatcagataggtcttttgcaaatattttcctcccaggctgtggcttattttctcaatccttgattccttctctttactttttttttcttttttctttttttaaagaaatggtagcataatatacacagttgtccattttttaaagactaaaccatctcacagattgttctgtatcagtaaataaagatctttcccccaccctt

SEQ ID NO: 240151 - protein, 595 aa, Artificial Sequence
  derived and/or modified sequence
MTSPLCRAASANALPPQDQASTPSSRVKGREASGKPSHLRGKGTAQAWTPGRSKGGSFHRGAGKPSVHSQVAELHKKIQLLEGDRKAFFESSQWNIKKNQETISQLRKETKALELKLLDLLKGDEKVVQAVIREWKWEKPYLKNRTGQALEHLDHRLREKVKQQNALRHQVVLRQRRLEELQLQHSLRLLEMAEAQNRHTEVAKTMRNLENRLEKAQMKAQEAEHITSVYLQLKAYLMDESLNLENRLDSMEAEVVRTKHELEALHVVNQEALNARDIAKNQLQYLEETLVRERKKRERYISECKKRAEEKKLENERMERKTHREHLLLQSDDTIQDSLHAKEEELRQRWSMYQMEVIFGKVKDATGTDETHSLVRRFLAQGDTFAQLETLKSENEQTLVRLKQEKQQLQRELEDLKYSGEATLVSQQKLQAEAQERLKKEERRHAEAKDQLERALRAMQVAKDSLEHLASKLIHITVEDGRFAGKELDPQADNYVPNLLGLVEEKLLKLQAQLQGHDVQEMLCHIANREFLASLEGRLPEYNTRIALPLATSKDKFFDEESEEEDNEVVTRASLKIRSQKLIESHKKHRRSRRS

SEQ ID NO: 240152 - protein, 574 aa, Artificial Sequence
  derived and/or modified sequence
LPPQDQASTPSSGKPSHLRGKGTAQAWTPGRSKGGSFHRGAGKPSVHSQVAELHKKIQLLEGDRKAFFESSQWNIKKNQETISQLRKETKALELKLLDLLKGDEKVVQAVIREWKWEKPYLKNRTGQALEHLDHRLREKVKQQNALRHQVVLRQRRLEELQLQHSLRLLEMAEAQNRHTEVAKTMRNLENRLEKAQMKAQEAEHITSVYLQLKAYLMDESLNLENRLDSMEAEVVRTKHELEALHVVNQEALNARDIAKNQLQYLEETLVRERKKRERYISECKKRAEEKKLENERMERKTHREHLLLQSDDTIQDSLHAKEEELRQRWSMYQMEVIFGKVKDATGTDETHSLVRRFLAQGDTFAQLETLKSENEQTLVRLKQEKQQLQRELEDLKYSGEATLVSQQKLQAEAQERLKKEERRHAEAKDQLERALRAMQVAKDSLEHLASKLIHITVEDGRFAGKELDPQADNYVPNLLGLVEEKLLKLQAQLQGHDVQEMLCHIANREFLASLEGRLPEYNTRIALPLATSKDKFFDEESEEEDNEVVTRASLKIRSQKLIESHKKHRRSRRS

SEQ ID NO: 240153 - DNA, 1788 bp, Artificial Sequence
  derived and/or modified sequence
atgaccagccccctgtgcagagccgccagcgccaacgccctgcccccccaggaccaggccagcacccccagcagcagagtgaagggcagagaggccagcggcaagcccagccacctgagaggcaagggcaccgcccaggcctggacccccggcagaagcaagggcggcagcttccacagaggcgccggcaagcccagcgtgcacagccaggtggccgagctgcacaagaagatccagctgctggagggcgacagaaaggccttcttcgagagcagccagtggaacatcaagaagaaccaggagaccatcagccagctgagaaaggagaccaaggccctggagctgaagctgctggacctgctgaagggcgacgagaaggtggtgcaggccgtgatcagagagtggaagtgggagaagccctacctgaagaacagaaccggccaggccctggagcacctggaccacagactgagagagaaggtgaagcagcagaacgccctgagacaccaggtggtgctgagacagagaagactggaggagctgcagctgcagcacagcctgagactgctggagatggccgaggcccagaacagacacaccgaggtggccaagaccatgagaaacctggagaacagactggagaaggcccagatgaaggcccaggaggccgagcacatcaccagcgtgtacctgcagctgaaggcctacctgatggacgagagcctgaacctggagaacagactggacagcatggaggccgaggtggtgagaaccaagcacgagctggaggccctgcacgtggtgaaccaggaggccctgaacgccagagacatcgccaagaaccagctgcagtacctggaggagaccctggtgagagagagaaagaagagagagagatacatcagcgagtgcaagaagagagccgaggagaagaagctggagaacgagagaatggagagaaagacccacagagagcacctgctgctgcagagcgacgacaccatccaggacagcctgcacgccaaggaggaggagctgagacagagatggagcatgtaccagatggaggtgatcttcggcaaggtgaaggacgccaccggcaccgacgagacccacagcctggtgagaagattcctggcccagggcgacaccttcgcccagctggagaccctgaagagcgagaacgagcagaccctggtgagactgaagcaggagaagcagcagctgcagagagagctggaggacctgaagtacagcggcgaggccaccctggtgagccagcagaagctgcaggccgaggcccaggagagactgaagaaggaggagagaagacacgccgaggccaaggaccagctggagagagccctgagagccatgcaggtggccaaggacagcctggagcacctggccagcaagctgatccacatcaccgtggaggacggcagattcgccggcaaggagctggacccccaggccgacaactacgtgcccaacctgctgggcctggtggaggagaagctgctgaagctgcaggcccagctgcagggccacgacgtgcaggagatgctgtgccacatcgccaacagagagttcctggccagcctggagggcagactgcccgagtacaacaccagaatcgccctgcccctggccaccagcaaggacaagttcttcgacgaggagagcgaggaggaggacaacgaggtggtgaccagagccagcctgaagatcagaagccagaagctgatcgagagccacaagaagcacagaagaagcagaagaagctag

SEQ ID NO: 240154 - DNA, 1725 bp, Artificial Sequence
  derived and/or modified sequence
ctgcccccccaggaccaggccagcacccccagcagcggcaagcccagccacctgagaggcaagggcaccgcccaggcctggacccccggcagaagcaagggcggcagcttccacagaggcgccggcaagcccagcgtgcacagccaggtggccgagctgcacaagaagatccagctgctggagggcgacagaaaggccttcttcgagagcagccagtggaacatcaagaagaaccaggagaccatcagccagctgagaaaggagaccaaggccctggagctgaagctgctggacctgctgaagggcgacgagaaggtggtgcaggccgtgatcagagagtggaagtgggagaagccctacctgaagaacagaaccggccaggccctggagcacctggaccacagactgagagagaaggtgaagcagcagaacgccctgagacaccaggtggtgctgagacagagaagactggaggagctgcagctgcagcacagcctgagactgctggagatggccgaggcccagaacagacacaccgaggtggccaagaccatgagaaacctggagaacagactggagaaggcccagatgaaggcccaggaggccgagcacatcaccagcgtgtacctgcagctgaaggcctacctgatggacgagagcctgaacctggagaacagactggacagcatggaggccgaggtggtgagaaccaagcacgagctggaggccctgcacgtggtgaaccaggaggccctgaacgccagagacatcgccaagaaccagctgcagtacctggaggagaccctggtgagagagagaaagaagagagagagatacatcagcgagtgcaagaagagagccgaggagaagaagctggagaacgagagaatggagagaaagacccacagagagcacctgctgctgcagagcgacgacaccatccaggacagcctgcacgccaaggaggaggagctgagacagagatggagcatgtaccagatggaggtgatcttcggcaaggtgaaggacgccaccggcaccgacgagacccacagcctggtgagaagattcctggcccagggcgacaccttcgcccagctggagaccctgaagagcgagaacgagcagaccctggtgagactgaagcaggagaagcagcagctgcagagagagctggaggacctgaagtacagcggcgaggccaccctggtgagccagcagaagctgcaggccgaggcccaggagagactgaagaaggaggagagaagacacgccgaggccaaggaccagctggagagagccctgagagccatgcaggtggccaaggacagcctggagcacctggccagcaagctgatccacatcaccgtggaggacggcagattcgccggcaaggagctggacccccaggccgacaactacgtgcccaacctgctgggcctggtggaggagaagctgctgaagctgcaggcccagctgcagggccacgacgtgcaggagatgctgtgccacatcgccaacagagagttcctggccagcctggagggcagactgcccgagtacaacaccagaatcgccctgcccctggccaccagcaaggacaagttcttcgacgaggagagcgaggaggaggacaacgaggtggtgaccagagccagcctgaagatcagaagccagaagctgatcgagagccacaagaagcacagaagaagcagaagaagctag

SEQ ID NO: 240155 - DNA, 2161 bp, Artificial Sequence
  derived and/or modified sequence
gagagatgcggagcgcaaccacctagcggtcggaaagtgcatttttcagagccctaggaatccgagctgacggatccctgacaggggcgactgactcctagttatccccctaacccctaggggccttcagccccaaccccatcatgacatctcctctgtgcagggcggcctccgccaacgccctgcctcctcaggaccaggcttcgacgccctcttccagggtcaagggcagggaggcttcgggcaaacccagccacctccgaggcaagggcacagcccaggcgtggaccccaggccgttccaagggaggatccttccacagaggtgcagggaagccctctgtgcactctcaggtggctgagttacataaaaagatacaactgttagagggtgaccggaaggctttttttgagagctctcagtggaacatcaagaagaaccaggagaccatcagtcagctccgcaaggagactaaggcactggaactaaagctgctggacctgctcaagggagatgagaaagtggtccaggcagtgattcgcgaatggaagtgggagaagccatacctgaagaacaggacaggacaggccctggagcacctagaccaccggctgagggagaaggtgaagcagcagaacgccctgcggcaccaggtggtgttgcggcagaggcggctggaggagctccagctgcagcacagcctgcgccttctggagatggcggaggcgcaaaacagacacacggaggtggccaagaccatgcggaacctggagaaccgcctggagaaggcccagatgaaggcgcaggaggccgagcacattaccagcgtgtacctgcagctcaaggcctatctaatggacgagagcctcaacttggagaaccggctggactccatggaggctgaggtggtgaggaccaaacatgagctggaggcactgcacgtggtgaaccaagaggccctcaatgcccgggacattgccaagaaccagctgcagtacctagaggagaccttggttcgagagcgcaagaagcgggaacgctacataagtgagtgcaagaagcgcgccgaggagaagaaactggagaacgagcgcatggagcgcaagacccaccgcgagcacctgctgctacagtccgacgacaccatccaggacagcctgcatgccaaggaggaggagctgcggcagcgctggagcatgtaccagatggaggtgatctttggcaaggtcaaggacgccactggcactgacgagacgcactcgttggtgcggcggttcctggcccagggcgacaccttcgcgcagttggagacgctcaagagcgagaacgagcagacgttggtgaggctgaagcaggagaagcaacaactgcagcgggagctggaagacctcaagtactcgggggaggccacgctggtgagccagcagaaactgcaagccgaggcgcaggagcgtctcaagaaggaggagcggcggcacgccgaggccaaggaccagctggagcgcgccttgcgggcgatgcaagtggccaaggacagcctggagcacctggccagcaagctgatccacatcactgtggaggacggccgcttcgcgggaaaggagctggatccccaggcagataactatgtgccaaacctgctgggcctcgtggaggaaaagctgctgaaactgcaggcgcagctccagggccacgacgtgcaggagatgctgtgccacatcgctaaccgcgagttcctcgccagcttagagggaaggctgcccgaatacaacacccgcatcgccctgccccttgccacttccaaggacaagttttttgacgaagagagtgaggaggaggacaacgaggtagtgacccgcgcatcactcaagatccgttcccagaaattaatcgaaagtcacaagaagcaccgtcgctctcggaggtcctagactcgtcctgacacccaccaggcggcccccttcggagcccccgatccctccgggtctagcgcaggccccacggggccccttcaggggctgaacgcggcccggaccgggaacggaggcggccagcggcgcccggaggggaggaaggggccgggccagacgttcccacagtaaatctccccagctgggtccgccccggcctcagagttgcgcaataaatgttaccgaccatg

SEQ ID NO: 240156 - DNA, 1955 bp, Artificial Sequence
  derived and/or modified sequence
ctgcctcctcaggaccaggcttcgacgccctcttcgggcaaacccagccacctccgaggcaagggcacagcccaggcgtggaccccaggccgttccaagggaggatccttccacagaggtgcagggaagccctctgtgcactctcaggtggctgagttacataaaaagatacaactgttagagggtgaccggaaggctttttttgagagctctcagtggaacatcaagaagaaccaggagaccatcagtcagctccgcaaggagactaaggcactggaactaaagctgctggacctgctcaagggagatgagaaagtggtccaggcagtgattcgcgaatggaagtgggagaagccatacctgaagaacaggacaggacaggccctggagcacctagaccaccggctgagggagaaggtgaagcagcagaacgccctgcggcaccaggtggtgttgcggcagaggcggctggaggagctccagctgcagcacagcctgcgccttctggagatggcggaggcgcaaaacagacacacggaggtggccaagaccatgcggaacctggagaaccgcctggagaaggcccagatgaaggcgcaggaggccgagcacattaccagcgtgtacctgcagctcaaggcctatctaatggacgagagcctcaacttggagaaccggctggactccatggaggctgaggtggtgaggaccaaacatgagctggaggcactgcacgtggtgaaccaagaggccctcaatgcccgggacattgccaagaaccagctgcagtacctagaggagaccttggttcgagagcgcaagaagcgggaacgctacataagtgagtgcaagaagcgcgccgaggagaagaaactggagaacgagcgcatggagcgcaagacccaccgcgagcacctgctgctacagtccgacgacaccatccaggacagcctgcatgccaaggaggaggagctgcggcagcgctggagcatgtaccagatggaggtgatctttggcaaggtcaaggacgccactggcactgacgagacgcactcgttggtgcggcggttcctggcccagggcgacaccttcgcgcagttggagacgctcaagagcgagaacgagcagacgttggtgaggctgaagcaggagaagcaacaactgcagcgggagctggaagacctcaagtactcgggggaggccacgctggtgagccagcagaaactgcaagccgaggcgcaggagcgtctcaagaaggaggagcggcggcacgccgaggccaaggaccagctggagcgcgccttgcgggcgatgcaagtggccaaggacagcctggagcacctggccagcaagctgatccacatcactgtggaggacggccgcttcgcgggaaaggagctggatccccaggcagataactatgtgccaaacctgctgggcctcgtggaggaaaagctgctgaaactgcaggcgcagctccagggccacgacgtgcaggagatgctgtgccacatcgctaaccgcgagttcctcgccagcttagagggaaggctgcccgaatacaacacccgcatcgccctgccccttgccacttccaaggacaagttttttgacgaagagagtgaggaggaggacaacgaggtagtgacccgcgcatcactcaagatccgttcccagaaattaatcgaaagtcacaagaagcaccgtcgctctcggaggtcctagactcgtcctgacacccaccaggcggcccccttcggagcccccgatccctccgggtctagcgcaggccccacggggccccttcaggggctgaacgcggcccggaccgggaacggaggcggccagcggcgcccggaggggaggaaggggccgggccagacgttcccacagtaaatctccccagctgggtccgccccggcctcagagttgcgcaataaatgttaccgaccatg

SEQ ID NO: 240157 - DNA, 1788 bp, Artificial Sequence
  derived and/or modified sequence
atgacttcacccttgtgccgggctgccagcgccaacgcccttcctccacaggaccaggccagtacgccatcgtctcgagtgaaggggcgcgaagcatccgggaagcctagccatctcagaggcaaagggactgctcaggcttggacccccggccggtccaagggaggttctttccacaggggtgctggaaagccctctgtccatagccaagttgcagaactgcataaaaaaattcagcttttagagggtgatagaaaggctttcttcgagtcatcccagtggaatattaagaaaaaccaggaaaccatctcacaattaagaaaggagacaaaggctttagagctcaaattgctcgacctgctgaaaggggacgagaaagtggtccaggccgtgattagagaatggaagtgggagaagccatacctgaaaaaccggaccggacaagcactggagcatctggaccacaggctgcgggaaaaggtgaagcagcagaatgcgcttcgccatcaggtggtcttgcggcagagaagactggaagaattgcagctccagcactccctgcgcctgctggagatggctgaggcacagaaccgtcacacagaagtggcaaaaaccatgcggaatcttgaaaataggttagaaaaggcccaaatgaaagcccaggaggctgagcacataacgtccgtttacctccagcttaaagcctatctgatggacgaatccttgaaccttgagaataggctggattccatggaagccgaagttgtgcgaaccaaacatgagctcgaggcccttcatgtagtgaatcaggaggccctcaatgctcgagacattgccaaaaaccagcttcagtacctggaggaaacactcgtgcgcgagcgcaagaaaagggaaaggtatatcagtgaatgcaagaagagagcggaggaaaagaaactggagaatgagaggatggagagaaagacgcacagggaacaccttctgttgcagagtgatgatactatccaggattccttgcacgctaaagaggaagaactcaggcagcgctggagcatgtaccagatggaggtcatctttgggaaggtgaaggacgcaactgggacagacgagacccattcattggtgcggcgcttcttggcccagggggataccttcgcacaacttgaaacgctaaagtcagaaaatgagcagacattggtgaggctcaaacaggagaaacaacagctgcagagggagctggaagacctcaaatactccggtgaggctactctggtttcccagcagaagctccaggccgaggcccaggaacgcctaaaaaaagaggaacgaaggcatgcagaagccaaggaccagttagagcgggcactgagagccatgcaggtggccaaggactccctggagcacctggcatctaagctcattcacatcaccgttgaggatggccggttcgctggaaaggagctggaccctcaagctgacaactatgtccccaacctgctggggctcgtggaagagaaacttttaaaactccaagcacagctgcaaggacacgatgtccaagaaatgctgtgtcacattgcaaacagggagttcctagcttctctcgagggcagactcccagaatataacacccgtattgcactccctcttgccacttccaaggataaattctttgatgaggagtctgaggaggaggacaacgaggtggtcacgagggcgagcctgaagatccgatcacagaaacttatcgaatctcataaaaagcacaggaggtctcgcagatcttag

SEQ ID NO: 240158 - DNA, 1725 bp, Artificial Sequence
  derived and/or modified sequence
ctgcccccgcaagatcaggctagcacccctagctcgggcaagcccagtcacttaaggggcaaaggaactgcccaagcctggactccaggtcggtctaagggcggcagttttcaccgcggcgccggtaaaccctctgtgcattctcaagtcgcagagttacataagaagatacagctgctggagggcgaccgcaaggcatttttcgagagtagccaatggaacattaagaagaaccaggagacaatctcccaactgaggaaagagacaaaagccctggaactgaagctgctagacctgctcaaaggagacgagaaggttgtgcaggcggtcatcagagaatggaaatgggagaaaccctacctgaaaaacaggactggccaggcattggaacatttggatcacaggctgcgcgagaaagtgaaacagcaaaacgctctacgacaccaggtcgtgctgcgccaacgtcgtctggaggagcttcagctgcaacatagcctgaggctgcttgaaatggccgaggcccagaacaggcataccgaagtcgcaaaaaccatgcggaacttggagaacaggcttgagaaggcgcagatgaaagcccaggaggcggagcacattactagtgtatatctgcagctgaaagcctatcttatggatgagtcattaaacttggagaacaggctggattccatggaggcggaggtggtgagaacaaaacatgagcttgaggccctgcatgtggtgaaccaggaggccctaaatgctagagatatcgcaaagaaccagctacagtacttggaagaaaccctggtccgcgagaggaagaagcgagagagatatatatctgaatgcaagaagagagctgaggagaagaaactggaaaatgagcgcatggaaagaaagacccatcgggaacacctcctgctacagagcgatgataccattcaggatagccttcacgcaaaagaagaagagttaaggcagaggtggtcaatgtaccagatggaggtgatatttggtaaggttaaggatgccacaggtactgatgagactcactcattagttcggaggttcttggcccagggcgacaccttcgcgcagcttgagaccctgaaaagcgagaatgaacagacacttgtgaggctcaagcaggagaagcagcagctccagagggaactagaagatctgaaatactcgggggaggcaacgctggtcagtcagcaaaagcttcaggcagaagctcaggaacggttaaagaaggaggaaagacgacacgcagaagctaaagatcagctggaacgggccttgcgagccatgcaggttgcaaaggattcactagagcacctcgctagcaaactcattcacattaccgtggaggatggcagattcgcgggaaaggagctggatccgcaggctgacaactatgtgcctaatcttctcggcctggtagaagagaaacttctgaagttgcaagcccaactgcagggacatgatgttcaggagatgctctgccacattgctaatcgcgagttcctcgcttccctagaggggagactgcctgagtataacacccgaatcgctctccctctggctacctctaaggataagtttttcgatgaagaaagcgaggaggaagacaacgaagtcgttaccagggcttctttgaagatcaggtcccaaaagctgatcgaatctcataaaaaacataggcgttctagacgttcctag

SEQ ID NO: 240159 - DNA, 1788 bp, Artificial Sequence
  derived and/or modified sequence
atgaccagccccctgtgccgggccgccagcgccaatgccctgcccccccaggaccaggccagcacccccagcagccgggtgaagggccgggaggccagcggcaagcccagccacctgcggggcaagggcacagcccaggcctggaccccaggccgcagcaagggcggcagcttccacagaggagctgggaagcccagcgtgcacagccaggtggccgagctgcacaagaagatccagctgctggagggggacaggaaggccttctttgagagcagccagtggaacatcaagaagaaccaggagaccatcagccagctgaggaaggagaccaaggccctggagctgaagctgctggacctgctgaagggagatgagaaggtggtgcaggccgtcatccgggagtggaagtgggagaagccctacctgaagaacagaacaggccaggccctggagcacctggaccaccggctgcgggagaaggtgaagcagcagaatgccctgcggcaccaggtggtgctgcggcagaggcggctggaggagctgcagctgcagcacagcctgcggctgctggagatggccgaggcccagaacagacacacagaggtggccaagaccatgaggaacctggagaaccggctggagaaggcccagatgaaggcccaggaggccgagcacatcacctctgtgtacctgcagctgaaggcctacctgatggatgagagcctgaacctggagaaccggctggacagcatggaggccgaggtggtgaggaccaagcatgagctggaggccctgcacgtggtgaaccaggaggccctgaatgcccgggacatcgccaagaaccagctgcagtacctggaggagaccctggtgcgggagaggaagaagcgggagcgctacatcagcgagtgcaagaagagagctgaggagaagaagctggagaatgaaagaatggagaggaagacccaccgggagcacctgctgctgcagagtgatgacaccatccaggacagcctgcacgccaaggaggaggagctgcggcagcgctggagcatgtaccagatggaggtgatctttgggaaggtgaaggatgccaccggcacagatgagacccacagcctggtgcggcgcttcctggcccagggcgacacctttgcccagctggagaccctgaagtcagaaaatgagcagaccctggtgcggctgaagcaggagaagcagcagctgcagcgggagctggaggacctgaagtacagcggggaggccaccctggtgtcccagcagaagctgcaggccgaggcccaggagcggctgaagaaggaggagaggagacatgctgaggccaaggaccagctggagcgggccctgcgggccatgcaggtggccaaggacagcctggagcacctggccagcaagctgatccacatcaccgtggaggatggccgctttgctgggaaggagctggacccccaggccgacaactacgtgcccaacctgctgggcctggtggaggagaagctgctgaagctgcaggcccagctgcagggccatgatgtgcaggagatgctgtgccacatcgccaaccgggagttcctggccagcctggagggccgcctgcctgagtacaacacccgcatcgccctgcccctggccaccagcaaggacaagttctttgatgaggagagcgaggaggaggacaatgaggtggtgacccgggccagcctgaagatccgcagccagaagctgattgagagccacaagaagcaccggcgcagcagaagaagctag

SEQ ID NO: 240160 - DNA, 1725 bp, Artificial Sequence
  derived and/or modified sequence
ctgcccccccaggaccaggccagcacccccagcagcggcaagcccagccacctgcggggcaaaggaacagcccaggcctggaccccaggccgcagcaaaggaggcagcttccacagaggagctgggaagcccagcgtgcacagccaggtggccgagctgcacaagaagatccagctgctggagggggacaggaaggccttctttgagagcagccagtggaacatcaagaagaaccaggagaccatcagccagctgaggaaggagaccaaggccctggagctgaagctgctggacctgctgaagggagatgagaaggtggtgcaggccgtcatccgggagtggaagtgggagaagccctacctgaagaacagaacaggccaggccctggagcacctggaccaccggctgcgggagaaggtgaagcagcagaatgccctgcggcaccaggtggtgctgcggcagaggcggctggaggagctgcagctgcagcacagcctgcggctgctggagatggccgaggcccagaacagacacacagaggtggccaagaccatgaggaacctggagaaccggctggagaaggcccagatgaaggcccaggaggccgagcacatcacctctgtgtacctgcagctgaaggcctacctgatggatgagagcctgaacctggagaaccggctggacagcatggaggccgaggtggtgaggaccaagcatgagctggaggccctgcacgtggtgaaccaggaggccctgaatgcccgggacatcgccaagaaccagctgcagtacctggaggagaccctggtgcgggagaggaagaagcgggagcgctacatcagcgagtgcaagaagagagctgaggagaagaagctggagaatgaaagaatggagaggaagacccaccgggagcacctgctgctgcagagtgatgacaccatccaggacagcctgcacgccaaggaggaggagctgcggcagcgctggagcatgtaccagatggaggtgatctttgggaaggtgaaggatgccactggaacagatgagacccacagcctggtgcggcgcttcctggcccagggcgacacctttgcccagctggagaccctgaagtcagaaaatgagcagaccctggtgcggctgaagcaggagaagcagcagctgcagcgggagctggaggacctgaagtacagcggggaggccaccctggtgtcccagcagaagctgcaggccgaggcccaggagcggctgaagaaggaggagaggagacatgctgaggccaaggaccagctggagcgggccctgcgggccatgcaggtggccaaggacagcctggagcacctggccagcaagctgatccacatcaccgtggaggatggccgctttgctgggaaggagctggacccccaggccgacaactacgtgcccaacctgctgggcctggtggaggagaagctgctgaagctgcaggcccagctgcagggccatgatgtgcaggagatgctgtgccacatcgccaaccgggagttcctggccagcctggagggccgcctgcctgagtacaacaccagaattgccctgcccctggccaccagcaaggacaagttctttgatgaggagagcgaggaggaggacaatgaggtggtgacccgggccagcctgaagatccgcagccagaagctgattgagagccacaagaagcacagaagaagccgccgctcctag

SEQ ID NO: 240161 - DNA, 1788 bp, Artificial Sequence
  derived and/or modified sequence
atgaccagccccctgtgccgggccgccagcgccaacgccctgcccccccaagatcaggcttccacccccagcagccgtgtcaagggccgagaagcttcaggcaaaccaagccacctaaggggaaaaggaaccgcacaggcctggactccagggcgaagcaaaggtggctccttccatcgaggagcaggcaagccttcagtgcacagtcaagtggccgaactgcacaagaaaatacagctgcttgagggcgaccgaaaagccttcttcgagtcttctcaatggaatatcaagaaaaatcaggaaacaatcagccaactacgcaaggagacaaaggcactcgagctcaaactcctggacctgctgaaaggagacgagaaggtcgttcaagctgtcatccgcgagtggaaatgggaaaagccctatctcaagaatagaacgggccaggcgctggaacatttggaccatcggctcagggaaaaagtgaaacagcagaatgccttgagacatcaggttgtactcaggcagcgccggttagaggagttacaactgcaacacagtcttaggctgttggaaatggcagaggctcaaaaccggcacacagaagtcgcgaaaaccatgcgcaaccttgagaacagactcgagaaggcacagatgaaagcccaagaggccgagcacatcacaagcgtctatttacagctcaaagcctatcttatggacgagagcctgaatctggagaaccgcctcgacagcatggaagcagaggtcgtgagaactaagcatgaactggaagctctgcacgttgtgaaccaggaagctctcaacgcccgggacattgccaagaatcagctgcagtatctagaagaaacacttgttagggaacggaagaagcgagaacgctacatttccgagtgtaagaagagggctgaggagaaaaagctggagaacgaacgaatggaaagaaaaactcatagagaacacctcttactgcaatccgacgacactatccaggacagcctgcacgcaaaggaggaggagttacgacagaggtggagcatgtatcaaatggaggtgatcttcggcaaagtgaaagatgccactgggaccgacgagacccattctctggtgcgcaggtttcttgctcagggggatacatttgcccagctggagacactgaagtccgagaacgaacaaacgctagttcggctcaagcaagaaaagcaacaactgcagcgcgagttggaggacctcaagtattcaggagaggccactttagtctcccagcaaaaactccaagccgaagctcaggaacgactgaaaaaagaagagcggcgtcatgccgaggccaaggaccagctggaacgcgccctcagggccatgcaggttgctaaagattccctcgagcacctggcttctaagcttattcatattaccgttgaagatggcagatttgccgggaaagagttagatcctcaggctgacaactacgtgccaaacttgctcggactcgtcgaggagaaacttctgaagttgcaggcccagcttcagggccacgatgtacaggagatgctgtgtcatatcgcaaacagggagttcctggctagccttgaggggagacttcctgagtacaatacaagaattgcacttccgctggcgacctcaaaggacaaattcttcgacgaagaatccgaggaggaggataacgaagtggtcacgcgtgcgtctctgaagatcagaagccagaagctcatcgaaagtcataaaaaacacaggaggagcaggaggtcttag

SEQ ID NO: 240162 - DNA, 1725 bp, Artificial Sequence
  derived and/or modified sequence
ctgcccccccaggaccaggccagcacccccagcagcggcaagccctcacacctccgaggaaaaggcaccgcccaagcctggacccccgggaggagcaagggcgggtccttccatcgaggcgcagggaaaccaagtgtgcacagtcaggtggccgaacttcacaaaaaaatccagttactggagggagataggaaagcattcttcgagagctcacaatggaatataaagaagaaccaagaaacgattagccagctgaggaaagagactaaggccttagaactgaaactgctggacctcctgaagggggacgagaaggtcgtgcaggccgttattagggaatggaagtgggaaaaaccctatctcaaaaaccggaccggccaggcattggaacaccttgaccatagactcagggaaaaggttaaacaacagaacgcccttcgacatcaagttgtgttgagacaaaggaggctggaggaactgcaacttcagcactcccttcgactcctcgaaatggccgaggctcagaatcggcatacggaggtggccaaaaccatgcgcaatctcgagaacaggttagagaaggcccagatgaaggcccaggaagccgagcatataacctcagtttacctgcagcttaaggcctatctcatggacgaatcgctaaacctcgaaaacaggctcgactccatggaggccgaagtggttcgaaccaagcatgagcttgaagctctccacgtagtgaatcaggaggctctcaacgcaagagatatagctaagaaccagctacagtatctggaggagacactggtgcgcgagcgcaagaagagggagaggtacatttcagaatgcaaaaagcgggctgaagaaaagaaattggaaaatgagcgtatggagcgcaaaactcacagagagcatctccttttgcagagcgatgacacaatacaggactccctgcacgctaaggaggaagaacttcgacagagatggtccatgtaccaaatggaagtgatctttggtaaggtgaaggatgctacgggtacagatgaaacccactcactcgtcaggaggtttctggcgcagggggataccttcgcacaactcgaaacacttaagtctgagaatgagcagacactggttcggttgaagcaagagaagcagcagctccaacgggaactggaggatttgaaatatagcggtgaggccactctggtgtcccagcaaaagctgcaggctgaagctcaggaacgtcttaagaaagaagagcggcgtcacgccgaagctaaggatcaactcgaaagggctctgcgcgcaatgcaggtggctaaggactctctggaacatttggcaagcaagctcattcacattacggtggaggacggccggttcgctggtaaagaattagatccccaggcagataactacgtgccaaatctgctcgggctggttgaggagaagctgctgaagctgcaagcccagctgcaggggcatgatgtgcaggaaatgctttgtcacatcgcaaatcgggagttcctcgccagcctggaggggaggctgcctgagtataacacaaggatcgcacttcccctagccacaagcaaagacaagttcttcgacgaggaaagcgaggaggaagataatgaggtggttacacgcgcctcccttaagatacgaagccagaagttgatcgagtctcataagaaacatagacgctccagaagaagctag

SEQ ID NO: 240163 - DNA, 1788 bp, Artificial Sequence
  derived and/or modified sequence
atgactagcccactgtgtcgggctgcgagtgcgaatgccctgccaccccaggaccaggcaagcactccctcttctagagtaaaagggcgagaagcctccggcaagccttcccacctgcgcggaaaaggaaccgctcaagcctggacgcctggaagaagtaagggaggctctttccaccggggtgctgggaagccctccgtgcattctcaggttgccgagctacacaaaaagatccagcttctcgaaggagatagaaaggccttttttgaatcgtcacaatggaatataaaaaaaaaccaggagacgattagccagctaaggaaagaaacaaaagcgctagagctcaaactgctggacctgcttaagggtgatgaaaaagtggtccaggcagttatccgtgagtggaaatgggaaaaaccctatctgaaaaaccgcactggccaggccctcgaacacctcgaccataggttgagggaaaaagtgaaacaacaaaacgccctccgtcaccaagtagtgctcaggcagagacgccttgaggaactacagttacagcacagcctcagactcctagaaatggcagaagctcagaataggcataccgaagtcgctaaaacgatgcgcaatctcgagaacagactggaaaaggcgcagatgaaagcccaagaggcagaacatatcacgtctgtatacttgcagctgaaagcctatctgatggatgaatcactgaacctggagaacagactcgacagcatggaggccgaagttgtaagaactaagcatgaactggaggcactgcacgtggttaatcaggaagctctcaacgctcgcgatatagccaagaatcagctacagtacctggaagaaacgctcgtgagagagagaaagaagcgggagaggtatatttccgagtgcaagaagcgggctgaagaaaagaagctggagaatgagagaatggaacggaaaactcaccgggaacatctgctcctccagtcggatgataccatacaggacagcctgcatgcgaaggaggaggagttacgccagcgctggagcatgtatcaaatggaagtcatttttggcaaggtaaaggatgcaacaggaaccgacgagacccattctctcgtgagacggttcctggctcagggggatacttttgcacagttggagacacttaagtctgagaacgagcagactctggtcaggcttaaacaggagaagcagcaactccagcgcgagcttgaagacttaaagtacagcggggaagccacactggtcagccaacagaaactccaggccgaggctcaggaacggctcaaaaaggaggagcggcgacacgccgaagctaaggatcagctcgaaagagcactacgggctatgcaagtggccaaagattctctggagcacctagcatctaagcttatccacatcacagtggaagacgggcgtttcgcgggaaaggagctcgatcctcaggctgataactacgttccaaacctgctggggctggtagaggagaaattgctgaagttgcaggctcagctccagggccatgatgttcaggagatgctctgtcatatagctaatcgcgagttcctggcctcactcgaaggcaggctacccgagtacaacacccgcatcgctcttccactggctacaagcaaggacaaatttttcgacgaagaatcagaggaggaagataatgaggttgttaccagagcctccctaaaaataaggagccagaaactgatcgagtcccacaagaaacaccgcagatcacggagaagctag

SEQ ID NO: 240164 - DNA, 1725 bp, Artificial Sequence
  derived and/or modified sequence
ctccctccccaagatcaggcatctaccccctcttctgggaagccctcccacttaaggggaaaaggcacggctcaagcttggaccccagggcgaagtaaagggggtagtttccaccgcggagctggtaaaccgtccgtgcacagccaggtcgccgaactccataagaagatacagttgttggagggtgacaggaaggcttttttcgagtccagccagtggaacataaaaaaaaaccaggagacaatctcacaactgcgcaaagagacaaaagccttggagctgaagctgctcgaccttctcaagggcgatgagaaggtggttcaagcggttattagagaatggaagtgggaaaagccatatcttaaaaaccggacaggacaggccctggaacatttggaccataggttacgcgaaaaggtcaaacagcagaatgcactgaggcatcaggtggtgctgcgccaacgtcggcttgaagaactgcaactccagcattcattgcgcctgctggagatggcagaggctcaaaaccgacacaccgaagtggccaaaacaatgcgtaaccttgaaaatagactcgaaaaggctcagatgaaagcgcaggaagccgagcacatcacctccgtatacctccagcttaaagcatacctgatggacgagtccttgaatctggaaaataggctggattctatggaggccgaggtggtgagaaccaagcacgagctggaagctttacacgttgtgaatcaggaagctctcaacgccagggacatcgccaagaaccagctgcagtatctggaagagacactcgtcagggaacgaaaaaagcgtgagcgctacatttctgagtgcaagaagcgcgcagaggagaaaaagctggagaacgagcgcatggagcgaaaaactcaccgcgagcacctgttgttgcagagcgacgacactattcaagattctctgcatgcaaaagaggaagagctgcgccagagatggtcgatgtatcaaatggaggttatcttcggcaaggtgaaggacgcgactgggaccgatgagacccacagcctggtgaggcgctttctcgctcaaggtgacaccttcgcccagctcgaaacgcttaagagtgagaacgagcagaccttggtaaggctgaagcaggagaaacagcaactccagagggagctggaggatctgaagtacagcggagaggctacgttagtttctcagcaaaaactccaagccgaagctcaggagcgcctgaagaaggaagaacgcagacacgctgaagccaaggatcaactggagagggcactgcgggctatgcaggttgccaaggactcactcgaacacctagccagcaaactcatccacatcacggttgaggacggaagattcgcaggcaaggagctggacccacaggcggataactacgtgccaaatttactgggactcgttgaagagaagttactcaagcttcaggcacagctccagggtcacgacgtccaggaaatgctgtgccacattgctaacagagaatttttggccagtctagaaggcaggctacccgagtataacacccgcatcgccctgccactggccaccagcaaggacaagttctttgatgaagagagtgaagaggaagacaacgaggttgttactcgggcaagcttaaaaataagaagtcaaaagctgatagagtcgcataagaagcatagacgcagccgacgttcttag

SEQ ID NO: 240165 - protein, 384 aa, Artificial Sequence
  derived and/or modified sequence
MARALVQLWAICMLRVALATVYFQEEFLDGEHWRNRWLQSTNDSRFGHFRLSSGKFYGHKEKDKGLQTTQNGRFYAISARFKPFSNKGKTLVIQYTVKHEQKMDCGGGYIKVFPADIDQKNLNGKSQYYIMFGPDICGFDIKKVHVILHFKNKYHENKKLIRCKVDGFTHLYTLILRPDLSYDVKIDGQSIESGSIEYDWNLTSLKKETSPAESKDWEQTKDNKAQDWEKHFLDASTSKQSDWNGDLDGDWPAPMLQKPPYQDGLKPEGIHKDVWLHRKMKNTDYLTQYDLSEFENIGAIGLELWQVRSGTIFDNFLITDDEEYADNFGKATWGETKGPEREMDAIQAKEEMKKAREEEEEELLSGKINRHEHYFNQFHRRNEL

SEQ ID NO: 240166 - DNA, 1155 bp, Artificial Sequence
  derived and/or modified sequence
atggccagagccctcgtgcagttgtgggccatctgcatgctccgggttgcgcttgctacagtctactttcaggaagagttcctcgacggcgagcattggcgcaaccgctggctacagtccaccaacgactcgcggtttggtcactttagattaagcagtggcaagttttacggacacaaggaaaaagataaaggtctccagacaacccagaatggacgtttctacgcaataagtgctcgcttcaagccgtttagcaataaaggcaagaccctggtcatccagtataccgtcaaacacgaacagaaaatggattgcgggggcggatatattaaggtgttcccggccgatattgatcaaaagaacctgaatggtaagagccagtactatatcatgttcggtcctgatatctgcggctttgatatcaagaaagtgcacgtcatcctgcactttaagaacaaataccatgaaaacaaaaaattgatcaggtgtaaagtggatggctttactcacctatacactctcattttgagacctgacctttcttacgatgtcaaaattgacggccaaagtatcgaatcaggttctattgagtatgattggaatttgaccagtctgaaaaaggaaacatctcccgcagagtccaaggattgggaacagaccaaagacaacaaagcccaggactgggagaagcactttttagatgcctcaactagcaaacagtcggattggaatggggacttagacggagactggcctgcccccatgttgcagaaacccccttatcaagatggactgaaacccgaaggaattcataaggacgtgtggcttcacagaaagatgaagaatacagactacctcactcagtacgatctgtcagaattcgaaaacattggggccattggccttgagttgtggcaggtgcgtagcggaacaatatttgataactttctcattaccgacgacgaggaatatgctgataattttgggaaggcaacatggggtgaaaccaagggaccagagcgcgagatggatgcgattcaagccaaagaggagatgaagaaggcccgagaggaggaagaagaggagttgctttccgggaagatcaatcgccatgaacactacttcaaccagttccaccggcgaaacgagctgtag

SEQ ID NO: 240167 - DNA, 1155 bp, Artificial Sequence
  derived and/or modified sequence
atggcccgggccctggtgcagctgtgggccatctgcatgctgcgggtggccctggccaccgtgtacttccaggaggagttcctggatggagagcactggaggaaccgctggctgcagagcaccaatgacagccgcttcggccacttccggctgagcagcggcaagttctacggccacaaggagaaggacaagggcctgcagaccacccagaatggccgcttctacgccatcagcgcccgcttcaagcccttcagcaacaagggcaagaccctggtgatccagtacacagtgaagcatgagcagaagatggactgtggcggcggctacatcaaggtgtttcctgctgacatcgaccagaagaacctgaatggcaagagccagtactacatcatgtttggaccagacatctgtggctttgacatcaagaaggtgcacgtgatcctgcacttcaagaacaagtaccacgagaacaagaagctgatccgctgcaaggtggatggcttcacccacctgtacaccctcatcctgcggccagacctgtcctatgatgtgaagattgatggccagagcattgaaagtggcagcattgaatatgactggaacctgaccagcctgaagaaggagaccagccctgctgagagcaaggactgggagcagaccaaggacaacaaggcccaggactgggagaagcacttcctggatgccagcaccagcaagcagagcgactggaatggagacctggatggagactggccagcccccatgctgcagaagccaccctaccaggacggcctgaagccagagggcatccacaaggatgtgtggctgcacaggaagatgaagaacacagactacctgacccagtatgacctgtctgaatttgaaaatattggagccatcggcctggagctgtggcaggtgcgcagcggcaccatctttgacaacttcctgatcacagatgatgaggagtatgctgacaactttgggaaggccacctggggcgagaccaagggccctgagcgggagatggatgccatccaggccaaggaggagatgaagaaggcccgggaggaggaggaggaggagctgctgagcggcaagatcaacagacatgagcactacttcaaccagttccacagaagaaatgagctgtag

SEQ ID NO: 240168 - DNA, 1155 bp, Artificial Sequence
  derived and/or modified sequence
atggcccgggccctggtgcagctgtgggccatctgcatgctgcgggtcgcgctggcaacggtctattttcaggaggagttcctggacggggaacattggcgtaatcgctggctgcagagcaccaacgactcccggtttgggcactttagactctccagcggcaagttctacggtcacaaagagaaagacaagggccttcagaccacacagaatggtaggttctacgccattagcgctcggtttaagcctttttctaataaggggaaaaccttggtaatccagtataccgtgaaacacgaacagaagatggattgtggaggcggctacattaaagttttccccgcggacatagaccagaagaatctgaatggaaagtctcaatactatatcatgttcgggccagatatatgcggttttgatattaaaaaggtgcatgtgatattacacttcaagaacaaataccatgagaataagaagctgatacgctgtaaggttgatggttttactcatctgtacacactaatcctcaggccagacctgtcatacgatgtaaagatcgatggccagtcaatcgagagcggtagtatcgagtatgattggaatctcacctctcttaagaaggagacatctccagctgagtcaaaagactgggaacagacaaaagacaataaggcgcaggattgggagaaacattttttggacgcctcaacctcgaaacagtctgattggaatggagatcttgacggggattggcccgcccctatgctgcagaagcccccttaccaagacggtcttaagcccgaaggaatccacaaagacgtctggttacacagaaaaatgaagaacaccgattatctgacccaatatgacctgtctgagtttgaaaacatcggagccatcggactcgagctttggcaggtgcggagtggcaccatctttgacaattttctcattaccgatgatgaagaatacgctgacaatttcggcaaagcaacctggggagagacaaaggggccggaaagggaaatggatgcaatccaggcgaaggaggaaatgaagaaggcccgggaagaggaggaggaggagctgcttagcgggaaaatcaacaggcatgaacactacttcaatcaattccaccggagaaatgagctgtag

SEQ ID NO: 240169 - DNA, 1155 bp, Artificial Sequence
  derived and/or modified sequence
atggctcgggctcttgttcagttgtgggccatctgcatgctcagagtagccctagccacagtgtactttcaggaagaatttctagacggagagcattggagaaaccgatggttgcagagtactaacgactctagattcgggcacttccgcttaagcagcgggaagttctatggtcacaaggagaaggataagggcctccagaccacgcagaacgggcgattttacgccatttccgctcgtttcaagcccttcagcaataagggcaaaactctagttatccagtacaccgtgaaacacgagcaaaagatggactgcggtggcggatacattaaggtgtttccggcagatattgaccagaagaatctgaatggaaagtctcagtactatattatgttcggaccagatatatgtggctttgatattaagaaagttcacgtaatacttcattttaagaataaataccacgagaacaagaagctgatccggtgtaaggtggatgggttcacccacctatacacgttgattttaagacccgatttgtcctatgacgtgaagatcgacggccagtcaatagagtcaggatctatcgaatatgattggaatctgacaagcttgaaaaaggagaccagcccagcagagtcgaaggactgggagcagactaaagataataaagcacaggattgggagaagcactttctggacgctagtacatccaagcagagcgactggaacggggaccttgacggcgattggcccgcaccgatgctgcagaagccgccttatcaggacggtctaaaacctgaaggcatacacaaggacgtttggctgcatcgtaaaatgaaaaatacagattacttaactcagtacgacctctccgagtttgaaaacatcggcgctattgggctcgagctctggcaggttcggtctggcaccatcttcgacaatttcttgatcacagatgatgaggagtacgcagataatttcggtaaagctacatggggagaaacaaaaggcccagagagggaaatggatgccatccaggcgaaggaggagatgaagaaggcaagagaggaggaggaggaagaattgctaagtggcaaaattaaccgccacgagcactactttaaccagtttcatcgcaggaacgaattatag

SEQ ID NO: 240170 - DNA, 1285 bp, Artificial Sequence
  derived and/or modified sequence
agagccgcagagagagctgggagctaaggggtggcggcgaccggaagcgcagtgcacacccccatggcccgggctttggtccagctctgggccatatgcatgctgcgagtggcgctggctaccgtctatttccaagaggaatttctagacggagagcattggagaaaccgatggttgcagtccaccaatgactcccgatttgggcattttagactttcgtcgggcaagttttatggtcataaagagaaagataaaggtctgcaaaccactcagaatggccgattctatgccatctctgcacgcttcaaaccgttcagcaataaagggaaaactctggttattcagtacacagtaaaacatgagcagaagatggactgtggagggggctacattaaggtctttcctgcagacattgaccagaagaacctgaatggaaaatcgcagtactatattatgtttggacccgatatttgtggatttgatatcaagaaagttcatgttattttacatttcaagaataagtatcacgaaaacaagaaactgatcaggtgtaaggttgatggcttcacacacctgtacactctaattttaagaccagatctttcttatgatgtgaaaattgatggtcagtcaattgaatccggcagcatagagtacgactggaacttaacatcactcaagaaggaaacgtccccggcagaatcgaaggattgggaacagactaaagacaacaaagcccaggactgggagaagcattttctggacgccagcaccagcaagcagagcgactggaacggtgacctggatggggactggccagcgccgatgctccagaagcccccgtaccaggatggcctgaaaccagaaggtattcataaagacgtctggctccaccgtaagatgaagaataccgactatttgacgcagtatgacctctcagaatttgagaacattggtgccattggcctggagctttggcaggtgagatctggaaccatttttgataactttctgatcacagatgatgaagagtacgcagataattttggcaaggccacctggggcgaaaccaagggtccagaaagggagatggatgccatacaggccaaggaggaaatgaagaaggcccgcgaggaagaggaggaagagctgctgtcgggaaaaattaacaggcacgaacattacttcaatcaatttcacagaaggaatgaactttagtgatccccattggatataaggatgactggtaaaatctcattgctactttaatctatgtttcaaactc

SEQ ID NO: 240171 - DNA, 1155 bp, Artificial Sequence
  derived and/or modified sequence
atggccagagccctggtgcagctgtgggccatctgcatgctgagagtggccctggccaccgtgtacttccaggaggagttcctggacggcgagcactggagaaacagatggctgcagagcaccaacgacagcagattcggccacttcagactgagcagcggcaagttctacggccacaaggagaaggacaagggcctgcagaccacccagaacggcagattctacgccatcagcgccagattcaagcccttcagcaacaagggcaagaccctggtgatccagtacaccgtgaagcacgagcagaagatggactgcggcggcggctacatcaaggtgttccccgccgacatcgaccagaagaacctgaacggcaagagccagtactacatcatgttcggccccgacatctgcggcttcgacatcaagaaggtgcacgtgatcctgcacttcaagaacaagtaccacgagaacaagaagctgatcagatgcaaggtggacggcttcacccacctgtacaccctgatcctgagacccgacctgagctacgacgtgaagatcgacggccagagcatcgagagcggcagcatcgagtacgactggaacctgaccagcctgaagaaggagaccagccccgccgagagcaaggactgggagcagaccaaggacaacaaggcccaggactgggagaagcacttcctggacgccagcaccagcaagcagagcgactggaacggcgacctggacggcgactggcccgcccccatgctgcagaagcccccctaccaggacggcctgaagcccgagggcatccacaaggacgtgtggctgcacagaaagatgaagaacaccgactacctgacccagtacgacctgagcgagttcgagaacatcggcgccatcggcctggagctgtggcaggtgagaagcggcaccatcttcgacaacttcctgatcaccgacgacgaggagtacgccgacaacttcggcaaggccacctggggcgagaccaagggccccgagagagagatggacgccatccaggccaaggaggagatgaagaaggccagagaggaggaggaggaggagctgctgagcggcaagatcaacagacacgagcactacttcaaccagttccacagaagaaacgagctgtag

SEQ ID NO: 240172 - protein, 318 aa, Artificial Sequence
  derived and/or modified sequence
MALPIIVKWGGQEYSVTTLSEDDTVLDLKQFLKTLTGVLPERQKLLGLKVKGKPAENDVKLGALKLKPNTKIMMMGTREESLEDVLGPPPDNDDVVNDFDIEDEVVEVENREENLLKISRRVKEYKVEILNPPREGKKLLVLDVDYTLFDHRSCAETGVELMRPYLHEFLTSAYEDYDIVIWSATNMKWIEAKMKELGVSTNANYKITFMLDSAAMITVHTPRRGLIDVKPLGVIWGKFSEFYSKKNTIMFDDIGRNFLMNPQNGLKIRPFMKAHLNRDKDKELLKLTQYLKEIAKLDDFLDLNHKYWERYLSKKQGQ

SEQ ID NO: 240173 - DNA, 957 bp, Artificial Sequence
  derived and/or modified sequence
atggccctgcccatcatcgtgaagtggggcggccaggagtacagcgtgaccaccctgagcgaggacgacaccgtgctggacctgaagcagttcctgaagaccctgaccggcgtgctgcccgagagacagaagctgctgggcctgaaggtgaagggcaagcccgccgagaacgacgtgaagctgggcgccctgaagctgaagcccaacaccaagatcatgatgatgggcaccagagaggagagcctggaggacgtgctgggccccccccccgacaacgacgacgtggtgaacgacttcgacatcgaggacgaggtggtggaggtggagaacagagaggagaacctgctgaagatcagcagaagagtgaaggagtacaaggtggagatcctgaacccccccagagagggcaagaagctgctggtgctggacgtggactacaccctgttcgaccacagaagctgcgccgagaccggcgtggagctgatgagaccctacctgcacgagttcctgaccagcgcctacgaggactacgacatcgtgatctggagcgccaccaacatgaagtggatcgaggccaagatgaaggagctgggcgtgagcaccaacgccaactacaagatcaccttcatgctggacagcgccgccatgatcaccgtgcacacccccagaagaggcctgatcgacgtgaagcccctgggcgtgatctggggcaagttcagcgagttctacagcaagaagaacaccatcatgttcgacgacatcggcagaaacttcctgatgaacccccagaacggcctgaagatcagacccttcatgaaggcccacctgaacagagacaaggacaaggagctgctgaagctgacccagtacctgaaggagatcgccaagctggacgacttcctggacctgaaccacaagtactgggagagatacctgagcaagaagcagggccagtag

SEQ ID NO: 240174 - DNA, 957 bp, Artificial Sequence
  derived and/or modified sequence
atggcccttcccatcatagttaaatggggtggccaggagtactccgtgaccacgctgagcgaggatgacacagtgcttgacctcaagcaatttctgaaaaccctgaccggcgttcttcccgaacgacagaaactcctgggcctcaaggttaaaggaaaacctgccgaaaatgacgtcaaactcggtgcattgaagcttaagcctaataccaaaattatgatgatggggacccgggaagaaagcttggaagacgtgctaggccctccacctgacaacgatgatgtcgtgaacgactttgatatcgaggatgaggtggtggaagtcgagaacagggaagagaacctccttaagatttctcgcagagtgaaggaatacaaggtcgaaatcttgaatccccctcgagaaggcaaaaaactactggttctggacgtggactacacccttttcgatcatagatcctgcgctgaaacgggcgtggaattaatgcggccctatctccacgaatttcttacatccgcctacgaggactacgatatagttatctggagcgcgaccaatatgaagtggattgaggcgaaaatgaaggagttaggcgtctctaccaacgctaactataaaatcacgttcatgcttgatagtgctgcaatgatcaccgtgcataccccccgacgggggctcatcgacgtcaagccactgggagtaatctggggaaaattttctgagttttactccaaaaaaaacacaattatgttcgacgacataggaagaaatttcctaatgaatccacagaatggtcttaaaatcagaccatttatgaaggcccacctcaatcgcgacaaagataaggaacttctcaagcttactcagtatctgaaggagatcgccaaattggacgattttctagaccttaatcacaaatactgggaacgctacctgtccaaaaagcaggggcagtag

SEQ ID NO: 240175 - DNA, 957 bp, Artificial Sequence
  derived and/or modified sequence
atggccctgcccatcatcgtgaagtggggcggccaggagtacagcgtgaccaccctgtctgaagatgacacagtgctggacctgaagcagttcctgaagaccctgactggagtgctgcctgagcggcagaagctgctgggcctgaaggtgaagggcaagccagcagaaaatgatgtgaagctgggcgccctgaagctgaagcccaacaccaagatcatgatgatgggcacccgggaggagagcctggaggatgtgctgggccccccaccagacaatgatgatgtggtgaatgactttgatattgaagatgaggtggtggaggtggagaaccgggaggagaacctgctgaagatcagccggcgggtgaaggagtacaaggtggagatcctgaaccccccccgggagggcaagaagctgctggtgctggatgtggactacaccctgtttgaccacaggagctgtgccgagactggagtggagctgatgaggccctacctgcacgagttcctgaccagcgcctatgaagattatgacatcgtcatctggagcgccaccaacatgaagtggattgaggccaagatgaaggagctgggcgtgtccaccaatgccaactacaagatcaccttcatgctggacagcgctgccatgatcaccgtgcacaccccaagaagaggcctgattgatgtgaagcccctgggcgtcatctggggcaagttcagcgagttctacagcaagaagaacaccatcatgtttgatgacatcggcaggaacttcctgatgaacccccagaatggcctgaagatccggcccttcatgaaggcccacctgaacagagacaaggacaaggagctgctgaagctgacccagtacctgaaggagatcgccaagctggatgacttcctggacctgaaccacaagtactgggagcgctacctgagcaagaagcagggccagtag

SEQ ID NO: 240176 - DNA, 957 bp, Artificial Sequence
  derived and/or modified sequence
atggccctgcccatcatcgtgaagtggggcggccaggagtacagcgtgacaactcttagcgaggacgatacagtactggatctgaaacagtttcttaagacactgaccggggtcttgcctgagcgacagaaattgctcggcttaaaggtgaagggcaagcctgcagagaatgacgtcaagttaggcgccttaaaacttaagcccaatactaaaattatgatgatgggaaccagagaagagagtctggaggacgtgctcggccccccccccgataatgacgacgtggtaaacgatttcgatattgaggatgaggtagtcgaagtggaaaaccgcgaagaaaacctgttaaaaatcagcagacgggtcaaggagtataaggtagagatattaaaccctcctagggagggcaagaaacttctggtcctggatgtggactacactcttttcgaccaccgatcctgtgccgaaacaggagtcgaattgatgcgcccgtacctccacgagttcctgacttcggcttatgaggactatgatatagtgatctggtcagcaaccaatatgaaatggatcgaagctaagatgaaagaactgggtgtgagtactaacgcaaactataagatcaccttcatgcttgactctgcagccatgatcacggtgcacacccctaggaggggtttgattgacgtgaaaccattgggggtgatctggggaaaattctcagagttctactctaaaaagaacacaatcatgtttgacgacatcggtaggaacttcctcatgaatccacagaacggccttaagattcgcccttttatgaaagcccacctgaaccgtgataaggacaaagagctgttgaagcttacccaatacctgaaagagatcgcgaagctcgacgactttctcgacctaaaccacaagtactgggaaagatatttgtctaaaaagcagggacaatag

SEQ ID NO: 240177 - DNA, 957 bp, Artificial Sequence
  derived and/or modified sequence
atggccctcccaataatagttaagtggggcggtcaggagtactcggtcacgacattaagcgaagacgacactgttcttgacttgaaacaattcctgaaaacattgaccggcgttctaccagaaaggcagaagctgctaggtctcaaggttaaagggaagcctgctgaaaatgacgtcaagttaggggcactgaagctgaagcccaataccaagatcatgatgatgggtacccgagaggaatcgctggaggatgtgctcggcccaccccctgacaacgacgatgtagttaatgatttcgacatcgaggatgaagtcgtggaggtggagaaccgtgaggagaaccttctcaaaataagccgccgagttaaggagtacaaggttgaaatcttaaacccccctcgcgaggggaagaagctcctcgtgctcgatgtggattacaccctgttcgatcatagaagctgtgcagaaacgggggtggagctaatgcgcccatacttacatgaattcctgacatcagcatacgaagattacgacattgtcatatggtccgcaactaacatgaaatggattgaagctaaaatgaaggagctcggcgtttctactaacgccaattacaagatcacattcatgttggactctgccgcaatgatcaccgttcatacgcctcgcaggggacttatcgatgttaaacccttaggcgtcatttggggcaagttcagtgagttttactctaagaagaacaccattatgttcgacgatatcggtagaaactttctgatgaaccctcaaaatggactaaaaatacggccatttatgaaagcccatctcaatagagataaggacaaagaacttctcaagctcacccagtacctaaaagagattgccaaacttgatgactttctggacctgaatcacaaatactgggaacgctatctgtcaaagaagcaggggcaatag

SEQ ID NO: 240178 - DNA, 2388 bp, Artificial Sequence
  derived and/or modified sequence
agagcggccacccagggatcggcgctatctgcacagcggttacagtctcggaaaggcctggcttcttcgtggctttgtggagatcccttacagcggccatttgattagcacccgaagagattcaaaggaagcagttgttccgtccccaacatatttccgtttcaaaccacccacttccggtttttcagccggttccggtcccgcccttcacttccggtcgctttcggtctctcagcggccggtttctgcgtccgctgccgcaggttccaccgcgctccaggtatttttttttctgaaggaaagctgcttcctcatatgtttcaagaatggctctccctatcattgtaaaatggggtggacaggagtattcagtgaccacactttcagaagatgatactgtgctcgatctcaaacagtttctcaagacccttacaggagttcttccagaacgccaaaagttacttggactcaaagttaaaggcaaacctgcagaaaatgatgttaagcttggagctctcaaactgaaaccaaatactaaaatcatgatgatgggaactcgtgaggagagcttggaagatgtcttaggtccaccccctgacaatgatgatgttgttaatgactttgatattgaagatgaagtagttgaagtagaaaatagggaagaaaacctactgaaaatttctcgcagagtgaaagagtacaaagtggaaattttgaatcctcccagggaagggaaaaagcttttggtgctagatgttgattatacattatttgaccacaggtcttgtgcagagactggggtagaattaatgcggccatatcttcatgaatttctaacatctgcctatgaagattatgacattgttatttggtctgcaacaaatatgaagtggattgaagctaaaatgaaagagctgggagtgagcacaaatgcaaattataagattactttcatgttggatagtgctgctatgataacagtacatactccaaggagaggattaatagacgtaaagcctcttggtgttatatggggaaagttttcggagttttacagcaagaaaaacaccattatgtttgatgacatagggagaaattttctaatgaacccacagaatggactaaagataaggccttttatgaaagcgcacctaaatcgtgataaagacaaagaacttttaaaattaactcagtacctcaaggagatagcaaaattagatgactttttggatctaaatcacaaatattgggaaagatatctctcaaagaagcaaggacagtagttacaagttatactggcagttattgaagatacttaagatccaagaacttcttgcttttatgctagaaatcattatgatagtgctggacactgaagcaaataccatactgcttatacttggtcttccagttttttgtaaatttaattttatattttttgaagatgatagcaatatgctaaaaaatgcttgtcccctatatgaatattctgttacgcttgaaaaatattttctccagcgttggttactgaccaccccaccctcccaccacacacacacacacacacacacacacacacacacacacacacacacaaagtggagaaaaatgtatactcaacaatgtcattttgtgactttggaaacaagttatgttttgtgtttttgtctcattgtgttattgtctgactaaatctaaaaccaaacccatgttgaaactagtacttttccctttaaaaacaaaccaaaaaaaaaaacaaaaaaaaactttttaattaaagaacctagtttgctatgcttaaaattaccaagaattttttatttctttgtcatagacacaatttctcttctgtatgccactagttacatttctaaattctgagcggtctcagttaggcctgtatgtgtgtacatgtccaagtaaagctggaaaatgtcagtcttgacacagctgtgtcttagtatgagaaacagaagactgaagaataaaaactaaggaacaagaatgagtctctttttggtggctaagtagaatcttcctaaaaccattgtcataaaagcagttaaaggcaataaatttttaaaagggacatatcactgattcattcctaaaaagcatgaacaaaaagtttttgttctgttccagctatatcttgtctaagtgctaacactgtttcagtgaaaatatctagccataagattaaaaaaatatattatttgcaatgcttaagcctgcagatacgtaatgtgaccactgttttgtgttgacaatattgctttatacagttcttgtatttgaaaggaattgatccttttaaagaaacatggtgtatattgttcttacaggactaatttcagtggtgtaaataataaatatcttttcttaaaa

SEQ ID NO: 240179 - protein, 309 aa, Artificial Sequence
  derived and/or modified sequence
MATELQCPDSMPCHNQQVNSASTPSPEQLRPGDLILDHAGGNRASRAKVILLTGYAHSSLPAELDSGACGGSSLNSEGNSGSGDSSSYDAPAGNSFLEDCELSRQIGAQLKLLPMNDQIRELQTIIRDKTASRGDFMFSADRLIRLVVEEGLNQLPYKECMVTTPTGYKYEGVKFEKGNCGVSIMRSGEAMEQGLRDCCRSIRIGKILIQSDEETQRAKVYYAKFPPDIYRRKVLLMYPILSTGNTVIEAVKVLIEHGVQPSVIILLSLFSTPHGAKSIIQEFPEITILTTEVHPVAPTHFGQKYFGTD

SEQ ID NO: 240180 - DNA, 930 bp, Artificial Sequence
  derived and/or modified sequence
atggccaccgagctgcagtgccccgacagcatgccctgccacaaccagcaggtgaacagcgccagcacccccagccccgagcagctgagacccggcgacctgatcctggaccacgccggcggcaacagagccagcagagccaaggtgatcctgctgaccggctacgcccacagcagcctgcccgccgagctggacagcggcgcctgcggcggcagcagcctgaacagcgagggcaacagcggcagcggcgacagcagcagctacgacgcccccgccggcaacagcttcctggaggactgcgagctgagcagacagatcggcgcccagctgaagctgctgcccatgaacgaccagatcagagagctgcagaccatcatcagagacaagaccgccagcagaggcgacttcatgttcagcgccgacagactgatcagactggtggtggaggagggcctgaaccagctgccctacaaggagtgcatggtgaccacccccaccggctacaagtacgagggcgtgaagttcgagaagggcaactgcggcgtgagcatcatgagaagcggcgaggccatggagcagggcctgagagactgctgcagaagcatcagaatcggcaagatcctgatccagagcgacgaggagacccagagagccaaggtgtactacgccaagttcccccccgacatctacagaagaaaggtgctgctgatgtaccccatcctgagcaccggcaacaccgtgatcgaggccgtgaaggtgctgatcgagcacggcgtgcagcccagcgtgatcatcctgctgagcctgttcagcaccccccacggcgccaagagcatcatccaggagttccccgagatcaccatcctgaccaccgaggtgcaccccgtggcccccacccacttcggccagaagtacttcggcaccgactag

SEQ ID NO: 240181 - DNA, 930 bp, Artificial Sequence
  derived and/or modified sequence
atggcgacagagctgcaatgccccgactctatgccttgccataaccagcaggtgaattctgcgtccacgcccagtcccgaacagctgaggcccggggacctgatcctggatcatgccgggggcaatcgagctagccgagccaaggtgatccttctcactggctatgcccactccagccttccagctgaacttgactccggggcttgtgggggctcatctttgaatagcgaaggaaacagtgggtccggtgactcgagcagttacgacgcaccggccgggaattcgttcttggaagattgtgagttgtccagacagatcggcgcgcaactaaaactgctgcctatgaatgaccagatcagagagttgcagaccatcatcagagacaaaactgcctcccgcggtgactttatgttttccgctgaccggctcatacggctggtggtcgaagaggggcttaaccagctcccatataaagaatgcatggtgactacacctacaggatacaagtatgagggcgtgaaattcgaaaaggggaattgcggggtgagcataatgagatcaggtgaagcaatggaacagggcctgcgcgattgctgccgaagcatcagaattgggaaaatactgatccaatccgacgaggagacgcagagggcaaaggtgtactatgcaaaattcccccccgacatctatcgccggaaagtcctgctgatgtacccaatcctcagcacaggaaatacagtcatagaagctgtaaaagttctcatcgaacacggagtccagccctcggtgattatcttgctcagcttgttttcaactcctcacggtgcgaagtctataatccaagagttccctgagatcacgattctaacaaccgaggtccacccggtcgcaccaactcatttcggacagaaatacttcggcactgattag

SEQ ID NO: 240182 - DNA, 2186 bp, Artificial Sequence
  derived and/or modified sequence
gtgtgctaaaggaaaccaacagcggcctaggggtgaaaggacagccagggttagatgttctgaggaggcgggagcaaccgagagagcacgtgagcatctgtcctttctacccgttcctctttatctttagtgttcagtagcagcggggatagcccggggcccggtgtatggccacggagttacagtgtccggactccatgccctgtcacaaccagcaagtaaactctgcctcaaccccaagtcccgagcagctgcgacctggcgatctgatcctggaccacgcagggggaaacagagcctccagggccaaggtgattctcctcacggggtacgcccattctagcctgccggccgagctggactctggggcctgcggcggctccagcctcaactcagagggcaacagtggtagtggtgacagtagcagctatgacgcaccagctggcaactccttcctagaggactgcgaactctcccggcagatcggggcgcagcttaagctgctgcctatgaatgatcagatacgggagctacagaccatcatccgtgacaagacagccagtagaggtgacttcatgttttctgcggatcgtttgatcagacttgttgtggaagagggattgaatcagctgccatataaagaatgcatggtgaccactccaacagggtacaagtatgaaggagtgaaatttgagaagggaaattgtggggtcagcataatgagaagcggtgaggcaatggaacaaggtttacgagactgctgtcgatccatacgaattggaaagatcctgattcagagtgatgaggagacacaaagagccaaagtatattatgccaaattccccccagacatttaccggagaaaagtccttctgatgtatccaattctcagcactggaaatactgtaattgaagctgtaaaggttcttatagaacatggagttcaacccagtgttatcatcctactcagtctgttctccactcctcatggtgccaaatcaatcattcaggagtttccagagatcacaattttaactactgaagttcatcctgttgcacctacacattttggacagaaatactttggaacagactaagttatttaagtaaaataattatcttatgtaatattacaatcatgttttgattttctatttgttttactgattcacttgagggtggcagagaaaaatgtgttaaaatgctttttagttttggaagtgggtatatttgaggttatatctcatttagttatttgtttactgttggcaccgaattcaacaatgaagtatatgcaactcttacaaaacataaattttaataatattctaatgcaaattactgaaccctcagtgcattaaaattatttcctaatttatgagcctcttagtttggaggttgcttgaagccacaaataaaactcaaatgagagtcagttctttgtcccactgtagtttgcattttgtttagtttggttttagctctactaaggtttcacatatgtggctattgccacattcctctactgttttctttctgatactggacatgctagtaacttggagaggagaataaaagaatgtctcctggaattttacattcccattaatgtcctcattcagttggcagacctaggatgtatggttaactctcaggccattatgtttttcatggctcatttcccaaactgcattgttggtaggtgccttgctaagctgtaatgcagtgaagaagatggtggggcatttttagtaattggaactgtaacattaatttacaagattgaaccggggatgtctggatgctgacaagggagagccaagtactgttaatgccatcaatcctctaggaaggaattggtggtttttctgaagtgtgggggaaagggtggtttcttgctggatttcatggccagtaagtaaatttaaatgcttcatttttaatttggatgtttctgctagagacctttgatttggaaattagttattttgcatgtttgtcaactgtatatgtatgaaaatagaaaaaaaccatgctttttgtaaaaacccctaagatttgtatatgttcatctttaggcttctgaaagggagagaaatcatattggaaatcagtgttggtgttctgaaatctgcttgtaaaactctcatctcattttacattgatattaaaacattttaacagtg

SEQ ID NO: 240183 - DNA, 930 bp, Artificial Sequence
  derived and/or modified sequence
atggccacagagctgcagtgcccagacagcatgccctgccacaaccagcaggtgaacagcgccagcacccccagccctgagcagctgcggcctggggacctgatcctggaccatgctgggggcaacagagccagccgggccaaggtgatcctgctgaccggctacgcccacagcagcctgcctgctgagctggacagcggggcctgtggcggcagcagcctgaacagcgagggcaacagcggcagcggggacagcagcagctatgatgccccagctggcaacagcttcctggaggactgtgagctgagccggcagatcggggcccagctgaagctgctgcccatgaatgaccagatccgggagctgcagaccatcatccgggacaagacagccagcagaggagacttcatgttttctgctgacaggctcatccggctggtggtggaggagggcctgaaccagctgccctacaaggagtgcatggtgaccacccccaccggctacaagtatgagggcgtgaagtttgagaagggcaactgtggggtgtccatcatgaggtctggagaggccatggagcagggcctgcgggactgctgccgcagcatccgcatcggcaagatcctgatccagagtgatgaggagacccagagggccaaggtgtactatgccaagttccccccagacatctacagaaggaaggtgctgctgatgtaccccatcctgagcactggaaacacagtcatcgaggccgtgaaggtgctgattgaacatggagtgcagcccagcgtcatcatcctgctgagcctcttcagcaccccccacggggccaagagcatcatccaggagttccctgagatcaccatcctgaccacagaggtgcaccctgtggcccccacccacttcggccagaagtacttcggcacagactag

SEQ ID NO: 240184 - DNA, 930 bp, Artificial Sequence
  derived and/or modified sequence
atggccaccgagctgcagtgccccgacagcatgccctgccacaaccagcaggtgaacagcgcctccaccccttctccagaacagcttcgaccaggtgatctgatactcgaccatgctggcggcaaccgcgcctctagggcaaaggtgatactgctgacaggatacgctcactcctcactgcctgcagagttggattccggtgcctgtggtgggtctagtctgaatagtgagggtaattctgggtctggcgactcttcttcctatgacgcacctgctggcaattcctttttagaggactgtgaattgtcacggcagataggagcccagctgaaattactgccaatgaacgaccagatcagagaattgcagactatcatacgggataagacagcctcaaggggcgatttcatgttcagcgcggatagactgatccggctggttgtcgaggagggccttaatcagctgccttataaagagtgtatggtcactaccccaacagggtataagtatgaaggcgtcaagttcgaaaagggcaactgcggagtgagtattatgcggagcggcgaggcaatggaacaaggtctgagagattgttgccgctctattcgcattggaaagattctcattcagtccgatgaggaaacccagcgcgcaaaagtgtattatgcgaagtttcctcccgatatctataggaggaaggttctccttatgtaccccatactgagtacaggcaatactgtcatcgaagctgtaaaggtgctgattgagcatggtgtgcaaccgtccgtgatcattctgctgtcattgttcagcaccccccatggggcaaaatcgataattcaagagttccccgagattaccatcctcactactgaggtgcacccagtcgcccccactcactttggccaaaagtacttcgggaccgattag

SEQ ID NO: 240185 - DNA, 930 bp, Artificial Sequence
  derived and/or modified sequence
atggccacagagctccaatgtcctgattcaatgccatgtcacaaccagcaggttaacagcgcttccactcctagccccgaacaattgagaccaggagacttgatactcgaccatgccggaggcaaccgcgcaagtagggccaaagttattctcctgacagggtacgctcacagcagcctgcccgcagagctggatagtggagcatgcggaggttctagcctgaactccgagggtaattccggaagtggggattcctcctcttacgatgcacctgcagggaactcttttcttgaggactgtgagttgtcccggcagatcggcgctcagttaaaactgcttcccatgaatgaccaaatccgtgaattgcagacaatcatccgggacaagaccgctagcaggggtgactttatgttttccgcggaccgattgatccgcttggtggtcgaagaggggctcaatcaactgccgtacaaggaatgtatggtgactactcctaccgggtacaagtatgaaggagtcaagttcgagaagggcaattgtggtgtgtcgatcatgcgatctggagaggccatggagcaaggcctcagagactgttgcaggagtattagaattgggaagatcctcattcagagcgacgaggaaacgcagagagcaaaagtatactacgcaaaatttcccccagacatttaccggaggaaagttctgctgatgtaccctattctcagtactgggaacacagttattgaggctgtgaaggtcctcattgaacacggagtgcagcccagtgtaatcattttactatcactcttttctacaccacatggagccaagagcattattcaggaatttcccgagattacgatcttgacaacagaagtccatccggtcgcacccacacattttggtcagaaatacttcggaaccgactag

SEQ ID NO: 240186 - protein, 260 aa, Artificial Sequence
  derived and/or modified sequence
MWHAISRTSRMSQSGCPSGLLADKNISSSATRVIVKTAGNQKDFMVADDISVRQFKEMLLAHFQCQMDQLVLVFMGCLLKDHDTLSQRGIMDGHTIYLVIKSKQGSRSLAHSFRDLPTNDPCHRDRNTKANDTLNKVNHTSKANTAMISTKGQSHICATRQPAWIPALPSIELTQQLQEEYKDATVSLSSSRQTLKGDLQLSDEQSSSQITGGMMQLLMNNPYLAAQIMLFTSMPQLSEQWRQQLPTFLQQTQISDLLSA

SEQ ID NO: 240187 - protein, 475 aa, Artificial Sequence
  derived and/or modified sequence
MWHAISRTSRMSQSGCPSGLLADKNISSSATRVIVKTAGNQKDFMVADDISVRQFKEMLLAHFQCQMDQLVLVFMGCLLKDHDTLSQRGIMDGHTIYLVIKSKQGSRSLAHSFRDLPTNDPCHRDRNTKGNSSRVHQPTGMNQAPVELAHFVGSDAPKVHTQNLEVSHPECKAQMLENPSIQRLLSNMEFMWQFISEHLDTQQLMQQNPEVSRLLLDNSEILLQTLELARNLAMIQEIMQIQQPSQNLEYPLNPQPYLGLETMPGGNNALGQNYADINDQMLNSMQDPFGGNPFTALLAGQVLEQVQSSPPPPPPSQEQQDQLTQHPATRVIYNSSGGFSSNTSANDTLNKVNHTSKANTAMISTKGQSHICATRQPAWIPALPSIELTQQLQEEYKDATVSLSSSRQTLKGDLQLSDEQSSSQITGGMMQLLMNNPYLAAQIMLFTSMPQLSEQWRQQLPTFLQQTQISDLLSA

SEQ ID NO: 240188 - DNA, 783 bp, Artificial Sequence
  derived and/or modified sequence
atgtggcacgccatcagcagaaccagcagaatgagccagagcggctgccccagcggcctgctggccgacaagaacatcagcagcagcgccaccagagtgatcgtgaagaccgccggcaaccagaaggacttcatggtggccgacgacatcagcgtgagacagttcaaggagatgctgctggcccacttccagtgccagatggaccagctggtgctggtgttcatgggctgcctgctgaaggaccacgacaccctgagccagagaggcatcatggacggccacaccatctacctggtgatcaagagcaagcagggcagcagaagcctggcccacagcttcagagacctgcccaccaacgacccctgccacagagacagaaacaccaaggccaacgacaccctgaacaaggtgaaccacaccagcaaggccaacaccgccatgatcagcaccaagggccagagccacatctgcgccaccagacagcccgcctggatccccgccctgcccagcatcgagctgacccagcagctgcaggaggagtacaaggacgccaccgtgagcctgagcagcagcagacagaccctgaagggcgacctgcagctgagcgacgagcagagcagcagccagatcaccggcggcatgatgcagctgctgatgaacaacccctacctggccgcccagatcatgctgttcaccagcatgccccagctgagcgagcagtggagacagcagctgcccaccttcctgcagcagacccagatcagcgacctgctgagcgcctag

SEQ ID NO: 240189 - DNA, 1428 bp, Artificial Sequence
  derived and/or modified sequence
atgtggcacgccatcagcagaaccagcagaatgagccagagcggctgccccagcggcctgctggccgacaagaacatcagcagcagcgccaccagagtgatcgtgaagaccgccggcaaccagaaggacttcatggtggccgacgacatcagcgtgagacagttcaaggagatgctgctggcccacttccagtgccagatggaccagctggtgctggtgttcatgggctgcctgctgaaggaccacgacaccctgagccagagaggcatcatggacggccacaccatctacctggtgatcaagagcaagcagggcagcagaagcctggcccacagcttcagagacctgcccaccaacgacccctgccacagagacagaaacaccaagggcaacagcagcagagtgcaccagcccaccggcatgaaccaggcccccgtggagctggcccacttcgtgggcagcgacgcccccaaggtgcacacccagaacctggaggtgagccaccccgagtgcaaggcccagatgctggagaaccccagcatccagagactgctgagcaacatggagttcatgtggcagttcatcagcgagcacctggacacccagcagctgatgcagcagaaccccgaggtgagcagactgctgctggacaacagcgagatcctgctgcagaccctggagctggccagaaacctggccatgatccaggagatcatgcagatccagcagcccagccagaacctggagtaccccctgaacccccagccctacctgggcctggagaccatgcccggcggcaacaacgccctgggccagaactacgccgacatcaacgaccagatgctgaacagcatgcaggaccccttcggcggcaaccccttcaccgccctgctggccggccaggtgctggagcaggtgcagagcagcccccccccccccccccccagccaggagcagcaggaccagctgacccagcaccccgccaccagagtgatctacaacagcagcggcggcttcagcagcaacaccagcgccaacgacaccctgaacaaggtgaaccacaccagcaaggccaacaccgccatgatcagcaccaagggccagagccacatctgcgccaccagacagcccgcctggatccccgccctgcccagcatcgagctgacccagcagctgcaggaggagtacaaggacgccaccgtgagcctgagcagcagcagacagaccctgaagggcgacctgcagctgagcgacgagcagagcagcagccagatcaccggcggcatgatgcagctgctgatgaacaacccctacctggccgcccagatcatgctgttcaccagcatgccccagctgagcgagcagtggagacagcagctgcccaccttcctgcagcagacccagatcagcgacctgctgagcgcctag

SEQ ID NO: 240190 - DNA, 783 bp, Artificial Sequence
  derived and/or modified sequence
atgtggcacgcgatttctagaacgtcccgtatgtcccaatcaggatgcccctctggtctgctggcagataaaaatatctcctcctcggctacccgggtaattgtcaaaactgcaggcaatcaaaaggacttcatggtggccgacgacatctctgtaaggcagtttaaggaaatgctgctggctcatttccaatgccaaatggatcagctggttctcgtgtttatgggatgcttgttaaaggatcacgataccttatctcagcgaggaatcatggatggacacacgatttatttggtgatcaagtctaaacagggaagtcgaagtctggctcactccttcagagatctgcccactaatgatccctgtcacagggacagaaataccaaagctaatgatacacttaacaaggttaatcacacgtctaaagcaaatacagccatgatcagcaccaaggggcagtctcacatctgtgccacgcggcaacctgcgtggattcccgctctcccttcgatcgagcttacccagcaactccaagaagagtacaaagatgctacggtatccctcagctctagcagacagaccctgaagggcgacttgcaactgtcggacgagcagagtagtagccaaattacaggcggaatgatgcagttgcttatgaacaatccttatctagccgcccaaataatgctttttaccagtatgcctcagttatccgagcaatggcggcagcagctgcctacctttctgcagcagacccagatcagtgacctgctatccgcatag

SEQ ID NO: 240191 - DNA, 1428 bp, Artificial Sequence
  derived and/or modified sequence
atgtggcacgccataagccggacttctcgcatgtcccagagtggctgtccaagcggccttctcgcggataagaacatctctagctctgcgactagagttatcgtaaaaacggctggtaatcaaaaggactttatggtggccgatgacatcagcgtacggcagttcaaagaaatgctgctcgctcacttccagtgtcaaatggaccagctggtcctcgtgtttatgggttgtctactgaaagatcacgacacactgagtcagagaggtataatggatggtcacacgatttacttggtgatcaagtccaaacagggctcgcgcagtctggcccactccttccgcgacctccctaccaacgacccatgtcatcgggatcggaacacaaaggggaatagttcccgggtccaccagccgacaggcatgaatcaggccccagttgagttagcccactttgtagggtctgacgcgcccaaggtgcatacccagaatctggaggtgagccatcccgaatgcaaagcccagatgctcgaaaatccctcaatccagaggttactgtcaaacatggagtttatgtggcagttcattagcgagcacttggacacacaacagcttatgcaacagaatccggaggtgtcaagactcctgctggacaattccgaaatcctattgcagactttggaattggcccgaaacctcgcaatgattcaggagatcatgcagattcagcagcctagccagaatctggagtaccccttgaatcctcagccgtatctggggcttgaaaccatgcctgggggcaacaacgcattgggacagaactacgctgacatcaacgaccagatgctcaactccatgcaggatccctttggcggtaaccccttcactgcgctactagccggccaggtgctggaacaggtgcagagttccccccccccaccccctccctcacaggaacagcaggaccagctgacacagcacccggctactcgagttatttataactcctcgggcggcttttcatccaacacttctgcaaacgatacattaaataaggtgaatcatacgtcaaaagccaatacagcaatgatctctactaaaggccagagccacatttgcgcaacaaggcagcccgcctggataccggctctcccctccatcgaacttacccagcagctccaggaggaatacaaagacgccaccgtctctctttcttcaagccgtcagaccctgaaaggtgacttgcagctgtctgacgaacagagttcttcccaaatcacaggcggaatgatgcagctgcttatgaacaatccctacttggcagcccaaataatgctgttcacatccatgcctcagttgtcagaacaatggcgccagcagttacccacattcctacaacaaacacagatttccgatctcctgtctgcctag

SEQ ID NO: 240192 - DNA, 783 bp, Artificial Sequence
  derived and/or modified sequence
atgtggcacgccatcagcaggaccagcaggatgagccagagcggctgccccagcggcctgctggccgacaagaacatcagcagcagcgccaccagggtcatcgtgaagacagctggcaaccagaaggacttcatggtggctgatgacatctctgtgcggcagttcaaggagatgctgctggcccacttccagtgccagatggaccagctggtgctggtgttcatgggctgcctgctgaaggaccatgacaccctgagccagaggggcatcatggatggccacaccatctacctggtgatcaagagcaagcagggcagccgcagcctggcccacagcttccgggacctgcccaccaatgacccctgccaccgggacaggaacaccaaggccaatgacaccctgaacaaggtgaaccacaccagcaaggccaacacagccatgatcagcaccaagggccagagccacatctgtgccacccggcagcctgcctggatcccagccctgcccagcattgagctgacccagcagctgcaggaggagtacaaggatgccaccgtgtccctgagcagcagccggcagaccctgaagggggacctgcagctgagtgatgagcagagcagcagccagatcactggaggcatgatgcagctgctgatgaacaacccctacctggccgcccagatcatgctgttcacctccatgccccagctgtctgagcagtggaggcagcagctgcccaccttcctgcagcagacccagatcagtgacctgctgagcgcctag

SEQ ID NO: 240193 - DNA, 1428 bp, Artificial Sequence
  derived and/or modified sequence
atgtggcacgccatcagcaggaccagcaggatgagccagagcggctgccccagcggcctgctggccgacaagaacatcagcagcagcgccaccagggtcatcgtgaagacagctggcaaccagaaggacttcatggtggctgatgacatctctgtgcggcagttcaaggagatgctgctggcccacttccagtgccagatggaccagctggtgctggtgttcatgggctgcctgctgaaggaccatgacaccctgagccagaggggcatcatggatggccacaccatctacctggtgatcaagagcaagcagggcagccgcagcctggcccacagcttccgggacctgcccaccaatgacccctgccaccgggacaggaacaccaagggcaacagcagccgggtgcaccagcccaccggcatgaaccaggcccctgtggagctggcccactttgtgggcagtgatgcccccaaggtgcacacccagaacctggaggtgagccaccctgagtgcaaggcccagatgctggagaaccccagcatccagaggctgctgagcaacatggagttcatgtggcagttcatcagcgagcacctggacacccagcagctgatgcagcagaaccctgaggtgtcccggctgctgctggacaacagcgagatcctgctgcagaccctggagctggccaggaacctggccatgatccaggagatcatgcagatccagcagcccagccagaacctggagtaccccctgaacccccagccctacctgggcctggagaccatgcctgggggcaacaatgccctgggccagaactatgctgacatcaatgaccagatgctgaacagcatgcaggacccctttggaggcaaccccttcaccgccctgctggccggccaggtgctggagcaggtgcagagcagccccccacctcctccacccagccaggagcagcaggaccagctgacccagcacccagccaccagggtcatctacaacagcagcggcggcttcagcagcaacaccagcgccaatgacaccctgaacaaggtgaaccacaccagcaaggccaacacagccatgatcagcaccaagggccagagccacatctgtgccacccggcagcctgcctggatcccagccctgcccagcattgagctgacccagcagctgcaggaggagtacaaggatgccaccgtgtccctgagcagcagccggcagaccctgaagggggacctgcagctgagtgatgagcagagcagcagccagatcaccggcggcatgatgcagctgctgatgaacaacccctacctggccgcccagatcatgctgttcacctccatgccccagctgtctgagcagtggaggcagcagctgcccaccttcctgcagcagacccagatcagtgacctgctgagcgcctag

SEQ ID NO: 240194 - DNA, 783 bp, Artificial Sequence
  derived and/or modified sequence
atgtggcacgccatcagccggaccagccggatgagccagagcggctgcccttccggcctgctcgcggacaagaacatctcctcctccgctactcgtgtcatagtaaaaaccgcgggcaatcaaaaggacttcatggtggccgacgatatttccgtcagacagtttaaggaaatgttgcttgcgcacttccaatgtcaaatggatcaacttgtacttgtgtttatgggatgtctcctgaaagatcatgacactctttctcaacgggggataatggacggccacacgatttacctcgtcattaagtccaaacagggctcccggtcactagcccacagctttcgtgacctgccaactaatgacccctgccaccgagaccggaacaccaaagcaaatgacaccctcaacaaagttaaccatacaagtaaagctaatacagctatgatatctactaagggacaaagccatatctgtgccacccggcagccagcctggatccccgctctcccatccattgaactgacccagcagctccaggaggagtataaggacgcaaccgtctctctaagctctagtagacaaacactgaagggagacctccagctttccgacgagcagtcatcctctcagatcactggcggtatgatgcagctcctcatgaacaatccatacctcgctgcacagattatgttattcacatccatgcctcagctctctgagcaatggaggcagcagctgccaaccttcctccagcaaacccagatcagcgacctcctcagcgcgtag

SEQ ID NO: 240195 - DNA, 1428 bp, Artificial Sequence
  derived and/or modified sequence
atgtggcacgccatcagccggaccagccggatgagccagagcggctgcccttcgggattgctcgccgataagaatatctcttcttctgccacccgtgtcatcgtcaaaaccgccggaaaccaaaaagattttatggtggcagacgatatttccgtacgacagtttaaagagatgctgcttgcgcactttcaatgccagatggaccagcttgtcttagtgtttatgggttgcctcttaaaagaccacgataccttgagccaaaggggcataatggacggtcacaccatatatctggtcatcaagtcaaaacagggatctaggtctctggcccactcttttcgcgacctcccaactaatgacccctgccatcgcgacagaaacactaagggaaactcatccagggttcaccaacccactggaatgaaccaggctccagtggagctcgcccatttcgttggctccgacgcccctaaagtacatacccagaatctggaggtgagtcatccagagtgtaaagcgcagatgctcgaaaaccctagcattcagcgtttgctgtccaatatggagtttatgtggcagttcataagcgagcacctggacactcagcagctaatgcagcaaaaccccgaagtgtcacgtttgctcttggacaattctgagatcttgctgcagactctggagttagcacggaatctggccatgattcaggagatcatgcaaattcagcaaccttcgcagaatctggaatacccactgaacccccagccttaccttggactcgaaacaatgcctggcggaaataatgccctcggccaaaattacgccgacatcaacgaccagatgctgaatagtatgcaagatccttttggcggaaaccctttcacggcactacttgctggtcaggtgctcgaacaggtgcagagtagcccaccacctcccccacccagccaagaacagcaggaccagctgacacagcaccccgctactagagtgatctataatagtagcggcgggttcagcagtaatacatctgcaaacgatacacttaataaagtcaaccacacctccaaagctaacacagctatgatcagcacgaaaggccagagccatatttgcgccaccaggcaacccgcttggatacctgctctgccgtccattgaacttacgcagcagctccaagaagaatacaaggatgccaccgtcagcttatctagcagtcgacagacactgaagggggatctacagctctccgacgaacagagcagctctcagatcaccggcgggatgatgcagttgctgatgaataacccatacctggccgcacagataatgttgtttacaagtatgccccagcttagtgaacagtggcgacagcaactgcccacttttttacaacagacacaaatttcagatctcctgagtgcatag

SEQ ID NO: 240196 - DNA, 783 bp, Artificial Sequence
  derived and/or modified sequence
atgtggcacgctatctcccgcaccagtcgtatgagtcagtctggctgtccttctgggctgctcgctgataaaaacatcagttcctcggcgacacgcgtaatagtgaagaccgccggaaaccagaaagacttcatggtggctgatgacatctctgtgaggcagtttaaggagatgctcttggcccacttccaatgccagatggaccagctagtgctggtgttcatgggctgcctcctcaaagatcacgacacgctctcacagcgtggcatcatggacggtcacaccatttacctggtgattaagtcgaaacaggggtctcgctctctggcccatagctttcgcgatttgcctaccaatgacccctgtcatcgagacagaaacacaaaggcaaatgataccctcaacaaggtcaaccacacctccaaagctaataccgccatgattagcactaagggccagagccatatttgcgcaacccggcagccagcctggattccagctctgcctagtatcgagctgacccagcagttacaggaagaatacaaagacgccacagttagcctcagcagcagccggcagacactgaaaggcgaccttcaattaagcgatgaacaatcaagctcacagataaccggaggaatgatgcagctcctgatgaataatccctacttggctgctcagattatgctcttcacatccatgccccagctttccgagcaatggcgccagcagttaccaacttttcttcaacagacccagatatccgatctgctgtcggcatag

SEQ ID NO: 240197 - DNA, 1428 bp, Artificial Sequence
  derived and/or modified sequence
atgtggcacgccatctccaggacctcccgaatgtcgcagtccgggtgcccgagtggcttgctcgccgataaaaacataagcagttccgcgactagggtgattgtgaagaccgccggaaaccaaaaggatttcatggtggctgatgatatttcggtgagacaattcaaggagatgctcctcgcccatttccagtgtcagatggaccagctcgtgctggtgttcatgggctgcctgttgaaggaccatgacaccttgtctcagcgcggaatcatggacgggcatactatttatctcgtgatcaagagcaaacaggggagtcggagtcttgcgcattcttttcgcgacctacccaccaacgacccatgtcaccgcgaccgcaatacgaaaggcaactcttctagagtgcaccaacccaccggcatgaatcaggcaccggtggagctcgcccacttcgtcggaagcgacgctcccaaggtgcatacacagaacttggaagtgtctcaccctgaatgcaaggctcagatgctcgaaaaccctagtatccagcgactactgtccaatatggagtttatgtggcaatttatcagcgagcatttggatactcagcagcttatgcagcagaatcctgaggtctctagactgcttctcgataatagcgaaatccttctgcagacactcgagctggctcgcaatttagccatgatccaggagatcatgcagattcagcagcccagccagaatctagagtatcccctcaatcctcagccttacctggggctcgagactatgcctggaggaaataacgcccttggacagaattatgctgatatcaatgatcagatgctcaactccatgcaagatcctttcggaggtaacccattcactgcccttctcgcagggcaagtgttggaacaggtccagagctccccgccacctccacctccttcacaggaacagcaagaccagctcacgcaacacccggctacccgtgtcatttacaattctagcggaggattctcatctaacacatctgccaacgatactctcaacaaggtaaaccatacatctaaagctaacacggccatgattagcacgaaaggccagagccatatctgcgcaaccagacaaccggcatggataccggcattaccgagcattgagcttacgcaacagctacaggaagaatacaaggatgcaacagtgagcctctccagcagcagacaaactcttaagggcgacctgcagctgtctgatgagcagtcctcaagccagatcacaggtggcatgatgcagctgctcatgaacaacccataccttgctgcacagatcatgctctttacatccatgccccagttaagcgagcagtggagacaacaacttccgacgtttctgcaacaaactcagatctcagatcttctgtctgcctag

SEQ ID NO: 240198 - DNA, 783 bp, Artificial Sequence
  derived and/or modified sequence
atgtggcatgccatctctcgaacatccaggatgtcccagagtggatgtccatcaggtctgctggcagacaaaaatatctcttcaagtgccactcgagtgatagtgaagactgcaggcaaccagaaagactttatggtagctgatgacatctcggtaaggcagttcaaggagatgctattggctcacttccaatgccagatggaccaactagtgctggtcttcatgggttgccttctcaaagaccatgacacactgagccagaggggcatcatggatggccacaccatctacttggtcatcaagtccaagcagggctccagatctctagcccattccttccgggacctgccaacgaatgatccctgccaccgggacagaaacaccaaagccaatgacacccttaacaaggtcaaccacacttccaaagccaacactgctatgatttccaccaagggccagagccatatctgtgccactcggcagccagcttggataccagccttacctagcatagagcttacccagcagcttcaagaagaatacaaggatgccactgtttctctaagtagctccagacagacattaaagggtgatctccagctgtcagatgagcagagcagctcccagatcacaggaggcatgatgcagttgcttatgaacaacccctacctggcagctcagattatgttgttcacaagtatgccccagctgagtgaacagtggaggcagcagctgcccacattcctgcagcagacacagatttctgatctgcttagtgcttag

SEQ ID NO: 240199 - DNA, 2313 bp, Artificial Sequence
  derived and/or modified sequence
cactttgtccaccatgggtgaattatgaatcagtagctatgccaggcctcagctgggccacatctggagaactggggtgagggcacaacatcacaaaatatctggccccagtctggtcactcatcccttttagggcaacaaggaaactatcctgtggcctgagagcacaatacctgagacaaaggccagcagaaacatttgtctgccctcaccctttctgccccagcttccacctgctccccatctgcccacccactaaagcccatgtggcatgccatctctcgaacatccaggatgtcccagagtggatgtccatcaggtctgctggcagacaaaaatatctcttcaagtgccactcgagtgatagtgaagactgcaggcaaccagaaagactttatggtagctgatgacatctcggtaaggcagttcaaggagatgctattggctcacttccaatgccagatggaccaactagtgctggtcttcatgggttgccttctcaaagaccatgacacactgagccagaggggcatcatggatggccacaccatctacttggtcatcaagtccaagcagggctccagatctctagcccattccttccgggacctgccaacgaatgatccctgccaccgggacagaaacaccaaaggaaacagcagcagagtgcaccaaccaactggtatgaatcaagctccagtggaactggcccactttgtggggtctgatgcacccaaagtgcatacccaaaacttggaagtgagccacccagagtgcaaagcacagatgctggagaatcctagcatccagcggcttctgtccaacatggagttcatgtggcagttcatttcagaacatctagacacgcaacaattgatgcagcagaacccagaagtttcccgccttcttcttgataattctgagatcctattgcagactctggagctggccaggaaccttgctatgatccaagagataatgcagatccaacaaccttcacaaaaccttgagtatccactgaacccacagccatatctgggcttagagacaatgccaggtgggaataatgccctgggtcagaactatgctgatatcaatgatcaaatgctgaacagcatgcaagatccttttggaggaaaccctttcacagctctcctggcaggacaagtgctagaacaagtccagtcttcacccccacctccaccaccatcacaggaacaacaagaccagctcacacagcatcctgcaacccgagtcatctataatagctctggtggtttctcttcaaacacctcagccaatgacacccttaacaaggtcaaccacacttccaaagccaacactgctatgatttccaccaagggccagagccatatctgtgccactcggcagccagcttggataccagccttacctagcatagagcttacccagcagcttcaagaagaatacaaggatgccactgtttctctaagtagctccagacagacattaaagggtgatctccagctgtcagatgagcagagcagctcccagatcacaggaggcatgatgcagttgcttatgaacaacccctacctggcagctcagattatgttgttcacaagtatgccccagctgagtgaacagtggaggcagcagctgcccacattcctgcagcagacacagatttctgatctgcttagtgcttaggcaaccctaaagcattccaagcaatattgcagattgagcaggccctccagctgctggccacagaggctcctgttcttctgccttgggttgcaccctacctatggggcctgggttggcttcctgcccccagctgcagctatcctgacacagtgccctgttcctggaatgtttcagatacagctgagcccaagggacctgagtgctgccacaagcctggaacagtcctgcagaggctacaatccccggatggggacccttcccaccctctgcaagctcctgagatttgttttagcaaacagatggattctctccaggccatgggatttgggaaccaccatgccaatctacaggcactcattgctactgaaggggacaccaatgctgctatccgcaagctcaagagatcccagagattctaaccaccatgcctacttgtttgcttgctacctgcctgctgacccacctgaccatctcatttgccttttgcacctttcctgatgcttccagccaggagaagtcctggaataagagttatcaaccaatgtgtcttgtactgaataatagatcattggtcgtggctgaaacatctgtcaataaaatggctacactcacttgctgcga

SEQ ID NO: 240200 - protein, 630 aa, Artificial Sequence
  derived and/or modified sequence
MEAVVLPWQIFGVRELPVERGVTMKGPRLFRAPGHVPTGLKCHPDQEHMIYPLGCTVLIQAINTKEQNFLQGHGNNVSCLAISRSGEYIASGQVTFMGFKADIILWDYKNRELLARLSLHKGKIEALAFSPNDLYLVSLGGPDDGSVVVWSIAKRDAICGSPAAGLNVGNATNVIFSRCRDEMFMTAGNGTIRVWELDLPNRKIWPTECQTGQLKRIVMSIGVDDDDSFFYLGTTTGDILKMNPRTKLLTDVGPAKDKFSLGVSAIRCLKMGGLLVGSGAGLLVFCKSPGYKPIKKIQLQGGITSITLRGEGHQFLVGTEESHIYRVSFTDFKETLIATCHFDAVEDIVFPFGTAELFATCAKKDIRVWHTSSNRELLRITVPNMTCHGIDFMRDGKSIISAWNDGKIRAFAPETGRLMYVINNAHRIGVTAIATTSDCKRVISGGGEGEVRVWQIGCQTQKLEEALKEHKSSVSCIRVKRNNEECVTASTDGTCIIWDLVRLRRNQMILANTLFQCVCYHPEEFQIITSGTDRKIAYWEVFDGTVIRELEGSLSGSINGMDITQEGVHFVTGGNDHLVKVWDYNEGEVTHVGVGHSGNITRIRISPGNQYIVSVSADGAILRWKYPYTS

SEQ ID NO: 240201 - protein, 620 aa, Artificial Sequence
  derived and/or modified sequence
MDNKISPEAQVAELELDAVIGFNGHVPTGLKCHPDQEHMIYPLGCTVLIQAINTKEQNFLQGHGNNVSCLAISRSGEYIASGQVTFMGFKADIILWDYKNRELLARLSLHKGKIEALAFSPNDLYLVSLGGPDDGSVVVWSIAKRDAICGSPAAGLNVGNATNVIFSRCRDEMFMTAGNGTIRVWELDLPNRKIWPTECQTGQLKRIVMSIGVDDDDSFFYLGTTTGDILKMNPRTKLLTDVGPAKDKFSLGVSAIRCLKMGGLLVGSGAGLLVFCKSPGYKPIKKIQLQGGITSITLRGEGHQFLVGTEESHIYRVSFTDFKETLIATCHFDAVEDIVFPFGTAELFATCAKKDIRVWHTSSNRELLRITVPNMTCHGIDFMRDGKSIISAWNDGKIRAFAPETGRLMYVINNAHRIGVTAIATTSDCKRVISGGGEGEVRVWQIGCQTQKLEEALKEHKSSVSCIRVKRNNEECVTASTDGTCIIWDLVRLRRNQMILANTLFQCVCYHPEEFQIITSGTDRKIAYWEVFDGTVIRELEGSLSGSINGMDITQEGVHFVTGGNDHLVKVWDYNEGEVTHVGVGHSGNITRIRISPGNQYIVSVSADGAILRWKYPYTS

SEQ ID NO: 240202 - DNA, 1893 bp, Artificial Sequence
  derived and/or modified sequence
atggaggccgtggtgctgccctggcagatcttcggcgtgagagagctgcccgtggagagaggcgtgaccatgaagggccccagactgttcagagcccccggccacgtgcccaccggcctgaagtgccaccccgaccaggagcacatgatctaccccctgggctgcaccgtgctgatccaggccatcaacaccaaggagcagaacttcctgcagggccacggcaacaacgtgagctgcctggccatcagcagaagcggcgagtacatcgccagcggccaggtgaccttcatgggcttcaaggccgacatcatcctgtgggactacaagaacagagagctgctggccagactgagcctgcacaagggcaagatcgaggccctggccttcagccccaacgacctgtacctggtgagcctgggcggccccgacgacggcagcgtggtggtgtggagcatcgccaagagagacgccatctgcggcagccccgccgccggcctgaacgtgggcaacgccaccaacgtgatcttcagcagatgcagagacgagatgttcatgaccgccggcaacggcaccatcagagtgtgggagctggacctgcccaacagaaagatctggcccaccgagtgccagaccggccagctgaagagaatcgtgatgagcatcggcgtggacgacgacgacagcttcttctacctgggcaccaccaccggcgacatcctgaagatgaaccccagaaccaagctgctgaccgacgtgggccccgccaaggacaagttcagcctgggcgtgagcgccatcagatgcctgaagatgggcggcctgctggtgggcagcggcgccggcctgctggtgttctgcaagagccccggctacaagcccatcaagaagatccagctgcagggcggcatcaccagcatcaccctgagaggcgagggccaccagttcctggtgggcaccgaggagagccacatctacagagtgagcttcaccgacttcaaggagaccctgatcgccacctgccacttcgacgccgtggaggacatcgtgttccccttcggcaccgccgagctgttcgccacctgcgccaagaaggacatcagagtgtggcacaccagcagcaacagagagctgctgagaatcaccgtgcccaacatgacctgccacggcatcgacttcatgagagacggcaagagcatcatcagcgcctggaacgacggcaagatcagagccttcgcccccgagaccggcagactgatgtacgtgatcaacaacgcccacagaatcggcgtgaccgccatcgccaccaccagcgactgcaagagagtgatcagcggcggcggcgagggcgaggtgagagtgtggcagatcggctgccagacccagaagctggaggaggccctgaaggagcacaagagcagcgtgagctgcatcagagtgaagagaaacaacgaggagtgcgtgaccgccagcaccgacggcacctgcatcatctgggacctggtgagactgagaagaaaccagatgatcctggccaacaccctgttccagtgcgtgtgctaccaccccgaggagttccagatcatcaccagcggcaccgacagaaagatcgcctactgggaggtgttcgacggcaccgtgatcagagagctggagggcagcctgagcggcagcatcaacggcatggacatcacccaggagggcgtgcacttcgtgaccggcggcaacgaccacctggtgaaggtgtgggactacaacgagggcgaggtgacccacgtgggcgtgggccacagcggcaacatcaccagaatcagaatcagccccggcaaccagtacatcgtgagcgtgagcgccgacggcgccatcctgagatggaagtacccctacaccagctag

SEQ ID NO: 240203 - DNA, 1863 bp, Artificial Sequence
  derived and/or modified sequence
atggacaacaagatcagccccgaggcccaggtggccgagctggagctggacgccgtgatcggcttcaacggccacgtgcccaccggcctgaagtgccaccccgaccaggagcacatgatctaccccctgggctgcaccgtgctgatccaggccatcaacaccaaggagcagaacttcctgcagggccacggcaacaacgtgagctgcctggccatcagcagaagcggcgagtacatcgccagcggccaggtgaccttcatgggcttcaaggccgacatcatcctgtgggactacaagaacagagagctgctggccagactgagcctgcacaagggcaagatcgaggccctggccttcagccccaacgacctgtacctggtgagcctgggcggccccgacgacggcagcgtggtggtgtggagcatcgccaagagagacgccatctgcggcagccccgccgccggcctgaacgtgggcaacgccaccaacgtgatcttcagcagatgcagagacgagatgttcatgaccgccggcaacggcaccatcagagtgtgggagctggacctgcccaacagaaagatctggcccaccgagtgccagaccggccagctgaagagaatcgtgatgagcatcggcgtggacgacgacgacagcttcttctacctgggcaccaccaccggcgacatcctgaagatgaaccccagaaccaagctgctgaccgacgtgggccccgccaaggacaagttcagcctgggcgtgagcgccatcagatgcctgaagatgggcggcctgctggtgggcagcggcgccggcctgctggtgttctgcaagagccccggctacaagcccatcaagaagatccagctgcagggcggcatcaccagcatcaccctgagaggcgagggccaccagttcctggtgggcaccgaggagagccacatctacagagtgagcttcaccgacttcaaggagaccctgatcgccacctgccacttcgacgccgtggaggacatcgtgttccccttcggcaccgccgagctgttcgccacctgcgccaagaaggacatcagagtgtggcacaccagcagcaacagagagctgctgagaatcaccgtgcccaacatgacctgccacggcatcgacttcatgagagacggcaagagcatcatcagcgcctggaacgacggcaagatcagagccttcgcccccgagaccggcagactgatgtacgtgatcaacaacgcccacagaatcggcgtgaccgccatcgccaccaccagcgactgcaagagagtgatcagcggcggcggcgagggcgaggtgagagtgtggcagatcggctgccagacccagaagctggaggaggccctgaaggagcacaagagcagcgtgagctgcatcagagtgaagagaaacaacgaggagtgcgtgaccgccagcaccgacggcacctgcatcatctgggacctggtgagactgagaagaaaccagatgatcctggccaacaccctgttccagtgcgtgtgctaccaccccgaggagttccagatcatcaccagcggcaccgacagaaagatcgcctactgggaggtgttcgacggcaccgtgatcagagagctggagggcagcctgagcggcagcatcaacggcatggacatcacccaggagggcgtgcacttcgtgaccggcggcaacgaccacctggtgaaggtgtgggactacaacgagggcgaggtgacccacgtgggcgtgggccacagcggcaacatcaccagaatcagaatcagccccggcaaccagtacatcgtgagcgtgagcgccgacggcgccatcctgagatggaagtacccctacaccagctag

SEQ ID NO: 240204 - DNA, 1893 bp, Artificial Sequence
  derived and/or modified sequence
atggaggccgtcgttcttccttggcagatatttggggttcgggagctgccggtcgaacggggcgtcaccatgaaaggcccccgcctgtttcgcgcgcctggacatgtccctaccggactcaagtgccaccctgaccaggagcatatgatttaccccttgggctgcactgtcttgattcaggccatcaacactaaggagcagaactttctgcagggccatggaaacaacgtctcctgtctcgccatttcacgctccggagaatacatcgcgagtggccaggtgactttcatggggttcaaagccgatatcatcctatgggactacaaaaatcgagaattgctagctagactgagcctgcacaaaggcaagattgaagcgctggctttctctcccaatgatttgtacctcgtgagcctgggcggcccggacgatgggtcggttgtggtgtggagtatagcaaagagagacgctatctgtggtagtcccgcagcgggacttaatgtgggtaatgcgactaatgtgattttctctaggtgtagagacgaaatgtttatgacagccggcaacggaacaatccgcgtgtgggagctggatcttcccaatagaaaaatatggccaaccgaatgtcaaactggtcaactcaaacggatagtgatgtcaatcggagtggatgatgacgatagctttttttacctaggcacaacaaccggcgacattttgaagatgaacccccggacaaaactgctgacagacgtgggccctgccaaggacaagttctctctaggagtgagcgccattcgttgtcttaagatgggtggacttctggtagggtcaggggccgggttgctggtgttctgtaagtctcctggctacaagccaataaagaagattcaactacagggagggataaccagtataactttgcgcggcgagggccatcagttcttagtcggcacagaggagtcacacatctatcgggtatccttcactgattttaaggagacgctcatagcaacgtgtcacttcgatgcagttgaggatatcgtgtttccgtttggtacagccgagctgtttgccacctgtgccaagaaggatattcgcgtctggcacactagtagtaatcgcgagctgttgcggattacagttccaaacatgacctgccacggaatcgactttatgcgggacgggaagtccattatctccgcgtggaatgatggaaaaatacgggcttttgcaccagaaactggccgtttgatgtacgtgatcaataacgcccacagaatcggtgtgaccgctattgcgacaacaagcgactgcaagcgggtcattagcggcgggggagagggggaggtgcgggtgtggcagatcggttgtcagacccagaagcttgaggaggccttaaaagaacacaagagctctgtgtcctgtatcagggtaaaaaggaacaacgaggagtgcgttaccgcatcaactgacggcacttgcataatatgggacctggttaggcttaggaggaatcagatgattctggcgaacactctctttcagtgcgtatgttaccatcccgaagagtttcagatcataacctctggcaccgaccggaaaattgcctactgggaggtattcgatggcactgtgattcgagagctggaaggttccctgtccggctcaatcaacggtatggatattacccaggaaggagtacatttcgtgacaggcggtaatgatcatctggtcaaggtttgggattacaacgaaggcgaagtcacacacgtcggggtcggccattcaggtaacattacccggatccgaattagccctgggaatcagtacatcgtatctgtgagcgctgatggagccattctgcgttggaaatatccttacacaagctag

SEQ ID NO: 240205 - DNA, 1863 bp, Artificial Sequence
  derived and/or modified sequence
atggacaataagattagccccgaagcgcaagtcgcagaacttgaactggatgctgtaataggttttaatggccatgtgcctacaggacttaagtgccatcctgaccaagagcacatgatctatccattgggatgcacagttctgatccaggctattaacaccaaggagcagaacttcctgcaggggcatgggaataacgtgtcttgtttggcaataagccgaagcggcgaatacatcgctagcggccaggtgacctttatgggatttaaagcagacataattctgtgggactataaaaatagagaacttctggcccgcctgtcccttcacaagggaaagatcgaagccttagccttttcaccaaatgacctgtaccttgtatcactcgggggtccggatgacggaagcgtggtggtatggagcatcgctaagagagatgccatttgtggatcaccagccgcagggttgaatgtcggaaatgcaaccaacgtgattttcagccgatgtagggatgagatgttcatgaccgccggtaacggaactataagagtgtgggaactggaccttcccaataggaaaatctggccaacagaatgtcagaccggccagctgaagcggattgtaatgtccatcggcgttgacgacgatgacagtttcttttacctgggcacgacaactggtgacattttaaagatgaatcctcgaacgaaacttctgaccgatgtcggacccgctaaggacaagttcagcttaggagtttctgccattcgatgtctcaagatgggcggtctgctggtgggcagcggcgccgggctgcttgtcttctgcaaatccccagggtacaagcctataaagaaaattcagctccagggtgggatcacatccatcacactccggggcgagggacatcagtttttagttgggactgaggaatctcacatatacagagttagtttcacagacttcaaggagacactcatcgccacctgccactttgatgctgttgaggatatagtgttcccttttggaactgctgagttattcgccacatgcgcaaagaaagacatccgtgtgtggcatacatcctccaatagagagctccttcggatcaccgtgcctaatatgacctgccacgggattgattttatgagggatggcaaatccatcattagtgcttggaacgacggaaaaatccgggcgtttgcacccgagacaggtcgactcatgtatgtcataaataacgctcaccgtatcggagtgacagcaatcgccaccacatcagattgtaagcgcgttattagcgggggaggcgagggcgaagtgagagtttggcagatcgggtgtcagacccagaaattagaggaggcccttaaggagcataaaagcagcgtcagttgcattcgcgtgaagcgtaacaacgaagagtgcgtgaccgcatctaccgatggcacttgcatcatctgggacctggtgagactccgacgtaaccagatgatcctagcaaataccttgtttcagtgcgtgtgctatcacccagaggagtttcagataatcacaagtgggaccgatcggaagatcgcctactgggaggtcttcgacggcacagttattcgcgaactggagggcagtctgagcggcagcataaatgggatggacattacacaggagggtgtccacttcgtgacaggtgggaacgatcacctcgttaaggtgtgggactacaatgagggtgaagttacccatgtaggggtgggacattcaggcaacatcacgcggatccgaatcagccccggcaatcagtatatcgtctcagtgtcagccgatggagccatccttaggtggaaatatccctacacttcctag

SEQ ID NO: 240206 - DNA, 1893 bp, Artificial Sequence
  derived and/or modified sequence
atggaggccgtggtgctgccctggcagatctttggagtgcgggagctgcctgtggagcggggcgtgaccatgaagggccccaggctcttccgggcccctggccacgtgcccaccggcctgaagtgccacccagaccaggagcacatgatctaccccctgggctgcaccgtgctgatccaggccatcaacaccaaggagcagaacttcctgcagggccacggcaacaacgtgtcctgcctggccatcagccgctctggagagtacatcgccagcggccaggtgaccttcatgggcttcaaggctgacatcatcctgtgggactacaagaaccgggagctgctggcccggctgagcctgcacaagggcaagattgaggccctggccttcagccccaatgacctgtacctggtgtccctgggcggcccagatgatggctctgtggtggtgtggagcatcgccaagagagatgccatctgtggcagccctgctgctggcctgaatgtgggcaatgccaccaacgtcatcttcagccgctgcagagatgagatgttcatgacagctggaaatggcaccatccgggtgtgggagctggacctgcccaacaggaagatctggcccacagagtgccagacaggccagctgaagagaattgtgatgagcattggagtggatgatgatgacagcttcttctacctgggcaccaccaccggggacatcctgaagatgaaccccaggaccaagctgctgacagatgtgggccctgccaaggacaagttcagcctgggcgtgtctgccatccgctgcctgaagatgggcggcctgctggtgggcagcggggccggcctgctggtgttctgcaagagccctggctacaagcccatcaagaagatccagctgcagggcggcatcaccagcatcaccctgcggggggagggccaccagttcctggtgggcacagaggagagccacatctacagagtgtccttcacagacttcaaggagaccctgattgccacctgccactttgatgctgtggaggacatcgtgttccccttcggcacagctgagctgtttgccacctgtgccaagaaggacatccgggtgtggcacaccagcagcaaccgggagctgctgcgcatcaccgtgcccaacatgacctgccacggcatcgacttcatgagagatggcaagagcatcatcagcgcctggaatgatggcaagatccgggcctttgcccctgagaccggccgcctgatgtatgtgatcaacaatgcccaccgcatcggcgtgacagccatcgccaccaccagtgactgcaagagggtcatcagcggcggcggggagggggaggtgcgggtgtggcagatcggctgccagacccagaagctggaggaggccctgaaggagcacaagagctctgtgtcctgcatccgggtgaagagaaataatgaagaatgtgtgacagccagcacagatggcacctgcatcatctgggacctggtgcggctgcggaggaaccagatgatcctggccaacaccctcttccagtgtgtgtgctaccaccctgaggagttccagatcatcaccagcggcacagacaggaagatcgcctactgggaggtgtttgatggcaccgtcatccgggagctggagggcagcctgagcggcagcatcaatggcatggacatcacccaggagggcgtgcactttgtgactggaggaaatgaccacctggtgaaggtgtgggactacaatgaaggagaggtgacccacgtgggcgtgggccacagcggcaacatcacccgcatccgcatcagccctggcaaccagtacatcgtgtctgtgtctgcagatggagccatcctgcgctggaagtacccctacaccagctag

SEQ ID NO: 240207 - DNA, 1863 bp, Artificial Sequence
  derived and/or modified sequence
atggacaacaagatcagccctgaggcccaggtggccgagctggagctggatgctgtgattggcttcaatggacatgtgcccaccggcctgaagtgccacccagaccaggagcacatgatctaccccctgggctgcaccgtgctgatccaggccatcaacaccaaggagcagaacttcctgcagggccacggcaacaacgtgtcctgcctggccatcagccgctctggagagtacatcgccagcggccaggtgaccttcatgggcttcaaggctgacatcatcctgtgggactacaagaaccgggagctgctggcccggctgagcctgcacaagggcaagattgaggccctggccttcagccccaatgacctgtacctggtgtccctgggcggcccagatgatggctctgtggtggtgtggagcatcgccaagagagatgccatctgtggcagccctgctgctggcctgaatgtgggcaatgccaccaacgtcatcttcagccgctgcagagatgagatgttcatgacagctggaaatggcaccatccgggtgtgggagctggacctgcccaacaggaagatctggcccacagagtgccagacaggccagctgaagagaattgtgatgagcattggagtggatgatgatgacagcttcttctacctgggcaccaccaccggggacatcctgaagatgaaccccaggaccaagctgctgacagatgtgggccctgccaaggacaagttcagcctgggcgtgtctgccatccgctgcctgaagatgggcggcctgctggtgggcagcggggccggcctgctggtgttctgcaagagccctggctacaagcccatcaagaagatccagctgcagggcggcatcaccagcatcaccctgcggggggagggccaccagttcctggtgggcacagaggagagccacatctacagagtgtccttcacagacttcaaggagaccctgattgccacctgccactttgatgctgtggaggacatcgtgttccccttcggcacagctgagctgtttgccacctgtgccaagaaggacatccgggtgtggcacaccagcagcaaccgggagctgctgcgcatcaccgtgcccaacatgacctgccacggcatcgacttcatgagagatggcaagagcatcatcagcgcctggaatgatggcaagatccgggcctttgcccctgagaccggccgcctgatgtatgtgatcaacaatgcccaccgcatcggcgtgacagccatcgccaccaccagtgactgcaagagggtcatcagcggcggcggggagggggaggtgcgggtgtggcagatcggctgccagacccagaagctggaggaggccctgaaggagcacaagagctctgtgtcctgcatccgggtgaagagaaataatgaagaatgtgtgacagccagcacagatggcacctgcatcatctgggacctggtgcggctgcggaggaaccagatgatcctggccaacaccctcttccagtgtgtgtgctaccaccctgaggagttccagatcatcaccagcggcacagacaggaagatcgcctactgggaggtgtttgatggcaccgtcatccgggagctggagggcagcctgagcggcagcatcaatggcatggacatcacccaggagggcgtgcactttgtgactggaggaaatgaccacctggtgaaggtgtgggactacaatgaaggagaggtgacccacgtgggcgtgggccacagcggcaacatcacccgcatccgcatcagccctggcaaccagtacatcgtgtctgtgtctgcagatggagccatcctgcgctggaagtacccctacaccagctag

SEQ ID NO: 240208 - DNA, 1893 bp, Artificial Sequence
  derived and/or modified sequence
atggaggccgtggtgctgccctggcagatcttcggcgtgcgggagcttcctgtcgaaagaggcgtgaccatgaaaggcccccggctgtttagagcccctgggcacgtaccgaccgggcttaagtgtcacccagaccaggagcacatgatctacccacttgggtgcactgtgctcatccaagctattaataccaaagagcaaaacttcctccaggggcacggaaataatgtttcttgcctcgcaatcagcaggagtggcgaatatatcgccagtgggcaggtgacattcatggggtttaaggcagacatcattctttgggattacaaaaacagggagctactggctagactgtctctgcacaaagggaagatcgaagccctcgccttttcaccgaacgatttgtatcttgtcagtctcggtggacccgacgacggcagcgttgtggtgtggagcattgcaaaaagggatgccatttgtggttccccagctgccggtctgaatgtggggaacgcgaccaatgtcatcttctctcggtgtcgcgatgaaatgttcatgactgccggaaatggcacgatacgagtgtgggagctcgatttgcccaatcggaaaatatggcccaccgaatgtcaaactggtcagctcaagcgaattgttatgtccattggcgttgacgatgacgacagcttcttctatctgggtacaactacaggagatattctaaagatgaatcctcgcacaaagctgctgaccgacgtggggcctgctaaggataaattctccctgggtgtgtccgccataagatgtctaaagatgggcggattactggtcggttccggggcagggcttctcgtgttctgtaagagtcccggttataaaccaatcaagaaaatacagctgcaagggggtattaccagcatcacacttcggggcgaaggacaccaattcctggttggcactgaggaatcccatatctatcgcgtgtcgtttactgacttcaaagaaacactaatcgccacctgtcacttcgacgccgtggaggacatcgtgtttccttttgggactgcggagctgttcgcaacctgcgcgaaaaaggacatccgagtttggcatacttccagtaatcgagagttactgagaattacagtccctaatatgacctgccacggaatcgacttcatgagagacgggaaatccatcatctccgcctggaatgatggtaagatcagggcctttgctcccgagacaggtcgcctgatgtacgtgattaacaatgcacatagaataggggttaccgccatcgccaccacgtcagattgcaagcgagttatcagtggaggtggcgagggggaggtgagggtgtggcagatcggctgccagacccagaagctcgaggaggcgctgaaagaacacaaaagtagtgtttcatgtatccgcgtgaagcgcaataatgaagaatgtgtgactgcttccacagacgggacctgcatcatttgggacctagtgcgcctacggcggaatcagatgattctggccaatacgcttttccaatgtgtttgctatcaccccgaggagttccaaattattacaagtggtaccgaccgcaaaatcgcttactgggaggttttcgatggcacggtgattcgggaacttgagggctccctcagcggttctatcaatgggatggatattactcaggagggcgtccacttcgttacgggcggaaatgatcaccttgtcaaggtctgggactataacgagggcgaggtcacacacgttggagtgggacacagcggcaacattacacggatcagaatttcaccaggtaaccaatacatagtttctgttagcgccgacggtgctatactgcggtggaagtacccctatacttcctag

SEQ ID NO: 240209 - DNA, 1863 bp, Artificial Sequence
  derived and/or modified sequence
atggacaacaagatcagccccgaggcccaggtggccgagctggagctggacgcagtgataggatttaacggccacgttcctactggactgaagtgtcacccggatcaagaacacatgatatatccgctgggatgtaccgtgttaatccaggcaatcaatacgaaagagcaaaatttcctgcagggtcacgggaacaatgttagctgcctggccatctctcggagcggggagtatattgctagcggacaggtcacattcatgggatttaaagccgacattatactgtgggactacaaaaaccgggagctgctggcccggctgagtctccataagggcaagatcgaagccctggctttctcacccaatgacttgtaccttgtgtcacttggtgggcctgacgatggtagcgtcgtggtttggagcattgcgaagcgtgacgccatctgtggctccccggctgcaggcttaaatgtgggcaatgccaccaacgtcattttttcacgatgtagagatgagatgttcatgaccgcaggcaatggtaccatccgggtgtgggaacttgatctccccaatcgcaaaatatggccgaccgagtgccagacaggtcagttaaaaaggatagtgatgagcataggtgttgatgacgatgacagtttcttctacctaggcactactactggtgacatcctgaagatgaacccccgaactaaactcctgactgacgtaggacctgccaaggataaattctctctcggcgtgagcgcaattcgatgtctcaagatgggcggtctcctggtcggttccggtgctggactactagttttctgcaagtctcccggctataagccaattaaaaagatccagcttcagggcgggattacatcaattactcttaggggcgaaggacaccagttcctcgttggcaccgaagagagccatatctatagagttagcttcacagattttaaagagacactgatcgccacctgtcacttcgacgccgtcgaggatattgtgttccctttcggcacagccgagctgtttgctacctgcgccaaaaaggacattcgagtgtggcacaccagctctaatcgagagcttcttcgcatcacagtcccaaatatgacctgtcacggcattgactttatgcgcgatgggaaatctattattagtgcctggaacgatggaaagatacgggcctttgcccctgaaactggtaggttaatgtacgtcattaacaacgcgcacaggattggggtgacggcaattgcgaccacatccgattgtaagcgggtcatttctggtggtggcgaaggagaagtgcgtgtttggcagatcggatgtcagacccaaaaattggaagaggctcttaaagaacacaagtcttcagttagctgtatcagagtgaaacggaacaacgaagagtgtgtgacagcatccacggatggtacttgtattatctgggatctggtgcggcttcggagaaatcaaatgatcctcgcaaacaccctgtttcagtgtgtgtgctaccacccggaggagttccagatcatcacttcaggaacagaccgcaaaatagcctactgggaagtgtttgacggcacagtaattcgcgagctcgaaggaagcctgtcgggctctattaacggcatggacattactcaggaaggggtgcactttgtcactggcggcaatgaccatctggtcaaggtctgggactataacgaaggtgaggtgacgcatgtaggcgtaggtcattcaggcaacattacgcgcatccggatttcaccagggaatcaatacatcgtgtccgtatctgccgacggcgctattctgcgctggaagtatccctacactagctag

SEQ ID NO: 240210 - DNA, 1893 bp, Artificial Sequence
  derived and/or modified sequence
atggaagcagtggtgctgccgtggcagatctttggagtgagagaactgcctgtggaaagaggtgtgacgatgaaaggacccaggctgtttcgcgcaccaggccacgtacccactggcctgaagtgccaccctgaccaggaacacatgatataccccctcggctgtacagtactcatccaggccataaacaccaaagagcagaacttcctgcagggtcacggcaataacgtttcctgtcttgcaattagtcggtccggcgagtacattgccagcggccaggtcacgttcatgggctttaaagccgatatcattctgtgggattacaagaacagggagctcttagccagactgtccctgcacaaaggcaaaatcgaggcactagccttctcccctaatgacctctacctcgtgtcactggggggtcccgacgacgggtctgtggtggtttggagtatcgcaaagagggacgccatatgcggctccccagcggcaggcttgaacgtgggcaatgcaactaacgtgatcttttcccggtgtagggacgagatgttcatgaccgccggtaacggaaccatccgggtgtgggagctggatctgcccaatcggaagatttggcccacagaatgtcaaactggccagctgaaacgcatcgtcatgtccattggcgtggatgacgacgatagcttcttctacttaggcactactacaggtgacattctgaaaatgaatcccagaacaaaactgctgactgatgtcggtccagcaaaagacaagtttagcctgggcgtcagcgctattaggtgcctcaagatggggggactattggtcggctctggcgctggactcctggttttttgcaaatctcccggttataagccaatcaagaagatccagctgcaagggggaatcacctccatcactttgcgaggggaagggcaccagtttttagtgggcaccgaggagtctcatatctatcgtgtcagctttactgacttcaaggaaaccctgatcgccacttgtcacttcgacgcagtggaagacattgttttcccattcgggacagctgaattattcgctacctgcgcaaagaaggatatccgcgtgtggcacacctcatccaacagggagttgctgcgtataaccgtgccaaacatgacttgccacggcattgactttatgagagatggcaagagcatcatctctgcgtggaacgatggcaagattagggcctttgcgcctgaaactggcaggctgatgtatgttatcaataacgctcaccgcattggggtgaccgccatcgctacgacttccgactgtaagagggttatatccggagggggagaaggcgaagtgcgcgtgtggcagattggctgccaaactcagaagttagaggaggcactcaaggagcacaaatcctctgtctcatgtatcagggttaagcggaataacgaggaatgcgttacagcaagtacagatgggacatgcattatctgggacttagtgcggctgagacgcaaccagatgattctggcaaacacgttattccagtgcgtttgctaccaccccgaggagtttcagataattaccagcggcactgacaggaagattgcttactgggaggtattcgatggcactgtgattcgcgagctggaagggtccctctctggttctatcaatgggatggatattacgcaagaaggagtgcacttcgtgaccggagggaatgaccaccttgtgaaggtttgggattacaatgagggtgaggttacccatgtcggggtggggcactctgggaatatcactagaatacgcattagcccaggtaatcagtatatagtttccgtgagtgcggacggcgctatacttaggtggaagtatccttacactagctag

SEQ ID NO: 240211 - DNA, 1863 bp, Artificial Sequence
  derived and/or modified sequence
atggataacaagatatcaccagaggcccaggtggcagaattagagttagatgctgttatcggcttcaatggccatgtgcctactggcctgaaatgtcaccccgaccaggagcacatgatttatccattaggctgcacagtgctgatacaggctatcaataccaaggaacagaattttttacaaggccatgggaataacgtgagttgcctggctatcagtcggtccggcgagtatattgcgtctggccaggttacgtttatggggtttaaggcagatatcattctgtgggattacaaaaaccgcgagctcctggccaggctgtccctccacaaggggaagatagaagccctggctttctcaccgaacgatttgtatttggtgtccctcggaggtcccgacgacggatccgtcgtggtttggtctatagcaaagcgagatgctatctgtggctcacccgcagcaggtctcaacgtaggcaacgccactaatgtcattttcagtagatgtagagatgagatgttcatgacagctggcaacggcactataagggtctgggagctggacctgccaaatcgcaaaatttggcccactgagtgccagacaggtcaacttaaaagaattgtgatgagcatcggcgttgatgatgacgatagtttcttctatctgggaaccaccaccggtgacatcctcaaaatgaacccaagaactaagctgctaaccgacgtggggccagctaaggacaagttttccctgggcgtatcagctatccggtgtctgaagatgggaggactattagtcggaagtggagcaggactgctggtgttttgtaagtctccgggatataagccaattaagaaaatccagctgcagggcggtattacctccattaccctaaggggggaaggacaccagtttttagtgggcacagaggagagccatatctaccgcgtttcctttactgacttcaaagagaccttgatcgccacttgtcattttgacgcagtggaggatattgtgttcccatttggaactgcggaactgtttgcaacgtgcgctaagaaagatatcagagtgtggcacacatcatccaatcgtgaattgctgcgcatcacagtgccaaatatgacgtgccacggcatcgattttatgcgtgatggtaagtctattatctccgcctggaacgatggaaagatacgcgcatttgccccagagactggtcgcttaatgtacgttatcaacaacgctcacaggatcggcgtaactgccatcgcaaccaccagcgactgtaagagggttataagcgggggaggagaaggcgaggtccgcgtgtggcagatcggatgtcagacccaaaagctggaggaagctctgaaagagcataaatcctctgtgtcatgcattagggtcaagcggaacaacgaggagtgcgttaccgccagcaccgacggcacgtgcatcatttgggacctagtcaggctgaggcggaaccagatgatccttgctaatacattgttccagtgcgtctgctatcacccagaagagttccaaatcattacgagcggcaccgatcgcaagatcgcctactgggaagtctttgacggcaccgtaatacgagagctggaggggtccctgagcggctctattaacggcatggacattactcaggagggtgttcacttcgtgaccggaggcaatgatcatctggtgaaggtctgggattacaatgagggggaggtgactcatgtgggagtggggcattcaggcaatattactcggattaggataagccccggaaaccaatacatcgtcagtgtgagcgcagatggggcaattcttcggtggaaatacccctacacaagttag

SEQ ID NO: 240212 - DNA, 2150 bp, Artificial Sequence
  derived and/or modified sequence
atggaagcagtagtgttaccttggcagatatttggagtacgggagttgcctgtggaaagaggtgtcaccatgaaaggtcccaggctcttcagagcacctggacatgtgcccactggtctcaaatgccatcctgaccaggagcatatgatttatcctcttggttgcacagtcctcattcaggcaataaatactaaagagcagaacttcctacagggtcatggcaacaacgtctcctgcttggccatctccaggtctggagagtacatcgcctccggacaagtcacattcatggggttcaaggcagacatcattttgtgggattataagaacagagagctgcttgctcggctgtcccttcacaaaggcaaaattgaagctctggccttttctccaaatgatttgtacttggtatcactaggaggcccagatgacggaagtgtggtggtgtggagcatagccaagagagatgccatctgtggcagccctgcagccggcctcaatgttggcaatgccaccaatgtgatcttctccaggtgccgggatgagatgtttatgactgctggaaatgggacaattcgagtatgggaattggatcttccaaatagaaaaatctggccaactgagtgccaaacaggacagttgaaaagaatagtcatgagtattggagtggatgatgatgatagctttttctaccttggcaccacgactggagatattctaaaaatgaaccccaggactaaactgctgacagatgttgggcctgcgaaggacaaattcagtttgggagtgtcagctatcaggtgcctgaagatggggggtttgttggtgggctctggagccggactgctggtcttctgtaaaagccctggctacaaacccatcaagaagattcagttacaaggcggcatcacttctatcacacttcgaggagaaggacaccagtttctcgtaggaacagaagaatcgcacatttatcgtgtcagcttcacggatttcaaagagacgctcatagcgacttgtcactttgatgctgtcgaggatattgtctttccatttggcactgctgagctatttgcaacctgtgccaagaaggatatcagggtgtggcacacatcatccaacagggagctgctgcggatcaccgtgcccaacatgacctgccacggcatcgacttcatgagggacggcaaaagcatcatttcagcatggaacgacggtaaaatccgagccttcgccccagagacaggccgactgatgtatgtcattaacaatgctcacaggatcggcgtcaccgccatcgccaccaccagtgactgtaaaagggtcatcagtggcggtggggaaggggaggtgagggtatggcagataggctgtcagacccagaagctggaggaggccctgaaggaacacaagtcatcagtgtcctgcattagggtgaagaggaacaacgaggagtgtgtcaccgccagcaccgatgggacttgtatcatttgggaccttgtgcgtctcaggaggaatcagatgatactagccaacaccttattccagtgtgtgtgctatcaccctgaggagttccagatcatcaccagcggaacagacagaaagattgcttactgggaagtatttgatgggacagtaatcagagaattggaaggttccctgtctgggtcgataaatggcatggatatcacacaggaaggggtgcactttgtcacaggtggaaatgaccatctggtcaaagtttgggattataatgagggtgaagtgactcacgttggggtgggacacagtggcaacatcacacgcatccgcataagtccaggaaatcaatatattgttagtgtaagtgccgatggagccattttgcgatggaagtacccatatacctcctgaagctgatgagatgtctctgagccttggcgttgcacgcagtcctgttgaagactgagtttagataactccaacactagtcttcatttctcacagctctgtttttgttcttgagtcaatttttctctttttctttatagaatgcattttatattcttaaattgcatattaaaattgaagtatgttcaagaataatttgtgcagactctaattagaacttttaacattttgaataaattcttagttgttggttttctgtt

SEQ ID NO: 240213 - DNA, 2193 bp, Artificial Sequence
  derived and/or modified sequence
gttaccataacgaccagaagacgctgcagccactagggaggagagcaaagtaatcagaacctcccaaggatggataacaaaatttcgccggaggcccaagtggcggagctggaacttgacgccgtgatcggcttcaatggacatgtgcccactggtctcaaatgccatcctgaccaggagcatatgatttatcctcttggttgcacagtcctcattcaggcaataaatactaaagagcagaacttcctacagggtcatggcaacaacgtctcctgcttggccatctccaggtctggagagtacatcgcctccggacaagtcacattcatggggttcaaggcagacatcattttgtgggattataagaacagagagctgcttgctcggctgtcccttcacaaaggcaaaattgaagctctggccttttctccaaatgatttgtacttggtatcactaggaggcccagatgacggaagtgtggtggtgtggagcatagccaagagagatgccatctgtggcagccctgcagccggcctcaatgttggcaatgccaccaatgtgatcttctccaggtgccgggatgagatgtttatgactgctggaaatgggacaattcgagtatgggaattggatcttccaaatagaaaaatctggccaactgagtgccaaacaggacagttgaaaagaatagtcatgagtattggagtggatgatgatgatagctttttctaccttggcaccacgactggagatattctaaaaatgaaccccaggactaaactgctgacagatgttgggcctgcgaaggacaaattcagtttgggagtgtcagctatcaggtgcctgaagatggggggtttgttggtgggctctggagccggactgctggtcttctgtaaaagccctggctacaaacccatcaagaagattcagttacaaggcggcatcacttctatcacacttcgaggagaaggacaccagtttctcgtaggaacagaagaatcgcacatttatcgtgtcagcttcacggatttcaaagagacgctcatagcgacttgtcactttgatgctgtcgaggatattgtctttccatttggcactgctgagctatttgcaacctgtgccaagaaggatatcagggtgtggcacacatcatccaacagggagctgctgcggatcaccgtgcccaacatgacctgccacggcatcgacttcatgagggacggcaaaagcatcatttcagcatggaacgacggtaaaatccgagccttcgccccagagacaggccgactgatgtatgtcattaacaatgctcacaggatcggcgtcaccgccatcgccaccaccagtgactgtaaaagggtcatcagtggcggtggggaaggggaggtgagggtatggcagataggctgtcagacccagaagctggaggaggccctgaaggaacacaagtcatcagtgtcctgcattagggtgaagaggaacaacgaggagtgtgtcaccgccagcaccgatgggacttgtatcatttgggaccttgtgcgtctcaggaggaatcagatgatactagccaacaccttattccagtgtgtgtgctatcaccctgaggagttccagatcatcaccagcggaacagacagaaagattgcttactgggaagtatttgatgggacagtaatcagagaattggaaggttccctgtctgggtcgataaatggcatggatatcacacaggaaggggtgcactttgtcacaggtggaaatgaccatctggtcaaagtttgggattataatgagggtgaagtgactcacgttggggtgggacacagtggcaacatcacacgcatccgcataagtccaggaaatcaatatattgttagtgtaagtgccgatggagccattttgcgatggaagtacccatatacctcctgaagctgatgagatgtctctgagccttggcgttgcacgcagtcctgttgaagactgagtttagataactccaacactagtcttcatttctcacagctctgtttttgttcttgagtcaatttttctctttttctttatagaatgcattttatattcttaaattgcatattaaaattgaagtatgttcaagaataatttgtgcagactctaattagaacttttaacattttgaataaattcttagttgttggttttctgttataa

SEQ ID NO: 240214 - protein, 629 aa, Artificial Sequence
  derived and/or modified sequence
MIRAFSFPVSPERGRLRGWLEGSLAGLCELHWLRERQEYRVQQALRLAQPGMGGAEAEDEEDADEDEDAAAARRAAAALEEQLEALPGLVWDLGQQLGDLSLESGGLEQESGRSSGFYEDPSSTGGPDSPPSTFCGDSGFSGSSSYGRLGPSEPRGIYASERPKSLGDASPSAPEVVGARAAVPRSFSAPYPTAGGSAGPEACSSAERRARAGPFLTPSPLHAVAMRSPRPCGRPPTDSPDAGGAGRPLDGYISALLRRRRRRGAGQPRTSPGGADGGPRRQNSVRQRPPDASPSPGSARPAREPSLERVGGHPTSPAALSRAWASSWESEAAPEPAAPPAAPSPPDSPAEGRLVKAQYIPGAQAATRGLPGRAARRKPPPLTRGRSVEQSPPRERPRAAGRRGRMAEASGRRGSPRARKASRSQSETSLLGRASAVPSGPPKYPTAEREEPRPPRPRRGPAPTLAAQAAGSCRRWRSTAEIDAADGRRVRPRAPAARVPGPGPSPSAPQRRLLYGCAGSDSECSAGRLGPLGRRGPAGGVGGGYGESESSASEGESPAFSSASSDSDGSGGLVWPQQLVAATAASGGGAGAGAPAGPAKVFVKIKASHALKKKILRFRSGSLKVMTTV

SEQ ID NO: 240215 - DNA, 1890 bp, Artificial Sequence
  derived and/or modified sequence
atgattagggcttttagctttccagtgagtcccgaacgcggcagactacgaggttggctggagggaagtttagccgggttgtgcgagctgcattggctgcgggagagacaggagtaccgcgtacaacaggcactgagactagcccagcccgggatgggcggcgccgaggccgaggacgaagaagacgcagacgaggacgaggatgcagcggctgcccgaagggcagcggccgcccttgaagagcagctggaagcactgcccgggctggtgtgggatcttggccaacaactcggagatctctcattagagtccggcggcctcgaacaggagtccgggcggtcctcaggcttttacgaggatcctagctccacagggggtccagacagtcctccttccacgttttgcggtgactccggctttagcggatcctccagttacggcagactaggtccttctgaaccacgaggaatatatgcttccgagcgacctaaatccttaggagacgcatccccatcggcccctgaggtggtgggtgctagagcggccgtccctcgcagttttagcgcaccttacccaacagcaggcggcagcgcaggccctgaagcatgctcgtccgctgagcgccgtgcccgtgccggtccgttccttacaccgagccctctccacgccgtagccatgcggtctccgcgaccttgtggccgacccccaaccgattccccggacgcaggaggtgccgggcgaccacttgatgggtacatctcggccttgctgagaaggcggcgccgccgaggcgctggccagccccgcacaagtcctgggggagcagacggcggacctagaagacagaattcggtccgacaacggccacctgacgcttctcctagcccaggctctgctaggcccgcccgtgagcctagcctggagcgggtcggggggcatcctacaagccctgccgcactaagtcgtgcgtgggccagttcctgggagagtgaagccgctcccgaacccgctgcccctccagccgctccaagcccacctgacagtccagccgaggggcggctcgtcaaagctcaatacattccaggagcccaggccgctactaggggtctacctggtcgcgccgcccggaggaagcccccaccactcacaagaggtagatctgtcgagcagtcccctccacgggaacgtcctagagcagctgggcgcagaggcagaatggctgaggcttctgggcgccgtggcagccctagggcacgtaaggccagtcggagccagtctgagacatccttgctgggtagggcgtctgcagtaccatcgggccctccaaagtatcctacggcggaaagagaagaacctcggcctcctaggccccgacggggccctgccccaactctggccgcccaggctgccggttcatgtcgaaggtggcgttccacggcagagatagatgccgccgatggtcgacgggtgagaccgcgggcccccgccgccagggtacctgggcccgggccctccccatcagccccacagcgacggttgctctacggttgcgccgggtctgattccgaatgttcagcaggtcggctgggccctctcggccggcgagggccagctggtggagttgggggagggtacggcgaaagcgagagttccgcttccgagggagagtctccagcatttagtagtgcaagcagcgacagtgacggatcgggcgggcttgtctggccacaacaactggtggccgctactgctgcatcaggaggcggggcgggagccggggcccccgctggacctgccaaggtgtttgtgaagattaaagcatcccatgccctaaagaaaaagatccttaggttcagatcgggcagtctgaaggtgatgactacagtgtag

SEQ ID NO: 240216 - DNA, 1890 bp, Artificial Sequence
  derived and/or modified sequence
atgatccgggccttctccttccctgtgtccccagagcggggccgcctgcggggctggctggagggcagcctggccggcctgtgtgagctgcactggctgcgggagcggcaggagtacagagtgcagcaggccctgcggctggcccagcccggcatgggcggcgctgaggccgaggatgaagaagatgctgatgaagatgaagatgctgctgctgccaggagagctgctgctgccctggaggagcagctggaggccctgcccggcctggtgtgggacctgggccagcagctgggggacctgagcctggagagcggcggcctggagcaggagagcggccgcagcagcggcttctatgaggaccccagcagcactggaggccctgacagcccccccagcaccttctgtggggacagcggcttcagcggcagcagcagctatggccgcctgggccccagcgagccccggggcatctatgccagcgagcggcccaagagcctgggagatgccagccccagcgcccctgaggtggtgggcgcccgggctgctgtgcccaggagcttcagcgccccctaccccacagctgggggcagcgctggccctgaggcctgcagcagcgctgagcggcgggcccgggccggccccttcctgacccccagccccctgcatgctgtggccatgaggagcccccggccctgtggccggcccccaacagacagcccagatgctgggggcgccggccggcccctggatggctacatcagcgccctgctgcggaggagaagaagaagaggagctggccagcccaggaccagccctgggggcgcagatggcggcccccggcggcagaacagcgtgcggcagaggcccccagatgccagccccagccctggcagcgcccggcctgcccgggagcccagcctggagcgggtgggcggccaccccaccagccctgctgccctgagccgggcctgggccagctcctgggagagcgaggccgcccctgagcctgctgcccctcctgctgcccccagccccccagacagccctgctgagggccgcctggtgaaggcccagtacatccctggggcccaggccgccacccggggcctgcccggccgggccgcccggaggaagcccccacccctgacccggggccgctctgtggagcagagccccccccgggagcggcccagggctgctggccggcggggccgcatggccgaggccagcggccggcggggcagcccccgggccaggaaggccagccgcagccagagcgagaccagcctgctgggccgggccagcgctgtgcccagcggcccccccaagtaccccacagctgagcgggaggagccccggcccccccggccccggcggggccctgcccccaccctggccgcccaggccgccggcagctgccgccgctggaggagcacagctgagattgatgctgctgatggccggcgggtgcggccccgggccccagctgcccgggtgcccggccctggccccagccccagcgccccccagaggcggctgctgtatggctgtgccggcagtgacagtgaatgttctgctggccgcctgggccccctgggccggcggggccctgctgggggcgtgggcggcggctatggagagagcgagagcagcgccagcgagggggagagccctgccttcagcagcgccagcagtgacagtgatggcagcggcggcctggtgtggccccagcagctggtggccgccacagctgccagcggcggcggggccggggccggggccccagctggccctgccaaggtgtttgtgaagatcaaggccagccacgccctgaagaagaagatcctgcgcttccgcagcggcagcctgaaggtgatgaccaccgtgtag

SEQ ID NO: 240217 - DNA, 1890 bp, Artificial Sequence
  derived and/or modified sequence
atgatccgggccttcagcttccccgtgagccccgagcggggccggttgagaggttggcttgaaggctccctggctggcctttgtgagctgcactggcttagggagaggcaagaatacagggtgcagcaggcgctcaggctggctcaaccaggtatggggggtgctgaagcggaggacgaggaggacgctgatgaggatgaagatgctgcagctgctcgacgggctgctgcagctttggaagaacagctcgaggcgcttcctggacttgtgtgggatctgggtcagcaactaggcgatctgtctcttgaatctggagggcttgagcaggagtctggccgatcctctgggttctacgaggaccccagctcgactggcggacctgacagcccacctagtaccttctgtggcgactcaggtttcagcgggtcctcctcctatggtcgtctaggaccctcagagccccgaggtatctacgccagtgagcgccctaagtccctgggcgatgcctccccgtccgccccggaggtcgtgggcgcccgcgctgcagtgcctaggtccttcagcgcaccgtatccgacagctggaggcagtgccggaccagaggcctgctcctctgccgaacgacgagcacgggccggccctttccttacgcccagtcctctgcatgcggtagccatgcgttcgccacgcccctgtggtcggccccctaccgacagccccgacgccggaggagccgggagacccctggacgggtacatctctgccctactgcggcgacgccgccgaagaggggccggccagccccgcacatctccaggtggcgcagacgggggcccccggaggcaaaatagcgtgagacaacgccccccggacgcatccccaagtcccggtagtgcccgcccggcccgggaaccaagcctcgaacgagttggtggacatcctactagtccagcagcactaagccgggcctgggccagcagttgggaatcagaagccgcaccagagccagcagctccaccagcagccccgagtccccccgacagccccgccgagggtcggctcgttaaagcacaatacatccccggcgcccaggcagctactcggggactcccaggcagggctgcccgtcgcaaaccccccccacttacccgtggacggtccgtcgagcaatcccctccacgggagaggccgagagccgccggccggcgtgggagaatggcagaagcttccgggaggagaggttcacccagggccaggaaagcgtcgaggtcacagtccgaaacctcccttctgggccgagcttcagccgttcccagcggccctcctaagtatccaacagccgagcgtgaagagccccgtcctccacgtcctcgcaggggccctgctcctacattagcggcccaagccgctgggagttgccgccggtggcggtccacggctgaaattgatgctgccgatgggcgcagagtgagaccaagggccccagcagcccgggtgcccggtcccggcccctccccctctgcccctcagcgccgcctgctctacggttgtgctggttcagattccgaatgttcagcagggaggctcggccccctggggaggagaggtccggccgggggcgtcggggggggctacggagaatcagaatcttctgccagcgagggtgaatctcctgctttcagtagcgctagtagcgactcagatgggtctgggggcctggtgtggcctcagcaactagtcgcagccactgctgcatccggcggaggcgccggtgccggcgcgcccgccgggcccgcgaaagtgttcgtaaagatcaaagcgtcccatgcacttaaaaagaaaatccttcgctttcgcagtgggagcttaaaggtgatgacaactgtctag

SEQ ID NO: 240218 - DNA, 1890 bp, Artificial Sequence
  derived and/or modified sequence
atgatacgggcatttagtttcccagtgagtccagaacggggtagactcaggggttggctggagggctcacttgctgggctgtgtgagctccactggcttcgagagaggcaggagtatcgagtgcaacaagccctcaggctggcccagccaggcatggggggagctgaggcagaggacgaggaggatgccgatgaggacgaggatgcagccgctgcaagacgagccgcagcggctctggaggaacagctggaggccctgccgggactggtctgggacctcgggcagcagctcggagatttgagtcttgagtctggagggttagagcaggagagcggacgatcaagcggattctacgaagatccaagcagtaccggaggtcccgactctcctccctcaacattctgtggcgactcaggattctccggatcatcatcttatggacgtctcggtccctctgaaccgagaggtatttacgcttctgaaagaccaaagtccctgggagacgctagcccttctgcccctgaggtcgttggagccagggccgctgtgccacggagcttcagtgcgccttatcctaccgccggaggctctgctggccctgaggcttgctcctccgctgagcggagggctcgtgctggcccatttctaacacccagcccgctgcacgctgtggccatgagatccccaaggccctgcggacgcccacctactgactcacctgatgccggtggcgctggcagaccgttagacggatatatctctgcactgctccggagaagacgacggaggggtgccggacagccccgaacatcaccaggcggagctgatgggggacctaggcgccagaatagcgtgaggcagagacccccagacgcttctccctccccgggatctgctcgcccagccagagaaccctccttagaacgggtcggcggacatcctacttccccagcagcgctctctagggcgtgggcctctagctgggagtctgaggccgctcccgagcccgcagccccacctgctgccccatcccccccagactcgcccgcagaaggcaggttggtgaaggcacagtacatacccggagcacaggccgctacccggggtctccccggtcgcgctgcacgccgaaagccgccacccttgacgcggggacgatccgtggagcagagcccgcctcgcgagcgacctagagcagctggacgccgagggagaatggccgaagcatctgggcgacggggaagcccaagagcgaggaaggcctccaggagccagtctgaaactagccttctcgggcgagcttcagctgtgcccagcggcccaccgaagtatcctaccgccgagcgcgaggaaccccgacccccaaggcccaggagggggccagctcccaccctggccgcacaggccgcaggtagctgccggcgttggagatctactgcggagatagacgccgctgacggccgtagggttcggcctagggcaccggcagcgcgagtccccggacctgggccatctccaagcgctccacagcgtcgattgctctacgggtgtgcaggtagcgattctgagtgtagcgccggacgcctgggccctcttgggaggcgcggaccagcgggtggagtgggaggcggatatggtgaaagcgagagctcagcatcagaaggcgagagccctgctttcagcagcgcatcctccgactcagacggcagcgggggactggtatggccacaacaattggttgctgctaccgctgccagcgggggaggcgcaggagctggtgcacccgctggacctgcaaaggtctttgtgaagatcaaagcaagtcacgccttgaaaaagaaaattttacgcttcaggagcggctcactcaaggtgatgaccaccgtgtag

SEQ ID NO: 240219 - DNA, 2834 bp, Artificial Sequence
  derived and/or modified sequence
gctggggcggggaggtgggaccgggagaggggtggccgcggggcccggccgggctggggcggggggccgcagccatgatccgggccttctcgttcccggtgagccctgagcggggccggctgcggggctggctggagggtagcctggccgggctctgcgagttacattggctccgggagaggcaggagtaccgcgtgcagcaggcgctgcggctggcccagcccggaatggggggcgccgaggccgaggacgaggaggacgccgatgaggatgaagatgcggcggcggcgcgccgggccgcagcggccctggaggagcagctggaggccctgcctggtctcgtctgggacctgggacagcagctgggagacctgagcctggagtctgggggcctggaacaggagagcgggcgtagctcgggcttctatgaagatcccagctctacaggaggtccagattcaccaccctcaaccttctgtggggacagtggcttctctggatccagctcctatggtcgcctgggtccctctgagccccggggcatctatgccagtgagaggcccaagtccctaggagacgccagtcccagcgctccggaggtggtgggcgcgcgggcagcggtgccgcggtccttctcagcgccctacccgacggcaggggggtccgccggcccggaggcctgctcctcggcggagcggcgggcccgcgccgggccctttctgacgcccagccccctgcacgccgtggcgatgcgcagcccgcggccctgcggccgccctcccaccgactcgcccgacgcggggggcgcagggcggcccctggacggctacatctcggcgctcctgcgcaggcgccgccgccggggggcgggccagccccggaccagtcccgggggcgcggacggcggcccgcggcgccagaacagcgtgcgccagcggccgcccgacgcgtctccgtcccccggcagcgcgcgacccgcgcgggagccctcgttggagcgcgtcgggggccaccccaccagccctgccgccttgagccgcgcctgggcgtcgtcgtgggagtcggaggcggcacccgagcccgctgcgccgcccgccgccccctcaccccccgacagcccggctgagggccgcttggtgaaggcgcagtacatcccgggcgcgcaggcggccacccgaggcctccctggccgcgccgcccgccgcaaaccgccgccactgacccgcggccgcagcgtggagcagtcaccaccccgggagcgtccccgggccgccggccgccgtggacgcatggccgaggcttcgggccgccgcggctcgcccagggcccgcaaggcctcgcgctcccagtctgagaccagcctgctgggccgcgcctccgcggtcccttcggggccccctaagtaccccacggcggagcgggaagagcctcggcctccacggccacgccgcggcccagcgcccacgctggcggcccaggccgcagggtcctgccgtcgctggcgctccactgcggagatcgacgctgccgatgggcgccgcgtgcggccccgagcccctgcggcgcgtgttcccggccccggcccgtccccgtcagctccccagcgtcgtctgctttacggctgcgcgggcagcgactccgagtgctcggctgggcgcctggggcccctgggacgccgggggcctgcgggaggcgtcggcgggggttacggggagagcgaatcgagcgccagcgagggagaatcgcctgccttcagctctgcctccagcgactcagacggcagcggtggcctcgtgtggccgcagcagctggtggcggccaccgcggcctctgggggtggagcaggtgcaggggcgcccgcaggccccgccaaagtcttcgtgaaaatcaaagcttcccacgcgctcaagaaaaagatactgcgtttccgttcgggttctctcaaggtcatgactacagtgtgagtttggggatttgcttgggctcccccttcatggcctctgcacctccacactcccaaccactgacccttccacatctaccttccaaagaccatcgttttctctgcttccaaagacccccctcactctccccactcctaacagtcttggttgaaaaggctcccccaccaccaccgagaggaatggggaggagccctgtttgacccagttcagcttctagcttggaagcccttgggcaagacagttccccttctctgggcgtcactttcctcatctgtacagtaagtgtccatgtatgcaaaaggggtaattcggtttgaatttccccgttttagtttagaagcctagtctgtttgttcccctccaccgctctccctctcattcctgatgagccctctcattcctcctttccttgcccagctatggccccctctcattcacaaagtgccccctccatgtccctggacccttaagatatccccttggcaccctggtcagagactctgtgtctgactcaggtggtccctgcagagtgccctgggaagggaaggagcactgatttgggggttttgagggtcaagtaggggttggtaacacctggaaagaaggactctttcacttcgatccctggacaattatggaggattcggaggtagaagaggggaaggaagatggtttctatctcatgacccccactccctgtgagagggaatgggggaagcctgatgaccctcagctgttccaatctagtattttttttcttttttaaaattactgtatttattatgacgatggtgactccccagtgcaaaggggggccagattctgtgtgtttctctaacctctttgtaaataaatgcacagtgtaacata

SEQ ID NO: 240220 - DNA, 1890 bp, Artificial Sequence
  derived and/or modified sequence
atgatcagagccttcagcttccccgtgagccccgagagaggcagactgagaggctggctggagggcagcctggccggcctgtgcgagctgcactggctgagagagagacaggagtacagagtgcagcaggccctgagactggcccagcccggcatgggcggcgccgaggccgaggacgaggaggacgccgacgaggacgaggacgccgccgccgccagaagagccgccgccgccctggaggagcagctggaggccctgcccggcctggtgtgggacctgggccagcagctgggcgacctgagcctggagagcggcggcctggagcaggagagcggcagaagcagcggcttctacgaggaccccagcagcaccggcggccccgacagcccccccagcaccttctgcggcgacagcggcttcagcggcagcagcagctacggcagactgggccccagcgagcccagaggcatctacgccagcgagagacccaagagcctgggcgacgccagccccagcgcccccgaggtggtgggcgccagagccgccgtgcccagaagcttcagcgccccctaccccaccgccggcggcagcgccggccccgaggcctgcagcagcgccgagagaagagccagagccggccccttcctgacccccagccccctgcacgccgtggccatgagaagccccagaccctgcggcagaccccccaccgacagccccgacgccggcggcgccggcagacccctggacggctacatcagcgccctgctgagaagaagaagaagaagaggcgccggccagcccagaaccagccccggcggcgccgacggcggccccagaagacagaacagcgtgagacagagaccccccgacgccagccccagccccggcagcgccagacccgccagagagcccagcctggagagagtgggcggccaccccaccagccccgccgccctgagcagagcctgggccagcagctgggagagcgaggccgcccccgagcccgccgccccccccgccgcccccagcccccccgacagccccgccgagggcagactggtgaaggcccagtacatccccggcgcccaggccgccaccagaggcctgcccggcagagccgccagaagaaagcccccccccctgaccagaggcagaagcgtggagcagagcccccccagagagagacccagagccgccggcagaagaggcagaatggccgaggccagcggcagaagaggcagccccagagccagaaaggccagcagaagccagagcgagaccagcctgctgggcagagccagcgccgtgcccagcggcccccccaagtaccccaccgccgagagagaggagcccagaccccccagacccagaagaggccccgcccccaccctggccgcccaggccgccggcagctgcagaagatggagaagcaccgccgagatcgacgccgccgacggcagaagagtgagacccagagcccccgccgccagagtgcccggccccggccccagccccagcgccccccagagaagactgctgtacggctgcgccggcagcgacagcgagtgcagcgccggcagactgggccccctgggcagaagaggccccgccggcggcgtgggcggcggctacggcgagagcgagagcagcgccagcgagggcgagagccccgccttcagcagcgccagcagcgacagcgacggcagcggcggcctggtgtggccccagcagctggtggccgccaccgccgccagcggcggcggcgccggcgccggcgcccccgccggccccgccaaggtgttcgtgaagatcaaggccagccacgccctgaagaagaagatcctgagattcagaagcggcagcctgaaggtgatgaccaccgtgtag

SEQ ID NO: 240221 - protein, 41 aa, Artificial Sequence
  derived and/or modified sequence
MGDIYITWIGCGLDRLQWENVSAMIEEVFEATDIKITVYTL

SEQ ID NO: 240222 - protein, 152 aa, Artificial Sequence
  derived and/or modified sequence
MASSLNEDPEGSRITYVKGDLFACPKTDSLAHCISEDCRMGAGIAVLFKKKFGGVQELLNQQKKSGEVAVLKRDGRYIYYLITKKRASHKPTYENLQKSLEAMKSHCLKNGVTDLSMPRIGCGLDRLQWENVSAMIEEVFEATDIKITVYTL

SEQ ID NO: 240223 - protein, 131 aa, Artificial Sequence
  derived and/or modified sequence
MASSLNEDPEGSRITYVKGDLFACPKTDSLAHCISEDCRMGAGIAVLFKKKFGGVQELLNQQKKSGEVAVLKRDGRYIYYLITKKRASHKPTYENLQKSLEAMKSHCLKNGVTDLSMPRIGCGLDRLQWEN

SEQ ID NO: 240224 - DNA, 126 bp, Artificial Sequence
  derived and/or modified sequence
atgggagacatatacatcacatggattggctgtggtcttgaccgcctccagtgggaaaacgtgagtgccatgattgaagaggtcttcgaggctactgacattaagattacagtgtacactctctag

SEQ ID NO: 240225 - DNA, 459 bp, Artificial Sequence
  derived and/or modified sequence
atggcctcgagcctgaatgaagatccagaaggatctagaattacttatgtcaagggcgatctgtttgcctgtcccaagactgactcactggcccactgcatttccgaggactgccgtatgggcgctggaatcgctgtgttattcaaaaagaaattcgggggtgttcaggagttgttaaaccagcaaaaaaaatctggtgaagtggcggttttgaaaagggatgggcgttacatttattacctgattactaaaaagcgggcctcccacaaaccaacctacgagaatctgcaaaagagcctggaggcaatgaagagccactgtctgaagaatggcgtcaccgacctgtcgatgccccggatcggatgcggactggatcgtctacagtgggagaatgtgagcgccatgatagaggaagtttttgaggcaaccgatatcaagattaccgtttacaccctctag

SEQ ID NO: 240226 - DNA, 459 bp, Artificial Sequence
  derived and/or modified sequence
atggcaagttcgttgaacgaggatcccgagggctcacgtattacctacgtgaagggcgacttatttgcttgcccaaaaaccgatagccttgcccactgtatctcagaggattgccgaatgggggctgggattgctgtccttttcaaaaaaaaatttggaggcgtgcaggagctgttgaaccaacagaagaagagtggagaagtcgctgtcttaaaaagggacggccgctatatctactacctgattacaaaaaaaagggcatctcataaacctacgtacgaaaacttgcagaaaagtctcgaggccatgaaatcacattgtcttaaaaatggagttacagacttgagtatgccacggataggttgcgggctggatagactgcagtgggagaatgtttctgccatgattgaggaagttttcgaagcaactgatataaagattactgtttatactctgtag

SEQ ID NO: 240227 - DNA, 459 bp, Artificial Sequence
  derived and/or modified sequence
atggctagctcgctgaacgaagaccctgaaggatctcgaatcacgtacgtgaaaggagatctcttcgcctgccccaagactgactctctggcccattgcatcagtgaagactgcagaatgggagccgggatagctgttctttttaaaaagaaattcggcggcgtccaagagctgctgaaccagcagaagaagtctggcgaggtcgcagtactcaagcgcgatgggcgctacatatattacctcattacgaagaagagggcaagccataagcctacttacgaaaaccttcaaaaatctctggaagccatgaaatctcactgcctgaagaacggggtaacagatctctcaatgcccaggatcggatgcggacttgaccggctacaatgggagaacgtgtctgcgatgattgaggaagtgtttgaggctaccgatattaaaataactgtgtatacactgtag

SEQ ID NO: 240228 - DNA, 459 bp, Artificial Sequence
  derived and/or modified sequence
atggccagtagcttgaacgaggaccccgaaggctcacggataacctatgtgaaaggggaccttttcgcttgcccaaagacagactccctggcccactgcatttctgaggattgtcggatgggagccggcatcgctgtcctattcaaaaaaaagttcggcggagtacaggagctcttaaatcagcagaaaaaaagcggagaggttgctgtacttaaacgagatggccgatatatttattacctcataactaaaaaaagagcctcccataaacccacgtatgaaaacctgcaaaagtcacttgaagccatgaagtcacattgtctgaagaacggtgtaaccgacctcagtatgccacgcattggctgcgggctggatcgcctgcagtgggagaatgtcagcgcgatgatcgaggaggtgtttgaggctaccgatattaagatcactgtgtataccttgtag

SEQ ID NO: 240229 - DNA, 396 bp, Artificial Sequence
  derived and/or modified sequence
atggcctcatctctgaatgaggatccagaaggctcacgtatcacttatgtcaagggcgacctgtttgcttgcccgaaaactgattctctggctcattgtatcagcgaggactgcaggatgggcgccggtatagccgttctgttcaaaaagaagtttggcggcgtgcaggaattgcttaatcagcaaaaaaagagcggcgaagtggctgtcctcaaaagagacggaaggtacatttactaccttataactaaaaaacgagcaagtcataagcctacctatgagaacttacaaaagtccctggaagcaatgaagtctcattgtcttaaaaacggagtgaccgacctttccatgccccggatcgggtgcggattggatcgcctgcagtgggagaactag

SEQ ID NO: 240230 - DNA, 126 bp, Artificial Sequence
  derived and/or modified sequence
atgggagacatctacatcacctggattggctgcggcctggaccggctgcagtgggagaatgtgtctgccatgattgaggaggtgtttgaggccacagacatcaagatcaccgtgtacaccctgtag

SEQ ID NO: 240231 - DNA, 459 bp, Artificial Sequence
  derived and/or modified sequence
atggccagcagcctgaatgaagatcctgagggcagccgcatcacctacgtgaagggggacctgtttgcctgccccaagacagacagcctggcccactgcatcagcgaggactgcaggatgggcgccggcattgctgtgctcttcaagaagaagtttggaggagtgcaggagctgctgaaccagcagaagaagtctggagaggtggccgtgctgaagagagatggccgctacatctactacctgatcaccaagaagagggccagccacaagcccacctatgagaacctgcagaagagcctggaggccatgaagagccactgcctgaagaatggagtgacagacctgtccatgccccgcatcggctgcggcctggaccggctgcagtgggagaatgtgtctgccatgattgaggaggtgtttgaggccacagacatcaagatcaccgtgtacaccctgtag

SEQ ID NO: 240232 - DNA, 396 bp, Artificial Sequence
  derived and/or modified sequence
atggccagcagcctgaatgaagatcctgagggcagccgcatcacctacgtgaagggggacctgtttgcctgccccaagacagacagcctggcccactgcatcagcgaggactgcaggatgggcgccggcattgctgtgctcttcaagaagaagtttggaggagtgcaggagctgctgaaccagcagaagaagtctggagaggtggccgtgctgaagagagatggccgctacatctactacctgatcaccaagaagagggccagccacaagcccacctatgagaacctgcagaagagcctggaggccatgaagagccactgcctgaagaatggagtgacagacctgtccatgccccgcatcggctgcggcctggaccggctgcagtgggagaactag

SEQ ID NO: 240233 - DNA, 126 bp, Artificial Sequence
  derived and/or modified sequence
atgggcgacatctacatcacctggatcggctgcggcctggaccggttgcagtgggagaatgtcagcgctatgatcgaggaagtgtttgaagcaaccgacattaagattaccgtatataccctgtag

SEQ ID NO: 240234 - DNA, 459 bp, Artificial Sequence
  derived and/or modified sequence
atggccagcagcctgaacgaggaccccgagggcagccggatcacctacgtcaaaggagacctgttcgcatgcccgaagacggattctctagcccattgtatcagcgaagactgtagaatgggggcaggcatcgcagtgttgttcaagaaaaaatttggaggagtgcaagagctgttgaatcagcagaaaaagtctggtgaggtagctgtcctgaagcgagacgggcgctatatttattatctgattactaagaagagagcaagtcacaaacctacttatgagaaccttcagaaatctctggaggccatgaagagccactgtttgaagaacggtgttacagacctcagcatgccccggataggatgtggtttggacaggttacaatgggaaaacgtctcagcaatgattgaagaggtgttcgaggcaactgatattaagattactgtatataccttgtag

SEQ ID NO: 240235 - DNA, 459 bp, Artificial Sequence
  derived and/or modified sequence
atggccagcagcctgaacgaggaccccgagggcagccggatcacctacgtgaagggggatctgttcgcatgccctaagaccgattccttagcacactgtatcagtgaggactgccggatgggcgctggaattgccgtgctcttcaaaaagaaatttggtggagtgcaggagctgctgaaccagcagaagaagtcaggcgaggtggctgtcctcaagcgggatggaaggtacatctactatctgatcactaagaaaagagctagtcataagcccacttacgagaatctacagaagagcttagaggcgatgaaatctcactgcctgaagaacggcgtaacggacctgtctatgcctaggattggatgcggactcgaccgcttgcagtgggagaatgtgagtgctatgatagaagaggttttcgaagctaccgacattaagattaccgtgtacacattatag

SEQ ID NO: 240236 - DNA, 459 bp, Artificial Sequence
  derived and/or modified sequence
atggccagcagcctgaacgaggaccccgagggcagccggatcacctacgtgaagggcgacctgttcgcctgtccgaagaccgactcgttggcacattgcatctccgaggattgccgaatgggagctggcattgctgttttgtttaaaaaaaagttcggaggggtgcaagaactgctgaatcagcagaagaagtctggagaagtggctgtgctgaagagggacggacgttacatctactatttgattaccaaaaagcgtgcatcacacaaacctacctatgagaacctgcaaaaatctctggaggccatgaaatcccattgtctgaaaaatggtgtgaccgacttgagcatgcctaggataggctgtgggttagatcgactgcaatgggagaatgtttcagctatgatagaagaggtttttgaagcgaccgatattaaaataaccgtctacacactctag

SEQ ID NO: 240237 - DNA, 459 bp, Artificial Sequence
  derived and/or modified sequence
atggccagcagcctgaacgaggaccccgagggcagccggatcacctacgtgaagggcgatctattcgcatgtccaaagaccgactcgctcgcccactgcattagtgaagactgcaggatgggcgccggcattgcagtgctgtttaaaaaaaagttcggcggggtacaggagctgcttaatcaacagaaaaagagcggagaggtggctgtgttgaagcgcgacggacgttacatctactacttgatcactaagaaacgggctagccacaaacctacctatgagaacctgcaaaagtcgctggaagctatgaaaagccactgcctcaaaaacggggtgaccgacctgtcaatgccaagaatcggctgcggtctcgacagactgcagtgggagaacgtgagtgcgatgatagaggaagtgttcgaggctacagacattaaaataacagtctacactctgtag

SEQ ID NO: 240238 - DNA, 396 bp, Artificial Sequence
  derived and/or modified sequence
atggccagcagcctgaacgaggaccccgagggcagccggatcacctatgtgaagggggacctcttcgcctgccccaagaccgactccttggctcactgcatttcagaagattgtcgcatgggggctgggatagcagtactcttcaagaaaaagtttggcggggttcaggaactgcttaaccagcagaaaaagtcaggcgaggttgccgtgctcaagcgagatggcaggtacatctactatttaattacaaaaaaacgggcttctcacaagcccacctacgagaacctgcaaaaatctctggaagctatgaagagtcactgcctcaaaaacggagtgacggacctctctatgcctcggattgggtgtggactcgacaggctgcagtgggagaattag

SEQ ID NO: 240239 - DNA, 126 bp, Artificial Sequence
  derived and/or modified sequence
atgggtgatatatacatcacttggattggatgtggtctagatcgcctccagtgggagaatgtatccgctatgattgaggaagtctttgaggcaacagacatcaagatcactgtgtataccttgtag

SEQ ID NO: 240240 - DNA, 459 bp, Artificial Sequence
  derived and/or modified sequence
atggcgagttccctgaatgaggatccagagggttctcgcattacgtatgtaaagggagacttgttcgcctgccctaaaaccgatagcctggcccattgcatttcagaggattgtcgaatgggagccggtatcgcggtgctctttaagaaaaagtttggaggagttcaagaattactgaaccagcagaaaaagtccggcgaagtggccgtgctgaaaagagatggccgatatatttactacctaattaccaagaagagggcctcccataagccaacttatgagaatctgcagaagtcgttggaggcaatgaaatctcattgcctcaagaatggtgtaacggacctgtccatgcctaggattgggtgcggcttggaccggctccaatgggagaatgtgagcgctatgattgaggaggtcttcgaagccacagacatcaaaatcaccgtgtataccttatag

SEQ ID NO: 240241 - DNA, 459 bp, Artificial Sequence
  derived and/or modified sequence
atggcctcctccctcaatgaggacccagaagggtccaggatcacctatgtcaaaggcgatttgttcgcgtgcccaaagactgattccctcgcccactgcatctcagaggactgtagaatgggtgctggtatagccgtacttttcaaaaagaaattcgggggagtgcaggagttactcaaccaacagaagaagagtggtgaggtggccgtccttaagcgggacgggaggtacatttactaccttattacgaagaagagagcatctcacaagcctacctacgagaatctccagaagtccttagaagcaatgaaaagccattgtctcaagaatggagtgacagatctgagtatgcctcgtatcggttgtggattagacagactgcagtgggagaatgtgtcagccatgattgaagaggtgttcgaagcaactgacattaagatcaccgtgtataccttgtag

SEQ ID NO: 240242 - DNA, 459 bp, Artificial Sequence
  derived and/or modified sequence
atggcctctagcctgaacgaagatcctgagggcagcaggatcacgtatgtgaagggcgacctgttcgcttgccccaagacggactccctggcacattgcattagcgaggattgtcggatgggtgcagggattgccgtgctgttcaagaagaaatttgggggtgtgcaagaactcctgaatcagcagaaaaaaagcggggaggttgccgttctcaaacgtgatgggagatacatctactacctgataacgaaaaagcgggcaagtcataagcctacttacgaaaatctgcaaaagagcctcgaagcaatgaagtcacactgcctgaaaaacggcgttacagatctgtccatgccaagaattggctgcggattagaccggctgcagtgggaaaatgtgagcgcaatgatagaggaagtgttcgaggcaaccgacatcaaaattacagtgtacacactttag

SEQ ID NO: 240243 - DNA, 459 bp, Artificial Sequence
  derived and/or modified sequence
atggctagcagcctgaacgaagatccagagggatcacgcattacttacgtaaaaggggatttgtttgcatgtccaaagaccgactcccttgcccactgcatatccgaggactgtcgaatgggcgcagggatcgcagtcctgttcaaaaaaaaatttggcggtgtgcaggagctgctgaaccagcagaaaaaatctggcgaggtggcggttctcaagcgcgatgggaggtacatctactatcttattaccaaaaagagagcttcacacaaacccacatacgagaatctgcagaagtcattagaagcgatgaagtcccattgcctgaaaaatggagtaactgatttatccatgccaaggattgggtgtggactggatcggctccagtgggaaaacgtgtctgccatgatagaggaggtgttcgaagccaccgatattaaaattaccgtgtatacactatag

SEQ ID NO: 240244 - DNA, 396 bp, Artificial Sequence
  derived and/or modified sequence
atggcatcaagcttgaacgaggacccagaagggtctagaattacctacgtcaaaggggacctgtttgcttgtcccaagaccgactccctcgcccactgtatctcagaagattgtaggatgggtgccggaatcgctgtgctgtttaaaaagaagtttggcggtgtgcaggagcttctgaaccagcagaagaaaagcggagaggtggcggtcttgaagcgcgatgggaggtacatttactatctgatcactaagaagcgggcaagtcacaaacctacctatgaaaaccttcagaaatccctcgaagcaatgaagtcgcactgcctgaagaatggagtcactgatctgtccatgcctagaattggctgcggcctagaccgtctgcagtgggaaaattag

SEQ ID NO: 240245 - DNA, 1128 bp, Artificial Sequence
  derived and/or modified sequence
ctcggctagcaagctagaggggctcgtttccgccccgctaccgggcgggggcggccatcttagatgcgtgcaattaagggctttggcgggattggctccgcgtttgggctggtccgctgctccccacctaccagggtcggatccggagcccttccccgcggggcggggacctccaaacaaccgactcctttccagctgaagaaacacttaaattctggaaatagcgactcagtatcatggccagcagccttaatgaagatccagaaggaagcagaatcacttatgtgaaaggagacctttttgcatgcccgaaaacagactctttagcccactgtatcagtgaggattgtcgcatgggcgctgggatagctgtcctctttaagaagaaatttggaggggtgcaagaacttttaaatcaacaaaagaaatctggagaagtggctgttctgaagagagatgggcgatatatatattacttggattggatgtggtcttgatcgtctgcaatgggaaaatgtatctgcgatgatcgaggaggtatttgaggcaacagacatcaaaattactgtgtacacactctgaaccagtgaacattttggatgtttccgtgttctcctgtgtcatctctactgggccataggaccgggcaaacctaccttaaaataggcagaggaaagtttcatgagaagtagtgtgtttaacaagacagactttggttgctgtattcaagtatttggattatgactgtggaggagggcttgcttaagatatgtggttgtgtttttttgtggaaaagtaaggagttaggtggcttgataataggcagggaaaccagattgtcgggactatgacctttttctccagtatgctacctgatttgtttggctggccactaggtggcagcattggttctacttctctgctttttaagagaaatttcaggaaggatgatcattccagttagtttggcattttttgtcgtttgtgcacataacttggtgttatccttatgtcatcagattcctcctaggggagagtttttgttttaattacaaaattaaattctacattgttaccaagaaatttgtggtgataaaaatggaaaaataaaaatttggggagttagtg

SEQ ID NO: 240246 - DNA, 1337 bp, Artificial Sequence
  derived and/or modified sequence
gagtgtgggctcggctagcaagctagaggggctcgtttccgccccgctaccgggcgggggcggccatcttagatgcgtgcaattaagggctttggcgggattggctccgcgtttgggctggtccgctgctccccacctaccagggtcggatccggagcccttccccgcggggcggggacctccaaacaaccgactcctttccaggtgaagggtgacttgggtacgttggggctttgagcgagcctccccgcaccctcccataggaccccaggacagactgcgtcctcgctgacccgccctaggctgaagaaacacttaaattctggaaatagcgactcagtatcatggccagcagccttaatgaagatccagaaggaagcagaatcacttatgtgaaaggagacctttttgcatgcccgaaaacagactctttagcccactgtatcagtgaggattgtcgcatgggcgctgggatagctgtcctctttaagaagaaatttggaggggtgcaagaacttttaaatcaacaaaagaaatctggagaagtggctgttctgaagagagatgggcgatatatatattacttgattacaaagaaaagggcttcgcacaagccaacttatgaaaacttacagaagagtttagaggcaatgaagtctcattgtctgaagaatggagtcactgacctctccatgcccaggattggatgtggtcttgatcgtctgcaatgggaaaatgtatctgcgatgatcgaggaggtatttgaggcaacagacatcaaaattactgtgtacacactctgaaccagtgaacattttggatgtttccgtgttctcctgtgtcatctctactgggccataggaccgggcaaacctaccttaaaataggcagaggaaagtttcatgagaagtagtgtgtttaacaagacagactttggttgctgtattcaagtatttggattatgactgtggaggagggcttgcttaagatatgtggttgtgtttttttgtggaaaagtaaggagttaggtggcttgataataggcagggaaaccagattgtcgggactatgacctttttctccagtatgctacctgatttgtttggctggccactaggtggcagcattggttctacttctctgctttttaagagaaatttcaggaaggatgatcattccagttagtttggcattttttgtcgtttgtgcacataacttggtgttatccttatgtcatcagattcctcctaggggagagtttttgttttaattacaaaattaaattctacattgttaccaagaaatttgtggtgataaaaatggaaaaataaaaattt

SEQ ID NO: 240247 - DNA, 1515 bp, Artificial Sequence
  derived and/or modified sequence
ccgggcgggggcggccatcttagatgcgtgcaattaagggctttggcgggattggctccgcgtttgggctggtccgctgctccccacctaccagggtcggatccggagcccttccccgcggggcggggacctccaaacaaccgactcctttccagctgaagaaacacttaaattctggaaatagcgactcagtatcatggccagcagccttaatgaagatccagaaggaagcagaatcacttatgtgaaaggagacctttttgcatgcccgaaaacagactctttagcccactgtatcagtgaggattgtcgcatgggcgctgggatagctgtcctctttaagaagaaatttggaggggtgcaagaacttttaaatcaacaaaagaaatctggagaagtggctgttctgaagagagatgggcgatatatatattacttgattacaaagaaaagggcttcgcacaagccaacttatgaaaacttacagaagagtttagaggcaatgaagtctcattgtctgaagaatggagtcactgacctctccatgcccaggattggatgtggtcttgatcgtctgcaatgggaaaatgtatctgcgatgatcgaggaggtatttgaggcaacagacatcaaaattactgtgtacacactctgaaccagtgaacattttggatgtttccgtgttctcctgtgtcatctctactgggccataggaccgggcaaacctaccttaaaataggcagaggaaagtttcatgagaagtagtgtgtttaacaagacagactttggttgctgtattcaagtatttggattatgactgtggaggagggcttgcttaagatatgtggttgtgtttttttgtggaaaagtaaggagttaggtggcttgataataggcagggaaaccagattgtcgggactatgacctttttctccagtatgctacctgatttgtttggctggccactaggtggcagcattggttctacttctctgctttttaagagaaatttcaggaaggatgatcattccagttagtttggcattttttgtcgtttgtgcacataacttggtgttatccttatgtcatcagattcctcctaggggagagtttttgttttaattacaaaattaaattctacattgttaccaagaaatttgtggtgataaaaatggaaaaataaaaatttggggagttagtgaggttctgtgcttatgtctatttgttctggacatgggtaatggagggttcacctgcaacttaatttcaaacagtcagacaaagggtccaagcgggaggagaagcaaagtgagaaataagagataaaaatagacaagtcaaaaggcaggtttttagaatctcctcatggtgaactttttctctcttttgtccactgcatggtttctgtgattgaacctgcctgaatttaatcatgaaaacaagtgaaataatgtatgttaaatgcctggcagagtacttagcacagactagtgacccaataaatcagtgattgtc

SEQ ID NO: 240248 - DNA, 819 bp, Artificial Sequence
  derived and/or modified sequence
ctctttgccccagaagggttttgtattacgtcccaggggccgaacaaactcacattcatcgataaacgttggggaaaaaagcctattaagtggttgtacagggcaatcagaatattatatactaaggctgcctaagcatttttacttccttttcccttctcatagctgaagaaacacttaaattctggaaatagcgactcagtatcatggccagcagccttaatgaagatccagaaggaagcagaatcacttatgtgaaaggagacctttttgcatgcccgaaaacagactctttagcccactgtatcagtgaggattgtcgcatgggcgctgggatagctgtcctctttaagaagaaatttggaggggtgcaagaacttttaaatcaacaaaagaaatctggagaagtggctgttctgaagagagatgggcgatatatatattacttgattacaaagaaaagggcttcgcacaagccaacttatgaaaacttacagaagagtttagaggcaatgaagtctcattgtctgaagaatggagtcactgacctctccatgcccaggattggatgtggtcttgatcgtctgcaatgggaaaatgtatctgcgatgatcgaggaggtatttgaggcaacagacatcaaaattactgtgtacacactctgaaccagtgaacattttggatgtttccgtgttctcctgtgtcatctctactgggccataggaccgggcaaacctaccttaaaataggcagaggaaagtttcatgagaagtagtgtgtttaacaagacagactttggttgctgtattcaagtatttg

SEQ ID NO: 240249 - DNA, 3330 bp, Artificial Sequence
  derived and/or modified sequence
ggcggcgggaaaccacggaatttactgccggaagttcggcggccttcgccaaagagtgtgggctcggctagcaagctagaggggctcgtttccgccccgctaccgggcgggggcggccatcttagatgcgtgcaattaagggctttggcgggattggctccgcgtttgggctggtccgctgctccccacctaccagggtcggatccggagcccttccccgcggggcggggacctccaaacaaccgactcctttccaggtgaagggtgacttggctgaagaaacacttaaattctggaaatagcgactcagtatcatggccagcagccttaatgaagatccagaaggaagcagaatcacttatgtgaaaggagacctttttgcatgcccgaaaacagactctttagcccactgtatcagtgaggattgtcgcatgggcgctgggatagctgtcctctttaagaagaaatttggaggggtgcaagaacttttaaatcaacaaaagaaatctggagaagtggctgttctgaagagagatgggcgatatatatattacttgattacaaagaaaagggcttcgcacaagccaacttatgaaaacttacagaagagtttagaggcaatgaagtctcattgtctgaagaatggagtcactgacctctccatgcccaggattggatgtggtcttgatcgtctgcaatgggaaaatgtatctgcgatgatcgaggaggtatttgaggcaacagacatcaaaattactgtgtacacactctgaaccagtgaacattttggatgtttccgtgttctcctgtgtcatctctactgggccataggaccgggcaaacctaccttaaaataggcagaggaaagtttcatgagaagtagtgtgtttaacaagacagactttggttgctgtattcaagtatttggattatgactgtggaggagggcttgcttaagatatgtggttgtgtttttttgtggaaaagtaaggagttaggtggcttgataataggcagggaaaccagattgtcgggactatgacctttttctccagtatgctacctgatttgtttggctggccactaggtggcagcattggttctacttctctgctttttaagagaaatttcaggaaggatgatcattccagttagtttggcattttttgtcgtttgtgcacataacttggtgttatccttatgtcatcagattcctcctaggggagagtttttgttttaattacaaaattaaattctacattgttaccaagaaatttgtggtgataaaaatggaaaaataaaaatttggggagttagtgaggttctgtgcttatgtctatttgttctggacatgggtaatggagggttcacctgcaacttaatttcaaacagtcagacaaagggtccaagcgggaggagaagcaaagtgagaaataagagataaaaatagacaagtcaaaaggcaggtttttagaatctcctcatggtgaactttttctctcttttgtccactgcatggtttctgtgattgaacctgcctgaatttaatcatgaaaacaagtgaaataatgtatgttaaatgcctggcagagtacttagcacagactagtgacccaataaatcagtgattgtcaaaaatccttatgagtcttctttaaaaaaataaaggccacttcctctcaaaaaattctcatacctgtcatctcagcactttgagaggctgagactggaggatgacttgagcccaggagtttgagacaaacctggttaacatagcgagaccctgtctctacaaaaaaaaaagaaattaaaaattagctgggcctggtggtgcaggcctgtagttccagctactctagaggttgaggcgggaggatggcttgagcctgggaggttgaagttgcattgagctgtgattgtgccactgcactccagtgtgggcaacagagcaagaccctatctcaattaaaaaaaaaaatttggtggtggagtgggatggccacttttgtgtttttaacctccatagaagatttggatgtgcagccagctggggtctaaatattagtcctcttttcttccgaagctgcaaagaccagtcgtctattgtggtcatggtaggaaaataaagttcatggatttagccaatggttcagtatcagagctattcgggaaactagacattttcttgttttcccttacagtggtgttgagagttaaaacagccagacttgctattgattttctccctagagtgactttgggtctgtcacaggacttgctgctttcccaagtataaaagaacaactgtattttagaaggggctggttaaaacaccaggaaagtactggttaaatataatctttgtactttagactgtgttcttatcacatatcagcctgataagaggcaacagtttcaaaaaagtatttcacttttgtatttctaggtggaacagacaagttcttcatgttgttggggtaggggcagtggagggtcaagttcattatcaaacttttagattgaggcttttcttgaagcattgcttttgtccacataaagttgaagggaaaaaggaaggagagattatctaaatacacaaaattgaaagtgagagtgggggataagaaacttaaagaaacttaaaatattttgcttaactctgcaattacagatgctcctcaacttaggtctatgtctgggtaaccccatcttaagttgagttcagttgaagggtgtactgaatgtgtatggcttttgcaccgttgtaaagtccaaaaattgcaagacaaaccattgtaaattgagtaccatctgtaaaccttaacacaagtcaaaacatggattttctaggcttcctttacttttaaagagattatggttattattattatttttttcttggcgtttgagccttgattctttagacaaaacctagtctcattcaggattggctgtaagtggaattctgggacttagcaggaatgtgataaagcactttgtcatttgccgatagtagtcttgggtcaaattccgacgacttatcacacttgaagcctgaggaaaggaggcatgccctggtaatcagagtgaacacattattcctggaaacctagttagagtttggcaaacacccggaaattcacctgtgaatttttgcttccacataggactcaaacaaacctttaaaaaaaaaaaaagagagacttgacatcatcctgccattaccatcaaacaccatgtattgaatacttttaaatgattgtatatctgaacattaaactactacttttcacccgctcctctctaataaagaagctagttgcttattaa

SEQ ID NO: 240250 - DNA, 814 bp, Artificial Sequence
  derived and/or modified sequence
gctttcctgattgcagttttggttgagaaggttgttcttccctgctgagatggctggctgacttcaccagtcaagaggcctgcaggatgaactggtcttaagtgtgagaaagatttagctatgtgatgatgtggaggaaggtgaagtactacaaatcaagagagcataaaaacaagaacagaaatatttcagcatgtgaacagtggactaaacaggaaaaaaagcttggggccacactactttctctcaaaatgtcagacaaagaaattcttctgcagactggtggaagcttgtaaggtcaggacgcagtggctcatgcctgtaatcccaacgttttgggagaacaagaagggaggatggcttgagcccaggagttccagctgaagaaacacttaaattctggaaatagcgactcagtatcatggccagcagccttaatgaagatccagaaggaagcagaatcacttatgtgaaaggagacctttttgcatgcccgaaaacagactctttagcccactgtatcagtgaggattgtcgcatgggcgctgggatagctgtcctctttaagaagaaatttggaggggtgcaagaacttttaaatcaacaaaagaaatctggagaagtggctgttctgaagagagatgggcgatatatatattacttgattacaaagaaaagggcttcgcacaagccaacttatgaaaacttacagaagagtttagaggcaatgaagtctcattgtctgaagaatggagtcactgacctctccatgcccaggattggatgtggtcttgatcgtctgcaatgggaaaat

SEQ ID NO: 240251 - DNA, 126 bp, Artificial Sequence
  derived and/or modified sequence
atgggcgacatctacatcacctggatcggctgcggcctggacagactgcagtgggagaacgtgagcgccatgatcgaggaggtgttcgaggccaccgacatcaagatcaccgtgtacaccctgtag

SEQ ID NO: 240252 - DNA, 459 bp, Artificial Sequence
  derived and/or modified sequence
atggccagcagcctgaacgaggaccccgagggcagcagaatcacctacgtgaagggcgacctgttcgcctgccccaagaccgacagcctggcccactgcatcagcgaggactgcagaatgggcgccggcatcgccgtgctgttcaagaagaagttcggcggcgtgcaggagctgctgaaccagcagaagaagagcggcgaggtggccgtgctgaagagagacggcagatacatctactacctgatcaccaagaagagagccagccacaagcccacctacgagaacctgcagaagagcctggaggccatgaagagccactgcctgaagaacggcgtgaccgacctgagcatgcccagaatcggctgcggcctggacagactgcagtgggagaacgtgagcgccatgatcgaggaggtgttcgaggccaccgacatcaagatcaccgtgtacaccctgtag

SEQ ID NO: 240253 - DNA, 396 bp, Artificial Sequence
  derived and/or modified sequence
atggccagcagcctgaacgaggaccccgagggcagcagaatcacctacgtgaagggcgacctgttcgcctgccccaagaccgacagcctggcccactgcatcagcgaggactgcagaatgggcgccggcatcgccgtgctgttcaagaagaagttcggcggcgtgcaggagctgctgaaccagcagaagaagagcggcgaggtggccgtgctgaagagagacggcagatacatctactacctgatcaccaagaagagagccagccacaagcccacctacgagaacctgcagaagagcctggaggccatgaagagccactgcctgaagaacggcgtgaccgacctgagcatgcccagaatcggctgcggcctggacagactgcagtgggagaactag

SEQ ID NO: 240254 - protein, 364 aa, Artificial Sequence
  derived and/or modified sequence
MTEKEVLESPKPSFPAETRQSGLQRLKQLLRKGSTGTKEMELPPEPQANGEAVGAGGGPIYYIYEEEEEEEEEEEEPPPEPPKLVNDKPHKFKDHFFKKPKFCDVCARMIVLNNKFGLRCKNCKTNIHEHCQSYVEMQRCFGKIPPGFHRAYSSPLYSNQQYACVKDLSAANRNDPVFETLRTGVIMANKERKKGQADKKNPVAAMMEEEPESARPEEGKPQDGNPEGDKKAEKKTPDDKHKQPGFQQSHYFVALYRFKALEKDDLDFPPGEKITVIDDSNEEWWRGKIGEKVGFFPPNFIIRVRAGERVHRVTRSFVGNREIGQITLKKDQIVVQKGDEAGGYVKVYTGRKVGLFPTDFLEEI

SEQ ID NO: 240255 - protein, 168 aa, Artificial Sequence
  derived and/or modified sequence
MTEKEVLESPKPSFPAETRQSGLQRLKQLLRKGSTGTKEMELPPEPQANGEAVGAGGGPIYYIYEEEEEEEEEEEEPPPEPPKLVNDKPHKFKDHFFKKPKFCDVCARMIVLNNKFGLRCKNCKTNIHEHCQSYVEMQRCFGKIPPGFHRAYSSPLYSNQQYACVKDL

SEQ ID NO: 240256 - protein, 325 aa, Artificial Sequence
  derived and/or modified sequence
MELPPEPQANGEAVGAGGGPIYYIYEEEEEEEEEEEEPPPEPPKLVNDKPHKFKDHFFKKPKFCDVCARMIVLNNKFGLRCKNCKTNIHEHCQSYVEMQRCFGKIPPGFHRAYSSPLYSNQQYACVKDLSAANRNDPVFETLRTGVIMANKERKKGQADKKNPVAAMMEEEPESARPEEGKPQDGNPEGDKKAEKKTPDDKHKQPGFQQSHYFVALYRFKALEKDDLDFPPGEKITVIDDSNEEWWRGKIGEKVGFFPPNFIIRVRAGERVHRVTRSFVGNREIGQITLKKDQIVVQKGDEAGGYVKVYTGRKVGLFPTDFLEEI

SEQ ID NO: 240257 - DNA, 1095 bp, Artificial Sequence
  derived and/or modified sequence
atgaccgagaaggaggtgctggagagccccaagcccagcttccccgccgagaccagacagagcggcctgcagagactgaagcagctgctgagaaagggcagcaccggcaccaaggagatggagctgccccccgagccccaggccaacggcgaggccgtgggcgccggcggcggccccatctactacatctacgaggaggaggaggaggaggaggaggaggaggaggagcccccccccgagccccccaagctggtgaacgacaagccccacaagttcaaggaccacttcttcaagaagcccaagttctgcgacgtgtgcgccagaatgatcgtgctgaacaacaagttcggcctgagatgcaagaactgcaagaccaacatccacgagcactgccagagctacgtggagatgcagagatgcttcggcaagatcccccccggcttccacagagcctacagcagccccctgtacagcaaccagcagtacgcctgcgtgaaggacctgagcgccgccaacagaaacgaccccgtgttcgagaccctgagaaccggcgtgatcatggccaacaaggagagaaagaagggccaggccgacaagaagaaccccgtggccgccatgatggaggaggagcccgagagcgccagacccgaggagggcaagccccaggacggcaaccccgagggcgacaagaaggccgagaagaagacccccgacgacaagcacaagcagcccggcttccagcagagccactacttcgtggccctgtacagattcaaggccctggagaaggacgacctggacttcccccccggcgagaagatcaccgtgatcgacgacagcaacgaggagtggtggagaggcaagatcggcgagaaggtgggcttcttcccccccaacttcatcatcagagtgagagccggcgagagagtgcacagagtgaccagaagcttcgtgggcaacagagagatcggccagatcaccctgaagaaggaccagatcgtggtgcagaagggcgacgaggccggcggctacgtgaaggtgtacaccggcagaaaggtgggcctgttccccaccgacttcctggaggagatctag

SEQ ID NO: 240258 - DNA, 507 bp, Artificial Sequence
  derived and/or modified sequence
atgaccgagaaggaggtgctggagagccccaagcccagcttccccgccgagaccagacagagcggcctgcagagactgaagcagctgctgagaaagggcagcaccggcaccaaggagatggagctgccccccgagccccaggccaacggcgaggccgtgggcgccggcggcggccccatctactacatctacgaggaggaggaggaggaggaggaggaggaggaggagcccccccccgagccccccaagctggtgaacgacaagccccacaagttcaaggaccacttcttcaagaagcccaagttctgcgacgtgtgcgccagaatgatcgtgctgaacaacaagttcggcctgagatgcaagaactgcaagaccaacatccacgagcactgccagagctacgtggagatgcagagatgcttcggcaagatcccccccggcttccacagagcctacagcagccccctgtacagcaaccagcagtacgcctgcgtgaaggacctgtag

SEQ ID NO: 240259 - DNA, 1095 bp, Artificial Sequence
  derived and/or modified sequence
atgaccgagaaagaggtactcgaatcaccaaaaccctcctttcccgccgagacgaggcagagcggattacagagattaaaacagctgctgagaaagggttcaaccggcacaaaggaaatggaactgcctcccgaaccccaggcaaatggggaagcagtcggagccggtggcggacctatctactacatttatgaagaagaagaggaagaggaggaagaagaggaagaaccaccgcccgagccccctaagcttgtaaatgacaagcctcacaaattcaaagatcacttttttaaaaagcctaaattttgcgacgtgtgcgcccgaatgattgtgctcaacaacaagttcggtctccggtgtaagaattgtaagaccaacatacacgaacactgccagtcatacgtcgaaatgcaacggtgctttggaaaaatccccccgggcttccaccgggcgtacagtagccccctgtattctaatcagcagtatgcttgcgtcaaggacctgagcgcagccaatcggaatgatcccgtgttcgagacactgcgcaccggagtcatcatggcgaacaaagaaagaaagaaggggcaggccgataagaaaaatcctgtcgccgcaatgatggaggaagagccggaatctgcccggcccgaggaaggcaaaccacaagacggaaacccagagggcgataagaaagccgagaagaagaccccagacgataaacataaacaacctggttttcagcagagtcattatttcgtcgccctgtatagatttaaagctctggagaaggacgacctggacttcccccctggggagaagattactgtaatcgatgactcaaatgaggagtggtggaggggtaaaataggggaaaaagttggcttctttccacctaactttatcattcgtgtccgggccggcgaacgcgttcatcgggtgactagatcttttgtgggaaacagagaaatcgggcagatcactctaaagaaggaccagatcgtagttcaaaaaggcgacgaggcaggagggtacgtgaaagtctacactggcaggaaggttggactgttcccaacggactttctcgaagagatctag

SEQ ID NO: 240260 - DNA, 507 bp, Artificial Sequence
  derived and/or modified sequence
atgaccgaaaaggaggtgctggagagccccaagccaagtttcccagccgagacgagacagagcggcctccagcggctgaagcagctccttcggaagggctctacagggacgaaagagatggagctgccccctgagccacaggctaatggcgaggccgtaggggccggtggagggccaatttattacatatacgaggaggaggaggaggaagaggaggaagaagaagagccaccccccgagccccccaagttagtgaatgataaaccacacaagtttaaggaccatttcttcaaaaagcccaaattctgcgacgtgtgtgcccgtatgattgtccttaacaataaatttggcctgaggtgtaaaaattgcaagacgaatatccacgagcattgccagtcctacgtcgaaatgcagcggtgttttggaaagatccctccaggcttccacagagcatactcatcaccgctttactccaaccagcagtacgcctgcgtaaaggatctttag

SEQ ID NO: 240261 - DNA, 1095 bp, Artificial Sequence
  derived and/or modified sequence
atgacagagaaggaggtgctggagagccccaagcccagcttccctgctgagacccggcagagcggcctgcagaggctgaagcagctgctgaggaagggcagcacaggcaccaaggagatggagctgcccccagagccccaggccaatggagaggccgtgggcgccggcggcggccccatctactacatctatgaggaggaggaggaggaggaggaggaggaggaggagcccccacctgagccccccaagctggtgaatgacaagccccacaagttcaaggaccacttcttcaagaagcccaagttctgtgatgtgtgtgccaggatgattgtgctgaacaacaagtttggcctgcgctgcaagaactgcaagaccaacatccacgagcactgccagagctatgtggagatgcagcgctgcttcggcaagatccccccaggcttccaccgggcctacagcagccccctgtacagcaaccagcagtatgcctgtgtgaaggacctgtctgctgccaacagaaatgaccctgtgtttgagaccctgaggactggagtcatcatggccaacaaggagaggaagaagggccaggccgacaagaagaaccctgtggccgccatgatggaggaggagcctgagagcgcccggcctgaggagggcaagccccaggacggcaaccctgagggggacaagaaggccgagaagaagaccccagatgacaagcacaagcagcccggcttccagcagagccactactttgtggccctgtaccgcttcaaggccctggagaaggatgacctggacttccccccaggagagaagatcaccgtgattgatgacagcaatgaggagtggtggaggggcaagattggagagaaggtgggcttcttcccccccaacttcatcatccgggtgcgggccggggagcgggtgcaccgggtgaccaggagctttgtgggcaaccgggagatcggccagatcaccctgaagaaggaccagatcgtggtgcagaagggagatgaagctgggggctacgtgaaggtgtacacaggcaggaaggtgggcctcttccccacagacttcctggaggagatctag

SEQ ID NO: 240262 - DNA, 507 bp, Artificial Sequence
  derived and/or modified sequence
atgacagagaaggaggtgctggagagccccaagcccagcttccctgctgagacccggcagagcggcctgcagaggctgaagcagctgctgaggaagggcagcacaggcaccaaggagatggagctgcccccagagccccaggccaatggagaggccgtgggcgccggcggcggccccatctactacatctatgaggaggaggaggaggaggaggaggaggaggaggagcccccacctgagccccccaagctggtgaatgacaagccccacaagttcaaggaccacttcttcaagaagcccaagttctgtgatgtgtgtgccaggatgattgtgctgaacaacaagtttggcctgcgctgcaagaactgcaagaccaacatccacgagcactgccagagctatgtggagatgcagcgctgcttcggcaagatccccccaggcttccaccgggcctacagcagccccctgtacagcaaccagcagtatgcctgtgtgaaggacctgtag

SEQ ID NO: 240263 - DNA, 1095 bp, Artificial Sequence
  derived and/or modified sequence
atgaccgagaaggaggtgctggagagccccaagcccagcttccccgcggaaacaagacaaagtgggctgcagcggctcaagcagctgctgcgcaagggatccaccggcacaaaggagatggagctccctccggagcctcaggccaatggcgaagctgtgggggcggggggcggtcccatctattatatttatgaagaggaagaggaagaggaggaggaggaagaggaacccccccccgagccacccaaattggtgaacgataagccacacaaattcaaggaccattttttcaaaaaacccaagttttgtgatgtctgcgccaggatgattgtactgaataacaagttcggtcttaggtgcaagaactgcaagacgaacatccacgaacattgccagtcctacgtcgagatgcaacgctgctttggcaaaatacccccaggcttccacagagcatactcatctcccctgtactcaaaccagcagtatgcctgtgtaaaggacctctctgccgcaaatcgtaatgatcccgtgttcgaaaccctcaggactggagtgattatggccaacaaagagcgcaaaaaagggcaggctgataaaaaaaatccagtcgccgcaatgatggaagaggaacctgaatcagcacgacctgaggaaggaaaaccacaggacggcaacccagagggagacaagaaagctgagaaaaagactcctgacgacaagcataaacagccaggattccagcaaagccattatttcgtggctttgtacaggtttaaggcactggagaaagatgacttggacttcccacccggagagaagatcacagtgatcgacgatagtaatgaggaatggtggcgcggaaaaattggcgagaaggtgggattctttcccccaaacttcatcataagagtccgggccggtgagcgcgtgcaccgggtcacccgtagcttcgtgggcaatagggaaatagggcaaataacactaaaaaaggaccagatcgtggttcagaagggagatgaggctggaggatacgttaaggtgtacactggaaggaaggtgggcctctttccgacggatttccttgaagagatctag

SEQ ID NO: 240264 - DNA, 507 bp, Artificial Sequence
  derived and/or modified sequence
atgaccgagaaggaggtgctggagagccccaagcccagcttccccgccgaaacacgacagtctgggctgcagcgtcttaaacagctcttaaggaagggcagcactggcaccaaggagatggagctgcctcctgagcctcaggctaacggggaggccgtcggagctggaggcggtcccatatactacatctatgaagaggaggaggaggaggaagaagaagaagaggagcctcctcctgagccacctaagcttgtaaatgacaagcctcataagtttaaggaccactttttcaagaagccaaagttttgtgatgtctgtgccaggatgatagtgctcaacaacaagttcggtctgaggtgtaagaattgtaagaccaatatccacgaacattgtcagtcctacgttgagatgcagcggtgcttcggcaagataccacctggcttccaccgagcttactcaagccccctttacagtaaccagcaatacgcctgcgtcaaggacctctag

SEQ ID NO: 240265 - DNA, 1095 bp, Artificial Sequence
  derived and/or modified sequence
atgacagaaaaggaggtgctggaaagcccaaagccctccttcccagcggagacacgccaatcgggactgcagagactgaagcagctgctccgtaagggttctacggggaccaaagagatggaacttccgccagaaccacaggcaaatggtgaggcggtgggggcagggggtggaccaatctactacatctatgaagaggaggaggaggaagaggaagaggaagaggagccccctcccgagccacctaagctggtaaatgacaaaccgcataagtttaaagaccacttcttcaagaagccaaaattctgtgatgtgtgcgcaagaatgattgtcctcaacaataagtttggcctgcgctgcaagaactgtaagacaaatatacacgaacactgccagtcatatgtggagatgcaaaggtgcttcggaaagatcccacccggtttccatcgtgcctacagttcaccgctctatagcaatcagcagtacgcttgtgtcaaagacctgtcagctgccaatcgaaatgacccagtattcgagacactgcggaccggtgtcatcatggcaaataaggagcggaaaaaaggacaggctgacaaaaagaaccccgtggcggcaatgatggaagaagagcctgagagcgcccgacccgaggagggcaagcctcaggacggaaatcctgaaggggacaagaaggcggagaaaaaaacaccagacgacaaacataagcagccaggctttcaacagtctcactacttcgttgctctgtatcgttttaaggcattggagaaggatgatctggatttccccccaggggagaagataacagttatagatgacagcaacgaggagtggtggagggggaaaatcggcgagaaagtgggctttttcccaccgaattttattattcgtgtgagagccggagagcgggtccacagagtgacgcgatcctttgtgggcaacagggagatcggtcagattaccttaaagaaggaccagatagtagtgcaaaagggagacgaagccggtggttatgtcaaagtctacactggccgaaaggtcggtctctttcctactgatttcttggaggagatttag

SEQ ID NO: 240266 - DNA, 507 bp, Artificial Sequence
  derived and/or modified sequence
atgaccgaaaaggaggtgctggagtccccaaagcccagttttcctgctgagacacggcagagtgggctgcaacgcctgaagcagcttctaagaaaagggtctaccgggactaaagaaatggaacttccgcctgaacctcaggccaatggggaggctgttggtgcaggaggcggtccgatctattacatttatgaggaagaggaggaggaggaagaggaagaagaggagccaccgccagagcctcctaaactggtgaacgataagccccacaaatttaaggatcacttcttcaagaaaccgaaattttgcgatgtgtgcgctcgaatgattgtcctcaataataagttcggactgcgctgcaaaaattgtaagaccaatatacatgaacactgtcagtcatatgtcgaaatgcaaaggtgcttcggaaagataccacctggattccaccgtgcttactccagcccactttacagcaaccaacagtacgcctgtgtgaaagacctgtag

SEQ ID NO: 240267 - DNA, 1656 bp, Artificial Sequence
  derived and/or modified sequence
ccctgtcatttcagccctgacaccaaggcaggaggctaggaggtctacaaatagcgactgggtagctggtgtgaacacagggggtactgggggggcttagcccccaaggaagaggaccagtttttccccagcaccaccatcaaggcctcgaggctcccagctccctctacagcctgtggactgacttagggaatcccgaacgatgacagaaaaggaggtgctggagtcccctaagccctccttcccagcagagactcggcaaagtgggctacagcggctaaagcagttactcaggaagggttctacagggacaaaggagatggaacttcccccagagccccaggccaatggggaggcagtgggagctgggggtgggcccatctactacatctatgaggaagaggaagaggaagaagaggaggaggaggagccacccccagaacctcctaagctggtcaacgataagccccacaaattcaaagatcacttcttcaagaagccaaagttctgtgatgtctgtgcccggatgattgttctcaacaacaagtttgggcttcgctgtaagaactgcaaaaccaacatccatgaacactgtcagtcctatgtggaaatgcagagatgcttcggcaagatcccacctggtttccatcgggcctatagttccccactctacagcaaccagcagtacgcttgtgtcaaagatctctctgctgccaatcgcaatgatcctgtgtttgaaaccctgcgcactggggtgatcatggcaaacaaggaacggaagaagggacaggcagataagaaaaatcctgtagcagccatgatggaggaggagccagagtcggccagaccagaggaaggcaaaccccaggatggaaaccctgaaggggataagaaggctgagaagaagacacctgatgacaagcacaagcagcctggcttccagcagtctcattactttgtggctctctatcggttcaaagccctggagaaggacgatctggatttcccgccaggagagaagatcacagtcattgatgactccaatgaagaatggtggcgggggaaaatcggggagaaggtcggatttttccctccaaacttcatcattcgggtccgggctggagaacgtgtgcaccgcgtgacgagatccttcgtggggaaccgcgagatagggcagatcactctcaagaaggaccagatcgtggtgcagaaaggagacgaagcgggcggctacgtcaaggtctacaccggccgcaaggtggggctgtttcccaccgactttctagaggaaatttaggcgtgcgggcgcctgcaagcgggagacacccacaccccattctgggcgggcccagtggagtttggggaggggggcgaaagcaacgggactgctgggagaggaggggtaggaaggcccgcctgagcgcgacggggcttccgggaagggactggttctcgcccccttccccagcctggggcctcggatacctgctgcccagagcagcccggacccgaaacctttcaggccccgcttgcaagagctggaaaaaaacgcgtatctactaggaggagccagggactggggcggggggcgggggcgagggagggcgaactgtcgaatgttgcgaatttattaaacttttgacaaaacttagaaaa

SEQ ID NO: 240268 - DNA, 795 bp, Artificial Sequence
  derived and/or modified sequence
tcatttcagccctgacaccaaggcaggaggctaggaggtctacaaatagcgactgggtagctggtgtgaacacagggggtactgggggggcttagcccccaaggaagaggaccagtttttccccagcaccaccatcaaggcctcgaggctcccagctccctctacagcctgtggactgacttagggaatcccgaaccctcccctttgaggaccaccctactgcaagggacagaaagggagagaagaatgaaagggattagatttcatagtggggtccaacctcttgcaggatgacagaaaaggaggtgctggagtcccctaagccctccttcccagcagagactcggcaaagtgggctacagcggctaaagcagttactcaggaagggttctacagggacaaaggagatggaacttcccccagagccccaggccaatggggaggcagtgggagctgggggtgggcccatctactacatctatgaggaagaggaagaggaagaagaggaggaggaggagccacccccagaacctcctaagctggtcaacgataagccccacaaattcaaagatcacttcttcaagaagccaaagttctgtgatgtctgtgcccggatgattgttctcaacaacaagtttgggcttcgctgtaagaactgcaaaaccaacatccatgaacactgtcagtcctatgtggaaatgcagagatgcttcggcaagatcccacctggtttccatcgggcctatagttccccactctacagcaaccagcagtacgcttgtgtcaaagatctct

SEQ ID NO: 240269 - DNA, 1580 bp, Artificial Sequence
  derived and/or modified sequence
ttcagccctgacaccaaggcaggaggctaggaggtctacaaatagcgactgggtagctggtgtgaacacagggggtactgggggggcttagcccccaaggaagaggaccagtttttccccagcaccaccatcaaggcctcgaggctcccagctccctctacagcctgtggactgacttagggaatcccgaacctacagcggctaaagcagttactcaggaagggttctacagggacaaaggagatggaacttcccccagagccccaggccaatggggaggcagtgggagctgggggtgggcccatctactacatctatgaggaagaggaagaggaagaagaggaggaggaggagccacccccagaacctcctaagctggtcaacgataagccccacaaattcaaagatcacttcttcaagaagccaaagttctgtgatgtctgtgcccggatgattgttctcaacaacaagtttgggcttcgctgtaagaactgcaaaaccaacatccatgaacactgtcagtcctatgtggaaatgcagagatgcttcggcaagatcccacctggtttccatcgggcctatagttccccactctacagcaaccagcagtacgcttgtgtcaaagatctctctgctgccaatcgcaatgatcctgtgtttgaaaccctgcgcactggggtgatcatggcaaacaaggaacggaagaagggacaggcagataagaaaaatcctgtagcagccatgatggaggaggagccagagtcggccagaccagaggaaggcaaaccccaggatggaaaccctgaaggggataagaaggctgagaagaagacacctgatgacaagcacaagcagcctggcttccagcagtctcattactttgtggctctctatcggttcaaagccctggagaaggacgatctggatttcccgccaggagagaagatcacagtcattgatgactccaatgaagaatggtggcgggggaaaatcggggagaaggtcggatttttccctccaaacttcatcattcgggtccgggctggagaacgtgtgcaccgcgtgacgagatccttcgtggggaaccgcgagatagggcagatcactctcaagaaggaccagatcgtggtgcagaaaggagacgaagcgggcggctacgtcaaggtctacaccggccgcaaggtggggctgtttcccaccgactttctagaggaaatttaggcgtgcgggcgcctgcaagcgggagacacccacaccccattctgggcgggcccagtggagtttggggaggggggcgaaagcaacgggactgctgggagaggaggggtaggaaggcccgcctgagcgcgacggggcttccgggaagggactggttctcgcccccttccccagcctggggcctcggatacctgctgcccagagcagcccggacccgaaacctttcaggccccgcttgcaagagctggaaaaaaacgcgtatctactaggaggagccagggactggggcggggggcgggggcgagggagggcgaactgtcgaatgttgcgaatttattaaacttttgacaaaacttagaaaa

SEQ ID NO: 240270 - protein, 790 aa, Artificial Sequence
  derived and/or modified sequence
MKAHPKEMVPLMGKRVAAPSGNPAILPEKRPAEITPTKKSAHFFLEIEGFEPNPTVAKTSPPVFSKPMDSNIRQCISGNCDDMDSPQSPQDDVTETPSNPNSPSAQLAKEEQRRKKRRLKKRIFAAVSEGCVEELVELLVELQELCRRRHDEDVPDFLMHKLTASDTGKTCLMKALLNINPNTKEIVRILLAFAEENDILGRFINAEYTEEAYEGQTALNIAIERRQGDIAALLIAAGADVNAHAKGAFFNPKYQHEGFYFGETPLALAACTNQPEIVQLLMEHEQTDITSRDSRGNNILHALVTVAEDFKTQNDFVKRMYDMILLRSGNWELETTRNNDGLTPLQLAAKMGKAEILKYILSREIKEKRLRSLSRKFTDWAYGPVSSSLYDLTNVDTTTDNSVLEITVYNTNIDNRHEMLTLEPLHTLLHMKWKKFAKHMFFLSFCFYFFYNITLTLVSYYRPREEEAIPHPLALTHKMGWLQLLGRMFVLIWAMCISVKEGIAIFLLRPSDLQSILSDAWFHFVFFIQAVLVILSVFLYLFAYKEYLACLVLAMALGWANMLYYTRGFQSMGMYSVMIQKVILHDVLKFLFVYIVFLLGFGVALASLIEKCPKDNKDCSSYGSFSDAVLELFKLTIGLGDLNIQQNSKYPILFLFLLITYVILTFVLLLNMLIALMGETVENVSKESERIWRLQRARTILEFEKMLPEWLRSRFRMGELCKVAEDDFRLCLRINEVKWTEWKTHVSFLNEDPGPVRRTDFNKIQDSSRNNSKTTLNAFEEVEEFPETSV

SEQ ID NO: 240271 - DNA, 2373 bp, Artificial Sequence
  derived and/or modified sequence
atgaaggcccaccccaaggagatggtgcccctgatgggcaagagagtggccgcccccagcggcaaccccgccatcctgcccgagaagagacccgccgagatcacccccaccaagaagagcgcccacttcttcctggagatcgagggcttcgagcccaaccccaccgtggccaagaccagcccccccgtgttcagcaagcccatggacagcaacatcagacagtgcatcagcggcaactgcgacgacatggacagcccccagagcccccaggacgacgtgaccgagacccccagcaaccccaacagccccagcgcccagctggccaaggaggagcagagaagaaagaagagaagactgaagaagagaatcttcgccgccgtgagcgagggctgcgtggaggagctggtggagctgctggtggagctgcaggagctgtgcagaagaagacacgacgaggacgtgcccgacttcctgatgcacaagctgaccgccagcgacaccggcaagacctgcctgatgaaggccctgctgaacatcaaccccaacaccaaggagatcgtgagaatcctgctggccttcgccgaggagaacgacatcctgggcagattcatcaacgccgagtacaccgaggaggcctacgagggccagaccgccctgaacatcgccatcgagagaagacagggcgacatcgccgccctgctgatcgccgccggcgccgacgtgaacgcccacgccaagggcgccttcttcaaccccaagtaccagcacgagggcttctacttcggcgagacccccctggccctggccgcctgcaccaaccagcccgagatcgtgcagctgctgatggagcacgagcagaccgacatcaccagcagagacagcagaggcaacaacatcctgcacgccctggtgaccgtggccgaggacttcaagacccagaacgacttcgtgaagagaatgtacgacatgatcctgctgagaagcggcaactgggagctggagaccaccagaaacaacgacggcctgacccccctgcagctggccgccaagatgggcaaggccgagatcctgaagtacatcctgagcagagagatcaaggagaagagactgagaagcctgagcagaaagttcaccgactgggcctacggccccgtgagcagcagcctgtacgacctgaccaacgtggacaccaccaccgacaacagcgtgctggagatcaccgtgtacaacaccaacatcgacaacagacacgagatgctgaccctggagcccctgcacaccctgctgcacatgaagtggaagaagttcgccaagcacatgttcttcctgagcttctgcttctacttcttctacaacatcaccctgaccctggtgagctactacagacccagagaggaggaggccatcccccaccccctggccctgacccacaagatgggctggctgcagctgctgggcagaatgttcgtgctgatctgggccatgtgcatcagcgtgaaggagggcatcgccatcttcctgctgagacccagcgacctgcagagcatcctgagcgacgcctggttccacttcgtgttcttcatccaggccgtgctggtgatcctgagcgtgttcctgtacctgttcgcctacaaggagtacctggcctgcctggtgctggccatggccctgggctgggccaacatgctgtactacaccagaggcttccagagcatgggcatgtacagcgtgatgatccagaaggtgatcctgcacgacgtgctgaagttcctgttcgtgtacatcgtgttcctgctgggcttcggcgtggccctggccagcctgatcgagaagtgccccaaggacaacaaggactgcagcagctacggcagcttcagcgacgccgtgctggagctgttcaagctgaccatcggcctgggcgacctgaacatccagcagaacagcaagtaccccatcctgttcctgttcctgctgatcacctacgtgatcctgaccttcgtgctgctgctgaacatgctgatcgccctgatgggcgagaccgtggagaacgtgagcaaggagagcgagagaatctggagactgcagagagccagaaccatcctggagttcgagaagatgctgcccgagtggctgagaagcagattcagaatgggcgagctgtgcaaggtggccgaggacgacttcagactgtgcctgagaatcaacgaggtgaagtggaccgagtggaagacccacgtgagcttcctgaacgaggaccccggccccgtgagaagaaccgacttcaacaagatccaggacagcagcagaaacaacagcaagaccaccctgaacgccttcgaggaggtggaggagttccccgagaccagcgtgtag

SEQ ID NO: 240272 - DNA, 2373 bp, Artificial Sequence
  derived and/or modified sequence
atgaaggcacaccctaaagaaatggtgccactaatgggtaaacgcgtggctgcaccatccggtaacccggcgattctgcctgaaaagagacccgcagagatcacccccactaagaaaagcgcccatttcttcctggaaattgagggttttgagcccaatcccactgtcgctaaaacatctccaccggtcttcagtaaaccgatggacagcaatattcggcaatgtatctcgggcaattgtgacgacatggattctccccaaagtcctcaagatgatgtgacagagactccatctaaccccaatagtccctctgcccagctggcaaaggaagagcagcgaaggaaaaaaagacgtctgaaaaaacgtatctttgcagcagtctccgaaggttgtgttgaggaactagtagagcttctggtagaactccaggaactgtgtcgccgtagacatgatgaagacgtccccgatttcttaatgcacaaactgaccgctagtgataccggtaaaacctgtctgatgaaagctttgctgaatatcaaccctaataccaaagaaatcgtacggatcctcctagcgttcgccgaggagaacgatattctaggccggttcattaacgcagagtacacagaggaagcctacgaggggcaaacagctctgaatatcgcgatcgaacggaggcagggggatattgcagcccttcttatcgctgctggagcagacgtaaatgcccacgccaagggcgcttttttcaaccccaaataccaacacgaaggattctacttcggggaaacacctctcgcgctcgctgcctgtacgaatcaacctgaaatagtccagctcctgatggaacatgaacagactgacatcacttcccgagattctagggggaacaatatattgcacgctctcgttactgtcgctgaagacttcaagacacagaacgactttgtaaaaaggatgtatgatatgattctgttaagaagtggaaactgggagctggaaaccactcgcaacaacgatggacttactcccttacagctggccgctaaaatgggcaaggccgagatactcaaatacattctgtcacgtgaaataaaggagaagagactgagaagcctcagcaggaagttcaccgactgggcctacggaccagtgtccagtagtctgtatgatttaacgaatgtggataccactaccgataacagcgtacttgagatcaccgtctataataccaatatcgacaatagacacgaaatgctgactttagaaccactgcatactcttctgcacatgaaatggaagaaatttgccaagcatatgttctttctgtccttctgcttttactttttttacaatatcaccttgacactggtgtcgtattatagaccccgggaggaagaagctattccccacccactggccctgactcataaaatggggtggctgcagttgctgggtcggatgtttgttcttatctgggcgatgtgtatatctgtgaaagaagggatcgctatctttctcttacggccttccgatctccaatcaatcctgtccgacgcttggtttcactttgtgtttttcatccaggcagttttggtaatcctgagcgtgtttctgtacctctttgcctacaaagagtaccttgcttgcctggtgcttgcaatggcactcggctgggctaacatgctgtattacaccagagggttccagagcatgggtatgtacagcgtgatgatccagaaggtgattctccatgatgttctcaagttcttgtttgtatatatagtgttccttcttggctttggggttgcgctggcatcgctgatcgaaaagtgtcccaaagataacaaagactgttcctcttacgggtcattctctgacgccgtactggaactctttaagctgacaatcgggcttggggaccttaacatccaacagaattcaaagtatcccatcctctttctgtttcttttgattacctacgtaattttaacgttcgtgctccttcttaacatgctcattgctcttatgggagagacagtggaaaacgtgagtaaggaatccgagagaatatggcgtcttcagagggcccgtaccattctggagttcgagaaaatgttgcccgaatggttaagaagccgcttcaggatgggagagctgtgtaaggttgccgaagatgatttccgcttgtgtctgaggatcaacgaagtcaagtggacagagtggaaaacacacgtctcattcctgaatgaggaccctggccctgttaggaggaccgacttcaataagatccaggacagttcaaggaacaacagtaagacaaccctcaacgcctttgaggaagtggaggaatttcctgaaacatccgtatag

SEQ ID NO: 240273 - DNA, 2373 bp, Artificial Sequence
  derived and/or modified sequence
atgaaggcacatcccaaagagatggtgccactaatggggaagagagtagccgctcccagcggcaacccggcaatacttccagagaaacgcccggccgaaataactcctacaaaaaagtccgctcatttcttccttgagatcgaggggtttgagcccaaccctacagtggctaagacaagccccccggtgttcagtaaacctatggacagtaatatccgccagtgtatttccggaaactgtgacgatatggattcaccccagtctccccaggatgatgtgacagaaacccctagcaatcccaattcaccttctgctcagctcgctaaagaggagcaacggagaaaaaagcggcgattgaagaaacgtatttttgcggctgttagtgagggttgcgtggaagagctcgtggaactgctggtggaactgcaggaattgtgtaggcggagacacgacgaggatgtgcccgatttccttatgcacaagctgacagccagcgacactgggaagacttgcctgatgaaggcactgctgaatatcaacccgaatactaaggagattgtgcgcattctgctggcctttgccgaggagaatgacatccttggccgcttcattaatgccgagtatacggaggaagcctatgagggccagactgccctgaacatagcaatcgaaagacgacagggcgatattgccgccctgttgatcgcagctggggcagacgtcaacgcccacgccaaaggagctttcttcaatcccaaataccaacatgagggcttttacttcggagaaacacccctggcgctggctgcctgtactaatcagccagagatcgtgcaactgctaatggagcacgagcaaacagatatcaccagtagggacagtcggggaaacaatattctccatgccctggttactgttgctgaagactttaaaacccagaatgatttcgtcaagagaatgtacgatatgatactgctgcggagtggtaattgggagctagagactacaaggaacaatgacggtctgacccctttgcagttggcggctaagatgggcaaggcagagattctcaaatacatcctgtctagggagatcaaagaaaaacggctgcggtcattaagtcgcaaatttaccgattgggcttacgggcccgtctcgtcctccctatacgatctgacgaacgtcgacacgacaaccgataactccgtcctggagatcacagtgtacaacactaatatcgataacaggcacgaaatgctaactctggagccacttcataccctactgcatatgaagtggaaaaagtttgcaaagcatatgttcttcttgtctttctgtttctacttcttctacaacatcacactcaccctcgtgagctactaccggccgagggaagaggaggccatcccacatccgctggctctgacacacaagatggggtggctccagctgctgggtcgaatgtttgttctcatatgggctatgtgcatttcagtaaaagagggtatagccattttcctactgcgccctagcgatctgcaatcgattctgtctgacgcctggtttcatttcgtgttcttcattcaggcagtgctagtgatactaagcgttttcctgtacctctttgcctacaaggaatatctggcatgcttagttctggccatggccttggggtgggccaacatgctctattataccagaggctttcagtccatggggatgtactccgtaatgattcagaaggtaattctacatgatgttctcaagttcttgttcgtgtatatcgtctttctcctgggctttggagtagctctcgcgtctctaatcgaaaagtgtcctaaagataacaaggattgtagctcttacggatccttttcagacgcagtactggagcttttcaagctcacgatcgggttgggggacttaaacatccagcagaactccaaataccccattctgtttctcttcctcctcatcacatatgttatacttacctttgtgcttctcctcaacatgctaatcgctctgatgggtgagacagtcgagaacgtgagtaaagaatcagagcgcatttggcggctgcagagggcccgcactatcctagagtttgagaagatgctgcctgaatggctccgcagtcggtttaggatgggcgagctgtgtaaggtcgctgaggacgactttcgcctgtgcttgaggattaacgaagttaaatggactgagtggaaaacgcacgtgtctttcctgaatgaagaccctggaccagtgagacgcactgattttaataaaattcaggacagctctagaaataacagtaagacaacattaaacgctttcgaggaggtagaggaattccctgagacaagcgtttag

SEQ ID NO: 240274 - DNA, 2373 bp, Artificial Sequence
  derived and/or modified sequence
atgaaggcccaccccaaggagatggtgcccctgatgggcaagagggtggccgcccccagcggcaacccagccatcctgcctgagaagaggcctgctgagatcacccccaccaagaagagcgcccacttcttcctggagattgagggctttgagcccaaccccaccgtggccaagaccagcccccctgtgttcagcaagcccatggacagcaacatccggcagtgcatcagcggcaactgtgatgacatggacagcccccagagcccccaggatgatgtgacagagacccccagcaaccccaacagccccagcgcccagctggccaaggaggagcagaggaggaagaagaggcggctgaagaagaggatctttgctgctgtgtctgagggctgtgtggaggagctggtggagctgctggtggagctgcaggagctgtgcagaagaagacatgatgaagatgtgcctgacttcctgatgcacaagctgacagccagtgacaccgggaagacctgcctgatgaaggccctgctgaacatcaaccccaacaccaaggagatcgtgcgcatcctgctggcctttgctgaggagaatgacatcctgggccgcttcatcaatgctgagtacacagaggaggcctatgagggccagacagccctgaacatcgccattgaaagacggcagggcgacattgctgccctgctgattgctgctggagcagatgtgaatgcccacgccaagggggccttcttcaaccccaagtaccagcacgagggcttctactttggagagacccccctggccctggccgcctgcaccaaccagcctgagatcgtgcagctgctgatggagcacgagcagacagacatcaccagccgggacagccggggcaacaacatcctgcacgccctggtgacagtggccgaggacttcaagacccagaatgactttgtgaagaggatgtatgacatgatcctgctgcggagcggcaactgggagctggagaccaccagaaataatgatggcctgacccccctgcagctggccgccaagatgggcaaggccgagatcctgaagtacatcctgagccgggagatcaaggagaagaggctgcggagcctgagcaggaagttcacagactgggcctacggccctgtgagcagcagcctgtatgacctgaccaacgtggacaccaccacagacaacagcgtgctggagatcaccgtgtacaacaccaacatcgacaacagacatgagatgctgaccctggagcccctgcacaccctgctgcacatgaagtggaagaagtttgccaagcacatgttcttcctgtccttctgcttctacttcttctacaacatcaccctgaccctggtgtcctactaccggccccgggaggaggaggccatcccccaccccctggccctgacccacaagatgggctggctgcagctgctgggccgcatgtttgtgctgatctgggccatgtgcatctctgtgaaggagggcatcgccatcttcctgctgcggcccagcgacctgcagagcatcctgagtgatgcctggttccactttgtgttcttcatccaggccgtgctggtgatcctgagcgtcttcctgtacctgtttgcctacaaggagtacctggcctgcctggtgctggccatggccctgggctgggccaacatgctgtactacacccggggcttccagagcatgggcatgtacagcgtgatgatccagaaggtgatcctgcatgatgtgctgaagttcctgtttgtgtacatcgtgttcctgctgggctttggagtggccctggccagcctgattgaaaaatgtcccaaggacaacaaggactgcagcagctatggcagcttcagtgatgctgtgctggagctgttcaagctgaccatcggcctgggggacctgaacatccagcagaacagcaagtaccccatcctcttcctgttcctgctgatcacctacgtgatcctgacctttgtgctgctgctgaacatgctgattgccctgatgggagagaccgtggagaatgtgtccaaggagagcgagcgcatctggaggctgcagagggcccggaccatcctggagtttgagaagatgctgcctgagtggctgcggagccgcttcaggatgggagagctgtgcaaggtggctgaagatgacttccggctgtgcctgcgcatcaatgaggtgaagtggacagagtggaagacccacgtgtccttcctgaatgaagatcctggccctgtgagaagaacagacttcaacaagatccaggacagcagcaggaacaacagcaagaccaccctgaatgcctttgaggaggtggaggagttccctgagacctctgtgtag

SEQ ID NO: 240275 - DNA, 2373 bp, Artificial Sequence
  derived and/or modified sequence
atgaaggcccaccccaaggagatggtgcccctgatgggcaagcgggtggccgccccatctggaaacccagccatattgcctgagaagcgtcctgcagagatcacccccacaaaaaagtctgcccacttctttctggaaattgaaggcttcgaaccaaacccaaccgtggctaaaacaagtccccctgtcttttcgaagcctatggattccaatattaggcagtgcatctctggaaactgcgacgacatggattccccccagagtcctcaagacgacgttactgagactcctagcaatcccaactctccttccgctcagctggctaaggaggagcagcggagaaaaaagagacgcctaaagaagcggattttcgcagctgttagtgagggttgcgttgaagagttggtagaactgctagtggaattacaggaactgtgcaggcgtaggcacgacgaggatgtgcccgatttcctgatgcacaagctgactgcttcagatactggaaaaacctgcctaatgaaagccttgttaaatattaacccaaatacgaaagaaatagtcagaatactcctcgcatttgccgaggagaacgacattctggggcggttcatcaatgcggaatacaccgaggaggcatacgaagggcagacggccctaaatatcgctatcgaacgccggcagggagacatcgccgccctcctcattgcagcgggggcggacgtcaacgcccacgctaagggtgccttttttaatcccaaataccagcatgaaggcttttatttcggagaaacgcccttggccctggctgcatgcacgaatcaaccggaaattgttcaacttctgatggagcatgaacagacagacatcacctcaagggacagtcgtggtaacaacattttacacgcactggtgaccgtcgcggaagattttaagacacagaatgacttcgttaagcgcatgtacgatatgatcctcctcagatcaggtaactgggagctggagactacccgcaataacgacgggctaacacccctgcagttagcagcgaaaatgggcaaggccgagatccttaagtacatactgtccagggagatcaaggaaaaacgcctccggagcctgtcacgcaaattcacagattgggcttacggacctgtctccagctctctgtacgaccttacgaatgtggatacgacaactgacaattctgtgctcgagattaccgtctacaacaccaacatagacaataggcacgaaatgcttactctggaacctctgcacaccctgctgcacatgaaatggaagaagtttgcgaagcacatgttcttcttgtccttttgcttctacttcttctacaatattactcttactttggtttcctactaccgacctcgcgaagaggaggccataccccacccactagcgctgactcataagatggggtggttgcagcttttgggaagaatgtttgtgctgatatgggcaatgtgtatctccgtgaaagagggcattgcaattttcctgctgagaccatccgacctgcagtcgatacttagcgatgcctggttccacttcgtgttctttattcaggctgtgcttgtgatcttgtccgtgtttctgtaccttttcgcctataaggaatacctggcatgcctagtgctggctatggctttgggctgggccaacatgctgtattataccagagggtttcagagtatgggtatgtacagtgtcatgatccaaaaagttatcttgcatgacgtcctgaaatttctatttgtctatattgtctttttgctgggattcggggtggctctggcatcgctcattgagaaatgtcctaaagacaataaagattgtagttcttacggctcgttttcagacgctgtattggagttgttcaagcttaccattggcctgggagacttgaacattcaacaaaatagcaagtaccccatcctttttctttttctccttataacctacgttatcctgacttttgtacttctgttgaacatgctgatcgccctgatgggtgaaacggtggaaaatgtatccaaagagagtgaacggatatggaggctgcagcgggcacgcaccatcttggaattcgagaaaatgttgccggagtggcttcgctcccgctttaggatgggtgagctctgcaaggttgctgaggacgatttccggctgtgtctccgcataaacgaagtgaaatggaccgaatggaaaacgcacgtctcttttcttaacgaagaccctggtcccgtgcgcaggaccgatttcaacaagatccaggactcatcgcggaataattcaaagaccactctcaacgctttcgaagaggttgaggagtttccagagacgagtgtgtag

SEQ ID NO: 240276 - DNA, 2373 bp, Artificial Sequence
  derived and/or modified sequence
atgaaggcccaccccaaggagatggtgcccctgatgggcaagcgggtggcagctcctagtggaaatcccgccatactccccgaaaagcgtcccgctgagattacccccacaaagaagagcgcccacttcttcctggagatcgaaggcttcgaacctaacccgacagtggctaaaacatcacctcccgtcttctcaaagcccatggactccaatattcgccagtgcatcagcgggaattgcgacgacatggattcaccacagtccccacaggacgacgtgaccgaaacccctagcaatccgaacagtccatccgcacagttggccaaagaggagcagaggcggaagaagcgacgcctgaagaaacggatcttcgcggcagtctcagagggttgcgtggaagaactggtagaactgttagtggagttgcaggagctatgtcgaagaagacatgatgaggacgttccagattttctgatgcacaagctaaccgcctcagacactgggaagacatgtcttatgaaagcccttctgaatattaatcccaacaccaaggaaattgtgagaatcctgctggccttcgccgaggaaaacgatattttgggacgattcattaatgcggagtacaccgaagaggcatacgaaggccaaacagcgttgaacattgccatcgaaagacgccagggtgacattgcagcacttctgattgccgcaggcgctgatgtgaacgcccacgctaagggcgcttttttcaatcctaaatatcaacatgaaggattttactttggcgagactcctctggcactcgctgcctgcacaaatcagccggaaattgtgcagctcctgatggagcacgagcagacagatattacgagtcgggatagtaggggcaacaacatcctgcatgccttagtgaccgtggctgaagacttcaagacccagaacgacttcgtcaaaaggatgtacgatatgattcttctcagaagtggcaattgggaacttgagacaacccgcaacaacgacgggctcacccctctgcagctagcagccaagatgggcaaggcagaaattctcaaatacattttgtcccgcgagatcaaggaaaagcggctgaggtcattatcacgtaaatttaccgactgggcttacggcccagtgagcagcagcctctatgatctaaccaatgttgacacaacaacggataactctgtgttggagatcactgtttataacacaaatatagacaaccgccatgaaatgcttactctggaacctctgcacacactgcttcatatgaaatggaaaaagttcgccaagcacatgttcttcctgagtttctgcttttactttttctacaacatcacactgaccctggtctcctattatagacccagagaggaggaggcaattccccatccccttgccctgactcacaaaatgggctggctgcagctactggggaggatgttcgtgctgatttgggcaatgtgtatttctgtaaaagaaggcatcgcgatttttctgctgagacctagtgatctgcaaagcatactgtctgatgcctggttccactttgtgtttttcatccaggccgtgttagtgatcctgagcgtcttcctgtatctctttgcctacaaagagtatctggcatgcctggtgctggccatggctcttggctgggctaacatgttatactacacccggggcttccagagcatgggaatgtacagtgtgatgatccaaaaggtgattctgcatgacgtgctgaaattcttgttcgtgtacatagttttcctcctggggttcggcgtggctctcgctagcctgatcgagaagtgtcctaaagacaacaaagattgctcaagctacggctctttttcagatgctgtcctcgagctattcaagctgacaatcggactcggagaccttaacatccagcagaacagcaaataccccattctgtttctattcctgctgattacctatgtgatcctgacattcgttctcctcttaaacatgctcattgcactcatgggggagaccgtcgaaaatgtgtctaaggaatccgagagaatctggcggctacagagagcgcgcactattctggaattcgagaaaatgctgccagaatggcttcggagccgttttcgaatgggtgagctgtgtaaggtggccgaggacgactttcgcttatgtcttaggataaacgaagtgaaatggactgagtggaagactcatgtctcttttctgaacgaggatccaggccccgtgcgaaggacagactttaataagatacaggactcctctcgcaataattctaagaccacccttaatgcttttgaagaggtcgaagagttccctgaaacctctgtgtag

SEQ ID NO: 240277 - DNA, 2373 bp, Artificial Sequence
  derived and/or modified sequence
atgaaggcccacccaaaagagatggttcccctgatgggcaagcgggtggcggctccatctggcaaccctgctattctacctgagaagagacccgcagagatcactcccactaagaagtccgcacacttttttctggagatcgagggtttcgaacctaatccaacagtggcaaaaaccagtccccctgtgttttccaaaccaatggacagtaatatccgacagtgcatctccggtaattgcgacgatatggatagtccacagagcccacaagatgacgtcactgaaacacctagcaaccctaatagtccttccgcacagcttgctaaagaagagcagagaagaaagaagaggagactgaaaaaacgaatttttgccgcagtcagcgaagggtgtgtagaagagctggtggagctcttggtggaactccaggagttgtgccgccgtaggcacgatgaagatgtgccggactttttgatgcacaaactaaccgcatctgatactgggaagacatgtttgatgaaagcgttactcaacattaacccgaacactaaggagatagtgagaattctcctcgcatttgctgaggaaaatgatattctaggtaggtttattaacgctgaatacaccgaagaggcctacgaggggcaaacagccttgaacattgctatcgaaagacgccagggggatattgccgctctcctgatcgccgctggcgcagacgtgaacgcccacgccaaaggcgctttctttaatccaaaataccagcacgagggcttttattttggggaaacaccactagccctggctgcttgcaccaatcaacccgagatcgtgcagctgcttatggagcacgaacaaacggacattacttcaagagacagccggggaaataatatcctgcacgccttagtaactgtggccgaggatttcaaaacccagaacgacttcgtgaagcggatgtacgatatgatccttctcagaagcggcaattgggaactggagactacccgaaataacgatgggctgactcctctccaattggcagccaagatgggtaaagctgaaattttgaaatatatactctctcgggagattaaggagaagaggcttcgctctctgtctcgcaagtttactgattgggcgtacgggcctgtgtccagctctttgtatgacctcactaacgtggatactaccaccgataatagcgtgctggaaattactgtctacaataccaatatcgataaccgccacgaaatgttgaccctggagcccctgcacactctgctgcatatgaagtggaagaagttcgcaaagcacatgtttttcctttcattctgtttctacttcttttacaacataactttgactctggtgtcttactatcgtcctagggaggaagaggccataccacacccgctagccctgacccataagatgggctggcttcagctgctagggcgtatgtttgttctgatttgggcaatgtgtatttcagtgaaggagggcatcgcgatttttctgctacgacccagcgatttgcagtccattctcagcgacgcttggtttcattttgtcttcttcatccaggccgtgctggttattttaagcgtgtttctgtacttgttcgcctataaagagtacctggcttgcctggtcctcgcaatggcactcggatgggcaaatatgctctattataccaggggatttcagagcatggggatgtacagtgtgatgatccagaaagtgattttgcacgacgtgctgaagtttttgttcgtgtatattgtatttctcttaggattcggcgtggctctggctagccttattgagaagtgtcccaaggacaataaggactgctcttcctacggttccttttcagatgcagtgttggagctgtttaagttgacgattgggttaggagatctgaacattcagcagaattctaaatatccaattctgtttctattcctgctgattacgtatgtaatcctgaccttcgtccttctgcttaacatgctcatcgccttaatgggcgaaaccgtggaaaatgtgtccaaggagtcagaacgtatctggcgtttgcagagggccagaactattcttgaattcgagaagatgctcccagagtggctgcggagcaggtttcggatgggagaactgtgcaaggtggctgaggacgactttagactctgcttacgaattaatgaagtgaagtggacagagtggaagacccacgtatcttttttgaatgaagatcctggcccagtgcggagaaccgattttaataagatccaggacagctccaggaacaattccaagaccacattgaacgcttttgaagaggtggaagagttccctgagacctccgtttag

SEQ ID NO: 240278 - DNA, 2373 bp, Artificial Sequence
  derived and/or modified sequence
atgaaagctcaccccaaagaaatggtacccttgatggggaagcgtgttgcagcaccatccggcaacccagcaatcctgccagagaaaaggccagccgagattacaccgaccaagaaatccgcccacttcttcctggagatcgaaggatttgagcccaaccctacagtggctaaaaccagcccccctgttttttccaagcccatggattctaacatccgacagtgtatttcaggcaattgtgatgatatggattctccgcaatcacctcaagacgatgtcaccgagacgcctagtaacccgaatagcccctcagctcagctcgccaaggaggagcagcgccgaaagaaacggcgactgaagaagcggattttcgccgctgtttctgaaggctgtgtcgaagaattggtggaattactcgttgaattgcaagagctgtgcagaaggcggcacgatgaggacgtgccggacttcttgatgcataaattaactgcaagcgacacagggaaaacatgtttgatgaaggcccttcttaacattaatcctaataccaaggagattgtgcgcatcttgttggcctttgctgaagagaatgatatactcggcaggtttatcaacgcagaatatacagaggaggcgtatgaaggccagactgcccttaacattgccattgagcggaggcagggcgacatcgctgctctgctcatcgccgcaggagctgacgtgaatgctcacgctaagggcgcattttttaacccgaagtaccaacacgagggtttctactttggcgagacccccctggctctggctgcttgtaccaatcaacctgaaatcgtgcagctgctcatggaacatgagcaaactgatattaccagtagggactcacgaggcaacaacatcctgcatgcgctggtgacagtcgctgaggacttcaagacgcagaacgattttgtgaagcgtatgtatgatatgatccttctacggtccggcaactgggagctggagaccacccgtaacaatgatggcctcacccccctgcagctggctgccaagatgggaaaagcggagattctgaagtacatactgtctagagaaatcaaggagaagcgcctacgcagcctgtcccgcaaatttacggactgggcctatgggccagtgtccagctccctatatgatttgacgaacgttgataccacaactgataattctgtgctagagatcaccgtgtacaacactaacatcgacaatcggcacgagatgctgacactggagcctttgcatacattgctgcacatgaaatggaagaaatttgccaaacacatgttcttcttgtccttctgcttttattttttttataatataacgctgactttagtgtcctactaccgacctagggaggaggaggccatacctcatcctctcgctttaacgcataaaatgggttggttacagctgctcgggagaatgtttgtgcttatctgggcgatgtgcatttccgtgaaagaagggatcgcgatcttcctcttgcgacccagcgacctccaatctatcttaagcgacgcctggttccacttcgttttcttcatccaggccgtccttgttattctgtcagtcttcctatacctttttgcatacaaagagtatctagcttgcctcgtcttggcaatggccctgggttgggcaaacatgttgtattacaccagaggattccagtctatgggtatgtacagtgtcatgatccagaaggtcatactgcatgacgtgcttaaatttctgttcgtgtacatagtcttcctcctcggtttcggggtggccctggcaagcttgattgagaagtgccctaaagataataaagattgcagctcctacggctctttttcggacgcagtgctcgagctttttaaactgaccatcggcctaggagacctcaacatccagcagaatagcaagtaccctattctgttcctgttcttgttaataacatatgtgatcctcaccttcgtcctgttgctgaatatgctgattgccctcatgggagaaacggtcgagaatgtgagcaaagagtctgagagaatctggaggctgcagcgagccaggacaatcctcgagttcgaaaagatgctgcctgagtggctgcggagtcgcttcagaatgggtgagctgtgcaaggttgccgaggatgatttccggctctgtcttaggatcaacgaggtcaagtggactgaatggaaaacacatgtttctttcctgaacgaggaccctggccctgtgcgcagaaccgatttcaacaagatccaggatagtagcaggaacaattcaaagaccacactcaatgcctttgaggaggtagaagaatttccagagacctctgtctag

SEQ ID NO: 240279 - DNA, 2766 bp, Artificial Sequence
  derived and/or modified sequence
ccacaacttcgatcttggcacctgcggcctcccctgccttttctccggtggggatgaggctgctgtgtgggtgtgggggtgactcacacgggccacgtgggtgggcgggtgctgcagctgtggctggtgggcgtggcctgcctggcgccgagggcaggtggctcagccagttctgcctctgacgcctcattccagccatccctctgcctgcaatgagagcttcccgccgcctcagccacagtcccacccgggggccttgggccccagacatgcggtgatctcagggcaagggttgccacgaccacccagaacctcaccagccatgaaagcccaccccaaggagatggtgcctctcatgggcaagagagttgctgcccccagtgggaaccctgccatcctgccagagaagaggccggcggagatcacccccacaaagaagagtgcacacttcttcctggagatagaagggtttgaacccaaccccacagttgccaagacctctcctcctgtcttctccaagcccatggattccaacatccggcagtgcatctctggtaactgtgatgacatggactccccccagtctcctcaggatgatgtgacagagaccccatccaatcccaacagccccagtgcacagctggccaaggaagagcagaggaggaaaaagaggcggctgaagaagcgcatctttgcagccgtgtctgagggctgcgtggaggagttggtagagttgctggtggagctgcaggagctttgcaggcggcgccatgatgaggatgtgcctgacttcctcatgcacaagctgacggcctccgacacggggaagacctgcctgatgaaggccttgttaaacatcaaccccaacaccaaggagatagtgcggatcctgcttgcctttgctgaagagaacgacatcctgggcaggttcatcaacgccgagtacacagaggaggcctatgaagggcagacggcgctgaacatcgccatcgagcggcggcagggggacatcgcagccctgctcatcgccgccggcgccgacgtcaacgcgcacgccaagggggccttcttcaaccccaagtaccaacacgaaggcttctacttcggtgagacgcccctggccctggcagcatgcaccaaccagcccgagattgtgcagctgctgatggagcacgagcagacggacatcacctcgcgggactcacgaggcaacaacatccttcacgccctggtgaccgtggccgaggacttcaagacgcagaatgactttgtgaagcgcatgtacgacatgatcctactgcggagtggcaactgggagctggagaccactcgcaacaacgatggcctcacgccgctgcagctggccgccaagatgggcaaggcggagatcctgaagtacatcctcagtcgtgagatcaaggagaagcggctccggagcctgtccaggaagttcaccgactgggcgtacggacccgtgtcatcctccctctacgacctcaccaacgtggacaccaccacggacaactcagtgctggaaatcactgtctacaacaccaacatcgacaaccggcatgagatgctgaccctggagccgctgcacacgctgctgcatatgaagtggaagaagtttgccaagcacatgttctttctgtccttctgcttttatttcttctacaacatcaccctgaccctcgtctcgtactaccgcccccgggaggaggaggccatcccgcaccccttggccctgacgcacaagatggggtggctgcagctcctagggaggatgtttgtgctcatctgggccatgtgcatctctgtgaaagagggcattgccatcttcctgctgagaccctcggatctgcagtccatcctctcggatgcctggttccactttgtcttttttatccaagctgtgcttgtgatactgtctgtcttcttgtacttgtttgcctacaaagagtacctcgcctgcctcgtgctggccatggccctgggctgggcgaacatgctctactatacgcggggtttccagtccatgggcatgtacagcgtcatgatccagaaggtcattttgcatgatgttctgaagttcttgtttgtatatatcgtgtttttgcttggatttggagtagccttggcctcgctgatcgagaagtgtcccaaagacaacaaggactgcagctcctacggcagcttcagcgacgcagtgctggaactcttcaagctcaccataggcctgggtgacctgaacatccagcagaactccaagtatcccattctctttctgttcctgctcatcacctatgtcatcctcacctttgttctcctcctcaacatgctcattgctctgatgggcgagactgtggagaacgtctccaaggagagcgaacgcatctggcgcctgcagagagccaggaccatcttggagtttgagaaaatgttaccagaatggctgaggagcagattccggatgggagagctgtgcaaagtggccgaggatgatttccgactgtgtttgcggatcaatgaggtgaagtggactgaatggaagacgcacgtctccttccttaacgaagacccggggcctgtaagacgaacagatttcaacaaaatccaagattcttccaggaacaacagcaaaaccactctcaatgcatttgaagaagtcgaggaattcccggaaacctcggtgtagaagcggaacccagagctggtgtgcgcgtgcgctgtctggcgctgcaggcggagtcaccgactctgtgcaga

SEQ ID NO: 240280 - DNA, 3420 bp, Artificial Sequence
  derived and/or modified sequence
ccacaacttcgatcttggcacctgcggcctcccctgccttttctccggtggggatgaggctgctgtgtgggtgtgggggtgactcacacgggccacgtgggtgggcgggtgctgcagctgtggctggtgggcgtggcctgcctggcgccgagggcaggtggctcagccagttctgcctctgacgcctcattccagccatccctctgcctgcaatgagagcttcccgccgcctcagccacagtcccacccgggggccttgggccccagacatgcggtgatctcagggcaagggttgccacgaccacccagaacctcaccagccatgaaagcccaccccaaggagatggtgcctctcatgggcaagagagttgctgcccccagtgggaaccctgccatcctgccagagaagaggccggcggagatcacccccacaaagaagagtgcacacttcttcctggagatagaagggtttgaacccaaccccacagttgccaagacctctcctcctgtcttctccaagcccatggattccaacatccggcagtgcatctctggtaactgtgatgacatggactccccccagtctcctcaggatgatgtgacagagaccccatccaatcccaacagccccagtgcacagctggccaaggaagagcagaggaggaaaaagaggcggctgaagaagcgcatctttgcagccgtgtctgagggctgcgtggaggagttggtagagttgctggtggagctgcaggagctttgcaggcggcgccatgatgaggatgtgcctgacttcctcatgcacaagctgacggcctccgacacggggaagacctgcctgatgaaggccttgttaaacatcaaccccaacaccaaggagatagtgcggatcctgcttgcctttgctgaagagaacgacatcctgggcaggttcatcaacgccgagtacacagaggaggcctatgaagggcagacggcgctgaacatcgccatcgagcggcggcagggggacatcgcagccctgctcatcgccgccggcgccgacgtcaacgcgcacgccaagggggccttcttcaaccccaagtaccaacacgaaggcttctacttcggtgagacgcccctggccctggcagcatgcaccaaccagcccgagattgtgcagctgctgatggagcacgagcagacggacatcacctcgcgggactcacgaggcaacaacatccttcacgccctggtgaccgtggccgaggacttcaagacgcagaatgactttgtgaagcgcatgtacgacatgatcctactgcggagtggcaactgggagctggagaccactcgcaacaacgatggcctcacgccgctgcagctggccgccaagatgggcaaggcggagatcctgaagtacatcctcagtcgtgagatcaaggagaagcggctccggagcctgtccaggaagttcaccgactgggcgtacggacccgtgtcatcctccctctacgacctcaccaacgtggacaccaccacggacaactcagtgctggaaatcactgtctacaacaccaacatcgacaaccggcatgagatgctgaccctggagccgctgcacacgctgctgcatatgaagtggaagaagtttgccaagcacatgttctttctgtccttctgcttttatttcttctacaacatcaccctgaccctcgtctcgtactaccgcccccgggaggaggaggccatcccgcaccccttggccctgacgcacaagatggggtggctgcagctcctagggaggatgtttgtgctcatctgggccatgtgcatctctgtgaaagagggcattgccatcttcctgctgagaccctcggatctgcagtccatcctctcggatgcctggttccactttgtcttttttatccaagctgtgcttgtgatactgtctgtcttcttgtacttgtttgcctacaaagagtacctcgcctgcctcgtgctggccatggccctgggctgggcgaacatgctctactatacgcggggtttccagtccatgggcatgtacagcgtcatgatccagaaggtcattttgcatgatgttctgaagttcttgtttgtatatatcgtgtttttgcttggatttggagtagccttggcctcgctgatcgagaagtgtcccaaagacaacaaggactgcagctcctacggcagcttcagcgacgcagtgctggaactcttcaagctcaccataggcctgggtgacctgaacatccagcagaactccaagtatcccattctctttctgttcctgctcatcacctatgtcatcctcacctttgttctcctcctcaacatgctcattgctctgatgggcgagactgtggagaacgtctccaaggagagcgaacgcatctggcgcctgcagagagccaggaccatcttggagtttgagaaaatgttaccagaatggctgaggagcagattccggatgggagagctgtgcaaagtggccgaggatgatttccgactgtgtttgcggatcaatgaggtgaagtggactgaatggaagacgcacgtctccttccttaacgaagacccggggcctgtaagacgaacagatttcaacaaaatccaagattcttccaggaacaacagcaaaaccactctcaatgcatttgaagaagtcgaggaattcccggaaacctcggtgtagaagcggaacccagagctggtgtgcgcgtgcgctgtctggcgctgcaggcggagtcaccgactctgtgcagagaggctttgagggatggtggagtccggctctgctggcctagaagcagagtgcaccctcgtgctcagtgctcagtgggtgtctgaactgaggggcagttgtcaatttgtctgagtgggaaacatcctggattttgttacttggcaaacagctggtgtaaacctacagccagcagcagtctggagcctgggagcctcctgaagtcccgggtgaagcctctggttttaccaattgcaggtcggcttggctgggagagatggatggcgggaaaggggcagcagtcttgaggagcagggagaggagtctttcctcctgccagcttcccccgtcagccccaaccccagcccacacattgtaccatctcttctgctgtgactgggttgcctgaatttgtgggagacccgtgatcccatcccagagtgtgcgggggacggaggtaagctggatatcctgggggaggaggggaatgcgctctggaaacacccttccggaacccttcggggaaaaggagaccatccttggagtgaacgtcccctgacaccccaaggttcaaactgtctcaagctgagagatgtttttagtagcagaattaacacagggttttaacttgcaatacggaaaagacatttcagttgagaatgaaaattactacaatg

SEQ ID NO: 240281 - protein, 258 aa, Artificial Sequence
  derived and/or modified sequence
MVLCVQGPRPLLAVERTGQRPLWAPSLELPKPVMQPLPAGAFLEEVAEGTPAQTESEPKVLDPEEDLLCIAKTFSYLRESGWYWGSITASEARQHLQKMPEGTFLVRDSTHPSYLFTLSVKTTRGPTNVRIEYADSSFRLDSNCLSRPRILAFPDVVSLVQHYVASCTADTRSDSPDPAPTPALPMPKEDAPSDPALPAPPPATAVHLKLVQPFVRRSSARSLQHLCRLVINRLVADVDCLPLPRRMADYLRQYPFQL

SEQ ID NO: 240282 - DNA, 777 bp, Artificial Sequence
  derived and/or modified sequence
atggttttatgcgtgcagggtccacggcccctgctagcggtagaacgtactgggcagagaccactgtgggcccccagcctagaattgcccaagcctgttatgcagcccctgcccgccggcgcattcctcgaggaagttgccgaaggaacccctgctcaaaccgaaagcgagcctaaagtactagatcccgaggaggacctgctctgcatcgccaaaacattctcctatttacgcgagtccgggtggtactgggggagtattactgcaagcgaagccaggcaacatttgcaaaagatgccggaaggaacctttctggtcagggatagtacacaccctagttatctgtttaccctgagcgttaagaccacgagaggacctaccaatgtaaggatcgaatacgcagatagttcctttagacttgactccaactgtctctctcgaccgagaattttagcatttccagatgtcgtctcgctcgttcaacattatgtcgcttcctgtacagccgatacacggtcggactcccccgatccggcacctactcccgccttgccaatgccaaaggaggatgctccaagtgatcctgcattgccagccccacccccagcaacggcagtgcacctgaagctcgtgcagccatttgtgagacggtcttccgccagaagcctccagcatctgtgccgactcgttatcaaccgtctagtcgccgatgtagactgtctccccctgcctcggagaatggcggattatctgagacagtatccttttcagctctag

SEQ ID NO: 240283 - DNA, 777 bp, Artificial Sequence
  derived and/or modified sequence
atggtgctgtgtgtgcagggcccccggcccctgctggccgtggagaggacaggccagaggcccctgtgggcccccagcctggagctgcccaagcctgtgatgcagcccctgcctgctggggccttcctggaggaggtggccgagggcaccccagcccagacagagagcgagcccaaggtgctggaccctgaggaggacctgctgtgcatcgccaagaccttctcctacctgcgggagagcggctggtactggggcagcatcacagccagcgaggcccggcagcacctgcagaagatgcctgagggcaccttcctggtgcgggacagcacccaccccagctacctgttcaccctgtctgtgaagaccacccggggccccaccaacgtgagaattgaatatgctgacagcagcttccggctggacagcaactgcctgagccggccccgcatcctggccttcccagatgtggtgtccctggtgcagcactacgtggccagctgcacagctgacaccaggagtgacagcccagaccctgcccccaccccagccctgcccatgcccaaggaggatgcccccagcgaccctgccctgcctgcccctcctccagccacagctgtgcacctgaagctggtgcagccctttgtgcggcgcagcagcgcccggagcctgcagcacctgtgccgcctggtgatcaaccggctggtggctgatgtggactgcctgcccctgcccaggaggatggctgactacctgcggcagtaccccttccagctgtag

SEQ ID NO: 240284 - DNA, 777 bp, Artificial Sequence
  derived and/or modified sequence
atggtgctgtgcgtgcagggcccccggcccctgctggccgtggagagaaccggacaacgtcctctctgggcccccagcctcgagttgcccaaaccagtgatgcaaccactgccagcaggcgcctttttggaagaggtggccgaggggacccctgcccagacagagtccgaacctaaggtgcttgaccccgaagaggaccttttgtgtatcgccaagacgttctcctatttacgtgagagcggctggtattggggcagcattacagccagtgaggctagacagcacctgcagaagatgccagaaggtactttccttgtgcgagattccactcacccgtcctacttattcacactgtccgtcaaaaccacacggggaccaacaaatgtccgtattgagtacgctgactctagttttcgcctcgactctaactgcttatcccgtcctcgtattctcgctttccctgacgtcgtgtccctggtacaacattacgtggcttcatgtactgctgatacaagatccgactcccccgaccctgcgccaacccctgctctccccatgccaaaagaggacgcaccttccgatccagccctccctgccccgcctcccgctaccgcagtccacttgaagctggtgcagcctttcgtacgccgttcctccgcgcggtctctccagcacctgtgtagattggtaattaaccggttagtcgctgacgtcgattgtttgccactgcccaggcgtatggcagattacctgaggcagtaccctttccagctgtag

SEQ ID NO: 240285 - DNA, 777 bp, Artificial Sequence
  derived and/or modified sequence
atggtgctctgcgttcagggaccgagaccccttctcgccgttgagcggaccggccaacggcctttgtgggccccttcacttgaactcccgaagcctgtgatgcagcccctgcctgccggagccttcctggaagaggtggcggagggtaccccagctcagactgaatccgaacctaaagtgttagatcccgaagaagatctgctgtgtattgcaaagacattttcttaccttcgcgagtctggatggtactggggctcaatcacagcgtcagaagcgaggcagcatctgcaaaagatgccagagggaacttttctggtgcgcgacagcactcatcccagctacctgtttacactcagtgtgaaaacgacacggggaccaactaatgtgaggattgaatatgcagatagcagctttagactagattcaaattgcttgagccggccacgcatactcgcgtttcctgacgtggtttccctcgtacagcattacgtcgccagctgtaccgccgacacccggagcgacagccccgatcccgcacccacaccggctttacctatgccgaaagaagacgcgccttctgaccccgctctcccagcccctcctccagctaccgcagtgcacctgaagctcgtgcaacctttcgtgcgcagatcaagtgcacgaagcctgcagcatctgtgtaggcttgtaattaatcgcttggtagcagacgtggactgtctccctctcccccgacgaatggctgattacctacgccagtacccattccagctttag

SEQ ID NO: 240286 - DNA, 2043 bp, Artificial Sequence
  derived and/or modified sequence
cccgctcgtctggcccgcccccctcgccctcgcaggcggtccgcgccactgcctctcagtccctgtcctgcgcccgcgcgccccgggagcctacccagcacgcgctccgcgcccactggttccctccagccgccgccgtccagccgagtccccactccggagtcgccgctgccgcggggacatggtcctctgcgttcagggacctcgtcctttgctggctgtggagcggactgggcagcggcccctgtgggccccgtccctggaactgcccaagccagtcatgcagcccttgcctgctggggccttcctcgaggaggtggcagagggtaccccagcccagacagagagtgagccaaaggtgctggacccagaggaggatctgctgtgcatagccaagaccttctcctaccttcgggaatctggctggtattggggttccattacggccagcgaggcccgacaacacctgcagaagatgccagaaggcacgttcttagtacgtgacagcacgcaccccagctacctgttcacgctgtcagtgaaaaccactcgtggccccaccaatgtacgcattgagtatgccgactccagcttccgtctggactccaactgcttgtccaggccacgcatcctggcctttccggatgtggtcagccttgtgcagcactatgtggcctcctgcactgctgatacccgaagcgacagccccgatcctgctcccaccccggccctgcctatgcctaaggaggatgcgcctagtgacccagcactgcctgctcctccaccagccactgctgtacacctaaaactggtgcagccctttgtacgcagaagcagtgcccgcagcctgcaacacctgtgccgccttgtcatcaaccgtctggtggccgacgtggactgcctgccactgccccggcgcatggccgactacctccgacagtaccccttccagctctgactgtacggggcaatctgcccaccctcacccagtcgcaccctggaggggacatcagccccagctggacttgggcccccactgtccctcctccaggcatcctggtgcctgcatacctctggcagctggcccaggaagagccagcaagagcaaggcatgggagaggggaggtgtcacacaacttggaggtaaatgcccccaggccgcatgtggcttcattatactgagccatgtgtcagaggatggggagacaggcaggaccttgtctcacctgtgggctgggcccagacctccactcgcttgcctgccctggccacctgaactgtatgggcactctcagccctggtttttcaatccccagggtcgggtaggacccctactggcagccagcctctgtttctgggaggatgacatgcagaggaactgagatcgacagtgactagtgaccccttgttgaggggtaagccaggctaggggactgcacaattatacactatttatttatttattctccttggggttggtgtcaggggcgagccaaccccacctctatgccctgagccctggtagtccagagaccccaactctgccctggcttctctggttcttccctgtggaaagcccatcctgagacatcttgctggaaccaaggcaatcctggatgtcctggtactgacccacccgtctgtgaatgtgtccactctcttctgcccccagccatatttggggaggatggacaactacaataggtaagaaaatgcagccggagcctcagtccccagcagagcctgtgtctcaccccctcacaggacagagctgtatctgcatagagctggtctcactgtggcgcaggccccggggggagtgcctgtgctgtcaggaagagggggtgctggtttgagggccgccactgcagttctgctaggtctgcttcctgcccaggaaggtgcctgcacatgagaggagagaaatacacgtctgataagacttcatgaaataataattatagcaaagaacagtttggtggtcttttctcttccactgatttttctgtaatgacattatacctttattacctctttatttta

SEQ ID NO: 240287 - DNA, 777 bp, Artificial Sequence
  derived and/or modified sequence
atggtgctgtgcgtgcagggccccagacccctgctggccgtggagagaaccggccagagacccctgtgggcccccagcctggagctgcccaagcccgtgatgcagcccctgcccgccggcgccttcctggaggaggtggccgagggcacccccgcccagaccgagagcgagcccaaggtgctggaccccgaggaggacctgctgtgcatcgccaagaccttcagctacctgagagagagcggctggtactggggcagcatcaccgccagcgaggccagacagcacctgcagaagatgcccgagggcaccttcctggtgagagacagcacccaccccagctacctgttcaccctgagcgtgaagaccaccagaggccccaccaacgtgagaatcgagtacgccgacagcagcttcagactggacagcaactgcctgagcagacccagaatcctggccttccccgacgtggtgagcctggtgcagcactacgtggccagctgcaccgccgacaccagaagcgacagccccgaccccgcccccacccccgccctgcccatgcccaaggaggacgcccccagcgaccccgccctgcccgcccccccccccgccaccgccgtgcacctgaagctggtgcagcccttcgtgagaagaagcagcgccagaagcctgcagcacctgtgcagactggtgatcaacagactggtggccgacgtggactgcctgcccctgcccagaagaatggccgactacctgagacagtaccccttccagctgtag

SEQ ID NO: 240288 - protein, 361 aa, Artificial Sequence
  derived and/or modified sequence
MAAPRAGRGAGWSLRAWRALGGIRWGRRPRLTPDLRALLTSGTSDPRARVTYGTPSLWARLSVGVTEPRACLTSGTPGPRAQLTAVTPDTRTREASENSGTRSRAWLAVALGAGGAVLLLLWGGGRGPPAVLAAVPSPPPASPRSQYNFIADVVEKTAPAVVYIEILDRHPFLGREVPISNGSGFVVAADGLIVTNAHVVADRRRVRVRLLSGDTYEAVVTAVDPVADIATLRIQTKFGNSGGPLVNLDGEVIGVNTMKVTAGISFAIPSDRLREFLHRGEKKNSSSGISGSQRRYIGVMMLTLSPRAGLRPGDVILAIGEQMVQNAEDVYEAVRTQSQLAVQIRRGRETLTLYVTPEVTE

SEQ ID NO: 240289 - DNA, 1086 bp, Artificial Sequence
  derived and/or modified sequence
atggctgctcccagggccggacggggggctggttggagcctgcgggcgtggagggcgctgggcgggattaggtgggggcggaggcctcggctaacacccgatctcagagccctactgactagcggaacgagcgatccgcgggcccgggttacctacggtaccccctctctgtgggcccggctgtctgttggcgtgaccgaacctagggcatgcctgacctccggtacaccaggccctcgcgctcagctgacagccgtgacccccgatactcgaacacgagaagcttcagagaattccggaacacgctcccgcgcctggttagctgtggcactgggcgctggtggcgccgtgcttctcctcctctgggggggcggacgcggtccacctgctgtgctggcggctgtcccctctccccctcctgctagcccccggtctcagtataacttcatcgcagacgtagtggagaaaactgcgcctgccgtggtgtacattgaaatactcgacagacatccgtttttgggcagagaagtacctatctctaatggaagtgggtttgttgtggccgccgacgggttgatcgtgactaatgcccatgtggtcgccgatcgtcggcgggtgagggtgaggcttcttagcggggatacatacgaggccgtggtgacagcggtggatccagtagctgacatcgcaaccctaagaattcagactaaattcgggaacagtggaggaccattggtaaacctggatggcgaggtgatcggtgtaaatactatgaaggtaacagctgggatatcattcgcaattccgtcggatagattaagagagttcctgcatcgaggtgaaaagaaaaatagtagctcaggtatctccggcagccagcgaagatatattggggtaatgatgctgacactctcccctcgagctggcttgaggcctggagacgttatactggctattggtgagcaaatggttcaaaacgccgaggacgtatacgaggcagtgaggacacagagtcagctagctgtgcagataaggcgaggacgcgaaacgctgacactctatgtcactccagaggtgaccgagtag

SEQ ID NO: 240290 - DNA, 1450 bp, Artificial Sequence
  derived and/or modified sequence
cagccaaggcggagctgatggctgcgccgagggcggggcggggtgcaggctggagccttcgggcatggcgggctttggggggcattcgctgggggaggagaccccgtttgacccctgacctccgggccctgctgacgtcaggaacttctgacccccgggcccgagtgacttatgggacccccagtctctgggcccggttgtctgttggggtcactgaaccccgagcatgcctgacgtctgggaccccgggtccccgggcacaactgactgcggtgaccccagataccaggacccgggaggcctcagagaactctggaacccgttcgcgcgcgtggctggcggtggcgctgggcgctgggggggcagtgctgttgttgttgtggggcgggggtcggggtcctccggccgtcctcgccgccgtccctagcccgccgcccgcttctccccggagtcagtacaacttcatcgcagatgtggtggagaagacagcacctgccgtggtctatatcgagatcctggaccggcaccctttcttgggccgcgaggtccctatctcgaacggctcaggattcgtggtggctgccgatgggctcattgtcaccaacgcccatgtggtggctgatcggcgcagagtccgtgtgagactgctaagcggcgacacgtatgaggccgtggtcacagctgtggatcccgtggcagacatcgcaacgctgaggattcagactaagtttggaaactctggaggtcccctggttaacctggatggggaggtgattggagtgaacaccatgaaggtcacagctggaatctcctttgccatcccttctgatcgtcttcgagagtttctgcatcgtggggaaaagaagaattcctcctccggaatcagtgggtcccagcggcgctacattggggtgatgatgctgaccctgagtcccagggctggtctgcggcctggtgatgtgattttggccattggggagcagatggtacaaaatgctgaagatgtttatgaagctgttcgaacccaatcccagttggcagtgcagatccggcggggacgagaaacactgaccttatatgtgacccctgaggtcacagaatgaatagatcaccaagagtatgaggctcctgctctgatttcctccttgcctttctggctgaggttctgagggcaccgagacagagggttaaatgaaccagtgggggcaggtccctccaaccaccagcactgactcctgggctctgaagaatcacagaaacactttttatataaaataaaattatacctagcaacatattatagtaaaaaatgaggtgggagggctggatcttttcccccaccaaaaggctagaggtaaagctgtatccccctaaacttaggggagatactggagctgaccatcctgacctcctattaaagaaaatgagctgctgccatcttttgtgggca

SEQ ID NO: 240291 - DNA, 1086 bp, Artificial Sequence
  derived and/or modified sequence
atggccgccccccgggccggccgcggggccggctggagcctgcgggcctggagggccctgggcggcatccgctggggcagaagaccccggctgaccccagacctgcgggccctgctgaccagcggcaccagtgacccccgggcccgggtgacctacggcacccccagcctgtgggcccggctgtctgtgggcgtgacagagccccgggcctgcctgaccagcggcaccccaggcccccgggcccagctgacagctgtgaccccagacaccaggacccgggaggcctctgaaaattctggcaccaggagccgggcctggctggccgtggccctgggcgccggcggcgctgtgctgctgctgctgtggggcggcggccggggccccccagctgtgctggccgctgtgcccagccccccaccagccagccccaggagccagtacaacttcatcgcagatgtggtggagaagacagccccagctgtggtgtacatcgagatcctggacagacaccccttcctgggccgggaggtgcccatcagcaatggaagtggctttgtggtggccgcagatggcctgattgtgaccaatgcccacgtggtggccgacagaagaagagtgcgggtgcggctgctgagcggggacacctatgaggccgtggtgacagctgtggaccctgtggccgacatcgccaccctgcgcatccagaccaagtttggaaattctgggggccccctggtgaacctggatggagaggtgattggagtgaacaccatgaaggtgacagctggcatcagctttgccatccccagcgaccggctgcgggagttcctgcacagaggagagaagaagaacagcagcagcggcatcagcggcagccagaggcgctacatcggcgtgatgatgctgaccctgagcccccgggccggcctgcggcctggagatgtgatcctggccatcggggagcagatggtgcagaatgcagaagatgtgtatgaagctgtgaggacccagagccagctggccgtgcagatcagaagaggccgggagaccctgaccctgtatgtgaccccagaggtgacagaatag

SEQ ID NO: 240292 - DNA, 1086 bp, Artificial Sequence
  derived and/or modified sequence
atggccgccccccgggccggccggggcgccggctggagcctgcgggcctggcgggctttaggggggatcagatggggccggcgcccacgtctgactcccgacctgcgcgccctgctcacttctggcaccagcgaccctcgggctcgggtaacatatggaactccttcactttgggcaagactttcagttggcgtcaccgaaccgagagcctgcttaactagtgggacccccggaccaagggcacagttgaccgccgtcaccccagatacccgcacccgggaagctagcgaaaatagtgggactagatcaagggcttggctggcggtagcccttggcgccgggggcgcggtcctcctgcttctttggggtggcggacgcggacctcctgcagtcctggctgctgtccccagcccgcccccagcttctccccgctcgcagtacaacttcatcgccgatgtggtcgaaaagaccgcgccagctgtggtatatattgagattctcgatcggcacccctttctgggccgcgaagtcccaatttccaatggcagcggcttcgttgtcgctgctgatggtctgatagtgaccaacgcccacgtggtggcggatcgcaggcgcgtcagggttagactcctttcaggtgacacctatgaggccgtcgttaccgcagtagaccctgtggctgatattgctactcttcgaatacagactaagttcggaaacagtggcggacctctagtaaacctggacggtgaggtaatcggagtgaacaccatgaaagttaccgccggcataagcttcgctatcccttcagaccgcctgcgtgaatttttacaccggggcgagaaaaagaatagcagctcggggatttctggcagtcaaagacggtatatcggcgtcatgatgctcactctgagtccgagagcaggcctgcgccctggtgacgtgatcctcgctatcggcgagcagatggtccagaacgctgaagacgtgtatgaggcggtccggacacagtcccaactggcggtgcagatacgcaggggccgggaaactctgacgctgtatgttacacctgaggtgacagaatag

SEQ ID NO: 240293 - DNA, 1086 bp, Artificial Sequence
  derived and/or modified sequence
atggcagcaccaagggcaggtcgcggagcaggatggtctttgagagcctggcgcgctttgggagggatcagatggggtcgaaggcctcgcctgacacccgatctcagagcgctgctgacctccggaacttccgatccccgtgccagagtcacttacggaactccatccttatgggctagactctcggtgggtgtgacggaacctcgggcatgcctgacctccggaacacccggacccagggcccagctgactgccgtcacccctgatactcggactcgggaagccagcgaaaattcgggcacacgctctagggcttggctagctgtagctctgggcgcaggaggcgcagtgcttctgctgctatgggggggtggacgaggaccaccggctgtgttagccgctgtgcccagccctcccccagctagtcctagatcccagtacaattttatcgctgacgtggtcgagaagacagctccagctgtcgtctacattgagattcttgatcgacacccctttctgggcagggaggtgcccatttccaatggaagtgggtttgtggtggctgctgacggcttaattgtgactaacgcccacgtggtagccgatcgtcggagagtccgggtcagactgctgagcggggacacctatgaagccgtagtgacggccgtcgatccggttgcggatatcgctaccctccggatccagaccaaattcggaaactccggtgggccactcgtgaatctcgacggcgaggtcatcggggtgaataccatgaaagtaaccgcagggatctccttcgccataccatccgacagactgagggaattcctgcacagaggagaaaagaagaattccagctctggcattagcggcagccagcgtcgttacattggggtcatgatgctcactctgtccccacgcgctggactccgacctggagatgtgattctggctataggggagcagatggtccagaacgcagaagatgtgtacgaggctgtgcgaacacaatctcaactggcggtgcagattaggcggggaagggaaaccctgacactgtacgtcacacccgaggtgactgagtag

SEQ ID NO: 240294 - DNA, 1086 bp, Artificial Sequence
  derived and/or modified sequence
atggccgcccccagagccggcagaggcgccggctggagcctgagagcctggagagccctgggcggcatcagatggggcagaagacccagactgacccccgacctgagagccctgctgaccagcggcaccagcgaccccagagccagagtgacctacggcacccccagcctgtgggccagactgagcgtgggcgtgaccgagcccagagcctgcctgaccagcggcacccccggccccagagcccagctgaccgccgtgacccccgacaccagaaccagagaggccagcgagaacagcggcaccagaagcagagcctggctggccgtggccctgggcgccggcggcgccgtgctgctgctgctgtggggcggcggcagaggcccccccgccgtgctggccgccgtgcccagccccccccccgccagccccagaagccagtacaacttcatcgccgacgtggtggagaagaccgcccccgccgtggtgtacatcgagatcctggacagacaccccttcctgggcagagaggtgcccatcagcaacggcagcggcttcgtggtggccgccgacggcctgatcgtgaccaacgcccacgtggtggccgacagaagaagagtgagagtgagactgctgagcggcgacacctacgaggccgtggtgaccgccgtggaccccgtggccgacatcgccaccctgagaatccagaccaagttcggcaacagcggcggccccctggtgaacctggacggcgaggtgatcggcgtgaacaccatgaaggtgaccgccggcatcagcttcgccatccccagcgacagactgagagagttcctgcacagaggcgagaagaagaacagcagcagcggcatcagcggcagccagagaagatacatcggcgtgatgatgctgaccctgagccccagagccggcctgagacccggcgacgtgatcctggccatcggcgagcagatggtgcagaacgccgaggacgtgtacgaggccgtgagaacccagagccagctggccgtgcagatcagaagaggcagagagaccctgaccctgtacgtgacccccgaggtgaccgagtag

SEQ ID NO: 240295 - protein, 351 aa, Artificial Sequence
  derived and/or modified sequence
MGVQGTLMSRDQTPHLLSILGKSKRKKDLRISCMSKPPAPNPTPPRNLDSRTFITIGDRNFEVEADDLVTISELGRGAYGVVEKVRHAQSGTIMAVKRIRATVNSQEQKRLLMDLDINMRTVDCFYTVTFYGALFREGDVWICMELMDTSLDKFYRKVLDKNMTIPEDILGEIAVSIVRALEHLHSKLSVIHRDVKPSNVLINKEGHVKMCDFGISGYLVDSVAKTMDAGCKPYMAPERINPELNQKGYNVKSDVWSLGITMIEMAILRFPYESWGTPFQQLKQVVEEPSPQLPADRFSPEFVDFTAQCLRKNPAERMSYLELMEHPFFTLHKTKKTDIAAFVKEILGEDS

SEQ ID NO: 240296 - protein, 347 aa, Artificial Sequence
  derived and/or modified sequence
MESPASSQPASMPQSKGKSKRKKDLRISCMSKPPAPNPTPPRNLDSRTFITIGDRNFEVEADDLVTISELGRGAYGVVEKVRHAQSGTIMAVKRIRATVNSQEQKRLLMDLDINMRTVDCFYTVTFYGALFREGDVWICMELMDTSLDKFYRKVLDKNMTIPEDILGEIAVSIVRALEHLHSKLSVIHRDVKPSNVLINKEGHVKMCDFGISGYLVDSVAKTMDAGCKPYMAPERINPELNQKGYNVKSDVWSLGITMIEMAILRFPYESWGTPFQQLKQVVEEPSPQLPADRFSPEFVDFTAQCLRKNPAERMSYLELMEHPFFTLHKTKKTDIAAFVKEILGEDS

SEQ ID NO: 240297 - protein, 318 aa, Artificial Sequence
  derived and/or modified sequence
MSKPPAPNPTPPRNLDSRTFITIGDRNFEVEADDLVTISELGRGAYGVVEKVRHAQSGTIMAVKRIRATVNSQEQKRLLMDLDINMRTVDCFYTVTFYGALFREGDVWICMELMDTSLDKFYRKVLDKNMTIPEDILGEIAVSIVRALEHLHSKLSVIHRDVKPSNVLINKEGHVKMCDFGISGYLVDSVAKTMDAGCKPYMAPERINPELNQKGYNVKSDVWSLGITMIEMAILRFPYESWGTPFQQLKQVVEEPSPQLPADRFSPEFVDFTAQCLRKNPAERMSYLELMEHPFFTLHKTKKTDIAAFVKEILGEDS

SEQ ID NO: 240298 - DNA, 1056 bp, Artificial Sequence
  derived and/or modified sequence
atgggcgtgcagggcaccctgatgagcagagaccagaccccccacctgctgagcatcctgggcaagagcaagagaaagaaggacctgagaatcagctgcatgagcaagccccccgcccccaaccccaccccccccagaaacctggacagcagaaccttcatcaccatcggcgacagaaacttcgaggtggaggccgacgacctggtgaccatcagcgagctgggcagaggcgcctacggcgtggtggagaaggtgagacacgcccagagcggcaccatcatggccgtgaagagaatcagagccaccgtgaacagccaggagcagaagagactgctgatggacctggacatcaacatgagaaccgtggactgcttctacaccgtgaccttctacggcgccctgttcagagagggcgacgtgtggatctgcatggagctgatggacaccagcctggacaagttctacagaaaggtgctggacaagaacatgaccatccccgaggacatcctgggcgagatcgccgtgagcatcgtgagagccctggagcacctgcacagcaagctgagcgtgatccacagagacgtgaagcccagcaacgtgctgatcaacaaggagggccacgtgaagatgtgcgacttcggcatcagcggctacctggtggacagcgtggccaagaccatggacgccggctgcaagccctacatggcccccgagagaatcaaccccgagctgaaccagaagggctacaacgtgaagagcgacgtgtggagcctgggcatcaccatgatcgagatggccatcctgagattcccctacgagagctggggcacccccttccagcagctgaagcaggtggtggaggagcccagcccccagctgcccgccgacagattcagccccgagttcgtggacttcaccgcccagtgcctgagaaagaaccccgccgagagaatgagctacctggagctgatggagcaccccttcttcaccctgcacaagaccaagaagaccgacatcgccgccttcgtgaaggagatcctgggcgaggacagctag

SEQ ID NO: 240299 - DNA, 1044 bp, Artificial Sequence
  derived and/or modified sequence
atggagagccccgccagcagccagcccgccagcatgccccagagcaagggcaagagcaagagaaagaaggacctgagaatcagctgcatgagcaagccccccgcccccaaccccaccccccccagaaacctggacagcagaaccttcatcaccatcggcgacagaaacttcgaggtggaggccgacgacctggtgaccatcagcgagctgggcagaggcgcctacggcgtggtggagaaggtgagacacgcccagagcggcaccatcatggccgtgaagagaatcagagccaccgtgaacagccaggagcagaagagactgctgatggacctggacatcaacatgagaaccgtggactgcttctacaccgtgaccttctacggcgccctgttcagagagggcgacgtgtggatctgcatggagctgatggacaccagcctggacaagttctacagaaaggtgctggacaagaacatgaccatccccgaggacatcctgggcgagatcgccgtgagcatcgtgagagccctggagcacctgcacagcaagctgagcgtgatccacagagacgtgaagcccagcaacgtgctgatcaacaaggagggccacgtgaagatgtgcgacttcggcatcagcggctacctggtggacagcgtggccaagaccatggacgccggctgcaagccctacatggcccccgagagaatcaaccccgagctgaaccagaagggctacaacgtgaagagcgacgtgtggagcctgggcatcaccatgatcgagatggccatcctgagattcccctacgagagctggggcacccccttccagcagctgaagcaggtggtggaggagcccagcccccagctgcccgccgacagattcagccccgagttcgtggacttcaccgcccagtgcctgagaaagaaccccgccgagagaatgagctacctggagctgatggagcaccccttcttcaccctgcacaagaccaagaagaccgacatcgccgccttcgtgaaggagatcctgggcgaggacagctag

SEQ ID NO: 240300 - DNA, 1056 bp, Artificial Sequence
  derived and/or modified sequence
atgggagttcaggggacactgatgagccgagatcagaccccgcacctgctgtccatccttggaaagtcaaaaaggaagaaagacctgagaatcagttgtatgtctaagccccccgctcccaacccaacaccgcctcgcaatttggatagccgcacattcattacgattggagatcgtaactttgaggtggaggcagacgatctggtgacaatttcagaactaggccgaggcgcatatggggttgtcgagaaggtgagacacgctcaatcaggaacaattatggccgtgaagaggatccgcgcaactgtaaactcgcaggagcagaaacgtcttttaatggacctcgacatcaacatgagaacggtggattgcttttacactgtcactttctatggggcgctttttagggagggagacgtttggatatgcatggagctgatggacacttctctggacaaattctaccggaaagtactggacaaaaacatgaccattccagaggacatcctaggggagatagcggtgtccatcgttagagcacttgagcatttgcattctaagctcagtgtcatccaccgtgacgttaagccctctaacgtgcttatcaacaaagaaggtcatgtgaagatgtgtgattttggcatctccggctacctggtggactccgttgccaaaaccatggacgctgggtgcaaaccatacatggcgcctgagaggatcaatcccgagctcaaccaaaaggggtataatgttaaatccgacgtctggtcattgggaatcactatgattgaaatggctattctgcgttttccatacgagtcctggggcaccccttttcagcaacttaaacaggttgttgaagaaccctcaccccagctccccgccgaccggttctcccctgagttcgttgattttacagcgcagtgcctgagaaagaacccagccgagcgtatgtcttatctggagctgatggaacatccctttttcactctccataagaccaaaaagacagacatagctgcctttgtgaaggaaatcctgggagaggattcttag

SEQ ID NO: 240301 - DNA, 1044 bp, Artificial Sequence
  derived and/or modified sequence
atggaatcacctgcaagctctcaacctgcctccatgccacagagcaaaggcaagtctaagcggaagaaagatttgaggatatcttgtatgtctaagcccccagcgcccaatcccactcctccaagaaacctggatagcaggaccttcatcaccattggagataggaactttgaagtggaagcagatgatctggtgacgatctctgagctcggacgaggagcctacggagtggtcgagaaggtaagacatgcccagtccggaactatcatggccgtgaagcgcatcagagctaccgtaaacagccaggaacagaaacgcctgctcatggacctcgatattaatatgcgcaccgtggactgcttttacacagtcaccttctacggggcgcttttccgtgagggtgacgtgtggatctgtatggagctcatggatacgagcttggataagttctaccgcaaagtgctggacaagaacatgaccatccctgaagacatactgggcgagattgcggtgagcattgtgcgagcacttgaacacctgcacagcaagctgagcgtaatccatcgagacgtgaagcctagtaatgtgctcataaacaaggaaggacacgtcaagatgtgtgatttcggcatctcaggctatctggtggattccgtcgcaaagacaatggacgcggggtgcaagccctatatggccccagagagaatcaaccccgaactaaaccagaaagggtataatgtcaaaagcgatgtgtggagcttagggatcacaatgattgagatggctattctgcgatttccctatgagtcttgggggacgcctttccagcaattaaagcaggtggtggaggagccttctcctcagctgcctgcagacaggttcagcccggaatttgttgactttacggcacaatgtctgagaaagaaccccgctgagagaatgtcttacctggagctgatggagcatcctttctttacactccacaaaacaaaaaagactgacatagccgcatttgtgaaggagattctgggcgaggattcttag

SEQ ID NO: 240302 - DNA, 1056 bp, Artificial Sequence
  derived and/or modified sequence
atgggcgtgcagggcaccctgatgagccgggaccagaccccccacctgctgagcatcctgggcaagagcaagaggaagaaggacctgcgcatcagctgcatgagcaagcccccagcccccaaccccaccccacccaggaacctggacagcaggaccttcatcaccatcggggacaggaactttgaggtggaggctgatgacctggtgaccatcagcgagctgggccgcggggcctatggagtggtggagaaggtgagacatgcccagagcggcaccatcatggctgtgaagaggatccgggccaccgtgaacagccaggagcagaagaggctgctgatggacctggacatcaacatgaggacagtggactgcttctacacagtgaccttctatggagccctcttccgggagggagatgtgtggatctgcatggagctgatggacaccagcctggacaagttctacaggaaggtgctggacaagaacatgaccatccctgaggacatcctgggggagattgctgtgtccatcgtgcgggccctggagcacctgcacagcaagctgagcgtcatccacagagatgtgaagcccagcaatgtgctgatcaacaaggagggccacgtgaagatgtgtgactttggcatcagcggctacctggtggacagcgtggccaagaccatggatgctggctgcaagccctacatggcccctgagcgcatcaaccctgagctgaaccagaagggctacaacgtgaagagtgatgtgtggagcctgggcatcaccatgattgagatggccatcctgcgcttcccctatgagagctggggcacccccttccagcagctgaagcaggtggtggaggagcccagcccccagctgcctgctgaccgcttcagccctgagtttgtggacttcaccgcccagtgcctgaggaagaacccagctgagaggatgagctacctggagctgatggagcaccccttcttcaccctgcacaagaccaagaagacagacattgctgcctttgtgaaggagatcctgggggaggacagctag

SEQ ID NO: 240303 - DNA, 1044 bp, Artificial Sequence
  derived and/or modified sequence
atggagagccctgccagcagccagcctgcctccatgccccagagcaagggcaagagcaagaggaagaaggacctgcgcatcagctgcatgagcaagcccccagcccccaaccccaccccacccaggaacctggacagcaggaccttcatcaccatcggggacaggaactttgaggtggaggctgatgacctggtgaccatcagcgagctgggccgcggggcctatggagtggtggagaaggtgagacatgcccagagcggcaccatcatggctgtgaagaggatccgggccaccgtgaacagccaggagcagaagaggctgctgatggacctggacatcaacatgaggacagtggactgcttctacacagtgaccttctatggagccctcttccgggagggagatgtgtggatctgcatggagctgatggacaccagcctggacaagttctacaggaaggtgctggacaagaacatgaccatccctgaggacatcctgggggagattgctgtgtccatcgtgcgggccctggagcacctgcacagcaagctgagcgtcatccacagagatgtgaagcccagcaatgtgctgatcaacaaggagggccacgtgaagatgtgtgactttggcatcagcggctacctggtggacagcgtggccaagaccatggatgctggctgcaagccctacatggcccctgagcgcatcaaccctgagctgaaccagaagggctacaacgtgaagagtgatgtgtggagcctgggcatcaccatgattgagatggccatcctgcgcttcccctatgagagctggggcacccccttccagcagctgaagcaggtggtggaggagcccagcccccagctgcctgctgaccgcttcagccctgagtttgtggacttcaccgcccagtgcctgaggaagaacccagctgagaggatgagctacctggagctgatggagcaccccttcttcaccctgcacaagaccaagaagacagacattgctgcctttgtgaaggagatcctgggggaggacagctag

SEQ ID NO: 240304 - DNA, 1056 bp, Artificial Sequence
  derived and/or modified sequence
atgggcgtgcagggcaccctgatgagccgggaccagaccccccacctcctgagtattctcggcaagagcaagagaaagaaggacctgcgcataagctgcatgtccaaaccccccgctccaaacccaacaccaccacgaaatttagactcaagaactttcatcacaattggggatcgtaatttcgaagtcgaggcggacgacctggtgacgattagtgagttgggccgaggtgcctacggcgtagtcgaaaaggttaggcacgcccagtcaggcactatcatggcagtcaaaaggatccgggccactgtgaactcgcaggaacagaaaagactgttgatggacctggatatcaacatgaggaccgtcgattgtttttataccgtgacattttatggggccttatttcgagagggggacgtgtggatatgcatggagctgatggacacctccctcgacaagttctatagaaaagtgctcgacaagaacatgactattccagaagatatactgggtgagatcgccgtttctatcgtccgcgcactcgagcatttacactcaaagctgtcagtgatccaccgagatgtcaagccatccaacgtgctgattaacaaagaaggtcacgtgaaaatgtgtgactttggcattagcggctacttagtggactcagttgccaagacaatggacgctggctgtaagccttatatggccccggaacggatcaatcccgaactgaaccaaaaaggctataacgtcaagtcagatgtgtggtctttgggtattaccatgattgagatggcaattcttcgattcccctacgagtcttggggtacccccttccagcaactcaagcaagttgtggaggagcccagcccccagctgcccgcggacagattcagtcccgagttcgttgacttcaccgcgcagtgtctgcgtaagaacccagccgaaagaatgagctatcttgagctaatggagcacccatttttcaccctgcataagaccaaaaagacagacatagccgcttttgtaaaagaaatccttggcgaagattcttag

SEQ ID NO: 240305 - DNA, 1044 bp, Artificial Sequence
  derived and/or modified sequence
atggagagccccgccagcagccagcccgccagcatgccccagagcaagggtaagtccaagcgcaagaaagacctgagaataagttgcatgtctaagccccccgccccaaaccccaccccaccacgtaatctagacagtaggacatttattactataggagataggaacttcgaggttgaggccgatgacttggtgacaatctctgagctgggcagaggggcctacggcgtggtcgaaaaggtcagacacgcgcaaagcggcactataatggccgttaagaggattagagcaacagtaaactcccaggagcagaagcggctgctgatggacctcgatattaatatgcggacagtcgattgcttttacaccgtgactttctatggggccctcttcagagagggagacgtgtggatatgcatggagctgatggacacatccctggataagttctatcggaaggtattagacaaaaacatgactattcctgaggacattctgggagaaatagcggtgtcaatcgttcgcgccctggaacacctgcatagtaagctgagtgttatccacagagacgtgaagccctccaacgtccttattaacaaggagggacatgttaagatgtgtgacttcggaatcagcggatatctcgtggattctgttgccaagacaatggatgcaggctgtaagccttacatggcccctgagcgaatcaatccagagctgaaccaaaagggatacaacgtgaaatccgacgtgtggtccctaggaatcaccatgatcgagatggccatcctgcggtttccatacgagtcgtggggaaccccattccagcagctgaaacaggttgtagaggagccctctcctcagctgccagccgaccgcttttctccagagttcgtcgactttacagcgcagtgccttcgtaaaaatcctgcggaaagaatgtcatacttggagttaatggaacatcctttcttcaccttgcacaaaactaagaagactgatattgccgccttcgtgaaggaaatcctaggggaagattcttag

SEQ ID NO: 240306 - DNA, 2039 bp, Artificial Sequence
  derived and/or modified sequence
atgggagtgcaggggacattgatgtcaagggatcagacgcctcaccttctctccattctaggaaaatccaagaggaagaaggatctacggatatcctgcatgtccaagccacccgcacccaaccccacacccccccggaacctggactcccggaccttcatcaccattggagacagaaactttgaggtggaggctgatgacttggtgaccatctcagaactgggccgtggagcctatggggtggtagagaaggtgcggcacgcccagagcggcaccatcatggccgtgaagcggatccgggccaccgtgaactcacaggagcagaagcggctgctcatggacctggacatcaacatgcgcacggtcgactgtttctacactgtcaccttctacggggcactattcagagagggagacgtgtggatctgcatggagctcatggacacatccttggacaagttctaccggaaggtgctggataaaaacatgacaattccagaggacatccttggggagattgctgtgtctatcgtgcgggccctggagcatctgcacagcaagctgtcggtgatccacagagatgtgaagccctccaatgtccttatcaacaaggagggccatgtgaagatgtgtgactttggcatcagtggctacttggtggactctgtggccaagacgatggatgccggctgcaagccctacatggcccctgagaggatcaacccagagctgaaccagaagggctacaatgtcaagtccgacgtctggagcctgggcatcaccatgattgagatggccatcctgcggttcccttacgagtcctgggggaccccgttccagcagctgaagcaggtggtggaggagccgtccccccagctcccagccgaccgtttctcccccgagtttgtggacttcactgctcagtgcctgaggaagaaccccgcagagcgtatgagctacctggagctgatggagcaccccttcttcaccttgcacaaaaccaagaagacggacattgctgccttcgtgaaggagatcctgggagaagactcataggggctgggcctcggaccccactccggccctccagagccccacagccccatctgcgggggcagtgctcacccacaccataagctactgccatcctggcccagggcatctgggaggaaccgagggggctgctcccacctggctctgtggcgagccatttgtcccaagtgccaaagaagcagaccattggggctcccagccaggcccttgtcggccccaccagtgcctctccctgctgctcctaggacccgtctccagctgctgagatcctggactgagggggcctggatgccccctgtggatgctgctgcccctgcacagcaggctgccagtgcctgggtggatgggccaccgccttgcccagcctggatgccatccaagttgtatatttttttaatctctcgactgaatggactttgcacactttggcccagggtggccacacctctatcccggctttggtgcggggtacacaagaggggatgagttgtgtgaataccccaagactcccatgagggagatgccatgagccgcccaaggccttcccctggcactggcaaacagggcctctgcggagcacactggctcacccagtcctgcccgccaccgttatcggtgtcattcacctttcgtgttttttttaatttatcctctgttgattttttcttttgctttatgggtttggcttgtttttcttgcatggtttggagctgatcgcttctcccccaccccctagggtaccagcaggcagagccttgccctctgctcaggctggggtccagtgggaggggcccaagatctctgctcagagaagtgcagggggagccttccagctcactctccctgaggactggcttgacaggggctatgggtttgctttggtgttgtttttaaaaaaagaaaatatatttttttgaaaaaacgactgcccatcccgggtcctttccctgatgggttggggcagttacctggttgctgttttaatt

SEQ ID NO: 240307 - DNA, 2303 bp, Artificial Sequence
  derived and/or modified sequence
agtcagcgcagttcggccggggtctccccggcgctgcccagtctgtctccggcgccgcccgtcgcggactcgtccttgctgcagtcgccgccgcagtcctcgccgcagtcgccgccgccgccgccgccgccgccgctgctcctccgcctggcctgggccgtctgcccgcagccatgagcgtgctcggccccggtggagcccgcagtcctctagattagtctccaccgccgtccaggacccacttgcagcatggagtcgcccgcctcgagccagcccgccagcatgccccagtccaaaggaaaatccaagaggaagaaggatctacggatatcctgcatgtccaagccacccgcacccaaccccacacccccccggaacctggactcccggaccttcatcaccattggagacagaaactttgaggtggaggctgatgacttggtgaccatctcagaactgggccgtggagcctatggggtggtagagaaggtgcggcacgcccagagcggcaccatcatggccgtgaagcggatccgggccaccgtgaactcacaggagcagaagcggctgctcatggacctggacatcaacatgcgcacggtcgactgtttctacactgtcaccttctacggggcactattcagagagggagacgtgtggatctgcatggagctcatggacacatccttggacaagttctaccggaaggtgctggataaaaacatgacaattccagaggacatccttggggagattgctgtgtctatcgtgcgggccctggagcatctgcacagcaagctgtcggtgatccacagagatgtgaagccctccaatgtccttatcaacaaggagggccatgtgaagatgtgtgactttggcatcagtggctacttggtggactctgtggccaagacgatggatgccggctgcaagccctacatggcccctgagaggatcaacccagagctgaaccagaagggctacaatgtcaagtccgacgtctggagcctgggcatcaccatgattgagatggccatcctgcggttcccttacgagtcctgggggaccccgttccagcagctgaagcaggtggtggaggagccgtccccccagctcccagccgaccgtttctcccccgagtttgtggacttcactgctcagtgcctgaggaagaaccccgcagagcgtatgagctacctggagctgatggagcaccccttcttcaccttgcacaaaaccaagaagacggacattgctgccttcgtgaaggagatcctgggagaagactcataggggctgggcctcggaccccactccggccctccagagccccacagccccatctgcgggggcagtgctcacccacaccataagctactgccatcctggcccagggcatctgggaggaaccgagggggctgctcccacctggctctgtggcgagccatttgtcccaagtgccaaagaagcagaccattggggctcccagccaggcccttgtcggccccaccagtgcctctccctgctgctcctaggacccgtctccagctgctgagatcctggactgagggggcctggatgccccctgtggatgctgctgcccctgcacagcaggctgccagtgcctgggtggatgggccaccgccttgcccagcctggatgccatccaagttgtatatttttttaatctctcgactgaatggactttgcacactttggcccagggtggccacacctctatcccggctttggtgcggggtacacaagaggggatgagttgtgtgaataccccaagactcccatgagggagatgccatgagccgcccaaggccttcccctggcactggcaaacagggcctctgcggagcacactggctcacccagtcctgcccgccaccgttatcggtgtcattcacctttcgtgttttttttaatttatcctctgttgattttttcttttgctttatgggtttggcttgtttttcttgcatggtttggagctgatcgcttctcccccaccccctagggtaccagcaggcagagccttgccctctgctcaggctggggtccagtgggaggggcccaagatctctgctcagagaagtgcagggggagccttccagctcactctccctgaggactggcttgacaggggctatgggtttgctttggtgttgtttttaaaaaaagaaaatatatttttttgaaaaaacgactgcccatcccgggtcctttccctgatgggttggggcagttacctggttgctgttttaattaaaaaaaaaaaaaaaaaaaggactaaa

SEQ ID NO: 240308 - DNA, 2034 bp, Artificial Sequence
  derived and/or modified sequence
aaagttctcagttggcccgtgtgaggagaaggccggggcagcggaggcttccggcggaaaatccaagaggaagaaggatctacggatatcctgcatgtccaagccacccgcacccaaccccacacccccccggaacctggactcccggaccttcatcaccattggagacagaaactttgaggtggaggctgatgacttggtgaccatctcagaactgggccgtggagcctatggggtggtagagaaggtgcggcacgcccagagcggcaccatcatggccgtgaagcggatccgggccaccgtgaactcacaggagcagaagcggctgctcatggacctggacatcaacatgcgcacggtcgactgtttctacactgtcaccttctacggggcactattcagagagggagacgtgtggatctgcatggagctcatggacacatccttggacaagttctaccggaaggtgctggataaaaacatgacaattccagaggacatccttggggagattgctgtgtctatcgtgcgggccctggagcatctgcacagcaagctgtcggtgatccacagagatgtgaagccctccaatgtccttatcaacaaggagggccatgtgaagatgtgtgactttggcatcagtggctacttggtggactctgtggccaagacgatggatgccggctgcaagccctacatggcccctgagaggatcaacccagagctgaaccagaagggctacaatgtcaagtccgacgtctggagcctgggcatcaccatgattgagatggccatcctgcggttcccttacgagtcctgggggaccccgttccagcagctgaagcaggtggtggaggagccgtccccccagctcccagccgaccgtttctcccccgagtttgtggacttcactgctcagtgcctgaggaagaaccccgcagagcgtatgagctacctggagctgatggagcaccccttcttcaccttgcacaaaaccaagaagacggacattgctgccttcgtgaaggagatcctgggagaagactcataggggctgggcctcggaccccactccggccctccagagccccacagccccatctgcgggggcagtgctcacccacaccataagctactgccatcctggcccagggcatctgggaggaaccgagggggctgctcccacctggctctgtggcgagccatttgtcccaagtgccaaagaagcagaccattggggctcccagccaggcccttgtcggccccaccagtgcctctccctgctgctcctaggacccgtctccagctgctgagatcctggactgagggggcctggatgccccctgtggatgctgctgcccctgcacagcaggctgccagtgcctgggtggatgggccaccgccttgcccagcctggatgccatccaagttgtatatttttttaatctctcgactgaatggactttgcacactttggcccagggtggccacacctctatcccggctttggtgcggggtacacaagaggggatgagttgtgtgaataccccaagactcccatgagggagatgccatgagccgcccaaggccttcccctggcactggcaaacagggcctctgcggagcacactggctcacccagtcctgcccgccaccgttatcggtgtcattcacctttcgtgttttttttaatttatcctctgttgattttttcttttgctttatgggtttggcttgtttttcttgcatggtttggagctgatcgcttctcccccaccccctagggtaccagcaggcagagccttgccctctgctcaggctggggtccagtgggaggggcccaagatctctgctcagagaagtgcagggggagccttccagctcactctccctgaggactggcttgacaggggctatgggtttgctttggtgttgtttttaaaaaaagaaaatatatttttttgaaaaaacgactgcccatcccgggtcctttccctgatgggttggggcagttacctggttgctgttttaatt

SEQ ID NO: 240309 - DNA, 1056 bp, Artificial Sequence
  derived and/or modified sequence
atgggagtgcagggcacattgatgtcccgcgaccagaccccacacttactaagcattctggggaagtctaagaggaaaaaagaccttcgtatttcatgtatgagtaagcctcccgcaccaaaccccacaccccctaggaatcttgattcgaggaccttcatcaccatcggcgaccggaatttcgaggtagaagccgacgacctcgtcaccataagtgagcttgggagaggagcctacggagtcgttgaaaaagtgcgacacgcccagtccggtacaattatggcggtcaaaaggatccgcgcaaccgtgaattcacaagagcagaagagactcctgatggacctggatatcaatatgcgcacagtagattgcttctacacggtaaccttctatggggcattattcagggagggagacgtttggatctgtatggagctgatggatacctccttggacaagttttacaggaaggtgcttgataaaaacatgacaattccagaagatatcctgggagaaattgccgtcagcatcgttagggcgctggagcatctacactcaaaactctcagttattcatagagacgtaaaaccctcaaacgttctgattaacaaggaaggccacgtgaagatgtgcgactttggcattagcggctacctggttgactcagtggccaaaactatggatgcaggatgcaaaccctatatggctccagaacggattaaccccgagttgaaccagaagggatacaatgtgaagagcgacgtgtggagtttagggattactatgatagaaatggccattctaagatttccttatgagtcctggggcacgccattccagcaacttaagcaggttgtagaggagcccagcccacagcttccggcagatcggttttccccagagttcgtggacttcactgcacaatgcctccgtaaaaacccggcagaacgtatgtcgtatctggaactaatggagcatcctttctttactctccacaagactaagaaaacagacatcgccgctttcgtaaaagagatactgggcgaggattcatag

SEQ ID NO: 240310 - DNA, 1044 bp, Artificial Sequence
  derived and/or modified sequence
atggaaagccccgcttcatcacaaccggctagtatgccacagagcaagggtaagtcaaaaaggaagaaagaccttcgcatctcctgcatgtccaagcctccagctccaaatcccacaccaccccgaaacctggattctaggaccttcattaccatcggcgaccgcaatttcgaggtggaagctgatgatctggttacaatatcggagctgggtcgaggcgcatacggcgtcgttgaaaaggttcggcacgcacagagcggcactattatggccgtgaagaggatcagagctacagttaacagccaagagcaaaaacggctgttgatggacctcgacattaacatgagaaccgtcgattgcttctacaccgttacattttatggcgctctgtttcgcgagggtgacgtttggatatgtatggaacttatggacacctctctcgacaaattctacagaaaggtgctggataagaacatgactattcccgaagacattctgggcgaaatcgctgtgtccattgtacgggctctggagcacctccatagtaaacttagcgtcatccatagagacgtcaaaccatccaatgtgctcatcaacaaggagggccacgtgaaaatgtgtgattttggaatctcaggctacctcgtggactctgttgcaaaaacgatggacgcaggatgtaagccttatatggccccagagagaattaacccagagttgaaccagaagggctacaacgtgaagtcagacgtatggagccttggaattaccatgatcgagatggctattttacggttcccatacgagagctggggcaccccgtttcagcagctcaagcaggtcgtcgaagaaccatccccacagctgcctgccgatcggttcagcccagaattcgtggacttcactgcacagtgcctgcggaagaaccccgctgagcgcatgtcctacctggagctgatggaacacccattcttcacccttcacaagacgaaaaagaccgatattgcagcctttgtcaaagagatccttggcgaagattcttag

SEQ ID NO: 240311 - protein, 151 aa, Artificial Sequence
  derived and/or modified sequence
MSDNDDIEVESDADKRAHHNALERKRRDHIKDSFHSLRDSVPSLQGEKASRAQILDKATEYIQYMRRKNHTHQQDIDDLKRQNALLEQQVRALEKARSSAQLQTNYPSSDNSLYTNAKGSTISAFDGGSDSSSESEPEEPQSRKKLRMEAS

SEQ ID NO: 240312 - DNA, 456 bp, Artificial Sequence
  derived and/or modified sequence
atgagcgacaacgacgacatcgaggtggagagcgacgccgacaagagagcccaccacaacgccctggagagaaagagaagagaccacatcaaggacagcttccacagcctgagagacagcgtgcccagcctgcagggcgagaaggccagcagagcccagatcctggacaaggccaccgagtacatccagtacatgagaagaaagaaccacacccaccagcaggacatcgacgacctgaagagacagaacgccctgctggagcagcaggtgagagccctggagaaggccagaagcagcgcccagctgcagaccaactaccccagcagcgacaacagcctgtacaccaacgccaagggcagcaccatcagcgccttcgacggcggcagcgacagcagcagcgagagcgagcccgaggagccccagagcagaaagaagctgagaatggaggccagctag

SEQ ID NO: 240313 - DNA, 456 bp, Artificial Sequence
  derived and/or modified sequence
atgtcagataatgatgacatcgaggtagagagcgatgcagacaaacgcgctcatcataacgcactggagagaaagcggcgggaccacataaaggattccttccacagtcttagggattcagtaccatcactgcagggagaaaaagcttcgcgcgcgcaaattctagacaaagccacagaatacatccagtacatgagacgtaagaatcacacacatcagcaggatattgacgatctgaagcgacagaatgcgctcttggagcaacaggttcgcgcgctggagaaagcaaggtccagcgcccagctgcagacaaactaccctagctctgataatagcctgtacaccaacgcgaagggcagcactatttcagcattcgatgggggatcagattcttcttcagagagcgaaccagaggagccgcagagtcggaaaaaattacgcatggaagcctcatag

SEQ ID NO: 240314 - DNA, 456 bp, Artificial Sequence
  derived and/or modified sequence
atgtctgacaatgatgacatcgaggtggagagtgatgctgacaagagggcccaccacaatgccctggagaggaagaggcgggaccacatcaaggacagcttccacagcctgcgggacagcgtgcccagcctgcagggcgagaaggccagccgggcccagatcctggacaaggccacagagtacatccagtacatgaggaggaagaaccacacccaccagcaggacattgatgacctgaagaggcagaatgccctgctggagcagcaggtgcgggccctggagaaggcccggagcagcgcccagctgcagaccaactaccccagcagtgacaacagcctgtacaccaatgccaagggcagcaccatcagcgcctttgatggcggcagtgacagcagcagcgagagcgagcctgaggagccccagagcaggaagaagctgaggatggaggccagctag

SEQ ID NO: 240315 - DNA, 456 bp, Artificial Sequence
  derived and/or modified sequence
atgagcgacaacgacgacatcgaggtggagagcgacgccgacaagcgagcccatcataacgctctggagagaaagagacgcgaccatataaaagactccttccactctcttcgggattcagttcccagcctgcaaggcgaaaaggcgtctagagctcagattctcgataaggccacagagtatattcaatatatgagaagaaaaaaccatactcaccagcaggatattgacgatttaaagagacaaaacgcgctcctggaacaacaagtcagggccctcgaaaaagctcgttcctccgcgcagctccagactaattacccctcctctgacaatagtttgtacactaacgctaaggggagcacaatctcagccttcgacggcggctctgacagcagcagcgaaagcgaaccggaggagccgcaatcaagaaagaaactgcgcatggaagcctcctag

SEQ ID NO: 240316 - DNA, 1973 bp, Artificial Sequence
  derived and/or modified sequence
ttcttgcccgtgttgtgtgtgtgtgtgagtgagagagcgagtgagtgagtgagtgagtgtgtgtgtgggggggactcggcttgttgttgtcggtgacttccccctccccttcaccccttcccctccccgccgccgctgcagtggccgctccctgggccgtaggaaatgagcgataacgatgacatcgaggtggagagcgacgctgacaaacgggctcatcataatgcactggaacgaaaacgtagggaccacatcaaagacagctttcacagtttgcgggactcagtcccatcactccaaggagagaaggcatcccgggcccaaatcctagacaaagccacagaatatatccagtatatgcgaaggaaaaaccacacacaccagcaagatattgacgacctcaagcggcagaatgctcttctggagcagcaagtccgtgcactggagaaggcgaggtcaagtgcccaactgcagaccaactacccctcctcagacaacagcctctacaccaacgccaagggcagcaccatctctgccttcgatgggggctcggactccagctcggagtctgagcctgaagagccccaaagcaggaagaagctccggatggaggccagctaagccactcggggcaggccagcaataaaaactgtctgtctccatcgtctcatcctcctttcagttcgttggtagagccctcagaaccatttaagagactctttatttttctctttctcccttttttttttaaatttttatttttacgtagaagctcttggacaacagctctcgttctccttccccatttccactgtatattttttaatgtattcccttcagggattccctgtccccaacaggaatttttaaaccaaaacaccccaacttggcagctttttctgtggaggacagacggccggccggacctctgagcacatagtgtcctgcccaccctaccagctcctccagccctgccgggcacatgcccgggggacgcctgccctgcccaggtggcctcctggcccgccctcacctctgatagactttgtgaatctgaactgctctactttgagaagatgaccggtttggagtaatcagaatgaaccctcctcctttttaagggttttttttttttcctttttctaaaaagctatgtatcgctcctattgaaagaccagatccttagagaagtttgtggtataaaaaggaagtggggacagattcgcagcacagagtcgctggcatgtttcactcctgcttctctcagccagctgtttaagcctgcggcgccagcctcacggagggccgtgtgacactctcgtggtatgtatgggagatggcagcagtgaagcagcagccaccagggagtggccatttggggttgggacagggagggtgttttgggtggcatagaggttttgtattgagggccagtgatgatgttttgatatttatttcctgctacttaaatttgaatctgagtgaattgtacctatttctgatgatgtcggtcttgcaaagcgacagattcataaagtaatgatgaaatctttctttcttcccgtgtgtatttctaagaaatagagccaactgattttgtatgtaaataccaagagcaatttacctggtactaaacccgcaccccagtgcggacccttcccagccctcatcccacttcctttcctactgtcctggaacctgtctccattgtgtgatccagccctggttctggctgtggtcagcagatgccagtgaagggttttgtgtgtttaggcctcatttctttgtctttttcctactccgttcctggcatttgctgatttctagtgtatactctgtagtctcagttcgtgtttgattccattccatggaaataaaaagtatgttgtacatactgccgaagaattgtcttgcaagttaaggcttccccctttactataagactataaataaaaacttattttatccttctt

SEQ ID NO: 240317 - DNA, 456 bp, Artificial Sequence
  derived and/or modified sequence
atgtctgacaacgatgacatcgaggtggaaagtgacgccgacaaaagagcccatcacaacgcactagaaaggaaaaggagagaccatattaaggatagcttccatagcctcagagactccgttccatctctccagggcgagaaagcctcgcgggctcagattcttgacaaggccaccgagtacatacagtatatgcggaggaagaatcacactcaccagcaagatattgacgatttaaagcgccagaacgccctgctagagcagcaagttagagcactggagaaggctcggtcttcagcccagctgcaaactaattaccctagctctgataatagcctgtacacgaatgcgaaaggttcaacaatttcagccttcgacgggggaagcgattcgtccagcgagagcgaacccgaggagccccagtcccgaaagaagctgcggatggaagcgagctag

SEQ ID NO: 240318 - protein, 134 aa, Artificial Sequence
  derived and/or modified sequence
MSDNDDIEVESDEEQPRFQSAADKRAHHNALERKRRDHIKDSFHSLRDSVPSLQGEKASRAQILDKATEYIQYMRRKNHTHQQDIDDLKRQNALLEQQGEHPSSWGSWPCCAPARSGFGTWACRVRASHGVCAQ

SEQ ID NO: 240319 - protein, 141 aa, Artificial Sequence
  derived and/or modified sequence
MLSVKITSIFSIFFFLLFQEEQPRFQSAADKRAHHNALERKRRDHIKDSFHSLRDSVPSLQGEKASRAQILDKATEYIQYMRRKNHTHQQDIDDLKRQNALLEQQGEHPSSWGSWPCCAPARSGFGTWACRVRASHGVCAQ

SEQ ID NO: 240320 - protein, 103 aa, Artificial Sequence
  derived and/or modified sequence
MSDNDDIEVESDEEQPRFQSAADKRAHHNALERKRRDHIKDSFHSLRDSVPSLQGEKASRAQILDKATEYIQYMRRKNHTHQQDIDDLKRQNALLEQQGESES

SEQ ID NO: 240321 - DNA, 405 bp, Artificial Sequence
  derived and/or modified sequence
atgagcgacaacgacgacatcgaggtggagagcgacgaggagcagcccagattccagagcgccgccgacaagagagcccaccacaacgccctggagagaaagagaagagaccacatcaaggacagcttccacagcctgagagacagcgtgcccagcctgcagggcgagaaggccagcagagcccagatcctggacaaggccaccgagtacatccagtacatgagaagaaagaaccacacccaccagcaggacatcgacgacctgaagagacagaacgccctgctggagcagcagggcgagcaccccagcagctggggcagctggccctgctgcgcccccgccagaagcggcttcggcacctgggcctgcagagtgagagccagccacggcgtgtgcgcccagtag

SEQ ID NO: 240322 - DNA, 426 bp, Artificial Sequence
  derived and/or modified sequence
atgctgagcgtgaagatcaccagcatcttcagcatcttcttcttcctgctgttccaggaggagcagcccagattccagagcgccgccgacaagagagcccaccacaacgccctggagagaaagagaagagaccacatcaaggacagcttccacagcctgagagacagcgtgcccagcctgcagggcgagaaggccagcagagcccagatcctggacaaggccaccgagtacatccagtacatgagaagaaagaaccacacccaccagcaggacatcgacgacctgaagagacagaacgccctgctggagcagcagggcgagcaccccagcagctggggcagctggccctgctgcgcccccgccagaagcggcttcggcacctgggcctgcagagtgagagccagccacggcgtgtgcgcccagtag

SEQ ID NO: 240323 - DNA, 312 bp, Artificial Sequence
  derived and/or modified sequence
atgagcgacaacgacgacatcgaggtggagagcgacgaggagcagcccagattccagagcgccgccgacaagagagcccaccacaacgccctggagagaaagagaagagaccacatcaaggacagcttccacagcctgagagacagcgtgcccagcctgcagggcgagaaggccagcagagcccagatcctggacaaggccaccgagtacatccagtacatgagaagaaagaaccacacccaccagcaggacatcgacgacctgaagagacagaacgccctgctggagcagcagggcgagagcgagagctag

SEQ ID NO: 240324 - DNA, 405 bp, Artificial Sequence
  derived and/or modified sequence
atgagtgataatgacgatatcgaagtagagtcagatgaggaacagccccgatttcagtctgcggccgacaaacgggcccaccataatgcgcttgagcgcaaaagaagggatcacatcaaagattccttccactcactgagggattcagttccaagcctccagggcgagaaagcctcaagggcccagattttggacaaggcaacagagtacattcaatatatgcggagaaagaatcacacgcatcaacaagacattgacgatctcaagcgccagaatgcacttttagaacagcagggtgagcacccgtcctcgtgggggtcatggccctgttgcgcacccgcccggtctggattcggcacatgggcctgtagagtacgtgccagtcacggagtgtgtgcccagtag

SEQ ID NO: 240325 - DNA, 426 bp, Artificial Sequence
  derived and/or modified sequence
atgctgtccgtgaaaattacaagtatcttctccattttcttttttctgctgtttcaggaggagcagccgcgctttcagagtgcggcggataagcgggcccaccacaacgctttggaacgcaagaggcgcgaccacattaaagacagctttcactccctccgcgattcagtgccctcccttcagggggagaaagcatccagagctcaaatcctcgataaagccacggagtacattcagtacatgaggcgaaagaaccacacacaccaacaggatattgacgatcttaaaagacagaatgcactactcgaacaacagggcgagcaccctagctcatgggggtcatggccctgctgcgcccccgccaggagcggcttcgggacatgggcttgtcgagtgcgggccagtcacggagtttgtgcccaatag

SEQ ID NO: 240326 - DNA, 312 bp, Artificial Sequence
  derived and/or modified sequence
atgtcagataatgatgacattgaggtggaatctgatgaagaacaaccccggtttcagtcagctgctgacaagagggcacaccacaatgcactcgaacgcaagcgccgcgaccacatcaaggatagtttccatagccttcgggactcagttccaagccttcagggggaaaaagcaagtcgcgctcaaatcctggataaagccaccgagtatatccagtatatgagacgcaaaaatcatacccaccagcaggatatcgacgacttaaaaagacaaaatgccctgctagagcaacagggagagtctgagtcttag

SEQ ID NO: 240327 - DNA, 312 bp, Artificial Sequence
  derived and/or modified sequence
atgtccgataatgatgacattgaggtcgaaagtgacgaagaacagccacgctttcaaagcgccgcggataaaagagcacatcacaatgcactggagcgtaagagacgagaccacattaaagactccttccatagtctgcgggactccgtcccctccttgcagggagagaaggcttcgcgggctcagattttggacaaagccaccgagtatatccagtacatgcgcaggaagaaccatacacatcagcaagatatcgacgatctgaaaagacagaacgcactgcttgagcagcaaggtgagagtgagtcctag

SEQ ID NO: 240328 - DNA, 405 bp, Artificial Sequence
  derived and/or modified sequence
atgtctgacaatgatgacatcgaggtggagagtgatgaggagcagccccgcttccagagcgctgctgacaagagggcccaccacaatgccctggagaggaagagaagagaccacatcaaggacagcttccacagcctgcgggacagcgtgcccagcctgcagggcgagaaggccagccgggcccagatcctggacaaggccacagagtacatccagtacatgaggaggaagaaccacacccaccagcaggacattgatgacctgaagaggcagaatgccctgctggagcagcagggcgagcaccccagctcctggggctcctggccctgctgtgccccagcccggagcggcttcggcacctgggcctgccgggtgcgggccagccatggagtgtgtgcccagtag

SEQ ID NO: 240329 - DNA, 426 bp, Artificial Sequence
  derived and/or modified sequence
atgctgtctgtgaagatcaccagcatcttcagcatcttcttcttcctgctcttccaggaggagcagccccgcttccagagcgctgctgacaagagggcccaccacaatgccctggagaggaagaggcgggaccacatcaaggacagcttccacagcctgcgggacagcgtgcccagcctgcagggcgagaaggccagccgggcccagatcctggacaaggccacagagtacatccagtacatgaggaggaagaaccacacccaccagcaggacattgatgacctgaagaggcagaatgccctgctggagcagcagggcgagcaccccagctcctggggctcctggccctgctgtgccccagcccggagcggcttcggcacctgggcctgccgggtgcgggccagccacggcgtgtgtgcccagtag

SEQ ID NO: 240330 - DNA, 312 bp, Artificial Sequence
  derived and/or modified sequence
atgtctgacaatgatgacatcgaggtggagagtgatgaggagcagccccgcttccagagcgctgctgacaagagggcccaccacaatgccctggagaggaagagaagagaccacatcaaggacagcttccacagcctgcgggacagcgtgcccagcctgcagggcgagaaggccagccgggcccagatcctggacaaggccacagagtacatccagtacatgaggaggaagaaccacacccaccagcaggacattgatgacctgaagaggcagaatgccctgctggagcagcagggcgagagcgagagctag

SEQ ID NO: 240331 - DNA, 405 bp, Artificial Sequence
  derived and/or modified sequence
atgagcgacaacgacgacatcgaggtggagagcgacgaggagcagccacggtttcagagcgcagctgataaaagagctcatcataacgccttggagcgcaaacgacgtgatcatatcaaggattcgttccacagcctaagagacagcgtgccttcgctacagggggagaaggcttcacgggctcagatcctggataaggctaccgagtatattcagtacatgcggagaaagaatcacacacaccagcaagacattgatgacttaaagcggcagaacgcgctcctggaacagcagggggagcacccatcctcctggggatcctggccctgttgtgccccagccagatcagggtttggcacctgggcgtgcagggtgcgcgcctcccacggagtctgtgcacagtag

SEQ ID NO: 240332 - DNA, 426 bp, Artificial Sequence
  derived and/or modified sequence
atgctgagcgtgaagatcaccagcatcttcagcatcttcttcttcctcctcttccaggaagagcagccaagattccagtcagcagctgataagagggctcatcataacgcgctcgaacgtaaacgacgcgaccacattaaggacagcttccatagcctgcgggactctgtcccctcactgcagggagaaaaggcctccagagcccagatcctggacaaggccactgaatatatccagtatatgagacgcaagaaccatactcaccagcaagatatcgacgatctaaagcgtcaaaacgccctgctggagcagcagggggagcacccaagtagctggggctcatggccttgttgtgccccagctaggtcagggttcggcacctgggcttgccgtgtgcgagcttcacacggggtatgcgcccagtag

SEQ ID NO: 240333 - DNA, 312 bp, Artificial Sequence
  derived and/or modified sequence
atgagcgacaacgacgacatcgaggtggagagcgacgaggagcagccccggtttcagagcgccgctgacaagcgagcccaccacaacgcattggagcgaaaacgccgcgatcatatcaaggatagctttcactccctgagagactccgtcccgtccctgcagggtgaaaaggcgtcaagggcacagattttagataaagcaactgaatacattcagtatatgcgccgaaagaaccacacccaccagcaggacatagacgaccttaagcgacaaaacgcccttctcgagcaacagggggaatctgaatcatag

SEQ ID NO: 240334 - DNA, 312 bp, Artificial Sequence
  derived and/or modified sequence
atgagcgacaacgacgacatcgaggtggagagcgacgaggagcagcccaggtttcagtccgctgctgataaaagagctcatcacaacgccctggagcgcaaacgccgagaccacataaaggactccttccacagcctgcgagactctgtccccagcctgcaaggggaaaaagcatcccgggcacaaattttagacaaggctaccgagtatatacaatacatgagaaggaagaatcacacacaccagcaagacatcgacgatttgaaacggcaaaacgcactgctggaacaacagggagagtctgagagctag

SEQ ID NO: 240335 - DNA, 3155 bp, Artificial Sequence
  derived and/or modified sequence
gtgtgtgtgtgagtgagagagcgagtgagtgagtgagtgagtgtgtgtgtgggggggactcggcttgttgttgtcggtgacttccccctccccttcaccccttcccctccccgccgccgctgcagtggccgctccctgggccgtaggaaatgagcgataacgatgacatcgaggtggagagcgacgaagagcaaccgaggtttcaatctgcggctgacaaacgggctcatcataatgcactggaacgaaaacgtagggaccacatcaaagacagctttcacagtttgcgggactcagtcccatcactccaaggagagaaggcatcccgggcccaaatcctagacaaagccacagaatatatccagtatatgcgaaggaaaaaccacacacaccagcaagatattgacgacctcaagcggcagaatgctcttctggagcagcaaggtgagcacccgagctcgtggggcagctggccctgctgtgctccagccaggtcaggctttggcacctgggcctgcagagtcagagccagtcatggagtatgtgctcagtagcaggcttggtcctgcttcttggggcctgagtaactgagtgttagagccgtcctgaggaaggacctgaggcgccagtgaggagacagtggaagctaggaagttggacatctggagacttgtatcttttctggcctgacctctccccttcttggggctcaggtgctctgcctgcagtagggatcacacctggcatcaggtgtctgaaaagagctttgaggtccttggagtggaatgtgctgtgtaagtaccagagactccaggtgttcagggacagtgagccctccccattgtcaatggtagtccaatcagggcagcctatgggctaggcccatgctgttctcaatgctcacacccgccttttcctacaaccacaggggaaagcgagagctgatcaagttctttgttcctggggaattcacttctcttcctccctcatggaagatgcaagtaaaaggaaatgcaagtaaccacctgggttagaaaacctcaaataaaataaaataaaataaattaaatgggttgaccttccaggctcaagctgagctgaaccaagggatgggcagtgggtggtgtcagtgggttggttactgggccaggcagcctgcatgtaggggctatttgaaaagcccaggtattttatgtgtattggtgacttgcttccaagtgtccagcttgtcattccaagtggatcttgtacacgagagctaagccaaaactgttctttggctgatacgtcttatgtcatcctttcctgctgttgtgtggcctcacaccttgtggagcctcatgctcctgggccagcttctcctctgttattgcactgctgaatcccacagggagctcacgctccagtctctccacggggcttccacggcaggacggtgacatcacaagccttctcttcagagttgggtgggattgcagagtgtctgctggctcccaggtccagctgggaaaggcgggagggaaatgaagtgtgtgagtgaacagccacccgaagggagctacttctgagcatcttgagcctcgggggccaacaagcaagcccttaggaagaacaggctggaccctgagtctgagactcggttactccccaagtctccagaaggcagtaacacactcccttggttgccttttagtccgtgcactggagaaggcgaggtcaagtgcccaactgcagaccaactacccctcctcagacaacagcctctacaccaacgccaagggcagcaccatctctgccttcgatgggggctcggactccagctcggagtctgagcctgaagagccccaaagcaggaagaagctccggatggaggccagctaagccactcggggcaggccagcaataaaaactgtctgtctccatcgtctcatcctcctttcagttcgttggtagagccctcagaaccatttaagagactctttatttttctctttctcccttttttttttaaatttttatttttacgtagaagctcttggacaacagctctcgttctccttccccatttccactgtatattttttaatgtattcccttcagggattccctgtccccaacaggaatttttaaaccaaaacaccccaacttggcagctttttctgtggaggacagacggccggccggacctctgagcacatagtgtcctgcccaccctaccagctcctccagccctgccgggcacatgcccgggggacgcctgccctgcccaggtggcctcctggcccgccctcacctctgatagactttgtgaatctgaactgctctactttgagaagatgaccggtttggagtaatcagaatgaaccctcctcctttttaagggttttttttttttcctttttctaaaaagctatgtatcgctcctattgaaagaccagatccttagagaagtttgtggtataaaaaggaagtggggacagattcgcagcacagagtcgctggcatgtttcactcctgcttctctcagccagctgtttaagcctgcggcgccagcctcacggagggccgtgtgacactctcgtggtatgtatgggagatggcagcagtgaagcagcagccaccagggagtggccatttggggttgggacagggagggtgttttgggtggcatagaggttttgtattgagggccagtgatgatgttttgatatttatttcctgctacttaaatttgaatctgagtgaattgtacctatttctgatgatgtcggtcttgcaaagcgacagattcataaagtaatgatgaaatctttctttcttcccgtgtgtatttctaagaaatagagccaactgattttgtatgtaaataccaagagcaatttacctggtactaaacccgcaccccagtgcggacccttcccagccctcatcccacttcctttcctactgtcctggaacctgtctccattgtgtgatccagccctggttctggctgtggtcagcagatgccagtgaagggttttgtgtgtttaggcctcatttctttgtctttttcctactccgttcctggcatttgctgatttctagtgtatactctgtagtctcagttcgtgtttgattccattccatggaaataaaaagtatgttgtacatac

SEQ ID NO: 240336 - DNA, 1090 bp, Artificial Sequence
  derived and/or modified sequence
tgactccccaccctccgcttcctctgccgccggcattttctttcttattattgaatgttaagtgtaaaaataacttctatattttctatttttttttttctcttattccaggaagagcaaccgaggtttcaatctgcggctgacaaacgggctcatcataatgcactggaacgaaaacgtagggaccacatcaaagacagctttcacagtttgcgggactcagtcccatcactccaaggagagaaggcatcccgggcccaaatcctagacaaagccacagaatatatccagtatatgcgaaggaaaaaccacacacaccagcaagatattgacgacctcaagcggcagaatgctcttctggagcagcaaggtgagcacccgagctcgtggggcagctggccctgctgtgctccagccaggtcaggctttggcacctgggcctgcagagtcagagccagtcatggagtatgtgctcagtagcaggcttggtcctgcttcttggggcctgagtaactgagtgttagagccgtcctgaggaaggacctgaggcgccagtgaggagacagtggaagctaggaagttggacatctggagacttgtatcttttctggcctgacctctccccttcttggggctcaggtgctctgcctgcagtagggatcacacctggcatcaggtgtctgaaaagagctttgaggtccttggagtggaatgtgctgtgtaagtaccagagactccaggtgttcagggacagtgagccctccccattgtcaatggtagtccaatcagggcagcctatgggctaggcccatgctgttctcaatgctcacacccgccttttcctacaaccacaggggaaagcgagagctgatcaagttctttgttcctggggaattcacttctcttcctccctcatggaagatgcaagtaaaaggaaatgcaagtaaccacctgggttagaaaacctcaaataaaataaaataaaataaattaaatgggttgaccttccaggctcaagctgagctgaaccaagggatgggcagtgggtggtgtcagtgggttggttactgggccaggcagcctgcatgta

SEQ ID NO: 240337 - DNA, 615 bp, Artificial Sequence
  derived and/or modified sequence
agtgaggaggtggttcttgcccgtgttgtgtgtgtgtgtgagtgagagagcgagtgagtgagtgagtgagtgtgtgtgtgggggggactcggcttgttgttgtcggtgacttccccctccccttcaccccttcccctccccgccgccgctgcagtggccgctccctgggccgtaggaaatgagcgataacgatgacatcgaggtggagagcgacgaagagcaaccgaggtttcaatctgcggctgacaaacgggctcatcataatgcactggaacgaaaacgtagggaccacatcaaagacagctttcacagtttgcgggactcagtcccatcactccaaggagagaaggcatcccgggcccaaatcctagacaaagccacagaatatatccagtatatgcgaaggaaaaaccacacacaccagcaagatattgacgacctcaagcggcagaatgctcttctggagcagcaaggggaaagcgagagctgatcaagttctttgttcctggggaattcacttctcttcctccctcatggaagatgcaagtaaaaggaaatgcaagtaaccacctgggttagaaaacctcaaataaaataaaataaaataaattaaat

SEQ ID NO: 240338 - DNA, 405 bp, Artificial Sequence
  derived and/or modified sequence
atgtcagacaatgatgacattgaggttgaaagcgatgaagaacagccaaggttccagtctgccgctgataagcgtgctcaccacaacgctctggaacgtaaaagacgagatcacataaaggactcttttcattctctgcgtgactccgtcccatctctgcagggggaaaaggcctctagggctcaaatcttagacaaagctactgagtatatccaatacatgagacggaaaaatcacacgcaccagcaagacatcgacgatctcaagcggcagaacgctctgctcgagcagcaaggggaacacccctcttcgtggggctcttggccatgttgtgctcctgctaggagcggcttcggaacttgggcctgccgcgtccgagcatctcacggggtgtgcgctcagtag

SEQ ID NO: 240339 - DNA, 426 bp, Artificial Sequence
  derived and/or modified sequence
atgctgtctgtcaaaattacctccattttctcaatcttcttcttcttgctcttccaagaggaacagcctcgctttcaaagcgccgcagacaagagagcccaccataacgctctggagcgcaaaaggcgagatcatattaaagacagcttccactccctgcgggactcggtgcctagcctacagggggagaaagcttccagagcacaaatcctcgacaaggcaaccgagtatatccagtacatgaggcgcaaaaaccacacgcatcagcaagacatcgatgacctgaagagacagaatgctctgcttgaacagcagggggagcacccctcctcatggggatcttggccttgctgcgcacctgcacgctccggttttggtacctgggcctgcagagttcgtgcttctcacggcgtctgcgcccagtag

SEQ ID NO: 240340 - DNA, 312 bp, Artificial Sequence
  derived and/or modified sequence
atgtctgacaatgacgacatcgaagtcgagagcgacgaagagcagccccgattccagagcgcagccgacaaacgtgcgcaccataacgcgctggagaggaagagaagagaccacattaaagactcctttcatagtctgcgagactccgtccctagtctgcaaggcgagaaggcgagccgcgcacagatcttggataaggcaacagaatacatccagtacatgcggagaaagaatcacacccaccaacaagacattgacgacctcaagcgacagaatgccctgctggaacaacagggagagtctgagagctag

SEQ ID NO: 240341 - DNA, 312 bp, Artificial Sequence
  derived and/or modified sequence
atgtcggataatgatgatatcgaagtcgaatctgacgaggagcaacctcgcttccagagcgccgctgacaagcgggctcaccataacgcactcgagcgaaagcggagagatcatatcaaggacagtttccattccctgcgtgacagcgtgccaagtctccagggcgagaaagcctctagagcacaaattttggacaaggcgaccgaatatatacaatatatgcgacgaaagaaccatactcaccagcaggatatagacgatctgaaaagacagaacgccctgctggagcaacagggagaaagtgagtcttag

SEQ ID NO: 240342 - protein, 96 aa, Artificial Sequence
  derived and/or modified sequence
MSDNDDIEVESDEEQPRFQSAADKRAHHNALERKRRDHIKDSFHSLRDSVPSLQGEKLYFLFWKLCTPVLHRQSLMQKCHTFISSYQVHKKKECKI

SEQ ID NO: 240343 - DNA, 291 bp, Artificial Sequence
  derived and/or modified sequence
atgagcgacaacgacgacatcgaggtggagagcgacgaggagcagcccagattccagagcgccgccgacaagagagcccaccacaacgccctggagagaaagagaagagaccacatcaaggacagcttccacagcctgagagacagcgtgcccagcctgcagggcgagaagctgtacttcctgttctggaagctgtgcacccccgtgctgcacagacagagcctgatgcagaagtgccacaccttcatcagcagctaccaggtgcacaagaagaaggagtgcaagatctag

SEQ ID NO: 240344 - DNA, 291 bp, Artificial Sequence
  derived and/or modified sequence
atgtcggataacgatgacattgaagtggaatcagacgaggagcagccgcggttccagtccgctgcggacaaaagggcacaccataacgccctcgaaagaaagcgcagggaccacattaaggattctttccactccctgcgggactcagttcccagcctacagggtgaaaaactgtatttcctgttttggaaattatgtacccccgtgttgcacaggcagagcctgatgcagaaatgccatactttcatttcgtcttaccaggtccacaaaaagaaggaatgcaaaatatag

SEQ ID NO: 240345 - DNA, 291 bp, Artificial Sequence
  derived and/or modified sequence
atgtctgacaatgatgacatcgaggtggagagtgatgaggagcagccccgcttccagagcgctgctgacaagagggcccaccacaatgccctggagaggaagagaagagaccacatcaaggacagcttccacagcctgcgggacagcgtgcccagcctgcagggcgagaagctgtacttcctgttctggaagctgtgcacccctgtgctgcaccggcagagcctgatgcagaagtgccacaccttcatcagcagctaccaggtgcacaagaagaaggagtgcaagatctag

SEQ ID NO: 240346 - DNA, 291 bp, Artificial Sequence
  derived and/or modified sequence
atgagcgacaacgacgacatcgaggtggagagcgacgaggagcagccacggttccaatccgcagccgacaaacgcgcacatcacaacgcccttgaacggaaaaggagggaccacatcaaagactcctttcatagccttcgcgactctgtcccctctcttcaaggcgagaaactgtatttcctgttttggaagctctgcacgcctgtccttcacagacagtccctcatgcagaaatgccacacgttcatctccagctatcaggttcacaagaagaaggagtgtaaaatctag

SEQ ID NO: 240347 - DNA, 897 bp, Artificial Sequence
  derived and/or modified sequence
ggtggttcttgcccgtgttgtgtgtgtgtgtgagtgagagagcgagtgagtgagtgagtgagtgtgtgtgtgggggggactcggcttgttgttgtcggtgacttccccctccccttcaccccttcccctccccgccgccgctgcagtggccgctccctgggccgtaggaaatgagcgataacgatgacatcgaggtggagagcgacgaagagcaaccgaggtttcaatctgcggctgacaaacgggctcatcataatgcactggaacgaaaacgtagggaccacatcaaagacagctttcacagtttgcgggactcagtcccatcactccaaggagagaagctctatttcctcttttggaaattgtgtactcctgtccttcatcgtcaaagtttgatgcagaaatgccacaccttcatttcaagctaccaagtgcacaagaaaaaagaatgcaagatttaaaaaatgattgttttgaccccttacacaaatgtcttactcctggctttaattaagctgcttgagggctgatagctctgccttaccctggtaatcagcaaaatggtcctgtggctggggaggccctggcagcaggaagccttcaaggagccatgggtctgtgctgactctggccttacaaccttccagcctcctttgctggcattgatggggttccatttttgaatgaactagtttaatgtggatccaaatttattgtgcatattctttcgttttggttttcaaaagatggcttattcacatggaaatgtacaccagtttagccctgggccctccctttaccttcatatgtgtaaaagcttacacaggtttcagaaaataaatggtttcattttctctaaaataactagtacaaaataaaacagatgtcagttgttga

SEQ ID NO: 240348 - DNA, 291 bp, Artificial Sequence
  derived and/or modified sequence
atgtctgataatgatgacattgaagttgagagtgatgaagagcagccaaggtttcaaagtgccgctgataaacgagcacatcataatgccttggaacgcaagcgccgagatcatattaaggatagcttccattccctacgggactcggtgccctcgctccagggagagaaactatacttcttgttctggaaactgtgtacccccgtattgcacaggcagtccctgatgcagaagtgccacacatttattagctcctaccaggtgcacaaaaaaaaagagtgtaagatttag

SEQ ID NO: 240349 - protein, 2429 aa, Artificial Sequence
  derived and/or modified sequence
MPAILVASKMKSGLPKPVHSAAPILHVPPARAGPQPCYLKLGSKVEVSKTTYPSQIPLKSQVLQGLQEPAGEGLPLRKSGSVENGFDTQIYTDWANHYLAKSGHKRLIRDLQQDVTDGVLLAQIIQVVANEKIEDINGCPKNRSQMIENIDACLNFLAAKGINIQGLSAEEIRNGNLKAILGLFFSLSRYKQQQQQPQKQHLSSPLPPAVSQVAGAPSQCQAGTPQQQVPVTPQAPCQPHQPAPHQQSKAQAEMQSRLPGPTARVSAAGSEAKTRGGSTTANNRRSQSFNNYDKSKPVTSPPPPPSSHEKEPLASSASSHPGMSDNAPASLESGSSSTPTNCSTSSAIPQPGAATKPWRSKSLSVKHSATVSMLSVKPPGPEAPRPTPEAMKPAPNNQKSMLEKLKLFNSKGGSKAGEGPGSRDTSCERLETLPSFEESEELEAASRMLTTVGPASSSPKIALKGIAQRTFSRALTNKKSSLKGNEKEKEKQQREKDKEKSKDLAKRASVTERLDLKEEPKEDPSGAAVPEMPKKSSKIASFIPKGGKLNSAKKEPMAPSHSGIPKPGMKSMPGKSPSAPAPSKEGERSRSGKLSSGLPQQKPQLDGRHSSSSSSLASSEGKGPGGTTLNHSISSQTVSGSVGTTQTTGSNTVSVQLPQPQQQYNHPNTATVAPFLYRSQTDTEGNVTAESSSTGVSVEPSHFTKTGQPALEELTGEDPEARRLRTVKNIADLRQNLEETMSSLRGTQVTHSTLETTFDTNVTTEMSGRSILSLTGRPTPLSWRLGQSSPRLQAGDAPSMGNGYPPRANASRFINTESGRYVYSAPLRRQLASRGSSVCHVDVSDKAGDEMDLEGISMDAPGYMSDGDVLSKNIRTDDITSGYMTDGGLGLYTRRLNRLPDGMAVVRETLQRNTSLGLGDADSWDDSSSVSSGISDTIDNLSTDDINTSSSISSYANTPASSRKNLDVQTDAEKHSQVERNSLWSGDDVKKSDGGSDSGIKMEPGSKWRRNPSDVSDESDKSTSGKKNPVISQTGSWRRGMTAQVGITMPRTKPSAPAGALKTPGTGKTDDAKVSEKGRLSPKASQVKRSPSDAGRSSGDESKKPLPSSSRTPTANANSFGFKKQSGSAAGLAMITASGVTVTSRSATLGKIPKSSALVSRSAGRKSSMDGAQNQDDGYLALSSRTNLQYRSLPRPSKSNSRNGAGNRSSTSSIDSNISSKSAGLPVPKLREPSKTALGSSLPGLVNQTDKEKGISSDNESVASCNSVKVNPAAQPVSSPAQTSLQPGAKYPDVASPTLRRLFGGKPTKQVPIATAENMKNSVVISNPHATMTQQGNLDSPSGSGVLSSGSSSPLYSKNVDLNQSPLASSPSSAHSAPSNSLTWGTNASSSSAVSKDGLGFQSVSSLHTSCESIDISLSSGGVPSHNSSTGLIASSKDDSLTPFVRTNSVKTTLSESPLSSPAASPKFCRSTLPRKQDSDPHLDRNTLPKKGLRYTPTSQLRTQEDAKEWLRSHSAGGLQDTAANSPFSSGSSVTSPSGTRFNFSQLASPTTVTQMSLSNPTMLRTHSLSNADGQYDPYTDSRFRNSSMSLDEKSRTMSRSGSFRDGFEEVHGSSLSLVSSTSSVYSTPEEKCQSEIRKLRRELDASQEKVSALTTQLTANAHLVAAFEQSLGNMTIRLQSLTMTAEQKDSELNELRKTIELLKKQNAAAQAAINGVINTPELNCKGNGTAQSADLRIRRQHSSDSVSSINSATSHSSVGSNIESDSKKKKRKNWLRSSFKQAFGKKKSPKSASSHSDIEEMTDSSLPSSPKLPHNGSTGSTPLLRNSHSNSLISECMDSEAETVMQLRNELRDKEMKLTDIRLEALSSAHQLDQLREAMNRMQSEIEKLKAENDRLKSESQGSGCSRAPSQVSISASPRQSMGLSQHSLNLTESTSLDMLLDDTGECSARKEGGRHVKIVVSFQEEMKWKEDSRPHLFLIGCIGVSGKTKWDVLDGVVRRLFKEYIIHVDPVSQLGLNSDSVLGYSIGEIKRSNTSETPELLPCGYLVGENTTISVTVKGLAENSLDSLVFESLIPKPILQRYVSLLIEHRRIILSGPSGTGKTYLANRLSEYIVLREGRELTDGVIATFNVDHKSSKELRQYLSNLADQCNSENNAVDMPLVIILDNLHHVSSLGEIFNGLLNCKYHKCPYIIGTMNQATSSTPNLQLHHNFRWVLCANHTEPVKGFLGRFLRRKLMETEISGRVRNMELVKIIDWIPKVWHHLNRFLEAHSSSDVTIGPRLFLSCPIDVDGSRVWFTDLWNYSIIPYLLEAVREGLQLYGRRAPWEDPAKWVMDTYPWAASPQQHEWPPLLQLRPEDVGFDGYSMPREGSTSKQMPPSDAEGDPLMNMLMRLQEAANYSSPQSYDSDSNSNSHHDDILDSSLESTL

SEQ ID NO: 240350 - DNA, 7290 bp, Artificial Sequence
  derived and/or modified sequence
atgcctgccattctagtggcctcaaagatgaagtcaggactgcccaagccagtgcactccgccgcaccgatcttgcatgttccaccggcgagagcaggtcctcagccctgctacttaaaattgggaagtaaagtggaagttagtaaaactacctacccttcacagattcctctcaagtctcaggtactacagggcctgcaggaaccagctggagagggtctcccgttacggaaaagtgggagcgtagagaacggattcgatacccagatttacactgattgggccaaccactacctcgccaaatcgggccacaagcggctgatccgggacttacagcaagatgtgacggatggagtcctgcttgcccagataatccaggttgtggcaaatgaaaaaatcgaagatatcaatgggtgcccaaagaatcgcagtcagatgatagagaatatcgacgcatgtctgaatttcttagcagctaaagggattaatatccagggactctctgcagaggagatacggaacggaaacctaaaagcaattttgggcttattcttcagcctcagccggtacaaacagcagcagcagcagccccagaagcagcacctgtcatccccactgccacccgctgtttctcaggtggctggcgctcccagccaatgccaagccggaaccccccagcagcaagttcccgttacaccacaggcaccttgtcagccgcaccagcccgcaccacatcagcaatctaaggcacaggcggagatgcagtctaggttgcctggccccaccgcaagagtgagcgcggctgggtccgaggcaaagacgcgcggcggctctacaacagcgaataaccgacggtcacagagttttaataactacgataaatccaagccagttaccagtccaccacctcccccttcatctcatgagaaggaacctttagcctcgagcgccagctctcatccgggaatgagtgacaatgcgccagcctcactcgagtccggctcgagcagcacccccacgaattgtagcaccagttccgctatccctcagccaggggccgccactaagccatggcgttcaaagtctctctccgtgaaacatagtgcgacagtgtccatgctttcagtcaaaccccccggaccagaggcgcccaggcccacacccgaagcaatgaagcctgccccaaataatcaaaagtccatgcttgaaaaattaaaacttttcaactcgaaaggaggcagcaaagccggcgaagggccagggtctcgcgacacttcatgcgaacgtctggagacactcccttctttcgaggaatcagaggaacttgaggctgccagtaggatgctcactaccgtcggccctgcatcctctagcccaaaaatcgccctgaaaggaattgcccagcgtaccttctcgcgggccctcaccaataaaaagtcgtctttgaagggcaacgaaaaagagaaggaaaagcagcagagagaaaaagataaggagaaatcgaaagatctggcaaagcgggcttctgtcactgagcgtcttgatttgaaggaggagccgaaagaagaccctagtggtgccgctgttcccgagatgccgaagaagagtagtaagatcgcatctttcattcccaaaggtggcaaattgaactctgctaagaaggaaccgatggccccgtctcacagtggcattcccaaacctggcatgaaatctatgcctgggaagtctccgtccgccccagctccaagcaaggagggagaacggagccgctccggaaaattgtcatccgggctaccacagcagaagccccagctggatggaaggcacagtagcagctcaagttccctggcttcgtcagaggggaagggcccggggggcacaactctcaaccactccattagctcacagactgtcagcggcagtgtaggaaccacacagacaacaggcagcaacacggtgagcgtgcaactgccccagccccaacagcagtacaatcacccaaatactgcaaccgtggcccccttcctgtaccgctcacagacagatacagagggaaatgtaaccgcagagtcctcatcaacaggagtttctgtggaacccagccattttaccaaaaccggccagcctgccctagaagaactgacgggggaggaccccgaagctcgtagacttagaacagtcaaaaatatagccgatcttcgtcagaacctggaggaaactatgagctccttacgggggacacaagtgacccattctactctcgagaccactttcgacactaacgtcactactgaaatgtccggcagaagtatcttatctctgaccggtaggccgaccccccttagttggcgtctggggcagtcgtcacccagactccaggctggggacgccccatctatgggcaacggataccctcctcgagcaaatgcctcacgattcattaacacagaaagtggcagatacgtgtatagtgccccgttaaggcggcagctcgcttcccgaggcagctcagtgtgtcacgtggacgtgagcgataaagccggtgatgagatggaccttgagggtatctccatggacgctccagggtacatgtctgatggcgatgttctgtcaaagaatatcaggactgacgatatcacaagtggttacatgaccgacggaggtttgggcttgtatactcgaaggttaaaccgcctccccgatggaatggccgttgtgcgggagaccctccagcggaacaccagcctgggcctgggagatgcggactcttgggacgactccagttccgtgtcgagcggcatcagtgacacaattgacaatctgagcactgacgacatcaacacgtcaagttcaatatcttcatacgccaatacccctgcatcttctagaaagaacctggatgttcaaactgatgcagagaagcattctcaggtagaacggaatagcctctggtcgggggatgacgtgaagaagtctgacggcggaagtgattctggcattaaaatggaaccaggatctaaatggcggaggaatccttcagacgttagtgacgagagtgataagagtacgagtggtaaaaaaaaccccgtcatctcccagacggggagctggcggcgggggatgacagcccaggtaggtataaccatgcctagaaccaaaccttccgccccggccggcgcactgaagaccccaggcaccggcaaaaccgatgacgctaaggtgagcgagaagggcaggctcagtcccaaggcaagtcaggtgaagcgatcaccatcagacgcaggccgaagttccggtgatgaatctaaaaaaccgctgcctagctcaagcaggacgcccaccgccaacgctaacagttttggttttaagaaacagtctggctctgctgctggtctggccatgataaccgctagtggagtaacagtcacatcccgtagtgccacacttggcaagattcccaagagctctgccctggtctctaggtcagcagggaggaagtcttccatggacggtgcccagaaccaggatgacggctacctggccctgtcttctagaaccaatcttcagtatagatcccttccaagaccctcaaagagcaattctcgcaatggcgccggtaatagatcttctacttccagtattgactctaatatcagctcaaaatctgcaggcctgcccgtgcccaaactgcgtgagccttctaagacagccctgggctcctcactccctggcctcgtcaaccaaacagacaaagaaaaggggattagctctgataacgagagcgtagcaagctgtaattcagttaaagttaatccagctgcgcaacccgtgagttccccagcccagacatccttgcagcctggcgccaagtacccagatgtcgctagccccactttacgaaggctatttggaggcaaacccaccaagcaagtgcccatcgctacggctgagaacatgaagaattccgtcgtcatatcgaatccccatgcaactatgactcagcaagggaatctggactcgcctagcggctccggcgtgctgtcaagcgggtcaagttcaccactctacagcaagaacgtcgatctcaaccaatcacctctggccagtagcccctcctcagcacacagtgcgcctagcaattcgcttacgtggggcaccaacgcttcctcatccagcgctgtgtccaaggacggattgggatttcagtcagtgtcgagcctccatacctcttgcgaatctatcgacatttctctgtctagcggcggagtgcccagccataactcatctaccggtctgatcgcttcatccaaagacgacagtctgacaccttttgtccgaactaatagcgtgaagaccaccctcagtgaatcaccactgtcgtccccagcggccagcccaaaattttgcagatccacccttcctaggaagcaggatagcgacccccatctggataggaatactctacccaagaaggggctgcgctacaccccaacatctcagctgagaacccaagaggacgccaaggagtggctcaggtctcacagtgcgggcggcctccaggacacggccgccaatagcccattctcttctggttctagcgttacgtcgccgagcggcacaaggttcaacttcagccagttggcctctcctactactgtgacgcagatgtcactgagtaatcccaccatgctgcggacgcacagtctcagcaatgccgacgggcagtacgacccctatacagactcccggtttcgtaactcatcaatgagtttagacgagaagtctcgaacaatgagtcggtctggaagttttagggatgggttcgaagaggtccatggcagctctctgtctttggtctctagcacgtcatctgtgtactctacccccgaggagaaatgccagagcgaaattcggaagctgagaagggaattggacgccagccaggagaaggtaagcgcattgacaactcagctcaccgctaacgcccacttggtggctgccttcgaacaaagcctgggtaacatgacgatccgcttacagtccctgaccatgaccgctgagcagaaggattcagaactgaatgagctgcggaaaacaatcgaactcctcaagaaacagaacgctgccgcgcaggctgcgataaacggcgtcattaacacacctgagctcaactgtaagggcaacggtacggcccagtccgcagacctcaggattcgtcgccagcattcaagcgattctgtgagttctattaattctgcgacttctcactcgtccgtcggaagcaatatcgagtccgactcaaagaaaaagaaacggaagaactggctgaggagcagttttaaacaagcatttggaaaaaagaaaagcccaaagagtgcttcctcacatagcgatattgaggagatgactgacagttctcttccaagtagtccgaagctccctcataacggctccactggatcaacccccctccttcgaaactcacactcaaattcattgattagcgagtgcatggacagtgaggctgagacagtgatgcagcttcgcaacgagctgagggacaaggaaatgaagcttactgacattaggctcgaagccctgtcttcagcacaccagctggaccagttaagggaagcaatgaaccgcatgcagtcagaaatcgagaagctgaaagcagagaacgaccgcctcaaatctgaatctcagggatcaggatgttccagagcacccagccaggtgagcatctccgcctccccgcgacaatccatgggcctgagccagcactcgttgaacctgactgagagcacatctctggatatgctgctggacgataccggcgagtgttcggcacgtaaggaggggggtaggcacgtcaagatcgtggtgtcctttcaggaagagatgaagtggaaagaggactcccgcccacatctcttcctgattggttgtatcggcgtatcaggaaaaaccaaatgggatgtcttagacggagtggtgcggcggctgtttaaggagtatatcatccatgttgacccagtgagccagcttggcctgaactccgatagcgtgctaggatacagtattggcgaaattaagcggagcaacaccagcgagacaccagagttgttaccatgtggctacttggttggggagaacacaaccatatccgttacggttaaaggccttgccgagaatagccttgacagccttgtgtttgagagtctgataccaaagccgattcttcagcgctacgtgtcgctgttaatcgagcatcggagaattattctctctggaccaagcggcactgggaagacctacctagccaataggctttcggagtacatcgtccttcgtgaaggtcgcgaactgactgatggggtgattgcgacctttaatgtggaccataaaagcagcaaggagttgcgccagtatctaagcaatctggcagaccagtgcaacagcgagaacaacgccgtggacatgcctcttgtcatcatcctagacaacctacaccatgtgagtagtctcggcgaaatttttaacggactcttgaattgcaagtatcataagtgtccatatatcattggtactatgaatcaggcaacaagttctacccccaacctccaattgcatcataattttagatgggtcctatgcgccaatcacaccgaacctgttaaaggattcttgggaaggtttttaaggaggaaattgatggagacagaaatttcaggtcgagtgcgcaacatggaactggtcaaaataatcgattggataccgaaggtgtggcaccatctgaatcgttttttagaggcccacagcagttcagatgtgaccatcgggccccggctgtttttatcttgccctatcgatgtcgatggatcgcgggtgtggttcactgacttgtggaattacagtattattccttacctcctggaggctgtgcgtgagggactgcaactatatgggcgaagagcaccatgggaggacccagccaagtgggtgatggatacctacccctgggccgctagtccacaacagcatgagtggcctccactgctccaactgaggcctgaggacgtgggatttgatgggtactctatgccgagagagggctccacttccaagcaaatgcccccaagcgatgcagagggagaccccttaatgaatatgctgatgcggcttcaggaggcagctaattatagtagcccccagtcttacgactctgactccaactcaaacagccatcacgacgacatcctggactcatctttagaaagtaccctgtag

SEQ ID NO: 240351 - DNA, 7290 bp, Artificial Sequence
  derived and/or modified sequence
atgcctgccatcctggtggccagcaagatgaagagcggcctgcccaagcctgtgcacagcgctgcccccatcctgcacgtgcccccagcccgggccggcccccagccctgctacctgaagctgggcagcaaggtggaggtgtccaagaccacctaccccagccagatccccctgaagagccaggtgctgcagggcctgcaggagcctgctggggagggcctgcccctgaggaagagcggctctgtggagaatggatttgacacccagatctacacagactgggccaaccactacctggccaagagcggccacaagaggctcatccgggacctgcagcaggatgtgacagatggagtgctgctggcccagatcatccaggtggtggccaatgagaagattgaggacatcaatggctgccccaagaacagaagccagatgattgagaacattgatgcctgcctgaacttcctggccgccaagggcatcaacatccagggcctgtctgctgaggagatcagaaatggaaacctgaaggccatcctgggcctcttcttcagcctgagccgctacaagcagcagcagcagcagccccagaagcagcacctgagcagccccctgcccccagctgtgtcccaggtggccggggcccccagccagtgccaggccggcaccccccagcagcaggtgcctgtgaccccccaggccccctgccagccccaccagcctgccccccaccagcagagcaaggcccaggccgagatgcagagccggctgcccggccccacagcccgggtgtctgctgctggcagcgaggccaagacccggggcggcagcaccacagccaacaacagaagaagccagagcttcaacaactatgacaagagcaagcctgtgaccagccccccacctccacccagcagccatgagaaggagcccctggccagcagcgccagcagccaccctggcatgtctgacaatgccccagccagcctggagagcggcagcagcagcacccccaccaactgcagcaccagcagcgccatcccccagcctggagctgccaccaagccctggaggagcaagagcctgtctgtgaagcacagcgccaccgtgtccatgctgtctgtgaagcccccaggccctgaggccccccggcccaccccagaggccatgaagccagcccccaacaaccagaagtccatgctggagaagctgaagctgttcaacagcaaaggaggcagcaaggccggggagggccctggcagccgggacaccagctgtgagcggctggagaccctgcccagctttgaggagagcgaggagctggaggccgccagcaggatgctgaccaccgtgggccctgccagcagcagccccaagatcgccctgaagggcatcgcccagaggaccttcagccgggccctgaccaacaagaagagcagcctgaagggaaatgagaaggagaaggagaagcagcagcgggagaaggacaaggagaagagcaaggacctggccaagagggcctctgtgacagagcggctggacctgaaggaggagcccaaggaggaccccagcggggctgctgtgcctgagatgcccaagaagagcagcaagatcgccagcttcatccccaagggcggcaagctgaacagcgccaagaaggagcccatggcccccagccacagcggcatccccaagccaggcatgaagtccatgcctgggaagagccccagcgccccagcccccagcaaggagggggagaggagccgcagcggcaagctgagcagcggcctgccccagcagaagccccagctggatggccgccacagcagcagcagcagcagcctggccagcagcgagggcaagggccctgggggcaccaccctgaaccacagcatcagcagccagacagtgtctggctctgtgggcaccacccagaccaccggcagcaacacagtgtctgtgcagctgccccagccccagcagcagtacaaccaccccaacacagccaccgtggcccccttcctgtaccgcagccagacagacacagagggcaatgtgacagctgagagcagcagcactggagtgtctgtggagcccagccacttcaccaagacaggccagcctgccctggaggagctgactggagaagatcctgaggcccggcggctgaggacagtgaagaacattgctgacctgcggcagaacctggaggagaccatgagcagcctgcggggcacccaggtgacccacagcaccctggagaccacctttgacaccaacgtgaccacagagatgagcggccgcagcatcctgagcctgaccggccggcccacccccctgtcctggaggctgggccagagcagcccccggctgcaggccggagatgcccccagcatgggaaatggctacccaccccgggccaatgccagccgcttcatcaacacagagagcggccgctacgtgtacagcgcccccctgcggcggcagctggccagccggggcagctctgtgtgccacgtggatgtgtctgacaaggctggagatgagatggacctggagggcatctccatggatgcccctggctacatgtctgatggagatgtgctgagcaagaacatcagaacagatgacatcaccagcggctacatgacagatggcggcctgggcctgtacacccggcggctgaaccggctgcctgatggcatggctgtggtgcgggagaccctgcagaggaacaccagcctgggcctgggagatgctgacagctgggatgacagcagctctgtgagcagcggcatcagtgacaccatcgacaacctgagcacagatgacatcaacaccagcagcagcatcagcagctatgccaacaccccagccagcagcaggaagaacctggatgtgcagacagatgctgagaagcacagccaggtggagaggaacagcctgtggagcggagatgatgtgaagaagagtgatggcggcagtgacagcggcatcaagatggagcccggcagcaagtggaggaggaaccccagtgatgtgtctgatgaaagtgacaagagcaccagcggcaagaagaaccctgtgatcagccagacaggctcctggaggcggggcatgacagcccaggtgggcatcaccatgcccaggaccaagcccagcgccccagctggggccctgaagaccccaggcaccgggaagacagatgatgccaaggtgtctgagaagggccgcctgagccccaaggccagccaggtgaagaggagccccagtgatgctggccgcagcagtggagatgagagcaagaagcccctgcccagcagcagcaggacccccacagccaatgccaacagctttggcttcaagaagcagagcggcagcgctgctggcctggccatgatcacagccagcggcgtgacagtgaccagccgcagcgccaccctgggcaagatccccaagagcagcgccctggtgagccgctctgctggcaggaagagctccatggatggagcccagaaccaggatgatggctacctggccctgagcagcaggaccaacctgcagtaccgcagcctgccccggcccagcaagagcaacagcagaaatggagctggcaacagaagcagcaccagcagcattgacagcaacatcagcagcaagtctgctggcctgcctgtgcccaagctgcgggagcccagcaagacagccctgggcagcagcctgcccggcctggtgaaccagacagacaaggagaagggcatcagcagtgacaatgaatctgtggccagctgcaacagcgtgaaggtgaacccagctgcccagcctgtgagcagccctgcccagaccagcctgcagcccggggccaagtacccagatgtggccagccccaccctgcggcggctgtttggaggcaagcccaccaagcaggtgcccatcgccacagctgagaacatgaagaacagcgtggtgatcagcaacccccacgccaccatgacccagcagggcaacctggacagccccagcggcagcggcgtgctgagcagcggcagcagcagccccctgtacagcaagaatgtggacctgaaccagagccccctggccagcagccccagcagcgcccacagcgcccccagcaacagcctgacctggggcaccaatgccagcagcagcagcgctgtgtccaaggatggcctgggcttccagagcgtgagcagcctgcacaccagctgtgagagcattgacatcagcctgagcagcggcggcgtgcccagccacaacagcagcacaggcctgattgccagcagcaaggatgacagcctgaccccatttgtgaggaccaacagcgtgaagaccaccctgtctgagagccccctgagcagccctgctgccagccccaagttctgccgcagcaccctgcccaggaagcaggacagcgacccccacctggacaggaacaccctgcccaagaagggcctgcgctacacccccaccagccagctgcggacccaggaggatgccaaggagtggctgcggagccacagcgctgggggcctgcaggacacagctgccaacagccccttcagcagcggcagctctgtgaccagccccagcggcacccgcttcaacttcagccagctggccagccccaccaccgtgacccagatgagcctgagcaaccccaccatgctgcggacccacagcctgagcaatgctgatggccagtatgacccctacacagacagccgcttcaggaacagctccatgagcctggatgagaagagcaggaccatgagccgcagcggcagcttcagagatggctttgaggaggtgcacggcagcagcctgagcctggtgagcagcaccagctctgtgtacagcaccccagaggagaagtgccagagcgagatcaggaagctgcggcgggagctggatgccagccaggagaaggtgtctgccctgaccacccagctgacagccaatgcccacctggtggccgcctttgagcagagcctgggcaacatgaccatccggctgcagagcctgaccatgacagctgagcagaaggacagcgagctgaatgagctgaggaagaccatcgagctgctgaagaagcagaatgctgctgcccaggccgccatcaatggagtcatcaacaccccagagctgaactgcaagggaaatggaacagcccagagcgctgacctgcgcatccggcggcagcacagcagtgacagcgtgagcagcatcaacagcgccaccagccacagctctgtgggcagcaacattgaaagtgacagcaagaagaagaagaggaagaactggctgcggagcagcttcaagcaggccttcggcaagaagaagagccccaagagcgccagcagccacagcgacatcgaggagatgacagacagcagcctgcccagcagccccaagctgccccacaacggcagcacaggcagcacccccctgctgaggaacagccacagcaacagcctcatcagcgagtgcatggacagcgaggccgagaccgtgatgcagctgagaaatgagctgcgggacaaggagatgaagctgacagacatccggctggaggccctgagcagcgcccaccagctggaccagctgcgggaggccatgaacaggatgcagagcgagattgagaagctgaaggcagaaaatgaccggctgaagtctgagagccagggcagcggctgcagccgggcccccagccaggtgtccatcagcgccagcccccggcagagcatgggcctgagccagcacagcctgaacctgacagagagcaccagcctggacatgctgctggatgacacaggagaatgttctgccaggaaggagggcggcagacatgtgaagatcgtggtgtccttccaggaggagatgaagtggaaggaggacagccggccccacctgttcctgattggctgcatcggcgtgtctgggaagaccaagtgggatgtgctggatggagtggtgcggcggctcttcaaggagtacatcatccacgtggaccctgtgtcccagctgggcctgaacagcgacagcgtgctgggctacagcatcggggagatcaagaggagcaacaccagcgagaccccagagctgctgccctgtggctacctggtgggggagaacaccaccatctctgtgacagtgaagggcctggccgagaacagcctggacagcctggtgtttgagagcctcatccccaagcccatcctgcagcgctacgtgtccctgctgattgagcaccggcgcatcatcctgagcggccccagcggcaccgggaagacctacctggccaaccggctgtctgagtacatcgtgctgcgggagggccgggagctgacagatggagtcatcgccaccttcaacgtggaccacaagagcagcaaggagctgcggcagtacctgagcaacctggccgaccagtgcaacagtgaaaataatgctgtggacatgcccctggtgatcatcctggacaacctgcaccacgtgagcagcctgggggagatcttcaacggcctgctgaactgcaagtaccacaagtgcccctacatcatcggcaccatgaaccaggccaccagcagcacccccaacctgcagctgcaccacaacttccgctgggtgctgtgtgccaaccacacagagcctgtgaagggcttcctgggccgcttcctgcggaggaagctgatggagacagagatcagcggccgggtgaggaacatggagctggtgaagatcatcgactggatccccaaggtgtggcaccacctgaaccgcttcctggaggcccacagcagcagtgatgtgaccatcggccccaggctcttcctgagctgccccattgatgtggatggcagccgggtgtggttcacagacctgtggaactacagcatcatcccctacctgctggaggccgtgcgggagggcctgcagctgtatggccggcgggccccctgggaggaccctgccaagtgggtgatggacacctacccctgggccgccagcccccagcagcacgagtggccacccctgctgcagctgcggccagaagatgtgggctttgatggctacagcatgccccgggagggcagcaccagcaagcagatgcccccatctgatgctgagggggaccccctgatgaacatgctgatgaggctgcaggaggccgccaactacagcagcccccagagctatgacagcgacagcaacagcaacagccaccatgatgacatcctggacagcagcctggagagcaccctgtag

SEQ ID NO: 240352 - DNA, 7290 bp, Artificial Sequence
  derived and/or modified sequence
atgcccgccatcctggtggccagcaagatgaagagcggcctgcccaaaccagtccactcagccgctccaattttgcatgtcccaccggccagagctggaccccagccatgttacctgaagctgggctccaaggtcgaggtgtcaaagaccacgtaccccagtcaaatcccgctgaagagccaggtcctgcaaggtttgcaagaacctgccggggaaggcctgcccctcagaaagagcggttctgtggaaaacggctttgacacacagatatacacggattgggctaaccactaccttgctaaatcaggccataagcggcttattagggacttgcagcaggatgtgaccgacggagtgctgctcgcccagatcattcaagtggtggctaacgagaaaatagaggatattaatgggtgtccaaagaaccggagccagatgatcgaaaatatcgatgcatgcctaaatttcctggctgcgaaaggcattaacattcagggcctaagtgccgaagaaatcaggaacggcaacctgaaggcaatcctggggctattcttcagcctgtcgcgctataaacagcagcagcagcaaccgcagaaacagcacctcagctctcccctgccgccagcagtgagccaggtggctggcgcaccttctcagtgccaggccggcaccccccagcagcaagtccccgtgaccccccaggccccttgccagccccaccaaccagccccgcaccagcaatccaaggcacaggctgaaatgcagtcaagactgcccggaccgaccgcacgcgtgtcagctgccggatcagaggccaagacacgaggcggctctactaccgctaacaatagaagaagtcaatcctttaacaattacgataaatccaaacccgttacatcccccccgcctcctccgtcttcccacgagaaggaaccccttgcatcatcagcctccagccacccgggtatgagcgacaacgcccctgcatctctggaatctggctcctcctctacccctaccaattgttcaacatcttcagctattccacagcctggggccgccacaaaaccttggcggagcaagagcctttcagtgaaacattcggcgactgtgtccatgctgtctgtaaaaccacccgggcccgaagcccctcgtcccacacccgaagccatgaagccggcacccaataaccaaaaatccatgctggagaaactgaagctatttaattccaaaggtggttcaaaggccggtgagggccctgggtctcgggacacttcctgtgaacgtctagagacgctgccgtctttcgaagaaagcgaggagttggaagccgcttcaaggatgctgactaccgtggggcctgcatcctcttcccctaagattgccttgaaaggaattgctcagcgtacattcagtagggctcttaccaacaagaaaagctctctgaaaggcaacgagaaggaaaaggagaaacaacaacgcgagaaggacaaggaaaagagtaaagatctcgcaaagagggcctctgtgaccgagagactggatcttaaagaagagcctaaagaagaccctagtggcgcggcagtccccgaaatgcccaagaagtctagcaaaatcgccagctttatacctaaagggggcaagctcaatagtgcaaaaaaggagccgatggctccttcgcactcaggaatccccaaacctgggatgaagagtatgcctggcaagagccccagcgcccccgccccttctaaagaaggagagcggtctcggtcaggtaagctttcaagcggcctgcctcaacagaagccacaactagacggccggcattcctcaagtagttccagtttagcctccagcgagggcaaaggcccaggtggtacaacgctgaaccattctatatcttcccagacagtgagcgggagcgtgggcacgacccagactaccggctccaacactgtgagcgtccaactgccccaaccccagcagcagtacaatcaccccaacactgccaccgtagcaccattcctgtacagatcacagactgatacagaggggaatgtgacggcagagtcgtcttcaacgggagtatcagttgaaccatcccacttcactaaaacaggacagccagccctcgaggagctgaccggagaagacccagaagcgcgacggttgagaacggtcaagaatattgccgacctccgacagaacctggaggagaccatgagcagccttaggggtactcaagtcacgcattcgactctcgaaacaaccttcgataccaacgttactacagagatgagcggacggagtattttaagcctcaccggacgaccaacacctctgtcgtggagactcgggcagagttctcctcgcctgcaggcgggcgatgctccatcaatgggtaacggatatcctccaagagcgaacgcgtcacggtttattaatacagaaagtggcaggtacgtctactcggcccccctgaggcgacaactggcatcccgtggctcttctgtttgtcacgtggacgtaagtgataaagctggcgatgagatggatctggagggaatttctatggacgcacccggatacatgtctgacggcgacgtgctgtctaagaatattcggactgacgacatcaccagcggatacatgacagacggggggctgggactgtacacacgtcggctgaatcgattgccggatggcatggcagtggtgcgagaaacgttacaacgaaatactagtctggggcttggagacgcggattcctgggatgattcctccagtgtgagctccgggatcagcgacaccattgataaccttagcacagacgatattaatacgtcttcttcaattagctcttacgccaacacccccgcttcgtcacgcaaaaacttggatgtccaaaccgatgccgaaaaacactctcaggtggaaagaaactcactgtggagcggcgatgatgtcaaaaagagcgatggtgggagtgacagcggaatcaagatggaacccggtagtaaatggaggcgtaaccctagtgatgtgagcgatgagagcgacaagtccacctccgggaagaagaatccagtcatttcccagacaggaagctggcgtcggggtatgacagcacaggttggaatcacaatgcctcgaactaagccgtctgcaccagccggggccctgaaaactccaggaacgggaaaaactgacgatgctaaagtttcggaaaaaggaaggctcagcccgaaggctagtcaggtcaaaagaagcccctctgacgccgggcggtcaagcggcgatgagagcaaaaagccgctcccctcaagctccaggacacctaccgctaatgctaactcttttggttttaagaagcagtctggaagcgcagcaggactggcgatgatcactgcttccggggttacagtaacgtctagatcggccacactcggtaaaatacctaaaagcagtgccctggtgagtaggagcgcaggccgcaagtctagcatggacggcgcccagaatcaggacgatggttatctggccttatccagtaggaccaatcttcagtatcgctccctacccaggccatctaaaagtaactctcggaatggagctgggaacaggagtagcacctctagcattgatagtaacatcagttcaaaaagcgcaggcctgcctgtccccaaattgcgagagccgtccaagaccgcgttgggaagctcactgcccggactcgttaaccagaccgataaagaaaagggcatctcgtcagacaacgaatccgtggcctcctgtaacagcgtgaaagtcaaccctgcagcccaacctgtgtcaagtcctgcacagaccagcttgcagccaggggcgaagtacccggacgtagcatctcccaccctgagaagactgttcggggggaagcctaccaagcaggtccctattgcaaccgctgaaaatatgaagaactctgtggtaatatcaaacccacacgccacaatgacacaacaaggaaatctggatagcccctcaggtagcggtgtgctctcctcaggctcatcctcaccactgtattccaaaaatgtcgacctgaaccagagccccctcgcctcctccccttcttccgcccatagcgccccgagcaatagcctcacttgggggaccaacgcgtccagcagcagcgccgtttccaaagatggactgggcttccaatcagtgagtagtcttcacacctcttgcgaatcaatcgacattagcctgtcctccggaggagttccgtcacacaacagctccacaggcctgatcgccagcagcaaagacgactccctgacgcctttcgttcggaccaattctgtaaaaactactctgtctgaatcccccctgagctctccagccgcctctcctaaattttgtcggtccacgcttcccaggaagcaagattctgacccccacttagataggaacaccctgcctaaaaaggggctgcggtatacccctacctcccagctgaggacacaggaagatgccaaggagtggctgcgcagccattccgcgggcggattacaggacacagccgctaactccccgttttctagcggcagctctgtaacctctccttcagggactagattcaactttagccagttggcgagtcctaccactgttactcagatgagcctgtcaaatccgacaatgctgcgcacccactcgttgagcaatgcagatggccagtatgatccatacaccgactcgaggtttcgtaactcttccatgagcctggacgaaaagagtaggacaatgtcgaggagtggcagttttagagacggtttcgaggaggtgcatggctcaagcttgtcactggtgagttccacttcctcagtgtactctacacctgaggaaaagtgccagtccgagatccgaaaactgcggcgggagctggacgctagccaggagaaagtttcagccctcaccacacagcttacggcaaacgcgcatctggtggccgctttcgaacagtcacttgggaacatgacaatcaggttgcaatccttgactatgactgctgagcaaaaggatagcgagctgaatgaattacgaaagaccatagaactattaaagaagcagaacgcagccgcgcaggcggctatcaatggcgtgattaatacccctgaattaaactgtaaggggaacggcactgcgcagtcagctgatcttaggatacggagacagcatagttctgacagcgttagctctattaattcagcaacttctcactctagtgtgggttcaaacattgaaagtgattccaagaaaaagaagcgaaaaaactggttaagaagcagtttcaagcaggcattcggtaagaagaaaagcccaaagtctgcctcaagtcactcagatatcgaggaaatgactgactcgagcctgcccagtagcccaaagctcccccacaacggctcaacaggtagcaccccccttctacggaatagtcactcgaactcactgatttcagaatgcatggatagcgaggcagagactgtcatgcagctgcgtaatgaactgcgtgataaagaaatgaaattgaccgatatccgcttagaagctctgtcgtcggcacaccagctcgatcaattgagggaagccatgaacagaatgcaaagtgaaattgagaaactgaaagctgagaacgacagactgaagtccgagagtcagggctcgggctgttcgagagctcctagccaggttagtatttctgcctctcctcggcagagcatgggcctctcccagcattctcttaatctgactgaatcgacttcactcgatatgttactcgacgacaccggtgagtgtagcgcacgtaaggaagggggaaggcatgttaaaatcgttgtgagctttcaggaggaaatgaagtggaaggaggattccagaccccacctgttcctgatcgggtgcatcggggtttccggaaagaccaagtgggatgtcctagacggcgtggttcggagactgttcaaggagtacattatacatgtcgatccggtgtcacaactgggtctgaattcggacagcgtgcttggttattcaattggggagataaaaaggtccaacacctcagaaacccctgagctactcccttgtggctatttagttggcgaaaacacaaccatctccgtgactgtgaagggcttggctgagaactctctggatagcctggtatttgagagcctgatcccaaaacctatcctccagcggtacgtcagcctgcttattgagcacagacggattattctttccggcccatctggaactggcaagacgtaccttgccaaccgtctgagtgagtacatcgtgttacgtgaggggcgtgagctgaccgatggggtgatcgccacatttaacgtggatcataaatctagtaaagagctgcgccagtatctgtctaatctcgccgaccagtgtaactccgagaacaatgccgtggacatgccgctcgtcattatcctggataatctacaccacgtgtcttccctgggagaaatcttcaatgggttactgaactgcaaataccataaatgcccctacattatcggtacaatgaaccaggcaacctctagcacgcctaaccttcagcttcatcataatttcagatgggtactctgcgccaatcacactgaacctgtcaaaggctttctcggacgatttctgagacgaaaattgatggagacagagatctctgggcgagtacggaacatggagctcgtcaaaattatcgattggatacccaaagtttggcaccacctgaaccggtttctggaagcacacagctcttcagacgtgaccatcggaccgcggctcttcctatcatgtcccatcgacgtcgacgggtcccgcgtctggtttacagacctctggaactattccatcatcccgtacctgctcgaggccgtgagagaaggactccagctctacggaaggcgtgctccctgggaagaccccgcgaagtgggtgatggatacctatccatgggcagcttccccacagcagcacgagtggccacccctcctgcagctgagaccagaagatgttggttttgatggctactccatgccacgggaggggtcaactagcaagcaaatgcccccttccgacgccgaaggtgacccgttaatgaacatgctgatgcgcttgcaggaagctgccaactattcttcacctcagtcctacgactcggatagcaattccaattcacaccatgacgacatactagatagcagtctagaaagtaccctgtag

SEQ ID NO: 240353 - DNA, 10960 bp, Artificial Sequence
  derived and/or modified sequence
aggaggaaatttgcaagaggcggcagcccctgagcgcccagagctcttgaaaggccacccaggagaggtgtgagacccggcggcagcatccgtccaggtgggacccgctgagcgccgtggccagtcccccattcccatcccggcaccccaaaggcgcgctcgcccgattgcttcgagttccccgacctggggattttttttttagccgctggtggtgggcgcctcgtgggctaaggcccggcgcctgctctgctacccgcgctgcctttagcggtcgcccccgccgccgctgccagggacgtgctgggaaagcccaagccccgggagaagatgccggccatcctggtcgcctccaaaatgaagtcgggactgcccaaacccgtgcacagcgccgcgcccatcctgcacgtgcccccggcccgggcgggcccccagccctgctacctgaagttgggaagcaaggtggaggtgagcaagaccacctatcctagccagatccccctgaaatcgcaggtgctgcaggggctgcaggagccagcgggggaggggctcccgctgcggaagagcggctcggtggaaaacgggttcgatacccagatctacacagactgggccaatcattacctagccaaatccggccacaagcgtctcatcagggatctccagcaagatgtgacagatggcgtcctcctggcccagattatccaggttgtggcaaatgaaaagattgaagacatcaatggctgtccgaagaacagatcccaaatgattgaaaacatagatgcctgcttgaatttcctggcagctaagggaataaacatccaggggctgtctgcagaagagatcaggaatggaaacctcaaggccattctaggcctcttcttcagcctctcccgatacaagcagcagcagcagcagccccagaagcagcacctctcctcacctctgccgcccgccgtatcccaggtggccggggccccctcccagtgccaggctggcacccctcagcagcaggtgccagtcactccccaagccccgtgccagcctcaccagccagcgccacatcagcagtcaaaagcacaagctgaaatgcagtccagacttccaggtcctaccgcgagggtatccgctgcaggcagcgaggccaaaacacgcggagggtcaactactgctaacaaccgacgcagccagagctttaacaactatgataaatccaaaccagtcacctccccacccccaccgccaagcagccacgagaaagagcctttggcaagttcagcctcctcccaccccggaatgagtgacaatgcacctgcttccttggagagcggcagcagctccacccctactaattgcagtacctcctcggccatcccgcagcccggtgcagccaccaagccttggcgcagcaaatccctcagcgtgaagcacagtgccacggtatccatgctctcggtcaagcctcctgggcctgaggcccccaggcccacacctgaagccatgaagccggcccccaacaatcagaagtccatgctggaaaagctgaaacttttcaacagtaaagggggctcaaaggcaggtgaggggccggggtcccgggacacaagctgtgagcggctggagactctgcccagcttcgaagagagcgaggagctggaggccgccagtcgcatgctcaccaccgtgggccctgcttccagcagccccaagattgcactcaagggcattgcccagaggacttttagccgggcactgaccaacaagaagagttctctgaaaggcaatgagaaagagaaggagaaacaacagcgggagaaggataaggagaaaagcaaggaccttgccaagagagcctctgtgacggagaggctggacctcaaggaggagccaaaagaagaccccagtggagcagctgtgcccgagatgccaaaaaagtcctccaagattgccagcttcatccccaaaggggggaagctcaacagtgccaagaaggagcccatggccccttcccacagtggaataccaaaaccaggaatgaaaagcatgcccgggaaatccccaagtgccccagcgccttccaaggaaggggagcggagccggagtgggaagctgagctcaggactcccccagcagaagccccagctggacggcagacactccagttcctcttccagcctggcgtcctcagaaggaaaaggcccaggagggaccaccctgaaccacagcatcagcagccagactgtcagtgggtctgtcgggaccacccagaccacaggaagcaataccgtcagtgttcagctacctcagccccagcagcaatacaaccatcccaacactgccacggttgcacctttcctgtacaggtctcagacggacactgaagggaatgttactgccgagtcaagctcaacaggtgtgagcgtggagcccagccacttcaccaagactggacagcctgctctggaagaactcactggggaagatcctgaggctcggcggctgcggacagtgaagaacatcgctgatctgcggcagaatttggaggaaaccatgtccagtttaaggggaactcaggttacacacagcacattggaaaccacgtttgacaccaatgtcaccacggagatgagtggccgtagcatactcagcttgacagggaggcccacacctctgtcctggagactgggccagtccagccctcggctccaagcaggagacgccccctcaatgggcaatgggtatccccctcgagccaacgccagcaggttcatcaacactgagtcaggtcgctatgtgtactccgcccctctgagaaggcagctggcctcccggggcagtagtgtctgccatgtggacgtctcagacaaggcaggagatgagatggacctggaaggcatcagcatggatgcccccggctacatgagcgacggggatgttctgagcaagaacatccggaccgatgacattacaagcggatacatgactgatggtggacttggcctctatacccgtcgcctgaaccggctccctgatgggatggctgtggtacgggagaccctgcaacgaaatacctccctgggcctcggagacgctgacagctgggacgacagcagctccgtcagcagcggcatcagcgacaccatagacaacctcagcactgatgacatcaacaccagctcctccatcagctcttatgccaacacacctgcctcctctcgaaaaaacctggatgtgcagactgatgctgagaagcactcacaggtggagaggaattccctgtggtctggtgatgatgtcaagaaatcagacggaggctcagacagcggcataaaaatggagccaggttccaagtggaggcggaatccttctgatgtgtctgacgagtccgacaaaagcacgtcgggcaagaagaatcctgtcatctcccagacaggctcatggcggcgaggcatgacagctcaggtgggcatcaccatgccaaggacgaagccttcagccccggcaggcgcactgaagaccccaggaactggaaaaacagacgacgcaaaggtgtctgagaaaggaaggctttctcctaaagcctcccaggtgaagcgctccccatcagatgcaggccggagcagtggtgacgaatccaaaaagcccctccccagcagctctaggacacctactgccaatgccaacagctttgggttcaagaagcagagtggttccgccgccggcctggccatgatcacagccagcggggtgactgtcaccagcaggtcagccacactgggcaaaatcccaaagtcatctgcactcgtcagtcggtctgctggtcggaagtcaagtatggatggggctcagaatcaggatgacgggtatctagccctaagctcccggacaaaccttcagtaccggagtttgccgaggcccagtaagtccaacagccggaacggggctgggaacaggtctagcaccagcagcatagattccaacattagcagcaagtccgcaggcctgccagtgcccaaactgagggagccttccaaaacagccctaggcagctctctaccaggtctggtcaaccaaacagacaaggagaaaggcatctcatcagacaacgagagtgtggcttcctgtaactcggtgaaagtgaatccggcagcccagcctgtgtccagtccggctcagaccagtctccagcctggagccaagtacccagatgtggcctctcccacactccgcagactctttggtgggaagcctaccaagcaagtgcccatcgccacagctgaaaacatgaaaaattcggtggtcatctccaatcctcatgccaccatgactcagcaaggtaacctagactccccgtcaggcagtggcgtcctgagcagtgggagcagcagtcctctctacagcaagaatgtggacctcaaccagtctccgctagcctccagccccagctcagcccactcggccccttccaacagcctcacctggggcaccaacgccagcagctcctccgcagttagcaaggatggcctgggctttcagtctgtcagcagcctccacaccagctgtgagtccatcgacatctccctcagcagtggaggggtccccagccacaattcttccactggcctcatcgcctcctccaaggacgactccttgactccctttgtcagaactaacagtgtgaagaccacactgtcagaaagccctctctcttcccctgctgctagccctaagttctgcagaagtactctgcccaggaaacaggacagtgacccgcaccttgataggaacactttgcctaagaaaggactcaggtatactcccacctcccagcttcgcacgcaagaagatgcaaaagaatggttacggtcccattctgcaggaggccttcaggacaccgctgccaattcccccttttcctctggctccagcgtgacttctccctccggaacaagattcaacttttcccagcttgcgagtcccaccactgtcacccagatgagcttgtccaacccgaccatgctgaggactcacagcctctccaatgctgatgggcagtatgatccatacactgacagccgcttccggaatagctccatgtccctggatgagaagagcagaaccatgagccgttcaggctcattccgggatgggtttgaagaagttcatggatcctcactctccttggtttccagcacatcgtcagtttattctacaccagaagaaaaatgccagtcagagattcgcaagctgcggcgggaactggatgcctcccaggagaaagtttcagctttgaccacccagctgacagcaaatgctcaccttgtggcagcctttgaacagagtcttggtaacatgacaatcaggctccagagtctgaccatgacagctgagcagaaggactcagaactgaatgagttaagaaaaaccattgagctgctaaagaaacagaacgcagctgcccaggctgccattaatggagtaattaacacacctgagctcaactgcaaaggaaacggcactgcccagtctgcagacctccgcatccgcaggcagcactcctcagacagcgtctccagcatcaacagtgccaccagccactccagcgtgggcagcaacatagagagtgactcaaagaagaagaagcggaagaactggttacgcagctccttcaagcaagctttcgggaagaagaagtccccaaaatctgcgtcctctcattcagatattgaggagatgacggattcttctttgccttcctcaccaaagttaccgcacaatgggtccacaggttccaccccactgctgaggaattctcactccaactctctaatttcagaatgcatggatagtgaagctgagaccgtcatgcagctccgaaatgagttaagagacaaggagatgaagctgacggatatccgcttagaagctctcagttctgcccaccagctggaccagctccgggaggccatgaacaggatgcagagtgaaatagagaagctgaaagctgagaatgatcggctgaagtcagagtctcaaggcagtggctgcagccgggctccttcccaagtgtccatctctgcctccccgaggcagtccatgggcctctcccagcacagcttgaacctcactgagtcaaccagcctggacatgttgctggatgacactggtgaatgctcggctcggaaggaaggaggcaggcatgttaagatagttgtcagctttcaggaggaaatgaagtggaaggaggattccagaccacatctctttcttattggctgcattggagttagtggcaagacgaagtgggatgtgctcgatggggtggttagacggctgttcaaagaatacatcattcatgtcgacccagtgagtcagctagggctgaattcagacagcgttcttggctacagcattggagaaatcaagcgcagcaacacttccgaaacaccggagctgcttccttgtggctatctggttggagagaacacgaccatctcagtgactgtgaaagggctcgcagaaaacagcctggactcactggtgtttgagtccttgattcccaagcccatcctgcagcgctacgtctccctcctgatagagcaccgtcggatcattctctctggccccagcggcactgggaaaacctacctggccaaccggctgtctgagtatatagtgcttcgagagggacgggagttgacagacggggttatcgccacctttaacgtggaccataagtccagcaaggaattgcgccagtacctgtccaaccttgctgaccagtgcaacagtgagaacaatgctgtggacatgcccctcgtcatcatcctggacaacctacaccacgtgagctctctgggagagatcttcaatgggctgctcaactgcaagtaccacaaatgcccttacataattggcacaatgaaccaggctacctcttcgactcccaacctgcagcttcaccataacttcagatgggtgctttgtgccaaccacacggagcctgtgaagggtttccttggccgattcctgaggaggaagctcatggaaacagagatcagtgggcgggtgcgcaatatggagctggtaaaaatcattgactggattcccaaggtctggcatcacctcaaccgcttcctggaggctcacagttcctcggacgtcaccatcggcccccggctcttcctgtcatgccccatcgatgtggacggctcgagagtgtggttcaccgacttgtggaactattccattatcccctatctcctggaagccgtcagagaaggactccagctctatggaaggcgcgccccctgggaggatcctgccaagtgggtgatggacacatatccatgggcagccagcccacaacagcacgagtggcctcccctgctgcagttacggcctgaggatgtcggcttcgacggctactccatgcctcgggagggatcgacaagcaagcagatgccccccagtgatgctgaaggtgacccgctgatgaacatgctgatgaggctgcaggaggcagccaactactccagcccccagagctatgacagcgactccaacagcaacagccatcacgatgacatcttggactcctctttggagtccactctgtgacaggggcccggagcccagcgccctcctcttctcctcaccgcattccacctgcatcccccacatcaccctgaagatgacttcctgagccagcccccagccacagccttagagctgcgggaacaccgagaccccccgtccttcagcctcgacctgggtgcaggcatcccgggccagctgcctgcggaccgcttccttccacagcgagaactgcactaccttctgttgtactttaattattgttttgccttgttgctgtgacctccctaagacactgaagatacttctcgggaaaggatcatcgccgttgaaatgaaaagagagacagagagaaaaaaaaaaagagaacccacatgaagctctgaaaccaaacagcatcctgccatgagcttcccagagacagaagagactggagcaaagtcggaaacacagagaagcacggcttcccctcagcacagaccctccagactgggtctcagagccgtgccacccaccctcccacacagccggccacagggagaactggtgctaaccagggtgcttgctttggtcacgttcaacgcactacagagctacgacacagggaaaccttaggagcaaataaaccgtgctttcatgttttttaaatggtgctttccttacccgagaggtattttgcctgttccaatcaaaccaccccattcaggtccatcagcctctgattaatatccgtgagagtgagtgacggagtgagagtgtgagcgagtggatgtggctgtcagtgcagaacagcatgtgtctctttccttctgatatatgaatgaatcaggtttttttttttttttttctgcaaacactgtgtatagtgagacttgttctactttggagaacaggttaccttttgaaaatgaggttgagtttcttcctttctgatgcattgatttttgaagatttttttttcccccttcccctcttggtcagaatcaatcctttggtgaaagtaagaaccgcaggagttgagttttggtttggtcctgctcagttttggtttttagttgtccatcctcacagtcctacacactcgcctcctcctgctagggctgggggtatctgtgtcctttaaaatggatgaggacctggtcctcgacatgtgggtgagccatggaccttgccttcccttctcgtccttgagggtttagaacacacaccaacacctccagcgtccccgccccagcttccggtggggtgatgcggtcaccctgcaaaagacttgcactttcctcagaaccaacatgacgcagctcaataagggtgagggtcactccctcccagaagccccgtctggacgagccttgcctgacctcttcggtgctgaccttcccaaagtgatgccttactggttttgtactaactgtgttcattttacataagtgtcgtgcctgcctggggtttgttttttttgtcattgttttccccattgaaacaaacagggctaaaaagtcatctgttcattaggagaactcaagttgctgtgacttttctcatccaaaagactcatttgtgtggatgcgtgaccatgggaaaaagaaaaaaaaaaagatccattttttaggttcttttcggtctccagctgacaacccaactggacaatgatctgtctggtgcaggagaaggcaaaagtttctacaagtctacatgaccttgctgatacttgttctaatagaaacccagtctgctgtgtcttcaacatactggtattttcattacaaagtatggtaaatttttgagttgtttgtttctgttttgtaaagagaatccttattggacaccagtgaaggtgtctctgttttaatgatcagggtttttattccatcttttgcatttcttctatttctgaaggtttgtctcttggcatctttttttagtttcttaccataagagtttgacccgaaactgctcacttcacattggatgacaccatgttcttcctctttgaaaagaaaaggggaatgtgtcccactagtgaaaggaaaacttttcaacactatccctgctttagtctcagcaaactcagactattctgcttagccttcattagtcatctgggtgtgagtgtgtcttgttctgtttttctttttaataaaacttttaaaccatatatttagcctgtgaccaggggggccaaaccctaagatttctggtaaacctgaagggtggccctcctcagacaatttatctcccagcaatgaccctactacactcgcgtactgtgaatttgggaggaggtaaagttgacttctcctcgtgggcagttttccaatcaccttgtgagtagacacctgccaatattgtttgaaacctttttttaatatgacatcctctcttgtcattctcttctcccctttcccacagacttccctcctgggtccaggttcagaaccaagacttctgtacctagtgctgcctgattggtgaacattgacttcaagtagcatagcccttgtgtgactcacaactccgtgtccttcctaaagtttcgggaagcagggttgtctaatatgcacatttcttattttggtcatatttttactttagtgtcactcaccttttacaaagtgactttgtactcatttagggctctatcggaaatgcttccattttgccttttctacagttaggccaattttgaaatatataaattctatgcaacatttatgttgagttaccaatggaagccaaaagttctcttcccaaactgccaagaatgatacaggccataattgaaatgggaataccttttaagtttcattaggggtggggtgggagtgggacaggaacaagacttgcctagatctttgttgtatcttggggacttttactttgttgtttgatgcttaaacttcaaaattctctgtattcaaatttgattgtggcgaatctacttcaaaaaggaaaaataatccaactttgtggatattaaatggaaggtttgctgttttgatctagttgtttccagtggagcagttttatgaaatatgttctataagatgtacattttttcattgtaacatagaaattgtaaataattgattaaagtgctgcattttgatgaattttttctagccatttttaaagagaaaactaggaattgagtattttgtgtacggtatgtttccatcctccctccccttcctcctcccctcctctctctctcttcctacctatttaattttcatttgtcatgaggtttttggatttgccaatgatctgctggacatcatgccccatgtcatagagaataaagctgatgattgtaccagtcttaaattattcatgattcaataaaattgatgcttatttattc

SEQ ID NO: 240354 - DNA, 7289 bp, Artificial Sequence
  derived and/or modified sequence
atgcccgctattcttgtggcaagcaagatgaagtccgggctgcctaagccagtgcattcagccgctcccatcctccacgtgcctccagcccgagccggacctcagccctgttatcttaagctgggcagcaaagttgaggtgtccaagacgacttatccttctcagatcccccttaaatcgcaagtgctgcaaggtttacaggaacctgctggagagggtctgcctctccgtaaatccggaagcgtcgagaacggcttcgacacccaaatctatacagactgggctaaccactacctagcaaaaagtggccacaagcgtcttattcgggatctgcaacaggacgttaccgatggagtgctcctcgcacagattatccaggtggtagccaacgagaagattgaggacatcaatggctgtcctaagaataggtcccagatgattgaaaatatcgatgcatgtctgaatttccttgccgctaaaggaatcaatatccaaggattgtccgctgaagaaatacgaaacggtaaccttaaagctattttaggccttttcttttccctcagcagatacaagcaacaacagcagcagccacagaaacagcatctcagctcacccctgccaccagcagtttcgcaggtagccggagcccctagtcagtgccaggcaggcaccccccaacaacaagtacctgttacacctcaggccccttgtcagccacatcagccagcccctcaccaacaaagcaaagcacaggcagagatgcagtcccgcttgccaggaccgaccgccagggtgtctgctgccggatccgaggctaaaaccagaggcggatccactacggcaaacaatcggcgatcccagagctttaataattatgacaagtctaagcccgttactagtcctccccctcctccttcttcccacgaaaaagagccgctagcctcaagcgctagcagccaccctggcatgagcgacaacgctcccgcttcattagagtcgggatcaagctcaacaccaaccaattgctctaccagcagcgccattccgcagcccggagcagctaccaagccatggcgatccaagtcgctttcggtgaaacactcagctactgtgagtatgctgagtgttaaacctccaggaccagaagcacccaggcccactcccgaggccatgaaaccggctcctaacaatcaaaagtcaatgctggagaaactaaagctgttcaactctaaaggcggatctaaagctggtgaaggtcctggaagccgtgacactagctgcgagagactggagacgctgcctagtttcgaggagagcgaggagttggaggcagccagtcgcatgctaacaacagtgggccctgcaagctcgtctcctaaaatcgctttgaaggggatcgcccagcgaaccttttcgcgtgcactcaccaacaagaagagctcattaaaaggcaatgaaaaagagaaagaaaagcagcagagggaaaaagacaaagagaaatcgaaagatctagccaaacgggcttccgtgacagagcgcctcgacctcaaagaagagccaaaggaagatccatcgggcgcagccgtaccagaaatgccaaaaaagagcagcaaaattgcaagtttcattcctaaagggggaaaacttaactctgcaaagaaggagccaatggctccctcacacagtggcatcccgaagcctggcatgaaatcaatgcctggaaagtctccctctgcgccagctccgagcaaggagggtgagagatcgagatctggcaagctcagttcagggctgcctcagcagaaacctcagctggacggacgacactcttcatctagttcctccctggcttcatcagaaggcaagggacccggaggaacaaccctaaatcatagcatctcctctcaaacagtgtctggaagtgtgggcactactcaaactactggtagcaacacggtttctgtgcaactgccccagccacagcagcagtataatcaccccaacacggcaactgtggctccctttctctaccgatcacagactgacactgagggcaatgtgaccgctgaatcatccagtaccggcgtcagtgtcgagcccagtcactttaccaagacgggacagccagccctcgaggaactgacaggcgaagaccccgaggccagaaggctccgcaccgtgaagaacattgcagatctgcgccaaaacctcgaggaaaccatgagctccctgcgaggaacacaggtgacacatagtacactagagactacttttgataccaatgtcactaccgagatgagcggtcggtcaatcctgtctttgacgggccgacccaccccactgtcctggcgtctgggccagtcatcccccaggcttcaggccggagacgctccctccatgggcaatggctatccgcctcgcgctaacgcctccagattcattaacacagaaagcgggcgttatgtctactcagctccactacggaggcaattggcaagtagaggcagctctgtgtgtcatgtggacgtgtccgacaaggctggagatgagatggacctggaaggcattagcatggatgccccaggttacatgagtgacggcgacgtgctttctaaaaatatacgtaccgatgacatcacgagtggatacatgacggacggtggattgggcctatataccagaaggctgaatcggctgcctgatggcatggcggtcgtccgggaaaccctccagcgcaacaccagtctggggcttggcgatgccgactcctgggacgatagcagcagtgtttcgtccggtatttctgacaccattgacaacctgagcaccgacgatatcaataccagctcatccatcagtagttacgcaaatacaccagcttcgagtagaaagaatctcgatgtacaaactgatgcggaaaagcatagtcaggtggagaggaattccctgtggagcggagatgatgtgaagaagagtgatgggggttccgactctggcatcaagatggagccaggctctaaatggcgcagaaatcccagtgatgtaagcgatgagagtgacaaatcaacgtccgggaaaaaaaaccccgtgatttcgcagactgggagctggagacgagggatgacagctcaggtaggtatcacaatgcccaggaccaagccctccgcacccgctggggcattgaagacgcctggcaccggcaaaaccgatgatgctaaggtttccgagaagggtaggctgagtcccaaagcgagccaggtgaaaaggagcccgtctgacgctggccgttctagtggagatgaatcaaagaaaccccttccttccagctctaggacccccaccgcaaacgctaatagctttggtttcaagaagcagtcggggtcggcggcagggctcgcaatgattacagccagtggtgtgaccgtaacatcacgctccgcaacactggggaagattcccaagtcgagcgctctggtctcaagatctgccggaagaaagagcagtatggacggcgctcaaaatcaggacgatgggtatctcgccctaagttcgagaaccaatctgcagtacaggagcctaccacgccctagcaagtccaactcaaggaacggcgcaggtaacaggagctccacgtcgtccattgacagtaacatctccagcaaaagcgcgggactcccagtgccgaagctcagggaaccatccaagacagcgcttggatctagcttgcctggcctggtgaaccagactgataaagagaaagggatctcatcagacaatgagtctgtggcctcctgcaactctgtgaaagtgaatcctgccgctcagcctgtgtcctcccctgcccagacttctctacagcccggtgcgaaatacccagatgttgcctctcctaccctccggagactgtttggcggtaaacctacaaaacaggtgcccatcgcaacggctgaaaacatgaagaactcagtcgtgataagtaatcctcacgcgacaatgacccaacagggcaacctggacagccctagcgggtccggggtgctcagcagcggcagctcttccccactttacagcaaaaacgtcgatttaaaccagtccccactggcctcctcgccatctagcgctcatagcgcgcctagcaattccctgacttgggggaccaatgcatcttcttcatccgctgtttctaaagacgggctcggatttcagagtgtgtccagtctacacacttcatgtgaatccatagatatctctctgtcctcaggcggagttccctctcacaatagctccacaggactgatcgcctctagcaaggatgatagcctcacccctttcgtacgtaccaactctgtgaagaccacattatccgagagtccgttgtcatccccagcggcaagccctaagttttgccgtagtacactgcctcgcaagcaggacagtgacccgcatctggatcgcaataccctgcccaagaaaggtctgcggtacaccccaactagccagctccgtacccaagaggatgctaaggaatggctcaggagccactccgcaggaggattgcaggacactgccgctaactctcccttttcatccggtagcagcgtcacctccccatcaggaacacgcttcaatttcagccaactggctagccctacaaccgtgacccaaatgagcctctctaatcctaccatgttacggacgcactctctctctaacgccgacgggcaatacgacccctatactgacagccggttcaggaattcatcaatgtctcttgatgaaaagtcgagaacgatgagtcggtcaggctcctttagagacggctttgaggaggtgcatggatccagcctgtctctggtgtcatccacctcctcggtctacagcacacctgaggagaaatgccagtcagagatcagaaaactgcgtcgggagttggacgccagccaggaaaaggtttcggccttgaccactcagctgacagccaatgcccacctggtcgccgctttcgagcagtctttaggtaacatgacgattagacttcagagcctgacaatgacagcggagcagaaagattccgaattaaatgagctacgcaagacaattgagctgctgaagaagcaaaacgcagccgcacaggccgcaataaacggggttataaatacgcccgagctgaattgcaaaggtaacgggacggcccagtctgcggatctgcgaatccggcgtcagcattcttccgattctgtgtccagcatcaattccgcaactagccactcatctgttggtagtaatatcgaatcggacagtaaaaagaaaaagagaaagaactggctgagatctagctttaaacaggctttcgggaaaaagaagtcccccaagagcgcctcctctcacagcgacatcgaagaaatgacggattcctctctaccgtcctccccgaaactgcctcacaatggatccacgggtagtactcccctgctcagaaatagccacagcaactccctgatcagtgagtgcatggactctgaggcagaaactgtcatgcagctgaggaacgaactgcgagacaaggagatgaaactgactgatatccggctggaggctctctcgtccgcccaccagctggaccagctgcgagaggctatgaacaggatgcagtcagaaattgaaaagctgaaggccgaaaacgaccgacttaaatcagagagtcaaggcagtggctgctcaagagctccttctcaagttagcattagcgcctccccaaggcagagcatgggtctcagccagcactccctcaatctgaccgagagcactagcctggacatgttactagacgatacaggagaatgttcagcccgaaaggagggagggaggcatgtgaaaatcgtggtgtcattccaggaagaaatgaaatggaaagaggactctcgccctcacctgtttctgataggatgcatcggtgtttctgggaaaaccaagtgggacgttctagatggagtcgtccgcaggctatttaaggagtatatcattcatgtagacccggtctcgcagctaggtctgaattccgacagtgtcctgggctacagcatcggagagattaagcggtccaacacatcagagacaccggagctcctcccctgtggttacctggtgggggaaaacaccacaatcagcgtgacagtgaaaggcctggccgagaattcactggactcccttgtgtttgaatccttgatcccgaagccaatcctccagaggtatgtgagtcttctgatcgagcatagacgcatcatactgagtgggccatccggtaccgggaagacttacctggcaaataggctgtcagaatacattgttctgcgtgagggccgagaactgactgatggggtgatagcaaccttcaatgtagatcacaaaagctccaaggagcttagacaatatcttagtaacctcgctgaccagtgcaattccgagaacaatgccgttgatatgcccctggtcataattctggacaacctgcaccacgtatcgtctctgggcgagatctttaacgggctgttgaactgcaaatatcataagtgcccatatattatagggactatgaatcaggcaacatccagcacgccaaacttacagcttcaccataactttcgatgggtgctctgcgccaaccacactgaaccagtcaagggcttcctcggtaggttcctacgacgcaagctcatggagaccgaaatttctggacgggtgcgaaatatggaattggttaagatcatagactggatacccaaagtctggcaccaccttaaccggttcctggaggcacactcatcgagcgacgttacaattgggcctcgactctttttgtcctgtcccatcgacgtggatggctctagggtatggttcacagacctgtggaattacagtatcattccctatctcctcgaagccgttagggagggtctgcagctgtacggccgaagggcaccctgggaggatcccgcaaaatgggtcatggacacttacccttgggcggctagccctcagcagcacgaatggcctcccttattacagttgcgtccagaggacgtaggatttgatggatactcaatgccccgagaaggctccactagcaaacagatgcctccttcagacgcggagggtgatccattgatgaatatgctaatgcgccttcaggaggctgcaaattactcgagcccccagtcctatgactcagattccaattccaatagccatcacgacgacatcctagatagttcactcgaaagtactctgta

SEQ ID NO: 240355 - DNA, 7290 bp, Artificial Sequence
  derived and/or modified sequence
atgcccgccatcctggtggccagcaagatgaagagcggcctgcccaagcccgtgcacagcgccgcccccatcctgcacgtgccccccgccagagccggcccccagccctgctacctgaagctgggcagcaaggtggaggtgagcaagaccacctaccccagccagatccccctgaagagccaggtgctgcagggcctgcaggagcccgccggcgagggcctgcccctgagaaagagcggcagcgtggagaacggcttcgacacccagatctacaccgactgggccaaccactacctggccaagagcggccacaagagactgatcagagacctgcagcaggacgtgaccgacggcgtgctgctggcccagatcatccaggtggtggccaacgagaagatcgaggacatcaacggctgccccaagaacagaagccagatgatcgagaacatcgacgcctgcctgaacttcctggccgccaagggcatcaacatccagggcctgagcgccgaggagatcagaaacggcaacctgaaggccatcctgggcctgttcttcagcctgagcagatacaagcagcagcagcagcagccccagaagcagcacctgagcagccccctgccccccgccgtgagccaggtggccggcgcccccagccagtgccaggccggcaccccccagcagcaggtgcccgtgaccccccaggccccctgccagccccaccagcccgccccccaccagcagagcaaggcccaggccgagatgcagagcagactgcccggccccaccgccagagtgagcgccgccggcagcgaggccaagaccagaggcggcagcaccaccgccaacaacagaagaagccagagcttcaacaactacgacaagagcaagcccgtgaccagccccccccccccccccagcagccacgagaaggagcccctggccagcagcgccagcagccaccccggcatgagcgacaacgcccccgccagcctggagagcggcagcagcagcacccccaccaactgcagcaccagcagcgccatcccccagcccggcgccgccaccaagccctggagaagcaagagcctgagcgtgaagcacagcgccaccgtgagcatgctgagcgtgaagccccccggccccgaggcccccagacccacccccgaggccatgaagcccgcccccaacaaccagaagagcatgctggagaagctgaagctgttcaacagcaagggcggcagcaaggccggcgagggccccggcagcagagacaccagctgcgagagactggagaccctgcccagcttcgaggagagcgaggagctggaggccgccagcagaatgctgaccaccgtgggccccgccagcagcagccccaagatcgccctgaagggcatcgcccagagaaccttcagcagagccctgaccaacaagaagagcagcctgaagggcaacgagaaggagaaggagaagcagcagagagagaaggacaaggagaagagcaaggacctggccaagagagccagcgtgaccgagagactggacctgaaggaggagcccaaggaggaccccagcggcgccgccgtgcccgagatgcccaagaagagcagcaagatcgccagcttcatccccaagggcggcaagctgaacagcgccaagaaggagcccatggcccccagccacagcggcatccccaagcccggcatgaagagcatgcccggcaagagccccagcgcccccgcccccagcaaggagggcgagagaagcagaagcggcaagctgagcagcggcctgccccagcagaagccccagctggacggcagacacagcagcagcagcagcagcctggccagcagcgagggcaagggccccggcggcaccaccctgaaccacagcatcagcagccagaccgtgagcggcagcgtgggcaccacccagaccaccggcagcaacaccgtgagcgtgcagctgccccagccccagcagcagtacaaccaccccaacaccgccaccgtggcccccttcctgtacagaagccagaccgacaccgagggcaacgtgaccgccgagagcagcagcaccggcgtgagcgtggagcccagccacttcaccaagaccggccagcccgccctggaggagctgaccggcgaggaccccgaggccagaagactgagaaccgtgaagaacatcgccgacctgagacagaacctggaggagaccatgagcagcctgagaggcacccaggtgacccacagcaccctggagaccaccttcgacaccaacgtgaccaccgagatgagcggcagaagcatcctgagcctgaccggcagacccacccccctgagctggagactgggccagagcagccccagactgcaggccggcgacgcccccagcatgggcaacggctacccccccagagccaacgccagcagattcatcaacaccgagagcggcagatacgtgtacagcgcccccctgagaagacagctggccagcagaggcagcagcgtgtgccacgtggacgtgagcgacaaggccggcgacgagatggacctggagggcatcagcatggacgcccccggctacatgagcgacggcgacgtgctgagcaagaacatcagaaccgacgacatcaccagcggctacatgaccgacggcggcctgggcctgtacaccagaagactgaacagactgcccgacggcatggccgtggtgagagagaccctgcagagaaacaccagcctgggcctgggcgacgccgacagctgggacgacagcagcagcgtgagcagcggcatcagcgacaccatcgacaacctgagcaccgacgacatcaacaccagcagcagcatcagcagctacgccaacacccccgccagcagcagaaagaacctggacgtgcagaccgacgccgagaagcacagccaggtggagagaaacagcctgtggagcggcgacgacgtgaagaagagcgacggcggcagcgacagcggcatcaagatggagcccggcagcaagtggagaagaaaccccagcgacgtgagcgacgagagcgacaagagcaccagcggcaagaagaaccccgtgatcagccagaccggcagctggagaagaggcatgaccgcccaggtgggcatcaccatgcccagaaccaagcccagcgcccccgccggcgccctgaagacccccggcaccggcaagaccgacgacgccaaggtgagcgagaagggcagactgagccccaaggccagccaggtgaagagaagccccagcgacgccggcagaagcagcggcgacgagagcaagaagcccctgcccagcagcagcagaacccccaccgccaacgccaacagcttcggcttcaagaagcagagcggcagcgccgccggcctggccatgatcaccgccagcggcgtgaccgtgaccagcagaagcgccaccctgggcaagatccccaagagcagcgccctggtgagcagaagcgccggcagaaagagcagcatggacggcgcccagaaccaggacgacggctacctggccctgagcagcagaaccaacctgcagtacagaagcctgcccagacccagcaagagcaacagcagaaacggcgccggcaacagaagcagcaccagcagcatcgacagcaacatcagcagcaagagcgccggcctgcccgtgcccaagctgagagagcccagcaagaccgccctgggcagcagcctgcccggcctggtgaaccagaccgacaaggagaagggcatcagcagcgacaacgagagcgtggccagctgcaacagcgtgaaggtgaaccccgccgcccagcccgtgagcagccccgcccagaccagcctgcagcccggcgccaagtaccccgacgtggccagccccaccctgagaagactgttcggcggcaagcccaccaagcaggtgcccatcgccaccgccgagaacatgaagaacagcgtggtgatcagcaacccccacgccaccatgacccagcagggcaacctggacagccccagcggcagcggcgtgctgagcagcggcagcagcagccccctgtacagcaagaacgtggacctgaaccagagccccctggccagcagccccagcagcgcccacagcgcccccagcaacagcctgacctggggcaccaacgccagcagcagcagcgccgtgagcaaggacggcctgggcttccagagcgtgagcagcctgcacaccagctgcgagagcatcgacatcagcctgagcagcggcggcgtgcccagccacaacagcagcaccggcctgatcgccagcagcaaggacgacagcctgacccccttcgtgagaaccaacagcgtgaagaccaccctgagcgagagccccctgagcagccccgccgccagccccaagttctgcagaagcaccctgcccagaaagcaggacagcgacccccacctggacagaaacaccctgcccaagaagggcctgagatacacccccaccagccagctgagaacccaggaggacgccaaggagtggctgagaagccacagcgccggcggcctgcaggacaccgccgccaacagccccttcagcagcggcagcagcgtgaccagccccagcggcaccagattcaacttcagccagctggccagccccaccaccgtgacccagatgagcctgagcaaccccaccatgctgagaacccacagcctgagcaacgccgacggccagtacgacccctacaccgacagcagattcagaaacagcagcatgagcctggacgagaagagcagaaccatgagcagaagcggcagcttcagagacggcttcgaggaggtgcacggcagcagcctgagcctggtgagcagcaccagcagcgtgtacagcacccccgaggagaagtgccagagcgagatcagaaagctgagaagagagctggacgccagccaggagaaggtgagcgccctgaccacccagctgaccgccaacgcccacctggtggccgccttcgagcagagcctgggcaacatgaccatcagactgcagagcctgaccatgaccgccgagcagaaggacagcgagctgaacgagctgagaaagaccatcgagctgctgaagaagcagaacgccgccgcccaggccgccatcaacggcgtgatcaacacccccgagctgaactgcaagggcaacggcaccgcccagagcgccgacctgagaatcagaagacagcacagcagcgacagcgtgagcagcatcaacagcgccaccagccacagcagcgtgggcagcaacatcgagagcgacagcaagaagaagaagagaaagaactggctgagaagcagcttcaagcaggccttcggcaagaagaagagccccaagagcgccagcagccacagcgacatcgaggagatgaccgacagcagcctgcccagcagccccaagctgccccacaacggcagcaccggcagcacccccctgctgagaaacagccacagcaacagcctgatcagcgagtgcatggacagcgaggccgagaccgtgatgcagctgagaaacgagctgagagacaaggagatgaagctgaccgacatcagactggaggccctgagcagcgcccaccagctggaccagctgagagaggccatgaacagaatgcagagcgagatcgagaagctgaaggccgagaacgacagactgaagagcgagagccagggcagcggctgcagcagagcccccagccaggtgagcatcagcgccagccccagacagagcatgggcctgagccagcacagcctgaacctgaccgagagcaccagcctggacatgctgctggacgacaccggcgagtgcagcgccagaaaggagggcggcagacacgtgaagatcgtggtgagcttccaggaggagatgaagtggaaggaggacagcagaccccacctgttcctgatcggctgcatcggcgtgagcggcaagaccaagtgggacgtgctggacggcgtggtgagaagactgttcaaggagtacatcatccacgtggaccccgtgagccagctgggcctgaacagcgacagcgtgctgggctacagcatcggcgagatcaagagaagcaacaccagcgagacccccgagctgctgccctgcggctacctggtgggcgagaacaccaccatcagcgtgaccgtgaagggcctggccgagaacagcctggacagcctggtgttcgagagcctgatccccaagcccatcctgcagagatacgtgagcctgctgatcgagcacagaagaatcatcctgagcggccccagcggcaccggcaagacctacctggccaacagactgagcgagtacatcgtgctgagagagggcagagagctgaccgacggcgtgatcgccaccttcaacgtggaccacaagagcagcaaggagctgagacagtacctgagcaacctggccgaccagtgcaacagcgagaacaacgccgtggacatgcccctggtgatcatcctggacaacctgcaccacgtgagcagcctgggcgagatcttcaacggcctgctgaactgcaagtaccacaagtgcccctacatcatcggcaccatgaaccaggccaccagcagcacccccaacctgcagctgcaccacaacttcagatgggtgctgtgcgccaaccacaccgagcccgtgaagggcttcctgggcagattcctgagaagaaagctgatggagaccgagatcagcggcagagtgagaaacatggagctggtgaagatcatcgactggatccccaaggtgtggcaccacctgaacagattcctggaggcccacagcagcagcgacgtgaccatcggccccagactgttcctgagctgccccatcgacgtggacggcagcagagtgtggttcaccgacctgtggaactacagcatcatcccctacctgctggaggccgtgagagagggcctgcagctgtacggcagaagagccccctgggaggaccccgccaagtgggtgatggacacctacccctgggccgccagcccccagcagcacgagtggccccccctgctgcagctgagacccgaggacgtgggcttcgacggctacagcatgcccagagagggcagcaccagcaagcagatgccccccagcgacgccgagggcgaccccctgatgaacatgctgatgagactgcaggaggccgccaactacagcagcccccagagctacgacagcgacagcaacagcaacagccaccacgacgacatcctggacagcagcctggagagcaccctgtag

SEQ ID NO: 240356 - protein, 643 aa, Artificial Sequence
  derived and/or modified sequence
MGQESSKPVWPNPTGGYQSNTGRRYGRRHAYVSFRPPTSQRERIASQRKTNSEVPMHRSAPSQTTKRSRSPFSTTRRSWDDSESSGTNLNIDNEDYSRYPPREYRASGSRRGMAYGHIDSYGADDSEEEGAGPVERPPVRGKTGKFKDDKLYDPEKGARSLAGPPPHFSSFSRDVREERDKLDPVPAARCSASRADFLPQSSVASQSSSEGKLATKGDSSERERREQNLPARPSRAPVSICGGGENTSKSAEEPVVRPKIRNLASPNCVKPKIFFDTDDDDDMPHSTSRWRDTANDNEGHSDGLARRGRGESSSGYPEPKYPEDKREARSDQVKPEKVPRRRRTMADPDFWTHSDDYYKYCDEDSDSDKEWIAALRRKYRSREQTLSSSGESWETLPGKEEREPPQAKVSASTGTSPGPGASASAGAGAGASAGSNGSNYLEEVREPSLQEEQASLEEGEIPWLQYHENDSSSEGDNDSGHELMQPGVFMLDGNNNLEDDSSVSEDLEVDWSLFDGFADGLGVAEAISYVDPQFLTYMALEERLAQAMETALAHLESLAVDVEVANPPASKESIDALPEILVTEDHGAVGQEMCCPICCSEYVKGEVATELPCHHYFHKPCVSIWLQKSGTCPVCRCMFPPPL

SEQ ID NO: 240357 - protein, 588 aa, Artificial Sequence
  derived and/or modified sequence
MHRSAPSQTTKRSRSPFSTTRRSWDDSESSGTNLNIDNEDYSRYPPREYRASGSRRGMAYGHIDSYGADDSEEEGAGPVERPPVRGKTGKFKDDKLYDPEKGARSLAGPPPHFSSFSRDVREERDKLDPVPAARCSASRADFLPQSSVASQSSSEGKLATKGDSSERERREQNLPARPSRAPVSICGGGENTSKSAEEPVVRPKIRNLASPNCVKPKIFFDTDDDDDMPHSTSRWRDTANDNEGHSDGLARRGRGESSSGYPEPKYPEDKREARSDQVKPEKVPRRRRTMADPDFWTHSDDYYKYCDEDSDSDKEWIAALRRKYRSREQTLSSSGESWETLPGKEEREPPQAKVSASTGTSPGPGASASAGAGAGASAGSNGSNYLEEVREPSLQEEQASLEEGEIPWLQYHENDSSSEGDNDSGHELMQPGVFMLDGNNNLEDDSSVSEDLEVDWSLFDGFADGLGVAEAISYVDPQFLTYMALEERLAQAMETALAHLESLAVDVEVANPPASKESIDALPEILVTEDHGAVGQEMCCPICCSEYVKGEVATELPCHHYFHKPCVSIWLQKSGTCPVCRCMFPPPL

SEQ ID NO: 240358 - protein, 558 aa, Artificial Sequence
  derived and/or modified sequence
MHRSAPSQTTKRSRSPFSTTRRSWDDSESSGTNLNIDNEDYSRYPPREYRASGSRRGMAYGHIDSYGADDSEEEGAGPVERPPVRGKTGKFKDDKLLDPVPAARCSASRADFLPQSSVASQSSSEGKLATKGDSSERERREQNLPARPSRAPVSICGGGENTSKSAEEPVVRPKIRNLASPNCVKPKIFFDTDDDDDMPHSTSRWRDTANDNEGHSDGLARRGRGESSSGYPEPKYPEDKREARSDQVKPEKVPRRRRTMADPDFWTHSDDYYKYCDEDSDSDKEWIAALRRKYRSREQTLSSSGESWETLPGKEEREPPQAKVSASTGTSPGPGASASAGAGAGASAGSNGSNYLEEVREPSLQEEQASLEEGEIPWLQYHENDSSSEGDNDSGHELMQPGVFMLDGNNNLEDDSSVSEDLEVDWSLFDGFADGLGVAEAISYVDPQFLTYMALEERLAQAMETALAHLESLAVDVEVANPPASKESIDALPEILVTEDHGAVGQEMCCPICCSEYVKGEVATELPCHHYFHKPCVSIWLQKSGTCPVCRCMFPPPL

SEQ ID NO: 240359 - DNA, 1932 bp, Artificial Sequence
  derived and/or modified sequence
atgggccaggagagcagcaagcccgtgtggcccaaccccaccggcggctaccagagcaacaccggcagaagatacggcagaagacacgcctacgtgagcttcagaccccccaccagccagagagagagaatcgccagccagagaaagaccaacagcgaggtgcccatgcacagaagcgcccccagccagaccaccaagagaagcagaagccccttcagcaccaccagaagaagctgggacgacagcgagagcagcggcaccaacctgaacatcgacaacgaggactacagcagatacccccccagagagtacagagccagcggcagcagaagaggcatggcctacggccacatcgacagctacggcgccgacgacagcgaggaggagggcgccggccccgtggagagaccccccgtgagaggcaagaccggcaagttcaaggacgacaagctgtacgaccccgagaagggcgccagaagcctggccggcccccccccccacttcagcagcttcagcagagacgtgagagaggagagagacaagctggaccccgtgcccgccgccagatgcagcgccagcagagccgacttcctgccccagagcagcgtggccagccagagcagcagcgagggcaagctggccaccaagggcgacagcagcgagagagagagaagagagcagaacctgcccgccagacccagcagagcccccgtgagcatctgcggcggcggcgagaacaccagcaagagcgccgaggagcccgtggtgagacccaagatcagaaacctggccagccccaactgcgtgaagcccaagatcttcttcgacaccgacgacgacgacgacatgccccacagcaccagcagatggagagacaccgccaacgacaacgagggccacagcgacggcctggccagaagaggcagaggcgagagcagcagcggctaccccgagcccaagtaccccgaggacaagagagaggccagaagcgaccaggtgaagcccgagaaggtgcccagaagaagaagaaccatggccgaccccgacttctggacccacagcgacgactactacaagtactgcgacgaggacagcgacagcgacaaggagtggatcgccgccctgagaagaaagtacagaagcagagagcagaccctgagcagcagcggcgagagctgggagaccctgcccggcaaggaggagagagagcccccccaggccaaggtgagcgccagcaccggcaccagccccggccccggcgccagcgccagcgccggcgccggcgccggcgccagcgccggcagcaacggcagcaactacctggaggaggtgagagagcccagcctgcaggaggagcaggccagcctggaggagggcgagatcccctggctgcagtaccacgagaacgacagcagcagcgagggcgacaacgacagcggccacgagctgatgcagcccggcgtgttcatgctggacggcaacaacaacctggaggacgacagcagcgtgagcgaggacctggaggtggactggagcctgttcgacggcttcgccgacggcctgggcgtggccgaggccatcagctacgtggacccccagttcctgacctacatggccctggaggagagactggcccaggccatggagaccgccctggcccacctggagagcctggccgtggacgtggaggtggccaacccccccgccagcaaggagagcatcgacgccctgcccgagatcctggtgaccgaggaccacggcgccgtgggccaggagatgtgctgccccatctgctgcagcgagtacgtgaagggcgaggtggccaccgagctgccctgccaccactacttccacaagccctgcgtgagcatctggctgcagaagagcggcacctgccccgtgtgcagatgcatgttccccccccccctgtag

SEQ ID NO: 240360 - DNA, 1767 bp, Artificial Sequence
  derived and/or modified sequence
atgcacagaagcgcccccagccagaccaccaagagaagcagaagccccttcagcaccaccagaagaagctgggacgacagcgagagcagcggcaccaacctgaacatcgacaacgaggactacagcagatacccccccagagagtacagagccagcggcagcagaagaggcatggcctacggccacatcgacagctacggcgccgacgacagcgaggaggagggcgccggccccgtggagagaccccccgtgagaggcaagaccggcaagttcaaggacgacaagctgtacgaccccgagaagggcgccagaagcctggccggcccccccccccacttcagcagcttcagcagagacgtgagagaggagagagacaagctggaccccgtgcccgccgccagatgcagcgccagcagagccgacttcctgccccagagcagcgtggccagccagagcagcagcgagggcaagctggccaccaagggcgacagcagcgagagagagagaagagagcagaacctgcccgccagacccagcagagcccccgtgagcatctgcggcggcggcgagaacaccagcaagagcgccgaggagcccgtggtgagacccaagatcagaaacctggccagccccaactgcgtgaagcccaagatcttcttcgacaccgacgacgacgacgacatgccccacagcaccagcagatggagagacaccgccaacgacaacgagggccacagcgacggcctggccagaagaggcagaggcgagagcagcagcggctaccccgagcccaagtaccccgaggacaagagagaggccagaagcgaccaggtgaagcccgagaaggtgcccagaagaagaagaaccatggccgaccccgacttctggacccacagcgacgactactacaagtactgcgacgaggacagcgacagcgacaaggagtggatcgccgccctgagaagaaagtacagaagcagagagcagaccctgagcagcagcggcgagagctgggagaccctgcccggcaaggaggagagagagcccccccaggccaaggtgagcgccagcaccggcaccagccccggccccggcgccagcgccagcgccggcgccggcgccggcgccagcgccggcagcaacggcagcaactacctggaggaggtgagagagcccagcctgcaggaggagcaggccagcctggaggagggcgagatcccctggctgcagtaccacgagaacgacagcagcagcgagggcgacaacgacagcggccacgagctgatgcagcccggcgtgttcatgctggacggcaacaacaacctggaggacgacagcagcgtgagcgaggacctggaggtggactggagcctgttcgacggcttcgccgacggcctgggcgtggccgaggccatcagctacgtggacccccagttcctgacctacatggccctggaggagagactggcccaggccatggagaccgccctggcccacctggagagcctggccgtggacgtggaggtggccaacccccccgccagcaaggagagcatcgacgccctgcccgagatcctggtgaccgaggaccacggcgccgtgggccaggagatgtgctgccccatctgctgcagcgagtacgtgaagggcgaggtggccaccgagctgccctgccaccactacttccacaagccctgcgtgagcatctggctgcagaagagcggcacctgccccgtgtgcagatgcatgttccccccccccctgtag

SEQ ID NO: 240361 - DNA, 1677 bp, Artificial Sequence
  derived and/or modified sequence
atgcacagaagcgcccccagccagaccaccaagagaagcagaagccccttcagcaccaccagaagaagctgggacgacagcgagagcagcggcaccaacctgaacatcgacaacgaggactacagcagatacccccccagagagtacagagccagcggcagcagaagaggcatggcctacggccacatcgacagctacggcgccgacgacagcgaggaggagggcgccggccccgtggagagaccccccgtgagaggcaagaccggcaagttcaaggacgacaagctgctggaccccgtgcccgccgccagatgcagcgccagcagagccgacttcctgccccagagcagcgtggccagccagagcagcagcgagggcaagctggccaccaagggcgacagcagcgagagagagagaagagagcagaacctgcccgccagacccagcagagcccccgtgagcatctgcggcggcggcgagaacaccagcaagagcgccgaggagcccgtggtgagacccaagatcagaaacctggccagccccaactgcgtgaagcccaagatcttcttcgacaccgacgacgacgacgacatgccccacagcaccagcagatggagagacaccgccaacgacaacgagggccacagcgacggcctggccagaagaggcagaggcgagagcagcagcggctaccccgagcccaagtaccccgaggacaagagagaggccagaagcgaccaggtgaagcccgagaaggtgcccagaagaagaagaaccatggccgaccccgacttctggacccacagcgacgactactacaagtactgcgacgaggacagcgacagcgacaaggagtggatcgccgccctgagaagaaagtacagaagcagagagcagaccctgagcagcagcggcgagagctgggagaccctgcccggcaaggaggagagagagcccccccaggccaaggtgagcgccagcaccggcaccagccccggccccggcgccagcgccagcgccggcgccggcgccggcgccagcgccggcagcaacggcagcaactacctggaggaggtgagagagcccagcctgcaggaggagcaggccagcctggaggagggcgagatcccctggctgcagtaccacgagaacgacagcagcagcgagggcgacaacgacagcggccacgagctgatgcagcccggcgtgttcatgctggacggcaacaacaacctggaggacgacagcagcgtgagcgaggacctggaggtggactggagcctgttcgacggcttcgccgacggcctgggcgtggccgaggccatcagctacgtggacccccagttcctgacctacatggccctggaggagagactggcccaggccatggagaccgccctggcccacctggagagcctggccgtggacgtggaggtggccaacccccccgccagcaaggagagcatcgacgccctgcccgagatcctggtgaccgaggaccacggcgccgtgggccaggagatgtgctgccccatctgctgcagcgagtacgtgaagggcgaggtggccaccgagctgccctgccaccactacttccacaagccctgcgtgagcatctggctgcagaagagcggcacctgccccgtgtgcagatgcatgttccccccccccctgtag

SEQ ID NO: 240362 - DNA, 1932 bp, Artificial Sequence
  derived and/or modified sequence
atgggccaggagagcagcaagcctgtttggcccaaccccactggtggataccagtctaatacagggcgcagatatggccgcagacatgcatatgtgtcttttcgccctcctacatcccaacgtgagcggatcgccagtcagcgcaagacgaatagcgaagtgccaatgcatcgtagcgcaccttcacagaccacaaagaggagcagatctccattctcaaccaccagacgcagttgggacgactccgaaagcagtggcacaaacctcaacattgataacgaagactacagccggtatccaccgcgcgagtaccgggcctccggatcccgtcgcggaatggcgtacggtcatattgattcatacggggccgacgatagcgaggaggagggcgccggaccagtcgagaggccccccgtacgaggaaagaccggaaagttcaaggacgacaagctttatgatcctgaaaagggggcacgttcactcgccggaccccccccccacttttctagttttagcagagacgtaagggaggagcgcgataagctcgatcctgtcccagccgcaaggtgcagcgcctcaagagccgatttcctgccccagtcatccgttgcttcacagagttcaagcgaaggcaagctggctaccaagggcgactcctctgagagggaacggcgcgagcagaaccttcctgcacgaccctctagggcaccggtgtcgatttgtgggggaggagaaaatacaagtaagagcgcagaagagccggtggtgcgacccaagatccggaatctggctagtcctaattgcgtcaaacccaagatattcttcgacacggatgacgacgatgatatgcctcactctaccagcaggtggcgggatacggccaacgataacgaggggcacagtgacggactcgccaggcgtgggcgcggcgagagctccagcggctatcccgagcctaagtacccagaagataaaagagaagccagatctgaccaggtgaaacctgaaaaagtgccacggaggagacggaccatggcagacccagatttttggacgcacagcgatgactattataagtactgtgacgaagatagtgacagcgacaaggaatggattgctgcgcttaggagaaagtaccggtctcgcgagcagacactctcctcgtccggagaatcatgggagacacttcccggcaaagaggagcgggagcccccacaggcgaaggtgtcagccagtacagggacttcccccggtccaggagcaagcgcatcagctggtgccggcgccggcgcttccgcagggtcaaatggttccaattatctcgaggaagtgcgggaaccctctttgcaagaagagcaggcctctttggaggaaggcgagattccttggctacagtaccacgaaaatgactcttcctccgagggtgataatgacagcgggcatgaactgatgcagcccggggtctttatgctggatggaaacaataacttggaagacgactcctcagtctcagaggacctggaggtcgactggtccttgttcgatgggttcgccgacggtttgggggtggctgaagcgattagctatgtggatccacaattcctaacctacatggctttggaggagcgtctcgcccaggctatggagacagccttggcccacttggagtctttggcagtcgacgtggaagtggccaatcctcccgccagtaaggaaagcatcgatgctcttcccgagattttggtgacagaagatcatggtgctgtaggccaggaaatgtgctgccccatttgctgctccgagtacgtcaagggagaggtcgcgaccgaactcccctgccatcactatttccacaaaccatgtgtatctatctggcttcagaaatctggcacgtgtccagtctgtcgatgcatgtttccaccgcccctatag

SEQ ID NO: 240363 - DNA, 2755 bp, Artificial Sequence
  derived and/or modified sequence
acaatcacttccgccgccgcagtcgccgcccgccccgctgctgtctggcgggggaggagctcgggaccgggagcagcggctctggcggtcgtggcggtcggagatccgagagctctgcttctctgaaaagcgtgtggctttctggacttggtctacacctgacagtcactggaatgctactccaggccttagaagaaagtgaaactaattttaaaggccccttattctttctgttacctgcctgctgaagtgaaaataaatctccctgctcctttattctaaactgattttactttcccatctcaaaaacgtgtgcagggagcaggagccctcctacccgagccccagctgtattggaaaccctcctaagtcagagtgatgggtcaggaatctagcaagcctgtatggcccaatccaacaggagggtatcagtccaatacaggtaggaggtatggaagaaggcatgcttatgtcagtttcaggccacccacgagccagcgggaaaggattgccagccagagaaagacgaactccgaagtcccaatgcacagatcagcccccagtcaaaccaccaagaggagccgatcgccattttccactactcgtcgtagttgggacgacagcgagagttcgggaaccaacctgaatattgataatgaggactattccaggtatccgccaagagagtacagagcttcgggtagcagaagaggaatggcctatggacatattgactcttatggggcagatgatagtgaggaggagggggctgggcctgttgagcgaccgccagtgagagggaaaactggcaagtttaaagatgataagctgtatgacccagagaaaggggcaaggtctttggctgggccacctccacatttctctagttttagccgtgatgtgagagaggagcgagacaagttagacccagtccctgcagcaagatgctcagctagcagagctgacttcctgccacaaagtagtgtggcctcacagtcgtcttctgaaggcaagctggctacaaaaggtgacagctcggagagggagagaagggagcaaaatttacctgcacgtcccagcagggctcctgtgagtatttgtggtggtggggaaaacacctcaaagagtgcagaggaacctgtggtcaggcccaaaatcagaaacctggcaagtccaaactgcgtgaaaccaaaaattttttttgatactgatgatgatgacgatatgccacacagtacttccaggtggagggataccgccaatgacaatgagggccactcggatggcctggcaagaagagggagaggcgagagttcaagtggctatcccgagccaaagtaccctgaagacaaacgggaagcgaggagtgaccaagtgaaaccagaaaaggtgccgagacgacgacgcaccatggccgaccctgacttctggacgcacagtgatgattactacaaatactgcgacgaagactctgacagtgacaaagagtggattgctgctctgcgtcggaaatatcgaagccgagagcaaaccctgtcctccagtggcgaaagctgggagactctgccggggaaagaagagcgggaacctccacaggctaaggtgagtgccagcactggcaccagccctggccccggtgctagtgccagtgccggggctggcgccggggccagtgctggcagcaatggcagcaattaccttgaagaagttcgagaaccatctcttcaggaagagcaggcatccctggaagaaggagaaattccttggctccagtaccatgagaatgacagtagcagtgagggggataatgattctggtcacgagttgatgcaacctggggtattcatgctggatggaaacaacaaccttgaagatgactccagtgtgagcgaagacctagaagtggattggagcctctttgatggatttgcagatgggttaggagtggctgaagccatttcctatgtggaccctcagttcctcacctacatggcacttgaagaacgcctggcccaggcaatggaaactgcccttgcgcacttggagtctctcgcagtggatgtagaggtggccaatccaccagcaagcaaggagagcattgacgctcttcccgagatcctggtcactgaagatcatggcgcagttggtcaggagatgtgctgccccatctgctgtagcgaatatgtgaagggggaggtggcaactgagctgccgtgccaccactatttccacaagccgtgtgtgtccatctggcttcagaagtcaggcacctgccccgtgtgccgctgcatgttccctcccccactctaaagaccaaggccgtttactcctggtctgattattttccccatctgaaatccacaatactgcaggagccctcttgaaattaacaatggaaataaaaccaatcagtcagttagcctaaacctattgattcctcgtgattatttccaatgtgaaaacagttgtgtatgattgcattaaaaatcatatcatcttttagaggttagaaaagggaaaactaaactttctaaatgctacttgagattgcagtaagaagatacgttttctaacctgaaagttaaatcgcatttgttttcttcagtagaatgggaatgtgttgctgttacttgtaatgtcaagtttatctgttaaatatgtccaaaaggcaaaatcatttttgttgcatgttatgggtcgatgttcctgtaattgcagtgccgtaaaagcttattaaagttgttcttttggtttt

SEQ ID NO: 240364 - DNA, 1767 bp, Artificial Sequence
  derived and/or modified sequence
atgcacaggtcagccccttcgcagaccactaaaaggagccgaagtcccttcagtactacccgtagatcatgggatgatagtgaatcgtcaggcactaacctcaatatagataacgaagattactcccgatatcctcctcgggaatacagggccagcgggtctagaaggggcatggcttacggccacattgacagctatggcgccgacgacagcgaggaggagggggccggacccgtggaacgtccacctgtgaggggaaagaccggcaagtttaaggatgataagctgtacgacccagagaaaggggcccgcagtctggccggacctcctccccacttctcctcattcagccgcgacgtgagggaggaaagagacaaacttgatcccgtgccagcggccaggtgttctgctagcagagccgactttctgccccagtcttcggtggcctctcaatcatcatccgagggcaagctggccacaaagggggactcgtccgagcgcgagaggcgcgaacagaatcttcctgctcgcccctcaagagctcctgtctctatttgtggaggcggtgagaacacaagcaagtctgctgaggagcctgtggtgaggccaaaaatccggaatctcgcctctccaaactgtgtgaaacccaaaattttctttgacacagatgacgatgacgacatgccacattccaccagcaggtggagggacacggccaatgataatgaaggccattccgacggccttgctagaaggggccgtggtgaaagcagctctggatatccagagcctaagtatcctgaagataagcgcgaggctaggtctgatcaggtaaagcccgaaaaagtcccccggcggcggagaaccatggccgacccggatttttggacccattctgatgattactacaaatattgtgatgaagattctgattctgataaagagtggatcgccgccctgagacgaaagtataggtcccgggagcagacactatcaagcagcggggagtcctgggaaacccttcctggaaaagaagaacgagagccccctcaggcaaaggtctcagcctctacaggaacctcccccggaccaggagcgagtgcaagcgcaggagctggggctggcgcaagcgctgggtccaatggatcaaattacttggaagaggtgagagaaccctcactgcaagaagaacaggcaagcctggaggagggagaaattccgtggctgcagtaccacgaaaacgatagcagcagcgagggggacaacgacagcggacacgagctgatgcagccgggagtgtttatgctggacggcaataacaacttagaagatgattctagtgtttccgaagatttggaggtggactggtcactatttgatggtttcgctgacggtctcggggtggcagaagcgatatcctatgtggacccacaattcctgacctatatggccctggaggagcgccttgcccaggcgatggaaaccgccctggcgcaccttgaatcactagctgtcgacgtggaggttgccaatccgccagctagtaaggagtctatcgacgcactgccggaaatcttggtgaccgaagatcatggagcggtcggccaggagatgtgctgccctatatgctgttcagaatatgtgaaaggagaggtcgcaacggagcttccttgtcaccactattttcacaaaccttgtgtaagcatctggctgcagaagagtggcacatgcccggtgtgccgttgcatgttcccgccacctttatag

SEQ ID NO: 240365 - DNA, 1932 bp, Artificial Sequence
  derived and/or modified sequence
atgggacaggaaagtagcaaacccgtgtggcccaatcctacgggcggctaccagtcgaatacaggtagacggtacgggcggcgccatgcctacgtgtcctttcgtccgcccaccagccaacgtgagcggattgcaagccaacgaaaaacaaacagtgaggttccaatgcaccggtccgccccaagtcaaactaccaaaaggagcagaagtccgttctctaccacccgaagatcctgggacgactccgaaagctcaggcaccaatctgaacatcgacaatgaggactattctaggtaccctcccagagaatacagggcctcaggttcgcggagagggatggcttacggacatattgacagctacggagccgacgactctgaggaggagggagccggtccggtagagaggcctccggtgagaggaaaaacaggaaagtttaaagacgataagctttacgatccagaaaagggagctagatcactggccgggcctcccccacacttttcctcattctcccgggacgtgagggaagagagggataaactggaccccgtcccagcagcaaggtgctccgcttcacgggcagatttcctgccccaatcttcagttgcctcgcaatcatcctcggagggcaaactggctactaaaggggactccagcgaacgggaacggcgggagcagaatctccctgcacggccctcccgggctcccgtgagcatctgcggtggtggagaaaacaccagtaaatctgccgaggaacctgtggtacggccaaagattaggaacctggcctccccgaactgcgtgaaacctaaaattttcttcgacactgatgacgatgatgacatgccccatagcacctccaggtggcgcgataccgcgaatgataatgaggggcactccgatgggcttgcaagaagaggaagaggggagtcctcctctggctaccccgagcccaagtatccagaggataagcgcgaagcgagaagcgaccaggtgaagccggagaaggttccacggagaagacgaaccatggcggaccctgatttctggactcattccgatgactactataagtactgcgacgaagacagtgacagcgacaaggaatggatagccgccttgaggcgcaagtataggagcagagaacagaccctgtccagctccggcgagtcgtgggaaaccttgcctggcaaggaagagcgggagccccctcaagcgaaagtctctgcttctaccggaacttctcctgggccgggggccagcgcctccgctggggccggcgccggagcgtccgcgggatccaatggctccaactatctggaggaggtgcgggaacctagcctgcaggaggaacaggcaagtctggaagagggggaaataccatggttgcagtaccatgagaacgactcttcgtccgagggggacaacgattcaggccacgaattaatgcagccaggggtgtttatgctcgatggaaataacaatctggaggatgattcctccgtgtctgaagacctcgaagtggattggtctctgttcgacggttttgccgacgggctcggcgtcgccgaagctatcagctacgtcgatcctcagttcctgacttatatggcccttgaagagcgtcttgctcaggctatggaaactgcactggcccacctggagtcactcgcagttgatgtagaggtcgcaaatccgccagcgagcaaagaaagtatcgatgcattgcctgaaatcctggttactgaagatcacggcgccgtgggccaggaaatgtgttgtccaatttgctgctccgaatatgttaagggagaagtggccaccgagttgccatgccatcactactttcacaagccctgtgtgtcaatctggctacaaaagagcggaacatgtccagtgtgtcggtgtatgttcccgccccctctctag

SEQ ID NO: 240366 - DNA, 1677 bp, Artificial Sequence
  derived and/or modified sequence
atgcacagatcggccccttcacagactacaaagaggtccagatcacctttctctacaactaggcgctcttgggatgatagcgaatcgagtgggactaatctgaatatcgacaacgaggactattcccgttaccctcctagggagtatcgcgccagtggcagccgtcgcgggatggcctacggacatattgattcatatggagctgacgattcggaggaagagggagctggccctgtggaacgcccaccagtgagggggaaaacaggcaagtttaaggatgacaaactgctcgaccccgtgccagccgcgagatgttctgcatctcgtgctgacttcttgccacagtccagcgtcgcaagtcaatcttcgtctgagggtaaattggcaaccaaaggggacagcagtgaacgagaacggagggagcaaaacctgcccgccaggccaagccgcgcgcctgtgtctatctgcggagggggagaaaatacttccaaatctgcagaggaacctgttgtccgccctaagatccgaaacttggcctcacccaactgcgtcaagcccaaaatcttttttgataccgacgacgacgacgatatgcctcacagcacatctcgctggcgtgacacagctaatgataacgagggacacagtgacggtctggcgagaagaggcaggggcgaatctagttctgggtatccagagcccaagtaccccgaagacaaaagagaggcaaggagtgaccaggttaagcccgagaaagtcccccgcagacgacgtacaatggccgacccagacttctggacacactcagatgactactataagtattgcgatgaggatagtgacagcgacaaggaatggatcgccgctctgagaaggaagtacagatcgagggagcagaccttatcgagttctggagagtcatgggagaccctgcctgggaaggaagaacgtgaaccacctcaggccaaggtttccgcgagtacgggcacctcgcctggccccggcgcatctgcttctgctggggccggagccggcgcgtctgcaggtagtaatggctctaactacttggaggaggtgagagaaccttcattgcaggaggagcaggccagcctggaagagggcgaaattccgtggctgcagtaccacgagaatgattcttcttcagagggggacaatgattctgggcacgagctgatgcaacccggcgtcttcatgttggatggtaataataacctcgaggacgacagctcagtgtctgaggacctagaggtggattggtccctcttcgatggttttgcagacggcctgggcgtagccgaggccatcagttatgtggaccctcaatttttgacgtatatggctcttgaggaacgcctggcgcaagccatggaaacagcactagctcaccttgagtccttggccgtcgatgtggaagtggctaaccctccagcctcaaaggaatccatcgatgcattgcccgaaatattagtgaccgaggatcacggagccgttggccaggaaatgtgttgtcccatctgttgttctgaatatgtcaagggggaagtggccactgagctgccctgccatcattactttcacaaaccttgcgtgtccatttggttacagaagtctgggacgtgccctgtttgtcgctgcatgttccctcctccactttag

SEQ ID NO: 240367 - DNA, 2378 bp, Artificial Sequence
  derived and/or modified sequence
tcgccgcccgccccgctgctgtctggcgggggaggagctcgggaccgggagcagcggctctggcggtcgtggcggtcggagatccgagagctctgcttctctgaaaagcgtgtggctttctggacttgtttcaggccacccacgagccagcgggaaaggattgccagccagagaaagacgaactccgaagtcccaatgcacagatcagcccccagtcaaaccaccaagaggagccgatcgccattttccactactcgtcgtagttgggacgacagcgagagttcgggaaccaacctgaatattgataatgaggactattccaggtatccgccaagagagtacagagcttcgggtagcagaagaggaatggcctatggacatattgactcttatggggcagatgatagtgaggaggagggggctgggcctgttgagcgaccgccagtgagagggaaaactggcaagtttaaagatgataagctgtatgacccagagaaaggggcaaggtctttggctgggccacctccacatttctctagttttagccgtgatgtgagagaggagcgagacaagttagacccagtccctgcagcaagatgctcagctagcagagctgacttcctgccacaaagtagtgtggcctcacagtcgtcttctgaaggcaagctggctacaaaaggtgacagctcggagagggagagaagggagcaaaatttacctgcacgtcccagcagggctcctgtgagtatttgtggtggtggggaaaacacctcaaagagtgcagaggaacctgtggtcaggcccaaaatcagaaacctggcaagtccaaactgcgtgaaaccaaaaattttttttgatactgatgatgatgacgatatgccacacagtacttccaggtggagggataccgccaatgacaatgagggccactcggatggcctggcaagaagagggagaggcgagagttcaagtggctatcccgagccaaagtaccctgaagacaaacgggaagcgaggagtgaccaagtgaaaccagaaaaggtgccgagacgacgacgcaccatggccgaccctgacttctggacgcacagtgatgattactacaaatactgcgacgaagactctgacagtgacaaagagtggattgctgctctgcgtcggaaatatcgaagccgagagcaaaccctgtcctccagtggcgaaagctgggagactctgccggggaaagaagagcgggaacctccacaggctaaggtgagtgccagcactggcaccagccctggccccggtgctagtgccagtgccggggctggcgccggggccagtgctggcagcaatggcagcaattaccttgaagaagttcgagaaccatctcttcaggaagagcaggcatccctggaagaaggagaaattccttggctccagtaccatgagaatgacagtagcagtgagggggataatgattctggtcacgagttgatgcaacctggggtattcatgctggatggaaacaacaaccttgaagatgactccagtgtgagcgaagacctagaagtggattggagcctctttgatggatttgcagatgggttaggagtggctgaagccatttcctatgtggaccctcagttcctcacctacatggcacttgaagaacgcctggcccaggcaatggaaactgcccttgcgcacttggagtctctcgcagtggatgtagaggtggccaatccaccagcaagcaaggagagcattgacgctcttcccgagatcctggtcactgaagatcatggcgcagttggtcaggagatgtgctgccccatctgctgtagcgaatatgtgaagggggaggtggcaactgagctgccgtgccaccactatttccacaagccgtgtgtgtccatctggcttcagaagtcaggcacctgccccgtgtgccgctgcatgttccctcccccactctaaagaccaaggccgtttactcctggtctgattattttccccatctgaaatccacaatactgcaggagccctcttgaaattaacaatggaaataaaaccaatcagtcagttagcctaaacctattgattcctcgtgattatttccaatgtgaaaacagttgtgtatgattgcattaaaaatcatatcatcttttagaggttagaaaagggaaaactaaactttctaaatgctacttgagattgcagtaagaagatacgttttctaacctgaaagttaaatcgcatttgttttcttcagtagaatgggaatgtgttgctgttacttgtaatgtcaagtttatctgttaaatatgtccaaaaggcaaaatcatttttgttgcatgttatgggtcgatgttcctgtaattgcagtgccgtaa

SEQ ID NO: 240368 - DNA, 2692 bp, Artificial Sequence
  derived and/or modified sequence
gtcagattctcctctaagtctggctttcctgcaaacccagtcttgtaatcattttgccaacattaaaaatgtgttccaggtctacacctgacagtcactggaatgctactccaggccttagaagaaagtgaaactaattttaaaggccccttattctttctgttacctgcctgctgaagtgaaaataaatctccctgctcctttattctaaactgattttactttcccatctcaaaaacgtgtgcagggagcaggagccctcctacccgagccccagctgtattggaaaccctcctaagtcagagtgatgggtcaggaatctagcaagcctgtatggcccaatccaacaggagggtatcagtccaatacaggtaggaggtatggaagaaggcatgcttatgtcagtttcaggccacccacgagccagcgggaaaggattgccagccagagaaagacgaactccgaagtcccaatgcacagatcagcccccagtcaaaccaccaagaggagccgatcgccattttccactactcgtcgtagttgggacgacagcgagagttcgggaaccaacctgaatattgataatgaggactattccaggtatccgccaagagagtacagagcttcgggtagcagaagaggaatggcctatggacatattgactcttatggggcagatgatagtgaggaggagggggctgggcctgttgagcgaccgccagtgagagggaaaactggcaagtttaaagatgataagctgtatgacccagagaaaggggcaaggtctttggctgggccacctccacatttctctagttttagccgtgatgtgagagaggagcgagacaagttagacccagtccctgcagcaagatgctcagctagcagagctgacttcctgccacaaagtagtgtggcctcacagtcgtcttctgaaggcaagctggctacaaaaggtgacagctcggagagggagagaagggagcaaaatttacctgcacgtcccagcagggctcctgtgagtatttgtggtggtggggaaaacacctcaaagagtgcagaggaacctgtggtcaggcccaaaatcagaaacctggcaagtccaaactgcgtgaaaccaaaaattttttttgatactgatgatgatgacgatatgccacacagtacttccaggtggagggataccgccaatgacaatgagggccactcggatggcctggcaagaagagggagaggcgagagttcaagtggctatcccgagccaaagtaccctgaagacaaacgggaagcgaggagtgaccaagtgaaaccagaaaaggtgccgagacgacgacgcaccatggccgaccctgacttctggacgcacagtgatgattactacaaatactgcgacgaagactctgacagtgacaaagagtggattgctgctctgcgtcggaaatatcgaagccgagagcaaaccctgtcctccagtggcgaaagctgggagactctgccggggaaagaagagcgggaacctccacaggctaaggtgagtgccagcactggcaccagccctggccccggtgctagtgccagtgccggggctggcgccggggccagtgctggcagcaatggcagcaattaccttgaagaagttcgagaaccatctcttcaggaagagcaggcatccctggaagaaggagaaattccttggctccagtaccatgagaatgacagtagcagtgagggggataatgattctggtcacgagttgatgcaacctggggtattcatgctggatggaaacaacaaccttgaagatgactccagtgtgagcgaagacctagaagtggattggagcctctttgatggatttgcagatgggttaggagtggctgaagccatttcctatgtggaccctcagttcctcacctacatggcacttgaagaacgcctggcccaggcaatggaaactgcccttgcgcacttggagtctctcgcagtggatgtagaggtggccaatccaccagcaagcaaggagagcattgacgctcttcccgagatcctggtcactgaagatcatggcgcagttggtcaggagatgtgctgccccatctgctgtagcgaatatgtgaagggggaggtggcaactgagctgccgtgccaccactatttccacaagccgtgtgtgtccatctggcttcagaagtcaggcacctgccccgtgtgccgctgcatgttccctcccccactctaaagaccaaggccgtttactcctggtctgattattttccccatctgaaatccacaatactgcaggagccctcttgaaattaacaatggaaataaaaccaatcagtcagttagcctaaacctattgattcctcgtgattatttccaatgtgaaaacagttgtgtatgattgcattaaaaatcatatcatcttttagaggttagaaaagggaaaactaaactttctaaatgctacttgagattgcagtaagaagatacgttttctaacctgaaagttaaatcgcatttgttttcttcagtagaatgggaatgtgttgctgttacttgtaatgtcaagtttatctgttaaatatgtccaaaaggcaaaatcatttttgttgcatgttatgggtcgatgttcctgtaattgcagtgccgtaaaagcttattaaagttgttcttttggttttacatggta

SEQ ID NO: 240369 - DNA, 1932 bp, Artificial Sequence
  derived and/or modified sequence
atgggccaggagagcagcaagcctgtgtggcccaaccccaccggcggctaccagagcaacacaggaagaagatatggaagaagacatgcctacgtgtccttccggccccccaccagccagcgggagcgcatcgccagccagaggaagaccaacagcgaggtgcccatgcacaggtctgcccccagccagaccaccaagaggagccgcagccccttcagcaccacccggcgctcctgggatgacagcgagagcagcggcaccaacctgaacatcgacaatgaagactacagccgctacccaccccgggagtaccgggccagcggcagccggcggggcatggcctacggccacatcgacagctatggagcagatgacagcgaggaggagggcgccggccctgtggagaggcctcctgtgcggggcaagacaggcaagttcaaggatgacaagctgtatgaccctgagaagggggcccggagcctggccggccccccaccccacttcagcagcttcagcagagatgtgcgggaggagcgggacaagctggaccctgtgcctgctgcccgctgcagcgccagcagagctgacttcctgccccagagctctgtggccagccagagcagcagcgagggcaagctggccaccaagggggacagcagcgagcgggagcggcgggagcagaacctgcctgcccggcccagccgggcccctgtgtccatctgtggcggcggggagaacaccagcaagtctgctgaggagcctgtggtgcggcccaagatccggaacctggccagccccaactgtgtgaagcccaagatcttctttgacacagatgatgatgatgacatgccccacagcaccagccgctggagggacacagccaatgacaatgaaggccacagtgatggcctggcccggcggggccgcggggagagcagcagcggctacccagagcccaagtacccagaggacaagcgggaggcccggagtgaccaggtgaagccagagaaggtgcccaggagaagaaggaccatggctgaccctgacttctggacccacagtgatgactactacaagtactgtgatgaagattctgacagcgacaaggagtggattgctgccctgcggaggaagtaccgcagccgggagcagaccctgagcagcagtggagagagctgggagaccctgcccgggaaggaggagcgggagcccccccaggccaaggtgtctgccagcacaggcaccagccctggccctggggccagcgccagcgctggagctggagctggggccagcgctggcagcaatggcagcaactacctggaggaggtgcgggagcccagcctgcaggaggagcaggccagcctggaggagggggagatcccctggctgcagtaccatgaaaatgacagcagcagcgagggggacaatgattctggccacgagctgatgcagcccggggtcttcatgctggatggcaacaacaacctggaggatgacagctctgtgtctgaggacctggaggtggactggagcctgtttgatggctttgctgatggcctgggcgtggccgaggccatctcctatgtggacccccagttcctgacctacatggccctggaggagcggctggcccaggccatggagacagccctggcccacctggagagcctggccgtggatgtggaggtggccaaccccccagccagcaaggagagcattgatgccctgcctgagatcctggtgacagaggaccacggggctgtgggccaggagatgtgctgccccatctgctgcagtgaatatgtgaagggggaggtggccacagagctgccctgccaccactacttccacaagccctgtgtgtccatctggctgcagaagagcggcacctgccctgtgtgccgctgcatgttccccccacccctgtag

SEQ ID NO: 240370 - DNA, 1767 bp, Artificial Sequence
  derived and/or modified sequence
atgcacaggtctgcccccagccagaccaccaagaggagccgcagccccttcagcaccaccaggaggtcctgggatgattctgagagcagcggcaccaacctgaacatcgacaatgaagactacagccgctacccaccccgggagtaccgggccagcggcagcagaagaggcatggcctacggccacatcgacagctatggagcagatgattctgaggaggagggcgccggccctgtggagcggccccctgtgcggggcaagacaggcaagttcaaggatgacaagctgtatgaccctgagaagggggcccggagcctggccggccccccaccccacttcagcagcttcagcagagatgtgcgggaggagcgggacaagctggaccctgtgcctgctgcccgctgcagcgccagcagagctgacttcctgccccagagctctgtggccagccagagcagcagcgagggcaagctggccaccaagggggacagcagcgagcgggagcggcgggagcagaacctgcctgcccggcccagccgggcccctgtgtccatctgtggcggcggggagaacaccagcaagtctgctgaggagcctgtggtgcggcccaagatccggaacctggccagccccaactgtgtgaagcccaagatcttctttgacacagatgatgatgatgacatgccccacagcaccagccgctggagggacacagccaatgacaatgaaggccacagtgatggcctggcccggcggggccgcggggagagcagcagcggctacccagagcccaagtacccagaggacaagcgggaggcccggagtgaccaggtgaagccagagaaggtgcccaggagaagaaggaccatggctgaccctgacttctggacccacagtgatgactactacaagtactgtgatgaggacagcgacagcgacaaggagtggattgctgccctgcggaggaagtaccgcagccgggagcagaccctgagcagcagcggggagagctgggagaccctgcccgggaaggaggagcgggagcccccccaggccaaggtgtctgccagcacaggcaccagccctggccctggggccagcgccagcgctggggccggggccggggccagcgctggcagcaatggcagcaactacctggaggaggtgcgggagcccagcctgcaggaggagcaggccagcctggaggagggggagatcccctggctgcagtaccatgaaaatgacagcagcagcgagggggacaatgacagcggccacgagctgatgcagcccggggtcttcatgctggatggcaacaacaacctggaggatgacagctctgtgtctgaggacctggaggtggactggagcctgtttgatggctttgctgatggcctgggcgtggccgaggccatctcctatgtggacccccagttcctgacctacatggccctggaggagcggctggcccaggccatggagacagccctggcccacctggagagcctggccgtggatgtggaggtggccaaccccccagccagcaaggagagcattgatgccctgcctgagatcctggtgacagaagatcatggagctgtgggccaggagatgtgctgccccatctgctgcagtgaatatgtgaagggggaggtggccacagagctgccctgccaccactacttccacaagccctgtgtgtccatctggctgcagaagagcggcacctgccctgtgtgccgctgcatgtttcctccacccctgtag

SEQ ID NO: 240371 - DNA, 1677 bp, Artificial Sequence
  derived and/or modified sequence
atgcacaggtctgcccccagccagaccaccaagaggagccgcagccccttcagcaccaccaggaggtcctgggatgattctgagagcagcggcaccaacctgaacatcgacaatgaagactacagccgctacccaccccgggagtaccgggccagcggcagcagaagaggcatggcctacggccacatcgacagctatggagcagatgattctgaggaggagggcgccggccctgtggagcggccccctgtgcggggcaagacaggcaagttcaaggatgacaagctgctggaccctgtgcctgctgcccgctgcagcgccagcagagctgacttcctgccccagagctctgtggccagccagagcagcagcgagggcaagctggccaccaagggggacagcagcgagcgggagcggcgggagcagaacctgcctgcccggcccagccgggcccctgtgtccatctgtggcggcggggagaacaccagcaagtctgctgaggagcctgtggtgcggcccaagatccggaacctggccagccccaactgtgtgaagcccaagatcttctttgacacagatgatgatgatgacatgccccacagcaccagccgctggagggacacagccaatgacaatgaaggccacagtgatggcctggcccggcggggccgcggggagagcagcagcggctacccagagcccaagtacccagaggacaagcgggaggcccggagtgaccaggtgaagccagagaaggtgcccaggagaagaaggaccatggctgaccctgacttctggacccacagtgatgactactacaagtactgtgatgaggacagcgacagcgacaaggagtggattgctgccctgcggaggaagtaccgcagccgggagcagaccctgagcagcagcggggagagctgggagaccctgcccgggaaggaggagcgggagcccccccaggccaaggtgtctgccagcacaggcaccagccctggccctggggccagcgccagcgctggggccggggccggggccagcgctggcagcaatggcagcaactacctggaggaggtgcgggagcccagcctgcaggaggagcaggccagcctggaggagggggagatcccctggctgcagtaccatgaaaatgacagcagcagcgagggggacaatgacagcggccacgagctgatgcagcccggggtcttcatgctggatggcaacaacaacctggaggatgacagctctgtgtctgaggacctggaggtggactggagcctgtttgatggctttgctgatggcctgggcgtggccgaggccatctcctatgtggacccccagttcctgacctacatggccctggaggagcggctggcccaggccatggagacagccctggcccacctggagagcctggccgtggatgtggaggtggccaaccccccagccagcaaggagagcattgatgccctgcctgagatcctggtgacagaagatcatggagctgtgggccaggagatgtgctgccccatctgctgcagtgaatatgtgaagggggaggtggccacagagctgccctgccaccactacttccacaagccctgtgtgtccatctggctgcagaagagcggcacctgccctgtgtgccgctgcatgtttcctccacccctgtag

SEQ ID NO: 240372 - DNA, 1932 bp, Artificial Sequence
  derived and/or modified sequence
atgggccaggagagcagcaagcccgtgtggcccaaccccaccggcggatatcaatcaaataccggaagaaggtacggtcgccgacatgcatatgtcagttttcgacccccaacctctcagcgtgaaagaatagcttcccagcgaaaaaccaacagtgaagtccctatgcaccgatcggctccatcgcagacaacgaaacggtctaggtctcctttctcaacgacgagacgctcctgggacgattctgaatcatctggcacaaacctcaacatcgacaatgaggactacagtaggtatccccctagggaataccgtgcttccgggtcccgccggggcatggcctacggacacatcgactcatacggagcagacgactcagaggaggaaggagccggtcctgtggagcgtcccccagtgaggggaaagacaggcaaattcaaagacgacaagttgtacgaccctgaaaaaggcgctaggagcctggccggcccaccccctcacttttcttctttcagccgcgacgtgagggaagaacgtgataaacttgacccagttcccgcggcacgttgctcagctagccgggccgacttccttccccagtctagcgttgcttcacagtcgtcctctgagggaaagcttgccaccaagggagacagttccgagcgggagaggagagaacagaacctccctgcacggccttcccgagctccggtgagcatatgcggaggtggagagaatacctcaaagtctgctgaagaaccggttgtgcgcccgaaaatcagaaacttggcttctccgaattgtgtgaagccaaaaattttcttcgataccgacgatgacgatgatatgccccactcaacgtctcgctggagggacaccgcgaacgataacgagggccacagtgacggactggccagaagaggtaggggtgagagctctagcggctacccagaacctaaatacccagaagataaaagggaagcaaggtccgatcaagtaaagccagaaaaagtgccacgacggcggaggacaatggcagatcctgatttctggacacactccgatgactattacaaatattgcgacgaggactcagatagcgacaaggagtggattgcagccctgaggaggaaataccggagccgggagcagacgctgtccagcagcggagagtcatgggagactctgcctggtaaagaggagcgtgagcctccccaggctaaggtgtctgcatcaaccgggacctcacccggccctggggcatctgctagcgcgggcgcaggtgctggcgcatccgctgggagcaatggttccaattatctcgaggaagtaagagagccctccctacaggaagagcaagcctcactggaagaaggtgaaattccatggttgcagtaccacgagaatgactcatcgtcggagggcgacaatgactctggccacgaattgatgcagcccggagtgtttatgctggacggcaacaacaatttggaggacgactcgtccgtgtccgaagatctggaggtcgattggtctctctttgatggttttgccgatggacttggggtggctgaggcaatctcgtatgtggatccccagtttcttacctatatggccctcgaggagcgtctcgcccaggccatggaaaccgctctagctcaccttgaatctctggcagtcgatgtcgaggtggccaacccaccagcttcaaaggaaagcatagatgctctgccagaaattttagtcactgaggatcacggcgctgtggggcaagagatgtgctgtcctatatgctgctccgaatatgtaaaaggagaggtagccaccgagcttccgtgtcaccactatttccataagccatgtgtctctatttggctgcagaaaagtggcacatgccctgtgtgcagatgtatgttcccgccgccattgtag

SEQ ID NO: 240373 - DNA, 2392 bp, Artificial Sequence
  derived and/or modified sequence
gagcagcggctctggcggtcgtggcggtcggagatccgagagctctgcttctctgaaaagcgtgtggctttctggacttgtttcaggccacccacgagccagcgggaaaggattgccagccagagaaagacgaactccgaagtcccaatgcacagatcagcccccagtcaaaccaccaagaggagccgatcgccattttccactactcgtcgtagttgggacgacagcgagagttcgggaaccaacctgaatattgataatgaggactattccaggtatccgccaagagagtacagagcttcgggtagcagaagaggaatggcctatggacatattgactcttatggggcagatgatagtgaggaggagggggctgggcctgttgagcgaccgccagtgagagggaaaactggcaagtttaaagatgataagctgttagacccagtccctgcagcaagatgctcagctagcagagctgacttcctgccacaaagtagtgtggcctcacagtcgtcttctgaaggcaagctggctacaaaaggtgacagctcggagagggagagaagggagcaaaatttacctgcacgtcccagcagggctcctgtgagtatttgtggtggtggggaaaacacctcaaagagtgcagaggaacctgtggtcaggcccaaaatcagaaacctggcaagtccaaactgcgtgaaaccaaaaattttttttgatactgatgatgatgacgatatgccacacagtacttccaggtggagggataccgccaatgacaatgagggccactcggatggcctggcaagaagagggagaggcgagagttcaagtggctatcccgagccaaagtaccctgaagacaaacgggaagcgaggagtgaccaagtgaaaccagaaaaggtgccgagacgacgacgcaccatggccgaccctgacttctggacgcacagtgatgattactacaaatactgcgacgaagactctgacagtgacaaagagtggattgctgctctgcgtcggaaatatcgaagccgagagcaaaccctgtcctccagtggcgaaagctgggagactctgccggggaaagaagagcgggaacctccacaggctaaggtgagtgccagcactggcaccagccctggccccggtgctagtgccagtgccggggctggcgccggggccagtgctggcagcaatggcagcaattaccttgaagaagttcgagaaccatctcttcaggaagagcaggcatccctggaagaaggagaaattccttggctccagtaccatgagaatgacagtagcagtgagggggataatgattctggtcacgagttgatgcaacctggggtattcatgctggatggaaacaacaaccttgaagatgactccagtgtgagcgaagacctagaagtggattggagcctctttgatggatttgcagatgggttaggagtggctgaagccatttcctatgtggaccctcagttcctcacctacatggcacttgaagaacgcctggcccaggcaatggaaactgcccttgcgcacttggagtctctcgcagtggatgtagaggtggccaatccaccagcaagcaaggagagcattgacgctcttcccgagatcctggtcactgaagatcatggcgcagttggtcaggagatgtgctgccccatctgctgtagcgaatatgtgaagggggaggtggcaactgagctgccgtgccaccactatttccacaagccgtgtgtgtccatctggcttcagaagtcaggcacctgccccgtgtgccgctgcatgttccctcccccactctaaagaccaaggccgtttactcctggtctgattattttccccatctgaaatccacaatactgcaggagccctcttgaaattaacaatggaaataaaaccaatcagtcagttagcctaaacctattgattcctcgtgattatttccaatgtgaaaacagttgtgtatgattgcattaaaaatcatatcatcttttagaggttagaaaagggaaaactaaactttctaaatgctacttgagattgcagtaagaagatacgttttctaacctgaaagttaaatcgcatttgttttcttcagtagaatgggaatgtgttgctgttacttgtaatgtcaagtttatctgttaaatatgtccaaaaggcaaaatcatttttgttgcatgttatgggtcgatgttcctgtaattgcagtgccgtaaaagcttattaaagttgttcttttggttttacatggtataatggaattttttggttttgtctgaagcagtggtactgaatgactttataattgatcccttgcatttgcatcaaaagctttagtttcactggaaatgctgacttcaacaattgc

SEQ ID NO: 240374 - DNA, 1767 bp, Artificial Sequence
  derived and/or modified sequence
atgcaccggagcgcccccagccagaccaccaagcggagccggagccccttctccaccacccgacgttcgtgggatgatagcgagtcttccggaacaaatctgaatattgacaacgaggattatagcaggtacccacctcgcgagtatcgggcttcggggagccgacgggggatggcatacgggcatattgactcctatggcgccgacgacagtgaagaggagggcgctggccctgttgaacggccaccggttagaggtaaaacaggaaagtttaaagatgataagctgtatgatcctgagaagggcgcacggagcctcgctgggcccccccctcacttttcatccttttcgcgcgacgtgcgagaggagagggataaactcgatcccgtccccgctgcacggtgttcggcgagtagagccgatttcctaccccaaagtagcgtcgcctcccagagctcaagcgagggcaagcttgccactaagggcgattcttccgagagggaaagacgcgagcaaaatttgccagctaggcccagtcgagcgccggtttccatttgtggaggcggcgaaaataccagtaaatctgccgaagagcctgtggtcaggccaaaaattaggaacttggcctctcctaactgcgttaaacccaagatctttttcgatacagatgatgacgatgatatgccacattctacgtcgcgatggcgcgatacagccaacgataatgaaggccatagcgacggactagccaggcgcgggcgcggggagtcaagttccgggtatccggaaccgaaatacccagaagataaaagggaggctcgctcagatcaggtgaaacctgagaaggtcccgagacggagacgcactatggccgatcccgatttttggacccatagcgatgattactacaagtactgcgacgaggactcagactcggataaggaatggatcgcagcacttcggaggaaataccgctcacgggagcagaccctaagctcatccggagaatcttgggagaccctacccggcaaggaagagcgggagcctccacaggcgaaggtgagtgcttcaacaggcacttctcctggccccggcgcttccgcaagtgctggagcaggtgccggggctagtgcaggatcaaatggttcaaattacctagaggaagtccgagaaccttcgttgcaggaggagcaagctagcctggaagaaggcgaaatcccctggctccagtaccacgaaaatgattctagtagcgagggagacaatgatagcggccacgagctgatgcagccgggagtatttatgcttgatggcaataacaacctggaggacgatagttccgtctctgaagatctggaggttgattggagcctgtttgatggcttcgctgacgggctcggtgtcgctgaagctatatcttacgtggacccccagtttcttacttatatggctctggaagaaagactggctcaggccatggagactgcccttgctcatcttgagtctctggccgttgatgtggaggtagctaacccacctgccagcaaggagtctatcgacgccctaccggagatcctagtgacagaagatcatggggccgtgggacaggagatgtgttgccccatctgttgcagtgagtatgtgaagggcgaggtcgcaaccgagttgccatgtcaccattacttccacaaaccctgcgtcagcatatggctccagaagtctggaacgtgtccagtgtgtcgctgcatgtttccgcctcctctctag

SEQ ID NO: 240375 - DNA, 1932 bp, Artificial Sequence
  derived and/or modified sequence
atgggccaggagagcagcaagcccgtgtggcccaaccccaccggcgggtatcagtccaataccgggcgcagatacgggcggagacacgcctatgtttccttcaggcccccgactagccagcgggaacgtatcgccagccagcgtaagactaactcagaggtgcccatgcacagatccgcccctagccagaccaccaagcggtcccgcagccccttctccacaactagaagatcctgggacgattctgaaagctcgggaacgaatctcaacatagataacgaagattacagtaggtaccccccccgggaataccgggcatccgggtcacgtaggggaatggcatatggccatattgatagctatggggcagatgattcagaagaagagggagccgggccagttgagcgtccacctgttaggggtaaaaccggaaagtttaaggatgacaaattatacgatcctgagaagggcgctcggtccctggccgggcctccgcctcatttttctagtttcagccgcgacgtgcgagaagaacgggacaaactggacccagtcccagcagcaagatgtagtgctagtcgagccgattttctgcctcaatctagtgtggccagccaatcatcgtctgagggaaaactggccacaaaaggagactcctccgagcgcgaacgaagggaacagaatctcccagccagaccctctagggccccggtgtctatttgcgggggaggggaaaatacttctaagtctgcggaagaaccagtggtgaggccgaaaatccgcaacctggctagtccaaactgtgttaagccaaaaattttctttgataccgacgacgacgatgacatgccgcattcgacgtcccgctggagggacactgccaatgacaacgaaggacatagtgacgggttggctagacgaggaaggggggaaagctccagcggatacccggagcctaaataccccgaggacaaacgggaagctcgaagcgatcaagtgaagccggaaaaggtccctcgccgccgacggacaatggcagacccagacttttggacacacagtgatgattattacaaatattgtgacgaggattccgactccgataaagagtggatcgccgctttaagacggaaataccgatccagagagcagacgctctcttcttctggagagtcatgggagacactgccaggcaaagaggaaagagagcctccgcaggcaaaagtatctgcttcaaccggaacttcccctggaccaggcgctagcgcaagcgcaggagccggagccggggctagtgccggctccaacggctccaactacctcgaagaagtgagggaacccagcttacaggaggaacaggcctccttggaagaaggtgaaatcccgtggctacagtatcacgaaaatgatagttcttcagagggggacaatgactctggccacgagttaatgcagccaggagtttttatgctcgacggcaacaacaacctcgaggatgatagctcagtctccgaggacttggaagtcgactggtctctgttcgacggctttgcagatggtctgggcgttgctgaggcaatatcgtatgtggatccccagtttctgacatacatggcactggaggaaaggctcgcccaagccatggagacagcgctggcacacctggagagcttggcagtcgatgtggaggtggcaaaccctccggcaagcaaggaatctatcgatgccctgcctgagatactggttacggaagatcatggtgctgtcgggcaagaaatgtgctgtcctatctgttgcagcgaatatgtgaagggcgaagtggcaactgagttgccttgtcatcactacttccacaaaccatgcgtgtctatttggcttcagaagtctgggacatgccccgtctgccgctgtatgttccccccaccgctgtag

SEQ ID NO: 240376 - DNA, 1677 bp, Artificial Sequence
  derived and/or modified sequence
atgcaccggagcgcccccagccagaccaccaagcggagccggagccctttcagcaccaccaggagaagctgggacgactcggaatcaagcgggactaacttgaacatagacaatgaagactattcccgctacccacctcgggagtatagggcctccggttctcggagaggcatggcttacggccatatcgatagctacggggcagatgacagtgaggaggagggggctggcccagtggaacgccccccagttcgaggcaagacgggtaagttcaaggacgacaagctcctggaccccgtgccagccgctcgttgtagcgcttccagggcagattttttacctcagagtagtgtggcgtcgcagagttcatctgagggtaagctcgccaccaagggtgattcatctgagagagaacggcgagagcagaatctgccagcacggcctagcagagcaccagtgtccatctgtggcgggggagagaatacctcaaagtcagctgaggaaccggtggtcaggcctaagataaggaatttggcctccccaaattgtgtgaaacctaagatctttttcgatactgatgatgacgacgacatgccgcactcaacgagtcggtggcgagacactgctaacgataatgaaggacattctgatggcctggcaagacgagggcgcggggaaagtagcagtggctaccctgagcccaagtaccccgaggataagagggaggcccgttctgatcaggttaaaccggagaaagtgcctagaaggcgcagaacaatggccgatccagacttttggacccacagcgacgactattacaagtactgtgatgaggactctgattctgacaaagagtggattgccgcgttaagaaggaagtatcgcagtagagaacagactctgagttcgagcggcgaaagttgggagacattgcctggaaaagaagagcgagagccacctcaggccaaagtgtccgctagtaccggcactagtcctggccccggagcttccgccagcgcgggggctggcgctggtgcatcagctgggagcaacgggagtaactacttggaggaagtgagagagcctagcctccaggaagaacaagctagccttgaggagggcgagattccttggttgcagtaccacgaaaacgattctagcagtgaaggagacaacgattccggacacgagctcatgcagcctggcgtatttatgctggacggtaataataacctggaggacgactccagcgtgtcggaggatttggaagtggactggtccctgtttgatggttttgctgacggtctgggcgtagcagaggctatttcatatgtggatccgcagttcctcacctacatggcattggaagagcgcttggcacaggccatggagacagccctggcccatctcgaaagcctggccgtggacgtggaagttgccaaccctccagcctctaaagagtcaatcgatgccctgcccgaaattctggtcaccgaagaccacggggccgtgggacaggaaatgtgctgccccatctgctgttcagaatacgtaaagggtgaggtagccacagagctgccttgtcaccattactttcataaaccatgcgtttccatatggctccagaaaagtggtacctgtcctgtgtgccggtgcatgtttccaccgcccctatag

SEQ ID NO: 240377 - DNA, 1932 bp, Artificial Sequence
  derived and/or modified sequence
atggggcaggagtccagtaaaccagtatggccaaatccgacagggggatatcaaagtaatacgggaaggagatacggcaggcggcacgcatacgtatcgtttagaccgccaacaagccagagagaacgaatcgcatctcagcggaaaactaattcagaggtgcctatgcaccggtcggcaccctcacaaactacgaaacggagtcggtcgcccttctcaacgacccggcgtagttgggatgacagcgagagtagcgggacgaacttgaacatcgataatgaggattactcacgctacccaccccgagaatacagagcatctggatcaagaaggggcatggcttatgggcatatcgattcgtatggtgctgatgatagcgaagaggagggggctggccctgtggaaagaccgcctgtaagaggaaagaccggtaaatttaaggatgacaagctctatgatcccgagaaaggggctagatctcttgccggtcctcctccacattttagttcgttttcgagagatgttagggaggaaagggacaagctggatcccgtgccggcagcccgttgctccgcttcaagagcagactttctccctcagtcctccgtcgcttcacaatcgagctcggaaggcaaactcgctaccaaaggggatagctcagaaagagagaggcgcgagcagaatctccccgcacgtcctagtcgcgctcctgtaagtatttgcgggggaggagagaacacatctaagtcagccgaggagcccgtcgttcgccctaagattaggaatctggcatcgccgaattgcgtcaagcctaagatctttttcgatacagacgacgacgacgacatgccgcattcaacatcccggtggagggacaccgccaatgataatgaagggcactctgatggcctggctaggcgtggtcgaggcgaatcttcctccgggtatcccgaacccaagtatcccgaggataagcgggaggctcgcagtgaccaagtgaagcccgagaaggtaccacggaggcgcagaacgatggcagatcccgatttttggacccatagcgacgactactacaaatactgcgatgaagactccgacagtgacaaggagtggatagctgccttacgcagaaagtatagatctcgcgaacagacgctgtcttcatccggcgaatcctgggagaccctgcctggcaaggaggagagggagccaccgcaggcaaaagtttcagcttccacaggcaccagccccggacccggagcgtcagctagcgcgggagcaggggctggagcaagcgcgggatccaatggtagtaactacctggaggaggtacgagagccgagcttgcaagaagagcaggccagcctcgaagaaggcgaaattccctggctgcagtaccacgagaatgacagtagcagtgagggtgataatgactctgggcatgagctcatgcaacctggggtatttatgctggacggcaataataatttggaagatgactcaagtgtgagcgaagaccttgaagtagactggtctctgttcgacggattcgctgatggtttaggagtggcagaggcaatcagttacgttgacccacaatttctcacctacatggctttggaggagcgtctggcacaggccatggaaacggccctcgcccatctcgaatcactagcagtggatgttgaggtcgctaatccacctgcaagcaaagagtccatcgatgcactgccagagattctggtgacagaggaccatggggcagtcggccaggagatgtgttgcccaatttgctgctccgaatacgtgaagggcgaagtggctacagaactgccatgccaccattatttccacaagccatgcgtgagtatctggctgcagaagtctggtacatgcccagtctgcaggtgcatgttcccccctccactgtag

SEQ ID NO: 240378 - DNA, 1767 bp, Artificial Sequence
  derived and/or modified sequence
atgcacaggtctgccccttcgcagacaaccaagcgaagtcgcagtcctttctcgaccaccagacgttcttgggatgactcggaatcatctggaacaaacctgaatattgacaacgaagactattctaggtacccaccccgagaatatcgtgctagcggatccaggcgcggaatggcatacgggcatattgatagttatggggcagacgacagcgaggaggagggagcaggtcctgtggaacgacccccagtgcgaggcaagactgggaaattcaaggacgacaaactgtacgaccctgaaaagggcgcacggtccctggctggaccacctcctcacttttcttcattttcgcgagacgttagagaagaacgagacaagctggatccagttccagcagcaaggtgctccgcaagcagggctgacttcttaccccaaagttcagtggcctcgcagtctagcagcgaaggcaagctggccactaagggcgacagctcagaacgggaacgtcgcgaacagaatttacctgctcgccctagccgggctcctgtgagtatctgtggaggaggcgagaataccagtaaatctgccgaggaacccgtagtccggccaaaaattaggaatctggcctctccaaattgtgtaaaacccaaaatcttcttcgacaccgatgatgatgacgatatgccgcactctacgtctcgctggcgggatacagcaaacgacaacgaaggacactctgacgggctggccagacgaggaagaggggaaagtagttctggctatcctgagcccaagtacccagaggacaagagagaggcgaggtccgatcaggtaaaacctgagaaagtgccaaggagacgtcgcacaatggccgaccccgatttttggacccactcagatgattattacaagtactgcgacgaagactctgacagcgacaaggagtggatagccgctctgaggcggaaatacaggtctagggaacagaccctgtcttccagcggagaatcatgggagacacttcccggtaaagaagaacgagaacctcctcaggctaaagtaagcgcctccactggcacttctcccggacctggcgcatcagcctctgctggtgcaggagccggagcaagcgctggttctaatggtagtaactacctcgaggaggtgcgggagcccagccttcaagaagagcaagcaagcctggaggaaggtgaaattccatggctgcaatatcacgagaatgacagctctagcgagggtgacaatgattctggacacgaactgatgcagcccggagtgtttatgttggacggcaacaacaacttagaagatgactcctctgtctcagaggatctggaggtggattggagtctcttcgacggcttcgccgatggacttggcgtggctgaggctatctcgtatgtggatccacagtttctaacatatatggcattggaagagcggctcgcccaggctatggagacggctctagctcacctcgagagcttagcagtggacgtggaagtggcaaacccgccagctagtaaggaaagtatagacgcactgccagagatactggttaccgaagaccatggtgccgtggggcaggaaatgtgctgtccaatctgttgctccgagtacgtgaaaggtgaagttgcaacagagttaccatgccaccactactttcataagccttgtgtgtctatctggctgcagaagagcggcacgtgtcctgtatgtagatgcatgttcccgccacctctttag

SEQ ID NO: 240379 - DNA, 1932 bp, Artificial Sequence
  derived and/or modified sequence
atgggacaagaatccagcaagcccgtctggccaaaccctaccggtggatatcagagtaatactggacgaagatatggccgtaggcatgcctacgtatcctttcgccctccaacatcacagagggaaaggatcgcctctcagcgcaagacaaacagcgaggtgccgatgcaccgatcagctccttctcaaacaacaaagcgcagtaggtcacccttttctactacacgccgatcctgggacgattctgagtcgtcaggtactaatctcaatatagacaacgaagattacagcaggtaccccccacgggaatatcgggcatctggatcgaggaggggaatggcctacgggcatattgactcatatggcgctgatgactccgaggaggagggggctggccctgtcgaacgccctcctgtcagaggtaagaccgggaagttcaaagacgataaactctacgatcccgaaaagggcgctcggagtttggcaggtccgccacctcatttcagctccttcagccgcgatgttcgagaagaacgagacaagcttgaccccgtcccagccgctagatgttctgcgagccgggcagacttcctcccacagagcagcgtggcaagtcaaagcagctctgaaggtaagctggctaccaaaggcgacagctcggaacgggagcggcgagagcagaatcttcccgctcggccttccagggctcccgtgtctatctgtgggggtggagagaatacttccaagagcgcggaagaacctgttgttagacccaaaatacgtaatctcgcatcacccaactgtgtaaaaccaaaaatcttctttgataccgatgacgacgatgatatgccccactcgacgagccgatggagagatactgcgaatgataatgaaggtcactccgacggattagcgaggcgcggaaggggagagagcagtagcggataccctgagccaaagtatcccgaggacaaacgcgaagccaggagtgatcaggtgaagcccgagaaggtgccaaggcgaagacgtaccatggctgacccggacttctggacccacagcgacgattactataagtattgtgatgaggactctgactccgataaggaatggatcgcggctctgcgaaggaagtaccgtagcagggagcagacccttagctcatccggtgaaagttgggaaactctgccaggtaaggaagagcgagaaccccctcaggctaaggtctcggcttctaccggaacatctccaggcccaggcgcatcagcaagcgccggagctggggctggcgcttctgcaggatctaacgggagtaactacttggaagaagtgagggagccatccctacaagaggagcaggcatccctggaagagggcgaaatcccctggctgcagtatcatgagaacgattcttcgtccgaaggagacaacgatagtggccatgagttaatgcagcctggtgtctttatgttagacgggaacaataaccttgaagatgactctagtgtaagtgaagacctggaggtggactggtctctgttcgatggtttcgcggacggactcggtgtggcagaagcaattagttacgttgatccacagttcttgacctacatggcattggaagaacgcctagcgcaagccatggaaacggctctggcccacctggagtcactagctgtggatgtggaggtggcaaacccaccggcttctaaggagtctattgacgctttgccggaaatcctggtgaccgaggatcatggtgccgtcggtcaggaaatgtgctgccccatctgttgctccgaatacgtcaagggtgaggtggccaccgagctcccttgtcaccactacttccacaagccgtgcgtgagcatttggcttcaaaagtcaggaacttgtcccgtatgtcgttgtatgtttccaccccctctctag

SEQ ID NO: 240380 - DNA, 1677 bp, Artificial Sequence
  derived and/or modified sequence
atgcatcgctctgcaccttcacagacaactaagcgttccagatctcccttttccactacgcgcaggtcctgggatgactcagagagttccggcacaaacctcaatatagataatgaagattattcaagatatcctccaagagaatacagggcctccggcagccggcgtggaatggcctacgggcatattgactcctacggagccgacgacagcgaggaagaaggcgcagggccagtcgagaggcccccagtgcgtggcaagacaggcaaatttaaagatgacaaactccttgatcctgttccagccgcaaggtgcagtgcaagccgggcagactttctgcctcagtcttccgtggcctcacaaagcagttctgaagggaagctagctacaaaaggagacagtagcgaacgcgagcgacgggaacaaaatctgcccgctcggcctagtcgtgcccctgttagtatatgcggcggtggcgagaacaccagcaagtctgctgaggaacctgtggtgcggcctaagatcagaaatctggcctcgcccaattgtgtcaagcctaagatattttttgataccgatgacgatgacgatatgccacactccacaagccgttggcgggacacagcaaacgataatgagggacacagtgatggtctggctaggcgcggtagaggcgaatcttccagcggataccccgaacctaaatatccagaagacaaaagagaggcgagaagtgatcaggtgaagcctgaaaaggtgcctaggcggagaaggactatggctgaccctgatttctggactcactcagacgattactataaatactgtgatgaagactctgactccgacaaagaatggattgctgctcttagacggaaatacaggtctcgggagcaaactctgtcatcttctggtgaaagctgggaaaccttgcccggaaaggaggagcgggagccccctcaggctaaggtgtcagcctcgaccggcacatctcccggaccgggagctagcgcaagtgccggagccggagcgggtgctagcgcgggatctaatggctccaattacctagaagaggtccgggagcctagcctgcaggaagaacaggccagtctcgaagaaggtgaaatcccttggctgcaatatcacgagaacgattcatcctctgagggcgataatgattctgggcacgagctcatgcaaccaggagtgtttatgttagatggaaataataatctggaggacgactccagcgtgtccgaagatctggaggtagattggtccctgttcgatggtttcgcggatggcctaggtgttgcagaagcaatttcctatgttgaccctcagtttctgacttacatggcactagaagagcgcctagctcaggctatggagacagcgcttgcccatctggagagcttagcggttgatgttgaagtggccaacccccctgcctctaaggagtccatcgacgcgctgcctgagatcctagtaactgaagatcatggggctgtgggccaggagatgtgctgtcccatttgctgttccgagtacgtaaagggcgaagtcgccacagagttgccctgtcaccactatttccataaaccatgcgtgtcaatttggcttcagaaatccggaacatgtccagtatgtcgatgcatgtttcccccacccttgtag

SEQ ID NO: 240381 - protein, 1200 aa, Artificial Sequence
  derived and/or modified sequence
MRAQGRGRLPRRLLLLLALWVQAARPMGYFELQLSALRNVNGELLSGACCDGDGRTTRAGGCGHDECDTYVRVCLKEYQAKVTPTGPCSYGHGATPVLGGNSFYLPPAGAAGDRARARARAGGDQDPGLVVIPFQFAWPRSFTLIVEAWDWDNDTTPNEELLIERVSHAGMINPEDRWKSLHFSGHVAHLELQIRVRCDENYYSATCNKFCRPRNDFFGHYTCDQYGNKACMDGWMGKECKEAVCKQGCNLLHGGCTVPGECRCSYGWQGRFCDECVPYPGCVHGSCVEPWQCNCETNWGGLLCDKDLNYCGSHHPCTNGGTCINAEPDQYRCTCPDGYSGRNCEKAEHACTSNPCANGGSCHEVPSGFECHCPSGWSGPTCALDIDECASNPCAAGGTCVDQVDGFECICPEQWVGATCQLDVNDCRGQCQHGGTCKDLVNGYQCVCPRGFGGRHCELERDECASSPCHSGGLCEDLADGFHCHCPQGFSGPLCEVDVDLCEPSPCRNGARCYNLEGDYYCACPDDFGGKNCSVPREPCPGGACRVIDGCGSDAGPGMPGTAASGVCGPHGRCVSQPGGNFSCICDSGFTGTYCHENIDDCLGQPCRNGGTCIDEVDAFRCFCPSGWEGELCDTNPNDCLPDPCHSRGRCYDLVNDFYCACDDGWKGKTCHSREFQCDAYTCSNGGTCYDSGDTFRCACPPGWKGSTCAVAKNSSCLPNPCVNGGTCVGSGASFSCICRDGWEGRTCTHNTNDCNPLPCYNGGICVDGVNWFRCECAPGFAGPDCRINIDECQSSPCAYGATCVDEINGYRCSCPPGRAGPRCQEVIGFGRSCWSRGTPFPHGSSWVEDCNSCRCLDGRRDCSKVWCGWKPCLLAGQPEALSAQCPLGQRCLEKAPGQCLRPPCEAWGECGAEEPPSTPCLPRSGHLDNNCARLTLHFNRDHVPQGTTVGAICSGIRSLPATRAVARDRLLVLLCDRASSGASAVEVAVSFSPARDLPDSSLIQGAAHAIVAAITQRGNSSLLLAVTEVKVETVVTGGSSTGLLVPVLCGAFSVLWLACVVLCVWWTRKRRKERERSRLPREESANNQWAPLNPIRNPIERPGGHKDVLYQCKNFTPPPRRADEALPGPAGHAAVREDEEDEDLGRGEEDSLEAEKFLSHKFTKDPGRSPGRPAHWASGPKVDNRAVRSINEARYAGKE

SEQ ID NO: 240382 - DNA, 3603 bp, Artificial Sequence
  derived and/or modified sequence
atgcgggcccagggacgcgggcggctgccccggagactcctgctcctgctcgccctctgggtccaggccgcacgtcctatggggtactttgaactgcagctctcagcattgaggaacgtgaatggagagctcctcagcggcgcgtgctgtgacggggacggacgaactacgagagctggaggctgcggccacgacgagtgcgacacgtatgtgagggtgtgcttaaaagaatatcaggccaaggtgactcccactgggccctgttcatatggtcatggggctacacccgtacttggcggcaattccttttacctgcctcccgctggggcagcaggcgacagggccagagcccgcgcccgagccggaggggatcaggacccaggacttgtggtgattcccttccagtttgcgtggcctagatcatttactctcatcgttgaggcatgggactgggataacgacaccacgccaaacgaggagctgctaatcgagagggtctcacacgccggaatgattaaccctgaagacagatggaagagccttcatttctcaggccacgtcgcacatttagaactccagattcgggttcggtgcgacgaaaactactactctgccacatgcaataaattctgccgacccagaaatgatttctttggacactacacgtgcgatcagtatggtaataaagcctgcatggacggttggatgggtaaagagtgcaaggaagccgtctgtaaacaggggtgtaacttgttacatggaggctgcacagtgcccggggaatgccggtgttcttacggatggcagggtcgcttttgtgacgaatgtgtcccgtatccgggatgcgtccatggctcatgtgtcgaaccatggcagtgcaactgcgagactaattggggcggattgttgtgtgacaaggacctcaattactgtggctctcaccacccatgcactaatggcggaacatgtatcaacgccgagccggatcaatatcgatgcacgtgcccagatggatatagcgggagaaactgtgaaaaggctgaacatgcgtgtacatcaaatccctgtgctaatggagggtcctgccatgaagtgccttctggatttgagtgccactgtccttcaggatggagcggacccacttgcgcactggatatcgacgagtgtgccagcaatccctgtgccgcaggtggtacctgcgttgatcaagtggatgggttcgagtgtatctgtccagagcaatgggtgggagctacatgtcagttagacgtgaatgattgtcgtggacagtgccagcacgggggcacgtgcaaggatctggtgaatggctatcagtgtgtctgcccacgcggattcggcggacgccactgtgagctcgagagagacgagtgcgctagcagcccatgccactccggcggcctctgcgaagatttggccgacggctttcactgtcattgtccgcagggattcagcggtccattatgtgaggtagatgttgacctgtgcgaaccttcaccctgcaggaatggtgcacgctgctataacctagaaggagactattattgtgcttgtccagatgactttggcggcaaaaattgctctgtgccgagagagccatgccctggcggagcctgtagggtgatcgacggatgcgggagtgatgccggtcctgggatgccaggcacggccgcatccggcgtatgcggccctcatgggcgctgtgtcagtcaacccggagggaacttctcgtgcatttgtgacagcgggtttactggcacctactgtcacgagaatattgacgactgcctgggtcaaccttgtcgtaacggcggcacctgtatcgacgaggtcgacgcttttagatgtttttgtccgtctggctgggagggagagctgtgcgacaccaatcccaatgattgcctgcctgacccatgccattcaaggggtcgctgctatgacctcgtgaatgatttttactgcgcatgcgacgatggatggaagggcaagacgtgccacagccgggaattccagtgcgacgcttatacgtgctctaacggtggtacctgttacgattcaggggacacatttcggtgtgcttgtccacctggctggaagggtagcacgtgcgccgtcgcaaaaaattcctcttgcctcccaaacccatgtgttaacggtgggacctgcgtcggcagtggcgcatcctttagctgcatttgccgcgacggatgggagggtcggacctgtacacacaacactaatgactgcaacccactgccctgctacaacgggggcatatgtgtggacggagtcaattggtttcgctgtgaatgtgcccccggctttgcaggccctgattgtcgcatcaatattgatgagtgtcaaagttcaccttgcgcatacggcgccacatgcgtggatgagatcaacgggtatagatgttcatgccccccgggccgagccggaccacggtgtcaggaagtaatagggttcgggcgctcttgttggtcaagagggacaccgttcccacacggaagcagctgggtcgaagactgtaattcctgtcgttgcctggacggaagacgcgattgttccaaagtgtggtgtggctggaagccgtgcctgctggcgggccagccggaagctctgagcgcacagtgtcctttgggacagcgttgtttagaaaaggcccctggccaatgcctccgacctccttgcgaggcttggggggagtgcggggccgaagagccaccaagcactccctgtcttccaaggtcgggccacttggacaataactgcgccagattgactctgcacttcaacagggaccatgttccccagggcacaacggtgggagccatatgttctggaatccggtctttgcctgcgacgcgtgctgtggcccgcgatcgccttctggtgttgttgtgcgatcgggcctcttctggtgcctctgctgtggaggttgctgtgtcattcagccccgcaagagacctgccagacagctccctgatccagggagcagcccatgccatagtcgcagcaatcacccaacgggggaactcatccctcctcctggctgtgactgaggttaaagtggagactgtggtgacagggggatctagcaccggactgctcgttccagtgctgtgcggtgcctttagtgtgctttggctggcttgtgtggtcctatgcgtttggtggacccggaagagacgcaaggagagagagcgatctcgattgccacgcgaggagtcagccaacaaccagtgggcccccttgaatcccatacgcaaccctatcgaacgtcccggcggacataaggacgtgttgtatcagtgtaaaaattttaccccaccaccacggcgagccgacgaggccctgcccggccccgcgggacatgctgctgtgagagaggatgaggaagacgaagatctcggtcggggagaagaggatagcctggaagctgagaagttcctgtcccacaaatttactaaagaccctgggcggagcccgggacggcccgcccactgggcgtcaggccctaaagtcgataatcgcgccgtcaggagcatcaatgaagcccgatacgctggcaaagagtag

SEQ ID NO: 240383 - DNA, 5720 bp, Artificial Sequence
  derived and/or modified sequence
ctcatgcatatgcaggtgcgcgggtgacgaatgggcgagcgagctgtcagtctcgttccgaacttgttggctgcggtgccgggagcgcgggcgcgcagagccgaggccgggacccgctgccttcaccgccgccgccgtcgccgccgggtgggagccgggccgggcagccggagcgcggccgccagcgagccggagctgccgccgcccctgcacgcccgccgcccaggcccgcgcgccgcggcgctgcgctcgaccccgcccgcgccgccgccgccgccgcctctgccgctgccgctgcctctgcgggcgctcggagggcgggcgggcgctgggaggccggcgcggcggctgggagccgggcgcgggcggcggcggcggggccgggcgggcgggtcgcgggggcaatgcgggcgcagggccgggggcgccttccccggcggctgctgctgctgctggcgctctgggtgcaggcggcgcggcccatgggctatttcgagctgcagctgagcgcgctgcggaacgtgaacggggagctgctgagcggcgcctgctgtgacggcgacggccggacaacgcgcgcggggggctgcggccacgacgagtgcgacacgtacgtgcgcgtgtgccttaaggagtaccaggccaaggtgacgcccacggggccctgcagctacggccacggcgccacgcccgtgctgggcggcaactccttctacctgccgccggcgggcgctgcgggggaccgagcgcgggcgcgggcccgggccggcggcgaccaggacccgggcctcgtcgtcatccccttccagttcgcctggccgcgctcctttaccctcatcgtggaggcctgggactgggacaacgataccaccccgaatgaggagctgctgatcgagcgagtgtcgcatgccggcatgatcaacccggaggaccgctggaagagcctgcacttcagcggccacgtggcgcacctggagctgcagatccgcgtgcgctgcgacgagaactactacagcgccacttgcaacaagttctgccggccccgcaacgactttttcggccactacacctgcgaccagtacggcaacaaggcctgcatggacggctggatgggcaaggagtgcaaggaagctgtgtgtaaacaagggtgtaatttgctccacgggggatgcaccgtgcctggggagtgcaggtgcagctacggctggcaagggaggttctgcgatgagtgtgtcccctaccccggctgcgtgcatggcagttgtgtggagccctggcagtgcaactgtgagaccaactggggcggcctgctctgtgacaaagacctgaactactgtggcagccaccacccctgcaccaacggaggcacgtgcatcaacgccgagcctgaccagtaccgctgcacctgccctgacggctactcgggcaggaactgtgagaaggctgagcacgcctgcacctccaacccgtgtgccaacgggggctcttgccatgaggtgccgtccggcttcgaatgccactgcccatcgggctggagcgggcccacctgtgcccttgacatcgatgagtgtgcttcgaacccgtgtgcggccggtggcacctgtgtggaccaggtggacggctttgagtgcatctgccccgagcagtgggtgggggccacctgccagctggacgtcaacgactgtcgcgggcagtgtcagcatgggggcacctgcaaggacctggtgaacgggtaccagtgtgtgtgcccacggggcttcggaggccggcattgcgagctggaacgagacgagtgtgccagcagcccctgccacagcggcggcctctgcgaggacctggccgacggcttccactgccactgcccccagggcttctccgggcctctctgtgaggtggatgtcgacctttgtgagccaagcccctgccggaacggcgctcgctgctataacctggagggtgactattactgcgcctgccctgatgactttggtggcaagaactgctccgtgccccgcgagccgtgccctggcggggcctgcagagtgatcgatggctgcgggtcagacgcggggcctgggatgcctggcacagcagcctccggcgtgtgtggcccccatggacgctgcgtcagccagccagggggcaacttttcctgcatctgtgacagtggctttactggcacctactgccatgagaacattgacgactgcctgggccagccctgccgcaatgggggcacatgcatcgatgaggtggacgccttccgctgcttctgccccagcggctgggagggcgagctctgcgacaccaatcccaacgactgccttcccgatccctgccacagccgcggccgctgctacgacctggtcaatgacttctactgtgcgtgcgacgacggctggaagggcaagacctgccactcacgcgagttccagtgcgatgcctacacctgcagcaacggtggcacctgctacgacagcggcgacaccttccgctgcgcctgcccccccggctggaagggcagcacctgcgccgtcgccaagaacagcagctgcctgcccaacccctgtgtgaatggtggcacctgcgtgggcagcggggcctccttctcctgcatctgccgggacggctgggagggtcgtacttgcactcacaataccaacgactgcaaccctctgccttgctacaatggtggcatctgtgttgacggcgtcaactggttccgctgcgagtgtgcacctggcttcgcggggcctgactgccgcatcaacatcgacgagtgccagtcctcgccctgtgcctacggggccacgtgtgtggatgagatcaacgggtatcgctgtagctgcccacccggccgagccggcccccggtgccaggaagtgatcgggttcgggagatcctgctggtcccggggcactccgttcccacacggaagctcctgggtggaagactgcaacagctgccgctgcctggatggccgccgtgactgcagcaaggtgtggtgcggatggaagccttgtctgctggccggccagcccgaggccctgagcgcccagtgcccactggggcaaaggtgcctggagaaggccccaggccagtgtctgcgaccaccctgtgaggcctggggggagtgcggcgcagaagagccaccgagcaccccctgcctgccacgctccggccacctggacaataactgtgcccgcctcaccttgcatttcaaccgtgaccacgtgccccagggcaccacggtgggcgccatttgctccgggatccgctccctgccagccacaagggctgtggcacgggaccgcctgctggtgttgctttgcgaccgggcgtcctcgggggccagtgctgtggaggtggccgtgtccttcagccctgccagggacctgcctgacagcagcctgatccagggcgcggcccacgccatcgtggccgccatcacccagcgggggaacagctcactgctcctggctgtcaccgaggtcaaggtggagacggttgttacgggcggctcttccacaggtctgctggtgcctgtgctgtgtggtgccttcagcgtgctgtggctggcgtgcgtggtcctgtgcgtgtggtggacacgcaagcgcaggaaagagcgggagaggagccggctgccgcgggaggagagcgccaacaaccagtgggccccgctcaaccccatccgcaaccccattgagcggccggggggccacaaggacgtgctctaccagtgcaagaacttcacgccgccgccgcgcagggcggacgaggcgctgcccgggccggccggccacgcggccgtcagggaggatgaggaggacgaggatctgggccgcggtgaggaggactccctggaggcggagaagttcctctcacacaaattcaccaaagatcctggccgctcgccggggaggccggcccactgggcctcaggccccaaagtggacaaccgcgcggtcaggagcatcaatgaggcccgctacgccggcaaggagtaggggcggctgccagctgggccgggacccagggccctcggtgggagccatgccgtctgccggacccggaggccgaggccatgtgcatagtttctttattttgtgtaaaaaaaccaccaaaaacaaaaaccaaatgtttattttctacgtttctttaaccttgtataaattattcagtaactgtcaggctgaaaacaatggagtattctcggatagttgctatttttgtaaagtttccgtgcgtggcactcgctgtatgaaaggagagagcaaagggtgtctgcgtcgtcaccaaatcgtagcgtttgttaccagaggttgtgcactgtttacagaatcttccttttattcctcactcgggtttctctgtggctccaggccaaagtgccggtgagacccatggctgtgttggtgtggcccatggctgttggtgggacccgtggctgatggtgtggcctgtggctgtcggtgggactcgtggctgtcaatgggacctgtggctgtcggtgggacctacggtggtcggtgggaccctggttattgatgtggccctggctgccggcacggcccgtggctgttgacgcacctgtggttgttagtggggcctgaggtcatcggcgtggcccaaggctggcaggtcaacctcgcgcttgctggccagtccaccctgcctgccgtctgtgcttcctcctgcccagaacgcccgctccagcgatctctccactgtgctttcagaagtgcccttcctgctgcgcagttctcccatcctgggacggcggcagtattgaagctcgtgacaagtgccttcacacagacccctcgcaactgtccacgcgtgccgtggcaccaggcgctgcccacctgccggccccggccgcccctcctcgtgaaagtgcatttttgtaaatgtgtacatattaaaggaagcactctgtatatttgattgaataatgccaccattccggcctcccttgttctttcggtgctgtcccttttgtattgagagtgaggttgggggagagccacgccggcagagaggcttggggcagtggggcgcgtgctgggtattggcccacgtggctgtggtggctgtagagggcgagacggttctgttgagtcggggcctgccagggcctcgaatgcgttggcatgccaaggtggtggatgcaggtttggccaaaaccttcctgggaatggggaggggggtgtctaggtgcctggcacccgaccctgactaaaacagctgaaaacagttttataaaatagtataaaattgcttacccacgaatacgtatcaaggtcttaaggaattaacaggtcaaaatttttattcattcatttattcctttgttttgcttggtcattcagaggcaaggtcagcatttgatggaggcaggagagaagcagcccttccacctggccctggagctggttttgcccctcactgcttgagccaactggaacgtggcatggtggcctcagggctgggcatggaaggccgactccaaggctgactccgagccgcctgtcagtgatgtgcaagtctttaccctgctgtgaggggtaggaggtcaactgagtcaaggagcaaagccaagaaccagatctgtacaaaagagaaaaaaaaagtcctgctgacagcctgggagtgaggctgccttgcacaggcagaacaaatgaataaatgaatgaacgaataaaaattttgacctggta

SEQ ID NO: 240384 - DNA, 3603 bp, Artificial Sequence
  derived and/or modified sequence
atgagggcccagggccggggccgcctgccccggcggctgctgctgctgctggccctgtgggtgcaggccgcccggcccatgggctactttgagctgcagctgagcgccctgagaaatgtgaatggagagctgctgagcggggcctgctgtgatggagatggccgcaccaccagggctgggggctgcggccatgatgaatgtgacacctacgtgcgggtgtgcctgaaggagtaccaggccaaggtgacccccaccggcccctgcagctatggccacggggccacccctgtgctgggcggcaacagcttctacctgcccccagctggagctgctggggaccgggcccgggcccgggcccgggccggcggggaccaggaccccggcctggtggtgatccccttccagtttgcctggcccaggagcttcaccctgattgtggaggcctgggactgggacaatgacaccaccccaaatgaggagctgctgattgagcgggtgtcccatgctggcatgatcaacccagaagatcgctggaagagcctgcacttcagcggccacgtggcccacctggagctgcagatccgggtgcgctgtgatgagaactactacagcgccacctgcaacaagttctgccggcccagaaatgacttcttcggccactacacctgtgaccagtatggcaacaaggcctgcatggatggctggatgggcaaggagtgcaaggaggccgtgtgcaagcagggctgcaacctgctgcatggaggctgcaccgtgcctggagaatgtcgctgcagctatggctggcagggccgcttctgtgatgaatgtgtgccctacccaggctgtgtgcacggcagctgtgtggagccctggcagtgcaactgtgagaccaactggggcggcctgctgtgtgacaaggacctgaactactgcggcagccaccacccctgcaccaatggaggcacctgcatcaatgctgagccagaccagtaccgctgcacctgcccagatggctacagcggcaggaactgtgagaaggccgagcacgcctgcaccagcaacccctgtgccaacggcggcagctgccacgaggtgcccagcggctttgagtgccactgccccagcggctggagcggccccacctgtgccctggacattgatgaatgtgccagcaacccctgtgccgccggcggcacctgtgtggaccaggtggatggctttgagtgcatctgcccagagcagtgggtgggcgccacctgccagctggatgtgaatgactgccggggccagtgccagcacggcggcacctgcaaggacctggtgaatggctaccagtgtgtgtgcccccggggctttggaggccgccactgtgagctggagagagatgaatgtgccagcagcccctgccacagcggcggcctgtgtgaggacctggctgatggcttccactgccactgcccccagggcttcagcggccccctgtgtgaggtggatgtggacctgtgtgagcccagcccctgcagaaatggagcccgctgctacaacctggagggggactactactgtgcctgcccagatgactttggaggcaagaactgcagcgtgccccgggagccctgccctggaggagcctgccgggtgattgatggctgcggcagtgatgctggccctggcatgcctggaacagctgccagcggcgtgtgtggcccccacggccgctgtgtgtcccagcccggcggcaacttcagctgcatctgtgacagcggcttcaccggcacctactgccatgaaaatattgatgactgcctgggccagccctgcagaaatggaggcacctgcattgatgaggtggatgccttccgctgcttctgccccagcggctgggagggggagctgtgtgacaccaaccccaatgactgcctgcctgacccctgccacagccggggccgctgctatgacctggtgaatgacttctactgtgcctgtgatgatggctggaagggcaagacctgccacagccgggagttccagtgtgatgcctacacctgcagcaatggaggcacctgctatgacagcggggacaccttccgctgtgcctgccccccaggctggaagggcagcacctgtgctgtggccaagaacagcagctgcctgcccaacccctgtgtgaatggaggcacctgtgtgggcagcggggccagcttcagctgcatctgcagagatggctgggagggccgcacctgcacccacaacaccaatgactgcaaccccctgccctgctacaacggcggcatctgtgtggatggagtgaactggttccgctgtgaatgtgcccctggctttgctggccctgactgccgcatcaacattgatgagtgccagagcagcccctgtgcctacggggccacctgtgtggatgagatcaatggctaccgctgcagctgccccccaggccgggccggcccccgctgccaggaggtgattggcttcggccgcagctgctggagccggggcacccccttcccccacggcagctcctgggtggaggactgcaacagctgccgctgcctggatggccggcgggactgcagcaaggtgtggtgtggctggaagccctgcctgctggccggccagcctgaggccctgagcgcccagtgccccctgggccagcgctgcctggagaaggcccctggccagtgcctgcggcccccctgtgaggcctggggagaatgtggggctgaggagccccccagcaccccctgcctgcccaggagcggccacctggacaacaactgtgcccggctgaccctgcacttcaacagagaccacgtgccccagggcaccaccgtgggcgccatctgcagcggcatccgcagcctgcctgccaccagggctgtggcccgggaccggctgctggtgctgctgtgtgaccgggccagcagcggggccagcgctgtggaggtggccgtgtccttcagccctgcccgggacctgcctgacagcagcctcatccagggcgccgcccacgccatcgtggccgccatcacccagaggggcaacagcagcctgctgctggccgtgacagaggtgaaggtggagaccgtggtgactggaggcagcagcacaggcctgctggtgcctgtgctgtgtggggccttctctgtgctgtggctggcctgtgtggtgctgtgtgtgtggtggaccaggaagaggaggaaggagcgggagaggagccggctgccccgggaggagagcgccaacaaccagtgggcccccctgaaccccatccggaaccccatcgagaggcctgggggccacaaggatgtgctgtaccagtgcaagaacttcaccccacctccaagaagagcagatgaggccctgcccggccctgctggccacgccgctgtgcgggaggatgaagaagatgaggacctgggccgcggggaggaggacagcctggaggccgagaagttcctgagccacaagttcaccaaggaccccggccgcagccctggccggcctgcccactgggccagcggccccaaggtggacaacagagctgtgcgcagcatcaatgaggcccgctatgccggcaaggagtag

SEQ ID NO: 240385 - DNA, 3603 bp, Artificial Sequence
  derived and/or modified sequence
atgcgggcccagggccggggccggctgccccggcggctgctgctgctgcttgccttgtgggtgcaggcagcacgccctatgggctattttgaacttcaattatcggccttacgaaacgtcaacggggaactgttgtccggagcctgttgcgacggagacggccgtactacgcgcgccggcggctgtgggcacgacgagtgcgatacatacgtccgcgtgtgtttaaaagagtaccaggctaaggttacccctacagggccatgtagctatggacatggcgcaacaccagttttgggaggaaactctttttacttacctccagcaggagctgctggcgatagggctagagcccgagctcgcgccggcggggaccaggatcctggcctcgtggtcatacctttccagtttgcttggccccggagctttaccctcatcgttgaagcttgggattgggacaatgacacaactcccaacgaggaactgctcattgagagagtgtctcacgctggcatgattaatcctgaggacaggtggaaaagcctgcacttctcaggccacgttgcacatctggagctacagataagagtgaggtgcgatgaaaactactatagcgccacatgcaataaattttgtagacctcgaaatgatttcttcggacattacacttgtgaccagtatggaaataaagcctgtatggatggatggatggggaaagaatgtaaagaagcggtttgcaagcagggttgtaacctcctgcacgggggctgcacagttccgggcgagtgccgctgttcctatgggtggcaaggccggttctgtgatgagtgtgtgccctaccccggttgtgtgcacgggagttgtgtggagccctggcagtgcaactgcgagaccaactggggaggacttctctgtgataaagatctcaattactgtgggagccaccatccttgtaccaacggcgggacctgcatcaacgctgagccagaccaatatcgctgtacctgcccagacgggtacagtggaaggaactgcgaaaaggccgagcacgcatgcacgagcaatccatgcgctaatggtgggagttgtcacgaggtcccttcgggtttcgaatgtcattgcccctccggatggagcgggcctacgtgcgccctcgatatagatgagtgcgcgtctaatccatgcgctgcgggaggcacatgtgtcgatcaggtcgatgggtttgagtgtatttgcccagagcagtgggtgggtgccacatgccaactggatgtgaacgactgccgcggccagtgccagcatggcggcacttgcaaagacctcgtcaatgggtatcagtgcgtatgtcccaggggctttggcggacgccactgcgaattagagcgcgacgaatgtgcatcctcaccatgccacagcgggggtctttgcgaagatctggccgacggctttcactgccattgcccacagggattttcaggtcctttatgtgaggtggacgttgacttgtgcgaaccgtcaccgtgtcggaatggcgccagatgctataatctggaaggggactattattgtgcctgcccggatgacttcggcggcaagaactgttcggttcctcgggagccttgccccggaggagcatgccgggtgatagacggatgtggctcggacgccgggccagggatgccgggcacagccgctagcggggtttgcggcccccacggacggtgcgtgagccaacctgggggcaacttctcatgcatctgcgacagtggattcaccggaacctattgtcacgagaacattgacgactgtctgggtcaaccatgtaggaatggtggaacttgtatcgatgaagtggatgctttcagatgcttctgtcctagtgggtgggaaggtgaattatgtgatacgaaccctaatgactgcctcccagatccatgccattctagaggccggtgttacgacctcgttaacgacttctactgtgcgtgtgacgacggatggaaaggaaagacatgccacagtcgtgagtttcagtgtgatgcttatacctgctctaatgggggaacctgctatgattcaggcgacacgttccgctgtgcgtgtccaccaggatggaaggggtctacatgtgcagtggcgaagaactcatcttgcctgccgaatccttgcgtgaatggcgggacttgcgtgggtagcggcgccagcttctcatgtatatgtagggacgggtgggaagggcggacatgcacccataataccaacgactgcaaccccctgccttgttacaatggcgggatctgtgtggatggagtgaactggtttagatgtgaatgcgctcccggcttcgccggaccagactgcaggattaacatcgacgaatgccagtcttcgccctgcgcctatggggccacctgcgtagacgaaatcaacggttataggtgttcgtgtccacccgggagggccggacctcgctgtcaggaagtgattgggtttgggcgctcttgctggtcccggggcactccatttccccacgggtcttcttgggtggaagattgcaatagctgtcgttgtttggatggtcggcgcgattgttcaaaggtgtggtgtggctggaaaccatgcctcctagccggccaacctgaggcccttagtgcacagtgtcctctgggccagaggtgtttagaaaaggcccctggccagtgtctgagaccaccttgcgaggcctggggggaatgcggcgctgaggagcctccaagcaccccatgcttgccccggagtggccatttagataacaattgcgcccgtctgacattgcatttcaacagggaccacgtgccgcaagggacgacggtcggggcaatatgcagcggcatcaggtccctccccgctacacgggctgtcgcccgcgacagactcctggttctgctctgcgacagggcttcatcaggcgcttcagccgtggaggtggcagtcagttttagtccggctagagatcttcccgactcctctttaatacagggagccgcccatgctatcgtggcagccatcacacaacgtggtaattcttctctgctgctggctgtgaccgaagtgaaggtggagacggttgtgaccgggggatcctcgacaggtctgctggtgccagtgttgtgtggcgcgttttccgtactgtggcttgcctgcgttgtactgtgtgtgtggtggacgcgcaagcggcggaaggaaagggagaggagcagactgcctcgggaagaatcagccaacaatcagtgggcaccattaaatcccattcgcaatccgatagagcgccccggggggcataaggacgtgctgtatcaatgtaagaacttcacgccaccccccagaagagcagatgaagccctgcccgggcctgccggtcatgcggccgtgcgggaggacgaggaggacgaggacctggggaggggcgaagaggactcacttgaggcggagaaatttctgtctcataaattcactaaagatcccgggcgctctccaggccgcccggcgcactgggcgtccggaccaaaagtcgataacagggccgtgagatctatcaatgaagccagatatgcaggtaaggagtag

SEQ ID NO: 240386 - DNA, 3603 bp, Artificial Sequence
  derived and/or modified sequence
atgagggcccagggacggggaagactcccaagaaggctgctgttgcttctggctctctgggtgcaggcagcgagaccaatgggatattttgagcttcaactatccgcattgcgtaatgtcaatggagaactgctttctggggcttgttgcgatggcgatggacgaactactcgtgctggcggttgtggacatgacgagtgcgatacatacgtgcgggtatgcctgaaggagtatcaggcaaaagtgacgcctacagggccttgtagctacggacatggggctaccccagtactgggaggaaatagtttttacctgccccctgcaggagccgcaggcgatcgcgctagggctagggctagagcgggaggtgaccaggatcccggtttggtcgtaatcccttttcaattcgcctggccacggagcttcactctgattgtggaggcttgggattgggacaacgataccaccccaaacgaggagctgcttattgaacgggtttctcacgctggcatgatcaaccccgaggaccgatggaaatctttacatttctctgggcacgttgcccacttggagcttcagatcagggtccggtgtgatgagaattattattctgccacatgcaataagttctgtagacctcggaatgacttctttggacactacacgtgtgaccagtatgggaataaggcctgtatggacgggtggatgggtaaagaatgcaaggaagctgtgtgcaaacagggttgtaatcttctgcacggaggctgcaccgtgcctggtgaatgccggtgtagttatggctggcagggaaggttttgtgatgaatgtgtgccatatcccggatgcgtgcacggttcctgtgtggaaccatggcagtgcaattgtgaaacaaactggggcggactgctttgcgacaaagatctgaactactgcggaagccatcatccctgcaccaatggcggaacatgcatcaatgcagagcctgatcagtatcggtgtacctgcccagatggctacagcggaaggaactgtgagaaggctgaacatgcatgcacttctaacccttgcgcaaacggagggtcatgtcacgaagtcccctcaggctttgagtgtcattgcccctcggggtggtccggtcccacttgtgctctggacatcgatgagtgtgcctccaatccctgcgcagccggagggacatgcgtcgaccaggtggatgggtttgagtgcatttgcccagagcaatgggtcggtgccacgtgccagcttgatgtgaacgattgccgcggacaatgccagcatgggggaacttgtaaggatcttgtgaatggatatcaatgcgtgtgccctcgcggttttggcggacggcattgcgagcttgagcgggacgaatgcgcttcatccccttgtcattcgggcggattgtgtgaagacctggcagatggatttcactgtcactgcccccaaggatttagcggtcctttgtgtgaggtggatgtggatctctgtgagccgagcccttgcaggaatggggctaggtgctataacttggagggagactactactgcgcttgtcctgacgattttggcggtaagaattgttctgtgccgagagagccatgtcctggtggtgcctgtcgtgttatcgacggatgtgggagcgacgcaggcccagggatgcccggtaccgctgcttccggcgtttgcggcccacacggccgttgcgtgagccagccagggggaaatttcagctgtatctgtgacagcgggttcactggtacctattgccacgagaatatagatgattgtcttggccagccctgcagaaatggtggcacttgtatcgatgaagtcgatgcctttagatgcttttgccctagtggatgggagggcgagctgtgcgatactaacccaaacgactgtctaccagatccatgccattcgcggggacggtgttatgatctggtgaatgatttttattgtgcctgtgacgatggctggaaaggcaagacttgccacagccgggagttccaatgtgacgcatatacttgctccaatggcggaacatgttacgactctggagatacatttcgctgcgcctgcccgcctggctggaagggaagcacttgcgcagtagccaagaactcctcctgcctgcccaatccgtgtgtgaacggaggtacctgtgttggctccggcgcttcgttctcttgcatctgtcgcgacggctgggaagggaggacatgtacgcataacactaatgactgcaatcccctcccctgctacaacggtggcatctgcgtcgacggcgttaactggttcaggtgcgagtgtgcgccagggttcgctgggccagactgccggatcaacatcgatgaatgccaaagcagcccatgcgcctatggcgcaacctgcgttgacgagatcaatggctaccggtgtagttgcccaccaggacgggctggccctcgctgccaagaggtgattggctttggcaggtcttgctggtcacggggaactccttttccacacggcagtagctgggttgaggattgcaacagttgtcgttgcctggacggacggagggactgtagcaaggtttggtgcggttggaagccctgcttactggctggtcaaccggaagcactaagcgcccagtgccccttgggacagcggtgtctggagaaggcgcctgggcagtgcctgcgccctccttgtgaggcctggggggagtgtggtgccgaggagcctccaagtaccccctgtctccctcggagcgggcatctagataacaattgtgcaaggttgactctgcactttaacagggaccatgttcctcagggcactacagtcggtgctatctgttcaggcattcgctcacttcccgctaccagagcagttgctagagatcggctgcttgtcctgctttgcgatagagcctcctcaggggcttccgcagtggaagtggccgtgtccttctcacctgctagagatctgcccgatagctccttgatccagggcgcagcacatgccattgtggctgcaatcactcagcgaggaaatagttcgcttttactcgccgttaccgaggtgaaagtggagacagtggtgacaggagggagttcgacagggcttttagtacctgtgctttgtggggcattcagcgtcttatggctggcatgtgttgttttgtgcgtgtggtggacacgtaaacgacgcaaagaaagagagagatcgcgacttcctagggaagagagtgccaacaatcagtgggcacctttgaatcctattagaaaccccatcgaacgacccggaggccacaaggacgtcctgtaccagtgtaagaacttcacaccacctcctcgtagggccgacgaggcactgcccggacccgctggccatgctgctgtgagagaagatgaagaggatgaggacttaggacgcggagaagaagactctctcgaggccgaaaaattcctgagccacaagtttactaaagaccctggcagaagccctgggagacctgcacattgggcctccggcccaaaagtcgacaacagggcggtcaggtccatcaatgaagcaaggtatgccggaaaggagtag

SEQ ID NO: 240387 - DNA, 3603 bp, Artificial Sequence
  derived and/or modified sequence
atgagagcccagggcagaggcagactgcccagaagactgctgctgctgctggccctgtgggtgcaggccgccagacccatgggctacttcgagctgcagctgagcgccctgagaaacgtgaacggcgagctgctgagcggcgcctgctgcgacggcgacggcagaaccaccagagccggcggctgcggccacgacgagtgcgacacctacgtgagagtgtgcctgaaggagtaccaggccaaggtgacccccaccggcccctgcagctacggccacggcgccacccccgtgctgggcggcaacagcttctacctgccccccgccggcgccgccggcgacagagccagagccagagccagagccggcggcgaccaggaccccggcctggtggtgatccccttccagttcgcctggcccagaagcttcaccctgatcgtggaggcctgggactgggacaacgacaccacccccaacgaggagctgctgatcgagagagtgagccacgccggcatgatcaaccccgaggacagatggaagagcctgcacttcagcggccacgtggcccacctggagctgcagatcagagtgagatgcgacgagaactactacagcgccacctgcaacaagttctgcagacccagaaacgacttcttcggccactacacctgcgaccagtacggcaacaaggcctgcatggacggctggatgggcaaggagtgcaaggaggccgtgtgcaagcagggctgcaacctgctgcacggcggctgcaccgtgcccggcgagtgcagatgcagctacggctggcagggcagattctgcgacgagtgcgtgccctaccccggctgcgtgcacggcagctgcgtggagccctggcagtgcaactgcgagaccaactggggcggcctgctgtgcgacaaggacctgaactactgcggcagccaccacccctgcaccaacggcggcacctgcatcaacgccgagcccgaccagtacagatgcacctgccccgacggctacagcggcagaaactgcgagaaggccgagcacgcctgcaccagcaacccctgcgccaacggcggcagctgccacgaggtgcccagcggcttcgagtgccactgccccagcggctggagcggccccacctgcgccctggacatcgacgagtgcgccagcaacccctgcgccgccggcggcacctgcgtggaccaggtggacggcttcgagtgcatctgccccgagcagtgggtgggcgccacctgccagctggacgtgaacgactgcagaggccagtgccagcacggcggcacctgcaaggacctggtgaacggctaccagtgcgtgtgccccagaggcttcggcggcagacactgcgagctggagagagacgagtgcgccagcagcccctgccacagcggcggcctgtgcgaggacctggccgacggcttccactgccactgcccccagggcttcagcggccccctgtgcgaggtggacgtggacctgtgcgagcccagcccctgcagaaacggcgccagatgctacaacctggagggcgactactactgcgcctgccccgacgacttcggcggcaagaactgcagcgtgcccagagagccctgccccggcggcgcctgcagagtgatcgacggctgcggcagcgacgccggccccggcatgcccggcaccgccgccagcggcgtgtgcggcccccacggcagatgcgtgagccagcccggcggcaacttcagctgcatctgcgacagcggcttcaccggcacctactgccacgagaacatcgacgactgcctgggccagccctgcagaaacggcggcacctgcatcgacgaggtggacgccttcagatgcttctgccccagcggctgggagggcgagctgtgcgacaccaaccccaacgactgcctgcccgacccctgccacagcagaggcagatgctacgacctggtgaacgacttctactgcgcctgcgacgacggctggaagggcaagacctgccacagcagagagttccagtgcgacgcctacacctgcagcaacggcggcacctgctacgacagcggcgacaccttcagatgcgcctgcccccccggctggaagggcagcacctgcgccgtggccaagaacagcagctgcctgcccaacccctgcgtgaacggcggcacctgcgtgggcagcggcgccagcttcagctgcatctgcagagacggctgggagggcagaacctgcacccacaacaccaacgactgcaaccccctgccctgctacaacggcggcatctgcgtggacggcgtgaactggttcagatgcgagtgcgcccccggcttcgccggccccgactgcagaatcaacatcgacgagtgccagagcagcccctgcgcctacggcgccacctgcgtggacgagatcaacggctacagatgcagctgcccccccggcagagccggccccagatgccaggaggtgatcggcttcggcagaagctgctggagcagaggcacccccttcccccacggcagcagctgggtggaggactgcaacagctgcagatgcctggacggcagaagagactgcagcaaggtgtggtgcggctggaagccctgcctgctggccggccagcccgaggccctgagcgcccagtgccccctgggccagagatgcctggagaaggcccccggccagtgcctgagacccccctgcgaggcctggggcgagtgcggcgccgaggagccccccagcaccccctgcctgcccagaagcggccacctggacaacaactgcgccagactgaccctgcacttcaacagagaccacgtgccccagggcaccaccgtgggcgccatctgcagcggcatcagaagcctgcccgccaccagagccgtggccagagacagactgctggtgctgctgtgcgacagagccagcagcggcgccagcgccgtggaggtggccgtgagcttcagccccgccagagacctgcccgacagcagcctgatccagggcgccgcccacgccatcgtggccgccatcacccagagaggcaacagcagcctgctgctggccgtgaccgaggtgaaggtggagaccgtggtgaccggcggcagcagcaccggcctgctggtgcccgtgctgtgcggcgccttcagcgtgctgtggctggcctgcgtggtgctgtgcgtgtggtggaccagaaagagaagaaaggagagagagagaagcagactgcccagagaggagagcgccaacaaccagtgggcccccctgaaccccatcagaaaccccatcgagagacccggcggccacaaggacgtgctgtaccagtgcaagaacttcacccccccccccagaagagccgacgaggccctgcccggccccgccggccacgccgccgtgagagaggacgaggaggacgaggacctgggcagaggcgaggaggacagcctggaggccgagaagttcctgagccacaagttcaccaaggaccccggcagaagccccggcagacccgcccactgggccagcggccccaaggtggacaacagagccgtgagaagcatcaacgaggccagatacgccggcaaggagtag

SEQ ID NO: 240388 - protein, 448 aa, Artificial Sequence
  derived and/or modified sequence
MLWLALGPFPAMENQVLVIRIKIPNSGAVDWTVHSGPQLLFRDVLDVIGQVLPEATTTAFEYEDEDGDRITVRSDEEMKAMLSYYYSTVMEQQVNGQLIEPLQIFPRACKPPGERNIHGLKVNTRAGPSQHSSPAVSDSLPSNSLKKSSAELKKILANGQMNEQDIRYRDTLGHGNGGTVYKAYHVPSGKILAVKVILLDITLELQKQIMSELEILYKCDSSYIIGFYGAFFVENRISICTEFMDGGSLDVYRKMPEHVLGRIAVAVVKGLTYLWSLKILHRDVKPSNMLVNTRGQVKLCDFGVSTQLVNSIAKTYVGTNAYMAPERISGEQYGIHSDVWSLGISFMELALGRFPYPQIQKNQGSLMPLQLLQCIVDEDSPVLPVGEFSEPFVHFITQCMRKQPKERPAPEELMGHPFIVQFNDGNAAVVSMWVCRALEERRSQQGPP

SEQ ID NO: 240389 - DNA, 1347 bp, Artificial Sequence
  derived and/or modified sequence
atgctctggctggctctggggccgtttccggctatggagaaccaagtccttgtgattcgtatcaagattcccaattcgggagcagtggattggactgttcactctggtccgcagcttttgtttagagatgtgctggatgtcataggccaggtattaccggaggccaccaccactgcatttgagtatgaggatgaggacggcgatagaatcactgtgaggtcggacgaagagatgaaggccatgctaagttactattactcaactgtgatggaacagcaggtgaatggccagctcatcgagcccttgcagatctttccccgggcatgtaaacctccaggcgagcggaacattcacggactcaaagttaatacacgcgccggcccgagccagcactcctcaccagccgttagcgatagcctgcctagtaacagtcttaaaaaaagctccgccgagctgaaaaaaatcctagctaatggacagatgaatgagcaggacattcgataccgtgataccttggggcatgggaatggaggcaccgtgtacaaggcataccatgtacccagcggtaagatcctggccgtcaaggtgatcctgcttgacatcactctggagctgcagaagcaaataatgagcgaattggaaattttatacaagtgcgactcctcctacattatagggttttatggtgcattctttgtcgagaaccgtatttcaatatgcactgaatttatggacggaggttcacttgacgtgtatcggaaaatgcccgagcacgtcctaggtcggatcgccgtggccgtagtgaaaggccttacctacttatggtcactcaaaatccttcaccgggacgtcaagcctagcaacatgctcgttaatactcgaggacaagtgaaattgtgcgattttggtgtgtcaacacagctcgtgaatagcatagccaaaacctacgttgggacgaacgcatacatggccccagagcggatctctggcgaacagtacgggattcactcagatgtttggtcactgggcataagcttcatggagctagcattgggacggttcccatatccccagatccaaaaaaaccaaggctcacttatgcccctccagctattgcagtgtattgtcgatgaggattccccagttttgccggtgggagagttttctgaacctttcgtgcacttcataactcagtgtatgcgcaagcagcctaaggagagaccagcccctgaggagcttatgggccatccgttcattgtccagttcaatgacggtaatgcggctgtggttagtatgtgggtgtgccgggctttggaagaacgccgatctcagcagggaccaccttag

SEQ ID NO: 240390 - DNA, 1347 bp, Artificial Sequence
  derived and/or modified sequence
atgctgtggctggccctgggccccttccctgccatggagaaccaggtgctggtgatccgcatcaagatccccaacagcggggctgtggactggacagtgcacagcggcccccagctgctcttcagagatgtgctggatgtgattggccaggtgctgcctgaggccaccaccacagcctttgaatatgaagatgaagatggagaccgcatcaccgtgcggagtgatgaggagatgaaggccatgctgagctactactacagcacagtgatggagcagcaggtgaatggccagctgattgagcccctgcagatcttcccccgggcctgcaagcccccaggagagaggaacatccacggcctgaaggtgaacacccgggccggccccagccagcacagcagccctgctgtgtctgacagcctgcccagcaacagcctgaagaagagcagcgctgagctgaagaagatcctggccaacggccagatgaatgagcaggacatccgctacagagacaccctgggccacggcaatggaggcaccgtgtacaaggcctaccacgtgcccagcggcaagatcctggccgtgaaggtgatcctgctggacatcaccctggagctgcagaagcagatcatgtctgagctggagatcctgtacaagtgtgacagcagctacatcatcggcttctacggggccttctttgtggagaaccgcatcagcatctgcacagagttcatggatggcggcagcctggatgtgtacaggaagatgcctgagcacgtgctgggcagaattgctgtggccgtggtgaagggcctgacctacctgtggagcctgaagatcctgcacagagatgtgaagcccagcaacatgctggtgaacacccggggccaggtgaagctgtgtgactttggagtgtccacccagctggtgaacagcatcgccaagacctacgtgggcaccaatgcctacatggcccctgagcgcatctctggagagcagtatggcatccacagtgatgtgtggagcctgggcatctccttcatggagctggccctgggccgcttcccctacccccagatccagaagaaccagggcagcctgatgcccctgcagctgctgcagtgcatcgtggatgaggacagccctgtgctgcctgtgggggagttcagcgagccctttgtgcacttcatcacccagtgcatgaggaagcagcccaaggagaggcctgcccctgaggagctgatgggccaccccttcatcgtgcagttcaatgatggaaatgctgctgtggtgtccatgtgggtgtgccgggccctggaggagaggaggagccagcagggccccccatag

SEQ ID NO: 240391 - DNA, 2347 bp, Artificial Sequence
  derived and/or modified sequence
ctcctcctcctctcgccgctaccgccgtcgccgccgccgcagccgccgccagtccgcgcggcctcgggtggccggagctcagcctgcgcgcgccgcgccctgtgtctccgggtggggcagaagactcgccccttgaacctcccgcggggactctccgtggtgtggcggccctggggctctttcttaatagccccggactgagtcccctccagtcgaggaccctctcctagtccactgacgagcggtggacacctgccgctgtatctcccccaaaccgagtccttgccctgctgcctcctcatacccacacggcggcagagaccttcaccatagcgttcgctcaactccagaaccttccgacctccgctagttcctgcgggcctttgcccgcttcccggtgcaccctccccgggagacacctcagacccccgacagcctgggcaggctcggtgcctgcgggtgcgttcctgatcacccctcccctcttccctccccctcatcctccattcccttgttttcaccctctgtcctctgcccgtcactccccttgtcacctcttggagccccctcctaaccagcggccagtgggtttcccataccccaggatgtgagcctctttaacctgtaatgctgtggctagcccttggcccctttcctgccatggagaaccaggtgctggtaattcgcatcaagatcccaaatagtggcgcggtggactggacagtgcactccgggccgcagttactcttcagggatgtgctggatgtgataggccaggttctgcctgaagcaacaactacagcatttgaatatgaagatgaagatggtgatcgaattacagtgagaagtgatgaggaaatgaaggcaatgctgtcatattattattccacagtaatggaacagcaagtaaatggacagttaatagagcctctgcagatatttccaagagcctgcaagcctcctggggaacggaacatacatggcctgaaggtgaatactcgggccggaccctctcaacacagcagcccagcagtctcagattcacttccaagcaatagcttaaagaagtcttctgctgaactgaaaaaaatactagccaatggccagatgaatgaacaagacatacgatatcgggacactcttggtcatggcaacggaggcacagtctacaaagcatatcatgtcccgagtgggaaaatattagctgtaaaggtcatactactagatattacactggaacttcagaagcaaattatgtctgaattggaaattctttataagtgcgattcatcatatatcattggattttatggagcattttttgtagaaaacaggatttcaatatgtacagaattcatggatgggggatctttggatgtatataggaaaatgccagaacatgtccttggaagaattgcagtagcagttgttaaaggccttacttatttgtggagtttaaagattttacatagagacgtgaagccctccaatatgctagtaaacacaagaggacaggttaagctgtgtgattttggagttagcactcagctggtgaattctatagccaagacgtatgttggaacaaatgcttatatggcgcctgaaaggatttcaggggagcagtatggaattcattctgatgtctggagcttaggaatctcttttatggagcttgctcttgggaggtttccatatcctcagattcagaaaaaccagggatctttaatgcctctccagcttctgcagtgcattgttgatgaggattcgcccgtccttccagttggagagttctcggagccatttgtacatttcatcactcagtgtatgcgaaaacagccaaaagaaaggccagcacctgaagaattgatgggccacccgttcatcgtgcagttcaatgatggaaatgccgccgtggtgtccatgtgggtgtgccgggcgctggaggagaggcggagccagcaggggcccccgtgaggctgccgcagggcactgaaagcccaggaccagtaaccaaggagaacaacccacccgtcgcccttctccgtatgctgcctgcgccagaagagctttgctgggccctggcttccctgccctcgccttcacctctgtcagcaggtggccttgcctggggagccccatgtgtggcccaccccaccaggccatccccataccttctggtttgaaggcgctgacactggcagagaggtaaagggtggggcattgagaatggaggctcccagggtccctgcccacttctgttttcctaatgtttttctctataaagggtcaggcccgtcagcatcactgatgggaataaaagtattaatgctttgtgacagcctctgcc

SEQ ID NO: 240392 - DNA, 1347 bp, Artificial Sequence
  derived and/or modified sequence
atgctgtggctggccctgggccccttccccgccatggagaaccaggtcctcgtcatccgtattaagattcccaacagtggggccgtagattggacagtacactccgggccccagctgttattcagagatgtcctggacgttattggccaggtgttgcccgaggcaaccaccaccgcatttgaatatgaggatgaagacggagacaggatcaccgtacgctcagacgaagaaatgaaggcaatgctaagttactattactcaactgttatggaacagcaggtgaatggtcagcttattgagccactccagatttttccccgggcttgtaagcctcctggtgaacggaacatacacggcctgaaggtgaatactcgcgcaggcccttcacagcatagctcccccgcagtttccgatagtctaccttctaacagcctgaaaaagtctagtgccgaactgaagaagattctagccaatggacagatgaacgaacaggatattcgctatagggatacattagggcacggtaatggcggcaccgtctacaaggcatatcacgtgcctagcgggaagatcctcgccgtgaaagtaattctgctcgacataactctggaactgcaaaagcagatcatgtccgagctggaaattctgtacaaatgcgacagctcttacattatcgggttttacggagccttttttgtcgaaaaccggatatcgatctgcacagagttcatggatgggggcagcctcgacgtttacaggaagatgcccgaacatgtgcttgggaggatcgctgtagctgtggtcaagggcctaacatatctctggtctcttaaaatcctgcaccgcgacgtgaagccttctaatatgctagtcaacacgcgaggacaggttaagctgtgcgatttcggcgtgtcaactcagctggttaattccattgctaaaacctacgtaggcacaaacgcttatatggcacccgaaaggataagtggtgagcagtacggcatccacagcgatgtatggagcctgggaattagttttatggagctggccttagggcgctttccataccctcagatacaaaaaaatcagggaagtttaatgccgttgcagctcttgcagtgtatcgtggacgaagacagtcccgtcttacctgtgggagaattctcggagccttttgtgcactttatcactcagtgcatgcgcaaacagcccaaagagcgcccagcccctgaagagcttatgggccatcccttcatcgtgcaatttaacgacggtaatgccgccgtcgtcagcatgtgggtctgtcgcgccctggaggaaaggcgttcccagcaaggacctccctag

SEQ ID NO: 240393 - DNA, 1347 bp, Artificial Sequence
  derived and/or modified sequence
atgctgtggttggcgttagggcctttcccagccatggagaaccaagttcttgtgatcaggatcaagatccccaacagcggcgctgtagactggacggtgcactccggccctcaattgttgttccgggacgttttagatgttatcggacaggtgttgcccgaagccaccacaacggcattcgaatacgaagatgaggatggcgatcgaatcactgtgaggtcagatgaggaaatgaaggccatgttgtcctattactactccacagtgatggaacagcaggttaatgggcaattgatagagcctctacagatctttccccgagcctgtaaacctccaggcgaaagaaacattcatggacttaaggtcaatacccgcgcagggccttcacagcatagctctcctgcagttagcgattcattaccttcaaactctttgaaaaagtcatccgctgaactgaagaaaatcctggctaatggacagatgaatgaacaggatatacgctaccgagataccttgggacacggaaatggaggtaccgtgtacaaagcctaccatgtgccgtctggtaagattctcgccgtaaaggtgattcttcttgatatcacactggaactgcagaagcagatcatgagtgaacttgagatactttacaaatgtgattcctcctacataattgggttctacggagcttttttcgtagagaataggattagcatctgcacggagtttatggatgggggatcgctagatgtatatcgcaaaatgccggaacacgtcctgggccgtattgccgtcgccgtcgtaaaaggcctcacatatctgtggagtttgaagatcttacaccgcgacgtgaagccttcaaatatgctggtgaatactcgcggacaggtgaagctgtgtgatttcggtgtctctacacagctcgtgaacagtatcgctaagacatacgtgggaacaaatgcttacatggcgccagagagaatcagtggtgaacagtacgggattcattcagatgtctggtctttagggatctccttcatggagctagcgctaggcagattcccatacccacagattcagaaaaaccagggatcactcatgcccctccagctcttgcaatgcatcgtcgatgaggattcccctgtgttgccagtgggggagttctctgagcccttcgttcacttcattacacagtgtatgcgcaaacagcccaaagaacggcctgcccctgaagagctgatgggccatcctttcattgttcaattcaacgacggcaatgctgcagtggtgagtatgtgggtgtgccgggctctagaggagcggagatctcaacaaggacctccctag

SEQ ID NO: 240394 - DNA, 1347 bp, Artificial Sequence
  derived and/or modified sequence
atgctgtggctggccctgggccccttccccgccatggagaaccaggtgctggtgatcagaatcaagatccccaacagcggcgccgtggactggaccgtgcacagcggcccccagctgctgttcagagacgtgctggacgtgatcggccaggtgctgcccgaggccaccaccaccgccttcgagtacgaggacgaggacggcgacagaatcaccgtgagaagcgacgaggagatgaaggccatgctgagctactactacagcaccgtgatggagcagcaggtgaacggccagctgatcgagcccctgcagatcttccccagagcctgcaagccccccggcgagagaaacatccacggcctgaaggtgaacaccagagccggccccagccagcacagcagccccgccgtgagcgacagcctgcccagcaacagcctgaagaagagcagcgccgagctgaagaagatcctggccaacggccagatgaacgagcaggacatcagatacagagacaccctgggccacggcaacggcggcaccgtgtacaaggcctaccacgtgcccagcggcaagatcctggccgtgaaggtgatcctgctggacatcaccctggagctgcagaagcagatcatgagcgagctggagatcctgtacaagtgcgacagcagctacatcatcggcttctacggcgccttcttcgtggagaacagaatcagcatctgcaccgagttcatggacggcggcagcctggacgtgtacagaaagatgcccgagcacgtgctgggcagaatcgccgtggccgtggtgaagggcctgacctacctgtggagcctgaagatcctgcacagagacgtgaagcccagcaacatgctggtgaacaccagaggccaggtgaagctgtgcgacttcggcgtgagcacccagctggtgaacagcatcgccaagacctacgtgggcaccaacgcctacatggcccccgagagaatcagcggcgagcagtacggcatccacagcgacgtgtggagcctgggcatcagcttcatggagctggccctgggcagattcccctacccccagatccagaagaaccagggcagcctgatgcccctgcagctgctgcagtgcatcgtggacgaggacagccccgtgctgcccgtgggcgagttcagcgagcccttcgtgcacttcatcacccagtgcatgagaaagcagcccaaggagagacccgcccccgaggagctgatgggccaccccttcatcgtgcagttcaacgacggcaacgccgccgtggtgagcatgtgggtgtgcagagccctggaggagagaagaagccagcagggccccccctag

SEQ ID NO: 240395 - protein, 113 aa, Artificial Sequence
  derived and/or modified sequence
MCGDCVEKEYPNRGNTCLENGSFLLNFTGCAVCSKRDFMLITNKSLKEEDGEEIVTYDPDLCKNCHHVIARHEYTFSIMDEFQEYTMLCLLCGKAEDTISILPDDPRQMTLLF

SEQ ID NO: 240396 - protein, 140 aa, Artificial Sequence
  derived and/or modified sequence
MRQPYLSSREVSSSRKRWRTFPVDCVAMCGDCVEKEYPNRGNTCLENGSFLLNFTGCAVCSKRDFMLITNKSLKEEDGEEIVTYDPDLCKNCHHVIARHEYTFSIMDEFQEYTMLCLLCGKAEDTISILPDDPRQMTLLF

SEQ ID NO: 240397 - DNA, 342 bp, Artificial Sequence
  derived and/or modified sequence
atgtgcggcgactgcgtggagaaggagtaccccaacagaggcaacacctgcctggagaacggcagcttcctgctgaacttcaccggctgcgccgtgtgcagcaagagagacttcatgctgatcaccaacaagagcctgaaggaggaggacggcgaggagatcgtgacctacgaccccgacctgtgcaagaactgccaccacgtgatcgccagacacgagtacaccttcagcatcatggacgagttccaggagtacaccatgctgtgcctgctgtgcggcaaggccgaggacaccatcagcatcctgcccgacgaccccagacagatgaccctgctgttctag

SEQ ID NO: 240398 - DNA, 423 bp, Artificial Sequence
  derived and/or modified sequence
atgagacagccctacctgagcagcagagaggtgagcagcagcagaaagagatggagaaccttccccgtggactgcgtggccatgtgcggcgactgcgtggagaaggagtaccccaacagaggcaacacctgcctggagaacggcagcttcctgctgaacttcaccggctgcgccgtgtgcagcaagagagacttcatgctgatcaccaacaagagcctgaaggaggaggacggcgaggagatcgtgacctacgaccccgacctgtgcaagaactgccaccacgtgatcgccagacacgagtacaccttcagcatcatggacgagttccaggagtacaccatgctgtgcctgctgtgcggcaaggccgaggacaccatcagcatcctgcccgacgaccccagacagatgaccctgctgttctag

SEQ ID NO: 240399 - DNA, 3381 bp, Artificial Sequence
  derived and/or modified sequence
aaccgtatctcagttctcgcgaggtttcgtcttcccggaagcgttggaggacattccctgttgactgcgtcgcgatgtgtggcgactgtgtggagaaggaatatcccaaccggggtaatacctgcctggagaatggatctttcttactgaactttacaggctgtgcagtgtgcagtaagcgggattttatgctgatcacaaacaaatccttgaaagaagaagatggagaagaaatagttacctatgatccagatttgtgtaagaattgtcatcatgtaatagccagacatgagtatacattcagtatcatggatgaatttcaggagtataccatgctgtgtctgttatgcggcaaagccgaagatactatcagtattctccctgatgacccccgacaaatgactctcttattctaaggatccttctacagatctgttataactatattgtgttggtttacaatacagcaagcctgatggtttgtcttatttcattcatactgaaaattctttgcatattttttttctgcttagacttacttattctttgaggaaaaaaggtaatgtaggagctcattgttctctagagctgagctcttctgctaaagttcaaagttcacatcagtgtagccagagtgaagcatctttgttagcagttatgtggtcagaaaacaactagaatgggagcacacctggtgcccagattttggtttccaataaaaggaaccaggactccttagaaaatgaactgattctagaactgggatatgaactgtacaagatgagcctagagtatcttgtgccacagaaaaatgaagtactgaaattaaaaaaaaaaaatcatagtgattgggagtatgtcagcatgatcgaactgaaggatctctgaaaggccacagctggagcaatttgagtaacaaaataaagtagtattgggttataacccaaactatataataaatatttacaagcccaaactaatataaatgattgaatgggaacaaatctcttgtgcagaagaatttcaaataatttatgtagatactccccacttagtgggctctgcatagtgacttccttgcagagtataatatggaaaggggggaaaagagtaactttacagtggagaaatctgacagacaccagctcagccaggtgattgaggttaacatcatccatgataagcccttttgatagcatgtatccttgatagcatcacatcatacagaatgtgataagaatggcactttacctctgtggtcctcctccccagaactcagaacccaagtctgatcaggagaaaaacatcacacaaattccaattgagaagcattctttaaaatacctaaccagtacttctcaaaactatcaaggccataaaaaacaaggaaaatctgagacatggtcacagccaagaggagcctgagaagacatgactgctagatgtaatgtggtatcctacatggaattatataccacgaaaagaaaaaaaggtcatttggtagaaactagggaaatctgaatacagtgtggacttcagttaatataaatgagaaaatggtttcattggctttaaagggattttagaatatcttactttgcatagtttcatgagcactggccaggaggttataaactggcatttaggcctctctgccatttagtagcagtatagtcattaagcaaagcattactctggactttattgtcctgtttctatcaaattggactaacaaaaattgatataatacattcatcacagtattgttaggagatttaaatgaattagtgaatgtaagatactttagaaagcatgtaaagtactagaaacaatgaggtggcttcaattagtgctcattctgagacctaaatttaaagggtcaggcattagaaacaaaagtgtttcttcatatctaggagatttggaaattctgaactaaggtcttataagaacaagaaatgagcaaagtgttcattgtagatactagggaaaagctttgttgaataacagtaatgatgataatatctgagctttattaagtacttactacatgctaagagctttttaagcacttatttaatcctcattaacaaattcataaggtaggtgctattgatagtttagccataaccagatatggcttgttatttgtaagttatcatgaaaaggtttatattcactattctttatttcagtgtagcacttttagagccaaaaaaactcaggcacaaagaagttaaataacttgccgggtgcggtggctcacccctgtaatcccagcactttgggaggccaaagcaggcggatcacctgaggtcaggagtttgagaccagccgggccaacatggtgcaacctcgtctttactaaaaatacaaaaacaaaaattagccaggggtggtggtatgcacctgcagtcccagcaacatgggaggctgaacaggagaatcgcttgaacccgcgacagggaggttgtgatgagccaaggtcatgccactgcactccagcctgggagacagagcaagactccatctcaaaaacaaaaacaaaacaaaacaacaacaaaaaaagaagttaaataacttgtttaagatcacacagctagtgcagttaccccctctcagtaattatgtttggcaaatatgaaatacaaggatctggcaaggttaggaagaggttaagaatatcagtgacagtactctgaggcatctgggcatgtcagatgaagatttattattcagaaaagttaagtcagctgttgcagggatcagttgttttattcctggaaaatgtttttcattttgctgcaaatctatatctgacctgctgaggaaatcgtttggtgaaatgaatccagaaagcagagaaaatgcttcattactttaaatagcagcattaagcccattatagcctctgaattgtcccttccttgagtttgctaatgcttccaacttagtcatttgaagcccaagagtctaattttatatgccctgccaatgtcctcatctattgcagaatgtataattatctatttgttttggactatatgttacaaaaatttaaaacataagatcctctctctatatttcattattggtgaacccacattgtgctgtgttttgtgatattttatcattttctagattcttatgtggatctaataacgaccacttgaacccagtttcacagaatccttatttttctgttcaaattaggaattagggacatggatgaaattggaaatcttcattctcagtaaactatcgcaaggacaaaaaaccaaacaccacatgttctcactcatagataggaattgaacaatgagaacacatggagacaggaaggggaacatcacactctagggactgttgtggggtgagggg

SEQ ID NO: 240400 - DNA, 2632 bp, Artificial Sequence
  derived and/or modified sequence
agacttcggctcggttcccgagacggaatacccaggagtcgagtacttgggcgcatgcggcaaccgtatctcagttctcgcgaggtttcgtcttcccggaagcgttggaggacattccctgttgactgcgtcgcgatgtgtggcgactgtgtggagaaggaatatcccaaccggggtaatacctgcctggagaatggatctttcttactgaactttacaggctgtgcagtgtgcagtaagcgggattttatgctgatcacaaacaaatccttgaaagaagaagatggagaagaaatagttacctatgatccagatttgtgtaagaattgtcatcatgtaatagccagacatgagtatacattcagtatcatggatgaatttcaggagtataccatgctgtgtctgttatgcggcaaagccgaagatactatcagtattctccctgatgacccccgacaaatgactctcttattctaaggatccttctacagatctgttataactatattgtgttggtttacaatacagcaagcctgatggtttgtcttatttcattcatactgaaaattctttgcatattttttttctgcttagacttacttattctttgaggaaaaaaggtaatgtaggagctcattgttctctagagctgagctcttctgctaaagttcaaagttcacatcagtgtagccagagtgaagcatctttgttagcagttatgtggtcagaaaacaactagaatgggagcacacctggtgcccagattttggtttccaataaaaggaaccaggactccttagaaaatgaactgattctagaactgggatatgaactgtacaagatgagcctagagtatcttgtgccacagaaaaatgaagtactgaaattaaaaaaaaaaaatcatagtgattgggagtatgtcagcatgatcgaactgaaggatctctgaaaggccacagctggagcaatttgagtaacaaaataaagtagtattgggttataacccaaactatataataaatatttacaagcccaaactaatataaatgattgaatgggaacaaatctcttgtgcagaagaatttcaaataatttatgtagatactccccacttagtgggctctgcatagtgacttccttgcagagtataatatggaaaggggggaaaagagtaactttacagtggagaaatctgacagacaccagctcagccaggtgattgaggttaacatcatccatgataagcccttttgatagcatgtatccttgatagcatcacatcatacagaatgtgataagaatggcactttacctctgtggtcctcctccccagaactcagaacccaagtctgatcaggagaaaaacatcacacaaattccaattgagaagcattctttaaaatacctaaccagtacttctcaaaactatcaaggccataaaaaacaaggaaaatctgagacatggtcacagccaagaggagcctgagaagacatgactgctagatgtaatgtggtatcctacatggaattatataccacgaaaagaaaaaaaggtcatttggtagaaactagggaaatctgaatacagtgtggacttcagttaatataaatgagaaaatggtttcattggctttaaagggattttagaatatcttactttgcatagtttcatgagcactggccaggaggttataaactggcatttaggcctctctgccatttagtagcagtatagtcattaagcaaagcattactctggactttattgtcctgtttctatcaaattggactaacaaaaattgatataatacattcatcacagtattgttaggagatttaaatgaattagtgaatgtaagatactttagaaagcatgtaaagtactagaaacaatgaggtggcttcaattagtgctcattctgagacctaaatttaaagggtcaggcattagaaacaaaagtgtttcttcatatctaggagatttggaaattctgaactaaggtcttataagaacaagaaatgagcaaagtgttcattgtagatactagggaaaagctttgttgaataacagtaatgatgataatatctgagctttattaagtacttactacatgctaagagctttttaagcacttatttaatcctcattaacaaattcataaggtaggtgctattgatagtttagccataaccagatatggcttgttatttgtaagttatcatgaaaaggtttatattcactattctttatttcagtgtagcacttttagagccaaaaaaactcaggcacaaagaagttaaataacttgccgggtgcggtggctcacccctgtaatcccagcactttgggaggccaaagcaggcggatcacctgaggtcaggagtttgagaccagccgggccaacatggtgcaacctcgtctttactaaaaatacaaaaacaaaaattagccaggggtggtggtatgcacctgcagtcccagcaacatgggaggctgaacaggagaatcgcttgaacccgcgacagggaggttgtgatgagccaaggtcatgccactgcactccagcctgggagacagagcaagactccatctcaaaaacaaaaacaaaacaaaacaacaacaaaaaaagaa

SEQ ID NO: 240401 - DNA, 342 bp, Artificial Sequence
  derived and/or modified sequence
atgtgcggagattgcgtggaaaaggaatatcccaacagggggaatacatgcttggagaacggatctttcctcttgaacttcacaggctgtgccgtgtgtagcaagcgagacttcatgctcattacaaataagagtctcaaggaggaggatggggaagagatagtgacttatgaccccgatttgtgcaagaattgtcatcatgtaatagctcggcacgagtatactttttcaattatggacgagttccaggagtacacaatgctgtgcctgctgtgcggtaaagctgaggacacaatctccattctcccagacgatccaagacagatgacgctgctattctag

SEQ ID NO: 240402 - DNA, 423 bp, Artificial Sequence
  derived and/or modified sequence
atgaggcagccctatttgagtagtcgcgaggtaagttcctccaggaaaagatggagaacattccccgttgactgcgtcgctatgtgcggagactgtgtggagaaggagtacccaaaccggggcaacacttgcctggaaaacggatcttttttgctgaactttacaggatgcgcggtttgttcaaaacgtgactttatgctcattaccaacaagtctctgaaagaggaggatggggaagagatagtaacgtacgacccagatttgtgtaagaactgccaccacgtaatcgctcgccacgagtacacatttagtatcatggacgagttccaagagtacactatgctttgcctcctctgtggaaaggccgaggatacaatctccatcctcccggacgatccaagacagatgacactgctattttag

SEQ ID NO: 240403 - DNA, 342 bp, Artificial Sequence
  derived and/or modified sequence
atgtgtggggactgtgtggagaaggagtaccccaacagaggcaacacctgcctggagaatggcagcttcctgctgaacttcaccggctgtgctgtgtgcagcaagagggacttcatgctgatcaccaacaagagcctgaaggaggaggatggagaggagatcgtgacctatgaccctgacctgtgcaagaactgccaccacgtgattgcccggcatgagtacaccttcagcatcatggatgagttccaggagtacaccatgctgtgcctgctgtgtgggaaggccgaggacaccatcagcatcctgcctgatgacccccggcagatgaccctgctcttctag

SEQ ID NO: 240404 - DNA, 423 bp, Artificial Sequence
  derived and/or modified sequence
atgaggcagccctacctgagcagccgggaggtgagcagcagcaggaagcgctggaggaccttccctgtggactgtgtggccatgtgtggggactgtgtggagaaggagtaccccaacagaggcaacacctgcctggagaatggcagcttcctgctgaacttcaccggctgtgctgtgtgcagcaagagggacttcatgctgatcaccaacaagagcctgaaggaggaggatggagaggagatcgtgacctatgaccctgacctgtgcaagaactgccaccacgtgattgcccggcatgagtacaccttcagcatcatggatgagttccaggagtacaccatgctgtgcctgctgtgtgggaaggccgaggacaccatcagcatcctgcctgatgacccccggcagatgaccctgctcttctag

SEQ ID NO: 240405 - DNA, 342 bp, Artificial Sequence
  derived and/or modified sequence
atgtgcggcgactgcgtggagaaggagtaccccaaccggggcaacacctgcttagagaacggttctttccttcttaattttaccggctgtgccgtatgcagcaagcgagattttatgctcatcacaaacaaaagcttaaaagaagaagacggcgaggagatcgtgacctacgaccccgacctgtgcaagaattgccaccacgttatagcacgccacgaatatacattttctatcatggatgaattccaggagtacaccatgctttgcctgctgtgcgggaaggccgaagacactattagcattcttcctgacgaccctagacagatgacactgttgttctag

SEQ ID NO: 240406 - DNA, 423 bp, Artificial Sequence
  derived and/or modified sequence
atgcggcagccctacctgagcagccgggaggtgagcagcagccggaaaagatggcgtacctttcccgttgactgtgttgccatgtgcggggattgcgtagaaaaggagtaccctaaccgaggtaacacttgcctggagaatggaagcttcctgctgaatttcaccggctgcgccgtttgctcaaaacgggactttatgctgataaccaataagagcctcaaagaggaagacggtgaagaaatagttacttatgatccagacctttgcaagaactgccatcacgtgatcgcacgtcacgaatatactttctcaatcatggacgagtttcaggaatacactatgctctgcctgctctgtggaaaagccgaggacacgatctccattctccccgatgacccacggcagatgacactgctgttttag

SEQ ID NO: 240407 - DNA, 342 bp, Artificial Sequence
  derived and/or modified sequence
atgtgcggggactgcgtggagaaggaatatcccaatcgcggaaatacctgccttgaaaatggcagcttcttgctgaattttaccggttgtgctgtgtgctcaaagcgcgattttatgcttattaccaataagtcactgaaggaagaggacggcgaagaaatcgttacttatgatcccgacctgtgcaagaattgtcaccacgtaatcgcccgtcatgagtacacgttttctatcatggacgagttccaggaatataccatgctatgcctgctgtgtggcaaggcggaggacactatttctatactgccagacgatccgaggcagatgactctcttgttctag

SEQ ID NO: 240408 - DNA, 423 bp, Artificial Sequence
  derived and/or modified sequence
atgcgtcagccctacctaagctcccgtgaagtttcatctagcagaaagcgttggcggaccttcccagtagactgtgttgcaatgtgcggagactgtgttgaaaaggaatatccaaaccgaggaaatacatgtctcgagaacggaagcttcctgctgaacttcaccggatgcgccgtttgctccaaaagggactttatgttaatcacaaacaaatcattaaaggaggaggatggtgaagagatcgttacatatgaccccgatctatgcaagaattgtcaccacgtgatcgcaagacatgagtacacctttagcataatggacgaatttcaagagtacactatgctctgtctgctttgcggaaaagccgaagacacaattagcatcctgcctgacgatcccaggcagatgaccctgcttttttag

SEQ ID NO: 240409 - protein, 423 aa, Artificial Sequence [sequence omitted]

SEQ ID NO: 240410 - DNA, 180 bp, Artificial Sequence
  derived and/or modified sequence
atgacatctgtttccactcagctcagtctggttcttatgtctcttttgctcgtgttacccgtggtcgaggccgtggaagcgggcgacgctatcgctctactgctgggcgtcgtcttgtctatcaccggtatttgtgcctgtctaggcgtttacgcacgaaagcgcaatggacagatgtag

SEQ ID NO: 240411 - DNA, 1272 bp, Artificial Sequence
  derived and/or modified sequence
atgggatcaactaagcattggggagagtggctactcaacctgaaggtggcaccagctggggtcttcggtgtcgccttcttggccagagtagctctggtgttctatggcgttttccaggatagaacacttcatgtgcgttacaccgatattgactatcaggtgtttacggatgccgcgcgctttgttactgaaggccggagcccttaccttcgcgcaacgtacagatatacacccctgttaggctggttacttaccccaaatatctacctgagtgagctgttcggcaaatttctgtttatcagctgcgatcttctgactgcctttcttttatatcgacttttactgctcaagggtctggggcggcggcaggcttgcggatattgtgtgttctggctgctcaaccccttgccaatggcagtgtcatcacgcggcaatgcggactctattgtggcctccctggtcctgatggtgttatacctgatcaagaaaaggcttgtggcctgtgcggcagtgttctatggctttgccgtacatatgaagatctacccagtgacatacattcttccaataaccctgcacctacttccagatcgtgataatgacaaaagcctgaggcaatttaggtataccttccaagcatgcctctacgaattgctaaaaagactctgtaatcgcgcagtgcttctgttcgtggctgtggccggactgacgtttttcgccctaagcttcggtttctactacgagtacggctgggaatttttagagcacacctatttttaccacctgactcgtcgtgacattaggcataacttcagcccttacttttacatgctctaccttacagcagaatctaaatggagttttagtctggggatcgctgctttccttcctcaactgatactgctgagcgccgtttccttcgcgtactaccgcgacctagttttctgctgcttccttcacactagtattttcgtgacgttcaacaaggtgtgcacctctcaatattttctctggtatctttgtctgttgcctctcgtaatgcctctcgtaaggatgccctggaagcgggccgttgtgctgttgatgctgtggtttatcggacaggccatgtggctggcccccgcttatgtgcttgaatttcagggaaagaacacgttcctgttcatctggttggctggattatttttcctgctcataaactgttccattttgatccagattatcagccattacaaggaggaacctctgaccgaaagaataaagtacgactag

SEQ ID NO: 240412 - DNA, 1272 bp, Artificial Sequence
  derived and/or modified sequence
atgggcagcaccaagcactggggcgagtggctgctgaacctgaaggtggccccagctggggtgtttggagtggccttcctggcccgggtggccctggtgttctatggagtcttccaggacaggaccctgcacgtgcgctacacagacatcgactaccaggtgttcacagatgctgccaggtttgtgacagagggccgcagcccctacctgcgggccacctaccgctacacccccctgctgggctggctgctgacccccaacatctacctgtctgagctgtttgggaagttcctgttcatcagctgtgacctgctgacagccttcctgctgtaccgcctgctgctgctgaagggcctgggccggcggcaggcctgtggctactgtgtgttctggctgctgaaccccctgcccatggctgtgagcagcagaggaaatgctgacagcatcgtggccagcctggtgctgatggtgctgtacctgatcaagaagaggctggtggcctgtgccgctgtgttctacggctttgctgtgcacatgaagatctaccctgtgacctacatcctgcccatcaccctgcacctgctgcctgaccgggacaatgacaagagcctgcggcagttccgctacaccttccaggcctgcctgtatgagctgctgaagaggctgtgcaacagagctgtgctgctgtttgtggccgtggccggcctgaccttctttgccctgagctttggcttctactatgaatatggctgggagttcctggagcacacctacttctaccacctgacccggcgggacatccgccacaacttcagcccctacttctacatgctgtacctgacagctgagagcaagtggagcttcagcctgggcattgctgccttcctgccccagctgatcctgctgtctgctgtgtcctttgcctactacagagacctggtgttctgctgcttcctgcacaccagcatctttgtgaccttcaacaaggtgtgcaccagccagtacttcctgtggtacctgtgcctgctgcccctggtgatgcccctggtgaggatgccctggaagagagctgtggtgctgctgatgctgtggttcatcggccaggccatgtggctggccccagcctacgtgctggagttccagggcaagaacaccttcctgttcatctggctggccggcctcttcttcctgctgatcaactgcagcatcctgatccagatcatcagccactacaaggaggagcccctgacagagcgcatcaagtatgactag

SEQ ID NO: 240413 - DNA, 1272 bp, Artificial Sequence
  derived and/or modified sequence
atgggcagcaccaagcactggggcgagtggctgctgaacctgaaggttgcccctgccggagtcttcggggttgcctttctggcgcgagtggccttggtattttacggggtgtttcaagatcgaacccttcacgtgcggtacacagacatcgactatcaggtcttcacagatgccgcacgatttgtgaccgagggtagaagtccttatctccgcgcgacttacagatatactcctttgcttgggtggttactgacaccgaatatttacctgagtgaacttttcgggaaattcctgttcattagctgtgacttattaacagccttcctattgtaccgtctgctcctcctgaaaggactgggccgaaggcaggcatgcggctattgtgtgttctggctcctcaaccccctccccatggctgtgtcaagcaggggcaatgccgactctatagtggcgtcattggtgctgatggtgctgtacctgattaaaaaacgattggttgcctgcgcagccgtattctatggtttcgccgtgcacatgaagatatacccagtgacatacatattgcccatcaccctgcacctgctgccagacagggataatgataaatctctcaggcaatttaggtacacttttcaggcctgcctttatgagctcctcaagagactctgcaatcgagcggtattactgtttgtggccgttgcggggctcactttcttcgccctgagcttcgggttttactacgaatacggctgggaatttttagaacacacctatttttaccatctgacgcgcagggatataaggcataatttctctccttacttttatatgttgtacctcacggccgagagcaagtggagttttagcctcggcatcgccgcattcctaccgcaactgatcctgctgagcgccgtctcattcgcgtattaccgggatctcgtgttctgctgtttcctgcacacttcgatcttcgtaacatttaacaaagtgtgtacctcccaatattttctgtggtacttgtgtctactgccactcgtgatgcccttagtgaggatgccttggaagagggctgtcgtcctgctgatgctgtggtttatcggacaagcgatgtggctggctcccgcgtacgtcctggagttccaggggaagaatacattcctgttcatctggctcgcaggcctattcttcctgcttattaattgtagcattcttatccaaattatctctcattataaggaagagcccttgactgagagaatcaagtacgactag

SEQ ID NO: 240414 - DNA, 4322 bp, Artificial Sequence
  derived and/or modified sequence
agcggaagcgagaccgtccatccagaggaaggcaagtttttggctcgggcggctgagaagaccgcgcggggctggagacaggtagcagtacgggggcggggcttcatgccggatgtgatagtctgcagtcgtttcggttggcagcctggcgggtgggagatgcggcggccacctgctgcaaagaaccgaagggaaggttagaagtacgaaggcagtttggagctggggctaagcagctgtcgcacggtcagatcatgggctccaccaagcactggggcgaatggctcctgaacttgaaggtggctccagccggcgtctttggtgtggcctttctagccagagtcgccctggttttctatggcgtcttccaggaccggaccctgcacgtgaggtatacggacatcgactaccaggtcttcaccgacgccgcgcgcttcgtcacggaggggcgctcgccttacctgagagccacgtaccgttacaccccgctgctgggttggctcctcactcccaacatctacctcagcgagctctttggaaagtttctcttcatcagctgcgacctcctcaccgctttcctcttataccgcctgctgctgctgaaggggctggggcgccgccaggcttgtggctactgtgtcttttggcttcttaaccccctgcctatggcagtatccagccgcggtaatgcggactctattgtcgcctccctggtcctgatggtcctctacttgataaagaaaagactcgtcgcgtgtgcagctgtattctatggtttcgcggtgcatatgaagatatatccagtgacttacatccttcccataaccctccacctgcttccagatcgcgacaatgacaaaagcctccgtcaattccggtacactttccaggcttgtttgtacgagctcctgaaaaggctgtgtaatcgggctgtgctgctgtttgtagcagttgctggactcacgttttttgccctgagctttggtttttactatgagtacggctgggaatttttggaacacacctacttttatcacctgactaggcgggatatccgtcacaacttttctccgtacttctacatgctgtatttgactgcagagagcaagtggagtttttccctgggaattgctgcattcctgccacagctcatcttgctttcagctgtgtctttcgcctattacagagacctcgttttttgttgttttcttcatacgtccatttttgtgacttttaacaaagtctgcacctcccagtactttctttggtacctctgcttactgcctcttgtgatgccactagtcagaatgccttggaaaagagctgtagttctcctaatgttatggtttatagggcaggccatgtggctggctcctgcctatgttctagagtttcaaggaaagaacacctttctgtttatttggttagctggtttgttctttcttcttatcaattgttccatcctgattcaaattatttcccattacaaagaagaacccctgacagagagaatcaaatatgactagtgtatgttccacaccctctgctactgtgttacattctgattgtcttgtatggaccagaagagagctttgggacattttttctgaacattctaagcattctagtgaaagttcccatgttccaacagaacttaaaagcaatgtttgccttatatataaaagggacacaataattgaggtccaccttctaggaaatcctaggactcgtttatttgggacatggtgggaataaaggtcacatattggaaaatggaaaggctgatgaaactatcagatactaaaacattcttaaaatagaggaatatagttagagacatcaggtttaagccagtatttgttcctgttttacaatgcttctgtcttaagctgtgtcttaacttttaacacccatcttttctttctaaagctttcctgacagctgtgaaaatccaaaaaatattcttaaactgtgtatggtggcccttgcctgtagtctcagcactttgggaggctgaggtgggagggtcgcttgagttcaggagttctagacccacctggggcaagatggtgagacctagtctcaaaaaaaaaaaaaaaaattagccaggtgttgtggtgcacccctgtagtcatagctgcatgggaggctgaggtgggagaattgcttgagcccagagcaagaccctgtctcaaaaaaaaaaaaaaaaaaaaaaaggaaaggacaactttttagatagaaaagtattaaataatactaagatgcttagtagtattattttagagagttttaaacttctatattaaatgtggggtcttacaagataatccaaagactttgggaggccaaggcgggcagatcacgaggtcaggagattgagaccatcctggctaacacggtgaaacccctctctactaaaaatacaaaaaattagccgggcgtggtgggtgcctgtagtcccagctactcctcgggaggctgaggcaggagaatggcgtgaactccggaggtggagcctgtagtgagccgagatggcaccactgcgctccagcctgggcgacagagcaagactccatatcaaaaaaaaaaaaaaaaaaagataatccaaagaatttaaattgtaatcatgtttcatgtatttgttttattacttacttttatagcacttagtcccagtggtattagactgctatttggtttcatacaaaaaggattaaatttaaattcattcatgtttagacttgagttattacatttttaaaactatcatcttgcctttaatgtttgtggtcctacacaaactattagtacatttcagtatcctcttacccctttgtttttaagtttttgattgctaaagcaagacttttttcttctagaatttaagtcaaccaagtgttatctatgttgtaaaaatggataatagtagattttaggtgataaaacaacttgttagtaagacatttcctagcttaaaaaaaaaaatcaaaaattccatgatagaaatgcagacctgtgagggaaactcctgaaaagcataagaagcatcccagagagccatgggttttctagaccagagaatttagagggagattgtggaactgaggcttaggtggtcagatcgtttcccttatcactgtaatatttctgggggaaaaatgctttctgagttgtttaaacaagcatccttacatttttttttttaattaaacagcctgtctaggcttgggattccctaatactacagtagcagtatatgaatatgattttgtgattgtgttttttaaaagataagtaatttgatgaactgttcttttgcagtcagaaaacactcacaaaaagacaaaaaaagttccacagtattatatttcatgtcagttcaggcctaaaatcctttgcaaataagatgtttataggctggtcacaattaacaatgttattattggcagcacttcttggatggataccttttgggacctttcattagaaagagggaaagaatggggtggttttgtatgggctcctgtttggggtaaaaatagcagagtcagttgctgaggacaatgaccttccttataacatttagtttcatacccatattaggtcttgtcttgaggaccctttatatgtgcttgtttactagtggccttccagccatagcattcttacctttttttcctattctaagaattaaaaaaaaaaattatagagccagcaagggaggaggcaggaaacagaaatcgaatttcatcattccagtatagttgtccctttttttgtatttctgacttggttttataattatatttacttactaattattgttttttaacattctttattgtggcttactcttcatacttagaattgaaattgttggacatcacatgtatattcacattataaatacatcattcttccactgttagacctttagattgcttccagtttttaatattctaaataagactttcaacattttctgtgttttagctcattctcttaggacattcttagaagttagaaacatttctgctgggatcgttggagggaacttcaaactttggaatctttcctgcaagaaattctttaccaaagaaaggcaggtgtttcttaaagggatgcaaaagatattttgcactttgtatgttccaaaacatttagtaagttaactaaaaaaatgagttaatttggtttcttgggggattttaattttttaatttgttttctggttatgtaaaaaaaatgttttttttttgcttcttatcacaatccttttgtttcctttttaatcctttaataacaccttcaaattttataag

SEQ ID NO: 240415 - DNA, 1272 bp, Artificial Sequence
  derived and/or modified sequence
atgggctcaactaagcactggggtgaatggctgttaaacctgaaggtggctcccgcaggggtatttggggtcgcgtttctggccagggtggccctcgtattctatggggttttccaggaccgaacattgcacgttcgctatactgacatcgactaccaagtgttcactgatgccgcacgctttgtaacagaaggcagaagcccatacctccgagcaacttacaggtatacacccctgctgggatggctattgactccaaacatctatctgagcgagctgtttggcaaattccttttcataagctgtgacctgttaacagcctttttactttataggctcttgctccttaagggactgggcaggcgccaggcctgcggatattgtgtcttctggctccttaatcccctgcctatggcggtgtcgtccagagggaatgccgattcaatcgtggcctccctcgtcctaatggttctctatttaatcaaaaagaggctggttgcctgcgctgcagtgttctatggctttgctgtccatatgaagatctatcctgtgacttacatccttccgataacgctgcaccttctgcccgatagagacaatgataagagtctgcggcaatttaggtatacctttcaagcatgtctttatgagctgctgaaaagactctgtaatcgcgcagttcttttattcgttgcagtggccggtctgaccttttttgccctgagttttggattctactatgaatatgggtgggagtttctggaacacacctatttttaccacctcacgcggcgtgatattcggcacaatttcagcccatatttctacatgttgtatctgactgcagaaagtaaatggtccttctcgctgggtattgctgccttcctgccacagttgatcctgctttctgctgttagtttcgcctattatagggaccttgttttttgttgctttctgcatacctccattttcgtgacatttaacaaagtgtgtaccagccagtacttcctttggtacctgtgtcttctgcccttagtgatgcctttggtcagaatgccttggaagagagctgtggtattgctcatgctatggtttatcggacaagccatgtggctggcaccagcctatgtgctggagtttcaaggaaaaaatactttcctatttatctggctggctggcctgttctttctgcttattaattgctccatactcattcagattattagtcactacaaagaagagcccctaactgaacgcatcaagtatgactag

SEQ ID NO: 240416 - DNA, 1272 bp, Artificial Sequence
  derived and/or modified sequence
atgggcagcaccaagcactggggcgagtggctgctgaacctgaaggtggcccccgccggcgtgttcggcgtggccttcctggccagagtggccctggtgttctacggcgtgttccaggacagaaccctgcacgtgagatacaccgacatcgactaccaggtgttcaccgacgccgccagattcgtgaccgagggcagaagcccctacctgagagccacctacagatacacccccctgctgggctggctgctgacccccaacatctacctgagcgagctgttcggcaagttcctgttcatcagctgcgacctgctgaccgccttcctgctgtacagactgctgctgctgaagggcctgggcagaagacaggcctgcggctactgcgtgttctggctgctgaaccccctgcccatggccgtgagcagcagaggcaacgccgacagcatcgtggccagcctggtgctgatggtgctgtacctgatcaagaagagactggtggcctgcgccgccgtgttctacggcttcgccgtgcacatgaagatctaccccgtgacctacatcctgcccatcaccctgcacctgctgcccgacagagacaacgacaagagcctgagacagttcagatacaccttccaggcctgcctgtacgagctgctgaagagactgtgcaacagagccgtgctgctgttcgtggccgtggccggcctgaccttcttcgccctgagcttcggcttctactacgagtacggctgggagttcctggagcacacctacttctaccacctgaccagaagagacatcagacacaacttcagcccctacttctacatgctgtacctgaccgccgagagcaagtggagcttcagcctgggcatcgccgccttcctgccccagctgatcctgctgagcgccgtgagcttcgcctactacagagacctggtgttctgctgcttcctgcacaccagcatcttcgtgaccttcaacaaggtgtgcaccagccagtacttcctgtggtacctgtgcctgctgcccctggtgatgcccctggtgagaatgccctggaagagagccgtggtgctgctgatgctgtggttcatcggccaggccatgtggctggcccccgcctacgtgctggagttccagggcaagaacaccttcctgttcatctggctggccggcctgttcttcctgctgatcaactgcagcatcctgatccagatcatcagccactacaaggaggagcccctgaccgagagaatcaagtacgactag

SEQ ID NO: 240417 - DNA, 597 bp, Artificial Sequence
  derived and/or modified sequence
atgcccgagcagagcaacgactacagagtggtggtgttcggcgccggcggcgtgggcaagagcagcctggtgctgagattcgtgaagggcaccttcagagacacctacatccccaccatcgaggacacctacagacaggtgatcagctgcgacaagagcgtgtgcaccctgcagatcaccgacaccaccggcagccaccagttccccgccatgcagagactgagcatcagcaagggccacgccttcatcctggtgttcagcgtgaccagcaagcagagcctggaggagctgggccccatctacaagctgatcgtgcagatcaagggcagcgtggaggacatccccgtgatgctggtgggcaacaagtgcgacgagacccagagagaggtggacaccagagaggcccaggccgtggcccaggagtggaagtgcgccttcatggagaccagcgccaagatgaactacaacgtgaaggagctgttccaggagctgctgaccctggagaccagaagaaacatgagcctgaacatcgacggcaagagaagcggcaagcagaagagaaccgacagagtgaagggcaagtgcaccctgatgtag

SEQ ID NO: 240418 - DNA, 597 bp, Artificial Sequence
  derived and/or modified sequence
atgcccgaacagtcaaacgattaccgtgtcgtggtgtttggagcaggcggagtgggcaaaagcagtttggtactgcgctttgtcaagggaactttccgcgacacctatatcccaaccattgaagatacctacagacaggtgataagctgtgacaagagtgtttgcacacttcagataactgatactacaggcagccaccagtttccggccatgcagaggctgagcatcagcaaaggacacgcattcatccttgtgttttcagtcacctcaaagcagagcctggaagagctggggccgatttacaagctgatcgttcagatcaaaggcagcgttgaagatattccagtcatgctggttggaaacaagtgcgatgagacccaaagggaagtggacactagagaagcgcaggcggtcgcgcaagaatggaagtgcgcattcatggagacatccgctaagatgaactacaacgtgaaggagttgtttcaggagttgttgacacttgagacacggcgaaatatgagcctgaacattgatggcaagaggtcagggaagcagaaacgcacggatcgcgtgaagggcaaatgtacgttaatgtag

SEQ ID NO: 240419 - DNA, 597 bp, Artificial Sequence
  derived and/or modified sequence
atgcctgagcagagcaatgactacagagtggtggtgtttggagctggaggagtgggcaagagcagcctggtgctgcgctttgtgaagggcaccttccgggacacctacatccccaccatcgaggacacctaccggcaggtgatcagctgtgacaagtctgtgtgcaccctgcagatcacagacaccaccggcagccaccagtttcctgccatgcagaggctgagcatcagcaagggccacgccttcatcctggtgttttctgtgaccagcaagcagagcctggaggagctgggccccatctacaagctgattgtgcagatcaagggctctgtggaggacatccctgtgatgctggtgggcaacaagtgtgatgagacccagcgggaggtggacacccgggaggcccaggccgtggcccaggagtggaagtgtgccttcatggagaccagcgccaagatgaactacaacgtgaaggagctgttccaggagctgctgaccctggagaccaggaggaacatgagcctgaacattgatggcaagaggtctgggaagcagaagaggacagacagagtgaagggcaagtgcaccctgatgtag

SEQ ID NO: 240420 - DNA, 597 bp, Artificial Sequence
  derived and/or modified sequence
atgcccgagcagagcaacgactaccgggtggtggtgttcggcgccggtggcgtcgggaagtcttccctggttctccgattcgtgaaaggcactttcagagacacatacatacccacaatcgaggacacatacaggcaggtgataagctgtgataaatccgtctgcacactgcagattactgatactaccgggagccaccagttcccagctatgcagcgtctgtctatctccaaggggcatgcttttatcctggtctttagcgtcacatcaaaacagtcactcgaggagttaggcccgatatacaagctgattgtgcagatcaagggtagcgtcgaggatattccagtcatgctcgttggtaataaatgcgatgagacccagagagaagtggacaccagggaagcccaggccgtcgctcaggagtggaagtgcgccttcatggagacaagcgccaaaatgaattacaatgtcaaggagcttttccaggagctgttgaccctcgagactcgacgtaatatgagtcttaatatcgacggtaagcggtccggcaaacagaagcggacggaccgcgtgaaaggcaagtgtacattgatgtag

SEQ ID NO: 240421 - DNA, 597 bp, Artificial Sequence
  derived and/or modified sequence
atgcccgagcagtccaatgactatcgtgtcgtggttttcggtgccggaggtgttgggaaaagctcactggtcttacggttcgtgaaaggtacattccgcgatacctatatccctacaatcgaggacacatatcgtcaagtgatatcatgcgataaaagtgtttgcaccttgcagattactgacacgacaggaagtcatcaattcccagccatgcagcgcctgtccataagtaagggacatgctttcattctggtttttagcgtgacctctaagcaatcattagaagagttaggtcctatttacaaattgatagtgcagatcaaaggcagcgtcgaggatatccctgtcatgttagtcggcaataagtgcgatgaaactcagcgggaggtcgacaccagggaggcccaggctgtcgcccaggagtggaagtgcgcatttatggaaactagtgcaaaaatgaattacaacgttaaggaactgttccaagaacttttaacactcgagactcggagaaatatgtcactgaatattgacggaaaacgtagcggcaagcagaagcgcaccgacagagtgaagggcaagtgtaccctgatgtag

SEQ ID NO: 240422 - protein, 309 aa, Artificial Sequence
  derived and/or modified sequence
MVDYYEVLGLQRYASPEDIKKAYHKVALKWHPDKNPENKEEAERKFKEVAEAYEVLSNDEKRDIYDKYGTEGLNGGGSHFDDECEYGFTFHKPDDVFKEIFHERDPFSFHFFEDSLEDLLNRPGSSYGNRNRDAGYFFSTASEYPIFEKFSSYDTGYTSQGSLGHEGLTSFSSLAFDNSGMDNYISVTTSDKIVNGRNINTKKIIESDQEREAEDNGELTFFLVNSVANEEGFAKECSWRTQSFNNYSPNSHSSKHVSQYTFVDNDEGGISWVTSNRDPPIFSAGVKEGGKRKKKKRKEVQKKSTKRNC

SEQ ID NO: 240423 - DNA, 930 bp, Artificial Sequence
  derived and/or modified sequence
atggtggactactacgaggtgctgggcctgcagagatacgccagccccgaggacatcaagaaggcctaccacaaggtggccctgaagtggcaccccgacaagaaccccgagaacaaggaggaggccgagagaaagttcaaggaggtggccgaggcctacgaggtgctgagcaacgacgagaagagagacatctacgacaagtacggcaccgagggcctgaacggcggcggcagccacttcgacgacgagtgcgagtacggcttcaccttccacaagcccgacgacgtgttcaaggagatcttccacgagagagaccccttcagcttccacttcttcgaggacagcctggaggacctgctgaacagacccggcagcagctacggcaacagaaacagagacgccggctacttcttcagcaccgccagcgagtaccccatcttcgagaagttcagcagctacgacaccggctacaccagccagggcagcctgggccacgagggcctgaccagcttcagcagcctggccttcgacaacagcggcatggacaactacatcagcgtgaccaccagcgacaagatcgtgaacggcagaaacatcaacaccaagaagatcatcgagagcgaccaggagagagaggccgaggacaacggcgagctgaccttcttcctggtgaacagcgtggccaacgaggagggcttcgccaaggagtgcagctggagaacccagagcttcaacaactacagccccaacagccacagcagcaagcacgtgagccagtacaccttcgtggacaacgacgagggcggcatcagctgggtgaccagcaacagagacccccccatcttcagcgccggcgtgaaggagggcggcaagagaaagaagaagaagagaaaggaggtgcagaagaagagcaccaagagaaactgctag

SEQ ID NO: 240424 - DNA, 930 bp, Artificial Sequence
  derived and/or modified sequence
atggtggattactacgaagtcctgggcttacagagatatgcttcgccagaggacatcaaaaaggcttaccacaaggtggccctcaagtggcatccggacaaaaacccagaaaataaggaagaggctgagcgaaaattcaaggaggtggccgaggcatacgaggttctttccaacgacgagaagcgagatatctatgataagtacgggacagaaggccttaacggcggcgggtcccactttgatgacgaatgcgaatacggattcacatttcataagccagacgatgtctttaaagaaatattccacgagcgcgaccccttctcgtttcacttcttcgaagattccctggaagatcttctgaatcggcccggcagttcctatgggaataggaacagggatgctggctattttttctcgacggcatctgagtatccaatttttgagaagttctcctcttatgatactggatatacgagccaggggtccctcggtcatgaggggctgacttctttttcatctctggcgtttgataactccggcatggacaactatatttcagtgacaacatcagataaaatcgtcaatggtagaaacataaatacaaagaaaattatcgagtccgaccaagaaagagaggccgaggacaatggggagttaaccttctttctcgtcaactcagttgccaacgaagaaggattcgcaaaggagtgctcgtggcggacgcaatctttcaataattatagccctaactctcacagttctaagcacgtgagtcagtatactttcgttgacaatgatgaaggtggaatatcatgggtgaccagcaaccgcgatcctcctattttcagcgcaggtgttaaagaagggggaaaaagaaaaaagaaaaagagaaaggaggtgcagaagaagagtacgaagcgcaactgctag

SEQ ID NO: 240425 - DNA, 2578 bp, Artificial Sequence
  derived and/or modified sequence
taacattgtctttaacataaaagtgtacctatttgcagtcactacctctatcaccaccaccagcagagcctgagctgaggaaaccacggttctcaatacccagcacacccacttccaactatctgttaaaacatggtggattactatgaagttctaggactgcaaagatatgcttcacctgaggacattaaaaaagcttatcataaagtggcacttaaatggcaccctgataaaaatccagaaaataaagaagaagcagagagaaaattcaaagaagtagctgaggcatacgaggtattatcaaatgatgagaaacgggacatttatgataaatatggcacagaaggattaaacggaggtggaagtcattttgatgatgaatgtgagtacggcttcacattccataagccagatgatgtttttaaagaaatttttcatgaaagggatccattttcttttcacttctttgaagactcgcttgaggacctgttaaatcgtccaggaagctcctatggaaacagaaacagagatgcaggatactttttctccactgccagtgaatatccaatttttgagaaattttcttcatatgatacaggatatacatcacagggttcattggggcatgaaggccttacttctttctcttccctggcttttgataatagtgggatggacaactacatatctgttacaacttcagacaaaatcgttaatggcagaaatattaatacaaagaaaattattgaaagtgatcaagaaagagaagctgaagataatggagagttgacattttttcttgtaaatagtgtggccaatgaagagggctttgcaaaagaatgcagctggagaacacagtcattcaacaactattcaccaaattctcacagctccaaacatgtatctcaatatactttcgtggacaatgatgagggaggtatatcttgggttaccagcaacagagatccccctattttctcagcaggagtcaaagagggtggtaagaggaaaaaaaagaagcgtaaagaggtgcaaaagaagtctaccaaaaggaattgttaaattgactcttcaaatatataacatttgaacacaattgtgtgtgttttggttaatcacaaattttgtagataacacttaatactatactaagagcttttcaacacttttagcaggattgtggacatttggttagtagtttttttgaatgggtatgtcagaaaaggatgagtttgtggtgacagttggtgctaataagaatttgcctgggcagtatagtgagatcttttctctacaaaaaatttaaaaattagccaagtgtggtggtgtgcacctgtagtcccagctactcgggaagctggtagaaagactgcttgagcctggaagacataggttgcagtgtaatgggatcacgccactgcactccagcttgggtgacaaagtaagaccctgtcttaaaaaaaaaaaaaaggaatttggaaaactgcaatgagttttttacttttgaatttttctttagtagagtttatagcctatttttcttttttctaattaaaaccactatacaaacttacgaaacatgcatagcattagaagacaagaatgtatcaagacacacaggttcagactacacaattattcatgaaatggctgttttccaatggaggaacagcatttgatgcattataacttaaaggtactacaaattaaaaattaaagtataaagtattttaagttagaaatagacttagctgggtgcagtggctcacacctgtaatcctagcatcttgggaggcccaggcaggagggttgaagtcagaatttcacgacagtccgggtaacataatgagacctgtcctctatgaaaaaacttttttaaaaatttagctgggtgtggtggtacgtgcctgtaggcctagctacttaggaggctgaggtgggaggattgcttgagcccaggagtttgaggttgtagggagctatgatcttgccattgcactccagctgagagtgtgaccctgtctctaaagaaaaactatagaaaatttaaaaaattaaaaaacgggtaacatggtaaattttatgtagtatattttaccacattttttttaaaggccagtcttatcctgaattcctcagagcagtctgtatggtaggccatcagtgaatcactccagacaggaaattttctatttttgtttagagtttgtacacaaaatctacaaatacattactctaaaatagcacctatagccattttaatttagtcatgttgggagaaaaatagatgggttacaaatacatcagatatcgagcaaatggtttgagttacatctagcagcactaaaacttattcaactttggccaaatacaaatgcgaaattagaaaaaaattataatatctgctatttttaaaagacagctatagtcaagagcttgtgttttgtatcggtatttgatttttagtgggcagatgggagaaggaaaggttatttattctatagaagagactgcggacaattagtattcaaagtttattttcagaaaataaaataataaaagcccagggtattttaaa

SEQ ID NO: 240426 - DNA, 930 bp, Artificial Sequence
  derived and/or modified sequence
atggtggactactatgaggtgctgggcctgcagagatatgccagccctgaggacatcaagaaggcctaccacaaggtggccctgaagtggcacccagacaagaaccctgagaacaaggaggaggccgagaggaagttcaaggaggtggccgaggcctatgaggtgctgagcaatgatgagaagagggacatctatgacaagtatggaacagagggcctgaatggaggcggcagccactttgatgatgaatgtgaatatggcttcaccttccacaagccagatgatgtgttcaaggagatcttccacgagcgggaccccttctccttccacttctttgaggacagcctggaggacctgctgaacagacctggcagcagctatggcaacagaaacagagatgctggctacttcttcagcacagccagcgagtaccccatctttgagaagttcagcagctatgacaccggctacaccagccagggcagcctgggccacgagggcctgaccagcttcagcagcctggcctttgacaacagcggcatggacaactacatctctgtgaccaccagtgacaagatcgtgaatggaagaaacatcaacaccaagaagatcattgaaagtgaccaggagcgggaggccgaggacaacggggagctgaccttcttcctggtgaacagcgtggccaatgaggagggctttgccaaggagtgctcctggaggacccagagcttcaacaactacagccccaacagccacagcagcaagcacgtgtcccagtacacctttgtggacaatgatgagggcggcatctcctgggtgaccagcaacagagatcctcccatcttctctgctggggtgaaggagggcggcaagaggaagaagaagaagaggaaggaggtgcagaagaagagcaccaagaggaactgctag

SEQ ID NO: 240427 - DNA, 930 bp, Artificial Sequence
  derived and/or modified sequence
atggtggactactacgaggtgctgggcctgcagcggtacgccagccctgaggatatcaagaaggcttatcacaaagttgcccttaaatggcacccagacaagaatcccgaaaacaaggaagaagccgaaaggaaatttaaggaggtggccgaggcttacgaggttctgtccaatgacgaaaaacgggacatttatgacaagtacggcacggaaggactgaacggaggtggaagccacttcgatgatgagtgcgagtatggcttcacattccacaaaccagatgatgtatttaaagagatcttccacgagagggatccgttttcgttccatttttttgaggactcattagaggatttgcttaataggccaggctccagttacggtaatagaaaccgcgatgctggctatttctttagcactgccagcgagtatccgatattcgaaaagtttagcagctacgatacaggatacacctcccagggctccttaggccatgaaggcctcaccagctttagtagcctcgccttcgataacagtgggatggataactatatttccgtgaccaccagtgataaaatagtgaacgggcgaaatataaataccaaaaagattatagagagcgaccaagaacgcgaggctgaagacaacggtgagctgacgttctttctggtcaacagcgtggcgaacgaggaaggctttgcaaaggagtgttcatggaggacacagtcttttaacaattattccccgaatagtcatagcagcaagcacgtgagtcaatatacttttgtggataacgacgagggggggatctcctgggttacttctaaccgtgaccccccaatcttctcagcaggtgtcaaagagggcggtaaacggaaaaagaaaaagaggaaagaggtgcagaaaaagtctacaaagaggaattgctag

SEQ ID NO: 240428 - DNA, 930 bp, Artificial Sequence
  derived and/or modified sequence
atggtggattattacgaggttctgggactacaacgctatgcgtcccctgaggatattaagaaagcctaccacaaagtagctctgaagtggcatccggataaaaatcccgaaaacaaggaggaagccgaaaggaaattcaaggaggtagcagaagcttacgaggttctgtcaaatgatgaaaaaagagacatttatgataagtacggaactgagggcttgaacggcggaggatcacattttgacgacgaatgtgagtatgggttcactttccacaagccagacgacgtgttcaaagagatcttccacgaacgggatcctttctctttccatttctttgaagacagcttggaggatctgctgaatagaccaggcagctcttacggaaaccggaaccgtgacgcaggctactttttcagtaccgctagcgagtacccaattttcgagaagttttcctcatacgatacagggtacaccagtcagggatctctggggcacgagggattaacctccttctcttcactcgctttcgataacagcgggatggacaattatatctcagtaacaacttccgataagattgtaaacgggcgtaatatcaataccaaaaagattattgagtcggaccaggaacgcgaggctgaagacaacggagaactgacttttttcctggttaactctgtggctaacgaggagggctttgctaaggagtgttcctggcggacccagagctttaataattattccccgaattctcacagcagtaagcacgtcagccagtacaccttcgttgataacgacgaaggaggaatctcttgggtaaccagtaacagggacccacccatcttctcggccggtgttaaagagggcggaaaaagaaagaagaagaaaaggaaggaagtccagaagaagtctaccaagagaaactgctag

SEQ ID NO: 240429 - protein, 292 aa, Artificial Sequence
  derived and/or modified sequence
MGNQLDRITHLNYSELPTGDPSGIEKDELRVGVAYFFSDDEEDLDERGQPDKFGVKAPPGCTPCPESPSRHHHHLLHQLVLNETQFSAFRGQECIFSKVSGGPQGADLSVYAVTALPALCEPGDLLELLWLQPAPEPPAPAPHWAVYVGGGQIIHLHQGEIRQDSLYEAGAANVGRVVNSWYRYRPLVAELVVQNACGHLGLKSEEICWTNSESFAAWCRFGKREFKAGGEVPAGTQPPQQQYYLKVHLGENKVHTARFHSLEDLIREKRRIDASGRLRVLQELADLVDDKE

SEQ ID NO: 240430 - protein, 355 aa, Artificial Sequence
  derived and/or modified sequence
MGNQLDRITHLNYSELPTGDPSGIEKDELRVGVAYFFSDDEEDLDERGQPDKFGVKAPPGCTPCPESPSRHHHHLLHQLVLNETQFSAFRGQECIFSKVSGGPQGADLSVYAVTALPALCEPGDLLELLWLQPAPEPPAPAPHWWASRARRSAGRTRRASPPGAALASGSSRREGRCRQARSPRSSSTISRCTWERTRSTPPGFTAWKTSSARSAVSTPAAACECSRSSPTSWTTRSSRLGAAGPSASPAPRSLPFPAPGLRSQRFSTSAPPRHARPPPVARARAAPPHPQASGRKSQELPQGRKGAAASAWLTATAVVTVLGDPACAFPLRCKPGTGKGLRGERTWPSPRVHGQ

SEQ ID NO: 240431 - protein, 197 aa, Artificial Sequence
  derived and/or modified sequence
MHLFQSERWPSGRRPKRLRGHRAASALRTRRPAGAAVAAARAGAARARPALGRLRGRRADHPPAPRRDPPGQPEAGAANVGRVVNSWYRYRPLVAELVVQNACGHLGLKSEEICWTNSESFAAWCRFGKREFKAGGEVPAAAPAAAVLSQGAPGREQGPHRFHSLEDLIREKRYRRQRPPASAPGARRPRGRQGVAA

SEQ ID NO: 240432 - DNA, 879 bp, Artificial Sequence
  derived and/or modified sequence
atgggcaaccagctggacagaatcacccacctgaactacagcgagctgcccaccggcgaccccagcggcatcgagaaggacgagctgagagtgggcgtggcctacttcttcagcgacgacgaggaggacctggacgagagaggccagcccgacaagttcggcgtgaaggccccccccggctgcaccccctgccccgagagccccagcagacaccaccaccacctgctgcaccagctggtgctgaacgagacccagttcagcgccttcagaggccaggagtgcatcttcagcaaggtgagcggcggcccccagggcgccgacctgagcgtgtacgccgtgaccgccctgcccgccctgtgcgagcccggcgacctgctggagctgctgtggctgcagcccgcccccgagccccccgcccccgccccccactgggccgtgtacgtgggcggcggccagatcatccacctgcaccagggcgagatcagacaggacagcctgtacgaggccggcgccgccaacgtgggcagagtggtgaacagctggtacagatacagacccctggtggccgagctggtggtgcagaacgcctgcggccacctgggcctgaagagcgaggagatctgctggaccaacagcgagagcttcgccgcctggtgcagattcggcaagagagagttcaaggccggcggcgaggtgcccgccggcacccagcccccccagcagcagtactacctgaaggtgcacctgggcgagaacaaggtgcacaccgccagattccacagcctggaggacctgatcagagagaagagaagaatcgacgccagcggcagactgagagtgctgcaggagctggccgacctggtggacgacaaggagtag

SEQ ID NO: 240433 - DNA, 1068 bp, Artificial Sequence
  derived and/or modified sequence
atgggcaaccagctggacagaatcacccacctgaactacagcgagctgcccaccggcgaccccagcggcatcgagaaggacgagctgagagtgggcgtggcctacttcttcagcgacgacgaggaggacctggacgagagaggccagcccgacaagttcggcgtgaaggccccccccggctgcaccccctgccccgagagccccagcagacaccaccaccacctgctgcaccagctggtgctgaacgagacccagttcagcgccttcagaggccaggagtgcatcttcagcaaggtgagcggcggcccccagggcgccgacctgagcgtgtacgccgtgaccgccctgcccgccctgtgcgagcccggcgacctgctggagctgctgtggctgcagcccgcccccgagccccccgcccccgccccccactggtgggccagcagagccagaagaagcgccggcagaaccagaagagccagcccccccggcgccgccctggccagcggcagcagcagaagagagggcagatgcagacaggccagaagccccagaagcagcagcaccatcagcagatgcacctgggagagaaccagaagcaccccccccggcttcaccgcctggaagaccagcagcgccagaagcgccgtgagcacccccgccgccgcctgcgagtgcagcagaagcagccccaccagctggaccaccagaagcagcagactgggcgccgccggccccagcgccagccccgcccccagaagcctgcccttccccgcccccggcctgagaagccagagattcagcaccagcgccccccccagacacgccagacccccccccgtggccagagccagagccgcccccccccacccccaggccagcggcagaaagagccaggagctgccccagggcagaaagggcgccgccgccagcgcctggctgaccgccaccgccgtggtgaccgtgctgggcgaccccgcctgcgccttccccctgagatgcaagcccggcaccggcaagggcctgagaggcgagagaacctggcccagccccagagtgcacggccagtag

SEQ ID NO: 240434 - DNA, 594 bp, Artificial Sequence
  derived and/or modified sequence
atgcacctgttccagagcgagagatggcccagcggcagaagacccaagagactgagaggccacagagccgccagcgccctgagaaccagaagacccgccggcgccgccgtggccgccgccagagccggcgccgccagagccagacccgccctgggcagactgagaggcagaagagccgaccacccccccgcccccagaagagacccccccggccagcccgaggccggcgccgccaacgtgggcagagtggtgaacagctggtacagatacagacccctggtggccgagctggtggtgcagaacgcctgcggccacctgggcctgaagagcgaggagatctgctggaccaacagcgagagcttcgccgcctggtgcagattcggcaagagagagttcaaggccggcggcgaggtgcccgccgccgcccccgccgccgccgtgctgagccagggcgcccccggcagagagcagggcccccacagattccacagcctggaggacctgatcagagagaagagatacagaagacagagaccccccgccagcgcccccggcgccagaagacccagaggcagacagggcgtggccgcctag

SEQ ID NO: 240435 - DNA, 879 bp, Artificial Sequence
  derived and/or modified sequence
atgggaaatcagctcgacaggatcacccacctgaattacagcgagctgcccaccggggacccaagcgggattgaaaaggacgagctgcgggtgggggtggcttactttttcagtgacgacgaagaggatctggacgagagaggccagcctgacaaatttggagtgaaagctccacccggctgcacgccatgtccagagtcaccttcccgccaccaccaccacctgctgcaccagctagtgttgaacgagactcagttcagcgccttcagaggccaggaatgtattttctctaaggtgtctggaggcccccagggtgccgatctgagtgtttacgcggtcactgcactgcccgccctgtgcgaaccgggcgatcttttggaactcctgtggctgcagcctgcacctgagcctcctgcaccggctcctcattgggcagtctacgtgggaggggggcagattatccacttgcaccagggagaaatccggcaggacagcctctatgaagccggcgcagctaatgttgggcgcgttgtgaacagctggtaccggtataggccgttggtcgccgaactcgtggtacagaacgcttgtggccacctcgggttgaaatctgaggaaatctgttggacaaactcagagagttttgcggcctggtgtcgtttcggcaagagggaattcaaggcgggcggcgaggttcctgccggcacacagccgccccagcagcagtattacctaaaggtgcatctcggggagaataaagtgcatacagccagattccatagcctggaagacctgatccgagagaaacggcgaatcgatgctagtggcaggctgagagtgctgcaggagttggcggacctcgtagacgataaggaatag

SEQ ID NO: 240436 - DNA, 879 bp, Artificial Sequence
  derived and/or modified sequence
atgggaaaccagttggacaggatcacccacttgaattacagtgagctgccaaccggagacccatctggtattgaaaaagatgagctgcgcgtcggcgtcgcttacttcttctctgacgacgaagaagacctcgatgaacgaggacaaccagacaaatttggagttaaagctccaccagggtgcaccccgtgtcccgaatctccatcccggcaccatcaccacctgctgcatcaactggtgctgaatgagactcagtttagcgcgttccgtgggcaggaatgcatcttcagtaaggtaagcggtggcccgcagggagccgacctgagcgtgtatgccgtaacagcccttcctgctctgtgcgagcccggcgatttactcgaactgctgtggctgcagcccgcacctgaaccacccgccccagccccccactgggcggtttacgtgggcgggggacagatcatccacctacatcagggcgaaattaggcaggactctctgtatgaagcaggcgcagcgaatgtcggcagagtggtgaactcctggtacagatatagacccttagtggccgagttggtggtacagaacgcatgtggccatctcggactaaagtccgaggagatctgttggacgaactctgagtcatttgccgcctggtgcagatttggaaagcgcgagttcaaagcaggcggtgaggtgcccgccggaacccagcctccacaacagcagtactacttgaaagtgcatttaggtgaaaacaaagtgcatactgcccggttccattcactcgaggacttgatacgcgaaaagcgccggatcgacgcatctggccgcttgagagtccttcaggagctggccgatctggtagatgacaaagagtag

SEQ ID NO: 240437 - DNA, 1068 bp, Artificial Sequence
  derived and/or modified sequence
atgggcaatcagctggatcggataactcatttgaattactctgaacttccaacaggagacccttctgggatcgagaaggatgagctgagagtgggagtggcttacttcttttcagatgatgaagaggacctggatgagaggggacagccagacaagtttggcgtgaaggcaccccccgggtgtacaccctgccccgagagcccttcaagacatcaccatcacctcctgcaccagctggtcctgaacgagactcagttcagtgcctttcgcggccaggaatgtatattctctaaagtaagcggcggtccgcaaggagcggaccttagtgtgtacgcagttacggctctccctgccctgtgcgaacccggagatctacttgagctgctttggctgcagccggccccggagcctcctgcccctgccccccactggtgggcatcccgagcaaggaggagcgccggtaggaccaggcgagcaagtccgcccggggcagcccttgctagtgggtctagtcggcgcgaggggcgctgcaggcaagcgaggtccccccgaagctcgtcaaccatcagcagatgcacttgggaacgaacccgaagcacccctccagggtttaccgcctggaagacaagctccgcacgttctgctgtgtctaccccggccgccgcctgtgagtgcagtagatccagcccaactagttggacgaccaggtcctcaagactaggtgctgccggaccaagtgcttcacctgcaccaagaagcctaccatttcccgcgcctggtctgcggagccagcgcttcagcacgagcgctccacccaggcatgctcgccctccacctgttgccagagctcgagctgctccaccccaccctcaggcttctggtagaaagtcacaagagctgccccagggcaggaagggagcagccgcaagcgcctggcttactgctactgcagtggtgaccgtgttaggggaccctgcctgcgcctttccactgcggtgtaaacccggtaccgggaagggactgaggggcgagagaacatggccctctcccagggtgcacggtcagtag

SEQ ID NO: 240438 - DNA, 594 bp, Artificial Sequence
  derived and/or modified sequence
atgcacctgttccagtctgaacgctggcctagcgggcgccggcccaagagactgagaggccatagagctgcttccgccctgagaaccaggagacctgctggcgctgccgtggctgctgcaagggccggcgctgccagagctaggccagctctcgggcgtctaagaggtcggagggccgatcaccccccggcgcccagaagggacccccccgggcaacctgaggccggagccgctaatgttggtcgggtcgtgaattcgtggtaccgataccggcctttggtggccgagttggtggtccagaacgcttgtggtcatttaggcctcaaaagtgaagagatatgttggacaaattcagaatcatttgcggcatggtgcaggtttggcaaaagggagtttaaggcaggcggggaggtccccgccgcggccccagcagccgcggtattgagccagggcgcccctggtcgagagcagggacctcaccgctttcactcccttgaggacctaatcagggaaaagcggtaccgaaggcagcgaccccctgcgtccgcaccaggggctagacgcccccgagggcggcaaggcgtggcagcttag

SEQ ID NO: 240439 - DNA, 6355 bp, Artificial Sequence
  derived and/or modified sequence
ggctacttagagtcgtcggcgcggcggtgggaaagcagagccgagccgggactgtccagtgggagcaggcgccccggccagcgcagacctggaggcgcacgggcgccgcaccgcacgattcggctcggggtagagcggagccgcagccccacgcgcagcccaggacccactcgccaccgccgcttcctcagcacccatggggaccaggagactttaaaggagtttggggtttcgggagcagggaaatcacggatccccgctcctggccctcgcctcgccacctcattgatgggcaaccaactggaccgcatcacccacctcaactacagcgagttgcccacaggggacccgtcggggattgaaaaggacgaactgcgggtcggggttgcctacttcttctcggatgatgaggaagacctggacgaacgcgggcagcccgacaagtttggcgtgaaggcccccccgggttgcaccccctgcccggagagccccagccgccaccaccaccacctgctgcaccagctggtcctcaacgagactcagttttccgcctttcggggccaggaatgcatcttttccaaagtgagcggtggccctcagggcgccgacctaagcgtctacgcggtcaccgcgctgccagcgctctgcgaacccggcgacctgctggagctgctgtggctgcagcccgcgccggagccgcccgcgcccgccccgcactgggccgtctacgtgggcggcgggcagatcatccacctgcaccaaggcgagatccgccaggacagcctgtatgaggcgggcgcggccaacgtgggccgggtggtgaatagctggtaccgctaccgcccgctggtggccgagctggtggtgcagaacgcctgcggccacctgggcctcaagagcgaggagatctgctggacgaactcggagagcttcgccgcctggtgccgctttggcaagcgggagttcaaggcgggaggggaggtgccggcaggcacgcagcccccgcagcagcagtactatctcaaggtgcacctgggagagaacaaggtccacaccgccaggtttcacagcctggaagacctcatccgcgagaagcgccgtatcgacgccagcggccgcctgcgagtgctccaggagctcgccgacctcgtggacgacaaggagtagccgcctaggggctgccggcccctctgcctcccccgcacctcgctcccttcccttccccgcacccggacttcgcagtcagcggttctcaacctctgccccgccccgccacgcgcgtccgccgccggtggcccgggcccgggctgcacccccgcatccccaagccagcggcaggaagtctcaggaactgccccagggccgaaagggcgccgctgcgagcgcctggctgacagccacagcggtggtgacggtgctgggagaccccgcgtgcgctttccccttgagatgtaaaccgggaacggggaaggggctgaggggagaaaggacatggccttccccgcgagtccatggccagtgactgtggcccgactcgaaaacaaccctcttctcaaaagggaccatcaccgccccgagcgtgcgcacacagaccggtcggaggcgagaactggtctctacagggcacagttcagctcctctgtggatgcgtccccagatcgcaggatttccaagaaatcgagcctgtcccttgtgcacttgggaataattccccaagacagcacttcgggattccgggttatcctgaggctgcccgggacttttccagctctccagccccaggtctcctgacattgtgttccaggctgcgggctaagccagacagtgtttgcctccggttctttccaccgtgggaagcgaacgccacccccacccgcctttgcctgcgagtctccctcgctggcagaagggaagccggcccggtcccgggaggaagatggcgctgcgaattcggtgaggacagccggccccgcccccgacaaggagctcgctcgttcacctggtgtctgggaacttgaatgtgtgaagggcgcttattgttctgaacccttgattgctccctcctcgggctgcatttcaaaaatagtcatatttttaaaggagttggaggagagggagggggaggacatggcaccattccagaaaccagcattgttacaacaccatagccagtatatttagtttggcttttcctaacatagaaatcttcaaagctggggaagtggaaataaagttttaaaaatgagagagcagttttccaactatgtcaacaaagcctatcgtgttgatgtttttattgaccattttagcaacaggctaataaaatttcaaattgaaatttttattttcatggctttaatccatgatagtttaaatactgggggccattaagagtggatgtagctaagagcttagctaacattgccttttcactctatttttctcagatattgtaagcattctgtttttcaatattgtagttaattttttggctttcaacagcagccctagtaatggtggagttgttaattaatgtgtatattgtactgaatttctgtcagttaaggggttcactgctttggtggaaattggtggaaattgctagcaggttccacgatgtttatttttttctccatgttgtatatcattaccatttcacatacgcgtttctatttttcttcctctcctcctgatctccttaaaaatgaatctagagttggtggctttttccccctcctctttggccagttccacagttcagttcttcctgaaaacagggatgatgaacttgtaggatcaggacaaatgtgtgtttttcaaaaacttaaggctgggtgtgaaacaccttctgtggacaaggatttgtaaacttctctcctccctccagctgcggccccagcctaactgatagttacttgattcagtgtgctagacacttaaatagcatctatgtctctttcaagggaatttgtcaaataatgctgtttagctaattgttgcaagcaattgcatattaacagctgtgattttgttggacagcaagtattatggccaaagccagtttcttggcatttcaaaaataatgcaataaaaactagttgaggttagctgaggctggaaatgcctttttcatggtaaatgattcacttctatatttttctttctttttctttttttttctttggttttcatcctggattcatcccctgatcttaaatcaaaacgtcagatcaatgaactatgaactaaagtatttttcttaagcctattgagtgatttattttttaaaaaatgtttaaatgcatatgcttttctttcagcacaaacaacagcaaaaacttttgtaataactaacttacctttgcatgtatgaagaactgagtcatttatttccctaacttactcctctttcaagtaacaggtggcagatcataaaatgaattctttattgtatctacacactccacattctttactgtgtcctactactgtatcttggctccctgctgtattaaacaccatcttaagcacttgttcctgcaggactccttcttgacattttgtctcccccttcaaagtcactcaaagagtgggacttcatcaaaagaaatgaattagtctctatcacaccgaatactaagatttatttcctctgatggtacatagatttctctctcactaagagggtcactctcatagaggaatgtcttgtcagttttatacttgctgaggctagactgacaataaaaatgagctgggcagttaaattagcatttgttactatattggcctataaaggatcaggttgatgataatacctctaaaaatatgcaataataaaacaatagttatgaaagaaacttgaaaggtttgcaaggtttctcctatccctgttaaaattatcatttattatctctttgtcagtgttagtaaggtaacccatgacagaataatttgagtgatagttcatcatgcagaggatatgatcaagatattacctaatggttttatcctgaaaaaggtgtatacttttagggcactgttaacaatgcgagtgaaaccaagatggtgcaagttccctttgcagatggcgtgggcacacttgatttttattatgagtgaatgtaatctttctgtattttaccagagttacagcaattacctgaaaagtttcctaacattttaataatgttagggatttcgttttggttttagttgtcctcaagagacaacaggttcacagtaatttccatgatgttgggtgtggctaagctggggattggttctgttccccctgctcccgtgtagagaaaagctatatttatactgcattctttctcaactttcaggtaaaacaaactatgatttaaaaaaagaaaaaagaaaagacaggtacttttacttcaaagagtgctttgctacatttttatttaaaccaaaaatcaaataaaataaggaggggggctgggtatactttaaacaaaaccagtcctgaaatgctgttattctcaaagtacattccaaaaaaaaaaaaaaaaaaaaactatagaatttacgtatgttacatttttaagtatgagttaaattgatataaagtgttcctcaatatttaataatgtaagctgttgtcatgacagtattttttaaaaataataacgtatattatagttacgaaacacttgtgccagattagaacatcaagcacagaagcagctgtatgatttacctgtttttttgaaactttaatgtttaccttcccctatgtttaatttttctgtggtgaacacttttgttagaacatggcttttttatttttcttggaaaaatatgctattagtatttacaaaataattaattacctgaataagcagtatatactaaaagtcttcaaacattactttattgattacttatgttttgtggtgcgctttcaacatccctaagagttaaatgtcttagtcatctaatacatggaacagggtcaaacttcaatgaaattaatacttattgcacaatcataatatagcaacctaattttcttttatttataggcatatctttaaagctttcttctcttttttgaacaaatgaagagaatccagttagtttttgcctttcagaggtgatttgccacgtgcacaaagggtctgtaggtgaaaagacaggcttttgggtttcttgaaacatcaaaaactgaatttagagaatggttatctaacactcaagtcaatgttttttttgaaattactagctattggtataatatacatatatgtacatgtatacatatacatacacacatatgtacatttacacatatgtaagtatacactcatatacatatatacacatgtatatatacttgtgtacacatacatttttgcctatagctagcaattatttcattcagatacacacacacacacacacacacacaggctacttaaaatagagagtgacttgagatatacaaaaacaggaagaaaagccctggaggtcatatagctaatgtataactgcacagcaagcagctatgtctaaagctaacaataaaaagaaaatgtgggagttgtgcaattagttttattctcattttttggaagaatatgttcctggtttctctaactaaaaggaaaaaattcaaaggaaagttgtaaatattaggaagtaactgaaaaataagaagcaagataaagtggggaggctatgagatcatataatgagctaataaacttttcaacaggggacacctgttctcccttctaactgaagacactaaagagaagctaagatcctatctttcaatcatttagtaattcataaaatcccattatttcataactcaaagtttacctttgaggttgtatgtttacctcatttgaactcgaaatagaagaggtttaagtatttgaataagttgggaaaaaaaggaaaaatagtcttccctgcccttgtcactgatggtgacactacttgtaattactgtattttttggcagaacactcagatgaacagattcctatgctgtggacttttatcattctttttgatggctgatagtagaaagcacacagtaggtactccataaatgtaagactatggcagctgtctagtacaagtgcttctcactgattcttggttaccaggaaaaccagaaagcccgtcacttgccttgcctgcaaaggcgagcctaaagaaatttctctaaccaaaattggcaggttctttccaccacaaaaggctcttggaaatataacttatggggcttaaggctaatttgagttgaagggtatttgtaatatttgatttgcttttagcagagaaaacaataaaagaatccaggaaaagtagaaaa

SEQ ID NO: 240440 - DNA, 3765 bp, Artificial Sequence
  derived and/or modified sequence
gtcggcgcggcggtgggaaagcagagccgagccgggactgtccagtgggagcaggcgccccggccagcgcagacctggaggcgcacgggcgccgcaccgcacgattcggctcggggtagagcggagccgcagccccacgcgcagcccaggacccactcgccaccgccgcttcctcagcacccatggggaccaggagactttaaaggagtttggggtttcgggagcagggaaatcacggcccacccctcggtccttcctgggtgtccgtctcccacactgccacagccagcactctcctccccaccgggaccccgcaagctctccagccagcctgggtgttttcttctgggagttggaccgagttcccggaaggggtcggaggctgtgtggtggcgtctgctctcgcctgacctgtggcggcttctccgcccctcgtacccctggggaggcacggaggactcggctggaaagggtgactccgatccccgctcctggccctcgcctcgccacctcattgatgggcaaccaactggaccgcatcacccacctcaactacagcgagttgcccacaggggacccgtcggggattgaaaaggacgaactgcgggtcggggttgcctacttcttctcggatgatgaggaagacctggacgaacgcgggcagcccgacaagtttggcgtgaaggcccccccgggttgcaccccctgcccggagagccccagccgccaccaccaccacctgctgcaccagctggtcctcaacgagactcagttttccgcctttcggggccaggaatgcatcttttccaaagtgagcggtggccctcagggcgccgacctaagcgtctacgcggtcaccgcgctgccagcgctctgcgaacccggcgacctgctggagctgctgtggctgcagcccgcgccggagccgcccgcgcccgccccgcactgggccgtctacgtgggcggcgggcagatcatccacctgcaccaaggcgagatccgccaggacagcctgtatgaggcgggcgcggccaacgtgggccgggtggtgaatagctggtaccgctaccgcccgctggtggccgagctggtggtgcagaacgcctgcggccacctgggcctcaagagcgaggagatctgctggacgaactcggagagcttcgccgcctggtgccgctttggcaagcgggagttcaaggcgggaggggaggtgccggcaggcacgcagcccccgcagcagcagtactatctcaaggtgcacctgggagagaacaaggtccacaccgccaggtttcacagcctggaagacctcatccgcgagaagcgccgtatcgacgccagcggccgcctgcgagtgctccaggagctcgccgacctcgtggacgacaaggagtagccgcctaggggctgccggcccctctgcctcccccgcacctcgctcccttcccttccccgcacccggacttcgcagtcagcggttctcaacctctgccccgccccgccacgcgcgtccgccgccggtggcccgggcccgggctgcacccccgcatccccaagccagcggcaggaagtctcaggaactgccccagggccgaaagggcgccgctgcgagcgcctggctgacagccacagcggtggtgacggtgctgggagaccccgcgtgcgctttccccttgagatgtaaaccgggaacggggaaggggctgaggggagaaaggacatggccttccccgcgagtccatggccagtgactgtggcccgactcgaaaacaaccctcttctcaaaagggaccatcaccgccccgagcgtgcgcacacagaccggtcggaggcgagaactggtctctacagggcacagttcagctcctctgtggatgcgtccccagatcgcaggatttccaagaaatcgagcctgtcccttgtgcacttgggaataattccccaagacagcacttcgggattccgggttatcctgaggctgcccgggacttttccagctctccagccccaggtctcctgacattgtgttccaggctgcgggctaagccagacagtgtttgcctccggttctttccaccgtgggaagcgaacgccacccccacccgcctttgcctgcgagtctccctcgctggcagaagggaagccggcccggtcccgggaggaagatggcgctgcgaattcggtgaggacagccggccccgcccccgacaaggagctcgctcgttcacctggtgtctgggaacttgaatgtgtgaagggcgcttattgttctgaacccttgattgctccctcctcgggctgcatttcaaaaatagtcatatttttaaaggagttggaggagagggagggggaggacatggcaccattccagaaaccagcattgttacaacaccatagccagtatatttagtttggcttttcctaacatagaaatcttcaaagctggggaagtggaaataaagttttaaaaatgagagagcagttttccaactatgtcaacaaagcctatcgtgttgatgtttttattgaccattttagcaacaggctaataaaatttcaaattgaaatttttattttcatggctttaatccatgatagtttaaatactgggggccattaagagtggatgtagctaagagcttagctaacattgccttttcactctatttttctcagatattgtaagcattctgtttttcaatattgtagttaattttttggctttcaacagcagccctagtaatggtggagttgttaattaatgtgtatattgtactgaatttctgtcagttaaggggttcactgctttggtggaaattggtggaaattgctagcaggttccacgatgtttatttttttctccatgttgtatatcattaccatttcacatacgcgtttctatttttcttcctctcctcctgatctccttaaaaatgaatctagagttggtggctttttccccctcctctttggccagttccacagttcagttcttcctgaaaacagggatgatgaacttgtaggatcaggacaaatgtgtgtttttcaaaaacttaaggctgggtgtgaaacaccttctgtggacaaggatttgtaaacttctctcctccctccagctgcggccccagcctaactgatagttacttgattcagtgtgctagacacttaaatagcatctatgtctctttcaagggaatttgtcaaataatgctgtttagctaattgttgcaagcaattgcatattaacagctgtgattttgttggacagcaagtattatggccaaagccagtttcttggcatttcaaaaataatgcaataaaaactagttgaggttagctgaggctggaaatgcctttttcatggtaaatgattcacttctatatttttctttctttttctttttttttctttggttttcatcctggattcatcccctgatcttaaatcaaaacgtcagatcaatgaactatgaactaaagtatttttcttaagcctattgagtgatttattttttaaaaaatgtttaaatgcatatgcttttctttcagcacaaacaacagcaaaaacttttgtaataactaacttacctttgcatgtatgaagaactgagtcatttatttccctaacttactcctctttcaagtaacaggtggcagatcataaaatgaattctttattgtatctacacactccacattctttactgtgtcctactactgtatcttggctccctgctgtattaaacaccatcttaagcacttgtt

SEQ ID NO: 240441 - DNA, 1068 bp, Artificial Sequence
  derived and/or modified sequence
atgggcaaccaactggaccgcatcacccacctcaactacagcgagttgcccacaggggacccgtcggggattgaaaaggacgaactgcgggtcggggttgcctacttcttctcggatgatgaggaagacctggacgaacgcgggcagcccgacaagtttggcgtgaaggcccccccgggttgcaccccctgcccggagagccccagccgccaccaccaccacctgctgcaccagctggtcctcaacgagactcagttttccgcctttcggggccaggaatgcatcttttccaaagtgagcggtggccctcagggcgccgacctaagcgtctacgcggtcaccgcgctgccagcgctctgcgaacccggcgacctgctggagctgctgtggctgcagcccgcgccggagccgcccgcgcccgccccgcactggtgggcctcaagagcgaggagatctgctggacgaactcggagagcttcgccgcctggtgccgctttggcaagcgggagttcaaggcgggaggggaggtgccggcaggcacgcagcccccgcagcagcagtactatctcaaggtgcacctgggagagaacaaggtccacaccgccaggtttcacagcctggaagacctcatccgcgagaagcgccgtatcgacgccagcggccgcctgcgagtgctccaggagctcgccgacctcgtggacgacaaggagtagccgcctaggggctgccggcccctctgcctcccccgcacctcgctcccttcccttccccgcacccggacttcgcagtcagcggttctcaacctctgccccgccccgccacgcgcgtccgccgccggtggcccgggcccgggctgcacccccgcatccccaagccagcggcaggaagtctcaggaactgccccagggccgaaagggcgccgctgcgagcgcctggctgacagccacagcggtggtgacggtgctgggagaccccgcgtgcgctttccccttgagatgtaaaccgggaacggggaaggggctgaggggagaaaggacatggccttccccgcgagtccatggccagtga

SEQ ID NO: 240442 - DNA, 594 bp, Artificial Sequence
  derived and/or modified sequence
atgcatcttttccaaagtgagcggtggccctcagggcgccgacctaagcgtctacgcggtcaccgcgctgccagcgctctgcgaacccggcgacctgctggagctgctgtggctgcagcccgcgccggagccgcccgcgcccgccccgcactgggccgtctacgtgggcggcgggcagatcatccacctgcaccaaggcgagatccgccaggacagcctgaggcgggcgcggccaacgtgggccgggtggtgaatagctggtaccgctaccgcccgctggtggccgagctggtggtgcagaacgcctgcggccacctgggcctcaagagcgaggagatctgctggacgaactcggagagcttcgccgcctggtgccgctttggcaagcgggagttcaaggcgggaggggaggtgccggcagcagcccccgcagcagcagtactatctcaaggtgcacctgggagagaacaaggtccacaccgctttcacagcctggaagacctcatccgcgagaagcgctatcgacgccagcggccgcctgcgagtgctccaggagctcgccgacctcgtggacgacaaggagtagccgcctag

SEQ ID NO: 240443 - DNA, 879 bp, Artificial Sequence
  derived and/or modified sequence
atgggcaaccagctggaccgcatcacccacctgaactacagcgagctgcccaccggggaccccagcggcatcgagaaggatgagctgcgggtgggcgtggcctacttcttcagtgatgatgaggaggacctggatgagcggggccagcctgacaagtttggagtgaaggcccctcctggctgcaccccctgcccagagagccccagccgccaccaccaccacctgctgcaccagctggtgctgaatgagacccagttcagcgccttccggggccaggagtgcatcttcagcaaggtgtctgggggcccccagggcgctgacctgtctgtgtatgctgtgacagccctgcctgccctgtgtgagcccggggacctgctggagctgctgtggctgcagcctgcccctgagcccccagccccagccccccactgggccgtgtatgtgggcggcggccagatcatccacctgcaccagggcgagatccggcaggacagcctgtatgaagctggagctgccaacgtgggccgggtggtgaacagctggtaccgctaccggcccctggtggccgagctggtggtgcagaatgcctgtggccacctgggcctgaagtctgaggagatctgctggaccaacagcgagagctttgctgcctggtgccgctttgggaagcgggagttcaaggccggcggggaggtgcctgctggcacccagcccccccagcagcagtactacctgaaggtgcacctgggggagaacaaggtgcacacagcccgcttccacagcctggaggacctgatccgggagaagagaagaattgatgccagcggccgcctgcgggtgctgcaggagctggccgacctggtggatgacaaggagtag

SEQ ID NO: 240444 - DNA, 1068 bp, Artificial Sequence
  derived and/or modified sequence
atgggcaaccagctggaccgcatcacccacctgaactacagcgagctgcccaccggggaccccagcggcatcgagaaggatgagctgcgggtgggcgtggcctacttcttcagtgatgatgaggaggacctggatgagcggggccagcctgacaagtttggagtgaaggcccctcctggctgcaccccctgcccagagagccccagccgccaccaccaccacctgctgcaccagctggtgctgaatgagacccagttcagcgccttccggggccaggagtgcatcttcagcaaggtgtctgggggcccccagggcgctgacctgtctgtgtatgctgtgacagccctgcctgccctgtgtgagcccggggacctgctggagctgctgtggctgcagcctgcccctgagcccccagccccagccccccactggtgggccagccgggcccggcgctctgctggccgcacccggcgggccagccccccaggggccgccctggccagcggcagcagccggcgggagggccgctgccggcaggcccggagccccaggagcagcagcaccatcagccgctgcacctgggagaggaccaggagcaccccacctggcttcaccgcctggaagaccagcagcgcccggtctgctgtgtccaccccagctgctgcctgtgagtgcagccgcagcagccccacctcctggaccaccaggagcagccggctgggcgctgctggccccagcgccagccctgcccccaggagcctgcccttccctgcccctggcctgcggagccagcgcttcagcaccagcgccccacccaggcatgcccggcccccacctgtggcccgggcccgggccgccccaccccacccccaggccagcggcaggaagagccaggagctgccccagggcaggaaaggagctgctgccagcgcctggctgacagccacagctgtggtgacagtgctgggggaccctgcctgtgccttccccctgcgctgcaagccaggcaccgggaagggcctgcggggggagaggacctggcccagcccccgggtgcacggccagtag

SEQ ID NO: 240445 - DNA, 594 bp, Artificial Sequence
  derived and/or modified sequence
atgcacctgttccagagcgagcgctggcccagcggcagaagacccaagaggctgcggggccacagagctgccagcgccctgcggacccggcggcctgctggagctgctgtggccgccgcccgggccggggccgcccgggcccggcctgccctgggccgcctgcggggcagaagagctgaccaccccccagccccccggcgggaccccccaggccagcctgaggccggggccgccaacgtgggccgggtggtgaacagctggtaccgctaccggcccctggtggccgagctggtggtgcagaatgcctgtggccacctgggcctgaagtctgaggagatctgctggaccaacagcgagagctttgctgcctggtgccgctttgggaagcgggagttcaaggccggcggggaggtgcctgctgctgccccagctgctgctgtgctgagccagggcgcccctggccgggagcagggcccccaccgcttccacagcctggaggacctgatccgggagaagcgctaccgccggcagaggcccccagccagcgcccctggggcccggcggccccggggccggcagggcgtggccgcctag

SEQ ID NO: 240446 - DNA, 879 bp, Artificial Sequence
  derived and/or modified sequence
atgggcaaccagctggaccggatcacccacctgaactacagcgagctacctactggcgatcctagcggaattgagaaggacgagctgagggtcggggtcgcctacttcttctctgatgatgaggaggatctggatgagcggggtcaacccgataagttcggagttaaggccccaccagggtgtactccttgccccgaaagtccatcaagacaccatcatcatttgctccaccagctcgttttgaatgaaacacaattcagtgcttttaggggccaggagtgtatcttctcaaaggtctctggcggtccacaaggtgccgacctgtcagtctatgcggtcactgcgcttcccgccctgtgcgaacccggagatctacttgagctgctctggttgcagcccgctcctgagccgcccgcccccgccccacactgggcagtgtacgtcggaggcggccagataatccacctgcatcagggcgagattcggcaagacagtctgtacgaggcgggagccgccaacgtaggccgcgtggtaaacagctggtacagatacagacccttggtcgctgagctcgtcgtgcagaacgcctgcgggcacttggggcttaaatctgaagagatctgttggacgaacagtgagtcctttgctgcttggtgtcgcttcggcaagcgggagttcaaggctgggggcgaagtgccagcagggactcagccaccacaacagcagtactatcttaaggtacacttgggggagaataaagtccacaccgcccgcttccatagcctagaagatcttataagggagaaacggaggatcgatgcaagcggtcgacttcgggttttgcaggagttagccgatctagtggacgataaggagtag

SEQ ID NO: 240447 - DNA, 879 bp, Artificial Sequence
  derived and/or modified sequence
atgggcaaccagctggaccggatcacccacctgaactacagcgagctgccaactggcgatcctagcggtatcgagaaggacgaattgcgggtcggtgtggcttactttttcagtgacgatgaagaggatctagacgaacgtggccagcctgacaagtttggcgttaaggcaccacccgggtgtaccccatgtccagaatccccaagccggcaccatcaccaccttctgcaccagctggtccttaacgaaacacagttctccgccttccgaggccaggagtgcatcttctcaaaggtgtccggcggacctcaaggagcggacttgtccgtctatgcggtgaccgctttgcctgctctgtgcgaaccaggcgatctcctcgagctgctgtggctgcagcccgctccagagccacccgctcctgcgccacattgggccgtgtatgtgggaggtggtcaaattatacatttgcatcagggcgagattagacaagactcgctgtacgaagccggagcagctaatgtaggacgggtcgtgaacagctggtataggtaccgccctctggtagccgagctggtcgttcagaatgcttgcgggcatctggggttaaaaagcgaagagatctgctggacaaattctgagtcatttgctgcctggtgcagattcggaaagcgcgagttcaaagccgggggggaggtcccagctggaacacagccaccgcagcagcagtactaccttaaggtccatcttggagagaataaggtgcacacagctcggtttcattcgctggaggatctcatccgtgagaaaaggagaattgatgcaagcggacggttgcgcgtgttgcaagaactggcagacctggtggacgataaagaatag

SEQ ID NO: 240448 - DNA, 1068 bp, Artificial Sequence
  derived and/or modified sequence
atgggcaaccagctggaccggatcacccacctgaactacagcgagctcccaacaggggacccatccggcattgagaaggatgagctacgcgtcggagtggcctacttctttagcgacgatgaagaggacttggacgaacgcggtcagcccgacaagtttggcgtgaaggcccccccaggatgtacaccatgtccagagagcccctccaggcatcatcatcacctcctgcatcaattagtcctgaatgaaacccaattctctgcctttcgggggcaggagtgtattttctccaaggtaagcggagggcctcaaggagcggatttgtccgtatacgctgtgacggccttgcccgccttatgtgagcccggcgatttattagaactcctctggctgcaacctgcccccgagcctcccgcgcctgctccacactggtgggccagtcgcgccaggaggagcgccggccggacccgacgagcttccccaccgggtgccgcactggcctccggatcatccaggagagagggacgctgtagacaggcccggtcccctagaagcagctccaccatctctagatgtacttgggagcggacacggtccacaccacctgggtttacagcctggaagacctcaagtgcacgtagtgctgtctccaccccagccgcggcctgcgagtgctctagaagtagccccacctcttggacaacgcggagctccaggctcggagctgccggaccaagcgcctcaccagcgcccagatcactgccatttcctgcacccggattgagatcccagcggttctccacaagcgctccccctcggcacgcacgtcctcctccggttgccagggcccgagctgcaccaccccacccccaggcatccggtagaaagagccaggagctgcctcagggtagaaagggggcagcagcaagtgcgtggctgacagcaactgcagtcgtgaccgtgctgggtgacccagcttgtgcctttcctctgcgatgtaagcccggcaccggcaagggcctgaggggagaaaggacctggccaagtcccagagtgcacggccaatag

SEQ ID NO: 240449 - DNA, 594 bp, Artificial Sequence
  derived and/or modified sequence
atgcacctgttccagagcgagcggtggcccagcggccggcggcccaagagactgagagggcacagagcggcaagtgctcttcgcaccagaagacccgccggagctgccgtggcggcagctcgagcaggagccgcaagagcccgccccgccctggggaggctgagaggacgtcgggctgatcatccccctgcccccaggagggatccacccggccagccagaggctggggcggccaatgtgggaagggtcgtgaactcttggtatcgttatcgccccctagtggccgagttggtagtacagaacgcctgcggacacctcggtctcaaatccgaggaaatctgttggacgaactctgagtccttcgcagcgtggtgtcggtttgggaaaagggagttcaaggcagggggagaagtgcctgccgcagcccctgctgcagcggtgctgtcgcagggggccccaggccgggaacagggccctcatcggtttcactcactggaggatctgattcgggagaaacgataccgtagacaacgcccaccagcctctgcccctggggccaggagaccgcggggaagacaaggtgtcgcagcctag

SEQ ID NO: 240450 - DNA, 879 bp, Artificial Sequence
  derived and/or modified sequence
atgggaaatcaactagacagaattacgcaccttaattattctgagctgcctacaggcgacccaagcggcatagaaaaagacgaactgcgggtcggggtggcctacttcttctccgacgacgaagaggacttggacgaacgcggacagcctgataaattcggagtgaaggcccctccaggatgcacaccttgtcccgaaagcccctcccgccaccaccaccacctactgcatcagctcgtcctgaacgagacacagttttcagccttccgcggacaggagtgcattttcagcaaagttagcggaggcccacagggtgcagacctctccgtgtacgctgtaaccgcactacccgctctgtgcgaaccgggtgatctccttgaactcctttggctccagcctgcacccgaacctcccgctcccgcaccccactgggcagtgtacgtcggtggaggccagattatacacttgcatcagggcgagatcaggcaggattctctatatgaggctggtgccgcaaatgtaggccgtgtcgtgaactcttggtatcgctacaggcccctggtggccgaactcgttgtgcagaacgcgtgtgggcatttgggactcaagtccgaagagatttgctggaccaattccgagtccttcgccgcatggtgccgattcgggaagagagaatttaaggcgggaggcgaagtgcccgctggaacacagccaccccaacagcagtattatctcaaggttcatctaggtgagaacaaagtgcatacggcaagatttcacagcctagaagatctcatacgggaaaagaggagaattgacgcaagcggacgcttgcgcgtcctccaggagctggccgatttggtggatgacaaagaatag

SEQ ID NO: 240451 - DNA, 879 bp, Artificial Sequence
  derived and/or modified sequence
atgggaaatcaactggaccggattactcaccttaattattctgaactccccaccggcgacccatcagggatagagaaggacgaattaagagttggggtggcttatttcttctctgatgatgaggaagatctcgatgaacgaggccagccagacaaattcggcgtaaaggcacccccagggtgcacaccatgccccgagtcaccatcccgccaccaccatcatctgctccatcagcttgttctcaacgagactcagttctctgcatttcgaggccaggagtgtatcttctctaaagtttccgggggtcctcagggagccgatctaagcgtctacgccgtgacagccttgccagctttgtgtgaacccggagacctgctagagttactgtggttacagccagcaccggaaccccctgcacccgcaccacactgggccgtttacgtaggtggagggcaaataattcatctccatcagggcgaaatccgccaggattcactgtacgaggccggtgccgcaaacgtggggagagtcgtgaattcctggtatcgctaccggcctctggtggctgaacttgtcgtgcagaacgcctgtggccacctaggcctgaagtctgaagaaatctgttggactaactcagagagcttcgccgcttggtgtcggttcggcaagcgcgagtttaaagcaggcggagaggttccggctgggacccagccaccgcaacaacagtattacttgaaagtgcacctgggcgaaaataaggtgcacactgcacggtttcactccctggaagacctcatcagggagaaaaggaggatcgacgcctcaggccgtctacgcgtcttacaggagctggccgacctggttgatgacaaggaatag

SEQ ID NO: 240452 - DNA, 1068 bp, Artificial Sequence
  derived and/or modified sequence
atgggaaatcagctggatcgtataacgcatttaaactactccgagcttccgacaggggaccccagtggaatcgaaaaagacgagctgcgcgtgggagtagcgtatttcttttccgatgacgaagaggacctcgacgaacggggacaaccagataaattcggtgttaaagcaccacccggatgcacaccttgccccgagagcccgtcccgccaccatcaccacttgttacaccaacttgtccttaatgaaacccagtttagtgctttcaggggacaggagtgtatcttcagcaaggtgtctgggggtcctcaaggcgcagacctaagcgtgtacgcagttaccgctctgcctgcgctgtgtgaacccggtgatctgttggagctattgtggctgcagccagccccagagcccccagcacccgctccgcattggtgggcatcccgcgcacgcagaagcgcaggcagaaccagaagagcctccccacccggagccgctctagcaagtggatcttcacgacgggagggtagatgcaggcaggccaggagtcctaggagctccagcactattagtcgatgcacttgggagagaactcgatcgacaccacccggtttcaccgcatggaaaacctcatcggctagaagcgcagtctccacgcccgctgccgcttgtgagtgctcgcgcagctcgccaacctcatggaccacacgatcttcaaggcttggtgctgctggcccaagtgcgagccccgctcctaggtcactcccctttccggctccagggctgcgaagccagcgattctctacatcagctccgcctaggcacgccaggccccctccagtggccagagcgagggccgcaccacctcaccctcaggcatcgggccgaaagagccaagaactcccccaggggaggaaaggcgctgccgcaagtgcttggctgacagccactgcagtggtaaccgtgttgggggacccagcttgtgcttttccattgaggtgtaagcctggcaccgggaaaggattgagaggtgagcgaacctggccctccccaagggtgcatggacaatag

SEQ ID NO: 240453 - DNA, 594 bp, Artificial Sequence
  derived and/or modified sequence
atgcacctctttcagtcagaaaggtggccatcaggcaggagaccaaagcgcttgagaggacatcgagccgctagcgccttacgaacacgcagacctgctggcgctgcagtcgccgcagcccgtgcgggtgctgctagagcacggcctgccctcggccgactgagaggccgaagggccgatcacccgcctgccccacgccgagacccaccaggccagcccgaggctggtgccgcaaacgtgggacgtgtcgtcaacagctggtataggtataggccactggttgctgaactagttgtacaaaacgcttgcggccacctgggtcttaagagcgaggaaatatgttggacaaacagtgaatcctttgcagcctggtgcagattcggaaaacgcgagtttaaggccggaggcgaagttccagctgctgcacccgcagctgccgtgctaagccagggcgctccgggtcgggaacagggcccacaccgctttcacagtctagaagatctgatcagagaaaagaggtacaggagacagaggccaccggcatctgctcctggagcaaggcgccctcgaggaaggcaaggagttgctgcctag

SEQ ID NO: 240454 - protein, 617 aa, Artificial Sequence
  derived and/or modified sequence
MVPVENTEGPSLLNQKGTAVETEGSGSRHPPWARGCGMFTFLSSVTAAVSGLLVGYELGIISGALLQIKTLLALSCHEQEMVVSSLVIGALLASLTGGVLIDRYGRRTAIILSSCLLGLGSLVLILSLSYTVLIVGRIAIGVSISLSSIATCVYIAEIAPQHRRGLLVSLNELMIVIGILSAYISNYAFANVFHGWKYMFGLVIPLGVLQAIAMYFLPPSPRFLVMKGQEGAASKVLGRLRALSDTTEELTVIKSSLKDEYQYSFWDLFRSKDNMRTRIMIGLTLVFFVQITGQPNILFYASTVLKSVGFQSNEAASLASTGVGVVKVISTIPATLLVDHVGSKTFLCIGSSVMAASLVTMGIVNLNIHMNFTHICRSHNSINQSLDESVIYGPGNLSTNNNTLRDHFKGISSHSRSSLMPLRNDVDKRGETTSASLLNAGLSHTEYQIVTDPGDVPAFLKWLSLASLLVYVAAFSIGLGPMPWLVLSEIFPGGIRGRAMALTSSMNWGINLLISLTFLTVTDLIGLPWVCFIYTIMSLASLLFVVMFIPETKGCSLEQISMELAKVNYVKNNICFMSHHQEELVPKQPQKRKPQEQLLECNKLCGRGQSRQLSPET

SEQ ID NO: 240455 - DNA, 1854 bp, Artificial Sequence
  derived and/or modified sequence
atggtgcccgtggagaacaccgagggccccagcctgctgaaccagaagggcaccgccgtggagaccgagggcagcggcagcagacaccccccctgggccagaggctgcggcatgttcaccttcctgagcagcgtgaccgccgccgtgagcggcctgctggtgggctacgagctgggcatcatcagcggcgccctgctgcagatcaagaccctgctggccctgagctgccacgagcaggagatggtggtgagcagcctggtgatcggcgccctgctggccagcctgaccggcggcgtgctgatcgacagatacggcagaagaaccgccatcatcctgagcagctgcctgctgggcctgggcagcctggtgctgatcctgagcctgagctacaccgtgctgatcgtgggcagaatcgccatcggcgtgagcatcagcctgagcagcatcgccacctgcgtgtacatcgccgagatcgccccccagcacagaagaggcctgctggtgagcctgaacgagctgatgatcgtgatcggcatcctgagcgcctacatcagcaactacgccttcgccaacgtgttccacggctggaagtacatgttcggcctggtgatccccctgggcgtgctgcaggccatcgccatgtacttcctgccccccagccccagattcctggtgatgaagggccaggagggcgccgccagcaaggtgctgggcagactgagagccctgagcgacaccaccgaggagctgaccgtgatcaagagcagcctgaaggacgagtaccagtacagcttctgggacctgttcagaagcaaggacaacatgagaaccagaatcatgatcggcctgaccctggtgttcttcgtgcagatcaccggccagcccaacatcctgttctacgccagcaccgtgctgaagagcgtgggcttccagagcaacgaggccgccagcctggccagcaccggcgtgggcgtggtgaaggtgatcagcaccatccccgccaccctgctggtggaccacgtgggcagcaagaccttcctgtgcatcggcagcagcgtgatggccgccagcctggtgaccatgggcatcgtgaacctgaacatccacatgaacttcacccacatctgcagaagccacaacagcatcaaccagagcctggacgagagcgtgatctacggccccggcaacctgagcaccaacaacaacaccctgagagaccacttcaagggcatcagcagccacagcagaagcagcctgatgcccctgagaaacgacgtggacaagagaggcgagaccaccagcgccagcctgctgaacgccggcctgagccacaccgagtaccagatcgtgaccgaccccggcgacgtgcccgccttcctgaagtggctgagcctggccagcctgctggtgtacgtggccgccttcagcatcggcctgggccccatgccctggctggtgctgagcgagatcttccccggcggcatcagaggcagagccatggccctgaccagcagcatgaactggggcatcaacctgctgatcagcctgaccttcctgaccgtgaccgacctgatcggcctgccctgggtgtgcttcatctacaccatcatgagcctggccagcctgctgttcgtggtgatgttcatccccgagaccaagggctgcagcctggagcagatcagcatggagctggccaaggtgaactacgtgaagaacaacatctgcttcatgagccaccaccaggaggagctggtgcccaagcagccccagaagagaaagccccaggagcagctgctggagtgcaacaagctgtgcggcagaggccagagcagacagctgagccccgagacctag

SEQ ID NO: 240456 - DNA, 1854 bp, Artificial Sequence
  derived and/or modified sequence
atggtgcctgttgaaaatacagagggtccttccctgctcaatcagaagggcactgccgtggaaaccgagggtagtggttcccgtcatccaccatgggcaaggggctgcggaatgtttacttttctgtcaagcgtcaccgctgctgtgtctggactcctggttggttatgagctgggaattatcagcggagcactgctgcagatcaaaactcttctcgcactgagttgccacgagcaggagatggttgtcagtagtttggtcataggcgctctccttgcttcccttacgggcggagtcctcattgacagatacggccgtaggactgctataatactgagctcctgcctgttaggattgggatccttggtactcatcctttctctcagctataccgtcctgatcgttggacgaatcgcaatcggcgtgagtatctctctgagcagtatcgcaacttgtgtgtatatagcggaaatcgcacctcagcaccgtcgaggtctgctggtatctctgaatgaactaatgatcgttattggaatactcagcgcctatattagcaattacgcatttgccaacgtcttccacggatggaaatacatgttcgggctggttatccccctgggagtcttgcaggccatcgccatgtacttccttccgccatcacctcggttcttggtcatgaagggacaggaaggcgccgcttccaaagtgctgggcagattgcgcgccctgtctgacacaaccgaagagttgactgtgataaaatcctcgttgaaagacgaatatcagtattccttttgggatctgttcagatccaaagacaacatgcgaactaggataatgattggtctgactttggtcttcttcgtgcagatcaccggccagcccaacatcctgttttacgcctcaaccgtgttaaaatctgttggtttccagagcaacgaggcagccagcctcgcaagcacaggcgtgggtgtcgtgaaggtaatctccacaatacccgccaccctgctggtcgatcatgtgggctcaaagacttttctctgcataggctctagcgtcatggccgcctcacttgtcactatgggcattgtaaacttgaacattcacatgaacttcactcacatttgcagaagtcacaactctattaatcagtctctagacgagtcagtaatctatgggccgggcaacctgtccactaacaacaacacactgcgggaccatttcaaagggatttctagccactcgagatccagcctaatgcccttaagaaatgatgtggacaaacggggggaaactactagcgcctctcttctcaatgctggcctatcccacacagagtaccagatagtcaccgatccgggagatgttccggcatttctcaagtggttgtccctcgcctccctgttagtgtacgtggctgcgttctcaatcgggctggggcccatgccttggctggtgctatcggagattttccccggcggcataaggggacgtgctatggccctgacgtctagcatgaattggggcatcaacctcctcattagtctaactttccttactgttactgatctgatcggcctgccatgggtttgtttcatctataccatcatgtctttggcaagcctgctgtttgttgtgatgttcatcccggaaaccaaggggtgctcactggagcagatcagcatggaacttgcaaaagttaattacgtcaagaataatatctgttttatgagccaccatcaggaggagttggtgcctaagcaaccccagaagcggaagccacaggagcaactgctagaatgcaacaaactttgtggcaggggccagtctcgacaactgtctccagagacgtag

SEQ ID NO: 240457 - DNA, 1854 bp, Artificial Sequence
  derived and/or modified sequence
atggtgcctgtggagaacacagagggccccagcctgctgaaccagaagggcacagctgtggagacagagggcagcggcagccgccaccccccctgggcccggggctgcggcatgttcaccttcctgagctctgtgacagctgctgtgtctggcctgctggtgggctatgagctgggcatcatcagcggggccctgctgcagatcaagaccctgctggccctgagctgccacgagcaggagatggtggtgagcagcctggtgattggagccctgctggccagcctgaccggcggcgtgctgattgacagatatggccgcaggacagccatcatcctgagcagctgcctgctgggcctgggcagcctggtgctgatcctgagcctgagctacacagtgctgattgtgggccgcatcgccatcggcgtgtccatcagcctgagcagcatcgccacctgtgtgtacatcgccgagatcgccccccagcacagaagaggcctgctggtgtccctgaatgagctgatgattgtgattggcatcctgagcgcctacatcagcaactatgcctttgccaacgtgttccacggctggaagtacatgtttggcctggtgatccccctgggcgtgctgcaggccatcgccatgtacttcctgccccccagcccccgcttcctggtgatgaagggccaggagggcgccgccagcaaggtgctgggccgcctgcgggccctgagtgacaccacagaggagctgaccgtcatcaagagcagcctgaaggatgagtaccagtacagcttctgggacctcttccgcagcaaggacaacatgaggacccgcatcatgattggcctgaccctggtgttctttgtgcagatcaccggccagcccaacatcctcttctacgccagcacagtgctgaagtctgtgggcttccagagcaatgaagctgccagcctggccagcactggagtgggcgtggtgaaggtgatcagcaccatcccagccaccctgctggtggaccacgtgggcagcaagaccttcctgtgcatcggcagctctgtgatggccgccagcctggtgaccatgggcatcgtgaacctgaacatccacatgaacttcacccacatctgccgcagccacaacagcatcaaccagagcctggatgaatctgtcatctacggccctggcaacctgagcaccaacaacaacaccctgcgggaccacttcaagggcatcagcagccacagccgcagcagcctgatgcccctgagaaatgatgtggacaagagaggagagaccaccagcgccagcctgctgaatgccggcctgagccacacagagtaccagatcgtgacagatcctggagatgtgcctgccttcctgaagtggctgagcctggccagcctgctggtgtatgtggccgccttcagcatcggcctgggccccatgccctggctggtgctgtctgagatcttccctgggggcatccggggccgggccatggccctgaccagctccatgaactggggcatcaacctgctgatcagcctgaccttcctgactgtgacagacctgattggcctgccctgggtgtgcttcatctacaccatcatgagcctggccagcctgctgtttgtggtgatgttcatccctgagaccaagggctgcagcctggagcagatctccatggagctggccaaggtgaactacgtgaagaacaacatctgcttcatgagccaccaccaggaggagctggtgcccaagcagccccagaagaggaagccccaggagcagctgctggagtgcaacaagctgtgtggccggggccagagccggcagctgagccctgagacctag

SEQ ID NO: 240458 - DNA, 1854 bp, Artificial Sequence
  derived and/or modified sequence
atggtgcccgtggagaacaccgagggccccagcctgctgaaccagaagggcaccgccgtggaaacagaagggtcaggatcacgccatcccccatgggccagaggctgcggtatgttcacattcttgtcctccgttaccgctgccgtgtctgggcttttggttggctacgagctgggcatcatttcaggcgctctcctgcagattaagaccttactcgccctgtcctgccacgaacaggagatggttgtctcaagcctggtgataggcgccctcctggcgtcactgaccggcggggtcctcatcgatagatacggcaggagaacagccattatcctcagttcatgtttgctcggcttgggatcattagtgttaatactgtccctcagttataccgtgctcatcgtaggccggatcgccataggagtgtctatatctttgagcagcatcgcaacctgcgtctatattgccgagattgctcctcagcatcgtcgaggccttctggtgagtctgaacgagctgatgatcgttattgggatcctgtctgcttatatctcaaattatgcattcgccaacgtatttcatggttggaagtatatgttcggtttggtaattcctctgggagtcctccaggccatcgctatgtactttttgcccccctccccaaggttcctagtgatgaaaggccaggagggagccgcaagcaaagtgttaggtaggctaagggcactcagcgataccaccgaggaactcaccgttatcaaatcttccctaaaggacgagtaccagtatagtttttgggatctttttcggagcaaagataacatgcgcactcgcatcatgatcggtttgacacttgttttcttcgttcagatcaccgggcaacctaacattctgttttatgccagcaccgttctgaagagtgtgggattccagagtaacgaagcagctagcctggctagcaccggagttggcgtggtcaaagttatatccacgattccagcaacattactggtggatcatgtaggatccaagaccttcctgtgtattggatcttccgtgatggcagcatcactagtcactatgggcattgtgaacttgaatattcacatgaacttcacccacatttgccgaagccataattctatcaaccaaagcctagacgagtctgtgatctacggcccagggaacctgtcgactaacaataataccctgcgcgatcacttcaagggaatcagttctcactcgcgctcatccctgatgcctctcaggaacgacgtggacaagcggggtgaaacaacctccgccagcctgctgaacgcaggactgagccacaccgagtaccagattgtaaccgatccaggagacgttcccgcattccttaagtggcttagtttggcaagcctgcttgtgtacgtcgcagcattcagcatcggactagggcctatgccatggctcgtcctgtctgagatatttccgggaggtattagaggtagggccatggccctcacgagctcaatgaattggggaatcaatctcctgatttcgctcactttcctgactgtgacggatctaatagggttgccttgggtctgtttcatctataccataatgtcccttgctagtcttctgtttgttgtgatgtttatccccgagacgaagggctgttccttagagcagattagtatggaactcgcaaaggtgaattatgtgaaaaacaatatatgtttcatgagccatcaccaggaggagctcgtcccaaagcaaccacagaagcggaaaccacaggaacagctgctggaatgcaacaaactgtgtgggcgcggacagagtcggcagctctctcccgagacctag

SEQ ID NO: 240459 - DNA, 1854 bp, Artificial Sequence
  derived and/or modified sequence
atggtccctgttgaaaataccgaaggtccttccctgctaaaccagaaagggacggctgtggaaactgaaggatccggctctaggcatcctccatgggcccgaggctgtgggatgtttacttttctgtccagcgtgacagccgctgttagcggcctactggtagggtacgagcttggaattattagcggcgcattgttacagattaagacccttctcgcccttagttgtcacgagcaggaaatggtagtctctagtctggtcattggtgctctgctggcatcactcaccggtggggtcttaattgatcgatacggccgaaggactgctatcatcctgagcagctgtctgttggggctgggctctctcgtgctcatcttatcgctctcatataccgtgttaattgtcggcagaattgccatcggagtaagtatctccctgagctctatagcgacctgtgtgtacatcgccgaaattgcaccccagcaccgaaggggccttcttgtcagtctgaatgagctgatgatagtgatagggatcctttcggcatacatcagtaattatgcattcgcgaatgtctttcatggatggaagtatatgtttggactcgtgattcctctgggtgtcctccaggctattgcaatgtatttcctgccgccatcccctaggttcctggtgatgaagggccaagagggggcagcctctaaagttctgggaaggctgagagcattgtcagacactactgaggagttgaccgtgattaagagcagcctgaaagatgaatatcaatatagcttttgggatctgttccggtcaaaggataacatgcggacacgtattatgattggcttgactctggtgttctttgtgcagatcactgggcagccgaacatactcttttatgccagcaccgtccttaagagcgttggttttcaatccaatgaggctgctagccttgcctccactggagtaggagtggtcaaggtgatcagcaccatccccgctaccttactagtcgaccacgtgggaagtaagacctttctgtgcatcggtagtagcgttatggcagcctcactagttaccatgggtatcgtgaacttaaacatacacatgaatttcacccatatctgccgctcccacaactcaataaatcagtctctcgatgagtcagtaatctacggcccaggcaacctgtctacaaataataatactcttcgtgaccactttaaaggtatctcttcgcattccagatcaagtcttatgcctttgcggaacgacgtagacaagagaggggagaccacaagcgcatctttacttaacgcagggctgtcacacacagagtaccagattgtaactgacccaggagacgtacccgcttttttgaaatggctcagtctcgcatcccttcttgtgtacgtagctgcattttctattggattgggccctatgccctggcttgtcctcagtgagatttttccagggggtattcgcggaagggcgatggcactgactagtagcatgaattgggggattaatcttcttattagccttacattccttaccgtcacagacttaatagggcttccgtgggtctgcttcatctacaccattatgagtctggcttcacttctgtttgtggtgatgtttattccagaaacgaaaggctgtagtctagagcaaatcagcatggagctggccaaggttaactacgtgaagaacaacatctgcttcatgtcacaccatcaagaggagctggtgccaaagcaaccccagaagaggaagccccaggagcagcttctcgagtgcaacaaactctgcggaagaggccaaagtagacagttgagtcctgagacatag

SEQ ID NO: 240460 - DNA, 4468 bp, Artificial Sequence
  derived and/or modified sequence
agaaacaaagttggtcacaaatcacattagctttgcccgaagtttttccccacactcttctttagcatgctattatggggaaagtgaccactcctgggagcgggggtggtcggggcggtttggtggcggggaagcggctgtaacttctacgtgaccatggtacctgttgaaaacaccgagggccccagtctgctgaaccagaaggggacagccgtggagacggagggcagcggcagccggcatcctccctgggcgagaggctgcggcatgtttaccttcctgtcatctgtcactgctgctgtcagtggcctcctggtgggttatgaacttgggatcatctctggggctcttcttcagatcaaaaccttattagccctgagctgccatgagcaggaaatggttgtgagctccctcgtcattggagccctccttgcctcactcaccggaggggtcctgatagacagatatggaagaaggacagcaatcatcttgtcatcctgcctgcttggactcggaagcttagtcttgatcctcagtttatcctacacggttcttatagtgggacgcattgccataggggtctccatctccctctcttccattgccacttgtgtttacatcgcagagattgctcctcaacacagaagaggccttcttgtgtcactgaatgagctgatgattgtcatcggcattctttctgcctatatttcaaattacgcatttgccaatgttttccatggctggaagtacatgtttggtcttgtgattcccttgggagttttgcaagcaattgcaatgtattttcttcctccaagccctcggtttctggtgatgaaaggacaagagggagctgctagcaaggttcttggaaggttaagagcactctcagatacaactgaggaactcactgtgatcaaatcctccctgaaagatgaatatcagtacagtttttgggatctgtttcgttcaaaagacaacatgcggacccgaataatgataggactaacactagtattttttgtacaaatcactggccaaccaaacatattgttctatgcatcaactgttttgaagtcagttggatttcaaagcaatgaggcagctagcctcgcctccactggggttggagtcgtcaaggtcattagcaccatccctgccactcttcttgtagaccatgtcggcagcaaaacattcctctgcattggctcctctgtgatggcagcttcgttggtgaccatgggcatcgtaaatctcaacatccacatgaacttcacccatatctgcagaagccacaattctatcaaccagtccttggatgagtctgtgatttatggaccaggaaacctgtcaaccaacaacaatactctcagagaccacttcaaagggatttcttcccatagcagaagctcactcatgcccctgagaaatgatgtggataagagaggggagacgacctcagcatccttgctaaatgctggattaagccacactgaataccagatagtcacagaccctggggacgtcccagcttttttgaaatggctgtccttagccagcttgcttgtttatgttgctgctttttcaattggtctaggaccaatgccctggctggtgctcagcgagatctttcctggtgggatcagaggacgagccatggctttaacttctagcatgaactggggcatcaatctcctcatctcgctgacatttttgactgtaactgatcttattggcctgccatgggtgtgctttatatatacaatcatgagtctagcatccctgctttttgttgttatgtttatacctgagacaaagggatgctctttggaacaaatatcaatggagctagcaaaagtgaactatgtgaaaaacaacatttgttttatgagtcatcaccaagaagaattagtgccaaaacagcctcaaaaaagaaaaccccaggagcagctcttggagtgtaacaagctgtgtggtaggggccaatccaggcagctttctccagagacctaatggcctcaacaccttctgaacgtggatagtgccagaacacttaggagggtgtctttggaccaatgcatagttgcgactcctgtgctctcttttcagtgtcatggaactggttttgaagagacactctgaaatgataaagacagcctttaatccccctcctccccagaaggaacctcaaaaggtagatgaggtacaaggtcctaagtgatctctttttctgagcaggatatcaggttaaaaaaaaaaagttactggctggtttaatactttctaccttcttcacagagcagcctttgaatagactatgtcctagtgaagacatcaacctccgccttaagctatgtatgtatggaggccagtcgcagctttattatgcagacacacaagtggtctggacatgagggtacagtttctgcctaccaagacactacttgcactggatcttacgcaaaaaagaaccagaacacacagtgtggacaactgcccatatattctatctagattaggagagggtcctggctaggattttagtggtaattcctagttacattcaacaagtataaagattatagagcttattttatgaactataaactataatttaatgcaaaatatccttttatgaatttcatgttaatattgtgaaatattaaaataattccacaatagttgagaaaaatgagcatttttttccatttttaaaaaatgcatagaaaagacaattttaaaatcctgggaccatatttatttagaagtagctgttagtaaaacattagaaaaggagtcaggccattaggttatttatccaaatctctaagcaattaggttgaagttattaagtcaagcctagaaaagctgcctccttgtaaggctttcatgacaatgtatagtaatccacagtgtccaattcttcacactcctcaggaatatcactacctcaggttacggtacacaggctataattgatgatgatgttcagataactgaagacacaataaatgacattcagacatcaggacaattccctcatgttcttttctatgatggccacctgtaccagcaacgtgggtttcacccacacaacgatgaactgttctcttacttctccagttgattttaaagacttgttaagaggtcttactaataaaatttgggtatgatagaaaatccacaatcaaatcttgaaccaaataacatattaaattactaatatttaagtgatggaagacacacaaaaaacttaaaagcacgaacaacctaacttgaaaaagaattttaaaatatgattaacctgaagaaaagagaatcctaagagccaaagctcctttttatttagcttggaattttcctattggttcctaacaaactgtcccaatgtcatataaggaaacatgatctattacattcctttataacaatgtggagagactataaacctatgtaagtagtaaaactatatcagagactcaggagactgactaaaaggcctggatctgcagtgtattatctgtataaaaattggcagggggaagctaaaaggaaaggagattggagatctcaattctatcatggtgtatttcatacgcaaatcagagcatgcattgttttttgtttttggaaagagaagggaagtgtgttctgccccatgtttccttccgtgtttatagttcaaactctatatatacttcaggtattttttgtttagcccttcattataaatgggcaggaaattgtttatcaacctagccagtttattactagtgaccttgacttcagtatcttgagcattcttttatatttttcttttattatcctgagtctgtaactaaacaattttgtcttcaaatttttatccaatatccattgcaccacaccaaatcaagcttcttgattttcaaaaataaaaagggggaaatacttacaacttgtacatatatattcacagtttttatttataaaaaaaatttacagtacttatggagagccagcagaagacatcagagcactcacttcttcccatctttgttaaggttagcgaattacccatggacactgttaggtgaggctcattcggcagccctgaaaacaaacctggtcacactgtctttaccctctcccttcagataaagcacttcgattatctattgatctgcccagttttcaagtcatgcgaatactaaaaaggttacatcatctggatctgtaccttggctatataagcatgttttccccctattctatgtttctttttttggtgaacattgaaaaacaggaggtgacttattactgttaattaaaactaaatgaaaaatgtcaagtctttaaaacagtgagcttgtaactctttcatgtaattttattctctatgaatttggctatcctactgaatcttaaaataaaggaaataaacactttttttttaaaaaaaaggaaaaatacaagtctaaaaatctcaatg

SEQ ID NO: 240461 - protein, 152 aa, Artificial Sequence
  derived and/or modified sequence
MKSCKPSGPPAGARVAPPCAGGTECAGTCAGAGRLESAARRRLAANARERRRMQGLNTAFDRLRRVVPQWGQDKKLSKYETLQMALSYIMALTRILAEAERFGSERDWVGLHCEHFGRDHYLPFPGAKLPGESELYSQRLFGFQPEPFQMAT

SEQ ID NO: 240462 - DNA, 459 bp, Artificial Sequence
  derived and/or modified sequence
atgaagtcttgtaaaccaagcgggcctccagccggggcacgggtggcccccccatgtgcgggcgggaccgaatgtgctgggacttgtgccggagccggccgactcgagtcagctgcccgtcggaggcttgccgctaatgcccgggagcggaggcgtatgcaaggattgaacacagcgttcgaccgcttgcgccgcgtggttccccagtggggccaggataaaaagctgagtaaatatgagacattacagatggcactgtcttacattatggctctaacgaggatccttgccgaggctgagcggttcggttctgagcgcgactgggtcggactacattgcgagcactttgggagagaccattatctgccattccctggcgctaaacttccaggcgagagcgagctctactctcagcggctcttcggctttcaaccagagccattccaaatggccacctag

SEQ ID NO: 240463 - DNA, 459 bp, Artificial Sequence
  derived and/or modified sequence
atgaagagctgcaagcccagcggccccccagctggggcccgggtggccccaccctgtgccggcggcacagaatgtgccggcacctgtgccggggccggccgcctggagagcgctgcccggcggcggctggccgccaatgcccgggagaggaggaggatgcagggcctgaacacagcctttgaccggctgcggcgggtggtgccccagtggggccaggacaagaagctgagcaaatatgagaccctgcagatggccctgagctacatcatggccctgacccgcatcctggccgaggccgagcgcttcggcagcgagcgggactgggtgggcctgcactgtgagcacttcggccgggaccactacctgcccttccctggggccaagctgcccggggagagcgagctgtacagccagaggctgtttggcttccagcctgagcccttccagatggccacctag

SEQ ID NO: 240464 - DNA, 459 bp, Artificial Sequence
  derived and/or modified sequence
atgaagagctgcaagcccagcggcccccccgccggcgcccgggtggcccctccctgcgccgggggtactgagtgtgccggtacctgtgccggagccggacgcctggagagtgccgcacgccgcaggctggccgccaatgccagggagaggagaagaatgcaaggcttgaacacagcctttgacagactgagaagagtggtgccgcagtggggacaggacaagaaactttcaaaatatgagacattgcagatggccttaagctatatcatggcactaacgcgcatcctggccgaggctgagaggtttggatcagaacgtgattgggtgggcctgcattgcgagcatttcggacgggatcactatctcccattccccggggctaagttaccaggggagagcgagttgtattcccagagactgtttgggtttcagcctgaacctttccagatggccacctag

SEQ ID NO: 240465 - DNA, 459 bp, Artificial Sequence
  derived and/or modified sequence
atgaagagttgtaaaccctccggaccacccgctggtgcccgtgtggccccaccttgcgccggaggaaccgagtgtgcagggacatgtgccggtgccggtcggttggaatccgcagctcgcaggaggctggccgctaacgccagggaacggcgacgaatgcaggggctgaacacagctttcgacagattaaggcgcgtagtaccccagtggggccaggataaaaagttaagcaagtacgaaactctacaaatggccttaagttacatcatggctctcacaagaatcctggccgaggccgaacggttcgggtccgagagagactgggtcgggctgcattgcgagcactttggacgcgatcactacttgccttttcctggggctaaacttccaggggaatcagaactctatagtcaaagattgtttgggttccagccggagccattccaaatggctacctag

SEQ ID NO: 240466 - DNA, 1486 bp, Artificial Sequence
  derived and/or modified sequence
tctgcactctccgacagctactgcgctaaaagcgctccttccctgagcttcgggaaagagttcatcttcctgcaaaggagtctcaggctttcccagaggacttgaaaggccttcctcgaaccagccacaccaaactctgctgcagaaggtttccttctctttttcaacttcatgttgagaaaatgactttctcttgagcatctcattttcccctaaatttgggcaagtgaagagatatcagcctggtcatccagtagaacagaaggccgagtcccgcactcccccactgtaaactatttgattgcacgtgagttgctttgtttatgacttatttgctcagaagaggcacgttgggaagcggctcgagagaccagcccacgcgcaggtcctgagcgggcgggcgtgcgaggtcggcgcctcgctgcttggggccggggatgaagtcctgcaagcccagcggcccgccggcgggagcgcgcgttgcacccccgtgcgcgggcggcaccgagtgcgcgggcacgtgcgccggggccgggcggctggagagcgcggcgcgcaggcgcctggcggccaacgcgcgcgagcgccgccgcatgcaggggctcaacactgccttcgaccgcttacgcagggtggttccccagtggggccaggataaaaagctgtccaagtacgagaccctgcagatggccctgagctacatcatggctctgacccggatcctggccgaggccgagcgattcggctcggagcgggactgggtgggtctccactgtgagcacttcggccgcgaccactacctcccgttcccgggcgcgaagctgccgggcgagagcgagctgtacagccagagactcttcggcttccagcccgagcccttccagatggccacctagggcgcgcgcctccgcgggggtgggtgtccggcagccgctccgagcctcggccctgccccaagtagcccagaagcctccggcggcccaggattctaaggatgcaatcctcgaggaaaattagtcgattctcagattacctttattcgcatcatcagacctatggacgcaatcatttaattgcctttcttttcccctcctcctttgtattttgtagatttcattaatggatcttgtgaatgggttgattgctgtgaaaataatgccccctttccccttttctgggctactttgagggaaaacaatcttaagaaaaataggattaagctattctgttccagtcctcagagaaataatcactttcttaaactttgtgagtttgtcctgttcgggtgaagttacagtatccattacttgtgtttgctcacaacagagctaccttcctgttgtgtaaatgcgtttttgctttagtgcattgtgtgtgcaagcatgaagtagaaacactttttttttctgggtacagtacatgggtatcggtgctctgtatttttttaaactgtgtacacattattaaaatatacattttataaaat

SEQ ID NO: 240467 - DNA, 459 bp, Artificial Sequence
  derived and/or modified sequence
atgaagagctgcaagcccagcggcccccccgccggcgccagagtggcccccccctgcgccggcggcaccgagtgcgccggcacctgcgccggcgccggcagactggagagcgccgccagaagaagactggccgccaacgccagagagagaagaagaatgcagggcctgaacaccgccttcgacagactgagaagagtggtgccccagtggggccaggacaagaagctgagcaagtacgagaccctgcagatggccctgagctacatcatggccctgaccagaatcctggccgaggccgagagattcggcagcgagagagactgggtgggcctgcactgcgagcacttcggcagagaccactacctgcccttccccggcgccaagctgcccggcgagagcgagctgtacagccagagactgttcggcttccagcccgagcccttccagatggccacctag

SEQ ID NO: 240468 - protein, 176 aa, Artificial Sequence
  derived and/or modified sequence
MGRARDAILDALENLTAEELKKFKLKLLSVPLREGYGRIPRGALLSMDALDLTDKLVSFYLETYGAELTANVLRDMGLQEMAGQLQAATHQGLHFIDQHRAALIARVTNVEWLLDALYGKVLTDEQYQAVRAEPTNPSKMRKLFSFTPAWNWTCKDLLLQALRESQSYLVEDLERS

SEQ ID NO: 240469 - DNA, 531 bp, Artificial Sequence
  derived and/or modified sequence
atgggcagagccagagacgccatcctggacgccctggagaacctgaccgccgaggagctgaagaagttcaagctgaagctgctgagcgtgcccctgagagagggctacggcagaatccccagaggcgccctgctgagcatggacgccctggacctgaccgacaagctggtgagcttctacctggagacctacggcgccgagctgaccgccaacgtgctgagagacatgggcctgcaggagatggccggccagctgcaggccgccacccaccagggcctgcacttcatcgaccagcacagagccgccctgatcgccagagtgaccaacgtggagtggctgctggacgccctgtacggcaaggtgctgaccgacgagcagtaccaggccgtgagagccgagcccaccaaccccagcaagatgagaaagctgttcagcttcacccccgcctggaactggacctgcaaggacctgctgctgcaggccctgagagagagccagagctacctggtggaggacctggagagaagctag

SEQ ID NO: 240470 - DNA, 531 bp, Artificial Sequence
  derived and/or modified sequence
atgggccgtgcgcgcgatgccatcctggatgcgctcgagaatctgacggccgaggagctcaagaaattcaagctaaaactcctgtctgtaccactgcgggaggggtatggaagaatccctaggggagccttattgtccatggatgccttggatctgaccgataagttggtctctttctacttagagacttacggagcagagctgactgcaaatgtcttgcgagacatgggacttcaggaaatggccggacaattgcaggccgctacccatcagggcctgcacttcattgaccagcacagggctgcgcttattgccagggtcactaatgtggaatggcttttggacgcactgtacggaaaagtgctcaccgacgaacagtaccaggcggtgcgggccgaaccaaccaatcctagtaaaatgcgcaaacttttctcctttaccccagcttggaactggacttgtaaagatctccttctgcaagccctccgggaaagtcagagctatttagttgaggacctcgaacggagctag

SEQ ID NO: 240471 - DNA, 531 bp, Artificial Sequence
  derived and/or modified sequence
atgggccgggccagagatgccatcctggatgccctggagaacctgacagctgaggagctgaagaagttcaagctgaagctgctgtctgtgcccctgcgggagggctacggccgcatccccaggggggccctgctgtccatggatgccctggacctgacagacaagctggtgtccttctacctggagacctacggggctgagctgacagccaacgtgctgcgggacatgggcctgcaggagatggccggccagctgcaggccgccacccaccagggcctgcacttcatcgaccagcacagagctgccctgattgcccgggtgaccaacgtggagtggctgctggatgccctgtatggcaaggtgctgacagatgagcagtaccaggccgtgcgggcagagcccaccaaccccagcaagatgaggaagctgttctccttcaccccagcctggaactggacctgcaaggacctgctgctgcaggccctgcgggagagccagagctacctggtggaggacctggagaggagctag

SEQ ID NO: 240472 - DNA, 531 bp, Artificial Sequence
  derived and/or modified sequence
atgggccgggcccgggacgccatcctggacgccctggagaacctgacggcggaggagctcaagaaattcaagctgaaacttctgagcgtgccgttgagggagggctacggccggattcccagaggtgctctcctcagtatggatgccttggatctgacagacaagttggtatcattctacttggaaacttacggagcggaattaaccgcaaatgttctcagggacatggggttgcaggagatggccggccagcttcaagctgcaactcatcagggactgcacttcatcgaccagcacagggccgcactcattgcacgtgttactaacgttgaatggctactcgatgcactctacggcaaggttcttactgacgaacagtaccaggcagtgagggcagagccaaccaatcctagcaaaatgagaaaattattcagttttacacctgcttggaactggacatgtaaagatcttttactgcaggctttgcgtgaatcacagtcttatcttgtggaggatcttgagagaagctag

SEQ ID NO: 240473 - DNA, 531 bp, Artificial Sequence
  derived and/or modified sequence
atgggcagggccagggatgctattctggacgctctggagaatcttacagccgaggagctgaaaaagttcaagcttaaactcctgagcgtccccctccgcgaaggctacggtaggatccccagaggagccctcctgtcaatggatgccctggatctcaccgacaagctggtcagcttctacctcgagacctatggggctgaactgaccgcaaacgtgctgagggatatgggcttgcaggaaatggctggacaacttcaggccgctacccaccagggcctgcattttattgaccaacatagagccgctctgatcgcaagggtgaccaatgtggagtggctcctcgatgcattatacgggaaggtgctgacagatgagcagtatcaggcggtccgtgcagagccgacgaatcctagtaagatgaggaagttgttctccttcacaccagcttggaactggacatgcaaagacctgcttctgcaagcactgagagagtctcaatcgtaccttgtggaggaccttgagcgttcatag

SEQ ID NO: 240474 - DNA, 696 bp, Artificial Sequence
  derived and/or modified sequence
ccgacttcctcctggtcggcggctgcagcggggtgagcggcggcagcggccggggatcctggagccatggggcgcgcgcgcgacgccatcctggatgcgctggagaacctgaccgccgaggagctcaagaagttcaagctgaagctgctgtcggtgccgctgcgcgagggctacgggcgcatcccgcggggcgcgctgctgtccatggacgccttggacctcaccgacaagctggtcagcttctacctggagacctacggcgccgagctcaccgctaacgtgctgcgcgacatgggcctgcaggagatggccgggcagctgcaggcggccacgcaccagggcctgcactttatagaccagcaccgggctgcgcttatcgcgagggtcacaaacgttgagtggctgctggatgctctgtacgggaaggtcctgacggatgagcagtaccaggcagtgcgggccgagcccaccaacccaagcaagatgcggaagctcttcagtttcacaccagcctggaactggacctgcaaggacttgctcctccaggccctaagggagtcccagtcctacctggtggaggacctggagcggagctgaggctccttcccagcaacactccggtcagcccctggcaatcccaccaaatcatcctgaatctgatctttttatacacaatatacgaaaagccagcttgaa

SEQ ID NO: 240475 - protein, 419 aa, Artificial Sequence
  derived and/or modified sequence
MAASSLEQKLSRLEAKLKQENREARRRIDLNLDISPQRPRPTLQLPLANDGGSRSPSSESSPQHPTPPARPRHMLGLPSTLFTPRSMESIEIDQKLQEIMKQTGYLTIGGQRYQAEINDLENLGEMGSGTCGQVWKMRFRKTGHVIAVKQMRRSGNKEENKRILMDLDVVLKSHDCPYIVQCFGTFITNTDVFIAMELMGTCAEKLKKRMQGPIPERILGKMTVAIVKALYYLKEKHGVIHRDVKPSNILLDERGQIKLCDFGISGRLVDSKAKTRSAGCAAYMAPERIDPPDPTKPDYDIRADVWSLGISLVELATGQFPYKNCKTDFEVLTKVLQEEPPLLPGHMGFSGDFQSFVKDCLTKDHRKRPKYNKLLEHSFIKRYETLEVDVASWFKDVMAKTESPRTSGVLSQPHLPFFR

SEQ ID NO: 240476 - protein, 461 aa, Artificial Sequence
  derived and/or modified sequence
MAASSLEQKLSRLEAKLKQENREARRRIDLNLDISPQRPRPTLQLPLANDGGSRSPSSESSPQHPTPPARPRHMLGLPSTLFTPRSMESIEIDQKLQEIMKQTGYLTIGGQVPPSLWRGEGGGPARLDPSWERQWGAGGGGRPGTLQPSLSSQRYQAEINDLENLGEMGSGTCGQVWKMRFRKTGHVIAVKQMRRSGNKEENKRILMDLDVVLKSHDCPYIVQCFGTFITNTDVFIAMELMGTCAEKLKKRMQGPIPERILGKMTVAIVKALYYLKEKHGVIHRDVKPSNILLDERGQIKLCDFGISGRLVDSKAKTRSAGCAAYMAPERIDPPDPTKPDYDIRADVWSLGISLVELATGQFPYKNCKTDFEVLTKVLQEEPPLLPGHMGFSGDFQSFVKDCLTKDHRKRPKYNKLLEHSFIKRYETLEVDVASWFKDVMAKTESPRTSGVLSQPHLPFFR

SEQ ID NO: 240477 - DNA, 1260 bp, Artificial Sequence
  derived and/or modified sequence
atggccgccagcagcctggagcagaagctgagcagactggaggccaagctgaagcaggagaacagagaggccagaagaagaatcgacctgaacctggacatcagcccccagagacccagacccaccctgcagctgcccctggccaacgacggcggcagcagaagccccagcagcgagagcagcccccagcaccccaccccccccgccagacccagacacatgctgggcctgcccagcaccctgttcacccccagaagcatggagagcatcgagatcgaccagaagctgcaggagatcatgaagcagaccggctacctgaccatcggcggccagagataccaggccgagatcaacgacctggagaacctgggcgagatgggcagcggcacctgcggccaggtgtggaagatgagattcagaaagaccggccacgtgatcgccgtgaagcagatgagaagaagcggcaacaaggaggagaacaagagaatcctgatggacctggacgtggtgctgaagagccacgactgcccctacatcgtgcagtgcttcggcaccttcatcaccaacaccgacgtgttcatcgccatggagctgatgggcacctgcgccgagaagctgaagaagagaatgcagggccccatccccgagagaatcctgggcaagatgaccgtggccatcgtgaaggccctgtactacctgaaggagaagcacggcgtgatccacagagacgtgaagcccagcaacatcctgctggacgagagaggccagatcaagctgtgcgacttcggcatcagcggcagactggtggacagcaaggccaagaccagaagcgccggctgcgccgcctacatggcccccgagagaatcgacccccccgaccccaccaagcccgactacgacatcagagccgacgtgtggagcctgggcatcagcctggtggagctggccaccggccagttcccctacaagaactgcaagaccgacttcgaggtgctgaccaaggtgctgcaggaggagccccccctgctgcccggccacatgggcttcagcggcgacttccagagcttcgtgaaggactgcctgaccaaggaccacagaaagagacccaagtacaacaagctgctggagcacagcttcatcaagagatacgagaccctggaggtggacgtggccagctggttcaaggacgtgatggccaagaccgagagccccagaaccagcggcgtgctgagccagccccacctgcccttcttcagatag

SEQ ID NO: 240478 - DNA, 1386 bp, Artificial Sequence
  derived and/or modified sequence
atggccgccagcagcctggagcagaagctgagcagactggaggccaagctgaagcaggagaacagagaggccagaagaagaatcgacctgaacctggacatcagcccccagagacccagacccaccctgcagctgcccctggccaacgacggcggcagcagaagccccagcagcgagagcagcccccagcaccccaccccccccgccagacccagacacatgctgggcctgcccagcaccctgttcacccccagaagcatggagagcatcgagatcgaccagaagctgcaggagatcatgaagcagaccggctacctgaccatcggcggccaggtgccccccagcctgtggagaggcgagggcggcggccccgccagactggaccccagctgggagagacagtggggcgccggcggcggcggcagacccggcaccctgcagcccagcctgagcagccagagataccaggccgagatcaacgacctggagaacctgggcgagatgggcagcggcacctgcggccaggtgtggaagatgagattcagaaagaccggccacgtgatcgccgtgaagcagatgagaagaagcggcaacaaggaggagaacaagagaatcctgatggacctggacgtggtgctgaagagccacgactgcccctacatcgtgcagtgcttcggcaccttcatcaccaacaccgacgtgttcatcgccatggagctgatgggcacctgcgccgagaagctgaagaagagaatgcagggccccatccccgagagaatcctgggcaagatgaccgtggccatcgtgaaggccctgtactacctgaaggagaagcacggcgtgatccacagagacgtgaagcccagcaacatcctgctggacgagagaggccagatcaagctgtgcgacttcggcatcagcggcagactggtggacagcaaggccaagaccagaagcgccggctgcgccgcctacatggcccccgagagaatcgacccccccgaccccaccaagcccgactacgacatcagagccgacgtgtggagcctgggcatcagcctggtggagctggccaccggccagttcccctacaagaactgcaagaccgacttcgaggtgctgaccaaggtgctgcaggaggagccccccctgctgcccggccacatgggcttcagcggcgacttccagagcttcgtgaaggactgcctgaccaaggaccacagaaagagacccaagtacaacaagctgctggagcacagcttcatcaagagatacgagaccctggaggtggacgtggccagctggttcaaggacgtgatggccaagaccgagagccccagaaccagcggcgtgctgagccagccccacctgcccttcttcagatag

SEQ ID NO: 240479 - DNA, 1260 bp, Artificial Sequence
  derived and/or modified sequence
atggccgcgtccagtttggaacagaaactgtcacggcttgaggctaaattgaaacaggagaatcgcgaggcgcgtcgccggatagacttgaatctggatatcagtccccagagacctcgccccacgctgcagttgccactggccaacgacggcgggagtcgatcgcctagctcggagtcgtcccctcaacatccaacacctcccgcccgacctaggcacatgttgggccttccctctaccttattcactccccgtagcatggagagcatcgagatcgatcagaagttgcaagaaattatgaagcagaccggttacctgactattggcggtcagcgctatcaggcagagattaacgacttagagaacctgggcgagatgggcagcggcacctgcggacaggtttggaagatgcgattccgcaaaaccgggcacgtcatagctgtaaaacaaatgagaagatccggcaacaaagaagagaacaagaggatcctgatggatttagatgtagtgcttaagagccatgattgcccatacattgtgcagtgcttcgggacattcattaccaacaccgacgtgttcatagccatggaactaatgggaacatgcgcagaaaaactgaagaagaggatgcagggaccgatacccgaaagaatcctcggaaaaatgacagtcgccatcgtaaaagcactgtactatttgaaggagaagcatggggttatacaccgggacgtgaaaccgagtaacattctcctggacgagaggggccagataaagctgtgtgactttggcatcagtgggaggcttgtggactctaaagctaagaccaggtcggctgggtgtgctgcttatatggcaccagaaaggatcgaccctcctgatcccaccaaacctgactacgacattcgcgcagatgtgtggagcctcggcattagtttggtagagttggcaactgggcagttcccctacaagaattgtaagacagacttcgaggtgctgacaaaggttctgcaggaagagcccccactcctacccggccacatgggtttctctggggatttccaatcctttgtgaaggactgcttgacaaaagatcatagaaagcgaccaaaatacaataagctcttagaacattctttcataaagcgatacgaaaccttagaagtcgatgttgcctcctggttcaaagacgtcatggccaaaaccgagtctccacgcaccagcggggtgctgtcgcagccccacctcccgttttttcggtag

SEQ ID NO: 240480 - DNA, 1386 bp, Artificial Sequence
  derived and/or modified sequence
atggcggcctccagtcttgagcaaaagctcagccggctggaagccaaactgaaacaagagaacagggaagcccggaggaggatcgacctaaatctggacataagtccacagcgcccccgccctaccctgcagcttcctcttgcaaacgatggggggtcgcggtctcccagctcggaatcgtcgcctcagcatcctaccccccctgctaggcctaggcacatgctgggcctccccagcactctattcaccccgcgaagcatggaaagtattgagatagaccaaaaactacaagagattatgaaacagactggctatcttactatcggtggccaggtacctccttcactgtggcggggggaaggaggcgggccagcgcggctggatccttcctgggagcgccagtggggggctgggggcggtggtcggcctgggactctgcagccctcacttagcagccagagatatcaggctgagatcaatgacctggaaaatctgggagaaatgggctctggaacctgcggccaggtgtggaaaatgagatttcggaaaactggccacgtgatcgccgtgaagcagatgcggcgttccggaaataaagaggaaaataagcgaattctcatggatcttgatgtggttttaaaatcacacgattgcccatacattgtccagtgcttcgggacttttatcaccaacaccgatgtgttcatcgccatggagctgatgggaacctgtgcagaaaaactgaaaaaacgcatgcaggggcctatccctgagagaatcctggggaagatgacagtggccatcgttaaagcgctctactacctcaaggaaaagcacggcgttatccaccgagatgtaaaacccagcaatatcctgttagacgaaagagggcagataaagttatgtgacttcgggatttcaggccggcttgtagatagtaaggccaaaaccaggtcggccggatgtgccgcctatatggcgccggagcgaatcgatccccccgacccgactaaaccagattacgacatacgggccgacgtctggtccctgggcatctctctggttgagctggctacaggacagttcccatataagaattgtaagactgattttgaggtccttactaaggtcctccaggaggaacctccactgttacctggacatatggggttttccggggattttcaatccttcgtcaaggattgtctgaccaaggatcatcgtaaaagaccgaaatacaacaagttattggagcattccttcattaagagatacgagacacttgaggtcgatgtggccagttggttcaaggatgtgatggcgaagaccgaaagtccaaggacatccggggtgctgtcgcaaccccacctgccgttctttaggtag

SEQ ID NO: 240481 - DNA, 1260 bp, Artificial Sequence
  derived and/or modified sequence
atggccgccagcagcctggagcagaagctgagccggctggaggccaagctgaagcaggagaaccgggaggcccggaggagaattgacctgaacctggacatcagcccccagaggccccggcccaccctgcagctgcccctggccaatgatggcggcagccgcagccccagcagcgagagcagcccccagcaccccaccccaccagcccggcccaggcacatgctgggcctgcccagcaccctcttcacccccaggtccatggagagcattgaaattgaccagaagctgcaggagatcatgaagcagacaggctacctgaccatcggcggccagcgctaccaggccgagatcaatgacctggagaacctgggggagatgggcagcggcacctgtggccaggtgtggaagatgaggttcaggaagacaggccacgtgattgctgtgaagcagatgaggaggagcggcaacaaggaggagaacaagaggatcctgatggacctggatgtggtgctgaagagccatgactgcccctacatcgtgcagtgcttcggcaccttcatcaccaacacagatgtgttcatcgccatggagctgatgggcacctgtgccgagaagctgaagaagaggatgcagggccccatccctgagcgcatcctgggcaagatgacagtggccatcgtgaaggccctgtactacctgaaggagaagcatggagtcatccacagagatgtgaagcccagcaacatcctgctggatgagcggggccagatcaagctgtgtgactttggcatcagcggccgcctggtggacagcaaggccaagaccaggtctgctggctgtgccgcctacatggcccctgagagaattgatcctccagaccccaccaagccagactatgacatccgggcagatgtgtggagcctgggcatcagcctggtggagctggccaccggccagttcccctacaagaactgcaagacagactttgaggtgctgaccaaggtgctgcaggaggagccccccctgctgcccggccacatgggcttcagcggggacttccagagctttgtgaaggactgcctgaccaaggaccacaggaagaggcccaagtacaacaagctgctggagcacagcttcatcaagagatatgagaccctggaggtggatgtggcctcctggttcaaggatgtgatggccaagacagagagccccaggaccagcggcgtgctgagccagccccacctgcccttcttcagatag

SEQ ID NO: 240482 - DNA, 1386 bp, Artificial Sequence
  derived and/or modified sequence
atggccgccagcagcctggagcagaagctgagccggctggaggccaagctgaagcaggagaaccgggaggcccggaggagaattgacctgaacctggacatcagcccccagaggccccggcccaccctgcagctgcccctggccaatgatggcggcagccgcagccccagcagcgagagcagcccccagcaccccaccccaccagcccggcccaggcacatgctgggcctgcccagcaccctcttcacccccaggtccatggagagcattgaaattgaccagaagctgcaggagatcatgaagcagacaggctacctgaccatcggcggccaggtgccccccagcctgtggagaggagagggcggcggccctgcccggctggaccccagctgggagcggcagtggggcgccggcggcggcggccggcccggcaccctgcagcccagcctgagcagccagcgctaccaggccgagatcaatgacctggagaacctgggggagatgggcagcggcacctgtggccaggtgtggaagatgaggttcaggaagacaggccacgtgattgctgtgaagcagatgaggaggagcggcaacaaggaggagaacaagaggatcctgatggacctggatgtggtgctgaagagccatgactgcccctacatcgtgcagtgcttcggcaccttcatcaccaacacagatgtgttcatcgccatggagctgatgggcacctgtgccgagaagctgaagaagaggatgcagggccccatccctgagcgcatcctgggcaagatgacagtggccatcgtgaaggccctgtactacctgaaggagaagcatggagtcatccacagagatgtgaagcccagcaacatcctgctggatgagcggggccagatcaagctgtgtgactttggcatcagcggccgcctggtggacagcaaggccaagaccaggtctgctggctgtgccgcctacatggcccctgagagaattgatcctccagaccccaccaagccagactatgacatccgggcagatgtgtggagcctgggcatcagcctggtggagctggccaccggccagttcccctacaagaactgcaagacagactttgaggtgctgaccaaggtgctgcaggaggagccccccctgctgcccggccacatgggcttcagcggggacttccagagctttgtgaaggactgcctgaccaaggaccacaggaagaggcccaagtacaacaagctgctggagcacagcttcatcaagagatatgagaccctggaggtggatgtggcctcctggttcaaggatgtgatggccaagacagagagccccaggaccagcggcgtgctgagccagccccacctgcccttcttcagatag

SEQ ID NO: 240483 - DNA, 3361 bp, Artificial Sequence
  derived and/or modified sequence
ctgccggactgacgggcggccgggcggtgcgcggcggcggtggcggcggggaagatggcggcgtcctccctggaacagaagctgtcccgcctggaagcaaagctgaagcaggagaaccgggaggcccggcggaggatcgacctcaacctggatatcagcccccagcggcccaggcccaccctgcagctcccgctggccaacgatgggggcagccgctcgccatcctcagagagctccccgcagcaccccacgccccccgcccggccccgccacatgctggggctcccgtcaaccctgttcacaccccgcagcatggagagcattgagattgaccagaagctgcaggagatcatgaagcagacgggctacctgaccatcgggggccagcgctaccaggcagaaatcaacgacctggagaacttgggcgagatgggcagcggcacctgcggccaggtgtggaagatgcgcttccggaagaccggccacgtcattgccgttaagcaaatgcggcgctccgggaacaaggaggagaacaagcgcatcctcatggacctggatgtggtgctgaagagccacgactgcccctacatcgtgcagtgctttgggacgttcatcaccaacacggacgtcttcatcgccatggagctcatgggcacctgcgctgagaagctcaagaagcggatgcagggccccatccccgagcgcattctgggcaagatgacagtggcgattgtgaaggcgctgtactacctgaaggagaagcacggtgtcatccaccgcgacgtcaagccctccaacatcctgctggacgagcggggccagatcaagctctgcgacttcggcatcagcggccgcctggtggactccaaagccaagacgcggagcgccggctgtgccgcctacatggcacccgagcgcattgaccccccagaccccaccaagccggactatgacatccgggccgacgtatggagcctgggcatctcgttggtggagctggcaacaggacagtttccctacaagaactgcaagacggactttgaggtcctcaccaaagtcctacaggaagagcccccgcttctgcccggacacatgggcttctcgggggacttccagtccttcgtcaaagactgccttactaaagatcacaggaagagaccaaagtataataagctacttgaacacagcttcatcaagcgctacgagacgctggaggtggacgtggcgtcctggttcaaggatgtcatggcgaagactgagtcaccgcggactagcggcgtcctgagccagccccacctgcccttcttcaggtagctgcttggcggcggccagccccacagggggccaggggcatggccacaggcccccctccccacttggccacccagctgcctgccaggggagacctgggacctggacggccacctaggactgaggacagagagtggggggtgcccacccaccccccccgccccgggcctaccaagcccccgcccttcccaccccggggtcagccggccgtgtgcgtcccccgacagacactgtgaacggaagacagcaggccgcgatcagagtcgctgttcattcagccgcagcctctgggccggggcggcccccaggggccaggagagagccctggagtcccgcagccaccatgcacgctcccagcgtgctgtgtccttcgccactcccacgcgcccgttcctcttccgtcgccctctgtcccctgctctacctctctgtccttgtctggctctcccgtcaccctccctgcctctgtctctcttctggcctgagcctgggcccagccacctcctgacgggtcccctgggtctgcataggtctcccatggcgcaatgagtcagtggcccccagccaggcagtgtgggcattgccactgcggctggacggggctgcgcgctcgcgctctctctctctctctctctctctctttgatctcagggggtcctttttggagtttattgtattttattgtacttggtggggtgtttggggtgggggcggaggagagcttgttctcgtggggttgtcggtaccttcagaaacttttaccaaagtcacgattagctgcttgtggtggggccccaaccgccctcgggcactggggagctgggctggggctgctgctctggggtctccgggggccacagcttggggtgagttgaagacctcaggggatgtggaggggtctgcggggccctggccgcacaggatggccttcagggaaggtggtcttggggcatggtgcagagcaggtgaccggagggaatcggtgacggagcggggccaagggaggggtccggagggagtcagggatggagggcagagggagtggatgtgggggtttgaggacgtgtgacaagctccagcaggggtgggggccgggctgagggtgggggtgcgaggtggtcactcccatcgtgcccctggccgtccctccactcacccacacctggcccagtccacgttgaggtccaggactgggaaggaccgggtgagtgcaccggggacccaggccaggtgccccccggagcctgctggggtggccagagcaggagggggtgtgtttcctttttgtgggtgttgcatgcaaatcaagtggacaagaaaaaataacaaaacaaaaaacaagaaaaaaaaaacacaaaaccccgtaaaatcacaaagaaaatccaacaccaaaggcgcagaagccggctggccgtggtgggggcagcgtaggcgtagcatccctctcctctcacttagcctgttgactcttgttattatcatgatattcacaaaacgccgcatgtttaaaaagtcatagatgtcatcttctctctgcccccagggaggaaagccaccttctcttgccccttggcccctttgtcaggggccaggggtctgccgggtgggggtgccaacaggcctggccctttcctcccctgcatccagccatgggggcctctgcgattgccggaaggttgcatggctggtcccagggccagcacaggcccgaggccgggctgcctggttttatttttatttaactttattttctgttttatgagtgtgtgtccgcccacccccacccccttcagtgttaagtggggagccctgggggagtctctcctgcctcccagcctctcccaagacctcccccctcgtcaccagccatccctctggaccaggcagagggcggaccgggtgggcaggggcctgagggtggctcgggccagcccaccagccaatggacccctcctcaggccgccagtgtcgccctgcccctttttaaaacaaaatgccctcgtttgtaaacccttagacgcttgagaataaaccccttccttttcttcca

SEQ ID NO: 240484 - DNA, 1260 bp, Artificial Sequence
  derived and/or modified sequence
atggccgccagcagcctggagcagaagctgagccggctggaggccaagttgaagcaggagaaccgggaggccaggcgccggatagatctcaacctggacatctcaccccagcgtccccgtccaacgttacaacttcccctggctaatgatggaggttcaaggagcccctcctcagagtcttcaccacagcaccctacaccccccgctcggcctagacacatgctcggactgccttccacactcttcaccccaaggtcaatggagtccattgagattgatcaaaagctgcaggaaattatgaaacagaccgggtatctgaccatcgggggccagcgctaccaggctgagatcaatgatctagagaacctcggagaaatgggtagcggcacatgcgggcaggtttggaagatgaggtttagaaagaccgggcacgtcattgccgtgaaacaaatgcggagatcgggcaataaagaggagaacaagcggattctgatggacctggacgtggttctcaagagccatgactgcccctacatagtacagtgctttggtacattcatcaccaacaccgacgtgttcatcgctatggaactgatgggaacgtgtgccgagaaactcaaaaagcgaatgcagggaccaatccccgaaagaatactcggcaagatgacagtggcgatcgttaaagccttgtattacttgaaagaaaagcacggcgtgatacacagggacgttaaacctagtaatattctgcttgacgaaaggggacagattaagctttgcgattttggaattagtggacgtctggtggattctaaagcaaagacccggagtgccggatgcgcggcttatatggcaccagagcgcatagaccctcctgatcccacgaagccagattatgatatccgtgccgacgtctggtcactcggtattagtctcgtggagcttgctaccggccagtttccatacaaaaactgtaagaccgattttgaagtgctgaccaaggtgctgcaggaagaaccacccctgttacctggccacatgggattctccggggactttcagagctttgttaaggattgtcttactaaagaccaccggaagaggccgaaatacaacaaactgctcgagcacagtttcatcaaaagatacgagaccctggaagtggatgtagccagctggtttaaggacgttatggcgaagacggagtctccacgcactagtggtgtgctgtctcagcctcatctgccttttttccgctag

SEQ ID NO: 240485 - DNA, 1386 bp, Artificial Sequence
  derived and/or modified sequence
atggccgccagcagcctggagcagaagctgagccggctggaggccaagctgaaacaggaaaaccgcgaggctagacggagaatcgatctgaatctggatattagccctcagcgcccacgccctacactccaactcccactggccaacgacggagggtcgcgctctcctagctccgaaagttccccccagcatccaactcctccggcgagacccagacacatgttgggcctcccttccacactgtttacaccaaggtcaatggaatccattgaaatcgaccagaagctgcaggaaattatgaagcagacaggctacctcactatcggcggacaggtcccaccgtcactttggaggggcgaaggaggagggcccgcgagactggacccttcctgggagagacagtggggggctggcggtgggggccggcccgggacactgcagccttccctttcttcccaaagatatcaggccgaaattaatgatctggaaaatctgggcgagatggggtcgggcacatgcggccaagtgtggaagatgcggttccgcaagaccggccatgtcattgcagtgaaacagatgagaagaagcggaaataaagaagagaataagcgtatcctaatggacctcgacgtggtcctcaagagccacgattgcccctatatagttcagtgctttgggactttcatcacaaataccgatgtgtttatagctatggagctcatgggcacatgtgccgagaaactgaagaagaggatgcagggccctattccggagcggatcctgggaaaaatgaccgttgccattgtgaaggcgctttactacctcaaagagaagcacggcgttatacacagggacgttaagccttctaatatcctcttggatgagagggggcagattaaattatgtgacttcggcatctcaggaagacttgtggattctaaagcgaagactcggtccgctggctgtgccgcgtatatggccccagagcgaatcgacccacctgacccaaccaagccagactatgatatcagagccgacgtgtggtcactcgggatttcgttagttgaactggctacgggacaattcccctataaaaattgcaagaccgactttgaagtgttgacaaaggtcctgcaggaagagcctcctctgttacccgggcacatgggattctcgggcgactttcagagctttgtgaaagactgcctcacaaaggatcatcgtaagcgaccgaagtataacaagctgctggaacattcatttattaaaagatatgaaactcttgaagtcgatgttgctagttggttcaaagacgtgatggccaaaactgagtctcctcggacgtccggcgttctgtcacagccccacttgccattctttagatag

SEQ ID NO: 240486 - DNA, 1260 bp, Artificial Sequence
  derived and/or modified sequence
atggccgcaagttctcttgaacagaagctgtcccgccttgaggcaaaattaaaacaggagaacagagaagccagaagaaggatcgatcttaatctggacataagcccccaacgtcccagacctaccctgcagttaccgctggctaatgacggaggatcaagatcaccaagtagtgaatcatcaccccaacaccccaccccccctgcgaggccgagacacatgctagggcttcccagcacgttattcactccgcgttccatggaatctatcgaaatcgatcaaaaacttcaagagatcatgaagcagacgggatacctcacaattggaggccagagatatcaggccgaaatcaatgatctggagaacttgggtgaaatgggcagcggcacatgcgggcaagtgtggaaaatgaggttcagaaagacaggacacgtaatcgccgtaaaacaaatgcgtaggtctggcaataaagaggagaacaagcgaatcctgatggacctcgatgtggtgctaaagtcccacgactgtccttacattgtgcaatgttttggcacctttatcaccaataccgacgtgtttatagccatggaacttatgggaacttgtgccgaaaagttgaaaaaaagaatgcaagggccaatccctgagcgcatactggggaagatgactgtggcaatcgtcaaggccctttactacctgaaagaaaagcacggggtcatccatcgggatgttaagcccagtaacatactcctcgatgagcggggacaaattaaactgtgcgacttcgggatttctggtcgcctcgttgattccaaagctaagactaggtccgctgggtgtgccgcatatatggcaccagagcgcattgacccccctgatccaaccaagcctgactatgacattagggcagacgtctggtcactgggtatcagtctggtggagcttgctactgggcagttcccctataagaattgcaagaccgacttcgaagtgcttactaaagtcctacaggaggagccccctttgttgccaggtcatatggggttcagcggcgatttccagtcattcgtgaaggactgcttgacaaaggaccatcgcaagcgaccaaaatataacaagctgctggaacatagtttcattaaacggtacgagacgctggaggtcgatgtggcttcttggttcaaagatgtgatggccaagaccgaatctccacggacctccggcgtgttgtcacagccacatctgcctttctttagatag

SEQ ID NO: 240487 - DNA, 1386 bp, Artificial Sequence
  derived and/or modified sequence
atggccgcttcttctttagaacagaagctctccagactcgaggccaaactgaagcaggagaatagagaagcacggagacggatcgacctaaatctggacataagtccacagcgccctcggccaacactccagctgccacttgctaacgatggtggatccagaagcccaagcagcgaatcctcaccccagcatcccacgcccccagccaggcctcgacacatgctgggactgcccagcacattgttcacccccagatctatggagagcattgaaatcgaccaaaaactacaagaaattatgaaacaaaccgggtacctgaccatcgggggacaggtgccaccttcactctggcgtggagaagggggtggtccagcacgtctggatccctcatgggaacgacagtggggagccggaggcggaggaaggcccggaactctgcagccgtcgttgtcaagtcagagataccaggctgagataaatgatctggaaaatcttggcgagatgggatctggcacatgcgggcaggtctggaaaatgcggttccgtaaaaccggtcacgtcattgccgtcaagcaaatgcggaggagcggaaataaggaggaaaataagcgcatcctcatggacctcgatgtggttctcaagtctcacgattgtccttatatcgtccaatgctttgggacttttattacaaataccgatgtctttattgctatggagcttatgggtacctgcgccgaaaagctgaaaaagcggatgcaagggcctattccggagcggatacttggaaagatgacagttgccatcgtgaaggcactgtactacttaaaggagaaacatggtgtcattcaccgcgatgtgaagccttcgaacatactactggacgaacgaggccagatcaaactctgtgatttcggcatctcaggaagactagtcgactcgaaggccaaaacacgcagtgcaggatgcgctgcctacatggccccagagcgaattgacccccctgaccctacgaaacccgactatgacatccgtgccgacgtgtggtccctcggaatcagtctagtggaactggccacgggacagtttccctacaaaaattgcaaaaccgattttgaggtcctcacaaaggtgttgcaggaggaaccacctttactgcccggtcatatggggttttccggggactttcagtccttcgtaaaggattgtctcaccaaggatcatcggaagcggcctaaatataacaaactccttgagcactcgttcattaaaagatacgagactttagaagtggacgtggcgtcctggttcaaagacgtaatggccaagaccgagtcaccccgtacctcaggtgtgctgtcgcagccacatctccccttctttaggtag

SEQ ID NO: 240488 - DNA, 3497 bp, Artificial Sequence
  derived and/or modified sequence
gcggtgtttgtctgccggactgacgggcggccgggcggtgcgcggcggcggtggcggcggggaagatggcggcgtcctccctggaacagaagctgtcccgcctggaagcaaagctgaagcaggagaaccgggaggcccggcggaggatcgacctcaacctggatatcagcccccagcggcccaggcccaccctgcagctcccgctggccaacgatgggggcagccgctcgccatcctcagagagctccccgcagcaccccacgccccccgcccggccccgccacatgctggggctcccgtcaaccctgttcacaccccgcagcatggagagcattgagattgaccagaagctgcaggagatcatgaagcagacgggctacctgaccatcgggggccaggtaccaccttcactgtggcggggagagggaggaggcccagccaggctggacccatcctgggagcgccagtggggggcagggggcggtggcagaccagggaccctccaaccctccctctcctcccagcgctaccaggcagaaatcaacgacctggagaacttgggcgagatgggcagcggcacctgcggccaggtgtggaagatgcgcttccggaagaccggccacgtcattgccgttaagcaaatgcggcgctccgggaacaaggaggagaacaagcgcatcctcatggacctggatgtggtgctgaagagccacgactgcccctacatcgtgcagtgctttgggacgttcatcaccaacacggacgtcttcatcgccatggagctcatgggcacctgcgctgagaagctcaagaagcggatgcagggccccatccccgagcgcattctgggcaagatgacagtggcgattgtgaaggcgctgtactacctgaaggagaagcacggtgtcatccaccgcgacgtcaagccctccaacatcctgctggacgagcggggccagatcaagctctgcgacttcggcatcagcggccgcctggtggactccaaagccaagacgcggagcgccggctgtgccgcctacatggcacccgagcgcattgaccccccagaccccaccaagccggactatgacatccgggccgacgtatggagcctgggcatctcgttggtggagctggcaacaggacagtttccctacaagaactgcaagacggactttgaggtcctcaccaaagtcctacaggaagagcccccgcttctgcccggacacatgggcttctcgggggacttccagtccttcgtcaaagactgccttactaaagatcacaggaagagaccaaagtataataagctacttgaacacagcttcatcaagcgctacgagacgctggaggtggacgtggcgtcctggttcaaggatgtcatggcgaagactgagtcaccgcggactagcggcgtcctgagccagccccacctgcccttcttcaggtagctgcttggcggcggccagccccacagggggccaggggcatggccacaggcccccctccccacttggccacccagctgcctgccaggggagacctgggacctggacggccacctaggactgaggacagagagtggggggtgcccacccaccccccccgccccgggcctaccaagcccccgcccttcccaccccggggtcagccggccgtgtgcgtcccccgacagacactgtgaacggaagacagcaggccgcgatcagagtcgctgttcattcagccgcagcctctgggccggggcggcccccaggggccaggagagagccctggagtcccgcagccaccatgcacgctcccagcgtgctgtgtccttcgccactcccacgcgcccgttcctcttccgtcgccctctgtcccctgctctacctctctgtccttgtctggctctcccgtcaccctccctgcctctgtctctcttctggcctgagcctgggcccagccacctcctgacgggtcccctgggtctgcataggtctcccatggcgcaatgagtcagtggcccccagccaggcagtgtgggcattgccactgcggctggacggggctgcgcgctcgcgctctctctctctctctctctctctctttgatctcagggggtcctttttggagtttattgtattttattgtacttggtggggtgtttggggtgggggcggaggagagcttgttctcgtggggttgtcggtaccttcagaaacttttaccaaagtcacgattagctgcttgtggtggggccccaaccgccctcgggcactggggagctgggctggggctgctgctctggggtctccgggggccacagcttggggtgagttgaagacctcaggggatgtggaggggtctgcggggccctggccgcacaggatggccttcagggaaggtggtcttggggcatggtgcagagcaggtgaccggagggaatcggtgacggagcggggccaagggaggggtccggagggagtcagggatggagggcagagggagtggatgtgggggtttgaggacgtgtgacaagctccagcaggggtgggggccgggctgagggtgggggtgcgaggtggtcactcccatcgtgcccctggccgtccctccactcacccacacctggcccagtccacgttgaggtccaggactgggaaggaccgggtgagtgcaccggggacccaggccaggtgccccccggagcctgctggggtggccagagcaggagggggtgtgtttcctttttgtgggtgttgcatgcaaatcaagtggacaagaaaaaataacaaaacaaaaaacaagaaaaaaaaaacacaaaaccccgtaaaatcacaaagaaaatccaacaccaaaggcgcagaagccggctggccgtggtgggggcagcgtaggcgtagcatccctctcctctcacttagcctgttgactcttgttattatcatgatattcacaaaacgccgcatgtttaaaaagtcatagatgtcatcttctctctgcccccagggaggaaagccaccttctcttgccccttggcccctttgtcaggggccaggggtctgccgggtgggggtgccaacaggcctggccctttcctcccctgcatccagccatgggggcctctgcgattgccggaaggttgcatggctggtcccagggccagcacaggcccgaggccgggctgcctggttttatttttatttaactttattttctgttttatgagtgtgtgtccgcccacccccacccccttcagtgttaagtggggagccctgggggagtctctcctgcctcccagcctctcccaagacctcccccctcgtcaccagccatccctctggaccaggcagagggcggaccgggtgggcaggggcctgagggtggctcgggccagcccaccagccaatggacccctcctcaggccgccagtgtcgccctgcccctttttaaaacaaaatgccctcgtttgtaaacccttagacgcttgagaataaaccccttccttttcttcc

SEQ ID NO: 240489 - protein, 1344 aa, Artificial Sequence
  derived and/or modified sequence
MTRKRTYWVPNSSGGLVNRGIDIGDDMVSGLIYKTYTLQDGPWSQQERNPEAPGRAAVPPWGKYDAALRTMIPFRPKPRFPAPQPLDNAGLFSYLTVSWLTPLMIQSLRSRLDENTIPPLSVHDASDKNVQRLHRLWEEEVSRRGIEKASVLLVMLRFQRTRLIFDALLGICFCIASVLGPILIIPKILEYSEEQLGNVVHGVGLCFALFLSECVKSLSFSSSWIINQRTAIRFRAAVSSFAFEKLIQFKSVIHITSGEAISFFTGDVNYLFEGVCYGPLVLITCASLVICSISSYFIIGYTAFIAILCYLLVFPLAVFMTRMAVKAQHHTSEVSDQRIRVTSEVLTCIKLIKMYTWEKPFAKIIEDLRRKERKLLEKCGLVQSLTSITLFIIPTVATAVWVLIHTSLKLKLTASMAFSMLASLNLLRLSVFFVPIAVKGLTNSKSAVMRFKKFFLQESPVFYVQTLQDPSKALVFEEATLSWQQTCPGIVNGALELERNGHASEGMTRPRDALGPEEEGNSLGPELHKINLVVSKGMMLGVCGNTGSGKSSLLSAILEEMHLLEGSVGVQGSLAYVPQQAWIVSGNIRENILMGGAYDKARYLQVLHCCSLNRDLELLPFGDMTEIGERGLNLSGGQKQRISLARAVYSDRQIYLLDDPLSAVDAHVGKHIFEECIKKTLRGKTVVLVTHQLQYLEFCGQIILLENGKICENGTHSELMQKKGKYAQLIQKMHKEATSDMLQDTAKIAEKPKVESQALATSLEESLNGNAVPEHQLTQEEEMEEGSLSWRVYHHYIQAAGGYMVSCIIFFFVVLIVFLTIFSFWWLSYWLEQGSGTNSSRESNGTMADLGNIADNPQLSFYQLVYGLNALLLICVGVCSSGIFTKVTRKASTALHNKLFNKVFRCPMSFFDTIPIGRLLNCFAGDLEQLDQLLPIFSEQFLVLSLMVIAVLLIVSVLSPYILLMGAIIMVICFIYYMMFKKAIGVFKRLENYSRSPLFSHILNSLQGLSSIHVYGKTEDFISQFKRLTDAQNNYLLLFLSSTRWMALRLEIMTNLVTLAVALFVAFGISSTPYSFKVMAVNIVLQLASSFQATARIGLETEAQFTAVERILQYMKMCVSEAPLHMEGTSCPQGWPQHGEIIFQDYHMKYRDNTPTVLHGINLTIRGHEVVGIVGRTGSGKSSLGMALFRLVEPMAGRILIDGVDICSIGLEDLRSKLSVIPQDPVLLSGTIRFNLDPFDRHTDQQIWDALERTFLTKAIILIDEATASIDMETDTLIQRTIREAFQGCTVLVIAHRVTTVLNCDHILVMGNGKVVEFDRPEVLRKKPGSLFAALMATATSSLR

SEQ ID NO: 240490 - protein, 755 aa, Artificial Sequence
  derived and/or modified sequence
MTRKRTYWVPNSSGGLVNRGIDIGDDMVSGLIYKTYTLQDGPWSQQERNPEAPGRAAVPPWGKYDAALRTMIPFRPKPRFPAPQPLDNAGLFSYLTVSWLTPLMIQSLRSRLDENTIPPLSVHDASDKNVQRLHRLWEEEVSRRGIEKASVLLVMLRFQRTRLIFDALLGICFCIASVLGPILIIPKILEYSEEQLGNVVHGVGLCFALFLSECVKSLSFSSSWIINQRTAIRFRAAVSSFAFEKLIQFKSVIHITSGEAISFFTGDVNYLFEGVCYGPLVLITCASLVICSISSYFIIGYTAFIAILCYLLVFPLAVFMTRMAVKAQHHTSEVSDQRIRVTSEVLTCIKLIKMYTWEKPFAKIIEDLRRKERKLLEKCGLVQSLTSITLFIIPTVATAVWVLIHTSLKLKLTASMAFSMLASLNLLRLSVFFVPIAVKGLTNSKSAVMRFKKFFLQESPVFYVQTLQDPSKALVFEEATLSWQQTCPGIVNGALELERNGHASEGMTRPRDALGPEEEGNSLGPELHKINLVVSKGMMLGVCGNTGSGKSSLLSAILEEMHLLEGSVGVQGSLAYVPQQAWIVSGNIRENILMGGAYDKARYLQVLHCCSLNRDLELLPFGDMTEIGERGLNLSGGQKQRISLARAVYSDRQIYLLDDPLSAVDAHVGKHIFEECIKKTLRGKTVVLVTHQLQYLEFCGQIILLENGKICENGTHSELMQKKGKYAQLIQKMHKEATSCRSISSHRRRRWKKAP

SEQ ID NO: 240491 - DNA, 4035 bp, Artificial Sequence
  derived and/or modified sequence
atgacaagaaagcggacatattgggtgccaaattccagcgggggacttgtcaatcggggcattgacattggcgatgatatggtcagcgggttgatctacaaaacatatacactgcaagatggaccttggtcccagcaggagcgaaatcccgaagccccaggtagagccgccgtgcctccttggggaaaatatgacgctgcactacgaaccatgattccattcaggcccaaaccacggtttcctgccccacagcccctggacaatgcaggcctcttctcatacctgacagtgagttggttaacgccactgatgatccagtcgttgcgctcccggcttgacgaaaacactatcccccctctgtccgttcacgatgcctctgacaagaacgtgcagaggttacatagactgtgggaggaggaggtgtctagacgcggtatcgagaaggcctcggttttgctcgtgatgctgaggtttcagcggactcgcctcatctttgatgccctgctaggcatttgcttctgtatcgctagcgttctaggacccatattgatcattccaaaaatcttagagtattccgaggagcagcttggtaatgtggtccatggggtcggcctttgctttgcacttttcctgtcggaatgcgttaagtccctgtctttttcctcatcctggataatcaaccaacgcactgcaatccgcttccgtgccgctgtcagctcttttgcctttgaaaaactgattcagtttaaatcggtgatccatataacaagcggagaagctattagcttctttacaggggacgtcaactacctctttgaaggtgtctgttacggtcctctggtcctcatcacttgcgcctccctagtgatctgttcgatcagtagttatttcattattggctacacagcctttattgcgatcctgtgctatctacttgtattcccccttgcagtcttcatgacccgcatggcagtgaaggctcagcaccacacttccgaggtctccgaccagaggataagggtaaccagtgaggtcctgacttgcatcaagttgatcaagatgtatacttgggagaaaccatttgccaagattatagaggacttgcgtcggaaagagcgcaaactgctggagaagtgtggactggtgcagtcattaacatctatcactctgttcatcatcccaaccgtagccaccgctgtgtgggttctgatccatacatccctgaagttaaagctcaccgctagtatggcttttagtatgcttgcgagccttaacctgctgaggttgagcgtgttcttcgtgccgatagccgtaaaaggactaactaactccaagtctgcagttatgaggttcaagaagtttttcctgcaggaaagtccagtgttctatgtccaaaccttgcaggatccctctaaggctttggtcttcgaagaagcaacactctcatggcaacagacatgccccgggattgttaacggcgccctcgaactggaacgcaacggtcatgcaagcgagggcatgacacgaccgagggatgctctaggaccagaggaggaaggcaattcgttgggccccgagttgcataaaatcaatctagtcgtaagcaaaggcatgatgctgggcgtgtgtggaaacactggaagtgggaagtccagtcttttgtcggccattctagaggagatgcatctgcttgagggtagtgtgggggtgcagggctccttggcctatgtgccgcagcaggcctggatcgtctcagggaacataagggaaaacattctaatgggaggcgcctacgataaagcccgatacctccaagttctccactgttgcagtctgaaccgcgacctcgagctattaccctttggggacatgacggagattggtgaaagaggcctgaacctgagtggggggcaaaagcagcggattagtctggcccgagctgtctactccgatcgacagatttatttgctggacgaccccctgagcgctgtggacgctcacgtggggaagcacatttttgaagagtgtataaaaaaaacgttgcggggcaagaccgtcgtcctggtgacacaccaacttcagtatttggaattctgcggccaaatcatcctgctggaaaacggcaagatctgcgagaatggcacccacagtgaattgatgcagaagaaagggaagtatgcacagcttattcaaaaaatgcataaggaagctacgtctgacatgctgcaggataccgccaaaatcgcggagaagcctaaagtcgagtcacaggcgctcgctacctccctggaggaatccttaaatgggaatgctgtccccgagcaccagttgacgcaagaagaagagatggaagaaggcagcctgagctggcgcgtgtaccaccattacatccaggcggctggcggctacatggtgagttgcattatttttttctttgtcgttttaatagtcttcctcactattttctcattttggtggcttagctattggcttgaacagggttcgggaacaaacagctcccgggaaagcaatggaaccatggcagatcttgggaacatagccgataaccctcaactttctttttaccaacttgtgtacggcttaaacgctcttctgctgatctgtgtcggagtatgctctagcggcattttcacaaaggtaacccggaaagcctctacagccctgcacaacaaattgttcaacaaggttttccgatgcccgatgtcgttcttcgacactattccaattggccggctcttgaactgctttgctggcgatctcgaacagttggaccaactgctgcctatcttcagtgagcagtttctggtgcttagtctgatggtcatagctgtgctgcttatcgtcagtgtactttctccatacatcttactgatgggcgccataatcatggttatatgctttatttattacatgatgttcaaaaaggccattggcgtctttaagcggcttgaaaactactcacggagccccctgttttctcacatcctcaattccctgcagggcctctccagcattcacgtctacggaaaaaccgaggactttatctcacaattcaagcggctcaccgatgcacagaacaattaccttctgttgttcttaagcagtacccggtggatggccctcagactggagatcatgacaaatctggtgactttggccgttgccttatttgtggctttcgggatctcttcgacaccctattcgtttaaggtcatggctgttaacatcgtgcttcaactggcctcttctttccaggcaaccgcacggatcggactggaaactgaagcacagttcacagccgtcgagcgtatccttcagtacatgaaaatgtgtgtgagcgaggccccactacatatggagggcacctcgtgtcctcagggctggcctcagcacggcgagataatatttcaggattatcacatgaaatatcgggacaacactccaaccgtgctgcacgggatcaacttgacaatcagagggcacgaagtcgtaggtatcgttgggcgcaccgggagcggcaagtcttcgctgggcatggccctttttcgcctcgtcgaacccatggccggccgtatcctgatcgacggggttgatatctgctcgataggtctggaagacctcagatctaagctcagcgtcattccccaagacccggtactgttgtctggtacaatccgctttaatttagatccgttcgataggcacaccgatcaacaaatctgggacgccctggaacgaacctttttgacgaaagccattatcttgatcgacgaagccaccgctagtatagatatggagaccgacaccctcatccagcggactatcagggaggccttccagggatgcacagtcctcgtcatcgcgcatagggttactaccgtgcttaattgcgaccacattctcgtcatgggtaatggcaaagttgtcgagttcgacaggccagaggtgctgcgaaaaaaaccaggctccttatttgcagctcttatggctactgctacctcgtcactgcgatag

SEQ ID NO: 240492 - DNA, 2268 bp, Artificial Sequence
  derived and/or modified sequence
atgactaggaaacgaacctactgggttcccaattccagcggggggcttgtgaatagggggattgatatcggggacgacatggtgagcgggctgatctataaaacatacaccctccaggatgggccgtggagtcagcaagaaagaaaccccgaagctcctggcagagccgctgttcccccatgggggaaatacgacgctgccctgcgtacgatgattcctttccgacccaagcccagattcccagctccgcaaccgcttgacaatgccgggctgttctcttacctgacggtctcctggttaaccccgctgatgatccagagtctccgcagtagattggatgagaataccatccccccattgtccgtgcacgatgcttccgacaaaaatgttcagcggttgcaccggttgtgggaagaggaggttagccgcagaggcattgagaaggcctcagtgctgctcgtgatgctgcgctttcaaaggaccaggttgatcttcgacgcgctcttaggaatttgcttctgcatcgcgagcgtgctcggacctatacttataatcccaaaaatcctggaatacagtgaggagcagctgggcaatgtggtccatggagtcggcctctgcttcgctctcttcctgtcagaatgtgtcaaatctctgtcattctcgtcttcatggattataaaccaaaggacagccattcgattcagggctgccgtgagctcatttgcatttgaaaagttgatccagttcaaatctgtgatccacatcacaagcggggaagctatttcattttttaccggtgacgttaattatctgttcgagggggtatgctacggacctctggtgctcatcacctgcgcatccttagtgatctgctccatctcatcatattttattatcggatacactgcattcatcgcgatcctttgttacctattggtttttcctctcgccgtcttcatgaccagaatggctgtcaaggcccaacaccacacaagcgaagtgtcagatcagaggattagagtcactagcgaggtcttaacctgcatcaagcttatcaagatgtatacttgggaaaagccattcgcgaagattattgaagatctgagacgaaaagagagaaagctacttgaaaagtgtgggttggtgcagagtcttacttccatcaccctcttcattatccccacagttgcgacagcagtgtgggtcctgattcatacgagtctgaagctgaagcttaccgcctcaatggcattttccatgctggcgagcctgaacctgctgcggctgtcagtcttcttcgtgcccatagctgtgaaaggcctcactaattctaaatccgcagtgatgcggttcaagaagttctttctccaggagtccccagttttctatgtacagacattgcaggatccgtccaaggctctggtgtttgaggaagctacgttgagctggcaacagacttgcccaggcattgtcaatggagcgctcgagctcgagcggaatggacacgcttctgaaggaatgacacgcccgcgtgatgcgctggggcccgaggaggagggtaattctcttgggcctgagctgcacaaaatcaacctggtggtctctaaggggatgatgctgggcgtgtgcggtaacaccggaagcggcaagtcatcacttctctcagcaatcctcgaggagatgcacctgcttgagggtagcgtgggggtccagggttccttagcttatgtgccccagcaggcctggatcgtatctggtaacattagggagaatatcctaatgggaggggcttacgacaaagcaaggtacttgcaggtgttgcactgttgtagcctgaaccgagacctcgagctgctccccttcggcgacatgactgagattggtgaaagaggacttaatctatccggcggccagaaacaacggatttcccttgcaagagccgtgtactctgaccgccagatttacctgttggacgaccccctttccgccgtggacgcccatgttgggaaacatatttttgaagaatgcatcaagaaaacgctgcgtggtaagacagttgttctagtcacccaccagcttcagtacttggaattctgcgggcagatcatcctactcgagaatgggaagatttgcgaaaacggaactcactccgaactgatgcagaagaaggggaaatatgcccagttaatacagaaaatgcataaagaggctacttcatgtaggtccatctcctcccacaggaggcgcaggtggaagaaggcgccctag

SEQ ID NO: 240493 - DNA, 4035 bp, Artificial Sequence
  derived and/or modified sequence
atgaccaggaagaggacctactgggtgcccaacagcagcggcggcctggtgaacagaggaattgatattggagatgacatggtgtctggcctcatctacaagacctacaccctgcaggacggcccctggagccagcaggagaggaaccctgaggcccctggccgggctgctgtgcccccctggggcaagtatgatgctgccctgcggaccatgatccccttccggcccaagccccgcttccctgccccccagcccctggacaatgccggcctcttctcctacctgactgtgtcctggctgacccccctgatgatccagagcctgcggagccggctggatgagaacaccatcccccccctgtctgtgcatgatgccagtgacaagaatgtgcagaggctgcaccggctgtgggaggaggaggtgtccagaagaggcatcgagaaggcctctgtgctgctggtgatgctgcgcttccagaggaccaggctcatctttgatgccctgctgggcatctgcttctgcatcgcctctgtgctgggccccatcctgatcatccccaagatcctggagtacagcgaggagcagctgggcaatgtggtgcatggagtgggcctgtgctttgccctcttcctgtctgaatgtgtgaagagcctgtccttcagcagctcctggatcatcaaccagaggacagccatccgcttccgggctgctgtgagcagctttgcctttgagaagctgatccagttcaagagcgtcatccacatcaccagcggggaggccatctccttcttcaccggagatgtgaactacctgtttgagggcgtgtgctacggccccctggtgctgatcacctgtgccagcctggtgatctgcagcatcagcagctacttcatcatcggctacacagccttcatcgccatcctgtgctacctgctggtgttccccctggccgtgttcatgaccaggatggctgtgaaggcccagcaccacaccagcgaggtgtctgaccagaggatccgggtgaccagcgaggtgctgacctgcatcaagctgatcaagatgtacacctgggagaagccctttgccaagatcatcgaggacctgcggaggaaggagaggaagctgctggagaagtgtggcctggtgcagagcctgaccagcatcaccctcttcatcatccccaccgtggccacagctgtgtgggtgctgatccacaccagcctgaagctgaagctgacagcctccatggccttctccatgctggccagcctgaacctgctgcggctgagcgtcttctttgtgcccatcgctgtgaagggcctgaccaacagcaagtctgctgtgatgaggttcaagaagttcttcctgcaggagagccctgtgttctacgtgcagaccctgcaggaccccagcaaggccctggtgtttgaggaggccaccctgtcctggcagcagacctgccccggcatcgtgaatggagccctggagctggagagaaatggccacgccagcgagggcatgacccggcccagagatgccctgggccctgaggaggagggcaacagcctgggccctgagctgcacaagatcaacctggtggtgtccaagggcatgatgctgggcgtgtgtggcaacacaggcagcggcaagagcagcctgctgagcgccatcctggaggagatgcacctgctggagggctctgtgggcgtgcagggcagcctggcctacgtgccccagcaggcctggatcgtgtctggcaacatccgggagaacatcctgatgggcggggcctatgacaaggcccgctacctgcaggtgctgcactgctgcagcctgaacagagacctggagctgctgccctttggagacatgacagaaattggagagcggggcctgaacctgagcggcggccagaagcagaggatcagcctggcccgggctgtgtacagcgaccggcagatctacctgctggatgaccccctgtctgctgtggatgcccacgtgggcaagcacatctttgaggagtgcatcaagaagaccctgcggggcaagacagtggtgctggtgacccaccagctgcagtacctggagttctgtggccagatcatcctgctggagaatggcaagatctgtgaaaatggcacccacagcgagctgatgcagaagaagggcaagtatgcccagctgatccagaagatgcacaaggaggccaccagtgacatgctgcaggacacagccaagattgctgagaagcccaaggtggagagccaggccctggccaccagcctggaggagagcctgaatggaaatgctgtgcctgagcaccagctgacccaggaggaggagatggaggagggcagcctgtcctggagggtgtaccaccactacatccaggccgccggcggctacatggtgtcctgcatcatcttcttctttgtggtgctgattgtgttcctgaccatcttctccttctggtggctgagctactggctggagcagggcagcggcaccaacagcagccgggagagcaatggcaccatggctgacctgggcaacattgctgacaacccccagctgtccttctaccagctggtgtatggcctgaatgccctgctgctgatctgtgtgggcgtgtgcagcagcggcatcttcaccaaggtgaccaggaaggccagcacagccctgcacaacaagctgttcaacaaggtgttccgctgccccatgtccttctttgacaccatccccatcggccgcctgctgaactgctttgctggggacctggagcagctggaccagctgctgcccatcttcagcgagcagttcctggtgctgagcctgatggtgattgctgtgctgctgattgtgtctgtgctgagcccctacatcctgctgatgggcgccatcatcatggtgatctgcttcatctactacatgatgttcaagaaggccatcggggtcttcaagaggctggagaactacagccgcagccccctcttcagccacatcctgaacagcctgcagggcctgagcagcatccacgtgtatggcaagacagaggacttcatcagccagttcaagaggctgacagatgcccagaacaactacctgctgctcttcctgagcagcacccgctggatggccctgcggctggagatcatgaccaacctggtgaccctggccgtggccctgtttgtggccttcggcatcagcagcaccccctacagcttcaaggtgatggctgtgaacatcgtgctgcagctggccagcagcttccaggccacagccagaattggcctggagacagaggcccagttcaccgctgtggagcgcatcctgcagtacatgaagatgtgtgtgtctgaggcccccctgcacatggagggcaccagctgcccccagggctggccccagcacggggagatcatcttccaggactaccacatgaagtacagagacaacacccccaccgtgctgcacggcatcaacctgaccatccggggccacgaggtggtgggcatcgtgggccgcactggaagtggcaagagcagcctgggcatggccctcttccggctggtggagcccatggccggccgcatcctgattgatggagtggacatctgcagcatcggcctggaggacctgcggagcaagctgagcgtcatcccccaggaccctgtgctgctgagcggcaccatccgcttcaacctggacccctttgacagacacacagaccagcagatctgggatgccctggagaggaccttcctgaccaaggccatcatcctgattgatgaggccacagccagcattgacatggagacagacaccctcatccagaggaccatccgggaggccttccagggctgcaccgtgctggtgattgcccaccgggtgaccaccgtgctgaactgtgaccacatcctggtgatgggaaatggcaaggtggtggagtttgacaggcctgaggtgctgaggaagaagccaggcagcctgtttgctgccctgatggccacagccaccagcagcctgaggtag

SEQ ID NO: 240494 - DNA, 2268 bp, Artificial Sequence
  derived and/or modified sequence
atgaccaggaagaggacctactgggtgcccaacagcagcggcggcctggtgaacagaggaattgatattggagatgacatggtgtctggcctcatctacaagacctacaccctgcaggacggcccctggagccagcaggagaggaaccctgaggcccctggccgggctgctgtgcccccctggggcaagtatgatgctgccctgcggaccatgatccccttccggcccaagccccgcttccctgccccccagcccctggacaatgccggcctcttctcctacctgactgtgtcctggctgacccccctgatgatccagagcctgcggagccggctggatgagaacaccatcccccccctgtctgtgcatgatgccagtgacaagaatgtgcagaggctgcaccggctgtgggaggaggaggtgtccagaagaggcatcgagaaggcctctgtgctgctggtgatgctgcgcttccagaggaccaggctcatctttgatgccctgctgggcatctgcttctgcatcgcctctgtgctgggccccatcctgatcatccccaagatcctggagtacagcgaggagcagctgggcaatgtggtgcatggagtgggcctgtgctttgccctcttcctgtctgaatgtgtgaagagcctgtccttcagcagctcctggatcatcaaccagaggacagccatccgcttccgggctgctgtgagcagctttgcctttgagaagctgatccagttcaagagcgtcatccacatcaccagcggggaggccatctccttcttcaccggagatgtgaactacctgtttgagggcgtgtgctacggccccctggtgctgatcacctgtgccagcctggtgatctgcagcatcagcagctacttcatcatcggctacacagccttcatcgccatcctgtgctacctgctggtgttccccctggccgtgttcatgaccaggatggctgtgaaggcccagcaccacaccagcgaggtgtctgaccagaggatccgggtgaccagcgaggtgctgacctgcatcaagctgatcaagatgtacacctgggagaagccctttgccaagatcatcgaggacctgcggaggaaggagaggaagctgctggagaagtgtggcctggtgcagagcctgaccagcatcaccctcttcatcatccccaccgtggccacagctgtgtgggtgctgatccacaccagcctgaagctgaagctgacagcctccatggccttctccatgctggccagcctgaacctgctgcggctgagcgtcttctttgtgcccatcgctgtgaagggcctgaccaacagcaagtctgctgtgatgaggttcaagaagttcttcctgcaggagagccctgtgttctacgtgcagaccctgcaggaccccagcaaggccctggtgtttgaggaggccaccctgtcctggcagcagacctgccccggcatcgtgaatggagccctggagctggagagaaatggccacgccagcgagggcatgacccggcccagagatgccctgggccctgaggaggagggcaacagcctgggccctgagctgcacaagatcaacctggtggtgtccaagggcatgatgctgggcgtgtgtggcaacacaggcagcggcaagagcagcctgctgagcgccatcctggaggagatgcacctgctggagggctctgtgggcgtgcagggcagcctggcctacgtgccccagcaggcctggatcgtgtctggcaacatccgggagaacatcctgatgggcggggcctatgacaaggcccgctacctgcaggtgctgcactgctgcagcctgaacagagacctggagctgctgccctttggagacatgacagaaattggagagcggggcctgaacctgagcggcggccagaagcagaggatcagcctggcccgggctgtgtacagcgaccggcagatctacctgctggatgaccccctgtctgctgtggatgcccacgtgggcaagcacatctttgaggagtgcatcaagaagaccctgcggggcaagacagtggtgctggtgacccaccagctgcagtacctggagttctgtggccagatcatcctgctggagaatggcaagatctgtgaaaatggcacccacagcgagctgatgcagaagaagggcaagtatgcccagctgatccagaagatgcacaaggaggccaccagctgccgcagcatcagcagccacagaagaagacgctggaagaaggccccctag

SEQ ID NO: 240495 - DNA, 4035 bp, Artificial Sequence
  derived and/or modified sequence
atgacccggaagcggacctactgggtgcccaacagcagcggcggcttagtcaacagaggaatcgacatcggggatgacatggtgagcggactcatctacaaaacatacaccctgcaggacggcccttggagccaacaggaaaggaacccagaggctccaggccgagccgccgtaccaccgtggggcaaatatgacgcagcactgcgaaccatgatcccatttcggcccaaacctagatttccagccccccagcccctggacaacgcgggtctgttcagctacctgactgtttcctggcttacccctctgatgatccaatccctgaggagcaggttggacgagaatacaataccaccactttcagtgcatgacgcatccgacaagaacgtgcagagactgcaccggctgtgggaggaggaagtaagccggcgcggaattgaaaaggctagtgtgctgctcgtgatgctcagattccagcgcactagacttatttttgatgccctgctggggatctgtttttgtatcgcttctgtcctcggtcccatacttattattcccaagattctcgagtattccgaggagcaactgggaaatgttgttcacggggtgggcctgtgctttgcactgttcctttctgagtgtgtgaagagtttgtctttttcctccagttggataatcaatcagcgcacggctatcagatttcgggccgctgtgtcgtcgttcgctttcgagaagcttattcagtttaagtctgtcattcacataacaagcggtgaggccatcagtttctttaccggcgacgtgaactacctgttcgaaggggtctgttatgggcctcttgttctcatcacgtgtgccagcctggtcatctgtagcatatctagctactttattattgggtatacagctttcattgctatcctctgctatctgctggtgtttccccttgctgtattcatgaccaggatggcagtgaaggcacagcatcacacaagtgaggtgagcgaccagcgtattcgggtcacttctgaagtgcttacgtgcattaagctgatcaaaatgtacacctgggagaagccatttgccaagatcattgaggatctccgacgaaaagagcggaagctcctggagaagtgtgggctcgtgcagtctctcacgagcatcacactattcatcattcctactgtcgcgacagctgtttgggtcctgatccatactagcttgaagctgaaactgaccgcgtcaatggcttttagcatgctggcgagcctcaatcttctgcgcttaagcgtcttttttgtccccatcgccgtgaagggactgactaattctaagagcgccgtgatgcggttcaagaaattttttcttcaagaaagtcccgtgttctacgtgcaaactttacaggatccttcaaaggctctagtattcgaagaagcaactctcagctggcagcaaacttgccctgggatcgttaacggagcacttgaactagagaggaatgggcacgcttccgagggaatgactcggcctagggacgcactcggcccagaggaggagggaaatagcctgggacctgaactccataagatcaatctggtggtgtctaagggcatgatgcttggggtttgcggtaacacaggatccgggaagtcaagtctcctgagtgccatcctagaggagatgcacctgcttgagggctccgtgggtgtgcagggatcgctggcatatgtgcctcagcaggcctggattgtgtcaggaaacattagagagaatatcctcatgggcggcgcctatgacaaggcccgctatctacaggtgttacactgttgctctctcaatagggatctcgagctcctgccgtttggagacatgacagagatcggcgaaagaggcctgaacctgtccggtggacagaagcagaggatatcactggcacgggccgtgtatagtgacagacagatttatctgctggacgatccattgtcggccgttgacgcccacgtgggtaaacacatattcgaagagtgcattaaaaagacgctgcgcgggaagaccgttgtgctagtgacacatcagctgcaatatctggaattttgcggtcagattatactcctcgagaatggcaagatatgtgaaaacggtacacacagtgagcttatgcaaaagaagggcaagtatgcccaattgattcagaagatgcacaaggaggcgaccagtgatatgctgcaagatactgccaagatcgcagagaagcccaaggtcgagtcacaagctttagccacaagtttggaggaaagcctcaatggcaacgccgttcctgaacatcaactcacacaggaggaagagatggaggagggctccctgtcttggcgagtctaccaccactatattcaggccgcaggagggtacatggtgtcttgtatcatattttttttcgtagttctcatcgtgttcctgacaatattttccttctggtggttgagctactggctggagcagggatccggaacaaattcctctagggaaagcaatgggactatggccgacctgggaaacatcgccgataatccacagctttccttttatcagctggtgtacggtctcaacgccctactgctgatctgcgtgggtgtttgctctagtggcatatttaccaaagttactcggaaagccagtactgccctccataacaagttatttaacaaggtgttcaggtgcccaatgagctttttcgacactattcctatcgggcgtctgctaaattgttttgcaggagacttggagcaattggaccaactgctgcctatatttagtgagcagttcctggtactgtcactcatggtcatcgcagtgctgctgattgtgtcagtgcttagcccgtatatcctcctaatgggtgcaatcatcatggtcatatgcttcatttactacatgatgtttaaaaaagcaatcggcgtttttaagagactcgagaattatagtagatctccactgttttcccacatccttaactcactgcaaggattgagctccattcatgtctacgggaagaccgaggattttataagtcagttcaaacggctcacagacgcgcaaaacaactatcttctcctcttcctgtcatcgacccgatggatggcactgcggctggagatcatgacaaatctggtcacactggcagtagccttgttcgtcgcattcggcatctcatccacgccatacagcttcaaagtcatggctgtgaacattgtgctgcaactggcatcatcttttcaggctaccgctagaattgggttggaaaccgaagcacagtttaccgctgtcgagaggattctccagtacatgaagatgtgtgtgtccgaagcccctctccacatggaaggaaccagttgtccccagggctggccccaacacggggagattatattccaggattaccatatgaaatacagagacaacaccccaacagtcttgcacgggatcaatcttactattagaggtcacgaggtcgtgggaatcgtggggagaacaggcagcggcaagtcttcactcggaatggctctgtttcgtttggtggagcctatggctgggcgcatactcattgacggcgtggacatctgctcgattggcctagaagaccttaggtccaagctgtccgtgatcccccaggaccccgtgttattgtccggcaccattcggttcaaccttgacccgttcgataggcacacggaccagcaaatctgggatgccctggagcgcacttttctcactaaggccattatcctcatcgatgaagcaactgcctcaatagacatggagacagataccctaattcagcgcacgatcagagaggcctttcagggctgcaccgtcctggttatcgctcatcgcgtgacaaccgtcctgaactgtgatcatatccttgtcatggggaatggcaaagtcgtggagttcgatcggcctgaagttctgcggaaaaagccaggaagcttgttcgccgccttaatggccaccgccacttctagtttgaggtag

SEQ ID NO: 240496 - DNA, 2268 bp, Artificial Sequence
  derived and/or modified sequence
atgacccggaagcggacctactgggtgcccaacagcagcggcggcctggtgaacagggggatcgatatcggggacgatatggtctcggggctgatttacaaaacatacacgctgcaagacggtccttggagtcagcaagagcgaaatcccgaggcacccgggagagccgccgtgccaccatggggcaagtatgacgctgccttgaggaccatgatccctttcaggcccaagccccgttttcccgcccctcagcccctggataatgccggattgttctcttatctgacagtctcatggctcacaccactgatgattcagagtctgcggtctcgcctcgacgagaatacaattcccccactgtccgtacatgatgcatccgacaagaacgtccagaggctccatagattgtgggaggaggaagtgagtagacgcggaattgagaaggccagcgtgctcttagttatgttaagattccagaggacaaggctgatttttgacgctctcctggggatctgcttttgtatcgcttccgttctgggccctatcctcatcatccctaagattctggagtattccgaagagcagctgggcaatgtcgttcatggggtgggactgtgctttgcccttttcctgagtgagtgtgtgaagagtctcagttttagttcctcctggatcatcaatcagcgcacagctattcgcttccgggctgccgttagctctttcgcatttgaaaagctaatccagtttaagagcgtgattcacatcaccagtggagaggccatcagctttttcactggagacgtcaactacctgtttgagggtgtgtgctacggcccactagtgctgattacctgtgcttctctcgtgatttgtagcattagctcctacttcattataggatatacagcttttatcgcaatactctgctacttgctagtctttcctctggccgtatttatgacgcggatggcggtgaaggcacagcaccataccagcgaagtgtccgaccagcgcattcgcgtgacttcggaggtcttgacgtgcatcaagctgatcaagatgtacacatgggagaagcccttcgccaaaatcatcgaggatctccgcagaaaggagaggaaactcctggagaaatgtgggttggtacaaagcttaacctccattactctgttcattatacctaccgtcgcaacagcagtgtgggtgcttattcacactagtctcaaacttaaactgaccgcttctatggccttcagtatgctggcctccttgaacctgctgcgcctgtcggttttctttgtgcccattgccgtgaagggcttaaccaacagcaagagtgctgtgatgcggttcaagaagttctttctgcaggagtcaccagtattctatgtacaaacactccaggatccatccaaagccctggtttttgaagaggccacacttagttggcagcagacatgccctggtatagtaaacggtgccctggagttggaaagaaatggacatgctagcgagggaatgactcgcccacgggatgcattggggcccgaggaagagggcaactctctggggcccgagctgcacaagattaacctcgttgtgtccaaaggcatgatgttgggagtctgcggaaacaccgggtccggaaagtcgagcctgctgtccgcgatactggaggagatgcaccttctggaaggaagtgtgggagtgcaaggctccttggcatacgtccctcaacaggcatggatcgtgtcaggcaacattcgggaaaacatactcatggggggcgcctatgacaaagcccgttatttgcaggtgcttcactgctgcagtctaaatagggatttggaattactgcctttcggggacatgacagagattggagaaagaggactaaacctgtctgggggtcaaaaacagcgcatttcactggccagggcagtctactctgacagacagatttatctactagatgacccgctgagcgccgtggacgctcatgttggcaagcacatttttgaggaatgcattaaaaaaacgctacggggaaaaacagtggtgctagttactcaccagttgcagtacctggaattttgtggacaaataattctcttagaaaacggcaaaatctgtgagaatggaactcacagtgaacttatgcagaagaaggggaaatatgctcagttgatacagaagatgcacaaggaggccactagttgtagatctatatcctcgcaccgacgccgccgctggaagaaagccccttag

SEQ ID NO: 240497 - DNA, 4035 bp, Artificial Sequence
  derived and/or modified sequence
atgaccaggaagagaacatactgggtgccaaatagttcgggtggactggtaaatagggggatagacatcggggatgatatggtctcagggcttatctacaagacttatacgctccaggatggcccttggtctcaacaggagagaaacccagaggcacctggaagagctgctgtgcctccttggggaaagtacgacgctgccctgcgcacgatgataccttttagaccaaagccgaggttcccagcccctcagccccttgataatgcaggcctgttcagctatctcaccgtctcctggcttaccccgctaatgattcaaagtttgcgctcaaggctggatgaaaatactataccccctctttccgtgcacgacgcaagcgacaagaacgtgcagaggttgcacaggctgtgggaggaggaggtgtcacgacgcggtatcgagaaggcttccgttctgctagtcatgctgaggttccaacgaacacggttgatcttcgatgctctcctgggtatttgtttttgtattgcgagcgtactgggcccaatcctcattataccaaagatcctcgaatactccgaggagcagctcggaaatgtggtccacggcgtgggactatgcttcgcattgtttcttagcgagtgtgtcaaaagcctttccttcagttcaagttggatcattaaccaacggaccgcaattagatttagagcagcggtgagcagttttgcatttgagaaacttattcaattcaagtcggtgatccatattacctcaggcgaggccatcagcttcttcacaggcgacgtgaattatttgttcgagggcgtttgttatggtccactcgtgcttattacatgtgcttcactcgtaatctgcagcatttcttcttacttcattattggctacacagctttcatcgccattttatgctacctgcttgtttttccactcgctgtgttcatgaccagaatggctgtgaaggcccagcaccacacatctgaggtctcagatcagcggattagggtgactagtgaggtgttaacatgtattaagctgatcaaaatgtacacctgggaaaagccatttgctaagatcatcgaagacctcaggcggaaagaaaggaaactgttagaaaaatgtggactcgtgcagagtctgacctctattacattgtttataattcccaccgtggcgacagctgtgtgggttttgatccatacttccctgaaactgaagctgactgcctcgatggcattttctatgctcgcgagcttaaatctgctacgcctgtcagtgttcttcgttcccatagccgtgaaggggctcacaaattccaagagcgccgtcatgagattcaagaagtttttcctccaggaatcgcccgtgttctatgtgcagaccctccaggatccatccaaggcgttagtgttcgaggaggcaactttgagctggcaacagacctgtccaggcatcgtcaatggagccctggagcttgagcgaaacggacatgcttccgagggcatgacaaggccacgagacgcactgggcccagaggaagaaggcaactcccttggtccggagttgcacaaaatcaacttggtggtcagtaagggcatgatgttaggggtgtgcgggaataccggctcagggaaatcatcgcttttaagcgctatactggaggaaatgcatctccttgagggttccgtgggagtgcagggaagcctggcatacgttcctcaacaggcatggatcgtcagtggcaatataagggaaaacatccttatggggggtgcttatgataaagctaggtatctccaggtcttacattgctgtagccttaacagagacctcgaattgctgccttttggcgatatgacagagatcggagagcggggtctcaatctctctggcggtcaaaagcaaaggatctctctagcgagggccgtctacagtgatcgacagatttatctacttgatgatcccctttccgctgttgacgctcacgtcggcaaacatatctttgaagaatgcatcaaaaagacattacgaggcaagacagtggtgctggtcacgcaccagctgcagtatctggaattttgtgggcagatcatcctgctggaaaacggtaagatctgtgagaacggcacacactcagaactcatgcagaagaaaggcaagtacgcacaactcatccagaaaatgcataaggaggccacaagtgatatgttacaagatacggcaaaaatcgccgagaagcctaaggtagagagccaggccttagccacgtcccttgaagaaagccttaacggcaatgctgttcctgaacatcagctgacccaggaggaggagatggaggaaggttctttaagctggcgtgtctatcaccattacatccaggcagccggaggctacatggtgtcctgcatcatcttctttttcgtggtgctcatagttttccttactatcttctctttctggtggctttcctactggctggagcaagggtctggaacgaattctagtcgtgagtccaatggaacaatggctgatttggggaacattgccgataacccacagctcagcttttatcagctcgtgtacgggctcaacgcgttactcttgatttgtgtcggagtctgttcttccgggatattcacaaaggtgactagaaaagcttcgaccgcactgcataataagttgtttaataaggtattccgttgtcctatgtctttcttcgacactatcccaatcggtcggttgctgaattgcttcgcgggagacctcgagcagttagaccagctgcttcctatctttagtgaacagttcctggttctgagtctgatggtcattgcagttctgctcatagtatccgtgctctcaccttatatactgttaatgggagccataatcatggtcatttgcttcatttactacatgatgttcaagaaagccattggggtgttcaaaagactggagaactactcacgctccccgctctttagccacatcctcaactcactccaaggcctcagctcaattcatgtatatgggaagactgaggacttcataagccaatttaaaaggctgactgacgcacagaacaattatctcctgctgtttctttcctcaaccaggtggatggccctccgcctggagataatgaccaacctcgtgacactggcagtagcattattcgttgccttcggtatcagctccaccccctatagctttaaagtgatggcagtaaacattgttctccaactggcatcctcatttcaggccaccgctaggatcggactggaaacggaagctcagtttacggctgtagagcggatactgcaatatatgaaaatgtgtgtgagcgaggcccctttacatatggaaggcacatcttgtccccagggctggccgcaacatggggagataattttccaggactaccatatgaagtatcgcgacaacactccaaccgtcttgcacggaatcaatctaaccattcgcggtcatgaggtcgtggggatcgtcggaagaacaggctctggaaaatcaagtttagggatggccttgtttcgcctggtagagcccatggctggaagaatcttgatcgatggggtggatatctgtagtatcggcctggaggatctcagatcaaagttgtcagttatacctcaggatcctgtgttgttgagtggcaccatcagattcaatcttgacccattcgacagacacacagaccagcagatttgggatgccctggagcgcacctttctgaccaaggccattattctcattgacgaagcaaccgcctctatagatatggagaccgacacccttatccaacgaactatcagagaggcgttccagggctgtaccgtgctggttatcgctcatagggtcaccactgtgttaaactgtgatcacattctagtgatgggtaacggcaaagttgtggaatttgataggcccgaagttctgcggaagaagcccggttctctgttcgcagccttgatggccacggccaccagctctctccggtag

SEQ ID NO: 240498 - DNA, 2268 bp, Artificial Sequence
  derived and/or modified sequence
atgacaaggaaacggacatactgggtcccgaactccagcggcggattagtgaatcgcggaattgacataggagatgacatggtgtcaggcctgatatacaagacgtataccctgcaggacgggccatggagtcagcaggagagaaatcctgaagccccaggaagggccgctgtgccaccatggggaaagtacgatgctgctttacgaacaatgatccccttcagacccaagccacgcttccctgccccacagccgctagataatgcaggcttgttttcctacctgactgtgtcatggctcacccctctcatgatccaatctttgcgatcccgactggacgaaaacaccattccgccactcagtgtgcacgatgcctctgacaagaatgtgcaaaggctgcaccggctgtgggaagaagaagtgtctcggagaggaatcgagaaggccagtgtgctcctggtgatgttgagatttcagcgaacacggctcattttcgatgcgctgttaggcatatgtttttgtatcgcatccgtacttgggcctattctcatcatccctaagatcctggagtatagcgaagaacagctcggaaacgtcgtgcacggagtcggcttgtgcttcgccttgttcttgagtgaatgtgtgaaatctctgagttttagctcctcgtggataatcaatcaacgaacagctatacgatttcgtgcagcggttagcagctttgcgttcgagaaacttattcagtttaaaagtgtgatccatatcacatccggggaagctatatctttcttcactggagacgtgaattatttattcgagggtgtttgctacggacccctggtattgatcacgtgcgcttccctcgtcatctgctcaatctccagctatttcatcataggctacacagcctttatcgccatactttgctatctgctggttttcccactggccgtgttcatgacacggatggccgtgaaggcgcagcaccatacttccgaggtctctgaccagcggattcgggtgacctcagaagttctcacctgcatcaagttgatcaagatgtacacctgggagaaaccttttgccaagatcattgaggaccttcggagaaaggaacgcaaactgctggaaaagtgcggccttgtccaatctctgacgtctatcaccctgttcatcatccctactgtggctactgcagtctgggtgctcatccacactagcctgaaactcaagctgacagcttccatggcattctccatgctggcttccctaaatctgctgaggctttctgtgttctttgtcccgatagctgtcaaaggcctgactaactctaaatctgctgttatgcgatttaagaaatttttcctccaggagtcacccgtattttatgtgcagacactgcaggaccccagtaaagctttggtgttcgaagaagccacgttatcttggcagcagacttgccctggcattgtgaatggtgccctggagttggaacgcaatgggcatgcttccgaaggaatgactaggccaagggatgcactgggtccagaagaggagggaaactccctgggtcccgaacttcataaaatcaacctcgtagtatctaaggggatgatgttgggggtctgcgggaatacaggttctggaaagagctctctgttgtccgctatacttgaggagatgcacttgctggaagggtctgttggtgtgcaagggagtctggcgtacgtccctcagcaggcctggattgtgtccggcaacatccgggaaaacattctgatggggggtgcctacgacaaggcacgatatctccaggtgctgcattgctgtagtttgaaccgggatttagagctgctcccatttggcgacatgaccgaaatcggcgagcgtggccttaatctgtccggtggtcagaagcagcgaatcagcttggcacgggctgtttattctgatcgacaaatatatcttctggacgaccctctgtcggcagttgacgctcatgttggaaagcatattttcgaagaatgtatcaaaaagacccttcgcggaaagaccgtggttctcgtgacccaccagcttcagtacctggagttctgtgggcagatcattttgttggagaacgggaaaatatgtgaaaatgggacccattccgagctcatgcaaaaaaaaggtaaatacgcccagctgattcagaaaatgcataaggaagctaccagctgccgatctatttccagccatcgtaggaggcggtggaagaaggccccatag

SEQ ID NO: 240499 - DNA, 4463 bp, Artificial Sequence
  derived and/or modified sequence
gtgtatttgaataaaccaggttggcaaatcatactatagctgaaagaattggcaggaactgaaaatgactaggaagaggacatactgggtgcccaactcttctggtggcctcgtgaatcgtggcatcgacataggcgatgacatggtttcaggacttatttataaaacctatactctccaagatggcccctggagtcagcaagagagaaatcctgaggctccagggagggcagctgtcccaccgtgggggaagtatgatgctgccttgagaaccatgattcccttccgtcccaagccgaggtttcctgccccccagcccctggacaatgctggcctgttctcctacctcaccgtgtcatggctcaccccgctcatgatccaaagcttacggagtcgcttagatgagaacaccatccctccactgtcagtccatgatgcctcagacaaaaatgtccaaaggcttcaccgcctttgggaagaagaagtctcaaggcgagggattgaaaaagcttcagtgcttctggtgatgctgaggttccagagaacaaggttgattttcgatgcacttctgggcatctgcttctgcattgccagtgtactcgggccaatattgattataccaaagatcctggaatattcagaagagcagttggggaatgttgtccatggagtgggactctgctttgccctttttctctccgaatgtgtgaagtctctgagtttctcctccagttggatcatcaaccaacgcacagccatcaggttccgagcagctgtttcctcctttgcctttgagaagctcatccaatttaagtctgtaatacacatcacctcaggagaggccatcagcttcttcaccggtgatgtaaactacctgtttgaaggggtgtgctatggacccctagtactgatcacctgcgcatcgctggtcatctgcagcatttcttcctacttcattattggatacactgcatttattgccatcttatgctatctcctggttttcccactggcggtattcatgacaagaatggctgtgaaggctcagcatcacacatctgaggtcagcgaccagcgcatccgtgtgaccagtgaagttctcacttgcattaagctgattaaaatgtacacatgggagaaaccatttgcaaaaatcattgaagacctaagaaggaaggaaaggaaactattggagaagtgcgggcttgtccagagcctgacaagtataaccttgttcatcatccccacagtggccacagcggtctgggttctcatccacacatccttaaagctgaaactcacagcgtcaatggccttcagcatgctggcctccttgaatctccttcggctgtcagtgttctttgtgcctattgcagtcaaaggtctcacgaattccaagtctgcagtgatgaggttcaagaagtttttcctccaggagagccctgttttctatgtccagacattacaagaccccagcaaagctctggtctttgaggaggccaccttgtcatggcaacagacctgtcccgggatcgtcaatggggcactggagctggagaggaacgggcatgcttctgaggggatgaccaggcctagagatgccctcgggccagaggaagaagggaacagcctgggcccagagttgcacaagatcaacctggtggtgtccaaggggatgatgttaggggtctgcggcaacacggggagtggtaagagcagcctgttgtcagccatcctggaggagatgcacttgctcgagggctcggtgggggtgcagggaagcctggcctatgtcccccagcaggcctggatcgtcagcgggaacatcagggagaacatcctcatgggaggcgcatatgacaaggcccgatacctccaggtgctccactgctgctccctgaatcgggacctggaacttctgccctttggagacatgacagagattggagagcggggcctcaacctctctggggggcagaaacagaggatcagcctggcccgcgccgtctattccgaccgtcagatctacctgctggacgaccccctgtctgctgtggacgcccacgtggggaagcacatttttgaggagtgcattaagaagacactcagggggaagacggtcgtcctggtgacccaccagctgcagtacttagaattttgtggccagatcattttgttggaaaatgggaaaatctgtgaaaatggaactcacagtgagttaatgcagaaaaaggggaaatatgcccaacttatccagaagatgcacaaggaagccacttcggacatgttgcaggacacagcaaagatagcagagaagccaaaggtagaaagtcaggctctggccacctccctggaagagtctctcaacggaaatgctgtgccggagcatcagctcacacaggaggaggagatggaagaaggctccttgagttggagggtctaccaccactacatccaggcagctggaggttacatggtctcttgcataattttcttcttcgtggtgctgatcgtcttcttaacgatcttcagcttctggtggctgagctactggttggagcagggctcggggaccaatagcagccgagagagcaatggaaccatggcagacctgggcaacattgcagacaatcctcaactgtccttctaccagctggtgtacgggctcaacgccctgctcctcatctgtgtgggggtctgctcctcagggattttcaccaaggtcacgaggaaggcatccacggccctgcacaacaagctcttcaacaaggttttccgctgccccatgagtttctttgacaccatcccaataggccggcttttgaactgcttcgcaggggacttggaacagctggaccagctcttgcccatcttttcagagcagttcctggtcctgtccttaatggtgatcgccgtcctgttgattgtcagtgtgctgtctccatatatcctgttaatgggagccataatcatggttatttgcttcatttattatatgatgttcaagaaggccatcggtgtgttcaagagactggagaactatagccggtctcctttattctcccacatcctcaattctctgcaaggcctgagctccatccatgtctatggaaaaactgaagacttcatcagccagtttaagaggctgactgatgcgcagaataactacctgctgttgtttctatcttccacacgatggatggcattgaggctggagatcatgaccaaccttgtgaccttggctgttgccctgttcgtggcttttggcatttcctccaccccctactcctttaaagtcatggctgtcaacatcgtgctgcagctggcgtccagcttccaggccactgcccggattggcttggagacagaggcacagttcacggctgtagagaggatactgcagtacatgaagatgtgtgtctcggaagctcctttacacatggaaggcacaagttgtccccaggggtggccacagcatggggaaatcatatttcaggattatcacatgaaatacagagacaacacacccaccgtgcttcacggcatcaacctgaccatccgcggccacgaagtggtgggcatcgtgggaaggacgggctctgggaagtcctccttgggcatggctctcttccgcctggtggagcccatggcaggccggattctcattgacggcgtggacatttgcagcatcggcctggaggacttgcggtccaagctctcagtgatccctcaagatccagtgctgctctcaggaaccatcagattcaacctagatccctttgaccgtcacactgaccagcagatctgggatgccttggagaggacattcctgaccaaggccatcatccttatcgatgaagccacagcctccattgacatggagacagacaccctgatccagcgcacaatccgtgaagccttccagggctgcaccgtgctcgtcattgcccaccgtgtcaccactgtgctgaactgtgaccacatcctggttatgggcaatgggaaggtggtagaatttgatcggccggaggtactgcggaagaagcctgggtcattgttcgcagccctcatggccacagccacttcttcactgagataaggagatgtggagacttcatggaggctggcagctgagctcagaggttcacacaggtgcagcttcgaggcccacagtctgcgaccttcttgtttggagatgagaacttctcctggaagcaggggtaaatgtagggggggtggggattgctggatggaaaccctggaataggctacttgatggctctcaagaccttagaaccccagaaccatctaagacatgggattcagtgatcatgtggttctccttttaacttacatgctgaataattttataataaggtaaaagcttatagttttctgatctgtgttagaagtgttgcaaatgctgtactgactttgtaaaatataaaactaaggaaaactca

SEQ ID NO: 240500 - DNA, 2942 bp, Artificial Sequence
  derived and/or modified sequence
ttaaaaaggctcctgcaggcaacatgcctgcacactaacgtgcagaaagggactgtactactcaaaaccaccaaggaagtggcagagaattggcaggaactgaaaatgactaggaagaggacatactgggtgcccaactcttctggtggcctcgtgaatcgtggcatcgacataggcgatgacatggtttcaggacttatttataaaacctatactctccaagatggcccctggagtcagcaagagagaaatcctgaggctccagggagggcagctgtcccaccgtgggggaagtatgatgctgccttgagaaccatgattcccttccgtcccaagccgaggtttcctgccccccagcccctggacaatgctggcctgttctcctacctcaccgtgtcatggctcaccccgctcatgatccaaagcttacggagtcgcttagatgagaacaccatccctccactgtcagtccatgatgcctcagacaaaaatgtccaaaggcttcaccgcctttgggaagaagaagtctcaaggcgagggattgaaaaagcttcagtgcttctggtgatgctgaggttccagagaacaaggttgattttcgatgcacttctgggcatctgcttctgcattgccagtgtactcgggccaatattgattataccaaagatcctggaatattcagaagagcagttggggaatgttgtccatggagtgggactctgctttgccctttttctctccgaatgtgtgaagtctctgagtttctcctccagttggatcatcaaccaacgcacagccatcaggttccgagcagctgtttcctcctttgcctttgagaagctcatccaatttaagtctgtaatacacatcacctcaggagaggccatcagcttcttcaccggtgatgtaaactacctgtttgaaggggtgtgctatggacccctagtactgatcacctgcgcatcgctggtcatctgcagcatttcttcctacttcattattggatacactgcatttattgccatcttatgctatctcctggttttcccactggcggtattcatgacaagaatggctgtgaaggctcagcatcacacatctgaggtcagcgaccagcgcatccgtgtgaccagtgaagttctcacttgcattaagctgattaaaatgtacacatgggagaaaccatttgcaaaaatcattgaagacctaagaaggaaggaaaggaaactattggagaagtgcgggcttgtccagagcctgacaagtataaccttgttcatcatccccacagtggccacagcggtctgggttctcatccacacatccttaaagctgaaactcacagcgtcaatggccttcagcatgctggcctccttgaatctccttcggctgtcagtgttctttgtgcctattgcagtcaaaggtctcacgaattccaagtctgcagtgatgaggttcaagaagtttttcctccaggagagccctgttttctatgtccagacattacaagaccccagcaaagctctggtctttgaggaggccaccttgtcatggcaacagacctgtcccgggatcgtcaatggggcactggagctggagaggaacgggcatgcttctgaggggatgaccaggcctagagatgccctcgggccagaggaagaagggaacagcctgggcccagagttgcacaagatcaacctggtggtgtccaaggggatgatgttaggggtctgcggcaacacggggagtggtaagagcagcctgttgtcagccatcctggaggagatgcacttgctcgagggctcggtgggggtgcagggaagcctggcctatgtcccccagcaggcctggatcgtcagcgggaacatcagggagaacatcctcatgggaggcgcatatgacaaggcccgatacctccaggtgctccactgctgctccctgaatcgggacctggaacttctgccctttggagacatgacagagattggagagcggggcctcaacctctctggggggcagaaacagaggatcagcctggcccgcgccgtctattccgaccgtcagatctacctgctggacgaccccctgtctgctgtggacgcccacgtggggaagcacatttttgaggagtgcattaagaagacactcagggggaagacggtcgtcctggtgacccaccagctgcagtacttagaattttgtggccagatcattttgttggaaaatgggaaaatctgtgaaaatggaactcacagtgagttaatgcagaaaaaggggaaatatgcccaacttatccagaagatgcacaaggaagccacttcgtgccggagcatcagctcacacaggaggaggagatggaagaaggctccttgagttggagggtctaccaccactacatccaggcagctggaggttacatggtctcttgcataattttcttcttcgtggtgctgatcgtcttcttaacgatcttcagcttctggtggctgagctactggttggagcagggctcggggaccaatagcagccgagagagcaatggaaccatggcagacctgggcaacattgcagacaatcctcaactgtccttctaccagctggtgtacgggctcaacgccctgctcctcatctgtgtgggggtctgctcctcagggattttcaccaaggtcacgaggaaggcatccacggccctgcacaacaagctcttcaacaaggttttccgctgccccatgagtttctttgacaccatcccaataggccggcttttgaactgcttcgcaggggacttggaacagctggaccagctcttgcccatcttttcagagcagttcctggtcctgtccttaatggtgatcgccgtcctgttgattgtcagtgtgctgtctccatatatcctgttaatgggagccataatcatggttatttgcttcatttattatatg

SEQ ID NO: 240501 - DNA, 4035 bp, Artificial Sequence
  derived and/or modified sequence
atgaccagaaagagaacctactgggtgcccaacagcagcggcggcctggtgaacagaggcatcgacatcggcgacgacatggtgagcggcctgatctacaagacctacaccctgcaggacggcccctggagccagcaggagagaaaccccgaggcccccggcagagccgccgtgcccccctggggcaagtacgacgccgccctgagaaccatgatccccttcagacccaagcccagattccccgccccccagcccctggacaacgccggcctgttcagctacctgaccgtgagctggctgacccccctgatgatccagagcctgagaagcagactggacgagaacaccatcccccccctgagcgtgcacgacgccagcgacaagaacgtgcagagactgcacagactgtgggaggaggaggtgagcagaagaggcatcgagaaggccagcgtgctgctggtgatgctgagattccagagaaccagactgatcttcgacgccctgctgggcatctgcttctgcatcgccagcgtgctgggccccatcctgatcatccccaagatcctggagtacagcgaggagcagctgggcaacgtggtgcacggcgtgggcctgtgcttcgccctgttcctgagcgagtgcgtgaagagcctgagcttcagcagcagctggatcatcaaccagagaaccgccatcagattcagagccgccgtgagcagcttcgccttcgagaagctgatccagttcaagagcgtgatccacatcaccagcggcgaggccatcagcttcttcaccggcgacgtgaactacctgttcgagggcgtgtgctacggccccctggtgctgatcacctgcgccagcctggtgatctgcagcatcagcagctacttcatcatcggctacaccgccttcatcgccatcctgtgctacctgctggtgttccccctggccgtgttcatgaccagaatggccgtgaaggcccagcaccacaccagcgaggtgagcgaccagagaatcagagtgaccagcgaggtgctgacctgcatcaagctgatcaagatgtacacctgggagaagcccttcgccaagatcatcgaggacctgagaagaaaggagagaaagctgctggagaagtgcggcctggtgcagagcctgaccagcatcaccctgttcatcatccccaccgtggccaccgccgtgtgggtgctgatccacaccagcctgaagctgaagctgaccgccagcatggccttcagcatgctggccagcctgaacctgctgagactgagcgtgttcttcgtgcccatcgccgtgaagggcctgaccaacagcaagagcgccgtgatgagattcaagaagttcttcctgcaggagagccccgtgttctacgtgcagaccctgcaggaccccagcaaggccctggtgttcgaggaggccaccctgagctggcagcagacctgccccggcatcgtgaacggcgccctggagctggagagaaacggccacgccagcgagggcatgaccagacccagagacgccctgggccccgaggaggagggcaacagcctgggccccgagctgcacaagatcaacctggtggtgagcaagggcatgatgctgggcgtgtgcggcaacaccggcagcggcaagagcagcctgctgagcgccatcctggaggagatgcacctgctggagggcagcgtgggcgtgcagggcagcctggcctacgtgccccagcaggcctggatcgtgagcggcaacatcagagagaacatcctgatgggcggcgcctacgacaaggccagatacctgcaggtgctgcactgctgcagcctgaacagagacctggagctgctgcccttcggcgacatgaccgagatcggcgagagaggcctgaacctgagcggcggccagaagcagagaatcagcctggccagagccgtgtacagcgacagacagatctacctgctggacgaccccctgagcgccgtggacgcccacgtgggcaagcacatcttcgaggagtgcatcaagaagaccctgagaggcaagaccgtggtgctggtgacccaccagctgcagtacctggagttctgcggccagatcatcctgctggagaacggcaagatctgcgagaacggcacccacagcgagctgatgcagaagaagggcaagtacgcccagctgatccagaagatgcacaaggaggccaccagcgacatgctgcaggacaccgccaagatcgccgagaagcccaaggtggagagccaggccctggccaccagcctggaggagagcctgaacggcaacgccgtgcccgagcaccagctgacccaggaggaggagatggaggagggcagcctgagctggagagtgtaccaccactacatccaggccgccggcggctacatggtgagctgcatcatcttcttcttcgtggtgctgatcgtgttcctgaccatcttcagcttctggtggctgagctactggctggagcagggcagcggcaccaacagcagcagagagagcaacggcaccatggccgacctgggcaacatcgccgacaacccccagctgagcttctaccagctggtgtacggcctgaacgccctgctgctgatctgcgtgggcgtgtgcagcagcggcatcttcaccaaggtgaccagaaaggccagcaccgccctgcacaacaagctgttcaacaaggtgttcagatgccccatgagcttcttcgacaccatccccatcggcagactgctgaactgcttcgccggcgacctggagcagctggaccagctgctgcccatcttcagcgagcagttcctggtgctgagcctgatggtgatcgccgtgctgctgatcgtgagcgtgctgagcccctacatcctgctgatgggcgccatcatcatggtgatctgcttcatctactacatgatgttcaagaaggccatcggcgtgttcaagagactggagaactacagcagaagccccctgttcagccacatcctgaacagcctgcagggcctgagcagcatccacgtgtacggcaagaccgaggacttcatcagccagttcaagagactgaccgacgcccagaacaactacctgctgctgttcctgagcagcaccagatggatggccctgagactggagatcatgaccaacctggtgaccctggccgtggccctgttcgtggccttcggcatcagcagcaccccctacagcttcaaggtgatggccgtgaacatcgtgctgcagctggccagcagcttccaggccaccgccagaatcggcctggagaccgaggcccagttcaccgccgtggagagaatcctgcagtacatgaagatgtgcgtgagcgaggcccccctgcacatggagggcaccagctgcccccagggctggccccagcacggcgagatcatcttccaggactaccacatgaagtacagagacaacacccccaccgtgctgcacggcatcaacctgaccatcagaggccacgaggtggtgggcatcgtgggcagaaccggcagcggcaagagcagcctgggcatggccctgttcagactggtggagcccatggccggcagaatcctgatcgacggcgtggacatctgcagcatcggcctggaggacctgagaagcaagctgagcgtgatcccccaggaccccgtgctgctgagcggcaccatcagattcaacctggaccccttcgacagacacaccgaccagcagatctgggacgccctggagagaaccttcctgaccaaggccatcatcctgatcgacgaggccaccgccagcatcgacatggagaccgacaccctgatccagagaaccatcagagaggccttccagggctgcaccgtgctggtgatcgcccacagagtgaccaccgtgctgaactgcgaccacatcctggtgatgggcaacggcaaggtggtggagttcgacagacccgaggtgctgagaaagaagcccggcagcctgttcgccgccctgatggccaccgccaccagcagcctgagatag

SEQ ID NO: 240502 - DNA, 2268 bp, Artificial Sequence
  derived and/or modified sequence
atgaccagaaagagaacctactgggtgcccaacagcagcggcggcctggtgaacagaggcatcgacatcggcgacgacatggtgagcggcctgatctacaagacctacaccctgcaggacggcccctggagccagcaggagagaaaccccgaggcccccggcagagccgccgtgcccccctggggcaagtacgacgccgccctgagaaccatgatccccttcagacccaagcccagattccccgccccccagcccctggacaacgccggcctgttcagctacctgaccgtgagctggctgacccccctgatgatccagagcctgagaagcagactggacgagaacaccatcccccccctgagcgtgcacgacgccagcgacaagaacgtgcagagactgcacagactgtgggaggaggaggtgagcagaagaggcatcgagaaggccagcgtgctgctggtgatgctgagattccagagaaccagactgatcttcgacgccctgctgggcatctgcttctgcatcgccagcgtgctgggccccatcctgatcatccccaagatcctggagtacagcgaggagcagctgggcaacgtggtgcacggcgtgggcctgtgcttcgccctgttcctgagcgagtgcgtgaagagcctgagcttcagcagcagctggatcatcaaccagagaaccgccatcagattcagagccgccgtgagcagcttcgccttcgagaagctgatccagttcaagagcgtgatccacatcaccagcggcgaggccatcagcttcttcaccggcgacgtgaactacctgttcgagggcgtgtgctacggccccctggtgctgatcacctgcgccagcctggtgatctgcagcatcagcagctacttcatcatcggctacaccgccttcatcgccatcctgtgctacctgctggtgttccccctggccgtgttcatgaccagaatggccgtgaaggcccagcaccacaccagcgaggtgagcgaccagagaatcagagtgaccagcgaggtgctgacctgcatcaagctgatcaagatgtacacctgggagaagcccttcgccaagatcatcgaggacctgagaagaaaggagagaaagctgctggagaagtgcggcctggtgcagagcctgaccagcatcaccctgttcatcatccccaccgtggccaccgccgtgtgggtgctgatccacaccagcctgaagctgaagctgaccgccagcatggccttcagcatgctggccagcctgaacctgctgagactgagcgtgttcttcgtgcccatcgccgtgaagggcctgaccaacagcaagagcgccgtgatgagattcaagaagttcttcctgcaggagagccccgtgttctacgtgcagaccctgcaggaccccagcaaggccctggtgttcgaggaggccaccctgagctggcagcagacctgccccggcatcgtgaacggcgccctggagctggagagaaacggccacgccagcgagggcatgaccagacccagagacgccctgggccccgaggaggagggcaacagcctgggccccgagctgcacaagatcaacctggtggtgagcaagggcatgatgctgggcgtgtgcggcaacaccggcagcggcaagagcagcctgctgagcgccatcctggaggagatgcacctgctggagggcagcgtgggcgtgcagggcagcctggcctacgtgccccagcaggcctggatcgtgagcggcaacatcagagagaacatcctgatgggcggcgcctacgacaaggccagatacctgcaggtgctgcactgctgcagcctgaacagagacctggagctgctgcccttcggcgacatgaccgagatcggcgagagaggcctgaacctgagcggcggccagaagcagagaatcagcctggccagagccgtgtacagcgacagacagatctacctgctggacgaccccctgagcgccgtggacgcccacgtgggcaagcacatcttcgaggagtgcatcaagaagaccctgagaggcaagaccgtggtgctggtgacccaccagctgcagtacctggagttctgcggccagatcatcctgctggagaacggcaagatctgcgagaacggcacccacagcgagctgatgcagaagaagggcaagtacgcccagctgatccagaagatgcacaaggaggccaccagctgcagaagcatcagcagccacagaagaagaagatggaagaaggccccctag

SEQ ID NO: 240503 - protein, 275 aa, Artificial Sequence
  derived and/or modified sequence
MTTEQARGQQGPNLAIGRQKPPAGVVTPKSDAEEPPLTRKRSKKERGLRGSRKRTGSSGEQTGPEAPGSSNNPPSTGEGPAGAPPASPGPASSRQSHRHRPDSLHDAAQRTYGPLLNRVFGKDRELGPEELDELQAAFEEFDTDRDGYISHRELGDCMRTLGYMPTEMELLEVSQHIKMRMGGRVDFEEFVELIGPKLREETAHMLGVRELRIAFREFDRDRDGRITVAELREAVPALLGEPLAGPELDEMLREVDLNGDGTVDFDEFVMMLSRH

SEQ ID NO: 240504 - DNA, 828 bp, Artificial Sequence
  derived and/or modified sequence
atgaccacagaacaggcgcgtggacagcagggacccaacctggcgatcggacgacagaaaccaccagctggcgtcgttactcctaaatcagatgctgaagagcctccccttacaagaaaaaggtccaaaaaagagaggggacttcgcggaagccggaaaaggaccggaagttctggggaacagactgggccagaggctcccggatcttccaacaacccaccgtctactggcgagggccccgctggcgcacctcccgctagccccgggcctgccagctctagacagtcccaccggcaccggcctgacagcctgcatgatgctgcccagcgaacatatggtccattactgaatcgtgtcttcgggaaagacagggaattgggtcccgaggagctagacgaactccaggccgcctttgaggagtttgacacagaccgcgatggttatatctcacatcgtgaactaggggattgcatgcgcacacttggctacatgccaaccgagatggaacttctggaggtgtcccaacacatcaagatgcggatgggagggagggtggactttgaggagtttgttgaattgattggccctaagttgcgcgaggagaccgcacacatgttaggcgtaagggagctaagaatcgcgttcagagaatttgatcgagatcgtgacggcagaatcactgttgctgaactccgcgaagcagtgcctgccctcctgggggagccactagccggacccgaactggatgagatgctccgcgaggtggatctcaatggcgacggcactgtcgatttcgatgagttcgttatgatgctttctagacactag

SEQ ID NO: 240505 - DNA, 828 bp, Artificial Sequence
  derived and/or modified sequence
atgaccacagagcaggcccggggccagcagggccccaacctggccatcggccggcagaagcccccagctggggtggtgacccccaagagtgatgctgaggagccccccctgaccaggaagaggagcaagaaggagcggggcctgcggggcagcaggaagaggacaggcagcagcggggagcagacaggccctgaggcccctggcagcagcaacaacccccccagcactggagagggccctgctggggcccccccagccagccctggccctgccagcagccggcagagccaccgccacaggccagacagcctgcatgatgctgcccagaggacctacggccccctgctgaacagagtgtttgggaaggaccgggagctgggccctgaggagctggatgagctgcaggccgcctttgaggagtttgacacagacagagatggctacatcagccaccgggagctgggggactgcatgaggaccctgggctacatgcccacagagatggagctgctggaggtgtcccagcacatcaagatgaggatgggcggccgggtggactttgaggagtttgtggagctgattggccccaagctgcgggaggagacagcccacatgctgggcgtgcgggagctgagaattgccttccgggagtttgaccgggacagagatggccgcatcaccgtggccgagctgcgggaggccgtgcctgccctgctgggggagcccctggccggccctgagctggatgagatgctgcgggaggtggacctgaatggagatggcaccgtggactttgatgaatttgtgatgatgctgagccgccactag

SEQ ID NO: 240506 - DNA, 828 bp, Artificial Sequence
  derived and/or modified sequence
atgaccaccgagcaggcccggggccagcagggccccaacctggccattggtaggcagaagcctcccgcaggcgttgtgactcctaaaagtgacgcagaggaacctcccttgacgcggaaacggagcaagaaggaacgggggttgaggggcagccgcaaaagaacaggatcctctggtgaacagaccggacccgaggcccccggctccagcaataatcctccaagtaccggggaaggtcccgctggggctcctccagcctcacctggacctgcgagtagcagacagagtcacagacaccgcccggattctctgcacgatgccgcccagcggacctatggacccttgcttaaccgtgtttttggtaaggaccgtgaactaggccctgaggagctcgacgagttgcaagcggccttcgaggagttcgacactgaccgcgacggatatatatcccatcgcgaactcggtgactgtatgcggaccttgggctacatgccgacggagatggaactgctagaagtcagccagcatatcaaaatgcgtatgggcggaagggttgactttgaggagtttgtggagctgattgggcccaagctgcgcgaagaaaccgcacacatgctgggtgtgagagagcttcgcatcgctttccgagaattcgacagagatcgggacgggcgcattactgttgcagagcttagggaggctgtccccgcactactgggggagcccctggcaggcccagaactggacgagatgttgcgggaagtagacctcaacggtgacggtacagtcgactttgatgaattcgtcatgatgctctcacgccattag

SEQ ID NO: 240507 - DNA, 828 bp, Artificial Sequence
  derived and/or modified sequence
atgacgactgagcaggcacgcggtcagcagggcccaaatctcgccattggacgacagaaaccacctgcaggcgtggtgaccccgaagtcagacgctgaggaaccaccattgacccgcaaacggagcaagaaggagcggggattacgaggctctagaaaacgaacaggttcatccggcgagcaaactggacctgaagcccctgggagttctaataaccccccatctacaggcgagggccctgctggcgctccacccgcatccccgggacctgcatctagcagacagagccatagacatagaccagactcacttcacgacgccgctcaacgaacttacgggcctttgctcaaccgcgtgttcggaaaggatcgcgaacttggacccgaggaactcgatgagctgcaggcggcattcgaggagttcgacaccgaccgggacgggtacatatctcaccgagagctgggggattgtatgagaacgctgggatatatgcctacagaaatggaactcctcgaggtcagccagcacataaagatgcgaatggggggtcgcgttgacttcgaggagtttgttgaactgattggccctaaactcagggaagagacagcccacatgctcggcgttagggagttgaggattgcctttagagaatttgatcgggacagagacgggaggattacagtggccgagttacgagaggcagtccccgctcttcttggggaaccacttgcaggacccgagttagatgaaatgcttagggaggtggacctgaatggtgatgggacagtggatttcgatgaattcgtcatgatgctctcgcgccactag

SEQ ID NO: 240508 - DNA, 1299 bp, Artificial Sequence
  derived and/or modified sequence
cataagcagctttatgggtcctgaaagccaagggtgcccaggggtgtggtgtctctgagccctgttatccctcccccatgaccacagagcaggcaagggggcagcagggcccaaatctggccattggccgtcagaagccccctgcgggggttgtgactcccaagagtgatgcagaggagcccccgttgaccaggaagaggagcaagaaggagagggggctccgagggtctcgaaagcgcactggcagctctggggagcagacaggccccgaggccccggggagcagcaataaccctcccagcactggagaggggccggcgggcgcaccccctgcatcccctgggccggcctcttctcgccagtcccaccgacatcgtcctgactccctgcacgacgctgctcagaggacatacgggcccctgctcaatcgagtcttcgggaaggaccgcgaactgggccccgaggagctagacgagcttcaggccgccttcgaggagtttgacactgaccgtgacggctacatcagccaccgggagctgggtgactgcatgcggaccctgggctacatgcccaccgagatggagctcctggaggtctcgcagcacatcaagatgcgcatgggcggccgtgtggactttgaggagtttgtagaactgataggcccaaagctgagggaggagacggcgcacatgctgggggtgcgagagctgcgcatcgccttccgagagtttgacagggacagggatggacgaattacggtggcggagctgcgggaggcggtaccggctctgctcggggagccgctggcgggtcctgagctggacgagatgctccgagaagtggacctcaatggggatggcaccgtagactttgacgagtttgtgatgatgctctcccgccactgaggctccaggagggaatatctgttgcccctgcggccccagacaccagccagacccaggctgcaggcctcccccaggagcctccaggatggagatggagacccagcagcccccagactacttctatccctgaaaacacctggcctcaatgttggcttgttatgttacctgcccaccctcatccttacctcctcctactcaagctgcctggagaagacctgctctcagctgcccaccgttcctcagtgtgagcaagatttgggtctctccagacctctgggaggtagggagttccctggcactggcagcattcagtggggaccccccagtggcatgatgaatggagaggatggctggaccccttccactacttatgtttataatttttttttttttt

SEQ ID NO: 240509 - DNA, 828 bp, Artificial Sequence
  derived and/or modified sequence
atgaccaccgagcaggccagaggccagcagggccccaacctggccatcggcagacagaagccccccgccggcgtggtgacccccaagagcgacgccgaggagccccccctgaccagaaagagaagcaagaaggagagaggcctgagaggcagcagaaagagaaccggcagcagcggcgagcagaccggccccgaggcccccggcagcagcaacaacccccccagcaccggcgagggccccgccggcgccccccccgccagccccggccccgccagcagcagacagagccacagacacagacccgacagcctgcacgacgccgcccagagaacctacggccccctgctgaacagagtgttcggcaaggacagagagctgggccccgaggagctggacgagctgcaggccgccttcgaggagttcgacaccgacagagacggctacatcagccacagagagctgggcgactgcatgagaaccctgggctacatgcccaccgagatggagctgctggaggtgagccagcacatcaagatgagaatgggcggcagagtggacttcgaggagttcgtggagctgatcggccccaagctgagagaggagaccgcccacatgctgggcgtgagagagctgagaatcgccttcagagagttcgacagagacagagacggcagaatcaccgtggccgagctgagagaggccgtgcccgccctgctgggcgagcccctggccggccccgagctggacgagatgctgagagaggtggacctgaacggcgacggcaccgtggacttcgacgagttcgtgatgatgctgagcagacactag

SEQ ID NO: 240510 - protein, 566 aa, Artificial Sequence
  derived and/or modified sequence
MAAEQDPEARAAARPLLTDLYQATMALGYWRAGRARDAAEFELFFRRCPFGGAFALAAGLRDCVRFLRAFRLRDADVQFLASVLPPDTDPAFFEHLRALDCSEVTVRALPEGSLAFPGVPLLQVSGPLLVVQLLETPLLCLVSYASLVATNAARLRLIAGPEKRLLEMGLRRAQGPDGGLTASTYSYLGGFDSSSNVLAGQLRGVPVAGTLAHSFVTSFSGSEVPPDPMLAPAAGEGPGVDLAAKAQVWLEQVCAHLGLGVQEPHPGERAAFVAYALAFPRAFQGLLDTYSVWRSGLPNFLAVALALGELGYRAVGVRLDSGDLLQQAQEIRKVFRAAAAQFQVPWLESVLIVVSNNIDEEALARLAQEGSEVNVIGIGTSVVTCPQQPSLGGVYKLVAVGGQPRMKLTEDPEKQTLPGSKAAFRLLGSDGSPLMDMLQLAEEPVPQAGQELRVWPPGAQEPCTVRPAQVEPLLRLCLQQGQLCEPLPSLAESRALAQLSLSRLSPEHRRLRSPAQYQVGGGPPCHSALCAPALTLPTAPVLCSLQVVLSERLQALVNSLCAGQSP

SEQ ID NO: 240511 - protein, 490 aa, Artificial Sequence
  derived and/or modified sequence
MAAEQDPEARAAARPLLTDLYQATMALGYWRAGRARDAAEFELFFRRCPFGGAFALAAGLRDCVRFLRAFRLRDADVQFLASVLPPDTDPAFFEHLRALDCSEVTVRALPEGSLAFPGVPLLQVSGPLLVVQLLETPLLCLVSYASLVATNAARLRLIAGPEKRLLEMGLRRAQGPDGGLTASTYSYLGGFDSSSNVLAGQLRGVPVAGTLAHSFVTSFSGSEVPPDPMLAPAAGEGPGVDLAAKAQVWLEQVCAHLGLGVQEPHPGERAAFVAYALAFPRAFQGLLDTYSVWRSGLPNFLAVALALGELGYRAVGVRLDSGDLLQQAQEIRKVFRAAAAQFQVPWLESVLIVVSNNIDEEALARLAQEGSEVNVIGIGTSVVTCPQQPSLGGVYKLVAVGGQPRMKLTEDPEKQTLPGSKAAFRLLGSDGSPLMDMLQLAEEPVPQAGQELRVWPPGAQEPCTVRPAQVEPLLRLCLQQGQVAAPPPSS

SEQ ID NO: 240512 - protein, 538 aa, Artificial Sequence
  derived and/or modified sequence
MAAEQDPEARAAARPLLTDLYQATMALGYWRAGRARDAAEFELFFRRCPFGGAFALAAGLRDCVRFLRAFRLRDADVQFLASVLPPDTDPAFFEHLRALDCSEVTVRALPEGSLAFPGVPLLQVSGPLLVVQLLETPLLCLVSYASLVATNAARLRLIAGPEKRLLEMGLRRAQGPDGGLTASTYSYLGGFDSSSNVLAGQLRGVPVAGTLAHSFVTSFSGSEVPPDPMLAPAAGEGPGVDLAAKAQVWLEQVCAHLGLGVQEPHPGERAAFVAYALAFPRAFQGLLDTYSVWRSGLPNFLAVALALGELGYRAVGVRLDSGDLLQQAQEIRKVFRAAAAQFQVPWLESVLIVVSNNIDEEALARLAQEGSEVNVIGIGTSVVTCPQQPSLGGVYKLVAVGGQPRMKLTEDPEKQTLPGSKAAFRLLGSDGSPLMDMLQLAEEPVPQAGQELRVWPPGAQEPCTVRPAQVEPLLRLCLQQGQLCEPLPSLAESRALAQLSLSRLSPEHRRLRSPAQYQVVLSERLQALVNSLCAGQSP

SEQ ID NO: 240513 - DNA, 1701 bp, Artificial Sequence
  derived and/or modified sequence
atggcagcagagcaggaccctgaggcccgtgcggcagctcgcccgcttctcacagacttgtatcaggcaaccatggcattgggctactggagagccggtcgagcccgtgacgccgcagagttcgagctcttttttcgcaggtgtccttttgggggagcctttgcactcgcagcaggactgagagactgcgtgcgcttccttcgcgccttccggttacgcgacgcagacgtacaattcctagcatctgttctgccccctgataccgatccagcatttttcgaacacctacgtgccctcgattgctcagaggtgacggttcgggcactcccggaaggtagcctggccttccccggtgtcccccttctgcaggtgagtggccctttgctggttgtgcagttgctggagacaccgctgctatgcctcgtcagttacgctagcctggttgccaccaatgctgcccgccttcgacttatcgccgggcccgagaagaggttgttagagatgggtttgcgcagagctcagggcccagatggtggcctgacagcctccacgtattcctacctcgggggatttgatagctcatctaatgttctggccggccagctgcggggtgtaccagttgcaggaactctggcccattcttttgtaacttcattttccgggagcgaggtgcctccagatcctatgctcgctcccgccgctggagaaggccccggcgtggatcttgctgcgaaggcacaggtttggttagaacaagtttgcgcccaccttgggttgggggtccaggagccacatcccggtgagagggccgctttcgtggcctatgccctcgcatttcccagagctttccagggcctgctggacacgtattcagtgtggagatctgggctgccgaatttccttgccgtggcactggccttgggagaactgggatatcgggcggtaggcgtgaggctggactccggggacctgcttcagcaggcccaagagataagaaaagtcttccgtgcagcagctgcccaatttcaagtgccatggctggaaagcgtgctcatagtagtgagtaataatatcgatgaagaagccctggcccgtctagcccaagaggggtccgaggtaaatgtaatcgggattgggacttcagtggtgacctgtccccagcaaccaagcttgggcggcgtttataagctcgtcgcagtgggggggcaacccaggatgaaactgaccgaggacccagagaaacaaaccctgcccgggagcaaagctgcctttaggcttcttggaagcgatggatcccccctcatggatatgctgcagctcgctgaggagcctgtgccccaggcaggtcaggagctacgcgtgtggccgccaggtgcacaggaaccctgtacagttcgccccgcccaagtcgagcccctgctaagactgtgtttgcagcagggtcagctgtgcgaaccgcttccgtcactagccgaaagcagagccctcgctcagctcagcttaagtcgtctgtctccggaacaccggagactgcggtccccagcccagtaccaggtgggcggtggaccgccatgtcattcggctctgtgtgcccccgccctaacacttccaactgcaccggtgctgtgctccctacaggtggtgttatccgagcggcttcaggctttggtcaatagcctgtgcgctggtcagtccccttag

SEQ ID NO: 240514 - DNA, 1473 bp, Artificial Sequence
  derived and/or modified sequence
atggcagcagagcaggatcccgaagcacgagctgccgcgagacccctgcttacagatttgtatcaggcgaccatggccctgggctattggcgcgccggacgcgccagagatgccgccgaatttgagttatttttccgccgttgcccattcggaggcgcgtttgctctggcggctggcctgagggactgcgtgaggttcctacgggcttttaggctgagagatgcagatgtgcagttcctggcaagtgtcctgcctcccgacaccgacccagcgttttttgagcaccttagggctctggactgttcagaagtgacagttagagcgttgcccgaggggtctttggctttcccaggtgtgccacttcttcaggtcagcggaccacttctggtcgtccagctcctcgagaccccattactgtgccttgtatcctatgctagcttggtggctaccaatgctgcccgccttagactgatcgctgggcctgagaagaggctgctcgaaatgggactgcgccgcgcgcagggccccgatgggggtctgactgccagcacttacagttatttgggtggttttgacagttcatccaacgtccttgcgggacagctgcgtggggtccccgtcgccggcactttggcgcatagcttcgttactagtttttcgggatccgaggttcctccagaccccatgcttgcacctgcggccggtgaagggccaggtgttgacctcgctgccaaggcccaggtatggcttgagcaagtgtgtgcccaccttggcctgggcgtccaagagccccatcccggtgaacgagctgcttttgtggcctatgccctggctttccctcgtgccttccagggtttgctggacacctatagtgtctggcggtctgggctacccaactttctcgcagtcgcactggctctgggtgagctgggctatagggcagtgggagtcagattggacagcggggacttattacagcaagcacaggagatccgtaaggttttccgagcagctgccgctcagttccaggtcccttggctagagtctgttctgatagtcgtgtcaaataatatcgatgaggaggcgctggctaggctggcccaggaggggagcgaagtgaacgtgatcgggattgggacctctgtggtgacgtgtccacagcaaccatcattgggtggggtgtataagctggtggctgttggcgggcaacctcggatgaagctgaccgaagaccctgagaaacagacactgcctggcagcaaagccgcctttcgacttttgggatcggacggatcacccctgatggacatgctacagttggccgaggaaccagtgccccaggctggtcaggagctccgagtttggcccccaggggcacaagaaccctgtacggtgaggcctgcccaggtggagcctcttttaagactgtgcctccagcagggtcaggtggctgcacctccaccatcctcctag

SEQ ID NO: 240515 - DNA, 1617 bp, Artificial Sequence
  derived and/or modified sequence
atggctgctgagcaggatcctgaagctcgcgctgctgcgcgcccactgctcaccgatctgtaccaagcaacgatggctctgggctattggcgagcgggaagagccagagatgctgctgaatttgaactattttttagacggtgcccctttggtggggcttttgccctagccgctggactgcgggattgtgttagatttctccgcgcttttaggctacgcgatgccgacgtacaatttcttgcaagcgtgctccctcctgataccgaccctgcattcttcgaacatcttagggcactggactgttcagaagttaccgtgagagctttgcctgagggatcactggcctttccaggggtacctctgcttcaggtctctgggcccctcctggttgtccagctcctcgaaacccccctgctgtgtctcgtttcatacgcctccctcgtcgcgacgaacgccgcgcggctccgcctgattgccggaccagaaaagaggctgctggagatgggactaagacgcgcacaaggccccgatggagggctgactgcaagcacctattcatatctgggcggcttcgatagcagttctaatgttttagcggggcagctccgtggtgtccccgtggctggaactttagcccactcattcgtgacgagcttcagtggtagcgaggtcccccccgatcctatgctggcgcccgccgccggggaaggacccggtgtggacctggcagccaaggcacaggtttggttggagcaggtctgtgctcatctcgggttaggcgtccaggaaccccaccccggtgaacgggcagcgttcgttgcctatgccctagccttcccacgtgcattccagggactgctggatacctatagcgtttggcggtctggccttccaaactttctcgcagtggctctcgcgctgggcgagctgggatatcgggctgttggtgtgagactggattcaggcgacctgctgcagcaggcacaagaaatccggaaagtgtttagggctgccgccgcccagtttcaggtgccttggctggaaagcgtcctgattgtcgttagtaataacatcgatgaagaagccctagctaggttagcccaagaaggctcagaggtgaacgttattggaatcgggacgtccgtcgtgacctgccctcaacagccgtcgctgggtggtgtatacaaactggtggccgttggaggccagcctagaatgaagttgaccgaggatcccgaaaagcagacactccccggctccaaggcagcattccgactgcttggatcagatgggtctcctcttatggacatgctgcaattggccgaagagccggtacctcaggccgggcaggagctcagagtctggccccccggagcacaggaaccatgtactgtcagacctgcccaggtcgaacccctattaaggctgtgcctccagcagggccaactgtgcgagccccttccatctctggcagagagtagggccctggcccaactgtctctcagccgcctttctccggagcataggcggctcagaagccctgctcagtaccaagttgtactgtccgaaagattgcaggcactggtaaactcactgtgcgcaggacagagcccctag

SEQ ID NO: 240516 - DNA, 1701 bp, Artificial Sequence
  derived and/or modified sequence
atggctgctgagcaggaccctgaggcccgggccgccgcccggcccctgctgacagacctgtaccaggccaccatggccctgggctactggagggctggccgggccagagatgctgctgagtttgagctgttcttccgccgctgcccctttggaggagcctttgccctggccgccggcctgcgggactgtgtgcgcttcctgcgggccttccggctgagagatgctgatgtgcagttcctggcctctgtgctgcccccagacacagatcctgccttctttgagcacctgcgggccctggactgcagcgaggtgacagtgcgggccctgcctgagggcagcctggccttccctggggtgcccctgctgcaggtgtctggccccctgctggtggtgcagctgctggagacccccctgctgtgcctggtgtcctatgccagcctggtggccaccaatgctgcccggctgcggctgattgctggccctgagaagaggctgctggagatgggcctgcggcgggcccagggcccagatggcggcctgacagccagcacctacagctacctgggcggctttgacagcagcagcaatgtgctggccggccagctgcggggcgtgcctgtggccggcaccctggcccacagctttgtgaccagcttcagcggcagcgaggtgcccccagaccccatgctggccccagctgctggggagggccctggggtggacctggccgccaaggcccaggtgtggctggagcaggtgtgtgcccacctgggcctgggcgtgcaggagccccaccctggagagcgggccgcctttgtggcctatgccctggccttcccccgggccttccagggcctgctggacacctacagcgtgtggaggagcggcctgcccaacttcctggccgtggccctggccctgggggagctgggctacagagctgtgggcgtgcggctggacagcggggacctgctgcagcaggcccaggagatcaggaaggtgttccgggctgctgctgcccagttccaggtgccctggctggagagcgtgctgattgtggtgagcaacaacattgatgaggaggccctggcccggctggcccaggagggcagcgaggtgaatgtcatcggcatcggcacctctgtggtgacctgcccccagcagcccagcctgggcggcgtgtacaagctggtggccgtgggcggccagcccaggatgaagctgacagaggaccctgagaagcagaccctgcccggcagcaaggccgccttccggctgctgggcagtgatggcagccccctgatggacatgctgcagctggccgaggagcctgtgccccaggccggccaggagctgcgggtgtggcccccaggggcccaggagccctgcaccgtgcggcctgcccaggtggagcccctgctgcggctgtgcctgcagcagggccagctgtgtgagcccctgcccagcctggccgagagccgggccctggcccagctgagcctgagccggctgagccctgagcaccggcggctgcggagccctgcccagtaccaggtgggcggcggccccccctgccacagcgccctgtgtgccccagccctgaccctgcccacagcccctgtgctgtgcagcctgcaggtggtgctgtctgagcggctgcaggccctggtgaacagcctgtgtgccggccagagcccctag

SEQ ID NO: 240517 - DNA, 1473 bp, Artificial Sequence
  derived and/or modified sequence
atggctgctgagcaggaccctgaggcccgggccgccgcccggcccctgctgacagacctgtaccaggccaccatggccctgggctactggagggctggccgggccagagatgctgctgagtttgagctgttcttccgccgctgcccctttggaggagcctttgccctggccgccggcctgcgggactgtgtgcgcttcctgcgggccttccggctgagagatgctgatgtgcagttcctggcctctgtgctgcccccagacacagatcctgccttctttgagcacctgcgggccctggactgcagcgaggtgacagtgcgggccctgcctgagggcagcctggccttccctggggtgcccctgctgcaggtgtctggccccctgctggtggtgcagctgctggagacccccctgctgtgcctggtgtcctatgccagcctggtggccaccaatgctgcccggctgcggctgattgctggccctgagaagaggctgctggagatgggcctgcggcgggcccagggcccagatggcggcctgacagccagcacctacagctacctgggcggctttgacagcagcagcaatgtgctggccggccagctgcggggcgtgcctgtggccggcaccctggcccacagctttgtgaccagcttcagcggcagcgaggtgcccccagaccccatgctggccccagctgctggggagggccctggggtggacctggccgccaaggcccaggtgtggctggagcaggtgtgtgcccacctgggcctgggcgtgcaggagccccaccctggagagcgggccgcctttgtggcctatgccctggccttcccccgggccttccagggcctgctggacacctacagcgtgtggaggagcggcctgcccaacttcctggccgtggccctggccctgggggagctgggctacagagctgtgggcgtgcggctggacagcggggacctgctgcagcaggcccaggagatcaggaaggtgttccgggctgctgctgcccagttccaggtgccctggctggagagcgtgctgattgtggtgagcaacaacattgatgaggaggccctggcccggctggcccaggagggcagcgaggtgaatgtcatcggcatcggcacctctgtggtgacctgcccccagcagcccagcctgggcggcgtgtacaagctggtggccgtgggcggccagcccaggatgaagctgacagaggaccctgagaagcagaccctgcccggcagcaaggccgccttccggctgctgggcagtgatggcagccccctgatggacatgctgcagctggccgaggagcctgtgccccaggccggccaggagctgcgggtgtggcccccaggggcccaggagccctgcaccgtgcggcctgcccaggtggagcccctgctgcggctgtgcctgcagcagggccaggtggccgcccccccacccagcagctag

SEQ ID NO: 240518 - DNA, 1617 bp, Artificial Sequence
  derived and/or modified sequence
atggctgctgagcaggaccctgaggcccgggccgccgcccggcccctgctgacagacctgtaccaggccaccatggccctgggctactggagggctggccgggccagagatgctgctgagtttgagctgttcttccgccgctgcccctttggaggagcctttgccctggccgccggcctgcgggactgtgtgcgcttcctgcgggccttccggctgagagatgctgatgtgcagttcctggcctctgtgctgcccccagacacagatcctgccttctttgagcacctgcgggccctggactgcagcgaggtgacagtgcgggccctgcctgagggcagcctggccttccctggggtgcccctgctgcaggtgtctggccccctgctggtggtgcagctgctggagacccccctgctgtgcctggtgtcctatgccagcctggtggccaccaatgctgcccggctgcggctgattgctggccctgagaagaggctgctggagatgggcctgcggcgggcccagggcccagatggcggcctgacagccagcacctacagctacctgggcggctttgacagcagcagcaatgtgctggccggccagctgcggggcgtgcctgtggccggcaccctggcccacagctttgtgaccagcttcagcggcagcgaggtgcccccagaccccatgctggccccagctgctggggagggccctggggtggacctggccgccaaggcccaggtgtggctggagcaggtgtgtgcccacctgggcctgggcgtgcaggagccccaccctggagagcgggccgcctttgtggcctatgccctggccttcccccgggccttccagggcctgctggacacctacagcgtgtggaggagcggcctgcccaacttcctggccgtggccctggccctgggggagctgggctacagagctgtgggcgtgcggctggacagcggggacctgctgcagcaggcccaggagatcaggaaggtgttccgggctgctgctgcccagttccaggtgccctggctggagagcgtgctgattgtggtgagcaacaacattgatgaggaggccctggcccggctggcccaggagggcagcgaggtgaatgtcatcggcatcggcacctctgtggtgacctgcccccagcagcccagcctgggcggcgtgtacaagctggtggccgtgggcggccagcccaggatgaagctgacagaggaccctgagaagcagaccctgcccggcagcaaggccgccttccggctgctgggcagtgatggcagccccctgatggacatgctgcagctggccgaggagcctgtgccccaggccggccaggagctgcgggtgtggcccccaggggcccaggagccctgcaccgtgcggcctgcccaggtggagcccctgctgcggctgtgcctgcagcagggccagctgtgtgagcccctgcccagcctggccgagagccgggccctggcccagctgagcctgagccggctgagccctgagcaccggcggctgcggagccctgcccagtaccaggtggtgctgtctgagcggctgcaggccctggtgaacagcctgtgtgccggccagagcccctag

SEQ ID NO: 240519 - DNA, 1701 bp, Artificial Sequence
  derived and/or modified sequence
atggccgccgagcaggaccccgaggcccgggccgccgcccggcccctactgacggatttgtatcaagcgacgatggcccttgggtattggagagcaggaagggcaagagacgcggctgaattcgagttattcttcaggagatgtccgttcgggggcgcattcgccctcgcggccgggttaagagactgcgttcgcttccttagagctttccgactacgggatgctgatgtgcagtttctagcctccgtgctgccaccagacacagaccctgctttcttcgagcatcttcgggctctggattgttccgaagtgactgttagagctctcccagaagggtctctggcatttccaggcgttccactactgcaggtgtccggacctctgctggtagttcagcttctggaaactcctttactctgcctcgtctcctacgcaagcctggtggccacgaacgcggcaagactccgattaatcgccggccctgagaagcgtctcttagaaatgggtttaaggcgagcccaaggccctgatggtggcctcactgccagcacgtactcttacttggggggttttgactcctcttccaatgtcctggccgggcaactgcggggtgtgccggtagccggcacgctggctcatagcttcgtcacctcattctccggaagtgaagtcccgccggatcccatgctcgcacccgccgctggggaagggccgggtgtcgaccttgctgccaaggcccaagtctggctcgaacaggtgtgtgctcacctagggctgggggtccaggaaccacatccgggggagcgagccgcatttgtggcttacgcactcgcatttcctcgcgcgttccaggggctgcttgacacatattccgtttggcgcagcggactgcctaactttctggctgtcgctctggcgctcggcgaattgggataccgggccgtcggagttaggctagattccggtgatctgcttcagcaggcccaagaaattcgtaaagtgttccgcgccgccgcggcacagttccaggtaccctggctggagtctgtgctcatcgtggtgtctaacaatattgatgaggaagctctcgcccgacttgcccaggagggatccgaagtgaacgtgatcggcattggcacatctgtcgtgacctgcccacaacagcccagccttgggggagtttacaaattagtcgctgttggaggtcagccccgaatgaagctgaccgaggatccagagaagcagactctgcccggctctaaggccgcttttaggttactgggtagtgatgggtcccctttgatggacatgctgcagttagcagaggagcctgtcccacaggctggtcaagagttacgcgtctggccgcccggagcccaggagccatgcaccgtacgacccgcgcaagtggaacctctcctcagactctgtctgcaacaaggccagctttgcgagccgttgcccagcctggctgagtcgcgtgccctcgcacagctgtcactcagtaggctgtcaccagagcaccggcgtttgcggtcccctgcccagtaccaggtgggtggcggccccccatgccattccgcactttgcgcaccggctctgaccctccccaccgcacctgttttatgctccctccaagtggtactgtctgagagattacaggccctcgttaactccctctgtgctggacagagcccatag

SEQ ID NO: 240520 - DNA, 1473 bp, Artificial Sequence
  derived and/or modified sequence
atggccgccgagcaggaccccgaggcccgggccgccgcccggcccttgttaactgacctatatcaagcgaccatggcccttgggtattggagggccggacgtgctcgggatgctgccgagtttgagctgttcttccgtagatgtccctttggcggtgcttttgccctggcagcgggcctgagggattgtgtacgtttccttagagcatttcggctgcgtgatgcagacgtccagttcctagcctctgtgcttcctcccgatacggacccagcgtttttcgaacatctcagggcactcgactgcagcgaagtaaccgtgcgggccctgccagaaggcagcctggccttccccggcgtccccctcttgcaagtctcggggcctcttctggtcgtccaactgctcgaaacccctctgttgtgcctggtgagctatgcctcactggtggcaactaacgccgctcgacttcggctaatcgccgggcctgagaaacggctgctcgaaatgggactacggagagcacagggcccagatggaggcctgactgccagtacatatagttacttaggaggcttcgatagctcctcaaatgtccttgccgggcaactccgaggagtcccggtggccgggacactggcgcattctttcgtgacaagcttctccggcagcgaagtgcctcctgatccaatgcttgcccccgcggccggggaggggccaggtgtagatctggcggccaaggcgcaggtttggttggaacaagtctgtgcacacttgggtctcggagtacaggaaccgcacccgggggagagggcagcctttgttgcctacgccctcgcgttccccagagcctttcagggtttgttggacacctactctgtttggagatctggcctgcctaatttccttgccgtggcccttgccctcggagaactcggatatagagccgtaggagttcgattagactccggcgacctgctgcaacaggcacaggaaattcgaaaggtgtttcgcgcagcagccgctcagtttcaagtaccttggctggagtcagtcctgattgtggtctctaataatattgatgaagaggctctcgcccgtctcgcccaggaggggagtgaggtaaacgtcatagggattggaacatcagtcgtgacatgcccccaacagccaagcctcgggggcgtgtacaagttggtagccgttggtggacagccgcgcatgaagttgaccgaggatccagagaaacagacactgcccggatcgaaggcagcttttagacttttgggaagcgacggctccccgctgatggacatgttacagctcgccgaggaacctgtgccccaggcgggccaggaattgagggtttggcctccaggcgctcaggaaccatgcaccgtgcgtccagcccaggtggaaccactattaaggctttgcctgcagcagggccaggtcgccgcacctcctccgagttcttag

SEQ ID NO: 240521 - DNA, 1617 bp, Artificial Sequence
  derived and/or modified sequence
atggccgccgagcaggaccccgaggcccgggccgccgcccggcccctgttgaccgatctgtatcaagcaacaatggccctcggttactggcgggcggggcgggcccgggacgccgccgaatttgagctgttctttcgtcggtgtccctttgggggagcatttgctttagctgcaggcctgcgagactgtgtgcgcttcctccgggcctttaggttgcgcgacgcggacgtccagtttctggcaagtgtccttcccccagacacggaccccgcgtttttcgagcaccttcgtgccctggactgttctgaggtgaccgttagagctttgcctgaaggttccctcgctttcccaggtgtccccctccttcaggtgtcaggacccctgctggtcgtgcaactcctggaaaccccattattatgtctcgtcagctatgcatccttggtggctactaatgcagcacggctgcgtttgatagccggccccgagaaaagattgttagaaatgggattgcggcgggctcagggtcctgatggggggctcaccgcctctacttactcatacctcgggggcttcgacagttcctccaatgttctggctgggcaactgagaggggtgcctgtggccggcactctggcacatagctttgtgacttctttttccggttctgaagtgccacctgacccgatgctcgctcccgcagctggcgaagggcccggagtggacctagcagcgaaggcacaggtgtggctggagcaggtctgtgctcacttggggctcggtgtacaggagcctcaccccggtgaaagagctgcctttgttgcctacgctcttgcctttccaagagcatttcaggggcttcttgacacatattccgtatggcgcagtgggctgccgaacttcctagccgtcgcactcgccctgggcgagctggggtaccgagctgtcggcgtacgattggacagcggcgaccttctccagcaggcacaggagatccgaaaggtgtttcgggctgccgcagctcagttccaggtgccttggttggagtctgtgctgatcgtcgtgtctaataatatagatgaggaagcactggcgagactggcgcaggagggctccgaggtcaacgtgatcggcattggcacctccgtcgtcacatgtccacagcagcctagtttgggtggtgtttataagctagtagccgtggggggacagccaaggatgaagctcacggaggacccagagaaacagacgttacccggttccaaagctgccttcaggttgcttggcagcgacggctcccccttgatggacatgttgcagctcgctgaggaaccagttccacaagccggtcaagaactgcgcgtgtggccgccgggagcacaggagccatgtactgtgcgccctgcacaggtcgaaccccttctgcgcctctgccttcagcagggacagctgtgcgagccgctcccatccttggctgagtctagggcgttagcccagctctcattaagtcggttgtctccagagcacagacgcttacggtcacccgctcagtaccaggttgtgctgagtgaacggttacaggcactggtgaattctctctgcgcaggacagagcccgtag

SEQ ID NO: 240522 - DNA, 1721 bp, Artificial Sequence
  derived and/or modified sequence
gtccggacgtcgggagcaggatggcggcggagcaggaccccgaggcgcgcgcggcggcgcggccgctgctcactgacctctaccaggccaccatggcgttgggctattggcgcgcgggccgggcgcgggacgccgccgagttcgagctcttcttccgccgctgcccgttcggcggcgccttcgccttggccgccggcttgcgcgactgtgtgcgcttcctgcgcgccttccgcctgcgggacgccgacgtgcagttcctggcctcggtgctgcccccagacacggatcctgcgttcttcgagcaccttcgggccctcgactgctccgaggtgacggtgcgagccctgcccgagggctccctcgccttccccggagtgccgctcctgcaggtgtccgggccgctcctggtggtgcagctgctggagacaccgctgctctgcctggtcagctacgccagcctggtggccaccaacgcagcgcggcttcgcttgatcgcagggccagagaagcggctgctagagatgggcctgaggcgggctcagggccccgatgggggcctgacagcctccacctacagctacctgggcggcttcgacagcagcagcaacgtgctagcgggccagctgcgaggtgtgccggtggccgggaccctggcccactccttcgtcacttccttttcaggcagcgaggtgccccctgacccgatgttggcgccagcagctggtgagggccctggggtggacctggcggccaaagcccaggtgtggctggagcaggtgtgtgcccacctggggctgggggtgcaggagccgcatccaggcgagcgggcagcctttgtggcctatgccttggcttttccccgggccttccagggcctcctggacacctacagcgtgtggaggagtggtctccccaacttcctagcagtcgccctggccctgggagagctgggctaccgggcagtgggcgtgaggctggacagtggtgacctgctacagcaggctcaggagatccgcaaggtcttccgagctgctgcagcccagttccaggtgccctggctggagtcagtcctcatcgtagtcagcaacaacattgacgaggaggcgctggcccgactggcccaggagggcagtgaggtgaatgtcattggcattggcaccagtgtggtcacctgcccccaacagccttccctgggtggcgtctataagctggtggccgtggggggccagccacgaatgaagctgaccgaggaccccgagaagcagacgttgcctgggagcaaggctgctttccggctcctgggctctgacgggtctccactcatggacatgctgcagttagcagaagagccagtgccacaggctgggcaggagctgagggtgtggcctccaggggcccaggagccctgcaccgtgaggccagcccaggtggagccactactgcggctctgcctccagcagggacagctgtgtgagccgctcccatccctggcagagtctagagccttggcccagctgtccctgagccgactcagccctgagcacaggcggctgcggagccctgcacagtaccaggttgggggaggcccaccctgtcattctgccctgtgcgcccccgccctcaccctgcccaccgctcctgtcctctgctccctgcaggtggtgctgtccgagaggctgcaggccctggtgaacagtctgtgtgcggggcagtccccctga

SEQ ID NO: 240523 - DNA, 1877 bp, Artificial Sequence
  derived and/or modified sequence
gcggagtccggacgtcgggagcaggatggcggcggagcaggaccccgaggcgcgcgcggcggcgcggccgctgctcactgacctctaccaggccaccatggcgttgggctattggcgcgcgggccgggcgcgggacgccgccgagttcgagctcttcttccgccgctgcccgttcggcggcgccttcgccttggccgccggcttgcgcgactgtgtgcgcttcctgcgcgccttccgcctgcgggacgccgacgtgcagttcctggcctcggtgctgcccccagacacggatcctgcgttcttcgagcaccttcgggccctcgactgctccgaggtgacggtgcgagccctgcccgagggctccctcgccttccccggagtgccgctcctgcaggtgtccgggccgctcctggtggtgcagctgctggagacaccgctgctctgcctggtcagctacgccagcctggtggccaccaacgcagcgcggcttcgcttgatcgcagggccagagaagcggctgctagagatgggcctgaggcgggctcagggccccgatgggggcctgacagcctccacctacagctacctgggcggcttcgacagcagcagcaacgtgctagcgggccagctgcgaggtgtgccggtggccgggaccctggcccactccttcgtcacttccttttcaggcagcgaggtgccccctgacccgatgttggcgccagcagctggtgagggccctggggtggacctggcggccaaagcccaggtgtggctggagcaggtgtgtgcccacctggggctgggggtgcaggagccgcatccaggcgagcgggcagcctttgtggcctatgccttggcttttccccgggccttccagggcctcctggacacctacagcgtgtggaggagtggtctccccaacttcctagcagtcgccctggccctgggagagctgggctaccgggcagtgggcgtgaggctggacagtggtgacctgctacagcaggctcaggagatccgcaaggtcttccgagctgctgcagcccagttccaggtgccctggctggagtcagtcctcatcgtagtcagcaacaacattgacgaggaggcgctggcccgactggcccaggagggcagtgaggtgaatgtcattggcattggcaccagtgtggtcacctgcccccaacagccttccctgggtggcgtctataagctggtggccgtggggggccagccacgaatgaagctgaccgaggaccccgagaagcagacgttgcctgggagcaaggctgctttccggctcctgggctctgacgggtctccactcatggacatgctgcagttagcagaagagccagtgccacaggctgggcaggagctgagggtgtggcctccaggggcccaggagccctgcaccgtgaggccagcccaggtggagccactactgcggctctgcctccagcagggacaggtggctgccccaccgccctcatcctgacccccagccccggtagagccctgactgggagctagccccaagcttctctttccttacctcctccctgcagctgtgtgagccgctcccatccctggcagagtctagagccttggcccagctgtccctgagccgactcagccctgagcacaggcggctgcggagccctgcacagtaccaggttggggggaggcccaccctgtcattctgccctgtgcgcccccgccctcaccctgcccaccgctcctgtcctctgctccctgcaggtggtgctgtccgagaggctgcaggccctggtgaacagtctgtgtgcggggcagtccccctgagactcggagcggggctgactggaaacaacacgaatcactcacttttccccaca

SEQ ID NO: 240524 - DNA, 1965 bp, Artificial Sequence
  derived and/or modified sequence
gagacacgagcgactgggggcacctctggtgaccaagaccgggctgcgctccaaagaggccgttgggcctggagtggggttggggggtccgagaggagttgggtgacatcccccaccccatcccgggtccagctgtttcagcccctctcggcgcgccgatactattagccccacccgtcctccatcgagtcccgtgccgctcccaaacggcacgataagccccacagggagtgcgccataggccggggcgcgtcacggggtcggggcggggcggagtccggacgtcgggagcaggatggcggcggagcaggaccccgaggcgcgcgcggcggcgcggccgctgctcactgacctctaccaggccaccatggcgttgggctattggcgcgcgggccgggcgcgggacgccgccgagttcgagctcttcttccgccgctgcccgttcggcggcgccttcgccttggccgccggcttgcgcgactgtgtgcgcttcctgcgcgccttccgcctgcgggacgccgacgtgcagttcctggcctcggtgctgcccccagacacggatcctgcgttcttcgagcaccttcgggccctcgactgctccgaggtgacggtgcgagccctgcccgagggctccctcgccttccccggagtgccgctcctgcaggtgtccgggccgctcctggtggtgcagctgctggagacaccgctgctctgcctggtcagctacgccagcctggtggccaccaacgcagcgcggcttcgcttgatcgcagggccagagaagcggctgctagagatgggcctgaggcgggctcagggccccgatgggggcctgacagcctccacctacagctacctgggcggcttcgacagcagcagcaacgtgctagcgggccagctgcgaggtgtgccggtggccgggaccctggcccactccttcgtcacttccttttcaggcagcgaggtgccccctgacccgatgttggcgccagcagctggtgagggccctggggtggacctggcggccaaagcccaggtgtggctggagcaggtgtgtgcccacctggggctgggggtgcaggagccgcatccaggcgagcgggcagcctttgtggcctatgccttggcttttccccgggccttccagggcctcctggacacctacagcgtgtggaggagtggtctccccaacttcctagcagtcgccctggccctgggagagctgggctaccgggcagtgggcgtgaggctggacagtggtgacctgctacagcaggctcaggagatccgcaaggtcttccgagctgctgcagcccagttccaggtgccctggctggagtcagtcctcatcgtagtcagcaacaacattgacgaggaggcgctggcccgactggcccaggagggcagtgaggtgaatgtcattggcattggcaccagtgtggtcacctgcccccaacagccttccctgggtggcgtctataagctggtggccgtggggggccagccacgaatgaagctgaccgaggaccccgagaagcagacgttgcctgggagcaaggctgctttccggctcctgggctctgacgggtctccactcatggacatgctgcagttagcagaagagccagtgccacaggctgggcaggagctgagggtgtggcctccaggggcccaggagccctgcaccgtgaggccagcccaggtggagccactactgcggctctgcctccagcagggacagctgtgtgagccgctcccatccctggcagagtctagagccttggcccagctgtccctgagccgactcagccctgagcacaggcggctgcggagccctgcacagtaccaggtggtgctgtccgagaggctgcaggccctggtgaacagtctgtgtgcggggcagtccccctgagactcggagcggggctgactggaaacaacacgaatcactcacttttccccaca

SEQ ID NO: 240525 - DNA, 1701 bp, Artificial Sequence
  derived and/or modified sequence
atggcagctgagcaggaccccgaagctcgggctgcggctcggccactgttaacagatttgtatcaagcaaccatggcccttggatactggcgggcaggcagagccagagacgctgccgagtttgagctcttcttccgtagatgtccctttggcggagccttcgctctggctgccggactcagagattgcgtgcgcttcctgcgagcctttaggctccgggatgcggacgtccagttccttgcatcggtcctgcccccagacacggatcccgcattcttcgagcatctgcgagcgctagattgctctgaggttaccgtcagggctctgcctgagggatctttggcctttcccggagtgcctctgttgcaggtttccggacccctgcttgtagtgcaactcctggagacccccctgctgtgcctagtcagttacgcttctctggtagctactaatgccgctcgtctccgcctgattgcaggcccagagaagcggctgctggagatgggcttacggagggcccagggacccgatggaggcctgacggcctccacttactcgtacctcggcggattcgacagctcctctaatgtgctggccggtcaattgcgaggcgtccccgtggccggaaccctggcccattcttttgttacatcattctctgggtcagaggttccccctgaccccatgctggcacccgcagcgggagagggtcccggtgtagatctagctgcgaaagcccaggtttggctggaacaggtctgcgcacacttaggcctcggcgtgcaggaaccacaccccggagaaagggctgccttcgtcgcttacgctctcgcttttcctagagctttccagggtctgctcgacacttactccgtctggcgtagtggcctaccaaattttctggctgtcgccctggccctgggtgaactcggataccgggctgtcggtgttcgattagacagcggggacctcttgcaacaggcgcaggagatccgcaaagttttcagagcagccgctgcacagttccaggttccttggctggaatcagtgctgatcgtcgttagtaacaacatcgatgaagaagccttggccagactggcccaggaagggtctgaagtcaatgtgataggtatagggacttctgttgtgacttgcccacaacagccaagcctgggaggggtttacaagctagttgctgtgggcggtcagccgagaatgaaacttacagaagacccggaaaagcagacactgccgggatccaaggccgctttcaggctcctaggttcagatggaagccccttgatggatatgttgcaattagcagaggagcctgtcccacaagccggacaggagttgagagtatggcctccaggcgcacaagagccctgtacggtccggcctgcacaggtagaaccccttctgcgcctctgcctccagcagggccagttgtgcgaacccctgccgagccttgctgaatcaagagcacttgcccagttgtccctgtctagactttctccagagcaccgcaggctgagatcccctgcccagtaccaggtgggcggtggaccgccttgtcactctgctctttgcgctcccgctctgacgctcccgactgcaccggtcctctgttccctgcaggtcgtgctttctgagcggctgcaggccctggttaatagcctctgcgctggccagagcccatag

SEQ ID NO: 240526 - DNA, 1473 bp, Artificial Sequence
  derived and/or modified sequence
atggcagccgaacaggacccagaggcacgggcagccgcacggccattactcacggatctttaccaagcaaccatggctcttgggtactggcgcgcaggcagggccagggacgctgccgaatttgagctgttctttcggcgttgtccctttggtggagccttcgctctggccgcaggattgcgcgactgtgtcaggttcctcagggccttcagactgcgggacgccgatgttcaatttctcgccagcgttctcccgccagacactgatcctgcttttttcgagcacctccgtgccttagactgttctgaagttactgtgagagcgcttcctgaggggtccttggccttccctggagttcccttgctgcaggtttcaggccctctgctggttgtacagctcttggagacacctctgctgtgcctcgtgtcgtacgcttccctagtggccaccaacgcagcccgtctgaggctgattgcagggcctgaaaagagactgctagagatggggttgcggagagcccagggtccagatgggggattgactgcctcaacatatagttacctggggggttttgacagctcatctaacgtactggccggacagttacgaggcgtcccggtggccggaacgctcgcacactcctttgtgacttcttttagcggttcagaagtccccccagatccaatgctagccccagctgctggcgagggccctggagtcgacctggccgcaaaggcccaagtctggctcgaacaggtgtgtgctcaccttgggctgggggttcaagagccacatccaggcgagcgcgctgcctttgtggcctacgcactggcttttccacgtgctttccaaggattgctagacacctattccgtatggcgcagcggccttcctaactttctggccgtggctttggcacttggcgagctgggttaccgcgctgtgggagtgcggctcgactctggtgacctcctacagcaagcccaggagatcagaaaggtgtttagagccgctgctgcccagttccaggtgccctggctcgagtccgtcttaatcgtggtttctaataacatcgatgaggaagcactcgccaggttggctcaggaaggcagcgaagtgaacgttatcggaatcggaacaagtgtggttacgtgcccgcagcagcccagtctgggaggcgtgtacaagctcgtcgctgttggaggccagccaagaatgaagctgaccgaggaccccgagaaacagacgctgccagggagcaaggctgcatttcggttactggggagtgacgggagtccgttgatggacatgctgcagctggccgaggaaccagtgccccaagctgggcaggagctgcgcgtttggcctcctggagcacaggagccctgcacagtaagacccgctcaagtcgaaccgttgttgagactgtgtttacagcagggccaggtggctgcgccaccgccatccagctag

SEQ ID NO: 240527 - DNA, 1617 bp, Artificial Sequence
  derived and/or modified sequence
atggccgcagagcaggatcctgaggcacgggctgctgccaggcctctattaacggacctgtaccaggcaactatggcactcggatactggcgtgctggacgcgcaagagatgcggctgagttcgaattgtttttccgtagatgtcccttcggcggagctttcgcgctggccgcaggactcagggattgtgtgcggtttcttcgagccttcaggttaagggatgctgacgtgcagttcttggccagcgtgttgccacctgacaccgaccccgctttttttgagcaccttagggccctggattgcagtgaagtgaccgtgagggccctccccgaggggagccttgctttccccggagtccctctgcttcaagtctctggtcccctcctggtggtgcagctgttggagactccgctgctgtgtttagtttcctacgcctcactggtcgccaccaatgcagctcgtctcaggctgatcgcgggacccgaaaaacggcttttggaaatgggtcttcggcgtgctcagggcccagatggcggacttaccgcctccacatactcctacctcggcggtttcgactcctcctccaatgttctagcagggcagcttaggggagtgcctgtggccggaaccctggctcactcctttgtcacttccttctctggcagcgaagtgcctccagaccctatgctggcacccgctgcaggcgaggggcctggggtagatctggcagccaaagcccaggtgtggctggagcaggtgtgtgcccacctaggattgggtgtgcaggagccacatcccggtgagagggcagccttcgttgcatatgcgctggccttccctagagcctttcagggtctactggacacctacagtgtttggcggagtgggctgcctaattttctcgccgtagcccttgccctcggagaactcggctatcgggctgtaggtgttcgtctagactcaggtgatctgctgcaacaagcccaggagatacgcaaggtgttcagagccgctgctgcccagttccaagtcccttggctcgagtccgtgctgattgttgtttcaaataacattgacgaagaggccctggcccgactggcccaggagggtagcgaggtaaatgttatcggcataggaaccagcgttgtgacgtgtccccagcagcccagcctgggtggcgtgtataagctggtagccgtcgggggacagccaagaatgaagcttacagaagacccggaaaagcagacacttcccggtagcaaggccgcttttcggttgctcggttctgacggctccccactcatggatatgctccaattagctgaagagccagtgccacaggctgggcaggaactgcgggtgtggccacctggggctcaggagccttgcaccgtgcgacccgctcaggtcgagccgctccttcgactgtgtctgcagcaaggccagctatgcgagcctctaccatcacttgcggagtcacgcgctctcgcccaattgtccttgagccgtctgagccctgaacataggagactcaggtctcccgcacagtaccaagtggtcctgagtgagaggctgcaggctctggttaattcattgtgcgctggtcaaagcccctag

SEQ ID NO: 240528 - DNA, 1701 bp, Artificial Sequence
  derived and/or modified sequence
atggccgccgagcaggaccccgaggccagagccgccgccagacccctgctgaccgacctgtaccaggccaccatggccctgggctactggagagccggcagagccagagacgccgccgagttcgagctgttcttcagaagatgccccttcggcggcgccttcgccctggccgccggcctgagagactgcgtgagattcctgagagccttcagactgagagacgccgacgtgcagttcctggccagcgtgctgccccccgacaccgaccccgccttcttcgagcacctgagagccctggactgcagcgaggtgaccgtgagagccctgcccgagggcagcctggccttccccggcgtgcccctgctgcaggtgagcggccccctgctggtggtgcagctgctggagacccccctgctgtgcctggtgagctacgccagcctggtggccaccaacgccgccagactgagactgatcgccggccccgagaagagactgctggagatgggcctgagaagagcccagggccccgacggcggcctgaccgccagcacctacagctacctgggcggcttcgacagcagcagcaacgtgctggccggccagctgagaggcgtgcccgtggccggcaccctggcccacagcttcgtgaccagcttcagcggcagcgaggtgccccccgaccccatgctggcccccgccgccggcgagggccccggcgtggacctggccgccaaggcccaggtgtggctggagcaggtgtgcgcccacctgggcctgggcgtgcaggagccccaccccggcgagagagccgccttcgtggcctacgccctggccttccccagagccttccagggcctgctggacacctacagcgtgtggagaagcggcctgcccaacttcctggccgtggccctggccctgggcgagctgggctacagagccgtgggcgtgagactggacagcggcgacctgctgcagcaggcccaggagatcagaaaggtgttcagagccgccgccgcccagttccaggtgccctggctggagagcgtgctgatcgtggtgagcaacaacatcgacgaggaggccctggccagactggcccaggagggcagcgaggtgaacgtgatcggcatcggcaccagcgtggtgacctgcccccagcagcccagcctgggcggcgtgtacaagctggtggccgtgggcggccagcccagaatgaagctgaccgaggaccccgagaagcagaccctgcccggcagcaaggccgccttcagactgctgggcagcgacggcagccccctgatggacatgctgcagctggccgaggagcccgtgccccaggccggccaggagctgagagtgtggccccccggcgcccaggagccctgcaccgtgagacccgcccaggtggagcccctgctgagactgtgcctgcagcagggccagctgtgcgagcccctgcccagcctggccgagagcagagccctggcccagctgagcctgagcagactgagccccgagcacagaagactgagaagccccgcccagtaccaggtgggcggcggccccccctgccacagcgccctgtgcgcccccgccctgaccctgcccaccgcccccgtgctgtgcagcctgcaggtggtgctgagcgagagactgcaggccctggtgaacagcctgtgcgccggccagagcccctag

SEQ ID NO: 240529 - DNA, 1473 bp, Artificial Sequence
  derived and/or modified sequence
atggccgccgagcaggaccccgaggccagagccgccgccagacccctgctgaccgacctgtaccaggccaccatggccctgggctactggagagccggcagagccagagacgccgccgagttcgagctgttcttcagaagatgccccttcggcggcgccttcgccctggccgccggcctgagagactgcgtgagattcctgagagccttcagactgagagacgccgacgtgcagttcctggccagcgtgctgccccccgacaccgaccccgccttcttcgagcacctgagagccctggactgcagcgaggtgaccgtgagagccctgcccgagggcagcctggccttccccggcgtgcccctgctgcaggtgagcggccccctgctggtggtgcagctgctggagacccccctgctgtgcctggtgagctacgccagcctggtggccaccaacgccgccagactgagactgatcgccggccccgagaagagactgctggagatgggcctgagaagagcccagggccccgacggcggcctgaccgccagcacctacagctacctgggcggcttcgacagcagcagcaacgtgctggccggccagctgagaggcgtgcccgtggccggcaccctggcccacagcttcgtgaccagcttcagcggcagcgaggtgccccccgaccccatgctggcccccgccgccggcgagggccccggcgtggacctggccgccaaggcccaggtgtggctggagcaggtgtgcgcccacctgggcctgggcgtgcaggagccccaccccggcgagagagccgccttcgtggcctacgccctggccttccccagagccttccagggcctgctggacacctacagcgtgtggagaagcggcctgcccaacttcctggccgtggccctggccctgggcgagctgggctacagagccgtgggcgtgagactggacagcggcgacctgctgcagcaggcccaggagatcagaaaggtgttcagagccgccgccgcccagttccaggtgccctggctggagagcgtgctgatcgtggtgagcaacaacatcgacgaggaggccctggccagactggcccaggagggcagcgaggtgaacgtgatcggcatcggcaccagcgtggtgacctgcccccagcagcccagcctgggcggcgtgtacaagctggtggccgtgggcggccagcccagaatgaagctgaccgaggaccccgagaagcagaccctgcccggcagcaaggccgccttcagactgctgggcagcgacggcagccccctgatggacatgctgcagctggccgaggagcccgtgccccaggccggccaggagctgagagtgtggccccccggcgcccaggagccctgcaccgtgagacccgcccaggtggagcccctgctgagactgtgcctgcagcagggccaggtggccgcccccccccccagcagctag

SEQ ID NO: 240530 - DNA, 1617 bp, Artificial Sequence
  derived and/or modified sequence
atggccgccgagcaggaccccgaggccagagccgccgccagacccctgctgaccgacctgtaccaggccaccatggccctgggctactggagagccggcagagccagagacgccgccgagttcgagctgttcttcagaagatgccccttcggcggcgccttcgccctggccgccggcctgagagactgcgtgagattcctgagagccttcagactgagagacgccgacgtgcagttcctggccagcgtgctgccccccgacaccgaccccgccttcttcgagcacctgagagccctggactgcagcgaggtgaccgtgagagccctgcccgagggcagcctggccttccccggcgtgcccctgctgcaggtgagcggccccctgctggtggtgcagctgctggagacccccctgctgtgcctggtgagctacgccagcctggtggccaccaacgccgccagactgagactgatcgccggccccgagaagagactgctggagatgggcctgagaagagcccagggccccgacggcggcctgaccgccagcacctacagctacctgggcggcttcgacagcagcagcaacgtgctggccggccagctgagaggcgtgcccgtggccggcaccctggcccacagcttcgtgaccagcttcagcggcagcgaggtgccccccgaccccatgctggcccccgccgccggcgagggccccggcgtggacctggccgccaaggcccaggtgtggctggagcaggtgtgcgcccacctgggcctgggcgtgcaggagccccaccccggcgagagagccgccttcgtggcctacgccctggccttccccagagccttccagggcctgctggacacctacagcgtgtggagaagcggcctgcccaacttcctggccgtggccctggccctgggcgagctgggctacagagccgtgggcgtgagactggacagcggcgacctgctgcagcaggcccaggagatcagaaaggtgttcagagccgccgccgcccagttccaggtgccctggctggagagcgtgctgatcgtggtgagcaacaacatcgacgaggaggccctggccagactggcccaggagggcagcgaggtgaacgtgatcggcatcggcaccagcgtggtgacctgcccccagcagcccagcctgggcggcgtgtacaagctggtggccgtgggcggccagcccagaatgaagctgaccgaggaccccgagaagcagaccctgcccggcagcaaggccgccttcagactgctgggcagcgacggcagccccctgatggacatgctgcagctggccgaggagcccgtgccccaggccggccaggagctgagagtgtggccccccggcgcccaggagccctgcaccgtgagacccgcccaggtggagcccctgctgagactgtgcctgcagcagggccagctgtgcgagcccctgcccagcctggccgagagcagagccctggcccagctgagcctgagcagactgagccccgagcacagaagactgagaagccccgcccagtaccaggtggtgctgagcgagagactgcaggccctggtgaacagcctgtgcgccggccagagcccctag

SEQ ID NO: 240531 - protein, 152 aa, Artificial Sequence
  derived and/or modified sequence
MRRLLLVTSLVVVLLWEAGAVPAPKVPIKMQVKHWPSEQDPENRAWGARVVEPPEKDDQLVVLFPVQKPKLLTTEEKPRGQGRGPILPGTKAWMETEDTLGHVLSPEPDHDSLYHPPPEEDQGEERPRLWVMPNHQVLLGPEEDQDHIYHPQ

SEQ ID NO: 240532 - protein, 151 aa, Artificial Sequence
  derived and/or modified sequence
MRRLLLVTSLVVVLLWEAGAVPAPKVPIKMQVKHWPSEQDPEKAWGARVVEPPEKDDQLVVLFPVQKPKLLTTEEKPRGQGRGPILPGTKAWMETEDTLGHVLSPEPDHDSLYHPPPEEDQGEERPRLWVMPNHQVLLGPEEDQDHIYHPQ

SEQ ID NO: 240533 - DNA, 459 bp, Artificial Sequence
  derived and/or modified sequence
atgagacgtctgctgctggtgacatctttagtggtcgtgcttctctgggaggcaggagccgtgcccgccccaaaagtgccaattaagatgcaggtcaaacactggcccagtgaacaggatccagagaatagggcatggggggcaagggttgttgagccacccgaaaaggatgaccagctggtcgttctattccccgtacagaagccgaagctgctgactaccgaagagaagccaagaggccaaggtcggggacccatcctacccgggacgaaagcctggatggagactgaagacaccctgggacatgttctgtctcccgagccagaccacgatagcttgtaccatcctcccccagaggaggaccagggcgaggaacgtcccaggctgtgggtaatgcctaatcatcaggtgctcttaggacccgaggaggatcaggaccacatctaccatccacagtag

SEQ ID NO: 240534 - DNA, 456 bp, Artificial Sequence
  derived and/or modified sequence
atgcgacgccttttgcttgtgacgagtctggtggttgtgctgctgtgggaggccggcgcggtgccagcaccgaaggtgcctatcaaaatgcaggttaagcactggccctcggagcaggacccagaaaaagcgtggggcgctagggttgtagaacctcctgagaaggatgatcagttggtggtgctctttcccgtccaaaagcccaagctgcttactactgaggaaaagcccaggggacagggacgagggcctatcctgccggggaccaaggcctggatggagactgaggacaccctcggccacgtcttgagtcctgaaccggatcacgattccttgtatcacccaccgcctgaggaagaccagggcgaggaacgaccacgactgtgggttatgccaaaccatcaggtgctactgggtccggaagaagatcaggaccacatttatcacccacagtag

SEQ ID NO: 240535 - DNA, 459 bp, Artificial Sequence
  derived and/or modified sequence
atgaggcggctgctgctggtgaccagcctggtggtggtgctgctgtgggaggccggggctgtgcctgcccccaaggtgcccatcaagatgcaggtgaagcactggcccagcgagcaggaccctgagaacagagcctggggcgcccgggtggtggagcccccagagaaggatgaccagctggtggtgctcttccctgtgcagaagcccaagctgctgaccacagaggagaagccccggggccagggccggggccccatcctgcccggcaccaaggcctggatggagacagaggacaccctgggccacgtgctgagccctgagccagaccatgacagcctgtaccaccccccacctgaggaggaccagggcgaggagcggccccggctgtgggtgatgcccaaccaccaggtgctgctgggccctgaggaggaccaggaccacatctaccacccccagtag

SEQ ID NO: 240536 - DNA, 456 bp, Artificial Sequence
  derived and/or modified sequence
atgaggcggctgctgctggtgaccagcctggtggtggtgctgctgtgggaggccggggctgtgcctgcccccaaggtgcccatcaagatgcaggtgaagcactggcccagcgagcaggaccctgagaaggcctggggcgcccgggtggtggagcccccagagaaggatgaccagctggtggtgctcttccctgtgcagaagcccaagctgctgaccacagaggagaagccccggggccagggccggggccccatcctgcccggcaccaaggcctggatggagacagaggacaccctgggccacgtgctgagccctgagccagaccatgacagcctgtaccaccccccacctgaggaggaccagggcgaggagcggccccggctgtgggtgatgcccaaccaccaggtgctgctgggccctgaggaggaccaggaccacatctaccacccccagtag

SEQ ID NO: 240537 - DNA, 459 bp, Artificial Sequence
  derived and/or modified sequence
atgcggcggctgctgctggtgaccagcctggtggtggtgctgctgtgggaagctggagccgtgcccgctccaaaagtacctatcaagatgcaggtgaagcattggccgtcggagcaggatccagagaatcgggcatggggggcccgtgtggtggagccaccagagaaggacgatcagctcgtggtgttatttccagtgcagaagcccaaacttctcacgactgaggaaaaacctcgcggccagggccgaggacccattctgccggggacaaaagcctggatggaaacagaggataccctcggtcacgtgctctcgcccgagccagaccacgattcgctgtatcatcccccacccgaggaagatcagggcgaggagcgccctaggctctgggtgatgcctaaccaccaagtgctgctcgggccggaggaggatcaggatcacatttatcatccgcagtag

SEQ ID NO: 240538 - DNA, 456 bp, Artificial Sequence
  derived and/or modified sequence
atgcggcggctgctgctggtgaccagcctggtggtggtgctgctgtgggaagcaggagctgtcccggcacccaaagttccaattaagatgcaagtgaagcattggccctctgaacaggaccccgagaaagcgtggggggctagagtcgtggagccccccgaaaaggacgaccagctggtcgtcctgtttcctgtgcagaagcctaaacttctgaccactgaggaaaagccaaggggtcagggacggggccccatcctgcctgggaccaaagcctggatggagacagaggacactctgggacacgtactcagcccagagcccgatcacgactccttgtatcatcctccacccgaggaagaccagggagaggagaggccgcggctgtgggtgatgcctaaccaccaagtcctgcttggtcccgaggaagaccaagatcacatttaccacccacagtag

SEQ ID NO: 240539 - DNA, 459 bp, Artificial Sequence
  derived and/or modified sequence
atgaggaggctgctcttggtgactagcttagttgtcgtccttctgtgggaggctggcgcagttcctgccccaaaagtccccatcaaaatgcaggtcaaacattggcccagtgagcaggatcccgaaaaccgagcctggggagcaagagtggtggagccccctgagaaggatgaccagttggtagtgctgtttcctgtgcagaagcccaagctgttgacaacagaagagaagccacggggtcaggggaggggtcccattctcccaggcactaaggcgtggatggagacagaggacaccctcggccacgtgctgagcccagaaccagatcatgactcactctatcacccgcctccagaggaagaccaaggggaggagcgccctagactttgggtgatgccaaatcaccaagtgctgttaggccctgaagaggaccaggaccatatatatcatccccaatag

SEQ ID NO: 240540 - DNA, 456 bp, Artificial Sequence
  derived and/or modified sequence
atgcgtaggctcctcctggtcacctctctggtcgtcgtgctgctgtgggaggctggcgctgttccagccccaaaagttccgattaagatgcaggtcaaacactggccttctgagcaggatcccgaaaaagcctggggggcacgggtcgttgaaccgcctgagaaggacgaccaattggtggtgctgtttccagtccagaagccaaaattgctgacaacagaggaaaaaccacgaggtcaaggacggggtccaattcttcctggcaccaaggcgtggatggagaccgaggataccttaggccacgtgctgtccccagagcccgaccatgattcactgtatcacccacctcctgaggaggatcagggggaggaacgccctcgattgtgggtcatgccaaatcatcaggtgctgcttgggcctgaggaagatcaggatcacatctaccatcctcagtag

SEQ ID NO: 240541 - DNA, 780 bp, Artificial Sequence
  derived and/or modified sequence
agctgggccgggtgccagatactgggatcagccactgcagctccctgagcactctctacagagacgcggaccccagacatgaggaggctcctcctggtcaccagcctggtggttgtgctgctgtgggaggcaggtgcagtcccagcacccaaggtccctatcaagatgcaagtcaaacactggccctcagagcaggacccagagaacagggcctggggcgcccgtgtggtggagcctccggagaaggacgaccagctggtggtgctgttccctgtccagaagccgaaactcttgaccaccgaggagaagccacgaggtcagggcaggggccccatccttccaggcaccaaggcctggatggagaccgaggacaccctgggccatgtcctgagtcccgagcccgaccatgacagcctgtaccaccctccgcctgaggaggaccagggcgaggagaggccccggttgtgggtgatgccaaatcaccaggtgctcctgggaccggaggaagaccaagaccacatctaccacccccagtagggctccaggggccatcactgcccccgccctgtcccaaggcccaggctgttgggactgggaccctccctaccctgccccagctagacaaataaaccccagcaggccgggcgcggtggctcacctctgtaatcccagcacttttagaggccgaggcaggcggatcacctgaaatcaggagttccagaccagcctgggcaacatggtgaaaccccgtctctactaaaaatacaaaaattagccggg

SEQ ID NO: 240542 - DNA, 971 bp, Artificial Sequence
  derived and/or modified sequence
tcttcctcagtcgtgtggcaggccctgagcaggcagctgggtgtccccgctcagatccaggcccgagtgggctgggcggctgcagagccagtcacctgagctacccagggtgggatccctggccccgacctctgtcctgacacgccccaagcggcagcaacaaagccccaattggcctgggcctgggcaggaggagctgggccgggtgccagatactgggatcagccactgcagctccctgagcactctctacagagacgcggaccccagacatgaggaggctcctcctggtcaccagcctggtggttgtgctgctgtgggaggcaggtgcagtcccagcacccaaggtccctatcaagatgcaagtcaaacactggccctcagagcaggacccagagaaggcctggggcgcccgtgtggtggagcctccggagaaggacgaccagctggtggtgctgttccctgtccagaagccgaaactcttgaccaccgaggagaagccacgaggtcagggcaggggccccatccttccaggcaccaaggcctggatggagaccgaggacaccctgggccatgtcctgagtcccgagcccgaccatgacagcctgtaccaccctccgcctgaggaggaccagggcgaggagaggccccggttgtgggtgatgccaaatcaccaggtgctcctgggaccggaggaagaccaagaccacatctaccacccccagtagggctccaggggccatcactgcccccgccctgtcccaaggcccaggctgttgggactgggaccctccctaccctgccccagctagacaaataaaccccagcaggccgggcgcggtggctcacctctgtaatcccagcacttttagaggccgaggcaggcggatcacctgaaatcaggagttccagaccagcctgggcaacatggtgaaaccccgtctctactaaaaatacaaaaattagccggg

SEQ ID NO: 240543 - DNA, 459 bp, Artificial Sequence
  derived and/or modified sequence
atgagaagactgctgctggtgaccagcctggtggtggtgctgctgtgggaggccggcgccgtgcccgcccccaaggtgcccatcaagatgcaggtgaagcactggcccagcgagcaggaccccgagaacagagcctggggcgccagagtggtggagccccccgagaaggacgaccagctggtggtgctgttccccgtgcagaagcccaagctgctgaccaccgaggagaagcccagaggccagggcagaggccccatcctgcccggcaccaaggcctggatggagaccgaggacaccctgggccacgtgctgagccccgagcccgaccacgacagcctgtaccaccccccccccgaggaggaccagggcgaggagagacccagactgtgggtgatgcccaaccaccaggtgctgctgggccccgaggaggaccaggaccacatctaccacccccagtag

SEQ ID NO: 240544 - DNA, 456 bp, Artificial Sequence
  derived and/or modified sequence
atgagaagactgctgctggtgaccagcctggtggtggtgctgctgtgggaggccggcgccgtgcccgcccccaaggtgcccatcaagatgcaggtgaagcactggcccagcgagcaggaccccgagaaggcctggggcgccagagtggtggagccccccgagaaggacgaccagctggtggtgctgttccccgtgcagaagcccaagctgctgaccaccgaggagaagcccagaggccagggcagaggccccatcctgcccggcaccaaggcctggatggagaccgaggacaccctgggccacgtgctgagccccgagcccgaccacgacagcctgtaccaccccccccccgaggaggaccagggcgaggagagacccagactgtgggtgatgcccaaccaccaggtgctgctgggccccgaggaggaccaggaccacatctaccacccccagtag

SEQ ID NO: 240545 - protein, 217 aa, Artificial Sequence
  derived and/or modified sequence
MSSDFEGYEQDFAVLTAEITSKIARVPRLPPDEKKQMVANVEKQLEEAKELLEQMDLEVREIPPQSRGMYSNRMRSYKQEMGKLETDFKRSRIAYSDEVRNELLGDDGNSSENQRAHLLDNTERLERSSRRLEAGYQIAVETEQIGQEMLENLSHDREKIQRARERLRETDANLGKSSRILTGMLRRIIQNRILLVILGIIVVITILMAITFSVRRH

SEQ ID NO: 240546 - DNA, 654 bp, Artificial Sequence
  derived and/or modified sequence
atgagcagcgacttcgagggctacgagcaggacttcgccgtgctgaccgccgagatcaccagcaagatcgccagagtgcccagactgccccccgacgagaagaagcagatggtggccaacgtggagaagcagctggaggaggccaaggagctgctggagcagatggacctggaggtgagagagatccccccccagagcagaggcatgtacagcaacagaatgagaagctacaagcaggagatgggcaagctggagaccgacttcaagagaagcagaatcgcctacagcgacgaggtgagaaacgagctgctgggcgacgacggcaacagcagcgagaaccagagagcccacctgctggacaacaccgagagactggagagaagcagcagaagactggaggccggctaccagatcgccgtggagaccgagcagatcggccaggagatgctggagaacctgagccacgacagagagaagatccagagagccagagagagactgagagagaccgacgccaacctgggcaagagcagcagaatcctgaccggcatgctgagaagaatcatccagaacagaatcctgctggtgatcctgggcatcatcgtggtgatcaccatcctgatggccatcaccttcagcgtgagaagacactag

SEQ ID NO: 240547 - DNA, 654 bp, Artificial Sequence
  derived and/or modified sequence
atgagctctgacttcgagggatacgaacaggatttcgcagtgctcaccgcagaaatcactagcaagatcgccagagtcccgcgactgcctcctgatgaaaagaaacagatggtggctaacgtcgaaaaacagctcgaggaggccaaggaactgctagagcagatggacctggaggtgcgcgaaatacctcctcagtccaggggtatgtattctaaccgtatgcggagctacaagcaggaaatggggaaactggagacagattttaaaagatcacgaattgcctattccgacgaggtcagaaatgagctgttgggggacgacgggaacagctcagagaaccagagagctcacctccttgataatacggaacgactggaacgcagtagcagacggctagaggccgggtatcagattgctgtcgagaccgaacagattggtcaggagatgctggaaaacttatcacacgaccgtgaaaagatccagagggcaagagagagactgcgagaaacagatgctaacctgggcaaatcgagtcgcatcttgactggcatgctgcgccgcataattcagaataggattctgttagtgattctcggtatcatcgttgtcattacaatcctgatggccataacctttagtgttagacgacattag

SEQ ID NO: 240548 - DNA, 654 bp, Artificial Sequence
  derived and/or modified sequence
atgagcagtgactttgagggctatgagcaggactttgctgtgctgacagctgagatcaccagcaagatcgcccgggtgccccggctgcccccagatgagaagaagcagatggtggccaacgtggagaagcagctggaggaggccaaggagctgctggagcagatggacctggaggtgcgggagatccccccccagagccggggcatgtacagcaacaggatgaggagctacaagcaggagatgggcaagctggagacagacttcaagaggagcagaattgcctacagtgatgaggtgagaaatgagctgctgggagatgatggcaacagcagcgagaaccagagggcccacctgctggacaacacagagcggctggagaggagcagccggcggctggaggccggctaccagattgctgtggagacagagcagatcggccaggagatgctggagaacctgagccatgaccgggagaagatccagagggcccgggagcggctgcgggagacagatgccaacctgggcaagagcagccgcatcctgaccggcatgctgcggcgcatcatccagaaccgcatcctgctggtgatcctgggcatcatcgtggtgatcaccatcctgatggccatcaccttctctgtgagaagacactag

SEQ ID NO: 240549 - DNA, 654 bp, Artificial Sequence
  derived and/or modified sequence
atgagcagcgacttcgagggctacgagcaggacttcgccgtgctgacagctgaaattacgtcaaaaattgcgcgcgtgcctcgccttccaccggacgagaagaagcagatggttgccaacgtagagaagcaactcgaggaagccaaggagcttctcgagcagatggatcttgaggtcagagagatacctccccaaagtagaggtatgtacagcaacaggatgcgtagttataaacaggagatgggaaagctagagacggacttcaagaggagtaggatcgcgtactctgacgaggtcagaaacgaactactgggcgacgacggtaactcctccgagaatcaaagagcccaccttttagataacactgagagactagagcggtccagccggcgacttgaagctggttaccagattgcggtcgaaaccgagcagatcgggcaggaaatgctcgagaatctcagccatgaccgcgagaaaattcagcgggcccgggagcggctcagggagacggacgccaacctagggaagtccagtcgcattctcaccggcatgctgaggcgaatcatacagaatcgcatcttgcttgtaatcctcggcataatagtggtaatcacaattctgatggctatcacgttctcagtgagaaggcattag

SEQ ID NO: 240550 - DNA, 654 bp, Artificial Sequence
  derived and/or modified sequence
atgtcaagcgatttcgaaggctatgaacaagatttcgcagtcttgacggccgagataacttctaaaattgcaagagtgcctcgcctgcctcccgacgagaagaagcaaatggtggctaacgtagaaaagcaactggaagaagccaaagagttacttgagcagatggacttagaggtccgcgagataccaccacagagccggggaatgtattctaatcgaatgaggagttataagcaagaaatgggcaaactggaaactgatttcaaacggtcccgaatagcctatagtgacgaagtgaggaatgagctgctgggcgacgatgggaattcctcggagaatcagagggcccatctcctggacaatacagagaggctggagcgatcaagtcggagactggaggcaggttaccagatcgccgtagagactgaacagattggccaagagatgctggagaatctatcccacgatagagagaaaatccaacgcgctcgggaaaggctgagagagactgacgcaaacctcgggaaaagtagccggatcttaacaggcatgctgagaagaatcatccagaaccggattcttctcgttatcctgggcataatcgtggtgattacgattcttatggctataacatttagcgtccgaagacactag

SEQ ID NO: 240551 - DNA, 4131 bp, Artificial Sequence
  derived and/or modified sequence
ccgttctgctctcgggggcaccttccggggttcctaagccgcggggcccctcgctgcccctcgaggccctttccctgacctaggctttggcctgggctactcgttccggagccgccatgtcgtccgacttcgaaggttacgagcaggacttcgcggtgctcactgcagagatcaccagcaagattgcgagggtcccacgactcccgcctgatgaaaagaaacagatggttgcaaatgtggagaaacagcttgaagaagcgaaagaactgcttgaacagatggatttggaagtccgagagataccaccccaaagtcgagggatgtacagcaacagaatgagaagctacaaacaagaaatgggaaaactcgaaacagattttaaaaggtcacggatcgcctacagtgacgaagtacggaatgagctcctgggggatgatgggaattcctcagagaaccagagggcacatctgctcgataacacagagaggctggaaaggtcatctcggagactagaggctggataccaaatagcagtggaaaccgagcaaattggtcaggagatgttggaaaaccttagtcatgacagagaaaagatacagcgagcacgtgaaagacttcgggaaacagatgctaatttgggaaaaagctccaggattctgacagggatgttgcgaagaatcatccagaaccgcatcctgctcgtcatcctagggatcatcgtggtcatcaccatcctgatggcgatcactttttctgtcagaagacactgatgtatctgctctcccttgataaacagcaacaacagcttgttctgagtaattaagacaaaatggtcacatgaatcattctgttgcgctgacaggccccaggtgaccctctctctccctcaccgccgttgggctgaagtgcaaagagtgtaaaaatattttctattcctgtttgcatgtgggttggtttccttttcgaggtttgtcttcacccagattcgttttttagaggggaaggtgaatgtttatttacctttttgctaatgtcatcaactagccaaaatagccccagtgacactcctagccctctggacgtgtcaagggccgtggtttgggagaggacatgatgagtcagtcacgagagcttctgtttgtcacccgcctcttgttgctgaaaagctcttctgtgatgtctgaggataaaaatgcagcaaaaagcaggggatggagtcagtgaccccgtccagcaagccagccctgttcctacacaggcctcatgaatatagtcatcaacctgcctgagtgctttcattgtaaaggtcggtatttaatgtcggttgtacaggaaattgacttagcactttccctgtttttctattgcataattttttttttaacccaaagatattttttttgctgagcctgcccagtattcactgttcacaactttgattactggctacaagaaatattttcttgccttccccaaatcccatactccccagaatctgctggcaaagtgagccctggtacaggatttaattgtgacctcgtcttccctgacctgtgtaagcatctctgtatcctttcggttttaatatctgcactgccaaaagcagtcctcatacttgcaaaaggtctgacaaggttctctccacatacattccagtatgtaaagagaccatgaatatttcagtaagagcaagaacatgactccatcagtgtgaaatttcaaatgtgattataaatatgggagagtcctataggagggtccaccagagataaacttcacggaaaacgttccctaacctcctttaaaagaatagaggatggcagattgttccaaaaggaatggcttgggtttttaactaacaaatgttagcaagcctttcttgaattcactatgtattcaaacttctaatatgctttgtgatttttttctttcatttctttctgtctgaggtaaccaggaattgcgttcaaaatgagctcatttgtgatcaggcttaaaagttgcccaagctgaggtcgtttccccccagtcacaaagcagaatgtttttctcaagacttcataggcacttactggtccgtactatctttggaatataattagaagctttgaatccttgaaaagcaaacctgttctcttcatcaaaaatgctaaccacctgtgcccgtggatcaatatcacctggatgtagtgcttgatatttttcccaactcagaagaaaaccattatggtttagagaggaaatgcagaatggcagaatccaccagagaaattgcacttatcgaaacaggccaaggcctgcatgtgttcggataaatcatttagtattgtgtaaataaagctgcagcctttacttcggagggatggtgtgggattttggccgagggaagcaggacagagaaggagcaggaagctatgctaattttcctgtcagcttaagggatccgtctcagcaagaatcttgtattctgataacggaatgctgtacgtgctgaccacatctaagaaccattaaaaagcaaggaaacaaacaaacaacccttttctcattccgacacacgaatagtcatcgagtattacaccagcccctctggtggcttccttcaaaactgttgatcttagctaaagtgtataaccagttaccagctgcacttcgcacggccatcccgtccacaatgcagcagactcttcccaaggccacctagcaagcaaggttgatcggatcatctaaactggccgcctcctgaatatttcactgaatcctggcgttcatgttgaagcagacaaaatgagaaaggaggagggcattgctcacctctcaatagcttttttcgttcaagttctatgtctttatcagctcttgcctgtgattttaccccaattcaaccttgggagtgggaagaatatgaacagataacccttggcctaacagctccatcaaacctccttgagagcaactacctaggccaggctagtgagtgctttgtgaggaagctggtcagaaggttccctcaactccttcctggtcctcctggacactgcagaaaagacttaggggatccccagcagaggccaattgctctccttccttccctgccccaccaggaaaggaataacgtccacagacttgaagcagatagtgaagtagatctgtgagaggttctaggtacttagtgtgtagactttgacgaatatttctcaagttgggagcccttgttaaaaatgatgtttaagggagtggttggggggaagatgaaggcatggaggaggaagaagagaaggaagcccttgccatataaaattcatgcagactaaacagtttccctgacagaataaataaagtggatgctaccccactccagaatcaaaagcaatttaattaaagtctcttaagttgtaaagagttttaaatgatccgtgttgaaggcgaatgcctgcaaatgcagtgggtctgacgtcagctgccgggcctgggctgggaggccatttgctattctgtttaaggcaggctggattgtcttattttggaaccagcttggtggggggtttgctttgctactgcttctgagccctgagcttcaaaggctgaaattaatggtgaacaaaattgtgcggctctggccatcccatgcggggcaagcccattgagggttatcattaagtaaagaaataaagagggggaaaaaagcctgcctgttccaaaaacctcatcagataatgacctcagtgattgggttttcattaccaaacagcatccagagattatcaacccatagaagaagggaggggaaaaaaaagaaagaaaggaaaagcaactgtctttctctccctctctttctcctttttttttgcacatcttttctttaaaactgtcagatcatttcagtatttcaaatccgaggaaaacagcctgcctgctgctgtatttgaagttgtaatggtgtcaaaaagtcacgactgactgacagccgtcagtcccagaggggctcattaaatcataaaaacttgacaaggaaataattgcgcattgccagcaacttggcgcctgtttagacgtttttattttctttcattattagtccccaccattacgttcattaacaaattgcattaaacaactgttaagggctaa

SEQ ID NO: 240552 - protein, 893 aa, Artificial Sequence
  derived and/or modified sequence
MSSKKNRKRLNQSAENGSSLPSAASSCAEARAPSAGSDFAATSGTLTVTNLLEKVDDKIPKTFQNSLIHLGLNTMKSANICIGRPVLLTSLNGKQEVYTAWPMAGFPGGKVGLSEMAQKNVGVRPGDAIQVQPLVGAVLQAEEMDVALSDKDMEINEEELTGCILRKLDGKIVLPGNFLYCTFYGRPYKLQVLRVKGADGMILGGPQSDSDTDAQRMAFEQSSMETSSLELSLQLSQLDLEDTQIPTSRSTPYKPIDDRITNKASDVLLDVTQSPGDGSGLMLEEVTGLKCNFESAREGNEQLTEEERLLKFSIGAKCNTDTFYFISSTTRVNFTEIDKNSKEQDNQFKVTYDMIGGLSSQLKAIREIIELPLKQPELFKSYGIPAPRGVLLYGPPGTGKTMIARAVANEVGAYVSVINGPEIISKFYGETEAKLRQIFAEATLRHPSIIFIDELDALCPKREGAQNEVEKRVVASLLTLMDGIGSEVSEGQVLVLGATNRPHALDAALRRPGRFDKEIEIGVPNAQDRLDILQKLLRRVPHLLTEAELLQLANSAHGYVGADLKVLCNEAGLCALRRILKKQPNLPDVKVAGLVKITLKDFLQAMNDIRPSAMREIAIDVPNVSWSDIGGLESIKLKLEQAVEWPLKHPESFIRMGIQPPKGVLLYGPPGCSKTMIAKALANESGLNFLAIKGPELMNKYVGESERAVRETFRKARAVAPSIIFFDELDALAVERGSSLGAGNVADRVLAQLLTEMDGIEQLKDVTILAATNRPDRIDKALMRPGRIDRIIYVPLPDAATRREIFKLQFHSMPVSNEVDLDELILQTDAYSGAEIVAVCREAALLALEEDIQANLIMKRHFTQALSTVTPRIPESLRRFYEDYQEKSGLHTL

SEQ ID NO: 240553 - DNA, 2682 bp, Artificial Sequence
  derived and/or modified sequence
atgagcagcaagaagaacagaaagagactgaaccagagcgccgagaacggcagcagcctgcccagcgccgccagcagctgcgccgaggccagagcccccagcgccggcagcgacttcgccgccaccagcggcaccctgaccgtgaccaacctgctggagaaggtggacgacaagatccccaagaccttccagaacagcctgatccacctgggcctgaacaccatgaagagcgccaacatctgcatcggcagacccgtgctgctgaccagcctgaacggcaagcaggaggtgtacaccgcctggcccatggccggcttccccggcggcaaggtgggcctgagcgagatggcccagaagaacgtgggcgtgagacccggcgacgccatccaggtgcagcccctggtgggcgccgtgctgcaggccgaggagatggacgtggccctgagcgacaaggacatggagatcaacgaggaggagctgaccggctgcatcctgagaaagctggacggcaagatcgtgctgcccggcaacttcctgtactgcaccttctacggcagaccctacaagctgcaggtgctgagagtgaagggcgccgacggcatgatcctgggcggcccccagagcgacagcgacaccgacgcccagagaatggccttcgagcagagcagcatggagaccagcagcctggagctgagcctgcagctgagccagctggacctggaggacacccagatccccaccagcagaagcaccccctacaagcccatcgacgacagaatcaccaacaaggccagcgacgtgctgctggacgtgacccagagccccggcgacggcagcggcctgatgctggaggaggtgaccggcctgaagtgcaacttcgagagcgccagagagggcaacgagcagctgaccgaggaggagagactgctgaagttcagcatcggcgccaagtgcaacaccgacaccttctacttcatcagcagcaccaccagagtgaacttcaccgagatcgacaagaacagcaaggagcaggacaaccagttcaaggtgacctacgacatgatcggcggcctgagcagccagctgaaggccatcagagagatcatcgagctgcccctgaagcagcccgagctgttcaagagctacggcatccccgcccccagaggcgtgctgctgtacggcccccccggcaccggcaagaccatgatcgccagagccgtggccaacgaggtgggcgcctacgtgagcgtgatcaacggccccgagatcatcagcaagttctacggcgagaccgaggccaagctgagacagatcttcgccgaggccaccctgagacaccccagcatcatcttcatcgacgagctggacgccctgtgccccaagagagagggcgcccagaacgaggtggagaagagagtggtggccagcctgctgaccctgatggacggcatcggcagcgaggtgagcgagggccaggtgctggtgctgggcgccaccaacagaccccacgccctggacgccgccctgagaagacccggcagattcgacaaggagatcgagatcggcgtgcccaacgcccaggacagactggacatcctgcagaagctgctgagaagagtgccccacctgctgaccgaggccgagctgctgcagctggccaacagcgcccacggctacgtgggcgccgacctgaaggtgctgtgcaacgaggccggcctgtgcgccctgagaagaatcctgaagaagcagcccaacctgcccgacgtgaaggtggccggcctggtgaagatcaccctgaaggacttcctgcaggccatgaacgacatcagacccagcgccatgagagagatcgccatcgacgtgcccaacgtgagctggagcgacatcggcggcctggagagcatcaagctgaagctggagcaggccgtggagtggcccctgaagcaccccgagagcttcatcagaatgggcatccagccccccaagggcgtgctgctgtacggcccccccggctgcagcaagaccatgatcgccaaggccctggccaacgagagcggcctgaacttcctggccatcaagggccccgagctgatgaacaagtacgtgggcgagagcgagagagccgtgagagagaccttcagaaaggccagagccgtggcccccagcatcatcttcttcgacgagctggacgccctggccgtggagagaggcagcagcctgggcgccggcaacgtggccgacagagtgctggcccagctgctgaccgagatggacggcatcgagcagctgaaggacgtgaccatcctggccgccaccaacagacccgacagaatcgacaaggccctgatgagacccggcagaatcgacagaatcatctacgtgcccctgcccgacgccgccaccagaagagagatcttcaagctgcagttccacagcatgcccgtgagcaacgaggtggacctggacgagctgatcctgcagaccgacgcctacagcggcgccgagatcgtggccgtgtgcagagaggccgccctgctggccctggaggaggacatccaggccaacctgatcatgaagagacacttcacccaggccctgagcaccgtgacccccagaatccccgagagcctgagaagattctacgaggactaccaggagaagagcggcctgcacaccctgtag

SEQ ID NO: 240554 - DNA, 2682 bp, Artificial Sequence
  derived and/or modified sequence
atgtcctccaaaaagaaccgcaaacgcttaaatcagtctgccgagaacggatcatccttgccgtcagcagcatcctcctgtgctgaagcgagagcaccctccgcgggctccgacttcgctgccacctccggtacccttacggtgacaaacctgctcgagaaggtggatgacaagatcccaaaaacttttcagaattctctcattcatctggggttgaataccatgaagtctgccaacatctgtataggccggccggtacttttgacatcattaaacggcaaacaggaggtttataccgcatggccgatggccgggttccccgggggaaaggtcggcttgagtgaaatggcacagaaaaacgtgggagtgcgccctggtgacgccatccaggtgcagcctcttgtaggggcagttttacaagccgaggagatggatgtggctctgagtgataaagatatggagattaacgaggaagagctcactggatgtatcctgcgcaaactggatgggaagatcgtgttacctggaaacttcctctattgcactttctacggacggccttacaagctgcaggtcctgcgcgtcaaaggcgctgatggcatgattcttgggggccctcagagtgattccgacaccgatgcccagcggatggcttttgagcagtcttccatggaaacctccagcctcgaactctccctgcagctgagccagctggatctggaagatacacaaattcccacctctaggagcactccgtataaaccgattgatgacagaattactaacaaggccagcgatgtcttgctcgatgttacacagagcccaggggatggctccggtcttatgcttgaggaagtgacaggcctcaaatgcaactttgagtccgccagagaggggaatgagcagctgacagaggaggagagacttctgaagttcagtattggggccaaatgcaacacagacacattctacttcatcagctcaactacacgggtcaattttacagaaatagacaagaatagcaaggaacaggacaatcagtttaaggtcacctatgatatgattgggggcctgagtagccagctcaaagcaatacgcgagattatcgaactgcccctgaagcagcccgagctttttaaatcctatggcatccccgctcccaggggcgtgcttctctatgggccgcccggaactggaaaaaccatgattgcccgagcagtcgccaatgaagtaggagcctacgtgtctgttatcaatggtcccgagattatctccaagttctacggagagacggaagccaagttaaggcagatctttgcagaggccaccttacgccacccatcaatcattttcattgacgagctcgatgccctctgccccaagagggagggcgcccagaacgaggtcgagaagagggtcgttgcctctttgctcacactgatggatggcatcggctctgaggtctctgaaggacaggtactagtgcttggcgcaaccaacaggccccacgctcttgatgcagcacttagacggccagggagatttgacaaggagatagaaatcggtgtgccaaacgctcaggaccgcttggatattcttcagaagttactgaggagagtgccccacctgcttaccgaagctgagctgcttcagctggcaaactctgcgcacggctacgtgggcgccgatctgaaagtgctctgtaatgaggctggcctctgtgccctcagacggattctgaaaaaacaaccgaatctacccgatgtgaaagtcgccggcttggtcaagatcaccttaaaggatttcttacaggcaatgaacgatatcagacctagtgcaatgagggagatcgccatcgatgtccctaacgtctcctggagcgacatcggaggactggaatccattaaactcaaactggaacaagctgtcgagtggcccctgaaacacccagaatcatttatacgcatgggcatacagcccccgaagggggttctgttatatggcccccccggatgctccaagactatgatcgccaaggccctggctaatgaatccggactgaatttccttgctatcaaagggccagagctgatgaataaatacgtgggagaatctgaacgcgccgtcagggagacgtttaggaaggcccgtgctgtggccccttcaatcattttctttgatgaactggatgcgttagccgtggaacgcggcagttctctcggggccgggaatgtggccgaccgggtcctggcccaacttctgacagaaatggatggcatcgaacagctcaaagacgtgacaatccttgccgctaccaatcgacctgataggatagacaaggcgctcatgcggcccggaagaattgaccgcattatttacgtaccactgcctgacgccgccacccggcgggagatcttcaaactccaattccactctatgccagtctccaacgaggtcgacttggacgagttaattctccagaccgacgcctattctggggcagagatagtggcagtttgccgggaggcagcactgctggctctggaagaagatatccaggccaaccttattatgaagaggcattttactcaggccttgtccacagttacacctcggatcccggaaagtctccgtcgtttttacgaggattaccaggaaaagtccggcttgcacaccctgtag

SEQ ID NO: 240555 - DNA, 2682 bp, Artificial Sequence
  derived and/or modified sequence
atgagcagcaagaagaacaggaagaggctgaaccagagcgcagaaaatggcagcagcctgcccagcgctgccagcagctgtgccgaggcccgggcccccagcgctggcagtgactttgctgccaccagcggcaccctgactgtgaccaacctgctggagaaggtggatgacaagatccccaagaccttccagaacagcctcatccacctgggcctgaacaccatgaagagcgccaacatctgcatcggccggcctgtgctgctgaccagcctgaatggcaagcaggaggtgtacacagcctggcccatggccggcttccctgggggcaaggtgggcctgtctgagatggcccagaagaatgtgggcgtgcggcctggagatgccatccaggtgcagcccctggtgggcgctgtgctgcaggccgaggagatggatgtggccctgagtgacaaggacatggagatcaatgaggaggagctgaccggctgcatcctgaggaagctggatggcaagatcgtgctgcccggcaacttcctgtactgcaccttctacggccggccctacaagctgcaggtgctgcgggtgaagggagcagatggcatgatcctgggcggcccccagagcgacagcgacacagatgcccagaggatggcctttgagcagagctccatggagaccagcagcctggagctgagcctgcagctgagccagctggacctggaggacacccagatccccaccagccgcagcaccccctacaagcccattgatgaccgcatcaccaacaaggccagtgatgtgctgctggatgtgacccagagccctggagatggcagcggcctgatgctggaggaggtgacaggcctgaagtgcaactttgaaagtgcccgggagggcaatgagcagctgacagaggaggagcggctgctgaagttcagcatcggggccaagtgcaacacagacaccttctacttcatcagcagcaccaccagggtgaacttcacagaaattgacaagaacagcaaggagcaggacaaccagttcaaggtgacctatgacatgattggaggcctgagcagccagctgaaggccatccgggagatcatcgagctgcccctgaagcagcctgagctgttcaagagctatggcatcccagccccccggggcgtgctgctgtatggccccccaggcaccgggaagaccatgattgcccgggctgtggccaatgaggtgggcgcctacgtgtctgtcatcaatggacctgagatcatcagcaagttctacggggagacagaggccaagctgcggcagatctttgctgaggccaccctgcggcaccccagcatcatcttcattgatgagctggatgccctgtgccccaagcgggagggcgcccagaatgaggtggagaagagggtggtggccagcctgctgaccctgatggatggcatcggcagcgaggtgtctgagggccaggtgctggtgctgggcgccaccaaccggccccacgccctggatgctgccctgcggcggcccggccgctttgacaaggagattgaaattggagtgcccaatgcccaggaccggctggacatcctgcagaagctgctgcggcgggtgccccacctgctgacagaagctgagctgctgcagctggccaacagcgcccacggctacgtgggcgctgacctgaaggtgctgtgcaatgaagctggcctgtgtgccctgcggcgcatcctgaagaagcagcccaacctgcctgatgtgaaggtggccggcctggtgaagatcaccctgaaggacttcctgcaggccatgaatgacatccggcccagcgccatgagagaaattgccattgatgtgcccaacgtgtcctggagcgacattggaggcctggagagcatcaagctgaagctggagcaggccgtggagtggcccctgaagcaccctgagagcttcatccgcatgggcatccagccccccaagggcgtgctgctgtatggccccccaggctgcagcaagaccatgattgccaaggccctggccaatgaaagtggcctgaacttcctggccatcaagggccctgagctgatgaacaagtatgtgggggagagcgagagagctgtgcgggagaccttcaggaaggcccgggctgtggcccccagcatcatcttctttgatgagctggatgccctggccgtggagcggggcagcagcctgggcgctggaaatgtggccgacagagtgctggcccagctgctgacagagatggatggcatcgagcagctgaaggatgtgaccatcctggccgccaccaacagaccagacagaattgacaaggccctgatgaggcctggaagaattgaccgcatcatctacgtgcccctgcctgatgctgccacccggcgggagatcttcaagctgcagttccacagcatgcctgtgtccaatgaggtggacctggatgagctgatcctgcagacagatgcctacagcggggctgagatcgtggccgtgtgccgggaggccgccctgctggccctggaggaggacatccaggccaacctgatcatgaagaggcacttcacccaggccctgagcacagtgaccccccgcatccctgagagcctgcggcgcttctatgaggactaccaggagaagagcggcctgcacaccctgtag

SEQ ID NO: 240556 - DNA, 2682 bp, Artificial Sequence
  derived and/or modified sequence
atgagcagcaagaagaaccggaagcggctgaaccagagcgccgagaatggatctagcttaccaagcgccgcgagtagttgtgccgaagcacgagcccccagtgcaggctccgacttcgcagcaacctctgggacactaacagttaccaatctgctggaaaaggtggacgataagatccctaagacttttcagaattccctgatacacctcggtctgaacacgatgaagtctgctaacatctgcattggcagacccgtgttacttactagcctcaacggaaagcaggaggtttacactgcctggccgatggcaggctttcctggcggaaaagtgggtctgtcagaaatggcacaaaagaatgtgggtgtgagaccaggggacgcgatccaggtgcagcctctcgtgggagctgtgttacaggcagaagaaatggacgtcgctctgtcagacaaagacatggagatcaatgaggaggaactaacggggtgcatcctgcgaaagctggacggaaagatcgtgctcccaggcaattttctctactgcaccttctacggtaggccgtacaaactgcaggttctgagggtcaaaggggctgacggcatgatcctgggggggcctcagagtgactccgataccgatgcccaacggatggcgtttgaacaaagtagcatggagacttccagtttggagctatccctgcagctcagccaactggacctagaagatacccagatccccactagtcggtccacgccctataagcctattgacgacaggatcactaacaaggcttccgacgtgctactcgacgtaactcagtctcccggggacgggtctggtttgatgttagaggaagttacagggttgaaatgtaacttcgaatccgctcgggaaggaaacgaacagctgaccgaggaggagagactcttaaaattctccattggggctaaatgcaacactgataccttctatttcattagctcaacaacccgcgtgaattttacagagatagataagaactctaaggaacaggacaaccagttcaaggtgacatacgatatgattggcggactgtcatctcagctgaaggccatcagggaaattatcgagctgcccctgaagcagcctgagctgtttaagagctacggcatacccgccccaaggggcgtgttattgtatggccccccggggacaggtaagacgatgatcgcccgggccgtcgctaatgaagtaggagcttacgtctccgttatcaatggcccagaaatcatatctaaattctacggggagaccgaagctaagctcagacagatattcgccgaggctacactccgacacccctcaattattttcatcgacgagcttgatgccttatgccctaagcgagaaggagcccagaacgaggttgagaagcgggtcgtcgcttctctcttgacactcatggacggcattggctccgaggtgtcagagggccaggtactcgtactgggcgccactaaccggcctcatgcactggacgcggcgctgaggagacccggcaggttcgacaaagaaatagaaattggggtacctaacgcacaggatcgcctggatattcttcagaagctgttgagaagagtcccccacttactgaccgaagcagaactgctgcagctggctaatagcgctcacggctacgtgggggcagacctgaaggtactatgcaatgaggcaggcctgtgtgcacttcgccgaattctgaagaagcagcctaacctcccagatgtaaaggtggctggcctggtgaaaattaccctgaaggacttcctgcaagcaatgaacgatataagaccctcagctatgagagagattgcaattgatgtacctaacgttagctggagcgatataggaggtctcgagtcaattaaattgaagcttgagcaggctgtagaatggccactcaagcaccccgagtcctttataagaatgggaatccaaccacccaagggcgttctcctgtacggaccgcccggatgcagcaagaccatgatcgccaaggctctcgctaacgagagcgggttgaactttctcgccatcaaagggcctgaactgatgaacaagtatgtgggagagtctgaaagagccgtgagggagaccttccgaaaagctagggctgtagctccaagcatcatctttttcgatgaactggatgctctagcggtggaaagagggagttcacttggcgcaggaaacgtcgctgaccgagtactggctcagcttttgaccgaaatggacgggatcgagcaactgaaagatgtgaccatcctcgctgccaccaatcgcccagataggatcgacaaggccctgatgagaccaggacggatcgatcgcattatctatgttccgcttccagatgcagccactcggcgagagatattcaagctgcaatttcacagcatgcccgtgtcaaatgaggtagatctggatgagctgatattgcagactgacgcgtatagcggagctgaaatcgttgcggtttgtcgggaggccgccttgctcgccctggaagaggacatccaagctaatttgatcatgaaaagacactttacacaggccttgagtacagtcaccccccggattcccgaatccctgaggcgtttctatgaagactaccaggaaaaaagtgggctgcatacactatag

SEQ ID NO: 240557 - DNA, 2682 bp, Artificial Sequence
  derived and/or modified sequence
atgtcttccaaaaaaaatcgaaagcggctgaaccagtcagctgaaaacggaagctccctgccttctgctgcgagttcctgtgcagaagcccgagctccctccgccggaagcgacttcgcggctacgagtggaacgctgacagtcaccaatctactggaaaaagtggacgataaaattccaaagaccttccaaaattctctgattcacctgggactgaacacaatgaaatccgcaaatatttgcataggacggcctgtactgctcacttcgctgaatggcaaacaggaagtctacaccgcatggcccatggccggatttccaggagggaaggttggtctctcagagatggctcagaaaaatgtaggcgtcagacccggtgatgccatccaggtccagcctctggtgggcgcagtcctccaggccgaggaaatggatgtggccctatccgacaaagatatggaaattaatgaagaggagctcacggggtgcattctcagaaagctggacggtaagatcgtcctgccgggaaatttcctctactgtaccttctacggcagaccctataagctgcaggtgctcagagttaagggcgcagacggcatgatcctaggaggcccacagagtgacagtgataccgatgcccagcgcatggcattcgagcagtcctcaatggagacttctagccttgaactcagtctgcagctgtcgcagctggatctagaagacacccaaattccaacctcgaggagtacaccttacaagccgatagacgatagaattactaacaaagcctcagacgtcctgcttgatgtcacacagagccctggagacggatctggtctgatgctggaggaagtgaccggcttgaaatgcaattttgagtcagctagagagggaaacgagcagctcaccgaggaggaacgtttactgaagttctcaatcggggcaaaatgcaacactgataccttttatttcatttctagcaccacaagggtgaattttacagagatcgataaaaacagcaaagaacaagacaatcagttcaaggtgacctacgacatgattggcggtctgtcctcccaactgaaggccatccgggagatcatcgaactaccactcaaacagccagaattgttcaagtcgtatgggatacccgctccaagaggggtcctactctacgggcctccaggtacgggaaagacaatgatcgccagagccgtagctaacgaagtgggcgcttatgtgtccgtaatcaacggacccgagatcatttccaagttttacggggaaaccgaagcaaaactgaggcagattttcgctgaggccaccctgcgacacccctctattatattcatagacgagctggacgcactgtgcccaaaaagggaaggggctcagaatgaagtcgagaagcgtgtagtggcctccctgctgacgttgatggatggcattgggtccgaggtgtcagagggccaggtcctggtgctcggagccactaatagacctcatgccctggacgcagctcttagacgcccaggcaggttcgacaaagagattgaaatcggagtgccgaatgcccaggacagactggacattctccaaaaactgctgcggcgtgtgccacacctgttgacagaagccgaactgctacagctggccaactcagctcatggatatgtgggagcggatctcaaggttctgtgcaacgaggccggactatgcgctctgcgccgaatactcaagaagcagcctaacctgcctgatgtgaaggtggcaggacttgtaaagatcacactgaaagacttcctgcaggctatgaacgacatccgaccctctgccatgagggagatcgccattgacgtccctaatgtatcgtggagtgacatcggaggcttggaatcaatcaaactgaagctggagcaggccgtggaatggcctctgaagcacccagaatcatttatccggatgggaatccagccgcctaaaggagtcctgctgtacggcccacctggatgttctaagactatgatcgctaaggctctggccaatgagagcggcctcaatttcctagcaattaaaggtccggaattgatgaacaagtacgtgggcgagtccgagcgtgctgttcgggagactttcagaaaagcccgtgcggtggccccatcaataatcttctttgatgagttggatgcccttgccgtggaaaggggctcaagccttggggcaggaaatgtggccgatagagtccttgcccagttattaacagagatggatggcattgaacagctgaaggatgtgaccatcctcgcggctaccaatcggcctgaccggattgacaaggcgctgatgcgccctgggcgtatcgataggattatctacgtccctctccccgacgcagctacaaggcgggaaatttttaaactgcagtttcacagcatgccagttagtaacgaagtggatctggacgaacttatcctccagaccgatgcctattctggcgcagagatcgtggctgtttgccgcgaggctgcccttctggcactcgaggaagatatccaggctaatttgatcatgaagcgccactttacgcaggctttaagcacggtgacacccaggatccccgagagcctcaggagattttatgaggactaccaagagaaaagtggcctgcatactctttag

SEQ ID NO: 240558 - DNA, 3341 bp, Artificial Sequence
  derived and/or modified sequence
ttttctctcagttgaagcgcgcacattgagtcggcttttctactgcttcggctagggtaccttgtgaccatgtcttccaagaagaatagaaagcggttgaaccaaagcgcggaaaatggttcgtccttgccctctgctgcttcctcttgtgcggaggcacgggctccttctgctggatcagacttcgcggcaacctccgggactctgacggtgaccaacttattagaaaaggtagatgacaaaattcctaaaacattccagaattcccttattcatcttggactcaacactatgaagtctgcaaatatatgtataggtcgaccagtgttgcttactagtttgaacggaaagcaagaggtgtatacagcctggcctatggcaggatttcctggaggcaaggtcggcctgagtgaaatggcacagaaaaatgtgggtgtgaggcctggtgatgccatccaggtccagcctcttgtgggtgctgtgctacaggctgaggaaatggatgtggcactgagtgacaaagatatggaaattaatgaagaagaactgactggttgtatcctgagaaaactagatggcaagattgttttaccaggcaactttctgtattgtacattctatggacgaccgtacaagctgcaagtattgcgagtgaaaggggcagatggcatgatattgggagggcctcagagtgactctgacactgatgcccaaagaatggcctttgaacagtccagcatggaaaccagtagcctggagttatccttacagctaagccagttagatctggaggatacccagatcccaacatcaagaagtactccttataaaccaattgatgacagaattacaaataaagccagtgatgttttgctggatgttacacagagccctggagatggcagtggacttatgctagaggaagtcacaggtcttaaatgtaattttgaatctgccagagaaggaaatgagcaacttactgaagaagagagactgctaaagttcagcataggagcaaagtgcaatactgatactttttattttatttcttcaacaacaagagtcaattttacagagattgataaaaattcaaaagagcaagacaaccaattcaaagtaacttatgacatgataggaggattaagtagccagctgaaagcaattagagaaataattgaattgcccctcaaacagcctgagcttttcaagagttatggaattcctgcccctagaggagtgttactttatggtcctccaggtactggaaaaacaatgatcgccagggctgttgctaatgaagttggagcctatgtttctgtaattaatggtcctgaaattataagcaaattctatggtgagactgaagcaaagttacgtcagatatttgctgaagccactctacgacacccatcaattatttttattgatgagctggatgcactttgtccgaaaagagagggggcccagaatgaagtggaaaaaagagttgtggcttcactcttaacactgatggatggcattggttcagaagtaagtgaaggacaagtgttggttcttggggccacaaatcgccctcatgccttggatgctgctctccgaagacctgggcgatttgataaagagattgagattggagttcccaatgctcaggaccggctagatattctccagaaactgcttcgaagggtaccccatttgctcactgaggctgagctgctgcagctggcaaatagtgctcatggatacgttggagcagacttgaaagtcttgtgtaatgaagcaggtctctgtgccttgcggagaatcctgaaaaaacagcctaacctccctgatgtcaaggtggctggactggtgaagattactctgaaggatttcttgcaggcaatgaatgatatcagacccagtgccatgagggaaatagcaattgatgtcccaaatgtatcctggtcagatataggaggactggaaagtatcaaactgaagttggaacaggctgtggaatggcccttaaaacatccagagtctttcattcgaatgggtattcagccacctaaaggagttcttctctatgggccacctgggtgctctaaaacaatgatagcaaaggctttggccaatgagagtggactgaattttctagctataaaggggcctgaattaatgaataaatatgttggtgaatctgaaagagcagttagagagaccttccgaaaagcaagagcagtggcgccttccattattttctttgatgaactggatgccttagcagttgaaaggggcagttctttaggtgctgggaatgtagccgatcgtgttttggctcagctcttaacagaaatggatgggattgaacagctaaaggatgtgaccattttggcagctactaaccgtccagataggatagacaaggctttgatgcggcctggaagaattgatagaatcatctatgtgcctttaccggatgcagcaacaagaagggaaatatttaagctgcagtttcactccatgcctgtcagtaatgaagttgacctggatgaactcatccttcaaaccgacgcatactcaggagcagagattgtagctgtctgcagagaggcagctcttctggctctggaagaagacattcaagccaatctcatcatgaaaagacatttcactcaggccttgagcactgtgacacctagaattcctgagtcattgagacgtttttatgaagattatcaagagaagagtgggctgcatacactctgagaaaatatatatattcaagatgctgaaaatcctttccagagaaaatttgtttctttttaaaattttttgagagtgttaaaaaaaattttactaggcaaaatgtttgaagtatgttcagtagaatttaggggctttggttcttacagattttcaagtcatgtaagtacagtgaaaatatctctgagcataagtttcaatcagttttacctggaaatttgtggtgtggtttaaaaaacaaatgtttagctttttcatttgcgacctagtctgttcatcccatgaagcgatttctttttccagaatctgtttgagtgtctttctaaaatgccaaacatgttggcatcaattttatacagggatataaaaaagtatatgtggataaattttttgtaatctttagggatataaaaaagtgtatgtggataaattttttgtaatctttatttttgaaggccagccagtaaaatggcccaatgtgccagccaggcttatgtggccttgttttcaaatatacatatatgtgttatcattaaaattcatatatgcatttttgttttagccttcttaatctctacctatggccaaaaaaa

SEQ ID NO: 240559 - protein, 468 aa, Artificial Sequence
  derived and/or modified sequence
MAAPDLSTNLQEEATCAICLDYFTDPVMTDCGHNFCRECIRRCWGQPEGPYACPECRELSPQRNLRPNRPLAKMAEMARRLHPPSPVPQGVCPAHREPLAAFCGDELRLLCAACERSGEHWAHRVRPLQDAAEDLKAKLEKSLEHLRKQMQDALLFQAQADETCVLWQKMVESQRQNVLGEFERLRRLLAEEEQQLLQRLEEEELEVLPRLREGAAHLGQQSAHLAELIAELEGRCQLPALGLLQDIKDALRRVQDVKLQPPEVVPMELRTVCRVPGLVETLRRFRGDVTLDPDTANPELILSEDRRSVQRGDLRQALPDSPERFDPGPCVLGQERFTSGRHYWEVEVGDRTSWALGVCRENVNRKEKGELSAGNGFWILVFLGSYYNSSERALAPLRDPPRRVGIFLDYEAGHLSFYSATDGSLLFIFPEIPFSGTLRPLFSPLSSSPTPMTICRPKGGSGDTLAPQ

SEQ ID NO: 240560 - protein, 385 aa, Artificial Sequence
  derived and/or modified sequence
MAAPDLSTNLQEEATCAICLDYFTDPVMTDCGHNFCRECIRRCWGQPEGPYACPECRELSPQRNLRPNRPLAKMAEMARRLHPPSPVPQGVCPAHREPLAAFCGDELRLLCAACERSGEHWAHRVRPLQDAAEDLKAKLEKSLEHLRKQMQDALLFQAQADETCVLWQKMVESQRQNVLGEFERLRRLLAEEEQQLLQRLEEEELEVLPRLREGAAHLGQQSAHLAELIAELEGRCQLPALGLLQDIKDALRRVQDVKLQPPEVVPMELRTVCRVPGLVETLRRFRGRCGGPRWGDDSRRGPAKDLGSQPRVLCPATASSKLTVSWWWVVGKTSSAHTSDISCVGIFTPNNSSTSGNELGIQGFHSALNRIASADTTGVSTDPTD

SEQ ID NO: 240561 - DNA, 1158 bp, Artificial Sequence
  derived and/or modified sequence
atggccgcccccgacctgagcaccaacctgcaggaggaggccacctgcgccatctgcctggactacttcaccgaccccgtgatgaccgactgcggccacaacttctgcagagagtgcatcagaagatgctggggccagcccgagggcccctacgcctgccccgagtgcagagagctgagcccccagagaaacctgagacccaacagacccctggccaagatggccgagatggccagaagactgcacccccccagccccgtgccccagggcgtgtgccccgcccacagagagcccctggccgccttctgcggcgacgagctgagactgctgtgcgccgcctgcgagagaagcggcgagcactgggcccacagagtgagacccctgcaggacgccgccgaggacctgaaggccaagctggagaagagcctggagcacctgagaaagcagatgcaggacgccctgctgttccaggcccaggccgacgagacctgcgtgctgtggcagaagatggtggagagccagagacagaacgtgctgggcgagttcgagagactgagaagactgctggccgaggaggagcagcagctgctgcagagactggaggaggaggagctggaggtgctgcccagactgagagagggcgccgcccacctgggccagcagagcgcccacctggccgagctgatcgccgagctggagggcagatgccagctgcccgccctgggcctgctgcaggacatcaaggacgccctgagaagagtgcaggacgtgaagctgcagccccccgaggtggtgcccatggagctgagaaccgtgtgcagagtgcccggcctggtggagaccctgagaagattcagaggcagatgcggcggccccagatggggcgacgacagcagaagaggccccgccaaggacctgggcagccagcccagagtgctgtgccccgccaccgccagcagcaagctgaccgtgagctggtggtgggtggtgggcaagaccagcagcgcccacaccagcgacatcagctgcgtgggcatcttcacccccaacaacagcagcaccagcggcaacgagctgggcatccagggcttccacagcgccctgaacagaatcgccagcgccgacaccaccggcgtgagcaccgaccccaccgactag

SEQ ID NO: 240562 - DNA, 1407 bp, Artificial Sequence
  derived and/or modified sequence
atggcggcccctgatctctcaactaatttacaggaggaggccacctgcgcaatatgtttggattactttaccgaccctgtgatgaccgactgcggccataacttctgccgggaatgtataaggaggtgttggggccagccggaaggaccctatgcctgcccagagtgcagagagctctcgccccagaggaacttgaggcctaacaggccccttgccaagatggcggagatggctagaaggctccaccctcccagtcccgtcccacaaggcgtgtgtcctgcacaccgcgaaccacttgcagcattctgcggcgacgagctccgtctactttgcgctgcctgcgagcgttcaggggagcattgggctcacagggtcaggcccctccaggacgcagcagaggacctgaaagccaagctcgagaagagcctggagcacctgaggaagcagatgcaggacgctctcctattccaagctcaggcagatgaaacctgcgtactctggcagaaaatggttgaatcacagcggcagaatgtgcttggcgaattcgaacggctcaggagactgctcgcagaggaagagcagcagttacttcagaggctagaggaggaggaactggaagtgctacctagactgcgggagggcgctgcccatttagggcagcagtcagcacatctggctgagctgatcgccgagctcgagggtaggtgccagctacccgctctgggactgctccaggatattaaagacgccctccgccgggtccaggatgtgaagctacaacctcctgaggtcgtgccaatggaattgcgcaccgtatgtcgagtaccgggtttggtcgaaacgctccgcagatttcggggagacgtcaccttggaccctgacaccgcgaaccctgaactcatcctgtctgaggatagacgctccgtccagcgcggcgatttgcggcaggccctcccggattctcccgagcgctttgatccaggaccgtgtgtactcgggcaggagcggtttactagtggacgccactactgggaggtagaagtcggcgatcggacgtcttgggcactcggtgtatgtcgggagaatgtgaatcggaaagaaaagggtgaactgtcagctggcaacgggttctggatccttgtgttcctcgggtcatattataatagctccgaacgagcactagcacctctgagggatccccctcgtagggtcggcatttttctggactatgaggccgggcatctgagcttctacagtgccacggatggatcactgctgtttatttttccagagataccgttcagcggaaccctacgacctctattctcaccactgagcagcagcccgacaccgatgacaatatgtcgccctaagggtgggagcggcgacaccctggcccctcagtag

SEQ ID NO: 240563 - DNA, 1158 bp, Artificial Sequence
  derived and/or modified sequence
atggcggcaccagatctgtccactaatctgcaggaagaagctacatgcgctatctgcctcgattatttcaccgacccagtcatgaccgactgtggccacaatttctgcagggaatgcatccggcggtgttggggacagcctgaggggccctatgcctgccctgaatgccgcgagctcagtccccagaggaatctgcggcccaatagacccttagcaaagatggccgaaatggctaggaggcttcaccccccatcgccagttccacagggggtctgtcccgctcaccgggagcccctcgccgcattttgtggggatgagctgcgcctgctttgtgcggcctgtgaacgcagcggggaacactgggctcaccgtgttaggcctctacaggatgccgcggaagatctgaaggccaaacttgagaagtcactggagcatctgagaaagcaaatgcaggatgcactactgtttcaggcccaggcagacgagacatgtgtcctatggcaaaagatggtagagtcccaaagacagaacgtgctgggcgagtttgaaagattgaggagattacttgccgaagaagagcagcagctcttgcaacggctagaagaagaggaactggaggtcctcccaaggctgagagagggtgcagcacatttgggtcaacaatcagctcaccttgccgaactgattgccgagctcgagggcaggtgccagctcccagcactggggctcctacaggacatcaaagatgcactgcggcgggtccaggacgtaaagttacaaccacccgaagtggtccctatggaactgaggactgtgtgcagagtgccagggctggttgaaaccctgagaagattcagaggcagatgcgggggaccccgttggggggacgattcgaggcggggccccgctaaagacctcggttcccagcctcgagtgctgtgtccggctacagccagctccaagcttactgtgtcttggtggtgggtagtgggaaaaacgtctagcgctcacacaagcgatattagctgcgttggaatctttacacctaataatagctccacttccggaaacgaactagggattcagggcttccattctgccttaaatcgcatcgcgtccgcggacacgactggggtgtctacggatccgactgactag

SEQ ID NO: 240564 - DNA, 2511 bp, Artificial Sequence
  derived and/or modified sequence
ctacgtcccgcgtcccccgagcgctcggagcctacgcgcccagcgctaccgaaacccagagtcctgcgccctggagtccccgcgccccggagcccgagcacccgggagtcccgagcctcgcgccccggagtgcccgagcctgcgccgccgcacccggataccccgcgtccccgcgagctgccgaggccgcccgccgccgccccgcggacagtaccgccttcctcccctctgtccgcgccatggccgcccccgacctgtccaccaacctccaggaggaggccacctgcgccatctgcctcgactacttcacggatccggtgatgaccgactgcggccacaacttctgccgcgagtgcatccggcgctgctggggccagcccgagggcccgtacgcgtgccccgagtgccgcgagctgtccccgcagaggaacctgcggcccaaccgcccgcttgctaagatggccgagatggcgcggcgcctgcacccgccgtcgccggtcccgcagggcgtgtgccccgcgcaccgcgagccactggccgccttctgtggcgacgagctgcgcctcctgtgtgcggcctgcgagcgctctggggagcactgggcgcaccgcgtgcggccgctgcaggacgcggccgaagacctcaaggcgaagctggagaagtcactggagcatctccggaagcagatgcaggatgcgttgctgttccaagcccaggcggatgagacctgcgtcttgtggcagaagatggtggagagccagcggcagaacgtgctgggtgagttcgagcgtcttcgccgtttgctggcagaggaggagcagcagctgctgcagaggctggaggaggaggagctggaggtgctgccccggctgcgggagggcgcagcccacctaggccagcagagcgcccacctagctgagctcatcgccgagctcgagggccgctgccagctgcctgctctggggctgctgcaggacatcaaggacgccctgcgcagggtccaggatgtgaagctgcagcccccagaagttgtgcctatggagctgaggaccgtgtgcagggtcccgggactggtagagacactgcggaggtttcgaggtaggtgtggaggccccaggtggggagatgactccaggaggggacctgccaaggacctgggcagccagccacgtgttctgtgccctgccactgccagctccaaactcacagtgtcatggtggtgggttgttgggaaaacgtcctctgctcatacttctgacatcagttgtgtgggtattttcacaccaaacaattcttcaacttctggaaacgaattgggtatccaaggattccattcagcattgaacagaattgccagtgctgacactacaggagttagtacagaccccacagattaagggctcagtcccataagactgcccccacttcagatgccagtcacaacttccaggggctgcccatacttctgttccctcagcgcctctgcagatgtgagcattcgctagcacagcccatggaactcagaagagcactttacttactgtcattggtttattgtgaaggataccactcaggaagagccaaatggaagagacacatgggcaaagcctggggaagggctcagagctttcccaccctccctgggtgcaccttcccagcacctcagtgtgctcaccaacctggaaactccctgagccccaagagctgtttaggtgtctttgtggaggttccattacatggttatgattgattaaatcattggtcattggtgatggggctcaacctcagacccctttccccttcctgaggtcagaggctggggctgagtgttcccgccctctactgacaggattggtctttctggtggctggccttatgctgggctctcaggtccccacctcagccactgcagtggcatcaactcaggtgtgatggaaaggggcatcttatgatagcacaagatgcttctatcagtcaggaaattcccagggttctgtgagctctgcgccaggaactgggcacaaaacccaaatctgagtcttgtatcacagtcacccaaaggaagtactatcctcagctcttgctagcaggtcaggagcctgttgtgtaggaactgtgtgcaggcctccagaggtggatagatctgaaatcggagtggtcagggttgggacagctgccctaattcacatccttcatttggagattgaaaggaaaaacagactggatgcattggctcacctctgtaatcccagcactttgagaggctcaggcgggaggattgcttgaggccatcagttcaagaccaacccgggaaacatagcaagactcccatctctacaaataaaaaacaaaaaaatgagccagccatggtggcacacgcctgtaatcccagcagcttgggaggatctgaggcgggaggatcatttgagcccaggagatcaaggctgcagtgagccatgatcgcaccactgcactgcagcctggggccacagagcaagaccctgcctcttt

SEQ ID NO: 240565 - DNA, 1407 bp, Artificial Sequence
  derived and/or modified sequence
atggccgccccagacctgagcaccaacctgcaggaggaggccacctgtgccatctgcctggactacttcacagatcctgtgatgacagactgtggccacaacttctgccgggagtgcatccgccgctgctggggccagcctgagggcccctatgcctgcccagaatgtcgggagctgagcccccagaggaacctgcggcccaaccggcccctggccaagatggccgagatggcccggcggctgcacccccccagccctgtgccccagggcgtgtgcccagcccaccgggagcccctggccgccttctgtggagatgagctgcggctgctgtgtgccgcctgtgagaggtctggagagcactgggcccaccgggtgcggcccctgcaggatgctgctgaggacctgaaggccaagctggagaagagcctggagcacctgaggaagcagatgcaggatgccctgctcttccaggcccaggctgatgagacctgtgtgctgtggcagaagatggtggagagccagaggcagaatgtgctgggggagtttgagcggctgcggcggctgctggccgaggaggagcagcagctgctgcagaggctggaggaggaggagctggaggtgctgccccggctgcgggagggcgccgcccacctgggccagcagagcgcccacctggccgagctgattgctgagctggagggccgctgccagctgcctgccctgggcctgctgcaggacatcaaggatgccctgcggcgggtgcaggatgtgaagctgcagcccccagaggtggtgcccatggagctgaggacagtgtgccgggtgcccggcctggtggagaccctgcggcgcttcagaggagatgtgaccctggaccctgacacagccaaccctgagctgatcctgtctgaggaccggcgctctgtgcagagaggagacctgcggcaggccctgcctgacagccctgagagatttgatcctggcccctgtgtgctgggccaggagcgcttcaccagcggccgccactactgggaggtggaggtgggggacaggacctcctgggccctgggcgtgtgcagagaaaatgtgaacaggaaggagaagggggagctgtctgctggaaatggcttctggatcctggtgttcctgggcagctactacaacagcagcgagcgggccctggcccccctgcgggaccccccccggcgggtgggcatcttcctggactatgaggccggccacctgtccttctacagcgccacagatggcagcctgctcttcatcttccctgagatccccttcagcggcaccctgcggcccctcttcagccccctgagcagcagccccacccccatgaccatctgccggcccaagggcggcagcggggacaccctggccccccagtag

SEQ ID NO: 240566 - DNA, 1158 bp, Artificial Sequence
  derived and/or modified sequence
atggccgccccagacctgagcaccaacctgcaggaggaggccacctgtgccatctgcctggactacttcacagatcctgtgatgacagactgtggccacaacttctgccgggagtgcatccgccgctgctggggccagcctgagggcccctatgcctgcccagaatgtcgggagctgagcccccagaggaacctgcggcccaaccggcccctggccaagatggccgagatggcccggcggctgcacccccccagccctgtgccccagggcgtgtgcccagcccaccgggagcccctggccgccttctgtggagatgagctgcggctgctgtgtgccgcctgtgagaggtctggagagcactgggcccaccgggtgcggcccctgcaggatgctgctgaggacctgaaggccaagctggagaagagcctggagcacctgaggaagcagatgcaggatgccctgctcttccaggcccaggctgatgagacctgtgtgctgtggcagaagatggtggagagccagaggcagaatgtgctgggggagtttgagcggctgcggcggctgctggccgaggaggagcagcagctgctgcagaggctggaggaggaggagctggaggtgctgccccggctgcgggagggcgccgcccacctgggccagcagagcgcccacctggccgagctgattgctgagctggagggccgctgccagctgcctgccctgggcctgctgcaggacatcaaggatgccctgcggcgggtgcaggatgtgaagctgcagcccccagaggtggtgcccatggagctgaggacagtgtgccgggtgcccggcctggtggagaccctgcggcgcttccggggccgctgtggcggcccccgctggggagatgacagcagaagaggccctgccaaggacctgggcagccagccccgggtgctgtgcccagccacagccagcagcaagctgactgtgtcctggtggtgggtggtgggcaagaccagcagcgcccacaccagtgacatcagctgtgtgggcatcttcacccccaacaacagcagcaccagcggaaatgagctgggcatccagggcttccacagcgccctgaacagaattgccagcgctgacaccactggagtgtccacagaccccacagactag

SEQ ID NO: 240567 - DNA, 1407 bp, Artificial Sequence
  derived and/or modified sequence
atggccgcccccgacctgagcaccaacctgcaggaggaggccacctgtgcaatttgtctggattatttcactgaccctgtgatgaccgactgcggtcataatttttgtcgcgagtgtataaggcgttgctggggacagcctgagggaccctacgcatgcccggagtgccgggaactgagcccccagcggaacttgcgtcccaaccgccccctcgcaaagatggccgaaatggcaaggcgcctgcaccccccctcaccggttccacaaggcgtgtgtccagcccaccgcgagccactggccgctttttgtggagacgagctgcgtctcttgtgcgcagcgtgtgaacggagcggagaacactgggcgcacagagttcgtcctctccaggacgctgccgaggaccttaaggcaaagcttgaaaagtcccttgaacacctgagaaagcagatgcaggacgcccttctgttccaggcacaggcggacgagacatgtgtgctctggcagaaaatggtcgagtctcaacgtcaaaacgtgctgggggaatttgagcgcctgagacgtctgctggcagaggaggaacagcagctacttcagaggctcgaggaagaagagttggaggtgctgccacggttaagagagggagcagctcatttggggcagcagtctgcccacctcgctgaattgatcgcagaacttgagggccggtgtcagctccctgccctcggacttctccaggatattaaggacgccttgcgcagggtacaggatgtcaagctccagccccccgaagtcgtgccgatggaactgagaactgtgtgcagggtgccaggactagtggaaaccttgagacgctttcgcggcgacgtgactctcgatcccgacaccgcgaatccggaactgatcctgagtgaggacaggcgcagcgtccagcgaggagacctgcggcaggccctcccggattctccagagaggttcgatcccgggccatgtgtgctgggacaagagagattcaccagcgggaggcactactgggaggtcgaggtcggggatcggacatcttgggcactgggtgtttgcagagaaaatgtgaaccggaaagaaaagggagagctttctgcgggaaacggcttttggatccttgtgtttctggggtcatactacaattcttcggaaagggcattggcacctttgcgagatccccctcggagagtcgggatttttctcgattacgaggcgggccatctgtctttttactcggccacagatggaagcttgcttttcatctttccagagattcccttctctggtaccctaaggccactatttagccccctttcatccagtccaaccccaatgaccatctgcagacctaaaggtggttcaggcgacaccttggcacctcagtag

SEQ ID NO: 240568 - DNA, 1158 bp, Artificial Sequence
  derived and/or modified sequence
atggccgcccccgacctgagcaccaacctgcaggaggaggccacctgtgccatatgtctcgactacttcaccgatcccgtcatgacggattgcggccataacttctgccgggagtgtatccgtcgctgctggggacagccagagggcccttacgcatgcccagagtgtagagagttgagcccacaacggaacctgaggcctaacaggcccctggccaagatggctgagatggccagacgtctgcatccaccatcccccgtcccgcagggcgtgtgcccagcacaccgggaaccgttggctgcgttttgtggtgatgagttgaggctcctgtgcgccgcttgtgaacgcagtggcgaacattgggcccacagagtaaggcccctccaagacgccgctgaagatctgaaagccaagcttgaaaagtcattggagcatctgaggaaacagatgcaggacgcgctgctgttccaggcccaggcggacgagacttgcgtgctgtggcagaagatggtggagtcacagcgacagaatgtgctcggagaattcgagcggctacgcaggctattagctgaggaagaacagcagttgctgcagcgtctcgaggaggaggaactcgaagtgctgcctcgcttaagagagggggccgcacacctagggcagcagtctgctcaccttgcggagttaattgccgaactggaggggcggtgccaactcccagccctgggtttactgcaggatatcaaggatgctttgcggcgcgtacaggatgtcaagctccaaccccctgaggttgtgcctatggagttacgaaccgtgtgtagggttcccggtttagtagaaacactgaggagattcagaggcaggtgcggagggcctcgctggggtgatgattcacggcgaggtcccgctaaagatttgggctcacagcccagagtcctctgtcctgcgactgcttcttccaaattgactgtttcctggtggtgggtggttggaaagacgagtagcgcccatacttcagatatttcatgcgttggaatatttacaccaaacaacagcagcacctctgggaacgaactgggtatccagggctttcattccgcgctgaaccgcatagcctcagcagatactaccggcgtgtccaccgacccaacagactag

SEQ ID NO: 240569 - DNA, 1407 bp, Artificial Sequence
  derived and/or modified sequence
atggcggcacccgacctttccacaaacctgcaggaagaagcaacttgtgccatctgcctggattactttactgacccagtgatgactgactgcgggcataacttctgccgcgagtgcatccgacggtgctggggccaacctgagggaccatacgcttgcccagagtgtcgcgagctgagtccgcagaggaacttaaggcccaacaggcccctggccaaaatggctgaaatggcccgacggttacatccgcctagccccgtgccccagggtgtgtgcccggcacaccgcgagcctttggcagctttttgtggtgacgagctgagactgctctgcgccgcatgcgagcggagcggggaacactgggctcaccgggtacgcccacttcaggatgccgcagaagatcttaaggccaagttagagaagagtctggaacacctgcgcaaacagatgcaggatgccttgctgttccaggcccaggccgatgagacctgcgttctttggcagaagatggtggaatcccaaaggcagaatgttctgggagagttcgagcggttgaggcgcctactagcagaagaagagcagcaattgctccagagattggaagaagaagagcttgaggtattgccaagattacgggagggtgccgctcacctgggccagcagtctgcccacctcgccgagctgatcgcggaactggaagggaggtgccagttacccgcactgggactcctgcaggacattaaggacgcattgcggagagtccaggatgtgaaactgcagcccccagaagtggtgcccatggaactgcgaactgtctgccgcgtccccggtctggtggaaacactgcgcaggttccggggtgacgtaactctggatccagacacagccaaccccgagctgatcctgagcgaagataggcgaagcgtacagcggggtgatctgcggcaggctttaccagatagccctgagagatttgacccaggtccctgtgtcctcgggcaggagcgctttacatcaggcaggcattactgggaagttgaagttggtgatcgtacctcttgggctctgggcgtgtgcagggagaacgttaacagaaaggagaaaggagagctgtctgctggcaacgggttctggatcctggtctttctaggatcatactataacagcagtgagcgagcactagcccctcttcgagatcctcctaggagggtggggatattcctcgactatgaagccggacacctgtcattttactccgcgacagacgggtctctgctttttattttccccgaaatccccttctccggcaccttacgaccactcttctcccccctgtcctctagtcccacaccaatgaccatttgcaggccaaagggtggcagcggcgacactctcgccccacaatag

SEQ ID NO: 240570 - DNA, 1158 bp, Artificial Sequence
  derived and/or modified sequence
atggcagctcccgatctctcaactaacctccaggaggaggccacttgtgcaatttgccttgattattttacagacccggtgatgaccgactgtgggcacaacttttgcagggagtgtattcgaagatgctgggggcagccggagggtccctatgcttgtcccgaatgccgagagctgtccccacaacggaacctgagacctaaccgcccactcgctaagatggcggagatggccagacgactacatccgccttcacccgtcccacaaggcgtttgtccagctcatcgcgaaccacttgcggctttttgcggtgatgagctgaggcttttatgcgccgcttgcgagcgatcgggagaacactgggctcacagagtgaggcctttgcaggatgctgcagaggatctgaaagcaaagctggagaaatctctggagcatcttcgtaaacagatgcaagatgccttactgtttcaggcccaagctgatgagacctgcgtactctggcagaaaatggtggaaagccaacggcagaacgtactcggtgaatttgagaggctgcgtcgccttttggctgaggaggagcagcagcttctgcaacgattggaggaggaggaattagaagttctgcccaggctgcgtgaaggagcggctcacttaggccagcaaagcgctcacctcgctgagttgatagctgaattggagggccgttgccagctaccagcactcgggctgttacaggacatcaaggatgcactgaggcgggtccaggacgtcaaattgcaacctcctgaggtagttcccatggaactcagaactgtatgccgagtgcccggactggttgaaacactgcgccgttttcgcggacggtgcggaggccctaggtggggcgatgattctagacgcggacccgctaaagaccttgggtcccagcccagagtgctctgtccagccacggcatcttcaaaattgacagtgtcctggtggtgggtggtcggtaaaaccagctctgcacatacaagcgatatcagctgcgtgggcatctttacccctaataatagctctacttccggcaatgagttgggcattcagggttttcatagcgcattgaaccgcatcgcatcagcagacacaaccggggtctctacagacccgacagattag

SEQ ID NO: 240571 - DNA, 2715 bp, Artificial Sequence
  derived and/or modified sequence
cttccgcctcggctcctcttcctgccggcatccgggatccctacgtcccgcgtcccccgagcgctcggagcctacgcgcccagcgctaccgaaacccagagtcctgcgccctggagtccccgcgccccggagcccgagcacccgggagtcccgagcctcgcgccccggagtgcccgagcctgcgccgccgcacccggataccccgcgtccccgcgagctgccgaggccgcccgccgccgccccgcggacagtaccgccttcctcccctctgtccgcgccatggccgcccccgacctgtccaccaacctccaggaggaggccacctgcgccatctgcctcgactacttcacggatccggtgatgaccgactgcggccacaacttctgccgcgagtgcatccggcgctgctggggccagcccgagggcccgtacgcgtgccccgagtgccgcgagctgtccccgcagaggaacctgcggcccaaccgcccgcttgctaagatggccgagatggcgcggcgcctgcacccgccgtcgccggtcccgcagggcgtgtgccccgcgcaccgcgagccactggccgccttctgtggcgacgagctgcgcctcctgtgtgcggcctgcgagcgctctggggagcactgggcgcaccgcgtgcggccgctgcaggacgcggccgaagacctcaaggcgaagctggagaagtcactggagcatctccggaagcagatgcaggatgcgttgctgttccaagcccaggcggatgagacctgcgtcttgtggcagaagatggtggagagccagcggcagaacgtgctgggtgagttcgagcgtcttcgccgtttgctggcagaggaggagcagcagctgctgcagaggctggaggaggaggagctggaggtgctgccccggctgcgggagggcgcagcccacctaggccagcagagcgcccacctagctgagctcatcgccgagctcgagggccgctgccagctgcctgctctggggctgctgcaggacatcaaggacgccctgcgcagggtccaggatgtgaagctgcagcccccagaagttgtgcctatggagctgaggaccgtgtgcagggtcccgggactggtagagacactgcggaggtttcgaggggacgtgaccttggacccggacaccgccaaccctgagctgatcctgtctgaagacaggcggagcgtgcagcggggggacctacggcaggccctgccggacagcccagagcgctttgaccccggcccctgcgtgctgggccaggagcgcttcacctcaggccgccactactgggaggtggaggttggggaccgcaccagctgggccctgggggtgtgcagggagaacgtgaacaggaaggagaagggcgagctgtccgcgggcaacggcttctggatcctggtcttcctggggagctattacaattcctcggaacgggccttggctccactccgggacccacccaggcgcgtggggatctttctggactacgaggctggacatctctctttctacagtgccaccgatgggtcactgctattcatctttcccgagatccccttctcggggacgctgcggcccctcttctcacccctgtccagcagcccgaccccgatgactatctgccggccgaaaggtgggtccggggacaccctggctccccagtgactcgggccctcctggaggagtcctgttgcctctcctgcccctccaggccactgagtgttttggccacttggaggacctgggaggagggagtgtgtcctttgagcaagaggaggaactcctggtgcctttctgagcctgcgtgggagaaccccaattctagcactccaggaaactgtgggagagtgtggggcaggctccgtcctccctgggagacccctccagccaccgggtgccacttaatgccaacagcccttaccaaagctgggagccccattgccccggcagctctggcctgtggttccagaagctgagaaaactccactggggcttgcagaatccagggttcacctaagctgcacagttcctgcagctttgccagccccctgaaagtcttgtgtaccccacctctgaagatgctgggggaggcagctgggatgggagccagccccatgcctgtctgtgaccccacagtgggtgagagcccgtcacagtcctgggtgtggctgctctggaagaattaggaggcagccataataagagtcttcagagagatgatgggaggggccagtgaggacaggaacagagagtagatgtcctataataaaggggcttctgggaggtgcctgggcacagatgtctgttcagcaggtgtgtgggcctagaggagagagcagagcccagaaatgtcttttgcaggcccacgttctgacttgaagctttcgtgggcatgttgccattgggttttgcccttgcaaaggcttcctaggtctccagtggcccctcaggacccagggtcccagctgctgcttggggatgtgcactgctggccgccggccttgcagtctctctaccctggggaggaacagtggcttctcagagcctggggcatacagaagaaggcaggagttgatttttgtgttgggtttggggtttctttgtcctcaaggtactgttctgtttctctttacccctctgctttatttattgtaagcattcccacgttaaataaactttggctgttgtctacaa

SEQ ID NO: 240572 - DNA, 1407 bp, Artificial Sequence
  derived and/or modified sequence
atggccgcccccgacctgagcaccaacctgcaggaggaggccacctgcgccatctgcctggactacttcaccgaccccgtgatgaccgactgcggccacaacttctgcagagagtgcatcagaagatgctggggccagcccgagggcccctacgcctgccccgagtgcagagagctgagcccccagagaaacctgagacccaacagacccctggccaagatggccgagatggccagaagactgcacccccccagccccgtgccccagggcgtgtgccccgcccacagagagcccctggccgccttctgcggcgacgagctgagactgctgtgcgccgcctgcgagagaagcggcgagcactgggcccacagagtgagacccctgcaggacgccgccgaggacctgaaggccaagctggagaagagcctggagcacctgagaaagcagatgcaggacgccctgctgttccaggcccaggccgacgagacctgcgtgctgtggcagaagatggtggagagccagagacagaacgtgctgggcgagttcgagagactgagaagactgctggccgaggaggagcagcagctgctgcagagactggaggaggaggagctggaggtgctgcccagactgagagagggcgccgcccacctgggccagcagagcgcccacctggccgagctgatcgccgagctggagggcagatgccagctgcccgccctgggcctgctgcaggacatcaaggacgccctgagaagagtgcaggacgtgaagctgcagccccccgaggtggtgcccatggagctgagaaccgtgtgcagagtgcccggcctggtggagaccctgagaagattcagaggcgacgtgaccctggaccccgacaccgccaaccccgagctgatcctgagcgaggacagaagaagcgtgcagagaggcgacctgagacaggccctgcccgacagccccgagagattcgaccccggcccctgcgtgctgggccaggagagattcaccagcggcagacactactgggaggtggaggtgggcgacagaaccagctgggccctgggcgtgtgcagagagaacgtgaacagaaaggagaagggcgagctgagcgccggcaacggcttctggatcctggtgttcctgggcagctactacaacagcagcgagagagccctggcccccctgagagacccccccagaagagtgggcatcttcctggactacgaggccggccacctgagcttctacagcgccaccgacggcagcctgctgttcatcttccccgagatccccttcagcggcaccctgagacccctgttcagccccctgagcagcagccccacccccatgaccatctgcagacccaagggcggcagcggcgacaccctggccccccagtag

SEQ ID NO: 240573 - protein, 130 aa, Artificial Sequence
  derived and/or modified sequence
MRVRGPARLIASGARLLLRMLSALPGWGPAHLQRPLLGPASCLGILRPAMTAHSFALPVIIFTTFWGLVGIAGPWFVPKGPNRGVIITMLVATAVCCYLFWLIAILAQLNPLFGPQLKNETIWYVRFLWE

SEQ ID NO: 240574 - protein, 81 aa, Artificial Sequence
  derived and/or modified sequence
MTAHSFALPVIIFTTFWGLVGIAGPWFVPKGPNRGVIITMLVATAVCCYLFWLIAILAQLNPLFGPQLKNETIWYVRFLWE

SEQ ID NO: 240575 - DNA, 393 bp, Artificial Sequence
  derived and/or modified sequence
atgcgggttcgggggcccgcccgtttgattgccagcggcgcccggctgctcctgcgtatgcttagcgcactgccaggatggggccctgcccacctgcagcgtcccctgctgggaccagcgtcctgcctgggcatcctccgtccggctatgacagctcactccttcgcactgcctgtaatcattttcaccacgttttggggcctcgtgggcattgcaggtccatggtttgtgccgaagggtccgaataggggagtgatcataacgatgctagtggcgactgcggtctgctgctacctgttttggctgattgctatcctcgcacagttgaaccctctgtttggaccccagctgaaaaacgagacgatttggtacgtgcgcttcctatgggagtag

SEQ ID NO: 240576 - DNA, 246 bp, Artificial Sequence
  derived and/or modified sequence
atgacggcccactcttttgcattaccggttatcattttcacaacattttgggggttggttggtattgccgggccatggttcgtccctaaaggaccaaatcgaggtgtcatcatcaccatgcttgtggccacggcggtttgctgctacctgttttggctgatcgctattcttgcgcagctgaatcccttgtttgggcctcagcttaaaaacgaaacaatctggtatgtacggtttctctgggagtag

SEQ ID NO: 240577 - DNA, 393 bp, Artificial Sequence
  derived and/or modified sequence
atgagggtgcggggccctgcccggctcatcgccagcggggcccggctgctgctgaggatgctgagcgccctgcccggctggggccctgcccacctgcagaggcccctgctgggccctgccagctgcctgggcatcctgcggcctgccatgacagcccacagctttgccctgcccgtcatcatcttcaccaccttctggggcctggtgggcattgctggcccctggtttgtgcccaagggccccaacagaggagtcatcatcaccatgctggtggccacagctgtgtgctgctacctgttctggctgattgccatcctggcccagctgaaccccctgtttggcccccagctgaagaatgagaccatctggtacgtgcgcttcctgtgggagtag

SEQ ID NO: 240578 - DNA, 246 bp, Artificial Sequence
  derived and/or modified sequence
atgacagcccacagctttgccctgcctgtgatcatcttcaccaccttctggggcctggtgggcattgctggcccctggtttgtgcccaagggccccaacagaggagtcatcatcaccatgctggtggccacagctgtgtgctgctacctgttctggctgattgccatcctggcccagctgaaccccctgtttggcccccagctgaagaatgagaccatctggtacgtgcgcttcctgtgggagtag

SEQ ID NO: 240579 - DNA, 393 bp, Artificial Sequence
  derived and/or modified sequence
atgcgggtgcggggccccgcccggctgatcgccagcggcgcccggctgctcctgaggatgctgtccgctctccccgggtggggtcctgcacacctgcaaagacctctgcttgggcccgcctcctgtctgggcatcctgaggcctgctatgactgcccactcatttgctctgccagtgatcatctttacaacattttgggggctcgtgggcattgcaggcccatggtttgtccctaagggacccaatcggggtgtgatcatcactatgctagtggcaacagctgtttgttgctatcttttttggctgatcgccatcttggcacagctgaatcccctattcggcccccagctgaagaacgagactatttggtatgtgaggttcctttgggaatag

SEQ ID NO: 240580 - DNA, 246 bp, Artificial Sequence
  derived and/or modified sequence
atgaccgcccacagcttcgccctgcccgtgatcatcttcaccaccttctggggtttggttggcatcgccggaccctggttcgtgccaaagggccccaaccgaggtgttatcatcactatgctggtcgccacagccgtttgctgttatttgttttggctgattgctatcttagctcagttaaacccattgttcgggccacagttaaagaacgagacaatatggtacgtccgctttctttgggagtag

SEQ ID NO: 240581 - DNA, 393 bp, Artificial Sequence
  derived and/or modified sequence
atgagggttagagggcctgcgaggctcatcgcttctggagcgagactgctactgcggatgttatccgccctgccgggttggggacctgcgcatctgcagcggcctcttctgggaccagcttcctgcctggggattctgagacccgctatgacagcccactctttcgctctcccggtgataatctttacaacattctggggactggtcgggattgctggcccatggtttgtccccaagggccctaatcgtggagtcattatcacaatgctggtggcgacggccgtttgttgttatctcttctggctcatcgccattctggctcaactgaaccctctattcggtccacaattaaaaaacgagacgatctggtacgtacgctttctttgggaatag

SEQ ID NO: 240582 - DNA, 246 bp, Artificial Sequence
  derived and/or modified sequence
atgacagcccattccttcgccctccctgtcatcattttcactacattctgggggcttgtaggtattgctggaccatggtttgtgccaaagggccctaaccggggagtcatcatcaccatgctggtggctaccgctgtgtgctgctatttgttttggctgattgccattctggcccagcttaatccactctttggaccccagctcaagaacgaaacaatctggtatgtgaggttcctctgggagtag

SEQ ID NO: 240583 - DNA, 393 bp, Artificial Sequence
  derived and/or modified sequence
atgagagtgagaggccccgccagactgatcgccagcggcgccagactgctgctgagaatgctgagcgccctgcccggctggggccccgcccacctgcagagacccctgctgggccccgccagctgcctgggcatcctgagacccgccatgaccgcccacagcttcgccctgcccgtgatcatcttcaccaccttctggggcctggtgggcatcgccggcccctggttcgtgcccaagggccccaacagaggcgtgatcatcaccatgctggtggccaccgccgtgtgctgctacctgttctggctgatcgccatcctggcccagctgaaccccctgttcggcccccagctgaagaacgagaccatctggtacgtgagattcctgtgggagtag

SEQ ID NO: 240584 - DNA, 246 bp, Artificial Sequence
  derived and/or modified sequence
atgaccgcccacagcttcgccctgcccgtgatcatcttcaccaccttctggggcctggtgggcatcgccggcccctggttcgtgcccaagggccccaacagaggcgtgatcatcaccatgctggtggccaccgccgtgtgctgctacctgttctggctgatcgccatcctggcccagctgaaccccctgttcggcccccagctgaagaacgagaccatctggtacgtgagattcctgtgggagtag

SEQ ID NO: 240585 - protein, 163 aa, Artificial Sequence
  derived and/or modified sequence
MFFSEARARSRTWEASPSEHRKWVEVFKACDEDHKGYLSREDFKTAVVMLFGYKPSKIEVDSVMSSINPNTSGILLEGFLNIVRKKKEAQRYRNEVRHIFTAFDTYYRGFLTLEDFKKAFRQVAPKLPERTVLEVFREVDRDSDGHVSFRDFEYALNYGQKEA

SEQ ID NO: 240586 - DNA, 492 bp, Artificial Sequence
  derived and/or modified sequence
atgttcttcagcgaggccagagccagaagcagaacctgggaggccagccccagcgagcacagaaagtgggtggaggtgttcaaggcctgcgacgaggaccacaagggctacctgagcagagaggacttcaagaccgccgtggtgatgctgttcggctacaagcccagcaagatcgaggtggacagcgtgatgagcagcatcaaccccaacaccagcggcatcctgctggagggcttcctgaacatcgtgagaaagaagaaggaggcccagagatacagaaacgaggtgagacacatcttcaccgccttcgacacctactacagaggcttcctgaccctggaggacttcaagaaggccttcagacaggtggcccccaagctgcccgagagaaccgtgctggaggtgttcagagaggtggacagagacagcgacggccacgtgagcttcagagacttcgagtacgccctgaactacggccagaaggaggcctag

SEQ ID NO: 240587 - DNA, 492 bp, Artificial Sequence
  derived and/or modified sequence
atgttcttctcagaggctcgggcacgaagtcggacctgggaagcttcgccttccgagcatcggaaatgggtggaggtgttcaaagcctgcgacgaggaccataagggctacctttcaagagaggattttaagacagccgtcgttatgctctttggctacaagccctccaaaatcgaggttgactctgtcatgtccagcatcaacccgaatacaagcgggatcctcctagaaggtttcctcaatatagtgaggaagaaaaaagaggcccagcgctatcgtaacgaagtgcggcacatattcaccgcttttgacacctattatagaggcttcctcaccttggaggattttaaaaaggccttccggcaggtggcccccaaactgcctgaaaggactgttttggaggtgttcagggaggtcgaccgcgatagtgatggccacgtttccttccgcgattttgagtatgcgttaaattatggccaaaaggaggcgtag

SEQ ID NO: 240588 - DNA, 3095 bp, Artificial Sequence
  derived and/or modified sequence
gttgctggggctcggttgttgtagtcgcgatgttcttctccgaggccagagccaggtcgcggacgtgggaagccagtccctcggaacacaggaagtgggtggaagtatttaaagcatgtgatgaagatcacaaaggatatctcagcagagaggactttaaaactgctgttgtaatgctgtttgggtacaagccctccaagatagaagtggattctgtgatgtcttcaataaatccaaatacttctggtatattactcgaggggtttttaaatattgtcaggaaaaagaaggaagctcaacgatatcggaacgaagtaagacacatcttcacagcctttgacacctactatcgtggatttttaactttggaagatttcaaaaaagcatttaggcaggtggctcccaaattaccggaaaggactgttcttgaggtattcagggaagtagatcgagattcagatggtcacgtcagctttagagactttgaatatgccctgaactatggacagaaggaagcctaactattgtgaactacttttggtaactctggggagatcaatagattgtaatgtcagcagactcgactctactaatgatgtcatgctacagacttgtgattaaacatttaaaaatttttaatttttgtgggtacatagtaggtgcatatgtatacatacacacacatatatgggttacgggagatattttggcacaggcatgcaataagtaattgactaaatttttaatcataatttttggatgctgatgatagacttgcatctcagaatcctagagatggttgctgccgggggtctccttctgtgtggccagcagccctgagtcaggccgccattgctagagctggggctagggatggcactggtggtcctcctcctcctcactcttcttgccccctaccctctccacactgcaggccacggtgctctactcactcacttcattgtcctcaccatcccaccctgaatctcatcatctcctaatatctgcagaggggcagacttttcctgccaatggtgccagtttccttcatttgctcaacattggttgaacaaataatagcacctacacatacagaatacttactatgttccaagcaatcagccaggccttgggaagcataggcttaagacttctctaagataggctcatgcctacaatcccagcactttgggaggccaaagcaggaggatcacttgagcctaggaattggagactagcctgggcaacataccgagaccccatccctaccaaaaaattaataataaaaaattatctggatttagtggtgtgtacctgtagtcccagctacttgggaggctgaggtggaaggatcatttgagcccaggggtttgaagcttcagtgagccatgattgcactgtcgcactccagcctggatgatagagcaagaccctgtctctaaaaaaacactttcaattaaaaaaaaacatataaagacttctctaagataatgtccctgagtccaaatcatcactgtaaagtggtcccagggcactgtctgtgcaagacaaagaaatcggcttgggctaacatgagcaagccctctcgggctatatacagaggaagaacagggtgatgagggtactgggggcaagagacatgtttgcagaaccctttaggatggtctaggcttgggagtctcactgtggagaagcaagccttgagctgctcagctgccctctgctccataccccctggtttctagcagtcacgtcctgcacccagacacttagccatgtgtgttcacgttccccatgccttgcctgtcctgctgggctccagtaactgctatactggagcaagaacagcaatgctggacactcagcatttagtgaaggtaattccaaaatactggtatcagtactcttatttataagtgtacggaatgcataacatgaacattagtcaaagaacttttaatataattcactttttaagtgttaaaatttaaaggtcaagtaaaattgtaaatttgtaatatggaaacattaagcgtcattatcatacaaattattagcagataaccttaataaaaataaacgtttgcgggttttttttgagacagagtctcactttgtcacctaagctggagtacagtgcgcgatctcggctcactgcaacttccgcctcctgggatcaagtgattctcctgccttagcctcctgagtatctgggtttacaggtgtgtaccgccacacccggctaatttttagtagagaaggggtttcaccatgttggccaggctggtcttgaactcctgacctcaagtgatccgtctgcctcggcctcccaaagtgctgggattacaggcgtgagccaccatgcctggccaataaaaataaagttttaaactgtcaaataagaggagcctaacaagatgtgacaactaaatgtcatttggtatcctggatgagatcacggaataaaaaataaacattggccggacacagtgactcagcctgtaatcccagcacttcgggaggccgaggcgggtggatcacgaggtcgggagatcgagaccatcctggctaacacggtgaaaccccgtctctactaaaaatacaaaaaacaaaaaaagattagctgggcgtggtggcaggtgcctgtagtcccagctgctcgggaggctgaggcaggagaatagcatgaacctgggaggcagagcttgcagtgagctgaaatggtgccactgcactccagtctgggcaacagagcgagactccctctcaaaaaaaaaaaaaaaaaaaaaaaaaaagacattaagtagaaacaaatcaagcatggactttagctaataataatgtatcactattggttcattaattgtaacaaatgtatcctactcatatataatgttaatagtaggggaaactgggtgaggtatatgggaaccctctactattttcacaatttttctataaatctaaaactattctaaaattaaaaattcatttaaaaaataaagtcttattcaaaacctgttaaactaaactttatctaaaatgaagaaaacattgaaaatcaagtaaaaataaaatcttatttcaaatacaaa

SEQ ID NO: 240589 - DNA, 492 bp, Artificial Sequence
  derived and/or modified sequence
atgttcttcagcgaggcccgggcccggagcaggacctgggaggccagccccagcgagcacaggaagtgggtggaggtgttcaaggcctgtgatgaggaccacaagggctacctgagccgggaggacttcaagacagctgtggtgatgctgtttggctacaagcccagcaagattgaggtggacagcgtgatgagcagcatcaaccccaacaccagcggcatcctgctggagggcttcctgaacatcgtgaggaagaagaaggaggcccagcgctacagaaatgaggtgcgccacatcttcaccgcctttgacacctactaccggggcttcctgaccctggaggacttcaagaaggccttccggcaggtggcccccaagctgcctgagaggacagtgctggaggtgttccgggaggtggaccgggacagtgatggccacgtgtccttccgggactttgaatatgccctgaactacggccagaaggaggcctag

SEQ ID NO: 240590 - DNA, 492 bp, Artificial Sequence
  derived and/or modified sequence
atgttcttcagcgaggcccgggcccggagccggacctgggaggccagcccaagcgaacaccggaagtgggtcgaggtatttaaggcgtgtgatgaagaccacaagggctatctgagcagagaagattttaaaaccgctgtggtcatgctgttcggttataagccctccaagatcgaagtagacagtgtcatgagctctatcaatccaaatactagcggcatacttctggaaggttttctaaacatagtgagaaagaaaaaggaggcgcagcgctatagaaacgaggtcaggcacatctttacagcttttgacacctactaccgtggatttctgaccctcgaggacttcaagaaagctttcaggcaggtggctccaaagctacccgagaggactgtgctcgaagtgtttagggaggtggaccgggacagtgacggtcacgtaagctttcgcgacttcgagtacgccttgaactacggccagaaagaagcttag

SEQ ID NO: 240591 - DNA, 492 bp, Artificial Sequence
  derived and/or modified sequence
atgtttttctctgaagctcgagccaggagtagaacctgggaggctagcccgtccgagcatcgcaaatgggtggaagtcttcaaggcctgcgacgaagaccataagggttatctgtctcgggaggacttcaagactgccgttgtgatgctgtttggatataaaccttcaaaaattgaagtcgattccgttatgagcagtatcaaccccaatacttcaggcatcttgctcgaaggcttcctgaacatcgtccgcaagaagaaggaggctcagcggtatcgcaacgaagtccgacacatcttcaccgcctttgacacctactaccgagggttcctgaccctcgaggattttaagaaagctttccgccaggtggcacccaaactgccggaacggaccgtcctggaagttttcagggaagtggatcgcgacagtgatgggcatgtcagttttcgggacttcgaatacgcattgaactacggccaaaaagaagcttag

SEQ ID NO: 240592 - protein, 348 aa, Artificial Sequence
  derived and/or modified sequence
MPAPPCASCHAARAALRRPLSGQALCGACFCAAFEAEVLHTVLAGRLLPPGAVVAVGASGGKDSTVLAHVLRALAPRLGISLQLVAVDEGIGGYRDAALAAVRRQAARWELPLTVVAYEDLFGGWTMDAVARSTAGSGRSRSCCTFCGVLRRRALEEGARRVGATHIVTGHNADDMAETVLMNFLRGDAGRLARGGGLGSPGEGGALPRCRPLQFASQKEVVLYAHFRRLDYFSEECVYAPEAFRGHARDLLKRLEAARPSAVLDLVHSAERLALAPAARPPRPGACSRCGALASRALCQACALLDGLNRGRPRLAIGKGRRGLDEEATPGTPGDPARPPASKAVPTF

SEQ ID NO: 240593 - DNA, 1047 bp, Artificial Sequence
  derived and/or modified sequence
atgcccgcccccccctgcgccagctgccacgccgccagagccgccctgagaagacccctgagcggccaggccctgtgcggcgcctgcttctgcgccgccttcgaggccgaggtgctgcacaccgtgctggccggcagactgctgccccccggcgccgtggtggccgtgggcgccagcggcggcaaggacagcaccgtgctggcccacgtgctgagagccctggcccccagactgggcatcagcctgcagctggtggccgtggacgagggcatcggcggctacagagacgccgccctggccgccgtgagaagacaggccgccagatgggagctgcccctgaccgtggtggcctacgaggacctgttcggcggctggaccatggacgccgtggccagaagcaccgccggcagcggcagaagcagaagctgctgcaccttctgcggcgtgctgagaagaagagccctggaggagggcgccagaagagtgggcgccacccacatcgtgaccggccacaacgccgacgacatggccgagaccgtgctgatgaacttcctgagaggcgacgccggcagactggccagaggcggcggcctgggcagccccggcgagggcggcgccctgcccagatgcagacccctgcagttcgccagccagaaggaggtggtgctgtacgcccacttcagaagactggactacttcagcgaggagtgcgtgtacgcccccgaggccttcagaggccacgccagagacctgctgaagagactggaggccgccagacccagcgccgtgctggacctggtgcacagcgccgagagactggccctggcccccgccgccagaccccccagacccggcgcctgcagcagatgcggcgccctggccagcagagccctgtgccaggcctgcgccctgctggacggcctgaacagaggcagacccagactggccatcggcaagggcagaagaggcctggacgaggaggccacccccggcacccccggcgaccccgccagaccccccgccagcaaggccgtgcccaccttctag

SEQ ID NO: 240594 - DNA, 1047 bp, Artificial Sequence
  derived and/or modified sequence
atgcccgcccctccatgcgctagctgccacgctgcaagagctgctctgcgacggcccttgtcaggacaggcgctctgcggcgcttgcttttgtgctgcctttgaagcagaggtgttgcatacagtcctggcaggaagattgcttcctcctggcgctgttgtggctgtgggagcgagcggcggaaaggactctactgtgctagctcacgtcctccgcgcgctagcgcctcggcttggtattagtttgcagcttgtcgctgtggacgaaggcataggaggatatagggatgccgcgttggcagctgtccgacggcaggccgctaggtgggagctgccactgacagtcgtggcttatgaagacctctttggaggatggacgatggacgctgtcgcccgctcgactgcgggctccgggcgctctcgaagctgctgtactttctgcggcgtgctgaggcgccgagccctagaggagggggcacgcagagtgggggcgacgcacatcgtcaccggacataatgcagatgatatggccgagaccgtgctgatgaatttccttcggggtgacgcaggtcgactagcgcggggcggtggtctcggatcccctggggaggggggggcactccctcgatgtaggcctcttcagtttgcaagtcagaaagaggttgtgctctatgcccattttcggagactggattacttcagcgaggaatgcgtgtatgcccccgaagcctttcgaggtcatgcgagagatctcctcaagcggctcgaggccgccaggcctagcgctgtactggacctcgtccattctgctgagcgtctcgcactggctccagccgcacggccccccaggccaggcgcctgctcccggtgcggtgctctcgcaagccgcgcgctctgccaggcctgcgccctcctggacggtctcaaccggggccggccgagactggcgatagggaagggtaggcggggcctcgacgaggaggcgacccccgggacccctggcgatccagcaagaccccctgcttctaaagccgtaccgaccttttag

SEQ ID NO: 240595 - DNA, 1047 bp, Artificial Sequence
  derived and/or modified sequence
atgcctgccccaccctgtgccagctgccacgccgcccgggccgccctgcggcggcccctgagcggccaggccctgtgtggggcctgcttctgtgccgcctttgaggccgaggtgctgcacacagtgctggccggccgcctgctgcccccaggagctgtggtggccgtgggcgccagcggcggcaaggacagcacagtgctggcccacgtgctgcgggccctggccccccggctgggcatcagcctgcagctggtggccgtggatgagggcattggaggctacagagatgctgccctggccgctgtgcggcggcaggccgcccgctgggagctgcccctgactgtggtggcctatgaggacctgtttggaggctggaccatggatgctgtggcccggagcacagctggcagcggccgcagccgcagctgctgcaccttctgtggggtgctgcggcggcgggccctggaggagggcgcccggcgggtgggcgccacccacatcgtgacaggccacaatgctgatgacatggccgagaccgtgctgatgaacttcctgcggggagatgctggccgcctggcccggggcggcggcctgggcagccctggagagggcggggccctgccccgctgccggcccctgcagtttgccagccagaaggaggtggtgctgtatgcccacttccggcggctggactacttcagcgaggagtgtgtgtatgcccctgaggccttccggggccacgcccgggacctgctgaagaggctggaggccgcccggcccagcgctgtgctggacctggtgcacagcgctgagcggctggccctggccccagctgcccggccccccaggcctggggcctgcagccgctgtggggccctggccagccgggccctgtgccaggcctgtgccctgctggatggcctgaacagaggccggccccggctggccatcggcaaaggaagaagaggcctggatgaggaggccaccccaggcacccctggggaccctgcccggcccccagccagcaaggctgtgcccaccttctag

SEQ ID NO: 240596 - DNA, 1047 bp, Artificial Sequence
  derived and/or modified sequence
atgcccgcccccccctgcgccagctgccacgccgcccgggccgccttgcggaggcctctgagcggacaggccctgtgtggggcatgtttttgtgctgcattcgaggcagaagtgttacacactgtgcttgccggcaggctcctgccacccggcgcagtagtggccgtaggcgcctctgggggcaaggactccacagtgttggctcatgtcttacgggctctagccccccgcttaggcatcagcttgcagctggtcgccgtggacgaaggaatcggcggttatagggatgccgcactcgcagccgtccgccggcaggccgccaggtgggagctcccacttactgttgtcgcctacgaagatctctttggggggtggactatggatgccgtggccagaagcaccgccgggtccggccgatcaagatcctgttgtacattctgcggggtacttagaagaagggcacttgaggagggcgccaggcgggtgggcgcaactcacatagtgaccggccacaacgccgatgacatggctgagacagtattgatgaattttctaagaggggatgccggccgccttgcaagaggagggggtctcggctccccaggggaaggaggagccttacccagatgccggccattgcaatttgcttctcagaaagaagtggtgctttatgcccactttagacggcttgattatttcagcgaagagtgtgtgtacgctccggaggcttttaggggacacgcccgagacctcctgaagcggctggaagccgctcgacccagcgccgtactggatctggttcacagcgccgaaaggctggcactggcgcccgccgcaaggcctccccggcctggggcatgttcacgctgcggcgccttagcctcaagggccctctgccaggcctgcgccctgctagacggccttaatcgcggcaggcccagattagcgatcggcaagggcagaagaggactcgatgaggaggccacccctggaaccccaggagatcccgcacggcctcctgcatccaaagctgttccaactttctag

SEQ ID NO: 240597 - DNA, 2107 bp, Artificial Sequence
  derived and/or modified sequence
gcgtggtgggcagtgtgggcatcccagcactgagttctgcccgggagaagccgacccctcccgcaatgcccgccccgccgtgcgcctcctgccatgctgcacgcgccgccctccgccgtccgctctcgggccaagcgctgtgcggtgcctgcttctgcgccgccttcgaggccgaggtgctgcacacggtgctcgccggccgcctgctgccgcccggcgcggtggtggccgtgggcgcctcgggcggcaaggactccacggtgctggcgcacgtgctgcgcgcgctggcgccgcgcctgggcatctcactgcagctcgtggccgtcgatgagggcatcggtggctaccgggacgcggcgttggcggccgtgcggcgccaggcggcgcgctgggagctgccgctcacggtcgtggcctacgaagacctctttgggggctggacgatggacgccgtggcccgcagcacagccggctccggccgcagccgctcctgctgcaccttctgtggagtgctgcggcgccgggcgctggaggaaggggcgcgccgcgtgggagccacgcacatcgtgacaggtcacaacgccgacgacatggcggagaccgtgctcatgaacttcctacggggcgacgcggggcggctggcccggggcgggggcctgggctctcccggcgaggggggcgccctgccgcgctgccgcccgctgcagttcgcctcgcagaaggaggtggtgctgtacgcgcacttccgccgcctcgactacttctccgaggagtgcgtctacgcgcccgaggccttccgcggccacgcccgggacctgctcaagcgcctggaggcggcgcggccgtccgcggtgctggacctcgtgcactcggccgagcgcctggcgctggccccggccgcgcggcccccgcgccccggcgcctgctcccgctgtggggcgctggccagccgcgcgctctgccaggcctgcgcgctcctggacggcctgaaccgcggccggccccgcctggccatcggcaagggccgccggggtctggacgaggaggcgacgccggggacgcccggggatccggcccggccccccgcctccaaggccgtccccaccttctagcgacttcgggcctcccgccgggatctgatgccgcggggtgggggctgcctgtaaatgacactgtgaataaacccgttaccttacctggccttccatgtggggttgggaaggagacgggggcccattcacctgaaaccctgaagaagctgggaccccagacttcgaggtctcagggaagaagggtctcgaactgggcttcaggctctgagggaggagggggctgggggaccatcctaggtctgagagaggagagggccaggactaagcctagaagaagtgggactggggaccccaggcatctgtggctgaggaaggagggcctggggtcgtggactcctgggtctcagggaggagggggctgaacaccgtgtgattcttgagcgagtggggattggttggggacctcctgcccagggcctctgctggttctgggtgcgctcagcatggtcctgaccctccttgagcatcagattcctgatgtttcctgtttgcccgcagtggggtaagcggagcgtgacttgatggacacacgccattcacagccgccgtcacgatgcctcccttccagcgcttcgtgtgtagcacgcactgcaccctcatttcgtctccaccacggtctcactggctgtagcctgaagtggtaaatggccctaagacacccagtcggaaggggtcacaccgagggctccctccaaagctctcgaatatcacaggtcgtggaattggtcctcccccacccatcccctctcgaatctctcctggtatctctgtcacgggtgaggaggggttggatgcgttccccaaaccttggactctggaggcagggttgtgtgagcctgtcggtgacttagcctctttcatgtcccatttctcctatgaaaatataatcagcccccttcccccccgcccccccatcccccccgcatcaaggcaccactgggaggaaatggaagatcagagaagttgaggtgctcaataaatggtgaccacttgga

SEQ ID NO: 240598 - DNA, 1047 bp, Artificial Sequence
  derived and/or modified sequence
atgcctgctcccccttgcgctagctgccatgcagccagggccgcactgagacgacccctctctggccaggctctttgcggtgcctgtttctgcgctgcattcgaagccgaagtgctgcataccgtcctggcgggacggctcctgccacccggagccgtggttgccgtgggagcttcaggcggaaaagacagcaccgtgttggctcacgttctccgggctctggcccctcggctcggcatttcccttcagctggtggctgtcgatgagggcatcgggggttaccgggatgccgctctcgccgcagtcaggcgccaagccgcaaggtgggagctgcccttgactgtggtggcatatgaggatttgtttgggggttggaccatggacgccgtggccagatcgacagctgggtctggcagatcacggagttgctgcacattctgcggagtgcttaggcgcagagccttggaagaaggcgcacggcgagtcggcgctactcacattgtgactggacataacgccgacgatatggcagagactgttctgatgaacttcttgcgaggcgatgccggacgactggctagaggagggggacttgggtccccaggggagggaggagccttgcccagatgcagacctctccagttcgcatcccagaaggaagtggtgttgtatgcacattttcggcgtctcgactacttttctgaggaatgcgtgtacgcacctgaggcctttcgcggacatgccagagaccttttgaagaggctcgaagccgcaagaccctccgcagtattggatctcgtccatagtgctgagcgcctagcactggcccctgctgcccgacccccacgccctggagcctgcagtcgctgcggggcattggcctccagggcactatgccaagcttgcgctctcttggacggactcaacagaggacggcctaggctagcaattggcaaggggaggagagggttggatgaagaggctacacccggtaccccaggagacccggcacgccctccagcttctaaagctgtcccaactttttag

SEQ ID NO: 240599 - DNA, 327 bp, Artificial Sequence
  derived and/or modified sequence
atgctggccaagggcgccgaggagggccggagcggcggcccccggcctgccattaccctgcccgggtctcttcattttacctgtgacttaaagacatctccctactgtcttacccgggcggaacttatggaacatctgccactccgggtagcagtgcactccatgagcccatgtcaccgttcctgtttctgtggggaactgaagaggggccatccctggaataccccccaggtctcctccttcccatctagcactaccagtctcagtcattcctgcaccacctctcaccttgactgttcccagcaggtcgagtcgggctcgaaatag

SEQ ID NO: 240600 - protein, 456 aa, Artificial Sequence
  derived and/or modified sequence
MRKKWKMGGMKYIFSLLFFLLLEGGKTEQVKHSETYCMFQDKKYRVGERWHPYLEPYGLVYCVNCICSENGNVLCSRVRCPNVHCLSPVHIPHLCCPRCPDSLPPVNNKVTSKSCEYNGTTYQHGELFVAEGLFQNRQPNQCTQCSCSEGNVYCGLKTCPKLTCAFPVSVPDSCCRVCRGDGELSWEHSDGDIFRQPANREARHSYHRSHYDPPPSRQAGGLSRFPGARSHRGALMDSQQASGTIVQIVINNKHKHGQVCVSNGKTYSHGESWHPNLRAFGIVECVLCTCNVTKQECKKIHCPNRYPCKYPQKIDGKCCKVCPGKKAKELPGQSFDNKGYFCGEETMPVYESVFMEDGETTRKIALETERPPQVEVHVWTIRKGILQHFHIEKISKRMFEELPHFKLVTRTTLSQWKIFTEGEAQISQMCSSRVCRTELEDLVKVLYLERSEKGHC

SEQ ID NO: 240601 - protein, 450 aa, Artificial Sequence
  derived and/or modified sequence
MGGMKYIFSLLFFLLLEGGKTEQVKHSETYCMFQDKKYRVGERWHPYLEPYGLVYCVNCICSENGNVLCSRVRCPNVHCLSPVHIPHLCCPRCPDSLPPVNNKVTSKSCEYNGTTYQHGELFVAEGLFQNRQPNQCTQCSCSEGNVYCGLKTCPKLTCAFPVSVPDSCCRVCRGDGELSWEHSDGDIFRQPANREARHSYHRSHYDPPPSRQAGGLSRFPGARSHRGALMDSQQASGTIVQIVINNKHKHGQVCVSNGKTYSHGESWHPNLRAFGIVECVLCTCNVTKQECKKIHCPNRYPCKYPQKIDGKCCKVCPGKKAKELPGQSFDNKGYFCGEETMPVYESVFMEDGETTRKIALETERPPQVEVHVWTIRKGILQHFHIEKISKRMFEELPHFKLVTRTTLSQWKIFTEGEAQISQMCSSRVCRTELEDLVKVLYLERSEKGHC

SEQ ID NO: 240602 - DNA, 1353 bp, Artificial Sequence
  derived and/or modified sequence
atgggagggatgaagtatattttcagcctgctgttcttcctgctgctagaagggggcaagacagagcaggtcaaacacagcgaaacatattgtatgttccaggacaagaagtatagggtaggggagcggtggcacccttatctggagccatatggcctcgtttattgtgtgaattgcatttgtagcgagaatggcaatgtcctatgcagcagagtgcgctgtcctaatgtgcattgcttaagccctgtccatatcccccacctgtgttgccctcgctgcccagattctcttccgccagtcaacaataaagtgacttcaaaatcgtgcgaatacaatggcactacctaccagcatggggaactgtttgtagctgagggcctgttccagaatcgccagcctaaccaatgtacccagtgctcctgcagcgaggggaacgtgtattgtgggctgaaaacgtgccccaaacttacctgcgctttccccgtgtcagttcctgactcttgctgccgggtgtgccggggggacggcgaattatcatgggagcactccgacggcgacatctttaggcagcccgctaaccgggaagcccgccattcctatcaccgaagccattacgatccgcctccttcacgacaggccggcgggctgtcgcgcttccccggagccagaagccatcgaggcgccctcatggacagtcagcaagccagtggaacgatagtacaaattgtgatcaataataagcacaagcacggacaggtttgtgtgagtaatggaaaaacttattcacatggcgaaagttggcacccgaatcttagagcctttggtattgtggagtgtgtgctgtgcacgtgtaatgtgactaaacaggagtgcaaaaaaatacactgtccaaatcgctacccctgcaaatacccccagaagatagacggaaagtgctgcaaagtatgtcccgggaagaaggccaaagagctccctgggcagtccttcgacaataaaggctacttttgcggggaggaaaccatgcccgtgtatgaaagcgtttttatggaggacggtgaaaccacgaggaaaattgctctggaaactgagaggcctcctcaggtagaggtccatgtctggactattagaaaaggcattctgcagcactttcacatagagaagatctcaaaacggatgttcgaagaactgccccatttcaagcttgtgaccagaaccacactttcacagtggaagatcttcaccgagggggaggcacaaatctcccagatgtgctcctcccgggtatgccgtactgaactggaggatctcgtgaaagtactttatcttgagaggagtgagaagggacactgttag

SEQ ID NO: 240603 - DNA, 1371 bp, Artificial Sequence
  derived and/or modified sequence
atgagaaaaaagtggaagatgggaggcatgaagtatatatttagcctgttattcttcctccttcttgagggcggaaagaccgagcaagttaaacattccgagacatactgcatgttccaggataaaaagtatagagtgggcgagaggtggcatccttacttggagccatacggcttagtgtactgtgtgaattgtatctgttccgagaatggcaacgtgctgtgcagtcgtgtgcgctgtccaaacgttcactgcctcagccctgtacatatccctcatttgtgctgcccacgatgcccagattcacttccacctgtgaataataaagtcacgagcaaaagctgtgagtacaacggaactacataccaacacggagaactgttcgtggcagagggcctctttcagaaccgtcagccaaaccaatgtacccagtgctcatgctctgagggcaacgtgtactgcggtctgaaaacatgcccaaaactaacttgcgcttttcctgtttcagtccccgattcatgctgccgagtgtgccgcggggacggcgagttatcttgggagcattcggacggcgacatattcaggcagccagccaatcgggaagcgagacactcgtatcatcgcagccactatgaccctcctccttctcgacaggccggaggcctgtcccgctttcctggagctcggagtcaccgaggggctctgatggacagtcaacaggcctccggcacaatcgtacagattgtcataaataacaaacataagcacgggcaggtttgcgtctctaatgggaaaacgtatagccatggagaaagctggcatcctaacctgcgggccttcgggatagtggagtgcgtgctctgtacctgcaacgtgacaaaacaggagtgtaaaaagattcattgccccaacagatatccctgcaagtatcctcagaaaattgacggtaaatgttgtaaggtttgccccgggaagaaggctaaagagctgcccggacagtcctttgacaacaaggggtacttttgcggcgaagagaccatgccagtgtacgaatcagtgttcatggaggacggggagaccacgcggaaaatagccttagagaccgagcggccgccacaggtggaggtccacgtgtggacaatcaggaaaggcatcctccagcacttccatatcgagaagatttctaagaggatgttcgaagaacttcctcattttaagctcgtgacacgcactacccttagccaatggaagatattcactgaaggtgaagcacagataagccagatgtgctcttccagggtttgccgtaccgagctggaggacttggtgaaagtcctgtacttagaacggtccgagaaaggccactgttag

SEQ ID NO: 240604 - DNA, 1371 bp, Artificial Sequence
  derived and/or modified sequence
atgcggaaaaaatggaagatgggagggatgaaatatatcttcagtctccttttctttcttctgctagagggaggtaaaacagagcaggtcaaacacagcgagacttactgcatgtttcaggataagaaataccgggtaggcgagcggtggcacccgtaccttgagccctacggactggtctattgtgtgaactgcatttgtagtgaaaacggcaatgtcttatgtagccgtgtgaggtgcccaaatgtacactgtttgtcccctgtgcacattcctcatttatgttgtccccgatgcccagactcactgcccccagttaacaataaagtgacgtccaagtcttgcgagtataatgggacgacctatcaacacggggagttgtttgtcgcggagggcctcttccagaaccgtcagccaaatcagtgcacccaatgttcatgcagcgagggcaatgtgtattgtggccttaagacctgccccaagttgacatgtgcttttcctgttagtgtgccagattcttgctgtagggtttgtcggggtgatggagaattgtcgtgggagcatagcgacggagacatctttcggcagcccgcgaaccgcgaagcgagacactcttatcacaggagtcattacgacccccctccctcccgacaggccggcgggctttcgcggtttccgggggctcgctcacatcgcggggcactgatggattcccagcaagctagcggaaccatcgtgcagatcgtgatcaacaacaaacataagcacggtcaggtgtgcgtctccaatgggaaaacctatagccatggcgagtcctggcaccctaatctccgggcttttggaattgtcgaatgcgttctttgtacatgtaatgtcacaaagcaggagtgcaagaaaatccattgtcctaaccgctatccttgtaagtacccccagaagatagatggaaaatgctgtaaggtctgcccggggaagaaggcaaaagaattgcccggacaaagttttgacaacaaaggatatttctgtggcgaggagactatgcctgtgtacgagtctgtgttcatggaagacggagagaccactagaaaaatcgccttggagaccgagcgtccgccacaggttgaggttcacgtgtggaccatcagaaaaggaatcctccagcacttccacattgaaaagatcagcaagagaatgttcgaggagctgcctcacttcaagctggtcaccaggacaactctttcccagtggaagatcttcacagaaggcgaagcccagataagccagatgtgtagttctcgggtttgcagaaccgaactggaggatctcgtgaaggtgctttatttggaaaggtcggagaagggccattgctag

SEQ ID NO: 240605 - DNA, 1353 bp, Artificial Sequence
  derived and/or modified sequence
atgggcggcatgaagtacatcttcagcctgctcttcttcctgctgctggagggcggcaagacagagcaggtgaagcacagcgagacctactgcatgttccaggacaagaagtacagagtgggggagcgctggcacccctacctggagccctacggcctggtgtactgtgtgaactgcatctgcagtgaaaatggaaatgtgctgtgcagccgggtgcgctgccccaacgtgcactgcctgagccctgtgcacatcccccacctgtgctgcccccgctgcccagacagcctgccccctgtgaacaacaaggtgaccagcaagagctgtgagtacaacggcaccacctaccagcacggggagctgtttgtggccgagggcctcttccagaaccggcagcccaaccagtgcacccagtgcagctgcagcgagggcaatgtgtactgcggcctgaagacctgccccaagctgacctgtgccttccctgtgtctgtgcctgacagctgctgccgggtgtgcagaggagatggagagctgtcctgggagcacagtgatggagacatcttccggcagcctgccaaccgggaggcccggcacagctaccacaggagccactatgaccccccacccagccggcaggccggcggcctgagccgcttccctggggcccggagccacagaggagccctgatggacagccagcaggccagcggcaccatcgtgcagatcgtcatcaacaacaagcacaagcacggccaggtgtgtgtgtccaatggcaagacctacagccatggagagagctggcaccccaacctgcgggccttcggcatcgtggagtgtgtgctgtgcacctgcaatgtgaccaagcaggagtgcaagaagatccactgccccaaccgctacccctgcaagtacccccagaagattgatggcaagtgctgcaaggtgtgccctgggaagaaggccaaggagctgcccggccagagctttgacaacaagggctacttctgtggggaggagaccatgcctgtgtatgagagcgtcttcatggaggatggagagaccaccaggaagatcgccctggagacagagaggcctccccaggtggaggtgcacgtgtggaccatcaggaagggcatcctgcagcacttccacatcgagaagatcagcaagaggatgtttgaggagctgccccacttcaagctggtgaccaggaccaccctgagccagtggaagatcttcacagaaggagaggcccagatcagccagatgtgcagcagccgggtgtgcaggacagagctggaggacctggtgaaggtgctgtacctggagaggtctgagaagggccactgctag

SEQ ID NO: 240606 - DNA, 1371 bp, Artificial Sequence
  derived and/or modified sequence
atgaggaagaagtggaagatgggcggcatgaagtacatcttcagcctgctcttcttcctgctgctggagggcggcaagacagagcaggtgaagcacagcgagacctactgcatgttccaggacaagaagtacagagtgggggagcgctggcacccctacctggagccctacggcctggtgtactgtgtgaactgcatctgcagtgaaaatggaaatgtgctgtgcagccgggtgcgctgccccaacgtgcactgcctgagccctgtgcacatcccccacctgtgctgcccccgctgcccagacagcctgccccctgtgaacaacaaggtgaccagcaagagctgtgagtacaacggcaccacctaccagcacggggagctgtttgtggccgagggcctcttccagaaccggcagcccaaccagtgcacccagtgcagctgcagcgagggcaatgtgtactgcggcctgaagacctgccccaagctgacctgtgccttccctgtgtctgtgcctgacagctgctgccgggtgtgcagaggagatggagagctgtcctgggagcacagtgatggagacatcttccggcagcctgccaaccgggaggcccggcacagctaccacaggagccactatgaccccccacccagccggcaggccggcggcctgagccgcttccctggggcccggagccacagaggagccctgatggacagccagcaggccagcggcaccatcgtgcagatcgtcatcaacaacaagcacaagcacggccaggtgtgtgtgtccaatggcaagacctacagccatggagagagctggcaccccaacctgcgggccttcggcatcgtggagtgtgtgctgtgcacctgcaatgtgaccaagcaggagtgcaagaagatccactgccccaaccgctacccctgcaagtacccccagaagattgatggcaagtgctgcaaggtgtgccctgggaagaaggccaaggagctgcccggccagagctttgacaacaagggctacttctgtggggaggagaccatgcctgtgtatgagagcgtcttcatggaggatggagagaccaccaggaagatcgccctggagacagagaggcctccccaggtggaggtgcacgtgtggaccatcaggaagggcatcctgcagcacttccacatcgagaagatcagcaagaggatgtttgaggagctgccccacttcaagctggtgaccaggaccaccctgagccagtggaagatcttcacagaaggagaggcccagatcagccagatgtgcagcagccgggtgtgcaggacagagctggaggacctggtgaaggtgctgtacctggagaggtctgagaagggccactgctag

SEQ ID NO: 240607 - DNA, 1353 bp, Artificial Sequence
  derived and/or modified sequence
atgggcggcatgaagtacatcttcagcctgctgttcttcctgctgctggaaggggggaagaccgagcaagtgaagcatagtgagacctactgcatgttccaggacaagaaataccgggtaggcgagcggtggcatccctatcttgagccttatggtctggtgtactgtgtcaactgtatctgcagtgagaatgggaacgtgctctgtagccgggtgcgttgtcctaacgtgcactgcttatcacccgtccatattccccacttgtgttgcccaaggtgcccagacagcctgcctcccgtaaacaataaagttacttctaagtcatgcgagtacaacggcacaacataccagcacggcgagctctttgtcgccgaaggactgttccaaaatcgccaaccaaatcagtgtactcaatgttcctgctccgaaggcaatgtctactgtggcctgaaaacctgtccgaagctgacatgtgcatttcccgtcagtgtaccggattcctgttgccgcgtatgtcggggggacggggagctttcctgggagcattctgacggagatatcttcagacagccggccaatagggaagcgcggcactcctatcaccgctcccactatgatccacctccaagccgccaagccggaggcctgagtcgcttcccaggagcaagaagccatagaggtgccctgatggattctcagcaagcctctgggacaatcgtgcagatcgtaataaataacaagcacaaacatggccaagtctgtgtctctaacgggaagacatatagtcacggcgaaagttggcatccaaatctccgcgcgtttggaatagtagaatgcgtcctgtgtacgtgtaacgtgaccaagcaagaatgtaagaaaattcactgtcccaaccgatatccatgcaagtatccacaaaagatcgatggaaaatgttgtaaagtgtgccccggcaagaaagccaaagaactacccggccagtcgttcgataacaagggatacttttgtggcgaagaaacaatgccggtctatgagagtgtgtttatggaggacggggagaccactagaaaaattgctctggaaacagagcggccccctcaggttgaagttcatgtgtggaccatacggaagggaatccttcagcattttcacattgaaaagatatctaagcggatgttcgaagaattgccgcactttaagctggtcactcgcacaactctgtcacagtggaagatctttacggaaggtgaagcccagatttcccagatgtgctcgagccgcgtgtgtcgtaccgaactcgaggacctggtgaaagtactgtacctggagcgttccgagaagggacattgttag

SEQ ID NO: 240608 - DNA, 1371 bp, Artificial Sequence
  derived and/or modified sequence
atgcggaagaagtggaagatgggcggcatgaagtacatcttcagcctcctctttttcttgttgctcgaggggggaaagacagaacaggtgaagcatagtgagacctactgcatgttccaggataaaaaatacagagttggagaaaggtggcatccatatctggaaccatacggattggtgtactgcgtgaactgcatctgcagcgagaatgggaatgtgttatgctcccgggtcaggtgcccaaacgttcactgccttagccccgtgcacattcctcatctgtgttgccctcgctgccctgattctctgccccctgtgaataacaaggtaaccagtaagtcctgcgaatataacggcaccacatatcagcatggagagttgtttgtggccgagggtctgttccagaacagacagcccaaccaatgcactcagtgctcttgttccgagggcaatgtatactgcggcctcaaaacttgcccaaagttgacctgtgcattcccagtcagcgtccctgacagttgctgtagagtgtgtagaggagatggtgaactgtcatgggaacatagcgatggcgacatcttccggcagccagccaatcgcgaggcccggcatagctatcaccggtctcattacgacccccctccctcgagacaggccggtggattgtcccgtttccccggggctcggagtcatcgtggggccctgatggatagccagcaagcttccggaaccatcgtgcagattgttattaacaacaaacacaaacacggccaggtatgtgtctccaacggaaaaacttacagccatggagagagctggcatccaaaccttcgggctttcgggattgtggaatgcgtgctgtgtacatgcaatgtcacgaagcaggaatgcaagaaaattcattgcccaaaccgctacccatgcaagtatccccagaagattgatggcaaatgttgcaaggtttgccctggtaagaaggctaaagagctcccgggtcaatccttcgacaacaaaggatatttctgcggcgaagaaaccatgccagtgtatgagagcgtcttcatggaggacggcgaaacaacgagaaaaattgccttggagactgagcggcccccccaggtagaagtacatgtttggacaattcggaaggggattctgcagcacttccacattgagaagatcagtaaacggatgttcgaggaactcccacactttaagttggtcactaggactaccctctcccaatggaagatttttactgagggtgaggcacagatttcccaaatgtgttcgtcccgcgtatgcagaactgagctggaggaccttgtcaaagtactttacttagaaagatctgagaaaggacactgctag

SEQ ID NO: 240609 - DNA, 1371 bp, Artificial Sequence
  derived and/or modified sequence
atgcggaagaagtggaagatgggcggcatgaagtacatcttcagcctcttatttttcctgctgttggaagggggcaaaactgaacaggtcaagcattcggaaacctattgcatgttccaggacaagaagtatcgggtgggagagcgttggcatccgtatctagaaccctacgggctcgtgtactgcgtgaactgtatctgctccgagaacggcaatgtgctctgttcaagggtgcggtgccccaacgtgcactgtttgtctcctgtacacatcccacatctatgctgcccacgctgccccgattctctccccccagtcaataacaaggttacgtccaagtcttgtgaatacaacgggaccacctaccagcatggtgaactctttgtggctgagggtctgtttcagaaccgccagccaaaccagtgcacgcagtgtagctgctccgagggaaacgtctactgtggcctgaagacctgtccaaaactgacctgcgccttccccgtgtccgtgccagattcctgttgccgagtgtgccgtggggacggcgaattatcttgggaacattctgatggcgacatctttcgccagcctgccaaccgagaggcccggcacagctatcataggtctcactacgaccctccaccatcacgccaggcaggaggcctgtccagattccccggtgcacgctctcaccgcggagccttgatggattctcagcaagcttcggggacaatcgtgcagatcgtcattaataacaagcacaagcacgggcaggtatgtgtttccaatggtaagacgtactcccatggggagtcatggcaccccaacctgcgggcctttggaattgtcgaatgtgtgctgtgcacatgcaatgttaccaaacaggagtgcaaaaagatccactgtccaaatagatatccttgtaagtatccacaaaaaatcgatgggaaatgctgtaaggtatgtcctggcaagaaggctaaggagcttcccggccagtccttcgacaataaagggtacttctgcggtgaagaaacaatgccggtatacgaatcggtattcatggaggacggagagaccactcggaagattgccttggagacagagcgcccaccgcaggtagaggttcacgtgtggactattcgaaagggaattctgcaacatttccacatcgagaagatctccaagcgcatgtttgaggagctgccccacttcaagctcgttaccaggacgactctcagccagtggaagatcttcactgaaggagaggctcagatctctcaaatgtgtagttctcgggtgtgcagaacagagctagaggatttagttaaggtcctgtatctggagaggtcagagaagggtcactgttag

SEQ ID NO: 240610 - DNA, 1353 bp, Artificial Sequence
  derived and/or modified sequence
atgggcggtatgaaatacatatttagtctgctgtttttcttgctcttggaaggaggaaaaactgagcaggttaagcactccgagacatactgcatgttccaggataagaaatacagagtgggcgaaagatggcatccctatctcgaaccctatgggctggtatactgcgtaaactgcatctgcagcgagaacggcaacgtgttgtgctcaagggtgagatgtcctaacgtgcattgtctgagcccagtgcacataccacacctgtgttgtcccaggtgtccagactcccttccgccagtgaataacaaagtgacatcgaagtcatgcgaatataatggaacaacttatcagcatggcgaactgtttgtcgccgaaggcctgtttcagaaccgacagcctaatcagtgcacccagtgctcgtgctcagagggtaatgtgtattgcggactgaagacttgcccaaagctgacttgcgccttcccagtatcagtaccggatagttgctgccgggtgtgtagaggagatggcgagctctcttgggagcactctgatggcgatatattcagacagcctgcaaatagagaagccagacattcttaccatcgctctcactacgatccccctccctcccggcaggccggtggcctgtcccggttcccaggagccaggagtcacagaggcgcactgatggactcacagcaggcatccggaacaatagtacagattgtgatcaataacaagcacaagcatggccaggtttgcgtcagcaatggaaaaacctatagccacggtgagagctggcaccccaatctcagagcatttggaattgtcgaatgtgtgctctgcacttgcaacgtcacaaagcaggagtgtaaaaagatccattgcccaaatagatatccttgcaaataccctcagaagatcgacggtaaatgttgcaaagtttgtcctgggaagaaagcaaaagaactccctgggcagtcctttgacaacaaggggtacttttgcggggaggagaccatgccagtatacgaatcagtgtttatggaggacggcgaaacgacccggaaaatagctctcgaaacagagcgtcctcctcaagtggaagtgcacgtctggactatccgtaagggcatactccagcacttccatattgaaaagatcagcaagcgcatgttcgaggaactcccgcactttaagttagtgaccaggaccacattatctcagtggaaaattttcaccgaaggcgaggcacagatcagccagatgtgttcatcaagggtgtgtcgcacggaattagaagacctcgttaaagtgctctacctggaaagaagcgagaaaggtcactgttag

SEQ ID NO: 240611 - DNA, 1371 bp, Artificial Sequence
  derived and/or modified sequence
atgcggaaaaagtggaagatgggcggaatgaagtatattttctctctcctgttctttctcctgctagagggagggaagaccgaacaagtcaaacatagtgagacttactgtatgtttcaggacaaaaagtatagggtaggcgaaagatggcacccatacctcgagccgtacgggctggtgtattgtgtgaattgtatttgcagtgagaacggaaacgtgctctgttcccgcgtaaggtgtcccaacgtacattgtctatcgcctgtgcatatcccccacctgtgctgtccgaggtgtccagacagtctgcccccagtaaacaacaaggtaacgagcaagtcttgtgaatataatgggactacctatcagcacggggagctctttgtggccgaaggactgttccaaaataggcagcctaatcagtgcacccagtgtagttgttccgagggcaacgtgtattgtggcctgaagacctgtcccaagttgacgtgtgccttcccagtatccgtgcccgattcctgttgtcgggtgtgcaggggcgacggggaactgtcatgggagcactcagatggagacattttcagacagcctgcaaatagagaagccagacactcttaccaccgttcccactatgatccccctccatcaaggcaagctgggggattatctagattccccggagccaggagccacagaggcgcacttatggattctcagcaggccagcggcaccattgtccagatcgttataaacaacaaacataagcacggtcaggtgtgcgtttccaatggaaaaacatatagtcatggcgaatcttggcatcctaatctgcgggctttcggtattgtggaatgcgttctctgcacttgtaacgtgaccaagcaggaatgtaagaagatacattgccctaacaggtacccctgcaaatatccccagaagatcgatggcaagtgttgcaaagtttgccccggtaaaaaagctaaagagttgccaggccagagcttcgacaacaaaggctatttttgcggtgaagagacgatgccagtttatgagagtgtattcatggaagatggtgaaacgacgaggaaaatcgcgctagaaacagagaggcctccccaggtcgaagtgcacgtctggaccattcgtaaaggaatcctgcagcactttcacatcgaaaagatttccaagagaatgttcgaggagttgcctcattttaagttagtgactaggactacactttcgcagtggaagatatttactgagggggaagcgcaaatcagccaaatgtgttcctctcgggtctgtagaaccgaactcgaggaccttgtgaaagtgctctacctagagcgatcagaaaagggacattgttag

SEQ ID NO: 240612 - DNA, 1371 bp, Artificial Sequence
  derived and/or modified sequence
atgcgcaaaaagtggaagatgggcggtatgaagtacatcttcagtcttttgttttttctgctcttagagggaggcaaaacagagcaggttaaacactcagaaacctactgtatgtttcaggacaaaaaataccgtgtcggagagaggtggcacccgtacctggagccctatggcttagtctattgcgttaattgtatatgttctgaaaacggtaacgttttgtgtagtagagtcaggtgccccaacgtacattgtctttcacctgtgcatatcccccatttatgctgcccgcgttgtcccgactctctcccacccgtaaataataaggtcaccagcaagagttgcgaatacaatgggaccacctaccaacatggcgaactcttcgtagcagaaggtctgtttcagaaccgccagccaaaccaatgtactcaatgtagttgctcggagggcaacgtctattgcggcctgaagacttgtccaaagctaacttgtgcatttcccgtatccgttcccgattcgtgttgtagggtgtgtaggggcgacggcgagctgtcttgggaacatagcgacggggatatctttagacaaccagctaatagggaagctagacacagttatcaccggagccactacgatcccccaccctctaggcaggcagggggtctttcaagatttcctggtgctcggtctcacaggggcgctctgatggactcccagcaagcaagcggtaccattgttcaaattgtgatcaacaacaagcataaacatggccaggtgtgcgtgtccaacgggaaaacatattcccacggcgaatcctggcatcccaacctgcgagcctttggcatcgtggagtgcgtattgtgcacttgtaatgttaccaagcaggagtgcaaaaaaatccactgtcccaacagatacccgtgtaagtatccccagaaaattgatggcaagtgttgcaaagtttgtccaggcaaaaaagcgaaggagcttcccggacagtctttcgacaataagggctacttctgtggagaggaaacaatgcccgtttacgaaagtgtatttatggaagacggcgagacaacaaggaaaatcgctctggaaacagaacgtccacctcaggtcgaagtgcacgtatggactataagaaaaggcatcctccagcatttccacattgaaaagatatccaagcggatgtttgaggagctcccccacttcaagctcgtcaccaggactacactgtcacagtggaagatctttaccgaaggggaggctcagataagccagatgtgttcgagcagggtctgtcgcacagaactcgaagatctggtgaaggtgctgtacctcgagagatcggaaaaagggcactgctag

SEQ ID NO: 240613 - DNA, 3935 bp, Artificial Sequence
  derived and/or modified sequence
actctagctctcgccacaacctgccagccccagacctcggacgagagcgccccggggagctcggagcgcgtgcacgcgtggcagacggagaaggccagtgcccaggttagtgagcagtgcccggcgcccgcttccctcacctccttttccagcctttgcacagcttgaaggttctgtcaccttttgcagtggtccaaatgagaaaaaagtggaaaatgggaggcatgaaatacatcttttcgttgttgttctttcttttgctagaaggaggcaaaacagagcaagtaaaacattcagagacatattgcatgtttcaagacaagaagtacagagtgggtgagagatggcatccttacctggaaccttatgggttggtttactgcgtgaactgcatctgctcagagaatgggaatgtgctttgcagccgagtcagatgtccaaatgttcattgcctttctcctgtgcatattcctcatctgtgctgccctcgctgcccagactccttacccccagtgaacaataaggtgaccagcaagtcttgcgagtacaatgggacaacttaccaacatggagagctgttcgtagctgaagggctctttcagaatcggcaacccaatcaatgcacccagtgcagctgttcggagggaaacgtgtattgtggtctcaagacttgccccaaattaacctgtgccttcccagtctctgttccagattcctgctgccgggtatgcagaggagatggagaactgtcatgggaacattctgatggtgatatcttccggcaacctgccaacagagaagcaagacattcttaccaccgctctcactatgatcctccaccaagccgacaggctggaggtctgtcccgctttcctggggccagaagtcaccggggagctcttatggattcccagcaagcatcaggaaccattgtgcaaattgtcatcaataacaaacacaagcatggacaagtgtgtgtttccaatggaaagacctattctcatggcgagtcctggcacccaaacctccgggcatttggcattgtggagtgtgtgctatgtacttgtaatgtcaccaagcaagagtgtaagaaaatccactgccccaatcgatacccctgcaagtatcctcaaaaaatagacggaaaatgctgcaaggtgtgtccaggtaaaaaagcaaaagaacttccaggccaaagctttgacaataaaggctacttctgcggggaagaaacgatgcctgtgtatgagtctgtattcatggaggatggggagacaaccagaaaaatagcactggagactgagagaccacctcaggtagaggtccacgtttggactattcgaaagggcattctccagcacttccatattgagaagatctccaagaggatgtttgaggagcttcctcacttcaagctggtgaccagaacaaccctgagccagtggaagatcttcaccgaaggagaagctcagatcagccagatgtgttcaagtcgtgtatgcagaacagagcttgaagatttagtcaaggttttgtacctggagagatctgaaaagggccactgttaggcaagacagacagtattggatagggtaaagcaagaaaactcaagctgcagctggactgcaggcttattttgcttaagtcaacagtgccctaaaactccaaactcaaatgcagtcaattattcacgccatgcacagcataatttgctcctttgtgtggagtggtgtgtcagcccttgaacatctcctccaaagagactagaagagtcttaaattatatgtgggaggaggagggatagaacatcacaacactgctctagtttcttggagaatcacatttctttacaggttaaagacaaacaagaccccagggtttttatctagaaagttattcaagtgaaagaaagagaagggaattgcttagtaggagttctgcagtatagaacaattacttgtatgaaattatacctttgaattttagaatgtcatgtgttcttttaaaaaaattagctccccatcctccctcctcactccctccctccctccttctctctctctctctctctccctccctctctcacagacacacacacacacacacacacacacacacacacgcacgtccacactcacattaaacgaaagctttatttgaagcaaagctagccaagattctacgttacttttcccttgactggatcccaagtagcttggaagtttttgtgcccaggagagtaaataactgtgaacaagaggctctgcccttaggtctttgtggctgtttaagtcaccaacaatagagtcagggtaaagaataaaaacactttcatagcctcattcattcacttagaagtggtaataatttttccctaatgataccacttttcttttccccctgtacctatgggacttccagaaagaagttaaattgagtaaaatcatcagaaactgaatccatgtaagaaaaaataattgttgaagaaagaagttgatagaattcaaaaaggccatctttttgctttcacatcaataaaatttaccaagtaatagatcagtactcactaatatttttgagaccatagttgtctggtcagaaaaattatattaaattagtaaattctagaagctctttaaaagggaagttttccttcttctccaattataggagttgatttttactttgcaaagtggctcggtcctcatgagcatctgcatgttgactcttcagttaagaaaattgttgttcatttagggaggtggatattctgatgaagatctttatcctaaaccttcctactatccttgtcttattcatcaagcagatattttagtcaagaattccagagaaggctgctcctaaaatgtctacttgcagcccaataccagagcataaactatccattctggggtctggctttagaaatcatctttgtgggaagacctaattcttcacagcaaggatctcaggcatgccttctagatttgttccctctgaggggcaggaatgaactgtagaaatgttttaaggacccagaaaccccatatgtctcattccatgactataggtgagagaattctttcctaagagggtttgataccaataggggaaaatgtaaaatgttcagtctttatgacaacctggcataaaggagtcaattcttatgaaagagacacaagggccttatggccagggtttcttgggacaagactctcaccagcacatcacacacgttctccttggaagagagaagcagtacatcccggttgagaggtcacaaagcattagtttgtgtgtgtgtgtgtgtgtgtgtgtgtgtgtgtgtgtgtgtgtgtgtggtaaaggggggaaggtgttatgcggctgctccctccgtcccagaggtggcagtgattccataatgtggagactagtaactagatcctaaggcaaagaggtgtttctccttctggatgattcatcccaaagccttcccacccaggtgttctctgaaagcttagccttaagagaacacgcagagagtttccctagatatactcctgcctccaggtgctgggacacacctttgcaaaatgctgtgggaagcaggagctggggagctgtgttaagtcaaagtagaaaccctccagtgtttggtgttgtgtagagaataggacatagggtaaagaggccaagctgcctgtagttagtagagaagaatggatgtggttcttcttgtgtatttatttgtatcataaacacttggaacaacaaagaccataagcatcatttagcagttgtagccattttctagttaactcatgtaaacaagtaagagtaacataacagtattaccctttcactgttctcacaggacatgtacctaattatggtacttatttatgtagtcactgtatttctggatttttaaattaataaaaaagttaattttg

SEQ ID NO: 240614 - DNA, 3860 bp, Artificial Sequence
  derived and/or modified sequence
gacggagaaggccagtgcccaggttagtgagcagtgcccggcgcccgcttccctcacctccttttccagcctttgcacagcttgaaggttctgtcaccttttgcagtggtccaaatgagaaaaaagtggaaaatgggaggcatgaaatacatcttttcgttgttgttctttcttttgctagaaggaggcaaaacagagcaagtaaaacattcagagacatattgcatgtttcaagacaagaagtacagagtgggtgagagatggcatccttacctggaaccttatgggttggtttactgcgtgaactgcatctgctcagagaatgggaatgtgctttgcagccgagtcagatgtccaaatgttcattgcctttctcctgtgcatattcctcatctgtgctgccctcgctgcccagactccttacccccagtgaacaataaggtgaccagcaagtcttgcgagtacaatgggacaacttaccaacatggagagctgttcgtagctgaagggctctttcagaatcggcaacccaatcaatgcacccagtgcagctgttcggagggaaacgtgtattgtggtctcaagacttgccccaaattaacctgtgccttcccagtctctgttccagattcctgctgccgggtatgcagaggagatggagaactgtcatgggaacattctgatggtgatatcttccggcaacctgccaacagagaagcaagacattcttaccaccgctctcactatgatcctccaccaagccgacaggctggaggtctgtcccgctttcctggggccagaagtcaccggggagctcttatggattcccagcaagcatcaggaaccattgtgcaaattgtcatcaataacaaacacaagcatggacaagtgtgtgtttccaatggaaagacctattctcatggcgagtcctggcacccaaacctccgggcatttggcattgtggagtgtgtgctatgtacttgtaatgtcaccaagcaagagtgtaagaaaatccactgccccaatcgatacccctgcaagtatcctcaaaaaatagacggaaaatgctgcaaggtgtgtccaggtaaaaaagcaaaagaacttccaggccaaagctttgacaataaaggctacttctgcggggaagaaacgatgcctgtgtatgagtctgtattcatggaggatggggagacaaccagaaaaatagcactggagactgagagaccacctcaggtagaggtccacgtttggactattcgaaagggcattctccagcacttccatattgagaagatctccaagaggatgtttgaggagcttcctcacttcaagctggtgaccagaacaaccctgagccagtggaagatcttcaccgaaggagaagctcagatcagccagatgtgttcaagtcgtgtatgcagaacagagcttgaagatttagtcaaggttttgtacctggagagatctgaaaagggccactgttaggcaagacagacagtattggatagggtaaagcaagaaaactcaagctgcagctggactgcaggcttattttgcttaagtcaacagtgccctaaaactccaaactcaaatgcagtcaattattcacgccatgcacagcataatttgctcctttgtgtggagtggtgtgtcagcccttgaacatctcctccaaagagactagaagagtcttaaattatatgtgggaggaggagggatagaacatcacaacactgctctagtttcttggagaatcacatttctttacaggttaaagacaaacaagaccccagggtttttatctagaaagttattcaagtgaaagaaagagaagggaattgcttagtaggagttctgcagtatagaacaattacttgtatgaaattatacctttgaattttagaatgtcatgtgttcttttaaaaaaattagctccccatcctccctcctcactccctccctccctccttctctctctctctctctctccctccctctctcacagacacacacacacacacacacacacacacacacacgcacgtccacactcacattaaacgaaagctttatttgaagcaaagctagccaagattctacgttacttttcccttgactggatcccaagtagcttggaagtttttgtgcccaggagagtaaataactgtgaacaagaggctctgcccttaggtctttgtggctgtttaagtcaccaacaatagagtcagggtaaagaataaaaacactttcatagcctcattcattcacttagaagtggtaataatttttccctaatgataccacttttcttttccccctgtacctatgggacttccagaaagaagttaaattgagtaaaatcatcagaaactgaatccatgtaagaaaaaataattgttgaagaaagaagttgatagaattcaaaaaggccatctttttgctttcacatcaataaaatttaccaagtaatagatcagtactcactaatatttttgagaccatagttgtctggtcagaaaaattatattaaattagtaaattctagaagctctttaaaagggaagttttccttcttctccaattataggagttgatttttactttgcaaagtggctcggtcctcatgagcatctgcatgttgactcttcagttaagaaaattgttgttcatttagggaggtggatattctgatgaagatctttatcctaaaccttcctactatccttgtcttattcatcaagcagatattttagtcaagaattccagagaaggctgctcctaaaatgtctacttgcagcccaataccagagcataaactatccattctggggtctggctttagaaatcatctttgtgggaagacctaattcttcacagcaaggatctcaggcatgccttctagatttgttccctctgaggggcaggaatgaactgtagaaatgttttaaggacccagaaaccccatatgtctcattccatgactataggtgagagaattctttcctaagagggtttgataccaataggggaaaatgtaaaatgttcagtctttatgacaacctggcataaaggagtcaattcttatgaaagagacacaagggccttatggccagggtttcttgggacaagactctcaccagcacatcacacacgttctccttggaagagagaagcagtacatcccggttgagaggtcacaaagcattagtttgtgtgtgtgtgtgtgtgtgtgtgtgtgtgtgtgtgtgtgtgtgtgtggtaaaggggggaaggtgttatgcggctgctccctccgtcccagaggtggcagtgattccataatgtggagactagtaactagatcctaaggcaaagaggtgtttctccttctggatgattcatcccaaagccttcccacccaggtgttctctgaaagcttagccttaagagaacacgcagagagtttccctagatatactcctgcctccaggtgctgggacacacctttgcaaaatgctgtgggaagcaggagctggggagctgtgttaagtcaaagtagaaaccctccagtgtttggtgttgtgtagagaataggacatagggtaaagaggccaagctgcctgtagttagtagagaagaatggatgtggttcttcttgtgtatttatttgtatcataaacacttggaacaacaaagaccataagcatcatttagcagttgtagccattttctagttaactcatgtaaacaagtaagagtaacataacagtattaccctttcactgttctcacaggacatgtacctaattatggtacttatttatgtagtcactgtatttctggatttttaaattaataaaaaagttaattttgaaaaatca

SEQ ID NO: 240615 - DNA, 2413 bp, Artificial Sequence
  derived and/or modified sequence
gacggagaaggccagtgcccagcttgaaggttctgtcaccttttgcagtggtccaaatgagaaaaaagtggaaaatgggaggcatgaaatacatcttttcgttgttgttctttcttttgctagaaggaggcaaaacagagcaagtaaaacattcagagacatattgcatgtttcaagacaagaagtacagagtgggtgagagatggcatccttacctggaaccttatgggttggtttactgcgtgaactgcatctgctcagagaatgggaatgtgctttgcagccgagtcagatgtccaaatgttcattgcctttctcctgtgcatattcctcatctgtgctgccctcgctgcccagactccttacccccagtgaacaataaggtgaccagcaagtcttgcgagtacaatgggacaacttaccaacatggagagctgttcgtagctgaagggctctttcagaatcggcaacccaatcaatgcacccagtgcagctgttcggagggaaacgtgtattgtggtctcaagacttgccccaaattaacctgtgccttcccagtctctgttccagattcctgctgccgggtatgcagaggagatggagaactgtcatgggaacattctgatggtgatatcttccggcaacctgccaacagagaagcaagacattcttaccaccgctctcactatgatcctccaccaagccgacaggctggaggtctgtcccgctttcctggggccagaagtcaccggggagctcttatggattcccagcaagcatcaggaaccattgtgcaaattgtcatcaataacaaacacaagcatggacaagtgtgtgtttccaatggaaagacctattctcatggcgagtcctggcacccaaacctccgggcatttggcattgtggagtgtgtgctatgtacttgtaatgtcaccaagcaagagtgtaagaaaatccactgccccaatcgatacccctgcaagtatcctcaaaaaatagacggaaaatgctgcaaggtgtgtccaggtaaaaaagcaaaagaacttccaggccaaagctttgacaataaaggctacttctgcggggaagaaacgatgcctgtgtatgagtctgtattcatggaggatggggagacaaccagaaaaatagcactggagactgagagaccacctcaggtagaggtccacgtttggactattcgaaagggcattctccagcacttccatattgagaagatctccaagaggatgtttgaggagcttcctcacttcaagctggtgaccagaacaaccctgagccagtggaagatcttcaccgaaggagaagctcagatcagccagatgtgttcaagtcgtgtatgcagaacagagcttgaagatttagtcaaggttttgtacctggagagatctgaaaagggccactgttaggcaagacagacagtattggatagggtaaagcaagaaaactcaagctgcagctggactgcaggcttattttgcttaagtcaacagtgccctaaaactccaaactcaaatgcagtcaattattcacgccatgcacagcataatttgctcctttgtgtggagtggtgtgtcagcccttgaacatctcctccaaagagactagaagagtcttaaattatatgtgggaggaggagggatagaacatcacaacactgctctagtttcttggagaatcacatttctttacaggttaaagacaaacaagaccccagggtttttatctagaaagttattcaagtgaaagaaagagaagggaattgcttagtaggagttctgcagtatagaacaattacttgtatgaaattatacctttgaattttagaatgtcatgtgttcttttaaaaaaattagctccccatcctccctcctcactccctccctccctccttctctctctctctctctctccctccctctctcacagacacacacacacacacacacacacacacacacacgcacgtccacactcacattaaacgaaagctttatttgaagcaaagctagccaagattctacgttacttttcccttgactggatcccaagtagcttggaagtttttgtgcccaggagagtaaataactgtgaacaagaggctctgcccttaggtctttgtggctgtttaagtcaccaacaatagagtcagggtaaagaataaaaacactttcatagcctcattcattcacttagaagtggtaataatttttccctaatgataccacttttcttttccccctgtacctatgggacttccagaaagaagttaaattgagtaaaatcatcagaaactgaatccatgtaagaaaaaataattgttgaagaaagaagttgatagaattcaaaaaggccatctttttgctttcacatcaataaaatttaccaagtaata

SEQ ID NO: 240616 - DNA, 1353 bp, Artificial Sequence
  derived and/or modified sequence
atgggcggcatgaagtacatcttcagcctgctgttcttcctgctgctggagggcggcaagaccgagcaggtgaagcacagcgagacctactgcatgttccaggacaagaagtacagagtgggcgagagatggcacccctacctggagccctacggcctggtgtactgcgtgaactgcatctgcagcgagaacggcaacgtgctgtgcagcagagtgagatgccccaacgtgcactgcctgagccccgtgcacatcccccacctgtgctgccccagatgccccgacagcctgccccccgtgaacaacaaggtgaccagcaagagctgcgagtacaacggcaccacctaccagcacggcgagctgttcgtggccgagggcctgttccagaacagacagcccaaccagtgcacccagtgcagctgcagcgagggcaacgtgtactgcggcctgaagacctgccccaagctgacctgcgccttccccgtgagcgtgcccgacagctgctgcagagtgtgcagaggcgacggcgagctgagctgggagcacagcgacggcgacatcttcagacagcccgccaacagagaggccagacacagctaccacagaagccactacgaccccccccccagcagacaggccggcggcctgagcagattccccggcgccagaagccacagaggcgccctgatggacagccagcaggccagcggcaccatcgtgcagatcgtgatcaacaacaagcacaagcacggccaggtgtgcgtgagcaacggcaagacctacagccacggcgagagctggcaccccaacctgagagccttcggcatcgtggagtgcgtgctgtgcacctgcaacgtgaccaagcaggagtgcaagaagatccactgccccaacagatacccctgcaagtacccccagaagatcgacggcaagtgctgcaaggtgtgccccggcaagaaggccaaggagctgcccggccagagcttcgacaacaagggctacttctgcggcgaggagaccatgcccgtgtacgagagcgtgttcatggaggacggcgagaccaccagaaagatcgccctggagaccgagagacccccccaggtggaggtgcacgtgtggaccatcagaaagggcatcctgcagcacttccacatcgagaagatcagcaagagaatgttcgaggagctgccccacttcaagctggtgaccagaaccaccctgagccagtggaagatcttcaccgagggcgaggcccagatcagccagatgtgcagcagcagagtgtgcagaaccgagctggaggacctggtgaaggtgctgtacctggagagaagcgagaagggccactgctag

SEQ ID NO: 240617 - DNA, 1371 bp, Artificial Sequence
  derived and/or modified sequence
atgagaaagaagtggaagatgggcggcatgaagtacatcttcagcctgctgttcttcctgctgctggagggcggcaagaccgagcaggtgaagcacagcgagacctactgcatgttccaggacaagaagtacagagtgggcgagagatggcacccctacctggagccctacggcctggtgtactgcgtgaactgcatctgcagcgagaacggcaacgtgctgtgcagcagagtgagatgccccaacgtgcactgcctgagccccgtgcacatcccccacctgtgctgccccagatgccccgacagcctgccccccgtgaacaacaaggtgaccagcaagagctgcgagtacaacggcaccacctaccagcacggcgagctgttcgtggccgagggcctgttccagaacagacagcccaaccagtgcacccagtgcagctgcagcgagggcaacgtgtactgcggcctgaagacctgccccaagctgacctgcgccttccccgtgagcgtgcccgacagctgctgcagagtgtgcagaggcgacggcgagctgagctgggagcacagcgacggcgacatcttcagacagcccgccaacagagaggccagacacagctaccacagaagccactacgaccccccccccagcagacaggccggcggcctgagcagattccccggcgccagaagccacagaggcgccctgatggacagccagcaggccagcggcaccatcgtgcagatcgtgatcaacaacaagcacaagcacggccaggtgtgcgtgagcaacggcaagacctacagccacggcgagagctggcaccccaacctgagagccttcggcatcgtggagtgcgtgctgtgcacctgcaacgtgaccaagcaggagtgcaagaagatccactgccccaacagatacccctgcaagtacccccagaagatcgacggcaagtgctgcaaggtgtgccccggcaagaaggccaaggagctgcccggccagagcttcgacaacaagggctacttctgcggcgaggagaccatgcccgtgtacgagagcgtgttcatggaggacggcgagaccaccagaaagatcgccctggagaccgagagacccccccaggtggaggtgcacgtgtggaccatcagaaagggcatcctgcagcacttccacatcgagaagatcagcaagagaatgttcgaggagctgccccacttcaagctggtgaccagaaccaccctgagccagtggaagatcttcaccgagggcgaggcccagatcagccagatgtgcagcagcagagtgtgcagaaccgagctggaggacctggtgaaggtgctgtacctggagagaagcgagaagggccactgctag

SEQ ID NO: 240618 - protein, 345 aa, Artificial Sequence
  derived and/or modified sequence
MEPQKIMPPSKPHPPVVGKVTHHSIELYWDLEKKAKRQGPQEQWFRFSIEEEDPKMHTYGIIYTGYATKHVVEGLEPRTLYRFRLKVTSPSGECEYSPLVSVSTTREPISSEHLHRAVSVNDEDLLVRILQGGRVKVDVPNKFGFTALMVAAQKGYTRLVKILVSNGTDVNLKNGSGKDSLMLACYAGHLDVVKYLRRHGASWQARDLGGCTALHWAADGGHCSVIEWMIKDGCEVDVVDTGSGWTPLMRVSAVSGNQRVASLLIDAGANVNVKDRNGKTPLMVAVLNNHEELVQLLLDKGADASVKNEFGKGVLEMARVFDRQSVVSLLEERKKKQRPKKSCVC

SEQ ID NO: 240619 - protein, 339 aa, Artificial Sequence
  derived and/or modified sequence
MPPSKPHPPVVGKVTHHSIELYWDLEKKAKRQGPQEQWFRFSIEEEDPKMHTYGIIYTGYATKHVVEGLEPRTLYRFRLKVTSPSGECEYSPLVSVSTTREPISSEHLHRAVSVNDEDLLVRILQGGRVKVDVPNKFGFTALMVAAQKGYTRLVKILVSNGTDVNLKNGSGKDSLMLACYAGHLDVVKYLRRHGASWQARDLGGCTALHWAADGGHCSVIEWMIKDGCEVDVVDTGSGWTPLMRVSAVSGNQRVASLLIDAGANVNVKDRNGKTPLMVAVLNNHEELVQLLLDKGADASVKNEFGKGVLEMARVFDRQSVVSLLEERKKKQRPKKSCVC

SEQ ID NO: 240620 - DNA, 1294 bp, Artificial Sequence
  derived and/or modified sequence
cacttcgcctccgggttgtcagggcaaccgtagcgacgccggccctggctgagaggcgttaggagtccgggggttcgcccgcggaggccggggagcagccgaccatggagccccagaaaatcatgccaccctcaaagcctcatccacctgtcgtgggcaaagtgactcatcacagcattgaattatactgggatctggaaaagaaagccaaacgccaaggacctcaagagcagtggttcaggttctcgattgaagaagaagaccccaaaatgcacacttatggtatcatttatacgggatatgcaacgaagcatgttgttgaaggtctggaaccaaggacgctgtacagatttcgcctgaaggtcaccagcccctctggggagtgtgagtacagcccactcgtctcagtgtctacaaccagagagcccataagtagtgagcacttgcaccgggctgtcagtgtgaatgatgaagatttgctggtccgaatacttcaaggaggccgtgttaaggttgatgttcccaataagtttggctttaccgctctgatggttgctgcccagaaaggatacaccaggcttgtgaaaatcctagtttctaatggcacagacgtgaatctgaagaatggaagtggcaaggacagtctaatgctggcgtgctatgcgggacacctagatgttgtgaaatatctccgaagacatggcgcttcttggcaggctagagacctgggaggctgtacagctctgcactgggctgcagatggaggccactgcagtgtgattgagtggatgataaaggatggctgtgaggtagacgtcgtggacactggttcaggatggaccccactcatgagagtctctgcggtgtcgggaaatcagagggtggcctctcttctaattgatgctggggccaatgtgaatgtgaaggacagaaatggaaagacgccccttatggtggctgtgttaaataatcatgaagagttagttcagttacttcttgacaaaggggcagatgcaagtgtaaaaaatgagttcggcaaaggtgtcctagaaatggccagagtttttgacagacagagtgtagtctccttattagaagaaaggaaaaaaaagcagaggccaaagaagtcttgtgtctgctgatgagagcaccactcatctgcgaaacgcacgtaaaacaaagtgaaccgtgactgttaaactagggatgggaaattctgcatcttggggggctgtacatttatttatttagttgaagattcactgatcccactttgaaatacatctttttacct

SEQ ID NO: 240621 - DNA, 1296 bp, Artificial Sequence
  derived and/or modified sequence
cacttcgcctccgggttgtcagggcaaccgtagcgacgccggccctggctgagaggcgttaggagtccgggggttcgcccgcggaggccggggagcagccgaccatggagccccagaaaatcatgccaccctcaaagcctcatccacctgtcgtgggcaaagtgactcatcacagcattgaattatactgggatctggaaaagaaagccaaacgccaaggacctcaagagcagtggttcaggttctcgattgaagaagaagaccccaaaatgcacacttatggtatcatttatacgggatatgcaacgaagcatgttgttgaaggtctggaaccaaggacgctgtacagatttcgcctgaaggtcaccagcccctctggggagtgtgagtacagcccactcgtctcagtgtctacaaccagagagcccataagtagtgagcacttgcaccgggctgtcagtgtgaatgatgaagatttgctggtccgaatacttcaaggaggccgtgttaaggttgatgttcccaataagtttggctttaccgctctgatggttgctgcccagaaaggatacaccaggcttgtgaaaatcctagtttctaatggcacagacgtgaatctgaagaatggaagtggcaaggacagtctaatgctggcgtgctatgcgggacacctagatgttgtgaaatatctccgaagacatggcgcttcttggcaggctagagacctgggaggctgtacagctctgcactgggctgcagatggaggccactgcagtgtgattgagtggatgataaaggatggctgtgaggtagacgtcgtggacactggttcaggatggaccccactcatgagagtctctgcggtgtcgggaaatcagagggtggcctctcttctaattgatgctggggccaatgtgaatgtgaaggacagaaatggaaagacgccccttatggtggctgtgttaaataatcatgaagagttagttcagttacttcttgacaaaggggcagatgcaagtgtaaaaaatgagttcggcaaaggtgtcctagaaatggccagagtttttgacagacagagtgtagtctccttattagaagaaaggaaaaaaaagcagaggccaaagaagtcttgtgtctgctgatgagagcaccactcatctgcgaaacgcacgtaaaacaaagtgaaccgtgactgttaaactagggatgggaaattctgcatcttggggggctgtacatttatttatttagttgaagattcactgatcccactttgaaatacatctttttacctaa

SEQ ID NO: 240622 - DNA, 1038 bp, Artificial Sequence
  derived and/or modified sequence
atggaaccgcaaaaaattatgccaccatctaaaccccacccgcccgtggtagggaaggtaacccaccactctatcgagctgtactgggacctggaaaaaaaagctaaaagacaaggcccccaagagcaatggttccgcttcagtattgaggaggaggatcctaaaatgcacacctatggtataatctatacgggatatgccactaaacatgtggtcgaagggctcgaacccaggaccctctacagattccgactgaaagtgacgtcaccttcaggggaatgcgaatattccccactcgtgtccgtaagcacgactagagagcccatctcttcagagcatctgcaccgcgccgtgagcgtgaatgatgaagatttgctcgtgagaatcctgcagggaggacgggtgaaagtggatgtgcctaacaaattcgggttcaccgctctcatggtggctgcccagaagggatataccaggctcgtgaaaattctggttagtaatggaaccgacgtgaacctgaaaaacggctccggaaaagattctctaatgctggcgtgttacgccggacacctggatgttgttaagtatctacgtcgacatggcgcttcctggcaagctcgcgacctgggaggttgcaccgctctgcattgggctgctgacgggggccactgttccgtgattgagtggatgattaaggacgggtgcgaggtcgacgttgttgacacaggaagcgggtggacaccactgatgcgggtctcagcggtgtccgggaatcaaagggtagcgagcctgttaattgatgcaggggccaacgttaatgtgaaagaccggaacggcaaaactcctttgatggtggcggtcctgaacaaccatgaggagctggtgcagctcctgctagacaaaggggcggacgcttctgtaaagaacgaattcggcaaaggcgtgctggagatggctagggtgttcgaccgtcagtcggtggtgtcattgctcgaggagaggaaaaagaaacaaagacccaagaaatcctgcgtgtgttag

SEQ ID NO: 240623 - DNA, 1038 bp, Artificial Sequence
  derived and/or modified sequence
atggagccccagaagatcatgccacccagcaagccccacccccctgtggtgggcaaggtgacccaccacagcattgagctgtactgggacctggagaagaaggccaagaggcagggcccccaggagcagtggttccgcttcagcattgaggaggaggaccccaagatgcacacctacggcatcatctacacaggctacgccaccaagcacgtggtggagggcctggagcccaggaccctgtaccgcttccggctgaaggtgaccagccccagcggagaatgtgagtacagccccctggtgtctgtgtccaccacccgggagcccatcagcagcgagcacctgcacagagctgtgtctgtgaatgatgaggacctgctggtgcgcatcctgcagggcggccgggtgaaggtggatgtgcccaacaagtttggcttcaccgccctgatggtggccgcccagaagggctacacccggctggtgaagatcctggtgtccaatggaacagatgtgaacctgaagaatggcagcggcaaggacagcctgatgctggcctgctacgccggccacctggatgtggtgaagtacctgcggagacatggagcctcctggcaggcccgggacctgggcggctgcacagccctgcactgggccgcagatggcggccactgcagcgtcatcgagtggatgatcaaggatggctgtgaggtggatgtggtggacaccggcagcggctggacccccctgatgagggtgtctgctgtgtctggcaaccagagggtggccagcctgctgattgatgctggggccaacgtgaatgtgaaggacagaaatggcaagacccccctgatggtggccgtgctgaacaaccacgaggagctggtgcagctgctgctggacaagggagcagatgcctctgtgaagaatgaatttgggaagggcgtgctggagatggcccgggtgtttgaccggcagagcgtggtgtccctgctggaggagaggaagaagaagcagaggcccaagaagagctgtgtgtgctag

SEQ ID NO: 240624 - DNA, 1038 bp, Artificial Sequence
  derived and/or modified sequence
atggagccccagaagatcatgccccccagcaagccccacccccccgttgtgggcaaggtcacccatcactccatcgaactgtactgggacctcgaaaaaaaagctaaaagacagggcccacaggagcaatggtttcgttttagtatcgaggaagaggacccaaaaatgcacacatacggcattatctacactggctacgccacaaaacatgttgtagaaggcttggagccacgcactctttatcgattccggctcaaagtcacctcaccgtccggagaatgtgaatattcccctctcgtgtcagtgagcacaactagggaacctatatcctcagagcatctccaccgtgctgtgagcgttaatgacgaagacctgctggtgcgaattctgcagggaggtagggtaaaggtggatgtcccaaacaaattcgggtttaccgcactgatggtggccgcgcagaaaggctatactaggttagtgaaaatacttgtttcaaatgggacagatgtcaacttgaaaaacggcagcgggaaagacagcttgatgctggcatgctatgcgggtcatttagatgttgtgaagtacctgcggagacacggtgcttcgtggcaggctagagacttgggtggttgcaccgcccttcattgggccgcagatggtggccactgctctgtcatagaatggatgattaaggatggatgcgaggtagatgtcgtggacacaggttcgggatggacccctttgatgcgtgtgtcagcagtgagtggcaatcagcgtgttgcatcactgctcatcgacgcaggtgccaacgtgaacgttaaagaccgcaatggcaaaacacctctgatggtcgctgtactcaacaaccacgaggaattggtgcagctgctgcttgataagggcgccgacgctagcgttaaaaacgagtttggtaagggagttctagagatggccagagtgttcgacagacagagtgtcgtaagtcttttggaggagcgaaagaagaagcagaggccaaagaagtcttgcgtctgctag

SEQ ID NO: 240625 - DNA, 1038 bp, Artificial Sequence
  derived and/or modified sequence
atggaaccccagaagatcatgccaccaagtaagcctcaccctcccgttgttggaaaggtcacccaccattccatcgaactctactgggatctggagaagaaggccaaacggcagggaccgcaggaacagtggttcagattcagtatagaagaggaggatcccaagatgcatacttacggtattatctacaccggatatgctacgaaacacgttgttgaagggctggagccccgaacattgtatcgattcaggctgaaagtaaccagccctagtggtgaatgcgagtattctcccctggtgtccgtgtccacgacgcgtgagccgatcagcagcgagcatctgcatagagccgtgagtgtgaatgacgaagacctgctggtgcgcatcctccagggcggaagagtgaaggtagatgtccccaacaagttcggatttacagctcttatggtcgcggctcaaaaaggttataccaggctggttaaaattctggtatctaatggtacggacgtgaacctcaaaaatggttctggaaaagattccctgatgctcgcatgttacgcgggacatctcgatgttgtaaaatatctccgacggcacggagcttcatggcaagcccgtgacttagggggttgcaccgccttgcactgggcagctgatggtggtcactgttcggttatcgaatggatgattaaggatggttgtgaagtggacgtggtcgacactggatccggctggacgcccctcatgcgagtaagcgctgtgagtggcaatcaaagggtggcctccctgcttatagatgctggagccaacgtcaacgtcaaagaccggaatggaaaaacaccccttatggtggcagtcctaaataatcacgaggagttggtccaacttctgctggataaaggcgctgacgccagcgtgaagaacgaatttggcaaaggtgtgctagaaatggctagggtgtttgaccgccaatccgtcgtaagtctcctcgaagagcggaaaaagaagcaacgcccaaaaaaaagctgcgtgtgctag

SEQ ID NO: 240626 - DNA, 1038 bp, Artificial Sequence
  derived and/or modified sequence
atggagccccagaagatcatgccccccagcaagccccacccccccgtggtgggcaaggtgacccaccacagcatcgagctgtactgggacctggagaagaaggccaagagacagggcccccaggagcagtggttcagattcagcatcgaggaggaggaccccaagatgcacacctacggcatcatctacaccggctacgccaccaagcacgtggtggagggcctggagcccagaaccctgtacagattcagactgaaggtgaccagccccagcggcgagtgcgagtacagccccctggtgagcgtgagcaccaccagagagcccatcagcagcgagcacctgcacagagccgtgagcgtgaacgacgaggacctgctggtgagaatcctgcagggcggcagagtgaaggtggacgtgcccaacaagttcggcttcaccgccctgatggtggccgcccagaagggctacaccagactggtgaagatcctggtgagcaacggcaccgacgtgaacctgaagaacggcagcggcaaggacagcctgatgctggcctgctacgccggccacctggacgtggtgaagtacctgagaagacacggcgccagctggcaggccagagacctgggcggctgcaccgccctgcactgggccgccgacggcggccactgcagcgtgatcgagtggatgatcaaggacggctgcgaggtggacgtggtggacaccggcagcggctggacccccctgatgagagtgagcgccgtgagcggcaaccagagagtggccagcctgctgatcgacgccggcgccaacgtgaacgtgaaggacagaaacggcaagacccccctgatggtggccgtgctgaacaaccacgaggagctggtgcagctgctgctggacaagggcgccgacgccagcgtgaagaacgagttcggcaagggcgtgctggagatggccagagtgttcgacagacagagcgtggtgagcctgctggaggagagaaagaagaagcagagacccaagaagagctgcgtgtgctag

SEQ ID NO: 240627 - protein, 340 aa, Artificial Sequence
  derived and/or modified sequence
MAASSSEISEMKGVEESPKVPGEGPGHSEAETGPPQVLAGVPDQPEAPQPGPNTTAAPVDSGPKAGLAPETTETPAGASETAQATDLSLSPGGESKANCSPEDPCQETVSKPEVSKEATADQGSRLESAAPPEPAPEPAPQPDPRPDSQPTPKPALQPELPTQEDPTPEILSESVGEKQENGAVVPLQAGDGEEGPAPEPHSPPSKKSPPANGAPPRVLQQLVEEDRMRRAHSGHPGSPRGSLSRHPSSQLAGPGVEGGEGTQKPRDYIILAILSCFCPMWPVNIVAFAYAVMSRNSLQQGDVDGAQRLGRVAKLLSIVALVGGVLIIIASCVINLGVYK

SEQ ID NO: 240628 - DNA, 1023 bp, Artificial Sequence
  derived and/or modified sequence
atggctgcaagttcgtccgagatctccgagatgaaaggcgtcgaagagtcgcctaaggtgcctggagaggggcccggacattccgaggctgagacggggcccccccaggttctggcgggcgtacctgaccagcctgaagcccctcagcccggtcccaacacgactgccgcacccgtggatagcggacctaaggcaggactcgccccggagaccacagagacacccgctggagcgagcgagaccgctcaggccactgatttaagcctgtccccgggcggggagagcaaagcaaactgttctcccgaggatccctgtcaagagaccgtgtccaaacctgaggtgtccaaggaggcaacggccgatcagggcagccggctggaatccgcagcgccacccgaacccgcccccgagcctgcccctcagccagatcccaggcctgattcacagccaacgccgaaacccgccctgcagcccgaactgccaacgcaagaggaccccacacctgaaattctgtcagagtctgtgggcgagaagcaggagaacggggctgttgtgcccttgcaggctggggacggagaagaaggcccagcccctgagccgcatagtccccccagtaaaaaatcaccgcctgctaacggagcgccccctcgtgtgcttcaacagttggtggaagaagacagaatgcgccgagcccactcaggacacccaggcagtcctcgaggcagcctgtcccggcatcccagctcacaactggcagggcctggggtggagggtggcgagggaacgcagaaacctagagactacatcatccttgctatactctcttgcttctgtcctatgtggcctgttaatatcgtcgcattcgcgtacgctgtgatgtcacgcaacagccttcagcagggagatgttgacggggcacaacggctaggccgggttgcaaagctcctctccatcgtggcactggtgggcggagtgctgatcattattgcttcctgcgtgatcaacttgggcgtgtataagtag

SEQ ID NO: 240629 - DNA, 1023 bp, Artificial Sequence
  derived and/or modified sequence
atggccgccagcagcagcgagatcagcgagatgaagggcgtggaggagagccccaaggtgcctggagagggccctggccacagcgaggccgagaccggccccccccaggtgctggccggcgtgcctgaccagcctgaggccccccagcccggccccaacaccacagctgcccctgtggacagcggccccaaggccggcctggcccctgagaccacagagaccccagctggggccagcgagacagcccaggccacagacctgagcctgagccctggaggagagagcaaggccaactgcagccctgaggacccctgccaggagaccgtgtccaagccagaggtgtccaaggaggccacagctgaccagggcagccggctggagagcgctgcccctcctgagcccgcccctgagcccgccccccagcctgaccccaggccagacagccagcccacccccaagccagccctgcagcctgagctgcccacccaggaggaccccaccccagagatcctgtctgagagcgtgggggagaagcaggagaatggagctgtggtgcccctgcaggccggagatggagaggagggccctgcccctgagccccacagcccccccagcaagaagagccccccagccaacggggccccaccccgggtgctgcagcagctggtggaggaggacaggatgagaagagcccacagcggccaccctggcagcccccggggcagcctgagccgccaccccagcagccagctggccggccctggggtggagggcggggagggcacccagaagccccgggactacatcatcctggccatcctgagctgcttctgccccatgtggcctgtgaacatcgtggcctttgcctatgctgtgatgagcaggaacagcctgcagcagggagatgtggatggagcccagaggctgggccgggtggccaagctgctgagcatcgtggccctggtgggcggcgtgctgatcatcatcgccagctgtgtgatcaacctgggcgtgtacaagtag

SEQ ID NO: 240630 - DNA, 1023 bp, Artificial Sequence
  derived and/or modified sequence
atggccgccagcagcagcgagatcagcgagatgaagggcgtggaggaatcgcccaaagttcccggcgaaggacccggtcacagtgaggccgaaaccgggcctccccaggtactggctggtgtgcccgaccagccagaggccccgcagcccgggcccaacacgacagccgcacccgtggatagcgggcctaaggcaggcctcgcacccgaaactacagagacccctgcaggcgcaagtgagacagcccaggcaaccgacttgagtctctctcctggaggtgagtccaaagcaaactgcagccccgaagacccctgtcaggagactgtgtctaaacctgaagtgagtaaagaggccaccgcggatcagggtagccggctggagtccgcggccccacctgaaccagccccggagccagcaccacagccggacccgagacccgactcccagcccaccccgaaacccgccctacagcctgaactgccaacacaggaggatcccactccagagattctctcggagtctgtcggagagaaacaggaaaacggcgcagtcgtccctcttcaggctggtgacggggaagagggtccagcccctgagcctcactctccaccttcaaagaaatcaccaccagcaaatggggcaccaccacgagtcctgcaacagctcgtggaagaggatcgtatgaggagagcccactcaggccacccaggttcaccacggggaagcctatccagacatccgtcttcccagctcgctggacctggcgttgaaggcggggagggaactcagaaaccacgcgactatatcatactggccattctctcttgtttctgccccatgtggcctgtcaacattgttgcctttgcgtatgccgttatgtcccgcaattctctccagcagggagacgtggatggggctcaacgcctcggccgagtggcaaagctcctgtccattgtggccttggtcggcggcgtgctgatcattatagcctcctgcgtgatcaacttgggggtatacaagtag

SEQ ID NO: 240631 - DNA, 1023 bp, Artificial Sequence
  derived and/or modified sequence
atggccgctagttcaagcgagatcagtgagatgaaaggggttgaggaatcaccaaaggtgccgggagaaggaccagggcatagcgaggccgaaactgggcctcctcaggttctcgctggggtcccggaccaaccagaagcacctcaaccaggccctaacactacggccgctcctgtcgattcaggccctaaagcaggcctggctcccgagactacagagacacctgccggagcatctgaaaccgcacaggcaaccgatctctctctgagtccaggtggcgaatccaaggcaaactgctcccccgaggacccttgccaggaaaccgtttctaagccagaagtatccaaggaggctactgccgaccagggatcacggctcgagtctgccgctccccctgaaccggcacctgaacctgctccccagcctgatccccgacctgattcccaaccaaccccaaaaccagccctccagcctgagcttcccacgcaggaggaccccacccctgagatactgtctgagagcgtgggtgagaagcaagaaaacggcgcagtggtgccgctgcaagccggagacggtgaggagggtccagcacctgaacctcactccccaccatctaaaaaaagccccccagcaaatggtgcccctccgcgtgtcctgcagcagctagtggaggaagaccggatgcgacgagcacactctggccaccccggaagtccacgaggaagtctgtcgcggcacccaagctcccagctggccggacccggagtggagggcggtgagggtacacagaagcccagagactatatcatcttggccatactctcttgtttctgtcccatgtggccagtcaacatcgtggcttttgcttacgccgtaatgagcaggaattcgcttcagcagggcgatgtcgacggggcacagcgactggggcgagtggcaaagctgctgtccattgttgccctcgtgggcggagtcttgatcattattgctagctgtgttattaacctaggagtgtacaaatag

SEQ ID NO: 240632 - DNA, 2549 bp, Artificial Sequence
  derived and/or modified sequence
gggctggcgggaggggccggaggctcgcgaggggcgggggcggcgacggcggcggagcgtaggggaggggaccggagaggaggggatgagcacacgggagaggagaagagggagacccgccgcctccctccctccctagctgacttgctccctcccgggctgcggctgctgcaaaagccagcagcggcagcgggagctgtccggaggccggcgtcgagggtttgccgctgtctctgctattccatcctccccataggggctctctcccctctcccatctcaagatggcagccagcagctctgagatctctgagatgaagggggttgaggagagtcccaaggttccaggcgaagggcctggccattctgaagctgaaactggccctccccaggtcctagcaggggtaccagaccagccagaggccccgcagccaggtccaaacaccactgcggcccctgtggactcagggcccaaggctgggctggctccagaaaccacagagaccccggctggggcctcagaaacagcccaggccacagacctcagcttaagcccaggaggggaatcaaaggccaactgcagccccgaagacccatgccaagaaacagtgtccaaaccagaagtgagcaaagaggccactgcagaccaggggtccaggctggagtctgcagccccacctgaaccagccccagagcctgctccccaaccagacccccggccagattcccagcctacccccaagccagcccttcaaccagagctccctacccaggaggaccccacccctgagattctgtctgagagtgtaggggaaaagcaagagaatggggcagtggtgcccctgcaggctggtgatggggaagagggcccagcccctgagcctcactcaccaccctcaaaaaaatcccccccagccaatggggcccccccccgagtgctgcagcagctggttgaggaggatcgaatgagaagggcacacagtgggcatccaggatctccccgaggtagcctgagccgccaccccagctcccagttggcaggtcctggggtggaggggggtgaaggcacccagaaacctcgggactacatcatccttgccatcctgtcctgcttctgccccatgtggcctgtcaacatcgtggccttcgcttatgctgtcatgtcccggaacagcctgcagcagggggacgtggacggggcccagcgtctgggccgggtagccaagctcttaagcatcgtggcgctggtggggggagtcctcatcatcatcgcctcctgcgtcatcaacttaggcgtgtataagtgaggggctctgccccgcatcccaagacttttcttcctgttgggagctgccttgggcccatccctcccctggggggagcccaactgatggccctggcccccacccctaaggaccaagggagcctgagcggccttgtttacagcttctgtcctgctcctgcatcttgccaggctcctctgccaactgtaggcctgcctcatccctgcactggttccaacctccctgcactaatgcctgcatcccctccggcctcttggccccctatccctgcacttctggaaacctccctgcactctggaaacctccctgaacacctccccaactctgcgctctcagcctccctgcatctctcctggcctccctgcacttcttccagccccccaaattctctggacctccaccctggccgcctcctcccaactttcattgtcttggcatctctcaaccctcagtcctctcttccttcccttctttatcatctcccctttcctctccacgtcccgcccccttcctcttcctgcctcctcatctcccttaagcatcctcttctccaacctcccgtcaccgtttactctgcaaaattgacagcacttagacgaggcttgggggcagggagcagtgttgggagagggctccccaaccccaggctcggactgttctctgctgggaccacccagggtcggacacccaagggtgcctggcaggtcgcagagttggcaagccgggcctcgtatggggactcgggtgagggtggcgagtactggttccgaacgcacgcaggggagaagggagggacgcggcgctgacccttccaggtcagctggagttgacccgcccacctgggcttttcaaccccagtccgcgagtttctttcttgaaggtgtgggggctagattcattcacgtgcttcgtaatgaaataatccaaaaaataggaccaaagcgcccactggcaggagcgagggcggggcgccgcgctctataattattttctaagatgatgggggaggtttgttgcacgcgacagcccgctgaggaggcggggaccgagctacaacgcggttcggatttggcgggggtttttttccttaaaaaaaaaaaaaaaaaaaaaaaaaaagtctgggggaagaaaaaaactaaaattcttaaaaaaaaaaaaaaaaggctattatcaaactgatttctccctttttgtatgccggatgctgcatgagtctgaaacaccaataaacggagactgcatgaga

SEQ ID NO: 240633 - DNA, 1023 bp, Artificial Sequence
  derived and/or modified sequence
atggccgccagcagcagcgagatcagcgagatgaagggcgtggaggagagccccaaggtgcccggcgagggccccggccacagcgaggccgagaccggccccccccaggtgctggccggcgtgcccgaccagcccgaggccccccagcccggccccaacaccaccgccgcccccgtggacagcggccccaaggccggcctggcccccgagaccaccgagacccccgccggcgccagcgagaccgcccaggccaccgacctgagcctgagccccggcggcgagagcaaggccaactgcagccccgaggacccctgccaggagaccgtgagcaagcccgaggtgagcaaggaggccaccgccgaccagggcagcagactggagagcgccgccccccccgagcccgcccccgagcccgccccccagcccgaccccagacccgacagccagcccacccccaagcccgccctgcagcccgagctgcccacccaggaggaccccacccccgagatcctgagcgagagcgtgggcgagaagcaggagaacggcgccgtggtgcccctgcaggccggcgacggcgaggagggccccgcccccgagccccacagcccccccagcaagaagagcccccccgccaacggcgccccccccagagtgctgcagcagctggtggaggaggacagaatgagaagagcccacagcggccaccccggcagccccagaggcagcctgagcagacaccccagcagccagctggccggccccggcgtggagggcggcgagggcacccagaagcccagagactacatcatcctggccatcctgagctgcttctgccccatgtggcccgtgaacatcgtggccttcgcctacgccgtgatgagcagaaacagcctgcagcagggcgacgtggacggcgcccagagactgggcagagtggccaagctgctgagcatcgtggccctggtgggcggcgtgctgatcatcatcgccagctgcgtgatcaacctgggcgtgtacaagtag

SEQ ID NO: 240634 - protein, 366 aa, Artificial Sequence
  derived and/or modified sequence
MLLLRCQLKQAPPQKVSFRFCVVMGKQQSKLKHSTYKYGPDEIIEERIQTKAFQEYSPAHMDTVSVVAALNSDLCVSGGKDKTVVAYNWKTGNVVKRFKGHEHEITKVACIPKSSQFFSASRDRMVMMWDLHGSSQPRQQLCGHAMVVTGLAVSPDSSQLCTGSRDNTLLLWDVVTGQSVERASVSRNVVTHLCWVPREPYILQTSEDKTLRLWDSRGLQVAHMFPAKQHIQTYCEVSVDGHKCISCSNGFGGEGCEATLWDLRQTRNRICEYKGHFQTVASCVFLPRALALMPLIATSSHDCKVKIWNQDTGACLFTLSLDGSGPLTSLAVGDAISLLCASFNRGIHLLRMDHSQGLELQEVAAF

SEQ ID NO: 240635 - protein, 242 aa, Artificial Sequence
  derived and/or modified sequence
MVMMWDLHGSSQPRQQLCGHAMVVTGLAVSPDSSQLCTGSRDNTLLLWDVVTGQSVERASVSRNVVTHLCWVPREPYILQTSEDKTLRLWDSRGLQVAHMFPAKQHIQTYCEVSVDGHKCISCSNGFGGEGCEATLWDLRQTRNRICEYKGHFQTVASCVFLPRALALMPLIATSSHDCKVKIWNQDTGACLFTLSLDGSGPLTSLAVGDAISLLCASFNRGIHLLRMDHSQGLELQEVAAF

SEQ ID NO: 240636 - DNA, 1101 bp, Artificial Sequence
  derived and/or modified sequence
atgctgctgctgagatgccagctgaagcaggcccccccccagaaggtgagcttcagattctgcgtggtgatgggcaagcagcagagcaagctgaagcacagcacctacaagtacggccccgacgagatcatcgaggagagaatccagaccaaggccttccaggagtacagccccgcccacatggacaccgtgagcgtggtggccgccctgaacagcgacctgtgcgtgagcggcggcaaggacaagaccgtggtggcctacaactggaagaccggcaacgtggtgaagagattcaagggccacgagcacgagatcaccaaggtggcctgcatccccaagagcagccagttcttcagcgccagcagagacagaatggtgatgatgtgggacctgcacggcagcagccagcccagacagcagctgtgcggccacgccatggtggtgaccggcctggccgtgagccccgacagcagccagctgtgcaccggcagcagagacaacaccctgctgctgtgggacgtggtgaccggccagagcgtggagagagccagcgtgagcagaaacgtggtgacccacctgtgctgggtgcccagagagccctacatcctgcagaccagcgaggacaagaccctgagactgtgggacagcagaggcctgcaggtggcccacatgttccccgccaagcagcacatccagacctactgcgaggtgagcgtggacggccacaagtgcatcagctgcagcaacggcttcggcggcgagggctgcgaggccaccctgtgggacctgagacagaccagaaacagaatctgcgagtacaagggccacttccagaccgtggccagctgcgtgttcctgcccagagccctggccctgatgcccctgatcgccaccagcagccacgactgcaaggtgaagatctggaaccaggacaccggcgcctgcctgttcaccctgagcctggacggcagcggccccctgaccagcctggccgtgggcgacgccatcagcctgctgtgcgccagcttcaacagaggcatccacctgctgagaatggaccacagccagggcctggagctgcaggaggtggccgccttctag

SEQ ID NO: 240637 - DNA, 1101 bp, Artificial Sequence
  derived and/or modified sequence
atgctgcttctgcgttgccagcttaagcaagcacccccccagaaagtaagcttccgcttctgcgttgttatgggtaagcagcagagtaagttaaagcattcaacctacaaatacggtcccgacgaaattattgaggaacggatccagaccaaagcctttcaggagtattctcccgcccatatggacacagtgagtgtagtggcagccctgaactcagacctgtgcgtcagcggggggaaggataaaaccgtggtcgcttacaactggaagaccggcaacgtggttaagcgattcaagggccacgaacacgaaattacaaaagttgcttgcatccctaagagcagtcagttcttcagtgccagtagggacaggatggtcatgatgtgggatctacacgggtcatctcagcctcgtcaacagctgtgcggtcacgcaatggtggtgacagggttggcagttagcccagattcaagccagctctgcacaggttcgcgggacaacacactgctgttgtgggatgtggtgacagggcagagcgtcgagcgggcctctgtcagtaggaatgtagtaacccacttatgctgggtgccgagagagccgtacatccttcagacttcagaggacaagaccctccggctatgggactcccgaggtctccaggtcgctcacatgttcccagctaagcagcatatacagacgtattgcgaagtgagtgtggatggccacaaatgcatttcttgctcaaacggcttcggtggcgagggctgcgaggccaccctgtgggatctcaggcaaactaggaatcggatctgcgaatacaaaggacacttccagacagtggccagctgcgtttttctgccacgcgctctggccctcatgccgttaattgccacatccagccacgactgcaaggtgaaaatttggaaccaggatactggggcttgtctctttactctttctttagatgggagcggaccactcacaagtcttgctgtcggagacgcaatctctcttctgtgcgcttcctttaatagaggaatccatctgctacgaatggatcattcacagggcctcgaacttcaggaggtggccgcgttttag

SEQ ID NO: 240638 - DNA, 1101 bp, Artificial Sequence
  derived and/or modified sequence
atgctgctgctgcgctgccagctgaagcaggccccaccccagaaggtgtccttccgcttctgtgtggtgatgggcaagcagcagagcaagctgaagcacagcacctacaagtatggcccagatgagatcatcgaggagcgcatccagaccaaggccttccaggagtacagccctgcccacatggacacagtgtctgtggtggccgccctgaacagcgacctgtgtgtgtctgggggcaaggacaagacagtggtggcctacaactggaagacaggaaatgtggtgaagcgcttcaagggccatgaacatgagatcaccaaggtggcctgcatccccaagagcagccagttcttcagcgccagccgggacaggatggtgatgatgtgggacctgcacggcagcagccagccccggcagcagctgtgtggccacgccatggtggtgacaggcctggccgtgtccccagacagcagccagctgtgcaccggcagccgggacaacaccctgctgctgtgggatgtggtgacaggccagagcgtggagcgggcctctgtgtccagaaatgtggtgacccacctgtgctgggtgccccgggagccctacatcctgcagaccagcgaggacaagaccctgcggctgtgggacagccggggcctgcaggtggcccacatgtttcctgccaagcagcacatccagacctactgtgaggtgtctgtggatggccacaagtgcatcagctgcagcaatggatttggaggagagggctgtgaggccaccctgtgggacctgcggcagaccaggaaccgcatctgtgagtacaagggccacttccagacagtggccagctgtgtgttcctgccccgggccctggccctgatgcccctcatcgccaccagcagccatgactgcaaggtgaagatctggaaccaggacaccggggcctgcctcttcaccctgagcctggatggcagcggccccctgaccagcctggccgtgggagatgccatcagcctgctgtgtgccagcttcaacagaggcatccacctgctgaggatggaccacagccagggcctggagctgcaggaggtggccgccttctag

SEQ ID NO: 240639 - DNA, 1101 bp, Artificial Sequence
  derived and/or modified sequence
atgctgctgctgcggtgccagctgaagcaggcccccccccagaaggtgtcctttcgcttttgtgtagtcatgggcaagcagcaaagcaaattgaaacactctacttacaaatatggacccgatgaaatcatcgaagagcgaattcagacaaaagcattccaggaatatagtcccgcccacatggatacagtctcggtagtggcagcgctcaatagtgatttatgtgtgtctgggggaaaggacaagactgttgtggcttacaactggaaaactggaaatgttgttaagagattcaaaggacatgagcacgagatcaccaaggtggcctgtatccccaagtccagccagtttttctccgccagccgggatcggatggttatgatgtgggatctacatgggtccagccagccaagacaacagctctgcggccacgcgatggtggtcacaggtctggcagtgtctcctgattctagtcagctatgtacgggatcacgtgacaatactttactcctctgggacgtggtcacaggacagagcgttgagcgtgcttccgtctcccggaatgtcgtcactcacctgtgctgggtcccacgggaaccatatattctccagacctctgaagacaagacgctgcggctgtgggattctcgggggctccaggttgctcatatgttccctgctaagcagcacatccagacatactgcgaagtatcagtcgatggccacaaatgcataagttgttctaacggctttggcggggagggttgcgaggccacactgtgggacttaagacagacaaggaatagaatttgcgagtacaaaggacattttcaaaccgtggcttcttgcgttttcttaccacgggctttggcactgatgccactgatagccacaagtagtcacgattgtaaggtgaaaatctggaatcaggatacaggtgcatgtctttttactctgagcttagacgggagcggccctctgaccagtctggcggttggagacgcgatttctttgctgtgtgccagttttaacaggggaatacacctgctgcgaatggatcactcacagggactggaactgcaagaagtggctgctttctag

SEQ ID NO: 240640 - DNA, 1101 bp, Artificial Sequence
  derived and/or modified sequence
atgctcctgctccgatgccaactaaaacaagctcctcctcagaaagtgagtttcagattctgcgtagtaatgggcaaacagcagtctaagctcaaacatagcacttacaagtatggtccagacgagatcattgaggaacggattcagaccaaagccttccaggaatactctccagcgcacatggatactgtgtccgtggtagctgcactgaacagtgacttgtgtgtttctggaggcaaagataaaaccgtcgtcgcgtacaattggaaaaccggaaacgtcgtgaagagatttaaaggtcatgagcacgagatcaccaaggtggcctgtattcccaagagcagccagtttttcagcgctagccgtgataggatggtcatgatgtgggatttgcacggtagctcgcagcctagacagcaactgtgcgggcacgccatggtggtaacgggactcgctgtgagccctgattcctcccagctgtgtacaggatcgcgggacaatactctgttgctgtgggacgtggtgactggccagagtgttgaacgcgcaagcgtaagccgcaacgtggtgacacatctgtgctgggtcccccgagagccatatatactccagacgtcggaggataaaaccttgcggctatgggattcacgcggattgcaggtggcccatatgttccccgctaagcagcacatacagacttactgcgaggtgtctgtcgatggtcacaagtgcatttcctgctcaaatggctttgggggtgagggctgcgaagcaaccttgtgggacttgcggcagacccgtaataggatctgtgagtacaaaggccacttccagacagtggcaagttgcgtattcctgcccagggctcttgcgcttatgccgctcatcgccacatcatctcatgactgcaaagtaaagatttggaatcaagatactggcgcatgtctttttaccctctccctggatgggagcggcccactgacaagtctggccgtgggggatgcaatctcattgctatgtgccagtttcaacagaggcatacacctgctgagaatggaccacagccagggacttgaactgcaagaggtggccgcattttag

SEQ ID NO: 240641 - DNA, 2192 bp, Artificial Sequence
  derived and/or modified sequence
acccccaggctccgcgttcccgccggccccagctccagccccgcagcccaccgtgcaaacatgcttagacagagaagagattaacttcagtggcttcccactaattacagagattaagaagtggctgcctgaactattttccaaaggatacacattacaaattattgaatagggcagctaaccaagaagatcctattggtttggggggaacacaacttccagcagccacaagggatgctgctactcaggtgccaactgaaacaagctcctccacagaaggtttcgtttaggttttgtgtcgtgatggggaaacagcaaagcaaactcaaacacagcacttataaatacgggcctgatgaaattatagaagagagaattcaaactaaagcttttcaagagtatagcccagctcacatggataccgtctctgtcgtggctgctttgaactcagacctttgtgtctctggagggaaagataagacagttgtggcctataattggaaaactggaaatgtggtgaaaaggttcaaaggacatgaacatgagatcaccaaggtagcctgtattcccaaatccagccagttcttcagtgcctctcgtgacaggatggtcatgatgtgggacttgcacggttcctcacaaccaaggcagcaattgtgtggccatgccatggtggtcaccggattggctgtgagtccagactcatcacagctgtgcactggctctcgggacaacaccctgcttctgtgggatgtggtgacaggacagagtgtggaaagagcatctgtctccaggaacgtggtcactcacctgtgctgggtccccagagaaccatacatactacagacctctgaagataaaaccctcagattatgggacagtcgggggctgcaggtagctcatatgtttcctgcaaagcagcacattcagacctactgtgaagtcagtgtggatggacacaagtgtatctcctgcagcaatggctttggaggagaaggctgtgaagccacgttgtgggacctaagacagactcgaaacagaatatgtgagtataaggggcatttccagactgtcgcatcctgcgtctttctaccaagagcattggccttgatgcctttaattgctacctcatcacatgattgcaaggtgaagatttggaaccaagatactggagcctgccttttcaccttgtctctggatggatcaggacccttgacttctctggctgttggtgacgccatctccttattgtgtgcaagttttaacagaggaattcacttactcagaatggaccacagccaagggctggaactgcaggaagtggcagcattctgaggccaagagacactcactggacaatatcaaaccatggctcctcctcagcatggctttgtgtctttcccagttatcttgaggggagtgggatgtagggctggtattctttgcttaggttcatttacaagatgtatcagtgttgtaagtccaataatttaagtccagtgattcaaaatcaggtatagagtccagaaacatggactacacataaggttctctatttaagttaaatacaaatgcaactttttagtgagcttttaggactactcttcaaaaaaagtgtattgctcagaatgatgacctgtaaatgtaagagtggcaggcctctgtctgtgaaagtcagaacacagggctcgagcctctggaactgaccctttgcaagtctttacaaaagaaaaaaggcagtggggagagagagtgttttggttacatcagaaataattgagatgggaaagaatagtgcagctccatagaggagacggactgtagacaatgagattaagcttcaatcactgctcctcagcaatgtgaagaatcaaagtcagggcaagaaagcgaaagcttggacttctattcaaagtggcagcagagtgggagggcggtacccttctagcccagtgctgctgagcttgtgtgaaaatcagacctgagatggcttgaagcagccaagaaccacatgggcattgcccagaattacaggagttagcacaccagctctacagataagaaaacattgaaattcaaagattaaggccaaaaatatctcacttgcaattttaatattttcatttggatttatataaatgaaacatatatatgttttggaatggccagagtgaggcaaaggggatccctga

SEQ ID NO: 240642 - DNA, 2255 bp, Artificial Sequence
  derived and/or modified sequence
gttcccgccggccccagctccagccccgcagcccaccgtgcaaacatgcttagacagagaagagattaacttcagtggcttcccactaattacagagattaagaagtggctgcctgaactattttccaaaggatacacattacaaattattgaatagggcagctaaccaagaagatcctattggtttggggggaacacaacttccagcagccacaagggatgctgctactcaggtgccaactgaaacaagctcctccacagaaggtttcgtttaggttttgtgtcgtgatggggaaacagcaaagcaaactcaaacacagcacttataaatacggacagttgtggcctataattggaaaactggaaatgtggtgaaaaggttcaaaggacatgaacatgagatcaccaaggtagcctgtattcccaaatccagccagttcttcagtgcctctcgtgacaggatggtcatgatgtgggacttgcacggttcctcacaaccaaggcagcaattgtgtggccatgccatggtggtcaccggattggctgtgagtccagactcatcacagctgtgcactggctctcgggacaacaccctgcttctgtgggatgtggtgacaggacagagtgtggaaagagcatctgtctccaggaacgtggtcactcacctgtgctgggtccccagagaaccatacatactacagacctctgaagataaaaccctcagattatgggacagtcgggggctgcaggtagctcatatgtttcctgcaaagcagcacattcagacctactgtgaagtcagtgtggatggacacaagtgtatctcctgcagcaatggctttggaggagaaggctgtgaagccacgttgtgggacctaagacagactcgaaacagaatatgtgagtataaggggcatttccagactgtcgcatcctgcgtctttctaccaagagcattggccttgatgcctttaattgctacctcatcacatgattgcaaggtgaagatttggaaccaagatactggagcctgccttttcaccttgtctctggatggatcaggacccttgacttctctggctgttggtgacgccatctccttattgtgtgcaagttttaacagaggaattcacttactcagaatggaccacagccaagggctggaactgcaggaagtggcagcattctgaggccaagagacactcactggacaatatcaaaccatggctcctcctcagcatggctttgtgtctttcccagttatcttgaggggagtgggatgtagggctggtattctttgcttaggttcatttacaagatgtatcagtgttgtaagtccaataatttaagtccagtgattcaaaatcaggtatagagtccagaaacatggactacacataaggttctctatttaagttaaatacaaatgcaactttttagtgagcttttaggactactcttcaaaaaaagtgtattgctcagaatgatgacctgtaaatgtaagagtggcaggcctctgtctgtgaaagtcagaacacagggctcgagcctctggaactgaccctttgcaagtctttacaaaagaaaaaaggcagtggggagagagagtgttttggttacatcagaaataattgagatgggaaagaatagtgcagctccatagaggagacggactgtagacaatgagattaagcttcaatcactgctcctcagcaatgtgaagaatcaaagtcagggcaagaaagcgaaagcttggacttctattcaaagtggcagcagagtgggagggcggtacccttctagcccagtgctgctgagcttgtgtgaaaatcagacctgagatggcttgaagcagccaagaaccacatgggcattgcccagaattacaggagttagcacaccagctctacagataagaaaacattgaaattcaaagattaaggccaaaaatatctcacttgcaattttaatattttcatttggatttatataaatgaaacatatatatgttttggaatggccagagtgaggcaaaggggatccctgaaataacattagaacatacaggaaaaacgaggcaggcagatcactttaggtcaggagttcaagaccagcctgtacgtgcgtgcctgtagtcccagctactcgggaggctgagatgggagaatcacttgaacctgggaggcagagtttgcagtgagctgagattgtgccactgcactccagtctgtgtgacagaatgagaccttgtcttg

SEQ ID NO: 240643 - protein, 193 aa, Artificial Sequence
  derived and/or modified sequence
MVATGSLSSKNPASISELLDCGYHPESLLSDFDYWDYVVPEPNLNEVIFEESTCQNLVKMLENCLSKSKQTKLGCSKVLVPEKLTQRIAQDVLRLSSTEPCGLRGCVMHVNLEIENVCKKLDRIVCDSSVVPTFELTLVFKQENCSWTSFRDFFFSRGRFSSGFRRTLILSSGFRLVKKKLYSLIGTTVIEGS

SEQ ID NO: 240644 - protein, 177 aa, Artificial Sequence
  derived and/or modified sequence
MVATGSLSSKNPASISELLDCGYHPESLLSDFDYWDYVVPEPNLNEVIFEESTCQNLVKMLENCLSKSKQTKLGCSKVLVPEKLTQRIAQDVLRLSSTEPCGLRGCVMHVNLEIENVCKKLDRIVCDSSVVPTFELTLVFKQENCSWTSFRDFFFSRGRFSSGFRRTLILSSGFRLV

SEQ ID NO: 240645 - protein, 128 aa, Artificial Sequence
  derived and/or modified sequence
MVATGSLSSKNPASISELLDCGYHPESLLSDFDYWDYVVPEPNLNEVIFEESTCQNLVKMLENCLSKSKQTKLGCSKVLVPEKLTQRIAQDVLRLSSTEPCGLRGCVMHVNLEIENVCKKLDRIVCDS

SEQ ID NO: 240646 - DNA, 582 bp, Artificial Sequence
  derived and/or modified sequence
atggtggcaaccgggagtctgagctcgaagaatccagcttccatttccgaactgcttgattgtggatatcaccctgagagcttgctgtcagattttgactattgggactacgtcgtcccagagccaaacctcaacgaagtcatcttcgaggagagcacctgtcaaaatctcgtgaaaatgctggagaactgtctgagcaaatcgaagcagaccaaactgggatgctccaaagttttagttcctgaaaaactgacacagcgcatcgcacaggatgttctacgattgagttccacagagccctgcgggctccgcggctgcgtgatgcacgtcaacttggagattgaaaacgtgtgcaaaaaactggacaggatcgtgtgtgactcttccgttgtgcccaccttcgaattgacactggtgtttaaacaggaaaattgttcatggacaagctttcgcgactttttcttcagtcgcgggcgattttcatctggttttagacgtacactgatcctgagtagcgggtttcggctggttaaaaagaagctttactcgctcatcggaactacagtcattgagggaagctag

SEQ ID NO: 240647 - DNA, 534 bp, Artificial Sequence
  derived and/or modified sequence
atggtggccactggtagcctgtctagtaagaatccggcctcgattagcgagctgctggactgcgggtatcaccccgagagtctgctcagcgacttcgattattgggactacgtggtgcccgaaccgaatctgaacgaagttatttttgaggagtccacctgccaaaatcttgtcaagatgctcgaaaattgcctgtccaaatccaagcagacaaaactgggatgtagtaaagtactggtgcccgaaaaactgacacaaagaattgcccaggatgtgctgagactgagctcgactgagccttgtggcctccggggctgtgtgatgcatgtcaacctcgaaatagagaacgtatgtaagaaattggatcgtatcgtctgtgactcttcagttgtgccaaccttcgagctgaccctggtatttaagcaagagaattgtagctggactagcttccgcgacttttttttttccagaggtaggttttcttccggttttcgacgcacactcatactcagtagcggattcaggctggtgtag

SEQ ID NO: 240648 - DNA, 387 bp, Artificial Sequence
  derived and/or modified sequence
atggtagccacaggtagcttgagctccaagaacccagcctcaatctccgagctgctggattgtgggtatcatccagagtccctcctgtccgatttcgactactgggattatgtggtccccgagcccaatctgaacgaggtgatcttcgaggagtccacatgtcagaatctcgtaaaaatgctggagaactgcctgagtaaatccaagcagaccaaactcggctgtagcaaagtgcttgtaccggagaaattgacacaaagaatcgctcaggacgttttgcgcctatctagcacggagccgtgcggcttacgtggctgcgtcatgcatgtcaatctggagattgaaaatgtgtgtaaaaagctggaccgcattgtctgcgatagctag

SEQ ID NO: 240649 - DNA, 582 bp, Artificial Sequence
  derived and/or modified sequence
atggtggccaccggcagcctgagcagcaagaacccagccagcatcagcgagctgctggactgtggctaccaccctgagagcctgctgagtgactttgactactgggactatgtggtgcctgagcccaacctgaatgaagtcatctttgaggagagcacctgccagaacctggtgaagatgctggagaactgcctgagcaagagcaagcagaccaagctgggctgcagcaaggtgctggtgcctgagaagctgacccagagaattgcccaggatgtgctgcggctgagcagcacagagccctgtggcctgcggggctgtgtgatgcacgtgaacctggagattgaaaatgtgtgcaagaagctggaccgcatcgtgtgtgacagctctgtggtgcccacctttgagctgaccctggtgttcaagcaggagaactgctcctggaccagcttccgggacttcttcttcagccggggccgcttcagcagcggcttccggaggaccctcatcctgagcagcggcttccggctggtgaagaagaagctgtacagcctgattggcaccaccgtcatcgagggcagctag

SEQ ID NO: 240650 - DNA, 534 bp, Artificial Sequence
  derived and/or modified sequence
atggtggccaccggcagcctgagcagcaagaacccagccagcatcagcgagctgctggactgtggctaccaccctgagagcctgctgagtgactttgactactgggactatgtggtgcctgagcccaacctgaatgaagtcatctttgaggagagcacctgccagaacctggtgaagatgctggagaactgcctgagcaagagcaagcagaccaagctgggctgcagcaaggtgctggtgcctgagaagctgacccagagaattgcccaggatgtgctgcggctgagcagcacagagccctgtggcctgcggggctgtgtgatgcacgtgaacctggagattgaaaatgtgtgcaagaagctggaccgcatcgtgtgtgacagctctgtggtgcccacctttgagctgaccctggtgttcaagcaggagaactgctcctggaccagcttccgggacttcttcttcagccggggccgcttcagcagcggcttccggaggaccctcatcctgagcagcggcttccggctggtgtag

SEQ ID NO: 240651 - DNA, 387 bp, Artificial Sequence
  derived and/or modified sequence
atggtggccaccggcagcctgagcagcaagaacccagccagcatcagcgagctgctggactgtggctaccaccctgagagcctgctgagtgactttgactactgggactatgtggtgcctgagcccaacctgaatgaagtcatctttgaggagagcacctgccagaacctggtgaagatgctggagaactgcctgagcaagagcaagcagaccaagctgggctgcagcaaggtgctggtgcctgagaagctgacccagagaattgcccaggatgtgctgcggctgagcagcacagagccctgtggcctgcggggctgtgtgatgcacgtgaacctggagattgaaaatgtgtgcaagaagctggaccgcatcgtgtgtgacagctag

SEQ ID NO: 240652 - DNA, 582 bp, Artificial Sequence
  derived and/or modified sequence
atggtggccaccggcagcctgagcagcaagaaccccgccagcatcagcgaactgctggattgcgggtatcatcctgaatccctgctgtctgactttgactactgggactacgtggtgccagagcccaacctcaatgaagtaattttcgaggaaagcacctgtcagaatctcgtcaagatgctcgaaaactgtctgagtaagtccaaacaaaccaagctggggtgctcaaaggtgttagtgccagagaaattaacacagagaattgcacaagacgtgctccggctctcttcaaccgagccttgcggcctgcgcgggtgcgtgatgcacgttaacctcgagatcgagaacgtgtgcaagaaactggatcggatcgtctgcgactcatctgttgtgcccacctttgagcttacgttggtgttcaagcaggagaactgcagttggacttcctttcgtgacttcttcttctcccgaggccggttcagctccggtttccgccgcactctcatactttcttctggctttcgactcgttaaaaagaaactttacagccttatcggcacaacagtgatcgaggggtcttag

SEQ ID NO: 240653 - DNA, 534 bp, Artificial Sequence
  derived and/or modified sequence
atggtggccaccggcagcctgagcagcaagaaccccgccagcatcagtgagcttctggattgcggctatcacccggaatctctgctgtctgatttcgattactgggattatgtggtccctgaacctaaccttaatgaggtgatattcgaagaatccacgtgccagaacctcgtaaagatgctagaaaactgcttatcaaagtctaagcagacgaagctgggctgctcaaaggtcctcgtccccgagaagctgacacagagaattgctcaggacgtattacgcctgtcttcaacagaaccctgcggcctgagggggtgcgttatgcatgtcaacctggaaattgagaatgtatgtaagaaactggaccgcattgtttgtgattcaagtgtggttccgacattcgaattaaccctggtctttaaacaggagaactgttcctggacttctttccgggacttttttttctccagggggcgcttttcatctgggttccggcgcaccctgatcttgtcttcaggcttccgactcgtctag

SEQ ID NO: 240654 - DNA, 387 bp, Artificial Sequence
  derived and/or modified sequence
atggtggccaccggcagcctgagcagcaagaaccccgccagcatctcagagctattggattgtggataccaccccgaatcattactctccgatttcgactattgggattacgtcgtgcctgagcccaaccttaatgaagtaatctttgaggaatcgacctgccagaacctcgtcaaaatgctagaaaactgcttatcaaagagcaaacagacaaaattgggatgcagtaaggtgctggtgcctgagaagctgactcagaggattgcccaggatgttctgagactgagctcgaccgaaccctgtgggctacgcggttgtgtgatgcacgtaaatctagagatcgagaatgtttgcaaaaaactggaccggatagtctgcgactcatag

SEQ ID NO: 240655 - DNA, 582 bp, Artificial Sequence
  derived and/or modified sequence
atggtggccacaggctccttgtctagcaagaatccggcttctatttccgagctcctggattgtgggtaccatccagaatctctcctgtcggacttcgactactgggactatgtggttcctgagcccaatctgaatgaggttatcttcgaagaaagcacttgccaaaacttggtgaaaatgctggagaactgtctgtccaagtcgaagcagaccaaactgggctgcagcaaagttttggtgcctgagaaactcacacagagaatcgcacaggacgtgctaagactatcgtcaactgaaccctgcggactgaggggatgtgtgatgcatgttaatctcgagattgaaaacgtttgtaaaaaattggaccgaatcgtctgcgatagcagcgttgttcctaccttcgagctaacactggtatttaagcaggaaaactgctcctggacctcattccgggatttctttttcagccgcggaaggttctcaagcggtttcagaagaacgctgatattgtcatcaggatttcggctcgttaagaaaaaattgtactccctgattggaaccacggttatcgagggctcctag

SEQ ID NO: 240656 - DNA, 534 bp, Artificial Sequence
  derived and/or modified sequence
atggtcgccacggggagcctctctagcaaaaaccccgcttccatcagcgaactgctggattgtggatatcaccccgaatctctcctgagcgactttgactactgggattatgtggttccggaaccaaacttaaacgaagtgattttcgaggagtccacctgccagaatctcgtcaagatgttggaaaattgtctgtcaaagagcaagcagactaagcttggctgctctaaagtgctggttcctgaaaagctcactcagaggatcgcgcaggatgtcctgagactgtcatcgactgagccctgcggccttcggggatgcgtgatgcacgtaaacctggaaattgagaacgtgtgcaagaagttagacaggattgtgtgcgactcatctgtggtgcctaccttcgagcttactctcgtgttcaagcaggagaactgctcatggacctcattccgggatttctttttttccaggggcagattttcaagcggtttcagacgaactctgatcctcagttcaggtttccggttggtgtag

SEQ ID NO: 240657 - DNA, 387 bp, Artificial Sequence
  derived and/or modified sequence
atggtagcaaccggctcgttgtcctcaaaaaatcctgcttccatttcagagcttttggactgcggctatcacccagagagtctcctcagcgatttcgattactgggattacgtggtgccagagcctaacctcaatgaagtgattttcgaggagtccacgtgccagaacttggttaagatgctggaaaattgcctgtcgaagagcaaacaaaccaagctcggatgttccaaggtgctcgtgcccgaaaaattgacgcagcgcattgcccaggacgtgctcaggctctcaagcacagaaccatgtgggctgagggggtgcgtgatgcatgtcaatctggagatcgagaacgtgtgcaagaagctggacaggatagtgtgcgacagctag

SEQ ID NO: 240658 - DNA, 582 bp, Artificial Sequence
  derived and/or modified sequence
atggtggccaccggcagcctgagcagcaagaaccccgccagcatcagcgagctgctggactgcggctaccaccccgagagcctgctgagcgacttcgactactgggactacgtggtgcccgagcccaacctgaacgaggtgatcttcgaggagagcacctgccagaacctggtgaagatgctggagaactgcctgagcaagagcaagcagaccaagctgggctgcagcaaggtgctggtgcccgagaagctgacccagagaatcgcccaggacgtgctgagactgagcagcaccgagccctgcggcctgagaggctgcgtgatgcacgtgaacctggagatcgagaacgtgtgcaagaagctggacagaatcgtgtgcgacagcagcgtggtgcccaccttcgagctgaccctggtgttcaagcaggagaactgcagctggaccagcttcagagacttcttcttcagcagaggcagattcagcagcggcttcagaagaaccctgatcctgagcagcggcttcagactggtgaagaagaagctgtacagcctgatcggcaccaccgtgatcgagggcagctag

SEQ ID NO: 240659 - DNA, 534 bp, Artificial Sequence
  derived and/or modified sequence
atggtggccaccggcagcctgagcagcaagaaccccgccagcatcagcgagctgctggactgcggctaccaccccgagagcctgctgagcgacttcgactactgggactacgtggtgcccgagcccaacctgaacgaggtgatcttcgaggagagcacctgccagaacctggtgaagatgctggagaactgcctgagcaagagcaagcagaccaagctgggctgcagcaaggtgctggtgcccgagaagctgacccagagaatcgcccaggacgtgctgagactgagcagcaccgagccctgcggcctgagaggctgcgtgatgcacgtgaacctggagatcgagaacgtgtgcaagaagctggacagaatcgtgtgcgacagcagcgtggtgcccaccttcgagctgaccctggtgttcaagcaggagaactgcagctggaccagcttcagagacttcttcttcagcagaggcagattcagcagcggcttcagaagaaccctgatcctgagcagcggcttcagactggtgtag

SEQ ID NO: 240660 - DNA, 387 bp, Artificial Sequence
  derived and/or modified sequence
atggtggccaccggcagcctgagcagcaagaaccccgccagcatcagcgagctgctggactgcggctaccaccccgagagcctgctgagcgacttcgactactgggactacgtggtgcccgagcccaacctgaacgaggtgatcttcgaggagagcacctgccagaacctggtgaagatgctggagaactgcctgagcaagagcaagcagaccaagctgggctgcagcaaggtgctggtgcccgagaagctgacccagagaatcgcccaggacgtgctgagactgagcagcaccgagccctgcggcctgagaggctgcgtgatgcacgtgaacctggagatcgagaacgtgtgcaagaagctggacagaatcgtgtgcgacagctag

SEQ ID NO: 240661 - DNA, 2604 bp, Artificial Sequence
  derived and/or modified sequence
gctactgcgaggagccggcgcagggtggcccgggaggggtgagcagggtgccgctggctgctggggtctgcaggtcaccgagtccccaggagaggggactcctaagaagccacctgcctgtgtttacccggcagcgagcgcgcaggcccccgcgaactcctggcagcgctcaggaaaggccgttgcgcctcgcgaaggaaacagagccgttgaccatggttgcaactggcagtttgagcagcaagaacccggccagcatttcagaattgctggactgtggctatcacccagagagcctgctaagtgattttgactactgggattatgttgttcctgaacccaacctcaacgaggtaatatttgaggaatcaacttgccagaatttggttaaaatgctggagaactgtctgtccaaatcaaagcaaactaaacttggttgctcaaaggtccttgtccctgagaaactgacccagagaattgctcaagatgtcctgcggctttcctcaacggagccctgcggcttgcgaggttgtgttatgcacgtgaacttggaaattgaaaatgtatgtaaaaagctggataggattgtgtgtgattctagcgtcgtacctacttttgagcttacacttgtgtttaagcaggagaactgctcatggactagcttcagggactttttctttagtagaggtcgcttctcctctggtttcaggagaactctgatcctcagctcaggatttcgacttgttaagaaaaaactttactcactgattggaacaacagtgattgaagggtcctaaaaagggaaaatatataaagattatttcatgattgggtagtaaaactattcagctagtcagctaaagtcatttgtagtttgccccacctgccctaaataagaaaccccaaatgtagtctcttttctttctgtgtttcacattcatagcaactgcagctaacaggctgattttctggcctttggagaagtgattcaaaatagtgtagattttctgcatagatcccatttttgtacagaattgaatgggatggaataggtaagcaaaagtagaagcccatttgagttttacatttgattccacaatttggtttcaggtaggcttggtaatagactatataaaccagatttgcctattttgattttcatatggcttttttttctgtaagttttcagaggattttttaaatcacagaatcatactaaatgatatttagcctatcaaaacttccaaaagcccacaccaccagttcctgactcaaatttgaagggtttttagacaggagggtaggattaagtaggtgagtttaattaaagcttaaccctaggtaagagtaaatgagaaatattacggcaataatggaactgcttcactgtttcttggtgacttcctcactctaatgttttaaagaggcaacaaaagcttgtggtgccatttcagtaaccacggtgttgttttagatgcctttataagctcagtttcccctgttcttaagtgttgaatactgtctttaaactagaaaaatgcaaaatattgaactgatatttttgtgtgtagttgattactcttccattgagtgaatgatgaatacctgtgaggataggaaattagttctgagatctagtccctctctgattcacttagtaatctatcctcttttcagtattacatgtgcttaatctcagatgaaccatttcaccatggcagtgttatctcatctctgggcttttctgggaattgaagtatctctccttaaccccaattgtcaagggtagtagctgtatactaccactttgaattattgaaacgggtcaatttacgaagtctgcattggctatggagatatggtttatagtacagcctagagaatgaaactcaccgtccagataaccatgcatgcacccagattttttccaccttggatacctgtcactagggaataataaaggcctgattttttgtcttattccaactaagtagatcattatctctttccttttttatgttaatgagagaatttagcctccactcaacaatgttcaattcagcaaggctttcatatccttgctgtgggtcgtggataaggagcttattcaggtttcctgccctagctattagctccacttcacatgctggagaccggcgtagggacagatgtattcatcctggtgttactgaaaaacaggtgtgatcctgttactgatactataagtgacctaaaatgtcactgttcaaattagccagtgttctaacaaactaaactcttcaaatgcttggaaagatactacaaagccaatctttatagaattgggccaagataaatctatgttgttttgcatggctattgttaagctccaaaggttcactgtgtttctgccgctgtcctggagttgtcaccactgactgggcaaggcttcttgggcatggatgtagaactgttgtccttttcccactaacagttatctttgactctcttgcctgttatgcttacaaaatggtgatggcttatggaaggctgttaaattaatattcctgttaaaggaaattaaagtttgtctatttttgacaataaaacattatatatttttaa

SEQ ID NO: 240662 - DNA, 852 bp, Artificial Sequence
  derived and/or modified sequence
aggtgagcgaagctgcggccttggtgggggcagcggggccggggggcgctccgcggggcaggtcgcttccaagttttgcgaactgttgagttagtttcaggttgcggctccgctcccagggctttgtcaaattgagttgcagaggccggttccacccctttggcaaaggagttcctccgctagttcgctcccgggacgccgggcattttaggagcctctgcacgactcgcctgcttttgcaaatccgtctcttctcgcctcattttttccagcgctcaggaaaggccgttgcgcctcgcgaaggaaacagagccgttgaccatggttgcaactggcagtttgagcagcaagaacccggccagcatttcagaattgctggactgtggctatcacccagagagcctgctaagtgattttgactactgggattatgttgttcctgaacccaacctcaacgaggtaatatttgaggaatcaacttgccagaatttggttaaaatgctggagaactgtctgtccaaatcaaagcaaactaaacttggttgctcaaaggtccttgtccctgagaaactgacccagagaattgctcaagatgtcctgcggctttcctcaacggagccctgcggcttgcgaggttgtgttatgcacgtgaacttggaaattgaaaatgtatgtaaaaagctggataggattgtgtgtgattctagcgtcgtacctacttttgagcttacacttgtgtttaagcaggagaactgctcatggactagcttcagggactttttctttagtagaggtcgcttctcctctggtttcaggagaactctgatcctcagctcaggatttcgacttgtt

SEQ ID NO: 240663 - DNA, 553 bp, Artificial Sequence
  derived and/or modified sequence
gagtgtgaaagcgcggacgctcggggaggggtcgcactgaacaatcaggttcaggctttgacgagtcgtgcacccggaattgcggtcccagtggcccgagatctaccctggaagcaacagcgctcaggaaaggccgttgcgcctcgcgaaggaaacagagccgttgaccatggttgcaactggcagtttgagcagcaagaacccggccagcatttcagaattgctggactgtggctatcacccagagagcctgctaagtgattttgactactgggattatgttgttcctgaacccaacctcaacgaggtaatatttgaggaatcaacttgccagaatttggttaaaatgctggagaactgtctgtccaaatcaaagcaaactaaacttggttgctcaaaggtccttgtccctgagaaactgacccagagaattgctcaagatgtcctgcggctttcctcaacggagccctgcggcttgcgaggttgtgttatgcacgtgaacttggaaattgaaaatgtatgtaaaaagctggataggattgtgtgtgattct

SEQ ID NO: 240664 - DNA, 699 bp, Artificial Sequence
  derived and/or modified sequence
atggaaagtccctccgattctgcagtggtcctcccttcaactcctcaggcctctgctaatccatcatcaccctacaccaattcaagccgaaagcagccgatgtccgcaactctacgtgagaggctcagaaagacgcgctttagcttcaatagtagttataatgtggttaagagactgaaagtggagtccgaggaaaatgatcagacgttttcagaaaaacccgcaagctctacggaggaaaactgtctggagttccaggaatcttttaagcatattgattcagagtttgaggagaacacgaacctgaagaacacgcttaaaaatcttaacgtgtgcgagtcccagagcctggacagtgggtcatgttctgcacttcaaaacgaatttgttagcgagaaacttcccaagcaaagactcaacgctgagaaagcgaaactggtgaaacaggtccaggaaaaagaagacctgctccgccggcttaaactggtcaagatgtatcgcagtaagaatgatctgagccaactccagctgcttattaagaaatggcgcagctgcagtcagctgctgctgtacgaactgcagtctgcagtgagtgaagaaaataagaagctgtccctgacccagctcattgatcactatggcctcgacgataagctgttgcactataaccgctccgaggaagaattcattgatgtgtag

SEQ ID NO: 240665 - DNA, 699 bp, Artificial Sequence
  derived and/or modified sequence
atggagagccccagcgacagcgctgtggtgctgcccagcaccccccaggccagcgccaaccccagcagcccctacaccaacagcagcaggaagcagcccatgtctgccaccctgcgggagcggctgaggaagacccgcttctccttcaacagcagctacaacgtggtgaagaggctgaaggtggagagtgaagaaaatgaccagaccttcagcgagaagccagccagcagcacagaggagaactgcctggagttccaggagagcttcaagcacatcgacagcgagtttgaggagaacaccaacctgaagaacaccctgaagaacctgaatgtgtgtgagagccagagcctggacagcggcagctgcagcgccctgcagaatgaatttgtgtctgagaagctgcccaagcagaggctgaatgctgagaaggccaagctggtgaagcaggtgcaggagaaggaggacctgctgcggcggctgaagctggtgaagatgtaccgcagcaagaatgacctgagccagctgcagctgctgatcaagaagtggaggagctgcagccagctgctgctgtatgagctgcagagcgctgtgtctgaggagaacaagaagctgagcctgacccagctgattgaccactacggcctggatgacaagctgctgcactacaacagaagtgaggaggagttcattgatgtgtag

SEQ ID NO: 240666 - DNA, 699 bp, Artificial Sequence
  derived and/or modified sequence
atggagagccccagcgacagcgccgtggtgctgcccagcaccccccaggcgtctgccaacccctcgtcaccgtataccaactcttcacgcaaacagccaatgtctgctaccttgagagagcggttgcgtaaaacaaggtttagcttcaacagctcatataacgtcgtgaagcggttaaaagtggaaagcgaagagaacgaccaaaccttcagcgaaaaaccggctagctctaccgaagagaactgtctggaattccaagagagcttcaaacacatcgacagcgaattcgaggagaataccaatctgaagaacaccctgaaaaatctcaacgtctgcgaaagccagagtctcgatagcggctcatgctctgccctgcagaatgagtttgtaagcgagaagctgcccaagcagcgcctcaacgcggagaaagctaaactcgtgaagcaggtccaggaaaaggaggacctcctcaggcgcctcaagctggtaaagatgtatcggtccaagaatgatttgagtcagttacagctgctgatcaagaagtggaggtcctgtagccagctcctgctctacgaactgcagagtgccgtgtccgaagagaacaaaaagcttagccttacccagttgattgaccattacggccttgatgataagttactccactacaacaggtctgaggaagagttcatagacgtttag

SEQ ID NO: 240667 - DNA, 699 bp, Artificial Sequence
  derived and/or modified sequence
atggagtcaccatctgactctgccgtggtactcccttccaccccccaagccagtgcaaatccatcatcgccttacacaaacagctctcgcaaacagcccatgtctgctaccctcagagagagactgcgcaaaacccggttttcgttcaattcttcttataacgtggtgaaaagactgaaagttgagtccgaagagaatgatcagacattctcagagaagcctgcctcttcaaccgaagagaactgtctcgagttccaagagagcttcaaacatatcgacagcgaattcgaagaaaacacgaacctgaagaataccctcaaaaacctgaatgtctgtgagtctcagagcctcgatagtggctcctgttccgctctacagaacgagtttgtgagtgaaaaactgcccaagcaacggctgaatgcagaaaaggcaaagttggtcaagcaggtgcaggagaaagaggacctcctaagacgactaaagctggtcaaaatgtaccgtagtaaaaatgacttgagccagttgcagctgctcatcaagaagtggcggtcgtgtagccagttactcctctacgagctccagagcgctgtgtccgaggaaaataagaagctctctttaacacagctaatcgaccactatggtctggatgataaacttctgcattataacaggtccgaagaagagttcatcgacgtgtag

SEQ ID NO: 240668 - DNA, 699 bp, Artificial Sequence
  derived and/or modified sequence
atggagagccccagcgacagcgccgtggtgctgcccagcaccccccaggccagcgccaaccccagcagcccctacaccaacagcagcagaaagcagcccatgagcgccaccctgagagagagactgagaaagaccagattcagcttcaacagcagctacaacgtggtgaagagactgaaggtggagagcgaggagaacgaccagaccttcagcgagaagcccgccagcagcaccgaggagaactgcctggagttccaggagagcttcaagcacatcgacagcgagttcgaggagaacaccaacctgaagaacaccctgaagaacctgaacgtgtgcgagagccagagcctggacagcggcagctgcagcgccctgcagaacgagttcgtgagcgagaagctgcccaagcagagactgaacgccgagaaggccaagctggtgaagcaggtgcaggagaaggaggacctgctgagaagactgaagctggtgaagatgtacagaagcaagaacgacctgagccagctgcagctgctgatcaagaagtggagaagctgcagccagctgctgctgtacgagctgcagagcgccgtgagcgaggagaacaagaagctgagcctgacccagctgatcgaccactacggcctggacgacaagctgctgcactacaacagaagcgaggaggagttcatcgacgtgtag

SEQ ID NO: 240669 - protein, 199 aa, Artificial Sequence
  derived and/or modified sequence
METFPLLLLSLGLVLAEASESTMKIIKEEFTDEEMQYDMAKSGQEKQTIEILMNPILLVKNTSLSMSKDDMSSTLLTFRSLHYNDPKGNSSGNDKECCNDMTVWRKVSEANGSCKWSNNFIRSSTEVMRRVHRAPSCKFVQNPGISCCESLELENTVCQFTTGKQFPRCQYHSVTSLEKILTVLTGHSLMSWLVCGSKL

SEQ ID NO: 240670 - protein, 178 aa, Artificial Sequence
  derived and/or modified sequence
METFPLLLLSLGLVLAEASESTMKIIKEEFTDEEMQYDMAKSGQEKQTIEILMNPILLVKNTSLSMSKDDMSSTLLTFRSLHYNDPKGNSSGNDKECCNDMTVWRKVSEANGSCKWSNNFIRSSTEVMRRVHRAPSCKFVQNPGISCCESLELENTVCQFTTGKQFPRCQYHSVTSLE

SEQ ID NO: 240671 - protein, 136 aa, Artificial Sequence
  derived and/or modified sequence
METFPLLLLSLGLVLAEASESTMKIIKEEFTDEEMQYDMAKSGQEKQTIEILMNPILLVKNTSLSMSKDDMSSTLLTFRSLHYNDPKGNSSGNDKECCNDMTVWRKVSEANGSCKWSNNFIRSSTEVMRRVHRAPS

SEQ ID NO: 240672 - protein, 171 aa, Artificial Sequence
  derived and/or modified sequence
METFPLLLLSLGLVLAEASESTMKIIKEEFTDEEMQYDMAKSGQEKQTIEILMNPILLVKNTSLSMSKDDMSSTLLTFRSLHYNDPKGNSSGNDKECCNDMTVWRKVSEANGSCKWSNNFIRSSTEVMRRVHRAPSCKFVQNPGISCCESLELENTVCQFTTGKQFPRCQY

SEQ ID NO: 240673 - protein, 143 aa, Artificial Sequence
  derived and/or modified sequence
METFPLLLLSLGLVLAEASESTMKIIKEEFTDEEMQYDMAKSGQEKQTIEILMNPILLVKNTSLSMSKDDMSSTLLTFRSLHYNDPKGNSSGNDKECCNDMTVWRKVSEANGSCKWSNNFIRSSTEVMRRVHRAPSCKFVQNP

SEQ ID NO: 240674 - DNA, 600 bp, Artificial Sequence
  derived and/or modified sequence
atggagaccttccccctgctgctgctgagcctgggcctggtgctggccgaagcctctgagtcaacgatgaaaataatcaaagaggagttcaccgatgaggagatgcagtatgatatggccaagtctggccaagagaaacagacaattgaaatactgatgaatcccatattacttgttaagaacacctccctgtcaatgtccaaggatgatatgtcaagtactctcctcacctttagatctcttcactacaacgatccgaagggcaatagctccggcaatgataaggaatgctgtaatgatatgaccgtgtggaggaaagtgtctgaggcaaacggctcctgcaaatggtcaaataactttattaggtcatccactgaggtaatgcgaagagttcaccgagctccaagctgcaagtttgtgcaaaatccagggatttcttgctgcgagtctctcgaactggagaatacagtctgccagtttactactggcaaacaatttccccgctgccagtatcattcggtcacttccttagaaaagattcttaccgttcttaccggccattctctgatgagctggcttgtttgcggctctaaactgtag

SEQ ID NO: 240675 - DNA, 411 bp, Artificial Sequence
  derived and/or modified sequence
atggagaccttccccctgctgctgctgagcctgggcctggtgctggccgaggcatccgagtcaacaatgaagatcatcaaggaagagttcacagacgaagaaatgcagtatgacatggctaaaagtggtcaggaaaagcagacgatcgagatccttatgaatccaattctcttagtgaaaaatacatccctctctatgagcaaagacgatatgtcctccacccttttgaccttccgcagcctgcactacaacgatcccaagggtaatagctccggcaacgacaaggagtgctgcaatgacatgacagtctggcggaaagtgagcgaagccaatggtagttgtaaatggtctaacaatttcattcgctccagtaccgaagtgatgcggagagtgcatcgcgcaccttcttag

SEQ ID NO: 240676 - DNA, 600 bp, Artificial Sequence
  derived and/or modified sequence
atggagaccttccccctgctgctgctgagcctgggcctggtgctggccgaggcctccgaaagcactatgaagatcattaaagaagaattcacagacgaggaaatgcaatatgatatggctaaatctggccaggaaaaacagaccatcgagatattaatgaatccaatcctgctggttaaaaacacctcactctccatgagcaaagatgacatgtcctctaccctgcttacttttcgctccctgcactacaacgatcctaagggcaatagcagtggaaacgacaaggagtgctgtaatgatatgacagtttggcggaaggtttctgaggctaatggcagctgcaagtggtccaacaactttattcggtccagcaccgaagttatgcgacgcgtgcatagggctccctcatgtaaattcgtccaaaacccaggcatatcctgctgcgagtctctggaactggagaatactgtgtgtcaattcacaacagggaaacagttcccacgctgccagtatcactccgttacgagcctggaaaaaattttgaccgtgctaactggccattccctcatgagctggttggtgtgtggaagtaaattatag

SEQ ID NO: 240677 - DNA, 516 bp, Artificial Sequence
  derived and/or modified sequence
atggagaccttccccctgctgctgctgagcctgggcctggtgctggcagaggccagtgagtccacaatgaagattatcaaggaggaattcactgatgaggagatgcaatatgatatggcaaagtctggccaggagaaacaaaccattgagattcttatgaaccccattctactggttaaaaacaccagcctaagcatgagtaaagatgacatgtcttccaccttgttgactttcagaagcctccattataatgatcccaaagggaatagcagtggaaatgacaaagagtgctgcaacgatatgactgtatggaggaaggtctctgaggcgaacggatcctgcaagtggtcgaataactttataaggtcgagcacagaggtgatgcgccgggtgcaccgagctccatcctgcaaatttgtgcagaaccctggcattagctgttgcgagtcactagaactcgaaaataccgtgtgtcaattcactaccggaaaacagttccctcgttgtcaatattag

SEQ ID NO: 240678 - DNA, 537 bp, Artificial Sequence
  derived and/or modified sequence
atggagaccttccccctgctgctgctgagcctgggcctggtgctggctgaggccagtgagtccacaatgaagattataaaggaagaattcacagatgaagagatgcagtacgatatggcaaagtcgggccaggaaaagcagacaattgagatcctgatgaacccgatcctgttagttaaaaatacaagcttgtccatgagcaaagacgacatgtcaagcactctactcacttttaggtccttacattacaatgatccaaagggaaatagctctggcaatgataaagaatgctgtaatgatatgacagtgtggagaaaggtctccgaggcaaatggatcatgtaagtggtccaacaactttatccgctcttctacggaggttatgagaagggtccaccgtgcaccctcctgtaagtttgtccagaaccctggaatctcttgctgcgaaagcttagaattagagaacactgtgtgccaatttacaactggtaagcagttccccaggtgccagtatcacagcgtaacttcactagaatag

SEQ ID NO: 240679 - DNA, 872 bp, Artificial Sequence
  derived and/or modified sequence
gagcaggcatgggtgggtcacaggctttggagagcactctctgtcctgatcttttcagttgagagacttcagctgttcattgctcatttggacttagttcaagaattttgggtgtcaccaggtaaacagagccctcagcatctgaatagaaactgaacaggaacagaagagattacactacatctgagatggagacctttcctctgctgctgctcagcctgggcctggttcttgcagaagcatcagaaagcacaatgaagataattaaagaagaatttacagacgaagagatgcaatatgacatggcaaaaagtggccaagaaaaacagaccattgagatattaatgaacccgatcctgttagttaaaaataccagcctcagcatgtccaaggatgatatgtcttccacattactgacattcagaagtttacattataatgaccccaagggaaacagttcgggtaatgacaaagagtgttgcaatgacatgacagtctggagaaaagtttcagaagcaaacggatcgtgcaagtggagcaataacttcatccgcagctccacagaagtgatgcgcagggtccacagggcccccagctgcaagtttgtacagaatcctggcataagctgctgtgagagcctagaactggaaaatacagtgtgccagttcactacaggcaaacaattccccaggtgccaataccatagtgttacctcattagagaagatattgacagtgctgacaggtcattctctgatgagctggttagtttgtggctctaagttgtaaatcccacagagctttaggactagggtcttactaaagaaggacctcttcttgttcattcttgtttaaacctttccttaatatcta

SEQ ID NO: 240680 - DNA, 1034 bp, Artificial Sequence
  derived and/or modified sequence
agctatggcatttcaatcctgtatgtgagagctagagactcatacagtgacctagagcaggcatggaattttgggtgtcaccaggtaaacagagccctcagcatctgaatagaaactgaacaggaacagttagacacaacagcagaaactcccaggaaacaaacacgatttcacttttagctctgcaacaaagtggaatcttcctctacaggatcaacttgccgaaggaactgaagagattacactacatctgagatggagacctttcctctgctgctgctcagcctgggcctggttcttgcagaagcatcagaaagcacaatgaagataattaaagaagaatttacagacgaagagatgcaatatgacatggcaaaaagtggccaagaaaaacagaccattgagatattaatgaacccgatcctgttagttaaaaataccagcctcagcatgtccaaggatgatatgtcttccacattactgacattcagaagtttacattataatgaccccaagggaaacagttcgggtaatgacaaagagtgttgcaatgacatgacagtctggagaaaagtttcagaagcaaacggatcgtgcaagtggagcaataacttcatccgcagctccacagaagtgatgcgcagggtccacagggcccccagctgcaagtttgtacagaatcctggcataagctgctgtgagagcctagaactggaaaatacagtgtgccagttcactacaggcaaacaattccccaggtgccaataccatagtgttacctcattagagaagatattgacagtgctgacaggtcattctctgatgagctggttagtttgtggctctaagttgtaaatcccacagagctttaggactagggtcttactaaagaaggacctcttcttgttcattcttgtttaaacctttccttaatatctactctttagcactatagtgaactcctgattatttattctaactggaggagtgaaaaatccaaaattgtggataattcaattaaaagttatgactga

SEQ ID NO: 240681 - DNA, 600 bp, Artificial Sequence
  derived and/or modified sequence
atggagacatttcccctgctcctgctatccctcggccttgtgcttgccgaggccagcgagtctaccatgaagatcattaaggaagagtttacagacgaggaaatgcagtacgacatggctaaaagtggccaggagaagcagactattgagattctgatgaaccccattctcctagtgaagaacaccagtttatcaatgagtaaagacgacatgtcctccacactgctcactttcaggtccttgcactataacgaccccaaggggaacagtagtggtaatgataaagagtgctgcaacgacatgacggtatggcgcaaggtttcggaggcaaacgggtcctgtaagtggtcaaacaactttatccgttcgagcactgaggtcatgagaagggtccacagagctccctcttgtaagtttgtgcagaatcccggaattagctgctgcgagagtctggagctcgagaacactgtctgtcagtttacaactggaaagcagtttccacggtgccagtaccactcggttacctccctggaaaagattttaactgtcttaacaggccactccctcatgagctggctggtatgcggctctaaactgtag

SEQ ID NO: 240682 - DNA, 600 bp, Artificial Sequence
  derived and/or modified sequence
atggaaacatttccactgttacttctttccctgggactcgtgttagccgaggcctccgaaagtactatgaagatcatcaaagaggagttcactgacgaagagatgcaatacgatatggccaaatccggccaagagaaacagaccattgagatactgatgaaccctattctgctcgtgaagaacacgagtctgtccatgagtaaagacgatatgtcctccacgctgctgacatttcgcagcctgcactataacgaccctaagggaaactcctctggtaacgataaggagtgttgcaacgatatgacagtctggcgaaaggtgtcagaagctaatggatcgtgtaagtggagtaacaatttcattcgaagcagcacagaggtgatgagacgggtgcatcgggctcccagctgcaagttcgtgcagaatcctggtatttcttgctgtgaatcgctggagttggagaatacagtgtgtcagtttactacagggaaacagtttcctaggtgccagtaccactccgtgacatcccttgagaaaattcttacggtgcttactggacacagtctgatgagttggttagtgtgtggaagtaaattgtag

SEQ ID NO: 240683 - DNA, 600 bp, Artificial Sequence
  derived and/or modified sequence
atggaaaccttcccattactgctcctctccctgggtctcgtcctggctgaggcctctgagtctaccatgaaaatcatcaaggaagaattcacagatgaggaaatgcagtacgacatggcaaaatccggccaagaaaagcagactattgagattctcatgaatccaatcctgttagtgaagaatactagcttgtctatgagcaaggatgatatgtcgtccacgctgctaacctttcggagcctccactacaatgaccctaaggggaactcaagcggtaacgataaagagtgctgtaacgatatgacagtttggaggaaagtaagtgaggccaacgggtcgtgcaaatggtccaacaactttatcaggtcatctacagaggtcatgagacgcgttcatcgggctccatcttgcaagttcgtgcagaaccccggaatcagctgctgtgaatctctagagttggagaatacagtgtgccagtttaccaccggtaagcaattccctaggtgtcagtatcactcggtgacttctttggaaaaaattttgacagtcctgactggccattccctgatgtcgtggctggtgtgcggttctaagctctag

SEQ ID NO: 240684 - DNA, 600 bp, Artificial Sequence
  derived and/or modified sequence
atggaaaccttccctctgctccttctgagcttggggttggtgcttgccgaagctagcgagagtacgatgaaaattatcaaggaggaattcacagacgaagagatgcagtacgatatggcgaagagcggacaggagaaacagacaatagagatactgatgaaccccatccttctcgtgaagaatacaagcctgtccatgtccaaagatgacatgtcatctactcttctgacgtttcgctcactgcattacaacgaccctaaggggaactcttcaggcaacgataaggaatgttgcaacgatatgacagtatggaggaaggtgagtgaggctaacggatcgtgtaagtggtcgaataattttatccgatcgtcaaccgaggtcatgcggagggtgcaccgcgcaccctcctgcaagtttgtgcaaaatccaggaatatcatgttgtgagtccctggagctggagaatactgtttgccagtttaccaccggaaagcaattccctcggtgccagtatcactctgtcacatcactggaaaaaatattgactgtccttactgggcacagcctgatgagctggctcgtctgcggttccaagttgtag

SEQ ID NO: 240685 - DNA, 537 bp, Artificial Sequence
  derived and/or modified sequence
atggagaccttcccactactgctcttgtccttaggactcgtgctggccgaggcctcagagagtacaatgaagattatcaaggaagagttcactgatgaagaaatgcagtatgatatggcaaagtcgggccaggaaaaacaaacgattgagattttgatgaaccctattctgctggttaagaacactagtctgtccatgtctaaagatgatatgtcatcaacgcttctaacattccgttcattgcattacaacgatcccaagggcaacagcagcggtaatgacaaagaatgctgtaatgatatgaccgtgtggaggaaagtgagcgaggccaacggaagttgtaaatggagcaacaattttatccgctcttctactgaggtgatgagacgggtccaccgggctccgagctgtaaattcgtgcaaaatccagggatttcttgttgtgaaagtctagaattggagaataccgtctgccaattcactacaggaaagcagtttcctcgatgccaatatcatagcgtcacatcgttggagtag

SEQ ID NO: 240686 - DNA, 600 bp, Artificial Sequence
  derived and/or modified sequence
atggaaacctttcctcttctcttactatctctcggcctggtgttagccgaggcatctgagagcactatgaaaataatcaaggaagagttcaccgacgaggagatgcaatatgatatggcgaagtcaggccaggagaaacagactattgaaattctcatgaatcctatcctgttggtgaaaaataccagcctgagcatgtccaaagatgacatgtcaagcactcttctgacgtttcgatccctgcactataatgatcccaaaggcaactcctcaggcaatgataaagaatgctgcaatgacatgactgtatggcgcaaagtaagcgaggctaacgggagctgtaagtggagcaataacttcataagatcttctacagaagtgatgagaagggtgcaccgggcacctagctgcaagttcgtgcagaatccaggaattagctgttgcgagagtctggagctggagaatacggtctgccagtttaccaccggcaagcagttcccacgttgccagtatcactcagtcacgtcgcttgaaaaaatcttgacagtcctcacaggccacagtctgatgtcctggttggtgtgcggttcaaagctgtag

SEQ ID NO: 240687 - DNA, 411 bp, Artificial Sequence
  derived and/or modified sequence
atggagacctttccgctcttgttgctgtccttgggcttggtactcgccgaagcatcagagtctactatgaagatcattaaagaggaatttacagatgaggagatgcagtacgacatggccaaatccggtcaggagaagcagacgattgaaatcctaatgaacccaatcctgctggtgaaaaacacctcgctctctatgagcaaagacgacatgagctctaccctactgaccttccgttccctgcattataatgaccccaagggtaactcgtctggaaacgataaggagtgttgtaatgacatgaccgtttggaggaaagtttctgaagccaatggttcatgcaagtggtctaataatttcattagatccagtactgaagtcatgaggcgtgtccatcgcgctccaagttag

SEQ ID NO: 240688 - DNA, 600 bp, Artificial Sequence
  derived and/or modified sequence
atggagacattcccactccttctgttatccttgggattggttcttgcggaggcttctgaaagcactatgaaaattatcaaggaagagtttaccgatgaggaaatgcagtatgacatggcaaagtctgggcaagaaaaacagacaattgaaattttgatgaaccccatactactggttaagaatacctctctgtctatgtcaaaggacgacatgtcaagcaccttgctgacatttaggtccctccactataatgatcctaagggcaactcctctggaaacgataaggagtgttgtaacgatatgacagtttggagaaaagtgtcagaggccaatggcagctgtaaatggagtaataatttcatccgcagctccacagaggtgatgaggcgggtacacagggctccttcctgtaagttcgtacagaaccctgggatttcgtgctgtgagtctctggagctagagaatactgtatgccaatttacaacgggcaaacagtttccgagatgccagtatcactcagtcacctcgttagaaaagatactgacggtactgaccggccattcactgatgagctggctggtgtgcggaagcaagctttag

SEQ ID NO: 240689 - DNA, 516 bp, Artificial Sequence
  derived and/or modified sequence
atggaaacttttcctttgttgctgctaagcttgggacttgtcttggctgaggctagtgagagtaccatgaagattatcaaggaggaatttacggacgaagaaatgcagtatgatatggccaaatctgggcaagagaaacagacaatcgaaattctaatgaatccaatcctgctggttaagaatacaagtctttccatgtctaaagacgatatgtcctcgacactgctaacgttccggagcctccactataacgaccctaagggaaattcgtccggaaatgacaaagaatgttgtaatgacatgaccgtgtggaggaaagttagcgaggctaatggcagttgcaaatggagtaacaatttcatccgaagcagcaccgaggtgatgaggcgagtccaccgtgcgccatcatgcaaatttgtccagaacccaggcatttcatgctgcgaaagtctggagctcgaaaatactgtctgccagttcacgaccggaaaacaattccccagatgccagtactag

SEQ ID NO: 240690 - DNA, 537 bp, Artificial Sequence
  derived and/or modified sequence
atggaaactttcccgctgcttctgctgagcttggggctcgttctcgctgaggcatccgagtcaactatgaagattattaaagaggagttcaccgacgaggagatgcagtacgacatggccaagagtggccaggagaagcagacaatcgagatactcatgaatcctattctgctggtaaagaacacgtcattgtccatgagcaaggatgacatgtcgagtacgctcttgacatttcgcagcctgcactacaacgatcccaagggcaattcaagtggtaacgacaaggagtgctgcaacgacatgactgtctggagaaaagtttccgaggccaacggctcctgtaaatggtcaaataacttcatacgcagttccactgaggtgatgcgtcgggtccaccgggcacctagttgcaaatttgttcagaacccaggaatctcctgttgtgaatccctggagctggagaacaccgtttgtcaatttaccaccggcaagcaatttccaaggtgccagtaccattcagtaaccagtttggagtag

SEQ ID NO: 240691 - DNA, 600 bp, Artificial Sequence
  derived and/or modified sequence
atggaaactttccctctcctcctactctccctgggcctggtattagcagaagcctctgaaagcacgatgaaaatcattaaggaagaatttactgacgaagagatgcaatatgacatggcaaaaagcggtcaagagaaacagactatcgagatactgatgaaccctatcttacttgttaagaatacaagcttaagcatgtccaaggatgatatgtctagtaccctgttgacttttaggagcctgcactacaatgatccaaaggggaattctagtggaaatgacaaggagtgttgtaatgatatgactgtgtggcgaaaggtctcagaagcgaatggctcttgtaaatggtccaataattttatccgcagttccaccgaggtgatgcgccgagtgcatcgcgctccttcttgcaaattcgtgcaaaatcctggcattagctgctgcgaaagtcttgagctagaaaatactgtctgccagttcacaaccggcaaacagttcccgcgctgccaataccattccgtgacctctctggaaaaaatccttaccgtcctcacaggacacagcctaatgtcttggctcgtgtgcggctccaagctgtag

SEQ ID NO: 240692 - DNA, 946 bp, Artificial Sequence
  derived and/or modified sequence
ctagagactcatacagtgacctagagcaggcatgggtgggtcacaggctttggagagcactctctgtcctgatcttttcagttgagagacttcagctgttcattgctcatttggacttagttcaaggtcatgtcaaagaagaaggtgcacttacgctagttgttagctctgtcttttgtaaccatcaagttccatgcgattgatcagatttaggagggggcgttgggggataatcgtaagtgaaggacagtttgcaaccttaattttgggtgtcaccaggtaaacagagccctcagcatctgaatagaaactgaacaggaacagaagagattacactacatctgagatggagacctttcctctgctgctgctcagcctgggcctggttcttgcagaagcatcagaaagcacaatgaagataattaaagaagaatttacagacgaagagatgcaatatgacatggcaaaaagtggccaagaaaaacagaccattgagatattaatgaacccgatcctgttagttaaaaataccagcctcagcatgtccaaggatgatatgtcttccacattactgacattcagaagtttacattataatgaccccaagggaaacagttcgggtaatgacaaagagtgttgcaatgacatgacagtctggagaaaagtttcagaagcaaacggatcgtgcaagtggagcaataacttcatccgcagctccacagaagtgatgcgcagggtccacagggcccccagctgcaagtttgtacagaatcctggcataagctgctgtgagagcctagaactggaaaatacagtgtgccagttcactacaggcaaacaattccccaggtgccaataccatagtgttacctcattagagaagatattgacagtgctgacaggtcattctctgatgagctggttagtttgtggctctaagttgtaa

SEQ ID NO: 240693 - DNA, 600 bp, Artificial Sequence
  derived and/or modified sequence
atggagacctttccactcctgttgctgtcactggggctggtgttggccgaggcctcagaaagtacaatgaagataattaaggaagaatttactgatgaagagatgcaatatgatatggcaaaatctggccaagagaagcaaaccatcgagatcttaatgaatcccatattgctggtgaaaaatacatccctgtccatgtccaaagatgacatgtcaagcacactgttaacattcaggagtttacactacaatgacccaaaaggaaatagcagcgggaatgataaggaatgctgcaacgatatgacagtgtggagaaaagtctctgaggccaacggcagctgcaaatggtcaaataattttattcgtagctctaccgaggtgatgcgccgagtgcaccgcgccccgtcttgtaaatttgttcaaaatcctggcatttcttgctgcgagtcattggagttggagaatactgtctgccagtttaccaccggtaaacagttcccccggtgtcaatatcactcagtcacctctctggagaagatcctcacggtactgacgggtcacagtctgatgagctggctcgtgtgtggatcaaaattgtag

SEQ ID NO: 240694 - DNA, 600 bp, Artificial Sequence
  derived and/or modified sequence
atggagacgttcccgttgctgctgttgtcactgggcttggtgctggcggaagcgtctgaatccactatgaagatcatcaaagaagagttcaccgatgaggagatgcaatatgacatggccaaatccgggcaagagaaacagactattgaaatcctaatgaaccctattctactcgtcaagaatacatcgctatcaatgtctaaagatgacatgtcctccaccctgcttaccttccggtcgctgcactataatgacccaaaagggaatagctccgggaatgacaaggagtgttgcaatgatatgaccgtctggcgtaaggtatctgaggcgaatggttcatgtaagtggagtaataactttatacgatctagtactgaagtgatgaggagggtacaccgtgcacctagttgcaagtttgtgcagaatcccgggattagctgttgtgagtctctggaacttgaaaatacagtgtgtcaatttactacggggaagcagtttcctcgctgtcagtatcactccgttacaagcttggagaaaattctcaccgtattaacaggtcactcgctgatgtcctggctggtttgtggttctaaactgtag

SEQ ID NO: 240695 - DNA, 600 bp, Artificial Sequence
  derived and/or modified sequence
atggaaactttcccattactcctcctttcattaggcctggttctagccgaggccagcgagtccaccatgaagataataaaagaggaattcacagacgaggagatgcagtacgatatggccaagagtggacaggaaaaacaaacaatagaaatcttgatgaatcccatccttctggtgaagaatacatctctttccatgagtaaagacgatatgagtagcaccttgctgactttccgatctctgcactacaatgatcctaaagggaattcctcaggaaacgacaaagaatgctgtaatgatatgacggtgtggagaaaggtaagcgaagccaatggctcatgcaaatggtcaaacaacttcatacgatcctccaccgaagtgatgagacgtgtgcatcgggctccgagctgcaaattcgtccagaacccaggcatctcctgctgtgaaagtcttgaacttgaaaacacagtctgccagtttactaccggaaaacaattcccgcgctgccagtaccattcggtgacatctctcgaaaaaattcttaccgttttaaccggccactccctgatgagctggcttgtgtgtggctctaagctgtag

SEQ ID NO: 240696 - DNA, 537 bp, Artificial Sequence
  derived and/or modified sequence
atggaaacattcccgttgctacttttgtcgttgggattagttctagctgaggcatcagagagcacaatgaaaattataaaggaggaatttactgatgaggagatgcaatacgacatggccaagagcggccaagagaagcaaacgattgagattttgatgaacccgattctgttagtgaaaaatacaagcctcagcatgagcaaggacgatatgagctcaacactactgaccttccgctctctgcattataatgatcccaaaggcaactcatccgggaatgataaagagtgttgcaacgatatgacggtttggagaaaagtgagcgaagctaatggatcttgtaagtggtctaacaactttattcgttcttcgacagaggtgatgcgtcgcgtccatagagcaccctcttgcaaatttgtgcagaatcccggcattagttgttgcgagtcacttgagttggaaaacacagtgtgtcagttcacgacgggcaaacagttcccaaggtgccaataccatagcgtaacatccctcgaatag

SEQ ID NO: 240697 - DNA, 600 bp, Artificial Sequence
  derived and/or modified sequence
atggagaccttcccactcctcctcctgagcctgggactggttctcgcggaggcgtccgagagcactatgaagatcatcaaagaagagtttaccgacgaagaaatgcagtatgacatggccaagtcaggacaagaaaagcaaaccattgagatactgatgaaccccattctcttggtgaagaacacatccctgagcatgtccaaagacgacatgtcaagtaccctgctgacattccgaagcttacattacaacgatcctaaagggaactcaagtggaaatgacaaagagtgttgtaacgatatgactgtgtggcgaaaggtttctgaggcaaacggatcctgcaaatggagtaataatttcattcgttccagcaccgaagtgatgcgaagagtgcatagggccccgagctgtaaattcgttcagaatccaggcattagctgttgcgagtctctggaactggagaacacagtgtgtcagtttacaacaggaaaacagttccccagatgtcaataccactccgtaacaagcctcgagaagatattaacagttcttactggccacagtctcatgagctggttagtttgtggctccaaactatag

SEQ ID NO: 240698 - DNA, 411 bp, Artificial Sequence
  derived and/or modified sequence
atggagacctttccattgcttcttctaagcctggggctcgttctagctgaagcaagtgaaagcaccatgaagataataaaagaggagtttacagacgaggaaatgcagtacgatatggccaaaagcggacaggaaaaacagactatcgaaatattaatgaacccaatcttgctggtaaagaatacatcactgtctatgtctaaagatgatatgtcctcgactcttctgaccttccggtctcttcattacaatgacccaaaaggaaactctagcggtaatgacaaggagtgctgtaatgacatgacggtctggcgcaaggtgagcgaagctaatgggtcatgcaaatggtctaacaattttatcagaagttctaccgaggttatgcggcgagtccaccgagccccttcatag

SEQ ID NO: 240699 - DNA, 600 bp, Artificial Sequence
  derived and/or modified sequence
atggagaccttccccctcctgctccttagtctcgggctggttctggccgaagcgtcggaaagcacaatgaaaataatcaaagaggaattcaccgatgaggagatgcagtacgacatggcaaaatctggtcaggagaagcagaccatcgagattctcatgaatccaatactgctagtaaaaaatacctcgctttccatgtccaaagatgatatgagtagcactttgcttaccttccgaagcctgcactataatgaccctaaaggtaactctagtggtaacgataaagaatgttgcaacgatatgaccgtgtggcgcaaggtgtccgaagctaatggctcttgtaagtggtctaacaatttcatcagaagcagtactgaggtcatgagaagagtgcacagagccccaagttgcaagttcgtccaaaacccgggcataagttgttgcgaaagcttagaactcgaaaataccgtgtgccagtttacgacaggcaagcagttccctcgttgtcagtatcactcagtcaccagtttagaaaagatcctcaccgtccttactgggcacagtttgatgtcctggctagtgtgtggtagcaaactgtag

SEQ ID NO: 240700 - DNA, 516 bp, Artificial Sequence
  derived and/or modified sequence
atggaaacattccccctcctactacttagtcttggcctggtgctcgcagaggcttccgagtcaaccatgaagataatcaaagaagaattcaccgatgaagagatgcagtacgacatggcaaaaagtggacaggagaagcagaccatcgagatcttaatgaatcccatcttactggttaagaacacctctttgagcatgagtaaggacgacatgtcttctacactgcttacctttagaagcctccactataacgatcctaaaggcaactcttccggaaacgataaagaatgttgcaacgatatgaccgtttggcgcaaagtgagtgaagcgaacggctcctgcaaatggtcgaataatttcattcgctcatctacagaagtaatgcgacgggtgcatcgcgccccgtcttgtaaatttgtgcagaaccctggaatctcttgctgtgaaagcctggagctcgagaacacagtctgtcagtttacaaccgggaagcagtttccccgctgtcagtactag

SEQ ID NO: 240701 - DNA, 537 bp, Artificial Sequence
  derived and/or modified sequence
atggaaaccttccctttgctgctgttatcactgggcttggttctcgcggaggcttctgagagcacaatgaagatcatcaaggaagagtttacggacgaggaaatgcagtatgatatggctaaatctggccaagagaagcagacaatcgagatcttaatgaatcccatcctactggtgaagaacacaagtctgtctatgtcgaaggatgatatgtccagtacactcctgacatttagatccttacactataatgatcccaaaggtaactcatctggcaatgataaagaatgctgtaatgacatgaccgtgtggagaaaagtttccgaggcaaatggttcatgtaagtggtctaataattttatccgttcaagcactgaggttatgcgacgggtacatagggcgccttcttgcaaattcgtgcagaatccaggtattagctgctgtgaatccctcgagctcgaaaatacagtgtgtcaatttaccactggcaaacagtttccgaggtgtcagtaccatagtgtcacctctttagagtag

SEQ ID NO: 240702 - DNA, 850 bp, Artificial Sequence
  derived and/or modified sequence
actcatacagtgacctagagcaggcatgggtgggtcacaggctttggagagcactctctgtcctgatcttttcagttgagagacttcagctgttcattgctcatttggacttagttcaaggtcatgtcaaagaagaaggtgcacttacgctagttgttagctctgtcttttgtaaccatcaagttccatgcgattgatcagatttaggagggggcgttgggggataatcaattttgggtgtcaccaggtaaacagagccctcagcatctgaatagaaactgaacaggaacagaagagattacactacatctgagatggagacctttcctctgctgctgctcagcctgggcctggttcttgcagaagcatcagaaagcacaatgaagataattaaagaagaatttacagacgaagagatgcaatatgacatggcaaaaagtggccaagaaaaacagaccattgagatattaatgaacccgatcctgttagttaaaaataccagcctcagcatgtccaaggatgatatgtcttccacattactgacattcagaagtttacattataatgaccccaagggaaacagttcgggtaatgacaaagagtgttgcaatgacatgacagtctggagaaaagtttcagaagcaaacggatcgtgcaagtggagcaataacttcatccgcagctccacagaagtgatgcgcagggtccacagggcccccagctgcaagtttgtacagaatcctggcataagctgctgtgagagcctagaactggaaaatacagtgtgccagttcactacaggcaaacaattccccaggtgccaataccatagtgttacctcattagagaa

SEQ ID NO: 240703 - DNA, 600 bp, Artificial Sequence
  derived and/or modified sequence
atggaaactttccctctcctcctactctccctgggcctggtattagcagaagcctctgaaagcacgatgaaaatcattaaggaagaatttactgacgaagagatgcaatatgacatggcaaaaagcggtcaagagaaacagactatcgagatactgatgaaccctatcttacttgttaagaatacaagcttaagcatgtccaaggatgatatgtctagtaccctgttgacttttaggagcctgcactacaatgatccaaaggggaattctagtggaaatgacaaggagtgttgtaatgatatgactgtctggcggaaagtttccgaagcaaatggatcttgcaaatggagcaacaattttatccgtagttctaccgaagtgatgaggagagtccacagggcgccaagttgcaagttcgtccagaatccaggcattagttgctgcgaatccttagagctggaaaacacagtttgccagttcaccaccggcaagcagttcccaagatgtcagtaccattccgtgacctccctcgaaaaaatactgacagtcctgaccggacactctctgatgtcatggctagtgtgtggctcaaaactctag

SEQ ID NO: 240704 - DNA, 600 bp, Artificial Sequence
  derived and/or modified sequence
atggaaaccttccccctgttgctcctctccttgggacttgtgttggccgaggcttcagagtccacaatgaagattatcaaagaagaatttacggatgaagaaatgcagtacgacatggcgaagtcaggccaggaaaagcagacaattgaaatcctcatgaatccaattcttctcgtcaaaaataccagcctctctatgagcaaagatgatatgtcatcaactctgcttacattccgatccctccactataacgatccaaaggggaattcaagtgggaacgataaagagtgttgcaatgacatgaccgtttggcgcaaagtgtccgaagctaacggctcctgtaagtggtccaacaacttcatccgctcttccacagaggttatgagaagggtccaccgcgcaccttcctgcaagtttgtccagaaccccggcatcagttgttgtgagagcctcgagttagagaataccgtgtgccaatttactaccggcaaacaattccctagatgtcaatatcattccgtaactagcctagagaagatcttgacggtgcttacaggtcacagcctgatgtcttggctcgtatgcggatctaagctctag

SEQ ID NO: 240705 - DNA, 600 bp, Artificial Sequence
  derived and/or modified sequence
atggaaacatttcccctcctgctcctctctctcggactggtgctagctgaggcctcagagtcaactatgaagatcatcaaggaagagttcactgacgaagaaatgcagtacgatatggccaagagcgggcaagaaaaacagactatcgagattctaatgaaccccatcctcttggtgaaaaacacctccttatcaatgtctaaagacgacatgtcaagtaccctgctgaccttccgaagcttacactataacgaccccaagggtaattcaagcggcaacgataaagagtgttgtaatgatatgactgtgtggaggaaagtgtctgaagccaatggatcttgcaaatggagtaacaatttcatccgttctagtactgaagtgatgcgccgggtccaccgggccccttcttgcaaatttgtgcaaaatcctggaatttcatgctgcgaatctctcgaactcgagaatacagtgtgtcagtttaccaccggaaagcagtttcctagatgccagtatcactccgtgacctcacttgaaaaaatcctcaccgtgctgacaggacactcccttatgagctggctagtatgcgggtctaaactctag

SEQ ID NO: 240706 - DNA, 600 bp, Artificial Sequence
  derived and/or modified sequence
atggaaaccttccctctacttttactctctttagggctggttctagccgaagcctctgagtctacaatgaaaattatcaaagaagagtttaccgacgaagaaatgcagtacgatatggcgaagagtggccaggagaagcaaaccattgaaatccttatgaatcccattctccttgtgaaaaatacgtccctttcaatgtcaaaagacgatatgagcagcacgctactgacatttcgttcacttcactataacgacccaaaggggaactcatctggcaatgacaaggaatgttgtaacgacatgaccgtgtggagaaaagtaagtgaagcaaatggatcgtgcaaatggtctaataactttatcagaagcagtacggaagttatgcgaagagtgcatcgagccccgtcttgtaaatttgtacagaatccgggcatctcttgctgtgaaagtcttgagctggaaaacacagtctgtcaatttaccacgggaaagcaatttcctcgctgccagtatcactctgtcacttcactagaaaagatcttgactgttctaacaggccacagtctgatgtcctggctcgtttgcggcagtaagctatag

SEQ ID NO: 240707 - DNA, 537 bp, Artificial Sequence
  derived and/or modified sequence
atggaaactttcccgctgcttctcctctccctggggttagtgctggccgaggcttccgaatcgaccatgaagattatcaaggaggagtttactgacgaagagatgcaatatgatatggccaaatcaggacaggagaaacagacaattgaaatactgatgaaccccattttgcttgtgaagaatacatcactgagtatgtcaaaggacgatatgtcaagcactctactgacctttagatctctccattacaacgatccaaaaggtaactcatcgggaaatgacaaggaatgctgcaacgatatgacagtttggcgtaaagtgagtgaggcaaatggctcctgcaagtggtcaaacaatttcatacgctcctccacggaagttatgaggcgggttcaccgggccccgtcgtgtaagttcgttcagaatcctggtataagctgctgcgagtctctagaactcgaaaataccgtctgtcagttcacaactgggaagcaatttccccggtgtcagtatcactcggtaacatctcttgaatag

SEQ ID NO: 240708 - DNA, 600 bp, Artificial Sequence
  derived and/or modified sequence
atggagacctttcctctcctactgttatccctcggcttagttctggctgaagcttccgagtccacgatgaaaatcataaaagaggaattcacagacgaagaaatgcagtatgacatggctaaatctggacaggaaaaacagacaatcgaaatactgatgaatcctatcctgctggtgaagaatacttccttgtcgatgtccaaggatgatatgtcctccacccttctgacctttcgcagccttcactacaatgaccctaaaggtaatagttctggaaacgataaagagtgttgtaacgatatgacagtgtggcggaaggtgtcagaggctaacggtagctgcaaatggtccaataatttcattcgttcgtcaaccgaggtcatgcggcgcgtccacagagccccttcctgcaaatttgtccagaatcccgggatttcttgttgcgaatccctcgaattggaaaataccgtgtgtcaatttaccaccggcaagcagttcccaaggtgccagtatcattcagtcacaagcctcgaaaagatcttaacggtcctgacgggccattctcttatgtcttggctcgtgtgtgggtccaaattgtag

SEQ ID NO: 240709 - DNA, 411 bp, Artificial Sequence
  derived and/or modified sequence
atggagaccttccccctcctgttactcagtcttggactcgtgcttgccgaagcctctgaatccacaatgaagatcataaaggaggaattcacagacgaggagatgcaatacgatatggccaaaagtggacaggaaaagcaaactatagagatactgatgaatcccatactactcgtgaaaaacacctccctctctatgagcaaagacgatatgagttccaccctcctgacattcagatctctgcattataatgatccaaagggcaattccagcggtaatgataaggaatgttgtaatgacatgaccgtgtggcgcaaagtaagtgaagccaatggaagctgtaaatggtccaataatttcatccggtctagtacagaggttatgcgcagagttcatagggcccccagttag

SEQ ID NO: 240710 - DNA, 600 bp, Artificial Sequence
  derived and/or modified sequence
atggaaaccttcccacttctactccttagcctcggactggtgctcgccgaggcctcagaatctacaatgaaaatcatcaaagaagaatttaccgacgaagagatgcagtacgatatggccaaaagtggtcaggagaagcagaccattgaaattctgatgaaccctatcctactcgtcaaaaacacctccttgtccatgagcaaagatgatatgagttctactctgctgacatttaggagtctccattacaatgacccaaaagggaattcttccggcaacgacaaggaatgctgcaacgatatgacggtatggcggaaggtcagtgaagctaatggttcttgcaaatggtctaacaattttatacgctctagcacagaggtaatgcgacgagtccatcgggcacccagctgcaaatttgtgcagaatcctggcatcagctgttgtgaaagcctcgagctcgaaaataccgtatgccagtttactactggaaagcagtttcccagatgtcagtatcactccgtcacatctttagaaaaaattcttacagtcctgacaggccacagtttaatgtcctggttagtgtgcggatccaagctctag

SEQ ID NO: 240711 - DNA, 516 bp, Artificial Sequence
  derived and/or modified sequence
atggaaacattccccctcctactacttagtcttggcctggtgctcgcagaggcttccgagtcaaccatgaagataatcaaagaagaattcaccgatgaagagatgcagtacgacatggcaaaaagtggacaggagaagcagaccatcgagatcttaatgaatcccatcttactggttaagaacacctctttgagcatgagtaaggacgacatgtcttctacactgcttacctttagaagcctccactataacgatcctaaaggcaactcttccggaaacgataaagaatgttgcaacgatatgacagtctggagaaaagtgagcgaagccaatggcagctgcaagtggtcaaataacttcattcggagctcgacggaagtgatgagaagagtccaccgagcccctagttgtaagttcgtccagaatcccggcatatcctgttgcgagtcacttgagttagagaacacggtatgtcagttcacaacaggtaagcagtttcctcgatgccaatattag

SEQ ID NO: 240712 - DNA, 537 bp, Artificial Sequence
  derived and/or modified sequence
atggagacatttcctctactcctgctgtccctgggactagtgcttgccgaagcctccgagtccactatgaagattatcaaagaggagtttacagacgaagagatgcaatacgacatggcaaagtccggtcaagaaaagcaaacaatcgaaattctcatgaaccctatattactggtgaagaacacaagcctatctatgtccaaagacgacatgtcatcaactctgctgacattccgaagtcttcactataatgaccctaaaggcaactcctcagggaatgacaaagaatgttgtaacgacatgactgtgtggcgaaaagtctcagaggctaatgggtcttgcaaatggagtaataattttatacgtagttctacggaagtcatgagaagagtgcatagagcaccatcctgcaagttcgttcagaatccagggatcagttgctgcgagagcctggagctcgaaaacaccgtttgtcaatttactacagggaaacaattccctcgctgtcaatatcactccgtaaccagcttagaatag

SEQ ID NO: 240713 - DNA, 1101 bp, Artificial Sequence
  derived and/or modified sequence
actcatctcatggcttcttccatcttaggtggccgtttttcagctgagtttcattttctagttctctgtggtaattctgttgtcattgttgtctccatagaattttgggtgtcaccaggtaaacagagccctcagcatctgaatagaaactgaacaggaacagaagagattacactacatctgagatggagacctttcctctgctgctgctcagcctgggcctggttcttgcagaagcatcagaaagcacaatgaagataattaaagaagaatttacagacgaagagatgcaatatgacatggcaaaaagtggccaagaaaaacagaccattgagatattaatgaacccgatcctgttagttaaaaataccagcctcagcatgtccaaggatgatatgtcttccacattactgacattcagaagtttacattataatgaccccaagggaaacagttcgggtaatgacaaagagtgttgcaatgacatgacagtctggagaaaagtttcagaagcaaacggatcgtgcaagtggagcaataacttcatccgcagctccacagaagtgatgcgcagggtccacagggcccccagctgcaagtttgtacagaatcctggcataagctgctgtgagagcctagaactggaaaatacagtgtgccagttcactacaggcaaacaattccccaggtgccaataccatagtgttacctcattagagaagatattgacagtgctgacaggtcattctctgatgagctggttagtttgtggctctaagttgtaaatcccacagagctttaggactagggtcttactaaagaaggacctcttcttgttcattcttgtttaaacctttccttaatatctactctttagcactatagtgaactcctgattatttattctaactggaggagtgaaaaatccaaaattgtggataattcaattaaaagttatgactgatactggcgtgcagattcttctctctctatctctctctctgtgtggggggagggtggggagggtgtaaaacaaactgaatttcatcctagctcagctataaagccaagaaacagaatccacctaactaggcagaatta

SEQ ID NO: 240714 - DNA, 527 bp, Artificial Sequence
  derived and/or modified sequence
gtcactaattctgagctatggcatttcaatcctaattttgggtgtcaccaggtaaacagagccctcagcatctgaatagaaactgaacaggaacagaagagattacactacatctgagatggagacctttcctctgctgctgctcagcctgggcctggttcttgcagaagcatcagaaagcacaatgaagataattaaagaagaatttacagacgaagagatgcaatatgacatggcaaaaagtggccaagaaaaacagaccattgagatattaatgaacccgatcctgttagttaaaaataccagcctcagcatgtccaaggatgatatgtcttccacattactgacattcagaagtttacattataatgaccccaagggaaacagttcgggtaatgacaaagagtgttgcaatgacatgacagtctggagaaaagtttcagaagcaaacggatcgtgcaagtggagcaataacttcatccgcagctccacagaagtgatgcgcagggtccacagggcccccagct

SEQ ID NO: 240715 - DNA, 886 bp, Artificial Sequence
  derived and/or modified sequence
cagtgacctagagcaggcatggaattttgggtgtcaccaggtaaacagagccctcagcatctgaatagaaactgaacaggaacagaagagattacactacatctgagatggagacctttcctctgctgctgctcagcctgggcctggttcttgcagaagcatcagaaagcacaatgaagataattaaagaagaatttacagacgaagagatgcaatatgacatggcaaaaagtggccaagaaaaacagaccattgagatattaatgaacccgatcctgttagttaaaaataccagcctcagcatgtccaaggatgatatgtcttccacattactgacattcagaagtttacattataatgaccccaagggaaacagttcgggtaatgacaaagagtgttgcaatgacatgacagtctggagaaaagtttcagaagcaaacggatcgtgcaagtggagcaataacttcatccgcagctccacagaagtgatgcgcagggtccacagggcccccagctgcaagtttgtacagaatcctggcataagctgctgtgagagcctagaactggaaaatacagtgtgccagttcactacaggcaaacaattccccaggtgccaataccatagtgttacctcattagagaagatattgacagtgctgacaggtcattctctgatgagctggttagtttgtggctctaagttgtaaatcccacagagctttaggactagggtcttactaaagaaggacctcttcttgttcattcttgtttaaacctttccttaatatctactctttagcactatagtgaactcctgattatttattctaactggaggagtgaaaaatccaaaattgtggataattcaattaaaagttatgactga

SEQ ID NO: 240716 - DNA, 703 bp, Artificial Sequence
  derived and/or modified sequence
cacaggctttggagagcactctctgtcctgatcttttcagttgagagacttcagctgttcattgctcatttggacttagttcaaggtcatgtcaaagaagaagaattttgggtgtcaccaggtaaacagagccctcagcatctgaatagaaactgaacaggaacagaagagattacactacatctgagatggagacctttcctctgctgctgctcagcctgggcctggttcttgcagaagcatcagaaagcacaatgaagataattaaagaagaatttacagacgaagagatgcaatatgacatggcaaaaagtggccaagaaaaacagaccattgagatattaatgaacccgatcctgttagttaaaaataccagcctcagcatgtccaaggatgatatgtcttccacattactgacattcagaagtttacattataatgaccccaagggaaacagttcgggtaatgacaaagagtgttgcaatgacatgacagtctggagaaaagtttcagaagcaaacggatcgtgcaagtggagcaataacttcatccgcagctccacagaagtgatgcgcagggtccacagggcccccagctgcaagtttgtacagaatcctggcataagctgctgtgagagcctagaactggaaaatacagtgtgccagttcactacaggcaaacaattccccaggtgccaatacca

SEQ ID NO: 240717 - DNA, 681 bp, Artificial Sequence
  derived and/or modified sequence
ggcatttcaatcctgtatgtgagagctagagactcatacagtgacctagagcaggcatggaattttgggtgtcaccaggtaaacagagccctcagcatctgaatagaaactgaacaggaacagaagagattacactacatctgagatggagacctttcctctgctgctgctcagcctgggcctggttcttgcagaagcatcagaaagcacaatgaagataattaaagaagaatttacagacgaagagatgcaatatgacatggcaaaaagtggccaagaaaaacagaccattgagatattaatgaacccgatcctgttagttaaaaataccagcctcagcatgtccaaggatgatatgtcttccacattactgacattcagaagtttacattataatgaccccaagggaaacagttcgggtaatgacaaagagtgttgcaatgacatgacagtctggagaaaagtttcagaagcaaacggatcgtgcaagtggagcaataacttcatccgcagctccacagaagtgatgcgcagggtccacagggcccccagctgcaagtttgtacagaatcctggcataagctgctgtgagagcctagaactggaaaatacagtgtgccagttcactacaggcaaacaattccccaggtgccaataccatagtgttacctcattagagaa

SEQ ID NO: 240718 - DNA, 600 bp, Artificial Sequence
  derived and/or modified sequence
atggagaccttccccctgctgctgctgagcctgggcctggtgctggccgaggccagcgagagcaccatgaagatcatcaaggaggagttcaccgacgaggagatgcagtacgacatggccaagagcggccaggagaagcagaccatcgagatcctgatgaaccccatcctgctggtgaagaacaccagcctgagcatgagcaaggacgacatgagcagcaccctgctgaccttcagaagcctgcactacaacgaccccaagggcaacagcagcggcaacgacaaggagtgctgcaacgacatgaccgtgtggagaaaggtgagcgaggccaacggcagctgcaagtggagcaacaacttcatcagaagcagcaccgaggtgatgagaagagtgcacagagcccccagctgcaagttcgtgcagaaccccggcatcagctgctgcgagagcctggagctggagaacaccgtgtgccagttcaccaccggcaagcagttccccagatgccagtaccacagcgtgaccagcctggagaagatcctgaccgtgctgaccggccacagcctgatgagctggctggtgtgcggcagcaagctgtag

SEQ ID NO: 240719 - DNA, 537 bp, Artificial Sequence
  derived and/or modified sequence
atggagaccttccccctgctgctgctgagcctgggcctggtgctggccgaggccagcgagagcaccatgaagatcatcaaggaggagttcaccgacgaggagatgcagtacgacatggccaagagcggccaggagaagcagaccatcgagatcctgatgaaccccatcctgctggtgaagaacaccagcctgagcatgagcaaggacgacatgagcagcaccctgctgaccttcagaagcctgcactacaacgaccccaagggcaacagcagcggcaacgacaaggagtgctgcaacgacatgaccgtgtggagaaaggtgagcgaggccaacggcagctgcaagtggagcaacaacttcatcagaagcagcaccgaggtgatgagaagagtgcacagagcccccagctgcaagttcgtgcagaaccccggcatcagctgctgcgagagcctggagctggagaacaccgtgtgccagttcaccaccggcaagcagttccccagatgccagtaccacagcgtgaccagcctggagtag

SEQ ID NO: 240720 - DNA, 411 bp, Artificial Sequence
  derived and/or modified sequence
atggagaccttccccctgctgctgctgagcctgggcctggtgctggccgaggccagcgagagcaccatgaagatcatcaaggaggagttcaccgacgaggagatgcagtacgacatggccaagagcggccaggagaagcagaccatcgagatcctgatgaaccccatcctgctggtgaagaacaccagcctgagcatgagcaaggacgacatgagcagcaccctgctgaccttcagaagcctgcactacaacgaccccaagggcaacagcagcggcaacgacaaggagtgctgcaacgacatgaccgtgtggagaaaggtgagcgaggccaacggcagctgcaagtggagcaacaacttcatcagaagcagcaccgaggtgatgagaagagtgcacagagcccccagctag

SEQ ID NO: 240721 - DNA, 516 bp, Artificial Sequence
  derived and/or modified sequence
atggagaccttccccctgctgctgctgagcctgggcctggtgctggccgaggccagcgagagcaccatgaagatcatcaaggaggagttcaccgacgaggagatgcagtacgacatggccaagagcggccaggagaagcagaccatcgagatcctgatgaaccccatcctgctggtgaagaacaccagcctgagcatgagcaaggacgacatgagcagcaccctgctgaccttcagaagcctgcactacaacgaccccaagggcaacagcagcggcaacgacaaggagtgctgcaacgacatgaccgtgtggagaaaggtgagcgaggccaacggcagctgcaagtggagcaacaacttcatcagaagcagcaccgaggtgatgagaagagtgcacagagcccccagctgcaagttcgtgcagaaccccggcatcagctgctgcgagagcctggagctggagaacaccgtgtgccagttcaccaccggcaagcagttccccagatgccagtactag

SEQ ID NO: 240722 - DNA, 2046 bp, Artificial Sequence
  derived and/or modified sequence
aaaaaggagcatgtcttcatccatgagaggcctcgaaaaatcaatggtatttgcatttctcccaagaaggttgcttgccaaaacctttcggccattttctgctttcagagtgagacaaagttcaaaatgacagtctgtcagctcattgaaggcacaagataccctgcctgcaggtaccactattcccccacagaggggtttgttcttgtcacttgtgatgacttgaggccagatagtttccttggctatgttaaataactcaagatcagctcccgagtctgagatctcttctctcaatggcattggagctggctgtgcctgaggcagacctggaccgtggacatggggcaatgccttgagcggaaggggaagccactgaattttgggtgtcaccaggtaaacagagccctcagcatctgaatagaaactgaacaggaacagaagagattacactacatctgagatggagacctttcctctgctgctgctcagcctgggcctggttcttgcagaagcatcagaaagcacaatgaagataattaaagaagaatttacagacgaagagatgcaatatgacatggcaaaaagtggccaagaaaaacagaccattgagatattaatgaacccgatcctgttagttaaaaataccagcctcagcatgtccaaggatgatatgtcttccacattactgacattcagaagtttacattataatgaccccaagggaaacagttcgggtaatgacaaagagtgttgcaatgacatgacagtctggagaaaagtttcagaagcaaacggatcgtgcaagtggagcaataacttcatccgcagctccacagaagtgatgcgcagggtccacagggcccccagctgcaagtttgtacagaatcctggcataagctgctgtgagagcctagaactggaaaatacagtgtgccagttcactacaggcaaacaattccccaggtgccaataccatagtgttacctcattagagaagatattgacagtgctgacaggtcattctctgatgagctggttagtttgtggctctaagttgtaaatcccacagagctttaggactagggtcttactaaagaaggacctcttcttgttcattcttgtttaaacctttccttaatatctactctttagcactatagtgaactcctgattatttattctaactggaggagtgaaaaatccaaaattgtggataattcaattaaaagttatgactgatactggcgtgcagattcttctctctctatctctctctctgtgtggggggagggtggggagggtgtaaaacaaactgaatttcatcctagctcagctataaagccaagaaacagaatccacctaactaggcagaattaaggaaacaaggactaaagccaatatggacaatgaaaagctaattgtactgccaatgatactattcagaaaaatagtgaatgagtgtgacatatattattatcactactctcttcaaagggtatgtgctcacacttgtgtgaattgatgtatgcacataacaaagagtctgcctgtccttcaggaaatgccagaggaaaaagattctttggctgagctgatgctctcagtgtcaatagctccagccctatgcaatctccattcttccacccccatctctatttcacaggttgctgtaaagagaagaaaattcttattgtaatctttattcaagccaagtcttgataccctggggctgtgggagaggaatggcaagccatggaagaatagaggagccagaaagatgggaatagaaagtctgtgctaagtaccaggcaggactggtcttcaaccttgatgtcttatgatactgtagttaattttgttcactaccagctatttatttgcaaacgttcgtggttcaacattctgcttaaagtatggacagttatcttcttcatcgatgtgtggccatatgtttctattcctctccttaaatcctccctccatcctgagaccactctttcttaatgttctaattttaactaaatgcatgtaaatgtatgtaaa

SEQ ID NO: 240723 - DNA, 600 bp, Artificial Sequence
  derived and/or modified sequence
atggagacttttcccctactgcttctgtccctcgggcttgttttagctgaagcgagcgaatcgactatgaaaatcattaaagaagagttcaccgacgaggagatgcagtacgacatggccaagagcggacaggagaagcagactatagagattctgatgaatccaattctgttggtcaagaatacatctctgagtatgagcaaggatgatatgtccagcacccttttaacctttcgctcactgcactacaacgaccccaaaggcaacagctccggcaatgataaagagtgctgtaacgacatgacagtgtggagaaaggtaagtgaggccaacggcagttgtaaatggagcaacaacttcatacggtcatcaaccgaggtgatgcgccgtgtccacagggccccgagctgtaaatttgtgcaaaatcctggtataagctgttgtgaaagcctggaactggaaaatactgtatgtcagttcaccaccggaaaacagtttccacgatgtcagtatcacagcgtcacttctctggagaagatactgacagtcctcacaggccattcgttgatgtcctggctggtgtgcgggtcgaaactttag

SEQ ID NO: 240724 - DNA, 600 bp, Artificial Sequence
  derived and/or modified sequence
atggaaactttcccactgcttctgctgagtctgggactggtgctggcagaagcctccgaatcgactatgaagataatcaaggaggaattcaccgatgaggagatgcagtacgacatggcgaagagcggtcaggaaaaacagacgatcgaaattctgatgaacccgatattactcgtcaagaatacgagcctttccatgtctaaagatgacatgtcctctaccctgcttacatttcgctccctgcattacaacgaccccaaagggaacagctcaggtaacgataaagaatgttgcaacgacatgaccgtctggagaaaggtgtccgaagctaacggaagctgcaagtggagtaacaactttattcgtagcagcacagaagtgatgagaagagtgcacagagcgcctagctgcaagttcgtgcagaaccctggtatcagctgttgtgaaagcctggagctggaaaacaccgtttgccagtttacaaccgggaagcagttcccgcgctgtcagtaccattcagtgacttcactggagaagatcctgacagttctgacgggacactctttaatgagctggttggtgtgcggtagtaagttgtag

SEQ ID NO: 240725 - DNA, 600 bp, Artificial Sequence
  derived and/or modified sequence
atggaaactttccccctccttcttctgtcgttagggctggtgctggctgaggcctcagagtcaactatgaaaatcatcaaggaggagtttacagacgaagagatgcagtatgacatggctaagagtggccaggaaaagcaaactattgaaattctgatgaacccgattttgctagtcaagaatactagcctgtcaatgagtaaagatgacatgtccagcacccttctcaccttccgctcattgcactataacgaccccaaaggcaactcatctggcaatgacaaggagtgctgcaacgatatgacagtgtggagaaaagtctcagaggctaatggttcgtgcaaatggtcaaacaactttatacggagttccaccgaggtgatgaggcgcgtgcaccgtgcccccagttgcaagttcgttcaaaatccaggaatatcctgctgtgaatccctggagcttgagaatacggtttgtcagtttaccaccggtaaacaattcccccgctgccaataccactctgtgacaagtctggagaagatcctgacagtattaacgggtcactctcttatgtcatggctcgtgtgtggttccaagctctag

SEQ ID NO: 240726 - DNA, 600 bp, Artificial Sequence
  derived and/or modified sequence
atggagacttttcctttgttgcttctgagcctgggacttgtcctcgctgaagcctctgagtcaactatgaaaatcatcaaggaagaattcacagatgaggaaatgcaatatgatatggccaaaagcggccaagaaaaacagaccatcgaaatcctcatgaaccccattctgctcgtgaagaatacgtccctgtccatgtcaaaggatgacatgagctctaccttactcacatttagatcgctgcactataatgatccgaagggaaattccagcggcaacgacaaggagtgttgtaacgatatgactgtatggcgaaaggtgagtgaggcaaacggttcttgtaaatggagcaataatttcattcggagctcaacagaggtgatgagaagggtgcaccgggcaccttcatgcaaattcgtccagaacccaggtatctcctgttgtgagagcctcgagctcgagaacacagtgtgtcagttcactactgggaaacagtttccacggtgtcagtaccactctgtgactagcctggagaaaatattgaccgtgctgaccggccattcactgatgagttggctcgtgtgtggctcaaaactgtag

SEQ ID NO: 240727 - DNA, 537 bp, Artificial Sequence
  derived and/or modified sequence
atggaaacatttccgctacttctcttatccctgggcctagtgctggctgaagcttcagaatccactatgaagatcattaaggaggagtttaccgacgaggagatgcagtacgatatggccaagtcaggacaggagaaacaaacgatcgagatactaatgaatccgattctcctagtgaaaaacacatccctatcaatgtctaaggatgatatgtctagcaccctgttaactttcaggtcccttcattataacgaccctaaagggaactcttctgggaatgacaaggagtgctgcaatgacatgaccgtgtggcggaaagtgagtgaagcaaacggatcttgtaaatggtcgaataatttcatccgctcttccacagaagtgatgcgccgggtgcatagggctccaagctgtaaattcgtgcagaaccccggcatctcctgttgtgagtcactggaattggaaaacaccgtctgtcagtttacgacgggcaagcaattccctcgctgccagtaccattccgtgaccagcctggaatag

SEQ ID NO: 240728 - DNA, 600 bp, Artificial Sequence
  derived and/or modified sequence
atggagacgtttccactcctgctcctgtccctgggtctggtgttagcagaagcttctgaatccaccatgaagattattaaggaggagttcactgacgaggaaatgcagtacgacatggctaaaagcggccaggaaaagcagaccattgagatcctgatgaatcccatcttgctcgtgaagaacacgtcactgtcaatgagtaaggatgatatgtcgagtactttattaacctttcgctcactgcattacaatgatccaaaaggcaacagttccggcaacgacaaggagtgttgcaatgatatgaccgtatggcgaaaagtcagcgaggcgaacggttcctgcaaatggtccaataactttattcgcagttctaccgaagtcatgagacgggtgcaccgagcacctagttgtaagtttgttcaaaatccaggtatttcgtgttgtgaatccctggaattagaaaatactgtgtgccagttcaccaccgggaagcagttcccgagatgtcaatatcacagtgtgacgtccctggaaaaaatacttacagtcctgacgggacattctctgatgtcgtggctcgtgtgcgggtccaagctctag

SEQ ID NO: 240729 - DNA, 411 bp, Artificial Sequence
  derived and/or modified sequence
atggaaacttttcccctgctgctgctgagcttgggcctggtgctggcagaagcctccgaaagcactatgaagataataaaagaggaattcactgacgaggaaatgcaatacgacatggctaagtccggtcaggaaaaacagactatagaaattctcatgaatccaattttattggtgaagaacacctcactcagcatgtccaaggacgatatgtcgagtacactgctgactttccgcagcctgcactacaatgatcccaaaggtaattcaagtgggaacgacaaggagtgctgtaacgatatgacagtctggcggaaagtatccgaggctaatggatcatgtaaatggtccaataacttcattcgaagttcaacggaagtgatgaggagggtgcaccgtgctcctagttag

SEQ ID NO: 240730 - DNA, 600 bp, Artificial Sequence
  derived and/or modified sequence
atggagacattcccactgctcctgctgtctttgggtctggtactggccgaggcaagcgagtccactatgaaaataatcaaagaggagttcaccgatgaggaaatgcagtatgacatggccaaaagtggccaggaaaagcagaccatcgaaattcttatgaacccaatactgctggtcaaaaatacaagcctcagtatgtccaaggatgatatgagttcaactctgctgaccttcaggtctctgcattataacgaccccaaggggaacagctcagggaacgataaagaatgctgtaatgatatgacagtatggagaaaggttagtgaggccaacggttcgtgcaaatggtccaataacttcatccggtcctccacggaggtgatgagacgggtgcatcgcgccccttcctgcaagttcgtgcagaaccctggcatttcatgctgcgagtcactggaactggagaacacagtatgccagttcacaactggcaaacagttccccaggtgtcagtaccattctgtcacatctcttgaaaaaattctaacagttctgacaggccattccctcatgtcctggctggtgtgcgggagcaaactatag

SEQ ID NO: 240731 - DNA, 516 bp, Artificial Sequence
  derived and/or modified sequence
atggagacatttcccctactcttactaagcttaggtttggtcctcgccgaggctagcgagtcaacaatgaaaatcattaaggaagaatttacagacgaggaaatgcagtacgacatggctaagtcagggcaagagaagcagacaatagaaatccttatgaatccgatcctgctggtgaaaaatacttcactgagcatgagcaaggatgatatgagttccacgttacttacatttcggtccctccactacaacgacccaaaggggaacagctcagggaatgacaaagaatgctgtaacgatatgacagtatggcgaaaggtctccgaagctaacgggagttgcaaatggtccaacaatttcatacgcagcagcactgaggtgatgagacgcgtccaccgtgctccctcctgcaagttcgtacagaaccctggaatcagctgctgtgagtccctggaactagaaaataccgtgtgccaattcactactggtaagcagtttccacggtgtcagtactag

SEQ ID NO: 240732 - DNA, 537 bp, Artificial Sequence
  derived and/or modified sequence
atggagactttccctctcttactcctgagcttagggttggttctcgccgaagctagtgaaagcacaatgaagattattaaggaagaattcacggatgaagaaatgcagtatgacatggctaagtcagggcaggagaagcagactattgagattctcatgaaccctatcctgcttgttaagaacacgtctctgagcatgtctaaggacgatatgagttccaccttgctgacatttcgctcgctgcactacaatgatccaaaagggaatagcagcggcaacgataaggagtgctgcaacgatatgacagtttggcgcaaagtgtcagaggccaacggcagttgcaagtggagcaacaacttcatccgatctagtacagaggtgatgaggagagtgcaccgtgccccgtcgtgcaagttcgtgcaaaacccgggaatttcctgttgtgagagtctggagttggagaacaccgtgtgccagtttactacggggaagcagtttccaagatgccaataccattctgtcacttctctggaatag

SEQ ID NO: 240733 - DNA, 600 bp, Artificial Sequence
  derived and/or modified sequence
atggagaccttccccctgctgctgctgagcctgggcctggtgctggccgaggccagcgagagcaccatgaagatcatcaaggaggagttcacagatgaggagatgcagtatgacatggccaagagcggccaggagaagcagaccatcgagatcctgatgaaccccatcctgctggtgaagaacaccagcctgtccatgagcaaggatgacatgagcagcaccctgctgaccttccgcagcctgcactacaatgaccccaagggcaacagcagtggaaatgacaaggagtgctgcaatgacatgacagtgtggaggaaggtgtctgaggccaacggcagctgcaagtggagcaacaacttcatccgcagcagcacagaggtgatgagaagagtgcaccgggcccccagctgcaagtttgtgcagaaccctggcatcagctgctgtgagagcctggagctggagaacacagtgtgccagttcaccaccgggaagcagttcccccgctgccagtaccacagcgtgaccagcctggagaagatcctgactgtgctgaccggccacagcctgatgtcctggctggtgtgtggcagcaagctgtag

SEQ ID NO: 240734 - DNA, 537 bp, Artificial Sequence
  derived and/or modified sequence
atggagaccttccccctgctgctgctgagcctgggcctggtgctggccgaggccagcgagagcaccatgaagatcatcaaggaggagttcacagatgaggagatgcagtatgacatggccaagagcggccaggagaagcagaccatcgagatcctgatgaaccccatcctgctggtgaagaacaccagcctgtccatgagcaaggatgacatgagcagcaccctgctgaccttccgcagcctgcactacaatgaccccaagggcaacagcagtggaaatgacaaggagtgctgcaatgacatgacagtgtggaggaaggtgtctgaggccaacggcagctgcaagtggagcaacaacttcatccgcagcagcacagaggtgatgagaagagtgcaccgggcccccagctgcaagtttgtgcagaaccctggcatcagctgctgtgagagcctggagctggagaacacagtgtgccagttcaccaccgggaagcagttcccccgctgccagtaccacagcgtgaccagcctggagtag

SEQ ID NO: 240735 - DNA, 411 bp, Artificial Sequence
  derived and/or modified sequence
atggagaccttccccctgctgctgctgagcctgggcctggtgctggccgaggccagcgagagcaccatgaagatcatcaaggaggagttcacagatgaggagatgcagtatgacatggccaagagcggccaggagaagcagaccatcgagatcctgatgaaccccatcctgctggtgaagaacaccagcctgtccatgagcaaggatgacatgagcagcaccctgctgaccttccgcagcctgcactacaatgaccccaagggcaacagcagtggaaatgacaaggagtgctgcaatgacatgacagtgtggaggaaggtgtctgaggccaacggcagctgcaagtggagcaacaacttcatccgcagcagcacagaggtgatgagaagagtgcaccgggcccccagctag

SEQ ID NO: 240736 - DNA, 516 bp, Artificial Sequence
  derived and/or modified sequence
atggagaccttccccctgctgctgctgagcctgggcctggtgctggccgaggccagcgagagcaccatgaagatcatcaaggaggagttcacagatgaggagatgcagtatgacatggccaagagcggccaggagaagcagaccatcgagatcctgatgaaccccatcctgctggtgaagaacaccagcctgtccatgagcaaggatgacatgagcagcaccctgctgaccttccgcagcctgcactacaatgaccccaagggcaacagcagtggaaatgacaaggagtgctgcaatgacatgacagtgtggaggaaggtgtctgaggccaacggcagctgcaagtggagcaacaacttcatccgcagcagcacagaggtgatgagaagagtgcaccgggcccccagctgcaagtttgtgcagaaccctggcatcagctgctgtgagagcctggagctggagaacacagtgtgccagttcaccaccgggaagcagttcccccgctgccagtactag

SEQ ID NO: 240737 - DNA, 600 bp, Artificial Sequence
  derived and/or modified sequence
atggagaccttccccctgctgctgctgagcctgggcctggtgctggctgaagcttctgagagcaccatgaagattattaaggaagaatttacagatgaagagatgcagtatgacatggcgaagtcaggacaggagaagcagacgatcgagattctgatgaaccctatcctcttggtgaaaaacacttccctttccatgtccaaagacgatatgtcatccacgctcctcacgttcagaagtctccattacaacgaccccaaggggaattcatctggcaatgacaaggagtgttgcaacgatatgacggtttggaggaaagtgtcggaggcaaatggctcctgcaaatggtcaaacaacttcatcaggtcaagcaccgaggttatgcggcgcgtccatagagctccctcttgtaaattcgtgcaaaaccccggtattagttgctgtgagagtctggagctcgagaacactgtgtgccagtttacaactggaaaacagtttcccagatgccagtaccacagtgttacctcccttgaaaagattctgacagtcctgacaggccactctcttatgtcctggcttgtgtgcgggagcaaactttag

SEQ ID NO: 240738 - DNA, 600 bp, Artificial Sequence
  derived and/or modified sequence
atggagaccttccccctgctgctgctgagcctgggcctggtgctggcagaggcttcggaatcaactatgaaaatcattaaagaagagttcaccgatgaggagatgcagtatgacatggctaagtcaggccaggaaaaacagaccattgagatactcatgaacccaatcttgctggtaaagaatacgtcactctctatgagtaaggacgatatgagttctaccctgctgacctttaggagtctccattacaacgaccctaagggtaatagcagcggaaatgataaggaatgttgcaatgacatgacagtttggagaaaggtgagcgaagccaatggtagttgcaagtggtccaacaatttcattcggagctcaaccgaggttatgaggcgagtccatcgcgcacccagttgcaagtttgtacagaaccccggcatatcctgttgtgaaagcctagagctggaaaacactgtatgtcagttcaccacagggaagcagtttcctaggtgtcagtatcattccgtgacctccctcgagaagatattaactgtactgaccggccacagtttgatgagctggctcgtgtgcgggtcgaagctgtag

SEQ ID NO: 240739 - DNA, 600 bp, Artificial Sequence
  derived and/or modified sequence
atggagaccttccccctgctgctgctgagcctgggcctggtgctggcggaggcgtcagagagtaccatgaagattattaaggaggaatttaccgatgaggagatgcaatatgacatggcgaaatccggacaggagaaacagacaatcgagatcctgatgaacccgatcttgctggtgaaaaatacatctctgagtatgtccaaggacgacatgagttctaccctgctgactttccgttcactccattataatgatccaaagggtaacagcagcggaaatgacaaagaatgttgtaatgatatgaccgtatggagaaaagtaagtgaggctaatggaagctgtaagtggtctaataattttatacgaagttccactgaggtgatgcgccgggttcacagagccccctcctgtaagttcgtgcagaaccctggtatctcttgctgcgaatcactggagctcgaaaacacagtatgccagttcacaactggaaaacaatttccaaggtgtcagtaccatagcgtcaccagtctggagaaaatcctgaccgtgctgaccgggcattccttgatgtcctggctggtttgcggtagtaagctttag

SEQ ID NO: 240740 - DNA, 600 bp, Artificial Sequence
  derived and/or modified sequence
atggagaccttccccctgctgctgctgagcctgggcctggtgctggccgaggcatccgagagtaccatgaagattatcaaagaagagtttaccgacgaggaaatgcaatacgatatggcaaagagtggacaagagaaacaaaccatcgagattctgatgaaccctatactgctggtcaagaacacatccttatctatgagcaaggatgacatgagctccacactgctgacgtttcggtcattacactacaacgaccccaagggaaattcgagtggtaatgataaggaatgctgtaacgatatgacggtgtggagaaaggtatctgaagccaatggctcctgtaagtggtcaaacaattttattaggagttcaacagaagtcatgcgcagggtgcaccgcgcaccaagttgcaagttcgtccaaaatcccggtataagctgttgcgagtccttggaactcgaaaacaccgtgtgtcagtttacaaccggcaagcagttccctcggtgccaatatcactccgtgacatccctggaaaagatccttacggtgctgacaggccatagcctcatgtcatggctggtgtgcggatctaagttgtag

SEQ ID NO: 240741 - DNA, 537 bp, Artificial Sequence
  derived and/or modified sequence
atggagaccttccccctgctgctgctgagcctgggcctggtgctggctgaagccagtgaatccaccatgaagattatcaaggaggaatttactgacgaagagatgcagtatgatatggcgaaatccggccaggagaaacagaccattgagattctgatgaacccaattctcctggtcaagaatacttctctcagtatgtctaaagatgacatgtctagtacgttactgactttcagaagcttgcattacaacgacccgaaagggaacagcagcggaaacgacaaagagtgctgtaacgatatgaccgtttggcgaaaagtcagcgaagctaacggctcctgcaaatggtcaaacaactttatccgcagtagtactgaggtgatgcgtagggttcatcgcgccccatcatgtaaattcgtgcaaaaccccggaatctcatgctgcgagtctttggagctggagaatacagtgtgccagtttacaaccggcaagcaattcccgcgttgccaataccactccgtcaccagcctggaatag

SEQ ID NO: 240742 - DNA, 432 bp, Artificial Sequence
  derived and/or modified sequence
atggagaccttccccctgctgctgctgagcctgggcctggtgctggccgaggccagcgagagcaccatgaagatcatcaaggaggagttcaccgacgaggagatgcagtacgacatggccaagagcggccaggagaagcagaccatcgagatcctgatgaaccccatcctgctggtgaagaacaccagcctgagcatgagcaaggacgacatgagcagcaccctgctgaccttcagaagcctgcactacaacgaccccaagggcaacagcagcggcaacgacaaggagtgctgcaacgacatgaccgtgtggagaaaggtgagcgaggccaacggcagctgcaagtggagcaacaacttcatcagaagcagcaccgaggtgatgagaagagtgcacagagcccccagctgcaagttcgtgcagaacccctag

SEQ ID NO: 240743 - DNA, 432 bp, Artificial Sequence
  derived and/or modified sequence
atggaaaccttccccctgctgcttctatcactcggcctcgtacttgctgaggccagcgagtctaccatgaagataatcaaggaagaatttaccgatgaagagatgcaatatgatatggccaagtccgggcaggaaaaacagaccatagagattctgatgaacccgatcctactggttaagaatacatccctgtccatgtcaaaggacgatatgtccagtacgctcctgacattcaggtctctgcactataatgatccaaagggaaactcctcgggaaacgataaagagtgctgcaatgacatgaccgtgtggaggaaggtaagtgaagccaacgggagctgtaagtggtcaaacaatttcattcgatctagcacagaagtgatgcggcgcgtccaccgcgccccttcttgcaaatttgtgcagaacccttag

SEQ ID NO: 240744 - DNA, 432 bp, Artificial Sequence
  derived and/or modified sequence
atggagaccttccccctgctgctgctgagcctgggcctggtgctggccgaggccagcgagagcaccatgaagatcatcaaggaggagttcacagatgaggagatgcagtatgacatggccaagagcggccaggagaagcagaccatcgagatcctgatgaaccccatcctgctggtgaagaacaccagcctgtccatgagcaaggatgacatgagcagcaccctgctgaccttccgcagcctgcactacaatgaccccaagggcaacagcagtggaaatgacaaggagtgctgcaatgacatgacagtgtggaggaaggtgtctgaggccaacggcagctgcaagtggagcaacaacttcatccgcagcagcacagaggtgatgagaagagtgcaccgggcccccagctgcaagtttgtgcagaacccctag

SEQ ID NO: 240745 - DNA, 432 bp, Artificial Sequence
  derived and/or modified sequence
atggagaccttccccctgctgctgctgagcctgggcctggtgctggctgaagcttcagagtccacgatgaagattatcaaggaggagtttaccgatgaggaaatgcagtacgacatggccaagtcgggacaagagaaacagacaatcgaaatcttgatgaaccccatactcttggtgaagaacaccagtctcagcatgagtaaggacgacatgagttccacgcttctcacatttcgcagcctccactataacgatcccaaaggtaattcatccgggaacgataaggaatgctgtaatgacatgacagtgtggaggaaggtcagtgaagctaacgggtcttgtaagtggagcaacaactttatcaggtcctcgactgaagttatgaggagggtgcatagggctcctagctgtaaattcgtgcagaacccctag

SEQ ID NO: 240746 - DNA, 432 bp, Artificial Sequence
  derived and/or modified sequence
atggaaaccttccccctgcttctcctgtctttgggcctagtgctcgccgaagcttcggaatctaccatgaagatcatcaaagaggagttcacagatgaagaaatgcaatatgacatggccaagtcaggccaggagaagcagactattgagattcttatgaatcccatactgctcgtcaagaatactagcctgtccatgagcaaggatgacatgtcctctacactgttgaccttccggtccctccactacaacgaccccaagggaaattcttcgggcaacgataaagagtgctgcaatgacatgacagtgtggagaaaggtttccgaagccaatgggtcctgtaaatggagtaacaatttcatccggagttcaactgaggtcatgagacgggtgcacagggccccaagctgcaaattcgtgcaaaacccatag

SEQ ID NO: 240747 - DNA, 432 bp, Artificial Sequence
  derived and/or modified sequence
atggagacatttccactcttacttctttctctaggtcttgtcctcgcagaggcatcagagtctaccatgaaaattattaaggaggaattcaccgatgaggagatgcagtacgacatggccaaatcaggacaagaaaaacagacaattgagattcttatgaaccctatcttactcgtgaaaaacacatccctgagtatgtccaaagatgacatgtcatctaccttgctcacattccggagcctgcattataatgatccaaaaggaaattcgtccggcaatgataaggagtgttgtaatgacatgacagtgtggcgaaaagtgtccgaagccaatggttcctgtaagtggagcaacaacttcatccgctcgtcgaccgaggtgatgagacgggttcatcgagccccatcttgcaaattcgtgcaaaacccctag

SEQ ID NO: 240748 - DNA, 432 bp, Artificial Sequence
  derived and/or modified sequence
atggaaactttccccctcttgctgctaagcttgggtctcgtgctcgccgaagcctccgaaagtactatgaaaattattaaggaagagttcactgacgaagaaatgcagtacgatatggctaaaagtggccaggaaaagcagaccatcgagattttaatgaatccaatacttctagtgaaaaacacgagtctttcaatgagtaaggatgacatgagcagcactcttttaacattcaggagcctgcattacaatgatccaaaaggcaactcttctggaaatgataaggaatgttgcaacgatatgactgtgtggcgaaaagtttctgaagctaacggatcctgtaagtggagtaataattttattcgctctagcactgaagttatgagaagagtccaccgtgcaccctcttgcaagtttgtgcaaaacccctag

SEQ ID NO: 240749 - DNA, 791 bp, Artificial Sequence
  derived and/or modified sequence
agccccgtgccaggcaaggcgggtcaccgggcagcgtcggggccctcttctgcctcggggtctcttcacggagggcgccctgcggcgacagctttcgccggccgcgcgcacggcggtcggtacctgttaaggacgagatgccttccgaccaccggataactcgggacggtccctgatttgcctgctccctgtccaacagcatcttcggctcactcggaagtgaaaacatgcaatttcatgttataacatgcaatttcatgtcataaattattcccactgacgcctgaacatttttcctaaaagggatctgcagtcacaaggcgccgccttccggaatttagaagagattacactacatctgagatggagacctttcctctgctgctgctcagcctgggcctggttcttgcagaagcatcagaaagcacaatgaagataattaaagaagaatttacagacgaagagatgcaatatgacatggcaaaaagtggccaagaaaaacagaccattgagatattaatgaacccgatcctgttagttaaaaataccagcctcagcatgtccaaggatgatatgtcttccacattactgacattcagaagtttacattataatgaccccaagggaaacagttcgggtaatgacaaagagtgttgcaatgacatgacagtctggagaaaagtttcagaagcaaacggatcgtgcaagtggagcaataacttcatccgcagctccacagaagtgatgcgcagggtccacagggcccccagctgcaagtttgtacagaatcc

SEQ ID NO: 240750 - RNA, 600 nt, Artificial Sequence
  derived and/or modified sequence
auggaaacuuucccucuccuccuacucucccugggccugguauuagcagaagccucugaaagcacgaugaaaaucauuaaggaagaauuuacugacgaagagaugcaauaugacauggcaaaaagcggucaagagaaacagacuaucgagauacugaugaacccuaucuuacuuguuaagaauacaagcuuaagcauguccaaggaugauaugucuaguacccuguugacuuuuaggagccugcacuacaaugauccaaaggggaauucuaguggaaaugacaaggaguguuguaaugauaugacuguguggcgaaaggucucagaagcgaauggcucuuguaaaugguccaauaauuuuauccgcaguuccaccgaggugaugcgccgagugcaucgcgcuccuucuugcaaauucgugcaaaauccuggcauuagcugcugcgaaagucuugagcuagaaaauacugucugccaguucacaaccggcaaacaguucccgcgcugccaauaccauuccgugaccucucuggaaaaaauccuuaccguccucacaggacacagccuaaugucuuggcucgugugcggcuccaagcuguag

SEQ ID NO: 240751 - RNA, 600 nt, Artificial Sequence
  derived and/or modified sequence
auggagaccuuuccacuccuguugcugucacuggggcugguguuggccgaggccucagaaaguacaaugaagauaauuaaggaagaauuuacugaugaagagaugcaauaugauauggcaaaaucuggccaagagaagcaaaccaucgagaucuuaaugaaucccauauugcuggugaaaaauacaucccuguccauguccaaagaugacaugucaagcacacuguuaacauucaggaguuuacacuacaaugacccaaaaggaaauagcagcgggaaugauaaggaaugcugcaacgauaugacaguguggagaaaagucucugaggccaacggcagcugcaaauggucaaauaauuuuauucguagcucuaccgaggugaugcgccgagugcaccgcgccccgucuuguaaauuuguucaaaauccuggcauuucuugcugcgagucauuggaguuggagaauacugucugccaguuuaccaccgguaaacaguucccccggugucaauaucacucagucaccucucuggagaagauccucacgguacugacgggucacagucugaugagcuggcucguguguggaucaaaauuguag

SEQ ID NO: 240752 - RNA, 600 nt, Artificial Sequence
  derived and/or modified sequence
auggagacguucccguugcugcuguugucacugggcuuggugcuggcggaagcgucugaauccacuaugaagaucaucaaagaagaguucaccgaugaggagaugcaauaugacauggccaaauccgggcaagagaaacagacuauugaaauccuaaugaacccuauucuacucgucaagaauacaucgcuaucaaugucuaaagaugacauguccuccacccugcuuaccuuccggucgcugcacuauaaugacccaaaagggaauagcuccgggaaugacaaggaguguugcaaugauaugaccgucuggcguaagguaucugaggcgaaugguucauguaaguggaguaauaacuuuauacgaucuaguacugaagugaugaggaggguacaccgugcaccuaguugcaaguuugugcagaaucccgggauuagcuguugugagucucuggaacuugaaaauacagugugucaauuuacuacggggaagcaguuuccucgcugucaguaucacuccguuacaagcuuggagaaaauucucaccguauuaacaggucacucgcugauguccuggcugguuugugguucuaaacuguag

SEQ ID NO: 240753 - RNA, 600 nt, Artificial Sequence
  derived and/or modified sequence
auggaaacuuucccauuacuccuccuuucauuaggccugguucuagccgaggccagcgaguccaccaugaagauaauaaaagaggaauucacagacgaggagaugcaguacgauauggccaagaguggacaggaaaaacaaacaauagaaaucuugaugaaucccauccuucuggugaagaauacaucucuuuccaugaguaaagacgauaugaguagcaccuugcugacuuuccgaucucugcacuacaaugauccuaaagggaauuccucaggaaacgacaaagaaugcuguaaugauaugacgguguggagaaagguaagcgaagccaauggcucaugcaaauggucaaacaacuucauacgauccuccaccgaagugaugagacgugugcaucgggcuccgagcugcaaauucguccagaacccaggcaucuccugcugugaaagucuugaacuugaaaacacagucugccaguuuacuaccggaaaacaauucccgcgcugccaguaccauucggugacaucucucgaaaaaauucuuaccguuuuaaccggccacucccugaugagcuggcuuguguguggcucuaagcuguag

SEQ ID NO: 240754 - RNA, 537 nt, Artificial Sequence
  derived and/or modified sequence
auggaaacauucccguugcuacuuuugucguugggauuaguucuagcugaggcaucagagagcacaaugaaaauuauaaaggaggaauuuacugaugaggagaugcaauacgacauggccaagagcggccaagagaagcaaacgauugagauuuugaugaacccgauucuguuagugaaaaauacaagccucagcaugagcaaggacgauaugagcucaacacuacugaccuuccgcucucugcauuauaaugaucccaaaggcaacucauccgggaaugauaaagaguguugcaacgauaugacgguuuggagaaaagugagcgaagcuaauggaucuuguaaguggucuaacaacuuuauucguucuucgacagaggugaugcgucgcguccauagagcacccucuugcaaauuugugcagaaucccggcauuaguuguugcgagucacuugaguuggaaaacacagugugucaguucacgacgggcaaacaguucccaaggugccaauaccauagcguaacaucccucgaauag

SEQ ID NO: 240755 - RNA, 600 nt, Artificial Sequence
  derived and/or modified sequence
auggagaccuucccacuccuccuccugagccugggacugguucucgcggaggcguccgagagcacuaugaagaucaucaaagaagaguuuaccgacgaagaaaugcaguaugacauggccaagucaggacaagaaaagcaaaccauugagauacugaugaaccccauucucuuggugaagaacacaucccugagcauguccaaagacgacaugucaaguacccugcugacauuccgaagcuuacauuacaacgauccuaaagggaacucaaguggaaaugacaaagaguguuguaacgauaugacuguguggcgaaagguuucugaggcaaacggauccugcaaauggaguaauaauuucauucguuccagcaccgaagugaugcgaagagugcauagggccccgagcuguaaauucguucagaauccaggcauuagcuguugcgagucucuggaacuggagaacacagugugucaguuuacaacaggaaaacaguuccccagaugucaauaccacuccguaacaagccucgagaagauauuaacaguucuuacuggccacagucucaugagcugguuaguuuguggcuccaaacuauag

SEQ ID NO: 240756 - RNA, 411 nt, Artificial Sequence
  derived and/or modified sequence
auggagaccuuuccauugcuucuucuaagccuggggcucguucuagcugaagcaagugaaagcaccaugaagauaauaaaagaggaguuuacagacgaggaaaugcaguacgauauggccaaaagcggacaggaaaaacagacuaucgaaauauuaaugaacccaaucuugcugguaaagaauacaucacugucuaugucuaaagaugauauguccucgacucuucugaccuuccggucucuucauuacaaugacccaaaaggaaacucuagcgguaaugacaaggagugcuguaaugacaugacggucuggcgcaaggugagcgaagcuaaugggucaugcaaauggucuaacaauuuuaucagaaguucuaccgagguuaugcggcgaguccaccgagccccuucauag

SEQ ID NO: 240757 - RNA, 600 nt, Artificial Sequence
  derived and/or modified sequence
auggagaccuucccccuccugcuccuuagucucgggcugguucuggccgaagcgucggaaagcacaaugaaaauaaucaaagaggaauucaccgaugaggagaugcaguacgacauggcaaaaucuggucaggagaagcagaccaucgagauucucaugaauccaauacugcuaguaaaaaauaccucgcuuuccauguccaaagaugauaugaguagcacuuugcuuaccuuccgaagccugcacuauaaugacccuaaagguaacucuagugguaacgauaaagaauguugcaacgauaugaccguguggcgcaagguguccgaagcuaauggcucuuguaaguggucuaacaauuucaucagaagcaguacugaggucaugagaagagugcacagagccccaaguugcaaguucguccaaaacccgggcauaaguuguugcgaaagcuuagaacucgaaaauaccgugugccaguuuacgacaggcaagcaguucccucguugucaguaucacucagucaccaguuuagaaaagauccucaccguccuuacugggcacaguuugauguccuggcuagugugugguagcaaacuguag

SEQ ID NO: 240758 - RNA, 516 nt, Artificial Sequence
  derived and/or modified sequence
auggaaacauucccccuccuacuacuuagucuuggccuggugcucgcagaggcuuccgagucaaccaugaagauaaucaaagaagaauucaccgaugaagagaugcaguacgacauggcaaaaaguggacaggagaagcagaccaucgagaucuuaaugaaucccaucuuacugguuaagaacaccucuuugagcaugaguaaggacgacaugucuucuacacugcuuaccuuuagaagccuccacuauaacgauccuaaaggcaacucuuccggaaacgauaaagaauguugcaacgauaugaccguuuggcgcaaagugagugaagcgaacggcuccugcaaauggucgaauaauuucauucgcucaucuacagaaguaaugcgacgggugcaucgcgccccgucuuguaaauuugugcagaacccuggaaucucuugcugugaaagccuggagcucgagaacacagucugucaguuuacaaccgggaagcaguuuccccgcugucaguacuag

SEQ ID NO: 240759 - RNA, 537 nt, Artificial Sequence
  derived and/or modified sequence
auggaaaccuucccuuugcugcuguuaucacugggcuugguucucgcggaggcuucugagagcacaaugaagaucaucaaggaagaguuuacggacgaggaaaugcaguaugauauggcuaaaucuggccaagagaagcagacaaucgagaucuuaaugaaucccauccuacuggugaagaacacaagucugucuaugucgaaggaugauauguccaguacacuccugacauuuagauccuuacacuauaaugaucccaaagguaacucaucuggcaaugauaaagaaugcuguaaugacaugaccguguggagaaaaguuuccgaggcaaaugguucauguaaguggucuaauaauuuuauccguucaagcacugagguuaugcgacggguacauagggcgccuucuugcaaauucgugcagaauccagguauuagcugcugugaaucccucgagcucgaaaauacagugugucaauuuaccacuggcaaacaguuuccgaggugucaguaccauagugucaccucuuuagaguag

SEQ ID NO: 240760 - RNA, 600 nt, Artificial Sequence
  derived and/or modified sequence
auggaaacuuucccucuccuccuacucucccugggccugguauuagcagaagccucugaaagcacgaugaaaaucauuaaggaagaauuuacugacgaagagaugcaauaugacauggcaaaaagcggucaagagaaacagacuaucgagauacugaugaacccuaucuuacuuguuaagaauacaagcuuaagcauguccaaggaugauaugucuaguacccuguugacuuuuaggagccugcacuacaaugauccaaaggggaauucuaguggaaaugacaaggaguguuguaaugauaugacugucuggcggaaaguuuccgaagcaaauggaucuugcaaauggagcaacaauuuuauccguaguucuaccgaagugaugaggagaguccacagggcgccaaguugcaaguucguccagaauccaggcauuaguugcugcgaauccuuagagcuggaaaacacaguuugccaguucaccaccggcaagcaguucccaagaugucaguaccauuccgugaccucccucgaaaaaauacugacaguccugaccggacacucucugaugucauggcuaguguguggcucaaaacucuag

SEQ ID NO: 240761 - RNA, 600 nt, Artificial Sequence
  derived and/or modified sequence
auggaaaccuucccccuguugcuccucuccuugggacuuguguuggccgaggcuucagaguccacaaugaagauuaucaaagaagaauuuacggaugaagaaaugcaguacgacauggcgaagucaggccaggaaaagcagacaauugaaauccucaugaauccaauucuucucgucaaaaauaccagccucucuaugagcaaagaugauaugucaucaacucugcuuacauuccgaucccuccacuauaacgauccaaaggggaauucaagugggaacgauaaagaguguugcaaugacaugaccguuuggcgcaaaguguccgaagcuaacggcuccuguaagugguccaacaacuucauccgcucuuccacagagguuaugagaaggguccaccgcgcaccuuccugcaaguuuguccagaaccccggcaucaguuguugugagagccucgaguuagagaauaccgugugccaauuuacuaccggcaaacaauucccuagaugucaauaucauuccguaacuagccuagagaagaucuugacggugcuuacaggucacagccugaugucuuggcucguaugcggaucuaagcucuag

SEQ ID NO: 240762 - RNA, 600 nt, Artificial Sequence
  derived and/or modified sequence
auggaaacauuuccccuccugcuccucucucucggacuggugcuagcugaggccucagagucaacuaugaagaucaucaaggaagaguucacugacgaagaaaugcaguacgauauggccaagagcgggcaagaaaaacagacuaucgagauucuaaugaaccccauccucuuggugaaaaacaccuccuuaucaaugucuaaagacgacaugucaaguacccugcugaccuuccgaagcuuacacuauaacgaccccaaggguaauucaagcggcaacgauaaagaguguuguaaugauaugacuguguggaggaaagugucugaagccaauggaucuugcaaauggaguaacaauuucauccguucuaguacugaagugaugcgccggguccaccgggccccuucuugcaaauuugugcaaaauccuggaauuucaugcugcgaaucucucgaacucgagaauacagugugucaguuuaccaccggaaagcaguuuccuagaugccaguaucacuccgugaccucacuugaaaaaauccucaccgugcugacaggacacucccuuaugagcuggcuaguaugcgggucuaaacucuag

SEQ ID NO: 240763 - RNA, 600 nt, Artificial Sequence
  derived and/or modified sequence
auggaaaccuucccucuacuuuuacucucuuuagggcugguucuagccgaagccucugagucuacaaugaaaauuaucaaagaagaguuuaccgacgaagaaaugcaguacgauauggcgaagaguggccaggagaagcaaaccauugaaauccuuaugaaucccauucuccuugugaaaaauacgucccuuucaaugucaaaagacgauaugagcagcacgcuacugacauuucguucacuucacuauaacgacccaaaggggaacucaucuggcaaugacaaggaauguuguaacgacaugaccguguggagaaaaguaagugaagcaaauggaucgugcaaauggucuaauaacuuuaucagaagcaguacggaaguuaugcgaagagugcaucgagccccgucuuguaaauuuguacagaauccgggcaucucuugcugugaaagucuugagcuggaaaacacagucugucaauuuaccacgggaaagcaauuuccucgcugccaguaucacucugucacuucacuagaaaagaucuugacuguucuaacaggccacagucugauguccuggcucguuugcggcaguaagcuauag

SEQ ID NO: 240764 - RNA, 537 nt, Artificial Sequence
  derived and/or modified sequence
auggaaacuuucccgcugcuucuccucucccugggguuagugcuggccgaggcuuccgaaucgaccaugaagauuaucaaggaggaguuuacugacgaagagaugcaauaugauauggccaaaucaggacaggagaaacagacaauugaaauacugaugaaccccauuuugcuugugaagaauacaucacugaguaugucaaaggacgauaugucaagcacucuacugaccuuuagaucucuccauuacaacgauccaaaagguaacucaucgggaaaugacaaggaaugcugcaacgauaugacaguuuggcguaaagugagugaggcaaauggcuccugcaaguggucaaacaauuucauacgcuccuccacggaaguuaugaggcggguucaccgggccccgucguguaaguucguucagaauccugguauaagcugcugcgagucucuagaacucgaaaauaccgucugucaguucacaacugggaagcaauuuccccggugucaguaucacucgguaacaucucuugaauag

SEQ ID NO: 240765 - RNA, 600 nt, Artificial Sequence
  derived and/or modified sequence
auggagaccuuuccucuccuacuguuaucccucggcuuaguucuggcugaagcuuccgaguccacgaugaaaaucauaaaagaggaauucacagacgaagaaaugcaguaugacauggcuaaaucuggacaggaaaaacagacaaucgaaauacugaugaauccuauccugcuggugaagaauacuuccuugucgauguccaaggaugauauguccuccacccuucugaccuuucgcagccuucacuacaaugacccuaaagguaauaguucuggaaacgauaaagaguguuguaacgauaugacaguguggcggaaggugucagaggcuaacgguagcugcaaaugguccaauaauuucauucguucgucaaccgaggucaugcggcgcguccacagagccccuuccugcaaauuuguccagaaucccgggauuucuuguugcgaaucccucgaauuggaaaauaccgugugucaauuuaccaccggcaagcaguucccaaggugccaguaucauucagucacaagccucgaaaagaucuuaacgguccugacgggccauucucuuaugucuuggcucguguguggguccaaauuguag

SEQ ID NO: 240766 - RNA, 411 nt, Artificial Sequence
  derived and/or modified sequence
auggagaccuucccccuccuguuacucagucuuggacucgugcuugccgaagccucugaauccacaaugaagaucauaaaggaggaauucacagacgaggagaugcaauacgauauggccaaaaguggacaggaaaagcaaacuauagagauacugaugaaucccauacuacucgugaaaaacaccucccucucuaugagcaaagacgauaugaguuccacccuccugacauucagaucucugcauuauaaugauccaaagggcaauuccagcgguaaugauaaggaauguuguaaugacaugaccguguggcgcaaaguaagugaagccaauggaagcuguaaaugguccaauaauuucauccggucuaguacagagguuaugcgcagaguucauagggcccccaguuag

SEQ ID NO: 240767 - RNA, 600 nt, Artificial Sequence
  derived and/or modified sequence
auggaaaccuucccacuucuacuccuuagccucggacuggugcucgccgaggccucagaaucuacaaugaaaaucaucaaagaagaauuuaccgacgaagagaugcaguacgauauggccaaaaguggucaggagaagcagaccauugaaauucugaugaacccuauccuacucgucaaaaacaccuccuuguccaugagcaaagaugauaugaguucuacucugcugacauuuaggagucuccauuacaaugacccaaaagggaauucuuccggcaacgacaaggaaugcugcaacgauaugacgguauggcggaaggucagugaagcuaaugguucuugcaaauggucuaacaauuuuauacgcucuagcacagagguaaugcgacgaguccaucgggcacccagcugcaaauuugugcagaauccuggcaucagcuguugugaaagccucgagcucgaaaauaccguaugccaguuuacuacuggaaagcaguuucccagaugucaguaucacuccgucacaucuuuagaaaaaauucuuacaguccugacaggccacaguuuaauguccugguuagugugcggauccaagcucuag

SEQ ID NO: 240768 - RNA, 516 nt, Artificial Sequence
  derived and/or modified sequence
auggaaacauucccccuccuacuacuuagucuuggccuggugcucgcagaggcuuccgagucaaccaugaagauaaucaaagaagaauucaccgaugaagagaugcaguacgacauggcaaaaaguggacaggagaagcagaccaucgagaucuuaaugaaucccaucuuacugguuaagaacaccucuuugagcaugaguaaggacgacaugucuucuacacugcuuaccuuuagaagccuccacuauaacgauccuaaaggcaacucuuccggaaacgauaaagaauguugcaacgauaugacagucuggagaaaagugagcgaagccaauggcagcugcaaguggucaaauaacuucauucggagcucgacggaagugaugagaagaguccaccgagccccuaguuguaaguucguccagaaucccggcauauccuguugcgagucacuugaguuagagaacacgguaugucaguucacaacagguaagcaguuuccucgaugccaauauuag

SEQ ID NO: 240769 - RNA, 537 nt, Artificial Sequence
  derived and/or modified sequence
auggagacauuuccucuacuccugcugucccugggacuagugcuugccgaagccuccgaguccacuaugaagauuaucaaagaggaguuuacagacgaagagaugcaauacgacauggcaaaguccggucaagaaaagcaaacaaucgaaauucucaugaacccuauauuacuggugaagaacacaagccuaucuauguccaaagacgacaugucaucaacucugcugacauuccgaagucuucacuauaaugacccuaaaggcaacuccucagggaaugacaaagaauguuguaacgacaugacuguguggcgaaaagucucagaggcuaaugggucuugcaaauggaguaauaauuuuauacguaguucuacggaagucaugagaagagugcauagagcaccauccugcaaguucguucagaauccagggaucaguugcugcgagagccuggagcucgaaaacaccguuugucaauuuacuacagggaaacaauucccucgcugucaauaucacuccguaaccagcuuagaauag

SEQ ID NO: 240770 - protein, 208 aa, Artificial Sequence
  derived and/or modified sequence
MGAQGAQESIKAMWRVPGTTRRPVTGESPGMHRPEAMLLLLTLALLGGPTWAGKMYGPGGGKYFSTTEDYDHEITGLRVSVGLLLVKSVQVKLGDSWDVKLGALGGNTQEVTLQPGEYITKVFVAFQAFLRGMVMYTSKDRYFYFGKLDGQISSAYPSQEGQVLVGIYGQYQLLGIKSIGFEWNYPLEEPTTEPPVNLTYSANSPVGR

SEQ ID NO: 240771 - DNA, 627 bp, Artificial Sequence
  derived and/or modified sequence
atgggggcacaaggagcccaggagagtattaaagccatgtggagagtgccgggaaccactcgacgtcctgtaaccggcgaaagcccgggaatgcatcgccctgaagctatgcttcttctgctcacactggctctgctggggggaccgacttgggctgggaaaatgtacgggccaggcggaggtaagtatttcagcacaacagaagactacgaccatgaaatcaccgggctgagagtgtccgtgggactgctgctggtgaagagcgtgcaagtgaagcttggagattcttgggacgtgaaacttggggctctgggtggaaatacacaagaagttaccttacagcccggtgaatatattaccaaagtgtttgtggccttccaggcctttctgcggggaatggtcatgtacactagcaaagacaggtacttttactttggaaagctggacggccagatttccagtgcgtacccttctcaggaggggcaggtcttagtggggatttacgggcagtatcagttgctcgggatcaagagtatcggattcgaatggaattatccacttgaagaacccacgaccgaaccaccagtgaatctcacctacagcgctaacagtcctgtcgggcgatag

SEQ ID NO: 240772 - DNA, 627 bp, Artificial Sequence
  derived and/or modified sequence
atgggggcacagggggcccaagaatctattaaagctatgtggagggtcccaggaactacgagaaggcccgtcaccggggaatccccgggtatgcacagaccagaggcaatgttactactacttacactagccttattgggaggccccacctgggctggtaaaatgtacggccctggaggcggcaaatatttttccactactgaagattacgaccatgagattaccgggctccgtgtctccgtgggtctgctgttggtgaaaagcgttcaagtgaaactgggtgatagttgggacgttaagcttggagcactcgggggaaatactcaagaagtcactctgcaacccggcgaatacataaccaaggtgttcgttgcttttcaggcctttctcaggggcatggtgatgtacacctccaaggacagatatttctacttcggcaagctggacggacagatatcttctgcctacccatcacaggagggccaagtgcttgtgggaatttatggacagtaccagctgcttggcattaaatccatcggatttgagtggaattaccccttagaagaacccactaccgaacctccagtgaaccttacctacagcgctaactcccctgtcggccgttag

SEQ ID NO: 240773 - DNA, 627 bp, Artificial Sequence
  derived and/or modified sequence
atgggggcacagggggcccaagaatctattaaagctatgtggagggtcccaggaactacgagaaggcccgtcaccggggaatccccgggtatgcacagaccagaggcaatgttactactacttacactagccttattgggaggccccacctgggctggtaaaatgtacggccctggaggcggcaaatatttttccactactgaagattacgaccatgagattaccgggctccgtgtctccgtgggtctgctgttggtgaaaagcgttcaagtgaaactgggtgatagttgggacgttaagctgggtgccctcggtggtaacacccaagaagtgaccctccagcccggcgaatacattactaaggtcttcgtcgccttccaagcattcttaaggggtatggtaatgtacacatcaaaagatcggtacttctatttcggcaaactggatggtcagatttcatctgcttatccttcccaagagggtcaagtgcttgttggtatctatggccagtaccaactgctcggcatcaagagtattggcttcgaatggaattaccccctggaagagccaacaacggagccccctgtgaacctgacttactctgctaactcacccgtcggacgatag

SEQ ID NO: 240774 - DNA, 627 bp, Artificial Sequence
  derived and/or modified sequence
atgggcgcccagggcgcccaggagagcatcaaggccatgtggagagtgcccggcaccaccagaagacccgtgaccggcgagagccccggcatgcacagacccgaggccatgctgctgctgctgaccctggccctgctgggcggccccacctgggccggcaagatgtacggccccggcggcggcaagtacttcagcaccaccgaggactacgaccacgagatcaccggcctgagagtgagcgtgggcctgctgctggtgaagagcgtgcaggtgaagctgggcgacagctgggacgtgaagctgggcgccctgggcggcaacacccaggaggtgaccctgcagcccggcgagtacatcaccaaggtgttcgtggccttccaggccttcctgagaggcatggtgatgtacaccagcaaggacagatacttctacttcggcaagctggacggccagatcagcagcgcctaccccagccaggagggccaggtgctggtgggcatctacggccagtaccagctgctgggcatcaagagcatcggcttcgagtggaactaccccctggaggagcccaccaccgagccccccgtgaacctgacctacagcgccaacagccccgtgggcagatag

SEQ ID NO: 240775 - DNA, 627 bp, Artificial Sequence
  derived and/or modified sequence
atgggggctcagggcgctcaggaatctatcaaggccatgtggcgagtgccggggaccacacggcgccctgtgacaggcgagagtccaggaatgcatcgacccgaagcgatgttgctgttgctcacactggctctcctgggcgggcctacctgggcgggaaaaatgtacggaccgggcggcgggaagtactttagcacaactgaggattacgatcacgaaattaccgggctcagggtgtccgtgggcctacttctggtgaaatccgtgcaggtgaagctaggagactcctgggacgtgaagctcggggccttgggcggaaacacgcaggaagtcaccctgcagccaggcgagtatatcactaaggtgttcgtcgccttccaggctttcctccgggggatggtcatgtatacaagtaaggatcgatatttctattttggcaagctggatggccagatatcatctgcttacccctctcaagagggtcaggtgctggttggcatctacggacagtaccagctgctcggtatcaaaagcattgggttcgaatggaattatcccctggaggaacctactacagagccgccagttaatctcacttattccgctaatagtcccgtcggcagatag

SEQ ID NO: 240776 - DNA, 627 bp, Artificial Sequence
  derived and/or modified sequence
atgggcgcccagggcgcccaggagagcatcaaggccatgtggagggtgcccggcaccaccaggaggcctgtgactggagagagccctggcatgcacaggcctgaggccatgctgctgctgctgaccctggccctgctgggcggccccacctgggccggcaagatgtatggccctgggggcggcaagtacttcagcaccacagaggactatgaccacgagatcaccggcctgcgggtgtctgtgggcctgctgctggtgaagtctgtgcaggtgaagctgggggacagctgggatgtgaagctgggcgccctgggcggcaacacccaggaggtgaccctgcagcctggagagtacatcaccaaggtgtttgtggccttccaggccttcctgcggggcatggtgatgtacaccagcaaggaccgctacttctactttgggaagctggatggccagatcagcagcgcctaccccagccaggagggccaggtgctggtgggcatctacggccagtaccagctgctgggcatcaagagcattggatttgagtggaactaccccctggaggagcccaccacagagccccctgtgaacctgacctacagcgccaacagccctgtgggccgctag

SEQ ID NO: 240777 - DNA, 831 bp, Artificial Sequence
  derived and/or modified sequence
ccctgggccttcccccaggaagagccccacggccagctccttcctgttcccctggcggcccctcgcttcttccttctggatgggggcccagggggcccaggagagtataaaggcgatgtggagggtgcccggcacaaccagacgcccagtcacaggcgagagccctgggatgcaccggccagaggccatgctgctgctgctcacgcttgccctcctggggggccccacctgggcagggaagatgtatggccctggaggaggcaagtatttcagcaccactgaagactacgaccatgaaatcacagggctgcgggtgtctgtaggtcttctcctggtgaaaagtgtccaggtgaaacttggagactcctgggacgtgaaactgggagccttaggtgggaatacccaggaagtcaccctgcagccaggcgaatacatcacaaaagtctttgtcgccttccaagctttcctccggggtatggtcatgtacaccagcaaggaccgctatttctattttgggaagcttgatggccagatctcctctgcctaccccagccaagaggggcaggtgctggtgggcatctatggccagtatcaactccttggcatcaagagcattggctttgaatggaattatccactagaggagccgaccactgagccaccagttaatctcacatactcagcaaactcacccgtgggtcgctagggtggggtatggggccatccgagctgaggccatctgggtggtggtggctgatggtactggagtaactgagtcgggacgctgaatctgaatccaccaataaataaaggttctgcagaatcagtgca

SEQ ID NO: 240778 - DNA, 627 bp, Artificial Sequence
  derived and/or modified sequence
atgggcgcccagggcgcccaggagagcatcaaggccatgtggcgggtcccagggaccacgcgtagaccagttacaggcgaatctcccgggatgcataggcctgaggcgatgttgcttctgctaaccttggcactactgggtggcccgacctgggccggtaaaatgtacgggccaggaggcgggaagtacttttctacaactgaagactacgatcacgaaattacgggtctccgggtgagcgtggggctcttattggtgaaatctgtacaggtaaaactcggggatagctgggatgtaaagctgggggccctggggggcaacacccaagaagtgaccctgcagcccggtgagtacattacgaaagtgttcgtggcatttcaggcatttctgagggggatggtgatgtatacctccaaggataggtatttctattttggcaagctggacggccagatctcctctgcatacccatcccaagaaggccaagtccttgtgggaatttacgggcagtaccagcttctgggcatcaaaagtattggcttcgaatggaactatccactggaggaaccaacaactgagcctccagtcaacttgacatactcagcaaattcaccggttggaaggtag

SEQ ID NO: 240779 - RNA, 627 nt, Artificial Sequence
  derived and/or modified sequence
augggggcacagggggcccaagaaucuauuaaagcuauguggagggucccaggaacuacgagaaggcccgucaccggggaauccccggguaugcacagaccagaggcaauguuacuacuacuuacacuagccuuauugggaggccccaccugggcugguaaaauguacggcccuggaggcggcaaauauuuuuccacuacugaagauuacgaccaugagauuaccgggcuccgugucuccgugggucugcuguuggugaaaagcguucaagugaaacugggugauaguugggacguuaagcuuggagcacucgggggaaauacucaagaagucacucugcaacccggcgaauacauaaccaagguguucguugcuuuucaggccuuucucaggggcauggugauguacaccuccaaggacagauauuucuacuucggcaagcuggacggacagauaucuucugccuacccaucacaggagggccaagugcuugugggaauuuauggacaguaccagcugcuuggcauuaaauccaucggauuugaguggaauuaccccuuagaagaacccacuaccgaaccuccagugaaccuuaccuacagcgcuaacuccccugucggccguuag

SEQ ID NO: 240780 - RNA, 627 nt, Artificial Sequence
  derived and/or modified sequence
augggggcacagggggcccaagaaucuauuaaagcuauguggagggucccaggaacuacgagaaggcccgucaccggggaauccccggguaugcacagaccagaggcaauguuacuacuacuuacacuagccuuauugggaggccccaccugggcugguaaaauguacggcccuggaggcggcaaauauuuuuccacuacugaagauuacgaccaugagauuaccgggcuccgugucuccgugggucugcuguuggugaaaagcguucaagugaaacugggugauaguugggacguuaagcugggugcccucggugguaacacccaagaagugacccuccagcccggcgaauacauuacuaaggucuucgucgccuuccaagcauucuuaagggguaugguaauguacacaucaaaagaucgguacuucuauuucggcaaacuggauggucagauuucaucugcuuauccuucccaagagggucaagugcuuguugguaucuauggccaguaccaacugcucggcaucaagaguauuggcuucgaauggaauuacccccuggaagagccaacaacggagcccccugugaaccugacuuacucugcuaacucacccgucggacgauag

SEQ ID NO: 240781 - protein, 144 aa, Artificial Sequence
  derived and/or modified sequence
MEREGSGGSGGSAGLLQQILSLKVVPRVGNGTLCPNSTSLCSFPEMWYGVFLWALVSSLFFHVPAGLLALFTLRHHKYGRFMSVSILLMGIVGPITAGILTSAAIAGVYRAAGKEMIPFEALTLGTGQTFCVLVVSFLRILATL

SEQ ID NO: 240782 - DNA, 435 bp, Artificial Sequence
  derived and/or modified sequence
atggagagagagggcagcggcggcagcggcggcagcgccggcctgctgcagcagatcctgagcctgaaggtggtgcccagagtgggcaacggcaccctgtgccccaacagcaccagcctgtgcagcttccccgagatgtggtacggcgtgttcctgtgggccctggtgagcagcctgttcttccacgtgcccgccggcctgctggccctgttcaccctgagacaccacaagtacggcagattcatgagcgtgagcatcctgctgatgggcatcgtgggccccatcaccgccggcatcctgaccagcgccgccatcgccggcgtgtacagagccgccggcaaggagatgatccccttcgaggccctgaccctgggcaccggccagaccttctgcgtgctggtggtgagcttcctgagaatcctggccaccctgtag

SEQ ID NO: 240783 - DNA, 435 bp, Artificial Sequence
  derived and/or modified sequence
atggaaagggaaggttccggcggatctggaggctccgcaggactgctccagcagatcctctccctcaaagttgtgccccgcgttggcaacggtactctgtgccccaacagcacaagtctatgttcttttcccgaaatgtggtacggcgtgttcctgtgggcactggtgtcgagtttgttctttcacgtgcccgctggcctgcttgcgttgttcactttgcgacaccacaaatacggccgtttcatgtcagtttccatcctgctaatgggcattgtgggtcctattaccgccggcatcctgacatcagcagccatcgcgggggtgtatcgtgccgctggcaaagagatgatcccattcgaagctttgaccctgggtacaggccagacattttgcgttcttgtagtgtctttcctcagaatcctggcaaccctatag

SEQ ID NO: 240784 - DNA, 435 bp, Artificial Sequence
  derived and/or modified sequence
atggaaagggagggatctggaggcagcggggggagcgctggcctgctgcagcagattctctccttgaaagtggtgccccgggtcggcaatggaacattgtgccctaactctacttcactttgctcctttcctgagatgtggtacggagtctttttgtgggctctcgtttcctcattgtttttccatgtgcccgccggtctgctcgcacttttcaccctccgccatcataaatacggccggtttatgagtgtctccatcttgctcatgggaatcgttggaccaataacagccgggatacttaccagcgccgccatagctggcgtgtatcgagcagccggtaaggaaatgatcccgtttgaagccctgactctggggacagggcaaaccttttgtgtcttagtggtgtcattcctgcgcatacttgccacactgtag

SEQ ID NO: 240785 - DNA, 435 bp, Artificial Sequence
  derived and/or modified sequence
atggagcgggagggcagcggcggcagcggcggcagcgctggcctgctgcagcagatcctgagcctgaaggtggtgccccgggtgggcaatggcaccctgtgccccaacagcaccagcctgtgcagcttccctgagatgtggtacggcgtcttcctgtgggccctggtgagcagcctcttcttccacgtgcctgctggcctgctggccctcttcaccctgcggcaccacaagtatggccgcttcatgtctgtgtccatcctgctgatgggcatcgtgggccccatcacagctggcatcctgaccagcgctgccatcgccggcgtgtacagagctgctgggaaggagatgatcccctttgaggccctgaccctgggcaccggccagaccttctgtgtgctggtggtgtccttcctgcgcatcctggccaccctgtag

SEQ ID NO: 240786 - DNA, 435 bp, Artificial Sequence
  derived and/or modified sequence
atggagcgggagggcagcggcggcagcggcggcagcgccggcctgctccagcagattttgtccctgaaggtggtccctagagtgggaaacggaacgctgtgccccaacagcacatcactctgttcctttcccgagatgtggtatggggttttcctgtgggctctggtatctagtttgttttttcacgtgcctgccggactcttagctctgttcactttacgacaccacaagtacgggagattcatgtcagtgagtattttgcttatgggaatcgtgggaccgatcaccgcgggaattttaaccagcgctgctattgcaggtgtgtatagagctgccggtaaggaaatgattccctttgaggccctgacacttggcacaggccagaccttctgcgtgctcgtggtgagttttcttcggatcctggcaaccctttag

SEQ ID NO: 240787 - DNA, 435 bp, Artificial Sequence
  derived and/or modified sequence
atggagcgggagggcagcggcggcagcggcggcagcgccggcctgcttcagcagatactcagtttaaaagttgtccctagagtgggtaatgggaccctctgtcccaacagcacaagcctttgctcttttcctgagatgtggtacggtgtgtttctgtgggcactggtgagttcactgttcttccatgtccctgcagggctgctggccctgttcaccttgcgccatcataagtatgggcggtttatgagcgtgtcaatcctactcatgggcatcgttggaccaatcacagcaggcattctgacctctgcggctattgctggagtgtaccgagcggcaggaaaggagatgatccccttcgaggccttgacattgggcacaggtcagactttttgtgtattggtcgtctccttcctgaggattctagctaccctgtag

SEQ ID NO: 240788 - DNA, 435 bp, Artificial Sequence
  derived and/or modified sequence
atggaaagggagggaagtggcggatctggaggctccgccggtctgctacaacagattctgtctctcaaagtggttccaagagttgggaatggcactctctgtcctaacagtactagtctttgttcatttcctgaaatgtggtacggtgtatttctatgggccctggtgtcttctttatttttccacgtgcccgctggtctcctggcgctctttacgctgcggcaccataagtatgggcgattcatgagcgtttccattctcctgatgggcattgtcggccctattaccgccggaatcctaacatccgctgccattgcaggtgtgtatcgggcagctggcaaggaaatgataccctttgaagctcttaccctcggtacaggacagaccttctgtgtcttagttgtgtctttcctgcgcatcttggccaccctctag

SEQ ID NO: 240789 - DNA, 435 bp, Artificial Sequence
  derived and/or modified sequence
atggagcgcgagggatccggcggtagcggaggaagcgccggattgctacagcagatcctgtctctgaaagtcgtcccacgcgtaggcaatgggactctctgcccgaacagcacttccctttgttctttcccagagatgtggtacggggttttcttatgggccctggtgagctccctgttttttcacgtgccagccggactgctcgcgctattcacactgcgtcaccacaaatatgggcgttttatgtcagtgagtattctcctcatggggattgtcggacctattactgcagggatactgacttccgccgcaatcgcaggcgtctaccgagcagcgggtaaagagatgattccctttgaggcccttactctcggaaccgggcagaccttctgcgtactggtagtctcttttcttcgcattttagccacactctag

SEQ ID NO: 240790 - DNA, 5025 bp, Artificial Sequence
  derived and/or modified sequence
gctgaggcggcgagggtgagtcggcgccggccgctaccgcacttcgggcgctcgtccctcatttctctgtggtgaatggcgacgggatggagcgcgaggggagcggcggcagcggcgggtcggccgggctcctgcagcagatcctgagcctgaaggttgtgccgcgggtgggcaacgggaccctgtgccccaactctacttccctctgctccttcccagagatgtggtatggtgtattcctgtgggcactggtgtcttctctcttctttcatgtccctgctggattactggccctcttcaccctcagacatcacaaatatggtaggttcatgtctgtaagcatcctgttgatgggcatcgtgggaccaattactgctggaatcttgacaagtgcagctattgctggagtttaccgagcagcagggaaggaaatgataccatttgaagccctcacactgggcactggacagacattttgcgtcttggtggtctcctttttacggattttagctactctatagcatacatccttatgctgagatgttgaacttaaactttatggaatcctccaaaagaatacattatggagtgtagtgttttcttagttcttcaaagggaagcaacttggatgaacaggaacatgaaggacaacacatctcagccttttcttcattttgaagctcctagaattgaagacttatgtggactcctattgttctcaaccaaaacaagtcttttggctttcttttttgtagatatttgatttaagcagttttcatgtgtacctttacccaagccaagtcaacagtgtctctggggtggcatcctttgcactgaaatttacagtattctgtgagatgtcgcatattttgaagaaaccgtggaagatactggtttatttcaaatgagcagagtatgttgtattaaaatcttatctaatcttgattaaaatttggcaaactcttttctttgctacatcttagtgacaataaatgccaaataggttttggttgagtatagttttgaaaacaaatttggtgaaataaagcaggaaaaaaaatttaagtataactcaagtagtggctttggttccactgtttataaataaaaagtagataacaatgaataatgtgacattttctggacaactgtcttgacttctgattaagatattttaagagatgtgaatttgttattttgtatgttttatcaaaataagctagctaatttagactttttagattttctgtaccacctttccctatcacttttaattctcttaattttatttcatttaattggaaacatacataccctattaaatggcttgagttggaaattttaagccagatttgtttggacattgaggcacacataagatactttaggcattctgtcatagtttttcttagtgactttggtatactaatgacccttgagaaactatagaagtgcatctgaaactagagttagtggttattgattttttagcttaatgtgtttacctagtggtaactcttcagcccacttttacagtattgggtatcaactcccagaaagtgcctaaagtttaatgttcagatatgtacccactctcccctttacatttttattcaaaagaatttatatctttaaagagatttaaatatcaagagtttttttaaaacttaattttagctatttaaatttttattctactgcctaactttctttttcattaaaaggcctgaaaactgtgactctttgagagggaaagaatcgcagaaattaagtatttaatgtgatcctttccacctaaactgttttgtatggaatacaatcagtgtggtggtagtggtggtggttatctgcaaaatagtttctggtgattaaatctgacttttttttttttttttcttttaaatgagacggagcctcactgtgttgcccaggctggagtgcagtggtgcaatctcagctcactccaacctctgccacccgggttcaagcgattctcctgcctcagtttcctgagtagctgggattacaggcacctgccaccgtgcccggctaatttttgtatttttagtagagataggtttcaccatcttgcccaggctggtcttgaactcctgaccttgtgatccacccgcctcggcctcccaaagtgctgggattacaggcgtgagccaccgcgcctggccataaatctgacatctttaaaggaaagttttcattgtgagattaaggcttaacagcccatgaggtcatatacacatgaacgtatctattccatttaaagcaatacacactctggcttctgattaaaaatagccaggaggagagtctctgaatctactgtgattctggagtctgcccaatttggaaaaaaaaaaaaaagaaaaaagtcaggaggaccaatttgccagggaaactcatagaaaagaattacaaagagatcacaaaaactggacatattcttttgactaattagaccacttatggctgggcgcagtggctcacacctataatcccagcactttgggaggtcgatgtgggaggattgcttgagcccaagagttcaagactggcctgggcaacatagtgagaccttgtctctactacaaaataaaaaaaaattagctgggcgtggcctcagctacccaagaggctaaagtgggaggatcacttgtgcctgggaggttcaggctgctgtgagccgagaccacgccactgaactccagcttaggccacagggcaagaccctgtcttaaaataatattactaattttggtaattaacttatcaaaactatagtgacatatacacgggcagaaacttataagtagagttgtaatgcagccaaatattcttacaaattccctaacaagaagctcaaatctttctcacaggcaaattgtaaaaattctagttttttgtttaaagagctgtgattttcaaaagtatcccttcagtttaagaaatctggggaattggtaacttttcttatgggaaatgattgccatcatctctactgaaggatgcctcttactgaaaaatgtcttttgaaggagttcttgcctaaagcattctttggatgtaatttcatacactaaacatatagaccagtagttagtgggcccctcctcttaaacagtaacttttgaagtactgatacatgattaaaatgttagatatttttcactggagctaagacttaaaattagggcattttgaaaggtgtatttgtttctgtttcttgtttgatatattttggttatctactcttttaaaaaactaaacgtataaaaggtatcttcaaattactgagtgtttcatccatcccagtaggtgaagtattctccagtgaataaatctatatatatatatagattttaaatagcttgagcggtgtagcttgaaatgttttcagggaaagactatttgaatcataaggaatagctttgattttcttttttatgtctcaaatatagaattatttgggggtggtcactcagatggaagaatattggcaattgtgttgaacattttaccttatatagttttgagaatttttgccaaaaactgatttcttagaaatatcctcccccagctgtgctttggttttttggtttttttgttttgagacggagtcttgctctgtcgcccaggctggagtgcagtggcatgatctcggctcactgcaagctctgcctcccgggttcacgccattctcctgcctcagcctcccgagtagctgggactacggacgtccaccaccatgcccagctaattttttgtatttttagtagagacggggtttcaccgtgttagccaggatggtctcaatctcctgacccgcctccacctcccaaagtgctgggattacaggcatgagccaccacacccggcctctgctttgttttttaaaaaaaaagaaatgcaagagagggagggaggcagcctcctgaccataaaagctgatttcttgatttttttttcttttttttttgaaatggagtcttgctctgtctccaaggctggagtgcagtggcatggtctcagctcactgcagcctccgtttcctgggttcaagtgattgtcctgccttggccgctgagtagctaggattactggcacccgccacaaggcccagctaatttttgtatttttagtagagacagggtttgattatgttggacaggctggtctcaaactcctgacttcaagtgatccacccgcctcggcctcccaacgtgatgggactatagacatgagccatcatgcttggccttcttgattcttgaatacggggttttgaggtgaaagcatttcatgaaaacttaagttcatacacaagagcatcatgaatattctaaaagaggtatctgtgctttttttgtgaccacaaaatattacttcttatgaaatgtttacactaggtgaggaaaagttcattaattacctttaaaccgttccttattttttttaagattttaaattgtattttggcttttgcctccagtatcctttctggttgctctggtttgaattaagttcctattatgctgcagcacatatcaaccttccctaagtaaccatttcctggaatgtgaagcatcggtgccattagcagaccatatgcagaaatgtcgtgtacttgcatttcttttttgtgcactctataaggctggttgtgactcagatcagcttaactttttatattatgttatttcactaactgctacagtcaaaatgatcaaatctttgtacaatagaaaattatttaaattttatttttctactgacatttctaattctagtgtaaatgtttatcaataaaaaattactttcaattctgagttggaattatatttctttttggtggctaatgagtttaatcttttgtaataaaattgacttcagttttcattttttaaataacttaatatctagcatgtgtaactttttttatgttctacttcttactaatttatgataaaattcttgttcaaagttgtgattaaaccgtacttaacatgtgaa

SEQ ID NO: 240791 - DNA, 1072 bp, Artificial Sequence
  derived and/or modified sequence
gctggaggtgacgctgaggcggcgagggtgagtcggcgccggccgctaccgcacttcgggcgctcgtccctcatttctctgtggtgaatggcgacgggatggagcgcgaggggagcggcggcagcggcgggtcggccgggctcctgcagcagatcctgagcctgaaggttgtgccgcgggtgggcaacgggaccctgtgccccaactctacttccctctgctccttcccagagatgtggtatggtgtattcctgtgggcactggtgtcttctctcttctttcatgtccctgctggattactggccctcttcaccctcagacatcacaaatatggtaggttcatgtctgtaagcatcctgttgatgggcatcgtgggaccaattactgctggaatcttgacaagtgcagctattgctggagtttaccgagcagcagggaaggaaatgataccatttgaagccctcacactgggcactggacagacattttgcgtcttggtggtctcctttttacggattttagctactctatagcatacatccttatgctgagatgttgaacttaaactttatggaatcctccaaaagaatacattatggagtgtagtgttttcttagttcttcaaagggaagcaacttggatgaacaggaacatgaaggacaacacatctcagccttttcttcattttgaagctcctagaattgaagacttatgtggactcctattgttctcaaccaaaacaagtcttttggctttcttttttgtagatatttgatttaagcagttttcatgtgtacctttacccaagccaagtcaacagtgtctctggggtggcatcctttgcactgaaatttacagtattctgtgagatgtcgcatattttgaagaaaccgtggaagatactggtttatttcaaatgagcagagtatgttgtattaaaatcttatctaatcttgattaaaatttggcaaactcttttctttgctacatcttagtgacaataaatgccaaataggttttggttgagtatagttttgaaaacaaatttggtgaaataaagcaggaaaaaaaa

SEQ ID NO: 240792 - protein, 261 aa, Artificial Sequence [sequence omitted]

SEQ ID NO: 240793 - DNA, 786 bp, Artificial Sequence
  derived and/or modified sequence
atggccgctgcagtcgctggcatgcttcgcgggggccttctccctcaggcaggacgcttgccgacactgcaaactgttagatatggttccaaggctgtaacacgtcacaggcgtgtgatgcactttcagcgccagaagctgatggcagtgacagagtatattcctccgaaaccagctattcatccgtcctgtctgccatctcccccgtctccaccacaggaggagatcggcctcatcagactgctacgacgcgagatcgcagccgtctttcaggataatagaatgatagctgtctgtcagaatgtggcactttcagccgaagataaacttctgatgagacaccagcttcgtaaacataagatccttatgaaagttttccccaaccaggttctgaagccattccttgaggattccaaatatcagaatctgttacctttgtttgtcggtcataatatgctcctggtcagcgaagaaccaaaagtcaaggagatggtacgtatactgcgaactgtccctttcctaccccttcttgggggatgtatcgacgatactatactgtcacgccagggattcattaactactccaaacttccatctcttcctcttgttcaaggcgaactggtcgggggcctgacgtgtctgacagcccagactcattctctcctgcagcaccagcctctgcaactcacgaccctactggatcagtacataagagagcagagggagaaagactcagtcatgtccgcgaacggtaagccagacccagacaccgtgccggatagctag

SEQ ID NO: 240794 - DNA, 786 bp, Artificial Sequence
  derived and/or modified sequence
atggctgctgctgtggccggcatgctgcggggcggcctgctgccccaggccggccgcctgcccaccctgcagacagtgcgctatggcagcaaggctgtgaccaggcacagaagagtgatgcacttccagaggcagaagctgatggctgtgacagagtacatcccccccaagccagccatccaccccagctgcctgcccagcccccccagccccccccaggaggagatcggcctcatccggctgctgcggcgggagattgctgctgtgttccaggacaacaggatgattgctgtgtgccagaatgtggccctgtctgctgaggacaagctgctgatgaggcaccagctgaggaagcacaagatcctgatgaaggtgttccccaaccaggtgctgaagcccttcctggaggacagcaagtaccagaacctgctgcccctgtttgtgggccacaacatgctgctggtgtctgaggagcccaaggtgaaggagatggtgcgcatcctgaggacagtgcccttcctgcccctgctgggcggctgcattgatgacaccatcctgagccggcagggcttcatcaactacagcaagctgcccagcctgcccctggtgcagggcgagctggtgggcggcctgacctgcctgacagcccagacccacagcctgctgcagcaccagcccctgcagctgaccaccctgctggaccagtacatccgggagcagcgggagaaggacagcgtgatgtctgccaacgggaagccagaccctgacacagtgcctgacagctag

SEQ ID NO: 240795 - DNA, 1725 bp, Artificial Sequence
  derived and/or modified sequence
gtggagatggctgcggccgtggcggggatgctgcgagggggtctcctgccccaggcgggccggctgcctaccctccagactgtccgctatggctccaaggctgttacccgccaccgtcgtgtgatgcactttcagcggcagaagctgatggctgtgactgaatatatccccccgaaaccagccatccacccatcatgcctgccatctcctcccagccccccacaggaggagataggcctcatcaggcttctccgccgggagatagcagcagttttccaggacaaccgaatgatagccgtctgccagaatgtggctctgagtgcagaggacaagcttcttatgcgacaccagctgcggaaacacaagatcctgatgaaggtcttccccaaccaggtcctgaagcccttcctggaggattccaagtaccaaaatctgctgcccctttttgtggggcacaacatgctgctggtcagtgaagagcccaaggtcaaggagatggtacggatcttaaggactgtgccattcctgccgctgctaggtggctgcattgatgacaccatcctcagcaggcagggctttatcaactactccaagctccccagcctgcccctggtgcagggggagcttgtaggaggcctcacctgcctcacagcccagacccactccctgctccagcaccagcccctccagctgaccaccctgttggaccagtacatcagagagcaacgcgagaaggattctgtcatgtcggccaatgggaagccagatcctgacactgttccggactcgtagccagcctgtttagccagccctgcgcataaatacactctgcgttattggctgtgctctcctcaatgggacatgtggaagaacttggggtcggggagtgtgtttgtcacttggttttcactagtaatgatattgtcaggtatagggccacttggagatgcagaggattccatttcagatgtcagtcaccggcttcgtccttagttttcccaacttgggacgtgataggagcaaagtctctccattctccaggtccaaggcagagatcctgaaaagatagggctattgtcccctgcctccttggtcactgcctcttgctgcacgggctcctgagcccacccccttggggcacaacctgccactgccacagtagctcaaccaagcagttgtgctgagaatggcacctggtgagagcctgctgtgtgccaggctttgtgctgagtgctgtacatgtattagttcctttactgctgaccacattgtacccatttcacagagaaggagcagagaaattaagtggcttgctcaaggtcatgcagttagtaagtggcagaacagggacttgaaccaagccctctgctctgaagaccgcgtcctgaatttcttcactagagcttcctcatcaggttacccagaagtgggtcccatccaccatccaggtgtgcttggatgttagttctccaccctcgaggtgtacgctgtgaaaagtttgggagcactgctttataataaaatgaaatatattctacttcctttattttgtggtttacacggttgtcctccctctaaacttactctcaggggcttctctgtcatctgactttcctcactcttgcttcccttcctaggaaaatcctcttcccctatacctgttcccacaaatggcatcccgcgcatgcttgccctattaaaggcagctgacagctgtacccacta

SEQ ID NO: 240796 - DNA, 786 bp, Artificial Sequence
  derived and/or modified sequence
atggccgccgccgtggccggcatgctgcggggcggcctgctgccccaggctgggaggctgcctactcttcagacagtccggtatggtagcaaggccgtgacccgccacaggagggttatgcacttccaacggcagaagcttatggccgtgaccgagtatatacctcctaaacccgcgatccacccctcttgcctgccatcgccacccagtcctcctcaggaggagatcgggctgatccgattgctgcggcgagagattgccgcggtgtttcaggataaccgcatgatcgccgtgtgccagaacgtggctctctctgctgaagataagctgctgatgcggcaccaactccgaaagcataaaattctgatgaaagtgtttcccaatcaagttttaaagccttttctggaggattccaaatatcagaatcttctccctctgtttgtgggacacaatatgctgcttgtcagcgaggagcctaaggtgaaggaaatggttcggattctcagaacagtaccttttttacctctgctcggagggtgtattgatgataccatcctcagtagacagggatttattaactactccaagctaccctccctccccctggtgcagggcgagctcgtggggggtttgacttgtctgacggcgcagacccacagcctcctccagcaccaaccactgcaactgaccactctgctggatcagtacatccgtgagcagcgggaaaaggacagcgtcatgtccgctaacgggaaaccggaccctgacaccgtccccgactcgtag

SEQ ID NO: 240797 - DNA, 786 bp, Artificial Sequence
  derived and/or modified sequence
atggctgcagctgttgccggtatgctcaggggcggtctcctgcctcaggcaggcaggctccccaccctgcagactgtgcgttatggctcaaaggcggttaccaggcaccggagagttatgcactttcagaggcaaaagttgatggccgtcacggaatatatcccccctaaacctgccatacatccatcatgccttccttcccctcccagtcctccccaggaggagatcggtctgatccggttgctgcggagagagatcgccgctgtgttccaggataaccgcatgatcgcagtctgtcagaatgtcgccctttcagcagaggacaagttactgatgaggcaccagttgagaaagcataagatactaatgaaggttttcccaaatcaggtcctgaaaccctttttagaggattcaaaatatcagaacttattacccctttttgtaggacacaacatgttactagtcagcgaggaaccgaaagtgaaggaaatggtgcgcattctccggaccgttccattcctccccctgctcgggggatgcatcgacgacactatcttgtcccgacaagggttcatcaactacagcaagttgccttcattaccgctggtgcagggggagctcgtgggtggcctgacctgtctcacggcccaaactcactcactgttgcagcaccagcctttgcagctgacaaccctgctggaccagtatattagagagcagagagagaaggactccgttatgtctgccaatgggaagccagacccggatacagtccctgactcctag

SEQ ID NO: 240798 - DNA, 786 bp, Artificial Sequence
  derived and/or modified sequence
atggccgccgccgtggccggcatgctgagaggcggcctgctgccccaggccggcagactgcccaccctgcagaccgtgagatacggcagcaaggccgtgaccagacacagaagagtgatgcacttccagagacagaagctgatggccgtgaccgagtacatcccccccaagcccgccatccaccccagctgcctgcccagcccccccagccccccccaggaggagatcggcctgatcagactgctgagaagagagatcgccgccgtgttccaggacaacagaatgatcgccgtgtgccagaacgtggccctgagcgccgaggacaagctgctgatgagacaccagctgagaaagcacaagatcctgatgaaggtgttccccaaccaggtgctgaagcccttcctggaggacagcaagtaccagaacctgctgcccctgttcgtgggccacaacatgctgctggtgagcgaggagcccaaggtgaaggagatggtgagaatcctgagaaccgtgcccttcctgcccctgctgggcggctgcatcgacgacaccatcctgagcagacagggcttcatcaactacagcaagctgcccagcctgcccctggtgcagggcgagctggtgggcggcctgacctgcctgaccgcccagacccacagcctgctgcagcaccagcccctgcagctgaccaccctgctggaccagtacatcagagagcagagagagaaggacagcgtgatgagcgccaacggcaagcccgaccccgacaccgtgcccgacagctag

SEQ ID NO: 240799 - protein, 443 aa, Artificial Sequence
  derived and/or modified sequence
MLTNGKEQVIKSCVSLPELNAQVFCHSSNNVTKTECCFTDFCNNITLHLPTASPNAPKLGPMELAIIITVPVCLLSIAAMLTVWACQGRQCSYRKKKRPNVEEPLSECNLVNAGKTLKDLIYDVTASGSGSGLPLLVQRTIARTIVLQEIVGKGRFGEVWHGRWCGEDVAVKIFSSRDERSWFREAEIYQTVMLRHENILGFIAADNKDNGTWTQLWLVSEYHEQGSLYDYLNRNIVTVAGMIKLALSIASGLAHLHMEIVGTQGKPAIAHRDIKSKNILVKKCETCAIADLGLAVKHDSILNTIDIPQNPKVGTKRYMAPEMLDDTMNVNIFESFKRADIYSVGLVYWEIARRCSVGGIVEEYQLPYYDMVPSDPSIEEMRKVVCDQKFRPSIPNQWQSCEALRVMGRIMRECWYANGAARLTALRIKKTISQLCVKEDCKA

SEQ ID NO: 240800 - protein, 493 aa, Artificial Sequence
  derived and/or modified sequence
MTRALCSALRQALLLLAAAAELSPGLKCVCLLCDSSNFTCQTEGACWASVMLTNGKEQVIKSCVSLPELNAQVFCHSSNNVTKTECCFTDFCNNITLHLPTASPNAPKLGPMELAIIITVPVCLLSIAAMLTVWACQGRQCSYRKKKRPNVEEPLSECNLVNAGKTLKDLIYDVTASGSGSGLPLLVQRTIARTIVLQEIVGKGRFGEVWHGRWCGEDVAVKIFSSRDERSWFREAEIYQTVMLRHENILGFIAADNKDNGTWTQLWLVSEYHEQGSLYDYLNRNIVTVAGMIKLALSIASGLAHLHMEIVGTQGKPAIAHRDIKSKNILVKKCETCAIADLGLAVKHDSILNTIDIPQNPKVGTKRYMAPEMLDDTMNVNIFESFKRADIYSVGLVYWEIARRCSVGGIVEEYQLPYYDMVPSDPSIEEMRKVVCDQKFRPSIPNQWQSCEALRVMGRIMRECWYANGAARLTALRIKKTISQLCVKEDCKA

SEQ ID NO: 240801 - DNA, 1482 bp, Artificial Sequence
  derived and/or modified sequence
atgactagggccctatgtagtgctctgagacaggcgctgctcctgctggccgcagcagccgagctgtctccagggctcaaatgtgtgtgcctcctatgcgatagttcaaacttcacgtgtcagacagaaggcgcatgctgggccagcgtcatgctcactaacggtaaggaacaggtaattaagtcgtgcgtgtcacttcccgaacttaatgctcaggtgttttgtcactcttcaaacaacgtgaccaagaccgagtgttgttttaccgatttctgtaacaacataactctgcatctgcctactgcgtccccaaatgcgcccaaactcggacccatggaactcgccattattatcaccgtgcctgtgtgtctcctatccatcgcagccatgctgacagtctgggcatgtcagggaaggcagtgctcctataggaagaaaaaaagacccaacgtggaggagccactgtcggagtgtaacttggttaacgcaggtaaaacactgaaagatctcatttacgatgtgacggcttctggcagtggctccgggcttcccctgctagtgcagcgcacaatcgcccgaactatcgtccttcaggagatcgtcgggaaaggtcgttttggagaagtctggcacgggcgctggtgtggcgaagacgtcgctgtcaagatcttctcttctagagacgagcggagctggtttagagaagctgagatctatcagacggtcatgctacgacacgagaatatcctgggatttatcgcagcggataataaggacaatgggacctggacccagctgtggctagtgagcgagtatcacgagcagggatcactctacgattatctgaatcgcaacatcgtgacagtggctggcatgataaaattggccttaagcattgcatctggactggcgcacctgcacatggagattgtggggacccaggggaagcccgctatcgcccaccgggatattaagtccaaaaatattctcgtcaaaaaatgcgaaacctgcgcaatagcagacttaggcctagctgtaaaacacgacagtatcttaaatacaatcgatatacctcagaacccaaaggtgggaaccaagaggtacatggcacctgagatgttggacgacacaatgaatgtgaacatttttgagagttttaagcgagccgatatttactccgtaggactagtatactgggaaatcgcgcgtcggtgctctgttgggggtatagttgaggagtatcagttgccgtactacgacatggtcccaagtgacccatctatcgaggagatgcgaaaggttgtttgtgaccaaaagttcagaccttctatccctaatcagtggcagtcttgcgaggctctgcgcgtcatgggcaggatcatgcgtgaatgctggtatgcaaatggagctgccaggttgactgcactgaggatcaagaaaacgataagccagctgtgtgtcaaggaggattgcaaagcctag

SEQ ID NO: 240802 - DNA, 1482 bp, Artificial Sequence
  derived and/or modified sequence
atgacccgggccctgtgcagcgccctgcggcaggccctgctgctgctggccgctgctgctgagctgagccctggcctgaagtgtgtgtgcctgctgtgtgacagcagcaacttcacctgccagacagagggcgcctgctgggcctctgtgatgctgaccaacgggaaggagcaggtgatcaagagctgtgtgtccctgcctgagctgaatgcccaggtgttctgccacagcagcaacaacgtgaccaagacagagtgctgcttcacagacttctgcaacaacatcaccctgcacctgcccacagccagccccaatgcccccaagctgggccccatggagctggccatcatcatcaccgtgcctgtgtgcctgctgagcattgctgccatgctgactgtgtgggcctgccagggccggcagtgcagctacaggaagaagaagaggcccaacgtggaggagcccctgtctgagtgcaacctggtgaatgccggcaagaccctgaaggacctgatctatgatgtgacagccagcggcagcggcagcggcctgcccctgctggtgcagaggaccatcgcccggaccatcgtgctgcaggagatcgtgggcaagggccgctttggagaggtgtggcacggccgctggtgtggagaagatgtggccgtgaagatcttcagcagcagagatgagaggtcctggttccgggaggccgagatctaccagacagtgatgctgcggcatgagaacatcctgggcttcatcgctgctgacaacaaggacaatggcacctggacccagctgtggctggtgtctgagtaccacgagcagggcagcctgtatgactacctgaacagaaacatcgtgacagtggccggcatgatcaagctggccctgagcatcgccagcggcctggcccacctgcacatggagatcgtgggcacccagggcaagccagccatcgcccaccgggacatcaagagcaagaacatcctggtgaagaagtgtgagacctgtgccatcgctgacctgggcctggccgtgaagcatgacagcatcctgaacaccatcgacatcccccagaaccccaaggtgggcaccaagcgctacatggcccctgagatgctggatgacaccatgaatgtgaacatctttgagagcttcaagagagctgacatctacagcgtgggcctggtgtactgggagatcgcccggcgctgcagcgtgggcggcatcgtggaggagtaccagctgccctactatgacatggtgcccagcgaccccagcattgaggagatgaggaaggtggtgtgtgaccagaagttccggcccagcatccccaaccagtggcagagctgtgaggccctgcgggtgatgggccgcatcatgagggagtgctggtacgccaacggggccgcccggctgacagccctgcgcatcaagaagaccatcagccagctgtgtgtgaaggaggactgcaaggcctag

SEQ ID NO: 240803 - DNA, 1482 bp, Artificial Sequence
  derived and/or modified sequence
atgacccgggccctgtgcagcgccctgcggcaggccctgctgctgctagctgcggctgctgaattgtcacctggactaaaatgtgtatgcttgctatgcgactcctcaaatttcacttgtcagaccgaaggcgcttgctgggcctccgtgatgttaaccaacggcaaggaacaggtgatcaagagctgcgtatccctgcctgaactgaacgctcaggttttttgccacagcagcaacaacgtgaccaagactgaatgttgtttcacggatttctgtaataatattactctgcacctgccaaccgctagccccaacgctcctaagctgggaccaatggaactggccatcattattacagtgccggtgtgtctcctcagcatcgccgccatgttgactgtctgggcctgccaaggccgccagtgtagttatcgtaaaaagaagcgcccaaacgttgaggagcctctgagtgagtgtaacctcgttaatgctggtaaaaccctaaaagatctcatctacgacgtgactgcctcaggatctggctccggcctgcctctgttggttcaacggaccatcgcccgtactatagtgctccaggagattgtcgggaaaggccgctttggggaagtgtggcatggccgttggtgcggagaagatgtggccgtgaaaatattctcatcccgagacgagcgcagttggtttagggaggcagagatatatcaaaccgtcatgcttcggcatgagaacatcctgggattcatcgctgcagataacaaggataatggcacttggacgcaactgtggttggtgagcgaataccatgaacaggggtccctgtatgattatctcaaccgaaacatcgtaacagttgctggcatgatcaagctggcactcagtattgcaagtggactcgcgcatcttcacatggaaattgtaggcacacagggaaagcccgcgattgcccatagggacatcaagagcaagaacattctggtgaagaagtgcgagacctgtgcaatcgcggatctgggacttgctgtgaaacacgatagcattctcaacactatagatattccccagaatcccaaggtcgggacaaagaggtatatggcccctgagatgctggacgacaccatgaatgtcaatatttttgaaagttttaaacgcgccgatatctacagcgtgggtctcgtgtattgggaaattgcacgaaggtgttcagtcggagggatcgttgaggagtatcaacttccctattatgacatggtcccgtccgatccctccattgaagaaatgaggaaggtggtttgtgatcagaaatttagaccctcgatacctaatcaatggcagtcttgcgaagcgctgcgcgtcatgggaaggatcatgcgagaatgctggtacgcaaacggcgccgctcgcctgacagcactgcgcatcaagaagaccatttcccaactctgtgttaaggaggattgtaaggcttag

SEQ ID NO: 240804 - DNA, 1482 bp, Artificial Sequence
  derived and/or modified sequence
atgaccagggctctgtgtagcgccctgcgccaggcactgctgctcctcgctgccgctgcggagctctcacctggactgaagtgtgtttgcctgctatgcgactccagcaattttacatgtcaaacagagggggcttgttgggccagtgttatgctgaccaacggaaaggagcaagtgattaaatcttgcgtgtctctaccagaactgaatgcccaggttttctgccacagcagcaataacgtgaccaagactgagtgttgctttacggatttttgcaataacattaccttgcacttacctacagcatctccaaacgcacctaaactcggcccaatggaactagcgatcattatcaccgttcctgtgtgcctgctctcgatcgccgcaatgttgactgtctgggcctgtcaggggagacagtgctcttacaggaaaaagaagcgccctaacgtagaagagcccctctcagaatgtaatttggtcaacgcaggaaagacactgaaggacctgatatatgacgtgactgctagcgggtctggctccggtctgcccctcctcgtgcagaggaccatcgccaggaccattgttctccaagagatcgtgggcaagggcagattcggtgaagtctggcacgggcgatggtgcggcgaagatgtcgccgtgaagatcttctccagtcgcgatgaacgatcttggtttagagaggcagaaatttaccagacagtcatgctgcgacacgagaatatacttggctttatcgctgcagacaataaggacaatgggacctggacacagctgtggctggtttccgaatatcacgaacagggtagcctttatgactatctgaataggaatatagttactgtggccggaatgattaagttggcgctgagcatagccagcggtctggcccatctgcacatggagatagtcgggacacaaggcaagcctgcaatcgcgcatagagacatcaaaagtaaaaacattcttgtaaaaaagtgcgagacctgcgccattgcagacctaggactcgccgtgaaacacgactcgatcttgaacacaattgatataccccaaaaccccaaggtcgggacaaaaaggtatatggctcccgagatgctggatgacacaatgaatgtaaacatttttgaaagctttaaaagagccgacatttactccgttgggctcgtttattgggagatcgcacgccgttgtagtgttggcggaatcgtggaagaatatcaactaccatactatgatatggtaccctcagatccctctattgaggagatgagaaaggtcgtttgcgaccaaaaattccgaccctctattcctaaccagtggcagtcctgcgaggcactgagagtgatggggagaatcatgcgagaatgctggtacgcaaacggggctgctaggctcacagcgcttcggattaagaagacgatcagccagctgtgcgtcaaagaagattgcaaggcatag

SEQ ID NO: 240805 - DNA, 1482 bp, Artificial Sequence
  derived and/or modified sequence
atgaccagagccctgtgcagcgccctgagacaggccctgctgctgctggccgccgccgccgagctgagccccggcctgaagtgcgtgtgcctgctgtgcgacagcagcaacttcacctgccagaccgagggcgcctgctgggccagcgtgatgctgaccaacggcaaggagcaggtgatcaagagctgcgtgagcctgcccgagctgaacgcccaggtgttctgccacagcagcaacaacgtgaccaagaccgagtgctgcttcaccgacttctgcaacaacatcaccctgcacctgcccaccgccagccccaacgcccccaagctgggccccatggagctggccatcatcatcaccgtgcccgtgtgcctgctgagcatcgccgccatgctgaccgtgtgggcctgccagggcagacagtgcagctacagaaagaagaagagacccaacgtggaggagcccctgagcgagtgcaacctggtgaacgccggcaagaccctgaaggacctgatctacgacgtgaccgccagcggcagcggcagcggcctgcccctgctggtgcagagaaccatcgccagaaccatcgtgctgcaggagatcgtgggcaagggcagattcggcgaggtgtggcacggcagatggtgcggcgaggacgtggccgtgaagatcttcagcagcagagacgagagaagctggttcagagaggccgagatctaccagaccgtgatgctgagacacgagaacatcctgggcttcatcgccgccgacaacaaggacaacggcacctggacccagctgtggctggtgagcgagtaccacgagcagggcagcctgtacgactacctgaacagaaacatcgtgaccgtggccggcatgatcaagctggccctgagcatcgccagcggcctggcccacctgcacatggagatcgtgggcacccagggcaagcccgccatcgcccacagagacatcaagagcaagaacatcctggtgaagaagtgcgagacctgcgccatcgccgacctgggcctggccgtgaagcacgacagcatcctgaacaccatcgacatcccccagaaccccaaggtgggcaccaagagatacatggcccccgagatgctggacgacaccatgaacgtgaacatcttcgagagcttcaagagagccgacatctacagcgtgggcctggtgtactgggagatcgccagaagatgcagcgtgggcggcatcgtggaggagtaccagctgccctactacgacatggtgcccagcgaccccagcatcgaggagatgagaaaggtggtgtgcgaccagaagttcagacccagcatccccaaccagtggcagagctgcgaggccctgagagtgatgggcagaatcatgagagagtgctggtacgccaacggcgccgccagactgaccgccctgagaatcaagaagaccatcagccagctgtgcgtgaaggaggactgcaaggcctag

SEQ ID NO: 240806 - DNA, 1786 bp, Artificial Sequence
  derived and/or modified sequence
gttgcgctgccgtcgggcaggtggccgagccccgcgggagctgtcgtcggggccgaattcactgcgccaaggtccagcggaaagctggggcatcccggcgaccgcagggtgtcccttcgcaaattcatcaggcgaaggggaggcggaagctcctggccgctgctctgggggagggctccgagctccaacctgcaagtccaggactgaagtgtgtatgtcttttgtgtgattcttcaaacttcacctgccaaacagaaggagcatgttgggcatcagtcatgctaaccaatggaaaagagcaggtgatcaaatcctgtgtctcccttccagaactgaatgctcaagtcttctgtcatagttccaacaatgttaccaaaaccgaatgctgcttcacagatttttgcaacaacataacactgcaccttccaacagcatcaccaaatgccccaaaacttggacccatggagctggccatcattattactgtgcctgtttgcctcctgtccatagctgcgatgctgacagtatgggcatgccagggtcgacagtgctcctacaggaagaaaaagagaccaaatgtggaggaaccactctctgagtgcaatctggtaaatgctggaaaaactctgaaagatctgatttatgatgtgaccgcctctggatctggctctggtctacctctgttggttcaaaggacaattgcaaggacgattgtgcttcaggaaatagtaggaaaaggtagatttggtgaggtgtggcatggaagatggtgtggggaagatgtggctgtgaaaatattctcctccagagatgaaagatcttggtttcgtgaggcagaaatttaccagacggtcatgctgcgacatgaaaacatccttggtttcattgctgctgacaacaaagataatggaacttggactcaactttggctggtatctgaatatcatgaacagggctccttatatgactatttgaatagaaatatagtgaccgtggctggaatgatcaagctggcgctctcaattgctagtggtctggcacaccttcatatggagattgttggtacacaaggtaaacctgctattgctcatcgagacataaaatcaaagaatatcttagtgaaaaagtgtgaaacttgtgccatagcggacttagggttggctgtgaagcatgattcaatactgaacactatcgacatacctcagaatcctaaagtgggaaccaagaggtatatggctcctgaaatgcttgatgatacaatgaatgtgaatatctttgagtccttcaaacgagctgacatctattctgttggtctggtttactgggaaatagcccggaggtgttcagtcggaggaattgttgaggagtaccaattgccttattatgacatggtgccttcagatccctcgatagaggaaatgagaaaggttgtttgtgaccagaagtttcgaccaagtatcccaaaccagtggcaaagttgtgaagcactccgagtcatggggagaataatgcgtgagtgttggtatgccaacggagcggcccgcctaactgctcttcgtattaagaagactatatctcaactttgtgtcaaagaagactgcaaagcctaatgatgataattatgttaaaaagaaatctctcatagctttcttttccattttcccctttatgtgaatgtttttgccattttttttttgttctacctcaaagataagacagtacagtatttaagtgcccataaggcagcatgaaaagataactctaaagttaagcatgggcaggagtt

SEQ ID NO: 240807 - DNA, 3385 bp, Artificial Sequence
  derived and/or modified sequence
gccgggcacagggccgcctttgcctgcctgccctgcagcagcaggcccgggcggctgcgagagggcgcagggggcggaggcgcggcaggggcgggctctgccgcccgccccaccacccgctccccgcccggctgcggggccagtggcaggagcgccgcgcaccgccagccgcagggggcgtgggatgggggcggccggggaggggggcgcccacactgactagagccaaccgcgcacttcaaaagggtgtcggtgccgcgctcccctcccgcggcccgggaacttcaaagcgggccgtgctgccccggctgcctcgctctgctctggggcctcgcagccccggcgcggccgcctggtggcgatgacccgggcgctctgctcagcgctccgccaggctctcctgctgctcgcagcggccgccgagctctcgccaggactgaagtgtgtatgtcttttgtgtgattcttcaaacttcacctgccaaacagaaggagcatgttgggcatcagtcatgctaaccaatggaaaagagcaggtgatcaaatcctgtgtctcccttccagaactgaatgctcaagtcttctgtcatagttccaacaatgttaccaaaaccgaatgctgcttcacagatttttgcaacaacataacactgcaccttccaacagcatcaccaaatgccccaaaacttggacccatggagctggccatcattattactgtgcctgtttgcctcctgtccatagctgcgatgctgacagtatgggcatgccagggtcgacagtgctcctacaggaagaaaaagagaccaaatgtggaggaaccactctctgagtgcaatctggtaaatgctggaaaaactctgaaagatctgatttatgatgtgaccgcctctggatctggctctggtctacctctgttggttcaaaggacaattgcaaggacgattgtgcttcaggaaatagtaggaaaaggtagatttggtgaggtgtggcatggaagatggtgtggggaagatgtggctgtgaaaatattctcctccagagatgaaagatcttggtttcgtgaggcagaaatttaccagacggtcatgctgcgacatgaaaacatccttggtttcattgctgctgacaacaaagataatggaacttggactcaactttggctggtatctgaatatcatgaacagggctccttatatgactatttgaatagaaatatagtgaccgtggctggaatgatcaagctggcgctctcaattgctagtggtctggcacaccttcatatggagattgttggtacacaaggtaaacctgctattgctcatcgagacataaaatcaaagaatatcttagtgaaaaagtgtgaaacttgtgccatagcggacttagggttggctgtgaagcatgattcaatactgaacactatcgacatacctcagaatcctaaagtgggaaccaagaggtatatggctcctgaaatgcttgatgatacaatgaatgtgaatatctttgagtccttcaaacgagctgacatctattctgttggtctggtttactgggaaatagcccggaggtgttcagtcggaggaattgttgaggagtaccaattgccttattatgacatggtgccttcagatccctcgatagaggaaatgagaaaggttgtttgtgaccagaagtttcgaccaagtatcccaaaccagtggcaaagttgtgaagcactccgagtcatggggagaataatgcgtgagtgttggtatgccaacggagcggcccgcctaactgctcttcgtattaagaagactatatctcaactttgtgtcaaagaagactgcaaagcctaatgatgataattatgttaaaaagaaatctctcatagctttcttttccattttcccctttatgtgaatgtttttgccattttttttttgttctacctcaaagataagacagtacagtatttaagtgcccataaggcagcatgaaaagataactctaaagttaagcatgggcaggagttgacttcatccaatctctatgttatgtttaattttattttgaaagcaacacctcaactcatctttttatttaataaggaagaaatatattacaaaagtataaaataagctctataaaaatgttatagtcattaagtttttattttacttgaaccaagagcacatgaatgaacaggaaaagatgtaaaaacatttttttctgagatgaaaacatattaattaaacatgcaaattagagcatgctatctttaggtgatgcaatctatgtttccccctttttaagttagcaggactttttaaaaataaatattgctctaaactttaatatatcgaacgtgagagtggagctgcttagtggaagatgtaagtgaggtgggtgtcccatgtgcttggtctccccttctgctgttctcctgttcttcataatccactactgcagcagtccctgaaccactaaacttgttcctttcatttacaaaagagatacctgacatcctgagacactgagaaatgtcctgaagtcacacagctaatggcagaactggcactaggtccaaatcttgtgataatgaacaccgtaaggttagctagcttcctactttcccttgaatagtgcttttctccctatgtaatatcttttattatgatatttgtggtttagaaggcatattgagttattttgcagaatcataatggacccgcacaaaatctcagaaccatatctgttgacattttttctcatagaaatatcatggttaccccatttgttaatgagcattaatgttttctgaacacttccaaagattaatcaaacataaatattcattgtctgaaaatgtctttaagatacaattcagaggtccctatttcctttgtacatacacacttagaaagaaaagacagaaaaggaagaggaaggaaggaaatattttgagaatatattgagaagaattaagaaaactcttcaatgaagtgttaacaaccaaaccctacagacggtatcagaaacagcaaatagatattcctctaccctttcacagtgagtgagtgagtacagaagaatgctcatgatagttttgccttcattctactttctgtggacacagagtaatgaatatttaatgggacattaaatatgcccttcaaatctataattttactttggtaaacgagatttaacatgatgtcttttatgctcctaaaacatcttttttcaaactccattccttagaacattcttctactgagatgatccaagaccaaaagtgttctttggtacttgcttataaagtgatagtacatgttagcatataatgtattttgaagagtgaagtaaatgctattgataacagtaaaaaaaaaaaaaaa

SEQ ID NO: 240808 - protein, 116 aa, Artificial Sequence
  derived and/or modified sequence
MASTVVAVGLTIAAAGFAGRYVLQAMKHMEPQVKQVFQSLPKSAFSGGYYRGGFEPKMTKREAALILGVSPTANKGKIRDAHRRIMLLNHPDKGGSPYIAAKINEAKDLLEGQAKK

SEQ ID NO: 240809 - DNA, 351 bp, Artificial Sequence
  derived and/or modified sequence
atggcttctacagtggtcgcagtgggacttacaatagctgctgccggctttgccggacgttacgtgctgcaagctatgaaacacatggaaccacaagtcaagcaagtctttcagtctttaccaaagtccgcttttagcggcggctactatcggggaggtttcgaacccaaaatgaccaagcgggaggcggctctgattctgggtgtttcaccaacagccaataaagggaagatccgagacgctcacagacggattatgctcctcaaccacccagacaagggaggtagcccttatatcgcagccaaaattaatgaggcaaaagatctccttgagggacaagccaaaaaatag

SEQ ID NO: 240810 - DNA, 351 bp, Artificial Sequence
  derived and/or modified sequence
atggccagcacagtggtggccgtgggcctgaccatcgctgctgctggctttgctggccgctacgtgctgcaggccatgaagcacatggagccccaggtgaagcaggtgttccagagcctgcccaagagcgccttcagcggcggctactaccggggcggctttgagcccaagatgaccaagcgggaggccgccctgatcctgggcgtgagccccacagccaacaagggcaagatcagagatgcccaccggcgcatcatgctgctgaaccacccagacaagggcggcagcccctacatcgccgccaagatcaatgaggccaaggacctgctggagggccaggccaagaagtag

SEQ ID NO: 240811 - DNA, 351 bp, Artificial Sequence
  derived and/or modified sequence
atggccagcaccgtggtggccgtgggcctgaccatcgccgccgccggatttgctggccggtacgttctccaagccatgaagcatatggagccccaggtaaaacaggtctttcagtccctcccgaaaagtgcgttttccggcggttattaccgcggcggatttgagcccaagatgacaaagcgcgaagccgcactcattctgggcgtgtctcccaccgcgaacaagggcaaaattcgagatgcccacaggcgcattatgctactcaatcatccagacaaaggaggctctccttacattgctgctaagatcaatgaagccaaagatctcctcgagggacaggccaagaaatag

SEQ ID NO: 240812 - DNA, 351 bp, Artificial Sequence
  derived and/or modified sequence
atggcgagcaccgtggtggctgtgggattaactattgccgcagctggctttgctggacggtacgtgttgcaggcaatgaaacacatggaaccgcaggtgaagcaagttttccagtctctcccaaaatccgcgttcagcggaggatattaccgaggtggcttcgagccgaagatgaccaagcgggaagctgctcttattcttggcgtgtcacccaccgccaacaaggggaagattagggacgcgcatcggagaatcatgctgctgaaccatcctgataagggagggtcgccctacatcgccgcaaagatcaacgaggccaaagatctcttggaaggccaagccaagaagtag

SEQ ID NO: 240813 - DNA, 351 bp, Artificial Sequence
  derived and/or modified sequence
atggccagcaccgtggtggccgtgggcctgaccatcgccgccgccggcttcgccggcagatacgtgctgcaggccatgaagcacatggagccccaggtgaagcaggtgttccagagcctgcccaagagcgccttcagcggcggctactacagaggcggcttcgagcccaagatgaccaagagagaggccgccctgatcctgggcgtgagccccaccgccaacaagggcaagatcagagacgcccacagaagaatcatgctgctgaaccaccccgacaagggcggcagcccctacatcgccgccaagatcaacgaggccaaggacctgctggagggccaggccaagaagtag

SEQ ID NO: 240814 - DNA, 1453 bp, Artificial Sequence
  derived and/or modified sequence
cgacagttttccggcctagtttgcggctgctcctgccgtgttgcgtagggcgcctgtgcttgaggttgggggttgcgtcgctctctggtaaaggcgtgcaggtgttggccgcggcctctgagctgggatgagccgtgctcccggtggaagcaagggagcccagccggagccatggccagtacagtggtagcagttggactgaccattgctgctgcaggatttgcaggccgttacgttttgcaagccatgaagcatatggagcctcaagtaaaacaagtttttcaaagcctaccaaaatctgccttcagtggtggctattatagaggtgggtttgaacccaaaatgacaaaacgggaagcagcattaatactaggtgtaagccctactgccaataaagggaaaataagagatgctcatcgacgaattatgcttttaaatcatcctgacaaaggaggatctccttatatagcagccaaaatcaatgaagctaaagatttactagaaggtcaagctaaaaaatgaagtaaatgtatgatgaattttaagttcgtattagtttatgtatatgagtactaagtttttataataaaatgcctcagagctacaattttaaaaaatgatttagcacaagctaaatctcaaagccttggtataattttcttgtttaaatttggggattttaaatcagattatagtttagaatatttgcgtattaattatgggcaagcacacaccttctgaatagaaatattgttcattactcatttagcagataatttgggacctatgtctacttttcaaggcaaagtgaagatgacagtccttgctctcagggagcccccactttaatgggagactgataaactggtaattagactgtgataaatagtatgatggaaattagcttaagctgtttaagtagggactcttcttattcggtggaaaggctgttccaggtacaggcaactggcctggcaacttggatacttggaaccttgtatttaaaagtgaatttaaccacaactgagacctaagaaattgacctaggggtgtgtgtgtgtgtgtattctatgtacatataaaccatttttatttcatgcattaaaaatagtatgataaagatttcagagtacaggtctggtacaatcacagttcattgcagcctcaacctcctgggtttaagcagtcctcccgcctcagcctcccaaagtactgggattacaggcatgagtatttacattgtattcagctagccccttaaaggtaatgaccatttataaattattccttcagttggctatttcttgacataatcaaacttctgcaattgttatgattaagcttaaaccctgttagcaaaactgaaaactgaaatgttctcaatatcaacatatttaatttggactctttagaatttatacactaataaatttaaatgatgtttaaaggcaaa

SEQ ID NO: 240815 - protein, 367 aa, Artificial Sequence
  derived and/or modified sequence
MAAALQVLPRLARAPLHPLLWRGSVARLASSMALAEQARQLFESAVGAVLPGPMLHRALSLDPGGRQLKVRDRNFQLRQNLYLVGFGKAVLGMAAAAEELLGQHLVQGVISVPKGIRAAMERAGKQEMLLKPHSRVQVFEGAEDNLPDRDALRAALAIQQLAEGLTADDLLLVLISGGGSALLPAPIPPVTLEEKQTLTRLLAARGATIQELNTIRKALSQLKGGGLAQAAYPAQVVSLILSDVVGDPVEVIASGPTVASSHNVQDCLHILNRYGLRAALPRSVKTVLSRADSDPHGPHTCGHVLNVIIGSNVLALAEAQRQAEALGYQAVVLSAAMQGWGTPAAHRDDRYQCHGHPPLVPAASVMA

SEQ ID NO: 240816 - protein, 457 aa, Artificial Sequence
  derived and/or modified sequence
MAAALQVLPRLARAPLHPLLWRGSVARLASSMALAEQARQLFESAVGAVLPGPMLHRALSLDPGGRQLKVRDRNFQLRQNLYLVGFGKAVLGMAAAAEELLGQHLVQGVISVPKGIRAAPIPPVTLEEKQTLTRLLAARGATIQELNTIRKALSQLKGGGLAQAAYPAQVVSLILSDVVGDPVEVIASGPTVASSHNVQDCLHILNRYGLRAALPRSVKTVLSRADSDPHGPHTCGHVLNVIIGSNVLALAEAQRQAEALGYQAVVLSAAMQGDVKSMAQFYGLLAHVARTRLTPSMAGASVEEDAQLHELAAELQIPDLQLEEALETMAWGRGPVCLLAGGEPTVQLQGSGRGGRNQELALRVGAELRRWPLGPIDVLFLSGGTDGQDGPTEAAGAWVTPELASQAAAEGLDIATFLAHNDSHTFFCCLQGGAHLLHTGMTGTNVMDTHLLFLRPR

SEQ ID NO: 240817 - protein, 523 aa, Artificial Sequence
  derived and/or modified sequence
MAAALQVLPRLARAPLHPLLWRGSVARLASSMALAEQARQLFESAVGAVLPGPMLHRALSLDPGGRQLKVRDRNFQLRQNLYLVGFGKAVLGMAAAAEELLGQHLVQGVISVPKGIRAAMERAGKQEMLLKPHSRVQVFEGAEDNLPDRDALRAALAIQQLAEGLTADDLLLVLISGGGSALLPAPIPPVTLEEKQTLTRLLAARGATIQELNTIRKALSQLKGGGLAQAAYPAQVVSLILSDVVGDPVEVIASGPTVASSHNVQDCLHILNRYGLRAALPRSVKTVLSRADSDPHGPHTCGHVLNVIIGSNVLALAEAQRQAEALGYQAVVLSAAMQGDVKSMAQFYGLLAHVARTRLTPSMAGASVEEDAQLHELAAELQIPDLQLEEALETMAWGRGPVCLLAGGEPTVQLQGSGRGGRNQELALRVGAELRRWPLGPIDVLFLSGGTDGQDGPTEAAGAWVTPELASQAAAEGLDIATFLAHNDSHTFFCCLQGGAHLLHTGMTGTNVMDTHLLFLRPR

SEQ ID NO: 240818 - protein, 283 aa, Artificial Sequence
  derived and/or modified sequence
MELLLSQSCIWWPMVGEGRTIISCGIKAMERSGNYLIWLQKGEMLLKPHSRVQVFEGAEDNLPDRDALRAALAIQQLAEGLTADDLLLVLISGGGSALLPAPIPPVTLEEKQTLTRLLAARGATIQELNTIRKALSQLKGGGLAQAAYPAQVVSLILSDVVGDPVEVIASGPTVASSHNVQDCLHILNRYGLRAALPRSVKTVLSRADSDPHGPHTCGHVLNVIIGSNVLALAEAQRQAEALGYQAVVLSAAMQGWGTPAAHRDDRYQCHGHPPLVPAASVMA

SEQ ID NO: 240819 - protein, 240 aa, Artificial Sequence
  derived and/or modified sequence
MLLKPHSRVQVFEGAEDNLPDRDALRAALAIQQLAEGLTADDLLLVLISGGGSALLPAPIPPVTLEEKQTLTRLLAARGATIQELNTIRKALSQLKGGGLAQAAYPAQVVSLILSDVVGDPVEVIASGPTVASSHNVQDCLHILNRYGLRAALPRSVKTVLSRADSDPHGPHTCGHVLNVIIGSNVLALAEAQRQAEALGYQAVVLSAAMQGWGTPAAHRDDRYQCHGHPPLVPAASVMA

SEQ ID NO: 240820 - protein, 205 aa, Artificial Sequence
  derived and/or modified sequence
MAAALQVLPRLARAPLHPLLWRGSVARLASSMALAEQARQLFESAVGAVLPGPMLHRALSLDPGGRQLKVRDRNFQLRQNLYLVGFGKAVLGMAAAAEELLGQHLVQGVISVPKGIRAAMERAGKQEMLLKPHSRVQVFEGAEDNLPDRDALRAALAIQQLAEGLTADDLLLVLISGWGTPAAHRDDRYQCHGHPPLVPAASVMA

SEQ ID NO: 240821 - DNA, 1104 bp, Artificial Sequence
  derived and/or modified sequence
atggctgccgctttgcaggtgctgcctcggctcgcacgcgcgcctctgcacccattgctgtggcgaggctctgtcgcgagactggcatcatccatggctttggcagagcaggctaggcagttatttgaatccgccgtcggcgctgtccttcccgggcccatgctccaccgcgcactgtccctggaccccggcggaaggcagttaaaagtgcgcgaccgtaattttcagctcagacagaacctctacctcgtcggtttcggcaaagcggtcctaggaatggctgccgcagctgaagaactactgggtcaacaccttgttcaaggagtaatcagcgtgcctaaagggattagggccgcaatggagagggctgggaagcaggaaatgctgttgaaaccccattcccgggtccaggtgtttgagggagccgaagacaacctacctgatcgcgatgccctgagagcagcacttgctatccagcagctagcagagggactgaccgcagatgacctgctacttgttttgatatctggcggtggaagcgcccttctcccagccccgattccacctgttaccctggaggaaaaacagacacttacaagacttttggcagccaggggggccactatccaggaacttaacaccatacgaaaagcgctatctcagctaaagggagggggcttggcacaagctgcctaccccgcacaggtggtttcactaatcctctcggacgtggtgggtgacccagttgaggtgattgccagcggcccaaccgtggcctcatctcacaatgttcaggactgcctccacatccttaaccgttacggccttagagcagctctgccccgcagcgtgaagactgtgctttctagagccgacagcgatcctcatgggccacacacttgtggccacgttcttaacgtcataatagggtctaatgtcctggccctggctgaggcacagagacaagcggaagccttaggttatcaagctgtcgtcctgtctgcggccatgcaggggtgggggactcccgctgcccacagagatgacaggtatcagtgtcacggacacccaccgctggtgcctgccgccagtgtaatggcctag

SEQ ID NO: 240822 - DNA, 1374 bp, Artificial Sequence
  derived and/or modified sequence
atggctgcagcactccaggtactgccccggctcgctcgcgccccccttcatccattgctctggagaggttcagttgcaagacttgcctcgagtatggctcttgccgagcaggctcggcaactttttgaatcagcagtcggcgctgttctgcccgggccaatgctgcaccgcgccttgagcctggaccctggggggagacagttgaaggtaagggaccgtaattttcagctgcgccagaatctctatttagtgggatttggaaaagctgtcttaggtatggcagctgccgcagaggagctacttgggcagcacctggtgcagggagtgatttctgtgcctaaagggattcgcgccgcaccaatccccccagtaactctggaggaaaaacagaccctcacccggttgttggccgcccgcggagcgactattcaagaactcaatactattcgcaaggcattgtctcagctgaaggggggcgggctggcccaagccgcgtatcctgctcaggttgtcagtctgattctgtcagacgtcgttggggatccagtggaggtgatcgccagtgggccgacagtggccagctcacataatgtgcaggattgtcttcacattttgaacaggtatggcctccgcgccgccctaccacgatccgtgaaaacagtcctgtctagagccgattcagatccccacggacctcatacatgtgggcacgtgctgaatgtaataataggatcaaatgtgttagcactggccgaggctcagcgtcaagcagaggctttaggatatcaggccgtggtgttatccgctgctatgcagggagatgtaaagtccatggcccagttctatggcctcttggctcacgtggcccggactaggctaactcccagtatggcgggggcctcagtggaggaggacgcgcagctacatgaactggcagcagaacttcaaattcctgatctgcaactagaggaagctctggagaccatggcttggggtcgtggtcctgtatgtctcctggctgggggcgaacctacagtccaactccagggcagcggaagggggggacgcaaccaggaactcgccctcagggtgggagcagaattgagacgctggccactgggccctatcgatgtcctgtttctttctgggggcacggacggtcaggacggccccaccgaagccgccggggcctgggtgacgcccgaactcgcaagtcaggcagccgccgagggactcgatatcgccacctttctggcacacaatgatagccatacctttttctgctgcttgcagggtggtgctcaccttctgcacacaggaatgaccggcactaatgttatggatacacaccttctgttcctcaggcccagatag

SEQ ID NO: 240823 - DNA, 1572 bp, Artificial Sequence
  derived and/or modified sequence
atggcagctgcactgcaggtgctccctaggcttgctagggcgccgctccatcccctgctatggcgtggctcagtggctcgacttgccagctccatggcgttggcagagcaagcccgtcagctttttgaaagcgccgtcggggcagtactgcccggacccatgctgcaccgagccctgagtctggatcctgggggccgccagttgaaggtgagagaccgcaacttccagctccgccaaaatctatacctcgtggggtttggaaaggccgtgctggggatggctgccgccgccgaggaattgctgggccagcatttggtgcagggagtgatcagtgtacccaaaggaattcgggccgcaatggagagggcagggaaacaggagatgcttcttaaacctcattctagggtgcaagttttcgagggtgcagaagacaacctcccagatagagacgccctgcgggccgccctggccatccagcaacttgccgagggcctgaccgcagacgacctcctcctggtcttgatcagcggcggcggctccgcactactgccggcacctatcccccccgtcaccctagaagagaagcagactcttaccaggcttctggctgcgaggggggcgactatacaggagttgaacactataaggaaggcgttgtctcaactcaagggaggtggacttgcccaggctgcgtatcctgcgcaggtagtttccttgatcctgtctgatgtcgtgggagaccccgttgaagtaatcgcctccggacctacagtggccagttcccacaacgtgcaggactgtctgcatattctcaatcgatacggtctacgcgctgcgctgccacggagcgtgaaaactgtattgtcccgtgccgacagtgaccctcatggccctcacacatgtggacacgtgttaaatgtgattattgggtctaacgtactggccttagccgaggcgcaaagacaggctgaggcacttggataccaggccgttgttctgtccgcggccatgcagggggatgtgaaaagcatggcacaattttatggtcttctggcccacgtggcaaggaccagactcactccttcaatggctggcgcgtccgtggaggaagatgctcagctccatgaactggccgccgagctgcagatccctgacctgcagcttgaagaagccctcgagacgatggcctgggggagaggtcccgtgtgcctgctggccggtggcgagcctaccgtgcagctgcagggatcagggagggggggacgcaatcaggagctggccctgagagttggcgccgaactgcgccgctggccactggggccaatcgatgtgctctttctctcaggcggcacagatggacaagatggcccgactgaagcagccggcgcctgggtgacgcccgagctggcatcacaagccgcggccgaggggctcgatattgccacattcctggcccataacgattcccacacgtttttctgttgtctgcagggaggagctcaccttcttcacactggaatgactggcaccaacgtaatggacacccacctgttgttcctcaggccaaggtag

SEQ ID NO: 240824 - DNA, 852 bp, Artificial Sequence
  derived and/or modified sequence
atggaacttctcttgagtcagtcctgcatctggtggcccatggtgggggaaggtcgcactatcatcagttgtggcattaaagctatggaaagatccggcaactacttgatttggctgcagaagggcgagatgctgctgaagccgcatagtcgggtgcaggtctttgagggagcggaagacaatctcccggatcgcgacgctctccgcgctgccctggctatccaacagttagccgagggtctgactgcagatgacctgctgctggtactgataagcggcggggggtccgccctcttacccgcaccgatcccgcctgtgaccctggaagagaagcagaccctcacccggctgcttgccgcacgaggcgccaccattcaggagctcaataccatccggaaagctctgtcccagctgaaaggaggcggactggcacaggcggcatatccagcccaggtagtgtcactgatcctttccgatgttgtgggtgaccccgtggaagtgattgccagtgggcctacagtcgcgagttcgcataatgtgcaggactgtcttcatattttaaataggtacggcctgcgtgcggctttgccacggtccgttaagacagtcctcagtcgcgctgacagcgatccacacggcccacacacatgcgggcatgtactgaacgtgattatcggtagcaatgtacttgccctggccgaggcacaaaggcaagctgaggctctcggttatcaagccgtggtactgtcagctgctatgcaggggtgggggactcctgctgcacacagagacgacagataccaatgtcacgggcaccccccgctggtgccagccgcaagcgtcatggcctag

SEQ ID NO: 240825 - DNA, 723 bp, Artificial Sequence
  derived and/or modified sequence
atgctgctgaagccacatagtcgggtgcaagtgttcgaaggagcggaggacaacctgcccgatcgggatgctctccgagccgcgctcgccattcagcagctggctgaggggctgacagcggacgatctcctgctggtactcatttccggaggcggttcggcgcttttgccggctccaattccccccgtgaccctcgaggagaaacagactttgactaggctgctggcggccagaggcgccactatccaggagctcaataccattcggaaggccctaagccaactgaaaggtggcggcctggcccaggcggcatatccggcccaggtggtctccctgatcctgagcgatgttgtgggggaccccgtcgaagtgattgcaagcgggcctaccgtggcaagttcccacaacgttcaggactgtcttcatatactaaatcgctatggactgagggccgccctgcctcgtagtgtcaaaaccgtgctttccagggccgactccgaccctcatggcccacacacctgcggacacgtgctgaatgtcataatcggctccaacgtgctggccttggccgaggctcaaaggcaggccgaggccctggggtaccaggccgttgttctgtccgccgctatgcagggctggggcacccccgcagcccatcgcgacgatcgatatcagtgccatggacacccacctctcgtccctgctgcatcggtcatggcttag

SEQ ID NO: 240826 - DNA, 1200 bp, Artificial Sequence
  derived and/or modified sequence
caccccctagtacttccgttctccagcgctgggcaccgcggccggagctgtgggctggcagccatgggtgccaggcagtgctgagagcagtggggcatggctgcagccctgcaggtcctgccccgcttggcccgagcccccttgcatccactcctctggcggggctcagtggcccgtctggccagcagcatggccttggcagagcaggccaggcagctgtttgagagtgctgtaggtgcagtgctgccgggccccatgctgcaccgggcactatccttggaccctggtggcagacagctgaaggtgcgggaccggaactttcagctgaggcaaaacctctacctggtgggctttggcaaggctgtgctgggtatggcagctgcagctgaggaactactgggccagcatcttgtgcagggcgtgatcagcgttcccaaggggatccgtgctgccatggagcgtgccggcaagcaggagatgctgctgaagccacatagccgtgtccaggtattcgagggtgcggaggacaacctcccggaccgcgatgcgctgcgggctgcactggccatccagcaactggctgagggactcacagctgatgacctgctgctcgtgctgatctcaggtgggggttcagctctgctgcctgcccccatcccacctgtcacactggaggagaagcagacactcactagactgctggcagcccgtggagccaccatccaggagttgaacaccattcggaaggccctgtcccagctcaagggtggggggctggctcaggccgcctaccctgcccaggtggtgagcctcatcctgtcagatgtggtgggggaccctgtggaggtgattgccagtggccccaccgtggccagttcccacaatgtgcaagattgcctgcatatcctcaatcgctacggcctccgtgcagccctgccacgttctgtgaagactgtgctgtctcgggccgactctgacccccatgggccacacacctgtggccatgtcctgaatgtgatcattggctctaatgtgctggcgctagctgaggcccagcggcaggccgaggcactgggctaccaggctgtggtgctgagtgcagccatgcaagggtggggcacacctgctgcacacagggatgacaggtaccaatgtcatggacacccacctcttgttcctgcggcctcggtgatggcatag

SEQ ID NO: 240827 - DNA, 3622 bp, Artificial Sequence
  derived and/or modified sequence
caccccctagtacttccgttctccagcgctgggcaccgcggccggagctgtgggctggcagccatgggtgccaggcagtgctgagagcagtggggcatggctgcagccctgcaggtcctgccccgcttggcccgagcccccttgcatccactcctctggcggggctcagtggcccgtctggccagcagcatggccttggcagagcaggccaggcagctgtttgagagtgctgtaggtgcagtgctgccgggccccatgctgcaccgggcactatccttggaccctggtggcagacagctgaaggtgcgggaccggaactttcagctgaggcaaaacctctacctggtgggctttggcaaggctgtgctgggtatggcagctgcagctgaggaactactgggccagcatcttgtgcagggcgtgatcagcgttcccaaggggatccgtgctgccatggagcgtgccggcaagcaggagatgctgctgaagccacatagccgtgtccaggtattcgagggtgcggaggacaacctcccggaccgcgatgcgctgcgggctgcactggccatccagcaactggctgagggactcacagctgatgacctgctgctcgtgctgatctcaggtggtgagcctcatcctgtcagatgtggtgggggaccctgtggaggtgattgccagtggccccaccgtggccagttcccacaatgtgcaagattgcctgcatatcctcaatcgctacggcctccgtgcagccctgccacgttctgtgaagactgtgctgtctcgggccgactctgacccccatgggccacacacctgtggccatgtcctgaatgtgatcattggctctaatgtgctggcgctagctgaggcccagcggcaggccgaggcactgggctaccaggctgtggtgctgagtgcagccatgcaaggtgatgtaaaaagtatggcccagttctacgggctgctggcccatgtggctagaacccgcctcaccccatccatggctggggcttctgtggaggaagatgcacagctccatgagctggcagctgagcttcagatcccagacctgcagctggaggaggctctggagaccatggcatggggaaggggcccagtctgcctgctggctggtggcgagcccacagtacagctgcagggctcgggcaggggtggccggaaccaggaactggccctgcgtgttggagcagagttgagaaggtggccgctggggccgatagatgtgctgtttttgagcggtggcaccgatgggcaggatgggcccacagaggctgctggggcctgggtcacacctgagcttgccagccaggctgcagctgagggcctggacatagccaccttcctagcccacaatgactcacataccttcttctgctgcctccagggtggggcacacctgctgcacacagggatgacaggtaccaatgtcatggacacccacctcttgttcctgcggcctcggtgatggcataggtcacattttgggagttcagaggaggcctacaagggcaaggtcagatggcagagcaaggttggtcctcagggcctctctaagccttagggcccctcctctccttggccttggctgtttggttaactgtcaccttccactcagggcctctgctctatatctattcccttccagccagactggcagatgggggcttccccctacccctgaggatgaggacaagcccctcggccagttcagcgttcccgtgcttctcccttgggcagcctctctcttgagcccctcaccctgtttctttctgtgaagcgagaatgtctgaaaataaataggaccatgccatgggttctcagtgcgccttccctcagagtgaggcctcacgggggagccgctgggaggggagcgtggtacggctgcagccacagtaccagggcctggcaggactcttaacacccctctactgggctgggtacgtgcaggatgtgcctcgcataacgggagcctgtgcccatccctctggagtgtgtgagggttgagcttggctcctgacagctttgatgtgcgtgagcagagaccccagggaggacaggcctaaagactgcagtctggggtgaccagccacccacccacccaaccatgactccaccatggcactgtcaccatggcttctccagcctcagcttgtaggcctcgttggatggatgtcctttctgtctttggacagcccttagccacatactgcacttctggttgagctgaagtttgtcccaccccccagtgctgtttccttgtgacagcccttgtcctaggctgaacatccctagttccttcagccactcctctggggaccaagtccagaccctgaagtcagcccttcagtgggggtcccagcactgggatggtgggtccagccagtgatgaggtccagtgacccacacctcttcctgtgaccactggcgggagaagaggcaagtgggaatagaggaacggctgtgttggcctggccagcagcctgggttgagagagggaggtgccactgtcctgcctccttttgagcccccttgctcagtgtcagaaccctccgctggctgtccccgccgtgcgccacggctccaatccctatatgagtgagcagtagaatcacataggaataaaaagccatagagaacagcgaggcctggggctgctcttgcaggcacttcttccaccccaaccctcccctcctccctgagggtgtggaggggccctgggccagggctggcaggactttcccctgggaagggtttcccttccccacctgggctctgggcagcctagcttgcagacagttcatgacctgggggcctggctcacacagggcaggctggagattgggagggaggtaaacgtggtaagcgggctctggggaccagggaggtttaggaaaaggggagcttgcaccccactgggatgcgcaggcaccgcttcctttccttctgtgctggcatggagttcctgctgactagggtcacagtctctggggttatggtgatcctcgcatgatcctgtgccgtggtgctcctctggcagcgtctacatgtagcctgttcctgcctcagtccttgctcttgggagcatgagtattggcactgggttccaagttccaggcaaaagcaggataggagagctggggcaggggctgcaggagctgagggcctggcagccatgtccccagtgtgtgtgtgggtggtaggtgtgtgagtatacagacgttggtgttggcgtactcagagtgggaatgcatctctgagtgtacacatagatacttagtacagggcacatgactccctgcatccctgctgagggctttgggtatggataggatcttgcaggaggttccccctgctctacattgaccccttccctatacttctgtttgtaggggctgggaggccagggcccggattggaccccatagggccaaatggtctgtgagcctaacccgttagatttgctcactggataccccagagataagaaaggatgtatttggccacagtctaaatgctgagatgagaaaaccctgcacagtgaatgttttgataggattcattacttgctccataaatgtcaattttggatcattga

SEQ ID NO: 240828 - DNA, 3504 bp, Artificial Sequence
  derived and/or modified sequence
atggctgcagccctgcaggtcctgccccgcttggcccgagcccccttgcatccactcctctggcggggctcagtggcccgtctggccagcagcatggccttggcagagcaggccaggcagctgtttgagagtgctgtaggtgcagtgctgccgggccccatgctgcaccgggcactatccttggaccctggtggcagacagctgaaggtgcgggaccggaactttcagctgaggcaaaacctctacctggtgggctttggcaaggctgtgctgggtatggcagctgcagctgaggaactactgggccagcatcttgtgcagggcgtgatcagcgttcccaaggggatccgtgctgcccccatcccacctgtcacactggaggagaagcagacactcactagactgctggcagcccgtggagccaccatccaggagttgaacaccattcggaaggccctgtcccagctcaagggtggggggctggctcaggccgcctaccctgcccaggtggtgagcctcatcctgtcagatgtggtgggggaccctgtggaggtgattgccagtggccccaccgtggccagttcccacaatgtgcaagattgcctgcatatcctcaatcgctacggcctccgtgcagccctgccacgttctgtgaagactgtgctgtctcgggccgactctgacccccatgggccacacacctgtggccatgtcctgaatgtgatcattggctctaatgtgctggcgctagctgaggcccagcggcaggccgaggcactgggctaccaggctgtggtgctgagtgcagccatgcaaggtgatgtaaaaagtatggcccagttctacgggctgctggcccatgtggctagaacccgcctcaccccatccatggctggggcttctgtggaggaagatgcacagctccatgagctggcagctgagcttcagatcccagacctgcagctggaggaggctctggagaccatggcatggggaaggggcccagtctgcctgctggctggtggcgagcccacagtacagctgcagggctcgggcaggggtggccggaaccaggaactggccctgcgtgttggagcagagttgagaaggtggccgctggggccgatagatgtgctgtttttgagcggtggcaccgatgggcaggatgggcccacagaggctgctggggcctgggtcacacctgagcttgccagccaggctgcagctgagggcctggacatagccaccttcctagcccacaatgactcacataccttcttctgctgcctccagggtggggcacacctgctgcacacagggatgacaggtaccaatgtcatggacacccacctcttgttcctgcggcctcggtgatggcataggtcacattttgggagttcagaggaggcctacaagggcaaggtcagatggcagagcaaggttggtcctcagggcctctctaagccttagggcccctcctctccttggccttggctgtttggttaactgtcaccttccactcagggcctctgctctatatctattcccttccagccagactggcagatgggggcttccccctacccctgaggatgaggacaagcccctcggccagttcagcgttcccgtgcttctcccttgggcagcctctctcttgagcccctcaccctgtttctttctgtgaagcgagaatgtctgaaaataaataggaccatgccatgggttctcagtgcgccttccctcagagtgaggcctcacgggggagccgctgggaggggagcgtggtacggctgcagccacagtaccagggcctggcaggactcttaacacccctctactgggctgggtacgtgcaggatgtgcctcgcataacgggagcctgtgcccatccctctggagtgtgtgagggttgagcttggctcctgacagctttgatgtgcgtgagcagagaccccagggaggacaggcctaaagactgcagtctggggtgaccagccacccacccacccaaccatgactccaccatggcactgtcaccatggcttctccagcctcagcttgtaggcctcgttggatggatgtcctttctgtctttggacagcccttagccacatactgcacttctggttgagctgaagtttgtcccaccccccagtgctgtttccttgtgacagcccttgtcctaggctgaacatccctagttccttcagccactcctctggggaccaagtccagaccctgaagtcagcccttcagtgggggtcccagcactgggatggtgggtccagccagtgatgaggtccagtgacccacacctcttcctgtgaccactggcgggagaagaggcaagtgggaatagaggaacggctgtgttggcctggccagcagcctgggttgagagagggaggtgccactgtcctgcctccttttgagcccccttgctcagtgtcagaaccctccgctggctgtccccgccgtgcgccacggctccaatccctatatgagtgagcagtagaatcacataggaataaaaagccatagagaacagcgaggcctggggctgctcttgcaggcacttcttccaccccaaccctcccctcctccctgagggtgtggaggggccctgggccagggctggcaggactttcccctgggaagggtttcccttccccacctgggctctgggcagcctagcttgcagacagttcatgacctgggggcctggctcacacagggcaggctggagattgggagggaggtaaacgtggtaagcgggctctggggaccagggaggtttaggaaaaggggagcttgcaccccactgggatgcgcaggcaccgcttcctttccttctgtgctggcatggagttcctgctgactagggtcacagtctctggggttatggtgatcctcgcatgatcctgtgccgtggtgctcctctggcagcgtctacatgtagcctgttcctgcctcagtccttgctcttgggagcatgagtattggcactgggttccaagttccaggcaaaagcaggataggagagctggggcaggggctgcaggagctgagggcctggcagccatgtccccagtgtgtgtgtgggtggtaggtgtgtgagtatacagacgttggtgttggcgtactcagagtgggaatgcatctctgagtgtacacatagatacttagtacagggcacatgactccctgcatccctgctgagggctttgggtatggataggatcttgcaggaggttccccctgctctacattgaccccttccctatacttctgtttgtaggggctgggaggccagggcccggattggaccccatagggccaaatggtctgtgagcctaacccgttagatttgctcactggataccccagagataagaaaggatgtatttggccacagtctaaatgctgagatgagaaaaccctgcacagtgaatgttttgataggattcattacttgctccataaatgtcaattttggatcattga

SEQ ID NO: 240829 - DNA, 1982 bp, Artificial Sequence
  derived and/or modified sequence
cgcggccggagctgtgggctggcagccatgggtgccaggcagtgctgagagcagtggggcatggctgcagccctgcaggtcctgccccgcttggcccgagcccccttgcatccactcctctggcggggctcagtggcccgtctggccagcagcatggccttggcagagcaggccaggcagctgtttgagagtgctgtaggtgcagtgctgccgggccccatgctgcaccgggcactatccttggaccctggtggcagacagctgaaggtgcgggaccggaactttcagctgaggcaaaacctctacctggtgggctttggcaaggctgtgctgggtatggcagctgcagctgaggaactactgggccagcatcttgtgcagggcgtgatcagcgttcccaaggggatccgtgctgccatggagcgtgccggcaagcaggagatgctgctgaagccacatagccgtgtccaggtattcgagggtgcggaggacaacctcccggaccgcgatgcgctgcgggctgcactggccatccagcaactggctgagggactcacagctgatgacctgctgctcgtgctgatctcaggtgggggttcagctctgctgcctgcccccatcccacctgtcacactggaggagaagcagacactcactagactgctggcagcccgtggagccaccatccaggagttgaacaccattcggaaggccctgtcccagctcaagggtggggggctggctcaggccgcctaccctgcccaggtggtgagcctcatcctgtcagatgtggtgggggaccctgtggaggtgattgccagtggccccaccgtggccagttcccacaatgtgcaagattgcctgcatatcctcaatcgctacggcctccgtgcagccctgccacgttctgtgaagactgtgctgtctcgggccgactctgacccccatgggccacacacctgtggccatgtcctgaatgtgatcattggctctaatgtgctggcgctagctgaggcccagcggcaggccgaggcactgggctaccaggctgtggtgctgagtgcagccatgcaaggtgatgtaaaaagtatggcccagttctacgggctgctggcccatgtggctagaacccgcctcaccccatccatggctggggcttctgtggaggaagatgcacagctccatgagctggcagctgagcttcagatcccagacctgcagctggaggaggctctggagaccatggcatggggaaggggcccagtctgcctgctggctggtggcgagcccacagtacagctgcagggctcgggcaggggtggccggaaccaggaactggccctgcgtgttggagcagagttgagaaggtggccgctggggccgatagatgtgctgtttttgagcggtggcaccgatgggcaggatgggcccacagaggctgctggggcctgggtcacacctgagcttgccagccaggctgcagctgagggcctggacatagccaccttcctagcccacaatgactcacataccttcttctgctgcctccagggtggggcacacctgctgcacacagggatgacaggtaccaatgtcatggacacccacctcttgttcctgcggcctcggtgatggcataggtcacattttgggagttcagaggaggcctacaagggcaaggtcagatggcagagcaaggttggtcctcagggcctctctaagccttagggcccctcctctccttggccttggctgtttggttaactgtcaccttccactcagggcctctgctctatatctattcccttccagccagactggcagatgggggcttccccctacccctgaggatgaggacaagcccctcggccagttcagcgttcccgtgcttctcccttgggcagcctctctcttgagcccctcaccctgtttctttctgtgaagcgagaatgtctgaaaataaataggaccatgccatgggt

SEQ ID NO: 240830 - DNA, 889 bp, Artificial Sequence
  derived and/or modified sequence
gcagaatggaactcttgctaagccagagctgtatttggtggcccatggtgggagagggaagaacaataataagttgtggaataaaagccatggagaggagcgggaattacttaatctggctccagaagggggagatgctgctgaagccacatagccgtgtccaggtattcgagggtgcggaggacaacctcccggaccgcgatgcgctgcgggctgcactggccatccagcaactggctgagggactcacagctgatgacctgctgctcgtgctgatctcaggtgggggttcagctctgctgcctgcccccatcccacctgtcacactggaggagaagcagacactcactagactgctggcagcccgtggagccaccatccaggagttgaacaccattcggaaggccctgtcccagctcaagggtggggggctggctcaggccgcctaccctgcccaggtggtgagcctcatcctgtcagatgtggtgggggaccctgtggaggtgattgccagtggccccaccgtggccagttcccacaatgtgcaagattgcctgcatatcctcaatcgctacggcctccgtgcagccctgccacgttctgtgaagactgtgctgtctcgggccgactctgacccccatgggccacacacctgtggccatgtcctgaatgtgatcattggctctaatgtgctggcgctagctgaggcccagcggcaggccgaggcactgggctaccaggctgtggtgctgagtgcagccatgcaagggtggggcacacctgctgcacacagggatgacaggtaccaatgtcatggacacccacctcttgttcctgcggcctcggtgatggcataggtcacattttgggagttcagaggaggcctaca

SEQ ID NO: 240831 - DNA, 992 bp, Artificial Sequence
  derived and/or modified sequence
ccgttctccagcgctgggcaccgcggccggagctgtgggctgggagatgctgctgaagccacatagccgtgtccaggtattcgagggtgcggaggacaacctcccggaccgcgatgcgctgcgggctgcactggccatccagcaactggctgagggactcacagctgatgacctgctgctcgtgctgatctcaggtgggggttcagctctgctgcctgcccccatcccacctgtcacactggaggagaagcagacactcactagactgctggcagcccgtggagccaccatccaggagttgaacaccattcggaaggccctgtcccagctcaagggtggggggctggctcaggccgcctaccctgcccaggtggtgagcctcatcctgtcagatgtggtgggggaccctgtggaggtgattgccagtggccccaccgtggccagttcccacaatgtgcaagattgcctgcatatcctcaatcgctacggcctccgtgcagccctgccacgttctgtgaagactgtgctgtctcgggccgactctgacccccatgggccacacacctgtggccatgtcctgaatgtgatcattggctctaatgtgctggcgctagctgaggcccagcggcaggccgaggcactgggctaccaggctgtggtgctgagtgcagccatgcaagggtggggcacacctgctgcacacagggatgacaggtaccaatgtcatggacacccacctcttgttcctgcggcctcggtgatggcataggtcacattttgggagttcagaggaggcctacaagggcaaggtcagatggcagagcaagccagactggcagatgggggcttccccctacccctgaggatgaggacaagcccctcggccagttcagcgttcccgtgcttctcccttgggcagcctctctcttgagcccctcaccctgtttctttctgtgaagcgagaatgtctgaaaataaataggaccatgcca

SEQ ID NO: 240832 - DNA, 1304 bp, Artificial Sequence
  derived and/or modified sequence
gtgccaggcagtgctgagagcagtggggcatggctgcagccctgcaggtcctgccccgcttggcccgagcccccttgcatccactcctctggcggggctcagtggcccgtctggccagcagcatggccttggcagagcaggccaggcagctgtttgagagtgctgtaggtgcagtgctgccgggccccatgctgcaccgggcactatccttggaccctggtggcagacagctgaaggtgcgggaccggaactttcagctgaggcaaaacctctacctggtgggctttggcaaggctgtgctgggtatggcagctgcagctgaggaactactgggccagcatcttgtgcagggcgtgatcagcgttcccaaggggatccgtgctgccatggagcgtgccggcaagcaggagatgctgctgaagccacatagccgtgtccaggtattcgagggtgcggaggacaacctcccggaccgcgatgcgctgcgggctgcactggccatccagcaactggctgagggactcacagctgatgacctgctgctcgtgctgatctcaggtggtgagcctcatcctgtcagatgtggtgggggaccctgtggaggtgattgccagtggccccaccgtggccagttcccacaatgtgcaagattgcctgcatatcctcaatcgctacggcctccgtgcagccctgccacgttctgtgaagactgtgctgtctcgggccgactctgacccccatgggccacacacctgtggccatgtcctgaatgtgatcattggctctaatgtgctggcgctagctgaggcccagcggcaggccgaggcactgggctaccaggctgtggtgctgagtgcagccatgcaaggtgatgtaaaaagtatggcccagttctacgggctgctggcccatgtggctagaacccgcctcaccccatccatggctggggcttctgtggaggaagatgcacagctccatgagctggcagctgagcttcagatcccagacctgcagctggaggaggctctggagaccatggcatggggaaggggcccagtctgcctgctggctggtggcgagcccacagtacagctgcagggctcgggcaggggtggccggaaccaggaactggccctgcgtgttggagcagagttgagaaggtggccgctggggccgatagatgtgctgtttttgagcggtggcaccgatgggcaggatgggcccacagaggctgctggggcctgggtcacacctgagcttgccagccaggctgcagctgagggcctggacatagccaccttcct

SEQ ID NO: 240833 - DNA, 1104 bp, Artificial Sequence
  derived and/or modified sequence
atggctgctgccctgcaggtgctgccccggctggcccgggcccccctgcaccccctgctgtggaggggctctgtggcccggctggccagctccatggccctggccgagcaggcccggcagctgtttgagagcgctgtgggcgctgtgctgcccggccccatgctgcaccgggccctgagcctggaccccggcggccggcagctgaaggtgcgggacaggaacttccagctgcggcagaacctgtacctggtgggctttgggaaggctgtgctgggcatggctgctgctgctgaggagctgctgggccagcacctggtgcagggcgtcatctctgtgcccaagggcatccgggccgccatggagagagctgggaagcaggagatgctgctgaagccccacagccgggtgcaggtgtttgaaggagctgaggacaacctgcctgacagagatgccctgcgggccgccctggccatccagcagctggccgagggcctgacagcagatgacctgctgctggtgctgatcagcggcggcggcagcgccctgctgcctgcccccatcccccctgtgaccctggaggagaagcagaccctgacccggctgctggccgcccggggggccaccatccaggagctgaacaccatcaggaaggccctgagccagctgaagggcggcggcctggcccaggccgcctacccagcccaggtggtgtccctcatcctgagtgatgtggtgggggaccctgtggaggtgattgccagcggccccaccgtggccagcagccacaacgtgcaggactgcctgcacatcctgaacagatatggcctgcgggccgccctgcccaggtctgtgaagacagtgctgagcagagctgacagcgacccccacggcccccacacctgtggccacgtgctgaatgtcatcatcggcagcaatgtgctggccctggccgaggcccagaggcaggccgaggccctgggctaccaggccgtggtgctgtctgctgccatgcagggctggggcaccccagctgcccacagagatgaccgctaccagtgccacggccacccccccctggtgcctgctgcctctgtgatggcctag

SEQ ID NO: 240834 - DNA, 1374 bp, Artificial Sequence
  derived and/or modified sequence
atggctgctgccctgcaggtgctgccccggctggcccgggcccccctgcaccccctgctgtggaggggctctgtggcccggctggccagctccatggccctggccgagcaggcccggcagctgtttgagagcgctgtgggcgctgtgctgcccggccccatgctgcaccgggccctgagcctggaccccggcggccggcagctgaaggtgcgggacaggaacttccagctgcggcagaacctgtacctggtgggctttgggaaggctgtgctgggcatggctgctgctgctgaggagctgctgggccagcacctggtgcagggcgtcatctctgtgcccaagggcatccgggccgcccccatcccccctgtgaccctggaggagaagcagaccctgacccggctgctggccgcccggggggccaccatccaggagctgaacaccatcaggaaggccctgagccagctgaagggcggcggcctggcccaggccgcctacccagcccaggtggtgtccctcatcctgagtgatgtggtgggggaccctgtggaggtgattgccagcggccccaccgtggccagcagccacaacgtgcaggactgcctgcacatcctgaacagatatggcctgcgggccgccctgcccaggtctgtgaagacagtgctgagcagagctgacagcgacccccacggcccccacacctgtggccacgtgctgaatgtcatcatcggcagcaatgtgctggccctggccgaggcccagaggcaggccgaggccctgggctaccaggccgtggtgctgtctgctgccatgcagggagatgtgaagtccatggcccagttctacggcctgctggcccacgtggcccggacccggctgacccccagcatggccggggcctctgtggaggaggatgcccagctgcacgagctggccgctgagctgcagatcccagacctgcagctggaggaggccctggagaccatggcctggggccggggccctgtgtgcctgctggccggcggggagcccaccgtgcagctgcagggcagcggccggggcggcaggaaccaggagctggccctgcgggtgggcgctgagctgcggcgctggcccctgggccccattgatgtgctcttcctgagcggcggcacagatggccaggacggccccacagaggccgccggggcctgggtgaccccagagctggccagccaggccgctgctgagggcctggacatcgccaccttcctggcccacaatgacagccacaccttcttctgctgcctgcagggcggggcccacctgctgcacacaggcatgacaggcaccaacgtgatggacacccacctgctcttcctgcggcccaggtag

SEQ ID NO: 240835 - DNA, 1572 bp, Artificial Sequence
  derived and/or modified sequence
atggctgctgccctgcaggtgctgccccggctggcccgggcccccctgcaccccctgctgtggaggggctctgtggcccggctggccagctccatggccctggccgagcaggcccggcagctgtttgagagcgctgtgggcgctgtgctgcccggccccatgctgcaccgggccctgagcctggaccccggcggccggcagctgaaggtgcgggacaggaacttccagctgcggcagaacctgtacctggtgggctttgggaaggctgtgctgggcatggctgctgctgctgaggagctgctgggccagcacctggtgcagggcgtcatctctgtgcccaagggcatccgggccgccatggagagagctgggaagcaggagatgctgctgaagccccacagccgggtgcaggtgtttgaaggagctgaggacaacctgcctgacagagatgccctgcgggccgccctggccatccagcagctggccgagggcctgacagcagatgacctgctgctggtgctgatcagcggcggcggcagcgccctgctgcctgcccccatcccccctgtgaccctggaggagaagcagaccctgacccggctgctggccgcccggggggccaccatccaggagctgaacaccatcaggaaggccctgagccagctgaagggcggcggcctggcccaggccgcctacccagcccaggtggtgtccctcatcctgagtgatgtggtgggggaccctgtggaggtgattgccagcggccccaccgtggccagcagccacaacgtgcaggactgcctgcacatcctgaacagatatggcctgcgggccgccctgcccaggtctgtgaagacagtgctgagcagagctgacagcgacccccacggcccccacacctgtggccacgtgctgaatgtcatcatcggcagcaatgtgctggccctggccgaggcccagaggcaggccgaggccctgggctaccaggccgtggtgctgtctgctgccatgcagggagatgtgaagtccatggcccagttctacggcctgctggcccacgtggcccggacccggctgacccccagcatggccggggcctctgtggaggaggatgcccagctgcacgagctggccgctgagctgcagatcccagacctgcagctggaggaggccctggagaccatggcctggggccggggccctgtgtgcctgctggccggcggggagcccaccgtgcagctgcagggcagcggccggggcggcaggaaccaggagctggccctgcgggtgggcgctgagctgcggcgctggcccctgggccccattgatgtgctcttcctgagcggcggcacagatggccaggacggccccacagaggccgccggggcctgggtgaccccagagctggccagccaggccgctgctgagggcctggacatcgccaccttcctggcccacaatgacagccacaccttcttctgctgcctgcagggcggggcccacctgctgcacacaggcatgacaggcaccaacgtgatggacacccacctgctcttcctgcggcccaggtag

SEQ ID NO: 240836 - DNA, 852 bp, Artificial Sequence
  derived and/or modified sequence
atggagctgctgctgagccagagctgcatctggtggcccatggtgggggagggccgcaccatcatcagctgtggcatcaaggccatggagaggagcggcaactacctgatctggctgcagaagggggagatgctgctgaagccccacagccgggtgcaggtgtttgaaggagctgaggacaacctgcctgacagagatgccctgcgggccgccctggccatccagcagctggccgagggcctgacagcagatgacctgctgctggtgctgatcagcggcggcggcagcgccctgctgcctgcccccatcccccctgtgaccctggaggagaagcagaccctgacccggctgctggccgcccggggggccaccatccaggagctgaacaccatcaggaaggccctgagccagctgaagggcggcggcctggcccaggccgcctacccagcccaggtggtgtccctcatcctgagtgatgtggtgggggaccctgtggaggtgattgccagcggccccaccgtggccagcagccacaacgtgcaggactgcctgcacatcctgaacagatatggcctgcgggccgccctgcccaggtctgtgaagacagtgctgagcagagctgacagcgacccccacggcccccacacctgtggccacgtgctgaatgtcatcatcggcagcaatgtgctggccctggccgaggcccagaggcaggccgaggccctgggctaccaggccgtggtgctgtctgctgccatgcagggctggggcaccccagctgcccacagagatgaccgctaccagtgccacggccacccccccctggtgcctgctgcctctgtgatggcctag

SEQ ID NO: 240837 - DNA, 723 bp, Artificial Sequence
  derived and/or modified sequence
atgctgctgaagccccacagccgggtgcaggtgtttgagggcgctgaggacaacctgcctgacagagatgccctgcgggccgccctggccatccagcagctggccgagggcctgacagcagatgacctgctgctggtgctgatcagcggcggcggcagcgccctgctgcctgcccccatcccccctgtgaccctggaggagaagcagaccctgacccggctgctggccgcccggggggccaccatccaggagctgaacaccatcaggaaggccctgagccagctgaagggcggcggcctggcccaggccgcctacccagcccaggtggtgtccctcatcctgagtgatgtggtgggggaccctgtggaggtgattgccagcggccccaccgtggccagcagccacaacgtgcaggactgcctgcacatcctgaacagatatggcctgcgggccgccctgcccaggtctgtgaagacagtgctgagcagagctgacagcgacccccacggcccccacacctgtggccacgtgctgaatgtcatcatcggcagcaatgtgctggccctggccgaggcccagaggcaggccgaggccctgggctaccaggccgtggtgctgtctgctgccatgcagggctggggcaccccagctgcccacagagatgaccgctaccagtgccacggccacccccccctggtgcctgctgcctctgtgatggcctag

SEQ ID NO: 240838 - DNA, 1104 bp, Artificial Sequence
  derived and/or modified sequence
atggccgccgccctgcaggtgctgccccggctggcccgggcccccttgcacccactcctttggcggggctcagttgcgcgcctggcctcctcaatggctctcgccgagcaggccaggcaactgttcgagtccgccgtaggggccgttctccccggtccaatgcttcaccgcgcattgtcacttgaccctggcgggcggcaactgaaagtgcgcgataggaattttcagctgcgtcagaacctgtacttggttggatttggcaaggccgttctgggcatggcagccgcagccgaggaacttctgggacagcatctggttcagggagtgatatcggtgccaaagggaatccgagctgcgatggaaagagcaggcaagcaggaaatgctcctgaagccacattcgagggtacaggtctttgagggcgccgaagacaacctcccagatagggatgctctgcgtgccgctttggctattcaacagcttgccgagggcctgaccgcagacgatctcctgctggtgttaatatctggcggtggtagcgccctcttgcctgccccaatcccccctgtaaccttagaagaaaagcaaacgctgactagactcctggcagcacgtggcgcgacaatacaggaacttaacacgatccggaaagcactgtcccagctaaagggcgggggactggcccaggcggcctatccagctcaagtagtctcactgattttgagcgacgtggtaggtgaccctgtggaggtgattgcttccggccctacagttgctagttcccacaatgtgcaggactgcctgcacatcctgaacagatacgggctgcgcgcagcactcccacggagcgtgaagaccgtgctgtctcgggccgacagcgatccgcatggacctcacacatgtggacatgtgttgaacgtgattattgggtcgaatgttctggccctcgccgaggcacagagacaggcggaggcgttgggctaccaggcagtagtattgtcagccgcaatgcagggatggggcactccagccgctcatagggatgaccgttaccaatgtcacggacaccccccactcgtccctgccgcttccgtcatggcctag

SEQ ID NO: 240839 - DNA, 1374 bp, Artificial Sequence
  derived and/or modified sequence
atggccgccgccctgcaggtgctgccccggctggcccgggcccccctccatcccctgctgtggagggggagcgtcgcacgtctggcatcttcgatggcactagcggaacaggccaggcaactgttcgaatctgccgtgggagcagtgttaccaggaccaatgctgcatagagctttgtccttagatccgggggggcgccaactgaaggtgcgtgacagaaactttcagctccggcagaacctttatcttgtcgggttcgggaaggcagtcctggggatggctgcggcagctgaagagctgctgggacagcacctggtgcagggtgtcatctcagtgcccaaaggaatccgggctgcccccataccgcctgtgacgcttgaggagaaacagacattgacccgcctcctggccgcaaggggcgccactattcaggaactcaatacaatcagaaaagctctctctcaacttaaggggggcgggctcgctcaggcagcctaccccgcgcaggtcgtctccttgatcctttctgacgtcgtcggcgaccctgtggaagtgattgcatccggacccactgttgcaagcagccacaacgtccaagactgtctgcatatcctgaatcggtacggattgcgcgcagctttgcctaggtctgtaaaaaccgtgttgtctcgagcggatagtgaccctcatggtcctcatacttgcgggcacgtacttaacgtgatcatcggttcgaatgtgctagccctggctgaggcacagcgccaggcggaagctctgggttaccaggctgttgtcctttcagcagccatgcagggcgatgtgaaatctatggcacaattctatggacttctggcgcacgtcgcacggacccggcttacaccttccatggccggcgcttccgtcgaggaggatgcacagctgcatgagttagccgccgagctgcagattcctgatctacagctggaagaagcgttagaaaccatggcatgggggcgcggtcccgtctgcctgttagcggggggggagcctaccgtccaattacagggatccggtcgtggcgggcgtaaccaggagctcgccctgcgtgtgggggccgaacttcgaagatggcccctgggaccgattgacgttctctttttatctggagggactgacggccaagacggacctacagaggccgcaggcgcctgggtaaccccagaactggcctctcaagccgcagctgaaggacttgacattgctaccttcctcgcgcacaatgacagccatactttcttctgctgtctgcagggcggcgcccatctcctgcacacaggcatgactggcaccaacgtgatggatacccacctgttgttccttcggccgcgatag

SEQ ID NO: 240840 - DNA, 1572 bp, Artificial Sequence
  derived and/or modified sequence
atggccgccgccctgcaggtgctgccccggctggcccgggcccccctgcatccccttttatggagagggtccgttgccaggctcgcatcttctatggccctggcagaacaggcccgacagttgttcgagagtgcagtgggcgctgttctcccaggaccgatgttacatcgggctctcagcctggatccgggcggaagacagcttaaagtcagggaccgcaactttcagctgagacagaatctatacctggtcgggtttggcaaagcagttctcggcatggccgcggcggcagaggagttacttggccaacacttagtgcagggcgtgatttcggtgcctaaggggattcgagccgcaatggaacgtgcagggaagcaagagatgctgttgaaaccacacagtcgtgtacaagtgtttgaaggggctgaggataacctgcctgatagagacgccttgcgggccgccctcgccatacagcaattggctgaaggactcacagccgacgaccttctgcttgtgctgatctcaggaggagggagcgcactccttcctgcccctattcctcctgtgactctggaggagaagcagactctgactagactgctggccgcacggggagctaccatacaggaactcaacaccatccgaaaagcccttagtcagctaaagggggggggcctcgcgcaggccgcctatcctgctcaagtcgtgtcccttattcttagtgacgtggttggggacccggtcgaagtcatcgcaagcggtccaacggtggcctccagccataacgttcaggactgcctgcacatccttaatagatatggccttcgggccgccttgccacgctctgtgaaaactgtactcagtagggctgattcagacccccacgggccacacacctgtggccacgtcctgaatgtcattattgggtcaaacgtcttggccttggctgaagctcagcgccaggctgaagccctggggtatcaggctgtggtcctcagcgccgctatgcagggcgatgtcaaatccatggcacagttttatggtctcctggcccatgtcgcccgaacacgcctgacaccgagcatggcgggtgcttctgtggaggaggacgctcagctgcacgagctcgctgctgagctccagatccccgacctccaactggaggaggcactggagaccatggcctgggggaggggcccagtatgcttattggcagggggcgaacctaccgtgcagcttcaaggcagtggtagaggcgggagaaaccaggaacttgccctaagagttggggcagaattacgccgctggcctttgggccctattgatgttttattcctgtcgggaggaacagacggtcaggacggcccgaccgaggctgcaggcgcctgggtgacgccggagcttgctagtcaagcagccgctgaaggattggatattgccacattcctggcacataatgacagccatacattcttctgttgtctgcaagggggtgcacatttgctgcatactgggatgaccgggacgaatgtgatggatacacatcttctcttcctcaggcctagatag

SEQ ID NO: 240841 - DNA, 852 bp, Artificial Sequence
  derived and/or modified sequence
atggagctgctgctgagccagagctgcatctggtggcccatggtgggggaaggtaggacaatcataagctgcggaatcaaggcaatggagaggtcaggtaactacctcatatggctacaaaaaggagaaatgcttttgaagcctcactcgagggtccaggtgttcgagggagctgaagacaacctgcccgaccgcgacgcactgcgtgcagcactggccatccagcaactggctgagggtctcaccgcagacgacctgctgttagtgcttatcagtggaggtggatcagcgctcctccccgctcccatcccgcctgtaacactcgaggagaagcagacccttacgaggctcctggccgcccgtggcgcaacgattcaagaattaaatactatcagaaaagccctctctcagctcaaagggggcgggctcgcacaggcggcttatcctgcacaggtggtaagcctgatcctgtctgacgtggtgggagacccggttgaagtgattgcttctgggcccactgtagcctccagccataacgtccaggactgcctgcatatcctgaaccgttatgggctgcgggctgcactccctcgttcggtcaagactgtgttgagtagagccgattcagacccacatggaccacacacctgtggtcacgttctgaatgtaattatcggctcaaatgtattggctctggccgaggcccagcgccaggccgaggcactcggatatcaagctgtcgtactgtctgctgccatgcaaggatggggcacaccagccgcccatcgcgacgataggtaccagtgtcacgggcatccccctcttgtgcctgctgcctcagttatggcctag

SEQ ID NO: 240842 - DNA, 723 bp, Artificial Sequence
  derived and/or modified sequence
atgctgctgaagccccacagccgggtgcaggtgttcgagggcgccgaggataacctccccgaccgcgatgctttgcgtgcggcactagccattcagcagcttgcggagggactaacagcagacgatctgttgctggtgctgatcagcggaggcggctccgctttgctgccggcccccatcccgcccgtgacactggaggagaagcagacgcttacgaggcttctagctgcccggggggcgacaatccaggagctgaacaccattcggaaagccttatcacagctgaaggggggaggccttgctcaggctgcttacccagctcaggtggtcagcttgattctatccgacgtcgtgggggatcctgtggaggttatcgccagtgggcctacagtggcgagcagtcacaacgtgcaggattgtctgcacatcctgaatcggtacgggctgcgcgccgcgctgcctcgctccgttaagaccgtcctctcccgggcagactccgatcctcacggacctcacacttgtggacacgtactaaacgtcataatagggagtaatgtcctggcgttggcagaagctcagcgtcaggcagaggcccttggctaccaggcagtggtgctgagtgccgcaatgcaggggtggggcacacctgcggcccaccgtgatgataggtaccaatgccacggacacccgcccctggtgcccgccgcgtccgttatggcttag

SEQ ID NO: 240843 - DNA, 1104 bp, Artificial Sequence
  derived and/or modified sequence
atggcagctgcccttcaggttctgcctagactcgctcgggctcctctacaccctctattgtggcgtggtagcgtggctaggcttgcatcaagcatggccctcgcggagcaagcaaggcagcttttcgaatctgcagttggagctgtcctccccggacccatgttgcaccgtgccctttcgctggaccccggaggcaggcagctaaaggtgagagatagaaactttcagctgaggcagaacctgtacttggtcggcttcggaaaagcagtgctggggatggcagctgcagcagaggaactgctcggccaacatctggtccagggagtgattagtgtcccgaagggcattagggcggcaatggaacgggctgggaagcaggagatgttactcaagcctcattcaagagtccaggtgtttgaaggcgctgaggataacttgccagaccgtgatgctctgagagccgctctcgcaatacaacaattggcggaaggcctcacggccgacgatctgctgttagtcctcatctcagggggaggcagcgccctattgcccgcacctattccccctgtgactctcgaagaaaagcagacattgacaagactactcgccgctaggggagccaccatacaggagttaaacactataagaaaggccctgtcccaattgaagggtggcggtctcgctcaggccgcatatcctgcgcaggtggtcagtctgatactgagtgacgtggtcggagatcctgtggaggtgatcgccagtggaccaacagttgcaagcagccataatgtgcaggattgcctccacatactgaaccgatacggtttacgcgcagcgttaccaaggagtgtcaagacagtgctctcgagagccgatagcgatccacacggccctcatacctgtggccacgtgctgaacgtaatcatcggttccaacgtactcgcattggctgaggcccagcgacaagccgaggccttgggatatcaagccgtggttctgtcagccgcaatgcagggctggggaacccctgccgctcacagagacgatcgataccaatgccatggccatcccccactggtgccagctgcctctgtgatggcctag

SEQ ID NO: 240844 - DNA, 1374 bp, Artificial Sequence
  derived and/or modified sequence
atggcagcagccctccaggtcctgccacgacttgcgcgagcccctctgcatcctctgttatggagaggctccgtggctcgcttggctagctctatggcgttagcagaacaggcgcgtcagctcttcgaatccgccgtaggcgcagtgctccctggcccaatgctacatcgcgcactctctctggatcctgggggaaggcaactgaaagttagagaccggaactttcaactgagacagaatctctacctggtaggattcggaaaggcggtgctggggatggcggcagctgctgaggagctgctgggacaacatctcgtccagggtgttatttcggtccctaaagggatccgggctgccccaattccgccagtgacgcttgaggagaagcagacccttacacggcttcttgctgcaaggggggctacaatccaagagctcaacactattcgcaaggcactttctcaactgaaagggggtggtctggcacaggccgcatatcccgcacaggtagtaagccttatcctgagcgatgtcgtaggcgacccagtggaagttattgcgagtggccctacagtggcttcctctcacaatgtacaagattgcctgcatatcttgaacagatacgggttgcgcgcagcccttcctcgtagtgtgaagaccgtgctgtcaagggcagactcagacccacatggccctcatacatgtgggcatgtactgaacgtgatcattggctccaatgtcctggctctggcagaggcccagcggcaggcagaagctctgggataccaagcagttgtgctgagcgccgctatgcagggagatgtcaagtcgatggcccagttttacggcctgcttgcccacgtggcccgaactagactcaccccctctatggccggtgcaagtgtggaggaagacgcccaactccacgaactcgcagccgagcttcaaattcctgatttgcagctggaggaagcactcgaaactatggcgtggggaagaggcccagtctgcctcctcgctgggggagagccgacagtgcaattgcaggggagcggcagaggcggaaggaatcaggagctggctctccgcgtcggcgcagaacttcgccgatggcctcttggccctatcgatgtcttattcctgtcgggaggcacggacggccaggacggccctactgaggctgccggagcttgggtgacacccgagctggctagccaagccgctgccgaaggcttagacatcgccacgtttctcgctcataatgatagccacacctttttctgttgccttcaaggcggagcgcatttattacatacaggcatgaccggaacaaatgtgatggacacacacctgctcttcctgcgaccacgatag

SEQ ID NO: 240845 - DNA, 1572 bp, Artificial Sequence
  derived and/or modified sequence
atggctgccgcactgcaggtcctgcccaggttggctagggcccctcttcatccactactctggagaggaagtgtggccagactggcgagctctatggcactggcagaacaggccaggcagctgtttgaatcagcggttggagcagtcctgccgggacccatgttgcaccgtgcattatctctggatccgggaggcaggcagttgaaagtacgcgaccgcaatttccagctgaggcaaaacctgtatctggtcggcttcggcaaagccgtgttaggtatggctgcagcggctgaagagctgcttggacagcacctggtgcaaggagtgatcagcgtgcccaaaggcatccgcgcagccatggagagggctgggaaacaggagatgctattaaagccacacagtcgggttcaggtgtttgagggtgctgaggataatctgcccgaccgcgatgccttgcgggctgccctggctattcaacagctagccgagggcctcacagcagatgatcttttgctagtgctgatttctggtggaggctctgctctactgccagcacccatcccaccagtcacactcgaggagaagcagaccctcacccggctgctggcagcgcgaggcgctactattcaggaattgaacaccattaggaaggcactgtcacagctcaagggtggcggtcttgcgcaggctgcgtacccagcccaggttgtaagtctgatccttagtgatgtagtgggcgacccggtcgaggttatcgccagtggtcccacggtcgcttcatctcacaatgtccaggattgtttgcacatcctcaaccggtatggactccgggcagccctgccccgatctgtgaaaaccgtgctgagtcgggctgactccgatccccatggcccacatacatgcggccatgtgctgaacgtaataataggctctaacgtcctggcccttgcagaggctcaaagacaggcagaggctctgggctaccaggccgttgtgctgtccgcagcaatgcagggggatgtgaagagcatggcccagttctacggactgctggcccatgttgctcgcactagacttaccccttctatggcaggggcatccgtggaagaagatgctcagttgcacgagttagcagcagaacttcagattcctgacctgcaactggaagaagccctcgaaactatggcttggggacgtggacctgtgtgtctgctcgccggaggcgagcccacggtccagttgcagggcagcggtaggggaggaagaaaccaagaactggccctgcgtgttggagcagagcttcgacgatggcctcttggccctattgatgtcctgttcctctcaggtggcaccgatggccaggatgggcctaccgaggcggctggggcatgggtgacgcccgagctcgccagtcaggccgcagccgagggcctggacattgctacgtttctggcccataacgactcccacacattcttctgctgcttgcaggggggagctcaccttctccacaccggcatgaccggaactaatgtcatggatacccatttactgttcttgagaccgaggtag

SEQ ID NO: 240846 - DNA, 852 bp, Artificial Sequence
  derived and/or modified sequence
atggaactattgcttagccagagctgtatctggtggccgatggtgggagaggggagaaccattatttcatgcggaataaaggccatggaacgatctggcaattacctgatttggctgcagaaaggagaaatgctactgaaaccccattcccgagtgcaggttttcgagggggcagaggacaacctgccggatagagatgcactaagggcagctctggctatacagcagcttgctgaaggcctcaccgcagacgaccttcttctcgtgctgattagtgggggtggctcagccctgcttcccgcacctatccccccagtgaccctggaggaaaaacaaacgcttactcgcctcttagccgcacgcggagccactatacaggaactgaacaccatccgcaaggcactgtcccaattgaaaggaggcggtctagcacaggcggcttaccccgcacaggtggtcagtctcattttgagtgacgtggttggtgacccagtcgaggtgatcgcctcagggcctaccgttgcgagttctcataatgttcaggattgcctacatatccttaacagatatgggctccgagccgctctcccgaggtccgtgaaaactgttctcagccgggctgactcagaccctcacgggcctcatacgtgcggccatgtacttaatgtgatcatcggatccaacgttcttgccctcgcagaggcccagaggcaggcagaagccctggggtaccaggccgtcgtgctgagtgcggcaatgcaaggatgggggactcctgcagcccaccgtgacgacaggtatcagtgtcatggtcatccacccttagtgcccgctgcgagcgtgatggcatag

SEQ ID NO: 240847 - DNA, 723 bp, Artificial Sequence
  derived and/or modified sequence
atgcttctgaagccccactcacgcgtgcaggtgttcgagggcgctgaagacaacctaccagacagagatgctttgagagccgcacttgcaatacagcagctcgctgagggacttacagcagatgatcttctgctggtgctgatttctgggggaggctctgctcttttgcccgctccgattcctcccgtgactctggaagagaagcagaccctgacacggctgctggcagctcggggagctaccattcaggagctgaatacgattcggaaggccctctcccagctgaaaggaggaggtctggcccaagccgcttaccctgcgcaggtggtttccctgatcctgtccgacgtggtgggggatccagtcgaggtcattgcttcaggcccaactgtggcttcttcccacaatgtgcaggattgcctccacattctgaatcggtacgggctccgggcagccctgcccagatctgtcaaaacagttctgtccagggccgatagcgatcctcacggtcctcatacctgtgggcacgtgctgaacgtgatcataggatccaacgttttggcgctcgcagaagcccagagacaagccgaggctctcgggtatcaagcagtggtcctgagcgcagccatgcagggatgggggaccccagcagcacacagagacgaccgctaccagtgccatggccacccgccacttgtgccagcggcatccgtaatggcctag

SEQ ID NO: 240848 - DNA, 1104 bp, Artificial Sequence
  derived and/or modified sequence
atggccgccgccctgcaggtgctgcccagactggccagagcccccctgcaccccctgctgtggagaggcagcgtggccagactggccagcagcatggccctggccgagcaggccagacagctgttcgagagcgccgtgggcgccgtgctgcccggccccatgctgcacagagccctgagcctggaccccggcggcagacagctgaaggtgagagacagaaacttccagctgagacagaacctgtacctggtgggcttcggcaaggccgtgctgggcatggccgccgccgccgaggagctgctgggccagcacctggtgcagggcgtgatcagcgtgcccaagggcatcagagccgccatggagagagccggcaagcaggagatgctgctgaagccccacagcagagtgcaggtgttcgagggcgccgaggacaacctgcccgacagagacgccctgagagccgccctggccatccagcagctggccgagggcctgaccgccgacgacctgctgctggtgctgatcagcggcggcggcagcgccctgctgcccgcccccatcccccccgtgaccctggaggagaagcagaccctgaccagactgctggccgccagaggcgccaccatccaggagctgaacaccatcagaaaggccctgagccagctgaagggcggcggcctggcccaggccgcctaccccgcccaggtggtgagcctgatcctgagcgacgtggtgggcgaccccgtggaggtgatcgccagcggccccaccgtggccagcagccacaacgtgcaggactgcctgcacatcctgaacagatacggcctgagagccgccctgcccagaagcgtgaagaccgtgctgagcagagccgacagcgacccccacggcccccacacctgcggccacgtgctgaacgtgatcatcggcagcaacgtgctggccctggccgaggcccagagacaggccgaggccctgggctaccaggccgtggtgctgagcgccgccatgcagggctggggcacccccgccgcccacagagacgacagataccagtgccacggccacccccccctggtgcccgccgccagcgtgatggcctag

SEQ ID NO: 240849 - DNA, 1374 bp, Artificial Sequence
  derived and/or modified sequence
atggccgccgccctgcaggtgctgcccagactggccagagcccccctgcaccccctgctgtggagaggcagcgtggccagactggccagcagcatggccctggccgagcaggccagacagctgttcgagagcgccgtgggcgccgtgctgcccggccccatgctgcacagagccctgagcctggaccccggcggcagacagctgaaggtgagagacagaaacttccagctgagacagaacctgtacctggtgggcttcggcaaggccgtgctgggcatggccgccgccgccgaggagctgctgggccagcacctggtgcagggcgtgatcagcgtgcccaagggcatcagagccgcccccatcccccccgtgaccctggaggagaagcagaccctgaccagactgctggccgccagaggcgccaccatccaggagctgaacaccatcagaaaggccctgagccagctgaagggcggcggcctggcccaggccgcctaccccgcccaggtggtgagcctgatcctgagcgacgtggtgggcgaccccgtggaggtgatcgccagcggccccaccgtggccagcagccacaacgtgcaggactgcctgcacatcctgaacagatacggcctgagagccgccctgcccagaagcgtgaagaccgtgctgagcagagccgacagcgacccccacggcccccacacctgcggccacgtgctgaacgtgatcatcggcagcaacgtgctggccctggccgaggcccagagacaggccgaggccctgggctaccaggccgtggtgctgagcgccgccatgcagggcgacgtgaagagcatggcccagttctacggcctgctggcccacgtggccagaaccagactgacccccagcatggccggcgccagcgtggaggaggacgcccagctgcacgagctggccgccgagctgcagatccccgacctgcagctggaggaggccctggagaccatggcctggggcagaggccccgtgtgcctgctggccggcggcgagcccaccgtgcagctgcagggcagcggcagaggcggcagaaaccaggagctggccctgagagtgggcgccgagctgagaagatggcccctgggccccatcgacgtgctgttcctgagcggcggcaccgacggccaggacggccccaccgaggccgccggcgcctgggtgacccccgagctggccagccaggccgccgccgagggcctggacatcgccaccttcctggcccacaacgacagccacaccttcttctgctgcctgcagggcggcgcccacctgctgcacaccggcatgaccggcaccaacgtgatggacacccacctgctgttcctgagacccagatag

SEQ ID NO: 240850 - DNA, 1572 bp, Artificial Sequence
  derived and/or modified sequence
atggccgccgccctgcaggtgctgcccagactggccagagcccccctgcaccccctgctgtggagaggcagcgtggccagactggccagcagcatggccctggccgagcaggccagacagctgttcgagagcgccgtgggcgccgtgctgcccggccccatgctgcacagagccctgagcctggaccccggcggcagacagctgaaggtgagagacagaaacttccagctgagacagaacctgtacctggtgggcttcggcaaggccgtgctgggcatggccgccgccgccgaggagctgctgggccagcacctggtgcagggcgtgatcagcgtgcccaagggcatcagagccgccatggagagagccggcaagcaggagatgctgctgaagccccacagcagagtgcaggtgttcgagggcgccgaggacaacctgcccgacagagacgccctgagagccgccctggccatccagcagctggccgagggcctgaccgccgacgacctgctgctggtgctgatcagcggcggcggcagcgccctgctgcccgcccccatcccccccgtgaccctggaggagaagcagaccctgaccagactgctggccgccagaggcgccaccatccaggagctgaacaccatcagaaaggccctgagccagctgaagggcggcggcctggcccaggccgcctaccccgcccaggtggtgagcctgatcctgagcgacgtggtgggcgaccccgtggaggtgatcgccagcggccccaccgtggccagcagccacaacgtgcaggactgcctgcacatcctgaacagatacggcctgagagccgccctgcccagaagcgtgaagaccgtgctgagcagagccgacagcgacccccacggcccccacacctgcggccacgtgctgaacgtgatcatcggcagcaacgtgctggccctggccgaggcccagagacaggccgaggccctgggctaccaggccgtggtgctgagcgccgccatgcagggcgacgtgaagagcatggcccagttctacggcctgctggcccacgtggccagaaccagactgacccccagcatggccggcgccagcgtggaggaggacgcccagctgcacgagctggccgccgagctgcagatccccgacctgcagctggaggaggccctggagaccatggcctggggcagaggccccgtgtgcctgctggccggcggcgagcccaccgtgcagctgcagggcagcggcagaggcggcagaaaccaggagctggccctgagagtgggcgccgagctgagaagatggcccctgggccccatcgacgtgctgttcctgagcggcggcaccgacggccaggacggccccaccgaggccgccggcgcctgggtgacccccgagctggccagccaggccgccgccgagggcctggacatcgccaccttcctggcccacaacgacagccacaccttcttctgctgcctgcagggcggcgcccacctgctgcacaccggcatgaccggcaccaacgtgatggacacccacctgctgttcctgagacccagatag

SEQ ID NO: 240851 - DNA, 852 bp, Artificial Sequence
  derived and/or modified sequence
atggagctgctgctgagccagagctgcatctggtggcccatggtgggcgagggcagaaccatcatcagctgcggcatcaaggccatggagagaagcggcaactacctgatctggctgcagaagggcgagatgctgctgaagccccacagcagagtgcaggtgttcgagggcgccgaggacaacctgcccgacagagacgccctgagagccgccctggccatccagcagctggccgagggcctgaccgccgacgacctgctgctggtgctgatcagcggcggcggcagcgccctgctgcccgcccccatcccccccgtgaccctggaggagaagcagaccctgaccagactgctggccgccagaggcgccaccatccaggagctgaacaccatcagaaaggccctgagccagctgaagggcggcggcctggcccaggccgcctaccccgcccaggtggtgagcctgatcctgagcgacgtggtgggcgaccccgtggaggtgatcgccagcggccccaccgtggccagcagccacaacgtgcaggactgcctgcacatcctgaacagatacggcctgagagccgccctgcccagaagcgtgaagaccgtgctgagcagagccgacagcgacccccacggcccccacacctgcggccacgtgctgaacgtgatcatcggcagcaacgtgctggccctggccgaggcccagagacaggccgaggccctgggctaccaggccgtggtgctgagcgccgccatgcagggctggggcacccccgccgcccacagagacgacagataccagtgccacggccacccccccctggtgcccgccgccagcgtgatggcctag

SEQ ID NO: 240852 - DNA, 723 bp, Artificial Sequence
  derived and/or modified sequence
atgctgctgaagccccacagcagagtgcaggtgttcgagggcgccgaggacaacctgcccgacagagacgccctgagagccgccctggccatccagcagctggccgagggcctgaccgccgacgacctgctgctggtgctgatcagcggcggcggcagcgccctgctgcccgcccccatcccccccgtgaccctggaggagaagcagaccctgaccagactgctggccgccagaggcgccaccatccaggagctgaacaccatcagaaaggccctgagccagctgaagggcggcggcctggcccaggccgcctaccccgcccaggtggtgagcctgatcctgagcgacgtggtgggcgaccccgtggaggtgatcgccagcggccccaccgtggccagcagccacaacgtgcaggactgcctgcacatcctgaacagatacggcctgagagccgccctgcccagaagcgtgaagaccgtgctgagcagagccgacagcgacccccacggcccccacacctgcggccacgtgctgaacgtgatcatcggcagcaacgtgctggccctggccgaggcccagagacaggccgaggccctgggctaccaggccgtggtgctgagcgccgccatgcagggctggggcacccccgccgcccacagagacgacagataccagtgccacggccacccccccctggtgcccgccgccagcgtgatggcctag

SEQ ID NO: 240853 - protein, 538 aa, Artificial Sequence
  derived and/or modified sequence
MAENLKRLVSNETLRTLQEKLDFWLKEYNTNTCDQNLNHCLELIEQVAKVQGQLFGILTAAAQEGGRNDGVETIKSRLLPWLEASFTAASLGKSVDSKVPSLQDTFDRERHKDPSPRDRDMQQLDSNLNSTRSQCNQVQDDLVETEKNLEESKNRSAISLLAAEEEINQLKKQLKSLQAQEDARHRNTDQRSSENRRSEPWSLEERKREQWNSLKQNADQQDTEAMSDYKKQLRNLKEEIAVLSAEKSALQGRSSRSRSPSPAPRSRSCSRSRSASPSTAVKVRRPSPNRSKLSNVARKAALLSRFSDSYSQARLDAQCLLRRCIDKAETVQRIIYIATVEAFHVAKMAFRHFKIHVRKSLTPSYVGSNDFENAVLDYVICHLDLYDSQSSVNDVIRAMNVNPKISFPPVVDFCLLSDFIQEICCIAFAMQALEPPLDIAYGADGEVFNDCKYRRSYDSDFTAPLVLYHVWPALMENDCVIMKGEAVTRRGAFWNSVRSVSRCRSRSLSPICPRSQIGLNTMSRSRSPSPIRCGLPRF

SEQ ID NO: 240854 - DNA, 1617 bp, Artificial Sequence
  derived and/or modified sequence
atggccgagaacctgaagagactggtgagcaacgagaccctgagaaccctgcaggagaagctggacttctggctgaaggagtacaacaccaacacctgcgaccagaacctgaaccactgcctggagctgatcgagcaggtggccaaggtgcagggccagctgttcggcatcctgaccgccgccgcccaggagggcggcagaaacgacggcgtggagaccatcaagagcagactgctgccctggctggaggccagcttcaccgccgccagcctgggcaagagcgtggacagcaaggtgcccagcctgcaggacaccttcgacagagagagacacaaggaccccagccccagagacagagacatgcagcagctggacagcaacctgaacagcaccagaagccagtgcaaccaggtgcaggacgacctggtggagaccgagaagaacctggaggagagcaagaacagaagcgccatcagcctgctggccgccgaggaggagatcaaccagctgaagaagcagctgaagagcctgcaggcccaggaggacgccagacacagaaacaccgaccagagaagcagcgagaacagaagaagcgagccctggagcctggaggagagaaagagagagcagtggaacagcctgaagcagaacgccgaccagcaggacaccgaggccatgagcgactacaagaagcagctgagaaacctgaaggaggagatcgccgtgctgagcgccgagaagagcgccctgcagggcagaagcagcagaagcagaagccccagccccgcccccagaagcagaagctgcagcagaagcagaagcgccagccccagcaccgccgtgaaggtgagaagacccagccccaacagaagcaagctgagcaacgtggccagaaaggccgccctgctgagcagattcagcgacagctacagccaggccagactggacgcccagtgcctgctgagaagatgcatcgacaaggccgagaccgtgcagagaatcatctacatcgccaccgtggaggccttccacgtggccaagatggccttcagacacttcaagatccacgtgagaaagagcctgacccccagctacgtgggcagcaacgacttcgagaacgccgtgctggactacgtgatctgccacctggacctgtacgacagccagagcagcgtgaacgacgtgatcagagccatgaacgtgaaccccaagatcagcttcccccccgtggtggacttctgcctgctgagcgacttcatccaggagatctgctgcatcgccttcgccatgcaggccctggagccccccctggacatcgcctacggcgccgacggcgaggtgttcaacgactgcaagtacagaagaagctacgacagcgacttcaccgcccccctggtgctgtaccacgtgtggcccgccctgatggagaacgactgcgtgatcatgaagggcgaggccgtgaccagaagaggcgccttctggaacagcgtgagaagcgtgagcagatgcagaagcagaagcctgagccccatctgccccagaagccagatcggcctgaacaccatgagcagaagcagaagccccagccccatcagatgcggcctgcccagattctag

SEQ ID NO: 240855 - DNA, 1617 bp, Artificial Sequence
  derived and/or modified sequence
atggcagagaatctgaagcgactcgtatcaaatgagacattgagaaccctgcaggaaaagctagacttttggttgaaagagtataatacaaatacttgcgaccaaaatctcaaccactgcctcgaactgattgaacaggtcgccaaggttcagggacagcttttcggaatccttactgccgcggcacaggaaggcggtagaaacgacggggtggaaacaattaagagtcgactgctgccctggcttgaggcatccttcaccgccgcttccctgggcaagtcggtggactcaaaagtgccttcactgcaggacacctttgatcgggaacgtcacaaagatcctagcccaagggatcgagacatgcagcagcttgactctaacttgaattcaacccgatcacagtgcaatcaggtccaggacgatctcgtggaaacagaaaaaaacctcgaggaatcgaaaaatcgtagcgcaattagcttgctggccgccgaggaagaaattaatcagcttaagaagcaactcaaaagcctgcaggcacaggaggatgcacggcaccggaacactgaccaacgctctagcgagaacagacgctctgagccttggagccttgaggagcgtaagcgcgagcaatggaactctctcaaacagaacgccgaccagcaagatactgaggcaatgtcggactataaaaagcaacttagaaatcttaaagaagagattgctgtgctttcagccgaaaagagcgcgcttcaaggtcggtcatctcgcagccgcagtccaagccctgcacccagatctaggagttgcagccgttctagatctgcgtccccttctaccgctgtgaaggttagacgtccgagccccaaccggtccaaactgtccaatgtggcccgcaaagccgcccttctaagccggttctctgattcctattcccaggccaggctcgacgcccaatgcttactgcgcaggtgcatcgacaaagccgaaaccgtgcagcggatcatctacattgccactgtggaagcgtttcacgtcgccaagatggcattccggcacttcaagatccatgtcagaaagtctctgacacctagctacgtgggtagcaacgacttcgagaacgccgtcctggactacgttatatgccatctcgatctttacgactcacagtcttctgtcaacgacgtgatccgtgcaatgaatgtcaatccgaagatctcatttccgcctgtggttgatttttgcttactatccgacttcatccaagaaatctgttgtatagctttcgccatgcaggctctggaaccgccactggacatcgcctacggagccgatggagaggtattcaacgactgtaaatatcgtcggtcatacgactccgacttcacagcgcccctcgttttgtatcacgtctggcccgcactgatggaaaacgactgcgttattatgaaaggcgaggctgtgacaaggagaggagccttctggaattctgtccggtccgtgtctaggtgtcgatctcgatctctgtcccctatatgcccgagatcacagatcggactgaacacaatgtcccgctcacgaagccccagtcccattagatgcgggttgcctcgcttttag

SEQ ID NO: 240856 - DNA, 1617 bp, Artificial Sequence
  derived and/or modified sequence
atggccgagaacctgaagaggctggtgtccaatgagaccctgcggaccctgcaggagaagctggacttctggctgaaggagtacaacaccaacacctgtgaccagaacctgaaccactgcctggagctgattgagcaggtggccaaggtgcagggccagctgtttggcatcctgacagctgctgcccaggagggcggcagaaatgatggagtggagaccatcaagagccggctgctgccctggctggaggccagcttcaccgctgccagcctgggcaagtctgtggacagcaaggtgcccagcctgcaggacacctttgaccgggagcggcacaaggaccccagcccccgggaccgggacatgcagcagctggacagcaacctgaacagcaccaggagccagtgcaaccaggtgcaggatgacctggtggagacagagaagaacctggaggagagcaagaacagaagtgccatcagcctgctggccgctgaggaggagatcaaccagctgaagaagcagctgaagagcctgcaggcccaggaggatgcccggcacaggaacacagaccagaggagcagcgagaacagaagaagtgagccctggagcctggaggagaggaagcgggagcagtggaacagcctgaagcagaatgctgaccagcaggacacagaggccatgtctgactacaagaagcagctgaggaacctgaaggaggagattgctgtgctgtctgctgagaagagcgccctgcagggccgcagcagccgcagccgcagccccagccctgcccccaggagccgcagctgcagccgcagccgcagcgccagccccagcacagctgtgaaggtgcggcggcccagccccaacagaagcaagctgagcaatgtggccaggaaggccgccctgctgagccgcttcagtgacagctacagccaggcccggctggatgcccagtgcctgctgcggcgctgcatcgacaaggccgagaccgtgcagaggatcatctacatcgccaccgtggaggccttccacgtggccaagatggccttccgccacttcaagatccacgtgaggaagagcctgacccccagctatgtgggcagcaatgactttgaaaatgctgtgctggactatgtgatctgccacctggacctgtatgacagccagagctctgtgaatgatgtgatccgggccatgaatgtgaaccccaagatctccttcccccctgtggtggacttctgcctgctgagtgacttcatccaggagatctgctgcatcgcctttgccatgcaggccctggagccccccctggacatcgcctatggagcagatggagaggtgttcaatgactgcaagtaccgccgctcctatgacagcgacttcaccgcccccctggtgctgtaccacgtgtggccagccctgatggagaatgactgtgtgatcatgaagggggaggccgtgaccaggagaggagccttctggaacagcgtgcgctctgtgagccgctgccgcagccgcagcctgagccccatctgccccaggagccagatcggcctgaacaccatgagccgcagccgcagccccagccccatccgctgtggcctgccccgcttctag

SEQ ID NO: 240857 - DNA, 1617 bp, Artificial Sequence
  derived and/or modified sequence
atggccgagaacctgaagcggctggtgagcaacgagaccctgcggactctgcaggaaaagcttgatttttggctgaaggaatataataccaatacatgcgatcagaacctcaatcactgtttggagctcattgaacaggtcgcgaaggttcaaggccagctgtttggtattctgacggctgctgcccaggagggggggcggaacgacggagttgaaacgatcaaaagcagattactaccctggcttgaagccagtttcactgccgcttcgttgggcaagtctgtcgactccaaggtcccttccctgcaggacactttcgaccgcgagaggcataaagaccccagcccccgcgatagagacatgcagcaactcgatagcaacttgaactcaactagaagtcagtgcaatcaggtccaggatgacctggtggaaacagagaaaaacctcgaggagtctaaaaaccgaagcgctatcagtctgctggcagccgaggaagagattaaccagctcaaaaaacagttgaaaagcctgcaagcccaagaagatgccagacatcgcaataccgaccagcgaagctctgagaataggaggtccgaaccatggtcactggaggaaagaaaaagggaacagtggaatagcctgaagcagaatgccgaccagcaggatacagaggccatgagtgactataagaagcaactgaggaacctgaaggaggagattgctgtattaagcgccgagaaatcagccttgcaaggaaggtcatctaggtctcgcagtccgtcccctgcgccacgctcccggagttgttccaggtcccggagtgcaagccccagcactgccgtcaaggtacgccggccctccccgaaccgctcgaagctgagcaatgttgccaggaaagctgccctgctctctagattttctgacagctactctcaagccagactggacgcccagtgtcttctgcgtcggtgtattgacaaggctgagaccgtacagaggattatatacatcgccacagtggaggcatttcacgtggccaagatggccttccggcatttcaagatccatgtgcggaagagtcttactccgtcatacgtaggcagcaacgactttgaaaacgcggtcctggactatgtgatctgccatttggacctctacgattctcagtctagcgtcaatgacgtgattagggccatgaatgttaatccaaagatttccttcccaccagtcgtggacttctgcttactcagcgacttcatacaggagatttgttgcatcgcgtttgccatgcaagccctggagccacccctggacatcgcctatggcgctgacggagaggtgttcaatgattgcaaatataggaggagctatgatagcgactttaccgcgccgctagtcctgtatcacgtctggcccgctctgatggagaatgattgtgtcatcatgaagggtgaagccgtcactcgtcggggagccttttggaactcagtgagaagcgtctctcggtgtagaagtcgctctctgtcacccatttgtccaaggtcgcagattggcttgaacacaatgagccgaagcaggagcccttcccctatccgctgtggactgcctagattctag

SEQ ID NO: 240858 - DNA, 1617 bp, Artificial Sequence
  derived and/or modified sequence
atggccgagaacctgaagcgcctggtaagtaatgagaccctcagaacattacaggaaaagctggatttttggttgaaggaatataataccaacacttgtgaccagaatttaaatcactgcctagagcttatcgagcaggtggccaaagtgcaggggcagttgttcggaatcctcacagctgcagcacaggaggggggacgaaacgatggtgtggaaacaatcaagtcccgactgctcccatggttggaggcgagttttacagcagctagtcttggcaagtccgtggatagtaaagttccatccctgcaggacacatttgatagagaacgtcacaaggatccctcaccccgtgaccgcgacatgcagcaattggatagcaaccttaactcaacccgatcccagtgtaaccaggtgcaggacgatctcgtcgagacagaaaagaatctggaggagtccaagaataggtcagcaatcagccttctggcggcagaggaggaaatcaatcagctgaagaagcagctcaaaagcctacaggcacaagaggacgctcggcatcgcaacactgaccagagatcttccgagaatcggcgaagcgagccttggagtttggaggaaagaaaacgcgagcaatggaattcactcaagcaaaacgccgatcaacaggacactgaggcgatgtcggactataagaagcagttgcggaatctgaaggaggaaattgccgttctgagcgcggagaaatcagctctgcaaggacgctccagccgctctagatccccgtcacctgcaccacggagcaggtcgtgctcacggtcacgctcagccagcccaagtaccgccgtgaaagtgcgcagaccgtctcctaaccgttctaaactgagcaatgtcgcaaggaaggctgccttgctgagtcgattttctgactcatattctcaggcacgtttagacgctcagtgtctgctccggagatgtatcgataaagctgagaccgttcagcggattatttatattgctacagtggaagccttccacgtggcaaagatggctttccgtcacttcaagatccacgtgcgaaagtctcttacaccgtcatatgtgggctcgaacgattttgaaaacgccgtactcgactacgtcatctgtcatctcgacctgtatgactctcagtcttcagtgaatgatgttataagggcgatgaatgtgaacccgaaaatatccttccccccagtcgtggatttttgcctgttgtcggacttcatacaggaaatctgttgcattgccttcgccatgcaagcccttgagccccctcttgacattgcttacggcgcagatggtgaggtttttaatgattgtaagtatcggaggagttatgacagtgatttcactgcacctcttgtcctgtatcacgtttggcctgcgctgatggaaaatgattgtgtgatcatgaaaggagaagcagtgaccagacggggagccttttggaactctgtgcgcagcgtgtccaggtgtagatcccggtcactgagccctatttgtcctaggtcacagattggcctgaatactatgagccgtagccgttcaccctccccaatccgctgtggtctgccccgattctag

SEQ ID NO: 240859 - DNA, 4396 bp, Artificial Sequence
  derived and/or modified sequence
acccagggcggggcggcgcgggcgttgccacgacgcgggccgcgcgcgtccctggcagccaacccgtccacgtcaaggtttgtttaataatcgccagggtatctatggccgggctcaggcggctgctggggagccaggagaccgcgcgggacggcggatgaggcgcggcggctgcggcccagggcacctcccctctggcttcccgaacccggccaggtccgacccgagggggaggatggaaacacctgccgcgctctgagccccccagaagagaacacccttcccgccatatcaccccacggtcctgcggaggccaccgcctggtccccccaagtctccatcgcgcagcgtggggccgagaggaatagtgagcgatggcggaaaacctgaaaagactggtctcaaacgaaactttacgaacgttgcaggaaaagctagacttctggctgaaggagtacaacacaaacacgtgtgatcaaaatctaaaccattgccttgaactcattgagcaagttgccaaggtgcagggacaactctttgggatcctcacagcagcagcccaagaaggaggacgtaatgatggtgtggaaacaatcaagtcacgccttttgccttggctggaggcttcctttactgctgcttccctgggaaaatctgttgacagcaaggtcccctctctgcaggacacgtttgatagggagagacataaagatcccagtcctcgggatcgggatatgcaacagttagactctaatttgaactcaacccggagtcaatgcaaccaggttcaagacgatctggttgaaactgaaaagaatcttgaagaaagcaagaacagatcggccatatcccttttggctgcagaggaggaaataaatcagctgaaaaagcagcttaaatctcttcaagctcaggaggatgcccgccacagaaacacagatcagaggagctcagagaataggcggtcagagccttggagcttggaggagcggaagcgtgagcagtggaactcactcaagcagaatgcagaccagcaggacacagaagccatgtccgattataagaaacagctccgaaacctgaaggaggagatagctgttctgtctgctgagaaaagtgcactccaaggaaggtcctccaggagccggtctcccagccctgcccctcgcagccgtagctgcagccgcagcagatctgccagcccctccaccgctgtcaaggtcaggagaccgtccccaaaccgctccaagctgtccaatgtggcgcgcaaggctgccctcttgtcccggttcagcgattcctattcccaggcccgcctggacgcgcagtgcctgctgcggcgctgcatcgacaaggctgagaccgttcagcggatcatctacatcgccacagtggaggcattccatgtagcaaaaatggcattcagacacttcaagatccatgtgagaaaatcgttgacaccatcttatgtggggtcgaatgactttgagaatgctgtcttggattatgtcatttgtcatcttgatctatatgattctcaaagcagtgtcaatgatgtgatccgagccatgaatgtcaatcccaagatttcattccctcctgtcgttgacttttgccttctcagtgacttcatccaggagatatgttgcattgcctttgcaatgcaggccttagaaccacccctagatattgcatatggagcagatggagaagtttttaatgattgcaaataccgccgcagctacgactcggatttcactgctcccttagtcctctatcacgtgtggcctgctctcatggagaatgactgtgtcattatgaagggagaagctgtcaccaggagaggggctttttggaattcggtgcgatctgtaagtcgttgtcgaagcaggagtttaagtcccatttgcccccgtagccaaattggtttaaacacgatgtctcgaagtcggagtccttctccaataagatgtggattgccaagattttaaaagcaccagacctgctcctttgacccagtgcgtggaaacagctgctttctccagtgccgccatctgtcttctgtgtctgcctcagacctcacttaagataatgtcaaaaggcaattctgtgtatcaccccacacagagagttaaatgttttggcttggcgcatttgtaactttagatatattgcattctattttattttatagatactaattccattaatttcataaaaatgattgtataggcatttaggatcatattcattcgaagcaaagtccgttacaaaggttcaagatttccatctcaaaacactacgctcttttatgggaactgtgtgaactgaagtggaaagcatctaccatgctgaggctaaaagaaaagatgaatcattttagtttgcagatggatcgtaaatataattgttggtatcagctttagctcaaaaccaatattaggtgttttaatttccttttaaggtttggaagacagccctaatctcaggttggggagctcatgttagtagcagtgacttaaggctaagtgtagaagataatttaagatacattttctttatatattagccaacaaattatatttattggttggcttgcttttccgttctgattttgagagtgcccagtttggtttagttgaccaatgaatgtcaaagctacttagttgagagaatttccttgttcataaatgtagagcagtgatttgattagaagccagctttgagataaatgttaattacctcatgcatatctcctgggaatatttcaaactgttttaatgcatgtgttatatataaaagtttcttgggacatgctcttcacctgttctacctagttatttgcaaattcagacctcctattgaactctgtctgaccaaaactacttaaactcaaggcccaaaactaggggcaccatttactgattttaaattgagtatatatcccttgacttcttcactgtcaaatacttttgaaacttcacgttcaagataagaatggaatgttgctttcttgcaataagtaatgttctttctgcctttttttcacttttaagtcagccttaaacacatgcctcacaaacatctactttctccacatacctttgagagagacactgaattggcctcagctcagttttgcataagcttagtgccagaaccagcacctgatgcttttcaggtgaaaataaaacaaacagcttctctaaagcatcttacccctgtgctggaggtttgagggacctcttcagtgcctgccccttgagtctaatggtcaccacctcattctgaagtatgagttgaattttttgccctctttgcatatttacattagtcatcactttgaagcaatgcagtgtgctggaaggagcactatctgcctaggtaactgctagtcatgacttggtcatcagcttgctttgtggcactgagcaagttacttcacttctctgagccttggttttatcatagggtgaggaggttggatacaattagtgcccctcttaaccctgcagactcaatgttcccttttataacaagtattttattctgaatatgaaatgaaaattaaagttaatataatcatctatgtgcatgtataattttaagcagtgaacatagtaccctaactataatataaagcagaaaaaaaggcaacttttaataaaataaaatgtatttcaataaaaaagcttgggtataaccaccctagaagataaaattaagtcattagatggctgaacctgcatgtagagccaccagctacaaatgaaaatcaatgtgtgtattggcaacagaaaatcacggtgttgtcattggatgtgactttctgaagtggtgggcaattcttgttaatgttttaaacaaaaaaaaaaaaaccttacagtcttgccctgatttacacagcagtcacattcctggaaaattcaagtgtttattaaaactatgcaacagttactgtgtgttatacgttgaaaggtcttcactaatatctcactaagtaatgagaatgcctacatatcagaattttttttttcaggagccaagcacatatactgatttggaaaaaggcacaggtagctcagtttatttgctttctaccctgcctggccacttgctgtttcttcagtttctaatttgagctgtaactacacaaggaaagctaaatagtctggaaaatttttggaaagaatccacaaagccaaaggagactggcctatactcattttatctggggatgtaccttacccttagagactttgaaaaatgtgaagctcttattttgtaacctgggtaaatgttagtttctagattttcggcttaacatctaataataacatttaaaaagtgcttttgtaactattagttatttgcaataaaatgctttccttctaca

SEQ ID NO: 240860 - protein, 108 aa, Artificial Sequence
  derived and/or modified sequence
MTPSRLPWLLSWVSATAWRAARSPLLCHSLRKTSSSQGGKSELVKQSLKKPKLPEGRFDAPEDSHLEKEPLEKFPDDVNPVTKEKGGPRGPEPTRYGDWERKGRCIDF

SEQ ID NO: 240861 - DNA, 327 bp, Artificial Sequence
  derived and/or modified sequence
atgaccccctctcgacttccttggctcctttcatgggtttcagcgacagcttggagggccgcaagaagcccactgctgtgccactctttacgtaaaacgagtagcagccagggagggaagtctgaactcgttaagcaatccctgaaaaagcccaagttgccggagggacgttttgacgcgccagaagattcccacctagagaaggaaccgctggagaagtttccagatgacgttaacccggtgaccaaggagaagggagggccacgcggacctgagcctactcggtatggggactgggagcgtaaagggagatgcattgatttctag

SEQ ID NO: 240862 - DNA, 327 bp, Artificial Sequence
  derived and/or modified sequence
atgactccaagccgattaccgtggctgttgtcctgggtatctgccacggcatggcgagctgccagatcgcccctcctgtgtcactcactacgcaaaacatccagttcccagggaggcaagagcgaactggtgaagcagtcattaaaaaagcctaaattaccagaagggcgcttcgacgcacccgaagactcacacctggaaaaggaacctctcgaaaaattcccggacgacgttaacccagtaaccaaggagaaagggggtcctcggggaccagagccaacccggtacggagactgggagcggaaaggaaggtgtattgacttctag

SEQ ID NO: 240863 - DNA, 327 bp, Artificial Sequence
  derived and/or modified sequence
atgactccttcaaggctgccctggctgctatcttgggtgtcagcaacagcatggcgcgctgccagatccccactgttgtgccatagcctacgaaagacaagctcttcccagggaggcaagagcgaactggtaaagcagagcctgaagaaaccaaaacttccagagggtaggtttgacgcaccagaggactctcacctcgaaaaggagcccctcgagaaattcccggatgacgtgaaccctgtaacaaaggaaaaaggaggtccccgtggcccagagcccactagatacggcgattgggaaagaaagggccgatgtattgatttttag

SEQ ID NO: 240864 - DNA, 327 bp, Artificial Sequence
  derived and/or modified sequence
atgacccccagcagactgccctggctgctgagctgggtgagcgccaccgcctggagagccgccagaagccccctgctgtgccacagcctgagaaagaccagcagcagccagggcggcaagagcgagctggtgaagcagagcctgaagaagcccaagctgcccgagggcagattcgacgcccccgaggacagccacctggagaaggagcccctggagaagttccccgacgacgtgaaccccgtgaccaaggagaagggcggccccagaggccccgagcccaccagatacggcgactgggagagaaagggcagatgcatcgacttctag

SEQ ID NO: 240865 - DNA, 327 bp, Artificial Sequence
  derived and/or modified sequence
atgaccccatctagactcccgtggctgctgtcctgggtttcagctaccgcatggcgcgctgcccgatccccgctgctctgccacagtctgcggaaaacttcatccagtcagggcgggaaatccgagcttgtgaaacaatctctcaagaaacccaagcttccagaaggcaggttcgacgcgcctgaggatagccatctagaaaaggagcctttggagaagtttccagatgatgtaaatcctgtaacgaaagagaaggggggaccccgtggccccgaacccacccgctatggagattgggagcgcaagggaagatgtatcgacttttag

SEQ ID NO: 240866 - DNA, 1196 bp, Artificial Sequence
  derived and/or modified sequence
gcggaggctcggggagtcggcgccatgaccccatcgaggcttccctggttgcttagctgggtctcggccacggcgtggagagcggcaagatcaccccttctgtgtcattctctgaggaaaacaagttcttctcaaggaggaaagtctgaacttgtcaaacagtcccttaagaagccgaagttaccagaaggtcgttttgatgcaccagaggattcccatttagagaaagaaccactggaaaaatttccagatgatgttaatccagtgaccaaagaaaaaggtggacccaggggcccagaacctacccgatatggagattgggaacgaaaaggacgctgtattgatttttaagtcgcatattctttaacttcaatattgttttctgaatatgtacatctgaattaacttatttctgattattttctttctttatatcctttatgtcgtgtagtttgtataatgtgtttaaatatatatatatatgatggctttggaagaaaatatgctgctgtaaattaggaaagggagaccagcctgaccaatatggagaaatctcgcctttactaaaaatacaaaattagccaggcgtggtggcatgcacctgtaatcccaactactctggaggctgaggcaggagaatggcttaaacccaggaggtggaggttgcggtgagctgaggtcgcgccattgcactccagcctgggcaacaagagcgaaactccgtctcaaaaaaaaagataggaaagggaaaatattttttcattaacatatattaatttaatgagtatagaaatgattcttgtttttttgagacagagtctctctctctcacccaggctggagtggagtggcactatcccaactcactgcaacttccgccccgccaggttcaagcaattctcctgcctcagcctcctgagtagctgggattacagacacccaccattgcgcctggctaatttttgtatttttagtaaagacaaggtttcaccatgttagccaggctggtctcgaactcctgacctcagttgatccacctgcctcagcctcccaaagtgctgggattgcaggtgtgagccaccacgcccagcctagaaatgattcttagagctgtaggcctttacttcatcatttttcagtttaaattaatcagttgcttataaaatgcatacataaataaaataatttttaaaaaa

SEQ ID NO: 240867 - DNA, 327 bp, Artificial Sequence
  derived and/or modified sequence
atgacccccagccggctgccctggctgctgtcctgggtgtctgccacagcctggagggctgcccggagccccctgctgtgccacagcctgaggaagaccagcagcagccagggcggcaagtctgagctggtgaagcagagcctgaagaagcccaagctgcctgagggccgctttgatgcccctgaggacagccacctggagaaggagcccctggagaagttcccagatgatgtgaaccctgtgaccaaggagaagggcggcccccggggccctgagcccacccgctacggggactgggagaggaagggccgctgcatcgacttctag

SEQ ID NO: 240868 - DNA, 327 bp, Artificial Sequence
  derived and/or modified sequence
atgacccccagccggctgccctggctgctgagctgggtgagcgccacagcttggcgtgccgccagatcacctcttctctgccactcgctccgcaagacctcttccagtcagggaggcaagtcagagttggttaaacagtctctgaaaaagccaaagctgccagaggggcggtttgatgcccctgaggacagccatctggagaaagagccattagagaagtttccagatgacgtgaacccagtgaccaaggaaaagggcggtcctcggggcccagaacccaccaggtatggagactgggagcggaaggggagatgtatcgatttctag

SEQ ID NO: 240869 - RNA, 327 nt, Artificial Sequence
  derived and/or modified sequence
augacuccaagccgauuaccguggcuguuguccuggguaucugccacggcauggcgagcugccagaucgccccuccugugucacucacuacgcaaaacauccaguucccagggaggcaagagcgaacuggugaagcagucauuaaaaaagccuaaauuaccagaagggcgcuucgacgcacccgaagacucacaccuggaaaaggaaccucucgaaaaauucccggacgacguuaacccaguaaccaaggagaaaggggguccucggggaccagagccaacccgguacggagacugggagcggaaaggaagguguauugacuucuag

SEQ ID NO: 240870 - RNA, 327 nt, Artificial Sequence
  derived and/or modified sequence
augacuccuucaaggcugcccuggcugcuaucuugggugucagcaacagcauggcgcgcugccagauccccacuguugugccauagccuacgaaagacaagcucuucccagggaggcaagagcgaacugguaaagcagagccugaagaaaccaaaacuuccagaggguagguuugacgcaccagaggacucucaccucgaaaaggagccccucgagaaauucccggaugacgugaacccuguaacaaaggaaaaaggagguccccguggcccagagcccacuagauacggcgauugggaaagaaagggccgauguauugauuuuuag

SEQ ID NO: 240871 - protein, 244 aa, Artificial Sequence
  derived and/or modified sequence
MGDLFSLFWEVDPPPIPVNCAIPNQDYECWKDDSCGTIGSFLLWYFVIVFVLMFFSRASVWMSEDKKDEGSGTSTSVRKASKETSCKRQSKDSAWDPSQTMKKPKQNQLTPVTNSEVALVNAYPEQRRARRQSQFNEVNQNQHDSDTTEYGSEESNSEASSWKESESEHHPSPDSIKRRKMAQRQRNLGSYQMSERHCLHCKALRTNEWLAHHSRQKPSVTPPMKRDSQEESSISDINKKFSKF

SEQ ID NO: 240872 - DNA, 1159 bp, Artificial Sequence
  derived and/or modified sequence
agtcatctttatccctttaagcatggtttattttctgagcaaggagtcatcatgggagaccttttttccttattttgggaggtagatcctcccccaatacctgtaaattgtgccattccaaatcaggattatgaatgctggaaggatgactcttgtggaaccatagggagcttcctgctttggtattttgttatcgtatttgtcctgatgttcttctctagggcttctgtctggatgtctgaggataaaaaggatgaaggcagtgggacaagtacttcagtaaggaaagcaagcaaagagacttcctgtaagcggcaaagcaaagacagtgcctgggatccctcacaaacaatgaagaaaccaaagcagaaccaacttacccctgtaaccaactcagaagtggctttggtcaatgcctatcctgaacaaagacgagccaggcgccagtctcagttcaatgaggtgaaccagaaccaacatgacagtgatactacggagtatggcagtgaagagtctaactcagaagcctcctcgtggaaggagagtgaaagtgaacaccacccatcaccagacagtattaagaggagaaaaatggctcagaggcaaaggaatctgggaagttaccaaatgagcgaaaggcactgcctccactgcaaagccttgagaaccaacgaatggttggcgcaccattcccgacagaagccttcagtaacaccgccaatgaaaagagacagtcaagaggaaagttccatatctgacattaacaagaaatttagtaaattttgaattttatcacgttcttccttcacttgaagccaaatgaaagagatgaataaaacatgaaaaatcaccagagctataggtgaggagacttttacaacaaagtctctctaccaacaaacaaaaacatacttggaacccaagaggtaaaatctcacacaattcttcgttcaaaaaaaaaaaggccatcacgtgtttatggcaccattggaacaccaaagatctatatctgctatgatttttttatttgaaatagcacaagacagatattttgtgccttgagtgtatatattttgtgccttgagtgtatgtattttgtttatgtctgtaatatgaataagaaagctctttgaaaatgtattatttatgttgagaaacc

SEQ ID NO: 240873 - DNA, 735 bp, Artificial Sequence
  derived and/or modified sequence
atgggcgacctgttcagcctgttctgggaggtggaccccccccccatccccgtgaactgcgccatccccaaccaggactacgagtgctggaaggacgacagctgcggcaccatcggcagcttcctgctgtggtacttcgtgatcgtgttcgtgctgatgttcttcagcagagccagcgtgtggatgagcgaggacaagaaggacgagggcagcggcaccagcaccagcgtgagaaaggccagcaaggagaccagctgcaagagacagagcaaggacagcgcctgggaccccagccagaccatgaagaagcccaagcagaaccagctgacccccgtgaccaacagcgaggtggccctggtgaacgcctaccccgagcagagaagagccagaagacagagccagttcaacgaggtgaaccagaaccagcacgacagcgacaccaccgagtacggcagcgaggagagcaacagcgaggccagcagctggaaggagagcgagagcgagcaccaccccagccccgacagcatcaagagaagaaagatggcccagagacagagaaacctgggcagctaccagatgagcgagagacactgcctgcactgcaaggccctgagaaccaacgagtggctggcccaccacagcagacagaagcccagcgtgaccccccccatgaagagagacagccaggaggagagcagcatcagcgacatcaacaagaagttcagcaagttctag

SEQ ID NO: 240874 - DNA, 735 bp, Artificial Sequence
  derived and/or modified sequence
atgggagaccttttttccctcttttgggaagtcgacccaccccccatcccggtgaattgcgccatccctaaccaggattatgagtgctggaaagacgattcgtgtggaactattggctcattcttgctttggtactttgtgatcgtctttgttctgatgttcttttccagggccagtgtttggatgagcgaagataaaaaggacgagggcagcggcacatccacaagcgtacgcaaggcttccaaggaaacttcctgcaaacggcagtctaaagactccgcctgggacccctcccagacaatgaagaagcccaagcagaatcagctgacgcccgtgaccaattcggaggtggccctggtgaatgcctaccccgagcagaggcgcgcccggcggcagtcccaattcaatgaggtaaaccagaatcaacacgattcagacaccacagaatatggctctgaagagagtaactcggaagccagcagctggaaggagtcggagagcgagcatcacccttctccagattcaataaaaagaagaaagatggctcagagacaacgcaacctgggaagctatcaaatgtctgagcggcattgcctgcactgcaaagctctcagaaccaacgagtggttggcgcaccacagccgccaaaagccaagtgtcactccccctatgaagcgggacagccaggaggaaagctcaatttcagatataaacaaaaagttttctaagttttag

SEQ ID NO: 240875 - DNA, 735 bp, Artificial Sequence
  derived and/or modified sequence
atgggagacctcttcagcctcttctgggaggtggaccccccacccatccctgtgaactgtgccatccccaaccaggactatgagtgctggaaggatgacagctgtggcaccatcggcagcttcctgctgtggtacttcgtcatcgtgtttgtgctgatgttcttcagccgggcctctgtgtggatgtctgaggacaagaaggatgagggcagcggcaccagcacctctgtgaggaaggccagcaaggagaccagctgcaagaggcagagcaaggacagcgcctgggaccccagccagaccatgaagaagcccaagcagaaccagctgacccctgtgaccaacagcgaggtggccctggtgaatgcctacccagagcagaggcgggcccggcggcagagccagttcaatgaggtgaaccagaaccagcacgacagcgacaccacagaatatggcagcgaggagagcaacagcgaggccagctcctggaaggagagcgagagcgagcaccaccccagcccagacagcatcaagaggaggaagatggcccagaggcagaggaacctgggcagctaccagatgtctgagcggcactgcctgcactgcaaggccctgcggaccaatgagtggctggcccaccacagccggcagaagcccagcgtgaccccacccatgaagagggacagccaggaggagagcagcatcagtgacatcaacaagaagttcagcaagttctag

SEQ ID NO: 240876 - DNA, 735 bp, Artificial Sequence
  derived and/or modified sequence
atgggcgacctgttcagcctgttctgggaggtggaccccccccccatacctgtaaattgtgcaattccaaatcaagactatgaatgctggaaggacgattcttgtggtacgatcggttcattcttactctggtatttcgtaatagtgtttgtcctcatgtttttctctcgagcctctgtgtggatgtcagaggataaaaaagatgagggctccgggaccagcacttcagtgaggaaagctagcaaggaaacctcatgcaagcggcagtctaaggattctgcctgggatccttctcaaacgatgaaaaaacccaaacagaatcagctgaccccggtcaccaactccgaagtggccctggtcaacgcgtaccctgaacaaagacgcgcgagaagacagtctcaatttaacgaggtgaaccagaatcagcacgattccgatactactgagtacggaagtgaagagtctaattccgaggcatcctcttggaaggagtcagaaagcgagcatcatcccagcccggacagcatcaagcgtagaaagatggcccagagacagagaaacctcgggtcgtaccagatgtctgagagacactgtctccactgcaaggcgctgcgaacaaatgagtggctagcccatcattcaagacaaaagccatctgtcacgcccccaatgaagcgggactcacaggaggagagctcaatatccgacattaacaaaaaattcagcaaattttag

SEQ ID NO: 240877 - DNA, 735 bp, Artificial Sequence
  derived and/or modified sequence
atgggcgatctcttctccctgttctgggaggtggatccacccccaatccctgtgaactgcgctatccccaaccaagattatgagtgctggaaggacgactcttgcggtacaattggatcatttctcctgtggtatttcgtgatagtcttcgtgctcatgttctttagcagggccagtgtgtggatgagcgaggacaaaaaagacgaaggaagcggaacttccacctcggtgcggaaggcatcgaaagagacaagctgcaaaaggcagtctaaggatagcgcgtgggacccttctcaaactatgaagaaacccaagcaaaaccagctgaccccagtgactaacagcgaggttgcactggtgaacgcatacccagaacaaagacgggctagaagacagagccagtttaacgaagtcaaccagaaccagcatgatagtgataccaccgagtatggaagcgaggagagtaactccgaggcaagctcatggaaggagagtgagtctgagcaccacccatctcctgacagcatcaagcgcagaaagatggctcagcgccaacgcaatctggggtcctatcagatgtctgaacgacactgtctgcattgcaaggcgttgaggaccaacgaatggctggcccatcattcaagacagaagccatcagtgacccctccaatgaaaagagattcccaggaggagagcagtatttctgacatcaataagaaattctccaagttctag

SEQ ID NO: 240878 - protein, 272 aa, Artificial Sequence
  derived and/or modified sequence
MMRRTLENRNAQTKQLQTAVSNVEKHFGELCQIFAAYVRKTARLRDKADLLVNEINAYAATETPHLKLGLMNFADEFAKLQDYRQAEVERLEAKVVEPLKTYGTIVKMKRDDLKATLTARNREAKQLTQLERTRQRNPSDRHVIAQAETELQRAAMDASRTSRHLEETINNFERQKMKDIKTIFSEFITIEMLFHGKALEVYTAAYQNIQNIDEDEDLEVFRNSLYAPDYSSRLDIVRANSKSPLQRSLSAKCVSGTGQQEAGWAATCQTLI

SEQ ID NO: 240879 - protein, 289 aa, Artificial Sequence
  derived and/or modified sequence
MMRRTLENRNAQTKQLQTAVSNVEKHFGELCQIFAAYVRKTARLRDKADLLVNEINAYAATETPHLKLGLMNFADEFAKLQDYRQAEVERLEAKVVEPLKTYGTIVKMKRDDLKATLTARNREAKQLTQLERTRQRNPSDRHVISQAETELQRAAMDASRTSRHLEETINNFERQKMKDIKTIFSEFITIEMLFHGKALEVYTAAYQNIQNIDEDEDLEVFRNSLYAPDYSSRLDIVRANSKSPLQRSLSAKCVSGTGQVSTCRLRKDQQAEDDEDDELDVTEEENFLK

SEQ ID NO: 240880 - protein, 262 aa, Artificial Sequence
  derived and/or modified sequence
MMRRTLENRNAQTKQLQTAVSNVEKHFGELCQIFAAYVRKTARLRDKADLLVNEINAYAATETPHLKLGLMNFADEFAKLQDYRQAEVERLEAKVVEPLKTYGTIVKMKRDDLKATLTARNREAKQLTQLERTRQRNPSDRHVIAQAETELQRAAMDASRTSRHLEETINNFERQKMKDIKTIFSEFITIEMLFHGKALEVYTAAYQNIQNIDEDEDLERWSFAMLPRLVLNSWGSSDPPALASQSVRFSEILCMHQIIHLV

SEQ ID NO: 240881 - DNA, 819 bp, Artificial Sequence
  derived and/or modified sequence
atgatgagaagaaccctggagaacagaaacgcccagaccaagcagctgcagaccgccgtgagcaacgtggagaagcacttcggcgagctgtgccagatcttcgccgcctacgtgagaaagaccgccagactgagagacaaggccgacctgctggtgaacgagatcaacgcctacgccgccaccgagaccccccacctgaagctgggcctgatgaacttcgccgacgagttcgccaagctgcaggactacagacaggccgaggtggagagactggaggccaaggtggtggagcccctgaagacctacggcaccatcgtgaagatgaagagagacgacctgaaggccaccctgaccgccagaaacagagaggccaagcagctgacccagctggagagaaccagacagagaaaccccagcgacagacacgtgatcgcccaggccgagaccgagctgcagagagccgccatggacgccagcagaaccagcagacacctggaggagaccatcaacaacttcgagagacagaagatgaaggacatcaagaccatcttcagcgagttcatcaccatcgagatgctgttccacggcaaggccctggaggtgtacaccgccgcctaccagaacatccagaacatcgacgaggacgaggacctggaggtgttcagaaacagcctgtacgcccccgactacagcagcagactggacatcgtgagagccaacagcaagagccccctgcagagaagcctgagcgccaagtgcgtgagcggcaccggccagcaggaggccggctgggccgccacctgccagaccctgatctag

SEQ ID NO: 240882 - DNA, 870 bp, Artificial Sequence
  derived and/or modified sequence
atgatgagaagaaccctggagaacagaaacgcccagaccaagcagctgcagaccgccgtgagcaacgtggagaagcacttcggcgagctgtgccagatcttcgccgcctacgtgagaaagaccgccagactgagagacaaggccgacctgctggtgaacgagatcaacgcctacgccgccaccgagaccccccacctgaagctgggcctgatgaacttcgccgacgagttcgccaagctgcaggactacagacaggccgaggtggagagactggaggccaaggtggtggagcccctgaagacctacggcaccatcgtgaagatgaagagagacgacctgaaggccaccctgaccgccagaaacagagaggccaagcagctgacccagctggagagaaccagacagagaaaccccagcgacagacacgtgatcagccaggccgagaccgagctgcagagagccgccatggacgccagcagaaccagcagacacctggaggagaccatcaacaacttcgagagacagaagatgaaggacatcaagaccatcttcagcgagttcatcaccatcgagatgctgttccacggcaaggccctggaggtgtacaccgccgcctaccagaacatccagaacatcgacgaggacgaggacctggaggtgttcagaaacagcctgtacgcccccgactacagcagcagactggacatcgtgagagccaacagcaagagccccctgcagagaagcctgagcgccaagtgcgtgagcggcaccggccaggtgagcacctgcagactgagaaaggaccagcaggccgaggacgacgaggacgacgagctggacgtgaccgaggaggagaacttcctgaagtag

SEQ ID NO: 240883 - DNA, 789 bp, Artificial Sequence
  derived and/or modified sequence
atgatgagaagaaccctggagaacagaaacgcccagaccaagcagctgcagaccgccgtgagcaacgtggagaagcacttcggcgagctgtgccagatcttcgccgcctacgtgagaaagaccgccagactgagagacaaggccgacctgctggtgaacgagatcaacgcctacgccgccaccgagaccccccacctgaagctgggcctgatgaacttcgccgacgagttcgccaagctgcaggactacagacaggccgaggtggagagactggaggccaaggtggtggagcccctgaagacctacggcaccatcgtgaagatgaagagagacgacctgaaggccaccctgaccgccagaaacagagaggccaagcagctgacccagctggagagaaccagacagagaaaccccagcgacagacacgtgatcgcccaggccgagaccgagctgcagagagccgccatggacgccagcagaaccagcagacacctggaggagaccatcaacaacttcgagagacagaagatgaaggacatcaagaccatcttcagcgagttcatcaccatcgagatgctgttccacggcaaggccctggaggtgtacaccgccgcctaccagaacatccagaacatcgacgaggacgaggacctggagagatggagcttcgccatgctgcccagactggtgctgaacagctggggcagcagcgacccccccgccctggccagccagagcgtgagattcagcgagatcctgtgcatgcaccagatcatccacctggtgtag

SEQ ID NO: 240884 - DNA, 819 bp, Artificial Sequence
  derived and/or modified sequence
atgatgcgacgaactctggagaacagaaacgctcagacaaaacagttacaaactgctgtcagtaacgtggaaaagcacttcggtgagctctgccaaatttttgccgcgtacgtgcggaagaccgctcgattgagagacaaggccgacctgcttgtgaacgagatcaatgcttacgcagccaccgagactcctcatctcaaactaggtttgatgaacttcgcggacgaatttgcaaagttgcaggactatcgtcaggccgaggtagaacgccttgaggctaaggtagtggaaccattgaagacttacggaactatagtgaagatgaaacgcgacgatttgaaggctactctcaccgcccggaaccgggaggctaagcagctcacccagctcgagcggaccagacagagaaacccttccgaccggcacgtgatcgcccaagccgaaactgagctccaacgcgccgcaatggacgctagtcgcacctcccggcacctggaagagactattaacaatttcgagcggcagaagatgaaggatatcaaaaccattttcagtgagtttatcactatcgaaatgctgttccatgggaaggcactggaagtgtataccgccgcttatcaaaacatccagaatatcgacgaggacgaagatttggaggtttttcggaattcgctgtacgcccccgactattccagcaggcttgatatcgtcagagctaactctaaaagcccgctccagagaagcttatctgccaagtgcgtttccggcacaggacaacaggaggcaggctgggccgcaacctgccaaacattaatctag

SEQ ID NO: 240885 - DNA, 870 bp, Artificial Sequence
  derived and/or modified sequence
atgatgcgccggacattggaaaacaggaacgcacaaacgaaacaactacagacagccgtaagcaacgtggaaaagcattttggcgaactttgccagatttttgccgcttacgttaggaaaaccgctcggctgcgggacaaggcggacctgctcgttaatgaaattaatgcttacgctgccacagagacgccccatttgaaactagggctcatgaatttcgccgatgagttcgccaagctgcaggactatcgccaggcagaggttgaaaggctcgaggccaaagtagtggaacctctgaaaacctacggcactatagtcaagatgaagcgagatgatctaaaggcgacactcacagccagaaatagagaagccaaacagctgacccaactggagagaactcggcaacggaacccctctgataggcacgttataagtcaggccgagacagagcttcagcgggccgccatggatgcatcaagaacctctcgtcatcttgaggagacaattaacaattttgaacggcagaagatgaaagatatcaagaccatttttagcgaattcatcacaatcgaaatgttgtttcacggaaaagctctggaggtgtacacagcagcctatcagaacatccagaacatagatgaggacgaagatcttgaggtcttccgcaacagcctgtacgctccagactattcttccagattggacatcgtccgcgctaattcaaagagtccactgcagagatctctctccgccaagtgcgtgagcggcacaggtcaagtttcgacatgcaggctgcggaaggatcagcaagcagaggatgatgaagatgacgagctggacgtcaccgaagaggagaacttcctgaaatag

SEQ ID NO: 240886 - DNA, 789 bp, Artificial Sequence
  derived and/or modified sequence
atgatgaggcgaacactcgagaacaggaatgctcaaaccaaacagcttcaaactgccgttagcaacgtggaaaagcactttggagaactgtgccagatcttcgccgcttacgtgcgaaagacagctcgcttacgagacaaagccgatctgcttgtgaacgagatcaatgcatatgccgctacggaaactccgcatctgaagctgggcctgatgaattttgcggacgagtttgctaagctgcaggattacaggcaggccgaagttgagcggttagaagccaaagttgtggagcccttaaagacttatggaaccatcgttaagatgaaacgggacgatctgaaagccacgctgacggctcgaaacagggaggctaaacaactgacacagctggagcgcacccgccagcgcaacccatcggataggcacgtcatcgcacaggcagagaccgagctccaaagggcagctatggacgcaagtaggacatcccgacatcttgaagagactattaataactttgaaagacagaaaatgaaagatataaagactatcttctcggagttcattacaatagaaatgctatttcatggcaaagccttggaggtgtacacggcggcctatcaaaatatacagaatattgatgaggatgaagatctggagaggtggagctttgccatgcttccgcgtctggtcctcaactcctggggctcatctgatcctccagccctggccagccagtctgtgaggttctctgagatcttatgtatgcatcagatcatccatctggtgtag

SEQ ID NO: 240887 - DNA, 878 bp, Artificial Sequence
  derived and/or modified sequence
gcgccttggaatccccgtccttgggcccccgcaaggtccccggccgtgcgcgaggcagcatgatgaggcgcaccctggaaaaccggaacgctcaaacgaaacaactgcaaacagctgtctcaaatgtggagaagcattttggagaactgtgccaaatcttcgctgcctatgtgcggaaaactgccaggctgagagacaaagcagacctcctggtgaatgaaattaacgcgtatgctgctacagagaccccgcatttaaagctgggcctgatgaactttgcagatgagtttgccaaacttcaggattatcgacaagcagaggttgaaagacttgaagccaaagtagttgaacccttgaaaacttatgggaccattgtgaaaatgaaacgggatgacctcaaagcaacactcacagcaaggaatcgagaagctaagcaattaactcagttagaaagaacacgtcagcgaaacccatctgatcgacatgttattgctcaagcagaaacggaattacagagagctgcaatggatgctagccgaacaagtcgtcatctggaggaaactattaacaactttgaaaggcagaaaatgaaggatataaagactatattttctgaatttatcacaatcgaaatgttatttcacggcaaagctttagaggtctacactgctgcctaccagaatatacaaaacattgatgaagatgaagatttagaggttttccgaaattctctgtatgcaccagattattcatctcgtttagatattgtaagagcaaattcaaagtcacctcttcagagatcactgtcagctaagtgtgtatctggaacaggacagcaggaggctggctgggccgcaacttgccaaaccctgatctag

SEQ ID NO: 240888 - DNA, 4241 bp, Artificial Sequence
  derived and/or modified sequence
agaaacgcccggcctgccgcggcggcgcgaggggcgggctttcaggctcccggcggctgcttgcgccccagcgcgcgcccaggcgccttggaatccccgtccttgggcccccgcaaggtccccggccgtgcgcgaggcagcatgatgaggcgcaccctggaaaaccggaacgctcaaacgaaacaactgcaaacagctgtctcaaatgtggagaagcattttggagaactgtgccaaatcttcgctgcctatgtgcggaaaactgccaggctgagagacaaagcagacctcctggtgaatgaaattaacgcgtatgctgctacagagaccccgcatttaaagctgggcctgatgaactttgcagatgagtttgccaaacttcaggattatcgacaagcagaggttgaaagacttgaagccaaagtagttgaacccttgaaaacttatgggaccattgtgaaaatgaaacgggatgacctcaaagcaacactcacagcaaggaatcgagaagctaagcaattaactcagttagaaagaacacgtcagcgaaacccatctgatcgacatgttatttcacaggcagaaacggaattacagagagctgcaatggatgctagccgaacaagtcgtcatctggaggaaactattaacaactttgaaaggcagaaaatgaaggatataaagactatattttctgaatttatcacaatcgaaatgttatttcacggcaaagctttagaggtctacactgctgcctaccagaatatacaaaacattgatgaagatgaagatttagaggttttccgaaattctctgtatgcaccagattattcatctcgtttagatattgtaagagcaaattcaaagtcacctcttcagagatcactgtcagctaagtgtgtatctggaacaggacaggtatccacttgtcgactaagaaaggatcaacaagcagaagatgatgaggatgacgagttagatgttacagaagaagaaaattttcttaagtaaactacacatttccattttcatcataaatgacttgaaatccacaatgactaaattgtagaactttatactcactttgctatgttaagcctcaaagtgaagtccaactggaaacagaaaaataattaaaggaaacttatgctgaccaaaaatgaaggctttaaaaaatattgcataccagtcatttcaacatcctacctagtgttacatgatttttgtgtaagtgcctttttttttaaagatggtgtatttcaaagtatttcatattaatgtactatatctacttgaagttccaatagtacattatgacagaaaccaaaagatctaacaattctgcttagctttttggttaagactccatgctttcattaccagaaaagggtcttacgtagtcattatgattcatggaattctattccatgaagccttaagaaaaaaaactttttttaactttccctgaaactttatcatttgataagtaaatttacttttcaagaagagtataaccaaagagtaaagataatgtgacactaagttatcaatgttttatgaatacacataaggcataaatttcagctgtaaaaaagctacattcaatctgactctggttttaaaacaaaactgctgtcataattatacatgatactgcaacttttggaaggctaatttggtggaatgttgcctcatcatagaacaccatagatcattaaaaattctataaaaattttaccaagctaccatatagttaataaaagggtatacagtcacttttatttctgaaaatataaaacattgagcctttcagtgtatctgatgcttctcttttggtaaggaatacttttatttcatggatcccaggcaggcatataaaagttacggaatttataaaatcatttgggataattagaaaatgcaattattcataacagaaaaataaagactttctagaaagcttctgactttgtcaatcatggctctgttcttaacaaagcactccttcctgagaatagtcctaagtgacaaagttgtttcagtacttttttgtaaaatatttaaaacattttaaaaccctaaattgatattcttaagaaactcaagatatcattggatatttactgcttcctcactcagtatttaaatttggttgtacttcgggggaaaacaacagagttattattttgctgcttactaaatagcaacttctcttgagcattatttgccttgtttgtaaagttaaaactgcgtaaaacagtaattctggaataaaacatacattctgcctacctcaaagaaatattctaagaacaaaaggaatactatccatgaaaatactttcattaatgtaaaattttcattatttagaccagcctaggttggcaaacttcttaaagggccagatagcaaatactgttattcttcgtgggtttaggcaaattcaagactattatacaggtaactatgtaaccatgtaagacttaagtacacttaaaaaatgtgaaaaaccattcctagcttccactacaacaacaacaaaaaacaggcaaccaatccaaccaacccagcctgtaagtctccatctcttatctccaaaataggaatacaaattgagtatcctttatctgaagtgcttgggaccagaagtatttaagactttggatttcttcagattttggagtatttgcattataccagttcaacattcctaacccaaaaatctgaaatcttaaatgctgcaatgagcattttctttgagcatcatgttggcactcaaaaagtttgtgattttcggagcatgtgaaatttcagattaccagattaggaatactcaacctgtagtacatttactaggattatcagaattaaatgatagttaattcatacataattatacatcatatagtatctaatacagctcaataaacaacagctaatatttactgcaaaaacagaggcagcaaggtcactacttaacaggtgatatatggatcaagaatcactgctcttaacagtgatctcagtaaattaatagaaatgcactcctaacatgatttttacctatctcttggttgtgggattgactttctagacatgatctacatttttttagataatttctagacaaaaatgtttggctttaagacaaatgccactgggtatcaggctagagaatacacctccagtgtacctggtataccttgaggataggagaggaaaaactggctatgagacgacaattactgaagctgagtgatgtgtacatgaaaatttactattctttttttatatttgaaattgatgaggtgctgggaagctggctttctgaggggacaacaggaggggaattccttgatttgctgcatttatcactttccatggtgtaaaatactcctgccatggccaatttgttattgacatatcactaaaggcagagttggagagagatgtgcaaagatggctcccaactagaagataccactttctgtaatcaactttttataatgaagtttaaaaatattaagccctgatacattatagggtaaaaggaaatattcatataaattaatttaaaaatcaaaatacaaggctgggcacagtggctcacacctgtaatcccaacacattctgggagaccaaggagtgaggattgcttgaggccagaaatttgagaacagcctgggcaacacagtgagactctgtctctacaaataataaaaaatttagccagacaaggtggcacacacctgtagtcccagctctcaggaggctgaggcaggaagacagcttgagcccaggagttagaagctgcagtgaaccattatcagaccactgcactccagcctggccagcagaacaagactctgactcttaaaataataaaactacaaagcttatgtttactctagctggcctcttatctaccaccaccatcccacctcagcccagtttgaaatgcaattccacagtaagtaatccctcacgttaagcttcatcttagctttattcctttgtatctgagaagcattttttaactttccatatattattcaaaatgggtgaccaaatgaaccatctatacaatctttgctcaattaaaaatatcatttctactttcttcattgtgcttggtttggatattccaaacaatcaatttaacattatcctagctacttacaagcttatactttaaagaatcatactgaggtgctttttcatatcaaatttacctgtttatt

SEQ ID NO: 240889 - DNA, 1159 bp, Artificial Sequence
  derived and/or modified sequence
gcgccttggaatccccgtccttgggcccccgcaaggtccccggccgtgcgcgaggcagcatgatgaggcgcaccctggaaaaccggaacgctcaaacgaaacaactgcaaacagctgtctcaaatgtggagaagcattttggagaactgtgccaaatcttcgctgcctatgtgcggaaaactgccaggctgagagacaaagcagacctcctggtgaatgaaattaacgcgtatgctgctacagagaccccgcatttaaagctgggcctgatgaactttgcagatgagtttgccaaacttcaggattatcgacaagcagaggttgaaagacttgaagccaaagtagttgaacccttgaaaacttatgggaccattgtgaaaatgaaacgggatgacctcaaagcaacactcacagcaaggaatcgagaagctaagcaattaactcagttagaaagaacacgtcagcgaaacccatctgatcgacatgttattgctcaagcagaaacggaattacagagagctgcaatggatgctagccgaacaagtcgtcatctggaggaaactattaacaactttgaaaggcagaaaatgaaggatataaagactatattttctgaatttatcacaatcgaaatgttatttcacggcaaagctttagaggtctacactgctgcctaccagaatatacaaaacattgatgaagatgaagatttagagagatggagtttcgccatgttgcccaggctggtcttgaactcctggggctcaagcgatccgcctgcgttggcctcccaaagtgtcaggttttccgaaattctctgtatgcaccagattattcatctcgtttagatattgtaagagcaaattcaaagtcacctcttcagagatcactgtcagctaagtgtgtatctggaacaggacaggtatccacttgtcgactaagaaaggatcaacaagcagaagatgatgaggatgacgagttagatgttacagaagaagaaaattttcttaagtaaactacacatttccattttcatcataaatgacttgaaatccacaatgactaaattgtagaactttatactcactttgctatgttaagcctcaaagtgaagtccaactggaaacagaaaaataattaaaggaaacttatgctgacc

SEQ ID NO: 240890 - DNA, 819 bp, Artificial Sequence
  derived and/or modified sequence
atgatgaggaggaccctggagaacagaaatgcccagaccaagcagctgcagacagctgtgtccaatgtggagaagcactttggagagctgtgccagatctttgctgcctacgtgaggaagacagcccggctgcgggacaaggctgacctgctggtgaatgagatcaatgcctatgctgccacagagaccccccacctgaagctgggcctgatgaactttgctgatgaatttgccaagctgcaggactaccggcaggccgaggtggagcggctggaggccaaggtggtggagcccctgaagacctacggcaccatcgtgaagatgaagagagatgacctgaaggccaccctgacagccaggaaccgggaggccaagcagctgacccagctggagaggacccggcagaggaaccccagcgacagacatgtgattgcccaggccgagacagagctgcagagagctgccatggatgccagcaggaccagccgccacctggaggagaccatcaacaactttgagcggcagaagatgaaggacatcaagaccatcttcagcgagttcatcaccatcgagatgctgttccacggcaaggccctggaggtgtacacagctgcctaccagaacatccagaacattgatgaagatgaggacctggaggtgttcaggaacagcctgtatgccccagactacagcagccggctggacatcgtgcgggccaacagcaagagccccctgcagaggagcctgagcgccaagtgtgtgtctggaacaggccagcaggaggccggctgggccgccacctgccagaccctcatctag

SEQ ID NO: 240891 - DNA, 870 bp, Artificial Sequence
  derived and/or modified sequence
atgatgaggaggaccctggagaacagaaatgcccagaccaagcagctgcagacagctgtgtccaatgtggagaagcactttggagagctgtgccagatctttgctgcctacgtgaggaagacagcccggctgcgggacaaggctgacctgctggtgaatgagatcaatgcctatgctgccacagagaccccccacctgaagctgggcctgatgaactttgctgatgaatttgccaagctgcaggactaccggcaggccgaggtggagcggctggaggccaaggtggtggagcccctgaagacctacggcaccatcgtgaagatgaagagagatgacctgaaggccaccctgacagccaggaaccgggaggccaagcagctgacccagctggagaggacccggcagaggaaccccagcgacagacatgtgatcagccaggccgagacagagctgcagagagctgccatggatgccagcaggaccagccgccacctggaggagaccatcaacaactttgagcggcagaagatgaaggacatcaagaccatcttcagcgagttcatcaccatcgagatgctgttccacggcaaggccctggaggtgtacacagctgcctaccagaacatccagaacattgatgaagatgaggacctggaggtgttcaggaacagcctgtatgccccagactacagcagccggctggacatcgtgcgggccaacagcaagagccccctgcagaggagcctgagcgccaagtgtgtgtctggaacaggccaggtgtccacctgccgcctgaggaaggaccagcaggccgaggatgatgaagatgatgagctggatgtgacagaggaggagaacttcctgaagtag

SEQ ID NO: 240892 - DNA, 789 bp, Artificial Sequence
  derived and/or modified sequence
atgatgaggaggaccctggagaacagaaatgcccagaccaagcagctgcagacagctgtgtccaatgtggagaagcactttggagagctgtgccagatctttgctgcctacgtgaggaagacagcccggctgcgggacaaggctgacctgctggtgaatgagatcaatgcctatgctgccacagagaccccccacctgaagctgggcctgatgaactttgctgatgaatttgccaagctgcaggactaccggcaggccgaggtggagcggctggaggccaaggtggtggagcccctgaagacctacggcaccatcgtgaagatgaagagagatgacctgaaggccaccctgacagccaggaaccgggaggccaagcagctgacccagctggagaggacccggcagaggaaccccagcgacagacatgtgattgcccaggccgagacagagctgcagagagctgccatggatgccagcaggaccagccgccacctggaggagaccatcaacaactttgagcggcagaagatgaaggacatcaagaccatcttcagcgagttcatcaccatcgagatgctgttccacggcaaggccctggaggtgtacacagctgcctaccagaacatccagaacattgatgaagatgaggacctggagcgctggagctttgccatgctgccccggctggtgctgaacagctggggcagcagtgaccccccagccctggccagccagagcgtgcgcttcagcgagatcctgtgcatgcaccagatcatccacctggtgtag

SEQ ID NO: 240893 - DNA, 819 bp, Artificial Sequence
  derived and/or modified sequence
atgatgcggcggaccctggagaaccggaacgcccagaccaagcagctgcaaactgccgtgagtaacgttgaaaagcactttggggagttgtgccagatttttgcagcatacgttagaaaaaccgccaggctcagagacaaggccgatctgctagttaatgagattaacgcttatgctgcaactgagactccacacctcaaactcggactgatgaatttcgcggacgagtttgccaagcttcaggattaccgccaagctgaagttgagcggctcgaagcaaaggtggtggaacccctgaagacgtatgggacgattgtgaagatgaaacgggatgatttgaaagccactcttaccgcgaggaacagggaggcaaagcagctgacccagctggagcgcaccaggcaacgaaatccatcagaccggcacgttatcgcccaggcagagacagaattgcagcgagcggcaatggacgcaagtcggacatctagacatctagaagagactattaataacttcgaacgtcagaagatgaaagacattaaaacaatcttctccgagtttatcacaatcgagatgctgttccatggtaaagctcttgaggtgtataccgcggcgtaccagaacatccagaacatagacgaggatgaagacttagaggtgttccgtaatagcttatacgcaccagactattcctcccgactggatattgtccgcgctaattctaaatctccgttacagcggtcattaagcgcaaagtgcgtgtctggaacaggtcagcaggaagctggctgggcagcgacctgccagacactaatttag

SEQ ID NO: 240894 - DNA, 870 bp, Artificial Sequence
  derived and/or modified sequence
atgatgcggcggaccctggagaaccggaacgcccagaccaagcagctacagacagccgtgtccaacgtggaaaagcatttcggggaactgtgtcaaatcttcgccgcgtatgtaaggaaaacggcccggctacgcgacaaggcagatcttttagttaatgaaatcaacgcctatgccgctacagaaaccccccatctaaagcttggcctgatgaatttcgcagacgaattcgcaaagctccaggactatagacaagccgaggtagaaagactggaggctaaggtggtggaacccctgaagacttacggtacaatcgtgaagatgaaaagagacgatctcaaggccacactgactgcgcgcaatagagaggcaaaacaactgacgcagctggaacgtactcggcagaggaatccaagtgaccgccacgtcatatcacaggccgagaccgaactccagcgcgccgccatggacgccagtaggactagcagacacctggaggaaacgatcaataactttgaacggcagaaaatgaaggacatcaaaacaatcttctcagaattcataaccatagaaatgctttttcatggtaaagctcttgaggtgtacactgccgcctaccaaaatattcagaatattgatgaggacgaggacctcgaggtcttccgcaactctttatatgcacctgactacagttctcgactggatatcgtcagggctaatagcaaatcacccctgcagcggtcgttatctgcgaagtgcgtgagcggaacaggacaggtgagtacttgccggcttcggaaggaccagcaggccgaggacgacgaagatgacgagcttgatgttactgaggaggaaaactttctgaagtag

SEQ ID NO: 240895 - DNA, 789 bp, Artificial Sequence
  derived and/or modified sequence
atgatgcggcggaccctggagaaccggaacgcccagaccaagcagttacagacagcagtatcaaacgtcgaaaagcacttcggcgagctttgtcagatatttgctgcctacgtaagaaagacggcccgcctacgtgacaaggctgatctgctagtcaatgaaatcaacgcctacgccgctacggaaacccctcatttaaagttaggactcatgaactttgcagatgaatttgccaagctacaggattaccggcaggctgaggtggagaggctggaggccaaggttgtcgaacctctgaagacgtatggcaccatcgtcaagatgaaacgggatgatttgaaggctaccctcacagcaagaaaccgcgaggctaagcaactgacacagctcgaaagaacccggcagagaaacccttccgataggcacgtgattgcccaggccgagaccgagttgcaacgggccgcaatggacgcctctcggacatctcgccatctggaagagactatcaataacttcgagcgccagaaaatgaaagacattaagactatatttagtgagttcattactatcgagatgctcttccatggaaaagctcttgaagtttacaccgctgcatatcagaacattcagaacatcgacgaagatgaggatctggaacgctggtcctttgctatgttgccgagacttgtgttgaatagctggggctcctctgaccccccagccttagccagccagagcgtgaggttctctgaaatactctgtatgcatcaaatcattcatttagtctag

SEQ ID NO: 240896 - DNA, 819 bp, Artificial Sequence
  derived and/or modified sequence
atgatgcgcagaacactggaaaataggaacgctcagacaaagcaactacaaacagccgtgtccaacgtcgaaaagcatttcggcgagttgtgccagattttcgccgcatacgtccgcaaaaccgctcgcctgcgggataaggctgacctgctcgtgaacgagattaacgcctacgcagccactgaaacaccacacctcaaactgggactcatgaatttcgctgacgagttcgctaaactccaggattaccggcaagcagaggtggagaggctggaggcaaaggtggttgagccactgaagacatacggaactattgtcaaaatgaagagggacgatttgaaagcgaccttgactgctcggaatcgggaggctaagcagcttactcaactggaaagaacgagacagaggaatccatcagaccgacacgtcattgcacaagccgaaacggagttacaaagagctgcgatggatgcctcaaggacaagtagacacctggaagaaacaatcaacaacttcgaacgccagaagatgaaggacataaagaccatcttttccgaattcataaccatcgaaatgctttttcatggcaaggctctggaggtgtacactgccgcttatcagaatatccaaaatatagatgaggacgaggatctcgaggtgttcagaaatagtctttacgcgccagactacagctcacgtctcgacatagttcgtgcaaattccaagagcccccttcaaaggtccctctctgctaaatgcgttagtgggacgggacaacaggaggccggttgggctgccacatgccaaacactgatctag

SEQ ID NO: 240897 - DNA, 870 bp, Artificial Sequence
  derived and/or modified sequence
atgatgcgacggacgctggaaaacagaaacgcccagactaagcagcttcaaacagctgtgagcaatgttgagaagcatttcggagagctttgtcaaatctttgcagcttacgtgcgcaagacagctcgactcagagacaaggctgatttgttggtgaatgagattaacgcttacgctgccactgaaacacctcacctcaagctggggctgatgaacttcgctgacgaattcgctaagctccaggattaccgccaggctgaggtggaacgcctggaagctaaggtcgtggagccacttaagacctacgggaccattgtgaaaatgaagcgtgacgacttgaaggccactctgaccgcgcgaaaccgggaggccaagcagctgactcagctggagcggactcgccagcgaaatcccagcgacaggcacgtaatctctcaggcagaaaccgaactccagcgcgctgccatggacgccagccgaacctcccggcacctcgaggaaaccatcaataacttcgaacgccagaagatgaaggatataaaaacaatcttttccgagttcataacaatagagatgctttttcacggaaaggccttagaagtgtacaccgcagcttaccagaacatacagaatatcgatgaggatgaagatttagaagttttccggaacagcttatacgctccagactactcctccaggctcgacattgtgcgggcaaactcaaagtcccccttacagagaagtctgtcagccaaatgcgtatcaggaaccggacaggtatcaacctgcagattgcggaaagatcagcaggcagaagatgacgaggatgatgaactcgatgtaactgaagaggagaactttcttaagtag

SEQ ID NO: 240898 - DNA, 789 bp, Artificial Sequence
  derived and/or modified sequence
atgatgcggagaactcttgaaaataggaatgcccagacgaagcagcttcagacggccgtctccaacgtggagaaacacttcggagaactatgtcagatcttcgccgcttatgtgcggaagaccgcccgtctgagagacaaggccgatctgctggttaacgaaatcaatgcctatgcggctactgaaaccccccacttaaaactcggcttaatgaactttgctgatgaattcgctaagcttcaagattataggcaggcagaagtagaaaggctcgaggccaaagtggtggagcctttgaaaacctatgggacaatcgttaagatgaagcgagatgatttaaaggcgactttaacggcaaggaatcgggaagctaagcagttaactcaactcgaacggacccgtcagcgtaaccccagcgataggcacgtgatagcccaggcagaaacagaactccagagggcagccatggacgcatcaaggaccagcagacatctggaagaaactatcaacaactttgaacggcagaaaatgaaggatattaaaaccatcttcagtgagttcatcacaatcgagatgttgtttcatggcaaggcactggaggtttatacagcagcctatcagaacattcagaatatcgatgaggatgaagatctagaacggtggtcttttgctatgcttcctcggctggttctgaacagttgggggtcttcagaccctccagccctagcgagtcagtccgtgcggttttcggaaattctgtgtatgcatcagattatacatctggtatag

SEQ ID NO: 240899 - protein, 135 aa, Artificial Sequence
  derived and/or modified sequence
MGNYLLRKLSCLGENQKKPKKGNPDEERKRQEMTTFERKLQDQDKKSQEVSSTSNQENENGSGSEEVCYTVINHIPHQRSSLSSNDDGYENIDSLTRKVRQFRERSETEYALLRTSVSRPCSCTHEHDYEVVFPH

SEQ ID NO: 240900 - protein, 80 aa, Artificial Sequence
  derived and/or modified sequence
MGNYLLRKLSCLGENQKKPKKGNPDEERKRQEMTTFERKLQDQDKKSQEVSSTSNQENENGSGSEEVCYTVINHIPHQRS

SEQ ID NO: 240901 - DNA, 408 bp, Artificial Sequence
  derived and/or modified sequence
atgggcaactacctgctgagaaagctgagctgcctgggcgagaaccagaagaagcccaagaagggcaaccccgacgaggagagaaagagacaggagatgaccaccttcgagagaaagctgcaggaccaggacaagaagagccaggaggtgagcagcaccagcaaccaggagaacgagaacggcagcggcagcgaggaggtgtgctacaccgtgatcaaccacatcccccaccagagaagcagcctgagcagcaacgacgacggctacgagaacatcgacagcctgaccagaaaggtgagacagttcagagagagaagcgagaccgagtacgccctgctgagaaccagcgtgagcagaccctgcagctgcacccacgagcacgactacgaggtggtgttcccccactag

SEQ ID NO: 240902 - DNA, 243 bp, Artificial Sequence
  derived and/or modified sequence
atgggcaactacctgctgagaaagctgagctgcctgggcgagaaccagaagaagcccaagaagggcaaccccgacgaggagagaaagagacaggagatgaccaccttcgagagaaagctgcaggaccaggacaagaagagccaggaggtgagcagcaccagcaaccaggagaacgagaacggcagcggcagcgaggaggtgtgctacaccgtgatcaaccacatcccccaccagagaagctag

SEQ ID NO: 240903 - DNA, 408 bp, Artificial Sequence
  derived and/or modified sequence
atggggaattacctgcttaggaaactcagctgcctgggggagaaccagaagaagcctaaaaagggcaaccctgacgaagagcgcaagcgacaagagatgacgaccttcgaaagaaaactccaggatcaggataaaaagtcgcaagaagtctccagtacaagcaaccaggagaacgaaaatggatctggatcagaagaggtgtgttacaccgtgattaatcacatcccccatcagcggtcctccctgtcttccaacgacgatggctatgaaaacatcgattcactgacccgcaaggtgcgacagttccgcgaaagatcagaaacagagtacgccctcctccgcacctccgtgagccggccctgttcttgtactcacgagcacgattacgaagttgtctttccacactag

SEQ ID NO: 240904 - DNA, 243 bp, Artificial Sequence
  derived and/or modified sequence
atgggaaactatctcctccgcaaactgtcctgtctaggagagaaccagaagaagcctaagaagggaaatcctgacgaagaaagaaaaaggcaggagatgaccacattcgagcgtaaactgcaggatcaggataagaaatctcaagaggtgagttccacgtccaaccaggagaacgaaaacggttcggggtccgaggaggtgtgctacaccgtcattaaccatatccctcaccagcgctcgtag

SEQ ID NO: 240905 - DNA, 408 bp, Artificial Sequence
  derived and/or modified sequence
atgggcaactacctgctgaggaagctgagctgcctgggggagaaccagaagaagcccaagaagggcaacccagatgaggagaggaagaggcaggagatgaccacctttgagaggaagctgcaggaccaggacaagaagagccaggaggtgagcagcaccagcaaccaggagaatgaaaatggcagcggcagcgaggaggtgtgctacaccgtcatcaaccacatcccccaccagaggagcagcctgagcagcaatgatgatggctatgagaacatcgacagcctgaccaggaaggtgcggcagttccgggagaggagtgaaacagaatatgccctgctgcggacctctgtgtcccggccctgcagctgcacccatgaacatgactatgaggtggtgttcccccactag

SEQ ID NO: 240906 - DNA, 243 bp, Artificial Sequence
  derived and/or modified sequence
atgggcaactacctgctgaggaagctgagctgcctgggggagaaccagaagaagcccaagaagggcaacccagatgaggagaggaagaggcaggagatgaccacctttgagaggaagctgcaggaccaggacaagaagagccaggaggtgagcagcaccagcaaccaggagaatgaaaatggcagcggcagcgaggaggtgtgctacaccgtcatcaaccacatcccccaccagaggagctag

SEQ ID NO: 240907 - DNA, 408 bp, Artificial Sequence
  derived and/or modified sequence
atgggcaactacctgctgcggaagctgagctgcctgggcgagaaccagaaaaaacctaaaaaagggaatccagacgaagaaagaaaacgacaggaaatgacaaccttcgagcggaagctccaagaccaagataagaagagccaagaagtgtcgagtaccagtaatcaggagaatgagaatgggagcggctccgaggaagtgtgttatacagtgattaatcatatcccccatcagcggagctcactctctagtaacgatgatggctatgaaaacatagactccctaacgcgaaaggtgagacagttcagagaacgatctgaaactgaatatgcactcctccggacttcagtcagccgcccctgctcttgcacacatgaacacgactatgaagttgtttttccgcactag

SEQ ID NO: 240908 - DNA, 243 bp, Artificial Sequence
  derived and/or modified sequence
atgggcaactacctgctgcggaagctgagctgcctgggcgagaaccaaaagaagccgaagaagggcaacccagacgaggagcgcaagcgacaggagatgaccacctttgagcggaagctgcaggatcaggacaagaagagtcaggaggtgtcttctacttccaaccaagaaaacgagaatggctccggtagtgaagaagtgtgctataccgttataaatcacattccccatcagcggagctag

SEQ ID NO: 240909 - DNA, 408 bp, Artificial Sequence
  derived and/or modified sequence
atggggaactacctgctgcgtaagctcagctgcttaggcgaaaatcagaaaaagccaaagaaaggaaaccctgacgaggagcggaagaggcaggaaatgaccacctttgagagaaaacttcaagaccaagataagaagtctcaggaagtttcctccaccagtaatcaggaaaatgagaacggtagcgggtccgaagaggtgtgttacacagtcattaaccacattccacaccagcgaagttcactctcgtccaatgacgatgggtacgagaacatcgacagcctgacaaggaaagtgcggcagttccgagagagaagtgaaacggagtatgcactactaagaacatcagttagccggccttgctcatgcacacacgagcacgactatgaggttgttttcccacactag

SEQ ID NO: 240910 - DNA, 243 bp, Artificial Sequence
  derived and/or modified sequence
atgggaaactatctgttgcggaagctcagttgtttgggagaaaaccagaagaaaccaaaaaagggtaatcccgacgaggaaagaaagagacaggagatgacaactttcgagcgaaagctgcaagaccaggataaaaaatcacaagaggtgtcttctacctccaaccaggaaaatgaaaatggctcagggagcgaagaagtttgctataccgtcatcaatcacattcctcatcagcggagttag

SEQ ID NO: 240911 - DNA, 3820 bp, Artificial Sequence
  derived and/or modified sequence
agatgcaacgtcctgcctcatgcattttcctcttggtgctttggtcagaacttccccaagtggagtgaaactcaggagctgagaaaccgagtcactgtgaaaagatgggaaattatctcctgcgaaaactcagttgcctgggagagaatcaaaagaagcccaagaaaggaaacccagatgaggaaagaaaacggcaggaaatgactacatttgaaagaaaacttcaagatcaagataagaaaagccaagaagtttcatccacttctaatcaggaaaacgagaatggcagtggttctgaagaagtgtgctacactgtcattaatcacatcccccatcagagatcctccctgagctccaatgatgatggctatgagaacattgactccctcacaaggaaagtgagacagtttagagaaaggtcagagacagaatatgcccttcttaggacttctgttagtaggccttgttcctgcacccatgagcatgattatgaagttgtgtttccacactaaaatcctcaagctgctttatcaccttccagcaatgaagacaatgcagaatagcagactctggcgaagttgttcaccctgagcagtgcatgaaacattcctttctggctaaagtttagaaatattatcttattatatatccttaggcaactctgatatgtggcatctctgtggcttaggtgaaatcatagaaattgacacaatgacctaaaatattctatgtgtttttgcttgtaaagtttgaggacatggaggtgataaaaaaaactttcttaggacaataatgtaaaatgaaaataaatttctaatccccctgactaactgaatggaccctcttctaggccaaagagacctcagatgaacctgaaagactgaattctggccatgataggaagggaggtgagacacaccttgttataccccttcccttttggagtttatgcacaagtgaccaggatgagtcataagactgatgaaatagactgattgtggcaataagagtcccaattccaacctgactctggtgtagatcacacactgtctgagggattccatctatgagactttgtctacataacagagaccttggtttccacaacccctttattttagctaaagcattcttttctactgacttcttaagtctttagacaaagcttaactctttcaaccaattgccaatcagacaaactttgaatctacctatgacctgtaagctctctcctgcttcaagatcttgcctctttaagctgaaccgatgtgcactttccatttaatgatttatgtctttgcttgtaactcctgtctccctaaaatgtataaaagtaaacggtgacctgaccacctcaggcacactttctcaggacctcctgagagtgtatcccaggccatggtaagtcatgttggctcagaatcaacctctttaaatattttacagaatttgggttttggttaccaataagtctccacaaatatatgtccaagaatcttcaattccaagcctgctcaccaaatttcaaatgccaacatctccccatccaattacctatttcatctttgaggtgtaatctactcaataaactgtgtaagaccagtgaccagaccctttgctaacctgacatttacttcaatttttctttttctatgtactggatatttttgcatataaacttgcagtaatagttcaaaaattaatagtttttgacattggcttttctgagaagagaaattgaaagtgtcacaaaataaaaaaagatgaaatgaagcatatataattgtcaattttttcaattttctagccaacagagaatcgaaggattctgttcaaatattagtaaaaattgaaaataaacttgtgcttatattttgtttgcaacacactagttaatttaacctgtgactagttatctctaccgaaggtggatgtgtagtttctggttttaaaattcaagcaaactggaaaataatccatctaattatgctttctttcccaagaagttttttaatgatatgccagcttcctaatttggagacaaaagccttaattgacaatgcattcattatatatttttttgtatagttacagtatacgagttgagtatcccttagatgagatgcttgggaccagaagtgttttggatttcagatttatttttggattttggaatatttccatacatataatgagagagttggaaaatgggattcaagtctaatcataaaattcacttatgtttgatatacaccttatctgaatagcctgaaggtaattttatacaatattttaaataattttatgcctgaaacagagtttgcgcacattggaccatcagaaagcagaagtgtcactatttcaagtcagtgctcaaaaagtttcagatgttaagctggtgatgcagttcatgccagtgatccgagtactttgggaagccaagacaggtggatctcttgagcccaggagtttgaggccagactgcacaacacagtgagacctcgtttctacaaataattaaaaaattagccaggtgtggtggtgcacacctgtagtcccaggtactcaggaggctgaggtagtaggattgtttgagactgggaggttgaggctgaactgagccaggatcttgccaccacattccagcttgggcaacagagtgagaccctgtctcaaaaaaaaaaaaagtttcagattttggagcatttcagatcttcagattagggattttcaacctgtactgaccttttagtcattgacaagcattaatcaataggtggactccagataactcatttgctgtatacacattttgcctctctattcaacgaattcttatgccctcttgtggtgattttaatgtgcggaagggaaacaatagaaattttgcaattctagaaaagtcattctgtcaaaatatgtcagtcctgtagatattagccaattttaggaaaatgacaaaattttttacttttcgtctgcctttgtagctgttttatgatataaataccttatttgtaataaaattaattttaatttgagtaacaatctggaattatcagagaaggggcaagcaataggttaataaacagtattgattggtagaaggaacgttgaaatccaagagcatcaatgtcttctggtggttcaccataagccacagcagatgtcttaatctttccgagatctagtttttcagcaaagcaggatttaagaaatgtaactatcttatgtggttatgaagaacaatagaatcattgctgtataagtgctttttaacctgtaaattttgtgaagcttatcttttatgcatataaatatttgaacattttacattgtttatatttttaatcagttttactcaagtgtgattatatacaagaaaatgtaaccactgtaagggtagagttataagaattttgtcaaatgtattcacccatgtagtcacctccttatgaagagacagaacacgtacatcctcccagaaagttccacagtgctccttttccctgagtttcaccagtcctggcaaccaatgatctgcttcgtataattataactgttctagatatttgtagcaatgtaccctttccatatttattttgtgtgtgtaaggcttcttttagtcattataatatttttgagattcatctatgtttaatgttctatcagtagttgtacatcttacttgtctcagcatatcaccatatagatatactataatttgttaatctaatcactgatggatatgtaggatatttaagtttttgacattatgaataaagtggctataaatgaataaagcgactacaaatttgaa

SEQ ID NO: 240912 - DNA, 522 bp, Artificial Sequence
  derived and/or modified sequence
aatgacaaatatgagcctgaaggaagatgagctgatggcattcccagcttattaccactccttgggggccttatcttacatacatggattcaattcgtagattcagctgggatttactgcctcaagatggttatgttggaggattccaatagttctactggatgtggagccagaaattgtgtggaatgcctggtgtttctttcagttcttggatgccaatctgagaacttccccaagtggagtgaaactcaggagctgagaaaccgagtcactgtgaaaagatgggaaattatctcctgcgaaaactcagttgcctgggagagaatcaaaagaagcccaagaaaggaaacccagatgaggaaagaaaacggcaggaaatgactacatttgaaagaaaacttcaagatcaagataagaaaagccaagaagtttcatccacttctaatcaggaaaacgagaatggcagtggttctgaagaagtgtgctacactgtcattaatcacatcccccatcagagatcct

SEQ ID NO: 240913 - protein, 218 aa, Artificial Sequence
  derived and/or modified sequence
MALVPYEETTEFGLQKFHKPLATFSFANHTIQIRQDWRHLGVAAVVWDAAIVLSTYLEMGAVELRGRSAVELGAGTGLVGIVAALLGAHVTITDRKVALEFLKSNVQANLPPHIQTKTVVKELTWGQNLGSFSPGEFDLILGADIIYLEETFTDLLQTLEHLCSNHSVILLACRIRYERDNNFLAMLERQFTVRKVHYDPEKDVHIYEAQKRNQKEDL

SEQ ID NO: 240914 - protein, 90 aa, Artificial Sequence
  derived and/or modified sequence
MALVPYEETTEFGLQKFHKPLATFSFANHTIQIRQDWRHLGVAAVVWDAAIVLSTYLEMGAVELRGRSAVELGAGTGLVGIVAALLGGGI

SEQ ID NO: 240915 - DNA, 657 bp, Artificial Sequence
  derived and/or modified sequence
atggccctggtgccctacgaggagaccaccgagttcggcctgcagaagttccacaagcccctggccaccttcagcttcgccaaccacaccatccagatcagacaggactggagacacctgggcgtggccgccgtggtgtgggacgccgccatcgtgctgagcacctacctggagatgggcgccgtggagctgagaggcagaagcgccgtggagctgggcgccggcaccggcctggtgggcatcgtggccgccctgctgggcgcccacgtgaccatcaccgacagaaaggtggccctggagttcctgaagagcaacgtgcaggccaacctgcccccccacatccagaccaagaccgtggtgaaggagctgacctggggccagaacctgggcagcttcagccccggcgagttcgacctgatcctgggcgccgacatcatctacctggaggagaccttcaccgacctgctgcagaccctggagcacctgtgcagcaaccacagcgtgatcctgctggcctgcagaatcagatacgagagagacaacaacttcctggccatgctggagagacagttcaccgtgagaaaggtgcactacgaccccgagaaggacgtgcacatctacgaggcccagaagagaaaccagaaggaggacctgtag

SEQ ID NO: 240916 - DNA, 657 bp, Artificial Sequence
  derived and/or modified sequence
atggccctagttccttacgaagagactacggagttcgggctgcagaaatttcacaagcctctggctacatttagctttgccaaccacaccattcagataagacaggattggcgacacctgggcgtggccgccgtcgtttgggacgcagcaattgtactgtcaacgtacctggaaatgggagcagtggagttgcgaggtcggtccgcagtggaactcggtgcagggactgggttggtggggatcgtcgccgctctgcttggagcccatgtcacgatcacagatagaaaagtggccctagagtttctcaaaagcaacgtgcaagccaatcttccccctcacattcaaacaaagacggtggtgaaagaactgacttggggccagaatcttggttctttctccccaggtgaattcgatctgatcctcggggccgatatcatttatttggaagagacctttacagatctcctccagacattggagcacctttgttcgaatcactcagtcatacttctcgcctgccgaatccgatatgaaagggacaataactttctggctatgctcgagagacagttcaccgttcggaaagtgcactacgatccagagaaggacgtccacatctacgaggctcagaagaggaaccagaaggaggacctctag

SEQ ID NO: 240917 - DNA, 657 bp, Artificial Sequence
  derived and/or modified sequence
atggcgttggtgccgtacgaggaaacaacagagttcggattgcagaaattccataagcccttggccacattctcctttgctaatcatacaatacagattcggcaggattggagacatttgggtgtagcggccgtcgtttgggacgccgcgatcgtcctgtccacatatcttgaaatgggcgctgtagagctgcggggcaggtccgctgtggagctgggcgccggcactgggctggtggggatagtcgccgccctgttgggagcgcacgtaacgattacagatcggaaggtggcactcgagtttctgaagagtaacgtacaagcgaatctgccacctcatattcagaccaagacagttgtgaaagaactcacttgggggcagaaccttggttccttctcccctggagagttcgatttaatcctaggcgccgacataatttatctggaggagacttttacggaccttcttcagacactcgagcacttatgctctaatcattctgtcatcctcctggcctgtagaatccgatacgagagagataacaatttcctggctatgctcgagagacagttcaccgtccgcaaggttcattacgaccccgaaaaggatgtccatatttacgaggctcagaagaggaaccagaaggaggatctttag

SEQ ID NO: 240918 - DNA, 657 bp, Artificial Sequence
  derived and/or modified sequence
atggctctggtcccatatgaagagacaacagaatttggtctgcagaaattccacaaacctcttgccactttctcttttgccaaccacactattcaaattcgacaagattggcggcatcttggcgtcgccgccgtggtgtgggacgcagcaatcgtcctctccacataccttgaaatgggtgcagttgaactgaggggccgctccgctgtagagttgggggctggaacgggcctggttgggattgtagccgcgctactcggcgcgcatgtgactatcactgacaggaaggttgccctggagtttctgaaatcgaatgtccaggccaatctcccacctcacattcaaacaaagaccgtcgtgaaggagcttacatggggccagaacttaggaagtttttctcctggggagtttgacctaattcttggggccgacattatatatctggaagaaactttcacagatctgttacaaacgctggagcacctgtgcagtaaccattctgttattctcctcgcctgcagaatccgctacgagcgcgataataatttcctcgcaatgctcgagaggcagtttacagttcgaaaggtgcattatgatccagaaaaagacgtgcacatatacgaggctcaaaagcgcaatcagaaagaggacctctag

SEQ ID NO: 240919 - DNA, 657 bp, Artificial Sequence
  derived and/or modified sequence
atggctctggttccttatgaggaaacgacggaattcggtcttcagaaattccataagcccctggctacattcagcttcgctaaccacacgatccaaattcgccaagactggcgccatctcggtgtggctgcagttgtgtgggacgccgccatagttttgtctacgtatctagagatgggcgcggtagaactcagagggcggtcggctgtggagcttggtgcaggtacgggactagtgggcatcgtggcagctttattgggggcccatgtgacaattaccgacaggaaagtggcattggagttcttaaagagcaacgtgcaggcaaacctcccccctcacatccagaccaaaacagttgtcaaggagttgacctgggggcagaaccttggatccttctctccgggggagttcgacttgatcctgggcgcggacattatctatctagaggaaactttcaccgacctcttgcagacgttggagcacctttgtagtaaccactctgtcatcctcctagcctgcaggattcgctatgagcgtgacaacaactttctggctatgctggaaagacagtttactgttcgaaaggtccattacgaccctgagaaagacgtacatatctatgaggcccagaaacgaaaccagaaagaggatctgtag

SEQ ID NO: 240920 - DNA, 657 bp, Artificial Sequence
  derived and/or modified sequence
atggccctagtgccatatgaagaaaccaccgagttcgggctacagaaatttcacaaaccgctggcgacattctcgttcgccaatcatacgatccagatacgacaggactggaggcatctgggcgtcgctgccgtagtctgggatgcagccattgtgctgagcacatatttagaaatgggagcagtcgaactacgcggcaggagtgcagttgagctaggggctggtaccgggttggtgggtattgtcgctgccctgttgggagcacacgtaacgatcacggataggaaggtggcattggaatttcttaaatccaatgtccaggctaacctccccccacacattcagacaaaaaccgtggtgaaagagctgacatggggccagaacctgggttctttctccccgggcgagttcgacttaattctgggcgccgatattatatatttggaggagacattcacagatcttttgcagacattggaacacctgtgttctaaccactccgtcatccttttggcatgtcgtatcaggtacgagagggataataactttttagccatgctggagaggcagttcacagtaaggaaagtccactatgatcccgaaaaggatgtgcatatctatgaagcacagaaacgaaatcaaaaagaagatctgtag

SEQ ID NO: 240921 - DNA, 657 bp, Artificial Sequence
  derived and/or modified sequence
atggccctggtgccctatgaggagaccacagaatttggcctgcagaagttccacaagcccctggccaccttctcctttgccaaccacaccatccagatccggcaggactggaggcacctgggcgtggccgctgtggtgtgggatgctgccatcgtgctgagcacctacctggagatgggcgctgtggagctgcggggccgctctgctgtggagctgggcgccggcaccggcctggtgggcatcgtggccgccctgctgggcgcccacgtgaccatcacagacaggaaggtggccctggagttcctgaagagcaatgtgcaggccaacctgcccccccacatccagaccaagacagtggtgaaggagctgacctggggccagaacctgggcagcttcagccctggagaatttgacctgatcctgggcgctgacatcatctacctggaggagaccttcacagacctgctgcagaccctggagcacctgtgcagcaaccacagcgtcatcctgctggcctgccgcatccgctatgagcgggacaacaacttcctggccatgctggagcggcagttcaccgtgaggaaggtgcactatgaccctgagaaggatgtgcacatctatgaggcccagaagaggaaccagaaggaggacctgtag

SEQ ID NO: 240922 - DNA, 4805 bp, Artificial Sequence
  derived and/or modified sequence
gcggcgcctcagcccggcctgggcgagccctgggtgctccgccgggcagctcacggcgccccgtatggcctggggatcctaagaggccctgtgacccccctcgcctggtctccctctcacccctggagggttgccgcagctccggggcccccgggcaggaagggcgcactggtcgtcccgggagaggggtctgagcagagggcggggtgcaggcggaatggccctcgtgccctatgaggagaccacggaatttgggttgcagaaattccacaagcctcttgcaactttttcctttgcaaaccacacgatccagatccggcaggactggagacacctgggagtcgcagcggtggtttgggatgcggccatcgttctttccacatacctggagatgggagctgtggagctcaggggccgctctgccgtggagctgggtgctggcacggggctggtgggcatagtggctgccctgctgggtgctcatgtgactatcacggatcgaaaagtagcattagaatttcttaaatcaaacgttcaagccaacttacctcctcatatccaaactaaaactgttgttaaggagctgacttggggacaaaatttggggagtttttctcctggagaatttgacctgatacttggtgctgatatcatatatttagaagaaacattcacagatcttcttcagacactggaacatctctgtagcaatcactctgtgattcttttagcatgccgaattcgctatgaacgggataacaacttcttagcaatgctggagaggcaatttactgtgagaaaggttcactacgatcctgaaaaagatgtacatatttacgaagcacagaagagaaaccagaaggaggacttataattggctataatttataagaatgttgtcattgagtgtgtcacttaaggtcttagactgcaaatctaaccatatttaatgaaatgtcttactgtacaaaaagtctaagccaaaggttctcaggggagaaagcacatgtgcagttttaaaacaaagcagtgctttgtcccattgctgtgatttttagtcagactttactcagtctgaaatgcaattaacattaaaggattaagtgtgagatttcgatttatgctatttgtgtatcccatactcctcccttttaataaacagtttccactgatgatatgaagggccggtataaagaagtctttaaatgagtaagctttcttggtaagattaaatcttacaaattatttttaaaaccttgtgatatatacaatgtttagctgagttttctaattttctggatgtaaaacaaaaggtttaacctatacattccttgagctgttagtgctatttaaatcttttgccctgtttaggtcctaaacacttttagttgagtaggatatgagcttttttgggtctcatatcatgctttttgccttaatttcaggtatatatatatatataaataaaggaattaagtaaaaataaaatttcagttactttttaaaagcacctgaaatctggccggatgcggtggctcatgcctgtaatcccaccactttgggaggccgaggcgggcagatcacctgaggtcaggagttcaagaccagcctggccaacatggtgaaaccccatctctactaaaaatacaaaaattagccgggcgtggtgtcaggcgcctgtaatcccagctactcaggaggctgaggcaggagaatcgcttgaacctgggaggcagaggttgcagtgagctgagattgcaccattgtactccagcctgggggacaagagcgagactccatctcaaaaaaaaaaaaaaaaaaaaaaaaaaaaagcacctgaaatcttgaataggttttctttttttttttttttttttaattaatttattttttttttattgatcattcttgggtgtttctcgcagagggggatttggcagggtcataggacaatagtggagggaaggtcagcagataaacaagtgaacaaaggtctctggttttcctaggcagaggaccctgcggccttggccttccgcagtgtttgtgtccctgggtacttaagattagggagtggtgatgactcttaacgagcatgctgccttcaagcatctgtttaacaaagcacatcttgcaccgcccttaatccatttaaccctgagtggacacagcacatgtttcagagagcacagggttggggataaggtcacagatcaacaggatcccaaggcagaagaatttttcttagtacagaacaaaatgaaaagtctcccatgtctacttctatccacacagacccggcaaccatccgatttctcaattttttccccacccttcccgcctttctattccacaaaaccgccattgtcatcgtggcccatccccaatgagccgctgggcacacctcccagacggggtcgtggccgggcagaggggctcctcacttcccagtaggggcggccgggcagaagcgcccctcacctcccggatggggcggctggccgggcggggggctgacccccccaccaccctcccggacggggcggctggccaggcagaggggctcctcacttcccagtagggacggccgggcagacgcgcccctcacctcctggatagggcggctggctgggcggggggctgtcccccccacctccctcccggacggggcggctggccgggcagaggggtcctcacttcccagtaggggcggccgggcagaggcgcccctcacctcccggacggggcggccggccggaaggggggctgaccccccccacctccctcccggaccgggcggctggccgacccccccccccccccccgcctccctcccggacggggcggctggccgggcagaggggctcctcactttccagtaggggcggccgggcagaggcgcccctcacctcccggacggggcgactggccaggcggggggctgacccccccacctccctcccggatggggcagctggccaggtgggaggatgacccccccacctccctcccgggcggggcggctggccgggcagaggggctcctcacttcccagtaggggcggccgggcagaggcgcccctcacctcccggatggggcggctggccaggcggggggctgatccccccacctccctcccggacggggcggctggccaggcagaggggctcctcacttcccagtaggggcggccgggcagaggagcccctcacctcccggacggggcggctggccgggcggggggctgaccccccccacctccctcccggacggggtggctgctgggcggagacgctcctcacttcccagacggggtggttgccggacggaggggctcctcacttctcagacggggcggttgccaggcagagggtttcctcacttctcagacggagcggccgggcagagacgctccccacctcccagacagggctgcggcccagcagaggcgctcctcacatcccagacagggcggcggggcagaggtgctccccacatctcagacgatgggcggccgggcagagacgctcctcacttcctagatgggatggcggcggggaagaggcgctcctcgcttcccagatgggatggcggccgggcagagacgctcctcactttccagactgggcagccaggcagaggggctcctcacatcccagacgatgggtggccaagcagagacgctcctcacttcccagacggggtggcggccaggcagaggctgcaatctcggctctccgggaggccaaggcaggcggctgggaggtggttgcagcgagccgagatcacgccactgcactccagcctgggcaccattgagcactgagtgaacgagactccatctgcaatcccggcacctcgggaggccgaggctggcggatcactcgcggctaggagctggagaccagcccggccaacacagcgaaaccccgtctccaccaaaaaaaaccgaaaaccagtcaggcgtggcggtgcgcgcctgcaatcgcaggcactcggcaggctgaggcaggagaatcaggcagggaggttgcagtgagccgagatggcagcagtaccgtccagccttggctcggcatcagagggagaccgtggagggagagggagagggagagggagagggagggggagggagagggagagggagggaataggttttctatttcaagtcaagagctgaggttttccccttctgttttacccttgctcaaatgtcttaatgcagttctttcccaagctttccctgcttccttaacaacgcataggatgacattaaaagttttaaatctcatccctgcctgagaggttagcttcctacatataagctccttttgtattggacttgtaattgctcattcagtggtagtattgccctgtagagtgtaagctccttgagggccaagaatgcttctgcctcttccattgttgcttccccagtaccttctgtatatttcataaccaaataatgaaaaagatacattccatttaaagggcattgactttgggttaaatgattgttatattgttttaggattatctatgatacactttgacatctcacacacacacatgaacttttctttttacaatgcaaaagtttaaacaatagcttaaatttagactgcaagaatattataatctcaatatggtatttggtactagagatagatttcttttataaaatcttaaaaacaggacgttctcttccttttgaacctttatcccagaggtgaaaatatccaatatgttgttttctgcatatattgaagtagtagtttcactttaataaagatggattaaaagtt

SEQ ID NO: 240923 - DNA, 1770 bp, Artificial Sequence
  derived and/or modified sequence
ccagtgtcgctcacttccagggtcggggagacggaactgcggcgaccatgtatttctggtttatcaaaccgctaacacccagtctaagggcaggttctgtcccattgttatcactatcgaagcagccgatggaggaggggaggtctgagcagagggcggggtgcaggcggaatggccctcgtgccctatgaggagaccacggaatttgggttgcagaaattccacaagcctcttgcaactttttcctttgcaaaccacacgatccagatccggcaggactggagacacctgggagtcgcagcggtggtttgggatgcggccatcgttctttccacatacctggagatgggagctgtggagctcaggggccgctctgccgtggagctgggtgctggcacggggctggtgggcatagtggctgccctgctgggtgctcatgtgactatcacggatcgaaaagtagcattagaatttcttaaatcaaacgttcaagccaacttacctcctcatatccaaactaaaactgttgttaaggagctgacttggggacaaaatttggggagtttttctcctggagaatttgacctgatacttggtgctgatatcatatatttagaagaaacattcacagatcttcttcagacactggaacatctctgtagcaatcactctgtgattcttttagcatgccgaattcgctatgaacgggataacaacttcttagcaatgctggagaggcaatttactgtgagaaaggttcactacgatcctgaaaaagatgtacatatttacgaagcacagaagagaaaccagaaggaggacttataattggctataatttataagaatgttgtcattgagtgtgtcacttaaggtcttagactgcaaatctaaccatatttaatgaaatgtcttactgtacaaaaagtctaagccaaaggttctcaggggagaaagcacatgtgcagttttaaaacaaagcagtgctttgtcccattgctgtgatttttagtcagactttactcagtctgaaatgcaattaacattaaaggattaagtgtgagatttcgatttatgctatttgtgtatcccatactcctcccttttaataaacagtttccactgatgatatgaagggccggtataaagaagtctttaaatgagtaagctttcttggtaagattaaatcttacaaattatttttaaaaccttgtgatatatacaatgtttagctgagttttctaattttctggatgtaaaacaaaaggtttaacctatacattccttgagctgttagtgctatttaaatcttttgccctgtttaggtcctaaacacttttagttgagtaggatatgagcttttttgggtctcatatcatgctttttgccttaatttcaggtatatatatatatataaataaaggaattaagtaaaaataaaatttcagttactttttaaaagcacctgaaatctggccggatgcggtggctcatgcctgtaatcccaccactttgggaggccgaggcgggcagatcacctgaggtcaggagttcaagaccagcctggccaacatggtgaaaccccatctctactaaaaatacaaaaattagccgggcgtggtgtcaggcgcctgtaatcccagctactcaggaggctgaggcaggagaatcgcttgaacctgggaggcagaggttgcagtgagctgagattgcaccattgtactccagcctgggggacaagagcgagactccatctcaaaaaaaaaaaaa

SEQ ID NO: 240924 - DNA, 657 bp, Artificial Sequence
  derived and/or modified sequence
atggccctggtgccctacgaggagaccaccgagttcggcctgcagaagttccacaaacctctggcaacctttagttttgcaaaccataccattcaaatccgacaggattggcgccacctgggcgtcgccgccgtcgtgtgggacgccgccattgttctgagcacctacctggagatgggagccgtggaacttagggggcgttcagcagtcgagttgggggccggcaccgggctggtgggcatcgtcgcagcccttttgggggcccatgtcacaatcacagataggaaggtggctctggagttcctgaagtctaacgttcaagccaacctcccgccacatatccagaccaagacggtggtcaaagagctgacgtgggggcagaacttggggagtttttcgcctggagagttcgacctgatcctgggagccgacattatctacctagaggagacatttactgacctgcttcagacattagagcacctttgttccaaccacagcgtcatcctccttgcgtgcaggataagatatgaaagagacaataacttcctggctatgctggagcgtcaatttaccgttaggaaagtccactacgatcctgagaaggatgtgcatatctacgaagcccagaagcgcaaccagaaggaagacctctag

SEQ ID NO: 240925 - DNA, 657 bp, Artificial Sequence
  derived and/or modified sequence
atggccctggtgccctacgaggagaccaccgagttcggcctgcagaagtttcataaacctttagctacctttagttttgccaatcacacgatccaaatccggcaagactggaggcatctgggtgtggcagctgtcgtgtgggacgccgccattgtgctgtccacctacttagaaatgggcgcggttgagttgcgcgggcggtcagccgtagagctgggagctggcaccggccttgttggcatcgtggcggccctgctcggcgcacatgtaacaatcaccgatcgcaaggtcgcgctcgagtttctgaagtcaaatgtgcaggcaaatctcccaccacacattcagaccaagacggtggtgaaggaacttacatggggccagaatctgggctcattttctcctggagaattcgacttgatcctgggggcagacatcatctacctggaagaaacttttactgacctgttacaaactctggagcatctgtgctccaatcacagtgtaatccttctggcctgtagaattagatatgagcgagacaataattttctcgctatgctagaacgtcaatttacggttcgtaaggtacattatgatccagagaaagacgtacacatatacgaggcccagaagcgtaaccagaaggaggatctctag

SEQ ID NO: 240926 - DNA, 657 bp, Artificial Sequence
  derived and/or modified sequence
atggccctggtgccctacgaggagaccaccgagttcggcctgcagaaattccataaaccattggcaacattctcattcgccaaccacacaattcagattagacaggattggcgccacctcggagtggctgccgtcgtttgggatgcggctatagtgctctccacatacctagaaatgggtgccgtcgagctgagagggcggtcagcggtcgagttgggtgctggcactgggctggtgggcattgttgctgcactgctgggggcacacgtgaccattaccgatagaaaagtggccctggaatttcttaagagcaatgtacaagcaaatcttcccccccacattcaaacgaaaacagtcgtaaaggagctgacgtgggggcagaacctgggctcattctctcctggggagttcgacctcattctcggagctgatataatctatctggaagagaccttcaccgacctgcttcagaccttggagcatctatgctccaaccattccgtgatcctgctggcctgtaggattaggtacgagagggataataacttcctagctatgttagagagacagttcaccgtacgcaaggtgcattacgacccggagaaggacgtacatatatatgaggcccagaagagaaatcagaaggaagatttgtag

SEQ ID NO: 240927 - DNA, 657 bp, Artificial Sequence
  derived and/or modified sequence
atggccctggtgccctacgaggagaccaccgagttcggcctgcagaagtttcacaagcctctggccaccttttcattcgcaaaccacactatccagatccggcaagattggcggcacctgggtgttgcagccgtagtgtgggacgctgccattgttctgagcacttatctggagatgggggctgtcgagcttcgggggcggtccgctgtcgagctaggggctggaaccggcttggttggcatcgtggccgcgcttttgggtgctcacgtgaccattactgacaggaaagtagctctggagttcttgaagagcaacgttcaggcgaatctgcctccccacattcaaacaaagaccgttgttaaagagctcacctggggacagaacctcggtagctttagccctggtgagtttgatttgatcttgggagctgacatcatctatctggaagagactttcaccgacctgctgcagacactggagcatctttgctctaaccacagtgtgatccttctcgcctgtaggattcgatatgagagggacaacaattttcttgccatgcttgagcgtcagttcacagtgcggaaagtccattatgatccagaaaaggacgtacacatctacgaggcgcagaagcggaaccagaaagaagatctatag

SEQ ID NO: 240928 - DNA, 657 bp, Artificial Sequence
  derived and/or modified sequence
atggccctggtgccctacgaggagaccaccgagttcggcctgcagaagttccacaagccattagcaaccttctcgttcgctaaccacactattcagattcgccaggactggcgacatctgggagtcgccgcagtcgtttgggacgccgctattgtgctttccacgtacctggagatgggcgctgtcgaactgcgcggcagaagtgcagtggagctcggggccggaaccggcctggtgggcattgtagctgcactactcggcgcccacgtcacaattactgatcgcaaggtagccttagagttcttaaagagcaacgtacaagccaacctgcctcctcatatccaaaccaagactgtggttaaagaactcacatgggggcagaatcttggtagcttttcaccgggggagttcgacctcattctgggagccgatattatatatctcgaggagacctttacagacctcctgcagacactcgagcacctttgtagtaatcattccgtgatcttgctggcttgcaggataaggtacgagagagataacaactttcttgccatgctggagcggcagtttactgtccgcaaagtccactacgatccagagaaagacgtccatatctatgaggctcagaagcgaaaccagaaggaagatctgtag

SEQ ID NO: 240929 - DNA, 657 bp, Artificial Sequence
  derived and/or modified sequence
atggctctggtaccttatgaggagaccacagaatttggtctgcagaaatttcacaaaccccttgcgacattcagctttgctaatcataccatacaaataaggcaggactggcggcatctgggcgtcgccgctgttgtctgggacgctgcaattgtgctgtcaacttatctggagatgggggcagttgagctcagaggacgctccgctgtggagctcggggcaggaactggcctcgtgggcatagtggccgcattgttaggggcacatgttactatcactgacaggaaagtcgcactggagtttcttaaatcgaacgtgcaggccaatctgccaccccacatccagaccaagacagttgtcaaagaactcacttgggggcaaaatctgggaagtttctctccaggagaatttgatctgatcctaggcgcagacatcatctatcttgaagaaactttcacagatctgctccagaccttggagcatctttgctccaaccactctgtgatcctgctggcatgccgtatccggtacgagagagacaacaactttttggctatgcttgagcggcaatttactgtacggaaggtgcactacgaccccgagaaagacgtgcacatttacgaggctcagaagcgtaatcagaaggaagacttgtag

SEQ ID NO: 240930 - DNA, 657 bp, Artificial Sequence
  derived and/or modified sequence
atggccctggttccgtatgaggagacgaccgagtttggtctgcaaaaatttcacaaacctttagcgacattctcttttgccaaccacacaattcagataagacaagactggaggcacctgggcgtcgccgcagtcgtgtgggatgcagcaattgtcctgagtacttacctggaaatgggagcggttgagctgcggggaaggtcggcagtcgaattgggagcaggcaccgggcttgtgggcatcgtcgcagccctcttgggtgcacacgtgactattacagaccgcaaagtagccttggaatttctcaagtcaaacgtgcaggctaacttgccaccccatattcagaccaaaacagtggtcaaggagctgacctgggggcagaacttaggatccttttctcctggcgaatttgatctcatacttggcgcagacattatctatctagaagagactttcaccgaccttctgcagactcttgaacatctttgttcaaatcattcagttattctgcttgcttgtcggattcgatatgagcgagacaataactttttagctatgttagagagacaatttacggtgcggaaagtgcattacgacccagaaaaggatgtgcatatctatgaagctcagaaaaggaatcagaaggaagacttgtag

SEQ ID NO: 240931 - DNA, 657 bp, Artificial Sequence
  derived and/or modified sequence
atggccttagttccatacgaagaaactacagagttcggactgcagaagttccacaagcctctggccacattcagttttgccaatcatacgatccaaatccggcaggattggcggcacctcggggtagccgcagttgtgtgggatgctgctatcgtcctatccacatacctggagatgggcgctgtagaactgagaggcaggtctgctgtggagcttggagccggaaccgggctagtgggaatagtggctgcactgcttggcgctcatgtgaccataactgataggaaggtggctctggagtttctgaaatctaacgtccaggccaacctcccaccgcacattcagacaaagacagttgttaaagagctcacctgggggcaaaatctcgggagcttttcccccggagaattcgacctgatcttgggagccgacataatttacctggaagagaccttcacggatctgctacagacactagaacatctctgcagcaaccatagtgtgatcttgttagcctgcagaataagatacgagagagataataactttctagccatgttggagcggcagtttacggtgagaaaggtgcattacgatcctgaaaaggatgtgcacatttacgaggcccagaagcggaaccagaaggaggacctttag

SEQ ID NO: 240932 - DNA, 657 bp, Artificial Sequence
  derived and/or modified sequence
atggccctcgtgccatacgaggagactactgagttcgggctgcagaagtttcacaagccactggctactttcagcttcgctaatcacactattcagatcaggcaggattggcggcatttaggggtcgccgcagttgtgtgggatgctgcgattgtcttgtccacttacctggaaatgggcgcagtggagttgcgaggaaggagtgccgtcgagcttggcgcaggaacaggccttgtaggaatcgtggccgcactgcttggtgcgcatgtcaccataactgaccgtaaggtcgctcttgaatttctcaagtcaaatgtgcaggccaatctgccgccacacatccagaccaagactgtggtaaaggaactcacatgggggcaaaacctggggagctttagccctggggagtttgatttgatcctgggggctgatatcatctacttggaggaaacctttacggaccttctacagactttggagcatctgtgttcaaaccactctgtaattctcctggcgtgcaggattaggtatgagcgtgacaataattttcttgcgatgttggagcgccagttcacagtgcggaaggtgcattatgatccggaaaaggacgtccacatttacgaggcccagaaacggaaccaaaaagaagatttgtag

SEQ ID NO: 240933 - DNA, 657 bp, Artificial Sequence
  derived and/or modified sequence
atggccttggtgccctacgaagaaaccaccgagttcggactgcagaaatttcacaagcccttggctactttttcatttgcaaaccatactattcagatcagacaggactggcgccacctgggggttgcggcagtcgtgtgggatgcagcgattgttctgagtacatacctggagatgggggcagtggaattgcggggacggtccgcagtcgaactgggtgcaggaacagggttggtgggaatcgtcgctgctttactcggggcacacgtcacgatcactgatagaaaggtcgctctggagttcctgaagagcaatgttcaggcaaatctgccaccccacattcagaccaagaccgtagtgaaagaactaacttggggacagaatctgggatccttttcacccggtgagtttgatctcatcctgggggctgacattatctaccttgaggagaccttcacagatcttttacagactctcgagcatttatgctctaaccactccgtgatcttactcgcctgcaggatcaggtacgagcgagacaataattttctagcaatgctagagcgtcagtttactgtgaggaaggtgcactatgatccggaaaaggacgtgcatatttatgaggctcagaagaggaaccagaaagaagacctctag

SEQ ID NO: 240934 - protein, 135 aa, Artificial Sequence
  derived and/or modified sequence
MVDILGERHLVTCKGATVEAEAALQNKVVALYFAAARCAPSRDFTPLLCDFYTALVAEARRPAPFEVVFVSADGSSQEMLDFMRELHGAWLALPFHDPYRQRSLALLPRLECSGVILAHCNLCLLGSSDSLALAS

SEQ ID NO: 240935 - DNA, 408 bp, Artificial Sequence
  derived and/or modified sequence
atggtggacatcctgggcgagagacacctggtgacctgcaagggcgccaccgtggaggccgaggccgccctgcagaacaaggtggtggccctgtacttcgccgccgccagatgcgcccccagcagagacttcacccccctgctgtgcgacttctacaccgccctggtggccgaggccagaagacccgcccccttcgaggtggtgttcgtgagcgccgacggcagcagccaggagatgctggacttcatgagagagctgcacggcgcctggctggccctgcccttccacgacccctacagacagagaagcctggccctgctgcccagactggagtgcagcggcgtgatcctggcccactgcaacctgtgcctgctgggcagcagcgacagcctggccctggccagctag

SEQ ID NO: 240936 - DNA, 408 bp, Artificial Sequence
  derived and/or modified sequence
atggtggacatcctgggggagagacacctggtcacctgtaagggagccaccgttgaggctgaggcagccttgcagaataaggtagtcgctttatacttcgcggccgctcgctgcgcaccctccagagacttcactccgctcctgtgtgatttctataccgcattggtggcggaagctcgtcggcccgctcccttcgaggtggtgttcgtgtctgccgatggctctagtcaggagatgctggacttcatgcgggaactgcatggtgcatggctggcgctcccttttcacgatccttataggcagagatcacttgctctgttgccccggctggaatgttctggggtcattctggcccactgcaatctgtgtctattgggatcctccgactccctggctcttgcatcttag

SEQ ID NO: 240937 - DNA, 408 bp, Artificial Sequence
  derived and/or modified sequence
atggtggacatcctgggggagcggcacctggtgacctgcaagggggccaccgtggaggccgaggccgccctgcagaacaaggtggtggccctgtactttgctgctgcccgctgtgcccccagccgggacttcacccccctgctgtgtgacttctacacagccctggtggccgaggcccggcggcctgccccctttgaggtggtgtttgtgtctgcagatggcagcagccaggagatgctggacttcatgagggagctgcatggagcctggctggccctgcccttccatgacccctaccggcagaggagcctggccctgctgccccggctggagtgcagcggggtcatcctggcccactgcaacctgtgcctgctgggcagcagtgacagcctggccctggccagctag

SEQ ID NO: 240938 - DNA, 408 bp, Artificial Sequence
  derived and/or modified sequence
atggtggacatcctgggcgagcggcacctggtgacctgcaagggcgctacagtcgaggccgaggctgcactccagaacaaagttgtcgcactatattttgccgcagcaaggtgcgcgccttcaagagatttcacgcctctgctgtgcgatttctacacagccctggttgctgaggcccgcagacctgctccctttgaagtggtgtttgtctctgcagatggttcctctcaggaaatgctggactttatgagggagctccacggcgcctggctggccctgccatttcatgatccttatcgccaacgcagcctggctctgctccctcggctcgaatgttctggcgtgattctcgcccattgcaacctgtgtctgctgggctcctccgacagcctcgccctggcatcttag

SEQ ID NO: 240939 - DNA, 1457 bp, Artificial Sequence
  derived and/or modified sequence
gtgtgggcggggcgcagttgggggagggtgcagagacctgagggcttgaggttgcctggctggccccgctcccagaggcgggtgccgcgctgtcgcccaggtatctggggtctctggtgtctgagtgtctcattgtcggcgcgaacacaattgctccagccacaggcgaggcctggccaaggtgtgggcgcatctggggcaggtcttgagaggtccagcgcccggtggtgcggacagaggcggggcaccgcggcgctcgccgccgcctccccgcaggtgatcatcctcctgcaggtgtcctcgggtctcaggtggctgcgtgtctgcgccatggttgacattctgggcgagcggcacctggtgacctgtaagggcgcgacggtggaggccgaggcggcgctgcagaacaaggtggtggcactgtacttcgcggcggcccggtgcgcgccgagccgcgacttcacgccgctgctctgcgacttctatacggcgctggtggccgaggcgcggcggcccgcgcccttcgaagtggtcttcgtgtcagccgacggcagctcccaggagatgctggacttcatgcgcgagctgcatggcgcctggctggcgctgcccttccacgacccctaccggcaacggagtctcgctctgttgcccaggctggagtgcagtggcgtgatcttagctcactgcaacctttgcctcctgggttcaagtgattctctagccttagcctcctgagcatctgggactacagccattgctgtgaattacgtgagggaaagatattgaagaggagttggacactccgagagtgcagctgttctccccccgcaccatccgtgtcctgcattctgcgagtctgtgctcattaacaatgtgctgtgaccatgtgactcagcaatcctgctgctgggtatatacccgaaagaaaggaaaaggaagccagtatattgaagaggtatctgcacccccatgtttattgcagcactgttcacaacagccaagatttggaagcaacctaagtgtccatcaacagatgaatggataaagaaaacgtggtacatatacacaatggagtactcttcagccattaaaaaaatgagattctgtcatttgcaataatatagatggaaaaggaggcccttatgtgaagtgaaataagccaggcacagaaagacaaacatcacatgttctcacttatttgtgggatctaatgatcaaaacaattgaactcttggacatagagagtagaaggttggttaccagaagctggaaaggaaagtggggttgggaggaaggtgggaatggttaataggtacaaaaaaatacaaagaataaataagacctaatatttgatagcacaacagtgtgactactgtcaataatcatttaattgtacatttaaaaataactataattgcattgtttgtaacacaaaagataaatgcttgagggga

SEQ ID NO: 240940 - DNA, 408 bp, Artificial Sequence
  derived and/or modified sequence
atggtcgatatcttgggggaacgccatctcgttacatgcaagggtgctactgtcgaggccgaagcagccctgcagaacaaagtggtggccctgtatttcgctgccgctaggtgcgctcctagccgggactttaccccactgctgtgtgacttctatacagctttagtggccgaggcgcgtcgtcccgctccattcgaggtggtgttcgtcagcgccgacggaagttctcaagaaatgctcgactttatgagagagttgcacggcgcttggctcgctttgccatttcacgatccatacaggcagcggtcactggcactgttgcctagactggagtgttctggcgtcatattagcccactgcaacttatgccttctgggctcttccgactcgctcgctctggccagctag

SEQ ID NO: 240941 - protein, 364 aa, Artificial Sequence
  derived and/or modified sequence
MMLPSPVTSTPFSVKDILNLEQQHQHFHGAHLQADLEHHFHSAPCMLAAAEGTQFSDGGEEDEEDEGEKLSYLNSLAAADGHGDSGLCPQGYVHTVLRDSCSEPKEHEEEPEVVRDRSQKSCQLKKSLETAGDCKAAEESERPKPRSRRKPRVLFSQAQVFELERRFKQQRYLSAPEREHLASSLKLTSTQVKIWFQNRRYKCKRQRQDKSLELGAHAPPPPPRRVAVPVLVRDGKPCVTPSAQAYGAPYSVGASAYSYNSFPAYGYGNSAAAAAAAAAAAAAAAAYSSSYGCAYPAGGGGGGGGTSAATTAMQPACSAAGGGPFVNVSNLGGFGSGGSAQPLHQGTAAGAACAQGTLQGIRAW

SEQ ID NO: 240942 - DNA, 2117 bp, Artificial Sequence
  derived and/or modified sequence
agtccctgcagtggctgtaacaaaacccagacccccaggtcccggccaatggaggcgatttagactggagtgggaccgcgtctgtcaaaagcccgactcggcagcagcggcggagtccaggaggagagctggagccgccgcgctgcctccccgcccccgccgggatttattatttggactggacaattaagtggccctgatgatgttaccaagcccggtcacctccacccctttctcagtcaaagacattttgaatctggagcagcagcaccagcacttccatggtgcgcacttgcaggcggacttggagcaccacttccactctgcgccctgcatgctggccgccgctgaggggacgcaattttctgacggaggggaggaggacgaggaagacgagggcgagaaattgtcctatttgaactcactagccgcagcagacggccacggggattcagggctgtgtccccagggctatgtccacacggtcctgcgagactcgtgcagcgagcccaaggaacatgaagaggagcccgaggtcgtgagggaccggagccaaaaaagctgccagctgaagaagtctctagagacggccggagactgcaaggcggcggaggagagcgagaggccgaagccacgcagccgccggaagccccgggtcctcttctcgcaagcccaggtcttcgagctggaacgcaggttcaagcagcagcggtacctgtcggcacccgagcgcgagcacctcgccagcagcctgaagctcacatccactcaggtgaaaatctggttccagaatcgcaggtacaagtgcaagagacagcggcaggacaagtctctggagcttggcgcacacgcgcccccgccgccgccgcgccgcgtggctgtcccggtgctggtgcgggacggcaagccgtgcgtcacgcccagcgcgcaggcctacggcgcgccctacagcgtgggcgccagcgcctactcctacaacagcttccccgcctacggctatgggaactcggccgcggccgccgccgccgccgccgccgccgccgcagcagcggcggcctacagcagcagctatggctgtgcgtacccggcgggcggcggcggcggcggcggcgggacctccgcggcgaccactgccatgcagcccgcctgcagcgcggccggaggcggcccctttgtgaacgtgagcaacctaggaggcttcggcagcggcggcagcgcacagccgttgcaccagggtactgcagccggggccgcgtgcgctcagggcaccttgcagggcatccgggcctggtagggacggggcgggtcacgcggcgggcaccccagcgcagcctggcgccgcgggactgaagctcgagaagggcctgacctaaaggtcaggtcccctcgttaaaaaaatatgtacgtctagctcctcagggcttcggatcgcagctcactcgaggcctggggaaggggactcaggggcgaggaggatgactgggtccggtcgccaggactgtctctgaggcagaaacgccggctgggcgccggggaggacgatggccccgaccctggcagcgagaggagaccaggaggctaggaccctggccgcgcttggttcttccaaagcgagaagggcttctctccctctgcctttccgcggcctccgcgaagcgttggcggggagcccaaggacataacaaattaaaagcatgaaggagagaaaaatgggggtcgtggcttgagaaattccaggccctaccgatcctctgccccctttgcgggcctggagcgccatagcacagtcgatttcgtttcgcagctgtctcccctccgcagcagatacctcggtccagatctccggattgtcgggggacgcaggactcttcgaggaaaaccagccgaatgagatcaaaagttgggggtggggggaggctgaacaaactcaggacctggtggcccaccggaggtgttaccgggtttcctttctgtttcgtattctgtattcagcacatgttatctatctatctatctatataactataaccacacgccgtgtagacacccgctgccacacactacaggagtcaataaacaaggtgcaatattttcaaaaaaaaaaaaaaaaaaaaaaa

SEQ ID NO: 240943 - DNA, 1095 bp, Artificial Sequence
  derived and/or modified sequence
atgatgctgccaagcccagtgaccagcaccccttttagtgtgaaagacattttaaatctggagcagcagcatcagcattttcatggcgctcacctacaggccgacctcgaacatcactttcatagcgcaccgtgcatgctagcagctgccgaaggtacgcaattctccgatggcggagaagaggacgaggaagatgagggcgaaaaactctcatatttaaactcgctggcagctgccgacgggcatggggacagcggcttatgtccccaggggtacgtgcacactgtgctgcgggactcctgcagcgagcctaaagagcacgaggaagagcctgaggttgtgcgggaccggagccaaaaatcttgccagctgaagaagtccctcgagacggcaggcgactgtaaggccgccgaagagtccgaaagacccaaaccccggagcagacggaaaccgagggtgctcttctcccaggcccaggtgtttgaacttgagcgtaggtttaaacaacaaaggtatctgtccgcccccgagcgagagcacctcgcgtccagcctcaaactcacatctacccaagtgaagatatggtttcagaatcgacgctataagtgtaagcggcagaggcaagacaagagcctcgagctcggagctcacgccccccctcctcccccccgccgcgtggccgtccctgttctggttcgtgatggaaagccatgcgtgaccccctcagcgcaggcctatggagctccatactccgttggagctagcgcgtattcttacaatagctttcctgcttatggatatgggaacagtgcggctgccgctgctgcagccgccgcagcggcagcagcagccgccgcttattcaagtagttacggatgcgcgtacccggctgggggagggggtggggggggcggcacctccgccgctacgacagccatgcagcctgcctgcagcgccgccgggggcgggcctttcgtcaatgtgtctaacctaggcggcttcggtagcgggggcagtgcccaacccctgcatcaaggtactgcagcgggagccgcctgcgcccaaggaactcttcaaggtataagggcgtggtag

SEQ ID NO: 240944 - DNA, 2094 bp, Artificial Sequence
  derived and/or modified sequence
agtccctgcagtggctgtaacaaaacccagacccccaggtcccggccaatggaggcgatttagactggagtgggaccgcgtctgtcaaaagcccgactcggcagcagcggcggagtccaggaggagagctggagccgccgcgctgcctccccgcccccgccgggatttattatttggactggacaattaagtggccctgatgatgttaccaagcccggtcacctccacccctttctcagtcaaagacattttgaatctggagcagcagcaccagcacttccatggtgcgcacttgcaggcggacttggagcaccacttccactctgcgccctgcatgctggccgccgctgaggggacgcaattttctgacggaggggaggaggacgaggaagacgagggcgagaaattgtcctatttgaactcactagccgcagcagacggccacggggattcagggctgtgtccccagggctatgtccacacggtcctgcgagactcgtgcagcgagcccaaggaacatgaagaggagcccgaggtcgtgagggaccggagccaaaaaagctgccagctgaagaagtctctagagacggccggagactgcaaggcggcggaggagagcgagaggccgaagccacgcagccgccggaagccccgggtcctcttctcgcaagcccaggtcttcgagctggaacgcaggttcaagcagcagcggtacctgtcggcacccgagcgcgagcacctcgccagcagcctgaagctcacatccactcaggtgaaaatctggttccagaatcgcaggtacaagtgcaagagacagcggcaggacaagtctctggagcttggcgcacacgcgcccccgccgccgccgcgccgcgtggctgtcccggtgctggtgcgggacggcaagccgtgcgtcacgcccagcgcgcaggcctacggcgcgccctacagcgtgggcgccagcgcctactcctacaacagcttccccgcctacggctatgggaactcggccgcggccgccgccgccgccgccgccgccgccgcagcagcggcggcctacagcagcagctatggctgtgcgtacccggcgggcggcggcggcggcggcggcgggacctccgcggcgaccactgccatgcagcccgcctgcagcgcggccggaggcggcccctttgtgaacgtgagcaacctaggaggcttcggcagcggcggcagcgcacagccgttgcaccagggtactgcagccggggccgcgtgcgctcagggcaccttgcagggcatccgggcctggtagggacggggcgggtcacgcggcgggcaccccagcgcagcctggcgccgcgggactgaagctcgagaagggcctgacctaaaggtcaggtcccctcgttaaaaaaatatgtacgtctagctcctcagggcttcggatcgcagctcactcgaggcctggggaaggggactcaggggcgaggaggatgactgggtccggtcgccaggactgtctctgaggcagaaacgccggctgggcgccggggaggacgatggccccgaccctggcagcgagaggagaccaggaggctaggaccctggccgcgcttggttcttccaaagcgagaagggcttctctccctctgcctttccgcggcctccgcgaagcgttggcggggagcccaaggacataacaaattaaaagcatgaaggagagaaaaatgggggtcgtggcttgagaaattccaggccctaccgatcctctgccccctttgcgggcctggagcgccatagcacagtcgatttcgtttcgcagctgtctcccctccgcagcagatacctcggtccagatctccggattgtcgggggacgcaggactcttcgaggaaaaccagccgaatgagatcaaaagttgggggtggggggaggctgaacaaactcaggacctggtggcccaccggaggtgttaccgggtttcctttctgtttcgtattctgtattcagcacatgttatctatctatctatctatataactataaccacacgccgtgtagacacccgctgccacacactacaggagtcaataaacaaggtgcaatattttc

SEQ ID NO: 240945 - DNA, 1095 bp, Artificial Sequence
  derived and/or modified sequence
atgatgctgcccagccctgtgaccagcacccccttctctgtgaaggacatcctgaacctggagcagcagcaccagcacttccacggggcccacctgcaggccgacctggagcaccacttccacagcgccccctgcatgctggccgctgctgagggcacccagttcagtgatggaggagaagaagatgaggaggatgaaggagagaagctgagctacctgaacagcctggccgctgctgatggccacggggacagcggcctgtgcccccagggctacgtgcacacagtgctgcgggacagctgcagcgagcccaaggagcacgaggaggagcctgaggtggtgcgggacaggagccagaagagctgccagctgaagaagagcctggagacagctggggactgcaaggctgctgaggagagcgagcggcccaagcccaggagcaggaggaagccccgggtgctcttcagccaggcccaggtgtttgagctggagcggcgcttcaagcagcagcgctacctgagcgcccctgagcgggagcacctggccagcagcctgaagctgaccagcacccaggtgaagatctggttccagaacagacgctacaagtgcaagaggcagaggcaggacaagagcctggagctgggcgcccacgcccctcctcctccaccccggcgggtggccgtgcctgtgctggtgagagatggcaagccctgtgtgacccccagcgcccaggcctacggggccccctacagcgtgggcgccagcgcctacagctacaacagcttccctgcctacggctacggcaacagcgctgctgctgctgctgctgctgctgctgctgctgctgctgctgctgcctacagcagcagctatggctgtgcctacccagctgggggcggcggcggcggcggcggcaccagcgctgccaccacagccatgcagcctgcctgcagcgctgctgggggcggcccctttgtgaatgtgagcaacctgggcggcttcggcagcggcggcagcgcccagcccctgcaccagggcacagctgctggagctgcctgtgcccagggcaccctgcagggcatccgggcctggtag

SEQ ID NO: 240946 - DNA, 1095 bp, Artificial Sequence
  derived and/or modified sequence
atgatgctgcccagccccgtgaccagcacccccttcagcgtgaaggacatccttaatttagagcagcaacaccagcacttccacggggcccatcttcaagcagatctcgagcatcactttcattcagcaccatgcatgctagcagcagcagaagggacgcaattctctgatggaggtgaggaagatgaggaggatgaaggagagaaattatcctatctaaactcactggcggccgcggatggccacggagattccggcctctgcccacaggggtacgtacatactgtattacgtgactcatgcagcgagcccaaagagcatgaagaggagcccgaggtggtgagggacaggagccagaaaagttgccagttgaaaaagagcctagagaccgcaggggattgcaaagccgcggaggagagcgaaaggccaaaaccacgtagcaggagaaagccaagagtcctgtttagccaggcccaggtgtttgagctcgagaggcgcttcaagcagcagagatacctgtcagctcctgaacgcgagcatctcgcctctagcctcaaactcacatctacccaggtgaaaatttggttccaaaacagaagatacaagtgcaagcggcagcggcaggataaaagccttgagctcggagctcacgcacctcctccccccccccgtagggtggcagttccggtgctagtaagagacggcaaaccatgtgtcacaccgagcgcacaagcctacggagccccatactctgtaggggcatccgcttatagctataacagctttcctgcatatggctatggcaactcagcggccgcagcggccgcggcggcagcggctgctgccgctgctgccgcatacagcagctcctatgggtgcgcttacccagctgggggcgggggcggagggggcggcacatcagcggccacgactgccatgcagccagcttgtagcgccgccggaggaggtccttttgttaacgtatccaacctcggcggctttggctctgggggatctgcgcagcccttacatcaaggaacagcggccggagctgcatgtgcacagggaacgctgcagggcattagagcttggtag

SEQ ID NO: 240947 - DNA, 1095 bp, Artificial Sequence
  derived and/or modified sequence
atgatgctgccaagccccgtgacctctacccccttttcagtgaaagacatattgaatcttgagcagcagcatcagcattttcacggggctcacttgcaagctgacctggagcaccacttccacagtgctccatgcatgctggctgcagctgagggtactcagttcagtgatggaggtgaggaggacgaagaggacgagggagagaagctttcgtacctgaatagtctcgctgcagccgacgggcacggcgatagcgggttatgcccccagggctatgtacataccgtcctgagagattcatgttctgaaccaaaggagcacgaagaggaacccgaagtcgtgagggataggagtcaaaaatcctgtcagctaaagaagtccctggaaacagctggcgactgcaaggctgccgaggaatcagagcgtcccaagccgaggagccgcagaaagcccagggtcctcttcagccaagctcaggtttttgagctggaacggagatttaaacagcagaggtatttgagcgcgccagagagagagcatctggccagttccttgaaactgacctcaacgcaggtaaaaatttggtttcagaaccggaggtacaaatgtaagcggcaacggcaagacaaatcactcgaactgggcgctcacgccccaccaccccctcctcgcagagtcgctgtgcctgtcctggtcagagacggcaaaccctgcgtaaccccgagcgctcaagcatacggtgcgccttactccgtgggcgcatccgcttatagctacaactccttcccggcatatggttacggaaattccgcagccgcagcagcagccgctgcagccgcagctgccgcagccgctgcttattcttcaagttatggttgcgcctatcccgctggagggggaggcggtgggggaggaaccagtgccgcaacgactgcaatgcagccagcttgttccgctgcaggcggtgggccttttgttaacgtttctaacctgggcggtttcggcagcggcggttctgcgcagccactacatcagggaaccgctgcaggggctgcttgcgctcagggcacgttacagggcatcagggcttggtag

SEQ ID NO: 240948 - DNA, 1095 bp, Artificial Sequence
  derived and/or modified sequence
atgatgctgcccagccccgtgaccagcacccccttcagcgtgaaggacatcctgaacctggagcagcagcaccagcacttccacggcgcccacctgcaggccgacctggagcaccacttccacagcgccccctgcatgctggccgccgccgagggcacccagttcagcgacggcggcgaggaggacgaggaggacgagggcgagaagctgagctacctgaacagcctggccgccgccgacggccacggcgacagcggcctgtgcccccagggctacgtgcacaccgtgctgagagacagctgcagcgagcccaaggagcacgaggaggagcccgaggtggtgagagacagaagccagaagagctgccagctgaagaagagcctggagaccgccggcgactgcaaggccgccgaggagagcgagagacccaagcccagaagcagaagaaagcccagagtgctgttcagccaggcccaggtgttcgagctggagagaagattcaagcagcagagatacctgagcgcccccgagagagagcacctggccagcagcctgaagctgaccagcacccaggtgaagatctggttccagaacagaagatacaagtgcaagagacagagacaggacaagagcctggagctgggcgcccacgcccccccccccccccccagaagagtggccgtgcccgtgctggtgagagacggcaagccctgcgtgacccccagcgcccaggcctacggcgccccctacagcgtgggcgccagcgcctacagctacaacagcttccccgcctacggctacggcaacagcgccgccgccgccgccgccgccgccgccgccgccgccgccgccgccgcctacagcagcagctacggctgcgcctaccccgccggcggcggcggcggcggcggcggcaccagcgccgccaccaccgccatgcagcccgcctgcagcgccgccggcggcggccccttcgtgaacgtgagcaacctgggcggcttcggcagcggcggcagcgcccagcccctgcaccagggcaccgccgccggcgccgcctgcgcccagggcaccctgcagggcatcagagcctggtag

SEQ ID NO: 240949 - protein, 291 aa, Artificial Sequence
  derived and/or modified sequence
MDSRVSSPEKQDKENFVGVNNKRLGVCGWILFSLSFLLVIITFPISIWMCLKIIKEYERAVVFRLGRIQADKAKGPGLILVLPCIDVFVKVDLRTVTCNIPPQEILTRDSVTTQVDGVVYYRIYSAVSAVANVNDVHQATFLLAQTTLRNVLGTQTLSQILAGREEIAHSIQTLLDDATELWGIRVARVEIKDVRIPVQLQRSMAAEAEATREARAKVLAAEGEMNASKSLKSASMVLAESPIALQLRYLQTLSTVATEKNSTIVFPLPMNILEGIGGVSYDNHKKLPNKA

SEQ ID NO: 240950 - DNA, 876 bp, Artificial Sequence
  derived and/or modified sequence
atggacagcagagtgagcagccccgagaagcaggacaaggagaacttcgtgggcgtgaacaacaagagactgggcgtgtgcggctggatcctgttcagcctgagcttcctgctggtgatcatcaccttccccatcagcatctggatgtgcctgaagatcatcaaggagtacgagagagccgtggtgttcagactgggcagaatccaggccgacaaggccaagggccccggcctgatcctggtgctgccctgcatcgacgtgttcgtgaaggtggacctgagaaccgtgacctgcaacatccccccccaggagatcctgaccagagacagcgtgaccacccaggtggacggcgtggtgtactacagaatctacagcgccgtgagcgccgtggccaacgtgaacgacgtgcaccaggccaccttcctgctggcccagaccaccctgagaaacgtgctgggcacccagaccctgagccagatcctggccggcagagaggagatcgcccacagcatccagaccctgctggacgacgccaccgagctgtggggcatcagagtggccagagtggagatcaaggacgtgagaatccccgtgcagctgcagagaagcatggccgccgaggccgaggccaccagagaggccagagccaaggtgctggccgccgagggcgagatgaacgccagcaagagcctgaagagcgccagcatggtgctggccgagagccccatcgccctgcagctgagatacctgcagaccctgagcaccgtggccaccgagaagaacagcaccatcgtgttccccctgcccatgaacatcctggagggcatcggcggcgtgagctacgacaaccacaagaagctgcccaacaaggcctag

SEQ ID NO: 240951 - DNA, 876 bp, Artificial Sequence
  derived and/or modified sequence
atggactcacgtgtgagtagccccgagaagcaggacaaagagaatttcgtgggcgtcaacaataagaggctgggagtgtgcggctggattttattctccctctccttcctcctggtgatcattacctttccaatttctatctggatgtgcctaaaaatcatcaaagagtatgaacgagccgtagtgttccgcttgggtcgtattcaagcagacaaggccaagggcccaggactaatcttggtcctgccttgcatcgatgtgttcgtgaaagttgatcttcggacagttacgtgcaatattcccccccaagagatattgaccagggactcagtgactactcaggtggatggtgtcgtctattataggatctatagtgcagtttctgcagtggcgaacgtcaacgatgtgcaccaggccacattcctgcttgctcagactacattaagaaacgtcctagggactcaaacattgtcacaaatactggctgggcgtgaagaaattgcacacagcattcagaccttacttgatgacgcaacagaactctgggggattagagtggctagggtggaaataaaggacgtgagaatacctgtgcaactgcaaaggagcatggcggcggaagcagaagcgactcgcgaggccagagcaaaagtgctagccgcagaaggtgaaatgaatgcttccaagtccctgaaatcggcctccatggtgcttgcagaatcaccaatcgccttacagctccggtacctgcaaacactttctacagtcgcaacagagaaaaacagcaccatcgttttcccactgccaatgaatattcttgagggaattgggggcgtaagttacgacaaccataagaagctgccaaacaaagcctag

SEQ ID NO: 240952 - DNA, 876 bp, Artificial Sequence
  derived and/or modified sequence
atggacagccgggtgagcagccctgagaagcaggacaaggagaactttgtgggcgtgaacaacaagaggctgggcgtgtgtggctggatcctcttcagcctgtccttcctgctggtgatcatcaccttccccatcagcatctggatgtgcctgaagatcatcaaggagtatgaaagagctgtggtgttccggctgggccgcatccaggccgacaaggccaagggccctggcctcatcctggtgctgccctgcattgatgtgtttgtgaaggtggacctgaggacagtgacctgcaacatccccccccaggagatcctgacccgggacagcgtgaccacccaggtggatggagtggtgtactaccgcatctacagcgctgtgtctgctgtggccaacgtgaatgatgtgcaccaggccaccttcctgctggcccagaccaccctgagaaatgtgctgggcacccagaccctgagccagatcctggccggccgggaggagatcgcccacagcatccagaccctgctggatgatgccacagagctgtggggcatccgggtggcccgggtggagatcaaggatgtgcgcatccctgtgcagctgcagaggtccatggctgctgaggccgaggccacccgggaggcccgggccaaggtgctggccgctgagggggagatgaatgccagcaagagcctgaagagcgcctccatggtgctggccgagagccccatcgccctgcagctgcgctacctgcagaccctgagcacagtggccacagagaagaacagcaccatcgtgttccccctgcccatgaacatcctggagggcatcggcggcgtgtcctatgacaaccacaagaagctgcccaacaaggcctag

SEQ ID NO: 240953 - DNA, 876 bp, Artificial Sequence
  derived and/or modified sequence
atggacagccgggtgagcagccccgagaagcaggacaaggagaacttcgtgggtgttaataataaacgattaggtgtttgtgggtggatcctgttttcccttagcttcctgctggtcataatcacctttcccatttctatctggatgtgtctaaaaataataaaggagtacgaacgggccgtagtgttccgacttggccgcattcaggctgacaaagcaaagggccctggactcatactggttttaccatgtatagacgtcttcgtaaaagtcgacctgcgcaccgtgacgtgtaacatccctcctcaggaaatcctgaccagggactcagttaccacacaggtggacggtgtggtctactaccgaatctattcagccgtgtccgctgtcgctaatgtcaacgacgtccaccaagccacatttctgctcgcccagaccaccctcagaaatgtcttggggactcagaccctatcacaaatccttgctgggcgcgaggaaattgcacacagtatccagaccctgctggacgatgccaccgaactgtggggaattagagtcgctcgagtcgagatcaaggatgttcggattcccgtgcagctgcaacggtccatggccgccgaggccgaagccactcgcgaagctcgcgcaaaggtcctcgctgcagagggcgagatgaatgccagtaaatcactgaagtctgctagcatggtgctggccgagagcccaatagctcttcagctgagatacctacagacgttgagtacggtcgcaactgagaaaaatagcacgattgtgtttccactcccaatgaacatattggaaggcataggaggtgtctcctacgacaaccacaaaaagctgccgaataaggcctag

SEQ ID NO: 240954 - DNA, 876 bp, Artificial Sequence
  derived and/or modified sequence
atggattcaagggtgtcatctcctgaaaaacaggataaagagaacttcgttggcgtgaataacaagcgcctgggcgtctgcggatggattctgttcagtctgtccttcttgctcgtcatcattacgttcccaatttctatttggatgtgcctcaaaatcataaaggagtacgagagagccgtggtttttagactggggaggatccaggcagacaaggcaaaagggcctggtctgattcttgtgctcccttgtatcgatgtgttcgtcaaggtagacctccggaccgtcacctgtaatatccctcctcaggaaattctgactcgggactcagtcacgactcaggtggacggagttgtctattaccgaatctattccgcagtgtcggccgtggccaacgtcaacgacgtgcaccaagccactttcctcctggcccaaacaactttgagaaacgtcttggggacccagaccctgtcccagatcctggccggtcgggaggagattgcacactccattcagaccctcctggacgatgcgaccgaactctggggcatccgtgttgcgagagtcgaaatcaaagatgtacggattcccgttcagctgcagaggtctatggcagcagaggccgaagccacgagggaggctcgcgcaaaagtgctcgcagccgagggggagatgaacgcgtctaagtctctgaagagcgcctcaatggtgttagcggagtctcctatcgccctccagctgcgatacctccagactctgtccactgtcgcaaccgaaaagaactccaccatagtgtttccgttacccatgaacatcttggaaggaattggtggggtttcctacgacaatcataaaaagcttcccaacaaagcttag

SEQ ID NO: 240955 - DNA, 2121 bp, Artificial Sequence
  derived and/or modified sequence
tatacaaggtgcatagaagtgttttatgaaatataaatgctatagaaaattacacagcaatattttacaggaagcaataccaccagatggtcatattctttcaagttttttctgtgaacaaaggcagtctgaactcataaaagaaatctttttgtttatgttatcaggcttccctcaccagggtaactaccccttagggagttcactaaagagaaggaatgtctttcactctctcatactttctcctctcccctctcccaagcacatctgagttgctgcctgttcttcacacttagctccaaacccatgaaaaattgccaagtataaaagcttctcaagaatgagatggattctagggtgtcttcacctgagaagcaagataaagagaatttcgtgggtgtcaacaataaacggcttggtgtatgtggctggatcctgttttccctctctttcctgttggtgatcattaccttccccatctccatatggatgtgcttgaagatcattaaggagtatgaacgtgctgttgtattccgtctgggacgcatccaagctgacaaagccaaggggccaggtttgatcctggtcctgccatgcatagatgtgtttgtcaaagttgacctccgaacagttacttgcaacattcctccacaagagatcctcaccagagactccgtaactactcaggtagatggagttgtctattacagaatctatagtgctgtctcagcagtggctaatgtcaacgatgtccatcaagcaacatttctgctggctcaaaccactctgagaaatgtcttagggacacagaccttgtcccagatcttagctggacgagaagagatcgcccatagcatccagactttacttgatgatgccaccgaactgtgggggatccgggtggcccgagtggaaatcaaagatgttcggattcccgtgcagttgcagagatccatggcagccgaggctgaggccacccgggaagcgagagccaaggtccttgcagctgaaggagaaatgaatgcttccaaatccctgaagtcagcctccatggtgctggctgagtctcccatagctctccagctgcgctacctgcagaccttgagcacggtagccaccgagaagaattctacgattgtgtttcctctgcccatgaatatactagagggcattggtggcgtcagctatgataaccacaagaagcttccaaataaagcctgaggtcctcttgcggtagtcagctattgcatagagagtggtgtctattcctatggagaagccagtagttagaaacggtgagaattccaacactgttcatgtaacagtaactccatagatggaagagcattggcaggaaaaagctctagaggctatacagagaagaaaaaaagagcaaaaatgagacctgtatattacttttatttttaggaccataatcaactttgtaatattcttatataattaattagtggtggtctccgactttatagcaggaactttctggtagtatgagaagaaatcattgggtgactatgactaatgtttcagaattactttttaattgttttaaaaagcactccagataatttatagagtaacataggcctcatatttacactatatgttcgctttataattccgaagttgttatttgctaaatctccaatggttgcaatcaaaccccacaatgctgaaaacagagattgattttgatgttaagaacaaaagaagtatggaaacttccaggctcaaacatgtcccccgtgccacaaggcaaactgcgatgagctcacagtccaggtctcttgctgtgtgtcctgcagggagtggccaactctccaccttccagcaccattatcagagggtgggaaaaggcacatgaaagtggccagctcctgtcaatttatttgcttacaagggagaatgcttggaaaggttgcattggttgaaaccactgaggagcatcaccctggggatttcatgttttcactctgttcttagtcccaggagccacaggtaatcgagaatgtttgtgaactctatccacatcccctcccccacctgccaaataacctgttcaaaacaaagaaggcatagaatataaatgaatttcaaaagtta

SEQ ID NO: 240956 - DNA, 1997 bp, Artificial Sequence
  derived and/or modified sequence
aaagagaaggaatgtctttcactctctcatactttctcctctcccctctcccaagcacatctgagttgctgcctgttcttcacacttagctccaaacccatgaaaaattgccaagtataaaagcttctcaagaatgagatggattctagggtgtcttcacctgagaagcaagataaagagaatttcgtggcacgtctattacctaatggagctgagcctcatgtgcacgtgtaatgatgcaagggcttgatgaactccagaggcgagcttgtaggtgtcaacaataaacggcttggtgtatgtggctggatcctgttttccctctctttcctgttggtgatcattaccttccccatctccatatggatgtgcttgaagatcattaaggagtatgaacgtgctgttgtattccgtctgggacgcatccaagctgacaaagccaaggggccaggtttgatcctggtcctgccatgcatagatgtgtttgtcaaagttgacctccgaacagttacttgcaacattcctccacaagagatcctcaccagagactccgtaactactcaggtagatggagttgtctattacagaatctatagtgctgtctcagcagtggctaatgtcaacgatgtccatcaagcaacatttctgctggctcaaaccactctgagaaatgtcttagggacacagaccttgtcccagatcttagctggacgagaagagatcgcccatagcatccagactttacttgatgatgccaccgaactgtgggggatccgggtggcccgagtggaaatcaaagatgttcggattcccgtgcagttgcagagatccatggcagccgaggctgaggccacccgggaagcgagagccaaggtccttgcagctgaaggagaaatgaatgcttccaaatccctgaagtcagcctccatggtgctggctgagtctcccatagctctccagctgcgctacctgcagaccttgagcacggtagccaccgagaagaattctacgattgtgtttcctctgcccatgaatatactagagggcattggtggcgtcagctatgataaccacaagaagcttccaaataaagcctgaggtcctcttgcggtagtcagctattgcatagagagtggtgtctattcctatggagaagccagtagttagaaacggtgagaattccaacactgttcatgtaacagtaactccatagatggaagagcattggcaggaaaaagctctagaggctatacagagaagaaaaaaagagcaaaaatgagacctgtatattacttttatttttaggaccataatcaactttgtaatattcttatataattaattagtggtggtctccgactttatagcaggaactttctggtagtatgagaagaaatcattgggtgactatgactaatgtttcagaattactttttaattgttttaaaaagcactccagataatttatagagtaacataggcctcatatttacactatatgttcgctttataattccgaagttgttatttgctaaatctccaatggttgcaatcaaaccccacaatgctgaaaacagagattgattttgatgttaagaacaaaagaagtatggaaacttccaggctcaaacatgtcccccgtgccacaaggcaaactgcgatgagctcacagtccaggtctcttgctgtgtgtcctgcagggagtggccaactctccaccttccagcaccattatcagagggtgggaaaaggcacatgaaagtggccagctcctgtcaatttatttgcttacaagggagaatgcttggaaaggttgcattggttgaaaccactgaggagcatcaccctggggatttcatgttttcactctgttcttagtcccaggagccacaggtaatcgagaatgtttgtgaactctatccacatcccctcccccacctgccaaataacctgttcaaaacaaagaaggcatagaatataaatgaatttcaaaagtt

SEQ ID NO: 240957 - protein, 475 aa, Artificial Sequence
  derived and/or modified sequence
MSRRKAGSAPRRVEPAPAANPDDEMEMQDLVIELKPEPDAQPQQAPRLGPFSPKEVSSAGRFGGEPHHSPGPMPAGAALLALGPRNPWTLWTPLTPNYPDRQPWTDKHPDLLTCGRCLQTFPLEAITAFMDHKKLGCQLFRGPSRGQGSEREELKALSCLRCGKQFTVAWKLLRHAQWDHGLSIYQTESEAPEAPLLGLAEVAAAVSAVVGPAAEAKSPRASGSGLTRRSPTCPVCKKTLSSFSNLKVHMRSHTGERPYACDQCPYACAQSSKLNRHKKTHRQVPPQSPLMADTSQEQASAAPPEPAVHAAAPTSTLPCSGGEGAGAAATAGVQEPGAPGSGAQAGPGGDTWGAITTEQRTDPANSQKASPKKMPKSGGKSRGPGGSCEFCGKHFTNSSNLTVHRRSHTGERPYTCEFCNYACAQSSKLNRHRRMHGMTPGSTRFECPHCHVPFGLRATLDKHLRQKHPEAAGEA

SEQ ID NO: 240958 - protein, 451 aa, Artificial Sequence
  derived and/or modified sequence
MEMQDLVIELKPEPDAQPQQAPRLGPFSPKEVSSAGRFGGEPHHSPGPMPAGAALLALGPRNPWTLWTPLTPNYPDRQPWTDKHPDLLTCGRCLQTFPLEAITAFMDHKKLGCQLFRGPSRGQGSEREELKALSCLRCGKQFTVAWKLLRHAQWDHGLSIYQTESEAPEAPLLGLAEVAAAVSAVVGPAAEAKSPRASGSGLTRRSPTCPVCKKTLSSFSNLKVHMRSHTGERPYACDQCPYACAQSSKLNRHKKTHRQVPPQSPLMADTSQEQASAAPPEPAVHAAAPTSTLPCSGGEGAGAAATAGVQEPGAPGSGAQAGPGGDTWGAITTEQRTDPANSQKASPKKMPKSGGKSRGPGGSCEFCGKHFTNSSNLTVHRRSHTGERPYTCEFCNYACAQSSKLNRHRRMHGMTPGSTRFECPHCHVPFGLRATLDKHLRQKHPEAAGEA

SEQ ID NO: 240959 - DNA, 1604 bp, Artificial Sequence
  derived and/or modified sequence
cctccgcccgcccgcctgcctgcctgcccgcccgctcgctcgcccggcccgcgactcatgtcccgccgcaaggccggcagcgcgccccgccgagtagagcccgcgcccgccgccaacccagacgacgagatggaaatgcaggacctcgtcatcgaactcaagcccgagccagacgcgcagccccaacaggccccaaggctggggcccttctccccgaaggaggtgtcctcggcggggcggttcggcggcgaaccccaccactcccctggccccatgcccgccggggccgccctcctcgccctcggcccgcggaacccgtggaccctgtggacgccgttgaccccgaactatcccgaccgccagccctggaccgacaaacacccagatctgttgacctgcggccgctgcctgcagaccttcccgttggaggccatcactgccttcatggaccacaagaagctgggctgtcagctcttcagaggccccagccgcggccagggctcagaacgagaggagctgaaggccttgagctgcctgcgctgtggcaaacagttcacagtggcctggaagctgctgcgtcacgcccagtgggaccacggactgtccatctaccagacagaatcagaggccccggaggccccgctcctgggcctggccgaggtggctgcagccgtgtcggcagtggtggggccagcagctgaggccaagagcccccgtgcaagtggcagcggcctcacccggcggagccccacctgtcctgtgtgcaagaagaccctcagctccttcagcaacctcaaagtgcacatgcgctcacacacaggcgagcggccctatgcttgcgaccagtgtccctacgcctgcgcccagagcagcaagctcaaccgccacaagaagacccaccggcaggtgccgccccagagccccctcatggccgacaccagccaggagcaggcctctgcagcccctccggagccggctgtccatgctgctgcccccaccagcacccttccatgcagcggtggtgagggggctggagccgccgccacagcaggtgtccaggaacccggggctcctggcagtggggctcaagccggccctggtggagacacttggggagccatcaccacggaacaaagaactgaccctgcaaacagccagaaggcatcacccaaaaagatgcccaagtcagggggcaagagccgcgggcccgggggcagctgtgagttctgcgggaagcattttaccaacagcagcaacctgacggtgcaccggcgctcacacaccggggagcgcccctacacctgtgagttctgcaactacgcctgcgcccagagcagtaagctcaaccgccaccgccgcatgcacggcatgacgcctggcagcacccgcttcgagtgcccccactgccatgtgcccttcggcctgcgagccaccctggacaaacacctgcggcagaagcaccctgaggcggccggcgaggcctgagcccaggaaagcccccctcactgtccctggtaccgctgccaacacccattgacctcctcgtttttgcccgccttctccaagtaaattttcccttttatttaaaaaaaaaaaaaaaaaaa

SEQ ID NO: 240960 - DNA, 1428 bp, Artificial Sequence
  derived and/or modified sequence
atgagcagaagaaaggccggcagcgcccccagaagagtggagcccgcccccgccgccaaccccgacgacgagatggagatgcaggacctggtgatcgagctgaagcccgagcccgacgcccagccccagcaggcccccagactgggccccttcagccccaaggaggtgagcagcgccggcagattcggcggcgagccccaccacagccccggccccatgcccgccggcgccgccctgctggccctgggccccagaaacccctggaccctgtggacccccctgacccccaactaccccgacagacagccctggaccgacaagcaccccgacctgctgacctgcggcagatgcctgcagaccttccccctggaggccatcaccgccttcatggaccacaagaagctgggctgccagctgttcagaggccccagcagaggccagggcagcgagagagaggagctgaaggccctgagctgcctgagatgcggcaagcagttcaccgtggcctggaagctgctgagacacgcccagtgggaccacggcctgagcatctaccagaccgagagcgaggcccccgaggcccccctgctgggcctggccgaggtggccgccgccgtgagcgccgtggtgggccccgccgccgaggccaagagccccagagccagcggcagcggcctgaccagaagaagccccacctgccccgtgtgcaagaagaccctgagcagcttcagcaacctgaaggtgcacatgagaagccacaccggcgagagaccctacgcctgcgaccagtgcccctacgcctgcgcccagagcagcaagctgaacagacacaagaagacccacagacaggtgcccccccagagccccctgatggccgacaccagccaggagcaggccagcgccgccccccccgagcccgccgtgcacgccgccgcccccaccagcaccctgccctgcagcggcggcgagggcgccggcgccgccgccaccgccggcgtgcaggagcccggcgcccccggcagcggcgcccaggccggccccggcggcgacacctggggcgccatcaccaccgagcagagaaccgaccccgccaacagccagaaggccagccccaagaagatgcccaagagcggcggcaagagcagaggccccggcggcagctgcgagttctgcggcaagcacttcaccaacagcagcaacctgaccgtgcacagaagaagccacaccggcgagagaccctacacctgcgagttctgcaactacgcctgcgcccagagcagcaagctgaacagacacagaagaatgcacggcatgacccccggcagcaccagattcgagtgcccccactgccacgtgcccttcggcctgagagccaccctggacaagcacctgagacagaagcaccccgaggccgccggcgaggcctag

SEQ ID NO: 240961 - DNA, 1356 bp, Artificial Sequence
  derived and/or modified sequence
atggagatgcaggacctggtgatcgagctgaagcccgagcccgacgcccagccccagcaggcccccagactgggccccttcagccccaaggaggtgagcagcgccggcagattcggcggcgagccccaccacagccccggccccatgcccgccggcgccgccctgctggccctgggccccagaaacccctggaccctgtggacccccctgacccccaactaccccgacagacagccctggaccgacaagcaccccgacctgctgacctgcggcagatgcctgcagaccttccccctggaggccatcaccgccttcatggaccacaagaagctgggctgccagctgttcagaggccccagcagaggccagggcagcgagagagaggagctgaaggccctgagctgcctgagatgcggcaagcagttcaccgtggcctggaagctgctgagacacgcccagtgggaccacggcctgagcatctaccagaccgagagcgaggcccccgaggcccccctgctgggcctggccgaggtggccgccgccgtgagcgccgtggtgggccccgccgccgaggccaagagccccagagccagcggcagcggcctgaccagaagaagccccacctgccccgtgtgcaagaagaccctgagcagcttcagcaacctgaaggtgcacatgagaagccacaccggcgagagaccctacgcctgcgaccagtgcccctacgcctgcgcccagagcagcaagctgaacagacacaagaagacccacagacaggtgcccccccagagccccctgatggccgacaccagccaggagcaggccagcgccgccccccccgagcccgccgtgcacgccgccgcccccaccagcaccctgccctgcagcggcggcgagggcgccggcgccgccgccaccgccggcgtgcaggagcccggcgcccccggcagcggcgcccaggccggccccggcggcgacacctggggcgccatcaccaccgagcagagaaccgaccccgccaacagccagaaggccagccccaagaagatgcccaagagcggcggcaagagcagaggccccggcggcagctgcgagttctgcggcaagcacttcaccaacagcagcaacctgaccgtgcacagaagaagccacaccggcgagagaccctacacctgcgagttctgcaactacgcctgcgcccagagcagcaagctgaacagacacagaagaatgcacggcatgacccccggcagcaccagattcgagtgcccccactgccacgtgcccttcggcctgagagccaccctggacaagcacctgagacagaagcaccccgaggccgccggcgaggcctag

SEQ ID NO: 240962 - DNA, 1428 bp, Artificial Sequence
  derived and/or modified sequence
atgagccggcgcaaagccggctcagcacccagaagagtagaaccagctccagccgccaacccggacgacgagatggaaatgcaagatcttgtcattgagctaaagccagagcccgatgcccaaccccagcaagcgccacgcctgggaccattctctccgaaagaggtgtctagtgccggacgcttcggtggagaaccccatcattccccggggcccatgcccgcgggagccgcactcctggcactgggcccaaggaatccgtggacactgtggacacctctgactccaaactatcccgatcgacagccttggaccgataagcatcctgatctgctgacgtgcgggaggtgtctccagacctttcctctagaagctatcaccgctttcatggaccacaaaaaacttggctgccagttgtttagaggtccatcccgcggacaagggagtgagagagaggaacttaaagcgctgtcctgcctgcggtgcggtaagcagttcaccgtggcatggaagctcttacgtcacgcacagtgggatcacggcctcagtatctaccaaacagagagtgaagcaccagaggcgcccctgctagggctcgctgaggtagctgccgccgtgtcagctgttgtgggacccgctgccgaggcaaagagtccaagagcttcagggtcgggtctgaccaggcgcagcccaacatgcccagtgtgtaagaaaactctgagctccttcagtaacctgaaagtgcacatgcgcagccataccggcgagcgcccttacgcctgcgaccagtgcccctatgcctgtgcccagtccagtaagctgaatcgccataagaagactcaccggcaggtgcctccccaaagtcccctgatggcggacaccagtcaggaacaagcatccgcagccccaccagagccagctgtgcacgccgctgcacctacaagtaccctgccgtgcagtgggggggagggagcgggcgctgcagccactgctggtgtccaggaacctggtgcacctggctctggcgctcaggcagggccggggggagacacttggggcgccatcactacagagcagcgcactgacccagccaactcacaaaaggcctctccaaagaagatgcctaaaagcggggggaaaagtagaggccccggtggctcatgtgaattctgtggcaagcattttacaaactcgtctaatttgaccgtccaccgaagatcacacaccggcgaacgaccatatacttgcgagttttgtaactatgcttgcgcccagtcctcaaagctcaatcgacaccgtaggatgcatgggatgactcccggcagcactcgtttcgaatgtccacattgccacgtcccattcggcttacgggcgacactggacaagcatttaaggcaaaagcaccccgaagctgccggagaggcttag

SEQ ID NO: 240963 - DNA, 1356 bp, Artificial Sequence
  derived and/or modified sequence
atggaaatgcaagacctggtgatcgagctcaagcctgagcccgacgcccagccgcagcaggccccgcggcttggccccttctcccctaaggaggtctctagtgctggcagatttggcggagagccacatcatagtccagggcccatgcccgccggggccgccctgctcgctctgggaccccggaatccatggacactgtggactccacttactcctaattacccagacagacagccttggaccgacaaacatcctgatctcctcacctgcggccgatgcctgcagacattcccactggaagccattacggcctttatggaccacaagaagcttggttgtcaactgttccgcggcccctcacgaggacaggggtcggaaagggaggaactcaaagctctgagctgtttgagatgcgggaaacagtttacagttgcttggaagctgctgaggcacgcacagtgggatcacggcctgtctatatatcaaaccgaatctgaagctcccgaagctcctctgctgggcctcgccgaggttgccgccgctgtctctgcagtggtgggacctgcggcagaagcaaagagcccaagggcgagcggttccggtcttactaggaggtctcccacgtgtccagtgtgcaaaaagaccctgtcttcattttccaaccttaaagtgcatatgagatcccacactggtgaaaggccctacgcatgcgaccagtgcccctatgcctgcgctcagagcagcaagctgaaccggcacaagaaaactcaccgccaggtgccccctcaatctcccctcatggcagatacttcccaagagcaagcctcagcagccccgcccgagcccgcggtacacgcggccgcgcctacctcgactttgccatgtagtggtggagaaggagccggggctgccgcgaccgctggtgttcaggaacctggggctccagggtccggagcccaggccggcccaggcggagatacttggggcgccatcactacagagcagaggacggacccggcaaactcccagaaagctagccccaagaaaatgcccaagagcggcggaaaatccaggggaccgggcgggagctgcgaattttgtggcaaacacttcacaaactcctccaacctcaccgttcacagacggtcacacaccggggaaaggccgtacacctgtgaattctgtaattatgcctgtgcccaatccagcaaactgaatcggcacaggcgtatgcatggcatgacccccggttccaccaggttcgaatgtccccactgtcacgtgccatttggactgcgcgcaaccttggacaaacacctgagacagaagcatccggaagccgcaggcgaggcatag

SEQ ID NO: 240964 - DNA, 1428 bp, Artificial Sequence
  derived and/or modified sequence
atgagcaggaggaaggccggcagcgcccccaggagagtggagcccgccccagctgccaacccagatgatgagatggagatgcaggacctggtgattgagctgaagccagagccagatgcccagccccagcaggccccccggctgggccccttcagccccaaggaggtgagcagcgctggccgctttggaggagagccccaccacagccctggccccatgcctgctggagctgccctgctggccctgggccccaggaacccctggaccctgtggacccccctgacccccaactacccagaccggcagccctggacagacaagcacccagacctgctgacctgtggccgctgcctgcagaccttccccctggaggccatcacagccttcatggaccacaagaagctgggctgccagctgttccggggccccagccggggccagggcagcgagcgggaggagctgaaggccctgagctgcctgcgctgtgggaagcagttcaccgtggcctggaagctgctgcggcatgcccagtgggaccacggcctgagcatctaccagacagaaagtgaggcccctgaggcccccctgctgggcctggccgaggtggccgctgctgtgtctgctgtggtgggccctgctgctgaggccaagagcccccgggccagcggcagcggcctgacccggcgcagccccacctgccctgtgtgcaagaagaccctgagcagcttcagcaacctgaaggtgcacatgaggagccacactggagagcggccctatgcctgtgaccagtgcccctatgcctgtgcccagagcagcaagctgaacagacacaagaagacccaccggcaggtgcccccccagagccccctgatggctgacaccagccaggagcaggccagcgctgcccctcctgagcctgctgtgcacgccgccgcccccaccagcaccctgccctgcagcggcggggagggcgctggggccgccgccacagctggggtgcaggagcccggggcccctggcagcggggcccaggccggccctggaggagacacctggggcgccatcaccacagagcagaggacagatcctgccaacagccagaaggccagccccaagaagatgcccaagagcggcggcaagagccggggccctgggggcagctgtgagttctgtgggaagcacttcaccaacagcagcaacctgactgtgcacagaagaagccacactggagagcggccctacacctgtgagttctgcaactatgcctgtgcccagagcagcaagctgaacagacacaggaggatgcacggcatgaccccaggcagcaccaggtttgagtgcccccactgccacgtgcccttcggcctgcgggccaccctggacaagcacctgcggcagaagcaccctgaggccgccggggaggcctag

SEQ ID NO: 240965 - DNA, 1356 bp, Artificial Sequence
  derived and/or modified sequence
atggagatgcaggacctggtgattgagctgaagccagagccagatgcccagccccagcaggccccccggctgggccccttcagccccaaggaggtgagcagcgctggccgctttggaggagagccccaccacagccctggccccatgcctgctggagctgccctgctggccctgggccccaggaacccctggaccctgtggacccccctgacccccaactacccagaccggcagccctggacagacaagcacccagacctgctgacctgtggccgctgcctgcagaccttccccctggaggccatcacagccttcatggaccacaagaagctgggctgccagctgttccggggccccagccggggccagggcagcgagcgggaggagctgaaggccctgagctgcctgcgctgtgggaagcagttcaccgtggcctggaagctgctgcggcatgcccagtgggaccacggcctgagcatctaccagacagaaagtgaggcccctgaggcccccctgctgggcctggccgaggtggccgctgctgtgtctgctgtggtgggccctgctgctgaggccaagagcccccgggccagcggcagcggcctgacccggcgcagccccacctgccctgtgtgcaagaagaccctgagcagcttcagcaacctgaaggtgcacatgaggagccacactggagagcggccctatgcctgtgaccagtgcccctatgcctgtgcccagagcagcaagctgaacagacacaagaagacccaccggcaggtgcccccccagagccccctgatggctgacaccagccaggagcaggccagcgctgcccctcctgagcctgctgtgcacgccgccgcccccaccagcaccctgccctgcagcggcggggagggcgctggggccgccgccacagctggggtgcaggagcccggggcccctggcagcggggcccaggccggccctggaggagacacctggggcgccatcaccacagagcagaggacagatcctgccaacagccagaaggccagccccaagaagatgcccaagagcggcggcaagagccggggccctgggggcagctgtgagttctgtgggaagcacttcaccaacagcagcaacctgactgtgcacagaagaagccacactggagagcggccctacacctgtgagttctgcaactatgcctgtgcccagagcagcaagctgaacagacacaggaggatgcacggcatgaccccaggcagcaccaggtttgagtgcccccactgccacgtgcccttcggcctgcgggccaccctggacaagcacctgcggcagaagcaccctgaggccgccggggaggcctag

SEQ ID NO: 240966 - DNA, 1428 bp, Artificial Sequence
  derived and/or modified sequence
atgagccggcggaaggccggcagcgccccccggcgggtggagcccgcgccagctgccaacccagacgacgagatggaaatgcaggatttggttattgagctcaaaccagaacctgacgcccagccccagcaagccccgaggcttggccccttcagccccaaagaggtgagcagcgctgggagatttgggggcgagccacaccacagtcccgggcctatgcctgccggagcagctcttctggccctgggtccaaggaacccatggacgctctggactcctctgaccccaaactacccggaccggcagccctggacagataaacacccggatctcttgacatgtgggcggtgcctgcagaccttccccttagaggccattaccgcattcatggaccataaaaaactgggttgtcagctcttcaggggcccttctcgagggcaaggtagcgagagagaagagctgaaggcgctcagttgtctgagatgcggcaaacagtttactgtggcttggaagctgttgcgccatgcccagtgggatcacggactgtctatttaccagacggagtcagaggctccggaagctcctttgctgggactggctgaagtggctgccgcagtctctgccgttgtcgggccagcagctgaagcgaaatctccaagagcctccggtagcgggctgacccgccgctccccaacttgtcccgtctgtaagaagaccttgtcaagcttcagcaacctaaaggtacatatgcgttcccatactggggaacgaccgtacgcttgtgaccagtgtccctacgcctgtgcccaaagtagtaagctcaacaggcacaagaagacacatcgtcaggttccaccacaatcaccactgatggcggatacaagccaggagcaggcctctgctgcccctcctgagcctgctgtgcacgcagcagctccgacatcaacactgccctgttctgggggagagggcgccggcgccgcagcaacagcaggggtgcaggagcctggagcccccgggtctggagcgcaagcgggccctggtggagacacctggggggctattactaccgaacagcggaccgatccagctaactcacagaaggctagccctaaaaaaatgcccaaatctggaggcaagtctcgtggtccagggggtagttgcgaattctgtggaaaacatttcacgaactcatccaacctgaccgtgcacaggcggtcccatactggcgaacgtccctacacgtgcgagttttgtaattatgcctgtgcgcagagcagtaaattaaatcggcacagaaggatgcacggaatgactcccggctctactcgctttgagtgtccgcattgtcacgtgccctttggactgcgtgctacgctggataagcaccttaggcagaaacacccagaggccgcaggggaggcgtag

SEQ ID NO: 240967 - DNA, 1356 bp, Artificial Sequence
  derived and/or modified sequence
atggagatgcaggacctggtgatcgagctgaagcccgagcccgacgctcagccccagcaagcccctaggttgggtccttttagccctaaggaagtgtcttctgcaggtcgcttcggcggtgaaccgcaccactctcctgggccaatgcctgcaggggctgccctgctggcactggggcctagaaacccttggactctgtggaccccactgacccctaattatccagaccggcaaccttggactgataaacatccagacctgctgacctgtggtcgttgcctgcagactttcccattggaggccattacagcatttatggaccataaaaagcttggctgccagctgttcaggggtcccagcagagggcaaggctccgagcgtgaagaactcaaggccttatcttgccttcgctgtggcaaacagttcaccgtagcatggaagctgctcagacacgcccagtgggatcacggcttaagcatctaccagacagaaagcgaggctcctgaggcccccctgcttggactggcagaagttgcggcagccgtgtcagcagtcgtcgggcctgctgccgaggcaaagagtccgagggcgtcaggaagcggcttaacacggcggagccccacgtgtcctgtgtgtaaaaagaccctgtcttccttcagtaatcttaaggtgcacatgagaagtcacactggggagcgcccatatgcgtgtgatcaatgcccatacgcctgtgcacaatcttctaagttgaataggcataaaaaaacgcacaggcaggtccccccacagtcacctctgatggctgacacctcgcaagagcaggcatctgctgcccctcccgaaccagctgttcatgccgctgctccaaccagcactctcccatgttcaggcggggaaggagcaggcgcagcggcaacagctggtgttcaagagccaggcgctccagggtcaggagcccaggccgggccgggtggggatacctggggcgccattacgacagaacagcggacagatccagccaacagccaaaaggcaagtccaaagaagatgcctaaatcaggcggcaaatctcgcggcccaggcggtagctgcgaattttgcgggaaacacttcaccaatagttcaaacctgactgtccatcggagatcccacacgggtgaacgaccatacacatgtgagttctgcaactacgcatgtgcccagtctagcaagctcaataggcatcgaagaatgcatgggatgacgccagggtcaacaaggtttgaatgcccacactgtcatgtgccctttggcctgagagctacattggacaagcacctgcgccagaaacatcccgaagctgcgggggaggcttag

SEQ ID NO: 240968 - DNA, 1428 bp, Artificial Sequence
  derived and/or modified sequence
atgtcaaggagaaaagcagggtcggcccctcggagggtggaaccagcacccgctgcaaaccctgacgacgaaatggaaatgcaagatctggttattgagctgaaacctgagcccgacgcacagccgcagcaggccccacggctgggcccatttagtccaaaagaagtgtccagtgcagggagatttgggggtgaacctcatcatagccctggacccatgcccgctggcgcagccctgctcgccctaggcccaaggaatccgtggacactgtggacacctcttacccccaactaccctgatcgacagccctggacagataagcatcccgatctgcttacatgcggaaggtgtctgcaaacgtttccattggaggctatcacggccttcatggatcacaaaaaacttggatgtcagttatttagaggcccttcacggggacagggctctgaacgggaggaactcaaggccctttcttgtttacgctgtggaaagcagtttaccgttgcgtggaagctgctcagacacgcacagtgggatcacggcttgagcatatatcagaccgagagcgaagctccagaggcccctctgttagggctcgcggaggttgctgcggctgtatctgcagtagtgggcccagccgcagaggccaagtccccgagggcatcgggatctggcttaaccagaaggtcgccaacatgtccagtgtgtaaaaagactctgagctcattcagcaacctgaaggtgcacatgagatctcacacgggagagcggccatacgcctgcgaccagtgtccatatgcctgcgcgcagagctccaagctgaaccgccataagaaaacccaccggcaggtgccccctcaatccccacttatggccgatacttcccaggagcaagcaagcgccgctcctccagagcctgcagtgcacgccgcagcccctacttcgacgttaccatgctcagggggtgagggcgcaggggctgctgctactgcaggtgtccaggagcccggtgccccaggatcaggagcccaagctggccctgggggagatacctggggtgccatcacaacagaacagagaactgacccagctaattcgcaaaaggcatcccctaaaaaaatgccaaaatcagggggaaagtctcgcggacccggtggcagctgcgagttttgcggaaaacacttcacgaacagctctaaccttacagttcatcgccgttctcacaccggcgaacgcccttacacctgtgagttctgtaattacgcttgtgcccagagttctaagctgaatagacatcgcaggatgcacggcatgaccccagggtctacacggtttgagtgcccccactgccacgttccattcggacttcgggctactctggataagcaccttagacagaaacaccccgaagcagccggagaggcatag

SEQ ID NO: 240969 - DNA, 1356 bp, Artificial Sequence
  derived and/or modified sequence
atggaaatgcaggatttagtgattgaactgaaaccagagccagatgcccaacctcagcaggcgcctcggctgggccctttctccccaaaggaggtgtcctcagctggcagattcgggggtgagcctcaccactcacccggacctatgccagcgggagctgctctcctggcgctcgggcctagaaatccatggacattgtggacgcccctcactccgaattaccccgacagacagccctggaccgacaagcaccctgacctgctcacctgcggacgatgcctccagacctttccgttggaagctattacagccttcatggatcacaaaaagctgggatgccagttatttagaggcccaagcagaggccaaggttctgagagggaggaactgaaagctctcagctgtctacgctgtggaaaacaattcacggtagcatggaaactgctgcggcatgcccagtgggatcatggactatcaatttaccagacggaatcagaagccccagaagcacccctgttggggctcgccgaggtcgccgctgccgtctccgcggtggtgggacctgccgcagaggcaaagtctccacgggcttcagggtcgggcttgaccagacggtctccgacatgtcccgtgtgtaagaaaaccctttccagtttttcaaacctcaaggtccacatgagaagtcacaccggggaaaggccatatgcatgcgaccagtgtccatatgcatgcgcgcagagctccaaacttaaccgacacaaaaaaacccatagacaggtgccacctcagtctcctctgatggccgacacatctcaagaacaggcctctgcagctccaccagaacccgctgttcacgccgcagccccaacttccactctgccatgttcaggcggagagggggcaggggcagccgcaaccgctggagtgcaagaacccggagcccctggatctggtgcacaagcaggacccggaggggatacttggggagcgataacaaccgagcaacggaccgatcccgcaaactctcagaaagcaagccctaaaaaaatgcccaaatcaggtggcaagtctagaggcccagggggttcctgcgagttttgtggcaaacacttcaccaacagcagcaatctaactgttcacagaagatcacacaccggcgagaggccctacacctgcgagttctgtaactacgcgtgcgcgcaatcaagcaagttaaacagacaccgcaggatgcatggtatgacccccggaagcactcggttcgagtgtccgcattgtcacgtcccatttggattgcgagctacccttgacaagcacctgcgccagaagcacccggaggcagctggcgaagcctag

SEQ ID NO: 240970 - DNA, 1585 bp, Artificial Sequence
  derived and/or modified sequence
cctccgcccgcccgcctgcctgcctgcccgcccgctcgctcgcccggcccgcgactcatgtcccgccgcaaggccggcagcgcgccccgccgagtagagcccgcgcccgccgccaacccagacgacgagatggaaatgcaggacctcgtcatcgaactcaagcccgagccagacgcgcagccccaacaggccccaaggctggggcccttctccccgaaggaggtgtcctcggcggggcggttcggcggcgaaccccaccactcccctggccccatgcccgccggggccgccctcctcgccctcggcccgcggaacccgtggaccctgtggacgccgttgaccccgaactatcccgaccgccagccctggaccgacaaacacccagatctgttgacctgcggccgctgcctgcagaccttcccgttggaggccatcactgccttcatggaccacaagaagctgggctgtcagctcttcagaggccccagccgcggccagggctcagaacgagaggagctgaaggccttgagctgcctgcgctgtggcaaacagttcacagtggcctggaagctgctgcgtcacgcccagtgggaccacggactgtccatctaccagacagaatcagaggccccggaggccccgctcctgggcctggccgaggtggctgcagccgtgtcggcagtggtggggccagcagctgaggccaagagcccccgtgcaagtggcagcggcctcacccggcggagccccacctgtcctgtgtgcaagaagaccctcagctccttcagcaacctcaaagtgcacatgcgctcacacacaggcgagcggccctatgcttgcgaccagtgtccctacgcctgcgcccagagcagcaagctcaaccgccacaagaagacccaccggcaggtgccgccccagagccccctcatggccgacaccagccaggagcaggcctctgcagcccctccggagccggctgtccatgctgctgcccccaccagcacccttccatgcagcggtggtgagggggctggagccgccgccacagcaggtgtccaggaacccggggctcctggcagtggggctcaagccggccctggtggagacacttggggagccatcaccacggaacaaagaactgaccctgcaaacagccagaaggcatcacccaaaaagatgcccaagtcagggggcaagagccgcgggcccgggggcagctgtgagttctgcgggaagcattttaccaacagcagcaacctgacggtgcaccggcgctcacacaccggggagcgcccctacacctgtgagttctgcaactacgcctgcgcccagagcagtaagctcaaccgccaccgccgcatgcacggcatgacgcctggcagcacccgcttcgagtgcccccactgccatgtgcccttcggcctgcgagccaccctggacaaacacctgcggcagaagcaccctgaggcggccggcgaggcctgagcccaggaaagcccccctcactgtccctggtaccgctgccaacacccattgacctcctcgtttttgcccgccttctccaagtaaattttcccttttattt

SEQ ID NO: 240971 - DNA, 1631 bp, Artificial Sequence
  derived and/or modified sequence
gccgtcagggccccagcagggcggctcggtcccctcccatgagccccgccctggtaggcggagccacgggcccggccagcacgtgtaagagttcgcggcgggtcgccgcagtcactcacctgagcgcgcacggtccgcgcgtcctccgctcgtgcgtcccaacccagacgacgagatggaaatgcaggacctcgtcatcgaactcaagcccgagccagacgcgcagccccaacaggccccaaggctggggcccttctccccgaaggaggtgtcctcggcggggcggttcggcggcgaaccccaccactcccctggccccatgcccgccggggccgccctcctcgccctcggcccgcggaacccgtggaccctgtggacgccgttgaccccgaactatcccgaccgccagccctggaccgacaaacacccagatctgttgacctgcggccgctgcctgcagaccttcccgttggaggccatcactgccttcatggaccacaagaagctgggctgtcagctcttcagaggccccagccgcggccagggctcagaacgagaggagctgaaggccttgagctgcctgcgctgtggcaaacagttcacagtggcctggaagctgctgcgtcacgcccagtgggaccacggactgtccatctaccagacagaatcagaggccccggaggccccgctcctgggcctggccgaggtggctgcagccgtgtcggcagtggtggggccagcagctgaggccaagagcccccgtgcaagtggcagcggcctcacccggcggagccccacctgtcctgtgtgcaagaagaccctcagctccttcagcaacctcaaagtgcacatgcgctcacacacaggcgagcggccctatgcttgcgaccagtgtccctacgcctgcgcccagagcagcaagctcaaccgccacaagaagacccaccggcaggtgccgccccagagccccctcatggccgacaccagccaggagcaggcctctgcagcccctccggagccggctgtccatgctgctgcccccaccagcacccttccatgcagcggtggtgagggggctggagccgccgccacagcaggtgtccaggaacccggggctcctggcagtggggctcaagccggccctggtggagacacttggggagccatcaccacggaacaaagaactgaccctgcaaacagccagaaggcatcacccaaaaagatgcccaagtcagggggcaagagccgcgggcccgggggcagctgtgagttctgcgggaagcattttaccaacagcagcaacctgacggtgcaccggcgctcacacaccggggagcgcccctacacctgtgagttctgcaactacgcctgcgcccagagcagtaagctcaaccgccaccgccgcatgcacggcatgacgcctggcagcacccgcttcgagtgcccccactgccatgtgcccttcggcctgcgagccaccctggacaaacacctgcggcagaagcaccctgaggcggccggcgaggcctgagcccaggaaagcccccctcactgtccctggtaccgctgccaacacccattgacctcctcgtttttgcccgccttctccaagtaaattttcccttttattt

SEQ ID NO: 240972 - protein, 1321 aa, Artificial Sequence
  derived and/or modified sequence
MEPPGRRRGRAQPPLLLPLSLLALLALLGGGGGGGAAALPAGCKHDGRPRGAGRAAGAAEGKVVCSSLELAQVLPPDTLPNRTVTLILSNNKISELKNGSFSGLSLLERLDLRNNLISSIDPGAFWGLSSLKRLDLTNNRIGCLNADIFRGLTNLVRLNLSGNLFSSLSQGTFDYLASLRSLEFQTEYLLCDCNILWMHRWVKEKNITVRDTRCVYPKSLQAQPVTGVKQELLTCDPPLELPSFYMTPSHRQVVFEGDSLPFQCMASYIDQDMQVLWYQDGRIVETDESQGIFVEKNMIHNCSLIASALTISNIQAGSTGNWGCHVQTKRGNNTRTVDIVVLESSAQYCPPERVVNNKGDFRWPRTLAGITAYLQCTRNTHGSGIYPGNPQDERKAWRRCDRGGFWADDDYSRCQYANDVTRVLYMFNQMPLNLTNAVATARQLLAYTVEAANFSDKMDVIFVAEMIEKFGRFTKEEKSKELGDVMVDIASNIMLADERVLWLAQREAKACSRIVQCLQRIATYRLAGGAHVYSTYSPNIALEAYVIKSTGFTGMTCTVFQKVAASDRTGLSDYGRRDPEGNLDKQLSFKCNVSNTFSSLALKNTIVEASIQLPPSLFSPKQKRELRPTDDSLYKLQLIAFRNGKLFPATGNSTNLADDGKRRTVVTPVILTKIDGVNVDTHHIPVNVTLRRIAHGADAVAARWDFDLLNGQGGWKSDGCHILYSDENITTIQCYSLSNYAVLMDLTGSELYTQAASLLHPVVYTTAIILLLCLLAVIVSYIYHHSLIRISLKSWHMLVNLCFHIFLTCVVFVGGITQTRNASICQAVGIILHYSTLATVLWVGVTARNIYKQVTKKAKRCQDPDEPPPPPRPMLRFYLIGGGIPIIVCGITAAANIKNYGSRPNAPYCWMAWEPSLGAFYGPASFITFVNCMYFLSIFIQLKRHPERKYELKEPTEEQQRLAANENGEINHQDSMSLSLISTSALENEHTFHSQLLGASLTLLLYVALWMFGALAVSLYYPLDLVFSFVFGATSLSFSAFFVVHHCVNREDVRLAWIMTCCPGRSSYSVQVNVQPPNSNGTNGEAPKCPNSSAESSCTNKSASSFKNSSQGCKLTNLQAAAAQCHANSLPLNSTPQLDNSLTEHSMDNDIKMHVAPLEVQFRTNVHSSRHHKNRSKGHRASRLTVLREYAYDVPTSVEGSVQNGLPKSRLGNNEGHSRSRRAYLAYRERQYNPPQQDSSDACSTLPKSSRNFEKPVSTTSKKDALRKPAVVELENQQKSYGLNLAIQNGPIKSNGQEGPLLGTDSTGNVRTGLWKHETTV

SEQ ID NO: 240973 - protein, 616 aa, Artificial Sequence
  derived and/or modified sequence
MEPPGRRRGRAQPPLLLPLSLLALLALLGGGGGGGAAALPAGCKHDGRPRGAGRAAGAAEGKVVCSSLELAQVLPPDTLPNRTVTLILSNNKISELKNGSFSGLSLLERLDLRNNLISSIDPGAFWGLSSLKRLDLTNNRIGCLNADIFRGLTNLVRLNLSGNLFSSLSQGTFDYLASLRSLEFQTEYLLCDCNILWMHRWVKEKNITVRDTRCVYPKSLQAQPVTGVKQELLTCDPPLELPSFYMTPSHRQVVFEGDSLPFQCMASYIDQDMQVLWYQDGRIVETDESQGIFVEKNMIHNCSLIASALTISNIQAGSTGNWGCHVQTKRGNNTRTVDIVVLESSAQYCPPERVVNNKGDFRWPRTLAGITAYLQCTRNTHGSGIYPGNPQDERKAWRRCDRGGFWADDDYSRCQYANDVTRVLYMFNQMPLNLTNAVATARQLLAYTVEAANFSDKMDVIFVAEMIEKFGRFTKEEKSKELGDVMVDIASNIMLADERVLWLAQREAKACSRIVQCLQRIATYRLAGGAHVYSTYSPNIALEAYVIKSTGFTGMTCTVFQKVAASDRTGLSDYGRRDPEGNLDKQLSFKCNVSNTFSSLALKVCYILQSFKTIYS

SEQ ID NO: 240974 - DNA, 4557 bp, Artificial Sequence
  derived and/or modified sequence
ggcggcggcagaggaggaggaggaggcggtgctcgcgccgggcggtagagcggcgctgggacccatgcggccgtgacccccggctccctagaggcccagcgcagccgcagcggacaaaggagcatgtccgcgccggggaaggcccgtcctccggccgccataaggctccggtcgccgctgggcccgcgccgcgctcctgcccgcccgggctccggggcggcccgctaggccagtgcgccgccgctcgccccgcaggccccggcccgcagcatggagccacccggacgccggcggggccgcgcgcagccgccgctgttgctgccgctctcgctgttagcgctgctcgcgctgctgggaggcggcggcggcggcggcgccgcggcgctgcccgccggctgcaagcacgatgggcggccccgaggggctggcagggcggcgggcgccgccgagggcaaggtggtgtgcagcagcctggaactcgcgcaggtcctgcccccagatactctgcccaaccgcacggtcaccctgattctgagtaacaataagatatccgagctgaagaatggctcattttctgggttaagtctccttgaaagattggacctccgaaacaatcttattagtagtatagatccaggtgccttctggggactgtcatctctaaaaagattggatctgacaaacaatcgaataggatgtctgaatgcagacatatttcgaggactcaccaatctggttcggctaaacctttcggggaatttgttttcttcattatctcaaggaacttttgattatcttgcgtcattacggtctttggaattccagactgagtatcttttgtgtgactgtaacatactgtggatgcatcgctgggtaaaggagaagaacatcacggtacgggataccaggtgtgtttatcctaagtcactgcaggcccaaccagtcacaggcgtgaagcaggagctgttgacatgcgaccctccgcttgaattgccgtctttctacatgactccatctcatcgccaagttgtgtttgaaggagacagccttcctttccagtgcatggcttcatatattgatcaggacatgcaagtgttgtggtatcaggatgggagaatagttgaaaccgatgaatcgcaaggtatttttgttgaaaagaacatgattcacaactgctccttgattgcaagtgccctaaccatttctaatattcaggctggatctactggaaattggggctgtcatgtccagaccaaacgtgggaataatacgaggactgtggatattgtggtattagagagttctgcacagtactgtcctccagagagggtggtaaacaacaaaggtgacttcagatggcccagaacattggcaggcattactgcatatctgcagtgtacgcggaacacccatggcagtgggatatatcccggaaacccacaggatgagagaaaagcttggcgcagatgtgatagaggtggcttttgggcagatgatgattattctcgctgtcagtatgcaaatgatgtcactagagttctttatatgtttaatcagatgcccctcaatcttaccaatgccgtggcaacagctcgacagttactggcttacactgtggaagcagccaacttttctgacaaaatggatgttatatttgtggcagaaatgattgaaaaatttggaagatttaccaaggaggaaaaatcaaaagagctaggtgacgtgatggttgacattgcaagtaacatcatgttggctgatgaacgtgtcctgtggctggcgcagagggaagctaaagcctgcagtaggattgtgcagtgtcttcagcgcattgctacctaccggctagccggtggagctcacgtttattcaacatattcacccaatattgctctggaagcttatgtcatcaagtctactggcttcacggggatgacctgtaccgtgttccagaaagtggcagcctctgatcgtacaggactttcggattatgggaggcgggatccagagggaaacctggataagcagctgagctttaagtgcaatgtttcaaatacattttcgagtctggcactaaagaatactattgtggaggcttctattcagcttcctccttcccttttctcaccaaagcaaaaaagagaactcagaccaactgatgactctctttacaagcttcaactcattgcattccgcaatggaaagctttttccagccactggaaattcaacaaatttggctgatgatggaaaacgacgtactgtggttacccctgtgattctcaccaaaatagatggtgtgaatgtagatacccaccacatccctgttaatgtgacactgcgtcgaattgcacatggagcagatgctgttgcagcccggtgggatttcgatttgctgaacggacaaggaggctggaagtcagatgggtgccatatactctattcagatgaaaatatcactacgattcagtgctactcccttagtaactatgcagttttaatggatttgacgggatctgaactatacacccaggcggccagcctcctgcatcctgtggtttatactaccgctatcattctcctcttatgtctcttagccgtcattgtcagttacatataccatcacagtttgattagaatcagcctcaagagctggcacatgcttgtgaacttgtgctttcatattttcctaacctgtgtggtctttgtgggaggaataacccagactaggaatgccagcatctgccaagcagttgggataattcttcactattccacccttgccacagtactatgggtaggagtgacagctcgaaatatctacaaacaagtcactaaaaaagctaaaagatgccaggatcctgatgaaccaccacctccaccaagaccaatgctcagattttacctgattggtggtggtatccccatcattgtttgcggcataactgcagcagcgaacattaagaattacggcagtcggccaaacgcaccctattgctggatggcatgggaaccctccttgggagccttctatgggccagccagcttcatcacttttgtaaactgcatgtactttctgagcatatttattcagttgaaaagacaccctgagcgcaaatatgagcttaaggagcccacggaggagcaacagagattggcagccaatgaaaatggcgaaataaatcatcaggattcaatgtctttgtctctgatttctacatcagccttggaaaatgagcacacttttcattctcagctcttgggggccagccttactttgctcttatatgttgcactgtggatgtttggggctttggctgtttctttgtattaccctttggacttggtttttagcttcgtttttggagccacaagtttaagcttcagtgcgttcttcgtggtccaccattgtgttaatagggaggatgttagacttgcgtggatcatgacttgctgcccaggacggagctcgtattcagtgcaagtcaacgtccagccccccaactctaatgggacgaatggagaggcacccaaatgccccaatagcagtgcggagtcttcatgcacaaacaaaagtgcttcaagcttcaaaaattcctcccagggctgcaaattaacaaacttgcaggcggctgcagctcagtgccatgccaattctttacctttgaactccacccctcagcttgataatagtctgacagaacattcaatggacaatgatattaaaatgcacgtggcgcctttagaagttcagtttcgaacaaatgtgcactcaagccgccaccataaaaacagaagtaaaggacaccgggcaagccgactcacagtcctgagagaatatgcctacgatgtcccaacgagcgtggaaggaagcgtgcagaacggcttacctaaaagccggctgggcaataacgaaggacactcgaggagccgaagagcttatttagcctacagagagagacagtacaacccaccccagcaagacagcagcgatgcttgtagcacacttcccaaaagtagcagaaattttgaaaagccagtttcaaccactagtaaaaaagatgcgttaaggaagccagctgtggttgaacttgaaaatcagcaaaaatcttatggcctcaacttggccattcagaatggaccaattaaaagcaatgggcaggagggacccttgctcggtaccgatagcactggcaatgttaggactggattatggaaacacgaaactactgtgtaacattgctgggcttcctaggcagaaattcatataaactgtgatactcacattccttgaagctatgagcatttaaaaactgtttacagccaccatagggattcaaaagaatttggaataaactttgaagttttggattttacttatttttatccccaaattgttgctattttttaggatctgaaacaaaatctttctaaaacattgttttagttgtcaaagcaccaacaggacattttgggatgtgaaatgtaatttcttggaatctgtaatttgtacttaatatttcaggcttgtatttaatataataaataggtgtttgtt

SEQ ID NO: 240975 - DNA, 2870 bp, Artificial Sequence
  derived and/or modified sequence
gggacccatgcggccgtgacccccggctccctagaggcccagcgcagccgcagcggacaaaggagcatgtccgcgccggggaaggcccgtcctccggccgccataaggctccggtcgccgctgggcccgcgccgcgctcctgcccgcccgggctccggggcggcccgctaggccagtgcgccgccgctcgccccgcaggccccggcccgcagcatggagccacccggacgccggcggggccgcgcgcagccgccgctgttgctgccgctctcgctgttagcgctgctcgcgctgctgggaggcggcggcggcggcggcgccgcggcgctgcccgccggctgcaagcacgatgggcggccccgaggggctggcagggcggcgggcgccgccgagggcaaggtggtgtgcagcagcctggaactcgcgcaggtcctgcccccagatactctgcccaaccgcacggtcaccctgattctgagtaacaataagatatccgagctgaagaatggctcattttctgggttaagtctccttgaaagattggacctccgaaacaatcttattagtagtatagatccaggtgccttctggggactgtcatctctaaaaagattggatctgacaaacaatcgaataggatgtctgaatgcagacatatttcgaggactcaccaatctggttcggctaaacctttcggggaatttgttttcttcattatctcaaggaacttttgattatcttgcgtcattacggtctttggaattccagactgagtatcttttgtgtgactgtaacatactgtggatgcatcgctgggtaaaggagaagaacatcacggtacgggataccaggtgtgtttatcctaagtcactgcaggcccaaccagtcacaggcgtgaagcaggagctgttgacatgcgaccctccgcttgaattgccgtctttctacatgactccatctcatcgccaagttgtgtttgaaggagacagccttcctttccagtgcatggcttcatatattgatcaggacatgcaagtgttgtggtatcaggatgggagaatagttgaaaccgatgaatcgcaaggtatttttgttgaaaagaacatgattcacaactgctccttgattgcaagtgccctaaccatttctaatattcaggctggatctactggaaattggggctgtcatgtccagaccaaacgtgggaataatacgaggactgtggatattgtggtattagagagttctgcacagtactgtcctccagagagggtggtaaacaacaaaggtgacttcagatggcccagaacattggcaggcattactgcatatctgcagtgtacgcggaacacccatggcagtgggatatatcccggaaacccacaggatgagagaaaagcttggcgcagatgtgatagaggtggcttttgggcagatgatgattattctcgctgtcagtatgcaaatgatgtcactagagttctttatatgtttaatcagatgcccctcaatcttaccaatgccgtggcaacagctcgacagttactggcttacactgtggaagcagccaacttttctgacaaaatggatgttatatttgtggcagaaatgattgaaaaatttggaagatttaccaaggaggaaaaatcaaaagagctaggtgacgtgatggttgacattgcaagtaacatcatgttggctgatgaacgtgtcctgtggctggcgcagagggaagctaaagcctgcagtaggattgtgcagtgtcttcagcgcattgctacctaccggctagccggtggagctcacgtttattcaacatattcacccaatattgctctggaagcttatgtcatcaagtctactggcttcacggggatgacctgtaccgtgttccagaaagtggcagcctctgatcgtacaggactttcggattatgggaggcgggatccagagggaaacctggataagcagctgagctttaagtgcaatgtttcaaatacattttcgagtctggcactaaaggtatgttacattctgcaatcatttaagactatttacagttaaattagaatgctccaaatgttctgcttcgcaaaataaccttattaaaagattttttttttgcaggaagataggtattattgcttttgctactgttttaaagaaaactaaccaggaagaactgcattacgactttcaagggccctaggcatttttgcctttgattccctttcttcacataaaaatatcagaaattacattttataactgcagtggtataaatgcaaatatactattgttacatgtgaaaaaatcttatttgacttaaaagtttatttatttgtttttttgctcctgattttaagacaataagatgttttcatgggcccctaaaagtatcatgagcctttggcactgcgcctgccaagcctagtggagaagtcaaccctgagaccaggtgtttaatcaagcaagctgtatatcaaaatttttggcagaaaacacaaatatgtcatatatctttttttaaaaaaagtatttcattgaagcaagcaaaatgaaagcatttttactgatttttaaaattggtgctttagatatatttgactacactgtattgaagcaaatagaggaggcacaactccagcaccctaatggaaccacatttttttcacttagctttctgtgggcatgtgtaattgtattctctgcggtttttaatctcacagtactttatttctgtcttgtccctcaataatatcacaaacaatattccagtcattttaatggctgcataataactgatccaacaggtgttaggtgttctggtttagtgtgagcactcaataaatattgaatgaatgaacgaa

SEQ ID NO: 240976 - DNA, 3966 bp, Artificial Sequence
  derived and/or modified sequence
atggagcctcccggtcgtagacggggacgcgcccaaccccccctcctgctgcctctgtctctgctggctctgcttgccctgttggggggaggagggggaggcggcgctgcagcccttccagctggctgtaagcatgacggcagacccaggggcgccggcagagcagctggcgcagctgagggaaaagtggtctgcagcagcctggagcttgctcaggtcctccctcctgacacactccctaatcgtacggtcaccctgatactgagtaacaacaagatctccgagctcaaaaacggatcattctcaggcctttcactcctcgagaggctggacctgcgcaataatctcatctcgtcaatcgatccgggtgccttttggggcctgtcttcactgaagcgactggatttgacaaacaataggatcggctgtctgaatgccgatatttttcgcggccttactaatctcgtcagactgaatctctccggaaatctcttttcctcgcttagtcaggggaccttcgactacctggcgtctctaagatcattggaattccagaccgagtatttgctgtgtgactgcaatattctctggatgcaccgctgggtcaaagaaaaaaacattaccgtgcgcgacacacgctgtgtgtatccaaagagcctccaggcacagccggtgaccggcgttaagcaagaactgctcacgtgcgatccaccgttggagctaccatctttctacatgactccgagtcaccgacaggtcgtctttgaaggcgattcactccccttccagtgcatggcatcatatatcgatcaggacatgcaggttctgtggtaccaggacgggcgcatcgtcgagaccgacgaatctcaaggcatattcgtcgagaaaaacatgatccacaattgttcactcattgcttctgccctgactatatcaaacatacaggctggcagcaccggcaactggggctgccacgtccagaccaaaagggggaacaatacgaggactgttgacatcgtggtgcttgagtcctcagcacagtactgccccccagagcgggtggttaacaacaagggcgacttcagatggccgaggactctggcggggattacagcatacctgcagtgcaccagaaacacacatggatcaggaatttatccaggcaaccctcaggacgaacgaaaggcctggcgaaggtgcgatcgtggcggtttctgggcagatgatgactatagcaggtgccagtatgccaacgacgtcacacgagttctctacatgttcaatcagatgcccctgaacctgaccaacgccgttgccactgctcgtcagctgctggcctacacggtggaggccgcaaacttcagtgataaaatggacgtcatctttgtggctgaaatgatcgagaagtttggcaggttcaccaaagaggaaaaaagcaaagagctcggcgacgtgatggttgatatagctagtaatattatgctcgcagatgagcgcgtgctgtggctcgcccagagggaagccaaggcttgcagccggatcgtgcagtgtttacagcgcattgccacatacaggctggctggcggagcccacgtgtactctacgtattctcccaacattgcgctggaagcatacgtcatcaagagcactggcttcaccgggatgacctgtaccgtgttccagaaagtcgctgcgtcagacagaaccggcttgtctgactatgggagaagggacccagagggcaatctggataagcagttgagctttaaatgcaatgtatccaacaccttctcgagcctagctcttaaaaataccattgttgaggccagcatccagttgcccccaagcctgttttctcccaaacagaaacgggaattaaggcccaccgacgacagtttgtacaaactgcagctcatcgcatttcgcaacggcaagctgttccctgcaacgggaaactctaccaacctcgcagacgacggcaagaggagaaccgttgttacccctgttattttaacgaaaatcgacggcgtgaacgtggatacccatcacatccccgtgaacgtgacattaagacgtattgcccatggtgctgatgctgttgccgcaagatgggacttcgatctgctgaatgggcaagggggatggaaaagcgatgggtgccacatcctgtactcagatgagaatatcaccacaattcagtgctatagcctgtcaaattacgccgtgctgatggacctgacaggatcggagctctatacgcaggccgctagtcttctgcacccggtggtttataccacggccatcattttgctgttgtgtcttctcgccgtcatcgtgagttatatctaccaccattctctgatcagaatatctctgaagagctggcatatgctggtgaatctttgtttccacatcttcctgacttgcgtggtgttcgttggcggcatcacacagacccggaatgcttcaatctgccaggcagtgggtattatattgcattactccaccttagcaaccgtgctgtgggtgggcgtgacggcacggaacatttataagcaggtcacaaaaaaagcgaagaggtgtcaagacccggacgaacctccgccccccccaagacccatgttgaggttctaccttattggtggaggaatacctatcatagtctgcggaatcaccgcagccgccaatattaaaaactatggatcccgccctaatgcaccatattgttggatggcatgggagccatctctcggcgcattttatggaccggcctcctttatcacgttcgttaactgcatgtatttcctgtctatattcatccaactgaaacgacatccagaacgtaagtatgagctcaaagaaccaacagaggaacagcaaaggctggccgctaatgaaaacggtgagatcaaccaccaggactccatgagtctttctctcatctccacatccgcgctagagaatgagcacacattccattcacagctcttgggggcctcattgacattgctcctgtacgtcgccctttggatgttcggcgctctcgcggtttccctctactacccactcgatctcgtcttctcattcgtgtttggtgcaacgagtcttagtttttctgctttcttcgttgttcatcactgtgtcaatcgcgaagacgtgagactcgcgtggattatgacctgctgtcccggtaggtccagttacagcgtgcaggtcaacgtgcagcccccgaattccaatgggactaatggtgaggccccaaaatgtccgaacagctccgccgagagttcctgcaccaacaagtccgcatcaagctttaagaacagctcccagggatgcaaactcactaacttgcaggcagccgccgcccagtgtcatgccaattctctaccactgaatagcaccccccagctggacaatagtctgactgagcactccatggataacgatatcaaaatgcacgtcgcccctctggaagtgcagtttagaaccaacgtgcatagcagccgccatcacaagaataggagtaaaggccacagggcttccagacttaccgtgctgcgggagtacgcttacgacgtcccgactagcgtcgaagggtccgtgcagaatggactccctaaatctcgcctaggaaataacgagggccactctagaagccgaagggcctacctcgcctacagagagaggcagtacaatccccctcaacaggatagttctgacgcatgctcaaccctgcccaagtcatcaaggaactttgagaagcccgttagtactacatctaagaaagacgctctgaggaaaccagccgttgtggagctcgaaaaccaacagaaaagttacggcctgaaccttgcaattcagaacgggccaatcaaatccaacggtcaggagggtcctctgctcggcacggacagtaccgggaacgtgcgcaccggcctttggaaacatgaaaccacagtgtag

SEQ ID NO: 240977 - DNA, 1851 bp, Artificial Sequence
  derived and/or modified sequence
atggaacctcccggccgaaggaggggccgcgcccagccacccctgttattgcccctgtctctactcgctctacttgcactcttgggaggtgggggagggggaggggctgcagccctgcctgccgggtgcaagcacgatgggagacctagaggcgccggcagagctgcgggcgcagccgaagggaaagtggtgtgtagctccttggaactcgctcaggtgttaccccccgacactctccccaaccgcacagtgaccctcatcttgtcaaacaataaaatctcagagctgaaaaacgggtcattctctggcctgagtctgttggagagactcgacctccggaataacctgatcagctcaattgaccccggagctttctgggggctgagttcactcaagaggttggatctgaccaataataggattgggtgccttaatgccgacatattccgtggacttaccaatctggtgcgtctcaatctgtcaggcaatctattttccagcctgtcacagggaaccttcgactatctggcttcactgaggtcactggaattccagactgaatatctgctgtgcgattgtaatattctctggatgcatagatgggttaaggaaaagaatattaccgttcgcgacactcgatgcgtttatcccaaatctctacaggcacagcccgttacaggagttaaacaggaactcctgacgtgtgatccacctctggaactcccctccttttacatgacgccttcccacagacaggtcgtgtttgagggtgactcgctgcctttccaatgtatggccagctacattgaccaagatatgcaggtgctgtggtatcaggacgggcgtatcgtcgaaaccgatgaatcccaggggatctttgtagaaaaaaatatgatacacaattgttcactgattgcaagtgccctcaccatctccaacatacaggccggatccacgggaaactggggctgccatgtccagacaaagcgaggaaacaatacaaggacggtagacatcgtagtcctcgagagctctgcccaatattgcccacccgagcgcgtggtcaacaataaaggagactttaggtggccacgaacactcgccgggatcactgcctatctacagtgtacccggaacacgcacggcagcggcatttacccaggcaacccacaggacgagcgcaaggcctggcggcgctgcgaccggggcggattctgggcagacgacgactactcacgctgccagtatgctaacgatgtcacaagggttctctatatgtttaaccagatgccacttaatctgaccaatgccgtggctacagctaggcagctgctggcctacacagttgaggctgccaactttagcgacaaaatggacgtgatcttcgtggccgagatgatcgagaagttcggtagattcaccaaggaggagaagtctaaggagcttggtgacgtcatggttgatatcgcctctaatatcatgctggcggacgagcgcgtgctctggctggcccagagagaggctaaggcctgcagcagaatagttcagtgcttgcaaaggatcgcaacttatcggctcgccggtggtgcccacgtgtactcaacatatagcccgaacattgcacttgaggcttatgtgatcaagtcaactggcttcaccggcatgacatgcactgtcttccagaaagtggccgctagtgatcggaccgggctctccgattatggacggagagatcccgagggaaacctggataagcagcttagtttcaagtgcaatgtgtcaaacacttttagctcactggcactgaaagtgtgctatatactgcagtcctttaagaccatatatagctag

SEQ ID NO: 240978 - DNA, 3966 bp, Artificial Sequence
  derived and/or modified sequence
atggagcccccaggaagaagaagaggccgggcccagccccccctgctgctgcccctgagcctgctggccctgctggccctgctgggcggcggcggcggcggcggcgctgctgccctgcctgctggctgcaagcatgatggccggcccaggggggccggccgggccgccggggctgctgagggcaaggtggtgtgcagcagcctggagctggcccaggtgctgcccccagacaccctgcccaacagaacagtgaccctcatcctgagcaacaacaagatcagcgagctgaagaatggcagcttcagcggcctgagcctgctggagcggctggacctgaggaacaacctgatcagcagcattgaccccggggccttctggggcctgagcagcctgaagaggctggacctgaccaacaacagaattggctgcctgaatgctgacatcttccggggcctgaccaacctggtgcggctgaacctgagcggcaacctcttcagcagcctgagccagggcacctttgactacctggccagcctgcggagcctggagttccagacagagtacctgctgtgtgactgcaacatcctgtggatgcaccgctgggtgaaggagaagaacatcaccgtgcgggacacccgctgtgtgtaccccaagagcctgcaggcccagcctgtgactggagtgaagcaggagctgctgacctgtgacccccccctggagctgcccagcttctacatgacccccagccaccggcaggtggtgtttgaaggagacagcctgcccttccagtgcatggccagctacatcgaccaggacatgcaggtgctgtggtaccaggacggcagaattgtggagacagatgagagccagggcatctttgtggagaagaacatgatccacaactgcagcctgattgccagcgccctgaccatcagcaacatccaggccggcagcactggaaactggggctgccacgtgcagaccaagaggggcaacaacaccaggacagtggacatcgtggtgctggagagcagcgcccagtactgccccccagagcgggtggtgaacaacaagggggacttccgctggcccaggaccctggccggcatcacagcctacctgcagtgcaccaggaacacccacggcagcggcatctacccaggcaacccccaggatgagaggaaggcctggaggcgctgtgacagaggaggcttctgggcagatgatgactacagccgctgccagtatgccaatgatgtgaccagggtgctgtacatgttcaaccagatgcccctgaacctgaccaatgctgtggccacagcccggcagctgctggcctacacagtggaggccgccaacttcagtgacaagatggatgtgatctttgtggccgagatgattgagaagtttggccgcttcaccaaggaggagaagagcaaggagctgggagatgtgatggtggacatcgccagcaacatcatgctggctgatgagcgggtgctgtggctggcccagcgggaggccaaggcctgcagccgcatcgtgcagtgcctgcagagaattgccacctaccgcctggccggcggggcccacgtgtacagcacctacagccccaacatcgccctggaggcctacgtgatcaagagcacaggcttcaccggcatgacctgcaccgtcttccagaaggtggccgccagtgacagaacaggcctgagtgactatggccggcgggaccctgagggcaacctggacaagcagctgtccttcaagtgcaatgtgagcaacaccttcagcagcctggccctgaagaacaccatcgtggaggccagcatccagctgccccccagcctcttcagccccaagcagaagcgggagctgcggcccacagatgacagcctgtacaagctgcagctgattgccttcagaaatggcaagctgtttcctgccaccggcaacagcaccaacctggctgatgatggcaagagaagaacagtggtgacccctgtgatcctgaccaagattgatggagtgaatgtggacacccaccacatccctgtgaatgtgaccctgcggagaattgcccatggagcagatgctgtggccgcccgctgggactttgacctgctgaatggccagggcggctggaagagtgatggctgccacatcctgtacagtgatgagaacatcaccaccatccagtgctacagcctgagcaactatgctgtgctgatggacctgactggaagtgagctgtacacccaggccgccagcctgctgcaccctgtggtgtacaccacagccatcatcctgctgctgtgcctgctggccgtcatcgtgtcctacatctaccaccacagcctcatccgcatcagcctgaagtcctggcacatgctggtgaacctgtgcttccacatcttcctgacctgtgtggtgtttgtgggcggcatcacccagaccagaaatgccagcatctgccaggccgtgggcatcatcctgcactacagcaccctggccaccgtgctgtgggtgggcgtgacagccaggaacatctacaagcaggtgaccaagaaggccaagcgctgccaggaccctgatgagcccccacctccaccccggcccatgctgcgcttctacctgattggaggcggcatccccatcatcgtgtgtggcatcacagctgctgccaacatcaagaactacggcagccggcccaatgccccctactgctggatggcctgggagcccagcctgggcgccttctacggccctgccagcttcatcacctttgtgaactgcatgtacttcctgagcatcttcatccagctgaagaggcaccctgagaggaaatatgagctgaaggagcccacagaggagcagcagaggctggccgccaatgaaaatggagagatcaaccaccaggacagcatgagcctgagcctcatcagcaccagcgccctggagaatgagcacaccttccacagccagctgctgggcgccagcctgaccctgctgctgtatgtggccctgtggatgtttggagccctggccgtgtccctgtactaccccctggacctggtgttctcctttgtgtttggagccaccagcctgtccttcagcgccttctttgtggtgcaccactgtgtgaacagagaagatgtgcggctggcctggatcatgacctgctgccccggccgcagcagctacagcgtgcaggtgaatgtgcagccccccaacagcaatggcaccaatggagaggcccccaagtgccccaacagcagcgctgagagcagctgcaccaacaagagcgccagcagcttcaagaacagcagccagggctgcaagctgaccaacctgcaggccgccgccgcccagtgccacgccaacagcctgcccctgaacagcaccccccagctggacaacagcctgacagagcacagcatggacaatgacatcaagatgcacgtggcccccctggaggtgcagttccgcaccaacgtgcacagcagccgccaccacaagaacagaagcaagggccaccgggccagccggctgactgtgctgcgggagtatgcctatgatgtgcccacctctgtggagggctctgtgcagaatggcctgcccaagagccggctgggcaacaatgaaggccacagccgcagcagaagagcctacctggcctaccgggagcggcagtacaaccccccccagcaggacagcagtgatgcctgcagcaccctgcccaagagcagcaggaactttgagaagcctgtgtccaccaccagcaagaaggatgccctgaggaagccagctgtggtggagctggagaaccagcagaagagctatggcctgaacctggccatccagaatggccccatcaagagcaatggccaggagggccccctgctgggcacagacagcactggaaatgtgaggacaggcctgtggaagcatgagaccaccgtgtag

SEQ ID NO: 240979 - DNA, 1851 bp, Artificial Sequence
  derived and/or modified sequence
atggagcccccaggaagaagaagaggccgggcccagccccccctgctgctgcccctgagcctgctggccctgctggccctgctgggcggcggcggcggcggcggcgctgctgccctgcctgctggctgcaagcatgatggccggcccaggggggccggccgggccgccggggctgctgagggcaaggtggtgtgcagcagcctggagctggcccaggtgctgcccccagacaccctgcccaacagaacagtgaccctcatcctgagcaacaacaagatcagcgagctgaagaatggcagcttcagcggcctgagcctgctggagcggctggacctgaggaacaacctgatcagcagcattgaccccggggccttctggggcctgagcagcctgaagaggctggacctgaccaacaacagaattggctgcctgaatgctgacatcttccggggcctgaccaacctggtgcggctgaacctgagcggcaacctcttcagcagcctgagccagggcacctttgactacctggccagcctgcggagcctggagttccagacagagtacctgctgtgtgactgcaacatcctgtggatgcaccgctgggtgaaggagaagaacatcaccgtgcgggacacccgctgtgtgtaccccaagagcctgcaggcccagcctgtgactggagtgaagcaggagctgctgacctgtgacccccccctggagctgcccagcttctacatgacccccagccaccggcaggtggtgtttgaaggagacagcctgcccttccagtgcatggccagctacatcgaccaggacatgcaggtgctgtggtaccaggacggcagaattgtggagacagatgagagccagggcatctttgtggagaagaacatgatccacaactgcagcctgattgccagcgccctgaccatcagcaacatccaggccggcagcactggaaactggggctgccacgtgcagaccaagaggggcaacaacaccaggacagtggacatcgtggtgctggagagcagcgcccagtactgccccccagagcgggtggtgaacaacaagggggacttccgctggcccaggaccctggccggcatcacagcctacctgcagtgcaccaggaacacccacggcagcggcatctacccaggcaacccccaggatgagaggaaggcctggaggcgctgtgacagaggaggcttctgggcagatgatgactacagccgctgccagtatgccaatgatgtgaccagggtgctgtacatgttcaaccagatgcccctgaacctgaccaatgctgtggccacagcccggcagctgctggcctacacagtggaggccgccaacttcagtgacaagatggatgtgatctttgtggccgagatgattgagaagtttggccgcttcaccaaggaggagaagagcaaggagctgggagatgtgatggtggacatcgccagcaacatcatgctggctgatgagcgggtgctgtggctggcccagcgggaggccaaggcctgcagccgcatcgtgcagtgcctgcagagaattgccacctaccgcctggccggcggggcccacgtgtacagcacctacagccccaacatcgccctggaggcctacgtgatcaagagcacaggcttcaccggcatgacctgcaccgtcttccagaaggtggccgccagtgacagaacaggcctgagtgactatggccggcgggaccctgagggcaacctggacaagcagctgtccttcaagtgcaatgtgagcaacaccttcagcagcctggccctgaaggtgtgctacatcctgcagagcttcaagaccatctacagctag

SEQ ID NO: 240980 - DNA, 3966 bp, Artificial Sequence
  derived and/or modified sequence
atggagccccccggccggcggcggggccgggcccagccccccctgttactccccctgtccttgctggcacttctcgcattgctaggcggggggggcggaggcggcgcagcggccctaccagccggatgcaagcacgatgggagacctcgaggagcgggccgagcagctggcgccgctgaaggcaaggtagtgtgctcttccttagagctcgcacaagtgctgccacccgacaccctgcctaacaggacagtgaccctgattctctccaacaataagataagtgagctcaaaaatggatcattctccggcctgagcctactggagaggttagacttgcggaacaacctgatctcatctatcgaccccggagcgttctggggcctctcctccctgaagaggctcgatttaaccaataatcggattggctgtttgaatgcagatatttttagaggtctgactaatctcgttcggctcaatttatctgggaacctgtttagcagcctgtcacagggaacattcgactatttggcatctttacgtagccttgaattccagaccgaatatctgctgtgtgactgcaatatactctggatgcatagatgggtcaaggaaaagaatataactgtgagggacactaggtgcgtataccccaaatcccttcaggctcaacccgtcactggagttaagcaagaacttttgacctgtgacccccccctagagctcccatcattctacatgacacccagtcacagacaggtggtgttcgagggcgacagcctgccattccagtgcatggccagttatatcgaccaagatatgcaggtgctttggtaccaggatgggcgcattgttgagacagacgagtcccagggaatctttgttgaaaaaaatatgatccacaattgttcccttatcgcaagtgcactgaccatcagcaacatacaagctgggtccactggtaactggggctgccacgttcaaacaaaaagaggcaacaacactcggacggtagatattgtggtactggagtcctccgcccaatattgccctccagagagggtcgttaacaataagggtgattttagatggccacggacccttgcgggtataactgcttacctgcagtgcacccgcaatacccacggctctggtatttaccctggtaacccccaagacgagcgtaaggcgtggcgcaggtgtgatcgggggggattctgggccgatgatgattactcccgctgccagtacgctaatgacgtcaccagagtgctgtatatgttcaatcagatgccattaaatcttaccaacgccgtcgcgactgcaagacagctgttggcttacacagtggaggccgccaacttcagtgacaagatggacgttatctttgttgcggaaatgattgaaaagttcggccggtttacaaaggaagaaaagagcaaggagctgggggacgttatggtcgacattgcctccaatatcatgcttgcagatgagcgggtcctgtggcttgcacagcgcgaggccaaagcatgcagtcgcatcgtgcaatgcttgcagaggatcgcaacctatcgactggccggcggtgcccatgtttacagcacatatagccccaacatcgcgctggaagcatacgtcatcaagtctaccggctttaccggcatgacatgtaccgtcttccagaaagtagcagcatccgaccgtacaggcctgtctgactacgggagacgggaccctgaagggaatttagataaacagttaagctttaagtgtaacgtgagcaatacgttctcgtcactcgctctgaaaaacaccatagtggaggcctctatccagctgccaccaagcctattctctccaaaacagaaaagggagcttcggcccaccgatgactccctttacaagctgcaactgatcgcttttcgcaatggaaagctattccctgccacagggaattccacaaacctggctgacgatggcaagcgccgcaccgtggtaacgcccgtcatcttgaccaaaatcgacggggtcaacgtcgatacacatcacataccagttaacgtgactcttaggcggatcgcacacggcgcagacgccgtggcagctcgatgggacttcgacctgctgaatgggcagggtggatggaaatcagatggatgtcacatcctttatagtgacgagaacatcacaaccattcagtgttactccctcagtaactacgccgttttgatggacctgacgggcagcgaattgtacactcaggccgctagtctgctgcatcctgtggtctatactacagccatcatccttctgttatgcttgctggcagtcatagtctcatacatctatcaccattccctcatccggatcagtctcaagagctggcacatgctagtcaatctgtgcttccacatattcttaacatgtgttgtgttcgtcggcggcattacacaaacaaggaacgcttctatttgccaagctgtggggatcattctgcactactccacactcgccacagttctgtgggtcggggttactgccagaaatatctacaaacaggtgaccaagaaggccaaacgatgccaggacccagacgaacccccacccccaccccgaccaatgcttagattttacctcatcggaggaggcattccgattatcgtttgtggcatcaccgctgccgccaacataaagaattacggaagcagacccaacgctccatactgttggatggcgtgggagccaagcctgggggctttctacggtcccgcctcatttattaccttcgtgaactgcatgtatttcctgtctatctttatccaactgaagagacatccggaaagaaagtatgagctgaaggagcccacggaagaacagcagaggctggcggcaaacgagaacggcgagataaatcatcaagacagtatgagcctgtccttgatctcgacaagcgccctagagaatgagcacactttccacagccagttgcttggagcatcgctgaccctgcttctctatgtggccctttggatgttcggtgcacttgcagtctctttatattatcctcttgacctcgtgttttcctttgtattcggcgccacctctctgtccttctcggccttctttgtagtgcatcactgcgtgaaccgcgaggacgtacgccttgcatggatcatgacatgctgtcctggacggagttcgtatagtgtgcaggtgaacgtacagcccccaaattctaatggcacaaacggggaagccccaaagtgcccaaactcctccgctgagagctcttgcaccaacaagagtgcttcgtcttttaagaacagttctcaggggtgcaagctgactaacttgcaggccgccgccgcccaatgccatgccaactctctgcccttgaattctacccctcagcttgacaactctctaactgagcatagcatggacaatgacatcaagatgcatgttgcccccctggaggtacagttcagaacaaatgtgcattcttcaagacaccacaagaacaggagcaagggccatagggcctctcgcctcacggtgctgagagaatacgcttacgatgtcccaacctctgtggaaggatcggtgcagaacggcttgcccaagagtcgtctgggaaacaacgaaggccattcccgctctcgacgggcttatcttgcctatcgggagcgccagtacaacccacctcagcaagactcaagcgacgcttgcagcacacttcctaagagctcccgtaacttcgaaaagcctgtaagcaccacttcaaaaaaggatgccctgaggaaacccgcagtggtggagctggagaatcagcagaaaagctacggtctgaatctagctattcagaatggaccaattaaaagcaatgggcaagaagggcccctgctgggtacagactcaaccggcaacgtgagaaccggcctctggaagcacgaaaccaccgtgtag

SEQ ID NO: 240981 - DNA, 1851 bp, Artificial Sequence
  derived and/or modified sequence
atggagccccccggccggcggcggggccgggcccagccccccctgcttctcccactgagtctgcttgcattgttggccctcttaggaggagggggaggtggcggagcagccgcactgccagcgggatgcaaacacgacggacgccccaggggagccggaagagcggccggagccgccgaagggaaagtggtgtgctcgtccctggagctcgcccaggtgctaccacctgacaccctgccaaatcgtactgtcacactaatcctatctaacaacaagattagcgagttgaaaaacgggtcgttctccggactcagcctcctcgagaggcttgacctccggaacaacctgatctcctctatcgacccaggggccttttggggcctgagtagtcttaagcgtcttgatctcactaacaatcggatcggctgcctaaatgctgatatcttccggggcttgaccaacctcgtgagactgaacttgtcaggcaatttgtttagctcactgtctcaggggacttttgactacctcgccagtttgaggagccttgaattccaaacagaatatctgctctgcgattgtaacatcctttggatgcaccgatgggtaaaagagaagaatataaccgtcagggacacccgatgtgtgtaccccaagtcactgcaagcacagcctgtgacgggggtgaaacaagagctgctgacctgtgaccccccgcttgaactcccttcattctacatgactccttcccacaggcaggttgtgttcgagggcgacagcctcccctttcagtgcatggctagctacattgaccaggacatgcaggtgctgtggtaccaggacggaaggatcgtggagaccgatgaatctcaagggatattcgtggagaagaacatgatccataattgctccctcatcgcttctgctctgacgatttccaatatccaagccggcagcacgggtaactggggttgtcacgttcagactaaacgtggcaataatacacgtaccgtggacatcgtggtgttagaaagtagcgcacagtactgccctccagaacgcgtggtgaataataagggcgattttaggtggcccagaacactcgctggaatcaccgcatatcttcagtgcactagaaatacacatggctccggaatctatccagggaaccctcaggatgaacgaaaggcatggagaaggtgtgacaggggtggcttttgggctgacgatgactacagccgctgccagtatgctaatgacgtcaccagagtcctatatatgtttaaccagatgccgttaaacctcaccaacgcggtcgccacagctagacagctgcttgcttacaccgtcgaagccgcaaacttcagcgataaaatggacgtgatttttgtagcggaaatgattgagaaattcgggagattcacgaaagaagagaaatcaaaagaacttggagacgtcatggtggatatcgcgtctaacataatgctggctgacgaacgggtgttatggctggctcaaagagaggcaaaggcttgctcccgtattgtgcagtgcctgcagagaattgccacctaccgcctcgccggaggagcccacgtgtatagtacatattctcccaatattgccctggaggcctatgtaatcaagtccaccggcttcactgggatgacttgtacggtgttccagaaagtggccgccagcgaccgcacaggcttatctgactatggtagaagggaccccgaaggcaatctcgacaagcagctgagctttaaatgcaacgtgtccaatactttctcaagcctggcgctaaaggtctgctacatcctgcagtcgtttaagactatatatagctag

SEQ ID NO: 240982 - DNA, 3966 bp, Artificial Sequence
  derived and/or modified sequence
atggagcctcccggacgacggagaggcagggcacagcctcctctgctgctgccacttagcttgctggcgctgctggcccttctaggcggaggcggaggcggaggtgcagctgctctcccggctggttgtaagcacgatggcaggccacgtggcgctggcagggcagctggcgctgcagagggtaaggtggtgtgcagctccctggagctggctcaggttcttccaccagacacactccctaaccggaccgtcacactgatactatctaacaataaaatttcggagctgaagaacggcagttttagcggcctctccttgctcgagcgcctggatcttcgcaacaacctcatatcctcaatcgaccctggcgctttctggggactctccagcctgaagagactggatttaaccaacaaccggattggctgtcttaatgcggacatttttcggggtctaaccaatctcgtgcggttgaatctctctggcaatctgttcagttcactgtctcaggggactttcgattacctggcttcactgcggtcgctcgaatttcagacagaatacctgctgtgcgattgcaacatcctgtggatgcatcgctgggtaaaggagaaaaacatcaccgttcgcgatacaaggtgcgtctacccaaaaagcttgcaggctcagccggttacaggggtgaaacaggagcttctgacctgtgatccacccctggaactgcccagcttttatatgactcccagtcacaggcaagtggtcttcgaaggggacagcctaccattccaatgcatggcctcctatatcgatcaggatatgcaggtgctgtggtatcaggacggacgtatcgtcgaaacagatgaatctcaaggcatttttgtcgaaaagaatatgattcacaattgttccctgattgcaagcgctctcacaatcagcaatatccaggccggttccaccggtaactggggatgtcacgtacaaacgaagaggggcaacaatactcgcacggtagacatcgtggttttggaaagttcagcgcaatattgtccacctgagagggtggtcaacaacaagggcgattttcgctggccaagaaccctagcaggaataacagcctacctgcaatgtactcgaaatacccacggctccggaatctacccaggcaatcctcaggacgagaggaaagcgtggagaaggtgtgacagaggtggtttctgggccgatgatgactacagtcggtgccaatatgcaaatgacgttaccagggtattgtacatgttcaatcagatgccgttgaatctgaccaacgcggtcgcaactgctcggcagctactggcatacacagttgaggctgcaaacttctcagacaaaatggacgtaatatttgtggcagagatgatagagaaattcggcaggttcacaaaagaagaaaagtccaaagaactgggagacgtcatggtcgatattgcctctaacatcatgttggcagatgagcgggtgctgtggctcgcgcagagagaagccaaggcctgttcaagaattgtgcaatgcctgcagaggattgctacataccggctggcaggaggcgctcatgtctacagcacctacagcccaaacatcgccttggaagcttacgtgataaagtccacaggtttcactggcatgacctgcaccgtgtttcaaaaggtggccgcatctgatagaaccgggctttcagattacgggcgtagggaccctgaggggaacttagacaaacagctgtctttcaagtgtaacgtgagcaacaccttttcaagtctggcccttaaaaacactattgtggaagcaagcattcagctccctccatctctattctcgcctaagcagaaaagggagcttcgaccgactgatgattccctgtataaactgcagttgatagcctttcggaatgggaaattgttccctgctacaggaaactctacaaatcttgccgacgacggaaaacggaggacagtggtgactcctgtcattctaacaaagatcgacggtgttaatgttgatacccaccatattcccgtgaatgtaacgcttcgccgtatcgcgcacggcgctgacgccgtcgccgcaagatgggattttgaccttctcaacgggcagggtggttggaaaagcgatgggtgccatattctgtacagcgatgagaacatcaccaccattcagtgttacagcctcagtaattacgccgtccttatggacctgaccgggagcgagctgtatacccaggcagcctctctgctccaccctgtcgtatataccaccgctatcatcctattactgtgtttgctcgcggtgatcgtgtcatacatctatcatcactccctgatccgcatttcactgaagtcatggcacatgctcgttaatctgtgctttcacatcttcctcacatgtgttgtgttcgttgggggtattacgcaaacacgcaacgcatcaatctgccaggcggtgggaatcatactgcactacagcaccctggcaaccgtactttgggtgggagtgaccgctcgaaacatctacaagcaggttaccaagaaagcaaaacggtgccaggatcccgacgagccccctcccccaccacggcctatgctgcggttttacctgatcggcggaggcatccctattatcgtctgcggcattaccgctgcagcaaacatcaaaaattacgggtctagaccgaatgcgccttattgttggatggcatgggagccatctttgggggcattttacggtccagcttcgttcatcacatttgtgaattgcatgtactttcttagcatctttattcagcttaagagacatccggagcgtaagtatgagctgaaggagccaaccgaggaacagcagagactggcagctaatgagaatggcgagatcaaccatcaagattctatgtcgttatctttaatctcaacgtccgccctggagaatgagcacacttttcactctcagcttctgggagcctctctgaccctattgctgtacgtggccctgtggatgttcggggcactggccgtttccttgtattaccctctggacctggtgttctcttttgtgttcggggctacgtcccttagcttctccgctttcttcgtggtccaccattgcgtgaatagggaggatgttcggctggcgtggataatgacctgttgtccgggaagaagttcgtattctgtgcaggtgaatgtgcagccgccaaactccaacggtactaatggcgaggctccaaaatgcccaaattcaagcgccgagtctagctgtaccaacaagtcagcctcctctttcaaaaattcaagccagggctgcaaactgaccaatttgcaggccgctgccgctcagtgccatgccaattcactgccgcttaacagcactcctcagctggacaattcactgaccgaacacagcatggataacgatattaaaatgcatgttgcccctctcgaggtgcagttccgtactaatgtgcactcatcacgccatcataagaataggtcaaaaggacatcgcgcttctagactgacagtgctgcgtgaatacgcctacgacgttcctacatctgtggagggaagcgtgcaaaacggtctgcccaagagtcgcctgggtaataacgagggacatagtcgctcaagacgggcttatttagcgtacagagaacgccagtacaacccgccacaacaggattccagcgacgcttgttcaaccctgcctaagtcttctagaaactttgagaagccggtgtccacaaccagcaagaaggacgccttgcggaagcccgctgtcgttgaattggaaaaccaacagaaatcttatggccttaaccttgccattcagaatggccctatcaagtcaaatggacaggagggccctttattaggaaccgactctaccggtaacgttaggaccgggctctggaagcatgaaaccactgtttag

SEQ ID NO: 240983 - DNA, 1851 bp, Artificial Sequence
  derived and/or modified sequence
atggagccaccagggcgaaggagagggagggcgcaaccccctttgctcctccctctgagtctcttggctctgttagccttactgggcggagggggaggtggtggtgccgctgcactgcctgcgggttgtaagcacgatggcagacctaggggagccggacgtgctgctggggcagcagagggtaaagtagtatgttcctccctggagctcgcacaagtgctgccacccgatacactccctaacagaacggtgacgctgatcctcagtaataataagatttcagagctgaaaaacggaagcttcagcggactctccctgctggaacgcctggatctaagaaataatcttatctccagcatcgatcccggagctttttggggcctgtctagcttgaaaagattggacctgactaacaatagaattggctgcctgaatgctgacattttcaggggactgaccaatctcgtgaggctgaatctcagcggaaacctgtttagcagtttgtcccagggaaccttcgactacctggcctcattacgcagtcttgaattccagacggaatatctgctctgcgattgtaacattctctggatgcaccgatgggtgaaggaaaaaaatattactgtgagggatacccgctgtgtctatccaaagagtctccaggcgcaaccggtgaccggtgtaaaacaggagttactgacgtgtgaccctcctctcgagcttcccagcttctacatgacaccttcacatcgtcaggtggtgtttgagggcgattcactaccattccaatgcatggctagctacatcgatcaggacatgcaggttctatggtaccaagacgggaggatagtggagacggatgaatcacagggcatcttcgtcgagaagaatatgattcataactgcagcctgatcgcaagcgctctcacgatttccaatatccaggccggaagtaccggaaactggggttgtcacgtacagactaaaagggggaacaacacccggactgtggacattgtagtgctcgaatcaagcgcccagtattgccccccagaaagagtagttaacaacaagggcgacttccgctggccacggaccctggccggaattacagcctatctccagtgtactcggaacactcacggttcaggaatctatcccggaaatcctcaggacgagcgcaaagcttggagaagatgtgaccgcggagggttctgggccgacgacgattattctaggtgccaatatgcgaatgacgtgactagagtgctctatatgtttaatcagatgcctctgaatctcacgaacgcggtcgcaactgccaggcagttgttggcctacacggtcgaagccgcaaacttcagcgataaaatggacgtcatttttgtggcagagatgattgaaaaatttgggaggtttactaaagaggaaaagagcaaggaactgggagatgttatggtggacatagcctcaaatattatgctagccgacgagcgcgtactttggctggctcaacgtgaagccaaggcttgtagcaggattgttcaatgtttgcagagaattgctacctacaggctagcgggaggtgcacacgtgtattccacatattctcctaacattgccctggaggcgtacgtgatcaaaagtacaggatttactggaatgacctgcaccgtgtttcagaaagtggccgcatcagacaggacaggattatcagactacggccgacgggaccccgagggcaaccttgacaaacagttgagttttaaatgtaacgtgtcgaatacttttagctcactggccctcaaagtgtgttacatactgcagtccttcaagactatctatagctag

SEQ ID NO: 240984 - DNA, 3966 bp, Artificial Sequence
  derived and/or modified sequence
atggagccccccggcagaagaagaggcagagcccagccccccctgctgctgcccctgagcctgctggccctgctggccctgctgggcggcggcggcggcggcggcgccgccgccctgcccgccggctgcaagcacgacggcagacccagaggcgccggcagagccgccggcgccgccgagggcaaggtggtgtgcagcagcctggagctggcccaggtgctgccccccgacaccctgcccaacagaaccgtgaccctgatcctgagcaacaacaagatcagcgagctgaagaacggcagcttcagcggcctgagcctgctggagagactggacctgagaaacaacctgatcagcagcatcgaccccggcgccttctggggcctgagcagcctgaagagactggacctgaccaacaacagaatcggctgcctgaacgccgacatcttcagaggcctgaccaacctggtgagactgaacctgagcggcaacctgttcagcagcctgagccagggcaccttcgactacctggccagcctgagaagcctggagttccagaccgagtacctgctgtgcgactgcaacatcctgtggatgcacagatgggtgaaggagaagaacatcaccgtgagagacaccagatgcgtgtaccccaagagcctgcaggcccagcccgtgaccggcgtgaagcaggagctgctgacctgcgacccccccctggagctgcccagcttctacatgacccccagccacagacaggtggtgttcgagggcgacagcctgcccttccagtgcatggccagctacatcgaccaggacatgcaggtgctgtggtaccaggacggcagaatcgtggagaccgacgagagccagggcatcttcgtggagaagaacatgatccacaactgcagcctgatcgccagcgccctgaccatcagcaacatccaggccggcagcaccggcaactggggctgccacgtgcagaccaagagaggcaacaacaccagaaccgtggacatcgtggtgctggagagcagcgcccagtactgcccccccgagagagtggtgaacaacaagggcgacttcagatggcccagaaccctggccggcatcaccgcctacctgcagtgcaccagaaacacccacggcagcggcatctaccccggcaacccccaggacgagagaaaggcctggagaagatgcgacagaggcggcttctgggccgacgacgactacagcagatgccagtacgccaacgacgtgaccagagtgctgtacatgttcaaccagatgcccctgaacctgaccaacgccgtggccaccgccagacagctgctggcctacaccgtggaggccgccaacttcagcgacaagatggacgtgatcttcgtggccgagatgatcgagaagttcggcagattcaccaaggaggagaagagcaaggagctgggcgacgtgatggtggacatcgccagcaacatcatgctggccgacgagagagtgctgtggctggcccagagagaggccaaggcctgcagcagaatcgtgcagtgcctgcagagaatcgccacctacagactggccggcggcgcccacgtgtacagcacctacagccccaacatcgccctggaggcctacgtgatcaagagcaccggcttcaccggcatgacctgcaccgtgttccagaaggtggccgccagcgacagaaccggcctgagcgactacggcagaagagaccccgagggcaacctggacaagcagctgagcttcaagtgcaacgtgagcaacaccttcagcagcctggccctgaagaacaccatcgtggaggccagcatccagctgccccccagcctgttcagccccaagcagaagagagagctgagacccaccgacgacagcctgtacaagctgcagctgatcgccttcagaaacggcaagctgttccccgccaccggcaacagcaccaacctggccgacgacggcaagagaagaaccgtggtgacccccgtgatcctgaccaagatcgacggcgtgaacgtggacacccaccacatccccgtgaacgtgaccctgagaagaatcgcccacggcgccgacgccgtggccgccagatgggacttcgacctgctgaacggccagggcggctggaagagcgacggctgccacatcctgtacagcgacgagaacatcaccaccatccagtgctacagcctgagcaactacgccgtgctgatggacctgaccggcagcgagctgtacacccaggccgccagcctgctgcaccccgtggtgtacaccaccgccatcatcctgctgctgtgcctgctggccgtgatcgtgagctacatctaccaccacagcctgatcagaatcagcctgaagagctggcacatgctggtgaacctgtgcttccacatcttcctgacctgcgtggtgttcgtgggcggcatcacccagaccagaaacgccagcatctgccaggccgtgggcatcatcctgcactacagcaccctggccaccgtgctgtgggtgggcgtgaccgccagaaacatctacaagcaggtgaccaagaaggccaagagatgccaggaccccgacgagcccccccccccccccagacccatgctgagattctacctgatcggcggcggcatccccatcatcgtgtgcggcatcaccgccgccgccaacatcaagaactacggcagcagacccaacgccccctactgctggatggcctgggagcccagcctgggcgccttctacggccccgccagcttcatcaccttcgtgaactgcatgtacttcctgagcatcttcatccagctgaagagacaccccgagagaaagtacgagctgaaggagcccaccgaggagcagcagagactggccgccaacgagaacggcgagatcaaccaccaggacagcatgagcctgagcctgatcagcaccagcgccctggagaacgagcacaccttccacagccagctgctgggcgccagcctgaccctgctgctgtacgtggccctgtggatgttcggcgccctggccgtgagcctgtactaccccctggacctggtgttcagcttcgtgttcggcgccaccagcctgagcttcagcgccttcttcgtggtgcaccactgcgtgaacagagaggacgtgagactggcctggatcatgacctgctgccccggcagaagcagctacagcgtgcaggtgaacgtgcagccccccaacagcaacggcaccaacggcgaggcccccaagtgccccaacagcagcgccgagagcagctgcaccaacaagagcgccagcagcttcaagaacagcagccagggctgcaagctgaccaacctgcaggccgccgccgcccagtgccacgccaacagcctgcccctgaacagcaccccccagctggacaacagcctgaccgagcacagcatggacaacgacatcaagatgcacgtggcccccctggaggtgcagttcagaaccaacgtgcacagcagcagacaccacaagaacagaagcaagggccacagagccagcagactgaccgtgctgagagagtacgcctacgacgtgcccaccagcgtggagggcagcgtgcagaacggcctgcccaagagcagactgggcaacaacgagggccacagcagaagcagaagagcctacctggcctacagagagagacagtacaaccccccccagcaggacagcagcgacgcctgcagcaccctgcccaagagcagcagaaacttcgagaagcccgtgagcaccaccagcaagaaggacgccctgagaaagcccgccgtggtggagctggagaaccagcagaagagctacggcctgaacctggccatccagaacggccccatcaagagcaacggccaggagggccccctgctgggcaccgacagcaccggcaacgtgagaaccggcctgtggaagcacgagaccaccgtgtag

SEQ ID NO: 240985 - DNA, 1851 bp, Artificial Sequence
  derived and/or modified sequence
atggagccccccggcagaagaagaggcagagcccagccccccctgctgctgcccctgagcctgctggccctgctggccctgctgggcggcggcggcggcggcggcgccgccgccctgcccgccggctgcaagcacgacggcagacccagaggcgccggcagagccgccggcgccgccgagggcaaggtggtgtgcagcagcctggagctggcccaggtgctgccccccgacaccctgcccaacagaaccgtgaccctgatcctgagcaacaacaagatcagcgagctgaagaacggcagcttcagcggcctgagcctgctggagagactggacctgagaaacaacctgatcagcagcatcgaccccggcgccttctggggcctgagcagcctgaagagactggacctgaccaacaacagaatcggctgcctgaacgccgacatcttcagaggcctgaccaacctggtgagactgaacctgagcggcaacctgttcagcagcctgagccagggcaccttcgactacctggccagcctgagaagcctggagttccagaccgagtacctgctgtgcgactgcaacatcctgtggatgcacagatgggtgaaggagaagaacatcaccgtgagagacaccagatgcgtgtaccccaagagcctgcaggcccagcccgtgaccggcgtgaagcaggagctgctgacctgcgacccccccctggagctgcccagcttctacatgacccccagccacagacaggtggtgttcgagggcgacagcctgcccttccagtgcatggccagctacatcgaccaggacatgcaggtgctgtggtaccaggacggcagaatcgtggagaccgacgagagccagggcatcttcgtggagaagaacatgatccacaactgcagcctgatcgccagcgccctgaccatcagcaacatccaggccggcagcaccggcaactggggctgccacgtgcagaccaagagaggcaacaacaccagaaccgtggacatcgtggtgctggagagcagcgcccagtactgcccccccgagagagtggtgaacaacaagggcgacttcagatggcccagaaccctggccggcatcaccgcctacctgcagtgcaccagaaacacccacggcagcggcatctaccccggcaacccccaggacgagagaaaggcctggagaagatgcgacagaggcggcttctgggccgacgacgactacagcagatgccagtacgccaacgacgtgaccagagtgctgtacatgttcaaccagatgcccctgaacctgaccaacgccgtggccaccgccagacagctgctggcctacaccgtggaggccgccaacttcagcgacaagatggacgtgatcttcgtggccgagatgatcgagaagttcggcagattcaccaaggaggagaagagcaaggagctgggcgacgtgatggtggacatcgccagcaacatcatgctggccgacgagagagtgctgtggctggcccagagagaggccaaggcctgcagcagaatcgtgcagtgcctgcagagaatcgccacctacagactggccggcggcgcccacgtgtacagcacctacagccccaacatcgccctggaggcctacgtgatcaagagcaccggcttcaccggcatgacctgcaccgtgttccagaaggtggccgccagcgacagaaccggcctgagcgactacggcagaagagaccccgagggcaacctggacaagcagctgagcttcaagtgcaacgtgagcaacaccttcagcagcctggccctgaaggtgtgctacatcctgcagagcttcaagaccatctacagctag

SEQ ID NO: 240986 - protein, 765 aa, Artificial Sequence
  derived and/or modified sequence
MDPVATHSCHLLQQLHEQRIQGLLCDCMLVVKGVCFKAHKNVLAAFSQYFRSLFQNSSSQKNDVFHLDVKNVSGIGQILDFMYTSHLDLNQDNIQVMLDTAQCLQVQNVLSLCHTFLKSATVVQPPGMPCNSTLSLQSTLTPDATCVISENYPPHLLQECSADAQQNKTLDESHPHASPSVNRHHSAGEISKQAPDTSDGSCTELPFKQPNYYYKLRNFYSKQYHKHAAGPSQERVVEQPFAFSTSTDLTTVESQPCAVSHSECILESPEHLPSNFLAQPVNDSAPHPESDATCQQPVKQMRLKKAIHLKKLNFLKSQKYAEQVSEPKSDDGLTKRLESASKNTLEKASSQSAEEKESEEVVSCENFNCISETERPEDPAALEDQSQTLQSQRQYACELCGKPFKHPSNLELHKRSHTGEKPFECNICGKHFSQAGNLQTHLRRHSGEKPYICEICGKRFAASGDVQRHIIIHSGEKPHLCDICGRGFSNFSNLKEHKKTHTADKVFTCDECGKSFNMQRKLVKHRIRHTGERPYSCSACGKCFGGSGDLRRHVRTHTGEKPYTCEICNKCFTRSAVLRRHKKMHCKAGDESPDVLEELSQAIETSDLEKSQSSDSFSQDTSVTLMPVSVKLPVHPVENSVAEFDSHSGGSYCKLRSMIQPHGVSDQEKLSLDPGKLAKPQMQQTQPQAYAYSDVDTPAGGEPLQADGMAMIRSSLAALDNHGGDPLGSRASSTTYRNSEGQFFSSMTLWGLAMKTLQNENELDQ

SEQ ID NO: 240987 - protein, 248 aa, Artificial Sequence
  derived and/or modified sequence
MQRKLVKHRIRHTGERPYSCSACGKCFGGSGDLRRHVRTHTGEKPYTCEICNKCFTRSAVLRRHKKMHCKAGDESPDVLEELSQAIETSDLEKSQSSDSFSQDTSVTLMPVSVKLPVHPVENSVAEFDSHSGGSYCKLRSMIQPHGVSDQEKLSLDPGKLAKPQMQQTQPQAYAYSDVDTPAGGEPLQADGMAMIRSSLAALDNHGGDPLGSRASSTTYRNSEGQFFSSMTLWGLAMKTLQNENELDQ

SEQ ID NO: 240988 - DNA, 2960 bp, Artificial Sequence
  derived and/or modified sequence
agtggaagtgacgccaacggaagcaggaaggcggttccggcaagccaagggggcgttgtcgtgatgattccgcggccagcggatcgctgcgagtggccttgaaggcagctgctgcaggtgaagagtaggcggcggggcagagagcggcctccgagggtcacctgaatggttgagcatggaccctgttgctacccacagctgccatctgctccagcaactgcatgagcagcgaatccaaggcctgctttgtgactgtatgttggtggtaaaaggagtctgctttaaagcgcataagaatgtcctggcagcattcagccagtattttaggagcctctttcagaattcttcaagccagaagaatgatgtttttcacttggatgttaaaaatgtcagtggcatagggcagatcctggacttcatgtacacttctcatctagatcttaaccaggacaatatacaagtaatgctggacacagcacagtgtttgcaagttcaaaatgttctgagtctgtgtcacacatttttaaaatcagccactgtagtacagccacctggcatgccttgtaatagtacattgtctctacaaagcaccctgaccccagatgccacttgtgttatcagtgaaaactacccccctcatttactgcaggaatgttcagcagatgcacagcagaacaaaacgttggatgaatcgcatccgcatgcttcaccatcagttaatcgtcatcactccgcaggtgaaatctcaaaacaagctcctgatacttcagatggcagctgcacagaactgcctttcaaacagccaaattactattacaaactcagaaacttttacagtaagcagtaccataaacacgcagctggtcccagtcaggagagagttgttgagcagccttttgctttcagcacctctacagaccttaccacggtagagagccagccttgtgccgtcagtcattctgaatgcatcctggagtctcccgagcacttaccttccaacttcctggcccagcctgtgaatgactctgccccacaccctgagtcagacgccacatgccaacaacctgtcaagcagatgaggctcaaaaaggccattcatctgaagaagctcaatttcctgaagtcacagaaatacgcagagcaagtatctgaacccaagtcagatgatggtttgacaaagaggttggaatctgctagtaaaaataccctagagaaagctagcagccaaagtgctgaagaaaaagaaagtgaagaagtcgtcagttgtgagaattttaattgcattagtgagacggagaggcctgaagacccggctgccctggaagaccagtcccagacacttcagtcccagagacaatacgcgtgtgaattatgcgggaaaccttttaaacacccaagcaacttggagcttcacaaacggtctcatacaggtgagaaaccttttgaatgtaacatttgtgggaaacatttctctcaggcaggtaacttgcagactcacttacgacggcattctggtgaaaaaccatacatctgcgagatctgtggaaagaggtttgcagcctctggcgacgtccagcgtcacattattattcactcaggagaaaaaccacacttgtgtgacatctgtggtcgagggtttagtaacttcagtaatttgaaggagcacaaaaagacacacacggctgataaagtcttcacctgtgatgagtgtggaaagtcttttaatatgcaaaggaagttagtaaagcacagaattcggcacacgggggagcggccttacagctgctctgcctgcgggaaatgttttgggggatcaggtgacctccgcaggcatgtccgcactcacactggggagaagccgtacacatgtgagatctgtaacaagtgctttacccgctctgcggtgctccggcggcacaagaagatgcactgcaaagctggtgacgagagcccagatgtgctggaggagctcagccaagccatcgagacctccgacctcgagaaatctcagagctcagactctttctcccaagacacgtctgtgacgctgatgccagtgtcggttaaactccctgtccacccagtggaaaattctgtggcagaatttgatagccactctggcggctcctattgtaagttacggtccatgatccaacctcatggagttagtgaccaggagaagctgagtttggatcctggtaaacttgccaagccccagatgcagcagacacagcctcaggcctatgcttactcggatgtggacaccccagccggtggcgaaccactgcaggccgatggcatggccatgatccgttcctctctggctgctttggacaaccacggcggtgaccccctgggcagtcgagcatcttccaccacttataggaactcagagggtcagtttttctccagcatgactctctgggggctagcgatgaagacgctgcagaatgaaaacgagttagaccagtgatgtaccgcgcttctccacggtagaggcgtgttctcagtttagcaggctggtgttaaggctgtaggaggacccagtttccccatgacagtgccttctaactagccagagaataggtagcttccctcctgatgatggctcataatctgaagcatcttgagctgggggtgtgagggggagggcctgctggctcaccgtgaggcagccgcgggagggagcgctgacgtcacagaagcgaaggcttgatgctgtctcagcagcctcagctgtgggggggaagcgcgtgtgcatcgtgtcaactactgtacatgttggtcatgtgaaaggaattatatatgtatagtattacaagtatttttgcatttttacaagattgaaatttgtagcattttgtattatttacacagaatttatttgtatatgaaactcataccataatttaattcgaataaatgaaacttttctatatattaaaaaaaaaaaaaaaaaa

SEQ ID NO: 240989 - DNA, 2298 bp, Artificial Sequence
  derived and/or modified sequence
atggaccccgtggccacccacagctgccacctgctgcagcagctgcacgagcagagaatccagggcctgctgtgcgactgcatgctggtggtgaagggcgtgtgcttcaaggcccacaagaacgtgctggccgccttcagccagtacttcagaagcctgttccagaacagcagcagccagaagaacgacgtgttccacctggacgtgaagaacgtgagcggcatcggccagatcctggacttcatgtacaccagccacctggacctgaaccaggacaacatccaggtgatgctggacaccgcccagtgcctgcaggtgcagaacgtgctgagcctgtgccacaccttcctgaagagcgccaccgtggtgcagccccccggcatgccctgcaacagcaccctgagcctgcagagcaccctgacccccgacgccacctgcgtgatcagcgagaactaccccccccacctgctgcaggagtgcagcgccgacgcccagcagaacaagaccctggacgagagccacccccacgccagccccagcgtgaacagacaccacagcgccggcgagatcagcaagcaggcccccgacaccagcgacggcagctgcaccgagctgcccttcaagcagcccaactactactacaagctgagaaacttctacagcaagcagtaccacaagcacgccgccggccccagccaggagagagtggtggagcagcccttcgccttcagcaccagcaccgacctgaccaccgtggagagccagccctgcgccgtgagccacagcgagtgcatcctggagagccccgagcacctgcccagcaacttcctggcccagcccgtgaacgacagcgccccccaccccgagagcgacgccacctgccagcagcccgtgaagcagatgagactgaagaaggccatccacctgaagaagctgaacttcctgaagagccagaagtacgccgagcaggtgagcgagcccaagagcgacgacggcctgaccaagagactggagagcgccagcaagaacaccctggagaaggccagcagccagagcgccgaggagaaggagagcgaggaggtggtgagctgcgagaacttcaactgcatcagcgagaccgagagacccgaggaccccgccgccctggaggaccagagccagaccctgcagagccagagacagtacgcctgcgagctgtgcggcaagcccttcaagcaccccagcaacctggagctgcacaagagaagccacaccggcgagaagcccttcgagtgcaacatctgcggcaagcacttcagccaggccggcaacctgcagacccacctgagaagacacagcggcgagaagccctacatctgcgagatctgcggcaagagattcgccgccagcggcgacgtgcagagacacatcatcatccacagcggcgagaagccccacctgtgcgacatctgcggcagaggcttcagcaacttcagcaacctgaaggagcacaagaagacccacaccgccgacaaggtgttcacctgcgacgagtgcggcaagagcttcaacatgcagagaaagctggtgaagcacagaatcagacacaccggcgagagaccctacagctgcagcgcctgcggcaagtgcttcggcggcagcggcgacctgagaagacacgtgagaacccacaccggcgagaagccctacacctgcgagatctgcaacaagtgcttcaccagaagcgccgtgctgagaagacacaagaagatgcactgcaaggccggcgacgagagccccgacgtgctggaggagctgagccaggccatcgagaccagcgacctggagaagagccagagcagcgacagcttcagccaggacaccagcgtgaccctgatgcccgtgagcgtgaagctgcccgtgcaccccgtggagaacagcgtggccgagttcgacagccacagcggcggcagctactgcaagctgagaagcatgatccagccccacggcgtgagcgaccaggagaagctgagcctggaccccggcaagctggccaagccccagatgcagcagacccagccccaggcctacgcctacagcgacgtggacacccccgccggcggcgagcccctgcaggccgacggcatggccatgatcagaagcagcctggccgccctggacaaccacggcggcgaccccctgggcagcagagccagcagcaccacctacagaaacagcgagggccagttcttcagcagcatgaccctgtggggcctggccatgaagaccctgcagaacgagaacgagctggaccagtag

SEQ ID NO: 240990 - DNA, 747 bp, Artificial Sequence
  derived and/or modified sequence
atgcagagaaagctggtgaagcacagaatcagacacaccggcgagagaccctacagctgcagcgcctgcggcaagtgcttcggcggcagcggcgacctgagaagacacgtgagaacccacaccggcgagaagccctacacctgcgagatctgcaacaagtgcttcaccagaagcgccgtgctgagaagacacaagaagatgcactgcaaggccggcgacgagagccccgacgtgctggaggagctgagccaggccatcgagaccagcgacctggagaagagccagagcagcgacagcttcagccaggacaccagcgtgaccctgatgcccgtgagcgtgaagctgcccgtgcaccccgtggagaacagcgtggccgagttcgacagccacagcggcggcagctactgcaagctgagaagcatgatccagccccacggcgtgagcgaccaggagaagctgagcctggaccccggcaagctggccaagccccagatgcagcagacccagccccaggcctacgcctacagcgacgtggacacccccgccggcggcgagcccctgcaggccgacggcatggccatgatcagaagcagcctggccgccctggacaaccacggcggcgaccccctgggcagcagagccagcagcaccacctacagaaacagcgagggccagttcttcagcagcatgaccctgtggggcctggccatgaagaccctgcagaacgagaacgagctggaccagtag

SEQ ID NO: 240991 - DNA, 2298 bp, Artificial Sequence
  derived and/or modified sequence
atggatcctgtggctacccactcgtgccacttgctacagcagcttcatgaacaaaggatccagggacttctgtgcgactgtatgctcgtggtcaagggtgtgtgcttcaaggcacataaaaatgtattggctgcattttctcagtactttcggagtctcttccagaactcctcctctcaaaaaaacgacgtttttcatctggatgtgaagaatgtgagcgggattggccagatcctggattttatgtacactagccatctggatttaaatcaagacaacatccaggtgatgcttgatactgctcagtgcttgcaggtgcagaatgtgctgtcgctctgtcatactttcttgaagtctgcaacagtcgtgcagcccccggggatgccctgcaactctaccctcagtttgcagtctactctcacaccagatgcaacctgcgtaattagcgaaaattatcccccccatcttctgcaagaatgctctgcagatgctcaacagaataaaacattggatgaaagccaccctcacgcgagccccagcgtgaatcgccaccatagtgccggcgaaatcagtaagcaggcacctgacacatccgacgggagctgcacggaactcccgtttaagcagcctaactattactacaagcttcgcaatttctacagcaaacagtatcacaaacatgcagccggtccatcccaggaacgggttgtggaacagccattcgccttctccacgtcgactgacctaactacagtggaaagtcagccttgtgcagttagtcactcagagtgcattctggaatcgcccgaacatctccctagtaactttctggctcaaccggttaatgacagcgcacctcaccctgagtcagatgccacatgtcaacaacccgtcaagcagatgaggcttaagaaagcaattcacttaaagaagctgaattttctaaaaagtcagaaatatgctgaacaggtttccgagccaaagtctgacgatgggctgactaaaaggctcgagtccgcgagtaaaaataccctggagaaagcatcatcccagtccgcggaagagaaagagagtgaggaggttgtttcctgtgagaactttaactgtatctccgagactgagcgcccggaagatcctgctgcgctggaggaccagtctcaaacattgcagagtcagcgccagtatgcgtgcgagctatgcgggaagccgtttaaacatccctcaaatcttgaacttcacaaaagatcacacaccggagagaagccgtttgaatgcaacatttgcggcaagcattttagtcaggccggcaacctgcagacgcaccttaggcgacactccggcgagaaaccttatatctgtgagatctgcggcaagcgctttgccgcaagtggggacgtccagcgacacattatcatccatagtggcgagaaaccacatctgtgcgacatctgtggaagggggttcagcaatttctcgaatctgaaggagcacaagaagacccatacagcagacaaggtgttcacctgcgacgagtgcggcaaatcctttaatatgcagcggaagctggtaaaacatagaataaggcataccggggaacgtccgtattcatgttccgcatgtggcaagtgcttcggcggctcaggtgacctgcgtaggcatgtccggacacataccggcgaaaaaccttacacttgcgaaatctgcaataagtgttttaccaggagcgccgttcttcgccgacacaaaaagatgcactgcaaagccggcgacgagtcacccgacgtccttgaggaactgagccaagcaatagaaacctcagacttggagaagtcacagagttcagatagcttctcccaggatacatcggtgacactgatgcccgtgagtgtgaagctcccggtgcatcctgtggagaactcagtggccgagttcgattcacattccggcggatcatactgcaaactacgcagcatgatacagcctcacggggtgtccgatcaggagaaactgagcctggacccaggcaaactcgcgaagccccagatgcagcaaacacaaccccaagcctatgcttattcagatgtcgacaccccagccggtggtgaacccctccaggccgacgggatggcgatgatccgatcctcactggccgcactcgataaccatggcggtgatcctttgggctccagagcttcatcaaccacttacaggaactctgaaggccagtttttctcgagcatgactttgtggggactggctatgaagacgctgcaaaacgagaacgagttagatcagtag

SEQ ID NO: 240992 - DNA, 747 bp, Artificial Sequence
  derived and/or modified sequence
atgcaaagaaaactggtgaagcaccgcattcggcacactggggaaagaccctactcctgctcagcctgtggcaagtgcttcggtggctcaggggacctgcggagacacgttaggactcacacaggcgaaaaaccgtatacttgtgaaatctgcaacaaatgcttcacacgcagcgctgttctgcgccggcacaagaagatgcactgcaaagcaggcgatgaatccccggatgtgcttgaggagctgtcacaggccatcgagacatccgacctggagaagagtcagtccagtgactctttctcacaggatacttctgtaacactgatgccagtcagcgtgaagctcccggtccaccctgtagagaactccgtggccgaatttgactcccatagtggcggcagctactgcaaactgcgatctatgatacagccacacggcgtaagcgaccaggaaaaactcagccttgatcctggcaagctggcgaaacctcagatgcagcagacccagcctcaagcatacgcctacagcgacgttgacacaccagccggaggtgaaccgttgcaggctgacgggatggcaatgattaggtcaagcctggcggccctggataatcatggcggcgacccacttggcagccgcgcgtcatcaaccacatacagaaatagtgaggggcaatttttctctagcatgaccctctgggggctagcaatgaagaccctacaaaatgagaacgaattagatcaatag

SEQ ID NO: 240993 - DNA, 2298 bp, Artificial Sequence
  derived and/or modified sequence
atggaccctgtggccacccacagctgccacctgctgcagcagctgcacgagcagaggatccagggcctgctgtgtgactgcatgctggtggtgaagggcgtgtgcttcaaggcccacaagaatgtgctggccgccttcagccagtacttccgcagcctcttccagaacagcagcagccagaagaatgatgtgttccacctggatgtgaagaatgtgtctggaattggccagatcctggacttcatgtacaccagccacctggacctgaaccaggacaacatccaggtgatgctggacacagcccagtgcctgcaggtgcagaatgtgctgagcctgtgccacaccttcctgaagagcgccaccgtggtgcagcccccaggcatgccctgcaacagcaccctgagcctgcagagcaccctgaccccagatgccacctgtgtgatcagcgagaactacccaccccacctgctgcaggagtgcagcgcagatgcccagcagaacaagaccctggatgagagccacccccacgccagccccagcgtgaacagacaccacagcgctggggagatcagcaagcaggccccagacaccagtgatggcagctgcacagagctgcccttcaagcagcccaactactactacaagctgaggaacttctacagcaagcagtaccacaagcacgccgccggccccagccaggagcgggtggtggagcagccctttgccttcagcaccagcacagacctgaccaccgtggagagccagccctgtgctgtgagccacagcgagtgcatcctggagagccctgagcacctgcccagcaacttcctggcccagcctgtgaatgacagcgccccccaccctgagagtgatgccacctgccagcagcctgtgaagcagatgaggctgaagaaggccatccacctgaagaagctgaacttcctgaagagccagaagtatgcagagcaggtgtctgagcccaagagtgatgatggcctgaccaagaggctggagagcgccagcaagaacaccctggagaaggccagcagccagagcgctgaggagaaggagagcgaggaggtggtgtcctgtgagaacttcaactgcatcagcgagacagagaggccagaagatcctgctgccctggaggaccagagccagaccctgcagagccagaggcagtatgcctgtgagctgtgtgggaagcccttcaagcaccccagcaacctggagctgcacaagaggagccacactggagagaagccctttgagtgcaacatctgtgggaagcacttcagccaggccggcaacctgcagacccacctgcggcggcacagcggggagaagccctacatctgtgagatctgtgggaagagatttgctgccagcggagatgtgcagaggcacatcatcatccacagcggggagaagccccacctgtgtgacatctgtggccggggcttcagcaacttcagcaacctgaaggagcacaagaagacccacacagctgacaaggtgttcacctgtgatgaatgtgggaagagcttcaacatgcagaggaagctggtgaagcaccgcatccgccacactggagagcggccctacagctgcagcgcctgtgggaagtgcttcggcggcagcggggacctgcggagacatgtgaggacccacactggagagaagccctacacctgtgagatctgcaacaagtgcttcaccaggtctgctgtgctgcggcggcacaagaagatgcactgcaaggctggagatgagagcccagatgtgctggaggagctgagccaggccatcgagaccagtgacctggagaagagccagagcagtgacagcttcagccaggacacctctgtgaccctgatgcctgtgtctgtgaagctgcctgtgcaccctgtggagaacagcgtggccgagtttgacagccacagcggcggcagctactgcaagctgcgctccatgatccagccccacggcgtgtctgaccaggagaagctgagcctggaccccgggaagctggccaagccccagatgcagcagacccagccccaggcctatgcctacagtgatgtggacaccccagctggaggagagcccctgcaggctgatggcatggccatgatccgcagcagcctggccgccctggacaaccacggcggggaccccctgggcagccgggccagcagcaccacctacagaaattctgagggccagttcttcagctccatgaccctgtggggcctggccatgaagaccctgcagaatgaaaatgagctggaccagtag

SEQ ID NO: 240994 - DNA, 747 bp, Artificial Sequence
  derived and/or modified sequence
atgcagaggaagctggtgaagcaccgcatccgccacactggagagcggccctacagctgcagcgcctgtgggaaatgttttggaggcagcggggacctgcggcggcacgtgaggacccacactggagagaagccctacacctgtgagatctgcaacaagtgcttcaccaggtctgctgtgctgcggcggcacaagaagatgcactgcaaggctggagatgagagcccagatgtgctggaggagctgagccaggccatcgagaccagtgacctggagaagagccagagcagtgacagcttcagccaggacacctctgtgaccctgatgcctgtgtctgtgaagctgcctgtgcaccctgtggagaacagcgtggccgagtttgacagccacagcggcggcagctactgcaagctgcgctccatgatccagccccatggagtgtctgaccaggagaagctgagcctggaccccgggaagctggccaagccccagatgcagcagacccagccccaggcctatgcctacagtgatgtggacaccccagctggaggagagcccctgcaggctgatggcatggccatgatccgcagcagcctggccgccctggacaaccacggcggggaccccctgggcagccgggccagcagcaccacctacagaaacagcgagggccagttcttcagctccatgaccctgtggggcctggccatgaagaccctgcagaatgaaaatgagctggaccagtag

SEQ ID NO: 240995 - DNA, 2298 bp, Artificial Sequence
  derived and/or modified sequence
atggaccccgtggccacccacagctgccacctgctgcagcagctgcacgaacagcgaatccaggggctgctgtgcgattgtatgctcgtagtaaagggggtttgtttcaaggcacataagaacgtgctggccgcattctcccagtactttcgatctctgtttcagaactccagctctcagaaaaacgatgtttttcaccttgacgtgaagaacgtaagcggcataggccagatactggacttcatgtatacctcacatctggacctaaatcaggataacatccaggttatgctcgacacggcccaatgtctgcaggtccagaacgttttgagcctttgccacacttttttaaagtctgccactgtggttcagccacctggcatgccctgcaactctactctctctctgcaatccacactgacacccgacgcgacatgcgttattagtgaaaactaccccccccatctgctgcaggaatgctccgccgacgcacagcagaataagacccttgacgaaagccacccacatgcatcaccaagcgtgaatcggcatcattctgccggcgagatatccaagcaggctccggacacctctgacggctcctgcacggaactgccgtttaaacagccaaactattattataaactgagaaacttttattccaagcagtatcacaagcatgccgccggcccaagccaagagagagtcgtcgagcagcccttcgccttttcaacttccacggacctgaccaccgtggaaagccagccctgcgctgtgtcccacagcgagtgcattctcgagtcaccagagcatttgccgagcaattttctggcccagcccgtgaatgatagtgctccacacccagagagcgacgccacctgtcagcaaccagtgaagcagatgagactgaagaaggccatccatctgaaaaagctgaatttcttaaagagccagaaatatgccgagcaagtatcagagccaaagtcggacgacggcctaaccaaacggcttgaaagcgccagcaaaaataccctagaaaaggcctctagccaaagcgccgaggagaaggaatcagaggaggtggtttcatgcgagaacttcaattgcattagcgaaactgagcggcccgaggacccggccgctttggaggaccagtctcagaccctgcagtctcagcgccagtatgcctgtgaattatgcggtaaaccttttaagcatcccagtaacctggagcttcacaaacgatcacacacaggcgagaagccattcgagtgtaacatatgcggaaaacacttttctcaagctggaaatttgcaaactcatctgagacgacatagcggtgagaaaccttatatctgcgaaatttgcggcaaacgattcgcagcaagtggtgatgtgcaacggcatattattatccattctggagaaaaaccacacctctgcgacatatgcggccgggggtttagcaattttagtaacctgaaggagcacaagaagacgcatacagcagataaggtttttacgtgcgatgagtgtggcaaatcattcaatatgcaacgcaagctggtgaaacaccgcattaggcatactggagagcgtccctatagttgcagtgcatgcggaaagtgcttcggaggttccggggaccttcgaagacatgtacgaacgcatactggcgaaaaaccctacacatgtgagatttgcaacaagtgctttacgcgctctgcagtgcttaggcgacacaaaaagatgcactgcaaagccggcgacgagtcacccgacgtcctcgaggagcttagtcaggcaatagagacaagcgacctggagaaatcgcagtcatcagattcattttcccaggatacctctgtcacacttatgcccgtgtctgtcaagttgcccgtccatcccgtagagaatagtgtggcggagtttgacagccatagtggcgggtcttactgcaagctgagatccatgattcagccccatggggttagtgaccaggagaagctctcattggacccggggaagctggccaagcctcagatgcagcaaactcagccgcaggcatatgcctactcagacgtggacacgccagctggcggggaaccactgcaggccgatggcatggctatgatccggagcagcctggccgcgcttgacaaccatggtggtgacccgctcgggagtcgcgcctcatccacaacttaccgcaactcagaaggacagttcttctccagcatgaccctgtgggggctagctatgaagactctgcaaaacgaaaacgagctcgaccaatag

SEQ ID NO: 240996 - DNA, 747 bp, Artificial Sequence
  derived and/or modified sequence
atgcagcggaagctggtgaagcaccggatccggcacaccggcgagcggccttatagttgttccgcctgtggcaagtgcttcggaggtagcggcgatttgcggaggcacgtcaggactcacaccggagaaaagccatatacctgtgaaatttgtaacaaatgtttcactagatctgccgtgctgagacggcataagaagatgcactgtaaggctggggatgagtcaccagatgttctggaggagctgagtcaggctatcgagacttccgacctggaaaaaagccagagcagtgacagcttctcccaagatactagcgtgaccctcatgcctgtgtctgttaaactacctgtccatcccgtggagaattccgtcgccgaatttgactcccacagtgggggttcctactgtaaactcagatcaatgattcagccccacggtgtgagcgaccaggagaagttaagcttagatcccgggaagctcgccaaaccccaaatgcagcagacccagcctcaagcctacgcctactctgatgtggacacacctgcagggggcgagcccctccaggctgatggcatggcgatgatccgcagcagcctggccgcgctggataaccatggcggagaccctcttggctcccgggcgagctcaaccacttatagaaacagcgagggacaattcttctcctctatgacgctgtgggggctggcgatgaaaaccctgcagaatgagaacgaactggaccaatag

SEQ ID NO: 240997 - DNA, 2298 bp, Artificial Sequence
  derived and/or modified sequence
atggacccggttgccacccactcttgccatctattacaacagctgcacgagcagcgcattcagggcctgttgtgcgactgcatgctcgttgtgaaaggagtctgtttcaaagcgcataagaacgttttagctgctttctcccagtattttcggtctcttttccagaattcttcgtcccaaaaaaacgatgtgttccatctcgacgtgaagaatgtgagcgggatcgggcagatcctagactttatgtacacctcccatctggacctgaaccaagataacatccaggttatgctcgacaccgcccaatgtctccaggtccagaatgtcttgagcctttgtcataccttcctgaagtccgccaccgttgttcagcccccaggtatgccttgtaacagtacactgtctttgcaatcaaccctgaccccagatgctacatgtgtgatatctgaaaattacccccctcatttactgcaggagtgttccgcagatgcacagcagaacaagactctggacgaaagccaccctcacgcctctccttccgtcaaccgccaccattccgccggagagatctcaaagcaggccccagacacttctgatgggagttgcaccgagctgcctttcaagcagccgaattattattacaagctccgtaatttttacagcaaacagtaccacaagcatgcagcgggtccctctcaggagcgggtagtcgagcagccgtttgccttctcaacatctacagatctcacaacagtggaaagtcagccctgcgctgtatcccactccgaatgcatcctggaaagccccgagcacttgcctagcaatttcctggctcaacccgttaatgactcagccccacatccagaatcagatgctacatgccagcaaccggtgaagcaaatgaggctgaaaaaggctatccacctcaagaaacttaattttcttaaatcccagaagtatgctgaacaggtatccgaacctaaatccgatgatggccttaccaagcgactggagtcagccagcaagaataccctcgagaaagcttcatcacagagcgccgaggaaaaggaatctgaagaagtcgtctcttgtgagaacttcaattgtatcagcgagaccgagcgccctgaggaccctgccgcactggaggaccagagccagacgttgcagtcacaacgacagtacgcttgtgagctgtgcgggaagccattcaagcatcctagcaatctggaactccacaagcgctcccacaccggagagaagccgttcgaatgtaatatttgtggcaaacacttttcccaggcaggaaatttgcagacacacctccggagacatagcggagagaagccctacatatgtgagatatgcggaaaaaggttcgctgctagcggggatgtgcagagacatatcatcattcatagcggggagaagcctcacctctgcgacatttgtggacgaggattttctaatttcagcaatctcaaagaacataagaagacacacaccgcagacaaggtgttcacctgtgatgaatgcggaaagtcctttaacatgcagaggaagctggttaaacatagaattcgccataccggtgagcgtccatattcttgctctgcttgcgggaaatgtttcggtggttcaggtgacctgcgtcggcacgtgcgtacccacacaggtgagaaaccctacacttgtgagatatgtaataagtgttttacacgaagcgccgtgctaaggagacataagaagatgcactgcaaggcaggcgatgagagtccggacgtgctagaagagttatctcaagcgatagagacatccgacttggaaaaaagccagagcagtgactctttcagtcaggacacatccgtcacactgatgcctgtgtcagtcaaattacccgtacaccccgtggaaaactccgtggccgagttcgacagtcactcaggcggttcctattgcaaactacgatccatgatccagccacatggagtcagcgaccaggaaaaacttagcctggacccagggaagctggccaagccacagatgcaacagacacagcctcaggcttacgcctactctgatgtggacacacccgcaggtggggagccactccaggcagacggaatggccatgattaggtccagcctggccgcattggacaatcacggaggggaccctctgggaagccgtgcttcctccacgacctataggaatagtgagggacaattcttctcttccatgacgctgtggggcctcgcaatgaaaactctgcagaacgagaacgagctcgatcagtag

SEQ ID NO: 240998 - DNA, 747 bp, Artificial Sequence
  derived and/or modified sequence
atgcagcggaaactagttaagcacaggattaggcacaccggcgagaggccctactcgtgttcagcttgcggcaagtgttttggcggtagcggggacctgcggcgtcacgtgagaacccacacaggggaaaaaccctatacctgcgagatctgcaacaagtgcttcacacgctcagctgtgctgcgtcggcacaaaaaaatgcactgcaaagcaggcgatgaaagccctgatgtcctggaggagttatcacaagcaatagagacctctgacctggagaaatcccagagctctgactcgtttagtcaggacactagtgtcaccctgatgcccgtgagcgtcaaattacctgttcaccccgtggagaattccgtggcagagtttgattctcactcaggagggtcgtattgcaaactccgttcgatgattcagccacatggcgtgagtgatcaggaaaagctttctctcgacccgggaaagctcgctaaaccacagatgcagcaaacccagcctcaggcgtacgcctattcagatgtggacacaccagctggcggagagccactgcaagccgacggcatggctatgatccggtcttccctggcagctttagataatcacgggggagatccactcgggagtagagcctcctcaaccacgtaccgcaatagtgaggggcagttcttcagttcaatgaccctgtggggtcttgcaatgaaaacactccagaatgagaacgagcttgatcagtag

SEQ ID NO: 240999 - DNA, 2889 bp, Artificial Sequence
  derived and/or modified sequence
gttgtcgtgatgattccgcggccagcggatcgctgcgagtggccttgaaggcagctgctgcaggtgaagagtaggcggcggggcagagagcggcctccgagggtcacctgaatggttgagcatggaccctgttgctacccacagctgccatctgctccagcaactgcatgagcagcgaatccaaggcctgctttgtgactgtatgttggtggtaaaaggagtctgctttaaagcgcataagaatgtcctggcagcattcagccagtattttaggagcctctttcagaattcttcaagccagaagaatgatgtttttcacttggatgttaaaaatgtcagtggcatagggcagatcctggacttcatgtacacttctcatctagatcttaaccaggacaatatacaagtaatgctggacacagcacagtgtttgcaagttcaaaatgttctgagtctgtgtcacacatttttaaaatcagccactgtagtacagccacctggcatgccttgtaatagtacattgtctctacaaagcaccctgaccccagatgccacttgtgttatcagtgaaaactacccccctcatttactgcaggaatgttcagcagatgcacagcagaacaaaacgttggatgaatcgcatccgcatgcttcaccatcagttaatcgtcatcactccgcaggtgaaatctcaaaacaagctcctgatacttcagatggcagctgcacagaactgcctttcaaacagccaaattactattacaaactcagaaacttttacagtaagcagtaccataaacacgcagctggtcccagtcaggagagagttgttgagcagccttttgctttcagcacctctacagaccttaccacggtagagagccagccttgtgccgtcagtcattctgaatgcatcctggagtctcccgagcacttaccttccaacttcctggcccagcctgtgaatgactctgccccacaccctgagtcagacgccacatgccaacaacctgtcaagcagatgaggctcaaaaaggccattcatctgaagaagctcaatttcctgaagtcacagaaatacgcagagcaagtatctgaacccaagtcagatgatggtttgacaaagaggttggaatctgctagtaaaaataccctagagaaagctagcagccaaagtgctgaagaaaaagaaagtgaagaagtcgtcagttgtgagaattttaattgcattagtgagacggagaggcctgaagacccggctgccctggaagaccagtcccagacacttcagtcccagagacaatacgcgtgtgaattatgcgggaaaccttttaaacacccaagcaacttggagcttcacaaacggtctcatacaggtgagaaaccttttgaatgtaacatttgtgggaaacatttctctcaggcaggtaacttgcagactcacttacgacggcattctggtgaaaaaccatacatctgcgagatctgtggaaagaggtttgcagcctctggcgacgtccagcgtcacattattattcactcaggagaaaaaccacacttgtgtgacatctgtggtcgagggtttagtaacttcagtaatttgaaggagcacaaaaagacacacacggctgataaagtcttcacctgtgatgagtgtggaaagtcttttaatatgcaaaggaagttagtaaagcacagaattcggcacacgggggagcggccttacagctgctctgcctgcgggaaatgttttgggggatcaggtgacctccgcaggcatgtccgcactcacactggggagaagccgtacacatgtgagatctgtaacaagtgctttacccgctctgcggtgctccggcggcacaagaagatgcactgcaaagctggtgacgagagcccagatgtgctggaggagctcagccaagccatcgagacctccgacctcgagaaatctcagagctcagactctttctcccaagacacgtctgtgacgctgatgccagtgtcggttaaactccctgtccacccagtggaaaattctgtggcagaatttgatagccactctggcggctcctattgtaagttacggtccatgatccaacctcatggagttagtgaccaggagaagctgagtttggatcctggtaaacttgccaagccccagatgcagcagacacagcctcaggcctatgcttactcggatgtggacaccccagccggtggcgaaccactgcaggccgatggcatggccatgatccgttcctctctggctgctttggacaaccacggcggtgaccccctgggcagtcgagcatcttccaccacttataggaactcagagggtcagtttttctccagcatgactctctgggggctagcgatgaagacgctgcagaatgaaaacgagttagaccagtgatgtaccgcgcttctccacggtagaggcgtgttctcagtttagcaggctggtgttaaggctgtaggaggacccagtttccccatgacagtgccttctaactagccagagaataggtagcttccctcctgatgatggctcataatctgaagcatcttgagctgggggtgtgagggggagggcctgctggctcaccgtgaggcagccgcgggagggagcgctgacgtcacagaagcgaaggcttgatgctgtctcagcagcctcagctgtgggggggaagcgcgtgtgcatcgtgtcaactactgtacatgttggtcatgtgaaaggaattatatatgtatagtattacaagtatttttgcatttttacaagattgaaatttgtagcattttgtattatttacacagaatttatttgtatatgaaactcataccataatttaattcgaataaatgaaacttttctatatatta

SEQ ID NO: 241000 - protein, 461 aa, Artificial Sequence
  derived and/or modified sequence
MDSVAFEDVAVNFTLEEWALLDPSQKNLYRDVMRETFRNLASVGKQWEDQNIEDPFKIPRRNISHIPERLCESKEGGQGEETFSQIPDGILNKKTPGVKPCESSVCGEVGMGPSSLNRHIRDHTGREPNEYQEYGKKSYTRNQCGRALSYHRSFPVRERTHPGGKPYDCKECGETFISLVSIRRHMLTHRGGVPYKCKVCGKAFDYPSLFRIHERSHTGEKPYECKQCGKAFSCSSYIRIHERTHTGDKPYECKQCGKAFSCSKYIRIHERTHTGEKPYECKQCGKAFRCASSVRSHERTHTGEKLFECKECGKALTCLASVRRHMIKHTGNGPYKCKVCGKAFDFPSSFRIHERTHTGEKPYDCKQCGKAFSCSSSFRKHERIHTGEKPYKCTKCGKAFSRSSYFRIHERTHTGEKPYECKQCGKAFSRSTYFRVHEKIHTGEKPYENPNPNASVVPVLS

SEQ ID NO: 241001 - DNA, 1386 bp, Artificial Sequence
  derived and/or modified sequence
atggacagcgtggccttcgaggacgtggccgtgaacttcaccctggaggagtgggccctgctggaccccagccagaagaacctgtacagagacgtgatgagagagaccttcagaaacctggccagcgtgggcaagcagtgggaggaccagaacatcgaggaccccttcaagatccccagaagaaacatcagccacatccccgagagactgtgcgagagcaaggagggcggccagggcgaggagaccttcagccagatccccgacggcatcctgaacaagaagacccccggcgtgaagccctgcgagagcagcgtgtgcggcgaggtgggcatgggccccagcagcctgaacagacacatcagagaccacaccggcagagagcccaacgagtaccaggagtacggcaagaagagctacaccagaaaccagtgcggcagagccctgagctaccacagaagcttccccgtgagagagagaacccaccccggcggcaagccctacgactgcaaggagtgcggcgagaccttcatcagcctggtgagcatcagaagacacatgctgacccacagaggcggcgtgccctacaagtgcaaggtgtgcggcaaggccttcgactaccccagcctgttcagaatccacgagagaagccacaccggcgagaagccctacgagtgcaagcagtgcggcaaggccttcagctgcagcagctacatcagaatccacgagagaacccacaccggcgacaagccctacgagtgcaagcagtgcggcaaggccttcagctgcagcaagtacatcagaatccacgagagaacccacaccggcgagaagccctacgagtgcaagcagtgcggcaaggccttcagatgcgccagcagcgtgagaagccacgagagaacccacaccggcgagaagctgttcgagtgcaaggagtgcggcaaggccctgacctgcctggccagcgtgagaagacacatgatcaagcacaccggcaacggcccctacaagtgcaaggtgtgcggcaaggccttcgacttccccagcagcttcagaatccacgagagaacccacaccggcgagaagccctacgactgcaagcagtgcggcaaggccttcagctgcagcagcagcttcagaaagcacgagagaatccacaccggcgagaagccctacaagtgcaccaagtgcggcaaggccttcagcagaagcagctacttcagaatccacgagagaacccacaccggcgagaagccctacgagtgcaagcagtgcggcaaggccttcagcagaagcacctacttcagagtgcacgagaagatccacaccggcgagaagccctacgagaaccccaaccccaacgccagcgtggtgcccgtgctgagctag

SEQ ID NO: 241002 - DNA, 1386 bp, Artificial Sequence
  derived and/or modified sequence
atggattccgtggcttttgaggacgtggcagtgaatttcacactggaagaatgggccttactggaccccagccagaaaaacctgtatcgtgacgttatgagagagaccttcagaaacttagccagtgttggtaagcagtgggaagaccagaatattgaggaccctttcaagattccaagaagaaacatctcccacattcctgaaagattatgcgagtcaaaagagggcggtcagggcgaagagacctttagtcagatccccgatggaattctgaataaaaaaaccccaggtgtcaaaccctgcgaatcttccgtgtgcggggaggtgggaatggggccatcatctctaaaccgccacatccgcgaccacacaggacgagagccaaatgagtaccaagagtacggcaagaagtcatatacaaggaaccagtgcggacgtgcattgtcctatcaccgatctttccccgtgcgcgagaggacccaccccggaggcaaaccttatgactgtaaagagtgcggagaaacctttatttccctggtttccatccgccgccatatgttaacacacagaggtggggtcccgtataagtgtaaggtttgcggcaaggcgttcgattatccaagtttgtttcggatccatgaaagatcccacaccggggagaaaccgtacgagtgcaagcaatgtggtaaggcgttctcctgcagctcttacatacggatccacgaacggacccacactggtgataagccttacgaatgtaagcaatgcgggaaagcattttcatgcagcaaatatattaggatccacgagcggactcacactggcgagaagccctatgagtgtaagcaatgcggcaaagccttccgatgtgcaagcagtgtgcgctctcacgagcgtacacatacaggggagaaactatttgagtgcaaagagtgcgggaaggcccttacctgtttggcaagtgtgagaagacacatgatcaagcataccggtaacgggccatacaaatgcaaggtctgcggcaaagccttcgactttccgtccagctttcggattcacgagcgcactcacactggcgagaagccctacgattgcaagcaatgtggaaaggcattctcttgctcttcgagttttcgcaaacatgaacgcatccatacaggtgaaaagccctacaagtgcaccaagtgtggcaaagccttttcccgatcgagttattttaggatacatgagcgaacccatacaggggagaagccgtatgagtgcaagcagtgcggcaaggctttctcacgtagtacatactttcgagtgcatgaaaagattcacaccggtgaaaagccctatgagaaccccaaccccaacgcatccgtagtccctgttctgtcatag

SEQ ID NO: 241003 - DNA, 1386 bp, Artificial Sequence
  derived and/or modified sequence
atggattctgtggcctttgaagatgtggccgtgaacttcaccctggaggagtgggccctgctggaccccagccagaagaacctgtacagagatgtgatgagggagaccttcaggaacctggcctctgtgggcaagcagtgggaggaccagaacatcgaggaccccttcaagatccccaggaggaacatcagccacatccctgagcggctgtgtgagagcaaggagggcggccagggcgaggagaccttcagccagatcccagatggcatcctgaacaagaagaccccaggagtgaagccctgtgagagctctgtgtgtggggaggtgggcatgggccccagcagcctgaacagacacatccgggaccacacaggccgggagcccaatgagtaccaggagtatggcaagaagagctacaccaggaaccagtgtggccgggccctgagctaccaccgctccttccctgtgcgggagaggacccaccctgggggcaagccctatgactgcaaggaatgtggggagaccttcatcagcctggtgtccatcagaagacacatgctgacccacagaggaggagtgccctacaagtgcaaggtgtgtgggaaggcctttgactaccccagcctcttccgcatccacgagaggagccacactggagagaagccctatgagtgcaagcagtgtgggaaggccttcagctgcagcagctacatccgcatccacgagaggacccacactggagacaagccctatgagtgcaagcagtgtgggaaggccttcagctgcagcaagtacatccgcatccacgagaggacccacactggagagaagccctatgagtgcaagcagtgtgggaaggccttccgctgtgccagctctgtgcgcagccatgagaggacccacactggagagaagctgtttgagtgcaaggaatgtgggaaggccctgacctgcctggcctctgtgagaagacacatgatcaagcacactggaaatggcccctacaagtgcaaggtgtgtgggaaggcctttgacttccccagcagcttccgcatccacgagaggacccacactggagagaagccctatgactgcaagcagtgtgggaaggccttcagctgcagcagcagcttcaggaagcatgagcgcatccacactggagagaagccctacaagtgcaccaagtgtgggaaggccttcagccgcagcagctacttccgcatccacgagaggacccacactggagagaagccctatgagtgcaagcagtgtgggaaggccttcagccgcagcacctacttccgggtgcatgagaagatccacactggagagaagccctatgagaaccccaaccccaatgcctctgtggtgcctgtgctgtcctag

SEQ ID NO: 241004 - DNA, 1386 bp, Artificial Sequence
  derived and/or modified sequence
atggacagcgtggccttcgaggacgtggccgtgaacttcaccctggaagagtgggcgctgttagatcccagtcagaagaatttatatcgggatgttatgcgcgagactttccgtaacctggcctcagtcggaaaacaatgggaggaccagaatattgaggaccccttcaaaataccacggcgtaacatctcgcacatcccagagcgtctttgtgaaagcaaggagggcggccagggagaggaaacgttctcacagatccctgacggaatcctgaataaaaaaacgcccggtgtgaagccttgtgagtcctccgtgtgcggcgaagtaggcatgggacctagttccctgaaccgtcatatacgggaccacactgggcgggaacctaacgagtaccaggagtacgggaaaaagagttatacacgtaaccagtgcggacgggctctgagctatcatcgcagcttcccagtacgagagcgcacccacccggggggaaaaccgtatgattgcaaagaatgcggagagacattcatttccctggtgtccatcaggcgacacatgctcactcaccggggcggtgtgccctacaaatgcaaggtctgtggcaaagccttcgactacccgagtctcttcagaatccacgagagatcccacaccggggagaagccatatgaatgtaaacagtgcggaaaagctttttcatgctcaagctacattcgcatccacgaaaggactcacacaggtgacaagccgtatgagtgtaagcagtgcggcaaggcgttttcgtgcagtaagtatatcagaatacatgagagaactcacactggagagaagccctacgagtgcaagcaatgtggaaaagcgtttaggtgcgcgtcgagcgtaagatcccacgagcgaacacacaccggcgagaaattgttcgagtgcaaagagtgcggaaaggccctgacttgcctggctagtgtgaggcgccatatgatcaagcataccggcaacggaccctacaaatgtaaagtgtgtggcaaagccttcgatttccctagctctttccgtattcatgagcgaacacataccggagaaaagccatatgactgtaagcaatgtggcaaggctttctcttgttcttcgtctttccgcaaacacgagcggattcatactggcgagaaaccctacaagtgcactaagtgtggaaaggcattttcccgctcttcttacttccgtatccacgagcggacacatacgggggagaaaccctacgagtgcaagcagtgtggcaaggcgttcagcagatctacctacttccgggtgcacgagaagattcacactggagaaaaaccctatgaaaatcccaatccaaatgcctcagtggtgccggtgctttcgtag

SEQ ID NO: 241005 - DNA, 1386 bp, Artificial Sequence
  derived and/or modified sequence
atggacagcgtggcatttgaagacgtcgccgtgaactttactctggaggagtgggccctccttgaccccagtcagaaaaacctctacagggacgttatgagagaaactttccggaatctggcgagcgtggggaagcaatgggaggaccagaacatcgaagaccctttcaagatcccccgaagaaatatttcccatatccctgaaaggttgtgtgagtccaaggaaggtggccagggagaggagacattctcccagatccctgatggaatcttgaataaaaagacccccggagtgaagccgtgtgaaagctccgtctgcggggaggtgggcatggggcctagtagtctgaatcgacatatccgcgaccacaccggcagggagcccaatgagtaccaggagtatggcaagaagagctacaccagaaatcaatgtggcagggccctgagctatcacaggagcttccctgtacgcgagagaacccatcctgggggaaagccgtacgactgtaaggagtgcggagaaacatttatcagtctcgtgtctatcagaaggcatatgctgactcacaggggcggtgttccctacaagtgtaaggtgtgtgggaaggcctttgattatccctcattattcagaatacacgagcggtcacacacaggtgaaaagccctatgaatgtaagcagtgtgggaaggcatttagctgtagctcttacatccggattcacgagagaacacacacaggagataagccttacgagtgcaagcagtgtggaaaagctttcagctgttctaaatacattcgcattcacgaacgcacacatacaggcgagaagccatatgaatgcaagcaatgtgggaaggctttccggtgcgcttcctcggtgcggtctcacgaacggacccatacaggggagaaactgttcgaatgcaaggagtgtggaaaagcactgacctgtctggcatccgtaagacgacacatgattaaacatacaggtaacggcccttacaagtgcaaggtgtgcgggaaagcctttgatttcccgtcaagctttaggattcatgaacgcacccacaccggggaaaagccctacgattgcaagcagtgcggaaaggcgttttcttgcagctctagctttaggaaacatgagaggattcacactggagagaagccctataagtgtacgaagtgtgggaaagctttttccaggtcatcatactttcgcattcacgaacggacacacacgggggaaaaaccctatgagtgtaagcagtgtgggaaagcattctctcgaagcacctatttccgcgtacatgaaaagatccacactggcgagaagccatatgaaaatcccaatccgaacgcgtcggtcgtaccagtcctgtcatag

SEQ ID NO: 241006 - DNA, 2864 bp, Artificial Sequence
  derived and/or modified sequence
aactgtccattcagatgggcccgggagaggagggcagggcctgcgcctccctacggagcctttgtttctggcgaccgtccccacccgggctcgcgtctccgtttctccgagaggcccaaggtgtctccgccgcagcctctgtcgcgccgtgacctgtacaggtcgcgggagtcgtagggaggacgccgggacacctggaagccgagaaatggattcagtggcctttgaggatgtggctgtgaacttcaccctggaggagtgggctttgctggatccttcccagaagaatctctacagggatgtgatgcgggaaaccttcaggaacctggcttctgtaggaaaacaatgggaagaccagaacattgaagacccattcaaaattcccaggagaaatataagtcatattccagagagactctgtgaaagtaaagaaggtggtcaaggtgaagaaaccttcagccagattccagatggtattctgaacaagaaaactcctggagtaaaaccgtgtgaaagcagtgtgtgtggagaagttggcatgggtccttcatcacttaataggcacatcagagatcacactggacgtgaaccaaatgaatatcaggaatatggaaagaagtcatatacacgtaaccagtgtggacgagccttgagttatcatcgctcttttccagtacgtgaaaggactcatcctggaggaaagccctatgattgtaaggaatgtggagaaacctttatttctcttgtaagcattcgaagacacatgttaacgcataggggaggtgtaccttacaaatgtaaggtgtgtgggaaagcctttgattatcccagtttatttcgtatacatgaaagaagtcacactggagagaaaccttatgaatgcaagcaatgtgggaaagccttcagttgttccagttacattagaatacatgaaaggactcacactggagataaaccctatgaatgcaagcagtgtgggaaagctttcagttgttccaagtacattcgaatccatgaacgaactcacacaggagagaaaccctacgaatgtaaacagtgcggtaaagcctttaggtgcgccagttctgttcgaagtcacgagaggactcacaccggagagaaactttttgaatgtaaggaatgcgggaaggctttgacttgtcttgcaagtgttagaagacacatgataaagcacactggcaatggaccttataaatgtaaggtgtgtgggaaagcctttgatttccccagttcatttcgaatccatgaaaggacccacactggagagaaaccctatgattgtaagcaatgtgggaaagccttcagttgttccagttcgtttcgaaaacatgaaagaattcacactggagagaaaccctataaatgtacaaaatgtgggaaagccttcagtcgttccagttacttccgaatccatgaaagaactcacactggagagaaaccctatgaatgtaagcaatgtgggaaagccttcagtcgatccacttactttcgagtacatgaaaaaattcatactggagagaaaccctatgagaaccctaaccctaacgcttcagttgtcccagttctttcatgagcatgaaaggagtcacatagagaaaccccatgaaagtaagaaatttgggaaagccttcagtcctttctgtttctttcaactacgtgaaaggattcacagtggagaaagaccctgtaagataattggctttaaattacgagagacttgtgataggacagtaaaacctagagttggagttggatctctggattgtgttatgtcagtgttggtaggttaggaactagatttcccagaatccattccatttgtgattccatgatacaattcaccagtaacctatcttacatgagattcggaagtaagttaagaaggcattagtcatggtttggaagcaccatacagggagacagctgtgtgaatacaggctgtatggacacttgcttccatcccattttcctgcttctttgggttgccaatcaagagtatcctcaaaacgacttgactttaattttctcggaggtgataggcttccacacaggtctccagaagccctgcattgaatatccatccacactttggttttccttcagacattattatgtctgtactaggcaactaattcagactgtcctggttgggaatattctgtgatgctctgactcccctagtctgtagacggaattggcatacggtctaatttgtgtagtaagcacctttgttcatactagtagtgactgtattcttgattcagcctgatagctaccatgctgctgtcaaaaccaaccagaggggagcttgttcttctgctgtagtgtgcagtgactggcctcacccaggactttgatgtgagaatgagcactttcctctatcaggaaatttcaagtgtttcctgttattcgtagctcaatgtaatgcctcagttcattttcagttgtttgattatatgtgactaatatgtattttttattcaaacaagacttctgtacatgtttcttcaaaacagtttattaactgtcttcagtcttggattacatcaagtttataattttggcaaattgttaagacactgtgaagtcagcgttaaccatgtgcatacaacttaaggaattttttcctcctcatgtaaattttacttttcatgcttatatagtttcaacttttatcttcatagtaatttctcatctactcataataccaaaagttaagtcatgctgttttgtgtgctctcttgctaaagaccgcagagaccatacctgttgtcaaagagggtgtaataaactgtaataataatcatgaccacaaaccataaaggactgtgtgatgtatcagt

SEQ ID NO: 241007 - protein, 388 aa, Artificial Sequence
  derived and/or modified sequence
MGRARRFQWPLLLLWAAAAGPGAGQEVQTENVTVAEGGVAEITCRLHQYDGSIVVIQNPARQTLFFNGTRALKDERFQLEEFSPRRVRIRLSDARLEDEGGYFCQLYTEDTHHQIATLTVLVAPENPVVEVREQAVEGGEVELSCLVPRSRPAATLRWYRDRKELKGVSSSQENGKVWSVASTVRFRVDRKDDGGIIICEAQNQALPSGHSKQTQYVLDVQYSPTARIHASQAVVREGDTLVLTCAVTGNPRPNQIRWNRGNESLPERAEAVGETLTLPGLVSADNGTYTCEASNKHGHARALYVLVVYDPGAVVEAQTSVPYAIVGGILALLVFLIICVLVGMVWCSVRQKGSYLTHEASGLDEQGEAREAFLNGSDGHKRKEEFFI

SEQ ID NO: 241008 - DNA, 2176 bp, Artificial Sequence
  derived and/or modified sequence
tgcaggtgccgggccgggagcgagcggcggcggcggcggcggcggcaccatgggccgggcccggcgcttccagtggccgctgctgctgctgtgggcggccgcggcggggccaggggcaggacaggaagtacagacagagaacgtgacagtggctgagggtggggtggctgagatcacctgccgtctgcaccagtatgatgggtccatagttgtcatccagaacccagcccggcagaccctcttcttcaatggcacccgtgccttgaaggatgagcgtttccagcttgaggagttctccccacgccgggtgcggatccggctctcagatgcccgcctggaggacgaggggggctatttctgccagctctacacagaagacacccaccaccagattgccacgctcacggtactagtggccccagagaatcctgtggtggaggtccgggagcaggcggtagagggcggcgaggtggagctcagctgcctcgttccgcggtcccgtccggctgccaccctgcgctggtaccgggaccgcaaggagctgaaaggagtgagcagcagccaggaaaatggcaaggtctggagcgtggcaagcacagtacggtttcgtgtggaccgtaaggacgacggtggtatcatcatctgtgaggcgcagaaccaggcgctgccctccggacacagcaagcagacgcagtacgtgctggatgtgcagtactcccccacggcccggattcatgcctcccaagctgtggtgagggagggagacacgctggtgttgacgtgtgctgtcacggggaaccccaggccaaaccagatccgctggaaccgcgggaatgagtctttgccggagagggcggaggccgtgggagagacgctcacgctgccgggtctggtatccgcggataacggcacctacacttgcgaggcgtccaataagcacggccatgcgagggcgctctacgtacttgtggtctacgaccctggtgcggtggtagaggctcagacgtcggttccctatgccattgtgggcggcatcctggcgctgctggtgtttctgatcatatgtgtgctagtgggcatggtctggtgctcggtacggcagaagggttcctatctgacccacgaagccagtggcttggatgaacagggagaagcaagagaagccttcctcaatggcagcgacggacacaagaggaaagaggaattcttcatctgaccctatccccaccccaggcctaggcctgggcctgggctggggtcccccccactgccagctgcaaggaaccagcaaagacatttaccagagtctgggatggtgggcttctccccccaccactaacacctcagacgcttgggcagggatgggggtgttggatgcctggatctctgtaagggccagaagtgagggcccagaggtctgggtcccccagggggcaggggccaaaggtccagaccccccaagtccagtgagggcagtagggattgggttgggggaagataactgggggaaggccagggcccctaggctacaaaaccaggtcttgtggggagggggtcagtttctgggaagggtggggggggcagggaaggggaacacagatttctttgggggtcctagaccccatgccagccattgtaagagttccacagagctctgggcacttctttgcaaagccatgtttgcacggtggggggatgggtggggggagggcgtggaaatagggattctgtgtctttgtgtcataactttgatgggggcagtgagggagacagccccaacccttttctccaatcccccttccccaggttcctgggctccccttctctctaccttctcccccaacgtctgtcccatccatatttgtctctctgtccacccactcctgggggggccttccccatctctcctccaggccccccggggagggggaaaggagtttggggaggattcgtggtcttcatggttttatatataatatattaaaaaatcaaaagtctgtatgaaaatatcagattgcacccccctctccccattcctggcttttgccccctttttcttgttaaaaaacaaaaaacaaaaaacaaaaaaccacacacacattttgtacggggtggggaggggaatggggagggggtttggcaatctcactaaccaccattaaactgaggagagaac

SEQ ID NO: 241009 - DNA, 1167 bp, Artificial Sequence
  derived and/or modified sequence
atgggcagggctaggaggtttcaatggcccttactgctcctctgggctgctgccgcgggacctggtgctggtcaggaggtacagactgagaatgtgacagttgcggagggcggggtagctgagatcacttgtaggctccaccagtatgatggaagtatcgtcgtgattcagaatcctgccagacagaccctgttcttcaacgggacccgagcgctgaaagatgagcgctttcaactcgaggaatttagccctagaagagtgaggatccgcttgtccgacgctcggcttgaagatgagggtggatatttctgtcagttgtataccgaagacacgcatcaccaaatcgctaccctgacagtcctggtggcccctgagaatcctgtagtagaagtgcgggaacaggccgtcgaaggcggggaggtagaactcagctgcctggtgcccagatcgaggccagccgccacgctgcgctggtatagggaccgaaaggagctcaagggagtatcttcatcccaggagaatggcaaggtgtggagcgtggcctcaacagtccgttttagggtggaccgtaaagatgatggagggatcattatttgtgaagcccaaaaccaggccttgccctccggccatagtaagcagacacagtacgtcttagatgttcagtacagcccaactgcgcggattcacgccagccaggcagtggtccgagaaggagacaccctcgtcctgacctgtgccgtaactggcaacccacggccaaatcagataaggtggaaccggggcaacgagtcgctgccagagagagcagaggctgtcggtgagacactcactcttcccgggctggtctccgctgataacggtacttacacttgcgaggcttctaacaagcacggccacgcccgcgcactttatgtgttggtggtctatgatcctggagcagtggtggaggcccagacatctgttccgtacgctatcgtcggtggaatactggctctgcttgtttttctgataatctgcgtgttggtcgggatggtctggtgctccgtccgccagaaaggaagttatctcacgcacgaggcatctggactcgacgaacaaggcgaggcaagagaggcgttcctaaacggatccgacggccacaaaaggaaggaggaattttttatttag

SEQ ID NO: 241010 - DNA, 1167 bp, Artificial Sequence
  derived and/or modified sequence
atgggccgggcccggcgcttccagtggcccctgctgctgctgtgggccgctgctgctggccctggagctggccaggaggtgcagacagaaaatgtgacagtggccgagggcggcgtggccgagatcacctgccgcctgcaccagtatgatggcagcatcgtggtgatccagaacccagcccggcagaccctcttcttcaacggcacccgggccctgaaggatgagcgcttccagctggaggagttcagccccaggagagtgcgcatccggctgagtgatgcccggctggaggatgagggcggctacttctgccagctgtacacagaggacacccaccaccagatcgccaccctgactgtgctggtggccccagaaaatcctgtggtggaggtgcgggagcaggccgtggagggcggggaggtggagctgagctgcctggtgcccaggagcaggcctgctgccaccctgcgctggtacagagacaggaaggagctgaagggcgtgagcagcagccaggagaatggcaaggtgtggagcgtggccagcacagtgcgcttccgggtggacaggaaggatgatggcggcatcatcatctgtgaggcccagaaccaggccctgcccagcggccacagcaagcagacccagtatgtgctggatgtgcagtacagccccacagcccgcatccacgccagccaggccgtggtgcgggagggggacaccctggtgctgacctgtgctgtgacaggcaacccccggcccaaccagatccgctggaacagaggaaatgaaagcctgcctgagagagctgaggccgtgggggagaccctgaccctgcccggcctggtgtctgctgacaatggcacctacacctgtgaggccagcaacaagcacggccacgcccgggccctgtatgtgctggtggtgtatgaccctggagctgtggtggaggcccagacctctgtgccctatgccatcgtgggcggcatcctggccctgctggtgttcctgatcatctgtgtgctggtgggcatggtgtggtgcagcgtgcggcagaagggcagctacctgacccatgaggccagcggcctggatgagcagggcgaggcccgggaggccttcctgaatggaagtgatggccacaagaggaaggaggagttcttcatctag

SEQ ID NO: 241011 - DNA, 1167 bp, Artificial Sequence
  derived and/or modified sequence
atgggccgggcccggcggttccagtggcccctgctgctgctgtgggccgcagcagccggacccggtgcagggcaggaggttcagacagagaatgtgactgtggcggagggaggggttgctgagatcacctgtaggctgcatcaatacgacggttctattgttgtaatccagaatcctgcccggcagaccctctttttcaacgggactcgggcccttaaagacgagaggttccaattagaagagttttctcctcgcagagtccggatcagactttctgatgctcggttggaggatgagggaggctatttctgtcagctttataccgaagatacccatcaccagatcgctaccttgaccgtgttagtggcaccagagaaccctgtggtggaagtacgggagcaggcggtggaaggaggggaggtggaactatcatgcctcgtccctagaagccgccccgctgcaacactgcgatggtatagggatagaaaggaactcaaaggcgtgtcttcttcgcaggaaaacggcaaggtgtggtcggtggctagtactgtgagatttagggtggatcggaaagatgacggcggaatcatcatttgcgaggctcaaaaccaagccctgccgagtggacactcaaaacaaactcagtacgtgttagatgtgcagtactctcctactgccaggatccatgcctcccaagcagtagtcagagagggcgacaccctggtgctgacttgcgccgtcacaggcaacccgcggcccaaccaaatccgttggaatcgaggcaacgaaagtctgccggaaagagccgaggcagtgggagagacactgaccctgcctggcctcgtttctgctgataacggaacttacacgtgtgaggccagcaataagcatggccacgctagagctctgtacgttctggtggtctacgatcccggcgctgtcgtggaggctcaaacctccgtaccttacgcgatcgttgggggcattctcgcgctcctggtttttttgattatttgtgtgcttgtggggatggtttggtgctctgttagacagaagggctcctacctgactcacgaagcttcaggcctcgacgagcagggagaagcccgagaggcctttctaaacggctctgacggccacaagagaaaagaggaatttttcatctag

SEQ ID NO: 241012 - DNA, 1167 bp, Artificial Sequence
  derived and/or modified sequence
atgggcagagctcggaggttccaatggccattgctcctcctgtgggcagccgctgccggacccggagccggacaggaagttcagaccgaaaatgtcacggtggccgagggaggggtagcagagattacttgccgccttcatcagtatgacgggtcgatcgtcgtcattcagaatcctgcgcgacagaccctattcttcaacggcacccgcgcattaaaggacgagcgctttcagctggaggagtttagccctcgcagagttcgcatccggctgagcgacgccagactcgaagacgaaggtggatacttctgccagctgtacactgaggatacgcaccaccagatcgccaccttgaccgtcttggtcgccccagaaaatccggtcgtcgaggtgcgggagcaggctgtcgaagggggtgaagtggaacttagctgtctggtgcccagatccaggcccgcagcgactttgcgctggtacagagaccggaaggaattgaagggcgtgagttcttctcaggagaacggcaaggtctggagtgtggcatctaccgtcagatttagggttgaccgtaaagacgatgggggtataataatatgtgaagcccagaatcaggcgctgcccagcggacactccaaacaaacccagtacgtgctagacgtgcagtacagccctacagccaggatccatgcctctcaagccgttgtgagagagggtgacacactggtgctcacctgcgccgtgaccgggaaccccaggccaaatcagatccggtggaacagggggaatgagagcctccccgagagagctgaagcggtcggggagacactgacacttccagggctggtctctgcggacaatggcacctatacatgcgaggcctccaacaagcacgggcacgcacgcgctttgtacgtgttagttgtttacgatcctggggctgttgtcgaagcccagaccagtgtgccatacgcaattgtcggtgggatcctggccctgctcgtgttcctcatcatctgcgtgctcgttggcatggtctggtgctccgtccgccagaagggctcctacttgacacacgaagcctcggggctggatgagcagggggaagccagggaagcgttcctgaacgggagcgacggacataagcggaaggaggagttttttatctag

SEQ ID NO: 241013 - DNA, 1167 bp, Artificial Sequence
  derived and/or modified sequence
atgggcagagccagaagattccagtggcccctgctgctgctgtgggccgccgccgccggccccggcgccggccaggaggtgcagaccgagaacgtgaccgtggccgagggcggcgtggccgagatcacctgcagactgcaccagtacgacggcagcatcgtggtgatccagaaccccgccagacagaccctgttcttcaacggcaccagagccctgaaggacgagagattccagctggaggagttcagccccagaagagtgagaatcagactgagcgacgccagactggaggacgagggcggctacttctgccagctgtacaccgaggacacccaccaccagatcgccaccctgaccgtgctggtggcccccgagaaccccgtggtggaggtgagagagcaggccgtggagggcggcgaggtggagctgagctgcctggtgcccagaagcagacccgccgccaccctgagatggtacagagacagaaaggagctgaagggcgtgagcagcagccaggagaacggcaaggtgtggagcgtggccagcaccgtgagattcagagtggacagaaaggacgacggcggcatcatcatctgcgaggcccagaaccaggccctgcccagcggccacagcaagcagacccagtacgtgctggacgtgcagtacagccccaccgccagaatccacgccagccaggccgtggtgagagagggcgacaccctggtgctgacctgcgccgtgaccggcaaccccagacccaaccagatcagatggaacagaggcaacgagagcctgcccgagagagccgaggccgtgggcgagaccctgaccctgcccggcctggtgagcgccgacaacggcacctacacctgcgaggccagcaacaagcacggccacgccagagccctgtacgtgctggtggtgtacgaccccggcgccgtggtggaggcccagaccagcgtgccctacgccatcgtgggcggcatcctggccctgctggtgttcctgatcatctgcgtgctggtgggcatggtgtggtgcagcgtgagacagaagggcagctacctgacccacgaggccagcggcctggacgagcagggcgaggccagagaggccttcctgaacggcagcgacggccacaagagaaaggaggagttcttcatctag

SEQ ID NO: 241014 - protein, 373 aa, Artificial Sequence
  derived and/or modified sequence
MKPHFRNTVERMYRDTFSYNFYNRPILSRRNTVWLCYEVKTKGPSRPRLDAKIFRGQVYSQPEHHAEMCFLSWFCGNQLPAYKCFQITWFVSWTPCPDCVAKLAEFLAEHPNVTLTISAARLYYYWERDYRRALCRLSQAGARVKIMDDEEFAYCWENFVYSEGQPFMPWYKFDDNYAFLHRTLKEILRNPMEAMYPHIFYFHFKNLRKAYGRNESWLCFTMEVVKHHSPVSWKRGVFRNQVDPETHCHAERCFLSWFCDDILSPNTNYEVTWYTSWSPCPECAGEVAEFLARHSNVNLTIFTARLYYFWDTDYQEGLRSLSQEGASVEIMGYKDFKYCWENFVYNDDEPFKPWKGLKYNFLFLDSKLQEILE

SEQ ID NO: 241015 - DNA, 1122 bp, Artificial Sequence
  derived and/or modified sequence
atgaagccccatttccgcaatacagtggagcgtatgtaccgggatacgttcagttataatttctataataggcctattctctcaagaagaaacaccgtgtggctctgctacgaagtgaagactaaggggcccagtagacctaggctggacgccaagatctttcgtggccaggtctactcccagccggagcatcacgcggaaatgtgtttcctcagctggttttgcggcaatcagttgcctgcatacaaatgctttcagatcacctggtttgtttcttggaccccgtgtcctgattgtgttgcaaagctcgccgaattcctagccgaacaccccaatgtcaccctcaccattagcgccgcccgactgtactactactgggagcgggactacagacgagcgctgtgtcgactgtcacaagctggggcaagagtaaagattatggacgatgaagagtttgcgtattgctgggagaacttcgtgtactcagaaggccaaccatttatgccctggtacaagtttgatgacaattacgcgtttctacaccgcaccctgaaagagatcctccgcaaccccatggaagcaatgtacccgcacattttctattttcacttcaagaatcttagaaaggcgtacggaaggaacgagagttggctgtgtttcaccatggaagtagtaaaacaccactccccggtctcatggaagaggggtgttttcaggaaccaggtggatccagaaacacattgtcatgctgagcgttgctttctcagttggttctgtgatgatattctctcaccgaacacaaactacgaggtaacgtggtacacctcctggtctccctgccccgaatgcgccggcgaggtggcagaattcctggcacgccacagcaatgtgaacctaactatctttaccgcccgcctttactacttttgggacacagattatcaggagggcctccggtccctgagtcaggagggcgcgagcgtggagatcatggggtataaagacttcaaatattgttgggagaacttcgtatacaatgacgacgagcctttcaagccatggaaggggctaaagtataattttttgttcctggacagcaaattacaggagatcttagagtag

SEQ ID NO: 241016 - DNA, 1122 bp, Artificial Sequence
  derived and/or modified sequence
atgaagccccacttcaggaacacagtggagaggatgtacagagacaccttctcctacaacttctacaaccggcccatcctgagcagaagaaacacagtgtggctgtgctatgaggtgaagaccaagggccccagccggccccggctggatgccaagatcttccggggccaggtgtacagccagcctgagcaccacgccgagatgtgcttcctgtcctggttctgtggcaaccagctgcctgcctacaagtgcttccagatcacctggtttgtgtcctggaccccctgcccagactgtgtggccaagctggccgagttcctggccgagcaccccaacgtgaccctgaccatctctgctgcccggctgtactactactgggagcgggactacagaagagccctgtgccgcctgagccaggccggggcccgggtgaagatcatggatgatgaggagtttgcctactgctgggagaactttgtgtacagcgagggccagcccttcatgccctggtacaagtttgatgacaactatgccttcctgcacaggaccctgaaggagatcctgaggaaccccatggaggccatgtacccccacatcttctacttccacttcaagaacctgaggaaggcctatggaagaaatgaatcctggctgtgcttcaccatggaggtggtgaagcaccacagccctgtgtcctggaagaggggcgtcttcaggaaccaggtggaccctgagacccactgccacgccgagcgctgcttcctgtcctggttctgtgatgacatcctgagccccaacaccaactatgaggtgacctggtacacctcctggagcccctgcccagaatgtgccggggaggtggccgagttcctggcccggcacagcaatgtgaacctgaccatcttcaccgcccggctgtactacttctgggacacagactaccaggagggcctgcggagcctgagccaggagggcgcctctgtggagatcatgggctacaaggacttcaagtactgctgggagaactttgtgtacaatgatgatgagcccttcaagccctggaagggcctgaagtacaacttcctgttcctggacagcaagctgcaggagatcctggagtag

SEQ ID NO: 241017 - DNA, 1122 bp, Artificial Sequence
  derived and/or modified sequence
atgaagccccacttccggaacaccgtggagcggatgtaccgggacactttcagctataatttttacaatcgacccatcctgagccgcaggaacaccgtgtggctttgctacgaggtaaagacaaaaggcccatctagacctcgtctcgacgccaagatctttagaggacaagtgtatagccagccagaacaccatgctgaaatgtgttttctgagctggttttgcggaaaccaactgccggcctataagtgtttccagataacctggttcgtctcctggacaccctgtcctgattgcgtagctaagctggctgagtttttagctgaacacccaaatgtcaccctcacgatctcagccgctaggctctactactattgggagcgagactaccggcgggcactgtgccggctgtcacaggccggcgcgagagtgaagataatggacgatgaggagtttgcctattgttgggagaacttcgtttattccgagggccagccgttcatgccctggtataagtttgacgacaactacgcttttctgcatagaacccttaaagaaatcctgcggaatcccatggaagccatgtatccccatatattctatttccactttaagaatcttcgtaaggcatacgggcgcaacgagagctggttgtgtttcacaatggaagttgtgaaacaccacagccccgtttcctggaagcgaggggtcttcagaaatcaggtcgacccagaaacgcactgtcacgccgagcgctgtttcctgagctggttttgtgatgatatcctatctccaaacacgaactacgaggtgacctggtataccagctggtccccctgcccagagtgcgctggggaagtggctgaattcctagcccgccatagtaatgttaacctcacaatttttacagctcggctctattacttttgggatacggattaccaggaaggactcaggtcactctcccaggaaggcgctagcgtcgaaattatggggtataaggacttcaagtactgctgggagaactttgtgtataatgacgacgagcccttcaagccctggaaaggactgaaatataactttctgtttctcgactctaaattgcaggaaatacttgagtag

SEQ ID NO: 241018 - DNA, 1122 bp, Artificial Sequence
  derived and/or modified sequence
atgaaaccccatttccgcaatacggtggagagaatgtaccgcgatacgttctcctacaatttttacaaccgtcccattctcagtcgccgaaacaccgtctggctatgctatgaggtaaagactaagggcccatctcgacctaggttagatgctaaaatcttcagaggccaagtttactctcagccggagcaccacgcggagatgtgcttcctgtcatggttctgtggaaaccagttacctgcatataaatgcttccagattacgtggttcgtgagctggaccccttgcccagattgcgtcgccaagctagctgaatttctggcagagcacccgaacgttactcttactatttccgctgctaggttatactactattgggagcgggattacaggcgagctctctgccggttgagtcaggctggggcacgagtgaagatcatggatgatgaggagttcgcctactgctgggagaatttcgtttactcagaagggcagccattcatgccctggtataagtttgatgacaactatgcgttcttgcaccgcacattgaaggaaatcctccgcaaccccatggaggctatgtacccccacatattctactttcactttaagaatctgaggaaggcgtacggcaggaacgagtcttggctgtgctttacgatggaagtggtcaaacaccacagccctgtcagttggaagagaggagtattcaggaaccaggtggatcctgagacacactgccacgcggagcggtgttttttgagctggttctgtgacgatatactctcccccaacaccaattatgaggtcacttggtacacctcatggtcgccctgccctgagtgcgccggagaggtggcagagtttctggcgaggcactcgaacgtgaacctcaccatcttcacagcacgtctgtactacttttgggacaccgattaccaggaaggtttgcgctccctttctcaagaaggagctagtgtcgaaattatggggtataaagattttaagtactgttgggagaactttgtgtacaatgatgacgagccgtttaagccctggaagggcttgaaatacaactttctattccttgattccaagctgcaagaaatccttgagtag

SEQ ID NO: 241019 - DNA, 2694 bp, Artificial Sequence
  derived and/or modified sequence
gtgctctgctggctcagcctggtgtggacccacctcgcgggcgctggctgcaatgactttctctttccctttgcaattgccttgggtcctgccgcacagagcggcctgtctttatcagaggtccctctgccagggggagggccccagagaaaaccagaaagagggtgagagactgaggaagataaagcgtcccagggcctcctacaccagcgcctgagcaggaagggggaggggccatgactacgaggccctgggaggtcactttagggagggctgtcctgaaacctggagcctggagcagaaagtgaaaccctggtgctccagacaaagatcttagtcgggactagccggccaaggatgaagcctcacttcagaaacacagtggagcgaatgtatcgagacacattctcctacaacttttataatagacccatcctttctcgtcggaataccgtctggctgtgctacgaagtgaaaacaaagggtccctcaaggccccgtttggacgcaaagatctttcgaggccaggtgtattcccagcctgagcaccacgcagaaatgtgcttcctctcttggttctgtggcaaccagctgcctgcttacaagtgtttccagatcacctggtttgtatcctggaccccctgcccggactgtgtggcgaagctggccgaattcctggctgagcaccccaatgtcaccctgaccatctccgccgcccgcctctactactactgggaaagagattaccgaagggcgctctgcaggctgagtcaggcaggggcccgcgtgaagattatggacgatgaagaatttgcatactgctgggaaaactttgtgtacagtgaaggtcagccattcatgccttggtacaaattcgatgacaattatgcattcctgcaccgcacgctaaaggagattctcagaaacccgatggaggcaatgtatccacacatattctacttccactttaaaaacctacgcaaagcctatggtcggaacgaaagctggctgtgcttcaccatggaagttgtaaagcaccactcacctgtctcctggaagaggggcgtcttccgaaaccaggtggatcctgagacccattgtcatgcagaaaggtgcttcctctcttggttctgtgacgacatactgtctcctaacacaaactacgaggtcacctggtacacatcttggagcccttgcccagagtgtgcaggggaggtggccgagttcctggccaggcacagcaacgtgaatctcaccatcttcaccgcccgcctctactacttctgggatacagattaccaggaggggctccgcagcctgagtcaggaaggggcctccgtggagatcatgggctacaaagattttaaatattgttgggaaaactttgtgtacaatgatgatgagccattcaagccttggaaaggactaaaatacaactttctattcctggacagcaagctgcaggagattctcgagtgaggggtctccccgggcctcatggtctgtctcctctagcctcctgctcatgttgtgcaggcctcccctccatcctggaccagctgtgcttttgcctggtcatcctgagcccctcctggcctcagggccattccatagtgctcccctgcctcaccacctcctctccgctctcccaggctcttcctgcagaggcctctttctgcctccatggctatccatccacccaccaagaccctgttccctgagcctgcatgcccctaacctgccttttcccatctccccagcataacctaatattttttttttttttttgagacggaatttcgctctgtcacccagactggagtgcaatggcttgatcttggctcactgcaaactctgcctaccaggttcaagcgattctcctgcctccgcctcccgagtagctggaattacagacgcctgccaccacgcacagctaactttttttttttttgtatttttagtagtgactgggtttcaccatgttggccaggctggtcttgaactcctgacctcaggtgatccgcctatctcagcctcccaaagtgctgggattacaggcgtgagccactggcccggcggcacaaccaaatcttattaaactcaccctaggctggccgcggtgactcatgcctataatcccccagcaatttgggaggcagaggtgagagaatcgcttgagcccaggaattcgagaccagcctgggccacatgacaaagccccatctctacaaaaaaattacaaaaaaaaaaaaaacaggtgtggtggcatgcacctgtagttgaagctacttggaaggatgaagtgggaggattgcttgagccggggaggtggaggctgcagtgaactgagatcacgtcactgaactccagtctgagcaacagatcgagaccctgcctgaaaataaatcaataaataaactcaaccgaaatgggtatgaaagttgaaatgggtatgtaagttgaaaaccagaagttttgagaaacatcctttgttaactttcatcctacaaattgggtcattcatgtcctacgcagctaaaacagagcccaggagccagggaggaaaagcagtcaggccacacaccattgctcccaaaatggacttctctgcaagcctgactcctgaaactgtgcattgtaccctgaaaccagctttatccatagcttctgcaataaatggctgtaagtcttgga

SEQ ID NO: 241020 - DNA, 1122 bp, Artificial Sequence
  derived and/or modified sequence
atgaagccccacttcagaaacaccgtggagagaatgtacagagacaccttcagctacaacttctacaacagacccatcctgagcagaagaaacaccgtgtggctgtgctacgaggtgaagaccaagggccccagcagacccagactggacgccaagatcttcagaggccaggtgtacagccagcccgagcaccacgccgagatgtgcttcctgagctggttctgcggcaaccagctgcccgcctacaagtgcttccagatcacctggttcgtgagctggaccccctgccccgactgcgtggccaagctggccgagttcctggccgagcaccccaacgtgaccctgaccatcagcgccgccagactgtactactactgggagagagactacagaagagccctgtgcagactgagccaggccggcgccagagtgaagatcatggacgacgaggagttcgcctactgctgggagaacttcgtgtacagcgagggccagcccttcatgccctggtacaagttcgacgacaactacgccttcctgcacagaaccctgaaggagatcctgagaaaccccatggaggccatgtacccccacatcttctacttccacttcaagaacctgagaaaggcctacggcagaaacgagagctggctgtgcttcaccatggaggtggtgaagcaccacagccccgtgagctggaagagaggcgtgttcagaaaccaggtggaccccgagacccactgccacgccgagagatgcttcctgagctggttctgcgacgacatcctgagccccaacaccaactacgaggtgacctggtacaccagctggagcccctgccccgagtgcgccggcgaggtggccgagttcctggccagacacagcaacgtgaacctgaccatcttcaccgccagactgtactacttctgggacaccgactaccaggagggcctgagaagcctgagccaggagggcgccagcgtggagatcatgggctacaaggacttcaagtactgctgggagaacttcgtgtacaacgacgacgagcccttcaagccctggaagggcctgaagtacaacttcctgttcctggacagcaagctgcaggagatcctggagtag

SEQ ID NO: 241021 - protein, 341 aa, Artificial Sequence
  derived and/or modified sequence
MATWRRDGRLTGGQRLLCAGLAGTLSLSLTAPLELATVLAQVGVVRGHARGPWATGHRVWRAEGLRALWKGNAVACLRLFPCSAVQLAAYRKFVVLFTDDLGHISQWSSIMAGSLAGMVSTIVTYPTDLIKTRLIMQNILEPSYRGLLHAFSTIYQQEGFLALYRGVSLTVVGALPFSAGSLLVYMNLEKIWNGPRDQFSLPQNFANVCLAAAVTQTLSFPFETVKRKMQAQSPYLPHSGGVDVHFSGAVDCFRQIVKAQGVLGLWNGLTANLLKIVPYFGIMFSTFEFCKRICLYQNGYILSPLSYKLTPGVDQSLQPQELRELKKFFKTRKPKPKKPTL

SEQ ID NO: 241022 - protein, 289 aa, Artificial Sequence
  derived and/or modified sequence
MATWRRDGRLTGGQRLLCAGLAGTLSLSLTAPLELAAYRKFVVLFTDDLGHISQWSSIMAGSLAGMVSTIVTYPTDLIKTRLIMQNILEPSYRGLLHAFSTIYQQEGFLALYRGVSLTVVGALPFSAGSLLVYMNLEKIWNGPRDQFSLPQNFANVCLAAAVTQTLSFPFETVKRKMQAQSPYLPHSGGVDVHFSGAVDCFRQIVKAQGVLGLWNGLTANLLKIVPYFGIMFSTFEFCKRICLYQNGYILSPLSYKLTPGVDQSLQPQELRELKKFFKTRKPKPKKPTL

SEQ ID NO: 241023 - protein, 226 aa, Artificial Sequence
  derived and/or modified sequence
MATWRRDGRLTGGQRLLCAGLAGTLSLSLTAPLELATVLAQVGVVRGHARGPWATGHRVWRAEGLRALWKGNAVACLRLFPCSAVQLAAYRKFVVLFTDDLGHISQWSSIMAGSLAGMVSTIVTYPTDLIKTRLIMQNILEPSYRGLLHAFSTIYQQEGFLALYRGVSLTVVGSEPLPPTQWRSRCPFLRSSGLLPADSEGPGGPGALEWIDSQFTEDSSIFWNYV

SEQ ID NO: 241024 - DNA, 1026 bp, Artificial Sequence
  derived and/or modified sequence
atggccacctggagacgagatggtagactcactgggggccagcgcctcctttgtgccggtttagcaggcaccctgtctctcagcctcacggcccctcttgaactggccacagttctcgcccaggttggcgtggtccggggacacgcaaggggcccatgggcgactggccatcgagtttggagagcggagggcctgagagctctctggaaaggcaatgccgtggcctgtctcaggctgtttccttgcagcgcagtccagttagccgcttacaggaagtttgtggtgctgtttacagatgacctcggtcatatctcacagtggagttcaattatggctggctcactggccggtatggtaagtacaatcgttacataccccaccgatctcataaaaacccgtctgatcatgcagaatattcttgagccgtcctacagaggattactccacgccttctcaactatctaccaacaagagggctttctagctttataccgtggggtgagtcttacagtggtgggtgctctgcctttttcagccgggagtcttctcgtctatatgaacctggagaagatttggaacggccccagggaccagttctcactgccccagaacttcgccaacgtgtgtctggcagcggccgtgacacagaccctgagtttccctttcgagaccgtgaagcgtaagatgcaagcacagagtccataccttccccacagcggcggggtggatgtccatttttcaggagcagttgattgcttccgacaaattgtgaaagcccagggggtcctgggtctgtggaacgggttgacagccaatcttctaaagattgtgccatactttggaatcatgttcagtacgtttgaattttgtaagagaatctgcctgtaccagaacggctatatacttagtcccctcagttacaagctgacccctggcgtggaccagagtttacaaccccaagaactacgtgaattgaaaaaattcttcaagaccaggaaaccaaagcctaaaaaaccaacactttag

SEQ ID NO: 241025 - DNA, 1026 bp, Artificial Sequence
  derived and/or modified sequence
atggccacctggaggagagatggccgcctgactggaggccagaggctgctgtgtgccggcctggccggcaccctgagcctgagcctgacagcccccctggagctggccaccgtgctggcccaggtgggcgtggtgcggggccacgcccggggcccctgggccaccggccaccgggtgtggagggctgagggcctgcgggccctgtggaagggaaatgctgtggcctgcctgcggctcttcccctgcagcgctgtgcagctggccgcctacaggaagtttgtggtgctcttcacagatgacctgggccacatcagccagtggagcagcatcatggccggcagcctggccggcatggtgtccaccatcgtgacctaccccacagacctgatcaagaccaggctcatcatgcagaacatcctggagcccagctaccggggcctgctgcacgccttcagcaccatctaccagcaggagggcttcctggccctgtaccggggcgtgtccctgactgtggtgggcgccctgcccttctctgctggcagcctgctggtgtacatgaacctggagaagatctggaatggcccccgggaccagttcagcctgccccagaactttgccaacgtgtgcctggccgctgctgtgacccagaccctgtccttcccctttgagaccgtgaagaggaagatgcaggcccagagcccctacctgccccacagcggaggagtggatgtgcacttctctggagctgtggactgcttccggcagatcgtgaaggcccagggcgtgctgggcctgtggaatggcctgacagccaacctgctgaagatcgtgccctacttcggcatcatgttcagcacctttgagttctgcaagaggatctgcctgtaccagaatggctacatcctgagccccctgagctacaagctgaccccaggagtggaccagagcctgcagccccaggagctgcgggagctgaagaagttcttcaagaccaggaagcccaagcccaagaagcccaccctgtag

SEQ ID NO: 241026 - DNA, 1026 bp, Artificial Sequence
  derived and/or modified sequence
atggccacctggcggcgggacggccggctgaccggcggccagcggctgttatgcgctgggctcgcagggactctctcactgtcactcaccgccccactcgagctggccaccgtgcttgcccaggtgggtgtagtgcgcgggcacgccagagggccctgggcaactggtcaccgggtctggagagcagaaggcctgcgtgcattatggaaaggtaatgccgtggcttgtctgagactgttcccatgctccgctgtacaactagcagcttaccgcaaattcgtggtgttgtttaccgacgatttggggcatatctcccagtggagcagcattatggcaggaagcttagcgggcatggtgtccacgattgttacataccctaccgaccttatcaaaacacggttaattatgcagaacattctggaacccagctaccggggtctgctccatgccttcagcacgatctaccaacaggagggatttctggctctgtatagaggcgtcagcctcacagtggttggagccctacctttttccgctggcagcctcttagtctacatgaacttagaaaaaatctggaacgggcctagggatcagttttccctccctcagaacttcgctaatgtgtgtctggctgccgctgtgactcagactctgtccttccccttcgaaacggtgaagcgcaagatgcaggcccagagtccatacttgccacactctggcggtgtagacgttcactttagcggtgcagtcgactgttttagacagattgtaaaagcccagggagtgttaggactgtggaacggcctgacagcgaacctgctgaagattgtgccttacttcgggatcatgttcagtacatttgaattctgcaagcgaatctgcctgtaccaaaatggctatatcctctccccgctcagttacaaattgacaccaggagttgatcagtcccttcagccgcaggagttgagggagctcaagaagttctttaagacgagaaagccaaagcccaagaagccaacactgtag

SEQ ID NO: 241027 - DNA, 1026 bp, Artificial Sequence
  derived and/or modified sequence
atggccacctggagaagagacgggcgtctcacaggaggccaaagactgctgtgcgcaggactagccggaacactttccctgtctctgacagctcccttggaactggccaccgtactggcccaggttggggtagtgaggggccacgcacgtggaccctgggcaactggacatcgcgtctggcgcgcagaaggacttagggcattgtggaagggcaatgccgtagcgtgtcttagattgtttccttgttctgctgtccagctagctgcttatcgtaaattcgtcgttctgttcactgatgatctagggcacattagccagtggtccagtattatggccggaagcctggcgggtatggtaagtacaatcgttacctacccaacggacctgataaaaacccgcctgattatgcagaacattttagagccaagctatagaggcctgctgcatgccttttctacaatctaccaacaggagggcttcctggctctgtatcggggagtgagtctgacagtggtgggagccttgccttttagcgcgggttctctgcttgtgtacatgaacctggagaaaatctggaatggccctcgcgatcagttttcactgcctcagaatttcgcgaatgtctgcttagcagccgctgtgacgcaaacactgagcttcccatttgagaccgttaagcgtaagatgcaggctcaatccccttacctgccccatagcggaggtgtagacgtccacttcagtggagccgttgactgtttccggcagatcgtgaaggctcagggcgtcctggggctctggaatgggctgaccgctaacctcctcaaaatcgtgccttattttggtattatgttcagcacgttcgagttttgcaaacgcatttgtttgtatcagaatggttacattctctccccactgagctacaagctcaccccaggagttgatcaaagtttacagccccaggagttacgagaactgaagaaatttttcaaaaccaggaagcccaagccaaagaagccgaccctgtag

SEQ ID NO: 241028 - DNA, 1026 bp, Artificial Sequence
  derived and/or modified sequence
atggccacctggagaagagacggcagactgaccggcggccagagactgctgtgcgccggcctggccggcaccctgagcctgagcctgaccgcccccctggagctggccaccgtgctggcccaggtgggcgtggtgagaggccacgccagaggcccctgggccaccggccacagagtgtggagagccgagggcctgagagccctgtggaagggcaacgccgtggcctgcctgagactgttcccctgcagcgccgtgcagctggccgcctacagaaagttcgtggtgctgttcaccgacgacctgggccacatcagccagtggagcagcatcatggccggcagcctggccggcatggtgagcaccatcgtgacctaccccaccgacctgatcaagaccagactgatcatgcagaacatcctggagcccagctacagaggcctgctgcacgccttcagcaccatctaccagcaggagggcttcctggccctgtacagaggcgtgagcctgaccgtggtgggcgccctgcccttcagcgccggcagcctgctggtgtacatgaacctggagaagatctggaacggccccagagaccagttcagcctgccccagaacttcgccaacgtgtgcctggccgccgccgtgacccagaccctgagcttccccttcgagaccgtgaagagaaagatgcaggcccagagcccctacctgccccacagcggcggcgtggacgtgcacttcagcggcgccgtggactgcttcagacagatcgtgaaggcccagggcgtgctgggcctgtggaacggcctgaccgccaacctgctgaagatcgtgccctacttcggcatcatgttcagcaccttcgagttctgcaagagaatctgcctgtaccagaacggctacatcctgagccccctgagctacaagctgacccccggcgtggaccagagcctgcagccccaggagctgagagagctgaagaagttcttcaagaccagaaagcccaagcccaagaagcccaccctgtag

SEQ ID NO: 241029 - DNA, 870 bp, Artificial Sequence
  derived and/or modified sequence
atggctacctggcgccgcgacgggaggctgacaggaggtcaaagactgctttgtgcagggcttgcagggacattaagcttgtccctcacagcaccactggagctggctgcctacagaaaattcgtagttctgtttaccgacgatctcggacacatttcacagtggtcttcgatcatggcgggcagcctggccgggatggtgtctaccatagtgacatatccaacggacttaatcaaaacccgccttataatgcagaacatccttgaacctagttatagaggtctgctgcatgccttcagcaccatctaccaacaggaaggttttctagccttatataggggggtgagcctgaccgtcgtgggggcccttcctttctctgccggatccctcttggtctacatgaatctcgagaaaatctggaacggtcctagagatcagttttctttaccacagaacttcgccaacgtgtgccttgccgccgctgttacccagacactgtctttcccttttgaaaccgtcaaacgtaagatgcaggcccagtcaccctatctcccacacagcggaggagttgatgttcacttttccggcgcagtggactgcttcagacagatcgttaaagcacaaggcgtgttgggtctgtggaacggactcaccgctaatctgcttaagattgtgccctatttcggaatcatgttctctactttcgagttctgtaaacgtatctgcctgtaccagaacggatatatcttgtccccccttagctacaagttgacaccaggcgtggatcagtccttgcagccccaggagcttcgcgaactgaagaaattctttaaaacgcgcaaacccaaacccaaaaagcccaccctgtag

SEQ ID NO: 241030 - DNA, 681 bp, Artificial Sequence
  derived and/or modified sequence
atggccacctggaggcgagacggccgattgacaggcggacaaagactgctgtgtgccggcctcgccggaaccctctctcttagcctgacagcccctcttgagttggcgacagttctagcccaggtgggcgtggtaaggggccacgcccgtggcccatgggccactgggcaccgcgtttggagagcagaaggtctgcgggccctgtggaagggtaatgcagtggcgtgtctccggttatttccttgttcagctgtgcagctggccgcctaccgtaaattcgttgtgctttttacagacgatctgggccatatctcccagtggtctagtataatggcaggcagcctcgccggtatggtgtctacaatagtcacttacccaactgacctgatcaagacacgccttatcatgcagaacattttagagccctcataccgcgggttgctgcatgccttctcaactatatatcagcaggagggctttctcgccctgtatcgaggtgtcagccttaccgtcgtgggctcagaacctctcccccccacccagtggaggtcacggtgccccttcctcagaagctcgggattactgcccgccgattccgagggcccgggtggccccggcgcattagaatggattgatagccagtttacggaggactcaagtattttctggaattacgtgtag

SEQ ID NO: 241031 - DNA, 870 bp, Artificial Sequence
  derived and/or modified sequence
atggccacctggaggagagatggccgcctgactggaggccagaggctgctgtgtgccggcctggccggcaccctgagcctgagcctgacagcccccctggagctggccgcctacaggaagtttgtggtgctcttcacagatgacctgggccacatcagccagtggagcagcatcatggccggcagcctggccggcatggtgtccaccatcgtgacctaccccacagacctgatcaagaccaggctcatcatgcagaacatcctggagcccagctaccggggcctgctgcacgccttcagcaccatctaccagcaggagggcttcctggccctgtaccggggcgtgtccctgactgtggtgggcgccctgcccttctctgctggcagcctgctggtgtacatgaacctggagaagatctggaatggcccccgggaccagttcagcctgccccagaactttgccaacgtgtgcctggccgctgctgtgacccagaccctgtccttcccctttgagaccgtgaagaggaagatgcaggcccagagcccctacctgccccacagcggaggagtggatgtgcacttctctggagctgtggactgcttccggcagatcgtgaaggcccagggcgtgctgggcctgtggaatggcctgacagccaacctgctgaagatcgtgccctacttcggcatcatgttcagcacctttgagttctgcaagaggatctgcctgtaccagaatggctacatcctgagccccctgagctacaagctgaccccaggagtggaccagagcctgcagccccaggagctgcgggagctgaagaagttcttcaagaccaggaagcccaagcccaagaagcccaccctgtag

SEQ ID NO: 241032 - DNA, 681 bp, Artificial Sequence
  derived and/or modified sequence
atggccacctggaggagagatggccgcctgactggaggccagaggctgctgtgtgccggcctggccggcaccctgagcctgagcctgacagcccccctggagctggccaccgtgctggcccaggtgggcgtggtgcggggccacgcccggggcccctgggccaccggccaccgggtgtggagggctgagggcctgcgggccctgtggaagggaaatgctgtggcctgcctgcggctcttcccctgcagcgctgtgcagctggccgcctacaggaagtttgtggtgctcttcacagatgacctgggccacatcagccagtggagcagcatcatggccggcagcctggccggcatggtgtccaccatcgtgacctaccccacagacctgatcaagaccaggctcatcatgcagaacatcctggagcccagctaccggggcctgctgcacgccttcagcaccatctaccagcaggagggcttcctggccctgtaccggggcgtgtccctgactgtggtgggcagcgagcccctgccccccacccagtggaggagccgctgccccttcctgcggagcagcggcctgctgcctgctgacagcgagggccctgggggccctggggccctggagtggattgacagccagttcacagaggacagcagcatcttctggaactacgtgtag

SEQ ID NO: 241033 - DNA, 870 bp, Artificial Sequence
  derived and/or modified sequence
atggccacctggcggcgggacggccggctgaccggcggccagcggttgctgtgtgctggcttagcaggcactctgtcactaagcttgaccgcccccttggaacttgctgcgtatcgaaaatttgttgtcctattcactgacgatttaggacacatatcccagtggagttctattatggcaggaagcctggctggaatggtcagcactatcgttacttatccaactgatctgatcaaaacccggctgatcatgcagaacattctggagccgtcttaccgcgggctgcttcatgcattctcaaccatctaccagcaggagggcttcctcgcattgtacaggggtgtgtctctaacagtcgtaggcgccctgccattttccgctgggtcccttctagtgtatatgaacctagaaaaaatttggaacggcccaagggatcagttctctctccctcagaatttcgccaacgtatgtctggccgcggcagttacccaaacattatctttcccctttgagacagttaagcgcaagatgcaggcccaaagcccatatcttccgcactctgggggcgtcgacgtgcacttttccggagccgtggactgcttcaggcaaatcgtgaaagctcagggcgtgcttgggctttggaacggactcaccgcaaacttactgaagatcgtcccatatttcgggatcatgtttagtacatttgagttctgcaaacggatttgcctgtatcaaaacggctatatcttgagcccgctgtcttataaactcacacccggcgtggatcagagcctgcagccccaggagctgcgtgaactgaaaaaatttttcaagacacgcaagccgaaaccgaagaaaccgacgttatag

SEQ ID NO: 241034 - DNA, 681 bp, Artificial Sequence
  derived and/or modified sequence
atggccacctggcggcgggacggccggctgaccggcggccagcggctgctgtgtgctggcctggccggcacactgtctctatccctgaccgccccgttagagctcgctactgtgctggctcaggtcggagtcgtgaggggacatgctcggggaccctgggcaaccggacaccgagtttggcgagcagaggggcttagagctctgtggaaaggtaacgccgtcgcatgcttgagactgttcccttgttcggcagtgcagcttgccgcctacagaaaatttgtcgtgctcttcacagacgatttgggacatataagtcaatggagctccatcatggcagggtctctggctgggatggtgagtacaatagttacttacccaaccgacttgattaagaccagactaatcatgcagaacatcctggaaccctcgtaccggggcctgctgcatgccttctctaccatctatcagcaggagggtttcttagcactgtataggggagtgtcactgaccgtggttggttccgaaccactccctcccacacaatggagatccagatgcccttttttgcgcagttcggggctgctacccgccgacagcgaaggccctggcggacccggggcgctggagtggatcgactcccaatttacagaggatagctcaattttctggaactatgtgtag

SEQ ID NO: 241035 - DNA, 870 bp, Artificial Sequence
  derived and/or modified sequence
atggccacatggcgaagagatggcaggctgactgggggtcagcggttgttatgtgccggtttggctggcactctttctctcagcctaactgcaccgctggagctggccgcttataggaagttcgtagtcttgtttactgatgacctgggccacatcagccagtggtcctcaattatggcgggtagtctggccggaatggtgtccacgattgtgacttatcctaccgacctcattaagacccgccttataatgcagaacatactcgaacccagctatcgtggactcctccacgccttctccaccatctaccagcaagagggattcctggctctatatagaggggtttctcttacagtcgtcggtgccttgccattttcagctggctccctgctggtctacatgaacctcgagaaaatctggaatggccctcgtgatcaattcagtttgcctcagaactttgctaacgtgtgcctggcagcggcagtgacccagacccttagtttccccttcgaaacagtcaagagaaaaatgcaggcccaatccccttacttgccacactcgggaggggtggacgtgcacttttccggagcagtcgactgctttcggcagattgtgaaggcccaaggagtgctcgggctgtggaacggattgaccgcgaaccttcttaaaattgtgccgtactttgggatcatgttttccacttttgagttctgtaagcggatctgtctgtatcagaatgggtacatcctcagtccgttgtcctataagcttactcccggtgttgaccagagcctgcagccacaggagctgagagaactcaagaagttttttaagacacggaagcccaaacctaaaaagccaactctgtag

SEQ ID NO: 241036 - DNA, 681 bp, Artificial Sequence
  derived and/or modified sequence
atggctacatggcggagagacggaaggctgacagggggtcagcggctgctctgtgctggcctggcagggacgctgtcactgtcccttaccgccccactggaactggccactgtactagctcaggtgggcgtcgtgaggggacacgctcgcggtccgtgggctaccggtcacagagtgtggagagccgagggcctacgtgccctctggaaagggaacgctgtcgcttgtctgcggctgtttccctgtagtgctgtgcaactcgcagcctatcggaaattcgtggttctattcaccgacgatctggggcatattagccaatggtcctccattatggccggatcactggctgggatggtcagcaccatcgtgacgtaccctacagatcttatcaagacaaggttaatcatgcagaatattcttgagccctcatataggggtctcttgcacgctttcagcacaatctaccaacaagagggttttttagccctgtatcgaggcgtgagtttgacggtggtgggaagtgagcctctcccgcctacacagtggcgcagccgttgcccatttctgcggtctagtggtctgctgcccgcagatagcgaggggccaggtggacccggagcattagagtggattgacagccagttcacagaggacagttctattttttggaactatgtgtag

SEQ ID NO: 241037 - DNA, 2783 bp, Artificial Sequence
  derived and/or modified sequence
cagggaggggcggcgggggcgcactgaacatttaggaagcaagatgtctagcaggctgggccttgagagaacagtaactgtttcgcaactgaaagtcgctactcgagccttgccaactggggagactatgcccatgatatccgcggcctcggaccccggaccctccaggccctcgcgccccacccccgaccagcctcgggccaggctagggcgtagacggggcttcccgtccctcacgcgggcccgccccatgccgggcggggcctggggcccgccacctccgcccgtggccggagagccccaggcccgagccacgcggtcttccgggcccgggtcggggctcgatggctacgtggaggcgggacggccgactgacaggcggccaaaggctgctgtgcgctgggctggcggggacgctcagcctcagcctcaccgcgcccctggagctcgccaccgtgctggcccaggttggcgtcgtgcgaggccacgcccggggaccgtgggccacagggcaccgggtgtggcgggcagaggggctccgggccctgtggaaggggaacgcggtggcgtgcctgcgcctcttcccctgcagcgccgtgcagctcgccgcctaccgcaaatttgttgtgctgttcacagatgacctgggccacatttcccagtggagctccatcatggctgggagtctcgcaggcatggtttccaccattgtaacatatcctacagacctcatcaaaacccggttgatcatgcagaacatactggaaccatcgtacagggggctcctccatgctttttctactatttaccaacaggaagggttccttgccctttatcgaggggtttccctcactgttgtaggtgctctcccgttctctgctggctcccttcttgtttacatgaacctggagaaaatctggaacggaccccgagatcagttctctctcccacagaactttgctaatgtctgtctggctgctgcagtgacccagaccctctcctttccctttgagaccgtgaagagaaagatgcaggctcagagcccctacctcccacacagtggaggagtagatgtccatttctcaggagcagtggactgcttccggcagatagtgaaggcccagggggtcctggggctctggaatggattgacagccaatttactgaagatagttccatattttggaattatgtttagcacctttgagttctgcaagagaatctgtctttatcaaaatggttacattctgtctccactgagctataaattgaccccaggagtcgatcagagtttgcagccccaggaattacgagaattaaagaagttcttcaaaacgagaaaaccgaagcctaaaaaaccaactctataaaatggaatggaactagaagtgcactgactgacagcatgttgcaatcacagataaatgtagcctcataactgtgcacctgaggagggatgagaagctactgctatctgctgctctgggaaatgagatggtttggccatgcaccacctcagatctccaaactgatgtccctgtgaacacctgcactatgagaaggtttcccaacaagagtgtatcatgatggcattccacgagattttataaccagagtctagcagtgataaaatgtacaatttacgctctgaatagaaacatgacaccaaagaaagggcattgccatgacatctcaaagcaacaggtaattgaagtggctgagtggataccacgttgtgaggtcagccactgggtcacttgtagtcaatgcaaagcttgcacaaaccaacgtcagcctagtttcactcagtttgacctgagactttccaatacaatctgttgttttgttttgtttttagagacagggtcttgctctgtcacccagactggagtacaatgacacaatcatagctcactgcagcctttaactactgggctcaagacatcctcctgcttcagcctccagagagttgggaccataggtgcacaccaccacacctagctaattttttggggaggtcttgctatgttgcccaggctggtcttgaactcctgggctcatgcaatcctcctgccttggcctcccaaagcgctaggattagaggtgtgagccgctgcaccctgccccagtacaatcttttttgaactcaaatttttgctgacatctgagtgcacacaccacagtgtaaattatgccttatcagaatctaaatgaaaatagcgaacatttaaaagctatcaccattgtagtagaatcatccttcttttttgaaatttgaagcatcccaggcttaaaatcttgtgtttcagaaagacagtttataccatgactgcttaattatccccccaaagaccttctgattgaagtcatgtacagttcagtggcctaaattctctgcctttttaacttgctttgcaagcctactctgaaaataagttatttagtcaagttattctcaaagatgtcccagttgcctagaaaggatcaaatggaacatttgacacacatactcaaaaaaatgtaactgactataaacactttaacctaatcatctgtatcaaactttctaaaaatcaaatctcaggattgttccactttagagattctatgtaaagtttatataactatacttgtcaaatagcacctatctatgcatttaaaaatgcattaatatctaacataaaattgttaatttatacacacacatacactcatacatagagagagattttcggtatgttgcaagtattttttccgattaaatttattttccaaagaaaaaa

SEQ ID NO: 241038 - DNA, 2273 bp, Artificial Sequence
  derived and/or modified sequence
atggctacgtggaggcgggacggccgactgacaggcggccaaaggctgctgtgcgctgggctggcggggacgctcagcctcagcctcaccgcgcccctggagctcgccgcctaccgcaaatttgttgtgctgttcacagatgacctgggccacatttcccagtggagctccatcatggctgggagtctcgcaggcatggtttccaccattgtaacatatcctacagacctcatcaaaacccggttgatcatgcagaacatactggaaccatcgtacagggggctcctccatgctttttctactatttaccaacaggaagggttccttgccctttatcgaggggtttccctcactgttgtaggtgctctcccgttctctgctggctcccttcttgtttacatgaacctggagaaaatctggaacggaccccgagatcagttctctctcccacagaactttgctaatgtctgtctggctgctgcagtgacccagaccctctcctttccctttgagaccgtgaagagaaagatgcaggctcagagcccctacctcccacacagtggaggagtagatgtccatttctcaggagcagtggactgcttccggcagatagtgaaggcccagggggtcctggggctctggaatggattgacagccaatttactgaagatagttccatattttggaattatgtttagcacctttgagttctgcaagagaatctgtctttatcaaaatggttacattctgtctccactgagctataaattgaccccaggagtcgatcagagtttgcagccccaggaattacgagaattaaagaagttcttcaaaacgagaaaaccgaagcctaaaaaaccaactctataaaatggaatggaactagaagtgcactgactgacagcatgttgcaatcacagataaatgtagcctcataactgtgcacctgaggagggatgagaagctactgctatctgctgctctgggaaatgagatggtttggccatgcaccacctcagatctccaaactgatgtccctgtgaacacctgcactatgagaaggtttcccaacaagagtgtatcatgatggcattccacgagattttataaccagagtctagcagtgataaaatgtacaatttacgctctgaatagaaacatgacaccaaagaaagggcattgccatgacatctcaaagcaacaggtaattgaagtggctgagtggataccacgttgtgaggtcagccactgggtcacttgtagtcaatgcaaagcttgcacaaaccaacgtcagcctagtttcactcagtttgacctgagactttccaatacaatctgttgttttgttttgtttttagagacagggtcttgctctgtcacccagactggagtacaatgacacaatcatagctcactgcagcctttaactactgggctcaagacatcctcctgcttcagcctccagagagttgggaccataggtgcacaccaccacacctagctaattttttggggaggtcttgctatgttgcccaggctggtcttgaactcctgggctcatgcaatcctcctgccttggcctcccaaagcgctaggattagaggtgtgagccgctgcaccctgccccagtacaatcttttttgaactcaaatttttgctgacatctgagtgcacacaccacagtgtaaattatgccttatcagaatctaaatgaaaatagcgaacatttaaaagctatcaccattgtagtagaatcatccttcttttttgaaatttgaagcatcccaggcttaaaatcttgtgtttcagaaagacagtttataccatgactgcttaattatccccccaaagaccttctgattgaagtcatgtacagttcagtggcctaaattctctgcctttttaacttgctttgcaagcctactctgaaaataagttatttagtcaagttattctcaaagatgtcccagttgcctagaaaggatcaaatggaacatttgacacacatactcaaaaaaatgtaactgactataaacactttaacctaatcatctgtatcaaactttctaaaaatcaaatctcaggattgttccactttagagattctatgtaaagtttatataactatacttgtcaaatagcacctatctatgcatttaaaaatgcattaatatctaacataaaattgttaatttatacacacacatacactcatacatagagagagattttcggtatgttgcaagtattttttccgattaaatttattttcc

SEQ ID NO: 241039 - DNA, 1032 bp, Artificial Sequence
  derived and/or modified sequence
cttccgggcccgggtcggggctcgatggctacgtggaggcgggacggccgactgacaggcggccaaaggctgctgtgcgctgggctggcggggacgctcagcctcagcctcaccgcgcccctggagctcgccaccgtgctggcccaggttggcgtcgtgcgaggccacgcccggggaccgtgggccacagggcaccgggtgtggcgggcagaggggctccgggccctgtggaaggggaacgcggtggcgtgcctgcgcctcttcccctgcagcgccgtgcagctcgccgcctaccgcaaatttgttgtgctgttcacagatgacctgggccacatttcccagtggagctccatcatggctgggagtctcgcaggcatggtttccaccattgtaacatatcctacagacctcatcaaaacccggttgatcatgcagaacatactggaaccatcgtacagggggctcctccatgctttttctactatttaccaacaggaagggttccttgccctttatcgaggggtttccctcactgttgtaggctcagagcccctacctcccacacagtggaggagtagatgtccatttctcaggagcagtggactgcttccggcagatagtgaaggcccagggggtcctggggctctggaatggattgacagccaatttactgaagatagttccatattttggaattatgtttagcacctttgagttctgcaagagaatctgtctttatcaaaatggttacattctgtctccactgagctataaattgaccccaggagtcgatcagagtttgcagccccaggaattacgagaattaaagaagttcttcaaaacgagaaaaccgaagcctaaaaaaccaactctataaaatggaatggaactagaagtgcactgactgacagcatgttgcaatcacagataaatgtagcctcataactgtgcacctgaggagggatgagaagctactgctatctgctgctctgggaaatgagatggtttggccatgcaccacctcagatctcc

SEQ ID NO: 241040 - DNA, 870 bp, Artificial Sequence
  derived and/or modified sequence
atggccacctggagaagagacggcagactgaccggcggccagagactgctgtgcgccggcctggccggcaccctgagcctgagcctgaccgcccccctggagctggccgcctacagaaagttcgtggtgctgttcaccgacgacctgggccacatcagccagtggagcagcatcatggccggcagcctggccggcatggtgagcaccatcgtgacctaccccaccgacctgatcaagaccagactgatcatgcagaacatcctggagcccagctacagaggcctgctgcacgccttcagcaccatctaccagcaggagggcttcctggccctgtacagaggcgtgagcctgaccgtggtgggcgccctgcccttcagcgccggcagcctgctggtgtacatgaacctggagaagatctggaacggccccagagaccagttcagcctgccccagaacttcgccaacgtgtgcctggccgccgccgtgacccagaccctgagcttccccttcgagaccgtgaagagaaagatgcaggcccagagcccctacctgccccacagcggcggcgtggacgtgcacttcagcggcgccgtggactgcttcagacagatcgtgaaggcccagggcgtgctgggcctgtggaacggcctgaccgccaacctgctgaagatcgtgccctacttcggcatcatgttcagcaccttcgagttctgcaagagaatctgcctgtaccagaacggctacatcctgagccccctgagctacaagctgacccccggcgtggaccagagcctgcagccccaggagctgagagagctgaagaagttcttcaagaccagaaagcccaagcccaagaagcccaccctgtag

SEQ ID NO: 241041 - DNA, 681 bp, Artificial Sequence
  derived and/or modified sequence
atggccacctggagaagagacggcagactgaccggcggccagagactgctgtgcgccggcctggccggcaccctgagcctgagcctgaccgcccccctggagctggccaccgtgctggcccaggtgggcgtggtgagaggccacgccagaggcccctgggccaccggccacagagtgtggagagccgagggcctgagagccctgtggaagggcaacgccgtggcctgcctgagactgttcccctgcagcgccgtgcagctggccgcctacagaaagttcgtggtgctgttcaccgacgacctgggccacatcagccagtggagcagcatcatggccggcagcctggccggcatggtgagcaccatcgtgacctaccccaccgacctgatcaagaccagactgatcatgcagaacatcctggagcccagctacagaggcctgctgcacgccttcagcaccatctaccagcaggagggcttcctggccctgtacagaggcgtgagcctgaccgtggtgggcagcgagcccctgccccccacccagtggagaagcagatgccccttcctgagaagcagcggcctgctgcccgccgacagcgagggccccggcggccccggcgccctggagtggatcgacagccagttcaccgaggacagcagcatcttctggaactacgtgtag

SEQ ID NO: 241042 - DNA, 366 bp, Artificial Sequence
  derived and/or modified sequence
atggtgagaatcctggccaacggcgagatcgtgcaggacgacgaccccagagtgagaaccaccacccagccccccagaggcagcatccccagacagagcttcttcaacagaggccacggcgccccccccggcggccccggccccagacagcagcaggccggcgccagactgggcgccgcccagagccccttcaacgacctgaacagacagctggtgaacatgggcttcccccagtggcacctgggcaaccacgccgtggagcccgtgaccagcatcctgctgctgttcctgctgatgatgctgggcgtgagaggcctgctgctggtgggcctggtgtacctggtgagccacctgagccagagatag

SEQ ID NO: 241043 - DNA, 366 bp, Artificial Sequence
  derived and/or modified sequence
atggtcaggatcctggcaaacggcgaaatcgtccaagatgatgaccctagggttcgtaccacgactcagccacctcgcggttctattcctcggcaatcattcttcaatcggggtcatggagctccacccgggggcccaggtcctagacagcagcaagctggcgctagactgggggctgcccaatcccctttcaatgacctgaaccgacagttggtcaatatgggtttccctcagtggcatctaggaaatcacgccgtcgaaccagtcacatcaatactgctcctctttttgctaatgatgttaggcgttcgcgggctgctgctggtgggcctggtttatttggtttctcatctaagccaacgatag

SEQ ID NO: 241044 - DNA, 366 bp, Artificial Sequence
  derived and/or modified sequence
atggtgcgcatcctggccaatggagagatcgtgcaggatgatgacccccgggtgaggaccaccacccagcccccccggggcagcatcccccggcagagcttcttcaacagaggacatggagcccctcctgggggccctggcccccggcagcagcaggccggggcccggctgggcgccgcccagagccccttcaatgacctgaaccggcagctggtgaacatgggcttcccccagtggcacctgggcaaccacgctgtggagcctgtgaccagcatcctgctgctcttcctgctgatgatgctgggcgtgcggggcctgctgctggtgggcctggtgtacctggtgagccacctgagccagaggtag

SEQ ID NO: 241045 - DNA, 366 bp, Artificial Sequence
  derived and/or modified sequence
atggtgcggatcctggccaacggcgagatcgtgcaggacgacgacccaagggtgaggacaactacgcagccgcctagggggtcgataccacggcagagttttttcaaccgggggcacggggcccctcctggaggacccgggccgcgccagcaacaagccggcgccagactgggggccgcccaatctccctttaacgatttgaaccgtcagcttgtaaatatggggttccctcagtggcatctggggaatcatgcagtggaaccagtcacaagcatactactgctctttctgttaatgatgctgggagtgaggggtctgctgctcgtcgggctggtgtacttggttagtcacctaagccagcgctag

SEQ ID NO: 241046 - DNA, 366 bp, Artificial Sequence
  derived and/or modified sequence
atggtgcgtatccttgccaacggcgaaatcgtgcaggatgacgatcctcgagtgcgcacgacaactcaacctcctcgagggagtatccccagacagtcattcttcaatcgtggccatggagctcctccaggcggacctgggcctcggcagcagcaagctggcgctcggttgggtgctgctcagtccccttttaacgatcttaaccgccagttggtgaacatgggcttcccacagtggcatctgggtaatcacgccgtggagcccgttactagcatactcctgttgtttctccttatgatgttaggcgttcggggtttactgcttgtgggcctggtctacctggtgtcgcatctgtcccagcggtag

SEQ ID NO: 241047 - protein, 609 aa, Artificial Sequence
  derived and/or modified sequence
MEGPSLRGPALRLAGLPTQQDCNIQEKIDLEIRMREGIWKLLSLSTQKDQVLHAVKNLMVCNARLMAYTSELQKLEEQIANQTGRCDVKFESKERTACKGKIAISDIRIPLMWKDSDHFSNKERSRRYAIFCLFKMGANVFDTDVVNVDKTITDICFENVTIFNEAGPDFQIKVEVYSCCTEESSITNTPKKLAKKLKTSISKATGKKISSVLQEEDDEMCLLLSSAVFGVKYNLLAHTTLTLESAEDSFKTHNLSINGNEESSFWLPLYGNMCCRLVAQPACMAEDAFAGFLNQQQMVEGLISWRRLYCVLRGGKLYCFYSPEEIEAKVEPALVVPINKETRIRAMDKDAKKRIHNFSVINPVPGQAITQIFAVDNREDLQKWMEAFWQHFFDLSQWKHCCEELMKIEIMSPRKPPLFLTKEATSVYHDMSIDSPMKLESLTDIIQKKIEETNGQFLIGQHEESLPPPWATLFDGNHQMVIQKKVLYPASEPLHDEKGKKRQAPLPPSDKLPFSLKSQSNTDQLVKDNWGKTSVSQTSSLDTKLSTLMHHLQKPMAAPRKLLPARRNRLSDGEHTDTKTNFEAKPVPAPRQKSIKDILDPRSWLQAQV

SEQ ID NO: 241048 - DNA, 1830 bp, Artificial Sequence
  derived and/or modified sequence
atggagggccccagcctgagaggccccgccctgagactggccggcctgcccacccagcaggactgcaacatccaggagaagatcgacctggagatcagaatgagagagggcatctggaagctgctgagcctgagcacccagaaggaccaggtgctgcacgccgtgaagaacctgatggtgtgcaacgccagactgatggcctacaccagcgagctgcagaagctggaggagcagatcgccaaccagaccggcagatgcgacgtgaagttcgagagcaaggagagaaccgcctgcaagggcaagatcgccatcagcgacatcagaatccccctgatgtggaaggacagcgaccacttcagcaacaaggagagaagcagaagatacgccatcttctgcctgttcaagatgggcgccaacgtgttcgacaccgacgtggtgaacgtggacaagaccatcaccgacatctgcttcgagaacgtgaccatcttcaacgaggccggccccgacttccagatcaaggtggaggtgtacagctgctgcaccgaggagagcagcatcaccaacacccccaagaagctggccaagaagctgaagaccagcatcagcaaggccaccggcaagaagatcagcagcgtgctgcaggaggaggacgacgagatgtgcctgctgctgagcagcgccgtgttcggcgtgaagtacaacctgctggcccacaccaccctgaccctggagagcgccgaggacagcttcaagacccacaacctgagcatcaacggcaacgaggagagcagcttctggctgcccctgtacggcaacatgtgctgcagactggtggcccagcccgcctgcatggccgaggacgccttcgccggcttcctgaaccagcagcagatggtggagggcctgatcagctggagaagactgtactgcgtgctgagaggcggcaagctgtactgcttctacagccccgaggagatcgaggccaaggtggagcccgccctggtggtgcccatcaacaaggagaccagaatcagagccatggacaaggacgccaagaagagaatccacaacttcagcgtgatcaaccccgtgcccggccaggccatcacccagatcttcgccgtggacaacagagaggacctgcagaagtggatggaggccttctggcagcacttcttcgacctgagccagtggaagcactgctgcgaggagctgatgaagatcgagatcatgagccccagaaagccccccctgttcctgaccaaggaggccaccagcgtgtaccacgacatgagcatcgacagccccatgaagctggagagcctgaccgacatcatccagaagaagatcgaggagaccaacggccagttcctgatcggccagcacgaggagagcctgccccccccctgggccaccctgttcgacggcaaccaccagatggtgatccagaagaaggtgctgtaccccgccagcgagcccctgcacgacgagaagggcaagaagagacaggcccccctgccccccagcgacaagctgcccttcagcctgaagagccagagcaacaccgaccagctggtgaaggacaactggggcaagaccagcgtgagccagaccagcagcctggacaccaagctgagcaccctgatgcaccacctgcagaagcccatggccgcccccagaaagctgctgcccgccagaagaaacagactgagcgacggcgagcacaccgacaccaagaccaacttcgaggccaagcccgtgcccgcccccagacagaagagcatcaaggacatcctggaccccagaagctggctgcaggcccaggtgtag

SEQ ID NO: 241049 - DNA, 1830 bp, Artificial Sequence
  derived and/or modified sequence
atggaagggcccagtctcaggggccctgctttgagactggcgggattgcctacccagcaggattgcaatattcaagaaaagatcgacttagagatacgaatgagagaagggatctggaaactgctgagtctctcaacccagaaagaccaggtgctccatgcggtaaaaaacctgatggtgtgtaacgccaggctcatggcttacacaagcgagctgcaaaaactggaagagcagattgccaaccagactggcagatgcgacgtgaagttcgaatccaaggagcgaactgcgtgcaaaggaaaaatagcgattagcgacatccggatcccattgatgtggaaggatagcgatcacttttccaataaagagagatcaaggagatatgctatcttctgcctgtttaaaatgggtgcgaacgtgtttgatacagatgtggtgaatgtcgataaaacgatcacagatatatgttttgagaacgtaacgatcttcaacgaagcgggacccgatttccagatcaaggtcgaggtatattcctgctgtaccgaggagtcttccataaccaatactccaaaaaaactggcaaagaagctaaagactagcattagtaaagccactggcaagaaaatctcttctgtgctgcaagaagaagatgatgaaatgtgcctgctgctgagttccgccgtgtttggagtcaagtataacttgttggcccacacaacattgactctggagagcgctgaggacagcttcaagacacacaaccttagtatcaatggcaacgaagagtcctctttttggctgcccctgtacggcaacatgtgttgtcgactcgttgcccaacccgcctgcatggccgaggatgcctttgcaggctttcttaatcaacagcagatggttgagggtcttatctcttggaggcgcctctattgtgtgctgcggggggggaaattatattgtttttatagtcctgaggagatcgaagcaaaagtggaacccgccctggtggtgcccattaacaaggaaactaggatcagggccatggacaaggatgccaagaaacggatccataacttctcagtcataaatcctgtcccagggcaggccatcacgcagatcttcgccgtggataatagggaggatctgcaaaaatggatggaggctttctggcagcacttttttgatcttagtcagtggaaacactgttgcgaagaacttatgaagatcgagatcatgtccccaaggaagcctccgctgttcctgactaaggaggcaacgagtgtgtaccacgatatgagcatcgattcccccatgaaactggaaagtctcacagatataatccagaagaaaatagaggagacaaatggacagttcctgataggccaacatgaggaatctctccccccgccgtgggccactttgtttgatggcaaccatcaaatggtcatccagaagaaggtgttataccccgcctccgaaccactccacgacgaaaaaggtaagaaaaggcaagcccccctcccacccagcgacaagcttccgttttccttgaaaagccagagcaataccgatcagctggtcaaagacaattggggcaagacttcagtgtcacagacatcttcccttgatactaagttgtccacactgatgcatcacctgcagaaaccaatggcagccccccgcaagcttttacccgcccggcgtaatcggctgtccgacggagagcacaccgatactaagaccaactttgaggccaaacccgtacctgcacctagacagaagagtattaaagatattctggacccaaggtcatggctgcaggcccaggtttag

SEQ ID NO: 241050 - DNA, 1830 bp, Artificial Sequence
  derived and/or modified sequence
atggagggccccagcctgcggggccctgccctgcggctggccggcctgcccacccagcaggactgcaacatccaggagaagattgacctggagatccgcatgagggagggcatctggaagctgctgagcctgagcacccagaaggaccaggtgctgcatgctgtgaagaacctgatggtgtgcaatgcccggctgatggcctacaccagcgagctgcagaagctggaggagcagatcgccaaccagacaggccgctgtgatgtgaagtttgagagcaaggagaggacagcctgcaagggcaagatcgccatcagtgacatccgcatccccctgatgtggaaggacagcgaccacttcagcaacaaggagaggagccgccgctatgccatcttctgcctcttcaagatgggcgccaacgtgtttgacacagatgtggtgaatgtggacaagaccatcacagacatctgctttgaaaatgtgaccatcttcaatgaggccggccctgacttccagatcaaggtggaggtgtacagctgctgcacagaggagagcagcatcaccaacacccccaagaagctggccaagaagctgaagaccagcatcagcaaggccaccgggaagaagatcagctctgtgctgcaggaggaggatgatgagatgtgcctgctgctgagcagcgctgtgtttggagtgaagtacaacctgctggcccacaccaccctgaccctggagagcgcagaagattccttcaagacccacaacctgagcatcaatggaaatgaggagagcagcttctggctgcccctgtatggcaacatgtgctgccgcctggtggcccagcctgcctgcatggccgaggatgcctttgctggcttcctgaaccagcagcagatggtggagggcctcatctcctggaggcggctgtactgtgtgctgcggggcggcaagctgtactgcttctacagccctgaggagattgaggccaaggtggagcccgccctggtggtgcccatcaacaaggagacccgcatccgggccatggacaaggatgccaagaagaggatccacaacttcagcgtcatcaaccctgtgcccggccaggccatcacccagatctttgctgtggacaaccgggaggacctgcagaagtggatggaggccttctggcagcacttctttgacctgagccagtggaagcactgctgtgaggagctgatgaagattgagatcatgagccccaggaagccacccctcttcctgaccaaggaggccacctctgtgtaccatgacatgagcattgacagccccatgaagctggagagcctgacagacatcatccagaagaagattgaggagaccaacggccagttcctgattggccagcacgaggagagcctgcccccaccctgggccaccctgtttgatggcaaccaccagatggtgatccagaagaaggtgctgtacccagccagcgagcccctgcatgatgagaagggcaagaagaggcaggcccccctgcccccaagtgacaagctgcccttcagcctgaagagccagagcaacacagaccagctggtgaaggacaactggggcaagacctctgtgtcccagaccagcagcctggacaccaagctgagcaccctgatgcaccacctgcagaagcccatggccgcccccaggaagctgctgcctgcccggaggaaccggctgagtgatggagagcacacagacaccaagaccaactttgaggccaagcctgtgcctgccccccggcagaagagcatcaaggacatcctggaccccaggtcctggctgcaggcccaggtgtag

SEQ ID NO: 241051 - DNA, 1830 bp, Artificial Sequence
  derived and/or modified sequence
atggagggccccagcctgcggggccccgccctgcggctggccggcttaccaactcaacaagattgtaatatccaggagaaaattgacttggagatacgaatgagagagggaatctggaaactcctcagtctgtcaacccaaaaagaccaggttctgcacgcggttaaaaatctgatggtctgcaacgcgcggctcatggcttatacttcagaacttcaaaagttagaggagcagatcgcaaatcaaactggtaggtgcgacgtgaaattcgaaagcaaagagcggacggcatgcaagggcaaaatcgcaatcagtgacattcgtataccactaatgtggaaagacagcgatcatttcagcaacaaggagcgctcccggaggtacgcaattttctgcctgttcaagatgggcgccaacgtcttcgataccgatgttgtcaatgttgacaagactattacagacatctgcttcgagaacgtgactattttcaacgaagcaggaccagacttccagattaaagtcgaggtttattcgtgctgcacagaggagagttcgattacaaatacccctaagaagctcgctaagaagctgaagaccagtatcagtaaagctacaggcaaaaagataagctccgtcctgcaggaagaagatgatgagatgtgcttactactatcaagcgccgtgtttggagtaaagtataatcttctggcacatactactctgactctagagtcagccgaagactcatttaagacccacaacctgtctattaatggcaatgaagagtcatctttttggctgcctttgtatggaaatatgtgctgccggctggtggctcagcccgcttgcatggcagaggacgccttcgccgggtttttgaatcagcagcagatggtggagggtctgattagttggcgccgactgtactgtgttttgaggggcggaaaactgtactgcttttactcaccagaggaaatagaagccaaggtggagcctgcacttgtggtgccaattaataaagagacacggatccgcgccatggataaagatgccaagaagagaattcacaatttctccgttataaacccggtgccggggcaggcaattacccaaatctttgcagtcgataaccgcgaggatctccagaaatggatggaggcattctggcagcacttcttcgatttgagtcagtggaagcattgttgcgaagaacttatgaagatcgagatcatgtccccccgaaagcccccacttttcctgacgaaagaggcgacatctgtgtatcacgacatgtctattgactcacccatgaaattggagagtctgacagacatcattcaaaaaaagatagaggagacaaacgggcagtttctcataggccagcacgaggaaagcctgccacccccctgggctaccctcttcgatggtaatcaccagatggttattcaaaagaaagtgctgtaccccgcttcagagccactccacgatgagaaaggtaagaaaaggcaagcaccgctgcctccctccgacaaactacctttctccctgaagagccagtcaaacacagatcagcttgtcaaggataactggggaaaaaccagtgtctcccagacaagctctcttgataccaagctctccacccttatgcaccatctgcagaaacccatggcagcccccagaaaactgctgccggctcgccgcaataggctgagtgacggagagcacaccgatacaaagaccaacttcgaagcaaaaccggtgccagcgcctcgacagaagtctataaaagatatcctggatcccaggagttggctgcaggctcaagtgtag

SEQ ID NO: 241052 - DNA, 1830 bp, Artificial Sequence
  derived and/or modified sequence
atggagggcccttcattaagaggtccagcactcaggctggccggactcccaacccaacaggactgcaatattcaggagaagatcgacctagaaattcggatgcgggaaggcatatggaaactcctcagtctgtctacgcagaaggatcaagtcctgcatgcagtaaagaacctcatggtctgcaatgctcgcctgatggcctacacctccgagcttcagaagctggaagaacagattgcgaatcagaccggtagatgtgacgtgaaattcgagagtaaggagcgcactgcatgcaaagggaaaatcgccatcagcgatattagaatccctctcatgtggaaggatagcgatcacttttctaacaaggaacggagtagacgctacgcaatattctgcctgttcaagatgggcgctaacgtgttcgacaccgacgtggtaaatgtggataagacgattaccgacatatgtttcgagaatgtgaccatttttaacgaggcaggaccagatttccagatcaaggtggaagtttatagttgctgtactgaagaaagttctatcacaaatacacctaaaaaacttgccaagaagttaaaaacaagcatcagtaaggctacaggcaaaaagatctccagcgtactgcaagaagaagatgacgaaatgtgccttctactttcatcagctgtatttggcgtgaaatacaatttgctggcccacaccacactgacattagagtccgctgaagactcttttaagacacacaatctctccattaatggcaatgaggagtcgagcttctggctacctctttatgggaatatgtgttgtcgcctggtggctcagcctgcctgcatggcagaggacgcctttgcaggctttttgaatcagcagcagatggttgaggggttgatctcatggaggaggctgtactgcgtcctcaggggcggaaagttgtactgcttctacagccctgaagaaatcgaagcaaaggtggagccagccctcgtggtcccaatcaataaggagaccagaattcgcgctatggacaaggatgccaagaagcgcatccataatttcagtgtgatcaatcctgttcccggtcaggccattactcagatctttgctgtggacaatcgggaagacctccagaagtggatggaggcattctggcagcactttttcgatctttcacagtggaaacattgctgcgaagagcttatgaagatcgagattatgtccccacgcaagccccctctattccttacaaaggaggccacatctgtgtatcacgacatgagcatagacagtcctatgaaacttgagtccttgaccgatataatacagaaaaaaattgaggagaccaacgggcagttcctgataggccaacacgaagagtctctgccacctccctgggccactctgtttgacggcaaccatcagatggtgatccagaaaaaggttctttaccccgcaagtgaaccccttcacgatgaaaaaggcaaaaagaggcaggccccactcccaccttcagataaattgccattttctttaaaatcgcaatcgaacacggaccagctggtaaaggataactgggggaaaacaagtgtgtcacaaacctcctctctggatactaagctaagtactctgatgcaccacttgcaaaagccgatggcagcccctcgtaagttgttgccggcaagaaggaatagactcagcgacggagaacacacagacaccaagactaatttcgaggctaaaccagtgccagctcccaggcagaaatctatcaaggatatactggatcctcgctcttggctccaggcacaggtatag

SEQ ID NO: 241053 - DNA, 6641 bp, Artificial Sequence
  derived and/or modified sequence
ccgggcggttggcgtcctctgcggctcctgccaggggcgggcttttcaaatcttccctttgaaggagtggcgacggcccggacagttcgcgttggagatggaggggccgagcctgaggggtcctgcgctccgcctggcggggcttcccacccagcaggactgcaacattcaagaaaaaatagacttagaaattcgaatgcgagaaggaatatggaaactcctttctctgagcactcagaaagatcaagttttacatgcagttaagaatctcatggtgtgcaatgctcgactaatggcctatacatcggagctacagaaattagaagaacagattgcaaatcagactggaagatgtgatgtgaaatttgaaagtaaagaacgaacagcatgtaaaggaaagattgccatatcagatattcgaataccactaatgtggaaagactctgatcacttcagcaataaagaacgatcacgacgctatgccattttttgtttattcaaaatgggagctaatgtgtttgatactgatgtggtgaatgtggataaaacaatcacagatatatgttttgaaaatgtaaccatatttaatgaagcagggccagactttcagataaaggtggaagtgtatagttgctgtacagaagaatcttctataaccaacacaccaaaaaagctagctaagaaactcaagacatctataagtaaagctacaggaaagaaaataagttcagtgcttcaagaagaggatgatgaaatgtgcttgctcctcagctctgctgtttttggtgtaaagtataatttgctagctcacactaccctaaccttggaaagtgctgaggatagtttcaagacccataatctgtctattaatggaaatgaggagtcttcattttggcttcccctgtatggcaacatgtgctgccgactagttgcccagccagcttgtatggctgaggatgcatttgcaggatttcttaatcagcagcaaatggtagaaggtctgattagttggagaaggttgtattgtgttttgcgaggaggtaaactctattgtttttacagtccagaggaaattgaagctaaagtggaaccagctttggtagtacccattaacaaggaaaccagaatccgggcaatggataaggatgccaagaaaagaatccataatttctctgtcatcaatcctgttcctggacaagctataactcagatttttgcagttgacaatagagaagatcttcagaagtggatggaagccttctggcagcatttctttgatcttagccaatggaagcactgttgtgaagaacttatgaaaattgagattatgtcaccacggaaaccacctttgttcttgacaaaagaggcaacctcagtctaccatgatatgagcattgattcacctatgaaacttgaaagtttaacggatataatacaaaaaaaaattgaagagacaaatgggcagttccttattggtcagcatgaagaatccttaccacctccttgggccacactctttgatggtaaccatcaaatggtcatccagaaaaaggtactgtatcctgcaagtgagccattacatgatgaaaaagggaaaaagagacaagctccccttcctccttctgataaacttccattcagcttaaaatcacagagtaacacagatcaattggttaaggacaactggggaaaaacaagtgtatctcagacatcgtctttggataccaaactatcaactctaatgcatcacttacagaaaccaatggctgctcctcgaaaacttctgcctgccaggagaaatagattaagtgatggtgagcacacagacactaaaaccaattttgaagccaagccagtgccagctccaaggcagaaatccatcaaagacattctggaccctagatcatggctgcaggcacaagtatagaaaactcttaatgataaaacatttaacaaaatctataactgtgaagcttaattcagaggcattatagaataatgtgtaattatataggtaaatatagtgatttataccaataattaataagctattaggtatagaaaaacattttataatgaagaagtggatttctcttttactcctgatttgcagaatgtaagtgatttctccagcagtgtgcaagaggcagtttctagacaatatcctaattgttggaagggttaatttattcctgaattagtaccaggcagtgaataagccctaggcagaataaagcattaaaatttcttttggggagagactgtctagtaatttaaaatgtgttaaatatgaaccatattctcattgtgagaattttaatactaatggaatgtttcaaaggttttattcaaaccacaaattatagaatccacccaagaaaattttcttagcattctggaattctcatctaatggttcactggctctcatctattgtttaactcactagtttataggcctgaccttttaaattcctgggataaattttagaatattaaattcttcatctttaaagggaatttgtaatgtgctattcaaacttgtttccttgatgagccctgaaatactgttgacattaactttcataaatgaagcataacacttactagtttagagaaatggtagatgaaatgctctttacattcaattttctgtgtgtggtgctaatttccattgtgactttggaatttagggaagtgagtagctgatcaacaccttaaaattcatttaatacttatttaaaaagaagatgagagattcaaaaatatcagaaaagttggccatggtaaataattttcagaattcttttttaaaattttaattagatttccttttcctagtaagagttgatgtctgctagtggtatttttcattaaatgtcatattcttacaacagtgacattggaatcatttccataggaggtaatttccatagcaactaatcatagtgacccaaacaggattataaagtcaagtgaggaataaatagcagaaaaataccttaaaggaacaaaaaatccattttttataataatgctttttgtaaacaagagcagaacagttttaaaaatctaattagaatttccaaataaaacagtttccataaggtgtcagcaacagcactaaaaatctcaaatcacactgaaccctaaatgtcattgcaagaaataaaaatttaagaattaaattgctgccctgtgtataatctcttgagatctttttaaagctagcaagaactctatttggatcagaactacattattacaaaacaaaatgaacacttgaccaaaaaaccacattaatttaaatggagcctttcattattttcagatagcggggtcttttccatttatagagaatgatgtaactgccaggacacttttgtgtttgcccaggactcctagtaagaattgaatcttgagggagtaatgataacaaaaggtttcttgtgactggtaacatcaggacagacagagtttttggtgagaagaaagtactatatgcctgcttgatagcatgtagagatcatcacatgtatggaaaccttaaaaagtaaacttattttttctaactagaaggctctcataagtttctgttatgattgccatttcaataaatgacattaaaaatctaaaggatattattgtttgaatttttgggttattttttaaaacttcattgctgtttttgacagcatttgtgactgtcattgccactaaattattgagctagaagatgctgcagggaaaattgttttgaagctggcatctaagcattcttttttttttcctagttgatgccttcctttattacaaatcagtattaaaacttccagattatattcttgtcatttttcctcatgcagataacagcaggaaggacttaaggtgtataagaaaaagaaagtattcatacagaaattacctagcagttgtgccctcagagtagaactttgaaacaggactgaagccctttttacctagaaccatttaaaagcctgagcaaggaccaccaccccctccccaccaaattattcggtctctttctggggggcccagcttactgtatgttacaagtctttgaaatgggtctggtgtcttcagctcctgaaatgctaatttaccccttacctaaggagtgtagttataatacagagttggtttccttccttccttccttccttccttccttccttccttccttccttccttccttccttccttccttcattccctctgtccgtctctccttccctccttccctccttccttcctttttgtctttgtttctttctctggccccctgtcctctctctctgtctcatccccttttcccactttccttctgtctctccttcctcccttcctttacagtttaaaaaaaaaatctaaaaatagttaagcactgtgtcaaagagtgtttcaaaagaattgtttgttttctcatttcttaaaccagaagtttatgacaaataaatatgccatgtaatatgaaagctgcttcagctttttatgagctttcacattccttgtttgtccttttaatttgtttcttgatatatgaagactataaacttgaaacaaagagttagctgtcagctcttgataatataattggggaaacagaatagatattttatgatatgataattctgatgatctaaagataatgtcttagacaattacctttacatttcaagctctgggatataaattacgtagtcagcattaagatagtattatttttaattgctactaagtggtaacttttgtattttaatatcttgcaagggcaaagaaggcatttttaaaattctaaatgcacacctcctaaggtaaatagtctttcaaaaatatcaggcgtgccaactcttgctgagttttgttaaatcctccttaactgtctgcagtgccccctgacttcttttaaatggatgtgaatatatgtggaaaactaaatccatttattataaatgccttatctttaccctttgggatcttactaaatgcattttacctgctactatttattaaaaatggaagctgtcttgaattagagatacctcacgtaaggtaggttaagcagtcaagtatttctttaggcttatgttcagcacctcagccccctactgagaagttaattaattcagtccaaaatgaaattatagggcagtttggtgcaatttatgttaaatgccatttgaatgtaatcacctgtgttaccacgaatgaggcacaactatactacatggacagagtactgcattgcaccatgagcaagaactgctctgcaagaaaaatatctgtccctgtggtctgaatttatcaaaactcattttcttgttaaagagtgaattattgaatagtaattaaactttaactgatgaccatttatattctagtagccatcttcactgttagtcttaaattataatgtaaagttgacattttccccttacatttcaaaggcatcactatttttaaatgtttacatatgtttacatgtttgtgtgcaactgcttcattgctattaatagttaaatgaaatctgcatattctggatcatagatgttcttagttaactctgggaaagatgttacctttgggtttttaaaagacaagtcatcatttgaaaatatattagggtgtgttgattttctgacatgcttgtgtaattggctttgtttataatttttattttttaatatgggtcagacttttggattaaaaagtattatatcatggacatacattttttaaagtaccaaaggtatttggtaagcgagcccaagtcatgtaattgaaacttctgtacattaaaagaactgattcatgaagacgttttctaactttttctctttaagtgctcctctagactagactgattgaagtagacagtgtggtggaatcagtttaatcagaaaaagacataccaagtagctggtgctaattattataagactaacattctgataagccatggtataattaacattattaaaatgtttacatataatccttcttaaagtatactcttttaaaaatccattgacataaccttacttttagtttagtgatccagaatttccccagagcttaagccactgcagtaaattaggtacgtaggatattcagtcgctactagccacaaggagtctccttattttaatgtacctccctcagtactttattcctgcagagcgcctcagagtgggggagagaaatgagcaatcctggctcagttggattatttcagcattttatttctaaatctgtagtgtgatcagaaatatttaaaattaaaaaaatactttacagagagaggcctactaatcaatgtgcttagagaaacaaactacctttacattcaattaacaacaaaaaaagttacagaaattttaacaaacatttttctttatctgagtatgggagaaaatactaatgctgacacgtttaataattagaaaagatcattccagatcttatggaaaattgtgttttaaattccagcagtttgctcttgagacatggtaatctcttaatgtaactactaaaggagaggtagattgaaaagatcttgtatatacataattatgtcagatggttcaagatatcaaaataaattgttttgttgaaaatgaa

SEQ ID NO: 241054 - protein, 192 aa, Artificial Sequence
  derived and/or modified sequence
MNKRDYMNTSVQEPPLDYSFRSIHVIQDLVNEEPRTGLRPLKRSKSGKSLTQSLWLNNNVLNDLRDFNQVASQLLEHPENLAWIDLSFNDLTSIDPVLTTFFNLSVLYLHGNSIQRLGEVNKLAVLPRLRSLTLHGNPMEEEKGYRQYVLCTLSRITTFDFSGVTKADRTTAEVWKRMNIKPKKAWTKQNTL

SEQ ID NO: 241055 - protein, 146 aa, Artificial Sequence
  derived and/or modified sequence
MNKRDYMNTSVQEPPLDYSFRSIHVIQDLVNEEPRTGLRPLKRSKSGKSLTQSLWLNNNVLNDLRDFNQVASQLLEHPENLAWIDLSFNDLTSIDPVLTTFFNLSVLYLHGNSIQRLGEVNKLAVLPRLRSLTLHGNPMEEEKGYR

SEQ ID NO: 241056 - protein, 92 aa, Artificial Sequence
  derived and/or modified sequence
MNKRDYMNTSVQEPPLDYSFRSIHVIQDLVNEEPRTGLRPLKRSKSGKSLTQSLWLNNNVLNDLRDFNQVASQLLEHPENLAWIDLSFNDLT

SEQ ID NO: 241057 - protein, 104 aa, Artificial Sequence
  derived and/or modified sequence
MNKRDYMNTSVQEPPLDYSFRSIHVIQDLVNEEPRTGLRPLKRSKSGKSLTQSLWLNNNVLNDLRDFNQVASQLLEHPENLAWIDLSFNDLTSIDPVLTTFFNL

SEQ ID NO: 241058 - DNA, 579 bp, Artificial Sequence
  derived and/or modified sequence
atgaacaaaagggactatatgaacacgtccgtccaggaacctccgcttgattattcgtttcgcagcattcatgtgatccaggatctggtgaacgaggagcccagaactggattgagacctctaaaaagaagcaagtccgggaagagtctgacccagtcgttgtggctgaataataacgtgcttaatgatctgcgggattttaatcaggttgcctctcagttgctggaacacccagagaatctcgcttggatcgatctcagtttcaacgacttgacaagcattgatccagtgctgaccacatttttcaacctaagcgtactttacctccatgggaattctatccagagactgggagaggttaataaactggcagtgctgcctagacttcgatcgctcaccttacatggcaaccccatggaagaagagaaagggtacagacagtacgttttatgtacactgagtcgaatcactacctttgacttttcaggggtcacaaaggcagaccgcacaaccgccgaggtatggaaacggatgaacattaaacctaagaaagcgtggacgaagcagaatacactttag

SEQ ID NO: 241059 - DNA, 579 bp, Artificial Sequence
  derived and/or modified sequence
atgaataagcgagattacatgaacacaagcgtgcaggagcctcctctggactatagctttaggagcatccacgtgatccaggatctggttaacgaagagccacggacaggactgcgcccgctgaaaaggtcaaaaagtgggaagagcctgacccagtcgctgtggctcaataataacgttctgaacgacctgcgggattttaaccaggtcgcttctcagctcctagagcaccccgagaaccttgcctggatagatttgagtttcaatgacttgacttcaatcgaccccgtgctaactacctttttcaatctttctgtcttgtaccttcacggtaattctatccagcgactgggggaggtgaataagttggccgtgctgcctaggttacgaagcctaacccttcacgggaaccccatggaggaagaaaaggggtatcgccagtacgtgctgtgtaccctctctagaatcacaacttttgacttctctggggtcacgaaagccgatcggactaccgctgaggtgtggaagcggatgaatattaagcccaaaaaggcctggacaaaacagaacacactgtag

SEQ ID NO: 241060 - DNA, 579 bp, Artificial Sequence
  derived and/or modified sequence
atgaacaagagggactacatgaacacctctgtgcaggagccccccctggactacagcttccgcagcatccacgtgatccaggacctggtgaatgaggagcccaggacaggcctgcggcccctgaagaggagcaagagcggcaagagcctgacccagagcctgtggctgaacaacaacgtgctgaatgacctgcgggacttcaaccaggtggccagccagctgctggagcaccctgagaacctggcctggattgacctgtccttcaatgacctgaccagcattgatcctgtgctgaccaccttcttcaacctgtctgtgctgtacctgcacggcaacagcatccagaggctgggggaggtgaacaagctggccgtgctgccccggctgcggagcctgaccctgcacggcaaccccatggaggaggagaagggctaccggcagtatgtgctgtgcaccctgagccgcatcaccacctttgacttcagcggcgtgaccaaggctgacaggaccacagctgaggtgtggaagaggatgaacatcaagcccaagaaggcctggaccaagcagaacaccctgtag

SEQ ID NO: 241061 - DNA, 2332 bp, Artificial Sequence
  derived and/or modified sequence
agagaaggggtatcaccgcttccggaccccggcctgtacttgaaggcaaagagaactacaaatcccagcgtcacccgcggccttgaagccccgcccctgacaaactgaaggtcccggtaagcatcgcgtcagtacttatggcgcctgccgggttgtggtgacgaaagcagttgccatggagttgctctgagtaaccctgaggcagtgggacgccaagactggagaggaagcgactgcggggagtatttccattttaaccggaaacaatccctgaacccacaggaatgaatgcctaatggtggagtttcagccatcagtgacaggctgaacccagactcccagggcacctgcttgcacctttgaatgatggcctgaactatgaacaaacgggactatatgaacacttcggtacaggagccccctcttgactactccttcagaagcatccacgtcattcaagatctggtaaatgaggagccaaggacaggactacgaccactgaagcgttcaaagtcggggaaatcactgacccagtccctgtggctgaataacaatgttctcaatgatctgagagacttcaaccaggtggcttcacagctgttggagcacccagagaacctggcctggatcgacctgtcctttaatgacctgacttccattgaccctgtcctaacaactttcttcaacctgagtgtcctctatcttcacggcaacagcatccagcgcctgggggaggtgaataagctggctgtccttcctcggctccgtagcctgacactccatgggaaccccatggaggaagagaaagggtataggcaatatgtgctgtgcaccctgtcccgtatcaccacgttcgacttcagtggggtcaccaaagcagaccgcaccacagctgaagtctggaaacgcatgaacatcaagcccaagaaggcctggaccaagcagaatacactttgaggctcccacgaccctagtagtcctaaaggcctaagcatagacagcatggtttgacaataaataatttgagctgttgagcagatgagaagtcacttacaccttgtagagatgttctctaactcaggcaactgcaagtagctctagccttttcttttcttttttttttttttgagacggagtctcactctgtcacacaggctggagtgcagtggcacgatcttggctcactgcaacctcagcctcccaggttcaagagattctcctgcctcagcctccccagtagctgtgattaaaggcgcctgccaccatgactggctaattttgttgttgttgttgttgttttgagacggtttcactcgtcaccccagctggagtgcagtggtgcgatctcagctcactgcaacctccgcctgctgggttcaagcgattctcctgcctcagcctcctgagtagctgggattacaggcgcctgctaccacatccagctaatttttttttttgagacggagtctcgctctgtcacccaggctggagtgcagtggcacgatctcggctcactgcaaactccgccttccaggttcacgccattctcctgcctcagcctcccaagtagctgggactataggcacctactaccacgcctggctaattttttgtatttttagtagagacggggtttcaccatgttagccaggatggtctccatctcctgaccttgtgatccacccacctcggcttcccccagctaattttttatattttagtagagacaaggtttcgccatgttggccaggctggtcttgaactcctgacctcaggtgatccgtctgctttggcctcccaaagtgctgggattagaagcgtgagccaccacgcccagcctttttttgtatttttagtagagatggggtttcgccatgttggccaggctggtctcaaactcctgacctcaggtgatctgcccacctcagcctcccaaagtgctaggattacaggataagccactgcacctggccagctctagtcttattttgctgaaaaagggaggcaattgagggaaaggcctgctggcctgggacactggagacgtgggtttaccacacagccttgggaaatttatctaactctctgggcccctttgtacttttcagcttagagatttgggggttaaagtagatcagtaatttccaaactcttcacagagtaccagggtctgtagagatgcctcacaggcctccatgacaggccaagaagatggcctatgatctctgaaaccagcccccacttcaatcagatcaaagtaattccattctgttttatatgctgggattctgcttaagatttcatttgataaaaagaatcttctgcttaaaaa

SEQ ID NO: 241062 - DNA, 814 bp, Artificial Sequence
  derived and/or modified sequence
gaggcagtgggacgccaagactggagaggaagcgactgcgggaatgaatgcctaatggtggagtttcagccatcagtgacaggctgaacccagactcccagggcacctgcttgcacctttgaatgatggcctgaactatgaacaaacgggactatatgaacacttcggtacaggagccccctcttgactactccttcagaagcatccacgtcattcaagatctggtaaatgaggagccaaggacaggactacgaccactgaagcgttcaaagtcggggaaatcactgacccagtccctgtggctgaataacaatgttctcaatgatctgagagacttcaaccaggtggcttcacagctgttggagcacccagagaacctggcctggatcgacctgtcctttaatgacctgacttccattgaccctgtcctaacaactttcttcaacctgagtgtcctctatcttcacggcaacagcatccagcgcctgggggaggtgaataagctggctgtccttcctcggctccgtagcctgacactccatgggaaccccatggaggaagagaaagggtataggcaatatgtgctgtgcaccctgtcccgtatcaccacgttcgacttcagtggggtcaccaaagcagaccgcaccacagctgaagtctggaaacgcatgaacatcaagcccaagaaggcctggaccaagcagaatacactttgaggctcccacgaccctagtagtcctaaaggcctaagcatagacagcatggtttgacaataaataatttgagctgttgagcagatgagaagtcacttaca

SEQ ID NO: 241063 - DNA, 579 bp, Artificial Sequence
  derived and/or modified sequence
atgaacaagcgggactacatgaacaccagcgtgcaggagccccccctcgactactcctttagatcgatccacgtaatccaagacctcgtgaatgaggagcctaggactggcctgcgcccactgaaaagatctaagagtgggaaaagtctgacgcagtcactgtggctgaataacaatgtgctgaacgacctccgagacttcaaccaggtcgcctctcaactcttggagcatccggagaacctagcctggatcgatctctcgtttaacgaccttacaagcattgatcctgtccttactacattctttaacttaagcgtgctctatctgcacggaaattcaattcagaggcttggggaagtcaacaagctggccgtcctccctcggcttcgaagtctgaccctgcacggaaaccccatggaggaagagaagggatacagacaatacgtgctgtgtactctgtctcgaatcacaacatttgacttttctggcgtcacaaaagctgataggaccactgctgaggtgtggaagaggatgaatatcaaaccaaaaaaagcctggaccaagcaaaatacactatag

SEQ ID NO: 241064 - DNA, 579 bp, Artificial Sequence
  derived and/or modified sequence
atgaacaagcgggactacatgaacaccagcgtgcaggagccccccctggattactcctttaggtcgatacacgtgatccaggacctcgtgaacgaagaacccaggactggccttaggcctctcaaaaggtccaaatcgggaaaaagccttacccagagcttatggctgaacaataacgttctcaacgatttgcgggattttaatcaggtggcatcacaacttctagagcatcctgaaaacttggcctggattgacctgagcttcaacgatttgaccagcatcgatcccgtgctgactaccttcttcaatcttagcgtcctctatttgcacggaaattctatacagcgcctgggggaagtgaataaactagccgtcctcccacgacttcgatcactaactctacacggaaaccctatggaagaggagaagggatacaggcagtacgtgctatgcactttgtcccggataacaacattcgacttctctggcgtcactaaagctgatcgtactactgctgaagtgtggaagagaatgaacatcaaaccaaaaaaagcatggactaaacagaacaccctgtag

SEQ ID NO: 241065 - DNA, 579 bp, Artificial Sequence
  derived and/or modified sequence
atgaacaaaagagattacatgaacacctcagtgcaagaaccaccattagactacagcttccgcagtattcacgttattcaggatctggtaaacgaggagccacggacaggcctgaggcccctgaagcgcagcaaaagtggaaagtctctaactcagagtctttggctaaacaataatgtcctgaacgatctgagagattttaatcaggttgccagtcagctgctggagcacccagagaatttggcttggattgacctgtcttttaacgacctgacctcgatcgatcccgtgctcacaaccttcttcaacttgtctgtgttgtacctgcatgggaacagcattcagagactaggagaggtcaataaactggccgtgcttcctaggcttaggagcttgacccttcacgggaacccaatggaggaggaaaaaggatatcggcagtatgtgctttgcacgttgtcgaggatcactacattcgattttagcggagtgacaaaagctgaccgaacaacagccgaggtgtggaagaggatgaatatcaagccaaagaaggcatggacgaaacagaataccttatag

SEQ ID NO: 241066 - DNA, 579 bp, Artificial Sequence
  derived and/or modified sequence
atgaacaagcgtgattacatgaacacatcagttcaggaaccccctctagattattccttccggtccattcacgtcatccaagatctggttaatgaagaacccagaaccggcctgaggccactcaagcggagtaagtcaggcaaatctctgactcagagcttgtggctcaataacaatgtgctgaacgacctgcgggacttcaatcaggtagcctcacagcttctggaacatcccgaaaatctcgcttggatagatctgtccttcaatgatttgaccagtatcgaccctgtcttgactactttcttcaacctgtcggtgctgtacttacacgggaattctatccaaaggcttggggaggtgaacaaactggctgtgctgccacgcctgcgctcactgaccctgcatgggaatccgatggaggaggagaaaggttaccggcagtatgttttatgcaccttgagcagaatcacgactttcgacttctcaggggttacaaaggctgataggaccactgccgaagtatggaagagaatgaatattaagcccaaaaaagcctggacaaagcagaatacactctag

SEQ ID NO: 241067 - DNA, 579 bp, Artificial Sequence
  derived and/or modified sequence
atgaacaagagagactacatgaacaccagcgtgcaggagccccccctggactacagcttcagaagcatccacgtgatccaggacctggtgaacgaggagcccagaaccggcctgagacccctgaagagaagcaagagcggcaagagcctgacccagagcctgtggctgaacaacaacgtgctgaacgacctgagagacttcaaccaggtggccagccagctgctggagcaccccgagaacctggcctggatcgacctgagcttcaacgacctgaccagcatcgaccccgtgctgaccaccttcttcaacctgagcgtgctgtacctgcacggcaacagcatccagagactgggcgaggtgaacaagctggccgtgctgcccagactgagaagcctgaccctgcacggcaaccccatggaggaggagaagggctacagacagtacgtgctgtgcaccctgagcagaatcaccaccttcgacttcagcggcgtgaccaaggccgacagaaccaccgccgaggtgtggaagagaatgaacatcaagcccaagaaggcctggaccaagcagaacaccctgtag

SEQ ID NO: 241068 - protein, 481 aa, Artificial Sequence
  derived and/or modified sequence
MPQTSVVFSSILGPSCSGQVQPGMGERGGGAGGGSGDLIFQDGHLISGSLEALMEHLVPTVDYYPDRTYIFTFLLSSRVFMPPHDLLARVGQICVEQKQQLEAGPEKAKLKSFSAKIVQLLKEWTEAFPYDFQDEKAMAELKAITHRVTQCDEENGTVKKAIAQMTQSLLLSLAARSQLQELREKLRPPAVDKGPILKTKPPAAQKDILGVCCDPLVLAQQLTHIELDRVSSIYPEDLMQIVSHMDSLDNHRCRGDLTKTYSLEAYDNWFNCLSMLVATEVCRVVKKKHRTRMLEFFIDVARECFNIGNFNSMMAIISGMNLSPVARLKKTWSKVKTAKFDVLEHHMDPSSNFCNYRTALQGATQRSQMANSSREKIVIPVFNLFVKDIYFLHKIHTNHLPNGHINFKKFWEISRQIHEFMTWTQVECPFEKDKKIQSYLLTAPIYSEEALFVASFESEGPENHMEKDSWKTLRTTLLNRA

SEQ ID NO: 241069 - DNA, 1446 bp, Artificial Sequence
  derived and/or modified sequence
atgccccagaccagcgtggtgttcagcagcatcctgggccccagctgcagcggccaggtgcagcccggcatgggcgagagaggcggcggcgccggcggcggcagcggcgacctgatcttccaggacggccacctgatcagcggcagcctggaggccctgatggagcacctggtgcccaccgtggactactaccccgacagaacctacatcttcaccttcctgctgagcagcagagtgttcatgcccccccacgacctgctggccagagtgggccagatctgcgtggagcagaagcagcagctggaggccggccccgagaaggccaagctgaagagcttcagcgccaagatcgtgcagctgctgaaggagtggaccgaggccttcccctacgacttccaggacgagaaggccatggccgagctgaaggccatcacccacagagtgacccagtgcgacgaggagaacggcaccgtgaagaaggccatcgcccagatgacccagagcctgctgctgagcctggccgccagaagccagctgcaggagctgagagagaagctgagaccccccgccgtggacaagggccccatcctgaagaccaagccccccgccgcccagaaggacatcctgggcgtgtgctgcgaccccctggtgctggcccagcagctgacccacatcgagctggacagagtgagcagcatctaccccgaggacctgatgcagatcgtgagccacatggacagcctggacaaccacagatgcagaggcgacctgaccaagacctacagcctggaggcctacgacaactggttcaactgcctgagcatgctggtggccaccgaggtgtgcagagtggtgaagaagaagcacagaaccagaatgctggagttcttcatcgacgtggccagagagtgcttcaacatcggcaacttcaacagcatgatggccatcatcagcggcatgaacctgagccccgtggccagactgaagaagacctggagcaaggtgaagaccgccaagttcgacgtgctggagcaccacatggaccccagcagcaacttctgcaactacagaaccgccctgcagggcgccacccagagaagccagatggccaacagcagcagagagaagatcgtgatccccgtgttcaacctgttcgtgaaggacatctacttcctgcacaagatccacaccaaccacctgcccaacggccacatcaacttcaagaagttctgggagatcagcagacagatccacgagttcatgacctggacccaggtggagtgccccttcgagaaggacaagaagatccagagctacctgctgaccgcccccatctacagcgaggaggccctgttcgtggccagcttcgagagcgagggccccgagaaccacatggagaaggacagctggaagaccctgagaaccaccctgctgaacagagcctag

SEQ ID NO: 241070 - DNA, 1446 bp, Artificial Sequence
  derived and/or modified sequence
atgcctcagacttccgtagtcttctcttctattcttgggccatcttgtagtggacaggttcagcccggtatgggcgagcgagggggcggcgccgggggcgggagcggagacctcatctttcaagatggacacctcatctcaggatctcttgaggccctgatggaacatctagttccaaccgtggattactaccccgatagaacttatatcttcacatttctcctgagtagccgtgtattcatgccaccccatgacctgcttgcaagagtggggcaaatctgcgttgagcagaaacagcagctggaggcagggccagagaaagccaagctgaaatcattctccgccaagattgtgcagctgcttaaagagtggacggaggccttcccatatgactttcaggacgagaaggcaatggctgaactgaaagctattactcatcgagtcactcagtgcgatgaggagaacggcactgttaagaaggctatcgcccaaatgacacagtctctgctgctgtccctcgctgcgagaagccagctgcaggagctccgggagaagttgagaccacccgccgtggacaaggggcctatcttaaagaccaagcccccagccgcacagaaagacatcctaggagtgtgctgcgacccactggtccttgcgcagcagctgactcacatagagctcgatcgggtgagctcaatctatcctgaagacttgatgcagatcgtgagtcatatggacagcttggataatcacagatgccggggcgatttaacgaaaacctacagtctcgaggcctatgacaattggttcaattgcctgtcgatgctagttgcaacggaagtgtgcagggtggtcaagaagaagcataggacacgaatgctggagtttttcattgatgttgcccgggagtgttttaatattggaaattttaactccatgatggcaatcattagcggaatgaacctgtctcccgtggcacgtctgaagaaaacatggagtaaggtgaagaccgccaaatttgatgtgctggagcaccacatggatccaagcagtaatttttgtaactatcggaccgcactgcaaggagcaactcagcgatcccagatggccaactcttcgcgggaaaagatcgtgatccctgtattcaatctctttgtgaaggatatctactttctccacaaaatccacacaaatcatctgccaaatggccatatcaattttaaaaagttctgggagattagccggcagattcacgagttcatgacctggacacaggtcgagtgccctttcgaaaaagacaagaagatccagagctacctcctaaccgcacctatctacagtgaggaggccctgtttgtggctagttttgagagcgaaggccccgagaaccatatggagaaggactcttggaaaaccctcaggacgaccctgctgaaccgcgcctag

SEQ ID NO: 241071 - DNA, 1446 bp, Artificial Sequence
  derived and/or modified sequence
atgcctcagacttcagttgtgttcagctccattcttggtccttcctgctctggccaggtccaacccgggatgggcgagcgcggagggggagctggtgggggctctggggatctcatctttcaggatgggcatttaatcagcggctctctagaagccctgatggagcacttggtccccacagtcgattactaccccgataggacgtatatttttacattccttttgtccagcagagtctttatgccaccccacgatttactggcaagggtcggacaaatttgcgtggaacagaaacagcaattggaagcaggtccagaaaaagccaaactgaagtccttttctgccaagatcgttcaacttcttaaggaatggacagaagcctttccttacgacttccaggatgaaaaggccatggcagagttgaaggctatcacacaccgtgttactcagtgcgatgaagaaaacgggacagtgaagaaggccattgcccagatgactcaatctctcttgctgagtcttgccgcacggtctcagctgcaagaactgagggaaaaactccggcccccagccgtagacaagggccctatcttgaagacaaagccacccgcggctcaaaaggacatcctgggggtctgctgtgacccactggtgcttgctcagcaactaacacatatcgaactcgaccgtgtatcctctatttaccctgaagacttaatgcaaatcgtgagtcatatggactccctggacaatcaccggtgtaggggggacctgacaaagacctattccctcgaggcgtacgacaactggttcaattgtctgagcatgcttgtcgccacagaggtatgcagggtcgtcaagaaaaaacatcgcacacggatgctcgaattttttatcgacgtcgccagagagtgcttcaatattggtaacttcaattctatgatggccattatcagtggaatgaacctctcaccagtggctcggctgaaaaagacgtggtcaaaggtcaaaacggctaaatttgatgtgttggaacatcacatggacccatccagtaacttttgcaactaccgtacagctctgcaaggggccacccaaagaagtcaaatggcaaacagctctcgagagaaaatcgtgataccagtcttcaatttgtttgtgaaggatatatatttcttacacaaaatacacacgaatcatttgccgaacggccatataaactttaagaagttctgggagatcagtaggcagattcatgagttcatgacatggacccaggttgaatgtccatttgagaaggacaagaaaatccagtcttatctcctgaccgcaccgatctacagcgaggaagcactttttgtggcctcattcgagagcgagggaccagaaaatcacatggagaaggattcctggaagactctaagaactaccttactgaaccgagcttag

SEQ ID NO: 241072 - DNA, 1446 bp, Artificial Sequence
  derived and/or modified sequence
atgccccagacctctgtggtgttcagcagcatcctgggccccagctgcagcggccaggtgcagcccggcatgggagagcggggcggcggggccggcggcggcagcggggacctgatcttccaggacggccacctgatcagcggcagcctggaggccctgatggagcacctggtgcccaccgtggactactacccagacaggacctacatcttcaccttcctgctgagcagcagggtcttcatgcctcctcatgacctgctggcccgggtgggccagatctgtgtggagcagaagcagcagctggaggccggccctgagaaggccaagctgaagagcttcagcgccaagatcgtgcagctgctgaaggagtggacagaggccttcccctatgacttccaggatgagaaggccatggccgagctgaaggccatcacccaccgggtgacccagtgtgatgaggagaatggaacagtgaagaaggccatcgcccagatgacccagagcctgctgctgagcctggccgcccggagccagctgcaggagctgcgggagaagctgcggcccccagctgtggacaagggccccatcctgaagaccaagcccccagctgcccagaaggacatcctgggcgtgtgctgtgaccccctggtgctggcccagcagctgacccacatcgagctggacagagtgagcagcatctacccagaggacctgatgcagatcgtgagccacatggacagcctggacaaccaccgctgccgcggggacctgaccaagacctacagcctggaggcctatgacaactggttcaactgcctgtccatgctggtggccacagaggtgtgccgggtggtgaagaagaagcacaggaccaggatgctggagttcttcattgatgtggcccgggagtgcttcaacatcggcaacttcaacagcatgatggccatcatcagcggcatgaacctgagccctgtggcccggctgaagaagacctggagcaaggtgaagacagccaagtttgatgtgctggagcaccacatggaccccagcagcaacttctgcaactacagaacagccctgcagggcgccacccagaggagccagatggccaacagcagccgggagaagatcgtcatccctgtgttcaacctgtttgtgaaggacatctacttcctgcacaagatccacaccaaccacctgcccaacggccacatcaacttcaagaagttctgggagatcagccggcagatccacgagttcatgacctggacccaggtggagtgcccctttgagaaggacaagaagatccagagctacctgctgacagcccccatctacagcgaggaggccctgtttgtggccagctttgagagcgagggccctgagaaccacatggagaaggacagctggaagaccctgcggaccaccctgctgaacagagcctag

SEQ ID NO: 241073 - DNA, 1446 bp, Artificial Sequence
  derived and/or modified sequence
atgccccagaccagcgtggtgttcagcagcatcctgggccccagctgcagcgggcaagtgcaacccggcatgggagagaggggcggaggggccggcggaggcagcggcgacctcatttttcaagatggccacttaatttccgggtcactggaagccctcatggagcatctcgtgcctactgttgattactacccagatcgcacttatatttttacgttccttttgtcaagccgggtgttcatgccaccacacgacctgctggccagagtggggcagatttgtgtagaacagaaacaacagctagaggcggggcccgaaaaagcgaagctgaaatcattcagtgccaagattgttcagttgctgaaggagtggactgaggcctttccttatgactttcaagatgaaaaagctatggccgaactcaaagctatcacacacagagtgactcagtgcgacgaggagaatggtaccgtgaagaaagctattgcgcaaatgacccagtcactgctgctcagtcttgcagcccgtagccaattacaagagctcagggagaaacttcgacctcccgccgtcgacaaaggaccaatacttaaaacaaaacctccagccgctcagaaagacatcttgggggtttgctgcgatcctctggtgctagcccagcagctgacccatatcgagctcgacagagttagctccatctaccccgaagacctaatgcaaattgtttctcatatggatagtttggataaccaccggtgcagaggtgacctaaccaagacgtactcactcgaggcatacgacaattggtttaattgcctttccatgctggtagctaccgaggtctgtagagtcgtgaaaaaaaagcatagaacgcggatgctcgaattttttatagatgttgcccgggagtgcttcaacattggcaattttaactccatgatggccatcatcagcgggatgaacctgtcccctgtcgccagacttaaaaagacctggtctaaagtgaagacagccaagtttgacgtcctggagcatcatatggatcccagcagcaatttttgtaactaccgcacagcgcttcagggagctactcagcgcagccagatggcaaatagctcccgcgaaaaaattgtgatccccgtgttcaatctatttgtcaaagacatttattttttacacaaaatccatactaaccacctccccaacggacacattaacttcaagaagttctgggagatttctcgacagattcacgagttcatgacttggacacaggtcgagtgtccctttgagaaagacaaaaaaatccaatcatatctattaactgcccccatctactcggaagaagctttgttcgtggcctcttttgagtcagagggccccgaaaaccatatggaaaaggattcatggaagaccctaaggacaactctgctcaatcgtgcgtag

SEQ ID NO: 241074 - DNA, 1446 bp, Artificial Sequence
  derived and/or modified sequence
atgccccagaccagcgtggtgttcagcagcatcctgggccccagctgctctggacaagtccagcctggaatgggagagaggggagggggcgctgggggagggagtggtgatctgatctttcaggacgggcatctcattagcgggagtctggaggcactgatggaacacctggtgcccactgtcgactattaccccgatcggacatatatattcacttttctgcttagtagcagggtattcatgcctccacacgatctgttggcacgggtagggcaaatttgtgtggaacagaagcagcagctggaggcgggcccagaaaaagcaaagctaaagagctttagcgccaagattgtgcagctcctgaaggagtggactgaggcctttccttatgacttccaagacgagaaggccatggcagaactgaaagcaataacacacagagtgacccagtgcgatgaggagaatggaacggtcaaaaaggctatcgcgcagatgacccaaagcctgctattgtcactggcggcaagatcccagctgcaggaacttcgggagaagttaagaccccccgcagtggataagggtcccatactcaagactaagccacccgccgcacagaaagacatcttgggcgtgtgctgcgaccctctggtcttggctcagcagttgactcacattgaattagaccgggtttcaagtatctaccctgaagacctgatgcagattgtctcccacatggattccctggataatcaccgctgtcgaggagacctcaccaagacttattctttagaggcctatgataactggttcaattgtctcagcatgctggtcgcaactgaggtttgcagagtcgtcaaaaaaaagcatcgcacaaggatgctcgaattcttcatagacgtggcaagagagtgctttaacataggaaactttaactcaatgatggcaataatttctggaatgaacctctctcctgtggcaagactgaagaaaacgtggtccaaggtcaaaactgcgaagtttgacgtgcttgagcaccacatggatcccagctcaaacttctgcaattataggaccgccctgcagggcgcgacccagcgctcccagatggcaaattctagcagagagaaaattgtgatccccgttttcaatctgttcgttaaggacatctatttccttcataagattcacactaatcatctgccgaatgggcacattaattttaaaaaattctgggagatctctcgtcagattcatgagttcatgacttggacacaggtggaatgccccttcgaaaaggataagaaaatccaaagctatttgctgactgcacctatttatagtgaggaggctctgtttgtggcatcctttgaaagcgaaggccccgagaatcacatggagaaggattcctggaagaccctacggactacattgctcaatcgtgcatag

SEQ ID NO: 241075 - DNA, 1446 bp, Artificial Sequence
  derived and/or modified sequence
atgccccagacaagcgtggttttctccagcatcctaggaccaagttgttcagggcaagtccagcctggaatgggcgagcgcggagggggtgctggaggcggtagtggcgatttgatcttccaggatgggcatctaatctcaggtagcctggaagcattaatggagcatctcgtgccaaccgtggactactatccagatcgaacatatatcttcaccttcttgctgagctcccgagtgttcatgcccccacacgacttactcgccagagttgggcagatttgcgtcgagcagaagcagcaactggaggccggacccgaaaaggctaaactcaagtcttttagcgccaaaatagtgcagctgctgaaggagtggaccgaggcattcccctacgacttccaggacgagaaggcaatggctgagttgaaggctataacacatagggttacgcagtgtgatgaggaaaatggtaccgtcaagaaagctatcgctcagatgacgcagtcactacttttgagcctcgccgctcgttctcagctccaggagctgcgcgaaaaactgcggccacctgcagtcgacaagggtcccatcttgaagaccaaaccacctgccgctcagaaagacatcttgggggtgtgctgcgatccactggtgctggcccagcagctgacacatatcgaattagatagggtcagcagtatatatcctgaggacctaatgcaaatcgtttctcacatggactccctggataaccaccggtgtcgtggcgacctcacgaagacatacagcctggaagcctacgataattggtttaattgcctgtcaatgcttgtggccaccgaagtttgccgagtagttaagaaaaagcataggacgcgcatgctggagttttttatcgatgtagctagggagtgtttcaacataggaaatttcaattcaatgatggcaataatatccgggatgaatctcagtcctgtggccagattaaaaaagacttggtcaaaagtaaaaactgcgaagtttgatgtcctggaacaccacatggacccaagctcaaatttctgtaattatagaacagccttacaaggcgcaactcagcgcagccagatggcaaacagtagtcgcgagaaaattgtgatccccgtgtttaacttgttcgtaaaggatatttactttctgcacaaaattcatactaaccacctcccgaatggccacatcaattttaagaagttttgggaaatttctaggcagattcatgagtttatgacttggacgcaggtagaatgccccttcgagaaggataaaaaaatacagtcctaccttctgactgccccaatttacagcgaggaggctctcttcgtcgccagttttgagtccgagggaccagagaaccacatggagaaagattcttggaagaccctcaggacaacgttgctgaaccgcgcatag

SEQ ID NO: 241076 - DNA, 1446 bp, Artificial Sequence
  derived and/or modified sequence
atgccacaaacatcagttgtattcagttctatccttggcccttcttgttctggacaggtccagccaggcatgggtgaacgcggaggcggagccggaggaggctctggagatctcatctttcaggatggacatctgatctccgggtcgctcgaggctctgatggaacacttggtgccaaccgttgactactacccagacagaacttatatctttacatttctcctgagttccagggtatttatgccaccgcatgatctgctcgcgagggtgggccaaatctgcgtcgagcagaaacagcaattggaagctggtcccgagaaagctaagctgaagtctttcagtgccaagatcgtgcagctgctgaaagagtggacagaggcctttccttacgacttccaggatgagaaagcaatggctgagctcaaggccatcactcaccgagtgacccagtgtgacgaggagaacggcacagtcaagaaggctatcgcccaaatgactcaatcactacttctgtcccttgcggctcgctcacagctgcaagaattgagggaaaaactgagacctcctgctgtggacaaaggccctatcttgaagactaaacctccagccgctcaaaaagacatattgggcgtgtgctgtgatcccttagtcctagcccagcaacttacacacatcgagcttgatcgggtgtccagtatttaccctgaggacctgatgcaaatagtgtcacacatggacagtctggataaccaccgctgtcggggagacttgaccaaaacatatagcctggaagcatatgataactggttcaattgtctctcaatgcttgtagccacagaagtgtgtcgagtggtgaagaagaaacaccgcacccgcatgctggaattttttatcgacgtggctagggaatgttttaacattggcaacttcaatagcatgatggcaattatatcaggaatgaacctgtctcccgtagctaggctcaaaaagacctggtcaaaggtaaagacagcaaaattcgacgttttagaacatcacatggatcccagttccaatttttgtaattacaggaccgctctccagggggctacacaaagaagccagatggcaaacagttcaagggagaagattgtcatccctgtctttaacctgttcgttaaggatatttactttctccacaagatccataccaatcacctgccaaatggacacatcaactttaagaaattctgggagatttcgagacaaattcacgaattcatgacttggacacaggtggaatgtcccttcgagaaggataagaagatacagtcatacctgctgaccgctcccatctactcagaagaagctctgtttgtcgctagttttgaatctgagggacctgagaaccatatggagaaggactcttggaagacgctcagaactaccctcctcaatcgtgcctag

SEQ ID NO: 241077 - DNA, 3235 bp, Artificial Sequence
  derived and/or modified sequence
ggcgccggccgcgcgctgctcggggcccgactgcggcgcgagggcggcgcgggagcgacgctggcccggaccgaggaaactatgccccagacgtccgttgtcttctccagcatccttgggcccagctgtagcggacaggtgcagcctggcatgggggagcgtggaggcggggccggtggcggctccggggacctcatcttccaagatggacacctcatctctgggtccctggaggccctgatggagcaccttgttcccacggtggactattaccccgataggacgtacatcttcacctttctcctgagctcccgggtctttatgccccctcatgacctgctggcccgcgtggggcagatctgcgtggagcagaagcagcagctggaagccgggcctgaaaaggccaagctgaagtctttctcagccaagatcgtgcagctcctgaaggagtggaccgaggccttcccctatgacttccaggatgagaaggccatggccgagctgaaagccatcacacaccgtgtcacccagtgtgatgaggagaatggcacagtgaagaaggccattgcccagatgacacagagcctgttgctgtccttggctgcccggagccagctccaggaactgcgagagaagctccggccaccggctgtagacaaggggcccatcctcaagaccaagccaccagccgcccagaaggacatcctgggcgtgtgctgcgaccccctggtgctggcccagcagctgactcacattgagctggacagggtcagcagcatttaccctgaggacttgatgcagatcgtcagccacatggactccttggacaaccacaggtgccgaggggacctgaccaagacctacagcctggaggcctatgacaactggttcaactgcctgagcatgctggtggccactgaggtgtgccgggtggtgaagaagaaacaccggacccgcatgttggagttcttcattgatgtggcccgggagtgcttcaacatcgggaacttcaactccatgatggccatcatctctggcatgaacctcagtcctgtggcaaggctgaagaaaacttggtccaaggtcaagacagccaagtttgatgtcttggagcatcacatggacccgtccagcaacttctgcaactaccgtacagccctgcagggggccacgcagaggtcccagatggccaacagcagccgtgaaaagatcgtcatccctgtgttcaacctcttcgttaaggacatctacttcctgcacaaaatccataccaaccacctgcccaacgggcacattaactttaagaaattctgggagatctccagacagatccatgagttcatgacatggacacaggtagagtgtcctttcgagaaggacaagaagattcagagttacctgctcacggcgcccatctacagcgaggaagctctcttcgtcgcctcctttgaaagtgagggtcccgagaaccacatggaaaaagacagctggaagaccctcaggaccacccttctgaacagagcctgaggcggatgcagcccgcgacgccagaggaagcacgtgcactaactgggtttaaattttgactgatgtgggttgagatgaggaggcctcactggttggggtccattttgtatataacttttatgagaaaaaaatggtaattatttcacgcatcaacctttggcacttacaaagttttttttgtttattttaaataacagggcagggccctgctttggggagggggaggggagagtatcatgggagatggtatccatgataacatcttattctaatgaaatgtagatttttattttctacttttgattattaacatcttatgaaaaaaatattttaaaaaacccagccaaaaccaacgtgagccctgcctgctcggacgcctttccagccagtgtctctgacgtcggggttagtgccttagagggtactggggtctggtcttcctgctctgtggtttgggctgcggtgagtcccactccacctgggcgcctgccctcaggagcctgggctgcgaggctccataggagggctggtggctgggaggtcgcgtccgcacacttctggaagtgagcctttgagtacgggctgtccaaagtttacattttcattttcctttcagggatttgtggggtcagggaggggcagggggcacctggcagcatattttctgtgacaatgtgtccagcaaatcattcttcaactacattttagaaaggaggaaatctaaaataaggtaagggagggaagcatggagttgtcagttttctgggctgtgactgaaagacacactgagctgtgatgaagaaaaatacatggccgactccagggtggtgacatttagagctagtcttgaaacctatcatctacagaggggagggcagccaacagccctcttcccacctgggtaggcagcgccctaattggaattggaaacagaaaattcgccaggccatactgctggagcccattcagataaaactgcccaatactgagaggtgttttctacacccagctagaggagcacactccattttcccatgtctgacttcgtggtgtgagccctgggccctactgaccatggcgcaggacagctgtccttcagaaagcacacggtcaatccacgtggaccgtctccctcgcaggaactccgcatccttgtccctctgcattcccagtttccgcaggagccttgatcaatggggaagcctgggtgaggatgggccaggtcccaattcccaaagctcctggaagagcctgaagacattgggaaaggctgggcctggggaggaggcagccctgggcccgctgcccatgcctctggtcctgggtggagcaggaatagttccactgtattgtcacagtgtgtttgcactttctgaggttctagctagtacagattgtatattgatagtacatattgctttgtttatgtctttgagatgagaaaggcttaaaacttgagaatatatatttggaatacagccttagaacggtttctgtacacacccacgtgcacttcacgggtgatcagttctagtacctacttgaaacagtgtctgtctgctactttattttcccaatttgatacataccctgatttgatgttttggtatttgagatgaactctgagtatgaagctgtaccataatgcaggacgtcagttttggtgtgactggacatacttgcttcaataaaagaatacatcactccc

SEQ ID NO: 241078 - protein, 138 aa, Artificial Sequence
  derived and/or modified sequence
MTWRQAVLLSCFSAVVLLSMLREGTSVSVGTMQMAGEEASEDAKQKIFMQESDASNFLKRRGKRSPKSRDEVNVENRQKLRVDELRREYYEEQRNEFENFVEEQNDEQEERSREAVEQWRQWHYDGLHPSYLYNRHHT

SEQ ID NO: 241079 - DNA, 417 bp, Artificial Sequence
  derived and/or modified sequence
atgacctggagacaggctgtcttactctcgtgcttctcagcagtggtgctcctgtccatgttgagagagggaacatctgtatcagtgggaaccatgcagatggccggtgaggaggcctccgaggacgcaaagcagaagatattcatgcaggaatctgatgcatcaaatttcctgaaaaggaggggcaaaagaagccctaagagtcgggacgaggtaaatgtggagaaccggcaaaaactgagagtggacgagctgcgtagagagtactacgaagagcagaggaacgaatttgaaaatttcgtggaggagcagaacgatgagcaggaagaaaggtctcgcgaagcagtggagcagtggcgtcagtggcactatgacgggcttcaccccagctacctgtataatagacatcatacttag

SEQ ID NO: 241080 - DNA, 417 bp, Artificial Sequence
  derived and/or modified sequence
atgacttggcgccaagccgttctgctgtcgtgcttctccgcagtcgtattactgtcaatgttgagggaaggtacttccgtgtccgtgggaaccatgcagatggcaggcgaggaggcctccgaggacgccaaacagaagattttcatgcaggaatcagacgccagcaatttcctcaaaagaagaggtaaacggtccccaaagtcaagagatgaagtgaacgtggaaaatcgacaaaaactgcgagtggacgagctacgaagagaatattacgaggagcagcggaacgagttcgaaaatttcgtcgaggaacagaacgatgagcaggaggagagatcacgtgaggcagtcgagcagtggagacagtggcattatgatgggttgcacccaagctacttatataacagacatcatacgtag

SEQ ID NO: 241081 - DNA, 417 bp, Artificial Sequence
  derived and/or modified sequence
atgacctggcggcaagcagttctattgagttgttttagcgccgttgtgttattaagcatgttgagggagggcacttcagtctcggtgggaactatgcaaatggcgggggaggaggcctcagaggacgctaagcagaaaatctttatgcaggaatccgatgcttctaattttcttaagagacggggaaagcggtcccctaagagtagagatgaggtgaatgttgaaaaccgccagaagctccgcgtcgacgaattacgaagagaatattatgaagaacagaggaatgaatttgaaaactttgttgaggaacagaatgatgagcaggaagagaggtcgagggaagcggtagaacagtggcgtcaatggcattacgatggtcttcacccaagctacctttacaacagacatcacacatag

SEQ ID NO: 241082 - DNA, 417 bp, Artificial Sequence
  derived and/or modified sequence
atgacctggagacaggccgtgctgctgagctgcttcagcgccgtggtgctgctgagcatgctgagagagggcaccagcgtgagcgtgggcaccatgcagatggccggcgaggaggccagcgaggacgccaagcagaagatcttcatgcaggagagcgacgccagcaacttcctgaagagaagaggcaagagaagccccaagagcagagacgaggtgaacgtggagaacagacagaagctgagagtggacgagctgagaagagagtactacgaggagcagagaaacgagttcgagaacttcgtggaggagcagaacgacgagcaggaggagagaagcagagaggccgtggagcagtggagacagtggcactacgacggcctgcaccccagctacctgtacaacagacaccacacctag

SEQ ID NO: 241083 - DNA, 417 bp, Artificial Sequence
  derived and/or modified sequence
atgacatggaggcaggccgttctgctgtcttgtttctcagcagttgtactactgtccatgctccgagaggggactagtgttagtgtgggtaccatgcagatggctggggaggaggcctcagaggacgcgaaacaaaaaatcttcatgcaggagtcagatgccagcaatttcttaaaaagacgaggtaaaagaagccctaagtcccgtgacgaggtgaatgtggaaaacaggcagaaactgcgggtcgatgagctgaggcgggagtattatgaggaacaaagaaacgaatttgaaaacttcgtcgaggaacaaaacgatgaacaggaagagcgatcaagggaggctgtggaacaatggcgtcagtggcactatgatggcctgcaccccagctatctctacaacaggcaccacacctag

SEQ ID NO: 241084 - DNA, 417 bp, Artificial Sequence
  derived and/or modified sequence
atgacctggaggcaggccgtgctgctgagctgcttctctgctgtggtgctgctgtccatgctgcgggagggcacctctgtgtctgtgggcaccatgcagatggccggggaggaggcctctgaagatgccaagcagaagatcttcatgcaggagagtgatgccagcaacttcctgaagaggcggggcaagaggagccccaagagcagagatgaggtgaatgtggagaaccggcagaagctgcgggtggatgagctgcggcgggagtactatgaggagcagagaaatgaatttgagaactttgtggaggagcagaatgatgagcaggaggagaggagccgggaggccgtggagcagtggaggcagtggcactatgatggcctgcaccccagctacctgtacaacagacaccacacctag

SEQ ID NO: 241085 - DNA, 826 bp, Artificial Sequence
  derived and/or modified sequence
agtggggacccaaagggtgcaggacgcctggtctgccttgtgggtcctggacggagcccctacctctgcaaagatgacttggagacaggccgtcctgctgtcttgcttctccgccgtggtgctcctgtctatgctgagagagggaaccagtgtatctgtgggcaccatgcagatggcgggagaagaggcgagtgaagatgcaaaacagaagattttcatgcaggaatcagatgcctcgaatttcctcaagaggcgcggcaagcggtcccccaagtccagagatgaggtcaatgtggaaaacaggcagaagcttcgggttgatgagctgcggagagaatattacgaggaacaaaggaatgaatttgagaacttcgtggaggaacaaaacgatgagcaggaagagaggagccgggaggctgtggagcagtggcgccagtggcactatgacggcctgcacccatcctatctctacaaccgccaccacacctgatcccatcctgaagccggccaagaagacaaagcttgtagcaccattggcatccccgtgttccagcaatctttcccatgcaaaccggcccttcagagggtctcagcttggggtctgcagtggccagcagctcttgaaaagacgcatgcctttccttccagtgtgtgaaagtgtcctgactttcacctctttgcagaccatcttctgaggtgagcaactgcctgcagggcctcctagtaccaaacctacagtggcttcccctggcttcgttcccaagcaaaagaatcagtcaagaatcacatgtttgcttatggcttacaaataaaaacgctgaatcaa

SEQ ID NO: 241086 - DNA, 417 bp, Artificial Sequence
  derived and/or modified sequence
atgacctggcggcaggccgtgctgctgagctgcttcagcgccgtggttcttttgagtatgcttagggagggcacttctgttagtgtgggcacaatgcagatggccggagaagaagcaagcgaagacgccaaacagaagatcttcatgcaggaaagcgatgctagcaactttctaaagcgccgcggaaaacggagcccgaaatcgagggacgaagtaaacgtagaaaatcggcagaagttgcgagttgatgaattgagaagggaatactatgaagagcaaaggaacgagtttgaaaatttcgtagaggagcagaacgacgagcaggaggaacgatcccgcgaggcagtggagcaatggcgccagtggcactatgacggactgcaccctagctacctgtacaatcggcatcacacatag

SEQ ID NO: 241087 - RNA, 417 nt, Artificial Sequence
  derived and/or modified sequence
augacuuggcgccaagccguucugcugucgugcuucuccgcagucguauuacugucaauguugagggaagguacuuccguguccgugggaaccaugcagauggcaggcgaggaggccuccgaggacgccaaacagaagauuuucaugcaggaaucagacgccagcaauuuccucaaaagaagagguaaacgguccccaaagucaagagaugaagugaacguggaaaaucgacaaaaacugcgaguggacgagcuacgaagagaauauuacgaggagcagcggaacgaguucgaaaauuucgucgaggaacagaacgaugagcaggaggagagaucacgugaggcagucgagcaguggagacaguggcauuaugauggguugcacccaagcuacuuauauaacagacaucauacguag

SEQ ID NO: 241088 - RNA, 417 nt, Artificial Sequence
  derived and/or modified sequence
augaccuggcggcaagcaguucuauugaguuguuuuagcgccguuguguuauuaagcauguugagggagggcacuucagucucggugggaacuaugcaaauggcgggggaggaggccucagaggacgcuaagcagaaaaucuuuaugcaggaauccgaugcuucuaauuuucuuaagagacggggaaagcgguccccuaagaguagagaugaggugaauguugaaaaccgccagaagcuccgcgucgacgaauuacgaagagaauauuaugaagaacagaggaaugaauuugaaaacuuuguugaggaacagaaugaugagcaggaagagaggucgagggaagcgguagaacaguggcgucaauggcauuacgauggucuucacccaagcuaccuuuacaacagacaucacacauag

SEQ ID NO: 241089 - protein, 481 aa, Artificial Sequence
  derived and/or modified sequence
MAASWSLLVTLRPLAQSPLRGRCVGCGAWAAALAPLATAPGKPFWKAYTVQTSESMTPTATSETYLKALAVCHGPLDHYDFLIKAHELKDDEHQRRVIQCLQKLHEDLKGYNIEAEGLFSKLFSRSKPPRGLYVYGDVGTGKTMVMDMFYAYVEMKRKKRVHFHGFMLDVHKRIHRLKQSLPKRKPGFMAKSYDPIAPIAEEISEEACLLCFDEFQVTDIADAMILKQLFENLFKNGVVVVATSNRPPEDLYKNGLQRANFVPFIAVLKEYCNTVQLDSGIDYRKRELPAAGKLYYLTSEADVEAVMDKLFDELAQKQNDLTRPRILKVQGRELRLNKACGTVADCTFEELCERPLGASDYLELSKNFDTIFLRNIPQFTLANRTQGRRFITLIDNFYDLKVRIICSASTPISSLFLHQHHDSELEQSRILMDDLGLSQDSAEGLSMFTGEEEIFAFQRTISRLTEMQTEQYWNEGDRTKK

SEQ ID NO: 241090 - DNA, 1446 bp, Artificial Sequence
  derived and/or modified sequence
atggccgccagctggagcctgctggtgaccctgagacccctggcccagagccccctgagaggcagatgcgtgggctgcggcgcctgggccgccgccctggcccccctggccaccgcccccggcaagcccttctggaaggcctacaccgtgcagaccagcgagagcatgacccccaccgccaccagcgagacctacctgaaggccctggccgtgtgccacggccccctggaccactacgacttcctgatcaaggcccacgagctgaaggacgacgagcaccagagaagagtgatccagtgcctgcagaagctgcacgaggacctgaagggctacaacatcgaggccgagggcctgttcagcaagctgttcagcagaagcaagccccccagaggcctgtacgtgtacggcgacgtgggcaccggcaagaccatggtgatggacatgttctacgcctacgtggagatgaagagaaagaagagagtgcacttccacggcttcatgctggacgtgcacaagagaatccacagactgaagcagagcctgcccaagagaaagcccggcttcatggccaagagctacgaccccatcgcccccatcgccgaggagatcagcgaggaggcctgcctgctgtgcttcgacgagttccaggtgaccgacatcgccgacgccatgatcctgaagcagctgttcgagaacctgttcaagaacggcgtggtggtggtggccaccagcaacagaccccccgaggacctgtacaagaacggcctgcagagagccaacttcgtgcccttcatcgccgtgctgaaggagtactgcaacaccgtgcagctggacagcggcatcgactacagaaagagagagctgcccgccgccggcaagctgtactacctgaccagcgaggccgacgtggaggccgtgatggacaagctgttcgacgagctggcccagaagcagaacgacctgaccagacccagaatcctgaaggtgcagggcagagagctgagactgaacaaggcctgcggcaccgtggccgactgcaccttcgaggagctgtgcgagagacccctgggcgccagcgactacctggagctgagcaagaacttcgacaccatcttcctgagaaacatcccccagttcaccctggccaacagaacccagggcagaagattcatcaccctgatcgacaacttctacgacctgaaggtgagaatcatctgcagcgccagcacccccatcagcagcctgttcctgcaccagcaccacgacagcgagctggagcagagcagaatcctgatggacgacctgggcctgagccaggacagcgccgagggcctgagcatgttcaccggcgaggaggagatcttcgccttccagagaaccatcagcagactgaccgagatgcagaccgagcagtactggaacgagggcgacagaaccaagaagtag

SEQ ID NO: 241091 - DNA, 1446 bp, Artificial Sequence
  derived and/or modified sequence
atggcggcctcctggagccttctggtgacacttagaccgctggcccagagtcccctgcgaggcagatgtgtcggatgcggcgcatgggccgccgcactggcaccactggctactgccccgggtaagccattctggaaagcatatacagtgcagacgtctgaaagcatgacaccaacggcaacttccgaaacttatttaaaggctctggccgtgtgccatggaccacttgaccactacgactttttaataaaggcacacgagctcaaggatgacgagcatcagaggagagtgatacagtgtctgcaaaaactgcatgaggaccttaaaggctataacattgaggcagaggggctcttcagcaagctgttctcaaggtctaagccacccaggggcctatatgtgtatggcgatgtcggcacaggcaaaaccatggtgatggatatgttctatgcgtacgtcgagatgaagcgtaagaaaagggtgcactttcatggttttatgttagatgtgcataagagaatccaccgcttaaaacagagcctgcctaaacgaaagcctggattcatggcaaagagctacgatccaattgcccccattgccgaagaaattagcgaagaagcgtgcttgctctgctttgatgaatttcaggtgaccgacattgcagatgcaatgatcctgaaacagctttttgagaatctgttcaaaaatggcgtagtcgtggtagctacatctaatcgcccccccgaggatctgtataaaaatgggctgcaacgcgccaactttgtcccttttatcgccgtcctgaaagagtactgcaacaccgtgcagctggactccggcatcgattatcgaaagcgggagttaccagctgcaggcaaattatactatctgacgagcgaggccgatgtggaagcggtcatggataagcttttcgatgagcttgctcagaagcaaaacgaccttaccagaccgcgcattctgaaggtgcagggtagagagctccgcctgaacaaagcgtgtgggacagttgcagattgcaccttcgaggagctctgtgaaaggccccttggcgctagcgattatctggagctgtcgaaaaattttgacacgattttcctccggaatattcctcagtttacccttgcaaaccgtactcagggtcggaggtttatcacgctaattgacaacttttatgatctgaaagttcgtattatttgttctgccagcacccctatctcaagtctcttcctccaccagcaccacgatagcgagctggaacaatcaaggatcctcatggacgacttggggcttagccaggactccgccgagggcctgtctatgtttacaggggaagaagagatcttcgcctttcagcgtacaatatcaaggctgactgagatgcagacagaacagtactggaacgaaggagatcgcaccaagaaatag

SEQ ID NO: 241092 - DNA, 4755 bp, Artificial Sequence
  derived and/or modified sequence
cggaaggacgggagggcacgggagtgcagcccgcccatgtggctactggaggtcacgttccctaactgatcccttggttctctcgggtggagccttcagcgtgcacggcggggtttgactttgccaccgtctctcttctgggttccaataaagttttcctcttcctctcctcgtacggagttcaagatggcggcctcctggtcgctcttggttaccctgcgccccttagcacagagcccgctgagagggagatgtgttgggtgcggggcctgggccgccgctctcgctcctctggccaccgcccctgggaagcccttttggaaagcctatacggttcagacatccgagagcatgaccccaactgccacttcagagacttatttgaaagctttggccgtttgccatggacctctggaccactatgattttctgatcaaagctcatgagctaaaggatgatgaacatcaaagaagagtcatacagtgtttgcagaaattacacgaggaccttaaaggatacaatatagaggcagaaggccttttttcaaagcttttttcaaggagcaaacctccaaggggcctgtatgtttatggagatgttggtacaggaaaaacaatggtgatggacatgttttatgcttatgtggaaatgaagaggaaaaaacgggttcattttcatggtttcatgctagatgtgcacaaaagaatacatcgccttaaacagagtttgccaaaaaggaaaccaggattcatggctaaatcatatgacccaatagctcccatagccgaagaaatcagcgaagaagcatgtctcctatgttttgatgaatttcaggtcactgacattgctgatgccatgattctgaaacagctttttgaaaatctgttcaaaaacggggtcgtcgttgtggcaacatccaacaggccaccggaagatctctataaaaatggactccaaagagctaactttgtaccattcatagcagtcttgaaggaatattgtaatacagtccagctagattctgggatagattaccggaaaagggaacttcctgctgcaggaaaactctactacctcacaagtgaagctgatgtggaggctgtcatggataagttgtttgatgagctggctcagaaacaaaatgatttaactagaccaaggattctaaaagtgcaaggcagagagctgcgcctgaataaagcctgtggaaccgttgccgactgcacatttgaagagctgtgtgagagaccacttggagccagtgactatttggaactatcaaagaattttgatacaatatttttacgaaacattccgcaatttactctggcaaacaggactcaaggtcgaagattcataactctcatcgataacttttatgatctcaaggtgcgtataatttgctctgcgtcgactcctatatcaagcttatttttgcatcaacatcatgacagtgagttggagcaaagcagaatactgatggatgatttggggctgagccaggattcagcagaaggactctccatgtttaccggagaagaggaaatctttgcatttcagcgcacaatttcccgactcacggaaatgcagactgaacagtactggaatgaaggagacagaaccaagaagtaactgccacttttgcataaataaaactctagacaaatggttaacgcaggcagaactccttattgtgggacttgaaggaatcattttctcatcattaattatgcactttgtcctctggaccattttaatctaaaattgctctcaaggatctagtggattagtaagttaaacacttaacattttttaggtctgctttttcttatttggccttatttctgcaccatgaaattaaaatcatctcattcctgaagatgaatgtaggaccagacattttagcttcacattaaaccacctgaatgaaccttgaatgcacaagtaaatgcaagacgtctggataccttcaagctttggctgcatggtggtggcatgttagaaatacatcttttataatgggggaagaatgccctatgtttcaattcaaaacaaagacagttttccaatctgatataaactaaaagggataatattttagaatatgggcttatatgtggtttttttttttggttatgaattacagtaaatctcccaggccttcagatttctacataatggaagaatatgtttttaaccctgagatcaagtttagtaggcaggacttgatctcaagtggtcacaaagttttctaaaaaaaaatagaaaattatgatgggatcaaataaggagcaagtgtcaaattccagccaacaggcagatctgcaggcagagctacaaactctgcagccaggaatggggaccagtgagagagtgtgggcgggggggtgggtgtcagagtcgtaggcactccaacagcagaggagactcccgctcacatgaggccagccgtaccccagtggacagcaggctccttctcactgttgtagacacttgctctccttgcagcatgctgcccccgcccttgccgccaactctgccgtgagatggacctaataggaaataggaaagaaagcctgacaagcctgcttcacaggaaatctgatttgtccttcactgagctcatcttttgcttctttgagtaaaacctggctttactaactattgtcacaaagtggatcttcggctgtggatgagtgtgaaaaacagaaaaaatataaaatccacaaaatcttgtgaaaattaagcatttgggggaaggtaaggcataggtgagtcagtccaatgaatacaatggtcaacataagtaagctctttgaacctatttattttctatttattattatttttattttttatatcttggccactctagccatctcctggcaggggtagtgtggcacagcatggccctatttaatttcttagtcaataatccatcacatagtctcttttagatattaacctaattaaggcaagcaggtagatggatgagtacccaagccgagagaagagtttaaatcaagccttctgtaaataaaatgtggtttaaagatatttttattgaagtgaaacacagtaatttcaaagaggttacgtaatagggagaaaggatgggaaataaccactttgtgctggattgaatgctatatatttacattagctcagttaaaaaaaatagtcttagaaagtgaatattataacccctgtttaaaaataagaaaactgagtcttgggaaagttaagtagcttgacctgagattcacagtttacaactacaaaactcatatactatattttataacacactgtctcttactcttactatttaaaaaaaagagattgttttaaaaattgattcatttaactcagtgaatgaagttgaagataaattcacaacagaaccattgatttgaactcagtgaatataaaatgtttaactttattctttagatcttagctttttacttttcacattcctttggtaattattctgtatcttaatttttaaaaaaatcatgtgaatggacagacagatagatggacagtatgaccgatagacagacctgtccctgagtgtgagtgtatgtagaagagtccccctgtcaagttatgttataaaagttcatctgaggtcagatattgggaataaagtttcatttttccatcgaaacaatcacgtaatgttagttggggtgctggtcaaacgcatagaagcctatgtaattctcagtgtagcttccctataatgtcattttggtacgaaagaacttaaaccctgagaaaaaaactgtagctcagtctccacctaagtaactggagcatgtgcccacttctgtgcccccaatccgcaatctccttccccagttccaggggcctgctgggattggctgcagtggaagaggctctttgagctgggagaagggtttatgcagaaagtggggctagaaggctttggctggatctctggaggggagggagttccatggtggctggaaatctccaaagctggtttcataaaatagcatgcaagaaaaaaacccaagtcttcaagaatagccatcactaggaaacagtatggtagctctactaaaagaaaagtaatgccaacatgaaaaacaacccctagattggagagcaacatttcactttatatgtctttcttctgagccctgcccctattacattctcagcattccagtctttctccatagaagtctctcagcaaatgctctttttttgaaatgctttaaatgtatactttgagacggaggtttgagctgagtactgctgtggaaagctcctgctcaattcaaaacacagaccggggggatgtctttagagtcaggagaaaacatcatgtgccaagggtgctctccaaactgatgactagttcccagacttaacagaggtcaagcggagaaaaaggaaaactttctttagagaagaaaaagaaaaatcttatcacttctcatatttctttaggcagtgtatgagcttatttgctgatatcactaatcctgagatgaaaaacaggatggacttaagtaatttttaacctatttctgaggccaaaaagactgtagtattattttaatcaaatttatgcattttcagtgggacttcaaattttaataataaggcaatacttttatcttcttaaagtatatttcctgtacttataagtgtgcaaatgacataattttaaaattagttggaatattgaaaaaaattaaaatttcacttgtaaaataa

SEQ ID NO: 241093 - DNA, 1446 bp, Artificial Sequence
  derived and/or modified sequence
atggccgcctcctggagcctgctggtgaccctgcggcccctggcccagagccccctgcggggccgctgtgtgggctgtggggcctgggccgccgccctggcccccctggccacagcccctgggaagcccttctggaaggcctacacagtgcagaccagcgagagcatgacccccacagccaccagcgagacctacctgaaggccctggccgtgtgccacggccccctggaccactatgacttcctgatcaaggcccacgagctgaaggatgatgagcaccagaggagggtcatccagtgcctgcagaagctgcacgaggacctgaagggctacaacattgaagctgagggcctcttcagcaagctgttcagccgcagcaagccaccccggggcctgtatgtgtatggagatgtgggcaccgggaagaccatggtgatggacatgttctacgcctacgtggagatgaagaggaagaagagggtgcacttccacggcttcatgctggatgtgcacaagaggatccaccggctgaagcagagcctgcccaagaggaagccaggcttcatggccaagagctatgaccccatcgcccccatcgccgaggagatcagcgaggaggcctgcctgctgtgctttgatgagttccaggtgacagacattgctgatgccatgatcctgaagcagctgtttgaaaatctcttcaagaatggagtggtggtggtggccaccagcaacagacctccagaagatctctacaagaatggcctgcagagggccaactttgtgcccttcatcgctgtgctgaaggagtactgcaacacagtgcagctggacagcggcatcgactacaggaagcgggagctgcctgctgctgggaagctgtactacctgaccagcgaggctgatgtggaggccgtgatggacaagctgtttgatgagctggcccagaagcagaatgacctgacccggccccgcatcctgaaggtgcagggccgggagctgcggctgaacaaggcctgtggcaccgtggccgactgcacctttgaggagctgtgtgagcggcccctgggcgccagtgactacctggagctgagcaagaactttgacaccatcttcctgaggaacatcccccagttcaccctggccaacagaacccagggccgccgcttcatcaccctgattgacaacttctatgacctgaaggtgcgcatcatctgcagcgccagcacccccatcagcagcctcttcctgcaccagcaccatgattctgagctggagcagagccgcatcctgatggatgacctgggcctgagccaggacagcgctgagggcctgtccatgttcaccggggaggaggagatctttgccttccagaggaccatcagccggctgacagagatgcagacagagcagtactggaatgaaggagacaggaccaagaagtag

SEQ ID NO: 241094 - DNA, 1446 bp, Artificial Sequence
  derived and/or modified sequence
atggccgccagctggagcctgctggtgaccctgcggcccctggcccagagtcctctgcggggcagatgcgtgggctgcggcgcatgggctgcagccctcgcccctctggctactgcccctggcaaacccttctggaaagcctacaccgtgcagacttccgaatccatgacgcctacagctacctccgagacctacctgaaggccctggcagtctgtcatggaccacttgatcattacgattttctgattaaggcccacgaactgaaagacgatgagcatcagcggagagtcatccaatgtcttcaaaaactgcacgaagacttaaagggttacaatatcgaggccgaagggctgttttccaagctcttttctcgctcaaagccgccccgtggcctttatgtatatggtgacgtgggtacaggaaagacgatggttatggacatgttttatgcttacgtagaaatgaaacggaagaaaagagtgcacttccacggattcatgctggatgtgcacaagcgcatacataggctgaaacagtcccttcccaagcgcaagcccgggttcatggcaaagtcttacgatcctattgctcctatagcagaggaaatatctgaggaggcatgcctgttgtgtttcgacgagttccaggttactgatattgctgatgccatgattcttaagcagttgtttgagaatctattcaagaacggcgttgtggtcgtggctacgtccaacaggccccctgaggatctgtacaaaaatgggttacaaagggccaactttgttccttttatcgcagtgcttaaagaatactgcaacacagtacagcttgacagcggtatcgactaccgaaaaagggagctgcctgccgcgggtaagctttattatctgacttccgaagcagatgtggaggccgtgatggacaagctatttgatgagctggcccagaagcagaatgatctgaccagacctcgcattctgaaggtacaagggcgagaactgcgcctcaacaaagcctgcgggacagttgccgattgcaccttcgaagaactgtgcgaacgacccctgggagcctccgattacttggaactttccaaaaacttcgacacaatattcttacgcaacatcccccagtttactctggccaaccgcactcagggacgcagatttatcactcttatcgataatttttacgatctgaaggttagaataatttgctctgcttcaacccctatttctagcctcttcctacaccaacaccacgactctgaattagaacagtcccggattctgatggatgacttggggctcagccaagacagtgctgaaggcctaagcatgtttaccggcgaggaggagatcttcgccttccagagaaccatttcccgactgaccgaaatgcagacagagcagtactggaacgaaggggatcggactaaaaaatag

SEQ ID NO: 241095 - DNA, 1446 bp, Artificial Sequence
  derived and/or modified sequence
atggctgcctcatggagcctgcttgtgacactgcgccctctcgcccagagccctttgagaggccgttgcgtcgggtgcggcgcttgggcagcagctctggcccctttggctactgccccagggaagcccttctggaaagcatatactgtgcaaacctccgaatctatgacacctactgctactagtgagacttacttgaaagctctggcagtgtgtcacgggcctctagatcactacgattttttgattaaagcccacgagttgaaggacgacgagcatcaacgtagagtgatacaatgcctacagaagctgcacgaagaccttaaaggttataacatcgaagccgaaggactcttctctaaactatttagtaggtccaaacctcccagggggttgtatgtttatggggatgtgggcaccggaaagactatggtcatggacatgttctatgcgtatgtggagatgaagaggaaaaaacgtgttcactttcacggttttatgctcgacgtacacaagcggatccaccggctgaagcagtccctcccgaaaagaaagccgggattcatggccaaaagctacgaccccattgccccaatcgccgaggaaataagtgaggaggcctgcctcctctgtttcgacgaatttcaagtaacagacattgctgatgctatgattctgaaacaactgttcgagaacctattcaagaatggagttgtggtcgtagccaccagtaatagaccaccggaggatttatataaaaacggcctacagagggcaaacttcgtgccatttattgcagtcctgaaggagtactgcaacacagtccaacttgactctgggatcgactataggaaacgtgagctcccggctgctgggaaattatactatctgacgtccgaagccgacgtggaggccgtaatggataaactgttcgatgagctggcccagaaacaaaatgatcttacgagacccaggatcttaaaggtgcaaggaagagaactgcgactgaataaggcttgtggcaccgtggcagattgcaccttcgaggaactctgcgaaaggccgctgggggctagcgattacttagagttgtccaagaacttcgatacaatcttcctccggaacatcccccagttcaccttagcaaaccgcactcaggggagaaggtttatcacactcattgacaatttctatgacctgaaggtgcgcataatatgtagtgcctcaactccaatttcaagcctatttctgcaccagcatcacgactctgaactagagcagagcagaattttgatggatgacttggggctttctcaagattccgctgaggggctctctatgtttacaggcgaagaggagattttcgccttccagcggacgatttccaggcttaccgagatgcagactgagcagtactggaatgaaggtgatcggacaaaaaaatag

SEQ ID NO: 241096 - protein, 229 aa, Artificial Sequence
  derived and/or modified sequence
MKQQQWCGMTAKMGTVLSGVFTIMAVDMYLIFEQKHLGNGSCTEITPKYRGASNIINNFIICWSFKIVLFLSFITILISCFLLYSVYAQIFRGLVIYIVWIFFYETANVVIQILTNNDFDIKEVRIMRWFGLVSRTVMHCFWMFFVINYAHITYKNRSQGNIISYKRRISTAEILHSRNKRLSISSGFSGSHLESQYFERQSFHTSIFTCLSPVPSSAPSTCRYTIDVC

SEQ ID NO: 241097 - DNA, 690 bp, Artificial Sequence
  derived and/or modified sequence
atgaagcagcagcagtggtgcggcatgaccgccaagatgggcaccgtgctgagcggcgtgttcaccatcatggccgtggacatgtacctgatcttcgagcagaagcacctgggcaacggcagctgcaccgagatcacccccaagtacagaggcgccagcaacatcatcaacaacttcatcatctgctggagcttcaagatcgtgctgttcctgagcttcatcaccatcctgatcagctgcttcctgctgtacagcgtgtacgcccagatcttcagaggcctggtgatctacatcgtgtggatcttcttctacgagaccgccaacgtggtgatccagatcctgaccaacaacgacttcgacatcaaggaggtgagaatcatgagatggttcggcctggtgagcagaaccgtgatgcactgcttctggatgttcttcgtgatcaactacgcccacatcacctacaagaacagaagccagggcaacatcatcagctacaagagaagaatcagcaccgccgagatcctgcacagcagaaacaagagactgagcatcagcagcggcttcagcggcagccacctggagagccagtacttcgagagacagagcttccacaccagcatcttcacctgcctgagccccgtgcccagcagcgcccccagcacctgcagatacaccatcgacgtgtgctag

SEQ ID NO: 241098 - DNA, 690 bp, Artificial Sequence
  derived and/or modified sequence
atgaagcaacaacagtggtgcgggatgacggccaaaatgggcaccgtcctgagcggtgtgttcactattatggccgtagatatgtatttgatcttcgaacagaaacatctgggaaatgggtcatgcacagaaatcacacccaagtatagaggcgcctcaaacattattaataacttcattatatgttggtccttcaaaattgtcttattcttatccttcattaccattttgattagttgcttcctgctgtacagtgtttacgcccaaatctttcgaggactagtgatttatatagtctggatctttttctatgaaacagccaacgtggttatccagattctcacaaataacgacttcgacattaaggaagttagaataatgaggtggttcgggctcgtcagcaggactgtaatgcactgtttttggatgttcttcgtgattaattatgctcatattacttataagaaccgctctcagggcaatattatttcttacaagcgacgaattagcacagcagagattctccacagccgtaacaagcggctgtccatatcctctggcttcagcgggtctcatctcgagtcccaatacttcgaaaggcagagctttcacacatcgattttcacatgtttgtcaccggttcctagcagcgccccctctacttgccggtacacgattgatgtttgttag

SEQ ID NO: 241099 - DNA, 690 bp, Artificial Sequence
  derived and/or modified sequence
atgaagcagcagcagtggtgtggcatgacagccaagatgggcaccgtgctgagcggggtcttcaccatcatggctgtggacatgtacctgatctttgagcagaagcacctgggcaatggcagctgcacagagatcacccccaagtacagaggagccagcaacatcatcaacaacttcatcatctgctggagcttcaagatcgtgctcttcctgtccttcatcaccatcctgatcagctgcttcctgctgtacagcgtgtatgcccagatcttccggggcctggtgatctacatcgtgtggatcttcttctatgaaacagccaacgtggtgatccagatcctgaccaacaatgactttgacatcaaggaggtgcgcatcatgcgctggtttggcctggtgtccaggacagtgatgcactgcttctggatgttctttgtgatcaactatgcccacatcacctacaagaacagaagccagggcaacatcatctcctacaagaggcgcatcagcacagctgagatcctgcacagcaggaacaagaggctgagcatcagcagcggcttcagcggcagccacctggagagccagtactttgagcggcagagcttccacaccagcatcttcacctgcctgagccctgtgcccagcagcgcccccagcacctgccgctacaccattgatgtgtgctag

SEQ ID NO: 241100 - DNA, 690 bp, Artificial Sequence
  derived and/or modified sequence
atgaagcagcagcagtggtgcggcatgaccgccaagatgggcaccgtcttgtccggggtcttcacgattatggctgtggacatgtatttaatttttgagcagaaacacctggggaatgggagttgtactgagataacgccgaagtatcgtggcgcgtccaacatcattaacaattttataatctgttggtccttcaagatcgtacttttcttgagttttattaccatcttgatatcatgcttcctcttatactcagtgtatgctcagatctttagggggctggtaatttacattgtgtggatcttcttttatgaaaccgccaacgtcgttattcagatcctcacaaataacgatttcgacattaaggaggtgagaatcatgcgatggttcggtctggtgtctagaacggtgatgcactgtttctggatgttctttgttattaattacgcacatataacttataagaaccgcagtcagggtaatattatctcatacaaaaggagaatatcgacagcagagattttacattctcgcaacaaacgtctcagcatatcttcggggtttagcgggtctcacctggaatcccagtacttcgaacgacaaagttttcacacctcaatattcacttgcttgagcccagttccctcatctgctcctagcacttgccgctatacaatagatgtttgctag

SEQ ID NO: 241101 - DNA, 690 bp, Artificial Sequence
  derived and/or modified sequence
atgaagcaacagcagtggtgtggcatgacggccaaaatgggaactgtgttatccggcgtgtttaccattatggctgtggacatgtacctgatattcgagcaaaagcacctgggcaacgggagctgcacagagatcaccccaaagtacaggggtgcgtcaaacattatcaataattttataatctgctggtcatttaagatcgtgttgtttctctcatttattacgattcttataagctgctttctactatacagtgtctatgcccagatattcagaggactggttatttacattgtgtggatcttcttctacgagacggccaacgtggttatacaaattctgactaataatgatttcgatattaaggaagtgagaataatgcggtggtttgggctagttagccgcaccgtgatgcattgcttttggatgtttttcgtgattaactacgctcacattacttataaaaaccggagccagggtaacattatcagctacaaacggagaatttctaccgctgagatcctgcactcccgaaacaaaaggctcagcatctcgtctggtttttctggcagtcatttggagtcacagtattttgaaaggcagagttttcacacttctattttcacctgtctcagccccgtcccgtcctcagcaccttccacatgtcgatatacaattgatgtttgttag

SEQ ID NO: 241102 - DNA, 1546 bp, Artificial Sequence
  derived and/or modified sequence
agttcctacccgcgagagggaagaagcaggaggtctcagcatgaaacagcagcagtggtgtgggatgactgccaaaatgggcaccgtgttgtcaggggtcttcaccatcatggccgtagacatgtatctcatctttgaacagaagcacctagggaatggcagttgcactgagatcacaccaaagtacaggggtgcaagtaacatcataaataacttcatcatctgctggagttttaaaatcgtcctcttcctgtctttcatcaccatcctcatcagctgcttcctcctgtactcagtgtatgcccagatcttcaggggcctggtcatctacattgtctggatttttttctatgaaactgcaaacgtcgtaatacaaatcctcaccaacaatgactttgacattaaagaggtcagaatcatgcgctggtttggcttggtgtctcgtacagtcatgcactgtttctggatgttctttgtcatcaactatgcccacataacctacaaaaaccggagccagggcaatataatttcctacaagagacgaatttctacagcggagattctccacagcagaaataaaagattatcaatttcgagtgggttcagtggctcacacctggaatcccagtactttgagaggcagagcttccacactagcatatttacctgtctgtctccagtgccaagctcagcccccagcacctgtagatacacaatagatgtctgctgagaggtgctctggtaaaacaagtataaaatgaatgtcaggatgttctccctcatggtgggcatcttctctgtccttaataccacccagttcttcatctttgacctgaaccagaagacacacatttgctatgaggccaagttcagcatctacgtggactcaaagtcggagctagtcacttggaccctgttccacagggctaatatcagcactggcctctccctcaccaccatcatcatcggctgcttcctcttttattgtatccacaagaatatctacatggggctgctgatctatgccatgtggatcatcacttacgagctcatcaacttctccatagtcctgctcctcaacgggatcatcaaagatcacttcaagacgctgagttatttgcactggatcttccaaatctcacacatgctcctgcactttttctgtctgcccttcatcgtcaagcatgcatacaacctttacaaggaatcccagactgtgggcaggaaacgccgccacaggctctgctccaccattgcagtgaactcatgactacctgtccgtctgggaatgttgtaccggaagttaaactgaaccatgccagatgccaggaaaggtgggagggaatggtgttcctcaacaatggaaccctccctaccctgcctgtcttctgttgatgctgcttggtttgtcagggcttttgagttttacgcactgaggaatgattctcgggagagggcaggttgtgcggatcaattattttacagatgtgttgtgtgacttgttttagcagttaatgatatgtggccttgtgcttacttaaccatc

SEQ ID NO: 241103 - protein, 856 aa, Artificial Sequence
  derived and/or modified sequence
MMSDEKNLGVSQKLVSPSRSTSSCSSKQGSRQDSWEVVEGLRGEMNYTQEPPVQKGFLLKKRKWPLKGWHKRFFYLDKGILKYAKSQTDIEREKLHGCIDVGLSVMSVKKSSKCIDLDTEEHIYHLKVKSEEVFDEWVSKLRHHRMYRQNEIAMFPHEVNHFFSGSTITDSSSGVFDSISSRKRSSISKQNLFQTGSNVSFSCGGETRVPLWLQSSEDMEKCSKDLAHCHAYLVEMSQLLQSMDVLHRTYSAPAINAIQVPKPFSGPVRLHSSNPNLSTLDFGEEKNYSDGSETSSEFSKMQEDLCHIAHKVYFTLRSAFNIMSAEREKLKQLMEQDASSSPSAQVIGLKNALSSALAQNTDLKERLRRIHAESLLLDSPAVAKSGDNLAEENSRDENRALVHQLSNESRLSITDSLSEFFDAQEVLLSPSSSENEISDDDSYVSDISDNLSLDNLSNDLDNERQTLGPVLDSGREAKSRRRTCLPAPCPSSSNISLWNILRNNIGKDLSKVAMPVELNEPLNTLQRLCEELEYSELLDKAAQIPSPLERMVYVAAFAISAYASSYYRAGSKPFNPVLGETYECIREDKGFQFFSEQVSHHPPISACHAESRNFVFWQDVRWKNKFWGKSMEIVPIGTTHVTLPVFGDHFEWNKVTSCIHNILSGQRWIEHYGEIVIKNLHDDSCYCKVNFIKAKYWSTNAHEIEGTVFDRSGKAVHRLFGKWHESIYCGGGSSSACVWRANPMPKGYEQYYSFTQFALELNEMDPSSKSLLPPTDTRFRPDQRFLEEGNLEEAEIQKQRIEQLQRERRRVLEENHVEHQPRFFRKSDDDSWVSNGTYLELRKDLGFSKLDHPVLW

SEQ ID NO: 241104 - protein, 112 aa, Artificial Sequence
  derived and/or modified sequence
MMSDEKNLGVSQKLVSPSRSTSSCSSKQGSRQDSWEVVEGLRGEMNYTQEPPVQKGFLLKKRKWPLKGWHKRFFYLDKGILKYAKSQTDIEREKLHGCIDVGLSVMSVKKSS

SEQ ID NO: 241105 - protein, 61 aa, Artificial Sequence
  derived and/or modified sequence
MMSDEKNLGVSQKLVSPSRSTSSCSSKQGSRQDSWEVVEGLRGEMNYTQEPPVQKGFLLKK

SEQ ID NO: 241106 - protein, 89 aa, Artificial Sequence
  derived and/or modified sequence
MMSDEKNLGVSQKLVSPSRSTSSCSSKQGSRQDSWEVVEGLRGEMNYTQEPPVQKGFLLKKRKWPLKGWHKRFFYLDKGILKYAKSQTD

SEQ ID NO: 241107 - DNA, 2571 bp, Artificial Sequence
  derived and/or modified sequence
atgatgagtgatgaaaaaaacctcggagtgtcccagaagttagtcagcccttccaggtctaccagctcctgttccagtaagcagggtagcaggcaggattcgtgggaagtggtggagggcctgaggggggaaatgaactacactcaagagccaccagtccagaaggggttccttctgaagaagaggaagtggcctctcaaagggtggcataaaagatttttctatctggacaaaggcatactgaagtacgccaaaagccagaccgatatcgagcgcgagaagctccacgggtgtattgatgtagggctgagcgtaatgtctgtcaagaagtcatccaagtgtatcgacctggacacggaggagcatatataccatctgaaagtgaagagcgaggaagtgttcgatgagtgggtgagtaaactgcgtcaccatcggatgtatcgccagaatgagattgctatgttccctcatgaagtgaatcattttttcagcgggtccaccatcaccgactccagcagtggcgtgttcgacagtatctcttctcggaagcgttcaagcatctctaagcagaatctgtttcaaacaggcagtaacgtgtctttttcttgtggtggcgagacgcgggtacccctgtggctgcagtcttcggaagatatggagaagtgcagcaaggatctggcacattgccacgcatacctagtcgagatgtcccagctgctgcagtccatggacgtgttgcacaggacttactcggcccccgccataaatgcaattcaggttcccaagcctttttcaggccctgtgagactgcacagcagtaacccaaatctgtccaccttagactttggtgaggagaaaaactactctgacggttcggagacaagcagcgagttctccaagatgcaggaagacctgtgccatatcgcacacaaagtatacttcacattgagatccgcttttaatatcatgtctgcagagcgggaaaagctcaagcaattgatggaacaggatgctagctcttcaccctccgcccaagtgataggcctgaaaaacgccttaagtagcgctctggctcagaatactgacctgaaagagaggctgaggcggatacatgccgagagcttgctactggacagccccgccgtcgccaagtccggagataatctggctgaagaaaacagtagagatgagaaccgggctttggtgcaccagttgagcaacgaaagtaggctgtctattactgattccctatctgagtttttcgatgcacaggaggtgcttctcagcccctcctcttctgagaacgagatctccgacgacgacagttatgtgtcggatatctccgacaatctgtcactggacaacttgtcaaacgacctcgataatgagagacagactcttggaccagtcctcgatagtggacgagaggccaaatcccgtaggcgcacgtgtctgcccgcaccctgtccctcatcgtccaacatcagtctgtggaacatcctgagaaataacatcggcaaagacttaagtaaggttgcaatgcccgtggaactgaacgaacccctcaacacgctccagagactgtgcgaagaactagagtattctgagctgctggacaaagccgcgcagatcccttcgccccttgagcgtatggtttatgtggccgcttttgccatctctgcctacgccagcagttattatcgcgctggatcgaaaccctttaatcctgtactcggtgagacctacgagtgcataagggaggataagggtttccagtttttctctgagcaagtgagtcaccacccgccgatcagcgcctgccatgccgaatccagaaactttgtattttggcaggatgtacggtggaagaacaagttctggggtaagagtatggagatcgttccaattggaaccactcacgttaccctccccgttttcggggaccatttcgagtggaataaggtgactagctgcatccataacatcctgagtggccagagatggattgaacactacggggagatcgtgatcaagaatctacacgatgactcttgttactgtaaagtgaatttcatcaaggccaagtactggagcacgaacgcacacgagatcgaggggaccgttttcgaccggtctggcaaggccgtccaccgcctctttggcaaatggcacgagtcaatctactgcggggggggctccagctcagcgtgcgtctggcgagctaacccaatgcctaagggctatgagcaatactattcctttacccaattcgctctggagctgaacgagatggatccatcctcaaagagtctcctgccgcccaccgacactaggttcaggccagatcagaggttcctggaagaaggcaacctggaagaagctgaaattcagaagcaacgaattgagcaactgcagagggagagacgacgcgttttagaggaaaaccacgtggagcaccagcccagatttttccgaaagagtgacgacgatagttgggtgagcaatggaacctacttggagctgagaaaagaccttggctttagcaaactcgaccatcctgtcttgtggtag

SEQ ID NO: 241108 - DNA, 2571 bp, Artificial Sequence
  derived and/or modified sequence
atgatgtctgacgagaaaaacctgggcgtctctcaaaagttagtctccccgagcagatctacctcttcatgctcttccaagcaaggctctaggcaggattcttgggaggtggtggaaggactccggggggagatgaactacacacaggagcctcctgtgcagaagggattcctgttaaaaaagcggaaatggcctctaaagggctggcacaaacgattcttttacctggataagggcattctgaagtacgccaagtcccaaacggacatcgaaagggaaaagctgcatggatgcatcgatgtgggcctctcggtcatgagcgtgaagaaatcctccaagtgcatcgatctcgataccgaggagcacatttaccatctcaaagtgaaaagcgaagaagtctttgacgagtgggtgagcaagctgaggcaccaccggatgtatcgtcagaatgagattgctatgttccctcacgaggtgaatcatttttttagcggcagcactattaccgactcttccagcggcgtgttcgacagtatttcctctcgaaaaaggagctccattagcaaacagaacctgtttcagaccggatccaatgtgtccttttcatgcggtggcgagacgcgggttcctctgtggctccagtcctcggaagacatggagaagtgttctaaggacctggcccactgccacgcatatctagtggagatgtcacagcttcttcaatctatggatgtcctgcacagaacctatagcgccccagccatcaacgccattcaggtcccaaagcccttcagtggtccagtgagattgcattcttccaacccgaatctaagtacactggatttcggggaggaaaagaactactcagacgggagtgaaacctcgagcgagttcagcaaaatgcaggaggatctttgccatatcgcccacaaggtttactttacccttcgatcagccttcaatatcatgtcagcagagagagagaagctaaaacaactgatggagcaggatgcctccagtagtcccagcgcacaggtcattgggctgaaaaacgctctgagctctgccctggcccagaacaccgatctgaaagaacggcttcggcgcatccatgccgaatctttgctcctggacagcccagcagtggctaagagcggcgataatctggccgaagagaattcacgcgacgaaaatagagcactggtccatcaattatctaacgagagtcgtctctcaattaccgacagcctcagtgaattcttcgacgcccaagaagtattgttgagccccagtagttcagagaacgagatttcagacgatgattcctatgtgtccgatatcagtgataatctttccctcgataacctttccaatgatttggacaacgagcgccaaactcttggtccagtgctggatagcggccgggaagcaaagtccaggcggaggacctgcttgcctgctccatgcccctcatctagcaatattagcctttggaacatcctgcggaataacattggaaaagatctgagtaaagttgccatgcccgtcgaactgaacgaacccctaaacacattacaaagactgtgcgaggagctggaatacagcgaactgcttgataaggcagcacaaattcccagtccattggagcgtatggtgtacgtggccgcttttgccatctccgcatacgcctcttcttactaccgggctggatccaagcctttcaatcccgtcctcggggaaacttatgagtgcatcagagaagataaagggttccaattcttctctgaacaggtgagccatcatccacctattagcgcgtgtcacgcggaatcccgcaacttcgttttctggcaggacgtcaggtggaaaaacaagttctggggcaagtcaatggaaatcgtcccaattggcaccacccatgtgacactccccgtgtttggagaccatttcgagtggaataaagtaacctcttgcattcacaatatattgtctggccagcggtggatcgagcactacggggaaattgtcatcaaaaatttgcatgacgacagttgctattgtaaggtcaactttataaaggccaagtactggagcaccaacgctcatgagattgaggggacggtgttcgatcgctctggtaaagccgtgcataggttgttcgggaaatggcatgaaagcatctattgcgggggcggctcttcttccgcctgcgtttggcgcgccaaccccatgccgaaaggctatgaacaatactacagcttcacccaattcgcccttgaacttaacgaaatggaccccagttccaagtctctgctgcctcccaccgacactaggtttaggccagatcaacgctttctagaagaggggaacttggaagaagctgagattcagaaacaacgcatcgagcagctgcagcgcgaacggcgacgggtcctcgaggaaaaccacgtggagcatcaacccaggttctttaggaagagcgacgatgacagctgggtgtccaacggcacttacctggaattacggaaggacttaggcttttccaagttggaccacccggtgctgtggtag

SEQ ID NO: 241109 - DNA, 2571 bp, Artificial Sequence
  derived and/or modified sequence
atgatgtctgatgagaagaacctgggcgtgtcccagaagctggtgagccccagccgcagcaccagcagctgcagcagcaagcagggcagccggcaggacagctgggaggtggtggagggcctgcggggggagatgaactacacccaggagccccctgtgcagaagggcttcctgctgaagaagaggaagtggcccctgaagggctggcacaagcgcttcttctacctggacaagggcatcctgaagtatgccaagagccagacagacatcgagcgggagaagctgcacggctgcattgatgtgggcctgtctgtgatgtctgtgaagaagagcagcaaatgtattgacctggacacagaggagcacatctaccacctgaaggtgaagtctgaggaggtgtttgatgagtgggtgtccaagctgcggcaccacaggatgtaccggcagaatgagatcgccatgttcccccatgaggtgaaccacttcttcagcggcagcaccatcacagacagcagcagtggagtgtttgacagcatcagcagcaggaagaggagcagcatcagcaagcagaacctcttccagacaggcagcaatgtgtccttcagctgtggcggggagaccagggtgcccctgtggctgcagagcagcgaggacatggagaagtgcagcaaggacctggcccactgccacgcctacctggtggagatgagccagctgctgcagagcatggatgtgctgcacaggacctacagcgccccagccatcaatgccatccaggtgcccaagcccttcagcggccctgtgcggctgcacagcagcaaccccaacctgagcaccctggactttggagaggagaagaactacagtgatggcagcgagaccagcagcgagttcagcaagatgcaggaggacctgtgccacatcgcccacaaggtgtacttcaccctgcggagcgccttcaacatcatgtctgctgagcgggagaagctgaagcagctgatggagcaggatgccagcagcagccccagcgcccaggtgattggcctgaagaatgccctgagcagcgccctggcccagaacacagacctgaaggagcggctgcggcgcatccacgccgagagcctgctgctggacagccctgctgtggccaagagcggggacaacctggccgaggagaacagcagagatgaaaatagagccctggtgcaccagctgagcaatgaaagccggctgagcatcacagacagcctgtctgagttctttgatgcccaggaggtgctgctgagccccagcagcagtgaaaatgagatcagtgatgatgacagctatgtgtctgacatcagtgacaacctgagcctggacaacctgagcaatgacctggacaatgaaaggcagaccctgggccctgtgctggacagcggccgggaggccaagagcagaagaaggacctgcctgcctgccccctgccccagcagcagcaacatcagcctgtggaacatcctgaggaacaacatcggcaaggacctgagcaaggtggccatgcctgtggagctgaatgagcccctgaacaccctgcagaggctgtgtgaggagctggagtacagcgagctgctggacaaggccgcccagatccccagccccctggagaggatggtgtatgtggccgcctttgccatcagcgcctatgccagcagctactacagagctggcagcaagcccttcaaccctgtgctgggggagacctatgagtgcatcagagaagataaaggcttccagttcttcagcgagcaggtgagccaccacccccccatcagcgcctgccacgccgagagcaggaactttgtgttctggcaggatgtgcgctggaagaacaagttctggggcaagtccatggagatcgtgcccatcggcaccacccacgtgaccctgcctgtgtttggagaccactttgagtggaacaaggtgaccagctgcatccacaacatcctgagcggccagcgctggattgagcactacggggagatcgtcatcaagaacctgcatgatgacagctgctactgcaaggtgaacttcatcaaggccaagtactggagcaccaatgcccacgagattgagggcaccgtgtttgacagaagtggcaaggctgtgcaccggctgtttgggaagtggcatgagagcatctactgcggcggcggcagcagcagcgcctgtgtgtggagggccaaccccatgcccaagggctatgagcagtactacagcttcacccagtttgccctggagctgaatgagatggaccccagcagcaagagcctgctgcccccaacagacacccgcttccggccagaccagcgcttcctggaggagggcaacctggaggaggccgagatccagaagcagagaattgagcagctgcagcgggagaggagaagagtgctggaggagaaccacgtggagcaccagccccgcttcttcaggaagagtgatgatgacagctgggtgtccaatggcacctacctggagctgaggaaggacctgggcttcagcaagctggaccaccctgtgctgtggtag

SEQ ID NO: 241110 - DNA, 2571 bp, Artificial Sequence
  derived and/or modified sequence
atgatgagcgacgagaagaacctgggcgtgagccagaagctggtgagccccagtcgatctacatctagttgttcttctaagcagggctctcggcaggactcatgggaggtagtagaaggattacgaggagagatgaactacacccaggagccacctgtgcagaagggctttttgctgaaaaagcgtaaatggcctctgaaaggctggcacaagcgatttttctacctcgacaaaggcatccttaaatacgcaaagtcacagacggatatcgaaagggaaaaactccatggctgtatcgatgtgggactgtcagtcatgtccgtcaagaagtcgtccaagtgtatagacctggatacggaggaacacatctaccacctgaaggtgaaaagcgaggaagtcttcgacgaatgggttagcaaactcagacaccaccgaatgtaccgccaaaacgagattgcaatgttcccccatgaggtgaatcacttcttctccggttccacaatcacagactcttctagcggtgtgttcgatagcatcagctcacggaagcgctcatctataagtaagcagaacctgttccaaaccggctcgaacgtttcttttagctgcggaggagagactcgtgtgcctctatggttgcagtcttccgaggacatggaaaagtgcagcaaggacctagcccactgtcacgcctatctggtggagatgagccagttgttgcagagcatggatgtgctccaccgtacctacagcgcacccgccattaatgcaatccaggttcccaaaccgttctctggacctgtgcgacttcactccagcaatcccaacctttctacactggattttggagaggaaaaaaactatagtgatggctcggagacaagttcggagtttagcaagatgcaggaggacctgtgccacattgctcataaggtgtacttcacattaaggagtgcattcaatatcatgagcgccgagagggagaagctcaagcagctcatggagcaggacgcaagttctagcccctccgctcaggtgattggtctaaagaacgccctcagctccgctcttgctcagaataccgaccttaaagaacggttaagacggatccatgctgagagcctgcttctagattcgccagccgtggctaaatctggcgacaacctggccgaggagaatagccgggacgagaatagggccctggttcaccagctcagcaacgagagcaggctgtctattacagatagcctcagcgaattttttgacgcccaagaagtgctcttgtcaccttcatcctccgaaaatgagatttcagacgatgatagttacgtgagcgacatctccgacaacctgagtttggacaacttgagcaacgatctggataacgagcggcagacactcgggccagtgctcgactccggccgggaggccaagagtcgacgacgaacgtgcctcccagcaccgtgcccttccagctcaaatatctctctgtggaacattctgcgcaataatatcgggaaggatttatccaaggtggctatgcccgtcgaactgaacgagccgcttaacacccttcagagactgtgcgaagagttagaatactcagaactgctggataaagcagctcagattccctcccccctggagaggatggtttacgtggctgcctttgccatttcagcctacgcctctagctactacagggcgggctcaaaacctttcaatcccgtccttggagaaacatacgagtgtatccgtgaggacaagggattccagttcttttcagagcaggtcagtcaccatcctcctatttccgcatgccatgccgaatctagaaacttcgtcttctggcaggatgtccgatggaagaacaagttctggggtaaatccatggaaatcgtaccaataggcactacccacgtaaccttgcccgtgtttggcgaccattttgaatggaacaaagtaacatcctgtattcacaacatcctgagcggtcagcgctggatcgagcattatggagagatcgtaattaagaatttgcatgacgatagctgttactgcaaggtgaattttatcaaggccaaatactggtccactaatgcccacgagattgaaggcacggtattcgatcgtagtggtaaagctgtgcaccgcctctttggcaaatggcatgagtccatatactgcggcggaggctcgtcgagtgcctgtgtgtggagagcaaacccgatgcctaagggctacgagcaatactactccttcacacagtttgctttggagctgaatgagatggacccctcctcaaaatcactgctgcctccaacagacaccagattccggccagatcaacggtttctagaggaaggcaatctcgaggaggccgagatccagaaacaaaggattgagcagcttcaacgggaacgtaggcgagtgttggaagagaatcacgttgaacaccaaccaagattcttcaggaaatcggatgacgactcatgggtaagcaacgggacatacctcgaactcagaaaagacctgggttttagcaaacttgaccaccctgtgctgtggtag

SEQ ID NO: 241111 - DNA, 2571 bp, Artificial Sequence
  derived and/or modified sequence
atgatgagcgacgagaagaacctgggcgtgagccagaagctggtgtccccatctcgttccacaagttcttgtagtagtaaacagggatctaggcaagatagctgggaagttgttgaagggcttaggggcgagatgaattatactcaagagcctccagtacagaaaggcttcttactgaagaagaggaagtggcctctaaagggatggcacaagaggttcttttacttggacaagggtatccttaaatacgcaaagtcccaaacagacatagaaagagagaagttgcacggttgtatcgatgtggggctaagcgtcatgtctgtcaagaagtcctcaaagtgtattgacttggatacagaagagcacatctatcacctgaaagtgaagtctgaggaggtgttcgacgagtgggtcagcaaattaaggcaccaccgaatgtacaggcagaacgaaatcgccatgttcccccatgaggtgaaccatttcttcagtgggtcaaccataacagattcatcatccggtgtcttcgatagcatcagttcacgcaagcgtagctcgatcagcaagcaaaatctctttcagactggatctaacgtgtcgttttcatgtggaggtgaaactagagtgccactgtggctgcagtcatctgaagatatggaaaaatgcagtaaagacctcgcgcattgtcacgcctatctggtcgagatgtctcagctcctccagagcatggatgtccttcaccgcacatatagcgcaccagccatcaacgcgatccaggttccaaaaccgttctctggacccgttcggctccactcatcaaatcctaaccttagtaccttggatttcggagaggaaaagaactatagcgatgggtccgagacttcctcggagttcagcaaaatgcaagaggacctttgtcatatcgcccacaaggtgtatttcacgcttaggtcagctttcaatatcatgagcgcagaaagagagaaactgaaacagctaatggagcaagacgcctcatcgagcccgagtgctcaggtgattggactcaagaatgccttgtcctccgctctggcacagaacacagatcttaaagagcgtctgaggagaatccatgccgagtccctcctccttgacagtcccgccgttgctaagagtggggataaccttgccgaggagaattcaagagatgagaacagggcgctcgtgcatcagctttctaacgagtcacgtctttccattaccgactccctctccgaattttttgacgcccaggaagtcttgctgtctccaagctcgtctgagaatgaaatttctgacgatgactcatacgtatccgacattagcgataacctgtctttggacaacctgtcaaacgacctcgacaatgagagacaaacacttggccctgtattagacagcggcagagaggctaaatcaaggcggcgtacctgcctgcctgccccatgcccctccagctctaacatatccctctggaacatcttgcggaataacatcggaaaggacttgtccaaagtcgctatgcccgtagagctgaacgagccacttaacactctccaacgcctgtgcgaggagctggaatactcggaacttttagataaggccgcccaaatacccagcccattggagcgtatggtatatgttgccgcgttcgcaatctccgcatatgctagttcctattaccgggctgggtcaaagccattcaatcccgtgcttggggaaacctacgaatgtattcgcgaggataaggggtttcaattcttttctgaacaggtttcgcatcatccgcctattagcgcatgtcacgcagaatctaggaatttcgtgttttggcaggacgtcagatggaagaacaagttttggggaaaatcaatggagattgtgcctattggaaccactcacgtcacactaccggtttttggcgatcacttcgaatggaataaggtcacgtcatgcattcacaacattctctcaggtcagagatggattgaacactacggagagattgtgatcaagaacctacatgacgattcgtgctactgcaaggttaactttataaaggcaaagtactggtctacaaacgcccatgaaatagagggcactgttttcgaccgctctggaaaggccgtgcacagactgtttggcaaatggcatgagtcaatctactgcggcggaggttcgtcttcagcttgtgtctggagagccaatcccatgcccaagggctatgaacaatattacagttttacacaattcgctctggaacttaacgagatggaccccagcagtaagtctctgctaccccccactgacaccaggtttagacctgatcagcgctttctggaagagggaaatctggaggaagccgagatccagaagcagaggatcgagcagttacagagagaacgcaggcgcgtgctggaggaaaatcacgtagaacatcagccgcggttctttaggaagtcggacgatgattcgtgggttagcaatggaacttacctggagctccgtaaagatctgggcttctctaaactcgatcaccccgttctgtggtag

SEQ ID NO: 241112 - DNA, 6612 bp, Artificial Sequence
  derived and/or modified sequence
gctggtggcgcccgccagccggcccgggagaggggacttgagcgcttcgcggccggtgcgcagcgcggctccggccccgcagtctgtctgcaagtggccatccccgcccccgactcctgcggccggtgcgggagctgtcagctgcacgttgcgggggtaccggagaagccggggttgccttctcccggttctgtgcgctaaccccggagcccggccccggggaactagggagcgtctccggctgcacagcgctcaggttttagggtttcctttgggccacccaaaatgttttttaaatactttggataagagctaaaccacctgccactggggacttccatactctcggctcccttgtcatctgatggcattttgattgtctcgaggccaagtgacttgctgtccatgatgagtgatgagaagaaccttggtgtgtcccaaaaattggtatcaccttcaaggagcacaagtagctgctcttccaagcaaggaagtcgacaggacagctgggaagtggtggaaggactgaggggggagatgaattacacccaggagccaccagttcagaaaggatttttgctgaaaaagaggaagtggcccttaaaaggctggcataagagattcttctatctggacaaaggaatcttgaaatatgccaagagccaaaccgatatagagagagagaagctgcatggctgcattgatgtcgggctctcagtgatgtctgtaaagaagtcatcaaaatgcatagaccttgacaccgaggagcacatctaccatctgaaggtcaagtcagaagaagtctttgatgagtgggtatcgaaacttcgccaccacagaatgtatcgtcagaatgaaattgccatgtttccacatgaagttaaccactttttctcagggtccaccatcacagactcttcatctggggtgtttgactccatttcaagtaggaagcgtagcagtatatcaaagcagaatttatttcaaactggaagcaatgtatcattttcttgtggtggtgagacacgagttccattatggttacagtcttcagaggacatggaaaaatgctccaaagacctggcgcactgtcatgcctacctggtagaaatgagccagctcctgcaaagcatggacgtcctgcatcggacatactcggcaccagctatcaacgccatccaggtcccgaaacctttttctggcccagtaagactacactcctccaatcctaatttgtcaacactagattttggagaagagaaaaattattctgatggctctgaaacctcatcagagttttctaaaatgcaagaagatctgtgtcatattgcccataaagtttacttcactttaaggtcagcttttaatatcatgtcagcggagagagagaaactgaagcagctgatggagcaggatgcctcctcctccccgtctgctcaggtcattggtctgaagaacgccctgtcatccgccctagcacaaaacacagatcttaaagaacgcttacgcagaatccatgccgagtctctgctcctcgactcccccgctgtcgccaagtcgggtgacaatctggcagaggaaaactccagagatgaaaaccgagctctagttcatcagctttctaatgaaagtagactctccatcactgactccctttctgagttttttgatgctcaggaagttctgttatctccaagctcttcagaaaacgagatttctgatgatgactcatatgtcagtgacataagtgataatctttccttagataatctcagtaatgatttagataatgagagacagaccttggggcctgtccttgatagtggtcgggaagcgaagtcccggagaagaacgtgcctgccggcgccctgcccgagcagcagtaacatcagcctgtggaacatcctgaggaacaacatcgggaaggacctgtccaaggtggccatgccggtggagctgaacgagcccctgaacacgctgcagaggctctgcgaggagctggagtacagcgagctcctggacaaggccgcgcagattcccagccccctggaaaggatggtatatgtggcagcctttgccatatcagcgtatgcatctagctactaccgagctggaagcaagccatttaatccggttcttggagaaacatatgaatgtattcgggaggacaagggcttccagtttttttcagaacaggtcagccaccatccgcctatctctgcgtgtcatgctgagtctagaaattttgttttctggcaagatgtgagatggaaaaacaaattctggggcaaatccatggaaattgttccaattggcacaacccatgtgactctgccagtttttggggatcattttgagtggaacaaagtgacctcttgcatccataacatcttaagcgggcagaggtggattgagcactatggagagattgtcatcaagaacctgcatgatgattcctgctactgcaaagtgaattttataaaggcaaaatactggagcactaatgcccatgagattgaaggcacagtgtttgacaggagtggaaaagcggttcatcggctgtttgggaaatggcatgaaagcatctactgtggcggcggctcctcttctgcctgtgtatggagagcaaatcctatgccgaaaggctacgagcaatactatagcttcacacagtttgcgctggaattaaatgaaatggatccatcatcaaagtctttattgccacctactgacactcgatttaggccagaccagaggtttctagaggaagggaacttagaagaagctgaaatacaaaagcagaggattgaacaactgcagagagaaaggcggcgggtcttagaagaaaatcatgtggagcaccagcctcggtttttcaggaaatccgacgatgactcttgggtgagcaacggcacctatttggaacttagaaaagatcttggtttttccaaactggaccatcctgtcttatggtgaaaaagtaaagaagaaagataacattagtgtatttctcctgtgcttgccttctgaagtggcacaaacctgtgtttatatatttaaaagatactctaggatgatcacttgtgcttagcttagcattgtaactctttaagtctatattttcctcagtgcgtttctttacaatttcaaatgttaccctgattgtttatatgaatgtagaacaccttgacatttctttttatatataaactatttaataaaaatgaaagattgaatgttcatgtgtgggttaaaaaaagaagctttaacactaattttccaaaggttagggaagattccaattaaatttatgccttataaaattatgttgtagaaaaaaaatcaacctctcccaggtgcattaagaaataagaattcccagggttactcacccatgcgtaagctacccaagtttaatttggtagctgaaatatctttttgcctcagacagctcttgaattgctcatacagaacaattctgctggtgctggagtctgaagaatattttcatttgcattttagtggttagggagaggatataagattaatggaatgtatatttttatataagacgtatacggcaccttcttgaaaaggaagcatttgaacttgttcctccctatagttctattgccttatatgcaaaattgtaccctgttgctcagagaaattattcataagagaaaagaattccaattaattaaatatcacaatagcatcccagagagacagtaggaaatttctccttagtgagagctgagtccttgagaagttaagagactgtttcctgcttcccaccccaccccgttttttgtccctccgtttgatcacctccctgttgagtatggaatgtcccagtttaatataaaacatacagtttattccacacagcagtttgactttgtaaaagtttagcaaaataactgattgttttggataactcaacatgtttttcttaaatgctgttttagtattttctacctcttaataagcaccatattttagatcttgtataaaaagttgccatctgccttatagacaaatgtagagaattgatgttcttgctttgtgttgtgttctggtaaagctttaagtgagtgtcttacccctttcctatactttcttgttatccatatcattcttttgtgagttttgcagcagtcttgaataatacagattataactactgaaaggggaaccttcgtctttttaaatgtgttatttcacattacaataatatgtgtagtagttgaattgtgttatcaaagcatgtccaacttctgtccagatgacattaaaaccaaagcctaattgttaagcctcttattctaaagtccatagcaatgctatggaatatcaagtataatgatgtagtaaaaagatttctccagaaaacactttgagatacttaaagaaattcagagcatatcgaatgttatgaatgaagagtaaaataattacaggaaaagaatgcatgatttttcattgtcacaccaaataaccagttggacaatattgcattttcaaaatggagagttatttaaagtggatgtgtagccttctggaatctgcacgtgactggcattttaaaacaactcattaaatattggattcattttatcgagatgccaagatgaacacaatgtgaatatcatttccatttctaagcagttgaatgacacagtcagattctttggtgtatgctttgttctttccatctcaagcatttatccaaattctgctcacagacatgaggaagcaggctgtagatttaagggcactcaaggggaaaacaaatgtagtttccacagtgtgaggataaatgtagaatcgtggtaatattggctgttaaattggcctgctccagagactggctcaaaaaagaaagaagcaacgaaaacaaaatgcacagcctgaatggacgtagcactgtcatgtggcatttggaaaatctttaattatcctaatgttatttcacttgcccttatgctttattttagagtcccagggacaactggatgaaacattacgtctgtagtcatcttatttgagatgggggtgggaacgaattaaaatatgatagagaactatatgcagattttaaaatctagtcagtactagcatctataaagggcttttctgaaatttaaacagcttggtgatgcatcctgatattataagcttaaaactatcttgagggggaaatgacttcttttctccttctgtcccttttctcaaaagcatctttcccccaaatgtatgtctctaggacattttatagttttaagaggaagaaaacagaaacgtggcatcatttgggaagaaccaaggtagaatttaattttctggactttaaatctcctggttaaataatgctaatcactgtaccatttgagttacatgttttaacctcttttttttttctaattattccatccaaaatttctggtgaattacacagaaatttttggaaatgggactttgtgcaggtaaccaccctgcacttcaggtaatgttcctgtcacagctgtcgactaccccacgctgcaggaaatccattcagaaatgagctaacagtctccagtgtagcaggagagccagtcacttccctccccaggccccaaagcaccccaaggctggtattccttgagtcataggtattaataataaaagcctcaatgcagcttctccatgtagttcctctcctacaagccaggtggattctggtcctaactaaagagatgggagttcacctgagggcaagaagtacccaggatgcccaaacagccgcacaggtgtcctgtgcttcctgtgagacttcctgggggaaatatacaaactaatatattttttaatgtttacgtcatttacactgctgcttttctcatattctgcttttaattacttgtagtaaatcatttgtttgggcttcaagcactgtcttccatctgcatcttccagatttatcatgagtgatcttgttctactgttaaagatgtcaagcctaaaaagtaataaagtttttatttggctgttgaaccttgatgtagcccctactacatacactacaagttatgccttctggctactacagaatctccgcagaccttttagttatgagtagaagcaataagaaggtgtccttatggtcttaggaataatagttccaatgtattggcataatttgtttgaatgtctttattttgatattaacaccggcataaatctatttttgctaccagatgatagctattttcatttgctctattttcctctgcattgtactaatctgttactcagtgttagtcttcatttttctgtgttggaaacctgcgtcatgtaaatatctgcaaatcatgacagtctaaagtgcaaaccattttcagagactttggggaatgcagtgatcagaagtggctaatttattttatttctgattattttatccagagggtacttttttaatggatatttgtaaatcttccacttaaccactgaaaattattttgttttaatcccacccttccatccatacctctgcctccccaaaaagctcctattaatttgcttatccccctcatgtagctagttgaatgtgaataaataacatgg

SEQ ID NO: 241113 - DNA, 2969 bp, Artificial Sequence
  derived and/or modified sequence
tttcctttgggccacccaaaatgttttttaaatactttggataagagctaaaccacctgccactggggacttccatactctcggctcccttgtcatctgatggcattttgattgtctcgaggccaagtgacttgctgtccatgatgagtgatgagaagaaccttggtgtgtcccaaaaattggtatcaccttcaaggagcacaagtagctgctcttccaagcaaggaagtcgacaggacagctgggaagtggtggaaggactgaggggggagatgaattacacccaggagccaccagttcagaaaggatttttgctgaaaaagaggaagtggcccttaaaaggctggcataagagattcttctatctggacaaaggaatcttgaaatatgccaagagccaaaccgatatagagagagagaagctgcatggctgcattgatgtcgggctctcagtgatgtctgtaaagaagtcatcaaaatgcatagaccttgacaccgaggagcacatctaccatctgaaggtcaagtcagaagaagtctttgatgagtgggtatcgaaacttcgccaccacagaatgtatcgtcagaatgaaattgccatgtttccacatgaagttaaccactttttctcagggtccaccatcacagactcttcatctggggtgtttgactccatttcaagtaggaagcgtagcagtatatcaaagcagaatttatttcaaactggaagcaatgtatcattttcttgtggtggtgagacacgagttccattatggttacagtcttcagaggacatggaaaaatgctccaaagacctggcgcactgtcatgcctacctggtagaaatgagccagctcctgcaaagcatggacgtcctgcatcggacatactcggcaccagctatcaacgccatccaggtcccgaaacctttttctggcccagtaagactacactcctccaatcctaatttgtcaacactagattttggagaagagaaaaattattctgatggctctgaaacctcatcagagttttctaaaatgcaagaagatctgtgtcatattgcccataaagtttacttcactttaaggtcagcttttaatatcatgtcagcggagagagagaaactgaagcagctgatggagcaggatgcctcctcctccccgtctgctcaggtcattggtctgaagaacgccctgtcatccgccctagcacaaaacacagatcttaaagaacgcttacgcagaatccatgccgagtctctgctcctcgactcccccgctgtcgccaagtcgggtgacaatctggcagaggaaaactccagagatgaaaaccgagctctagttcatcagctttctaatgaaagtagactctccatcactgactccctttctgagttttttgatgctcaggaagttctgttatctccaagctcttcagaaaacgagatttctgatgatgactcatatgtcagtgacataagtgataatctttccttagataatctcagtaatgatttagataatgagagacagaccttggggcctgtccttgatagtggtcgggaagcgaagtcccggagaagaacgtgcctgccggcgccctgcccgagcagcagtaacatcagcctgtggaacatcctgaggaacaacatcgggaaggacctgtccaaggtggccatgccggtggagctgaacgagcccctgaacacgctgcagaggctctgcgaggagctggagtacagcgagctcctggacaaggccgcgcagattcccagccccctggaaaggatggtatatgtggcagcctttgccatatcagcgtatgcatctagctactaccgagctggaagcaagccatttaatccggttcttggagaaacatatgaatgtattcgggaggacaagggcttccagtttttttcagaacaggtcagccaccatccgcctatctctgcgtgtcatgctgagtctagaaattttgttttctggcaagatgtgagatggaaaaacaaattctggggcaaatccatggaaattgttccaattggcacaacccatgtgactctgccagtttttggggatcattttgagtggaacaaagtgacctcttgcatccataacatcttaagcgggcagaggtggattgagcactatggagagattgtcatcaagaacctgcatgatgattcctgctactgcaaagtgaattttataaaggcaaaatactggagcactaatgcccatgagattgaaggcacagtgtttgacaggagtggaaaagcggttcatcggctgtttgggaaatggcatgaaagcatctactgtggcggcggctcctcttctgcctgtgtatggagagcaaatcctatgccgaaaggctacgagcaatactatagcttcacacagtttgcgctggaattaaatgaaatggatccatcatcaaagtctttattgccacctactgacactcgatttaggccagaccagaggtttctagaggaagggaacttagaagaagctgaaatacaaaagcagaggattgaacaactgcagagagaaaggcggcgggtcttagaagaaaatcatgtggagcaccagcctcggtttttcaggaaatccgacgatgactcttgggtgagcaacggcacctatttggaacttagaaaagatcttggtttttccaaactggaccatcctgtcttatggtgaaaaagtaaagaagaaagataacattagtgtatttctcctgtgcttgccttctgaagtggcacaaacctgtgtttatatatttaaaagatactctaggatgatcacttgtgcttagcttagcattgtaactctttaagtctatattttcctcagtgcgtttctttacaatttcaaatgttaccctgattgtttatatgaatgtagaacaccttgacatttctttttatatataaactatttaataaaaatgaaagattg

SEQ ID NO: 241114 - DNA, 2571 bp, Artificial Sequence
  derived and/or modified sequence
atgatgagtgacgagaagaatttgggtgtctcccaaaagctcgtaagcccatcgagatcaacatcatcttgttcgtccaagcagggctctaggcaggattcctgggaggttgttgagggtcttcgaggtgaaatgaattacacacaagaaccaccagtacagaagggcttcctactgaagaagcggaaatggcccttgaaaggctggcacaagcgattcttttacctggataagggcatcctgaaatatgctaaatcccagacagacatcgagagagagaagttgcatggctgtatcgacgtgggcttgtcggtgatgtctgtcaagaaaagtagcaagtgtatagacttggataccgaggaacacatttaccatctaaaggtaaaaagtgaggaggtgttcgatgaatgggtgagcaagcttcgtcatcacaggatgtatcggcagaacgaaatagctatgtttccccacgaagtcaatcatttcttcagcggctccaccataaccgatagctcctctggcgtattcgactcaatcagttcaaggaagcggagttctatcagtaagcagaacctgttccagaccggttccaacgtatctttctcttgtggaggggagacacgcgtccctctgtggttgcaaagcagcgaggacatggagaagtgtagcaaggacttggcgcactgccatgcatacctggtggaaatgagccagctgctgcagtccatggacgtgctccaccggacctacagcgctcccgcaattaacgctatccaggtgccgaaacctttttccggcccagttaggctgcattcctccaaccctaatcttagcactttggactttggagaagagaagaattattccgatggttccgaaacatcctccgagtttagtaaaatgcaagaagatctgtgtcacatagctcataaagtgtattttacgttgagatctgcttttaatatcatgtctgccgagcgagaaaaactgaagcagttgatggagcaagatgcctctagctctccatccgctcaggtgattggactcaagaatgccctctcaagcgccttagctcagaacacagatctgaaggaaaggctgcgtcgtattcatgccgaatccctgctattagacagcccagctgtcgcaaagagcggtgataatctcgccgaggaaaatagccgcgacgagaacagggcgctggtccaccagctgtcgaatgaatcccgactgtcaatcacggacagtctgagcgagttttttgacgcccaggaggtactgctcagtcctagctccagcgagaacgaaatatcagatgacgactcatacgtgagcgacatctctgacaatctgagtctcgacaacttaagcaacgatctggacaacgagcgtcagactctggggcctgtgctcgatagcgggagggaagcaaagagtaggcggagaacctgcctgccagccccttgcccctccagcagcaatatcagcctctggaacattttgcgcaacaacatcgggaaagatctgagcaaagtggccatgccagttgagctgaacgaacctttgaacaccctccagagactgtgcgaggagcttgagtactccgagttgctggacaaagccgctcagattccttccccattagaacgcatggtttatgttgccgcatttgccatttctgcctacgcctcgagttattaccgcgcaggaagcaaaccttttaatcctgtgttgggtgaaacgtacgagtgcatacgggaggataagggattccaatttttcagtgagcaagtgtcccatcatcccccaatttccgcttgccacgcagagagtcgcaatttcgtattctggcaggacgtgaggtggaagaataagttttggggaaaaagcatggagatcgtgccaatcggaactactcacgttactttaccagtattcggggatcattttgaatggaataaagtgaccagctgcattcacaacatcctcagcggccaaaggtggatagaacactacggtgagatagtgataaagaacttacacgatgactcatgttactgcaaagttaacttcattaaagcaaagtactggtccacaaatgctcatgaaattgaaggtaccgttttcgacaggtcaggcaaagcagttcataggcttttcggaaagtggcacgagtctatttactgtgggggtggcagctcaagcgcatgcgtgtggagggccaatccaatgcctaaggggtatgagcaatactacagcttcacccagttcgcactggagctgaacgagatggacccaagctccaagtcactcttgcctcctactgacacacgattcaggcccgatcagagatttctggaggaggggaacctggaggaggctgagatccaaaagcagcgtattgagcaactccagcgggaaaggaggcgtgtgttggaagagaatcacgtagaacaccagcccagattcttccgaaagtccgatgatgactcctgggtaagtaacggtacctatttagagttgcgcaaagatttgggcttcagcaaattagaccatcctgttctgtggtag

SEQ ID NO: 241115 - DNA, 2571 bp, Artificial Sequence
  derived and/or modified sequence
atgatgtctgatgagaaaaacctgggcgtcagtcagaagcttgtcagcccctcaagaagtactagctcatgcagttccaagcaagggagcaggcaagacagctgggaggtggtggagggcctccggggtgagatgaattatacgcaagaacctccagtccagaaggggtttctgctgaagaaaagaaagtggccgctgaaaggctggcataaacggttcttttatttggacaaaggcatcctcaagtacgcgaaatcacagaccgacatagagcgggaaaaactgcacgggtgtatcgacgtgggcttgtcggtgatgagtgtgaaaaagtcaagtaaatgcatagaccttgacacggaagagcatatctaccacctaaaagtgaagagcgaggaggtattcgatgagtgggtgtcaaagttgaggcaccatagaatgtaccgtcagaacgaaatcgcgatgttcccgcacgaggtaaatcatttcttcagtggttcgaccataactgatagtagcagcggcgtctttgactccatttcttccagaaaaaggtcctcaatttccaaacagaacctcttccagacagggtccaatgtgagctttagctgcggtggagagactcgcgtccctctgtggctgcaaagctcagaggatatggaaaaatgctccaaggacctggcccattgtcatgcctatctggtggaaatgtcacagctcctgcagtccatggatgtgttgcaccggacctattctgcgccagccattaatgctattcaagttccaaagcctttctccgggcctgtccggttgcatagcagtaatcccaacctttccaccctggactttggagaagagaaaaattattctgacggcagtgaaaccagcagtgagtttagcaagatgcaggaagacctttgccatatagctcataaagtgtacttcacactacgctcggcctttaatattatgagtgctgagagggaaaagctcaagcaactgatggagcaggacgcctcgagcagtccttccgcccaggtcatcggccttaagaacgccttgtctagcgcccttgcacaaaacaccgatctgaaggaacggttaaggaggatccatgccgaatcactgttgctggacagccccgcagtagctaaaagcggcgacaacctcgctgaggagaactcccgtgatgagaaccgcgctctggtgcatcaattgtcgaatgagtcaaggttgtcgattacagatagccttagcgagttttttgatgcccaagaggtcctgctttcaccatctagttccgaaaatgagatcagcgatgatgattcctacgtctccgacatatcagataatctcagcttagacaatctctctaatgatctcgacaatgagagacagaccctgggcccagttctggattccggtagggaggcgaaaagccgacggcgaacatgcctaccagcaccatgtcccagtagttctaacatcagcctgtggaacatcctccgcaacaacattggcaaggacctgtccaaggtagccatgccggtagaactcaatgaaccgcttaatacattacagcgcctgtgtgaagagttggagtactccgaactgttggataaggctgcacagattccaagccccttagagcggatggtttacgtggctgcttttgccattagcgcttacgcctcctcttactaccgagctggctctaagccctttaacccagtactgggagagacctacgaatgtatccgtgaagacaaggggtttcaatttttcagcgagcaggtttctcaccaccccccaatctccgcctgccatgctgagtcccggaactttgtgttttggcaggacgtgaggtggaaaaacaagttttgggggaagagtatggaaattgttcccatcggcaccactcatgtgacgctgccagtgttcggagaccactttgaatggaataaggtaacctcatgcatccataatatcctgagcggccagagatggattgagcactatggtgaaatcgtgattaagaacttgcacgatgattcttgctactgtaaggtgaattttataaaggcaaaatactggagcaccaacgcccatgagatagaggggaccgtcttcgatcggtccggaaaagctgtacatcggttatttgggaagtggcacgaatcaatatactgcggtggcggaagtagttcagcttgcgtatggcgcgcaaaccctatgcccaaagggtatgagcaatactatagttttactcagttcgcgctggaactgaatgaaatggacccctccagtaagtccttgctcccacctaccgatactaggtttcggcctgatcagaggtttttagaggaaggaaacctggaagaggccgaaattcagaaacagcgaatcgaacagctgcagagagagaggaggagggttctcgaggaaaatcacgtagagcaccagcctagattcttcaggaagagcgatgacgatagctgggttagcaacggcacctacttagagcttcggaaagacttgggattctccaaattggaccatccagtactgtggtag

SEQ ID NO: 241116 - DNA, 2571 bp, Artificial Sequence
  derived and/or modified sequence
atgatgagcgacgagaagaacctgggcgtgagccagaagctggtgagccccagcagaagcaccagcagctgcagcagcaagcagggcagcagacaggacagctgggaggtggtggagggcctgagaggcgagatgaactacacccaggagccccccgtgcagaagggcttcctgctgaagaagagaaagtggcccctgaagggctggcacaagagattcttctacctggacaagggcatcctgaagtacgccaagagccagaccgacatcgagagagagaagctgcacggctgcatcgacgtgggcctgagcgtgatgagcgtgaagaagagcagcaagtgcatcgacctggacaccgaggagcacatctaccacctgaaggtgaagagcgaggaggtgttcgacgagtgggtgagcaagctgagacaccacagaatgtacagacagaacgagatcgccatgttcccccacgaggtgaaccacttcttcagcggcagcaccatcaccgacagcagcagcggcgtgttcgacagcatcagcagcagaaagagaagcagcatcagcaagcagaacctgttccagaccggcagcaacgtgagcttcagctgcggcggcgagaccagagtgcccctgtggctgcagagcagcgaggacatggagaagtgcagcaaggacctggcccactgccacgcctacctggtggagatgagccagctgctgcagagcatggacgtgctgcacagaacctacagcgcccccgccatcaacgccatccaggtgcccaagcccttcagcggccccgtgagactgcacagcagcaaccccaacctgagcaccctggacttcggcgaggagaagaactacagcgacggcagcgagaccagcagcgagttcagcaagatgcaggaggacctgtgccacatcgcccacaaggtgtacttcaccctgagaagcgccttcaacatcatgagcgccgagagagagaagctgaagcagctgatggagcaggacgccagcagcagccccagcgcccaggtgatcggcctgaagaacgccctgagcagcgccctggcccagaacaccgacctgaaggagagactgagaagaatccacgccgagagcctgctgctggacagccccgccgtggccaagagcggcgacaacctggccgaggagaacagcagagacgagaacagagccctggtgcaccagctgagcaacgagagcagactgagcatcaccgacagcctgagcgagttcttcgacgcccaggaggtgctgctgagccccagcagcagcgagaacgagatcagcgacgacgacagctacgtgagcgacatcagcgacaacctgagcctggacaacctgagcaacgacctggacaacgagagacagaccctgggccccgtgctggacagcggcagagaggccaagagcagaagaagaacctgcctgcccgccccctgccccagcagcagcaacatcagcctgtggaacatcctgagaaacaacatcggcaaggacctgagcaaggtggccatgcccgtggagctgaacgagcccctgaacaccctgcagagactgtgcgaggagctggagtacagcgagctgctggacaaggccgcccagatccccagccccctggagagaatggtgtacgtggccgccttcgccatcagcgcctacgccagcagctactacagagccggcagcaagcccttcaaccccgtgctgggcgagacctacgagtgcatcagagaggacaagggcttccagttcttcagcgagcaggtgagccaccacccccccatcagcgcctgccacgccgagagcagaaacttcgtgttctggcaggacgtgagatggaagaacaagttctggggcaagagcatggagatcgtgcccatcggcaccacccacgtgaccctgcccgtgttcggcgaccacttcgagtggaacaaggtgaccagctgcatccacaacatcctgagcggccagagatggatcgagcactacggcgagatcgtgatcaagaacctgcacgacgacagctgctactgcaaggtgaacttcatcaaggccaagtactggagcaccaacgcccacgagatcgagggcaccgtgttcgacagaagcggcaaggccgtgcacagactgttcggcaagtggcacgagagcatctactgcggcggcggcagcagcagcgcctgcgtgtggagagccaaccccatgcccaagggctacgagcagtactacagcttcacccagttcgccctggagctgaacgagatggaccccagcagcaagagcctgctgccccccaccgacaccagattcagacccgaccagagattcctggaggagggcaacctggaggaggccgagatccagaagcagagaatcgagcagctgcagagagagagaagaagagtgctggaggagaaccacgtggagcaccagcccagattcttcagaaagagcgacgacgacagctgggtgagcaacggcacctacctggagctgagaaaggacctgggcttcagcaagctggaccaccccgtgctgtggtag

SEQ ID NO: 241117 - protein, 851 aa, Artificial Sequence
  derived and/or modified sequence
MMSDEKNLGVSQKLVSPSRSTSSCSSKQGSRQDSWEVVEGLRGEMNYTQEPPVQKGFLLKKRKWPLKGWHKRFFYLDKGILKYAKSQTDIEREKLHGCIDVGLSVMSVKKSSKCIDLDTEEHIYHLKVKSEEVFDEWVSKLRHHRMYRQNEIAMFPHEVNHFFSGSTITDSSSGVFDSISSRKRSSISKQNLFQTGSNVSFSCGGETRVPLWLQSSEDMEKCSKDLAHCHAYLVEMSQLLQSMDVLHRTYSAPAINAIQGGSFESPKKEKRSHRRWRSRAIGKDAKGTLQVPKPFSGPVRLHSSNPNLSTLDFGEEKNYSDGSETSSEFSKMQEDLCHIAHKVYFTLRSAFNIMSAEREKLKQLMEQDASSSPSAQVIGLKNALSSENSRDENRALVHQLSNESRLSITDSLSEFFDAQEVLLSPSSSENEISDDDSYVSDISDNLSLDNLSNDLDNERQTLGPVLDSGREAKSRRRTCLPAPCPSSSNISLWNILRNNIGKDLSKVAMPVELNEPLNTLQRLCEELEYSELLDKAAQIPSPLERMVYVAAFAISAYASSYYRAGSKPFNPVLGETYECIREDKGFQFFSEQVSHHPPISACHAESRNFVFWQDVRWKNKFWGKSMEIVPIGTTHVTLPVFGDHFEWNKVTSCIHNILSGQRWIEHYGEIVIKNLHDDSCYCKVNFIKAKYWSTNAHEIEGTVFDRSGKAVHRLFGKWHESIYCGGGSSSACVWRANPMPKGYEQYYSFTQFALELNEMDPSSKSLLPPTDTRFRPDQRFLEEGNLEEAEIQKQRIEQLQRERRRVLEENHVEHQPRFFRKSDDDSWVSNGTYLELRKDLGFSKLDHPVLW

SEQ ID NO: 241118 - DNA, 2556 bp, Artificial Sequence
  derived and/or modified sequence
atgatgtcagacgagaaaaatctgggcgtgagtcagaagctcgtgtcgccaagccggagcactagctcttgctcttctaagcaaggttcccgccaagattcctgggaggtggttgaaggactgcgcggggaaatgaactatactcaggaacctccagtccagaaaggtttcctgctgaagaaacgtaagtggcccttaaaagggtggcacaagcgatttttttacctggacaagggcattttaaaatacgccaaaagccagaccgacattgagagagagaaactgcatggctgcatcgatgtgggcctgagcgttatgtccgttaaaaagtcttccaagtgtattgacctcgataccgaggagcacatttaccatcttaaagtgaaatcggaggaggtctttgacgagtgggtctcaaaactgagacaccaccgtatgtaccgacagaacgagatcgcaatgttccctcacgaagttaaccactttttctctggatcgacaattaccgatagtagcagcggtgtgtttgactcaatctccagtagaaaaagatcaagcatctcaaagcaaaacctatttcagactggaagcaatgtgtccttcagctgcgggggcgaaacccgcgtgcctctatggctgcagagctctgaggacatggagaagtgtagcaaggaccttgcacattgccacgcttatctcgtggaaatgtctcagctgcttcaatctatggatgtgctgcaccgcacctattctgcacccgcgataaacgctatccagggaggttcgtttgaaagtccaaagaaggagaaacgcagtcaccggagatggcggagtcgagcgataggcaaagatgccaaaggtaccttgcaggtgccaaaacctttcagcggccccgtgaggcttcacagttcaaacccaaacttgtcaacgctggattttggagaagaaaagaactattctgacggcagtgaaacttctagtgagttttcaaaaatgcaggaggacctttgtcatatcgcccataaagtgtactttactctgcgctccgccttcaacatcatgtccgccgaaagagagaagctaaaacagttgatggaacaggatgcaagttcttccccgtccgcccaagttattggactgaaaaatgccctaagctctgagaatagccgggacgagaatagggccctggttcaccaacttagtaatgaatcacgactatccattacagatagtctatctgaattctttgatgcccaggaggtactgttgtctccttcaagctccgagaacgaaatttctgatgacgactcatatgtcagcgatatcagcgataaccttagcctggacaatctttcgaacgatttggacaatgagcggcagactttaggtcccgtactggacagcggtagagaggccaagagtcgaagaaggacatgcctgcctgctccatgcccgtcgagctcgaacatcagtctgtggaatattttgaggaacaacataggaaaagacctttctaaggtcgcaatgccggtcgagctgaacgagcctctgaacacattacagagactgtgcgaagagctagagtatagcgagctgttagataaagccgcccagattcccagtcctctggaaaggatggtctatgtggcagcttttgcgatctccgcatatgcctcaagttattacagagccggctccaagccgttcaatcccgtcctgggagaaacatatgagtgtattcgagaggataaagggttccagttcttctccgagcaggttagtcatcaccctcccattagcgcctgccatgctgaatccaggaactttgtgttttggcaggatgtcaggtggaaaaataaattctggggaaagagcatggagattgtgccaatcggaaccacacacgtgactctgccggtcttcggcgaccactttgagtggaataaggttaccagctgcatccacaatatcctgtcagggcagcgttggatagagcattacggcgagattgtaataaagaacctgcatgatgatagctgttattgtaaagtgaacttcatcaaagctaaatactggagcaccaatgcccacgagatcgagggtaccgtttttgataggagtggcaaagccgtgcatcgtctctttggaaaatggcatgaaagtatctactgtgggggtggttcttcatccgcctgtgtctggcgcgcaaatcctatgccaaaggggtacgagcagtactatagcttcacacagtttgcactagagctcaatgagatggatccctcctcaaaaagtctcctccccccaaccgatactagatttaggcctgaccagaggttcctcgaagagggcaatctggaagaggctgagatacaaaagcagcgcattgagcaactgcaacgagagcggcgccgggtcctggaagagaaccatgtcgagcatcagccacgctttttccggaaatccgatgatgactcctgggtgtcaaatggaacctacctcgagctaagaaaggacctcggcttcagtaagttggaccaccccgtgctgtggtag

SEQ ID NO: 241119 - DNA, 2556 bp, Artificial Sequence
  derived and/or modified sequence
atgatgtccgatgagaagaaccttggcgtgagccagaaactggttagtcccagccgaagtactagcagttgctcaagtaagcagggttcccgccaagatagctgggaggtggtggaaggcctcaggggagagatgaattacactcaggaaccacccgtccaaaaagggttcctccttaagaaaaggaaatggccactgaaggggtggcataagcggtttttttacttagataaaggcatactgaaatacgctaaatcccaaacagatatcgagcgagaaaaactgcacgggtgcatcgacgtgggtctaagcgtgatgtctgtgaagaagtcctcaaaatgcatagacctagacactgaggaacacatctaccacctgaaagtaaaatctgaggaagtgttcgacgaatgggttagtaaactaaggcatcatcggatgtataggcaaaatgagatagccatgtttccccacgaggttaatcattttttctccggctcaacaattactgattcatccagtggagtgtttgacagcatttcgtcccgcaaaaggtcaagtatctccaaacaaaatttgtttcagacaggctctaacgtgagcttctcctgcggtggtgagacacgggtgccactgtggctgcagtcaagcgaggatatggaaaagtgtagtaaagaccttgcacactgccacgcctatctcgtggaaatgagtcaattactgcaaagtatggacgtgctgcaccgcacatattctgccccggctatcaacgcaattcagggaggaagctttgagtcaccaaagaaggagaaacgcagccaccgcagatggcgatctagagctattgggaaggacgctaagggaacactccaggttcccaagcccttctccggccccgtccgattgcattcaagcaacccaaacttgtctaccctggatttcggtgaggagaagaattatagcgacggctcagagacctcatcagaattctccaagatgcaggaagacctctgtcacattgcacacaaagtgtactttaccttaagaagcgcctttaacatcatgagtgctgaaagggaaaaactcaaacagctgatggagcaggacgcctcttcttcgccttctgcacaagtgatcggtttgaagaatgccttgtcctccgagaacagccgggatgaaaaccgagccctggtacaccagttatctaacgagtctcggctctccatcacagactccttgtccgagtttttcgacgcccaggaggtgctactaagccccagcagctctgaaaacgagattagcgacgatgatagctacgttagtgacatttccgataacctttcacttgacaatctctcgaatgacttagataatgagagacagaccttgggccccgtattagatagcggacgggaggctaagagccggcgacgcacctgcctacccgctccgtgcccaagttcatccaatatctctttgtggaacattttacgaaacaatattggcaaagacctgagtaaggtggcaatgccagtggagctgaatgaaccgctgaatacactccagagactctgcgaggaactggagtattccgagttgcttgataaggctgctcagattcccagccccctggaaagaatggtgtacgtggccgccttcgcaatctccgcatacgccagcagttactacagggcgggttctaaaccgttcaatccagtcctcggcgaaacctatgaatgcattcgtgaggataaaggtttccaattcttctcagagcaggtctcacatcacccccccatctcagcctgccatgccgagtcacgcaacttcgttttctggcaagatgtgagatggaagaacaagttttggggcaagagtatggaaattgtgccaatcggaactactcacgtgacactccctgttttcggcgatcatttcgaatggaacaaagtgacatcatgtattcacaacatactttcagggcagagatggattgagcactacggagagatagtcatcaagaatttacatgacgactcatgctattgcaaagtgaacttcatcaaagcaaaatattggagcaccaacgctcacgaaatcgagggcaccgtttttgacagatctgggaaagccgtacacagactctttggcaagtggcatgaaagcatctattgtggcggagggagctcttctgcatgtgtgtggagagccaatccaatgcccaaagggtatgagcaatattattcattcactcagtttgccctggagcttaacgaaatggacccgtccagtaaatcactgctgcctcctacagatactaggttccgccctgaccagcgattcctggaggagggcaatctcgaagaagctgaaatccagaaacaacggatagagcagctccagcgagagcgaaggagagtactggaggaaaaccacgtcgaacaccaacctcgctttttccggaaaagcgatgacgatagctgggtgagcaacggtacctatctcgagcttaggaaagacctcgggttcagtaaactcgaccacccagtgctctggtag

SEQ ID NO: 241120 - DNA, 2556 bp, Artificial Sequence
  derived and/or modified sequence
atgatgtctgatgagaagaacctgggcgtgtcccagaagctggtgagccccagccgcagcaccagcagctgcagcagcaagcagggcagccggcaggacagctgggaggtggtggagggcctgcggggggagatgaactacacccaggagccccctgtgcagaagggcttcctgctgaagaagaggaagtggcccctgaagggctggcacaagcgcttcttctacctggacaagggcatcctgaagtatgccaagagccagacagacatcgagcgggagaagctgcacggctgcattgatgtgggcctgtctgtgatgtctgtgaagaagagcagcaaatgtattgacctggacacagaggagcacatctaccacctgaaggtgaagtctgaggaggtgtttgatgagtgggtgtccaagctgcggcaccacaggatgtaccggcagaatgagatcgccatgttcccccatgaggtgaaccacttcttcagcggcagcaccatcacagacagcagcagtggagtgtttgacagcatcagcagcaggaagaggagcagcatcagcaagcagaacctcttccagacaggcagcaatgtgtccttcagctgtggcggggagaccagggtgcccctgtggctgcagagcagcgaggacatggagaagtgcagcaaggacctggcccactgccacgcctacctggtggagatgagccagctgctgcagagcatggatgtgctgcacaggacctacagcgccccagccatcaatgccatccagggcggcagctttgagagccccaagaaggagaagaggagccaccggcgctggaggagccgggccatcggcaaggatgccaagggcaccctgcaggtgcccaagcccttcagcggccctgtgcggctgcacagcagcaaccccaacctgagcaccctggactttggagaggagaagaactacagtgatggcagcgagaccagcagcgagttcagcaagatgcaggaggacctgtgccacatcgcccacaaggtgtacttcaccctgcggagcgccttcaacatcatgtctgctgagcgggagaagctgaagcagctgatggagcaggatgccagcagcagccccagcgcccaggtgattggcctgaagaatgccctgagcagcgagaacagcagagatgagaacagagccctggtgcaccagctgagcaatgaaagccggctgagcatcacagacagcctgtctgagttctttgatgcccaggaggtgctgctgagccccagcagcagtgaaaatgagatcagtgatgatgacagctatgtgtctgacatcagtgacaacctgagcctggacaacctgagcaatgacctggacaatgaaaggcagaccctgggccctgtgctggacagcggccgggaggccaagagcagaagaaggacctgcctgcctgccccctgccccagcagcagcaacatcagcctgtggaacatcctgaggaacaacatcggcaaggacctgagcaaggtggccatgcctgtggagctgaatgagcccctgaacaccctgcagaggctgtgtgaggagctggagtacagcgagctgctggacaaggccgcccagatccccagccccctggagaggatggtgtatgtggccgcctttgccatcagcgcctatgccagcagctactaccgggccggcagcaagcccttcaaccctgtgctgggggagacctatgagtgcatccgggaggacaagggcttccagttcttcagcgagcaggtgagccaccacccccccatcagcgcctgccacgccgagagcaggaactttgtgttctggcaggatgtgcgctggaagaacaagttctggggcaagtccatggagatcgtgcccatcggcaccacccacgtgaccctgcctgtgtttggagaccactttgagtggaacaaggtgaccagctgcatccacaacatcctgagcggccagcgctggattgagcactatggagagatcgtcatcaagaacctgcatgatgacagctgctactgcaaggtgaacttcatcaaggccaagtactggagcaccaatgcccatgaaattgagggcaccgtgtttgacagaagtggcaaggctgtgcaccggctgtttgggaagtggcatgagagcatctactgcggcggcggcagcagcagcgcctgtgtgtggagggccaaccccatgcccaagggctatgagcagtactacagcttcacccagtttgccctggagctgaatgagatggaccccagcagcaagagcctgctgcccccaacagacacccgcttccggccagaccagcgcttcctggaggagggcaacctggaggaggccgagatccagaagcagagaattgagcagctgcagcgggagcggcggcgggtgctggaggagaaccacgtggagcaccagccccgcttcttcaggaagagtgatgatgacagctgggtgtccaatggcacctacctggagctgaggaaggacctgggcttcagcaagctggaccaccctgtgctgtggtag

SEQ ID NO: 241121 - DNA, 2556 bp, Artificial Sequence
  derived and/or modified sequence
atgatgagcgacgagaagaacctgggcgtgagccagaagctggtgtcaccctcgcgctctacctcatcgtgttcgtccaaacagggcagtaggcaggattcctgggaggtagtcgaaggtctgcgcggtgagatgaactacacacaggagcctcccgtccaaaaaggatttctgctgaaaaaacggaaatggcccctgaaagggtggcacaagagattcttttacttggataaagggatactgaagtacgcaaaaagccagaccgatatcgagcgggagaaactccatgggtgtattgacgtcggcttgtccgtcatgagtgtcaagaagagctctaaatgcattgatctggatacagaagaacacatttaccacctgaaggtcaagagtgaggaggtgttcgacgagtgggtgagtaaattgcgccatcaccggatgtacaggcaaaacgagatcgctatgttcccacatgaggtgaaccactttttcagcgggagtacgattacggattcttcctccggtgtgttcgatagcatttccagcaggaaacgatcctctatttctaaacagaatttattccagaccggctctaacgttagcttctcttgcgggggggaaacaagggtgccactgtggctgcagtccagtgaggatatggaaaagtgctccaaggacttggcgcactgtcatgcttacttggttgagatgtcccagctgttacagagcatggatgtgctccatagaacatacagcgccccggctatcaatgcaatccaaggagggtccttcgaatctcccaagaaagagaagcgctctcatcgccgttggaggtcgcgagccataggcaaggatgcaaagggcacactccaagtgcctaagcccttttccgggccagtgaggttacactcgagcaatcctaatctcagcactcttgactttggagaggagaagaactattcagatggaagcgagaccagctcggaattcagcaaaatgcaggaagatctctgccatattgcccacaaggtatattttacactgcgctctgccttcaatattatgtcagccgaacgagagaagttgaaacaactcatggaacaggacgcctcatcaagccctagtgcccaggtgatcggccttaagaacgctctgtcctcagagaatagcagagatgaaaaccgcgctttagtacaccagttgtccaacgaaagccgactctccattactgactcgctctccgaattctttgacgcccaggaggtgctgctttcaccaagctcttccgaaaacgaaatcagcgacgacgacagctacgtgtcagacatatctgataacctctcacttgataatctgagtaacgacttggataatgagcggcagacactaggtccagtgttagattctgggcgggaagcaaaatcacggcgccgcacctgcctgcccgccccgtgtccctcatcatcaaatatcagtctttggaacatcctgcgcaacaacattggtaaagacctgagtaaagttgccatgccagtggaactgaatgagcctctcaataccttgcagagactctgcgaagagcttgagtactcagaactgttagataaagcggcccagataccatcacccctggaacggatggtatatgtggctgcgtttgcaatatcagcttatgcctcctcctactaccgcgcgggtagcaagccattcaatccagtccttggggagacttacgagtgcatccgagaagacaaaggtttccagttcttttcggaacaagtgagtcaccacccaccgataagcgcctgccacgccgagagccgcaacttcgtcttctggcaggatgtccgatggaaaaacaagttctgggggaaaagcatggaaatagtgcccataggaaccacacatgtgacactgcctgtgttcggggatcacttcgagtggaataaggttacaagttgcatccacaatattctgagcggacagcgttggatcgaacactacggtgagattgtgatcaaaaatctccatgacgacagctgctattgcaaggtaaattttattaaagcaaaatattggagtactaacgcccacgaaatcgagggaactgtgttcgataggtcgggaaaagccgtccatcgattattcgggaaatggcacgagtccatttattgtgggggcggctcatcaagtgcgtgtgtatggcgcgccaaccctatgcctaagggatacgagcaatactacagttttacacagtttgccctcgaactgaatgaaatggacccatcttctaagagcctgctaccgccgacggatacgcgatttaggcccgatcaaagattcttggaggagggaaatctcgaggaagccgagatacagaagcaacggatcgagcaactgcagcgggaacggagaagagtccttgaagagaatcacgtggaacatcagcctcgtttctttcgcaaatccgacgacgactcttgggtgagcaacggtacctacctggagctccgaaaggaccttggcttctcaaagctggaccaccctgtgctgtggtag

SEQ ID NO: 241122 - DNA, 2556 bp, Artificial Sequence
  derived and/or modified sequence
atgatgagcgacgagaagaacctgggcgtgagccagaagctggtgagcccatctagaagcacaagttcttgcagcagcaagcagggctctaggcaggacagttgggaggtggttgaaggactccgtggcgaaatgaactatacccaggaacccccagtccagaagggattcctgctgaaaaaacggaaatggcctcttaagggatggcacaaacgctttttttatctggataaagggatcctgaaatatgctaagtctcagacagacatcgagcgggaaaagttgcacggctgcattgacgtaggactatctgtcatgagtgtcaaaaagagcagcaaatgtattgacttagacaccgaagaacacatttatcacttgaaggtcaagtcagaggaagttttcgatgagtgggtgtcaaaactgcgccatcataggatgtacaggcagaatgaaatcgctatgttcccccacgaggtcaaccacttcttctctggctccaccattactgacagctccagtggagtatttgatagcatctcctcacgcaaacgctcctcaatcagtaagcagaacttgttccagactggatcgaacgtgagtttttcctgtgggggagaaacacgcgtgccgctgtggctccagtcgagtgaggatatggaaaagtgcagcaaggatctggcccactgccacgcatatcttgttgaaatgtcccaactgctacaaagtatggacgtgctgcataggacatattccgctcccgccatcaacgctatacagggcggaagctttgaatcccctaaaaaagaaaagaggtcccacagacgttggcgctcaagagctatcgggaaggacgccaaaggcaccttgcaagttcccaagccattctcgggccctgtgaggctgcacagtagtaaccccaacttaagcacacttgactttggagaagagaagaactatagcgacggttcagaaacttcgtctgagttctctaagatgcaggaggacctgtgccacatagcgcataaggtctacttcacactcagatcagcctttaacatcatgagcgcagaaagggagaaactgaagcagttaatggaacaggacgcctcttctagtcccagcgcgcaggttataggcttgaagaacgccctgtcttctgaaaacagccgtgacgagaacagagccctggtgcaccagttatctaacgagtcgagactgtcaatcactgactctttgagtgaattctttgacgcccaggaggtgctgctgagtccttcgtcctctgagaatgagatttctgacgatgattcctacgtctcagatatctcagataatctgtctctggataacttgagcaatgacctggataacgaacggcagacattaggccccgtgcttgacagcggccgagaagccaagagcagacgtcgcacctgcctgccggccccctgtccctcatccagtaacattagtctctggaatattctgagaaataacatcgggaaggatctctccaaggtggccatgcccgtggagctaaatgagcctctgaatacactgcagaggctgtgcgaggaacttgaatattctgaactactggataaggccgcccagataccctcacctttggagcgtatggtgtatgtggccgctttcgcaatcagcgcctatgctagcagctattatagagcaggatctaaacctttcaatccggtgctgggagagacctatgagtgcatccgggaggataagggattccagtttttcagtgaacaggtgagtcatcatccccccattagcgcatgtcacgccgaatcacgtaacttcgtattctggcaagatgtcagatggaagaataagttttggggcaagtcaatggaaatagtgccaatcggtacaactcatgttaccttaccagtcttcggggatcactttgaatggaacaaagtcacctcctgcatccataatatcctctccggccagaggtggatcgagcactatggagaaattgtgattaaaaacctccatgacgactcttgttattgcaaggtgaacttcattaaggccaagtattggtcaactaacgcacatgaaattgaaggcacggtattcgatagatcagggaaggcagtgcatcggctgttcggaaagtggcatgaatcaatctattgtggcggcgggagttccagcgcttgcgtctggcgagccaaccccatgcccaagggatacgagcagtactactcatttacacagtttgcgcttgaactgaatgagatggatccaagctccaaatctctgctgccccctacagacacaagattcaggccagatcagcgctttctcgaagaaggcaacctcgaggaagctgaaatccagaaacagcgaatcgagcaattacagcgggaaaggagacgggtgctagaagagaatcacgtggaacatcagccacgattcttccggaagtctgacgatgactcttgggtgagcaacggcacctatttggaactgcgcaaggatctaggtttttcaaaactagatcatcctgtgctgtggtag

SEQ ID NO: 241123 - DNA, 6597 bp, Artificial Sequence
  derived and/or modified sequence
gctggtggcgcccgccagccggcccgggagaggggacttgagcgcttcgcggccggtgcgcagcgcggctccggccccgcagtctgtctgcaagtggccatccccgcccccgactcctgcggccggtgcgggagctgtcagctgcacgttgcgggggtaccggagaagccggggttgccttctcccggttctgtgcgctaaccccggagcccggccccggggaactagggagcgtctccggctgcacagcgctcaggttttagggtttcctttgggccacccaaaatgttttttaaatactttggataagagctaaaccacctgccactggggacttccatactctcggctcccttgtcatctgatggcattttgattgtctcgaggccaagtgacttgctgtccatgatgagtgatgagaagaaccttggtgtgtcccaaaaattggtatcaccttcaaggagcacaagtagctgctcttccaagcaaggaagtcgacaggacagctgggaagtggtggaaggactgaggggggagatgaattacacccaggagccaccagttcagaaaggatttttgctgaaaaagaggaagtggcccttaaaaggctggcataagagattcttctatctggacaaaggaatcttgaaatatgccaagagccaaaccgatatagagagagagaagctgcatggctgcattgatgtcgggctctcagtgatgtctgtaaagaagtcatcaaaatgcatagaccttgacaccgaggagcacatctaccatctgaaggtcaagtcagaagaagtctttgatgagtgggtatcgaaacttcgccaccacagaatgtatcgtcagaatgaaattgccatgtttccacatgaagttaaccactttttctcagggtccaccatcacagactcttcatctggggtgtttgactccatttcaagtaggaagcgtagcagtatatcaaagcagaatttatttcaaactggaagcaatgtatcattttcttgtggtggtgagacacgagttccattatggttacagtcttcagaggacatggaaaaatgctccaaagacctggcgcactgtcatgcctacctggtagaaatgagccagctcctgcaaagcatggacgtcctgcatcggacatactcggcaccagctatcaacgccatccagggtggatcttttgaaagtcccaaaaaggaaaaaagatcgcacaggaggtggcggtccagagctattggcaaagatgctaaaggaacactgcaggtcccgaaacctttttctggcccagtaagactacactcctccaatcctaatttgtcaacactagattttggagaagagaaaaattattctgatggctctgaaacctcatcagagttttctaaaatgcaagaagatctgtgtcatattgcccataaagtttacttcactttaaggtcagcttttaatatcatgtcagcggagagagagaaactgaagcagctgatggagcaggatgcctcctcctccccgtctgctcaggtcattggtctgaagaacgccctgtcatccgaaaactccagagatgaaaaccgagctctagttcatcagctttctaatgaaagtagactctccatcactgactccctttctgagttttttgatgctcaggaagttctgttatctccaagctcttcagaaaacgagatttctgatgatgactcatatgtcagtgacataagtgataatctttccttagataatctcagtaatgatttagataatgagagacagaccttggggcctgtccttgatagtggtcgggaagcgaagtcccggagaagaacgtgcctgccggcgccctgcccgagcagcagtaacatcagcctgtggaacatcctgaggaacaacatcgggaaggacctgtccaaggtggccatgccggtggagctgaacgagcccctgaacacgctgcagaggctctgcgaggagctggagtacagcgagctcctggacaaggccgcgcagattcccagccccctggaaaggatggtatatgtggcagcctttgccatatcagcgtatgcatctagctactaccgagctggaagcaagccatttaatccggttcttggagaaacatatgaatgtattcgggaggacaagggcttccagtttttttcagaacaggtcagccaccatccgcctatctctgcgtgtcatgctgagtctagaaattttgttttctggcaagatgtgagatggaaaaacaaattctggggcaaatccatggaaattgttccaattggcacaacccatgtgactctgccagtttttggggatcattttgagtggaacaaagtgacctcttgcatccataacatcttaagcgggcagaggtggattgagcactatggagagattgtcatcaagaacctgcatgatgattcctgctactgcaaagtgaattttataaaggcaaaatactggagcactaatgcccatgagattgaaggcacagtgtttgacaggagtggaaaagcggttcatcggctgtttgggaaatggcatgaaagcatctactgtggcggcggctcctcttctgcctgtgtatggagagcaaatcctatgccgaaaggctacgagcaatactatagcttcacacagtttgcgctggaattaaatgaaatggatccatcatcaaagtctttattgccacctactgacactcgatttaggccagaccagaggtttctagaggaagggaacttagaagaagctgaaatacaaaagcagaggattgaacaactgcagagagaaaggcggcgggtcttagaagaaaatcatgtggagcaccagcctcggtttttcaggaaatccgacgatgactcttgggtgagcaacggcacctatttggaacttagaaaagatcttggtttttccaaactggaccatcctgtcttatggtgaaaaagtaaagaagaaagataacattagtgtatttctcctgtgcttgccttctgaagtggcacaaacctgtgtttatatatttaaaagatactctaggatgatcacttgtgcttagcttagcattgtaactctttaagtctatattttcctcagtgcgtttctttacaatttcaaatgttaccctgattgtttatatgaatgtagaacaccttgacatttctttttatatataaactatttaataaaaatgaaagattgaatgttcatgtgtgggttaaaaaaagaagctttaacactaattttccaaaggttagggaagattccaattaaatttatgccttataaaattatgttgtagaaaaaaaatcaacctctcccaggtgcattaagaaataagaattcccagggttactcacccatgcgtaagctacccaagtttaatttggtagctgaaatatctttttgcctcagacagctcttgaattgctcatacagaacaattctgctggtgctggagtctgaagaatattttcatttgcattttagtggttagggagaggatataagattaatggaatgtatatttttatataagacgtatacggcaccttcttgaaaaggaagcatttgaacttgttcctccctatagttctattgccttatatgcaaaattgtaccctgttgctcagagaaattattcataagagaaaagaattccaattaattaaatatcacaatagcatcccagagagacagtaggaaatttctccttagtgagagctgagtccttgagaagttaagagactgtttcctgcttcccaccccaccccgttttttgtccctccgtttgatcacctccctgttgagtatggaatgtcccagtttaatataaaacatacagtttattccacacagcagtttgactttgtaaaagtttagcaaaataactgattgttttggataactcaacatgtttttcttaaatgctgttttagtattttctacctcttaataagcaccatattttagatcttgtataaaaagttgccatctgccttatagacaaatgtagagaattgatgttcttgctttgtgttgtgttctggtaaagctttaagtgagtgtcttacccctttcctatactttcttgttatccatatcattcttttgtgagttttgcagcagtcttgaataatacagattataactactgaaaggggaaccttcgtctttttaaatgtgttatttcacattacaataatatgtgtagtagttgaattgtgttatcaaagcatgtccaacttctgtccagatgacattaaaaccaaagcctaattgttaagcctcttattctaaagtccatagcaatgctatggaatatcaagtataatgatgtagtaaaaagatttctccagaaaacactttgagatacttaaagaaattcagagcatatcgaatgttatgaatgaagagtaaaataattacaggaaaagaatgcatgatttttcattgtcacaccaaataaccagttggacaatattgcattttcaaaatggagagttatttaaagtggatgtgtagccttctggaatctgcacgtgactggcattttaaaacaactcattaaatattggattcattttatcgagatgccaagatgaacacaatgtgaatatcatttccatttctaagcagttgaatgacacagtcagattctttggtgtatgctttgttctttccatctcaagcatttatccaaattctgctcacagacatgaggaagcaggctgtagatttaagggcactcaaggggaaaacaaatgtagtttccacagtgtgaggataaatgtagaatcgtggtaatattggctgttaaattggcctgctccagagactggctcaaaaaagaaagaagcaacgaaaacaaaatgcacagcctgaatggacgtagcactgtcatgtggcatttggaaaatctttaattatcctaatgttatttcacttgcccttatgctttattttagagtcccagggacaactggatgaaacattacgtctgtagtcatcttatttgagatgggggtgggaacgaattaaaatatgatagagaactatatgcagattttaaaatctagtcagtactagcatctataaagggcttttctgaaatttaaacagcttggtgatgcatcctgatattataagcttaaaactatcttgagggggaaatgacttcttttctccttctgtcccttttctcaaaagcatctttcccccaaatgtatgtctctaggacattttatagttttaagaggaagaaaacagaaacgtggcatcatttgggaagaaccaaggtagaatttaattttctggactttaaatctcctggttaaataatgctaatcactgtaccatttgagttacatgttttaacctcttttttttttctaattattccatccaaaatttctggtgaattacacagaaatttttggaaatgggactttgtgcaggtaaccaccctgcacttcaggtaatgttcctgtcacagctgtcgactaccccacgctgcaggaaatccattcagaaatgagctaacagtctccagtgtagcaggagagccagtcacttccctccccaggccccaaagcaccccaaggctggtattccttgagtcataggtattaataataaaagcctcaatgcagcttctccatgtagttcctctcctacaagccaggtggattctggtcctaactaaagagatgggagttcacctgagggcaagaagtacccaggatgcccaaacagccgcacaggtgtcctgtgcttcctgtgagacttcctgggggaaatatacaaactaatatattttttaatgtttacgtcatttacactgctgcttttctcatattctgcttttaattacttgtagtaaatcatttgtttgggcttcaagcactgtcttccatctgcatcttccagatttatcatgagtgatcttgttctactgttaaagatgtcaagcctaaaaagtaataaagtttttatttggctgttgaaccttgatgtagcccctactacatacactacaagttatgccttctggctactacagaatctccgcagaccttttagttatgagtagaagcaataagaaggtgtccttatggtcttaggaataatagttccaatgtattggcataatttgtttgaatgtctttattttgatattaacaccggcataaatctatttttgctaccagatgatagctattttcatttgctctattttcctctgcattgtactaatctgttactcagtgttagtcttcatttttctgtgttggaaacctgcgtcatgtaaatatctgcaaatcatgacagtctaaagtgcaaaccattttcagagactttggggaatgcagtgatcagaagtggctaatttattttatttctgattattttatccagagggtacttttttaatggatatttgtaaatcttccacttaaccactgaaaattattttgttttaatcccacccttccatccatacctctgcctccccaaaaagctcctattaatttgcttatccccctcatgtagctagttgaatgtgaataaataacatgg

SEQ ID NO: 241124 - DNA, 2707 bp, Artificial Sequence
  derived and/or modified sequence
tggataagagctaaaccacctgccactggggacttccatactctcggctcccttgtcatctgatggcattttgattgtctcgaggccaagtgacttgctgtccatgatgagtgatgagaagaaccttggtgtgtcccaaaaattggtatcaccttcaaggagcacaagtagctgctcttccaagcaaggaagtcgacaggacagctgggaagtggtggaaggactgaggggggagatgaattacacccaggagccaccagttcagaaaggatttttgctgaaaaagaggaagtggcccttaaaaggctggcataagagattcttctatctggacaaaggaatcttgaaatatgccaagagccaaaccgatatagagagagagaagctgcatggctgcattgatgtcgggctctcagtgatgtctgtaaagaagtcatcaaaatgcatagaccttgacaccgaggagcacatctaccatctgaaggtcaagtcagaagaagtctttgatgagtgggtatcgaaacttcgccaccacagaatgtatcgtcagaatgaaattgccatgtttccacatgaagttaaccactttttctcagggtccaccatcacagactcttcatctggggtgtttgactccatttcaagtaggaagcgtagcagtatatcaaagcagaatttatttcaaactggaagcaatgtatcattttcttgtggtggtgagacacgagttccattatggttacagtcttcagaggacatggaaaaatgctccaaagacctggcgcactgtcatgcctacctggtagaaatgagccagctcctgcaaagcatggacgtcctgcatcggacatactcggcaccagctatcaacgccatccagggtggatcttttgaaagtcccaaaaaggaaaaaagatcgcacaggaggtggcggtccagagctattggcaaagatgctaaaggaacactgcaggtcccgaaacctttttctggcccagtaagactacactcctccaatcctaatttgtcaacactagattttggagaagagaaaaattattctgatggctctgaaacctcatcagagttttctaaaatgcaagaagatctgtgtcatattgcccataaagtttacttcactttaaggtcagcttttaatatcatgtcagcggagagagagaaactgaagcagctgatggagcaggatgcctcctcctccccgtctgctcaggtcattggtctgaagaacgccctgtcatccgaaaactccagagatgaaaaccgagctctagttcatcagctttctaatgaaagtagactctccatcactgactccctttctgagttttttgatgctcaggaagttctgttatctccaagctcttcagaaaacgagatttctgatgatgactcatatgtcagtgacataagtgataatctttccttagataatctcagtaatgatttagataatgagagacagaccttggggcctgtccttgatagtggtcgggaagcgaagtcccggagaagaacgtgcctgccggcgccctgcccgagcagcagtaacatcagcctgtggaacatcctgaggaacaacatcgggaaggacctgtccaaggtggccatgccggtggagctgaacgagcccctgaacacgctgcagaggctctgcgaggagctggagtacagcgagctcctggacaaggccgcgcagattcccagccccctggaaaggatggtatatgtggcagcctttgccatatcagcgtatgcatctagctactaccgagctggaagcaagccatttaatccggttcttggagaaacatatgaatgtattcgggaggacaagggcttccagtttttttcagaacaggtcagccaccatccgcctatctctgcgtgtcatgctgagtctagaaattttgttttctggcaagatgtgagatggaaaaacaaattctggggcaaatccatggaaattgttccaattggcacaacccatgtgactctgccagtttttggggatcattttgagtggaacaaagtgacctcttgcatccataacatcttaagcgggcagaggtggattgagcactatggagagattgtcatcaagaacctgcatgatgattcctgctactgcaaagtgaattttataaaggcaaaatactggagcactaatgcccatgagattgaaggcacagtgtttgacaggagtggaaaagcggttcatcggctgtttgggaaatggcatgaaagcatctactgtggcggcggctcctcttctgcctgtgtatggagagcaaatcctatgccgaaaggctacgagcaatactatagcttcacacagtttgcgctggaattaaatgaaatggatccatcatcaaagtctttattgccacctactgacactcgatttaggccagaccagaggtttctagaggaagggaacttagaagaagctgaaatacaaaagcagaggattgaacaactgcagagagaaaggcggcgggtcttagaagaaaatcatgtggagcaccagcctcggtttttcaggaaatccgacgatgactcttgggtgagcaacggcacctatttggaacttagaaaagatcttggtttttccaaactggaccatcctgtcttatggtgaaaaagtaaagaagaaagataacattagtgtatttctcctgtgcttgcc

SEQ ID NO: 241125 - DNA, 2556 bp, Artificial Sequence
  derived and/or modified sequence
atgatgtccgacgaaaaaaacttgggagtgtcccagaaacttgtgtcccccagtcgcagtacatcttcctgctctagcaagcaaggatctcgccaagatagttgggaggtggtggagggactgcgcggagaaatgaactacacacaggagcctcccgtccagaagggcttcctgttaaagaagcgcaaatggcctcttaaaggatggcacaaacgcttcttttacctcgataagggcatactgaaatatgcaaagagccaaaccgacatagagagagaaaagttgcacgggtgcattgacgtgggcctcagtgtgatgagcgtcaagaagagctcaaagtgtatcgatctggatacagaagagcatatttaccacttaaaggttaagtctgaggaggtatttgacgagtgggtttcaaagctaaggcaccatcgcatgtacaggcagaatgaaattgccatgttcccgcacgaagtgaatcatttcttttcagggtcaactatcaccgatagcagttctggcgttttcgactcgatcagctccaggaaaagatcatccatttccaagcaaaatctctttcagaccggaagcaacgtctctttttcctgcgggggtgagaccagagtgcctctttggttacagtccagtgaggacatggagaagtgctctaaagacctggcccattgtcacgcgtacctggtggagatgtcccaattgctgcagtctatggacgtcctgcaccgcacttactccgcgccagcaatcaatgcgattcaggggggaagctttgaatctccaaaaaaggaaaaacgctcccacaggagatggcgcagcagggcaataggcaaggacgccaaaggaacacttcaagtgccaaagccattctcaggacccgtgaggttacactcctccaaccctaacctgtcaactctcgatttcggtgaggagaaaaactatagcgatggcagcgaaacttccagcgaatttagtaagatgcaagaggacctatgccatatcgcacataaggtgtacttcacattgagatcagcctttaatattatgtctgctgagcgtgaaaaactgaaacagctgatggagcaggacgctagcagtagtccttctgcgcaagttattgggctcaaaaacgctctctctagcgagaattccagagacgaaaacagggctctcgtacatcagctgagcaatgagtcaaggctgtcaataactgattcccttagtgaattctttgacgcccaggaggttctactctccccttctagctcagagaatgagatctccgatgacgacagctatgtctcggacatttctgataaccttagccttgacaatctgagtaatgacctcgacaatgagagacagaccctaggccctgttctcgactccgggagggaggccaagagtcgcaggaggacttgtttaccagctccatgcccttcttcctctaacatctctctttggaatatactgagaaataatatcggcaaggaccttagtaaagtcgcaatgccagtagaactgaatgaacctctgaacaccctccagagattgtgcgaggaactggaatatagcgagctactggataaagctgcccagatacccagtcctctcgaaagaatggtgtatgtggcagcctttgccatcagcgcctatgcaagctcctactatcgagccggaagcaaaccctttaatcccgtgcttggggagacttacgagtgtattcgcgaagacaagggatttcagtttttctcagagcaggttagtcatcaccctccaatcagtgcctgtcacgccgagtctcggaattttgtcttctggcaagacgtgcgatggaagaataagttttgggggaaatctatggaaattgtacccatcggaaccacccatgtcacacttcctgtgtttggcgatcattttgagtggaacaaggtgacatcctgtattcacaatattctctccgggcagagatggattgaacactatggggagattgtgatcaagaacctgcacgacgactcatgctattgtaaggtcaacttcataaaggctaaatattggagcaccaacgctcatgaaattgaagggactgtgttcgaccgctccggaaaagccgtgcacaggttgtttggcaaatggcacgaatctatatactgtggtggtggctcttcctccgcatgcgtgtggcgggctaatcctatgccaaaggggtacgaacagtactatagtttcacacagtttgctcttgagctcaacgagatggatccgtcaagcaaatccctgctcccaccaactgatacaagatttcggcctgatcagagattcctcgaagagggcaacttagaggaggcagaaatacagaaacagagaattgagcagctgcaacgcgagcgccgaagggtgctggaggagaatcacgtcgagcatcagccaagattcttcagaaaatccgacgatgactcttgggtctcaaatggaacttatctggagctaagaaaggatcttggcttctccaagctggatcaccctgtgttatggtag

SEQ ID NO: 241126 - DNA, 2556 bp, Artificial Sequence
  derived and/or modified sequence
atgatgagtgacgagaaaaatttgggcgtgtctcaaaagctggtgagcccatctagatcaacaagttcatgctcctccaaacaaggcagccggcaggattcatgggaggttgtcgagggactccggggtgagatgaattatacacaagaaccacccgtgcagaaaggatttctgttaaagaaacggaagtggccattgaaaggctggcacaagaggtttttctatcttgacaagggtatactgaagtacgcaaagagccaaactgacatcgaaagagaaaaactgcacgggtgcatcgatgttggcctctctgtcatgtccgtgaaaaagtcaagtaagtgcatcgacctcgacaccgaggaacatatctaccacctaaaagtaaagagtgaagaggttttcgacgaatgggtctcaaaattgcggcaccaccgcatgtacagacagaacgaaatcgccatgttcccgcatgaggtaaaccacttttttagtgggtccacaatcactgactcatcatctggggtgttcgacagcatctcttcacgcaagcgtagctcgatctccaaacagaatctgttccagaccggatcaaacgtatctttctcatgcggtggggaaacacgcgtccctctgtggctacagtcctccgaggacatggaaaagtgttccaaggacttggcccactgccacgcttatttggtcgagatgtcacaacttctacagtctatggacgtcctgcacagaacatattcagccccagcaatcaacgccattcagggtggcagtttcgaaagcccgaagaaagaaaagcggagtcacaggaggtggcggtcccgtgctatcgggaaagacgccaagggaaccctccaggtcccaaagccgttctcaggacctgtgagactgcacagctccaaccccaatttgagcactctggatttcggcgaggagaaaaactactctgacggttctgaaacgagttccgaatttagcaagatgcaagaagatctatgtcatatcgcacataaagtttattttacgttgcgttccgcttttaacattatgtctgcagagagagagaaactgaagcaactcatggagcaagacgcttcttcttcaccctccgcccaagtcataggacttaaaaatgccctcagttcagagaacagcagagatgaaaatcgggctctagttcaccagctgtcaaacgaaagccggctctcaataacagactccctgtcggagttctttgacgcccaagaagttcttctctcgcctagttccagtgagaacgaaatcagcgacgatgactcctatgtcagcgacatctcagataatctctccctggataacttatctaatgatctggacaacgagaggcagaccctaggaccagtactggacagcggaagggaggctaaatcaaggaggaggacctgtctccccgcaccctgtcctagcagctctaatatctcactgtggaacatcctgcgcaataatattggcaaagacctgtcaaaggttgccatgcctgtggagctgaacgagcccttgaatacgctccagcgtctttgcgaggagttggaatattctgaactacttgacaaggccgcacagattccatcccccctcgagagaatggtgtacgtggccgctttcgctatcagcgcatatgcctcgtcttattaccgggcaggatccaaacccttcaatccggtactgggagaaacttacgagtgcatcagagaggacaagggcttccagtttttttccgagcaagtgtcccaccaccccccaatctccgcttgccacgccgaaagtcgcaactttgtgttctggcaagatgtacggtggaaaaacaaattctggggaaaatctatggagattgtgcccatcgggactacccacgttaccctcccagttttcggagatcatttcgagtggaacaaagtaacctcttgtattcacaatatcctctctggtcagaggtggatcgagcactacggagaaatcgtcataaagaacctccacgatgattcatgttactgcaaagtcaacttcatcaaagccaagtactggtccacaaacgcccacgaaattgaggggacagtgtttgatagatccggcaaggcagtgcaccggctgttcgggaaatggcacgaatcaatctactgcggcggaggctcatcgtccgcgtgcgtgtggcgagcgaaccctatgcccaaaggatatgagcaatattacagcttcactcagtttgccctggaactgaatgagatggacccatcatctaagtcccttttaccccctactgacacccgatttaggccggatcagcggtttctggaggagggtaaccttgaggaggcggaaattcaaaagcagagaattgagcaattacagcgtgaaagacgcagagtcttggaggagaatcatgttgagcatcagccacggttctttaggaagagtgacgatgatagctgggtctccaatggaacatacctggaactcaggaaagatctgggcttttcaaagctcgaccaccctgtgctgtggtag

SEQ ID NO: 241127 - DNA, 2556 bp, Artificial Sequence
  derived and/or modified sequence
atgatgagcgacgagaagaacctgggcgtgagccagaagctggtgagccccagcagaagcaccagcagctgcagcagcaagcagggcagcagacaggacagctgggaggtggtggagggcctgagaggcgagatgaactacacccaggagccccccgtgcagaagggcttcctgctgaagaagagaaagtggcccctgaagggctggcacaagagattcttctacctggacaagggcatcctgaagtacgccaagagccagaccgacatcgagagagagaagctgcacggctgcatcgacgtgggcctgagcgtgatgagcgtgaagaagagcagcaagtgcatcgacctggacaccgaggagcacatctaccacctgaaggtgaagagcgaggaggtgttcgacgagtgggtgagcaagctgagacaccacagaatgtacagacagaacgagatcgccatgttcccccacgaggtgaaccacttcttcagcggcagcaccatcaccgacagcagcagcggcgtgttcgacagcatcagcagcagaaagagaagcagcatcagcaagcagaacctgttccagaccggcagcaacgtgagcttcagctgcggcggcgagaccagagtgcccctgtggctgcagagcagcgaggacatggagaagtgcagcaaggacctggcccactgccacgcctacctggtggagatgagccagctgctgcagagcatggacgtgctgcacagaacctacagcgcccccgccatcaacgccatccagggcggcagcttcgagagccccaagaaggagaagagaagccacagaagatggagaagcagagccatcggcaaggacgccaagggcaccctgcaggtgcccaagcccttcagcggccccgtgagactgcacagcagcaaccccaacctgagcaccctggacttcggcgaggagaagaactacagcgacggcagcgagaccagcagcgagttcagcaagatgcaggaggacctgtgccacatcgcccacaaggtgtacttcaccctgagaagcgccttcaacatcatgagcgccgagagagagaagctgaagcagctgatggagcaggacgccagcagcagccccagcgcccaggtgatcggcctgaagaacgccctgagcagcgagaacagcagagacgagaacagagccctggtgcaccagctgagcaacgagagcagactgagcatcaccgacagcctgagcgagttcttcgacgcccaggaggtgctgctgagccccagcagcagcgagaacgagatcagcgacgacgacagctacgtgagcgacatcagcgacaacctgagcctggacaacctgagcaacgacctggacaacgagagacagaccctgggccccgtgctggacagcggcagagaggccaagagcagaagaagaacctgcctgcccgccccctgccccagcagcagcaacatcagcctgtggaacatcctgagaaacaacatcggcaaggacctgagcaaggtggccatgcccgtggagctgaacgagcccctgaacaccctgcagagactgtgcgaggagctggagtacagcgagctgctggacaaggccgcccagatccccagccccctggagagaatggtgtacgtggccgccttcgccatcagcgcctacgccagcagctactacagagccggcagcaagcccttcaaccccgtgctgggcgagacctacgagtgcatcagagaggacaagggcttccagttcttcagcgagcaggtgagccaccacccccccatcagcgcctgccacgccgagagcagaaacttcgtgttctggcaggacgtgagatggaagaacaagttctggggcaagagcatggagatcgtgcccatcggcaccacccacgtgaccctgcccgtgttcggcgaccacttcgagtggaacaaggtgaccagctgcatccacaacatcctgagcggccagagatggatcgagcactacggcgagatcgtgatcaagaacctgcacgacgacagctgctactgcaaggtgaacttcatcaaggccaagtactggagcaccaacgcccacgagatcgagggcaccgtgttcgacagaagcggcaaggccgtgcacagactgttcggcaagtggcacgagagcatctactgcggcggcggcagcagcagcgcctgcgtgtggagagccaaccccatgcccaagggctacgagcagtactacagcttcacccagttcgccctggagctgaacgagatggaccccagcagcaagagcctgctgccccccaccgacaccagattcagacccgaccagagattcctggaggagggcaacctggaggaggccgagatccagaagcagagaatcgagcagctgcagagagagagaagaagagtgctggaggagaaccacgtggagcaccagcccagattcttcagaaagagcgacgacgacagctgggtgagcaacggcacctacctggagctgagaaaggacctgggcttcagcaagctggaccaccccgtgctgtggtag

SEQ ID NO: 241128 - protein, 820 aa, Artificial Sequence
  derived and/or modified sequence
MMSDEKNLGVSQKLVSPSRSTSSCSSKQGSRQDSWEVVEGLRGEMNYTQEPPVQKGFLLKKRKWPLKGWHKRFFYLDKGILKYAKSQTDIEREKLHGCIDVGLSVMSVKKSSKCIDLDTEEHIYHLKVKSEEVFDEWVSKLRHHRMYRQNEIAMFPHEVNHFFSGSTITDSSSGVFDSISSRKRSSISKQNLFQTGSNVSFSCGGETRVPLWLQSSEDMEKCSKDLAHCHAYLVEMSQLLQSMDVLHRTYSAPAINAIQVPKPFSGPVRLHSSNPNLSTLDFGEEKNYSDGSETSSEFSKMQEDLCHIAHKVYFTLRSAFNIMSAEREKLKQLMEQDASSSPSAQVIGLKNALSSENSRDENRALVHQLSNESRLSITDSLSEFFDAQEVLLSPSSSENEISDDDSYVSDISDNLSLDNLSNDLDNERQTLGPVLDSGREAKSRRRTCLPAPCPSSSNISLWNILRNNIGKDLSKVAMPVELNEPLNTLQRLCEELEYSELLDKAAQIPSPLERMVYVAAFAISAYASSYYRAGSKPFNPVLGETYECIREDKGFQFFSEQVSHHPPISACHAESRNFVFWQDVRWKNKFWGKSMEIVPIGTTHVTLPVFGDHFEWNKVTSCIHNILSGQRWIEHYGEIVIKNLHDDSCYCKVNFIKAKYWSTNAHEIEGTVFDRSGKAVHRLFGKWHESIYCGGGSSSACVWRANPMPKGYEQYYSFTQFALELNEMDPSSKSLLPPTDTRFRPDQRFLEEGNLEEAEIQKQRIEQLQRERRRVLEENHVEHQPRFFRKSDDDSWVSNGTYLELRKDLGFSKLDHPVLW

SEQ ID NO: 241129 - DNA, 2463 bp, Artificial Sequence
  derived and/or modified sequence
atgatgtctgatgagaagaacctgggcgtgagtcagaaattggtgagcccctcacggtccacctcttcatgttctagcaaacagggctcaagacaggattcctgggaggtcgtcgagggcctgcggggtgagatgaattatacccaggagccccctgtgcagaagggttttttattgaagaaacggaagtggcctctgaagggctggcataaaagatttttttacctggacaagggaattttaaaatacgccaagtcgcagaccgatattgaaagggaaaaactgcacggctgcatcgacgtggggctgtccgtgatgtcggttaaaaaatcatccaaatgcattgacctggataccgaggaacatatctaccaccttaaagttaagagcgaggaggtgttcgatgagtgggtgagtaaattacgacaccacaggatgtataggcagaatgagatcgccatgtttccacacgaagtgaaccacttcttttccggtagcaccattaccgacagcagttccggagtattcgactctatttcttctcgcaagagaagctccatctctaagcagaatctcttccaaaccggctccaacgtctccttctcatgtgggggcgagaccagagttcctttatggctgcagtcgagtgaagatatggagaaatgctcaaaggatttggcccattgccatgcctacctcgtcgaaatgtcccagcttttgcagtccatggacgttttacaccgtacctattcagcccccgctattaatgctatccaggtccctaagcccttttctggccccgtcaggctgcattcctctaaccccaacttgtctaccctggacttcggcgaggagaagaactacagcgacgggagcgaaacttcaagtgagttctctaaaatgcaagaggatctgtgccacatcgcccacaaagtgtacttcaccctacgctccgcttttaacattatgagcgcagagagagagaaactgaagcagctgatggagcaggatgccagcagcagcccgagtgctcaggtgattggattgaaaaacgccctgagctccgagaacagtcgtgacgagaacagggctctcgtacatcagttgtcaaacgagtctaggctgagtataacggattccctcagcgagttcttcgatgcccaggaggtgttacttagtccatctagttcggagaatgaaattagcgacgacgactcatacgtgagcgatattagtgacaatctgtccctagataatctatccaatgaccttgacaacgaacggcagaccctgggccccgtcctggactccggccgagaagccaaaagccgccgccgaacctgtctgccggcaccttgcccctcctcctcaaacatttccctgtggaacattctgagaaataatattggaaaagatctgtccaaggtcgccatgccagtagaattgaacgagcctctgaacactctacagcgcttgtgtgaggaattagagtattctgagcttttagataaagctgcccagataccctctccccttgagcgcatggtctacgtcgctgctttcgccatctccgcttacgcttcctcctactacagggcaggcagcaaaccctttaaccctgtcctcggcgagacttacgagtgcatcagggaagacaagggcttccaattcttctcagagcaggtttctcaccacccacccatatcagcttgccatgccgaatcacgcaactttgtcttttggcaggacgtgaggtggaagaataagttctgggggaagtcgatggaaatcgttccaatcggaactacacacgtgactctccccgtatttggagatcacttcgaatggaataaggtgaccagttgcatccacaatatcctgtcgggtcaaaggtggatcgagcattatggtgagatagtcatcaagaacttgcatgatgacagttgctattgtaaagtgaactttatcaaagcgaaatactggtctacgaatgcgcatgaaatcgagggtaccgttttcgacagatcgggcaaggccgtccatcgtctcttcgggaagtggcacgaatctatttattgtggaggggggagttctagtgcttgtgtgtggcgggcgaaccctatgccaaaggggtacgagcagtattactctttcacacagttcgccctggaacttaacgaaatggaccccagcagtaagagtctcctcccaccgacggatacaagatttagacccgaccagcgcttcctggaggaaggcaacctggaggaggcggagatccaaaagcagcgcattgaacaactccagagagagaggcggcgggtccttgaggagaatcacgtggagcaccagccccgcttttttcgaaagtccgatgacgatagttgggtgtctaatggcacttacttagagctgaggaaggacttgggcttttccaaactcgaccatcccgttctctggtag

SEQ ID NO: 241130 - DNA, 339 bp, Artificial Sequence
  derived and/or modified sequence
atgatgagtgacgaaaagaatctgggagtgtctcaaaaactggtctctccttctcggtcaacgtccagctgctcatcaaagcagggttcccggcaagacagctgggaggtggttgaaggattacgaggggagatgaattacactcaagagccgcccgtgcaaaaaggatttctcttgaagaaacggaagtggccactcaaagggtggcacaagcggtttttttaccttgataaggggatcctgaaatacgctaaaagccaaaccgacattgaaagagagaaattgcacggctgcatagacgtcggtttgtctgtaatgagcgtgaaaaagtcttcctag

SEQ ID NO: 241131 - DNA, 186 bp, Artificial Sequence
  derived and/or modified sequence
atgatgagcgacgagaaaaatttaggggtgtctcagaagctggtgtcgccgtctcgttcaaccagcagttgcagttccaagcagggaagtcggcaggactcctgggaagtcgtagaggggctgaggggcgaaatgaattacacacaggagccccccgttcagaaaggcttcctgctcaaaaagtag

SEQ ID NO: 241132 - DNA, 2463 bp, Artificial Sequence
  derived and/or modified sequence
atgatgagcgatgaaaagaacctcggcgtatcacagaagttagtgtcccctagccggagtacaagctcgtgctccagtaaacagggctcccgccaggatagttgggaggtcgtcgagggtctgagaggtgagatgaattacacgcaggaaccccccgtgcagaagggttttctgttaaaaaagcgtaaatggccacttaaaggatggcacaaacgattcttctaccttgacaagggcatcctgaagtatgccaagtcacagaccgatatagagagggaaaaactacacggatgcattgacgtggggttgtccgtgatgtctgtgaagaagtctagcaaatgtatcgatttagacactgaggagcacatatatcacctgaaagtcaagtccgaggaggtgttcgatgagtgggttagcaagctgcgtcaccataggatgtatcgccaaaacgagattgccatgtttccacacgaagtcaatcatttcttctcaggttctactatcacagatagctcttcaggagtgttcgattctatcagctccaggaagaggtcctctattagcaaacagaatttgtttcagaccggatccaacgtgtcattcagctgcggaggagaaacacgggtgcctttatggttgcagtcatcggaagacatggaaaaatgctccaaggacttggctcactgccacgcatatctggtggagatgtcgcagctgctccagtccatggatgtcttgcatcgtacatactccgcccctgccatcaacgcaattcaggttcctaagcccttcagtggccccgtccggctgcactcaagtaacccaaacctgtctacactggattttggagaagaaaagaattactcagacggatctgaaacatcctcggagttcagtaagatgcaggaggacttgtgccacattgctcacaaagtctattttacactccgcagcgcttttaacatcatgagcgctgaaagggaaaaactcaaacaactcatggagcaagatgcttcatcctcgccatcggcccaggttatcggtctcaagaacgccctctcttccgagaacagccgtgacgaaaaccgcgctctcgttcaccagctgtctaacgaatctagactaagtatcactgacagtttgtccgaatttttcgacgcacaggaagtgctgctttcaccatcatctagcgaaaacgaaatctccgatgatgatagttacgtgtcagatatttccgataacttgagtctggacaatctgtccaacgatctcgataatgagaggcagaccctgggacctgtgctggactccggcagagaggccaagagcagacgacggacatgcctgccggccccgtgtccttcctcaagtaacatcagtctgtggaatatcctacgtaataacatcggcaaagacctaagcaaagtcgctatgcctgttgagctgaacgagcctttgaataccctgcagcggctgtgtgaagagctcgagtacagtgagcttctggataaggctgctcagatcccatctccactggagcgcatggtgtacgtagctgcattcgccatctcagcttatgctagctcctactatcgggccgggagtaagccatttaaccctgtgctgggtgaaacatatgagtgcatccgcgaagataagggctttcagtttttttcggagcaggtatcgcaccacccccctatttcagcctgtcatgccgagagcaggaactttgtattttggcaggatgtcagatggaagaacaagttctgggggaaatctatggagatcgtgcccattggtaccacacatgtgacgctgccagtgtttggggatcactttgagtggaataaggtgacatcttgcatccacaatattctgagcggtcagcgctggatagagcactatggagagatagtcatcaaaaacttgcatgacgactcctgctactgtaaggtgaatttcattaaggccaaatactggtctaccaatgcccatgagatcgagggtacggttttcgacaggtccgggaaggcagtgcataggctatttgggaagtggcacgagtccatctactgtgggggtgggagcagctctgcttgtgtgtggagggctaatccgatgcccaaggggtatgagcagtactattcatttacacagttcgccctagaacttaacgaaatggatccttcaagcaagtctctgttgccaccgactgacaccagattcagacccgaccagcgttttctggaggagggtaacctggaggaagccgagatacaaaaacagcgaatagaacagctccagagggaacgccgaagggtgttggaagagaaccacgtggagcatcagcctaggttctttcgcaaatccgacgacgattcgtgggtgagcaatgggacctacctagagctacgtaaggacctggggttcagcaagctggaccatcccgttttgtggtag

SEQ ID NO: 241133 - DNA, 270 bp, Artificial Sequence
  derived and/or modified sequence
atgatgagcgatgaaaagaatctcggagtgtcacaaaaacttgtctctccctcacggagtacctcatcatgctctagtaaacagggaagccgtcaggattcatgggaggtcgtggaaggtctccggggggagatgaactatactcaggagccacccgtccagaaaggtttcttgctgaagaaaaggaagtggcccctgaaagggtggcacaagcggtttttctatttggacaaagggatccttaagtatgcaaagtcccagacagactag

SEQ ID NO: 241134 - DNA, 2463 bp, Artificial Sequence
  derived and/or modified sequence
atgatgtctgatgagaagaacctgggcgtgtcccagaagctggtgagccccagccgcagcaccagcagctgcagcagcaagcagggcagccggcaggacagctgggaggtggtggagggcctgcggggggagatgaactacacccaggagccccctgtgcagaagggcttcctgctgaagaagaggaagtggcccctgaagggctggcacaagcgcttcttctacctggacaagggcatcctgaagtatgccaagagccagacagacatcgagcgggagaagctgcacggctgcattgatgtgggcctgtctgtgatgtctgtgaagaagagcagcaaatgtattgacctggacacagaggagcacatctaccacctgaaggtgaagtctgaggaggtgtttgatgagtgggtgtccaagctgcggcaccacaggatgtaccggcagaatgagatcgccatgttcccccatgaggtgaaccacttcttcagcggcagcaccatcacagacagcagcagtggagtgtttgacagcatcagcagcaggaagaggagcagcatcagcaagcagaacctcttccagacaggcagcaatgtgtccttcagctgtggcggggagaccagggtgcccctgtggctgcagagcagcgaggacatggagaagtgcagcaaggacctggcccactgccacgcctacctggtggagatgagccagctgctgcagagcatggatgtgctgcacaggacctacagcgccccagccatcaatgccatccaggtgcccaagcccttcagcggccctgtgcggctgcacagcagcaaccccaacctgagcaccctggactttggagaggagaagaactacagtgatggcagcgagaccagcagcgagttcagcaagatgcaggaggacctgtgccacatcgcccacaaggtgtacttcaccctgcggagcgccttcaacatcatgtctgctgagcgggagaagctgaagcagctgatggagcaggatgccagcagcagccccagcgcccaggtgattggcctgaagaatgccctgagcagcgagaacagcagagatgaaaatagagccctggtgcaccagctgagcaatgaaagccggctgagcatcacagacagcctgtctgagttctttgatgcccaggaggtgctgctgagccccagcagcagtgaaaatgagatcagtgatgatgacagctatgtgtctgacatcagtgacaacctgagcctggacaacctgagcaatgacctggacaatgaaaggcagaccctgggccctgtgctggacagcggccgggaggccaagagcagaagaaggacctgcctgcctgccccctgccccagcagcagcaacatcagcctgtggaacatcctgaggaacaacatcggcaaggacctgagcaaggtggccatgcctgtggagctgaatgagcccctgaacaccctgcagaggctgtgtgaggagctggagtacagcgagctgctggacaaggccgcccagatccccagccccctggagaggatggtgtatgtggccgcctttgccatcagcgcctatgccagcagctactacagagctggcagcaagcccttcaaccctgtgctgggggagacctatgagtgcatcagagaagataaaggcttccagttcttcagcgagcaggtgagccaccacccccccatcagcgcctgccacgccgagagcaggaactttgtgttctggcaggatgtgcgctggaagaacaagttctggggcaagtccatggagatcgtgcccatcggcaccacccacgtgaccctgcctgtgtttggagaccactttgagtggaacaaggtgaccagctgcatccacaacatcctgagcggccagcgctggattgagcactacggggagatcgtcatcaagaacctgcatgatgacagctgctactgcaaggtgaacttcatcaaggccaagtactggagcaccaatgcccacgagattgagggcaccgtgtttgacagaagtggcaaggctgtgcaccggctgtttgggaagtggcatgagagcatctactgcggcggcggcagcagcagcgcctgtgtgtggagggccaaccccatgcccaagggctatgagcagtactacagcttcacccagtttgccctggagctgaatgagatggaccccagcagcaagagcctgctgcccccaacagacacccgcttccggccagaccagcgcttcctggaggagggcaacctggaggaggccgagatccagaagcagagaattgagcagctgcagcgggagaggagaagagtgctggaggagaaccacgtggagcaccagccccgcttcttcaggaagagtgatgatgacagctgggtgtccaatggcacctacctggagctgaggaaggacctgggcttcagcaagctggaccaccctgtgctgtggtag

SEQ ID NO: 241135 - DNA, 339 bp, Artificial Sequence
  derived and/or modified sequence
atgatgtctgatgagaagaacctgggcgtgtcccagaagctggtgagccccagccgcagcaccagcagctgcagcagcaagcagggcagccggcaggacagctgggaggtggtggagggcctgcggggggagatgaactacacccaggagccccctgtgcagaagggcttcctgctgaagaagaggaagtggcccctgaagggctggcacaagcgcttcttctacctggacaagggcatcctgaagtatgccaagagccagacagacatcgagcgggagaagctgcacggctgcattgatgtgggcctgtctgtgatgtctgtgaagaagagcagctag

SEQ ID NO: 241136 - DNA, 186 bp, Artificial Sequence
  derived and/or modified sequence
atgatgtctgatgagaagaacctgggcgtgtcccagaagctggtgagccccagccgcagcaccagcagctgcagcagcaagcagggcagccggcaggacagctgggaggtggtggagggcctgcggggggagatgaactacacccaggagccccctgtgcagaagggcttcctgctgaagaagtag

SEQ ID NO: 241137 - DNA, 270 bp, Artificial Sequence
  derived and/or modified sequence
atgatgtctgatgagaagaacctgggcgtgtcccagaagctggtgagccccagccgcagcaccagcagctgcagcagcaagcagggcagccggcaggacagctgggaggtggtggagggcctgcggggggagatgaactacacccaggagccccctgtgcagaagggcttcctgctgaagaagaggaagtggcccctgaagggctggcacaagcgcttcttctacctggacaagggcatcctgaagtatgccaagagccagacagactag

SEQ ID NO: 241138 - DNA, 2463 bp, Artificial Sequence
  derived and/or modified sequence
atgatgagcgacgagaagaacctgggcgtgagccagaagctggtgagcccttcccgtagcaccagttcttgctcctctaagcaaggctctcgccaggacagctgggaagttgttgaagggctgaggggcgaaatgaattatacccaagagcctccagtgcagaaggggtttctgttaaaaaaaagaaaatggcccctcaagggctggcacaaacgatttttttatttggataagggcattctcaaatatgccaagtcacagactgatatcgagcgagagaagctgcacggctgcattgacgtcggcctttcagtgatgtccgtcaagaaatcttcaaaatgcatcgaccttgacaccgaagagcacatctatcatctcaaggtcaaaagtgaagaagtgttcgacgaatgggtgtctaaattgaggcaccaccgaatgtatcggcaaaatgaaattgcgatgttccctcacgaagtcaatcatttcttttctggctcaacaatcacagacagctcaagcggcgtcttcgatagcatcagcagtcgtaaacgaagttctattagtaagcagaatctgttccaaaccgggtcaaacgttagtttcagttgcggtggagagacccgggtgcctctctggctgcaatcaagcgaggatatggagaagtgcagtaaagaccttgcccattgccatgcatatctggtagagatgtctcagctcctccaatcaatggatgtgctgcatagaacatactccgctccggctatcaacgcaatacaagttccaaagcccttttctgggccggtgcggcttcactcttcaaacccaaacctttctactttggactttggcgaagaaaaaaactatagcgatggatctgaaacgagtagcgaattttccaagatgcaggaagatctctgccatatcgctcacaaagtttactttaccctcaggtccgctttcaatatcatgagtgctgagcgagaaaagctaaaacaactaatggagcaagacgcatcctcctcaccttcagcccaggtgataggattaaagaacgccctgtcaagtgagaattctcgggacgaaaaccgtgccctggtgcaccagctgtcgaatgagtcgcggctgagtattaccgattcacttagcgagttctttgatgctcaagaagtgctgctcagccctagcagctccgagaacgaaatttcagatgacgattcttacgtgtccgacatttccgataacctcagtttagataacctgtccaatgatctggataatgagcgccagactctcggccccgtgttggacagcggtagggaggccaaatcacgccggcgcacatgtctgcctgctccctgcccctcctcatcgaacatttctctgtggaatattctgcgaaacaatattggaaaagacctgtcaaaggtggctatgccagtggagcttaacgaaccgttgaacacactccagcgcctgtgtgaagagctagagtactctgagttgttggataaagccgcccagatcccctcgcccttagaacgcatggtttatgtggccgctttcgcaatctcagcctatgcctcaagctactatcgagcaggctcgaagccttttaatccagtgcttggcgagacatatgagtgtattcgagaagataaagggttccagtttttttcagagcaagtctcccaccaccccccgatttccgcatgccacgccgaatcaaggaactttgtgttttggcaggacgttcggtggaagaacaagttttgggggaaatccatggagatcgttcccatcgggacaactcatgtgactctgcccgtttttggcgatcatttcgagtggaataaggttacttcttgtattcacaacatcctgagtggtcaaagatggatcgagcactacggtgagatcgtgatcaaaaatttacacgacgatagctgctactgtaaagtgaatttcattaaggccaagtactggtccacgaacgctcacgagattgaaggaaccgtcttcgatcgaagcggcaaggcggttcacagactgtttgggaagtggcacgaatctatttactgcggcggggggagcagctcagcctgcgtctggagggcaaacccaatgcccaaaggttacgagcagtattactcttttacccagtttgctttagaactgaatgagatggacccttcatctaaaagtctccttccacccacagacaccagattccggcctgaccagcggttcctggaagagggaaaccttgaggaagctgaaatccagaagcagcgcatcgaacaattgcagagggaaagaaggagggtgcttgaagagaatcacgtcgagcaccagccacgcttttttagaaagtccgacgacgattcctgggtgtcaaacggaacatatttggagttgcgcaaagatttgggctttagcaaactcgatcatccggtactgtggtag

SEQ ID NO: 241139 - DNA, 339 bp, Artificial Sequence
  derived and/or modified sequence
atgatgagcgacgagaagaacctgggcgtgagccagaagctggtgtccccctccaggagcacctcatcctgcagcagcaagcagggctctagacaggatagttgggaggtcgtggaaggccttcggggagaaatgaattatactcaggaaccccctgttcagaaaggcttcctgctgaaaaaacgcaagtggcctttgaaaggctggcacaaacgatttttttatttggataagggaatcctgaagtacgccaaaagtcagacagatattgaaagggagaagctgcacggttgcatcgacgtgggcttaagtgtcatgagcgtgaagaagtcctcttag

SEQ ID NO: 241140 - DNA, 186 bp, Artificial Sequence
  derived and/or modified sequence
atgatgagcgacgagaagaacctgggcgtgagccagaagctggtgagtccttccaggagcactagttcatgcagtagcaaacaaggttcaaggcaggacagctgggaagtggtcgaggggctcaggggagagatgaactatactcaagagcctccggtacagaaaggcttcttattaaagaaatag

SEQ ID NO: 241141 - DNA, 2463 bp, Artificial Sequence
  derived and/or modified sequence
atgatgagcgacgagaagaacctgggcgtgagccagaagctggtgagcccttctcgaagtacttcaagttgttccagcaaacaaggcagcaggcaggactcctgggaggtagttgaaggtctaaggggggaaatgaactatacccaggaacctcctgtccagaaaggctttctgttgaagaagaggaagtggcctctgaaggggtggcataaacgttttttttatctcgacaaaggtatcctcaagtatgcgaagtcgcagaccgatatcgagcgggagaaacttcacggctgtatcgacgtgggactctctgtgatgtcagttaaaaaatccagtaagtgcatcgatctggacactgaggaacatatttaccatctcaaggtgaaatccgaggaagtgttcgatgagtgggtttctaagctgaggcatcatcgcatgtataggcagaacgagatcgcaatgtttcctcacgaggtgaatcattttttctcaggctctaccatcacagactctagttccggtgtctttgatagtatttcaagtagaaaaagaagctcaatctctaaacagaatttattccagaccggatccaacgtgtccttctcttgtggaggagagaccagggttcctctctggctccagtctagcgaagatatggagaaatgtagcaaggatctggcccattgccatgcctacctggtggaaatgagccagcttctacagtcaatggacgttttgcaccgcacatacagcgccccggcaatcaatgccatccaggtgccgaagcccttctccgggcctgtgcgattgcactctagtaacccgaatttatccaccctcgactttggagaagaaaagaattactccgatggtagcgaaacatcttcagagttttcgaagatgcaggaggacctgtgtcacatcgctcacaaagtatatttcacattacggtcggctttcaacattatgagcgcagagcgcgaaaaactaaaacagcttatggaacaggatgcatcctcctccccatctgcccaggtgataggcctgaaaaacgccctgtccagcgaaaactcccgagacgaaaatagggccttagttcatcagctgtcaaacgagagccggctttcaataactgactctctgtccgaattcttcgatgcgcaagaggtgctcctttccccttctagctccgaaaatgagatcagtgacgatgattcttacgtgtctgatatctctgataacctgtctctggacaatctttccaacgatctcgataacgaaagacagactcttgggcccgtgctggattctggtagggaggcgaaatcgcgccgacgcacttgtttacctgcaccatgcccctcaagctccaatatttctctgtggaacatcctgaggaacaacatcggcaaggacttgagcaaagtggccatgcctgtggagctgaatgagcctctaaatacactccagcggttatgcgaagagctggagtactctgagctgctagataaagcagcacaaataccctcacctctcgagagaatggtatacgtggctgcttttgctatatcggcttacgccagttcctactaccgcgccgggtccaaacctttcaatccagtgctgggagagacctatgagtgcattagggaggacaaaggctttcaattttttagcgaacaggtgtcacaccacccgcccatttctgcttgtcacgctgagtctcgcaatttcgtattttggcaagatgtgaggtggaaaaacaaattctgggggaagtccatggaaatagtaccaattggcacaacacatgtgaccttgcccgtgttcggtgaccattttgagtggaataaggtaacaagttgcatccataacatactgtccgggcagcgttggatcgagcattacggcgagatcgtgatcaagaatttgcacgacgattcttgttattgcaaggtaaacttcatcaaggccaagtattggagtaccaacgctcacgaaattgaaggtacggtgtttgaccggtcaggcaaagctgtgcaccgccttttcggcaagtggcacgaatccatctactgtggcggcgggtcctcgtccgcatgcgtgtggagagcaaatcccatgcccaaggggtatgaacagtattactcattcacacagtttgctctggaacttaacgaaatggatccctcgtccaagtcattgctccctccgacggacactagatttaggccagaccagagattcttggaagagggtaacttggaagaggcggagatacagaagcagagaattgagcagcttcaacgggagcggcgtcgcgtgctggaggagaatcacgtggagcaccagccaagattcttcagaaagagcgacgacgatagctgggtgtcgaacgggacctacttggaactgcgtaaggaccttggtttcagcaagctagaccatccagtgttgtggtag

SEQ ID NO: 241142 - DNA, 270 bp, Artificial Sequence
  derived and/or modified sequence
atgatgagcgacgagaagaacctgggcgtgagccagaagctggtgtctccgtctaggtcaacctcctcgtgttcaagcaagcagggcagtcggcaggatagttgggaagtcgtggaaggccttaggggcgaaatgaattatactcaagagccacccgtccagaagggctttctccttaaaaaacgaaagtggcctcttaaagggtggcacaagcgcttcttctacctggataagggtatccttaagtatgccaagtcgcagactgactag

SEQ ID NO: 241143 - DNA, 2614 bp, Artificial Sequence
  derived and/or modified sequence
tggataagagctaaaccacctgccactggggacttccatactctcggctcccttgtcatctgatggcattttgattgtctcgaggccaagtgacttgctgtccatgatgagtgatgagaagaaccttggtgtgtcccaaaaattggtatcaccttcaaggagcacaagtagctgctcttccaagcaaggaagtcgacaggacagctgggaagtggtggaaggactgaggggggagatgaattacacccaggagccaccagttcagaaaggatttttgctgaaaaagaggaagtggcccttaaaaggctggcataagagattcttctatctggacaaaggaatcttgaaatatgccaagagccaaaccgatatagagagagagaagctgcatggctgcattgatgtcgggctctcagtgatgtctgtaaagaagtcatcaaaatgcatagaccttgacaccgaggagcacatctaccatctgaaggtcaagtcagaagaagtctttgatgagtgggtatcgaaacttcgccaccacagaatgtatcgtcagaatgaaattgccatgtttccacatgaagttaaccactttttctcagggtccaccatcacagactcttcatctggggtgtttgactccatttcaagtaggaagcgtagcagtatatcaaagcagaatttatttcaaactggaagcaatgtatcattttcttgtggtggtgagacacgagttccattatggttacagtcttcagaggacatggaaaaatgctccaaagacctggcgcactgtcatgcctacctggtagaaatgagccagctcctgcaaagcatggacgtcctgcatcggacatactcggcaccagctatcaacgccatccaggtcccgaaacctttttctggcccagtaagactacactcctccaatcctaatttgtcaacactagattttggagaagagaaaaattattctgatggctctgaaacctcatcagagttttctaaaatgcaagaagatctgtgtcatattgcccataaagtttacttcactttaaggtcagcttttaatatcatgtcagcggagagagagaaactgaagcagctgatggagcaggatgcctcctcctccccgtctgctcaggtcattggtctgaagaacgccctgtcatccgaaaactccagagatgaaaaccgagctctagttcatcagctttctaatgaaagtagactctccatcactgactccctttctgagttttttgatgctcaggaagttctgttatctccaagctcttcagaaaacgagatttctgatgatgactcatatgtcagtgacataagtgataatctttccttagataatctcagtaatgatttagataatgagagacagaccttggggcctgtccttgatagtggtcgggaagcgaagtcccggagaagaacgtgcctgccggcgccctgcccgagcagcagtaacatcagcctgtggaacatcctgaggaacaacatcgggaaggacctgtccaaggtggccatgccggtggagctgaacgagcccctgaacacgctgcagaggctctgcgaggagctggagtacagcgagctcctggacaaggccgcgcagattcccagccccctggaaaggatggtatatgtggcagcctttgccatatcagcgtatgcatctagctactaccgagctggaagcaagccatttaatccggttcttggagaaacatatgaatgtattcgggaggacaagggcttccagtttttttcagaacaggtcagccaccatccgcctatctctgcgtgtcatgctgagtctagaaattttgttttctggcaagatgtgagatggaaaaacaaattctggggcaaatccatggaaattgttccaattggcacaacccatgtgactctgccagtttttggggatcattttgagtggaacaaagtgacctcttgcatccataacatcttaagcgggcagaggtggattgagcactatggagagattgtcatcaagaacctgcatgatgattcctgctactgcaaagtgaattttataaaggcaaaatactggagcactaatgcccatgagattgaaggcacagtgtttgacaggagtggaaaagcggttcatcggctgtttgggaaatggcatgaaagcatctactgtggcggcggctcctcttctgcctgtgtatggagagcaaatcctatgccgaaaggctacgagcaatactatagcttcacacagtttgcgctggaattaaatgaaatggatccatcatcaaagtctttattgccacctactgacactcgatttaggccagaccagaggtttctagaggaagggaacttagaagaagctgaaatacaaaagcagaggattgaacaactgcagagagaaaggcggcgggtcttagaagaaaatcatgtggagcaccagcctcggtttttcaggaaatccgacgatgactcttgggtgagcaacggcacctatttggaacttagaaaagatcttggtttttccaaactggaccatcctgtcttatggtgaaaaagtaaagaagaaagataacattagtgtatttctcctgtgcttgcc

SEQ ID NO: 241144 - DNA, 534 bp, Artificial Sequence
  derived and/or modified sequence
acctgtgcttgtcattatgtgcgtcgaggataagccaacctttataggttttagggtttcctttgggccacccaaaatgttttttaaatactttggataagagctaaaccacctgccactggggacttccatactctcggctcccttgtcatctgatggcattttgattgtctcgaggccaagtgacttgctgtccatgatgagtgatgagaagaaccttggtgtgtcccaaaaattggtatcaccttcaaggagcacaagtagctgctcttccaagcaaggaagtcgacaggacagctgggaagtggtggaaggactgaggggggagatgaattacacccaggagccaccagttcagaaaggatttttgctgaaaaagaggaagtggcccttaaaaggctggcataagagattcttctatctggacaaaggaatcttgaaatatgccaagagccaaaccgatatagagagagagaagctgcatggctgcattgatgtcgggctctcagtgatgtctgtaaagaagtcatcaaa

SEQ ID NO: 241145 - DNA, 568 bp, Artificial Sequence
  derived and/or modified sequence
agacatttcgcgagggggatggttccagaaagcgaagatctgagcgtggtgaatgaaatgtgaacagaatagctccggaaagagtctcagaaaccttgaattggggtcagtttggagactgaaaatgcgtcgagcgctgcaggtggtggttggcagggggatttaacactgtggagcccttactccgtcccaggcgctgagcccagcgagccacgcgcggtgcccagctcggtgaggttttagggtttcctttgggccacccaaaatgttttttaaatactttggataagagctaaaccacctgccactggggacttccatactctcggctcccttgtcatctgatggcattttgattgtctcgaggccaagtgacttgctgtccatgatgagtgatgagaagaaccttggtgtgtcccaaaaattggtatcaccttcaaggagcacaagtagctgctcttccaagcaaggaagtcgacaggacagctgggaagtggtggaaggactgaggggggagatgaattacacccaggagccaccagttcagaaaggatttttgctgaaaaag

SEQ ID NO: 241146 - DNA, 6504 bp, Artificial Sequence
  derived and/or modified sequence
gctggtggcgcccgccagccggcccgggagaggggacttgagcgcttcgcggccggtgcgcagcgcggctccggccccgcagtctgtctgcaagtggccatccccgcccccgactcctgcggccggtgcgggagctgtcagctgcacgttgcgggggtaccggagaagccggggttgccttctcccggttctgtgcgctaaccccggagcccggccccggggaactagggagcgtctccggctgcacagcgctcaggttttagggtttcctttgggccacccaaaatgttttttaaatactttggataagagctaaaccacctgccactggggacttccatactctcggctcccttgtcatctgatggcattttgattgtctcgaggccaagtgacttgctgtccatgatgagtgatgagaagaaccttggtgtgtcccaaaaattggtatcaccttcaaggagcacaagtagctgctcttccaagcaaggaagtcgacaggacagctgggaagtggtggaaggactgaggggggagatgaattacacccaggagccaccagttcagaaaggatttttgctgaaaaagaggaagtggcccttaaaaggctggcataagagattcttctatctggacaaaggaatcttgaaatatgccaagagccaaaccgatatagagagagagaagctgcatggctgcattgatgtcgggctctcagtgatgtctgtaaagaagtcatcaaaatgcatagaccttgacaccgaggagcacatctaccatctgaaggtcaagtcagaagaagtctttgatgagtgggtatcgaaacttcgccaccacagaatgtatcgtcagaatgaaattgccatgtttccacatgaagttaaccactttttctcagggtccaccatcacagactcttcatctggggtgtttgactccatttcaagtaggaagcgtagcagtatatcaaagcagaatttatttcaaactggaagcaatgtatcattttcttgtggtggtgagacacgagttccattatggttacagtcttcagaggacatggaaaaatgctccaaagacctggcgcactgtcatgcctacctggtagaaatgagccagctcctgcaaagcatggacgtcctgcatcggacatactcggcaccagctatcaacgccatccaggtcccgaaacctttttctggcccagtaagactacactcctccaatcctaatttgtcaacactagattttggagaagagaaaaattattctgatggctctgaaacctcatcagagttttctaaaatgcaagaagatctgtgtcatattgcccataaagtttacttcactttaaggtcagcttttaatatcatgtcagcggagagagagaaactgaagcagctgatggagcaggatgcctcctcctccccgtctgctcaggtcattggtctgaagaacgccctgtcatccgaaaactccagagatgaaaaccgagctctagttcatcagctttctaatgaaagtagactctccatcactgactccctttctgagttttttgatgctcaggaagttctgttatctccaagctcttcagaaaacgagatttctgatgatgactcatatgtcagtgacataagtgataatctttccttagataatctcagtaatgatttagataatgagagacagaccttggggcctgtccttgatagtggtcgggaagcgaagtcccggagaagaacgtgcctgccggcgccctgcccgagcagcagtaacatcagcctgtggaacatcctgaggaacaacatcgggaaggacctgtccaaggtggccatgccggtggagctgaacgagcccctgaacacgctgcagaggctctgcgaggagctggagtacagcgagctcctggacaaggccgcgcagattcccagccccctggaaaggatggtatatgtggcagcctttgccatatcagcgtatgcatctagctactaccgagctggaagcaagccatttaatccggttcttggagaaacatatgaatgtattcgggaggacaagggcttccagtttttttcagaacaggtcagccaccatccgcctatctctgcgtgtcatgctgagtctagaaattttgttttctggcaagatgtgagatggaaaaacaaattctggggcaaatccatggaaattgttccaattggcacaacccatgtgactctgccagtttttggggatcattttgagtggaacaaagtgacctcttgcatccataacatcttaagcgggcagaggtggattgagcactatggagagattgtcatcaagaacctgcatgatgattcctgctactgcaaagtgaattttataaaggcaaaatactggagcactaatgcccatgagattgaaggcacagtgtttgacaggagtggaaaagcggttcatcggctgtttgggaaatggcatgaaagcatctactgtggcggcggctcctcttctgcctgtgtatggagagcaaatcctatgccgaaaggctacgagcaatactatagcttcacacagtttgcgctggaattaaatgaaatggatccatcatcaaagtctttattgccacctactgacactcgatttaggccagaccagaggtttctagaggaagggaacttagaagaagctgaaatacaaaagcagaggattgaacaactgcagagagaaaggcggcgggtcttagaagaaaatcatgtggagcaccagcctcggtttttcaggaaatccgacgatgactcttgggtgagcaacggcacctatttggaacttagaaaagatcttggtttttccaaactggaccatcctgtcttatggtgaaaaagtaaagaagaaagataacattagtgtatttctcctgtgcttgccttctgaagtggcacaaacctgtgtttatatatttaaaagatactctaggatgatcacttgtgcttagcttagcattgtaactctttaagtctatattttcctcagtgcgtttctttacaatttcaaatgttaccctgattgtttatatgaatgtagaacaccttgacatttctttttatatataaactatttaataaaaatgaaagattgaatgttcatgtgtgggttaaaaaaagaagctttaacactaattttccaaaggttagggaagattccaattaaatttatgccttataaaattatgttgtagaaaaaaaatcaacctctcccaggtgcattaagaaataagaattcccagggttactcacccatgcgtaagctacccaagtttaatttggtagctgaaatatctttttgcctcagacagctcttgaattgctcatacagaacaattctgctggtgctggagtctgaagaatattttcatttgcattttagtggttagggagaggatataagattaatggaatgtatatttttatataagacgtatacggcaccttcttgaaaaggaagcatttgaacttgttcctccctatagttctattgccttatatgcaaaattgtaccctgttgctcagagaaattattcataagagaaaagaattccaattaattaaatatcacaatagcatcccagagagacagtaggaaatttctccttagtgagagctgagtccttgagaagttaagagactgtttcctgcttcccaccccaccccgttttttgtccctccgtttgatcacctccctgttgagtatggaatgtcccagtttaatataaaacatacagtttattccacacagcagtttgactttgtaaaagtttagcaaaataactgattgttttggataactcaacatgtttttcttaaatgctgttttagtattttctacctcttaataagcaccatattttagatcttgtataaaaagttgccatctgccttatagacaaatgtagagaattgatgttcttgctttgtgttgtgttctggtaaagctttaagtgagtgtcttacccctttcctatactttcttgttatccatatcattcttttgtgagttttgcagcagtcttgaataatacagattataactactgaaaggggaaccttcgtctttttaaatgtgttatttcacattacaataatatgtgtagtagttgaattgtgttatcaaagcatgtccaacttctgtccagatgacattaaaaccaaagcctaattgttaagcctcttattctaaagtccatagcaatgctatggaatatcaagtataatgatgtagtaaaaagatttctccagaaaacactttgagatacttaaagaaattcagagcatatcgaatgttatgaatgaagagtaaaataattacaggaaaagaatgcatgatttttcattgtcacaccaaataaccagttggacaatattgcattttcaaaatggagagttatttaaagtggatgtgtagccttctggaatctgcacgtgactggcattttaaaacaactcattaaatattggattcattttatcgagatgccaagatgaacacaatgtgaatatcatttccatttctaagcagttgaatgacacagtcagattctttggtgtatgctttgttctttccatctcaagcatttatccaaattctgctcacagacatgaggaagcaggctgtagatttaagggcactcaaggggaaaacaaatgtagtttccacagtgtgaggataaatgtagaatcgtggtaatattggctgttaaattggcctgctccagagactggctcaaaaaagaaagaagcaacgaaaacaaaatgcacagcctgaatggacgtagcactgtcatgtggcatttggaaaatctttaattatcctaatgttatttcacttgcccttatgctttattttagagtcccagggacaactggatgaaacattacgtctgtagtcatcttatttgagatgggggtgggaacgaattaaaatatgatagagaactatatgcagattttaaaatctagtcagtactagcatctataaagggcttttctgaaatttaaacagcttggtgatgcatcctgatattataagcttaaaactatcttgagggggaaatgacttcttttctccttctgtcccttttctcaaaagcatctttcccccaaatgtatgtctctaggacattttatagttttaagaggaagaaaacagaaacgtggcatcatttgggaagaaccaaggtagaatttaattttctggactttaaatctcctggttaaataatgctaatcactgtaccatttgagttacatgttttaacctcttttttttttctaattattccatccaaaatttctggtgaattacacagaaatttttggaaatgggactttgtgcaggtaaccaccctgcacttcaggtaatgttcctgtcacagctgtcgactaccccacgctgcaggaaatccattcagaaatgagctaacagtctccagtgtagcaggagagccagtcacttccctccccaggccccaaagcaccccaaggctggtattccttgagtcataggtattaataataaaagcctcaatgcagcttctccatgtagttcctctcctacaagccaggtggattctggtcctaactaaagagatgggagttcacctgagggcaagaagtacccaggatgcccaaacagccgcacaggtgtcctgtgcttcctgtgagacttcctgggggaaatatacaaactaatatattttttaatgtttacgtcatttacactgctgcttttctcatattctgcttttaattacttgtagtaaatcatttgtttgggcttcaagcactgtcttccatctgcatcttccagatttatcatgagtgatcttgttctactgttaaagatgtcaagcctaaaaagtaataaagtttttatttggctgttgaaccttgatgtagcccctactacatacactacaagttatgccttctggctactacagaatctccgcagaccttttagttatgagtagaagcaataagaaggtgtccttatggtcttaggaataatagttccaatgtattggcataatttgtttgaatgtctttattttgatattaacaccggcataaatctatttttgctaccagatgatagctattttcatttgctctattttcctctgcattgtactaatctgttactcagtgttagtcttcatttttctgtgttggaaacctgcgtcatgtaaatatctgcaaatcatgacagtctaaagtgcaaaccattttcagagactttggggaatgcagtgatcagaagtggctaatttattttatttctgattattttatccagagggtacttttttaatggatatttgtaaatcttccacttaaccactgaaaattattttgttttaatcccacccttccatccatacctctgcctccccaaaaagctcctattaatttgcttatccccctcatgtagctagttgaatgtgaataaataacatgg

SEQ ID NO: 241147 - DNA, 540 bp, Artificial Sequence
  derived and/or modified sequence
attatgtgcgtcgaggataagccaacctttataggtaagagtgctagtcattttatggactcataggatcactgaatttgaaagctagacaggatcgtcaggctgaaggaatcttggtaaatgggttttagggtttcctttgggccacccaaaatgttttttaaatactttggataagagctaaaccacctgccactggggacttccatactctcggctcccttgtcatctgatggcattttgattgtctcgaggccaagtgacttgctgtccatgatgagtgatgagaagaaccttggtgtgtcccaaaaattggtatcaccttcaaggagcacaagtagctgctcttccaagcaaggaagtcgacaggacagctgggaagtggtggaaggactgaggggggagatgaattacacccaggagccaccagttcagaaaggatttttgctgaaaaagaggaagtggcccttaaaaggctggcataagagattcttctatctggacaaaggaatcttgaaatatgccaagagccaaaccgat

SEQ ID NO: 241148 - DNA, 2463 bp, Artificial Sequence
  derived and/or modified sequence
atgatgtccgatgaaaagaatttgggcgtctctcagaaactggtctcgccgagccgatccaccagctcatgcagctctaagcagggctctcgccaagacagctgggaggtcgtagagggactgagaggcgagatgaactatactcaggagccacctgttcaaaagggattccttcttaaaaaacggaaatggcctctcaaggggtggcacaagcgatttttctatctagataaggggattctaaaatacgcaaagagccaaacagatattgaaagggagaagttgcacgggtgcattgatgtagggctgagtgtgatgtcagtgaagaaatcaagcaaatgcattgacttggataccgaagagcacatctatcatctgaaggttaagtcagaggaagttttcgatgagtgggttagtaagctgcgccatcatcgaatgtaccgacaaaatgagatagcgatgttccctcacgaggtgaatcacttttttagcggctcaaccataacggactcgtccagtggcgtctttgatagcatatctagccgaaagcgctcgtctattagcaagcagaaccttttccagacaggatccaatgtatcgtttagctgcggtggcgaaactcgtgtccccctatggcttcagtcatccgaggatatggaaaagtgctcaaaggatctcgcacattgtcatgcatatttggtagagatgagtcaactcctccagagtatggatgtgctccaccgcacatacagcgcgccagcgatcaacgcaattcaagtccccaaacctttctccggccctgtgcgtcttcactcttctaatcctaatctgtcaacgctcgactttggcgaagagaagaactacagcgatgggtccgaaacatctagcgagttctccaagatgcaggaagacctatgccatatcgcccataaggtctatttcaccctgcgttctgccttcaacatcatgagcgcagagcgggagaagcttaaacagttaatggagcaggatgcctcttctagtcccagtgcccaggtaatcggccttaagaatgctctctccagcgaaaatagccgggatgaaaacagggcgctcgtgcaccagctgtccaatgagagccgattgagcatcacagactcactaagcgaattcttcgacgctcaggaggttctcttgtctccctctagttctgagaatgaaattagcgacgatgacagttacgtgtcggatattagtgataacctgagcctcgacaacctctctaacgacttggataacgaacgccagaccctggggcctgtgttggacagcggacgggaggctaagtcaaggagacgaacttgtctgcctgcgccatgtccttccagcagcaacatcagcctgtggaacatactgaggaacaatatagggaaggacctgtcgaaagtagccatgccagtcgaattgaacgagcccctgaacacccttcagaggctgtgcgaagaattggagtacagcgagctgctcgataaggcagcccagatcccaagcccacttgaaagaatggtttatgtagcagctttcgcgatctccgcgtacgctagtagttactaccgcgcaggaagcaaaccctttaatccagttctgggcgagacgtatgaatgcatcagggaagataagggatttcagttcttttctgaacaggtgtcccatcatccaccgattagcgcctgtcacgccgagtccagaaatttcgtgttctggcaggacgttcgatggaagaataaattctggggcaaatccatggaaatcgtgccaattggcactactcatgtgactttgcccgtgtttggcgatcacttcgagtggaacaaagtcacttcctgtattcacaacatcctgtcaggccagcgttggatcgaacattatggcgaaatcgtgattaaaaatctgcatgacgatagctgctactgcaaggttaattttataaaggccaagtattggtctacgaacgcccacgagattgaagggacagtgtttgacaggtctggcaaagccgtgcataggctgttcggaaaatggcacgaaagcatctactgtggaggtggatcatcttcagcttgtgtttggcgagccaaccctatgccaaaaggttatgaacaatactatagcttcacgcaatttgccctggaattaaatgaaatggatccttcgtccaagtccctcctccccccaacagacactcgctttcgacctgatcagcggttccttgaggaaggtaatttggaggaagcagaaatccagaaacagaggatcgagcagctgcagagagaaaggcggagggtcctggaagagaaccatgttgagcaccagccaagattttttcgcaaaagtgatgatgactcttgggtgtccaatggcacttacctggagctgcgcaaggatttggggttctctaagctggaccacccggtactctggtag

SEQ ID NO: 241149 - DNA, 339 bp, Artificial Sequence
  derived and/or modified sequence
atgatgagcgatgaaaagaacctgggcgtttctcagaagcttgttagccccagccgctcaacatctagctgctcttcaaaacagggctcgaggcaggactcatgggaggtggtggagggtctccgtggggagatgaattacactcaggaacctccagtgcagaaaggcttcctgttaaaaaagagaaaatggccactgaagggatggcacaagaggttcttctatcttgataagggaatcctgaagtacgcaaagtctcagactgacattgagagggagaagctccacggatgtattgatgtgggactgagtgttatgagtgttaaaaagtcctcttag

SEQ ID NO: 241150 - DNA, 186 bp, Artificial Sequence
  derived and/or modified sequence
atgatgagcgatgagaaaaatcttggggtgtcccagaaactggtgtcaccaagtcgttcaacgtcatcttgtagttcgaagcagggtagccggcaagattcttgggaggtggtcgaaggacttagaggcgagatgaattacacccaggaaccacccgttcagaaaggatttctgctcaagaagtag

SEQ ID NO: 241151 - DNA, 2463 bp, Artificial Sequence
  derived and/or modified sequence
atgatgagtgatgagaaaaaccttggggtgagccaaaaactggtctccccctctagaagcacctcaagttgctctagcaaacagggaagcaggcaggatagttgggaggtagtggaaggccttcgaggggaaatgaactacacccaggaacctcctgtacagaaagggtttctgcttaaaaagcggaaatggccactcaaaggctggcacaaaaggtttttttacctcgacaaggggatcctgaagtacgcaaaatcccagacagatattgaaagggagaaactccatggatgtatcgatgtcgggctctccgtgatgtctgtcaagaaaagttcgaagtgtatcgatctggataccgaagagcacatttaccatctgaaggtgaagtctgaggaagttttcgatgaatgggtgtcaaagctgcgacaccatcgtatgtacaggcaaaacgaaatcgccatgttcccccacgaagtgaatcacttcttctcaggaagtaccatcacagattcctcttccggggtgtttgacagcatctcttctcgaaagcgctcctcaatttctaagcaaaatctcttccagacaggctcgaatgtgtcttttagctgcgggggagagactagagttcctctgtggctacaatcctcggaggacatggagaagtgctccaaagacctggctcactgtcatgcttacctggttgaaatgtcccagcttctgcagagcatggacgtactacataggacctattctgctccggctatcaatgccattcaggtgcctaagccattttccggaccggtgcggttgcactcatctaatcctaatctgtccacccttgattttggagaggagaagaattacagcgatggctcagagacatcctcggagtttagtaaaatgcaggaggacctttgccacattgcccataaggtttatttcaccctccgtagtgccttcaacataatgagtgctgagcgagagaagctcaagcagctcatggagcaggatgcttcctcttcaccgtctgcccaggtgattggactcaagaatgcgcttagttccgaaaactctcgggacgagaaccgggctctcgttcaccagttgtcgaacgagtctcgcctgagtataacagactcactcagcgagttctttgacgcgcaggaggtgctcttatcaccaagttcctcggagaatgaaattagcgatgacgattcatatgtctctgatattagcgataatttgagcctggacaatctgagcaacgatctcgataatgagcgccaaacacttgggcctgtacttgatagtggtagagaggctaaatctcgcagaaggacctgcctgcccgcaccatgcccttctagcagtaatattagtctctggaatatcctcagaaataacataggcaaggacctctcaaaagtcgccatgcccgtggaactaaacgagccccttaacactctccaaagactttgcgaagagctggaatactccgaacttttggataaggcagcccaaatcccatcccctctggagcgaatggtgtacgtggctgcatttgctatcagtgcctacgcgtctagttattatcgagccggtagcaagccattcaaccccgtcctgggggaaacctatgaatgcatcagagaggacaaaggctttcagttcttctccgagcaagtctcgcaccatcctccaattagcgcttgtcacgccgaatcacggaacttcgtcttctggcaggacgtcaggtggaaaaacaagttctggggtaaatctatggagatcgtacccatcggcaccactcacgttacactccccgtctttggcgaccatttcgaatggaacaaggtcacctcatgtatacataacatcctgtcagggcagcggtggatcgaacattacggcgaaatcgtgatcaagaacctgcatgatgacagctgctactgtaaggttaacttcatcaaagcaaaatattggagcacaaatgcccacgaaattgaggggactgtgtttgatcgtagcggcaaagcagtgcatcgactgttcggcaagtggcacgaatccatttactgcggcggagggtccagttcagcctgtgtgtggcgcgctaacccaatgcccaagggttacgagcagtactattccttcacacagtttgccctcgaattgaatgaaatggatccaagctcaaaaagcctgctgccccctaccgatactcgatttcgaccagatcaacgattccttgaagaaggcaatcttgaagaagcggaaatccaaaagcagaggatcgagcagcttcagagggagcggagacgggtcctcgaggagaaccatgtcgaacaccagccacgcttttttcgcaaatctgacgacgactcttgggtgtcaaacgggacctatctcgaactccggaaggatttgggtttctcaaagctcgatcacccagtgctgtggtag

SEQ ID NO: 241152 - DNA, 270 bp, Artificial Sequence
  derived and/or modified sequence
atgatgtcagacgaaaaaaatctgggcgtgagtcagaagctggtgtctccttcacggtccaccagtagttgttcgtccaagcagggcagccggcaggattcatgggaagttgtggaaggcctgcgcggagagatgaattacacccaggaaccaccggtgcagaagggctttctgctgaagaagcgcaaatggcccctgaaaggatggcataagcgatttttctacctcgacaagggaattcttaagtacgcaaagagccagacagattag

SEQ ID NO: 241153 - DNA, 2463 bp, Artificial Sequence
  derived and/or modified sequence
atgatgagcgacgagaagaacctgggcgtgagccagaagctggtgagccccagcagaagcaccagcagctgcagcagcaagcagggcagcagacaggacagctgggaggtggtggagggcctgagaggcgagatgaactacacccaggagccccccgtgcagaagggcttcctgctgaagaagagaaagtggcccctgaagggctggcacaagagattcttctacctggacaagggcatcctgaagtacgccaagagccagaccgacatcgagagagagaagctgcacggctgcatcgacgtgggcctgagcgtgatgagcgtgaagaagagcagcaagtgcatcgacctggacaccgaggagcacatctaccacctgaaggtgaagagcgaggaggtgttcgacgagtgggtgagcaagctgagacaccacagaatgtacagacagaacgagatcgccatgttcccccacgaggtgaaccacttcttcagcggcagcaccatcaccgacagcagcagcggcgtgttcgacagcatcagcagcagaaagagaagcagcatcagcaagcagaacctgttccagaccggcagcaacgtgagcttcagctgcggcggcgagaccagagtgcccctgtggctgcagagcagcgaggacatggagaagtgcagcaaggacctggcccactgccacgcctacctggtggagatgagccagctgctgcagagcatggacgtgctgcacagaacctacagcgcccccgccatcaacgccatccaggtgcccaagcccttcagcggccccgtgagactgcacagcagcaaccccaacctgagcaccctggacttcggcgaggagaagaactacagcgacggcagcgagaccagcagcgagttcagcaagatgcaggaggacctgtgccacatcgcccacaaggtgtacttcaccctgagaagcgccttcaacatcatgagcgccgagagagagaagctgaagcagctgatggagcaggacgccagcagcagccccagcgcccaggtgatcggcctgaagaacgccctgagcagcgagaacagcagagacgagaacagagccctggtgcaccagctgagcaacgagagcagactgagcatcaccgacagcctgagcgagttcttcgacgcccaggaggtgctgctgagccccagcagcagcgagaacgagatcagcgacgacgacagctacgtgagcgacatcagcgacaacctgagcctggacaacctgagcaacgacctggacaacgagagacagaccctgggccccgtgctggacagcggcagagaggccaagagcagaagaagaacctgcctgcccgccccctgccccagcagcagcaacatcagcctgtggaacatcctgagaaacaacatcggcaaggacctgagcaaggtggccatgcccgtggagctgaacgagcccctgaacaccctgcagagactgtgcgaggagctggagtacagcgagctgctggacaaggccgcccagatccccagccccctggagagaatggtgtacgtggccgccttcgccatcagcgcctacgccagcagctactacagagccggcagcaagcccttcaaccccgtgctgggcgagacctacgagtgcatcagagaggacaagggcttccagttcttcagcgagcaggtgagccaccacccccccatcagcgcctgccacgccgagagcagaaacttcgtgttctggcaggacgtgagatggaagaacaagttctggggcaagagcatggagatcgtgcccatcggcaccacccacgtgaccctgcccgtgttcggcgaccacttcgagtggaacaaggtgaccagctgcatccacaacatcctgagcggccagagatggatcgagcactacggcgagatcgtgatcaagaacctgcacgacgacagctgctactgcaaggtgaacttcatcaaggccaagtactggagcaccaacgcccacgagatcgagggcaccgtgttcgacagaagcggcaaggccgtgcacagactgttcggcaagtggcacgagagcatctactgcggcggcggcagcagcagcgcctgcgtgtggagagccaaccccatgcccaagggctacgagcagtactacagcttcacccagttcgccctggagctgaacgagatggaccccagcagcaagagcctgctgccccccaccgacaccagattcagacccgaccagagattcctggaggagggcaacctggaggaggccgagatccagaagcagagaatcgagcagctgcagagagagagaagaagagtgctggaggagaaccacgtggagcaccagcccagattcttcagaaagagcgacgacgacagctgggtgagcaacggcacctacctggagctgagaaaggacctgggcttcagcaagctggaccaccccgtgctgtggtag

SEQ ID NO: 241154 - DNA, 339 bp, Artificial Sequence
  derived and/or modified sequence
atgatgagcgacgagaagaacctgggcgtgagccagaagctggtgagccccagcagaagcaccagcagctgcagcagcaagcagggcagcagacaggacagctgggaggtggtggagggcctgagaggcgagatgaactacacccaggagccccccgtgcagaagggcttcctgctgaagaagagaaagtggcccctgaagggctggcacaagagattcttctacctggacaagggcatcctgaagtacgccaagagccagaccgacatcgagagagagaagctgcacggctgcatcgacgtgggcctgagcgtgatgagcgtgaagaagagcagctag

SEQ ID NO: 241155 - DNA, 186 bp, Artificial Sequence
  derived and/or modified sequence
atgatgagcgacgagaagaacctgggcgtgagccagaagctggtgagccccagcagaagcaccagcagctgcagcagcaagcagggcagcagacaggacagctgggaggtggtggagggcctgagaggcgagatgaactacacccaggagccccccgtgcagaagggcttcctgctgaagaagtag

SEQ ID NO: 241156 - DNA, 270 bp, Artificial Sequence
  derived and/or modified sequence
atgatgagcgacgagaagaacctgggcgtgagccagaagctggtgagccccagcagaagcaccagcagctgcagcagcaagcagggcagcagacaggacagctgggaggtggtggagggcctgagaggcgagatgaactacacccaggagccccccgtgcagaagggcttcctgctgaagaagagaaagtggcccctgaagggctggcacaagagattcttctacctggacaagggcatcctgaagtacgccaagagccagaccgactag

SEQ ID NO: 241157 - protein, 54 aa, Artificial Sequence
  derived and/or modified sequence
MFLSAVFFAKSKSNETKSPLRGKEKNTLPLNGGLKMTLIYKEKTEGGDTDSEIL

SEQ ID NO: 241158 - DNA, 165 bp, Artificial Sequence
  derived and/or modified sequence
atgttcctgagcgccgtgttcttcgccaagagcaagagcaacgagaccaagagccccctgagaggcaaggagaagaacaccctgcccctgaacggcggcctgaagatgaccctgatctacaaggagaagaccgagggcggcgacaccgacagcgagatcctgtag

SEQ ID NO: 241159 - DNA, 165 bp, Artificial Sequence
  derived and/or modified sequence
atgtttttgtctgcagtcttctttgccaagagcaagagcaacgagacaaagtcaccccttcgaggcaaagagaagaatacactgcccctcaacgggggactgaagatgaccctcatatataaagagaagacagaagggggggatacagacagtgaaatcctctag

SEQ ID NO: 241160 - DNA, 165 bp, Artificial Sequence
  derived and/or modified sequence
atgttcctgtctgctgtgttctttgccaagagcaagagcaatgagaccaagagccccctgcggggcaaggagaagaacaccctgcccctgaatggaggcctgaagatgaccctcatctacaaggagaagacagagggcggggacacagattctgagatcctgtag

SEQ ID NO: 241161 - DNA, 404 bp, Artificial Sequence
  derived and/or modified sequence
gcagttgttgttggttgggggccttttggccggtgacggagactgcccaggtgtggtcaccatgttcctctccgcggtcttctttgccaagagcaagtcaaatgaaacaaagagtcctcttcgtggaaaagaaaaaaatacgctccctttaaacggtggattgaaaatgactttgatttataaagagaagactgagggcggggatactgattcagaaatcctgtagcgtgtaataaaagaagaggaaatggcatggaatcactgcctcctgtgatttgaaggccattgtgaaggaaaacaatgcagtgaaagaaagttcttcatattaggacagatatcattgcatcacatttatttatctttctgggtatttttatagcccttaataaaaaatattaaaatag

SEQ ID NO: 241162 - DNA, 165 bp, Artificial Sequence
  derived and/or modified sequence
atgttcctgagcgccgtgttcttcgccaagagcaagagcaacgagaccaaatcgcccttgcgggggaaggagaaaaacactctgcccttaaacggcggtcttaaaatgactctgatctacaaagagaagactgaaggaggcgacaccgatagcgagatcttgtag

SEQ ID NO: 241163 - DNA, 165 bp, Artificial Sequence
  derived and/or modified sequence
atgttcctgtctgccgtgttctttgctaaatcgaaaagcaacgagacaaaatcacccttgcggggtaaggaaaagaacactttaccattgaatggtggactaaagatgacattaatatataaagagaaaacagaaggcggtgatacagattccgagatactgtag

SEQ ID NO: 241164 - protein, 606 aa, Artificial Sequence
  derived and/or modified sequence
MSTASAASSSSSSSAGEMIEAPSQVLNFEEIDYKEIEVEEVVGRGAFGVVCKAKWRAKDVAIKQIESESERKAFIVELRQLSRVNHPNIVKLYGACLNPVCLVMEYAEGGSLYNVLHGAEPLPYYTAAHAMSWCLQCSQGVAYLHSMQPKALIHRDLKPPNLLLVAGGTVLKICDFGTACDIQTHMTNNKGSAAWMAPEVFEGSNYSEKCDVFSWGIILWEVITRRKPFDEIGGPAFRIMWAVHNGTRPPLIKNLPKPIESLMTRCWSKDPSQRPSMEEIVKIMTHLMRYFPGADEPLQYPCQYSDEGQSNSATSTGSFMDIASTNTSNKSDTNMEQVPATNDTIKRLESKLLKNQAKQQSESGRLSLGASRGSSVESLPPTSEGKRMSADMSEIEARIAATTAYSKPKRGHRKTASFGNILDVPEIVISGNGQPRRRSIQDLTVTGTEPGQVSSRSSSPSVRMITTSGPTSEKPTRSHPWTPDDSTDTNGSDNSIPMAYLTLDHQLQPLAPCPNSKESMAVFEQHCKMAQEYMKVQTEIALLLQRKQELVAELDQDEKDQQNTSRLVQEHKKLLDENKSLSTYYQQCKKQLEVIRSQQQKRQGTS

SEQ ID NO: 241165 - DNA, 1821 bp, Artificial Sequence
  derived and/or modified sequence
atgtcgactgcatccgctgcttcgtccagctcctcctcttctgcaggcgagatgatcgaggcgccctcacaagtcctaaacttcgaggagatcgattacaaagagattgaggtggaggaggtggttggccgaggagcctttggggtggtatgtaaagccaagtggagggcaaaggatgtagcgataaaacagatcgaaagtgagtcggaacgaaaggcgtttatcgtcgaattacgtcagctaagcagagtgaatcatcctaacatcgtgaagctgtacggcgcatgcttaaatcctgtgtgtctggtaatggagtacgcagaaggcggcagtctgtataacgtcctgcacggagccgagcctctgccctactatacagctgctcacgcaatgagttggtgtttgcagtgcagtcagggtgttgcttacctgcatagcatgcaaccgaaagcactgatacaccgtgatctgaagccacccaatctgctcctggttgccggaggaaccgttctgaagatatgtgatttcgggaccgcatgtgatatccagacgcatatgactaacaataagggatccgccgcttggatggcaccagaagtgttcgaagggagtaattattccgagaagtgtgatgtgtttagctggggcattatcctttgggaagttattactcggagaaaacctttcgatgagatcggcggcccagcatttaggatcatgtgggctgtacacaacggcacacggcctcctcttatcaaaaatctccctaaaccaattgaatctctcatgactcggtgttggagtaaggaccccagtcaaagacccagcatggaggaaatagtgaaaattatgacacacctgatgcgatattttcctggggcagacgagcctcttcagtatccctgccaatactcagacgaaggtcagtctaattcagccacaagtacgggcagcttcatggatatagcctcaaccaacacaagcaacaaaagtgatacgaacatggaacaggttccagctaccaatgacacaattaaaaggctcgaaagtaagctcttgaaaaatcaggctaaacagcagagtgaatctgggcgcctgagtctgggcgcctctcggggatcctccgtcgagagtcttccccctaccagtgagggaaagcggatgtctgccgatatgtccgaaatagaggcaagaatcgctgcaactaccgcttattccaagccaaagagaggccaccgtaaaacagcatccttcggcaacattttggacgttcctgaaatcgtcatctccggcaatggacaaccccgcaggaggtccatccaggatctaaccgttacaggcacagagccagggcaggtgagttcacgatcatcctctccatctgtccgcatgatcactactagcggccctacatccgagaagcccactcggtctcacccttggactcccgacgattccactgacactaacggatccgacaacagtattcccatggcttatctaactctagatcaccagctccagccactggctccctgccctaattcaaaggagtccatggcagtcttcgagcagcactgcaaaatggcccaagagtatatgaaggtgcagacagagatcgccctcctgctccagcggaaacaggaactggtggccgagctagatcaagacgagaaggaccagcagaacacaagtagactggtgcaggagcataaaaagctacttgatgaaaacaagagcctgtcaacatactatcagcagtgtaaaaagcaattggaggttatcaggtcgcagcagcagaagcggcagggaacaagttag

SEQ ID NO: 241166 - DNA, 1821 bp, Artificial Sequence
  derived and/or modified sequence
atgagcacagccagcgctgccagcagcagcagcagcagcagcgctggggagatgattgaggcccccagccaggtgctgaactttgaggagattgactacaaggagattgaggtggaggaggtggtgggccgcggggcctttggagtggtgtgcaaggccaagtggagggccaaggatgtggccatcaagcagattgaaagtgaaagtgagaggaaggccttcatcgtggagctgcggcagctgagccgggtgaaccaccccaacatcgtgaagctgtatggagcctgcctgaaccctgtgtgcctggtgatggagtatgcagagggcggcagcctgtacaacgtgctgcatggagctgagcccctgccctactacacagctgcccacgccatgtcctggtgcctgcagtgcagccagggcgtggcctacctgcacagcatgcagcccaaggccctgatccaccgggacctgaagccacccaacctgctgctggtggccggcggcaccgtgctgaagatctgtgactttggaacagcctgtgacatccagacccacatgaccaacaacaagggcagcgctgcctggatggcccctgaggtgtttgagggcagcaactacagcgagaagtgtgatgtgttctcctggggcatcatcctgtgggaggtgatcaccaggaggaagccctttgatgagatcggcggccctgccttccgcatcatgtgggccgtgcacaacggcaccaggcctcctctcatcaagaacctgcccaagcccatcgagagcctgatgacccgctgctggagcaaggaccccagccagaggcccagcatggaggagatcgtgaagatcatgacccacctgatgagatacttccctggagcagatgagcccctgcagtacccctgccagtacagtgatgagggccagagcaacagcgccaccagcacaggcagcttcatggacatcgccagcaccaacaccagcaacaagagtgacaccaacatggagcaggtgcctgccaccaatgacaccatcaagaggctggagagcaagctgctgaagaaccaggccaagcagcagagcgagagcggccgcctgagcctgggcgccagccggggcagctctgtggagagcctgccccccaccagcgagggcaagaggatgtctgctgacatgtctgaaattgaggccagaattgctgccaccacagcctacagcaagcccaagaggggccacaggaagacagccagctttggaaacatcctggatgtgcctgagatcgtcatctctggaaatggccagcccaggagaagaagcatccaggacctgactgtgactggaacagagcccggccaggtgagcagccgcagcagcagccccagcgtgaggatgatcaccaccagcggccccaccagcgagaagcccaccaggagccacccctggaccccagatgacagcacagacaccaacggcagtgacaacagcatccccatggcctacctgaccctggaccaccagctgcagcccctggccccctgccccaacagcaaggagagcatggctgtgtttgagcagcactgcaagatggcccaggagtacatgaaggtgcagacagagatcgccctgctgctgcagaggaagcaggagctggtggccgagctggaccaggatgagaaggaccagcagaacaccagccggctggtgcaggagcacaagaagctgctggatgagaacaagagcctgagcacctactaccagcagtgcaagaagcagctggaggtgatccgcagccagcagcagaagaggcagggcaccagctag

SEQ ID NO: 241167 - DNA, 4911 bp, Artificial Sequence
  derived and/or modified sequence
ggacacggctgtggccgctgcctctacccccgccacggatcgccgggtagtaggactgcgcggctccaggctgagggtcggtccggaggcgggtgggcgcgggtctcacccggattgtccgggtggcaccgttcccggccccaccgggcgccgcgagggatcatgtctacagcctctgccgcctcctcctcctcctcgtcttcggccggtgagatgatcgaagccccttcccaggtcctcaactttgaagagatcgactacaaggagatcgaggtggaagaggttgttggaagaggagcctttggagttgtttgcaaagctaagtggagagcaaaagatgttgctattaaacaaatagaaagtgaatctgagaggaaagcgtttattgtagagcttcggcagttatcccgtgtgaaccatcctaatattgtaaagctttatggagcctgcttgaatccagtgtgtcttgtgatggaatatgctgaagggggctctttatataatgtgctgcatggtgctgaaccattgccatattatactgctgcccacgcaatgagttggtgtttacagtgttcccaaggagtggcttatcttcacagcatgcaacccaaagcgctaattcacagggacctgaaaccaccaaacttactgctggttgcaggggggacagttctaaaaatttgtgattttggtacagcctgtgacattcagacacacatgaccaataacaaggggagtgctgcttggatggcacctgaagtttttgaaggtagtaattacagtgaaaaatgtgacgtcttcagctggggtattattctttgggaagtgataacgcgtcggaaaccctttgatgagattggtggcccagctttccgaatcatgtgggctgttcataatggtactcgaccaccactgataaaaaatttacctaagcccattgagagcctgatgactcgttgttggtctaaagatccttcccagcgcccttcaatggaggaaattgtgaaaataatgactcacttgatgcggtactttccaggagcagatgagccattacagtatccttgtcagtattcagatgaaggacagagcaactctgccaccagtacaggctcattcatggacattgcttctacaaatacgagtaacaaaagtgacactaatatggagcaagttcctgccacaaatgatactattaagcgcttagaatcaaaattgttgaaaaatcaggcaaagcaacagagtgaatctggacgtttaagcttgggagcctcccgtgggagcagtgtggagagcttgcccccaacctctgagggcaagaggatgagtgctgacatgtctgaaatagaagctaggatcgccgcaaccacagcctattccaagcctaaacggggccaccgtaaaactgcttcatttggcaacattctggatgtccctgagatcgtcatatcaggcaacggacagccaagacgtagatccatccaagacttgactgtaactggaacagaacctggtcaggtgagcagtaggtcatccagtcccagtgtcagaatgattactacctcaggaccaacctcagaaaagccaactcgaagtcatccatggacccctgatgattccacagataccaatggatcagataactccatcccaatggcttatcttacactggatcaccaactacagcctctagcaccgtgcccaaactccaaagaatctatggcagtgtttgaacagcattgtaaaatggcacaagaatatatgaaagttcaaacagaaattgcattgttattacagagaaagcaagaactagttgcagaactggaccaggatgaaaaggaccagcaaaatacatctcgcctggtacaggaacataaaaagcttttagatgaaaacaaaagcctttctacttactaccagcaatgcaaaaaacaactagaggtcatcagaagtcagcagcagaaacgacaaggcacttcatgattctctgggaccgttacattttgaaatatgcaaagaaagactttttttttaaggaaaggaaaaccttataatgacgattcatgagtgttagctttttggcgtgttctgaatgccaactgcctatatttgctgcatttttttcattgtttattttccttttctcatggtggacatacaattttactgtttcattgcataacatggtagcatctgtgacttgaatgagcagcactttgcaacttcaaaacagatgcagtgaactgtggctgtatatgcatgctcattgtgtgaaggctagcctaacagaacaggaggtatcaaactagctgctatgtgcaaacagcgtccattttttcatattagaggtggaacctcaagaatgactttattcttgtatctcatctcaaaatattaataatttttttcccaaaagatggtatataccaagttaaagacagggtattataaatttagagtgattggtggtatattacggaaatacggaacctttagggatagttccgtgtaagggctttgatgccagcatccttggatcagtactgaactcagttccatccgtaaaatatgtaaaggtaagtggcagctgctctatttaatgaaagcagttttaccggattttgttagactaaaatttgattgtgatacattgaacaaaatggaactcatttttttttaaggagtaaagatttttaattctgtgattgtgtgtatgtgtgttgaaactgtaaagcttttatgactctaatattaatctcttaaatgaaattaaaaggcaaaagaacatgattgagcttaaatgatcatttcttcctgcagtgattcttggattgttttctcatgtatttgaaaaaaaaaaaatgaagaaaaataatggaaaatggaagtaattactccagctaaaaaaagcttggacttagatttctttttatgataccaaatgagaaataaaccaggcaaatcagaaggaagttaaagaagcaaatataaattcaacaagtgtcctaattatcctggatattggaatatttgattttccttacaatcccgttctagaatgcctgccgcctttcaacactttcaagagaatttcaacacttacagagtatttatattgttaacagtaattttgctaccaaaaccttcagaataactttaataataaaatgacactgaaataatagactatacaaactctatattttttcagttggtgttaaaataagtcacattttgataccagtacaagatgtcttttaaataaggatgtcatcagtctgatttttatagcattaatgttttatgaagaaaaagttcaaaatgaaagcattaattgctgtgattattagaattctatcatgactgtattgtagtttttgctctatttcagataagcaagatctaagaagttatcaaaactattctttaaaatgctaaagcaggtaactttttcttccattattttttcctcctaccactgagttttgtaatgaattccttgtgtatacaagcaatacaggtgaatactaaactgttatttttagcttcttcaaaagctattttagaaagcttcctggaaataaatgtcttctgtcatttaatttaaataaaaggagtgttaattgttcccaaatttgattacctagctgaaacagatattggattcagcatagtaatagtaaaataaaattggcagagaaaataactgtagactaggataaagcatgactcctccatagcattgttgcttgtatgtacatctgtcactccactgaaagggacctagtcactttaaagaggccttttatctcagcacgagatatccaagcgtgaatgctaaggcttgatgtttccattaggatttagcattcgagatttcagattttatttatagtcattgatgtgttttgctgtattataacacatttaagggaaattttattatggtttttacatgtagtcatttcataaaaatatccagataggtaaatggaagaaaatagtagattttagtcatggtaccaaatgcaagaggctgttgaacagttgcttgtttgtttacagtaagttccttgagattttcagtactgtagttgccctggacattgagtacagttcagccttactctgtttttaagtagttgtgttgtcaatttcatgcttttaagtcctgatgatccttggagatgggagaaaaagataccagggataattaaaatccacagccagtttcatcagtttcctcatccatcctgcaaataaaaatgttaacaaggagccaaacttattcgttctggttttacaatttattttgaccgttttttgggtgaaaattgcaaacagccaagcaagtggctggaatgccccagtctaagaaattcaaaaacaatcactgagtaagccctaattacattaattacattttactcttgactccaggaaaagaaagcaagcttttatctaatctagagggaagtattcgtgagcaataaaaatcacttttttgagttgaataataatcagttaagaatatttaccgcatagcaacacaacatataaagatttgttacaagttgtttacggatgtttgactatttttgctgaagtattttagagtattgaatgtcttctctcttcaagtttctttcatgttcctaatttcagctcctgtagccagagatcacaggtcttccctgtgaaactttggtttctttctataaatgtgtgtggttttcagcgctcaactcctgtcttcaaatggtagtaagttctacttctacttctgtcattcagaacattttatgtcaaatgatgtaatgcagaaattcttgtgcatatttgtaactgaaggaagctttttagatttatttttgtttttaataaaattcagattcctattctaaactggta

SEQ ID NO: 241168 - DNA, 1821 bp, Artificial Sequence
  derived and/or modified sequence
atgagcaccgccagcgccgccagcagcagcagcagcagcagcgccggtgagatgattgaggccccaagccaggtcctcaacttcgaagagatcgattataaagagatcgaggtggaagaagtggtgggcagaggcgcctttggtgtagtatgcaaggccaaatggcgcgccaaggacgtcgccatcaaacaaattgagtctgagtcagaacgtaaagctttcatagttgagttgagacaattatcaagagtgaatcatccgaacatagtcaagctttatggtgcctgtttgaaccccgtctgcctcgtgatggaatatgccgaagggggatcgctgtacaatgtcctacacggcgctgaacctctcccatattacactgcagcacatgccatgtcatggtgccttcagtgttctcagggggtggcctacttgcacagcatgcagccgaaggccttgatccaccgcgaccttaagcctcctaatcttctcctagtcgcagggggcacagtgctaaagatatgcgactttggaaccgcttgtgatatacaaacacatatgacgaataacaaaggatcagccgcatggatggcccctgaggtcttcgagggctctaactatagcgagaagtgcgacgtgttcagctggggaataatcctgtgggaggttatcactcgacgtaaaccctttgacgaaattggcggcccggcgtttaggatcatgtgggcagtgcataacggaaccagacccccgttgatcaaaaatttaccgaagcctatagaaagtttaatgacaagatgctggtccaaggacccaagccagagaccctcaatggaggaaatagtcaagatcatgactcatttgatgaggtactttcccggagccgacgagccccttcaatacccgtgccagtactccgatgaaggtcaatctaactccgccacatccactggctcctttatggatattgctagtacgaacacctctaataagagtgacaccaatatggaacaagtgcctgccacaaatgacactatcaaacgtctagaatctaagctgttgaagaaccaggcgaaacagcagtcggaaagcggtcgcctcagccttggtgcctccagagggtcatctgttgagagcctcccccctacctccgaggggaagcgaatgtccgccgacatgtcagagattgaggctagaattgcagctaccactgcatactctaaacccaagcgcgggcatcgcaaaacagccagtttcggcaacattctcgatgttcctgagattgtgatttctggcaatggacagccacgtaggcggagcattcaggatctgaccgtcacaggaacggaaccaggccaggtgagcagccgcagtagctcacccagcgtcagaatgattacaacatctgggcccacctcagaaaaacctacacgcagccatccatggaccccagatgattcgacagacactaatggctctgacaacagtatccccatggcttatctgacgctcgatcaccaacttcagcctcttgccccctgtccaaattctaaagagtccatggccgtgttcgagcagcactgcaagatggcacaggagtatatgaaagtacagaccgaaatcgccctgctccttcagaggaagcaggagttggtcgctgagctggaccaggatgagaaggatcagcagaatacctccaggctggtgcaggaacacaaaaaattgttggatgagaacaaatccctctccacttattatcagcagtgcaagaaacaactagaagtgatccggagccaacagcaaaagcgccaaggtacgagctag

SEQ ID NO: 241169 - DNA, 1821 bp, Artificial Sequence
  derived and/or modified sequence
atgtcaacagccagtgctgcttcctcctcttcctcctcttccgcgggagagatgatagaggccccatctcaagtcctgaactttgaagaaatcgactacaaagaaatcgaagtggaggaggtggtcggaaggggcgcttttggggtagtatgcaaagcaaagtggcgcgctaaggacgtggcgattaaacagatcgagtccgagtccgaacgtaaggccttcattgttgaacttcgccagctcagcagagttaaccaccccaacattgtcaaactctacggcgcttgtctgaacccggtctgcctggtgatggaatacgctgaagggggaagcctgtataatgtgctacacggggctgagcctctgccatattacactgcagcgcacgccatgtcatggtgcctacagtgcagccagggtgtcgcttacctacattccatgcagccaaaagccctgatccacagagacctcaagccgcctaacttgttactggtggctggcggaacagtgttaaagatttgtgatttcggcaccgcttgcgatatccaaactcatatgacaaataataagggctccgcggcttggatggctccagaggtgtttgaaggatctaattactccgagaagtgtgatgtcttctcatggggcataatactgtgggaggtgatcacccgccgtaaaccttttgatgagattggcggtcctgcctttagaataatgtgggccgtccataatggaacacggccacccctgataaaaaacctgcctaagccaatcgagtcattaatgacacggtgctggtcaaaggacccttctcagcggccttcaatggaggaaatagtaaagattatgacacacttgatgaggtatttccctggagccgatgaacctctccagtatccgtgtcaatacagcgatgaagggcaaagtaactcagccacttctaccggctccttcatggacattgcctccacaaacaccagcaataagtctgatactaatatggagcaggtcccggcaaccaacgatacaatcaagagactggagtctaagctgttgaagaaccaggccaagcagcagtcagagagcggccgactgagcttaggcgcttctagagggtcatccgtcgaatccttgcccccaacgtcagaaggcaagcgcatgagtgccgacatgtctgaaatcgaagcgagaattgcagctactactgcatactccaaaccaaaacggggacataggaaaacagcctcctttgggaacattctggatgtcccagagattgttatttctggaaatggtcagccaagacgcagaagcatccaggatttgacagtgaccggcacagagcccggacaggtgagttctcgttcgagcagcccgtcagtccggatgataaccacaagcgggcctacgtctgagaagcccacccgcagccatccctggacccctgatgacagtaccgataccaacgggagcgataattcaatcccaatggcctacttgaccttggaccaccaattgcagccactggccccttgtcctaattccaaggagagcatggccgtcttcgagcagcactgtaagatggcacaggaatatatgaaggttcagactgaaatcgcactacttctccagcgcaaacaggagctggtggccgagctggaccaggatgagaaagaccagcagaatacctcccgcctggtccaagaacacaagaaactgttggacgagaataagtctctatccacatattaccaacagtgcaagaagcagctcgaggtgattcggagtcaacaacaaaaacggcaaggaacctcctag

SEQ ID NO: 241170 - DNA, 1821 bp, Artificial Sequence
  derived and/or modified sequence
atgagcaccgccagcgccgccagcagcagcagcagcagcagcgccggcgagatgatcgaggcccccagccaggtgctgaacttcgaggagatcgactacaaggagatcgaggtggaggaggtggtgggcagaggcgccttcggcgtggtgtgcaaggccaagtggagagccaaggacgtggccatcaagcagatcgagagcgagagcgagagaaaggccttcatcgtggagctgagacagctgagcagagtgaaccaccccaacatcgtgaagctgtacggcgcctgcctgaaccccgtgtgcctggtgatggagtacgccgagggcggcagcctgtacaacgtgctgcacggcgccgagcccctgccctactacaccgccgcccacgccatgagctggtgcctgcagtgcagccagggcgtggcctacctgcacagcatgcagcccaaggccctgatccacagagacctgaagccccccaacctgctgctggtggccggcggcaccgtgctgaagatctgcgacttcggcaccgcctgcgacatccagacccacatgaccaacaacaagggcagcgccgcctggatggcccccgaggtgttcgagggcagcaactacagcgagaagtgcgacgtgttcagctggggcatcatcctgtgggaggtgatcaccagaagaaagcccttcgacgagatcggcggccccgccttcagaatcatgtgggccgtgcacaacggcaccagaccccccctgatcaagaacctgcccaagcccatcgagagcctgatgaccagatgctggagcaaggaccccagccagagacccagcatggaggagatcgtgaagatcatgacccacctgatgagatacttccccggcgccgacgagcccctgcagtacccctgccagtacagcgacgagggccagagcaacagcgccaccagcaccggcagcttcatggacatcgccagcaccaacaccagcaacaagagcgacaccaacatggagcaggtgcccgccaccaacgacaccatcaagagactggagagcaagctgctgaagaaccaggccaagcagcagagcgagagcggcagactgagcctgggcgccagcagaggcagcagcgtggagagcctgccccccaccagcgagggcaagagaatgagcgccgacatgagcgagatcgaggccagaatcgccgccaccaccgcctacagcaagcccaagagaggccacagaaagaccgccagcttcggcaacatcctggacgtgcccgagatcgtgatcagcggcaacggccagcccagaagaagaagcatccaggacctgaccgtgaccggcaccgagcccggccaggtgagcagcagaagcagcagccccagcgtgagaatgatcaccaccagcggccccaccagcgagaagcccaccagaagccacccctggacccccgacgacagcaccgacaccaacggcagcgacaacagcatccccatggcctacctgaccctggaccaccagctgcagcccctggccccctgccccaacagcaaggagagcatggccgtgttcgagcagcactgcaagatggcccaggagtacatgaaggtgcagaccgagatcgccctgctgctgcagagaaagcaggagctggtggccgagctggaccaggacgagaaggaccagcagaacaccagcagactggtgcaggagcacaagaagctgctggacgagaacaagagcctgagcacctactaccagcagtgcaagaagcagctggaggtgatcagaagccagcagcagaagagacagggcaccagctag

SEQ ID NO: 241171 - protein, 518 aa, Artificial Sequence
  derived and/or modified sequence
MSTASAASSSSSSSAGEMIEAPSQVLNFEEIDYKEIEVEEVVGRGAFGVVCKAKWRAKDVAIKQIESESERKAFIVELRQLSRVNHPNIVKLYGACLNPVCLVMEYAEGGSLYNVLHGAEPLPYYTAAHAMSWCLQCSQGVAYLHSMQPKALIHRDLKPPNLLLVAGGTVLKICDFGTACDIQTHMTNNKGSAAWMAPEVFEGSNYSEKCDVFSWGIILWEVITRRKPFDEIGGPAFRIMWAVHNGTRPPLIKNLPKPIESLMTRCWSKDPSQRPSMEEIVKIMTHLMRYFPGADEPLQYPCQYSDEGQSNSATSTGSFMDIASTNTSNKSDTNMEQVPATNDTIKRLESKLLKNQAKQQSESGRLSLGASRGSSVESLPPTSEGKRMSADMSEIEARIAATTAYSKPKRGHRKTASFGNILDVPEIVISGNGQPRRRSIQDLTVTGTEPGQVSSRSSSPSVRMITTSGPTSEKPTRSHPWTPDDSTDTNGSDNSIPMAYLTLDHQLQARTSCRTGPG

SEQ ID NO: 241172 - DNA, 1557 bp, Artificial Sequence
  derived and/or modified sequence
atgagcacagctagtgccgcaagctccagtagttcctcttctgcaggagagatgatcgaagccccgtcacaggtgctgaacttcgaagaaatcgattacaaggaaatcgaggtcgaggaggtcgtggggcgcggggccttcggggtcgtctgcaaagcgaaatggcgagccaaagacgtggccattaagcagatagagtcagaatcagagagaaaggccttcattgtcgaacttcggcagctgtcccgggttaatcatcctaacattgtgaagctctatggggcttgcctgaacccagtctgtttggttatggagtacgccgagggtggatccctctacaatgtgttgcacggggcagagcctctcccttactacacagcggctcatgccatgagctggtgcttgcaatgttctcagggcgttgcatatttgcatagcatgcagcccaaggctctgatccaccgtgatctcaagccacccaacctgctcctggttgcaggaggcaccgtactaaagatctgcgattttggcactgcatgtgatatccagacccatatgacgaataataagggctcagccgcttggatggcccccgaggtttttgagggaagcaattatagcgaaaagtgcgatgtgttctcatgggggatcatcctgtgggaggtaatcacaaggaggaaaccatttgacgaaattggaggacctgctttccgtatcatgtgggctgtgcacaacggcacccgaccaccactgatcaagaacctgcccaaacctatcgaatcactcatgacaaggtgctggtctaaagacccaagccagaggccttcaatggaagagattgtaaagattatgacacacctcatgaggtacttccctggcgcagatgaaccactgcagtatccctgtcagtattctgatgagggccagagtaactctgccacctctactgggtcttttatggatatcgcaagcactaatacaagcaacaagtccgacacaaacatggagcaggtccccgctaccaacgacacaatcaagcggcttgagagcaaattacttaaaaatcaggcgaagcagcaaagcgagtcaggccgcttgtcgctgggggctagtaggggctcgagtgttgagtctcttcctcccacttcagaaggaaagcgcatgagtgctgacatgtcagagattgaagcgcgcatcgctgccaccaccgcctactccaagcccaaaagagggcaccgcaagaccgcctctttcgggaatatcctcgatgtcccagaaatagttatttcagggaacgggcaaccgcggagacgctctattcaggatctaactgtcaccgggacggagcccggccaggtgagctctagatcgagttctccatccgtgaggatgataactacctccgggcctaccagtgagaagccaaccaggtcccacccctggacgcccgatgacagtacagataccaacgggagcgacaactctatacccatggcatacctcactttagatcaccagctgcaggccagaacttcttgcagaacaggacctgggtag

SEQ ID NO: 241173 - DNA, 1557 bp, Artificial Sequence
  derived and/or modified sequence
atgagcacagccagcgctgccagcagcagcagcagcagcagcgctggggagatgattgaggcccccagccaggtgctgaactttgaggagattgactacaaggagattgaggtggaggaggtggtgggccgcggggcctttggagtggtgtgcaaggccaagtggagggccaaggatgtggccatcaagcagattgaaagtgaaagtgagaggaaggccttcatcgtggagctgcggcagctgagccgggtgaaccaccccaacatcgtgaagctgtatggagcctgcctgaaccctgtgtgcctggtgatggagtatgcagagggcggcagcctgtacaacgtgctgcatggagctgagcccctgccctactacacagctgcccacgccatgtcctggtgcctgcagtgcagccagggcgtggcctacctgcacagcatgcagcccaaggccctgatccaccgggacctgaagccacccaacctgctgctggtggccggcggcaccgtgctgaagatctgtgactttggaacagcctgtgacatccagacccacatgaccaacaacaagggcagcgctgcctggatggcccctgaggtgtttgagggcagcaactacagcgagaagtgtgatgtgttctcctggggcatcatcctgtgggaggtgatcaccaggaggaagccctttgatgagatcggcggccctgccttccgcatcatgtgggccgtgcacaacggcaccaggcctcctctcatcaagaacctgcccaagcccatcgagagcctgatgacccgctgctggagcaaggaccccagccagaggcccagcatggaggagatcgtgaagatcatgacccacctgatgagatacttccctggagcagatgagcccctgcagtacccctgccagtacagtgatgagggccagagcaacagcgccaccagcacaggcagcttcatggacatcgccagcaccaacaccagcaacaagagtgacaccaacatggagcaggtgcctgccaccaatgacaccatcaagaggctggagagcaagctgctgaagaaccaggccaagcagcagagcgagagcggccgcctgagcctgggcgccagccggggcagctctgtggagagcctgccccccaccagcgagggcaagaggatgtctgctgacatgtctgaaattgaggccagaattgctgccaccacagcctacagcaagcccaagaggggccacaggaagacagccagctttggaaacatcctggatgtgcctgagatcgtcatctctggaaatggccagcccaggagaagaagcatccaggacctgactgtgactggaacagagcccggccaggtgagcagccgcagcagcagccccagcgtgaggatgatcaccaccagcggccccaccagcgagaagcccaccaggagccacccctggaccccagatgacagcacagacaccaacggcagtgacaacagcatccccatggcctacctgaccctggaccaccagctgcaggcccggaccagctgcaggactggacctggatag

SEQ ID NO: 241174 - DNA, 4633 bp, Artificial Sequence
  derived and/or modified sequence
atgtctacagcctctgccgcctcctcctcctcctcgtcttcggccggtgagatgatcgaagccccttcccaggtcctcaactttgaagagatcgactacaaggagatcgaggtggaagaggttgttggaagaggagcctttggagttgtttgcaaagctaagtggagagcaaaagatgttgctattaaacaaatagaaagtgaatctgagaggaaagcgtttattgtagagcttcggcagttatcccgtgtgaaccatcctaatattgtaaagctttatggagcctgcttgaatccagtgtgtcttgtgatggaatatgctgaagggggctctttatataatgtgctgcatggtgctgaaccattgccatattatactgctgcccacgcaatgagttggtgtttacagtgttcccaaggagtggcttatcttcacagcatgcaacccaaagcgctaattcacagggacctgaaaccaccaaacttactgctggttgcaggggggacagttctaaaaatttgtgattttggtacagcctgtgacattcagacacacatgaccaataacaaggggagtgctgcttggatggcacctgaagtttttgaaggtagtaattacagtgaaaaatgtgacgtcttcagctggggtattattctttgggaagtgataacgcgtcggaaaccctttgatgagattggtggcccagctttccgaatcatgtgggctgttcataatggtactcgaccaccactgataaaaaatttacctaagcccattgagagcctgatgactcgttgttggtctaaagatccttcccagcgcccttcaatggaggaaattgtgaaaataatgactcacttgatgcggtactttccaggagcagatgagccattacagtatccttgtcagtattcagatgaaggacagagcaactctgccaccagtacaggctcattcatggacattgcttctacaaatacgagtaacaaaagtgacactaatatggagcaagttcctgccacaaatgatactattaagcgcttagaatcaaaattgttgaaaaatcaggcaaagcaacagagtgaatctggacgtttaagcttgggagcctcccgtgggagcagtgtggagagcttgcccccaacctctgagggcaagaggatgagtgctgacatgtctgaaatagaagctaggatcgccgcaaccacagcctattccaagcctaaacggggccaccgtaaaactgcttcatttggcaacattctggatgtccctgagatcgtcatatcaggcaacggacagccaagacgtagatccatccaagacttgactgtaactggaacagaacctggtcaggtgagcagtaggtcatccagtcccagtgtcagaatgattactacctcaggaccaacctcagaaaagccaactcgaagtcatccatggacccctgatgattccacagataccaatggatcagataactccatcccaatggcttatcttacactggatcaccaactacaggcaagaactagttgcagaactggaccaggatgaaaaggaccagcaaaatacatctcgcctggtacaggaacataaaaagcttttagatgaaaacaaaagcctttctacttactaccagcaatgcaaaaaacaactagaggtcatcagaagtcagcagcagaaacgacaaggcacttcatgattctctgggaccgttacattttgaaatatgcaaagaaagactttttttttaaggaaaggaaaaccttataatgacgattcatgagtgttagctttttggcgtgttctgaatgccaactgcctatatttgctgcatttttttcattgtttattttccttttctcatggtggacatacaattttactgtttcattgcataacatggtagcatctgtgacttgaatgagcagcactttgcaacttcaaaacagatgcagtgaactgtggctgtatatgcatgctcattgtgtgaaggctagcctaacagaacaggaggtatcaaactagctgctatgtgcaaacagcgtccattttttcatattagaggtggaacctcaagaatgactttattcttgtatctcatctcaaaatattaataatttttttcccaaaagatggtatataccaagttaaagacagggtattataaatttagagtgattggtggtatattacggaaatacggaacctttagggatagttccgtgtaagggctttgatgccagcatccttggatcagtactgaactcagttccatccgtaaaatatgtaaaggtaagtggcagctgctctatttaatgaaagcagttttaccggattttgttagactaaaatttgattgtgatacattgaacaaaatggaactcatttttttttaaggagtaaagatttttaattctgtgattgtgtgtatgtgtgttgaaactgtaaagcttttatgactctaatattaatctcttaaatgaaattaaaaggcaaaagaacatgattgagcttaaatgatcatttcttcctgcagtgattcttggattgttttctcatgtatttgaaaaaaaaaaaatgaagaaaaataatggaaaatggaagtaattactccagctaaaaaaagcttggacttagatttctttttatgataccaaatgagaaataaaccaggcaaatcagaaggaagttaaagaagcaaatataaattcaacaagtgtcctaattatcctggatattggaatatttgattttccttacaatcccgttctagaatgcctgccgcctttcaacactttcaagagaatttcaacacttacagagtatttatattgttaacagtaattttgctaccaaaaccttcagaataactttaataataaaatgacactgaaataatagactatacaaactctatattttttcagttggtgttaaaataagtcacattttgataccagtacaagatgtcttttaaataaggatgtcatcagtctgatttttatagcattaatgttttatgaagaaaaagttcaaaatgaaagcattaattgctgtgattattagaattctatcatgactgtattgtagtttttgctctatttcagataagcaagatctaagaagttatcaaaactattctttaaaatgctaaagcaggtaactttttcttccattattttttcctcctaccactgagttttgtaatgaattccttgtgtatacaagcaatacaggtgaatactaaactgttatttttagcttcttcaaaagctattttagaaagcttcctggaaataaatgtcttctgtcatttaatttaaataaaaggagtgttaattgttcccaaatttgattacctagctgaaacagatattggattcagcatagtaatagtaaaataaaattggcagagaaaataactgtagactaggataaagcatgactcctccatagcattgttgcttgtatgtacatctgtcactccactgaaagggacctagtcactttaaagaggccttttatctcagcacgagatatccaagcgtgaatgctaaggcttgatgtttccattaggatttagcattcgagatttcagattttatttatagtcattgatgtgttttgctgtattataacacatttaagggaaattttattatggtttttacatgtagtcatttcataaaaatatccagataggtaaatggaagaaaatagtagattttagtcatggtaccaaatgcaagaggctgttgaacagttgcttgtttgtttacagtaagttccttgagattttcagtactgtagttgccctggacattgagtacagttcagccttactctgtttttaagtagttgtgttgtcaatttcatgcttttaagtcctgatgatccttggagatgggagaaaaagataccagggataattaaaatccacagccagtttcatcagtttcctcatccatcctgcaaataaaaatgttaacaaggagccaaacttattcgttctggttttacaatttattttgaccgttttttgggtgaaaattgcaaacagccaagcaagtggctggaatgccccagtctaagaaattcaaaaacaatcactgagtaagccctaattacattaattacattttactcttgactccaggaaaagaaagcaagcttttatctaatctagagggaagtattcgtgagcaataaaaatcacttttttgagttgaataataatcagttaagaatatttaccgcatagcaacacaacatataaagatttgttacaagttgtttacggatgtttgactatttttgctgaagtattttagagtattgaatgtcttctctcttcaagtttctttcatgttcctaatttcagctcctgtagccagagatcacaggtcttccctgtgaaactttggtttctttctataaatgtgtgtggttttcagcgctcaactcctgtcttcaaatggtagtaagttctacttctacttctgtcattcagaacattttatgtcaaatgatgtaatgcagaaattcttgtgcatatttgtaactgaaggaagctttttagatttatttttgtttttaataaaattcagattcctattctaaactggta

SEQ ID NO: 241175 - DNA, 1557 bp, Artificial Sequence
  derived and/or modified sequence
atgagcaccgccagcgccgccagcagcagcagcagcagcagcgccggggaaatgattgaagctccgagccaggtgttgaattttgaagagattgactataaggaaattgaagttgaagaagtggtgggaagaggcgcgtttggagtcgtctgcaaggccaaatggagggcaaaagacgtcgctatcaaacagatagaatccgaaagcgagagaaaggctttcatcgtggaactgcggcaactgtcccgggtaaatcaccccaacattgtaaagctgtacggggcttgcttgaaccctgtatgcctggttatggagtacgcagaaggaggcagcctgtacaatgtgctgcacggggcagaacctttaccctactataccgcagcccacgcgatgtcatggtgcctgcagtgttcccaaggtgttgcttacctgcactccatgcagccaaaggcccttatacacagagaccttaaacctcccaacttactcctggtggcgggcggcactgtgctgaagatttgcgactttggcaccgcatgtgacattcagacccacatgacaaataacaaggggtcagccgcgtggatggcacccgaggttttcgagggatctaattactccgaaaagtgtgatgtgttttcatgggggatcatactctgggaggtcattacccgaagaaaaccattcgacgagatcgggggcccagcattccgtatcatgtgggcagtgcataacggcaccagaccccccctgataaaaaatctgccaaaaccgattgaatctctgatgactcgttgttggagcaaggacccaagccaacgcccttccatggaggagatcgtgaaaattatgacgcacttgatgcgctacttccccggtgccgacgaaccactgcagtacccatgtcaatattcagacgaggggcagagcaactcagctacttccactggtagcttcatggatatcgcttctactaacacgtccaacaagagtgatactaacatggagcaggtgcccgctactaacgacacaatcaaacgcctggaaagtaaactgttgaagaaccaggccaaacagcagagcgaatctgggcggctcagtttaggagccagtcggggatcgtctgtggagagtctccccccgacttctgagggcaagaggatgagtgcagacatgagtgaaattgaagcacgtatcgccgcaactacagcatatagcaagccaaaacggggacaccggaagaccgcctccttcggcaacattctcgatgtccctgagattgtgattagtggtaacggacaacccagaagaagatccattcaggatttaaccgtgactggtacggagcctggccaggtgtcctctcggagctcatccccgtcagtgcggatgatcaccacatcaggacctactagcgaaaagccaactcgttctcatccttggacgccagacgacagcaccgatactaatggctctgacaacagcatcccaatggcttatctgactcttgatcatcagctccaggcacgcactagttgccggactggccctgggtag

SEQ ID NO: 241176 - DNA, 1557 bp, Artificial Sequence
  derived and/or modified sequence
atgtcaaccgcctccgccgcatcatcgagctcaagctcctcagccggagaaatgatcgaagccccttctcaggtattgaactttgaagagatcgactataaggagattgaggttgaggaggtagtaggcagaggagctttcggagtggtgtgcaaagcaaaatggagggccaaagatgttgcaataaaacaaatagagtctgaaagcgagcgcaaagcttttattgttgaactccgccagttaagtcgagttaaccaccctaacatcgtgaagctctacggtgcttgtctcaatcccgtttgtctcgtgatggagtacgccgaaggaggcagcttgtataacgtgctgcatggtgctgagccacttccttattacactgctgctcacgcaatgagctggtgcttgcagtgctcccagggcgtggcatatctgcattccatgcagcccaaggccctgattcaccgcgatctgaaacctcctaaccttctgctggttgcaggaggcaccgttctaaagatatgcgattttgggactgcgtgcgatattcagacccacatgactaacaataaggggtctgctgcatggatggcaccagaggtttttgagggctcaaactacagcgagaaatgtgacgtcttcagctggggtattatcctgtgggaagttattacaagaaggaagccctttgacgagattgggggacccgctttccgaatcatgtgggcagtgcacaacggaacacgccctccgctcatcaaaaacctgcctaaacccattgaatcacttatgacacgatgttggtccaaagacccaagtcagagaccaagtatggaggagatcgttaagatcatgacccacctgatgagatactttccaggcgcagatgagccactgcaatatccatgccagtactcagacgagggccagagtaactcggctaccagtactggcagcttcatggacattgcctctaccaatacatccaacaagtcagatacaaatatggaacaggtgcctgcgactaatgataccatcaagcgcctggagtcgaaactactgaaaaaccaggcaaaacaacagagcgagtcaggccgattatccctaggggctagtcgcggatcaagtgtcgagtcattgcctccaactagcgaaggaaagcgcatgagtgcagatatgtctgaaatcgaagctcgcatcgctgccactaccgcttacagcaagcccaaaaggggacacaggaagacagctagctttgggaatattcttgacgttcctgagatcgttatcagtggtaacgggcagcctcgccgtagaagtattcaggaccttactgtgacgggcacagaacctgggcaggtctctagcagatcttcctctcccagcgtgcgtatgatcacaacttctggtccaacctcagaaaaacccacacgctcccatccatggacccctgatgatagcactgatacaaacggatcagacaattctatccctatggcctatttaactctggatcatcagctgcaggctagaacctcatgtagaaccggccctgggtag

SEQ ID NO: 241177 - DNA, 1557 bp, Artificial Sequence
  derived and/or modified sequence
atgagcaccgccagcgccgccagcagcagcagcagcagcagcgccggcgagatgatcgaggcccccagccaggtgctgaacttcgaggagatcgactacaaggagatcgaggtggaggaggtggtgggcagaggcgccttcggcgtggtgtgcaaggccaagtggagagccaaggacgtggccatcaagcagatcgagagcgagagcgagagaaaggccttcatcgtggagctgagacagctgagcagagtgaaccaccccaacatcgtgaagctgtacggcgcctgcctgaaccccgtgtgcctggtgatggagtacgccgagggcggcagcctgtacaacgtgctgcacggcgccgagcccctgccctactacaccgccgcccacgccatgagctggtgcctgcagtgcagccagggcgtggcctacctgcacagcatgcagcccaaggccctgatccacagagacctgaagccccccaacctgctgctggtggccggcggcaccgtgctgaagatctgcgacttcggcaccgcctgcgacatccagacccacatgaccaacaacaagggcagcgccgcctggatggcccccgaggtgttcgagggcagcaactacagcgagaagtgcgacgtgttcagctggggcatcatcctgtgggaggtgatcaccagaagaaagcccttcgacgagatcggcggccccgccttcagaatcatgtgggccgtgcacaacggcaccagaccccccctgatcaagaacctgcccaagcccatcgagagcctgatgaccagatgctggagcaaggaccccagccagagacccagcatggaggagatcgtgaagatcatgacccacctgatgagatacttccccggcgccgacgagcccctgcagtacccctgccagtacagcgacgagggccagagcaacagcgccaccagcaccggcagcttcatggacatcgccagcaccaacaccagcaacaagagcgacaccaacatggagcaggtgcccgccaccaacgacaccatcaagagactggagagcaagctgctgaagaaccaggccaagcagcagagcgagagcggcagactgagcctgggcgccagcagaggcagcagcgtggagagcctgccccccaccagcgagggcaagagaatgagcgccgacatgagcgagatcgaggccagaatcgccgccaccaccgcctacagcaagcccaagagaggccacagaaagaccgccagcttcggcaacatcctggacgtgcccgagatcgtgatcagcggcaacggccagcccagaagaagaagcatccaggacctgaccgtgaccggcaccgagcccggccaggtgagcagcagaagcagcagccccagcgtgagaatgatcaccaccagcggccccaccagcgagaagcccaccagaagccacccctggacccccgacgacagcaccgacaccaacggcagcgacaacagcatccccatggcctacctgaccctggaccaccagctgcaggccagaaccagctgcagaaccggccccggctag

SEQ ID NO: 241178 - protein, 491 aa, Artificial Sequence
  derived and/or modified sequence
MSTASAASSSSSSSAGEMIEAPSQVLNFEEIDYKEIEVEEVVGRGAFGVVCKAKWRAKDVAIKQIESESERKAFIVELRQLSRVNHPNIVKLYGACLNPVCLVMEYAEGGSLYNVLHGAEPLPYYTAAHAMSWCLQCSQGVAYLHSMQPKALIHRDLKPPNLLLVAGGTVLKICDFGTACDIQTHMTNNKGSAAWMAPEVFEGSNYSEKCDVFSWGIILWEVITRRKPFDEIGGPAFRIMWAVHNGTRPPLIKNLPKPIESLMTRCWSKDPSQRPSMEEIVKIMTHLMRYFPGADEPLQYPCQYSDEGQSNSATSTGSFMDIASTNTSNKSDTNMEQVPATNDTIKRLESKLLKNQAKQQSESGRLSLGASRGSSVESLPPTSEGKRMSADMSEIEARIAATTGNGQPRRRSIQDLTVTGTEPGQVSSRSSSPSVRMITTSGPTSEKPTRSHPWTPDDSTDTNGSDNSIPMAYLTLDHQLQARTSCRTGPG

SEQ ID NO: 241179 - protein, 418 aa, Artificial Sequence
  derived and/or modified sequence
MSTASAASSSSSSSAGEMIEAPSQVLNFEEIDYKEIEVEEVVGRGAFGVVCKAKWRAKDVAIKQIESESERKAFIVELRQLSRVNHPNLLLVAGGTVLKICDFGTACDIQTHMTNNKGSAAWMAPEVFEGSNYSEKCDVFSWGIILWEVITRRKPFDEIGGPAFRIMWAVHNGTRPPLIKNLPKPIESLMTRCWSKDPSQRPSMEEIVKIMTHLMRYFPGADEPLQYPCQYSDEGQSNSATSTGSFMDIASTNTSNKSDTNMEQVPATNDTIKRLESKLLKNQAKQQSESGRLSLGASRGSSVESLPPTSEGKRMSADMSEIEARIAATTGNGQPRRRSIQDLTVTGTEPGQVSSRSSSPSVRMITTSGPTSEKPTRSHPWTPDDSTDTNGSDNSIPMAYLTLDHQLQARTSCRTGPG

SEQ ID NO: 241180 - DNA, 1476 bp, Artificial Sequence
  derived and/or modified sequence
atgtctactgcaagcgccgcctcctctagctcatcatcctctgctggcgaaatgattgaggcgccaagccaagttctgaactttgaagagattgactacaaggaaattgaggtcgaagaggtggtcgggcggggcgcattcggcgtagtttgcaaggccaagtggcgggccaaagatgtggcaattaagcagattgaaagcgagagtgagcgaaaggccttcatcgtggaactgagacaattatcccgcgtcaaccacccaaatattgtcaagctgtatggggcctgcctaaatcccgtgtgcttggtgatggaatatgctgaaggaggcagcttatacaacgtgctgcatggagctgagccactcccatattacactgctgcccacgccatgtcttggtgcctccagtgctcccaaggcgtggcctatctgcatagcatgcagccaaaggctttaattcatcgggacttgaaacccccaaaccttctgctggtggcaggggggacagtgttgaagatttgcgattttggaacagcctgtgatattcaaactcacatgaccaataacaagggttccgcagcttggatggcccccgaagttttcgaaggttctaactactccgaaaaatgcgacgttttcagttggggaatcattctctgggaagttattacccgaaggaaaccctttgacgagataggggggcccgcctttcgtattatgtgggcagttcataacggaacccgcccccccctcatcaagaatctcccgaaacccatcgagtccctgatgaccaggtgctggtctaaagatccttcccagaggccttctatggaggagattgtcaagattatgacacacctgatgcggtactttccgggcgctgacgaacctctgcaatatccatgccagtacagtgacgaaggccagtctaacagcgccacttcaacaggctctttcatggatattgctagcacaaacacatcaaacaaatctgacaccaatatggaacaagttcctgcaacaaacgacactatcaaacgcctagagtctaagctcctgaaaaaccaggctaaacagcaatccgagtcgggccggctatccctgggagccagcagggggagttccgtggaatcactccctccgacatcagagggaaagaggatgtctgctgacatgtcagaaatcgaagcccgtatcgcagccaccaccggcaatggtcagcccagacgtcgatcaatacaagacctaacagtgacagggaccgagcctgggcaggtgagttcccgcagctcctccccttcagttaggatgatcaccacatcaggtccgacctcagagaaacccacccggtctcacccgtggacgcctgacgacagtaccgacacaaatggctccgacaactccattccaatggcctatctgactctcgatcatcaattgcaggcccgcacctcctgtcgaacggggcctgggtag

SEQ ID NO: 241181 - DNA, 1257 bp, Artificial Sequence
  derived and/or modified sequence
atgtccaccgcatctgctgcctcatcatccagctccagctctgctggagagatgatcgaggccccatcccaagtactgaactttgaggagattgattataaggagatcgaggttgaggaagtcgtgggccgaggagcttttggggtggtatgcaaggctaagtggagggctaaggatgttgcaatcaagcaaatagaatcggagtcagaacggaaagccttcatcgtcgagctcaggcagctcagtagagtgaatcatcccaacctgcttctggttgcaggcggcactgttttgaaaatctgcgacttcggtacagcgtgtgatatacagacgcacatgacaaataataagggcagtgcagcatggatggccccagaggtgttcgaaggatccaattacagcgaaaaatgtgacgttttttcatggggtattatactctgggaggtgattactagacgaaaaccattcgatgaaataggtggtcctgcatttcggatcatgtgggccgttcataatggcactaggcctcctctgatcaagaacctcccgaaaccgattgagtccctaatgacccggtgttggagcaaagacccgtcacagcgcccttccatggaggaaatagttaagataatgacccacctcatgcgttacttcccgggggctgatgaacctctacagtacccctgtcagtactcggacgaggggcagagcaactcagccactagtaccggatcgtttatggacattgcatccacaaatacttcaaacaaaagcgatacaaacatggagcaggtccctgctaccaatgataccattaaacgattggagagcaaactgcttaagaatcaagctaaacagcaaagtgaatccggcagactgtccctcggcgcctcaagggggagttccgtggaatcacttccccccacttctgagggaaaaaggatgagcgcggatatgtcagagatcgaggcccggatcgctgccaccaccgggaatggacagccccgccgacgctccattcaagaccttaccgttactggcacggaaccaggccaagtctcatcgaggtccagctcaccgtccgtgcgtatgatcaccactagcggtcccacctctgagaagcccacgaggtcccacccttggacgcctgatgacagtactgatacaaatggcagcgacaactcaattccaatggcctacctgaccctggaccaccagctgcaagccaggacttcgtgtcgaactggaccaggatag

SEQ ID NO: 241182 - DNA, 1476 bp, Artificial Sequence
  derived and/or modified sequence
atgagcacagccagcgctgccagcagcagcagcagcagcagcgctggggagatgattgaggcccccagccaggtgctgaactttgaggagattgactacaaggagattgaggtggaggaggtggtgggccgcggggcctttggagtggtgtgcaaggccaagtggagggccaaggatgtggccatcaagcagattgaaagtgaaagtgagaggaaggccttcatcgtggagctgcggcagctgagccgggtgaaccaccccaacatcgtgaagctgtatggagcctgcctgaaccctgtgtgcctggtgatggagtatgcagagggcggcagcctgtacaacgtgctgcatggagctgagcccctgccctactacacagctgcccacgccatgtcctggtgcctgcagtgcagccagggcgtggcctacctgcacagcatgcagcccaaggccctgatccaccgggacctgaagccacccaacctgctgctggtggccggcggcaccgtgctgaagatctgtgactttggaacagcctgtgacatccagacccacatgaccaacaacaagggcagcgctgcctggatggcccctgaggtgtttgagggcagcaactacagcgagaagtgtgatgtgttctcctggggcatcatcctgtgggaggtgatcaccaggaggaagccctttgatgagatcggcggccctgccttccgcatcatgtgggccgtgcacaacggcaccaggcctcctctcatcaagaacctgcccaagcccatcgagagcctgatgacccgctgctggagcaaggaccccagccagaggcccagcatggaggagatcgtgaagatcatgacccacctgatgagatacttccctggagcagatgagcccctgcagtacccctgccagtacagtgatgagggccagagcaacagcgccaccagcacaggcagcttcatggacatcgccagcaccaacaccagcaacaagagtgacaccaacatggagcaggtgcctgccaccaatgacaccatcaagaggctggagagcaagctgctgaagaaccaggccaagcagcagagcgagagcggccgcctgagcctgggcgccagccggggcagctctgtggagagcctgccccccaccagcgagggcaagaggatgtctgctgacatgtctgaaattgaggccagaattgctgccaccactggaaatggccagccccggcggcgcagcatccaggacctgactgtgactggaacagagcccggccaggtgagcagccgcagcagcagccccagcgtgaggatgatcaccaccagcggccccaccagcgagaagcccaccaggagccacccctggaccccagatgacagcacagacaccaatggaagtgacaacagcatccccatggcctacctgaccctggaccaccagctgcaggcccggaccagctgcaggacaggccctggatag

SEQ ID NO: 241183 - DNA, 1257 bp, Artificial Sequence
  derived and/or modified sequence
atgagcacagccagcgctgccagcagcagcagcagcagcagcgctggggagatgattgaggcccccagccaggtgctgaactttgaggagattgactacaaggagattgaggtggaggaggtggtgggccgcggggcctttggagtggtgtgcaaggccaagtggagggccaaggatgtggccatcaagcagattgaaagtgaaagtgagaggaaggccttcatcgtggagctgcggcagctgagccgggtgaaccaccccaacctgctgctggtggccggcggcaccgtgctgaagatctgtgactttggaacagcctgtgacatccagacccacatgaccaacaacaagggcagcgctgcctggatggcccctgaggtgtttgagggcagcaactacagcgagaagtgtgatgtgttctcctggggcatcatcctgtgggaggtgatcaccaggaggaagccctttgatgaaattggaggccctgccttccgcatcatgtgggccgtgcacaacggcacccggcccccactcatcaagaacctgcccaagcccatcgagagcctgatgacccgctgctggagcaaggaccccagccagaggcccagcatggaggagatcgtgaagatcatgacccacctgatgagatacttccctggagcagatgagcccctgcagtacccctgccagtacagtgatgagggccagagcaacagcgccaccagcacaggcagcttcatggacatcgccagcaccaacaccagcaacaagagtgacaccaacatggagcaggtgcctgccaccaatgacaccatcaagaggctggagagcaagctgctgaagaaccaggccaagcagcagagcgagagcggccgcctgagcctgggcgccagccggggcagctctgtggagagcctgccccccaccagcgagggcaagaggatgtctgctgacatgtctgaaattgaggccagaattgctgccaccactggaaatggccagcccaggagaagaagcatccaggacctgactgtgactggaacagagcccggccaggtgagcagccgcagcagcagccccagcgtgaggatgatcaccaccagcggccccaccagcgagaagcccaccaggagccacccctggaccccagatgacagcacagacaccaacggcagtgacaacagcatccccatggcctacctgaccctggaccaccagctgcaggcccggaccagctgcaggactggacctggatag

SEQ ID NO: 241184 - DNA, 4558 bp, Artificial Sequence
  derived and/or modified sequence
gggatcatgtctacagcctctgccgcctcctcctcctcctcgtcttcggccggtgagatgatcgaagccccttcccaggtcctcaactttgaagagatcgactacaaggagatcgaggtggaagaggttgttggaagaggagcctttggagttgtttgcaaagctaagtggagagcaaaagatgttgctattaaacaaatagaaagtgaatctgagaggaaagcgtttattgtagagcttcggcagttatcccgtgtgaaccatcctaatattgtaaagctttatggagcctgcttgaatccagtgtgtcttgtgatggaatatgctgaagggggctctttatataatgtgctgcatggtgctgaaccattgccatattatactgctgcccacgcaatgagttggtgtttacagtgttcccaaggagtggcttatcttcacagcatgcaacccaaagcgctaattcacagggacctgaaaccaccaaacttactgctggttgcaggggggacagttctaaaaatttgtgattttggtacagcctgtgacattcagacacacatgaccaataacaaggggagtgctgcttggatggcacctgaagtttttgaaggtagtaattacagtgaaaaatgtgacgtcttcagctggggtattattctttgggaagtgataacgcgtcggaaaccctttgatgagattggtggcccagctttccgaatcatgtgggctgttcataatggtactcgaccaccactgataaaaaatttacctaagcccattgagagcctgatgactcgttgttggtctaaagatccttcccagcgcccttcaatggaggaaattgtgaaaataatgactcacttgatgcggtactttccaggagcagatgagccattacagtatccttgtcagtattcagatgaaggacagagcaactctgccaccagtacaggctcattcatggacattgcttctacaaatacgagtaacaaaagtgacactaatatggagcaagttcctgccacaaatgatactattaagcgcttagaatcaaaattgttgaaaaatcaggcaaagcaacagagtgaatctggacgtttaagcttgggagcctcccgtgggagcagtgtggagagcttgcccccaacctctgagggcaagaggatgagtgctgacatgtctgaaatagaagctaggatcgccgcaaccacaggcaacggacagccaagacgtagatccatccaagacttgactgtaactggaacagaacctggtcaggtgagcagtaggtcatccagtcccagtgtcagaatgattactacctcaggaccaacctcagaaaagccaactcgaagtcatccatggacccctgatgattccacagataccaatggatcagataactccatcccaatggcttatcttacactggatcaccaactacaggcaagaactagttgcagaactggaccaggatgaaaaggaccagcaaaatacatctcgcctggtacaggaacataaaaagcttttagatgaaaacaaaagcctttctacttactaccagcaatgcaaaaaacaactagaggtcatcagaagtcagcagcagaaacgacaaggcacttcatgattctctgggaccgttacattttgaaatatgcaaagaaagactttttttttaaggaaaggaaaaccttataatgacgattcatgagtgttagctttttggcgtgttctgaatgccaactgcctatatttgctgcatttttttcattgtttattttccttttctcatggtggacatacaattttactgtttcattgcataacatggtagcatctgtgacttgaatgagcagcactttgcaacttcaaaacagatgcagtgaactgtggctgtatatgcatgctcattgtgtgaaggctagcctaacagaacaggaggtatcaaactagctgctatgtgcaaacagcgtccattttttcatattagaggtggaacctcaagaatgactttattcttgtatctcatctcaaaatattaataatttttttcccaaaagatggtatataccaagttaaagacagggtattataaatttagagtgattggtggtatattacggaaatacggaacctttagggatagttccgtgtaagggctttgatgccagcatccttggatcagtactgaactcagttccatccgtaaaatatgtaaaggtaagtggcagctgctctatttaatgaaagcagttttaccggattttgttagactaaaatttgattgtgatacattgaacaaaatggaactcatttttttttaaggagtaaagatttttaattctgtgattgtgtgtatgtgtgttgaaactgtaaagcttttatgactctaatattaatctcttaaatgaaattaaaaggcaaaagaacatgattgagcttaaatgatcatttcttcctgcagtgattcttggattgttttctcatgtatttgaaaaaaaaaaaatgaagaaaaataatggaaaatggaagtaattactccagctaaaaaaagcttggacttagatttctttttatgataccaaatgagaaataaaccaggcaaatcagaaggaagttaaagaagcaaatataaattcaacaagtgtcctaattatcctggatattggaatatttgattttccttacaatcccgttctagaatgcctgccgcctttcaacactttcaagagaatttcaacacttacagagtatttatattgttaacagtaattttgctaccaaaaccttcagaataactttaataataaaatgacactgaaataatagactatacaaactctatattttttcagttggtgttaaaataagtcacattttgataccagtacaagatgtcttttaaataaggatgtcatcagtctgatttttatagcattaatgttttatgaagaaaaagttcaaaatgaaagcattaattgctgtgattattagaattctatcatgactgtattgtagtttttgctctatttcagataagcaagatctaagaagttatcaaaactattctttaaaatgctaaagcaggtaactttttcttccattattttttcctcctaccactgagttttgtaatgaattccttgtgtatacaagcaatacaggtgaatactaaactgttatttttagcttcttcaaaagctattttagaaagcttcctggaaataaatgtcttctgtcatttaatttaaataaaaggagtgttaattgttcccaaatttgattacctagctgaaacagatattggattcagcatagtaatagtaaaataaaattggcagagaaaataactgtagactaggataaagcatgactcctccatagcattgttgcttgtatgtacatctgtcactccactgaaagggacctagtcactttaaagaggccttttatctcagcacgagatatccaagcgtgaatgctaaggcttgatgtttccattaggatttagcattcgagatttcagattttatttatagtcattgatgtgttttgctgtattataacacatttaagggaaattttattatggtttttacatgtagtcatttcataaaaatatccagataggtaaatggaagaaaatagtagattttagtcatggtaccaaatgcaagaggctgttgaacagttgcttgtttgtttacagtaagttccttgagattttcagtactgtagttgccctggacattgagtacagttcagccttactctgtttttaagtagttgtgttgtcaatttcatgcttttaagtcctgatgatccttggagatgggagaaaaagataccagggataattaaaatccacagccagtttcatcagtttcctcatccatcctgcaaataaaaatgttaacaaggagccaaacttattcgttctggttttacaatttattttgaccgttttttgggtgaaaattgcaaacagccaagcaagtggctggaatgccccagtctaagaaattcaaaaacaatcactgagtaagccctaattacattaattacattttactcttgactccaggaaaagaaagcaagcttttatctaatctagagggaagtattcgtgagcaataaaaatcacttttttgagttgaataataatcagttaagaatatttaccgcatagcaacacaacatataaagatttgttacaagttgtttacggatgtttgactatttttgctgaagtattttagagtattgaatgtcttctctcttcaagtttctttcatgttcctaatttcagctcctgtagccagagatcacaggtcttccctgtgaaactttggtttctttctataaatgtgtgtggttttcagcgctcaactcctgtcttcaaatggtagtaagttctacttctacttctgtcattcagaacattttatgtcaaatgatgtaatgcagaaattcttgtgcatatttgtaactgaaggaagctttttagatttatttttgtttttaataaaattcagattcctattctaaactggta

SEQ ID NO: 241185 - DNA, 1773 bp, Artificial Sequence
  derived and/or modified sequence
aaaacgcagcggagccagagccggacacggctgtggccgctgcctctacccccgccacggatcgccgggtagtaggactgcgcggctccaggctgagggtcggtccggaggcgggtgggcgcgggtctcacccggattgtccgggtggcaccgttcccggccccaccgggcgccgcgagggatcatgtctacagcctctgccgcctcctcctcctcctcgtcttcggccggtgagatgatcgaagccccttcccaggtcctcaactttgaagagatcgactacaaggagatcgaggtggaagaggttgttggaagaggagcctttggagttgtttgcaaagctaagtggagagcaaaagatgttgctattaaacaaatagaaagtgaatctgagaggaaagcgtttattgtagagcttcggcagttatcccgtgtgaaccatcctaacttactgctggttgcaggggggacagttctaaaaatttgtgattttggtacagcctgtgacattcagacacacatgaccaataacaaggggagtgctgcttggatggcacctgaagtttttgaaggtagtaattacagtgaaaaatgtgacgtcttcagctggggtattattctttgggaagtgataacgcgtcggaaaccctttgatgagattggtggcccagctttccgaatcatgtgggctgttcataatggtactcgaccaccactgataaaaaatttacctaagcccattgagagcctgatgactcgttgttggtctaaagatccttcccagcgcccttcaatggaggaaattgtgaaaataatgactcacttgatgcggtactttccaggagcagatgagccattacagtatccttgtcagtattcagatgaaggacagagcaactctgccaccagtacaggctcattcatggacattgcttctacaaatacgagtaacaaaagtgacactaatatggagcaagttcctgccacaaatgatactattaagcgcttagaatcaaaattgttgaaaaatcaggcaaagcaacagagtgaatctggacgtttaagcttgggagcctcccgtgggagcagtgtggagagcttgcccccaacctctgagggcaagaggatgagtgctgacatgtctgaaatagaagctaggatcgccgcaaccacaggcaacggacagccaagacgtagatccatccaagacttgactgtaactggaacagaacctggtcaggtgagcagtaggtcatccagtcccagtgtcagaatgattactacctcaggaccaacctcagaaaagccaactcgaagtcatccatggacccctgatgattccacagataccaatggatcagataactccatcccaatggcttatcttacactggatcaccaactacaggcaagaactagttgcagaactggaccaggatgaaaaggaccagcaaaatacatctcgcctggtacaggaacataaaaagcttttagatgaaaacaaaagcctttctacttactaccagcaatgcaaaaaacaactagaggtcatcagaagtcagcagcagaaacgacaaggcacttcatgattctctgggaccgttacattttgaaatatgcaaagaaagactttttttttaaggaaaggaaaaccttataatgacgattcatgagtgttagctttttggcgtgttctgaatgccaactgcctatatttgctgcatttttttcattgtttattttccttttctcatggtggacatacaattttac

SEQ ID NO: 241186 - DNA, 1476 bp, Artificial Sequence
  derived and/or modified sequence
atgagcaccgccagcgccgccagcagcagcagcagcagcagcgccggggagatgattgaggctccctcccaggttctgaactttgaagaaatcgactataaggagatcgaggttgaggaagtcgttggaaggggcgcgtttggagtggtgtgcaaggccaaatggagggcaaaggatgttgctattaagcagatcgagagcgagtccgagaggaaggcattcatcgtcgagctgaggcagcttagcagggtgaaccacccaaacatcgtgaagctttacggagcatgtctcaatcccgtatgcctggtcatggaatatgccgagggcggatccctgtacaatgtgctccacggagctgaaccgttgccatactacactgctgcgcacgctatgagttggtgtctgcagtgttcgcagggagtggcctacctgcactccatgcagccaaaggctttgattcacagagacctgaagccgcccaacttgctgctagtggccgggggaactgtgctgaaaatatgcgactttggcacggcctgtgatatccagacccacatgacaaacaataagggttcagcagcgtggatggctccggaagtgtttgagggatcaaactactctgaaaaatgcgatgtgtttagctggggcattatcctatgggaagttattaccaggcgtaaaccctttgatgaaattggcggaccggcttttcgaattatgtgggctgtccacaatggaacccgcccgccgctgatcaaaaaccttcccaaacctatcgaatctctcatgaccaggtgctggtctaaggacccatctcagagaccaagtatggaggagatcgtgaaaatcatgacacatctgatgaggtactttcccggcgctgacgaaccgcttcagtacccatgccagtactcagatgaagggcaatccaacagcgccacctcaacaggatcctttatggatatagccagcaccaatacttctaataaatcagacactaacatggagcaggttccagccacaaatgataccattaaacggttggagtccaagttgctgaagaaccaagcgaagcagcagtctgaaagcggcaggttgtcactaggggccagtagaggatcatctgtagaaagcctgcctccaactagcgaaggcaagagaatgtcagcagatatgagcgagatagaggcccgcatagctgctaccactggcaatggacagcccaggagaaggtccatccaggatctaactgttacaggaacggagccaggtcaggtctccagccggagctcatcccccagtgtaagaatgatcacaaccagcggaccaaccagtgagaagcccactagatcacatccttggaccccagacgattctacagatacaaatgggtcagacaattctattcctatggcatacctcaccttagatcaccaactgcaagcccggacaagctgcagaaccggtcctggctag

SEQ ID NO: 241187 - DNA, 1257 bp, Artificial Sequence
  derived and/or modified sequence
atgagcaccgccagcgccgccagcagcagcagcagcagcagcgccggcgaaatgattgaagccccaagccaggtactgaacttcgaggagattgattacaaggaaatcgaagtcgaggaggtggtcggacggggtgccttcggcgtggtgtgcaaagccaagtggagggcaaaagatgtggccattaagcagatcgaatctgagtccgaacggaaggccttcatcgtcgaactgagacagctgtctagggtcaatcatcccaacctgctgctcgtcgccggcgggacagtgttaaagatttgcgatttcggcactgcatgtgacatacaaacccatatgaccaataacaagggttcagcggcgtggatggctcccgaggtattcgagggttctaactattctgagaagtgtgatgtattcagttggggtatcattctctgggaagtgatcactcgtcggaaacctttcgatgagatcggtggcccagcctttagaatcatgtgggctgtgcacaacggaactcgccccccccttattaaaaacttgccaaagcccatagagtccctgatgacaaggtgctggagtaaagatcctagccagcgaccaagcatggaagaaatcgttaagatcatgactcacctgatgcgatactttccaggcgctgatgaacctctgcagtacccatgccaatattccgatgaaggccagagcaattcagcaacaagcacaggcagcttcatggatattgcttcaaccaatacttccaataagagtgatacgaatatggagcaggtgccggctactaatgacactatcaagcgcctcgagagcaaattgctgaagaatcaagccaaacagcagagcgaatcaggtcgattgtctcttggggcctctcggggaagtagcgttgaaagtctgccgcccacatctgaagggaagagaatgagcgcagacatgagcgaaatcgaggctagaattgctgccacaactggtaacgggcagccacggcgcaggtcaattcaggatcttacagttacaggcaccgagccaggacaggtttcaagtagatcttcatctccctcagtgaggatgataaccacatctggacctacctctgaaaaaccaaccagatcccacccatggacccccgacgacagtacggacaccaacggctccgacaactccattcctatggcctacttaaccctggaccaccagctgcaggccaggactagctgccgaacaggacctgggtag

SEQ ID NO: 241188 - DNA, 1476 bp, Artificial Sequence
  derived and/or modified sequence
atgtcgacggcctcagccgctagtagctcctcgagttcaagcgccggagagatgattgaggctccttcacaggtcctgaattttgaggaaattgattacaaagaaattgaagtggaagaggtcgtggggcgtggggcattcggggtggtgtgtaaggccaaatggagggccaaggacgttgccattaagcaaatcgaatccgagtctgagcgcaaagcgtttatcgttgaacttaggcaactgagtcgggttaatcacccaaacatagtgaaactgtatggcgcatgtctaaatcctgtctgcctcgtcatggagtacgccgagggaggaagtctgtataacgtcctgcatggagcagagccccttccctactataccgctgctcacgctatgagttggtgtcttcaatgtagccagggagtcgcctacctgcatagcatgcaacccaaggctctaattcaccgggacctgaaaccgccaaatctgctgttggttgctggtggcacggtgctcaagatatgtgactttggcactgcatgtgatattcagactcacatgaccaataataagggttcagcagcgtggatggcccctgaagtcttcgagggttccaactactcagaaaagtgcgacgtgttctcttggggaatcattctttgggaggtcattactcgccgaaaaccattcgatgagatagggggtccagcattccgaatcatgtgggctgtccataatggcacgcgcccacctctcatcaagaatctcccaaaaccaatcgagtccctaatgactagatgttggtcgaaagatccttctcaacggccttccatggaggagatcgtgaagataatgacccacctcatgcgctactttcctggggcagacgaaccccttcagtacccctgccagtattccgacgaggggcagagcaacagtgcaacttctaccggttcttttatggacatcgcctctactaatacctccaataaatctgataccaatatggagcaggtgccagccaccaatgatacgataaagaggctggagtctaagctccttaagaaccaagcaaagcagcagtccgaaagcgggcgtctctcactgggcgcttctagggggagctctgtggagtctcttccccctacttccgagggtaagcgaatgtctgctgatatgtcagaaatagaggctagaattgctgccaccacaggcaacggacagcccaggcgcagatctatccaagaccttacggtaacaggcaccgagcctggacaggtaagctctaggtcctcttctccctctgtgagaatgatcactacctccggcccaacgagtgagaaacctacaaggtctcatccctggacccctgatgatagtactgatacaaacggctcagataactcaattcctatggcctacctcacactggatcaccagctgcaggcccgaacctcttgtcgcactggcccaggatag

SEQ ID NO: 241189 - DNA, 1257 bp, Artificial Sequence
  derived and/or modified sequence
atgagcacagcctctgccgcatcttcatctagtagcagtagtgccggtgagatgatagaggccccaagccaggtccttaatttcgaggaaattgactataaagaaattgaagtagaggaagtggtggggagaggcgcatttggcgtggtttgcaaagctaagtggagagctaaagatgtcgccataaagcagatcgagtcagaatcagagcgcaaggcatttattgttgagctgaggcagctgagtcgggttaatcacccaaatctcctgcttgtcgccggtggcacagtgcttaaaatctgtgactttggcaccgcttgtgacatccagacacacatgactaataacaagggctccgctgcttggatggccccagaggtcttcgagggttccaactatagcgagaaatgcgatgtattctcctggggaatcattttatgggaggtgattactcggaggaagcctttcgacgagatcggcggtcccgcattcagaattatgtgggcagtccataacggcacacgaccccctctcataaagaatttgccgaagcctattgagtctctgatgacgcgttgctggtcaaaggaccccagtcaacgcccttccatggaggaaattgtcaaaatcatgacacacttgatgaggtacttcccaggagccgatgaacccctgcagtacccatgccagtatagtgatgaaggacagagcaacagcgcaaccagtaccggatctttcatggacatagctagcaccaacaccagtaataagtccgacacaaatatggagcaggtgcctgccacgaacgataccattaaacggttagagtcaaagctgcttaagaaccaagccaagcagcagtccgagagcggtcgactaagcctaggcgcatcgcgaggaagtagcgtcgaatcattacctcccacgtccgaagggaagcgcatgtctgctgatatgtcggagattgaggccagaatagcagccacaacaggcaacggtcagccacggcgaaggagtatccaagaccttacagtcactgggacagagccgggacaggtctccagccgaagctcatctccctcggtccgcatgatcacaacttctggtccaacatcggagaaaccaaccagatctcacccttggacccccgatgattctactgatacgaacgggagcgacaattccatccccatggcttatctaacacttgatcatcaactgcaggcgagaacctcctgtagaaccgggcctgggtag

SEQ ID NO: 241190 - DNA, 1476 bp, Artificial Sequence
  derived and/or modified sequence
atgagcaccgccagcgccgccagcagcagcagcagcagcagcgccggcgagatgatcgaggcccccagccaggtgctgaacttcgaggagatcgactacaaggagatcgaggtggaggaggtggtgggcagaggcgccttcggcgtggtgtgcaaggccaagtggagagccaaggacgtggccatcaagcagatcgagagcgagagcgagagaaaggccttcatcgtggagctgagacagctgagcagagtgaaccaccccaacatcgtgaagctgtacggcgcctgcctgaaccccgtgtgcctggtgatggagtacgccgagggcggcagcctgtacaacgtgctgcacggcgccgagcccctgccctactacaccgccgcccacgccatgagctggtgcctgcagtgcagccagggcgtggcctacctgcacagcatgcagcccaaggccctgatccacagagacctgaagccccccaacctgctgctggtggccggcggcaccgtgctgaagatctgcgacttcggcaccgcctgcgacatccagacccacatgaccaacaacaagggcagcgccgcctggatggcccccgaggtgttcgagggcagcaactacagcgagaagtgcgacgtgttcagctggggcatcatcctgtgggaggtgatcaccagaagaaagcccttcgacgagatcggcggccccgccttcagaatcatgtgggccgtgcacaacggcaccagaccccccctgatcaagaacctgcccaagcccatcgagagcctgatgaccagatgctggagcaaggaccccagccagagacccagcatggaggagatcgtgaagatcatgacccacctgatgagatacttccccggcgccgacgagcccctgcagtacccctgccagtacagcgacgagggccagagcaacagcgccaccagcaccggcagcttcatggacatcgccagcaccaacaccagcaacaagagcgacaccaacatggagcaggtgcccgccaccaacgacaccatcaagagactggagagcaagctgctgaagaaccaggccaagcagcagagcgagagcggcagactgagcctgggcgccagcagaggcagcagcgtggagagcctgccccccaccagcgagggcaagagaatgagcgccgacatgagcgagatcgaggccagaatcgccgccaccaccggcaacggccagcccagaagaagaagcatccaggacctgaccgtgaccggcaccgagcccggccaggtgagcagcagaagcagcagccccagcgtgagaatgatcaccaccagcggccccaccagcgagaagcccaccagaagccacccctggacccccgacgacagcaccgacaccaacggcagcgacaacagcatccccatggcctacctgaccctggaccaccagctgcaggccagaaccagctgcagaaccggccccggctag

SEQ ID NO: 241191 - DNA, 1257 bp, Artificial Sequence
  derived and/or modified sequence
atgagcaccgccagcgccgccagcagcagcagcagcagcagcgccggcgagatgatcgaggcccccagccaggtgctgaacttcgaggagatcgactacaaggagatcgaggtggaggaggtggtgggcagaggcgccttcggcgtggtgtgcaaggccaagtggagagccaaggacgtggccatcaagcagatcgagagcgagagcgagagaaaggccttcatcgtggagctgagacagctgagcagagtgaaccaccccaacctgctgctggtggccggcggcaccgtgctgaagatctgcgacttcggcaccgcctgcgacatccagacccacatgaccaacaacaagggcagcgccgcctggatggcccccgaggtgttcgagggcagcaactacagcgagaagtgcgacgtgttcagctggggcatcatcctgtgggaggtgatcaccagaagaaagcccttcgacgagatcggcggccccgccttcagaatcatgtgggccgtgcacaacggcaccagaccccccctgatcaagaacctgcccaagcccatcgagagcctgatgaccagatgctggagcaaggaccccagccagagacccagcatggaggagatcgtgaagatcatgacccacctgatgagatacttccccggcgccgacgagcccctgcagtacccctgccagtacagcgacgagggccagagcaacagcgccaccagcaccggcagcttcatggacatcgccagcaccaacaccagcaacaagagcgacaccaacatggagcaggtgcccgccaccaacgacaccatcaagagactggagagcaagctgctgaagaaccaggccaagcagcagagcgagagcggcagactgagcctgggcgccagcagaggcagcagcgtggagagcctgccccccaccagcgagggcaagagaatgagcgccgacatgagcgagatcgaggccagaatcgccgccaccaccggcaacggccagcccagaagaagaagcatccaggacctgaccgtgaccggcaccgagcccggccaggtgagcagcagaagcagcagccccagcgtgagaatgatcaccaccagcggccccaccagcgagaagcccaccagaagccacccctggacccccgacgacagcaccgacaccaacggcagcgacaacagcatccccatggcctacctgaccctggaccaccagctgcaggccagaaccagctgcagaaccggccccggctag

SEQ ID NO: 241192 - protein, 458 aa, Artificial Sequence
  derived and/or modified sequence
MTKYPDNLSDSLFSGDEENAGTEEIKNEINGNWISASSINEARINAKAKRRLRKNSSRDSGRGDSVSDSGSDALRSGLTVPTSPKGRLLDRRSRSGKGRGLPKKGGAGGKGVWGTPGQVYDVEEVDVKDPNYDDDQENCVYETVVLPLDERAFEKTLTPIIQEYFEHGDTNEVAEMLRDLNLGEMKSGVPVLAVSLALEGKASHREMTSKLLSDLCGTVMSTTDVEKSFDKLLKDLPELALDTPRAPQLVGQFIARAVGDGILCNTYIDSYKGTVDCVQARAALDKATVLLSMSKGGKRKDSVWGSGGGQQSVNHLVKEIDMLLKEYLLSGDISEAEHCLKELEVPHFHHELVYEAIIMVLESTGESTFKMILDLLKSLWKSSTITVDQMKRGYERIYNEIPDINLDVPHSYSVLERFVEECFQAGIISKQLRDLCPSRGRKRFVSEGDGGRLKPESY

SEQ ID NO: 241193 - DNA, 1377 bp, Artificial Sequence
  derived and/or modified sequence
atgaccaagtaccccgacaacctgagcgacagcctgttcagcggcgacgaggagaacgccggcaccgaggagatcaagaacgagatcaacggcaactggatcagcgccagcagcatcaacgaggccagaatcaacgccaaggccaagagaagactgagaaagaacagcagcagagacagcggcagaggcgacagcgtgagcgacagcggcagcgacgccctgagaagcggcctgaccgtgcccaccagccccaagggcagactgctggacagaagaagcagaagcggcaagggcagaggcctgcccaagaagggcggcgccggcggcaagggcgtgtggggcacccccggccaggtgtacgacgtggaggaggtggacgtgaaggaccccaactacgacgacgaccaggagaactgcgtgtacgagaccgtggtgctgcccctggacgagagagccttcgagaagaccctgacccccatcatccaggagtacttcgagcacggcgacaccaacgaggtggccgagatgctgagagacctgaacctgggcgagatgaagagcggcgtgcccgtgctggccgtgagcctggccctggagggcaaggccagccacagagagatgaccagcaagctgctgagcgacctgtgcggcaccgtgatgagcaccaccgacgtggagaagagcttcgacaagctgctgaaggacctgcccgagctggccctggacacccccagagccccccagctggtgggccagttcatcgccagagccgtgggcgacggcatcctgtgcaacacctacatcgacagctacaagggcaccgtggactgcgtgcaggccagagccgccctggacaaggccaccgtgctgctgagcatgagcaagggcggcaagagaaaggacagcgtgtggggcagcggcggcggccagcagagcgtgaaccacctggtgaaggagatcgacatgctgctgaaggagtacctgctgagcggcgacatcagcgaggccgagcactgcctgaaggagctggaggtgccccacttccaccacgagctggtgtacgaggccatcatcatggtgctggagagcaccggcgagagcaccttcaagatgatcctggacctgctgaagagcctgtggaagagcagcaccatcaccgtggaccagatgaagagaggctacgagagaatctacaacgagatccccgacatcaacctggacgtgccccacagctacagcgtgctggagagattcgtggaggagtgcttccaggccggcatcatcagcaagcagctgagagacctgtgccccagcagaggcagaaagagattcgtgagcgagggcgacggcggcagactgaagcccgagagctactag

SEQ ID NO: 241194 - DNA, 1377 bp, Artificial Sequence
  derived and/or modified sequence
atgacaaaatatcccgacaatctgtccgattctctgttctcaggggacgaagagaacgccgggacagaagagattaaaaacgaaataaatgggaactggatatccgcctcttcaatcaatgaagcaagaatcaatgccaaggccaaaagaaggctgaggaaaaattcttctcgtgacagtgggcgcggggatagtgtaagtgattcagggtcagacgccctgcggtctggactgactgtgccgacctcaccgaagggcagattattggacagacgtagtaggagtgggaaaggacgcgggcttcccaagaaagggggagccggcggaaaaggggtgtggggtactcctggtcaggtctatgacgtcgaagaagtcgatgtgaaggaccccaattatgatgatgatcaggagaattgtgtctacgagacggtggtgctccctctcgacgaacgggcctttgaaaaaactctcacaccaatcatacaagagtattttgagcatggggatactaacgaggtggcagagatgctcagagaccttaacctcggagaaatgaaaagtggcgttcccgtgttagctgtgtccctggctttagagggtaaggcatcacacagagaaatgacctctaagctcctttctgacctgtgcggcaccgttatgagtaccacagacgtagagaagtcattcgacaaactgctgaaagatctgccggagctggcactggatactccacgcgctccacaactggtgggccaatttattgcccgtgctgtcggtgacggcatcttatgtaacacctatatcgactcatacaagggcaccgtagattgcgtgcaggcccgggccgccctggacaaggctactgtgcttctgagtatgtcaaaagggggaaagaggaaggacagcgtttggggctcagggggcgggcagcagtcagtaaaccacctggttaaggagatcgacatgctgctaaaggaatatttactctctggagacatctcggaagctgaacactgtctaaaggaactggaggtgccgcacttccatcacgagctggtgtatgaagccattataatggtgctggaatctaccggagagtccacctttaagatgattctcgacttgctgaaaagtctgtggaagtcgtcaaccatcacagtggaccagatgaaaaggggctacgagagaatttataacgaaatccccgatatcaaccttgatgtgccccactcctacagcgtcctggagcggttcgttgaggagtgcttccaggccggcattatctccaagcagctcagagacctgtgtccctcaaggggccgaaaacgattcgtgagtgaaggtgacggcggtcgtctgaagcccgagtcatattag

SEQ ID NO: 241195 - DNA, 1377 bp, Artificial Sequence
  derived and/or modified sequence
atgaccaagtacccagacaacctgagtgacagcctcttctctggagatgaggagaatgccggcacagaggagatcaagaatgagatcaatggaaactggatcagcgccagcagcatcaatgaggcccgcatcaatgccaaggccaagaggcggctgaggaagaacagcagccgggacagcggccgcggggacagcgtgtctgattctggcagtgatgccctgcggagcggcctgactgtgcccaccagccccaagggccgcctgctggacagaagaagccgcagcggcaagggccggggcctgcccaagaagggcggggccggcggcaagggcgtgtggggcaccccaggccaggtgtatgatgtggaggaggtggatgtgaaggaccccaactatgatgatgaccaggagaactgtgtgtatgaaacagtggtgctgcccctggatgagcgggcctttgagaagaccctgacccccatcatccaggagtactttgaacatggagacaccaatgaggtggccgagatgctgcgggacctgaacctgggggagatgaagtctggagtgcctgtgctggccgtgtccctggccctggagggcaaggccagccaccgggagatgaccagcaagctgctgagtgacctgtgtggcaccgtgatgagcaccacagatgtggagaagagctttgacaagctgctgaaggacctgcctgagctggccctggacaccccccgggccccccagctggtgggccagttcatcgcccgggctgtgggagatggcatcctgtgcaacacctacatcgacagctacaagggcaccgtggactgtgtgcaggcccgggccgccctggacaaggccaccgtgctgctgtccatgagcaaaggaggcaagaggaaggacagcgtgtggggcagcggcggcggccagcagagcgtgaaccacctggtgaaggagattgacatgctgctgaaggagtacctgctgagcggggacatcagcgaggccgagcactgcctgaaggagctggaggtgccccacttccaccacgagctggtgtatgaggccatcatcatggtgctggagagcactggagagagcaccttcaagatgatcctggacctgctgaagagcctgtggaagagcagcaccatcaccgtggaccagatgaagaggggctatgaaagaatctacaatgagatcccagacatcaacctggatgtgccccacagctacagcgtgctggagagatttgtggaggagtgcttccaggccggcatcatcagcaagcagctgcgggacctgtgccccagccggggcaggaagagatttgtgtctgaaggagatggcggccgcctgaagccagagagctactag

SEQ ID NO: 241196 - DNA, 1377 bp, Artificial Sequence
  derived and/or modified sequence
atgaccaagtaccccgacaacctgagcgacagcctgttcagcggcgacgaggagaacgcagggactgaggagatcaaaaacgagatcaatgggaattggatttctgcaagtagtatcaatgaagcccgcattaacgcgaaagccaagaggaggctccgaaaaaacagttctagggatagtggacggggagacagcgtatccgattccggatccgacgcattgcgttcaggcctgactgtgcctaccagcccaaaaggccgcctgctggaccgccgttcacgctctggcaagggccgaggcctgccaaaaaaaggtggagccggaggtaagggcgtgtgggggacgcccggtcaggtgtacgatgtggaggaagtggatgttaaggaccccaactacgacgatgaccaggaaaactgcgtctacgagactgttgttcttcctctggacgagagagctttcgagaagacactgactcccataatccaggaatatttcgaacacggggacactaatgaggtggcagaaatgttacgcgacctgaacctcggcgagatgaaatccggcgtccctgttctggctgtgtctctggccctcgaaggcaaagcctcacatcgcgagatgacctccaagcttctgagcgacttgtgtggcaccgttatgtccaccaccgatgtcgaaaagtctttcgacaagctactgaaggatctgcctgaacttgctctcgacacccccagggcccctcagctggttggccaatttattgccagagcagtgggggacgggatcctgtgcaacacttacatcgattcatacaaaggcactgtagattgcgtacaggctagggctgccctcgacaaggcaactgtgttgctgtcaatgtccaaggggggcaaaagaaaggacagcgtgtgggggtctggagggggccagcagtccgttaatcacctggtcaaagagatcgatatgctgttaaaagaatatttactcagtggagacatctccgaggcagagcactgtcttaaagaattagaagtcccccactttcaccatgaacttgtgtatgaagctatcatcatggtactggaaagcaccggggaatctacattcaaaatgatactggatctgcttaaaagcctctggaaatcatccacaataaccgtcgaccaaatgaagcgcggatatgagcgaatttacaatgaaatcccggatattaatctggatgtgccacactcctattccgttctggagcgatttgtcgaagaatgcttccaggctggcataatttctaaacagctgagggacctgtgcccatctcggggtagaaagcgattcgtctccgagggcgacgggggacggctcaagcctgaatcctactag

SEQ ID NO: 241197 - DNA, 1377 bp, Artificial Sequence
  derived and/or modified sequence
atgactaaatatccggataacctctctgattccctgttcagcggcgatgaggaaaatgctggcacagaagagatcaagaacgagatcaacggtaattggatcagcgcctcttccataaatgaggctcggattaacgcaaaggcgaaacgtcgtttacgaaaaaattcaagtcgagatagtggccgtggcgactccgtgtccgactcaggtagcgacgccctgcgttctggccttacagtccccacttcacctaaggggaggctgctggaccggaggtcaaggtcagggaaaggcagaggcctgccaaaaaagggcggagctggcggaaaaggggtgtgggggacgcccggacaggtgtacgacgtagaggaggttgacgttaaggacccaaactatgatgatgaccaagaaaattgtgtgtacgaaacggttgtcttaccactcgacgagagggccttcgagaaaacattgacaccgatcattcaagaatacttcgagcatggagacaccaacgaggttgctgagatgctcagagatctcaatttaggcgaaatgaaatccggcgtgcctgtcttggctgtctccctggcgctggagggcaaagcttcccatagagaaatgactagcaagttacttagtgatttgtgcggtactgtgatgtccacgaccgacgtcgaaaaaagttttgacaagctcctgaaagaccttccagagctcgctctcgatacacctcgcgcacctcagctggtcgggcagttcatcgctcgggcagttggcgatggcatactttgcaatacttatatcgactcatacaagggaaccgtagattgcgtgcaggccagggccgctttagataaagctactgttctcctgtctatgtcaaagggaggaaagagaaaagactcagtgtgggggtcgggtgggggtcagcaaagcgtcaaccaccttgtaaaagagattgacatgctactaaaggagtatcttttatctggagatatctctgaagcggaacattgtctcaaagagctagaggttcctcacttccaccacgagcttgtgtacgaagcgattattatggtgctggaatccacgggtgaatcaacctttaagatgatactcgatctgctgaaatccttatggaaatctagtaccatcacagtcgaccaaatgaaacgagggtatgaaaggatttataatgagatcccagacattaacctggacgtgccccactcttatagcgtgttggagcgtttcgtcgaagagtgttttcaggctggcattattagtaagcaactgcgggatctctgccccagccggggaaggaaaagattcgtgtccgagggtgacggcggaagactgaaacctgagagctactag

SEQ ID NO: 241198 - protein, 414 aa, Artificial Sequence
  derived and/or modified sequence
MRFKSHTVELRRPCSDMEGAALLRVSVLCIWMSALFLGVGVRAEEAGARVQQNVPSGTDTGDPQSKPLGDWAAGTMDPESSIFIEDAIKYFKEKVSTQNLLLLLTDNEAWNGFVAAAELPRNEADELRKALDNLARQMIMKDKNWHDKGQQYRNWFLKEFPRLKSELEDNIRRLRALADGVQKVHKGTTIANVVSGSLSISSGILTLVGMGLAPFTEGGSLVLLEPGMELGITAALTGITSSTMDYGKKWWTQAQAHDLVIKSLDKLKEVREFLGENISNFLSLAGNTYQLTRGIGKDIRALRRARANLQSVPHASASRPRVTEPISAESGEQVERVNEPSILEMSRGVKLTDVAPVSFFLVLDVVYLVYESKHLHEGAKSETAEELKKVAQELEEKLNILNNNYKILQADQEL

SEQ ID NO: 241199 - protein, 398 aa, Artificial Sequence
  derived and/or modified sequence
MEGAALLRVSVLCIWMSALFLGVGVRAEEAGARVQQNVPSGTDTGDPQSKPLGDWAAGTMDPESSIFIEDAIKYFKEKVSTQNLLLLLTDNEAWNGFVAAAELPRNEADELRKALDNLARQMIMKDKNWHDKGQQYRNWFLKEFPRLKSELEDNIRRLRALADGVQKVHKGTTIANVVSGSLSISSGILTLVGMGLAPFTEGGSLVLLEPGMELGITAALTGITSSTMDYGKKWWTQAQAHDLVIKSLDKLKEVREFLGENISNFLSLAGNTYQLTRGIGKDIRALRRARANLQSVPHASASRPRVTEPISAESGEQVERVNEPSILEMSRGVKLTDVAPVSFFLVLDVVYLVYESKHLHEGAKSETAEELKKVAQELEEKLNILNNNYKILQADQEL

SEQ ID NO: 241200 - protein, 118 aa, Artificial Sequence
  derived and/or modified sequence
MRFKSHTVELRSTLSQPLFSCSRRRPCSDMEGAALLRVSVLCIWMSALFLGVGVRAEEAGARVQQNVPSGTDTGDPQSKPLGDWAAGTMDPESSIFIEDAIKYFKEKVSTQNLLLLLT

SEQ ID NO: 241201 - DNA, 1245 bp, Artificial Sequence
  derived and/or modified sequence
atgaggttcaaatcacataccgtcgagctacggcgtccctgctcggatatggaaggggccgcacttctgcgggtaagcgtcctgtgcatctggatgagcgcactgttcctgggggtgggtgttcgggccgaggaagcaggagcccgggtacagcagaacgtcccatctggcaccgataccggggacccccagtcaaagccactgggagattgggctgccggcactatggatcctgagagctctatcttcatcgaagacgcgattaaatatttcaaggagaaggtgtctacgcagaatttgctgttgttgctcacagacaacgaggcctggaatgggtttgtggctgcagccgagcttccaagaaacgaggccgacgaattaaggaaagcactggacaatttagcccgccagatgattatgaaagacaagaactggcacgataaaggacaacaatataggaattggtttctgaaagagtttccaagattgaagagcgagctcgaagataacatccggcgactgagggcactggcagacggcgtgcagaaggtgcacaaagggacaacaattgccaatgttgtttcaggctcgctgtcaatcagcagcggtattctgaccctggtgggcatgggcttggcccctttcacagaaggaggttctcttgtactgcttgagcctggcatggaactggggatcactgccgccctgacaggcatcacctcctccaccatggactacggaaagaaatggtggacacaggcccaggctcatgatctcgtgatcaagtccctcgacaagctcaaggaggttagggagttcctcggagaaaacatatcaaatttcctttccttggctggcaacacataccagctgacgagaggcatcggaaaagatataagggcactcagacgggcaagagcaaacctgcagtcagtcccacatgcatccgcatcacggcctcgggtgacggagcccatttcggccgagtccggagagcaagtcgaaagggttaacgaaccgtccatcctggaaatgtcacgaggcgtgaagctcactgatgtcgccccagtgtctttcttcttggtcctcgatgttgtgtacctcgtatatgagtccaaacatttgcacgagggggcgaaatctgagactgccgaggaactgaagaaagtcgcccaggagctggaagaaaagctgaacattctgaacaacaactataaaattctgcaagcggaccaagaactgtag

SEQ ID NO: 241202 - DNA, 357 bp, Artificial Sequence
  derived and/or modified sequence
atgaggtttaagagtcacaccgtggagttaaggagtacgttatctcaaccgttattcagctgttcccggagacgaccatgctctgatatggaaggagccgctttgttacgcgtcagcgtgctgtgcatctggatgtccgctctatttttgggggtgggtgtaagagctgaagaagcaggggcacgcgtccagcagaatgtcccgagcggcacggacactggggatccacagtctaagcccctgggggactgggctgcaggcacgatggatcctgaatcgtcaatcttcatcgaggacgccataaagtactttaaggaaaaagtgagcacacagaacctactccttctgctgacttag

SEQ ID NO: 241203 - DNA, 1245 bp, Artificial Sequence
  derived and/or modified sequence
atgaggttcaagagccacacagtggagctgcggcggccctgcagcgacatggagggcgccgccctgctgcgggtgtctgtgctgtgcatctggatgtctgccctcttcctgggcgtgggcgtgcgggcagaggaggccggggcccgggtgcagcagaatgtgcccagcggcacagacaccggggacccccagagcaagcccctgggggactgggccgccggcaccatggaccctgagagcagcatcttcattgaagatgccatcaagtacttcaaggagaaggtgtccacccagaacctgctgctgctgctgacagacaatgaggcctggaatggatttgtggccgctgctgagctgcccagaaatgaagcagatgagctgaggaaggccctggacaacctggcccggcagatgatcatgaaggacaagaactggcatgacaagggccagcagtacagaaactggttcctgaaggagttcccccggctgaagtctgagctggaggacaacatccggcggctgcgggccctggctgatggagtgcagaaggtgcacaagggcaccaccatcgccaacgtggtgtctggcagcctgagcatcagcagcggcatcctgaccctggtgggcatgggcctggcccccttcacagagggcggcagcctggtgctgctggagcccggcatggagctgggcatcacagctgccctgaccggcatcaccagcagcaccatggactatggcaagaagtggtggacccaggcccaggcccatgacctggtgatcaagagcctggacaagctgaaggaggtgcgggagttcctgggggagaacatcagcaacttcctgagcctggccggcaacacctaccagctgacccggggcatcggcaaggacatccgggccctgcggcgggcccgggccaacctgcagagcgtgccccacgccagcgccagccggccccgggtgacagagcccatctctgctgagagcggggagcaggtggagcgggtgaatgagcccagcatcctggagatgagccggggcgtgaagctgacagatgtggcccctgtgtccttcttcctggtgctggatgtggtgtacctggtgtatgagagcaagcacctgcacgagggcgccaagtcagaaacagctgaggagctgaagaaggtggcccaggagctggaggagaagctgaacatcctgaacaacaactacaagatcctgcaggccgaccaggagctgtag

SEQ ID NO: 241204 - DNA, 357 bp, Artificial Sequence
  derived and/or modified sequence
atgaggttcaagagccacacagtggagctgcggagcaccctgagccagcccctcttcagctgcagcagaagaagaccctgcagcgacatggagggcgccgccctgctgcgggtgtctgtgctgtgcatctggatgtctgccctcttcctgggcgtgggcgtgcgggcagaggaggccggggcccgggtgcagcagaatgtgcccagcggcacagacacaggagacccccagagcaagcccctgggggactgggccgccggcaccatggaccctgagagcagcatcttcattgaagatgccatcaagtacttcaaggagaaggtgtccacccagaacctgctgctgctgctgacctag

SEQ ID NO: 241205 - DNA, 1245 bp, Artificial Sequence
  derived and/or modified sequence
atgcggttcaagagccacaccgtggagctgcggcggccctgcagcgacatggaaggcgccgccctgctgagagtgtctgtgctgtgcatctggatgagcgccctctttctaggcgtaggggtcagagctgaagaggctggcgctagggtgcagcaaaatgtgccctcaggcaccgataccggagatccccagagcaaaccattgggcgactgggccgctggcacaatggacccagagagctctatcttcattgaggacgccataaaatacttcaaagagaaagtctccacgcagaacttgctgttgctcctgacagacaacgaggcttggaatggttttgtggccgctgcagaacttccgcgcaatgaggcagatgagctccgaaaggcactggacaacctggctcgtcaaatgatcatgaaggacaagaattggcatgataagggccagcagtaccggaactggttcttaaaagagttcccacggctgaaatcggaactggaggataatatccgtcggctccgcgcactggccgatggggtccaaaaggtgcacaagggtaccactatcgctaacgtggtgtccgggagtctttcaatttccagcgggatcctaacactagtagggatgggtctggcaccgttcacagagggaggctccctcgtgctgctcgagcccggcatggagcttggaatcactgcagcactgacaggaatcacaagctccactatggattacggcaaaaagtggtggacccaagcacaagcacacgacttggttatcaaatcccttgacaaactgaaggaagtccgcgagtttctgggggagaatatttcaaatttcctcagccttgctgggaacacgtaccagttaacccgtggcatcggaaaggacatacgcgctctacggagggccagagcgaacctgcagagcgtgccccatgccagcgcaagcagaccgcgagtcactgaacctatttcagctgaatcaggagagcaagtggaaagggtgaacgagccaagcatcctggagatgagcagaggcgtgaagctcaccgatgtagcacccgtctctttcttcctggtcctggacgtggtatatttagtgtatgagagcaagcaccttcatgagggcgcaaaaagcgagaccgccgaggaacttaagaaagtggcacaagaacttgaggagaagcttaacattcttaacaataactacaaaattctgcaggctgatcaggagctgtag

SEQ ID NO: 241206 - DNA, 357 bp, Artificial Sequence
  derived and/or modified sequence
atgcggttcaagagccacaccgtggagctgcggagcaccctgagccaacccctgttctcttgtagccggcgccgaccatgctctgacatggagggtgccgctctgcttcgggtaagcgtactgtgtatttggatgtccgctctcttccttggtgtgggcgttagagctgaagaagcgggggcccgagtgcaacagaatgtccccagcggaacagacacgggcgacccccaaagtaaacccctgggggactgggcagccggcactatggatccggagtcttctatctttatcgaggacgccattaagtattttaaagagaaggtgagtacacagaatctcctcctcctcctgacctag

SEQ ID NO: 241207 - DNA, 1245 bp, Artificial Sequence
  derived and/or modified sequence
atgcgcttcaaaagccacactgtagaacttcggagaccctgcagcgatatggagggggcagccctgcttcgcgtaagcgtgttgtgtatctggatgtcggcactgttcctcggcgttggagtgcgggctgaagaagctggagctcgcgtacagcagaatgtgcccagcggtacggacacgggcgatccgcagagcaaacccctgggcgactgggctgccggaaccatggatccagaatctagcatcttcatagaagatgctattaaatacttcaaagaaaaggtgtccacccagaacctcttactcctcctgaccgacaatgaagcgtggaacggatttgtcgcggctgccgagctgccaaggaacgaagctgacgagctaaggaaggcattggacaacctggccaggcaaatgatcatgaaggataaaaactggcacgacaaaggccagcagtaccgcaactggttccttaaagaattccccaggttaaaatccgagcttgaagataacattagacggctgcgggcactggctgacggggttcagaaggttcacaagggcaccacaatcgcgaacgtcgtgtctggctctctgagcatttctagcgggatcctcaccctggtcgggatggggctagcccctttcaccgagggcggaagcctcgtgctgctggagcctggaatggagctgggcatcacagccgcactcactggcatcacatccagcacgatggattacggtaaaaagtggtggacacaagctcaggcccacgatcttgttatcaagtcattggacaaacttaaggaggtgagagagtttctgggcgagaacatttccaacttcctttcactagccggtaacacgtaccagttaactagggggattggtaaggatatcagggctttacggcgagccagggcaaacctccagtccgtccctcacgcctcagctagccgcccacgagtgaccgagccaatttccgccgaatcgggcgagcaggtggaacgagtaaatgagccgtctatccttgaaatgagcaggggcgtgaaattaacagatgtcgcccctgtcagtttctttctcgttctcgatgtggtttacctcgtttatgagtcaaaacatttgcacgaaggtgcaaagtctgagaccgctgaagaattgaagaaggtcgctcaggagctcgaggaaaagctgaatatccttaacaacaactacaaaatattacaggccgatcaggagctgtag

SEQ ID NO: 241208 - DNA, 357 bp, Artificial Sequence
  derived and/or modified sequence
atgaggttcaagtcccatacggttgaactcagatctactctgtcacaaccactgttttcgtgcagtagaaggcgcccttgctctgacatggaaggggctgccttgctgagggtctccgtgttgtgcatttggatgagtgctttgttcctgggtgtgggcgtcagagccgaggaagctggggctcgggtgcagcagaacgtgcctagcggtactgataccggggacccacagagcaaaccactgggggactgggccgctggaactatggatccagagtcatccattttcatcgaagatgctataaaatatttcaaggaaaaggtctctacacagaacctgctgctgctgctgacttag

SEQ ID NO: 241209 - DNA, 3000 bp, Artificial Sequence
  derived and/or modified sequence
actttccctttcgaattcctcggtatatcttggggactggaggacctgtctggttattatacagacgcataactggaggtgggatccacacagctcagaacagctggatcttgctcagtctctgccaggggaagattccttgacttctggggtgatggagaagaaacaggctgtgctgtgtccctaatgggaaacgtggctgagacaggggagtgagaagggtgcgttgcagaatggtgcctgtggcatgatgccagctttgcaatcatgagattcaaaagccacactgtggaattgaggaggccctgcagcgacatggagggagctgctttgctgagagtctctgtcctctgcatctggatgagtgcacttttccttggtgtgggagtgagggcagaggaagctggagcgagggtgcaacaaaacgttccaagtgggacagatactggagatcctcaaagtaagcccctcggtgactgggctgctggcaccatggacccagagagcagtatctttattgaggatgccattaagtatttcaaggaaaaagtgagcacacagaatctgctactcctgctgactgataatgaggcctggaacggattcgtggctgctgctgaactgcccaggaatgaggcagatgagctccgtaaagctctggacaaccttgcaagacaaatgatcatgaaagacaaaaactggcacgataaaggccagcagtacagaaactggtttctgaaagagtttcctcggttgaaaagtgagcttgaggataacataagaaggctccgtgcccttgcagatggggttcagaaggtccacaaaggcaccaccatcgccaatgtggtgtctggctctctcagcatttcctctggcatcctgaccctcgtcggcatgggtctggcacccttcacagagggaggcagccttgtactcttggaacctgggatggagttgggaatcacagccgctttgaccgggattaccagcagtaccatggactacggaaagaagtggtggacacaagcccaagcccacgacctggtcatcaaaagccttgacaaattgaaggaggtgagggagtttttgggtgagaacatatccaactttctttccttagctggcaatacttaccaactcacacgaggcattgggaaggacatccgtgccctcagacgagccagagccaatcttcagtcagtaccgcatgcctcagcctcacgcccccgggtcactgagccaatctcagctgaaagcggtgaacaggtggagagggttaatgaacccagcatcctggaaatgagcagaggagtcaagctcacggatgtggcccctgtaagcttctttcttgtgctggatgtagtctacctcgtgtacgaatcaaagcacttacatgagggggcaaagtcagagacagctgaggagctgaagaaggtggctcaggagctggaggagaagctaaacattctcaacaataattataagattctgcaggcggaccaagaactgtgaccacagggcagggcagccaccaggagagatatgcctggcaggggccaggacaaaatgcaaacttttttttttttctgagacagagtcttgctctgtcgccaagttggagtgcaatggtgcgatctcagctcactgcaagctctgcctcccgtgttcaagcgattctcctgccttggcctcccaagtagctgggactacaggcgcctaccaccatgcccagctaatttttgtatttttaatagagatggggtttcaccatgttggccaggatggtctcgatctcctgacctcttgatctgcccaccttggcctcccaaagtgctgggattacaggcgtgagccatcgcttttgacccaaatgcaaacattttattagggggataaagagggtgaggtaaagtttatggaactgagtgttagggactttggcatttccatagctgagcacagcaggggaggggttaatgcagatggcagtgcagcaaggagaaggcaggaacattggagcctgcaataagggaaaaatgggaactggagagtgtggggaatgggaagaagcagtttactttagactaaagaatatattggggggccgggtgtagtggctcatgcctgtaatccgagcactttgggaggccaaggcgggcggatcacgaggtcaggagatcgagaccatcctggctaacacagtgaaaccccgtctctactaaaaatacaaaaaattagccgggcatggtggcgggcgcctgtagttccagctaactgggcggctgaggcaggagaatggcgtgaacctgggaggtggagcttgcagtgagccgagatatcgccactgcactccagcctgggtgacagagcgagactccatctcaaaaaaaaaaaaaaaaagaatatattgacggaagaatagagaggaggcttgaaggaaccagcaatgagaaggccaggaaaagaaagagctgaaaatggagaaagcccaagagttagaacagttggatacaggagaagaaacagcggctccactacagacccagccccaggttcaatgtcctccgaagaatgaagtctttccctggtgatggtcccctgccctgtctttccagcatccactctcccttgtcctcctgggggcatatctcagtcaggcagcggcttcctgatgatggtcattggggtggttgtcatgtgatgggtcccctccaggttactaaagggtgcatgtcccctgcttgaacactgaagggcaggtggtgggccatggccatggtccccagctgaggagcaggtgtccctgagaacccaaacttcccagagagtatgtgagaaccaaccaatgaaaacagtcccatcgctcttacccggtaagtaaacagtcagaaaattagcatgaaagcagtttagcattgggaggaagctcagatctctagagctgtcttgtcgccgcccaggattgacctgtgtgtaagtcccaataaactcacctactca

SEQ ID NO: 241210 - DNA, 2918 bp, Artificial Sequence
  derived and/or modified sequence
tggactgaaggtggaggggagcgtgtttgctgtgcttggtcatgagctgctgggaagttgtgactttcactttccctttcgaattcctcggtatatcttggggactggaggacctgtctggttattatacagacgcataactggaggtgggatccacacagctcagaacagctggatcttgctcagtctctgccaggggaagattccttggaggaggccctgcagcgacatggagggagctgctttgctgagagtctctgtcctctgcatctggatgagtgcacttttccttggtgtgggagtgagggcagaggaagctggagcgagggtgcaacaaaacgttccaagtgggacagatactggagatcctcaaagtaagcccctcggtgactgggctgctggcaccatggacccagagagcagtatctttattgaggatgccattaagtatttcaaggaaaaagtgagcacacagaatctgctactcctgctgactgataatgaggcctggaacggattcgtggctgctgctgaactgcccaggaatgaggcagatgagctccgtaaagctctggacaaccttgcaagacaaatgatcatgaaagacaaaaactggcacgataaaggccagcagtacagaaactggtttctgaaagagtttcctcggttgaaaagtgagcttgaggataacataagaaggctccgtgcccttgcagatggggttcagaaggtccacaaaggcaccaccatcgccaatgtggtgtctggctctctcagcatttcctctggcatcctgaccctcgtcggcatgggtctggcacccttcacagagggaggcagccttgtactcttggaacctgggatggagttgggaatcacagccgctttgaccgggattaccagcagtaccatggactacggaaagaagtggtggacacaagcccaagcccacgacctggtcatcaaaagccttgacaaattgaaggaggtgagggagtttttgggtgagaacatatccaactttctttccttagctggcaatacttaccaactcacacgaggcattgggaaggacatccgtgccctcagacgagccagagccaatcttcagtcagtaccgcatgcctcagcctcacgcccccgggtcactgagccaatctcagctgaaagcggtgaacaggtggagagggttaatgaacccagcatcctggaaatgagcagaggagtcaagctcacggatgtggcccctgtaagcttctttcttgtgctggatgtagtctacctcgtgtacgaatcaaagcacttacatgagggggcaaagtcagagacagctgaggagctgaagaaggtggctcaggagctggaggagaagctaaacattctcaacaataattataagattctgcaggcggaccaagaactgtgaccacagggcagggcagccaccaggagagatatgcctggcaggggccaggacaaaatgcaaacttttttttttttctgagacagagtcttgctctgtcgccaagttggagtgcaatggtgcgatctcagctcactgcaagctctgcctcccgtgttcaagcgattctcctgccttggcctcccaagtagctgggactacaggcgcctaccaccatgcccagctaatttttgtatttttaatagagatggggtttcaccatgttggccaggatggtctcgatctcctgacctcttgatctgcccaccttggcctcccaaagtgctgggattacaggcgtgagccatcgcttttgacccaaatgcaaacattttattagggggataaagagggtgaggtaaagtttatggaactgagtgttagggactttggcatttccatagctgagcacagcaggggaggggttaatgcagatggcagtgcagcaaggagaaggcaggaacattggagcctgcaataagggaaaaatgggaactggagagtgtggggaatgggaagaagcagtttactttagactaaagaatatattggggggccgggtgtagtggctcatgcctgtaatccgagcactttgggaggccaaggcgggcggatcacgaggtcaggagatcgagaccatcctggctaacacagtgaaaccccgtctctactaaaaatacaaaaaattagccgggcatggtggcgggcgcctgtagttccagctaactgggcggctgaggcaggagaatggcgtgaacctgggaggtggagcttgcagtgagccgagatatcgccactgcactccagcctgggtgacagagcgagactccatctcaaaaaaaaaaaaaaaaagaatatattgacggaagaatagagaggaggcttgaaggaaccagcaatgagaaggccaggaaaagaaagagctgaaaatggagaaagcccaagagttagaacagttggatacaggagaagaaacagcggctccactacagacccagccccaggttcaatgtcctccgaagaatgaagtctttccctggtgatggtcccctgccctgtctttccagcatccactctcccttgtcctcctgggggcatatctcagtcaggcagcggcttcctgatgatggtcattggggtggttgtcatgtgatgggtcccctccaggttactaaagggtgcatgtcccctgcttgaacactgaagggcaggtggtgggccatggccatggtccccagctgaggagcaggtgtccctgagaacccaaacttcccagagagtatgtgagaaccaaccaatgaaaacagtcccatcgctcttacccggtaagtaaacagtcagaaaattagcatgaaagcagtttagcattgggaggaagctcagatctctagagctgtcttgtcgccgcccaggattgacctgtgtgtaagtcccaataaactcacctactcatcaa

SEQ ID NO: 241211 - DNA, 1564 bp, Artificial Sequence
  derived and/or modified sequence
gacgcataactggaggtgggatccacacagctcagaacagctggatcttgctcagtctctgccaggggaagattccttggaggaggccctgcagcgacatggagggagctgctttgctgagagtctctgtcctctgcatctggatgagtgcacttttccttggtgtgggagtgagggcagaggaagctggagcgagggtgcaacaaaacgttccaagtgggacagatactggagatcctcaaagtaagcccctcggtgactgggctgctggcaccatggacccagagagcagtatctttattgaggatgccattaagtatttcaaggaaaaagtgagcacacagaatctgctactcctgctgactgataatgaggcctggaacggattcgtggctgctgctgaactgcccaggaatgaggcagatgagctccgtaaagctctggacaaccttgcaagacaaatgatcatgaaagacaaaaactggcacgataaaggccagcagtacagaaactggtttctgaaagagtttcctcggttgaaaagtgagcttgaggataacataagaaggctccgtgcccttgcagatggggttcagaaggtccacaaaggcaccaccatcgccaatgtggtgtctggctctctcagcatttcctctggcatcctgaccctcgtcggcatgggtctggcacccttcacagagggaggcagccttgtactcttggaacctgggatggagttgggaatcacagccgctttgaccgggattaccagcagtaccatggactacggaaagaagtggtggacacaagcccaagcccacgacctggtcatcaaaagccttgacaaattgaaggaggtgagggagtttttgggtgagaacatatccaactttctttccttagctggcaatacttaccaactcacacgaggcattgggaaggacatccgtgccctcagacgagccagagccaatcttcagtcagtaccgcatgcctcagcctcacgcccccgggtcactgagccaatctcagctgaaagcggtgaacaggtggagagggttaatgaacccagcatcctggaaatgagcagaggagtcaagctcacggatgtggcccctgtaagcttctttcttgtgctggatgtagtctacctcgtgtacgaatcaaagcacttacatgagggggcaaagtcagagacagctgaggagctgaagaaggtggctcaggagctggaggagaagctaaacattctcaacaataattataagattctgcaggcggaccaagaactgtgaccacagggcagggcagccaccaggagagatatgcctggcaggggccaggacaaaatgcaaacttttttttttttagcgagactccatctcaaaaaaaaaaaaaaaaagaatatattgacggaagaatagagaggaggcttgaaggaaccagcaatgagaaggccaggaaaagaaagagctgaaaatggagaaagcccaagagttagaacagttggatacaggagaagaaacagcggctccactacagacccagccccaggttcaatgtc

SEQ ID NO: 241212 - DNA, 2040 bp, Artificial Sequence
  derived and/or modified sequence
ctggaggtgggatccacacagctcagaacagctggatcttgctcagtctctgccaggggaagattccttggaggaggccctgcagcgacatggagggagctgctttgctgagagtctctgtcctctgcatctggatgagtgcacttttccttggtgtgggagtgagggcagaggaagctggagcgagggtgcaacaaaacgttccaagtgggacagatactggagatcctcaaagtaagcccctcggtgactgggctgctggcaccatggacccagagagcagtatctttattgaggatgccattaagtatttcaaggaaaaagtgagcacacagaatctgctactcctgctgactgataatgaggcctggaacggattcgtggctgctgctgaactgcccaggaatgaggcagatgagctccgtaaagctctggacaaccttgcaagacaaatgatcatgaaagacaaaaactggcacgataaaggccagcagtacagaaactggtttctgaaagagtttcctcggttgaaaagtgagcttgaggataacataagaaggctccgtgcccttgcagatggggttcagaaggtccacaaaggcaccaccatcgccaatgtggtgtctggctctctcagcatttcctctggcatcctgaccctcgtcggcatgggtctggcacccttcacagagggaggcagccttgtactcttggaacctgggatggagttgggaatcacagccgctttgaccgggattaccagcagtaccatggactacggaaagaagtggtggacacaagcccaagcccacgacctggtcatcaaaagccttgacaaattgaaggaggtgagggagtttttgggtgagaacatatccaactttctttccttagctggcaatacttaccaactcacacgaggcattgggaaggacatccgtgccctcagacgagccagagccaatcttcagtcagtaccgcatgcctcagcctcacgcccccgggtcactgagccaatctcagctgaaagcggtgaacaggtggagagggttaatgaacccagcatcctggaaatgagcagaggagtcaagctcacggatgtggcccctgtaagcttctttcttgtgctggatgtagtctacctcgtgtacgaatcaaagcacttacatgagggggcaaagtcagagacagctgaggagctgaagaaggtggctcaggagctggaggagaagctaaacattctcaacaataattataagattctgcaggcggaccaagaactgtgaccacagggcagggcagccaccaggagagatatgcctggcaggggccaggacaaaatgcaaacttttttttttttctgagacagagtcttgctctgtcgccaacttgcagtgagccgagatatcgccactgcactccagcctgggtgacagagcgagactccatctcaaaaaaaaaaaaaaaaagaatatattgacggaagaatagagaggaggcttgaaggaaccagcaatgagaaggccaggaaaagaaagagctgaaaatggagaaagcccaagagttagaacagttggatacaggagaagaaacagcggctccactacagacccagccccaggttcaatgtcctccgaagaatgaagtctttccctggtgatggtcccctgccctgtctttccagcatccactctcccttgtcctcctgggggcatatctcagtcaggcagcggcttcctgatgatggtcattggggtggttgtcatgtgatgggtcccctccaggttactaaagggtgcatgtcccctgcttgaacactgaagggcaggtggtgggccatggccatggtccccagctgaggagcaggtgtccctgagaacccaaacttcccagagagtatgtgagaaccaaccaatgaaaacagtcccatcgctcttacccggtaagtaaacagtcagaaaattagcatgaaagcagtttagcattgggaggaagctcagatctctagagctgtcttgtcgccgcccaggattgacctgt

SEQ ID NO: 241213 - DNA, 2901 bp, Artificial Sequence
  derived and/or modified sequence
gactttcactttccctttcgaattcctcggtatatcttggggactggaggacctgtctggttattatacagacgcataactggaggtgggatccacacagctcagaacagctggatcttgctcagtctctgccaggggaagattccttggaggagcacactgtctcaacccctcttttcctgctcaaggaggaggccctgcagcgacatggagggagctgctttgctgagagtctctgtcctctgcatctggatgagtgcacttttccttggtgtgggagtgagggcagaggaagctggagcgagggtgcaacaaaacgttccaagtgggacagatactggagatcctcaaagtaagcccctcggtgactgggctgctggcaccatggacccagagagcagtatctttattgaggatgccattaagtatttcaaggaaaaagtgagcacacagaatctgctactcctgctgactgataatgaggcctggaacggattcgtggctgctgctgaactgcccaggaatgaggcagatgagctccgtaaagctctggacaaccttgcaagacaaatgatcatgaaagacaaaaactggcacgataaaggccagcagtacagaaactggtttctgaaagagtttcctcggttgaaaagtgagcttgaggataacataagaaggctccgtgcccttgcagatggggttcagaaggtccacaaaggcaccaccatcgccaatgtggtgtctggctctctcagcatttcctctggcatcctgaccctcgtcggcatgggtctggcacccttcacagagggaggcagccttgtactcttggaacctgggatggagttgggaatcacagccgctttgaccgggattaccagcagtaccatggactacggaaagaagtggtggacacaagcccaagcccacgacctggtcatcaaaagccttgacaaattgaaggaggtgagggagtttttgggtgagaacatatccaactttctttccttagctggcaatacttaccaactcacacgaggcattgggaaggacatccgtgccctcagacgagccagagccaatcttcagtcagtaccgcatgcctcagcctcacgcccccgggtcactgagccaatctcagctgaaagcggtgaacaggtggagagggttaatgaacccagcatcctggaaatgagcagaggagtcaagctcacggatgtggcccctgtaagcttctttcttgtgctggatgtagtctacctcgtgtacgaatcaaagcacttacatgagggggcaaagtcagagacagctgaggagctgaagaaggtggctcaggagctggaggagaagctaaacattctcaacaataattataagattctgcaggcggaccaagaactgtgaccacagggcagggcagccaccaggagagatatgcctggcaggggccaggacaaaatgcaaacttttttttttttctgagacagagtcttgctctgtcgccaagttggagtgcaatggtgcgatctcagctcactgcaagctctgcctcccgtgttcaagcgattctcctgccttggcctcccaagtagctgggactacaggcgcctaccaccatgcccagctaatttttgtatttttaatagagatggggtttcaccatgttggccaggatggtctcgatctcctgacctcttgatctgcccaccttggcctcccaaagtgctgggattacaggcgtgagccatcgcttttgacccaaatgcaaacattttattagggggataaagagggtgaggtaaagtttatggaactgagtgttagggactttggcatttccatagctgagcacagcaggggaggggttaatgcagatggcagtgcagcaaggagaaggcaggaacattggagcctgcaataagggaaaaatgggaactggagagtgtggggaatgggaagaagcagtttactttagactaaagaatatattggggggccgggtgtagtggctcatgcctgtaatccgagcactttgggaggccaaggcgggcggatcacgaggtcaggagatcgagaccatcctggctaacacagtgaaaccccgtctctactaaaaatacaaaaaattagccgggcatggtggcgggcgcctgtagttccagctaactgggcggctgaggcaggagaatggcgtgaacctgggaggtggagcttgcagtgagccgagatatcgccactgcactccagcctgggtgacagagcgagactccatctcaaaaaaaaaaaaaaaaagaatatattgacggaagaatagagaggaggcttgaaggaaccagcaatgagaaggccaggaaaagaaagagctgaaaatggagaaagcccaagagttagaacagttggatacaggagaagaaacagcggctccactacagacccagccccaggttcaatgtcctccgaagaatgaagtctttccctggtgatggtcccctgccctgtctttccagcatccactctcccttgtcctcctgggggcatatctcagtcaggcagcggcttcctgatgatggtcattggggtggttgtcatgtgatgggtcccctccaggttactaaagggtgcatgtcccctgcttgaacactgaagggcaggtggtgggccatggccatggtccccagctgaggagcaggtgtccctgagaacccaaacttcccagagagtatgtgagaaccaaccaatgaaaacagtcccatcgctcttacccggtaagtaaacagtcagaaaattagcatgaaagcagtttagcattgggaggaagctcagatctctagagctgtcttgtcgccgcccaggattgacctgtgtgtaagtcccaataaactcacctactcatcaagctgg

SEQ ID NO: 241214 - DNA, 2808 bp, Artificial Sequence
  derived and/or modified sequence
gactttcactttccctttcgaattcctcggtatatcttggggactggaggacctgtctggttattatacagacgcataactggaggtgggatccacacagctcagaacagctggatcttgctcagtctctgccaggggaagattccttggaggaggccctgcagcgacatggagggagctgctttgctgagagtctctgtcctctgcatctgggtgcaacaaaacgttccaagtgggacagatactggagatcctcaaagtaagcccctcggtgactgggctgctggcaccatggacccagagagcagtatctttattgaggatgccattaagtatttcaaggaaaaagtgagcacacagaatctgctactcctgctgactgataatgaggcctggaacggattcgtggctgctgctgaactgcccaggaatgaggcagatgagctccgtaaagctctggacaaccttgcaagacaaatgatcatgaaagacaaaaactggcacgataaaggccagcagtacagaaactggtttctgaaagagtttcctcggttgaaaagtgagcttgaggataacataagaaggctccgtgcccttgcagatggggttcagaaggtccacaaaggcaccaccatcgccaatgtggtgtctggctctctcagcatttcctctggcatcctgaccctcgtcggcatgggtctggcacccttcacagagggaggcagccttgtactcttggaacctgggatggagttgggaatcacagccgctttgaccgggattaccagcagtaccatggactacggaaagaagtggtggacacaagcccaagcccacgacctggtcatcaaaagccttgacaaattgaaggaggtgagggagtttttgggtgagaacatatccaactttctttccttagctggcaatacttaccaactcacacgaggcattgggaaggacatccgtgccctcagacgagccagagccaatcttcagtcagtaccgcatgcctcagcctcacgcccccgggtcactgagccaatctcagctgaaagcggtgaacaggtggagagggttaatgaacccagcatcctggaaatgagcagaggagtcaagctcacggatgtggcccctgtaagcttctttcttgtgctggatgtagtctacctcgtgtacgaatcaaagcacttacatgagggggcaaagtcagagacagctgaggagctgaagaaggtggctcaggagctggaggagaagctaaacattctcaacaataattataagattctgcaggcggaccaagaactgtgaccacagggcagggcagccaccaggagagatatgcctggcaggggccaggacaaaatgcaaacttttttttttttctgagacagagtcttgctctgtcgccaagttggagtgcaatggtgcgatctcagctcactgcaagctctgcctcccgtgttcaagcgattctcctgccttggcctcccaagtagctgggactacaggcgcctaccaccatgcccagctaatttttgtatttttaatagagatggggtttcaccatgttggccaggatggtctcgatctcctgacctcttgatctgcccaccttggcctcccaaagtgctgggattacaggcgtgagccatcgcttttgacccaaatgcaaacattttattagggggataaagagggtgaggtaaagtttatggaactgagtgttagggactttggcatttccatagctgagcacagcaggggaggggttaatgcagatggcagtgcagcaaggagaaggcaggaacattggagcctgcaataagggaaaaatgggaactggagagtgtggggaatgggaagaagcagtttactttagactaaagaatatattggggggccgggtgtagtggctcatgcctgtaatccgagcactttgggaggccaaggcgggcggatcacgaggtcaggagatcgagaccatcctggctaacacagtgaaaccccgtctctactaaaaatacaaaaaattagccgggcatggtggcgggcgcctgtagttccagctaactgggcggctgaggcaggagaatggcgtgaacctgggaggtggagcttgcagtgagccgagatatcgccactgcactccagcctgggtgacagagcgagactccatctcaaaaaaaaaaaaaaaaagaatatattgacggaagaatagagaggaggcttgaaggaaccagcaatgagaaggccaggaaaagaaagagctgaaaatggagaaagcccaagagttagaacagttggatacaggagaagaaacagcggctccactacagacccagccccaggttcaatgtcctccgaagaatgaagtctttccctggtgatggtcccctgccctgtctttccagcatccactctcccttgtcctcctgggggcatatctcagtcaggcagcggcttcctgatgatggtcattggggtggttgtcatgtgatgggtcccctccaggttactaaagggtgcatgtcccctgcttgaacactgaagggcaggtggtgggccatggccatggtccccagctgaggagcaggtgtccctgagaacccaaacttcccagagagtatgtgagaaccaaccaatgaaaacagtcccatcgctcttacccggtaagtaaacagtcagaaaattagcatgaaagcagtttagcattgggaggaagctcagatctctagagctgtcttgtcgccgcccaggattgacctgtgtgtaagtcccaataaactcacctactcatcaagctgg

SEQ ID NO: 241215 - DNA, 624 bp, Artificial Sequence
  derived and/or modified sequence
attatacagacgcataactggaggtgggatccacacagctcagaacagctggatcttgctcagtctctgccaggggaagattccttggaggagcacactgtctcaacccctcttttcctgctcaaggaggaggccctgcagcgacatggagggagctgctttgctgagagtctctgtcctctgcatctggatgagtgcacttttccttggtgtgggagtgagggcagaggaagctggagcgagggtgcaacaaaacgttccaagtgggacagatactggagatcctcaaagtaagcccctcggtgactgggctgctggcaccatggacccagagagcagtatctttattgaggatgccattaagtatttcaaggaaaaagtgagcacacagaatctgctactcctgctgactgataatgaggcctggaacggattcgtggctgctgctgaactgcccaggaatgaggcagatgagctccgtaaagctctggacaaccttgcaagacaaatgatcatgaaagacaaaaactggcacgataaaggccagcagtacagaaactggtttctgaaagagtttcctcggttgaaaagtgagcttgaggataacataagaaggctccgtgc

SEQ ID NO: 241216 - DNA, 541 bp, Artificial Sequence
  derived and/or modified sequence
atccacacagctcagaacagctggatcttgctcagtctctgccaggggaagattccttggaggagcacactgtctcaacccctcttttcctgctcaaggaggaggccctgcagcgacatggagggagctgctttgctgagagtctctgtcctctgcatctggatgagtgcacttttccttggtgtgggagtgagggcagaggaagctggagcgagggtgcaacaaaacgttccaagtgggacagatactggagatcctcaaagtaagcccctcggtgactgggctgctggcaccatggacccaggcccagctgggtccagaggtgacagtggagagccgtgtaccctgagaccagcctgcagaggacagaggcaacatggaggtgcctcaaggatcagtgctgagggtcccgcccccatgccccgtcgaagaaccccctccactgcccatctgagagtgcccaagaccagcaggaggaatctcctttgcatgagagcagtatctttattgaggatgccattaagtatttcaaggaaaaagt

SEQ ID NO: 241217 - DNA, 566 bp, Artificial Sequence
  derived and/or modified sequence
attatacagacgcataactggaggtgggatccacacagctcagaacagctggatcttgctcagtctctgccaggggaagattccttgacttctggggtgatggagaagaaacaggctgtgctgtgtccctaatgggaaacgtggctgagacaggggagtgagaagggtgcgttgcagaatggtgcctgtggcatgatgccagctttgcaatcatgagattcaaaagccacactgtggaattgaggagcacactgtctcaacccctcttttcctgctcaaggaggaggccctgcagcgacatggagggagctgctttgctgagagtctctgtcctctgcatctggatgagtgcacttttccttggtgtgggagtgagggcagaggaagctggagcgagggtgcaacaaaacgttccaagtgggacagatactggagatcctcaaagtaagcccctcggtgactgggctgctggcaccatggacccagagagcagtatctttattgaggatgccattaagtatttcaaggaaaaagtgagcacacagaatctgctactcctgctgact

SEQ ID NO: 241218 - DNA, 1245 bp, Artificial Sequence
  derived and/or modified sequence
atgcggttcaagtctcacactgttgagcttcggaggccatgttctgatatggaaggcgccgcacttttacgagtatccgtgctatgcatctggatgagtgcgttgtttctaggggtgggcgtgagagccgaggaggcaggggcacgcgtgcagcagaacgtgccttcaggaactgacaccggagacccacagtcaaagccccttggggattgggcggcaggaacaatggacccggaatctagtattttcattgaggacgccataaaatatttcaaagaaaaggtaagcacccaaaatttgctacttctactaacagataatgaggcatggaatggattcgttgccgctgcagaactccccagaaacgaggccgacgagcttcgcaaggctctagataatctcgctagacaaatgattatgaaggacaagaattggcacgataaaggtcagcagtacagaaattggtttttaaaagaatttccacgcctgaagtctgagctagaagacaatattcgtcggctgagagcccttgccgatggggtgcaaaaggtccacaaggggacaaccattgctaatgttgtcagcgggtcactgtcaatttcctcgggtatccttaccctggtcgggatgggcctcgcaccattcaccgagggcggtagcctcgttctgctggagcctggtatggaactggggatcactgcagccctgacagggataacttcgagcaccatggattacggaaagaagtggtggacacaggcccaggctcacgacttggttattaaaagtcttgataaacttaaggaagtgagggaatttctcggtgagaacatttcaaatttcctctctctcgccggcaacacttaccagttaaccagaggcatcgggaaggatattcgcgcactgcgccgagctcgagcaaatctgcaatccgtgccacatgctagcgcttcccgtcctcgagttacggagccaatctcggccgagtccggagaacaggtagagagagtaaatgagccaagtatcttagaaatgagcagaggggtgaagcttactgacgtggccccagtcagttttttcctggtgctcgacgtggtttacctagtgtacgagagtaaacatttgcacgagggagccaagtcagagaccgccgaagaactgaaaaaagtagcccaagagctggaggagaaactcaatatcttaaataacaactataaaattctgcaggcggatcaggaactttag

SEQ ID NO: 241219 - DNA, 357 bp, Artificial Sequence
  derived and/or modified sequence
atgcgcttcaaaagtcacactgtcgaactccgaagtacgttgagccagccactgttctcctgctcaagacgacgcccttgcagtgatatggaaggcgctgcgctgctgcgggtgtctgttctgtgtatttggatgtccgctctgtttctgggcgtgggagtcagggccgaagaggccggtgctagggttcagcagaatgtgccaagcgggacagacaccggagatccccagagtaaacctctcggagattgggccgcaggcaccatggaccccgaatctagtatcttcatcgaagacgccattaaatacttcaaggagaaagtttccacacaaaacctgctgttactcctgacctag

SEQ ID NO: 241220 - DNA, 1245 bp, Artificial Sequence
  derived and/or modified sequence
atgcggttcaagtctcacactgttgagcttcggaggccatgttctgatatggaaggcgccgcacttttacgagtatccgtgctatgcatctggatgagtgcgttgtttctaggggtgggcgtgagagccgaggaggcaggggcacgcgtgcagcagaacgtgccttcaggaactgacaccggagacccacagtcaaagccccttggggattgggcggcaggaacaatggacccggaatctagtattttcattgaggacgccataaaatatttcaaagaaaaggtaagcacccaaaatttgctacttctactaacagataatgaggcatggaatggattcgttgccgctgcagaactccccagaaacgaggccgacgagcttcgcaaggctctagataatctcgctagacaaatgattatgaaggacaagaattggcacgataaaggtcagcagtacagaaattggtttttaaaagaatttccacgcctgaagtctgagctagaagacaatattcgtcggctgagagcccttgccgatggggtgcaaaaggtccacaaggggacaaccattgctaatgttgtcagcgggtcactgtcaatttcttctggcatactaacgctggtcggaatgggactcgcaccattcacggaaggtggtagccttgtgctgctagagccgggaatggagttgggtattactgctgccctgactggtattacctcctccacgatggactacgggaagaaatggtggactcaagcacaggcgcacgatctggtcatcaagagtttagataagctgaaggaagtacgcgaatttctcggggagaatatctctaatttcctctcacttgccggaaacacataccagctgaccaggggcatcgggaaggatattcgtgcacttagacgagcgagagcaaatctacagtcggtcccccacgcaagtgcatccaggccccgagtcaccgagcctataagtgcagaatccggtgagcaggtagaaagagttaatgagccctccatcttggaaatgagccgtggcgtcaagctgacagatgtcgcacctgtctccttcttcctcgtcctggatgtcgtgtacctggtctacgaatcaaaacacctacatgaaggtgctaaatccgaaaccgccgaggagctgaagaaggtcgcccaggagctcgaggagaaactgaatatcttaaacaataattacaagattctgcaagccgaccaagaactatag

SEQ ID NO: 241221 - DNA, 357 bp, Artificial Sequence
  derived and/or modified sequence
atgagattcaagagtcatacagtagaactccgatccactctatcacaaccgcttttctcttgtagtcgtagacggccatgctcagacatggaaggcgccgctttgctccgggtctcagtgctgtgtatttggatgagtgcactgttccttggggtgggcgtgcgggccgaagaagccggagccagagtccagcagaatgtgccctctgggacagacactggagacccacaatcaaagccattgggcgactgggctgccggaaccatggaccctgagagcagcattttcattgaagacgccatcaagtattttaaagaaaaagtctcgactcaaaacctgctacttttattaacctag

SEQ ID NO: 241222 - DNA, 1245 bp, Artificial Sequence
  derived and/or modified sequence
atgagattcaagagccacaccgtggagctgagaagaccctgcagcgacatggagggcgccgccctgctgagagtgagcgtgctgtgcatctggatgagcgccctgttcctgggcgtgggcgtgagagccgaggaggccggcgccagagtgcagcagaacgtgcccagcggcaccgacaccggcgacccccagagcaagcccctgggcgactgggccgccggcaccatggaccccgagagcagcatcttcatcgaggacgccatcaagtacttcaaggagaaggtgagcacccagaacctgctgctgctgctgaccgacaacgaggcctggaacggcttcgtggccgccgccgagctgcccagaaacgaggccgacgagctgagaaaggccctggacaacctggccagacagatgatcatgaaggacaagaactggcacgacaagggccagcagtacagaaactggttcctgaaggagttccccagactgaagagcgagctggaggacaacatcagaagactgagagccctggccgacggcgtgcagaaggtgcacaagggcaccaccatcgccaacgtggtgagcggcagcctgagcatcagcagcggcatcctgaccctggtgggcatgggcctggcccccttcaccgagggcggcagcctggtgctgctggagcccggcatggagctgggcatcaccgccgccctgaccggcatcaccagcagcaccatggactacggcaagaagtggtggacccaggcccaggcccacgacctggtgatcaagagcctggacaagctgaaggaggtgagagagttcctgggcgagaacatcagcaacttcctgagcctggccggcaacacctaccagctgaccagaggcatcggcaaggacatcagagccctgagaagagccagagccaacctgcagagcgtgccccacgccagcgccagcagacccagagtgaccgagcccatcagcgccgagagcggcgagcaggtggagagagtgaacgagcccagcatcctggagatgagcagaggcgtgaagctgaccgacgtggcccccgtgagcttcttcctggtgctggacgtggtgtacctggtgtacgagagcaagcacctgcacgagggcgccaagagcgagaccgccgaggagctgaagaaggtggcccaggagctggaggagaagctgaacatcctgaacaacaactacaagatcctgcaggccgaccaggagctgtag

SEQ ID NO: 241223 - DNA, 357 bp, Artificial Sequence
  derived and/or modified sequence
atgagattcaagagccacaccgtggagctgagaagcaccctgagccagcccctgttcagctgcagcagaagaagaccctgcagcgacatggagggcgccgccctgctgagagtgagcgtgctgtgcatctggatgagcgccctgttcctgggcgtgggcgtgagagccgaggaggccggcgccagagtgcagcagaacgtgcccagcggcaccgacaccggcgacccccagagcaagcccctgggcgactgggccgccggcaccatggaccccgagagcagcatcttcatcgaggacgccatcaagtacttcaaggagaaggtgagcacccagaacctgctgctgctgctgacctag

SEQ ID NO: 241224 - protein, 337 aa, Artificial Sequence
  derived and/or modified sequence
MNPESSIFIEDYLKYFQDQVSRENLLQLLTDDEAWNGFVAAAELPRDEADELRKALNKLASHMVMKDKNRHDKDQQHRQWFLKEFPRLKRELEDHIRKLRALAEEVEQVHRGTTIANVVSNSVGTTSGILTLLGLGLAPFTEGISFVLLDTGMGLGAAAAVAGITCSVVELVNKLRARAQARNLDQSGTNVAKVMKEFVGGNTPNVLTLVDNWYQVTQGIGRNIRAIRRARANPQLGAYAPPPHIIGRISAEGGEQVERVVEGPAQAMSRGTMIVGAATGGILLLLDVVSLAYESKHLLEGAKSESAEELKKRAQELEGKLNFLTKIHEMLQPGQDQ

SEQ ID NO: 241225 - protein, 449 aa, Artificial Sequence
  derived and/or modified sequence
MHSWTWDPHSSEQLDLAQSLSEEDPLSSLRGSIQPQPPAEAPDKGGSQANNDPGGWDPGCSSSQVLGRTRGPCLGVRVREEEAGTRVKENLPVWTVTGELQGKPLGNPAAGTMNPESSIFIEDYLKYFQDQVSRENLLQLLTDDEAWNGFVAAAELPRDEADELRKALNKLASHMVMKDKNRHDKDQQHRQWFLKEFPRLKRELEDHIRKLRALAEEVEQVHRGTTIANVVSNSVGTTSGILTLLGLGLAPFTEGISFVLLDTGMGLGAAAAVAGITCSVVELVNKLRARAQARNLDQSGTNVAKVMKEFVGGNTPNVLTLVDNWYQVTQGIGRNIRAIRRARANPQLGAYAPPPHIIGRISAEGGEQVERVVEGPAQAMSRGTMIVGAATGGILLLLDVVSLAYESKHLLEGAKSESAEELKKRAQELEGKLNFLTKIHEMLQPGQDQ

SEQ ID NO: 241226 - protein, 74 aa, Artificial Sequence
  derived and/or modified sequence
MNPESSIFIEDYLKYFQDQVSRENLLQLLTDDEAWNGFVAAAELPRDEADELRKALNKLASHMVMKDKNRHDKD

SEQ ID NO: 241227 - protein, 128 aa, Artificial Sequence
  derived and/or modified sequence
MNPESSIFIEDYLKYFQDQVSRENLLQLLTDDEAWNGFVAAAELPRDEADELRKALNKLASHMVMKDKNRHDKDQQHRQWFLKEFPRLKRELEDHIRKLRALAEEVEQVHRGTTIANVVSNSVGTTSG

SEQ ID NO: 241228 - DNA, 1014 bp, Artificial Sequence
  derived and/or modified sequence
atgaaccccgaatcatccatttttattgaggattacctgaagtatttccaggaccaggtgtctcgggaaaacttattgcagctgctgacggacgatgaggcttggaacgggttcgtagcagcagccgagttaccacgcgacgaagctgatgagctgcggaaggccctgaacaaactcgcaagccacatggttatgaaagacaaaaatcggcatgataaggaccagcagcaccgccagtggttcttaaaagagtttcctagactaaaacgcgagctggaggatcacattagaaagttgagggccttggcagaagaagtcgaacaggtgcatagaggaaccacaatagccaacgtagtatccaactcagtgggaaccactagcggtatactgactctgctaggattggggctagcgccatttactgagggaattagcttcgtgctcctcgacacgggaatgggactaggagccgccgctgcagtggccggcattacgtgcagtgtggttgaactggtcaataaactgcgggctagagcacaggccaggaacctggaccagagcgggaccaacgtcgccaaggtcatgaaagaatttgtcggcggtaatacgcctaatgtcctcaccctcgtggacaattggtaccaggtgacccaaggaatcggacgcaacataagagctattaggcgcgccagggctaatcctcaactgggggcatacgcgccccctccacacatcatagggcgcatctcggcagaagggggggaacaggtcgaaagggtcgtggagggccctgcccaggccatgagtaggggtacaatgattgtcggggctgcaaccggagggatcctgctgctgctggatgtggttagtctggcttatgaatcgaagcatttactggagggcgcaaagagcgagtccgcagaggagctcaaaaaaagagcacaggagctcgagggcaagcttaacttcctgacaaagattcacgagatgctgcaacccggtcaggaccagtag

SEQ ID NO: 241229 - DNA, 1014 bp, Artificial Sequence
  derived and/or modified sequence
atgaatcctgagagctctatctttattgaagattacttgaagtacttccaggaccaggtcagccgcgagaacctcttgcagctcttaaccgatgacgaagcatggaatgggtttgtggctgcagctgaactccctcgcgatgaggctgacgagctgaggaaagccctcaacaaactcgcctcccatatggtcatgaaggacaagaaccggcacgacaaggaccaacaacaccgacagtggttcctgaaggaattcccccgactgaagcgcgaattagaagaccacatccgcaaactgcgcgcactagctgaggaagtggagcaggtgcataggggtacgaccatcgcaaacgtagtttccaatagcgtgggcacaacgtccggcattctgacccttctgggcctggggcttgcacccttcaccgaggggatttccttcgtgctactggataccggcatgggactgggggcagctgctgcagtggcaggtatcacttgttccgtcgtagaattagttaacaaactgcgtgccagagcgcaggccaggaatctcgaccagagtgggactaatgtcgcaaaggtgatgaaggagtttgtagggggaaacacccctaatgtgctcacacttgttgacaattggtaccaggtgacacagggtataggacgaaacattagagcaatccgcagagcaagggccaatccgcagttaggggcttatgcaccaccccctcacattatcggtaggatctcggctgagggaggggagcaggtcgagagagtcgtggaaggacccgcacaggccatgagcagagggacgatgatcgtaggagcggccacaggcggcatcctgcttttgctcgatgtggtgtcccttgcgtatgagtcaaaacacctgcttgagggcgcaaagtcggagtccgcggaagaactgaagaagcgagcacaagaactggagggcaagctaaattttctcaccaagatccacgaaatgttgcagccaggccaggaccagtag

SEQ ID NO: 241230 - DNA, 1350 bp, Artificial Sequence
  derived and/or modified sequence
atgcatagttggacatgggatccgcattccagcgagcaacttgacctggcacagagtctttcagaggaagaccccttatctagcctgaggggctccatccaacctcaaccaccagctgaagcacctgacaaaggcggatcacaggctaataatgaccccggcggatgggacccaggatgcagctctagccaggtactcggtcgaacccgcggaccctgcttaggcgtccgtgtgagagaagaagaggctgggacacgtgtaaaggaaaacctgcccgtttggactgtcaccggagagctccagggcaaaccactgggaaaccctgccgctggcacaatgaaccccgagtcttccatttttatcgaggattatttgaagtactttcaggatcaggttagcagggagaacctgctacagctgcttactgatgacgaagcatggaacgggttcgttgcagcggccgagttgcctagggacgaggctgacgaattgcgaaaggcgctgaataaactggcctctcacatggtgatgaaggacaaaaatcggcacgacaaagatcaacagcacaggcaatggtttctcaaagagtttcctaggctcaagagggagctcgaagaccatattagaaagctgagggctttagccgaagaggttgaacaagtccacagggggactacaatcgcaaatgtggtgtcgaacagcgtaggcaccacctctggaatactgactctgctgggtctgggattagcacccttcaccgagggtatctccttcgtgctgctcgacacaggaatgggattgggcgctgccgccgccgtggcgggcatcacctgtagtgtggtagagcttgtgaataagttgagggcccgggctcaggcaagaaacttggaccaaagtggcacaaacgtcgccaaggttatgaaggaatttgtcggaggaaatactcccaatgttctaactctcgtggacaattggtaccaggtcacccagggaattggccgcaacatcagagctattcgccgcgcgagggcgaacccccaattaggtgcatacgcccctccccctcacatcataggccggatctcagcagagggaggcgaacaagtggaaagagtggtcgaaggccctgcacaggccatgtccagaggcactatgattgttggcgccgctacagggggaattctgctgttactggacgtggtgagtctggcttacgaatcaaaacacctgcttgagggtgctaagtctgaatctgcagaggaactgaagaagcgcgcacaggagttagagggcaagcttaatttccttaccaagatccacgagatgttacaaccaggccaggaccagtag

SEQ ID NO: 241231 - DNA, 225 bp, Artificial Sequence
  derived and/or modified sequence
atgaacccagagagttcgattttcatcgaagattatctgaaatatttccaggaccaggtgtcaagggagaatctgctccagctgctgaccgacgatgaagcttggaacggcttcgttgcagccgctgagctgccacgcgacgaggccgacgaactcaggaaagctctcaataagctagcctcgcatatggtaatgaaggacaaaaatagacacgataaggactag

SEQ ID NO: 241232 - DNA, 387 bp, Artificial Sequence
  derived and/or modified sequence
atgaatcctgagagctcaatcttcatcgaggattacctaaagtatttccaggatcaagtgtctagggagaacctgttacaattgctgaccgacgacgaggcctggaatggcttcgtcgctgcagctgagctgccacgggacgaagctgatgagctgcgtaaggcactcaataagctcgcatcccatatggtgatgaaagacaagaaccgacacgataaagatcagcagcacagacagtggttccttaaagaattcccacggctaaagagagagctggaggatcacattcggaaactgagagctctggcagaggaggtggaacaagtgcacagaggcaccacaatagcgaacgtggtcagtaacagcgtaggtacaacctccgggtag

SEQ ID NO: 241233 - DNA, 1014 bp, Artificial Sequence
  derived and/or modified sequence
atgaaccctgagagcagcatcttcatcgaggactacctgaagtacttccaggaccaggtgtcccgggagaacctgctgcagctgctgacagatgatgaggcctggaatggatttgtggccgctgctgagctgcccagagatgaagcagatgagctgaggaaggccctgaacaagctggccagccacatggtgatgaaggacaagaacagacatgacaaggaccagcagcaccggcagtggttcctgaaggagttcccccggctgaagcgggagctggaggaccacatcaggaagctgcgggccctggccgaggaggtggagcaggtgcaccggggcaccaccatcgccaacgtggtgagcaacagcgtgggcaccaccagcggcatcctgaccctgctgggcctgggcctggcccccttcacagagggcatcagctttgtgctgctggacaccggcatgggcctgggcgctgctgctgctgtggccggcatcacctgcagcgtggtggagctggtgaacaagctgcgggcccgggcccaggccaggaacctggaccagagcggcaccaacgtggccaaggtgatgaaggagtttgtgggcggcaacaccccaaatgtgctgaccctggtggacaactggtaccaggtgacccagggcatcggcaggaacatccgggccatccggcgggcccgggccaacccccagctgggcgcctatgcccccccaccccacatcatcggccgcatctctgctgagggcggggagcaggtggagcgggtggtggagggccctgcccaggccatgagccggggcaccatgattgtgggcgccgccactggaggcatcctgctgctgctggatgtggtgtccctggcctatgagagcaagcacctgctggagggcgccaagtctgagagcgctgaggagctgaagaagagggcccaggagctggagggcaagctgaacttcctgaccaagatccacgagatgctgcagcccggccaggaccagtag

SEQ ID NO: 241234 - DNA, 1350 bp, Artificial Sequence
  derived and/or modified sequence
atgcacagctggacctgggacccccacagcagcgagcagctggacctggcccagagcctgtctgaggaggaccccctgagcagcctgcggggcagcatccagccccagcccccagctgaggccccagacaagggcggcagccaggccaacaatgaccccggcggctgggaccccggctgcagcagcagccaggtgctgggccgcacccggggcccctgcctgggcgtgcgggtgcgggaggaggaggccggcaccagggtgaaggagaacctgcctgtgtggacagtgactggagagctgcagggcaagcccctgggcaacccagctgctggcaccatgaaccctgagagcagcatcttcatcgaggactacctgaagtacttccaggaccaggtgtcccgggagaacctgctgcagctgctgacagatgatgaggcctggaatggatttgtggccgctgctgagctgcccagagatgaagcagatgagctgaggaaggccctgaacaagctggccagccacatggtgatgaaggacaagaacagacatgacaaggaccagcagcaccggcagtggttcctgaaggagttcccccggctgaagcgggagctggaggaccacatcaggaagctgcgggccctggccgaggaggtggagcaggtgcaccggggcaccaccatcgccaacgtggtgagcaacagcgtgggcaccaccagcggcatcctgaccctgctgggcctgggcctggcccccttcacagagggcatcagctttgtgctgctggacaccggcatgggcctgggcgctgctgctgctgtggccggcatcacctgcagcgtggtggagctggtgaacaagctgcgggcccgggcccaggccaggaacctggaccagagcggcaccaacgtggccaaggtgatgaaggagtttgtgggcggcaacaccccaaatgtgctgaccctggtggacaactggtaccaggtgacccagggcatcggcaggaacatccgggccatccggcgggcccgggccaacccccagctgggcgcctatgcccccccaccccacatcatcggccgcatctctgctgagggcggggagcaggtggagcgggtggtggagggccctgcccaggccatgagccggggcaccatgattgtgggcgccgccactggaggcatcctgctgctgctggatgtggtgtccctggcctatgagagcaagcacctgctggagggcgccaagtctgagagcgctgaggagctgaagaagagggcccaggagctggagggcaagctgaacttcctgaccaagatccacgagatgctgcagcccggccaggaccagtag

SEQ ID NO: 241235 - DNA, 225 bp, Artificial Sequence
  derived and/or modified sequence
atgaaccctgagagcagcatcttcatcgaggactacctgaagtacttccaggaccaggtgtcccgggagaacctgctgcagctgctgacagatgatgaggcctggaatggatttgtggccgctgctgagctgcccagagatgaagcagatgagctgaggaaggccctgaacaagctggccagccacatggtgatgaaggacaagaacagacatgacaaggactag

SEQ ID NO: 241236 - DNA, 387 bp, Artificial Sequence
  derived and/or modified sequence
atgaaccctgagagcagcatcttcatcgaggactacctgaagtacttccaggaccaggtgtcccgggagaacctgctgcagctgctgacagatgatgaggcctggaatggatttgtggccgctgctgagctgcccagagatgaagcagatgagctgaggaaggccctgaacaagctggccagccacatggtgatgaaggacaagaacagacatgacaaggaccagcagcaccggcagtggttcctgaaggagttcccccggctgaagcgggagctggaggaccacatcaggaagctgcgggccctggccgaggaggtggagcaggtgcaccggggcaccaccatcgccaacgtggtgagcaacagcgtgggcaccaccagcggctag

SEQ ID NO: 241237 - DNA, 1014 bp, Artificial Sequence
  derived and/or modified sequence
atgaaccccgagagcagcatcttcatcgaggactacctgaagtactttcaggatcaagtcagtcgcgagaatctgctgcaactcctgactgatgatgaggcttggaatggtttcgttgcagctgcggaacttccacgtgatgaagctgatgagcttaggaaggcactgaataagctggcgagtcacatggtcatgaaagacaaaaaccggcacgacaaggaccagcaacatcggcagtggtttttaaaagaattcccgaggctaaaacgcgaactggaggaccacatcagaaagttgcgcgccctggccgaggaagtggaacaagtgcaccgaggtacaacaattgccaatgtagtgagcaactccgttggcacaacttctggaatactcacgctattgggcctggggttagctcctttcacagaaggtatctcctttgtgctcctggacaccgggatgggcctcggcgctgccgcggctgtcgccggcataacgtgtagcgtagtggaattggtcaacaagctacgggcacgggcccaggctagaaacctcgaccagtctggtaccaacgtggctaaggtgatgaaggaattcgtgggcggtaacacgcctaatgtcctgacactagtggacaattggtaccaggtaacgcaggggatcgggcgaaacattcgcgcaatccggcgggcaagagccaaccctcagctgggcgcgtacgcaccacccccccacatcattggacgtatttcagcggaaggtggggagcaggtagaacgggtggtcgaagggccagctcaggccatgtcacgcggcacgatgatcgttggcgctgccactggagggatcctcctcctgttagatgtagtatctctggcctacgagtctaaacacctgctggaaggggccaaatcggaatccgcagaggaattaaagaaaagagctcaggaactcgaaggcaagctgaactttctgaccaaaatacatgagatgctgcaaccaggccaggatcagtag

SEQ ID NO: 241238 - DNA, 1014 bp, Artificial Sequence
  derived and/or modified sequence
atgaaccccgagagcagcatcttcatcgaggactacctgaagtactttcaggaccaggtctcacgagagaacctcctccagcttttgacagatgacgaggcttggaacgggttcgtggctgctgctgagctgcctagagatgaggctgatgagctgcgtaaggcattgaacaagttggcctctcatatggtcatgaaggataaaaacaggcatgataaggaccaacagcaccggcagtggttcctgaaagagttcccaagactgaagagagaactggaggaccacatccggaagttgagggcgctggccgaggaggtagaacaggtgcatagaggaaccacaatcgcaaacgtagtgtctaatagtgtagggacgacatcaggtatccttaccctcctgggcctgggattggctcctttcacggagggtattagtttcgtgctcctagacacagggatgggcctgggcgctgccgccgccgtagctggcattacctgtagcgtggtagaactggtaaacaagctccgagctcgcgcccaagctaggaatctggatcagtcgggtacgaacgtcgctaaagtaatgaaggaattcgttggaggtaatactcctaatgtcttgacactggtcgacaactggtatcaggtgacccagggcatcggtagaaatatccgtgccatcagacgtgctcgggctaacccacaactcggtgcctacgcccctcccccccatattatcggccgcatcagcgctgagggaggagagcaggtcgagcgtgtggtggaggggcccgctcaggctatgtcccgcggaaccatgattgtgggtgccgccaccggaggcattctgttactactagatgtcgtgtccctggcttatgaaagtaagcatctgcttgagggagcaaagtccgagagtgcggaagaactgaagaaaagggcgcaagagctggagggaaaacttaatttcctgactaagattcatgaaatgctgcagcctggacaggaccaatag

SEQ ID NO: 241239 - DNA, 1350 bp, Artificial Sequence
  derived and/or modified sequence
atgcacagctggacctgggacccccacagcagcgagcagctggacctagcccagtccctgtccgaagaagaccccttgagttccctgagagggtccatacagccccagccccccgcggaagcccccgataagggtgggagtcaagccaacaatgatcccggaggctgggatcccgggtgttcttcctcccaggtgctcggaaggaccagggggccctgcctgggagttcgggtccgggaggaggaagccggaacccgagtgaaggagaacttacctgtctggaccgtgaccggtgaactccaagggaagcccctgggaaaccccgccgccggcacaatgaatcctgaatcctctattttcatcgaggactatctcaagtatttccaagatcaggtgagtcgagaaaaccttctccagttactgactgatgatgaggcttggaatggctttgttgccgccgcagagctgccaagggacgaggccgacgaattaagaaaagccctgaacaaactggcatctcacatggtgatgaaagacaagaatcgccacgataaagaccagcagcaccgccagtggtttctcaaagagttcccacgcctgaaaagagagctggaagaccatattcgaaaacttcgcgccctggctgaagaagtggaacaggtgcatcggggaactaccatagccaacgtggtaagcaattcagtgggcaccaccagcggcatattgaccctgctcggcctgggccttgctccgtttactgagggcatctctttcgttctgttagataccggaatgggactgggagcagctgcagcagtcgctgggatcacctgttccgtggtggagttggttaataagctgagagccagagcccaagcacgaaacctcgatcaatccggaacgaacgtcgcaaaggttatgaaggagttcgtgggcggtaatactcctaacgttctcacgcttgtcgacaactggtatcaagtgacccagggaattggccgaaacatccgggctatacgccgggcacgagctaatccccagttgggagcctacgcccctccccctcacattataggccggatctctgccgagggaggagagcaagtggaaagggttgtcgagggccctgctcaggccatgtcacggggcacaatgatcgttggagctgctaccgggggaattctccttcttctcgacgtggttagtctggcttacgagtctaaacacctgttggaaggcgcgaaaagcgaatccgctgaggagctcaagaaaagggcgcaggaactggaaggtaaattaaactttcttactaagatccacgagatgcttcagcccggccaagaccaatag

SEQ ID NO: 241240 - DNA, 225 bp, Artificial Sequence
  derived and/or modified sequence
atgaaccccgagagcagcatcttcatcgaggactacctgaagtacttccaggaccaggtgtcccgagagaacctgctgcagctcctgactgacgacgaagcttggaacggctttgtagcggccgcagagctaccccgcgatgaagctgacgagctccggaaggcgctgaataagcttgcctctcacatggtcatgaaggataagaaccgtcatgacaaggattag

SEQ ID NO: 241241 - DNA, 387 bp, Artificial Sequence
  derived and/or modified sequence
atgaaccccgagagcagcatcttcatcgaggactacctgaagtacttccaggaccaagtctcaagggaaaatttattgcagctgctgactgacgatgaggcttggaacggtttcgtggctgccgcagaactgcccagggatgaagccgatgagctcagaaaagctctgaataagctggcatcccacatggttatgaaggacaaaaacagacacgacaaagaccagcagcacaggcagtggttcttgaaggagttccctcgcctgaagcgggagctcgaagaccacattcggaaacttagggccctggctgaagaagtagaacaggtccatagggggacaactatcgccaacgtggtctctaattctgttggaacaacttccggctag

SEQ ID NO: 241242 - DNA, 1014 bp, Artificial Sequence
  derived and/or modified sequence
atgaaccctgaaagctcaatcttcattgaggactacttgaaatatttccaagatcaagtcagtcgtgaaaatctcctgcagttgctgaccgatgacgaggcctggaatgggtttgttgcggcagccgagttaccccgagacgaggctgacgagctccgcaaggcactgaataaactagcatcacacatggtgatgaaagacaagaaccgtcatgataaggaccagcaacatagacaatggttcctaaaggaatttccaagactgaagcgcgagctggaggaccatattagaaagctgagggctttggctgaggaagtcgagcaagtgcacagaggaacaactatcgcaaatgtcgtaagtaacagcgtaggcacaacttcaggtattcttacactgctcggactcggcttggcaccatttactgaagggattagttttgtactgctggatactggcatgggcctgggtgccgctgccgcagtagcagggataacctgttctgtggtggagttagtcaacaagctcagggccagggcgcaggcgcgaaaccttgaccagagcgggactaacgtcgctaaagtgatgaaagaatttgtcgggggtaacaccccgaacgtgctgacgctggtggacaattggtaccaggttacgcagggcattggtagaaacattcgggcaattcgacgggcaagggccaacccacagcttggcgcttacgccccacctcctcacatcattggtagaatctcagctgagggcggtgaacaggtcgagcgcgttgtcgaagggcctgcacaagcaatgtcacgtggcactatgattgtgggtgctgcgactgggggaattttacttctgctcgacgtggtctccttggcctacgaaagtaagcacctgcttgaaggcgcaaagtctgagtccgctgaagagctgaaaaagcgggcacaggaactcgaggggaaactgaatttccttacaaagatccatgaaatgctgcagcctggacaggaccagtag

SEQ ID NO: 241243 - DNA, 1014 bp, Artificial Sequence
  derived and/or modified sequence
atgaaccctgaatccagtatttttattgaggattacctaaagtactttcaagaccaggtatcccgggaaaacctgcttcagttattgacggacgatgaggcatggaacggtttcgtggccgctgcagagctgccaagggacgaagctgatgagctgcggaaagcgctgaacaagcttgcctctcacatggtcatgaaagacaagaatagacatgacaaggaccagcagcacagacaatggtttctgaaagaattcccacgactgaaacgtgaactggaagatcacattagaaagctgcgcgcactggccgaggaggtggaacaggtacatcgcggaaccactatcgccaatgttgtatcaaacagtgtgggaactaccagcggcattctgaccctactggggttaggattagccccatttactgaaggaatctctttcgtactcttggatacagggatgggcctaggcgcagcagccgcagttgccggtatcacttgcagcgttgtggagctcgtgaacaaactacgggctagggcccaagcccgaaacttggaccagagcgggacaaacgtagctaaggtgatgaaagagttcgtggggggaaatacaccaaatgtgctcacgctcgtcgataattggtaccaggtgacccagggaatcggtaggaacatacgagccatccgccgagctcgagccaatccacagttgggagcctatgctccccctccacatatcataggcagaatatccgcagagggcggagagcaggtcgaaagggtagtggaggggcctgctcaggctatgagccgcggtaccatgattgtgggagcagccaccggaggaatattgttattgctggatgtggtgtcactggcttatgaatccaagcacctccttgaaggagctaagtctgaatccgcagaggagctgaaaaagcgcgctcaagagctcgagggcaaactgaattttctcacaaaaatccacgaaatgctgcagcccggacaggaccagtag

SEQ ID NO: 241244 - DNA, 1350 bp, Artificial Sequence
  derived and/or modified sequence
atgcatagctggacttgggaccctcattcctctgagcaattggatctggctcaatcgctctcagaggaagatccactgagcagccttagggggtctatacagcctcagccccctgcagaagcccctgacaagggtggctctcaggccaacaacgaccccggtgggtgggacccgggatgttcctcttcccaggtcctgggtcgcacgcgcggaccatgcctcggggtccgagtgagggaggaagaggccggtactcgtgttaaggaaaacctgcctgtgtggactgtgacgggagaattgcaaggtaaacccctgggtaatccggcagccggtacaatgaatcctgaaagtagtatattcatagaggactatctcaagtactttcaggaccaggtgtcaagggagaatctcctccaactcctaacggatgatgaggcttggaatggcttcgtggccgctgccgagctgcccagagacgaggccgatgaattacggaaagccctgaataaactggcctcccacatggttatgaaggacaagaaccggcatgacaaggatcagcagcaccgtcagtggtttcttaaggagtttcccagactcaaacgagagttggaagaccatattcggaaacttagggccctcgctgaagaggtagagcaagtgcaccgcggaacaactatcgccaacgtggtatctaactctgtggggacaacgagtggtatcctgactctgttgggcttaggcctggccccattcactgagggcatttcctttgtcctgctggacacggggatgggcttgggtgccgctgccgctgtcgcaggcattacatgctcagtggtggaactggttaataagctcagagccagggcccaggctagaaacttggaccagagtggtactaatgttgccaaagttatgaaggagttcgtgggcggtaacactccaaacgtgctgaccttggtggataattggtatcaagtgacacaggggataggcaggaacattcgagctattcgtcgggctcgcgcaaacccccagctaggtgcctacgcgccaccaccgcatattatcgggagaatctccgccgagggtggagagcaggtggagagggtagtagaggggccagcccaggctatgtcccggggaacaatgatcgtaggggcagcgactgggggtatcctgctgctgctggatgtggtctctctggcttatgagagcaaacacctgctggaaggagctaagagtgagagtgcggaagaactgaagaagcgggctcaggagcttgagggtaaactgaatttcttaaccaagattcacgagatgcttcagcctggacaagaccagtag

SEQ ID NO: 241245 - DNA, 225 bp, Artificial Sequence
  derived and/or modified sequence
atgaacccagagtcaagtatatttatagaggattacttgaagtacttccaggatcaggtgagtagggagaacctgctccagctgctgacagatgacgaggcatggaatggattcgtcgcagcagccgaattacctagagacgaagcggatgagcttcggaaggccctgaacaagttagcttcccatatggtgatgaaggacaagaacaggcatgataaagactag

SEQ ID NO: 241246 - DNA, 387 bp, Artificial Sequence
  derived and/or modified sequence
atgaacccagaatcgtctatcttcattgaagactatctgaaatactttcaggaccaagtgagccgcgagaatctgttacagctgttgacagacgatgaggcctggaatggctttgtggccgcagccgaactgccgcgagacgaggctgatgagctccgaaaagctctaaacaaactggcttctcatatggtcatgaaggacaagaataggcacgataaagaccagcagcacagacagtggttcctaaaggagtttccgaggctcaaacgggaactggaggatcacataagaaagcttcgagcgttggcggaagaagtggagcaggtccatcggggtacaactatcgcaaacgttgttagcaactctgtcggcacaactagcggctag

SEQ ID NO: 241247 - DNA, 2685 bp, Artificial Sequence
  derived and/or modified sequence
atcagacagtaaaacaggggcagagcctggaattgcactgaggcttgagtctgacttctctcccccacctgctgtgcccttaaactgcagagatcggggcgggggttggggggcaagcggctcagatgggttcaaaaaactccccaggctcaactctggttctgactgcctgagacatgggcagctgacacagcagaccttgaatcctgaggatgtgaggcagggtatatctgggaggccggaggacgtgtctggttattacacagatgcacagctggacgtgggatccacacagctcagaacagttggatcttgctcagtctctgtcagaggaagatcccttggacaagaggaccctgccttggtgtgagagtgagggaagaggaagctggaacgagggttaaggaaaaccttccagtctggacagtgactggagagctccaaggaaagcccctcggtaacccagccgctggcaccatgaacccagagagcagtatctttattgaggattaccttaagtatttccaggaccaagtgagcagagagaatctgctacaactgctgactgatgatgaagcctggaatggattcgtggctgctgctgaactgcccagggatgaggcagatgagctccgtaaagctctgaacaagcttgcaagtcacatggtcatgaaggacaaaaaccgccacgataaagaccagcagcacaggcagtggtttttgaaagagtttcctcggttgaaaagggagcttgaggatcacataaggaagctccgtgcccttgcagaggaggttgagcaggtccacagaggcaccaccattgccaatgtggtgtccaactctgttggcactacctctggcatcctgaccctcctcggcctgggtctggcacccttcacagaaggaatcagttttgtgctcttggacactggcatgggtctgggagcagcagctgctgtggctgggattacctgcagtgtggtagaactagtaaacaaattgcgggcacgagcccaagcccgcaacttggaccaaagcggcaccaatgtagcaaaggtgatgaaggagtttgtgggtgggaacacacccaatgttcttaccttagttgacaattggtaccaagtcacacaagggattgggaggaacatccgtgccatcagacgagccagagccaaccctcagttaggagcgtatgccccacccccgcatatcattgggcgaatctcagctgaaggcggtgaacaggttgagagggttgttgaaggccccgcccaggcaatgagcagaggaaccatgatcgtgggtgcagccactggaggcatcttgcttctgctggatgtggtcagccttgcatatgagtcaaagcacttgcttgagggggcaaagtcagagtcagctgaggagctgaagaagcgggctcaggagctggaggggaagctcaactttctcaccaagatccatgagatgctgcagccaggccaagaccaatgaccccagagcagtgcagccaccagggcagaaatgccgggcacaggccaggacaaaatgcagacttttttttttttttttttttttttttgagatggagtctcgctctatcgcccaggatggagtgcagtggctcaatctcggctcactgcaaactccgcctcccgggttcacaccattctccggcctcagtctcccgagtagctgggactacaggcacctgccaccacgcccggctaatttttttgtattttcactggagacggggtttcactgtgttagccacgatggtctccatctcctgacctcgtgatctgcccacctcggcctcccaaagtgctgggattacaggcgtgagccaccgcgcctggccaaaatgcagacattttattagggggataaggagggcaaggtaaagcttatggaactgagtgttagtgactttggcatttgtgtagctgagcacagcaagggaggggttaatgcagatggcaagtgcaccaaggagaaggcaggaacactggagcctgcaataagggaggagagaggactggagagtgtggggaatgggaagaagtagtttactttggactaaagaatatattgggcgaagaatagagggggagcttgcaggaaccagcaatgagaaggccaggaaaagaaagagctgaaaatggagaaaaccagagttagaactgttggatacaggagaagaaacagcagctccactaccgacccccccccaggtttgatgtccttccaagaataaagtctttccctggtgatggtctctcgctctgtctttccagcatccactctcccttgtccttctgggggtgtatcacagtcagccagtggcttcttcatgatggtggttggggtggttgtcatgtgacgggtcccctccaggttactaaagggtgcatgtcccctgcttgaaccctgagaggcaggtggtaggccatggccacaatccccagctgaggagcaggtgtccctgagaacccaaacttcccagagagtatctgagaaccaaccaatgaaaacagtcccatcgctcttagccggtaagtaaacagtcagaagattagcatgaaagcagtttagcattgggaggaagcacagatctctagagctgtcctgtcgctgcccaggattgacctgtgtgtaagtcccaataaactcacctactcacca

SEQ ID NO: 241248 - DNA, 2544 bp, Artificial Sequence
  derived and/or modified sequence
gtgctggggagcagcgtgtttactgtgcttggtcatgagctgctgggaagttgtgactttcactttccctttcgaattccagggtatatctgggaggccggaggacgtgtctggttattacacagatgcacagctggacgtgggatccacacagctcagaacagttggatcttgctcagtctctgtcagaggaagatcccttggacaagaggaccctgccttggtgtgagagtgagggaagaggaagctggaacgagggttaaggaaaaccttccagtctggacagtgactggagagctccaaggaaagcccctcggtaacccagccgctggcaccatgaacccagagagcagtatctttattgaggattaccttaagtatttccaggaccaagtgagcagagagaatctgctacaactgctgactgatgatgaagcctggaatggattcgtggctgctgctgaactgcccagggatgaggcagatgagctccgtaaagctctgaacaagcttgcaagtcacatggtcatgaaggacaaaaaccgccacgataaagaccagcagcacaggcagtggtttttgaaagagtttcctcggttgaaaagggagcttgaggatcacataaggaagctccgtgcccttgcagaggaggttgagcaggtccacagaggcaccaccattgccaatgtggtgtccaactctgttggcactacctctggcatcctgaccctcctcggcctgggtctggcacccttcacagaaggaatcagttttgtgctcttggacactggcatgggtctgggagcagcagctgctgtggctgggattacctgcagtgtggtagaactagtaaacaaattgcgggcacgagcccaagcccgcaacttggaccaaagcggcaccaatgtagcaaaggtgatgaaggagtttgtgggtgggaacacacccaatgttcttaccttagttgacaattggtaccaagtcacacaagggattgggaggaacatccgtgccatcagacgagccagagccaaccctcagttaggagcgtatgccccacccccgcatatcattgggcgaatctcagctgaaggcggtgaacaggttgagagggttgttgaaggccccgcccaggcaatgagcagaggaaccatgatcgtgggtgcagccactggaggcatcttgcttctgctggatgtggtcagccttgcatatgagtcaaagcacttgcttgagggggcaaagtcagagtcagctgaggagctgaagaagcgggctcaggagctggaggggaagctcaactttctcaccaagatccatgagatgctgcagccaggccaagaccaatgaccccagagcagtgcagccaccagggcagaaatgccgggcacaggccaggacaaaatgcagacttttttttttttttttttttttttttgagatggagtctcgctctatcgcccaggatggagtgcagtggctcaatctcggctcactgcaaactccgcctcccgggttcacaccattctccggcctcagtctcccgagtagctgggactacaggcacctgccaccacgcccggctaatttttttgtattttcactggagacggggtttcactgtgttagccacgatggtctccatctcctgacctcgtgatctgcccacctcggcctcccaaagtgctgggattacaggcgtgagccaccgcgcctggccaaaatgcagacattttattagggggataaggagggcaaggtaaagcttatggaactgagtgttagtgactttggcatttgtgtagctgagcacagcaagggaggggttaatgcagatggcaagtgcaccaaggagaaggcaggaacactggagcctgcaataagggaggagagaggactggagagtgtggggaatgggaagaagtagtttactttggactaaagaatatattgggcgaagaatagagggggagcttgcaggaaccagcaatgagaaggccaggaaaagaaagagctgaaaatggagaaaaccagagttagaactgttggatacaggagaagaaacagcagctccactaccgacccccccccaggtttgatgtccttccaagaataaagtctttccctggtgatggtctctcgctctgtctttccagcatccactctcccttgtccttctgggggtgtatcacagtcagccagtggcttcttcatgatggtggttggggtggttgtcatgtgacgggtcccctccaggttactaaagggtgcatgtcccctgcttgaaccctgagaggcaggtggtaggccatggccacaatccccagctgaggagcaggtgtccctgagaacccaaacttcccagagagtatctgagaaccaaccaatgaaaacagtcccatcgctcttagccggtaagtaaacagtcagaagattagcatgaaagcagtttagcattgggaggaagcacagatctctagagctgtcctgtcgctgcccaggattgacctgtgtgtaagtcccaataaactcacctactcacca

SEQ ID NO: 241249 - DNA, 1421 bp, Artificial Sequence
  derived and/or modified sequence
attacacagatgcacagctggacgtgggatccacacagctcagaacagttggatcttgctcagtctctgtcagaggaagatcccttgtcaagcctgaggggcagtatccagcctcaacccccagcagaggctccagacaaaggtgggagccaggccaacaatgacccaggaggatgggatcctggatgcagctcctcacaagtattgggcaggacaagaggaccctgccttggtgtgagagtgagggaagaggaagctggaacgagggttaaggaaaaccttccagtctggacagtgactggagagctccaaggaaagcccctcggtaacccagccgctggcaccatgaacccagagagcagtatctttattgaggattaccttaagtatttccaggaccaagtgagcagagagaatctgctacaactgctgactgatgatgaagcctggaatggattcgtggctgctgctgaactgcccagggatgaggcagatgagctccgtaaagctctgaacaagcttgcaagtcacatggtcatgaaggacaaaaaccgccacgataaagaccagcagcacaggcagtggtttttgaaagagtttcctcggttgaaaagggagcttgaggatcacataaggaagctccgtgcccttgcagaggaggttgagcaggtccacagaggcaccaccattgccaatgtggtgtccaactctgttggcactacctctggcatcctgaccctcctcggcctgggtctggcacccttcacagaaggaatcagttttgtgctcttggacactggcatgggtctgggagcagcagctgctgtggctgggattacctgcagtgtggtagaactagtaaacaaattgcgggcacgagcccaagcccgcaacttggaccaaagcggcaccaatgtagcaaaggtgatgaaggagtttgtgggtgggaacacacccaatgttcttaccttagttgacaattggtaccaagtcacacaagggattgggaggaacatccgtgccatcagacgagccagagccaaccctcagttaggagcgtatgccccacccccgcatatcattgggcgaatctcagctgaaggcggtgaacaggttgagagggttgttgaaggccccgcccaggcaatgagcagaggaaccatgatcgtgggtgcagccactggaggcatcttgcttctgctggatgtggtcagccttgcatatgagtcaaagcacttgcttgagggggcaaagtcagagtcagctgaggagctgaagaagcgggctcaggagctggaggggaagctcaactttctcaccaagatccatgagatgctgcagccaggccaagaccaatgaccccagagcagtgcagccaccagggcagaaatgccgggcacaggccaggacaaaatgcagac

SEQ ID NO: 241250 - DNA, 611 bp, Artificial Sequence
  derived and/or modified sequence
ggggaaaacagcttagatgggttcacaaagctccccgggctcagctctggttctgacaccctcagacacggccagctgaccccagaagaaaggacaagaggaccctgccttggtgtgagagtgagggaagaggaagctggaacgagggttaaggaaaaccttccagtctggacagtgactggagagctccaaggaaagcccctcggtaacccagccgctggcaccatgaacccagagagcagtatctttattgaggattaccttaagtatttccaggaccaagtgagcagagagaatctgctacaactgctgactgatgatgaagcctggaatggattcgtggctgctgctgaactgcccagggatgaggcagatgagctccgtaaagctctgaacaagcttgcaagtcacatggtcatgaaggacaaaaaccgccacgataaagaccagcagcacaggcagtggtttttgaaagagtttcctcggttgaaaagggagcttgaggatcacataaggaagctccgtgcccttgcagaggaggttgagcaggtccacagaggcaccaccattgccaatgtggtgtccaactctgttggcactacctctggcat

SEQ ID NO: 241251 - DNA, 1014 bp, Artificial Sequence
  derived and/or modified sequence
atgaacccagagtcctcaattttcatcgaagattacctaaaatacttccaagaccaggtttctagggaaaacctactccagctacttaccgacgatgaagcctggaacggattcgtggctgcagcagagcttcctagagatgaagctgacgagctgcgcaaagccctcaacaaactggcctctcatatggtcatgaaggacaagaatcggcacgacaaagaccaacagcatcgacaatggttcctcaaagaattccccagactcaagcgggagcttgaggaccacatcagaaaattacgggccttagctgaggaggtcgaacaggtgcatcggggcacaacgatagccaatgtagtgagcaacagcgtagggacaactagcggcatccttacattactggggctaggactcgctcccttcacggagggaatctctttcgtgctcctcgacactggaatggggttgggagccgcagctgcagtggccggaataacttgttctgtggtggaactggttaataagttacgagcccgtgcccaggcccgaaatctcgatcagagcggaactaatgtcgccaaagtcatgaaggagtttgtggggggaaacacacctaatgtccttaccctcgtggacaactggtaccaagtgactcagggaattggcaggaatatcagagccattcgccgggcgcgcgctaatccccagctgggtgcctacgcaccgccccctcacattattggcagaatcagcgcggaggggggcgaacaggttgagcgtgtggtggagggccccgcccaggccatgagtcggggcactatgatcgtgggggccgcaacagggggcattttactcctgctggacgtagtctctctagcctacgagagtaaacacctgttagaaggagcaaaatcagagagcgcggaagaattaaaaaaacgggcacaagaactcgagggtaaattgaacttcttgacaaagattcatgagatgcttcaacctggccaggatcaatag

SEQ ID NO: 241252 - DNA, 1014 bp, Artificial Sequence
  derived and/or modified sequence
atgaaccctgagagtagcatcttcatcgaggactacttaaaatactttcaggatcaagtgagtcgcgaaaacctgcttcagcttctgaccgatgacgaggcctggaacggttttgttgctgcagctgagttaccgcgcgacgaggcagatgagttaagaaaggcgctgaataaactcgcctcacacatggtaatgaaggacaaaaaccgccacgataaggaccagcagcatagacaatggtttctcaaagagttcccccgcctgaagcgcgagctcgaagaccatatccgcaagttacgggcactcgcagaagaggtggaacaggtgcaccggggcaccacgatagctaatgtggtcagcaattctgttgggacgacatcaggcatccttacactcttaggtctcgggctagctccatttactgagggtatcagcttcgtcctgcttgacacgggcatgggccttggtgcagccgctgccgtcgctggaatcacatgctctgttgtagagctcgtaaataagcttagagctagggcacaggcccgcaacctcgatcagtctggcacaaacgtcgctaaggttatgaaggaattcgttggtggaaatactcccaatgtactgacactggtggacaattggtaccaggtgacccaaggcatcggccggaacatcagagctattcggagagctagagcaaacccccagctgggagcttatgccccccctccacacattatagggaggattagtgctgaaggaggagagcaggtcgaacgagtagtggagggtcccgcccaggctatgtccagaggcaccatgatcgtaggcgccgccactggtggtatactactcctcctggacgtagtaagcctggcttacgaaagcaagcatctccttgagggtgccaaaagtgaaagcgcagaagaactgaagaaaagagctcaggagctcgagggaaagttgaattttctaactaagattcatgagatgctgcagccaggacaggaccaatag

SEQ ID NO: 241253 - DNA, 1350 bp, Artificial Sequence
  derived and/or modified sequence
atgcattcctggacatgggatccacattcaagtgaacagctcgacctggctcagtcactgagcgaggaagatccactatctagcctgcgaggttctattcagccccagcctccagccgaggctccagacaaaggcgggtcccaagcaaacaatgatcctggcggatgggatcccggttgttctagctcccaggtgctggggcgcaccaggggtccttgcctaggggtcagggttagggaagaagaagccggaaccagggtgaaggaaaatctacccgtttggaccgtgacaggggaactacaaggaaaacctctcggaaaccctgccgccgggaccatgaatccagagtcctccatcttcattgaggattaccttaagtatttccaggaccaggtctcacgagaaaatctcctacagttgcttaccgatgatgaggcgtggaacggttttgtggctgccgccgagcttccacgtgacgaggccgacgaattgaggaaagctctgaataagcttgcgagtcacatggtaatgaaggacaaaaaccgacatgataaggaccagcaacaccggcaatggtttttgaaagaattccctagactcaagcgggaactggaggaccatatccgtaagctcagggcattggcagaggaagtggaacaagtgcatagaggtacgacaatcgccaacgtagtaagtaattccgtgggtacaacctctggcatactcaccctgcttgggctaggtctcgcaccttttactgaaggaatctcattcgtgttgttggatacgggcatgggcctcggcgcagcagccgccgtggcaggcattacttgttcagttgttgagttggttaacaaactgcgcgccagggcacaggcaaggaacctggatcagtccggcaccaacgttgctaaggtaatgaaggagttcgtcggtgggaacacaccaaacgtgcttactcttgtagacaattggtatcaggttactcaaggaatcggccgtaatattcgtgccataagaagggctcgagcgaacccccaactaggggcctatgcaccacccccccacatcattggaaggatcagcgcagaaggcggcgaacaggtcgaacgtgttgtagagggccctgcccaggcaatgtcacgtggaacaatgatcgtgggcgccgccaccggtgggatcttactccttttagacgtggttagccttgcatatgagagcaaacatctcctcgagggcgcaaaaagtgagtccgctgaagaactgaaaaaaagagcccaagaactggagggtaagctgaattttctgactaaaattcatgaaatgctacagccaggacaagatcagtag

SEQ ID NO: 241254 - DNA, 225 bp, Artificial Sequence
  derived and/or modified sequence
atgaaccctgaaagcagcattttcatcgaagactaccttaaatactttcaagaccaagtcagtagagagaatcttcttcaactgcttactgacgacgaagcctggaacggcttcgtggctgcagctgaactaccaagggacgaggcagatgaactgagaaaggctcttaacaagctagcttcccacatggttatgaaggataagaaccggcacgacaaagactag

SEQ ID NO: 241255 - DNA, 387 bp, Artificial Sequence
  derived and/or modified sequence
atgaaccccgaatcgtctattttcattgaggactatcttaaatacttccaggatcaggttagccgggaaaacctactgcaattgctgaccgacgacgaagcttggaacggatttgtggctgctgccgagctaccgagagatgaagctgacgagttgcggaaggcgttaaataagcttgccagccatatggttatgaaggataaaaatagacacgacaaagaccagcagcaccgccagtggttcctgaaggagttccctagactgaaaagagaactggaagaccatatccggaaactgagggcattggctgaggaggtggaacaagtgcatcgcgggactactatagcaaacgtggtgagcaattccgtgggcacaacatctggatag

SEQ ID NO: 241256 - DNA, 1014 bp, Artificial Sequence
  derived and/or modified sequence
atgaaccctgagtcctccatcttcatcgaagattaccttaaatatttccaggaccaggtctctcgcgaaaacctgttacagctgttaactgacgacgaagcatggaacggatttgtggccgccgccgaacttccccgggacgaagccgatgaactgagaaaagcactgaacaaactggccagtcatatggtcatgaaggacaagaataggcatgataaagaccagcaacacagacaatggttcctgaaggagtttccacgcctcaaacgtgaactggaagatcatatccgcaaattgcgagccctagctgaggaggtagagcaggtgcatcgcggtaccaccatcgctaatgtcgtatctaatagcgttggtacaacatcgggcatcctgactctgctgggattgggcctggccccctttacagaaggcatttcattcgtattgttggacactgggatgggcttaggagctgccgctgccgtggctgggattacatgttcagtggtggaattggtaaataagctccgcgcacgagcccaagcacgaaatctggaccaaagcggaacaaatgttgcaaaagtgatgaaagagttcgtaggcggtaatactcctaatgtcttgacattagtggataactggtaccaagtaacgcagggcattggacgaaatattcgagccatcagacgagcaagagccaacccgcagttgggagcatacgctcccccaccccacatcatcggaaggatatctgcagaaggcggggagcaggttgaaagggtggttgaaggtccagctcaagctatgtcaagaggcacaatgatcgttggcgctgctaccggggggatcctactgctgttggacgtggtgtcactggcctatgaatctaaacacctgcttgagggagcgaaatcagaaagtgccgaggaattaaaaaaacgggctcaagaacttgaaggtaagttaaatttccttacgaaaatccacgagatgttgcaacccggccaggaccagtag

SEQ ID NO: 241257 - DNA, 1014 bp, Artificial Sequence
  derived and/or modified sequence
atgaacccagagagctctatctttatcgaggactatctgaaatatttccaagaccaagtgagtagagaaaaccttttgcagctcctgactgatgatgaggcatggaacggttttgtcgcagccgccgagttgcccagagatgaagccgatgagctcagaaaggccttgaataaacttgcaagccacatggtaatgaaggacaagaacagacatgacaaggaccagcaacaccgccaatggttcctaaaggagttccccaggctaaaacgggaactggaggatcatatcaggaagctccgcgcgctggcagaagaagtagaacaagtccatagagggaccactattgctaacgtcgtgtcaaattccgtgggaaccaccagcggtattctgactcttctcggactgggattggcccctttcactgaaggtattagtttcgttctcttggacacgggaatgggactaggcgccgccgccgctgtcgccgggatcacatgcagcgtcgtcgaactggtgaacaagcttagagcccgagcccaagcccggaatctcgaccaatcgggtaccaacgtcgctaaagtcatgaaagagttcgtgggcggtaacacgccaaatgttttaacattagttgacaattggtaccaggttacacagggaataggcagaaatatcagagccatacggcgcgctagagcaaacccacagttaggagcatatgcaccgccaccccatattattggaagaatttctgcagaaggtggagagcaagtggagagagtggtggaggggcctgctcaggccatgagccgcggcacaatgattgtgggcgccgccacaggtgggatactcctcctgctcgatgttgtctcactcgcatacgaatccaaacatctgctcgaaggagcaaagagcgagtctgctgaggaattgaagaaaagggcacaagaactggagggtaagctcaactttctgactaaaattcacgagatgctgcaaccaggccaagaccagtag

SEQ ID NO: 241258 - DNA, 1350 bp, Artificial Sequence
  derived and/or modified sequence
atgcactcctggacgtgggaccctcacagttcagagcaacttgacctggcccagagcctttctgaagaagatccactcagtagcctcagagggtcaattcagccccagccgcctgccgaagcacctgataaagggggaagtcaagctaacaatgaccctgggggatgggatcctggatgcagcagctctcaggtcttaggacgaacacgcggcccctgtcttggagtgcgggtacgggaagaggaagccggtaccagggtgaaggagaacctccccgtgtggacagtcacaggcgaactacaaggcaaaccgcttggtaaccctgccgccggcacgatgaatcctgagtcttccatatttattgaggactacttaaagtacttccaggaccaagtctccagagagaatcttctgcagcttttaacagatgacgaagcttggaatggatttgttgccgcagccgaattgcctagagatgaggccgatgaactgcggaaagcactgaacaaactagctagtcacatggtcatgaaagataaaaacaggcacgataaggaccagcagcaccggcagtggttcctaaaagaatttccccgcttgaagagagagttggaggatcatattagaaagctaagagccctggccgaagaggtcgaacaggtgcatcggggcacaacaatagccaatgtggtaagcaatagtgttggaaccacctctggtatcttaacgttactggggctgggccttgcccctttcaccgagggcatctcctttgtgctgctggataccggtatgggtttaggagcagctgcagccgtggcaggtataacttgttcagtcgttgagctcgtaaataaactgcgcgcacgcgctcaggcccggaatttggatcagtctgggactaacgtggccaaagttatgaaagagtttgtcgggggcaatacacctaatgtgctcactttggttgataactggtaccaggtcacacaaggcatcgggaggaacatacgggccatcaggagagcacgtgctaatcctcagctgggcgcctacgcacccccgcctcacataatcggacgcatttctgcagagggaggagaacaagtcgaaagagtcgtggagggacctgctcaggcaatgtctaggggcactatgatcgttggcgcagccactgggggaatactcctactgctggacgtggttagccttgcatatgagagcaaacatctcctcgagggcgcaaaaagtgagtccgctgaagaactgaaaaaaagagcccaagaactggagggtaagctgaattttctgactaaaattcatgaaatgctacagccaggacaagatcagtag

SEQ ID NO: 241259 - DNA, 387 bp, Artificial Sequence
  derived and/or modified sequence
atgaacccagagtccagtatctttatcgaagattacctcaagtatttccaggaccaggtgtcacgagagaacctcctacaattgctgacagatgatgaggcctggaatggatttgttgccgcagccgaactgccccgtgacgaagccgacgaactccgtaaagccctcaacaagctggccagccacatggtaatgaaagacaagaaccgccacgacaaagaccagcagcacagacaatggtttttgaaggaatttccccgcctcaagcgagaactggaagatcacatccgtaagctgcgagctctggcagaagaggttgagcaggtacataggggtaccaccatcgcaaacgtagtttcaaatagtgtcggcaccacctccgggtag

SEQ ID NO: 241260 - DNA, 1014 bp, Artificial Sequence
  derived and/or modified sequence
atgaaccccgagagcagcatcttcatcgaggactacctgaagtacttccaggaccaggtgagcagagagaacctgctgcagctgctgaccgacgacgaggcctggaacggcttcgtggccgccgccgagctgcccagagacgaggccgacgagctgagaaaggccctgaacaagctggccagccacatggtgatgaaggacaagaacagacacgacaaggaccagcagcacagacagtggttcctgaaggagttccccagactgaagagagagctggaggaccacatcagaaagctgagagccctggccgaggaggtggagcaggtgcacagaggcaccaccatcgccaacgtggtgagcaacagcgtgggcaccaccagcggcatcctgaccctgctgggcctgggcctggcccccttcaccgagggcatcagcttcgtgctgctggacaccggcatgggcctgggcgccgccgccgccgtggccggcatcacctgcagcgtggtggagctggtgaacaagctgagagccagagcccaggccagaaacctggaccagagcggcaccaacgtggccaaggtgatgaaggagttcgtgggcggcaacacccccaacgtgctgaccctggtggacaactggtaccaggtgacccagggcatcggcagaaacatcagagccatcagaagagccagagccaacccccagctgggcgcctacgccccccccccccacatcatcggcagaatcagcgccgagggcggcgagcaggtggagagagtggtggagggccccgcccaggccatgagcagaggcaccatgatcgtgggcgccgccaccggcggcatcctgctgctgctggacgtggtgagcctggcctacgagagcaagcacctgctggagggcgccaagagcgagagcgccgaggagctgaagaagagagcccaggagctggagggcaagctgaacttcctgaccaagatccacgagatgctgcagcccggccaggaccagtag

SEQ ID NO: 241261 - DNA, 1350 bp, Artificial Sequence
  derived and/or modified sequence
atgcacagctggacctgggacccccacagcagcgagcagctggacctggcccagagcctgagcgaggaggaccccctgagcagcctgagaggcagcatccagccccagccccccgccgaggcccccgacaagggcggcagccaggccaacaacgaccccggcggctgggaccccggctgcagcagcagccaggtgctgggcagaaccagaggcccctgcctgggcgtgagagtgagagaggaggaggccggcaccagagtgaaggagaacctgcccgtgtggaccgtgaccggcgagctgcagggcaagcccctgggcaaccccgccgccggcaccatgaaccccgagagcagcatcttcatcgaggactacctgaagtacttccaggaccaggtgagcagagagaacctgctgcagctgctgaccgacgacgaggcctggaacggcttcgtggccgccgccgagctgcccagagacgaggccgacgagctgagaaaggccctgaacaagctggccagccacatggtgatgaaggacaagaacagacacgacaaggaccagcagcacagacagtggttcctgaaggagttccccagactgaagagagagctggaggaccacatcagaaagctgagagccctggccgaggaggtggagcaggtgcacagaggcaccaccatcgccaacgtggtgagcaacagcgtgggcaccaccagcggcatcctgaccctgctgggcctgggcctggcccccttcaccgagggcatcagcttcgtgctgctggacaccggcatgggcctgggcgccgccgccgccgtggccggcatcacctgcagcgtggtggagctggtgaacaagctgagagccagagcccaggccagaaacctggaccagagcggcaccaacgtggccaaggtgatgaaggagttcgtgggcggcaacacccccaacgtgctgaccctggtggacaactggtaccaggtgacccagggcatcggcagaaacatcagagccatcagaagagccagagccaacccccagctgggcgcctacgccccccccccccacatcatcggcagaatcagcgccgagggcggcgagcaggtggagagagtggtggagggccccgcccaggccatgagcagaggcaccatgatcgtgggcgccgccaccggcggcatcctgctgctgctggacgtggtgagcctggcctacgagagcaagcacctgctggagggcgccaagagcgagagcgccgaggagctgaagaagagagcccaggagctggagggcaagctgaacttcctgaccaagatccacgagatgctgcagcccggccaggaccagtag

SEQ ID NO: 241262 - DNA, 225 bp, Artificial Sequence
  derived and/or modified sequence
atgaaccccgagagcagcatcttcatcgaggactacctgaagtacttccaggaccaggtgagcagagagaacctgctgcagctgctgaccgacgacgaggcctggaacggcttcgtggccgccgccgagctgcccagagacgaggccgacgagctgagaaaggccctgaacaagctggccagccacatggtgatgaaggacaagaacagacacgacaaggactag

SEQ ID NO: 241263 - DNA, 387 bp, Artificial Sequence
  derived and/or modified sequence
atgaaccccgagagcagcatcttcatcgaggactacctgaagtacttccaggaccaggtgagcagagagaacctgctgcagctgctgaccgacgacgaggcctggaacggcttcgtggccgccgccgagctgcccagagacgaggccgacgagctgagaaaggccctgaacaagctggccagccacatggtgatgaaggacaagaacagacacgacaaggaccagcagcacagacagtggttcctgaaggagttccccagactgaagagagagctggaggaccacatcagaaagctgagagccctggccgaggaggtggagcaggtgcacagaggcaccaccatcgccaacgtggtgagcaacagcgtgggcaccaccagcggctag

SEQ ID NO: 241264 - RNA, 225 nt, Artificial Sequence
  derived and/or modified sequence
augaacccugaaagcagcauuuucaucgaagacuaccuuaaauacuuucaagaccaagucaguagagagaaucuucuucaacugcuuacugacgacgaagccuggaacggcuucguggcugcagcugaacuaccaagggacgaggcagaugaacugagaaaggcucuuaacaagcuagcuucccacaugguuaugaaggauaagaaccggcacgacaaagacuag

SEQ ID NO: 241265 - protein, 811 aa, Artificial Sequence
  derived and/or modified sequence
MKEEAFLRRRFSLCPPSSTPQKVDPRKLTRNLLLSGDNELYPLSPGKDMEPNGPSLPRDEGPPTPSSATKVPPAEYRLCNGSDKECVSPTARVTKKETLKAQKENYRQEKKRATRQLLSALTDPSVVIMADSLKGPKGESVGSITQPLPSSYLIFRAASESDGRCWLDALELALRCSSLLRLGTCKPGRDGEPGTSPDASPSSLCGLPASATVHPDQDLFPLNGSSLENDAFSDKSERENPEESDTETQDHSRKTESGSDQSETPGAPVRRGTTYVEQVQEELGELGEASQVETVSEENKSLMWTLLKQLRPGMDLSRVVLPTFVLEPRSFLNKLSDYYYHADLLSRAAVEEDAYSRMKLVLRWYLSGFYKKPKGIKKPYNPILGETFRCCWFHPQTDSRTFYIAEQVSHHPPVSAFHVSNRKDGFCISGSITAKSRFYGNSLSALLDGKATLTFLNRAEDYTLTMPYAHCKGILYGTMTLELGGKVTIECAKNNFQAQLEFKLKPFFGGSTSINQISGKITSGEEVLASLSGHWDRDVFIKEEGSGSSALFWTPSGEVRRQRLRQHTVPLEEQTELESERLWQHVTRAISKGDQHRATQEKFALEEAQRQRARERQESLMPWKPQLFHLDPITQEWHYRYEDHSPWDPLKDIAQFEQDGILRTLQQEAVARQTTFLGSPGPRHERSGPDQRLRKASDQPSGHSQATESSGSTPESCPELSDEEQDGDFVPGGESPCPRCRKEARRLQALHEAILSIREAQQELHRHLSAMLSSTARAAQAPTPGLLQSPRSWFLLCVFLACQLFINHILK

SEQ ID NO: 241266 - protein, 439 aa, Artificial Sequence
  derived and/or modified sequence
MDLSRVVLPTFVLEPRSFLNKLSDYYYHADLLSRAAVEEDAYSRMKLVLRWYLSGFYKKPKGIKKPYNPILGETFRCCWFHPQTDSRTFYIAEQVSHHPPVSAFHVSNRKDGFCISGSITAKSRFYGNSLSALLDGKATLTFLNRAEDYTLTMPYAHCKGILYGTMTLELGGKVTIECAKNNFQAQLEFKLKPFFGGSTSINQISGKITSGEEVLASLSGHWDRDVFIKEEGSGSSALFWTPSGEVRRQRLRQHTVPLEEQTELESERLWQHVTRAISKGDQHRATQEKFALEEAQRQRARERQESLMPWKPQLFHLDPITQEWHYRYEDHSPWDPLKDIAQFEQDGILRTLQQEAVARQTTFLGSPGPRHERSGPDQRLRKASDQPSGHSQATESSGSTPESCPELHGTGSTGTDPRPPAEPPILVPALRVPGVSAVH

SEQ ID NO: 241267 - protein, 124 aa, Artificial Sequence
  derived and/or modified sequence
MKEEAFLRRRFSLCPPSSTPQKVDPRKLTRNLLLSGDNELYPLSPGKDMEPNGPSLPRDEGPPTPSSATKVPPAEYRLCNGSDKECVSPTARVTKKETLKAQKENYRQEKKRATRQLLSALTDP

SEQ ID NO: 241268 - protein, 98 aa, Artificial Sequence
  derived and/or modified sequence
MKEEAFLRRRFSLCPPSSTPQKVDPRKLTRNLLLSGDNELYPLSPGKDMEPNGPSLPRDEGPPTPSSATKVPPAEYRLCNGSDKECVSPTARVTKKET

SEQ ID NO: 241269 - protein, 90 aa, Artificial Sequence
  derived and/or modified sequence
MKEEAFLRRRFSLCPPSSTPQKVDPRKLTRNLLLSGDNELYPLSPGKDMEPNGPSLPRDEGPPTPSSATKVPPAEYRLCNGSDKECVSPT

SEQ ID NO: 241270 - protein, 432 aa, Artificial Sequence
  derived and/or modified sequence
YNPILGETFRCCWFHPQTDSRTFYIAEQVSHHPPVSAFHVSNRKDGFCISGSITAKSRFYGNSLSALLDGKATLTFLNRAEDYTLTMPYAHCKGILYGTMTLELGGKVTIECAKNNFQAQLEFKLKPFFGGSTSINQISGKITSGEEVLASLSGHWDRDVFIKEEGSGSSALFWTPSGEVRRQRLRQHTVPLEEQTELESERLWQHVTRAISKGDQHRATQEKFALEEAQRQRARERQESLMPWKPQLFHLDPITQEWHYRYEDHSPWDPLKDIAQFEQDGILRTLQQEAVARQTTFLGSPGPRHERSGPDQRLRKASDQPSGHSQATESSGSTPESCPELSDEEQDGDFVPGGESPCPRCRKEARRLQALHEAILSIREAQQELHRHLSAMLSSTARAAQAPTPGLLQSPRSWFLLCVFLACQLFINHILK

SEQ ID NO: 241271 - protein, 510 aa, Artificial Sequence
  derived and/or modified sequence
MCVPHRQGHQEGDSQGAEGELPAGEEPRSFLNKLSDYYYHADLLSRAAVEEDAYSRMKLVLRWYLSGFYKKPKGIKKPYNPILGETFRCCWFHPQTDSRTFYIAEQVSHHPPVSAFHVSNRKDGFCISGSITAKSRFYGNSLSALLDGKATLTFLNRAEDYTLTMPYAHCKGILYGTMTLELGGKVTIECAKNNFQAQLEFKLKPFFGGSTSINQISGKITSGEEVLASLSGHWDRDVFIKEEGSGSSALFWTPSGEVRRQRLRQHTVPLEEQTELESERLWQHVTRAISKGDQHRATQEKFALEEAQRQRARERQESLMPWKPQLFHLDPITQEWHYRYEDHSPWDPLKDIAQFEQDGILRTLQQEAVARQTTFLGSPGPRHERSGPDQRLRKASDQPSGHSQATESSGSTPESCPELSDEEQDGDFVPGGESPCPRCRKEARRLQALHEAILSIREAQQELHRHLSAMLSSTARAAQAPTPGLLQSPRSWFLLCVFLACQLFINHILK

SEQ ID NO: 241272 - DNA, 2436 bp, Artificial Sequence
  derived and/or modified sequence
atgaaggaggaagcatttttaaggagaagattcagtctgtgcccaccctcttccacccctcaaaaggtggatcctcgcaagttaacgagaaaccttctactatccggagacaacgaactgtatccactgtcaccgggaaaggacatggagcccaatggacccagcctgccccgtgatgaaggtccgccaacccccagttccgccactaaggtgccacctgccgaatacagactgtgcaatggttcagataaagagtgcgtgtctcccacagcaagagttactaaaaaggagactctgaaagcacagaaggagaactatcggcaggagaagaaacgggcaactcgccagctcttgtcagccctgaccgatcccagtgtcgtgataatggccgacagtcttaaaggccccaaaggagagtctgttgggtccatcacccagcccctcccatcttcgtatctcatctttagggctgcatccgagagcgatggaagatgctggctcgatgccctggaactagccctccgttgcagctcactcctccggctgggcacttgcaagcccggacgggatggcgagccggggacctcaccagatgctagcccatctagcctgtgcggactgccagcctcggcaactgtgcaccccgaccaagatctgttcccactcaatggttcatcgctggaaaacgacgcattctctgacaagtctgagagggagaatccagaggaatcagataccgagactcaggatcattcaagaaagacagagagtggcagcgatcagtcagaaacaccaggggcacccgttcggcgaggaaccacatatgtcgaacaagtgcaggaagagctgggtgaactcggggaagcctcacaggtcgagacggtttcggaagagaacaagagtcttatgtggacgctgctgaagcagctacggccagggatggatctctctcgggttgtcctgccaacgttcgttctggaaccacggtcctttctaaacaagctcagcgactattattaccacgctgatctcctgagcagagcagcagtcgaggaggatgcttatagtcgcatgaaactcgtactgaggtggtatctgtccgggttctataagaagcccaaaggcattaaaaaaccatacaaccccatcttaggggagacattccgctgctgctggttccacccccaaaccgactccaggaccttctatattgccgagcaggtcagccaccaccctcctgtgagtgccttccatgtgtcaaatagaaaggacgggttctgcatcagcgggtccatcaccgctaaaagccgattctatggcaatagcctcagtgcactgctggatggtaaggccacactcacatttttaaatcgtgctgaggattacaccctgacgatgccttacgcccattgcaaggggatcctctacggaactatgacccttgaactaggggggaaggtgacgatcgaatgtgctaagaacaacttccaggcacagctcgagtttaaactgaagccgttttttggcggctctaccagcattaatcaaatttctgggaagattacctcgggggaggaagtcttggcctccctgagcggacattgggatcgggacgtcttcatcaaagaagaaggatctggaagttcggccctattctggacaccaagcggggaggtgagacgccaaagattacggcagcatacagtgcctttagaggagcagactgagcttgagtcagaacggctctggcagcatgttacccgagctataagcaaaggagaccaacatcgtgcaactcaggaaaaattcgcacttgaggaagcccagcgacagcgagcccgcgaaaggcaggaatcattgatgccctggaagcctcaattattccatctggacccgattacccaagaatggcattaccgatatgaagaccactccccatgggacccactgaaggacatagcccaatttgaacaggacggaatactcagaactcttcagcaggaagccgtggcgcgccagaccacctttcttggatccccagggccgcgacacgaacgttccggacctgatcagagactaagaaaagcgtctgaccagccaagtggccatagccaggccacggaatcttccgggtccacccctgaatcttgtcctgaactgagtgacgaagaacaggatggtgactttgtccccggtggcgaatctccttgtccacggtgcaggaaggaagcccgaaggctgcaagctttacatgaggcaattctttctatccgcgaggcacagcaagaactccaccggcacctctcggccatgctctcatcaacagcccgcgctgctcaagcgccgactccagggctcctccagtcccctcggtcatggtttctactctgtgttttcctggcctgccagctgtttatcaaccatatccttaaatag

SEQ ID NO: 241273 - DNA, 1320 bp, Artificial Sequence
  derived and/or modified sequence
atggacttgtctcgcgtggtgctgccaacttttgtgctcgaaccaaggtcattccttaataagctatccgattactattaccacgcggatctactgagtcgagcagcagtggaggaggacgcctattccagaatgaagctcgtcctcagatggtacctgtcaggtttctataaaaagccgaagggcattaaaaaaccctacaatccaattctcggtgagacttttcgatgctgttggttccatccacagacagattccagaaccttttatatcgccgagcaagtgagccaccaccctcccgtctccgcctttcatgtgtctaatcgaaaagatggattctgtatctccggatcgatcactgcgaaatctaggttttacggaaattctctgagcgctctcctcgacggcaaagctaccctgacgtttctgaacagggccgaagactacaccctgacaatgccttatgcccactgcaagggaatcctttacggtactatgactctggagttgggagggaaggtgacaatcgagtgtgccaagaataatttccaggcccagctggagtttaagttgaaaccctttttcggggggtcgacttcaatcaatcagattagcgggaaaatcacaagcggcgaagaagtgctagcatctctgagcggccactgggatcgggacgtgttcattaaggaggaaggttctggctcttcagccctgttctggacgccgtccggggaggtcagaagacaacgcctgcggcagcatacggtcccgctagaggaacaaacagaactggaatctgaaaggttgtggcagcatgtcaccagagctatctccaagggcgatcagcacagggccacccaggaaaagtttgcacttgaagaggctcagcggcaacgcgcgagagagcggcaggaaagtctgatgccttggaagccccagctgttccacctcgaccctattactcaggaatggcactataggtacgaggatcacagcccatgggaccccctgaaggacatcgcccagttcgagcaggacggaatactgcgtactcttcagcaggaggccgtagctcgacaaacaactttcctagggtcgcctggtccaagacatgaaaggagcggaccagatcagcgcctccggaaagccagcgatcagccctcaggccatagccaggccacagagtcttcaggatctacacccgagtcatgccctgagttacacggcacaggcagcacaggaactgacccaaggccccccgccgaaccccctattctcgtgccagctctacgagtccctggggtgagcgcggttcattag

SEQ ID NO: 241274 - DNA, 2436 bp, Artificial Sequence
  derived and/or modified sequence
atgaaggaagaggcctttctccgccggcgcttctctctctgcccccccagttctacaccccagaaggtggacccacggaaacttacgcgtaacctgctgctgtctggtgacaatgaactgtacccgttaagccccgggaaggacatggaacctaacgggccctccttgccccgcgatgaggggcctcccaccccatctagtgcgacaaaggtgccacctgctgaatatcgcttatgcaatgggtccgataaggaatgcgttagtcctacagccagggtgactaaaaaagaaacactgaaggcacagaaagagaactacagacaagagaaaaagcgcgctacccgccagctcctgagtgcactgacggacccctccgtggtgatcatggccgatagccttaagggacccaaaggggagtctgtgggctctattacacagccactcccttcctcctatctcattttccgggccgcgagcgaatctgacggacgctgctggctcgacgcgctggagttagccctcaggtgcagcagtctcttgcgacttgggacctgtaagcccggccgggacggcgagcctggaacaagcccagacgccagtcccagttctttatgcggtcttcctgcatctgcaacagtccaccccgaccaagaccttttccctttgaatgggagcagcctggagaatgacgctttttcagacaaaagcgagcgggaaaatccagaggagtcggatacggaaactcaggaccattctcgcaagaccgagtcggggagcgaccagagcgaaacacctggagctcccgtgcgacgcggcactacgtacgttgaacaggtgcaggaggagcttggcgaattgggagaggcgagtcaggtggaaactgtgtccgaggagaataaatccctcatgtggacactactgaaacagctccgaccggggatggacctctctagagtcgtgctacccacgttcgtgctcgagccccgctcattcctgaataagctgagtgactattattaccacgccgatctgctgagcagagccgccgtcgaggaggacgcgtattcacggatgaagctggtgctgagatggtatctgtccggtttttataaaaaaccgaaaggcattaagaaaccctacaaccctatcctaggggaaacatttagatgctgttggtttcaccctcagaccgactcccggacattttacatcgcagagcaggtatctcaccatccacctgtcagtgcgttccacgtgtccaatagaaaggatgggttctgcatctcaggatctatcaccgctaagtctcggttttatgggaacagcctttcagccctcctggacggcaaagcaaccctgacattcctgaacagagccgaggactatactctcactatgccgtatgctcactgcaagggaattctatatggcactatgaccctcgagctgggcgggaaggtgacaattgagtgcgccaagaataattttcaagctcagctagagttcaagctcaagccattttttggtggttcgacatccatcaaccagattagtggtaagattacttctggagaagaagtgctcgcgtctctgagcggccattgggatagagacgtcttcataaaggaggaggggtctgggagtagcgccctattttggacaccaagcggcgaagtgcgcagacaaagactcagacaacacaccgtgcctttggaggaacagaccgagctggagtccgagcggctgtggcagcacgtcaccagagccatctctaaaggagaccagcatagagcgactcaggagaaatttgccctcgaggaggctcagagacagagggcacgggagcggcaagagagcctgatgccttggaagccacagttattccacttggaccctatcacacaagaatggcattaccggtatgaggaccattctccgtgggatcctctaaaggatatcgctcaatttgagcaggacggaattctcaggaccctgcaacaagaggcggttgcacgccaaaccacctttttaggatcccccggccctagacacgagcgcagcggtcccgaccagcgcctgcgaaaggcctcagatcagccatcaggacactcccaggcgactgagagctccggatcaaccccggagagctgcccagagctgagcgacgaagagcaggacggagatttcgtgcctggaggggagagcccctgtccgagatgtcgcaaggaagcacggcggttgcaagctcttcacgaagctatacttagcatccgagaagcccaacaggagctccaccgtcacctgagcgctatgttgagttccaccgctcgggcagctcaagcaccaaccccagggctgctgcagtcaccaagatcatggttcctgttgtgcgtatttctcgcctgtcagctgtttatcaaccacatcctaaagtag

SEQ ID NO: 241275 - DNA, 375 bp, Artificial Sequence
  derived and/or modified sequence
atgaaggaagaggcctttttaagaagacggtttagtctctgcccaccatctagcaccccacagaaggttgacccaaggaagctaacaaggaacttgcttctctctggggacaatgagttgtatcctctttctcctggcaaggatatggagccgaatggcccatccctccccagggacgaaggcccccccactccttcttcagctacaaaggtgccccctgctgaataccgtctgtgtaacggcagtgataaagagtgtgtgagtccgacagcgcgcgtcactaagaaggagaccctaaaagcccagaaagaaaattatcgacaggagaagaagcgcgctacaaggcagctcctgtctgccctgactgatccttag

SEQ ID NO: 241276 - DNA, 297 bp, Artificial Sequence
  derived and/or modified sequence
atgaaagaagaagcgttcctgcggcgaaggttctccctgtgccccccttcatcaacccctcaaaaagtcgacccccgcaagttgacccggaatctgttgctttccggcgataatgagttgtatccactttcaccaggaaaagatatggaacctaatggtcctagcctacctcgggatgaagggccacccacaccatccagtgccaccaaagtccctccagctgagtataggctgtgcaacggttccgataaggagtgtgtctctcccaccgctcgtgtaactaagaaagaaacttag

SEQ ID NO: 241277 - DNA, 273 bp, Artificial Sequence
  derived and/or modified sequence
atgaaagaggaagcattcttgcggaggcgtttttcgctctgccctccgtcgtccaccccccagaaggtcgaccccagaaaattaactagaaatctgctgctatccggcgataatgaattgtatccattaagtcccggtaaagacatggaaccaaacggtccttccctcccccgggacgaggggccgcctaccccaagctctgcaaccaaggttcctccagctgaatataggctgtgtaacgggtccgataaggaatgtgtgagccccacatag

SEQ ID NO: 241278 - DNA, 210 bp, Artificial Sequence
  derived and/or modified sequence
atgaaggaggaggcatttctgcgtcgccgtttcagcctgtgcccaccgtcctctaccccccagaaagtggatccgaggaagctgaccaggaacttgttgctgtcgggcgacaatgagctgtaccccctgagtccagggaaagacatggaacctaatgggccctcacttcccagggatgagggcccacccaccccctcgtcagccacctag

SEQ ID NO: 241279 - DNA, 1299 bp, Artificial Sequence
  derived and/or modified sequence
tataatccaattctgggggagacattcagatgctgctggtttcaccctcagaccgatagcagaaccttctacatcgccgagcaggtgtcccaccacccccccgtatcggctttccacgtgagcaacagaaaagatgggttttgtatttctggcagtataaccgctaaatcacgcttttatgggaattcactgtccgctttgctggatgggaaagccacactgacctttctcaatcgagcagaagactacactctgaccatgccctatgcccactgtaagggtattctgtacggtaccatgaccctggagctgggcggcaaagtgaccatagagtgcgcgaagaacaactttcaggcacagctcgagttcaaacttaagccattctttggtggatcaacaagtattaaccagataagtggaaaaatcacatctggcgaggaagttctggcatcactgtccggtcattgggaccgtgatgtctttattaaggaggagggaagtgggtcatcagctctgttttggaccccaagcggagaggtaagacgccaacgactgaggcagcacactgtgcctctagaggaacagacggagctcgagagcgaacggctgtggcagcacgttacacgggctataagcaagggagatcagcatagggctacgcaggaaaaatttgcccttgaggaggctcagaggcagcgtgctagggagcggcaagaaagcctgatgccttggaaaccacaactgttccacttggatccaatcacccaggagtggcactaccgctatgaagaccacagtccatgggaccctcttaaagacattgcccagtttgaacaggatggcattctgcggactctccaacaggaggctgtggctaggcagactaccttcctcggtagtccgggtcctaggcatgagagaagcgggcccgatcaacgcctgaggaaggcatcggaccaaccaagtggccactcacaggccacagagagttccggcagcacaccagagagctgtccagagctaagcgacgaagagcaggatggcgactttgttccaggaggagagtccccttgtccaagatgcagaaaggaggcccggaggctccaggcattgcacgaggccattttaagcatccgtgaagctcagcaggaactgcacagacatctgtctgctatgctctcttccacagcgagggctgctcaagcccccacaccaggcctcttgcagtcccctcgttcatggttcctgttgtgtgttttccttgcatgccagctgtttatcaaccatatcctcaagtag

SEQ ID NO: 241280 - DNA, 2436 bp, Artificial Sequence
  derived and/or modified sequence
atgaaggaggaggccttcctgcggcggcgcttcagcctgtgcccccccagcagcaccccccagaaggtggaccccaggaagctgaccaggaacctgctgctgagcggggacaatgagctgtaccccctgagccctgggaaggacatggagcccaacggccccagcctgcccagagatgagggcccccccacccccagcagcgccaccaaggtgcccccagctgagtaccgcctgtgcaatggaagtgacaaggaatgtgtgagccccacagcccgggtgaccaagaaggagaccctgaaggcccagaaggagaactaccggcaggagaagaagagggccacccggcagctgctgagcgccctgacagaccccagcgtggtgatcatggctgacagcctgaagggccccaagggggagagcgtgggcagcatcacccagcccctgcccagcagctacctgatcttccgggccgccagcgagagtgatggccgctgctggctggatgccctggagctggccctgcgctgcagcagcctgctgcggctgggcacctgcaagccaggaagagatggagagcccggcaccagcccagatgccagccccagcagcctgtgtggcctgcctgccagcgccaccgtgcacccagaccaggacctcttccccctgaatggcagcagcctggagaatgatgccttcagtgacaagtcagaaagagaaaatcctgaggagagtgacacagagacccaggaccacagcaggaagacagaaagtggcagtgaccagagcgagacccctggggcccctgtgcggcggggcaccacctacgtggagcaggtgcaggaggagctgggggagctgggggaggccagccaggtggagaccgtgtctgaggagaacaagagcctgatgtggaccctgctgaagcagctgcggcccggcatggacctgagccgggtggtgctgcccacctttgtgctggagcccaggagcttcctgaacaagctgagtgactactactaccacgccgacctgctgagcagagctgctgtggaggaggatgcctacagcaggatgaagctggtgctgcgctggtacctgagcggcttctacaagaagcccaagggcatcaagaagccctacaaccccatcctgggggagaccttccgctgctgctggttccacccccagacagacagcaggaccttctacatcgccgagcaggtgagccaccacccccctgtgtctgccttccacgtgagcaacaggaaggatggcttctgcatcagcggcagcatcacagccaagagccgcttctacggcaacagcctgagcgccctgctggatggcaaggccaccctgaccttcctgaacagagctgaggactacaccctgaccatgccctatgcccactgcaagggcatcctgtatggcaccatgaccctggagctgggcggcaaggtgaccattgaatgtgccaagaacaacttccaggcccagctggagttcaagctgaagcccttcttcggcggcagcaccagcatcaaccagatcagcggcaagatcaccagcggggaggaggtgctggccagcctgagcggccactgggacagagatgtgttcatcaaggaggagggcagcggcagcagcgccctcttctggacccccagcggggaggtgcggcggcagaggctgcggcagcacacagtgcccctggaggagcagacagagctggagagcgagcggctgtggcagcacgtgacccgggccatcagcaagggggaccagcaccgggccacccaggagaagtttgccctggaggaggcccagaggcagagggcccgggagcggcaggagagcctgatgccctggaagccccagctgttccacctggaccccatcacccaggagtggcactaccgctatgaggaccacagcccctgggaccccctgaaggacatcgcccagtttgagcaggacggcatcctgcggaccctgcagcaggaggccgtggcccggcagaccaccttcctgggcagccctggccccaggcatgagaggagcggccctgaccagaggctgaggaaggccagtgaccagcccagcggccacagccaggccacagagagcagcggcagcaccccagagagctgcccagagctgagtgatgaggagcaggatggagactttgtgcctggaggagagagcccctgcccccgctgcaggaaggaggcccggcggctgcaggccctgcacgaggccatcctgagcatccgggaggcccagcaggagctgcaccgccacctgagcgccatgctgagcagcacagcccgggccgcccaggcccccaccccaggcctgctgcagagccccaggtcctggttcctgctgtgtgtgttcctggcctgccagctgttcatcaaccacatcctgaagtag

SEQ ID NO: 241281 - DNA, 1320 bp, Artificial Sequence
  derived and/or modified sequence
atggacctgagccgggtggtgctgcccacctttgtgctggagcccaggagcttcctgaacaagctgagtgactactactaccacgccgacctgctgagcagagctgctgtggaggaggatgcctacagcaggatgaagctggtgctgcgctggtacctgagcggcttctacaagaagcccaagggcatcaagaagccctacaaccccatcctgggggagaccttccgctgctgctggttccacccccagacagacagcaggaccttctacatcgccgagcaggtgagccaccacccccctgtgtctgccttccacgtgagcaacaggaaggatggcttctgcatcagcggcagcatcacagccaagagccgcttctacggcaacagcctgagcgccctgctggatggcaaggccaccctgaccttcctgaacagagctgaggactacaccctgaccatgccctatgcccactgcaagggcatcctgtatggcaccatgaccctggagctgggcggcaaggtgaccattgaatgtgccaagaacaacttccaggcccagctggagttcaagctgaagcccttctttggaggcagcaccagcatcaaccagatcagcggcaagatcaccagcggggaggaggtgctggccagcctgagcggccactgggacagagatgtgttcatcaaggaggagggcagcggcagcagcgccctcttctggaccccatctggagaggtgcggcggcagaggctgcggcagcacacagtgcccctggaggagcagacagagctggagagcgagcggctgtggcagcacgtgacccgggccatcagcaaaggagaccagcaccgggccacccaggagaagtttgccctggaggaggcccagaggcagagggcccgggagcggcaggagagcctgatgccctggaagccccagctgttccacctggaccccatcacccaggagtggcactaccgctatgaggaccacagcccctgggaccccctgaaggacatcgcccagtttgagcaggacggcatcctgcggaccctgcagcaggaggccgtggcccggcagaccaccttcctgggcagccctggccccaggcatgagaggagcggccctgaccagaggctgaggaaggccagtgaccagcccagcggccacagccaggccacagagagcagcggcagcaccccagagagctgcccagagctgcacggcaccggcagcactggaacagaccccaggcctcctgctgagccccccatcctggtgcctgccctgcgggtgcctggggtgtctgctgtgcactag

SEQ ID NO: 241282 - DNA, 375 bp, Artificial Sequence
  derived and/or modified sequence
atgaaggaggaggccttcctgcggcggcgcttcagcctgtgcccccccagcagcaccccccagaaggtggaccccaggaagctgaccaggaacctgctgctgagcggggacaatgagctgtaccccctgagccctgggaaggacatggagcccaacggccccagcctgcccagagatgagggcccccccacccccagcagcgccaccaaggtgcccccagctgagtaccgcctgtgcaatggaagtgacaaggaatgtgtgagccccacagcccgggtgaccaagaaggagaccctgaaggcccagaaggagaactaccggcaggagaagaagagggccacccggcagctgctgagcgccctgacagacccctag

SEQ ID NO: 241283 - DNA, 297 bp, Artificial Sequence
  derived and/or modified sequence
atgaaggaggaggccttcctgcggcggcgcttcagcctgtgcccccccagcagcaccccccagaaggtggaccccaggaagctgaccaggaacctgctgctgagcggggacaatgagctgtaccccctgagccctgggaaggacatggagcccaacggccccagcctgcccagagatgagggcccccccacccccagcagcgccaccaaggtgcccccagctgagtaccgcctgtgcaatggaagtgacaaggaatgtgtgagccccacagcccgggtgaccaagaaggagacctag

SEQ ID NO: 241284 - DNA, 273 bp, Artificial Sequence
  derived and/or modified sequence
atgaaggaggaggccttcctgcggcggcgcttcagcctgtgcccccccagcagcaccccccagaaggtggaccccaggaagctgaccaggaacctgctgctgagcggggacaatgagctgtaccccctgagccctgggaaggacatggagcccaacggccccagcctgcccagagatgagggcccccccacccccagcagcgccaccaaggtgcccccagctgagtaccgcctgtgcaatggaagtgacaaggaatgtgtgagccccacctag

SEQ ID NO: 241285 - DNA, 210 bp, Artificial Sequence
  derived and/or modified sequence
atgaaggaggaggccttcctgcggcggcgcttcagcctgtgcccccccagcagcaccccccagaaggtggaccccaggaagctgaccaggaacctgctgctgagcggggacaatgagctgtaccccctgagccctgggaaggacatggagcccaacggccccagcctgcccagagatgagggcccccccacccccagcagcgccacctag

SEQ ID NO: 241286 - DNA, 1299 bp, Artificial Sequence
  derived and/or modified sequence
tacaaccccatcctgggggagaccttccgctgctgctggttccacccccagacagacagcaggaccttctacatcgccgagcaggtgagccaccacccccctgtgtctgccttccacgtgagcaacaggaaggatggcttctgcatcagcggcagcatcacagccaagagccgcttctacggcaacagcctgagcgccctgctggatggcaaggccaccctgaccttcctgaacagagctgaggactacaccctgaccatgccctatgcccactgcaagggcatcctgtatggcaccatgaccctggagctgggcggcaaggtgaccattgaatgtgccaagaacaacttccaggcccagctggagttcaagctgaagcccttctttggaggcagcaccagcatcaaccagatcagcggcaagatcaccagcggggaggaggtgctggccagcctgagcggccactgggacagagatgtgttcatcaaggaggagggcagcggcagcagcgccctcttctggaccccatctggagaggtgcggcggcagaggctgcggcagcacacagtgcccctggaggagcagacagagctggagagcgagcggctgtggcagcacgtgacccgggccatcagcaaaggagaccagcaccgggccacccaggagaagtttgccctggaggaggcccagaggcagagggcccgggagcggcaggagagcctgatgccctggaagccccagctgttccacctggaccccatcacccaggagtggcactaccgctatgaggaccacagcccctgggaccccctgaaggacatcgcccagtttgagcaggacggcatcctgcggaccctgcagcaggaggccgtggcccggcagaccaccttcctgggcagccctggccccaggcatgagaggagcggccctgaccagaggctgaggaaggccagtgaccagcccagcggccacagccaggccacagagagcagcggcagcaccccagagagctgcccagagctgagtgatgaggagcaggatggagactttgtgcctggaggagagagcccctgcccccgctgcaggaaggaggcccggcggctgcaggccctgcacgaggccatcctgagcatccgggaggcccagcaggagctgcaccgccacctgagcgccatgctgagcagcacagcccgggccgcccaggcccccaccccaggcctgctgcagagccccaggtcctggttcctgctgtgtgtgttcctggcctgccagctgttcatcaaccacatcctgaagtag

SEQ ID NO: 241287 - DNA, 2436 bp, Artificial Sequence
  derived and/or modified sequence
atgaaggaggaggccttcctgcggcggcggttcagcctgtgcccccctagcagcactccacagaaggtggatcctcgtaaactaacgagaaatcttctgctttcgggggacaacgagctgtatccgctgtctcccgggaaggacatggaacccaatggccctagcctgcccagagacgaaggacccccaactccatcttcagcgactaaggtgcctcccgctgagtataggctgtgcaatggatcagacaaggaatgcgtatcacctaccgcacgcgtcaccaaaaaggagaccctgaaagcccagaaggaaaactatcggcaagagaagaagagggccacccgacagctcctcagcgctctcactgacccaagcgtggtgatcatggcggactctctcaaagggcctaaaggcgaatcagtgggctccattacccaaccacttcccagttcttacctaatctttcgcgccgccagcgagtcagatggcagatgttggttggacgcactggaactggccttgcggtgttcctctctgctccgactgggtacctgtaagccgggccgggacggggaacccggaactagtccagatgcttctccttcctccctgtgcggattacccgccagcgcgaccgtgcaccctgaccaagatctgtttcctctgaacggctcctcattagaaaatgatgccttctctgacaaatcagagcgcgagaacccagaggaaagtgacacagagactcaggaccattctagaaaaactgaatcgggctctgatcagtccgaaactcccggtgcaccagtgcgacgcggaacgacctatgttgaacaagtccaggaggagctcggtgagcttggagaggcttcccaggtcgagaccgtgagtgaagagaataagtccctgatgtggacacttttgaagcagctgcgcccagggatggatctgagcagggtggtgctgcctacttttgtgttggaacctcgcagttttctgaataagctatccgattactattaccacgcggaccttctgagtcgggctgctgtcgaagaggatgcctacagcaggatgaagctcgttctccgttggtacctgtccggcttttataagaagccaaaggggatcaaaaagccttacaatccaatacttggcgagaccttcagatgctgctggtttcatccgcagacagacagtcgtacattttacatagcggagcaggtctctcaccatcctccagtgagcgcttttcatgtgagtaaccgaaaagacggattttgtatcagcgggtccatcacagcaaaatctcggttctacggcaactcattgtctgcccttctagacggcaaagcaactctaaccttcttgaatcgtgcggaggactacactctgacaatgccctatgcgcattgcaaagggattttatacggcacaatgacgttggagctcggtggcaaagtaaccatcgaatgcgctaaaaacaattttcaagcacagcttgaatttaagctcaaaccattcttcggcggtagcactagcatcaaccaaatttcgggcaaaataacaagtggagaggaagtgctcgccagcttgagcggacattgggatagagacgtgttcatcaaggaggagggctctgggtcgagtgctctcttctggaccccatctggggaggtgagacgccaaaggctgcgccaacacactgtgcctcttgaagagcagaccgaactggagtctgagcgcttgtggcagcacgtgacaagagccatcagcaaaggagatcagcatagggccactcaggaaaagttcgctttggaggaagcccaacgacagagagctcgggagcgacaggagagtctgatgccatggaaacctcagttgttccaccttgatccaatcactcaagagtggcattatcgctacgaagatcacagcccgtgggatccattaaaggatatcgcccagttcgagcaagatggtatccttcgcaccctacagcaggaggcggttgccaggcagactactttcttgggaagcccagggcctaggcatgagagaagtgggccggatcagcggctgaggaaagctagcgatcagccgagcggccactcccaggccactgagagctctgggtctacaccagagagctgccctgagctgagcgatgaagagcaggatggcgatttcgtgccaggaggggaatccccctgccccagatgtaggaaagaagcacgacggctccaggccttgcacgaagcaattttgagtatccgcgaggcccagcaggagctgcaccggcacctttcagctatgctctcctctactgcccgggccgctcaagcccccactcccggcctactgcagagcccgcgaagctggtttctgctgtgtgtcttcctggcctgccaattatttatcaatcacatcttaaagtag

SEQ ID NO: 241288 - DNA, 1320 bp, Artificial Sequence
  derived and/or modified sequence
atggacctgagccgggtggtgctgcccaccttcgtgctggagccccggagcttcctcaataagttatctgactactattaccatgccgacttattgtccagggccgccgttgaagaagatgcatattctaggatgaaactggtgcttagatggtatctgagtggcttctataaaaagccgaaaggcattaagaaaccttacaatcctatactgggcgagaccttccggtgttgctggttccatcctcagactgattccaggactttttacatagcggaacaggtgagccaccaccctccggtatccgcctttcatgtttcaaacagaaaagacggattctgtatatcgggttccataaccgcgaagtctagattctatggcaacagcctgtcagctctgctggacggcaaagccactctgacttttctgaatagagctgaggactatacactcaccatgccatatgcacactgtaaaggaatcctgtatggcacgatgactctggagctcggggggaaggtgaccatcgagtgtgctaagaataacttccaggcgcagctggagttcaagctaaagccgttctttggcggcagtacgtctatcaatcagattagtggcaagattacctccggcgaagaagttctggctagtttatctgggcattgggatagagatgttttcataaaggaagaagggtccggttccagcgcgctgttctggacacctagcggtgaggttaggaggcagaggctgcggcagcacacagtacctctagaggagcaaaccgaactcgaatctgaacgactgtggcagcatgtgacccgggccatatccaagggagatcaacatcgcgcaacgcaggagaagtttgctttggaagaggctcagcgacagagggcaagagaacgacaggaatctctgatgccgtggaaacctcagctctttcacttagatcctattactcaagaatggcactatcgatatgaggatcactccccatgggatccactaaaagacatagcccaatttgagcaggatggcatcctgcgcacccttcagcaggaggctgtggcccggcaaacgacttttcttggctcacccggcccgcgacacgaacgaagcggtccagatcaacgtctacgaaaggcctcagaccaaccttctggtcactctcaggccactgagtcaagtggttcaacccccgagtcctgcccggagctgcacggcaccgggtctacgggaactgaccccaggcctcccgccgaaccccctatacttgtgcctgccctgcgggtaccaggcgtgtctgctgtgcattag

SEQ ID NO: 241289 - DNA, 2436 bp, Artificial Sequence
  derived and/or modified sequence
atgaaggaggaggccttcctgcggcggcggttcagcctgtgccccccttcatccacaccccagaaagtggacccccgaaagctcacaaggaatttgctcctaagtggcgataatgagctgtacccgctgagccctggaaaggatatggagccaaacggaccttcactgccgcgcgatgagggcccacccacacccagctctgctaccaaagtgccaccagccgagtaccggctgtgtaacggctctgacaaggagtgtgtgtcacccaccgcccgagtgaccaagaaggagacgctgaaggcacagaaggagaattatagacaggaaaaaaaacgagctaccagacagcttctttctgctctcacagacccaagcgtggtcattatggccgattccctgaagggtccgaagggggaatccgtagggagtattacccagcctctcccatcgagctaccttatttttagggccgcctccgagtcagacggcagatgttggctcgatgctctcgaacttgcccttcgctgctctagtctcctgcgattaggcacatgtaagcccggacgggatggggagcctgggacatcgcctgacgcttcaccgagttctctatgtggactcccagctagcgctaccgtgcaccctgaccaagacctgttcccgcttaatggctcatccctagaaaacgacgccttctctgacaaatcagaacgagaaaaccctgaagagtcggacacagaaactcaagaccactcacgtaagactgaatccggttctgatcagagtgagacgcctggtgcgccagtccgcagaggaaccacttacgtggaacaggtacaggaggaactgggtgaacttggtgaggcctctcaagtggagacggtgtccgaggagaataaaagcctcatgtggactctgttaaagcagttgcggcctggaatggacctgtctcgcgttgtactgcccacatttgtcttggagcccagatcctttctgaacaaactttctgactactactatcacgcagaccttctgagcagagctgccgtggaagaagacgcgtattcccgaatgaagttggtactccgttggtatctgtcgggtttttacaaaaaacctaaggggattaagaaaccctacaatccaatcttaggagagactttccgctgctgctggttccatccccagaccgatagccggaccttctacatcgcggaacaagtgagccatcatccaccagtcagtgcttttcacgtgtccaatcggaaagatggcttctgcattagcgggtccataactgccaagtccaggttttatggaaattcactgagcgctcttttggatggcaaggctactctcacctttctcaacagggctgaagactataccctcaccatgccctacgcccactgcaagggaatcctctacggcacaatgactttagaactgggagggaaagttaccatcgagtgtgcgaagaataactttcaggctcaactggagttcaaactgaagccattcttcggtggctctacctcgattaatcaaatttccgggaagattactagcggcgaggaggtgctcgccagcctgagtgggcattgggatcgtgacgttttcattaaggaggaagggagtggctcttccgccctgttctggacgccatctggcgaggttcgtagacagagactgagacaacataccgtgccgctggaggagcagaccgaactggaaagcgagaggctttggcaacacgtgacccgggcaataagtaagggggatcagcaccgggccacccaggaaaaattcgcactggaagaggcgcaacggcagcgagcacgcgaacgccaggagtcactgatgccctggaaaccccagctgttccacctagatccaatcacccaggagtggcactatcggtacgaagaccacagcccctgggatccactgaaagacatcgcccagttcgaacaggacggtatcctgaggacattgcagcaggaggcagtggcccgacaaacaactttcctgggaagtcctggtccgagacatgaaagatccgggccagatcagaggctacgaaaggctagcgaccagccaagcgggcactcgcaggcaacggagagcagcggctccacacccgaatcctgcccagaacttagtgacgaagagcaggatggcgacttcgtaccgggaggtgaaagcccttgcccaaggtgccggaaggaggcccgccggcttcaagctttgcatgaggcgattttgtccataagagaagcacagcaggagctgcaccgccaccttagtgctatgttaagcagcaccgccagagccgctcaggcccctactccagggttattacagtcacctagaagctggtttttactgtgtgtgtttctggcctgccagcttttcatcaatcatatcttgaagtag

SEQ ID NO: 241290 - DNA, 375 bp, Artificial Sequence
  derived and/or modified sequence
atgaaggaggaggccttcctgcggcggcggttcagcctgtgccccccctcatccacaccacaaaaggtcgatccgagaaagctgactaggaacctgcttttgtccggagataatgaactatatccgctctcccccggtaaagacatggagccgaatggaccctcactcccgagagacgaaggcccgcccacgcctagctcagccactaaagtgcccccagcagagtatagactgtgcaatgggagcgacaaagaatgtgtgtcaccaaccgcacgggttacaaaaaaggaaacgttgaaggcgcaaaaggaaaattacaggcaggaaaaaaaaagggcaaccaggcaattgcttagtgcactgacagatccgtag

SEQ ID NO: 241291 - DNA, 297 bp, Artificial Sequence
  derived and/or modified sequence
atgaaggaggaggccttcctgcggcggcggttcagcctgtgcccccctagctccacccctcaaaaggttgaccctaggaagttaactagaaacctcctacttagtggtgacaatgagttataccctctctcccctggcaaagacatggaaccaaatgggcctagccttcctagagacgagggaccccctacaccatcctctgctacgaaagtgcctcctgcggaataccggctgtgtaatggtagcgataaggagtgcgtttcgcccactgcccgcgttacaaaaaaggagacatag

SEQ ID NO: 241292 - DNA, 273 bp, Artificial Sequence
  derived and/or modified sequence
atgaaggaggaggccttcctgcggcggcggttcagcctgtgccccccgtcctctaccccccagaaggtcgacccccgtaagctgactagaaacttgctgttgtctggggacaacgaactttatcctctgtcccctggcaaagatatggagccaaatggaccctccctccctcgcgatgagggtccacccacaccctccagtgccaccaaagtcccaccggccgaatataggctctgcaacggctcagacaaggagtgcgtttctccgacatag

SEQ ID NO: 241293 - DNA, 210 bp, Artificial Sequence
  derived and/or modified sequence
atgaaggaggaggccttcctgcggcggcggttcagcctgtgccccccttcatcaactccccagaaagtcgatcccaggaagttaactcgcaatcttctgctgtctggggacaatgaactctacccactgtctccaggcaaggatatggaaccaaacggcccatctctgccccgagacgaaggcccacccacgccttcctccgcgacgtag

SEQ ID NO: 241294 - DNA, 1299 bp, Artificial Sequence
  derived and/or modified sequence
tacaaccccatcctgggcgagaccttccggtgctgctggttccacccccagacagatagccggaccttttatatcgctgaacaggtctcccatcacccccctgtgagcgctttccacgtgtccaaccgcaaggatggcttctgtatttccggcagcatcactgccaaatcccggttttacggaaactccctgagcgccctgttagatgggaaggccacattgacttttctcaaccgagccgaggattacaccctgaccatgccctatgcccactgtaagggcatactatacggcacaatgaccctcgaactgggcgggaaagtaaccattgaatgtgccaagaacaacttccaagcacagttggagttcaaactgaagccattctttggtggatccacctccataaaccagatctctggtaaaatcacgtctggcgaagaggtgctggctagcctttctggtcattgggacagagatgtattcataaaggaagagggcagtggatctagcgctctgttttggaccccatctggggaggtgcgccgccaacgcctgcgtcagcacacggtcccattggaagagcagacagaattagaatccgagagactttggcagcacgtgacacgtgccatctctaaaggagatcagcacagagcaacacaggagaaatttgcgctcgaagaagcccagcggcagagggcaagagagagacaggaatcattaatgccctggaaaccacaactcttccacttagaccccattacccaggagtggcactaccgctacgaggaccatagtccctgggaccccctcaaggacatcgctcagttcgagcaagatggaatcctacggacccttcagcaggaagctgttgcaagacagactacctttctcggctcccccgggcccaggcacgaaaggagtgggccagatcagcgcttgcgtaaggcttctgaccaaccctccggtcatagtcaggccactgaatccagcggatcgacacccgaatcttgtcccgaactgagtgacgaggaacaagatggagactttgtgccgggaggggaatccccttgccccaggtgccggaaggaggcccgaagattacaagctttgcacgaggcaatcctctccatccgggaggcccagcaggaactgcaccggcatttgtctgcaatgttgagttctacagctcgagcagctcaggcaccgacccctggcttactccagtccccccgctcttggtttctgctgtgcgtgtttctagcctgtcaactgttcattaatcatatcttgaaatag

SEQ ID NO: 241295 - DNA, 2798 bp, Artificial Sequence
  derived and/or modified sequence
ctccctccgccgcgccctcgctccgcctcgcgcggggggaccatctgctggcatttcctgcagccaggcccgcgccgccagtggagcccccgcgcgcccggccggcccggagcaccgagctcgcggcacggtaggagaagcccccgagcgcccacagcatgaaggaggaggccttcctccggcgccgcttctccctgtgtccaccttcctccacccctcagaaagtcgacccccggaagctcacccggaacttgctcctcagcggagacaatgagctctacccactcagcccagggaaggacatggagcccaacggcccgtcgctgcccagggatgaagggcccccgaccccaagctctgccacgaaggtgccaccggcagagtacaggctgtgcaacgggtcagacaaggaatgtgtgtcccccaccgccagggtcaccaagaaggagactctcaaggcgcagaaggagaactaccggcaggagaagaagcgcgccacacggcagctgctcagcgctctgacagaccccagcgtggtcatcatggctgacagcctgaagggccccaaaggtgagagcgtgggctccatcacacagcccctgcccagcagctacctgatcttcagggccgcctccgagtcagatggtcgctgctggctggacgccctggagctggccctgcgctgctctagcctactgagactgggcacctgcaagccgggccgagacggggagccagggacctcgccagacgcatcaccctcatcgctctgtgggctgccagcctcagccaccgtccacccagaccaagacctgttcccactgaacgggtcttccctggagaacgatgcattctcagacaagtcggagagagagaaccctgaggagtcagataccgagacccaggaccatagccggaagacggagagtggcagcgaccagtcagagacccctggggccccggtgcggagagggaccacctatgtggagcaggtccaggaggagctgggggagctgggcgaggcgtcccaggtggagacagtgtcagaggagaacaagagtctgatgtggaccctgctgaagcagctacggccaggcatggacctgtcccgcgtggtgctacccacgttcgtactggagccgcgctccttcctgaacaagctctccgactactactaccacgcagacctgctctccagggctgcggtggaggaggatgcctacagccgcatgaagctggtgctgcggtggtacctgtctggcttctacaagaagcccaagggaatcaagaagccgtacaaccccatcctgggggagaccttccgctgctgctggttccacccgcagactgacagccgcacattctacatagcagagcaggtgtcccaccacccgcccgtgtctgccttccacgtcagcaaccggaaggacggcttctgcatcagtggcagcatcacagccaagtccaggttttatgggaactcgctgtcggcgctgctggacggcaaagccacgctcaccttcctgaaccgagccgaggattacacccttaccatgccctacgcccactgcaaaggaatcctgtatggcacgatgaccctggagctgggtgggaaggtcaccatcgagtgtgcgaagaacaacttccaggcccagctggaattcaaactcaagcccttcttcgggggtagcaccagcatcaaccagatctcgggaaagatcacgtcgggagaggaagtcctggcgagcctcagtggccactgggacagggacgtgtttatcaaggaggaagggagcggaagcagtgcgcttttctggaccccgagcggggaggtccgcagacagaggctgaggcagcacacggtgccgctggaggagcagacggagctggagtccgagaggctctggcagcacgtcaccagggccatcagcaagggcgaccagcacagggccacacaggagaagtttgcactggaggaggcacagcggcagcgggcccgtgagcggcaggagagcctcatgccctggaagccgcagctgttccacctggaccccatcacccaggagtggcactaccgatacgaggaccacagcccctgggaccccctgaaggacatcgcccagtttgagcaagacgggatcctgcggaccttgcagcaggaggccgtggcccgccagaccaccttcctgggcagcccagggcccaggcacgagaggtctggcccagaccagcggcttcgcaaggccagcgaccagccctccggccacagccaggccacggagagcagcggatccacgcctgagtcctgcccagagctctcagacgaggagcaggatggtgactttgtccctggcggtgagagcccatgccctcggtgcaggaaggaggcgcggcggctgcaggccctgcacgaggccatcctctccatccgagaggcccagcaggagctgcacaggcacctctcggccatgctgagctccacggcacgggcagcacaggcaccgaccccaggcctcctgcagagcccccgatcctggttcctgctctgcgtgttcctggcgtgtcagctgttcattaaccacatcctcaaataggagccctgagggcagagctcctggccggtcctgagccctccctcccaggcacccagcactttaagcctgctccatggaggcagagaggcccggcaagcacagccactgtgacggggagtccaggcgcaggagggacccggggccacaaggcgctgcgggcccaggtgtgctgggcccctctcaggggcactggcctctctgcag

SEQ ID NO: 241296 - DNA, 3619 bp, Artificial Sequence
  derived and/or modified sequence
atttcctgcagccaggcccgcgccgccagtggagcccccgcgcgcccggccggcccggagcaccgagctcgcggcacgaagcccccgagcgcccacagcatgaaggaggaggccttcctccggcgccgcttctccctgtgtccaccttcctccacccctcagaaagtcgacccccggaagctcacccggaacttgctcctcagcggagacaatgagctctacccactcagcccagggaaggacatggagcccaacggcccgtcgctgcccagggatgaagggcccccgaccccaagctctgccacgaaggtgccaccggcagagtacaggctgtgcaacgggtcagacaaggaatgtgtgtcccccaccgccagggtcaccaagaaggagactctcaaggcgcagaaggagaactaccggcaggagaagaagcgcgccacacggcagctgctcagcgctctgacagaccccagcgtggtcatcatggctgacagcctgaagggccccaaaggtgagagcgtgggctccatcacacagcccctgcccagcagctacctgatcttcagggccgcctccgagtcagatggtcgctgctggctggacgccctggagctggccctgcgctgctctagcctactgagactgggcacctgcaagccgggccgagacggggagccagggacctcgccagacgcatcaccctcatcgctctgtgggctgccagcctcagccaccgtccacccagaccaagacctgttcccactgaacgggtcttccctggagaacgatgcattctcagacaagtcggagagagagaaccctgaggagtcagataccgagacccaggaccatagccggaagacggagagtggcagcgaccagtcagagacccctggggccccggtgcggagagggaccacctatgtggagcaggtccaggaggagctgggggagctgggcgaggcgtcccaggtggagacagtgtcagaggagaacaagagtctgatgtggaccctgctgaagcagctacggccaggcatggacctgtcccgcgtggtgctacccacgttcgtactggagccgcgctccttcctgaacaagctctccgactactactaccacgcagacctgctctccagggctgcggtggaggaggatgcctacagccgcatgaagctggtgctgcggtggtacctgtctggcttctacaagaagcccaagggaatcaagaagccgtacaaccccatcctgggggagaccttccgctgctgctggttccacccgcagactgacagccgcacattctacatagcagagcaggtgtcccaccacccgcccgtgtctgccttccacgtcagcaaccggaaggacggcttctgcatcagtggcagcatcacagccaagtccaggttttatgggaactcgctgtcggcgctgctggacggcaaagccacgctcaccttcctgaaccgagccgaggattacacccttaccatgccctacgcccactgcaaaggaatcctgtatggcacgatgaccctggagctgggtgggaaggtcaccatcgagtgtgcgaagaacaacttccaggcccagctggaattcaaactcaagcccttcttcgggggtagcaccagcatcaaccagatctcgggaaagatcacgtcgggagaggaagtcctggcgagcctcagtggccactgggacagggacgtgtttatcaaggaggaagggagcggaagcagtgcgcttttctggaccccgagcggggaggtccgcagacagaggctgaggcagcacacggtgccgctggaggagcagacggagctggagtccgagaggctctggcagcacgtcaccagggccatcagcaagggcgaccagcacagggccacacaggagaagtttgcactggaggaggcacagcggcagcgggcccgtgagcggcaggagagcctcatgccctggaagccgcagctgttccacctggaccccatcacccaggagtggcactaccgatacgaggaccacagcccctgggaccccctgaaggacatcgcccagtttgagcaagacgggatcctgcggaccttgcagcaggaggccgtggcccgccagaccaccttcctgggcagcccagggcccaggcacgagaggtctggcccagaccagcggcttcgcaaggccagcgaccagccctccggccacagccaggccacggagagcagcggatccacgcctgagtcctgcccagagctctcagacgaggagcaggatggtgactttgtccctggcggtgagagcccatgccctcggtgcaggaaggaggcgcggcggctgcaggccctgcacgaggccatcctctccatccgagaggcccagcaggagctgcacaggcacctctcggccatgctgagctccacggcacgggcagcacaggcaccgaccccaggcctcctgcagagcccccgatcctggttcctgctctgcgtgttcctggcgtgtcagctgttcattaaccacatcctcaaataggagccctgagggcagagctcctggccggtcctgagccctccctcccaggcacccagcactttaagcctgctccatggaggcagagaggcccggcaagcacagccactgtgacggggagtccaggcgcaggagggacccggggccacaaggcgctgcgggcccaggtgtgctgggcccctctcaggggcactggcctctctgcagggccttccgcccagcgctggccttaatgctaaagccaaatgcagcttctgctgtgcgacgcactcctggccatcttgccgtgtcaccccctgtccggcctccacttgccatgggggatggatggatttagggtgggagggcctgtgggggccctggacagtcacaccccagcagcagtgagtgggcaggtttggaggagccccgagtggcccaggagtccccccacacacagatgcataggcctgccttccggagaccctgtccacattgccgggaccaccctggtggggccactggtgggtgccagggacaggttagggccactctggggaaggcattttggttttttattccacgctgtgctgtttggatgggagccccacagaggcaggtcctggaaccaccccacccccacacctggacgctcgctctggtgggggcacacgcaggtggaggtggttgtgggtgcaggtgtgtgcaggggtgtggggggcgcaggggtgtggcttagctggccccgcacccaggccggggaggctcaagttcgccactttactcagaccgatgcacagtcttcccattttacacttttttaataaacataattgcaatattttaggtgggctgcgagctgcagtcagccttcacgtctggcctcagtccccgtgtcagtgccgctctgcgtgtgcgtgtgcgcgtgtgtgagcctctacacatatatatacgtacagagccttaaaccacatcgtggcggtgccgtctgagctgtagcgggtggctttgtttccagtttttgtacccgtgtccttgtctcccctcctcccccatctggggatgtgtctgtgttccacaccttgaaataaacagacacatacgtgtt

SEQ ID NO: 241297 - DNA, 554 bp, Artificial Sequence
  derived and/or modified sequence
tgaccacccaccaccaggctcccagggcccaggccctcctcaccctgcctcagaagtcccctgagagggggacttcttagccaggggcacccccaccatgtggctctgaagccccttccggggcggtgacctcctgctgcccctccttccttccttccagaagcccccgagcgcccacagcatgaaggaggaggccttcctccggcgccgcttctccctgtgtccaccttcctccacccctcagaaagtcgacccccggaagctcacccggaacttgctcctcagcggagacaatgagctctacccactcagcccagggaaggacatggagcccaacggcccgtcgctgcccagggatgaagggcccccgaccccaagctctgccacgaaggtgccaccggcagagtacaggctgtgcaacgggtcagacaaggaatgtgtgtcccccaccgccagggtcaccaagaaggagactctcaaggcgcagaaggagaactaccggcaggagaagaagcgcgccacacggcagctgctcagcgctctgacagacccca

SEQ ID NO: 241298 - DNA, 575 bp, Artificial Sequence
  derived and/or modified sequence
agcacataaggggcagggacaacgggctcagatgtctggggctcctcttgtgttctgatggctcctgagacggggagaaacggcgacagtttcctgggttcaggaagggagaggaggcgcctcgcaccctggctagggtgggctgggggcctgcacccctaagttggagaaccccacgaagctgaccccactcaccgctgcccaccccgccaagcctcctggccattttcagcggagtgtcccgacctctggccgcccggaagcccccgagcgcccacagcatgaaggaggaggccttcctccggcgccgcttctccctgtgtccaccttcctccacccctcagaaagtcgacccccggaagctcacccggaacttgctcctcagcggagacaatgagctctacccactcagcccagggaaggacatggagcccaacggcccgtcgctgcccagggatgaagggcccccgaccccaagctctgccacgaaggtgccaccggcagagtacaggctgtgcaacgggtcagacaaggaatgtgtgtcccccaccgccagggtcaccaagaaggagact

SEQ ID NO: 241299 - DNA, 774 bp, Artificial Sequence
  derived and/or modified sequence
agaccgctgggctgcctcctgtcagaagccaactggagttagggtttggggtgactcctgggggtatggaggggtcacagggtgggcttacctgcccctccctcgtccctgggctgagcccagcccctccctcatccttgggctgagcgggtctgccccgccgaagcggctgggtggatttcctctcttgccgtttcgcaacttgctcccctctgtgtgtctgccccagtctcttcaaggtgccttttacaggaagacttctgtaagggtcccaccccacctgatacagcctcccaaagcctggagaagtgggccagcctttgggatcctagatagatgctcttgggtctgcctgcaccagggctgatccagatcccagactgaacagaaactctgctccccaaccccaggagtaaggcccctctgcacgtttttatcccacctccttggtacacagggccttgctgttccttgaacctgccagaagcccccgagcgcccacagcatgaaggaggaggccttcctccggcgccgcttctccctgtgtccaccttcctccacccctcagaaagtcgacccccggaagctcacccggaacttgctcctcagcggagacaatgagctctacccactcagcccagggaaggacatggagcccaacggcccgtcgctgcccagggatgaagggcccccgaccccaagctctgccacgaaggtgccaccggcagagtacaggctgtgcaacgggtcagacaaggaatgtgtgtcccccac

SEQ ID NO: 241300 - DNA, 706 bp, Artificial Sequence
  derived and/or modified sequence
atttcctccatgctctaggatgggaaggacaagagggcgtgactcttcccagagtcccatcatctctgatttaggaatggagcccttagggtgtctcacctcctcgggatgcctaatagtgtgtttggtgaatgcagatggacttaactggtccatagatcccctctcaccctgctgacacgaagacaaggatgaaggggaaagttgaggctcaacaactgaacagtattccttctaaatatgtacattcttagggattttaagtggaaaacagggaggagatttgagggataccccacctcggcaggcagctggtcaggctgcctgttgtgaccagcctggggtcgccttcccttcatccaaggccaggggagatggcaaaccttcagtaagcgctgccgtacctggcagagcagaagcaccaccccagcttggagacagcatgcccctgactgctggtcacggatggccccttgaagcccccgagcgcccacagcatgaaggaggaggccttcctccggcgccgcttctccctgtgtccaccttcctccacccctcagaaagtcgacccccggaagctcacccggaacttgctcctcagcggagacaatgagctctacccactcagcccagggaaggacatggagcccaacggcccgtcgctgcccagggatgaagggcccccgaccccaagctctgccacgaa

SEQ ID NO: 241301 - DNA, 1731 bp, Artificial Sequence
  derived and/or modified sequence
tacaaccccatcctgggggagaccttccgctgctgctggttccacccgcagactgacagccgcacattctacatagcagagcaggtgtcccaccacccgcccgtgtctgccttccacgtcagcaaccggaaggacggcttctgcatcagtggcagcatcacagccaagtccaggttttatgggaactcgctgtcggcgctgctggacggcaaagccacgctcaccttcctgaaccgagccgaggattacacccttaccatgccctacgcccactgcaaaggaatcctgtatggcacgatgaccctggagctgggtgggaaggtcaccatcgagtgtgcgaagaacaacttccaggcccagctggaattcaaactcaagcccttcttcgggggtagcaccagcatcaaccagatctcgggaaagatcacgtcgggagaggaagtcctggcgagcctcagtggccactgggacagggacgtgtttatcaaggaggaagggagcggaagcagtgcgcttttctggaccccgagcggggaggtccgcagacagaggctgaggcagcacacggtgccgctggaggagcagacggagctggagtccgagaggctctggcagcacgtcaccagggccatcagcaagggcgaccagcacagggccacacaggagaagtttgcactggaggaggcacagcggcagcgggcccgtgagcggcaggagagcctcatgccctggaagccgcagctgttccacctggaccccatcacccaggagtggcactaccgatacgaggaccacagcccctgggaccccctgaaggacatcgcccagtttgagcaagacgggatcctgcggaccttgcagcaggaggccgtggcccgccagaccaccttcctgggcagcccagggcccaggcacgagaggtctggcccagaccagcggcttcgcaaggccagcgaccagccctccggccacagccaggccacggagagcagcggatccacgcctgagtcctgcccagagctctcagacgaggagcaggatggtgactttgtccctggcggtgagagcccatgccctcggtgcaggaaggaggcgcggcggctgcaggccctgcacgaggccatcctctccatccgagaggcccagcaggagctgcacaggcacctctcggccatgctgagctccacggcacgggcagcacaggcaccgaccccaggcctcctgcagagcccccgatcctggttcctgctctgcgtgttcctggcgtgtcagctgttcattaaccacatcctcaaataggagccctgagggcagagctcctggccgtccccccacacacagatgcataggcctgccttccggagaccctgtccacattgccgggaccaccctggtggggccactggtgggtgccagggacaggttagggccactctggggaaggcattttggttttttattccacgctgtgctgtttggatgggagccccacagaggcaggtcctggaaccaccccacccccacacctggacgctcgctctggtgggggcacacgcaggtggaggtggttgtgggtgcaggtgtgtgcaggggtgtggggggcgcaggggtgtggcttagctggccccgcacccaggccggggaggctcaagttcgccactttactcagaccgatgcacagtcttcccattttacacttttttaataaacataattgcaatattttaggtg

SEQ ID NO: 241302 - DNA, 2436 bp, Artificial Sequence
  derived and/or modified sequence
atgaaagaagaagctttcctgcggaggcgcttttctttatgcccgccatcctccactcctcagaaagtggatcctaggaagctgaccagaaacttactcctctccggagacaacgaactatatcccctgtcccctggcaaagatatggagccaaatggaccatcactgcctagggacgaaggcccaccaaccccgtctagcgcgaccaaggtacccccagccgagtacagactttgcaacgggtcggacaaagagtgtgtttcccccaccgcgagagtgacaaaaaaagagacgctcaaagctcaaaaagagaactacaggcaggagaagaagcgagccacccgacagcttcttagcgctttgactgaccccagcgtcgtcataatggcagactcactgaagggccctaagggagaatccgttggctccatcacccagcccctcccgagcagctacttgattttcagggccgcaagcgaatccgatggcagatgttggcttgatgcccttgaactagccctgagatgctcgtccctgttacggctcggcacttgtaagccaggcagagacggagaacccggaaccagtccggatgcgagtccctcgtccttgtgcggcttgccagcaagcgccactgtgcatcctgatcaggatctttttcccttgaacggcagctcgctggagaatgatgccttcagcgacaagagtgaaagggagaatccagaagagtcagatacagaaacccaggatcattcaaggaagactgaatctggctcagatcagagcgagaccccaggcgctccagtgaggcgcggaactacatatgtggagcaggtgcaagaggagttaggtgagctcggagaggcttcccaggtggagaccgtaagcgaggagaataagagcttgatgtggaccctccttaagcagcttcggcctggaatggacctgtctcgggtcgtccttcctaccttcgttttggaaccacggagctttcttaacaaactgagtgactactactatcatgctgatttgctgtcccgggcagctgtggaggaggatgcctattctcggatgaagttagtcctgcggtggtacctttcagggttttacaagaagcctaagggcataaagaagccttacaatcccatcctgggggaaacttttagatgctgttggttccatccacagacagattcgagaacattctatatcgcagaacaggtcagtcaccacccccctgtgagcgcgttccacgtatcgaatagaaaggacggattctgcatctctggatctattacagctaagagcaggttctatggaaactccctttcagcactgctggacggaaaggctactctcacattcttaaacagagccgaggactacaccttaaccatgccgtacgctcattgtaagggcatactgtatgggactatgaccctcgagctcggaggtaaggtgaccatagagtgcgcaaaaaataactttcaggctcagctcgaattcaaactgaagccatttttcgggggtagtacttcaattaaccaaatatccgggaaaataacctctggcgaggaagttctggcctcccttagtggacactgggatcgggatgtttttatcaaagaagagggctcaggcagttccgcgctgttctggacacctagtggagaggtgaggcgacagagacttaggcagcacaccgtgcctcttgaggagcagacagaactagagtccgagaggctgtggcagcacgtgaccagggccatttctaaaggtgatcagcaccgcgcaactcaggaaaaatttgccctggaagaagcccaacgccagcgggctcgggagcgacaggagagtttgatgccatggaagccccagttatttcacctggatcctattacccaggagtggcactatcgctacgaagaccacagtccatgggatcctctgaaagatattgcccaattcgaacaggatgggatactgcgcactctccagcaagaagctgtcgcgaggcagaccacctttttaggttcaccagggccacggcatgaacgctctggacctgaccagagacttcggaaggcgtccgatcagccctctgggcactcacaggcgaccgagagctcggggagtacgcctgaaagttgcccagagctgtccgatgaagaacaggatggggacttcgttccgggtggagagtcaccttgtcctcgatgcagaaaagaggccaggagacttcaggccctacatgaggctatccttagtattcgagaagcccagcaggaactgcaccggcacctgagtgcgatgctgagcagtactgccagagctgctcaggcacccaccccaggcctcctgcagtctcctcgcagctggttcctattgtgcgtctttctcgcatgccaactgtttatcaaccacattctcaagtag

SEQ ID NO: 241303 - DNA, 1320 bp, Artificial Sequence
  derived and/or modified sequence
atggacctttcccgagttgttctgccgacctttgtgctggaacctcgttcatttctgaataaattaagtgactactactaccacgccgatctcttgagcagggcagcagtagaggaggacgcctactctagaatgaagctcgttctgcgttggtacctgagtggcttctataaaaaacccaaaggaattaagaaaccttacaatcctatcctgggcgaaacttttcggtgttgttggtttcacccccagaccgattccagaactttctacatagcggaacaagtgagtcaccaccccccagtgagtgcatttcatgtgtcaaaccgcaaagatggtttttgtatctcaggctcaattactgccaaatctcgcttttacggcaatagtctcagcgccttgctggacgggaaggcaacactgacctttctcaacagggccgaggactacacgcttaccatgccttatgctcactgcaagggcattttgtacggaacgatgacgctcgagttaggagggaaggtcactattgaatgtgccaagaacaacttccaggctcagctggagttcaagttgaagccattctttggaggatcaacttctataaatcagattagcggaaagatcacttcaggagaggaagtgttagcctcacttagtggccattgggaccgggacgtgtttatcaaagaagaggggagcggcagctctgcccttttttggactcccagcggggaagtgagacgacagaggctccgacagcatacagtccctcttgaagagcaaactgaactcgagtcagaacgcctgtggcagcacgttactagagcaattagcaaaggagaccagcatagagccactcaagagaaattcgccttggaagaagctcaacgacaacgagcacgggagcgccaggaaagcttgatgccgtggaaaccccagctgtttcacctggacccaatcacccaagagtggcactataggtatgaggaccactcaccatgggatccgttaaaagacattgcacagtttgaacaggatgggatcctgagaaccttgcagcaggaagctgtagcacgtcaaacaaccttcctagggagccccggacccaggcacgagcgcagtgggcctgaccagcgcctccgtaaggcgtcggatcaaccctctggccacagccaagcaacggagagctcaggatccacccctgagtcatgcccagaacttcatggaaccgggtcgactggtacagatccacgcccacctgccgagcctccgatcctcgtccccgcactaagagttccaggggtttccgcagtacactag

SEQ ID NO: 241304 - DNA, 2436 bp, Artificial Sequence
  derived and/or modified sequence
atgaaggaggaggctttcttgcgcaggcgtttctccctctgtcctccaagttctactccccagaaggtggaccctcgcaagctgaccagaaatcttctcctgagcggcgataatgagctttatcccttatctccaggcaaggacatggagcctaatggaccctctctgccacgggatgaggggccacccacaccctctagcgccaccaaggttccacccgcagagtaccgattatgcaatggcagtgacaaagaatgcgttagccccaccgcgagggtgaccaagaaagaaactttaaaagcacagaaggaaaattaccgccaggagaaaaaaagggctaccaggcagctactcagcgccctcacagatccttctgtcgtgattatggccgactcactgaaaggacccaagggggagagtgtgggctctataactcaaccacttccgtcgtcctacctgatttttagggctgccagcgagagcgatggccgatgctggctggacgcattagagctcgccctgagatgtagtagtctgctgaggctcggaacctgtaagccaggacgagacggcgaaccaggaacatcccctgacgccagcccatcttccctgtgcggcctccccgcatcggcaaccgttcaccccgaccaggatctgtttcccctgaatggcagctctttggaaaacgatgcctttagcgacaagagtgagagagagaaccctgaggagtctgacacagaaacccaggaccacagccgcaagacagagtcaggaagcgatcaaagtgaaacccccggtgctccggttaggcgcggaaccacctatgtcgagcaggtccaggaggagctcggtgagctgggggaagcatcacaagtggagactgtgagcgaggaaaataaaagcctgatgtggacgctgctcaaacagctgcgccctgggatggatttgtcacgtgtggtactgccgacattcgtgctggaacccagaagcttcttaaacaagctaagcgattactactatcatgcagaccttttgtctagggctgccgtagaggaagacgcgtattcaaggatgaagctcgtgcttcgctggtatctgagcgggttttataaaaagccaaaaggcattaaaaagccttacaatccaatacttggtgagacctttcgctgttgttggttccatccccagaccgatagcagaactttctacattgcggaacaggtcagccaccatcctcccgtctccgcctttcatgtctccaatcgcaaggatggattttgtatcagcgggtccatcacggcgaagtcaagattctacggcaattctctgagcgctctactcgacggaaaagccaccctcacatttttgaatagggcagaggattacaccctcactatgccgtacgctcactgtaagggcatactgtacggaaccatgactctcgaactgggcggtaaggtcaccatagaatgtgctaagaataatttccaagcacagctggagtttaagctcaagcccttctttggcggaagtacatctatcaaccagatatcaggaaagattacaagcggcgaggaggtgctggcatctctctccggacactgggaccgggatgtatttattaaagaagaaggatcaggctcttcagcgttgttctggacgcctagcggagaggtgaggcggcaacgtctgcggcagcacacggttccactggaggaacagaccgagcttgagagtgagcggctgtggcagcacgtcaccagggctatttccaaaggagatcagcatcgggctacccaagagaaatttgctctggaggaggcccaacggcaaagggccagggagaggcaggagtccctcatgccctggaaacctcagctgttccacctcgatcccattacgcaggagtggcactatcgatatgaggatcactctccatgggacccattaaaagatatcgcccagtttgagcaggacgggattctgagaaccttacagcaggaagccgtcgctcgccagactacgtttctcggttctcccggaccacgccacgaacgcagcgggcctgaccaaagactgcgaaaggcatctgatcaaccttccggccactcacaggcaacggagtcaagcggatcaacccccgaaagttgcccagagctgtctgacgaggagcaagacggagatttcgtgcccggaggcgaaagtccgtgtccgaggtgccggaaggaggcccgaaggctgcaggctctccacgaagcaatcctcagcatcagggaagctcagcaggaactgcacaggcacctctccgctatgttgagttccaccgcgagggctgctcaagctcctactcccggattgctgcagtccccacggtcttggtttcttctctgtgtgttccttgcctgtcaactctttatcaatcacatcctgaaatag

SEQ ID NO: 241305 - DNA, 375 bp, Artificial Sequence
  derived and/or modified sequence
atgaaggaagaggcttttttgagacgaagatttagcctctgccccccttctagcacaccgcagaaggttgaccccagaaagcttaccagaaatttgcttcttagcggcgataacgagttgtatcccctctccccaggaaaggacatggagcctaacggtcctagcctgccacgggatgaaggacctcctacaccctcatccgcaacaaaagtgcctcccgctgagtatcgcctgtgtaacgggtccgacaaggagtgcgtgtctcctactgcccgtgttactaagaaagaaacactgaaagctcagaaagagaactaccggcaagaaaagaaacgggctacccgtcagttgttgtccgctctgaccgatccctag

SEQ ID NO: 241306 - DNA, 297 bp, Artificial Sequence
  derived and/or modified sequence
atgaaagaggaggcttttctacggcgacgcttctctctgtgtcctccaagttctacacctcagaaggtagaccccaggaaacttactagaaacctgttgctgtcaggggacaacgaactctacccactcagtcccggaaaggatatggagccaaatggaccttcccttccccgagacgaaggcccacccacccctagtagcgctactaaggtgcccccagcggaatatcgtctgtgcaatgggagcgacaaagagtgcgttagccctaccgctagagtaaccaagaaggagacttag

SEQ ID NO: 241307 - DNA, 273 bp, Artificial Sequence
  derived and/or modified sequence
atgaaagaagaggccttcctaagacggaggttttccctgtgccccccaagtagtacaccacagaaggtggatcccaggaagctcacaaggaacctgcttctcagtggcgacaacgaactgtacccactctccccgggtaaggatatggagcctaacggccctagtctcccacgagacgaaggccctccaacgccctcgagtgctacgaaagtgccgccagctgagtaccgcctgtgtaatggaagtgacaaagagtgtgtgtcaccaacttag

SEQ ID NO: 241308 - DNA, 210 bp, Artificial Sequence
  derived and/or modified sequence
atgaaggaggaagccttcttgagacgcaggttcagcctgtgcccaccatcgagcacccctcagaaagtggacccgagaaaactaacgaggaacttgcttctgagcggtgataacgagctgtatcctttaagtcccggtaaggatatggaacctaacggcccttctctcccgagggatgaggggcctccaactcctagctctgctacttag

SEQ ID NO: 241309 - DNA, 1299 bp, Artificial Sequence
  derived and/or modified sequence
tataaccctatcttgggggaaacattcaggtgctgctggttccacccccaaacagacagtaggaccttctatatcgctgaacaggtttcacaccaccctcccgtgtccgcatttcacgtatctaataggaaggatgggttctgcatttcaggctctatcactgccaagtcaaggttttacggcaacagcctgagcgcgctccttgacggaaaagctacactaacatttctgaatcgggcagaggattatacgctaactatgccttacgcccactgcaagggcatcctgtacgggacgatgactttggaactagggggaaaggtgaccatcgagtgtgccaaaaacaacttccaagcacagctggagtttaagcttaagccgtttttcggagggtccacaagcatcaatcagatttcaggtaagatcacttctggcgaggaagttttagctagtctgagtgggcactgggacagagacgtctttattaaggaagaggggtctggcagttcagcgctgttttggacgccaagcggtgaggtgcggcgtcagcggttaagacaacacaccgtgccattggaggaacagaccgaactggagagcgaaagattgtggcagcacgtgacccgggcaattagcaagggcgaccaacaccgcgcaacacaagagaagttcgctctcgaagaagctcagcggcagcgggctagggaaagacaagaatcactgatgccctggaagccccagctattccatttagaccccattacccaggaatggcactaccgatatgaagatcactcaccttgggacccactgaaggacatcgcccagtttgaacaggacggcattctgcgcacccttcaacaggaagccgtggcccgacagaccactttcctgggaagccccggtccaaggcatgagaggagcgggccagatcagaggctccggaaggctagcgaccagccatcaggccactctcaggccacggagagtagcgggagtacccctgagtcctgtcccgagctctcggacgaagagcaggatggagactttgtcccgggaggggaaagcccctgccccagatgtaggaaggaggccagacggctgcaggctctgcacgaagccattttatccatccgagaggctcaacaggagttacaccgtcacctcagtgccatgctgagcagtactgctcgggcagcgcaggcccctaccccagggctcctgcagagtcctcgaagttggtttctgctgtgcgtgttcttagcgtgccagctcttcatcaatcatatattgaagtag

SEQ ID NO: 241310 - DNA, 2436 bp, Artificial Sequence
  derived and/or modified sequence
atgaaggaggaggccttcctgagaagaagattcagcctgtgcccccccagcagcaccccccagaaggtggaccccagaaagctgaccagaaacctgctgctgagcggcgacaacgagctgtaccccctgagccccggcaaggacatggagcccaacggccccagcctgcccagagacgagggcccccccacccccagcagcgccaccaaggtgccccccgccgagtacagactgtgcaacggcagcgacaaggagtgcgtgagccccaccgccagagtgaccaagaaggagaccctgaaggcccagaaggagaactacagacaggagaagaagagagccaccagacagctgctgagcgccctgaccgaccccagcgtggtgatcatggccgacagcctgaagggccccaagggcgagagcgtgggcagcatcacccagcccctgcccagcagctacctgatcttcagagccgccagcgagagcgacggcagatgctggctggacgccctggagctggccctgagatgcagcagcctgctgagactgggcacctgcaagcccggcagagacggcgagcccggcaccagccccgacgccagccccagcagcctgtgcggcctgcccgccagcgccaccgtgcaccccgaccaggacctgttccccctgaacggcagcagcctggagaacgacgccttcagcgacaagagcgagagagagaaccccgaggagagcgacaccgagacccaggaccacagcagaaagaccgagagcggcagcgaccagagcgagacccccggcgcccccgtgagaagaggcaccacctacgtggagcaggtgcaggaggagctgggcgagctgggcgaggccagccaggtggagaccgtgagcgaggagaacaagagcctgatgtggaccctgctgaagcagctgagacccggcatggacctgagcagagtggtgctgcccaccttcgtgctggagcccagaagcttcctgaacaagctgagcgactactactaccacgccgacctgctgagcagagccgccgtggaggaggacgcctacagcagaatgaagctggtgctgagatggtacctgagcggcttctacaagaagcccaagggcatcaagaagccctacaaccccatcctgggcgagaccttcagatgctgctggttccacccccagaccgacagcagaaccttctacatcgccgagcaggtgagccaccacccccccgtgagcgccttccacgtgagcaacagaaaggacggcttctgcatcagcggcagcatcaccgccaagagcagattctacggcaacagcctgagcgccctgctggacggcaaggccaccctgaccttcctgaacagagccgaggactacaccctgaccatgccctacgcccactgcaagggcatcctgtacggcaccatgaccctggagctgggcggcaaggtgaccatcgagtgcgccaagaacaacttccaggcccagctggagttcaagctgaagcccttcttcggcggcagcaccagcatcaaccagatcagcggcaagatcaccagcggcgaggaggtgctggccagcctgagcggccactgggacagagacgtgttcatcaaggaggagggcagcggcagcagcgccctgttctggacccccagcggcgaggtgagaagacagagactgagacagcacaccgtgcccctggaggagcagaccgagctggagagcgagagactgtggcagcacgtgaccagagccatcagcaagggcgaccagcacagagccacccaggagaagttcgccctggaggaggcccagagacagagagccagagagagacaggagagcctgatgccctggaagccccagctgttccacctggaccccatcacccaggagtggcactacagatacgaggaccacagcccctgggaccccctgaaggacatcgcccagttcgagcaggacggcatcctgagaaccctgcagcaggaggccgtggccagacagaccaccttcctgggcagccccggccccagacacgagagaagcggccccgaccagagactgagaaaggccagcgaccagcccagcggccacagccaggccaccgagagcagcggcagcacccccgagagctgccccgagctgagcgacgaggagcaggacggcgacttcgtgcccggcggcgagagcccctgccccagatgcagaaaggaggccagaagactgcaggccctgcacgaggccatcctgagcatcagagaggcccagcaggagctgcacagacacctgagcgccatgctgagcagcaccgccagagccgcccaggcccccacccccggcctgctgcagagccccagaagctggttcctgctgtgcgtgttcctggcctgccagctgttcatcaaccacatcctgaagtag

SEQ ID NO: 241311 - DNA, 1320 bp, Artificial Sequence
  derived and/or modified sequence
atggacctgagcagagtggtgctgcccaccttcgtgctggagcccagaagcttcctgaacaagctgagcgactactactaccacgccgacctgctgagcagagccgccgtggaggaggacgcctacagcagaatgaagctggtgctgagatggtacctgagcggcttctacaagaagcccaagggcatcaagaagccctacaaccccatcctgggcgagaccttcagatgctgctggttccacccccagaccgacagcagaaccttctacatcgccgagcaggtgagccaccacccccccgtgagcgccttccacgtgagcaacagaaaggacggcttctgcatcagcggcagcatcaccgccaagagcagattctacggcaacagcctgagcgccctgctggacggcaaggccaccctgaccttcctgaacagagccgaggactacaccctgaccatgccctacgcccactgcaagggcatcctgtacggcaccatgaccctggagctgggcggcaaggtgaccatcgagtgcgccaagaacaacttccaggcccagctggagttcaagctgaagcccttcttcggcggcagcaccagcatcaaccagatcagcggcaagatcaccagcggcgaggaggtgctggccagcctgagcggccactgggacagagacgtgttcatcaaggaggagggcagcggcagcagcgccctgttctggacccccagcggcgaggtgagaagacagagactgagacagcacaccgtgcccctggaggagcagaccgagctggagagcgagagactgtggcagcacgtgaccagagccatcagcaagggcgaccagcacagagccacccaggagaagttcgccctggaggaggcccagagacagagagccagagagagacaggagagcctgatgccctggaagccccagctgttccacctggaccccatcacccaggagtggcactacagatacgaggaccacagcccctgggaccccctgaaggacatcgcccagttcgagcaggacggcatcctgagaaccctgcagcaggaggccgtggccagacagaccaccttcctgggcagccccggccccagacacgagagaagcggccccgaccagagactgagaaaggccagcgaccagcccagcggccacagccaggccaccgagagcagcggcagcacccccgagagctgccccgagctgcacggcaccggcagcaccggcaccgaccccagaccccccgccgagccccccatcctggtgcccgccctgagagtgcccggcgtgagcgccgtgcactag

SEQ ID NO: 241312 - DNA, 375 bp, Artificial Sequence
  derived and/or modified sequence
atgaaggaggaggccttcctgagaagaagattcagcctgtgcccccccagcagcaccccccagaaggtggaccccagaaagctgaccagaaacctgctgctgagcggcgacaacgagctgtaccccctgagccccggcaaggacatggagcccaacggccccagcctgcccagagacgagggcccccccacccccagcagcgccaccaaggtgccccccgccgagtacagactgtgcaacggcagcgacaaggagtgcgtgagccccaccgccagagtgaccaagaaggagaccctgaaggcccagaaggagaactacagacaggagaagaagagagccaccagacagctgctgagcgccctgaccgacccctag

SEQ ID NO: 241313 - DNA, 297 bp, Artificial Sequence
  derived and/or modified sequence
atgaaggaggaggccttcctgagaagaagattcagcctgtgcccccccagcagcaccccccagaaggtggaccccagaaagctgaccagaaacctgctgctgagcggcgacaacgagctgtaccccctgagccccggcaaggacatggagcccaacggccccagcctgcccagagacgagggcccccccacccccagcagcgccaccaaggtgccccccgccgagtacagactgtgcaacggcagcgacaaggagtgcgtgagccccaccgccagagtgaccaagaaggagacctag

SEQ ID NO: 241314 - DNA, 273 bp, Artificial Sequence
  derived and/or modified sequence
atgaaggaggaggccttcctgagaagaagattcagcctgtgcccccccagcagcaccccccagaaggtggaccccagaaagctgaccagaaacctgctgctgagcggcgacaacgagctgtaccccctgagccccggcaaggacatggagcccaacggccccagcctgcccagagacgagggcccccccacccccagcagcgccaccaaggtgccccccgccgagtacagactgtgcaacggcagcgacaaggagtgcgtgagccccacctag

SEQ ID NO: 241315 - DNA, 210 bp, Artificial Sequence
  derived and/or modified sequence
atgaaggaggaggccttcctgagaagaagattcagcctgtgcccccccagcagcaccccccagaaggtggaccccagaaagctgaccagaaacctgctgctgagcggcgacaacgagctgtaccccctgagccccggcaaggacatggagcccaacggccccagcctgcccagagacgagggcccccccacccccagcagcgccacctag

SEQ ID NO: 241316 - DNA, 1299 bp, Artificial Sequence
  derived and/or modified sequence
tacaaccccatcctgggcgagaccttcagatgctgctggttccacccccagaccgacagcagaaccttctacatcgccgagcaggtgagccaccacccccccgtgagcgccttccacgtgagcaacagaaaggacggcttctgcatcagcggcagcatcaccgccaagagcagattctacggcaacagcctgagcgccctgctggacggcaaggccaccctgaccttcctgaacagagccgaggactacaccctgaccatgccctacgcccactgcaagggcatcctgtacggcaccatgaccctggagctgggcggcaaggtgaccatcgagtgcgccaagaacaacttccaggcccagctggagttcaagctgaagcccttcttcggcggcagcaccagcatcaaccagatcagcggcaagatcaccagcggcgaggaggtgctggccagcctgagcggccactgggacagagacgtgttcatcaaggaggagggcagcggcagcagcgccctgttctggacccccagcggcgaggtgagaagacagagactgagacagcacaccgtgcccctggaggagcagaccgagctggagagcgagagactgtggcagcacgtgaccagagccatcagcaagggcgaccagcacagagccacccaggagaagttcgccctggaggaggcccagagacagagagccagagagagacaggagagcctgatgccctggaagccccagctgttccacctggaccccatcacccaggagtggcactacagatacgaggaccacagcccctgggaccccctgaaggacatcgcccagttcgagcaggacggcatcctgagaaccctgcagcaggaggccgtggccagacagaccaccttcctgggcagccccggccccagacacgagagaagcggccccgaccagagactgagaaaggccagcgaccagcccagcggccacagccaggccaccgagagcagcggcagcacccccgagagctgccccgagctgagcgacgaggagcaggacggcgacttcgtgcccggcggcgagagcccctgccccagatgcagaaaggaggccagaagactgcaggccctgcacgaggccatcctgagcatcagagaggcccagcaggagctgcacagacacctgagcgccatgctgagcagcaccgccagagccgcccaggcccccacccccggcctgctgcagagccccagaagctggttcctgctgtgcgtgttcctggcctgccagctgttcatcaaccacatcctgaagtag

SEQ ID NO: 241317 - protein, 402 aa, Artificial Sequence
  derived and/or modified sequence
MGLGQGWGWEASCFACLIRSCCQVVTFTFPFGFQGISQSLENVSGYYADARLEVGSTQLRTAGSCSHSFKRSFLEKKRFTEEATKYFRERVSPVHLQILLTNNEAWKRFVTAAELPRDEADALYEALKKLRTYAAIEDEYVQQKDEQFREWFLKEFPQVKRKIQESIEKLRALANGIEEVHRGCTISNVVSSSTGAASGIMSLAGLVLAPFTAGTSLALTAAGVGLGAASAVTGITTSIVEHSYTSSAEAEASRLTATSIDRLKVFKEVMRDITPNLLSLLNNYYEATQTIGSEIRAIRQARARARLPVTTWRISAGSGGQAERTIAGTTRAVSRGARILSATTSGIFLALDVVNLVYESKHLHEGAKSASAEELRRQAQELEENLMELTQIYQRLNPCHTH

SEQ ID NO: 241318 - DNA, 83 bp, Artificial Sequence
  derived and/or modified sequence
gaatggaattgaaaggtatcaacaccaaacggaaaaaaaaacggaattatcgaatggaatcgaagagaatcatcgaacggacc

SEQ ID NO: 241319 - DNA, 1209 bp, Artificial Sequence
  derived and/or modified sequence
atgggccttggccagggctgggggtgggaggccagctgcttcgcctgcttaattcgcagttgttgccaggtggttacattcacctttccctttggattccaggggatctcccagtcactggagaatgtgtccgggtattatgccgacgctaggctggaagtcgggagtactcagctacgaacagctggaagctgcagccactcattcaagaggagtttcctggagaagaaacgctttaccgaggaggcaaccaagtactttcgggaacgagtgagcccagtgcacctgcagatcctgctgacaaacaatgaagcctggaagcggtttgtgactgcggcggagctgccacgcgatgaggcagatgccctctacgaggccctcaagaaactgcgcacatatgcggccatagaggatgagtatgtgcagcagaaagacgagcagtttcgcgagtggttcctgaaggagtttcctcaggtgaagaggaagatccaggagtctattgaaaagcttcgggccctggctaacggcattgaagaggtccaccgtggctgtactattagcaatgtcgtgtcttcctccacaggggctgcgagtgggatcatgagtctggctggtttggttctcgcaccattcaccgccggaaccagcctggctctcaccgctgccggagtgggactaggtgcggcgagcgccgtgactggcatcaccacctccattgtcgagcatagctacacatcatcagccgaagccgaagccagtcgcctgaccgccacaagcatcgaccgactgaaggtatttaaggaggtaatgcgggatatcacacccaacttattgtcattgttgaataactactacgaagccacccagactatcggttcagagattcgggcgatccgccaggctagagctcgcgctagactccccgtcaccacctggcgaatcagcgctgggagtggaggccaagccgagagaacaatagcaggtacaaccagggctgtgtctagaggcgccaggattctgagcgccaccacgagcggcattttcctggctttggacgtggtcaacttggtgtacgaatcaaagcatcttcatgaaggtgcgaaatcggcctccgctgaggaactaaggcggcaagcacaggagttggaggaaaatctaatggagctcactcaaatataccagcggctgaacccttgtcacacccattag

SEQ ID NO: 241320 - DNA, 1209 bp, Artificial Sequence
  derived and/or modified sequence
atgggcctgggccagggctggggctgggaggccagctgctttgcctgcctgatccgcagctgctgccaggtggtgaccttcaccttccccttcggcttccagggcatcagccagagcctggagaatgtgtctggctactatgcagatgcccggctggaggtgggcagcacccagctgaggacagctggcagctgcagccacagcttcaagaggagcttcctggagaagaagcgcttcacagaggaggccaccaagtacttccgggagcgggtgtcccctgtgcacctgcagatcctgctgaccaacaatgaggcctggaagagatttgtgacagctgctgagctgcccagagatgaagcagatgccctgtatgaggccctgaagaagctgcggacctacgccgccattgaagatgaatatgtgcagcagaaggatgagcagttccgggagtggttcctgaaggagttcccccaggtgaagaggaagatccaggagagcattgagaagctgcgggccctggccaatggaattgaggaggtgcaccggggctgcaccatcagcaatgtggtgagcagcagcactggagctgccagcggcatcatgagcctggccggcctggtgctggcccccttcaccgctggcaccagcctggccctgacagctgctggggtgggcctgggcgccgccagcgctgtgacaggcatcaccaccagcatcgtggagcacagctacaccagcagcgctgaggccgaggccagccggctgacagccaccagcattgaccggctgaaggtgttcaaggaggtgatgagggacatcacccccaacctgctgagcctgctgaacaactactatgaggccacccagaccatcggcagcgagatccgggccatccggcaggcccgggcccgggcccggctgcctgtgaccacctggaggatctctgctggcagcggcggccaggccgagaggaccatcgccggcaccaccagggctgtgtccagaggagcccgcatcctgagcgccaccaccagcggcatcttcctggccctggatgtggtgaacctggtgtatgagagcaagcacctgcacgagggcgccaagagcgccagcgctgaggagctgcggcggcaggcccaggagctggaggagaacctgatggagctgacccagatctaccagaggctgaacccctgccacacccactag

SEQ ID NO: 241321 - DNA, 1209 bp, Artificial Sequence
  derived and/or modified sequence
atgggcctgggccagggctggggctgggaggccagctgcttcgcctgcctgattaggtcgtgctgccaggttgtgacatttacattcccattcggatttcagggaatcagccaaagcttggagaatgtgagcggttattatgccgacgcaaggcttgaggtaggctcaacccagctccggactgccggtagttgctcccacagcttcaagcgatcttttctggagaaaaagaggttcacagaggaggcaacaaaatactttcgagaacgcgtgagtccagtgcacctgcagatactgttgactaacaacgaagcctggaagagatttgtgactgccgccgaacttcccagagatgaggcagatgccctgtacgaagcgctgaaaaagctaagaacctacgctgccatcgaagacgagtatgtgcagcagaaagacgagcagtttcgcgagtggtttctgaaggaattccctcaggtcaaaagaaaaattcaggaaagcattgaaaagctccgggctctggccaatggcattgaagaagtgcatcggggatgtacaatttccaatgtcgtatcatcttccactggggccgcgagcggtatcatgtcactggccggcctggttctcgcaccgttcaccgcaggaacctccctggcgctgacagccgccggtgtgggcttgggtgctgccagcgccgtgacaggcatcactacttccatcgtggagcactcctatacttcctccgccgaagcagaggcgtcaaggctgacagccacttccatcgatagactaaaggtgttcaaggaggttatgcgggatatcacacccaatcttctcagtctcttgaacaattattacgaagctacccagaccatcggctccgaaatcagagcaatacgacaagctcgtgcgcgagccaggctgcctgtcaccacgtggcggattagtgctggctcaggaggtcaggcggaacgcactatcgcagggactacccgagccgtatctcggggggcacgcattctgtctgccactacatccggcatttttctggcacttgacgtagttaacctcgtatacgagagcaaacacctgcatgaaggagctaagtccgcttcagcggaggagctgagaaggcaggctcaggaactggaagaaaatctgatggagctgacgcagatttaccagcgattaaacccctgtcatactcactag

SEQ ID NO: 241322 - DNA, 1209 bp, Artificial Sequence
  derived and/or modified sequence
atggggctgggccagggctggggttgggaggcctcttgcttcgcgtgtttgatcaggtcttgctgccaggtggtgacctttaccttcccgttcggtttccaagggatttcccaaagccttgagaatgtttcaggatactacgccgacgcgagattggaggtcgggtctacccaattgcgcaccgcaggcagttgtagtcactccttcaaaagatcttttctcgaaaaaaaacgcttcacagaggaggccacaaaatatttccgggaacgggtgagccccgtgcacctgcaaatcttgctcacgaacaatgaggcctggaagcggtttgtgaccgccgctgaactgccgcgagatgaagcagacgcgttatacgaggcactgaagaagttaagaacgtatgctgccatagaggacgaatacgtacaacagaaagacgaacagttccgggagtggtttctgaaagagttcccacaggtcaaacggaaaatccaggaatctatagagaagttgcgcgctttggctaatggaatcgaagaagtgcatcggggttgcacaatctcgaacgtggtctcttcatctaccggtgctgcctccggcatcatgagtctcgcagggctcgtactcgccccttttaccgcagggacaagcttggctctgacggctgccggagtgggcttgggcgcagcctctgcagtaaccgggattacaacgtccatcgttgagcatagctatacttccagcgcagaagcagaagcatctagactgacagcgacatctatcgatagactaaaagtgtttaaggaagttatgagggatatcactccaaatctactaagtctcctcaacaattactatgaagcaacacaaacgattgggtccgagatcagggccatccgccaggctagggctcgcgcacggctccccgtgacaacttggcggatatctgccggttcaggcggtcaggccgagcggaccattgccggaactactcgcgcagtttcacgaggggcacggattttaagtgctacaacctccggtattttcctggccctcgatgtggtgaatctcgtgtacgaaagtaaacatcttcatgagggagctaagtccgcaagcgccgaggagctccgacggcaagctcaggagctggaggagaacctgatggaactaacgcaaatttatcagagactcaatccgtgccacacccactag

SEQ ID NO: 241323 - DNA, 2117 bp, Artificial Sequence
  derived and/or modified sequence
agcaggagggtgggaccaagggtgctgctggaccaaggatgggactgggccaagggtggggctgggaagcatcctgttttgcatgtttgatcaggagctgctgccaagttgtgactttcactttcccttttgggttccagggtatatctcagagcctggagaacgtgtctggttattatgcagatgcacggctggaggtgggatccacacagctcagaacagctggatcttgctcacactctttcaagagaagcttccttgaaaagaaacgctttactgaagaggccaccaaatacttccgggagagagtcagcccagtgcatctgcaaatcctgctgactaacaatgaagcctggaagagattcgtgactgcggctgaattgcccagggatgaggcagatgctctctacgaagctctgaagaagcttagaacatatgcagctattgaggacgaatatgtgcagcagaaagatgagcagtttagggaatggtttttgaaagagtttccccaagtcaagaggaagatccaggagtccatagaaaagcttcgtgcccttgcaaatggtattgaagaggtccacagaggctgcaccatctccaatgtggtgtccagctccactggcgctgcctctggcatcatgtcccttgctggtcttgttttggcaccatttacagcagggacgagtctggcccttactgcagctggggtagggctgggagcagcgtctgctgtgactgggatcaccaccagcatcgtggagcactcatacacatcatcagcagaagctgaagccagcaggctgactgcaaccagcattgaccgattgaaggtatttaaggaagttatgcgtgacatcacacccaacttactttcccttcttaataattattacgaagccacacaaaccattgggagtgaaatccgtgccatcaggcaagccagagccagggcccgactccctgtgaccacctggcgaatctcagctggaagtggtggtcaagcagagagaacgattgcaggcaccacccgggcagtgagcagaggagcccggatcctgagtgcgaccacttcaggcatcttccttgcactggatgtggtcaaccttgtatacgagtcaaagcacttgcatgagggggcaaagtctgcatctgctgaggagctgaggcggcaggctcaggagctggaggagaatctaatggagctcactcagatctatcagcgtctgaatccatgccatacccactgaccccagaccagtgcagccagcaggggaggtgagccatacacaggccacgacaaaatgcaggcattttattagggggataaagagggcaaggtaaagtttatggagctgagtgttagtgactttggcatttctgtagctgagcacagcaggggaggggttaatgcagatggcaagtgcaccaaggagaaggcaggaatgctggagcctggaataagggaggagaggggactggagagtgtggggaataggaagaagaaatttcctttagactaacgaatatattggggggaggaatagaggggaggtgtgcaggaaccagcaatgagaaggccaggaaaagaaagagctgaaaatgcagaaagccgaagagttagaacttttggatacagcagaagaaacagcggctccactaccgacctgcccccggttcgatgtccttccaagaatgaagtctttccctggtgatggtcccctgccctgtctttccagcatccactctgtcttgtcctcctggaagtgtatctcagtcagccagtggcttcttgatgatggcggtggaggtggtggttgtagtgtgatggatcccctttaggttatttaggggtatatgtcccctgcttgaaccctgaaggccaggtaatgagccatggccattgtccccagctgaggaccaggtgtctctaaaaacccaaacatcctggagagtatgcgagaacctaccaagaaaaacagtctcattactcatatacagcaggcaaagagacagaaaattaactgaaaagcagtttagagactgggggaggccggatctctagagccatcctgctgagtgccctgtgtgtaagtcctaataaactcacctactcacca

SEQ ID NO: 241324 - DNA, 3563 bp, Artificial Sequence
  derived and/or modified sequence
actctggggaaaggagggtacaaccacatgtaaattttattataatgatggtataatgaacttggggtgacctgagggcatgtttttgtgttactgggcatgtgcccctttaggagacttccacctgtgccttactttctctttctttgggatgtgctggccacagactttaccaaaaactccatccattaggatggcattaggacggttctggggctaaacttaggtgggccaggggctgtttcactgtcagcctttctactctcttttcttacccactcctagctgctaatgtctatttaactacctaatatttccccctttagagaaaaaaagccaaatttttgggtagatcggtgacaattaatctggctacttcctgctgacaagaggcagtggtaataattgggttctcttttttgctctcttgtagctggtaggttgggcagagaaaagtggtggccatccaaggggcccacgtagatatcagacatggttgagacctcgcggtaaccttgtgtagaatcatttggagttttatggattctaggtgggaagaaacaaaacaaccttgtaaatcaaatgagcatcgtttgaaagctataagttgtataaagctgttttaggaccaagaaagggggctaaccaggaaaaccaggaccagttgttaaatttccaccagtcaaagcctcctgaaactctgttttccattaacttgttggccctgtctgtaatttttttaagttggtttgcactttacctgattggttgatgaaaacagcaatgtttatcaagtgttgcacaagctcccccttgattggctgtgagcaaattaaaagctcatcaatttcataagactatgcttgctaatgaagcaatttgttctgaaagggtattgacctggttagttagattaataatttgttgagtaatttttaagaagagtttctgggcagtaaaaatggagttaaggaggtcctccagttcccgtgccaataccagccagaacgccaattatagtcagtgctgttaaaactcctctttcagttttaccagattgagcgtgtatagggaggggaatgctatcgataagagtgagtttggggatgatgtaaactagggccaaatccccgtttaattagcagacaagcagagatatgccttgtttctatacaaaaatgtgatttgtcatgttaagacaaatatcaacagtgatactaaagtagggtttttccatgctgtgtaagtctgctttaataccctcagaagtggaagtcaaggctagttcatgtaatgggggaacacaggcagtacttgacagaatgaaagaggaatcaaaagcccaattagaggaaggagtgatgggatcccaaccaatattgtgaaattatggggagctgcagttttttgcaatgattttgcccgaagttgtgagactgaaaccagaagttgttatgtttaaaatgatattctggtgtgggtctggggaaaagggtagatccagaatagctggcttctttccacatagtggttctgttggggggcttgggaaatgaataaaacacaaagaagaattagaatatcagggtatatctcagagcctggagaacgtgtctggttattatgcagatgcacggctggaggtgggatccacacagctcagaacagctggatcttgctcacactctttcaagagaagcttccttgaaaagaaacgctttactgaagaggccaccaaatacttccgggagagagtcagcccagtgcatctgcaaatcctgctgactaacaatgaagcctggaagagattcgtgactgcggctgaattgcccagggatgaggcagatgctctctacgaagctctgaagaagcttagaacatatgcagctattgaggacgaatatgtgcagcagaaagatgagcagtttagggaatggtttttgaaagagtttccccaagtcaagaggaagatccaggagtccatagaaaagcttcgtgcccttgcaaatggtattgaagaggtccacagaggctgcaccatctccaatgtggtgtccagctccactggcgctgcctctggcatcatgtcccttgctggtcttgttttggcaccatttacagcagggacgagtctggcccttactgcagctggggtagggctgggagcagcgtctgctgtgactgggatcaccaccagcatcgtggagcactcatacacatcatcagcagaagctgaagccagcaggctgactgcaaccagcattgaccgattgaaggtatttaaggaagttatgcgtgacatcacacccaacttactttcccttcttaataattattacgaagccacacaaaccattgggagtgaaatccgtgccatcaggcaagccagagccagggcccgactccctgtgaccacctggcgaatctcagctggaagtggtggtcaagcagagagaacgattgcaggcaccacccgggcagtgagcagaggagcccggatcctgagtgcgaccacttcaggcatcttccttgcactggatgtggtcaaccttgtatacgagtcaaagcacttgcatgagggggcaaagtctgcatctgctgaggagctgaggcggcaggctcaggagctggaggagaatctaatggagctcactcagatctatcagcgtctgaatccatgccatacccactgaccccagaccagtgcagccagcaggggaggtgagccatacacaggccacgacaaaatgcaggcattttattagggggataaagagggcaaggtaaagtttatggagctgagtgttagtgactttggcatttctgtagctgagcacagcaggggaggggttaatgcagatggcaagtgcaccaaggagaaggcaggaatgctggagcctggaataagggaggagaggggactggagagtgtggggaataggaagaagaaatttcctttagactaacgaatatattggggggaggaatagaggggaggtgtgcaggaaccagcaatgagaaggccaggaaaagaaagagctgaaaatgcagaaagccgaagagttagaacttttggatacagcagaagaaacagcggctccactaccgacctgcccccggttcgatgtccttccaagaatgaagtctttccctggtgatggtcccctgccctgtctttccagcatccactctgtcttgtcctcctggaagtgtatctcagtcagccagtggcttcttgatgatggcggtggaggtggtggttgtagtgtgatggatcccctttaggttatttaggggtatatgtcccctgcttgaaccctgaaggccaggtaatgagccatggccattgtccccagctgaggaccaggtgtctctaaaaacccaaacatcctggagagtatgcgagaacctaccaagaaaaacagtctcattactcatatacagcaggcaaagagacagaaaattaactgaaaagcagtttagagactgggggaggccggatctctagagccatcctgctgagtgccctgtgtgtaagtcctaataaactcacctactcacca

SEQ ID NO: 241325 - DNA, 3626 bp, Artificial Sequence
  derived and/or modified sequence
actctggggaaaggagggtacaaccacatgtaaattttattataatgatggtataatgaacttggggtgacctgagggcatgtttttgtgttactgggcatgtgcccctttaggagacttccacctgtgccttactttctctttctttgggatgtgctggccacagactttaccaaaaactccatccattaggatggcattaggacggttctggggctaaacttaggtgggccaggggctgtttcactgtcagcctttctactctcttttcttacccactcctagctgctaatgtctatttaactacctaatatttccccctttagagaaaaaaagccaaatttttgggtagatcggtgacaattaatctggctacttcctgctgacaagaggcagtggtaataattgggttctcttttttgctctcttgtagctggtaggttgggcagagaaaagtggtggccatccaaggggcccacgtagatatcagacatggttgagacctcgcggtaaccttgtgtagaatcatttggagttttatggattctaggtgggaagaaacaaaacaaccttgtaaatcaaatgagcatcgtttgaaagctataagttgtataaagctgttttaggaccaagaaagggggctaaccaggaaaaccaggaccagttgttaaatttccaccagtcaaagcctcctgaaactctgttttccattaacttgttggccctgtctgtaatttttttaagttggtttgcactttacctgattggttgatgaaaacagcaatgtttatcaagtgttgcacaagctcccccttgattggctgtgagcaaattaaaagctcatcaatttcataagactatgcttgctaatgaagcaatttgttctgaaagggtattgacctggttagttagattaataatttgttgagtaatttttaagaagagtttctgggcagtaaaaatggagttaaggaggtcctccagttcccgtgccaataccagccagaacgccaattatagtcagtgctgttaaaactcctctttcagttttaccagattgagcgtgtatagggaggggaatgctatcgataagagtgagtttggggatgatgtaaactagggccaaatccccgtttaattagcagacaagcagagatatgccttgtttctatacaaaaatgtgatttgtcatgttaagacaaatatcaacagtgatactaaagtagggtttttccatgctgtgtaagtctgctttaataccctcagaagtggaagtcaaggctagttcatgtaatgggggaacacaggcagtacttgacagaatgaaagaggaatcaaaagcccaattagaggaaggagtgatgggatcccaaccaatattgtgaaattatggggagctgcagttttttgcaatgattttgcccgaagttgtgagactgaaaccagaagttgttatgtttaaaatgatattctggtgtgggtctggggaaaagggtagatccagaatagctggcttctttccacatagtggttctgttggggggcttgggaaatgaataaaacacaaagaagaattagaatatcaggtgaaggtagcaggtgctcctggcagaagaacccacataaggaagtgtccagaagccacacagggtatatctcagagcctggagaacgtgtctggttattatgcagatgcacggctggaggtgggatccacacagctcagaacagctggatcttgctcacactctttcaagagaagcttccttgaaaagaaacgctttactgaagaggccaccaaatacttccgggagagagtcagcccagtgcatctgcaaatcctgctgactaacaatgaagcctggaagagattcgtgactgcggctgaattgcccagggatgaggcagatgctctctacgaagctctgaagaagcttagaacatatgcagctattgaggacgaatatgtgcagcagaaagatgagcagtttagggaatggtttttgaaagagtttccccaagtcaagaggaagatccaggagtccatagaaaagcttcgtgcccttgcaaatggtattgaagaggtccacagaggctgcaccatctccaatgtggtgtccagctccactggcgctgcctctggcatcatgtcccttgctggtcttgttttggcaccatttacagcagggacgagtctggcccttactgcagctggggtagggctgggagcagcgtctgctgtgactgggatcaccaccagcatcgtggagcactcatacacatcatcagcagaagctgaagccagcaggctgactgcaaccagcattgaccgattgaaggtatttaaggaagttatgcgtgacatcacacccaacttactttcccttcttaataattattacgaagccacacaaaccattgggagtgaaatccgtgccatcaggcaagccagagccagggcccgactccctgtgaccacctggcgaatctcagctggaagtggtggtcaagcagagagaacgattgcaggcaccacccgggcagtgagcagaggagcccggatcctgagtgcgaccacttcaggcatcttccttgcactggatgtggtcaaccttgtatacgagtcaaagcacttgcatgagggggcaaagtctgcatctgctgaggagctgaggcggcaggctcaggagctggaggagaatctaatggagctcactcagatctatcagcgtctgaatccatgccatacccactgaccccagaccagtgcagccagcaggggaggtgagccatacacaggccacgacaaaatgcaggcattttattagggggataaagagggcaaggtaaagtttatggagctgagtgttagtgactttggcatttctgtagctgagcacagcaggggaggggttaatgcagatggcaagtgcaccaaggagaaggcaggaatgctggagcctggaataagggaggagaggggactggagagtgtggggaataggaagaagaaatttcctttagactaacgaatatattggggggaggaatagaggggaggtgtgcaggaaccagcaatgagaaggccaggaaaagaaagagctgaaaatgcagaaagccgaagagttagaacttttggatacagcagaagaaacagcggctccactaccgacctgcccccggttcgatgtccttccaagaatgaagtctttccctggtgatggtcccctgccctgtctttccagcatccactctgtcttgtcctcctggaagtgtatctcagtcagccagtggcttcttgatgatggcggtggaggtggtggttgtagtgtgatggatcccctttaggttatttaggggtatatgtcccctgcttgaaccctgaaggccaggtaatgagccatggccattgtccccagctgaggaccaggtgtctctaaaaacccaaacatcctggagagtatgcgagaacctaccaagaaaaacagtctcattactcatatacagcaggcaaagagacagaaaattaactgaaaagcagtttagagactgggggaggccggatctctagagccatcctgctgagtgccctgtgtgtaagtcctaataaactcacctactcacca

SEQ ID NO: 241326 - DNA, 3634 bp, Artificial Sequence
  derived and/or modified sequence
actctggggaaaggagggtacaaccacatgtaaattttattataatgatggtataatgaacttggggtgacctgagggcatgtttttgtgttactgggcatgtgcccctttaggagacttccacctgtgccttactttctctttctttgggatgtgctggccacagactttaccaaaaactccatccattaggatggcattaggacggttctggggctaaacttaggtgggccaggggctgtttcactgtcagcctttctactctcttttcttacccactcctagctgctaatgtctatttaactacctaatatttccccctttagagaaaaaaagccaaatttttgggtagatcggtgacaattaatctggctacttcctgctgacaagaggcagtggtaataattgggttctcttttttgctctcttgtagctggtaggttgggcagagaaaagtggtggccatccaaggggcccacgtagatatcagacatggttgagacctcgcggtaaccttgtgtagaatcatttggagttttatggattctaggtgggaagaaacaaaacaaccttgtaaatcaaatgagcatcgtttgaaagctataagttgtataaagctgttttaggaccaagaaagggggctaaccaggaaaaccaggaccagttgttaaatttccaccagtcaaagcctcctgaaactctgttttccattaacttgttggccctgtctgtaatttttttaagttggtttgcactttacctgattggttgatgaaaacagcaatgtttatcaagtgttgcacaagctcccccttgattggctgtgagcaaattaaaagctcatcaatttcataagactatgcttgctaatgaagcaatttgttctgaaagggtattgacctggttagttagattaataatttgttgagtaatttttaagaagagtttctgggcagtaaaaatggagttaaggaggtcctccagttcccgtgccaataccagccagaacgccaattatagtcagtgctgttaaaactcctctttcagttttaccagattgagcgtgtatagggaggggaatgctatcgataagagtgagtttggggatgatgtaaactagggccaaatccccgtttaattagcagacaagcagagatatgccttgtttctatacaaaaatgtgatttgtcatgttaagacaaatatcaacagtgatactaaagtagggtttttccatgctgtgtaagtctgctttaataccctcagaagtggaagtcaaggctagttcatgtaatgggggaacacaggcagtacttgacagaatgaaagaggaatcaaaagcccaattagaggaaggagtgatgggatcccaaccaatattgtgaaattatggggagctgcagttttttgcaatgattttgcccgaagttgtgagactgaaaccagaagttgttatgtttaaaatgatattctggtgtgggtctggggaaaagggtagatccagaatagctggcttctttccacatagtggttctgttggggggcttgggaaatgaataaaacacaaagaagaattagaatatcaggtatgtttgcattttttgttgtcagtgactaagctgacacataattgggtggaaaatagggtacaagtgtgattgcaagccttgagaacgtgtctggttattatgcagatgcacggctggaggtgggatccacacagctcagaacagctggatcttgctcacactctttcaagagaagcttccttgaaaagaaacgctttactgaagaggccaccaaatacttccgggagagagtcagcccagtgcatctgcaaatcctgctgactaacaatgaagcctggaagagattcgtgactgcggctgaattgcccagggatgaggcagatgctctctacgaagctctgaagaagcttagaacatatgcagctattgaggacgaatatgtgcagcagaaagatgagcagtttagggaatggtttttgaaagagtttccccaagtcaagaggaagatccaggagtccatagaaaagcttcgtgcccttgcaaatggtattgaagaggtccacagaggctgcaccatctccaatgtggtgtccagctccactggcgctgcctctggcatcatgtcccttgctggtcttgttttggcaccatttacagcagggacgagtctggcccttactgcagctggggtagggctgggagcagcgtctgctgtgactgggatcaccaccagcatcgtggagcactcatacacatcatcagcagaagctgaagccagcaggctgactgcaaccagcattgaccgattgaaggtatttaaggaagttatgcgtgacatcacacccaacttactttcccttcttaataattattacgaagccacacaaaccattgggagtgaaatccgtgccatcaggcaagccagagccagggcccgactccctgtgaccacctggcgaatctcagctggaagtggtggtcaagcagagagaacgattgcaggcaccacccgggcagtgagcagaggagcccggatcctgagtgcgaccacttcaggcatcttccttgcactggatgtggtcaaccttgtatacgagtcaaagcacttgcatgagggggcaaagtctgcatctgctgaggagctgaggcggcaggctcaggagctggaggagaatctaatggagctcactcagatctatcagcgtctgaatccatgccatacccactgaccccagaccagtgcagccagcaggggaggtgagccatacacaggccacgacaaaatgcaggcattttattagggggataaagagggcaaggtaaagtttatggagctgagtgttagtgactttggcatttctgtagctgagcacagcaggggaggggttaatgcagatggcaagtgcaccaaggagaaggcaggaatgctggagcctggaataagggaggagaggggactggagagtgtggggaataggaagaagaaatttcctttagactaacgaatatattggggggaggaatagaggggaggtgtgcaggaaccagcaatgagaaggccaggaaaagaaagagctgaaaatgcagaaagccgaagagttagaacttttggatacagcagaagaaacagcggctccactaccgacctgcccccggttcgatgtccttccaagaatgaagtctttccctggtgatggtcccctgccctgtctttccagcatccactctgtcttgtcctcctggaagtgtatctcagtcagccagtggcttcttgatgatggcggtggaggtggtggttgtagtgtgatggatcccctttaggttatttaggggtatatgtcccctgcttgaaccctgaaggccaggtaatgagccatggccattgtccccagctgaggaccaggtgtctctaaaaacccaaacatcctggagagtatgcgagaacctaccaagaaaaacagtctcattactcatatacagcaggcaaagagacagaaaattaactgaaaagcagtttagagactgggggaggccggatctctagagccatcctgctgagtgccctgtgtgtaagtcctaataaactcacctactcaccaagctgg

SEQ ID NO: 241327 - DNA, 1209 bp, Artificial Sequence
  derived and/or modified sequence
atgggcctgggccagggctggggctgggaggccagctgcttcgcctgcctgatcagaagctgctgccaggtggtgaccttcaccttccccttcggcttccagggcatcagccagagcctggagaacgtgagcggctactacgccgacgccagactggaggtgggcagcacccagctgagaaccgccggcagctgcagccacagcttcaagagaagcttcctggagaagaagagattcaccgaggaggccaccaagtacttcagagagagagtgagccccgtgcacctgcagatcctgctgaccaacaacgaggcctggaagagattcgtgaccgccgccgagctgcccagagacgaggccgacgccctgtacgaggccctgaagaagctgagaacctacgccgccatcgaggacgagtacgtgcagcagaaggacgagcagttcagagagtggttcctgaaggagttcccccaggtgaagagaaagatccaggagagcatcgagaagctgagagccctggccaacggcatcgaggaggtgcacagaggctgcaccatcagcaacgtggtgagcagcagcaccggcgccgccagcggcatcatgagcctggccggcctggtgctggcccccttcaccgccggcaccagcctggccctgaccgccgccggcgtgggcctgggcgccgccagcgccgtgaccggcatcaccaccagcatcgtggagcacagctacaccagcagcgccgaggccgaggccagcagactgaccgccaccagcatcgacagactgaaggtgttcaaggaggtgatgagagacatcacccccaacctgctgagcctgctgaacaactactacgaggccacccagaccatcggcagcgagatcagagccatcagacaggccagagccagagccagactgcccgtgaccacctggagaatcagcgccggcagcggcggccaggccgagagaaccatcgccggcaccaccagagccgtgagcagaggcgccagaatcctgagcgccaccaccagcggcatcttcctggccctggacgtggtgaacctggtgtacgagagcaagcacctgcacgagggcgccaagagcgccagcgccgaggagctgagaagacaggcccaggagctggaggagaacctgatggagctgacccagatctaccagagactgaacccctgccacacccactag

SEQ ID NO: 241328 - DNA, 609 bp, Artificial Sequence
  derived and/or modified sequence
atgtcccttgcgggtctagtgcttgctcccttcaccgccggcacctctttggccttgacggcagccggtgtgggcctaggggccgcttctgctgttacagggatcactacctctatcgtagaacactcatacacttcctctgctgaagccgaagcatccagactgacagcaactagcatagatcgcctgaaggtgttcaaagaggtgatgcgtgatatcacccctaacctgctcagcctcttgaataactactatgaagccacacagactatcggctccgagatccgcgctattcgccaggcacgggctcgcgcacgcctacccgttaccacttggaggatatcagctgggagcggggggcaggctgagcgaaccattgccggcaccacaagggccgtatcccggggggcacggatcttgagcgcgaccacctcgggcatattcttggccctggacgtggtcaacctggtgtacgagagtaaacatctgcatgagggagccaaaagcgcgagtgcggaagagctgcgccggcaggcccaggagctggaggagaacctcatggagctgactcagatttaccaacgccttaacccctgtcacacacattag

SEQ ID NO: 241329 - DNA, 609 bp, Artificial Sequence
  derived and/or modified sequence
atgtcactggccgggctcgtcctcgccccttttaccgctgggacctcccttgccctcactgccgccggggtcggactaggtgcagccagcgcggtgaccgggatcactactagcatcgtggagcattcctacactagttcagccgaggcagaagcttcaagattgaccgctacctccatcgatcgtctcaaggtcttcaaagaggtgatgagagacattacaccaaacctgctgtccctgctgaataactactacgaggccacgcagacaatcggctctgaaattcgtgccattcgccaggccagagcgagggcccggctgccggttaccacctggagaatatcggccggctccgggggccaggccgagaggaccatcgccggtactaccagagctgtctcccggggagcaagaatcttatccgccactacgtctggcatattcctggccctggatgtggtgaacctggtgtatgagtccaagcacctgcatgaaggggctaagtccgcttctgccgaagagctgcgccgtcaggcccaggagctggaagagaatctgatggaactgacccagatttatcagcgactcaatccctgccatacgcactag

SEQ ID NO: 241330 - DNA, 609 bp, Artificial Sequence
  derived and/or modified sequence
atgtcactcgcaggcctggtgttggctccattcacagcaggtacttcactcgccctcaccgctgccggggtaggcttgggagccgccagtgctgtgactggaatcacaaccagtatcgtggagcacagctataccagttcagccgaggccgaggcatcacggttaacagccacctccatagatcgacttaaggtgttcaaagaagtaatgagggacattactcccaatctgcttagcttgctgaataattattacgaagctacacagaccatagggtctgaaataagggcgatcaggcaagctagggcccgggcaaggctccctgtgacaacttggagaatcagtgctggctccgggggccaggcagagagaacgatagccgggacgactagggccgtgtcccggggggcgaggattctgtctgctaccaccagtggtattttcctcgcgttggacgtggtaaacttagtgtacgaatcaaaacatctccacgaaggggccaaaagtgcaagcgctgaggaactccggagacaggcacaggaactggaagaaaacctcatggagcttacccagatttaccagagacttaacccttgtcacacccattag

SEQ ID NO: 241331 - DNA, 609 bp, Artificial Sequence
  derived and/or modified sequence
atgagcctggccggcctggtgctggcccccttcaccgctggcaccagcctggccctgacagctgctggggtgggcctgggcgccgccagcgctgtgacaggcatcaccaccagcatcgtggagcacagctacaccagcagcgctgaggccgaggccagccggctgacagccaccagcattgaccggctgaaggtgttcaaggaggtgatgagggacatcacccccaacctgctgagcctgctgaacaactactatgaggccacccagaccatcggcagcgagatccgggccatccggcaggcccgggcccgggcccggctgcctgtgaccacctggaggatctctgctggcagcggcggccaggccgagaggaccatcgccggcaccaccagggctgtgtccagaggagcccgcatcctgagcgccaccaccagcggcatcttcctggccctggatgtggtgaacctggtgtatgagagcaagcacctgcacgagggcgccaagagcgccagcgctgaggagctgcggcggcaggcccaggagctggaggagaacctgatggagctgacccagatctaccagaggctgaacccctgccacacccactag

SEQ ID NO: 241332 - DNA, 609 bp, Artificial Sequence
  derived and/or modified sequence
atgagcctggccggcctggtgctggcccccttcaccgccggcacctccctggctctcaccgccgctggcgtgggtctcggcgccgcttctgcagtgaccggaatcaccactagcattgttgagcactcatacacatcatctgcagaagccgaggcgtccagactgactgcaaccagcatcgataggttgaaggttttcaaagaagtgatgcgcgatattacacccaaccttctgtctttacttaacaattattacgaggcaacccagactatcggcagcgaaatccgtgctattagacaagccagggcacgtgccaggctgccagtgacaacctggcgcatatctgccgggtctggagggcaagctgaacggaccattgcagggacgacacgcgccgtgagcagaggtgcacgaattctaagtgctacgacatccggaattttcctggccctcgatgtcgtcaatctggtttacgaaagcaagcacctgcacgagggggctaagtctgcttccgctgaggagctcagacggcaggcacaggagctcgaggaaaacctgatggagttgacgcagatctatcagcgcctgaacccttgccatactcattag

SEQ ID NO: 241333 - DNA, 609 bp, Artificial Sequence
  derived and/or modified sequence
atgagcctggccggcctggtgctggcccccttcaccgccggcacctcgctcgcgctcactgcggccggcgtgggcttaggcgccgcctcagccgtgactggtatcacaaccagcatcgtggaacacagttatactagtagcgcagaagccgaggcgtctcggctgacggccacatcaatcgacaggctgaaagtgtttaaagaggtcatgagggacatcacccccaacctgctgtctcttctgaataactactacgaagcaactcaaacaattggctccgaaattcgggccatccgtcaggcccgcgctagggcccgcctgcccgttactacttggaggatttccgccggatccggcggccaagccgaacgcacaatcgctggcaccacaagagccgtgtcaagaggcgcaagaattctgagtgccacaacatccggaatctttctggctctggacgtggtcaacttggtgtacgaaagtaaacacctgcacgaaggcgccaaatctgcctccgcagaagagctgcgaagacaggcccaggaactcgaagagaaccttatggagctgacacagatttatcagcggctgaatccgtgtcacactcactag

SEQ ID NO: 241334 - DNA, 609 bp, Artificial Sequence
  derived and/or modified sequence
atgagcctggccggcctggtgctggcccccttcaccgccggcacctcattagcgctgacggccgcaggggtaggcttgggcgccgctagtgcagttaccggaatcacaactagtattgtggagcactcctatacaagctccgccgaggcagaggcaagccgtctcaccgccacatcaattgaccgtcttaaagtttttaaggaagtgatgcgcgacatcacgcctaacttgttgtccttactgaacaactattacgaagccacgcaaaccatcggtagcgagattcgcgctatacggcaggcaagggcccgcgctcggcttcctgtcactacctggagaatatcagccggatcaggcggccaggccgaaagaaccatcgccggaactacacgggctgtcagccggggagctagaatcctgagcgctaccacatcagggatattcttagctctggacgtagtgaacttagtctatgaaagtaaacacctgcacgagggtgctaaatctgcttccgctgaggagctacgcagacaggctcaggagctcgaagaaaatctgatggagctaactcagatctatcagcgtttgaatccgtgtcacacccactag

SEQ ID NO: 241335 - DNA, 609 bp, Artificial Sequence
  derived and/or modified sequence
atgtctctcgccggactagtgcttgctcctttcactgctggcacaagcttggccctgacagcagccggagtggggctgggtgcagcatcagcggtgaccgggattaccacttcgatcgtggagcactcctacacatcctccgccgaggccgaggcatctaggcttaccgccacttcgattgacagattgaaggtctttaaagaggtgatgcgagacatcactcctaacttgcttagtcttttgaataattactatgaggccacccagacaattggttctgaaatcagggctatccggcaggccagagcacgggctcggctacccgttaccacctggcgcatctctgcaggcagtgggggacaggcagagcgtacaatcgccggtacgacccgagccgtctctaggggcgcacggatcctctctgctactacatccggcattttcctggcactggacgtggttaatttggtatatgagtccaaacacttgcacgagggagcaaagagcgcttcagccgaagagttgagacggcaagctcaggagctcgaagaaaacctgatggaacttacccaaatttatcaacggctgaacccctgtcatactcactag

SEQ ID NO: 241336 - DNA, 609 bp, Artificial Sequence
  derived and/or modified sequence
atgagtctcgcaggcctagtgttagctcccttcacagcaggaacatctctggccctcacagccgcaggtgttggcctgggggcagcaagcgcagtcaccggcattacgacctctatcgttgaacattcatataccagctcggctgaggctgaagcatcgaggcttaccgcgactagcattgataggctgaaagtttttaaagaggtgatgagggatattacccctaaccttctgtccctactcaacaattattacgaagccacacaaaccatcgggtctgaaatccgggctattcgccaggcccgtgcccgtgctcgcttgcccgtgacaacttggcggatcagcgccggaagtgggggtcaggcagaaagaaccatcgccggaacaacccgagctgttagcaggggagcgcgaattttgagcgccaccacatctggaatttttctcgccttggatgtggtgaatctggtgtatgagtccaaacacttacacgagggggcaaagagtgcgagcgcggaggagctgcggagacaagcgcaggaactggaggaaaatctgatggagctaactcagatatatcagcgccttaacccatgtcacacgcactag

SEQ ID NO: 241337 - DNA, 609 bp, Artificial Sequence
  derived and/or modified sequence
atgtcactggccggactggttctggccccatttacagccggtacttctttagcgctcaccgctgccggagtaggtctgggcgcagcttccgcggtgactgggatcactacaagcatcgtagagcacagctacacatccagcgccgaagctgaagcatctcgcttaacagctacgagcattgaccggctcaaggtgtttaaagaggtgatgcgagatattacaccaaacctgttgagcctgctaaacaactactatgaagccactcagactatcgggtctgaaattagagcgattcgacaggccagagcacgtgctaggctgcccgtgacaacctggcgaatatccgcaggctctggagggcaggcggagcggacaattgcgggaaccaccagggctgtatcaaggggcgctagaatactgagcgcaactacctccggtatctttctcgctctcgatgtggtcaatcttgtttacgagtccaagcatctgcacgaaggagctaaatccgcttctgccgaagaactaaggcggcaggcccaggaactcgaagaaaacctgatggagctcacccagatatatcagagactgaatccgtgccacactcactag

SEQ ID NO: 241338 - DNA, 609 bp, Artificial Sequence
  derived and/or modified sequence
atgagcctggccggcctggtgctggcccccttcaccgccggcaccagcctggccctgaccgccgccggcgtgggcctgggcgccgccagcgccgtgaccggcatcaccaccagcatcgtggagcacagctacaccagcagcgccgaggccgaggccagcagactgaccgccaccagcatcgacagactgaaggtgttcaaggaggtgatgagagacatcacccccaacctgctgagcctgctgaacaactactacgaggccacccagaccatcggcagcgagatcagagccatcagacaggccagagccagagccagactgcccgtgaccacctggagaatcagcgccggcagcggcggccaggccgagagaaccatcgccggcaccaccagagccgtgagcagaggcgccagaatcctgagcgccaccaccagcggcatcttcctggccctggacgtggtgaacctggtgtacgagagcaagcacctgcacgagggcgccaagagcgccagcgccgaggagctgagaagacaggcccaggagctggaggagaacctgatggagctgacccagatctaccagagactgaacccctgccacacccactag

SEQ ID NO: 241339 - protein, 577 aa, Artificial Sequence
  derived and/or modified sequence
MEGSGGGAGERAPLLGARRAAAAAAAAGAFAGRRAACGAVLLTELLERAAFYGITSNLVLFLNGAPFCWEGAQASEALLLFMGLTYLGSPFGGWLADARLGRARAILLSLALYLLGMLAFPLLAAPATRAALCGSARLLNCTAPGPDAAARCCSPATFAGLVLVGLGVATVKANITPFGADQVKDRGPEATRRFFNWFYWSINLGAILSLGGIAYIQQNVSFVTGYAIPTVCVGLAFVVFLCGQSVFITKPPDGSAFTDMFKILTYSCCSQKRSGERQSNGEGIGVFQQSSKQSLFDSCKMSHGGPFTEEKVEDVKALVKIVPVFLALIPYWTVYFQMQTTYVLQSLHLRIPEISNITTTPHTLPAAWLTMFDAVLILLLIPLKDKLVDPILRRHGLLPSSLKRIAVGMFFVMCSAFAAGILESKRLNLVKEKTINQTIGNVVYHAADLSLWWQVPQYLLIGISEIFASIAGLEFAYSAAPKSMQSAIMGLFFFFSGVGSFVGSGLLALVSIKAIGWMSSHTDFGNINGCYLNYYFFLLAAIQGATLLLFLIISVKYDHHRDHQRSRANGVPTSRRA

SEQ ID NO: 241340 - DNA, 1734 bp, Artificial Sequence
  derived and/or modified sequence
atggagggcagcggcggcggcgccggcgagagagcccccctgctgggcgccagaagagccgccgccgccgccgccgccgccggcgccttcgccggcagaagagccgcctgcggcgccgtgctgctgaccgagctgctggagagagccgccttctacggcatcaccagcaacctggtgctgttcctgaacggcgcccccttctgctgggagggcgcccaggccagcgaggccctgctgctgttcatgggcctgacctacctgggcagccccttcggcggctggctggccgacgccagactgggcagagccagagccatcctgctgagcctggccctgtacctgctgggcatgctggccttccccctgctggccgcccccgccaccagagccgccctgtgcggcagcgccagactgctgaactgcaccgcccccggccccgacgccgccgccagatgctgcagccccgccaccttcgccggcctggtgctggtgggcctgggcgtggccaccgtgaaggccaacatcacccccttcggcgccgaccaggtgaaggacagaggccccgaggccaccagaagattcttcaactggttctactggagcatcaacctgggcgccatcctgagcctgggcggcatcgcctacatccagcagaacgtgagcttcgtgaccggctacgccatccccaccgtgtgcgtgggcctggccttcgtggtgttcctgtgcggccagagcgtgttcatcaccaagccccccgacggcagcgccttcaccgacatgttcaagatcctgacctacagctgctgcagccagaagagaagcggcgagagacagagcaacggcgagggcatcggcgtgttccagcagagcagcaagcagagcctgttcgacagctgcaagatgagccacggcggccccttcaccgaggagaaggtggaggacgtgaaggccctggtgaagatcgtgcccgtgttcctggccctgatcccctactggaccgtgtacttccagatgcagaccacctacgtgctgcagagcctgcacctgagaatccccgagatcagcaacatcaccaccaccccccacaccctgcccgccgcctggctgaccatgttcgacgccgtgctgatcctgctgctgatccccctgaaggacaagctggtggaccccatcctgagaagacacggcctgctgcccagcagcctgaagagaatcgccgtgggcatgttcttcgtgatgtgcagcgccttcgccgccggcatcctggagagcaagagactgaacctggtgaaggagaagaccatcaaccagaccatcggcaacgtggtgtaccacgccgccgacctgagcctgtggtggcaggtgccccagtacctgctgatcggcatcagcgagatcttcgccagcatcgccggcctggagttcgcctacagcgccgcccccaagagcatgcagagcgccatcatgggcctgttcttcttcttcagcggcgtgggcagcttcgtgggcagcggcctgctggccctggtgagcatcaaggccatcggctggatgagcagccacaccgacttcggcaacatcaacggctgctacctgaactactacttcttcctgctggccgccatccagggcgccaccctgctgctgttcctgatcatcagcgtgaagtacgaccaccacagagaccaccagagaagcagagccaacggcgtgcccaccagcagaagagcctag

SEQ ID NO: 241341 - DNA, 1734 bp, Artificial Sequence
  derived and/or modified sequence
atggaaggatcaggagggggggccggtgaaagagcccccttacttggagcaagacgggctgcggctgctgccgccgcggctggagcattcgccggtcgccgagcagcatgcggagctgtgctgttaaccgaattactcgagagggctgccttttacgggattacgtctaaccttgtgctgttcctgaatggagcccctttctgttgggaaggggcccaagccagcgaagccctgctgcttttcatgggactcacttatctggggtcaccttttgggggttggttggcagatgcgcgactgggccgcgctagagcaatcctcctgagcctcgccctgtacctgttgggaatgctcgcattcccactgttggccgctcctgccacaagggctgctctctgcgggagtgccaggctgttgaactgtactgctccaggaccggacgcggctgctcgctgctgtagcccagctacatttgctggactggtccttgtgggtcttggcgtggctaccgtcaaagctaatattacgcctttcggcgccgatcaagtgaaggatcggggacccgaagcaacccggaggttcttcaattggttttattggagtatcaatctcggggctattttgtcccttgggggcatcgcctatatacagcaaaacgttagtttcgtgaccggatatgccatacctaccgtgtgtgtggggctcgccttcgttgttttcctttgtggccagtccgttttcatcaccaaacctcctgatggttcagcattcaccgacatgttcaagatactgacatactcctgctgctcacaaaaacgatctggagagaggcagagcaatggcgaggggattggggtatttcagcagtcatcaaagcagtcactgttcgattcctgcaagatgtctcatggtggcccctttaccgaggagaaggtagaagatgtcaaggctttagtgaagatcgtccctgtcttcctagctctgattccctattggacagtgtattttcaaatgcagacgacatacgtgctgcagagcctgcacctgagaatcccagagattagcaacattaccacgacacctcacactctgcccgccgcatggctcacaatgtttgacgccgttctcattctactcctcatcccgctgaaagacaagctcgtggaccctatcctgcgtcggcacggcctgctcccaagcagcctgaagaggatagcagtggggatgtttttcgtaatgtgttccgctttcgccgcagggatattggaaagcaaacgcctgaacttagtgaaggaaaagacaatcaaccagactatcggtaacgtcgtgtaccacgcagccgatctctctctttggtggcaagtgcctcagtatctcttaattggtatttcagagatttttgcctctatcgctggtctggaattcgcttactccgccgcccccaaatccatgcaatccgcaatcatgggcctatttttcttcttttccggagtagggagtttcgttgggtcaggactcctggcactcgtctctatcaaagccatcgggtggatgtcctctcacacagacttcggaaacattaacgggtgctacttaaattactattttttcctcctggccgctattcaaggtgccacactgctgctcttcttgattatcagcgttaaatatgatcaccaccgtgaccatcagcgaagcagagcgaacggcgtgcccacatcccggcgggcatag

SEQ ID NO: 241342 - DNA, 1734 bp, Artificial Sequence
  derived and/or modified sequence
atggagggcagcggcggcggggccggggagcgggcccccctgctgggcgcccggcgggctgctgctgctgctgctgctgctggggcctttgctggaagaagagctgcctgtggggctgtgctgctgacagagctgctggagagagctgccttctacggcatcaccagcaacctggtgctcttcctgaatggagcccccttctgctgggagggcgcccaggccagcgaggccctgctgctcttcatgggcctgacctacctgggcagcccctttggaggctggctggctgatgcccggctgggccgggcccgggccatcctgctgagcctggccctgtacctgctgggcatgctggccttccccctgctggccgccccagccacccgggccgccctgtgtggcagcgcccggctgctgaactgcacagcccctggcccagatgctgctgcccgctgctgcagccctgccacctttgctggcctggtgctggtgggcctgggcgtggccaccgtgaaggccaacatcaccccatttggagctgaccaggtgaaggaccggggccctgaggccacccggcgcttcttcaactggttctactggagcatcaacctgggcgccatcctgagcctgggcggcatcgcctacatccagcagaatgtgtcctttgtgacaggctacgccatccccaccgtgtgtgtgggcctggcctttgtggtgttcctgtgtggccagagcgtcttcatcaccaagcccccagatggcagcgccttcacagacatgttcaagatcctgacctacagctgctgcagccagaagaggtctggagagcggcagagcaatggagagggcatcggggtcttccagcagagcagcaagcagagcctgtttgacagctgcaagatgagccatggaggccccttcacagaggagaaggtggaggatgtgaaggccctggtgaagatcgtgcctgtgttcctggccctgatcccctactggacagtgtacttccagatgcagaccacctacgtgctgcagagcctgcacctgcgcatccctgagatcagcaacatcaccaccaccccccacaccctgcctgctgcctggctgaccatgtttgatgctgtgctgatcctgctgctgatccccctgaaggacaagctggtggaccccatcctgcggagacatggcctgctgcccagcagcctgaagagaattgctgtgggcatgttctttgtgatgtgcagcgcctttgctgctggcatcctggagagcaagaggctgaacctggtgaaggagaagaccatcaaccagaccatcggaaatgtggtgtaccacgccgctgacctgagcctgtggtggcaggtgccccagtacctgctgattggcatcagcgagatctttgccagcattgctggcctggagtttgcctacagcgctgcccccaagtccatgcagagcgccatcatgggcctcttcttcttcttcagcggcgtgggcagctttgtgggcagcggcctgctggccctggtgtccatcaaggccatcggctggatgagcagccacacagactttggaaacatcaatggctgctacctgaactactacttcttcctgctggccgccatccagggcgccaccctgctgctcttcctgatcatctctgtgaagtatgaccaccaccgggaccaccagaggagccgggccaatggagtgcccaccagcagaagagcctag

SEQ ID NO: 241343 - DNA, 1734 bp, Artificial Sequence
  derived and/or modified sequence
atggagggcagcggcggcggcgccggcgagcgggcccccctgctgggcgctcggagggccgctgcggccgctgctgcagctggagctttcgcagggcgaagagccgcctgcggggcggtgctcttaaccgaattgttagagagggctgcattttacggtataacctccaacctagtcctatttttaaatggggctccgttctgctgggagggtgcccaggcttcagaagcgcttctcttatttatgggcctgacataccttggaagcccatttggcggatggctcgctgacgcgaggctcggtcgggcacgtgccattttgctgtccctggctttgtacctgcttggcatgctggcattccccctcctggccgcacccgcaacacgtgccgccttgtgtggcagcgccaggctgctgaattgtaccgcccctggtcctgacgctgccgccaggtgctgcagcccagcgactttcgccgggctggtacttgtgggtctcggcgttgctacagtgaaggctaacattacaccctttggagcagatcaagttaaggacaggggaccagaggctacccgtagattctttaactggttttactggtccatcaaccttggagccatcctgtctctggggggcattgcctatatccagcaaaatgttagttttgtcaccggctatgctattcctactgtgtgcgtcggtctagcttttgtcgtgtttttgtgcggccagagtgtattcatcactaaaccccccgacggttctgccttcacagatatgttcaagattctgacgtactcatgctgctcccaaaaacggagtggcgagaggcagagcaatggagaaggaattggggtgtttcaacaaagttctaaacagtcactcttcgatagctgtaagatgtctcatggcggtccgtttacggaagagaaagtggaggacgtgaaggctcttgtgaagatcgttcccgttttcctggccctcatcccctactggactgtttacttccagatgcagaccacgtatgtgttacaatcgctccacctacggattcccgagatcagcaacataacaacaactccacacaccctcccggctgcttggctcaccatgtttgacgcagttctaattctgctgctgattccgctcaaagataagctcgtggatcccatccttagacgtcatgggctgctccctagcagcttaaaacggattgctgtgggaatgttttttgtgatgtgctcagccttcgccgctggcatactggaatccaaacgcctgaatttagtgaaggaaaagacgattaaccagacaatcggcaacgttgtgtatcacgctgctgacctttcgctctggtggcaagtgcctcaataccttctgatcggtatctcagaaatcttcgctagcatagccggactggagttcgcctactccgccgcacccaaatcgatgcagtctgccatcatggggttatttttttttttctccggcgtcggatcgttcgtaggaagtggtctgctggcgctcgtgtccataaaagctattggatggatgtcttctcatacagactttggcaacattaacggttgctaccttaactactatttcttcctgctcgctgccattcaaggagccacactgctgttatttttgataatatctgtgaaatacgaccatcatcgcgatcatcagaggtcacgcgccaacggcgtcccaaccagcagacgtgcctag

SEQ ID NO: 241344 - DNA, 1734 bp, Artificial Sequence
  derived and/or modified sequence
atggagggatctggtggcggagccggagagcgggctcccctgctgggagcacgacgtgccgcagccgcagctgctgcagccggtgcatttgccggtcgcagagccgcttgtggagctgtgctgcttaccgaacttcttgagcgagccgctttctacggtattacctccaatctcgtgctgtttctgaacggagctcctttttgctgggaaggggctcaggcatccgaggctctacttctcttcatgggcctcacttacttgggttctccgttcggaggctggctcgccgatgctagactcgggagggccagggccatcttactaagcctggctctttatctacttggcatgttagcctttcccctgctcgctgctcctgccactcgggctgctttatgtggcagcgcacggctactgaactgcaccgctcccggacctgacgcagcagctagatgctgctctcctgccacctttgccggactggtgcttgtcggacttggcgtggcaacagtgaaggcgaacatcaccccgtttggtgctgatcaggtaaaagatagaggtccggaagcgactagacgtttcttcaactggttctattggagcatcaatttgggtgccattctctccttggggggtatcgcttatattcagcagaatgtttcctttgtgaccggttacgccatacccactgtgtgcgtgggacttgcgtttgtggtattcttatgcgggcagtcggtcttcattaccaagccccctgatggctctgcttttactgacatgtttaaaatcctaacatactcttgttgtagccaaaaaaggagcggcgaacgccagagcaacggcgaggggatcggtgtgtttcagcagtcctcaaagcaaagcctgtttgattcgtgtaaaatgtcacacggtgggccattcaccgaggaaaaagtcgaggacgtgaaagccctcgtcaagatcgtgcccgtgttccttgctcttattccttattggaccgtgtattttcagatgcaaactacttacgtactgcaatccctgcatcttaggatccccgagatttcaaatatcacaacaactccacacacactacccgcagcttggctgaccatgttcgatgcagtgctgatcctgttactgatcccccttaaggacaagctagtggatcctattctgagacgccatgggcttttaccttcaagcctgaagcgaatagccgtgggaatgttttttgtgatgtgtagtgccttcgccgctggtatccttgagtccaagaggctcaacctcgtgaaagagaagaccataaatcagactatcggtaacgtggtctatcatgctgccgatttgtccttatggtggcaggttccacagtacctgctaatcggtataagtgagatcttcgctagcatcgccggactggagttcgcctactcagcggcacctaagagcatgcagtcagccatcatgggactctttttcttcttctctggtgtgggctcctttgtggggtccggcttgctggcgcttgtgagcatcaaggctattggttggatgagctcccacactgattttggcaacataaatggatgttacctcaattactatttctttctcctcgctgccatccagggagcaactcttttgttatttctgattatctctgtgaaatacgaccatcatagggatcaccagagatctagagcgaacggcgtaccaactagtagaagagcatag

SEQ ID NO: 241345 - DNA, 2776 bp, Artificial Sequence
  derived and/or modified sequence
aggtgacccggcggcggggcgaggcagctggcggcgtcgcatggagggctctgggggcggtgcgggcgagcgggcgccgctgctgggcgcgcggcgggcggcggcggccgcggcggcggctggggcgttcgcgggccggcgcgcggcgtgcggggccgtgctgctgacggagctgctggagcgcgccgctttctacggcatcacgtccaacctggtgctattcctgaacggggcgccgttctgctgggagggcgcgcaggccagcgaggcgctgctgctcttcatgggcctcacctacctgggctcgccgttcggaggctggctggccgacgcgcggctgggccgggcgcgcgccatcctgctgagcctggcgctctacctgctgggcatgctggccttcccgctgctggccgcgcccgccacgcgagccgcgctctgcggttccgcgcgcctgctcaactgcacggcgcctggtcccgacgccgccgcccgctgctgctcaccggccaccttcgcggggctggtgctggtgggcctgggcgtggccaccgtcaaggccaacatcacgcccttcggcgccgaccaggttaaagatcgaggtccggaagccactaggagattttttaattggttttattggagcattaacctgggagcgatcctgtcgttaggtggcattgcctatattcagcagaacgtcagctttgtcactggttatgcgatccccactgtctgcgtcggccttgcttttgtggtcttcctctgtggccagagcgttttcatcaccaagcctcctgatggcagtgccttcaccgacatgttcaagatactgacgtattcctgctgttcccagaagcgaagtggagagcgccagagtaatggtgaaggcattggagtctttcagcaatcttctaaacaaagtctgtttgattcatgtaagatgtctcatggtgggccatttacagaagagaaagtggaagatgtgaaagctctggtcaagattgtccctgttttcttggctttgataccttactggacagtgtatttccaaatgcagacaacatatgttttacagagtcttcatttgaggattccagaaatttcaaatattacaaccactcctcacacgctccctgcagcctggctgaccatgtttgatgctgtgctcatcctcctgctcatccctctgaaggacaaactggtcgatcccattttgagaagacatggcctgctcccatcctccctgaagaggatcgccgtgggcatgttctttgtcatgtgctcggcctttgctgcaggaattttggagagtaaaaggctgaaccttgttaaagagaaaaccattaatcagaccatcggcaacgtcgtctaccatgctgccgatctgtcgctgtggtggcaggtgccgcagtacttgctgattgggatcagcgagatctttgcaagtatcgcaggcctggaatttgcatactcagctgcccccaagtccatgcagagtgccataatgggcttgttctttttcttctctggcgtcgggtcgttcgtgggttctggactgctggcactggtgtctatcaaagccatcggatggatgagcagtcacacagactttggtaatattaacggctgctatttgaactattacttttttcttctggctgctattcaaggagctaccctcctgcttttcctcattatttctgtgaaatatgaccatcatcgagaccatcagcgatcaagagccaatggcgtgcccaccagcaggagggcctgaccttcctgaggccatgtgcggtttctgaggctgacatgtcagtaactgactggggtgcactgagaacaggcaagactttaaattcccataaaatgtctgacttcactgaaacttgcatgttgcctggattgatttcttctttccctctatccaaaggagcttggtaagtgccttactgcagcgtgtctcctggcacgctgggccctccgggaggagagctgcagatttcgagtatgtcgcttgtcattcaaggtctctgtgaatcctctagctgggttcccttttttacagaaactcacaaatggagattgcaaagtcttggggaactccacgtgttagttggcatcccagtttcttaaacaaatagtatcacctgcttcccatagccatatctcactgtaaaaaaaaaattaataaactgttacttatatttaagaaagtgaggatttttttttttttaaagataaaagcatggtcagatgctgcaaggattttacataaatgccatatttatggtttccttcctgagaacaatcttgctcttgccatgttctttgatttaggctggtagtaaacacatttcatctgctgcttcaaaaagtacttactttttaaaccatcaacattacttttctttcttaaggcaaggcatgcataagagtcatttgagaccatgtgtcccatctcaagccacagagcaactcacggggtacttcacaccttacctagtcagagtgcttatatatagctttattttggtacgattgagactaaagactgatcatggttgtatgtaaggaaaacattcttttgaacagaaatagtgtaattaaaaataattgaaagtgttaaatgtgaacttgagctgtttgaccagtcacatttttgtattgttactgtacgtgtatctggggcttctccgtttgttaatactttttctgtatttgttgctgtatttttggcataactttattataaaaagcatctcaaatgcgaaatcca

SEQ ID NO: 241346 - DNA, 723 bp, Artificial Sequence
  derived and/or modified sequence
atgcagaccacctacgtgctgcagagcctgcacctgagaatccccgagatcagcaacatcaccaccaccccccacaccctgcccgccgcctggctgaccatgttcgacgccgtgctgatcctgctgctgatccccctgaaggacaagctggtggaccccatcctgagaagacacggcctgctgcccagcagcctgaagagaatcgccgtgggcatgttcttcgtgatgtgcagcgccttcgccgccggcatcctggagagcaagagactgaacctggtgaaggagaagaccatcaaccagaccatcggcaacgtggtgtaccacgccgccgacctgagcctgtggtggcaggtgccccagtacctgctgatcggcatcagcgagatcttcgccagcatcgccggcctggagttcgcctacagcgccgcccccaagagcatgcagagcgccatcatgggcctgttcttcttcttcagcggcgtgggcagcttcgtgggcagcggcctgctggccctggtgagcatcaaggccatcggctggatgagcagccacaccgacttcggcaacatcaacggctgctacctgaactactacttcttcctgctggccgccatccagggcgccaccctgctgctgttcctgatcatcagcgtgaagtacgaccaccacagagaccaccagagaagcagagccaacggcgtgcccaccagcagaagagcctag

SEQ ID NO: 241347 - DNA, 723 bp, Artificial Sequence
  derived and/or modified sequence
atgcagactacctacgttctgcagtccttacatctccgcataccggaaatctccaatattactacaacaccacatactctcccagcagcatggttgaccatgtttgatgccgttctgatactgcttttaatcccacttaaagataagctcgttgatccaatccttagaaggcacgggctcttgcccagcagtcttaagcgcattgctgtggggatgttcttcgtgatgtgttctgcctttgcggccggaatcctcgaatcaaaaaggctcaacctagtgaaagagaagaccatcaatcagacaattggcaacgttgtgtaccacgccgctgacctcagtctgtggtggcaggtcccccaataccttctcatcggtatcagtgagattttcgcgagtatcgctggcctggagtttgcctattctgctgcccccaaaagtatgcaatccgccataatggggctgtttttctttttcagtggtgtaggtagctttgtcggatcaggcctcttggctctcgtcagcatcaaagcgataggttggatgagcagtcacacggacttcgggaatattaatggctgttatctcaattactacttcttcctcctcgctgccatccagggcgctacactgttactgtttctcataatctcggtcaaatacgaccaccacagagaccaccagcgttctcgagctaacggagtccctacctccagacgcgcctag

SEQ ID NO: 241348 - DNA, 723 bp, Artificial Sequence
  derived and/or modified sequence
atgcagaccacctacgtgctgcagagcctgcacctgcgcatccctgagatcagcaacatcaccaccaccccccacaccctgcctgctgcctggctgaccatgtttgatgctgtgctgatcctgctgctgatccccctgaaggacaagctggtggaccccatcctgcggcggcacggcctgctgcccagcagcctgaagagaattgctgtgggcatgttctttgtgatgtgcagcgcctttgctgctggcatcctggagagcaagaggctgaacctggtgaaggagaagaccatcaaccagaccatcggaaatgtggtgtaccacgccgctgacctgagcctgtggtggcaggtgccccagtacctgctgattggcatcagcgagatctttgccagcattgctggcctggagtttgcctacagcgctgcccccaagtccatgcagagcgccatcatgggcctcttcttcttcttctctggagtgggcagctttgtgggcagcggcctgctggccctggtgtccatcaaggccatcggctggatgagcagccacacagactttggaaacatcaatggctgctacctgaactactacttcttcctgctggccgccatccagggcgccaccctgctgctcttcctgatcatctctgtgaagtatgaccaccaccgggaccaccagaggagccgggccaacggggtgcccaccagccggcgggcctag

SEQ ID NO: 241349 - DNA, 723 bp, Artificial Sequence
  derived and/or modified sequence
atgcagaccacctacgtgctgcagagcctgcacctgcggatccccgagatctctaacattactactactccgcacacccttccggctgcctggttgaccatgttcgacgccgtacttatcttgctgctgatcccgctgaaagacaagttggttgaccctattctgcggaggcacgggctgctgcccagcagcctcaaacggattgccgttgggatgttctttgtcatgtgttcggcttttgcagcggggatactggagtcgaaacgccttaatttggttaaggagaagactattaatcagacaattggaaacgtcgtatatcatgcagctgacctcagtctatggtggcaggttccccagtatctgcttatcggaatctccgaaatttttgcaagcatcgcaggactagagtttgcatactctgccgctcccaagagcatgcagtcggctatcatgggtttgttttttttcttcagtggggttggctcctttgtgggctcaggactgctcgccctggtttcgatcaaggccataggctggatgtctagccacactgactttgggaatatcaacggatgttacctgaattactacttttttttactggctgcgatccagggcgctacattgttactcttcttgatcattagcgtcaagtacgaccatcatagagatcatcagcggtcacgtgctaacggcgtacccaccagccgacgcgcgtag

SEQ ID NO: 241350 - DNA, 723 bp, Artificial Sequence
  derived and/or modified sequence
atgcagacaacatacgtcctgcagtctctgcaccttaggattcctgaaatcagcaatatcaccaccacccctcataccttgcctgctgcttggctgacaatgttcgatgccgttctcattttgctacttattccactgaaggataagctggtcgacccaattctgcggcgacacggtttactcccatcctctttgaaaagaattgctgtcggtatgtttttcgtcatgtgcagtgcttttgctgctggaattctcgaaagcaaacgattgaatctcgtcaaggaaaaaacaatcaatcagactattggcaacgtcgtttatcacgccgctgatctaagcctttggtggcaggttcctcagtatctccttataggaatctcggagattttcgcctcaatcgccggtttggaattcgcctactccgctgcacctaaaagcatgcaatctgccattatggggctctttttctttttttcgggggttggctccttcgttggaagtggcttattggctctggtgagcataaaagccataggatggatgagctcacataccgactttgggaatatcaacggctgttacctcaattattacttcttcttacttgccgcaatacagggcgctacgctgctgctgtttttaataatctcggtaaagtatgatcaccacagggaccatcaacgttcgcgggctaacggcgtacccacctctaggcgcgcatag

SEQ ID NO: 241351 - DNA, 1631 bp, Artificial Sequence
  derived and/or modified sequence
ccaaaattacagtagcccagtttcactttgactagaaagtccctttgtcagctgtttcagtacattctgtgacatttagaaataatttaggtagctgtgttgggtgtgtacaattagtaagtgatggaatgagttgaagcagattcaatacagtgagctggtttcttacctccaaacttaatttgtgaccaaataattgattgctgggaggggaagaaaactaattccttcattttatttcccaaagtgaaggcattggagtctttcagcaatcttctaaacaaagtctgtttgattcatgtaagatgtctcatggtgggccatttacagaagagaaagtggaagatgtgaaagctctggtcaagattgtccctgttttcttggctttgataccttactggacagtgtatttccaagtgagtggtgacaaacaggtttaatttcctttatcttcctatgaagtcttaccctagcacttgttttggccatttctaaagtaggtaggactaggtgattttttttcccatgagtctacagaatcttggaatttttggttttagttatggagtcattttggctgctttaactatgtctaaagcctctctgaaaaagaagctgagaacaggtacgcttctggtttttcaggcccctcttgttaatgtaatttctcctttggataactggccattctttttcaaaattgatctccagaggactttacgatgaccaaatcattgacctgtctgttttcaaacttgagccattgtctatttctgggagtcactgtgtgtcgcatctgagtctagcttaggggaggggcaggatgcttagagtgtttgagagcacagttggtccacatataatgatactgttttttatacctagatgcagacaacatatgttttacagagtcttcatttgaggattccagaaatttcaaatattacaaccactcctcacacgctccctgcagcctggctgaccatgtttgatgctgtgctcatcctcctgctcatccctctgaaggacaaactggtcgatcccattttgagaagacatggcctgctcccatcctccctgaagaggatcgccgtgggcatgttctttgtcatgtgctcggcctttgctgcaggaattttggagagtaaaaggctgaaccttgttaaagagaaaaccattaatcagaccatcggcaacgtcgtctaccatgctgccgatctgtcgctgtggtggcaggtgccgcagtacttgctgattgggatcagcgagatctttgcaagtatcgcaggcctggaatttgcatactcagctgcccccaagtccatgcagagtgccataatgggcttgttctttttcttctctggcgtcgggtcgttcgtgggttctggactgctggcactggtgtctatcaaagccatcggatggatgagcagtcacacagactttggtaatattaacggctgctatttgaactattacttttttcttctggctgctattcaaggagctaccctcctgcttttcctcattatttctgtgaaatatgaccatcatcgagaccatcagcgatcaagagccaatggcgtgcccaccagcaggagggcctgaccttcctgaggccatgtgcggtt

SEQ ID NO: 241352 - DNA, 1005 bp, Artificial Sequence
  derived and/or modified sequence
atgttagcactggccaaaattttacttatttccaccctgttttattctctgctctcaggatctcacggcaaagaaaaccaggacattaacactacccagaatatcgcagaggtattcaagaccatggaaaacaaaccgatttccctcgaatccgaagccaacctgaattccgacaaagagaatattaccacgagcaatttgaaggcctcccacagcccaccactcaatctgccgaacaattcacacggaatcaccgacttcagcagcaacagctccgcagagcattcacttgggtcactgaaacccacgagtacgattagcactagtcccccacttattcacagctttgtgtccaaggttccttggaatgccccaatcgccgatgaggatctattgcctatttctgctcatcccaacgccactccagccctcagctctgagaactttacgtggtccctggtgaacgacactgtcaaaacgcctgacaatagctctatcacagtttcaatactgagcagtgagcctacatctccatctgtcacaccgttgatcgtggagccaagcgggtggctgacgacaaactctgattccttcactggcttcacaccataccaggagaaaactactcttcaaccgacgctgaagttcaccaataatagtaaacttttcccaaatacaagcgatccccaaaaggaaaatagaaacactggtatcgtgttcggtgcaattctgggcgcaattctcggcgtttctttactaaccctcgtgggttacctcctgtgcggaaaacgaaaaaccgattcattctcacacaggcgcctctacgacgaccgcaacgagcccgtcctgagactggacaatgctccggaaccatatgatgtttctttcggtaatagctcgtattataatccgacactgaacgacagtgcaatgcctgagtcggaggaaaatgcccgtgatggcatacccatggacgacatccccccactgcgtacatctgtgtag

SEQ ID NO: 241353 - DNA, 1005 bp, Artificial Sequence
  derived and/or modified sequence
atgctcgctcttgccaaaattttactgatttctaccctgttttattccttgttgagtgggagtcatggaaaagaaaatcaagacatcaataccacccagaacatcgctgaagtcttcaaaactatggaaaacaagcctattagtttggaatctgaagcaaatttgaattctgataaggagaatataaccactagtaatctcaaagctagtcattcccctccacttaacttgcctaataactctcatggaatcacagattttagcagcaacagctccgcggagcactccctcgggagcctcaaacccacttctaccatttcaacctctccgccacttatccactcttttgtgagcaaggtcccatggaatgcgccaattgcagatgaagatctcttacccataagcgctcatcctaacgccactccagctctttcgagtgaaaactttacctggagcttagtgaatgatacagtcaaaacacccgacaatagcagcatcacagtctcaattctgagcagcgagcccaccagcccttccgtgactcctctcattgtcgaaccctctggctggctgaccaccaactccgactctttcactggcttcacaccgtaccaagagaagacaaccttacaacccacattgaaattcacaaataactctaaactttttcctaatacgtctgatcctcagaaggagaataggaataccggtatcgtatttggggccattcttggagcaatactcggtgtttcattgctcactttagtcggctatctgctgtgcggcaagagaaagacagactctttctcacacagaaggttatacgatgatcgcaatgagccagtgttgcggctggataacgcacctgaaccttatgatgtgtcctttggaaactcaagttattacaaccccacgctaaatgactccgcaatgcctgagagtgaagaaaacgcccgcgacggaatcccaatggatgatattcctcctctgcgtacaagtgtgtag

SEQ ID NO: 241354 - DNA, 1005 bp, Artificial Sequence
  derived and/or modified sequence
atgctggctttagctaaaatcctgctcatctctaccctattctactccctgttgagcggttctcacggaaaagaaaatcaggacattaatactacacagaacatcgcagaagtcttcaaaaccatggaaaataaacccataagtctcgaaagtgaagccaatctcaactcagataaggaaaacataacaacatcgaatctgaaggcctctcattccccccccctaaacttacccaacaactcacacggcataaccgacttctctagcaactcctccgccgaacactcgctgggatccctgaaaccaaccagtacaatatctacgtctccgccactgatccatagttttgtcagcaaagtgccctggaatgcccctatcgctgacgaagatctccttcccatttccgcgcaccctaatgccacaccggccctcagttctgagaactttacatggtccttagtcaacgacactgttaagacacccgacaactcatccataacggtttcaattctgtcctccgagccgacatctccctctgtcacaccattgatcgtagagccaagtggatggctcaccactaactccgacagcttcacagggtttaccccttatcaagaaaaaacaactctgcagccaactcttaaattcacaaacaactccaagcttttcccaaacaccagtgatccccaaaaggaaaatcggaatacaggaatagttttcggtgccatcttgggtgcaatccttggtgtgtccctgttgaccctggtgggatatttgctctgcggcaaaaggaagaccgatagcttttcccatagacgattgtatgacgataggaatgaaccagtcctgcgcctggataacgcccctgaaccttatgacgtgtcctttggtaacagcagctactataatccgacactgaacgatagcgcaatgccagagagcgaggagaatgcaagagacggaattcctatggatgacatacctcccctgagaacctccgtgtag

SEQ ID NO: 241355 - DNA, 1005 bp, Artificial Sequence
  derived and/or modified sequence
atgctggccctggccaagatcctgctgatcagcaccctgttctacagcctgctgagcggcagccacggcaaggagaaccaggacatcaacaccacccagaacatcgccgaggtgttcaagaccatggagaacaagcccatcagcctggagagcgaggccaacctgaacagcgacaaggagaacatcaccaccagcaacctgaaggccagccacagcccccccctgaacctgcccaacaacagccacggcatcaccgacttcagcagcaacagcagcgccgagcacagcctgggcagcctgaagcccaccagcaccatcagcaccagcccccccctgatccacagcttcgtgagcaaggtgccctggaacgcccccatcgccgacgaggacctgctgcccatcagcgcccaccccaacgccacccccgccctgagcagcgagaacttcacctggagcctggtgaacgacaccgtgaagacccccgacaacagcagcatcaccgtgagcatcctgagcagcgagcccaccagccccagcgtgacccccctgatcgtggagcccagcggctggctgaccaccaacagcgacagcttcaccggcttcaccccctaccaggagaagaccaccctgcagcccaccctgaagttcaccaacaacagcaagctgttccccaacaccagcgacccccagaaggagaacagaaacaccggcatcgtgttcggcgccatcctgggcgccatcctgggcgtgagcctgctgaccctggtgggctacctgctgtgcggcaagagaaagaccgacagcttcagccacagaagactgtacgacgacagaaacgagcccgtgctgagactggacaacgcccccgagccctacgacgtgagcttcggcaacagcagctactacaaccccaccctgaacgacagcgccatgcccgagagcgaggagaacgccagagacggcatccccatggacgacatcccccccctgagaaccagcgtgtag

SEQ ID NO: 241356 - DNA, 1005 bp, Artificial Sequence
  derived and/or modified sequence
atgctggcccttgcaaagatactactgatatccaccctgttttactctctcctgagtggttcacacggaaaagagaatcaagatattaataccacacagaacatcgcggaagtctttaagaccatggagaacaagccaatatcccttgaatcggaagcaaatcttaactcagacaaagaaaacatcacaacctcaaatcttaaagcctcgcactcaccccctctgaacctgccaaacaattcacacggcattaccgatttctcttcgaactctagcgctgagcatagcctcggttcattaaagcccacctcaactatatctacctctcccccgcttattcattcgttcgtgtccaaagtgccatggaatgctcctattgccgacgaagacctcttacctatctccgcccatcctaatgccaccccagcattaagctcagagaactttacttggtcactcgtgaacgacaccgtgaagactcctgacaattcttctatcactgtgtccatcctgtctagcgagcccacttcacctagtgtaacccctcttatcgtagaaccctccggctggctgacgactaactccgatagctttacaggatttaccccataccaagaaaaaactacattacagccaactctgaaatttacgaataacagtaaactctttccgaacacctcagatcctcagaaagaaaaccgaaatacgggaatagttttcggcgccatattaggagctatccttggtgtgagcctgctgacacttgtcggctatctgctctgtggtaagcggaagacagacagtttctctcatcgtaggttgtacgacgacaggaacgagcccgtgctcagactggacaatgcacctgagccttacgacgtgtcttttggcaactcgtcgtattacaatcccactctcaatgactccgcgatgcccgaatccgaggagaatgccagagacggtatccctatggacgacatacccccactgcggacaagcgtatag

SEQ ID NO: 241357 - DNA, 1005 bp, Artificial Sequence
  derived and/or modified sequence
atgctggccctggccaagatcctgctgatcagcaccctcttctacagcctgctgagcggcagccacggcaaggagaaccaggacatcaacaccacccagaacattgctgaggtgttcaagaccatggagaacaagcccatcagcctggagagcgaggccaacctgaacagcgacaaggagaacatcaccaccagcaacctgaaggccagccacagcccccccctgaacctgcccaacaacagccacggcatcacagacttcagcagcaacagcagcgctgagcacagcctgggcagcctgaagcccaccagcaccatcagcaccagccccccactcatccacagctttgtgtccaaggtgccctggaatgcccccatcgcagatgaggacctgctgcccatcagcgcccaccccaatgccaccccagccctgagcagcgagaacttcacctggagcctggtgaatgacacagtgaagaccccagacaacagcagcatcaccgtgtccatcctgagcagcgagcccaccagccccagcgtgacccccctcatcgtggagcccagcggctggctgaccaccaacagcgacagcttcaccggcttcaccccctaccaggagaagaccaccctgcagcccaccctgaagttcaccaacaacagcaagctgttccccaacaccagtgacccccagaaggagaacagaaacacaggcatcgtgtttggagccatcctgggcgccatcctgggcgtgtccctgctgaccctggtgggctacctgctgtgtgggaagaggaagacagacagcttcagccaccggcggctgtatgatgacagaaatgaacctgtgctgcggctggacaatgcccctgagccctatgatgtgtcctttggaaacagcagctactacaaccccaccctgaatgattctgccatgcctgagagcgaggagaatgccagagatggcatccccatggatgacatcccccccctgcggacctctgtgtag

SEQ ID NO: 241358 - DNA, 1005 bp, Artificial Sequence
  derived and/or modified sequence
atgctggccctggccaagatcctgctgatcagcaccctgttctactctctgctctcaggctcacacggcaaggaaaatcaggatattaacaccacacagaatattgccgaagtcttcaagactatggagaataaacccatctccctcgagagcgaggcaaatctcaactccgacaaggagaatataaccacctctaatttgaaagcttctcacagccctcccctcaatctgccaaataatagccacgggatcaccgatttttcttcaaactctagcgccgagcattctttgggtagtctcaagcctacctctactatcagcacctctcctccactgattcatagttttgtatcgaaggttccatggaacgctcctattgctgacgaagatctgcttcccatttctgcacaccctaatgctaccccggcgctgagttcggaaaactttacctggtctctcgttaatgacacagtgaagacccccgataacagctccatcacagtttccatcctgagctctgaacctaccagtcccagtgtaactccactgattgtggagcctagcggctggctcactacaaattctgactccttcactggctttacaccgtatcaggagaaaacaaccctgcagcccaccctgaagtttactaataattccaagctgttcccaaatacgtctgatcctcagaaggaaaacaggaataccgggattgtgtttggggccattcttggcgccatcttaggagtctctctgctgactcttgttggatacctcctgtgcggtaaacggaaaacggatagctttagccatcgcaggttatacgacgacagaaatgaacctgtgctgaggcttgacaacgctcccgagccttatgacgtctcctttggaaactcttcctattacaatcctactctcaatgactcggctatgcctgagtccgaggagaatgcacgggatggtatcccaatggacgatatcccacccctgcggacgagtgtctag

SEQ ID NO: 241359 - RNA, 1005 nt, Artificial Sequence
  derived and/or modified sequence
augcucgcucuugccaaaauuuuacugauuucuacccuguuuuauuccuuguugagugggagucauggaaaagaaaaucaagacaucaauaccacccagaacaucgcugaagucuucaaaacuauggaaaacaagccuauuaguuuggaaucugaagcaaauuugaauucugauaaggagaauauaaccacuaguaaucucaaagcuagucauuccccuccacuuaacuugccuaauaacucucauggaaucacagauuuuagcagcaacagcuccgcggagcacucccucgggagccucaaacccacuucuaccauuucaaccucuccgccacuuauccacucuuuugugagcaaggucccauggaaugcgccaauugcagaugaagaucucuuacccauaagcgcucauccuaacgccacuccagcucuuucgagugaaaacuuuaccuggagcuuagugaaugauacagucaaaacacccgacaauagcagcaucacagucucaauucugagcagcgagcccaccagcccuuccgugacuccucucauugucgaacccucuggcuggcugaccaccaacuccgacucuuucacuggcuucacaccguaccaagagaagacaaccuuacaacccacauugaaauucacaaauaacucuaaacuuuuuccuaauacgucugauccucagaaggagaauaggaauaccgguaucguauuuggggccauucuuggagcaauacucgguguuucauugcucacuuuagucggcuaucugcugugcggcaagagaaagacagacucuuucucacacagaagguuauacgaugaucgcaaugagccaguguugcggcuggauaacgcaccugaaccuuaugauguguccuuuggaaacucaaguuauuacaaccccacgcuaaaugacuccgcaaugccugagagugaagaaaacgcccgcgacggaaucccaauggaugauauuccuccucugcguacaaguguguag

SEQ ID NO: 241360 - RNA, 1005 nt, Artificial Sequence
  derived and/or modified sequence
augcuggcuuuagcuaaaauccugcucaucucuacccuauucuacucccuguugagcgguucucacggaaaagaaaaucaggacauuaauacuacacagaacaucgcagaagucuucaaaaccauggaaaauaaacccauaagucucgaaagugaagccaaucucaacucagauaaggaaaacauaacaacaucgaaucugaaggccucucauucccccccccuaaacuuacccaacaacucacacggcauaaccgacuucucuagcaacuccuccgccgaacacucgcugggaucccugaaaccaaccaguacaauaucuacgucuccgccacugauccauaguuuugucagcaaagugcccuggaaugccccuaucgcugacgaagaucuccuucccauuuccgcgcacccuaaugccacaccggcccucaguucugagaacuuuacaugguccuuagucaacgacacuguuaagacacccgacaacucauccauaacgguuucaauucuguccuccgagccgacaucucccucugucacaccauugaucguagagccaaguggauggcucaccacuaacuccgacagcuucacaggguuuaccccuuaucaagaaaaaacaacucugcagccaacucuuaaauucacaaacaacuccaagcuuuucccaaacaccagugauccccaaaaggaaaaucggaauacaggaauaguuuucggugccaucuugggugcaauccuuggugugucccuguugacccuggugggauauuugcucugcggcaaaaggaagaccgauagcuuuucccauagacgauuguaugacgauaggaaugaaccaguccugcgccuggauaacgccccugaaccuuaugacguguccuuugguaacagcagcuacuauaauccgacacugaacgauagcgcaaugccagagagcgaggagaaugcaagagacggaauuccuauggaugacauaccuccccugagaaccuccguguag

SEQ ID NO: 241361 - protein, 546 aa, Artificial Sequence
  derived and/or modified sequence
MAAGSTTLRAVGKLQVRLATKTEPKKLEKYLQKLSALPMTADILAETGIRKTVKRLRKHQHVGDFARDLAARWKKLVLVDRNTGPDPQDPEESASRQRFGEALQEREKAWGFPENATAPRSPSHSPEHRRTARRTPPGQQRPHPRSPSREPRAERKRPRMAPADSGPHRDPPTRTAPLPMPEGPEPAVPGEQPGRGHAHAAQGGPLLGQGCQGQPQGEAVGSHSKGHKSSRGASAQKSPPVQESQSERLQAAGADSAGPKTVPSHVFSELWDPSEAWMQANYDLLSAFEAMTSQANPEALSAPALQEEAAFPGRRVNAKMPVYSGSRPACQLQVPTLRQQCLRVPRNNPDALGDVEGVPYSVLEPVLEGWTPDQLYRTEKDNAALARETDELWRIHCLQDFKEEKPQEHESWRELYLRLRDAREQRLRVVTTKIRSARENKPSGRQTKMICFNSVAKTPYDASRRQEKSAGAADPGNGEMEPAPKPAGSSQAPSGLGDGDGGSVSGGGSSNRHAAPADKTRKQAAKKVAPLMAKAIRDYKGRFSRR

SEQ ID NO: 241362 - DNA, 1641 bp, Artificial Sequence
  derived and/or modified sequence
atggccgccggcagcaccaccctgagagccgtgggcaagctgcaggtgagactggccaccaagaccgagcccaagaagctggagaagtacctgcagaagctgagcgccctgcccatgaccgccgacatcctggccgagaccggcatcagaaagaccgtgaagagactgagaaagcaccagcacgtgggcgacttcgccagagacctggccgccagatggaagaagctggtgctggtggacagaaacaccggccccgacccccaggaccccgaggagagcgccagcagacagagattcggcgaggccctgcaggagagagagaaggcctggggcttccccgagaacgccaccgcccccagaagccccagccacagccccgagcacagaagaaccgccagaagaaccccccccggccagcagagaccccaccccagaagccccagcagagagcccagagccgagagaaagagacccagaatggcccccgccgacagcggcccccacagagacccccccaccagaaccgcccccctgcccatgcccgagggccccgagcccgccgtgcccggcgagcagcccggcagaggccacgcccacgccgcccagggcggccccctgctgggccagggctgccagggccagccccagggcgaggccgtgggcagccacagcaagggccacaagagcagcagaggcgccagcgcccagaagagcccccccgtgcaggagagccagagcgagagactgcaggccgccggcgccgacagcgccggccccaagaccgtgcccagccacgtgttcagcgagctgtgggaccccagcgaggcctggatgcaggccaactacgacctgctgagcgccttcgaggccatgaccagccaggccaaccccgaggccctgagcgcccccgccctgcaggaggaggccgccttccccggcagaagagtgaacgccaagatgcccgtgtacagcggcagcagacccgcctgccagctgcaggtgcccaccctgagacagcagtgcctgagagtgcccagaaacaaccccgacgccctgggcgacgtggagggcgtgccctacagcgtgctggagcccgtgctggagggctggacccccgaccagctgtacagaaccgagaaggacaacgccgccctggccagagagaccgacgagctgtggagaatccactgcctgcaggacttcaaggaggagaagccccaggagcacgagagctggagagagctgtacctgagactgagagacgccagagagcagagactgagagtggtgaccaccaagatcagaagcgccagagagaacaagcccagcggcagacagaccaagatgatctgcttcaacagcgtggccaagaccccctacgacgccagcagaagacaggagaagagcgccggcgccgccgaccccggcaacggcgagatggagcccgcccccaagcccgccggcagcagccaggcccccagcggcctgggcgacggcgacggcggcagcgtgagcggcggcggcagcagcaacagacacgccgcccccgccgacaagaccagaaagcaggccgccaagaaggtggcccccctgatggccaaggccatcagagactacaagggcagattcagcagaagatag

SEQ ID NO: 241363 - DNA, 1641 bp, Artificial Sequence
  derived and/or modified sequence
atggctgccggaagcaccacattgcgggctgttgggaagttacaagtcaggctcgccacgaagaccgagccaaagaagctggagaaatacctgcagaagctgagcgccctgcctatgacggcagacatcctagcagaaactggaattaggaagaccgttaaaagactaaggaaacaccagcacgtgggcgattttgccagagacctagctgcccgttggaagaaacttgtcctcgttgatcgcaacactggtcctgaccctcaggaccctgaggaaagcgcctctcggcagagatttggcgaggctctccaggaaagagagaaggcgtggggtttcccagagaatgcaaccgccccacgtagcccaagtcactctccagaacacagacgcactgccagacgcaccccaccaggacagcaacggccccatcctcggtctcctagccgggaaccaagggcggaaagaaaaagacctcggatggcccctgcagacagcggacctcaccgcgatccccctaccagaactgcccctcttccaatgcccgagggaccagaaccagccgtccctggagagcagccaggccgggggcacgcgcacgcagcacaagggggaccactactgggccaaggatgtcagggacaaccacagggagaggccgtgggatctcattccaaaggacataaaagctctagaggtgcttctgcacagaagagtcccccagtccaggagtctcaaagtgagcgtctacaggccgccggggccgattccgccggccccaagacggtaccatcccacgtttttagtgagctgtgggacccttcggaggcgtggatgcaggcaaattacgatctgctgtccgctttcgaggcaatgacctcccaagccaatcccgaagcgctgtcagctcctgcgctacaggaggaagctgcatttcctggacgaagagtgaacgcgaaaatgccagtttacagcggcagtagacctgcctgtcagctgcaggtacctactctccgccagcaatgcttaagggttccccgaaataacccagacgctctcggcgacgtggagggggtcccatactctgtgctcgaacctgtgttggagggatggacccctgaccagctttacagaactgaaaaagataacgctgcgcttgcacgagaaactgatgaattatggcgtatccactgtctgcaagacttcaaggaggagaagccgcaggaacatgagtcttggagagagctgtacttgaggttgagggatgctagggagcagaggctgagggtggtaaccaccaaaattcgtagcgccagggagaacaaacccagtggccgccagacaaagatgatctgtttcaattccgttgctaaaacgccttacgatgcgtcaagaagacaggaaaagtcagcaggggcagctgatccaggaaacggagaaatggaaccagctcctaaacccgcgggcagctcccaagcccctagtggactcggcgatggagatggaggatcagtatctggaggaggcagttccaatagacacgcggctccagcagacaaaaccagaaagcaggcagcgaaaaaagttgctcccttgatggccaaagccattagggactataagggcagattctctagaaggtag

SEQ ID NO: 241364 - DNA, 1641 bp, Artificial Sequence
  derived and/or modified sequence
atggctgctggcagcaccaccctgcgggctgtgggcaagctgcaggtgcggctggccaccaagacagagcccaagaagctggagaagtacctgcagaagctgagcgccctgcccatgacagctgacatcctggccgagaccggcatcaggaagacagtgaagaggctgaggaagcaccagcacgtgggggactttgcccgggacctggccgcccgctggaagaagctggtgctggtggacagaaatactggaccagacccccaggaccctgaggagagcgccagccggcagagatttggagaggccctgcaggagcgggagaaggcctggggcttcccagaaaatgccacagcccccaggagccccagccacagccctgagcacagaagaacagcccggaggaccccacctggccagcagaggccccaccccaggagccccagccgggagcccagggctgagaggaagaggcccaggatggccccagctgacagcggcccccaccgggacccccccaccaggacagcccccctgcccatgcctgagggccctgagcctgctgtgcctggagagcagcccggccggggccacgcccacgccgcccagggcggccccctgctgggccagggctgccagggccagccccagggcgaggccgtgggcagccacagcaagggccacaagagcagcagaggagccagcgcccagaagagcccccctgtgcaggagagccagagcgagcggctgcaggccgccggggctgacagcgctggccccaagacagtgcccagccacgtgttcagcgagctgtgggaccccagcgaggcctggatgcaggccaactatgacctgctgagcgcctttgaggccatgaccagccaggccaaccctgaggccctgagcgccccagccctgcaggaggaggccgccttccctggccggcgggtgaatgccaagatgcctgtgtacagcggcagcaggcctgcctgccagctgcaggtgcccaccctgcggcagcagtgcctgcgggtgcccaggaacaacccagatgccctgggagatgtggagggcgtgccctacagcgtgctggagcctgtgctggagggctggaccccagaccagctgtacagaacagagaaggacaatgctgccctggcccgggagacagatgagctgtggaggatccactgcctgcaggacttcaaggaggagaagccccaggagcacgagagctggagggagctgtacctgcggctgagagatgcccgggagcagaggctgcgggtggtgaccaccaagatccgcagcgcccgggagaacaagcccagcggccggcagaccaagatgatctgcttcaacagcgtggccaagaccccctatgatgccagccggcggcaggagaagtctgctggagctgctgaccctggaaatggagagatggagcccgcccccaagccagctggcagcagccaggcccccagcggcctgggagatggagatggcggctctgtgtctgggggcggcagcagcaacagacatgctgccccagctgacaagaccaggaagcaggccgccaagaaggtggcccccctgatggccaaggccatccgggactacaagggccgcttcagcagaagatag

SEQ ID NO: 241365 - DNA, 1641 bp, Artificial Sequence
  derived and/or modified sequence
atggccgccggcagcaccaccctgcgggccgtgggcaagctgcaggtgagactggctaccaagacggaacccaaaaagctggagaaatatcttcagaaactcagcgccttaccaatgaccgcagacatcttggctgagacaggtatacgcaagaccgtaaaacggctcaggaagcaccagcacgttggagacttcgccagggatttggccgcacgttggaaaaagcttgtactggttgacagaaataccgggcccgacccacaggacccagaagagtcggccagtcgtcagcgcttcggggaggccctgcaggagagagagaaggcatggggttttcccgagaacgccactgcaccaaggtcaccttcccattctcctgagcaccggcgcactgcacggcgaacccccccgggacagcagcgaccacatcctcgcagtccctctagggagccacgcgcagaaagaaaaagaccaagaatggcaccagctgactccggccctcacagggacccccccacccggacagctcccttaccaatgcccgagggtcctgagcctgccgtcccaggcgaacagcccggaagagggcatgcacatgcggctcagggcgggcctctgctcggccagggctgtcagggccagccacagggcgaggccgtagggtcccatagcaagggacataagtcatcaaggggcgcctccgctcagaaatcccccccagtgcaggagtctcagagtgaaagactgcaagctgccggagcagactctgctggcccaaagacagtgcccagtcacgtttttagtgaactgtgggatcctagcgaggcctggatgcaagcgaactatgatctgctgagcgcctttgaagcaatgacctcccaggctaatcctgaagcccttagcgccccagccctgcaggaggaggctgcgtttcccggccggagagtcaacgcaaaaatgcccgtgtattcagggtcacgcccggcctgtcagctccaggttcctacactccgccaacagtgcctgcgggtaccgaggaacaaccctgatgctcttggggacgtggagggggtcccatatagcgtactcgagcccgtactcgaaggctggacccccgaccagctataccgcacagagaaggacaacgccgctttggctcgggagacggacgagttgtggcgcattcactgcctgcaggacttcaaagaagagaagccccaagaacacgaaagctggagggagttgtacttgcgtttgcgggatgcccgcgagcagcgcttacgagtcgtgacaacaaagatccggagtgccagagagaacaagccctcgggtcgacagacaaaaatgatctgtttcaatagtgtggccaagacaccatatgatgcttccagacgccaggaaaagagtgcaggagcagccgatccggggaacggcgagatggagccagcccctaaaccggcggggtcatcgcaggcacccagcggactgggggatggggatggcggctccgtttcgggcggcggctcttccaatcgccacgcggcacctgccgacaagacccggaaacaggctgcgaaaaaggtcgcgcccctgatggcaaaggccatccgcgattacaaggggagattttcacgccgttag

SEQ ID NO: 241366 - DNA, 1641 bp, Artificial Sequence
  derived and/or modified sequence
atggcagccggatccaccacccttcgcgcagtgggaaagctgcaagtccgcctcgccaccaaaacggaacccaaaaaactcgagaagtatctgcaaaaactcagcgctctgcctatgaccgccgatattctcgccgagactggcatccgcaagacagttaaaagactgcgcaagcaccagcatgtcggagacttcgccagagatctggcggctagatggaagaagctcgtgctggtggacagaaatactggacctgaccctcaggaccctgaagaaagcgccagccgccaaaggttcggagaagcacttcaggaacgagaaaaggcatggggatttccagagaatgctaccgctcccaggtctccctcccactccccagagcatagacgcactgccagacgcacaccaccaggacaacagcggcctcacccacggagccctagtagagaaccaagggctgaaagaaaacgacctagaatggcccctgcggactctggccctcatcgggatcccccaacacgcaccgctcccctacctatgcctgaagggcctgagccggctgttccaggcgaacagcctggccgagggcacgctcacgcagctcagggagggccattacttgggcagggttgccagggacagccccagggcgaagcagtgggctctcattcgaaaggacacaaatccagcagaggggcttcagcccagaagtctcccccagtgcaggagtctcagtctgaacgattacaagctgctggagctgactctgccggtccgaagactgtcccaagtcatgtcttcagtgagctttgggacccatccgaggcctggatgcaagcgaattacgacttgctgagcgccttcgaagccatgacctcacaggccaacccagaagcccttagtgcgcctgctctgcaagaggaagccgcttttcccggacggagagttaacgcaaagatgccagtgtacagtggatcccggcctgcatgccagctgcaggtgcccactcttcgacagcaatgtctgcgagtccccagaaataacccagatgccctgggcgacgttgaaggggtgccttacagtgtactcgagccagttctggaagggtggacgcctgaccaactttacaggactgaaaaagacaacgcagccttggcgcgagaaaccgacgaattgtggcgtatccattgccttcaggacttcaaagaggagaaaccccaggaacacgaaagctggcgtgagctctacctgcggctccgggatgccagagaacagcggctccgggtcgtaaccacgaagatacgctctgccagagagaataagccaagcggacggcagacaaagatgatatgcttcaatagcgtcgccaaaactccttacgacgcctcccgacgtcaagaaaaatctgcaggagcggctgaccccggaaacggcgaaatggagcctgccccaaagcccgctggctcaagccaggctccctctggcctaggagacggggacggcggttctgtgtccggcggtggttccagcaataggcatgcggctcctgccgataaaactaggaagcaggctgccaaaaaggtcgcccctttgatggccaaggccatccgggactataaaggccgtttcagcagacgttag

SEQ ID NO: 241367 - DNA, 1877 bp, Artificial Sequence
  derived and/or modified sequence
acatcccgaggaacagaagcgggcctgctcagctgtctgcaaggaccggcgttccagaccaagtggcccgctgctccgaggacccagctcgctccaggctgtgactccacatcccgaggtcgccgcctggcgaccgggcagcgaggaccggccaccccagactgcctgtgccgccgccccgagctcggacagagccgcgaccgcgaggacagcgacgcctgcacagctctggcgagatggcggcagggtccactacgctgcgcgcagtggggaagctgcaggtgcgtctggccactaagacggagccgaaaaagctagagaaatatttgcagaaactctccgccttgcccatgaccgcagacatcctggcggagactggaatcagaaagacggtgaagcgcctgcggaagcaccagcacgtgggcgactttgccagagacttagcggcccggtggaagaagctggtgctcgtggaccgaaacaccgggcctgacccgcaggaccctgaggagagcgcttcccgacagcgcttcggggaggctcttcaggagcgggaaaaggcctggggcttcccagaaaacgcgacggcccccaggagcccatctcacagccctgagcacagacggacagcacgcagaacacctccggggcaacagagacctcacccgaggtctcccagtcgcgagcccagagccgagagaaagcgccccagaatggccccagctgattccggcccccatcgggaccctccaacgcgcaccgctcccctcccgatgcccgagggccctgagcccgctgtgcccggggagcaacccggaagaggccacgctcacgccgctcagggcgggcctctgctgggtcaaggctgccagggccaaccccagggggaagcggtggggagccacagcaaggggcacaaatcgtcccgcggggcttcggctcagaaatcgcctcctgtccaggaaagccagtcagagaggctgcaggcggccggcgctgattccgccgggccgaaaacggtgcccagccatgtcttctcggagctctgggacccctcagaggcctggatgcaggccaactacgatctgctgtccgcttttgaggccatgacctcccaggcaaacccagaagcactctccgcgccagcgctccaggaggaagctgctttccctggacgcagagtgaacgctaagatgccggtgtactcgggctccaggcctgcctgccagctccaggtgccgacgctgcgccagcagtgcctccgggtgcctaggaacaatccggacgccctcggcgacgtggaaggggtcccctactcggttcttgaacccgttctggaagggtggacgcccgatcagctgtaccgcacagagaaagacaatgccgcactcgctcgagagacagatgaattatggaggattcattgcctccaggacttcaaggaagaaaagccacaggagcacgagtcttggcgggagctgtacctgcggcttcgggacgcccgagagcagcggctgcgagtagtgaccacgaaaatccgatccgcacgtgaaaacaaacccagcggccgacagacaaagatgatctgtttcaactctgtggccaagacgccttatgatgcttccaggaggcaagagaagtctgcaggagccgctgaccccggaaatggagagatggagccagcccccaagcccgcaggaagcagccaggctccctccggcctcggggacggcgacggcggcagcgtgagcggcggcggcagcagcaaccggcacgcggcgcccgcggacaaaacccgaaaacaggctgccaagaaagtggccccgctgatggccaaggcaattcgagactacaagggaagattctcccgacgataa

SEQ ID NO: 241368 - protein, 284 aa, Artificial Sequence
  derived and/or modified sequence
MAELVPFAVPIESDKTLLVWELSSGPTAEALHHSLFTAFSQFGLLYSVRVFPNAAVAHPGFYAVIKFYSARAAHRAQKACDRKQLFQKSPVKVRLGTRHKAVQHQALALNSSKCQELANYYFGFNGCSKRIIKLQELSDLEERENEDSMVPLPKQSLKFFCALEVVLPSCDCRSPGIGLVEEPMDKVEEGPLSFLMKRKTAQKLAIQKALSDAFQKLLIVVLESGKIAVEYRPSEDIVGVRCEEELHGLIQVPCSPWKQYGQEEEGYLSDFSLEEEEFRLPELD

SEQ ID NO: 241369 - DNA, 855 bp, Artificial Sequence
  derived and/or modified sequence
atggccgagcttgttcctttcgcggtgcccatcgaatctgacaagaccctgcttgtatgggagctctcttccggacccaccgccgaggcgctgcaccattctctgtttactgccttctcgcaatttgggcttctttatagcgtgagagtttttcctaatgcagctgtggctcacccaggattttatgccgtaataaaattctatagcgcccgcgccgcacacagggctcaaaaggcctgcgaccggaaacagctgtttcaaaagagtcccgtgaaagttagattaggcacaaggcataaggccgtgcagcaccaggctttagcacttaattccagcaagtgtcaagagctggccaactattacttcggatttaatggatgtagcaaacgcattatcaagctgcaagagctcagcgatctggaagagagggaaaatgaggattcaatggtgcctcttcccaagcagtctcttaaatttttctgcgcgttggaagtggtgttgccctcctgtgactgtcgctccccaggtatcggcctagtggaggaacctatggacaaagtcgaagaagggcccttgtccttcttaatgaaaagaaagacagcacagaagctcgccatacaaaaggcattgtccgacgcattccagaagctgctgatcgtggtactcgaatctggcaagatagcagtggagtatagaccttcagaggatattgttggggtgaggtgtgaagaggagctacatggcctgattcaggtcccttgtagtccgtggaagcagtatggccaagaagaagaagggtatctttccgatttctcacttgaggaggaggaattcagactacccgagctggattag

SEQ ID NO: 241370 - DNA, 855 bp, Artificial Sequence
  derived and/or modified sequence
atggccgagctggtgccctttgctgtgcccattgaaagtgacaagaccctgctggtgtgggagctgagcagcggccccacagctgaggccctgcaccacagcctcttcaccgccttcagccagtttggcctgctgtacagcgtgcgggtcttccccaatgctgctgtggcccaccctggcttctatgctgtgatcaagttctacagcgcccgggccgcccaccgggcccagaaggcctgtgacaggaagcagctgttccagaagagccctgtgaaggtgcggctgggcaccaggcacaaggctgtgcagcaccaggccctggccctgaacagcagcaagtgccaggagctggccaactactacttcggcttcaacggctgcagcaagaggatcatcaagctgcaggagctgagtgacctggaggagcgggagaatgaagacagcatggtgcccctgcccaagcagagcctgaagttcttctgtgccctggaggtggtgctgcccagctgtgactgccgcagccctggcatcggcctggtggaggagcccatggacaaggtggaggagggccccctgtccttcctgatgaagaggaagacagcccagaagctggccatccagaaggccctgagtgatgccttccagaagctgctgattgtggtgctggagagcggcaagattgctgtggagtaccggcccagtgaagatattgtgggcgtgcgctgtgaggaggagctgcacggcctcatccaggtgccctgcagcccctggaagcagtatggccaggaggaggagggctacctgagtgacttcagcctggaggaggaggagttccggctgcctgagctggactag

SEQ ID NO: 241371 - DNA, 855 bp, Artificial Sequence
  derived and/or modified sequence
atggccgagctggtgcccttcgccgtgcccatcgagagcgacaagactctcttggtctgggagttgtcaagcgggccgaccgccgaagctctccaccattccctgttcactgctttctcccaatttggactgctttacagtgtccgagtgttccctaatgctgcagttgcccatccgggcttctatgcagttataaagttctactccgcccgcgcggcgcatagggctcagaaggcctgtgataggaagcaactattccagaagagtccagtcaaagttagactgggtacccggcataaagccgtccagcaccaggccctggccctcaactcgagtaaatgccaggaactcgccaattattacttcggttttaacggatgctcgaagagaattatcaaactccaggaactatcagacttggaagaacgtgaaaacgaagacagtatggtgcctctgccaaagcaatccctcaagttcttctgcgccctggaagtggttctccccagttgcgattgtcgcagcccaggaattggactggtagaggaacccatggataaggtggaagagggccccctctccttcctcatgaagcggaaaacggcacaaaagctggcaattcaaaaggccctctccgacgccttccagaagcttctcatcgtggtgctggagtcaggcaagattgcagtggaatacaggcccagtgaagatatcgtaggggtccggtgcgaggaagagctgcacggattaatacaagtgccctgttctccctggaagcagtatggacaggaggaagaaggatatctttctgatttctccctcgaggaggaggagtttagactgccggaactcgactag

SEQ ID NO: 241372 - DNA, 855 bp, Artificial Sequence
  derived and/or modified sequence
atggcagagttggtacctttcgccgtgccaatcgaatctgacaagactcttctggtgtgggaactgagctctgggcctacagctgaagcactccatcattcgctgtttactgccttctcacaatttgggttactgtattccgtccgcgtgtttcctaacgctgctgtagcgcacccaggattctacgccgttatcaaattctattccgcacgggctgctcatcgcgctcagaaggcctgtgatagaaaacaacttttccaaaagagccccgtgaaagtacgactaggcacaagacataaggctgtgcagcatcaggctcttgccctgaacagctccaagtgtcaagagctggccaattactattttggctttaatggctgctctaagcgaatcattaagcttcaggagctgagcgatctggaagaacgtgaaaatgaagactccatggttcctctgcccaaacagtccctcaagtttttctgcgcattagaggtcgtcttgccttcttgtgattgccgaagtcccggaattgggctggtcgaagagcccatggacaaagtggaggagggccctctctctttcctgatgaaaagaaagaccgcccagaaactggccattcagaaagctttgtccgatgcgtttcagaagctgttgatcgtagttctcgaatctgggaagattgccgtcgagtatcgccctagcgaggatatcgtgggcgtccggtgcgaggaggagctgcacggtctgatccaggttccctgtagcccctggaagcagtatgggcaggaagaagagggatacctcagcgacttttccctggaggaggaggagttcagattgcctgagctggactag

SEQ ID NO: 241373 - DNA, 1158 bp, Artificial Sequence
  derived and/or modified sequence
tagccgcgcaggtgcggtgaagggaggatggcggagttggtaccttttgcggttcccatcgagagtgacaaaaccttgctagtgtgggagctgagctccggacccacggccgaggctttgcatcattctctgttcacagcattttctcagtttggccttctgtattcagtccgggtcttcccaaatgctgcagtggcccatcctggtttctatgccgtcattaagttttattctgcaagggctgcccacagagcccaaaaggcatgcgaccggaagcagctttttcagaaatctccagtcaaggttcgtcttggcaccagacataaggcagttcaacatcaagcccttgccctgaacagttccaaatgccaagaactggcgaattactactttggtttcaatgggtgttccaaaaggatcatcaagcttcaggagctttctgaccttgaagaaagggaaaatgaagatagcatggtgccacttccgaagcaaagcctgaagttcttctgtgctttagaagtggtgttgccatcctgtgattgcaggagtcctggcattggcttggtggaggagcctatggataaggtggaggaaggaccattatcattccttatgaaaaggaagacagcccagaagcttgctattcagaaggctttgtcagatgcattccagaaactgttgattgttgttctagaaagtggtaaaatagctgtggagtacagacccagtgaagacatcgtaggtgtcagatgcgaagaagaactacacggtttaattcaagtcccttgctctccctggaagcagtatggccaagaggaggaagggtatctctcggatttcagcttggaggaggaagagttcaggctgccagaacttgactagcatttctgaatatcccaaggcgaggtcatgtaacttccttgggaagctctgtcgtgcccctaccccacgccgccccaccactataggctgctggagtcctggaaccacctgggtcggccgcccaaatctttcctggcgaaggggagggaaggggtgttctggtggagtgggaagggaggcttgggtaggattgtgggataagatcgccctggtgacgaggagcggatctcgaacggaacttaataaaggttgcctagataaagatatggtaaataa

SEQ ID NO: 241374 - DNA, 855 bp, Artificial Sequence
  derived and/or modified sequence
atggccgagctggtgcccttcgccgtgcccatcgagagcgacaagaccctgctggtgtgggagctgagcagcggccccaccgccgaggccctgcaccacagcctgttcaccgccttcagccagttcggcctgctgtacagcgtgagagtgttccccaacgccgccgtggcccaccccggcttctacgccgtgatcaagttctacagcgccagagccgcccacagagcccagaaggcctgcgacagaaagcagctgttccagaagagccccgtgaaggtgagactgggcaccagacacaaggccgtgcagcaccaggccctggccctgaacagcagcaagtgccaggagctggccaactactacttcggcttcaacggctgcagcaagagaatcatcaagctgcaggagctgagcgacctggaggagagagagaacgaggacagcatggtgcccctgcccaagcagagcctgaagttcttctgcgccctggaggtggtgctgcccagctgcgactgcagaagccccggcatcggcctggtggaggagcccatggacaaggtggaggagggccccctgagcttcctgatgaagagaaagaccgcccagaagctggccatccagaaggccctgagcgacgccttccagaagctgctgatcgtggtgctggagagcggcaagatcgccgtggagtacagacccagcgaggacatcgtgggcgtgagatgcgaggaggagctgcacggcctgatccaggtgccctgcagcccctggaagcagtacggccaggaggaggagggctacctgagcgacttcagcctggaggaggaggagttcagactgcccgagctggactag

SEQ ID NO: 241375 - protein, 402 aa, Artificial Sequence
  derived and/or modified sequence
MNFWRYCFFAFTLLSVVIFVRFYSSQLSPPKSYEKLNSSSERYFRKTACNHALEKMPVFLWENILPSPLRSVPCKDYLTQNHYITSPLSEEEAAFPLAYVMVIHKDFDTFERLFRAIYMPQNVYCVHVDEKAPAEYKESVRQLLSCFQNAFIASKTESVVYAGISRLQADLNCLKDLVASEVPWKYVINTCGQDFPLKTNREIVQHLKGFKGKNITPGVLPPDHAIKRTKYVHQEHTDKGGFFVKNTNILKTSPPHQLTIYFGTAYVALTRDFVDFVLRDQRAIDLLQWSKDTYSPDEHFWVTLNRVSGVPGSMPNASWTGNLRAIKWSDMEDRHGGCHGHYVHGICIYGNGDLKWLVNSPSLFANKFELNTYPLTVECLELRHRERTLNQSETAIQPSWYF

SEQ ID NO: 241376 - DNA, 1209 bp, Artificial Sequence
  derived and/or modified sequence
atgaacttttggcggtactgctttttcgcctttaccctgctgagcgtggttattttcgtgaggttttactcctctcaattgagtccccccaaatcatatgaaaagctgaactcgagtagtgaacgatactttcggaagaccgcttgtaatcatgcactggagaaaatgcctgtctttctctgggagaacatattaccttctcctctgcgaagtgtgccttgtaaggactacctgactcaaaatcactatattacctcgcctttgagtgaagaggaagcagctttcccgcttgcttatgtcatggtgatccataaagacttcgatacctttgagcgcttatttagagccatctacatgcctcagaatgtatactgtgtgcacgtggatgaaaaggcgcccgccgagtacaaagagtcagtcagacaacttttgtcttgctttcagaacgcttttatcgcttctaaaacagagtcggtggtatacgcgggcatcagcaggctacaggctgatctgaactgtctgaaagatctcgtggcctccgaagtgccgtggaaatatgtgattaatacgtgcggtcaagactttccactgaaaacaaatagggaaattgttcagcatctgaagggattcaagggcaagaatataaccccgggggttctccctcccgaccatgcaattaaaagaaccaaatatgtacaccaggaacacaccgacaaaggcgggttctttgtgaaaaacactaatatcctgaaaacatcacccccccatcagcttaccatctatttcgggacagcttacgtcgcccttaccagagacttcgtcgactttgtgctccgggatcagcgcgccatcgatttgctgcagtggtccaaagacacctactcaccagacgaacacttttgggttacactcaatcgggtgtcaggcgtgccgggttcaatgcctaacgcatcttggacgggcaatctgagagccatcaaatggtccgatatggaagacaggcatggtggttgccatggtcattacgtgcatggaatctgtatttacggtaatggcgatctcaagtggctggttaattcgccatctctcttcgccaacaaattcgaactgaacacttatccactgactgttgaatgcctggagctgaggcatcgagaaaggactttaaaccagtccgaaaccgcgattcagccctcatggtatttttag

SEQ ID NO: 241377 - DNA, 4214 bp, Artificial Sequence
  derived and/or modified sequence
aaccctggggaactgcagaccaaagtgagagagggacgcaccgcatctccaggcacatccaaaaaggatggacgagacaccgaagcagaggatacaggaggattaaaggattcaggaaagcaagcagccctccggagaagctgtcgaaattcaagactggcaagagaagcaaattcaacctctcacaccgatcatttctcattccctgaaaagaagagattgtttccccagggaagtgaaaataatgaacttttggaggtactgcttttttgctttcactctgctcagcgtggtcatttttgtgagattttacagtagccaattgagcccgccaaaaagttatgagaagctgaacagttccagtgaaaggtattttaggaaaactgcctgtaatcacgccttagagaaaatgccagtctttttgtgggaaaatatattaccatcacctttgcgaagtgtcccttgcaaggattacctgacccagaatcactacatcacaagtcccctgtcggaagaagaggctgcattccctttggcctatgtcatggtcatccataaggactttgacacctttgaaaggctctttagggctatctatatgccccaaaatgtctactgtgttcacgtggatgagaaagccccagctgagtataaggaatctgtgaggcagttactgagttgcttccaaaatgctttcattgcttcaaagacagagtctgtggtttatgcaggcatttccagactccaggctgacctgaactgtctgaaagaccttgtcgcctctgaggttccctggaagtacgtcatcaacacctgtggacaagacttccccctgaaaaccaaccgggagatagttcagcatctgaaaggatttaaagggaaaaatatcaccccaggggtgctgcctcctgaccatgcaattaagcgaactaaatatgtccaccaagagcatacagataaaggtggcttttttgtgaaaaatactaatattttgaaaacttcacctccacatcagctgaccatctactttggcactgcctatgtggcgcttaccagagactttgtcgactttgttctacgtgaccaaagggccattgatctactacaatggtcaaaagatacctatagtcctgatgagcatttctgggtgacacttaatagggtttcaggtgttcctggctctatgccaaatgcatcctggactggaaacctcagagctataaagtggagtgacatggaagacagacacggaggctgccacggccactatgtacatggtatttgtatctatggaaacggagacttaaagtggctggttaattcaccaagcctgtttgctaacaagtttgagcttaatacctacccccttactgtggaatgcctagaactgaggcatcgcgaaagaaccctcaatcagagtgaaactgcgatacaacccagctggtatttttgagctattcatgagctactcatgactgaagggaaactgcagctgggaagaggagcctgtttttgtgagagacttttgccttcgtaatgttaaccgtttcaggaccacgtttatagcttcaggacctggctacgtaattatacttaaaatatccactggacactgtgaaatacactaacaggatggctgggtagagcaatctgggcactttggccaattttagtcttgctgtttcttgatgctcacctctatattagtttattgttaggatcaatgataaatttaaatgacctcagatctttgcaccagatactcatcatatacaaatgttttagtaaaaaagagaattgtagataatactgtctaggaaaataagaattaggtttctttgaagaaggaatcttttataacaccttaacagtcaccactgtgctcaaccagacagatagtgaaacagctttctgggtaattcaccaatttcctttaaaacataagctacctgaatggagaatacatcttgtttctgagtttcaacactagcatttttggcttactcatggacaaagttctgtatatagtataaagtcattaacaagaaacaggatatgctttaagacagaattcactgtctgttgcttcagtaaaaggacctcggggaataaaacatttctctcttatatgccagaatgtaggctggtccctatgtcatgtcttccattaagaacactaaaaagtccttgcaagaatggagatatgcattcaagagaggtgctatcacatagatctagtctgaagtctggaacactttcctcttctatgacccctctctccccagtattatcttacttgcaaaatggagaccaaattctatcctgtgaggcttttaattgcaccatagtatgctctgagtagctttacactgcctggtactgatagtagtggctcgatttttaagagccttcaattgtagatgaacatctctgttatttatccctcattcatccatccgttcattcattcagccttcaatcaacatctcttgagtgtctattatgtacaggacatgtactgagacaaaaaggaaacataagagctttttcactctaaaaatcttggcaataatgtcaacaccagaaagcctcctctggagaatcttacagagtgattgtagtttaatacaggaacacacagggctgtgtagcatgataccaggcccaggagatcagtaattacaaattaagggttaaatcagagattattcaacagagagggagaaaggaggagacagagggaggacctgttgtgttccagccattctggtattcctttatgtatctaatttcattcaaacctcacaacagtcttgtgaggcccttatataattactcccattttgcagatgaagtaactgaggcttagaaaggttaatagcaccggggaacaatttctctgggtgagaattgggactctgttgctggtcttctcagttcatttcctgaggtggatttactgagagaaggtgaaataaagccatatttagtataccagagaaggtagattttaagaatggtctcagtgttaatactgagaaaaagtcctgtcagttcagaaaaaatgtgaagtctactttagtattcctgtaatactaaaccgttgagtttctaaatatttatttattctaacaaaaagcaattactacaaatggatgacacatttaatgaacacaattttattttttttctgtaactgtgcttgttgaatgtcaatcatatttaaagggaatgactttgaagtaaaaccttttttcttgctactgaaaaaaatggagttgttttgggtggtaaagtgttaaggaatagggacagctggtcacacaaggaactcttgaaggccacatgtgaaaacctgtcacttgcacagaggccagtcccactaaggtgaccagagtgggctccaagcacaaactgccattggctatagatgggactgtgtccccccaaaattcatgtgttggagccttaaccctcaatgtgatggtatttgagatggggcctttggtaagggaagtttagatgaggtcacgagggtaggaccctcatgatgggatgagtccccttacaagacctctggcttgggccgggcgtggtggctcacacctgtaatcccaacactttgggaggccaaggcaggtagatcacttgatgccaggagttccagaccaggctggccgacatggtgaaaccccatctctactaaaaaatataaaaattagccgggctttgtggcatgtgcctgtaatcccagctatttggcaggctgaggcatgagaatcgcttgaacccaggaggtggaggttacagtgagctgagagtgccccactgcactccagcctgggtgacagagcgagactttgtcccaaaacaaaataggtgaggggatagcgaatgcactcagggtcagcagtggagtttaaaaattgtctcttttcaacttatttaaatgacagcacctgagaagaggaaccgttttacactggatgtttctcatgtagaacaagaaatctttctggaattgatgtttacatgtctgttgttggtcatctctcctgtgtcttaaatactttaatgttggaagagcatagtgtttgggctagtgggtttctgacagcccatgggaatgccctgaaactactgtatctgatgtttgttttcgatgaggttccatgttttgttttcttgggaataaattaatatattgttttcca

SEQ ID NO: 241378 - DNA, 1209 bp, Artificial Sequence
  derived and/or modified sequence
atgaacttctggagatactgcttctttgccttcaccctgctgtctgtggtgatctttgtgcgcttctacagcagccagctgagcccccccaagagctatgagaagctgaacagcagcagcgagcgctacttcaggaagacagcctgcaaccacgccctggagaagatgcctgtgttcctgtgggagaacatcctgcccagccccctgcggtctgtgccctgcaaggactacctgacccagaaccactacatcaccagccccctgtctgaggaggaggccgccttccccctggcctacgtgatggtgatccacaaggactttgacacctttgagcggctcttccgggccatctacatgccccagaatgtgtactgtgtgcacgtggatgagaaggccccagctgagtacaaggagagcgtgcggcagctgctgagctgcttccagaatgccttcatcgccagcaagacagagagcgtggtgtatgccggcatcagccggctgcaggccgacctgaactgcctgaaggacctggtggccagcgaggtgccctggaagtatgtgatcaacacctgtggccaggacttccccctgaagaccaaccgggagatcgtgcagcacctgaagggcttcaagggcaagaacatcaccccaggagtgctgcccccagaccacgccatcaagaggaccaagtatgtgcaccaggagcacacagacaagggcggcttctttgtgaagaacaccaacatcctgaagaccagccccccccaccagctgaccatctacttcggcacagcctacgtggccctgacccgggactttgtggactttgtgctgcgggaccagagggccatcgacctgctgcagtggagcaaggacacctacagcccagatgagcacttctgggtgaccctgaacagagtgtctggagtgcccggctccatgcccaatgcctcctggacaggcaacctgcgggccatcaagtggagcgacatggaggacagacatggaggctgccacggccactacgtgcacggcatctgcatctatggaaatggagacctgaagtggctggtgaacagccccagcctgtttgccaacaagtttgagctgaacacctaccccctgactgtggagtgcctggagctgcggcaccgggagaggaccctgaaccagagcgagacagccatccagcccagctggtacttctag

SEQ ID NO: 241379 - DNA, 1209 bp, Artificial Sequence
  derived and/or modified sequence
atgaacttctggcggtactgcttcttcgccttcaccctgctgagcgtggtgatcttcgtcaggttctacagttcccagctgagcccccctaaatcctatgagaagctgaacagctcgtccgagcggtatttccggaaaacagcatgtaaccacgccctggagaagatgcccgtgtttctgtgggaaaacatccttccttcacccctgagaagtgtcccctgtaaggactatcttacgcagaatcactatataacctctccgctctccgaagaggaagctgctttccccctggcttatgtaatggtaatccataaagacttcgacacgttcgaaagactgtttcgagccatatacatgcctcagaatgtatattgtgtgcacgttgatgaaaaagcgccagctgagtacaaggagtccgtgcgacagctcctttcctgcttccagaatgctttcatagcatcgaaaacggagagtgtggtttatgccggcattagtcgcctgcaagccgatctcaactgccttaaggatttggtggcgagtgaggtcccatggaaatacgtcatcaacacctgcggccaggatttccccctgaagaccaatcgtgagatagtgcaacatctgaaaggattcaagggtaaaaatatcactcctggtgtcttaccaccagaccacgcaatcaagagaacaaagtacgtccaccaggagcacaccgataagggcgggttctttgtcaaaaatacaaacatcctaaagacttccccacctcatcaactgaccatatactttggtaccgcttatgtggcactcactcgggactttgtggatttcgtgctgcgagatcagcgtgccatcgacttgcttcagtggtcaaaagatacatactcaccagatgaacacttctgggttacgctcaatcgggttagcggcgtgcctggttctatgcccaatgccagttggaccggaaatctacgcgctatcaagtggtcagatatggaggacagacacggaggatgtcacggccattacgtccatgggatatgtatctatggcaacggggacttgaagtggcttgtgaattcaccatcactgttcgcaaataagtttgaattgaatacgtatcctctcacggtggaatgtctagaactgcgccaccgggagagaacactaaatcagagtgagaccgccatacaaccttcatggtatttttag

SEQ ID NO: 241380 - DNA, 1209 bp, Artificial Sequence
  derived and/or modified sequence
atgaacttctggaggtactgcttttttgctttcacgctgctgagcgtggttatctttgtgagattttatagctcccagcttagcccaccgaaatcctacgagaagctgaactcttctagtgagcggtactttcggaagaccgcatgtaatcacgctctggagaaaatgcccgtttttttgtgggagaatattttaccaagcccacttagatcggtgccttgtaaggattaccttacccagaatcattatatcacctccccactgagcgaggaggaggctgcattccccctagcctacgtcatggttatccacaaggattttgatacatttgaacggcttttccgcgctatttatatgccacaaaatgtctactgtgtgcacgtagatgagaaggctcctgcagagtacaaagagtccgtacgacagctgctcagctgttttcagaacgcgtttatcgcaagtaaaacagagagtgttgtgtacgcaggcattagccgactccaggctgacttaaattgtttaaaggatttagtcgcgtcggaagtcccttggaaatacgtgattaacacatgcggacaagatttccctttaaagacaaaccgtgaaatagtccagcacctgaaaggctttaaagggaagaacattacccctggtgtactgccgcctgatcacgccattaaaagaactaaatacgtccaccaggaacacaccgacaaaggaggtttctttgtgaagaatacaaatatccttaagacatctccacctcaccaattgaccatttattttgggacggcctacgtggcccttactagggatttcgttgatttcgtcttaagagaccagcgtgcgattgatctcctgcagtggtccaaagatacgtattcccctgacgagcacttctgggtgacgctcaaccgcgtgagcggcgtccctggaagcatgcctaacgctagttggaccggtaatttgcgcgcaatcaagtggagcgacatggaggacagacatgggggttgccacggccactacgtgcacggtatatgcatctacggtaacggcgatttaaagtggctcgtaaattcaccaagcctctttgcgaataagtttgagctcaatacatatccactcacagtggaatgcctagagctcagacatagggagcgaacccttaatcaaagcgagaccgctatccagccaagctggtacttttag

SEQ ID NO: 241381 - DNA, 1209 bp, Artificial Sequence
  derived and/or modified sequence
atgaacttctggagatactgcttcttcgccttcaccctgctgagcgtggtgatcttcgtgagattctacagcagccagctgagcccccccaagagctacgagaagctgaacagcagcagcgagagatacttcagaaagaccgcctgcaaccacgccctggagaagatgcccgtgttcctgtgggagaacatcctgcccagccccctgagaagcgtgccctgcaaggactacctgacccagaaccactacatcaccagccccctgagcgaggaggaggccgccttccccctggcctacgtgatggtgatccacaaggacttcgacaccttcgagagactgttcagagccatctacatgccccagaacgtgtactgcgtgcacgtggacgagaaggcccccgccgagtacaaggagagcgtgagacagctgctgagctgcttccagaacgccttcatcgccagcaagaccgagagcgtggtgtacgccggcatcagcagactgcaggccgacctgaactgcctgaaggacctggtggccagcgaggtgccctggaagtacgtgatcaacacctgcggccaggacttccccctgaagaccaacagagagatcgtgcagcacctgaagggcttcaagggcaagaacatcacccccggcgtgctgccccccgaccacgccatcaagagaaccaagtacgtgcaccaggagcacaccgacaagggcggcttcttcgtgaagaacaccaacatcctgaagaccagccccccccaccagctgaccatctacttcggcaccgcctacgtggccctgaccagagacttcgtggacttcgtgctgagagaccagagagccatcgacctgctgcagtggagcaaggacacctacagccccgacgagcacttctgggtgaccctgaacagagtgagcggcgtgcccggcagcatgcccaacgccagctggaccggcaacctgagagccatcaagtggagcgacatggaggacagacacggcggctgccacggccactacgtgcacggcatctgcatctacggcaacggcgacctgaagtggctggtgaacagccccagcctgttcgccaacaagttcgagctgaacacctaccccctgaccgtggagtgcctggagctgagacacagagagagaaccctgaaccagagcgagaccgccatccagcccagctggtacttctag

SEQ ID NO: 241382 - protein, 264 aa, Artificial Sequence
  derived and/or modified sequence
MPRSFLVDSLVLREAGEKKAPEGSPPPLFPYAVPPPHALHGLSPGACHARKAGLLCVCPLCVTASQLHGPPGPPALPLLKASFPPFGSQYCHAPLGRQHSAVSPGVAHGPAAAAAAAALYQTSYPLPDPRQFHCISVDSSSNQLPSSKRMRTAFTSTQLLELEREFASNMYLSRLRRIEIATYLNLSEKQVKIWFQNRRVKHKKEGKGSNHRGGGGGGAGGGGSAPQGCKCASLSSAKCSEDDDELPMSPSSSGKDDRDLTVTP

SEQ ID NO: 241383 - DNA, 795 bp, Artificial Sequence
  derived and/or modified sequence
atgccgaggagcttcctggtagatagcctggttctcagggaagctggtgagaagaaggcaccggaagggagtcctcctcctctcttcccatacgccgttccccctcctcacgcactacatggactgagccccggggcctgtcatgccagaaaggctggtctcctgtgcgtctgtcctttatgtgtgaccgctagtcagctccatggcccccctggacctccagcactgcccctgctcaaggccagcttccccccatttggaagtcagtactgccatgcacctttaggacgacaacactccgcagtatctccaggtgtggctcacggtccagctgcagctgcagcagctgctgctctctatcagacttcctatccactgcctgaccccaggcagttccactgcatcagtgtagattccagcagcaatcagttgccttcatctaaacgtatgaggaccgctttcaccagcacccagttgctggaacttgagcgcgaatttgcgagcaatatgtatttgtccaggctgagacgaatcgaaattgctacctatctcaatctctccgaaaaacaggtaaagatctggtttcagaatcgtcgtgtaaagcacaaaaaagagggaaaaggcagtaaccacaggggaggggggggtggcggtgcggggggcggcgggagtgccccacagggctgcaaatgcgccagtttgtcctcggctaagtgttcggaggatgacgatgagctgcccatgtccccctctagctccgggaaggacgatagagacctcacggttactccctag

SEQ ID NO: 241384 - DNA, 795 bp, Artificial Sequence
  derived and/or modified sequence
atgcccaggagcttcctggtggacagcctggtgctgcgggaggccggggagaagaaggcccctgagggcagccccccacccctcttcccctatgctgtgcccccacctcatgccctgcacggcctgagccctggggcctgccacgccaggaaggccggcctgctgtgtgtgtgccccctgtgtgtgacagccagccagctgcacggccccccaggccccccagccctgcccctgctgaaggccagcttcccccccttcggcagccagtactgccacgcccccctgggccggcagcacagcgctgtgtcccctggggtggcccacggccctgctgctgctgctgctgctgctgccctgtaccagaccagctaccccctgcctgacccccggcagttccactgcatctctgtggacagcagcagcaaccagctgcccagcagcaagaggatgaggacagccttcaccagcacccagctgctggagctggagcgggagtttgccagcaacatgtacctgagccggctgcggcgcatcgagatcgccacctacctgaacctgtctgagaagcaggtgaagatctggttccagaacagaagagtgaagcacaagaaggagggcaagggcagcaaccacagaggaggcggcggcggcggggccggcggcggcggcagcgccccccagggctgcaagtgtgccagcctgagcagcgccaagtgcagtgaagatgatgatgagctgcccatgagccccagcagcagcggcaaggatgaccgggacctgactgtgaccccctag

SEQ ID NO: 241385 - DNA, 795 bp, Artificial Sequence
  derived and/or modified sequence
atgccccggagcttcctggtggacagcctggtgctgcgggaggccggggagaaaaaagctcccgaggggtctccgccacccctgttcccatacgccgtgccaccaccccatgcccttcacggtttatccccgggggcttgtcacgctcgcaaggccgggctgttatgcgtttgccctttatgtgtgaccgctagccagctgcacggaccacctggcccccccgccctccctctgctcaaggcctccttcccccctttcggctcccaatattgccacgccccccttggccggcagcactctgcggtgtctccgggagtggcacacggtccggccgccgctgcagctgccgctgcgctatatcagactagctatcccctgcccgaccccaggcagtttcattgcatttctgtggattcttcctccaatcagcttccatccagtaaaaggatgagaaccgcctttactagcacccagctgcttgaactggaaagggaattcgcatccaatatgtacctgtctcggctgcgcagaattgagatcgctacatacctcaatctttcagaaaaacaggtgaaaatttggttccagaatcgccgtgtcaagcacaaaaaagagggaaagggcagcaaccaccggggtgggggaggggggggagcaggggggggcggatcagcgcctcaggggtgcaagtgcgcttccctctccagtgccaagtgttcagaggatgacgatgagcttccaatgtcgccaagttccagtggtaaagacgaccgcgacctgactgtgactccttag

SEQ ID NO: 241386 - DNA, 795 bp, Artificial Sequence
  derived and/or modified sequence
atgcctaggagcttcttggtggacagtctcgttcttagagaggctggtgaaaaaaaagctcccgaggggagtccccctccactgttcccttacgctgtccctcccccacatgcccttcacgggctgtctcctggcgcttgtcacgccagaaaggccggtctcttatgcgtatgtccactgtgtgtgaccgcctcacagctgcacggaccccctggccctccggctctgcctcttctgaaagcgagcttcccgccttttgggagtcaatattgtcatgcgccactgggaagacagcactccgctgttagtcccggagtggcacacggaccggctgccgcagccgcagctgctgcactttatcagacatcctatcctctccccgatccacgacagttccactgcatcagcgtggattcaagtagcaaccagttacctagcagcaagaggatgaggaccgctttcacgtctacgcaactcctggaactggagcgcgaattcgcttctaatatgtacctctccaggctgagacggatagaaatcgccacttaccttaacctgagtgaaaagcaagtcaagatctggtttcagaatcggagagtgaaacacaagaaagaggggaaagggagtaaccatcgagggggtggagggggaggcgcaggcggtggcggttctgccccacagggatgtaaatgcgcctcactctcatccgctaaatgctcagaggacgatgacgaactccctatgtccccctcaagcagcggcaaggatgaccgcgacttaaccgtgacaccctag

SEQ ID NO: 241387 - DNA, 1663 bp, Artificial Sequence
  derived and/or modified sequence
gtgggcgcagagggcgggctggctgcggggcgaccgcgcgccggggccatgccgcgctccttcctggtggactcgctagtgctgcgcgaggcgggcgagaagaaggcgcccgagggcagcccgccgccgctcttcccctacgctgtgcccccgccgcacgcgctgcacggtctctcgcctggcgcctgccacgcgcgcaaggctgggctgctgtgcgtgtgcccgctctgcgtcaccgcctcgcagctgcatgggccccccgggccgcccgcgctgcctctactcaaggcttccttcccacccttcggctcgcagtactgccacgcgcccctgggccgccagcactctgctgtgtcgcccggggtcgctcacggcccggccgccgctgctgctgccgccgcgctctaccagacctcctacccgctgcctgaccccaggcagttccactgcatctctgtggacagcagctctaaccagctgcccagcagcaagaggatgcgcacggctttcaccagcacgcagctgctagagctggagcgcgagttcgcttctaatatgtacctgtcccgcctacgtcgcatcgagatcgcgacctacctgaatctgtccgagaagcaggtgaagatctggtttcagaaccgccgagtgaagcacaagaaggagggcaagggcagcaaccatcgtggcggcggcggcgggggtgccggtggtggcgggagcgcaccgcaaggctgcaagtgcgcatcgctctcctcagccaagtgctccgaggatgacgacgaattgcccatgtctccgtcctcctcagggaaggacgaccgggatcttacggtcactccctaggcgcgtgtctccctaggtcgcccaccccaagacctccctgcgcctcggagactagtcctgggactcagcgctgattcccaggcacccgcagccaaaccactgcctggcatggatttggcactgctttgcagaggtcccgggcctgggcagggctgagagcttggcagagactggaccatggcgtccccgccccagggctcgctcgtgtccaaagccaactccaagctgtgaacactgtaagcgctcgagtcctcctgggcagtgcagcaccgcggcccccgcccgcaagcctgcttggcgcagcgccttgctggcagccggcgcctcctagcccgccctctctgggctggcttgggcttcctcgcttactctactctcctccgctctcggtcaaggtcggcggccttggatgctcgttcgcttctctttttaaaatgtctttttgtccctccccacctctttcctgtgatcatttattcactcggcccccgcccgccaacacacacatttatgaacccccactttttttttccttctccttttcccttcccctcctcagggagcctcctccttcagtcagtccatttgtcccttgatctggccttgctgtcctcagtccccacggctcctctcacagatgataaatttcgcccgtagtatccatattggggaaacagatttgctctgtttccaacacgctcttccttcctctaaacataggaccccgctctgcgccgctggcgaccccactcttccccctccagactctggcccgccccagcctagctgtgtaattgtacggcctctgcaatgccagaag

SEQ ID NO: 241388 - DNA, 795 bp, Artificial Sequence
  derived and/or modified sequence
atgcccagaagcttcctggtggacagcctggtgctgagagaggccggcgagaagaaggcccccgagggcagccccccccccctgttcccctacgccgtgccccccccccacgccctgcacggcctgagccccggcgcctgccacgccagaaaggccggcctgctgtgcgtgtgccccctgtgcgtgaccgccagccagctgcacggcccccccggcccccccgccctgcccctgctgaaggccagcttcccccccttcggcagccagtactgccacgcccccctgggcagacagcacagcgccgtgagccccggcgtggcccacggccccgccgccgccgccgccgccgccgccctgtaccagaccagctaccccctgcccgaccccagacagttccactgcatcagcgtggacagcagcagcaaccagctgcccagcagcaagagaatgagaaccgccttcaccagcacccagctgctggagctggagagagagttcgccagcaacatgtacctgagcagactgagaagaatcgagatcgccacctacctgaacctgagcgagaagcaggtgaagatctggttccagaacagaagagtgaagcacaagaaggagggcaagggcagcaaccacagaggcggcggcggcggcggcgccggcggcggcggcagcgccccccagggctgcaagtgcgccagcctgagcagcgccaagtgcagcgaggacgacgacgagctgcccatgagccccagcagcagcggcaaggacgacagagacctgaccgtgaccccctag

SEQ ID NO: 241389 - protein, 350 aa, Artificial Sequence
  derived and/or modified sequence
MKPLVLLVALLLWPSSVPAYPSITVTPDEEQNLNHYIQVLENLVRSVPSGEPGREKKSNSPKHVYSIASKGSKFKELVTHGDASTENDVLTNPISEETTTFPTGGFTPEIGKKKHTESTPFWSIKPNNVSIVLHAEEPYIENEEPEPEPEPAAKQTEAPRMLPVVTESSTSPYVTSYKSPVTTLDKSTGIGISTESEDVPQLSGETAIEKPEEFGKHPESWNNDDILKKILDINSQVQQALLSDTSNPAYREDIEASKDHLKRSLALAAAAEHKLKTMYKSQLLPVGRTSNKIDDIETVINMLCNSRSKLYEYLDIKCVPPEMREKAATVFNTLKNMCRSRRVTALLKVY

SEQ ID NO: 241390 - DNA, 1053 bp, Artificial Sequence
  derived and/or modified sequence
atgaagcccctggtgctgctggtggccctgctgctgtggcccagcagcgtgcccgcctaccccagcatcaccgtgacccccgacgaggagcagaacctgaaccactacatccaggtgctggagaacctggtgagaagcgtgcccagcggcgagcccggcagagagaagaagagcaacagccccaagcacgtgtacagcatcgccagcaagggcagcaagttcaaggagctggtgacccacggcgacgccagcaccgagaacgacgtgctgaccaaccccatcagcgaggagaccaccaccttccccaccggcggcttcacccccgagatcggcaagaagaagcacaccgagagcacccccttctggagcatcaagcccaacaacgtgagcatcgtgctgcacgccgaggagccctacatcgagaacgaggagcccgagcccgagcccgagcccgccgccaagcagaccgaggcccccagaatgctgcccgtggtgaccgagagcagcaccagcccctacgtgaccagctacaagagccccgtgaccaccctggacaagagcaccggcatcggcatcagcaccgagagcgaggacgtgccccagctgagcggcgagaccgccatcgagaagcccgaggagttcggcaagcaccccgagagctggaacaacgacgacatcctgaagaagatcctggacatcaacagccaggtgcagcaggccctgctgagcgacaccagcaaccccgcctacagagaggacatcgaggccagcaaggaccacctgaagagaagcctggccctggccgccgccgccgagcacaagctgaagaccatgtacaagagccagctgctgcccgtgggcagaaccagcaacaagatcgacgacatcgagaccgtgatcaacatgctgtgcaacagcagaagcaagctgtacgagtacctggacatcaagtgcgtgccccccgagatgagagagaaggccgccaccgtgttcaacaccctgaagaacatgtgcagaagcagaagagtgaccgccctgctgaaggtgtactag

SEQ ID NO: 241391 - DNA, 1053 bp, Artificial Sequence
  derived and/or modified sequence
atgaaaccgctggtgttgttagtcgcactgctgctttggccaagctctgtgccagcctacccatccatcacagtgaccccagacgaagaacagaatctcaatcattatatccaggtattagaaaacctggtcaggagcgtaccctctggcgagcctggtagagaaaagaaatccaactcccccaagcatgtttattcaattgccagcaagggatccaagttcaaagagttggtaacccacggggatgctagcaccgagaacgacgtgcttacaaaccccatatccgaagaaacaacaacattccctacaggcggatttacacccgagatagggaagaaaaagcacacagagtccacccctttttggagcattaagcctaataacgtgagcattgtccttcatgccgaagaaccatatatagagaatgaggaaccggagccagaacccgaacccgcagccaagcaaactgaggctcccaggatgctgcccgtggttacagagtctagcacgagcccgtacgtgacgtcatacaagtcaccggtgaccaccctggacaaatcgaccgggataggcatctctacggagtccgaggatgtacctcaactgtccggcgagactgctatcgagaaacctgaagagttcggcaagcatcctgaaagctggaacaatgacgacattctgaagaaaatcttggacattaactcccaggtacagcaggctctgctgtctgacacttctaatcctgcctatagggaggatatcgaggccagtaaggaccatttgaaacgatccctcgcgttagctgcagctgccgagcacaagctaaaaaccatgtacaagtcccaactgctaccggtagggcgcacctcaaacaaaatcgacgatattgaaaccgtgataaatatgttgtgtaattccagatctaaactgtatgaatatcttgatattaagtgcgtgcctcctgagatgagggagaaagcagcaacagtattcaacaccttgaagaatatgtgccggtcaagacgagttaccgccttgctgaaagtctattag

SEQ ID NO: 241392 - DNA, 1053 bp, Artificial Sequence
  derived and/or modified sequence
atgaagcccctggtgctgctggtggccctgctgctgtggcccagctctgtgcctgcctaccccagcatcaccgtgaccccagatgaggagcagaacctgaaccactacatccaggtgctggagaacctggtgcgctctgtgcccagcggggagcccggccgggagaagaagagcaacagccccaagcacgtgtacagcatcgccagcaagggcagcaagttcaaggagctggtgacccatggagatgccagcacagaaaatgatgtgctgaccaaccccatcagcgaggagaccaccaccttccccactggaggcttcaccccagagatcggcaagaagaagcacacagagagcacccccttctggagcatcaagcccaacaacgtgtccatcgtgctgcatgctgaggagccctacattgaaaatgaggagcctgagcctgagcctgagcctgctgccaagcagacagaggcccccaggatgctgcctgtggtgacagagagcagcaccagcccctacgtgaccagctacaagagccctgtgaccaccctggacaagagcacaggcatcggcatcagcacagaaagtgaagatgtgccccagctgtctggagaaacagccatcgagaagccagaggagtttgggaagcaccctgagagctggaacaatgatgacatcctgaagaagatcctggacatcaacagccaggtgcagcaggccctgctgagtgacaccagcaacccagcctaccgggaggacatcgaggccagcaaggaccacctgaagaggagcctggccctggccgctgctgctgagcacaagctgaagaccatgtacaagagccagctgctgcctgtgggccgcaccagcaacaagattgatgacatcgagaccgtcatcaacatgctgtgcaacagccgcagcaagctgtatgagtacctggacatcaagtgtgtgcccccagagatgagggagaaggccgccaccgtcttcaacaccctgaagaacatgtgccgcagcagaagagtgacagccctgctgaaggtgtactag

SEQ ID NO: 241393 - DNA, 1053 bp, Artificial Sequence
  derived and/or modified sequence
atgaagcccctggtgctgctggtggccctgctgctgtggcccagctccgtgcctgcgtatccatctatcacagtgactcctgatgaggagcagaatctcaatcactacattcaggtgttggaaaatctcgtgcgcagtgttcccagtggggagcctggaagagaaaagaaatccaacagcccaaagcatgtttactccatcgctagcaaggggagcaagtttaaagaactggttacacatggggacgcctctactgaaaatgacgttctgacaaaccctatatctgaggaaactaccacgtttccaaccggaggctttacaccggagatcgggaagaagaagcacacagagagtacgccgttctggtccataaaaccaaataacgtttcgatcgtactccatgctgaggagccatatatagaaaatgaagaaccggagcccgaacctgaacctgcagcaaagcagacagaagccccacgcatgctgcctgtcgtgacagaatcctccacaagcccatacgtcacttcatataaaagtcccgttacaacgctagacaagagcaccggaatcggcatttctacggagtccgaagacgtcccccagctgtctggcgagacggccatcgaaaaacccgaagagttcggcaagcaccctgaatcatggaataatgatgatatactgaagaaaattctggacatcaatagccaagtgcagcaagccctgctctccgacacttccaacccggcctatagggaggatatcgaggcctccaaagaccatcttaaaagaagcctcgctctggccgctgctgccgaacacaagctaaagactatgtataaaagtcaactcttaccagtcggaaggactagtaacaagattgacgatattgaaacagtcatcaatatgctctgcaacagtaggtcaaaactgtacgagtatttagacattaagtgcgtgcccccagagatgcgggaaaaagcagctaccgtgttcaataccctgaagaatatgtgcagaagtcgccgtgtgactgccctcctcaaagtatattag

SEQ ID NO: 241394 - DNA, 1053 bp, Artificial Sequence
  derived and/or modified sequence
atgaagccattagttctcttagtcgcacttctgctctggccctctagtgtgcccgcatatccctccattaccgtaactcccgatgaagagcagaatctcaatcactacattcaagtgctcgaaaaccttgtgaggtccgtcccgagcggggaacctggaagggagaaaaaaagcaactctccgaagcacgtgtactctattgccagcaagggctctaagttcaaagagttagtgacccatggggatgccagtacagagaacgatgttttgacaaatcccatctctgaggaaacaaccaccttccccaccggtggttttactcccgagataggcaaaaagaagcatactgaaagcaccccattctggagtattaaacccaacaatgtgagtattgttctgcacgctgaggagccatatatcgaaaacgaggagcctgaacctgagcccgaacctgccgcaaaacaaactgaggccccaaggatgcttcccgtggtgaccgaaagtagcacctctccttacgttacctcatataagagcccagttaccacactggacaagtctaccggaataggaatttccactgaatctgaggatgtgccccaactttctggcgagaccgctatcgaaaagccagaggaatttggaaaacaccctgaaagctggaacaatgatgatatcctcaaaaaaatcctggacattaacagtcaggtacagcaggcgctgctgagtgataccagcaatcccgcttatagagaagacatcgaagcaagcaaggatcatctcaagcgcagcctcgcccttgcggctgctgctgagcataagttgaagaccatgtataagtcgcagctactccccgttggacggacatcgaataaaatcgacgacatcgagaccgttattaacatgctgtgcaattctcgttcgaagttgtatgaatacttggacatcaaatgcgtcccccctgaaatgcgggagaaggcggcaacagtgtttaacacccttaagaatatgtgccgctcacgtcgtgtgactgccctgctcaaggtctactag

SEQ ID NO: 241395 - DNA, 1431 bp, Artificial Sequence
  derived and/or modified sequence
ctgcgcttgcgcgctggggacaaccgttgctgggtgtcccagggcctgaggcaggacggtactccgctgacaccttccctttcggccttgaggttcccagcctggtggccccaggacgttccggtcgcatggcagagtgctacggacgacgcctatgaagcccttagtccttctagttgcgcttttgctatggccttcgtctgtgccggcttatccgagcataactgtgacacctgatgaagagcaaaacttgaatcattatatacaagttttagagaacctagtacgaagtgttccctctggggagccaggtcgtgagaaaaaatctaactctccaaaacatgtttattctatagcatcaaagggatcaaaatttaaggagctagttacacatggagacgcttcaactgagaatgatgttttaaccaatcctatcagtgaagaaactacaactttccctacaggaggcttcacaccggaaataggaaagaaaaaacacacggaaagtaccccattctggtcgatcaaaccaaacaatgtttccattgttttgcatgcagaggaaccttatattgaaaatgaagagccagagccagagccggagccagctgcaaaacaaactgaggcaccaagaatgttgccagttgttactgaatcatctacaagtccatatgttacctcatacaagtcacctgtcaccactttagataagagcactggcattgggatctctacagaatcagaagatgttcctcagctctcaggtgaaactgcgatagaaaaacccgaagagtttggaaagcacccagagagttggaataatgatgacattttgaaaaaaattttagatattaattcacaagtgcaacaggcacttcttagtgacaccagcaacccagcatatagagaagatattgaagcctctaaagatcacctaaaacgaagccttgctctagcagcagcagcagaacataaattaaaaacaatgtataagtcccagttattgccagtaggacgaacaagtaataaaattgatgacatcgaaactgttattaacatgctgtgtaattctagatctaaactctatgaatatttagatattaaatgtgttccaccagagatgagagaaaaagctgctacagtattcaatacattaaaaaatatgtgtagatcaaggagagtcacagccttattaaaagtttattaaacaataatataaaaattttaaacctacttgatattccataacaaagctgatttaagcaaactgcattttttcacaggagaaataatcatattcgtaatttcaaaagttgtataaaaatattttctattgtagttcaaatgtgccaacatctttatgtgtcatgtgttatgaacaattttcatatgcactaaaaacctaatttaaaataaaattttggttcagga

SEQ ID NO: 241396 - protein, 243 aa, Artificial Sequence
  derived and/or modified sequence
MGQTAGDLGWRLSLLLLPLLLVQAGVWGFPRPPGRPQLSLQELRREFTVSLHLARKLLSEVRGQAHRFAESHLPGVNLYLLPLGEQLPDVSLTFQAWRRLSDPERLCFISTTLQPFHALLGGLGTQGRWTNMERMQLWAMRLDLRDLQRHLRFQVLAAGFNLPEEEEEEEEEEEEERKGLLPGALGSALQGPAQVSWPQLLSTYRLLHSLELVLSRAVRELLLLSKAGHSVWPLGFPTLSPQP

SEQ ID NO: 241397 - DNA, 732 bp, Artificial Sequence
  derived and/or modified sequence
atgggccagaccgccggcgacctgggctggagactgagcctgctgctgctgcccctgctgctggtgcaggccggcgtgtggggcttccccagaccccccggcagaccccagctgagcctgcaggagctgagaagagagttcaccgtgagcctgcacctggccagaaagctgctgagcgaggtgagaggccaggcccacagattcgccgagagccacctgcccggcgtgaacctgtacctgctgcccctgggcgagcagctgcccgacgtgagcctgaccttccaggcctggagaagactgagcgaccccgagagactgtgcttcatcagcaccaccctgcagcccttccacgccctgctgggcggcctgggcacccagggcagatggaccaacatggagagaatgcagctgtgggccatgagactggacctgagagacctgcagagacacctgagattccaggtgctggccgccggcttcaacctgcccgaggaggaggaggaggaggaggaggaggaggaggaggagagaaagggcctgctgcccggcgccctgggcagcgccctgcagggccccgcccaggtgagctggccccagctgctgagcacctacagactgctgcacagcctggagctggtgctgagcagagccgtgagagagctgctgctgctgagcaaggccggccacagcgtgtggcccctgggcttccccaccctgagcccccagccctag

SEQ ID NO: 241398 - DNA, 732 bp, Artificial Sequence
  derived and/or modified sequence
atgggccagactgcgggcgatctcgggtggcgcctgagcctgctgctgcttccattgctgctggtacaggctggcgtgtgggggtttccgcgtcccccaggtagaccgcaattgagccttcaggagctgcggcgcgagttcaccgtgtcattgcatctggcccgcaaactccttagcgaagtgcgaggacaagctcacaggttcgctgaatctcacctccccggcgtgaatctgtacctgctaccacttggcgagcagcttcccgacgtgagccttacattccaggcctggaggcggctgagtgacccagagaggctctgtttcatctccaccacccttcagccatttcatgcactcttgggtggcttgggcacgcagggcagatggaccaatatggaacggatgcagctctgggcgatgaggctggacttgcgcgaccttcagaggcatctgcgcttccaagttctggctgccggtttcaacctgccggaagaggaggaagaggaggaggaggaggaagaagaagaacgaaaagggctactccccggcgcactggggtccgctttgcaaggcccagctcaggtctcctggccccagctcttgagcacgtatcggctgttacatagccttgaactggtgctctctagagccgtgcgcgagttgcttttattatccaaggcaggccattcggtgtggccactcgggtttcccactctcagccctcaaccctag

SEQ ID NO: 241399 - DNA, 732 bp, Artificial Sequence
  derived and/or modified sequence
atgggccagacagctggggacctgggctggaggctgagcctgctgctgctgcccctgctgctggtgcaggccggcgtgtggggcttcccccggcccccaggccggccccagctgagcctgcaggagctgcggcgggagttcaccgtgtccctgcacctggccaggaagctgctgtctgaggtgcggggccaggcccacagatttgctgagagccacctgcccggggtgaacctgtacctgctgcccctgggggagcagctgcctgatgtgtccctgaccttccaggcctggaggcggctgagtgaccctgagcggctgtgcttcatcagcaccaccctgcagcccttccacgccctgctgggcggcctgggcacccagggccgctggaccaacatggagaggatgcagctgtgggccatgaggctggacctgcgggacctgcagaggcacctgcgcttccaggtgctggccgccggcttcaacctgcctgaggaggaggaggaggaggaggaggaggaggaggaggagaggaagggcctgctgcccggggccctgggcagcgccctgcagggccctgcccaggtgtcctggccccagctgctgagcacctaccgcctgctgcacagcctggagctggtgctgagcagagctgtgcgggagctgctgctgctgagcaaggccggccacagcgtgtggcccctgggcttccccaccctgagcccccagccctag

SEQ ID NO: 241400 - DNA, 732 bp, Artificial Sequence
  derived and/or modified sequence
atgggccagaccgccggcgacctgggctggcggctgagcctgctgttgctcccactcctcctggtgcaagctggcgtgtggggatttcccagacccccagggaggcctcagctctccctacaggaacttaggcgtgaatttaccgtgtcactccacctggcaagaaaacttctctctgaagtgcgaggacaggcccaccggttcgcagaatcacatttgcctggggtgaatctgtaccttcttcccctgggcgagcagctgcccgacgtctcactgacgtttcaggcgtggaggcgtctttcagatccagaacggctatgctttatctctacaaccctccagccttttcatgccctcctggggggcttgggtacacagggaagatggaccaatatggagagaatgcagctgtgggccatgcgcttagatctgagggacctccagcgccatctgcgcttccaggtcctggcggcaggtttcaatctgcccgaagaggaagaagaagaggaggaggaagaggaggaggaacggaagggattgctgcccggggcgctggggagtgccctccagggtccagcacaagttagttggccccagctgctcagtacttatcgactcctgcactctcttgagctggtcttatcgcgcgccgtcagggagctcctcttgctgtccaaagctgggcatagcgtttggccactgggcttccctactttatcaccccagccgtag

SEQ ID NO: 241401 - DNA, 732 bp, Artificial Sequence
  derived and/or modified sequence
atggggcaaacggctggagatttaggatggaggcttagtttgttgttgctcccacttctcctggtgcaagctggtgtctggggcttccccaggccccctggcaggccccaattatccctacaggaattaagaagggagttcaccgtttccttacacctggctcgcaaactcttgtcagaggtgcgcggacaggctcatagattcgccgagagccatctgcctggcgtgaacctttacctgctgcctttgggcgaacagcttccagatgtatccctgaccttccaggcctggcgacgcctgtcagaccccgaacgcctctgttttatttccactactcttcagcctttccacgcactactggggggattgggaactcaggggcgatggaccaacatggaaagaatgcagctttgggccatgcggttggaccttcgtgatctgcagcgccatcttaggttccaagtcttggcagctggatttaatctgcccgaggaagaggaggaagaggaggaggaggaggaagaggagcgcaaaggattactgcccggagccttaggatcagccttgcaaggacccgctcaggtttcgtggcctcaactgttaagcacctaccgccttcttcacagcctggagctggtgctgtctcgcgctgtcagagaactgctcttattatccaaggccggtcattctgtgtggcccctcggttttcccacactgtccccacagccatag

SEQ ID NO: 241402 - DNA, 1044 bp, Artificial Sequence
  derived and/or modified sequence
gaccaaagaggctgggccccgccatgggccagacggcaggcgaccttggctggcggctcagcctgttgctgcttcccttgctcctggttcaagctggtgtctggggattcccaaggcccccagggaggccccagctgagcctgcaggagctgcggagggagttcacagtcagcctgcatctcgccaggaagctgctctccgaggttcggggccaggcccaccgctttgcggaatctcacctgccaggagtgaacctgtacctcctgcccctgggagagcagctccctgatgtttccctgaccttccaggcctggcgccgcctctctgacccggagcgtctctgcttcatctccaccacgcttcagcccttccatgccctgctgggagggctggggacccagggccgctggaccaacatggagaggatgcagctgtgggccatgaggctggacctccgcgatctgcagcggcacctccgcttccaggtgctggctgcaggattcaacctcccggaggaggaggaggaggaagaggaggaggaggaggaggagaggaaggggctgctcccaggggcactgggcagcgccttacagggcccggcccaggtgtcctggccccagctcctctccacctaccgcctgctgcactccttggagctcgtcttatctcgggccgtgcgggagttgctgctgctgtccaaggctgggcactcagtctggcccttggggttcccaacattgagcccccagccctgatcggtggcttcttagccccctgccccccaccctttagaactttaggactggagtcttggcatcagggcagccttcgcatcatcagccttggacaagggagggctcttccagccccctgccccaggctctacccagtaactgaaagcccctctggtcctcgccagctatttatttcttggatatttatttattgtttagggagatgatggtttatttattgtcttggggcccgatggtcctcctcgggccaagcccccatgctgggtgcccaataaagcactctcatcca

SEQ ID NO: 241403 - protein, 350 aa, Artificial Sequence
  derived and/or modified sequence
MEGAALLKIFVVCIWVQQNHPGWTVAGQFQEKKRFTEEVIEYFQKKVSPVHLKILLTSDEAWKRFVRVAELPREEADALYEALKNLTPYVAIEDKDMQQKEQQFREWFLKFPQIRWKIQESIERLRVIANEIEKVHRGCVIANVVSGSTGILSVIGVMLAPFTAGLSLSITAAGVGLGIASATAGIASSIVENTYTRSAELTASRLTATSTDQLEALRDILRDITPNVLSFALDFDEATKMIANDVHTLRRSKATVGRPLIAWRYVPINVVETLRTRGAPTRIVRKVARNLGKATSGVLVVLDVVNLVQDSLDLHKGAKSESAESLRQWAQELEENLNELTHIHQSLKAG

SEQ ID NO: 241404 - protein, 130 aa, Artificial Sequence
  derived and/or modified sequence
MEGAALLKIFVVCIWVQQNHPGWTVAGQFQEKKRFTEEVIEYFQKKVSPVHLKILLTSDEAWKRFVRVAELPREEADALYEALKNLTPYVAIEDKDMQQKEQQFREWFLKVSSNQMEDSGVHRKASCHCK

SEQ ID NO: 241405 - DNA, 1053 bp, Artificial Sequence
  derived and/or modified sequence
atggagggtgctgcacttcttaagatctttgttgtgtgcatctgggtccagcaaaaccatccagggtggactgtggctggccagtttcaggagaaaaaacgcttcaccgaggaagtcattgaatatttccagaagaaggtgtcccctgtacatctgaagattctgctcacctccgatgaggcttggaagcgcttcgtacgagtggcagaactgccaagggaggaagctgacgccctgtatgaggccttgaagaaccttactccctatgttgcaattgaggacaaagatatgcagcagaaagagcagcagttccgtgagtggttccttaaattccctcagatcaggtggaaaatccaggagtctatcgagcggctaagagttattgcaaatgagattgagaaagtccatcgagggtgtgttatagccaatgtcgtaagcgggagcacaggcatcttatcagttatcggcgttatgctggcacccttcactgccggtttaagcctctcgataacagccgctggagtcggattagggatagcttccgcaactgccgggatagcaagctcgatcgtggaaaacacttataccagaagtgcggagttgactgcttctcgactgactgctacctcaactgatcagcttgaggcacttcgagatatcctgagggatattacccccaatgttctctccttcgccttagacttcgatgaggccacaaagatgatcgccaatgacgtgcatacattgagacgtagcaaagccacagttggcaggcctctaatcgcctggcggtacgtaccaataaacgtcgtggagacgcttaggaccagaggcgctcctactaggatagtgcggaaggtggccaggaatctggggaaagccacatcaggtgtactcgttgtactggacgtggttaatcttgtgcaggattcgttggaccttcacaagggcgctaagtctgaaagcgctgagtcactgaggcagtgggcccaggagttggaggagaacctgaacgaacttactcatatccatcaatccctgaaagccggatag

SEQ ID NO: 241406 - DNA, 393 bp, Artificial Sequence
  derived and/or modified sequence
atggaaggagccgcccttctcaaaatctttgtggtttgcatctgggttcagcagaaccatcccggctggaccgtggccgggcaattccaggagaaaaaaaggttcactgaagaggtcatagaatactttcagaagaaggtgagccccgtacacctgaagattcttcttacatccgacgaagcatggaagaggttcgttcgcgttgctgagctgcccagggaagaagctgacgcgctttatgaggccctgaaaaatttgacaccatacgtggcaattgaagacaaggacatgcaacagaaggagcagcagttccgcgagtggttcctcaaggtgtcttccaatcagatggaggattccggagtccaccggaaggctagttgtcactgcaaatag

SEQ ID NO: 241407 - DNA, 1053 bp, Artificial Sequence
  derived and/or modified sequence
atggagggcgccgccctgctgaagatctttgtggtgtgcatctgggtgcagcagaaccaccctggctggacagtggccggccagttccaggagaagaagcgcttcacagaggaggtgattgagtacttccagaagaaggtgtcccctgtgcacctgaagatcctgctgaccagtgatgaggcctggaagagatttgtgcgggtggccgagctgccccgggaggaggctgatgccctgtatgaggccctgaagaacctgaccccctacgtggccatcgaggacaaggacatgcagcagaaggagcagcagttccgggagtggttcctgaagttcccccagatccgctggaagatccaggagagcattgaaaggctgcgggtcatcgccaatgaaattgagaaggtgcaccggggctgtgtgattgccaacgtggtgtctggcagcacaggcatcctgtctgtgattggagtgatgctggcccccttcaccgctggcctgagcctgagcatcacagctgctggggtgggcctgggcatcgccagcgccacagctggcatcgccagcagcatcgtggagaacacctacaccaggtctgctgagctgacagccagccggctgacagccaccagcacagaccagctggaggccctgcgggacatcctgcgggacatcaccccaaatgtgctgagctttgccctggactttgatgaggccaccaagatgattgccaatgatgtgcacaccctgcggcgcagcaaggccaccgtgggccggcccctgattgcctggaggtatgtgcccatcaacgtggtggagaccctgcggaccaggggggcccccaccagaattgtgaggaaggtggccaggaacctgggcaaggccaccagcggcgtgctggtggtgctggatgtggtgaacctggtgcaggacagcctggacctgcacaagggggccaagtctgagagcgctgagagcctgcggcagtgggcccaggagctggaggagaacctgaatgagctgacccacatccaccagagcctgaaggccggctag

SEQ ID NO: 241408 - DNA, 393 bp, Artificial Sequence
  derived and/or modified sequence
atggagggcgccgccctgctgaagatctttgtggtgtgcatctgggtgcagcagaaccaccctggctggacagtggccggccagttccaggagaagaagcgcttcacagaggaggtgattgagtacttccagaagaaggtgtcccctgtgcacctgaagatcctgctgaccagtgatgaggcctggaagagatttgtgcgggtggccgagctgccccgggaggaggctgatgccctgtatgaggccctgaagaacctgaccccctacgtggccatcgaggacaaggacatgcagcagaaggagcagcagttccgggagtggttcctgaaggtgagcagcaaccagatggaggacagcggcgtgcacaggaaggccagctgccactgcaagtag

SEQ ID NO: 241409 - DNA, 1053 bp, Artificial Sequence
  derived and/or modified sequence
atggagggcgccgccctgctgaagatcttcgtggtgtgcatctgggtccaacaaaatcatcctggatggaccgtagccgggcaattccaagagaaaaagcgcttcacggaagaggttattgaatattttcagaagaaggtgtctcctgttcatttaaagatcctcctgacgtctgacgaggcttggaagcggttcgtgcgcgtcgctgagctgccaagggaggaggcagatgccttgtacgaagctctgaagaacctgacaccctacgtcgcgatcgaagacaaagatatgcagcagaaggaacaacagttcagggagtggtttctcaaatttccacaaattagatggaagattcaggagagcattgagcggttaagggttattgccaatgaaatcgagaaggttcaccggggctgtgtgatcgccaacgttgtgtcaggatcaacaggcattctgtcagtgattggcgtgatgctggccccttttacggccggattgtcgctcagcataaccgccgccggggtcggcctgggtatagcatccgctacagcgggaatagcaagcagtatcgtggagaacacatatacccgttctgccgagctgacagcctcaaggcttacagcgacgtccactgatcaacttgaagctttacgcgatatactccgcgatattacacccaatgtgttgtcctttgcactcgattttgacgaggcaacgaagatgattgctaatgatgtgcacacacttcgacgaagcaaggccactgtgggccggccgcttatcgcctggcgctacgtacctatcaatgtcgtggagacactgagaactcggggggcccccacacggatcgtccgaaaggtcgctagaaatctcggcaaagccacaagcggtgtgttggtcgtgctggacgttgtgaatctggtacaggactcgctcgacctccataagggggccaaatcagaatccgccgagtctctcagacagtgggcgcaggagctcgaggagaatctgaatgaattgacgcacatccaccaatcactaaaagctggctag

SEQ ID NO: 241410 - DNA, 393 bp, Artificial Sequence
  derived and/or modified sequence
atggagggcgccgccctgctgaagatcttcgtggtgtgcatctgggttcaacaaaatcaccctggctggaccgtagccggtcagttccaggaaaagaaaaggttcacagaagaggttattgagtactttcaaaaaaaagtatctccagttcacctcaaaatactgctgacgagcgatgaagcttggaaacggttcgtcagggtggctgagcttcccagagaagaagcggacgccctgtatgaggcgctgaaaaatctgaccccatacgttgcaattgaggacaaagacatgcagcagaaggagcaacaattcagagaatggttcttaaaggtgagcagcaaccaaatggaagattcaggcgttcataggaaggcttcctgccactgtaaatag

SEQ ID NO: 241411 - DNA, 1053 bp, Artificial Sequence
  derived and/or modified sequence
atggagggcgcagcactgctgaagatcttcgtcgtgtgcatttgggtgcagcagaaccaccccggatggaccgtagccggtcagtttcaagagaagaagaggttcacagaggaggtcatcgagtattttcagaaaaaggtgagcccggtgcaccttaagatcctgctcaccagtgacgaagcttggaagaggttcgttagggtcgcagaactgcctcgggaggaggccgacgctctgtacgaagctctgaagaacttgactccttatgtggcaatcgaggacaaagacatgcagcagaaggagcaacaattccgtgagtggtttctgaaattcccacagatccgctggaaaatacaggaaagcatcgaaaggctaagagtcatagcaaacgaaatagagaaagtgcacagagggtgtgtaatcgcgaacgtcgtctccggctctaccggcattctctcagttattggcgtgatgcttgccccattcacagccggactttccctgtcgatcaccgccgctggggtgggattgggcattgcctctgcaactgccggaatcgcttccagcattgtcgagaacacgtatacccggagtgctgaattaactgcatcccggctcaccgctacttcaactgaccaactggaggcgctgagagatatcctaagggatatcacccctaacgtgctctcattcgctctcgacttcgacgaagccacaaagatgatcgcaaacgacgttcacactttgcgacgatcaaaagccaccgtgggcaggccactaattgcctggagatacgtaccaataaatgtggtggaaaccctgcgcacacgcggagccccaacaagaatcgttagaaaagtggcgagaaacctcggaaaagctacatcaggggtcctggtggtgctggatgtcgtcaaccttgtgcaggactctctcgatcttcataaaggggcaaagtcagaaagtgcagaaagtctgaggcagtgggctcaggagcttgaagagaaccttaatgagctgactcacatccatcagagtctgaaggccggttag

SEQ ID NO: 241412 - DNA, 393 bp, Artificial Sequence
  derived and/or modified sequence
atggagggcgcagctctcctcaagatttttgtggtttgcatatgggtgcagcaaaatcaccccggatggactgtcgcgggacagtttcaggaaaaaaaaagattcacagaagaagtaatcgaatacttccagaaaaaggtgagtcccgtgcatctgaagatacttcttacctccgatgaagcctggaagaggttcgtccgggtggccgagttgccgcgagaggaggctgacgctctctacgaggccctgaagaatctcacaccatacgtggcgatcgaagacaaggatatgcagcaaaaggaacagcagttcagagaatggtttctgaaggtgtccagtaatcaaatggaggactctggagtgcatcggaaggccagctgtcactgcaaatag

SEQ ID NO: 241413 - DNA, 1278 bp, Artificial Sequence
  derived and/or modified sequence
gaggtgctggggagcagcgtgtttgctgtgcttgattgtgagctgctgggaagttgtgactttcattttacctttcgaattcctgggtatatcttgggggctggaggacgtgtctggttattatataggtgcacagctggaggtgagatccacacagctcagaccagctggatcttgctcagtctctgtcagaggaagatcccttggaggaggccccgcagcgacatggagggagctgctttgctgaaaatctttgtcgtctgcatctgggtgcagcaaaaccatccaggctggacagtggctggacagttccaagaaaagaaacgcttcactgaagaagtcattgaatacttccagaagaaagttagcccagtgcatctgaaaatcctgctgactagcgatgaagcctggaagagatttgtgcgtgtggctgaattgcccagggaagaggcagatgctctctatgaagctctgaagaatcttacaccatatgtggctattgaggacaaagacatgcagcaaaaagaacagcagtttagggagtggtttttgaaatttcctcaaatcagatggaagattcaggagtccatagaaaggcttcgtgtcattgcaaatgagattgaaaaggtccacagaggctgcgtcatcgccaatgtggtgtctggctccactggcatcctgtctgtcattggcgttatgttggcaccatttacagcagggctgagcctgagcattactgcagctggggtagggctgggaatagcatctgccacggctgggatcgcctccagcatcgtggagaacacatacacaaggtcagcagaactcacagccagcaggctgactgcaaccagcactgaccaattggaggcattaagggacattctgcgtgacatcacacccaatgtgctttcttttgcacttgattttgacgaagccacaaaaatgattgcgaatgatgtccatacactcaggagatctaaagccactgttggacgccctttgattgcttggcgatatgtacctataaatgttgttgagacactgagaacacgtggggcccccacccggatagtgagaaaagtagcccggaacctgggcaaggccacttcaggtgtccttgttgtgctggatgtagtcaaccttgtgcaagactcactggacttgcacaagggggcaaaatccgagtctgctgagtcgctgaggcagtgggctcaggagctggaggagaatctcaatgagctcacccatatccatcagagtctaaaagcaggctag

SEQ ID NO: 241414 - DNA, 3225 bp, Artificial Sequence
  derived and/or modified sequence
gaggtgctggggagcagcgtgtttgctgtgcttgattgtgagctgctgggaagttgtgactttcattttacctttcgaattcctgggtatatcttgggggctggaggacgtgtctggttattatataggtgcacagctggaggtgagatccacacagctcagaccagctggatcttgctcagtctctgtcagaggaagatcccttggaggaggccccgcagcgacatggagggagctgctttgctgaaaatctttgtcgtctgcatctgggtgcagcaaaaccatccaggctggacagtggctggacagttccaagaaaagaaacgcttcactgaagaagtcattgaatacttccagaagaaagttagcccagtgcatctgaaaatcctgctgactagcgatgaagcctggaagagatttgtgcgtgtggctgaattgcccagggaagaggcagatgctctctatgaagctctgaagaatcttacaccatatgtggctattgaggacaaagacatgcagcaaaaagaacagcagtttagggagtggtttttgaaagtttcctcaaatcagatggaagattcaggagtccatagaaaggcttcgtgtcattgcaaatgagattgaaaaggtccacagaggctgcgtcatcgccaatgtggtgtctggctccactggcatcctgtctgtcattggcgttatgttggcaccatttacagcagggctgagcctgagcattactgcagctggggtagggctgggaatagcatctgccacggctgggatcgcctccagcatcgtggagaacacatacacaaggtcagcagaactcacagccagcaggctgactgcaaccagcactgaccaattggaggcattaagggacattctgcgtgacatcacacccaatgtgctttcttttgcacttgattttgacgaagccacaaaaatgattgcgaatgatgtccatacactcaggagatctaaagccactgttggacgccctttgattgcttggcgatatgtacctataaatgttgttgagacactgagaacacgtggggcccccacccggatagtgagaaaagtagcccggaacctgggcaaggccacttcaggtgtccttgttgtgctggatgtagtcaaccttgtgcaagactcactggacttgcacaagggggcaaaatccgagtctgctgagtcgctgaggcagtgggctcaggagctggaggagaatctcaatgagctcacccatatccatcagagtctaaaagcaggctaggcccaattgttgcgggaagtcagggaccccaaacggagggactggctgaagccatggcagaagaacgtggattgtgaagatttcatggacatttattagttccccaaattaatacttttataatttcctatgcctgtctttaccgcaatctctaaacacaaattgtgaagatttcatggacactgatcacttccccaatcaatacccttgtgatttcttatgcctgtctttactttaatctcctaatcctgtcagctgaggaggatgtatgtcacctcaggaccatgtgataattgcgttaactgcacaaattgtagagcatgtgtgtttgaacaatatgaaatctgggcaccttgaaaaaagaacaggataacagcaattgttcagggaataagagagataaccttaaactctgaccaacagtgagcctggtggaacagagtcatatttctcttctttcaaaagcaaatgggagaaatatcgctgaattctttttctcagcaaggaacatccctgagaaagagaatgcacccctgagggtgggtctataaatggcctccttgggtgtggccatcttctatggtcgagactgtagggatgaaataaaccccagtctcccatagcgctcccaggcttattaggaagaggaaattcccgcctaataaattttggtcagaccggttgctctcaaaaccctgtctcctgataagatgttatcaatgacaatggtgcccgaaacctcattagcaattttaatttctccccggtcctgtgttcctgtgatctcgccctgcctccacttgccttgtgatattctattaccttgtgaagtaggtgatctttgtgacccacacccacaccctattcatacactccctccccttttgaaagtccctaataaaaacttgctggttttgcggcttgtgaggcatcacggaacctaccgatgtgtgatgtctcccctggacacctagctttaaaatttctctcttttgtactctgtgcctttatttctcaaaccggccaacacttagggaaaatagaaaagaacctacgtgaccatcggggcaggttccccgatacccaatgaccccagagcagtgcagccaccagggaaggtgagccagacacaggccgggacaaaacgcagacattttttaggggaataaagagggcgaggtaaagtttatggaactcagtgttaggaactttggcatctgtagctgagcacagcaggggaggggttactcaagatggcaagtgcgccaaggagaaggcagaaatgctggggcctggaataagggaggagaggggactggagagtgtggggaatggaaagaagcagtttactctagactaaagagtatattgggggaggaagagagggaggcacgtaggaacaagcaatgagaagaccaggaaaagaaagagctgaaaatggagaaagccacagttagaactgttggatacaggagaagaaacagcggctccactaaagacccgccccccggttggatgtccttccaagaatggaatccttccctggtgatggtctctcaccctgtcttaccagcatccactctcccttgtcctcccgggggtgtatctgagtcagccagtggcttcttgatgatggtggtggtggttgtagtgtgacaggtcccctttaggttatttaagggtgcatgtcccctgcttgaaccctgaaggccgggtaatgagccatttccatggtgcccagctgaggaccaggtgtctctgagaatccaaacatcctggagagtatctgagaaccaaccaagtaaaagtctcgttgctcatatatagtagacaaagagccagaaaattaactgaaaagcagtttagacattgggggaggctggatctctcgagctgtcttgctgagtgccctgtgtgtaagtcctaataaacttagctactcgcca

SEQ ID NO: 241415 - DNA, 1053 bp, Artificial Sequence
  derived and/or modified sequence
atggaaggtgctgcattactgaagatctttgtggtttgcatctgggtgcaacagaatcaccctgggtggactgtggccgggcagttccaagaaaaaaaacgcttcacagaagaggtcattgagtatttccaaaagaaggtgtcccctgttcatttaaagattttactgacgagtgacgaagcctggaagcggtttgtgcgtgtcgccgaattgccacgcgaagaagccgatgcattatacgaggctcttaagaacctgacaccatacgtggccatagaagataaggacatgcagcagaaggaacagcaattccgggagtggtttcttaaatttccccagataaggtggaagatccaagaatctattgaacgattacgagttatagccaacgaaatagagaaggtgcaccggggctgtgtcatagctaatgttgtcagcggcagcacaggaattctgtctgtcattggcgttatgctggcgccattcacggcaggactgtcactaagtattacggcagcaggagtggggctcgggattgcatccgctaccgccgggattgcctccagtattgtggagaatacatacacaaggtctgcagagctcaccgcctccagactgaccgccacaagtactgatcagctggaagccctgagagacattcttcgcgacataacacccaacgtcctgtcctttgccctagactttgacgaagccaccaagatgattgccaacgacgtgcacaccctccggcggtcaaaagcgacagtcggaagaccgttaatcgcctggcgttatgtgcctattaacgttgtcgagaccctgcgcaccagaggtgcgccaacacgaattgttcgcaaggtggcacgaaatctgggaaaagccacatctggggttctggtggtgcttgacgtggtgaatttggtgcaggatagtctcgacctccacaaaggcgcaaaaagcgaatcagccgagagcttgcggcagtgggcccaggagctggaagagaatctaaacgagctgacacacatccatcaaagtctgaaagccggttag

SEQ ID NO: 241416 - DNA, 393 bp, Artificial Sequence
  derived and/or modified sequence
atggaaggcgctgcacttttgaaaatattcgtggtttgcatttgggtgcaacaaaatcatcctggttggacagtcgctgggcagttccaagaaaagaaaaggtttaccgaggaggtaattgagtacttccagaagaaagtgtctcctgtgcatttaaagatattactgactagtgatgaggcatggaagcgattcgttcgcgtggctgagttgccccgggaggaagcagacgccctgtacgaggcccttaaaaatctgaccccctacgtcgctattgaagacaaagacatgcagcagaaggaacaacagttcagggaatggtttctgaaggtatcaagtaatcaaatggaagacagcggagttcaccgtaaggcctcatgccactgcaagtag

SEQ ID NO: 241417 - DNA, 1053 bp, Artificial Sequence
  derived and/or modified sequence
atggagggagccgcccttctgaaaatcttcgtagtatgtatttgggttcagcaaaaccatcctggatggactgtggccgggcagttccaggaaaagaagcgcttcacggaagaggtgatagaatatttccaaaaaaaagtctcgccagtgcacttaaagatactcctgacaagtgacgaagcctggaaaagattcgtcagagtagccgagctaccaagagaggaagcagatgctctctacgaagcattgaagaatctcacaccttatgtggctattgaagacaaggatatgcaacagaaagagcaacagtttcgtgaatggtttctgaaatttccacagattaggtggaaaattcaggaaagcatagaaaggttacgagttatcgctaatgaaattgagaaagtgcatcggggatgcgtgatcgccaatgtggtgtccgggagcaccggcatcctttccgtgattggagtcatgttagcaccctttaccgccggtctgagtctgagcatcaccgctgctggagtgggcttgggtattgccagtgcaactgcaggaattgcatcatccatcgtagagaacacctatacaagaagcgccgaactgactgcctctagattaacagcaacgagcacagaccagctggaggcgttacgagatatcttaagagacatcacacccaacgttctttcttttgctctcgatttcgatgaggccaccaaaatgatcgcgaatgatgtacacacattgagaaggagcaaagctaccgttggcagaccactgatcgcttggagatacgtgccaatcaatgttgtggaaacactgcggactagaggggcccctacgcggattgtccgaaaggtggcaagaaatctgggcaaagccacaagcggcgtcctcgttgttctggatgttgttaacctggtgcaggattctttggaccttcataagggagcaaaaagtgagtcagccgagtcccttaggcaatgggcgcaagagctggaggaaaatctaaatgaactaactcatatccatcagagcctcaaagccggttag

SEQ ID NO: 241418 - DNA, 393 bp, Artificial Sequence
  derived and/or modified sequence
atggaaggggccgctctcttaaaaatatttgtggtctgtatctgggtgcagcaaaatcaccctggatggaccgtggcagggcaatttcaagaaaagaaaaggtttaccgaagaagtaatcgagtactttcagaaaaaagtgtccccagtacatctgaagatcctcttaactagtgatgaggcatggaagagattcgtgagagtcgctgaactcccacgtgaggaggcagacgctctgtatgaggctttgaaaaacctgaccccctatgtcgcaattgaggacaaggacatgcaacaaaaggaacaacaatttcgcgaatggttcctgaaagtcagtagcaatcagatggaagactcaggcgtacacagaaaagcatcttgccactgcaaatag

SEQ ID NO: 241419 - DNA, 1053 bp, Artificial Sequence
  derived and/or modified sequence
atggagggcgccgccctgctgaagatcttcgtggtgtgcatctgggtgcagcagaaccaccccggctggaccgtggccggccagttccaggagaagaagagattcaccgaggaggtgatcgagtacttccagaagaaggtgagccccgtgcacctgaagatcctgctgaccagcgacgaggcctggaagagattcgtgagagtggccgagctgcccagagaggaggccgacgccctgtacgaggccctgaagaacctgaccccctacgtggccatcgaggacaaggacatgcagcagaaggagcagcagttcagagagtggttcctgaagttcccccagatcagatggaagatccaggagagcatcgagagactgagagtgatcgccaacgagatcgagaaggtgcacagaggctgcgtgatcgccaacgtggtgagcggcagcaccggcatcctgagcgtgatcggcgtgatgctggcccccttcaccgccggcctgagcctgagcatcaccgccgccggcgtgggcctgggcatcgccagcgccaccgccggcatcgccagcagcatcgtggagaacacctacaccagaagcgccgagctgaccgccagcagactgaccgccaccagcaccgaccagctggaggccctgagagacatcctgagagacatcacccccaacgtgctgagcttcgccctggacttcgacgaggccaccaagatgatcgccaacgacgtgcacaccctgagaagaagcaaggccaccgtgggcagacccctgatcgcctggagatacgtgcccatcaacgtggtggagaccctgagaaccagaggcgcccccaccagaatcgtgagaaaggtggccagaaacctgggcaaggccaccagcggcgtgctggtggtgctggacgtggtgaacctggtgcaggacagcctggacctgcacaagggcgccaagagcgagagcgccgagagcctgagacagtgggcccaggagctggaggagaacctgaacgagctgacccacatccaccagagcctgaaggccggctag

SEQ ID NO: 241420 - DNA, 393 bp, Artificial Sequence
  derived and/or modified sequence
atggagggcgccgccctgctgaagatcttcgtggtgtgcatctgggtgcagcagaaccaccccggctggaccgtggccggccagttccaggagaagaagagattcaccgaggaggtgatcgagtacttccagaagaaggtgagccccgtgcacctgaagatcctgctgaccagcgacgaggcctggaagagattcgtgagagtggccgagctgcccagagaggaggccgacgccctgtacgaggccctgaagaacctgaccccctacgtggccatcgaggacaaggacatgcagcagaaggagcagcagttcagagagtggttcctgaaggtgagcagcaaccagatggaggacagcggcgtgcacagaaaggccagctgccactgcaagtag

SEQ ID NO: 241421 - protein, 97 aa, Artificial Sequence
  derived and/or modified sequence
MDKQSSAGGVKRSVPCDSNEANEMMPETPTGDSDPQPAPKKMKTSESSTILVVRYRRNFKRTSPEELLNDHARENRINPLQMEEEEFMEIMVEIPAK

SEQ ID NO: 241422 - protein, 97 aa, Artificial Sequence
  derived and/or modified sequence
MDKQSSAGGVKRSVPCESNEVNETMPETPTGDSDPQPAPKKMKTSESSTILVVRYRRNVKRTSPEELLNDHARENRINPLQMEEEEFMEIMVEIPAK

SEQ ID NO: 241423 - DNA, 294 bp, Artificial Sequence
  derived and/or modified sequence
atggacaagcagagcagcgccggcggcgtgaagagaagcgtgccctgcgacagcaacgaggccaacgagatgatgcccgagacccccaccggcgacagcgacccccagcccgcccccaagaagatgaagaccagcgagagcagcaccatcctggtggtgagatacagaagaaacttcaagagaaccagccccgaggagctgctgaacgaccacgccagagagaacagaatcaaccccctgcagatggaggaggaggagttcatggagatcatggtggagatccccgccaagtag

SEQ ID NO: 241424 - DNA, 294 bp, Artificial Sequence
  derived and/or modified sequence
atggacaagcagagcagcgccggcggcgtgaagagaagcgtgccctgcgagagcaacgaggtgaacgagaccatgcccgagacccccaccggcgacagcgacccccagcccgcccccaagaagatgaagaccagcgagagcagcaccatcctggtggtgagatacagaagaaacgtgaagagaaccagccccgaggagctgctgaacgaccacgccagagagaacagaatcaaccccctgcagatggaggaggaggagttcatggagatcatggtggagatccccgccaagtag

SEQ ID NO: 241425 - DNA, 294 bp, Artificial Sequence
  derived and/or modified sequence
atggacaaacagtcatcagccggcggcgtgaaacgcagcgtgccatgcgatagcaacgaagccaatgagatgatgcctgagacacctactggagactcagatccccagccagcacctaagaagatgaagacctcagagagttccaccattttagttgtaaggtatcgcagaaacttcaaaaggacaagccctgaagaactgctcaacgatcatgcccgggaaaaccggataaatcccctgcaaatggaggaggaggagttcatggaaatcatggttgaaattccagcaaaatag

SEQ ID NO: 241426 - DNA, 294 bp, Artificial Sequence
  derived and/or modified sequence
atggataaacagagttccgcagggggagtaaaacgtagcgtaccatgcgaaagcaacgaagtgaacgaaacaatgcccgaaacgcccacgggggattctgacccacaacctgcccctaaaaagatgaaaacatccgagagttctacaatactcgtggtcaggtaccggcgcaacgtcaagcgaacatctcccgaagaattgctcaacgaccatgcccgggaaaatagaataaaccccttgcaaatggaggaggaagagtttatggagattatggtcgagatccctgccaagtag

SEQ ID NO: 241427 - DNA, 294 bp, Artificial Sequence
  derived and/or modified sequence
atggacaagcagtcctcggctggcggagtgaaacggtcggtgccttgcgatagcaacgaagccaatgagatgatgcccgagaccccaaccggcgactcagacccccaaccagcccccaagaagatgaagacgtcagaaagcagtaccatcctagtggtgcggtataggcggaacttcaagcgcacctcgccagaggaactgctgaacgaccacgctagggaaaaccggataaatcctttgcaaatggaggaggaagaattcatggagattatggtcgaaatcccagctaagtag

SEQ ID NO: 241428 - DNA, 294 bp, Artificial Sequence
  derived and/or modified sequence
atggacaagcagagcagcgctggaggagtgaagaggtctgtgccctgtgacagcaatgaggccaatgagatgatgcctgagacccccaccggggacagcgacccccagcctgcccccaagaagatgaagaccagcgagagcagcaccatcctggtggtgcgctacagaagaaacttcaagaggaccagccctgaggagctgctgaatgaccacgcccgggagaaccgcatcaaccccctgcagatggaggaggaggagttcatggagatcatggtggagatcccagccaagtag

SEQ ID NO: 241429 - DNA, 294 bp, Artificial Sequence
  derived and/or modified sequence
atggacaagcagagcagcgctggaggagtgaagaggtctgtgccctgtgagagcaatgaggtgaatgagaccatgcctgagacccccaccggggacagcgacccccagcctgcccccaagaagatgaagaccagcgagagcagcaccatcctggtggtgcgctacagaagaaatgtgaagaggaccagccctgaggagctgctgaatgaccacgcccgggagaaccgcatcaaccccctgcagatggaggaggaggagttcatggagatcatggtggagatcccagccaagtag

SEQ ID NO: 241430 - DNA, 294 bp, Artificial Sequence
  derived and/or modified sequence
atggacaagcagagcagcgccggcggcgtgaagcggagcgtgccctgtgactctaacgaagccaacgaaatgatgccagagactccaaccggcgacagcgatccacagccagcgcctaaaaaaatgaaaacaagtgagtcgtcgacaatccttgtggtccgataccggcgaaactttaagcgtactagcccagaggaattactcaatgatcatgcccgggaaaatcgaatcaacccactccaaatggaagaagaggagttcatggagattatggtggaaattcctgccaagtag

SEQ ID NO: 241431 - DNA, 294 bp, Artificial Sequence
  derived and/or modified sequence
atggacaagcagagcagcgccggcggcgtgaagcggagcgtgccctgcgagagcaatgaggtaaacgagaccatgcctgaaaccccgaccggtgatagtgatccccagcctgcccccaagaaaatgaagacatcagagtccagcactattttggtagtgaggtaccgccggaacgttaaacggaccagccccgaggaactactgaacgaccatgctagggagaaccggatcaatccactccagatggaggaggaggaatttatggagatcatggtggaaattccggccaagtag

SEQ ID NO: 241432 - DNA, 294 bp, Artificial Sequence
  derived and/or modified sequence
atggacaagcagagcagcgccggcggcgtgaagcggagcgtgccctgcgatagcaatgaggcgaatgagatgatgcccgagacaccaacaggcgactccgacccgcagcctgccccaaagaaaatgaagaccagcgaatcctcgactatcttggtggtgcgataccggcgtaatttcaaaaggacatctccagaggaactgttgaatgaccacgctcgggaaaacagaatcaatccgttacagatggaagaagaggaattcatggagattatggtagagatccctgccaaatag

SEQ ID NO: 241433 - DNA, 294 bp, Artificial Sequence
  derived and/or modified sequence
atggacaaacaatcctccgctggtggcgtgaagaggtcagttccgtgtgactctaatgaggcgaatgagatgatgccagagacacccacgggagactccgatcctcaacccgcaccaaagaagatgaaaactagtgagtcaagtacaattctggtggttcgatatagacggaactttaagagaaccagcccagaggaactactaaatgaccatgccagagaaaatcgaattaaccctctccagatggaagaagaggaattcatggagatcatggtcgagattcctgctaaatag

SEQ ID NO: 241434 - DNA, 294 bp, Artificial Sequence
  derived and/or modified sequence
atggacaaacaaagttccgcgggaggcgtcaaacgaagtgtgccttgtgagtctaacgaggtgaacgaaactatgcctgagacccccactggagactccgatccccaacctgctcccaagaagatgaagaccagtgagtccagtacaattctcgttgtccgctaccggagaaatgtgaagaggacctctcctgaagaactgctcaacgatcacgcgagagagaaccggataaacccactccagatggaagaagaagaattcatggagattatggtcgaaattcctgcaaagtag

SEQ ID NO: 241435 - DNA, 294 bp, Artificial Sequence
  derived and/or modified sequence
atggataaacagtcaagtgctgggggagtgaaacggtccgtgccctgcgactcaaacgaggcaaatgagatgatgcctgaaacgcccactggggattccgacccgcagcctgctcccaagaagatgaagacatctgagagctccacaatcctcgtggtacgataccgcaggaacttcaaaagaacgagccctgaagaactcttaaacgatcacgcccgagagaatcgtattaatccccttcagatggaggaggaggaattcatggaaatcatggtagagattcccgctaagtag

SEQ ID NO: 241436 - DNA, 691 bp, Artificial Sequence
  derived and/or modified sequence
attaaacatggagaaatgaggagcggcggcagatcggtttgggatgcatcttcaggggatgctgaaacaacagcagcatttggtttgctctacacccctgtcacccctcgcccgcaagcccagggagtggtcagcagtggggctttgtgatgtgaagccaccctagggctgccattggctgggacactgcctgtatgatcaaacaaagctcaagggtgtggctttgccttgtcaccaggagggtatacatagggagggcaagagctccgggccactgagaagattcaaaacctacaaaagcctgccactgacattgaagaaccaatatatacaatggacaaacaatccagtgccggcggggtgaagaggagcgtcccctgtgattccaacgaggccaacgagatgatgccggagaccccaactggggactcagacccgcaacctgctcctaaaaaaatgaaaacatctgagtcctcgaccatactagtggttcgctacaggaggaactttaaaagaacatctccagaggaactgctgaatgaccacgcccgagagaacagaatcaaccccctccaaatggaggaggaggaattcatggaaataatggttgaaatacctgcaaagtagcaagaagctacatctctcaaccttgggcaatgaaaataaagtttgagaagctgatggctgtgta

SEQ ID NO: 241437 - DNA, 387 bp, Artificial Sequence
  derived and/or modified sequence
caaaagcctgccgcagacattgaagaaccaatatatacaatggacaaacaatccagtgccggcggggtgaagaggagcgtcccctgtgaatccaacgaggtgaatgagacgatgccggagaccccaactggggactcagacccgcaacctgctcctaaaaaaatgaaaacatctgagtcctcgaccatactagtggttcgctacaggaggaacgtgaaaagaacatctccagaggaactgctgaatgaccacgcccgagagaacagaatcaaccccctccaaatggaggaggaggaattcatggaaataatggttgaaatacctgcaaagtagcaagaagctacatctctcaaccttgggcaatgaaaataaagtttgagaagctga

SEQ ID NO: 241438 - protein, 1272 aa, Artificial Sequence
  derived and/or modified sequence
MANDSPAKSLVDIDLSSLRDPAGIFELVEVVGNGTYGQVYKGRHVKTGQLAAIKVMDVTEDEEEEIKLEINMLKKYSHHRNIATYYGAFIKKSPPGHDDQLWLVMEFCGAGSITDLVKNTKGNTLKEDWIAYISREILRGLAHLHIHHVIHRDIKGQNVLLTENAEVKLVDFGVSAQLDRTVGRRNTFIGTPYWMAPEVIACDENPDATYDYRSDLWSCGITAIEMAEGAPPLCDMHPMRALFLIPRNPPPRLKSKKWSKKFFSFIEGCLVKNYMQRPSTEQLLKHPFIRDQPNERQVRIQLKDHIDRTRKKRGEKDETEYEYSGSEEEEEEVPEQEGEPSSIVNVPGESTLRRDFLRLQQENKERSEALRRQQLLQEQQLREQEEYKRQLLAERQKRIEQQKEQRRRLEEQQRREREARRQQEREQRRREQEEKRRLEELERRRKEEEERRRAEEEKRRVEREQEYIRRQLEEEQRHLEVLQQQLLQEQAMLLHDHRRPHPQHSQQPPPPQQERSKPSFHAPEPKAHYEPADRAREVEDRFRKTNHSSPEAQSKQTGRVLEPPVPSRSESFSNGNSESVHPALQRPAEPQVPVRTTSRSPVLSRRDSPLQGSGQQNSQAGQRNSTSIEPRLLWERVEKLVPRPGSGSSSGSSNSGSQPGSHPGSQSGSGERFRVRSSSKSEGSPSQRLENAVKKPEDKKEVFRPLKPADLTALAKELRAVEDVRPPHKVTDYSSSSEESGTTDEEDDDVEQEGADESTSGPEDTRAASSLNLSNGETESVKTMIVHDDVESEPAMTPSKEGTLIVRQSTVDQKRASHHESNGFAGRIHLLPDLLQQSHSSSTSSTSSSPSSSQPTPTMSPQTPQDKLTANETQSASSTLQKHKSSSSFTPFIDPRLLQISPSSGTTVTSVVGFSCDGMRPEAIRQDPTRKGSVVNVNPTNTRPQSDTPEIRKYKKRFNSEILCAALWGVNLLVGTESGLMLLDRSGQGKVYPLINRRRFQQMDVLEGLNVLVTISGKKDKLRVYYLSWLRNKILHNDPEVEKKQGWTTVGDLEGCVHYKVVKYERIKFLVIALKSSVEVYAWAPKPYHKFMAFKSFGELVHKPLLVDLTVEEGQRLKVIYGSCAGFHAVDVDSGSVYDIYLPTHIQCSIKPHAIIILPNTDGMELLVCYEDEGVYVNTYGRITKDVVLQWGEMPTSVAYIRSNQTMGWGEKAIEIRSVETGHLDGVFMHKRAQRLKFLCERNDKVFFASVRSGGSSQVYFMTLGRTSLLSW

SEQ ID NO: 241439 - DNA, 3819 bp, Artificial Sequence
  derived and/or modified sequence
atggccaacgacagccccgccaagagcctggtggacatcgacctgagcagcctgagagaccccgccggcatcttcgagctggtggaggtggtgggcaacggcacctacggccaggtgtacaagggcagacacgtgaagaccggccagctggccgccatcaaggtgatggacgtgaccgaggacgaggaggaggagatcaagctggagatcaacatgctgaagaagtacagccaccacagaaacatcgccacctactacggcgccttcatcaagaagagcccccccggccacgacgaccagctgtggctggtgatggagttctgcggcgccggcagcatcaccgacctggtgaagaacaccaagggcaacaccctgaaggaggactggatcgcctacatcagcagagagatcctgagaggcctggcccacctgcacatccaccacgtgatccacagagacatcaagggccagaacgtgctgctgaccgagaacgccgaggtgaagctggtggacttcggcgtgagcgcccagctggacagaaccgtgggcagaagaaacaccttcatcggcaccccctactggatggcccccgaggtgatcgcctgcgacgagaaccccgacgccacctacgactacagaagcgacctgtggagctgcggcatcaccgccatcgagatggccgagggcgccccccccctgtgcgacatgcaccccatgagagccctgttcctgatccccagaaaccccccccccagactgaagagcaagaagtggagcaagaagttcttcagcttcatcgagggctgcctggtgaagaactacatgcagagacccagcaccgagcagctgctgaagcaccccttcatcagagaccagcccaacgagagacaggtgagaatccagctgaaggaccacatcgacagaaccagaaagaagagaggcgagaaggacgagaccgagtacgagtacagcggcagcgaggaggaggaggaggaggtgcccgagcaggagggcgagcccagcagcatcgtgaacgtgcccggcgagagcaccctgagaagagacttcctgagactgcagcaggagaacaaggagagaagcgaggccctgagaagacagcagctgctgcaggagcagcagctgagagagcaggaggagtacaagagacagctgctggccgagagacagaagagaatcgagcagcagaaggagcagagaagaagactggaggagcagcagagaagagagagagaggccagaagacagcaggagagagagcagagaagaagagagcaggaggagaagagaagactggaggagctggagagaagaagaaaggaggaggaggagagaagaagagccgaggaggagaagagaagagtggagagagagcaggagtacatcagaagacagctggaggaggagcagagacacctggaggtgctgcagcagcagctgctgcaggagcaggccatgctgctgcacgaccacagaagaccccacccccagcacagccagcagcccccccccccccagcaggagagaagcaagcccagcttccacgcccccgagcccaaggcccactacgagcccgccgacagagccagagaggtggaggacagattcagaaagaccaaccacagcagccccgaggcccagagcaagcagaccggcagagtgctggagccccccgtgcccagcagaagcgagagcttcagcaacggcaacagcgagagcgtgcaccccgccctgcagagacccgccgagccccaggtgcccgtgagaaccaccagcagaagccccgtgctgagcagaagagacagccccctgcagggcagcggccagcagaacagccaggccggccagagaaacagcaccagcatcgagcccagactgctgtgggagagagtggagaagctggtgcccagacccggcagcggcagcagcagcggcagcagcaacagcggcagccagcccggcagccaccccggcagccagagcggcagcggcgagagattcagagtgagaagcagcagcaagagcgagggcagccccagccagagactggagaacgccgtgaagaagcccgaggacaagaaggaggtgttcagacccctgaagcccgccgacctgaccgccctggccaaggagctgagagccgtggaggacgtgagacccccccacaaggtgaccgactacagcagcagcagcgaggagagcggcaccaccgacgaggaggacgacgacgtggagcaggagggcgccgacgagagcaccagcggccccgaggacaccagagccgccagcagcctgaacctgagcaacggcgagaccgagagcgtgaagaccatgatcgtgcacgacgacgtggagagcgagcccgccatgacccccagcaaggagggcaccctgatcgtgagacagagcaccgtggaccagaagagagccagccaccacgagagcaacggcttcgccggcagaatccacctgctgcccgacctgctgcagcagagccacagcagcagcaccagcagcaccagcagcagccccagcagcagccagcccacccccaccatgagcccccagaccccccaggacaagctgaccgccaacgagacccagagcgccagcagcaccctgcagaagcacaagagcagcagcagcttcacccccttcatcgaccccagactgctgcagatcagccccagcagcggcaccaccgtgaccagcgtggtgggcttcagctgcgacggcatgagacccgaggccatcagacaggaccccaccagaaagggcagcgtggtgaacgtgaaccccaccaacaccagaccccagagcgacacccccgagatcagaaagtacaagaagagattcaacagcgagatcctgtgcgccgccctgtggggcgtgaacctgctggtgggcaccgagagcggcctgatgctgctggacagaagcggccagggcaaggtgtaccccctgatcaacagaagaagattccagcagatggacgtgctggagggcctgaacgtgctggtgaccatcagcggcaagaaggacaagctgagagtgtactacctgagctggctgagaaacaagatcctgcacaacgaccccgaggtggagaagaagcagggctggaccaccgtgggcgacctggagggctgcgtgcactacaaggtggtgaagtacgagagaatcaagttcctggtgatcgccctgaagagcagcgtggaggtgtacgcctgggcccccaagccctaccacaagttcatggccttcaagagcttcggcgagctggtgcacaagcccctgctggtggacctgaccgtggaggagggccagagactgaaggtgatctacggcagctgcgccggcttccacgccgtggacgtggacagcggcagcgtgtacgacatctacctgcccacccacatccagtgcagcatcaagccccacgccatcatcatcctgcccaacaccgacggcatggagctgctggtgtgctacgaggacgagggcgtgtacgtgaacacctacggcagaatcaccaaggacgtggtgctgcagtggggcgagatgcccaccagcgtggcctacatcagaagcaaccagaccatgggctggggcgagaaggccatcgagatcagaagcgtggagaccggccacctggacggcgtgttcatgcacaagagagcccagagactgaagttcctgtgcgagagaaacgacaaggtgttcttcgccagcgtgagaagcggcggcagcagccaggtgtacttcatgaccctgggcagaaccagcctgctgagctggtag

SEQ ID NO: 241440 - DNA, 3819 bp, Artificial Sequence
  derived and/or modified sequence
atggccaacgattctcctgcaaagagcctcgttgatattgacctgagttcgctgagggatcccgccggaatcttcgagctcgtggaagtggtgggcaacggaacttacggacaagtctataaggggcgccatgtgaagaccggccagctggccgctattaaggtgatggacgtgaccgaggatgaagaagaagagattaaactggagattaacatgctgaaaaaatactcgcatcaccggaacattgctacctattacggggctttcattaagaagtcccctcccggacacgacgaccagctgtggttagttatggagttttgtggggcaggctctatcaccgaccttgtaaaaaatacgaagggcaacaccctgaaggaagattggatagcttacatttctcgcgaaatattgagaggactcgcgcatctgcacatccaccatgtgatacaccgtgatatcaaaggtcagaacgtgctgctgactgagaacgcagaggtcaaattagtcgatttcggagtctccgctcagctcgaccggactgtgggcaggaggaatactttcatcgggaccccatattggatggcaccagaagtcatagcctgcgacgaaaacccagatgccacctatgactatcgctctgatttgtggtcttgcggcataactgctatcgagatggctgagggcgcgccgcccctatgtgatatgcatccaatgcgcgccctttttctcattccacgtaaccctccgccgaggttgaagagcaagaagtggagtaaaaagttcttctcttttattgagggatgcctcgttaagaattacatgcagaggccttctactgagcagctcctgaaacacccttttatcagagatcagcctaatgagcggcaggtcaggatacagctgaaggaccatatagaccggactcggaaaaaacgcggggagaaggacgaaaccgagtatgagtattcaggctccgaggaggaggaagaagaggtccctgagcaggagggggagccatcgtcaattgtgaatgttcccggcgaaagcacacttcgtcgggatttcctccggttgcagcaggagaataaggagcggagtgaggctctgagacggcaacagcttctacaggagcaacaactgcgcgagcaggaggaatacaagcgtcagcttctcgctgagaggcagaaaagaatcgaacagcagaaggagcagaggagaaggctcgaagagcagcagcgacgggagcgagaagccagaagacagcaagagagggaacagcgacggcgggagcaggaggagaagcggaggctggaagaactcgagcggcggcgcaaggaagaagaagaaagacgcagggctgaagaggaaaaaagacgggttgagcgggagcaggagtacatcaggaggcagctcgaggaggaacagcgccatttagaggtgctgcagcaacagcttttgcaggaacaagccatgctactgcacgatcacaggagaccacaccctcaacattctcagcagccgcccccaccccagcaagagcgcagcaagccctccttccatgccccagagccaaaggctcactatgagcccgccgatcgggcccgcgaggtagaggacaggttccggaaaacaaatcatagctcccccgaagcccaatccaagcagacaggtagggtcctggaacccccggtgccatcgcgcagcgagagcttttccaacggcaactctgaatctgtgcaccccgccctgcaaagaccggcagagccacaggtaccagttcgaaccacaagtcggagccctgtcctgagtcgcagggacagtcctctccagggaagcgggcagcagaactctcaggccggccagagaaattctacatctattgagcccagactgttgtgggagagggtggaaaagctcgtccctcggccaggatctggaagcagctcaggaagttccaactctggctcacagcccggcagtcaccccggcagtcaatcgggctctggcgaacgatttcgggtgcgcagcagtagcaaaagtgagggaagcccctctcagaggctggaaaacgcggtcaagaaaccagaagataaaaaagaagttttcaggccactgaagcccgccgacctcaccgccctcgccaaggagctccgggcagtggaggatgtgcggccccctcacaaagtgacagattacagctccagcagcgaggaaagtggaaccaccgatgaggaggatgacgatgtggagcaggaaggcgctgacgagtcaacgtccggacctgaggatactagagcagccagctcactgaacctgtccaacggggaaacagaatccgtgaaaactatgatcgtgcatgacgatgtggaaagtgagccagctatgactcccagtaaagaggggactttgattgtcaggcagtctacagtggatcagaaacgggccagtcaccatgagtcgaacgggtttgcaggcaggatccatctgcttcccgatttgttgcagcagtcccattcttcatcaacgtccagcactagttcctctccaagttcatcacagcccaccccaacaatgagccctcagactccacaagacaagctgacagcgaacgagacacagtccgcctcctctactctccagaaacacaagtcctcctccagttttactccgtttattgatccaagactgctgcagatcagcccgtcctccgggacaactgtcacctccgtcgttgggttctcttgcgatggcatgaggcctgaagcgattcggcaggacccaacacggaaaggttcggtcgtgaatgtgaaccccaccaacacccgtccccagagtgatacccctgagattcggaagtacaagaagcgcttcaattcggagatcctgtgcgctgctttgtggggtgtgaatctgttggtggggactgagtccggtctgatgctcctggacagatccggccaaggcaaggtgtaccccctgatcaacagacgcaggtttcagcagatggatgtgctggaggggttgaacgtgctcgtgacaatctcgggaaagaaggacaagctgcgcgtatactatctatcctggctgaggaataagatcctgcacaacgatccagaagtggaaaagaagcagggctggacgacggtaggggacctggaaggctgcgtgcactataaggtggtcaagtacgagcgtattaagttccttgtaatcgcacttaagagcagcgtcgaggtttatgcctgggccccgaagccataccataagttcatggcgttcaaatcattcggtgagctggtacacaaaccacttctggtggacctaacagtggaggagggccagaggctcaaagtcatctacggatcgtgtgctggctttcacgccgtggacgtcgacagcgggagtgtgtacgacatctacttgcctacacacatccagtgctccataaagcctcatgctattattatactgcccaacaccgatggaatggagctgttggtgtgttatgaagatgaaggtgtgtatgttaatacttatggaagaattaccaaggacgttgttctgcaatggggggaaatgccaacgagcgtcgcttatattagaagcaatcagaccatgggatggggcgaaaaggccattgaaatccgaagtgtggaaacagggcacctcgacggcgtgtttatgcacaagagggcacagaggcttaaatttctgtgcgagcgtaacgacaaagtgtttttcgcctcagtgcgaagtggcgggtccagccaggtgtacttcatgactctcgggcggacgtccctgttgagttggtag

SEQ ID NO: 241441 - DNA, 3819 bp, Artificial Sequence
  derived and/or modified sequence
atggccaatgacagccctgccaagagcctggtggacatcgacctgagcagcctgcgggaccctgctggcatctttgagctggtggaggtggtgggcaatggcacctacggccaggtgtacaagggccgccacgtgaagacaggccagctggccgccatcaaggtgatggatgtgacagaagatgaggaggaggagatcaagctggagatcaacatgctgaagaagtacagccaccacaggaacatcgccacctactacggggccttcatcaagaagagccccccaggccatgatgaccagctgtggctggtgatggagttctgtggggccggcagcatcacagacctggtgaagaacaccaagggcaacaccctgaaggaggactggatcgcctacatcagccgggagatcctgcggggcctggcccacctgcacatccaccacgtgatccaccgggacatcaagggccagaatgtgctgctgacagaaaatgctgaggtgaagctggtggactttggagtgtctgcccagctggacagaacagtgggcagaagaaacaccttcatcggcaccccctactggatggcccctgaggtgattgcctgtgatgagaacccagatgccacctatgactacagaagtgacctgtggagctgtggcatcacagccatcgagatggccgagggcgccccacccctgtgtgacatgcaccccatgagggccctcttcctgatccccagaaatcctccaccccggctgaagagcaagaagtggagcaagaagttcttctccttcatcgagggctgcctggtgaagaactacatgcagaggcccagcacagagcagctgctgaagcaccccttcatccgggaccagcccaatgaaaggcaggtgcgcatccagctgaaggaccacatcgacaggaccaggaagaagagaggagagaaggatgaaacagaatatgagtacagcggcagcgaggaggaggaggaggaggtgcctgagcaggagggggagcccagcagcatcgtgaatgtgcctggagagagcaccctgcggcgggacttcctgcggctgcagcaggagaacaaggagaggtctgaggccctgcggcggcagcagctgctgcaggagcagcagctgcgggagcaggaggagtacaagaggcagctgctggccgagcggcagaagagaattgagcagcagaaggagcagaggcggcggctggaggagcagcagaggcgggagcgggaggcccggcggcagcaggagcgggagcagaggagaagagagcaggaggagaagaggcggctggaggagctggagaggaggaggaaggaggaggaggagcggcggcgggcagaggaggagaagagaagagtggagcgggagcaggagtacatccggcggcagctggaggaggagcagaggcacctggaggtgctgcagcagcagctgctgcaggagcaggccatgctgctgcatgaccaccggcggccccacccccagcacagccagcagcccccaccaccccagcaggagaggagcaagcccagcttccacgcccctgagcccaaggcccactatgagcctgctgaccgggcccgggaggtggaggaccgcttcaggaagaccaaccacagcagccctgaggcccagagcaagcagacaggccgggtgctggagccccctgtgcccagccgctctgagagcttcagcaatggaaattctgagagcgtgcacccagccctgcagaggcctgctgagccccaggtgcctgtgaggaccaccagccgcagccctgtgctgagcagaagagacagccccctgcagggcagcggccagcagaacagccaggccggccagaggaacagcaccagcattgagccccggctgctgtgggagcgggtggagaagctggtgccccggcccggcagcggcagcagcagcggcagcagcaacagcggcagccagcccggcagccaccctggcagccagagcggcagcggggagcgcttccgggtgcgcagcagcagcaagtctgagggcagccccagccagaggctggagaatgctgtgaagaagccagaggacaagaaggaggtgttccggcccctgaagccagctgacctgacagccctggccaaggagctgcgggctgtggaggatgtgcggcccccccacaaggtgacagactacagcagcagcagcgaggagagcggcaccacagatgaggaggatgatgatgtggagcaggagggcgcagatgagagcaccagcggccctgaggacaccagggctgccagcagcctgaacctgagcaatggagaaacagagagcgtgaagaccatgattgtgcatgatgatgtggagagcgagcccgccatgacccccagcaaggagggcaccctgattgtgcggcagagcacagtggaccagaagagggccagccaccacgagagcaatggatttgctggccgcatccacctgctgcctgacctgctgcagcagagccacagcagcagcaccagcagcaccagcagcagccccagcagcagccagcccacccccaccatgagcccccagaccccccaggacaagctgacagccaatgagacccagagcgccagcagcaccctgcagaagcacaagagcagcagcagcttcacccccttcatcgacccccggctgctgcagatcagccccagcagcggcaccaccgtgacctctgtggtgggcttcagctgtgatggcatgaggcctgaggccatccggcaggaccccaccaggaaaggatctgtggtgaatgtgaaccccaccaacacccggccccagagcgacaccccagagatcaggaagtacaagaagcgcttcaacagcgagatcctgtgtgccgccctgtggggcgtgaacctgctggtgggcacagagagcggcctgatgctgctggacaggagcggccagggcaaggtgtaccccctcatcaacagaagacgcttccagcagatggatgtgctggagggcctgaatgtgctggtgaccatcagcggcaagaaggacaagctgcgggtgtactacctgtcctggctgaggaacaagatcctgcacaatgaccctgaggtggagaagaagcagggctggaccaccgtgggggacctggagggctgtgtgcactacaaggtggtgaagtatgaaagaatcaagttcctggtgattgccctgaagagctctgtggaggtgtatgcctgggcccccaagccctaccacaagttcatggccttcaagagctttggagagctggtgcacaagcccctgctggtggacctgactgtggaggagggccagaggctgaaggtgatctacggcagctgtgccggcttccacgctgtggatgtggacagcggctctgtgtatgacatctacctgcccacccacatccagtgcagcatcaagccccacgccatcatcatcctgcccaacacagatggcatggagctgctggtgtgctatgaagatgagggcgtgtatgtgaacacctacggccgcatcaccaaggatgtggtgctgcagtggggcgagatgcccacctctgtggcctacatccgcagcaaccagaccatgggctggggcgagaaggccatcgagatccgctctgtggagaccggccacctggatggagtcttcatgcacaagagggcccagaggctgaagttcctgtgtgaaagaaatgacaaggtgttctttgcctctgtgcgcagcggcggcagcagccaggtgtacttcatgaccctgggccgcaccagcctgctgtcctggtag

SEQ ID NO: 241442 - DNA, 3819 bp, Artificial Sequence
  derived and/or modified sequence
atggccaacgacagccccgccaagagcctggtggacatcgacctgtcaagcttacgagaccctgctggaatctttgagcttgtagaagtggtgggtaatggcacatacggccaggtctataaggggcgacatgtgaaaacagggcagttagctgccattaaggtgatggacgtgacagaggatgaggaggaagaaatcaaacttgagatcaacatgcttaagaagtactctcatcatcggaatatcgccacctattacggtgcgttcataaagaagagtccaccaggtcatgatgatcagctctggttggtcatggaattttgcggtgccggctcaatcaccgacctggtcaagaatactaagggcaacaccctaaaggaggattggattgcctatatatcacgggaaattctcaggggcttggcccatcttcatatccatcacgtaattcatagggacattaagggccagaacgtgctgttgaccgagaacgcagaggtgaagctcgtggattttggggttagcgcacagctcgacagaacggtgggtagacgtaacacatttatcggtactccatactggatggccccagaagtgatcgcatgtgatgagaacccagacgccacatacgattacagatcagacctgtggagttgcgggatcactgccatcgaaatggcagaaggtgcgccacccctttgcgacatgcaccccatgagagctctcttcctcatcccacggaatccgccacctaggctcaaatcaaaaaagtggtccaagaagtttttctcattcattgaaggttgtctggttaagaactacatgcaaagacctagtacagaacaactcctcaagcacccatttattagagaccaacctaacgaaagacaggtcaggatccaacttaaagaccacattgaccgcaccaggaagaagagaggggagaaggatgagacagagtacgagtattctggatcagaagaagaggaggaggaggttccagaacaggagggggagccctccagtatagtgaatgtgcctggggagagtacacttcgtcgcgacttccttcggctgcagcaggaaaacaaggagaggagcgaggccttacgacggcagcagctgctgcaggaacagcagttgcgcgagcaggaggagtacaaacggcagctgctggccgagagacagaagagaatagagcaacagaaggagcagagaagacgactcgaagaacaacagaggagggagagagaggcacgccgacaacaggaacgggagcagcgtaggcgggagcaggaagagaaaagaagactggaggaactggaacgcagacgaaaggaagaggaggagaggcggagagccgaggaagagaaaaggagagtagaacgggaacaggagtacatccggcgccaattggaggaagaacaacgtcatctggaggttttgcagcagcagttgctacaggaacaggctatgctgctacatgatcacagacggcctcatccgcagcattcacagcagccacccccacctcaacaagagagaagcaaaccatcttttcacgcccctgaacctaaggctcactatgaacctgctgatcgcgctcgggaagttgaagatcggtttaggaaaaccaaccatagttcgccagaggctcagtcaaagcagactggcagggtgctcgagcccccagtgccctcccgatctgagagtttctctaacggcaacagcgagtcggtgcaccctgcactgcagcggccggctgaaccacaggttcccgtccgtacaactagcaggtcccccgtccttagcagacgggattctcctttacagggctcaggacagcagaattctcaggcaggccagcgcaatagcacctccatcgaaccccggctactgtgggagcgagttgaaaaactggtgcccagaccaggaagcggctcatctagcgggtcctccaattctggatctcagcccgggtcgcatcctgggtctcagtcgggctccggcgagcgatttcgagtaagatccagcagtaaatcagaagggagccccagtcagaggctggagaatgcagtcaaaaaacctgaagacaagaaagaggtattcaggccgttgaagcctgcagacctgacagcactggcaaaggaactccgggcagtggaagacgtgcggcctccacacaaagtaacagattactcctcatcgtcagaggaatccggcactactgatgaggaagacgacgacgtcgaacaggagggagctgatgagagtacaagtggccctgaggatactagagcggcatcttctctcaacttgtccaacggcgaaactgagagcgtgaagacgatgatcgttcacgacgacgttgagagtgagccagccatgacaccaagcaaagaaggtacgcttattgtgaggcagtctacggtcgaccagaaacgggcgtcccaccacgagagtaacggattcgccggcaggatccatctgctgccagatctgctccagcagtcgcactctagcagtacatcatcaaccagtagtagtcctagctcttcccagccaactccaaccatgagcccacagacaccacaggataagcttacagcaaatgagacccaaagcgcctccagcaccttacagaagcataagtcctcgtcttcctttactcctttcattgacccacgcttgctgcagatctcaccaagcagtggaacgaccgtcacaagcgtggtcggtttttcctgcgacggcatgcggcctgaggcaatacggcaggacccaacccggaaagggagtgttgtgaacgtgaatccaacaaacaccagaccccagtccgatactccagaaatccgaaagtacaagaagcggtttaattcagagattctgtgcgccgccctgtggggcgtcaatttgctcgtgggaactgagagtggcctcatgctccttgataggagcgggcagggaaaggtgtaccccctcatcaatcgacgccggtttcaacaaatggacgtgctggaaggactgaatgtccttgttactatatcagggaagaaggataaattgagggtgtattacctatcctggttgagaaataagatccttcataatgaccctgaagtcgagaaaaaacagggatggacaactgtgggagaccttgaaggttgcgtccattataaagtggtgaagtacgaacgcatcaaattccttgtgattgcccttaaaagcagcgtggaggtttacgcatgggcaccaaagccctatcataaattcatggcattcaagtcttttggtgaattggtccacaaaccactgctggtggaccttacagtggaagagggacagagattgaaggtgatttatggcagctgcgctggttttcatgctgtggatgtagattctggttcggtgtacgatatttatttgcccacccacatacagtgctccattaaacctcatgctattataatactccctaataccgatggcatggaactactagtatgttatgaggacgagggcgtgtacgtgaacacttacggcaggattaccaaggatgtcgtactccaatggggggagatgccgacctctgtagcttacatcaggtccaatcagaccatgggctggggggaaaaggcaattgaaatccgcagtgtggagacaggtcacctcgatggagtgttcatgcataagagggcacagagacttaagttcctgtgtgagcggaacgataaagtttttttcgccagcgttcgtagtggagggtcttcccaggtttactttatgaccctgggacgaactagcctgttatcctggtag

SEQ ID NO: 241443 - DNA, 4403 bp, Artificial Sequence
  derived and/or modified sequence
gggcccgtcctcgaggcgcgcggcgcggggcgcgggcgccggggcctgaggcggcgggcgacgcccgggggcctgacggccggccccgcgccatggtgtgagcgccgccgcccgtgcacgctccgtccgccctccgcgcggcccggccggcagagagccccgagcggcccgagagcgcagccgagcccgccgccgccgcccgcggccccgcgaggagagtaccgggccggctcggctgccgcgcgaggagcgcggtcggcggcctggtctgcggctgagatacacagagcgacagagacatttattgttatttgttttttggtggcaaaaagggaaaatggcgaacgactcccctgcaaaaagtctggtggacatcgacctctcctccctgcgggatcctgctgggatttttgagctggtggaagtggttggaaatggcacctatggacaagtctataagggtcgacatgttaaaacgggtcagttggcagccatcaaagttatggatgtcactgaggatgaagaggaagaaatcaaactggagataaatatgctaaagaaatactctcatcacagaaacattgcaacatattatggtgctttcatcaaaaagagccctccaggacatgatgaccaactctggcttgttatggagttctgtggggctgggtccattacagaccttgtgaagaacaccaaagggaacacactcaaagaagactggatcgcttacatctccagagaaatcctgaggggactggcacatcttcacattcatcatgtgattcaccgggatatcaagggccagaatgtgttgctgactgagaatgcagaggtgaaacttgttgactttggtgtgagtgctcagctggacaggactgtggggcggagaaatacgttcataggcactccctactggatggctcctgaggtcatcgcctgtgatgagaacccagatgccacctatgattacagaagtgatctttggtcttgtggcattacagccattgagatggcagaaggtgctccccctctctgtgacatgcatccaatgagagcactgtttctcattcccagaaaccctcctccccggctgaagtcaaaaaaatggtcgaagaagttttttagttttatagaagggtgcctggtgaagaattacatgcagcggccctctacagagcagcttttgaaacatccttttataagggatcagccaaatgaaaggcaagttagaatccagcttaaggatcatatagatcgtaccaggaagaagagaggcgagaaagatgaaactgagtatgagtacagtgggagtgaggaagaagaggaggaagtgcctgaacaggaaggagagccaagttccattgtgaacgtgcctggtgagtctactcttcgccgagatttcctgagactgcagcaggagaacaaggaacgttccgaggctcttcggagacaacagttactacaggagcaacagctccgggagcaggaagaatataaaaggcaactgctggcagagagacagaagcggattgagcagcagaaagaacagaggcgacggctagaagagcaacaaaggagagagcgggaagctagaaggcagcaggaacgtgaacagcgaaggagagaacaagaagaaaagaggcgtctagaggagttggagagaaggcgcaaagaagaagaggagaggagacgggcagaagaagaaaagaggagagttgaaagagaacaggagtatatcaggcgacagctagaagaggagcagcggcacttggaagtccttcagcagcagctgctccaggagcaggccatgttactgcatgaccataggaggccgcacccgcagcactcgcagcagccgccaccaccgcagcaggaaaggagcaagccaagcttccatgctcccgagcccaaagcccactacgagcctgctgaccgagcgcgagaggtggaagatagatttaggaaaactaaccacagctcccctgaagcccagtctaagcagacaggcagagtattggagccaccagtgccttcccgatcagagtctttttccaatggcaactccgagtctgtgcatcccgccctgcagagaccagcggagccacaggttcctgtgagaacaacatctcgctcccctgttctgtcccgtcgagattccccactgcagggcagtgggcagcagaatagccaggcaggacagagaaactccaccagtattgagcccaggcttctgtgggagagagtggagaagctggtgcccagacctggcagtggcagctcctcagggtccagcaactcaggatcccagcccgggtctcaccctgggtctcagagtggctccggggaacgcttcagagtgagatcatcatccaagtctgaaggctctccatctcagcgcctggaaaatgcagtgaaaaaacctgaagataaaaaggaagttttcagacccctcaagcctgctgatctgaccgcactggccaaagagcttcgagcagtggaagatgtacggccacctcacaaagtaacggactactcctcatccagtgaggagtcggggacgacggatgaggaggacgacgatgtggagcaggaaggggctgacgagtccacctcaggaccagaggacaccagagcagcgtcatctctgaatttgagcaatggtgaaacggaatctgtgaaaaccatgattgtccatgatgatgtagaaagtgagccggccatgaccccatccaaggagggcactctaatcgtccgccagagtacagttgaccaaaagcgtgccagccatcatgagagcaatggctttgccggtcgcattcacctcttgccagatctcttacagcaaagccattcctcctccacttcctccacctcctcctccccatcctccagccagccgacacccaccatgtccccacagacaccccaggacaagctcactgctaatgagactcagtccgctagtagcacactccagaaacacaaatcttcctcctcctttacaccttttatagaccccagattactacagatttctccatctagcggaacaacagtgacatctgtggtgggattttcctgtgatgggatgagaccagaagccataaggcaagatcctacccggaaaggctcagtggtcaatgtgaatcctaccaacactaggccacagagtgacaccccggagattcgtaaatacaagaagaggtttaactctgagattctgtgtgctgccttatggggagtgaatttgctagtgggtacagagagtggcctgatgctgctggacagaagtggccaagggaaggtctatcctcttatcaaccgaagacgatttcaacaaatggacgtacttgagggcttgaatgtcttggtgacaatatctggcaaaaaggataagttacgtgtctactatttgtcctggttaagaaataaaatacttcacaatgatccagaagttgagaagaagcagggatggacaaccgtaggggatttggaaggatgtgtacattataaagttgtaaaatatgaaagaatcaaatttctggtgattgctttgaagagttctgtggaagtctatgcgtgggcaccaaagccatatcacaaatttatggcctttaagtcatttggagaattggtacataagccattactggtggatctcactgttgaggaaggccagaggttgaaagtgatctatggatcctgtgctggattccatgctgttgatgtggattcaggatcagtctatgacatttatctaccaacacatatccagtgtagcatcaaaccccatgcaatcatcatcctccccaatacagatggaatggagcttctggtgtgctatgaagatgagggggtttatgtaaacacatatggaaggatcaccaaggatgtagttctacagtggggagagatgcctacatcagtagcatatattcgatccaatcagacaatgggctggggagagaaggccatagagatccgatctgtggaaactggtcacttggatggtgtgttcatgcacaaaagggctcaaagactaaaattcttgtgtgaacgcaatgacaaggtgttctttgcctctgttcggtctggtggcagcagtcaggtttatttcatgaccttaggcaggacttctcttctgagctggtagaagcagtgtgatccagggattactggcctccagagtcttcaagatcctgagaacttggaattccttgtaactggagctcggagctgcaccgagggcaaccaggacagctgtgtgtgcagacctcatgtgttgggttctctcccctccttcctgttcctcttatataccagtttatccccattctttttttttttcttactccaaaataaatcaaggctgcaatgcagctggtgctgttcagattcta

SEQ ID NO: 241444 - DNA, 3819 bp, Artificial Sequence
  derived and/or modified sequence
atggccaacgacagtcctgcaaagagtctcgtggacattgatttgtccagtcttcgcgatcccgctgggatctttgaattggtcgaggtcgttggtaacggcacatatggtcaggtgtataagggccgacatgtgaaaacaggacagttggctgcaattaaggttatggatgttactgaggatgaggaggaggagataaaactagaaataaacatgctgaagaagtattcccaccatcgcaacattgccacttactacggggcatttatcaagaaatctcctcccggacacgacgaccagttgtggctagtgatggagttttgcggggctggctcaattaccgaccttgttaagaacacgaagggtaataccctaaaggaggattggatcgcctacatctccagggaaattctgagaggtctggctcacttgcatatccaccacgtgatccaccgtgatattaaggggcagaacgtcctgctgacagaaaacgccgaagtgaagctagtagacttcggagtttcagctcagctcgatagaacagttggtaggcgtaacacatttatcgggacaccctactggatggccccagaggtaatagcctgcgacgagaatcctgacgccacttacgactatagaagcgacttgtggtcatgcggtattaccgctatagaaatggccgaaggagcaccccctctctgtgacatgcaccctatgcgggcacttttcctgattccgagaaacccccctcccagactcaagagcaagaaatggagtaagaaatttttcagctttatagaagggtgtctggtcaagaattacatgcaaagaccttcaaccgaacagctgcttaagcatccatttattagggatcagccgaacgagcgtcaggttcgtatccagctgaaggaccacattgacagaacccggaagaagcggggagagaaagacgagacggagtatgaatacagcggctcagaggaggaggaagaggaagttcctgagcaggaaggggagcctagcagcatcgtgaacgtgcccggtgagtcaaccctgaggcgggacttcctccgtctgcagcaggagaacaaagaacgaagtgaggccttgagacggcaacagctgcttcaggaacaacaactacgggaacaagaggaatataagagacagctccttgcggagcggcagaaacgcatcgaacagcagaaggagcagagacgcaggttggaagagcagcagaggagagaaagagaggctagaaggcaacaggaaagagagcagagaagacgtgaacaggaggaaaaacgcagactcgaagaattggagaggaggaggaaggaggaagaagagaggcgcagagccgaggaagaaaagagacgggtcgagcgcgaacaggaatacatccggaggcagcttgaggaggaacagcggcacctggaggtgctacagcagcagttactgcaggaacaagccatgctgctgcacgaccatcggcgacctcaccctcagcatagtcaacagccccctccaccacagcaggagaggtcaaagccctcatttcacgcacccgaacccaaggcacactatgagccggctgatcgcgcaagggaggtggaggatcggttcagaaaaacaaaccacagcagccccgaggcccagtcaaagcagacagggagagtactggaacctccggtccccagtaggtcagagagcttctctaatggcaattccgagtctgtgcatccagcactgcagaggccggctgagccgcaggttcctgtgcggaccacatctcgttcgccagtcttgtccagacgcgactcccccttgcagggatcgggacagcaaaactcacaggcgggacagcggaattccacctctatagaaccaagactcctgtgggagagagtcgaaaagctcgttccacgcccagggagtggttccagctctggctcttcgaactccgggtctcagcctgggtctcaccccggaagtcagtcaggaagcggggaacggttcagggttcgctcctccagcaagtccgagggctcgccctcccagcggctcgagaatgcggtcaaaaaaccagaagacaagaaggaggtttttagacctctaaaacctgcggatctgacggctctggccaaggaacttcgagccgtggaagatgtgaggcctcctcataaagtcacagactactcaagcagcagtgaagagtccggcaccactgacgaagaggatgatgacgttgagcaagagggagcagatgaatccacctcagggcctgaggatacccgggcagccagttcactcaacctgtccaatggagaaacagagtccgtgaaaacaatgattgtgcacgacgacgtagaatctgagcctgccatgaccccttcaaaagaggggacccttattgtccggcaatctacggtggaccagaagagagccagtcatcacgaaagcaacggcttcgcgggacgcatacacctcctccccgacttgttgcagcagtctcattctagttccacgtcaagtacctcgagtagcccatcctcatcccagcccacccccaccatgagcccacagaccccccaggataagctgaccgctaacgaaacccagtccgccagtagcacactgcagaaacacaagagcagctcctcattcaccccattcattgaccccaggctgttgcagatctcccctagcagtggcaccaccgtgacaagcgtggtggggtttagctgcgatggcatgaggcccgaggccatccggcaggaccccacccggaagggctccgtggtcaacgtcaatccgaccaatacaaggccgcagagtgacactccggaaatcagaaagtacaaaaagcgctttaacagtgaaattctgtgtgcggctctgtggggcgtgaacctccttgtgggaacggagagtgggctgatgttgctcgacaggagtggacaaggcaaggtataccccctcattaaccgcagaagatttcagcaaatggacgtgctcgaggggttgaacgtgctagtgacaatcagcggaaaaaaggacaagctaagagtttactatctgtcatggctgcgaaataagatactgcacaatgatccagaggttgaaaagaagcaggggtggaccactgtgggcgatctcgaggggtgcgtgcactataaggttgttaaatacgagagaatcaagttcctcgtgatcgcattgaagtctagcgtggaagtgtatgcttgggccccaaagccctaccataaattcatggccttcaagtctttcggcgagctggtgcacaaacctctactcgttgacttgactgtggaagaaggtcaaagactcaaagtcatttacgggagttgcgccggatttcacgcagtggacgtggatagcggttcggtgtacgatatttatctgcccacacacatccagtgttcaatcaagccccacgccattattatcctgccaaacaccgacggcatggagctgcttgtgtgttatgaagatgagggtgtatacgtgaatacctacggcagaatcaccaaagacgtagtgttacaatggggcgagatgcctacctccgttgcatatatccgctctaaccaaaccatgggatggggcgaaaaagccatcgagatcaggtccgtggaaaccgggcatctggatggggtctttatgcataagcgggcacagaggcttaaattcctgtgtgaacggaatgataaggtctttttcgccagtgtgcggtcaggcggtagcagtcaggtctactttatgacattaggaaggacttctttactgagttggtag

SEQ ID NO: 241445 - protein, 708 aa, Artificial Sequence
  derived and/or modified sequence
MSVPSSLSQSAINANSHGGPALSLPLPLHAAHNQLLNAKLQATAVGPKDLRSAMGEGGGPEPGPANAKWLKEGQNQLRRAATAHRDQNRNVTLTLAEEASQEPEMAPLGPKGLIHLYSELELSAHNAANRGLRGPGLIISTQEQGPDEGEEKAAGEAEEEEEDDDDEEEEEDLSSPPGLPEPLESVEAPPRPQALTDGPREHSKSASLLFGMRNSAASDEDSSWATLSQGSPSYGSPEDTDSFWNPNAFETDSDLPAGWMRVQDTSGTYYWHIPTGTTQWEPPGRASPSQGSSPQEESQLTWTGFAHGEGFEDGEFWKDEPSDEAPMELGLKEPEEGTLTFPAQSLSPEPLPQEEEKLPPRNTNPGIKCFAVRSLGWVEMTEEELAPGRSSVAVNNCIRQLSYHKNNLHDPMSGGWGEGKDLLLQLEDETLKLVEPQSQALLHAQPIISIRVWGVGRDSGRDFAYVARDKLTQMLKCHVFRCEAPAKNIATSLHEICSKIMAERRNARCLVNGLSLDHSKLVDVPFQVEFPAPKNELVQKFQVYYLGNVPVAKPVGVDVINGALESVLSSSSREQWTPSHVSVAPATLTILHQQTEAVLGECRVRFLSFLAVGRDVHTFAFIMAAGPASFCCHMFWCEPNAASLSEAVQAACMLRYQKCLDARSQASTSCLPAPPAESVARRVGWTVRRGVQSLWGSLKPKRLGAHTP

SEQ ID NO: 241446 - DNA, 2127 bp, Artificial Sequence
  derived and/or modified sequence
atgagcgtaccctcctccctttctcagtccgctattaacgccaattcccacggaggtccagcactctccttgccactgccccttcacgcagcccacaatcaactactaaatgccaagctgcaggcaactgccgtgggtccgaaggaccttagatctgccatgggagagggaggaggcccagaacctggtcccgcaaacgctaagtggctgaaggagggccaaaaccaattgcgacgcgcagctacagcacacagagatcaaaatcggaacgtgaccttaacactggcagaagaggcctctcaggagcccgaaatggcccccttgggaccaaaaggcctgatacacctgtactcagaactggaactctccgcccataacgctgctaaccgagggttacgaggacctggcttgatcatttccacacaggaacagggccctgacgagggtgaagagaaggcagctggtgaagcagaggaggaagaagaggacgatgacgacgaggaggaggaagaggacttgtcctccccgccaggcttgcccgagcccctcgagtctgtcgaggccccacccagaccccaggcacttactgacgggccacgcgagcactctaaatctgcatcccttctcttcggcatgcgcaactccgcagccagcgatgaagatagttcatgggcaacactgtcacaaggtagcccatcctatgggtcaccagaggatacagattccttttggaaccccaacgcatttgaaactgactccgacttgccggccggatggatgcgagttcaggatacttctgggacttactactggcacattcccacagggaccacccagtgggaacctccaggaagagcttccccatctcaaggctctagcccgcaggaggaatcacagctgacttggacaggatttgcgcacggggagggattcgaagatggagaattctggaaggacgaaccctcagacgaggccccaatggaacttggcctgaaggaacccgaagagggcacccttacattcccagcacagagtctcagtcctgaacctctgccccaggaagaggagaagcttccacctagaaatactaaccccggtataaaatgctttgccgtgcgaagccttggatgggtcgagatgacagaggaagagctcgctccgggccggtcttcggttgccgtgaataactgtatcaggcagctttcttaccataagaataacctccacgatccaatgtccggggggtggggcgagggtaaagatcttcttctccagctagaggacgagaccctgaagctcgtcgagccccaatctcaggctcttcttcacgcgcagcctattatatccataagagtatggggagtggggcgggacagcggacgtgactttgcctacgtggcgcgagacaagctcacacagatgctgaagtgtcacgtcttcaggtgtgaggccccagctaagaatatagctacgtccctccatgaaatttgcagtaagattatggccgaaaggagaaacgcacgctgtctggtgaacggcctgagtctggatcactccaagttggttgacgtccctttccaggtggagtttccagcccctaaaaatgaactggtgcagaaatttcaagtctactacctgggcaacgtgcctgtagccaagcctgttggcgtagatgtcattaacggggcactagagtccgtgctgagttcctcatcacgggaacagtggacaccaagccacgtctccgtcgcacccgcaaccctgaccatcctgcaccagcagactgaggcagtacttggcgagtgtcgggttcgattcttgagtttccttgcagttggccgcgacgtgcatacctttgcattcattatggctgctggtcccgcctcattctgttgccatatgttttggtgcgagcccaatgccgcgagtctgtccgaggcggtgcaggctgcctgcatgttaaggtaccagaagtgccttgacgcacggtcccaggcttcgaccagctgcttacccgccccacccgccgagagtgttgctcgcagggtcgggtggacagtcagacgaggggtgcagagtttgtggggatctctcaagcccaagcgtctcggtgcgcacactccctag

SEQ ID NO: 241447 - DNA, 2127 bp, Artificial Sequence
  derived and/or modified sequence
atgagcgtgccaagctcactgtcccagagcgctattaatgccaactcccacgggggcccagccctcagcctccctcttcctctgcacgcagcccacaatcaactactgaatgccaagttgcaggccacagccgtcggacctaaagacctgcgaagcgctatgggcgagggaggcggacccgagcccggcccggccaatgccaagtggcttaaggaaggacagaatcagctacgtagagccgcaacggcccatcgggaccagaacagaaacgttacattgacactggccgaggaagccagccaggagccggagatggcccccctcggccctaaaggtcttattcacttatactcagaactcgagctcagtgcacacaatgcagctaatcgaggccttcgcggccctggactgattataagtacacaagagcagggcccagacgagggcgaagaaaaggctgctggagaggccgaagaggaggaggaggatgacgatgacgaagaagaggaagaggatttgtcctcccctcccggactgcctgagcccctggaaagcgtggaagcacccccgaggcctcaggccctgaccgacggccccagggagcattccaagagtgcttccctcctgttcgggatgcggaattctgccgcctctgatgaagacagtagctgggccacactgtcccagggtagcccgtcttatggaagccccgaagacaccgactccttctggaatcccaacgccttcgagaccgattcggatcttcctgctggctggatgcgggtgcaggacacttctggcacttactactggcatattcctactggaacaacccagtgggagccgcctggtagagcctctcccagccaggggtcctccccccaggaagagagccagcttacctggacgggttttgcacacggagaagggtttgaggacggtgaattttggaaggatgagccgagcgatgaagcccctatggagctgggactgaaagagccagaggaaggtacactgacctttccggcacagtctctgtcccccgaacctctgccccaggaagaggagaaactgcctcctcgcaataccaatcctggtatcaagtgttttgccgtccggtctttaggatgggtggagatgactgaagaggaacttgccccgggtcggtcttccgtcgcggttaacaattgcatccgccaactaagctaccacaagaataatttgcatgacccaatgtccggtgggtggggagaagggaaagatctcctgttgcaactggaagatgaaaccctcaagctggtggagccccagtcgcaagctttgcttcatgctcagccgatcatctccattcgcgtttggggcgtggggagggacagtggcagagattttgcatatgtcgcacgggacaaactgacccagatgctaaagtgccatgtgtttcgatgtgaggctcccgcaaaaaacattgctacgtcacttcatgaaatctgctctaagataatggctgagaggagaaatgcccgctgtctggttaatgggttgtcactagaccatagcaagctggtggatgtgccattccaggtggagtttccggcaccaaaaaacgagttagtacagaagttccaggtgtattatcttggaaatgtgcctgtggccaaacctgtgggcgtggacgtaataaacggcgccctggagagtgtgctgagctccagctcccgggaacagtggacaccctctcatgtgtctgtggcccctgcgacactgaccattttgcatcagcagactgaagcagtcctcggagaatgccgagtgcggtttctgtccttcctggccgtcgggcgcgacgtgcatacattcgctttcatcatggcagcagggcccgcctctttctgttgtcacatgttctggtgtgagcccaacgccgcctcattgagtgaggccgtccaggccgcatgcatgctacgctatcaaaaatgcttggatgcgaggagccaggccagtacaagctgcctcccagcccctccagcagaatccgtggcccgtcgagttggttggacagtgaggcgaggcgtccagtcactgtgggggagtctaaaaccaaagagactgggagcccataccccctag

SEQ ID NO: 241448 - DNA, 2127 bp, Artificial Sequence
  derived and/or modified sequence
atgtctgtgcccagcagcctgagccagagcgccatcaatgccaacagccatggaggccctgccctgagcctgcccctgcccctgcacgccgcccacaaccagctgctgaatgccaagctgcaggccacagctgtgggccccaaggacctgcggagcgccatgggagagggcggcggccctgagcccggccctgccaatgccaagtggctgaaggagggccagaaccagctgcggcgggccgccacagcccaccgggaccagaacagaaatgtgaccctgaccctggccgaggaggccagccaggagcctgagatggcccccctgggccccaagggcctcatccacctgtacagcgagctggagctgagcgcccacaatgctgccaacagaggcctgcggggccctggcctcatcatcagcacccaggagcagggcccagatgaaggagaggagaaggccgccggggaggccgaggaggaggaggaggatgatgatgatgaggaggaggaggaggacctgagcagccccccaggcctgcctgagcccctggagagcgtggaggccccaccccggccccaggccctgacagatggcccccgggagcacagcaagagcgccagcctgctgtttggcatgagaaattctgctgccagtgatgaggacagctcctgggccaccctgagccagggcagccccagctatggcagccctgaggacacagacagcttctggaaccccaatgcctttgaaacagacagcgacctgcctgctggctggatgagggtgcaggacaccagcggcacctactactggcacatccccaccggcaccacccagtgggagcccccaggccgggccagccccagccagggcagcagcccccaggaggagagccagctgacctggacaggctttgcccatggagagggctttgaagatggagagttctggaaggatgagcccagtgatgaggcccccatggagctgggcctgaaggagcctgaggagggcaccctgaccttccctgcccagagcctgagccctgagcccctgccccaggaggaggagaagctgcccccaagaaacaccaaccctggcatcaagtgctttgctgtgcgcagcctgggctgggtggagatgacagaggaggagctggcccctggccgcagctctgtggccgtgaacaactgcatccggcagctgagctaccacaagaacaacctgcatgaccccatgtctgggggctggggcgagggcaaggacctgctgctgcagctggaggatgagaccctgaagctggtggagccccagagccaggccctgctgcacgcccagcccatcatcagcatccgggtgtggggcgtgggccgggacagcggccgggactttgcctacgtggcccgggacaagctgacccagatgctgaagtgccacgtgttccgctgtgaggccccagccaagaacatcgccaccagcctgcacgagatctgcagcaagatcatggccgagaggagaaatgcccgctgcctggtgaatggcctgagcctggaccacagcaagctggtggatgtgcccttccaggtggagttccctgcccccaagaatgagctggtgcagaagttccaggtgtactacctgggcaatgtgcctgtggccaagcctgtgggcgtggatgtgatcaatggagccctggagagcgtgctgagcagcagcagccgggagcagtggacccccagccacgtgtctgtggccccagccaccctgaccatcctgcaccagcagacagaagctgtgctgggagaatgtcgggtgcgcttcctgtccttcctggccgtgggcagagatgtgcacacctttgccttcatcatggctgctggccctgccagcttctgctgccacatgttctggtgtgagcccaatgctgccagcctgtctgaggccgtgcaggccgcctgcatgctgcgctaccagaagtgcctggatgcccggagccaggccagcaccagctgcctgcctgcccccccagctgagagcgtggccaggagagtgggctggacagtgcggcggggcgtgcagagcctgtggggcagcctgaagcccaagaggctgggcgcccacaccccctag

SEQ ID NO: 241449 - DNA, 2127 bp, Artificial Sequence
  derived and/or modified sequence
atgagcgtgcccagcagcctgagccagagcgccatcaacgccaactcacacggagggcccgccctgtctctgcctctccctctgcacgcagcacacaaccagctgttaaacgccaaactccaagccactgcagttggcccaaaggatttgcggtctgccatgggagagggaggagggcccgagcccgggccagctaatgccaagtggctgaaggaaggccagaatcagttacgccgcgcggccactgcccatagagatcaaaatcgcaatgtgacgctcacgctggccgaggaggctagccaggaacccgagatggcacccttgggacctaagggcctgattcatctgtatagcgagttggagttgagtgcccacaacgccgccaatagggggctaagggggccaggactcatcatatctactcaggagcaaggtcctgatgagggcgaagaaaaggccgcaggggaagcagaagaagaggaagaagatgatgatgacgaagaggaagaggaggacctgtcttccccgcccggtctccccgagcctttggagtccgttgaggcaccacccaggccgcaagccctgacggacggacccagagagcattccaagtcagcgtcactccttttcggaatgcgcaacagcgccgccagtgacgaggattccagttgggctactctgagccaagggtctcctagttacgggtctccagaggacaccgacagcttctggaatcccaacgcatttgaaactgattctgacctcccagccggctggatgcgtgtccaagacactagcggcacttactactggcatatccctacgggtacaacccagtgggaaccccctggtagagcctcaccgtcacaagggtcaagcccccaggaggaaagccagctgacttggaccggtttcgctcacggagagggatttgaagacggggagttttggaaggacgagccgtctgacgaggcacccatggagctaggtcttaaggagcctgaggaggggacgctaactttcccggctcaaagcctatcccccgagccactgcctcaggaggaggaaaaactgccacctcgaaacaccaaccccggaatcaaatgtttcgctgtaagatctctaggctgggtcgagatgacagaggaagaactcgctcctggccgcagctctgtagccgtgaacaactgtatcagacaactctcataccataaaaacaacttacacgacccaatgagcggaggctggggagagggaaaagatctcctgttgcaactcgaagatgagactttgaaactggtagagccacagtcgcaagccctgctgcacgcgcaaccaattatatcaatccgagtgtggggcgtgggccgcgacagtggacgcgattttgcctacgtcgccagagataagttaacacaaatgctgaaatgccatgtattcaggtgcgaagcacccgctaagaacatcgccacatcattgcacgaaatctgcagtaaaatcatggcagaaagaagaaatgctcgatgcctggttaacggactgagcttggaccatagtaagcttgtagacgtgcctttccaagtcgaattccccgcacccaagaacgagctggtgcagaagttccaggtctactatctcggtaacgtgccagtcgctaaacctgtaggggtggatgtcattaacggagccttggaatctgtcctttcaagctcatcccgcgaacagtggacgccaagccacgtgtccgtggcacctgcaacgttgaccattctgcaccaacagacagaagccgtgctgggagagtgtcgcgtgcggttcctcagctttctcgccgtgggcagggacgtgcacactttcgcattcattatggctgccggacccgccagtttctgctgccatatgttttggtgtgaaccgaacgccgcctcattgtctgaagcggtgcaggccgcttgcatgcttcgctatcaaaagtgcttggacgcacgatcccaggcatccacaagttgcctaccggcacctccagctgaaagcgtcgcgcggagggtgggctggaccgtgagacggggcgtccaatccctgtgggggagcctcaagcccaagcggcttggcgctcacaccccatag

SEQ ID NO: 241450 - DNA, 2127 bp, Artificial Sequence
  derived and/or modified sequence
atgagcgtgcccagcagcctgagccagagcgccatcaacgccaactctcacgggggcccagctctcagcctgccgctgcctctgcacgctgcacacaatcagcttctgaacgcaaagttacaagcaaccgctgtgggtcccaaggacctgagatctgcaatgggagaaggtggaggtcctgagcccggcccagcaaacgctaagtggctcaaggaggggcaaaaccagctgcgcagggccgcaactgcccatcgcgaccagaaccggaatgtgacccttactctggcggaagaagcatcccaagaacctgagatggcccccctgggacccaaagggctcatccacttgtactctgagcttgaactgagcgcccataacgcagctaatcgtggtctgcgggggcccggccttataatctccacccaggagcagggacctgatgagggtgaggaaaaagctgcgggagaagcagaggaggaggaggaggacgacgacgatgaagaggaggaggaagatctctcctctcctccaggactgcccgagcctctagagagtgtggaagcgcctccacgcccgcaggctttaacagatggaccacgcgagcattcaaaaagtgcctcactgctcttcggtatgagaaactcggcagcgtctgacgaagactcctcctgggctacactttctcaagggtccccctcctatggatcacccgaggacacggatagcttctggaacccaaatgccttcgaaaccgactccgatctccccgctggatggatgcgcgttcaggataccagcggaacctactactggcatattcccacgggaaccacccagtgggaacccccaggccgggccagcccctcacagggctctagtcctcaagaggagtcacaactgacctggaccgggttcgcgcacggggaaggttttgaggatggagaattttggaaggatgagccttccgatgaagccccaatggagttgggtctcaaagaaccagaggagggcaccctaaccttccccgctcaatcactttcacctgagccactcccccaagaagaggagaaattaccgccgaggaataccaacccaggaattaagtgttttgctgtgcgaagtctagggtgggtggagatgaccgaggaggagcttgctccaggcagaagttcagtggcagtgaacaattgcattaggcagttgtcctatcataaaaacaaccttcatgatccaatgtcaggcggctggggggaaggtaaagacctcctgctgcagctggaagatgaaactctcaagttggtggaaccccaaagccaggcgctactccatgcacaacctatcattagtattcgagtatggggcgttggccgagacagtggaagggactttgcttacgtagccagagacaaactgacccagatgttgaagtgccacgtttttagatgcgaagctccagccaaaaacattgctacatcactccatgagatttgctccaagattatggccgaaagacggaatgctcgctgtctggtgaatggcctgtctttggaccacagcaaactggtggatgttccctttcaagtcgaattccctgccccaaaaaacgagcttgtccaaaaattccaagtgtattacttgggaaatgtacctgtcgccaagcctgtgggggtggacgttatcaatggagccctcgagagtgtcctctcttcctcgagcagggaacagtggacgccgtcccacgtatcagtcgccccggctacactgaccatccttcaccagcagaccgaagcagtgctgggggagtgtagagttaggtttctcagcttcctcgccgtgggaagagacgtgcataccttcgcctttatcatggccgccggtcctgctagtttctgttgtcatatgttttggtgcgagcctaacgctgcctccttgtccgaggctgttcaggccgcgtgtatgctgcgctatcagaaatgcctcgacgcgcgctcacaggcgagcacaagctgtctgccagcgcccccagccgaatcagtggctaggagagtaggatggacagtgaggcggggcgttcagtccctgtggggaagcttaaagcccaagaggcttggcgcccatactccctag

SEQ ID NO: 241451 - DNA, 2636 bp, Artificial Sequence
  derived and/or modified sequence
atgttgtgatggagaagccgcggcggagcccgaaccccgcagcctgagccacctccgtcatctgggcccggggcctcaccgcgcaggagctgccaaggccatgtctgttccatcatcactgagccagtcggccattaatgccaacagccacggaggccccgcactgagcctacccctgcctctgcacgctgcccacaaccagctgctcaacgccaagctgcaggccacagctgtgggacccaaggacctgcgcagcgccatgggggagggtggtgggcctgagccaggccctgccaatgccaagtggctaaaagagggccagaaccagctccggcgggccgccacggcccaccgtgaccagaatcgcaatgtgaccttgaccttggcggaggaggccagccaggagcctgagatggcacccttgggccccaaaggcctgatacacctgtactctgagctggagctctcagctcacaacgcagccaaccgaggcctacgaggacctggcctgatcatcagcactcaagagcaggggccagatgagggagaggagaaggcggccggggaggccgaggaggaggaggaggatgatgatgatgaagaggaggaggaggacttatcttctcccccagggctgcctgagcccctggagagtgtggaggcccctcccaggccccaagcccttacagatggcccccgggaacacagcaagagtgccagcctcctgtttggcatgcggaacagtgcagccagtgatgaggactcaagctgggctaccttatcccagggcagcccctcctatggctccccagaggacacagattccttctggaaccccaacgccttcgagacggattccgacctgccggctggatggatgagggtccaggacacctcagggacctattactggcacatcccaacagggaccacccagtgggaaccccccggccgggcctccccctcacaggggagcagcccccaagaggagtcccagctcacctggacaggttttgctcatggagaaggctttgaggatggagaattttggaaggatgaacccagtgatgaggccccaatggagctgggactgaaggaacctgaggaggggacgttgaccttcccagctcagagcctcagcccagagccgttgccccaagaggaggagaagcttcccccacggaataccaacccagggatcaagtgtttcgccgtgcgctccctaggctgggtagagatgaccgaggaggagctggcccctggacgcagcagtgtggcagtcaacaattgcatccgtcagctctcttaccacaaaaacaacctgcatgaccccatgtctgggggctggggggaaggaaaggatctgctactgcagctggaggatgagacactaaagctagtggagccacagagccaggcactgctgcacgcccaacccatcatcagcatccgcgtgtggggcgtcgggcgggacagtggaagggactttgcctacgtagctcgtgataagctgacccagatgctcaagtgccacgtgtttcgctgtgaggcacctgccaagaacatcgccaccagcctgcatgagatctgctctaagatcatggccgaacggcgtaatgcccgctgcttggtaaatggactctccctggaccactctaaacttgtggatgtccctttccaagtggaattcccagcgcctaagaatgagttggtccagaagttccaagtctattacctggggaatgtacctgttgctaaacctgttggggtagatgtgattaatggggccctcgagtcagtcctgtcctccagcagccgtgaacaatggaccccaagtcatgtcagtgtggcccctgctaccctcaccatcttgcaccagcagacagaggcagtgctgggagagtgtcgggtgcgtttcctctccttcctggccgtgggcagagatgtccacacgtttgcattcatcatggctgccggcccagcctccttctgctgccacatgttctggtgcgagcccaatgctgccagcctctcagaggctgtgcaggctgcgtgcatgcttcgctaccagaagtgtctggatgcccgttcccaggcctccacctcctgcctcccagcaccccctgctgagtctgtggcacggcgtgtagggtggactgtccgcaggggtgttcagtcgctgtggggctccctgaagcccaaacggctgggggcccataccccatgaagaagcccccaccttccctccacctgcttgtgttgggccccagggaactaaagggtgtgggtcagggaggggtctagaggctattcctaggcctcaggcctcccaaatatgcccctccccagtagctacggttccctgcctaggagctggggagggagagatctaatcccttcaaggaagtgataacactggagtggtaacaagaggagcaggaagcaaggccagccctggttctccatccccatgtgtttcaggtggaacaggaggaactggtccaggccaggcctcatcctcctggacccagcaggggcagaaggaggaagggactggtccaggcatgggtcccttccccctgctccatgggcacctctgctgtattgatatcactaataaagtctgtctgcactgc

SEQ ID NO: 241452 - DNA, 2619 bp, Artificial Sequence
  derived and/or modified sequence
tcgggctccagccccgtccgcgcgtctcccggcgtgggtgcgggaccagggcgctgcggggcgcgcagggagctgccaaggccatgtctgttccatcatcactgagccagtcggccattaatgccaacagccacggaggccccgcactgagcctacccctgcctctgcacgctgcccacaaccagctgctcaacgccaagctgcaggccacagctgtgggacccaaggacctgcgcagcgccatgggggagggtggtgggcctgagccaggccctgccaatgccaagtggctaaaagagggccagaaccagctccggcgggccgccacggcccaccgtgaccagaatcgcaatgtgaccttgaccttggcggaggaggccagccaggagcctgagatggcacccttgggccccaaaggcctgatacacctgtactctgagctggagctctcagctcacaacgcagccaaccgaggcctacgaggacctggcctgatcatcagcactcaagagcaggggccagatgagggagaggagaaggcggccggggaggccgaggaggaggaggaggatgatgatgatgaagaggaggaggaggacttatcttctcccccagggctgcctgagcccctggagagtgtggaggcccctcccaggccccaagcccttacagatggcccccgggaacacagcaagagtgccagcctcctgtttggcatgcggaacagtgcagccagtgatgaggactcaagctgggctaccttatcccagggcagcccctcctatggctccccagaggacacagattccttctggaaccccaacgccttcgagacggattccgacctgccggctggatggatgagggtccaggacacctcagggacctattactggcacatcccaacagggaccacccagtgggaaccccccggccgggcctccccctcacaggggagcagcccccaagaggagtcccagctcacctggacaggttttgctcatggagaaggctttgaggatggagaattttggaaggatgaacccagtgatgaggccccaatggagctgggactgaaggaacctgaggaggggacgttgaccttcccagctcagagcctcagcccagagccgttgccccaagaggaggagaagcttcccccacggaataccaacccagggatcaagtgtttcgccgtgcgctccctaggctgggtagagatgaccgaggaggagctggcccctggacgcagcagtgtggcagtcaacaattgcatccgtcagctctcttaccacaaaaacaacctgcatgaccccatgtctgggggctggggggaaggaaaggatctgctactgcagctggaggatgagacactaaagctagtggagccacagagccaggcactgctgcacgcccaacccatcatcagcatccgcgtgtggggcgtcgggcgggacagtggaagggactttgcctacgtagctcgtgataagctgacccagatgctcaagtgccacgtgtttcgctgtgaggcacctgccaagaacatcgccaccagcctgcatgagatctgctctaagatcatggccgaacggcgtaatgcccgctgcttggtaaatggactctccctggaccactctaaacttgtggatgtccctttccaagtggaattcccagcgcctaagaatgagttggtccagaagttccaagtctattacctggggaatgtacctgttgctaaacctgttggggtagatgtgattaatggggccctcgagtcagtcctgtcctccagcagccgtgaacaatggaccccaagtcatgtcagtgtggcccctgctaccctcaccatcttgcaccagcagacagaggcagtgctgggagagtgtcgggtgcgtttcctctccttcctggccgtgggcagagatgtccacacgtttgcattcatcatggctgccggcccagcctccttctgctgccacatgttctggtgcgagcccaatgctgccagcctctcagaggctgtgcaggctgcgtgcatgcttcgctaccagaagtgtctggatgcccgttcccaggcctccacctcctgcctcccagcaccccctgctgagtctgtggcacggcgtgtagggtggactgtccgcaggggtgttcagtcgctgtggggctccctgaagcccaaacggctgggggcccataccccatgaagaagcccccaccttccctccacctgcttgtgttgggccccagggaactaaagggtgtgggtcagggaggggtctagaggctattcctaggcctcaggcctcccaaatatgcccctccccagtagctacggttccctgcctaggagctggggagggagagatctaatcccttcaaggaagtgataacactggagtggtaacaagaggagcaggaagcaaggccagccctggttctccatccccatgtgtttcaggtggaacaggaggaactggtccaggccaggcctcatcctcctggacccagcaggggcagaaggaggaagggactggtccaggcatgggtcccttccccctgctccatgggcacctctgctgtattgatatcactaataaagtctgtctgcactgc

SEQ ID NO: 241453 - DNA, 2127 bp, Artificial Sequence
  derived and/or modified sequence
atgtccgttccaagctcgctctctcagagcgccatcaacgctaattcacatggtgggccagccctgtcactgccactgccactgcatgctgcacataaccagctgttgaacgctaagttacaagccacagctgttgggccaaaagacctacgcagtgccatgggtgagggcggaggcccagagccaggacccgctaatgcgaagtggttgaaggagggacaaaaccagctgcggagagcagctaccgcacacagagatcaaaatcgcaatgtcacgttgacactggcggaggaggcatcccaggagcccgagatggctcccttgggcccaaaaggcctcatccacctgtactctgagctggaactgtctgcccacaacgctgctaatcgaggcctccgcggaccaggcctcataatcagcacccaagagcaagggcctgatgagggggaagaaaaggccgcaggtgaagccgaggaagaggaggaagacgacgatgacgaggaggaggaagaagacttatcctctcctcccggattacccgaacccctcgagtccgtagaagcccctccacgccctcaggccctcacagatgggccacgagaacactccaagtccgcctccctgctgttcggcatgcggaattctgcggcttccgacgaggacagcagctgggctacactatctcaggggagtcccagttacggaagccccgaggacacggattccttctggaatccaaacgcatttgagactgactctgacctaccggctgggtggatgcgtgtgcaagacaccagcggcacctattactggcacattccaaccggtacgactcaatgggaaccccctggccgagcctctccatcccaggggagttccccccaggaagaatcccagcttacctggaccggctttgcccatggggaagggtttgaggatggagaattctggaaggatgaacccagcgacgaggcccctatggagctggggttgaaggagcccgaagaaggaacgctgacctttccagcccagagcctgtcccccgagccactgccccaggaagaagaaaagctgcctccaaggaacaccaaccctggtattaagtgcttcgccgtcaggtcccttgggtgggtggagatgaccgaggaagaactggcgcctgggaggagttccgtggctgtgaataactgcatccgtcagctctcctatcataagaataatttgcacgaccctatgtcaggtgggtggggagagggaaaggatctactgctccagcttgaggacgagactcttaagttggtcgagccacagtctcaggcccttctgcatgcacagcctattatctcgatccgcgtatggggtgttggtcgcgattccggacgcgattttgcatacgtggccagggacaaacttacacaaatgcttaagtgccatgtgttcaggtgcgaggcgccagcaaagaacatcgcaacttcactacacgagatatgcagtaaaatcatggcagaacgcaggaacgccaggtgcctcgtgaacggtcttagtctagatcactctaagctggtcgacgtgccctttcaggtagagttccctgccccaaaaaacgaattagtgcagaagtttcaagtgtactatctgggcaatgtgccagtcgccaaacctgtcggcgttgacgtgattaacggcgcactcgaatcagtgttgtcctctagttctagggagcagtggactccatctcacgtgtcagtggcacccgctaccttaacgatcctccaccagcaaacagaagccgttctgggcgagtgccgggtacgcttcctgagcttcctggccgtcggcagagacgttcatacctttgcgtttataatggctgcgggtccagcaagcttttgttgtcatatgttttggtgtgagccaaacgccgctagcctgagcgaggccgtccaggccgcttgcatgcttagataccagaaatgtcttgacgccagatcacaggctagcacatcatgtttaccggctcctccggctgagagcgtcgcacggcgagttggctggaccgtccggagaggggtgcagagcctgtgggggtctttgaaacctaaaaggcttggggcacacactccgtag

SEQ ID NO: 241454 - DNA, 2127 bp, Artificial Sequence
  derived and/or modified sequence
atgtctgtgcctagcagcctttcccagtctgccatcaatgccaattcacatggcggtcccgctcttagcttgcccctaccactccacgctgcacataaccagctcttaaatgccaagctccaagccaccgcggtaggcccaaaggacttacgatctgccatgggggagggaggcggacctgagcctgggccagctaacgccaagtggctgaaggaaggacagaatcaactgagacgagccgctacggctcacagggaccagaatcggaacgtgactcttactcttgccgaagaggcctcacaggagccggagatggccccactcgggcctaagggcttgatacacctttatagcgaactggaactgagtgcccacaacgcagctaatagggggctgaggggtccaggcctgatcattagcacccaggagcaggggccagacgagggcgaggagaaagcggcaggtgaggctgaagaagaagaggaggacgacgatgacgaggaggaagaagaggacctttctagcccgcctgggctgcctgagcctctcgaatcggtggaagcccctcccagacctcaggcactgaccgatggaccgagagaacattctaagagtgcaagcctgctgttcggtatgagaaactccgctgcaagtgacgaggattcatcctgggccacactaagtcaaggcagcccaagctacgggagccctgaagatacagactcattctggaacccaaatgcctttgaaacagactctgatctcccggctggttggatgcgcgtgcaggacaccagtgggacatactactggcacatacctaccggcacaacacaatgggagccgccagggcgagcctccccctcccaaggtagctcacctcaagaggaaagccagctgacatggactggctttgcccacggagagggttttgaggatggggagttttggaaggacgagccctctgacgaggcccctatggagctcggccttaaagagcctgaggagggtacgctcacttttcctgcccagtctctttcaccagagcctctcccacaagaagaagagaaactgccccctcgcaacaccaaccctggcatcaaatgttttgctgttagatcccttggttgggtggagatgacagaggaggaactcgccccagggagaagcagcgtggccgtgaacaactgcattcgccagctatcctaccataaaaataacctgcacgatccaatgagcgggggttggggtgaagggaaggatctactgcttcagctcgaggatgagacactgaagcttgtggagcctcagtcacaagcactgctccacgcacaaccaatcatcagtattcgcgtgtggggtgtcggcagggactccggcagagacttcgcttacgtagccagggacaagctgactcagatgctgaagtgccacgtcttccgctgcgaagcaccggcaaagaatatcgccacttccttacacgagatttgctccaaaatcatggcagagaggcgtaatgcaagatgcctggtgaatggcctatcactggatcactcgaagctggtggatgtgccgttccaagtggaattccccgctcctaaaaatgagttggtgcaaaaattccaggtgtattatctggggaacgttcctgtggccaaacctgtgggcgtagatgtgattaatggcgctttggagtctgtcctgagctctagctcacgcgaacaatggaccccttcacacgtgagcgtggcacccgctaccctgacaattttgcaccagcagacagaggctgttcttggggaatgtagggttagatttctctccttcctggctgtggggcgtgacgtccacaccttcgcattcattatggctgccggaccagcctcattttgctgtcacatgttttggtgcgagccaaacgcggcatcactgtccgaggcagttcaggctgcgtgcatgcttagataccaaaagtgcctggacgccaggagtcaggcttcaacgtcttgcctcccggctcccccagccgagtcagtcgccagaagggtaggctggactgtccggaggggagtccagagtctgtgggggtcgcttaaacctaagagactgggagcacacacaccctag

SEQ ID NO: 241455 - DNA, 2127 bp, Artificial Sequence
  derived and/or modified sequence
atgagcgtgcccagcagcctgagccagagcgccatcaacgccaacagccacggcggccccgccctgagcctgcccctgcccctgcacgccgcccacaaccagctgctgaacgccaagctgcaggccaccgccgtgggccccaaggacctgagaagcgccatgggcgagggcggcggccccgagcccggccccgccaacgccaagtggctgaaggagggccagaaccagctgagaagagccgccaccgcccacagagaccagaacagaaacgtgaccctgaccctggccgaggaggccagccaggagcccgagatggcccccctgggccccaagggcctgatccacctgtacagcgagctggagctgagcgcccacaacgccgccaacagaggcctgagaggccccggcctgatcatcagcacccaggagcagggccccgacgagggcgaggagaaggccgccggcgaggccgaggaggaggaggaggacgacgacgacgaggaggaggaggaggacctgagcagcccccccggcctgcccgagcccctggagagcgtggaggccccccccagaccccaggccctgaccgacggccccagagagcacagcaagagcgccagcctgctgttcggcatgagaaacagcgccgccagcgacgaggacagcagctgggccaccctgagccagggcagccccagctacggcagccccgaggacaccgacagcttctggaaccccaacgccttcgagaccgacagcgacctgcccgccggctggatgagagtgcaggacaccagcggcacctactactggcacatccccaccggcaccacccagtgggagccccccggcagagccagccccagccagggcagcagcccccaggaggagagccagctgacctggaccggcttcgcccacggcgagggcttcgaggacggcgagttctggaaggacgagcccagcgacgaggcccccatggagctgggcctgaaggagcccgaggagggcaccctgaccttccccgcccagagcctgagccccgagcccctgccccaggaggaggagaagctgccccccagaaacaccaaccccggcatcaagtgcttcgccgtgagaagcctgggctgggtggagatgaccgaggaggagctggcccccggcagaagcagcgtggccgtgaacaactgcatcagacagctgagctaccacaagaacaacctgcacgaccccatgagcggcggctggggcgagggcaaggacctgctgctgcagctggaggacgagaccctgaagctggtggagccccagagccaggccctgctgcacgcccagcccatcatcagcatcagagtgtggggcgtgggcagagacagcggcagagacttcgcctacgtggccagagacaagctgacccagatgctgaagtgccacgtgttcagatgcgaggcccccgccaagaacatcgccaccagcctgcacgagatctgcagcaagatcatggccgagagaagaaacgccagatgcctggtgaacggcctgagcctggaccacagcaagctggtggacgtgcccttccaggtggagttccccgcccccaagaacgagctggtgcagaagttccaggtgtactacctgggcaacgtgcccgtggccaagcccgtgggcgtggacgtgatcaacggcgccctggagagcgtgctgagcagcagcagcagagagcagtggacccccagccacgtgagcgtggcccccgccaccctgaccatcctgcaccagcagaccgaggccgtgctgggcgagtgcagagtgagattcctgagcttcctggccgtgggcagagacgtgcacaccttcgccttcatcatggccgccggccccgccagcttctgctgccacatgttctggtgcgagcccaacgccgccagcctgagcgaggccgtgcaggccgcctgcatgctgagataccagaagtgcctggacgccagaagccaggccagcaccagctgcctgcccgccccccccgccgagagcgtggccagaagagtgggctggaccgtgagaagaggcgtgcagagcctgtggggcagcctgaagcccaagagactgggcgcccacaccccctag

SEQ ID NO: 241456 - protein, 289 aa, Artificial Sequence
  derived and/or modified sequence
MWRSCLRLRDGGRRLLNRPAGGPSASMSPGPTIPSPARAYAPPTERKRFYQNVSITQGEGGFEINLDHRKLKTPQAKLFTVPSEALAIAVATEWDSQQDTIKYYTMHLTTLCNTSLDNPTQRNKDQLIRAAVKFLDTDTICYRVEEPETLVELQRNEWDPIIEWAEKRYGVEISSSTSIMGPSIPAKTREVLVSHLASYNTWALQGIEFVAAQLKSMVLTLGLIDLRLTVEQAVLLSRLEEEYQIQKWGNIEWAHDYELQELRARTAAGTLFIHLCSESTTVKHKLLKE

SEQ ID NO: 241457 - DNA, 870 bp, Artificial Sequence
  derived and/or modified sequence
atgtggaggtcttgccttcgtctccgggacgggggtagacgtctcctgaacagacctgccgggggcccatctgcctccatgtcacctggccccacaatcccttcaccagccagagcgtatgctccccctacagaaaggaagagattctatcagaacgtgtctatcacacagggagaaggtggtttcgaaatcaatcttgatcataggaagctgaaaacacctcaggccaagttgtttaccgtgccgagtgaggctctcgccattgccgtggctactgagtgggattcccagcaggacacaatcaagtactatacaatgcacttgaccactttgtgcaacacttctctcgacaaccccacccaacggaataaggatcagctaataagggcggccgtgaagtttctcgacacagacacaatctgttaccgcgtggaagagccagaaactctcgtggagctccagagaaatgaatgggatcctatcattgaatgggctgaaaagaggtacggcgttgaaatcagctcctctacgagtatcatgggtcctagcatccccgctaaaacccgggaggtcctggtgagtcatttggccagctacaacacatgggctcttcaaggaatcgagttcgttgcggcacagttgaagtctatggttctgactctaggactgattgacctgcgacttactgtggagcaggccgtgttgctctcacgtcttgaagaggaataccagatccagaagtggggcaacatcgagtgggcacacgattacgaactgcaggagctccgtgcccggactgcagcgggaaccttgtttatccatctttgtagcgaaagcaccaccgtgaaacataaactcctcaaggagtag

SEQ ID NO: 241458 - DNA, 870 bp, Artificial Sequence
  derived and/or modified sequence
atgtggaggagctgcctgcggctgagagatggcggccgccgcctgctgaacagacctgctgggggccccagcgcctccatgagccctggccccaccatccccagccctgcccgggcctatgccccacccacagagaggaagcgcttctaccagaatgtgtccatcacccagggcgagggcggctttgagatcaacctggaccacaggaagctgaagaccccccaggccaagctgttcaccgtgcccagcgaggccctggccatcgctgtggccacagagtgggacagccagcaggacaccatcaagtactacaccatgcacctgaccaccctgtgcaacaccagcctggacaaccccacccagaggaacaaggaccagctgatccgggctgctgtgaagttcctggacacagacaccatctgctacagagtggaggagcctgagaccctggtggagctgcagagaaatgagtgggaccccatcatcgagtgggccgagaagagatatggagtggagatcagcagcagcaccagcatcatgggccccagcatcccagccaagacccgggaggtgctggtgagccacctggccagctacaacacctgggccctgcagggcattgaatttgtggccgcccagctgaagtccatggtgctgaccctgggcctgattgacctgcggctgactgtggagcaggccgtgctgctgagccggctggaggaggagtaccagatccagaagtggggcaacatcgagtgggcccatgactatgagctgcaggagctgcgggccaggacagctgctggcaccctcttcatccacctgtgcagcgagagcaccaccgtgaagcacaagctgctgaaggagtag

SEQ ID NO: 241459 - DNA, 870 bp, Artificial Sequence
  derived and/or modified sequence
atgtggcggagctgcctgcggctgcgggacggcggccggcggctgttgaaccggcctgccgggggtccatctgcttccatgtctcctggccctactattccctctccggctagagcatatgctccaccaactgagcgcaaacgtttctaccaaaatgtctcgattacgcagggcgagggaggcttcgagattaacctcgatcataggaaactcaagacaccccaggccaaactctttaccgtgcctagcgaagccctggccattgccgtggccactgaatgggattctcagcaagataccatcaagtattatacaatgcacctcactactctgtgcaatacatctctagacaatccaacgcagcgaaataaggatcaactgattagagctgcagtcaagttcttggataccgacacaatatgctatcgcgtggaggagcctgagaccctcgtcgagcttcagagaaatgagtgggacccaatcatcgagtgggccgaaaaacgttatggggtcgagatttccagctctacttcgattatgggcccgtcaatacccgctaagacccgcgaggtgctcgttagccacctggcctcttacaacacttgggcgctacaggggattgaattcgtggctgcacagcttaagagtatggtccttaccctcggcttgatagacctgagactaactgtcgagcaggccgtgctcctgtctaggctggaagaagaataccaaattcagaagtggggaaacattgagtgggctcacgactatgaactccaggaactgcgggcacgaactgcggctggcactttgtttatccacctgtgctctgagtccaccactgtgaagcataagctgctcaaggagtag

SEQ ID NO: 241460 - DNA, 870 bp, Artificial Sequence
  derived and/or modified sequence
atgtggagatcatgcctgcgcttgagggacgggggacgcagacttttaaaccgtccagcaggcggtccctccgcaagcatgagtcccggacccactattccgtctcccgcacgggcatatgccccacccaccgaaagaaagaggttctaccagaatgtatctatcacgcagggggaagggggattcgagataaacttggatcacagaaaactgaaaactccgcaggctaagctattcaccgttccctccgaggcccttgcaattgccgtcgctaccgagtgggacagccaacaggatactataaaatattatacaatgcacctcaccaccctgtgcaacaccagtctggacaacccaacacagcggaacaaggaccagcttattagggcggctgtgaaattcttggacacagacacgatatgttaccgcgtggaagagcccgagacattggtggagctgcagcggaacgaatgggatccaatcattgagtgggcggagaagaggtatggagtggagatcagttcatcaactagtatcatggggccatcaatcccggctaagacacgggaggtgctggtgtctcatttggctagctataacacatgggccttacagggaattgaattcgtggcagctcagcttaagtctatggtccttacactcgggctcatcgacctacgactgacggtggagcaggctgtgttattgtcgcgtctggaggaagagtatcaaatccagaaatggggcaatatcgaatgggcgcacgattatgagctgcaggagctgcgggctcgcaccgcggctggaacactgtttatccacctgtgttctgagagcacaactgtgaagcacaagttgctaaaggagtag

SEQ ID NO: 241461 - DNA, 1310 bp, Artificial Sequence
  derived and/or modified sequence
gcggaagatggcggcgtccaagggaggttgagggctctgaggaggcgttgagaggtttccgtacagcccgaccgtgcggctttggggatcccatcgctctgtgtttcctgctccaggtttcgcgtctcgcatcttcccagaccctcgggcgcgatgtggaggagctgcctccggctgcgggacgggggacgccgtctcctgaatcggccggcgggtggccccagcgcttctatgagtccggggccaaccatcccgtctccagcccgggcttacgccccgccgacagaaaggaagaggttttatcagaatgtcagcatcacacagggtgaaggtggctttgagataaacctggaccacaggaagctgaaaactccccaagccaagctctttaccgtccccagcgaggccctggccattgcagtggctactgagtgggattcccagcaggataccatcaagtactacaccatgcacctgaccacattgtgcaacacatcattggacaacccaacccagagaaacaaggatcagctgatccgggcagccgtgaagtttctggacaccgacaccatctgctacagggtggaggagcccgagacattagtggaacttcaaaggaatgagtgggatccaatcatcgaatgggctgagaaaagatacggcgtggagatcagctcctccaccagcataatgggacccagcatccctgccaaaactcgggaggtgctcgtcagccacctggcatcttacaacacatgggctttacaagggattgagtttgtagctgcccagctcaagtccatggtgctaaccttgggcctgattgacctgcgcctgacagtggagcaggccgtgctgctgtcacgcctggaggaggagtaccagatccagaagtggggcaacattgagtgggcccatgactatgagctgcaggagctgcgggcccgcaccgccgccggcaccctcttcatccatctctgctccgagagcaccacagtcaagcacaagctcctgaaggagtgaggcctgggcagagcacactcagcaggatagaggcagtgcagccacagctcccccggccttcagggctccccagcctgtggggctggcttccttggcttttggggactcggcctcagcgtcaccctgagattccccccgagacacagtgcgctagtacggctgtccggaggtcagcctgatttcaacccaggtgcccctggcctggccagcagtgaatgtaggagatgaattgtgcaagtgactttctctcgactctgattttattaaatatttctccaccctggaaa

SEQ ID NO: 241462 - DNA, 870 bp, Artificial Sequence
  derived and/or modified sequence
atgtggagaagctgcctgagactgagagacggcggcagaagactgctgaacagacccgccggcggccccagcgccagcatgagccccggccccaccatccccagccccgccagagcctacgccccccccaccgagagaaagagattctaccagaacgtgagcatcacccagggcgagggcggcttcgagatcaacctggaccacagaaagctgaagaccccccaggccaagctgttcaccgtgcccagcgaggccctggccatcgccgtggccaccgagtgggacagccagcaggacaccatcaagtactacaccatgcacctgaccaccctgtgcaacaccagcctggacaaccccacccagagaaacaaggaccagctgatcagagccgccgtgaagttcctggacaccgacaccatctgctacagagtggaggagcccgagaccctggtggagctgcagagaaacgagtgggaccccatcatcgagtgggccgagaagagatacggcgtggagatcagcagcagcaccagcatcatgggccccagcatccccgccaagaccagagaggtgctggtgagccacctggccagctacaacacctgggccctgcagggcatcgagttcgtggccgcccagctgaagagcatggtgctgaccctgggcctgatcgacctgagactgaccgtggagcaggccgtgctgctgagcagactggaggaggagtaccagatccagaagtggggcaacatcgagtgggcccacgactacgagctgcaggagctgagagccagaaccgccgccggcaccctgttcatccacctgtgcagcgagagcaccaccgtgaagcacaagctgctgaaggagtag

SEQ ID NO: 241463 - protein, 890 aa, Artificial Sequence
  derived and/or modified sequence
MNYVGQLAGQVFVTVKELYKGLNPATLSGCIDIIVIRQPNGNLQCSPFHVRFGKMGVLRSREKVVDIEINGESVDLHMKLGDNGEAFFVQETDNDQEVIPMHLATSPILSEGASRMECQLKRGSVDRMRGLDPSTPAQVIAPSETPSSSSVVKKRRKRRRKSQLDSLKRDDNMNTSEDEDMFPIEMSSDEAMELLESSRTLPNDIPPFQDDIPEENLSLAVIYPQSASYPNSDREWSPTPSPSGSRPSTPKSDSELVSKSTERTGQKNPEMLWLWGELPQAAKSSSPHKMKESSPLSSRKICDKSHFQAIHSESSDTFSDQSPTLVGGALLDQNKPQTEMQFVNEEDLETLGAAAPLLPMIEELKPPSASVVQTANKTDSPSRKRDKRSRHLGADGVYLDDLTDMDPEVAALYFPKNGDPSGLAKHASDNGARSANQSPQSVGSSGVDSGVESTSDGLRDLPSIAISLCGGLSDHREITKDAFLEQAVSYQQFVDNPAIIDDPNLVVKIGSKYYNWTTAAPLLLAMQAFQKPLPKATVESIMRDKMPKKGGRWWFSWRGRNTTIKEESKPEQCLAGKAHSTGEQPPQLSLATRVKHESSSSDEERAAAKPSNAGHLPLLPNVSYKKTLRLTSEQLKSLKLKNGPNDVVFSVTTQYQGTCRCEGTIYLWNWDDKVIISDIDGTITRSDTLGHILPTLGKDWTHQGIAKLYHKVSQNGYKFLYCSARAIGMADMTRGYLHWVNERGTVLPQGPLLLSPSSLFSALHREVIEKKPEKFKVQCLTDIKNLFFPNTEPFYAAFGNRPADVYSYKQVGVSLNRIFTVNPKGELVQEHAKTNISSYVRLCEVVDHVFPLLKRSHSSDFPCSDTFSNFTFWREPLPPFENQDIHSASA

SEQ ID NO: 241464 - DNA, 1176 bp, Artificial Sequence
  derived and/or modified sequence
atgcaggccttccagaaacctttaccgaaaagctcctgtttgagctacttacatgtgatactcgacgccatcaggttttgcttctccaagattttcaacgcgcagatcgcaaccgtcgagagcataatgagagacaaaatgccgaaaaagggcggccgatggtggtttagttggcgtggcaggaataccaccatcaaggaagaatctaagcctgaacagtgtctggctggcaaggctcattctactggagaacaacctccccagcttagcctggccaccagagtcaagcatgaatcatcatcttcagacgaagaaagagcagcagccaagccctctaacgcagggcacctgcctctgctgcccaatgtgagctacaaaaaaaccttaagactgaccagtgaacagctaaagtctctaaagctgaaaaatggccctaacgacgtggttttcagcgtgaccacccaatatcagggaacctgtaggtgcgaagggaccatatatctttggaattgggacgacaaggtcattataagtgacatcgatggcactattacgcgaagcgatacgctgggtcatattctgcctactttgggaaaggactggacccaccaggggatagcgaaattgtaccacaaagttagtcagaacgggtacaagttcctgtactgctctgccagagcaattggtatggcagacatgacacggggatatctgcactgggtaaacgagcggggcaccgtattgccccagggacctcttttactgagtccctccagtttgttctccgctcttcatcgagaggtcatcgaaaagaagcccgagaagttcaaggtccagtgcctgaccgacatcaagaacctgttctttccgaataccgagccattctacgctgccttcggcaacaggcccgcggatgtttactcatacaaacaggtgggcgttagtttgaataggattttcacagtcaaccccaagggtgaactggtccaggagcacgccaagacaaatatctcttcatacgtccggctttgcgaagtggtggaccacgtgtttcctttgctcaaaagatctcactcctcggacttcccatgtagcgataccttctccaacttcacattttggcgggagccacttccgcccttcgagaaccaggacattcactctgcctcggcatag

SEQ ID NO: 241465 - DNA, 1176 bp, Artificial Sequence
  derived and/or modified sequence
atgcaggccttccagaagcccctgcccaagagcagctgcctgagctacctgcacgtgatcctggatgccatccgcttctgcttcagcaagatcttcaatgcccagatcgccaccgtggagagcatcatgagggacaagatgcccaagaagggcggccgctggtggttctcctggagaggaagaaacaccaccatcaaggaggagagcaagccagagcagtgcctggccggcaaggcccacagcactggagagcagcccccccagctgagcctggccaccagggtgaagcatgagagcagcagcagtgatgaggagagagctgctgccaagcccagcaatgccggccacctgcccctgctgcccaacgtgtcctacaagaagaccctgcggctgaccagcgagcagctgaagagcctgaagctgaagaatggccccaatgatgtggtgttttctgtgaccacccagtaccagggcacctgccgctgtgagggcaccatctacctgtggaactgggatgacaaggtgatcatcagtgacattgatggcaccatcaccaggagtgacaccctgggccacatcctgcccaccctgggcaaggactggacccaccagggcatcgccaagctgtaccacaaggtgtcccagaatggctacaagttcctgtactgcagcgcccgggccatcggcatggctgacatgacccggggctacctgcactgggtgaatgaaagaggcaccgtgctgccccagggccccctgctgctgagccccagcagcctcttcagcgccctgcaccgggaggtgattgagaagaagccagagaagttcaaggtgcagtgcctgacagacatcaagaacctcttcttccccaacacagagcccttctatgctgcctttggaaacagaccagcagatgtgtacagctacaagcaggtgggcgtgtccctgaaccgcatcttcaccgtgaaccccaagggggagctggtgcaggagcacgccaagaccaacatcagcagctatgtgcggctgtgtgaggtggtggaccacgtgttccccctgctgaagaggagccacagcagtgacttcccctgcagcgacaccttcagcaacttcaccttctggagggagcccctgcccccatttgagaaccaggacatccacagcgccagcgcctag

SEQ ID NO: 241466 - DNA, 1439 bp, Artificial Sequence
  derived and/or modified sequence
gatgcattcctggagcaagctgtgtcatatcaacagtttgtggacaaccccgctattatcgatgaccccaatctcgtggtaaagattgggagtaaatattataactggacaacagcagcacccctcctcctggcaatgcaggccttccagaaacctttgccaaagtcttcatgcttaagttaccttcatgtaattttggacgccattaggttttgcttctctaaaatttttaacgcacaaatagccactgtggaatctatcatgagggataaaatgcccaaaaagggaggaagatggtggttttcatggaggggaagaaacaccacaatcaaggaggaaagtaagccagagcagtgcttggctggcaaggcccatagcaccggagagcaaccgccgcagctcagcttggccaccagggtaaagcatgaatcatcctccagtgatgaggagcgcgcagctgccaagccatcaaacgcaggccacctccctcttctgcctaatgtcagctacaagaagactctccggctgacttccgagcagcttaaaagcttgaagttgaagaatggccccaacgacgtggttttcagtgtcaccacgcagtaccaaggcacgtgccgctgtgagggcaccatctatctgtggaactgggatgataaagtcatcatttctgatattgatgggacaattaccagatcagatactcttggccacattttgcccacccttgggaaggattggacccatcagggcatcgctaagctgtaccataaagtgagccagaatggatataaatttctctactgttctgcccgtgccatcgggatggcggacatgacgcggggctacctgcactgggtcaacgagaggggcacggtgctgccccaggggcccctgctgctgagtcccagcagcctcttctctgccctgcacagagaagtgattgaaaagaagccagaaaagtttaaagtccagtgtttgacagacatcaaaaacctgtttttccccaacacagaacccttttatgctgcttttggaaaccgaccagctgatgtgtattcatacaagcaagtaggagtgtctttgaatagaatatttaccgtcaaccctaaaggagagctggtacaggaacatgcaaagaccaacatctcttcgtatgtgagactctgtgaagtagtcgaccacgttttcccgttgctgaaaagaagccattcttcagactttccctgttcggataccttcagtaacttcaccttttggagagagccactgccaccttttgaaaaccaggacattcattctgcctcagcgtaaaatgtcccaagcagcctcttgccagcagtgcagagcctggttgtcacccattaaaggataggtctccccggagtgcacagctccacctgggagcctggcgcgtcatcattggcctgacagcagagaga

SEQ ID NO: 241467 - DNA, 1176 bp, Artificial Sequence
  derived and/or modified sequence
atgcaggccttccagaagcccctgcccaagagcagctgcctgagctatctgcacgttatccttgacgccatcaggttttgcttctccaagattttcaatgcgcagatcgctaccgtggagtctatcatgagagataagatgcctaagaagggcggaagatggtggttttcctggagagggagaaataccaccataaaggaggaatcaaaacccgagcagtgcctggcggggaaggcgcactccacaggagaacagcctcctcaacttagtttggccaccagagtcaaacatgagtccagctcaagtgatgaagaacgtgcggcagctaagccatcaaacgccgggcacctcccattgttacctaacgtgtcttataaaaaaacactgcgcttaacttcagaacagctgaagagcctgaagctgaagaacggtcctaacgatgtggtgtttagcgtgacaacacagtaccagggcacgtgcaggtgcgaaggcactatctatttatggaattgggatgacaaagtgatcataagcgatattgacggaaccattactcggtcagatacactgggacatatccttccgaccctgggtaaggactggacgcatcaaggaatcgcaaagttgtatcacaaggtgtctcagaacggctacaagttcctgtattgttcagcccgcgctattggaatggccgacatgacacgcggatacctgcattgggtgaacgaacgtggcaccgttttacctcagggacctctactattgagcccctcttccctcttttcagcactacatagagaagtgatcgagaaaaagcccgaaaaatttaaggttcagtgcttgactgatattaagaacctgttttttcctaatacagagcctttctatgcagcgttcgggaacaggccggctgacgtgtactcatataaacaagtcggagtgagcctaaatcgcattttcacagtgaaccccaaaggcgaactggtccaggagcacgccaaaacgaatatcagttcttacgtgcgcctttgcgaagtcgtggaccatgttttccctctgttgaagcgatcccattcgtcggactttccctgcagcgacacttttagcaattttacattttggcgggagcccctacccccgtttgaaaaccaggacatacattccgctagcgcttag

SEQ ID NO: 241468 - DNA, 1176 bp, Artificial Sequence
  derived and/or modified sequence
atgcaagccttccagaagcctctgccaaagtcctcttgcttgtcttacctgcacgtgattcttgacgctattcgattttgtttttctaagatctttaatgcgcagattgcaaccgtggaaagtattatgcgggacaaaatgccaaaaaaagggggtcgatggtggttcagttggaggggaagaaacacaactataaaggaagagagcaagcccgagcagtgtctcgcgggaaaagctcattcaacgggcgaacagccgccacagctgagtctcgcaactcgtgttaagcacgaatctagttcctccgacgaggagcgggcagctgcaaagcctagcaacgcgggtcatctgccactgttgccaaatgtgtcatacaagaagactctgcgcctcacatctgaacagctcaagtctctgaagctgaaaaatggtccaaacgatgtggtgttcagcgtgactacccagtaccaggggacttgcaggtgcgaaggaactatctatctgtggaactgggacgataaggtcattattagcgacatcgatggcaccattacacgatcagacacgctgggacacatcctccccaccctaggcaaggactggacccatcaagggatagccaaactctaccataaggtgagccagaacggctacaagttcctctactgtagcgccagagcgattggaatggctgacatgaccagaggctacctgcactgggtgaacgagcgaggcacagtcctgccccaaggcccattactgctgagcccttcatcactattttctgcactgcaccgcgaagtcatcgaaaagaagcctgaaaagttcaaagtgcaatgcctcaccgacatcaagaatctgtttttccccaacaccgaacccttctatgctgcttttggcaatagaccggctgacgtgtattcctacaagcaggtgggagtcagtttaaatcgtatcttcacagtaaatcctaagggagagttggtgcaggaacatgccaagaccaacatttcatcttacgtcagactctgcgaggtggtcgaccacgtctttcccctgcttaagcggtcccacagcagcgactttccgtgctccgacactttcagtaactttactttttggagggagcccttaccaccctttgagaatcaggacatccactccgccagtgcttag

SEQ ID NO: 241469 - DNA, 1176 bp, Artificial Sequence
  derived and/or modified sequence
atgcaggccttccagaagcccctgcccaagagcagctgcctgagctacctgcacgtgatcctggacgccatcagattctgcttcagcaagatcttcaacgcccagatcgccaccgtggagagcatcatgagagacaagatgcccaagaagggcggcagatggtggttcagctggagaggcagaaacaccaccatcaaggaggagagcaagcccgagcagtgcctggccggcaaggcccacagcaccggcgagcagcccccccagctgagcctggccaccagagtgaagcacgagagcagcagcagcgacgaggagagagccgccgccaagcccagcaacgccggccacctgcccctgctgcccaacgtgagctacaagaagaccctgagactgaccagcgagcagctgaagagcctgaagctgaagaacggccccaacgacgtggtgttcagcgtgaccacccagtaccagggcacctgcagatgcgagggcaccatctacctgtggaactgggacgacaaggtgatcatcagcgacatcgacggcaccatcaccagaagcgacaccctgggccacatcctgcccaccctgggcaaggactggacccaccagggcatcgccaagctgtaccacaaggtgagccagaacggctacaagttcctgtactgcagcgccagagccatcggcatggccgacatgaccagaggctacctgcactgggtgaacgagagaggcaccgtgctgccccagggccccctgctgctgagccccagcagcctgttcagcgccctgcacagagaggtgatcgagaagaagcccgagaagttcaaggtgcagtgcctgaccgacatcaagaacctgttcttccccaacaccgagcccttctacgccgccttcggcaacagacccgccgacgtgtacagctacaagcaggtgggcgtgagcctgaacagaatcttcaccgtgaaccccaagggcgagctggtgcaggagcacgccaagaccaacatcagcagctacgtgagactgtgcgaggtggtggaccacgtgttccccctgctgaagagaagccacagcagcgacttcccctgcagcgacaccttcagcaacttcaccttctggagagagcccctgccccccttcgagaaccaggacatccacagcgccagcgcctag

SEQ ID NO: 241470 - protein, 773 aa, Artificial Sequence
  derived and/or modified sequence
MTNQEKWAHLSPSEFSQLQKYAEYSTKKLKDVLEEFHGNGVLAKYNPEGKQDILNQTIDFEGFKLFMKTFLEAELPDDFTAHLFMSFSNKFPHSSPMVKSKPALLSGGLRMNKGAITPPRTTSPANTCSPEVIHLKDIVCYLSLLERGRPEDKLEFMFRLYDTDGNGFLDSSELENIISQMMHVAEYLEWDVTELNPILHEMMEEIDYDHDGTVSLEEWIQGGMTTIPLLVLLGLENNVKDDGQHVWRLKHFNKPAYCNLCLNMLIGVGKQGLCCSFCKYTVHERCVARAPPSCIKTYVKSKRNTDVMHHYWVEGNCPTKCDKCHKTVKCYQGLTGLHCVWCQITLHNKCASHLKPECDCGPLKDHILPPTTICPVVLQTLPTSGVSVPEERQSTVKKEKSGSQQPNKVIDKNKMQRANSVTVDGQGLQVTPVPGTHPLLVFVNPKSGGKQGERIYRKFQYLLNPRQVYSLSGNGPMPGLNFFRDVPDFRVLACGGDGTVGWVLDCIEKANVGKHPPVAILPLGTGNDLARCLRWGGGYEGENLMKILKDIENSTEIMLDRWKFEVIPNDKDEKGDPVPYSIINNYFSIGVDASIAHRFHIMREKHPEKFNSRMKNKFWYFEFGTSETFSATCKKLHESVEIECDGVQIDLINISLEGIAILNIPSMHGGSNLWGESKKRRSHRRIEKKGSDKRTTVTDAKELKFASQDLSDQLLEVVGLEGAMEMGQIYTGLKSAGRRLAQCSCVVIRTSKSLPMQIDGEPWMQTPCTVSTE

SEQ ID NO: 241471 - DNA, 2322 bp, Artificial Sequence
  derived and/or modified sequence
atgacaaaccaggaaaagtgggcgcatttgtcaccaagcgaattcagtcaactgcagaagtacgctgaatacagtacgaaaaagctgaaagatgtgctggaagaattccatggaaacggggtgctggctaagtacaaccctgaaggtaaacaggacattctgaaccagacgatagacttcgaaggatttaagctgttcatgaagacctttctggaggccgaactgcccgacgacttcaccgcgcatctgttcatgagcttttcaaacaaattccctcactcatctcctatggtgaaaagcaagcctgctctcctgtcaggaggtctgcgtatgaacaagggcgctatcaccccccctagaaccacatctccggcaaatacctgtagtcctgaggtgattcatctcaaggacatcgtctgttatttaagtctgctcgaaaggggtaggcccgaggacaagctggagttcatgttccgcctttacgacactgacggcaatggctttctggattcatctgagctggaaaatattatatctcagatgatgcacgttgccgaatatcttgaatgggacgtcaccgagctcaacccaattctccatgaaatgatggaagaaatcgactatgaccacgacggaacagtgagcttggaggaatggatacagggaggcatgacaactatcccgttgcttgtcctgcttggcctcgaaaataatgttaaggatgacgggcagcatgtttggcgacttaagcactttaataaaccagcttattgcaatctgtgtctcaacatgcttatcggcgtgggcaaacaggggctctgttgcagcttctgtaagtatacagttcacgaacggtgtgtggcccgtgcccccccttcctgtataaagacctatgtgaaaagcaagaggaacacggatgtgatgcatcactattgggtcgagggcaactgtcctaccaagtgtgacaagtgccacaagaccgtgaaatgttatcaggggctgactggactgcactgcgtgtggtgccagatcaccctgcacaacaagtgcgcttcccatcttaaaccagagtgtgattgtggtccacttaaggaccacattcttcctcccactacgatttgtccagtggttctccaaacccttccaacctctggggtgtccgtgcccgaggagcggcaatccacagttaagaaagaaaaatctggcagtcaacagccaaataaggtgatcgacaagaataagatgcaaagagccaattccgttacagtagacggccagggactgcaggtgacgcctgttcccggcactcatccactactggtgttcgttaacccaaaatctggggggaaacagggagaacgaatttataggaaattccagtacttactcaaccctcgccaggtttattcattgagtggtaatggcccaatgcctggtctaaacttcttcagggatgtccctgacttcagagtactggcctgcgggggcgatggtacggtgggctgggttctagattgcatcgagaaggccaacgtggggaaacatcctcccgtggcgatcctccccttagggaccggcaacgacctggctagatgcttgcggtgggggggaggttacgaaggcgaaaatctgatgaagatcctgaaggacatcgaaaatagcacagagatcatgttagacaggtggaagttcgaggtaatcccaaatgataaagacgagaaaggggaccccgtcccatactctattataaacaattatttttccatcggagttgatgcctctatcgctcatcgcttccacatcatgagagagaagcatcctgagaagttcaatagtcgcatgaaaaataaattctggtacttcgagttcggtacatcagagaccttctcagcaacctgcaaaaagctgcacgagtctgtggaaatcgagtgtgacggcgttcagattgatttaatcaatatctcactcgaaggcatcgccattctcaatattcccagcatgcacggcggctcgaacctctggggtgagtcaaaaaaacgaagaagtcacaggcggatcgagaaaaagggatcagacaaacggacgactgtcacggatgctaaagagcttaaattcgcaagccaggatttatcggatcagctcttagaagtcgtgggcctcgaaggggccatggagatgggccagatatacactggactgaaaagcgccgggcggcgtctggcacagtgttcgtgtgttgttatccgcactagtaaaagcctgccgatgcagattgatggggagccgtggatgcagactccgtgcacagtctccaccgagtag

SEQ ID NO: 241472 - DNA, 2322 bp, Artificial Sequence
  derived and/or modified sequence
atgaccaaccaggagaagtgggcccacctgagccccagcgagttcagccagctgcagaagtatgcagagtacagcaccaagaagctgaaggatgtgctggaggagttccatggaaatggagtgctggccaagtacaaccctgagggcaagcaggacatcctgaaccagaccatcgactttgagggcttcaagctgttcatgaagaccttcctggaggccgagctgcctgatgacttcaccgcccacctgttcatgtccttcagcaacaagttcccccacagcagccccatggtgaagagcaagccagccctgctgagcggcggcctgaggatgaacaagggggccatcaccccacccaggaccaccagccctgccaacacctgcagccctgaggtgatccacctgaaggacatcgtgtgctacctgagcctgctggagcggggccggcctgaggacaagctggagttcatgttccggctgtatgacacagatggaaatggcttcctggacagcagcgagctggagaacatcatcagccagatgatgcacgtggccgagtacctggagtgggatgtgacagagctgaaccccatcctgcacgagatgatggaggagattgattatgaccatgatggcaccgtgtccctggaggagtggatccagggcggcatgaccaccatccccctgctggtgctgctgggcctggagaacaacgtgaaggatgatggccagcacgtgtggaggctgaagcacttcaacaagccagcctactgcaacctgtgcctgaacatgctgattggagtgggcaagcagggcctgtgctgcagcttctgcaagtacacagtgcatgagcgctgtgtggcccgggccccacccagctgcatcaagacctacgtgaagagcaagaggaacacagatgtgatgcaccactactgggtggagggcaactgccccaccaagtgtgacaagtgccacaagacagtgaagtgctaccagggcctgaccggcctgcactgtgtgtggtgccagatcaccctgcacaacaagtgtgccagccacctgaagccagaatgtgactgtggccccctgaaggaccacatcctgccccccaccaccatctgccctgtggtgctgcagaccctgcccaccagcggcgtgtctgtgcctgaggagcggcagagcacagtgaagaaggagaagagcggcagccagcagcccaacaaggtgattgacaagaacaagatgcagagggccaacagcgtgacagtggatggccagggcctgcaggtgacccctgtgcccggcacccaccccctgctggtgtttgtgaaccccaagagcggcggcaagcagggcgagcgcatctacaggaagttccagtacctgctgaacccccggcaggtgtacagcctgtctggaaatggccccatgcctggcctgaacttcttcagagatgtgcctgacttccgggtgctggcctgtggaggagatggcaccgtgggctgggtgctggactgcatcgagaaggccaacgtgggcaagcacccccctgtggccatcctgcccctgggcactggaaatgacctggcccgctgcctgcgctggggcggcggctatgaaggagagaacctgatgaagatcctgaaggacatcgagaacagcacagagatcatgctggaccgctggaagtttgaggtgatccccaatgacaaggatgagaagggggaccctgtgccctacagcatcatcaacaactacttcagcattggagtggatgccagcatcgcccaccgcttccacatcatgagggagaagcaccctgagaagttcaacagcaggatgaagaacaagttctggtactttgaatttggcaccagcgagaccttcagcgccacctgcaagaagctgcatgaatctgtggagattgaatgtgatggagtgcagattgacctgatcaacatcagcctggagggcatcgccatcctgaacatccccagcatgcacggcggcagcaacctgtggggcgagagcaagaagaggaggagccaccggcgcatcgagaagaagggcagtgacaagaggaccaccgtgacagatgccaaggagctgaagtttgccagccaggacctgagtgaccagctgctggaggtggtgggcctggagggcgccatggagatgggccagatctacacaggcctgaagtctgctggccggcggctggcccagtgcagctgtgtggtgatccgcaccagcaagagcctgcccatgcagattgatggagagccctggatgcagaccccctgcaccgtgtccacagaatag

SEQ ID NO: 241473 - DNA, 2322 bp, Artificial Sequence
  derived and/or modified sequence
atgaccaaccaggagaagtgggcccacctgagccccagcgagttctcacaacttcagaaatacgctgagtacagtactaagaaactgaaggacgtgcttgaagaatttcatggcaacggggttcttgctaagtataaccccgaggggaagcaggacattttgaatcaaactatcgactttgagggcttcaaacttttcatgaaaacattcctggaagccgaattgccagatgatttcacagcacacttatttatgtcattttcaaataagtttcctcattcctcgcccatggtcaaatccaagcccgcgctgttaagtggtgggctgaggatgaacaaaggcgccatcaccccacctagaacaacttcccccgcaaatacctgttccccagaggtcatacatctgaaagatattgtctgttacctgagcctgctggagcggggcagacctgaagacaaactggagtttatgtttagactgtatgataccgacggtaatggctttttagattcatctgagctggaaaacataattagccagatgatgcatgtcgcggaatacctggagtgggacgtgaccgagcttaatcccattttacacgaaatgatggaggagatcgactatgatcacgatggcaccgtcagtctggaagagtggatacaaggaggtatgactaccattccactgctcgtgctgcttgggttagagaataacgtcaaggatgatgggcagcacgtctggcgactgaaacacttcaataaaccagcatactgcaacctctgtctcaacatgctgattggggtcggcaagcagggattatgctgttcgttctgcaaatacacagtgcacgaacgctgcgtggcacgcgctccaccaagttgtataaaaacatacgtgaaaagtaaaaggaataccgacgtgatgcaccattactgggtcgaaggtaattgccccactaagtgtgataaatgtcataaaacggtgaagtgctaccaaggcctgaccggactgcactgcgtgtggtgccagatcactctacacaataagtgtgcatctcatcttaaacctgaatgtgattgcggcccattgaaagatcatatcttgccacctacgaccatttgcccggtggtgttgcagaccctgccaacaagtggagtctcagtgccagaggagagacagtcgaccgtcaaaaaggaaaaaagcgggagtcagcagccaaataaagtgatagacaagaacaagatgcaaagagcaaactcggtgacagtggacggacaagggctgcaggtgacaccagttcctgggacccacccgcttctggtctttgtcaatcctaagtctgggggcaaacagggggagaggatctacaggaaattccagtatctgctaaacccccgtcaggtttacagtctctcaggaaatggtccaatgcctggcctgaacttctttcgcgatgtgccagactttagagtgcttgcatgcggaggagacgggaccgtgggatgggtgctggactgtatcgaaaaagccaatgtgggcaagcacccacctgtggccatcttaccactgggaacggggaatgatctcgcacgatgcctaaggtggggtggggggtacgaaggtgaaaacctgatgaagattctgaaagacattgagaatagtaccgagatcatgctggatcgatggaagttcgaggtgattcctaacgacaaggatgagaaaggagaccctgtaccatactcaattatcaataactacttcagtataggcgttgacgctagcatcgctcaccgatttcacatcatgcgggaaaaacatccggagaaatttaattctcgcatgaagaacaaattctggtattttgaattcggcacttcagagacctttagcgctacttgcaagaaacttcacgagtctgttgagatcgagtgcgatggggtacagatcgatctcatcaatatcagcttagagggaatcgctatcctaaacatcccctccatgcacgggggctcaaatctctggggagagagcaagaagagacgtagccatcggagaatcgagaaaaaaggcagcgataaacgtaccacagtcacggatgctaaggagctcaagttcgcatcccaggatttatccgaccagttgctggaggtggtgggattggagggagccatggagatgggccagatatacactgggctcaagtccgctggccgcagactggcccagtgcagttgcgtggtcatcaggacttctaagtctctccccatgcagatcgacggcgagccatggatgcagactccttgtactgtgagtacagaatag

SEQ ID NO: 241474 - DNA, 2322 bp, Artificial Sequence
  derived and/or modified sequence
atgactaaccaagaaaaatgggcgcatctgtctccttctgagtttagccagttgcagaagtatgccgaatactcaacgaagaaactcaaggatgtactcgaagaatttcacgggaatggagtactcgccaagtacaaccccgagggtaagcaggatatcctgaaccaaacgatagacttcgagggctttaaactgtttatgaaaacctttctcgaggccgagctccctgacgacttcacagcccacctgtttatgtcattctcaaataagttcccgcattcttcacccatggttaagtctaagcccgctcttcttagcggaggattgagaatgaacaaaggcgctatcaccccgcctcggaccacctctcccgcaaatacctgctcacctgaagtgatacatctcaaggacatcgtatgctacctctctcttctggaacgaggacgcccagaagacaagctcgagttcatgttcagattatacgacaccgatggcaatggattcctcgactccagcgagttggagaatatcataagccagatgatgcatgttgcagagtatttagaatgggatgtgacagagctaaatcctatcttgcatgagatgatggaagaaatagactatgatcacgatggaactgtgtccctagaggagtggattcaaggaggcatgacaactattcctctcctcgtcttattagggctggaaaacaatgtcaaggatgacggccagcatgtctggcgactgaagcactttaataagcctgcatattgcaacctctgtctcaatatgctgataggagttgggaaacagggattatgctgtagcttttgcaagtacacggtccacgagagatgtgtggcccgtgcacctcccagttgcatcaaaacatacgtgaaaagtaagcgaaacactgacgtcatgcatcactactgggtggagggaaattgtcccaccaaatgtgacaagtgccacaagactgttaagtgttaccagggactgactggactgcactgtgtctggtgtcagattaccctccataacaaatgcgcatcacacctgaagcccgaatgcgactgcggcccactcaaagatcacattctccctccaacaactatttgtcccgtggtgctgcagacactaccaaccagtggagtatctgtgccagaggaaagacagagcactgttaagaaagagaagagcggcagtcaacagccaaacaaagtcatcgacaaaaacaagatgcaaagagctaattcggtgacagtcgacggccaaggtcttcaggtgacccccgttccagggacccacccattactggtgtttgtgaacccaaaatccgggggaaagcagggagaacggatttatagaaagttccagtatcttttgaacccacgccaggtatactctctgtctggcaatggccctatgccgggactgaattttttcagggatgtaccagattttcgggttcttgcttgtggaggtgacgggaccgtgggctgggtgctcgactgcattgagaaggctaatgtgggcaaacatccacctgttgcaattctcccactcgggacaggcaacgatctggcacgatgtctacgatgggggggaggatacgagggagaaaacctgatgaaaattttgaaagacattgagaattctactgagataatgctggatcgctggaagtttgaggtcatccccaacgataaagatgagaagggtgatcccgttccatattctattataaataactatttcagtatcggagtggatgcctctatcgcgcacagatttcacattatgagggaaaagcaccccgaaaagttcaattcccgaatgaagaacaagttctggtatttcgagttcgggacatccgagaccttctccgccacctgcaaaaaactgcacgaatccgttgaaatcgagtgtgacggtgttcagattgacctcattaacatatccctggagggtattgccatcttgaatattcccagtatgcatggaggctccaacctgtggggagagagtaagaaaagacgctctcatcgcaggatagagaaaaagggaagcgacaagagaaccaccgtgacagacgcaaaggagctgaagtttgcctcacaggatctctccgaccagctcttagaagtggtcggcctggagggggctatggagatgggccagatctacacaggcctgaagagcgccggtagacgtttggctcagtgttcatgtgtggtgatccggacgtccaaatccttgcccatgcagatcgatggagagccttggatgcagacaccctgtactgtgtctactgagtag

SEQ ID NO: 241475 - DNA, 2322 bp, Artificial Sequence
  derived and/or modified sequence
atgaccaaccaggagaagtgggcccacctgagccccagcgagttcagccagctgcagaagtacgccgagtacagcaccaagaagctgaaggacgtgctggaggagttccacggcaacggcgtgctggccaagtacaaccccgagggcaagcaggacatcctgaaccagaccatcgacttcgagggcttcaagctgttcatgaagaccttcctggaggccgagctgcccgacgacttcaccgcccacctgttcatgagcttcagcaacaagttcccccacagcagccccatggtgaagagcaagcccgccctgctgagcggcggcctgagaatgaacaagggcgccatcaccccccccagaaccaccagccccgccaacacctgcagccccgaggtgatccacctgaaggacatcgtgtgctacctgagcctgctggagagaggcagacccgaggacaagctggagttcatgttcagactgtacgacaccgacggcaacggcttcctggacagcagcgagctggagaacatcatcagccagatgatgcacgtggccgagtacctggagtgggacgtgaccgagctgaaccccatcctgcacgagatgatggaggagatcgactacgaccacgacggcaccgtgagcctggaggagtggatccagggcggcatgaccaccatccccctgctggtgctgctgggcctggagaacaacgtgaaggacgacggccagcacgtgtggagactgaagcacttcaacaagcccgcctactgcaacctgtgcctgaacatgctgatcggcgtgggcaagcagggcctgtgctgcagcttctgcaagtacaccgtgcacgagagatgcgtggccagagccccccccagctgcatcaagacctacgtgaagagcaagagaaacaccgacgtgatgcaccactactgggtggagggcaactgccccaccaagtgcgacaagtgccacaagaccgtgaagtgctaccagggcctgaccggcctgcactgcgtgtggtgccagatcaccctgcacaacaagtgcgccagccacctgaagcccgagtgcgactgcggccccctgaaggaccacatcctgccccccaccaccatctgccccgtggtgctgcagaccctgcccaccagcggcgtgagcgtgcccgaggagagacagagcaccgtgaagaaggagaagagcggcagccagcagcccaacaaggtgatcgacaagaacaagatgcagagagccaacagcgtgaccgtggacggccagggcctgcaggtgacccccgtgcccggcacccaccccctgctggtgttcgtgaaccccaagagcggcggcaagcagggcgagagaatctacagaaagttccagtacctgctgaaccccagacaggtgtacagcctgagcggcaacggccccatgcccggcctgaacttcttcagagacgtgcccgacttcagagtgctggcctgcggcggcgacggcaccgtgggctgggtgctggactgcatcgagaaggccaacgtgggcaagcacccccccgtggccatcctgcccctgggcaccggcaacgacctggccagatgcctgagatggggcggcggctacgagggcgagaacctgatgaagatcctgaaggacatcgagaacagcaccgagatcatgctggacagatggaagttcgaggtgatccccaacgacaaggacgagaagggcgaccccgtgccctacagcatcatcaacaactacttcagcatcggcgtggacgccagcatcgcccacagattccacatcatgagagagaagcaccccgagaagttcaacagcagaatgaagaacaagttctggtacttcgagttcggcaccagcgagaccttcagcgccacctgcaagaagctgcacgagagcgtggagatcgagtgcgacggcgtgcagatcgacctgatcaacatcagcctggagggcatcgccatcctgaacatccccagcatgcacggcggcagcaacctgtggggcgagagcaagaagagaagaagccacagaagaatcgagaagaagggcagcgacaagagaaccaccgtgaccgacgccaaggagctgaagttcgccagccaggacctgagcgaccagctgctggaggtggtgggcctggagggcgccatggagatgggccagatctacaccggcctgaagagcgccggcagaagactggcccagtgcagctgcgtggtgatcagaaccagcaagagcctgcccatgcagatcgacggcgagccctggatgcagaccccctgcaccgtgagcaccgagtag

SEQ ID NO: 241476 - DNA, 3257 bp, Artificial Sequence
  derived and/or modified sequence
ggaatctttgaagcatagacctctgcgcaacacctgaataaagaatcttttacctggtatgtgacagagcttctcaccaccaccatgacaaaccaggaaaaatgggcccacctcagcccttcggaattttcccaacttcagaaatatgctgagtattctacaaagaaattaaaggatgttcttgaagaattccatggtaatggtgtgcttgcaaagtataatcctgaagggaaacaagacattcttaaccaaacaatagattttgaaggtttcaaactattcatgaagacattcctggaagccgagcttcctgatgatttcactgcacaccttttcatgtcatttagcaacaagtttcctcattctagtccaatggtaaaaagtaagcctgctctcctatcaggcggtctgagaatgaataaaggtgccatcacccctccccggactacttctcctgcaaatacgtgttccccagaagtaatccatctgaaggacattgtctgttacctgtctctgcttgaaagaggaagacctgaggataagcttgagtttatgtttcgcctttatgacacggatgggaatggcttcctggacagctcggagctagaaaatatcatcagtcagatgatgcatgttgcagaataccttgagtgggatgtcactgaacttaatccaatcctccatgaaatgatggaagaaattgactatgatcatgatggaaccgtgtctctggaggaatggattcaaggaggaatgacaacgattccacttcttgtgctcctgggcttagaaaataacgtgaaggatgatggacagcacgtgtggcgactgaagcactttaacaaacctgcctattgcaacctttgcctgaacatgctgattggcgtggggaagcagggcctctgctgttccttctgcaagtacacagtccatgagcgctgtgtggctcgagcacctccctcttgcatcaagacctatgtgaagtccaaaaggaacactgatgtcatgcaccattactgggttgaaggtaactgcccaaccaagtgtgataagtgccacaaaactgttaaatgttaccagggcctgacaggactgcattgtgtttggtgtcagatcacactgcataataaatgtgcttctcatctaaaacctgaatgtgactgtggacctttgaaggaccatattttaccacccacaacaatctgtccagtggtactgcagactctgcccacttcaggagtttcagttcctgaggaaagacaatcaacagtgaaaaaggaaaagagtggttcccagcagccaaacaaagtgattgacaagaataaaatgcaaagagccaactctgttactgtagatggacaaggcctgcaggtcactcctgtgcctggtactcacccacttttagtttttgtgaaccccaaaagtggtggaaaacaaggagaacgaatttacagaaaattccagtatctattaaatcctcgtcaggtttacagtctttctggaaatggaccaatgccagggttaaactttttccgtgatgttcctgacttcagagtgttagcctgtggtggagatggaaccgtgggctgggttttggattgcatagaaaaggccaatgtaggcaagcatcctccagttgcgattctgcctcttgggactggcaatgatctagcaagatgcctgcgatggggaggaggttacgaaggtgagaatctgatgaaaattctaaaagacattgaaaacagcacagaaatcatgttggacaggtggaagtttgaagtcatacctaatgacaaagatgagaaaggagacccagtgccttacagtatcatcaataattacttttccattggcgtggatgcctccattgcacacagattccacatcatgagagaaaaacacccagagaaattcaacagtagaatgaagaacaaattttggtattttgagtttggcacatctgaaactttctcagccacctgcaagaagctacatgaatctgtagaaatagaatgtgatggagtacagatagatttaataaacatctctctggaaggaattgctattttgaatataccaagcatgcatggaggatccaatctttggggagagtctaagaaaagacgaagccatcgacgaatagagaaaaaagggtctgacaaaaggaccaccgtcacagatgccaaagagttgaagtttgcaagtcaagatctcagtgaccagctgctggaggtggtcggcttggaaggagccatggagatggggcaaatatacacaggcctgaaaagtgctggccggcggctggctcagtgctcctgcgtggtcatcaggacgagcaagtctctgccaatgcaaattgatggggagccatggatgcagaccccatgcacagtgagtacagagtagttgatatgctatgtcaatctcagttttgctttcctctttgactaaataaccacaataactgatttttttctttatttcttttcaacctatcagcaaatagtctttttgttgttgttgttatgtgtgtgtcagagccactacatttaggttgtagacattatatacccttggcaatgatttagctcttgaatgtttgtgttagcctaagtataaatagatcttttaaatagatcaattataaaccatagatcaattataaactatggagctaaacaaaatattaataaaagtttatctgaaacttttttgtttatttcagagcacattattagaatattatttgcaagaaatgcagacctaagcttatatgtgaacttatttctcagcttttctatgcctccatttggggatttgagggctttcttctccataagaaaaaaatttctctccagtttctaccataattaattgtgttttccagaatgaggtattatttaaggcagacactgcccctctcaaaaaaaaatcagttttcatttgcatagtgaatattttattgcatttcaaaaacatgctaggaactgcttttggcactgggagtagacacatgaacaagaccaacagtgtaatttccttcaagttacttacattcctataatagaggaccgaataaataaacaactacatgataaatataacttcagactgtgagagttattaaaaaataaggtgaaatgatgataagaagctggattaggtgtggagaataaatactacttgagataagggagacctctttgaaaggacatagccaaaagcttagtataaaattaaaaaaaataaaaaaaaaa

SEQ ID NO: 241477 - protein, 464 aa, Artificial Sequence
  derived and/or modified sequence
METLSFPRYNVAEIVIHIRNKILTGADGKNLTKNDLYPNPKPEVLHMIYMRALQIVYGIRLEHFYMMPVNSEVMYPHLMEGFLPFSNLVTHLDSFLPICRVNDFETADILCPKAKRTSRFLSGIINFIHFREACRETYMEFLWQYKSSADKMQQLNAAHQEALMKLERLDSVPVEEQEEFKQLSDGIQELQQSLNQDFHQKTIVLQEGNSQKKSNISEKTKRLNELKLSVVSLKEIQESLKTKIVDSPEKLKNYKEKMKDTVQKLKNARQEVVEKYEIYGDSVDCLPSCQLEVQLYQKKIQDLSDNREKLASILKESLNLEDQIESDESELKKLKTEENSFKRLMIVKKEKLATAQFKINKKHEDVKQYKRTVIEDCNKVQEKRGAVYERVTTINQEIQKIKLGIQQLKDAAEREKLKSQEIFLNLKTALEKYHDGIEKAAEDSYAKIDEKTAELKRKMFKMST

SEQ ID NO: 241478 - protein, 202 aa, Artificial Sequence
  derived and/or modified sequence
METLSFPRYNVAEIVIHIRNKILTGADGKNLTKNDLYPNPKPEVLHMIYMRALQIVYGIRLEHFYMMPVNSEVMYPHLMEGFLPFSNLVTHLDSFLPICRVNDFETADILCPKAKRTSRFLSGIINFIHFREACRETYMEFLWQYKSSADKMQQLNAAHQEALMKLERLDSVPVEEQEEFKQLSDGIQELQQSLNQDFHQKT

SEQ ID NO: 241479 - protein, 145 aa, Artificial Sequence
  derived and/or modified sequence
METLSFPRYNVAEIVIHIRNKILTGADGKNLTKNDLYPNPKPEVLHMIYMRALQIVYGIRLEHFYMMPVNSEVMYPHLMEGFLPFSNLVTHLDSFLPICRVNDFETADILCPKAKRTSRFLSGIINFIHFREACRETYMEFLWQY

SEQ ID NO: 241480 - protein, 221 aa, Artificial Sequence
  derived and/or modified sequence
METLSFPRYNVAEIVIHIRNKILTGADGKNLTKNDLYPNPKPEVLHMIYMRALQIVYGIRLEHFYMMPVNSEVMYPHLMEGFLPFSNLVTHLDSFLPICRVNDFETADILCPKAKRTSRFLSGIINFIHFREACRETYMEFLWQYKSSADKMQQLNAAHQEALMKLERLDSVPVEEQEEFKQLSDGIQELQQSLNQDFHQKTCCKREIPKRSQIFQRKPSV

SEQ ID NO: 241481 - protein, 417 aa, Artificial Sequence
  derived and/or modified sequence
METLSFPRYNVAEIVIHIRNKILTGADGKNLTKNDLYPNPKPEVLHMIYMRALQIVYGIRLEHFYMMPVNSEVMYPHLMEGFLPFSNLVTHLDSFLPICRVNDFETADILCPKAKRTSRFLSGIINFIHFREACRETYMEFLWQYKSSADKMQQLNAAHQEALMKLERLDSVPVEEQEEFKQLSDGIQELQQSLNQDFHQKTIVLQEGNSQKKSNISEKTKRLNELKLSVVSLKEIQESLKTKIVDSPEKLKNYKEKMKDTVQKLKNARSLNLEDQIESDESELKKLKTEENSFKRLMIVKKEKLATAQFKINKKHEDVKQYKRTVIEDCNKVQEKRGAVYERVTTINQEIQKIKLGIQQLKDAAEREKLKSQEIFLNLKTALEKYHDGIEKAAEDSYAKIDEKTAELKRKMFKMST

SEQ ID NO: 241482 - protein, 124 aa, Artificial Sequence
  derived and/or modified sequence
METLSFPRYNVAEIVIHIRNKILTGADGKNLTKNDLYPNPKPEVLHMIYMRALQIVYGIRLEHFYMMPVNSEVMYPHLMEGFLPFSNLVTHLDSFLPICRVNDFETADILCPKAKRTSRFLSGI

SEQ ID NO: 241483 - DNA, 1395 bp, Artificial Sequence
  derived and/or modified sequence
atggagactctgtcttttccccgatataacgtggctgaaattgtaatccacatacggaataagatcctgacaggagccgacggtaagaatttaaccaagaatgatctgtaccccaacccaaaacctgaggtgctccatatgatctatatgcgtgctctccaaattgtttacgggatcagactagaacacttctatatgatgcctgtcaattcagaggtgatgtacccccacctcatggaaggatttctgcccttttcgaatttggtgacccacctcgattcctttctgccaatctgccgtgtgaatgactttgaaactgcagacattctgtgtccgaaagcaaagcgcacaagcaggttcctgtcgggcatcatcaatttcatccacttccgtgaggcctgccgagagacttacatggaatttctctggcagtacaaaagttctgccgataagatgcagcagctcaatgctgctcaccaggaggctctgatgaagttggaaagactcgactccgtgcccgtggaagaacaggaggaattcaaacagctttcagatggcattcaggaactccaacagtcactgaatcaagactttcaccagaaaacaatcgtgctgcaagaagggaattcacagaagaagtctaacatttctgaaaaaaccaaacgcctgaacgagctgaagctgagcgtggtcagtctcaaagagatacaagaaagtttaaagacgaagatcgtagactcacccgagaagctgaagaactacaaggaaaaaatgaaggacacagtacagaagcttaagaacgccagacaggaagtggtggagaaatatgagatatatggggactctgtggattgcctcccttcgtgtcaactcgaggtccagctgtaccagaagaagatccaggatctgtctgacaatagagagaaactggcctcgatcctcaaggaatccctgaatctagaggatcagatcgagagcgacgaatccgaactcaaaaagctcaagactgaggaaaattcattcaagagactgatgatcgtaaagaaagagaagctcgccacagcccagtttaagataaataaaaaacatgaagacgttaagcagtataaacgaaccgttatcgaagattgcaacaaggtgcaggaaaaacgcggggcagtctatgagcgcgttaccacaatcaaccaagaaatacaaaaaatcaagttgggaatccaacaactcaaggatgccgcggagagggagaagctcaagtctcaggagatctttcttaatttgaagactgcactagagaaataccacgacggcatcgaaaaagctgctgaagactcctacgctaagattgacgagaagaccgctgaattgaaacgcaaaatgttcaagatgagtacatag

SEQ ID NO: 241484 - DNA, 1395 bp, Artificial Sequence
  derived and/or modified sequence
atggagaccctttcctttcctagatataacgtggccgagatcgttatccatattcgtaataagatccttactggtgccgacgggaagaatctcactaaaaatgacctctaccccaaccccaagccagaagttctgcacatgatctacatgcgggctctgcagatagtgtatggtattcgccttgagcacttctatatgatgccagtgaactccgaggtcatgtatcctcacctgatggaaggatttctgcctttctctaatctggttacacatctggacagcttcttaccaatctgtcgagtaaacgactttgaaactgctgatatcctgtgtcccaaagctaaacgaacaagccggttcctctccggtattatcaattttatacatttccgcgaggcctgcagggagacctatatggagttcctgtggcagtacaagagttctgctgacaagatgcagcaacttaatgccgctcatcaggaggcacttatgaagctggagagactggactctgtgccagtcgaagaacaagaggaattcaagcagctctctgatggaatccaggagctccaacagtctctgaaccaggatttccaccaaaaaactattgtactgcaagaaggcaactcccagaaaaagagcaacattagtgaaaagaccaaacgcctgaatgaactcaagctctccgtggtgtccttgaaggagattcaagagtctctgaaaactaagatcgtagacagtcccgagaaactcaagaattacaaagagaaaatgaaagatactgtccagaagctgaagaacgccaggcaagaagtggtagaaaaatacgagatctatggagactcagtggactgtctaccaagctgccagctcgaggtacaattgtaccagaagaagatccaggacctgtctgataatcgggaaaagttggcctcaatacttaaggagagcttaaacctggaggaccagattgagtccgatgagagtgagctcaagaaactgaaaactgaggaaaattcattcaaaagactgatgattgtgaagaaggaaaaacttgccacagctcaattcaagattaataaaaaacacgaggatgtaaaacaatacaagagaacagtcatcgaagattgtaataaggtgcaggaaaaacgcggggccgtgtacgaacgggtgactacgatcaatcaagagattcagaagatcaaactgggcatccagcagctgaaggacgctgcagagcgagagaagttgaagagccaggaaattttcctgaacctcaaaacagcactggaaaagtaccacgacggaatcgaaaaggccgctgaagatagctatgccaaaatagacgagaagaccgccgagctcaagcgcaagatgttcaaaatgagtacttag

SEQ ID NO: 241485 - DNA, 609 bp, Artificial Sequence
  derived and/or modified sequence
atggaaaccctttctttcccccgatacaacgttgccgagattgtgatccatatccgcaataagattctgacaggagccgacggtaagaaccttaccaagaacgatctgtatccaaatcccaaaccagaagtcctccatatgatatacatgcgggctctgcagatcgtttacggcattcggttggagcacttttatatgatgccagtcaactctgaagtgatgtacccccatctgatggaaggtttcctccctttttctaatctcgttacacatctggatagctttttaccgatctgtagggtcaacgacttcgagaccgcagacattttatgcccgaaggctaagcggaccagtcgttttctctctggaatcatcaacttcattcacttccgggaggcctgtcgtgaaacctatatggagttcctgtggcagtataagtctagtgctgacaaaatgcaacaattgaacgccgcacatcaggaggccctgatgaagctggaaagacttgactccgtgcccgtggaagagcaggaagagtttaaacagctgagtgacggcatccaggagctgcaacagtccttgaatcaggacttccatcaaaaaacgtag

SEQ ID NO: 241486 - DNA, 438 bp, Artificial Sequence
  derived and/or modified sequence
atggaaacattatctttcccccggtacaacgtggccgagattgtcatccacatcagaaataaaattttgacaggggccgacgggaagaatctcaccaagaacgatttgtatccaaaccccaagcccgaagtactgcacatgatttacatgagggcactgcagatcgtgtatggtatcaggttagagcacttttatatgatgccggtgaacagcgaggtgatgtacccacacttgatggagggatttctgccatttagcaacctagtcacccacctcgattcattcctgccaatctgcagggtgaacgactttgaaacagccgatatcctctgtccaaaggctaaaagaacatccaggttcttgagcggaatcatcaacttcattcacttccgagaggcctgcagagaaacatacatggagttcctttggcagtattag

SEQ ID NO: 241487 - DNA, 666 bp, Artificial Sequence
  derived and/or modified sequence
atggagacgctgtcgttcccgagatacaatgtagccgaaatcgtgatccatatccgcaacaagatcctgactggcgcggatggcaaaaatctgacaaagaatgatctgtatcccaacccaaaacctgaggtgctacacatgatctacatgcgggcccttcagattgtttatggaatcaggcttgaacacttttacatgatgcccgttaactctgaagtcatgtatccacacctaatggagggatttcttcccttttctaacctggtgacgcacctagactcgttcctcccaatctgccgtgtgaacgactttgagaccgcggatattttgtgtccaaaggcgaaacgtacctctcgtttcctttctgggatcatcaattttatccactttcgagaggcttgtagggagacctatatggaatttctgtggcagtacaaaagctctgcagataaaatgcagcagcttaatgccgctcaccaggaggcgctgatgaaactcgaacggcttgattctgtcccagtggaggagcaagaagagtttaagcagctgagtgatggaattcaggagctgcagcagagtctcaatcaggacttccaccagaaaacgtgttgtaagcgggaaattcccaagagatcccagatcttccagcgaaaacctagcgtttag

SEQ ID NO: 241488 - DNA, 1254 bp, Artificial Sequence
  derived and/or modified sequence
atggagaccctgtccttccctcggtataatgttgccgagatcgtgattcacattagaaacaagatcctcaccggggcagatggcaagaatctgacgaagaatgatctgtatccgaacccaaaacccgaggttctgcatatgatatatatgcgggcactgcagattgtgtacgggatacggctggaacatttttatatgatgcctgtcaattcggaggtgatgtaccctcatcttatggaggggtttttgcccttttcaaacctcgtcacccacctcgactcctttctgccaatatgccgggttaatgacttcgaaactgccgacatactgtgccccaaggcgaaaagaacatccaggtttttaagcgggatcattaatttcatacattttagggaagcttgccgtgagacctacatggagttcctttggcagtacaaatccagcgccgacaagatgcaacagctgaatgccgcgcatcaggaggcgctgatgaagctggagcgcctagattcagtgcctgtggaggagcaagaagaatttaagcagttgtccgacgggatccaagagctgcagcagagcctgaatcaggacttccaccagaaaactatcgtcctgcaggagggcaactctcagaaaaaatccaacatctctgaaaagaccaaacggctgaacgagctcaagttatctgtggtttcccttaaagagatacaggaaagcctgaagacaaagatcgtagatagcccagaaaagctcaagaattacaaagaaaaaatgaaggatactgtgcaaaaactaaaaaacgccaggtctctgaatctcgaagatcagatcgaatctgatgagagcgagttgaaaaagctcaagacagaagagaacagcttcaagcgcctgatgatcgtgaaaaaggaaaaacttgcaacagcacagtttaaaatcaacaaaaagcatgaagatgtgaagcaatataaacggaccgtcattgaggattgtaataaggtgcaggagaaaaggggggccgtgtacgagcgagttactacaataaaccaggagattcaaaaaatcaaacttggaatccaacagctcaaagatgcagcggagcgggagaaattgaagtctcaggaaattttcctaaacctcaagaccgctttagaaaagtatcacgacgggatcgaaaaagctgcggaggatagttatgccaagatagatgagaagaccgctgaactgaaacggaaaatgttcaagatgtcaacatag

SEQ ID NO: 241489 - DNA, 375 bp, Artificial Sequence
  derived and/or modified sequence
atggaaacactgagtttcccaaggtataacgttgccgagattgttatccatatccgtaacaaaatcctcacaggggccgacggaaagaatctaacaaagaatgacctgtaccccaacccaaaacccgaggttttgcatatgatttacatgagagccctccagatcgtttacggcattagattggagcatttctacatgatgcccgtgaactccgaggtgatgtaccctcatctcatggaaggattccttcctttttcgaatctggtgactcatctcgacagctttctccctatttgcagggttaatgacttcgaaaccgccgacatcctatgcccaaaggcgaagagaacctcaagattcttaagcggcatttag

SEQ ID NO: 241490 - DNA, 1395 bp, Artificial Sequence
  derived and/or modified sequence
atggagaccctgtccttcccccgctacaacgtggccgagatcgtcatccacatccggaacaagatcctgaccggggctgatggcaagaacctgaccaagaatgacctgtaccccaaccccaagccagaggtgctgcacatgatctacatgagggccctgcagatcgtgtatggcatccggctggagcacttctacatgatgcctgtgaacagcgaggtgatgtacccccacctgatggagggcttcctgcccttcagcaacctggtgacccacctggacagcttcctgcccatctgccgggtgaatgactttgaaacagctgacatcctgtgccccaaggccaagaggaccagccgcttcctgagcggcatcatcaacttcatccacttccgggaggcctgccgggagacctacatggagttcctgtggcagtacaagagcagcgctgacaagatgcagcagctgaatgctgcccaccaggaggccctgatgaagctggagcggctggacagcgtgcctgtggaggagcaggaggagttcaagcagctgagtgatggcatccaggagctgcagcagagcctgaaccaggacttccaccagaagaccatcgtgctgcaggagggcaacagccagaagaagagcaacatcagcgagaagaccaagaggctgaatgagctgaagctgtctgtggtgtccctgaaggagatccaggagagcctgaagaccaagatcgtggacagccctgagaagctgaagaactacaaggagaagatgaaggacacagtgcagaagctgaagaatgcccggcaggaggtggtggagaagtatgagatctatggagacagcgtggactgcctgcccagctgccagctggaggtgcagctgtaccagaagaagatccaggacctgagtgacaaccgggagaagctggccagcatcctgaaggagagcctgaacctggaggaccagatcgagagtgatgaaagtgagctgaagaagctgaagacagaggagaacagcttcaagaggctgatgattgtgaagaaggagaagctggccacagcccagttcaagatcaacaagaagcatgaagatgtgaagcagtacaagaggacagtgattgaggactgcaacaaggtgcaggagaagagaggagctgtgtatgaaagagtgaccaccatcaaccaggagatccagaagatcaagctgggcatccagcagctgaaggatgctgctgagcgggagaagctgaagagccaggagatcttcctgaacctgaagacagccctggagaagtaccatgatggcatcgagaaggctgctgaggacagctatgccaagattgatgagaagacagctgagctgaagaggaagatgttcaagatgagcacctag

SEQ ID NO: 241491 - DNA, 609 bp, Artificial Sequence
  derived and/or modified sequence
atggagaccctgtccttcccccgctacaacgtggccgagatcgtcatccacatccggaacaagatcctgaccggggctgatggcaagaacctgaccaagaatgacctgtaccccaaccccaagccagaggtgctgcacatgatctacatgagggccctgcagatcgtgtatggcatccggctggagcacttctacatgatgcctgtgaacagcgaggtgatgtacccccacctgatggagggcttcctgcccttcagcaacctggtgacccacctggacagcttcctgcccatctgccgggtgaatgactttgaaacagctgacatcctgtgccccaaggccaagaggaccagccgcttcctgagcggcatcatcaacttcatccacttccgggaggcctgccgggagacctacatggagttcctgtggcagtacaagagcagcgctgacaagatgcagcagctgaatgctgcccaccaggaggccctgatgaagctggagcggctggacagcgtgcctgtggaggagcaggaggagttcaagcagctgagtgatggcatccaggagctgcagcagagcctgaaccaggacttccaccagaagacctag

SEQ ID NO: 241492 - DNA, 438 bp, Artificial Sequence
  derived and/or modified sequence
atggagaccctgtccttcccccgctacaacgtggccgagatcgtcatccacatccggaacaagatcctgaccggggctgatggcaagaacctgaccaagaatgacctgtaccccaaccccaagccagaggtgctgcacatgatctacatgagggccctgcagatcgtgtatggcatccggctggagcacttctacatgatgcctgtgaacagcgaggtgatgtacccccacctgatggagggcttcctgcccttcagcaacctggtgacccacctggacagcttcctgcccatctgccgggtgaatgactttgaaacagctgacatcctgtgccccaaggccaagaggaccagccgcttcctgagcggcatcatcaacttcatccacttccgggaggcctgccgggagacctacatggagttcctgtggcagtactag

SEQ ID NO: 241493 - DNA, 666 bp, Artificial Sequence
  derived and/or modified sequence
atggagaccctgtccttcccccgctacaacgtggccgagatcgtcatccacatccggaacaagatcctgaccggggctgatggcaagaacctgaccaagaatgacctgtaccccaaccccaagccagaggtgctgcacatgatctacatgagggccctgcagatcgtgtatggcatccggctggagcacttctacatgatgcctgtgaacagcgaggtgatgtacccccacctgatggagggcttcctgcccttcagcaacctggtgacccacctggacagcttcctgcccatctgccgggtgaatgactttgaaacagctgacatcctgtgccccaaggccaagaggaccagccgcttcctgagcggcatcatcaacttcatccacttccgggaggcctgccgggagacctacatggagttcctgtggcagtacaagagcagcgctgacaagatgcagcagctgaatgctgcccaccaggaggccctgatgaagctggagcggctggacagcgtgcctgtggaggagcaggaggagttcaagcagctgagtgatggcatccaggagctgcagcagagcctgaaccaggacttccaccagaagacctgctgcaagcgggagatccccaagaggagccagatcttccagaggaagcccagcgtgtag

SEQ ID NO: 241494 - DNA, 1254 bp, Artificial Sequence
  derived and/or modified sequence
atggagaccctgtccttcccccgctacaacgtggccgagatcgtcatccacatccggaacaagatcctgaccggggctgatggcaagaacctgaccaagaatgacctgtaccccaaccccaagccagaggtgctgcacatgatctacatgagggccctgcagatcgtgtatggcatccggctggagcacttctacatgatgcctgtgaacagcgaggtgatgtacccccacctgatggagggcttcctgcccttcagcaacctggtgacccacctggacagcttcctgcccatctgccgggtgaatgactttgaaacagctgacatcctgtgccccaaggccaagaggaccagccgcttcctgagcggcatcatcaacttcatccacttccgggaggcctgccgggagacctacatggagttcctgtggcagtacaagagcagcgctgacaagatgcagcagctgaatgctgcccaccaggaggccctgatgaagctggagcggctggacagcgtgcctgtggaggagcaggaggagttcaagcagctgagtgatggcatccaggagctgcagcagagcctgaaccaggacttccaccagaagaccatcgtgctgcaggagggcaacagccagaagaagagcaacatcagcgagaagaccaagaggctgaatgagctgaagctgtctgtggtgtccctgaaggagatccaggagagcctgaagaccaagatcgtggacagccctgagaagctgaagaactacaaggagaagatgaaggacacagtgcagaagctgaagaatgcccggagcctgaacctggaggaccagattgaaagtgatgagagcgagctgaagaagctgaagacagaagaaaattccttcaagaggctgatgattgtgaagaaggagaagctggccacagcccagttcaagatcaacaagaagcatgaagatgtgaagcagtacaagaggacagtgattgaggactgcaacaaggtgcaggagaagagaggagctgtgtatgagcgggtgaccaccatcaaccaggagatccagaagatcaagctgggcatccagcagctgaaggatgctgctgagcgggagaagctgaagagccaggagatcttcctgaacctgaagacagccctggagaagtaccatgatggcatcgagaaggccgcagaagattcctatgccaagattgatgagaagacagctgagctgaagaggaagatgttcaagatgagcacctag

SEQ ID NO: 241495 - DNA, 375 bp, Artificial Sequence
  derived and/or modified sequence
atggagaccctgtccttcccccgctacaacgtggccgagatcgtcatccacatccggaacaagatcctgaccggggctgatggcaagaacctgaccaagaatgacctgtaccccaaccccaagccagaggtgctgcacatgatctacatgagggccctgcagatcgtgtatggcatccggctggagcacttctacatgatgcctgtgaacagcgaggtgatgtacccccacctgatggagggcttcctgcccttcagcaacctggtgacccacctggacagcttcctgcccatctgccgggtgaatgactttgaaacagctgacatcctgtgccccaaggccaagaggaccagccgcttcctgagcggcatctag

SEQ ID NO: 241496 - DNA, 1395 bp, Artificial Sequence
  derived and/or modified sequence
atggagaccctgagcttcccccggtacaacgtggccgagatcgtgattcacatccgcaataaaattctgacaggagcagatggaaaaaacctgaccaagaatgatttgtaccctaaccccaagccagaagttctgcacatgatttatatgcgagccctgcaaatcgtctatggaatcaggttggagcacttttacatgatgccagtcaactctgaggtgatgtatccacatctgatggaagggtttctgccgttttctaatctggtgacccacctggactcttttctcccgatttgccgcgtaaatgattttgaaaccgcggacattctgtgccctaaagccaaacgcacctctaggttcctcagcggcattattaacttcattcacttccgcgaagcttgccgagagacatacatggaattcctgtggcaatataagtcttcggccgataaaatgcagcagctgaacgctgcacaccaggaagccctcatgaagcttgaacgtcttgactctgtcccagtggaggaacaagaggaattcaaacaactctccgatggaatacaggagctccagcagagcctaaatcaagacttccatcagaaaacgattgtacttcaggagggtaacagccagaagaagagtaatattagtgaaaagactaaacgacttaacgaactgaagttgtctgtggtcagcctgaaagaaatccaggaaagcctgaagacaaaaatcgtcgacagccctgagaagctcaaaaactacaaagagaagatgaaggacactgtgcagaagctgaagaacgcccggcaggaggtagtcgagaaatacgagatttacggcgactcagtcgattgtttgccaagttgccagctggaggtccagctttaccaaaaaaaaatacaggatctgagtgataatcgcgaaaaattggcatctatcctaaaggaatccctcaacctggaggaccaaatcgagagcgatgagtccgaactcaaaaagttgaagactgaggaaaattcattcaaacggctgatgatcgtcaaaaaagagaaactcgctactgctcagttcaagattaataagaaacacgaggatgtaaagcagtataagaggaccgtcattgaagattgtaataaggtacaggagaaacggggcgcagtttatgagcgggtgaccacgattaaccaggagattcagaagatcaaactgggaatccagcagttaaaagatgctgccgaaagagagaaactgaagtcccaggaaatctttttgaatctgaagacagcgctcgagaaataccatgatggaatcgagaaagcagccgaggactcatacgcaaagattgacgagaagacagccgagctgaagcggaagatgttcaaaatgagtacctag

SEQ ID NO: 241497 - DNA, 1395 bp, Artificial Sequence
  derived and/or modified sequence
atggagaccctgagcttcccccggtacaacgtggccgagatcgtgattcacattcgtaataaaattctgaccggggctgacgggaagaatctgacaaaaaacgacctataccctaatccaaaacccgaggtgctacatatgatctacatgagggccttgcagattgtctatggtatccggctggaacacttctacatgatgcctgtcaactcggaagttatgtatcctcacttgatggaaggatttttgccattctctaacctggtgacccacttagacagctttttgccaatctgtagggttaatgattttgaaaccgctgacatattatgccctaaagcaaagagaacctcacgatttctgtcaggaatcattaattttattcattttcgagaggcatgtagagaaacgtatatggaattcctgtggcagtacaagtcctccgctgacaaaatgcaacagttaaacgccgctcatcaagaagctttgatgaagctggaaaggctggactctgtccctgtggaagagcaggaagaatttaagcagctgtccgatgggattcaggaattgcagcagtccctgaaccaggattttcaccagaaaacgattgtgttgcaagaaggcaattcccaaaaaaagtccaacattagcgaaaaaactaaaaggttgaatgaactgaagctatccgttgtaagcttgaaagagatccaagagagtctgaagacaaagattgtggacagccccgaaaaattaaagaattataaggaaaagatgaaagatactgtgcagaaactgaaaaatgctaggcaggaggtggttgaaaaatacgagatctacggggactcagtcgattgtctccctagctgtcagctcgaagtgcaactgtatcagaagaagatacaggatttgtcagataaccgggaaaagttggcatctatcctaaaagagtccttgaacctggaagatcagatcgagagtgatgagtcagagcttaaaaagctcaagaccgaagagaatagctttaagcgactaatgattgtgaagaaggaaaagctggccactgcccaatttaaaatcaataagaaacacgaagacgtgaagcagtacaaaaggactgtgatcgaggactgcaacaaggtgcaggagaaaagaggagcagtatacgagcgagtgactacaataaatcaagagatccagaagataaaactcggcatacaacagttgaaggatgcagccgagagagaaaaattgaaaagccaggaaatctttctgaacctcaagacagcccttgagaaataccatgacggcattgagaaagccgccgaggattcctacgcaaaaattgatgagaagacagcagaactcaagcggaagatgttcaaaatgtcgacctag

SEQ ID NO: 241498 - DNA, 609 bp, Artificial Sequence
  derived and/or modified sequence
atggagaccctgagcttcccccggtacaacgtggccgagatcgtgattcatattcggaacaaaatcttgactggagcggatgggaaaaacctgactaaaaatgatctatatcccaaccctaagcccgaagttctgcacatgatctatatgagggccttgcagatcgtgtatgggatccgattggagcatttctatatgatgccggtaaattccgaggttatgtacccgcatttgatggagggattcttaccgttctcaaacttggttacgcatctcgacagcttcttgcccatttgtagggttaatgacttcgagactgcagatatcctgtgccccaaagcaaagagaaccagccgtttcttgtcagggatcatcaactttattcatttcagggaggcttgccgcgagacctatatggaatttttatggcagtataagtcttccgccgataagatgcaacagctcaacgcagctcaccaagaggctttgatgaagttagagaggttggactcggtcccagtcgaggagcaggaggagtttaaacaactgtctgatggtatccaggagttgcagcagtccttgaaccaggattttcatcagaaaacatag

SEQ ID NO: 241499 - DNA, 438 bp, Artificial Sequence
  derived and/or modified sequence
atggagaccctgagcttcccccggtacaacgtggccgagatcgtgattcacatacggaacaaaatcctgaccggtgccgatgggaagaacttgaccaagaatgatctgtaccctaatcctaagcctgaagtccttcacatgatttatatgagagctttacagatcgtttacggtatccgtcttgaacatttttacatgatgccagtgaacagcgaagtgatgtaccctcatctgatggaaggcttcctcccattctctaatttggtgacgcatctcgacagcttccttccgatttgcagggtgaatgacttcgagacagccgatatactttgcccaaaagcgaaacgtacttcccgcttcctgtcagggatcatcaatttcatacatttccgcgaggcatgccgagagacttacatggaatttctgtggcagtattag

SEQ ID NO: 241500 - DNA, 666 bp, Artificial Sequence
  derived and/or modified sequence
atggagaccctgagcttcccccggtacaacgtggccgagatcgtgattcacattcgtaataagattctgacaggagcagatggcaagaatcttactaagaacgacttgtaccctaatcctaagccagaagtgctccacatgatttacatgcgggccctgcagattgtgtacggaattcgactggaacatttctacatgatgcccgtgaacagcgaagtcatgtatccgcatcttatggagggcttcctgcccttcagtaatctcgtcacccatctagactcgttccttccgatctgtcgggtgaacgattttgagactgcagacattctgtgtccaaaagccaagaggaccagtaggttcttatccgggatcattaacttcatccatttccgggaggcatgtagagaaacatatatggagttcctgtggcaatataaaagttcggcagacaagatgcagcagctgaacgcggcccaccaggaggccctaatgaagttagagagactcgactctgtccctgtggaggaacaggaggaatttaagcagctctccgatggaatccaggagctgcaacagagcctgaaccaggacttccatcagaagacttgctgcaaaagggaaattcccaaaagaagccagatctttcagaggaagccatccgtgtag

SEQ ID NO: 241501 - DNA, 1254 bp, Artificial Sequence
  derived and/or modified sequence
atggagaccctgagcttcccccggtacaacgtggccgagatcgtgatccacattcgtaataagatacttacaggtgctgacggaaaaaacctgactaaaaacgacctctatccaaatcctaagcccgaggtactacacatgatctatatgcgagctctgcagatcgtttacggcatacgcctagagcatttctacatgatgccggtcaacagtgaggtcatgtatccccatttgatggaaggattcctgcccttttccaacctggtgacacacttagactcatttctgccgatatgtagagtcaacgacttcgagaccgcagacatattatgcccaaaggccaagagaaccagtaggttcttatccggcatcataaacttcatccatttccgggaagcttgccgtgagacatacatggagtttctttggcaatacaaatcaagcgccgacaaaatgcagcagttgaatgccgcacaccaagaggccctgatgaagctcgagaggctcgattctgtgcccgtggaggagcaagaggagttcaaacagctgtcagacggaatccaagaattacaacagagcttgaaccaggatttccatcaaaagacaattgtcctgcaggagggaaattcacagaagaagtccaacattagcgagaagacaaagagactgaatgagctcaagctgtctgtcgtcagtcttaaggagatccaagagtctttgaaaaccaaaattgtggatagcccagagaaactgaaaaattacaaggaaaagatgaaagatacagtccaaaagctgaagaacgcacgctcactcaatctggaagaccagattgaaagcgacgaaagtgaactgaagaaactcaaaaccgaagaaaacagcttcaaaaggctgatgatagtaaaaaaggaaaagctggccactgcgcagtttaaaattaacaagaaacatgaagacgttaaacagtataagaggacggtcatagaagactgcaacaaggtgcaggagaaacgcggcgccgtatacgaaagagtgacaaccattaatcaggagattcagaaaataaaacttggcatccagcagctgaaagatgccgctgagcgagaaaaattaaaatctcaggagatctttctgaacttgaagactgcactcgaaaaatatcacgatggtatagagaaagccgctgaagatagttacgcaaagatagacgaaaaaaccgccgaattaaagaggaaaatgtttaagatgtccacctag

SEQ ID NO: 241502 - DNA, 375 bp, Artificial Sequence
  derived and/or modified sequence
atggagaccctgagcttcccccggtacaacgtggccgagatcgtgatacacattcggaacaagattttgacaggcgctgacgggaaaaacctgaccaaaaacgacctttaccccaatcctaagccggaggtcctgcacatgatttacatgcgcgcactacaaatcgtgtatggcatccgcttagaacacttctacatgatgccagtaaacagcgaagtgatgtatccacaccttatggagggcttcctccctttcagcaacttagtgacccaccttgactcctttcttcccatttgccgggtcaacgactttgaaaccgccgacatcctgtgtcccaaagccaagcgaacatcccgatttttatctggcatctag

SEQ ID NO: 241503 - DNA, 1969 bp, Artificial Sequence
  derived and/or modified sequence
agtaggaggcggcaagtttgaaaagtgatgacggttgacgtttgctgatttttgactttgcttgtagctgctccccgaactcgccgtcttcctgtcggcggccggcactgtaggtgagcgcgagaggacggaggaaggaagcctgcagacagacgccttctccatcccaaggcgcgggcaggtgccgggacgctgggcctggcggtgttttcgtcgtgctcagcggtgggaggaggcggaagaaaccagagcctgggagattaacaggaaacttccaagatggaaactttgtctttccccagatataatgtagctgagattgtgattcatattcgcaataagatcttaacaggagctgatggtaaaaacctcaccaagaatgatctttatccaaatccaaagcctgaagtcttgcacatgatctacatgagagccttacaaatagtatatggaattcgactggaacatttttacatgatgccagtgaactctgaagtcatgtatccacatttaatggaaggcttcttaccattcagcaatttagttactcatctggactcatttttgcctatctgccgggtgaatgactttgagactgctgatattctatgtccaaaagcaaaacggacaagtcggtttttaagtggcattatcaactttattcacttcagagaagcatgccgtgaaacgtatatggaatttctttggcaatataaatcctctgcggacaaaatgcaacagttaaacgccgcacaccaggaggcattaatgaaactggagagacttgattctgttccagttgaagagcaagaagagttcaagcagctttcagatggaattcaggagctacaacaatcactaaatcaggattttcatcaaaaaacgatagtgctgcaagagggaaattcccaaaagaagtcaaatatttcagagaaaaccaagcgtttgaatgaactaaaattgtcggtggtttctttgaaagaaatacaagagagtttgaaaacaaaaattgtggattctccagagaagttaaagaattataaagaaaaaatgaaagatacggtccagaagcttaaaaatgccagacaagaagtggtggagaaatatgaaatctatggagactcagttgactgcctgccttcatgtcagttggaagtgcagttatatcaaaagaaaatacaggacctttcagataatagggaaaaattagccagtatcttaaaggagagcctgaacttggaggaccaaattgagagtgatgagtcagaactgaagaaattgaagactgaagaaaattcgttcaaaagactgatgattgtgaagaaggaaaaacttgccacagcacaattcaaaataaataagaagcatgaagatgttaagcaatacaaacgcacagtaattgaggattgcaataaagttcaagaaaaaagaggtgctgtctatgaacgagtaaccacaattaatcaagaaatccaaaaaattaaacttggaattcaacaactaaaagatgctgctgaaagggagaaactgaagtcccaggaaatatttctaaacttgaaaactgctttggagaaataccacgacggtattgaaaaggcagcagaggactcctatgctaagatagatgagaagacagctgaactgaagaggaagatgttcaaaatgtcaacctgattaacaaaattacatgtctttttgtaaatggcttgccatcttttaattttctatttagaaagaaaagttgaagcgaatggaagtatcagaagtaccaaataatgttggcttcatcagtttttatacactctcataagtagttaataagatgaatttaatgtaggcttttattaatttataattaaaataacttgtgcagctattcatgtctctactctgccccttgttgtaaatagtttgagtaaaacaaaactagttacctttgaaatatatatatttttttctgttactatca

SEQ ID NO: 241504 - DNA, 1842 bp, Artificial Sequence
  derived and/or modified sequence
ggaatggggcgggacttccagtaggaggcggcaagtttgaaaagtgatgacggttgacgtttgctgatttttgactttgcttgtagctgctccccgaactcgccgtcttcctgtcggcggccggcactgtagattaacaggaaacttccaagatggaaactttgtctttccccagatataatgtagctgagattgtgattcatattcgcaataagatcttaacaggagctgatggtaaaaacctcaccaagaatgatctttatccaaatccaaagcctgaagtcttgcacatgatctacatgagagccttacaaatagtatatggaattcgactggaacatttttacatgatgccagtgaactctgaagtcatgtatccacatttaatggaaggcttcttaccattcagcaatttagttactcatctggactcatttttgcctatctgccgggtgaatgactttgagactgctgatattctatgtccaaaagcaaaacggacaagtcggtttttaagtggcattatcaactttattcacttcagagaagcatgccgtgaaacgtatatggaatttctttggcaatataaatcctctgcggacaaaatgcaacagttaaacgccgcacaccaggaggcattaatgaaactggagagacttgattctgttccagttgaagagcaagaagagttcaagcagctttcagatggaattcaggagctacaacaatcactaaatcaggattttcatcaaaaaacgatagtgctgcaagagggaaattcccaaaagaagtcaaatatttcagagaaaaccaagcgtttgaatgaactaaaattgtcggtggtttctttgaaagaaatacaagagagtttgaaaacaaaaattgtggattctccagagaagttaaagaattataaagaaaaaatgaaagatacggtccagaagcttaaaaatgccagacaagaagtggtggagaaatatgaaatctatggagactcagttgactgcctgccttcatgtcagttggaagtgcagttatatcaaaagaaaatacaggacctttcagataatagggaaaaattagccagtatcttaaaggagagcctgaacttggaggaccaaattgagagtgatgagtcagaactgaagaaattgaagactgaagaaaattcgttcaaaagactgatgattgtgaagaaggaaaaacttgccacagcacaattcaaaataaataagaagcatgaagatgttaagcaatacaaacgcacagtaattgaggattgcaataaagttcaagaaaaaagaggtgctgtctatgaacgagtaaccacaattaatcaagaaatccaaaaaattaaacttggaattcaacaactaaaagatgctgctgaaagggagaaactgaagtcccaggaaatatttctaaacttgaaaactgctttggagaaataccacgacggtattgaaaaggcagcagaggactcctatgctaagatagatgagaagacagctgaactgaagaggaagatgttcaaaatgtcaacctgattaacaaaattacatgtctttttgtaaatggcttgccatcttttaattttctatttagaaagaaaagttgaagcgaatggaagtatcagaagtaccaaataatgttggcttcatcagtttttatacactctcataagtagttaataagatgaatttaatgtaggcttttattaatttataattaaaataacttgtgcagctattcatgtctctactctgccccttgttgtaaatagtttgagtaaaacaaaactagttacctttgaaatatatatatttttttctgttactatca

SEQ ID NO: 241505 - DNA, 1133 bp, Artificial Sequence
  derived and/or modified sequence
ggaatggggcgggacttccagtaggaggcggcaagtttgaaaagtgatgacggttgacgtttgctgatttttgactttgcttgtagctgctccccgaactcgccgtcttcctgtcggcggccggcactgtaggtgagcgcgagaggacggaggaaggaagcctgcagacagacgccttctccatcccaaggcgcgggcaggtgccgggacgctgggcctggcggtgttttcgtcgtgctcagcggtgggaggaggcggaagaaaccagagcctgggaggagctcaaactatgtagttggaaagtgtcttcatctctcgttaatgaataaattgtaactgaaattgtacttcgaaagaatgatagaatttggatattggaggaggttccaaaaggaaatactggaagtttgggaaagttaggagactaacttggagcagaaatttcattcaattattaaagggtttagaagcctagcagaaaaatttgaatttgatgtggtgggtaagattaacaggaaacttccaagatggaaactttgtctttccccagatataatgtagctgagattgtgattcatattcgcaataagatcttaacaggagctgatggtaaaaacctcaccaagaatgatctttatccaaatccaaagcctgaagtcttgcacatgatctacatgagagccttacaaatagtatatggaattcgactggaacatttttacatgatgccagtgaactctgaagtcatgtatccacatttaatggaaggcttcttaccattcagcaatttagttactcatctggactcatttttgcctatctgccgggtgaatgactttgagactgctgatattctatgtccaaaagcaaaacggacaagtcggtttttaagtggcattatcaactttattcacttcagagaagcatgccgtgaaacgtatatggaatttctttggcaatataaatcctctgcggacaaaatgcaacagttaaacgccgcacaccaggaggcattaatgaaactggagagacttgattctgttccagttgaagagcaagaagagttcaagcagctttcagatggaattcaggagctacaacaatcactaaatcaggattttcatcaaaaaacg

SEQ ID NO: 241506 - DNA, 861 bp, Artificial Sequence
  derived and/or modified sequence
tcttgagcccaaccggcatccgtcgcggttggacgtgggcttggcggaatggggcgggacttccagtaggaggcggcaagtttgaaaagtgatgacggttgacgtttgctgatttttgactttgcttgtagctgctccccgaactcgccgtcttcctgtcggcggccggcactgtaggagctcaaactatgtagttggaaagtgtcttcatctctcgttaatgaataaattgtaactgaaattgtacttcgaaagaatgatagaatttggatattggaggaggttccaaaaggaaatactggaagtttgggaaagttaggagactaacttggagcagaaatttcattcaattattaaagggtttagaagcctagcagaaaaatttgaatttgatgtggtgggtaagattaacaggaaacttccaagatggaaactttgtctttccccagatataatgtagctgagattgtgattcatattcgcaataagatcttaacaggagctgatggtaaaaacctcaccaagaatgatctttatccaaatccaaagcctgaagtcttgcacatgatctacatgagagccttacaaatagtatatggaattcgactggaacatttttacatgatgccagtgaactctgaagtcatgtatccacatttaatggaaggcttcttaccattcagcaatttagttactcatctggactcatttttgcctatctgccgggtgaatgactttgagactgctgatattctatgtccaaaagcaaaacggacaagtcggtttttaagtggcattatcaactttattcacttcagagaagcatgccgtgaaacgtatatggaatttctttggcaatat

SEQ ID NO: 241507 - DNA, 885 bp, Artificial Sequence
  derived and/or modified sequence
tgtcggcggccggcactgtagattaacaggaaacttccaagatggaaactttgtctttccccagatataatgtagctgagattgtgattcatattcgcaataagatcttaacaggagctgatggtaaaaacctcaccaagaatgatctttatccaaatccaaagcctgaagtcttgcacatgatctacatgagagccttacaaatagtatatggaattcgactggaacatttttacatgatgccagtgaactctgaagtcatgtatccacatttaatggaaggcttcttaccattcagcaatttagttactcatctggactcatttttgcctatctgccgggtgaatgactttgagactgctgatattctatgtccaaaagcaaaacggacaagtcggtttttaagtggcattatcaactttattcacttcagagaagcatgccgtgaaacgtatatggaatttctttggcaatataaatcctctgcggacaaaatgcaacagttaaacgccgcacaccaggaggcattaatgaaactggagagacttgattctgttccagttgaagagcaagaagagttcaagcagctttcagatggaattcaggagctacaacaatcactaaatcaggattttcatcaaaaaacgtgctgcaagagggaaattcccaaaagaagtcaaatatttcagagaaaaccaagcgtttgaatgaactaaaattgtcggtggtttctttgaaagaaatacaagagagtttgaaaacaaaaattgtggattctccagagaagttaaagaattataaagaaaaaatgaaagatacggtccagaagcttaaaaatgccagacaagaagtggtggagaaatatgaaatctatggagactcagt

SEQ ID NO: 241508 - DNA, 1845 bp, Artificial Sequence
  derived and/or modified sequence
aaccggcatccgtcgcggttggacgtgggcttggcggaatggggcgggacttccagtaggaggcggcaagtttgaaaagtgatgacggttgacgtttgctgatttttgactttgcttgtagctgctccccgaactcgccgtcttcctgtcggcggccggcactgtaggtgagcgcgagaggacggaggaaggaagcctgcagacagacgccttctccatcccaaggcgcgggcaggtgccgggacgctgggcctggcggtgttttcgtcgtgctcagcggtgggaggaggcggaagaaaccagagcctgggagattaacaggaaacttccaagatggaaactttgtctttccccagatataatgtagctgagattgtgattcatattcgcaataagatcttaacaggagctgatggtaaaaacctcaccaagaatgatctttatccaaatccaaagcctgaagtcttgcacatgatctacatgagagccttacaaatagtatatggaattcgactggaacatttttacatgatgccagtgaactctgaagtcatgtatccacatttaatggaaggcttcttaccattcagcaatttagttactcatctggactcatttttgcctatctgccgggtgaatgactttgagactgctgatattctatgtccaaaagcaaaacggacaagtcggtttttaagtggcattatcaactttattcacttcagagaagcatgccgtgaaacgtatatggaatttctttggcaatataaatcctctgcggacaaaatgcaacagttaaacgccgcacaccaggaggcattaatgaaactggagagacttgattctgttccagttgaagagcaagaagagttcaagcagctttcagatggaattcaggagctacaacaatcactaaatcaggattttcatcaaaaaacgatagtgctgcaagagggaaattcccaaaagaagtcaaatatttcagagaaaaccaagcgtttgaatgaactaaaattgtcggtggtttctttgaaagaaatacaagagagtttgaaaacaaaaattgtggattctccagagaagttaaagaattataaagaaaaaatgaaagatacggtccagaagcttaaaaatgccagaagcctgaacttggaggaccaaattgagagtgatgagtcagaactgaagaaattgaagactgaagaaaattcgttcaaaagactgatgattgtgaagaaggaaaaacttgccacagcacaattcaaaataaataagaagcatgaagatgttaagcaatacaaacgcacagtaattgaggattgcaataaagttcaagaaaaaagaggtgctgtctatgaacgagtaaccacaattaatcaagaaatccaaaaaattaaacttggaattcaacaactaaaagatgctgctgaaagggagaaactgaagtcccaggaaatatttctaaacttgaaaactgctttggagaaataccacgacggtattgaaaaggcagcagaggactcctatgctaagatagatgagaagacagctgaactgaagaggaagatgttcaaaatgtcaacctgattaacaaaattacatgtctttttgtaaatggcttgccatcttttaattttctatttagaaagaaaagttgaagcgaatggaagtatcagaagtaccaaataatgttggcttcatcagtttttatacactctcataagtagttaataagatgaatttaatgtaggcttttattaatttataattaaaataacttgtgcagctattcatgtctctactctgccccttgttgtaaatagtttgagtaaaacaaaactagtt

SEQ ID NO: 241509 - DNA, 567 bp, Artificial Sequence
  derived and/or modified sequence
aatgcttattcattcttcaagattcagctcaaaattcacttttctctgtgaattcgtatgtcactccatctaccacacagcctctctcagcttcctcagaaaacagccatatgaaagccaagaagagagtcctcaccaggcaccttgaacttgcacttcccagactccagaaatattaacaggaaacttccaagatggaaactttgtctttccccagatataatgtagctgagattgtgattcatattcgcaataagatcttaacaggagctgatggtaaaaacctcaccaagaatgatctttatccaaatccaaagcctgaagtcttgcacatgatctacatgagagccttacaaatagtatatggaattcgactggaacatttttacatgatgccagtgaactctgaagtcatgtatccacatttaatggaaggcttcttaccattcagcaatttagttactcatctggactcatttttgcctatctgccgggtgaatgactttgagactgctgatattctatgtccaaaagcaaaacggacaagtcggtttttaagtggcatta

SEQ ID NO: 241510 - DNA, 1395 bp, Artificial Sequence
  derived and/or modified sequence
atggagaccctgagctttcctcggtacaacgtggccgaaatcgtgatccacatcagaaacaagatcctgactggtgctgatggcaaaaacctcaccaagaatgacctctacccaaacccgaagcctgaagtccttcacatgatttatatgcgcgctctgcagattgtgtacgggattcgcctggagcacttctacatgatgccagtcaatagtgaagtcatgtatccgcaccttatggagggatttctgcctttctctaacctggtcactcaccttgattcgtttttgccaatctgccgggtcaacgacttcgagaccgcagacattttgtgtccaaaggcgaagcggactagcaggttcttgtccggcatcatcaatttcatccacttccgcgaggcttgtcgggaaacctacatggaatttttatggcaatacaagtcctccgccgataaaatgcagcagttaaacgccgctcaccaagaagcccttatgaagttggagcggctcgacagcgtgcctgtagaagaacaggaggagtttaagcagctgtctgacggaatacaggagctgcagcagagcctaaatcaggactttcaccagaagactatcgtcctgcaagagggtaacagccagaaaaaatccaacatatcagagaagactaagcgccttaacgagctaaaactatcagttgtgagtctgaaagagatacaggagagtcttaaaaccaaaatcgtagacagtcccgaaaagttgaagaactacaaggagaagatgaaagataccgtacagaagctgaagaatgctaggcaggaggtggtagagaagtatgaaatctatggcgatagtgtcgactgcttgccaagttgccaattggaggtgcagctttatcaaaaaaaaatacaggatctgtcagacaacagagagaagctagcctccatcctaaaggaatcactgaacctagaagaccagatcgaaagtgatgaaagtgaactgaagaagctcaaaacagaggagaatagctttaagcgcctcatgatcgtaaagaaagaaaaactcgccaccgcccaattcaaaattaataaaaaacacgaggacgtgaaacagtataagagaaccgtgatcgaggattgtaataaggtgcaagagaagcgaggcgcagtatacgagcgagtgaccacaattaatcaggaaattcaaaagattaaactgggaattcagcagttaaaagacgcagccgagcgcgagaaactcaagtcacaagagatcttcctgaacctcaaaactgccctggagaagtaccacgacggcattgaaaaggctgccgaggacagctatgccaagattgatgaaaaaactgctgagctaaagagaaaaatgttcaagatgtctacctag

SEQ ID NO: 241511 - DNA, 1395 bp, Artificial Sequence
  derived and/or modified sequence
atggagaccctgtcatttcctaggtataacgtggccgagatcgtgatccacattaggaacaaaatcctaacaggggcagacggtaaaaacttgactaaaaatgatctgtacccaaaccccaagcccgaagtgctgcacatgatctatatgcgagcactccagatcgtgtatggaattcggctggaacacttttatatgatgcctgtgaacagcgaggtcatgtacccacatctgatggaagggttcctgccattcagtaatctggttactcatctggacagtttcctgcctatctgtagggttaatgattttgagactgcagatattttgtgtcccaaggcaaagcgaaccagcaggtttttgtcaggaataatcaactttattcatttcagagaggcctgcagagagacgtacatggaattcttgtggcagtataaatcatccgccgataagatgcagcagttaaatgctgcccaccaggaggcactgatgaagttggaacgtttagactctgtgccagtggaagaacaagaggaatttaagcagctgtcagacggcatacaggagctgcagcagtccctgaaccaggatttccatcaaaagactattgtgctacaagaaggtaactctcagaagaagtccaacatcagtgaaaaaacaaagagactgaatgaactcaaactgtccgtggtctcattaaaggaaatacaggaatctctcaaaacaaagatagtcgacagcccagagaagcttaaaaactacaaagagaaaatgaaagataccgtccagaagctgaagaatgccagacaagaggtggtcgaaaagtacgagatttacggagacagcgtagactgccttcccagctgccagcttgaggtacagctctaccaaaaaaaaattcaggacctctctgacaacagagagaagttagcgtccatactaaaggagtctctcaatcttgaggatcagatcgaaagtgacgagtctgagctgaagaagctgaaaaccgaggaaaattccttcaaaaggcttatgatcgtgaaaaaagagaagctggctactgcccagtttaagatcaacaaaaagcacgaggatgttaagcagtataaacggacggtgatagaggactgcaataaggtgcaggaaaagcggggagcagtctatgagcgggtaaccacaatcaaccaagagatacagaagattaaactgggaatacaacagctcaaggacgcggcagaacgtgaaaagttaaaaagccaagagatattcctgaacctgaaaactgctcttgagaaatatcatgacggtattgagaaagctgcagaagactcttatgcgaagattgacgaaaagaccgcagaattgaagagaaagatgtttaaaatgtcgacctag

SEQ ID NO: 241512 - DNA, 609 bp, Artificial Sequence
  derived and/or modified sequence
atggagacactctcctttcccagatacaatgtggcggaaattgtaattcatattcggaacaaaatcttgacaggggctgacggaaaaaatctcacaaagaacgatctgtatcccaatcccaagcccgaagtgcttcacatgatctacatgcgggctctgcagatcgtatacggcattaggctagaacacttttacatgatgccggtaaacagtgaggtgatgtacccccacctcatggaaggattcctacctttcagcaatcttgtgacgcacctggattcatttcttcccatatgccgagtgaacgactttgagaccgccgacattttgtgcccaaaggcaaagcgaacctctaggtttttgtccggcatcatcaattttatccatttcagggaggcctgtcgtgaaacatacatggagttcctctggcagtataaaagcagtgcagataaaatgcagcaactgaacgccgcacaccaggaagctttaatgaagctggagagacttgactcggtacctgtggaagagcaagaggaatttaaacagctgagtgacggaattcaggaactgcagcaaagcctgaatcaggactttcatcagaagacatag

SEQ ID NO: 241513 - DNA, 438 bp, Artificial Sequence
  derived and/or modified sequence
atggaaaccctgagtttcccgagatacaatgtggccgagattgtgatccacatccgtaataagatcctcacaggagctgatggaaaaaatctaacaaagaacgacctgtaccctaatcctaagcccgaagttcttcatatgatctacatgcgtgccctacagatcgtgtatggaattcgtctggaacacttttacatgatgcctgtgaattcagaagtaatgtacccccacctgatggaggggtttctgccctttagcaacctggtgactcatcttgacagttttcttcccatctgtcgtgttaatgatttcgaaacagccgatatactgtgtccaaaggcaaagcgcacgagtcggttcctgagtggaatcataaacttcatccattttcgagaggcttgtagggaaacatacatggagttcttgtggcagtactag

SEQ ID NO: 241514 - DNA, 666 bp, Artificial Sequence
  derived and/or modified sequence
atggagactctatcatttccaaggtataacgtcgcagagatcgtgattcacattcgcaataaaatccttacaggcgcagacggtaagaatctcacaaaaaatgatctctaccccaacccgaaaccagaggttctccacatgatatacatgagggctttgcagatcgtgtatggtatacgcctagagcacttttatatgatgcccgtgaactcggaagtcatgtatccccacttgatggaaggcttcctccctttttctaatctggtgacccacctggactcctttttgccaatctgtagggttaatgactttgaaacggctgacatcttgtgcccaaaggcaaaaagaacgagcaggttcctgagtggtattattaacttcatccatttccgagaggcatgcagagaaacctacatggaattcttgtggcagtacaagtcctccgcggataagatgcagcaacttaacgctgctcatcaggaggcattaatgaagctggaaaggctggactccgtgcctgtcgaggagcaggaggagttcaaacagctgagcgacggcatccaggaactgcaacagagcctgaatcaggacttccatcagaaaacttgctgtaagcgggaaattcccaagcgttcacagattttccaaaggaaaccaagtgtctag

SEQ ID NO: 241515 - DNA, 1254 bp, Artificial Sequence
  derived and/or modified sequence
atggagacgctgtcctttcctcggtacaatgtggctgagatcgtcatacacattcgcaacaagatcctgacaggcgcagatgggaaaaacctgaccaagaacgacctctaccctaatcccaagcccgaagttctgcatatgatttatatgcgagcactgcaaattgtgtacggcattagactggagcacttctacatgatgcccgtcaactccgaagtgatgtacccacatttgatggaaggatttctccccttctccaacctcgtgacacacctcgattcattcctgccaatttgcagggtgaatgattttgaaaccgcagatattctctgccccaaggccaagcgaacatctcggtttctctcaggcatcatcaacttcatccatttcagagaggcatgcagagaaacgtacatggagttcctgtggcagtataaaagcagcgccgacaagatgcagcaactgaatgcggctcaccaagaggctcttatgaagctggaacgcctggatagcgtgccagtcgaggaacaggaagaattcaaacagctgtccgacgggatccaggaactacagcagtctctgaatcaggacttccatcagaagaccattgtactgcaggaaggcaattctcaaaagaagagtaatataagcgaaaagactaaacgcttaaacgagctaaagttgagcgtggtgagtcttaaagagatccaagagtctctaaagaccaaaattgtggactctccggaaaaactgaagaactataaagaaaagatgaaagatacagtgcagaagcttaagaacgccagatcactgaatctagaggaccagattgagtccgacgaatcagaactgaagaagctcaaaactgaagaaaattcttttaaacgcctgatgatcgtgaagaaggagaaacttgcaacggcgcagttcaaaatcaataagaagcacgaggacgtgaaacagtataagcgaacagttatcgaagattgtaataaagtgcaagaaaaacggggagccgtgtacgagagagtgacaaccatcaaccaggagattcagaagatcaagttgggcatccagcagttgaaagatgctgccgagcgggagaaattgaaatctcaggaaatcttccttaatctcaagactgctctggagaagtaccacgatggcatcgagaaagccgctgaagactcttatgcaaagatcgatgaaaagacagctgaactcaagcggaaaatgtttaaaatgtcgacctag

SEQ ID NO: 241516 - DNA, 375 bp, Artificial Sequence
  derived and/or modified sequence
atggagaccctctccttccccaggtataacgtcgccgaaatcgttatccatattcgtaacaagattctcacaggggcagacgggaagaacctgaccaagaacgacctttaccccaacccaaaacctgaagtgttacatatgatctatatgcgtgccctgcagatcgtgtacgggatcagactcgagcacttctacatgatgcccgttaacagcgaggtcatgtacccccacctgatggagggcttcctgcctttctcaaacttagttactcacctagatagttttctcccaatttgtcgggtgaacgattttgagactgctgatatcctgtgtcccaaggccaaacgaacctctaggttcttgagtggaatctag

SEQ ID NO: 241517 - DNA, 1395 bp, Artificial Sequence
  derived and/or modified sequence
atggagaccctgagcttccccagatacaacgtggccgagatcgtgatccacatcagaaacaagatcctgaccggcgccgacggcaagaacctgaccaagaacgacctgtaccccaaccccaagcccgaggtgctgcacatgatctacatgagagccctgcagatcgtgtacggcatcagactggagcacttctacatgatgcccgtgaacagcgaggtgatgtacccccacctgatggagggcttcctgcccttcagcaacctggtgacccacctggacagcttcctgcccatctgcagagtgaacgacttcgagaccgccgacatcctgtgccccaaggccaagagaaccagcagattcctgagcggcatcatcaacttcatccacttcagagaggcctgcagagagacctacatggagttcctgtggcagtacaagagcagcgccgacaagatgcagcagctgaacgccgcccaccaggaggccctgatgaagctggagagactggacagcgtgcccgtggaggagcaggaggagttcaagcagctgagcgacggcatccaggagctgcagcagagcctgaaccaggacttccaccagaagaccatcgtgctgcaggagggcaacagccagaagaagagcaacatcagcgagaagaccaagagactgaacgagctgaagctgagcgtggtgagcctgaaggagatccaggagagcctgaagaccaagatcgtggacagccccgagaagctgaagaactacaaggagaagatgaaggacaccgtgcagaagctgaagaacgccagacaggaggtggtggagaagtacgagatctacggcgacagcgtggactgcctgcccagctgccagctggaggtgcagctgtaccagaagaagatccaggacctgagcgacaacagagagaagctggccagcatcctgaaggagagcctgaacctggaggaccagatcgagagcgacgagagcgagctgaagaagctgaagaccgaggagaacagcttcaagagactgatgatcgtgaagaaggagaagctggccaccgcccagttcaagatcaacaagaagcacgaggacgtgaagcagtacaagagaaccgtgatcgaggactgcaacaaggtgcaggagaagagaggcgccgtgtacgagagagtgaccaccatcaaccaggagatccagaagatcaagctgggcatccagcagctgaaggacgccgccgagagagagaagctgaagagccaggagatcttcctgaacctgaagaccgccctggagaagtaccacgacggcatcgagaaggccgccgaggacagctacgccaagatcgacgagaagaccgccgagctgaagagaaagatgttcaagatgagcacctag

SEQ ID NO: 241518 - DNA, 609 bp, Artificial Sequence
  derived and/or modified sequence
atggagaccctgagcttccccagatacaacgtggccgagatcgtgatccacatcagaaacaagatcctgaccggcgccgacggcaagaacctgaccaagaacgacctgtaccccaaccccaagcccgaggtgctgcacatgatctacatgagagccctgcagatcgtgtacggcatcagactggagcacttctacatgatgcccgtgaacagcgaggtgatgtacccccacctgatggagggcttcctgcccttcagcaacctggtgacccacctggacagcttcctgcccatctgcagagtgaacgacttcgagaccgccgacatcctgtgccccaaggccaagagaaccagcagattcctgagcggcatcatcaacttcatccacttcagagaggcctgcagagagacctacatggagttcctgtggcagtacaagagcagcgccgacaagatgcagcagctgaacgccgcccaccaggaggccctgatgaagctggagagactggacagcgtgcccgtggaggagcaggaggagttcaagcagctgagcgacggcatccaggagctgcagcagagcctgaaccaggacttccaccagaagacctag

SEQ ID NO: 241519 - DNA, 438 bp, Artificial Sequence
  derived and/or modified sequence
atggagaccctgagcttccccagatacaacgtggccgagatcgtgatccacatcagaaacaagatcctgaccggcgccgacggcaagaacctgaccaagaacgacctgtaccccaaccccaagcccgaggtgctgcacatgatctacatgagagccctgcagatcgtgtacggcatcagactggagcacttctacatgatgcccgtgaacagcgaggtgatgtacccccacctgatggagggcttcctgcccttcagcaacctggtgacccacctggacagcttcctgcccatctgcagagtgaacgacttcgagaccgccgacatcctgtgccccaaggccaagagaaccagcagattcctgagcggcatcatcaacttcatccacttcagagaggcctgcagagagacctacatggagttcctgtggcagtactag

SEQ ID NO: 241520 - DNA, 666 bp, Artificial Sequence
  derived and/or modified sequence
atggagaccctgagcttccccagatacaacgtggccgagatcgtgatccacatcagaaacaagatcctgaccggcgccgacggcaagaacctgaccaagaacgacctgtaccccaaccccaagcccgaggtgctgcacatgatctacatgagagccctgcagatcgtgtacggcatcagactggagcacttctacatgatgcccgtgaacagcgaggtgatgtacccccacctgatggagggcttcctgcccttcagcaacctggtgacccacctggacagcttcctgcccatctgcagagtgaacgacttcgagaccgccgacatcctgtgccccaaggccaagagaaccagcagattcctgagcggcatcatcaacttcatccacttcagagaggcctgcagagagacctacatggagttcctgtggcagtacaagagcagcgccgacaagatgcagcagctgaacgccgcccaccaggaggccctgatgaagctggagagactggacagcgtgcccgtggaggagcaggaggagttcaagcagctgagcgacggcatccaggagctgcagcagagcctgaaccaggacttccaccagaagacctgctgcaagagagagatccccaagagaagccagatcttccagagaaagcccagcgtgtag

SEQ ID NO: 241521 - DNA, 1254 bp, Artificial Sequence
  derived and/or modified sequence
atggagaccctgagcttccccagatacaacgtggccgagatcgtgatccacatcagaaacaagatcctgaccggcgccgacggcaagaacctgaccaagaacgacctgtaccccaaccccaagcccgaggtgctgcacatgatctacatgagagccctgcagatcgtgtacggcatcagactggagcacttctacatgatgcccgtgaacagcgaggtgatgtacccccacctgatggagggcttcctgcccttcagcaacctggtgacccacctggacagcttcctgcccatctgcagagtgaacgacttcgagaccgccgacatcctgtgccccaaggccaagagaaccagcagattcctgagcggcatcatcaacttcatccacttcagagaggcctgcagagagacctacatggagttcctgtggcagtacaagagcagcgccgacaagatgcagcagctgaacgccgcccaccaggaggccctgatgaagctggagagactggacagcgtgcccgtggaggagcaggaggagttcaagcagctgagcgacggcatccaggagctgcagcagagcctgaaccaggacttccaccagaagaccatcgtgctgcaggagggcaacagccagaagaagagcaacatcagcgagaagaccaagagactgaacgagctgaagctgagcgtggtgagcctgaaggagatccaggagagcctgaagaccaagatcgtggacagccccgagaagctgaagaactacaaggagaagatgaaggacaccgtgcagaagctgaagaacgccagaagcctgaacctggaggaccagatcgagagcgacgagagcgagctgaagaagctgaagaccgaggagaacagcttcaagagactgatgatcgtgaagaaggagaagctggccaccgcccagttcaagatcaacaagaagcacgaggacgtgaagcagtacaagagaaccgtgatcgaggactgcaacaaggtgcaggagaagagaggcgccgtgtacgagagagtgaccaccatcaaccaggagatccagaagatcaagctgggcatccagcagctgaaggacgccgccgagagagagaagctgaagagccaggagatcttcctgaacctgaagaccgccctggagaagtaccacgacggcatcgagaaggccgccgaggacagctacgccaagatcgacgagaagaccgccgagctgaagagaaagatgttcaagatgagcacctag

SEQ ID NO: 241522 - DNA, 375 bp, Artificial Sequence
  derived and/or modified sequence
atggagaccctgagcttccccagatacaacgtggccgagatcgtgatccacatcagaaacaagatcctgaccggcgccgacggcaagaacctgaccaagaacgacctgtaccccaaccccaagcccgaggtgctgcacatgatctacatgagagccctgcagatcgtgtacggcatcagactggagcacttctacatgatgcccgtgaacagcgaggtgatgtacccccacctgatggagggcttcctgcccttcagcaacctggtgacccacctggacagcttcctgcccatctgcagagtgaacgacttcgagaccgccgacatcctgtgccccaaggccaagagaaccagcagattcctgagcggcatctag

SEQ ID NO: 241523 - protein, 525 aa, Artificial Sequence
  derived and/or modified sequence
MLFLSFHAGSWESWCCCCLIPADRPWDRGQHWQLEMADTRSVHETRFEAAVKVIQSLPKNGSFQPTNEMMLKFYSFYKQATEGPCKLSRPGFWDPIGRYKWDAWSSLGDMTKEEAMIAYVEEMKKIIETMPMTEKVEELLRVIGPFYEIVEDKKSGRSSDITSDLGNVLTSTPNAKTVNGKAESSDSGAESEEEEAQEEVKGAEQSDNDKKMMKKSADHKNLEVIVTNGYDKDGFVQDIQNDIHASSSLNGRSTEEVKPIDENLGQTGKSAVCIHQDINDDHVEDVTGIQHLTSDSDSEVYCDSMEQFGQEESLDSFTSNNGPFQYYLGGHSSQPMENSGFREDIQVPPGNGNIGNMQVVAVEGKGEVKHGGEDGRNNSGAPHREKRGGETDEFSNVRRGRGHRMQHLSEGTKGRQVGSGGDGERWGSDRGSRGSLNEQIALVLMRLQEDMQNVLQRLQKLETLTALQAKSSTSTLQTAPQPTSQRPSWWPFEMSPGVLTFAIIWPFIAQWLVYLYYQRRRRKLN

SEQ ID NO: 241524 - DNA, 1578 bp, Artificial Sequence
  derived and/or modified sequence
atgctgttcctgagcttccacgccggcagctgggagagctggtgctgctgctgcctgatccccgccgacagaccctgggacagaggccagcactggcagctggagatggccgacaccagaagcgtgcacgagaccagattcgaggccgccgtgaaggtgatccagagcctgcccaagaacggcagcttccagcccaccaacgagatgatgctgaagttctacagcttctacaagcaggccaccgagggcccctgcaagctgagcagacccggcttctgggaccccatcggcagatacaagtgggacgcctggagcagcctgggcgacatgaccaaggaggaggccatgatcgcctacgtggaggagatgaagaagatcatcgagaccatgcccatgaccgagaaggtggaggagctgctgagagtgatcggccccttctacgagatcgtggaggacaagaagagcggcagaagcagcgacatcaccagcgacctgggcaacgtgctgaccagcacccccaacgccaagaccgtgaacggcaaggccgagagcagcgacagcggcgccgagagcgaggaggaggaggcccaggaggaggtgaagggcgccgagcagagcgacaacgacaagaagatgatgaagaagagcgccgaccacaagaacctggaggtgatcgtgaccaacggctacgacaaggacggcttcgtgcaggacatccagaacgacatccacgccagcagcagcctgaacggcagaagcaccgaggaggtgaagcccatcgacgagaacctgggccagaccggcaagagcgccgtgtgcatccaccaggacatcaacgacgaccacgtggaggacgtgaccggcatccagcacctgaccagcgacagcgacagcgaggtgtactgcgacagcatggagcagttcggccaggaggagagcctggacagcttcaccagcaacaacggccccttccagtactacctgggcggccacagcagccagcccatggagaacagcggcttcagagaggacatccaggtgccccccggcaacggcaacatcggcaacatgcaggtggtggccgtggagggcaagggcgaggtgaagcacggcggcgaggacggcagaaacaacagcggcgccccccacagagagaagagaggcggcgagaccgacgagttcagcaacgtgagaagaggcagaggccacagaatgcagcacctgagcgagggcaccaagggcagacaggtgggcagcggcggcgacggcgagagatggggcagcgacagaggcagcagaggcagcctgaacgagcagatcgccctggtgctgatgagactgcaggaggacatgcagaacgtgctgcagagactgcagaagctggagaccctgaccgccctgcaggccaagagcagcaccagcaccctgcagaccgccccccagcccaccagccagagacccagctggtggcccttcgagatgagccccggcgtgctgaccttcgccatcatctggcccttcatcgcccagtggctggtgtacctgtactaccagagaagaagaagaaagctgaactag

SEQ ID NO: 241525 - DNA, 3918 bp, Artificial Sequence
  derived and/or modified sequence
gggagggcacggactgacagacggactccggcggaatggggggtgtggctgctccgccagggtccccagggtgggagagcggctccgcggccaccgatgcccggaccccctctgtcttctgctagacatgctcttcctctcgtttcatgcaggctcttgggaaagctggtgctgctgctgcctgattcccgccgacagaccttgggaccggggccaacactggcagctggagatggcggacacgagatccgtgcacgagactaggtttgaggcggccgtgaaggtgatccagagtttgccgaagaatggttcattccagccaacaaatgaaatgatgcttaaattttatagcttctataagcaggcaactgaaggaccctgtaaactttcaaggcctggattttgggatcctattggaagatataaatgggatgcttggagttcactgggtgatatgaccaaagaggaagccatgattgcatatgttgaagaaatgaaaaagattattgaaactatgccaatgactgagaaagttgaagaattgctgcgtgtcataggtccattttatgaaattgtcgaggacaaaaagagtggcaggagttctgatataacctcagatcttggtaatgttctcacttctactccaaacgccaaaaccgttaatggtaaagctgaaagcagtgacagtggagccgagtctgaggaagaagaggcccaagaagaagtgaaaggagcagaacaaagtgataatgataagaaaatgatgaagaagtcagcagaccataagaatttggaagtcattgtcactaatggctatgataaagatggctttgttcaggatatacagaatgacattcatgccagttcttccctgaatggcagaagcactgaagaagtaaagcccattgatgaaaacttggggcaaactggaaaatctgctgtttgcattcaccaagatataaatgatgatcatgttgaagatgttacaggaattcagcatttgacaagcgattcagacagtgaagtttactgtgattctatggaacaatttggacaagaagagtctttagacagctttacgtccaacaatggaccatttcagtattacttgggtggtcattccagtcaacccatggaaaattctggatttcgtgaagatattcaagtacctcctggaaatggcaacattgggaatatgcaggtggttgcagttgaaggaaaaggtgaagtcaagcatggaggagaagatggcaggaataacagcggagcaccacaccgggagaagcgaggcggagaaactgacgaattctctaatgttagaagaggaagaggacataggatgcaacacttgagcgaaggaaccaagggccggcaggtgggaagtggaggtgatggggagcgctggggctccgacagagggtcccgaggcagcctcaatgagcagatcgccctcgtgctgatgagactgcaggaggacatgcagaatgtccttcagagactgcagaaactggaaacgctgactgctttgcaggcaaaatcatcaacatcaacattgcagactgctcctcagcccacctcacagagaccatcttggtggcccttcgagatgtctcctggtgtgctaacgtttgccatcatatggccttttattgcacagtggttggtgtatttatactatcaaagaaggagaagaaaactgaactgaggaaaatggtgttttcctcaagaagactactggaactggatgacctcagaatgaactggattgtggtgttcacaagaaaatcttagtttgtgatgattacattgctttttgttgtccagtagtttagtttgtgtacatatatacacatatatattttgcactacacaaacgataacattttaaggactaatattgctgatacttgaataatcaatctctactaggttataagtagtatacacagatttaccctgcccttgaacttgaaggacattaaattattaatgatcatttggtaacatgtttacctgattatcttccatagagtaacataagctgcttttcaaaggtaccattgtgataatgagatcaaatttataagttattatttttaattttctaaattaaataaaagaaagaatgcaaaccaggagtgaatttcaaatgagatgtaatcgactttatatcttagtcacggagttgccatggcatgtagtagaaaaccacaggaagaatggtcatattcactttgtgggctgcccataatctttcttgggcattcacaactcttgagtttggtgttcaggcatcattattaaaaagtggagtcctatgtaccagactgagtttttacaaatgatttgcaggctagacataacccactgatggaaatggtgaagaatgagcttcatgtaggtttaaaagtgtattctgagcctgtagatgattaatcaggtttttattcaatcatataaatgtattcctttgtaatcatttttgtttaactgaggatatctagtgtctgcttcatagggtgctttgaaatataaaatgaaaacttatttatactgtttttacaacagtcaaaaaggaaacacacgaaaatcacttttctgcaactgatgaactatatagactggactcttaacctcttagtgcctcagtttttccttcggggtatactattttagatacacctacttcacaggagtactggagggatttgcaagctaacgggccaaatgcttccataggaataaggcatgcccagctaacagaaatttaagtccctcttccccacctctctcatctagaccaaaaagaagactacaatttagatccttggagacttttcctgtatgccttccaaaacttcctgctcacttagatgtaccttgtgctttgaagatttctttgatgcagtctttgtaacaaataatttttttttttaaatggagtttctctcttgttgcccaggctggagggcaatggcgtgatcttggctcactgcaacttccacctcctgggttcaagtgattctcctgcctcactcccaagtagctgggattacaggcatgcaccaccatgcctggctaattttgtatttttagtagagacggggtttctccatgttggtaaggctgatctcaaactcccaacctcaggtgatctgcctgcctcggcctcccaaagtgctgggattagaggcgtgagccactgcacctggcctgtagcaaataatttttaagcattctcaagatgtatgatgttgggtttaacatcatatgttcacagtgttttaaataagaaataatctgtctttagtatacagaatggttctttgtttgcctgaaaagtataagaatacaatttacttttcccaaactctttttccttatttttttctttcaaataactttaattatttaatcccatactgattaaaatatgtctgtctaaagggatctactactatttgcttttaaaaaagtgttccctatttatttaggaaaaagtgaagcaagcaactgaatttatatgtaaaaataacatttagacctgtggatcaaagattattttcaaaaatgagatatcaatttggtatcagtaaaaagtgtcttttctcttagtatataaataaataaaatgcaaattaagagtgtaagcagttgtgaatcattacaagcagtctgggataactaactcctagggataaccatttctatcctgttccaaagtcttattttatagtttgaaaagcactttgcacacagttcttgtatataaaagtaaagatgtaattataggatatagtgttcctgctttgtttaataagaacctcatttaaacttgacagctatggtatttttttaatgataacttcttttctgtttattgtaaaactaagttaaaaataaaaggttaatgagaaa

SEQ ID NO: 241526 - DNA, 1578 bp, Artificial Sequence
  derived and/or modified sequence
atgctctttcttagtttccatgccggctcttgggagtcttggtgttgttgttgtcttatccctgctgacaggccctgggacagaggccaacattggcagttggagatggccgatacccggtccgttcacgagacgagattcgaggctgccgtcaaggttatccagtccctgccgaagaatggcagctttcagccgacaaacgaaatgatgttgaagttctacagtttttataaacaagccactgaggggccctgcaaactttcacgaccaggattttgggaccctatcggccggtacaagtgggatgcatggagcagtctgggggatatgaccaaagaggaagccatgattgcctacgtcgaagagatgaaaaaaatcatagagacaatgcccatgaccgaaaaagtcgaggaacttttgcgcgtgattgggcccttttatgagatcgtggaggataagaaaagtggtcgcagtagtgacatcacaagcgatctgggaaacgtattaacttcaactcctaacgcaaagaccgtcaacggtaaagctgagtccagcgatagcggagcagagagtgaagaggaagaggcccaggaagaggtcaaaggagcagaacagagcgacaacgacaagaagatgatgaagaaatctgctgaccacaagaacttagaagttatcgtgacaaacgggtacgacaaggacgggttcgttcaggatattcaaaatgatattcatgcatcgagctctctgaacggccgatccaccgaggaagtcaagccaatagacgagaacctagggcaaaccggtaaaagcgccgtttgtattcaccaggacattaacgatgaccacgtcgaggatgttactggaatccagcacctgacctccgacagcgatagcgaggtttactgtgacagcatggagcagttcggacaggaggagtccctcgactcctttacaagcaataacggacccttccagtactatctggggggtcattcaagccaacctatggaaaactctggatttagagaggacatccaggtaccgccagggaacggcaacataggcaacatgcaggtggtggccgtggaaggaaagggtgaggtgaagcatggcggcgaagatggtaggaataactccggagctcctcatcgggagaaacgcggtggcgagactgacgaattcagtaatgtgagaagaggaagaggccaccggatgcagcacctgtcagagggaactaagggccgccaagttgggtcaggcggggacggagagagatggggttcagatagaggttccaggggaagcctgaatgagcagattgcccttgttctcatgagattacaggaagatatgcagaatgtcctccagcgactgcagaaactggaaaccctcactgctttacaggctaagagctctacctccactctgcagactgctccccaaccaacaagccaacggccatcctggtggccctttgaaatgtcgcctggagtccttaccttcgcaataatctggccgtttatagctcagtggttagtttacttgtattaccagagaagaaggagaaaactgaattag

SEQ ID NO: 241527 - DNA, 1578 bp, Artificial Sequence
  derived and/or modified sequence
atgctgttcctgtccttccacgccggctcctgggagagctggtgctgctgctgcctgatcccagctgaccggccctgggaccggggccagcactggcagctggagatggctgacaccaggtctgtgcatgagaccaggtttgaagctgctgtgaaggtgatccagagcctgcccaagaatggcagcttccagcccaccaatgagatgatgctgaagttctacagcttctacaagcaggccacagagggcccctgcaagctgagccggcccggcttctgggaccccatcggccgctacaagtgggatgcctggagcagcctgggggacatgaccaaggaggaggccatgattgcctacgtggaggagatgaagaagatcatcgagaccatgcccatgacagagaaggtggaggagctgctgcgggtgattggccccttctatgaaattgtggaggacaagaagagcggccgcagcagtgacatcaccagtgacctgggcaatgtgctgaccagcaccccaaatgccaagacagtgaatggcaaggccgagagcagtgacagcggggctgagagcgaggaggaggaggcccaggaggaggtgaagggagctgagcagagcgacaatgacaagaagatgatgaagaagtctgctgaccacaagaacctggaggtgattgtgaccaacggctatgacaaggatggctttgtgcaggacatccagaatgacatccacgccagcagcagcctgaatggccgcagcacagaggaggtgaagcccattgatgagaacctgggccagacaggcaagtctgctgtgtgcatccaccaggacatcaatgatgaccacgtggaggatgtgacaggcatccagcacctgaccagtgacagcgacagcgaggtgtactgtgacagcatggagcagtttggccaggaggagagcctggacagcttcaccagcaacaacggccccttccagtactacctgggcggccacagcagccagcccatggagaacagcggcttccgggaggacatccaggtgcccccaggaaatggaaacatcggcaacatgcaggtggtggccgtggagggcaaaggagaggtgaagcacggcggagaagatggcaggaacaacagcggggccccccaccgggagaagaggggcggggagacagatgagttcagcaatgtgcggcggggccggggccacaggatgcagcacctgtctgagggcaccaagggccggcaggtgggcagcggaggagatggagagcgctggggcagtgaccggggcagccggggcagcctgaatgagcagatcgccctggtgctgatgaggctgcaggaggacatgcagaatgtgctgcagaggctgcagaagctggagaccctgacagccctgcaggccaagagcagcaccagcaccctgcagacagccccccagcccaccagccagaggcccagctggtggccctttgagatgagccctggggtgctgacctttgccatcatctggcccttcatcgcccagtggctggtgtacctgtactaccagaggagaagaaggaagctgaactag

SEQ ID NO: 241528 - DNA, 1578 bp, Artificial Sequence
  derived and/or modified sequence
atgctgttcctgagcttccacgccggcagctgggagagctggtgctgttgctgtctcatccctgccgatagaccgtgggaccgtggtcagcactggcaactagagatggcagataccaggtcagtccatgaaactaggtttgaggccgcagtgaaggttatacagtcgcttcctaagaatggaagttttcagcctacaaatgagatgatgcttaaattctacagtttctataagcaggcgactgagggtccctgcaagttatccagacccggcttctgggaccccatcggtcggtataagtgggacgcatggagctccctgggcgatatgacaaaagaggaagccatgattgcctatgtcgaggagatgaaaaaaattattgagactatgcccatgacagagaaagtcgaagagctgctccgtgtgatcggccccttttacgagatcgtggaagataagaagtctggccggtcttccgacattacatcagaccttggcaatgtgctcactagtacacctaatgcaaagaccgtgaatggcaaagcggaaagctccgactcaggtgccgaaagcgaggaagaagaagcacaggaggaagtaaaaggtgcagaacagtccgacaacgataagaagatgatgaagaagtcagccgatcacaaaaacttggaagtcattgtcaccaacggttatgacaaagatggttttgtccaagacattcagaatgatattcacgcaagctctagcttaaacgggaggtcaacagaggaagtgaagccgatagatgagaacctcggtcagaccggaaaaagtgcggtctgcatccaccaggatattaatgacgaccacgtcgaagatgttaccggaatccagcatctgacctccgatagcgatagcgaggtgtattgcgatagcatggagcagtttggccaggaggagtccctggacagcttcacatcgaacaacgggccttttcaatattacctgggaggccacagctcacagccaatggagaacagtggcttcagggaggatatacaggtgccacccgggaatggcaatataggcaatatgcaggttgtggctgttgagggtaagggggaggtaaaacatggaggggaggacggccgcaataacagtggcgcacctcaccgggagaagagagggggcgagaccgacgagttttccaatgtgagaagggggcgcggccataggatgcagcatctatccgagggcacaaagggtcggcaggtagggagcggtggggacggggagagatggggaagcgacagaggcagccgtgggtcccttaatgaacagatcgctttagtgctaatgagactacaggaagatatgcagaatgtactgcagcgtctgcaaaaacttgagacactcacagccctgcaggccaaaagcagtacatccaccttgcaaaccgctcctcagccaacatcccagcggcccagctggtggcctttcgaaatgtcacctggcgtgcttacattcgcaatcatctggccttttattgcccagtggctcgtttacctgtactaccagcgtaggaggaggaagctgaactag

SEQ ID NO: 241529 - DNA, 1578 bp, Artificial Sequence
  derived and/or modified sequence
atgctgttcctgtcatttcatgcaggttcctgggagtcatggtgttgctgctgcctgattccagccgacaggccctgggatcgcggacagcattggcagcttgaaatggccgatacgcgctctgtacacgagacccggttcgaggcagctgttaaagtgattcaatccctgcctaagaatggcagtttccagccaactaatgaaatgatgcttaaattttatagcttttacaagcaggccacggagggcccttgcaagttatcacggccagggttttgggatcctatcggcaggtataagtgggacgcttggtcctccctaggagacatgactaaagaagaagctatgattgcatatgtggaggagatgaagaagatcatcgagacaatgccgatgaccgagaaggtggaagaactcctgagggtgataggacctttttacgaaattgtagaggataaaaaaagcggtaggagttctgacatcacatctgatctgggaaatgtcttaactagcacacccaatgctaagactgtgaatggtaaagcggagtcatctgacagtggggctgagagtgaagaggaggaagcccaggaggaggtcaagggtgcagaacagtctgataatgacaagaagatgatgaagaagtctgccgatcacaagaatctggaggtcattgtgaccaatgggtatgataaggacgggttcgtacaggatattcagaacgacattcacgccagctcctctttaaacgggcgttcaaccgaggaggtcaaacccatcgacgaaaacctaggccagactggaaagagtgcggtgtgcatccatcaggatataaacgatgaccacgttgaggatgtgactggaatacagcatctcaccagcgacagtgactcagaagtgtattgtgattctatggaacaattcggccaggaggaatcccttgacagtttcacttctaataatggtccttttcagtactacctgggcggacactcttcacaacctatggaaaactcagggtttcgggaggatatccaggtgccacccggtaacggcaatatcggtaatatgcaggtagtcgcggtggaaggcaagggggaggtaaaacacggaggtgaagacggcaggaataactccggggctccgcaccgggaaaagcgtgggggagagactgatgagtttagtaatgtgaggaggggaagaggtcaccggatgcagcacctttcagaaggcaccaaaggtcgtcaagtgggttctggcggtgacggagagcgctggggatctgatagaggatcacgcggatccctcaacgagcagattgccttagtcctgatgagactgcaggaggacatgcagaatgtgcttcagagactgcagaaattggaaaccctgacagccctccaagctaagtcttccaccagcactttacagacagctccacagcccacgagccagaggcccagctggtggccttttgagatgagtcccggagtactaacatttgcgatcatctggccatttatagctcaatggctcgtgtacctctattaccagaggagacggcgtaagctcaactag

SEQ ID NO: 241530 - protein, 1062 aa, Artificial Sequence
  derived and/or modified sequence
MLKPQPLQQPSQPQQPPPTQQAVARRPPGGTSPPNGGLPGPLATSAAPPGPPAAASPCLGPVAAAGSGLRRGAEGILAPQPPPPQQHQERPGAAAIGSARGQSTGKGPPQSPVFEGVYNNSRMLHFLTAVVGSTCDVKVKNGTTYEGIFKTLSSKFELAVDAVHRKASEPAGGPRREDIVDTMVFKPSDVMLVHFRNVDFNYATKDKFTDSAIAMNSKVNGEHKEKVLQRWEGGDSNSDDYDLESDMSNGWDPNEMFKFNEENYGVKTTYDSSLSSYTVPLEKDNSEEFRQRELRAAQLAREIESSPQYRLRIAMENDDGRTEEEKHSAVQRQGSGRESPSLASREGKYIPLPQRVREGPRGGVRCSSSRGGRPGLSSLPPRGPHHLDNSSPGPGSEARGINGGPSRMSPKAQRPLRGAKTLSSPSNRPSGETSVPPPPAVGRMYPPRSPKSAAPAPISASCPEPPIGSAVPTSSASIPVTSSVSDPGVGSISPASPKISLAPTDVKELSTKEPGRTLEPQELARIAGKVPGLQNEQKRFQLEELRKFGAQFKLQPSSSPENSLDPFPPRILKEEPKGKEKEVDGLLTSEPMGSPVSSKTESVSDKEDKPPLAPSGGTEGPEQPPPPCPSQTGSPPVGLIKGEDKDEGPVAEQVKKSTLNPNAKEFNPTKPLLSVNKSTSTPTSPGPRTHSTPSIPVLTAGQSGLYSPQYISYIPQIHMGPAVQAPQMYPYPVSNSVPGQQGKYRGAKGSLPPQRSDQHQPASAPPMMQAAAAAGPPLVAATPYSSYIPYNPQQFPGQPAMMQPMAHYPSQPVFAPMLQSNPRMLTSGSHPQAIVSSSTPQYPSAEQPTPQALYATVHQSYPHHATQLHAHQPQPATTPTGSQPQSQHAAPSPVQHQAGQAPHLGSGQPQQNLYHPGALTGTPPSLPPGPSAQSPQSSFPQPAAVYAIHHQQLPHGFTNMAHVTQAHVQTGITAAPPPHPGAPHPPQVMLLHPPQSHGGPPQGAVPQSGVPALSASTPSPYPYIGHPQGEQPGQAPGFPGGADDRIPPLPPPGELKIVLAAT

SEQ ID NO: 241531 - DNA, 3189 bp, Artificial Sequence
  derived and/or modified sequence
atgctgaagccccagccgcttcagcagcctagtcagccccagcagccccctccaactcagcaggccgtggctagacgccccccgggaggtacctcacctcccaacggtggtcttccgggcccactcgctacttctgcagcaccaccgggaccgcccgccgcggcttctccttgcctgggcccagtggctgctgcaggatctggcttaaggcgaggggccgagggcatactggccccccagcccccccctccccagcagcaccaggagcggcccggagccgcagccatcggatcggcacgcgggcagagcacgggaaagggccctccgcagtcacccgtcttcgagggagtctacaataactctcggatgcttcactttctaaccgccgtcgtgggctcaacctgcgacgttaaggtcaaaaacggtactacttacgaaggaatatttaagaccctcagcagcaagttcgagcttgcagtggacgccgtgcaccgcaaagcttctgagcccgcgggtggccctaggcgggaggatatcgtcgacacaatggtgtttaagccctccgacgttatgctggtccacttcagaaacgtggactttaattacgctacaaaggataagttcaccgactccgccatcgcaatgaactctaaagtcaatggggagcataaggaaaaagtcttgcagagatgggaaggaggggacagcaactctgatgactatgacctggagtccgatatgtcaaatgggtgggacccaaatgagatgtttaaatttaatgaggagaactatggggtgaaaaccacatacgatagtagcctctccagttacacagtgcccttggaaaaggacaattcagaggagtttcgccagagagagctccgcgccgcccagctggcacgtgagatcgagtcctcaccccagtaccggctcaggatagccatggagaacgatgatggtaggacagaagaagagaagcactccgctgtgcagcgtcaaggcagcggcagggagagcccctccttggcctcacgggaaggcaagtacattcccctgccccaaagggtccgtgaaggtccacggggtggtgttaggtgtagctctagccgtggcggacgtcctggcctgtctagcctgccccctcgaggacctcatcacctggacaacagctcccctggtcccggtagcgaagcaaggggcatcaatggggggccatctaggatgagtcccaaagcacagagacctctgcgcggggctaagacactgagctctccatccaatcgcccgtcaggcgaaacctccgttcccccaccaccggccgttggccgcatgtaccctccccgcagccccaagtctgccgctcctgccccgatttccgcaagctgccctgagccccccattggttctgccgtgcccacaagctctgcctctattcccgtcaccagttctgtgtcagaccccggtgttggatcgatttctcctgcctccccgaagatttccttggcaccaacggatgtcaaagaactttctacaaaggaaccggggagaacactggagccgcaagagctggcgcgtatcgccggcaaggtgccagggctgcaaaatgaacagaagagatttcagctggaagagctgcgaaaattcggagcccagtttaaactccagccctcatcctctcccgagaactccttggatcccttcccaccacgtatcctcaaggaggagccgaaagggaaggagaaagaggtagatggccttctgactagcgagcccatgggcagccccgtgagcagcaaaacagaatcagtatctgacaaggaagacaaaccgcccttggcaccatccggggggaccgaaggccccgagcagcccccccctccctgcccttcgcaaaccgggagcccgcccgtgggcttaattaaaggggaggacaaagatgaagggcctgtggcggaacaggtgaaaaagagcacgctcaatcccaatgcaaaagagtttaaccccacgaagcccctcctctccgttaacaaatcaacgtccactcccacctcccctggccctaggacccactccaccccatcaatcccggtgctgactgccggccagtccggtctttactccccacagtacatttcatatatcccccagatacacatgggcccagccgttcaggctccccagatgtatccatacccagtctccaacagtgtaccaggacagcagggcaagtacagaggggcaaagggttctttgcccccgcaacgatcagaccagcaccagcccgcaagtgcacctcctatgatgcaggccgccgcagctgccggaccccctctcgttgctgcgactccatactctagctacatcccatataacccgcagcaatttcccggtcagccggctatgatgcagcccatggctcactatccctctcaacctgtgttcgccccgatgcttcaatcaaacccccgaatgctgaccagtgggtctcacccccaggccattgtgtctagtagcaccccacaatacccttccgcagagcagcctaccccacaagccctgtacgcaacagtgcaccaaagctatcctcaccacgccactcaactgcacgctcaccagccacagccggcaactacgccaactgggtcccagcctcagagccagcatgccgccccctcaccagtgcagcaccaggccgggcaggctccacatttagggtccggacagccccagcagaacctgtaccacccgggtgccctgactgggactcccccttcactgccacccgggccctctgcccagagcccacagagcagtttcccacaaccagctgctgtgtacgccatccatcatcagcagcttccccacggcttcacaaacatggcacacgtgacccaagcccatgttcagaccggaatcaccgccgctcctcccccacaccccggagccccgcacccgccccaagtgatgctcctgcacccaccacaatctcatggaggtccaccccagggcgctgtgccccagtcgggagttcctgctctgtccgccagcaccccttctccgtacccatacatcggccacccccagggtgaacagcccggtcaggcacccggcttcccaggaggcgccgacgacaggattcctccactcccaccgcccggtgaacttaagattgtcctggccgcaacgtag

SEQ ID NO: 241532 - DNA, 3189 bp, Artificial Sequence
  derived and/or modified sequence
atgctgaagccccagcccctgcagcagcccagccagccccagcagcccccacccacccagcaggccgtggcccggcggcccccaggcggcaccagccccccaaatggaggcctgcccggccccctggccaccagcgctgcccctcctggccccccagctgctgccagcccctgcctgggccctgtggccgctgctggcagcggcctgcggagaggagctgagggcatcctggccccccagcccccaccaccccagcagcaccaggagaggcctggagctgctgccatcggcagcgcccggggccagagcacaggcaagggccccccccagagccctgtgtttgagggcgtgtacaacaacagcaggatgctgcacttcctgacagctgtggtgggcagcacctgtgatgtgaaggtgaagaatggcaccacctatgagggcatcttcaagaccctgagcagcaagtttgagctggccgtggatgctgtgcacaggaaggccagcgagcctgctgggggccccaggagagaagatattgtggacaccatggtgttcaagcccagtgatgtgatgctggtgcacttcagaaatgtggacttcaactatgccaccaaggacaagttcacagattctgccatcgccatgaacagcaaggtgaatggagagcacaaggagaaggtgctgcagcgctgggagggcggggacagcaacagtgatgattatgacctggagagtgacatgagcaatggctgggaccccaatgagatgttcaagttcaatgaggagaactacggcgtgaagaccacctatgacagcagcctgagcagctacacagtgcccctggagaaggacaacagcgaggagttccggcagcgggagctgcgggccgcccagctggcccgggagattgagagcagcccccagtaccgcctgagaattgccatggagaatgatgatggccgcacagaggaggagaagcacagcgctgtgcagaggcagggcagcggccgggagagccccagcctggccagccgggagggcaagtacatccccctgccccagagggtgcgggagggcccccggggcggcgtgcgctgcagcagcagcagaggaggccggcccggcctgagcagcctgcccccccggggcccccaccacctggacaacagcagccctggccctggcagcgaggcccggggcatcaatggaggccccagcaggatgagccccaaggcccagaggcccctgcggggggccaagaccctgagcagccccagcaaccggcccagcggggagacctctgtgcccccacctcctgctgtgggccgcatgtacccacccaggagccccaagtctgctgccccagcccccatcagcgccagctgcccagagccccccatcggcagcgctgtgcccaccagcagcgccagcatccctgtgaccagctctgtgtctgaccccggggtgggcagcatcagccctgccagccccaagatcagcctggcccccacagatgtgaaggagctgagcaccaaggagcccggccgcaccctggagccccaggagctggccagaattgctgggaaggtgcccggcctgcagaatgagcagaagcgcttccagctggaggagctgaggaagtttggagcccagttcaagctgcagcccagcagcagccctgagaacagcctggaccccttccccccacgcatcctgaaggaggagcccaagggcaaggagaaggaggtggatggcctgctgaccagcgagcccatgggcagccctgtgagcagcaagacagagagcgtgtctgacaaggaggacaagccacccctggcccccagcggcggcacagagggccctgagcagcccccaccaccctgccccagccagacaggcagcccccctgtgggcctcatcaagggggaggacaaggatgagggccctgtggccgagcaggtgaagaagagcaccctgaaccccaatgccaaggagttcaaccccaccaagcccctgctgtctgtgaacaagagcaccagcacccccaccagccctggccccaggacccacagcacccccagcatccctgtgctgacagctggccagagcggcctgtacagcccccagtacatctcctacatcccccagatccacatgggccctgctgtgcaggccccccagatgtacccctaccctgtgagcaacagcgtgcccggccagcagggcaagtacagaggagccaagggcagcctgcccccccagaggagtgaccagcaccagcctgccagcgccccacccatgatgcaggccgctgctgctgctggcccccccctggtggccgccaccccctacagcagctacatcccctacaacccccagcagtttcctggccagcctgccatgatgcagcccatggcccactaccccagccagcctgtgtttgcccccatgctgcagagcaaccccaggatgctgaccagcggcagccacccccaggccatcgtgagcagcagcaccccccagtaccccagcgctgagcagcccaccccccaggccctgtatgccaccgtgcaccagagctacccccaccacgccacccagctgcacgcccaccagccccagcctgccaccacccccaccggcagccagccccagagccagcacgccgcccccagccctgtgcagcaccaggccggccaggccccccacctgggcagcggccagccccagcagaacctgtaccaccctggggccctgaccggcaccccacccagcctgcccccaggccccagcgcccagagcccccagagcagcttcccccagcctgctgctgtgtatgccatccaccaccagcagctgccccacggcttcaccaacatggcccacgtgacccaggcccacgtgcagacaggcatcacagctgcccccccaccccaccctggggccccccaccccccccaggtgatgctgctgcaccccccccagagccatggaggccccccccagggcgctgtgccccagagcggcgtgcctgccctgagcgccagcacccccagcccctacccctacatcggccacccccagggcgagcagcccggccaggcccctggcttccctggaggagcagatgaccgcatcccccccctgcccccacctggagagctgaagatcgtgctggccgccacctag

SEQ ID NO: 241533 - DNA, 3189 bp, Artificial Sequence
  derived and/or modified sequence
atgctgaagccccagcccctgcagcagcccagccagccccagcagccaccacctacgcagcaagctgtcgctcggagaccccctggaggaacgagtcctcccaatgggggtcttccagggccactggcaactagtgcagccccacccggaccccccgctgcagcctctccctgtctggggcctgttgcagcagccggctctggcctgcggaggggtgcagaaggcatcctcgcgccccaacccccgcctccgcagcagcaccaggagagaccaggcgccgccgctattggaagcgctagagggcaaagcacaggtaaaggtccgccacagtccccagtttttgaaggagtctataacaattctcggatgttgcacttcctcacagccgttgtgggaagcacatgcgatgtgaaggttaaaaacggaacgacctacgagggaatatttaaaacccttagctctaaatttgaactcgctgttgacgccgtccataggaaagcctccgaaccagctggagggccacgtcgcgaagacattgtggataccatggtgtttaaacctagcgatgttatgctggttcactttagaaacgtcgacttcaattacgctaccaaagataaatttactgacagcgcaatcgcgatgaattcaaaggtgaatggcgaacataaagagaaagttctgcagcgatgggaaggaggggatagtaactctgatgattacgatctcgaatctgatatgagtaatggttgggaccctaatgagatgtttaagtttaatgaggagaactatggcgttaaaaccacctacgatagcagcttaagcagttacacagtcccgctggagaaggataattcggaagagttccgccaacgagagctgcgcgcagcacagctggcccgagagatagagagctctcctcagtacagactccggatcgccatggaaaatgacgatgggagaactgaggaagaaaagcactccgccgtgcagcgccagggttcaggacgtgagtccccttctctcgcctcccgagagggaaagtacattccactccctcaaagagtacgcgagggccccaggggaggagtgagatgttccagctcccggggcgggcggcctgggctcagttctctcccaccacgcggtccgcaccatctcgacaatagctctccgggtccagggtctgaagccagaggcataaatgggggaccatctaggatgtcccctaaagcccagaggcctctgcggggcgcgaagactttaagttcaccctcaaatcggcccagtggagagaccagcgtgccccctccccccgcagttggcagaatgtacccccctaggtcacctaaatcagccgcccccgctcctatcagcgccagctgcccagagccgcccatagggtccgccgtgcctacgtcctccgcaagcatcccagtcacgagcagcgtgagcgatccaggggtgggttcaattagccccgcctcacccaaaataagccttgcaccaactgatgtgaaagaattatcaaccaaagagcctggtcgtacattggagccacaggaactggctcggatcgccgggaaggtgccgggcctccaaaatgagcaaaagcgctttcagctcgaggagttaaggaagtttggagcccagtttaagctgcagccttcgagcagtccagaaaacagcttggacccctttccaccccggatcctaaaagaggaaccaaaaggcaaggagaaagaggtggacggccttctcacctcggaaccgatgggcagcccagtgtctagtaagactgagtctgtgtctgataaggaagataagcccccattggcaccatccggggggactgaaggtccagagcagcccccccccccatgtccttcacagacagggtccccgccagtcggtctgattaagggtgaggataaggacgagggacctgtcgctgagcaggttaaaaaatctaccctgaaccccaatgctaaggagttcaacccgacgaaacccctactatccgtgaacaagtccacatccacacctacaagtcctggccccaggacccactccactccgagcatccccgtcctgacagctgggcagtctgggctttattcacctcagtacataagctacatccctcagattcatatgggcccggccgtgcaggctccccagatgtatccctaccccgtgagcaactcggtgcccggacagcagggaaagtaccgcggggctaaaggctcactccccccacaacgttccgatcagcaccagcccgccagcgcgcctccaatgatgcaggccgccgcagccgccggtccacccctagttgccgccacaccgtattcttcctacattccatacaatccccagcagtttccagggcaaccggctatgatgcagccgatggctcattatccgagccagccagtgttcgcacccatgctacagtcaaaccccaggatgttgacaagtggttctcacccacaagccatcgtgtcgtcatcgactcctcagtatcccagcgccgaacaacccaccccacaagctctgtatgctactgtgcaccagagctaccctcatcatgcgacgcagctccacgcccatcagccccaacctgccaccacaccaaccgggtcccagccacagtcacaacacgctgcgcctagtccagtgcaacaccaggctgggcaggccccccacctgggctcaggccaaccccagcaaaacctataccaccctggggctctgactgggaccccaccaagtcttcctcctgggccctccgctcagagcccccagtcctccttcccccagcctgctgccgtgtacgcaatccaccaccagcagcttccacacggcttcaccaatatggcacatgtgacgcaggcccatgtccagaccggcatcactgccgcaccaccgcctcacccaggtgctccacaccccccccaagtgatgctgcttcatcctccccagagtcatgggggtccaccacagggagcggttccccagtctggggtgcccgctctgtctgctagcacccccagtccttacccctacatcggtcaccctcaaggcgagcaacctggtcaggccccaggattcccagggggcgccgacgatcgaatcccacctctcccacctcctggggagttaaagattgtccttgccgccacctag

SEQ ID NO: 241534 - DNA, 3189 bp, Artificial Sequence
  derived and/or modified sequence
atgctgaaaccccagcctctccagcagccaagtcaacctcagcaaccaccacccacacagcaggccgtggccaggcgaccacccggtggcacctcaccgccaaacggcggtctgccgggaccgctggccacatcggctgcgcctccagggcctcccgcagcagccagtccctgcttgggcccagtcgcggctgctggatccggattgcgaagaggggctgaaggcatcttggctccccaacctccccctcctcagcagcatcaggaaagacccggagccgctgctattggttccgcacggggtcagagcacaggcaaggggcctcctcagtcccccgtttttgagggtgtgtacaacaactctaggatgctccactttttaactgccgtggttggttctacatgtgacgttaaggtgaaaaacggaaccacttatgaagggatctttaagaccctgtcttccaaattcgaactggccgtggacgctgtccatcggaaggctagcgaaccagcaggcggaccccgaagggaggacattgtagacaccatggtgttcaagccgagcgatgtcatgctggtgcactttaggaatgtggatttcaattacgccactaaggacaagttcacagactccgcaattgcaatgaacagcaaagtaaatggagaacacaaggagaaggtgcttcaaaggtgggaaggtggcgactccaattcagatgactacgatctcgagagcgatatgtctaacggctgggatcccaacgagatgtttaaattcaatgaagagaactatggagtcaagactacatacgatagcagtcttagctcctataccgtgccgctcgaaaaagacaatagcgaggaattccggcagcgggaactgagagcagcacaacttgcaagggaaatcgagtcttctccgcaatacaggctccgcattgccatggagaacgatgatgggagaaccgaggaggaaaaacactcggctgttcagcggcaggggagcggcagagaaagccccagcctggcttccagagaaggcaaatatatccctctgccccagcgcgtgcgggaaggccctagagggggagtgaggtgtagttcttcccgaggcggaaggccgggactaagtagtcttcctcccagaggccctcaccacctggataatagttcccctggccctgggtccgaggccagaggaataaacggcggaccctcacgcatgtcacctaaagcacagaggcctctacggggtgctaagaccctctcctccccatcaaataggccttctggggagacctctgtgccacctccccctgctgtaggccgtatgtatccaccacgaagccccaaaagcgccgctcctgcccctatatcagcctcatgtccagaaccacccatcgggtccgcggtgcccacgagttcggcgtccattccagtgacgtcctccgtctctgatcccggtgtcgggagcatctcccctgcatctccgaagatctcattggcccctactgatgtaaaggagctgtcgacaaaagaacctggcagaacactagagccgcaagagttggccagaatagcaggcaaggtgccaggtctgcaaaacgaacagaagaggtttcagcttgaagagctcaggaagttcggagcccagtttaaactgcagccttcctctagccctgaaaatagcctggatcccttcccaccccgtatcctcaaagaagaaccaaagggtaaggaaaaggaagtcgacggtttgctgacaagcgagccaatggggtctcctgtgtccagtaagacggagtctgtgagcgataaagaggacaagccccctcttgcccctagcggaggcaccgagggtccagaacagccaccgcctccatgcccaagccagactggctctcctccagtgggactgattaagggcgaagataaggatgaaggacccgttgccgaacaagtgaaaaagtcaactctgaaccctaacgctaaagaattcaaccctaccaagcccctgctgagtgtgaacaagtcgacctccacgcccacctctcctggaccaagaacgcattccaccccttccattccagttttgacagctggtcaatcaggcttatattccccacagtacatcagctacattcctcagatccacatgggtcccgctgttcaggcgcctcagatgtacccctaccccgtgtcaaattctgtgcccggacagcagggaaaatatcggggagccaagggcagtctgccaccgcagagatctgatcagcaccaacctgccagcgccccaccgatgatgcaggccgcagccgctgcaggaccacctctcgtagctgccactccatactcctcctatattccttacaacccccagcagtttcccggacagcctgccatgatgcaacccatggcacactaccccagccagcctgtctttgctcctatgttacagtccaatcccagaatgctcacctccggaagccacccgcaggctatagttagctcgtctacaccacagtacccctctgccgagcaacctactccccaggccctttatgcaaccgtgcatcaaagctacccccaccatgctactcagttacatgcacaccaaccacagccagccactactccgaccggaagccagccgcagagtcaacatgccgcaccctcccctgttcagcaccaggccggacaggcaccccacctcggctccggccaaccccagcagaacttgtaccacccgggtgctctcaccggcaccccgccatccttaccccctggaccgagcgcacagtcaccacaaagctccttcccacagcccgctgctgtttacgcgattcatcatcagcagcttccacacggcttcactaacatggcccatgtgacgcaggctcatgtgcagaccggtataacagccgctccaccccctcaccccggagccccacaccccccacaggtgatgttgctgcatccaccccagtctcatggtgggccaccgcagggcgcagttccacaatcaggggttccggcactatcagcatccactccatccccatatccttatattgggcatcctcagggggagcagcctggccaggcacccggattccctggcggtgcagatgatagaattcctcctctacctcccccaggagagctcaaaatcgttctggcagctacctag

SEQ ID NO: 241535 - DNA, 3786 bp, Artificial Sequence
  derived and/or modified sequence
ccgcggtcttctctctccacccccgacaccgcggggctccccccgcccgcccacggcgggccccggctgcccgatccccctcgcttcccgcgctctccagcggggccccagccccggccccctctctccctcccttctctctaattccccttccggacgctgccatcatgttgaagcctcagccgctacaacagccctcccagccccagcagccgccccccacgcaacaggccgtggcccgtcggccccccgggggcaccagccctcccaacggcggcctcccggggccgctggccacctctgcggctcctcccgggcctccagcggccgcctccccctgcctggggcctgtggccgctgccgggagcgggctccgccggggagccgaaggcatcttggcgccgcagccgccgccgccgcagcaacaccaggagaggccgggggcagccgccatcggcagcgccaggggacagagcacaggaaagggacccccacagtcacctgtgtttgaaggcgtctacaacaattccagaatgctgcatttccttacagctgttgtgggctccacttgtgatgtaaaggtgaaaaatggtaccacttatgagggtatcttcaagacgctaagctcaaagtttgaactagccgtggatgctgtgcaccggaaagcatctgagccagcaggtggccctcgtcgggaggacattgtggacaccatggtgtttaagccaagtgatgtcatgcttgttcacttccgaaatgttgacttcaactatgctactaaagacaagttcaccgattcagccattgccatgaactcgaaagtgaatggggaacacaaagagaaggtgcttcagcgctgggaggggggtgacagcaacagcgacgactatgacctcgagtctgacatgtccaatggatgggaccccaatgaaatgttcaagttcaatgaggagaactacggtgtgaagactacctatgatagcagtctttcttcttatacggtgcccttagaaaaggacaactcagaagagtttcgtcagcgagagctgcgtgcggcccagttggctcgagagattgaatcaagcccccagtaccgcctacggatcgccatggagaacgacgatgggcgcactgaagaggagaagcacagtgcagtccagcggcagggctcagggcgggagagccccagcttggcatccagggaggggaagtatatccctctgcctcaacgagtccgggaaggtccccggggaggagttcgatgcagcagctctcggggcggtcggcctggccttagctctttgccacctcgtggccctcaccatctggacaacagcagccctggcccaggttctgaggcccgtggtatcaatggaggcccttcccgcatgtccccaaaggcacaacggcctctgagaggtgccaagactctgtcttcgcccagtaataggccttctggagaaacttctgttccacctcctcctgcagtgggccggatgtatcccccgcgttctcccaagtctgctgcccctgccccaatctcagcttcctgtccagagcctcccatcggctcggcagtgccaacctcttcagcctccatccctgtgacctcatcagtctcagatcctggagtgggctccatttctccagcttctccaaagatctccctggcccccacagatgtaaaagaactctctaccaaggaacctgggagaactctggagccccaggagctggctcggatagctgggaaagtccctggtcttcagaatgaacagaaacgattccaactggaagaactgagaaagtttggggcccagtttaagcttcagcccagtagctcccctgagaacagcctggatccttttcctccccggatcttaaaggaggagcccaaaggaaaggagaaagaggttgatggtctgttgacttcagagcccatggggtctcccgtctcctccaagacagagtccgtatcggataaggaggacaaaccacccctggcaccatcaggaggcactgaggggccagagcagcccccaccaccttgtccaagccaaactggcagccccccggtgggcctcatcaagggagaagacaaagatgagggccctgttgctgaacaagtaaagaaatcaacgttgaaccctaatgctaaggagttcaatcctacaaagcctctgctgtctgtgaataaatccaccagtaccccaacttctccggggccccggactcattcaactccctccatcccggtgctgacagcaggccagagtgggctatacagcccccagtacatctcctacatacctcagatccacatgggaccagctgtgcaggcacctcagatgtatccatatcctgtatccaattcagtgcctgggcagcagggcaagtaccggggagcaaaaggctcccttcctccgcagcgctcggaccaacaccagccagcctcagccccgccgatgatgcaggccgccgcggctgctggcccgcctctggtggctgccacgccctattcttcctacatcccctacaaccctcagcagttcccaggccagccagccatgatgcagcccatggcccactacccctcacagccggtgtttgcccccatgcttcagagcaacccacgcatgctgacgtcgggcagccatccccaggccatcgtgtcatcctctacccctcagtacccttctgcagagcagcctaccccccaagccctttatgccactgttcaccagtcctacccacaccatgccacacagctccatgcccaccagccgcagccggctaccacgcctactggaagccagccgcagtcccagcatgcggcccccagtcctgtccagcatcaggcggggcaggccccacacttgggcagtggacagccacagcagaatctgtaccacccaggggccctgacaggcacgccgccctctctgccaccgggaccttctgcccagtcccctcagagcagcttcccccagccagccgctgtgtatgccatccaccaccagcagctgccccacggcttcaccaacatggcccatgttacccaggcccatgtccaaactggaatcacagcagccccgccccctcaccctggggctccccacccgccccaggtgatgctgctgcacccaccccagagtcatggggggcccccccaaggcgcggtgccccagagtggggtgcctgcactctcagcttccacaccctcaccctacccctacatcggacacccccaaggtgagcagcctggccaggcgcctggatttccaggaggagccgatgacaggattcctccccttccaccccccggggaactgaagattgtcctggccgcgacctgagacctccatgagtggagggaagagtgatctatgtctcttcccccagcagctcggaccactcccagccccccatccccccgttccccaggggagctggggaattcctgccaagcaccttgaatgggaggggcctcacagagggcagggccagggtccagcaggggtggggggttcctgctctgcccctgcccgtccccacccagtcttgccctcccatcctctcatctattcccccgctggagacggaagatcttttattttctattatttataacttcagacttgggccccctgttctttctttcccattaacttgagtgacctgtgtgagagacagacagatgccccacgaggatggctggacaaggacttttactttttattacataaaaatattaaaaaataaataaaaaaaataaaattttaaact

SEQ ID NO: 241536 - DNA, 3189 bp, Artificial Sequence
  derived and/or modified sequence
atgctgaagccccagcccctgcagcagcccagccagccccagcagcccccccccacccagcaggccgtggccagaagaccccccggcggcaccagcccccccaacggcggcctgcccggccccctggccaccagcgccgccccccccggcccccccgccgccgccagcccctgcctgggccccgtggccgccgccggcagcggcctgagaagaggcgccgagggcatcctggccccccagcccccccccccccagcagcaccaggagagacccggcgccgccgccatcggcagcgccagaggccagagcaccggcaagggccccccccagagccccgtgttcgagggcgtgtacaacaacagcagaatgctgcacttcctgaccgccgtggtgggcagcacctgcgacgtgaaggtgaagaacggcaccacctacgagggcatcttcaagaccctgagcagcaagttcgagctggccgtggacgccgtgcacagaaaggccagcgagcccgccggcggccccagaagagaggacatcgtggacaccatggtgttcaagcccagcgacgtgatgctggtgcacttcagaaacgtggacttcaactacgccaccaaggacaagttcaccgacagcgccatcgccatgaacagcaaggtgaacggcgagcacaaggagaaggtgctgcagagatgggagggcggcgacagcaacagcgacgactacgacctggagagcgacatgagcaacggctgggaccccaacgagatgttcaagttcaacgaggagaactacggcgtgaagaccacctacgacagcagcctgagcagctacaccgtgcccctggagaaggacaacagcgaggagttcagacagagagagctgagagccgcccagctggccagagagatcgagagcagcccccagtacagactgagaatcgccatggagaacgacgacggcagaaccgaggaggagaagcacagcgccgtgcagagacagggcagcggcagagagagccccagcctggccagcagagagggcaagtacatccccctgccccagagagtgagagagggccccagaggcggcgtgagatgcagcagcagcagaggcggcagacccggcctgagcagcctgccccccagaggcccccaccacctggacaacagcagccccggccccggcagcgaggccagaggcatcaacggcggccccagcagaatgagccccaaggcccagagacccctgagaggcgccaagaccctgagcagccccagcaacagacccagcggcgagaccagcgtgccccccccccccgccgtgggcagaatgtacccccccagaagccccaagagcgccgcccccgcccccatcagcgccagctgccccgagccccccatcggcagcgccgtgcccaccagcagcgccagcatccccgtgaccagcagcgtgagcgaccccggcgtgggcagcatcagccccgccagccccaagatcagcctggcccccaccgacgtgaaggagctgagcaccaaggagcccggcagaaccctggagccccaggagctggccagaatcgccggcaaggtgcccggcctgcagaacgagcagaagagattccagctggaggagctgagaaagttcggcgcccagttcaagctgcagcccagcagcagccccgagaacagcctggaccccttcccccccagaatcctgaaggaggagcccaagggcaaggagaaggaggtggacggcctgctgaccagcgagcccatgggcagccccgtgagcagcaagaccgagagcgtgagcgacaaggaggacaagccccccctggcccccagcggcggcaccgagggccccgagcagcccccccccccctgccccagccagaccggcagcccccccgtgggcctgatcaagggcgaggacaaggacgagggccccgtggccgagcaggtgaagaagagcaccctgaaccccaacgccaaggagttcaaccccaccaagcccctgctgagcgtgaacaagagcaccagcacccccaccagccccggccccagaacccacagcacccccagcatccccgtgctgaccgccggccagagcggcctgtacagcccccagtacatcagctacatcccccagatccacatgggccccgccgtgcaggccccccagatgtacccctaccccgtgagcaacagcgtgcccggccagcagggcaagtacagaggcgccaagggcagcctgcccccccagagaagcgaccagcaccagcccgccagcgccccccccatgatgcaggccgccgccgccgccggcccccccctggtggccgccaccccctacagcagctacatcccctacaacccccagcagttccccggccagcccgccatgatgcagcccatggcccactaccccagccagcccgtgttcgcccccatgctgcagagcaaccccagaatgctgaccagcggcagccacccccaggccatcgtgagcagcagcaccccccagtaccccagcgccgagcagcccaccccccaggccctgtacgccaccgtgcaccagagctacccccaccacgccacccagctgcacgcccaccagccccagcccgccaccacccccaccggcagccagccccagagccagcacgccgcccccagccccgtgcagcaccaggccggccaggccccccacctgggcagcggccagccccagcagaacctgtaccaccccggcgccctgaccggcaccccccccagcctgccccccggccccagcgcccagagcccccagagcagcttcccccagcccgccgccgtgtacgccatccaccaccagcagctgccccacggcttcaccaacatggcccacgtgacccaggcccacgtgcagaccggcatcaccgccgccccccccccccaccccggcgccccccaccccccccaggtgatgctgctgcaccccccccagagccacggcggccccccccagggcgccgtgccccagagcggcgtgcccgccctgagcgccagcacccccagcccctacccctacatcggccacccccagggcgagcagcccggccaggcccccggcttccccggcggcgccgacgacagaatcccccccctgcccccccccggcgagctgaagatcgtgctggccgccacctag

SEQ ID NO: 241537 - protein, 525 aa, Artificial Sequence
  derived and/or modified sequence
MLGKRKRVVLTIKDKLDIIKKLEEGISFKKLSVVYGIGESTVRDIKKNKERIINYANSSDPTSGVSKRKSMKSSTYEELDRVMIEWFNQQKTDGIPVSGTICAKQAKFFFDALGMEGDFNASSGWLTRFKQRHGIPKAAGKGTKLKGDETAAREFCGSFQEFVEKENLQPEQIYGADQTGLFWKCLPSRTLTLETDQSTSGCRSSRERIIIMCCANATGLHKLNLCVVGKAKKPRAFKGTDLSNLPVTYYSQKGAWIEQSVFRQWFEKYFVPQVQKHLKSKGLLEKAVLLLDFPPARPNEEMLSSDDGRIIVKYLPPNVTSLIQPMSQGVLATVKRYYRAGLLQKYMDEGNDPKIFWKNLTVLDAIYEVSRAWNMVKSSTITKAWKKLFPGNEENSGMNIDEGAILAANLATVLQNTEECEHVDIENIDQWFDSRSSDSSCQVLTDSESAEDQTKAAEQKPSSKSRKTELNPEKHISHKAALEWTENLLDYLEQQDDMLLSDKLVLRRLRTIIRKKQKIQNNKNH

SEQ ID NO: 241538 - DNA, 1578 bp, Artificial Sequence
  derived and/or modified sequence
atgctgggcaagagaaagagagtggtgctgaccatcaaggacaagctggacatcatcaagaagctggaggagggcatcagcttcaagaagctgagcgtggtgtacggcatcggcgagagcaccgtgagagacatcaagaagaacaaggagagaatcatcaactacgccaacagcagcgaccccaccagcggcgtgagcaagagaaagagcatgaagagcagcacctacgaggagctggacagagtgatgatcgagtggttcaaccagcagaagaccgacggcatccccgtgagcggcaccatctgcgccaagcaggccaagttcttcttcgacgccctgggcatggagggcgacttcaacgccagcagcggctggctgaccagattcaagcagagacacggcatccccaaggccgccggcaagggcaccaagctgaagggcgacgagaccgccgccagagagttctgcggcagcttccaggagttcgtggagaaggagaacctgcagcccgagcagatctacggcgccgaccagaccggcctgttctggaagtgcctgcccagcagaaccctgaccctggagaccgaccagagcaccagcggctgcagaagcagcagagagagaatcatcatcatgtgctgcgccaacgccaccggcctgcacaagctgaacctgtgcgtggtgggcaaggccaagaagcccagagccttcaagggcaccgacctgagcaacctgcccgtgacctactacagccagaagggcgcctggatcgagcagagcgtgttcagacagtggttcgagaagtacttcgtgccccaggtgcagaagcacctgaagagcaagggcctgctggagaaggccgtgctgctgctggacttcccccccgccagacccaacgaggagatgctgagcagcgacgacggcagaatcatcgtgaagtacctgccccccaacgtgaccagcctgatccagcccatgagccagggcgtgctggccaccgtgaagagatactacagagccggcctgctgcagaagtacatggacgagggcaacgaccccaagatcttctggaagaacctgaccgtgctggacgccatctacgaggtgagcagagcctggaacatggtgaagagcagcaccatcaccaaggcctggaagaagctgttccccggcaacgaggagaacagcggcatgaacatcgacgagggcgccatcctggccgccaacctggccaccgtgctgcagaacaccgaggagtgcgagcacgtggacatcgagaacatcgaccagtggttcgacagcagaagcagcgacagcagctgccaggtgctgaccgacagcgagagcgccgaggaccagaccaaggccgccgagcagaagcccagcagcaagagcagaaagaccgagctgaaccccgagaagcacatcagccacaaggccgccctggagtggaccgagaacctgctggactacctggagcagcaggacgacatgctgctgagcgacaagctggtgctgagaagactgagaaccatcatcagaaagaagcagaagatccagaacaacaagaaccactag

SEQ ID NO: 241539 - DNA, 1578 bp, Artificial Sequence
  derived and/or modified sequence
atgcttggcaagcgcaaacgagtagtcctgactatcaaggataaactggatatcatcaagaagcttgaagaaggtatcagttttaaaaagctatcagtggtctatggcatcggcgagtctacagtgcgcgacatcaagaaaaacaaggaaaggatcatcaattacgctaatagctctgacccgacatccggtgttagtaagcggaaaagtatgaaatctagcacttatgaggagttagatagagtgatgatcgagtggtttaatcagcagaagaccgatgggattcctgtcagcggcaccatctgcgccaagcaggctaagtttttcttcgatgccttgggaatggagggagattttaatgcatcatctgggtggttgactaggttcaaacagagacatggcatcccgaaggccgctggcaagggaactaagcttaagggggatgagacggccgcacgcgaattttgtggcagctttcaggaatttgttgagaaggaaaatttacagccagagcagatttatggagctgatcagaccggattgttttggaaatgcctcccatccaggactctaacactggagacagaccagtccacgagcggttgtagatcaagtcgggagaggatcatcataatgtgctgcgcgaatgccaccggactgcacaaacttaatttgtgcgttgttggaaaggccaagaaaccaagggcctttaaggggacagatttgtctaacctccctgtcacctactactcacagaagggggcgtggatcgagcagtcagtatttagacagtggttcgaaaagtatttcgttcctcaggtgcagaagcacctgaaatctaagggcctgttggaaaaagccgtcctcctccttgactttccccctgccagaccaaatgaggaaatgctgtctagcgacgatggccggataattgtaaagtatctgcctccaaatgtgacatccctaatccagccaatgtcccagggagtgctggccacagtaaaaagatattacagagccgggctgctccagaaatacatggatgagggaaacgatccaaagatcttttggaaaaacctaactgttctggatgctatctatgaggtctcgcgcgcctggaatatggttaaatcgagcacaattactaaggcctggaagaaactcttcccgggcaatgaggaaaatagcggcatgaatatcgacgaaggagccatcctggctgcaaatctcgccaccgtgcttcagaataccgaggaatgcgagcatgtggatattgaaaatatcgatcagtggttcgattcacgctcctctgatagctcctgccaagtgttaacagactccgagagtgctgaggatcagaccaaagccgctgaacagaagcccagctccaaaagcaggaagactgaacttaatccagagaaacacatttcccacaaggcggccctcgaatggacggaaaatttgctcgactatctggaacaacaagatgacatgcttctttctgacaagctggtactgagaagattgcgcaccatcattagaaagaagcagaagatccaaaataacaaaaaccattag

SEQ ID NO: 241540 - DNA, 1578 bp, Artificial Sequence
  derived and/or modified sequence
atgctgggcaagaggaagagggtggtgctgaccatcaaggacaagctggacatcatcaagaagctggaggagggcatctccttcaagaagctgtctgtggtgtatggaattggagagagcacagtgcgggacatcaagaagaacaaggagcgcatcatcaactatgccaacagcagtgaccccaccagcggcgtgtccaagaggaagtccatgaagagcagcacctatgaggagctggacagagtgatgattgagtggttcaaccagcagaagacagatggcatccctgtgtctggcaccatctgtgccaagcaggccaagttcttctttgatgccctgggcatggagggggacttcaatgccagcagcggctggctgacccgcttcaagcagagacatggcatccccaaggctgctgggaagggcaccaagctgaagggagatgaaacagctgcccgggagttctgtggcagcttccaggagtttgtggagaaggagaacctgcagcctgagcagatctacggggctgaccagacaggcctcttctggaagtgcctgcccagcaggaccctgaccctggagacagaccagagcaccagcggctgccgcagcagccgggagcgcatcatcatcatgtgctgtgccaatgccaccggcctgcacaagctgaacctgtgtgtggtgggcaaggccaagaagccccgggccttcaagggcacagacctgagcaacctgcctgtgacctactacagccagaagggggcctggattgagcagagcgtcttccggcagtggtttgagaagtactttgtgccccaggtgcagaagcacctgaagagcaagggcctgctggagaaggctgtgctgctgctggacttccccccagcccggcccaatgaggagatgctgagcagtgatgatggccgcatcatcgtgaagtacctgccccccaacgtgaccagcctcatccagcccatgagccagggcgtgctggccaccgtgaagcgctactaccgggccggcctgctgcagaagtacatggatgagggcaatgaccccaagatcttctggaagaacctgactgtgctggatgccatctatgaggtgtcccgggcctggaacatggtgaagagcagcaccatcaccaaggcctggaagaagctgtttcctggaaatgaggagaacagcggcatgaacattgatgaaggagccatcctggccgccaacctggccaccgtgctgcagaacacagaagaatgtgagcacgtggacatcgagaacatcgaccagtggtttgacagccgcagcagtgacagcagctgccaggtgctgacagattctgagagcgctgaggaccagaccaaggctgctgagcagaagcccagcagcaagagcaggaagacagagctgaaccctgagaagcacatcagccacaaggccgccctggagtggacagagaacctgctggactacctggagcagcaggatgacatgctgctgagtgacaagctggtgctgcggcggctgcggaccatcatcaggaagaagcagaagatccagaacaacaagaaccactag

SEQ ID NO: 241541 - DNA, 1578 bp, Artificial Sequence
  derived and/or modified sequence
atgctgggcaagcggaagcgggtggtgctgaccatcaaggacaagctcgatatcatcaagaaattggaagaggggatctccttcaagaaactcagcgtggtgtacggcatcggggagtccacggttcgggatatcaaaaagaataaagaacgcatcatcaattacgccaactcttccgacccaacatctggcgtctcaaaacgaaaaagcatgaaatcatcgacttacgaggagctcgaccgcgtcatgatagaatggttcaatcagcaaaagactgatggcatccctgtatccggaactatctgcgcgaagcaggccaagtttttctttgacgccctgggaatggagggagacttcaacgcgagctctggctggctgacgcgcttcaaacagaggcacggcattcccaaggcagcgggaaaaggcaccaaactgaagggagacgaaacggccgcacgggagttttgtggcagctttcaggaatttgtagagaaagaaaatctacagcccgaacagatatatggagccgaccagacaggactgttctggaagtgcctgcccagccgcacccttacattagagaccgaccagtccacgtctgggtgccggagtagccgagagaggatcatcatcatgtgctgcgccaacgccacaggactccacaagctcaacctgtgtgtcgtggggaaggcaaaaaaacctcgggcctttaagggtaccgacctgtccaatctcccggttacatactattcgcagaaaggtgcctggatagaacagtcagtgtttcgccagtggttcgaaaaatatttcgtcccccaagtgcagaagcatctcaagtccaagggccttctcgaaaaggctgttttgctcctcgattttccacctgctcgacctaatgaggaaatgttaagcagcgatgatggcagaattattgtaaagtatctgccaccaaacgtgacctctcttatccagcccatgagccagggcgttcttgccaccgtcaagagatattatcgagccggcctcttgcagaaatacatggacgagggcaatgacccaaaaatcttctggaagaacttaacggtcctagatgccatctatgaagtatcacgggcatggaatatggtcaagagcagtactattactaaagcctggaaaaaattattccccggaaatgaagagaattctggaatgaacatagatgagggagcaattctcgcagctaatctggcaaccgtattacagaataccgaggagtgcgagcatgtcgacattgagaatatcgatcagtggttcgattcccggtcttctgacagcagctgccaggtgctgacagattcagaaagcgctgaggatcagaccaaggccgccgagcagaagccgagctccaagagtcgcaaaaccgagctcaatccggagaagcacatttcacacaaagccgccctcgagtggactgagaacttactagactacctggaacagcaggatgacatgctgctctctgacaaactagttctgagaagactgagaaccataattaggaagaagcagaaaattcagaataataagaaccattag

SEQ ID NO: 241542 - DNA, 1578 bp, Artificial Sequence
  derived and/or modified sequence
atgcttggcaaacgtaagagagtggttctgactattaaggacaagttagatattatcaaaaagttggaagagggcatttcgtttaagaaattatcagtcgtctatggaatcggggaaagtacagtccgagacatcaagaaaaataaggagcgtattattaactatgctaatagttcagaccctacatctggcgtgagcaagagaaagtctatgaaatctagcacatacgaggaactggaccgtgtgatgattgagtggtttaaccagcagaagacggacggtatcccagtgtccggaactatctgtgccaagcaggctaaatttttctttgatgccttgggtatggagggggacttcaacgcatcctcaggatggctgacgcgctttaagcagcgccatgggattcccaaggcagccggtaagggaaccaaactcaaaggggatgaaacagctgctagagaattctgcggaagttttcaggagttcgtggagaaagagaacctgcaacccgagcagatctacggagccgaccagaccgggctattttggaagtgccttccctctcggactctaaccctagaaacagaccagtccacatcaggttgtcggagctcacgtgaacgcattatcattatgtgttgcgccaatgccactggcctgcacaaactcaatctgtgtgtcgtcggtaaagccaagaagcccagggccttcaagggcactgacctgagtaacctgcctgtgacctactatagccagaaaggggcttggatagagcagagtgtatttcgccagtggtttgagaaatattttgtgccacaggtccagaaacatttaaagtcaaagggtctgctagagaaggcggtgctgctactggacttccctccagccaggccaaatgaggagatgctgagctctgatgatggcagaattattgtgaaatatttgcctcctaatgtcacgagtctcattcagcctatgtcacagggggtcctggccactgtaaaacgatactatcgagcaggcctgctgcagaagtatatggatgagggcaatgacccaaagatcttctggaaaaacctcacggtgttggacgctatctatgaagtgtctagggcctggaatatggtgaagagctcaaccatcacgaaggcttggaagaaactgttccctggcaatgaggagaacagtggaatgaatatagacgaaggcgctatcttggctgcgaatctggccacagtgcttcaaaataccgaggaatgtgagcatgttgacattgagaatattgatcagtggttcgacagccgaagctccgactcctcctgtcaagtactcactgatagtgaaagtgctgaggatcagaccaaggccgcagaacaaaagccatcgagcaagtctcggaagaccgaactgaatccagagaaacacatctcacataaggcagctctggagtggaccgagaacctgctcgactatcttgagcaacaggatgacatgttgcttagcgacaagttagtgctgaggcgcctccggaccatcatcaggaaaaagcaaaagattcagaataacaaaaaccattag

SEQ ID NO: 241543 - DNA, 2083 bp, Artificial Sequence
  derived and/or modified sequence
gattcacgtagaccttgtcaggaaattggtcactatccatctaggccctagaagtgagaggaggaatcttacgaactcattttctagttgctttgtattcaaatcttagttgttaattatcttgttctagtaatcacctaaaatattagacacttaaaatgttggggaaacgtaagcgtgtggtgttgacaattaaggacaagcttgacattattaagaaacttgaggaaggcatctctttcaaaaaactttccgtggtgtacggaattggtgaatccacagttcgtgatattaaaaagaacaaagaaaggattataaactatgcaaacagttcagatcctaccagtggagtatccaaacgtaaatctatgaagtcatcaacatacgaggagcttgatagagttatgatagagtggtttaaccaacagaaaacagatgggattccagtgtccggaacgatttgtgcaaaacaagccaagttcttttttgatgctttgggaatggaaggtgattttaatgcatcgtcaggctggctaactcgatttaagcagcgccatggtattccaaaggctgctggtaaaggaacaaaattaaaaggagatgaaactgctgccagagaattttgtggtagctttcaggaatttgttgaaaaagagaatctacaaccagagcaaatttatggtgctgatcaaactggattgttttggaaatgtctaccatcaaggacattaactcttgaaactgaccaaagtacttctgggtgtaggtcaagcagagagagaatcatcattatgtgttgcgcaaatgccacaggtttacacaaacttaatctttgtgttgtggggaaggccaaaaagccccgagcattcaaaggcactgacctttcaaaccttcctgtgacatattacagtcaaaaaggtgcatggatagaacagtctgttttcagacagtggtttgaaaagtactttgtgccacaggtacagaagcatttgaaatccaagggacttttagaaaaagcagtgcttcttttagatttccccccagcacgtccaaatgaagaaatgttgagttcagatgatggcagaataattgtgaagtatttgccaccaaatgtcacaagtctgattcaaccaatgagccagggagttctagccactgtaaaaagatactatcgagcaggacttctccagaaatacatggatgaaggaaatgacccaaaaatattttggaagaacttgacagtgttggatgcaatttatgaagtgtcaagagcttggaacatggtaaaatcaagtaccataaccaaagcatggaaaaaacttttccctggcaatgaagagaattcaggtatgaacattgatgaaggagccattttagcagctaatttagcaacagttttacagaacacagaagaatgtgaacatgttgacattgagaatattgatcagtggttcgactctcggagcagtgactcaagctgtcaggtgctgactgacagtgaaagtgctgaggaccagaccaaggctgctgagcaaaagccttccagtaagagtagaaaaacagaactgaatccagagaagcatattagccataaagcggcacttgaatggactgaaaatttactggattatcttgaacaacaagatgacatgcttctgtctgataaattggtattaaggaggcttcggaccataataagaaaaaaacagaagatccaaaataacaaaaatcattaataaggctcttaagtatttcagtgtatctgcatctttgtgactatctgcagtgaaactttgcttgtttgaagtcctgtggattccaaagccaaatacattttataaatgattttggaattagatgtcagtttggattacttaaattacaactctttaatgttgactctagtcattgggcattgacgtgtaacttgtctttctactgtttctaatatctattaattagatcataaggtacctgaggccagggatcttgtgtctgttgtgcctgaatttggcgtgtctaataaaggcccatgcacactataggcactcaataaaacttacatttttatgatttttctttg

SEQ ID NO: 241544 - protein, 543 aa, Artificial Sequence
  derived and/or modified sequence
MESSKKMDSPGALQTNPPLKLHTDRSAGTPVFVPEQGGYKEKFVKTVEDKYKCEKCHLVLCSPKQTECGHRFCESCMAALLSSSSPKCTACQESIVKDKVFKDNCCKREILALQIYCRNESRGCAEQLMLGHLLVHLKNDCHFEELPCVRPDCKEKVLRKDLRDHVEKACKYREATCSHCKSQVPMIALQKHEDTDCPCVVVSCPHKCSVQTLLRSEGTNQQIKAHEASSAVQHVNLLKEWSNSLEKKVSLLQNESVEKNKSIQSLHNQICSFEIEIERQKEMLRNNESKILHLQRVIDSQAEKLKELDKEIRPFRQNWEEADSMKSSVESLQNRVTELESVDKSAGQVARNTGLLESQLSRHDQMLSVHDIRLADMDLRFQVLETASYNGVLIWKIRDYKRRKQEAVMGKTLSLYSQPFYTGYFGYKMCARVYLNGDGMGKGTHLSLFFVIMRGEYDALLPWPFKQKVTLMLMDQGSSRRHLGDAFKPDPNSSSFKKPTGEMNIASGCPVFVAQTVLENGTYIKDDTIFIKVIVDTSDLPDP

SEQ ID NO: 241545 - DNA, 1632 bp, Artificial Sequence
  derived and/or modified sequence
atggagagcagcaagaagatggacagccccggcgccctgcagaccaacccccccctgaagctgcacaccgacagaagcgccggcacccccgtgttcgtgcccgagcagggcggctacaaggagaagttcgtgaagaccgtggaggacaagtacaagtgcgagaagtgccacctggtgctgtgcagccccaagcagaccgagtgcggccacagattctgcgagagctgcatggccgccctgctgagcagcagcagccccaagtgcaccgcctgccaggagagcatcgtgaaggacaaggtgttcaaggacaactgctgcaagagagagatcctggccctgcagatctactgcagaaacgagagcagaggctgcgccgagcagctgatgctgggccacctgctggtgcacctgaagaacgactgccacttcgaggagctgccctgcgtgagacccgactgcaaggagaaggtgctgagaaaggacctgagagaccacgtggagaaggcctgcaagtacagagaggccacctgcagccactgcaagagccaggtgcccatgatcgccctgcagaagcacgaggacaccgactgcccctgcgtggtggtgagctgcccccacaagtgcagcgtgcagaccctgctgagaagcgagggcaccaaccagcagatcaaggcccacgaggccagcagcgccgtgcagcacgtgaacctgctgaaggagtggagcaacagcctggagaagaaggtgagcctgctgcagaacgagagcgtggagaagaacaagagcatccagagcctgcacaaccagatctgcagcttcgagatcgagatcgagagacagaaggagatgctgagaaacaacgagagcaagatcctgcacctgcagagagtgatcgacagccaggccgagaagctgaaggagctggacaaggagatcagacccttcagacagaactgggaggaggccgacagcatgaagagcagcgtggagagcctgcagaacagagtgaccgagctggagagcgtggacaagagcgccggccaggtggccagaaacaccggcctgctggagagccagctgagcagacacgaccagatgctgagcgtgcacgacatcagactggccgacatggacctgagattccaggtgctggagaccgccagctacaacggcgtgctgatctggaagatcagagactacaagagaagaaagcaggaggccgtgatgggcaagaccctgagcctgtacagccagcccttctacaccggctacttcggctacaagatgtgcgccagagtgtacctgaacggcgacggcatgggcaagggcacccacctgagcctgttcttcgtgatcatgagaggcgagtacgacgccctgctgccctggcccttcaagcagaaggtgaccctgatgctgatggaccagggcagcagcagaagacacctgggcgacgccttcaagcccgaccccaacagcagcagcttcaagaagcccaccggcgagatgaacatcgccagcggctgccccgtgttcgtggcccagaccgtgctggagaacggcacctacatcaaggacgacaccatcttcatcaaggtgatcgtggacaccagcgacctgcccgacccctag

SEQ ID NO: 241546 - DNA, 1632 bp, Artificial Sequence
  derived and/or modified sequence
atggagagcagtaagaagatggactccccgggtgctctgcagactaatcctcccttgaaactgcacactgacagatccgcaggtaccccggtattcgttcccgagcaaggaggatacaaggaaaagttcgtaaagacagtggaagacaagtataaatgtgagaagtgccacttggtgctgtgcagtcccaaacagactgagtgtggtcataggttctgcgagtcatgtatggccgcacttttatcgtcctcatcaccaaaatgcaccgcctgtcaggaatcgatcgtaaaggacaaagtgttcaaagataattgttgcaaacgggaaatcctggccctgcagatctattgtagaaatgaatcccgcggatgcgccgagcagcttatgttaggccacctcttggtgcacttaaaaaacgactgtcatttcgaggagcttccctgtgtacgaccagactgcaaagaaaaagtgttgcgtaaggacctgagagatcatgtggagaaagcctgtaagtacagagaagccacatgttctcattgcaaatcacaggtccccatgatcgcccttcagaagcatgaagataccgattgcccctgtgttgtggtctcgtgccctcataaatgctctgtgcagaccctcctgcgcagtgagggtaccaatcaacagattaaggctcacgaggcttcttcagcagtgcagcacgtcaatctgttaaaggagtggtccaactcactggagaaaaaagtgtccctactccaaaacgagagtgtggaaaagaataagtcaattcagtctctacacaatcagatttgcagttttgaaatagagatagagcgtcagaaagagatgctaagaaacaacgaaagcaagatactgcacctgcagagagttatcgattcgcaggctgagaagcttaaggagctggacaaggagatccgcccattcagacagaactgggaggaggctgacagcatgaaaagcagcgtagaaagcttgcaaaatagagtcacagagctcgaatccgtcgacaagtccgcaggccaggtagcccgaaacactggcctgcttgagtcacagctctccaggcatgaccaaatgctctctgtgcatgatatcagattagcagatatggacctaaggttccaggtgttggaaaccgcctcttataatggcgtgctgatctggaaaattcgggactacaagcggcgcaaacaggaggccgtgatgggaaagacactgtctttgtatagccagccattctacacaggatattttggctacaaaatgtgcgctcgagtgtatctgaatggcgatggaatgggaaaaggcacccacctgtccttattctttgtgatcatgcggggcgaatatgacgctctgctgccttggccttttaaacaaaaggttaccttgatgttgatggaccagggcagctctaggcgacacctgggggatgcattcaagcccgacccaaacagctcctcttttaaaaagcctaccggggaaatgaatatagccagcggttgtccggtttttgtagcccagaccgtgcttgaaaacggaacctacatcaaagatgataccatctttatcaaagtcatcgttgatacttctgacctcccagatccatag

SEQ ID NO: 241547 - DNA, 1632 bp, Artificial Sequence
  derived and/or modified sequence
atggagagctcgaaaaaaatggacagccccggggcgctgcagactaaccctccacttaaactgcatacggacaggagcgccgggactcccgtgtttgtgccagaacagggaggctacaaggaaaagtttgttaaaacggttgaggacaagtacaaatgtgaaaagtgtcacctcgtgctgtgcagccctaagcaaacggaatgcgggcaccgattctgtgagtcttgcatggctgcgctgctgtcctcgtcttcccccaagtgtacggcgtgtcaagaaagtattgtgaaggataaggtgtttaaggacaattgctgcaaacgggaaattctcgctttacagatatactgtcgtaacgagtcgcgggggtgcgcggaacagttgatgctggggcatctgctggtgcatctgaagaacgattgtcattttgaggagctgccttgtgttcggcctgactgcaaagagaaagtgcttaggaaggatctcagagaccacgtagagaaggcctgcaaataccgcgaagccacttgttcacactgcaagtcacaagttccaatgatcgccctgcagaagcacgaggacaccgactgcccttgcgtagtcgtgagttgcccccataagtgcagtgtgcagacactgctgcgatctgaagggaccaaccagcagatcaaggcccacgaagcctcatccgcggtccagcatgtgaacctgctgaaagagtggtctaatagcttagagaagaaggtatctcttttgcaaaacgagagtgtggagaagaataagtcaatccagagcctgcacaatcagatctgctcctttgagatcgaaatcgagagacagaaagagatgctgcgaaataatgagagtaagatcctgcatctccagcgcgtgatcgatagtcaggctgagaagcttaaagagctggataaggaaatacggccattccgccaaaattgggaagaagccgatagtatgaagagtagcgtcgaaagtctgcagaatcgggttaccgagctagaaagcgtggacaagagcgccgggcaggtcgctcggaatacgggcctactcgagtcccagctgtcaaggcacgaccagatgctgtccgttcacgacattcgtctggccgacatggatctgagatttcaggtgctggaaactgccagttacaacggagttctcatatggaagatcagggattacaagcgcaggaagcaagaggcagtgatgggcaaaacactatcattgtatagccagcctttctataccggatatttcgggtacaagatgtgcgcacgcgtatacctcaatggagatgggatgggcaagggcacccacctatccttgttctttgttatcatgcgaggcgaatatgatgcattgctgccctggcccttcaagcagaaagtgaccctcatgcttatggatcaaggtagctccagaagacacctcggagatgcatttaaaccagaccctaacagttcctcattcaaaaagccaaccggtgagatgaatatcgcatcgggttgccctgtcttcgtagctcagacggtactggaaaacggcacatatattaaagatgacactatcttcattaaggtgatcgtggacactagcgatcttcccgacccgtag

SEQ ID NO: 241548 - DNA, 1632 bp, Artificial Sequence
  derived and/or modified sequence
atggagagcagcaagaagatggacagccctggggccctgcagaccaacccccccctgaagctgcacacagacagatctgctggcacccctgtgtttgtgcctgagcagggcggctacaaggagaagtttgtgaagacagtggaggacaagtacaagtgtgagaagtgccacctggtgctgtgcagccccaagcagacagaatgtggccaccgcttctgtgagagctgcatggccgccctgctgagcagcagcagccccaagtgcacagcctgccaggagagcatcgtgaaggacaaggtgttcaaggacaactgctgcaagcgggagatcctggccctgcagatctactgcagaaatgaaagccggggctgtgccgagcagctgatgctgggccacctgctggtgcacctgaagaatgactgccactttgaggagctgccctgtgtgcggccagactgcaaggagaaggtgctgaggaaggacctgcgggaccacgtggagaaggcctgcaagtaccgggaggccacctgcagccactgcaagagccaggtgcccatgattgccctgcagaagcatgaggacacagactgcccctgtgtggtggtgtcctgcccccacaagtgcagcgtgcagaccctgctgcggtctgagggcaccaaccagcagatcaaggcccacgaggccagcagcgctgtgcagcacgtgaacctgctgaaggagtggagcaacagcctggagaagaaggtgtccctgctgcagaatgaatctgtggagaagaacaagagcatccagagcctgcacaaccagatctgcagctttgaaattgaaattgagcggcagaaggagatgctgagaaataatgaaagcaagatcctgcacctgcagagggtcatcgacagccaggccgagaagctgaaggagctggacaaggagatccggcccttccggcagaactgggaggaggccgacagcatgaagagctctgtggagagcctgcagaacagagtgacagagctggagagcgtggacaagtctgctggccaggtggccaggaacacaggcctgctggagagccagctgagcagacatgaccagatgctgtctgtgcatgacatccggctggccgacatggacctgcgcttccaggtgctggagacagccagctacaacggggtgctgatctggaagatccgggactacaagaggaggaagcaggaggccgtgatgggcaagaccctgagcctgtacagccagcccttctacacaggctacttcggctacaagatgtgtgcccgggtgtacctgaatggagatggcatgggcaagggcacccacctgagcctcttcttcgtcatcatgagaggagaatatgatgccctgctgccctggcccttcaagcagaaggtgaccctgatgctgatggaccagggcagcagccgccgccacctgggagatgccttcaagccagaccccaacagcagcagcttcaagaagcccaccggggagatgaacatcgccagcggctgccctgtgtttgtggcccagacagtgctggagaatggcacctacatcaaggatgacaccatcttcatcaaggtgattgtggacaccagtgacctgcctgacccctag

SEQ ID NO: 241549 - DNA, 1632 bp, Artificial Sequence
  derived and/or modified sequence
atggagagcagcaagaagatggacagccccggcgccctgcagaccaatcccccactcaagctccatacagatcgatccgccggcacccctgtgttcgtgccagaacaggggggttacaaggagaaattcgtcaagactgtggaggacaaatacaagtgcgagaagtgtcaccttgtgctgtgctcacccaaacaaacagaatgcggacatcgcttctgcgaaagttgcatggcagccctcttgtcgagctcaagtcccaaatgcaccgcttgccaggaaagtattgtgaaagacaaagtgtttaaagacaactgctgtaagcgggaaatcctcgccctgcagatttattgtcgcaatgagagtcgcggatgtgccgagcaactgatgctgggtcacctcctcgtgcatttaaagaatgactgccactttgaggaacttccgtgcgtgagacccgactgtaaggaaaaggtcctgaggaaagatttgcgcgaccatgttgagaaggcttgcaagtacagggaagccacctgctcacattgcaagtctcaggtacccatgatcgctctgcaaaagcatgaagataccgactgtccctgtgtggtcgtgagttgtccacacaagtgttctgtccagaccctcttacggagcgaagggaccaaccaacagatcaaagcccacgaggcttcttcagcagtgcaacacgtaaatctgttgaaagagtggtcaaattccctagagaaaaaggtttcactgcttcagaacgaaagcgtagagaagaataaatccattcagtccctgcataatcagatatgctcctttgaaattgagattgagcggcagaaggaaatgctgcggaataatgagtcaaagattctccacctccaacgtgtgatcgattcgcaggcagaaaagctcaaagagctggacaaagagatacgtccgttccgtcagaactgggaggaagctgactccatgaagtcctctgtggagtcactgcaaaatagagtgacagagcttgagagcgtggacaaatctgctggccaggtggcacgcaatacaggcctattagagtcacagctctctagacatgatcaaatgctgagcgtgcacgacatccgcctggctgacatggacctgcgttttcaggtactggagaccgcctcctacaacggggtgctcatatggaagattcgcgattacaagcgtaggaagcaagaggccgtgatgggtaagactttgtcgttgtactctcaacctttctatactggatacttcggatacaaaatgtgtgctagagtgtacttgaatggggatggaatgggtaaaggaacgcatctgtctttgttcttcgtcatcatgcgaggtgaatacgatgcactgctcccatggccattcaagcagaaggtgaccctaatgttgatggaccaaggcagttctcgaaggcacctgggagacgcgtttaagcctgatccgaactcaagttcctttaagaaacccaccggggaaatgaacattgcttccgggtgtccagtgttcgtggcccaaacggttctggaaaatggtacctacatcaaagacgataccatttttataaaagtgattgtcgacacaagcgatcttcccgacccgtag

SEQ ID NO: 241550 - DNA, 1632 bp, Artificial Sequence
  derived and/or modified sequence
atggagagcagcaagaagatggacagccccggcgccctgcagaccaatcccccccttaaactgcacactgacagatctgctggcacaccagtgttcgtacctgagcagggtgggtacaaggagaagtttgttaagactgtagaggataagtataaatgcgaaaagtgccacctggtactgtgtagcccgaagcagaccgaatgtggacatagattctgtgagtcctgcatggcagccttgctcagttcaagttctccaaagtgcaccgcatgccaggagtctatagtgaaggacaaggtcttcaaggataattgttgcaagcgggaaatcctggccttgcaaatttactgcagaaacgaatcacgcggatgcgctgagcagctgatgctgggtcatttactggtgcacctgaagaacgattgccatttcgaagagctgccatgcgtgcggccagattgcaaggaaaaagttctgaggaaagacctccgggaccacgtggaaaaagcctgcaagtacagggaggctacctgttcacattgtaagagtcaggtccctatgatcgccctgcaaaaacacgaggacacagactgcccctgcgtcgtggtttcttgcccccacaaatgctcagtgcagactctcctgaggtccgagggaacgaaccagcagatcaaagcacatgaggcaagctccgctgtgcagcatgtgaacctcctgaaggagtggtctaactcgctcgagaagaaagtgtcacttctgcagaacgaaagcgtggaaaaaaataaatccatacagagtctacacaaccagatttgttcattcgagatagaaatcgaacgccagaaggagatgttgcggaataacgaatccaagattctccacctgcagagagtgatagattcccaggcagaaaaactaaaggagctagacaaggaaatcagaccttttagacaaaattgggaagaagctgatagtatgaagtccagcgtggaatctctgcagaatcgcgtgacggagctggaaagcgtcgacaagtctgctggacaggtcgctcgcaatacaggcctgctagagtcgcaactgtcgagacacgaccagatgttaagtgtgcatgacatcaggctggccgacatggatctgcggtttcaggtactggaaacagccagctataatggcgtactgatttggaaaataagggattacaaaagaagaaaacaggaagccgtcatgggcaagaccttgtcactgtactcacagcctttttatacaggctattttggttataagatgtgcgcccgcgtatacttgaatggcgacggcatgggtaaagggacccacctcagtttgttttttgtcattatgcggggcgagtatgatgcattgttgccctggcccttcaaacagaaggtgaccctgatgcttatggatcagggaagcagcaggagacatcttggagacgctttcaagccagatcctaatagcagctcattcaaaaaaccaactggggagatgaacattgctagtggctgccccgtgtttgtcgcacaaacagttctagaaaatggcacatacataaaggacgacaccatctttattaaggttatcgtggatacatctgatctgcccgacccgtag

SEQ ID NO: 241551 - DNA, 1632 bp, Artificial Sequence
  derived and/or modified sequence
atggagtcctccaagaagatggactccccgggagccctgcagaccaatcctcctctaaaactgcacactgatagaagtgctggaactccagtattcgtgcctgagcagggcggatataaggaaaagttcgtcaagaccgtcgaggataagtacaagtgcgaaaaatgccacctggtcttgtgctcccccaagcagaccgaatgtgggcatcgcttttgcgaaagttgcatggctgcgctgctctcgtcatcctctccaaaatgtactgcctgtcaggagagcatcgttaaggacaaagtgttcaaggacaactgttgcaagcgcgaaatcctagcgttacagatctattgcaggaacgagagccggggttgtgctgagcagttaatgctgggccacctactggttcatctaaaaaatgattgccattttgaggagctgccttgcgtgagacctgattgcaaggaaaaggtgctgagaaaggacctgagagaccatgtagagaaggcttgcaaatacagggaggcaacatgtagccattgtaagtctcaggtcccgatgatcgccctgcagaagcacgaggacaccgattgcccatgtgtggtcgtcagctgccctcacaaatgctctgtgcagaccttattgagatctgaaggtacaaaccagcaaattaaggcacatgaagcctcctcagcagtgcagcacgtaaatctactgaaggaatggtctaatagccttgagaaaaaagtctctctgctccagaacgagagcgtcgagaaaaacaaatcaatccaaagcctgcacaatcagatttgctcgtttgaaatcgaaattgaacgtcagaaggagatgctgcgcaacaacgagagcaaaattctgcacctccagagagtgatcgacagccaggctgagaaactgaaggagctcgacaaggagattcgtccatttcgtcagaactgggaagaggccgattctatgaagtcgagcgtggagtcactacaaaaccgtgtgacagagctggagtccgtggacaagagtgcgggtcaggtcgcccgtaatactggtttgctcgagtctcagctgagcaggcacgatcagatgctgtccgtacacgacattcgattagcagatatggacctgcgttttcaggttctggagaccgcatcttataacggggtccttatttggaagattagagactataagcgccgaaagcaggaggctgtcatgggcaaaactctgtcactttacagccagcctttctacacaggatacttcggttataagatgtgtgcacgtgtttatctgaatggtgacgggatgggcaagggtactcatttaagcttgtttttcgtgatcatgcgtggcgagtatgatgcgctcttgccatggccatttaagcagaaggttaccctgatgcttatggaccagggctcttctagaagacacctgggagacgcttttaaacctgacccaaactcaagctcattcaagaaaccgacaggagaaatgaatatagcttctggatgtcctgtattcgtggcccagacagtgctcgaaaacgggacttatattaaagacgacaccatttttatcaaggttatcgttgacacgagcgatttacctgatccctag

SEQ ID NO: 241552 - DNA, 1632 bp, Artificial Sequence
  derived and/or modified sequence
atggagtctagtaaaaagatggattcccctggcgctttacagactaatccgccattaaagctgcatactgaccgatcggccggaacccccgtgtttgttcctgaacaggggggatataaggagaagtttgtaaagaccgtcgaagataaatacaagtgcgagaagtgccatttggtcctatgctccccgaagcagaccgaatgcggacaccgtttttgtgaaagttgcatggcggctctcttgtcaagttccagcccaaaatgtacagcttgtcaggagtctatcgtgaaggataaagttttcaaagataactgctgtaagagggagatcttggccctacagatctattgtcgcaatgagtcaaggggctgcgctgaacagctaatgctgggccacctgctggtgcacctcaaaaatgactgccactttgaagagctgccgtgcgtcaggccagattgtaaagaaaaggtccttagaaaggacctcagagatcatgtggagaaggcttgtaagtaccgggaagctacctgcagtcactgtaaatcccaagtgcccatgatcgcattacagaagcacgaagatacagactgtccctgtgtggttgtcagctgcccacataaatgctctgttcaaactcttttaaggtctgagggcaccaatcaacagatcaaagctcatgaagcatcctccgcagtccagcacgtgaacctgctcaaggaatggtccaactctctggaaaaaaaggtgtcactgttgcagaatgaatcagtggagaaaaacaagtccatccagtccctgcacaatcaaatttgttcctttgagatcgagatcgagaggcaaaaggagatgttgaggaataacgaatccaagattctgcacttacaacgcgtcatagactctcaagcagaaaagctgaaagagctggataaggagatccgaccattccgtcaaaactgggaggaggccgatagcatgaagagcagtgtggagtctcttcagaaccgcgtgactgaactcgagtcggtcgataagagcgctggccaggtggcccgaaacactggacttctggaatcccagctgtctcgccatgaccaaatgctttctgtccacgacatccgtctggccgatatggacctccgcttccaggttctggagaccgcctcatataatggtgtgctcatttggaaaatcagggactataaaaggaggaagcaggaggcggtgatgggtaaaacgttgtctctttacagtcaacctttttacacaggttacttcggctataaaatgtgtgcacgcgtgtacttgaatggggacgggatgggcaaaggaacacacctgtctttattttttgtgatcatgcggggagagtacgacgctctgctcccgtggccgttcaagcaaaaggtgaccttaatgctgatggaccaaggctccagcaggcgacacctgggggacgcattcaagccagatccaaactcttcctcgttcaagaagcccactggcgaaatgaacattgcttctggatgtccagtatttgtggcacagactgtcctggaaaacggcacatacatcaaagatgacactatcttcatcaaagtgatcgtagacactagcgatctcccagacccatag

SEQ ID NO: 241553 - DNA, 2492 bp, Artificial Sequence
  derived and/or modified sequence
gggagcgcggcgcggccgccgcgtgcgcgagccggggttgcagcccagccgggactttccagccggcggcagccgcggcggccgccggctcttccccgccccccgccatggggcagcccggggagcagaacgctgcggaccgcggcggaggacgcgcccggcgcccctgagccggccgagcggcgacggaccgcgagatgaggaaaatgaggcccaaagaagtgatgccacttggttaaggtcccagagcaggtcagaatcagacctaggatcagaaacctggctcctggctcctggctccctactcttctaaggatcgctgtcctgacagaagagaactcctctttcctaaaatggagtcgagtaaaaagatggactctcctggcgcgctgcagactaacccgccgctaaagctgcacactgaccgcagtgctgggacgccagtttttgtccctgaacaaggaggttacaaggaaaagtttgtgaagaccgtggaggacaagtacaagtgtgagaagtgccacctggtgctgtgcagcccgaagcagaccgagtgtgggcaccgcttctgcgagagctgcatggcggccctgctgagctcttcaagtccaaaatgtacagcgtgtcaagagagcatcgttaaagataaggtgtttaaggataattgctgcaagagagaaattctggctcttcagatctattgtcggaatgaaagcagaggttgtgcagagcagttaatgctgggacatctgctggtgcatttaaaaaatgattgccattttgaagaacttccatgtgtgcgtcctgactgcaaagaaaaggtcttgaggaaagacctgcgagaccacgtggagaaggcgtgtaaataccgggaagccacatgcagccactgcaagagtcaggttccgatgatcgcgctgcagaaacacgaagacaccgactgtccctgcgtggtggtgtcctgccctcacaagtgcagcgtccagactctcctgaggagcgaggggacaaaccagcagatcaaggcccacgaggccagctccgccgtgcagcacgtcaacctgctgaaggagtggagcaactcgctcgaaaagaaggtttccttgttgcagaatgaaagtgtagaaaaaaacaagagcatacaaagtttgcacaatcagatatgtagctttgaaattgaaattgagagacaaaaggaaatgcttcgaaataatgaatccaaaatccttcatttacagcgagtgatagacagccaagcagagaaactgaaggagcttgacaaggagatccggcccttccggcagaactgggaggaagcagacagcatgaagagcagcgtggagtccctccagaaccgcgtgaccgagctggagagcgtggacaagagcgcggggcaagtggctcggaacacaggcctgctggagtcccagctgagccggcatgaccagatgctgagtgtgcacgacatccgcctagccgacatggacctgcgcttccaggtcctggagaccgccagctacaatggagtgctcatctggaagattcgcgactacaagcggcggaagcaggaggccgtcatggggaagaccctgtccctttacagccagcctttctacactggttactttggctataagatgtgtgccagggtctacctgaacggggacgggatggggaaggggacgcacttgtcgctgttttttgtcatcatgcgtggagaatatgatgccctgcttccttggccgtttaagcagaaagtgacactcatgctgatggatcaggggtcctctcgacgtcatttgggagatgcattcaagcccgaccccaacagcagcagcttcaagaagcccactggagagatgaatatcgcctctggctgcccagtctttgtggcccaaactgttctagaaaatgggacatatattaaagatgatacaatttttattaaagtcatagtggatacttcggatctgcccgatccctgataagtagctggggaggtggatttagcagaaggcaactcctctgggggatttgaaccggtctgtcttcactgaggtcctcgcgctcagaaaaggaccttgtgagacggaggaagcggcagaaggcggacgcgtgccggcgggaggagccacgcgtgagcacacctgacacgttttataatagactagccacacttcactctgaagaattatttatccttcaacaagataaatattgctgtcagagaaggttttcattttcatttttaaagatctagttaattaaggtggaaaacatatatgctaaacaaaagaaacatgatttttcttccttaaacttgaacaccaaaaaaacacacacacacacacacgtggggatagctggacatgtcagcatgttaagtaaaaggagaatttatgaaatagtaatgcaattctgatatcttctttctaaaattcaagagtgcaattttgtttcaaatacagtatattgtctatttttaaggcctc

SEQ ID NO: 241554 - DNA, 2239 bp, Artificial Sequence
  derived and/or modified sequence
agaagtgatgccacttggttaaggtcccagagcaggtcagaatcagacctaggatcagaaacctggctcctggctcctggctccctactcttctaaggatcgctgtcctgacagaagagaactcctctttcctaaaatggagtcgagtaaaaagatggactctcctggcgcgctgcagactaacccgccgctaaagctgcacactgaccgcagtgctgggacgccagtttttgtccctgaacaaggaggttacaaggaaaagtttgtgaagaccgtggaggacaagtacaagtgtgagaagtgccacctggtgctgtgcagcccgaagcagaccgagtgtgggcaccgcttctgcgagagctgcatggcggccctgctgagctcttcaagtccaaaatgtacagcgtgtcaagagagcatcgttaaagataaggtgtttaaggataattgctgcaagagagaaattctggctcttcagatctattgtcggaatgaaagcagaggttgtgcagagcagttaatgctgggacatctgctggtgcatttaaaaaatgattgccattttgaagaacttccatgtgtgcgtcctgactgcaaagaaaaggtcttgaggaaagacctgcgagaccacgtggagaaggcgtgtaaataccgggaagccacatgcagccactgcaagagtcaggttccgatgatcgcgctgcagaaacacgaagacaccgactgtccctgcgtggtggtgtcctgccctcacaagtgcagcgtccagactctcctgaggagcgaggggacaaaccagcagatcaaggcccacgaggccagctccgccgtgcagcacgtcaacctgctgaaggagtggagcaactcgctcgaaaagaaggtttccttgttgcagaatgaaagtgtagaaaaaaacaagagcatacaaagtttgcacaatcagatatgtagctttgaaattgaaattgagagacaaaaggaaatgcttcgaaataatgaatccaaaatccttcatttacagcgagtgatagacagccaagcagagaaactgaaggagcttgacaaggagatccggcccttccggcagaactgggaggaagcagacagcatgaagagcagcgtggagtccctccagaaccgcgtgaccgagctggagagcgtggacaagagcgcggggcaagtggctcggaacacaggcctgctggagtcccagctgagccggcatgaccagatgctgagtgtgcacgacatccgcctagccgacatggacctgcgcttccaggtcctggagaccgccagctacaatggagtgctcatctggaagattcgcgactacaagcggcggaagcaggaggccgtcatggggaagaccctgtccctttacagccagcctttctacactggttactttggctataagatgtgtgccagggtctacctgaacggggacgggatggggaaggggacgcacttgtcgctgttttttgtcatcatgcgtggagaatatgatgccctgcttccttggccgtttaagcagaaagtgacactcatgctgatggatcaggggtcctctcgacgtcatttgggagatgcattcaagcccgaccccaacagcagcagcttcaagaagcccactggagagatgaatatcgcctctggctgcccagtctttgtggcccaaactgttctagaaaatgggacatatattaaagatgatacaatttttattaaagtcatagtggatacttcggatctgcccgatccctgataagtagctggggaggtggatttagcagaaggcaactcctctgggggatttgaaccggtctgtcttcactgaggtcctcgcgctcagaaaaggaccttgtgagacggaggaagcggcagaaggcggacgcgtgccggcgggaggagccacgcgtgagcacacctgacacgttttataatagactagccacacttcactctgaagaattatttatccttcaacaagataaatattgctgtcagagaaggttttcattttcatttttaaagatctagttaattaaggtggaaaacatatatgctaaacaaaagaaacatgatttttcttccttaaacttgaacaccaaaaaaacacacacacacacacacgtggggatagctggacatgtcagcatgttaagtaaaaggagaatttatgaaatagtaatgcaattctgatatcttctttctaaaattcaagagtgcaattttg

SEQ ID NO: 241555 - protein, 1564 aa, Artificial Sequence
  derived and/or modified sequence
MLSWRLQTGPEKAELQELNARLYDYVCRVRELERENLLLEEELRGRRGREGLWAEGQARCAEEARSLRQQLDELSWATALAEGERDALRRELRELQRLDAEERAARGRLDAELGAQQRELQEALGARAALEALLGRLQAERRGLDAAHERDVRELRARAASLTMHFRARATGPAAPPPRLREVHDSYALLVAESWRETVQLYEDEVRELEEALRRGQESRLQAEEETRLCAQEAALRREALGLEQLRARLEDALLRMREEYGIQAEERQRVIDCLEDEKATLTLAMADWLRDYQDLLQVKTGLSLEVATYRALLEGESNPEIVIWAEHVENMPSEFRNKSYHYTDSLLQRENERNLFSRQKAPLASFNHSSALYSNLSGHRGSQTGTSIGGDARRGFLGSGYSSSATTQQENSYGKAVSSQTNVRTFSPTYGLLRNTEAQVKTFPDRPKAGDTREVPVYIGEDSTIARESYRDRRDKVAAGASESTRSNERTVILGKKTEVKATREQERNRPETIRTKPEEKMFDSKEKASEERNLRWEELTKLDKEARQRESQQMKEKAKEKDSPKEKSVREREVPISLEVSQDRRAEVSPKGLQTPVKDAGGGTGREAEARELRFRLGTSDATGSLQGDSMTETVAENIVTSILKQFTQSPETEASADSFPDTKVTYVDRKELPGERKTKTEIVVESKLTEDVDVSDEAGLDYLLSKDIKEVGLKGKSAEQMIGDIINLGLKGREGRAKVVNVEIVEEPVSYVSGEKPEEFSVPFKVEEVEDVSPGPWGLVKEEEGYGESDVTFSVNQHRRTKQPQENTTHVEEVTEAGDSEGEQSYFVSTPDEHPGGHDRDDGSVYGQIHIEEESTIRYSWQDEIVQGTRRRTQKDGAVGEKVVKPLDVPAPSLEGDLGSTHWKEQARSGEFHAEPTVIEKEIKIPHEFHTSMKGISSKEPRQQLVEVIGQLEETLPERMREELSALTREGQGGPGSVSVDVKKVQGAGGSSVTLVAEVNVSQTVDADRLDLEELSKDEASEMEKAVESVVRESLSRQRSPAPGSPDEEGGAEAPAAGIRFRRWATRELYIPSGESEVAGGASHSSGQRTPQGPVSATVEVSSPTGFAQSQVLEDVSQAARHIKLGPSEVWRTERMSYEGPTAEVVEVSAGGDLSQAASPTGASRSVRHVTLGPGQSPLSREVIFLGPAPACPEAWGSPEPGPAESSADMDGSGRHSTFGCRQFHAEKEIIFQGPISAAGKVGDYFATEESVGTQTSVRQLQLGPKEGFSGQIQFTAPLSDKVELGVIGDSVHMEGLPGSSTSIRHISIGPQRHQTTQQIVYHGLVPQLGESGDSESTVHGEGSADVHQATHSHTSGRQTVMTEKSTFQSVVSESPQEDSAEDTSGAEMTSGVSRSFRHIRLGPTETETSEHIAIRGPVSRTFVLAGSADSPELGKLADSSRTLRHIAPGPKETSFTFQMDVSNVEAIRSRTQEAGALGVSDRGSWRDADSRNDQAVGVSFKASAGEGDQAHREQGKEQAMFDKKVQLQRMVDQRSVISDEKKVALLYLDNEEEENDGHWF

SEQ ID NO: 241556 - DNA, 4695 bp, Artificial Sequence
  derived and/or modified sequence
atgctgagctggagactgcagaccggccccgagaaggccgagctgcaggagctgaacgccagactgtacgactacgtgtgcagagtgagagagctggagagagagaacctgctgctggaggaggagctgagaggcagaagaggcagagagggcctgtgggccgagggccaggccagatgcgccgaggaggccagaagcctgagacagcagctggacgagctgagctgggccaccgccctggccgagggcgagagagacgccctgagaagagagctgagagagctgcagagactggacgccgaggagagagccgccagaggcagactggacgccgagctgggcgcccagcagagagagctgcaggaggccctgggcgccagagccgccctggaggccctgctgggcagactgcaggccgagagaagaggcctggacgccgcccacgagagagacgtgagagagctgagagccagagccgccagcctgaccatgcacttcagagccagagccaccggccccgccgcccccccccccagactgagagaggtgcacgacagctacgccctgctggtggccgagagctggagagagaccgtgcagctgtacgaggacgaggtgagagagctggaggaggccctgagaagaggccaggagagcagactgcaggccgaggaggagaccagactgtgcgcccaggaggccgccctgagaagagaggccctgggcctggagcagctgagagccagactggaggacgccctgctgagaatgagagaggagtacggcatccaggccgaggagagacagagagtgatcgactgcctggaggacgagaaggccaccctgaccctggccatggccgactggctgagagactaccaggacctgctgcaggtgaagaccggcctgagcctggaggtggccacctacagagccctgctggagggcgagagcaaccccgagatcgtgatctgggccgagcacgtggagaacatgcccagcgagttcagaaacaagagctaccactacaccgacagcctgctgcagagagagaacgagagaaacctgttcagcagacagaaggcccccctggccagcttcaaccacagcagcgccctgtacagcaacctgagcggccacagaggcagccagaccggcaccagcatcggcggcgacgccagaagaggcttcctgggcagcggctacagcagcagcgccaccacccagcaggagaacagctacggcaaggccgtgagcagccagaccaacgtgagaaccttcagccccacctacggcctgctgagaaacaccgaggcccaggtgaagaccttccccgacagacccaaggccggcgacaccagagaggtgcccgtgtacatcggcgaggacagcaccatcgccagagagagctacagagacagaagagacaaggtggccgccggcgccagcgagagcaccagaagcaacgagagaaccgtgatcctgggcaagaagaccgaggtgaaggccaccagagagcaggagagaaacagacccgagaccatcagaaccaagcccgaggagaagatgttcgacagcaaggagaaggccagcgaggagagaaacctgagatgggaggagctgaccaagctggacaaggaggccagacagagagagagccagcagatgaaggagaaggccaaggagaaggacagccccaaggagaagagcgtgagagagagagaggtgcccatcagcctggaggtgagccaggacagaagagccgaggtgagccccaagggcctgcagacccccgtgaaggacgccggcggcggcaccggcagagaggccgaggccagagagctgagattcagactgggcaccagcgacgccaccggcagcctgcagggcgacagcatgaccgagaccgtggccgagaacatcgtgaccagcatcctgaagcagttcacccagagccccgagaccgaggccagcgccgacagcttccccgacaccaaggtgacctacgtggacagaaaggagctgcccggcgagagaaagaccaagaccgagatcgtggtggagagcaagctgaccgaggacgtggacgtgagcgacgaggccggcctggactacctgctgagcaaggacatcaaggaggtgggcctgaagggcaagagcgccgagcagatgatcggcgacatcatcaacctgggcctgaagggcagagagggcagagccaaggtggtgaacgtggagatcgtggaggagcccgtgagctacgtgagcggcgagaagcccgaggagttcagcgtgcccttcaaggtggaggaggtggaggacgtgagccccggcccctggggcctggtgaaggaggaggagggctacggcgagagcgacgtgaccttcagcgtgaaccagcacagaagaaccaagcagccccaggagaacaccacccacgtggaggaggtgaccgaggccggcgacagcgagggcgagcagagctacttcgtgagcacccccgacgagcaccccggcggccacgacagagacgacggcagcgtgtacggccagatccacatcgaggaggagagcaccatcagatacagctggcaggacgagatcgtgcagggcaccagaagaagaacccagaaggacggcgccgtgggcgagaaggtggtgaagcccctggacgtgcccgcccccagcctggagggcgacctgggcagcacccactggaaggagcaggccagaagcggcgagttccacgccgagcccaccgtgatcgagaaggagatcaagatcccccacgagttccacaccagcatgaagggcatcagcagcaaggagcccagacagcagctggtggaggtgatcggccagctggaggagaccctgcccgagagaatgagagaggagctgagcgccctgaccagagagggccagggcggccccggcagcgtgagcgtggacgtgaagaaggtgcagggcgccggcggcagcagcgtgaccctggtggccgaggtgaacgtgagccagaccgtggacgccgacagactggacctggaggagctgagcaaggacgaggccagcgagatggagaaggccgtggagagcgtggtgagagagagcctgagcagacagagaagccccgcccccggcagccccgacgaggagggcggcgccgaggcccccgccgccggcatcagattcagaagatgggccaccagagagctgtacatccccagcggcgagagcgaggtggccggcggcgccagccacagcagcggccagagaaccccccagggccccgtgagcgccaccgtggaggtgagcagccccaccggcttcgcccagagccaggtgctggaggacgtgagccaggccgccagacacatcaagctgggccccagcgaggtgtggagaaccgagagaatgagctacgagggccccaccgccgaggtggtggaggtgagcgccggcggcgacctgagccaggccgccagccccaccggcgccagcagaagcgtgagacacgtgaccctgggccccggccagagccccctgagcagagaggtgatcttcctgggccccgcccccgcctgccccgaggcctggggcagccccgagcccggccccgccgagagcagcgccgacatggacggcagcggcagacacagcaccttcggctgcagacagttccacgccgagaaggagatcatcttccagggccccatcagcgccgccggcaaggtgggcgactacttcgccaccgaggagagcgtgggcacccagaccagcgtgagacagctgcagctgggccccaaggagggcttcagcggccagatccagttcaccgcccccctgagcgacaaggtggagctgggcgtgatcggcgacagcgtgcacatggagggcctgcccggcagcagcaccagcatcagacacatcagcatcggcccccagagacaccagaccacccagcagatcgtgtaccacggcctggtgccccagctgggcgagagcggcgacagcgagagcaccgtgcacggcgagggcagcgccgacgtgcaccaggccacccacagccacaccagcggcagacagaccgtgatgaccgagaagagcaccttccagagcgtggtgagcgagagcccccaggaggacagcgccgaggacaccagcggcgccgagatgaccagcggcgtgagcagaagcttcagacacatcagactgggccccaccgagaccgagaccagcgagcacatcgccatcagaggccccgtgagcagaaccttcgtgctggccggcagcgccgacagccccgagctgggcaagctggccgacagcagcagaaccctgagacacatcgcccccggccccaaggagaccagcttcaccttccagatggacgtgagcaacgtggaggccatcagaagcagaacccaggaggccggcgccctgggcgtgagcgacagaggcagctggagagacgccgacagcagaaacgaccaggccgtgggcgtgagcttcaaggccagcgccggcgagggcgaccaggcccacagagagcagggcaaggagcaggccatgttcgacaagaaggtgcagctgcagagaatggtggaccagagaagcgtgatcagcgacgagaagaaggtggccctgctgtacctggacaacgaggaggaggagaacgacggccactggttctag

SEQ ID NO: 241557 - DNA, 4695 bp, Artificial Sequence
  derived and/or modified sequence
atgttaagctggcgtctgcagacgggacctgaaaaggctgagctccaggagctcaacgcccgcctctacgactacgtctgtcgcgtccgggaacttgaaagagagaaccttctgctggaagaggaactgcggggcaggagaggacgagaaggcctttgggccgaaggacaagctagatgtgccgaggaggcaagatcactgagacagcagctggacgagctatcctgggcaaccgctctggccgagggggagcgagacgcgctgagacgggagctgagagaattgcaacgcctggatgccgaggagcgcgcagcacgaggaaggcttgatgccgagcttggagcacagcagcgggagttacaagaagctctcggggctagagccgctctcgaggccttactgggccgtctacaggccgaacggaggggactcgatgctgcccatgagagagatgtaagagaattgcgggctcgtgcggcgtctcttaccatgcacttcagagcccgcgctacaggtcctgcagctccaccaccgaggctgagagaagtgcacgactcttacgcactgctggtagcggagagctggagggagactgtccagctctatgaggacgaagtgcgtgagctggaggaggcgctgaggcgtgggcaggagagccgcttgcaagctgaggaagagacccgcctgtgtgcacaggaggccgcccttcggcgggaagcccttggcctggagcagcttagagccaggctagaggatgctctgctgcggatgagagaagagtatggcatccaagctgaagagcgtcagcgcgtgattgactgcctcgaggatgagaaagctacactgactctagcaatggccgattggctgcgcgactatcaggaccttcttcaggtaaagactggtctctctcttgaagtggcgacatacagggcgctcctggagggtgaatccaatcctgagattgtgatatgggcagaacacgtggagaatatgccttcagagttcaggaacaagtcgtaccattataccgactccctcctccagagagagaatgaaagaaacttgttcagtagacagaaagcccctctcgcgtcctttaatcacagttcggccctttactcaaatctgagcgggcatcgaggaagccagactggaaccagcatagggggcgatgctcgtcggggttttctgggcagcggctacagcagcagtgccactacacagcaagagaactcgtacggaaaggcagtgagttctcagacaaatgtgcgcactttttccccaacatacggtctactcaggaacaccgaagcccaggtgaagacattccccgaccgccccaaggcaggtgacacacgggaagtcccggtgtacatcggagaggatagtacaatcgcacgcgaatcctacagagatagacgagacaaggtggccgcaggcgcctccgagagcacacggtccaacgagcgcacagtcatcctgggcaaaaagacagaggtgaaagcgaccagggaacaggaacgcaatagacccgagacaataaggaccaaaccagaggagaagatgttcgattctaaggagaaggcgtcagaggaacgcaacctcagatgggaggagttaacaaagctcgataaggaggcaaggcagcgcgaatctcagcaaatgaaagaaaaagctaaggaaaaagacagccccaaggaaaaatccgtgcgcgaacgtgaggtgcccatcagtctggaggtttctcaggaccgtcgggcggaagtaagccccaagggactgcagacccctgtgaaagatgccggtggaggcacgggcagggaagccgaagcaagagagctcagattccgtctgggtactagcgacgctacaggaagcctgcaaggcgattccatgaccgagacggttgccgagaacatagttacttctatcctgaagcagtttacccagtcgcccgagaccgaagctagcgcagactcctttccagacaccaaggtgacctacgtggacagaaaggagctccccggcgaaagaaagacgaagaccgaaattgttgtcgagtctaagctaacagaagacgtagacgtcagtgacgaggccggtctggattacctgctgagtaaagatattaaggaggtgggcctgaagggcaagagcgcagaacagatgatcggcgacattatcaacctgggactgaaagggagagaagggcgcgctaaagttgtgaacgtagagatcgtcgaagagccagtgtcgtatgtaagcggcgaaaagcccgaagagttttcagtcccctttaaggtagaagaagttgaggacgtgagtcccggcccatggggtttggttaaggaggaagagggctatggtgaaagcgacgtgaccttttccgtgaatcagcaccggagaaccaagcaaccccaagaaaatactacccacgtagaggaggtgaccgaggccggggattccgaaggtgagcagtcatacttcgtttccactcctgacgaacaccccggcggccacgatagggatgatggttctgtatacggtcagattcatatcgaggaggaatctacgatcaggtatagttggcaggacgaaatagtgcaggggacccgccggagaacacaaaaagatggggcagttggagagaaggtagttaaaccactggacgttccagcacctagcctggagggcgacctgggatccacacactggaaggagcaagctcggagtggtgaattccatgcggaacctactgtgattgaaaaagaaatcaagattccacacgagtttcacactagcatgaaaggcatcagctctaaggaaccacggcagcagttagtcgaggttatcggccagcttgaggaaaccctgcccgaacggatgcgcgaggagctgagcgctcttaccagggagggccagggtggtcctggtagtgtttcagtggatgtgaaaaaggtgcagggcgcaggcggatcgtctgttaccctcgttgccgaagttaatgtgagccagacagtggatgccgatcggctggacctcgaagaactgagtaaagatgaggcctccgaaatggaaaaagccgtggagtccgttgtccgggagtccctgtcaagacagcggagccctgctccaggaagtccggacgaggaaggaggggccgaagctccggctgcaggaattaggttccggagatgggctacccgcgagctgtatatccctagcggtgaatccgaagtcgcagggggcgcttcccacagcagcggacagagaactccgcaggggcccgttagcgcgacggtggaagtgtcctccccaacgggattcgctcaatctcaggtgctggaggacgtaagtcaggcggcacgacacataaagttgggccctagcgaggtttggcgaacggaaaggatgagttatgaaggcccaactgccgaggtagttgaggtgtccgcaggcggcgacctctctcaggctgcttcacccacaggggctagcaggtcagtgagacacgtcaccctcggacccggccagagccccctgtcccgagaggtgatatttctgggtccagcgccagcatgccccgaggcatgggggagtccagagccaggaccagctgaaagctcggctgatatggatgggagtgggcggcacagtacattcggctgtcgccagtttcacgcagagaaggagattatctttcagggacctatctctgccgcaggaaaggtgggtgactatttcgcgaccgaagaatccgtggggacccagacatctgttagacagctccaactcggaccaaaggaaggcttcagcggccagatccaattcactgcgcctttgagcgataaggttgagctgggagttatcggcgattctgttcacatggaggggctgcccggcagcagcaccagtattcggcatatttctattggcccacagagacatcagacgacccagcagattgtgtaccatgggctggtgccccagcttggggagtccggggactctgagtctaccgtgcacggcgagggcagtgccgacgtccaccaagcaacacattcacatactagcggtcgtcagaccgtgatgacagagaagagcaccttccagtccgtggtgagcgaatcaccccaggaagacagcgcggaggatacttctggagccgagatgaccagcggggtgagccgtagctttaggcacattaggctgggtcctaccgaaacagaaacttcagagcatatcgccattcgcggccccgtgagtcggacatttgttctcgcagggtccgcagactcgccggagctgggtaagctggcagattccagtcggacgctccgtcatattgcccctggccctaaagaaacgtcattcaccttccagatggacgtctccaacgttgaggcaataaggagtagaacccaggaggcaggcgcactcggggtttccgaccgcggatcatggcgggacgccgactcccggaatgatcaggctgtcggagtttcatttaaggcgtcggctggggagggcgatcaagcccacagggagcaaggtaaggaacaggctatgtttgacaaaaaggtgcagctgcagagaatggtggatcagagatctgttatttcagacgaaaagaaagtggccctgctttacctggataatgaggaagaggaaaacgatgggcactggttctag

SEQ ID NO: 241558 - DNA, 4695 bp, Artificial Sequence
  derived and/or modified sequence
atgctgtcctggaggctgcagacaggccctgagaaggccgagctgcaggagctgaatgcccggctgtatgactatgtgtgccgggtgcgggagctggagcgggagaacctgctgctggaggaggagctgcggggccggcggggccgggagggcctgtgggccgagggccaggcccgctgtgccgaggaggcccggagcctgcggcagcagctggatgagctgtcctgggccacagccctggccgagggggagagagatgccctgcggcgggagctgcgggagctgcagaggctggatgctgaggagcgggccgcccggggccgcctggatgctgagctgggcgcccagcagcgggagctgcaggaggccctgggcgcccgggccgccctggaggccctgctgggccgcctgcaggccgagcggcggggcctggatgctgcccacgagagagatgtgcgggagctgcgggcccgggccgccagcctgaccatgcacttccgggcccgggccactggacctgctgcccccccaccccggctgcgggaggtgcatgacagctatgccctgctggtggccgagagctggagggagaccgtgcagctgtatgaagatgaggtgcgggagctggaggaggccctgcggcggggccaggagagccggctgcaggccgaggaggagacccggctgtgtgcccaggaggccgccctgcggcgggaggccctgggcctggagcagctgcgggcccggctggaggatgccctgctgaggatgagggaggagtatggcatccaggccgaggagcggcagagggtcatcgactgcctggaggatgagaaggccaccctgaccctggccatggctgactggctgcgggactaccaggacctgctgcaggtgaagacaggcctgagcctggaggtggccacctaccgggccctgctggagggggagagcaaccctgagatcgtcatctgggccgagcacgtggagaacatgcccagcgagttcaggaacaagagctaccactacacagacagcctgctgcagagagaaaatgaaagaaacctcttcagccggcagaaggcccccctggccagcttcaaccacagcagcgccctgtacagcaacctgagcggccaccggggcagccagacaggcaccagcattggaggagatgcccggcggggcttcctgggcagcggctacagcagcagcgccaccacccagcaggagaacagctatggcaaggctgtgagcagccagaccaacgtgaggaccttcagccccacctacggcctgctgaggaacacagaggcccaggtgaagaccttcccagaccggcccaaggccggggacacccgggaggtgcctgtgtacatcggggaggacagcaccatcgcccgggagagctacagagaccggcgggacaaggtggccgccggggccagcgagagcaccaggagcaatgaaagaactgtcatcctgggcaagaagacagaggtgaaggccacccgggagcaggagaggaacagacctgagaccatccgcaccaagccagaggagaagatgtttgacagcaaggagaaggccagcgaggagaggaacctgcgctgggaggagctgaccaagctggacaaggaggcccggcagcgggagagccagcagatgaaggagaaggccaaggagaaggacagccccaaggagaagtctgtgcgggagcgggaggtgcccatcagcctggaggtgtcccaggaccggcgggcagaggtgagccccaagggcctgcagacccctgtgaaggatgctgggggcggcaccggccgggaggccgaggcccgggagctgcgcttccggctgggcaccagtgatgccaccggcagcctgcagggcgacagcatgacagagaccgtggctgaaaatattgtgaccagcatcctgaagcagttcacccagagccctgagacagaggccagcgctgacagcttcccagacaccaaggtgacctacgtggacaggaaggagctgcccggggagaggaagaccaagacagaaattgtggtggagagcaagctgacagaagatgtggatgtgtctgatgaagctggcctggactacctgctgagcaaggacatcaaggaggtgggcctgaagggcaagtctgctgagcagatgattggagacatcatcaacctgggcctgaagggccgggagggccgggccaaggtggtgaatgtggagatcgtggaggagcctgtgtcctatgtgtctggagagaagccagaggagttctctgtgcccttcaaggtggaggaggtggaggatgtgtccccaggcccctggggcctggtgaaggaggaggagggctatggagagagtgatgtgaccttctctgtgaaccagcacaggaggaccaagcagccccaggagaacaccacccacgtggaggaggtgacagaggccggggacagcgagggggagcagagctactttgtgtccaccccagatgagcaccctgggggccatgacagagatgatggctctgtgtatggccagatccacatcgaggaggagagcaccatccgctacagctggcaggatgagatcgtgcagggcaccaggaggaggacccagaaggatggagctgtgggggagaaggtggtgaagcccctggatgtgcctgcccccagcctggagggggacctgggcagcacccactggaaggagcaggcccggagcggggagttccacgccgagcccaccgtcatcgagaaggagatcaagatcccccatgagttccacacctccatgaagggcatcagcagcaaggagccccggcagcagctggtggaggtgattggccagctggaggagaccctgcctgagaggatgagggaggagctgagcgccctgacccgggagggccagggcggccctggctctgtgtctgtggatgtgaagaaggtgcagggcgccggcggcagctctgtgaccctggtggccgaggtgaatgtgtcccagacagtggatgctgaccggctggacctggaggagctgagcaaggatgaggccagcgagatggagaaggctgtggagagcgtggtgcgggagagcctgagccggcagaggagccctgcccctggcagcccagatgaggagggcggcgctgaggccccagctgctggcatccgcttccgccgctgggccacccgggagctgtacatccccagcggggagagcgaggtggccggcggggccagccacagcagcggccagaggaccccccagggccctgtgtctgccaccgtggaggtgagcagccccaccggctttgcccagagccaggtgctggaggatgtgtcccaggccgcccggcacatcaagctgggccccagcgaggtgtggaggacagagaggatgtcctatgagggccccacagctgaggtggtggaggtgtctgctggaggagacctgagccaggccgccagccccaccggggccagccgctctgtgcgccacgtgaccctgggccctggccagagccccctgagccgggaggtgatcttcctgggccctgccccagcctgcccagaggcctggggcagccctgagcccggccctgctgagagcagcgctgacatggatggcagcggccgccacagcaccttcggctgccggcagttccacgccgagaaggagatcatcttccagggccccatctctgctgctgggaaggtgggggactactttgccacagaggagagcgtgggcacccagacctctgtgcggcagctgcagctgggccccaaggagggcttcagcggccagatccagttcaccgcccccctgagtgacaaggtggagctgggcgtgattggagacagcgtgcacatggagggcctgcccggcagcagcaccagcatccgccacatcagcatcggcccccagaggcaccagaccacccagcagatcgtgtaccacggcctggtgccccagctgggggagagcggggacagcgagagcacagtgcatggagagggcagcgcagatgtgcaccaggccacccacagccacaccagcggccggcagacagtgatgacagagaagagcaccttccagagcgtggtgtctgagagcccccaggaggacagcgctgaggacaccagcggggctgagatgaccagcggcgtgagccgctccttccgccacatccggctgggccccacagaaacagagaccagcgagcacatcgccatccggggccctgtgtccaggacctttgtgctggccggcagcgctgacagccctgagctgggcaagctggccgacagcagcaggaccctgcggcacatcgcccctggccccaaggagaccagcttcaccttccagatggatgtgtccaatgtggaggccatccgcagcaggacccaggaggccggggccctgggcgtgtctgaccggggctcctggagagatgctgacagcagaaatgaccaggccgtgggcgtgtccttcaaggccagcgctggggagggggaccaggcccaccgggagcagggcaaggagcaggccatgtttgacaagaaggtgcagctgcagaggatggtggaccagaggagcgtcatcagtgatgagaagaaggtggccctgctgtacctggacaatgaggaggaggagaatgatggccactggttctag

SEQ ID NO: 241559 - DNA, 4695 bp, Artificial Sequence
  derived and/or modified sequence
atgctgagctggcggctgcagaccggccccgagaaggccgagctgcaagagctgaatgcccggctctatgactacgtgtgccgtgtgcgtgagttggagagagaaaacttgctcttagaggaagaattgcgggggaggaggggaagggagggactgtgggcggaagggcaggcccgctgtgcggaagaggccaggtcactaagacagcagctggacgaactgagctgggcaacggcactggcggaaggggaacgcgatgccctgagaagggagcttcgcgaactacaacggcttgacgccgaggagagagccgccagggggagactggacgctgagttgggcgcccagcagagggaactgcaggaagcgctgggtgccagagctgccctggaagccctcctaggtcgactacaagccgagcggagaggcttggatgcggcgcacgaacgggatgtccgtgaactaagggccagagccgctagtctgaccatgcactttagggctcgggcaaccggacctgcagcgcctccgcctcggctcagggaagtgcacgattcatatgccttactggttgctgagtcatggagagagactgttcagctctatgaagatgaagtcagggagttagaagaagcgctgcggcgcggtcaagagagtaggctccaggcggaggaggagacaaggttatgtgcccaggaagctgcactccggcgcgaggctctgggccttgaacagctccgggcgcgtcttgaagacgccttgctgagaatgagggaggagtatggtattcaggccgaagagagacagagagtcatcgattgcctcgaggacgagaaagcaacgttgaccctcgcaatggctgactggctgcgggactaccaggatctcttgcaggttaagactgggctatctctcgaggtagccacctacagagccctgctggagggtgagagcaatcctgagattgtcatatgggctgaacatgtggaaaatatgccatccgaattccgcaataagagttaccactacaccgactcattacttcagcgggagaatgagcgaaatctcttctctaggcaaaaagcgcctttggcctcattcaatcacagctctgctctatatagtaatctaagcggccacaggggatcacagaccggcacatcaataggtggcgacgcacggcggggcttccttggctccgggtattcgtcttccgccaccacccagcaggaaaactcctacgggaaagccgtttctagccaaactaacgtgcggaccttcagccccacgtacggccttttgaggaataccgaggctcaagtaaagaccttccccgaccgccccaaagctggcgatactagagaagtgcctgtgtatataggagaggactccactatagctagagaaagttatcgggacaggagagacaaggttgccgctggggcttcagaatctacccgaagcaatgaacggaccgtcattctgggaaaaaaaacagaagtgaaggctacaagggaacaggaaagaaatcggcccgagaccatcaggaccaagccggaggagaaaatgttcgatagtaaggaaaaggcatccgaagagcggaatctgaggtgggaggaactgacaaagcttgataaagaggcccggcagagggaatcacagcagatgaaggaaaaagcaaaggagaaagactcacctaaagaaaagagtgtgagggagcgcgaagtgcccattagcctggaggtatcccaggaccgaagagcggaagtgtcacctaagggattgcaaactcccgttaaggatgcaggcggtgggacaggcagagaagccgaggctcgagagcttcgctttcggctcggcacctccgatgcgaccggctccctacagggggattccatgactgagaccgtagcagagaatatcgttacttctattctcaaacagttcactcaatcacctgaaacagaggcttctgctgattcttttcccgataccaaagtgacatatgtggatagaaaagagctgcctggagaaagaaagaccaagacggagatcgtagtggaaagcaaacttactgaggatgtggacgtttccgacgaagcaggcctggactatctcctgagcaaggatataaaagaagtcggtcttaaaggtaaatccgccgaacagatgattggagacattatcaatctgggcttgaaaggcagagaggggcgcgccaaggttgtcaacgttgaaatcgtcgaggagcccgttagctacgtaagtggtgaaaaacccgaagagttttccgtgccctttaaggttgaagaggtcgaagacgtgagcccaggcccttgggggctcgtaaaagaggaagagggctacggtgaaagcgatgtaacatttagtgtgaatcagcatcgccggacaaaacagccccaggagaacaccacccacgtggaggaggttactgaagctggggacagcgaaggtgagcaaagctacttcgtatccaccccagatgagcatcccggagggcatgatcgcgacgacgggtccgtatatggccaaatccatatcgaggaagaatccaccattagatacagttggcaggacgaaattgtgcagggaaccaggcggaggacccagaaagacggggctgtcggtgagaaagtcgtaaagccactcgatgtccctgcccctagcctggagggcgacctgggaagcacgcactggaaagagcaagcccggtctggcgagtttcacgcagagcccacagtgattgaaaaggagattaaaattccacacgagttccatacatcaatgaagggtatttcaagcaaggaaccccggcaacaattagtggaagtcataggccagcttgaagaaacactgcctgaacgcatgcgagaggagctctcggcccttaccagagaagggcaaggagggcccggaagtgtgtccgtggacgtaaagaaagtgcagggtgccggcggctcatctgttacactagtagccgaagttaacgtgtcacaaaccgtagatgccgaccgtctggacttagaagagttgagtaaggacgaagcaagtgagatggagaaagccgtggagagcgtggtaagggagagcctctcccggcagcggtcaccagcgccggggtccccggacgaagaaggcggagcagaagccccagcggccggcattcgtttccggcgctgggccacacgagaactgtatatcccatcaggggagtcagaggtcgccggaggcgcttctcacagttctgggcagcggaccccccagggccccgtatcggcgaccgttgaagtatcttcccccacaggcttcgctcaaagccaggtgctggaagacgtttctcaggccgccaggcacatcaagttgggacctagtgaagtatggaggaccgagcgcatgtcgtatgagggaccaaccgcagaggtggtggaagtatcggcaggcggggacttatctcaggccgcctcacctaccggtgcgagcagatctgtaaggcacgtgacattgggaccagggcagagcccgctgtcacgggaggtgattttcctgggtcccgctccagcttgcccagaagcttggggctctcccgagccagggccggcggagtcttctgctgatatggatggcagtggccggcacagtacattcggctgtagacagtttcatgccgagaaggagatcatttttcagggacctataagcgccgcgggtaaggttggcgactactttgcaacagaagaatccgtcgggacacaaacctccgttcgtcagcttcaactgggtcccaaggaaggcttttctgggcagattcagtttacagcccccctgagcgataaagtggaactcggcgttataggcgactctgtccacatggagggccttcccggctctagcacaagtattaggcacatcagcattggcccccagcggcatcagaccacacagcagattgtttatcatggcctggtgccacaactgggcgaatctggtgactctgaaagcacagtccatggcgaggggtccgcggatgtccatcaggcgacccacagccacacctctggtaggcagacagtaatgaccgagaaatcgacttttcagtccgtggtatctgaaagtcctcaggaggactccgccgaggatacctccggggccgaaatgaccagtggggtgtcccggtccttcaggcatatcaggctgggccctactgagaccgagacgtctgagcatatcgccatcaggggacccgtgagccgaacattcgtactggccggtagtgccgacagcccagagctgggtaagctggccgacagttccagaacgctccggcatattgccccaggccccaaggaaacatcctttacgtttcagatggacgtatcaaacgtggaggctatcagaagccgaacacaggaggcgggggcacttggggtgtcagatcgagggagctggagagacgcggactcccggaacgatcaggcagtcggagtgtcctttaaagcatccgccggagagggggatcaggcgcatagagaacagggcaaagagcaggccatgtttgacaaaaaagtgcagctgcaaagaatggttgatcaacgctcggtgattagcgatgaaaaaaaagttgctctgctctacttggacaacgaggaggaggaaaatgatggacattggttctag

SEQ ID NO: 241560 - DNA, 4695 bp, Artificial Sequence
  derived and/or modified sequence
atgctttcatggcgcttacaaaccggccctgagaaggccgagctgcaagaattgaatgctagactatacgactacgtttgccgcgtgcgggaactggagagagagaacttgctcttggaggaagaattacgagggaggagggggagagaaggcttgtgggctgaagggcaagccagatgtgctgaggaggcaagatcactgcgacagcagctcgatgagctgtcctgggctactgcactagcagagggcgaacgggacgctttgagacgagaattgagagagctgcagagattggatgccgaggaacgcgctgccaggggcaggcttgacgccgagttaggcgctcaacaacgtgagctgcaggaagccctgggggcaagagcggctctcgaagctctgctgggaaggctccaggcagagagaagaggactggatgctgctcacgaaagggacgttcgggagctgagagcccgagcagcaagtcttaccatgcactttcgtgccagagccacagggccagcagctcctcccccacgcctgcgagaggttcacgacagctacgccttactggtggccgagagctggagagagacagttcagttatacgaggatgaggttagggagctggaggaagctttgcgtaggggtcaggagtctcgcttgcaggctgaggaggagactcgcctctgcgctcaggaggcagctctacgcagagaagcacttggcttagagcagctgcgcgcaaggttggaggacgctctcttgcgaatgcgagaggagtacggaattcaggccgaagagagacagagagtcattgactgtttagaggacgaaaaggcaacactgacccttgctatggccgactggctccgcgactaccaggatttgcttcaggtgaagaccgggttaagcctggaagtcgcaacatacagggcactgttggagggcgaaagcaatcccgagatcgtcatctgggcagaacatgttgagaacatgccgtctgagtttcggaataaaagttatcactatacagacagcctactgcagcgcgagaatgaacgcaacctcttttcacgccagaaggccccactggccagcttcaaccattcctccgcactttactctaacctcagcggccaccgaggtagtcagacaggaacatccatcggaggcgatgccaggcgtgggtttctcggatcggggtacagcagctcggctactacccaacaggagaacagctatggcaaggctgttagttctcagactaacgtcaggaccttcagtcctacatatggactactgcggaacactgaggctcaggtaaaaacattccctgaccggccaaaagccggagacacacgggaggtgcctgtgtacatcggtgaggacagtacaatcgcccgtgagagctaccgggatcggagggacaaagtagctgctggggctagcgagtcaacacgatccaacgagaggactgtgatcttaggcaagaaaaccgaagttaaagccacccgggagcaggagagaaatcgccctgaaacaatccgcacgaaacctgaagagaagatgttcgactctaaagaaaaagctagcgaggagaggaatctgcggtgggaagaacttaccaaactcgacaaagaggcccgtcagagggaaagtcagcagatgaaggaaaaggcaaaagagaaggattcaccgaaggaaaagagcgtaagagagcgcgaagttcccatcagcctcgaagtaagccaagacagaagagctgaggtgagccccaaaggcctccagactcctgtgaaagacgctggaggcggaacaggtcgagaggcagaggctcgggaactccggttcagacttggtacaagcgacgcaacaggatctctccaaggcgactccatgactgagaccgtggcggaaaacattgtcacaagtatcctcaagcaatttacgcagtcacccgagacagaggcatctgcagattcctttccagacactaaggtgacatacgtggatcgtaaagaactgccaggagaaaggaagacaaaaacggagattgtagtggagtcaaaattaacagaggacgttgacgtgagcgatgaggctgggctcgattatctactgtccaaggatatcaaggaggtgggcctcaaaggaaaaagcgcagaacaaatgattggcgatattatcaatcttggcctgaagggaagggaaggtagggcaaaggtggtcaacgtggagatcgtggaagaacctgtgtcttacgtgtctggcgagaaacccgaagagttctcagtgccctttaaggtggaggaagttgaggatgtaagccctgggccttgggggttggtgaaggaggaagagggttatggggagtccgatgtcacattctcggtcaaccagcaccggcgtactaagcaaccccaagagaatacaactcatgtagaggaggtcactgaagcaggggacagtgagggggagcagagctactttgtgagtactccggatgagcacccaggtggccatgaccgcgacgatggatccgtttacggtcagatacatattgaagaggagagtaccattaggtactcctggcaagacgagatagttcaggggacacgccgaaggacacaaaaggacggggctgtgggtgagaaagtggtcaaaccgttagacgtacccgctccaagtctcgagggtgatctcggtagcacacactggaaggaacaggcaagatctggagaatttcacgccgaacctacagtgatagagaaagagattaaaatccctcacgagttccatacctctatgaaagggatttcctccaaggagcctagacaacagctggtagaagtcatcggtcaacttgaagaaaccctgcccgagaggatgagagaagagctatccgcactgactcgtgaaggccaggggggacctgggtcagtgagcgtagacgtaaaaaaagtccagggagctggcggtagtagcgtaacactggtcgccgaggttaacgtgagtcaaaccgtggatgctgaccggcttgatctggaggagctgtctaaagacgaagcaagcgaaatggagaaggccgtcgaatccgtcgtgcgtgaatcactgtctaggcagcggagccctgccccaggctccccagacgaggaaggtggggctgaggcacctgcagctgggattcgtttcaggcgttgggcaacccgcgagctgtacattccaagcggtgagtccgaggtggcaggcggagcttcccactcatctggtcagaggacaccccaggggccagtctcagccacagtggaggtcagttctcctaccggattcgctcagagccaggtccttgaagatgtctctcaggccgctcgtcacattaagcttggaccttccgaagtatggcggactgaaaggatgtcgtatgagggacctactgctgaggtcgtggaagtctcagccggtggggacctgtctcaagcggcaagcccaacgggcgcaagtcggtccgtgaggcacgttacattagggcctggtcagagtcccttgagccgggaggtgatctttctgggacccgctccggcatgccccgaggcgtgggggtctcctgagcccggtcccgcagagagttccgccgatatggacggatctggcagacattctacttttggttgtagacaattccatgcagaaaaggagataatcttccagggcccaatctcagcggcaggcaaggtaggggactactttgcaactgaagaaagcgttgggacccaaacttctgtgaggcaattgcagctgggccctaaagaggggttctcaggacagatacagtttaccgcccctttgtctgataaggtggaacttggcgtgattggggacagcgttcacatggaaggtctccccggttcatccacaagcatcaggcacatctctattggtccacagaggcatcagaccacgcaacagatagtctaccacggccttgtgcctcagctgggcgagagcggggactctgagagcacagtgcacggggagggaagcgccgatgtccatcaggctactcattcacacacctcaggcaggcagacagtcatgacggagaagagcacgttccagtcagtggtgagcgaatctccacaggaggacagcgctgaagacacttccggtgctgagatgacaagcggggtgagtagaagttttcggcatataaggctggggcctactgaaacggaaacaagcgaacatatcgctatcagagggccagttagccgcacattcgtcctcgccggatcagccgattcccccgagctgggtaagctcgcagacagttctaggactctgcgccacatcgcccctggaccaaaggagactagcttcacattccagatggacgtaagtaacgtcgaggccatcaggtccaggacacaggaggcaggcgctcttggcgtgtctgatcgcggaagctggcgggacgccgatagccgcaatgatcaggccgtcggcgtatccttcaaagcgtccgccggtgaaggggaccaggcacatagggagcaaggtaaggagcaggccatgttcgataagaaagtgcagctgcaacgtatggtcgaccaacggtcagtgatctctgacgagaaaaaggtcgcattgctttacctcgacaacgaagaagaggagaatgatggacactggttctag

SEQ ID NO: 241561 - DNA, 7322 bp, Artificial Sequence
  derived and/or modified sequence
agtctgcgggcctccggggcagcggcgaggccggagcgtcgcggcggagaggacgagaccgggacaagaccagggcaggagggagccggccagccgcgagaaccccgcacgcccggcaagatgctgtcctggcggctgcagacgggccccgagaaggccgagctccaggagctcaacgcccggctctatgactacgtgtgtcgggtgcgggagctggagcgcgaaaacctactcctggaggaggagctgcgcggccggcgcgggcgagagggcctgtgggccgaggggcaggcccgctgcgccgaggaggcgcgcagcttgcggcagcagctggacgagctgagctgggccactgcgctggcggagggcgagcgggacgctctgcggcgcgagctgcgggagctgcagcgcctggatgcggaggagcgcgccgcccgcggccgcctggacgccgagctgggtgcgcagcagcgcgagctgcaggaggcgctgggcgcgcgcgccgccctcgaggcgctgctgggccggctgcaggccgagcgccgaggcctcgacgcggcccacgaacgcgacgtgagggagctgcgcgcgcgcgccgccagccttaccatgcatttccgcgcccgcgccaccggccccgccgcgccgccgccacgcctgcgggaggtgcacgacagctacgcactgctggtggccgagtcgtggcgggagacggtgcagctgtacgaggacgaggtgcgcgagctggaggaggcgctgcggcgcggccaggagagcagactccaggcggaggaagagacgcggctgtgcgcgcaggaggcagcgctgcggcgcgaggcgctcgggttggagcagctgcgcgcgcggctggaggacgcgctgctgcggatgcgcgaggagtacgggatacaggccgaggagcggcagagagtgattgactgcctggaggatgagaaggcaaccctcaccttggccatggctgactggctgcgggactatcaggacctcctgcaggtgaagaccggcctcagtctggaggtggcgacctaccgggccttattggaaggagaaagtaatccagagatagtgatctgggctgagcacgttgaaaacatgccgtcagaattcagaaacaaatcctatcactataccgactcactactacagagggaaaatgaaaggaatctattttcaaggcagaaagcacctttggcaagtttcaatcacagctcggcactgtattctaacctgtcagggcaccgtggatctcagacgggcacatctattggaggtgatgccagaagaggcttcttgggctcgggatattcttcctcggccactacccagcaggaaaactcatacggaaaagccgtcagcagtcaaaccaacgtcagaactttctctccaacctatggccttttaagaaatactgaggctcaagtgaaaacattccctgacagaccaaaagccggagatacaagggaggtccccgtttacataggtgaagattccacaattgcccgcgagtcgtaccgggatcgccgagacaaggtggcagcaggtgcttcggaaagcacacggtcaaatgagaggaccgtcattctgggaaagaaaacagaagtgaaagccacgagggagcaagaaagaaacagaccagaaaccatccgaacaaagccagaagagaaaatgttcgattctaaagagaaggcttccgaggagagaaacctaagatgggaagaattgacaaagttagataaggaagcgagacagagagaaagccagcagatgaaggagaaggctaaggagaaggactcaccgaaggagaagagcgtgcgagagagagaggtgccgattagtctagaagtatcccaggacagaagagcagaggtgtccccgaaaggtttgcagacgcctgtgaaggatgctggtggtgggaccggtagagaggcagaagcaagagagctacggttcaggttgggcaccagtgatgccactggttctctgcaaggcgattccatgacagaaaccgtagcagaaaacatcgttaccagtatcctgaagcagttcactcagtctccagagacagaagcatctgctgattcttttccagacacaaaagtcacttacgtggacaggaaagagcttcctggggaaaggaaaacaaagactgaaatagttgtggagtctaaactgactgaggatgttgatgtttccgatgaagctggcctggactaccttttaagcaaggatattaaggaagtggggctgaaaggcaagtcagccgagcagatgataggagacatcatcaacctcggcctgaaagggagggaggggagagcaaaggtcgtcaacgtggagatcgtggaggagcccgtgagttatgtcagcggggagaagccggaggagttttccgtcccattcaaagtggaggaggtcgaagatgtgtcgccaggcccctgggggttggttaaggaggaggaaggttatggagaaagcgatgtcacattctcagttaatcagcatcgaaggaccaagcagcctcaggagaacacgactcacgtggaagaagtgacagaggcaggtgattcagagggcgagcagagttattttgtgtccactccagatgaacaccccggggggcacgacagagatgacggctcggtgtacgggcagatccacatcgaggaggaatccaccatcaggtactcttggcaggatgaaatcgtgcaggggactcgaaggaggacacagaaggacggtgcagtgggcgagaaggttgtgaagcccttggatgtcccagcgccctctctggagggggacctgggttccactcactggaaagaacaagctagaagcggtgaatttcatgccgaacccacagtcattgaaaaagaaattaaaataccccacgaattccacacctccatgaagggcatctcctccaaggagccccggcagcagctggtggaggtcatcgggcagctggaggaaacccttcccgagcgcatgagggaggagctgtccgccctcaccagagaggggcagggtgggccggggagcgtttccgtggatgtcaagaaggtccagggtgctggtggcagttccgtgaccctggttgctgaagtcaacgtctcacaaactgtggatgccgatcggttagacctggaggagctgagcaaagatgaggccagtgagatggagaaggctgtggagtcggtggttcgggagagcctgagcaggcaacgcagcccagcgcctggcagcccagatgaggaaggtggagcggaggccccggctgctggcattcgctttaggcgttgggccacccgggagctgtacatcccttcaggcgagagcgaggttgctggtggggcctctcacagctcgggacagcgcactccccagggcccagtgtcggccactgtggaggtcagcagccccacaggctttgcccagtcacaggtgctggaggatgtgagccaggctgcaaggcacataaaactcggcccctctgaagtctggaggactgagcgaatgtcatatgaaggacccactgcagaagtggtggaggtaagtgcgggaggtgacctaagtcaggcagcgagcccgaccggagccagccggtctgtgaggcatgtcacgctgggtcccggtcaaagtccactgtccagagaagtcatcttcctaggccctgcccctgcctgtccagaggcatggggctcgccagaacctggcccagcagagtcttctgcagatatggacggatcagggaggcacagcacatttggctgcagacaatttcatgctgaaaaggagattatttttcagggccccatttctgctgcagggaaggttggtgattattttgcaacagaagagtcagtgggtacccagacttctgtcaggcaactccagttaggccctaaagaagggttcagtgggcaaatccagttcacagctccactttcagacaaggtggagttgggtgtcataggagattctgtacacatggaagggttgccagggagcagcacatccatcaggcacatcagcattgggcctcagaggcatcagaccacccagcagatagtttaccatgggctggttccccaactgggggaatctggtgactcagagagcactgtgcacggagagggctcagcagatgtgcaccaggccactcacagtcatacctcgggtagacaaaccgttatgactgaaaagagcaccttccaaagtgtcgtttctgaatctccccaggaggatagtgcagaggacacatcaggggcagaaatgacatcgggtgttagcagatcctttaggcacattcgactaggtcctacagaaacggaaacctctgaacacattgccatccgtggacccgtgtccagaacatttgtgcttgctggttcagcggactcccctgagctaggcaagttagcagacagcagcagaacgctaaggcacattgcaccagggcccaaagaaacttcgtttacctttcagatggatgtgagtaacgtagaggcgatccgcagccggacacaggaagcgggagctctcggtgtgtctgaccgtggttcctggagagacgcggacagtaggaatgaccaggcagttggtgtgagctttaaggcctctgctggggaaggagaccaggcccacagagaacagggcaaggagcaggccatgtttgataagaaggtgcagctccagagaatggtagaccaaaggtcggtgatttcagatgaaaagaaagttgccctcctctatctagacaatgaggaggaggagaatgatgggcattggttttaataagcagaaacattttgttttaatggcagcctgttggcgacgtgccaacatccaaaggccttaacttattttaagaggccgagggagtctatgaaaatctccccttttttacttttttaaagagtactcccggcatggtcaatttcctttatagttaatccgtaaaggtttccagttaattcatgccttaaaaggcactgcaattttatttttgagttgggacttttacaaaacacttttttccctggagtcttctctccacttctggagatgaatttctatgttttgcacctggtcacagacatggcttgcatctgtttgaaactacaattaattatagatgtcaaaacattaaccagattaaagtaatatatttaagagtaaattttgcttgcatgtgctaatatgaaataacagactaacattttaggggaaaaataaatacaatttagactctaaaaagtcttttcaaaaagaaatgggaaataggcagactgtttatgttaaaaaaattcttgctaaatgatttcatctttaggaaaaaattacttgccatatagagctaaattcatcttaagacttgaatgaattgctttctatgtacagaactttaaacaatatagtatttatggcgaggacagctgtagtctgttgtgatatttcacattctatttgcacaggttccctggcactggtagggtagatgattattgggaatcgcttacagtaccatttcattttttggcactaggtcattaagtagcacacagtctgaatgcccttttctggagtggccagttcctatcagactgtgcagacttgcgcttctctgcaccttatcccttagcacccaaacatttaatttcactggtgggaggtagaccttgaagacaatgaagagaatgccgatactcagactgcagctggaccggcaagctggctgtgtacaggaaaattggaagcacacagtggactgtgcctcttaaagatgcctttcccaaccctccattcatgggatgcaggtctttctgagctcaagggtgaaagatgaatacaataacaaccatgaacccacctcacggaagctttttttgcactttgaacagaagtcattgcagttggggtgttttgtccagggaaacagtttattaaatagaaggatgttttggggaaggaactggatatctctcctgcagcccagcaccgagatacccaggacgggcctggggggcgagaaaggcccccatgctcatgggccgcggagtgtggacctgtagataggcaccaccgagtttaagatactgggatgagcatgcttcattggattcattttattttacacgtcagtattgttttaaagtttctgtctgtaaagtgtagcatcatatataaaaagagtttcgctagcagcgcattttttttagttcaggctagcttctttcacataatgctgtctcagctgtatttccagtaacacagcatcatcgcactgactgtggcgcactggggaataacagtctgagctagcaccaccctcagccaggctacaacgacagcactggagggtcttccctctcagattcacctggaggccctcagacccccagggtgcacgtctccccaggtcctgggagtggctaccgcaggtagtttctggagagcacgttttcttcattgataagtggaggagaaatgcagcacagctttcaagatactattttaaaaacaccatgaatcagatagggaaagaaagttgattggaatagcaagtttaaacctttgttgtccatctgccaaatgaactagtgattgtcagactggtatggaggtgactgctttgtaaggttttgtcgtttctaatacagacagagatgtgctgattttgttttagctgtaacaggtaatggtttttggatagatgattgactggtgagaatttggtcaaggtgacagcctcctgtctgatgacaggacagactggtggtgaggagtctaagtgggctcagtttgatgtcagtgtctgggctcatgacttgtaaatggaagctgatgtgaacaggtaattaatattatgacccacttctatttactttgggaaatatcttggatcttaattatcatctgcaagtttcaagaagtattctgccaaaagtatttacaagtatggactcatgagctattgttggttgctaaatgtgaatcacgcgggagtgagtgtgcccttcacactgtgacattgtgacattgtgacaagctccatgtcctttaaaatcagtcactctgcacacaagagaaatcaacttcgtggttggatggggccggaacacaaccagtctttttgtatttattgttactgagacaaaacagtactcactgagtgtttttcagtttcctactggtggttttgatattgtttgtttaagatgtatatttagaatgacatcatctaagaagctgattttgctaaactcctgttccctacaatgggaaatgtcacaagaatgtgc

SEQ ID NO: 241562 - protein, 939 aa, Artificial Sequence
  derived and/or modified sequence
MTDSKYFTTTKKGEIFELKAELNSDKKEKKKEAVKKVIASMTVGKDVSALFPDVVNCMQTDNLELKKLVYLYLMNYAKSQPDMAIMAVNTFVKDCEDPNPLIRALAVRTMGCIRVDKITEYLCEPLRKCLKDEDPYVRKTAAVCVAKLHDINAQLVEDQGFLDTLKDLISDSNPMVVANAVAALSEIAESHPSSNLLDLNPQSINKLLTALNECTEWGQIFILDCLANYMPKDDREAQSICERVTPRLSHANSAVVLSAVKVLMKFMEMLSKDLDYYGTLLKKLAPPLVTLLSAEPELQYVALRNINLIVQKRPEILKHEMKVFFVKYNDPIYVKLEKLDIMIRLASQANIAQVLAELKEYATEVDVDFVRKAVRAIGRCAIKVEQSAERCVSTLLDLIQTKVNYVVQEAIVVIKDIFRKYPNKYESVIATLCENLDSLDEPEARAAMIWIVGEYAERIDNADELLESFLEGFHDESTQVQLQLLTAIVKLFLKKPTETQELVQQVLSLATQDSDNPDLRDRGYIYWRLLSTDPVAAKEVVLAEKPLISEETDLIEPTLLDELICYIGTLASVYHKPPSAFVEGGRGVVHKSLPPRTASSESAESPETAPTGAPPGEQPDVIPAQGDLLGDLLNLDLGPPVSGPPLATSSVQMGAVDLLGGGLDSLIGGTNFVAPPTAAVPANLGAPIGSGLSDLFDLTSGVGTLSGSYVAPKAVWLPAMKAKGLEISGTFTRQVGSISMDLQLTNKALQVMTDFAIQFNRNSFGLAPATPLQVHAPLSPNQTVEISLPLSTVGSVMKMEPLNNLQVAVKNNIDVFYFSTLYPLHILFVEDGKMDRQMFLATWKDIPNENEAQFQIRDCPLNAEAASSKLQSSNIFTVAKRNVEGQDMLYQSLKLTNGIWVLAELRIQPGNPSCTLSLKCRAPEVSQHVYQAYETILKN

SEQ ID NO: 241563 - protein, 578 aa, Artificial Sequence
  derived and/or modified sequence
MTDSKYFTTTKKGEIFELKAELNSDKKEKKKEAVKKVIASMTVGKDVSALFPDVVNCMQTDNLELKKLVYLYLMNYAKSQPDMAIMAVNTFVKDCEDPNPLIRALAVRTMGCIRVDKITEYLCEPLRKCLKDEDPYVRKTAAVCVAKLHDINAQLVEDQGFLDTLKDLISDSNPMVVANAVAALSEIAESHPSSNLLDLNPQSINKLLTALNECTEWGQIFILDCLANYMPKDDREAQSICERVTPRLSHANSAVVLSAVKVLMKFMEMLSKDLDYYGTLLKKLAPPLVTLLSAEPELQYVALRNINLIVQKRPEILKHEMKVFFVKYNDPIYVKLEKLDIMIRLASQANIAQVLAELKEYATEVDVDFVRKAVRAIGRCAIKVEQSAERCVSTLLDLIQTKVNYVVQEAIVVIKDIFRKYPNKYESVIATLCENLDSLDEPEARAAMIWIVGEYAERIDNADELLESFLEGFHDESTQVQLQLLTAIVKLFLKKPTETQELVQQVLSLATQDSDNPDLRDRGYIYWRLLSTDPVAAKEVVLAEKPLISEETDLIEPTLLDELICYIGTLASVYHKPP

SEQ ID NO: 241564 - DNA, 2935 bp, Artificial Sequence
  derived and/or modified sequence
tgcagaagcctggctacagataagggaccaaaatgactgactcaaaatatttcaccacgaccaagaaaggggagatcttcgagctgaaggcagagctcaacagtgacaagaaggagaagaagaaggaggcagtgaagaaagtgattgcatcgatgaccgtgggcaaagatgtcagtgccctcttccccgatgtggtcaactgcatgcagacggacaacctggagctgaagaagctagtatacctctacttgatgaattacgccaagagtcagcctgacatggccattatggccgtcaacacctttgtgaaggactgtgaggaccccaaccccctcatccgagccctggcagtgcggaccatgggctgcatccgcgttgacaagatcacagagtacctgtgcgagccactccggaagtgcctgaaggacgaggatccatatgtgcgcaagacagcagctgtgtgcgtggccaagctccacgacatcaacgcccagctggtggaggaccagggcttcctggacacccttaaagacctcatctccgactctaaccccatggtggtggccaatgcagtggcagcgctctcagaaattgccgagtctcaccccagcagcaacctgctcgatctgaacccacagtccatcaacaagctgctgacagccctcaatgagtgcaccgagtggggccagatcttcatcctggactgcctcgccaactatatgcccaaggacgaccgcgaggcccagagcatctgtgagcgggtcacccccaggctctcccatgccaactccgctgtggtgctctctgctgtgaaggtgctgatgaagttcatggagatgttgtctaaggacttggactactacggcacactgctcaagaagctggccccacccctggtcacactgctgtcagccgagccagagctgcagtatgtggccctgcgcaacatcaatctcatcgtgcagaaaaggcctgagatcctgaagcatgagatgaaggtgttcttcgtgaagtacaacgaccctatctacgtgaagctggagaagctggacatcatgatccgcctggcctctcaggccaacatcgcccaggtgttggcagagctgaaagagtacgcaacagaagtggatgtggactttgtacggaaggctgtgcgtgctattggccgctgcgccatcaaggtggagcaatctgcggagcgctgtgtgagcacgctgctcgacctcatccagaccaaggtcaactatgtggtccaggaggccatcgtggtcatcaaggacatcttccgcaagtaccccaacaagtatgagagtgtgattgccacactgtgtgagaatctggactccctggatgagcctgaggcccgggctgccatgatctggattgtgggcgagtacgcggaacggatcgacaacgcagatgagctgctggagagcttcctcgagggcttccatgacgagagcacacaggtccagctgcagctgctgacagccattgtgaaactctttctaaagaagccaacagagacccaggagctggtgcagcaggtcctcagtttggccactcaggactcagataacccagacctgcgggaccgtggctacatctactggcgcctgctgtccacggacccggtggcagccaaggaggtggtgttggctgagaagccactcatctctgaagagacggacctcatcgagcccacactgttagacgagcttatctgctacatcggcacgctggcttccgtctaccataagcctcccagtgcctttgtggaggggggccggggcgtcgtgcacaagagcctgccacctcgcacggcctcgagtgagagcgcagagagccctgagacagcccctactggagcacctcctggggagcagccagatgtcatccccgcccagggcgacctgctgggtgacctcctcaacctggacctcggccccccagtgagcggcccacccctggccacctcctcggtgcagatgggagctgtggaccttcttggcggtggccttgacagcctgattgggggcaccaacttcgtggcacctccaacagcagcagtaccagccaatcttggagcacccatcggcagtggcctgagtgacctctttgacctgaccagtggcgtgggcaccctgtcaggatcatatgtggcccccaaagcagtctggctcccagccatgaaggctaaggggctggagatctcaggcaccttcacccgccaggtgggctccatctccatggacctgcagctgaccaacaaggccttgcaggtcatgaccgactttgccatccagttcaaccgcaacagctttggcctggcccccgccacccccctccaggtccacgcgccactcagccccaaccagacagtggagatctccctgcctctcagcacggtgggctcggtcatgaagatggagcctctgaacaacctccaggtggccgtgaagaacaacatcgatgtcttctacttcagcaccttgtacccactgcacatcctctttgtggaggacgggaagatggaccggcagatgttcctggccacatggaaggatattcccaatgagaatgaggcccagttccagatcagagactgccccctcaatgcagaggctgcgagcagcaagctgcagagcagcaacatcttcactgtcgccaagaggaacgtggagggccaggacatgctctaccagtccctgaagctgaccaacggcatctgggtgctggcggagctgcggatccagccgggcaaccccagctgcacgctgtccctgaagtgtcgagcaccagaggtgtcccagcacgtgtaccaggcctacgagaccatcctcaagaactgagaccccggccagcgcccaccccagccttctgcccgccccatcgaggaggcccctcgggggcagcacatcttcctcctcgcagg

SEQ ID NO: 241565 - DNA, 2838 bp, Artificial Sequence
  derived and/or modified sequence
tacagataagggaccaaaatgactgactcaaaatatttcaccacgaccaagaaaggggagatcttcgagctgaaggcagagctcaacagtgacaagaaggagaagaagaaggaggcagtgaagaaagtgattgcatcgatgaccgtgggcaaagatgtcagtgccctcttccccgatgtggtcaactgcatgcagacggacaacctggagctgaagaagctagtatacctctacttgatgaattacgccaagagtcagcctgacatggccattatggccgtcaacacctttgtgaaggactgtgaggaccccaaccccctcatccgagccctggcagtgcggaccatgggctgcatccgcgttgacaagatcacagagtacctgtgcgagccactccggaagtgcctgaaggacgaggatccatatgtgcgcaagacagcagctgtgtgcgtggccaagctccacgacatcaacgcccagctggtggaggaccagggcttcctggacacccttaaagacctcatctccgactctaaccccatggtggtggccaatgcagtggcagcgctctcagaaattgccgagtctcaccccagcagcaacctgctcgatctgaacccacagtccatcaacaagctgctgacagccctcaatgagtgcaccgagtggggccagatcttcatcctggactgcctcgccaactatatgcccaaggacgaccgcgaggcccagagcatctgtgagcgggtcacccccaggctctcccatgccaactccgctgtggtgctctctgctgtgaaggtgctgatgaagttcatggagatgttgtctaaggacttggactactacggcacactgctcaagaagctggccccacccctggtcacactgctgtcagccgagccagagctgcagtatgtggccctgcgcaacatcaatctcatcgtgcagaaaaggcctgagatcctgaagcatgagatgaaggtgttcttcgtgaagtacaacgaccctatctacgtgaagctggagaagctggacatcatgatccgcctggcctctcaggccaacatcgcccaggtgttggcagagctgaaagagtacgcaacagaagtggatgtggactttgtacggaaggctgtgcgtgctattggccgctgcgccatcaaggtggagcaatctgcggagcgctgtgtgagcacgctgctcgacctcatccagaccaaggtcaactatgtggtccaggaggccatcgtggtcatcaaggacatcttccgcaagtaccccaacaagtatgagagtgtgattgccacactgtgtgagaatctggactccctggatgagcctgaggcccgggctgccatgatctggattgtgggcgagtacgcggaacggatcgacaacgcagatgagctgctggagagcttcctcgagggcttccatgacgagagcacacaggtccagctgcagctgctgacagccattgtgaaactctttctaaagaagccaacagagacccaggagctggtgcagcaggtcctcagtttggccactcaggactcagataacccagacctgcgggaccgtggctacatctactggcgcctgctgtccacggacccggtggcagccaaggaggtggtgttggctgagaagccactcatctctgaagagacggacctcatcgagcccacactgttagacgagcttatctgctacatcggcacgctggcttccgtctaccataagcctcccagtgcctttgtggaggggggccggggcgtcgtgcacaagagcctgccacctcgcacggcctcgagtgagagcgcagagagccctgagacagcccctactggagcacctcctggggagcagccagatgtcatccccgcccagggcgacctgctgggtgacctcctcaacctggacctcggccccccagtgagcggcccacccctggccacctcctcggtgcagatgggagctgtggaccttcttggcggtggccttgacagcctgattgggggcaccaacttcgtggcacctccaacagcagcagtaccagccaatcttggagcacccatcggcagtggcctgagtgacctctttgacctgaccagtggcgtgggcaccctgtcaggatcatatgtggcccccaaagcagtctggctcccagccatgaaggctaaggggctggagatctcaggcaccttcacccgccaggtgggctccatctccatggacctgcagctgaccaacaaggccttgcaggtcatgaccgactttgccatccagttcaaccgcaacagctttggcctggcccccgccacccccctccaggtccacgcgccactcagccccaaccagacagtggagatctccctgcctctcagcacggtgggctcggtcatgaagatggagcctctgaacaacctccaggtggccgtgaagaacaacatcgatgtcttctacttcagcaccttgtacccactgcacatcctctttgtggaggacgggaagatggaccggcagatgttcctggccacatggaaggatattcccaatgagaatgaggcccagttccagatcagagactgccccctcaatgcagaggctgcgagcagcaagctgcagagcagcaacatcttcactgtcgccaagaggaacgtggagggccaggacatgctctaccagtccctgaagctgaccaacggcatctgggtgctggcggagctgcggatccagccgggcaaccccagctgcacgctgtccctgaagtgtcgagcaccagaggtgtcccagcacgtgtaccaggcctacgagaccatcctcaagaactga

SEQ ID NO: 241566 - DNA, 4146 bp, Artificial Sequence
  derived and/or modified sequence
cccgcgcgcgggcagctcacttccgcccggcaggtgacagccgcggggctccgagccgccggcagcccggacgcaccgggagagcgagaggtggaggccgcggacattttggtgccaagccgaaccgagccggggcgccgggagctattgggacctgcggaagcctggctacagataagggaccaaaatgactgactcaaaatatttcaccacgaccaagaaaggggagatcttcgagctgaaggcagagctcaacagtgacaagaaggagaagaagaaggaggcagtgaagaaagtgattgcatcgatgaccgtgggcaaagatgtcagtgccctcttccccgatgtggtcaactgcatgcagacggacaacctggagctgaagaagctagtatacctctacttgatgaattacgccaagagtcagcctgacatggccattatggccgtcaacacctttgtgaaggactgtgaggaccccaaccccctcatccgagccctggcagtgcggaccatgggctgcatccgcgttgacaagatcacagagtacctgtgcgagccactccggaagtgcctgaaggacgaggatccatatgtgcgcaagacagcagctgtgtgcgtggccaagctccacgacatcaacgcccagctggtggaggaccagggcttcctggacacccttaaagacctcatctccgactctaaccccatggtggtggccaatgcagtggcagcgctctcagaaattgccgagtctcaccccagcagcaacctgctcgatctgaacccacagtccatcaacaagctgctgacagccctcaatgagtgcaccgagtggggccagatcttcatcctggactgcctcgccaactatatgcccaaggacgaccgcgaggcccagagcatctgtgagcgggtcacccccaggctctcccatgccaactccgctgtggtgctctctgctgtgaaggtgctgatgaagttcatggagatgttgtctaaggacttggactactacggcacactgctcaagaagctggccccacccctggtcacactgctgtcagccgagccagagctgcagtatgtggccctgcgcaacatcaatctcatcgtgcagaaaaggcctgagatcctgaagcatgagatgaaggtgttcttcgtgaagtacaacgaccctatctacgtgaagctggagaagctggacatcatgatccgcctggcctctcaggccaacatcgcccaggtgttggcagagctgaaagagtacgcaacagaagtggatgtggactttgtacggaaggctgtgcgtgctattggccgctgcgccatcaaggtggagcaatctgcggagcgctgtgtgagcacgctgctcgacctcatccagaccaaggtcaactatgtggtccaggaggccatcgtggtcatcaaggacatcttccgcaagtaccccaacaagtatgagagtgtgattgccacactgtgtgagaatctggactccctggatgagcctgaggcccgggctgccatgatctggattgtgggcgagtacgcggaacggatcgacaacgcagatgagctgctggagagcttcctcgagggcttccatgacgagagcacacaggtccagctgcagctgctgacagccattgtgaaactctttctaaagaagccaacagagacccaggagctggtgcagcaggtcctcagtttggccactcaggactcagataacccagacctgcgggaccgtggctacatctactggcgcctgctgtccacggacccggtggcagccaaggaggtggtgttggctgagaagccactcatctctgaagagacggacctcatcgagcccacactgttagacgagcttatctgctacatcggcacgctggcttccgtctaccataagcctcccagtgcctttgtggaggggggccggggcgtcgtgcacaagagcctgccacctcgcacggcctcgagtgagagcgcagagagccctgagacagcccctactggagcacctcctggggagcagccagatgtcatccccgcccagggcgacctgctgggtgacctcctcaacctggacctcggccccccagtgagcggcccacccctggccacctcctcggtgcagatgggagctgtggaccttcttggcggtggccttgacagcctgattgggggcaccaacttcgtggcacctccaacagcagcagtaccagccaatcttggagcacccatcggcagtggcctgagtgacctctttgacctgaccagtggcgtgggcaccctgtcaggatcatatgtggcccccaaagcagtctggctcccagccatgaaggctaaggggctggagatctcaggcaccttcacccgccaggtgggctccatctccatggacctgcagctgaccaacaaggccttgcaggtcatgaccgactttgccatccagttcaaccgcaacagctttggcctggcccccgccacccccctccaggtccacgcgccactcagccccaaccagacagtggagatctccctgcctctcagcacggtgggctcggtcatgaagatggagcctctgaacaacctccaggtggccgtgaagaacaacatcgatgtcttctacttcagcaccttgtacccactgcacatcctctttgtggaggacgggaagatggaccggcagatgttcctggccacatggaaggatattcccaatgagaatgaggcccagttccagatcagagactgccccctcaatgcagaggctgcgagcagcaagctgcagagcagcaacatcttcactgtcgccaagaggaacgtggagggccaggacatgctctaccagtccctgaagctgaccaacggcatctgggtgctggcggagctgcggatccagccgggcaaccccagctgcacgctgtccctgaagtgtcgagcaccagaggtgtcccagcacgtgtaccaggcctacgagaccatcctcaagaactgagaccccggccagcgcccaccccagccttctgcccgccccatcgaggaggcccctcgggggcagcacatcttcctcctcgcaggagggaccaggcggggctccaggccactcagtgggctccctggtcctgatggcagaacccacccgatccctggggtagggcaccaccccctcctggggtgagagcgcagtgcactcccgtgctctgggacacccctgctcctgtggctgtgatgtggggttaagtgaggtggggaccaaaggaaacagagccagagcagccacagaagctgtgcctgaagggtgagtgtggagcttgcccctccggctcacagccccggcagcccctggctccttggtctctccggttggtgttaaagggccctccactgccacctctcatgggatggaccctgccaacctggcctgggtgtgcagggaggggttccccttggtaccaggagagctgctcacttagggcctggggctcaaggagctgtaggtgccggcagaggggcagagctaggctgggaggagcccagggcctgcaccacccacttgcaaccaccaggctggtgccctgcagctgtgccagttgggccacagcctcccgagtgctgacccacatggtcaagaccaggcagaagctcccagagcccctgtctcgggctccccaccgactggcagctgcactatccccaactccccacttctgccccaagggtggtcactgcctgtgatacattcctcagtgtcgcctctgagcccaggcctcctgccacaaagactgggccgagagatggggctgggtaagcgggtgcgcctcctgtttgggtttcttcggggtttctctgtagtgtctgctgccctcctcctggcctcccaggtttcagttgtgtctgacagagcattaggttttcctgttactgctgtgtaataataaagaaagattcggcttttggcaatcacggacacttttttcccctccaccgaatgtcaggattgaaagctgcctccgagtggttggggatggttttctgaccctacggtaactagatctaatatatatcatcagaaaatatatattgtatgtttactcttattttcagaaagagaaaatgaataaaaatgatgacatc

SEQ ID NO: 241567 - DNA, 2820 bp, Artificial Sequence
  derived and/or modified sequence
atgaccgatagcaagtactttacaactaccaagaaaggcgagatctttgagttaaaggcagagctgaattccgataaaaaagaaaaaaagaaggaggccgtcaaaaaagtgatcgcttctatgaccgtgggaaaggacgttagcgctctctttcccgatgtagtgaattgtatgcagaccgataatctcgagttgaagaaactggtgtacctgtatctgatgaattacgctaagtcacagcctgacatggccatcatggccgtgaacacgttcgtgaaggactgcgaggaccccaatccactcattcgggcgcttgctgtaaggactatgggatgtatacgagtcgacaagatcaccgaatacttgtgcgaaccactccggaaatgcctcaaggatgaggacccctatgtccgcaagaccgccgccgtgtgtgtggcaaagttgcacgacatcaatgcacagctggtggaggatcaaggcttcctcgatacactgaaagatctgatctcagacagtaatccgatggtcgtggccaatgcggtagcggccctatccgagatcgccgagagccaccccagttccaaccttctggacttgaacccacagtctattaataaactgctaaccgctttgaatgaatgtacggagtggggccagatctttatcctggactgcctggcgaactacatgcccaaggacgatagggaagcccagtccatctgtgagagggttactccacgcctcagtcacgcaaactcagccgttgtactgagtgctgtcaaagtgcttatgaaattcatggagatgctttctaaggatttggactactatggaacccttttaaaaaaactggctccccccctggtcaccctgttatctgcggagcccgaactgcagtacgtcgcgttaagaaacattaaccttattgttcagaagcgtcccgagatacttaagcacgaaatgaaggtgtttttcgtgaagtacaatgacccaatttacgtgaaactcgagaagttagacatcatgattcggctcgcttctcaggctaacattgcccaagtgctggccgagttaaaagagtacgccactgaggtcgatgttgattttgttcggaaagccgtgcgcgctatcggtcggtgcgcgattaaagtcgaacagagcgccgaacgctgcgtgagcaccctgctagacctcatacagacaaaagtgaactatgtggtccaagaggccatcgtagtgatcaaagacatctttagaaaatatccaaacaagtacgaaagtgttatagccacactgtgcgaaaacctcgactctctggatgagcccgaagcacgtgctgctatgatttggatcgtgggggaatatgcagaacgcattgataatgcagatgagttactagagagcttccttgaagggttccatgacgagtcaactcaggtccagctgcaattgctaaccgccatcgtgaagctatttctgaaaaagcccaccgagacacaggaactggtgcagcaggtgctctcattggctacacaggactcagacaatccagacttacgggatagaggttacatttactggagactgctatctacagaccctgtggctgctaaggaagtggttctagcagaaaaacccttaatttccgaagaaaccgatctcatcgaacccactctactggatgaactgatctgctatattggtactttggcttctgtataccacaagcccccctccgcgttcgttgaaggaggtcgcggggtggtgcacaagtctctgcccccccggacggcatcttctgagtcagcggagagcccagaaaccgcccctaccggcgcacctcccggggaacagccagacgtgatcccagcgcagggcgatttgctgggagacttgctgaacctagatctggggccaccagtctcagggccacccttggcaacctcttcagtccaaatgggagccgtagatctcctgggcggcgggttggattccctcatcggtggcaccaactttgtggcacccccgaccgctgcagtcccagctaatctgggggcccctatcggctctggcctgagcgatttattcgacttgacatccggggtgggcactctctcaggatcttacgtggcccccaaagccgtgtggctacctgctatgaaagctaaaggcctcgaaattagtgggacattcacaagacaggtgggctcgatctctatggatttgcagttgaccaacaaagccctccaagtcatgacagattttgctatacagttcaatcggaatagttttggtctggcccctgcgactcctctacaggtgcatgcccccttaagtcccaaccaaactgtcgagatctctctcccactcagcactgttggcagcgtaatgaagatggaacccctgaataacttgcaagttgcagtgaaaaacaatattgacgtgttttactttagtacgctttacccactgcatatcctgttcgtcgaagacgggaagatggatagacagatgttcctggctacctggaaggatattccaaacgagaatgaggctcagtttcaaatcagagactgcccgttgaacgccgaagcagcatcgagcaagctgcagagctctaacattttcacggtggcaaagagaaacgtagagggacaggacatgctgtatcaatccctcaagctgacaaatggaatatgggtgttggccgagctcagaatccagccgggtaatccctcatgtacactgtcccttaaatgtagagctcctgaagtcagtcagcacgtttatcaggcatacgagaccattctgaagaattag

SEQ ID NO: 241568 - DNA, 2820 bp, Artificial Sequence
  derived and/or modified sequence
atgacagactccaagtactttacaacaacaaagaaaggagaaatcttcgagctgaaagcagaactgaattctgataaaaaggagaagaaaaaggaggccgtgaaaaaggttatcgcgtctatgacggtaggcaaggacgtgagtgcgctgtttccagacgtggtgaattgcatgcaaaccgataacttagaattgaagaagctggtgtacttgtatcttatgaattacgctaaaagccagccagacatggccatcatggctgtgaataccttcgtaaaagactgtgaggatcctaatcctctgatccgcgcactggcagttagaactatgggttgtatcagggtagacaagatcacagaatacttatgtgagcccttgcggaagtgtttgaaggatgaggacccttacgtgaggaaaacagccgccgtttgcgtggccaagctgcacgacattaatgcccaactagtggaggatcagggatttctggacacccttaaagacctcattagcgactccaacccgatggtggttgcaaacgccgttgccgctctgtctgagattgccgaatcccaccctagttccaatctactagaccttaatccccagagcattaataaactcctgactgctttgaacgagtgcaccgaatggggacagatcttcattttggattgtttggctaattatatgcctaaagatgatagagaagcccagtctatctgtgaacgcgtgaccccccgactgtcgcacgcaaattccgccgtcgtgttgagcgccgtcaaagttttgatgaaatttatggaaatgttatcaaaagaccttgattattacggcacactgctgaagaagctcgcacctcctcttgtgactctgcttagtgctgagcccgaattacagtatgtggcactgagaaatattaacttaatcgtgcagaaaaggcccgagattctgaaacatgaaatgaaagtcttcttcgtgaaatacaatgatccaatctatgttaaactcgagaagctcgacatcatgattcgactcgcctcgcaagctaacattgcacaggttctggcagaactgaaagagtacgcaaccgaagtggacgtcgatttcgtcaggaaggccgtgagagctataggccgctgtgccataaaagttgaacaatccgcagagagatgtgtgagcacactgctggacctgatacagacgaaggtcaactacgtggtgcaggaggctatcgtggtcatcaaagacattttcagaaaatacccaaacaagtacgaaagtgtcatagccacgctttgtgaaaatctagacagtctcgacgagccagaggctagagcagcaatgatttggatcgtcggtgaatacgcagaaagaattgacaacgctgatgaattgctggagtcctttctggaagggttccatgatgaaagcacacaggtgcagctgcaactgctgacagctattgtgaagcttttcctcaagaagccaactgagacacaggaattagtgcaacaggtgctgagcctggctactcaggacagtgacaatcctgatctgagagatcgcggatacatatactggcgcctcctgagtacggaccccgtagccgccaaagaggtagtgcttgcagaaaagcctctgatatctgaggagacagaccttattgaaccaaccctactggacgagttgatttgctacattggtaccctggcaagcgtttaccataagccgccgtcggccttcgtcgagggcgggagaggagtagtgcacaaaagcttgcccccccgcacagctagctctgagtctgccgagtcccccgaaacagcacctacaggagcaccccccggggagcagccagacgtgatccctgcccagggcgacttgctgggggacctccttaaccttgacctgggtccccccgtcagtggacctccgcttgcgacatcctcagtgcagatgggcgctgtcgacttactgggcgggggcctcgactctcttatcggcggtacaaattttgtggctccacccaccgccgcagtgcctgctaacctcggtgcccctattggtagcgggttgtccgatctttttgatctcacatccggcgtgggcaccctatccgggagttatgtagctccaaaggccgtgtggctgccggcgatgaaggctaagggcctggaaatctcaggtacctttacccgccaggtggggtctatctccatggacctccagctgacaaacaaagcactgcaggttatgaccgactttgccattcagtttaataggaattcctttggattggccccagccactcctctccaggtgcacgcgccccttagcccgaatcaaacagtcgaaatttcgctgcctctttctacagtggggagcgtcatgaaaatggagcctcttaataacctgcaggtcgccgttaaaaataacatagacgtgttttatttctcaaccttgtaccctctgcatatactcttcgtggaagacggcaagatggaccgccaaatgtttctagccacgtggaaggatattccaaatgaaaatgaggctcagtttcagattagggactgccccctgaatgctgaggcagcgagctcaaagttacagtctagtaatatctttaccgtcgccaaacggaacgttgagggacaagatatgctctatcagagcttaaaactcaccaacggaatttgggtgttggctgagcttaggatccagcccgggaacccgtcgtgcactttaagtctgaaatgtcgggctccggaggtgtctcagcacgtgtatcaggcatacgaaacaattctgaaaaactag

SEQ ID NO: 241569 - DNA, 2820 bp, Artificial Sequence
  derived and/or modified sequence
atgactgatagcaaatacttcactacaaccaagaaaggggagattttcgagctgaaggccgagctgaattcggacaagaaagagaaaaaaaaggaagcggtcaagaaggttatagcctcaatgactgtgggtaaggatgtgagtgccctttttccagacgtggtgaattgcatgcagaccgataacttggagcttaagaaactggtctatctgtatcttatgaattatgccaagagccagcctgacatggcaataatggccgtaaatacattcgtgaaggattgtgaggacccaaatcccctgattagggccttggctgtgcggactatgggctgtatccgagtggataagatcaccgaatacttatgcgaacctctgcgcaaatgtctaaaggatgaagatccttacgttcggaagacagcagctgtctgcgttgccaagttgcatgacataaacgcgcagttggtagaggaccaaggattcctggacactcttaaggacctgatctccgatagtaatcccatggtggtggccaacgctgtggccgcactctctgaaatagcggagagccacccttctagtaatctccttgacctgaacccccagtccatcaataagctcctgaccgctctgaatgagtgcaccgagtggggccagattttcatcctggattgtctggcaaactatatgcctaaagacgatcgggaggcccagagtatttgtgagcgcgtgactccccgactgtcccatgctaatagcgcggtggtgctttctgctgtgaaagtgcttatgaaatttatggaaatgttaagcaaagatttggattactatggaacattactgaaaaaactggcacctcccctggtgacgctgctttccgctgagcccgagctccagtacgtggctctgcggaatattaacctgattgtacagaaacggcccgaaatcttgaaacacgagatgaaggtgttctttgtcaaatataacgatcctatctacgtgaaactggaaaagctggacatcatgattagactcgcttctcaggccaacattgcccaggtgctggcggaactaaaagaatatgccaccgaggtcgatgtggacttcgtgcgtaaggctgttcgcgccatcggcagatgcgccatcaaagttgagcaaagcgccgaaagatgtgtgtcaacattactggatctgatccagaccaaggtaaactatgttgttcaggaggctatcgtcgttataaaagacatttttagaaagtatccaaataaatatgagtccgttatcgccaccctatgtgagaatctggattctcttgatgaacctgaagctcgggcggcaatgatttggatcgttggcgaatacgcagagaggatcgacaacgccgatgagcttttggaatcattccttgagggtttccatgatgagtccacccaagtgcaattgcaactgctcactgcaatcgtcaagctctttctgaagaagcctacagagacacaagaactggtgcagcaggtcctctctttggcaacgcaagactccgacaaccctgacttaagggacagagggtacatatactggcgcctcttgagcacagaccctgttgcagcgaaagaagtagtgctcgccgaaaagccattgatcagtgaggaaacagatcttatagaacccaccttgctggacgagttgatctgctatataggtacgcttgcctcagtgtatcacaaaccgccatccgcctttgtcgaaggagggcgtggggtggtacacaagagtctgcctccacgtaccgcttcatccgagagtgcggaatcacccgagacggcacctacaggcgcaccgcccggcgagcagccagacgtcatccctgctcagggagatctgctgggagacctgctcaatctggacttgggcccacccgtgagcggtccaccactggccaccagtagcgtgcagatgggagctgtcgatctattggggggaggtctcgactcactcatcggagggactaattttgttgccccgcctacagccgccgtgccggctaatctaggggcccccatcggctccgggttgagtgatctctttgaccttacatcaggggtgggaactctgagcgggtcttacgtggcacccaaggccgtatggctccctgccatgaaggctaagggactcgaaatcagcgggacgttcacccgtcaggttggcagcatcagcatggacctgcagttaacaaacaaggctctccaggtgatgaccgacttcgcaatccagtttaaccgaaacagcttcggtctggcccccgctacaccccttcaggtgcacgcgcccctgtcacctaatcagaccgtcgagatttccttgcccctgtcaaccgtcggctccgtgatgaagatggaaccgctcaataatctgcaggtcgcagtgaaaaacaacattgacgtgttttatttctccacgctataccccttacacatcctgttcgtcgaggatggcaagatggaccgtcaaatgtttcttgccacttggaaggatattcccaatgaaaatgaggcgcagttccagatccgagattgccctcttaatgcagaagccgcatctagcaaattacagagtagcaatatatttacagtagcgaaacggaatgtggagggacaggacatgctgtaccagtcactgaaactgactaacggtatctgggtgttagccgaactcaggatccagcccggaaatccctcctgcaccctgagccttaaatgccgggctcctgaggtgtcccagcatgtgtatcaggcatacgaaacaattctcaaaaattag

SEQ ID NO: 241570 - DNA, 2820 bp, Artificial Sequence
  derived and/or modified sequence
atgacagacagcaagtacttcaccaccaccaagaagggggagatctttgagctgaaggccgagctgaacagcgacaagaaggagaagaagaaggaggccgtgaagaaggtgattgcctccatgacagtgggcaaggatgtgtctgccctcttcccagatgtggtgaactgcatgcagacagacaacctggagctgaagaagctggtgtacctgtacctgatgaactatgccaagagccagcctgacatggccatcatggctgtgaacacctttgtgaaggactgtgaggaccccaaccccctcatccgggccctggccgtgaggaccatgggctgcatccgggtggacaagatcacagagtacctgtgtgagcccctgaggaagtgcctgaaggatgaggacccctacgtgaggaagacagctgctgtgtgtgtggccaagctgcatgacatcaatgcccagctggtggaggaccagggcttcctggacaccctgaaggacctgatcagtgacagcaaccccatggtggtggccaatgctgtggccgccctgtctgaaattgctgagagccaccccagcagcaacctgctggacctgaacccccagagcatcaacaagctgctgacagccctgaatgaatgtacagagtggggccagatcttcatcctggactgcctggccaactacatgcccaaggatgaccgggaggcccagagcatctgtgagcgggtgaccccccggctgagccacgccaacagcgctgtggtgctgtctgctgtgaaggtgctgatgaagttcatggagatgctgagcaaggacctggactactacggcaccctgctgaagaagctggccccacccctggtgaccctgctgtctgctgagcctgagctgcagtatgtggccctgaggaacatcaacctgattgtgcagaagaggcctgagatcctgaagcatgagatgaaggtgttctttgtgaagtacaatgaccccatctacgtgaagctggagaagctggacatcatgatccggctggccagccaggccaacatcgcccaggtgctggccgagctgaaggagtatgccacagaggtggatgtggactttgtgaggaaggctgtgcgggccatcggccgctgtgccatcaaggtggagcagagcgctgagcgctgtgtgtccaccctgctggacctgatccagaccaaggtgaactacgtggtgcaggaggccatcgtggtgatcaaggacatcttcaggaagtaccccaacaagtatgaatctgtgattgccaccctgtgtgagaacctggacagcctggatgagcctgaggcccgggccgccatgatctggatcgtgggggagtatgcagagagaattgacaatgctgatgagctgctggagagcttcctggagggcttccatgatgagagcacccaggtgcagctgcagctgctgacagccatcgtgaagctgttcctgaagaagcccacagagacccaggagctggtgcagcaggtgctgagcctggccacccaggacagcgacaacccagacctgcgggaccggggctacatctactggaggctgctgagcacagatcctgtggccgccaaggaggtggtgctggccgagaagcccctcatcagcgaggagacagacctgattgagcccaccctgctggatgagctgatctgctacatcggcaccctggcctctgtgtaccacaagcccccatctgcctttgtggagggcggccggggcgtggtgcacaagagcctgccccccaggacagccagcagcgagagcgctgagagccctgagacagcccccactggagcccctcctggagagcagccagatgtgatcccagcccagggcgacctgctgggggacctgctgaacctggacctgggcccccctgtgtctggcccccccctggccaccagctctgtgcagatgggcgctgtggacctgctgggcggcggcctggacagcctgattggaggcaccaactttgtggccccacccacagctgctgtgcctgccaacctgggcgcccccatcggcagcggcctgagtgacctgtttgacctgaccagcggcgtgggcaccctgagcggcagctatgtggcccccaaggctgtgtggctgcctgccatgaaggccaagggcctggagatcagcggcaccttcacccggcaggtgggcagcatctccatggacctgcagctgaccaacaaggccctgcaggtgatgacagactttgccatccagttcaacagaaattcctttggcctggccccagccacccccctgcaggtgcacgcccccctgagccccaaccagacagtggagatcagcctgcccctgagcacagtgggctctgtgatgaagatggagcccctgaacaacctgcaggtggccgtgaagaacaacattgatgtgttctacttcagcaccctgtaccccctgcacatcctgtttgtggaggatggcaagatggaccggcagatgttcctggccacctggaaggacatccccaatgaaaatgaggcccagttccagatccgggactgccccctgaatgctgaggccgccagcagcaagctgcagagcagcaacatcttcaccgtggccaagagaaatgtggagggccaggacatgctgtaccagagcctgaagctgaccaacggcatctgggtgctggccgagctgcgcatccagcccggcaaccccagctgcaccctgagcctgaagtgccgggcccctgaggtgtcccagcacgtgtaccaggcctatgagaccatcctgaagaactag

SEQ ID NO: 241571 - DNA, 2820 bp, Artificial Sequence
  derived and/or modified sequence
atgaccgacagcaagtacttcaccaccaccaagaagggcgagatctttgagttgaaggccgagctgaactccgacaagaaggagaagaagaaagaggccgtgaaaaaggtgatcgcctctatgactgttggcaaggacgttagtgctttatttccagatgtggtgaattgcatgcaaaccgacaacttagagctgaagaagttggtttacttatacctgatgaactacgcaaagagtcagccagatatggctatcatggctgtcaacacctttgttaaggactgtgaggacccaaacccgttgattcgggctctggcggtccgcacaatgggatgtatccgcgtggacaaaattaccgaatatttatgtgaaccgctccgtaagtgcctcaaggacgaggatccttatgtcagaaaaacagcggcagtttgcgtggcaaaactgcacgatattaatgcccagctcgttgaagaccaggggtttctggataccctgaaagatctgattagtgacagcaacccaatggtggtggctaacgccgtcgcggccctctcggaaatagctgagtcccacccaagttcaaatctgctcgacctcaatccccaaagcattaacaaactgttgaccgcactgaatgagtgtacagagtgggggcagatcttcattctggactgtctcgccaattatatgccaaaggatgaccgggaggctcaaagtatttgcgagcgggttactcctagactgagccatgcaaattcagcagtcgtgctgagcgccgtgaaggtcctgatgaagttcatggagatgctttccaaagatttagactactacggcactttgctgaagaaactcgcccccccgcttgtgactctactgtcagcagagcccgagctgcagtacgtggctctgcgtaacatcaaccttatcgtgcagaaacgccccgagatactcaaacacgaaatgaaagtgttcttcgtgaaatataacgaccccatatacgttaagctggaaaagctcgatataatgataaggctggcatcccaggcaaatatagcacaagtgcttgccgagttaaaagaatacgcaacagaggtcgatgtggactttgtcagaaaggccgtgagggctatcgggcgatgcgccatcaaagtggaacagtcagccgagaggtgcgtatccacactgctcgacctgatccaaaccaaggtcaactatgtggtccaggaggctatcgtggtcatcaaggatatctttcgaaagtatcctaacaagtatgaatctgtcatcgctacactgtgcgagaatctcgactctttggacgagccagaggcacgtgctgcaatgatttggatcgtaggggaatacgccgagaggatcgataatgccgacgaacttctggagtccttcctcgaagggttccacgacgaatctacgcaagtccaattgcaactcctgacagctatagtcaaactatttcttaagaagccaacagagactcaggagctggtgcaacaggtgctatcacttgcaacccaagatagtgataatccagatctgcgagaccgagggtacatttattggcgtctgctaagcacggaccccgttgcggctaaagaggttgtcctggcagaaaaacctctcattagcgaagagacagacctgattgaacctacactgctcgacgaactgatctgctatatcgggaccttggccagcgtgtaccataagcccccatctgctttcgtggagggaggtcggggcgtggtacataaatctctgcctccacggacggcttcttctgaatccgccgagtcaccagaaactgcacccaccggcgccccccctggggagcagccggacgtcatccctgcccaaggcgacctgcttggggacctgctgaacctcgatctcggacctcccgttagtggaccaccactggctacctccagtgtccaaatgggagcagtggacctgctcgggggcggcctcgactctcttatcggtggaaccaatttcgtcgccccgcccaccgccgccgtccctgccaatcttggcgcccctatcggatccggactatcagatctcttcgacctcacctctggcgtgggtacgctttctggaagctatgttgccccaaaagcggtgtggcttccagcgatgaaggccaaaggtctggagatttctggcacattcacacggcaggtcggatccatctcaatggatttgcaactgaccaataaagccctccaggttatgactgatttcgcgattcagttcaacagaaacagctttggcttggccccagctaccccactgcaagtgcatgctccattaagccccaaccaaacagtggagattagccttcctctctctacagtgggcagcgttatgaagatggaacctctgaacaatcttcaagttgccgtgaaaaataatatcgacgtgttctacttttctacactctatcccttacatatcctcttcgtggaagacggaaagatggacaggcagatgttcctggccacatggaaggatattccaaatgagaacgaagctcagtttcagataagggactgtccactcaacgccgaggcagcgtctagtaagttgcagagctccaatatcttcacggtcgctaaacggaatgtagaaggccaggacatgctttaccagagtttaaagttgactaatggtatatgggtactggctgaattacgtatccagccaggcaatccttcttgcaccctttctctgaagtgcagggcaccagaggtaagccagcatgtttatcaggcctatgagaccatactgaaaaactag

SEQ ID NO: 241572 - DNA, 2820 bp, Artificial Sequence
  derived and/or modified sequence
atgaccgacagcaagtacttcaccaccaccaagaagggcgagatcttcgaactaaaggccgagttgaattctgataaaaaagaaaagaagaaggaagccgtgaagaaggtcatcgcaagtatgacagtgggaaaagacgtcagtgccctgttcccagatgtggtgaactgcatgcagacagacaatctggagctgaagaaactggtgtatctgtatctgatgaactacgctaaaagtcagcccgatatggctatcatggctgttaatacgttcgtcaaggattgtgaggatccgaacccactgatcagggcccttgccgtgcgcaccatgggctgtatacgcgtcgacaagattacagagtatctatgtgaacccctcaggaagtgcttgaaagacgaggatccgtatgtgagaaagaccgctgcagtctgtgtggcaaaactccacgacatcaacgcccaactcgtcgaagatcagggtttcctggacactctcaaggaccttatctctgattccaatcctatggtggtcgcaaatgcagttgccgccctgtctgaaatcgccgaatcacatccctcgagcaaccttctagatctcaacccacagtcaatcaataagttgctaactgccctgaatgaatgcaccgaatggggtcaaatctttattcttgattgtctggcaaattacatgccaaaagacgaccgagaagcacaatccatttgcgagcgcgtaactccaagactgtcacacgccaactcagcggtggtcctgtcggcagtgaaagtcttgatgaaattcatggaaatgctctctaaggaccttgactactatggtacactgcttaagaaactggcacctcccctggtcaccttgttgagcgcggaacccgagctacagtacgtagcactgcgaaatatcaatctgattgtgcagaaaaggccagagattcttaagcatgagatgaaggtgttttttgtgaaatataacgaccccatttacgtcaaactagagaagctcgacattatgatccgcctcgcctcacaggcaaatattgcccaggttctggcagagctcaaagaatatgccacggaggttgatgtggatttcgttagaaaggctgtacgcgctatcgggcggtgcgccatcaaggtcgagcaaagcgcagagagatgcgtatcaacactgctggacctaatccagaccaaggtgaactacgttgttcaggaagctattgtcgtaattaaagatatattcagaaagtatcccaacaagtacgaatccgtcattgccaccctatgcgaaaacttagactcactcgacgaacccgaggctagagccgccatgatctggattgtaggcgaatatgctgaaagaatagacaacgctgatgagcttctagaaagtttcctggagggctttcatgatgaatctacccaggtccagcttcagttgctgacagcaattgtgaagctgtttctgaaaaaacccactgagacacaggagctggtgcagcaagtactgtcattagcaacccaggattcagataatcccgatcttcgggaccgtggttatatctactggcgccttttgagcactgaccctgtggccgctaaagaagttgttctggcagagaagccactgatctctgaggagactgatctgattgaaccaaccctgctggatgagctcatttgctacatcggaacccttgcctctgtgtatcataaaccaccctcagctttcgtagaaggtggacgcggtgtggtgcacaaatcgctcccacctaggaccgcgagctctgaaagtgcggagagccccgagaccgctcccaccggggcaccacctggtgagcagccggatgtgattcctgcccaaggtgatctgcttggagacttgctaaatctggatctgggcccccccgtcagcggtccccctctggccaccagcagcgtgcagatgggagcagtggatctcctgggaggcggtctcgactcacttatcggcgggaccaacttcgtcgcccctcccactgccgctgtccccgccaatctcggagcacctatcggtagcggcttaagcgatctgttcgacctgacatctggcgttggtaccctgtccgggtcctacgtggcgcccaaagcggtgtggctgccagcaatgaaggccaagggtcttgagatttccggaacattcactaggcaggtgggaagcatctctatggacctgcagttgacaaataaggccttgcaggttatgacagactttgcaatacaattcaatagaaacagctttgggttagcccctgcaacaccgctccaggtgcatgcgcctctgtcccccaaccagacggtagaaataagcctcccactttcgacagtgggtagcgtcatgaaaatggagcctctgaataatctccaggtcgcagtcaagaataatatcgacgttttttattttagtacgctgtatccacttcacatcctgtttgtggaagacggcaaaatggatcgacagatgtttctagctacatggaaggacattcctaatgaaaatgaagcccagttccagattagggattgccctctgaacgcagaagccgctagctccaaactccaaagttctaacatctttactgtcgcaaaacggaatgtggagggacaggacatgttatatcagtctctgaaactgactaacggtatctgggttctggctgaactcaggatacagcccggaaatccctcatgtaccctgtcacttaagtgtagggcccctgaggtgtcacagcacgtataccaggcctacgaaacaattttgaagaattag

SEQ ID NO: 241573 - DNA, 2820 bp, Artificial Sequence
  derived and/or modified sequence
atgaccgacagcaagtacttcaccaccaccaagaagggcgagatctttgagctgaaagctgagcttaattccgacaagaaggaaaagaagaaggaagcagtgaagaaggtgattgctagtatgacagtggggaaagacgtcagtgccctttttccagatgttgtaaactgcatgcagaccgacaacctcgagctgaagaaactggtttacctttaccttatgaactacgcgaaaagccagcctgatatggccatcatggctgttaatacctttgtcaaggattgcgaagaccccaatccacttattcgggcactcgcagtgcggaccatgggctgtattcgtgtagataagatcaccgaatacctctgcgagcccctgcggaagtgcttgaaggatgaagatccatacgtccgcaaaaccgcagccgtgtgtgtggccaaactgcacgacataaatgcccagctggtcgaggaccaaggatttctggacacgcttaaggacctgatttcagacagcaatcccatggtggttgccaacgccgtagctgctctaagcgaaattgccgagtcgcaccccagtagtaatctcctggatctcaacccacagtcgatcaacaagctcctgaccgctctcaacgagtgtaccgagtgggggcagatctttatccttgactgccttgcaaattacatgccaaaggacgacagagaagctcaatccatatgtgaaagagtcacaccccgtctaagccacgcgaacagcgccgtcgtcctgtccgcagtaaaggttctaatgaaattcatggaaatgctctcaaaagatttggattattacggcacccttctaaagaaacttgcacccccccttgttacgctgctcagcgcggagccagaactgcagtacgttgctttaagaaacataaacctgatcgttcagaagaggcccgaaatcctgaagcacgaaatgaaggtatttttcgtgaagtacaacgatccaatttatgtaaagttagagaaactggatattatgatcagactcgcgtctcaggccaatatcgcgcaagtgcttgctgagctaaaggaatatgccacggaggttgatgtggactttgtgcggaaggcagtgcgggcgattggtagatgtgctataaaggtggagcaatccgcagaacgatgtgtttctacactcttagacctcatccaaaccaaagttaattacgtggtccaggaagccatagttgtgatcaaggacattttcagaaaatatccgaacaaatacgagagcgtaatcgcgactttgtgtgagaacctcgactctctagatgagcctgaggcacgcgccgcaatgatctggatcgttggcgaatacgcggagagaattgacaacgctgatgagctgctggaaagctttctggagggcttccacgacgagagcacccaggttcagctgcagttattgaccgccatagtcaaactttttctaaaaaaacccacagaaactcaggaactggtgcaacaggtgcttagcctggcgacacaggattccgacaacccagacctgcgagaccgcggttacatatattggagacttttaagcacagatccggtggccgccaaagaggtggtcctcgctgagaaacctctgatctccgaggaaacggatcttattgagccgacactactcgacgagctcatctgttatattgggactctagcgagtgtctaccacaagccaccgagcgccttcgttgaaggagggaggggggtggttcacaagagtctgccaccaagaacggcatcctctgaaagcgcagagagccctgagacagctccgaccggcgcacccccgggggagcagcctgacgtgattccagcccagggggacttactgggggacctgctgaacctagacttgggtcccccagtgagcggcccacctttggcaacttccagtgttcagatgggtgccgtggatttgctgggagggggcctggacagtttaatcggggggacgaacttcgtcgccccgcctaccgcggctgtccctgctaatctgggggcaccaataggttcaggactgtccgatctgttcgacctcacctctggagtcggtaccctaagcggttcctatgttgcacccaaagccgtttggctacctgccatgaaggctaaggggctggagattagcggcacattcacacgccaggtcggcagcatctccatggacctgcagcttacaaataaggctctacaagtgatgaccgactttgctatacagtttaaccgaaattccttcgggctggcccctgccactcctctacaagttcatgccccgctgtcaccaaaccagacagttgagatctcactgccgctgagtacagtcggtagcgtcatgaagatggagcctctgaataatttgcaggtagcagtaaaaaataacattgacgtgttttactttagtactctttatcccctgcatattctgttcgtggaggatggcaaaatggaccgccaaatgttcctggctacgtggaaagatatacctaatgaaaatgaggcacagttccagatccgcgactgtcccctgaacgctgaggcagctagcagtaagctacagagctctaacatcttcacagttgccaagcggaatgtggaggggcaggacatgttgtaccagtctctgaagttgacaaatggcatctgggtattggccgagttgcgcatccaacctggcaacccttcttgtacactaagccttaagtgcagagccccagaggtgagccaacacgtgtaccaggcttacgaaactatactgaagaactag

SEQ ID NO: 241574 - DNA, 2820 bp, Artificial Sequence
  derived and/or modified sequence
atgacagatagtaaatactttactactacgaaaaaaggtgagattttcgagctgaaagctgaactaaactcagataagaaagagaaaaagaaagaggcggtgaaaaaagtcatagcttcaatgactgttggcaaggacgtcagcgctctgtttcccgacgtggtcaattgtatgcagacagacaatctggaacttaaaaaactggtttacctatacctgatgaattacgctaaatcacagcctgatatggcaattatggctgttaacaccttcgtgaaagactgcgaggacccaaaccctttgatcagagccctcgccgtgcgtaccatgggctgcattcgcgtcgataagattacagagtatctgtgcgaacctcttaggaagtgcctgaaggatgaagacccatacgtcaggaagacagctgcggtgtgcgttgctaaattacacgacatcaatgcccaactcgtagaagatcaagggtttttggatacactgaaggacctcatctccgatagcaatccaatggttgtcgcgaatgccgtcgccgctctgtctgaaatagcagaatctcatccttcttctaacctactggatttgaacccccagtccatcaacaagctgcttactgccttaaatgaatgcaccgagtgggggcagatatttatcctggactgcctcgctaactacatgccaaaagacgacagagaagctcagtccatatgtgaaagagtgactccccgattgtcacacgccaatagtgcggtcgtgctgtccgcagtcaaggttctaatgaagtttatggagatgctgagcaaagacctggactattacggtaccctgctaaagaaattggctcccccattagtgaccctcctgtccgctgaacctgagctgcagtatgttgcacttcggaatatcaacctcatcgtacagaaacgacccgagatcctcaaacacgagatgaaggtgttttttgtgaaatacaatgacccaatttacgtgaaactagagaagttggacataatgattcggctcgcaagccaggccaatattgctcaggtgctggcggaattgaaagagtacgccacagaggtggacgtcgattttgtgcgcaaagctgtgcgagccatcggcagatgtgctatcaaggttgaacagagtgcagaacgctgtgtcagtactttgctagatctcattcaaacaaaggtgaactacgttgtacaggaagctatcgtggtaattaaggacatctttagaaagtacccaaacaagtatgagagtgttatagccacgctatgtgagaacctggactcattagacgagcccgaggccagggccgcaatgatctggattgttggggagtacgccgagcgaatcgacaacgctgacgagctcttggaatcatttctcgaggggttccacgatgagtcgactcaggtacagctccagctcctgactgccatcgtcaaattgtttctaaagaaacccactgaaacacaggaacttgtgcagcaggtcttaagcctcgccacgcaagattctgataaccccgacttgcgtgatcggggatatatctactggaggctgctgtcaaccgatcccgtcgctgctaaggaagtggttctggcggagaaacccctaatctccgaagaaaccgacttaatcgaacccacactccttgacgaactaatctgctacatcggaacacttgcctccgtctatcacaaaccgccatcagcctttgtcgagggaggtcgtggagtcgtgcataaatccctcccacccaggacagctagctcagagagcgcagaatctcccgagaccgcgccaactggcgcaccaccgggagagcaacccgacgtcatccccgcacagggcgacctgcttggcgacctgctgaatctcgacctggggccaccggtgtccgggcctccattggctacctccagtgtacaaatgggagcagtcgacctgctgggtggcggactcgatagtctcataggcggaaccaacttcgtcgcaccgccaacggccgcagttcccgctaatctgggagcacccatcggcagtggcctgtcagacctctttgatcttacgtcaggggtcgggacgctcagtgggagttacgtggctccgaaagctgtttggctgccagcaatgaaagcgaagggcttagagatctccgggacgttcactagacaggtcggctctattagcatggacttgcagcttactaacaaagcactgcaagtaatgaccgattttgccatacagtttaatagaaattcctttggactggcgccagcaacacctctccaggtgcacgcgcctctgtcacctaatcaaacagtggagatctctcttccccttagcactgtgggcagcgtgatgaaaatggagcctctcaacaacctgcaggtagcggtaaagaacaacatcgatgtcttctattttagcaccctttaccctctccatattctgttcgtggaagatggtaagatggataggcagatgtttctggctacttggaaagatattcccaacgaaaatgaagcacagttccaaatccgcgattgccccttgaacgccgaggccgcatcaagtaagctgcagtcttcaaatattttcaccgtcgctaagagaaacgtcgagggccaggacatgctgtatcagtcgttgaaactgaccaacgggatttgggtgctggctgagctccgaattcagccagggaacccatcctgtactctctcactgaagtgccgagcgcctgaagtgagtcagcatgtgtatcaagcttatgagactatccttaagaattag

SEQ ID NO: 241575 - DNA, 2820 bp, Artificial Sequence
  derived and/or modified sequence
atgactgactctaagtacttcacaacaacgaagaagggggagatttttgagttgaaagccgaactgaatagtgacaagaaggagaagaaaaaggaggccgtaaaaaaggttatcgcctccatgactgtgggtaaggatgtatccgcactgttccctgacgtcgtaaattgtatgcagactgataacttggagttgaaaaagctggtctacctgtacctgatgaattatgccaaaagccagcctgacatggccattatggcggtcaacacattcgtcaaagattgtgaggacccaaaccctctgatccgggctctggcagtccgcaccatggggtgcatcagggtggacaagataactgagtacctgtgcgaacctctgcggaaatgccttaaggacgaggacccctacgttcgaaaaactgccgctgtgtgtgtcgccaagctccacgacatcaatgcacagctcgtcgaggatcaggggtttttggacaccttaaaggatctcatctccgacagcaatcctatggtggttgccaatgcagtggccgcattgtcggaaattgcagagtcccatcccagttccaacctactggatttgaacccacagtccatcaataaacttctcaccgccctgaatgaatgcacagagtgggggcagatctttatactggactgtctggctaattatatgccaaaggacgacagagaggcccaatccatctgtgagcgtgttaccccaagactatcccacgccaatagcgccgtggtcctgtcagcagtgaaagttcttatgaagttcatggagatgctgtccaaggacctcgattactatgggacgctgctaaagaaattggcaccaccactggtgactctgctgagcgcagaaccagaactgcaatacgtcgcccttcgcaatataaacctgattgtgcaaaaaagacctgagattcttaaacatgaaatgaaggtattctttgttaaatataatgatcccatttacgtgaagctcgaaaagttggacatcatgatacggctggcaagccaggcaaatattgcacaggtactggccgagctgaaggagtatgccacggaggttgatgtagatttcgtgcgaaaggctgtgcgagctataggcaggtgtgcaatcaaggtagaacagagtgccgaaaggtgcgtcagcacccttctggatttgatacagaccaaggtgaactacgttgtgcaagaagcaatagtcgtcatcaaggacatctttcggaagtaccctaataagtacgagtcagtaatcgctacattgtgcgaaaacctcgactcactagacgagcccgaggccagagccgctatgatttggatagtaggagagtatgcagagcgtattgataatgccgacgagctgctggaatcctttttggagggcttccacgacgagtccacccaagtgcagttgcagttactgacagctattgtgaaactcttcttgaaaaaaccgacagagacgcaggagttggtacagcaggtgttatctttagccacgcaagattctgataaccccgacctgagggacaggggctacatctactggcggctcctctcaaccgacccagtggcagctaaggaagtcgtgctggccgagaaaccactaatcagcgaggagaccgacctgatcgagcccactcttctcgacgaactgatctgctacataggtactctagccagcgtctaccataagcctccatcagcctttgtagaaggcggtcggggagtggttcataagagcctaccaccaaggaccgcgagctcagaatctgcagaatcgccggagaccgcccctaccggtgctcccccaggcgaacagccagatgtcattccggcacagggcgatcttctcggcgatctgctgaatctcgacctgggtccacccgtctcagggcctccactcgccactagttctgtgcaaatgggcgcagttgatttactaggcggaggccttgacagtttaattggtgggaccaactttgttgccccacctacagccgcagtgcccgctaatctgggagcccctattggctctgggctgtccgatctgtttgatctcacctccggagtgggaacactatctggcagctatgtggctcctaaggcagtttggctcccagcaatgaaggccaaaggtttggaaatttcaggcacatttactcgacaggttggtagcatttccatggatctgcaactcaccaataaggctcttcaagtgatgaccgactttgccattcaattcaatcgaaactcttttggcttagccccagccactcctcttcaagtgcacgcccctctgtctccaaaccagaccgtggagatcagcctgcctctgtctacggttggcagtgtaatgaaaatggagcccttaaacaacctccaggtcgccgtgaaaaataacattgacgtattctatttcagtactctgtacccgcttcacattctctttgtcgaagatggcaaaatggaccgccagatgttcctcgcgacctggaaagatattccaaatgagaatgaggcgcaattccagattagggactgcccactgaacgcggaagccgctagttccaagctgcagagcagtaatatattcactgtggcaaagcgaaacgtggaaggccaagatatgctgtaccaaagcctgaagctgactaatgggatctgggtactcgccgagctgcgaatccagcctgggaaccctagttgcactctgagcttaaagtgccgggctcctgaggtatcccagcacgtttaccaagcttatgaaacaattttgaaaaattag

SEQ ID NO: 241576 - DNA, 2820 bp, Artificial Sequence
  derived and/or modified sequence
atgacagattccaagtacttcactaccacaaagaaaggagagattttcgaactcaaagccgaattgaactctgacaaaaaagaaaaaaaaaaggaagccgtgaagaaagtgattgctagcatgactgtagggaaagatgtatccgccttatttcccgacgtggtcaactgcatgcaaaccgacaacctggagcttaagaagctcgtttacctgtacctgatgaattacgcaaaaagccagcctgatatggccatcatggccgttaatactttcgtgaaagactgtgaagacccgaatcctctgataagagcattagctgttcgaactatgggctgtattcgggtggacaaaattaccgaatacctgtgcgaacccctgcggaaatgtctgaaggacgaggacccctacgtgcggaagacagccgctgtgtgcgtcgcaaaactgcatgatattaacgctcagctcgtggaggaccaagggtttcttgacactcttaaggacttgatcagcgacagtaacccgatggtagtggccaacgcagttgccgcactgtctgaaatagcggagtcccacccgagcagtaacctcctcgatctgaatcctcagagtataaataagctactgacagccctgaatgaatgcaccgagtggggccagatcttcatcctcgactgcctcgccaactacatgcccaaagacgatcgggaggctcagagcatctgtgagcgggtcacacccagactgtcacacgcgaactctgcggtcgttctgagtgctgtgaaagtacttatgaagttcatggagatgctgagcaaggatctcgactactacggtactctgctgaaaaagctggccccacccctcgtcacactcctgtctgcagagcctgagcttcagtacgtcgcacttcggaatatcaatctcatcgtccagaagaggcccgagattctaaaacacgagatgaaggtcttctttgtgaaatataacgacccaatctacgtgaaactggagaagcttgatattatgatccgtcttgcgagccaggctaatatcgcacaggtactcgccgagttaaaagagtacgccacagaggtggatgttgatttcgtgcggaaggccgtgcgcgcaatcggcagatgcgctattaaagttgaacagtccgctgagagatgcgtctcaacgctgctcgatctgatacagaccaaagtgaactacgtcgtccaggaggccattgtggtgattaaagacattttcagaaagtatccaaacaagtacgaaagcgtcatagcaactttgtgcgagaacctggactcactagacgagcctgaggcaagggcagctatgatttggatcgtgggtgagtacgccgagcgcatcgacaatgccgatgagctgttagagtctttcctagagggctttcacgatgagtctacccaggtccagctgcagcttctgacggcgatcgtcaaactgtttctgaagaagccaacggagacacaggagctcgtccagcaggtactctccttggctacccaggattctgacaatcccgatcttcgagacagaggctacatttattggcgcctgctctccactgatccagtggcagcgaaggaggtcgtcctggccgagaagcccctgatttcggaggaaacggacttaattgaacccacactgctggatgagcttatttgctacatcgggacactcgcctcagtgtaccataagccgccttccgccttcgtcgaaggcggacggggtgtggtgcacaagagcctgcccccacgaactgctagctccgaatcagccgagagccccgagacggcacctacaggtgctcccccaggagagcagcccgacgtgattccggctcagggtgacctgctgggcgatctgttgaatctagacctggggccaccagtgtccggaccacccttggcaacctcaagcgtccaaatgggcgcagtagacctcctggggggtggtcttgactcactcattggaggcactaacttcgtggcacccccaacagcagccgttcccgctaatctgggagccccaatcggatctggactgagcgatctcttcgatttaactagcggggtaggtacgcttagtggtagctacgtcgccccaaaagctgtgtggctgccagcaatgaaagccaagggcctggagataagcgggacattcacacgacaagtgggatctatttcaatggaccttcagctgaccaacaaggctctgcaggtgatgacagacttcgctattcagttcaaccgcaacagctttgggctcgcaccagcaacacctctgcaggtccacgcgcctctttcgcccaatcagacggtagaaatctctctgcctctgtctacagtaggatctgtgatgaagatggagccactaaacaatcttcaggtcgcagtgaagaacaatatcgatgttttttatttctctacactgtatccactccatatcctattcgtagaggacgggaaaatggacaggcaaatgtttcttgccacttggaaagatatccccaatgaaaatgaagctcaatttcagattagagattgtcctctgaacgcagaagctgcaagtagcaagctgcaatcctccaatatttttacagttgccaagcgcaatgtcgaaggccaggacatgctttatcagtctctcaagctgactaacggaatctgggtactggccgaactgcgcatccagccaggaaatccttcttgcaccctgtctctcaaatgtcgcgcaccagaagttagccagcatgtgtaccaggcatacgaaaccattttaaaaaattag

SEQ ID NO: 241577 - DNA, 2820 bp, Artificial Sequence
  derived and/or modified sequence
atgaccgacagcaagtacttcaccaccaccaagaagggcgagatcttcgagctgaaggccgagctgaacagcgacaagaaggagaagaagaaggaggccgtgaagaaggtgatcgccagcatgaccgtgggcaaggacgtgagcgccctgttccccgacgtggtgaactgcatgcagaccgacaacctggagctgaagaagctggtgtacctgtacctgatgaactacgccaagagccagcccgacatggccatcatggccgtgaacaccttcgtgaaggactgcgaggaccccaaccccctgatcagagccctggccgtgagaaccatgggctgcatcagagtggacaagatcaccgagtacctgtgcgagcccctgagaaagtgcctgaaggacgaggacccctacgtgagaaagaccgccgccgtgtgcgtggccaagctgcacgacatcaacgcccagctggtggaggaccagggcttcctggacaccctgaaggacctgatcagcgacagcaaccccatggtggtggccaacgccgtggccgccctgagcgagatcgccgagagccaccccagcagcaacctgctggacctgaacccccagagcatcaacaagctgctgaccgccctgaacgagtgcaccgagtggggccagatcttcatcctggactgcctggccaactacatgcccaaggacgacagagaggcccagagcatctgcgagagagtgacccccagactgagccacgccaacagcgccgtggtgctgagcgccgtgaaggtgctgatgaagttcatggagatgctgagcaaggacctggactactacggcaccctgctgaagaagctggccccccccctggtgaccctgctgagcgccgagcccgagctgcagtacgtggccctgagaaacatcaacctgatcgtgcagaagagacccgagatcctgaagcacgagatgaaggtgttcttcgtgaagtacaacgaccccatctacgtgaagctggagaagctggacatcatgatcagactggccagccaggccaacatcgcccaggtgctggccgagctgaaggagtacgccaccgaggtggacgtggacttcgtgagaaaggccgtgagagccatcggcagatgcgccatcaaggtggagcagagcgccgagagatgcgtgagcaccctgctggacctgatccagaccaaggtgaactacgtggtgcaggaggccatcgtggtgatcaaggacatcttcagaaagtaccccaacaagtacgagagcgtgatcgccaccctgtgcgagaacctggacagcctggacgagcccgaggccagagccgccatgatctggatcgtgggcgagtacgccgagagaatcgacaacgccgacgagctgctggagagcttcctggagggcttccacgacgagagcacccaggtgcagctgcagctgctgaccgccatcgtgaagctgttcctgaagaagcccaccgagacccaggagctggtgcagcaggtgctgagcctggccacccaggacagcgacaaccccgacctgagagacagaggctacatctactggagactgctgagcaccgaccccgtggccgccaaggaggtggtgctggccgagaagcccctgatcagcgaggagaccgacctgatcgagcccaccctgctggacgagctgatctgctacatcggcaccctggccagcgtgtaccacaagccccccagcgccttcgtggagggcggcagaggcgtggtgcacaagagcctgccccccagaaccgccagcagcgagagcgccgagagccccgagaccgcccccaccggcgccccccccggcgagcagcccgacgtgatccccgcccagggcgacctgctgggcgacctgctgaacctggacctgggcccccccgtgagcggcccccccctggccaccagcagcgtgcagatgggcgccgtggacctgctgggcggcggcctggacagcctgatcggcggcaccaacttcgtggccccccccaccgccgccgtgcccgccaacctgggcgcccccatcggcagcggcctgagcgacctgttcgacctgaccagcggcgtgggcaccctgagcggcagctacgtggcccccaaggccgtgtggctgcccgccatgaaggccaagggcctggagatcagcggcaccttcaccagacaggtgggcagcatcagcatggacctgcagctgaccaacaaggccctgcaggtgatgaccgacttcgccatccagttcaacagaaacagcttcggcctggcccccgccacccccctgcaggtgcacgcccccctgagccccaaccagaccgtggagatcagcctgcccctgagcaccgtgggcagcgtgatgaagatggagcccctgaacaacctgcaggtggccgtgaagaacaacatcgacgtgttctacttcagcaccctgtaccccctgcacatcctgttcgtggaggacggcaagatggacagacagatgttcctggccacctggaaggacatccccaacgagaacgaggcccagttccagatcagagactgccccctgaacgccgaggccgccagcagcaagctgcagagcagcaacatcttcaccgtggccaagagaaacgtggagggccaggacatgctgtaccagagcctgaagctgaccaacggcatctgggtgctggccgagctgagaatccagcccggcaaccccagctgcaccctgagcctgaagtgcagagcccccgaggtgagccagcacgtgtaccaggcctacgagaccatcctgaagaactag

SEQ ID NO: 241578 - protein, 118 aa, Artificial Sequence
  derived and/or modified sequence
MEGGAYGAGKAGGAFDPYTLVRQPHTILRVVSWLFSIVVFGSIVNEGYLNSASEGEEFCIYNRNPNACSYGVAVGVLAFLTCLLYLALDVYFPQISSVKDRKKAVLSDIGVSAWEMHS

SEQ ID NO: 241579 - protein, 191 aa, Artificial Sequence
  derived and/or modified sequence
MEGGAYGAGKAGGAFDPYTLVRQPHTILRVVSWLFSIVVFGSIVNEGYLNSASEGEEFCIYNRNPNACSYGVAVGVLAFLTCLLYLALDVYFPQISSVKDRKKAVLSDIGVSAFWAFLWFVGFCYLANQWQVSKPKDNPLNEGTDAARAAIAFSFFSIFTWSLTAALAVRRFKDLSFQEEYSTLFPASAQP

SEQ ID NO: 241580 - DNA, 576 bp, Artificial Sequence
  derived and/or modified sequence
atggagggcggcgcctacggcgccggcaaggccggcggcgccttcgacccctacaccctggtgagacagccccacaccatcctgagagtggtgagctggctgttcagcatcgtggtgttcggcagcatcgtgaacgagggctacctgaacagcgccagcgagggcgaggagttctgcatctacaacagaaaccccaacgcctgcagctacggcgtggccgtgggcgtgctggccttcctgacctgcctgctgtacctggccctggacgtgtacttcccccagatcagcagcgtgaaggacagaaagaaggccgtgctgagcgacatcggcgtgagcgccttctgggccttcctgtggttcgtgggcttctgctacctggccaaccagtggcaggtgagcaagcccaaggacaaccccctgaacgagggcaccgacgccgccagagccgccatcgccttcagcttcttcagcatcttcacctggagcctgaccgccgccctggccgtgagaagattcaaggacctgagcttccaggaggagtacagcaccctgttccccgccagcgcccagccctag

SEQ ID NO: 241581 - DNA, 510 bp, Artificial Sequence
  derived and/or modified sequence
atggagggcggcgcctacggcgccggcaaggccggcggcgccttcgacccctacaccctggtgagacagccccacaccatcctgagagtggtgagctggctgttcagcatcgtggtgttcggcagcatcgtgaacgagggctacctgaacagcgccagcgagggcgaggagttctgcatctacaacagaaaccccaacgcctgcagctacggcgtggccgtgggcgtgctggccttcctgacctgcctgctgtacctggccctggacgtgtacttcccccagatcagcagcgtgaaggacagaaagaaggccgtgctgagcgacatcggcgtgagcgccttctgggccttcctgtggttcgtgggcttctgctacctggccaaccagtggcaggtgagcaagcccaaggacaaccccctgaacgagggcaccgacgccgccagagccgccatcgccttcagcttcttcagcatcttcacctggagaagcggcgccaccagccccccctag

SEQ ID NO: 241582 - DNA, 357 bp, Artificial Sequence
  derived and/or modified sequence
atggagggcggcgcctacggcgccggcaaggccggcggcgccttcgacccctacaccctggtgagacagccccacaccatcctgagagtggtgagctggctgttcagcatcgtggtgttcggcagcatcgtgaacgagggctacctgaacagcgccagcgagggcgaggagttctgcatctacaacagaaaccccaacgcctgcagctacggcgtggccgtgggcgtgctggccttcctgacctgcctgctgtacctggccctggacgtgtacttcccccagatcagcagcgtgaaggacagaaagaaggccgtgctgagcgacatcggcgtgagcgcctgggagatgcacagctag

SEQ ID NO: 241583 - DNA, 576 bp, Artificial Sequence
  derived and/or modified sequence
atggagggcggtgcctacggtgctggaaaggccggtggagctttcgatccttacactctcgtgcggcagccgcacaccattctaagggtggtaagctggctgttctctatagtggtcttcgggtcaattgtgaacgaagggtacctgaactctgcaagcgaaggagaggaattttgtatttataaccgtaatccaaatgcttgctcctacggagttgcagtcggagtgctggcattcttgacatgtctgttatacctggcgctcgacgtctattttcctcagatcagcagcgtgaaagatcgcaaaaaggctgtgctgagtgatattggagtttctgccttctgggcgttcctgtggtttgtggggttctgttaccttgcaaaccaatggcaggtctcaaagccgaaggacaatcccctcaacgaagggaccgatgcagcccgggcagcgatcgctttctcttttttctcaatctttacctggtcccttaccgcggctttggctgtacggcggtttaaggatctctcattccaggaagaatactccactctcttccccgcttccgcacaaccatag

SEQ ID NO: 241584 - DNA, 510 bp, Artificial Sequence
  derived and/or modified sequence
atggaagggggtgcctacggcgcgggaaaagccgggggagcattcgacccatatacgctcgtccgacagccacacactattctccgggttgtgagttggctgttttcaatcgtggtgtttgggtctattgttaacgagggatacctcaactccgcaagtgagggcgaggaattttgtatatacaatcgcaacccgaacgcttgcagctatggagtagcggtgggcgtgttagcattcctgacgtgccttctatatctggctcttgacgtgtactttcctcagatctcatccgtgaaagacagaaagaaagctgttcttagcgacattggggtgtccgcattttgggcgtttctctggttcgttggcttttgctatcttgcgaaccagtggcaggtgtctaagcctaaagacaaccctcttaacgagggaacagatgcagccagagcagcaatcgcattcagcttcttcagcatttttacttggcggagcggggccacgtcacccccttag

SEQ ID NO: 241585 - DNA, 357 bp, Artificial Sequence
  derived and/or modified sequence
atggaaggcggcgcatacggtgcgggcaaggcaggcggagccttcgacccatatacattggtgcgccagccacatacaatcttgcgggtggtctcctggctgttcagcatagtggtgttcggatcaatcgtgaacgagggatacctgaattcagcctctgagggcgaggaattttgtatatacaaccggaaccctaacgcctgctcctacggggtggccgtgggcgtgctggcttttctcacctgtttactttaccttgccttggatgtctattttccccagattagttctgttaaggatcgtaaaaaagcggtgctcagcgatatcggtgtctctgcatgggaaatgcattcctag

SEQ ID NO: 241586 - DNA, 576 bp, Artificial Sequence
  derived and/or modified sequence
atggagggcggggcctacggggccggcaaggccggcggggcctttgacccctacaccctggtgcggcagccccacaccatcctgcgggtggtgtcctggctgttcagcatcgtggtgtttggcagcatcgtgaatgaaggctacctgaacagcgccagcgagggggaggagttctgcatctacaacagaaaccccaatgcctgcagctatggagtggccgtgggcgtgctggccttcctgacctgcctgctgtacctggccctggatgtgtacttcccccagatcagctctgtgaaggacaggaagaaggctgtgctgagtgacattggagtgtctgccttctgggccttcctgtggtttgtgggcttctgctacctggccaaccagtggcaggtgtccaagcccaaggacaaccccctgaatgaaggaacagatgctgcccgggccgccatcgccttctccttcttcagcatcttcacctggagcctgacagctgccctggccgtgcggcgcttcaaggacctgtccttccaggaggagtacagcaccctcttccctgccagcgcccagccctag

SEQ ID NO: 241587 - DNA, 510 bp, Artificial Sequence
  derived and/or modified sequence
atggagggcggggcctacggggccggcaaggccggcggggcctttgacccctacaccctggtgcggcagccccacaccatcctgcgggtggtgtcctggctgttcagcatcgtggtgtttggcagcatcgtgaatgaaggctacctgaacagcgccagcgagggggaggagttctgcatctacaacagaaaccccaatgcctgcagctatggagtggccgtgggcgtgctggccttcctgacctgcctgctgtacctggccctggatgtgtacttcccccagatcagctctgtgaaggacaggaagaaggctgtgctgagtgacattggagtgtctgccttctgggccttcctgtggtttgtgggcttctgctacctggccaaccagtggcaggtgtccaagcccaaggacaaccccctgaatgaaggaacagatgctgcccgggccgccatcgccttctccttcttcagcatcttcacctggaggtctggggccaccagccccccatag

SEQ ID NO: 241588 - DNA, 357 bp, Artificial Sequence
  derived and/or modified sequence
atggagggcggggcctacggggccggcaaggccggcggggcctttgacccctacaccctggtgcggcagccccacaccatcctgcgggtggtgtcctggctgttcagcatcgtggtgtttggcagcatcgtgaatgaaggctacctgaacagcgccagcgagggggaggagttctgcatctacaacagaaaccccaatgcctgcagctatggagtggccgtgggcgtgctggccttcctgacctgcctgctgtacctggccctggatgtgtacttcccccagatcagctctgtgaaggacaggaagaaggctgtgctgagtgacattggagtgtctgcctgggagatgcacagctag

SEQ ID NO: 241589 - DNA, 576 bp, Artificial Sequence
  derived and/or modified sequence
atggagggcggcgcctacggcgccggcaaggccggcggcgccttcgatccttatacacttgttcgtcaaccacacacgatcctccgtgttgtcagctggctgttttctattgtggtcttcggctctattgttaacgaggggtatttgaattccgcatccgagggggaagaattttgtatatacaaccgaaaccccaatgcgtgctcttacggcgtcgcagtcggtgtcctggcctttcttacctgtcttttgtacctggctctggatgtctacttccctcagatcagttcggtaaaagaccgaaaaaaagcggttctctccgatataggcgtgagcgccttctgggccttcctgtggtttgtgggcttctgctacctggccaaccagtggcaggtatctaaaccgaaggataacccattgaacgagggcaccgatgccgcccgagctgctattgccttctcatttttcagcatcttcacttggagcctaaccgcagcactagcggtgaggaggtttaaagacctgtccttccaggaagaatactccactctcttcccagcttccgcccagccctag

SEQ ID NO: 241590 - DNA, 510 bp, Artificial Sequence
  derived and/or modified sequence
atggagggcggcgcctacggcgccggcaaggccggcggcgccttcgacccatacactctcgtgcgacagccgcatacaattttgcgcgttgtgagttggctgttttctattgtggtgtttggaagcattgtgaacgagggctacctgaactccgcatccgaaggggaggagttttgtatttacaacaggaatcctaacgcctgttcatacggggtggccgttggggtgctggctttcctcacttgtctcctgtatctggccctcgacgtgtatttcccgcagatttcctcagtgaaagatagaaaaaaagctgtgctctccgacattggggtcagtgccttctgggcattcctgtggttcgtgggcttttgttacctcgccaatcagtggcaggtgagcaaacccaaggataaccctcttaatgaaggtacggacgccgctagggctgcaatcgctttctcctttttcagcattttcacttggagatccggagccaccagcccgccttag

SEQ ID NO: 241591 - DNA, 357 bp, Artificial Sequence
  derived and/or modified sequence
atggagggcggcgcctacggcgccggcaaggccggcggcgccttcgatccttacactctagtgcgacagcctcatactatattaagggtcgtatcatggttgttttcgattgtcgtattcgggagcattgtgaatgagggctatctcaactcagcgtccgaaggagaggagttctgcatttacaatagaaaccccaatgcctgcagttacggcgttgcagtcggagtgctggcttttctcacctgcttgctctacttagcactcgacgtgtactttcctcagatcagcagtgtcaaggatcgtaaaaaagccgtgctgtccgacatcggtgtcagcgcgtgggagatgcacagctag

SEQ ID NO: 241592 - DNA, 576 bp, Artificial Sequence
  derived and/or modified sequence
atggagggcggagcgtacggcgcaggtaaagctgggggagcatttgatccctatacgctcgttagacaacctcacactattctccgcgttgtgagttggctttttagtattgtcgtgtttggctctatcgtgaatgagggatacttgaactccgccagtgagggcgaagagttctgtatttacaatcgaaatcctaacgcgtgctcctacggggtggcagttggggtactagcatttctcacgtgtcttctgtacctcgccctggatgtatattttccacagatttcctccgtgaaggatcgaaagaaagctgtgctgtctgatattggggtctctgccttctgggcctttctatggttcgtgggattttgttatctcgctaaccagtggcaagtttccaaacctaaggacaatccgctgaacgagggaaccgatgccgctcgggcagccattgcctttagcttcttttcaattttcacatggtctttgacagccgcactggcagtgcgaagatttaaggacctatcctttcaggaagagtatagcacactgttccctgcttccgcacagccttag

SEQ ID NO: 241593 - DNA, 510 bp, Artificial Sequence
  derived and/or modified sequence
atggagggcggtgcttacggagccggtaaagccggaggagcttttgacccttacacactggttcgtcaacctcacacaattctccgcgtggtatcatggctgttttcgattgttgtattcggctccatcgtgaacgagggttatctgaacagcgctagcgaaggggaagagttttgcatttataaccggaaccctaatgcctgttcgtacggcgtggcagtgggcgtcctagctttcctgacctgtttactatatttggcccttgatgtctacttcccccagatatcttccgtcaaagaccggaaaaaagcagtgctgtccgatatcggggtgtctgccttctgggctttcctgtggttcgtaggcttttgctatctcgcaaaccagtggcaggtttccaagcctaaagataatcctctcaacgaggggacagacgccgctcgggcagcgatcgcattttcattcttctctatcttcacttggcgcagcggagccactagtcccccttag

SEQ ID NO: 241594 - DNA, 357 bp, Artificial Sequence
  derived and/or modified sequence
atggaagggggagcttacggtgccggtaaggcaggcggagcatttgacccttatacccttgttagacaaccacatactatcctcagagttgtatcttggctgttctccattgtcgtgttcggctcgattgtgaatgaggggtatctcaacagtgcaagtgagggggaagagttctgcatctacaacaggaacccaaatgcttgctcctacggcgtggctgtcggcgtgctggcctttctgacgtgtttgttgtacttagcgctggacgtttacttcccccagatatcatccgtgaaagaccgcaagaaggcagtgttatcagacatcggagtgtctgcatgggaaatgcattcttag

SEQ ID NO: 241595 - DNA, 497 bp, Artificial Sequence
  derived and/or modified sequence
cgcgcacgcgcacgggccggcggcgcgcgccgagcggggggcaccgcgcgggtgcagccacgatggaagggggtgcgtacggagcgggcaaagccgggggcgccttcgacccctacaccctggtccggcagccgcacaccatcctgcgcgtcgtgtcttggctgttctccatagtggtgttcggctccatcgtgaacgagggctacctcaacagcgcctccgagggggaggagttctgcatctacaaccgcaaccccaacgcctgcagctatggcgtggccgtgggcgtgctcgccttcctcacctgcctgctgtacctggccctggacgtgtacttcccgcagatcagcagcgtcaaggaccgcaagaaagccgtcctgtccgacatcggtgtctcggcatgggagatgcactcttgaatgtccctctgttcctcggcttccccattttctccccactcaccctctcccccatgtgtggcactgcctattctgccc

SEQ ID NO: 241596 - DNA, 1353 bp, Artificial Sequence
  derived and/or modified sequence
gcgcaggggagggggcgggggcgccgcgcacgcgcacgggccggcggcgcgcgccgagcggggggcaccgcgcgggtgcagccacgatggaagggggtgcgtacggagcgggcaaagccgggggcgccttcgacccctacaccctggtccggcagccgcacaccatcctgcgcgtcgtgtcttggctgttctccatagtggtgttcggctccatcgtgaacgagggctacctcaacagcgcctccgagggggaggagttctgcatctacaaccgcaaccccaacgcctgcagctatggcgtggccgtgggcgtgctcgccttcctcacctgcctgctgtacctggccctggacgtgtacttcccgcagatcagcagcgtcaaggaccgcaagaaagccgtcctgtccgacatcggtgtctcggccttctgggctttcctctggttcgtgggattctgctacctggccaaccagtggcaggtctccaagcccaaggacaacccactgaacgaagggacggacgcagcccgggccgccatcgccttctcctttttctccatcttcacctggagcctgaccgcagccctggccgtgcggagattcaaggacctaagcttccaggaggagtacagcacactgttccctgcctcggcacagccgtaggcctccccggcttgcagaggccggcagccctgtatcacccctggcagtgaggtggcaggagcagcctagtgccagaaatgtccaagatgccagggcatgcagggcagtggaaggctggcttgaggaaccaattcaggttctccactgactcattcattccttcaccgcctccttcattgattcttcatgcgttcattcattcagtaaacatttattgagcagctgttttgtgcctagtgatgaattaggtggggtccttggctccaggagcccacaggctggggaggagaaaacaaacacatcaatatctcttccaaatggacagccgtggacagttaccaggtaggtagcggccccatacatgggctgcctagaggcgttcatggtccccattgctgagctgtgggtgcagagcaatagcctctcccttcacagcggtgtgaagagtgacctcactgtccttagggttagcatcctggccgaggatgtcacagggctcctggtctggctctgtcctcatgtgctatgtgaccctgacaaacccgtgcacctctctcagcctcagtccacttacctgaactgaggggtgataatggaccaacctctcaaggctgttgtgccaatgaaacaaaggccagcccagggcttagcacaagcatgctcaataaatgtaagctcttttgttcattca

SEQ ID NO: 241597 - DNA, 564 bp, Artificial Sequence
  derived and/or modified sequence
accgcgcgggtgcagccacgatggaagggggtgcgtacggagcgggcaaagccgggggcgccttcgacccctacaccctggtccggcagccgcacaccatcctgcgcgtcgtgtcttggctgttctccatagtggtgttcggctccatcgtgaacgagggctacctcaacagcgcctccgagggggaggagttctgcatctacaaccgcaaccccaacgcctgcagctatggcgtggccgtgggcgtgctcgccttcctcacctgcctgctgtacctggccctggacgtgtacttcccgcagatcagcagcgtcaaggaccgcaagaaagccgtcctgtccgacatcggtgtctcggccttctgggctttcctctggttcgtgggattctgctacctggccaaccagtggcaggtctccaagcccaaggacaacccactgaacgaagggacggacgcagcccgggccgccatcgccttctcctttttctccatcttcacctggagatctggggccacatcacctccatagccccatcccaagagccctccccataacccacagc

SEQ ID NO: 241598 - protein, 358 aa, Artificial Sequence
  derived and/or modified sequence
MSKGLPETRTDAAMSELVPEPRPKPAVPMKPMSINSNLLGYIGIDTIIEQMRKKTMKTGFDFNIMVVGQSGLGKSTLVNTLFKSQVSRKASSWNREEKIPKTVEIKAIGHVIEEGGVKMKLTVIDTPGFGDQINNENCWEPIEKYINEQYEKFLKEEVNIARKKRIPDTRVHCCLYFISPTGHSLRPLDLEFMKHLSKVVNIIPVIAKADTMTLEEKSEFKQRVRKELEVNGIEFYPQKEFDEDLEDKTENDKIRQESMPFAVVGSDKEYQVNGKRVLGRKTPWGIIEVENLNHCEFALLRDFVIRTHLQDLKEVTHNIHYETYRAKRLNDNGGLPPGEGLLGTVLPPVPATPCPTAE

SEQ ID NO: 241599 - protein, 294 aa, Artificial Sequence
  derived and/or modified sequence
MSKGQSGLGKSTLVNTLFKSQVSRKASSWNREEKIPKTVEIKAIGHVIEEGGVKMKLTVIDTPGFGDQINNENCWEPIEKYINEQYEKFLKEEVNIARKKRIPDTRVHCCLYFISPTGHSLRPLDLEFMKHLSKVVNIIPVIAKADTMTLEEKSEFKQRVRKELEVNGIEFYPQKEFDEDLEDKTENDKIRQESMPFAVVGSDKEYQVNGKRVLGRKTPWGIIEVENLNHCEFALLRDFVIRTHLQDLKEVTHNIHYETYRAKRLNDNGGLPPGEGLLGTVLPPVPATPCPTAE

SEQ ID NO: 241600 - DNA, 1077 bp, Artificial Sequence
  derived and/or modified sequence
atgtccaagggtctccctgagacccgcactgatgccgccatgtctgagctcgttccagagcctaggccaaagcctgccgttcccatgaagcctatgtctattaatagcaatcttctgggctacattggaatcgatactattattgagcaaatgcgcaagaaaactatgaaaaccggatttgacttcaacatcatggtggtcggtcagagcggcctgggcaaaagcacactggtaaacaccttgtttaagagtcaggttagtaggaaagcatcctcatggaatcgagaagagaagatccctaaaactgtcgaaattaaggcgatcggtcacgtcatcgaagaggggggggtgaaaatgaagctgacggttatcgacacccccgggttcggagatcagatcaataacgagaactgctgggaacccattgaaaagtacattaacgaacaatacgaaaaatttctgaaggaagaagttaatatcgctagaaagaagagaatccctgatactcgggtccattgttgcctgtatttcatttcccccacagggcactccctgcgaccactagacttggagttcatgaagcacctgagcaaagtagtcaacatcatcccagtgatagcgaaagctgacaccatgaccctggaggaaaaatcggaattcaagcagcgggtgagaaaggagcttgaagtcaacggtatcgaattttatcctcagaaggaattcgatgaagatctagaagacaaaaccgagaatgataaaatacggcaggaatcaatgccatttgccgtcgttgggtctgataaggagtaccaagttaacggtaagcgggtcctcggcagaaaaactccctggggcatcatcgaagtggaaaacctaaaccactgcgaattcgcgctgctgcgagatttcgtcatcaggactcacctccaagatttgaaggaggtcacacacaacatccattacgaaacctaccgcgcaaaaaggctgaatgataacggtggcctgcccccaggcgaaggattgcttggcaccgtgctcccacccgtgcctgccaccccttgtcctacagccgaatag

SEQ ID NO: 241601 - DNA, 885 bp, Artificial Sequence
  derived and/or modified sequence
atgtcaaagggacagtcagggctcggtaaatcaactctcgtgaatactctgtttaagtcacaagtaagtagaaaagcgagtagttggaatcgcgaggaaaaaattccgaagactgtggagattaaggctatcgggcatgtcatagaggagggtggagtgaaaatgaagctgaccgttatcgatactcccgggtttggcgaccagattaacaatgagaactgttgggaacctatcgaaaaatacataaacgaacagtatgagaagtttcttaaggaggaggtgaacatcgccaggaagaagcggattccggacacaagagtgcactgttgcctgtactttatttctccaacaggccatagcctgaggccgctggatctggaatttatgaagcacttgagtaaggttgtgaatatcatcccagtaatcgccaaagccgacacaatgactttggaagaaaaatcagaattcaaacaacgcgtgaggaaggaactcgaggtgaacggaatcgaattttacccccagaaagagtttgatgaagatttggaagataagacagagaacgataagatccggcaagagagcatgcccttcgccgttgtggggtctgataaggagtaccaggtaaacggcaagcgcgttctggggaggaaaacgccctggggaatcattgaggtggaaaacctgaatcactgcgagttcgccctcttgcgcgattttgtgatccgaacccatctgcaggacttgaaagaggtcacccacaatatccactacgaaacatacagagccaagaggctgaatgacaacgggggcttgcctccaggggaggggctgttgggcaccgtgcttccaccagtcccggccaccccttgccctactgcagagtag

SEQ ID NO: 241602 - DNA, 1077 bp, Artificial Sequence
  derived and/or modified sequence
atgagcaagggcctgcctgagaccaggacagatgctgccatgtctgagctggtgcctgagccccggcccaagccagctgtgcccatgaagcccatgagcatcaacagcaacctgctgggctacatcggcatcgacaccatcatcgagcagatgaggaagaagaccatgaagacaggctttgacttcaacatcatggtggtgggccagagcggcctgggcaagagcaccctggtgaacaccctcttcaagagccaggtgtccaggaaggccagctcctggaaccgggaggagaagatccccaagacagtggagatcaaggccatcggccacgtgattgaggagggcggcgtgaagatgaagctgaccgtcatcgacaccccaggctttggagaccagatcaacaatgaaaactgctgggagcccatcgagaagtacatcaatgagcagtatgagaagttcctgaaggaggaggtgaacatcgccaggaagaagaggatcccagacaccagggtgcactgctgcctgtacttcatcagccccaccggccacagcctgcggcccctggacctggagttcatgaagcacctgagcaaggtggtgaacatcatccctgtgattgccaaggctgacaccatgaccctggaggagaagtctgagttcaagcagagggtgaggaaggagctggaggtgaatggaattgagttctacccccagaaggagtttgatgaggacctggaggacaagacagaaaatgacaagatccggcaggagagcatgccctttgctgtggtgggcagtgacaaggagtaccaggtgaatggcaagagggtgctgggcaggaagaccccctggggcatcatcgaggtggagaacctgaaccactgtgaatttgccctgctgcgggactttgtgatccgcacccacctgcaggacctgaaggaggtgacccacaacatccactatgagacctaccgggccaagaggctgaatgacaatggaggcctgcccccaggagagggcctgctgggcaccgtgctgccccctgtgcctgccaccccctgccccacagctgagtag

SEQ ID NO: 241603 - DNA, 885 bp, Artificial Sequence
  derived and/or modified sequence
atgagcaagggccagagcggcctgggcaagagcaccctggtgaacaccctcttcaagagccaggtgtccaggaaggccagctcctggaaccgggaggagaagatccccaagacagtggagatcaaggccatcggccacgtgattgaggagggcggcgtgaagatgaagctgaccgtcatcgacaccccaggctttggagaccagatcaacaatgaaaactgctgggagcccatcgagaagtacatcaatgagcagtatgagaagttcctgaaggaggaggtgaacatcgccaggaagaagaggatcccagacaccagggtgcactgctgcctgtacttcatcagccccaccggccacagcctgcggcccctggacctggagttcatgaagcacctgagcaaggtggtgaacatcatccctgtgattgccaaggctgacaccatgaccctggaggagaagtctgagttcaagcagagggtgaggaaggagctggaggtgaatggaattgagttctacccccagaaggagtttgatgaggacctggaggacaagacagaaaatgacaagatccggcaggagagcatgccctttgctgtggtgggcagtgacaaggagtaccaggtgaatggcaagagggtgctgggcaggaagaccccctggggcatcatcgaggtggagaacctgaaccactgtgaatttgccctgctgcgggactttgtgatccgcacccacctgcaggacctgaaggaggtgacccacaacatccactatgagacctaccgggccaagaggctgaatgacaatggaggcctgcccccaggagagggcctgctgggcaccgtgctgccccctgtgcctgccaccccctgccccacagctgagtag

SEQ ID NO: 241604 - DNA, 1077 bp, Artificial Sequence
  derived and/or modified sequence
atgagcaagggcctgcccgagacccggaccgacgccgccatgagcgaattagtgcctgaacctcggcctaaacctgccgttcctatgaagccgatgtccataaacagcaacctgctggggtacatcggaattgacactatcatcgagcagatgagaaagaaaaccatgaagaccggttttgatttcaatatcatggtggtaggacaaagcggcctcggcaagagcactctggtgaacactttgtttaagtcacaagtgagtaggaaagctagcagctggaaccgggaggagaaaattcccaaaaccgttgaaattaaggctatagggcacgtcattgaagagggcggtgtgaagatgaagctgacagtgatcgacactcccggtttcggcgaccaaattaataatgaaaattgttgggagcctattgagaagtatatcaatgagcaatacgagaagtttttgaaggaagaagtgaatatagcacggaaaaaaagaattcccgatacgagagtgcactgctgtctgtacttcattagccctactggtcattctctgcgaccactcgatttggagttcatgaaacacttaagcaaagtggtgaatatcataccagtgatcgctaaagccgacactatgaccctcgaggagaagagtgaatttaagcagagagtgcggaaagagctggaagtgaatggaattgagttttaccctcagaaagagttcgacgaagatcttgaagataagaccgagaatgacaaaatccgccaagagtctatgccttttgcggttgtcggaagcgataaggagtaccaggtgaatgggaagagagtgctcggacggaagaccccatggggcattattgaagtagaaaacttgaatcattgtgagttcgctttgctcagggattttgtcatccgcactcatctgcaggaccttaaagaagtcacccacaacatacattacgagacctaccgcgcgaaacgtctgaatgacaacggtggtctacctcctggcgaaggtttactcgggacagtgctccctcccgtaccagccaccccttgccctactgccgaatag

SEQ ID NO: 241605 - DNA, 885 bp, Artificial Sequence
  derived and/or modified sequence
atgagcaagggccagagcggcctgggcaagagcaccctggtgaacaccttgttcaagagccaggtgtctcggaaggccagctcctggaacagggaggaaaaaatacctaagaccgtggagattaaggcgatcggccacgtaattgaggaaggtggagtcaagatgaagctgaccgtcatagataccccaggattcggagaccaaatcaacaacgagaactgctgggagccgattgaaaagtacattaatgagcagtatgaaaaatttctgaaagaggaggttaacatagcccggaaaaagaggatcccagacacccgggtgcactgttgcctctatttcattagcccaacaggacactctctgcgacccctggatctagaattcatgaagcatctgtccaaagttgtgaacatcatacctgtgattgccaaggccgacacaatgaccctcgaggaaaagtccgagttcaaacagcgcgtgcgcaaagagctcgaagtgaacggcatcgaattttaccctcaaaaagaattcgacgaggacctcgaggataagaccgagaatgacaagattcgtcaggagtccatgccatttgcagtggtcggatcagacaaggagtatcaagtcaacggcaagcgcgtgctgggcagaaagacaccatggggcataatcgaagtggagaaccttaatcactgcgagttcgcactgttgagggactttgtcattcggacccaccttcaagacttgaaggaggtgactcacaatatacactatgaaacatatcgcgccaaaaggctgaacgataatggcggccttcctccaggggagggcttgctcggaactgtattgcctccggtgcccgccactccctgtcccacggcagaatag

SEQ ID NO: 241606 - DNA, 1077 bp, Artificial Sequence
  derived and/or modified sequence
atgtctaagggcttgcccgagactagaacagacgcggctatgagtgagctagtgcctgagccaaggcccaaacccgctgtccctatgaagccaatgagcatcaattccaacttattgggatacattggcatcgacaccatcatagaacaaatgcgaaagaagacgatgaagacaggattcgattttaatatcatggtcgtaggtcagtctggtctggggaagtcaaccttggtcaataccttgttcaaatcccaggtgagcagaaaagcgagcagctggaacagagaagagaagattcctaagaccgtggaaatcaaggcgatcggacacgtgatcgaagaaggcggagtgaagatgaagctaactgtgattgacacccccggtttcggggaccaaatcaataacgaaaattgttgggaacccatcgagaaatacatcaatgaacagtacgagaaatttctcaaagaggaggtgaacatcgcccgaaagaaacgaatccctgacactcgggtccactgttgtctctattttattagccctactgggcacagcctgaggcccctggacctggaattcatgaagcatctgtccaaggtggtgaacatcattccggttattgctaaggctgatacaatgaccctggaagagaagagcgaatttaagcaaagggtgaggaaggaattggaagttaatggcattgagttctacccccagaaggagtttgacgaagatctggaggataagacagagaatgacaagatccggcaggagagcatgccatttgcggtggtaggaagcgacaaggagtaccaggtcaacgggaaaagggtgttggggagaaagaccccttggggaattatagaagtagagaacttaaatcactgcgagtttgccctgctcagagatttcgtgatacgcacacaccttcaggatctcaaggaggtaacccacaacatacattatgaaacatatcgtgcgaagcggcttaatgacaacggaggcctgccaccgggagaaggtctgctgggcacagttctgcctcctgtacccgcaacgccctgcccaaccgccgaatag

SEQ ID NO: 241607 - DNA, 885 bp, Artificial Sequence
  derived and/or modified sequence
atgtccaaggggcagagcggattggggaagtccaccttagtcaatacgctcttcaaatcccaagtgtcacggaaagccagtagttggaaccgggaagagaagatccctaaaactgtagagattaaggccattggccacgtgattgaggagggaggagttaagatgaagctcacagtcatcgataccccaggattcggagatcaaattaacaacgaaaattgttgggagcccatcgagaagtacattaatgaacaatacgaaaagtttctcaaggaggaagtgaatatcgcccgaaagaagcggattcctgacacgcgtgttcattgttgcttatatttcatcagccccaccggtcattcactgaggcccttggacctggaattcatgaaacatctaagtaaggttgtgaatattatccccgtcatagcgaaagccgacactatgacacttgaggagaagtctgaattcaagcagcgagtgcggaaggagttggaggtaaatgggatcgagttttatccccagaaagaatttgatgaggaccttgaggacaagaccgagaatgataaaatacggcaggagagcatgcccttcgcagttgtcggcagtgacaaggaataccaggttaacggcaaacgggttttaggcagaaagacaccgtggggtatcattgaagtggaaaatttgaatcattgtgaatttgccctgctaagggacttcgttattaggacccaccttcaggacttgaaagaggtcactcacaacatccattatgaaacctaccgcgctaagcgccttaatgataatggagggctgcctcctggtgaggggctcttgggtactgtgttgcctccggtccccgcaaccccatgccccacagcagagtag

SEQ ID NO: 241608 - DNA, 2258 bp, Artificial Sequence
  derived and/or modified sequence
gggcgggtgggaggagagcgcgaaggggcgaggcccgtttgcaggggccgctcggcccggggaagcccgcgccccgctcagccttgcagccccgcgcccggagcatctccctggaggaacggagacaaaggaggattcatgtccaaagggctcccagagaccaggacggacgcagccatgtcagagctggtgcctgagcccaggcctaagccagcggtgcccatgaagcccatgagcatcaactccaacctgctgggctacatcggcatcgacaccatcatcgagcagatgcgcaagaagaccatgaagaccggtttcgacttcaacatcatggtcgttgctgggagcccattgagaagtacatcaatgagcagtacgagaagttcctgaaggaggaggtcaacatcgccaggaagaaacgcatccctgacactcgtgtccactgctgcctttacttcatctctcccacaggacactccttgcgacctctggatcttgagttcatgaaacacctcagcaaggttgtgaacatcatccctgtcattgctaaggctgacaccatgaccctggaggagaagtctgaattcaagcaaagggttcgcaaggagcttgaagtaaatggcattgaattctacccccagaaggaatttgatgaggatttggaggataagacggagaatgacaaaatcaggcaggagagcatgccttttgctgtggtgggaagtgacaaggagtaccaagtgaatggcaagagggtcctcggccgaaaaactccatgggggatcatcgaagtggaaaacctcaaccactgtgagtttgccctgcttcgagactttgtcatcaggacccacctccaggacctcaaggaagtgacacacaacatccactatgagacttacagggccaagcggctcaatgacaatggaggcctccctccgggagaaggcctcctgggcactgtccttccacctgtgccagccaccccctgccccactgctgaatgaaggccatttcaagcgctgcttctcactccattcctctcagctgttattgctgcagggccaagccctttttagtgctgtgctcgtccagctcaccaccacagcccctctcagccctcagtaggtgggaggggccagctgcctctttaggccagttgcatcctccatttatccaaaccactcctctcctcccagtggagtggggttctgccagtacagccctactgcatcatctgcgtcagccggtcctagcccatctgcagggtgaaagaactcatcaagagctccttctgcccttgtaagcccatcccagctacttgtaaccatctctaagggcaatggcattgctccctacccattcatctgcatgagctactcttggcttccttaaagggtcaagaaagcaatttttctgcttactagattcattgagatcagctgtgtgagccccaaagtgggacaagggtgtctccttcattacttaaagatattcatgagggtgggtcactacagatgttggggagcaagggctaggatcactttttaaaaaatcaccacttgtggctgtcccagagtgcggttgtacatcctccccacctcataacgcagccactgaggaagagtggttttcctaagaagacattgctggagttgactttcttctgtccaaacaaacaaacaaaaactaaacacacacacaaacccccagaaacccacaatatgtacacgctaaggaaaaactagcacccttctgtccactcagcaataagagggatctcttcccacctaccctacctactcctacccccaacccccttccccattaatgtgagtaatgaattagcctgaccacaggtggtcactgtaggctaatggaaaatacccaagggagggcaaagccccccatcagatgcatgaatgtttgcgaatgttgactgccactgccccacacactgtgtctttatagaattcccctttgcccaccctcttcctgtctccacctggacacaacttgctcaaaggctggtgacttgtgggccattcatctacaaccaagtcctgatggagcaagaggcccacgcctaggggatgcaagaacaacccgtttcttaaatgttaccagtcccagccaatcttacggtgacattacagttaaatttcccaattgaaaacaagcaaacagacactcaaactggtcctgtaattgttgctagactttatgtgttgtacaactaaacattgctgtttgaacagtaa

SEQ ID NO: 241609 - DNA, 2586 bp, Artificial Sequence
  derived and/or modified sequence
ggcggcggcaacggtgcgcgcggacaggggcggcgcggcgccgagcgagccgaggcgaggtcccggggagggcgcggcggcgcggggcgcaggggcggcgcggcggggccgcgggccgggcgggtgggaggagagcgcgaaggggcgaggcccgtttgcaggggccgctcggcccggggaagcccgcgccccgctcagccttgcagccccgcgcccggagcatctccctggaggaacggagacaaaggaggattcatgtccaaagggctcccagagaccaggacggacgcagccatgtcagagctggtgcctgagcccaggcctaagccagcggtgcccatgaagcccatgagcatcaactccaacctgctgggctacatcggcatcgacaccatcatcgagcagatgcgcaagaagaccatgaagaccggtttcgacttcaacatcatggtcgttggccagagtggactgggcaaatcaacgctggtcaacacgctcttcaaatcccaagtgagccgcaaggcctccagctggaaccgggaggagaagatccccaagacagtggagatcaaagctatcgggcatgtgatagaggaaggcggtgtcaaaatgaagctgaccgtcatcgacaccccaggctttggagaccaaatcaacaatgaaaactgctgggagcccattgagaagtacatcaatgagcagtacgagaagttcctgaaggaggaggtcaacatcgccaggaagaaacgcatccctgacactcgtgtccactgctgcctttacttcatctctcccacaggacactccttgcgacctctggatcttgagttcatgaaacacctcagcaaggttgtgaacatcatccctgtcattgctaaggctgacaccatgaccctggaggagaagtctgaattcaagcaaagggttcgcaaggagcttgaagtaaatggcattgaattctacccccagaaggaatttgatgaggatttggaggataagacggagaatgacaaaatcaggcaggagagcatgccttttgctgtggtgggaagtgacaaggagtaccaagtgaatggcaagagggtcctcggccgaaaaactccatgggggatcatcgaagtggaaaacctcaaccactgtgagtttgccctgcttcgagactttgtcatcaggacccacctccaggacctcaaggaagtgacacacaacatccactatgagacttacagggccaagcggctcaatgacaatggaggcctccctccgggagaaggcctcctgggcactgtccttccacctgtgccagccaccccctgccccactgctgaatgaaggccatttcaagcgctgcttctcactccattcctctcagctgttattgctgcagggccaagccctttttagtgctgtgctcgtccagctcaccaccacagcccctctcagccctcagtaggtgggaggggccagctgcctctttaggccagttgcatcctccatttatccaaaccactcctctcctcccagtggagtggggttctgccagtacagccctactgcatcatctgcgtcagccggtcctagcccatctgcagggtgaaagaactcatcaagagctccttctgcccttgtaagcccatcccagctacttgtaaccatctctaagggcaatggcattgctccctacccattcatctgcatgagctactcttggcttccttaaagggtcaagaaagcaatttttctgcttactagattcattgagatcagctgtgtgagccccaaagtgggacaagggtgtctccttcattacttaaagatattcatgagggtgggtcactacagatgttggggagcaagggctaggatcactttttaaaaaatcaccacttgtggctgtcccagagtgcggttgtacatcctccccacctcataacgcagccactgaggaagagtggttttcctaagaagacattgctggagttgactttcttctgtccaaacaaacaaacaaaaactaaacacacacacaaacccccagaaacccacaatatgtacacgctaaggaaaaactagcacccttctgtccactcagcaataagagggatctcttcccacctaccctacctactcctacccccaacccccttccccattaatgtgagtaatgaattagcctgaccacaggtggtcactgtaggctaatggaaaatacccaagggagggcaaagccccccatcagatgcatgaatgtttgcgaatgttgactgccactgccccacacactgtgtctttatagaattcccctttgcccaccctcttcctgtctccacctggacacaacttgctcaaaggctggtgacttgtgggccattcatctacaaccaagtcctgatggagcaagaggcccacgcctaggggatgcaagaacaacccgtttcttaaatgttaccagtcccagccaatcttacggtgacattacagttaaatttcccaattgaaaacaagcaaacagacactcaaactggtcctgtaattgttgctagactttatgtgttgtacaactaaacattgctgtttgaacagtaa

SEQ ID NO: 241610 - DNA, 1866 bp, Artificial Sequence
  derived and/or modified sequence
cggcgccgagcgagccgaggcgaggtcccggggagggcgcggcggcgcggggcgcaggggcggcgcggcggggccgcgggccgggcgggtgggaggagagcgcgaaggggcgaggcccgtttgcaggggccgctcggcccggggaagcccgcgccccgctcagccttgcagccccgcgcccggagcatctccctggaggaacggagacaaaggaggattcatgtccaaaggccagagtggactgggcaaatcaacgctggtcaacacgctcttcaaatcccaagtgagccgcaaggcctccagctggaaccgggaggagaagatccccaagacagtggagatcaaagctatcgggcatgtgatagaggaaggcggtgtcaaaatgaagctgaccgtcatcgacaccccaggctttggagaccaaatcaacaatgaaaactgctgggagcccattgagaagtacatcaatgagcagtacgagaagttcctgaaggaggaggtcaacatcgccaggaagaaacgcatccctgacactcgtgtccactgctgcctttacttcatctctcccacaggacactccttgcgacctctggatcttgagttcatgaaacacctcagcaaggttgtgaacatcatccctgtcattgctaaggctgacaccatgaccctggaggagaagtctgaattcaagcaaagggttcgcaaggagcttgaagtaaatggcattgaattctacccccagaaggaatttgatgaggatttggaggataagacggagaatgacaaaatcaggcaggagagcatgccttttgctgtggtgggaagtgacaaggagtaccaagtgaatggcaagagggtcctcggccgaaaaactccatgggggatcatcgaagtggaaaacctcaaccactgtgagtttgccctgcttcgagactttgtcatcaggacccacctccaggacctcaaggaagtgacacacaacatccactatgagacttacagggccaagcggctcaatgacaatggaggcctccctccgggagaaggcctcctgggcactgtccttccacctgtgccagccaccccctgccccactgctgaatgaaggccatttcaagcgctgcttctcactccattcctctcagctgttattgctgcagggccaagccctttttagtgctgtgctcgtccagctcaccaccacagcccctctcagccctcagtaggtgggaggggccagctgcctctttaggccagttgcatcctccatttatccaaaccactcctctcctcccagtggagtggggttctgccagtacagccctactgcatcatctgcgtcagccggtcctagcccatctgcagggtgaaagaactcatcaagagctccttctgcccttgtaagcccatcccagctacttgtaaccatctctaagggcaatggcattgctccctacccattcatctgcatgagctactcttggcttccttaaagggtcaagaaagcaatttttctgcttactagattcattgagatcagctgtgtgagccccaaagtgggacaagggtgtctccttcattacttaaagatattcatgagggtgggtcactacagatgttggggagcaagggctaggatcactttttaaaaaatcaccacttgtggctgtcccagagtgcggttgtacatcctccccacctcataacgcagccactgaggaagagtggttttcctaagaagacattgctggagttgactttcttctgtccaaacaaacaaacaaaaactaaacacacacacaaacccccagaaacccacaatatgtacacgctaaggaaaaactagcacccttctgtccactcagc

SEQ ID NO: 241611 - DNA, 1077 bp, Artificial Sequence
  derived and/or modified sequence
atgagcaagggcctgcccgagaccagaaccgacgccgccatgagcgagctggtgcccgagcccagacccaagcccgccgtgcccatgaagcccatgagcatcaacagcaacctgctgggctacatcggcatcgacaccatcatcgagcagatgagaaagaagaccatgaagaccggcttcgacttcaacatcatggtggtgggccagagcggcctgggcaagagcaccctggtgaacaccctgttcaagagccaggtgagcagaaaggccagcagctggaacagagaggagaagatccccaagaccgtggagatcaaggccatcggccacgtgatcgaggagggcggcgtgaagatgaagctgaccgtgatcgacacccccggcttcggcgaccagatcaacaacgagaactgctgggagcccatcgagaagtacatcaacgagcagtacgagaagttcctgaaggaggaggtgaacatcgccagaaagaagagaatccccgacaccagagtgcactgctgcctgtacttcatcagccccaccggccacagcctgagacccctggacctggagttcatgaagcacctgagcaaggtggtgaacatcatccccgtgatcgccaaggccgacaccatgaccctggaggagaagagcgagttcaagcagagagtgagaaaggagctggaggtgaacggcatcgagttctacccccagaaggagttcgacgaggacctggaggacaagaccgagaacgacaagatcagacaggagagcatgcccttcgccgtggtgggcagcgacaaggagtaccaggtgaacggcaagagagtgctgggcagaaagaccccctggggcatcatcgaggtggagaacctgaaccactgcgagttcgccctgctgagagacttcgtgatcagaacccacctgcaggacctgaaggaggtgacccacaacatccactacgagacctacagagccaagagactgaacgacaacggcggcctgccccccggcgagggcctgctgggcaccgtgctgccccccgtgcccgccaccccctgccccaccgccgagtag

SEQ ID NO: 241612 - DNA, 885 bp, Artificial Sequence
  derived and/or modified sequence
atgagcaagggccagagcggcctgggcaagagcaccctggtgaacaccctgttcaagagccaggtgagcagaaaggccagcagctggaacagagaggagaagatccccaagaccgtggagatcaaggccatcggccacgtgatcgaggagggcggcgtgaagatgaagctgaccgtgatcgacacccccggcttcggcgaccagatcaacaacgagaactgctgggagcccatcgagaagtacatcaacgagcagtacgagaagttcctgaaggaggaggtgaacatcgccagaaagaagagaatccccgacaccagagtgcactgctgcctgtacttcatcagccccaccggccacagcctgagacccctggacctggagttcatgaagcacctgagcaaggtggtgaacatcatccccgtgatcgccaaggccgacaccatgaccctggaggagaagagcgagttcaagcagagagtgagaaaggagctggaggtgaacggcatcgagttctacccccagaaggagttcgacgaggacctggaggacaagaccgagaacgacaagatcagacaggagagcatgcccttcgccgtggtgggcagcgacaaggagtaccaggtgaacggcaagagagtgctgggcagaaagaccccctggggcatcatcgaggtggagaacctgaaccactgcgagttcgccctgctgagagacttcgtgatcagaacccacctgcaggacctgaaggaggtgacccacaacatccactacgagacctacagagccaagagactgaacgacaacggcggcctgccccccggcgagggcctgctgggcaccgtgctgccccccgtgcccgccaccccctgccccaccgccgagtag

SEQ ID NO: 241613 - protein, 782 aa, Artificial Sequence
  derived and/or modified sequence
MNSAEQTVTWLITLGVLESPKKTISDPEGFLQASLKDGVVLCRLLERLLPGTIEKVYPEPRSESECLSNIREFLRGCGASLRLETFDANDLYQGQNFNKVLSSLVTLNKVTADIGLGSDSVCARPSSHRIKSFDSLGSQSLHTRTSKLFQGQYRSLDMTDNSNNQLVVRAKFNFQQTNEDELSFSKGDVIHVTRVEEGGWWEGTLNGRTGWFPSNYVREVKASEKPVSPKSGTLKSPPKGFDTTAINKSYYNVVLQNILETENEYSKELQTVLSTYLRPLQTSEKLSSANISYLMGNLEEICSFQQMLVQSLEECTKLPEAQQRVGGCFLNLMPQMKTLYLTYCANHPSAVNVLTEHSEELGEFMETKGASSPGILVLTTGLSKPFMRLDKYPTLLKELERHMEDYHTDRQDIQKSMAAFKNLSAQCQEVRKRKELELQILTEAIRNWEGDDIKTLGNVTYMSQVLIQCAGSEEKNERYLLLFPNVLLMLSASPRMSGFIYQGKLPTTGMTITKLEDSENHRNAFEISGSMIERILVSCNNQQDLQEWVEHLQKQTKVTSVGNPTIKPHSVPSHTLPSHPVTPSSKHADSKPAPLTPAYHTLPHPSHHGTPHTTINWGPLEPPKTPKPWSLSCLRPAPPLRPSAALCYKEDLSKSPKTMKKLLPKRKPERKPSDEEFASRKSTAALEEDAQILKVIEAYCTSAKTRQTLNSTWQGTDLMHNHVLADDDQPSLDSLGRRSSLSRLEPSDLSEDSDYDSIWTAHSYRMGSTSRKSCCSYISHQN

SEQ ID NO: 241614 - DNA, 2349 bp, Artificial Sequence
  derived and/or modified sequence
atgaacagcgccgagcagaccgtgacctggctgatcaccctgggcgtgctggagagccccaagaagaccatcagcgaccccgagggcttcctgcaggccagcctgaaggacggcgtggtgctgtgcagactgctggagagactgctgcccggcaccatcgagaaggtgtaccccgagcccagaagcgagagcgagtgcctgagcaacatcagagagttcctgagaggctgcggcgccagcctgagactggagaccttcgacgccaacgacctgtaccagggccagaacttcaacaaggtgctgagcagcctggtgaccctgaacaaggtgaccgccgacatcggcctgggcagcgacagcgtgtgcgccagacccagcagccacagaatcaagagcttcgacagcctgggcagccagagcctgcacaccagaaccagcaagctgttccagggccagtacagaagcctggacatgaccgacaacagcaacaaccagctggtggtgagagccaagttcaacttccagcagaccaacgaggacgagctgagcttcagcaagggcgacgtgatccacgtgaccagagtggaggagggcggctggtgggagggcaccctgaacggcagaaccggctggttccccagcaactacgtgagagaggtgaaggccagcgagaagcccgtgagccccaagagcggcaccctgaagagcccccccaagggcttcgacaccaccgccatcaacaagagctactacaacgtggtgctgcagaacatcctggagaccgagaacgagtacagcaaggagctgcagaccgtgctgagcacctacctgagacccctgcagaccagcgagaagctgagcagcgccaacatcagctacctgatgggcaacctggaggagatctgcagcttccagcagatgctggtgcagagcctggaggagtgcaccaagctgcccgaggcccagcagagagtgggcggctgcttcctgaacctgatgccccagatgaagaccctgtacctgacctactgcgccaaccaccccagcgccgtgaacgtgctgaccgagcacagcgaggagctgggcgagttcatggagaccaagggcgccagcagccccggcatcctggtgctgaccaccggcctgagcaagcccttcatgagactggacaagtaccccaccctgctgaaggagctggagagacacatggaggactaccacaccgacagacaggacatccagaagagcatggccgccttcaagaacctgagcgcccagtgccaggaggtgagaaagagaaaggagctggagctgcagatcctgaccgaggccatcagaaactgggagggcgacgacatcaagaccctgggcaacgtgacctacatgagccaggtgctgatccagtgcgccggcagcgaggagaagaacgagagatacctgctgctgttccccaacgtgctgctgatgctgagcgccagccccagaatgagcggcttcatctaccagggcaagctgcccaccaccggcatgaccatcaccaagctggaggacagcgagaaccacagaaacgccttcgagatcagcggcagcatgatcgagagaatcctggtgagctgcaacaaccagcaggacctgcaggagtgggtggagcacctgcagaagcagaccaaggtgaccagcgtgggcaaccccaccatcaagccccacagcgtgcccagccacaccctgcccagccaccccgtgacccccagcagcaagcacgccgacagcaagcccgcccccctgacccccgcctaccacaccctgccccaccccagccaccacggcaccccccacaccaccatcaactggggccccctggagccccccaagacccccaagccctggagcctgagctgcctgagacccgccccccccctgagacccagcgccgccctgtgctacaaggaggacctgagcaagagccccaagaccatgaagaagctgctgcccaagagaaagcccgagagaaagcccagcgacgaggagttcgccagcagaaagagcaccgccgccctggaggaggacgcccagatcctgaaggtgatcgaggcctactgcaccagcgccaagaccagacagaccctgaacagcacctggcagggcaccgacctgatgcacaaccacgtgctggccgacgacgaccagcccagcctggacagcctgggcagaagaagcagcctgagcagactggagcccagcgacctgagcgaggacagcgactacgacagcatctggaccgcccacagctacagaatgggcagcaccagcagaaagagctgctgcagctacatcagccaccagaactag

SEQ ID NO: 241615 - DNA, 1878 bp, Artificial Sequence
  derived and/or modified sequence
atgaccgacaacagcaacaaccagctggtggtgagagccaagttcaacttccagcagaccaacgaggacgagctgagcttcagcaagggcgacgtgatccacgtgaccagagtggaggagggcggctggtgggagggcaccctgaacggcagaaccggctggttccccagcaactacgtgagagaggtgaaggccagcgagaagcccgtgagccccaagagcggcaccctgaagagcccccccaagggcttcgacaccaccgccatcaacaagagctactacaacgtggtgctgcagaacatcctggagaccgagaacgagtacagcaaggagctgcagaccgtgctgagcacctacctgagacccctgcagaccagcgagaagctgagcagcgccaacatcagctacctgatgggcaacctggaggagatctgcagcttccagcagatgctggtgcagagcctggaggagtgcaccaagctgcccgaggcccagcagagagtgggcggctgcttcctgaacctgatgccccagatgaagaccctgtacctgacctactgcgccaaccaccccagcgccgtgaacgtgctgaccgagcacagcgaggagctgggcgagttcatggagaccaagggcgccagcagccccggcatcctggtgctgaccaccggcctgagcaagcccttcatgagactggacaagtaccccaccctgctgaaggagctggagagacacatggaggactaccacaccgacagacaggacatccagaagagcatggccgccttcaagaacctgagcgcccagtgccaggaggtgagaaagagaaaggagctggagctgcagatcctgaccgaggccatcagaaactgggagggcgacgacatcaagaccctgggcaacgtgacctacatgagccaggtgctgatccagtgcgccggcagcgaggagaagaacgagagatacctgctgctgttccccaacgtgctgctgatgctgagcgccagccccagaatgagcggcttcatctaccagggcaagctgcccaccaccggcatgaccatcaccaagctggaggacagcgagaaccacagaaacgccttcgagatcagcggcagcatgatcgagagaatcctggtgagctgcaacaaccagcaggacctgcaggagtgggtggagcacctgcagaagcagaccaaggtgaccagcgtgggcaaccccaccatcaagccccacagcgtgcccagccacaccctgcccagccaccccgtgacccccagcagcaagcacgccgacagcaagcccgcccccctgacccccgcctaccacaccctgccccaccccagccaccacggcaccccccacaccaccatcaactggggccccctggagccccccaagacccccaagccctggagcctgagctgcctgagacccgccccccccctgagacccagcgccgccctgtgctacaaggaggacctgagcaagagccccaagaccatgaagaagctgctgcccaagagaaagcccgagagaaagcccagcgacgaggagttcgccagcagaaagagcaccgccgccctggaggaggacgcccagatcctgaaggtgatcgaggcctactgcaccagcgccaagaccagacagaccctgaacagcacctggcagggcaccgacctgatgcacaaccacgtgctggccgacgacgaccagcccagcctggacagcctgggcagaagaagcagcctgagcagactggagcccagcgacctgagcgaggacagcgactacgacagcatctggaccgcccacagctacagaatgggcagcaccagcagaaagagctgctgcagctacatcagccaccagaactag

SEQ ID NO: 241616 - DNA, 1344 bp, Artificial Sequence
  derived and/or modified sequence
atgaccgacaacagcaacaaccagctggtggtgagagccaagttcaacttccagcagaccaacgaggacgagctgagcttcagcaagggcgacgtgatccacgtgaccagagtggaggagggcggctggtgggagggcaccctgaacggcagaaccggctggttccccagcaactacgtgagagaggtgaaggccagcgagaagcccgtgagccccaagagcggcaccctgaagagcccccccaagggcttcgacaccaccgccatcaacaagagctactacaacgtggtgctgcagaacatcctggagaccgagaacgagtacagcaaggagctgcagaccgtgctgagcacctacctgagacccctgcagaccagcgagaagctgagcagcgccaacatcagctacctgatgggcaacctggaggagatctgcagcttccagcagatgctggtgcagagcctggaggagtgcaccaagctgcccgaggcccagcagagagtgggcggctgcttcctgaacctgatgccccagatgaagaccctgtacctgacctactgcgccaaccaccccagcgccgtgaacgtgctgaccgagcacagcgaggagctgggcgagttcatggagaccaagggcgccagcagccccggcatcctggtgctgaccaccggcctgagcaagcccttcatgagactggacaagtaccccaccctgctgaaggagctggagagacacatggaggactaccacaccgacagacaggacatccagaagagcatggccgccttcaagaacctgagcgcccagtgccaggaggtgagaaagagaaaggagctggagctgcagatcctgaccgaggccatcagaaactgggagggcgacgacatcaagaccctgggcaacgtgacctacatgagccaggtgctgatccagtgcgccggcagcgaggagaagaacgagagatacctgctgctgttccccaacgtgctgctgatgctgagcgccagccccagaatgagcggcttcatctaccagggcaagctgcccaccaccggcatgaccatcaccaagctggaggacagcgagaaccacagaaacgccttcgagatcagcggcagcatgatcgagagaatcctggtgagctgcaacaaccagcaggacctgcaggagtgggtggagcacctgcagaagcagaccaaggtgaccagcgtgggcaaccccaccatcaagccccacagcgtgcccagccacaccctgcccagccaccccgtgacccccagcagcaagcacgccgacagcaagcccgcccccctgacccccgcctaccacaccctgccccactag

SEQ ID NO: 241617 - DNA, 2070 bp, Artificial Sequence
  derived and/or modified sequence
atcccccccagcaagcccctgagaggcagcagcctgtggggctgctggagcagacccaagaccatcagcgaccccgagggcttcctgcaggccagcctgaaggacggcgtggtgctgtgcagactgctggagagactgctgcccggcaccatcgagaaggtgtaccccgagcccagaagcgagagcgagtgcctgagcaacatcagagagttcctgagaggctgcggcgccagcctgagactggagaccttcgacgccaacgacctgtaccagggccagaacttcaacaaggtgctgagcagcctggtgaccctgaacaaggtgaccgccgacatcggcctgggcagcgacagcgtgtgcgccagacccagcagccacagaatcaagagcttcgacagcctgggcagccagagcctgcacaccagaaccagcaagctgttccagggccagtacagaagcctggacatgaccgacaacagcaacaaccagctggtggtgagagccaagttcaacttccagcagaccaacgaggacgagctgagcttcagcaagggcgacgtgatccacgtgaccagagtggaggagggcggctggtgggagggcaccctgaacggcagaaccggctggttccccagcaactacgtgagagaggtgaaggccagcgagaagcccgtgagccccaagagcggcaccctgaagagcccccccaagggcttcgacaccaccgccatcaacaagagctactacaacgtggtgctgcagaacatcctggagaccgagaacgagtacagcaaggagctgcagaccgtgctgagcacctacctgagacccctgcagaccagcgagaagctgagcagcgccaacatcagctacctgatgggcaacctggaggagatctgcagcttccagcagatgctggtgcagagcctggaggagtgcaccaagctgcccgaggcccagcagagagtgggcggctgcttcctgaacctgatgccccagatgaagaccctgtacctgacctactgcgccaaccaccccagcgccgtgaacgtgctgaccgagcacagcgaggagctgggcgagttcatggagaccaagggcgccagcagccccggcatcctggtgctgaccaccggcctgagcaagcccttcatgagactggacaagtaccccaccctgctgaaggagctggagagacacatggaggactaccacaccgacagacaggacatccagaagagcatggccgccttcaagaacctgagcgcccagtgccaggaggtgagaaagagaaaggagctggagctgcagatcctgaccgaggccatcagaaactgggagggcgacgacatcaagaccctgggcaacgtgacctacatgagccaggtgctgatccagtgcgccggcagcgaggagaagaacgagagatacctgctgctgttccccaacgtgctgctgatgctgagcgccagccccagaatgagcggcttcatctaccagggcaagctgcccaccaccggcatgaccatcaccaagctggaggacagcgagaaccacagaaacgccttcgagatcagcggcagcatgatcgagagaatcctggtgagctgcaacaaccagcaggacctgcaggagtgggtggagcacctgcagaagcagaccaaggtgaccagcgtgggcaaccccaccatcaagccccacagcgtgcccagccacaccctgcccagccaccccgtgacccccagcagcaagcacgccgacagcaagcccgcccccctgacccccgcctaccacaccctgccccaccccagccaccacggcaccccccacaccaccatcaactggggccccctggagccccccaagacccccaagccctggagcctgagctgcctgagacccgccccccccctgagacccagcgccgccctgtgctacaaggaggacctgagcaagagccccaagaccatgaagaagctgctgcccaagagaaagcccgagagaaagcccatgagaagcagcagacccggcaaggcccagctgctgtggaagaagatgctgagattctag

SEQ ID NO: 241618 - DNA, 2349 bp, Artificial Sequence
  derived and/or modified sequence
atgaattcagccgagcagacagtaacctggctgattacactcggcgttttagaaagtccaaagaagactatcagcgatccagaggggttcctccaggccagccttaaggatggagtggtactgtgtaggctactagagaggttgctgccaggcactatcgaaaaggtgtaccccgagcccaggagtgaatcggagtgtctatcgaacatccgtgaatttctccggggatgcggagcatctctgagactggaaacgtttgacgcaaacgacctgtatcagggtcagaacttcaacaaagtcctttcatccctggtgacactgaacaaagttacagctgacattggattgggaagtgacagtgtctgcgcaagaccctcctctcacaggatcaagtcttttgactcgctggggagccagtcactccacacgcgaactagtaagttgttccagggacagtaccggagtctggatatgaccgataacagcaataatcaattggttgtccgcgcgaagttcaactttcagcaaactaatgaagacgagctgtctttttcaaaaggtgatgtgatacacgtgaccagagtagaggagggggggtggtgggaaggcacactgaacgggcgcacagggtggttcccatcaaattatgtgcgagaagtcaaggcttcagaaaaacccgtgtcccccaaatcaggcacgctaaagagcccaccaaagggctttgatacgaccgcaataaataagtcctattacaacgtggttcttcagaacatcctggagacagagaacgaatattcaaaggagttgcagacggttctcagcacctacctgcggcctctgcagacatccgagaaactctcgagcgctaatatctcatatctcatgggcaatctggaggaaatctgctcttttcagcagatgctggtgcaaagcttggaagaatgcacaaagctgccagaagctcagcagcgtgtagggggttgcttccttaatttgatgccgcagatgaagaccctgtatctgacttactgcgctaaccacccatccgcggtgaatgtgctgactgaacacagcgaagaattgggcgaattcatggagacaaagggggcctcatcgccaggaatcctggtgcttacaaccggcttatctaaaccctttatgagattggacaagtatcctaccctattgaaagaactcgaaaggcacatggaagattaccacactgatcgacaggatatccaaaaatcaatggcagcatttaaaaacctgagtgcccagtgtcaagaggtccgaaagaggaaagagcttgaacttcagattttaactgaggctatacgcaactgggaaggggacgatattaaaaccctaggaaatgttacgtatatgagccaggtgcttatccagtgcgccggcagtgaggaaaaaaacgagcgatacctcctgctctttcccaacgtgcttctcatgttatctgctagccccagaatgtccggctttatataccaaggtaagctgcctactaccggcatgacaattaccaagcttgaagactccgaaaaccaccgtaacgctttcgagatttctgggtccatgattgagagaatcctggtctcctgtaataatcagcaggatttacaagaatgggtggaacatctccaaaagcagacaaaggtgacgagcgtcggcaatcctaccatcaaaccccattcagttccttcacatactttacccagccaccccgttacaccatcctcaaaacacgcagattccaaaccagcaccactcacccccgcctaccatactttgccccatccatctcaccatgggactccgcataccacaatcaactggggacccctggagcctccgaaaacacccaaaccttggagcctgagttgcctgcggcccgcgcctccccttcgcccctccgccgccctgtgctataaggaagatctttctaagagccccaagactatgaaaaaattgcttcccaaacgcaagccagagaggaagccctccgacgaagagtttgcctcgcgaaagtccactgctgccctggaagaggatgcccagatcctgaaggtgatcgaggcgtactgtacgtctgcaaaaacgaggcagaccctgaattccacctggcagggaaccgaccttatgcataaccacgtcttggccgatgacgaccagccctcacttgattcattagggcggagatccagcctgagtcgcttggagcctagtgatctttccgaagactctgactatgattccatctggacagctcacagctacaggatgggatcaaccagccgtaaatcctgctgtagctacatctcacatcaaaattag

SEQ ID NO: 241619 - DNA, 1878 bp, Artificial Sequence
  derived and/or modified sequence
atgaccgacaattccaataaccagctggtagttagagccaaatttaacttccagcagactaacgaagatgagttgtccttctccaaaggtgatgtgattcacgtgactagggtggaagaaggcggctggtgggagggcacactgaatggtcgcacaggttggttcccctccaattatgtgcgggaggtcaaggcatctgagaagcccgtgtcccccaagagcggaacactcaaatcacctccaaaggggttcgatactacagcaatcaataagagctactacaacgttgtgctccagaatatccttgagactgagaacgaatactctaaagaactgcagacagtcctctcaacttatcttcggccacttcagaccagcgagaagctgtcttccgcgaacatcagctatttaatgggcaatttggaggagatctgcagttttcagcagatgttagttcagagcttggaggagtgtacaaaactgcctgaggcgcagcaacgggtcggcggctgctttctgaatctcatgcctcaaatgaagactctgtacctgacttactgcgccaaccacccttctgccgtcaacgttttaaccgaacacagcgaggagctaggagaatttatggagacaaaaggcgcaagttcaccaggcatcctggtcctgacaacgggtctgagcaaacctttcatgcggctggacaagtatccgaccctgctcaaggagttggagcggcacatggaagactatcatacggatcgccaggacattcagaagtccatggccgcatttaagaaccttagcgcacagtgccaggaagtaagaaagaggaaggagctggagctgcagattctgaccgaagccatcagaaattgggagggcgacgatattaaaactcttggtaatgtcacctacatgagccaggttctcattcagtgcgcaggatccgaggagaagaatgagcggtacttgctgctctttccaaatgtgctcctgatgctatcagcctcaccccggatgtccggattcatttatcaggggaaactacctaccacgggaatgaccataaccaagctagaggacagcgagaatcatagaaacgctttcgagatctccgggagtatgatcgagagaatacttgtgagttgcaataatcaacaggatttgcaggaatgggtggagcacctgcagaaacagacaaaggtcacttcagtcgggaatccaaccatcaaacctcacagtgtgccttcccatacactgccctcccacccggtcacgccatcttccaagcacgcagacagcaagcccgcaccgcttaccccggcctatcataccctgccccacccttctcatcacggaacaccacatacgacaatcaattggggacccctcgagccgcccaagactcccaagccctggtctctgtcctgcttgcgccccgccccgccccttcgtccttctgccgctctctgttacaaggaagatctgtcaaagtccccaaagaccatgaagaagctgctgcctaagagaaagcccgagagaaagccttccgacgaggaattcgcatccaggaagagcacagccgccttagaggaagacgcccagatactgaaggtcatcgaagcctactgcacgtcagccaagacgcgtcagactttgaatagcacttggcaggggactgatctgatgcataatcacgtgctggccgacgacgaccaaccaagcctagactccctgggtcgaagaagtagtctctctcggctggagcctagcgatctctctgaggacagcgattatgacagcatctggaccgctcacagctacaggatgggctctacttctcgcaaatcgtgctgttcctacataagtcaccagaattag

SEQ ID NO: 241620 - DNA, 1344 bp, Artificial Sequence
  derived and/or modified sequence
atgacagacaactccaacaaccagttggttgtccgagctaaattcaatttccagcagaccaatgaggacgagttgtctttttctaaaggtgacgttattcacgtcactagagtagaagaggggggatggtgggagggcactctcaatggacgcactggttggttcccgtctaactacgtccgcgaggtcaaagcatctgagaagcccgtttccccaaaatccggcacactaaaatcacccccaaaaggattcgatacaactgctattaacaaaagctactacaacgtggttctgcagaacattctggagaccgaaaatgagtattctaaggaacttcagaccgttctctccacttatctccggcctctgcagacgtctgaaaagctttcctcagccaacatcagttacctaatggggaacttggaggaaatatgcagtttccagcagatgcttgtgcagagtctagaagagtgtactaaactccctgaagcccagcagcgcgttggcggatgtttcctgaatttgatgccacagatgaaaaccctttacctaacatactgcgctaatcatccttctgcggtgaacgtgctcaccgaacacagcgaggagcttggtgagtttatggagaccaagggcgcatcatctccgggaatactcgtgttgacgactgggctgagcaagcctttcatgcgattggacaaatacccgaccctccttaaggaactggagaggcacatggaagactatcatacagacagacaggatatccagaagtctatggcagccttcaagaacctcagtgctcaatgccaagaagtgagaaagcgcaaagagctagagctccagatcctcaccgaagccatcaggaactgggagggggatgatattaagactctgggtaatgtgacctatatgtcccaggttcttatccagtgcgccgggagtgaagagaagaacgagcgttacttgcttctgtttccaaacgtcctactcatgctctctgcatccccccggatgagcggctttatataccagggcaaactgcccactactggaatgactatcactaagcttgaggactccgaaaatcatcggaatgcatttgagatatccggatcaatgatcgagaggatcctggtttcttgtaacaatcagcaggacctgcaggaatgggttgaacacctgcagaagcagacaaaggtgactagcgtgggcaatccaactattaaacctcatagcgtgccatctcacaccttaccaagtcacccagtgactccaagctcgaagcacgccgatagcaaaccagctcctctgacacctgcttatcacaccctccctcactag

SEQ ID NO: 241621 - DNA, 2070 bp, Artificial Sequence
  derived and/or modified sequence
attccccccagtaagcccctcagaggttcgagcctatgggggtgctggagtagacccaagacaatctccgatcctgagggcttcctgcaggcctccctgaaggacggcgtggtgctctgccgcctgctcgagcgtctcctgcctggtaccattgagaaagtctatcctgagccccggtccgaatctgagtgcctttcaaacatccgtgagtttctgagggggtgcggcgcaagcctgaggctggaaaccttcgatgctaatgatctctatcagggtcagaatttcaataaagtgctctctagcctggtgacactgaacaaggttaccgccgacattggcctgggatctgactccgtgtgtgccaggccttccagccatcggatcaaatcattcgacagcctgggatcacagagcctgcacacaaggactagtaagctctttcaggggcaatatagatctctggatatgacagacaatagtaataaccagctcgtggtgcgggctaagttcaattttcaacagacaaacgaggatgaactcagttttagtaaaggcgacgtgattcacgtgacgcgggtcgaagaagggggttggtgggagggtacacttaatggcagaaccggatggtttccgtctaactacgtgcgagaggtgaaggccagcgaaaaaccggtgtcccccaagtcgggtacactcaagtccccacccaagggatttgacacgaccgccataaacaagtcatactacaacgtggttctccaaaatattctggagacggaaaatgaatatagcaaagaactccagaccgtattaagcacctatctgagaccactgcagactagcgagaaactatctagcgccaacatctcgtatttaatgggcaacctcgaagaaatatgctccttccagcaaatgcttgtgcagtccctggaggagtgtaccaaactacccgaggcacagcagcgggtgggaggatgttttctcaacctgatgccccagatgaaaacactttatcttacctactgtgctaaccatcccagtgcagtcaatgtacttacagagcactctgaagagcttggtgagttcatggagactaaaggcgcaagctcccccgggatcctggtattaactacggggctcagcaaaccttttatgaggctcgataaataccctacccttttgaaggagctcgaacgtcatatggaggattaccataccgatcgccaggatatccaaaaaagtatggccgcttttaaaaacctcagtgctcagtgccaggaagtgcgaaaaagaaaagagctagagctacagattcttaccgaagctattcggaactgggaaggggacgacataaaaaccctgggtaacgtcacatacatgtctcaggtcctgatacaatgcgctggctctgaggaaaagaatgagcggtaccttctcctgttccctaacgttctcctgatgctgtcagcttctccccgcatgtctggattcatataccagggaaagctgccaacgaccggtatgaccataacaaagctggaggactccgagaatcaccgcaacgcattcgaaatctctggatccatgatcgagcgaatcctcgttagttgtaacaatcagcaggacctgcaggagtgggtagaacacttgcaaaagcagacgaaggtcacttccgtggggaacccaacaatcaagccacacagcgttccatcccatacactgccgtctcaccccgttaccccatcgtcaaaacatgccgacagcaaacccgcccccctgaccccggcctatcacacccttcctcatccatcacaccacggtacccctcataccacgattaattggggcccgctggagcccccgaaaacgccgaaaccctggagcctgagctgcctgcgcccagctcctcctctaaggccatcagctgccttatgttacaaagaagacctgtctaagtctcctaaaacaatgaagaagcttctgcctaagaggaaaccagaaaggaagccaatgcgctcgagtaggccaggtaaggcccaactcctatggaaaaaaatgctgcgtttttag

SEQ ID NO: 241622 - DNA, 2349 bp, Artificial Sequence
  derived and/or modified sequence
atgaacagcgctgagcagacagtgacctggctgatcaccctgggcgtgctggagagccccaagaagaccatcagtgaccctgagggcttcctgcaggccagcctgaaggatggagtggtgctgtgccgcctgctggagcggctgctgcccggcaccatcgagaaggtgtacccagagcccaggtctgagagtgaatgtctgagcaacatccgggagttcctgcggggctgtggggccagcctgcggctggagacctttgatgccaatgacctgtaccagggccagaacttcaacaaggtgctgagcagcctggtgaccctgaacaaggtgacagctgacatcggcctgggcagtgacagcgtgtgtgcccggcccagcagccaccgcatcaagagctttgacagcctgggcagccagagcctgcacaccaggaccagcaagctgttccagggccagtaccgcagcctggacatgacagacaacagcaacaaccagctggtggtgcgggccaagttcaacttccagcagaccaatgaagatgagctgtccttcagcaaaggagatgtgattcatgtgaccagggtggaggagggcggctggtgggagggcaccctgaatggccgcacaggctggttccccagcaactacgtgcgggaggtgaaggccagcgagaagcctgtgagccccaagagcggcaccctgaagagcccccccaagggctttgacaccacagccatcaacaagagctactacaacgtggtgctgcagaacatcctggagacagaaaatgagtacagcaaggagctgcagacagtgctgagcacctacctgcggcccctgcagaccagcgagaagctgagcagcgccaacatctcctacctgatgggcaacctggaggagatctgcagcttccagcagatgctggtgcagagcctggaggagtgcaccaagctgcctgaggcccagcagagggtgggcggctgcttcctgaacctgatgccccagatgaagaccctgtacctgacctactgtgccaaccaccccagcgctgtgaatgtgctgacagagcacagcgaggagctgggggagttcatggagaccaagggggccagcagccctggcatcctggtgctgaccaccggcctgagcaagcccttcatgaggctggacaagtaccccaccctgctgaaggagctggagcggcacatggaggactaccacacagaccggcaggacatccagaagtccatggccgccttcaagaacctgagcgcccagtgccaggaggtgaggaagaggaaggagctggagctgcagatcctgacagaggccatccggaactgggagggagatgacatcaagaccctgggcaatgtgacctacatgagccaggtgctgatccagtgtgccggcagcgaggagaagaatgaaagatacctgctgctcttccccaacgtgctgctgatgctgagcgccagccccaggatgagcggcttcatctaccagggcaagctgcccaccaccggcatgaccatcaccaagctggaggacagcgagaaccacagaaatgcctttgagatcagcggctccatgattgaaagaatcctggtgtcctgcaacaaccagcaggacctgcaggagtgggtggagcacctgcagaagcagaccaaggtgacctctgtgggcaaccccaccatcaagccccacagcgtgcccagccacaccctgcccagccaccctgtgacccccagcagcaagcacgccgacagcaagccagcccccctgaccccagcctaccacaccctgccccaccccagccaccacggcaccccccacaccaccatcaactggggccccctggagccccccaagacccccaagccctggagcctgagctgcctgcggcctgccccacccctgcggcccagcgctgccctgtgctacaaggaggacctgagcaagagccccaagaccatgaagaagctgctgcccaagaggaagccagagaggaagcccagtgatgaggagtttgccagcaggaagagcacagctgccctggaggaggatgcccagatcctgaaggtgattgaggcctactgcaccagcgccaagacccggcagaccctgaacagcacctggcagggcacagacctgatgcacaaccacgtgctggctgatgatgaccagcccagcctggacagcctgggcagaagaagcagcctgagccggctggagcccagcgacctgtctgaagattctgactatgacagcatctggacagcccacagctacaggatgggcagcaccagcaggaagagctgctgcagctacatcagccaccagaactag

SEQ ID NO: 241623 - DNA, 1878 bp, Artificial Sequence
  derived and/or modified sequence
atgacagacaacagcaacaaccagctggtggtgcgggccaagttcaacttccagcagaccaatgaagatgagctgtccttcagcaaaggagatgtgatccacgtgaccagggtggaggagggcggctggtgggagggcaccctgaatggaagaacaggctggttccccagcaactacgtgcgggaggtgaaggccagcgagaagcctgtgagccccaagagcggcaccctgaagagcccccccaagggctttgacaccacagccatcaacaagagctactacaacgtggtgctgcagaacatcctggagacagaaaatgagtacagcaaggagctgcagacagtgctgagcacctacctgcggcccctgcagaccagcgagaagctgagcagcgccaacatctcctacctgatgggcaacctggaggagatctgcagcttccagcagatgctggtgcagagcctggaggagtgcaccaagctgcctgaggcccagcagagggtgggcggctgcttcctgaacctgatgccccagatgaagaccctgtacctgacctactgtgccaaccaccccagcgctgtgaatgtgctgacagagcacagcgaggagctgggggagttcatggagaccaagggggccagcagccctggcatcctggtgctgaccaccggcctgagcaagcccttcatgaggctggacaagtaccccaccctgctgaaggagctggagcggcacatggaggactaccacacagaccggcaggacatccagaagtccatggccgccttcaagaacctgagcgcccagtgccaggaggtgaggaagaggaaggagctggagctgcagatcctgacagaggccatccggaactgggagggagatgacatcaagaccctgggcaatgtgacctacatgagccaggtgctgatccagtgtgccggcagcgaggagaagaatgaaagatacctgctgctcttccccaacgtgctgctgatgctgagcgccagccccaggatgagcggcttcatctaccagggcaagctgcccaccaccggcatgaccatcaccaagctggaggacagcgagaaccacagaaatgcctttgagatcagcggctccatgattgagcgcatcctggtgtcctgcaacaaccagcaggacctgcaggagtgggtggagcacctgcagaagcagaccaaggtgacctctgtgggcaaccccaccatcaagccccacagcgtgcccagccacaccctgcccagccaccctgtgacccccagcagcaagcatgctgacagcaagccagcccccctgaccccagcctaccacaccctgccccaccccagccaccacggcaccccccacaccaccatcaactggggccccctggagccccccaagacccccaagccctggagcctgagctgcctgcggcctgccccacccctgcggcccagcgctgccctgtgctacaaggaggacctgagcaagagccccaagaccatgaagaagctgctgcccaagaggaagccagagaggaagcccagtgatgaggagtttgccagcaggaagagcacagctgccctggaggaggatgcccagatcctgaaggtgattgaggcctactgcaccagcgccaagacccggcagaccctgaacagcacctggcagggcacagacctgatgcacaaccacgtgctggctgatgatgaccagcccagcctggacagcctgggccgccgcagcagcctgagccggctggagcccagcgacctgtctgaggacagcgactatgacagcatctggacagcccacagctacaggatgggcagcaccagcaggaagagctgctgcagctacatcagccaccagaactag

SEQ ID NO: 241624 - DNA, 1344 bp, Artificial Sequence
  derived and/or modified sequence
atgacagacaacagcaacaaccagctggtggtgcgggccaagttcaacttccagcagaccaatgaagatgagctgtccttcagcaaaggagatgtgatccacgtgaccagggtggaggagggcggctggtgggagggcaccctgaatggaagaacaggctggttccccagcaactacgtgcgggaggtgaaggccagcgagaagcctgtgagccccaagagcggcaccctgaagagcccccccaagggctttgacaccacagccatcaacaagagctactacaacgtggtgctgcagaacatcctggagacagaaaatgagtacagcaaggagctgcagacagtgctgagcacctacctgcggcccctgcagaccagcgagaagctgagcagcgccaacatctcctacctgatgggcaacctggaggagatctgcagcttccagcagatgctggtgcagagcctggaggagtgcaccaagctgcctgaggcccagcagagggtgggcggctgcttcctgaacctgatgccccagatgaagaccctgtacctgacctactgtgccaaccaccccagcgctgtgaatgtgctgacagagcacagcgaggagctgggggagttcatggagaccaagggggccagcagccctggcatcctggtgctgaccaccggcctgagcaagcccttcatgaggctggacaagtaccccaccctgctgaaggagctggagcggcacatggaggactaccacacagaccggcaggacatccagaagtccatggccgccttcaagaacctgagcgcccagtgccaggaggtgaggaagaggaaggagctggagctgcagatcctgacagaggccatccggaactgggagggagatgacatcaagaccctgggcaatgtgacctacatgagccaggtgctgatccagtgtgccggcagcgaggagaagaatgaaagatacctgctgctcttccccaacgtgctgctgatgctgagcgccagccccaggatgagcggcttcatctaccagggcaagctgcccaccaccggcatgaccatcaccaagctggaggacagcgagaaccacagaaatgcctttgagatcagcggctccatgattgagcgcatcctggtgtcctgcaacaaccagcaggacctgcaggagtgggtggagcacctgcagaagcagaccaaggtgacctctgtgggcaaccccaccatcaagccccacagcgtgcccagccacaccctgcccagccaccctgtgacccccagcagcaagcatgctgacagcaagccagcccccctgaccccagcctaccacaccctgccccactag

SEQ ID NO: 241625 - DNA, 2070 bp, Artificial Sequence
  derived and/or modified sequence
atcccccccagcaagcccctgcggggcagcagcctgtggggctgctggagccggcccaagaccatcagtgaccctgagggcttcctgcaggccagcctgaaggatggagtggtgctgtgccgcctgctggagcggctgctgcccggcaccatcgagaaggtgtacccagagcccaggtctgagagtgaatgtctgagcaacatccgggagttcctgcggggctgtggggccagcctgcggctggagacctttgatgccaatgacctgtaccagggccagaacttcaacaaggtgctgagcagcctggtgaccctgaacaaggtgacagctgacatcggcctgggcagtgacagcgtgtgtgcccggcccagcagccaccgcatcaagagctttgacagcctgggcagccagagcctgcacaccaggaccagcaagctgttccagggccagtaccgcagcctggacatgacagacaacagcaacaaccagctggtggtgcgggccaagttcaacttccagcagaccaatgaagatgagctgtccttcagcaaaggagatgtgattcatgtgaccagggtggaggagggcggctggtgggagggcaccctgaatggccgcacaggctggttccccagcaactacgtgcgggaggtgaaggccagcgagaagcctgtgagccccaagagcggcaccctgaagagcccccccaagggctttgacaccacagccatcaacaagagctactacaacgtggtgctgcagaacatcctggagacagaaaatgagtacagcaaggagctgcagacagtgctgagcacctacctgcggcccctgcagaccagcgagaagctgagcagcgccaacatctcctacctgatgggcaacctggaggagatctgcagcttccagcagatgctggtgcagagcctggaggagtgcaccaagctgcctgaggcccagcagagggtgggcggctgcttcctgaacctgatgccccagatgaagaccctgtacctgacctactgtgccaaccaccccagcgctgtgaatgtgctgacagagcacagcgaggagctgggggagttcatggagaccaagggggccagcagccctggcatcctggtgctgaccaccggcctgagcaagcccttcatgaggctggacaagtaccccaccctgctgaaggagctggagcggcacatggaggactaccacacagaccggcaggacatccagaagtccatggccgccttcaagaacctgagcgcccagtgccaggaggtgaggaagaggaaggagctggagctgcagatcctgacagaggccatccggaactgggagggagatgacatcaagaccctgggcaatgtgacctacatgagccaggtgctgatccagtgtgccggcagcgaggagaagaatgaaagatacctgctgctcttccccaacgtgctgctgatgctgagcgccagccccaggatgagcggcttcatctaccagggcaagctgcccaccaccggcatgaccatcaccaagctggaggacagcgagaaccacagaaatgcctttgagatcagcggctccatgattgaaagaatcctggtgtcctgcaacaaccagcaggacctgcaggagtgggtggagcacctgcagaagcagaccaaggtgacctctgtgggcaaccccaccatcaagccccacagcgtgcccagccacaccctgcccagccaccctgtgacccccagcagcaagcacgccgacagcaagccagcccccctgaccccagcctaccacaccctgccccaccccagccaccacggcaccccccacaccaccatcaactggggccccctggagccccccaagacccccaagccctggagcctgagctgcctgcggcctgccccacccctgcggcccagcgctgccctgtgctacaaggaggacctgagcaagagccccaagaccatgaagaagctgctgcccaagaggaagccagagaggaagcccatgaggagcagcaggcctgggaaggcccagctgctgtggaagaagatgctgcgcttctag

SEQ ID NO: 241626 - DNA, 2349 bp, Artificial Sequence
  derived and/or modified sequence
atgaacagcgccgagcagaccgtgacctggctgatcaccctgggcgtgctggaatctccaaagaagaccatatctgatcccgagggcttcctacaggccagtttgaaagatggagtggtgctatgtcgactcctcgagcgtctgcttcccggcacaatcgaaaaggtttatccggaaccacggtccgaatcagaatgcttgtccaatattagggagtttcttcggggctgtggcgcctcattaaggcttgagactttcgacgcaaacgacctgtaccagggacaaaatttcaataaagttttgtcaagcctcgtaacactcaacaaggttaccgctgatatcggcctggggagcgacagtgtgtgcgcccgcccctccagtcaccgcatcaagtctttcgactcactcgggagtcagagcctgcacacaagaaccagtaagctcttccaggggcagtacagaagcctcgatatgacggacaatagtaataatcaattagttgtcagggcaaaattcaatttccagcagaccaacgaggatgaactgtccttctccaagggcgacgttattcacgtgacacgggtagaagaaggggggtggtgggaaggaaccctgaatggacgcactggttggttcccatctaactatgtgcgagaggtcaaggcgtccgagaagcctgtgagtcctaagagcggaactttgaagtcgcccccgaaaggattcgatacaacggccatcaacaaaagttattataacgtggtgcttcagaacattctggaaaccgagaatgagtactccaaggagttgcagacggttttatcaacctatctgcgacctctccagacctccgagaaattgagcagcgccaacatcagctatttaatggggaacctagaggaaatctgctcgtttcagcaaatgcttgttcagagcttagaggagtgtacaaagctgccggaggcacagcaacgcgtcggggggtgtttcctcaatttgatgccacagatgaagaccctctatctaacatattgcgccaaccacccatccgcggtgaacgtgctcactgaacatagcgaagaactcggcgaatttatggaaacaaagggcgcaagtagccctggaatcctcgtcctgacaactgggttaagcaaacctttcatgagactagataagtaccccacccttctaaaagagctcgaacgccacatggaagactatcatactgaccgccaggacattcaaaagtcgatggctgcattcaaaaacttgtctgctcagtgtcaggaggtaagaaagcgcaaggagcttgagctccagatcttaactgaagccattagaaattgggaaggagatgacataaagactctggggaacgtcacttacatgagccaggtcttgatccagtgtgccgggtctgaagaaaaaaacgaaaggtatctgcttctcttcccaaacgtgctactcatgctcagtgccagtccacgaatgagcggctttatctatcagggcaagctgcccactacgggcatgacaataaccaaactagaggactcagagaaccacagaaatgcctttgagattagtggctctatgattgagcgcattttggtcagctgcaacaaccagcaagatctgcaagaatgggtggaacacctgcagaagcagacaaaggtgactagcgtgggaaatcctaccataaaacctcactctgttcctagtcacaccctgccctcacaccccgtgactcccagctccaagcacgcagactctaagcctgctcctcttacacccgcctaccatacgctgcctcatccttcccaccatggtacaccccatacgacgattaattggggtccactggagccaccgaagactcccaagccttggagcctcagttgtctaaggcctgccccccccctcagacctagcgctgcattatgctacaaggaagatctttccaaaagtccaaagactatgaagaaattgttgccaaagcgcaagcctgaacgcaaacccagcgatgaagagttcgctagccggaagagcacagcagctcttgaggaagacgctcagatcctgaaggtgatagaggcctattgcacatcagctaaaactcggcagaccctaaacagtacttggcaggggacagacttgatgcataaccacgtgctggcagatgacgaccagcctagtctggacagtctaggacgtcgcagttcgctttccagactcgagccttcagaccttagcgaggattcagattatgactccatttggacggcacactcttacaggatggggagcacatccagaaagagctgttgttcctatataagtcatcagaactag

SEQ ID NO: 241627 - DNA, 1878 bp, Artificial Sequence
  derived and/or modified sequence
atgaccgacaacagcaacaaccagctggtggtgcgggccaagttcaacttccagcaaaccaacgaagatgaactgtccttctctaagggcgatgtgatccacgttacgcgggtggaggaaggtggctggtgggagggaacactgaacggcaggacaggatggttcccttctaattatgttagagaggtgaaagcaagcgaaaagccagtaagtcccaaatccgggactttaaagagtccacctaaggggtttgacacaaccgcaatcaataaatcgtactataacgtggtattacagaatattctggaaacagaaaatgaatacagtaaagagctgcaaaccgtcctgtctacatacctcagacctcttcaaacatccgagaaactgagctcggcaaacatcagctacttgatggggaatctggaagagatttgtagtttccaacagatgttggtacaaagcctggaggagtgtacaaagctgcccgaggcacagcagagagttggcggatgcttcctgaacctcatgcctcagatgaaaaccttgtaccttacgtattgtgctaaccacccatcagccgtcaacgtgcttacggaacatagcgaggagctgggggaattcatggagactaaaggcgcatcctccccgggaattctggtgctgacgacaggcttgagcaagcctttcatgcgcctagataagtaccccaccctactcaaggagctggagcgccacatggaagactaccacacagatcgccaggacattcaaaagagcatggcagccttcaagaatcttagcgcgcagtgtcaggaagtcaggaaacgcaaggagcttgaactgcagattcttaccgaggccatccgtaactgggaaggggacgacatcaagactcttgggaacgtcacttacatgtcccaggtcctcattcagtgcgccggaagtgaagaaaagaacgagcgttatcttctgctgttccccaacgtacttttgatgctgagtgcctctccccgcatgagcggttttatttaccaaggcaagctcccaacaacgggcatgaccataacaaaactcgaggattccgaaaatcatcggaatgccttcgagatctcaggctcgatgatcgagcgcattcttgtgtcttgcaacaatcaacaggacctgcaggaatgggtggagcatttgcaaaagcagacaaaagtgacatctgtggggaacccgactatcaagcctcattctgttccatcacatactctgcccagtcaccctgttacccccagttctaaacatgcagattctaagcctgctcccttaacaccagcctaccacactcttccccacccttcccaccacggcacgccgcataccacgatcaactggggacctctggagccgcctaaaactcctaagccttggagtctgagctgtttgaggccagcgcctcccctacgacctagcgcggcactttgctacaaggaagacttgtctaagtctcctaaaactatgaagaaactgctgcctaaaaggaaaccggagcggaaaccaagtgatgaggagttcgccagtagaaagtccactgccgctttagaggaggacgcgcagatccttaaagtgattgaggcctactgtaccagcgcaaagacaagacagaccttgaattccacttggcaaggtaccgacctcatgcacaatcacgttctggctgacgatgatcagccaagcctagattcattaggacgcagaagctcgctgtcccgcctggagccatccgatctgagcgaggattcagattacgattccatctggactgctcattcatacagaatgggctcgacttctagaaagagttgctgctcttacatatcccaccagaactag

SEQ ID NO: 241628 - DNA, 1344 bp, Artificial Sequence
  derived and/or modified sequence
atgaccgacaacagcaacaaccagctggtggtgcgggccaagttcaattttcagcagaccaatgaggacgaactgtctttcagtaaaggtgatgttattcacgtgacgagggtcgaggagggaggctggtgggaagggacactgaatggacgcaccggttggtttccctctaattacgtaagggaagtcaaagcatccgagaaaccagtcagtcctaagagcggtacactgaaatcacctccaaaaggattcgataccaccgccattaataagtcttactataatgtcgtcctccagaatatcctggagacggagaatgagtattcaaaagaactccaaacagtgttgtcaacctaccttagacctctccagacctcagaaaagctgagctcagccaacattagctatctgatgggcaacctggaggagatctgcagcttccagcagatgctagtgcaaagcctggaggagtgtacaaaattgcccgaagctcagcaacgcgttggcggctgctttctaaatcttatgccccaaatgaaaaccttatatcttacgtactgcgccaatcacccctcagccgttaacgttctgaccgagcatagcgaggaattgggggagtttatggagactaagggcgcctctagtccaggaatcctggtgctaaccacaggtctgagtaagccctttatgcgcctggataagtatccgactttgctgaaagagctggagcggcacatggaggactaccacaccgacagacaggacatccagaagtcaatggccgcttttaaaaatttaagcgcccagtgtcaggaagtgaggaaacgcaaggagcttgagctgcagatcttgactgaggcaattcgtaactgggaaggcgatgatattaagaccttaggaaacgtcacttacatgagtcaagtccttatccagtgtgcaggaagcgaggaaaaaaatgagaggtacctgctgctgtttccgaacgtattgctaatgctgagtgcctcacctcgtatgtctggttttatttaccagggaaagctgcccacaactggaatgacaatcacgaagctggaggatagcgagaatcacagaaatgcctttgagatcagcgggtcaatgattgagcgtatcttagtgtcatgtaacaaccagcaggatctgcaagagtgggtggagcacctgcagaaacagaccaaagtgactagcgtggggaatccaacaatcaagcctcacagcgtcccttctcacacgcttcctagccaccctgtgacacccagctctaaacacgccgatagtaagcccgccccactgaccccggcttaccacactctccctcattag

SEQ ID NO: 241629 - DNA, 2070 bp, Artificial Sequence
  derived and/or modified sequence
atcccccccagcaagcccctgcggggcagcagcctgtggggctgctggtcaaggcctaagactatctccgatcccgaaggatttttgcaggcttctttgaaggacggagttgtactgtgtcgcctgcttgagagattgctgcctggcacaatcgagaaagtctatccggaacctagatccgagagcgaatgtttgtcaaatattagagaatttcttagaggatgcggtgctagtctgcgcctagaaacattcgacgctaacgacttatatcagggccagaatttcaataaagtgttgtcgagtttggtgactctcaacaaggtcaccgcggatatcgggctgggaagtgactccgtatgcgcacggccctcgagccaccgaatcaaatctttcgactctctggggagccaaagcctgcatactaggacatcgaaattgttccagggacagtacaggtcattggacatgactgacaacagcaacaaccaactggtagttcgggcaaagtttaactttcagcagaccaatgaagacgaactttccttttctaagggtgatgttattcatgtaacaagggtggaggaaggaggctggtgggaaggcaccctaaatggtcgaacaggttggttcccctctaattacgtcagggaggtgaaggcatcggagaagccagtgagtcccaagtctggcacgctgaaatccccacctaaaggcttcgacacaaccgccatcaacaaatcttattataacgtcgttctgcaaaatattctagaaaccgagaacgagtactccaaggagcttcagaccgtgctgagcacctatcttcgtcctctgcagaccagcgaaaaactctcatccgcaaacatcagttacttaatgggtaacctggaagagatctgtagctttcagcaaatgctcgtgcagtcactggaggagtgtaccaaactacccgaggcccagcagcgggtaggcgggtgtttcctcaacctgatgccacaaatgaagacactctatctgacatactgtgcgaaccacccttctgccgtgaatgtactcacagagcatagtgaggagctgggcgaattcatggaaactaagggcgcaagttctcctggaatcctggtactaacaactggcttaagcaagccgtttatgcgtctcgacaagtacccaaccctgctcaaggagctggagaggcatatggaagattatcatacagatcgccaggatatacagaagtccatggcggccttcaaaaacctcagcgcgcagtgtcaagaggttcggaagcggaaagagttagagctgcagatccttactgaggctattcgaaactgggagggtgatgacataaaaaccctcggtaatgtaacttacatgtcccaggtcttgatccagtgcgctggctccgaggaaaagaacgaacgctatctgctgctctttcctaacgttctgctcatgttgtctgcgtcacccaggatgtccggtttcatttaccaagggaagttgcctaccaccggaatgacaattacgaaactcgaagattctgaaaatcatcgaaacgcctttgaaatctcaggatctatgatagagcgcatcctggtgagctgtaacaaccagcaggacctgcaggagtgggtggaacatctgcagaaacagaccaaagtgacatcagtgggcaaccctactatcaagccccattctgtaccttcacacaccctgccgtctcaccccgtaacaccctcttcaaaacacgccgactcaaaacccgccccgctgactcccgcctaccacacactcccccatccatctcaccacggaacaccccacacaactatcaattggggccctctagaaccccccaagacccccaaaccttggagtctgtcttgccttagaccggccccacccctgcggccatcggcggccctttgttataaagaggacttgagtaaatcaccaaaaaccatgaaaaagctgctgccaaagagaaagccggagcggaaacccatgagatcttctaggccaggcaaggcccagctgctttggaagaagatgttgaggttttag

SEQ ID NO: 241630 - DNA, 2349 bp, Artificial Sequence
  derived and/or modified sequence
atgaactcagccgagcaaaccgtcacttggttgatcacgttgggagttttagagagccccaaaaaaaccatcagcgaccctgaaggttttctgcaggctagtctgaaagatggagtggtgctctgtcggcttctcgagagactcttaccaggcacaatagagaaggtctatccagaaccaagaagcgaatcggagtgcctgagcaacataagggaatttctgcggggatgtggcgcaagcctgcggctcgaaacatttgacgctaacgacctctaccagggacagaacttcaacaaggtgctgtcttccctcgtgactctgaacaaagtgaccgcggatattggcctaggatctgactcagtctgcgcacgcccttcatctcaccgcatcaaatcatttgatagcctgggatcgcagagtctgcacactaggacatccaagctgtttcaaggacagtacagatctcttgatatgaccgataattctaacaaccagttggtggtgcgcgctaagttcaattttcagcagaccaacgaagacgagctctccttctctaagggggacgtgatacatgttacgcgagtggaggaaggcggatggtgggagggcaccttgaacggcagaactggctggttcccaagtaattatgtgcgagaggtcaaagcatcagagaagcctgtctcgccaaaatccggcactttgaagtcaccacctaaggggttcgacactacagcgatcaataagagttactacaacgtcgtgctccaaaatattctggagacagaaaacgaatactctaaggaactgcagacagtgctttccacctatcttcgcccattgcaaactagcgaaaagctaagcagcgctaatatctcatatcttatggggaatcttgaggaaatatgctcctttcagcaaatgcttgtgcagagcctggaggaatgtacaaaacttccggaggcacagcagcgcgtgggcggatgctttctcaaccttatgccccagatgaagaccctgtatctcacatattgcgctaatcacccttcagccgtaaacgtgctgaccgaacattctgaggagctcggagagtttatggaaactaagggagcctcctccccaggcattttagtgttaactacgggtctgtccaaaccctttatgcgcctggacaagtaccctacgctgctaaaggagcttgagcgacatatggaagattaccacaccgacagacaagacattcagaagtcgatggcagccttcaaaaacttatccgctcagtgccaggaggtgcgcaaacgaaaggagctggagctgcaaatccttactgaggccatcaggaattgggagggcgatgacatcaaaactctgggaaacgtaacctatatgtcacaagttctaatacaatgcgccggaagcgaagaaaagaacgaaagatacctgcttttgttcccaaatgtcctgctcatgctgtcagcctctccacgaatgagtggcttcatttatcagggtaaactgccaaccacagggatgacaattacaaagctggaagattccgagaatcaccgaaatgcctttgagatctcaggaagtatgattgagcgaattctggttagctgcaataaccaacaggacctgcaggaatgggtggagcacctgcaaaagcagactaaagtaacttcggtggggaaccctactattaaaccccattcagttcctagtcatacccttccttcacacccagttactccgagtagtaagcacgccgattctaaaccagccccactgacacccgcataccatacactgccccaccccagccaccacggaaccccccatacgacaattaattgggggccactggagccgccaaaaactcctaagccgtggtctctcagttgtctgagaccggcaccccctctgaggccctccgctgctctctgttacaaggaagacctgtcaaaaagcccaaaaaccatgaaaaagctgttgcctaagcggaagcccgaacggaagcccagcgacgaagaatttgcaagccggaagtccacagctgcactggaggaagatgctcaaattctgaaagtgattgaagcctactgcacgtctgcgaagactcggcagactctcaattccacatggcagggtaccgatctcatgcacaaccacgtgctcgcagatgacgaccaaccatctctggactctctgggcaggaggagctccttgagcaggctcgaaccaagcgatctaagcgaggattctgactatgactcaatatggaccgctcactcatatcggatgggtagtacatcccggaagtcgtgttgttcatacataagccatcagaattag

SEQ ID NO: 241631 - DNA, 1878 bp, Artificial Sequence
  derived and/or modified sequence
atgactgacaatagcaataatcaattggttgttcgcgcaaaattcaatttccagcagaccaacgaggacgagctttctttctcaaaaggagacgtaatacacgtcacacgtgtggaggaaggaggatggtgggaaggcacattaaatggtcgcaccggatggttccccagtaactacgtccgagaagtgaaagcctcagagaaacccgttagccccaagagcgggaccctgaagagcccgccaaagggattcgacaccaccgccattaataagagttactataatgtggtgctgcagaatatactggagaccgagaacgaatactccaaagagttacagactgtgctgtccacatacctgcggccacttcagacaagtgagaaactcagctctgccaacatctcttacttgatggggaacctcgaagagatttgttccttccaacagatgctagtgcagtctctggaagaatgtaccaagttgcccgaggcgcaacagcgcgtcggcggttgttttctgaacctgatgcctcaaatgaagaccctgtacctcacctactgcgcgaaccacccctccgccgtaaatgtgctcacagaacactcggaagaacttggcgagttcatggaaacaaagggcgcttcaagtcccggtatcctggtactgactacgggactctccaagccatttatgagactcgataaataccctaccctcctcaaggagctggagcggcacatggaagactaccacaccgaccggcaggacatccagaagtcaatggccgcttttaaaaacctatctgctcagtgtcaggaagtgaggaaaagaaaagagctggaactgcagatattaaccgaggccattagaaattgggagggcgatgatatcaaaactttggggaacgttacctacatgagccaggtgctgatccagtgtgccggaagtgaagagaaaaacgagcggtacctgctattgttccccaatgtgctcctcatgctttcagcttcccctcgcatgagcggcttcatctaccaagggaaactgccaactactggtatgacaatcactaagttagaggatagtgaaaatcaccgaaacgcctttgagatcagcggttcgatgattgaaaggatcctggtttcttgtaataaccagcaagacctccaggagtgggtagagcacctacaaaagcagaccaaggtcaccagcgttgggaatccaaccataaagccccattcggtcccgagtcatacgctcccatcccatccagtgactccctcttctaagcacgccgatagcaagcccgcacccctgacgccagcctatcacactctgccccatccctcgcatcacggcacacctcacactactatcaactggggacccctcgaaccaccaaagacccccaaaccctggtccctgtcatgtctacgtccggcaccacctttgcggcctagtgctgccctgtgttacaaagaagatcttagcaagtcaccaaagaccatgaagaagctgttacctaagcgaaaacctgagcgcaagcctagcgatgaggagtttgctagtagaaagtccacagccgcactggaggaggacgcacagattcttaaggtgatagaggcctattgcacttcggctaagacccgacaaactctcaattctacttggcaggggacggatctgatgcacaatcacgttctggctgatgatgatcaacctagcctagatagcctcggaagacgaagtagcctgtcgcggctcgaacccagcgatctctccgaggacagcgactatgactctatctggactgctcactcatatcggatgggtagtacatcaagaaaaagctgttgttcttatatttctcaccagaattag

SEQ ID NO: 241632 - DNA, 1344 bp, Artificial Sequence
  derived and/or modified sequence
atgacagataacagcaacaaccagctggtcgtgcgcgcaaaattcaattttcaacaaactaacgaggatgagctgagcttcagcaaaggggacgttattcatgtcaccagagtcgaagaaggaggctggtgggaaggaaccctgaatggccgaaccggctggttcccaagcaactatgtgagagaggttaaagccagcgagaagcccgtgtcacccaaaagcggtacccttaagtccccgcctaaagggtttgacacgaccgccattaacaagtcatactacaacgtggtgctgcagaacattctggagactgagaatgagtactcaaaggagctgcagacagtactaagcacatacttaagaccgctccagacgagcgagaagcttagtagcgccaacatttcttacctgatggggaacctcgaggagatttgcagcttccagcagatgctggtgcagtccttagaggaatgtaccaagctgccagaggcccagcaaagggtgggaggatgctttctgaatctcatgccacagatgaaaactctctatctgacatactgcgccaatcatccgtcagccgtgaatgtgctcaccgaacatagtgaggagctgggcgaattcatggagactaaaggcgcatccagcccaggcattctggtcctcacaacaggtttgagcaagccatttatgaggcttgacaagtatccgactttgctcaaggaactggaacgccacatggaggattatcataccgataggcaagatatccagaaatcaatggccgctttcaagaaccttagcgcacagtgccaggaagtccgcaagaggaaagagttagaactccagattctgaccgaggcaattcggaattgggaaggcgatgacataaaaaccctcggcaatgtaacttacatgagccaagtgcttattcagtgcgccggtagtgaggagaaaaatgagcggtacctcctactatttcctaatgtcttgttaatgctgtccgcttctcccaggatgagtggctttatctaccagggtaagttgccaaccaccggaatgactattacgaagctggaagatagcgaaaaccatcgcaatgcatttgagataagcgggtctatgatagagaggattctagtctcatgcaataatcaacaagatctgcaagagtgggtggagcaccttcagaaacaaacaaaggtgacctcagtcggcaaccctacgattaaaccacactcagttccttcacacactctgcccagccatcctgtgaccccctcatcaaaacatgccgacagtaaacctgcaccattgactcctgcgtaccatacgctgccccactag

SEQ ID NO: 241633 - DNA, 2070 bp, Artificial Sequence
  derived and/or modified sequence
atacccccatcaaaaccactcaggggatcctcgctgtggggttgctggagcagaccaaaaacaatatcagatcccgaaggcttcttgcaggccagtctgaaagatggtgtcgtcctttgtagattgctggaaaggctcctgcccggaaccatcgagaaggtctaccctgagcctcggtcggagagcgaatgcctcagtaacatacgcgagtttctccggggatgcggtgcctccctgaggttggagaccttcgacgctaacgacctgtaccaaggccaaaattttaataaagtgctctctagcttggttaccctcaacaaggttactgccgatattggtttggggagtgattccgtgtgcgcacgcccttcttcacacaggatcaaaagcttcgattctctaggatcccaatccttgcacacccggacatcaaagttgttccaggggcagtataggtcacttgatatgacggacaatagcaataaccagctcgtcgtgcgggcaaaatttaactttcagcagacgaacgaagatgagctgtccttcagtaaaggagatgtgatccacgtaactcgcgtcgaggagggcggatggtgggagggaaccctgaatggaaggacaggctggttcccatctaattatgtgcgggaagtaaaggcttcagagaagccagtctctccaaagtcgggaaccttgaagagccctcctaaaggttttgacaccactgcgattaataaatcatactataacgtggtgctgcagaacattttggagaccgagaatgagtatagcaaggagctccagactgtcctctcaacttacttgaggccattacagacaagcgagaagctcagtagcgcaaacattagctatcttatggggaatctcgaggaaatttgctcctttcaacagatgcttgtccagagcctggaggagtgtaccaagctgccagaggcacagcagcgcgtcggaggttgcttcctcaatctgatgccccagatgaagactctataccttacatattgcgcgaatcatccttctgccgtaaatgtactgacagagcactccgaggaattaggcgaatttatggagaccaaaggggctagctcccccggtatcctggtactgaccactggcctctctaagccctttatgagactagataagtaccccactctgctcaaagagctggaacgacatatggaggattaccataccgaccgacaggatatccagaaatcaatggccgcattcaaaaacctatctgcccagtgtcaggaggtacgcaagcgaaaagaactcgaactgcagatcttgaccgaggccattcgaaattgggaaggtgatgacataaaaactctgggtaacgtcacatatatgtcgcaggtcttgatccagtgtgccggaagtgaggaaaagaacgagcggtatctactgctgtttcccaacgtcttactcatgcttagcgccagccctcgcatgtctgggtttatctatcagggaaaattgcctaccacagggatgaccatcacaaagcttgaagactccgagaatcacagaaatgcctttgagatatctggatctatgatcgagcgcatattggttagctgcaataaccagcaagatctgcaggagtgggtggagcacttgcaaaaacagaccaaggtgacgtctgtcggcaatcctaccatcaagccacactctgttcccagccacaccctgcccagccaccccgtgacaccgtcttctaagcatgctgactccaagcctgcacccctcacccccgcataccacactttgccacacccatcccaccacggaactccccacacaaccatcaattggggcccattggaaccccctaagactcccaagccctggagtctgagctgccttcgtccagcccctcctctgcggcctagtgccgcattgtgttataaggaggatttatccaaaagccccaagacaatgaagaaactcctgcccaaaaggaaacccgagcgcaagcccatgaggtcttcccggcctgggaaagcccaattgctgtggaaaaaaatgcttagattctag

SEQ ID NO: 241634 - DNA, 4361 bp, Artificial Sequence
  derived and/or modified sequence
ccccgagacgcagccaggcgcccggcccggcccggcccggccctctgcacagccccacttcaggccacgccgtttccttgaccttcccccggcagggtctgaagcgtcaccgtccgtctagagcagagtcgcgcaggcccctgccctgccggtgaggtcggcgccgcgctccggagagtcggttcctcccgattcagacccatatggcttcagatggaaccatcatttctgttccgtcatgaccggcttgcaaggtagcaaagcgaaacaaacgtctcgttttcagcctgtccccgccaccttgaaataaaaccggcaaaaataaaaagagcattctgggaagtacttcatcatttcaacgctcacgaattcaaaacataaacaaaggcttccgagtgccccggccaggggcgcggggcgcacggcgggcccggggcaggtaagcgcaggtgcgcgcccgcccccacccccggctccctccccatccgctccccgctccccttcccctttcccttccccgcccgctcccagccgccgccgccgccccgcgcacggcctggagcggaggctgcgcagggcgcggggcggcgcgggccgggcgcgggccgggcggacggccgcgtctttcttctcctggcggtgatgtcattgggcgacggcggccgaggccggggggcggcggcgggcgcccgcaggttcccgagccgctcctgagaaggcgcctgacagcgggccggggcgcacggagaagcgggccgggccggacctgctgggccgcgccgagccaatcgccggcgccggccgctcgatgggcgaggcggcggcggcggcggcgggggccgcgggccgggccgccgctccgaggtgaaggcgcgcgcccctccccgcctgcctcccgggccgcagcgatgaattccgccgagcaaaccgttacgtggctcatcactctgggggtgctggagtcgcccaaaaaaaccatctcggacccggagggctttctgcaggcgtcgctgaaggatggggtggtcctctgcaggctgctggagcgcctgctccccgggaccatcgagaaagtctaccccgagccccggagcgagagcgagtgcctgagcaacatccgcgagttcctgcgcggctgcggggcttccctgcggctggagacgtttgatgcaaatgatttgtatcaggggcagaattttaacaaggtcctcagttccttagtgactctaaataaagtaacagcagacatcgggctggggagtgactccgtgtgtgcccggccctcgtctcaccgcataaagtcttttgactcccttggatcacagtctttgcacactcggacttcaaaactgttccagggccagtatcggagtttggacatgaccgataatagcaacaatcaactggtagtaagagcaaagtttaacttccagcagaccaatgaggacgagctttccttctcaaaaggagacgtcatccatgtcacccgtgtggaagagggaggctggtgggagggcacactcaacggccggaccggctggttccccagcaactacgtgcgcgaggtcaaggccagcgagaagcctgtgtctcccaaatcaggaacactgaagagccctcccaaaggatttgatacgactgccataaacaaaagctattacaatgtggtgctacagaatattttagaaacagaaaatgaatattctaaagaacttcagactgtgctttcaacgtacctacggccattgcagaccagtgagaagttaagttcagcaaacatttcatatttaatgggaaatctagaagaaatatgttctttccagcaaatgctcgtacagtctttagaagaatgcaccaagttgcccgaagctcagcagagagtcggaggctgctttttaaacctgatgccacagatgaaaaccctgtacctcacgtattgtgccaatcacccttctgcagtgaatgtcctcacggaacacagtgaggagttgggggagttcatggagaccaaaggtgccagcagccctgggattctcgtgctgaccacgggcctgagcaaacccttcatgcgcctggataaataccctacgctgctcaaagagctcgagagacacatggaggattatcatacagatagacaagatattcaaaaatccatggctgccttcaaaaacctttcagcccaatgtcaagaagtccggaagaggaaagagcttgagctgcagatcctgacggaagccatccggaactgggagggcgatgacattaaaactctgggcaacgtcacttacatgtcccaggtcctgattcagtgtgccggaagtgaggaaaagaatgaaagatatcttctactcttcccaaatgttttgctaatgttgtctgccagtcctaggatgagtggctttatctatcagggaaagcttccaacgacaggaatgacaatcacaaagcttgaggacagtgaaaatcatagaaatgcatttgaaatatcagggagcatgattgagcggatattagtgtcgtgcaacaaccagcaggatctgcaggaatgggtggagcacctacagaagcaaacgaaggtcacgtctgtgggaaaccccaccataaagcctcattcagtgccatctcataccctcccctcccacccggtcactccgtccagcaagcacgcagacagcaagcccgcgccgctgacgcccgcctaccacacgctgccccacccctcccaccacggcaccccgcacaccaccatcaactggggacccctggagcctccgaaaacacccaagccctggagcctgagctgcctgcggcccgcgcctcccctccggccctcagctgctctctgctacaaggaggatcttagtaagagccctaagaccatgaaaaagctgctgcccaagcgcaaacctgaacggaagccttcagatgaggagttcgcgtcccggaaaagcacagctgctttggaagaagatgctcagattctgaaagtcattgaagcttactgcaccagcgccaaaacaaggcaaacactcaattcaacatggcaaggcactgacctgatgcataatcacgtcttggctgatgatgaccaaccaagcctagactccctggggcgtcgcagtagcctttctcgtttggagccttcagacctctcggaagactctgactatgacagtatatggacagcccatagttacagaatgggttctacatctcgtaagagctgttgctcatatatctctcaccagaactaatgcacttctgagcttttcttaacaaatgcttgttgtatcgcagcctgcttttcttagatgttttcttgctgttccttgtctcttttatgtgatattttaacaacttttgagagtgttcctgatatttcccattgtactttgtggaggcttaactgccgatgcgagtatacattcgaatgactgactattggagggaggtggtgtgttcacgtgagcctacatccgagggtgctcttcgtaaggggtagttgttgttttatagctccaaatggtttttttattctcagtgtagcaactgtttgatttctttctggatacagctgtatgaacacttttctattttatactgaaatcacacaggtttgtgatctaagtgccagaaccatggaggagactctggccttatctgtagggacctaaattttttaagtgctatgaacactgatcaagtagttgtggagagatgagaagaatatatgcagcaaaggtgctgtgagcccagttccaacggctgtgttctggtaatcgtgcagaacagcatgtgggctctgggccttggcaggtgcacagacgggcgggcgtcacgtgtgttcagagcttgtctccacctcacggctctgtgctcttctgtgtgctgcgttgtggccgtgaagtgggagctctcctttccaaaggcagagcttactgtcatggctcagatgttcactcgcatcttcaccccaaacttccctgaattgcagtgatttctgttataaggcacatagcaagcctgtaccactctacagtaaaatctctacactaacagtttaaagcccgaaagctgaagcattcagcctctgcaagtgtagactactggactgtagtagaggcatttggaatacttacaaagtcaagtgctgtggcttcagttcccccggctccccacccctgacatccatacttatgttgtctggaagagccatggacacatcattattttcagcaaccagctgcagtgaaactccatttacagcaaccccatagtataaaaccacaatgcctcattgtaatgggatattgaagttcattgaagaattactaggttgccatgtggctcacttattt

SEQ ID NO: 241635 - DNA, 4957 bp, Artificial Sequence
  derived and/or modified sequence
acgtttgatgcaaatgatttgtatcaggggcagaattttaacaaggtcctcagttccttagtgactctaaataaagtaacagcagacatcgggctggggagtgactccgtgtgtgcccggccctcgtctcaccgcataaagtcttttgactcccttggatcacagtctttgcacactcggacttcaaaactgttccagggccagtatcggagtttggacatgaccgataatagcaacaatcaactggtagtaagagcaaagtttaacttccagcagaccaatgaggacgagctttccttctcaaaaggagacgtcatccatgtcacccgtgtggaagagggaggctggtgggagggcacactcaacggccggaccggctggttccccagcaactacgtgcgcgaggtcaaggccagcgagaagcctgtgtctcccaaatcaggaacactgaagagccctcccaaaggatttgatacgactgccataaacaaaagctattacaatgtggtgctacagaatattttagaaacagaaaatgaatattctaaagaacttcagactgtgctttcaacgtacctacggccattgcagaccagtgagaagttaagttcagcaaacatttcatatttaatgggaaatctagaagaaatatgttctttccagcaaatgctcgtacagtctttagaagaatgcaccaagttgcccgaagctcagcagagagtcggaggctgctttttaaacctgatgccacagatgaaaaccctgtacctcacgtattgtgccaatcacccttctgcagtgaatgtcctcacggaacacagtgaggagttgggggagttcatggagaccaaaggtgccagcagccctgggattctcgtgctgaccacgggcctgagcaaacccttcatgcgcctggataaataccctacgctgctcaaagagctcgagagacacatggaggattatcatacagatagacaagatattcaaaaatccatggctgccttcaaaaacctttcagcccaatgtcaagaagtccggaagaggaaagagcttgagctgcagatcctgacggaagccatccggaactgggagggcgatgacattaaaactctgggcaacgtcacttacatgtcccaggtcctgattcagtgtgccggaagtgaggaaaagaatgaaagatatcttctactcttcccaaatgttttgctaatgttgtctgccagtcctaggatgagtggctttatctatcagggaaagcttccaacgacaggaatgacaatcacaaagcttgaggacagtgaaaatcatagaaatgcatttgaaatatcagggagcatgattgagcggatattagtgtcgtgcaacaaccagcaggatctgcaggaatgggtggagcacctacagaagcaaacgaaggtcacgtctgtgggaaaccccaccataaagcctcattcagtgccatctcataccctcccctcccacccggtcactccgtccagcaagcacgcagacagcaagcccgcgccgctgacgcccgcctaccacacgctgccccacccctcccaccacggcaccccgcacaccaccatcaactggggacccctggagcctccgaaaacacccaagccctggagcctgagctgcctgcggcccgcgcctcccctccggccctcagctgctctctgctacaaggaggatcttagtaagagccctaagaccatgaaaaagctgctgcccaagcgcaaacctgaacggaagccttcagatgaggagttcgcgtcccggaaaagcacagctgctttggaagaagatgctcagattctgaaagtcattgaagcttactgcaccagcgccaaaacaaggcaaacactcaattcaacatggcaaggcactgacctgatgcataatcacgtcttggctgatgatgaccaaccaagcctagactccctggggcgtcgcagtagcctttctcgtttggagccttcagacctctcggaagactctgactatgacagtatatggacagcccatagttacagaatgggttctacatctcgtaagagctgttgctcatatatctctcaccagaactaatgcacttctgagcttttcttaacaaatgcttgttgtatcgcagcctgcttttcttagatgttttcttgctgttccttgtctcttttatgtgatattttaacaacttttgagagtgttcctgatatttcccattgtactttgtggaggcttaactgccgatgcgagtatacattcgaatgactgactattggagggaggtggtgtgttcacgtgagcctacatccgagggtgctcttcgtaaggggtagttgttgttttatagctccaaatggtttttttattctcagtgtagcaactgtttgatttctttctggatacagctgtatgaacacttttctattttatactgaaatcacacaggtttgtgatctaagtgccagaaccatggaggagactctggccttatctgtagggacctaaattttttaagtgctatgaacactgatcaagtagttgtggagagatgagaagaatatatgcagcaaaggtgctgtgagcccagttccaacggctgtgttctggtaatcgtgcagaacagcatgtgggctctgggccttggcaggtgcacagacgggcgggcgtcacgtgtgttcagagcttgtctccacctcacggctctgtgctcttctgtgtgctgcgttgtggccgtgaagtgggagctctcctttccaaaggcagagcttactgtcatggctcagatgttcactcgcatcttcaccccaaacttccctgaattgcagtgatttctgttataaggcacatagcaagcctgtaccactctacagtaaaatctctacactaacagtttaaagcccgaaagctgaagcattcagcctctgcaagtgtagactactggactgtagtagaggcatttggaatacttacaaagtcaagtgctgtggcttcagttcccccggctccccacccctgacatccatacttatgttgtctggaagagccatggacacatcattattttcagcaaccagctgcagtgaaactccatttacagcaaccccatagtataaaaccacaatgcctcattgtaatgggatattgaagttcattgaagaattactaggttgccatgtggctcacttatttaaaaaaaaaaaaaaaaaactcacccgttttcctgggatttgttgtaaggagttttcactggcctcactcagaccaatttctgcttcaaaaagcactgaatgtgacctgttgcattcagttgtagcatcaaatccacacctagtcattgcttgaggggccaaattgtgttctgtcccatgcacgctctatttggtgttaaaatggaaccttacggttgtgttttaagtattcattgaaaccagcttcagaaaacaagatgccatagtaaattgagaataacattttttccttcttcagggtggctgtaattccaggtggccgtgatttctttcttccccactgcccactccttcgccaaacccacgtattcagtgttctgatcttgtttgtgcagagtgaactctgatgcagtatcagtcttgtcctgggagccgggtcctgctgctcacaagcccagagctgccagggagctcctggcagtagcacgttgtttagaaagttgggtggcttcattcagcatggaacaagctaatggcacaggagacatcagggcagctgttaattccaaatatttgttcccaagtagctactgaactgctcacaccattggaagattttgtattttcataccaattagtaaaaataagaacattgaggagcagtcagagcccagtgttaatctccggcagagatggggtttatgtatgttcagccagatagtaaatgggatttttggagaaataagataactacaaagtttctatacttactataagtggatttagaagcgattttggttttgtattacatacggtagtcctctgcgtcagggagcacttttttgtttgcctcgagactactcattagcgcactggctaagctgcctttgccttctcgtaggcgtgggttgcctgtgtcatgggctgtgtagaccacaacactcaaacacagttgctgcacttggattttcctttaataccaagtatcatttggttatcttactgggacattttcattgatattctatacaccaaagttttgacggtttaccatcattccattttgtaccagttaaaggcattttgatgatgctttttcttgatgctaagatcactgcagaagaataacctgaccttttctttgcatttgttttgaatgtctaacaccattagcttttgtgatctggttaagaagtattagtgccacaagcctgaaaagacagttctcctgtggcagtggcgatgtggcatccagagggccattgtttctacttttgtgggacttcagtcatgctgataatagaatcttctgttcatacaattctgtaatatttatttgtacagttagtattctaatgaaaggatgaagagtctgaactagaaggtaggtttaagccatcaccaggcctttgcaaatggcctaaatggtgttccctttgaaataacgcttgccacaagtatataataagctatattaattgtgttttgcataaaattgccaaaacacagtaatgtgtatatagtggtataagatcttgaaaaaaatctctataattgtgctctttatctgtgaatgggaaaagccatttttagtaggtgactaccatttgaaaaactcaattggatgtatatctgaatgttgcattgtattgtacagtatgcatattattgtttgtggttgcatatggcaatgaagtgtttgttttatattaaaaaaaacctgttatgtacagttgaaataaattttgcatttgcta

SEQ ID NO: 241636 - DNA, 1681 bp, Artificial Sequence
  derived and/or modified sequence
gagattggtgcagccccggaggaagaaaaaagggtctaccccgagccccggagcgagagcgagtgcctgagcaacatccgcgagttcctgcgcggctgcggggcttccctgcggctggagacgtttgatgcaaatgatttgtatcaggggcagaattttaacaaggtcctcagttccttagtgactctaaataaagtaacagcagacatcgggctggggagtgactccgtgtgtgcccggccctcgtctcaccgcataaagtcttttgactcccttggatcacagtctttgcacactcggacttcaaaactgttccagggccagtatcggagtttggacatgaccgataatagcaacaatcaactggtagtaagagcaaagtttaacttccagcagaccaatgaggacgagctttccttctcaaaaggagacgtcatccatgtcacccgtgtggaagagggaggctggtgggagggcacactcaacggccggaccggctggttccccagcaactacgtgcgcgaggtcaaggccagcgagaagcctgtgtctcccaaatcaggaacactgaagagccctcccaaaggatttgatacgactgccataaacaaaagctattacaatgtggtgctacagaatattttagaaacagaaaatgaatattctaaagaacttcagactgtgctttcaacgtacctacggccattgcagaccagtgagaagttaagttcagcaaacatttcatatttaatgggaaatctagaagaaatatgttctttccagcaaatgctcgtacagtctttagaagaatgcaccaagttgcccgaagctcagcagagagtcggaggctgctttttaaacctgatgccacagatgaaaaccctgtacctcacgtattgtgccaatcacccttctgcagtgaatgtcctcacggaacacagtgaggagttgggggagttcatggagaccaaaggtgccagcagccctgggattctcgtgctgaccacgggcctgagcaaacccttcatgcgcctggataaataccctacgctgctcaaagagctcgagagacacatggaggattatcatacagatagacaagatattcaaaaatccatggctgccttcaaaaacctttcagcccaatgtcaagaagtccggaagaggaaagagcttgagctgcagatcctgacggaagccatccggaactgggagggcgatgacattaaaactctgggcaacgtcacttacatgtcccaggtcctgattcagtgtgccggaagtgaggaaaagaatgaaagatatcttctactcttcccaaatgttttgctaatgttgtctgccagtcctaggatgagtggctttatctatcagggaaagcttccaacgacaggaatgacaatcacaaagcttgaggacagtgaaaatcatagaaatgcatttgaaatatcagggagcatgattgagcggatattagtgtcgtgcaacaaccagcaggatctgcaggaatgggtggagcacctacagaagcaaacgaaggtcacgtctgtgggaaaccccaccataaagcctcattcagtgccatctcataccctcccctcccacccggtcactccgtccagcaagcacgcagacagcaagcccgcgccgctgacgcccgcctaccacacgctgccccacc

SEQ ID NO: 241637 - DNA, 5020 bp, Artificial Sequence
  derived and/or modified sequence
attccgccgagcaaaccgttacgtggctcatcactctgggggtgctggagtcgcccaaaaaccatctcggacccggagggctttctgcaggcgtcgctgaaggatggggtggtcctctgcaggctgctggagcgcctgctccccgggaccatcgagaaagtctaccccgagccccggagcgagagcgagtgcctgagcaacatccgcgagttcctgcgcggctgcggggcttccctgcggctggagacgtttgatgcaaatgatttgtatcaggggcagaattttaacaaggtcctcagttccttagtgactctaaataaagtaacagcagacatcgggctggggagtgactccgtgtgtgcccggccctcgtctcaccgcataaagtcttttgactcccttggatcacagtctttgcacactcggacttcaaaactgttccagggccagtatcggagtttggacatgaccgataatagcaacaatcaactggtagtaagagcaaagtttaacttccagcagaccaatgaggacgagctttccttctcaaaaggagacgtcatccatgtcacccgtgtggaagagggaggctggtgggagggcacactcaacggccggaccggctggttccccagcaactacgtgcgcgaggtcaaggccagcgagaagcctgtgtctcccaaatcaggaacactgaagagccctcccaaaggatttgatacgactgccataaacaaaagctattacaatgtggtgctacagaatattttagaaacagaaaatgaatattctaaagaacttcagactgtgctttcaacgtacctacggccattgcagaccagtgagaagttaagttcagcaaacatttcatatttaatgggaaatctagaagaaatatgttctttccagcaaatgctcgtacagtctttagaagaatgcaccaagttgcccgaagctcagcagagagtcggaggctgctttttaaacctgatgccacagatgaaaaccctgtacctcacgtattgtgccaatcacccttctgcagtgaatgtcctcacggaacacagtgaggagttgggggagttcatggagaccaaaggtgccagcagccctgggattctcgtgctgaccacgggcctgagcaaacccttcatgcgcctggataaataccctacgctgctcaaagagctcgagagacacatggaggattatcatacagatagacaagatattcaaaaatccatggctgccttcaaaaacctttcagcccaatgtcaagaagtccggaagaggaaagagcttgagctgcagatcctgacggaagccatccggaactgggagggcgatgacattaaaactctgggcaacgtcacttacatgtcccaggtcctgattcagtgtgccggaagtgaggaaaagaatgaaagatatcttctactcttcccaaatgttttgctaatgttgtctgccagtcctaggatgagtggctttatctatcagggaaagcttccaacgacaggaatgacaatcacaaagcttgaggacagtgaaaatcatagaaatgcatttgaaatatcagggagcatgattgagcggatattagtgtcgtgcaacaaccagcaggatctgcaggaatgggtggagcacctacagaagcaaacgaaggtcacgtctgtgggaaaccccaccataaagcctcattcagtgccatctcataccctcccctcccacccggtcactccgtccagcaagcacgcagacagcaagcccgcgccgctgacgcccgcctaccacacgctgccccacccctcccaccacggcaccccgcacaccaccatcaactggggacccctggagcctccgaaaacacccaagccctggagcctgagctgcctgcggcccgcgcctcccctccggccctcagctgctctctgctacaaggaggatcttagtaagagccctaagaccatgaaaaagctgctgcccaagcgcaaacctgaacggaagcctatgaggagttcgcgtcccggaaaagcacagctgctttggaagaagatgctcagattctgaaagtcattgaagcttactgcaccagcgccaaaacaaggcaaacactcaattcaagttcacgcaaagaatctgctccacaagttttgcttccagaagaagagaaaattatagtggaagaaactaaaagtaatggtcagacagtgatagaagaaaagagtcttgtggataccgtatatgcattaaaggatgaagttcaagaattaagacaggacaacaaaaagatgaagaaatctctagaggaagaacagagagcccgcaaagacctggagaagctggtgaggaaagtcctgaagaacatgaatgatcctgcctgggatgagaccaatctataagggatgtcctcagttctttctgttgaagaccagttctgaggtgaagctgggcacccctgacccaagtcggggtgcactcaggaccacagggcagggctgggtggggcgccaccttgctctctgtatatagaaaagctggagcttattctgcgaatggagacgatcaaaccatgactgatgaatccagacaggagggattgactctgaggacctgagctacatcaatccactctgtgaacatctcagttacctcattctgcaataagttcagtgactgactaaaagtcttgtttttccagactttgaattgaatatataaatattatatatacatgtttcttgtaaatatcccattttgaatgcatacctgtggtggttctgtccgggctaatccccatgctagaatgtcctttccagctacgtgaataagaagtcccatgcccgcatccaccggaagcagaagcctggtggatgcctggttcgttccgcagcaccagggcctccaccgtgctgtggcagcaccccccatgtcggtatttctaaataaccttatttatacctgcagagatacacttcagtcccattcagaagtcttctcttaaagcagcattacagtcccagacctgcgggtttctgagggcaacttgctggctgacagactcagtcttgacctcaaggaaggcccatacggcactgccgcatccacctagaggtgtttgctcttgtccgctgtctgagtactgtgattctcagatgagtttgctgcgttttgggaggacacagacggttctgtataggctagttcagtaacaacaaaatacactgttttgtcttccctcaaagagagatcttactagaacctgtaaatagaatgtattatttattataagtcactgcagctgatgaaaacagatggaggccatgctgcaggctgatactgatgggtggagttttgtcatcaggccagcctcatcccgaggtctcctccaccattggccgtagccagcaggcttcagtgctcaccgaaagtaaaatcccctccttcagcaagaataaagcaatatacaccttaggttccactaagtaacataggcataagcagggaacgtttcccccactgtgttccagtgcagaggagacgaagcctgtcctcaccgcggctcgctgggcccaggctggctctggaaagcctgtgcggtcctgggcaggaagcccggcccgtggagcaggttttcgttctgcttcagcaataaataagggtgaccacagggactttgcttttggtttcctttcctgtgaaaaggttggttttaaagtgagatacacttttccgtagaacaagtgttctatctttaaaaacccaaattgcagcaccgtggattactggtctcagaacaactcattgcgcatcagatttgactctctgattttctgtctattggccaaattgccctttaactgcacctgaatcctttgtgtactgatgcctttgagctgggcaccttgggagagtgttgtgttgctgtttacggttcttccttgcccttgctaattacagtctctggtgcccagcaagcccctttggcttccttccgtgactggtcacgttgtctgcctgggctcagcgtggacctgccccatgctgcagaacctggcctcacctggacttttcactagaattgccagcttcctcaacttagcagatcattcactcatgcgggcacaagcaaagatcaacactttcttttttggtaagcttgagttttacaagttattttttggtgatgcgtaagacattgcagtgggaaaccattcaacttgagtttattggagtttgctgttgtagcaggttttaactcaggaacaactcttgtctgatctctccgcccctctgccgggaggcgacattaactgtcctctcggagccggtagcgttgctgtccgagtccccaggacggatctcctgcagacctgccttaatgctcagatcgaagtatttcacaagaatacttgtgtttttaacagcccttcccctggacggtgcggccatgagggcctcatgttacggcattgccttttctttctgtggatccagtatcttcctcggctttttagggagcaggaaaaatgcgtctgagagcaactctttttaaaaacctgccctgttgtatataactgtgtctgtttcaccgtgtgacctcccaagggggtgggaacttgatataaacgtttaaaggggccacgatttgcccgagggttactcctttgctctcaccttgtatggatgaggagatgaagccatttcttatcctgtagatgtgaagcactttcagttttcagcgatgttggaatgtagcatcagaagctcgttccttcacactcagtggcgtctgtgcttgtccacatgcgctgggcgtctgggaccttgaatgcctgccctggttgtgtggactccttaatgccaatcatttcttcacttctctgggacacccagggcgcctgttgacaagtgtggagaaactcctaatttaaatgtcacagacaatgtcctagtgttgactactacaatgttgatgctacactgttgtaattattaaactgattatttttcttatgtc

SEQ ID NO: 241638 - protein, 192 aa, Artificial Sequence
  derived and/or modified sequence
MLTLEFGILEFDPSWIGSWTQRSWVSWRSRPGCELFSIVVFGSIVNEGYLNSASEGEEFCIYNRNPNACSYGVAVGVLAFLTCLLYLALDVYFPQISSVKDRKKAVLSDIGVSAFWAFLWFVGFCYLANQWQVSKPKDNPLNEGTDAARAAIAFSFFSIFTWSLTAALAVRRFKDLSFQEEYSTLFPASAQP

SEQ ID NO: 241639 - DNA, 579 bp, Artificial Sequence
  derived and/or modified sequence
atgctgaccctggagttcggcatcctggagttcgaccccagctggatcggcagctggacccagagaagctgggtgagctggagaagcagacccggctgcgagctgttcagcatcgtggtgttcggcagcatcgtgaacgagggctacctgaacagcgccagcgagggcgaggagttctgcatctacaacagaaaccccaacgcctgcagctacggcgtggccgtgggcgtgctggccttcctgacctgcctgctgtacctggccctggacgtgtacttcccccagatcagcagcgtgaaggacagaaagaaggccgtgctgagcgacatcggcgtgagcgccttctgggccttcctgtggttcgtgggcttctgctacctggccaaccagtggcaggtgagcaagcccaaggacaaccccctgaacgagggcaccgacgccgccagagccgccatcgccttcagcttcttcagcatcttcacctggagcctgaccgccgccctggccgtgagaagattcaaggacctgagcttccaggaggagtacagcaccctgttccccgccagcgcccagccctag

SEQ ID NO: 241640 - DNA, 579 bp, Artificial Sequence
  derived and/or modified sequence
atgctcactctcgagtttgggatcctggagttcgatcctagttggataggttcatggactcagcggtcctgggtgagttggaggtcacgccctggttgcgaactgttttccatcgtggtgttcggatcaattgtgaacgaggggtaccttaattctgcctcggagggcgaggagttctgcatctataaccgcaaccctaacgcttgtagctacggtgtggctgtaggagttctggcctttcttacatgtctgctgtatctcgcactcgacgtatactttccacaaattagcagcgtgaaagataggaaaaaggctgtcctttcagacatcggagtgagtgctttctgggctttcctttggtttgtgggcttttgctacctggccaatcaatggcaggtctctaaacccaaggacaacccccttaacgaaggaacggacgccgctagggcagccatcgctttctcattcttttctatcttcacttggagcttgactgcagccctggctgtgaggagatttaaagacctcagttttcaggaggagtattccacactcttcccagcttccgcccagccctag

SEQ ID NO: 241641 - DNA, 579 bp, Artificial Sequence
  derived and/or modified sequence
atgctgaccctggagtttggcatcctggagtttgaccccagctggattggctcctggacccagaggtcctgggtgtcctggaggagcaggcctggctgtgagctgttcagcatcgtggtgtttggcagcatcgtgaatgaaggctacctgaacagcgccagcgagggggaggagttctgcatctacaacagaaaccccaatgcctgcagctatggagtggccgtgggcgtgctggccttcctgacctgcctgctgtacctggccctggatgtgtacttcccccagatcagctctgtgaaggacaggaagaaggctgtgctgagtgacatcggcgtgtctgccttctgggccttcctgtggtttgtgggcttctgctacctggccaaccagtggcaggtgtccaagcccaaggacaaccccctgaatgaaggaacagatgctgcccgggccgccatcgccttctccttcttcagcatcttcacctggagcctgacagctgccctggccgtgcggcgcttcaaggacctgtccttccaggaggagtacagcaccctcttccctgccagcgcccagccctag

SEQ ID NO: 241642 - DNA, 579 bp, Artificial Sequence
  derived and/or modified sequence
atgctgaccctggagttcggcatcctggagttcgaccccagctggataggctcctggacccagcgatcatgggtctcttggaggtcccgccccggatgtgagctgttcagtatcgtagtcttcggtagtattgtcaatgaggggtatctgaattccgcttccgaaggcgaggagttctgcatatacaatagaaatccaaacgcctgcagctacggtgttgccgtgggcgtcctggccttcctgacgtgtcttctctacctggccctcgatgtctacttcccccagatctcgtccgttaaagatcgcaagaaagcagtccttagcgacataggcgtgtccgccttttgggcctttctgtggtttgttggcttctgctacctggcgaatcagtggcaggtgagtaaacctaaggacaacccactcaacgaagggactgatgctgccagggcagcgatcgcctttagctttttcagcatctttacctggagtcttaccgccgcgctagctgtgcgccgcttcaaggatctgagctttcaggaagaatatagtacactttttcccgcttccgcccagccatag

SEQ ID NO: 241643 - DNA, 579 bp, Artificial Sequence
  derived and/or modified sequence
atgctcacgcttgaatttggaatcctggagtttgacccgtcatggatcggttcctggacgcagcggtcttgggtctcctggaggtctcggcctggttgcgagctgtttagtattgtcgtattcggaagcattgtcaacgaagggtacctgaattccgcatcagagggggaagagttttgcatttacaaccgcaacccaaatgcatgcagttatggcgtggccgttggggtgctggcattcttgacctgtctactgtatctggccctggacgtgtactttcctcaaatctcttccgtgaaagataggaagaaggcagtgctatcagacattggggtaagcgcattttgggcgttcctgtggttcgtaggtttctgttacctggctaatcagtggcaagttagcaaacccaaagataacccgttaaacgagggaaccgacgcggcacgcgcagctattgcattctccttttttagtatctttacctggtccctgaccgcggcactcgccgtccgcagatttaaggacctgagctttcaggaagaatactccacactgtttcccgcttcagcccagccctag

SEQ ID NO: 241644 - DNA, 1295 bp, Artificial Sequence
  derived and/or modified sequence
ccagcaggcatgcctccttggtctcatgttgaccttagagtttgggattctggaattcgatccttcatggataggcagctggacacagaggtcgtgggtgagctggaggagcaggcccggatgtgagctgttctccatagtggtgttcggctccatcgtgaacgagggctacctcaacagcgcctccgagggggaggagttctgcatctacaaccgcaaccccaacgcctgcagctatggcgtggccgtgggcgtgctcgccttcctcacctgcctgctgtacctggccctggacgtgtacttcccgcagatcagcagcgtcaaggaccgcaagaaagccgtcctgtccgacatcggtgtctcggccttctgggctttcctctggttcgtgggattctgctacctggccaaccagtggcaggtctccaagcccaaggacaacccactgaacgaagggacggacgcagcccgggccgccatcgccttctcctttttctccatcttcacctggagcctgaccgcagccctggccgtgcggagattcaaggacctaagcttccaggaggagtacagcacactgttccctgcctcggcacagccgtaggcctccccggcttgcagaggccggcagccctgtatcacccctggcagtgaggtggcaggagcagcctagtgccagaaatgtccaagatgccagggcatgcagggcagtggaaggctggcttgaggaaccaattcaggttctccactgactcattcattccttcaccgcctccttcattgattcttcatgcgttcattcattcagtaaacatttattgagcagctgttttgtgcctagtgatgaattaggtggggtccttggctccaggagcccacaggctggggaggagaaaacaaacacatcaatatctcttccaaatggacagccgtggacagttaccaggtaggtagcggccccatacatgggctgcctagaggcgttcatggtccccattgctgagctgtgggtgcagagcaatagcctctcccttcacagcggtgtgaagagtgacctcactgtccttagggttagcatcctggccgaggatgtcacagggctcctggtctggctctgtcctcatgtgctatgtgaccctgacaaacccgtgcacctctctcagcctcagtccacttacctgaactgaggggtgataatggaccaacctctcaaggctgttgtgccaatgaaacaaaggccagcccagggcttagcacaagcatgctcaataaatgtaagctcttttgttcattca

SEQ ID NO: 241645 - protein, 938 aa, Artificial Sequence
  derived and/or modified sequence
MHQLSLIRGNRGRSIHILERTASSSTEPSVSRQLLEPEPVPLSKEADSWEIIEGLKIGQTNVQKPDKHEGFMLKKRKWPLKGWHKRFFVLDNGMLKYSKAPLDIQKGKVHGSIDVGLSVMSIKKKARRIDLDTEEHIYHLKVKSQDWFDAWVSKLRHHRLYRQNEIVRSPRDASFHIFPSTSTAESSPAANVSVMDGKMQPNSFPWQSPLPCSNSLPATCTTGQSKVAAWLQDSEEMDRCAEDLAHCQSNLVELSKLLQNLEILQRTQSAPNFTDMQANCVDISKKDKRVTRRWRTKSVSKDTKIQLQEGPPAKGQFSTTRRRQRLAAAVATTVPFSATMSPVRLHSSNPNLCADIEFQTPPSHLTDPLESSTDYTKLQEEFCLIAQKVHSLLKSAFNSIAIEKEKLKQMVSEQDHSKGHSTQMARLRQSLSQALNQNAELRSRLNRIHSESIICDQVVSVNIIPSPDEAGEQIHVSLPLSQQVANESRLSMSESVSEFFDAQEVLLSASSSENEASDDESYISDVSDNISEDNTSVADNISRQILNGELTGGAFRNGRRACLPAPCPDTSNINLWNILRNNIGKDLSKVSMPVELNEPLNTLQHLCEEMEYSELLDKASETDDPYERMVLVAAFAVSGYCSTYFRAGSKPFNPVLGETYECIREDKGFRFFSEQVSHHPPISACHCESKNFVFWQDIRWKNKFWGKSMEILPVGTLNVMLPKYGDYYVWNKVTTCIHNILSGRRWIEHYGEVTIRNTKSSVCICKLTFVKVNYWNSNMNEVQGVVIDQEGKAVYRLFGKWHEGLYCGVAPSAKCIWRPGSMPTNYELYYGFTRFAIELNELDPVLKDLLPPTDARFRPDQRFLEEGNLEAAASEKQRVEELQRSRRRYMEENNLEHIPKFFKKVIDANQREAWVSNDTYWELRKDPGFSKVDSPVLW

SEQ ID NO: 241646 - DNA, 2817 bp, Artificial Sequence
  derived and/or modified sequence
atgcatcagctttccctcattcgcggcaaccgcgggaggagtatacatattctggaacgcactgcttcatccagtacagaaccgtccgtgtcccggcaactcctggaaccagagcccgtcccactctctaaggaagccgatagttgggagatcatagagggcttgaaaatagggcagacgaacgtgcagaagcctgacaaacatgaagggttcatgctcaagaaaaggaagtggcccctgaagggctggcacaagcggttctttgtgctcgataacgggatgctcaaatatagcaaggctcccttggacatacagaaggggaaggtgcacggttctatcgatgtgggattgagtgtgatgtctataaagaagaaggccagaagaatagacttggacactgaagaacacatctatcatcttaaggtgaagagccaagactggttcgacgcctgggtgtcaaagctgcggcatcaccgcctctataggcaaaacgaaattgttcggtcacccagagacgctagttttcacatttttccatctaccagtacagccgaaagcagcccagccgcgaatgtttcagtcatggatggcaaaatgcagcctaatagtttcccttggcagagccccctgccctgtagtaactccctgccggccacatgcaccacaggccagagcaaggtggcagcctggctgcaagatagcgaggagatggatcggtgcgccgaagacctcgcacattgccagagcaacctggtggagttgagcaagttacttcagaaccttgagattctgcagaggacgcagagtgcccccaattttacagacatgcaagccaactgcgttgacatctccaaaaaagacaagcgagtcactagaaggtggagaaccaaaagcgtgtcgaaggatacaaagatacagcttcaagagggaccgccagccaagggtcagttctccaccactaggaggagacagcgactggccgcagccgtggccacgaccgtcccattctcagccacaatgtcacccgtgcggctgcactccagtaatcctaatctctgtgccgatattgaattccagacacccccatctcatctcacggaccccctggagtctagtacagattataccaaattacaagaagaattctgcttaatcgcgcagaaggtccatagccttctgaaatcggcttttaattccattgcgatcgaaaaagagaaacttaagcaaatggtcagcgagcaggaccacagtaaaggccactccacccagatggcgcggctgcgccagtccctgtctcaagccctcaatcagaatgccgagctgcgatccaggctgaacaggatccacagcgaatccataatttgcgaccaggttgtctccgtcaatatcattccctctccagatgaagctggggaacagatccacgtgagcctcccactctctcagcaggtcgctaacgaatccagactgtccatgtcagagtcagtgtccgagttcttcgacgcccaggaagtgttgttgtccgcttcctcatccgaaaatgaagcaagcgatgacgagtcatacatttcagatgtttctgataacatatccgaggacaatacttcggtggctgacaatatcagtaggcagatcctcaatggtgagttgacaggcggcgccttccgaaatggccggcgtgcctgcctgcccgcaccatgcccagacacaagcaatatcaacttgtggaatattttaaggaacaatataggaaaggacctttctaaggtttctatgcctgtggagctgaacgaaccgctgaacaccctgcaacatctgtgcgaggaaatggaatatagcgagttgttggataaggcgtccgagacagacgacccctacgagagaatggtcctggttgccgccttcgccgtgtctgggtactgcagcacctatttccgagccggttctaaacctttcaatccagttcttggcgagacatacgagtgtattagagaggataagggttttaggtttttctctgagcaggtttcacatcatcccccaatatctgcttgtcattgcgagtccaaaaactttgtgttctggcaggatatacgatggaaaaataagttctggggaaagtctatggagattctgcctgttgggacacttaacgtgatgctgcccaagtacggagactactacgtatggaataaggtgaccacatgtattcataatattctttctggaaggagatggattgagcattacggagaggtcaccattcggaatacgaagagctcggtgtgcatttgtaagcttaccttcgtcaaggtgaattactggaatagtaacatgaacgaggtacagggggtggttattgaccaagagggtaaagcagtctaccggctttttggaaagtggcacgaaggactgtactgcggtgttgcgcccagcgctaaatgtatctggagacctggcagcatgcccactaactacgagctgtattacggcttcacacggtttgctattgagttaaacgaactggaccctgtacttaaggaccttttaccacctactgatgctcggtttcggccagatcaacggtttctggaggaggggaatctggaagctgctgcttctgagaagcagcgggtagaggagcttcagagatcccgacgtcgatacatggaggagaataatctggagcacattccaaagttctttaaaaaagtgattgacgccaatcagagggaagcttgggtctcaaacgatacttattgggagttgaggaaggacccgggtttcagcaaagtggacagccccgttttgtggtag

SEQ ID NO: 241647 - DNA, 2817 bp, Artificial Sequence
  derived and/or modified sequence
atgcaccagctgagcctcatccggggcaacagaggccgcagcatccacatcctggagaggacagccagcagcagcacagagcccagcgtgtcccggcagctgctggagcctgagcctgtgcccctgagcaaggaggccgacagctgggagatcatcgagggcctgaagattggccagaccaacgtgcagaagccagacaagcatgagggcttcatgctgaagaagaggaagtggcccctgaagggctggcacaagcgcttctttgtgctggacaatggcatgctgaagtacagcaaggcccccctggacatccagaagggcaaggtgcacggcagcattgatgtgggcctgtctgtgatgagcatcaagaagaaggccaggagaattgacctggacacagaggagcacatctaccacctgaaggtgaagagccaggactggtttgatgcctgggtgtccaagctgcggcaccaccggctgtaccggcagaatgagatcgtgcgcagccccagagatgccagcttccacatcttccccagcaccagcacagctgagagcagccctgctgccaacgtgtctgtgatggatggcaagatgcagcccaacagcttcccctggcagagccccctgccctgcagcaacagcctgcctgccacctgcaccaccggccagagcaaggtggccgcctggctgcaggacagcgaggagatggacagatgtgccgaggacctggcccactgccagagcaacctggtggagctgagcaagctgctgcagaacctggagatcctgcagaggacccagagcgcccccaacttcacagacatgcaggccaactgtgtggacatcagcaagaaggacaagagggtgacccggcgctggaggaccaagtctgtgtccaaggacaccaagatccagctgcaggagggccccccagccaagggccagttcagcaccacccggcggcggcagaggctggccgctgctgtggccaccaccgtgcccttcagcgccaccatgagccctgtgcggctgcacagcagcaaccccaacctgtgtgccgacatcgagttccagaccccacccagccacctgacagaccccctggagagcagcacagactacaccaagctgcaggaggagttctgcctgattgcccagaaggtgcacagcctgctgaagagcgccttcaacagcatcgccatcgagaaggagaagctgaagcagatggtgtctgagcaggaccacagcaagggccacagcacccagatggcccggctgcggcagagcctgagccaggccctgaaccagaatgctgagctgcggagccggctgaaccgcatccacagcgagagcatcatctgtgaccaggtggtgtctgtgaacatcatccccagcccagatgaggccggggagcagatccacgtgtccctgcccctgagccagcaggtggccaatgaaagccggctgtccatgtctgagagcgtgtctgagttctttgatgcccaggaggtgctgctgagcgccagcagcagtgaaaatgaggccagtgatgatgagagctacatcagtgatgtgtctgacaacatcagcgaggacaacacctctgtggccgacaacatcagccggcagatcctgaatggagagctgactggaggagccttcagaaatggaagaagagcctgcctgcctgccccctgcccagacaccagcaacatcaacctgtggaacatcctgaggaacaacatcggcaaggacctgagcaaggtgtccatgcctgtggagctgaatgagcccctgaacaccctgcagcacctgtgtgaggagatggagtacagcgagctgctggacaaggccagcgagacagatgacccctatgaaagaatggtgctggtggccgcctttgctgtgtctggctactgcagcacctacttccgggccggcagcaagcccttcaaccctgtgctgggggagacctatgagtgcatcagagaagataaaggcttccgcttcttcagcgagcaggtgagccaccacccccccatcagcgcctgccactgtgagagcaagaactttgtgttctggcaggacatccgctggaagaacaagttctggggcaagtccatggagatcctgcctgtgggcaccctgaatgtgatgctgcccaagtacggggactactacgtgtggaacaaggtgaccacctgcatccacaacatcctgagcggccgccgctggattgagcactacggggaggtgaccatccggaacaccaagagctctgtgtgcatctgcaagctgacctttgtgaaggtgaactactggaacagcaacatgaatgaggtgcagggcgtggtgattgaccaggagggcaaggctgtgtaccgcctgtttgggaagtggcatgagggcctgtactgcggcgtggcccccagcgccaagtgcatctggaggcctggctccatgcccaccaactatgagctgtactacggcttcaccaggtttgccatcgagctgaatgagctggaccctgtgctgaaggacctgctgcccccaacagatgcccgcttccggccagaccagcgcttcctggaggagggcaacctggaggccgccgccagcgagaagcagagggtggaggagctgcagaggagcagaagacgctacatggaggagaacaacctggagcacatccccaagttcttcaagaaggtgattgatgccaaccagcgggaggcctgggtgtccaatgacacctactgggagctgaggaaggaccccggcttcagcaaggtggacagccctgtgctgtggtag

SEQ ID NO: 241648 - DNA, 2817 bp, Artificial Sequence
  derived and/or modified sequence
atgcaccagctgagcctgatccggggcaaccggggccggagcatccacatcctggaacgtacggccagtagctctacggaaccctcggtctctcgtcagttactagaaccggaacctgtgcccttgtccaaagaggcagatagctgggagatcattgagggtctgaagatcggccagaccaacgtgcagaaaccagataaacacgaagggttcatgctaaaaaagaggaagtggccccttaagggttggcacaagcgcttctttgtcttggataatggcatgctcaaatatagcaaggcccctcttgacatccagaaaggtaaagttcacggctcaatcgacgtcgggctgagtgtgatgagcatcaaaaaaaaagctcgcaggattgacttggacaccgaggagcacatataccacctcaaggtgaagagccaggactggtttgacgcgtgggtgtccaagctgcgccatcataggctctaccgccagaatgagatcgtgaggtcacctcgggacgctagttttcacatatttccctccacgagcacagctgagagcagccctgcagccaatgtgtccgtgatggatgggaagatgcagccgaactcatttccgtggcagagccctctaccctgcagcaactcactgcccgccacctgcacaacgggtcagtccaaggttgcagcttggctccaggacagcgaagagatggacagatgcgccgaggacctggcccactgtcagtcaaatctggtggagcttagtaaactacttcagaatttagagattttacaacgcacccaatcagcccctaatttcaccgatatgcaggccaattgcgtcgatattagcaagaaagacaaacgagtgacccgccgatggcgtactaaatccgtgagtaaagatacaaagatccagctgcaggaaggacctccggctaaaggacaattcagcaccacacgccgcagacaaaggctcgcagctgctgtggccactactgtgcctttttctgcaaccatgtcccccgtccgcctccattcctctaatccgaacctgtgtgcggacatcgaatttcagacaccgccctctcacctcactgacccactggagtcttccactgattacactaagctgcaggaagaattctgtctgattgcacaaaaggttcactctctattgaaaagcgcattcaatagcattgccatcgaaaaagaaaagctcaaacaaatggtgtctgagcaggatcactctaaaggccatagcacccagatggcaaggttgagacagagcttgagccaggcactcaatcaaaacgcggagttgcggagccgactcaatcggatccactctgagtccattatttgcgatcaagtcgtaagcgttaacatcattccttcacctgatgaggcgggggaacagatacacgtgtcccttcccttaagtcagcaggtcgccaatgagtctcggttaagcatgtcagaatccgtttcggaattctttgacgcccaggaggtactgctatcagcctcttcctcagagaatgaagcaagtgatgacgagtcttatatctcggacgtttccgataacatttccgaggataataccagtgtcgcagacaacatttcccgtcaaattcttaatggagaactgacaggaggggcttttaggaatgggcggcgggcgtgcctgcccgctccatgccctgatacttccaacattaacctctggaacatcctgcggaataacatcggtaaagacttgagtaaggtgagcatgcctgttgagctgaacgagcctcttaacaccctgcagcacctctgtgaagagatggagtatagcgagctgctggacaaggctagtgagaccgatgatccgtacgaacgaatggtgctggtggccgcgtttgcggtttccgggtactgctctacctatttccgtgcggggtcaaaaccgtttaacccagtcctgggggagacatacgagtgtattcgggaagataaaggctttaggtttttttcagagcaggtgtcccaccaccctcctatcagcgcctgccactgtgagtctaagaactttgtgttctggcaggacattaggtggaaaaacaagttttgggggaagagtatggaaatccttcccgtgggaactttgaatgtgatgctacctaaatacggagattactacgtctggaacaaagtcaccacatgtatccataatattctgtcaggcaggaggtggatagagcactacggcgaggtcacaatccggaataccaaatcgtcggtgtgcatatgtaagctgactttcgtcaaagtgaattattggaattccaatatgaacgaagtgcagggagtcgtcatcgaccaggagggcaaggcagtctatagactgttcggcaaatggcacgagggactctattgtggcgtggccccgagcgctaaatgcatttggagacctggatccatgccaacaaactacgagttatattatggctttacacgatttgccattgagttgaatgaactcgatccggtccttaaggacctcctcccaccaaccgacgcgcgctttagacccgatcagagattcctggaagagggcaatctggaggccgccgcctccgaaaaacagagagttgaggaacttcaaagaagcagacggaggtacatggaagaaaataatctggaacacatcccaaaattcttcaagaaggtgatcgacgcaaaccaaagagaggcctgggtgtcaaatgatacctactgggagcttcgcaaggaccccggattcagcaaagtcgattcgcctgttctctggtag

SEQ ID NO: 241649 - DNA, 2999 bp, Artificial Sequence
  derived and/or modified sequence
tttccacttgctgctcaggaggtattgagatcaatgaacactaacctgaggagcatatttttaccaaattaaagagctacagtgaaatatgtgttccaggttcctggttttaagctaaatatgcatcagttatctctgatcaggggaaacagagggcggagtattcacatactggagaggactgcttcctctagcaccgagccctctgtaagtcggcaattgctagaaccggagccagtccccctctccaaggaagctgacagctgggaaattatagaagggctgaaaataggccaaaccaatgtccagaaaccagacaaacatgagggctttatgctgaagaaaagaaaatggcctttaaaaggctggcacaagcgtttttttgtcctggataatggaatgttaaagtattcaaaggcaccactcgatattcagaaaggaaaggtccatgggagcatagatgtgggactctcagtcatgtcaattaaaaagaaagctcgaagaatagaccttgacaccgaagagcacatctatcatttgaaggtgaaatcccaggactggtttgatgcatgggtctccaaactgcgacatcatcggttgtatcgtcagaatgaaattgtgagatcaccaagagatgctagttttcacatatttccttcaacgtccacagctgaatcctcaccagctgctaatgtttctgtaatggatggaaagatgcaaccaaacagctttccgtggcagtcccctttaccatgcagcaatagcctccctgcaacgtgcacaactggccagagtaaagtggcagcctggttacaggactcggaagagatggacaggtgtgcagaagatcttgcacattgccagtcaaaccttgtggaacttagcaaactcctgcaaaatttggaaatacttcagagaactcagtcggcacctaactttactgacatgcaggctaactgtgtagatatttcaaagaaagacaagcgggtcacaagacgatggagaacaaaaagtgtcagcaaagatacaaaaatacaactgcaggaagggccacccgcgaagggccagttcagcacaactcggcgccggcagaggctagcggcagcagtggctacaacagttcctttcagtgctaccatgtcaccagttcgcttgcattcctccaaccccaacctttgtgcagatattgaatttcagactccccctagccacctcactgaccctctggaaagttcaacagattatacaaagctgcaagaagaattttgtctaatcgcacagaaagtgcattctcttttgaagtctgcatttaatagcatagctatagagaaggagaagctgaagcagatggtttccgagcaggatcacagtaaaggccacagcacgcagatggcacggctccgacagtcactgtctcaggcactcaaccagaatgctgaactaaggagtcggttgaacagaatacattcagagtctattatttgtgatcaggttgtcagtgtaaatattattcctagccctgatgaggctggtgagcaaatccatgtcagtctccccttatcacagcaagtagccaatgagagccgcctctccatgtcagagtctgtttctgagttctttgatgcccaagaggtgctcctctctgcaagttcgtcagagaatgaggcttcagatgatgagtcttacatcagtgatgtgagtgataatatatctgaagacaacaccagtgttgcagacaatatttctcggcaaatcctgaatggggagcttacaggaggggccttccgaaatgggcgtcgagcatgcctgccagctccttgtcctgacaccagtaacattaacctgtggaatatcttgaggaacaacattggtaaagacctgtctaaagtctctatgcctgtggagctaaacgagccgctcaacaccctgcagcacctctgtgaggaaatggaatacagcgagctcctggacaaggcttcggaaactgatgatccatatgagcgcatggttctcgttgccgcatttgcagtttcaggatactgctccacctatttcagagcaggaagtaagccattcaacccagtccttggggagacttatgaatgcattagagaagacaagggattccgctttttctcagaacaggttagccatcatccacccatttctgcctgtcactgtgaatcaaagaattttgtgttttggcaagatatcagatggaaaaacaagttctgggggaagtcgatggaaatcctgcctgttggaacactgaatgtcatgcttccaaagtatggagattactatgtgtggaataaagtcaccacttgcatacacaacatcctcagtgggagaagatggatagaacattatggagaagtaaccatcagaaataccaaaagcagtgtttgcatttgcaaactcacatttgtcaaggtgaattattggaattctaacatgaatgaagtccagggggtggtgatagatcaggaggggaaggcggtgtaccggctgtttggaaagtggcatgaaggactctactgtggtgtggccccctctgcaaagtgcatttggagaccaggttccatgccaacaaactatgagctgtactatggcttcacaaggtttgctattgagctcaatgagttagatccagtactaaaagatctccttccaccaacagacgcccggttccggccagatcaaagatttttggaagaaggaaatttagaagctgcagcatcagagaagcaaagagtagaggaactccagagatctcggagacgatatatggaagaaaacaatcttgaacatataccaaaattttttaaaaaagttattgatgccaatcaaagagaagcctgggtttctaacgacacctactgggagcttcgaaaggaccctgggtttagcaaagtagacagccctgttctttggtagactgggaatgtagagctagccaacatatcacattctgaatgaataaataactatgcacaatt

SEQ ID NO: 241650 - DNA, 2817 bp, Artificial Sequence
  derived and/or modified sequence
atgcaccagctctccctgatccgaggcaacaggggccgatctattcatattctggaacgtactgccagcagctctaccgagcctagtgttagcagacagttactggagcctgaacctgtccccttatccaaggaggcagacagctgggagattattgaaggactgaagatcggacaaaccaacgtgcaaaagcctgataaacacgagggattcatgttgaagaagcgtaagtggcctctcaaagggtggcataaaaggttcttcgttctggacaacggaatgctcaagtatagcaaggctccactggacattcagaagggaaaggttcatgggtctatcgatgtgggcctaagcgtaatgtccataaaaaagaaagcacggagaattgatttggatacagaagagcatatttaccacctaaaggtaaagtcacaggattggtttgacgcctgggttagtaaactacgtcaccaccggctgtatcgtcagaacgaaatcgtacgcagcccaagagatgcaagtttccatatcttcccaagcacctctacagcagagtcaagccccgctgctaatgtgtccgttatggacggcaagatgcagccaaatagctttccttggcagtctccactcccatgtagtaacagcctacctgcaacatgtacaaccgggcagtcaaaggtggctgcgtggctgcaagatagtgaggagatggaccggtgcgccgaagacctggcccactgccagtccaacctcgtggagctctcaaaactgcttcaaaacttggagatcctgcagcgcactcaatctgcccctaactttacggatatgcaagccaactgcgttgatatctcgaaaaaggataaaagggtcacgcgaaggtggcgcacaaaaagcgtcagcaaagacactaaaatccagctgcaggaaggaccccctgctaaggggcagttttccaccaccagaagaagacagaggttggcggcagcagtcgcaactactgtccccttcagcgctaccatgtcccctgtgcgcttacacagtagcaacccaaatctgtgcgctgatatcgaatttcagaccccgccatcacacctgaccgacccccttgagagcagcacggactacactaagctgcaagaagagttttgcttgattgctcaaaaagtgcactcacttctcaaaagcgctttcaattccatcgctattgaaaaggagaaactcaagcagatggtctcggagcaggaccatagcaagggtcactcaactcagatggcacgactgcgacagagcctctcacaagccttgaaccagaacgccgaactaaggtcaaggctgaaccgaatccatagtgagtcaataatctgcgaccaggtggtgagcgttaatatcattccatccccggacgaggccggagagcagatccatgtgtcccttccactgtcccagcaggtcgcaaacgaatcaagactcagcatgtccgagtcagtatctgagttcttcgatgcccaggaggttctactgtcggcatcctcgtcagagaatgaagcctctgatgatgagtcctacattagcgacgtgagcgacaatatctctgaagacaatacaagcgtggctgataacatcagccggcagattctgaacggggaacttaccggcggtgcctttagaaatggacgacgggcatgcttgcccgctccctgcccagatacaagcaacatcaatctatggaatattcttagaaataatatcggtaaggaccttagtaaagtgtcgatgcccgtggagttgaacgagcctctcaacaccttgcagcatctgtgtgaggagatggagtacagcgagcttctggacaaggcatccgaaaccgatgacccatacgaacgtatggttctagtggccgcttttgccgtaagcggctactgtagcacctacttcagggcgggatcaaaaccatttaaccccgtactgggcgagacctacgaatgtatccgagaggataaagggtttcgtttttttagtgagcaggtcagtcatcaccctcccattagtgcctgccactgtgaaagcaaaaacttcgtgttttggcaggacatcagatggaagaataaattttggggcaaaagcatggagattctgcctgtcggtaccctgaatgtcatgctgccaaagtacggtgattactatgtgtggaacaaggtgacgacctgtatacacaacatcctgtccgggagacgctggatcgagcattatggagaggttaccattcggaatacaaagtccagcgtttgcatctgcaagttaactttcgtgaaggttaactattggaattccaatatgaacgaagtacaaggagtcgtgatcgaccaagagggcaaagctgtctaccgtttgtttggcaaatggcatgagggactgtactgcggcgtggcaccatccgctaaatgcatatggcgccctggtagcatgccaacaaactatgaactctattacgggttcaccaggtttgctattgaactgaacgagttggatcctgtgctcaaggacctccttccaccaaccgatgcacggtttcgccctgaccagagatttttggaagaggggaacctggaggccgcagcaagcgaaaaacagagagtggaagaactgcagagaagtaggagacggtacatggaggagaacaacctggagcatatccccaaatttttcaaaaaggtgatagacgcaaaccagagggaagcctgggtgtccaacgacacatattgggaactgagaaaggatccaggcttttcaaaggttgactcaccagtgttgtggtag

SEQ ID NO: 241651 - DNA, 2817 bp, Artificial Sequence
  derived and/or modified sequence
atgcaccagctgagcctgatcagaggcaacagaggcagaagcatccacatcctggagagaaccgccagcagcagcaccgagcccagcgtgagcagacagctgctggagcccgagcccgtgcccctgagcaaggaggccgacagctgggagatcatcgagggcctgaagatcggccagaccaacgtgcagaagcccgacaagcacgagggcttcatgctgaagaagagaaagtggcccctgaagggctggcacaagagattcttcgtgctggacaacggcatgctgaagtacagcaaggcccccctggacatccagaagggcaaggtgcacggcagcatcgacgtgggcctgagcgtgatgagcatcaagaagaaggccagaagaatcgacctggacaccgaggagcacatctaccacctgaaggtgaagagccaggactggttcgacgcctgggtgagcaagctgagacaccacagactgtacagacagaacgagatcgtgagaagccccagagacgccagcttccacatcttccccagcaccagcaccgccgagagcagccccgccgccaacgtgagcgtgatggacggcaagatgcagcccaacagcttcccctggcagagccccctgccctgcagcaacagcctgcccgccacctgcaccaccggccagagcaaggtggccgcctggctgcaggacagcgaggagatggacagatgcgccgaggacctggcccactgccagagcaacctggtggagctgagcaagctgctgcagaacctggagatcctgcagagaacccagagcgcccccaacttcaccgacatgcaggccaactgcgtggacatcagcaagaaggacaagagagtgaccagaagatggagaaccaagagcgtgagcaaggacaccaagatccagctgcaggagggcccccccgccaagggccagttcagcaccaccagaagaagacagagactggccgccgccgtggccaccaccgtgcccttcagcgccaccatgagccccgtgagactgcacagcagcaaccccaacctgtgcgccgacatcgagttccagaccccccccagccacctgaccgaccccctggagagcagcaccgactacaccaagctgcaggaggagttctgcctgatcgcccagaaggtgcacagcctgctgaagagcgccttcaacagcatcgccatcgagaaggagaagctgaagcagatggtgagcgagcaggaccacagcaagggccacagcacccagatggccagactgagacagagcctgagccaggccctgaaccagaacgccgagctgagaagcagactgaacagaatccacagcgagagcatcatctgcgaccaggtggtgagcgtgaacatcatccccagccccgacgaggccggcgagcagatccacgtgagcctgcccctgagccagcaggtggccaacgagagcagactgagcatgagcgagagcgtgagcgagttcttcgacgcccaggaggtgctgctgagcgccagcagcagcgagaacgaggccagcgacgacgagagctacatcagcgacgtgagcgacaacatcagcgaggacaacaccagcgtggccgacaacatcagcagacagatcctgaacggcgagctgaccggcggcgccttcagaaacggcagaagagcctgcctgcccgccccctgccccgacaccagcaacatcaacctgtggaacatcctgagaaacaacatcggcaaggacctgagcaaggtgagcatgcccgtggagctgaacgagcccctgaacaccctgcagcacctgtgcgaggagatggagtacagcgagctgctggacaaggccagcgagaccgacgacccctacgagagaatggtgctggtggccgccttcgccgtgagcggctactgcagcacctacttcagagccggcagcaagcccttcaaccccgtgctgggcgagacctacgagtgcatcagagaggacaagggcttcagattcttcagcgagcaggtgagccaccacccccccatcagcgcctgccactgcgagagcaagaacttcgtgttctggcaggacatcagatggaagaacaagttctggggcaagagcatggagatcctgcccgtgggcaccctgaacgtgatgctgcccaagtacggcgactactacgtgtggaacaaggtgaccacctgcatccacaacatcctgagcggcagaagatggatcgagcactacggcgaggtgaccatcagaaacaccaagagcagcgtgtgcatctgcaagctgaccttcgtgaaggtgaactactggaacagcaacatgaacgaggtgcagggcgtggtgatcgaccaggagggcaaggccgtgtacagactgttcggcaagtggcacgagggcctgtactgcggcgtggcccccagcgccaagtgcatctggagacccggcagcatgcccaccaactacgagctgtactacggcttcaccagattcgccatcgagctgaacgagctggaccccgtgctgaaggacctgctgccccccaccgacgccagattcagacccgaccagagattcctggaggagggcaacctggaggccgccgccagcgagaagcagagagtggaggagctgcagagaagcagaagaagatacatggaggagaacaacctggagcacatccccaagttcttcaagaaggtgatcgacgccaaccagagagaggcctgggtgagcaacgacacctactgggagctgagaaaggaccccggcttcagcaaggtggacagccccgtgctgtggtag

SEQ ID NO: 241652 - protein, 222 aa, Artificial Sequence
  derived and/or modified sequence
MAEKPKLHYFNARGRMESTRWLLAAAGVEFEEKFIKSAEDLDKLRNDGYLMFQQVPMVEIDGMKLVQTRAILNYIASKYNLYGKDIKERALIDMYIEGIADLGEMILLLPVCPPEEKDAKLALIKEKIKNRYFPAFEKVLKSHGQDYLVGNKLSRADIHLVELLYYVEELDSSLISSFPLLKALKTRISNLPTVKKFLQPGSPRKPPMDEKSLEEARKIFRF

SEQ ID NO: 241653 - DNA, 669 bp, Artificial Sequence
  derived and/or modified sequence
atggccgagaagcctaagttacattacttcaacgcaagaggtagaatggagtcaactcgctggctgctagctgccgctggtgtcgagttcgaggagaagttcattaagtccgcggaggatctggacaagctgcgcaacgacggctaccttatgttccaacaagtgcctatggtggaaatcgatgggatgaagcttgttcaaacccgcgctatcctcaattacatcgcatcaaaatataacctctacgggaaagacataaaagaacgcgcattaattgacatgtacatagaaggaatcgctgacctgggagaaatgattctgttgctgccggtttgtccccccgaggagaaggacgccaaattagccctgatcaaagaaaagataaaaaaccgctatttccctgcctttgagaaggtgctcaaatcacacggccaggattacttggtggggaataaactgtccagagccgacatccacctagtagaactgctttactacgtggaggagctggacagcagtctcatttcatctttccctttactgaaggccctgaagactcgaatttccaacctgcccacagtgaagaagttcttgcagcctggatctcctaggaagcctcccatggatgaaaagtcactcgaggaggctcgaaaaatcttcagattttag

SEQ ID NO: 241654 - DNA, 1019 bp, Artificial Sequence
  derived and/or modified sequence
gtggcttttccctaacttgactcttctttcagtgggagagaactattgagaggaacaaagagcttataaatacattaggacctggaattcagttgtcgagccaggacggtgacagcgtttaacaaagcttagagaaacctccaggagactgctatcatggcagagaagcccaagctccactacttcaatgcacggggcagaatggagtccacccggtggctcctggctgcagctggagtagagtttgaagagaaatttataaaatctgcagaagatttggacaagttaagaaatgatggatatttgatgttccagcaagtgccaatggttgagattgatgggatgaagctggtgcagaccagagccattctcaactacattgccagcaaatacaacctctatgggaaagacataaaggagagagccctgattgatatgtatatagaaggtatagcagatttgggtgaaatgatcctccttctgcccgtatgtccacctgaggaaaaagatgccaagcttgccttgatcaaagagaaaataaaaaatcgctacttccctgcctttgaaaaagtcttaaagagccatggacaagactaccttgttggcaacaagctgagccgggctgacattcatctggtggaacttctctactacgtcgaggagcttgactccagtcttatctccagcttccctctgctgaaggccctgaaaaccagaatcagcaacctgcccacagtgaagaagtttctacagcctggcagcccaaggaagcctcccatggatgagaaatctttagaagaagcaaggaagattttcaggttttaataacgcagtcatggaggccaagaacttgcaataccaatgttctaaagttttgcaacaataaagtactttacctaagtgttgattgtgcctgttgtgaagctaatgaactctttcaaattatatgctaattaaataatacaactcctattcgctgacttagttaaaattgatttgttttcattaggatctgatgt

SEQ ID NO: 241655 - DNA, 669 bp, Artificial Sequence
  derived and/or modified sequence
atggccgagaagcccaagctgcactacttcaatgcccggggccgcatggagagcacccgctggctgctggccgccgccggcgtggagtttgaggagaagttcatcaagtctgctgaggacctggacaagctgagaaatgatggctacctgatgttccagcaggtgcccatggtggagattgatggcatgaagctggtgcagacccgggccatcctgaactacatcgccagcaagtacaacctgtatggcaaggacatcaaggagcgggccctgattgacatgtacatcgagggcattgctgacctgggggagatgatcctgctgctgcctgtgtgccccccagaggagaaggatgccaagctggccctgatcaaggagaagatcaagaaccgctacttccctgcctttgagaaggtgctgaagagccacggccaggactacctggtgggcaacaagctgagcagagctgacatccacctggtggagctgctgtactacgtggaggagctggacagcagcctcatcagcagcttccccctgctgaaggccctgaagacccgcatcagcaacctgcccaccgtgaagaagttcctgcagcccggcagccccaggaagccacccatggatgagaagagcctggaggaggccaggaagatcttccgcttctag

SEQ ID NO: 241656 - DNA, 669 bp, Artificial Sequence
  derived and/or modified sequence
atggccgagaagcccaagctgcactacttcaacgcccggggccggatggagtccacccggtggctactcgctgctgccggagtggagttcgaggagaagttcatcaaatctgctgaggatctcgacaaactgcgtaatgacgggtatcttatgttccagcaagtgccgatggtcgagatcgatggaatgaaactggtgcagacccgagcgattttgaattatattgcgtctaagtacaacctgtacggaaaggatataaaagaaagggcacttattgacatgtacattgagggaattgccgatctgggggagatgatactgctgctgcccgtatgtcccccagaggagaaggacgctaaattggccctgatcaaggagaaaataaaaaatagatactttcctgcatttgaaaaagtgcttaaatcccatggacaggactatctggttggcaacaagctgtctagggctgacatacacctggttgagttactatattacgtggaggagcttgactcaagtctgatctcgtcatttcctctgctgaaggcattaaagacgcgcatatctaacctacccactgttaagaaatttttgcagcccggaagcccgagaaagcccccaatggatgaaaagtctcttgaggaagccagaaagattttccgattttag

SEQ ID NO: 241657 - DNA, 669 bp, Artificial Sequence
  derived and/or modified sequence
atggccgagaaaccgaagctgcactatttcaatgcaagggggaggatggaaagtacccggtggcttctggcagctgctggcgtagaatttgaagagaaattcataaagagcgcagaggacctcgataagcttcgaaacgatgggtacctaatgtttcaacaagtgcccatggtggagattgatgggatgaaattggtgcagaccagggcgatacttaattacattgcgtctaagtacaacctttatggcaaagacattaaggagcgggcactgatcgatatgtacattgaaggcattgcagatctgggagaaatgatattactattaccagtatgcccccctgaggagaaagatgccaagctggctcttatcaaagaaaagatcaaaaacaggtactttcccgcatttgagaaagttctcaagtcccatgggcaagactatctggtgggaaacaagttatcccgtgcagatattcaccttgttgagctgctgtattacgtggaggagttagactcttcactcatatcttcctttcccctactaaaggcactaaagaccagaatctccaatctgccaaccgtgaaaaaatttctgcaacctggctcgccaagaaagcctccgatggatgaaaagagcctggaagaggctcggaagattttcaggttttag

SEQ ID NO: 241658 - DNA, 669 bp, Artificial Sequence
  derived and/or modified sequence
atggccgagaagcccaagctgcactacttcaacgccagaggcagaatggagagcaccagatggctgctggccgccgccggcgtggagttcgaggagaagttcatcaagagcgccgaggacctggacaagctgagaaacgacggctacctgatgttccagcaggtgcccatggtggagatcgacggcatgaagctggtgcagaccagagccatcctgaactacatcgccagcaagtacaacctgtacggcaaggacatcaaggagagagccctgatcgacatgtacatcgagggcatcgccgacctgggcgagatgatcctgctgctgcccgtgtgcccccccgaggagaaggacgccaagctggccctgatcaaggagaagatcaagaacagatacttccccgccttcgagaaggtgctgaagagccacggccaggactacctggtgggcaacaagctgagcagagccgacatccacctggtggagctgctgtactacgtggaggagctggacagcagcctgatcagcagcttccccctgctgaaggccctgaagaccagaatcagcaacctgcccaccgtgaagaagttcctgcagcccggcagccccagaaagccccccatggacgagaagagcctggaggaggccagaaagatcttcagattctag

SEQ ID NO: 241659 - protein, 557 aa, Artificial Sequence
  derived and/or modified sequence
MAYSEEHKGMPCGFIRQNSGNSISLDFEPSIEYQFVERLEERYKCAFCHSVLHNPHQTGCGHRFCQHCILSLRELNTVPICPVDKEVIKSQEVFKDNCCKREVLNLYVYCSNAPGCNAKVILGRYQDHLQQCLFQPVQCSNEKCREPVLRKDLKEHLSASCQFRKEKCLYCKKDVVVINLQNHEENLCPEYPVFCPNNCAKIILKTEVDEHLAVCPEAEQDCPFKHYGCAVTDKRRNLQQHEHSALREHMRLVLEKNVQLEEQISDLHKSLEQKESKIQQLAETIKKLEKEFKQFAQLFGKNGSFLPNIQVFASHIDKSAWLEAQVHQLLQMVNQQQNKFDLRPLMEAVDTVKQKITLLENNDQRLAVLEEETNKHDTHINIHKAQLSKNEERFKLLEGTCYNGKLIWKVTDYKMKKREAVDGHTVSIFSQSFYTSRCGYRLCARAYLNGDGSGRGSHLSLYFVVMRGEFDSLLQWPFRQRVTLMLLDQSGKKNIMETFKPDPNSSSFKRPDGEMNIASGCPRFVAHSVLENAKNAYIKDDTLFLKVAVDLTDLEDL

SEQ ID NO: 241660 - DNA, 1674 bp, Artificial Sequence
  derived and/or modified sequence
atggcctacagcgaggagcacaagggcatgccctgcggcttcatcagacagaacagcggcaacagcatcagcctggacttcgagcccagcatcgagtaccagttcgtggagagactggaggagagatacaagtgcgccttctgccacagcgtgctgcacaacccccaccagaccggctgcggccacagattctgccagcactgcatcctgagcctgagagagctgaacaccgtgcccatctgccccgtggacaaggaggtgatcaagagccaggaggtgttcaaggacaactgctgcaagagagaggtgctgaacctgtacgtgtactgcagcaacgcccccggctgcaacgccaaggtgatcctgggcagataccaggaccacctgcagcagtgcctgttccagcccgtgcagtgcagcaacgagaagtgcagagagcccgtgctgagaaaggacctgaaggagcacctgagcgccagctgccagttcagaaaggagaagtgcctgtactgcaagaaggacgtggtggtgatcaacctgcagaaccacgaggagaacctgtgccccgagtaccccgtgttctgccccaacaactgcgccaagatcatcctgaagaccgaggtggacgagcacctggccgtgtgccccgaggccgagcaggactgccccttcaagcactacggctgcgccgtgaccgacaagagaagaaacctgcagcagcacgagcacagcgccctgagagagcacatgagactggtgctggagaagaacgtgcagctggaggagcagatcagcgacctgcacaagagcctggagcagaaggagagcaagatccagcagctggccgagaccatcaagaagctggagaaggagttcaagcagttcgcccagctgttcggcaagaacggcagcttcctgcccaacatccaggtgttcgccagccacatcgacaagagcgcctggctggaggcccaggtgcaccagctgctgcagatggtgaaccagcagcagaacaagttcgacctgagacccctgatggaggccgtggacaccgtgaagcagaagatcaccctgctggagaacaacgaccagagactggccgtgctggaggaggagaccaacaagcacgacacccacatcaacatccacaaggcccagctgagcaagaacgaggagagattcaagctgctggagggcacctgctacaacggcaagctgatctggaaggtgaccgactacaagatgaagaagagagaggccgtggacggccacaccgtgagcatcttcagccagagcttctacaccagcagatgcggctacagactgtgcgccagagcctacctgaacggcgacggcagcggcagaggcagccacctgagcctgtacttcgtggtgatgagaggcgagttcgacagcctgctgcagtggcccttcagacagagagtgaccctgatgctgctggaccagagcggcaagaagaacatcatggagaccttcaagcccgaccccaacagcagcagcttcaagagacccgacggcgagatgaacatcgccagcggctgccccagattcgtggcccacagcgtgctggagaacgccaagaacgcctacatcaaggacgacaccctgttcctgaaggtggccgtggacctgaccgacctggaggacctgtag

SEQ ID NO: 241661 - DNA, 1356 bp, Artificial Sequence
  derived and/or modified sequence
atggcctacagcgaggagcacaagggcatgccctgcggcttcatcagacagaacagcggcaacagcatcagcctggacttcgagcccagcatcgagtaccagttcgtggagagactggaggagagatacaagtgcgccttctgccacagcgtgctgcacaacccccaccagaccggctgcggccacagattctgccagcactgcatcctgagcctgagagagctgaacaccgtgcccatctgccccgtggacaaggaggtgatcaagagccaggaggtgttcaaggacaactgctgcaagagagaggtgctgaacctgtacgtgtactgcagcaacgcccccggctgcaacgccaaggtgatcctgggcagataccaggacaagagaagaaacctgcagcagcacgagcacagcgccctgagagagcacatgagactggtgctggagaagaacgtgcagctggaggagcagatcagcgacctgcacaagagcctggagcagaaggagagcaagatccagcagctggccgagaccatcaagaagctggagaaggagttcaagcagttcgcccagctgttcggcaagaacggcagcttcctgcccaacatccaggtgttcgccagccacatcgacaagagcgcctggctggaggcccaggtgcaccagctgctgcagatggtgaaccagcagcagaacaagttcgacctgagacccctgatggaggccgtggacaccgtgaagcagaagatcaccctgctggagaacaacgaccagagactggccgtgctggaggaggagaccaacaagcacgacacccacatcaacatccacaaggcccagctgagcaagaacgaggagagattcaagctgctggagggcacctgctacaacggcaagctgatctggaaggtgaccgactacaagatgaagaagagagaggccgtggacggccacaccgtgagcatcttcagccagagcttctacaccagcagatgcggctacagactgtgcgccagagcctacctgaacggcgacggcagcggcagaggcagccacctgagcctgtacttcgtggtgatgagaggcgagttcgacagcctgctgcagtggcccttcagacagagagtgaccctgatgctgctggaccagagcggcaagaagaacatcatggagaccttcaagcccgaccccaacagcagcagcttcaagagacccgacggcgagatgaacatcgccagcggctgccccagattcgtggcccacagcgtgctggagaacgccaagaacgcctacatcaaggacgacaccctgttcctgaaggtggccgtggacctgaccgacctggaggacctgtag

SEQ ID NO: 241662 - DNA, 1674 bp, Artificial Sequence
  derived and/or modified sequence
atggcctattcagaggaacataaggggatgccttgtggatttatcagacagaacagcgggaacagtatctcgctcgatttcgaaccctcaattgaataccagtttgtagagcgcctggaggagcggtataagtgtgcgttctgccacagtgtacttcataatcctcaccagactgggtgcggacacagattttgtcagcattgcatcttatcactcagggaattgaacacggttccaatttgccctgtagacaaggaggttattaagtctcaagaggtctttaaagataactgctgtaagagagaggttttaaatttgtacgtgtattgttccaatgcccccggttgtaacgccaaggttattttggggcggtaccaggaccatcttcagcagtgtctattccagccggtgcagtgttccaacgaaaagtgccgggagcctgttctacgtaaggatctgaaggaacacctctctgctagctgccagtttaggaaagagaaatgcttatactgcaagaaagacgtcgtcgtgatcaacctccagaaccatgaggaaaacttgtgtcccgagtatcctgttttttgccctaacaactgtgctaaaattatactcaaaaccgaagtggacgaacatctggctgtgtgccccgaagctgaacaggactgcccctttaagcattacggatgcgccgtgaccgataaaaggaggaaccttcagcagcacgagcacagtgcactcagagagcatatgcggctggtcttagagaaaaacgtccagttggaggaacagattagcgacctccacaagagccttgagcagaaggagagcaagattcagcagctggccgagaccatcaaaaaactggaaaaagaatttaagcagttcgcacagttgttcggcaaaaacggatcgtttctgccaaatattcaggtcttcgcctcgcatatcgataaatccgcctggctcgaagcccaggtgcaccagctgttgcagatggtaaatcagcagcaaaacaagttcgacctgcggccactcatggaagccgtagacactgtcaagcagaagataaccctcctggaaaataatgatcagcgcctagccgtcctggaggaggaaacaaataagcatgatacccatatcaatatccacaaggcgcagctgtctaagaatgaggagcgctttaaactgctggaggggacttgttataatggcaaactgatctggaaggttaccgattacaagatgaaaaagagagaggccgtggacggccacaccgtatcaatctttagccagagtttttatacctctcgatgtgggtaccgcttatgtgccagggcctacctcaacggggacgggagtgggcggggatcacatttatctttgtattttgtagtgatgaggggagagttcgactcccttcttcagtggccttttcggcagcgtgtgaccctcatgctgctggatcaaagtggcaagaagaatattatggaaacctttaagcctgatcccaacagcagctcattcaagaggcctgatggagagatgaacattgcgtccgggtgccctagatttgtcgcacactccgtgcttgagaatgcaaaaaatgcctatatcaaggatgacactctgttcctcaaagttgcagtagacttgacagatctggaggatctatag

SEQ ID NO: 241663 - DNA, 1674 bp, Artificial Sequence
  derived and/or modified sequence
atggcttatagtgaagagcacaaagggatgccttgtggcttcattcgccaaaattctggtaattctatcagtctggatttcgaaccatccattgagtatcagttcgtagagagactcgaggagagatacaagtgtgcattttgccactctgtgctgcacaatccacaccagactggatgcggacaccgtttttgtcagcattgtattctgtcgttgcgggagctcaatacggtgcccatctgccctgttgacaaagaggtcattaaaagtcaggaggtcttcaaggataactgctgtaagcgtgaggtgctgaacctgtacgtgtactgcagcaacgctccaggctgcaacgcaaaggttattcttggcaggtatcaggatcaccttcagcagtgcctgttccagcctgttcagtgctccaacgagaagtgccgcgagcctgtgcttaggaaggacctaaaagagcacctgagcgctagttgccagttcagaaaggagaagtgtctttactgcaagaaagacgtcgtggtcatcaacctccagaaccacgaagaaaacctttgtcctgagtacccagttttctgtccaaataattgcgccaaaatcatacttaaaaccgaagttgatgaacatctggctgtctgtcccgaagctgagcaagactgtccattcaagcactacggatgcgccgttaccgacaaacgacggaatctgcagcagcacgagcactcagctttgcgggaacacatgagactggtgttggaaaagaatgtccagttggaagaacagatctctgatctgcataaatcattggagcaaaaagagtccaagatccagcaactggcagaaaccatcaaaaagctggaaaaggaattcaaacaattcgcccaactcttcggaaagaacggctcgttcctgcctaacatacaagtgttcgcaagtcacatagataagtcggcttggcttgaagcacaggtgcaccagctgttgcaaatggtcaatcagcaacagaataagtttgatctgagacccctcatggaggctgtcgacacggtgaagcagaagattacgctcctagagaacaatgaccagcgcctagcagttctggaagaagaaaccaacaaacacgatacacacatcaacattcacaaagcacagctctccaagaatgaggagcgattcaaactcctcgagggcacctgttataacggaaaactgatatggaaggtgaccgactacaagatgaagaagcgtgaggctgtggatggacacacagtgagcatcttctcccagagcttttacacatcccgatgtgggtaccgactttgcgcccgcgcctatctgaatggtgatggttcaggccggggtagtcacctctccctctacttcgtggtgatgcgcggcgagttcgattccctgttacagtggccctttcggcagcgtgtcactctcatgttgctggaccagtcaggtaagaagaatatcatggagacatttaagccagacccgaattcctctagcttcaaaagaccagacggcgagatgaacatcgctagtggttgtccgcgttttgtggcacatagtgtgttggaaaacgctaagaacgcctacattaaagacgacaccctgttcttaaaagttgccgtcgatttgactgatctggaagacctctag

SEQ ID NO: 241664 - DNA, 1674 bp, Artificial Sequence
  derived and/or modified sequence
atggcttatagcgaagaacataagggcatgccatgcgggttcatccgacagaactctggtaactcaatcagcttggatttcgaaccaagtattgagtatcagtttgtggagcggctcgaggagcgctacaagtgtgccttttgccattcagtccttcacaacccgcaccagaccggctgcggccacagattctgccagcactgtattcttagcctccgcgagctcaacaccgtgcccatctgtcctgtggacaaagaagtgataaaaagccaggaggtgttcaaagataattgctgtaaaagagaggtgctaaatctgtacgtctattgctcaaacgcccccggctgcaatgccaaggtcatcctagggaggtaccaggaccatttgcagcagtgtctttttcagcctgtgcagtgcagcaacgaaaaatgccgggaaccggtgctgcgaaaggacctcaaagaacatttgtctgcgagttgtcagttccgcaaagaaaagtgcctgtattgcaaaaaggacgtcgttgtgattaatctgcagaatcacgaggaaaatctgtgtccagaataccctgtgttttgtcccaataactgcgctaagatcatattaaaaactgaggttgatgaacacttggctgtgtgtccagaggccgagcaagactgtcctttcaagcattacgggtgtgcagtgaccgataaacgcaggaacctgcagcagcacgagcactccgccctgagggagcacatgagactagtgctggagaagaatgtgcagctagaggaacagatctcggatttgcacaaatctctcgagcagaaggaatcgaagattcagcagctcgccgaaactattaaaaagctcgagaaggaattcaagcagtttgcccagctgtttgggaagaacggatcattcctgcccaatatccaagtcttcgcatcacacatcgacaaatccgcctggctggaagcacaggttcatcagctgctgcagatggtgaatcaacagcagaataaattcgacctgcgcccactgatggaagccgtcgacaccgtcaagcaaaagatcaccctccttgaaaacaatgaccagaggttagcagtacttgaagaagagactaacaaacatgacacccatatcaacattcataaggcgcagctaagtaaaaacgaggaacggtttaagctgctcgaaggaacctgctataatggtaagctgatttggaaagtcacggattataagatgaagaaacgtgaggctgtggatggtcatacagtgtcaattttttcccagagcttctacacttcacggtgcggttacaggctgtgcgctcgagcttatttgaacggcgacggatcaggacggggatcccatttgtccctgtactttgtcgtgatgaggggggagttcgattcactgcttcagtggcccttccggcagagagtcactctcatgttattggatcagagtggtaaaaagaacatcatggagacctttaagccggaccctaactcctcgagcttcaaacgtcccgatggtgagatgaatatcgcctccggctgtccacgtttcgtggcccacagcgttctagagaatgcgaaaaacgcctatatcaaagacgacactctctttctcaaggtcgccgttgatttgaccgatcttgaagacttatag

SEQ ID NO: 241665 - DNA, 1356 bp, Artificial Sequence
  derived and/or modified sequence
atggcctatagcgaagagcacaagggcatgccctgcgggtttatccggcagaattcaggcaactcaatcagtctggatttcgaaccttccattgagtatcaatttgtggagcgcctggaggagcgatacaagtgtgccttttgccacagcgtgctgcacaatcctcatcagacagggtgtggtcacagattttgccagcattgtatactctcactacgggagctgaacactgtccctatttgtcccgtggacaaggaggtgatcaagtcacaggaggtcttcaaagataattgctgcaaacgagaggtgctcaacctttatgtctactgttcaaacgctcctgggtgtaacgcaaaggtcatacttggaagataccaagataaaagacgaaacctgcagcagcacgagcacagtgctttgagggaacacatgaggctcgtcctcgagaaaaatgttcaactggaggaacagatctccgacctgcacaagtcacttgaacagaaggaatccaaaatccagcagttagcagagacgatcaagaagctggaaaaagagttcaagcagttcgctcagttgtttggcaagaacggtagctttttaccaaacattcaggtgttcgctagtcatatagacaagtccgcgtggctcgaggcacaggtccaccagctgctgcagatggtgaaccagcagcagaacaagtttgacttaagaccattgatggaggccgtggatactgtgaagcagaagataaccctgctggaaaataacgatcaaaggcttgctgtgctcgaggaagagacaaacaaacacgatacacacattaatattcataaggctcaactctccaagaatgaagaacggttcaaactcctggaaggtacatgctataacggaaaattgatatggaaagtgactgactacaagatgaagaaaagggaggccgttgatgggcacacagtctcaattttttctcaaagtttctatacttctagatgtgggtatcgcttgtgcgctcgcgcttacctgaatggggatggctcagggaggggttcccatctatccttgtacttcgtggtgatgagaggcgaattcgactccttgctgcaatggcccttccgccagagggtgacgctgatgctgctggaccagtccggcaaaaagaatattatggaaaccttcaaaccagatccaaattccagttcatttaaacgtccggacggcgaaatgaatattgcctctggttgtcctcgcttcgtggctcattctgtgctggagaacgcgaagaacgcctatataaaggatgatacactctttttgaaggtcgctgtcgacctgaccgacctcgaggacctatag

SEQ ID NO: 241666 - DNA, 1674 bp, Artificial Sequence
  derived and/or modified sequence
atggcctacagcgaggagcacaagggcatgccctgtggcttcatccggcagaacagcggcaacagcatcagcctggactttgagcccagcattgagtaccagtttgtggagcggctggaggagcgctacaagtgtgccttctgccacagcgtgctgcacaacccccaccagacaggctgcggccaccgcttctgccagcactgcatcctgagcctgcgggagctgaacacagtgcccatctgccctgtggacaaggaggtgatcaagagccaggaggtgttcaaggacaactgctgcaagcgggaggtgctgaacctgtatgtgtactgcagcaatgcccctggctgcaatgccaaggtgatcctgggccgctaccaggaccacctgcagcagtgcctcttccagcctgtgcagtgcagcaatgaaaaatgtcgggagcctgtgctgaggaaggacctgaaggagcacctgagcgccagctgccagttcaggaaggagaagtgcctgtactgcaagaaggatgtggtggtgatcaacctgcagaaccacgaggagaacctgtgcccagagtaccctgtgttctgccccaacaactgtgccaagatcatcctgaagacagaggtggatgagcacctggccgtgtgcccagaggccgagcaggactgccccttcaagcactacggctgtgctgtgacagacaagagaagaaacctgcagcagcacgagcacagcgccctgcgggagcacatgaggctggtgctggagaagaatgtgcagctggaggagcagatcagtgacctgcacaagagcctggagcagaaggagagcaagatccagcagctggccgagaccatcaagaagctggagaaggagttcaagcagtttgcccagctgtttgggaagaatggcagcttcctgcccaacatccaggtgtttgccagccacatcgacaagagcgcctggctggaggcccaggtgcaccagctgctgcagatggtgaaccagcagcagaacaagtttgacctgcggcccctgatggaggccgtggacacagtgaagcagaagatcaccctgctggagaacaatgaccagaggctggccgtgctggaggaggagaccaacaagcatgacacccacatcaacatccacaaggcccagctgagcaagaatgaggagcgcttcaagctgctggagggcacctgctacaacgggaagctgatctggaaggtgacagactacaagatgaagaagcgggaggccgtggatggccacacagtgtccatcttcagccagagcttctacaccagccgctgtggctaccgcctgtgtgcccgggcctacctgaatggagatggcagcggccggggcagccacctgagcctgtactttgtggtgatgagaggagaatttgacagcctgctgcagtggcccttccggcagagggtgaccctgatgctgctggaccagagcggcaagaagaacatcatggagaccttcaagccagaccccaacagcagcagcttcaagaggccagatggagagatgaacatcgccagcggctgccccaggtttgtggcccacagcgtgctggagaatgccaagaatgcctacatcaaggatgacaccctcttcctgaaggtggccgtggacctgacagacctggaggacctgtag

SEQ ID NO: 241667 - DNA, 1356 bp, Artificial Sequence
  derived and/or modified sequence
atggcctacagcgaggagcacaagggcatgccctgtggcttcatccggcagaacagcggcaacagcatcagcctggactttgagcccagcattgagtaccagtttgtggagcggctggaggagcgctacaagtgtgccttctgccacagcgtgctgcacaacccccaccagacaggctgcggccaccgcttctgccagcactgcatcctgagcctgcgggagctgaacacagtgcccatctgccctgtggacaaggaggtgatcaagagccaggaggtgttcaaggacaactgctgcaagcgggaggtgctgaacctgtatgtgtactgcagcaatgcccctggctgcaatgccaaggtgatcctgggccgctaccaggacaagagaagaaacctgcagcagcacgagcacagcgccctgcgggagcacatgaggctggtgctggagaagaatgtgcagctggaggagcagatcagtgacctgcacaagagcctggagcagaaggagagcaagatccagcagctggccgagaccatcaagaagctggagaaggagttcaagcagtttgcccagctgtttgggaagaatggcagcttcctgcccaacatccaggtgtttgccagccacatcgacaagagcgcctggctggaggcccaggtgcaccagctgctgcagatggtgaaccagcagcagaacaagtttgacctgcggcccctgatggaggccgtggacacagtgaagcagaagatcaccctgctggagaacaatgaccagaggctggccgtgctggaggaggagaccaacaagcatgacacccacatcaacatccacaaggcccagctgagcaagaatgaggagcgcttcaagctgctggagggcacctgctacaacgggaagctgatctggaaggtgacagactacaagatgaagaagcgggaggccgtggatggccacacagtgtccatcttcagccagagcttctacaccagccgctgtggctaccgcctgtgtgcccgggcctacctgaatggagatggcagcggccggggcagccacctgagcctgtactttgtggtgatgagaggagaatttgacagcctgctgcagtggcccttccggcagagggtgaccctgatgctgctggaccagagcggcaagaagaacatcatggagaccttcaagccagaccccaacagcagcagcttcaagaggccagatggagagatgaacatcgccagcggctgccccaggtttgtggcccacagcgtgctggagaatgccaagaatgcctacatcaaggatgacaccctcttcctgaaggtggccgtggacctgacagacctggaggacctgtag

SEQ ID NO: 241668 - DNA, 1674 bp, Artificial Sequence
  derived and/or modified sequence
atggcctacagcgaggagcacaagggcatgccctgcggcttcatccggcagaatagcgggaactccataagtctagacttcgagccctctatagagtatcaattcgtagagcggcttgaagaacgctacaaatgtgccttttgtcatagtgtgctccacaaccctcatcaaaccgggtgcgggcatcgcttttgccagcactgtatcttgtccctgcgcgaactgaatactgtgcctatttgccccgtggataaagaggtgatcaaatctcaggaagtatttaaagacaactgttgcaaaagagaggtgcttaacctctatgtctactgtagtaacgccccaggatgcaatgccaaggttattctgggccgatatcaggatcacctccaacagtgcctgtttcagcctgttcagtgctcaaatgaaaagtgtagggagcccgttctacgaaaggacctgaaggagcacttaagcgcttcatgtcagttccgcaaagaaaagtgtctgtattgtaaaaaggacgtggtggtcattaacttgcaaaaccacgaggagaacctctgtccagagtatcctgttttctgcccgaataattgtgccaaaatcattcttaaaaccgaagttgatgaacacctggcggtttgtccagaggcggagcaagactgcccattcaaacactacggttgtgcggtgactgacaagagacggaacctgcagcagcacgagcatagcgccctcagagagcatatgaggctcgtgctggaaaagaacgtgcagctggaagagcaaatctcagaccttcataaatcactcgagcaaaaagagagtaaaatccagcagctggcagaaaccattaaaaagctcgaaaaagaattcaaacaatttgcccagctgtttggaaaaaatggttctttcctgcccaatatacaggtgtttgcctcccatatcgacaaaagcgcctggctggaggcgcaggtccaccagctgctccagatggttaaccaacaacagaataagttcgacttacgacctctgatggaagctgtggacaccgtaaaacagaaaatcacgttgcttgagaataatgatcagcgactggcggttctagaggaagagacaaacaaacatgatacacacatcaacattcataaagcgcagcttagtaagaacgaagagcgattcaagctcctggagggcacctgctataacggtaaactcatttggaaggtgacggactacaagatgaaaaagagggaggctgtggacggccacaccgtcagtatcttctcccagtctttttacaccagtcgctgcggctataggctgtgcgcacgggcgtatttaaacggcgacggcagcgggcgtggctcccacttgagtctgtactttgtggtaatgcgaggcgagttcgattcactcctccagtggcccttcaggcagcgcgtcacactaatgttgctcgatcagagtgggaagaagaacattatggaaacgttcaagcctgatccgaatagcagctcttttaaacgcccagacggcgagatgaacatcgcctcaggatgtccaaggtttgttgcacatagcgtacttgagaatgccaaaaacgcttacattaaagatgacacgttgttcctaaaggtcgccgtagatctcactgacctcgaggatctctag

SEQ ID NO: 241669 - DNA, 1674 bp, Artificial Sequence
  derived and/or modified sequence
atggcctacagcgaggagcacaagggcatgccctgcggcttcatcagacaaaactccggtaacagcataagtctcgattttgaaccctcaatcgagtaccaatttgtcgagcggttggaggagagatacaagtgcgctttctgccactccgttttacacaacccacaccagactggttgtggccaccgcttttgtcagcactgcatcttaagccttcgtgaattaaacaccgtccccatctgtcctgtggataaggaagtcattaaatcccaagaggtgttcaaggacaattgctgtaaacgcgaagtgcttaatttgtatgtctattgcagcaatgctccgggctgtaatgctaaagtcatcctgggacggtaccaggatcatttgcagcagtgtctgtttcagcccgtgcagtgtagtaacgagaagtgtcgtgagcctgttctcaggaaagacttaaaggagcacctgtcggcctcctgtcagttccgcaaggagaaatgtctgtattgtaaaaaagatgtcgtagttataaatctgcagaatcacgaagaaaatctgtgtcctgagtaccctgtgttctgtccgaacaattgcgcaaaaatcattctgaaaacagaagtggacgaacacctggccgtctgcccggaggccgagcaggactgcccctttaaacattatgggtgtgctgtaacggacaagcggcggaacctccaacagcatgagcattcagcactcagagaacatatgcggctggtgttagagaaaaatgtgcagttggaagagcagattagcgacctgcacaagagcctggagcagaaggagagcaagatccagcagctcgccgagactatcaagaagctggaaaaggaattcaagcaattcgctcagttgttcggaaagaatggctcctttctgcccaatatacaggtcttcgcaagtcacatcgacaagtcagcctggctggaagcccaggtgcaccagcttctgcaaatggtcaatcaacagcagaacaagttcgatcttcgccctctgatggaagccgtcgatacagtgaaacagaagattactctcctcgaaaacaacgaccagcggcttgcagtactggaggaagagaccaataagcatgatacccacataaacattcataaggcgcagctgagcaagaacgaggagaggttcaagctcctggaagggacatgctacaacgggaaacttatatggaaggtaaccgactacaagatgaagaagcgtgaggctgtggacggacacactgtctcaatctttagtcagtctttctatacctctcgctgtggatatcgcttatgtgctcgcgcctacctgaacggggatggaagtggccgcggaagtcacttgagtttatatttcgtggtcatgcggggcgaattcgacagcttgctgcagtggcctttcaggcagcgagtgacactgatgctcctcgaccagagcgggaagaagaatattatggagaccttcaagcctgatcccaactcttcctcctttaagaggcctgacggggaaatgaacatagccagcggatgtccacgctttgtggcacatagcgtgctggagaatgctaaaaatgcctacatcaaagacgataccttattcttaaaagtggccgtcgacctcacagaccttgaggacctgtag

SEQ ID NO: 241670 - DNA, 1674 bp, Artificial Sequence
  derived and/or modified sequence
atggcctacagcgaggagcacaagggcatgccctgcggcttcatccgacagaatagcgggaactccatctcactggatttcgaaccatcaatagagtaccagtttgtagaacgccttgaagaacgttataagtgcgcattttgtcattctgttctgcataatccgcaccagaccggatgtgggcaccgattctgccaacactgcatcttgagcctgcgagagctgaacaccgtgcctatttgcccagtggataaggaggtaatcaagagccaggaagtctttaaggacaactgctgcaaacgggaggtcttaaatctctacgtctattgcagtaacgcccccgggtgtaatgccaaggtgatcctgggcaggtaccaagatcaccttcaacagtgtcttttccagcccgttcagtgctctaacgagaaatgccgggaaccagtgcttagaaaagatctgaaagagcacctgagcgccagctgccagtttaggaaggagaagtgtttgtattgcaagaaagatgtggtggtgatcaacctccagaatcacgaggaaaacctgtgccccgaatatccagtgttttgtcccaataattgtgcaaaaatcatcctcaaaaccgaggtcgatgagcacctggccgtctgtcccgaagctgagcaggactgccccttcaaacactacgggtgtgccgtgactgataaaagacgaaatctgcagcagcatgaacacagtgcactgcgagaacacatgcgcttagtcctggagaaaaatgtccagctggaggaacagatatcagatctccacaagagcctagagcaaaaagaatccaaaattcagcagctggccgagactattaaaaagctggaaaaagagttcaagcagttcgcacagctgtttggaaaaaacggctccttcttacccaatatccaggtattcgcatcacatatcgacaaatccgcttggcttgaggcccaggtgcatcagctgcttcagatggtgaaccagcagcaaaacaaattcgacttgcgcccgctcatggaagctgtggataccgtaaaacagaagattactctcctggagaacaacgatcagaggctcgccgttcttgaggaagaaaccaataaacacgatacacacatcaacatccacaaagcacagctcagcaagaatgaagaacgcttcaaattactggaagggacttgctataacggtaaactgatctggaaagtcaccgattacaaaatgaaaaaaagggaggccgttgacggacacacagtgtccatcttttctcagtccttttatacttcccgctgtggctatcgattgtgcgctcgtgcttacttgaatggggacgggtcgggcaggggcagtcatctgagcttgtactttgtggtgatgaggggcgaatttgattctctactgcaatggcctttccgccagagggtgacgctcatgctcttagaccagagcggaaagaagaacatcatggagactttcaaacctgaccctaatagcagctcctttaagaggcctgacggtgaaatgaatatagcaagcggctgcccccgttttgtcgcccactccgtgctggaaaatgctaagaatgcttatataaaagatgacacactttttttgaaagtcgctgtcgatctgaccgacctcgaggatttgtag

SEQ ID NO: 241671 - DNA, 1356 bp, Artificial Sequence
  derived and/or modified sequence
atggcctacagcgaggagcacaagggcatgccctgcggcttcatcaggcaaaatagtggaaattcgattagtcttgacttcgaaccttccatcgaataccagtttgttgagcggctggaagaaagatataaatgtgccttttgccacagcgtactgcacaacccacaccagacagggtgtgggcataggttttgtcagcattgcattctgtcactgcgcgagctgaatactgtgcctatctgccccgtagacaaagaagtgatcaaaagccaggaggtgtttaaggacaactgctgtaagagagaggtgctaaacttgtacgtgtactgcagcaatgcgcctgggtgtaacgcaaaggtgatccttggtcgttatcaggataaaagaaggaacctccagcagcatgaacatagcgcgctgcgcgaacatatgcgcttggtcttagagaaaaacgttcagttagaagagcagattagcgatctgcacaaaagtctggagcagaaggagagtaagatacagcagctggccgagacgatcaagaaattggagaaagagtttaaacaatttgcccaactgttcggaaaaaacgggagtttcctgcccaatatccaggtctttgcttcacatattgataaatctgcttggctggaggctcaggttcatcagctattgcaaatggtgaatcagcagcagaataagttcgacctgcgccccctgatggaggctgtcgatactgtgaagcagaagataaccctgctggagaataatgaccaacgactggccgtgctggaagaggagacaaataagcacgatacccacattaatattcacaaagctcaattgtctaaaaatgaagaaagattcaagctcctggaagggacatgctacaatggcaagctgatttggaaggtaactgactacaagatgaagaagcgtgaggcagtcgacgggcacacagtgtcgatcttctcgcagtcgttttacacttcccgttgcggatatagactgtgcgctcgggcttaccttaatggggacgggagcggccgaggcagtcacctgtccctgtacttcgtggttatgcgaggtgaatttgactcattactacaatggcctttccgccagcgggtgactcttatgctgttagaccagagcggcaagaaaaatattatggagaccttcaagccagatccaaactccagctcattcaagcggcctgacggagaaatgaatattgcctccgggtgtcccaggtttgtcgcccactctgtcctggaaaacgccaaaaacgcctacataaaggacgacacccttttcttgaaggtcgctgtcgatctgactgatctcgaggacctttag

SEQ ID NO: 241672 - DNA, 1674 bp, Artificial Sequence
  derived and/or modified sequence
atggcctacagcgaagaacacaaagggatgccgtgtgggttcatacgccagaatagcggtaattccatctctctagactttgaaccatcaatcgagtatcagttcgttgagagactggaagagaggtataagtgcgctttttgtcacagcgtgttacataatccccatcaaacgggttgcggccatcgcttctgccagcattgtatcctaagcctgcgcgagctgaacacggtgccaatatgtccggtggataaggaagtgattaaaagccaagaagtgtttaaagacaactgttgtaagcgcgaagtgttaaatctgtacgtctactgcagtaatgcgcctggatgcaatgcaaaggtgatattggggagatatcaagaccacttacagcagtgcctgtttcagccggttcaatgcagcaatgagaagtgccgcgaaccagtactgagaaaggaccttaaagaacacttgagcgcatcctgtcagttcaggaaagagaagtgcctgtattgtaagaaagacgtggtggttattaatctccaaaatcacgaggagaacctgtgtcccgagtacccagtgttctgccccaacaattgtgcaaaaatcatcctaaaaaccgaagtcgatgagcatctcgctgtgtgtccagaggccgagcaagattgtcctttcaaacactacgggtgtgctgtgactgacaagcggagaaatttgcaacagcatgagcacagcgcgctgcgcgagcatatgagactggtcttggagaaaaacgtgcagctggaggagcagatttccgacttgcacaagtccctggaacagaaggagtcgaaaattcaacagctggccgaaacaataaagaagttggaaaaggaattcaaacaatttgcccaattgttcggcaagaacggatcttttttacctaatatccaagtcttcgcttctcatatagataagagcgcatggctcgaggctcaggtccaccagttgttacaaatggtcaatcagcagcagaacaagtttgacctccggccactaatggaagctgttgacactgtaaagcaaaagatcacccttttggaaaataatgaccagcggcttgctgttttagaggaggagacaaataagcacgatacacatattaatattcataaggcccaactgtctaagaatgaggagcgcttcaagctcctagaaggtacctgctacaatggaaagctaatctggaaagtaaccgattacaagatgaaaaagcgggaagccgtggatgggcacacggtgtccattttttctcaatccttttacacaagcagatgcgggtacaggctgtgcgctcgagcatacctcaatggggacggctctggtcggggaagccacctgtccctatattttgtggtaatgcgcggtgagttcgattcccttttacagtggccgttcaggcaacgtgtgacccttatgctgttagatcagtctggcaagaaaaacatcatggaaacgtttaaacctgaccccaatagctcatcattcaagcgaccggatggcgaaatgaacattgcctcaggctgcccccgatttgtagcacactctgtactggagaatgccaaaaacgcttatattaaagatgacactttgtttcttaaagtggccgtggacctgacagacctcgaagatttatag

SEQ ID NO: 241673 - DNA, 1674 bp, Artificial Sequence
  derived and/or modified sequence
atggcttacagcgaagaacataaaggcatgccctgtggatttattaggcagaacagtgggaattcaatttcactggacttcgagcctagtattgaatatcagttcgtggagaggctggaggaaagatataaatgtgctttctgtcatagtgtgctacataaccctcatcagacaggttgtggccatcggttttgccagcactgcatcctctcactgcgggagctcaacacagtccctatctgccccgtggacaaagaggtaatcaaatcacaggaagtgttcaaggataattgctgcaagcgggaggttttaaacttatacgtctactgcagcaatgctcccggttgcaatgcaaaggtgatactggggaggtaccaagaccacttgcagcaatgcctttttcaacccgtccaatgctccaatgaaaaatgtcgggagccggttcttaggaaggacttgaaagaacatctgtcagcctcttgccaattccgcaaggaaaagtgtctatactgtaaaaaagacgtcgtggtcattaatcttcagaaccatgaggagaacctgtgccccgagtacccggtgttttgtcctaacaattgcgccaagatcattctgaaaaccgaagtggacgagcatttggccgtgtgcccagaagctgaacaggattgtccattcaagcactacgggtgtgccgtcacagacaagcgcagaaatctccagcaacacgagcactctgctctccgcgaacacatgagactcgtgctcgaaaagaatgttcagctggaagagcagatcagcgacctgcataagagcctggagcagaaagagtcaaagattcagcaactcgctgagaccattaagaaactagagaaagaatttaagcagtttgcccagcttttcgggaaaaacggaagcttcctcccaaatattcaggtattcgcaagccatatagacaagtccgcatggctggaagctcaggtgcaccagctgttacagatggtgaaccagcagcagaataagtttgacctgagacctttgatggaggctgttgacactgtaaaacagaaaatcactctgctggagaataacgaccaacggctggcggtgctggaagaggagaccaacaaacatgacacccacattaacatacacaaagcccagctttccaagaacgaggagcgatttaagttactggaggggacatgctataacggcaaactcatctggaaagtaaccgattacaaaatgaaaaagcgggaggccgttgacggccacaccgttagtattttttctcaatccttctatacgagtagatgcggttaccggctgtgcgctagggcctatttgaatggggacggctccggcagaggctcccacctctctctatactttgtggtgatgcgcggagaattcgatagtctcctgcagtggccctttagacagcgggtcacacttatgctacttgaccagtccggcaagaagaacattatggaaacatttaagcccgacccaaactcctcctcttttaagcgacctgacggcgagatgaatatagcaagcgggtgccctaggttcgtggctcacagtgtcctggaaaatgccaagaatgcatacatcaaggacgacacattgttcctgaaggtggccgtggatttgactgacctggaggacctttag

SEQ ID NO: 241674 - DNA, 1674 bp, Artificial Sequence
  derived and/or modified sequence
atggcgtacagtgaagagcataaggggatgccctgcggcttcattcgacagaactcggggaacagtatatcactggacttcgagcctagtatagaatatcagttcgtcgagaggctagaggagcgctacaaatgcgcattttgtcacagcgttctgcacaatccccaccagaccgggtgtggccatagattctgccagcattgcatcctctcgttacgtgaattgaacacagtgccaatttgtccggtggataaagaagttattaagtctcaggaagtgtttaaagacaattgttgtaagcgtgaagtgttgaacttatatgtgtactgtagtaacgcaccgggatgtaacgccaaggtaattctcgggaggtatcaggaccacctgcagcagtgcctgttccagccagttcagtgctccaacgaaaagtgcagagagcctgtgcttagaaaggatctgaaggaacacctcagtgcgagctgtcagtttaggaaagaaaagtgcctgtactgtaaaaaagatgtggtagtgattaacctacagaaccatgaggagaatttgtgtcctgagtatcctgtgttttgtcctaataactgcgctaagatcatcctcaaaacagaagtggatgaacatctggctgtgtgccctgaggcagagcaggattgccctttcaaacattatggctgtgccgttacagacaaaaggaggaacctgcagcagcatgaacactcagccctgagagagcatatgagattggtactggaaaagaacgtgcagctagaggagcagatcagtgatctccataagtctctggaacagaaggagagtaagattcagcagctggctgagacgataaaaaaattggagaaagaattcaagcagttcgctcagctgttcgggaaaaatgggtcctttctacccaatatacaggtcttcgcatcccacattgacaaaagcgcatggctagaggcccaggttcaccaactgcttcagatggtcaaccaacaacaaaacaaattcgacttaagaccacttatggaagccgtggacaccgtaaaacagaaaattacacttcttgaaaataacgatcagcggctcgcagtgttggaggaggaaaccaataaacatgatacccatataaatattcataaggctcagctttcaaagaatgaagaacgatttaagctcctggaaggtacctgttacaatgggaagctgatttggaaagttaccgactataagatgaagaagagggaggccgttgacggacacacggtgagcatcttttctcagtctttttacaccagccgctgtggttacagactatgcgccagagcctacctgaacggcgacggctcgggtcgcggatcccatttaagcttgtacttcgtggtgatgagaggtgagttcgatagcctattgcagtggcctttccggcagcgtgttaccctcatgcttttggatcagtccggtaaaaaaaatataatggagaccttcaagccagacccaaatagctcctcatttaaaaggccagacggcgagatgaacatagcttccggctgcccgaggtttgttgctcacagcgtcctggaaaacgcgaagaatgcctatatcaaggacgacacgctcttcctcaaggtagctgtcgacttgacagatttggaagacctgtag

SEQ ID NO: 241675 - DNA, 1356 bp, Artificial Sequence
  derived and/or modified sequence
atggcttactctgaggaacataaaggaatgccttgcgggttcatccggcaaaattctggaaattctattagtctggacttcgagccgagtattgaataccagttcgtagaaagattggaggaacgctataagtgcgctttctgccattcagttctgcataaccctcaccaaaccggctgcgggcaccgattctgccagcactgcattttatccttgcgagaactcaatacagttcccatttgtcccgtggataaagaagttatcaagtctcaggaggtgttcaaagataattgttgcaagcgcgaagtgctcaacctgtatgtctattgcagcaacgctccaggatgtaacgcgaaagtgatactcggcagataccaagataaacgaaggaatctccagcagcacgaacacagcgcactgcgagagcatatgcggttggtgcttgaaaagaacgttcaactggaggagcagatttccgacctccacaagtctcttgaacagaaggagtccaaaatccaacagctggccgaaacaatcaaaaaactggagaaggaatttaaacagtttgcacagctgtttggcaagaacgggagcttcctgcccaatattcaagtgttcgcctctcatatcgataagagcgcctggcttgaggctcaagtacaccagctgcttcagatggtgaaccagcagcaaaacaaattcgacctgcgcccactaatggaagctgtggacaccgtcaaacagaaaattacgctgctcgaaaacaacgaccaaagactggcagtgcttgaagaagaaaccaacaagcatgatacccacattaatattcataaggctcagctttctaagaacgaggagcgttttaaactgctggagggaacctgttataatggaaaacttatttggaaggtgaccgattacaaaatgaagaagcgggaggccgtagacgggcacacagtgtccattttctctcagagcttctacacctctagatgcggatacaggctctgtgctcgtgcatacctgaacggggatggctcaggtcggggaagtcacttatccttgtactttgttgtcatgaggggggaatttgatagccttctccagtggcccttccggcagcgagtgacgctgatgcttctggaccagagcgggaaaaagaatatcatggagacctttaagcctgatcccaattcttcgtctttcaagcgtccagacggggagatgaacatcgctagcggctgccctcggtttgttgcgcattcggtcctggaaaatgcaaaaaatgcgtatatcaaggatgatacccttttcctgaaggtcgccgttgacctgactgatctggaggacctgtag

SEQ ID NO: 241676 - DNA, 3972 bp, Artificial Sequence
  derived and/or modified sequence
gcagcagccgcgcctgcagaccggcctcgcggagcccgcgcgccgagccccacaatggcttattcagaagagcataaaggtatgccctgtggtttcatccgccagaattccggcaactccatttccttggactttgagcccagtatagagtaccagtttgtggagcggttggaagagcgctacaaatgtgccttctgccactcggtgcttcacaacccccaccagacaggatgtgggcaccgcttctgccagcactgcatcctgtccctgagagaattaaacacagtgccaatctgccctgtagataaagaggtcatcaaatctcaggaggtttttaaagacaattgttgcaaaagagaagtcctcaacttatatgtatattgcagcaatgctcctggatgtaatgccaaggttattctgggccggtaccaggatcaccttcagcagtgcttatttcaacctgtgcagtgttctaatgagaagtgccgggagccagtcctacggaaagacctgaaagagcatttgagtgcatcctgtcagtttcgaaaggaaaaatgcctttattgcaaaaaggatgtggtagtcatcaatctacagaatcatgaggaaaacttgtgtcctgaatacccagtattttgtcccaacaattgtgcgaagattattctaaaaactgaggtagatgaacacctggctgtatgtcctgaagctgagcaagactgtccttttaagcactatggctgtgctgtaacggataaacggaggaacctgcagcaacatgagcattcagccttacgggagcacatgcgtttggttttagaaaagaatgtccaattagaagaacagatttctgacttacacaagagcctagaacagaaagaaagtaaaatccagcagctagcagaaactataaagaaacttgaaaaggagttcaagcagtttgcacagttgtttggcaaaaatggaagcttcctcccaaacatccaggtttttgccagtcacattgacaagtcagcttggctagaagctcaagtgcatcaattattacaaatggttaaccagcaacaaaataaatttgacctgagacctttgatggaagcagttgatacagtgaaacagaaaattaccctgctagaaaacaatgatcaaagattagccgttttagaagaggaaactaacaaacatgatacccacattaatattcataaagcacagctgagtaaaaatgaagagcgatttaaactgctggagggtacttgctataatggaaagctcatttggaaggtgacagattacaagatgaagaagagagaggcggtggatgggcacacagtgtccatcttcagccagtccttctacaccagccgctgtggctaccggctctgtgctagagcatacctgaatggggatgggtcagggagggggtcacacctgtccctatactttgtggtcatgcgaggagagtttgactcactgttgcagtggccattcaggcagagggtgaccctgatgcttctggaccagagtggcaaaaagaacattatggagaccttcaaacctgaccccaatagcagcagctttaaaagacctgatggggagatgaacattgcatctggctgtccccgctttgtggctcattctgttttggagaatgccaagaacgcctacattaaagatgacactctgttcttgaaagtggccgtggacttaactgacctggaggatctctagtcactgttatggggtgataagaggacttcttggggccagaactgtggaggagagcacatttgattatcatattgacctggatttagactcaaagcacatttgtatttgcctttttccttaacgtttgaagtcagtttaaaacttctgaagtgctgtctttttacattttactctgtcccagtttgaaacttaaaactcttagaatattctcttattatttatatttttatatttcttgaaagatggtaagtttcttgaagtttttggggcgtttctcttttactggtgcttagcgcagtgtctcgggcactctaaatattgagtgttatggaggacacagaggtagcagaatcccagttgaaaatgttttgatattttattgtttggcctattgattctagacctggccttaagtctgcaaaagccatctttataaggtaggctgttccagttaagtagtgggtgatgtagttacaaagataatatgctcagtttggacctttttttcagttaaatgctaaatatatgaaaattactatacctctaagtattttcatgaaattcaccagcagtttgcaagcacagttttgcaaggctgcataagaactggtgaatggggtaagcattttcattcttcctgctgaagtaaagcagaaagtactgcatagtatatgagatatagccagctagctaaagttcagattttgttaggttcaaccctatgaaaaaaactattttcataggtcaaaaatggtaaaaaattagcagtttcataagattcaaccaaataaatatatatatacacacacacatacatatacacctatatatgtgtgtatacaaacagttcgaatgtattttggtgacagtaataaatcaatgtgaggatggatagaatttagtatatgatagagaaaatgtcataaatggataaaaggaatttacaacttgaggagaaaacctttacaatttcctatgggtgtcagaagtactctcagcgaaaactgatggctaaaacagtatctactattctctgataactttttttttgagacagagtttcattgtcacccaggctggagtacagtggcatgatctcagctcactgcaaactctgcctcccgaattcaagtgattctcctgcctcagcctcctgagtagctgggattacaggcgcccgtcaccacacccaggtaatttttgtatttttagtagagacggagttttgccatgttggccaagctgatctcaaactcctgacctcaagtgatctgcccgcctcggcctcccaaagtgctgagattacaggcatgacccaccgcgtcaagcctctgacaactattgaatttgtaagctgctatgcaaatgggcatttatataaacttgtgatgtttcttgtcagaattctgagtactctgtgaagaacagaaatgatcatattcttatgcatctatctgtatgggtctgaaggtgtatatacaaactgagatgagtccttatgactcttgataagcctgagtttaacaacaacaaaaatgccaagttgtcctgagcccttctgcgttgttatgccacttccctactgctcatatgcacgctggctcccctgggcacgcaaggatgagtatgggccatgggcccctgtagagctgcttacctggtgatgaccatgcaccttacaatttctgaacagttaaccctatagaagcatgctttatatgagtgtcttctgggaagaggaaccttcttaatctcttctgtgggattttcaaaatgctaaagactcacactgcagcaatcatcccagatgattaaattcaaagaaataggttcacaacaggaatatactgaagaactagagtgtcactgctggtgaactgtggcacggttgctcaacacatcacctcggacaaattcaggaagcatttctttagcccacaagtccagacccaggtgctctgtatgtttgtttttaatattcatcatatccaagttcactctgtcttcctgagcagtggaagatcatattgctgtaacttcttttaagtagttgatgtggaaaacattttaaagtgaatttgtcaaaatgctggttttgtgttttatccaacttttgtgcatatatataaagtatgtcatggcatggtttgcttaggagttcagagttccttcatcatcgaaatagtgattaagtgatcccagaacaaggaatactagagtaaaaagcacctctttttcacaaaa

SEQ ID NO: 241677 - DNA, 3972 bp, Artificial Sequence
  derived and/or modified sequence
agacgcacgtgagggaaatcagatgactggacttgtagatactaacggttctgaagcggaatggcttattcagaagagcataaaggtatgccctgtggtttcatccgccagaattccggcaactccatttccttggactttgagcccagtatagagtaccagtttgtggagcggttggaagagcgctacaaatgtgccttctgccactcggtgcttcacaacccccaccagacaggatgtgggcaccgcttctgccagcactgcatcctgtccctgagagaattaaacacagtgccaatctgccctgtagataaagaggtcatcaaatctcaggaggtttttaaagacaattgttgcaaaagagaagtcctcaacttatatgtatattgcagcaatgctcctggatgtaatgccaaggttattctgggccggtaccaggatcaccttcagcagtgcttatttcaacctgtgcagtgttctaatgagaagtgccgggagccagtcctacggaaagacctgaaagagcatttgagtgcatcctgtcagtttcgaaaggaaaaatgcctttattgcaaaaaggatgtggtagtcatcaatctacagaatcatgaggaaaacttgtgtcctgaatacccagtattttgtcccaacaattgtgcgaagattattctaaaaactgaggtagatgaacacctggctgtatgtcctgaagctgagcaagactgtccttttaagcactatggctgtgctgtaacggataaacggaggaacctgcagcaacatgagcattcagccttacgggagcacatgcgtttggttttagaaaagaatgtccaattagaagaacagatttctgacttacacaagagcctagaacagaaagaaagtaaaatccagcagctagcagaaactataaagaaacttgaaaaggagttcaagcagtttgcacagttgtttggcaaaaatggaagcttcctcccaaacatccaggtttttgccagtcacattgacaagtcagcttggctagaagctcaagtgcatcaattattacaaatggttaaccagcaacaaaataaatttgacctgagacctttgatggaagcagttgatacagtgaaacagaaaattaccctgctagaaaacaatgatcaaagattagccgttttagaagaggaaactaacaaacatgatacccacattaatattcataaagcacagctgagtaaaaatgaagagcgatttaaactgctggagggtacttgctataatggaaagctcatttggaaggtgacagattacaagatgaagaagagagaggcggtggatgggcacacagtgtccatcttcagccagtccttctacaccagccgctgtggctaccggctctgtgctagagcatacctgaatggggatgggtcagggagggggtcacacctgtccctatactttgtggtcatgcgaggagagtttgactcactgttgcagtggccattcaggcagagggtgaccctgatgcttctggaccagagtggcaaaaagaacattatggagaccttcaaacctgaccccaatagcagcagctttaaaagacctgatggggagatgaacattgcatctggctgtccccgctttgtggctcattctgttttggagaatgccaagaacgcctacattaaagatgacactctgttcttgaaagtggccgtggacttaactgacctggaggatctctagtcactgttatggggtgataagaggacttcttggggccagaactgtggaggagagcacatttgattatcatattgacctggatttagactcaaagcacatttgtatttgcctttttccttaacgtttgaagtcagtttaaaacttctgaagtgctgtctttttacattttactctgtcccagtttgaaacttaaaactcttagaatattctcttattatttatatttttatatttcttgaaagatggtaagtttcttgaagtttttggggcgtttctcttttactggtgcttagcgcagtgtctcgggcactctaaatattgagtgttatggaggacacagaggtagcagaatcccagttgaaaatgttttgatattttattgtttggcctattgattctagacctggccttaagtctgcaaaagccatctttataaggtaggctgttccagttaagtagtgggtgatgtagttacaaagataatatgctcagtttggacctttttttcagttaaatgctaaatatatgaaaattactatacctctaagtattttcatgaaattcaccagcagtttgcaagcacagttttgcaaggctgcataagaactggtgaatggggtaagcattttcattcttcctgctgaagtaaagcagaaagtactgcatagtatatgagatatagccagctagctaaagttcagattttgttaggttcaaccctatgaaaaaaactattttcataggtcaaaaatggtaaaaaattagcagtttcataagattcaaccaaataaatatatatatacacacacacatacatatacacctatatatgtgtgtatacaaacagttcgaatgtattttggtgacagtaataaatcaatgtgaggatggatagaatttagtatatgatagagaaaatgtcataaatggataaaaggaatttacaacttgaggagaaaacctttacaatttcctatgggtgtcagaagtactctcagcgaaaactgatggctaaaacagtatctactattctctgataactttttttttgagacagagtttcattgtcacccaggctggagtacagtggcatgatctcagctcactgcaaactctgcctcccgaattcaagtgattctcctgcctcagcctcctgagtagctgggattacaggcgcccgtcaccacacccaggtaatttttgtatttttagtagagacggagttttgccatgttggccaagctgatctcaaactcctgacctcaagtgatctgcccgcctcggcctcccaaagtgctgagattacaggcatgacccaccgcgtcaagcctctgacaactattgaatttgtaagctgctatgcaaatgggcatttatataaacttgtgatgtttcttgtcagaattctgagtactctgtgaagaacagaaatgatcatattcttatgcatctatctgtatgggtctgaaggtgtatatacaaactgagatgagtccttatgactcttgataagcctgagtttaacaacaacaaaaatgccaagttgtcctgagcccttctgcgttgttatgccacttccctactgctcatatgcacgctggctcccctgggcacgcaaggatgagtatgggccatgggcccctgtagagctgcttacctggtgatgaccatgcaccttacaatttctgaacagttaaccctatagaagcatgctttatatgagtgtcttctgggaagaggaaccttcttaatctcttctgtgggattttcaaaatgctaaagactcacactgcagcaatcatcccagatgattaaattcaaagaaataggttcacaacaggaatatactgaagaactagagtgtcactgctggtgaactgtggcacggttgctcaacacatcacctcggacaaattcaggaagcatttctttagcccacaagtccagacccaggtgctctgtatgtttgtttttaatattcatcatatccaagttcactctgtcttcctgagcagtggaagatcatattgctgtaacttcttttaagtagttgatgtggaaaacattttaaagtgaatttgtcaaaatgctggttttgtgttttatccaacttttgtgcatatatataaagtatgtcatggcatggtttgcttaggagttcagagttccttcatcatcgaaatagtgattaagtgatcccagaacaaggaatactagagtaaaaagcacctctttttc

SEQ ID NO: 241678 - DNA, 1827 bp, Artificial Sequence
  derived and/or modified sequence
agtgcagggatgtgcagatgagtgggctgtggggtgtcctgctcacggtttcatggatgaatggcttattcagaagagcataaaggtatgccctgtggtttcatccgccagaattccggcaactccatttccttggactttgagcccagtatagagtaccagtttgtggagcggttggaagagcgctacaaatgtgccttctgccactcggtgcttcacaacccccaccagacaggatgtgggcaccgcttctgccagcactgcatcctgtccctgagagaattaaacacagtgccaatctgccctgtagataaagaggtcatcaaatctcaggaggtttttaaagacaattgttgcaaaagagaagtcctcaacttatatgtatattgcagcaatgctcctggatgtaatgccaaggttattctgggccggtaccaggatcaccttcagcagtgcttatttcaacctgtgcagtgttctaatgagaagtgccgggagccagtcctacggaaagacctgaaagagcatttgagtgcatcctgtcagtttcgaaaggaaaaatgcctttattgcaaaaaggatgtggtagtcatcaatctacagaatcatgaggaaaacttgtgtcctgaatacccagtattttgtcccaacaattgtgcgaagattattctaaaaactgaggtagatgaacacctggctgtatgtcctgaagctgagcaagactgtccttttaagcactatggctgtgctgtaacggataaacggaggaacctgcagcaacatgagcattcagccttacgggagcacatgcgtttggttttagaaaagaatgtccaattagaagaacagatttctgacttacacaagagcctagaacagaaagaaagtaaaatccagcagctagcagaaactataaagaaacttgaaaaggagttcaagcagtttgcacagttgtttggcaaaaatggaagcttcctcccaaacatccaggtttttgccagtcacattgacaagtcagcttggctagaagctcaagtgcatcaattattacaaatggttaaccagcaacaaaataaatttgacctgagacctttgatggaagcagttgatacagtgaaacagaaaattaccctgctagaaaacaatgatcaaagattagccgttttagaagaggaaactaacaaacatgatacccacattaatattcataaagcacagctgagtaaaaatgaagagcgatttaaactgctggagggtacttgctataatggaaagctcatttggaaggtgacagattacaagatgaagaagagagaggcggtggatgggcacacagtgtccatcttcagccagtccttctacaccagccgctgtggctaccggctctgtgctagagcatacctgaatggggatgggtcagggagggggtcacacctgtccctatactttgtggtcatgcgaggagagtttgactcactgttgcagtggccattcaggcagagggtgaccctgatgcttctggaccagagtggcaaaaagaacattatggagaccttcaaacctgaccccaatagcagcagctttaaaagacctgatggggagatgaacattgcatctggctgtccccgctttgtggctcattctgttttggagaatgccaagaacgcctacattaaagatgacactctgttcttgaaagtggccgtggacttaactgacctggaggatctctagtcactgttatggggtgataagaggacttcttggggccagaactgtggaggagagcacatttgattatcatattgacctggatttagactcaaa

SEQ ID NO: 241679 - DNA, 1622 bp, Artificial Sequence
  derived and/or modified sequence
gcagccaggagcagcagccgcgcctgcagaccggcctcgcggagcccgcgcgccgagccccacaatggcttattcagaagagcataaaggtatgccctgtggtttcatccgccagaattccggcaactccatttccttggactttgagcccagtatagagtaccagtttgtggagcggttggaagagcgctacaaatgtgccttctgccactcggtgcttcacaacccccaccagacaggatgtgggcaccgcttctgccagcactgcatcctgtccctgagagaattaaacacagtgccaatctgccctgtagataaagaggtcatcaaatctcaggaggtttttaaagacaattgttgcaaaagagaagtcctcaacttatatgtatattgcagcaatgctcctggatgtaatgccaaggttattctgggccggtaccaggataaacggaggaacctgcagcaacatgagcattcagccttacgggagcacatgcgtttggttttagaaaagaatgtccaattagaagaacagatttctgacttacacaagagcctagaacagaaagaaagtaaaatccagcagctagcagaaactataaagaaacttgaaaaggagttcaagcagtttgcacagttgtttggcaaaaatggaagcttcctcccaaacatccaggtttttgccagtcacattgacaagtcagcttggctagaagctcaagtgcatcaattattacaaatggttaaccagcaacaaaataaatttgacctgagacctttgatggaagcagttgatacagtgaaacagaaaattaccctgctagaaaacaatgatcaaagattagccgttttagaagaggaaactaacaaacatgatacccacattaatattcataaagcacagctgagtaaaaatgaagagcgatttaaactgctggagggtacttgctataatggaaagctcatttggaaggtgacagattacaagatgaagaagagagaggcggtggatgggcacacagtgtccatcttcagccagtccttctacaccagccgctgtggctaccggctctgtgctagagcatacctgaatggggatgggtcagggagggggtcacacctgtccctatactttgtggtcatgcgaggagagtttgactcactgttgcagtggccattcaggcagagggtgaccctgatgcttctggaccagagtggcaaaaagaacattatggagaccttcaaacctgaccccaatagcagcagctttaaaagacctgatggggagatgaacattgcatctggctgtccccgctttgtggctcattctgttttggagaatgccaagaacgcctacattaaagatgacactctgttcttgaaagtggccgtggacttaactgacctggaggatctctagtcactgttatggggtgataagaggacttcttggggccagaactgtggaggagagcacatttgattatcatattgacctggatttagactcaaagcacatttgtatttgcctttttccttaacgtttgaagtcagtttaaaacttctgaagtgctgtctttttacattttactctgtcccagtttgaaacttaaaactcttag

SEQ ID NO: 241680 - protein, 299 aa, Artificial Sequence
  derived and/or modified sequence
MVRCLGPALLLLLLLGSASSVGGNRCVDAAEACTADARCQRLRSEYVAQCLGRAAQGGCPRARCRRALRRFFARGPPALTHALLFCPCAGPACAERRRQTFVPSCAFSGPGPAPPSCLEPLNFCERSRVCRCARAAAGPWRGWGRGLSPAHRPPAAQASPPGLSGLVHPSAQRPRRLPAGPGRPLPARLRGPRGVPAGTAVTPNYVDNVSARVAPWCDCGASGNRREDCEAFRGLFTRNRCLDGAIQAFASGWPPVLLDQLNPQGDPEHSLLQVSSTGRALERRSLLSILPVLALPALL

SEQ ID NO: 241681 - DNA, 900 bp, Artificial Sequence
  derived and/or modified sequence
atggtgcggtgcctcggccctgccctgctgttgctcctactgctgggtagcgccagtagtgtgggtgggaaccgctgcgtggatgccgctgaggcttgtacagcagacgccaggtgccagagactacggagcgaatacgtggcccagtgtctgggccgagcagctcaaggcggatgccccagggctcgttgccggcgtgctttacgccgtttctttgcgcgagggcctcccgcactgactcacgcccttttgttctgtccgtgcgctggcccagcatgcgcggaacgcaggcgacaaacatttgtgccgtcttgcgctttctccggcccaggacctgctcctccatcttgcctcgaaccgcttaacttttgcgaacgatcacgcgtttgtcgttgcgcgagagctgctgcaggaccttggcgcggatggggccgagggttaagccccgcacatcgccctcctgcggctcaggccagcccacccggactgagtggtctggtacatccaagcgcgcagaggcctcgccgactgcccgcagggcctggcaggcctcttcccgcaagactgcggggaccccgaggggtgcccgcagggaccgccgtcacgccaaattatgtggataatgtgtcagccagagtcgctccatggtgcgattgcggggctagtggcaacagacgggaagactgcgaagcgtttcgtggcctcttcacacgaaatcggtgtttagacggggctatacaagcgtttgcctcgggctggcctcccgtccttcttgaccagctgaacccacaaggcgaccctgagcatagcctgctgcaagttagcagcactggtcgtgccctcgaaaggaggtcactgctgagcatcctgcctgttctggccttgcctgcactgttgtag

SEQ ID NO: 241682 - DNA, 900 bp, Artificial Sequence
  derived and/or modified sequence
atggtaagatgtctcggccctgcactgctgctactgctccttctagggtctgcctccagcgtgggcggaaatagatgtgtggatgccgcagaggcttgtacggcagatgccagatgccagcgtctgagatctgagtacgtagctcagtgtctggggcgagctgctcagggaggttgtcctagggctagatgccggcgcgccttgcggaggtttttcgcgcggggccctccagcactgacacacgcgctcctcttctgtccatgcgctggtcccgcgtgtgcagaacggcgaagacagacctttgtcccttcatgtgccttttcaggaccagggccggctccaccttcctgccttgaacccctgaatttctgcgaacgatcgagggtatgtagatgtgctcgcgcagctgctggaccctggcgagggtggggcaggggacttagtcctgctcaccgcccccccgccgcacaagcgagtcctccagggctttccggactggtccatccgtcagctcaacgcccaagacgccttccggcaggacccgggagaccccttcctgcacgactgcgtgggccacgaggcgtacccgcaggaaccgccgtcacaccaaattacgtcgataatgtgtctgcacgggtggcaccctggtgtgattgtggcgcttctggtaacagaagggaggactgcgaagcgttcaggggcctattcacgcggaacagatgcctggacggagcaatacaagcgtttgccagcgggtggccacctgtgttgttggatcagctcaacccccagggtgacccggaacattccctgcttcaggtatctagtaccggccgcgccctcgaacgccgctccttactctctattcttcctgtcttggcccttcctgctctgctttag

SEQ ID NO: 241683 - DNA, 900 bp, Artificial Sequence
  derived and/or modified sequence
atggttaggtgcctgggccccgctctccttttactgcttctccttggatcagcctcttccgtcggaggcaacagatgcgtggatgcggccgaggcttgtaccgccgacgcccgctgtcaaagactcagatcagagtacgtcgcccagtgtctgggccgtgcagcccaggggggatgccctagagctcgttgcagacgagccttgagacgattctttgccagaggcccgccagctctgacccatgccctgttgttttgtccctgcgctggcccagcctgtgccgaaagacgccggcagacctttgtcccttcatgtgccttttcaggaccagggccggctccaccttcctgccttgaacccctgaatttctgcgaacgatcgagggtatgtagatgtgctcgcgcagctgctggaccctggcgagggtggggcaggggacttagtcctgctcaccgcccccccgccgcacaagcgagtcctccagggctttccggactggtccatccgtcagctcaacgcccaagacgccttccggcaggacccgggagaccccttcctgcacgactgcgtgggccacgaggcgtacccgcaggaaccgccgtcacacccaactatgtggataatgtgtctgcgagggtcgccccctggtgcgattgcggtgcgtcaggcaaccggagagaagattgcgaagccttccgcggcttatttaccaggaacagatgtttagatggcgcaatacaagctttcgcttcgggatggcccccagtgttactcgatcagctaaaccctcagggggaccccgaacactcacttctgcaggtgtctagcaccggccgcgcccttgagaggcggagccttctttccatccttcctgtacttgcacttcctgcccttctttag

SEQ ID NO: 241684 - DNA, 900 bp, Artificial Sequence
  derived and/or modified sequence
atggtgagatgcctgggccccgccctgctgctgctgctgctgctgggcagcgccagcagcgtgggcggcaacagatgcgtggacgccgccgaggcctgcaccgccgacgccagatgccagagactgagaagcgagtacgtggcccagtgcctgggcagagccgcccagggcggctgccccagagccagatgcagaagagccctgagaagattcttcgccagaggcccccccgccctgacccacgccctgctgttctgcccctgcgccggccccgcctgcgccgagagaagaagacagaccttcgtgcccagctgcgccttcagcggccccggccccgccccccccagctgcctggagcccctgaacttctgcgagagaagcagagtgtgcagatgcgccagagccgccgccggcccctggagaggctggggcagaggcctgagccccgcccacagaccccccgccgcccaggccagcccccccggcctgagcggcctggtgcaccccagcgcccagagacccagaagactgcccgccggccccggcagacccctgcccgccagactgagaggccccagaggcgtgcccgccggcaccgccgtgacccccaactacgtggacaacgtgagcgccagagtggccccctggtgcgactgcggcgccagcggcaacagaagagaggactgcgaggccttcagaggcctgttcaccagaaacagatgcctggacggcgccatccaggccttcgccagcggctggccccccgtgctgctggaccagctgaacccccagggcgaccccgagcacagcctgctgcaggtgagcagcaccggcagagccctggagagaagaagcctgctgagcatcctgcccgtgctggccctgcccgccctgctgtag

SEQ ID NO: 241685 - DNA, 900 bp, Artificial Sequence
  derived and/or modified sequence
atggtccgctgcctggggcctgcgctgctgctgctgctgttactggggtcggcgagctcggtcggagggaaccgatgtgtggacgcggccgaagcctgcacggcggacgcgcggtgccagcgtttgcgctccgagtatgtggcgcagtgcctgggccgggctgcgcaggggggctgtccccgcgcccgctgccgccgggccctgcgccgcttcttcgcccgcgggccgcccgcgctcacccacgcactgctcttctgcccgtgcgcgggccccgcgtgcgccgagcgtcggcgccagaccttcgtgccctcctgcgccttttcggggcccggccccgcgccgccctcctgccttgagcccttaaacttctgcgagcgcagccgggtctgcaggtgcgcgcgggcggcggcggggccgtggcgagggtggggacggggcctctctccggctcaccgccctcccgccgcgcaggcctcgcctcctggcctttcaggtctcgtgcaccccagcgcccagcgcccccgacggctgcctgctggaccagggcgcccgctgcctgcgcgcctacgcgggcctcgtggggtccccgcaggcaccgccgtcacccctaactacgtggacaacgtgagcgcgcgcgtggcgccctggtgcgactgcggagccagcgggaaccggcgtgaggactgcgaagccttccgggggctctttaccaggaaccgctgcttggatggtgccattcaggcctttgccagcgggtggcccccagtcctgctggaccagctgaacccccagggagacccggagcacagcctcctgcaggtgtcctccacaggcagggccctggagagacgctccctgctctccatacttcctgtcctggctctcccggccctgctctga

SEQ ID NO: 241686 - DNA, 900 bp, Artificial Sequence
  derived and/or modified sequence
atggtgcggtgtctgggacctgctcttctcctcctgctgctgctgggcagcgcctcttcggtagggggaaacaggtgtgtcgacgcagccgaagcgtgcacggccgacgcacgttgtcagaggctgcgatcggagtacgttgctcaatgcctggggagggccgcacaaggtggatgtccgagggctaggtgtagaagagctttacgacgcttcttcgcacgcggacctccggctctgacgcacgcactgctgttttgtccgtgcgccggtccagcctgtgccgaaaggcgccgtcagacgtttgtaccaagctgcgctttttctggacccggccccgcccctccctcctgtttggaaccattgaacttctgcgagagatcccgcgtctgccgatgcgctcgtgccgcagctggaccctggcgtggctggggacgtggcctctcccccgcacacaggcctcccgccgcccaggctagtccgcccgggctcagcggcttggtgcatccttccgcccagagaccacggcgcctgcctgccggtcccggtagacccctacctgcaagactgagagggccacgaggcgttccagcggggacggccgtcacacccaactatgtcgacaacgtcagcgcacgcgtggctccttggtgtgattgtggagcctccggcaacaggcgtgaagactgcgaagcctttcgcgggttgtttaccagaaacaggtgtctcgatggggccattcaagcgtttgcttctggctggcctcccgtgctgctggatcaacttaatccccagggggaccccgagcacagtctccttcaggtttcctctaccgggcgagcgttggagcggcggtcactgttgtctatactccccgtactggctcttcccgccctgctgtag

SEQ ID NO: 241687 - DNA, 900 bp, Artificial Sequence
  derived and/or modified sequence
atggtgcgctgcctgggccctgccctgctgctgctgctgctgctgggcagcgccagctctgtgggcggcaacagatgtgtggatgctgctgaggcctgcacagcagatgcccgctgccagaggctgcggagtgaatatgtggcccagtgcctgggccgggccgcccagggcggctgcccccgggcccgctgcagaagagccctgcggcgcttctttgcccggggccccccagccctgacccacgccctgctcttctgcccctgtgccggccctgcctgtgccgagcggcggcggcagacctttgtgcccagctgtgccttcagcggccctggccctgccccacccagctgcctggagcccctgaacttctgtgagaggagccgggtgtgccgctgtgcccgggctgctgctggcccctggaggggctggggccggggcctgagccctgcccacaggcctcctgctgcccaggccagccccccaggcctgagcggcctggtgcaccccagcgcccagaggccccggcggctgcctgctggccctggccggcccctgcctgcccggctgcggggcccccggggcgtgcctgctggaacagctgtgacccccaactacgtggacaacgtgtctgcccgggtggccccctggtgtgactgtggggccagcggcaacagaagagaggactgtgaggccttccggggcctcttcaccaggaaccgctgcctggatggagccatccaggcctttgccagcggctggccccctgtgctgctggaccagctgaacccccagggcgaccctgagcacagcctgctgcaggtgagcagcacaggccgggccctggagaggaggagcctgctgagcatcctgcctgtgctggccctgcctgccctgctgtag

SEQ ID NO: 241688 - DNA, 900 bp, Artificial Sequence
  derived and/or modified sequence
atggtgcggtgcctgggccccgccctgctgctgctgctgctgctgggctccgcttcaagcgtgggagggaatagatgtgtcgatgccgccgaagcctgtactgccgatgcacgatgtcagagactcaggtcggagtacgtggctcagtgtctagggcgcgctgctcaaggcggatgcccaagggctcgctgcaggagggctcttcgtcgcttctttgccaggggacctcctgctttgacccacgccttactgttctgtccatgcgccggccctgcttgcgctgagcgtcgtaggcagaccttcgtccccagttgcgcattttcgggtcccggacctgcgccaccatcctgcttagagcccctgaacttctgcgagcggtccagagtctgtcgatgtgcgcgcgcagccgccggtccctggagaggatggggccgaggtctgtcccctgcgcataggccaccagccgcacaggcatccccaccagggctttctggcctagtccacccatccgcacaacgacctagaagattgcccgccggacccggccgccccctccctgcaagactacggggaccccgaggagttcccgccggcactgcggtcacgcctaactacgtggataacgtctccgcccgggtggccccttggtgcgactgcggtgcttccggcaataggagggaggattgcgaagcattcaggggacttttcacaagaaacaggtgtctggatggggccatccaggcttttgcttcaggatggccccccgttttgctggatcagctgaacccgcaaggtgacccggagcacagcctgttacaggtgtccagcaccggccgtgcccttgagaggcgttcgttactgagcattctgccagtgctcgcgctccctgccttgctgtag

SEQ ID NO: 241689 - RNA, 900 nt, Artificial Sequence
  derived and/or modified sequence
augguaagaugucucggcccugcacugcugcuacugcuccuucuagggucugccuccagcgugggcggaaauagauguguggaugccgcagaggcuuguacggcagaugccagaugccagcgucugagaucugaguacguagcucagugucuggggcgagcugcucagggagguuguccuagggcuagaugccggcgcgccuugcggagguuuuucgcgcggggcccuccagcacugacacacgcgcuccucuucuguccaugcgcuggucccgcgugugcagaacggcgaagacagaccuuugucccuucaugugccuuuucaggaccagggccggcuccaccuuccugccuugaaccccugaauuucugcgaacgaucgaggguauguagaugugcucgcgcagcugcuggacccuggcgaggguggggcaggggacuuaguccugcucaccgcccccccgccgcacaagcgaguccuccagggcuuuccggacugguccauccgucagcucaacgcccaagacgccuuccggcaggacccgggagaccccuuccugcacgacugcgugggccacgaggcguacccgcaggaaccgccgucacaccaaauuacgucgauaaugugucugcacggguggcacccuggugugauuguggcgcuucugguaacagaagggaggacugcgaagcguucaggggccuauucacgcggaacagaugccuggacggagcaauacaagcguuugccagcggguggccaccuguguuguuggaucagcucaacccccagggugacccggaacauucccugcuucagguaucuaguaccggccgcgcccucgaacgccgcuccuuacucucuauucuuccugucuuggcccuuccugcucugcuuuag

SEQ ID NO: 241690 - RNA, 900 nt, Artificial Sequence
  derived and/or modified sequence
augguuaggugccugggccccgcucuccuuuuacugcuucuccuuggaucagccucuuccgucggaggcaacagaugcguggaugcggccgaggcuuguaccgccgacgcccgcugucaaagacucagaucagaguacgucgcccagugucugggccgugcagcccaggggggaugcccuagagcucguugcagacgagccuugagacgauucuuugccagaggcccgccagcucugacccaugcccuguuguuuugucccugcgcuggcccagccugugccgaaagacgccggcagaccuuugucccuucaugugccuuuucaggaccagggccggcuccaccuuccugccuugaaccccugaauuucugcgaacgaucgaggguauguagaugugcucgcgcagcugcuggacccuggcgaggguggggcaggggacuuaguccugcucaccgcccccccgccgcacaagcgaguccuccagggcuuuccggacugguccauccgucagcucaacgcccaagacgccuuccggcaggacccgggagaccccuuccugcacgacugcgugggccacgaggcguacccgcaggaaccgccgucacacccaacuauguggauaaugugucugcgagggucgcccccuggugcgauugcggugcgucaggcaaccggagagaagauugcgaagccuuccgcggcuuauuuaccaggaacagauguuuagauggcgcaauacaagcuuucgcuucgggauggcccccaguguuacucgaucagcuaaacccucagggggaccccgaacacucacuucugcaggugucuagcaccggccgcgcccuugagaggcggagccuucuuuccauccuuccuguacuugcacuuccugcccuucuuuag

SEQ ID NO: 241691 - protein, 429 aa, Artificial Sequence
  derived and/or modified sequence
MAATDIARQVGEGCRTVPLAGHVGFDSLPDQLVNKSVSQGFCFNILCVGETGLGKSTLMDTLFNTKFEGEPATHTQPGVQLQSNTYDLQESNVRLKLTIVSTVGFGDQINKEDSYKPIVEFIDAQFEAYLQEELKIRRVLHTYHDSRIHVCLYFIAPTGHSLKSLDLVTMKKLDSKVNIIPIIAKADAISKSELTKFKIKITSELVSNGVQIYQFPTDDESVAEINGTMNAHLPFAVIGSTEELKIGNKMMRARQYPWGTVQVENEAHCDFVKLREMLIRVNMEDLREQTHTRHYELYRRCKLEEMGFKDTDPDSKPFSLQETYEAKRNEFLGELQKKEEEMRQMFVQRVKEKEAELKEAEKELHEKFDRLKKLHQDEKKKLEDKKKSLDDEVNAFKQRKTAAELLQSQGSQAGGSQTLKRDKEKKNFF
